United States Patent Application Publication US 2007/0067865 A1 - sequence listing, part 53

SEQ ID NO: 329217 - DNA, 177 bp, Zea mays
accgcccgaattcccggtcggccgcgcgtacgcaatagtgttccttattgtgtgtcacaactctagattatgcacaaaccggttaattggtgcagtcttcattttcaagatgatggagtggtggtatcaatctggctgaaaaagaatgtcaactccgactgtatatccaccaccccc

SEQ ID NO: 329218 - DNA, 290 bp, Zea mays
aatttcctaagcactactggctttttgtagtccatttacatgaactacatccacgggaccgttttataatcccaacgggccatcctacaattcttacacatcatgcatagctctacaaggattatgtccgcctctgaagtcttaactagcgactcattccgcattctacacccaatctttatgtataaacttcttaacctcagctctaagccctttacttctccttctcttgacctcaccaactcaacctgtacattgcgactccgttccagcatttccatataccctac

SEQ ID NO: 329219 - DNA, 87 bp, Zea mays
ctcctaccttacctgaattccccggtcagacccactcgtcctgccacacgtcctctctcccgccccatttttttattcacaccactt

SEQ ID NO: 329220 - DNA, 204 bp, Zea mays
taaacaaatacattcttgtccgttacaattcctaagcactctatcctcttccacacacctgctatgttttccatcgttctcaccacccactcaccttcagctcaattctccacctattccctgttctaccctaacattccaccattttactgatatcaattacattctgaactattctcctttacctaagaggcccactgcact

SEQ ID NO: 329221 - DNA, 412 bp, Zea mays
cttggttatcaaccaagagtctaaactcctttgtcatgtgttatcgtttcaatcctgaactgtgcattgttgtgggtcttgaagatctggttacaagcctacaacttaactgatatatatcacatgatgatgataatatgtatattcatggtgacacctttgctctttgaacatgttgtagtctattgtgtagttgcaaaagaatatgtgaattaccagtcagtggagattgagagggattccccggctagaagctcaagcggattaggaagtggctcatcttcatccagtggtacagtacagtggagcaaatgagtatctatcaccattaatgctgagttatcgatcaagtagctcgttaattcgttaaaattcttgcagaatctgacttttgatgtacaggttatttttt

SEQ ID NO: 329222 - DNA, 198 bp, Zea mays
tatctgaaccggaccgaatttagaatcagtacaatcctgcactagacctggttatcacccttgaaggatctgtttcaatccatacaactaactgatatatatcacatgatgatgataatatgtatattcatggtgacacctttgctctttgaacatgttgtaatctattgtgtaattgcaaaagaatatgttaattac

SEQ ID NO: 329223 - DNA, 393 bp, Zea mays
gttgtgtgtactctgtccttcactaccatctgtcccctggaaagttataacaatagcttgattttcctgataaatattcttccccttgtatgattaaagaatagatagttctttttacttgcatacaggttatcagacatagcgaatagggaaacatgcaagaagatacatgtgtccataggacctactgtttagaacattggtcacattgacatgaagataagctgccttttcatgatctgcagcttcaacatagctaaaacaacaaatttttaatctttaaaatgccttttaaaggaaaaatggttcaagcaccattacatagtccttaatttgactgtatatattacttttgaacaggttaattagggtttaataaagataacaaaaagg

SEQ ID NO: 329224 - DNA, 252 bp, Zea mays
ccaagatccaggacaaggagggcattcccccagaccagcagcggctcatctttgctggaaagcagcttgaggacgggcgcacgctggccgactacaacatccagaaggagagcaccctccacttggtgctgcgcctcaggggaggcatgcagatcttcgtgaagaccctgactggcaagactatcaccctcgaggtggagtcttcagacaccatcgacaacgtcaaggccaagatccaggacaaggagggca

SEQ ID NO: 329225 - DNA, 247 bp, Zea mays
gtccataatcatccaagcaaaagcgtctcacagagaggaaagagagagggaggaaaatgctgctgccatggctccttgccccaccggcgttcggtgtacacggtatgggcatacgcaatcactggtgcgggagaaattcatcaccggtggagtgcttcgatgggctagcatgcgccgcgccatggccgagattgtttgccgcacggactcgtcgtcggtcgtgaagtcacgagtcatctgaaaagca

SEQ ID NO: 329226 - DNA, 449 bp, Zea mays
ggagaatgccttcgcctcctacggcgagatcctcgactccaaggtcatcaccgaccgggagacggggaggtctcgcggcttcggcttcgttaccttctcctccgagaactccatgctcgacgctatcgagaacatgaacggcaaggagctcgacggccgtaacatcaccgttaaccaggcccagtcccgtggcggtggcggtggcggcggtggctacggcggcggtcgcggcggcggcggctatggtggcgggcgccgtgacggcggttatggcggcggtggcggctacggcggtcggcgcgagggtggtggcggcggctacggaggccgtggcggctacggcggtcggcgcgaaggtggtggtggcggctacggcggccgccgccgcggctggaaggactgatgtgtgggcccattctggcttcagccgagttatcttatctatctat

SEQ ID NO: 329227 - DNA, 225 bp, Zea mays
aattcctcgggtcgacccacgagtcacgcgtagggaccttagcactcatgcaagccgactttcgatttaccaccgtgccaacccgagagagggatggtgatgatcaagaggatcctcatcgccgcgctcctcgtagacggcgtcttggccaccgcattgctggccttcaccgaggccttcgccgtcggatccccatgcggcttcgagtcgtctgcgttcggctaa

SEQ ID NO: 329228 - DNA, 424 bp, Zea mays
  unsure (1)..(424): unsure at all n locations
accgctccgaattcccgggtcgacctacgcgtccgaaacctttcccccttctcccaattcccgccgccgctccatcccgtaacgcgacaccatgagggagtgcatttcgatccacatcggccaggccggtatccaggtcggaaacgcgtgctgggagctgtactgccttgagcatggcattcaggctgacggtcagatgcccggtgacaagaccattgggggaggtgatgatgctttcaacaccttcttcagtgagactggtgctgggaagcacgtgccccgtgctgtttttgttgaccttgaacccactgtcatcgatgaggtgagaactggcacctaccgncagctcttccaccctgagcagctcatcagtgggaaggaagatgcagccaacaactttgcccgtggtcactacaccattggc

SEQ ID NO: 329229 - DNA, 378 bp, Zea mays
accggtcctgaattcccgggtcgacccactcgtctctcttactcgtggtcgtactcgtgtcatcagcgacttccgccctttttttttttttttttttttgtgtttttttttttttatttattatttattataaattattaaaacataattaatatttttaaatatttcttataaatttattttataataacaaaaaaataaaaacgatattcgctataaaaaaaaaaaaaaacgtaatcacggtctacaatatacaaaaatacgtactcaaacatgaaaaataatattatatatataggttaacctacatccaactcactgttcatctttataaaaactcctcaatataaaaaaacttaaaataacacaacttaattt

SEQ ID NO: 329230 - DNA, 70 bp, Zea mays
gcacgtactcggtctcgtgaattcccgggtacgactccacgtcgtcacgtgtcatgtcgttgactgtggc

SEQ ID NO: 329231 - DNA, 200 bp, Zea mays
aaaaaaaaaaaaaaaaaaaaaaaaaataaaaaaataaaaaaaaaacaaaaaccaagaaaggggatggcaacaaagcaacgcaagcatgcaaagacaattactctactatagcgaaaggtaaatacaatttgctggcctttatatgacatagtctttccatgacaaaagccgcgatcaaacaaaatttaattgacttgcat

SEQ ID NO: 329232 - DNA, 348 bp, Zea mays
agactaaacatatattgattagttaatctatgaatgtggcttgtatttgtgtctatatttattatcattcattcgaacgattgacagaaaaagaaaaagagtgctaaaaagaacgagtattcactgacatttcgtggcattgttctccgtcaaggaggtgctactctacgctaccaaaaggccaaagagagagctcacagaaatttcctgtccttttctgcaagcacaaaatttccgaaatctctgccgactaataataattctaattacgcgaccgatgatcgatcaaatcactagaccaaattctgcgttccatcgaggacgagtattgggctgcgaacagagtac

SEQ ID NO: 329233 - DNA, 366 bp, Zea mays
cgaaatgatgcgagtaaggacaatgagatggttcaagcaacatctaggttagattgggattctatggttctccgtgatgtttgggaggaggaatggggacatgatgtttgagatgcagatgtattctcaacttggacttgctgaagaggacaatgctgaggaaagtagaagagaggaagcctttagaggtgttacaagggattttgaacaatctgagcatgttatgtttttggaagagagccttatagaccaagctttaaataaaaaaacacaaaaaaaaaaaaaataacaaaaaaaaaaataaaaaaatatactaaaaaaaaaagaacataaatacatacaaaaacgatgataaaatcaataaag

SEQ ID NO: 329234 - DNA, 306 bp, Zea mays
aaaaaaaaaaataaaaaaaaaaaaaaaaaaaatttaaaattataaaaaaaaaaaataaaaaaaaggagaattgaaaaaacaaaaaaaaaaaaaattaaattaacatgatattatatttttttttaggaaatctgataattattttacatgatggtttttttatatgacctataacttttaaataaccttggttgatcctctttttttgcctgatagtgatttttctttttgacgtcgatgtgataaacatggggatttttgcaatttacattcttatgaagcttctatgctattttgaatatttta

SEQ ID NO: 329235 - DNA, 370 bp, Zea mays
ggctggcttctcctccccctcttaccaagtcctcttcgggttagggttacttagggttttgtggaggggcgatggcggcggctgatgtggagtaccgttgcttcgtcggcgggcttgcctgggccaccagcaacgagtcgctggagaatgccttcgcctcctacggcgagatcctcgactccaaggtcatcaccgaccgggagacggggaggtctcgcggcttcggcttcgttaccttctcctccgagaactccatgctcgacgctatcgagaacatgaacggcaaggagctcgacggccgtaacatcaccgttaaccaggcccagtcccgtggcggtggccgtggcggcggtggctacggcggccgtcg

SEQ ID NO: 329236 - DNA, 452 bp, Zea mays
cccacgcgtccgggtgggttggcttctcctccccctccggttcgggttcgggttcgtgaggttgtccggggttcggtttcgtgggtgagcggatcgagatggcggcgtcggatgttgagtaccgctgcttcgtcggcggcctcgcctgggccacggacgaccactccctccacaacgccttcagcacctacggcgaggtcctcgagtccaagatcatcctcgatcgggagacgcagaggtcccgcggcttcggcttcgtcaccttctccacggaggaggcgatgcggaacgccatcgagggcatgaacggcaaggagctggacggccgcaacatcaccgtcaacgaggcccagtcccgcggcggccgtggaggcggcggcggcggcgggtacggtggtggccgtggaagcggcggctacggcggtggcgggcgccgtgatggcggcggcggc

SEQ ID NO: 329237 - DNA, 139 bp, Zea mays
gggacgcgtgggaaaaaaataaaaaattaaattttattaaaagaaaataaaaaaaaaaaggatggagaataaataaaattaaagtattaaaaaaattataaatccataaataaaattacatagagtaacttaaaataaa

SEQ ID NO: 329238 - DNA, 178 bp, Zea mays
tcgacctacgcgtccgggttggcttctccttccccttcggttcgggttctggttcgtgaggttcttcggggttcggtttcgtgggtgagcggatcgagatggcggcgtcggatgttgagtaccgctgcttcggcggcggcctcgcctgggccacggaccaccacttccttcacaacgc

SEQ ID NO: 329239 - DNA, 387 bp, Zea mays
cgtcgacgccaccgccggagaaagcgatgtggtcgtctcggccctcgtcgccgtcggcgccggggccgcggtcgtccccttcgccaggcgtatgctccgcctccgcaccgcccctgcttcgagccccacgtcctcgtcctgagcttcgcggtcctcctccgcctctcctccaagaacacatagggactattgtgaaggtattgatttgggatttctggagcttattatcagctcgtcgtacgtattcgcatgtcactggggacggagtagcagaataaatgaatgaaatgatcattcaagtgctcagttcagccactgtctattttttaaaaaaaaagctcctgacgaggccattttcgaactggacaccctctatagagaagacct

SEQ ID NO: 329240 - DNA, 415 bp, Zea mays
  unsure (1)..(415): unsure at all n locations
cggacgcgtgggttcgttcggagcgcacacacacacaaccagatctcccccaaatccacccgtcggcacctccgcttcaagatgcagatctttgtgaaaaccctgaccggcaagactatcaccctcgaggtggagtcgtctgacaccattgacaacgttaaggccaagatccaggacaaggagggcattcccccagaccagcagcggctcatcttcgctggcaaacagcttgaggacgggcgcacgcttgctgactacaacatccagaaggagagcaccctncaccttgtgctccgcctcaggggaggcatgcacatctttgtgaaaaccctgaccggcaagactatcaccctcgaggtggagtcctctgacaccattgacaacgtcaaggccaagatccaggacaaggagggca

SEQ ID NO: 329241 - DNA, 181 bp, Zea mays
  unsure (1)..(181): unsure at all n locations
gtcgcgccgncgtcgtcgtcgaaacagcacatttctctctcgatctcagccatggccgaagtggggcaggcccaggacgccgtgaagctctttaaccggttgaccttcgacgatgtccacgtgaacgatatctcgctgaacgactacctgggtgtgactgtggggaaacacacgacatttc

SEQ ID NO: 329242 - DNA, 75 bp, Zea mays
atttggatagtcaatagtggtggcgttatttgtacatgaaggaataaagacattagaacaaaggtttttttaaaa

SEQ ID NO: 329243 - DNA, 344 bp, Zea mays
cggacgcgtgggccgcagcatctcaaccccatggccaagatcaagatcgggatcaatgggttcggcaggatcggaaggctggtggccagggtggccctgcagagtgacgatgtcgagctcgtcgccgtgaacgaccccttcatcagcaccgactacatgacctacatgttcaagtacgacactgtgcacggacagtggaagcaccatgaagtcaaggtgaaggactccaaaacccttctctttggtgagaaagatgctgctgtgtttggctgcaggaaccctgaggagatcccgtggggttcgggtggtgctgaatatgttggtgagtctactggtgttttcac

SEQ ID NO: 329244 - DNA, 395 bp, Zea mays
cactcgtagagagaaggaaaaatatccccaaaccctagctcccgatctcgatggcgaaccctcgcgtctgcttcgacatgaccgtcggcggcgccccggcgggccggatcgtgatggagctgtacgccaacgaggtgcccaagaccgcggagaacttccgcgcgctgtgcacgggcgagaagggcgtgggcaagtccgggaagccgctccactacaagggctccaccttccaccgcgtcatccccgagttcatgtgccagggcggcgacttcacccgcggcaacggcaccggcggcgagtccatctacggcgagaagttccccgacgagaagttcgtgcgcaagcacaccgtccccggtgtgctctccatggccaacgccgggcccaacaccaac

SEQ ID NO: 329245 - DNA, 321 bp, Zea mays
aatttccgggtcgacccacgcgtgcggatctagagagcggccgtttgcgaagggtgctctgattccagaggtcgtggtggacaaaaggactgggtgtggtggcggaactggcggtcacgtagctgtgcgagacatcgaactgtcttgatactgcgactcatgcttgctttcattcagcatacaatgccatgttgggtatgctgcctgaggtggaacggtgagtgggttaagcaaggtttttagagcgtctgatgactttgccaagaggattgggacacgctctagactagcgcatgaagtgctgggtgcactgcatgctag

SEQ ID NO: 329246 - DNA, 151 bp, Zea mays
aacgaagcgaacggactgggctacttcgaggacctgcgagcggcgagcaacatggacccctatgtgggcgtctgcatgagcgccgagaccaacatcatgtgtaagcgctgtagcaccccgcttgcatgtcgtgtcgggttgctgcgggaac

SEQ ID NO: 329247 - DNA, 398 bp, Zea mays
ggccagccggcctatttatataatcaatggatgagaaataaagtcggcaagaattagaagggagaaaccctcctcttgctcgaccgtgggcagaagcccccggccgacgttcttgcccgtcgaatcgtcgatacccctctccaatccctcaccgatctagcgaccataacactaatacttgtttattgatgatttgaaatgtgagctagaacgtgctagaacctgatgggattgtatgttttacttcagtctgcacttactgttaacaatttcgttcatagaataccaatggccctggttttgacttttgagctatacatgtaatacatgatttaggatgttagcgtattctcttgctggaatgcatatgttaaagagtatagatgtgtatgagcata

SEQ ID NO: 329248 - DNA, 448 bp, Zea mays
  unsure (1)..(448): unsure at all n locations
actcggtccggaanttcccgggntcgactccacgcccgtccgtatggagaacgaatctggnncatcacatccttctaccaacgagggctccgtgtgggcttcccgagggaacatcccgcgtnncctcctcaactgagggcgcnnccctgatacccaaagggctaaccccgtgagaaagatgatcccacgatcaatggttcgagaccccttcaacacccccgcttatgtaccgtnncgccatccaggcccgtccctgggtctctgtatgccanngtggtcgtacccacaaggtnnatcgtgctcgacttcgggaagaatcggtgtcagccacacttgtcnccccatctacgaagggaaatacgcccttccnncaacgccatccccttcgtctcgaccctggctgggccgcgaccnctcaccgactacctcatgaaagatcccctgactg

SEQ ID NO: 329249 - DNA, 440 bp, Zea mays
cgtcttctccctctcccctagatccttcgacgccgccctccctcagctcattccctgccgccgctcatctgctggccttgtctcactgccgcccaaccattttcctccctcaagctagcacgcagcctcaactcctctcccacctcacgcacgtctctcccagccgttccttcatttctctggctcgtccttctccatgaggtcgcgccctgctgcgccgtcgtgctggtcgccggctgagcccccttcagtgcctgacgccgcatctccctggtgctcacctctgtttccccctgcgttggacgacctcgcactccctccctgctccagatttctccatggtcgcccctttccttgccccgggtggcgagctcgcccctcattcctgctcgcctaatctccacttccctgttgcagccaccttccatggacgccagccc

SEQ ID NO: 329250 - DNA, 314 bp, Zea mays
gtttttgtggccgcctacggcgttaaagatattctgcccgaaaagcccaggtactacacgatcctgaagcttgtggtggacaccaatggcgagacagacgcgaataatgttctgcaggagactctactgtgcgtgcgcgacaaacttgccaagcctatggtgcttatgcccaacgataacgtgctcccggcgcaggataaccacagacttcatagttacttcgacccgatcaagctggacgagagtaagacactcaccaccattctccacacgctgctctaggacactgacaagaaactcgagagtctaaacta

SEQ ID NO: 329251 - DNA, 306 bp, Zea mays
  unsure (1)..(306): unsure at all n locations
gcgatggcggcggctgatgtggagtaccgttgcttcgtcggcgggcttgcctgggccaccagcaacgagtcgctggagaatgccttcgccttctacggcgagatcctcgactccaaggtcatcaccgaccgggagacggggaggtctcgcggcttccgacttcgtaccttctccttcgagaactccatgctcgacgctatcgagaacatgaacggcaaggagctcgacggccgtaacatcaccgttaaccaggcccagtcccgtggcggtggcggtggcggccgtggctacggcggcngtcgcggc

SEQ ID NO: 329252 - DNA, 160 bp, Zea mays
cgacaaggtgcaagagacatgtctggggcatcatttgtatggctttaattttttttattatatatagataaggaaatattttccttaaaaatggagtacaagggattgttgagaactgcttttgttcatgatattaatatatatgatgaatatttcttgc

SEQ ID NO: 329253 - DNA, 236 bp, Zea mays
cgccccttggaaatcaaacttggctttgtttattggaggggtgacaatgggctctaacttgggtttgtttattggaggggtgacatcgggctctaaattttacactaagatttaaggatctgattaagatcaggccctatttctattcatttttaaactcatacaaacttcgcttcatatcctgtccacgtccaaaggcgaggtggttatggatcaccaaccattcacttgataaa

SEQ ID NO: 329254 - DNA, 416 bp, Zea mays
ttcagttttcatcacacgacaatggagtggggctagcaatggcatgggtcacctgaaccagctgctgcacctgtccccgctcctcgcatggcgggggtttcctatccacttcgccgcgccggagtcgcacctcagggaggtccgcgcgcgcctgcacggctgggccccgaccccgcgacggtgtgtttccacgcgatggacgtgcccgcgcacgacccccccccttccccgttcccggcgcacatgcaacccttgttcgaggccttctgcaccggcgcgcgggcctcgctagtcgcgctggagaggaggcggaagaaatgggggaggaggcgcgacgcacggacgaaagatgttgatttgatgatatagatggacggtccagattggttcgaggccgaactggtggagtcatacta

SEQ ID NO: 329255 - DNA, 303 bp, Zea mays
ctcggcattgtttctcgggagtcgattgggaggatcctatgcgtcccattgaagcgcgcaaatgagatcataggaacaactactgaagaaatggtgatgcgagcccaacaagcttcgggataattacatcattcagtcaaaacttatgcgatgcaaaagccttgcgcgctgatgcattcttttgagcactttgctggtgtagaggagatgttggtattctttcatctgctcatccttctctctttatagtgtacgggcagatcaacaagtggactgtagagagcacacgatttacatgtacag

SEQ ID NO: 329256 - DNA, 191 bp, Zea mays
cggacgcgtgggcggacgcgtgggtttttttttttttttttttttttttttttttttttgtggtgttttttttttttgtgttttttttttttttttgtttaaaaacgcgagcgggcgctttaaaggaaccaagcttacgtacccgggcatgcgaaggtaaaacttttttataggggaaacaaaaatcaaat

SEQ ID NO: 329257 - DNA, 398 bp, Zea mays
  unsure (1)..(398): unsure at all n locations
gctggctgctcgtgccgtccggccgtccctgctctgctggagtgctggacgctcggagaggcggagagcggacgccggcagagacgcanagggcagaccgtgtcctctctccactgtccagtgatccagtctcctccggcctccgcggccgtgggtgcacggagcctgacagccgatcagccggccgcgagcccgccgcgaggacaaaggaggccgccggaccggagcctggagactggagagccagccgccagagcggaggtatcctgttgccggcttgccgctgttggatctagcggccaggagggcgatttggtgccgttgccgtactgccgtgaaccaagagtgacttgctgtggcgctcggcgatggggcccatattgccatacactataagc

SEQ ID NO: 329258 - DNA, 458 bp, Zea mays
  unsure (1)..(458): unsure at all n locations
acccacgcgttcggccattctttttcggccaattcggccccgtccggtaaccagaaaattgcctgatgaccaagcagttctgcaaccgctggcaggcatgtcacacacaggcttgtaaaatgtccaggcctcgtctcgtttcctcttcgctcccccgtgacgtcagtacgccacccatcctcaccggctgtcggcaccagcccgccgccgacccccgccgccgtgtcacgactcacgacccattgtggtttcagatcagacccgaatcgcgagcagcgatctgtacgtcgtccccgttcgcacgcctagcgcgatggcgcacccgatgtacggctccgggccactcagatccaggaacgcggcgaactcggacgaaatccagctgcggatcgacccgggtgcacgggacctcgacgaggagatcgacgggctgcaatcanggtccgcatgctcaaagg

SEQ ID NO: 329259 - DNA, 426 bp, Zea mays
ttcccggggcgacccacgccgtccgtttattggggcgaaaagcgatgagtcaagaagaatggtggagaagaaagtcgaggccgccgcgggcgaacttgcgatgggccaacacagagaccatggcgtgctgctcagggggtttgccgggggtcgggaagggtgtattcgtgaaggccgatgggttggagcgctctgtggtggcatgattcctcgacggacttggtggtcaccatggaatcgcgctccgtcgccgagaggactccctgcgcaaccatcctcgaagcgaggttgcgaggcacctacattctacattggagaagtacctggagttgcaccaaaaaggtcaagaacaggtaccactggaggaacatgaaggatgctacgatgagttcggagaggtctaggtcgtcgtctcctagtcaacta

SEQ ID NO: 329260 - DNA, 379 bp, Zea mays
tccagctgatatcatccaaaacaagcccaatagcatgatccaaaaagagaaaagtatgtgtgttatctagcacgatgccatccttatctaacttgaactatttttagtatgtaaaatttgcattatagattttcttattggtactgaagaagttggtgattcttttgaggatatttcaggaagccctggtgttgaagctgcaaaggattttaatgcttctgcaaatgctggaacaagatcaagtgtagacactcatattagctggaacaacaagccaaaaattgcttcttgatgtagaggctattataaatcttcttcgttgtctgaaataatctcagcccgggacaccaattcaaaaacaaatgaagaagtcaagaca

SEQ ID NO: 329261 - DNA, 88 bp, Zea mays
atggcgcgggttttctttttataggaaccaaacaaacctcccctttaaagcaaccaaatatcttttctatagcgtaccaaaataaatt

SEQ ID NO: 329262 - DNA, 462 bp, Zea mays
  unsure (1)..(462): unsure at all n locations
cggncctgaattcccgggtcgacccacgccttcgatttggtaccaatccttaaaacaggggactgttgtcttacaccagattgcgtacaaaatttgcgaatgaagtacgtaacaaagaaaggaaacgagaacatttgccgacttgactttgtattcctagattgcaccttctccaaatgcttcctcaagctaccgagcaaggactcagcaatccgacaggttatatcttgcatatggaagcatatgcatgcaccatttgtcttccttgcttgtgatctgcttgggcatgaagatatactagttgaggtgtcaaggactttcggaacaaaaatttacgttgacccgaaattggattgttttaaagcactctcactgacagcccctgaaatcatcactgacgattcatcttctcgctttcagatggttgggttccaccaattacatgatagagcaagcaaagag

SEQ ID NO: 329263 - DNA, 371 bp, Zea mays
cgggacgcgtggggtggcgtcagctcgggcatggcgttccacgaagtggagacgccgcgtcgaggctgagacgccggggcatggtcggcgcgcagtgacggcggccggcggctcggttcgtgcgtgcgtgcccagcattcttgcccctgttgagtcatcggctcgtcgctcgctcgcgcccccgccgctcgccccgcgtccacagggtcgccgccacggggaggcgcagagggaaaaggaagatgagctgctttccgtgcttcggcggcggaaagggcaacaacgacgacgccgacgcggagagcccgggcgacgcggccccggcgtctaacatgacgccagccgcgatggtgcaggcgcccgccgcgtac

SEQ ID NO: 329264 - DNA, 368 bp, Zea mays
  unsure (1)..(368): unsure at all n locations
agcagccgtgtcttgtgtacaggtgtgttttgctattgttgatcgatgaagctgtaggtggacatgttatgatgcccattatattattctgttgtcggccaaaaaaaaaaaaaaaaaaaaaaaaaaaaaaaaaaaaaaaaaaaaaaaaaaaaaaaaaaaaaaaaaaaaaaaaaaaaaaaaaaaaaaaaaaaaaaaaaaaaaaaaaaaaaaaaaaaaaaaaaaaaaaaaaaaaaaaaaaaaaaaaaanggggggggcctttttaaaggaccaaagttaacttccccgtctttcaaaaaaaaaaccttttttaaagtgcaacaaaaataaaattaacggccccggttttaaaaacgtaggaatgggaaaa

SEQ ID NO: 329265 - DNA, 216 bp, Zea mays
gcatctgcttaatcagagtagcatacctttggctttgtggagacaatgttccctggtcgagggccactgccactgtaccttttttatcatgcaaacaagagttccgacttttacataaatacgtacatgtcaattattgacttaatgaacagttgtttgaataatgaagctagctcaatgaaaactaatagtgtggataacactagccacactcaa

SEQ ID NO: 329266 - DNA, 418 bp, Zea mays
cggacgcgtgggttcggcgagttacggagttagtacaccacgacatctgcctgtcgccgtggctgggaggcgctcgacaccggtggccatcctcctcaccgcggccttcgtccccatctccttcgtcgttcgtccaatctttgacacgcacagatccgctgccgtggagctcttcaacttctccgccgacggatccttcgacgagttaaagcaagaggacccctgtgcattaaagaataagcacacaatagatcttcctaaacactgaacattgccttatatgcttataatatcaccaaccttaccttttaagttatagaatgtttactttgtatggtacactccgtataattatatatgtacgcctgtttatttcttttggagatagtttgtgtacgttagcagttcaggtctaaat

SEQ ID NO: 329267 - DNA, 395 bp, Zea mays
cccacgcgtccgcggacgcgtgggcacgccgcccacggcaggagagagaaagcgggggcgagcaacagcaggccagggcaggcaggcgcaagaaacttcccccacctccacctcctcctcgccttccgcctttatttcttctcgtctccttcctcggtcctatctcctctcctgctccgccttttcctcatcggtccctcctcccctatcctctgctcctcatcccctgcgctccgtttcttcggggtttgaggcgagtgatctaggccatggcggccaccaagaaaaccaagatcgtcttggcccagccggcggttggggctccgacgtcgcggctgccgttcttttctcgcgcgcccggcccggtccgaggcgccggggacgaggcggcgcac

SEQ ID NO: 329268 - DNA, 461 bp, Zea mays
  unsure (1)..(461): unsure at all n locations
cgcgtncgcgacctgtttgatcttggcgatctgcgcgatgaactctacttcaaggcatttgtgtttccggggccatccaccactggaagctacatcgtggttcttattcatgagccacgttcacggctttcgtttgcacgaccgggagatgacaagtggacctcggttggacaaggtatcggatataaagactgcacatatgtggatggtcttttgtatacagtggattggactggagaaattgatgcttttgattttaccgcatcccctgttaaaatgacagtaattatggacagtctgaagtatcctccatgtgaaaacctgtacattattcaggctccatggggtgatctgctgcatgtttggaggactattgacgttccacccaatgctccatcgtgggaccctgaaaagtgcctggcagaaaccgtaaaaatacaagtgcataaagtggacttgga

SEQ ID NO: 329269 - DNA, 437 bp, Zea mays
acgaccgacgcgtgcgcctcgtccgacgcgcgtggggatggggacctaacgctaccttccttcagcgagcgcctggggaccgcggcggcggcgtcccagtgcgccgccgagccgagtagcccggtgcaggaccctgtcacccatctctacacatccacgacgagcctaaacgacgaggggcccaagtacgacctcgagctatccaagaaagaccaccggaagcatgggttctgggggcttgtggctcagaaagccaaagtcatgctggacgaaaacggcacaccacgccctcaggctaagacctctgaatcgctctggtcctacgatcgggtccaaggatcgttgggaggcaggctggacatcagagggaagatcaaggacgttcttcagcaggagggccttgctgtggtggccgacagcacgacgcccggcaccag

SEQ ID NO: 329270 - DNA, 247 bp, Zea mays
ccaagctcaacaacagccagctcgcgaaaataatgaagagccgcagcatggcatcatcggccgcgctcttggtgctagccctcgcgctagtggcggccaccgccccacaggtagcggaggcaaagaagaagagagcggcggagagcggcgaggcggcggaggcgaagaagatccaggacgacttctgctcgacgctgtgcgagggcaagaaggggacggacctggtcgtgtgcaaggagtcctgcgc

SEQ ID NO: 329271 - DNA, 215 bp, Zea mays
gtcgacccactcgtctcgctaaaaaaaaaaaaaaaaataaaaaaaaaaaattattaaaaaaaaaaaaaaaaaaaaaaaaaaagaagaaaaaaaaaaaaacacaaggggctgcctatcttggggattcctagcttgacttccgcatccttgcaacttcttagctcttttatgtggtcacctaactccaattgactgtccgatggtttacatcttgc

SEQ ID NO: 329272 - DNA, 236 bp, Zea mays
cggacgcgtggggtcaacctttcaacttctgcttgtgttttcatgactgctattgggctggactatataacttaacaagaaaactacctttatacttctttttctggattttatgggggtctatcaagattggtggtgggcattaaacaacttttacctgatcaagaagcttaatctttttgtgctaaaaattaaggcaaagggaattccatctctggtggcatggatatccattc

SEQ ID NO: 329273 - DNA, 442 bp, Zea mays
gaggtgtcaagaggagcaggtcggcgcatggctgccgaaggaaaaagcggaggcggagatgtcggatttgcaagaggagaggccgcagagcagcgaggtcgtggagacagaaacgggggcccatgagcgcacggacgatggctcaccggccgtcgttggagaagcagcagcaacacctgagggagaagatgagcttgcaaccagcgcggcagaagagaagatcgtcgaggagatccagcgagcagaggcgactgagaactcgaaggcgaacgcgaaccctgaggaaccagaccaagaaaccggcgtgatctccgaagaacccaaggagggaacgagcgtggtctctgaagaaccaaaaccaaaggaggcagctgatcctaccactgcgcagaagcgcgaggaggcgttcgacgagccaaaaacggctgccggatcgaacgcg

SEQ ID NO: 329274 - DNA, 453 bp, Zea mays
ggctcaccgaggcatacaaccatcgacggggcaacatgcctgaaagatcaactaagtcacttatgagtagatgggataccataaaaacacaatgctcactattttctggctacatggcaaatgtcctacgagagaactctagtgggttgtccgacgctgataagacatctctagcagcttctcgatttgctactatggagaagcgcccattcactcttttgcattgttggtctattctaaaggatgaaccaaagtggatggatcatagttccaataagcaagttcgaattattgaagttgcaccaattggatcgaacatcatcgacctagaccctaaagactcttttcttggtagcacaacatcaaagcaacatctaggtcaagatgcaagcaagggaaaaactaaaaaggctcgatcaagctcaatcactgtaagctcatcggatgaatatc

SEQ ID NO: 329275 - DNA, 201 bp, Zea mays
ggccatttcatcgcagttggtctccaacggttctcctatttgatctcttatccgaccttctattctaaactctactctataggcaatgttgtctacggtgtaaaaacagtattttgtactctactctatatacagagttaatttgtactctactctatacagagttgtctacaatgtagaaacaatatcttatacggtcat

SEQ ID NO: 329276 - DNA, 460 bp, Zea mays
cgctgttcgactgcatctcgcttcgcgtctccttgtcgggaaggggaggaggttgcgttgggggggaccgaagcgagatgccgctgtacgactgcatgctgctgctgaagacgacggtgaccagggaggtcctagcggaactggtgacgcggttggcgcgccgcgcatgccatcgcaacggggtcgtcaccgacgtcaagtcatccggccaggtcagcctcgcctacggcatcatgaagctcgacggccgtcacttccaggtccatcttatgcaaatgaccatgatggttcccccttcgttcccgcaagaactccactatctgaacaaggaggacaggctgcttcgctggctggtcgtgaagcacagagacacggtatacgggttggagttcttgaacgcggatggcggcagggacgagctgagaagtttcagccatggtcacacgaagggcgactacga

SEQ ID NO: 329277 - DNA, 339 bp, Zea mays
tcgaatccgaacccgccagctctacaccaccctttgttctgacggcgacggaccccgcgccggggccggctatgctctgctactcgctgccgccggtccggctgcccgcggaggacattctcttctgcgttgacgttgacctcgaggcccgcgccgagatgaattccgccgtcttctccgcatcagcgtcctctggctccacctagaccgcttcaccggatccgacgcagccctgggaggccgggggttcccaagcggcggtgccccggaccgcggtcaggcggacggactcggtcaggcaggcgctgttgctgatcgtccacagcaagctcaccatgt

SEQ ID NO: 329278 - DNA, 462 bp, Zea mays
cccaagaacaacaaaaaaggatcgaggaagataggctcaaaagagcataagttggattgttctcggcctcaccggaccaggtccgtagaggcctggcgcaccagaccggagccttgtgcaccgggctaccagtatggtcgaacctcgtagtcttgggaattttattataaaattcaccggattgtctacagtaaccggtcggtggtgcaccggaccctctccaacggctatcttccaatgggcgcgcactggccaacggctagctaacgtggcatccagtccgaaggtgcaccagactggtccagtgcccgtcagctatggaaaccgcccaatcatatcacaaactcagggcatgtggatctggttcagtggcgcatcgaatcagtccggtgcccccacaggcaaccagtttttaacatctttttagaaggggcaataaatatggggcctttgggtctacaa

SEQ ID NO: 329279 - DNA, 216 bp, Zea mays
ttttaaaggtccaaggtttacttacccttccttccaacttcttaccttttttatagggcaccttaatataatttaagtggcctggtttttacaactttgactctgaaaaaaccttggcttcacaaatctatatcgttttaaaacatatccctttttccaaatgtcgcattatagcaaagagccccacacatatcgcttttcaaaacatttgcacac

SEQ ID NO: 329280 - DNA, 289 bp, Zea mays
cccacgcgtccgaaaaaaaaaaaaaaaataatttaaaaaaaaagggcggacgatctgcaggacgcaatcttacatccacgcttacgtccacttacatgctatcgtataaggtcacctataatgaatctaatgtccgttgattgacaacgtgctttactgcgaaaacactggcaaaaccctgcttaatcgcattgcaatacatttgcatttcatcagctgttttactagcgaagaagctccggaccaatcgcgcttccgatcgaccttcgcaacctgtatggagaatgga

SEQ ID NO: 329281 - DNA, 196 bp, Zea mays
gatgaaccagcagagctacgcgctgtacgcgttgaagtccgtcggggacgggggcaaggagcgcctggacaagaagctgtcggaggcgaagaaaaagaaggtcacgtacgtggtggaccccagcggcaagggcgactacaccaacatcaccgcggcgctggaggatatcccggtgagcaacaccaagcgcgtgatc

SEQ ID NO: 329282 - DNA, 136 bp, Zea mays
  unsure (1)..(136): unsure at all n locations
ggcgaccacgcgtccgagctagcgatggctggagcccgggcactgtttatcgtcctcgcggctgccgtcgcggtcgtggccgcgcggccggcgtctgcangcggtggagccgcggcggtggcggagatctgcatga

SEQ ID NO: 329283 - DNA, 421 bp, Zea mays
ttcatttaaaaggtcatagtttcatagaaattattgtaacatgtctactgtcgtacatacattgaaacagagagagttgctcacaagacataactgtgcactacttcagtccattgcccatttcccaactactctttctttcgcagacattccagccttttctttcacaggcactccagccacattgctaaggccaagggtacttgactttggtccagacctttcaaccaatgcgccctggaaaacacagtaagctatgaaggagagtatgcgccgaatctgccgcagcacaagcaacaacgaattgataacagaagccaccagtatattgaagtttgcaatcaggaaaaacgccgcgataatgccaaggattgtaagaacagtttgttttgctgcatcccagaaaccttcaccagtaagc

SEQ ID NO: 329284 - DNA, 84 bp, Zea mays
accggaaccggaagggccgggccagagcgacccgtacgatacatcctcatccgattacggacccggattgtatacatcgtgtac

SEQ ID NO: 329285 - DNA, 71 bp, Zea mays
gctaccttactgtaagttgtgtaacaactgctgtattatattaacgcttttgagttctgccgggtgatatg

SEQ ID NO: 329286 - DNA, 346 bp, Zea mays
acccaggcgtccggtcagctcacttttgaatagtagacttccacattctttttatggagctatcattgccgtctttagatgggtttactcagaatgtggacgcgctgctctttaccgaggtgtacgtacaacactcatgcggatacttacttatgctggtcttaagcactacatatatgaaaggctgaaggtacatgtaccacaagattacacatgctatgtaacatccaagctcacatacaacgctgactgtaggattatttgaacagactctgacatattcattatacgttgtcaggaggcaaatgcaagttcaaaatcagcaacaacatgagcaattaggtgc

SEQ ID NO: 329287 - DNA, 418 bp, Zea mays
cacagtttcctctcacggatcgcactttcttcatgcgcagcgactgccgctagttgcggcccgtgagggcacaacgagcaccgtccgcttcgagcttggcgtgtgggcagaaaagcaacgccaccgctgacacttctatatgcgctgcttcttcaggaagccatgggtgatcgccgtgctttagtctctgcatctgatggcatgcgggcccgtcgagcgccgctacgagggtgagcaggcgtgccattgacactctgcgggcgagcctccactggcgggcgaactggctgccgccgctgcaccgatcgggcgagtggaagggagtgctagcgggagcagggccacatatttggtttcttcaggaaactgttcttattgtcgtatgacttacaccaacagtaaatcgcagattcacttg

SEQ ID NO: 329288 - DNA, 458 bp, Zea mays
gaacgagcagcctccagtacgagccagccagtgaaactaataaagctctcgtcgtcgccatcggagctaacacgccaaccgaccccgtgcccaaggcaatccgccgacgacgtaccaccaccaccgcaggagcgagatggagatgaagaggatgctcttcgccgtcctcgtcgtcatcgacgcctcggtcaccgcagtgctgtcctccaccgaggtcgtcgccgcggacaccccaactgcctccgagtcgtccgacgaggctgccgctagcgctggcgctggcgctgccgctggcgccgccgtctcgatgccctccgtcagcagcggcacgaccgccctagacgccgagctcgacgcgctactcttatacctactcgcctactagctccactaagcgtgtgcgtgcgtacgtacgcacgcatggacgacgatggatccggacaacgttgacattgcag

SEQ ID NO: 329289 - DNA, 390 bp, Zea mays
tcgagcgacgcgtacgcacccagtaactagatccatcatctagagcgctaccgttcatggaccactatattccggagcgacgaagtgagacaaacagtagtacatggcatgaagaacgtccattgcgccgccctcgtcgccgacgtctgggccatcggctcactggactcagtggcttctgatgagccctgcaacgcactcgccggaccggccggcattcttcttggtcctagcgtaagcggctacaccgtaacgctgccgcccaatgacgactcgctctggcgctgttgttagagtacggacctcaatgatctatcaagctctcagctgtaatctattgaagtctctgatgtagctgaacctactaatgaatcctgacatcatgctaca

SEQ ID NO: 329290 - DNA, 474 bp, Zea mays
acgccacgcgtacgtacacgcgtccgatatacagtagctcgtcagacactccaaggctacaagcgacatgtgtgggcagcaaaggcccatgcgagaacgacgccaatcaaacgagacaagcatagacctactgtccaaagtgtgctaatgcgatcagggtcctgagcgacagacatgactagtaaacgcactgctagagtgaaacatcttttaatggatccagccaacagcgagtacatcttccccctgaaccttttcaggggagcacaaggctactttacacatgtcagaactcttcatctgggatatgactgtctggacacaacctagactgaattcatgaactatgcaaatcttaagaagctcactctgcacaagatttcctttttgggagacctacagtgcctgatgctgccagaatgcaattcatctgagtgtctgagcatcagcatctggtccttgcctggcttaagc

SEQ ID NO: 329291 - DNA, 379 bp, Zea mays
gttcgagccacgacgtacgcgcttcgcatggagacacgcgatcccggataggttcactgctgctgctgaggcatgctccagaagaaatgcaggctctgggcgccctgcacatcattgcactcattccacgcacaaaagctttgcatattcctttctaacgcgcaacgatgcacatgccgactcatcagataaaacgcgcatctcgtgccggtgagggagctcgtcaaaaatgcccgcagctgcgtccacccgtgcgacctcttcaggggactgcagtgaccataacacgcggtgggtctccggcagaagtggcagcagtgggcgcccgttcctcgcgcagaggctccaccagtcgggaggcgccgagaacagcatgtcg

SEQ ID NO: 329292 - DNA, 360 bp, Zea mays
  unsure (1)..(360): unsure at all n locations
gcagcgcggcactcgctcgtctgcccattgccttggcgtgtcgacccaaattggtcccggccggggcatcaccctggcgtaacccaagctcgccttgtcggcgtgggcgccttcatgggcggccgggctgaaccctggctctgtgaggatagcagtcgctcctgctgaattttgcacatcatcaccgtcagcatcggcatcgtcatcaccatcaccacagctctgcacttccccaaactggaccatcgatgtctcggacgtncgaactatcaaggtgaaccaacgtgcctctctcggcgaccgccggggaacatgaaggagttcttctccttctacggcgagatcgagtacgtcgagatg

SEQ ID NO: 329293 - DNA, 303 bp, Zea mays
cgcgtccgcacaacgcgaatgtgcaaacctactactagcattaagatgagcagcaaactcacagtttaatggatcgagctattaaggagcatggtgtacaagctgcaccttaccaagcaggtgtccatttcaaccaacatctgcttgcattctcaggagctatagcccgacctcgtcttccacttctgccaacccctgacatgcctcatgggtttgctcaagcacctggcgcaccattgctgccaggaattaggcccccgattttaccagctccaggctatactgatgctccaccaaccatgc

SEQ ID NO: 329294 - DNA, 153 bp, Zea mays
aggtgaaccagcagcctacaataaaagccagcttatttgctttaaagcgagagacctcagacgtgaggcgagccgaccgccgacgtaccaccgcgccaacgtgcgagaaagatggagatgatcaagaggatcctcatcggcgtgctcctcgta

SEQ ID NO: 329295 - DNA, 465 bp, Zea mays
cggacgcgtgggcggacgcgtgggcccgtgcgaagtggccatggttgccgcagttgaaacacttcctgatcgacgactttttcttttgtcgagccttccactcggcctccgtgagaaggagctggttgtcgcgccgttcgccgccagtacgagtgcgccgccgggaacgctcgtcgaacgccttcagtctgccgagcgcctcctcgaacgccatcgtctcgacatcgcagaactgctcgatgcccgcgacggcgggaagagccgatctggaacgatgtcgaggagcttcttcaccatggcagcgtcgtcgagcgtcacgccaagcccggcgtaacgcgccgtcataccgctgattttgtcggcgtagtcgtccaatgcctccccgtcctccatttacagcttgtagaactcccccttgagcgtggtgaggcgcgtcgtcttgacccgattcgccccgacaaaacg

SEQ ID NO: 329296 - DNA, 459 bp, Zea mays
cgtacgcctggtcccacgcgtgcgccattgctttgctgccgctcattgcgtacaccgagcagggactggtcaaggactgcgacatgtgcagagcgtgacactctggctcatgcataatcacctacaactgcgccaatgtgtgcccaggacaaggcctcttggccggaacgctcagcaaacgactgcgtcgttgcatgcgcatcttgcaacgctaaacaatgaacatcgataactcgtatgcatccacaacctattcaagatcacatctattacgacgtccatatgcatgacgaccatcacatatgtactgatcactgcgatgtgtattctgatgactgccatcgttctggtgaatgtgtgctcaaggtccatcaatgccttcatgtactacatttacagctgaataacctactacttaagcttgcggacatgcatgaattataccctaatgagctcaac

SEQ ID NO: 329297 - DNA, 290 bp, Zea mays
gaattcccgggtcgacccacgcgtacgcccggatgtattctcagcctcgaacggtctatttgcagtatgcatacgagatatgtcatatgcggtagtatggttaccgagatctgtagggatgcatatgcatatgatctacgcctttgcacattatatgtgatgctgcgattatgagcactacaataatcacgacctcataattacatacgaaatgatccatgcactcaagtccaagcctgatctgcagacacaaaagttccttgtgtattcttttactagattattgaccg

SEQ ID NO: 329298 - DNA, 287 bp, Zea mays
tccagaaatcaaagtaaaaaaaagccctagtgtcttcgcatctcgctcccgcacacagaccgaccagtcgcagcccgtggcgcacctgcctgcgcccgacgcctacgtcatccactcaacctcgcccctcagccactgccgcgcggcgcccgtccatctgccgcacccgccgaattattctacggcccttaagctgaagcggtgtggcctaagtagcagcgcggcggtcgtcccatgtctcgttcactttggccccgacaggctgtccacggtagcgcgaactgccc

SEQ ID NO: 329299 - DNA, 507 bp, Zea mays
  unsure (1)..(507): unsure at all n locations
accggactctgaattcccgggtcagacccacgcgtgcgctagccggccgcgctcgcaccgtcgcgtgtcccattctcctcgtcgttcgaaactggcccctgcctcaccgtgtcgtgggcaccggcggctccacacgggatgtggccacgcctgacacctncacctccatggctgagtgacggatgagcggctgggaggtctcccgcggagcggctccactagccgcctcaacgtgcaggcgcaggagttcgtgccgcgcgctgccgcggtgcccctcccccttcgcaacagaagcggttgccattggtagggttggcaagttcggtccccaccgctgctgcagagcaggaggccgaaggtgagcatttttatgccttcttgtcaggggaaccttttgcaggtatcagatcttgggtattttctggtgattcagttgtgtattcttggagctgaaagactcggaagaagtaatatatcggcaatagctagttccattaatcaaatatc

SEQ ID NO: 329300 - DNA, 421 bp, Zea mays
tgaattcgcgggtcgacccacgcgtacgcctagatcgcagttcggacgctcgaatatctgatactaagtatttacaatatgccagtccgaacacaagcgctgctgggtctgtatatgttctcatgtaggatgatatattggacttttgatctgtgaacagagctgcgtgatacaaaccgtgaaatcagactatatgaggcacctggctgctcgagcctgctacgtgatccaatcaaactggtgcctgcgacaatggcatgcgacgttcgtgcagctgcctcacctggctaatcatccgactgtccttaaactgtagccttatgacctaattagcatcgctgcagtgtgtactctgatatcgtcactatatgcgggacaggctgtgcaacgagtctagatactgccgttagatggtccacac

SEQ ID NO: 329301 - DNA, 175 bp, Zea mays
gaggaatgattctgtaggatgtgttgcgggtgaaaacttccttttttccccccttttaatcaggatagccctttgtgggctcaaacattgctgtaacggctcgtgtgaaaattgccaggtcatggtttaactctaaaaaaaaaaaacataataaaaaataaaatgaaaaaatcat

SEQ ID NO: 329302 - DNA, 414 bp, Zea mays
ttccctggtcttccctctcgtcctataattaaaaataataaattaaaaaataatatttaactaaaaaaaaaaaaaaaaaatatagatgggtaaataaatataaaaaaaaaatactaaaaaaacaaaaaaaaaaggggcgtccgttctagtggctccatgctttcttcccctttcttgcaacttcttatctcttctttggtgccacttaatttcatttctctgtccttctttttacaacgttgtgcctggtaatcccctggtgttccccaactttttcgccttgcatcacttccctttttctcctgttgtcgtatttccttatgtgcctccccctttcgcccttcctaacttttgcccagcctgattggcttttgtgcccctccttgttccgcctctttttccccttcgtttttg

SEQ ID NO: 329303 - DNA, 259 bp, Zea mays
cgaactctcctgatcactgtctgtctgtatgtgcaactgcgagcaaggaaattaattaaaagaagatcggcaccatggctggaacgacgacgacggtgatgcagatgatgcacgtgcaacatgcggcagcattgctgatgtgcttggctgtgttgactgcgtacacgccggtagtgtgatcatctgcagtgactactgatggatgatgcaacggatggaccatcgtatgacagatatactgtgccatcgcatgctacgg

SEQ ID NO: 329304 - DNA, 469 bp, Zea mays
gcatttctggcgagggaggcaggaatgttaccgttcacgccgcagaattcctgatcgatggcgatgaatcgacgatcaggagcggcatcaagcaactgagccgtgccctccaaatcttccggtttgtttgggaggccgcgaatactgactgtcatgccgccaatcacaatggtaaagatgttgtgggcaagaagaagaatgaagatgcaaagggtgtgttggagttgcaaggtcatctctggagtttcggtgttgaggagaagactctgacatacagaggagacgtgttccatatgcatcagattcagttaccatgaaatctcctttctccaacatatctttgtgcaaaatctagccatatagacaaaacatataagaggtgcgatctgaactgaaatgctactcttttcactagcgcttctctgaatctgtgcaaaggcgatgcaactgcatcctgggtgaaaaagac

SEQ ID NO: 329305 - DNA, 463 bp, Zea mays
ggcggcattgcggaatgggtgcaaggcagaatcgtaaagttgaggacgctcttccctattcttaaaccgctggactcacttgatgtgattggcttccaagagggcacagataccattttcattagcatagatatggaggtcttcgcagtcatgctcagatcggagcaggtgaagaaggtaggcaagacgggctccaaatatgccatggcaccctatgtgagcttctacactccagatcttgcaaagggcagattgctatcaccatgaagatgcagtgatccatccattaacatggccgtggcactattgacttcttaaggagatgatgagttaaagtgtttttccagtttggacggttatggaaaaaaagcaagttaccatgttcattcagaaaagtttagtttcttacctgtgcagtttaaggaactgtaagaacaggatatcatcgtcaaaatggctagtc

SEQ ID NO: 329306 - DNA, 342 bp, Zea mays
ataaccaaaccgactatggctgacattttgacgggaagcatcgacggcgggacacgtatgatcgcgctggcgctgcatgccggccgtccggcgacagacctgagctgccatggcctttgctgccaggctagcctgggactccacacgactactgcggactagcctaagtggtgcacggttatccgttgtcatctcgggtctaacatacagttacaaggcgaccactctggacatcccacgtagtcaacgatgcctccatcgcatgagcgtatgaataggtccatacggttatgcttggacactgcgagcgcatggcgaatatggtcaacgacataatgcact

SEQ ID NO: 329307 - DNA, 262 bp, Zea mays
attcccgggtcgacccacgcgttcggtttggagaaactcccgcgttcgaggttatcgtgacattgataagactatggcagggcgcgcgcttcttctgcaactgggcttggcgcttagtcttttagatccacgccttcgacccggtggtgtacgaaccgttcaattaagacttctaagggacaagggtcagttccaagaaagatgaataccaaggtgagttgaagcatgcccagaatgaatctcatgaggactatggccttct

SEQ ID NO: 329308 - DNA, 373 bp, Zea mays
ctaacgatagcaccaatcatgtctggtctttcttggacaataatggcgcctatcctggcgtggatctgctcatcgggctcgccgtgagctccgaggacgacgaggacggcggatgcaaaaagaagccccacgtcaaccaccgcaagtttaacgcggaaccgtggactgacggtcacgctacgtactactgctggcgcgacggattaactgacaccactgacgtgcgcgcgtgcggctacaaggtctagctggtgaaagactacgactccctgacggcgaccgtgggcccatagctgtacaccaacggcacctgttgcagcgcgtgctatgagctcaaggtccctaagggcaccgaagtagagacagtcaccaa

SEQ ID NO: 329309 - DNA, 433 bp, Zea mays
gtggcatgcagatctttgtgaagacactcactggcaagacaatcacccttgaggtggagtcttcggataccattgacaatgtcaaggccaagatccaggacaaggagggcatcccaccggaccagcagcgcctcatcttcgccggcaagcagctggaggatggccgcaccctggcggactacaacatccagaaggagagcacccttcacctggtgctccgcctcaagggtggcatgcagatttttgtgaagacattgactggcaagaccatcaccttggaggtggagagctctgacaccattgacaatgtgaaggccaagatccatgacaaggagggcattcccccagaccagcagcgtctgatctttgctggcaagcagctggaggatggtcgcaccctcgcggactacaacatccagaaggagagtaccct

SEQ ID NO: 329310 - DNA, 443 bp, Zea mays
gatttgggtgcttatctgcgactcttgcttgtggtgattgttctcttgtcagtggcattgcagttggacctctcatagctgcaacaccggtgcagcaggaagaaagaggcataagtgaataacgatgcacgagacgaacacgaggcgaagaggccacaaaagagacgatgtcagcggaagaggcgaagaggccacgagacccacgagacgccgcagcggcagtagtctgcagcaaggagcgcttaagtacgggattgcagcgaggtgcgacagagaaagagagaaaaccttgggtttcctggtcagcgaggtgcattttattttagaagtactataaatttaaattagggttggaaatggatgtttggtgatccgaattattcgtattcgtactcactaaaactgctaatatggatatccgtatccgtattcgatttcaatat

SEQ ID NO: 329311 - DNA, 432 bp, Zea mays
gccaccatctatccatagaggtgcgaggccatggcggcccaggaggcggttccgatcgacgccatcggcagccagctggagataagtctcgtcgggctggagcacgcggtccttctcactaacaatctcgacctcgccggacagaccttcgtcgtcgaaaaagtccaggtgcgccaggcgccggccttgcttgaggtcatccagagggccgtctgccatcccaagaggaagtgggtggtccgcatacccaacaccttgaagttgcgccacatcgccaggatttcgaatgagatcgaggtggtcgttgccgtcgtgatccctcaactgctccgcgacaatgttgaccccaccggcgcgcgactcctacgccgctacgcttggtccatctgtcatgcggcgaggaaggtggatggcgcccccaggattcctggg

SEQ ID NO: 329312 - DNA, 493 bp, Zea mays
tccggaattcccgggtcgacccacgcgttcgcagattactccataccatcatctgccagcgaaacttttgctgatgtccttaaacaagctggtggaaaagtagagttacaattgtataaagggaaaacacatactgatgtatttttacaggatccactaaggggcggcagggacaaactggttgaagatgttttatctgtcattcatgttgatgatgcaagtgcgcgtgagagggacgcttcggcacctacccctgagcgcctggtttatgaatggcaaattaaattggcccgccaaattagtcccttctaaacaggtctgtacacagaaaggatttgttccaagacttcaacaagcatgtgttgcaacgtgataaactacgtggggtacatgatatttcttgggattttcactgggtcaagcaaacgcagcttcaatctttgtttgcagggcgccagttgccaatgatggcagaagatttgccactgatgga

SEQ ID NO: 329313 - DNA, 467 bp, Zea mays
  unsure (1)..(467): unsure at all n locations
gagcaacagcggtcttccggtcgctgggagcatgagcgtcgagcgccaactccactccaggccgccgtgtttggctcgacgatgggatgtccacctgctgccacaaggaacgtcgaaggcccttggaggcaccacgacgcaaacccagcacgggagggaggtttcgggtatcctcatacccataacttcctcccgaccaatggtatggctcctggatcgaacccattccttcagcaattccacatatggtgcatgatgcttttggaagtcatccacattctcaattcgaccgacctctgggtaacatacctaaggttccatttccggngttcgatggggaaaatcctaaactatggcagacacgatgtcaagattatttcaccatgtattctgttgacactagtgtgtggattaggattgctcgcatgcattttacggngtctgcagcacgatggctccaatcggta

SEQ ID NO: 329314 - DNA, 251 bp, Zea mays
tggatttttaggttgaaaggcaatgggctgttgatcagtgtggggagggagtggaaggaccgagggggcacggcaacggatgaaaagggggatggcgctccctggtatgaggaaaatatttcgcatagaatcacccgactgagtacaagacattttgagttttgacagagaaagctgcttacatcaaacatgttattagctgaattctgtagatgaactctttttttcgatggaaatagctacttcatgtt

SEQ ID NO: 329315 - DNA, 421 bp, Zea mays
gatgccaggtggtctctacatgccattaaagtttggggtgacttgctaaacaaaaatgcacttcgctgggtgttggctaaggagaattgtagcataataattgggactatgtttcgacgatttagaaggcaaggtgttcattccaataaacataaaaaattttcactggtacctggcgattgtcaatgctaaaaaaaatgaggtacatatactcgattctatgggaccacaaataacggatcgtcgagacctttatactacaggtttcttgcggtctatggatggtgaactatatggaatattggacagggtcttctttgtctaataacataactcagaatgatataacaaagtttagatttaagctacctgcaatattgtggaactcaagattaaacacaaagaaaggacatcaagagac

SEQ ID NO: 329316 - DNA, 188 bp, Zea mays
tcatcattttcttcttcccgaaaacttttcacattccgcgaaggagctatattaaccttgcggctaaccacaccatctacaactttcctactcataaggaactttccaactagtgttccttctccctcttttacttgttttccgtactgcatttattattgggtttgacacacaatactcctctaaca

SEQ ID NO: 329317 - DNA, 164 bp, Zea mays
  unsure (1)..(164): unsure at all n locations
acgcgttcgcggacgcgtggngcagtcatctncttcaccaccaccaccaagctcaacaacagccagctcgcgaaaataatgaagagccgcagcatggcatcatcggccgcgctcttggtgctagccctcgcgctagtggcggccaccgccccacaggtagcgga

SEQ ID NO: 329318 - DNA, 200 bp, Zea mays
  unsure (1)..(200): unsure at all n locations
ttcccggncgaccacgcgtccgcagctttaatagctgatgtaggangnnactttgcttgtcgtgggggtggcgaccttatcggggggggaggatgtgatgatttcgttagcgctnnactttacctcaccggcgcttgtggcggctgctaacttaacagtggtgaatgatgttgtgtatttcactgaccattgaggtgacc

SEQ ID NO: 329319 - DNA, 354 bp, Zea mays
  unsure (1)..(354): unsure at all n locations
ccgggnccgacccacgccgtccgcaagccgtttaacctttatcntcatcacatgtacgaaaggtgtttggaaccttggatggagaggatgttgtcaggcactgtgagggtatctgtccaagccgtgctcgggggcctttgtcaacttctttggcttcgggnngccagagctgtagtaatgatacctcgtaaggttctctctttgcattggacgaaggggatgccaggagttcatactttttatctaagagaagacccttatttcgacatcgttgtacaactcttatttgtattttaagtggagaacctagaacacttttgttgatagatatanctgttaaatacttctgtcgat

SEQ ID NO: 329320 - DNA, 205 bp, Zea mays
caacgtcgaggaggtcaccgaagcggcgccctcgacccccgggaacaacaaggcctactgtgatgaccacggcacttgctaccggaaccataaccaagacgtcgaaccccaaaagccctgttgcggcggccaacccatacaccctctgctagaacaagatcacttgatgctgatgcttatcgatggcatgcaagcatatatatac

SEQ ID NO: 329321 - DNA, 247 bp, Zea mays
gactacgtggagcgtccgtaaaagacgaccttgccaagagcgcctatggctacgattacgcggtggtagccgtgggcgaacccccatgcgccgagacggccggagacaacaagaacctgaccatgccggtggctgagccctaggtgatcaaggacctgtgcgggctcctgaggtgcgtcttgctactacggtgcggccggccgcttctgctgcaggcagacgtggacttcatggacgctgtcggcgt

SEQ ID NO: 329322 - DNA, 351 bp, Zea mays
  unsure (1)..(351): unsure at all n locations
gcgtcggcaactccgcttcgccggccgggccgtctatcgtctaaaaacctttcagggcacggggctagctgaaggagagggaacggagggggatggcgtcccggcgacgagataagccggctcttcgatccgccgcacgggatgagatgctgccnaccgcggatacggtgccgcgacgaacaaataagctcgaaaggccaagttcatgacgctcggaaccccgccgccggacgagctcaccttaacgccacaaagtgacggccatcggacagatctacggtctttctaatgaggcaaagccgggggaagacaacaggaactacgtcgagaagatgaagaacgagaacgtct

SEQ ID NO: 329323 - DNA, 409 bp, Zea mays
atcaatatttggatatagattaaatatctcaaacgaaaaagtcaagaattcaaaatctgttgtggtgagcagagaaatgcacaaccgggggaccactaacatatttacatttgctgctgatcgtaattacgagtaccaaacaaaactgagaacaccaggaacacagaacaacagactgaaaccagcaaatcagcgcggcaagcgaccgcaccgcaccgcacgcacgttcgatcgatcagccaacaacaacaacgccacctaaatcgaggaacgcacgttcgatcgatcagactcaccccgcgatcggcttcacctcacgctgtcccgccaatcgccgccggggcggggcttccggctccgcagcgccttgatctttcctgcgatgagcctcccccatcgaggccggcgc

SEQ ID NO: 329324 - DNA, 454 bp, Zea mays
  unsure (1)..(454): unsure at all n locations
gacccacgccgtccgagcacanccgacgggagtgcaagacgccactcgggttggatgacgttgctccaccttctcaccgtcgacagggcggcacccagagacgttcgaccagtccgtggcggcgatgatcaagctgatgaccgacggcagtgccagcatcacacggttcaactacgccgccgtcatagaggccgccttcgggttcgcggcgctcaagatcagcccgctggacgtcagcacaaagatcctggagctcatggccgagtccgtgaactggctgatccagtggcacaagtccggctactccgaccctggaaacagcggcggcttcagcggcagctcttcgtcccagacgtcggtggaagatgcgtcgcggatgggcaacctggcagtcaacatgttcatcaagctcgcggaggcgctgcgcaagacgagcctagtccggcgcgaggag

SEQ ID NO: 329325 - DNA, 374 bp, Zea mays
  unsure (1)..(374): unsure at all n locations
ccgggncgacccacgcgtgcgcaaagtgagcccattaaagctggcagctagttatttttaaccctaaccggtcacatcccgggggcgagggcctaggtgctggccccggcctatgcacacctgaacggggcacccccgaggcacaagcgctcggcccctggctgcacccagcagcgcgcgggcgaagccccccagcggctcgacacgggcgcgcccccctgcggcgactcagcggtcatggcccccggctgcacagcgcaccgcgggcgttgctcctcggtcagcgagcgcaagcaggccccccatcggtcagagcgcgacccccggccttagtctcgggggtggcgccgcccccgcaaggcgcgagcgctgac

SEQ ID NO: 329326 - DNA, 107 bp, Zea mays
  unsure (1)..(107): unsure at all n locations
ggaattcccggggtcggacccacgccgnntccgcagctagggcgatnnggctggagnncccgggctacttggcttctatcgtcnccctcgcggcttggccccgtcgc

SEQ ID NO: 329327 - DNA, 221 bp, Zea mays
taccatttctcttctccaccccatagcacctttactctaaaactcttgttgtagcaactctgctccatactttatattgtttcttataaccattcgcaattgccctataataactcaaaacttcattactaactttcttttttttatttttcacagtatcataaaatttactacaacaaattattctgcatctccaaaaactctataaatcttacacccct

SEQ ID NO: 329328 - DNA, 363 bp, Zea mays
  unsure (1)..(363): unsure at all n locations
agagcggcacgcaccttgcagaggaggagctggtcccttccgcgctcctcaagttcattcccagggagactgattccgtggtcttcaccggtttgcttgatgagcttctggaggccagtgagccgcttcctgctgcatcacaatgaagtgtgtgtatatagcagttcgttctgttgctgtttctgcttgctgcatcacaggattacttggataacggtacgtatttgtattggctgacatatcttgtggaaaggctgacatactcgagaaattcgttaggcccatgctgaactggatatgggctggactgggctggactggactgtaaaactcaatacatggcaagattgcttgaaaanaaaa

SEQ ID NO: 329329 - DNA, 427 bp, Zea mays
gacgaattgcagaatgatgatgccgaagcacgcatcaaactctggatccggcatatcctgaagtgcaaaactggggtactaggggtgtgtttggcatggctctgctccaccccagagcagctctactctaaaactctgggtggagcagctctgctccagagtttagattgtttctcataaccagtggcaatggcggttaaataactcaaaactccatgactaggttgcttttttggagttttcagagcagcaaaagaggtactccaaaaaattgtactgcagctccaaaaactctatagagtttacaactctggagttagggtgtttggcatgctctggccagctcctccttggagttttgctctggagccatgccaaacaggccctaagagtccgatttccattcagctgcatatacgaaatgaca

SEQ ID NO: 329330 - DNA, 373 bp, Zea mays
cccacgcgtccgcccacgcgtccgctgacgcgtgggcgaatgcatctacaagttctttaacgaaaggttcaatctgaggtcagtgaaaaatgaagaacaagctggatctgaaaatgatgatgaagggaacagcagaccttcctttttgtccgtggaaaagggcgctggttccttggacaaggaactagctgccagtggatttaccaggaaagagcaagtggatatggataagtacatcgaggaggttgttgaagggcacggttccagctcagatgatgacaatgatgaggttggtgatgctgtgcctttggtttctttcaagatagaccaagacagttccgatgagcctgattgtgatcttaccccaagtgat

SEQ ID NO: 329331 - DNA, 231 bp, Zea mays
ccggaattcccggtcgacccacgcgttcgtcacgcgttcgctcagaaactgccacagccatggcgaccgtgacgcggaggctgctcacgacgctacttaaaaccctagctcgcggcctctcgcgcgggctttctaccgagaaagccgttggtgcaggcagccacatcggtaagcacacccctgacacgatgcaagacacgagcaaggagctgcccatggaactgatcaacg

SEQ ID NO: 329332 - DNA, 175 bp, Zea mays
  unsure (1)..(175): unsure at all n locations
cccacgcgtccgcccacgcgtccgggccaagnacgtaagaagtcntntaattnnattgggatcgaataaactccttattggggcctctcttcattagcacgctcaccagcttgtaatctgccgcatctaagcaaagacttcattcacttattgactgatttgtacgcctcttgaa

SEQ ID NO: 329333 - DNA, 325 bp, Zea mays
gtggcttctcctccccttcgggtcgtgttttgtttcgggagggtctccggggtcgggttgcggggtgaagcgatccagaatgcggccttcgatgttgagtaccgctgcttcgtcggcggcctcgcctgggccacggacgaccactcccttcacaacgccttcagcacctacggcgaggtcctcgagtccaagatcatcctcgatcgggagacgcagaggtcccgcggcttcggcttcgtcaccttctccacggaggaggcgatgcggaacgccatcgagggcatgaacggcaaggagctggacggccgcaacatcaccgtcaacg

SEQ ID NO: 329334 - DNA, 409 bp, Zea mays
cggacgcgtgggttttgtttgagcatgtataacctctcctataaaagaccagtatgatgtttgtgtatgagttcaatgttatgtcgactaaggtagactgttgtgttcgaggtcctcttttattactgttttcatagtttgtgagatgatcatgatttcatattttggtttttaaatttgtacagtcacagcaattgtccttttgcctacctgtatcattctgtcatactatctgcaattcagctatgcacagaactatcaaaagcaagcaaagatgctctagagtacctgaggaaggtaagggcatctatttcttaccacaaggcccaaaccaatataagtataatgttttcatcaattggtctatgtaaacctgtgtatgtgtattttttaatgcaatctaattcat

SEQ ID NO: 329335 - DNA, 314 bp, Zea mays
aaaaaaaaaaaaaaaaaaaaaaattatttttaaaaaaaaaaaaaaaaaaaaaaagaggaggaaaaaaaaaaaaaaaaaaaaaaaaaaaaaaaaaaaaaaaaaaaaaaaaaaaaaaaaaaaagggccgccccttttaaaggatccaatcttacttccccttccttgcggcgccctcttttttttttccggtccctaaattccatttctttgcccgttgttttacaacttggggcctggaaaaacctttcctttccccactttaatcccctttcggcacatgcaactttcgccggttgccaaaataataaaaaggc

SEQ ID NO: 329336 - DNA, 263 bp, Zea mays
ggcagcacctccgtccatgccggcgccgtcggcggcggagccaagcggaggcatcgtagcccccgtggccgtggtggcctcgcatttctgccccccctacgtggtgcaacttgcggtgaaagagaagaaggtgagccttcgggaaggcgactttaccattaccgacaccaacggggccgtcgtggtcaccgtcaaaggtgccttgatcagcattcacaaacggcggcggcttcttgacggcggccggaacccccttcttttgc

SEQ ID NO: 329337 - DNA, 346 bp, Zea mays
gccaaaatcaacctacattggtgttgattacagaagaagtgcagattcatcgaacagatacttttcattggcattcgaggtcccaaattgttggctcaaataaaaagattgtttcactttatcaattattctatcacttttttttttttttattaaaattcatttatatatatattattttttttattttctattttttttatttatttactttttataaatttttatatatttttttttcttttttatatattatttttttttttttttttttctatattttttatcttaatttaatttttgttgtgttaatttttttctattatctatttttttacttatattt

SEQ ID NO: 329338 - DNA, 316 bp, Zea mays
  unsure (1)..(316): unsure at all n locations
ggaatcccggtcgaccagcgtccgtaacaaagcttagagactgagtctgagcctttgaggaaggggaggagaaggcaagctacaaaggtgctacgcctgggttccggccgctccctgtcatgaactggcttcacgtctcctcgcgtctcttctcgttcctgctgcgcctctctcatactcgcnccgacatatccagatcgcgcagccgtaccgcgacctctctcgtgctcgcggcccgcgcgcccggcgcgggaccagcggcggaggcctcgcggctccacgcctgcctccggttcctcgccccggccaaccccac

SEQ ID NO: 329339 - DNA, 126 bp, Zea mays
  unsure (1)..(126): unsure at all n locations
ggactgccttgatattggtggcttgaattttgaacataanaaagctactttgcccaggttcacttttcccctctcaacacgcctcataacatcactttccaataattttatactaccaataaacat

SEQ ID NO: 329340 - DNA, 288 bp, Zea mays
cgcagagataggcgtcttcgtactcgcctacctccgggggtcaaacctttcccccttcggccggttcccgccgccgctccatcccgtaacgcgacaccatgagggagtgcatttcgatccacatcggccaggccggtatccaggtcggaaacgcgtgctgggagctgtactgccttgagcatggcattcaggctgacggtcagatgcccggtgacaagaccattgggggaggtgatgatgctttcaacaccttcttcagtgagactggtgcttggaagcacgtgcccc

SEQ ID NO: 329341 - DNA, 247 bp, Zea mays
  unsure (1)..(247): unsure at all n locations
cccacgcgtncgagacaaatatacttcatagggaccaaaatacttaacgcgatgaagcaggtgagtggttgtgacattgcttcaccaggcgtaccttctatggcttcgcagtgtatcccttccacaagtcgttcgacatctccatcaagtgcaatttcggttgatagatccatgttggaagctgcacatgaaaaggagaaagagctgctgaatgaagtcttggagctgcaatggcggttactatgca

SEQ ID NO: 329342 - DNA, 196 bp, Zea mays
  unsure (1)..(196): unsure at all n locations
acgggatccaaaatccaccacgatgagcatctttggccggccgaaagccgcgggccccggcgggcaagaagccgaagtggaagcccttatcccggccgggccagaagccgtgctccttaagctcaaagggaactcccacctcgtcttctcgggctncagcccttctttcgctcgacgcggcggaactcgatcccct

SEQ ID NO: 329343 - DNA, 298 bp, Zea mays
  unsure (1)..(298): unsure at all n locations
cggacgcgtgggcggtaggtcacatgcggtcggatggtgagagcctgagagggggtggcagcacagcaccatggcgcgcgcttcaccgtccgtcccgacgcgtcggtcgagtactcgagtcgtcagcggtcggtcggcactcggcacccgattcttccaaagccgccacttatgtcctcgcgagcttggttaataacgccgcgtgagctgggtgggtggggagtttgtcagctgggtggcgcgagcgtcangcgatggcggaggcgggggaaaaggcgagggtcgtggtggttggcgg

SEQ ID NO: 329344 - DNA, 359 bp, Zea mays
gtgccggactgggagaaattgggagggtttgagtaggccgccaagtgctccttgccacgcagagagagagggcatgtaccactactgttaatcccgccctacaccatctcttggggttcaagcaggggggccacggagcacgaatgaagctcatcaggtctcctctgtgggtccgtacgccgggcggttggccggaatctcatgggatttcttgccggagtatggcggtcgttgtgggattacggtgccatggcggtttgggtctcagaaaacggcttgggatgatcttcggaccctattgatgaggtgcgtgcgcttgattcgaactaaggtcaaccggggatcttggcaattggtcg

SEQ ID NO: 329345 - DNA, 390 bp, Zea mays
aaaaaaaggtcaatatcggttactgtcatggagagaagtgcatactgcagttccctattgattgtatggtacattttctgtaagaccacagagaattgcaggagaatcatggcctcactacagtcctacagtggtgtggcaataataatacatctgggaagtccatgcccagccacaactttcccatattatccaaagaataaacagagctttacggagaaataagaaaaaccaaacaactagaacctcctaatctgcctttgtcaactgcaaaacatgaaaggcgggaactggtctgcagcactagagagtaacaagggtaaagatgacttgcattatataaagtatgaactcttcgacaggggtataaatttcaatggatcttgtgca

SEQ ID NO: 329346 - DNA, 156 bp, Zea mays
aaacccatcaaccatcccaaactctgcttcgtttattgcctttaacgacgactgcaatctcaacttccattacctcaagtccaagctaatctttcctttcatcaccttcaacatcaacgtacatactctatcatttattttttatttattaccaac

SEQ ID NO: 329347 - DNA, 175 bp, Zea mays
cgccagttcagccacgtggagagggcagatcctagaagagccggcgccatgagctcggcggcggggtccaccatctcggccggcgaaaacgtcgcttattccatcgacgcgctctaccgcaaggaccaagccctggctgaactcaagtctgaagtgatggaagcccttcaaaagg

SEQ ID NO: 329348 - DNA, 415 bp, Zea mays
aggcccgagtcgacccacgcgtgcggcgcacgcgtcctgagagactagttaggtatacttcggttgatatctgaagaatgtaatgaactaaaggtgcaaaatgccatgttaacagacaaagtctcaatgatgcaggatacttcaaacaatatcattgaagaaaaacaaactaaaacatccatgcaaacaaagatgagtaccataaatgaggggaacaatgatctagctactgacaacagaggttgttgtctagttaatgaggaaccagacctgcaagtaaaggtccaatcattggaaagcggacttgtcgaagttctagagaaaaatagcatgtatatgacacaggtgaagagccccactacagagcagcaagcttggagtaggaatggagagggggataacgatgacaaaatag

SEQ ID NO: 329349 - DNA, 347 bp, Zea mays
tccgggtcgaccacgcgttcgggcgatgcagcatctacaagactagagattttatcacgtccataaactggaactgcgggtgggttttcgcagaggacatggggctggacctatacgcgtccctcgacatgcgcgccggcagcgccggcgcctgcgtcgacatcaaggagtcttgtgcaaagacaccagaccctgacgtgtgcctactagcgctacatgcggacaacgactccaagacccatcgggacctgtcagatgcggcgctacgcgcagagacgaccgctgtcgaagcggaggtcgactacgctcggaacgagatggacgtggtgaaggacaacgacatgtga

SEQ ID NO: 329350 - DNA, 265 bp, Zea mays
gggtttcaacgctgtttccgtatcatgctaatggtccgctatgaatatctatgcatgcatgggtaccgtttgcggtatttaattattattacttcgtagaccttactatttaaaattcaagcgttctcgttaaagtcctctgtaatcttgcgatggaatatatttgatacattccttttaaaatcattccattgaaatgccattggtcctagcctcaaaccgtgactaccattgtattgaccgaatatatattgaatgcctcttt

SEQ ID NO: 329351 - DNA, 112 bp, Zea mays
gatggattatagatcctgacatatttatcttttattttgcaagacttccgctgtgtaataaggactctgattatattgtgtcatttatctctattcaccttgtgattttatt

SEQ ID NO: 329352 - DNA, 281 bp, Zea mays
ccggaattcccgggtcgacccacgcgttcgccatgaactcgtccttgacacccttccacaagtattagtttgcttgcatgcgctgttgagctgaaattgtaggttccctgcatagtgtacgccaagttcaagtgattagtgtcacggatacagtttactgtgtacaaagagagagagagagagagagaaatacatggcattttctccatgatactataatataatatgatgagatatgcatactggactttattaagcagagtaaggggtattacagtcct

SEQ ID NO: 329353 - DNA, 327 bp, Zea mays
cggaattcccgggtcgacccacgcgttcgaagataaagaagaatgagtgtgccaactaaggattaggcgttatgaattggccaggttgactggaggcctccagcagcttcctcctaccgttgttcagaagcagtagttcatgttttttgtgtgccgagctgatgaatatgtttatgttcgtataaacaggatgaacactagctatgttaaggatttgcttataaaaagttacaccgggtcagatgctgttctgttagcgtacattgtctttaaaaactatttgcattctgtatgacaatgtaaacttgtgaacggtagtagtgcttt

SEQ ID NO: 329354 - DNA, 240 bp, Zea mays
ggagaaccagcatcctccaataagagcttgtcttagaaactaataaaactctcgccggcgtcgtccgagcgaacaatccaaccgtccccgttcccaaggcaatccgacggcgacgtaccaccaccaccgcaggagcgagatggagatgaagaggatcctcttcgtcgtcctcgtcgtcatcgccgtctcgtgcaccgaagtgctggactacaccgaggccgtcatcgaggtcgccccaac

SEQ ID NO: 329355 - DNA, 70 bp, Zea mays
gtctgtatacggatgaacatgtataccttctcaaagggatgctgtattaaaaaaaaaaagggaggagaaa

SEQ ID NO: 329356 - DNA, 318 bp, Zea mays
ctcctccccctccggttcgggttcgggtttgttaggttctccggggttcggtttcgtgggtgagcggatcgagatggcggcgtcggatgttgagtaccgctgcttcgtcggcggcctcgcctgggccacggacgaccactccctccacaacgccttcagcacctacggcgaggtcctcgagtccaagatcatcctcgatcgggagacgcagaggtcccgcggcttcggcttcgtcaccttctccacggaggaggcgatgcggaacgccatcgagggcatgaacggcaaggagctggacggccgcaacatcaccgtcaa

SEQ ID NO: 329357 - DNA, 209 bp, Zea mays
cgttggttgctatttcgtagatccgcgaagtagagagcacggggaagacaaagtaggcctgaccctcagtcagactctccagctttttgacgaaagaccagactagacacctaagacttacatacgcttcatgagtgcgagcgaagtgttatcactcaacgtgccaggcttagaagatcagtagacgcaggactgaaaaatacgcagat

SEQ ID NO: 329358 - DNA, 464 bp, Zea mays
ccggaattcccgggtcgacccacgcgttcgtccacgcgtccgatcagattctgattgtccaaaagttgatgaaagaagacctgttgctcgctccttgggacgtaaaaaagcactggcatcctccaagaagcagagccgaagttcaaagaaaccattatctacttttcactctacacccaagaagaaaatgctggacaatgtgtttatctttaatgagaaatgcacacctaaaacagtggatcagggtgaaacaaataaagcgactgagtcacgtggtagcaggtctcctgattctgccaaaaaaagagtaaacaggaaacagacatacctttctccaactgaggatgaagggattaaaagttctgaaacaagttttgcaaaaggatataaatctcacaaatggccttcagatattgatgttcctgataaatctcctgttgagcatatgggtaggaaatcaaatc

SEQ ID NO: 329359 - DNA, 405 bp, Zea mays
  unsure (1)..(405): unsure at all n locations
cttttgtatgaattcgggtcgacccagcgtcgaccaacagcaagaccgtttgcttggaccgaacctttcttcgacgcaaaaagaaccccacccgcgtaccgtgagccgcgatggcgacggtggcgatggacatctcgaagcccacgccggcagcgtccggtgacgaggcagcggcggcggcgaaggggagagcggcggggtggcgaggggctgcggcagtctacctgcacacatccatgacctgcagctccagatccggcagaagacccataacctcaaccgcctcgaggcccaggcatcgacctcaactccgagttagaatgctcaggaagagttgcagttgcttaagagcctggctcatatgtgtgaggtggtgaagtcatgngaaatcaaagttctggtgag

SEQ ID NO: 329360 - DNA, 418 bp, Zea mays
cccacgcgtccgggaagagtcagcaatggaggcgaggattgcaggagtgcccgaagatgaagagtccggcctcctcccccgcccgtccgcagccggccgacggccgtcctcccgcggcccccgcttcccgcctccaccggcagcctgggcgacggtggacggctccctcgggcttccgctggaggacgcggagggccacgcccgccgcttcttcatgtggggtttcgcgtgcctccccttcctctgggccatcaactgctgctacttctggcccgtcctccgctcgtcggtcgcctcctcgcccgccgccttcgcccccatccgtccctgtgagaccgctaccccttctccccgcttcctcgtctcctctcttccttctcgcgcctgagatctgatctttcgtgatgctagtatgtga

SEQ ID NO: 329361 - DNA, 413 bp, Zea mays
cggacgcgtgggggcaagaccatcaccttggaggtggagagctctgacaccattgacaatgtgaaggccaagatccaggacaaggagggcattcccccagaccagcagcgtctgatctttgctggcaagcagctggaggatggtcgcaccctcgcggactacaacatccagaaggagagtacccttcaccttgttctccgcctcaggggtggtatgcacatctttgtgaagaccctgactggaaaaaccataaccctggaggttgagagctcggacaccatcgacaatgtgaaggcgaagatccaggacaaggagggcatccccccggaccagcagcgtctgatcttcgccggcaaacagctggaggatggccgcaccttagcagactacaacatccaaaaggagagcaccct

SEQ ID NO: 329362 - DNA, 463 bp, Zea mays
  unsure (1)..(463): unsure at all n locations
tcgtgtggacgtgcaagggagcgtgttcgagcttcttacggcgtgtcgcacggtcgaccccgagacccgccgtcaagtctcgtccgagtaccttcatacaccacgcgacggggctgttcacagtatcgactatcatgcgcgcgatcgtgcgcgctccttccaagtctcgcgtcccaccaagtatggctccccatacgtcattccgcgtccgatgttctcgctaccttcatcgatggtggtctatcgatgaactccgcgatgaagagcatcagacagccatcgcactatcgacgagctacgtccttcttcacacgtcaggcatgggcccgcggcataatggacgtccagctgtcccggaagcacgtacataccttctggacacggttagccgtctcacgatccaggtgtaccctangtcgtggacggcagtgatgatgacgttcgacaacgtcggcatgttgag

SEQ ID NO: 329363 - DNA, 282 bp, Zea mays
tgcttgctcgcccgtgtcccgattcccacttacaacatgaaactgatcccatccatcttgatcgctaaacatgatcgagtcaatgaacttgtcgcaatccattgggtctgacttgctttaccaaatcagcatgcagagacttaggcactatacgttatacatcgtataacactatcaaaagtaactgtgtccgggccctaatggtggcgcgttcggctaagcagacatactcagtgctcgaggtgatgcaacttgaccaggtgctaaacccaagatatctga

SEQ ID NO: 329364 - DNA, 283 bp, Zea mays
atccaggaccatgcggccaggctccgtttcgcgctggccacactcggcggcggcactaccgttcgctggtcggcgcggcggaagccgcggctgctcaacgggtaaaggagaaagaggcggaggcgtctgaggccgcgcggggccccgcggacctggaggaccgggtggcgcggctgagggcggaggcggcggcgtggcatgccaaggacgcagcggatcagtccacagccgcggcgctccacgcgcagctgcagaaagcggcggcggcgcatgcgaggggcaa

SEQ ID NO: 329365 - DNA, 81 bp, Zea mays
ccgtccgattcccgtcgaccacgcgtcgtacatattaattcaatatctacttataagcattccgaacctgaaaatcagggg

SEQ ID NO: 329366 - DNA, 437 bp, Zea mays
cagcaatgtcaggtttgctttttttcattctctccacacttcaacttaaatcactaaagttctgttagtggattaaccatgaagaatactatagacatcgaatgaatgtttttattttccatgtcattcaaacttatttcagtgctggagtgttttttccagccaaagtaattatttatccttgaatgtagtgttatctgctgtcagtggcttgaaagttgggctaccaaatacctcacaaggtgatttctttggggttaaaatttctcgtatcttatagcatggagtttatttttaataaattatggcttactttgtgttttcattaaacgttctttgcagatgctgttgtgatgatttcaattgcacttcttgtagtattgtttagtgtacagaggtatgccactagcaaagtggggtttgcaattggcccttct

SEQ ID NO: 329367 - DNA, 466 bp, Zea mays
  unsure (1)..(466): unsure at all n locations
cggttctcggaattttcccgggtcgatcccacgtccgtccgtcttcnntgaaatcagtagcagaaaagtatccatctcaaactttcttcaccnnntcgcaatgggagaaagggatgganntgactttcattannacgctgnnttcaagaatgggtganntgaggagaaacacatgtcccatggtaataccaatacgtatcatgtgttgcatcctctagtgtctgcatcctccccatatnctgtatgatgctcgttgaagaaagcaccnngttgcagaagaatgccagaataccaaagttattagtcattctgtactttactgcaatggttaccaagaactctgttgctgagggtactctcccagctttaaaactgaatattaagagagattcattccagaaaagacacnaatctgcaaagaaactaaggtctcagatgaaattcaggaaagtcaaaagggtctcat

SEQ ID NO: 329368 - DNA, 436 bp, Zea mays
atgtaatgctttaatttactgcattctacgtcgttttttcccttcttcttctatgtgtttctttttatgtggcagcaatagtattattcaatctcttatgagctgcagctacgtacaaaaagaaacaaatagaagaagaagggaaaaaacgcgacaagaacctgggccccgaggcctcccgcccagggaaacccgccaacgactacacccgcggctgcaacccgatcaccggctgtcgcggctgatcatatctctctggtcgatgtgcgcgcaatgtcaatgtcgcacgcgcgtgcaggtaccaggcctcagcgtgtggtgccgcgtgtgtgtatatattacacacatgcattatacattggtcgtcgatcgttactgtatgcatggcaactgatgcttcttgcctcgcatatctgacgtgtatactgatgtatgt

SEQ ID NO: 329369 - DNA, 149 bp, Zea mays
  unsure (1)..(149): unsure at all n locations
ccggtttcggaattcccgggttcgacccacgcgntccgcaattccagnccgcaagtggtccgtttagtatgnttgtgcattacgtgaaagggaaaaatccctgataccagagccaatctactgggtctctttagttcagattttattat

SEQ ID NO: 329370 - DNA, 167 bp, Zea mays
aacatacataccaagcgatacgccatcatgcatcaagaccagcccaggtatatgagtgcatcccagatcctatgaaactagcgtcaacaacgagcccacaacgacagaaccaatcgttaggtactttcgcaagacactgaaaagagggaacattccgacagtgaaca

SEQ ID NO: 329371 - DNA, 159 bp, Zea mays
cgacccacgcgtacgtcaaccttaacgcgcccaccgacttttgttatacaacaacaacgtccacctaaggaggtagggcaacatcatcatcacggactaaaacatcgagaccaccgacgacactatctatcattgtctcccatccaacctcactcttcg

SEQ ID NO: 329372 - DNA, 315 bp, Zea mays
gaattcccgggtcgacccacgccttccaaccggttgaagatggcaccggttgcctttattccttaaaagcgctggagagtttaaaggattggtccaaggcctctggcacgcttgccgtataattcacctgcgcaagttttgggcgctttagaaaagccagcgcgtgcccctggtgtgggaaagttttaaaatgtggtaaagttcacatttagagaggtcgacacatctacgggagactctgatgatgatggtgaggatgaataccacctgttagaggtcttaaaagtttgatcagctgattatctgctgagggtt

SEQ ID NO: 329373 - DNA, 276 bp, Zea mays
ttcataccacccacgccataactctagaatcgctttttcaaaccaaccgaccgattaacccaccacctcctcacctcatcttcgctctcttcctcgtacaaagccttgtcctttcatcttgagtcattggactcactttcacgcatccatgaacggcatcaaccccaacctcggattcctgtcgtactgcaacatgtatagctactcgatgtgcatggccaccgtcatatcgtctatcttcttctcgttcctcgaacgctactccttcatccacct

SEQ ID NO: 329374 - DNA, 227 bp, Zea mays
cccgggtcgacccactcgttcggaagtcatgccctttctgatcccttcttctctttgacctcgcttggcatgaacttaggggggtcatgctgaatatccataaccaacagacgttatcttcttcaccacacgtgtgcgatctcgaaattgccagagacatcaaaggaaaacatgaatatgttgatcttgaatcctaccagcagcttcagaatgccaagagcaggtca

SEQ ID NO: 329375 - DNA, 194 bp, Zea mays
  unsure (1)..(194): unsure at all n locations
tttttntttnaggaagggtttttttttatcccccctttcttacaaagggggcttccatgacccaccatataactgggaagcataactttcccttgattgaagtgaaattagtaaaaaattaaaattaaccctttgtgcgattacttcatgtttacccatggaacataaatttcatgataccttctttttttttg

SEQ ID NO: 329376 - DNA, 284 bp, Zea mays
tatggatcttgattctagccgccaccgctgatcatctgacatacgtcgagaagacgcctgctcctcgactatcgatacgaaggcgtctactacgaccttcacacacgtcgacagcctcaaataacctagaggctgaccctgacggcaaaacctattgcgccaggtgactacattactaaagatgacatctaggtctcggtctgggtaccatcaaaacctgactctgaggttacatatatgccataccgatggtacgagaccgtctctgacgatgtagcctcaag

SEQ ID NO: 329377 - DNA, 313 bp, Zea mays
ctcactgacgcgcgctcgacgcgggtttctgtctgcgccgacttgctccgagctacggaagacgagctctaggtgatgtacgaggtgctgaagcagccgaccgacggcgccacggccgacaccctcggctcgtccttcgcgatcaatgtcgtacctgctcgtacgacctcgtagcgccgtcatagactgtccgatcggacagagcagctactagcagccgtatgccgacggcgacacctaggaggaagacgatgaggagtggaagctcatgcgcatgctcaccgaatgacgacgtgatcaagagctatccgct

SEQ ID NO: 329378 - DNA, 160 bp, Zea mays
gtcctgggtcgcatttatcaaggataagttccaccacattttgttgctcttttccagcgatgggtattcttaaaggtggtacccacttttggtattaaaaattttttgaaaaaaaaggtcctgaagaataaacattttggtcttattgccttggttttat

SEQ ID NO: 329379 - DNA, 379 bp, Zea mays
accggttccgaattcccggtcgacccactcgtccgcttttttttttttttttttttttttttttttttttttttttttttttttttttagttggtttttttttatttatttttttttaaaaaatatttttatttttttttttttttttaaaaattttttatatttcttttttttctctggaaaaaaaaaaaaataattttaaaaagcgcttcacaaaacaaaatgtaaaaaaaaaaaaaccttatttaagaaaacccttgaacacccaccattggtacatcaaaaaaaaaaaaattttttacgacccccccttaataaaaaaatttatttttaaaaaataatccccccctttttaaatattttaaaaaaaaaaaaatat

SEQ ID NO: 329380 - DNA, 176 bp, Zea mays
cccacgcgtccgcagcatggtcgccgtcgtcctggctgccatcgccacaataccgctgggggaggaagccattccggggccactgccggaccattgaaccaccgcaaaaaattccaaggccacattggacgccaaaacccggaaggctttcaacggcttgttggccgccgttccgg

SEQ ID NO: 329381 - DNA, 141 bp, Zea mays
  unsure (1)..(141): unsure at all n locations
tcgcggactcgtgggcggactcgtgggttctgtgccaacgttgtacntgatagcaacggtgtggttcttttacctacgcgtggtgctacacaaaatacataccatccacattaacgacatcaaccactgctggaacaacct

SEQ ID NO: 329382 - DNA, 302 bp, Zea mays
gctctctacaaggaggcggcttgcgcggggggcatcgtgcaatggcgcggcggtgcccgtgcaggctgctgctagccgtggcggcggcggccgtgctcgtggccgcggcagcgcaggcgcaggagacgtgctcggggaccgtccccgcgccgccgcgccgcggggcgcgggtgtccgtggccagcttcggcggcgcgggcgacggacggacgctcaacacggcggcgttcgcgcgcgccgtcgccagcatcgagcgccgcgccgcgccgggcggggcggagctctacgtgccgcccggggtg

SEQ ID NO: 329383 - DNA, 298 bp, Zea mays
ttactagtccagaggtgggctggcttctcctcggcctcttaccaagtcctcttcgggttagggttacttagggttttgtggaggggcgatggcggcggctgatgtggagtaccgttgcttcgtcggcgggcttgcctgggccaccagcaacgagtcgctggagaatgccttcgcctcctacggcgagatcctcgactccaaggtcatcaccgaccgggagacggggaggtctcgcggcttcggcttcgttaccttctcctccgagaactccatgctcgacgctatcgagaacatgaac

SEQ ID NO: 329384 - DNA, 391 bp, Zea mays
cggacgcgtgggtttttctaaaattggatcttcgatgctatttttcaaatggtatagagctaattttcccaactcagaactgaagcacgcttctacttcctttctcggctctcacaaccatttcccctcccctcgcttccaactattggaactgaagcatataggctctgaggagaagcaagactgaataaggtcaatatcttgggctaacaaggctgctattgttggctctgaggagaagcatcatattctcccatgattactcttggtgggttgtctgcatctcattttgctctgagaaagaaaattttctctctggttcacttgaccgtactgttctcttatgggatcaacgggctgaaaaatcacaggtttgaccatataatatata

SEQ ID NO: 329385 - DNA, 292 bp, Zea mays
gcggcgagcgaattagaagatgctggacaagctgtgggacgacgtggtggccgggcctcgcccggagacgggcctcgagaagctccgcaaggccaccaccgcccgcccgctcgtcatcaacaaagacgcggacggcggcagctacaagcgggcgcagtcgatgccgtcgaccccgacgacgccggtgacgccgtcgtcgtcgtcgtcgtcgacgacgccgcgcggcgccggcaacgtgtggcgcagcgtcttccacccggggagcaacctggccaccaagggcatgggcgcc

SEQ ID NO: 329386 - DNA, 376 bp, Zea mays
gctctaccggctcgattcccggtcgaccacgcgtccgcaaaatacgtctgcgaatgcaggagccatgtcctcgcggactcctgcacacacggctacggctattgcgtcaacgacttatgccagcggcacatcctgccgctctgccaagaggtcgactggctcaaacatcacaaccacctcttgaaactaatgtatggacactactacgacatcgtcttgcaagtcgacaagtacccgtacagattacaactgcgtgacctgctgatacaatgacgtgaacaagatgaccatccataccatatgcacaggccgcaccatcgatatgttaaactatggtgcaaaccgagcgtcctgctcagatatcacgtgctacaca

SEQ ID NO: 329387 - DNA, 267 bp, Zea mays
  unsure (1)..(267): unsure at all n locations
cggaanacccgggncgacccacgcgtgcgaaccactcgcatctgaggggaagaagtgcacggggactccgattggacaacatggtcttcgcctcgccattagcaatgtcttcccctctgctgctgctcatggaggcggagctggagaaggcacgaggcgaaaccagggagctggaggaggagcggcgcctcatgaccaaacgcctggaccgcttcctgcggaggctggccgaggagaaagcggcgtggaagtcccgggtccgggaca

SEQ ID NO: 329388 - DNA, 205 bp, Zea mays
  unsure (1)..(205): unsure at all n locations
ccgggccggaanncccggggcgacccacgcggccgcatcgatcacgacaagatggcgtgcacagacaatgcgatgagagccttgttcctgctggtgctcttctgcatcgggcatggtgagaaggaagagtcaaagggcatcgatgcgaaaacgtccgggcctggtgggtccttcgacatcaccaagatgggcgcctccggcaatg

SEQ ID NO: 329389 - DNA, 312 bp, Zea mays
gctctcttgaatggttagtggcccatgtatttattgattgtttgcttgtacatatatgctccggcatccggaccttagtatggcctaatcctcactatgtatcatacataggaagtgaatgggagccaatataattttgctctagacaattttagcttgctttctgaacccttaggtaagccttcaagatagtgaaaatgttaagtgagtagcttacgagctaaataatggctagatattctcggtaaaaaaaaaaaaaaaaaaaaaaaaacaaacaaaaaaaaaaataaagaaaaaaaaaaaatgacattt

SEQ ID NO: 329390 - DNA, 325 bp, Zea mays
cttgctcaaaaaaaaaaaaaaattaatatttaaaaaaaaaacaaaaaaaaaacacggaaggggccaaaaaacaacgtaccgagagccgacaaatggcaacggaggcaaaagaacatctggaaggccacgccggcaacgtactgtgacgaggcatcggcggccgcgaatgggatgagctgctgctggggcgaagtactttggccgtactacctgtaatacatccatgacctgcagctacagatccggcagaagacccataacctcaaccgactcgaggtccaccttaacgacctgaacttcagagttagaatgctcagggatgatt

SEQ ID NO: 329391 - DNA, 431 bp, Zea mays
  unsure (1)..(431): unsure at all n locations
agatacaaggcatatttttgtggatatcggtctaggttttcatgtggaatttacttggcaagaagctttacagttcatatctgtaagagaggcaaggttgactaggcaaatagacgaatacacacatctcatcgcaagcataaaagcacagatcaagttggtatgtgaaggtatccgcgaagtgctgcagctgcctgcggagaaagagttatcgcccaggaatacgtggtagaatttggttctcaatggagcagggggtggtgttctgtaaacgtggttccgtttcaactcttgcagttgaaattattgtggtgccgacagtattttagagcagagaatgacgttccccttcgtataacaatctcttcgacgacaccacgtacaactcatactgatttctatgntttcattatgttttcatactgatttgc

SEQ ID NO: 329392 - DNA, 396 bp, Zea mays
cgcaactgcttcctcttgctctgcctgctccgccaatgcccggcatgggtggccctccacctccgatgggcggaatgggcatgcctccgatgggcgggatgggcatgccgccgatgggccctggtccgatgccagcattcgggatgccaccaatgggaagctactgagatgagatgtttttttgttgttgttgcagagagcttagatgatgatttgatatgttcctgtgtaagcagaggcggaaacctcattggagttgtagatggttacattttggaattaatattctttatggtaccaggaaatttttggcgagtgaatgattaggttggttgagcatgagctggtgaaagcttgtaccatttgtatagtgtgatgaaatctttgtagacattt

SEQ ID NO: 329393 - DNA, 425 bp, Zea mays
gcgccgggtcaggggaggggcggtggatcagatcagcagccgcacgagcattgagcgagatggcttctatgtaggatgcaactggacatcgccgtccactcgtctagctattgatgctgaagtcccgatgcttcatgccaccgcgatggtggctggttgatctccgatatcaagaggagggaagaggcactgaagaatggtgcagatccacatttgtttttgcataattgctgccttagctccaccaattgtatttcatgggaaatcattaacgtaagtttgccactccttttatctaaagtaatcaaagtcattagttattatgggcttgggtaatgtgagtaagcaccattgcatagatagccagtgatgttggctgctggaaaaggagaaatcaatgaattatagattgggatcacagaact

SEQ ID NO: 329394 - DNA, 308 bp, Zea mays
aaaaaaaaaaaaaaaaaaaaaaatttttttaaaacatactaaaaaacataaaagcaggggataaatacaaaaaaaataccgatataacgaaaacacaaatcaatacgactactgcataaaaaaaaaactgatgtgaggacacgcacattattacaaatcgggggcggctgttttaaaagaatacagttttttttccattagctgaaactcaaaaattctttttttagcacgacaaacttatactgttttcgccgacttttctaatcacaggtttttaaaaactgtttatttccctaaatttttaccgt

SEQ ID NO: 329395 - DNA, 351 bp, Zea mays
  unsure (1)..(351): unsure at all n locations
cggacgcgtgggcgagtagcactttcatatcctgggttcgattcctatcgaaagcgaattttcaggcttggttaaaaaaatcccctcgttgtgccccatccgctcttgggttgcgatgttctgtgcgccaccgagagggcggtcattcctccccggccaagtttttctataaagtaacangaaaaaaaaaaaattttattaaaaaattaacaaagaaaaaaaaggaaaagaactaaatgttgttaaagaaataaaaccaacttttacaaaagttcaaaacttttacttatggggcggccgttttaaagaatccaagtttacgtacccgggcatgcaacgtcataccttttt

SEQ ID NO: 329396 - DNA, 395 bp, Zea mays
  unsure (1)..(395): unsure at all n locations
gattccgctctagcgaacgggacgacctttgtgcttggaagggtcatcctaaacatgagtccccagcggaacaactgcttcaagcgctttgttatcaacaacctgtacaggttcctgcagaagaacttcaggtccaacatttccagtctgaagatagctcctagcaaaaccttgcacgttggaatgcaatatgagatttgagtagaggagccttgcaagatatgatggacgtgagattctagaacatgcagacgtgggtagtttagaattagatgttttttgttttgtttttgaaactagcgatctgtttgtaattaggtcagcctcgccatacaaagctaccatggtcataactttggaactatntatttgagtgtggtctttgttgcacaatt

SEQ ID NO: 329397 - DNA, 449 bp, Zea mays
cataaatcatagagggtagaaggttgcttatggttcattagtgagttgacttattgtttgttttgctagatggttttcaccgtaatcaataatatggtgttagagcattctaaatttcaagaacatagtaattgtagaagctaaaaaaatagaagtaactaggagctaagttaaaattattgctctctagacctgcatgtccaattttaattatgcagtgaagtaaattatgttttctgtaaaagtgttatatagaaaagttatagctaactcctttatcttgcttgtgctaaaatttcatgaccataggtctgtagtttaaaagttatgattttctcaagtccagtcttggaatctgtttagattttgtacatatttcgaaactgactttgtttgttcaatttaaacatagaatcagttcttataaattataagaagttgtatgtaac

SEQ ID NO: 329398 - DNA, 325 bp, Zea mays
cgcgagcccttttttttttttttttctcaagaatatcagcagcaatgtaaccatatacgtagaagcactatatatggttcccacacgcatatattattattactgttcacatcgccgcagttatatataaaaacattactatctactagtgctttattccacataatactagtgctagtatcgcatcatgccctaacttttctttgccaaacattattgtttgcctcctggtcgtggtcctgggttggctccttgatgcgcatccatctactagtatactggaaaactggccactacaagggccgatgctgctcatggaagtata

SEQ ID NO: 329399 - DNA, 287 bp, Zea mays
cctacgcgtctgatcaaggcctccgctaggagcacgatgacggggtccgagatcacactcgatgtgatcgtggactgtgcgagcgtgcggtttcatacaggattggaacggacaggcttgacgcgcgggagcatatctagtcgtgcaggccggcgcgaggctacgagcatcatggagtttctgtggaccatgataacgtgatgcatcgtataagaggacgaggacaggacgtcctgacaggacctgcggatcccatgattctcggaagaggcaccctgaatcgaagc

SEQ ID NO: 329400 - DNA, 339 bp, Zea mays
aaaaaaaaaaaaaaaaaaaaaaaaaaaaataatttaaaaaaaaaaaaaaaaaaaaaaaaaggagggaaaaaaaaaaaaaaaaaaataaaaaaaaaaaaaaaaaaaataaaaaaaaaaaaaaaaaattaaaaaaaaaaagaagacccttataaacactaccatttacattgagagtatttctacacaatcaattttttatacggacgcactatttaaatatgtagccctaatataatcaactactcattatgaaaaatccaccatttaaactaataattttgctggaaaccttacaacttttaaactttcggtcgtttttaaaaattctgcgaacatata

SEQ ID NO: 329401 - DNA, 325 bp, Zea mays
gaggaattcattacagtcggccgccttttctttctccctcacgtcatctggtcaactgggcggtgcctccatacgcactagcgagctgcctcgacctaatcactggtgccttacctgttgcagctattgcgatggcaaagatggacaagctttccaatgcaagggttaaaacagctggatcaatggctgcctggacagcacacacttctctacatgtggataccagcggcacatatgttgacaaattaccttaacccacgtaacactaaacggctgtcagctttcagcatgtcgattgcaatgctagccaacggacatatgattt

SEQ ID NO: 329402 - DNA, 354 bp, Zea mays
cgggagcacagagctagctagccagccagccagcagccagcttgctcgccgcgcccgtgcttgttcctcgcctccgttccgttccgttccgtcccgcccgccgccgccgtcgcattcagggatggagatgaagaagatcgcctgcgccgtcctcgtcgccgcctcggcggccaccgtggcgctcgccgcggaggctccggctccgggccccaccagcggctcctccgtcgtcgcgcccgccgtcggcgccgacctcgaggccgccgtcgcctacttcttcggctactacattcagtgagccggccgcggccggtcgccccgaggccgaggaagagacgaagcgggagagagagt

SEQ ID NO: 329403 - DNA, 300 bp, Zea mays
ggctggcggctagcctctaaccaatacattaaaataaaaccaactctcccattcggccagttcccatcccatctcgccttcgcttcccaccacgcccctccgtcccgcctcgccgcggcaaggcaccgacgccaaccgccctctccctcttcgactcgaccgcgtgagtgagagacgaccgcgcgcgcccctcgcccgcccgcccgccaggagatcgacccctgaacgcgtcatgacgtacgtgctggtgaccggcggcgtcgtgaagcggctctggaagggcgtgactgtcagcagcgt

SEQ ID NO: 329404 - DNA, 89 bp, Zea mays
aaaaaaaaaaaaaaaaaaaaaaaaaaaataaaaaaaaaaaaaaaaaaaaaaaaaaaaaaggaaaaaaaaaaaaaaaaaaaaaaaaaaaa

SEQ ID NO: 329405 - DNA, 110 bp, Zea mays
aataaagagtaaatgagcatggtggatgtgtttatactagtcatcagcggatcttgtaggggggggctttctgagataatggcaaggtatttctactttttttgctttat

SEQ ID NO: 329406 - DNA, 428 bp, Zea mays
  unsure (1)..(428): unsure at all n locations
ctcggaggcagcgacgcgcgggtggaggagctcagtgacagcgccagtgcctatcgagctagcgaatcgaggagattttccccactgtttctttcctgctgattccgatttcacgttgaaacaccggggggagaagaattgcgggcgaccataactcggcaagaagcggctccaaaaagggcatctacctttgccgattccggcaccgatggataccgcggcgtcggggaggttcgacaagctccagagctcgttcaagctctccatccagtgcctcctcacggcctgctcccgcgaggatgtcaatgacgctttctcgtccttcactgatgctgagaaggagcgtttgcaccggatgctcacccttgtgatgaagaatctgcatgccaacgtantggatgagtttgacgactttctgccagaaacac

SEQ ID NO: 329407 - DNA, 61 bp, Zea mays
aaaaaacaacacaaaaaaaaataaaaaataaaaaaaaaaaaacacaaaaaaaaaacaaaag

SEQ ID NO: 329408 - DNA, 234 bp, Zea mays
caaaaaattatggcctggcttagatgattgcgagatgttaggacatgccttgagtttcagatagagaccaacctgtggtgccttccgcatctaagggatagccaagaacccgcaaattctgtagcattcttccagctttgaggcaggtagttcttagtggaggatcatgtgaccagctatggattcagtagtacaatgaagatggccaatggatgaaaattgtttcgcgagaaa

SEQ ID NO: 329409 - DNA, 254 bp, Zea mays
attgcaccgacggcgaccgcccccaattttcttctaacccttcggcttcaattaagtcggcggggtcccaggttccttggcctgggtaaccattattttattaagccttgtgcccaaattggacgcaaggacttccgggcggaattccttgagccgagccaatttggataccggttggccacatagatatccgaggacaccacacccaaggggccgagccaaagtgatacggagacaaatctcccgccggtgtt

SEQ ID NO: 329410 - DNA, 424 bp, Zea mays
cccacacgtccgcgctggagaatgccttcgcctcctacggcgagatcctcgactccaaggtcatcaccgaccgggagacggggaggtctcgcggcttcggcttcgttaccttctcctccgagaactccatgctcgacgctatcgagaacatgaacggcaaggagctcgacggccgtaacatcaccgttaaccaggcccagtcccgtggcggtggcggtggcggcggtggctacggcggcggtcgcggcggcggcggctatggtggcgggcgccgtgacggcggttatggcggcagtggcggctacggcggtcggcgcgagggtggtggcggcggctacggaggcggtggcggctacggcggtcggcgcgagggtggtggtggcggctacggcggcggcggcggcggctggagggactgatgtgt

SEQ ID NO: 329411 - DNA, 310 bp, Zea mays
aaaaaaaaaaaaaaataaaaaaaatttattataaaaaaaaaaaaaaaaaaataaaaaagcaaggaaaaaaaaaaaaaaaaaaaaaaaaaaaataaaaaaaaaaaaaataaaaaaaaaacaacaaaaaaaacgggcagtcccaaaacatttcacccaactttaacaaagaattcttttaactctaaacttacatattattgaaaaccaaattaaattcattcccataacaaaaataacagatatacatacaaaaactctaacaaaccccactttaataacattgactcattcaggaacattcccattttta

SEQ ID NO: 329412 - DNA, 186 bp, Zea mays
catgcactttcaccattcacatatttcatttacaccaatcatcttcacaaaagagcgcatgatcctataaactttgccctggaaaacactcttattattaaacctcttactcatactcatagcactatctactttcaccaataaatccaacacatcccatttctaaccttctcaacacactcaaat

SEQ ID NO: 329413 - DNA, 435 bp, Zea mays
ggaagatcggtgtcctgaagcccgttttcacgatctggtctggttgctgagaggtatattgatatcaaatacaggtggttttatgatatcaatggggcattttgaagctgaaaactctgctaacctacttacctgcaactaacaaaaggtcacctatatatcaggaaaaaagaaagcaaagcctgtagtgtgtcgctaatctataccatggagcaaaaggacattgcagtatgcctgccacttaattgtgctgcgtataaactatccaacgtattaggtcgtgctgtaaacaatgtagaactgtacctgctggacggttaccatgtatataaagatgaagtgtttaactgatgtgaagattgatggatatagtacgtcctctctttgccataagcgtgttgcaaatagtgcttttgcaatatatcccaatggaca

SEQ ID NO: 329414 - DNA, 346 bp, Zea mays
cccacgcgtccgcccacgcgtccgcccattcgttcggatggcggcgtcatcgtcaaccggcacgtaaaccaactcgatcgatcgcgtgcgactgcgagccgtccgtccgtcatggcggacgtgctggtgggctccgagcgccgtgtcctcatcagcggctacgggtacggactttccccgcagcccccgcccccgccgtcgccggcagagagccagctgctcggtcgcctcgatcacatcgatctacggctgcggcagctggaggagcagcatcagcgccgtccgttgcacgccgacccggtcccggtcacggccctacgagcgccggcggcgcaggaccagcaca

SEQ ID NO: 329415 - DNA, 58 bp, Zea mays
gtggactgtagagagcacacgatttacatgtacagaaccgttgcttcctgattgcttt

SEQ ID NO: 329416 - DNA, 370 bp, Zea mays
gatgcggtaaaagcgaaagaagaatccgatccgcttctccacgccgaacccggtaaggccgccgccgcttctcgaatggcctcaacctcctcctcctcgcctcagccgccgccggcggcggcggcagcgtcgcccggggcagcttcctcgcccgaggatcgccgcgcaggtggaggccgcggcggcccgcccccggtcccgccctatgtcaaggcggcggcggggtccctgggcggcgtcatggaggcgtgctgcctgcagccgatcgacgtcgtcaagacgcggctgcagctcgaccgcacggtggcctaccggggcatcgcgcactgcggcgccaccgtggcccgcgccgagggcgtgcgcgcgctct

SEQ ID NO: 329417 - DNA, 234 bp, Zea mays
  unsure (1)..(234): unsure at all n locations
ttccggtcgacccacgcgttcgcgacgctggggttctagatccgngcttctttcgcgactagaaccacctatctgggaatcgntgcatctttcttggaatcgtcctggtgtacggtgaaccgaacaaccctgaaaaagatcatgtctacaaaaaaattgattatactcggagtttgaatatccatgatagcagcaaatctattaagggtgtacctcttcctagaatttcgtctg

SEQ ID NO: 329418 - DNA, 265 bp, Zea mays
cgaaccttctaataagtgggccactcttcctcacatcgcctccctcgacgatggccggcgccaccgccgtcgccgccacggcgtcggcttcgcgtcttctccggaggtctatatcctctgcattcctcgcgaggcgcgcggtccctaacattccgggtacaactctctggtattccttcttcgcattccgcagacttaaaccaacgccggccctgtcttcgcctgacaccttcggcaatgattgaagccgccggattaggtggga

SEQ ID NO: 329419 - DNA, 359 bp, Zea mays
gacgcatgcgtccggaccatatcttggagccgcaggcgtcatttaataggaagggagggagagacaaacgggcgggttacccgagagagagaaagaggagctcatgccctatccgctgattaccgcccaggggagttccctcctagagagagaaccaaggtgttggccgccttcgtcgtgcaccttcggcgtttcccggactcgtacagtccgtgtgccgagcccaacatggagcgctgaacatgctcgttgcgtcatcgtgcgactggaactctactcgttgtcgaagacaatccctgaatttgtcatggggatccagcttaaaaacctttccactcccccaggacattacctgcgtt

SEQ ID NO: 329420 - DNA, 370 bp, Zea mays
  unsure (1)..(370): unsure at all n locations
taccatatcttggagccgtaggcgccattaagaggaagggagggagagagaaacgcgcggtcacccgtgagagagaaagaggagctcgtgccctagccgctgcagtaccgcccaggggagttccgtcgtagagagagaaccagggtgttggccgccgtcgtcgtgcacctgcggcgttccccggactcgtacggtccgtgtgcggtgcccgccatggagcgctgagcatgctcgttgcgtcatcgtgcgactggaactcgactcgttgccgaggacaatccgtcaattcgtcgtggggatcgagcttagaagcctcgccgcgccccgaggacattnacctggttctctctgtgaaaggttggccgatcga

SEQ ID NO: 329421 - DNA, 325 bp, Zea mays
gaccatagaggtcagcatgggctcgacgcatggtcaggtggaacataggcataagattgccaagatgaaagacgggtacagcaatgcgcctgacttggaggacctgttcttaatgctcaatgtgggttcagcttgcacttggacactgtacaccagggtccggatacagtacgaagctcacatccgctatgactccacatgtagccgataacagtatctggatcatgatagccgctccgacttccatgactaccataactacgtgatgaatacaaagatatggtgatactgctaagcatgaggacacatggactggccagtccac

SEQ ID NO: 329422 - DNA, 299 bp, Zea mays
ccgacgcaatcgcctccaacgcctgtttttagtcagctcaccatcaacacctataggggggcaccaccggctccagtgagctcaccaccttctatggcgcaatgacctccaccacctgctccagtcagctcactatcagcacctgagacatcacctccttcagcgcctccagttagctcagcaccacctgctgtgaaatactcttgaccacctactacaggcaactaaccgtcaccacctgataaagtacctcctgcactagcttcaatggttttaccatcgtgtaccatgaaataccc

SEQ ID NO: 329423 - DNA, 432 bp, Zea mays
ccaccaccgcccatggaagaagaactggtgtagccgcaactcgccgccatgggactcgtcgggtccagggccgccaagacaccacgctcggacttcgtatctgaactgcactcggttaaggttctacgatcccacctggctggcgtacttctccctcgaccgatcccctcaagcagcatgctgtcgttctccccaacaccatcgcgctcaccttgtcatggtctcacgctccctggttgacgcctcctgccgcatctccctggagtgtgcgcaccgcctatgctggtcaggttgtgagtccccgcgtcgaagcacacgtcctctccgctccacgtccacagtccagcggtgcttggccacgttctcttcctgctgatgctcgcgcacgacggatgttcgacggtttgcgcagccaagtctatgtgccatcat

SEQ ID NO: 329424 - DNA, 291 bp, Zea mays
tcgaggtttgctggctaccttcctcctcatcttattaagtgcggagaatgaatatttagccaggggaggtttaaaccatgaatgggacgttactgattgtgaatgctttgactgcatcctgtagcaacctgatagctcttggccattaggcgccatacccatcatatggcaatacatactgatttgagttccaaaatgcacttgaaaaacttacaagctacatattctacaagagctatcatatgatagattatgatctaccacaacgaatcattgcatacttctataaag

SEQ ID NO: 329425 - DNA, 397 bp, Zea mays
ctctaatcaattcttagagttgtatactcattggcctagatgctcatttgaaactgccagctataacttacaatatccaatacatgtaagaaaaggcaagtattggatattgtaagttatagctggcagtttcaaatacttgccttttcttacatgtatttttcttacaggtcttcattgaagtagcccttctaactgatgtgtcactcttgatcaacaagattttgaatgcttttgtaacttgtttcaaaccatgcttgttcctttgatagccattagtcaagatgtatccttaatgggagtgaatagacccactcatcttataacctacaaactcttttggagcagagcgctccagtattatcgcggagctgaagcacttgagtgataatatttt

SEQ ID NO: 329426 - DNA, 374 bp, Zea mays
ccggttcggaattcggctcgacccacgcgttcgaccacgctatcaagcccacatggactcggggatcacccggagtggctgcggtcccggtgccgccacggtacagacctgtggctctgtgccgacgtttgggacaggctccggcgaggtgctagacttcgacgcacaccaccggttcaccatctacatcaccgacagcgatggggaactgcagcacataccggcgtgctctatcaacatcagtgagtacacgccgcgtgaggaccctatgctatggcgccggttctaccgcaacatgctaatgcataaggagcaccactggtctggcatggactagcaattccggtgcctcattacagcaccttctggggaca

SEQ ID NO: 329427 - DNA, 196 bp, Zea mays
caaggggtcccatggccacacggcgtcactcatggtatgaacgtcaaccgtcgcagtcattagcggcatcctaacaacaacgacccatggcgtatcatgcatcgaactgccaagtggcagcacccaaggggttgcactcaagtgagacttgcgatgcccttctagactcctcgcaatcgatctgagccgcatctct

SEQ ID NO: 329428 - DNA, 268 bp, Zea mays
cagaacgccacaattaatgacacatcctttcgcgaccatgtgctcaatcatatagtgggggcatgatcgcgggctccatccttgatactctcatcgccgccctttcctacatgcccccgaaagtaccacccttcacaaaacatcaccaccaacaacaacggcaagtatctcaccactaagcccaccatgaaccgtcagactaaccataccgtcgctcttgacaaccaccctcacctgggtatcaagaacgggaacctgccaccctaca

SEQ ID NO: 329429 - DNA, 256 bp, Zea mays
accggttggattcccgggtcgatcacgcgtccgcttttattaaataaaaaataaatggatattaggagtgtgacaaacaacaatacaatatgtgtgttgattgtggtatagagcaatatataatgatacactggcaagtggtacaacgggtgagtgaatgggtaaaccatgtggtagattaaactgtatcgcctggcattacatatgactttcgctagatagggtggtaattaagagggatgttaagattgaagtt

SEQ ID NO: 329430 - DNA, 115 bp, Zea mays
agtagaggtcctggagagggtcacaactatagtctcatatattgtttattgaggatgccatcgccttggtttgagatctgtaagcagttcttttatccacaaacaagttggtact

SEQ ID NO: 329431 - DNA, 178 bp, Zea mays
cagacgcgtgggcatttgtgtttttgttttaaaaacttgtggttaaaccactgtgctcgtaaatatatgaggtacttttgtcccttaatcatttcaccccaatataccatggccagaatgttctttgaacataacttgtttcttgggtggcatgggtttacaaaatttccatagcaaa

SEQ ID NO: 329432 - DNA, 70 bp, Zea mays
aaaaaaaaaaaaaaaaaaaaaaaaaaaattaaaaaaaaaaaaaaaaaaaaaaaaaaaaagagaaaaaagg

SEQ ID NO: 329433 - DNA, 278 bp, Zea mays
  unsure (1)..(278): unsure at all n locations
accggtctcggacattcccgcggtcgactccacgtcgtcgcgtggaaaagcaatttagcaagagacagctatgctgtatgacgataccccttggactgtgagtcgagtggatgtagcttctnnttactgtctggacacgttcacaggtgatcgaacgaaggcttgatcgattgcagtggacctgtacaagcagtgcttaagggaacccagtcattccagatgcttttcaggtnnagggcagcatttctggcacttgtcacaggtgatcgtataaagaa

SEQ ID NO: 329434 - DNA, 353 bp, Zea mays
aattcccgggtcgacccacgcgtgcgctgacgcgtgggatctgatccttttattttaccagcagctacaccaccggcgacgttcagccccatcatcttaatcacgaaggatatttcaaaagcagcagtagcttagacaaattagatatgccttttaagattctagttgatatgcatgcattatttagttcacatcgaatgcagcagtgtgttaactatgtagttgcatacctatcatatctaagtatattagacgtctttctaataattatttaggatctgtcatcaataaaaatgttgcaacaattaataataaaattataaagggctgccgctctaaaggatccaagctta

SEQ ID NO: 329435 - DNA, 315 bp, Zea mays
cgacgcgtacgcgaacacgtcatcgatttgatcttagactatgtctacgtctattgcggcgccttcttcggcgtcgggatgcgcccatcgaagtggacgcagacggtcaagaagacgtacaacctgctgcacaccacgagccagcacaccgatccaggtgtacacggggacattgacgacaatcatgctcacgttcgactactccggcatgtggaacgtgcattacaacatctagctgcggtactacctctgcgtgcacttctacatgagcgtgatctcactggggcaatcactgaacgtctagtacaacatgct

SEQ ID NO: 329436 - DNA, 279 bp, Zea mays
  unsure (1)..(279): unsure at all n locations
tcggttcggaattcccgggcaaataattattntgattgcgatccacgtggaaccttctctaaatggcttatccagaggaggtccattatggatggaaatacacgttgatgtagaactttttcaaaaaaagaaaaataaaataaaaaataaaaataaaaaaataaaaataaaaactaaaacaaaataaaaaaataaaaaaataaaaaaaaaaaacaaaaaaaataaaaaaaaaataaaaaaaaataaaaaaaaataaaaaaagaaaaagaaaagaggggg

SEQ ID NO: 329437 - DNA, 397 bp, Zea mays
cggattggcatttcgaggcagacgtacgcgtgcgaataccggacgacgagcgagcagtctatttattacacccattaactaataacagctaactggaaaccttactcctcggaccactatattcaggagctacgaaatgatccactcgccagccatggagacgaacaaagtaatctgcgccgatgtagtcgtcgccgtctataccaccgacacgctggccatagtcgatttcgaggcgccctcttaggcgccctgatgcgcatccggagattcggttggccctagaacaagcggtgccgtcgccgacgacgtggccgccggctgagcgcttgtaagcttattactgggctactacctacactgagcgactacacgcggggcggcaacgtcgggatgc

SEQ ID NO: 329438 - DNA, 229 bp, Zea mays
cgcagcagccgtaattcgaccgacctttttttcggtcgtcctccatatcgtctacgctggctgtcgctactatttttaggaatcaagatgagccgcggtgagcagtgcagatggtgatcaaagttctcagaagtatagtgtatggaagaggtgagctgatcaaaccagcagtcacaccaactgcatgtgctgcatctgttgagagaccatctgatgtaaagactgatgc

SEQ ID NO: 329439 - DNA, 457 bp, Zea mays
aatctctacatgcaagctggcagtgagtatgtcagacagatttctaagattctgaagagccaggttacgatgttgacatccacatcatctacatctttgccggaagaaatgttcacatgcactctagaactgcaaagttcttgcaaaggtcataagagagattcaatttctccacaatatttgaagccagggactggtgaatctcaactctttcactgaaggagtttgtatttggacaaatttgaaaagcagcaggatgaaatcatcaggtggtggcctctatatcttgatgatcaagattgtgtcggaaaagttcagcttggtatgaatttatccatgtcttccaataactatgggtccgaaaagatgctgcaaggtggccctgcagtggataccatcatatatgacatggttctggaagcggcaatgagggctcaaaatttcaacagcaaaatgc

SEQ ID NO: 329440 - DNA, 322 bp, Zea mays
ctcctgttatgtagtaaagatgtgacattccttccacaaaattattaaaataatatggagatggtataaattatttaataacaaattataataattatcaccataaataaataaacaccttgctctcttttaatattaaaatgctgtcgtgcgtctcttatgtccctaattttcttccccttccttgctccttcttttcttttttttatggaccctttatttcatttcacttgccgtcgttctaaactttccagactgtgaaaccccttacgtttctccccttctttcctttgtcatattttcccctttcgccactttgctt

SEQ ID NO: 329441 - DNA, 332 bp, Zea mays
tggatcgaccggcgcgtccaaactggcacttgtgctattaacaattgggcatttcaaattttctacactcctgtctttttcttgtatgagccgattcatactgatgaaacattttgaaagcatacgattaaaaaacctgaaagtgaagaaccccgaacgttcgcattaccggactcatgatacatatcttccagatgagaaactttttcttagaaaccgatagaagacatccgatacatagaatataatggaactctataaagaccacattcgctaccgggaacgtcatcgtattgaccaggtcaaacttcgtggtcaggactattattgat

SEQ ID NO: 329442 - DNA, 228 bp, Zea mays
gttcatgaacgataaaatctactcaagacaacttattttcacatcctcatacatcggggttcggtttttttttttattttcatccaactttaatttatttgcccttttttcatagcacactactgttcatataatctctttacccaactcaaaatgctatagggtcatttctctttcaccagctagaataccatagattacgtgtacacttgaatactctacccaaca

SEQ ID NO: 329443 - DNA, 190 bp, Zea mays
gatggacattatctccgttgactcgcaatgacctcagtgaccacgggactactacaatcgaatggcgaacgattgggtggacacacattctaataccacactcatgatggatctacgtactgagcagtggctaccaagccacgtgctctctagatatccaatgacatccattgagagagtcaaagaagat

SEQ ID NO: 329444 - DNA, 412 bp, Zea mays
gggacaggtcgaccaagagggggttcgtcgtctgggaccccctcaccggcagccggcagcacgggggcatgcccagcgctagctacccgtcccactcgtgccgctacacctcctacaccggggccgtggtgtgtgccaaggccggctgcgacgacgaccacctcgactgccaggccggtccgttccgcgtggtctgcgtagagaccaacctcctgaagcctgtattcgcgtgcgcgaccagctactcgtcagtgaccggcgcgtggagtgctcccgtgcccaaccatgacagccacgacttcaactactactgcttgagaagctatggcaagcagagccttcttgtcggcgatgccgtctacttcctcttccaggatgaccaaagcatcctcacgtacgacctgggtaggca

SEQ ID NO: 329445 - DNA, 398 bp, Zea mays
gaaacttttaaacatttgcccatgtatgttttagaaagtttaatatttgcatgccttctatatgattttgtatatttttcccatattattcattttgcaaattaagtttcaaacgagtacttaggaggttaatgacacagttgtatgattgtatatcttaatggaagatctgttaatttattaatgtttgcttgcataacatgtgcatgatgtcttttgtgtacagtttatcttaaattgaactatataaagatttggtttgatacttctgtatcttttgatcataaactcctatgttggaggccatagacagaactatcaacttaccctacttctcgcatggctaacgttatagatgctagtaaggttctggtgtgcagcttggggttttaaacact

SEQ ID NO: 329446 - DNA, 194 bp, Zea mays
tgaattgacgggtcgacccacgcgttcgtaaaattctgtgcatctgtcattgtttctgtttcttaccatcgttttttactatcaggttcaggggttctaccatacacatttcataaatcaaaccagtggttacttcttcatcaatttaatacataggtttccccacctcacccgttaattaatgcttatacccc

SEQ ID NO: 329447 - DNA, 272 bp, Zea mays
ctgaattcccgggtcgacccacgcgttctccccaatcgcttcctaattgcagcacttgcatatttcacctttgacctatatacatgcggcatggctctatcatcattcttactccatactatatattttactctatcaccagaaatcatgcactcatacatattactttcctaaatgaactctatctcttacaacaacatattttcactcccattcctaactctcctcactatatcaacatgacaattcgaagattctcttacacatttatc

SEQ ID NO: 329448 - DNA, 364 bp, Zea mays
gaaaaaacagaacgacccacgcgtacgccgacgcatcctcatatatctcccctcactttttttgacagcctgtccacacactaaggacctctggttttcatacacaacgctgtccgtctctttttcattctaaccgtgctataatccttatgcacacctaacacgacaacaaccaacaacgaagaaactgcagcagactctacatgcgcttatagaatcaacccaggaaccttcgacatctgcaaactcggatcgaacactgacgcttagacgtactatacaaagacattccatgacaccttgacgttaaacaacgaatcgatcgcaacccccactgttattatccctacagccgactacctac

SEQ ID NO: 329449 - DNA, 180 bp, Zea mays
tttctccttcactgtctcacattttacctctttgtatcaacttttcagaggtagatatatttccctttacctcaaagatcatcacttatagtatctttaggaacgccttcttaaagatcttatcaataaacactcatattttatcatctacccaatctctctctttatccataataccac

SEQ ID NO: 329450 - DNA, 323 bp, Zea mays
atctataggagaaccatcagcctccaattttagccagccagagaaactaataagactctggccgcctccatccgagcgaacaaaccatccgaccccgtccccaatgcaatccgtcttcgacgtaccaccaccaccgcatgagcgagatggagatgaagaggatcctcttcgccgtcctcgtcttcatcgacgcctcggccaccgtaatgctgtccttcaccgaggccttcgtcgagtgcaccccaactgcctccaagtcgttcgccgaggctaccgcttgcgctgtcgcttgcgctgccgcttgcgccgtctactctgagccc

SEQ ID NO: 329451 - DNA, 310 bp, Zea mays
gggggacccacgcgtccgcccactcgttcacccactcgttcgttcactctttcggaatcatcaattaccaattgaggggctctgtattgctcaatggagtgctgtttctaattttaccttaaagtatgctttctctatcattcatttgcatatatatgttgtcatatatttgtttcacactcatattattctgatatctagttactattatctatgcaactgactttttaatcacatgattatgtattactatcttcttgtgttttaacacactttatatctgatacacactttaaatttgattttctaa

SEQ ID NO: 329452 - DNA, 70 bp, Zea mays
gataaagcaaaggttactcttgaacacacctctcttctgttatccaatctttactcatccacgcggaggg

SEQ ID NO: 329453 - DNA, 452 bp, Zea mays
  unsure (1)..(452): unsure at all n locations
gccagctatcacattcgctagatcacaccaatgataaggaacaggtcaagccctacaagggctacatncacaacgttccgaggggactacacgcacattcacaacgccgcagctaatacagcaccaataccattcccgcgacaacaaccatcggctggaaccgacacctaagcctcgtactgtcgtgacccgacgatgaccaccctgaacctacccgactacccgaatcaatgaccgactccaactgcgacacactaccgtgcacgccttacgtgacacaacgaccacgcgagtaccatcgtgtgtcgccaaatgagactcatggactgcaacgcactatcggctcccatacagctcggacctcaccataggccatcgtcacacgacgcaaccgtgcatctacacgatcgaactaaaagacagccacgatgaggacatatactcactagtgc

SEQ ID NO: 329454 - DNA, 226 bp, Zea mays
cccacgcgtccgaccagcttgtgaagtgaataagaagctctaaatcaagaaggatatttactagaccagaagcatggtttgggtgggatatctctacatgattttgttgctgttctgactttgtttgtgctcccgaacttgagtttgcaatcaaattatgataatggtattgactctcatatgaaagcatggcatatggaatttaatactgtgtatgactgtggac

SEQ ID NO: 329455 - DNA, 206 bp, Zea mays
gcaaatcaccggcaaggctaccaagatcctatgtcattcctgtgttactctccgtggtcgggggggctttttttggccgcgggtggtgagatagaaaagctaaacgacatgcccacgtactccaccttccctaagctgctccatgacaccaacgacttgggcgcctccaatcatgtccagacagacacgcctctggctgttcccga

SEQ ID NO: 329456 - DNA, 448 bp, Zea mays
ctcaatcaccactcgcccatcgtgggcgccgcccttctccccaatcctgatcctcgtaggaccgccgccgagaacgctaccgccgccaagagcagcacaagcacccgtcgcatcaccgtcttcaatgaattcctctgtctactcgcctaccccgacttcacttgatagcccgccagacgcatctcgatgcttctgctccctggttcttagggcctgtggatgagaccgtgtccctgccgtccaaaaatcagcaggccctcatgctcatagcgttcatggatccaggaaaaggagacgccggtgatacttcaaccaccagagagcgtcggatggggaccaccatcgtacgggtccgctgggaccgctgctagcctactagggcagcaacgaattgacaggtatgattgcgcatggccatcactgcgagacgtaaccacattaaaccttt

SEQ ID NO: 329457 - DNA, 231 bp, Zea mays
tggtcacctacgtgacagccatgtgggtcatgccccaccccttgcgcattgtgccgagcgagcggctccaggtgcgacccgccgtgaacgggccgctctactacctcacctgcctcatgaacggtctggggagcgactgtatcatcggctggcacatgctggcggtgctcaagatggacacccacgccatccgcggcttctactatgggcatgttcatcgggggcgcacta

SEQ ID NO: 329458 - DNA, 435 bp, Zea mays
aggagatgaggtggagcgtccaggagatgcggggcgtgcaggagacgctgcagaacaaggagctggcggtgctgtccatgagcctcttcttcgcgtgcctggcgctcttcaagctggcgtgcgaccgcgtgttctgcctcttcgccggcaagggcagggaggaacccgacgcggaggagcacacaaggagcagtagggcgtggatgctcgtgctcgccagcagcagcttcaccaccctcatcgtcctgctctacaactgaagctttctagagtttcgcttgctagcacggagcaacgttcttttagccatgttcttgtccccgcatagctcattaactcccctctcaagtagatggggtaacgtatgtactcactatttcagaataaagatgaacacaggttccttgttcattgtaaaacaacctggaataatcc

SEQ ID NO: 329459 - DNA, 213 bp, Zea mays
acttctcctaattccctttctacccactctttcgatgaaacctatcattttctcccaattaactcactttcacgttcattctacatatctcaagacacttccaagtactccctttactcttctcagaaaacaaaacaatcattttatctaccaacatcatctatctctcttttaaaacatatctttaatctttattatctttctcttctaatc

SEQ ID NO: 329460 - DNA, 347 bp, Zea mays
gcggcgcctcccgatccggtggtgggccaatgtcgccgcgcttggcatctttcttgcgggggccgcatctgctgacgcgggctttctcagcccggtccttattaataatgctggtgcacctattctttactgggaatcaataactttcatcagacccactgttgctctaatatgttttgagacaatcggcttattactaaatgattagtcacctccttctcccttcaagtcatcttgcatggatgactgtagcatatctttatggcttgctgataatcacagcggtgttgaacataagcaagcccgtgccgtattttatacgcactgcattgcactgcacgatacat

SEQ ID NO: 329461 - DNA, 180 bp, Zea mays
aggaaatgtatcaggggcggtcaattgactcaggttcaggtgcattgtgcatatgtcaagacactcccaatgtacaccctttatttttctcataaaaaaaaacaatgttgttatctaccaacatcagcaagctgtgttgtaaaacatatctttaatcgttattatctttctctttcgatc

SEQ ID NO: 329462 - DNA, 477 bp, Zea mays
aactctactcctgaattcccgggtcgacccactcgtccggggaaatgcatcattctcacccaattaactcacgatcaagcgcaacgtccacatcttaagaccctcccaagcacacccttgatacttctcggaccacatagcaataccaattatctaccaacatcatcaacctacggcattataccatcatctacaccttatacacgtcactctctgcacatatagcacgcaatcttgatcatattgctatcattgtccaaacaagccaccgtcaacaagaccatctcgctatccatgctcacgatatccctcactatactggatatgtaatcaatactaatactaaccatgaacatcatgaccccgctttacacattcttgacatgaaataccatctcattctccatgacactcactatcctgtcaaagctggtcttgaagcttatcatacatctcacagagaccatcacaatctac

SEQ ID NO: 329463 - DNA, 216 bp, Zea mays
gggagctggcaccagcaccagcaccggcaccagcggctcttcccgtgccggatcagtgcaacgccggggacggcgaccgcgggaggaaggccggcgtcgctggtcccggcgtgtgcagcggggcgcggagacgggtggccaagggcgccggtggcccggcgagcaccaagttccgcggcgtgcggaggacgccgtggggcaagttcgcggcggaga

SEQ ID NO: 329464 - DNA, 227 bp, Zea mays
atcacgacaagatggcgtgcacaaacaatgcgatgagagccttgttcctcctggtcctcttctgcatcgtgcatggtgagaaggaagagtcaaagggcatcgatgcgaaagcgtccgggcctggtgggtccttcgacatcaccaagttgggcgccttcggcaatggcaagacagacagcacgaaggctgtgcaggaggcatgggcatcggcgtgcggcggcactggg

SEQ ID NO: 329465 - DNA, 167 bp, Zea mays
cggacgcgtgggcggacgcgtgggaaaaaattaaaaaaaaaaaaaagataaaaaaaaagagaaaaaaaaaaaaaaaaaaaaggagtagataatagaattggaaatgttggtaaaaagtaacaagggacattgatcttggtcatatattaggctgtcttgggctattg

SEQ ID NO: 329466 - DNA, 376 bp, Zea mays
  unsure (1)..(376): unsure at all n locations
gccagagccaagcagctagctagtagcggccggcagcatcgcgtagtagagtgtgctcagagcagcgcgcgcatgggacccttgggccccaccgtgagcttcagtatcatggtcatggccaggctcagcggcgccgcccagcagcagccggaggatgagagggagaggaaggagggcgggagtgggtgcggcttccggatgccgctgcactacccgcgctacaagaaggcggactacgaggccatgcccgagtggcgcgtcgactgcctgctccgcgagtacggcctncccgccgacggcgacctcgacagcaagcgccgcttcggcatgggcgcctttctctgggccgaccagtactgatctgatacaattcaac

SEQ ID NO: 329467 - DNA, 146 bp, Zea mays
ggcagcttgcttggaaatggtcagagaatgaaggtgagagtggttgcaccgattgagaacgttcacttttcatagcgtacgcaaaaagtcgcaaccctgcatgtgttttggcttaaaacgggattaaggtaagcaaagtacaaaac

SEQ ID NO: 329468 - DNA, 95 bp, Zea mays
tgcctttttttttttttttaaaaaaaaagcgagctcgcgtacttgggcttggacgcttaggactggttcgtggtgtcgttctagcggtccttttt

SEQ ID NO: 329469 - DNA, 222 bp, Zea mays
gcgcgacccgccgaccggctgcgccctgtttggcatctacaacggcatgttccgccgccgccgctccgcattcatgacctgcctccaccggatcaacggggccgaggccgaggccgcggtgccgccgaaccagaagcccgccgcgcaccgcgactccttcctcgcgcgccgtcccagcgccatgcccgtgccggcggcggcgcataacggcaggagcaggcc

SEQ ID NO: 329470 - DNA, 59 bp, Zea mays
ttaaatcttcctcgcttggaatctaagccaacaactgcagaagtccagcccttaaacct

SEQ ID NO: 329471 - DNA, 78 bp, Zea mays
cctgtaaccagatctgaacccgcggcgacagaaacaaacgctcgctcgctcgttcgttgtccgttcattgtcttcgcc

SEQ ID NO: 329472 - DNA, 349 bp, Zea mays
  unsure (1)..(349): unsure at all n locations
tacgcctgcaggtactcggtccggaattncccgggntcgactccacgtcgtctcggctctgaggtagactgaacgcagcttgctcgatcggccgtactcgactggtcgcaagaagttctcggagggtagcaagggccagtctagcagctcgatcgtgcgcacctcggacgtcggcggcacgactgactggggcctgcaccaatggctacgaatcgttcaagcatttgtctcgcacgatcgacacccttgagtggtcatcgcgccgtcacccggccgtggcacctcgacatgcctgtgtcctcgtaatcatccagagcgcttggccgtcaatcctcctcgccaaggttca

SEQ ID NO: 329473 - DNA, 147 bp, Zea mays
gggcatcgtaaatccatagtggtacttcactgttttcaggtggcgccattccagattctttggattcatgttcctgcagttggccacgccagtttttctttttatatgtggtggtgctttggtggacttggaaaagactatttttga

SEQ ID NO: 329474 - DNA, 207 bp, Zea mays
ccggttcgggttcgggttcgtgaggttctccggggttcggtttcgtgggtgagcggatcgagatggcggcgtcggatgttgagtaccgttctttctccgggggcctcgcctgggcaaggaacgaccactccctccacaacgccttcagcacctacggggaggtcctcgagtccaaaatcatcctcgatcgggagacgcataggtccc

SEQ ID NO: 329475 - DNA, 215 bp, Zea mays
ccggtccggaattcccgggtcgacgcgcacgcgtcacgatcgcggtcaatactgcaggggcgcgaccatttggatttgttcgtgaccatatatgaaactggattcgctcacgtgaagacagtaacggcaaccatatgctaaatagactagcgagactagtcttggttcttctacagatcctcattcgaggcaggatcatggatgtgcacgatctc

SEQ ID NO: 329476 - DNA, 224 bp, Zea mays
taccggtccggaattgccggatcgacccacgcgttcgcgagaggagatccagcagccgtccaataagagccagccagagaaactaataaaactgtagccgtcgccatccgagcgagcaagccaaccgtccccgtccacaaggcaatccgccgtcgacgtaccatcaccaccgtaagagcgagatggagatgaagaggatactcttcgccgtcctcgtacgtatc

SEQ ID NO: 329477 - DNA, 423 bp, Zea mays
tcgcgactgcgtatatgataatgcatattcagtcgcgtagctccttccatgccccctgagctgactgcgcgactacctcggagagcaaggcctgtgaatggattcatttaacctcgctcgcttgtccatggttcgcagcaacgataccaacacccgcattatttaattggtagcctcctctagctacgcacgcatttttagtctcctacacgcccttggattgtgcgtggctctgttaatcatctctcatccttcgtctgccatttctcccctgagatttttgttccttgttggtaccatgcattttggcaaataattttgtgattccactccccaaattaaagtttggctgtcgtatgggttgtaaacccagatcaatatatatatgtgcgtgattgaactgctccaaaaaaaaaaatttaa

SEQ ID NO: 329478 - DNA, 232 bp, Zea mays
ttcccgggtcgacccactcgtctcgcttcttgtttgttctcctggcattcactctaaccaacgacggatgatctctcgatgtcccggcgattttgatattcagattcagcttataagacttcagagaaagctatggatttttaggttgaaagtcaatgtgctgttgatcattgtggtgagggagtagatgtacctagggtgctcggccacgaagtaatagtatgatggggct

SEQ ID NO: 329479 - DNA, 379 bp, Zea mays
tcgagccacgcgtccgaagacgaggtagaggagggggcgagcgacataggcagtggaggggcacggtgaggaagccggcggcgcgcgcgcgcttgcggggccggcggcctggcgaagggggaggtggacgagctgcgccagctcagaggccaaggccaggagctctgggaccacaacggaggcaacggaaacccacgacaaaggcggagatgacctgaccgcgaacatggaacaaacaaggctgattatagggagggaaggctaagatacaactcggaaatacaggaagaacaagggaaacgaaccaatcacccccgtggaagctgacccctgagagaacgaaaaccgggaaaagggacccaactgaaacaaaattgaa

SEQ ID NO: 329480 - DNA, 272 bp, Zea mays
atagactctcaacgagccagatgacgactcgacaaggtggatctatcggggcactacaacgccgagacggcggaggactctgtgatgccagtacctaaatctgttgtgacaaaaggaggtgttcaccagagcaaggctgttccgtcagcatcgattcatcatcacccactacaaggaggcataagatggactctgagtcttcaaacttggtaccccaatatggggatttcccatgtcgaacctcaattcaacaaaatgcacaaccaccaaat

SEQ ID NO: 329481 - DNA, 213 bp, Zea mays
gaacttttacgctaggtcaatctataagagcgttgtgaatctacatggatcagccaaaaatttaccagcttcatgtacctcaaagccaaagcaatcacctgagctgtgtatgttcccacagtatgttgtcccgacaatgcgcacaccattgttcatacttaatgcagcctacgattcgtggcaggtcaagaacgtcctatcacctagtccagc

SEQ ID NO: 329482 - DNA, 306 bp, Zea mays
tcgaccggcctcagtgggcggtaacatccgagatgaacacaccagcaagacgctcaagctctaatatttccatataacgcgactttcaaattcttgccatgcatcagccttcatcttctctctctaaagcaccctcttaagcttctcagtggatactgcacccaatgatggctaccttgtgccctatgaagaatggtatacttctaactgaagtatgagataagattatcctcctctccacttataaaagctactcatacatgaatgactacaatgtgccaaattctaaaacattactcgactttg

SEQ ID NO: 329483 - DNA, 194 bp, Zea mays
atatgttcgagagcactgcatcctttggttccaacggcattgttgattttgggtggggccgatcgatccactcttgcttgaggcttgtgcagttgaacacacgtcgactcaagctgcatgctagcgcacaccgtctccgtttagacgagacccgtccatggggttcgcatccttcagctatgcgcgccgcgaca

SEQ ID NO: 329484 - DNA, 132 bp, Zea mays
accggtcctgaattcccggatcgacccactcgtccagtgctgcgccgctgtgtgctgctgcattcattacgacatggacgatgtcgcggttctatccacagtgcgcgctccctctacgctgtgccggaaggc

SEQ ID NO: 329485 - DNA, 338 bp, Zea mays
agcagttctaatctcacagcatgctaaacatcacggagcaagcctcactgatcgtgcttctcgacatggtggccctgctgtacgacgatctgctgacgcaacccctgcataaggatagggaaggcagcgaacacgatgacaccgtctacccatacatcgcctgcatctgctctataaccccgttccaggaggtgtacacgttcaccgccatgcgggacacgtgcaattacgctatcatcgacaacctggcacgtctgaacaatcacttggacacgttcagcatacgcaccgctcaggcgcgcatgcacgtcgcgaggccgatcactaccatcccgacg

SEQ ID NO: 329486 - DNA, 205 bp, Zea mays
gggcgacccacgcgttcgcactttctcgctggcccataaatatatatctatctatcgccatcgatcaattatgaggtcacagaataataaacatgggggggcaagcctcacggctcgtcctcctctccgtcgtggtgctgttgtacgccggcctcctcccgcaagctctgggtaagggtatgggaggcatgggacaccgtgggcg

SEQ ID NO: 329487 - DNA, 267 bp, Zea mays
tgacagaatataacatcctgatgaagttatttgcatatgccatcgacttgagatcaggatgtagcacaactgagaaagtaacttcctcaggatgtttcaatgacagaatataacaacattgcttaacaatttttatcatatgagtctgatgtttgtcagcttccaattcacatttcttgctaggcttaagtatatgcttccttgtacaacaaatcatatgatgcaagggattcaactgtcgatttacttggatcgtacattcaattt

SEQ ID NO: 329488 - DNA, 298 bp, Zea mays
acccgtcactgaatttccggatcgacccactcgttcgcgcacgcgttgctcaaagttcacacctactttaatgctaactgacttatgcctaggggcgcccttaacacgtatgaggacacccttctctataacccacaacccatcctaagaactcacttttcctaatcattacacatgcagacttcaacccaaacgacttactgtctaccagtgaacctgacaaaaatatcacaatatcctgaaccttaatgaccagaacgatgcatattacatcatctttaacatgaatgtgcacaac

SEQ ID NO: 329489 - DNA, 266 bp, Zea mays
tccacgcgttcgcccacgcgtacgccctctcgttcggaatcatcaattaccaatcgattggctcgcaattgttcaatggatgcctgttcctcatttaccttaaagccgattttctttcattctttgcatatctacgttgacagatctttcctgcccacttatattatcctcacatccttttactagtagctatgcagctcacttctccatcacatgcgtgtgtatacatgtactctcgcgctctagcgcccttgataactaaagca

SEQ ID NO: 329490 - DNA, 81 bp, Zea mays
attagaagtatttctaataatatttaggatctgtcatcaataaaatgtatgcaacaatacgactattgtattattttgtct

SEQ ID NO: 329491 - DNA, 268 bp, Zea mays
ctgacgcgtgggcggacgcgtgggcttgtattgacacacgtgaacactactatcgcctggcctggcgataacactattggcgtgggcccccttcttctcccactcggaggcggacggtcgcgcggaaaacaaaacgcacctcaaccaccgaacatttaaagcaactacaacgacagacgggtaaccgacagactcacgtggtaccgacaggctaactgacaccacgctcctgacaacgtgcgggtacacgggctaaataacgaaaaac

SEQ ID NO: 329492 - DNA, 351 bp, Zea mays
ccgttaaccaaaaatagatgccgcattatttttttcttgctccaaccgatccctcgtcggtctcccaaaaacttcgggtgcccgcatcgagctgctcccctccctcatattttggtgtgagtaatctttccccaatccgagctcccgttcgttctcccgcgtttttttggtaccgcacgtcgcttttgtggatgttgcgcgaagcgacggtggtgagaaagccatacactacgttcgaggatgaggcgctgggagattcaacccgcagaatcagtcgctccaaatgttcagcgcgtatcatgacggaaccgccataccttgcgagaagttgtctccatcggtgacaggctc

SEQ ID NO: 329493 - DNA, 204 bp, Zea mays
accggtccttaattcccgggtcgacgcacgcgtacgactgactacaccaccgcgtcgtcgtctaattaaaaaggatacagagatggccctggggtgtcaacatatggccaggcgagcgcgattcttcgtcgctcgttcttttaatactcgcggatgtatacatgacaatatgcaaggtagtggcggaagagacaactctgactg

SEQ ID NO: 329494 - DNA, 328 bp, Zea mays
acctgtccttaattcccgggtggacgcacgcgtccggtcactcactgcatcgttcgttcattcattaactactggaaattatagagccacatctgttggtctgtgaacctgcggggaaggactaacgagtcgaatatgactgcggcggtgctttccgtgcgcacgacgactacttctctgctagcagcagtcatcctgtgcctatgcatcgtctccctctccccccgctgagccgctgtcgcgcggttttccctcggcgccagcccatgacgctcgtgatgcgctctgccttcgacgtctcgttctgcaccgtcagctgcatggagct

SEQ ID NO: 329495 - DNA, 336 bp, Zea mays
ctttcaagcgcctaggctgctaccttagaatcaagcctgcggtagagggtataacctcgccggagaagacagctatctccatagaccgaaggaccttccaaattgaaaataataataatatgagatcagtctgggctggcttgggcaggaagcgaacagcgcagtatacaattgcccctttgcagagcttgtcgcttggagtttaaggctgctggtggcaagaatacatggcaaagtcagtcgtaaattcatactgtaatacatattccttaggcatgcgaggcaatatttgcccagagccaagctgcggacaagctgccatcgctgtccgtccat

SEQ ID NO: 329496 - DNA, 302 bp, Zea mays
aataaccctgcgtgcccttcgttctcgtttcgatcccaacaaccctccctttgtctccggcagaccacattaagtcgcgggggacatgaacaacgtcgcctgcgctgtacttgccgccgtcgtctcctccaccgtagtccttgtcgccgaggcccccgctccctctctcactaacgcctcctttgctgctttccctgccgtcatcacccctcttagcgcctccttgctttacttctttgcctactacctttagtaaactttaagtaggatcgaagggagacgcttcttgctttccatacctt

SEQ ID NO: 329497 - DNA, 399 bp, Zea mays
cagacacgtgagcatacgcgggggcagccgtggcgagagcagtcttgcgaatacacccaagaacggagaagatgtactcgaacgccaggatgcttggaccactatagacaggagcgactaagaggttcatctgacagacatggagaggaagaaggacctttgtgtcctgcttggcgccgacgactggggagcgagctgttgggactgggctgctaacgggcgccctctgaagggcgcgaaggctcggacagcggagaggttggacataattcaaggggcgcctcttgctggcgtctgaatgacgcctgtgtgctacaaagcctgcttcgatgcatatagcttgagtgtaagacgacatgagcggtagaaacgttaggatgcaaccagtgtgagtgatac

SEQ ID NO: 329498 - DNA, 128 bp, Zea mays
gaaccgatccccgctattttactcccgttcgtttcattgttccgttgctttggatctgagtctcgagatcctcccctgtcctgctgctcgaggagccgccaaggataccaaaataccatgatgcaggt

SEQ ID NO: 329499 - DNA, 155 bp, Zea mays
cacattcttccatcgatcggtttcatcgtccgccaacatccttcttgattgttatttgtgcaacacccagggcggcaggtgggaggacatgagctaccattgaaccatggttgcagccccagtacgcgcttgagtgctggtgctggctctagcac

SEQ ID NO: 329500 - DNA, 279 bp, Zea mays
cccacgcatgcgaccagaggttcagttcgctctcattggggccaccgcctacttattggctacactagcccgcggatgcgagggcttcttgtgtaccatcgaggaggacgcgcctggtatgattaccttgaatactagactccggaacaaagctgaaatggtgcatactcgatgctgcaagagcaattactgaactgaatggtgtcacaagcctagatcttacacttagaagtactgcgctgtatatgtctataagtacattcaaacctgttcttagat

SEQ ID NO: 329501 - DNA, 53 bp, Zea mays
ctcaaacttcctcacattcgttcaggttatcttcaccaatctcatctacaatg

SEQ ID NO: 329502 - DNA, 341 bp, Zea mays
cacgaccatgatgttattagcgagggatcccatcgtcgtgggtgtcgatcttgcagcgctggtccacgacgtgatatgcgggccttcgaaggtgactctaaggtcccaacatctcgaccaattactattgctagtgtctcacccccatggtcacgtgctacattgagtctaatcttgcacgagttgctgacaactggtggtcgtgggctatcaagaatgtgtacacggcatcctacaccaggatgaagatgtgtagctacgagctcatttttaatgaacggcagggttgcgtgtaatactatgaggtgacataccatgaaaaacctgggtgctcaggcaat

SEQ ID NO: 329503 - DNA, 308 bp, Zea mays
cccagacctgcgaccgcgcctgctcgtaaactccagcgcgaccctcggagccgtcgggtgggccacccacgctggcggcgtggataaatgccgtaagcttggccagtattactctcaacgcctgtggatgctcaggacgatggtgtcgcagctgctgatgcacgtgcgcattgagatcacctctgccaaggtcaaagacgttcgcctgaaggctgatcatatggtgcaggtagggatggaggatactcatcatgcaacaagacaagctgttcccttcgatcgatgggatgatgaccttcataaactat

SEQ ID NO: 329504 - DNA, 117 bp, Zea mays
aaaaaaaaaaaaaaaaaaaaaaaaaaaaaaaataataaaaaaaaaaaaaaaaaaaaaaaaaagggggagaaaaaaaaaaaataaaggtgggtctgccaattctaaagttcctttctt

SEQ ID NO: 329505 - DNA, 378 bp, Zea mays
gcgtttgatcttcgctggcaagcagctggaggatggccgcacccttgcggattacaacatccagaaggagagcaccctccacctggtgctccgtctcaggggtggcatgcagatctttgtgaagacactcactggcaagacaatcacccttgaggtggagtcttcggataccattgacaatgtcaaggccaagatccaggacaaggagggcatcccaccggaccagcagcgcctcatcttcgccggcaagcagctggaggatggccgcaccctggcggactacaacatccagaaggagagcaccctccacctggtgctccgcctcaggggtggcatgcagatttttgtgaagacattgactggcaagaccatcacctt

SEQ ID NO: 329506 - DNA, 110 bp, Zea mays
cggacgcgtgggcaagttccccggcgcgcaggtgctgctggccgagttcaacatgacctcggcgggcggcgcgcagaacttcaagtcgcaggcggacaacttcgtgtgcg

SEQ ID NO: 329507 - DNA, 219 bp, Zea mays
ctcatacctacgtacgcggctgcgtgtaaactcaaggccatccttggcagtgacggcgtgggcctcgcgggctagtcttgggggatcctgccgtaacctggggcggtgatactgtacaggtgtgagatactacaggacaacactcacgaagcttttcaggaacgtactgttcgagaccaccgctatgtctttcttagctgtatcccctacaacagctta

SEQ ID NO: 329508 - DNA, 204 bp, Zea mays
acacaacgtctatcagtgcttattcaataattcgagcgcgaccaaggcaatcatggggtggggctaccgtgctggcggcgggggggaatgccttatacttggcaagttctactttgaaggcgttagcatccatagcagggggccgacgtaacggttcaaggacgagagcctcgacagcacagataacaggggcaagatgaaccc

SEQ ID NO: 329509 - DNA, 132 bp, Zea mays
acaaaacgtctatcagtgcttattcaacaattcgtgcgcgaccaaggcaataatggggtcgtcctcccgtgctgacggggtgggcgaaggcctaaagcttgccaagtcctctttcgacgacgttagatacga

SEQ ID NO: 329510 - DNA, 92 bp, Zea mays
gtttttgctgtgtgcaggtgaggaggcacttccgacccgagctgctgaaccgtctcgacgagatcgtgatcttcgatcctctgtcccacgag

SEQ ID NO: 329511 - DNA, 412 bp, Zea mays
ggaaggtcttcgggaattctgttcagcagaatccgagtccactagccctcctcagtcctccccagggatttcgacttccccgagacaccatcgctacgacgagcaagcagagcaccatctcggctgccttaaactgtctctccgccggatactacacccgccgccgcagcgccgaccttgtctcaatcgagcggagcgggcgatcggattggttgcttccttcccccatctcatgttggtggactgagagatggagttttgatttcaaatagcatctagagaactgccactaagtttttaagttagtatataatgggtggctggtgttgctgttcgtcgagaacatctgaagccgatagagcaccaattgatatatatcgtcaacaaaatcttgaagagcatgagcccgctg

SEQ ID NO: 329512 - DNA, 405 bp, Zea mays
gggtttcacagcgacgcttccccaccaccaccgtcgtggagatgcagaccctcgtgccctccactacggcttcttctgcaagggctatggcaccgagatcggtgagacgttgtgcccggagatcttgtgcgaggagagcgccatccacaaggctcgttccacccaccaccgttggccggtcgtgcaattctctgtagctgtatgagcatttggagcctcatccctggacaagggggcgatttattcattggagtaaactgcatttaggttgcacaagattcagttttgcttagaccatcagataaagtcaatcatagcattggatcatctaaaaattatatttatatggatggtcaaatgtgagattggacatgagagagactgcaaatttgtctgatgcaaaaa

SEQ ID NO: 329513 - DNA, 244 bp, Zea mays
ctcaaacactatatctttcatgcttgtaaatatcaatccatccttttcattcatcgagtgggcctcccacactatccgcagggagtcaattacttaaactatccaacatttcctttcttgccttaattatatctcataacgagcactatcctaactttttacttacattcccattcttaccactatttcctctactcctaaccacattccataaacctgcttatattcagtaacttcctaaaaa

SEQ ID NO: 329514 - DNA, 221 bp, Zea mays
ctcaaacatatattcgttcatccttgacaattctaatccatccttcgtatatatctagtgggccaaccacactaaccccagggagcaattaccaaaactatctcacttatactcttttgccataatacttcacataacgatcacttccaaacttttcaccaacatcctctttcctatcttatttatctctaccctaaccattttcctgaaacctgcttata

SEQ ID NO: 329515 - DNA, 199 bp, Zea mays
ggaaaaaccgaacgaaactgacatggagggtggtggtcttgactatcacgggtggcctctaagggggcaccatggcccagaagctggacatcgccggcatgaagtttacctcgcgcactttcgccttcgcgacaaccaaactggtgccggcgtgtaccttcgttatcgtcctcatcttccactacgagaagtacggcat

SEQ ID NO: 329516 - DNA, 206 bp, Zea mays
agcaaacatatgacatcggattcggcctatttttattacatgacaaattgaccccactaggggggcgtccgcctttctagagggtccaaacttacctactcttgcatgccacgtcctagctccttaatctggacatcaaatttgaattcactgtccggatctatattacctcggaacttattaaaccctgacatgacccaatttaa

SEQ ID NO: 329517 - DNA, 142 bp, Zea mays
ttcaaacatatctcatacaatccataaaatttataataaaaaacatttctaactattaagagtactttctacatattcaagggaccaaatttacatacacttctcttccactcctattatctacaatcttcatatcaaaatt

SEQ ID NO: 329518 - DNA, 268 bp, Zea mays
cggacgcgtgcgcgaccacgatgaggatgactaagatcatgatgacaacttcccaaacaacggggggcaagctctaaaaaacaagggctctcaaaagaaagatttgaaacatcacgtcattcaacacctcaagagataccaccatgaagtggaaagggcatgtcaacaacgtgtcctgtatggtaaagaaatcgtcgtaaggggcaacgaatcctgccaaatctaccaaatgcaaacttcagctctgaagcattgtttaatcacttca

SEQ ID NO: 329519 - DNA, 253 bp, Zea mays
cgcacgcgtgcgcgtactcgatgtgcacgttggagttcttgcctcgtacgaggttgccgctgggaggccacttcaatcatactaggtgtcgttgctgttcacgagggacgtaatcgccactagatccggaagaaagcaaccatgcgcaggacgacccttaacatctgccttgtatccctggagatgagaaagacattatgttcaactcttcaagtctggtctaccggctttgatccacagtgcaaggtacgga

SEQ ID NO: 329520 - DNA, 331 bp, Zea mays
gcactatctataggaagtgccctgtgtttttttttctcattccttgctagtgtcactaagggggctactaacatcacaaagggtcttcaatcacattctccacttcattcttcatgccccaatatccttcttttattccacacctactggtataattttaaacaagtcctctaattaccaaacttttctacattttgaaatatcaaacatactaagctcttctttttcttcaatcattactatttcttggcaccactcttcttatttcatattttatcattcccaacttttctacctttattcaccaacatcaaactttcttttttctatt

SEQ ID NO: 329521 - DNA, 310 bp, Zea mays
cagtcatctcctccaccaccaccaccaagctcaacaacagccagctcgcgaaaataatgaagagccgcagcatggcatcatcggccgcgctcttggtgctagccctcgcgctagtggcggccaccgccccacaggtagcggaggcaaagaagaagagagcggcggagagcggcgaggcggcggaggcgaagaagatccaggacgacttctgctcgacgctgtgcgagggcaagaaggggacggacctggtcgtgtgcaaggagtcctgcgctctctcccagcagtccaacctggtgctgtacggcaggat

SEQ ID NO: 329522 - DNA, 214 bp, Zea mays
ggaaaacatgtgtgatcggtttcgtcttattttaattcgcagaaaacaagcactcaaatagggggggggcctcctgtctaaaaggtccaagcttaccttacgcttgcatactacaggcatatctgataatatagtgacaccaaacttgaattgactggctgaggctttacaactacgcgactgggaaaacgctgacaatattcaaattaataaa

SEQ ID NO: 329523 - DNA, 148 bp, Zea mays
aaaaaacatatgacatcgcattcgtctaattttaaataaaaaaaaaaaaaacaataaaagggggggggcttcctgtctagagggtccaagcttacctacccgtgcataccacgtcatatctcttatatagtgtcaccaaacttgaatt

SEQ ID NO: 329524 - DNA, 153 bp, Zea mays
aagattactgaaccaaacttacaaggagatagctattctatactttaacctaaagtcaattagggggcacgacttttacaacaaggtgcctgagaaaactctagctaaactcaactaaattcgcttgcaccacatccaaccttctccaggtgt

SEQ ID NO: 329525 - DNA, 275 bp, Zea mays
ccgcatcacctctccctccggcgcgcgcgttcgggtacagcgctagagtcactcaccaccatgcaggcggcggcggctgcaaatggcgcaggctactttcacaagcctcagcagcagccgctggtggcgggggcgccgccctcaccgtcggcggcggccgtggtgtcgccccattgggtcggcatgccgttcgcgccgcctcctggggccacggacatggtgatgcagccgcacacatatggcgccttcgccgacataattcgcgccgactcact

SEQ ID NO: 329526 - DNA, 220 bp, Zea mays
catctattgtagcgtacttgttatacagtactcttccatctctccttttttccttgttgatgccaaaatcaagtttacaaaaaaaaaaaaaaaaaaaaaaaaaaaaaaaaaaaaaaaaaaaaaaaaaaaaaaaaaaaaaaaaaaaaaaaaaaaaaaaaaaaaaaaaataaaaaaaaaaaaaaaaaaaaataaggggggatgttttaaaggatcaaagttt

SEQ ID NO: 329527 - DNA, 319 bp, Zea mays
cccacgcgttcggctcattggggaagggagggtcatggagctatacagtgtactcggggccttgttccatgtaagcgccatccgagaccgagagttctctagcaagcctgatgtggggcaacagtgtttctcagaggcatcttcacgtcggccagctgacttgttgtcatctttcacaacaatcaagagtgttatgaatggcttgtatgatggccttaaagatgtccttttaatccttctaaaaaatttggatactcgagaaaaggttcttgagtatatagcagaagtgataaataaaaatgcatccagatctggcatg

SEQ ID NO: 329528 - DNA, 242 bp, Zea mays
gacgggagcacacagctagctagccagccagccagcagccagcttgctcgccgcgcccggggttcttcctcgcctccgtgggggtccgttccgtcccgaccgccgccgccgtcgcattcagggatggagatgaagaacatcgcctgcgccagcctcgtcgccgactcggcggtcaccgtggcactcgccgcggaagcttctcatccagaaccgaccaggggatcctcaaccgtcgcgcccaa

SEQ ID NO: 329529 - DNA, 243 bp, Zea mays
cagacacatccgactgcccgggccaaaccaaatcaacggcagcactgacgttgttcacgctgatcctcttcatcttgtaaagggtgctcacaagctcatcctgagcactgctaacgccggtggccgtgtcgctagcggcgatcatcttactccatggctgagaacccacgcctgactaggtggtgcctaacaggaacgtttcctgcctatctcacgagacgagcataaacattcggagacatg

SEQ ID NO: 329530 - DNA, 238 bp, Zea mays
accacgcgtgcggttaattgtggaggggagtgtcatgtatctatacagcgtactctagaacgggttgcatgtaagcgccatgtgagaccgtgagttctctatcacgcctgatcatggagtaacagcgtttctaaaatgcatgttgacattggccagctgacttggtgtgatctagcacaactatgaagagagtcatgaatggcttgcatgatggcctcaaagatgtccatttaatcct

SEQ ID NO: 329531 - DNA, 123 bp, Zea mays
gtgaagaacgcgtccaaactggctaccgttttcacgtagaagaacaaggactccatgggcgcgggcattaactggctagacggcgaccagatacgcacggccgtcaacatctattacacgatg

SEQ ID NO: 329532 - DNA, 56 bp, Zea mays
taccggtccggaattcccgggtcgaccaagccttccgctttctttttttcttggca

SEQ ID NO: 329533 - DNA, 328 bp, Zea mays
gcacccggtatccctgctccttttccttggcggacgaacggggctccctccggcgactggggtgctccctctagccatcgactacctcacagatccctgtaagccggaccccattacccttctcggatagctgtgcccctaccgacaggacttcacgggagcaagcctggggttgatcggaggactcggcatggatcggtgcacgaaaccacgcccaggacttctcacagatcacactggaccgagcgctgagcgcctggaacttccctgttcatgcgcgagttaggtggaccggagctctccgtcgtgcgttgaacatcgctgtgct

SEQ ID NO: 329534 - DNA, 172 bp, Zea mays
cagacacgttggcatacgccttaccaatcgttcatacacgtactcataatttatcacgggggaaaatctagatgccttggatgaagctaactaagatttgcatgacaaccctttcactgatcaagaacctgtactatggaagaacacataagatttcttaaagaaatattcc

SEQ ID NO: 329535 - DNA, 57 bp, Zea mays
cagacacgtgcgcctactcgtgggcaaactctcacacatgaacaaataccttatcac

SEQ ID NO: 329536 - DNA, 299 bp, Zea mays
cacaagatacatgacagtcgtgtagctagctcatgtatgctcaacggtcataatctagaacatgtattaagagcgcgacgagtgcctcaagaattactataccggccaagatcattcatcaacagcatgtcactttgcattgtggccacttcaatctggatcaagtgtggtcagatcttttagtgatttaacgcttatattacttacaacaaaagataaacccaccaatgcggacctcgatgtaccgcccagttcagcagaagcgcacaccgagatgttccatctgagccctgctggcc

SEQ ID NO: 329537 - DNA, 389 bp, Zea mays
atctggtttaatcttacggcctcctacgggagggctgagtaccgggactatcttgcgagtgcgtcgcagttcacaacaaattggtaccggagccactacgcgcgcatcgccaccatggccggcgcgcacgacgatcttgtgacctactccgccaagatggacctcatcctcgagcaacttgccgacatcaatgcccgtttggattcccatgacgctcgtctggccaagctagaccaggcgtgggtcagcccctttgcttctaccgcgggctgcctgggcgcgagcgagggcggcctgggcgcgggcagaggcggccgaatcgaggacgatgggggcaatgggctgcaacccaacacacccaaggaggtggaggcggcgttctacgttga

SEQ ID NO: 329538 - DNA, 250 bp, Zea mays
cacgcgtccgagcatgttagcccaaataggaaaagaaaactatgttatcttataccgacttaattcagaacatgtaaaaaaagcacgacatgtgcatagagaattgctgaaccagcaaagatcattcatcaacggcatgtcactttgcattgtggccacttcaatctggttcaagtttggtcagatcttttagtgtgttaacgcttatattacttacaacaaaagataagcccacgaatcagtagatcga

SEQ ID NO: 329539 - DNA, 87 bp, Zea mays
gtgaaacacacggatgctttttctaccttttttgaattggacttcatgcacttcatcaggggcattattaacaatctcgaggggcac

SEQ ID NO: 329540 - DNA, 179 bp, Zea mays
aagacgtgcaagatgtgctggatcggatcgcccggccggcgcatgcttaataatctgttatatgctcccgttgttgcatttcttgaacggattggagtgtctttgcgtactccctcagtctagagtcacaatatacttatacatgttgttaaggaataaggatggagggggatctttct

SEQ ID NO: 329541 - DNA, 242 bp, Zea mays
tttctgctgtgatggttgccttggacaagtcatttttaccccactacggaaatccagcgacgagttttacgcggcgatgcggcacaacctgagcagcgtgaaggacacttttgaggaggtgaagcagctggaggagaaggccaatgctgtcatggcggttgcttgagcggcgattgcagcggcgctgaacaccattaataacgagacgcatgctgagctggagcatcagattgcttgaggga

SEQ ID NO: 329542 - DNA, 131 bp, Zea mays
ctcatgttgtttgttcttgcatgaggaatctaccactaatattgtcctcattgatgcatacatgtgtgaactcaaagcattgtgcatgctatacttatttatcaaacaaatacaaaagcttccttgtacct

SEQ ID NO: 329543 - DNA, 301 bp, Zea mays
gtcctgctcacggaccagttcggcaccggatccaagcccgacctcctgcacctcatcacgtacgttggcaacatattcgaggtgcacatcatagaccacgggatccatgacttctactttacgctcaacgaggccctgacttacaactacacgctccacaccatcgccgcactaaagtacccgctctgcatacgctttattgcgacgattcacggttacccgctcttcgactacaataacttcgcctatcataagggtggcaccacctataatacctcacatggcttgttaataaccattc

SEQ ID NO: 329544 - DNA, 154 bp, Zea mays
caaaaacactcgattcatgtggcttcttttatcaagagtgtattcaacgacaacatcaggagggttaattgcttgcttgaggcgatctcattttactctgccaacacctcatgataacataagagacgaccgggcgcatccttacaactgctct

SEQ ID NO: 329545 - DNA, 314 bp, Zea mays
ggccgacattggttttttctatttgcaagattatgtactgttgatcaaaataacagcactacgcatcatacaacatgctctaggagtaggatacagtaacacagcagcagaacatccaacccaacattctgccaagctctgatcaaacgccaaaacctgcaacatgcgatctactgaccgtacccaagtaactcaccccacaccctaccttgatcgccagagcagcttaccctctacacacactactgcgcgaggcacgcaccgaccacacggcgagctaattatgtatgagtaagtttagggactgggcttac

SEQ ID NO: 329546 - DNA, 130 bp, Zea mays
gaggcggttaagctcctccccggcaacgtattcaaacctggccacctgatccatatcccgggcgtttttaccatattcgaagcggacatcaaagagcacgcacgtcacgacttttactttacgctcaagg

SEQ ID NO: 329547 - DNA, 203 bp, Zea mays
cagacgcgtgcggttccttcctcaaccttattttcggctctcaccagagaaaaattgaggagcattaaccaaaggatcagagggccaaagctaacatggacaagcctgtgatgaaccaatgagtatctccagaagctttcgttaaagtgcaaccaaatccgatatcactttgatctggttagcttaaaaccaacgcttttaat

SEQ ID NO: 329548 - DNA, 219 bp, Zea mays
ccgacgcgtgggccgaagcctcacgagcgcagagcggagattgcagcgactcctcctccctgcgggcgatatacgctcatcgatgccgtctatcacacacctatcattaccgctcctcttcctctcctatgctatgctctctaactcattgtcaaaatagaaaaaaaaagtccttgttgagatagatgtatccggattctgcgaggtgacctggtactg

SEQ ID NO: 329549 - DNA, 166 bp, Zea mays
gaaaatacgaacgggccatcgtgtcatggtgctaccacgtagataaactctggcttgctcgtacttttcagatgcatggttggacaacaccttttacttccagcaaaaaatacataatatgcatgtactcctcattttttccgtatagtaatataaacaaattttc

SEQ ID NO: 329550 - DNA, 348 bp, Zea mays
gacgaatggaatagggcctgtatgaaacatgcagatgacgaacgcgatctaacttatgagggcatcatagagtctgtatcgggtgaactggaaaaggagctccacacatatggagaggacacgtgaaaagcacgctactacactggatcatctggaccgggttgataggcatgaagagtcacccctgattgagcaagctattcaaacacgcatagtggacgattaagaaccttgacgatcatgaggcactttcgcagatacaactcgataggcttcaccatgcctaacactgactcgagaaaaattgactttcacagacgttcgagcacaataatgctgtaccggaga

SEQ ID NO: 329551 - DNA, 56 bp, Zea mays
atccgatcatgctacctaagatgcgacgacgttactctatcagcatgacagcagat

SEQ ID NO: 329552 - DNA, 331 bp, Zea mays
gcacattgcacagccaaaaaaaaaacaaaaaacaaaaaaaaaataaaaacataaagggaaaaagaaaataaaaaaaatgggaactgccaaaaaaaaaaacaacaaataaaaaaatatactgctaaattttgataatacacttagcaattctaaataagacagattaacaccagaagaagcaataatgattgagctagttacccttacagttttcatggaatataatagtccttacgatacttgactaacttgtgcaatattgaactctactacgccaccctattccaaacgattattagggaatatatcactttgacatccattgcatctc

SEQ ID NO: 329553 - DNA, 175 bp, Zea mays
acgcctgcagtaccgtccgaattcccggtcgaccacgcgtccgaaaaaaaaaaaaaaaatgaaaaaaaaaaaaaaaaaaaaaaaaaaaaggacaaaacatactggaggatgcaagcttactaactcgggcatgcaatctctataactattctatactgtcacctaaattctatta

SEQ ID NO: 329554 - DNA, 413 bp, Zea mays
gagccaacagagcgcagaagctgcacaactaggaggtaagagccaacagagcaacgcccaggcacacgcgacacgaaccaggcaaaccagctgccgagggaggaaccctagcggaacactgtgcaggtgacggcggctcgctaccggagacgggggatacggcggcatcgcccccctcggcccctcctacatccacggcgcggcggcgccagcagccggcctgcaggattccacgtcgtccatggcgcttgtcgagatgtgtgggcagccgtgcagcggtaaaacagcagccgacacttgccttgctgtggcgctgcactcctgctaacctgacctcactgtccgaatcatcgatgagtcatcccttcatctcaggcgcaacgatagctacaaagatatggttgtggagaaaa

SEQ ID NO: 329555 - DNA, 264 bp, Zea mays
gcacgtaccggtccggaattcccgggtcggctcgagcgacccgtcagagcaagtactgtgcatagaggtatactacttgtcattgagacagtggtacctacacggcgggtgagcagatttcgccggctgccctcgtgatcatgcgatcaacctactatgggcgagctgtgacctatagcgacagcgaatagtagaccatgagagttccggtgctatcctgcacacgttcaacgcctgccttcaaaaatgcatagatgtgagtta

SEQ ID NO: 329556 - DNA, 448 bp, Zea mays
ggcgacgagtcggagacggcggtgcgggcgtctgaggagttgcgggactggtccgacatggcgccagtgtgtcttgccgaagcgttctcgcggctggcgctggaggacctgtggcgcggcgccatgccgtgctgtcgctcctggcgggacgccgcgcgctcgcgcccgggactcttcgcggtgcttgacctcgagcccgggtttgctgagttcacacctggcgccgaggcgacagcgtggtggacgccctcctttcagcgccgtgatgacgccatggtgcgctttgacagcacgttcgtcgaggtggagctgcgtgagatccatgtacaccactgtttcgacgactcgctcggcttcggcggcgagaggtctgctagacttagtatcctttcggtcaaaactagcctggcagtaaccgatcgatcaatgcttattgtcggagcatgct

SEQ ID NO: 329557 - DNA, 407 bp, Zea mays
gataatctgacgctccaaacaatgcactgcattagctatcagggcttcagattctgcaaaggctaaatctgtcatatggtctggacactggcattcgtgtgaacaagatctatgcgaagagtccaatgaaaacagctaacctcgacaatcgacagattcctgaccatctactcgatgtacttataatctatacctaggcgtgctcatcgtgacctttacggagcctgcatacctacaccatggcaccaattgctatagatactataagaatatcggagctaatgcaatctgaagagagttacgaactgacgctggagtgaagaccattacggatctgaatgccctgacgtttctgaatgtaagtgaaactgcttacctgtcagaccttacctatgatatccacattg

SEQ ID NO: 329558 - DNA, 119 bp, Zea mays
ccagttttagttaatgtgctccatgcttgacgtttaaaaaaaaaaaaaaaaaaaaaacaaggagaaaaaaaaaaaacaaaatggggaacacaaaaataaaaaaaaaaaaaatataatat

SEQ ID NO: 329559 - DNA, 368 bp, Zea mays
ctcacgcgtccgcccacgcgtacggtcacgcgttcgactacgcacccgctcaggtcggagccgacgcggacggtgtcgagctggaatgtagacctacgaagctgcagtcgtacgccatcgatatgagcaccgtgtcgagagctgttacatgagcctctacgtggtgtatccaagcagacgacgcgacgggtggacatatctacgatgcactgttacacggtgacctctagtactgcttgaacgttagtcagtgcttcctgaatccaatgagctactacgtgttaccatttttggactgcgtctttcggaagcacgtcaagcgcgcttgatacgacctcaagttcgggatcaccatgtactagggcagg

SEQ ID NO: 329560 - DNA, 468 bp, Zea mays
aagcgaaaaagtgaagcctgttccttactatgttcaaggatttttgctctctcagagaaaaagcaataaaaaaaaaaaggaaaaaaaaaaaaaaaaaaaaaaaaaaaaaaaaaaaaaaaaaaaaaaaaaaaaaaaaaaaaaaaaaaaaaaaaaaaggcgatcagagcgaggcacgggaagggcaacgacagagccatgagttacaaaaaggtcccggagtcttatccgccaccagggtactggaagccgtaccaaccgcccaaggttcaaccgaaggggccttactacccgtcgccgaattaatgaattctggggtaccagggttactttaacgacggacagaaaccctacggttatccgccgccgaagggtgggtattacaataagggtaacaaccaccataacgaccaccatgaccataatcatggtaactatcactaacaccacgaatatgatgactgatgcctt

SEQ ID NO: 329561 - DNA, 256 bp, Zea mays
gtgttactcttttttttgtgtgtgtctcctggcaatagctaattatgtcaaaactgtcattgataccaccttttccattaatcattccttaaaagaatgtgtaaatagattcctatgtgtggtccatgatgcagatgcccttcaaaaaaaaaaaaaaaaaaaaaaaaaaaaaaaaaaaaagggcagccagttttaagggtccaaacttacattcgcgagggtgccaccttttaagtattcaatcttgccaccttaa

SEQ ID NO: 329562 - DNA, 318 bp, Zea mays
gaaattttagttcaatcattgtatctattagatatgtcagagtcctcttgcatacatctattgaccgcgtaactcaaacggggagctggcaatgattttacacattggacttcagcagttcctactgcaccccgattgcctctcaccatgtctgcactgacatggttcaatgctccggtgccaccatttatgactaccacgacggtgatttcgtataccaactacatgaccaatgctatcttctctaacgccatgggcatcaccaaagtgtagcctcaaagagcttgcattcttatagaccctaaattaattgaccca

SEQ ID NO: 329563 - DNA, 156 bp, Zea mays
ctacgcctgaggtaccggtccggaattccgacctaggcgtacgcgtccgcaacgaagcccgaatccgacttatctagaatgatatcaggcttgccaatccttatggatagaactggattgatccgcatgggaccatgatcttcatagacgccactg

SEQ ID NO: 329564 - DNA, 178 bp, Zea mays
cggacgcgtgggcggacgcgtgggataagagggcttcatggatccagcagactagaggatttcggtggaagcataccaccagcagcgtcatcggcattagtcaagctgacaaaccggctcaacttcctgaaagaacgtatggctgctgctggcaagcgagatgcagagcttggatctg

SEQ ID NO: 329565 - DNA, 318 bp, Zea mays
ttcgtggacgctgtgactgcttctgagaagttcattagcaatggactggaagctgaacgacgtgacatgacgcatttacatggaaagctcctcgttgaagtaaacagaagtttccttgaagaacacagtgctgccttgatgcacccagcagctgatgctgaaatgatgtatcttttacagccaaatgagcagattgaggcactcaattcaatcgaatattcaacaactattacatagtcacggcatagttcgcttaatgctgtaaaaacatggcatatctaagaatgaattgatgttcattacttactggagacagtc

SEQ ID NO: 329566 - DNA, 354 bp, Zea mays
tgattactaggtttttttaaaaagaattgataataaacatccgataatcaatcaagcgcatacaaagaagatgatcaaaatgcaaataaataattaaacacttaaaaagtattaccctaattaatataataactaaattcattatttttaattgatggcttttatggtgttacaataagaaacataatacttcaatcttactaatgtttaaagcaaaaatcttgggaagaatggtgcaacaaacacaaaaactctgccacggtagcacaacctgtctctgtgatgatctaaacaatttttttcttttcatgaatgttttttgctttgtttttgggacagtcttacttgattctt

SEQ ID NO: 329567 - DNA, 279 bp, Zea mays
aaaatatggatccaaagagccatctagcggcaagatgtcttcaaaccatgaaagcttgcatccaaggaagactgttgtagaattaccagtccgtgtggactttgttgggggttggagtgatacaccttcgtggagcttggagcgtacagattgtgttttgaatatggcgataagggtatgaggaagccttccagtcggtgctatcgtagatacaacagattaccaccttggagtaaggatcgaagacgactcttgtagacatgtttatatcgatcatct

SEQ ID NO: 329568 - DNA, 78 bp, Zea mays
tggtcagcatatctgtcgcgttcatctgaaattacagctgcatccggctgatgcaagagggactatcgcaatctagtt

SEQ ID NO: 329569 - DNA, 274 bp, Zea mays
tttcacgggacctgagacgtgcttctgttagattacacactcgtgtttctgacagctgcccgacactgtcatgagcgaattacatggaatgtcatcctttgtagtttacacaccattgcatgcacttcactaagcctcattgacataccgggcatatactaccgtaatgaggtttaactctatagccaaatatgatgatcgacacaatccacttaatattatatttacctacttttacattgtcacgtggataagtcccttgatcctgtaaaaa

SEQ ID NO: 329570 - DNA, 292 bp, Zea mays
aagacctcagtgaacttccatgcggtcctagatacactactgaccacatcgcgtacccgcgggatgccacttgcgacaaatcaagagaggcatcataatcctgacctctttcctaaactataacatgcagtgctggtccctgagaccgtctgtgcaagagacaacaccttcaaacacaaaggcgatcacatagacagtacaccctactgcttactccagttcaacctgccgattgccctttcgaccgtggtaacatccaaagagcgaattgtataactgacaccagctcaga

SEQ ID NO: 329571 - DNA, 269 bp, Zea mays
cgcgttcgcgccaccgactcgctcgcgcacccgctccacctctgccggctccgcctcgccgacccgcgctcgcgctccccctccccacggcacgggcggcgcgccatgtcggtccgcagctgcctcatcgacccggacggcagcgcgctcgtcgagctcgtcgccccgtccgaccgcctcccggcgctgagcgcggaggccgaagcgctaccgtgggtgcgcctcgcccgcggcgacctgcagtgggcgcacgtgcttcgctaggggtg

SEQ ID NO: 329572 - DNA, 203 bp, Zea mays
attcgatccaaaaaatagacaagaagataatataccgaatatgggaaattcttcatgggtgggtctttgtaaaataaaaaggtaaaagaaaactaaaaaatataaaataacataaaaaaatactatttaacaaaaaaagggaggtctatccaaagttcctttataatctgtactaatgtttttttggtttaaaagttttttta

SEQ ID NO: 329573 - DNA, 361 bp, Zea mays
agtcgcactaggaacttactacattcttgctctatagaaactgtcaggcttgtgagagttctgttatgtaccgcttcttttctaaagaaaaatagtagagttttagaaaacataatgaatacagcttcttttattgaactcttagaagtactccagccattgtagtttaatttatctgcatacagttggttgtattgaacactgggacaccctgaggtctttgttgttcaattatgattatatttctgtatactttatttttaatggttaatcaaaatgctagcttatataatgctccctcaaatgcaggttgcaatattttccagcatagcttgctcacctacttctcaatttagaagac

SEQ ID NO: 329574 - DNA, 245 bp, Zea mays
aaggaacctgaagatcaaattggagaagtacctggagtttgcaccaaaaaggttaagaacaggtgcatccagaagtggaggaagactctgatgaagatgagtttggagagatctaggccatcgtctcccagtcaactagggattgtggaggatcgtcgtcgccatatggtgtaatatcttttagttattttgtacagaatttctattaagtaataaagatatgacattgatttctgtaccaaaaa

SEQ ID NO: 329575 - DNA, 333 bp, Zea mays
gagatacccgatcgacataggcatacctgacttaacttgaaggctgacacacgtacatgcgggaggggagaccctttatgagctggacctggtagcggcgattgagatccgacgcaactctatgccagctacttacacgagcacaataaactacgacggatgttggagcacatgaatgctttacatgatgagaatcatctaataactggtcacttgagtgacgcctgactgacaaagagagagatctactgatgaatgggctgatatctctactaaagagtcacatgtagacacccatgaacttcatgatctatgtcaacgtcgacgaacagc

SEQ ID NO: 329576 - DNA, 440 bp, Zea mays
  unsure (1)..(440): unsure at all n locations
ttctgggcgagcgaggatgaggcgaaggcgtgcttggcgaaagaagccagcgtcgactccattggacgtcgccagtgtcgaggagtacaagcagaaggcgggcttggtgtcgaagcggggccggacgtcgacaggcagcaactaactaccgtgaccatcgtcaccgttgtggtggttcttcgccctccgtgccttcttccccctgtccgatagccgacgccggtgcgagatctactcccccccatcctcgcttcaacgagcacctttctttaatcggttaggtaagatccactttcctagtacacggagttaatgctcagtgcttcatactntggcaatcctttgatttggtcagtacggttcgtatatctgtgaaattggttgacaatgttcgtgcatgtgcgaccatggaatacctatccgctctaagatctggtaga

SEQ ID NO: 329577 - DNA, 272 bp, Zea mays
ttcggcgccgtaaaaaaaaaaaaaaaaaaaaaaaaaaaaaaaaaaaaaaggaaagaaaaaaaaaaaaaaaaaaaaaaaaaaaaaaaaaaaaaaaaaaaaaaaaaaaaaaaaaaaaaaaaaaaaactaaaaaaaaaaaaaaaaaaaaaaaaaggggcgtcccttataagggataaaattttacgcaccgttcctttcaaagtaaaagttttctaaaagggtaactaaaattaaaataatgggccgtgtttttaaaatccttattatctggaaa

SEQ ID NO: 329578 - DNA, 77 bp, Zea mays
tacactacctcacacgatacattctcttctcatgtacgagtacaattccaaggaattggcaatggattaaggacatc

SEQ ID NO: 329579 - DNA, 231 bp, Zea mays
ggcacccacagacacgcatagcccttttagcttaagggcctatgggtacttactgggacagggcgctaaggactcggagattgcaatagcgcacgcagagcacaatgatcgacacacatgtgatgacgtatataggctaaaagcattagccggcacatagatcaagactgatgcatgaaaagcaccactactacgtctacgtaagtctggacaataagtatatgatgacaa

SEQ ID NO: 329580 - DNA, 89 bp, Zea mays
ggcacttttgtttaagctaagttttgcggagacaagatacttatatatgttcccgatgaaattatgggtccttgtatgctctggaaaaa

SEQ ID NO: 329581 - DNA, 310 bp, Zea mays
gtttgagcaaccaagaaatcatttgctctgctcacaaacggtacacgcactttcctgcgtgggttgccacctggttcatatagggaaacggctcaactatggaacagagacattgtacgactggaaagctatgcaagcacatagcttttcatcgtcgataaagaggattaaacgtgcccttgactcgtatcatgaattgcgtatcgaccatttgcaactggcttgcgcactttttagacagtaccttctgatgcaaaactagcactggttggaagctgcatggctcaaccaatgagtagctatcttgaca

SEQ ID NO: 329582 - DNA, 73 bp, Zea mays
cacctgccgtaccgaatttccgggtcgacccacgcgtactcgtaccatcacttaccacatcctattatttctc

SEQ ID NO: 329583 - DNA, 247 bp, Zea mays
ggaccatggtggtgtgcgcgacggtgcggcccttgtgttggtggagtggttcgaggttcattgcgatagctggaagattgctcccggtggaacaaggaaacgtgtgaccgaggttgtagcaatggaggacttctgccgtaataagggaagtgattgggactgaaatttctggagataagatgctcttctgagaagcctggttatgtgagtaaaattgtttgtattccggtaccatgataattaaacg

SEQ ID NO: 329584 - DNA, 311 bp, Zea mays
gcaagcggttcagggacttcattggtaaggctttcgacgacgatgtacagtgactagctcataggacagaacagggagccagcgaactaaggcaattaacacttcttaatttgggtggggttagtttgttcccacacaacaacagtggttcttttaagtaaaatcgtcggagcaatctgcagtagatcaaaacacttgcatagtgcagcaaaaggaggcttagatggtttcttgtagcatttgtgaattttaagcatttggtgcgtaagttaaagctgaataacacttcacttttaaaaaaaaaaaagaca

SEQ ID NO: 329585 - DNA, 258 bp, Zea mays
ctgacacatgggctcaccggaccctaaacctgagccacctgcctagcccggaggtccgttgatgcgtgtgcgactctaggcgtagcctgagcccactacaagggctagcggtggatggagctgtgaaccgattacccatacgatccccttaccggtggagggagaaactagcctacgaggccaataaagccagaatggggcacgatgaggatcatgatcaagggatgcgtgtggaagaacacctacgactagaaactt

SEQ ID NO: 329586 - DNA, 304 bp, Zea mays
gcatgaatacccgcatctgtttccagtcatgaacttcctgcaaactctcagggagagctgctggagggtctttagacacatctacttttctgtatcacggtctgatttgatgtccgcgagtgaagagcatcgctcgctcctagactagatcaacgtcacgatcaacgagaacatccatgagtataagcactcgtcgtcgtgctcctcctcttacgactcaaacgatgacaaaaagcccaataactctaagaagaagaagcttcttggaagaaaacattcattgcatcatgttctcggaggaggc

SEQ ID NO: 329587 - DNA, 287 bp, Zea mays
ccgatgcgcacgtacgggtcgacccaagcttgcgctggacacagagtggctcatgtatacgggcgtcaggactacctacatcctaggggtctacttcatctgactccattgaactctacagcctatatatgcacacactggctcacgcgtggacccgtcgacaaccttcttgcacttggccgtcacaaaccaatgtctccatcgtaagaacagaacaccttcagctgatgaccatcgcatgcacatcccattgacttggcgcgagcattttgataatggcatacacc

SEQ ID NO: 329588 - DNA, 285 bp, Zea mays
cttcttccttttcttttcttttttttttttttttttttttgtttttttttttttttttctgttcttttgtttttttctctctttagttttttttttttttccttttcttttttttttttctttttttttttttttttccttttttttcttttttttttttgttttcttttttcttctttttttttttttctttttttgttttttcctttttttttttttttgttttttttctttttttttttttttttcttattttttttttcttttttcttttttttttttttt

SEQ ID NO: 329589 - DNA, 290 bp, Zea mays
  unsure (1)..(290): unsure at all n locations
tgtacttggtntggtctatgtttttgctgagtatggtttttttttgttttgggatgaaagcattttaaggaacggcgatcatttgtctgattttattaaaataacgaatccattctcttgacatggtcgttaagagtcacaggttactctgaacgaaaatgggaaattaacccagggttgtcaaaggtggttttggtgaggtttcagaatgacacttcgtttcttgagactgtgggccaccgtcgtcgtccaacttggggcccttggaacccttctggacagggcccttc

SEQ ID NO: 329590 - DNA, 202 bp, Zea mays
gatgcacgcgtacgtaagctccgaatcttgctcgagagaaacaaactcctattatcactgatccgaaaactactttttctcttagaagttcactagatgatatatattaatattacacacatatttagaaatcgatataaatcctttcgtgatattgttccttgcacggagcgttatcataatatatgcttcacgtgctcac

SEQ ID NO: 329591 - DNA, 208 bp, Zea mays
gcgaagggggcacggaagccagggcggcagaggcgctaagggaggcagggaggcgaagaggacgcgaggagggcacggccagcggcagagagaggcggcctggtgtgcacgtgcgcgcaagtgaggagagaaggtgttacagacactgtccaggaatgggaggagggagacaacacgacatcagaaattggggagggcgatggaccga

SEQ ID NO: 329592 - DNA, 337 bp, Zea mays
ccacgcggacggaaaagccagcgcagggggagcagggagcagaggagaagcagaatacaagggtagcggcagaggaggactgggtcggggatagcgggtaagttcctaaggaagctgacagaagaggagagggcgtgcatcgctcaatcagcaaccaactagatcaacctagcccaggggcatgcagccgagaacgccaagaagcttcgacgagagtgagcaggagaagaggctgaggaagaagtacgcgcacaaagacgaggagtgcgagcgcgggctaggggtgagccgcgagatcccgccctagcacatccttcccgacaacatcctcccacac

SEQ ID NO: 329593 - DNA, 411 bp, Zea mays
atgcacgcgtacgtaagctccgaattcggctcgagattgatatgagtgagcttgatgaggattctgatgggttccttcagggacattaaatggaggcctatatacgaggtctgatacccaacttggcacagttacgtgacatgccaactgcctttgttcaaatgtattgtcgtattgctgcacacaaattcttcttcttttgcgatcctcatagacgaggaaaagcttgcattaagaaagttttgcttaataattgtctccaggaactcatggagctttaccaggaaaggtaataaaaagtcacggacacaaagcaagccgaaaacttgttctctttgacttctgctcaacgcatatgtgacatgtttcttgctcttgataaagatactaatgggacattaagcaagcatt

SEQ ID NO: 329594 - DNA, 130 bp, Zea mays
acactgctctctctcagccatgctatttacctccactacggggagcatgatcaggcacaaaagcttacatcaataccacctcgtagtgaaacacactctaatcaacattgatgacgatacatgttctact

SEQ ID NO: 329595 - DNA, 207 bp, Zea mays
aaaaaacaagaagcaagttgtttggtcctgattgcagggtcgattggtgagctgatgtatatcggagtaatgtaacgacagaaaaaagaagtaactactacagaaactatttatagaagcggtagattcacttcataggctatagcaactgtctttaccaagggtatgtagaaaatgatttattaaaaataatagtatttattaaat

SEQ ID NO: 329596 - DNA, 321 bp, Zea mays
cgaattctagggttaggttgctgttcatgcttgttcttgttgtttgtttgtaggcgatggttacagctgtggcatctactttagtactttcgaaagatgaagctcattttgcctgtatgtcttaaatatagtgctctgtattaagcttatctgcatcttttttttttttgcatatgacatctggtagtattaccgtcgagcctatgatttgttattgttatggaataacaaactgaaatctcccgtcagatgacattatattgcttgtgtccttgttcgacttactcttgcatcgtgcataacagtatttttttttctttt

SEQ ID NO: 329597 - DNA, 214 bp, Zea mays
agatcgatctaggcggaggcacactattcgtcggtaggagccaacaacgttttacgaacacattcgacttggacatcctctgatgactctagacaaccgacatgactaccacgcgaccgatgcatctatgatgaattaatccaatgtatttacataatggtcgatttactaaactaggatttgaaagcttgcgcgtactatactattgctatac

SEQ ID NO: 329598 - DNA, 328 bp, Zea mays
  unsure (1)..(328): unsure at all n locations
ctgtcactgaaggacagggagcggctgctatggtttcgtggngctatggcggccggagcccatcctctgctatccgtggcgaccggcaaatgctatccgcggtgctatggcggacagactgagctcctatccgcggttgccgagaaatatgggtgatagtgccgattggaatgaagataacactgctctagtgtgtgaattgttctccgaacaagtgaagtcgcacaaccgttctggtacccacttagataaaacaggagacaaaaatgggatggacaaattcaaagaaaagactgggttgtcctacaccaaaatgcagttcaagaac

SEQ ID NO: 329599 - DNA, 184 bp, Zea mays
acgccaccggaatcaccattcggttcaccaataacaccttcgtgaacgccaccaacgagtacatggtcatgatcctgatcaccatatgattgttttaaaagcagcagcagtctagtgaaagtaatgtttcgttttaagattctagctgatagacgtcctatcatagctagtcaaattagatttg

SEQ ID NO: 329600 - DNA, 105 bp, Zea mays
gaaataatgtgcttgcgtgattgttagtctatctctttatttgtttaataatgttataaatgctacggtgatgttttaacatgataattgtgatgttgttaaaaa

SEQ ID NO: 329601 - DNA, 106 bp, Zea mays
ccaagacgcacacgggacggttcgttcaccaaacctaccttggtgggccccacttttcccccgaaccgtagcttcagagtgatccccttttcaccctctatataat

SEQ ID NO: 329602 - DNA, 188 bp, Zea mays
  unsure (1)..(188): unsure at all n locations
gtnttgtcnccatattttttatttttttttttttttttttttttttttttcctttttttttttttgttttttttttttttctttttttttttttttttttgttatttttttttgtttttttttttttttttttttattttttttttttttttttttttttcttttttttttgttttaatatttttttt

SEQ ID NO: 329603 - DNA, 317 bp, Zea mays
  unsure (1)..(317): unsure at all n locations
atgagaggcaggcgtgtttgccgatatgaactgtgttgttgaggtatgacagatttatggggatagaagaagaggctcctgtttgccgtgtgagcagcagatttgatgtattatttgttggctaataaacagctattgtacactgtagaggcaaaagaaacaaattaacgtggtttccattttctttatatgttttggggatacctgaggagcggtttatatcatacatttttattgacataattcaatagggantgttatgtgcgatacttgtcaaaaaaaaataagaaatcatggagaaacaacggctgtgataa

SEQ ID NO: 329604 - DNA, 424 bp, Zea mays
ggccactgaggtaaatacaagtgatagccgtgttgaagtggactccaagatctagaagggtgttgggggggagcacaacacaaattctatcaaagagcttatcagcaacacgcctctaaattataatgacaatcgtttctttgggaaattcagatagtaaacaaaaagtggctatttcttcagaaacgcaaggttgctttacaattgtattatgagaaaatatttgatgatgagaaatggaggatctggcgaacgacttcatgagtatagttgcagatagaaaagacaacactgacgatcaaatggaaccatcaattttggcacttgatcgcaacaacacatgtgagctttttttgctgataatctgatggcaaaagcaaaatcatgaaaatatgatggcataatggttatttctgaagttatt

SEQ ID NO: 329605 - DNA, 246 bp, Zea mays
aaaaaaaaaaaaaaaaaaaaaaaaaaaaatattaaaaaaaataaaaaaaaaaaaaaaaaaaaaaaaaaagggaaaataaaaaaaaaaggcgaaagctttcttatgctataatataaaataatatatttttaaaaatggggtgttgaatttaaataaatcataatatttattacaattgtccgtacataaaaaacctttggttttacgaaacttattattaattccaattatattcccattttaaaa

SEQ ID NO: 329606 - DNA, 432 bp, Zea mays
agcagatccagaaatcattaaattacagcttgaatttctttgatatgaaaaaattcacctcgaatacaaatgtccacaggatacaggaagctccttacaatactactaacctcatttctgtacatgatccccagacctcagtttttttttccatcacaactgttctgggagataggtgcatccacatcctggactggctggatccatcctccaggaaatcctgctatgtgttgaagaccgaattttttgtaaactactactactactaccgtttggcactgcagacccttttgttatttgtggtcacggatgaaagttgagatccctggagcaaggtctcatgtggagaacccccttattcatcacgtattctgggaactcatgcatggcaaaacgccatgctgattgttggacatgaacataatggttacg

SEQ ID NO: 329607 - DNA, 375 bp, Zea mays
cacagagattatcccaggaaccactccattttggaattctctgcgtcagcgaagctcctgccactttgttcaccaggttctgtatcgtcggcagcaccctcaggtagcagaacccgtacagccacagatgcagccgccgccgctgctcctgagcccgagaagccccatgagcgagctgcggaggctgcacatgccgtcaagcccgcgcaaggtagcgtcgtcctcctcctcctcgtcgtcgtcgtctgccgtatcgtcccctaagcacgttggcgaggatcagaagcaaagaccagctgcgcctgagaaccaagccaccatcgctgactcgatagtgtgatccatcagccatggtggtggagagactgtggcatt

SEQ ID NO: 329608 - DNA, 389 bp, Zea mays
gttcttagggaaatttggatccataccattaaaagatcaccactttggatccataccattactatctcacttacatgtgggtccacatgagtcaatgacatgtggggtccatggtatatatctaaagtttggatcttttaatggtatacatccaattgttcctagttcttaactgtgttgcttattccatcaggacagcacgtcccaaatgattttgtgttaactagcaaacagtttgagataagttatgttttgcaagattgacatattggtatatagtccgtatttttcttgtcttctcgttcttgctcacatgtgttacatttgaaattcggtataaaccttattaatatggactgttattggcttgtgcctcatttacatcttgc

SEQ ID NO: 329609 - DNA, 351 bp, Zea mays
ctcctcttctccctcctcgcctactacctgcactaagcggagcgcggcgggcgcggcggcgagggcgggcgcggcgccgcgctcctcttctccctcctcgcctactacctgcactaagcggacggacggacggacgcgcgcatggcattggcatgcatggactggtgaacatctatgcatgcatggacgacgtcacttgcaacgctgttcccatatagtactactggtctgctatgaatatctatgcatgcatggtaacggggtgcggtatttaattattattattacgtagacattactatgtaaaaatcatgtgttcgcggaaagtcgttctggaatcttgggatggaa

SEQ ID NO: 329610 - DNA, 387 bp, Zea mays
aaaagagatttaacatgaggttggcaccagaagaggagtcacacaagcttactgggtttgtgcataacgctgtcacttgcatcgggatggaaacaaacataccggtcatcatagatgaagctatcaccaaattggatgaggatttcttctggttgggtggcggagaatttgacctcaagctcggaatgcgaacctcacaattcttaagtgtctttagtccattcgtggtgaaatgcagctgatgatagccgtgcagcctaaaagaagcttctgattcatttatttctaccgagcctccatgcatccatcacatggaggtacaccacaatactattgggttttgcttggatctggtggtgggattgtatttttttattggacaggctt

SEQ ID NO: 329611 - DNA, 362 bp, Zea mays
ggagctggacggcattgagcggtaccgggataaggagaggagggataggcataggagggaggagaaggatcacaatggcaggggaagaagggacagggagaaagagaaggacgaccggagaagggacaaggatgatggcaagcatagggatagagatagagatagggagagagacagggataaggatagcaagtacagagaccgggataaggagccagaacgtgaacgtaaccgtgaccgtgaccgtgaccggggcaaagatcgggagcgggaaccacatcggcagcgtgacaaggaccgtatcataaatcgtgataaggaagcagatcgtgataaggaaagggaagcggagggacaaggga

SEQ ID NO: 329612 - DNA, 446 bp, Zea mays
cgttttgaagccaccaggtgcttggcgaactgcatcacgcgcagccgcctccggtgggctcccttccgcggcgccggcgggctcccatcctcggcgcctgaagctatatatctgctcggcgtccatggtcacaggattatatggttgtccatgtcctcgcgccgaagcaagtgatgatttagattaaagaaatgtagaacctgggacatgctctcttcagtttgcacatggtcacaagatttgcaacacatatatagtttgcacattctgcctgctcacatggactcagaagcaacaatacatcatcaacatcgtgtctgcaggactgcacattagcattcatcccgttggctgttagattggcttcagcaacgtgatttttatactttctctatatcctggctttacagttttttttaaaaattccatactctatattttctttc

SEQ ID NO: 329613 - DNA, 286 bp, Zea mays
cttgtgtaactgaaccagaggattgctagcgtcttggatcgaaggggattatcgaaggggattgaaggagattaccttctattcaattttgattagggagggatttaattctctcaaatcctcttcgatcgagacgtaatcaagtaagccttaagatgtgtaggctgtggcttcttgtgtaactgaaccagaggattgctagcgtctgaatttttcgttgttcggagtagtaagtttacagtcaaaaaatataaaatgtaattgttataattttcttttttgttta

SEQ ID NO: 329614 - DNA, 148 bp, Zea mays
atcaaatgcgtgcggcaaacgcatggaatgtgcttgcctagctagctaattgttgtttttttttttctttacttttcttcatacctgtctctctctctcggttgtttaatttttcttcatgcatgtaatataatgtgatatacccaat

SEQ ID NO: 329615 - DNA, 419 bp, Zea mays
cgtcagcatccgtcgcattggccgagggtacctcctgccaaaaagaagaaaaaaaaagggttcacatgcgatgctgccgagaccggagagcacagtacacgacgggcactgacggcgcatcgggattgaagcagtcctccactaccactgccactccagatctgcccaaaacaccctgacggacggagggtatcttttcaacaagtgcaaggcgcctcgtgctaattccaaggtgtttttaggtcctcatgttggccatgaccgatgcatcgcgcgggtcgcctgcgagtgcgctttgcgttgatccaatcacaagcagcggggacaatcatgcatgcccccggccccgtcgtcccttcttttgaaaatctggccaaatcttgatcatgcttttcgcaaataatggtcggtggaatctt

SEQ ID NO: 329616 - DNA, 238 bp, Zea mays
cggacgcgtgggcggacgcgtgggcggacgcgtgggtttttttttttttttttttttggggtttttttttttttttttttatattttcctttttttgtgttaaattaatccgaaggctccaggcctgggggaaccctatcgctaattcccttaacggtagtctccgctaccatacattccatgaaacccaaagactttgatctctcataaagggccaccgaggtcctattagttacac

SEQ ID NO: 329617 - DNA, 63 bp, Zea mays
cacttgccgaaagggttacatcagcacaaaataatctcagactataattggtaattgtgggat

SEQ ID NO: 329618 - DNA, 448 bp, Zea mays
gcagaactgcgacgagcagttcaggcagatcggcgagaagaaccccatggagcagttcgacgcgtcgctcgtcgagatgtccgagaactgccgctcgctctccaacatgatctgatcgatctccttctccacggacgacaacagagagccgggcgttttgggccctcgcatcgtttgtcgccgctgctaacgttcgcatgcccatgcccgcgagcgcgctctcgcgcgacaataactgatgagttaagtttgttttgctttgaccatctcacatcggtatttcctgtagagatgcgttaatttggtctcggaaacggggaggcgaattgaggtggaatatttataattcaagaaacacagttttggttctagaagaggatcgtcgatcatgctgctctactcgatctcctcttctcgttacgaatttaattaaccgttttgtatctat

SEQ ID NO: 329619 - DNA, 354 bp, Zea mays
gtcgcctgacggtccggcccggaattaccgggtcgaccgacgcgtgcgtgcagatcgactgcgtctacctcatccattcctctgctgatgccggtgctagctgccctgagggtggatggttcggtgcaccatcggcggttaccttccacgtcgggcagggcttcaagcccggccacttggtcctcacccccaacgttgtcaccatctctaacatggagatcaaggatcaccggggggacgactgcccctttacactcaaagcgggagcgactgtgacttggacgctcgacatccagaccccggtcatgtacctgatctgcaaccgcttatgtgccaagttcggttgctaccgca

SEQ ID NO: 329620 - DNA, 303 bp, Zea mays
tcgggctcgtcgtcagagtcggagtccgagtcgtcgtactcggggtccagcgtggagtctgagatcgagtcggagttggattcggaggaggagaggccgacgcggcggcgcaagacgaggaaggaaagggaggatgaggagagaaggccgaggacgaaggagatggagaggagaaagaggacggagaaggcgaatgagagggacaggatgaagatgacgaacgaggacatgacgagtccctagctcatcgactagacttacatcgctgttcttaagcacttgtggcgatcattcgcgttgctg

SEQ ID NO: 329621 - DNA, 342 bp, Zea mays
tccacgcgtacgtgctggtgcaagggatcttgccaagatacgagctgagagcatagatcggatcattcatccgtaatgccgaacatccagcagtgcttggatgccggcaagggtgaggcccagggcgagtaccaggcggagcacgcggagcacagcgtcaaggacaccgccgaaagcgcggacgtcagtgcgcacctgcagaaggaccgccccaccgacaccgctgagcaggtggagcacacggtccaaggcgtgaaggacagcgtcaaggacacggtggctggcgctgcgaacaccgtcacgaacacggtggcgggcgttacggacaccgtcacgaaacca

SEQ ID NO: 329622 - DNA, 340 bp, Zea mays
cactcccctaccgccacccctaaaactagccccattcccttaccagcgtccgatcacactgctgggtcccacgcttggatggattccgtcggtacaaatcggcccccgctgcgccccgttgccgccgcagctactcgacgcagcgcgctcctgcgcccccctagccacctcgggctcggcaatcgttttgcggagactaagcttgggatcgcgtcagggtgtggaggaggaggagggtattttggaaaggtacagggatttgatgccttgcggagtaccacgacgaaagttcagagcgggaaggcggggaggagtgtgaccaaggaaatgggacacactt

SEQ ID NO: 329623 - DNA, 406 bp, Zea mays
agagcatcatattgttcactcacgattcgtactgaagcatcaaaacagaaacctaaagctagacataatatgataataaagaactaaataaaattaagggttcagaacgaggttgttactcagcattaatcaaataaatgaagcccttggctggagttccaaactaaactactgcatcttgttttcctttatcatgcccgtacttgcttccttcttttattcataccattgattttatttagttcttaatcattatattattgatagatttatgtttatctattcttttctatattcctttattgttttctttttcattttgatctcttttttttcttttattgtgtttcttatttttttttattttcttacttattattgttatttatttttttctttccttttt

SEQ ID NO: 329624 - DNA, 180 bp, Zea mays
cagtcatctcctccatcaccaccaaactcaacaacagccagctcgcgaaaataatgaagagccgcagcatggcatcatcggccgcgctcttggtgctagccctcgcgctagtggcggacaccgccccacaggtagcggaggcaaagaagaagagagcggcggagagcggcgaggcggcgg

SEQ ID NO: 329625 - DNA, 331 bp, Zea mays
cgcaggcccgattccaattcgacccacgcgtacgcgatccgcgccactccattcgcacctgacctgcggatctcatgcaagctcaggatggcggccttgcactgtgcaggaggccgactgtctcacctagcacagctgcctgactctgacacgcgctaaccgccctggctagtaccagcatgcagatcaacgtggctgctactacaaatcggacgtacagagtctgcatagcctgaaccatactggcatggatcacgacactgcaccagaggtgcatagcaacagttcagtacaagaactctggcccatccatggcgcaaagcaaaggttc

SEQ ID NO: 329626 - DNA, 332 bp, Zea mays
cggacgcgtgggttcgacgccactctcacggccctccttgagcaagagcaacaccacggccttgacaccggggaccttccgcagatcgacggcctttcagaagtagcatactacccaaccgccaccgatgaggccaccatagggcaattcaaccagatggggcttccgacgaccttagctgaacagatgcttccaatgcagatgaacagcagtgcatccgccttgatggccctcacttcagactaccatgaggggttcacaagggccgtaggttgaagggtcaagggtctggatggaactatggatcaattggaaactggagccattctttc

SEQ ID NO: 329627 - DNA, 257 bp, Zea mays
gaccacgtgaacgaccaaaccatatcatgatcgacgttgtgaatcacgcttggagagacggaagttgctacatacattaatggggcgggtactacactagcatgaagtgctgacatgccttcattgccgaacatagtccgaatctcatagactttctcaagccattcaaccaacaaccttttcaaaggcagatgtatcgcactcctcaagtcaagatctcttcgaagcgagctacagtatgtcatcaacggtctagc

SEQ ID NO: 329628 - DNA, 358 bp, Zea mays
accgcatgggctccatccggatcaagaaggggaggaaaggagaggttaggaaagtctgtaaccagcacctgttatcagcctgatctgcgtctgcattcagcagcatgcgtccgtacatcgtcgtcggagtcagctcatcagcgtgccagcaccagtatacacacgggactagctcgttcgtggttactacgtttggggcctcgcgttgcgtgattagagctatctttgatgcatgtgacggcagtttaagttagagaagattatcttggtcattgactttaaggtcgcgtgcagtttgtgccagaaaatgtgtaactgcgtatgcatgcaactatgcaagtacagtgttcaaaataaa

SEQ ID NO: 329629 - DNA, 394 bp, Zea mays
ccgagaccgagcgtgagagagagatcgggaggggagtgacgcagtcagagctcgggagcggcaggaagagagaaaagcggaagagcttcgtcgacagctcgtgtacagagtcgctctgtcctcgatagatggcttgggagggtcgtacaggcgtcccaatggtgtcatgaccttaccccacagaacttgggcagtcgtgcggaactttctcgacgacgtcgaggaaccaccggacttccgccctgcgccgtggtcagtgctgatgctcgcgtggctcacccgaggttacgagttgactgaacatcaccctggttactgggatctcaagtgccaagcgcgttgagcccttgatccactcttggtacccaataatgatctttattatcactattca

SEQ ID NO: 329630 - DNA, 143 bp, Zea mays
cgttcgcgacgggtgcggccagtgcggagcttcggctttgtgcatacaactccattcaatagccatggccacaaagtgtttgtccaaagcccattgatacccggtcatggcgatggatctaatgtgccagtcatggatgacac

SEQ ID NO: 329631 - DNA, 138 bp, Zea mays
cagtcgcatggctcgagcgaccatgcttcggcttggcaagggcgggaagggtctttgccaatgcgtagccaagcttcaccgtatggttctacgcgacaacatccatggcatcacgaaccggcagatgctcaggctgat

SEQ ID NO: 329632 - DNA, 266 bp, Zea mays
ggcttctactccccctcttaccaagtcctcttcgggttagggttacttaaggttttgtggaggggcgatggcggcggctgatgtggagtaccgttgcttcgtcggcgggcttgcctgggccaccagcaacgagtcgctggagaatgccttcgcctcctacggcgagatcctcgactccaaggtcatcaccgaccgggagacggggaggtctcgcggcttcggcttcgttaccttctcctacgagaactccatgctcgacgctatcg

SEQ ID NO: 329633 - DNA, 268 bp, Zea mays
acgcctcgcaggtaccgattccaattcgacggacgacgccacgcgtacgcttcattgacctcgacgacagctacaactgaagtgcgcgctcgatcgattacaccctgactgtagagaccgtgcagtggcagaacacacatcgaggctgagctgatcaaggagcatgctcaactttgtctgctccttgatctgcctgcagaacgtcaagtataatggtggcgcacctgtatgatcacttaagtgcgaaactatcagaggatgcacttta

SEQ ID NO: 329634 - DNA, 145 bp, Zea mays
ccggtccggaattcccggattgacccatgcgtccactcctctgcagacacatctgttcgaataagccttctgatttctacggatcgatcccttgataatgacatggtggtttcgagccatcgtccatgatggccaagtgcgaccc

SEQ ID NO: 329635 - DNA, 104 bp, Zea mays
ggcatgcttgaacgcctcggttcaaaaatcactgtagatgctacggctcaattgatcactatcgacattgtctctgttgaatctgaccgtgtctctatagagca

SEQ ID NO: 329636 - DNA, 167 bp, Zea mays
cggacgcgtgcgctgacgcgtggtggattgagaggaacagcgctgaggaagtgttaccggatagggcccgagcacggtacgattacctcatgcaactgatactgatacgagatagctgagtcagacatgggacgaaaatgataaagctctgagagagcgattaacac

SEQ ID NO: 329637 - DNA, 418 bp, Zea mays
tgagcactttcattgctcataaggtggagatgcaagaccatgaatgtgcatgcttgagtagttcaagtgcagacaccttccgtgcagagcaagcagcagactcgtgttagacacactgttgatcgacacagtacatgctgacagccttctggcactgattcattcatgcaccggttcagtcctgggttgaatgttcatgagtcatgaaccaaacacgttttgggcatatagctatgttcgccatggtactctttacgcgggtcttgagttcaccggtgttgatgccagaaaagacaatgataacaatgatattcagatttaggcatctgagaaaccagatactaagatattgacaggaacatgatggctctgtggacatgacacgaatgtgattaatgggactgaaacatgttctgat

SEQ ID NO: 329638 - DNA, 243 bp, Zea mays
cttagataagtagtaaggctctaaaatgtcacaaaaatccacaaggccctcaagtagtagtagtaggtggtgtactctagctagcacgaagtggatagatcatgcaagggcgcagtcgactacgggtctcctgacatcagtgtcctacgggtatctcaaggaccatgaaaacatcgtatactgctgcaatcatgttgtcgtacttcggaaggacttccatggtgtcaagaatgccaaggcctt

SEQ ID NO: 329639 - DNA, 305 bp, Zea mays
ccgccgccatgttggttcttgtccgtctacagatttctctttctaccctttatgttctctctttcttctctggtttcaatatttggagcttttgttctgcgttggacgatgatgatttgctcatatataccatcaaactctgaacaatcatacgctatgttgattgcacaaagcttccgtgagtctgatgcgatcttctgcctctaatcccgtttttgtttattcgtcttcttccatttttcgtttctttgttttctgaattaatttattcccgatgcaataaattagagtctctgatgcgcttc

SEQ ID NO: 329640 - DNA, 218 bp, Zea mays
cgcatcgcagtaccgatccgcaattcgaggcacgcctcacgcgtccacaacacacggcgatggcgaaggtcggcttttggaagggctacgcgtcatgtccgttttgtttctgctcctctgtgggaacatcccatccatgactcgctgcccttcgcattgctctgcgattccatgcagtacatcgatccttctcctaatattcaaaggctctataaaga

SEQ ID NO: 329641 - DNA, 368 bp, Zea mays
ggaactcgaacaaggaacgatcggctaatcgatatggctggatgtgttgccagcggcgtggccgttccgcctttgatgaagctagttgttgtttctactgcctgaggtgaacaaaccttatacgacacactacaggacgcctacaccatgagacaatactacaagatgtgtgtgaacggactggacatatagtcagacagccagaaggcgaagtacttccacataggcacgcatgtcttgaacatcaggaaccacaagggatcccagatgaccaagctcatgcacagtaatgaccgcatccacgacgacaataatgcgcgcacgtattatcaccgctattacgtgcacctgcaggaggacgaagcaca

SEQ ID NO: 329642 - DNA, 250 bp, Zea mays
cggacacgtgggcggacgcgtgggcagacgcgtgggctgacgcgtgggcgaacgcgtgcatgcgcagacgctgaggtcgagggacacggtatatgtgagcttcatcagacagcgacccgccaccgccacacttggacggaagccgagaagagtgtctggcccggagaccggacgataattgattcgtagcacattcggttatggtggacacaggtgacatggagcggatcttcaagtcggtcgacaccaa

SEQ ID NO: 329643 - DNA, 424 bp, Zea mays
attttccaaagaaaagaggagagaaaagccaagttgcagcaacatttcgctcagcttgcaagaatggttggacctgcgaactctatgatccccactggatatccacaagtttattttgcccatccaagtacccatatccctcaaggtcctccaagacaaggttttgtgtatccacccatgggccttagtcatgaatggagaccaagtatgttccccccagcaccaaatctccagcaaatacattcacccgtgatgccaaattcgccaaggcattacagaagcaaccgaggaaggatgggtgggaatatgatgcctcttcctcatgcagttcatacaatgaactatatgacacattcacagccagctaaagaattcatgtctttgcctcgacagcgattcaatcatccgaagtacttctcaaatg

SEQ ID NO: 329644 - DNA, 51 bp, Zea mays
ccttacgcacgcacgtaccaattcccaattcgacgcacgccccacgcgtcc

SEQ ID NO: 329645 - DNA, 132 bp, Zea mays
cacgaccagcatagtatctaggtgaacttgcgacttggaacacagcatacggcgattggcagaagcttttaaggggctgggcaaccctttgagaattattgaaggggttggggcttcctccggcccaaaatt

SEQ ID NO: 329646 - DNA, 399 bp, Zea mays
  unsure (1)..(399): unsure at all n locations
cccacgcgtccgcccacgcgtccggttgcctgaaaccttcgtttccggtctggaatgttgccgatgtcaaacatgtcagctaatccttcacagcttacaattttctatggcggatcagtatgtgtgtatgactcagtgccaccggaaaaggctcaagcaatcatgcttatagctgcagctgcagcggcagcggcagctaccaaaagcagtgctgcccctactgttaaacctncaatggtggcctgcagccctggtggcccaacaagtggcggttcttccgggcctacaccggcttcattactggagaacacttttggagcaactgggccaccttaaggtggtgcttgacctaacttgatttgccaactttaagctgatcttcccattggcaggaaggac

SEQ ID NO: 329647 - DNA, 259 bp, Zea mays
tgacggtcgtctcgccgatcgcgccggacctcctggcggcgttcgagcgcaagttcccgggcgttcacgtcgaggatgcggaggggctcacgtagcacatgtgcatcacgctgacgcacgctagcggcggacagctaggacgttgcagtcggctaatgcaagctgtcaataacaagtcggtcgggttcattctgaccaacctggacgcgaacttcttggaccccgacacggggctggacgctgcccaataacactcctt

SEQ ID NO: 329648 - DNA, 311 bp, Zea mays
cccacgcgtacgtccacgcgtccggtcacgcgtgcggctccttctgcactggcggcggtggctacatctcgatcggtgggtctctgcctcacactcacacacacgaacggcgactgccatgaaacacgccgcgaagctcccgtaccgcggtgcatcgacgtcacagcaccgactctcccacgctatcccgaagacgccgacgcgtaagatcacgatcgctcacgtcttggcgccggaagttatcaaaacaagagctccagactttcgtaagggcgttcagacgcttaccggaatgccatcgttccaaaagg

SEQ ID NO: 329649 - DNA, 369 bp, Zea mays
tccacgcgttcgtgagagtcccgtatggagtggagaaggagttcttcagatactgggttttccttgttttctgtaggcgcattaccacatccatggtgtctgcaatggtgttactggcaagtaagacattcttggaccctgtggctccactacacaaatatggtgatggctccatatcaaatatactgaccactacctgccattatgaggctctcacgtatgtaagcttgcctgttcaaacactggccaaatgcgccaaaagaatccctgtcttaacctgggccacaatattattgaaaaaaaattttgttgaaaacaataactcttttcctgccgccgtaattatgctttcgcaatggttaatttata

SEQ ID NO: 329650 - DNA, 62 bp, Zea mays
taccaattcccaattcgacggacgactcacgcgtcctatccttcacgactatcaccaaactc

SEQ ID NO: 329651 - DNA, 386 bp, Zea mays
cggacgcgtgggcggacgcgtggggcctgccgctcgccgccgcggacgtggccggcgcctgccggagcggcaacagcagcagcaccaccaccaccaccaccgtcgactccttcggcggcgacgtgcaggcgccgcccatgcaggccatgccgctcccaccgtccttctgcgccagcggcgccgtacgcttccctttcagcagctaccccgtgacgcacccgtattacttcttcgggcaggccgcaacagggtgccatatgctgaagctgccaccgacgacggtgactgtggctcagagcgactcagactcctcgtcggtcgaggatctgtcgccgtcgccgtcgccgtcgcggcgggcgacgtgtcagcgacgagatccggcacgt

SEQ ID NO: 329652 - DNA, 343 bp, Zea mays
  unsure (1)..(343): unsure at all n locations
cggacgcgtgggcgcatgcgcgttaccttttacaactgcaaacactacaaccataagaaggggcgtcctcttctgtgggtgcgtagcactatctattgtaagtgccctcggacgtttgccagcaccctttcttctagaactaattacagctactaacatcacaaaacatcttcaatgacaacctcaactgcatgctgcatgcccaaatgttcctctttgattacacacatactggtgctattataatcaaggactctaatgaacaangnncnctatatccaaatataccttacaatctaagctcatatgtcatttcaatcctacaaaatcttgggaccattat

SEQ ID NO: 329653 - DNA, 307 bp, Zea mays
  unsure (1)..(307): unsure at all n locations
gcctgccgtaccggtccgtaattcccggggcgacccacacgttcgcctgcattcaagtttgccccacaaatcctgtaaactttaatgttgacaatgttggggtggctaatctacttgggggtgggttgcacaanttcttctgtggttccgtggcgttgcgttctagagaaatatgtaatgcttgttcggttatgacatcaaaaggngcggtagaagtgcaatatgtatcgctaaaaattgctaccttttcattcacatttcacactggttatacctgtcaaagatctatgcccttcttttctattga

SEQ ID NO: 329654 - DNA, 257 bp, Zea mays
ccggcgaactccacgggctccggagtgtgccgttcgtcgtcggagttcaccggagccgggtactagctgtccgtagtcgagccccgctctccgtcgatccgtgcccgtcacacgcacgaacccgaggttgttgatgacccaaatttattttatgtattttataaagcgtttttattcgattcatgtgttgtatattttgttgttgtaatatgaacacatgtgattccgatttatggatatgtgtgcgcttattaaaa

SEQ ID NO: 329655 - DNA, 149 bp, Zea mays
ggacgatggatgggacagagacaaaagatgattgctgtgagcatcatcgtggtcattagggcacgagcctacgttgacgatgatggcgatatcatttttagtaggcggtgcctggtgtgctactacgaagggcggcggacgctagaaca

SEQ ID NO: 329656 - DNA, 441 bp, Zea mays
  unsure (1)..(441): unsure at all n locations
cggacgcgtgggcggacgcgtgggaaaaatgtgacatttgtttctgtaccatgaaaaaaggaggaaaaaaaaaaaaaaaagggaaaaaaaaaaaaaaaaaaaaaaaaaaccccacccgtccaaaaaatcgcaggttgttgaagcgaatgtacctgaacatgttttttgtgacgaacaacaaaaaattttaaacgaacaggattcactgtcaaatatgaacaaccatattggaatagttgagcatttaaagcaaaataccgaatccaagggtnttatggtactgcgtttcttatatagttcttcattccatgagggtctcacatttacttttttttttaaaaccaggatgaaagacctgcatctgataagcaacctgaacctgtttttaggcagcataaacatttgaactttcctccgttcactacccaaattcacttgaaa

SEQ ID NO: 329657 - DNA, 78 bp, Zea mays
gatgaaccaacagtctacaataaaagccagtcacatgcaaataaaaccgatagacctcatccctgaggcaagcctacc

SEQ ID NO: 329658 - DNA, 444 bp, Zea mays
  unsure (1)..(444): unsure at all n locations
gccacagctcgtcgcgttcgtcaacggtcgacccatcgcctatggaaggaatgcgcgaggcggatgctgacggcggaaagggcgggggcctccctccgtcggagccgccgcacctgcagggccagccgccgcaggagtacgggtacggcacgttccagggccctcgacatcctcccgtcgggttcccgcagcctgccccgcctcccgggctctgcggcggcggcgggggcggcggctatcacaaccagaagcaaccattttcnccnnnngagacttactacgcccaggggtaccaggccgtaccaggctatggtcctgttgctgaaggaagacctgtgagaatgaggcgtcttccatgttgtggcctcggcttangctggtgtctgttcataactgggtttttcttggctggcatttcatggttcattggagctttcggtctta

SEQ ID NO: 329659 - DNA, 366 bp, Zea mays
ggaaaatatgtctgaattccatgtggtgtttttttgttgcctctttttgtgcctttttctgttctcgtaactgtgttgcacacttatgaggatatgatgaccctttccccagatgatcgacagtgaacatattgagcgccatattttctcttttgagaaaaccaagccagaattctgatcctccatttatgcataaaaagtatttctgaattttatgtagtacttattttgtattcctccttttgtgttttttgttcttgtaactatgttgcacactttggaggatatgatgaccctttccccagatgatcaacaatgaaaatactgagcgctataatttctcatctgagaaaaccaagccagaat

SEQ ID NO: 329660 - DNA, 180 bp, Zea mays
gcgtcgggagaaccagcatcttaataagagccagtctatatactaataaaactctcgccgagggcatccgagcgaacaagccaagcgaccccgtgctcaatgcaatatcgtcgtcgacgtaccaccaccaccttatgatcgagatggagatgaagaggatcctcttcgccgttctcgtcg

SEQ ID NO: 329661 - DNA, 514 bp, Zea mays
gcagctaccggtccgtaattcccgggtcgcacccacgcgtccgcatgtcgttgtcccgcccgtcgctgcgcgaggtatggctgtccctgcccctccggtgaggctgggcgtgacaatccacggacaggcccagcgtctcgtccactctgacccttcgggcttcatctgccgcaccggagccaccacaccttcgcccaccacacgggagacgctccatcgctgctatggtgggccctaccatcgagaggacccaggcacggttgcaggcttgcagcgggcagacaacacgggccaccgcatggccgtcatcgtcgtacccaccacccgatggctgcgcacggtctccagatctgaatagggaggcgacccaacggctgcgcacgatctccagatctaaacaggaagcggcatgggcggcgttggctggcactggtgccctgcttcgacccaatgggcttcgtctaccgtatgggagccgcatgggaaccgatccacctttaccatttgcatggga

SEQ ID NO: 329662 - DNA, 292 bp, Zea mays
acatagagtcaccaagcgatgaactcggctaagtttctatcaaccaaccctacatagctagacacggtacccatggctcgcgctagcgtcgcctttgtcattgccgatctcctgttcgtcgccatggtacaatcacccatggccgaggcatagtccgtcgatgcttctgtggctgactcgccagccgatggacctagcggtccaacatgctgcacctgttccacagggtgtcgaaatgcctatcatgcaatgaagatgacgattattacttcaccaattgatgtctcacacg

SEQ ID NO: 329663 - DNA, 194 bp, Zea mays
gtgaactgcgcgcgtactactcaacagcggatatacagctaatctgtgctctacccagcatttcacatgacgtcctgcactactgagggggagctatacctaaagtgcagacgaaatgacgtatctgctgaagagatttccgcttacacccgactcgtctacaccttgcaccagggatgggagtccgacgagac

SEQ ID NO: 329664 - DNA, 233 bp, Zea mays
cattttctctctgtttttgatttctggtctattcgggttattttttacgtgctcttggcaaaaaccctcttttaaaaaaggtgcctcacgattgagcactgaacatcaacccctagtccacctgtctatgcacacccttacactaatcaacttctcatatacattaaaccttattgctaaatctctaaaagatctcctgtaaaccaaaaggaaatttctccttcatacacacc

SEQ ID NO: 329665 - DNA, 110 bp, Zea mays
actttacatcacttttattatgtttattttttatgggttttctttattttttcttttggtaaactgtgttttaaaaaaggggaccttgacttgacccctgatcattaacc

SEQ ID NO: 329666 - DNA, 164 bp, Zea mays
gacctaatcgcatgtccatcctaatctcaccctattttagtaacaggtctaactaaggctctctattggtctcatggtgaacttgaaactgaactcgattccccttctgaatcaggacccggacatgctctaccatatcctgctggtgcatatcaactatatta

SEQ ID NO: 329667 - DNA, 388 bp, Zea mays
gttccctaaccttgacgcttctcccttctcggcgcctgcttcgttggttgccttcagcggacgccggcgattcggctctcctgttcggcgccctccccagattgccccacccaccgtcagcctcgtcagggtcctcccaggacaaaccatgctccggagacagatgcggcagagctggggcaggagcagagccatcacagaaattcttgtctccagattcttggtcaaaggaatgttggacacctgctagccaatgtgcagccgcgagagggcttagacagataatatggtcgacggcatggacttctaggagctctgcagcgacttcgaatgcataagcagcccctacgtggagtccattatgaggccatgtcgcgccggacatctt

SEQ ID NO: 329668 - DNA, 137 bp, Zea mays
ggcctaaacgcattgcgtgtaccattgcaatcattgccggagtctacttcgtctgaaggctcaagagcttacattgcatcaacgcgagcgtgcaacacttccatggcaacgtcgaagacgcaacgtgtggcgcaaag

SEQ ID NO: 329669 - DNA, 90 bp, Zea mays
ggccaatgatgattgcaaatctctttctagtgcatctcacatgtacattatatactactattccacacgggtacatgacacagtttcaca

SEQ ID NO: 329670 - DNA, 152 bp, Zea mays
gggacatcagcaagctgaacatggccgtcgccatgtacatggctcaaggtcctagactgtggcctcctatcaccgaattcttgggtatggcaagctccatcagcccatgcacgaatgtgttctgagggcttccattgactaacgggacaccc

SEQ ID NO: 329671 - DNA, 283 bp, Zea mays
cgcctgcactaccgttccggaattcccaggtctacccgcgcgtcctacaagaactagagcatcccgtgcgagagaacgcgttttccgcgcctgtgggacacgtgggtcctgtgggataagagcgcgggcagtctatggctggttaggcagacgcctgactcgcagcccttcatattcacgtctcgcggcgctgtgcgagcagtcgtcccagacgttatctgatacctcgtgatgcatttcaccgtgtccagctacgagcagttcgaggcccaccttcgctcca

SEQ ID NO: 329672 - DNA, 325 bp, Zea mays
cgaaacaccgcaaccctccctcgatctagccgccatggccgcgcgcgtccccggttccctcttggctgtcctcctgctcatcctcgcgaccgcgtcccccaccggcgccctccgcttcgacctgcgttcgggccacaccaagtgcatctccgacgacatcaaggtgggcgccatggccgtcgggaagtaccaagtcatggcccccgacggcgtcgcctcttcgtcgtcgtcacagcagcttccggactctcaccgcatctcgctgcgggtcacctcggccctacgcaacagtctgcactacgcggagaacctgcactcgggcaac

SEQ ID NO: 329673 - DNA, 370 bp, Zea mays
aatcaacatatgcaagttgcagactgagtatgcaagattaggcaatcgacctccacacatcagttttggtctagcattagttctgatcgtggtgctttccttgagggttttgaattgcttggttcaagaaaagcaaaaaatatatttctcctttctacttcaacatctagcgatgtatctgcatgtaagctcttcgttggtatcgaggctacatccagatacatcactagatgttgaattataaaggagaaatatatttttggtagtttcgtcaatcctaaagaagatggtaagaattgcaatgcaaatgcaggatccacagataaagaacgtgttcaattgcttcatttgaatttattaacttttgggc

SEQ ID NO: 329674 - DNA, 351 bp, Zea mays
cggacgcgtgggcggacgcgtgggggcgcacacggatggtgttccacaccagtgcccatgggacacaggcctagccaagcagcgctaccgtatatctacatgcgaccgtgggacagcgtcagccggaggccggagcagctcgatcgggtagttgccgcgcgaccgtcagagacctctgtttctttgggttgggttcggtgtttctctttctatttatgttttactaattagttgtccgtgtgttgcgacggtacataaacaccattgataaagcattagtagtaattaattttagatcacttcatgagatgcgctctgccgacatgaggaaaaactcattcattttttatt

SEQ ID NO: 329675 - DNA, 211 bp, Zea mays
cgagcgcggaacccgacccatcaacgatcgcctgattggcgtggatcgatctgcccagatcgacgcggacatcacccctggggttctgggactccacaactctaatgcgtccgatgcacgtaccgtaggcgacaccgggcatgacgcacgcaggatgacacagttgaccaagatctgcgtggacagccttgacggaccaccagaaagacct

SEQ ID NO: 329676 - DNA, 277 bp, Zea mays
cagatctcagagggttggtgtcaggtggcgtcgccggccggccgtcgtggaacagggaaccgcgtgtggaggacgaggattccctctgtagcactgcactgcactgcactgcaagttgttgtacacaagtgcatgtgtatgtgtagtagtccggcctccgggcgggaggcgccgaccccatccgatggcgacgattgggcatgctatatggatgatcgattagcccacactgcacgtgaatgaaggagagctgtggccaacgattagcccaccacac

SEQ ID NO: 329677 - DNA, 151 bp, Zea mays
cagatctcatagggttggtgtcaggtggcgtctccttccggccgtcgtggaacagggaaccgggtgtggagtgacttggattccctctgtagcactgcactgcactgcactgcaagttgttgtacacaagtgcatgtgtatgtgtagaact

SEQ ID NO: 329678 - DNA, 178 bp, Zea mays
gattccgagaagagcagtattacttcaaattcatgtgctggagatgattatagagacatagggtggggagacgagtcgggcagctgtaactgcgaggataaaaccgtctcagaagcattagagtctggtgcaaatgaaagacccttggagaaaaccatggttcctaatgaaagaaagc

SEQ ID NO: 329679 - DNA, 94 bp, Zea mays
tccacgcatgcgtgaagatgttatataccacacattctggttggctgagggatggtcacttcgggggtcaccaggttgcatgcggtgaaagcac

SEQ ID NO: 329680 - DNA, 160 bp, Zea mays
cgtccggaatttccgggtggacccacgcgtcctaccactcgttctcccactctttccatctatcacaacatgatgtcgtgctcaaacaaggcgaggagagccttgttccttctgttccctttatgcatcatgcttggtgttaaagaagagtcaatgggca

SEQ ID NO: 329681 - DNA, 235 bp, Zea mays
cggttcgacccacgcgtgcgcccacgcgttcggtaagatgtgatcccaatcagaaccccactttggtgtgaacataatggtgcgcaggatacatcacaacgatgcatgttacccattggttatacttttctctctctaacgattggaaaattatcaagtcagttaacatggtgattcaattttgagaatggctggttatagcttttcatgtactccttcaattcctaaggaaaag

SEQ ID NO: 329682 - DNA, 387 bp, Zea mays
gaacgccgggccgtttcacttgtcttcttcctccgatccctcccggcggccggccgggctcgggcgttttccccttttgtttcccatggaggacgccaagatggggaacggctccaccatccgcgcggtgctcgccatcctccagtggtggggattcaacgtcaccggcatcatcatcaacaagtggatctttcagaaactggagttcaagttccccctgacggtgtcgtgcgtccacttcatatgctcctccatcggagcctacatcgcgatcaaagtcctgagaaccataccgctgatcgaggtggccttggaggaccgggggggggagatattccccatgtcgttggtgttctgcgtgaacatcgggctggggaaacggtagcc

SEQ ID NO: 329683 - DNA, 170 bp, Zea mays
gcatcatggaacatcatccatccgagctaagtaattaggtcgaaaatgacccgtgccagcagggggagcagcagccggtgtgtgacgctggtactgtacggtctccgcctgctgcttctggttggggttgcgcaagcggaattggagttggtgcctgctgatgaataata

SEQ ID NO: 329684 - DNA, 115 bp, Zea mays
ccggaatacccggggcgacgccacgcgtacgggtgccgagagcagagcgagataaaaaaaaagggaaggcgacggaaacgacaagggcgacgggggggcagggacaaggacagga

SEQ ID NO: 329685 - DNA, 71 bp, Zea mays
ggcccccccctttttaaaaaaaactgtcgacccccttcttttttaaaaaaaaaaaaaaaaaaaaacttttt

SEQ ID NO: 329686 - DNA, 429 bp, Zea mays
cccacgcgttcggtcgctgctcacggacgccgaccgcctcatggaggcgcggcgcacggtctcccacgaggtgcacggcggcggcgggggcttcggcagcccgacgtcgtcgtcctccccgtcctcggcgtcgtcctccgcctcctccaggacctcgcgcacctggtccttcggcggcggctcccactactccgacagccctaccatgtgcctcacctgcgcccccgacgccgactaccgccacgacaaaaaatgcgacgcctacacggccgacgacgactgttgggccgcctcgtcgaattacaagagcggcagcaggtgggcagccacagtggacgaaggcgacggcgaggaccagcagcagcaccaggggctcatggacgacgcctgggacgcccactcggtgaaggacagcaccagcggcacatg

SEQ ID NO: 329687 - DNA, 115 bp, Zea mays
cgaactcgttggcgagatcgttctcgttttttttagcaccaccattcccaacgtccaggggcttctttatgactacttggggggcaattattcttacaaggtcttgaaccctgat

SEQ ID NO: 329688 - DNA, 143 bp, Zea mays
  unsure (1)..(143): unsure at all n locations
cggaanncccggggcgaccgacgcgtccggggcaagaagaaacagagacggactcgatccatcgtatcggcgcaggacacacaacgcgggcggcgacacggtcaagaaggggggggggaacaaactcgagaccaacatcgcca

SEQ ID NO: 329689 - DNA, 299 bp, Zea mays
ggcaagactatcaccctcgaggaggagtcttcagacaccatcgaccacctcaaggccaagatccaggacaaggagggcatgggaccggaccatcagcgtttgatcttcgctggcaagcagctggaggatggccgcacccttgcggattacaacattcagaaggagagcacccttcacctggtgctccgtcttatgggtggcatgcacatctttgtgaagacactcactggcaagacaatcacccttgaggtggagtcttcggataccattgacaatgtcaaggccaacatccaggacaa

SEQ ID NO: 329690 - DNA, 449 bp, Zea mays
  unsure (1)..(449): unsure at all n locations
aaatggggcaaaaaggcaatgttctttgaccaccgagcaaaccccagcctccgttactctccttcctcttggctcgcttcggctcccgtcgtccccttccttgagatctctaggatacgagcgcattcgcatcgcttcgcctccgccgcggcctggggagatggcgggtttgggaaaggcgatgtacgcggtgggattctggatccgggagaccggtcaggccctcgatcgcctcggctgccgcctgcagggcaagtacttcttccacgagcagatttcaaggcatcgcaccatcatgaatatctttgacaaatccccacatgttcatagggatgcatttgttgctccaagtgcatcccttattggtgatgttcaagtcgggcaaggagcttccatttggtatgggtgcgtcttaagaggggacgcaaacaacatacanattggatctg

SEQ ID NO: 329691 - DNA, 266 bp, Zea mays
cggacgcgtgggctgacacgtgggcgttaacaatacaagtgcacacaaataaatacctggctcgctagattgccaagagcgggggcctttaagttattcattctgctcgccatggtggcgctggctacgctattctcggacggctcatgcaccacccctgtcaccttacaagccggcaaggtctacaagcctggccacttggtccccacccccaacgttgccaccatctatgacatgtagatcaacgagcacggttgtgactactt

SEQ ID NO: 329692 - DNA, 222 bp, Zea mays
cagacgcatggtacgtcgggcttacccctttatctccagccgggtaacacttgccgcgctgggctcttccaccggcgggaggatgtcgttcaacaagatcgtcgacatcgggagccttgccctcgtgatctacagggactactatggccgcctcgacgtgatcggcgatgtggtggtccagtacaaggtacttcgcgtacgcattgatctgggcaagggcct

SEQ ID NO: 329693 - DNA, 399 bp, Zea mays
gccttaattatcctttagaactttggctggacatgcaactttagatagccataaccgcaagctgccttgtcctattctcagaaaaataaataaacaaaaccgttgatttatttatatttttccaactatataagctatttatgtcctgatgaagtttattactgacatttgactgaaccatcagctacttgtagcattcatctccagtcttgttacacatggatttattgccatctcttgcctgttgagttgcgcacttgggttgaagcctaccagctggatttttgctctgccgcacctgtgatgctactgctggggggcaatggatatagcaataacaccagctactgctggggggcaatggatgtagcaataacaccagcccatgcttgacacctt

SEQ ID NO: 329694 - DNA, 413 bp, Zea mays
cggacgcgtggggccggccatctgctaccaccagtgcgtcgtcagcaagtgcctctgcttcccaccctttagcaaagagaaaacgatgtgcatgaagagctgctgcaacaagtgcttccaccacggcccgccagcgcctggtcctggcccgaagccgaggccgccaatgcctggtcctccgaagccgcctgccccgaagccgaagccgaggccgccagcgccaaagccaccgacgcccaaggcgccgccaccgccaaagaaagccgtgtccctgccccccgggcagcgacgaggccaaggccgacagcaaaaactgattcatacgatgggatggatcggccagtcatcatcagaagcactcatattagtatatacacatcgtaagtacgcgtgtacgtgtaacgtacgtactc

SEQ ID NO: 329695 - DNA, 452 bp, Zea mays
  unsure (1)..(452): unsure at all n locations
gtcaaggccaagatccaggacaaggagggcattccaccggaccagcagcgtttgatcttcgctggcaagcagctggaggatggccgcacccttgcggattacaacatccagaaggagagcaccctccacctggtgctccgtctcaggggtggcatgcagatctttgtgaagacactcactggcaagacaatcacccttgaggtggagtcttcggataccattgacaatgtcaaggccaagatccaagacaaggagggcatcccaccggaccagcagcgcctcatcttcgccggcaagcagctggaggatggccgcaccctggcggactacaacatccagaaggagagcaccctncacctggtgctccgcctaggggtggcatgcagatttttgtgaagacattgactggcaagaccatcaccttggaggtggagagctctgacaccattgac

SEQ ID NO: 329696 - DNA, 338 bp, Zea mays
caaaccctagcacacgcaccatggcggcgcagcagaagatccggtggggggagctggaggaggacgatggcggggacctcgatttcctcctgccgccccgcgtcgtggtcggacccgacgagaacggcctcaagaaggtcatcgagtaccgcttcgacgacgacggcaacaaggtccgggtcacgaccaccatccgcgttctgaaactcgctcgggcgcgcctttcccgcagcgccattgagcgccgccagtggcctaagtttggggacgtcctctatggaggactctggttttcatgttttactatgggtttttacttgatgagtattcttttttgt

SEQ ID NO: 329697 - DNA, 143 bp, Zea mays
  unsure (1)..(143): unsure at all n locations
caaacagcagtgaattgttcttcttctcaatgtatgcaacganctgcaactgacactgcccgagtctcccggtttgaagaccctgcggggggggccttttgattcgaagatgaccgcggcggtgctgcccggcgccgatacga

SEQ ID NO: 329698 - DNA, 54 bp, Zea mays
acccacgcgtccggggacgcatgcttaaaaactaaacacactacctttttctac

SEQ ID NO: 329699 - DNA, 179 bp, Zea mays
  unsure (1)..(179): unsure at all n locations
cggaancccgggacgacccacgcgnccgcgcgnccgnccgcnaccccacccagaccagagcgccacgagacgccgcgcgaaccgacccaggccgacgcggacaaccccccgcggcgccgggggacaaagcgnacagcgaccgcgccaccacccgcgaggaccccgagaaggagagcgag

SEQ ID NO: 329700 - DNA, 87 bp, Zea mays
ccggccggaattcccgggtcaccacgcgtccggacgattcacaagaacatcttaactttttttttaataacaactaacccaacatta

SEQ ID NO: 329701 - DNA, 342 bp, Zea mays
atcggccgtagagcgagcagtatcccaagtccacccagtctctaatcacattactctcgaacgacaggttccttgcaccactatatccaggaccgacgaagtgatccagccgacagtcatggagacgaagaaggtgctatgggcactgctagtaccagccgtctcggtcacagtcgcgctgagctggctcgcctacgaggcaccatccgaggcgctcatcgtctcggccggcggtgcggctggctcctagcgatagcggagcgggctgcaacgtcgtgctatccaccagagcacttacaacttcatcactaactgctacgtggatatgacgaaggctctcta

SEQ ID NO: 329702 - DNA, 186 bp, Zea mays
ttcacgcgtccacccacgcgttcgggcactcgtcaaaaaacatgcttgcataactcctccagtacgatcctatggagattatcacaggtggagttgtcatacacgaagcctatctatctaataatcccctgatccaaaagtgacctttatgacatgcatatggacgggcatatatatttatataaa

SEQ ID NO: 329703 - DNA, 199 bp, Zea mays
cccacgcgtccgcatgcatgcatgcataacacctcgagtaggagttgaagtacatcatcattgatggtatatatatagaggaagcatgtctatctaataagtccctcatccaaaattgatctttatgtcatgtatatgtacgtgcatatatatatatataaaaatacgtctccttttattaaaacaaaaaacccaagaa

SEQ ID NO: 329704 - DNA, 352 bp, Zea mays
  unsure (1)..(352): unsure at all n locations
gcctgcacgtaccggtgcggaattcgcgcggcgtggacccacgcgtgagcggacgcgtgggtcatgatacaaattcttagtggaattatgaccttggtaaaactgtgcgtgtttcaatacacagagtgctgagcctgtcttattatacaaaggggaccggaaggagctaaagctcaagatcaccggacgggtctggaaagagcagcagacaccagacggggcatgtacttcaaatctgggcagctaattaagcaatcttcaaacaaacaaaaacacacaccttgcctgtactttctttctaattaaacgnggtgggggtgctcaaagggatttatttatttattactaatta

SEQ ID NO: 329705 - DNA, 258 bp, Zea mays
cggacgcgtgggggcgctgtcgtggacgtgccggttcgctgctgaaccggggttgggttggaccctgttcgttttcgtctgatctagcactagaagtagcggtgatggggtgtgtgtggttgtgtacatgttcctggaggccgttgtgatctgcgtgtgctattatcacttattcttttggtccatatacggacccacatactggattgttcgtatgtataaccacggtggagaggcgcctgttatattaataaacac

SEQ ID NO: 329706 - DNA, 139 bp, Zea mays
tcgacccacgcgtgcggccacgcgtccgcatacatgcgtgcataaaacatgaaatacgacgtgatggacaacatccggggtggtgaggtattgacggagcatgcctatgtaagatgaaggtggaccccaatagaaggtt

SEQ ID NO: 329707 - DNA, 94 bp, Zea mays
cggacgcgtgggcaacacgtgcggcattgccgagaggggttgcgagagcgacgcttttggaggacgaagacgacgactagggggcgcgccgcga

SEQ ID NO: 329708 - DNA, 216 bp, Zea mays
gactgattgttgttcctttttctccctttctaaaatctaggttggataggagctccgaacgggagccatagacggagagttgatgccaccgcgcaatggatgggtggatgctcacgacctccgcgtgcaacaacaggggtaagaactcgtccccttcctctccggcggcgaggttacgatcttcctctgccgaccttgaactttaaaaatgagaac

SEQ ID NO: 329709 - DNA, 276 bp, Zea mays
ctcgcgctcgcagcggcggcgggcggcggctgcttctccgtctcctccttccccgcaaacttgtctcgtattcctagcgcaggcggggaacactcccggcctccgcccgagcggagcggagcgtttcgtccgcgccgctgactccgaggagttcattttgccgcgctgtctccctgaatcctacacgtccttctcgcgtttggctcgactggcgcgttgattccttcttctttcgttgttgatgtgcagatctcccattctctttttacaagaact

SEQ ID NO: 329710 - DNA, 250 bp, Zea mays
agcgtacaagtccattgagtgttgaatggcctccagggaagtagttggtggcaagaaataagcaataaccgaccagtctcgtggctttgtttcaagagccgctttgcggtatatataacttgatcaagggataattaatgtgattcttctgcaagtactgattataatatgctaacctgaatatattgtctaactcggacattttggggatattgaataaacaatgggagtgtttttttctttcttgcaa

SEQ ID NO: 329711 - DNA, 87 bp, Zea mays
cccacgcgtccgcccacgcgtgcgcccacgcgtacgcccacgcgtccgcccacgcgtccgaccacgcgttcgcccacgcgtccggac

SEQ ID NO: 329712 - DNA, 160 bp, Zea mays
ggcaatggaactagatgaacaaccttttgatgcaaacataccagattagggaaaataaagtgctcgtccgggtaaatcaagggatgttcaaagtgcttaaatagcacttggttacatgaaacagaagggtatggtacctggtgttattctttacaatgaa

SEQ ID NO: 329713 - DNA, 291 bp, Zea mays
gaaaacaagccgacggttttactatcggcaggtgcggccaaatgtgctcgctgcagcacctacaacataaatgggggttcatatgagctgaatgtctcgggttctcggggacctaggcggatgaaatgagttatgcactccatacctacctcacgccttgaggctgtgggcactgttaccagccagctggacagaatccttgctagatctactgaagagacattttgcagcatttgcttctccaaagcatctgttgtggaccgcgctatgtgtttgaccagctcaagattc

SEQ ID NO: 329714 - DNA, 237 bp, Zea mays
gttacagtgattaacttggatcctgaccagcctcttgaggttcttgcaagagctggtgttggtgcccgcgctgcacgtggggctcatcccattgaagacattgctaataagggattgaagattgatggtgggagcgctcagaagattgctggacgtggacatgaagggactacatgtctagggccatagaaagtatgctattattatgcacttttgcttggcctatttggttctgta

SEQ ID NO: 329715 - DNA, 143 bp, Zea mays
cccacgcgtccgcccacgcgtccgcctcttctccggctagggtgttcacgcctgccgcggcgaagcttctgccctccccggcgtcgggctctggtcgtcgtcaatcgtgaagattgctgatgtcttttgtgttctatattata

SEQ ID NO: 329716 - DNA, 343 bp, Zea mays
gatggctccctcgggtgtgcgagtggtggcgatcccaggggcgagaggcggtggcgccccgaggtgggcgatcgacgacgatgctcccgaggtgggtgggaaagcggcggcggcactccccttagaccgagtgatggcgtcgctcccgaggcagacgggcaagtggtgagaacgctcccgaagcgggcgagcggtggcagcgcaccctaagcgtggaggcgacggcggttgcgtgaggtgaggtaagcttcggcagcagatgtggcggccacaagagacgcgggtggctccaggagtcgcgcgaggcatggtcaattttgccatggcggcctcaagaggcatg

SEQ ID NO: 329717 - DNA, 145 bp, Zea mays
accatgagcaattacagttacactcttcttttgctttttaggagcgggttaaattgggggcggtaggggaaaataagctctttatttttttgaataaacacaaaacttggcttttgtatgtatagtttaaaaagattgactaata

SEQ ID NO: 329718 - DNA, 198 bp, Zea mays
cccacgcagtctatatgcttcgacgagaggtgggtcatctcgcaccacactcctgatcttgcgctcgtccatgctcgagcgtgcctagagattatggtgacccaaacagataccccgatgacctatcatgagcaataattgcctcttcgcaagggtgaatcccctctacaaacacacaagtctgtggcgaacatgacg

SEQ ID NO: 329719 - DNA, 235 bp, Zea mays
catcctttgggtactagaaaatgctgagcttgctgctgttgcactatcggctgcatcggcaactgctgctggagttggcatgggtgctgctggcgctgatggcgtggcagctttgggaacaactggcccagctgatgcagctggcttaactgcagctgcaattggggcttctgttgctggtggattaactgcataaaagggtgtggcgcaagatgggctaactgctgcagatcat

SEQ ID NO: 329720 - DNA, 340 bp, Zea mays
gccagatattggcttgcgtacttgtccacctttggcccattcgcataatgcttaaggtccgcatgctggttcatctcttggggctcatgagccgctcgtggatgctgcatgttaagcctccttgccttcttactctaaacatggggcacttgccagagacatgatcatgggggatataatgcacatcttatcattcctctggacaagtacacaagccattatatgtcgtgctcgactacccacttactgatggatgcgatctcacttcgggactctgccgtatgattctttccccttttctgctcatccaccttgtcattttaagcgactcttgctgttc

SEQ ID NO: 329721 - DNA, 431 bp, Zea mays
  unsure (1)..(431): unsure at all n locations
cgaccgctcgtcgccgccgtccaaatcgtcgggcttctccgccttcgtgcgcgcctacttgcgcttcctcgacacccgctcgctcttcatcgcccaggatctagatgccgtcgccgacacgggcgagaccgacggcgaggacgcgaggctggatcacgtgaccaagcagcagcacctgctgcacctgctcctgcaaatccgaccgtacggggacggcatggagctgggcctcatcttcgaggcgatggactgcgtcgttatcgagatcttcgaggtctacagcgagatatgcacgggcattgcccggttcctcgtcgccgttctcggctcggccccgatgacgccacgggcacggncgggagagacgttggcggcagcgaggcggccgaaggcagtgcaagggatgcgggtactggaaaatgcccgcgagc

SEQ ID NO: 329722 - DNA, 375 bp, Zea mays
cggacgcgtgggatcgcggatacctcgaggagcagaaagcctcgtcgcatgaaagagagagaaagttgtggccgccgccgatgtctgctgcccgtgctgccggtctgtggccggagtggggctatggtcgttcacggggctgtggtgatccttggcgcggagtcacaggagctagggatggacggaatcacccctaattcctcgttgttggtttgggcaccgccgcgggccgttgtgccgcgcggtcagtgcatctgcaccacgaattcgtgaggtcacgaggatctgaagatcaccctggtaactggaatctcaagtgcaggagaagaacatgtggttcaagagggccacgcatcgaggagttcgattcgatct

SEQ ID NO: 329723 - DNA, 369 bp, Zea mays
gaggcgcgtagacgaactcgtcggcgcacttctgccgtatgctaaagcgtcagcagcgaggtcatgtttgcaagatgagatgcctaacatcatagaggtcatggatgacagaaacgggggcccatgagcgcacggtcgatggctcaacgggcggcgctgtataagcaacagcaactcctgacggagaacatgagcttgcatccatctcgtgtaaagagaacatcgtcaaggagatccagcgagcagatgcaactgagaactggaaagcgaacgcgaaccctgaggaaccataccattaaaccgacttgatcttcggaaaactcaaggagggaactagcgtggtctctggagaaccatttccaaaagatg

SEQ ID NO: 329724 - DNA, 313 bp, Zea mays
gtctaattatacaactctcagtctagggaactcactcatcttaagggtggacatgaaccaatcggtggcactaccatacaaggggaggacagacatggccatagcatgaatgtcattgcatgcgtttccattgccatgctccttgccttgtgcacattatataacctccaaactcactaggtctatacttactacattctatttgatacccgagcgtgcatgcaccgcctgaccatctattggaagccccgttaaatggcgacagaatgatgcatagaatcgtgcaaagtcaaacggacaatgagagctacac

SEQ ID NO: 329725 - DNA, 425 bp, Zea mays
tgcaggagtgggtgctggacaagatctgattgtcctgaagattgatgacacaagcggcgtgtgtggcacatctcaggcgtggtctataagcctgtcggtgctaacaacgttaattgagcaggcactgaatgacgctgccttcgactagtaagggcctggacgaatatctgatcaactcgtacatcatcttcatgcatgttcaactgcttaagtgcgagttcgactccaaggtcacctctcacatgcgaaaaggagtactgacccaactacctggcactgatgctcaagaacgtctactgtgacagctacattggagccatggacgtcataggacaaaggctaattcacgtacgatactgtgaagcacttctggtgctccatctgcacgtaggacagtgactaaccgcttaagggacccgtcaccg

SEQ ID NO: 329726 - DNA, 368 bp, Zea mays
ctggcttctcctccccctcttaccaagtcctcttcgggttagggttacttagggttttgtggaggggcgatggcggcggctgatgtggagtaccgttgcttcgtcggcgggcttgcctgggccaccagcaacgagtcgctggagaatgccttcgcctcctacggcgagatcctcgactccaaggtcatcaccgaccgggagacggggaggtctcgcggcttcggcttcgttaccttctcctccgagaactccatgctcgacgctatcgagaacatgaacggcaaggagctcgacggccgtaacatcaccgttaaccaggcccagtcccgtggcggtggccgtggcggccgtggctaccgcggccgtcg

SEQ ID NO: 329727 - DNA, 167 bp, Zea mays
gggccaaaaaaatggacctttaaaattgttaaagtggaagaccggtgctaaaaatggtttccgtaaatgagcggtgatcataaagtgcccggggaaccagactttcgggagggtgattcgatccttgtttgggggatgctaatacagctttgtgtcgcgcataattt

SEQ ID NO: 329728 - DNA, 293 bp, Zea mays
ggcgacgagaagtggcgagcccgtagagcgtttttagttagaggctactggcggtgggccgctgcggtggcggcggccatgagcagcgtgagcgagagcactaccgtcagcaggtggtccgagctggccacgctgcgcgcgctggcgcgcgacgccgtggagcaacttctgctgtcgtggtccggcacagttgcgtgggcgtcgtcgctcgaggcgcgggccctatgaccacctgcacggtcacggtacgacagtcaaggtgatgcacctgctgctttgaggacccaagtgaa

SEQ ID NO: 329729 - DNA, 224 bp, Zea mays
cgtaccgaattgccatttcggcctacacgtacgcgtacaagcatgtaccacactatcgttacttcagcttcaatgataacactttccgctttgggcatcgctacactgctgatccggtggactcaacttacgcaacatatggacgtttaacgcttttctccttggctgacgacccccatgatgctttctttccatacatgttagaatatgcttagaaacgtatt

SEQ ID NO: 329730 - DNA, 356 bp, Zea mays
ggctaaatgtgatggtattgtgatgatgtgaactgagagtacaacggcattctccaatggtctccaatccaaaaaatgtaatttgttttcattaaagtttgttaaattgttcttctaatttataaggaattataggatgtaatggcataatgccattctatacggtccatcaagaaatgaatttatgatttcaaattatttcatcaaatcgaattattattttttgtacaaattgttagtggaagtatcaccttgtcgacaatgtatgtcacaagtgatgataatttgtaatcattgaaatttctaatggattgaaaatcaataatgtcttgcagagtacttggacaagtagtttt

SEQ ID NO: 329731 - DNA, 365 bp, Zea mays
taccggtgcacgtgccggtaccgaatcggaatttccgggtagacctacgcgtccgagcacgcgttcggaagctgatgggtacgctgcactcgaatgccttggttctaggtatggatcccagacagacgatcagcggtgggccatggcttgcgtgcatgcgcaggtcatagggatcagcgacagcgccatctaggagctgtgatgtcggcatcgagaggctgatagagatcaagctgcgtcgaatggagaagctgcaagacctgcttgtcagcatgctggagctgtgaaacctgatggacacgcctgctgatgagcaacgggggttccagggcatgggctgcaacatttacgcatgcgaggacgag

SEQ ID NO: 329732 - DNA, 369 bp, Zea mays
gttacttggaaggcactgataataccactgttgctgatgctcacgagctgaaggtgatacttgagcacatcgtggagaggatatcctgcatctctgacgctgctcgtactgatcgtccatgacagatcacagattactcgtatatcgaggacgctcttgctgctaaagcaacacacacacttaagcaccttgggctcactcatatatcgtgcttgtgtgctagtgaaatcggacacgtcgaaatcgcagaatcctgtcctttttgcgcatatcgaattcatccatatactatgaggacgatgcagacattggtgatccttctcaagaaggtgctgatttcctgaggtatgctcatgacttgccttggta

SEQ ID NO: 329733 - DNA, 381 bp, Zea mays
accacgcgttcgggagctcatgggtacgctgcactcgacggccttggttctaggcatgggtcccaaagagacgaacagcgtgggccatggcggcttgcatgcgcaggccagacgcatcagcgacagcgccatctaggagctggctggcggcatctagaggctgatagagatcaagcggagacgaatggagaagctgtaagacctgcttgtcagcatgctggagctgtagaacctgatggacacgccttctgatgacaaaaggggatccagggcatggcctgcaacatcgacgcgttcgaggacgagatcacggatcctggcgcgctgtccatggccttcatacgcaacagggatgcggacgtgatgaggctggataacctt

SEQ ID NO: 329734 - DNA, 251 bp, Zea mays
acaacccgaaagctgacgccaccgctctcctgacaacgatccaacgtcacccaacccaccggtgctccccccaaaacccaccacaaggcttgcccaaggcttcccctcaaccatgccacactcgcgcccttcaccgaccccatacccgcgggcatgatccgctgcgatggaggactcgttgccatcgtccgtcgcacctgaccctaccacttcccctgcaccttgcacgcccccgtccccgaacccgcacc

SEQ ID NO: 329735 - DNA, 422 bp, Zea mays
  unsure (1)..(422): unsure at all n locations
cgcagcgtcaattcagcctggcaggagctcacaggcatcggcgagcgtgcgctattcgtagattcccaccacgggttcgcagtgccgacggcggggtttggcaatctcgagagcaacacaatctattcagtgagcagcaagaaggtgaactacagcgtttcggcatttagcctggagacccgtacctcgaagaaacttgcgtgccgcctcaacgaccaggagatggcgatgcgtggtgagatgccatcgtggatcgtaccaagattggatgaagtctgaatctgcagggttgggagattcatcattgttgtgcaatcactgttgatatatggttctaggtaatttcttcggtatccttgcagttcgaaccagcaataatccctatataagttcactcctgtnaattcttgattctgtcgttt

SEQ ID NO: 329736 - DNA, 335 bp, Zea mays
ggtaccgattccaattcgacctacgcgtacgcgtccgctccggtccgtcaccccaccatactcgtacagaaccaacgaatatgtgtagcgccacatacgcagtcctattgtacgtactcgccggacatggcctcatagatggcgctgaacaagattagggaccaaaaggagctagtcatgacaaggtacactacgtgtatccggatgtaggcaggggtataattcatgcatacgcaccttactctggtaccgctagaactgtcgccgcttaaggacctcaggccaccttcagccgccacgatgccgctgccgcatctgctgctgcacctaagaag

SEQ ID NO: 329737 - DNA, 137 bp, Zea mays
gtgacgcgtagccaccggtctgcacttgagctaatacgtcggacgtgtgcagggcacctactgacgaccgcgagagcacaatgtgggactatcataaggcgaattatcggccggactaacttaggcaggctaccgcg

SEQ ID NO: 329738 - DNA, 408 bp, Zea mays
cggaggagtgcgtgcgtggtcggctgccgctcgcgcacggtgtaggaggcggtgccgaggccacgtggcgggtcttggggacgagctccgttagcttgaagcggtgctcgggaagatggcgccggccaatggccgtaccgtgctgatcttccgtgtgccgtgcgggtgcccataagagaggatggaggtctggggcgctaagaaaaggtgcgccggatgaagacgtatggaggccatgaaaaacaaacagctgatggctccttatctattatctaatgacagacatcctaaacaactcatagctgagttactttcgcatagcgttactaggagatgactactaactactagggcggtggctgtttggagaaattgctctcattcatatagccctattggactagtgga

SEQ ID NO: 329739 - DNA, 270 bp, Zea mays
atagactgtactatttacattaggatagaaagactggttaccttagcctaagaccaggcaaaataattacaccccgtaagtcaagaatatggtcacgacacaggtcacagcgagctgaacaatctgcagtcaaaaactggcagctactagccgctactgacaaacagaattcacatgactagctggccaaggaccccctacaaaaagcaacgactcatcacttgggtccaagaattcgaggttttgtttgccagtactgatccaagcgct

SEQ ID NO: 329740 - DNA, 299 bp, Zea mays
  unsure (1)..(299): unsure at all n locations
cgcctcccctggcagattcgccaatcacaatcgagcttccagttggaggagatcggctacgtttcctgtaggttccaatggtgcagcttccgggctccaagaagcggcacgccgagatggccacggcggcgaccgtgaaagcggaagtggagggtttgggctgcngcgatggttctcctcacaagcatgtcaagccaattgccgagccgncgncgcagccgtcaccttccgaggacttgccctttgatgtgcttgatggacctagcccattgggtctgcgactaagaaaaaagtcgatc

SEQ ID NO: 329741 - DNA, 462 bp, Zea mays
gaggagaaccagcagcctccaatattagtctttcagagaaactaataaaactctggccgccgccattcgagcgaacgagccaaccgatcccgttctcaaggcaatccgccgccgacgtaccaccaccaccgcatgatcgagatggaaatgaagaggatcctttttgccgatcttgttgttatcatcgcctttttcacctcaatgcttgccttcatctaagcctcccttactggtcccccaactttttttctatttgaatgatttgctttattttgtttttgcttttaattttatctttttttctttctcttttgttccttttcttttattagtgttaaatattttttattatttttttatagcatctatattttttttttattctatttttaaaattatggtctatcttttatattatatcttctttataatatttatatttttttagttttttctttttta

SEQ ID NO: 329742 - DNA, 314 bp, Zea mays
cacgcgtccgggtgatgaaagctgtatcggacttcaaacatatttctcagccactttcaaggttcgaagatgatttggaatcaaacagagccgtgagagatcaaggctggggttcaccgcagcttgagcaaaatataactcgcttggagaaaattgtcgaaattttatcacaggacaaattctgttatgaagctcacatactacgggatggtgcattccttcaacgagcattatctttctacaggttaatgatactctggtcagttaacctagttggcggatttaagatgcctttgccatcacaatgtcccaag

SEQ ID NO: 329743 - DNA, 315 bp, Zea mays
ctgctggggactggaccagggacagggagcaacaaagctgagtcctcctcctccatggcggtacggtggcggccgacgtttacaaaggcgagctgacgccgctgcagcggcacgtcgccttcttcgaccggaacaaggacggcgtcatctaccccgccgagacataccaagggttccgcgcgatcggggccggcgtcacgttgtctgccttcagctccgtcttcatcaacggcctccttggacccaagaccataccggtatatatgcatggcattggcatctctcccccctcaacaggcaacaccctcagcgaca

SEQ ID NO: 329744 - DNA, 245 bp, Zea mays
  unsure (1)..(245): unsure at all n locations
cgcacgcatgatggctcctaccacctccttgctcgcgctcgtgttcctcttnctcctgcccgccgccgccgtngncgncccacccgctaccggcgacgctgccgccttcaacgtgacggagatcctcagccggtacccggagttcaagctcttcaacctcctcctcagcaagacccgcgtcgcgcgcgaggtgaaccgccggagcgccgtcaccgtgctggtcccggacaactcggccgtggact

SEQ ID NO: 329745 - DNA, 223 bp, Zea mays
ccgtaagcaacatcggtgagtgaaggctggctggcgccctcgtaatgacgacggtctgatcctcacccgatgaacatgagtagattcaatatcataccatttgtttgtgtagggaatcgaaggctgtcgcgtaagacagttcggctaggccggatgacctgacggcttgacgaagagttggtgcagatccgatcccgtagcaacatcgagaaagagcgtgctg

SEQ ID NO: 329746 - DNA, 238 bp, Zea mays
  unsure (1)..(238): unsure at all n locations
cagaaagcaaacgcaaacaagaagcaaaccagcaatggcccgcgcctgcgtcttcctcgtcgtgctcctcctagccgccgtcgccatggcgccgttcgcgggcgcggcgcgcatcgacgtcgtcgagggcaggtccatggcgtccgcggacgcaccggaggccgncgncgacgctcccgctcctgctcctggccccgactcctcctcgaccccgtcgccggcaccctccagcagcagc

SEQ ID NO: 329747 - DNA, 221 bp, Zea mays
ccaagctctacatcatgcccaacctcgtcttctacaacatcgtgctcatggaccttgtcgtcatcggtgacttctactctatgctgaattgagtgaaggccagatgctactatgtacacggtgctcatagatggtattgccaccgtaggaagttgcaagatgcagcaaggatcatggatgagatggaaaccgctggggtgcagccaaatgaggattcatac

SEQ ID NO: 329748 - DNA, 232 bp, Zea mays
cggacgcgtgggtgagaggacatgggagcataggagtgctgttggtgggacctgattgctaccgagtgtccagaaaggtttgcagaatttcagttggagtcaggctcgtgggctgaattcccatcagcagaagtttggcaacggtgtgttgattgtgagcaataatgagggtgcacaccgcaacaacggagcagtggacagccctagcgcagcgcagtttcagcttcaaaag

SEQ ID NO: 329749 - DNA, 217 bp, Zea mays
cacccttcctgctccggcctctggctcggacacctgcgctcgccctcgtgcggacggagccgacagcggcaacgacggatgccgggcttcgccggcctctcaatgcagcagcagtcggagcctgccgatccggcgggccgggccttaccgccaccggcggtgccggcgccggcgccttgtgtcgcgcgcgcggtgcaccaccgccgggctagatctg

SEQ ID NO: 329750 - DNA, 165 bp, Zea mays
gacgacgacgacgaaagtggtgaggacgttgactgacagtggtggcgtttgagaattcaggtgtggataccccgcaagatgatggataaccgcgttcgagtgttcaagtattgatatggataccgcaagaagttactaggagagatgctgcagccttttgggttt

SEQ ID NO: 329751 - DNA, 354 bp, Zea mays
atgagccgcttgaggacgggcgcacgctggccgactacaacatccagaaggagagcaccctccacttggtgctgcgcctcaggggaggcatgcacatcttcgtgaagaccctgactggcaagactatcaccctcgaggtggagtcttcagacaccatcgacaacgtcaaggccaagatccaggacaaggagggcatcccaccggaccagcagcgtttgatcttcgctggcaagcagctggaagatggccgcacccttgcggattacaacatccaaaaggagagcacccttcaccttgtgcttccgtttaagggtggcatgcagatctttgtgaagacacttactggcaagacaa

SEQ ID NO: 329752 - DNA, 270 bp, Zea mays
ggtcgacccacgcgttcgggaagttcactgagactgtggaacttcagattggtatgaagaattatgatccacagaaggacaagcgtttcagtggctctgttaagttgccccatatccctcgtcccaagatgaaggtgtgcatgcttggtgatgcccagcatgttgaggaggccgagaagatgggacttgactacatggatgttgaggctctcaagaaaatgaacaagaacaagaagcttgttaagaggcttgccaagaagtaccatgctt

SEQ ID NO: 329753 - DNA, 221 bp, Zea mays
  unsure (1)..(221): unsure at all n locations
cccacgcgtncgcccacgcgttcgaatttctctgtcttaagcacctgatcgttcgcttgtcattaggaacaaccattacccaggcatttgactatttctctttggtttctttccttgatgcgtctccttccttggagacttttatattaaatgtaaggtgttggcactgtcaattcattcggtcctgtaaattcatcttaccattctgtccatttagctta

SEQ ID NO: 329754 - DNA, 215 bp, Zea mays
gttctctcgggcatgcgagcgtggcggcggttccctcgggcgtgcaagcggtggtgatcccgagggccaacggcggtgccgccctgaggcaggcgacaggcggtggcgttccaccgggatcaagcgacggtgacgctcccggggcatgcgggcaagcatcatcgtcgctcccgaatcggacgagttgcagcggcgcaccccagacccagcggcaa

SEQ ID NO: 329755 - DNA, 293 bp, Zea mays
aatgtgagaggcactcacatggttaagcaaaattaaaggcgcagtttgtgttaccaaatgcaagaaagaaagtaaagaaagcgctggcaagtgatgatgagactaaaagtgctgataaaagtccactatatcaagagtctgccgattgtagtttagcgacatcttctaatgatggtggtaatggaagttctagtgtgaatatgctacataagactaagatcatgacgcacctgaaaagcgtaagaccacgttcatggagataggatacaaggcctacaacaagcgtattggac

SEQ ID NO: 329756 - DNA, 416 bp, Zea mays
  unsure (1)..(416): unsure at all n locations
cctcttagccaacctattagctgtccaacacctatttagggctgcgagccagaggaagaagtggcatttggagggggcccaagttccccaaatcttttcatagtgtccgaaggagacagaaccagtaaacaatccttcataggcagctttagctgaataaaccccattagcagcaatactgaaaatatgattatcctccacattgggatgcaacacaaattctgaaagcagattccaaaggtgaagataatccattaagaccccaacagatattactttcattaccttggaagtataattagtgggtgcatggattatgctctnttgaggtttaagctaaactattgttattgataaaataagttaaaccaaaatattgtactagcatgagtcatggttaataacatttctttttt

SEQ ID NO: 329757 - DNA, 241 bp, Zea mays
agggcatccctccagaccagcagcggctcatctttgctgggaagcagcttgaggacgggcgcacgcttgccgactacaacatgcagaaggagagcaccctccacttggtgctgcgcctcaggggaggcatgcacatcttcgtgaagaccctgaccggcaaaactatcaccctcgaggtggagtcttcagacaccatcgacaacgtcaaggccaagatccaggacaaggagggcattccccc

SEQ ID NO: 329758 - DNA, 257 bp, Zea mays
atcacgacaagatggcgtgcacaaacaatgcgatgagagccttgttcctcctggtcctcttctgcatcgtgcatggtgagaaggaagagtcaaagggcatcgatgcgaaagcgtccgggcctggtgggtccttcgacatcaccaagttgggcgcctccggcaatggcaagacagacagcacgaaggctgtgcaggaggcatgggcatcggcgtgcggcggcactgggaagcagacaatcctcatacccaagggtgac

SEQ ID NO: 329759 - DNA, 342 bp, Zea mays
gtttgaaatggtagaattaagaatatttttctcatcccttgagatttctacgctattgatcttggttcctagtgtctcaggaaagaattacaatccgactctagcatgacttccatcggatcactaaaaaagactacttaaggtgatagtgtagaggattaggcataatgcgtgcgtttaattgcacggaacctttcagggaaaaaaatatttagttcagagggttggagggcaagatgcctctcggggatacatatgtcagtacgagattacaatgtcctaacggccaaatatactcaacactgttaaccttttttataaggtggctaataaaaaataaca

SEQ ID NO: 329760 - DNA, 307 bp, Zea mays
gatcacgacaagatggcgtgcacaaacaatgcgatgagagccttgttcctcctggtcctcttctgcatcgtgcatggtgagaaggaagagtcaaagggcatcgatgcgaaagcgtccgggcctggtgggtccttcgacatcaccaagttgggcgcctccggcaatggcaagacagacagcacgaaggctgtgcaggaggcatgggcatcggcatgcggcggcactgggaagcagacaatcctcatacccaagggtgactttcttgtcggacaactcaactttacaggcccctttgcagggcgacgtg

SEQ ID NO: 329761 - DNA, 252 bp, Zea mays
gtacatgctacggaggattgctgcaaagcttccgatatcccagggtcaccccaccagcaggggctcgagaccagggattaccgtatggtgagccaaaaatggggactgacgtccagctatgaaaaaaccactgcctccccctatatataatacttgcattggcagcctctctgcaaaaaatatattgggatgagactccgcaccgatattctttttctagaccctactcacatgggagccatctctattttt

SEQ ID NO: 329762 - DNA, 178 bp, Zea mays
gtacatgctaaagaggattgctgcaaagctaccgatatcccagggtcaccccaccagcaccagctcgagactaggcaccaccatatgctgagccaaaaatggagactgctgccaagctatgaaaaaacaactgcctcgcccaacatataacattggcttggccggctattctccaaaa

SEQ ID NO: 329763 - DNA, 284 bp, Zea mays
ctccgctgggccaccagctttgaccgccgcctcccttcccctccgctactgctcctcctcagcccactcccccgcaggagcggcggcggcggcggcgaggtcgtaccccacatcggcgagcggcggcggcaccgccggaggcaaaggcaagatgttcgggcgcgcgccgaagaagagcgacaacaccaagtactacgagatcctcggggtgcccaagtcggcgtcccaggacgatctcaagaaagcctaccgcaaggctgctatcaagaaccaccccgacaagg

SEQ ID NO: 329764 - DNA, 150 bp, Zea mays
ccttgaagagacctttggcgccgacgatggggcgcgaggtccctggcaacgcactgatgttcggcgtgtacgaaggcactaagcagtacctggccggtggcccggacacgtacgtccttggcaggggcgtccacgtccttgcaggcggtc

SEQ ID NO: 329765 - DNA, 174 bp, Zea mays
cccacgcgtgcgtggacgcgaaggtgaacgacaatgtcgtctacatcgacctggactacgagacggagatggacactgcttaggccaggtatagttttgagaagagctacgagctggctgacagacatgtgattaacatcggtgcttagcgctagggcttctctgaggtactct

SEQ ID NO: 329766 - DNA, 272 bp, Zea mays
agcaaacctgcagtcatctcctccaccaccaccaccaagctcaacaacagccagctcgcgaaaataatgaagagccgcagcatggcatcatcggccgcgctcttggtgctagccctcgcgctagtggcggccaccgccccacaggtagcggaggcaaagaagaagagagcggcggagagcggcgaggcggcggaggcgaagaacatccaggacgacttctgctcgacgctgtgcgagggcaagaaggggacggacctggtcgcgtgcaagga

SEQ ID NO: 329767 - DNA, 230 bp, Zea mays
ggcggccaccgccccacaggtagcggaggcaaagaagaagagagcggcggatagcggcgaggcggcggaggcgaagaagatccaggacgacttctgctcgacgctgtgcgagggcaagaaggggacggacctggtcgtgtgcaaggagtcctgcgcgctcttccagcagtccaacctggtgctgtacggcaggatccagtgcaagggcaagtgcaccgagcagaagggca

SEQ ID NO: 329768 - DNA, 243 bp, Zea mays
cctaagcgtccaaacaaaagttctctcgctcgctttttttttaaaaaacaaatgtgctatatgtatatgcgcgcatgcatgctagcagacatctttcctaaaaaaaatttaaataatttccatctcgcattattttagtagctaccattcatgttttctgagtagttgtataaatgctaccaccgtcatcttttgtacccggccggaacaaacgaaaaacacactatctatgctgtgttgtga

SEQ ID NO: 329769 - DNA, 97 bp, Zea mays
  unsure (1)..(97): unsure at all n locations
attcatagcagaccagtagtactagtttnntttttttcgttaaagcaggtgcctgtgccttatgggggtaccacttgcctttcagggggggcctgcc

SEQ ID NO: 329770 - DNA, 159 bp, Zea mays
caaatgcgaagacggtctcatcgacgtttttcttagctctacggtgatcaccatccttaagggccacttaaacaaccacagcggcgtcattctctttggcgccaaccactcctggccgcaagatcagaacattcacttcatcgctgatttcaaccactt

SEQ ID NO: 329771 - DNA, 85 bp, Zea mays
tctagatttttcaagctgacctacgcctgcatgcgacgggatatctcttgtatagtgccgcctaacttcaactcattgctccgcc

SEQ ID NO: 329772 - DNA, 109 bp, Zea mays
gtgatgctttggttggggctactaagcctttttactagtatctatcctggggcaactatggctcccaagaataaaaacatgggggttaacaccaaaagtactttggata

SEQ ID NO: 329773 - DNA, 186 bp, Zea mays
  unsure (1)..(186): unsure at all n locations
cggacgcgtgggataaaaaaaaaaaaatnnaatttataaaaaaaaaaaataaaaataaaacaaggggggtttttttaattgtctttggggtttcaanttttctttcccaatcatattgggtttataacttttaaataccaacccctactttccttttcctgccccttttttttcttcttttggcct

SEQ ID NO: 329774 - DNA, 356 bp, Zea mays
gaaacacgtctggcaccccttccatccatttctgcagcacatccgggcagcctaacgaatgggtttcgcgccacagctgcggtcctattctacatcctcgccgtcgctgccctcaccgcggccgaagcactggctgagtcaccgtatacaggcagtactgccaagtaaccggccgagtcacctaaggcaggcagtgctgctgctcctgccaaggcacccgagtctgctgccacgagaactgcccctgataaggcacctcaagccggctccacgccctgcgatgccgctgcctaatcgtaatcgacgagtaggaagtttggaccagttgccgagccgaccaccggcgtctatacacc

SEQ ID NO: 329775 - DNA, 334 bp, Zea mays
gtcttgcctcgtgaggctctaccacgacgttgttatcatatctgtcgtggacatcatatagcatggaggcgttaaaacatgttgggcgacaaaagaagtccctagcggaacctggacactacacgccatagtctcgctcaacttccccctttgaatgcccattgttgtcaaatatggtgcctactccatcaccaacgacctcattacagcgtagttccaagttggaaccacttataaaacaaaactcatcatggaagtagcttctgatgaagaaccatgttttacaagacctcatgtggcgcacgatatagcatgacactatttttttttggca

SEQ ID NO: 329776 - DNA, 97 bp, Zea mays
ccttggcgacccatttaaacccttgtccaagggcggcattgtccagaacagctagttcaacagcgggctgatgggctggtcgacacaccggaacgtc

SEQ ID NO: 329777 - DNA, 62 bp, Zea mays
gatacacgaacgcggcaccttgaatccatttgttgggcgcaccagctacaagttacatatgg

SEQ ID NO: 329778 - DNA, 187 bp, Zea mays
cttcatcttcttaccagcctactacgacacttttattgtatctatcgagacacacctaacagaggcaacagtcatagcgggaacgcgaaccctgtacctccttggcgcgactgtcgcggcgctcttaaccacacctgctgacgtggacgctggcacgctggaggagatctgaaggggaacctccttc

SEQ ID NO: 329779 - DNA, 241 bp, Zea mays
aaaagacggaaggaagcagagaacagagaatatcacattaagaacaggctcaaggaaaaaaaggatgccaagcagagcgcgggggggaaaataaaagcggccgacaacgaggcaacaccgagacgaggctggcaagcagcaaagagagacaacacggcgcgcaaagaggagcagaagctgcgagcaaaaaagtggaagaagcacgaaacgaaaatccaaggcgcaaaaaaaacgaaccgga

SEQ ID NO: 329780 - DNA, 238 bp, Zea mays
gctatcctgtggcaactcaagaggactattttttctacaattgctaaggaacttgaaatgggactctaaatagaaagagaggagggatgcttacattctcatttgggctaatatcaagggcatggaatcaggcaaaacttcacatattgaaagcttcaaggacaaaacgattgcagatggggagtatcttccatgagctcctaaatgctgtgcagagcaagcgttgtagactggaaca

SEQ ID NO: 329781 - DNA, 144 bp, Zea mays
tcgacccacgcatacgcggacgcgtaggatcaccggccgttaagcgtttaatctcccaattccacccaatatctcatggcgtcttctccaacgcacttatcctcgcaccactatatccaggagcgtcgaagtgatccacccgcc

SEQ ID NO: 329782 - DNA, 186 bp, Zea mays
acaagatggcatgcacaaacaatgcgatgagagccttgttcctcctggtcctcttctgcatcgtgcatggtgagaaggaagagtcaaagggcatcgatgcgaaagcgtccgggcctggtgggtccttcgacatcaccaagttgggcgcctccggcaatggcaagacagacagcacgaaggctgtgc

SEQ ID NO: 329783 - DNA, 299 bp, Zea mays
gttagtatatacttatgttttctaaatacaagagactgtataatacaaacacagcggtgcaacgtgcgcaacggtttttaagcgaagataattgcacgagcataaaactggggtaataaataaatcacgctaccaaagaagagtgctgatgcttgcaactaagtgtacatgattccataatgaacatcataaacgtagcgatggccctttctattgtaatgatctcttaaaattttagcccgacatacgaatacctggatctgttatctgggctgacagttttgaccaaattgaacgtg

SEQ ID NO: 329784 - DNA, 124 bp, Zea mays
tttacgcaatcgtgaacatgatcctggcgattcaaggcgaaacctgagctgatatgcgccgcgcgacggcatccttcggcatcactgggacaaaatctggactgtcactcaagattgggatata

SEQ ID NO: 329785 - DNA, 382 bp, Zea mays
ttcacttcctcgctggcccataaatatatatttatctatcgccatcgagcatttataggcggacagaataattaacatcatggggcaagcctcacggctcgtcctcctcgccgtcttggcgctgctgtccggcggcctcctgccgcacgcgctgggtaaggcctggcgtggcaggcgacacggaggcgccttcaacctgtaggtccacgacatctgctttcgcacgatgccccctttgataggctcgctgacgaccggccgtataacgagctacctcgtattctgatcactgcataacgatatcctgatattggcacacggttcatcttgcatcgactgatcctcacatttccgaatatgccgatttttccattagtggatt

SEQ ID NO: 329786 - DNA, 469 bp, Zea mays
  unsure (1)..(469): unsure at all n locations
caaacatttgcttattagtccggttcacttccaggctagggtcgcaaggatcgggcgacctttgggtggagatgaaggggttcttcatggcatcacagtaaaaccacattgcatgttaagaatggcagtttttaatggaactataaatttcatgagttcactgttgagtcttcatccaggacctcagtgggcagcagcgcagcagaggtggaggtccatcgggagaatgtggagacagcgacgacgagcccaaccgtgatttcgccaaattcggcccgtggggcggcgacggaggacagccgcatgacatcggaacactaccctgccgtctagacaggatcaagatcagcagtgggcttatcatcgactcgatcgagttctcgtacgctggccctgacagccagtaccgtaccgcatgccccttgngtggtcatggangagacatcagctctgtgagtgtgatgaacat

SEQ ID NO: 329787 - DNA, 313 bp, Zea mays
cgcgttcgctcacgtattcgggaggctttttcctccactagaacgagggctaccacggggggcgcatcatatgatcccatgctacgatcgcggctaatcacaaccacgacaacttctgctcgacactgctctagttcaagatcgggacggtgccggtccagagccaggagtcctgcgacctatgcctggaggacaacctgccgctgatccgcacgatccactgcaagggccagtgctcctatcacaacggcatcaccattcccgtcatgaacgtcctgcacgatgagcccgacacggcgtacctggtgaaggc

SEQ ID NO: 329788 - DNA, 400 bp, Zea mays
cgtggacgaagaggattctgaacctgaatgggtggaatacaaaatcaaagagacgaacatattcactgtggacaaatatcagcagatagggttctttcctgaagaaaaggcatttgctctgaggtatcagactgctggaatgctggagactgttcttcgggttggcacgcttggagaagatgatactggtgaagaatctcccaaaaacctgaagataccttctcgcaagccatctattgcatgtgaaaatcgtctttactcccttgaaggcaatggtcgaatgagggctttccacataatggatccaaagggagtgcttgacacacttgttatttttcatgagaagaggatccttctgaattaaccccaaccttttattcctttagagtgcccacagtga

SEQ ID NO: 329789 - DNA, 216 bp, Zea mays
tacgcgacgattgcctggacagtgcctgcgattttttccgcgatactcctgactctcatgtgggggctgaccgttaagcaggaagagccaaaggccatggattcgaaagcttctactcctggagctttattctacatgatctcgataacatcatcggccaatagctagacagacagcacgtaagctgtgcaccgaggcacgtccatcggcgttcga

SEQ ID NO: 329790 - DNA, 388 bp, Zea mays
ccagcaacgagtcgctggagaatgccttcgcctcctacggcgagatcctcgactccaaggtcatcaccgaccgggagacggggaggtctcgcggcttcggcttcgttaccttctcctccgagaactccatgctcgacgctatcgagaacatgaacggcaaggagctcgacggccgtaacatcaccgttaaccaggcccagtcccgtggcggtggcggtggcggcggtggctacggcggcggtcgcggcggcggcggctatggtggcgggcgccgtgacggcggttatggcggcggtggcggctacggcggtcggcgcgagggtggtggcggcggctacggaggcggtggcggctacggcggtcggcgcgagggtggtggtggcggcta

SEQ ID NO: 329791 - DNA, 355 bp, Zea mays
tcctgaattcccgggtcgacccactcgtccgaactatgcaagacccatcccatcctactctatcaaacacgaatgttttatcgctccttgccctgtttaatcagggatgccactgtacatggttaaataatagggtagtttctcaaggcatacggagttatgtataggaactgttgtaccctataacttacaacggtgaggagcttcttgtcttgcgcatgtcgtcatgagatgcagctgcggcgaacgagggtgcatgtgttggtacacgcgaagagcgagcataggagtgcgatgacacggtatgacaggatgatgaaaccagatgtgccgatgctggtattgtaccatctgc

SEQ ID NO: 329792 - DNA, 460 bp, Zea mays
  unsure (1)..(460): unsure at all n locations
ttttgaatgattttgagtgggttgaactttttttgtggtcgatgttcatcacctcttggctcatacccttctcagagttcgcttgttccggctgatggccgtgtacgactcttcaaatgctacacatctacagaaattcctgtaacagggtctcatgatgtgtttagggggcatacattggaaagagtttttgtgaatctgctgctcgaagtcgcagaagacgaaatatcttttcggacagtagtcagagatttgaaaaccaaaaggccaatgctgcaattagttcttcttagctcanaagcatggttatcttctggttgctgctatgaaaatgataccaatggttcacatggaacatcagatctgcaggctagtgttaaactctngtattctgattataagaatgcttcagaagcagacttaaggacagttgaagagtgggcatccaaatacccggctg

SEQ ID NO: 329793 - DNA, 389 bp, Zea mays
cagcactgcgcctgccgcgactggcccggcgtcgaccccgcccccgccaccgccccggctggcgtgaagaaggccgccagcgtcgctgacgacgctgggaaggcctccggcaccgccgcctccactcccgcgcagggcggcgctgcgcagtgagattcgcgccgcccaccgcgtggtgttctgttccctgaggatcggaacccgccgtgtcgaacgaacgtgtggtcatccatcgttgccccgtttgagcatatcaatccccgttgggtcgtgtttttcgggtctgagtggatttttggcttttgatcaaaaaaaaacaaaaagaccaccaaattacccttaatatcaaactttcaacaacattttcaaacaaaaaaaaaagggcggcc

SEQ ID NO: 329794 - DNA, 182 bp, Zea mays
gtatatccctgctgccatgcatcacaatcggtacaactcatgtgttatctgtgtgtgcctagccgatggccgatgttcatgttcgtataaagtgaacgaaacactacccgtgtcacgggacctgctgatgaacaagaaggttacgctgttcacacactggtcagtctatgaggctaccttgt

SEQ ID NO: 329795 - DNA, 375 bp, Zea mays
cagagggttggtgtcaggtggcgtcgccggccggccgtcgtggaacagggaaccgcgtgtggaggacgaggattccctctgtagcactgcactgcactgcactgcaagttgttgtacacaagtgcatgtgtatgtgtagtagtccggcctccgggcgggaggcgccgaccccatccgatggcgacggtggcgtccttttcggatgctgagctcgccgacgctgagcctgagcgtctacgccttcatgtgaatgaaggagagctgtggccaacgattagcccaccacacaatggagaccggagaggtgaccaaccgtgtccaatccgtgaacggccggcacgggattgaagtgaacgggcgggcgggcgaaaaagc

SEQ ID NO: 329796 - DNA, 179 bp, Zea mays
cggacgcttgggaactaaatccactcatgttctaggaaagagggacacaggagggatggagccccggtctccacgcctccacaaccatccttcccgatcccgaccagctttgaatatcctatggcggacggccgttgttgcaccttcgtggatacccttttccaaaatacccccccccc

SEQ ID NO: 329797 - DNA, 454 bp, Zea mays
cggacgcgtgggcagctggtaaatcaacaaaatgcaccagtttcagtttctaatacaggtatagcaagagcaagtttctgctgcagcactcttaataagaatgcatcgttgtctgatggtgatagctcgcacaataggcgctgggacacaattcggtctggtcatattgtttcctctcattcttcagatagcactatgctatcaagaccagccagtgcagtatcatccactgatgtggcatctctgcatagaaaggaaaggagacaagcttgtcctcctggatttgagaagcctcatctgtactccggttcaggcaaagcttgctctggacattgctctgcacctgatgccctggtacaagattgtggtattccagatcaacaagaccttactagcttgactacagattgcctgaaagatgatggagatgtcacacaaaatctaagcatgaaca

SEQ ID NO: 329798 - DNA, 263 bp, Zea mays
cttctttcattttcacgtggtatgctatcttccgatcgcgaggcgtgtttgcaatataatcgtcgttagcctcggagaggaggattggagaggcaaccaaccatccacgacgggatcgcaggagctgatgccccggtcgcggaaagcaacggcgacgagatttcgtgcacgcgagacgcggcagagaaccgacgaggaggacgcgagccgcgtgacggatgatccgcggtcgccactcgctcctcgggcgggaaggcatcggt

SEQ ID NO: 329799 - DNA, 300 bp, Zea mays
taattaccggaccgacccatgcgttcaaacaatacttgcacccattatctccattacttcaccacatctctctcaccctaacgaaggtcgcccgccccacataccacgctcctctcctacatccttataagatttaccatcaccacgggccaggcaccggcacatctaccaattgctctcacagctgctatatcacccgccgtggccaccgaatgcgctatcccttaccgtgacccacacccagtgcatcctcgagttcttaccctatgagagcgacaccctgttcaggaacttctttct

SEQ ID NO: 329800 - DNA, 219 bp, Zea mays
  unsure (1)..(219): unsure at all n locations
ttccggtcgacccacgcgttcgggcgcatccgatcgttccttggggacgatgcttcatcgcgatgtggtgngaggcggtgaggcgccggttggtcgcgacggcgcggcccgcgttcctccgggcggcgggggcggaaaaaaacttccgcgccgtggtggtgccgcgtttcggtgggccggaggtgctcgaggtcangcaaggcatgcctgtgccccatc

SEQ ID NO: 329801 - DNA, 233 bp, Zea mays
ggcaagatgacaaatattttgataatgtattttatcagcgagatcattctgataatggggagcagaaattaactaaagacacatgcatagctacatgccatacaggaattcatgtatcattgtacatgttgcctgagtatatcaccatgctaattgtagaagccattacacatcttttctaatcaataatgcatcttctaaaaccaacttctataactacattgcaggatcct

SEQ ID NO: 329802 - DNA, 395 bp, Zea mays
caaccggttcatggactcgcgcactattttctctctgcattgtgccaagaaggtgtcagaatggtggggaagccgcagcagatctacgaggatgccgaacatctcatgcgcccgaccttatcaaatctcttggcttcgaagacggtaatgcaggaagatttgtgtgagacgaggtcgtctccgtgctcgagggccaacaaagcgagcgcctcggcggcagccttcctggcggcccaatcgtcggccgtgagcgcgtcgcggaggcaaggcacggcggcggaggcggcttcaccgccggatgctgccgaggcagcgccgatgatggaaatgagcgcgggcttggccttgaacgccgcgctgcggatgaccttgtataggctccggaagagcccccg

SEQ ID NO: 329803 - DNA, 261 bp, Zea mays
atgaaatccattattgtatgttatttggagtttcgtttttgtcacatgcatgtaatgaacaacggtggcaatcatctataaaggttccattattcgctcgcgaaaaaaaaaaaaaaaacaaaaaaaaaaaaaaaaacaaaaaaaaaaataaacaaccaaaaaaaaaaaaagacaaaaaacgcgcatacacaagaaaaaaatatagaacagcgtcaaatcataaacaacgagacactatatggagcataacattaaaaatta

SEQ ID NO: 329804 - DNA, 187 bp, Zea mays
cggacgcgtgggatttgcaaaatccccaccgtcacagttcaaatgggggtgcccaaatcaggggtggggatctcgtagtcaaggcttgcggtgaacgacgagtacaacgcaaaatttcatgaactataaccgcggcacatctttccgttcattgtgttcacgatcgatgacactgccatggagaaca

SEQ ID NO: 329805 - DNA, 437 bp, Zea mays
  unsure (1)..(437): unsure at all n locations
tgcttcggaggcgtaagatccgcaaaggtgtctcatgtttctccttgacgtttgctgcgttggctgggctaataggtgtcctggtggggctcctgatgagcctcatcttctcttcgccgccggttgatgcataagatgcgagaaaaaggttgcagcctatggaagcattaattgttcagaccgacatggggagaaagctcgctcgggaaaagaagaagatgaaacttttgtcgtagtagtctccattttcattcttttgttgcttgcaccgtagttatatgaaacgatgataacgggttgcagatctttgatctttccacccgtgcttggttcanaaaaaaaaaattaagataagaataataatatttaaacggggcggccgctcgttatgttccaaacttacgtgcgcgtgcatgcgacttaatatttcttttata

SEQ ID NO: 329806 - DNA, 432 bp, Zea mays
cggacgcgtggggccttcaccgtcaccgaactgaagtgatgtttaagaaaattttagaactgacgaggattgggtgggattggcactgatgttcttgctggtgcacattgtgaaacaatggatgttgttgctggtttggctttaatccataccgacttctaccgcttttacagtgttttcaaacattcagctttaatccgaagcgaacaactcatctgataccacgtcgctggcgaccctcacgacggatgcgcctagccgcgatgacttgatggcgcagaggccgtggctaccctcgcccccgactcatccgtcgtatcattagcgccaggcaggaagcacaagttgaacgccaccacaagcacggtgaggattttggcagcctccaccgtcaccgaactgaagtgatgtttaagaaaattttataactga

SEQ ID NO: 329807 - DNA, 228 bp, Zea mays
ccaaggctgctgaacactttacaaagacattttttcatactaaaccatgcctctaataaagacgcctaggttgtcactacagagagtctcctgctaccaaactctcacaccccatacctgacttgaccaacacgcacgccctgactgacgcataagctcatgcatacttgatttgatttaaacaccaattctgtacttttactgaacatgctactcttttcatcattc

SEQ ID NO: 329808 - DNA, 440 bp, Zea mays
gtctgatcataccattgagagatcagactggtatggacgatccttctaataatgcctagtagattgtgactacagctatctcagtggtaacaatctctcaggccccatacctgacttgagcagcatgcacgccctgactgcagtgtatgctcaagcatacttgattcgttctgaacacccattctgcaattttactgaacatgctacgcttttcatcatttgaaaaaaggcgccttgatagcaatcagttcagtggaacgatcaacccattaatggaaaaactagccaatctcaaggagctgttagtactcgatatctcatttcataatctatctcaaacagtgtctgcagacattctttacctaatgcattttctcaaaaaatggcagacacctgaacaacagcaatctcacgggcaaaataccagatggtctgaaaaa

SEQ ID NO: 329809 - DNA, 444 bp, Zea mays
tgtcgttcttgaaataaaccctacctattgctgtagtgctgttgttgattacagaattatttactccgttctgaagttgaaagaatttctggacaacaagatatgcgacacaaatatttgacggtctcaaaccgtgctaaccacccaaagaagttcgaggtgctgccagtttatcagagttcttttgctgcaggggatgatttttcatcccttactgatgatagaaagacaagagcattggttcatgctatggtggagattctttttttatgtggaactgggaaaagagctgttgtagcatctgttgcacgtgccaatcgtgggaaaattgatgcagctttggaagatctttctgtcgaatcagcagtggatctgcagaaagttcttaaaacaagtacatttacttcaaggaaagatgcattcaacacccttttggctaacatt

SEQ ID NO: 329810 - DNA, 106 bp, Zea mays
cggtctctggaattcccgggtacgactccacgtcgtctcgtgaaccacgcagtcctgtcaatataaagctcagcacatctcaaatacgaaccctgagagactctca

SEQ ID NO: 329811 - DNA, 325 bp, Zea mays
ctcaagctgaacgggactatgttcttgcagagtttaagagcggccagagccccataatggctggcgcagatgtggcagcacgcggtcttggcatgatgattcatttgaatattacgattaggtagccgttccaagtgctcaagggtgataagtcgcatgctcgctgtgctgcgactggtcgagtgaactgaacttgtggatcggtggtgtataccaaggtgccatcatgtctaaggtagataatttccgcccgtggtttacctcatttgagcgcgagcattgaccacgttacacaggcagtctaactttgagctatcatggtaat

SEQ ID NO: 329812 - DNA, 249 bp, Zea mays
gcaaaatagtcgtgataatttttggattttatgtggaacctgggagaccagttttcaaataattgctcttagtgatggaggaattatccaaaccttcaggcaccccaaggttgtgtttaccgtgttgcacatttccttgaccgggaacgtggttgcaactggtagttatgacacaactgttatgatctggcatgcatttcgtggaagaccaattgataagaaaatcaggggtgccaattttgaactttc

SEQ ID NO: 329813 - DNA, 423 bp, Zea mays
gcaccctccacttggtgctgcgcctcaggggaggcatgcagatcttcgtgaagaccctgagtggcaagactatcaccctcgaggtggagtcttcagacaccatcgacaacgtcaaggccaagatccaggacaaggagggcatcccaccggaccagcagcgtttgatcttcgctggcaagcagctggaggatggccgcacccttgcggattacaacatccagaaggagagcaccctacacctggtgctccgtctcaggggtggcatgcacatctttgtgaagacactcactggcaagacaatcacccttgaggtggagtcttcggataccattgacaatgtcaaggccaagatccaggacaaggagggcattccaccggaccagcagcgccttatcttcgccggcaagcagctggaagatggcc

SEQ ID NO: 329814 - DNA, 436 bp, Zea mays
aaaaaaagggcaacctgatgcaacagatggtgggccaacaggaagagagctgaatatcggacaagcaagtttccattcagaaccgagcaacgcttcaaaccagttcatcccagaccaattgatgcagggacattatgtgcttggccacaatttcgggccaggtagctcacataaccttcacgacaatctgaaccagttcgatcaggcttcctcggctcctaccttgcaacaacagccgtttaccgggaatggtcaactgacccagggatatcctggtgatatgcatgcgttgcagtttgtggagccaaccccccagattgaccatcagaatggcgatgagggtcagtcgtcaataccagtgtgggattttctttgagctgcctgcctctggcactttgccatccttcccttcacgcgagaggccgcgtttcaccct

SEQ ID NO: 329815 - DNA, 124 bp, Zea mays
atttgaaacagttcagaattcatctataagattgcctacatatatatatgattctggcaaggcaaacgtgatgcagtcttgacgcatgttccattcggacatcatcatgcttgtcctgctgatt

SEQ ID NO: 329816 - DNA, 218 bp, Zea mays
aaaaccatagtatcaatcatgattggccgttttttgtcaataatggccactatgctgacgaggaggctggtcgacttgctcggccgggcctccgatgtcgaggacgacctccggggcaaaaagaagcccaacatacaccacctcaaggttaaggcgtgtccatggacggacggtcacgcgactatctaaaagcggacgcgacgcgttaactgacacca

SEQ ID NO: 329817 - DNA, 443 bp, Zea mays
  unsure (1)..(443): unsure at all n locations
gaaggcagagggcgacggccaggaggaagcggtcaatagaagacaaaattttaccctaaaagagactagaaaaaacatctccgactatgtcatcgtcggcgttcggcgacttcggtccgctcaccgagcgccgccgcgctgagaaggcgcggcagcagcgcaggcgcatcatgatcgccgtcgggactgtctccataatcgccatactcatcgtcattggctggtacgcggtcatgaacagcgggaagaagtcgtccagcgacggtgaccacaaccacaagtcttcgtcgtcgcgggccaaaggcaagtccagcggcggatcggactcggaagcggaagcggaaacggaaacggaatcggggtcggattcgaagacggatctgaaggctgtgtncaagagcatcaaagcgatgtgctcgcagacagactacacggacgcgtgc

SEQ ID NO: 329818 - DNA, 362 bp, Zea mays
cggtccgtcattccctgttcgacccactcgtccgcatactcactgcccaaccactcacattcccgttattactacgactaacaaccgagaggggcaactgggtcattctacaagacgtactgccagccaactgcacaccacacgcactgtacacttcccacttaccattatactatacttcgaactcccttccattcatcctactctgtggcctatgaaccttacggacccagctaactaagcttatctctatcgcatgactaagcatgcaccggtaaccacatatactactgacacttctgacacctagtctatgtcatgctttcgtactactttaagaggcaattctaatcatgtatgcc

SEQ ID NO: 329819 - DNA, 219 bp, Zea mays
cgggttgacccacgcgtacgccctgaccggcgacggctgccaccgcgacggtgatgatgtggctcgcgacgttcgcgatggcgtcgtacaagctgaaggcggcggcgtggacgccggtctggcaccaccggtaggtggccgcgtccctcgcgcaggccgccgacgcctggctcaggctcctgcgcgccaaccacccggaccaattctacttcggggccc

SEQ ID NO: 329820 - DNA, 167 bp, Zea mays
actttataccctattccttctacacttccaacttccaattctactatactttcaattaccttcaatacatcactctctttactctatatacctacatcaacaatctaattaactttattatattcatatatacattcaccctaccattatactactaactttaatct

SEQ ID NO: 329821 - DNA, 444 bp, Zea mays
gagctctactgctcaccatggatcaagtgccgaagaagatggccatattgggttggccacactatcatcgatatgacctgccaaagttttgggcgtgtaaaaaaggttgcatatcattattggcggatgccggattcttgcagcatcattatgtgaggatgaatgcatgcgtagttatacggctatacccttcctgcctgccttcatgagcaactgaccgattctttggtttaggcggtctgtttttctagaatggatgtatgtaccttccgtgtgcgtgtgggttctggtaaatggtgaaagttgggtgtgattacttgtagctcacagttacatattgagggggtactcagggcccgtttggatacatctagctaaattttttaggccccatgtttgaatactagttagaaacattaaatatagtctaaaactaattacaca

SEQ ID NO: 329822 - DNA, 382 bp, Zea mays
aggagaggagcttaaaagcaaataggcgcgccatactacatcgagtgcagctcaaagacggaactaaacgtgaagggtgtcttccatgcggcgataaaggttgtgctgcagccgcctaaagcgaagaataagaaaaaggcgcagaggggggcgtgctccattttgtgatctaataatgatcagtagacaaaagaaacaagggccaaagtgccatgggtctattatatccgcgtcttgcgttaacggaacaaccatggatgataccaccccctctcccctatatattactgtggggtgtgaagagatctaggggttttagagagatatatgtgtgttatattcctcccttccgccccgtgagaatatcgcgtgtgtgtgtgac

SEQ ID NO: 329823 - DNA, 275 bp, Zea mays
cttaccctaaatcttaagttctatataaactatttctatattcatatctttcaccatgtatcctccatatacatatttaaagttatatatttataaaaaacagaacaacttatattttccattcttctattaattacatccatcacattttttttttcaataaattcccatattatttaacatttttaccacttttttaaattgggcattcaatgattttcataacttcatgattaacacacctattctaaatatattacatattcttttactat

SEQ ID NO: 329824 - DNA, 426 bp, Zea mays
  unsure (1)..(426): unsure at all n locations
tgcaagcaagccatgggcatgagcaccaccactgacctgtccgcgccaccccactccgccacgctgccctgccgcatggcctcctcctcgtcatcttcctccgtcgccccgtggccgcgtccagacaagcaccgcggcgcgggcgccctggtccgccgcgcgcagctcgtcctgtcgcgcgaggtcgggtggtgcgggcagcgcgcgtggcggaagctgctcaggcggctggcgcaggagaccaggtgcgtgtgcagctccccgacggcggcggccacgggtcggcccatcacgttcggctacgacgccgccagctacgccaagaacttcgacgacgggcgcagncccgcgccgcgccgcgtcgtcgtcggcgccaatgcgggcgataaaccgagcggcaacaactgaccaccccatcgacgttct

SEQ ID NO: 329825 - DNA, 308 bp, Zea mays
cgtgcgcgagacgacgacactcgatcgttgtccctgtatttccaccaccaccgtttccgacatcgctagggtggattgtcaacagtgctgcctccctccatatccgcatcgccatccttgccttcgtctagagactctatccttcacgccacgcctactacagcccccaccgacttctactatgcctccatgcagtacaccaagtaccctgagcttttcgtcaagtactcatcctcctcggcgccgaaagcaaatgcgaatgctgatcggagaaaacaaactgcactggtcggactagcactatccca

SEQ ID NO: 329826 - DNA, 442 bp, Zea mays
caagatccaggacaaggagggcatcccaccggaccagcagcgtttgatcttcgctggcaagcagctggaggatggccgcacccttgcggattacaacatccagaaggagagcaccctccacctggtgctccgtctcaggggtggcatgcagatctttgtgaagacactcactggcaagacaatcacccttgaggtggagtcttcggataccattgacaatgtcaaggccaagatccaggacaaggagggcatcccaccggaccagcagcgcctcatcttcgccggcaagcagctggaggatggccgcaccctggcggactacaacatccagaaggagagcaccctccacctggtgctccgcctcaggggtggcatgcagatttttgtgaagacattgactggcaagaccatcaccttggaggtggagagctctgacaccatt

SEQ ID NO: 329827 - DNA, 421 bp, Zea mays
  unsure (1)..(421): unsure at all n locations
cgtagagagaaggaaaaatattcccaaaccctagctcccgatctcgatggcgaaccctcgcgtcttcttcgacatgaccgtcggcggcgccccggcgggccggatcgtgatggagctgtacgccaacgaggtgcccaagaccgcggagaacttccgcgcgctgtgcacgggcgagaagggcgtgggcaagtccgggaagccgctccactacaagggctccaccttccaccgcgtcatccccgagttcatgtgccagggcggcgacttcacccgcggcaacggcaccggcggcgagtccatctacggcgagaagttccccgacgagaagttcgtgcgcaagcacaccgcccncggtgtgctctccatggccaacgccgggcccaacaccaacggctcccagttcttcatctgcaccgtcgcg

SEQ ID NO: 329828 - DNA, 302 bp, Zea mays
  unsure (1)..(302): unsure at all n locations
gcgtccggcttggacactcgtccttgttcattgcgattgatctactaaatattccttacccctttgagttcttagctctatggctagaaacatgctctttcagacccaatcntcatgtacctgtactccaactatgtcccctatacctctactactaccttgcgctttgcacattctagaacagcgttatcaattcccgttagccaatccactacatgttctccaccttttaccccgtcttctccaagttattgtccatgtcgatgacttcacccgtgacatctatcccttctcctattcca

SEQ ID NO: 329829 - DNA, 277 bp, Zea mays
catatatctagaagtaatactacttaaataatccttatttctttaatttcttagctctatagctagaaacatgttttttggcaactacaaacaattttcgagctatacagctaacacccctcttgtttggcttaaccgatagcgataggctcattggtgagggtggcaccaactagccacatgtcaacactgagagggccacctacagtcttaagcgcctcatcttgcgagagtttcatgattaggaagtccacatggacatgcaaccttgcccctt

SEQ ID NO: 329830 - DNA, 308 bp, Zea mays
ccggtccttaattcccgggtcgacccactcgtctcgggccacttcacgaggcactaccactttatgctgttcaagtcctgcgactcttcctccgaggacagggacacgcacttaacaaagacttcactctactactgatatactccatcgtacaaaactatccactaaccaataacatgcatctaaaccgttatcatccactccacgaactgactcatatgcacgatcacaaactgtcgtaaacacagcactattagccctagaacccgttacggtactaccttcaacagcaggtcctcaaaggtgac

SEQ ID NO: 329831 - DNA, 391 bp, Zea mays
gttgttgcggtggttagcacagcgtaaagactcaagcgacacctgggcaaagccagccagtgggcatgcgtgcaacacaagaggcttatcacatcccaaacacgcgacacgccacaccggccgcacacgaagatacaagactgttcatccacgaaatcgtctggccacgtacaatcaaggagatagatcgtgggaggagagacgatgcaccgttcgtcgagctactacctgcagcagtcgtcgtcatcgtcgtcgtgcgtgtcatcgtcggtagcggcgaccggcggggcggcatcgccgggtccgagctcgacggcgggcgtgatggatgtggaccatctgccgacttatgacccgcggtcggacttggccaaaaaggatgccctggatg

SEQ ID NO: 329832 - DNA, 438 bp, Zea mays
cggctctgggagtggctctattccattatacagctgatatccggaatgagcccgctcggccaaatggaccggacctgagcgctctcgttctctctcacgcgagcagtgcatccttgagccaccgccgccgtgaggagctccgcccgtccgccgtcatccgtcaaatcaggtggccatttggtacaggcgtcggactcccaggaggatgaccggtggcaagaggttcggcggcgggcgggtgccgacggggaccccgtccctcgcgtggtcgtccgtcgtcatcgtcgcctccctcctcgctggcgcctccatcgtccacaacatctacaagcctgacatgaccattccacctgtggagggtgccgccggcggcgagcgaggacaacaaagatgagctacgaatggctggacactgcatgcaagagaggaagctgggca

SEQ ID NO: 329833 - DNA, 450 bp, Zea mays
tcgacccacgcgtgcgcctggtcgtggaatcaggtgtgttacccaccctcacactcacaacgtgccatacatcgtgtggcagcattccgatcaggttttggtgccttggggtggggattcgggtgcctccggtgaggccccactgtgggtcggggcggtgccgttgcctggacggcttgtggaagaagtcaggtcctggtggttggatccgagatacacgatcgggatcgagccatgtcataccgatccagtgtttgcatccggagcattaatcttgtgggcaatggctcagattggccatggccgtacccgtttgcccgggtgcttgaaagccgttagatctagatccgaggggtgagagcgtatatccgacttaataaaactatggtcgttggatcgggatccgagggacccaaaccgtgtaccgattcgtttatatgtgatatgatc

SEQ ID NO: 329834 - DNA, 147 bp, Zea mays
  unsure (1)..(147): unsure at all n locations
ttattaaacaagattttacattctgcgggggccttcaaccattgatggactcaccaangttcatgagtattttatctatagatgatttttcagtatgccccacagtattaccggtttaataaatgatacattaccttttttatagtt

SEQ ID NO: 329835 - DNA, 322 bp, Zea mays
cggacgcgtggggtcctattggtctaatctgggagggtactatctcaacaaccgacaccacatcgagtcctacaatccttcagtatacggtaacataagtaaactagaggattgtaggatggatgtggtgtcggttgttgagatagtgtcctattggtctaatccgggagggtacttttcagaaggaaacgacataagccatttcggttcaaggtatgagatgcatgcttgaacccttggtcctggaactggggggaacatattcttaatatggaattattgtcgatctggggaaaaaacaatcaagctcatgaaacccatg

SEQ ID NO: 329836 - DNA, 226 bp, Zea mays
agatacatgagcttatcactgaagggggctgacgaatgaaggattctttaagactttgacatgttcatttatttctgggcacatacttgaaaccacatgttgccattcttgatggcattactatgagtggtggtgtacggtttttcattcctcgaacattgcggggttgaactgataggacaggctttgtaacttcataacttcatattgtacttcattctgatgc

SEQ ID NO: 329837 - DNA, 339 bp, Zea mays
  unsure (1)..(339): unsure at all n locations
gtccgtttttttgcataatcaaatgtatttgaagattggcaggctctgaaagctgcgggtgataacaggctgtaggaaacattaactttcacatgacattgtatacccaaatgacccattatcaaagatcaatgttgatgatgancctgaagcttttttttacgtgaaataaagctgccacgtgacatggccgacataaataacgaactatttatatacggtttcaagcccatgacaaattctgccaaacgacgagcatctgcccacatcaatggcttaaaacccaaggctatatccaataataatcttcgagagatcacaaaaaggaccaagcttact

SEQ ID NO: 329838 - DNA, 232 bp, Zea mays
tccaagatatatcaccctatgcatgttcctagtacttgtggtacatggagatacaactttggcagaaacttgcaggccgcttgttaaatgggatccattctgctttagtgcaatgtgcaaggcaaggtgttttatagagggaaaatactccgatggttcctatgtgaaggcgcacagatgtcaatcaaatggacatcacgctctgcgtgttcggtttctgcgtgaaaaatta

SEQ ID NO: 329839 - DNA, 176 bp, Zea mays
ggtaccgcgccggaattcccgggtcgacgccacgcgtacgcctctatgtgcaacagtagtagagaaggcattaatacttgttgctcacaatgcctaggttgtgttctttagtccagacaagaaaacatgttaatccgcagctgattaagagcttcaactcttgcaactactctaaa

SEQ ID NO: 329840 - DNA, 344 bp, Zea mays
tcgcccgcggtaccggtccgggattcccgggtcgacgccacgcgtacggcgctctttcttgagtgagagggtccaacatttggtaccagagctaggatggagacgccgccggcaaaggatggcctcaagatgttcgacggcatgggctcgacgagtgccgcgatggagcgcgtcatcaacagcagctccgttgagctcccgctgctgaccaaggcgaattaccacgagtgggcgttggttatgcaggtctcgctggaggcgatggaactgtgggacgcggtggaggccgtgtgcaaagagcgttccaaggatcggcgggcaatggccgccatcctgcgcggagt

SEQ ID NO: 329841 - DNA, 122 bp, Zea mays
ctgcggtaccggtaccggtccgggattccgggctacgacccacgcgtacttcgagatcgaaccctgcgcgtactggatgaacggcatctacgatcccgctgtctgcaccgtccatgatgaca

SEQ ID NO: 329842 - DNA, 239 bp, Zea mays
ctaactctaaccctatctgggcagaacactatgattaatcagggcctgggtcatggtgccgggcgcttaacatcgagtgtgggtagcatgtccagaggggcttccatgcacatcgtggacaaagggtcaagggctggttcgacttcaagggcatctatgaccttgaaaaggggagcgcgcccaactagctgatactgctggtccagtctatctaccgacaccgagcacctattatgggg

SEQ ID NO: 329843 - DNA, 328 bp, Zea mays
ggaaggacggcgtacggcgctgccaacgctaccacaccggcccggtcgcgcgcccggatgcgacgcgcggtcctgtgctggcgggaccgagatgtgcggtgcatgtgggcgcgtacgtacgttggtcgttggtccctccgtccgccctccggcttcgtggtttcgtttagttaggatgcgtttggttggcgagccaccggatgtggagtggcttcattctagatttggagaatagagctgttctgttctatgttaggtaagcaggatggagctgctctattttttgcttggttggggagtgtattataacggagccattcactttttt

SEQ ID NO: 329844 - DNA, 222 bp, Zea mays
gacgcgcccgctcccggtcccgacttcgcctcatactcggactcgtcgtcggaggcgcccttcagcagcagctcattcgactagccgcgcacaacgcagttcttgtcatgatctatctagcagataaaaagatcatatgtctcgttctattctctggtatactactactatctgttcgtcgcgctgattgctttttatacatcgatcgaggatcgacttatc

SEQ ID NO: 329845 - DNA, 98 bp, Zea mays
cggacgcgtgggcttgttcatgtatgctcaaggttcattatcttgttcatgtattaagtatgttatgaataactcaatatttattattttgttcatgt

SEQ ID NO: 329846 - DNA, 360 bp, Zea mays
ctgctgcgtcacctaaatcatccatcctatttgttgcatcacctgctaaagtataggggctgtcttttacacacatcgggtgtagtatattatgccacttaacataaaaacaatgtggccaatggatgtaacagctccaaactgacttgcctcctctttcaaacgactatcatggctatgatggcttctaaactgcacaacctggacctcttttataaaaaaaagattctgtcaaaaccctggcaagcaccacctctatctacatctcgaatcaaagacttatttaaagactcaccaattgcgccaatgtcctcagctacagctctttcccacgttaacgcttacaatgatatcattagt

SEQ ID NO: 329847 - DNA, 422 bp, Zea mays
attgtagtggcttatctcctccaaaacatgacaccaatggcacaattttttaaaaagatattttagatctaacaagaaccttgtatttgcagactattgaggctctcttcagtaaaaagattttcttgaacaaggaggggtacagtgagttctacagtggactggtagattccgtgagctctgaactgaagggatccaaggattttacaaagttatgtgcaggtctctcgatccttgggtacatttcttccgagtcagatggaacttgcaccaaggcattttcccaactcctcacattcctaggccacagataccccaagatccgaaaagctgcagccgaccaggtgtaccttgtgctgctgcaaaatgatgaccttattgtgtcggagaatatggataaagcccagggattacttgcggag

SEQ ID NO: 329848 - DNA, 309 bp, Zea mays
gcgacagagacaagagctacaacagcttgtccaagaacagcgctgaggcactgacgcaccggatcaagactaggacgaagaaggccacacgcgagttcctgtgcttgaaccccaggttctcctccaggctcagctggagctccacctggaagaacacaccctgaggccgtgccaagagcaactacttggacaacgtcacacacttcagcttggacaaactgaagctgcagagggtaacgctctagatcataacatacgcgtacctgaccaagtgcacatgcatcttcctgtcaccctccaacgtcacaa

SEQ ID NO: 329849 - DNA, 57 bp, Zea mays
ccaatttattaggcttttgttccaaaacatcacccaaaagccaaaccaaattcaacc

SEQ ID NO: 329850 - DNA, 446 bp, Zea mays
caaaaataggcgaacttttggatctggatgtgtgcatggaaattttggacattctgtatggaacggaagatacctgggactttttaattctccctgctcacttgctgcttccactcttgttgctgcatatgctatatcagttcctaagcaaacatgggagtttcccatccttccttgggtcaggtttgctacatcatacgatgaagaggaaatcatgaagattgttctgacaattctcctgcatgtgcttaaactggatggtatcgaagagaagggcaagggacgttttgatgccagatgtttgtcgtgagtatgtgatatgtagagcacgagattgtgccccaattttgccttttgagttctgaacgtataaccatctaactgaccgagggcagcagatacatgcttttagaagacactgtagctagttttttgacaggcgggtt

SEQ ID NO: 329851 - DNA, 298 bp, Zea mays
tgccgaccggccggaatccgggtcgaccacgcgtccgaaagccgcacatccaaataaaccgaggtacttagtcctaggcaagccgaccgccgacgtacgaccgcgccaacccgagagagaggatggatatgatcaagaggatcctcatcgccgcgctccttgtagtcgccgtctcggccaccgcagtgctggcctccaccgaggtcgccgtcgtcggtgccccagtcgtcttcgagtcgttggtgttcgtcgaatccctctctggcgccgtcggtgccggcgccggtaccggtactcg

SEQ ID NO: 329852 - DNA, 321 bp, Zea mays
aaaaaaaaaaaaaaaaaaaaaaaaaaaaataatttattaataataaaaaaacaaaaaaaaaaagaaagaaaaaaaaaaaaaaggggagggaaaaaaaaaaaaaaaaataataatttaaataaaaaaaaaaaaaaaaaaaaatataaaaaaaggggggccccctttttaaatgcaaattttttttcccccctttttctacaaaatattttttttttttttccctcaaaaaaaaataatcgccccccgcttttaataccccctcctttgaaaaacccccctgtccccccaattatatcctttttaaaaaaaatccctttttta

SEQ ID NO: 329853 - DNA, 340 bp, Zea mays
cccacgcgtccgtccaaacctgacattaatttattacaagcgtcagtatacatcttgcatgtggtcataggcaagggccggctggaaacttactaaatcatcttcctcgcgctcctcgcgaccgagtcatgccttcacaccgtcgacaccgccgctttatggttttgctggggcaagtgcagagctcagtgcgcacggtcaagctcacacaggacatgggccgcgtgcatgagctcatgcagcctctgctgctaagagtgcaactgcttgcccaacgacatccatgactgcccctgctacagaaacattttcaccacctgtcccaacaatatgcccaagt

SEQ ID NO: 329854 - DNA, 168 bp, Zea mays
gtttgttttatctgtatattgaacatgctcattccctggttactagagatataaaatgtgccgatatcctatttgatgcaagcggactggtcaaattggcagattttggacttgcaaaggagatgtcaattttgagccaggcaaaatctagcaagggaactgtctact

SEQ ID NO: 329855 - DNA, 433 bp, Zea mays
ggctgttccagcgtgatgatgaccctggccccgtgcatggacttcatctccagcaaggcggggggacccgggaatctctgggggttcgttcctgcccgaatccggccaaaccaaccccggttgctctgcatggtactggacggcactgccacgtgcttcggcattgccatcaaccaaaccagggcgctggagctccccggcgtctgcaaggtcaaggcgccgccgctcatccagtgcacaggcgtccctgcggcacctgcaccgacgcctccggacgagccagcagcggcagcggaagatgaagaagccgacgcagctgcagatgccccttcagcaaatggagcctcaagctccacaaactcaaagaatgcagcgagcttactgcttctcatctgcgcattgctgtatgccttctaataagtggtgatacaac

SEQ ID NO: 329856 - DNA, 448 bp, Zea mays
  unsure (1)..(448): unsure at all n locations
aaaaataggagttgcaatgcctttgatgccccattcatctgtttttgcatgtccttgccttggatttgctgtgagaacttccatatatagcatcagatggcttaaatgccatagcagattaatatatgaaactttcctctcaagcagaagacatcaaagtaaacttcttagtacaacagttctagcaagaagcacaagaaaagtaagcagtcatttagcaatagtcatcattttgcatgggaaatcagttgaatcatcaattgaagtgtacatgcagtcagagtttgaacagcttaactcacttcattgctacaatgttgtggaagagttttctgtagtcaagactaaatggcctgcaactgtccttgttttttatattgaaactacaagcttctcacattgtgatgacagaattattgagttttcagttccgtgatcttatgaangg

SEQ ID NO: 329857 - DNA, 407 bp, Zea mays
ctgaagattctcattcaggtccattttcattgttgggaagagtttcagagttgaaacctgacttttttatcagaatgggagatgtgaaaagagtttaccatggagtaagcagagtatctgtagtctgacgctccaaagttgatgccatcaaacacgaaggccagggaattgatggtctgcgtcccggcgacaaactgaaccgagataaaagatgtctaattcagtgtctgaatcttgtgaaatgcttgcgtatggagcggcgttgtttcgatagccaggccagggcacgtccttaccgggatgcctctgtgaatgacttggatcacgggcacgtcgcttgtgaaaatgccagccccgaacctcatagcaagtcccagcacgacggtgagacccatgcccaggacaat

SEQ ID NO: 329858 - DNA, 345 bp, Zea mays
  unsure (1)..(345): unsure at all n locations
gtgggagcggagtaataaccaaacaacggggagagagagagagagggaggaggaggaggaggaggaggccaggaggttttcgttcgctcgttcgccttgcctggggacggggttgccgttggcgccgtanaggtcccagagctcctggacctggccgacgagctggcgcagcgcggccacctcccccatcgccaggccgccggcgccgcaagcgcgcgcgcgccgncggccttctcaccgcgcccctccactgcctctgtcgctcgccccctcctctacctcgtcttccgggtcggggtcgggccttccggtcgcaccctccctttccgcttcgctaaatggaca

SEQ ID NO: 329859 - DNA, 474 bp, Zea mays
tacgcctgcacgtaccggtccggacattcccgggtgcgacgccacgcccgtccgaacaaaaaaaagaaaatttatgaattggaaacaattttttgttctgataattcaaaaaaacgggccggcgggtctagaggatccaagcggggcggcccatactttcaaagatgggcacgagaaatgcctatcggtgaaagagtttcgtgggcgattggaggaatggttctcacaggtggacttatttttatcaccaaaagaaagagctacagccatcatcagaagcaagctggtattggtaataatatgaaattgagaacgctggattctagagaccactcacaacaaacaaagcggagctaggaaggcatacgcaacttagcgttactcagaggattcttggacttgtgcttctacttttgtggatcggtataatcaacaactgggaacaatacattgtactgtgtgtgggtccatctt

SEQ ID NO: 329860 - DNA, 305 bp, Zea mays
ggtgcttgttcgtatggaggctggtggcgaggattttgcgttcggattagaactcctaatgcttaccttttaaatagaggtggcatgggtacaataccaagcacttgtacagcaaccacatgtaacttgaaaaagaaggattcttggaatattgctggtgcaaaatatcgattgcttctgggacctaagggacatcacgaacaagaaatggctattcccgcttgggctcatgaccctcatcttctaagccgaaagcactggtgacaccagcatttctgtgcttggcaatgttgaccatccctact

SEQ ID NO: 329861 - DNA, 411 bp, Zea mays
gcggcgtcggatgttgagtaccgctgcttcgtcggcggcctcgcctgggccacggacgaccactccctccacaacgccttcagcacctacggcgaggtcctcgagtccaagatcatcctcgatcgggagacgcagaggtcccgcggcttcggcttcgtcaccttctccacggaggaggcgatgcggaacgccatcgagggcatgaacggcaaggagctggacggccgcaacatcaccgtcaacgaggcccagtcccgcggcggccgtggaggcggcggcggcggcgggtacggtggtggccgtggaggcggcggctactgcggtggcgggcgccgtgatggcggcggcggctaccgcggtggcggcggctaccgtggtggcggcggccgctaccgtggtggtggcggcggc

SEQ ID NO: 329862 - DNA, 90 bp, Zea mays
cggacgcgtgggcggacgcgtgggcggacgcgtgggaaaaaaaaaaaaaaaaaaaaaaaaagggggaataaaaaaaaaaaaaggggggga

SEQ ID NO: 329863 - DNA, 460 bp, Zea mays
  unsure (1)..(460): unsure at all n locations
atcagttatggtgttggctcaactagcccgctcagcccttcattcattttctccctggaacttgccagaagcacacagctaaccgcatcattctatcagcacctggttgttcaaagaagggtaaaaaatccttttgaagatgatcaggttgttggcattacaaactacatcgattttggacttgagttggctgccaaggttgataaagataaagtgagtggggatggcaactcgtttcagttggctgcaagttggcaagctaacaaaaactttctgctgaagggaaagcttggtccttccacgtcctctgtagctctggcattcaaatcatggtggagaccatcctttacatttagtgtaacagctgtgaatgatcattcaaagggcacaacatcgtatggatttggcctccgtgtcgaggaccttanacgagcgagtaaccacgagctgatccaaacta

SEQ ID NO: 329864 - DNA, 278 bp, Zea mays
gtccgcccatgcggcccagaaattagtatcgcaattttttctaccgacaagtatacatttggagcgcctgggtcgtgctctacatgatgctgtccgagaccctacccttttcctgcgccaccgttggggataactttcaggccttgctcccgtataacctgcgcttcctttgccacccctttgctcgcctttttcaccttgtcaacgaccttcttcgccccattctttgcatggacttttggcgcaagctctacgccgagcaagtcctgatgcaccca

SEQ ID NO: 329865 - DNA, 324 bp, Zea mays
  unsure (1)..(324): unsure at all n locations
tagatccaagtccatagactaacatagatcccgttatcaagatgaatacaatcaattcctgacctcgcgcgagtgctagaaaaatcactcgacttctaccgagatcctgattagcaaagcagctactcgacctagcatactagtattcatctcaacaaggaatcctaagttcatgcaactagaggtttcaagcaactcctacacttaagtgcacattacaatcctacaagcattaagtgtagtaaagtagcatataataatacggtgatgcatataaaccagggcttgcctttaatagctggggctgcggngagatcctcgata

SEQ ID NO: 329866 - DNA, 194 bp, Zea mays
gcacgaagctccccggcatcaccggggcgacatacgcatacggagcgatctactgtacctctccctatattatccaaactccagctcatctaattaaacatgggggaccttacaaagaagtggggggattcatacgctgactaacacctttgtacctagaacgatggccaccaccacattgctgaattcattgt

SEQ ID NO: 329867 - DNA, 308 bp, Zea mays
  unsure (1)..(308): unsure at all n locations
cctgcacggaccgggcctgaattgccgggtcgacccacgccgttcggagctaacgtccctaaactaaaaaatgaagtcttgctagctatggcctccgaacaacctgacgacacaaggagacaacaggtcgacgatgacgctcctggacaacgngattgaaactatagcatctgcattggcgacgctggtgccattcccttactattgagtgttctggagacatataatctgcatacccaggaacatgctgtgactgcacttgtgaacctctgtatacacgaagataactagacgagcattatatcatc

SEQ ID NO: 329868 - DNA, 317 bp, Zea mays
  unsure (1)..(317): unsure at all n locations
gtcgcctgacgcgccgggccggaattgccgggtcgacgcatgcgttcggtattcgtcccgccagcacaaaaaagggatttgctagctatgcgtanaacgaatgacgacgcagggcggcaacaggtcgacgacgacgctggtcgccgccgtggacgtagttctggccgtggcggcggcgtcgtccctggccggcgtggcgtccgcggagaatgcgggcgggttcgtggtgacggggcgcgagtactgtgacccctgccgcgccgggttcgagactaacgtgttcaggaacgtggcctgcgcgacagtggaagtggtgt

SEQ ID NO: 329869 - DNA, 118 bp, Zea mays
catatcctatcctctacctctgcatcatctaccggctccgacgtctcgtatccggtccggaccttggcaggcatgggcaacatcaacatcgtatttgacactttagaaaggatcgaca

SEQ ID NO: 329870 - DNA, 254 bp, Zea mays
cggcggcctcctcctcctccctctcttcagcgtcccccctcgctcgcctaatctctcggggcggccttgccggtgccgcagacggccatgggtctgcgaaggtgcccttgtggaaagatccgttgagcccgagcaagtggaaggaagagcactttgttctagcaagcctctcaatgtggggggttattttttatggtggttacaagctttttagtggaaagaaggaagccaagactgaggcgggatcaccacag

SEQ ID NO: 329871 - DNA, 254 bp, Zea mays
gctgttctctacattgagtcattgcgtttagatgtcgacaaggcctggtggaaggattttggcggtgtgatcctgttggcagtgcttatctttatcctgatattcctactactattgtggttgtttcattcgtacattgctgtaacaaatcaatcaacctacgaagttgccagaaggaagcgaatattctacctaaggggagttcctgaaagagtccacccattcagtagaggcatatgcagaaatctctatga

SEQ ID NO: 329872 - DNA, 58 bp, Zea mays
tgaaaagacagttagccatcaagcaggtggtagtggtcaccgaggtagatggtccaaa

SEQ ID NO: 329873 - DNA, 255 bp, Zea mays
tgaaaagacagttggccatcaagcaggtggtagttttcacctaggtattttgtccaaacaagggctgtttgagatttgacccatgcgtttctttaagagcatcgtcgaataaaagatgactgcagtcagattgctttcttttgatacctcatattggcccattgggtgtgatggacatgtaatattcagttatggaacatgctcatttctatgcttagcgtgctgggaattttgcaaaaggtctcatatatcatt

SEQ ID NO: 329874 - DNA, 59 bp, Zea mays
cggactcgtgtgacgtcaccgtctacatcgcgggctccaaagtgaggttggagtgctag

SEQ ID NO: 329875 - DNA, 331 bp, Zea mays
ccgatctcgatggcgaaccctcgcgtcttcttcgacatgaccgtcggcggcgccccggcgggccggatcgtgatggagctgtacgccaacgaggtgcccaagaccgcggagaacttccgcgcgctgtgcacgggcgagaagggcgtgggcaagtccgggaagccgctccactacaagggctccaccttccaccgcgtcatccccgagttcatgtgccagggcggcgacttcacccgcggctacggcaccggcggcgagtccatctacggcgagaagttccccgactgagaagttcgtgcgcaagcacaccgtccccggtgtgctctgcatg

SEQ ID NO: 329876 - DNA, 239 bp, Zea mays
atcccgcagccgccgtccaacgccaactcggatgccatggcgtcgttcaagcaggcccaggctctagctgctggacccttggtgcaagcccgaaactttgcagtcatgactggcgcaaatgcaggcatatcttgtgtcatgagaaggctacgatggcaagaggacattcagggcagcatgacagctgcttttggtgctggtgctcttttctccatagtgagcggaatgggaactcctaa

SEQ ID NO: 329877 - DNA, 136 bp, Zea mays
aagagtgccagttctactaccacggtggcgccgtaaccatccgatgaggcacgtgggggtgcaagtacatgctcgggggcatggaccggcaccggcacggcctgttcgacgacgatgggaagtagatgcacggaga

SEQ ID NO: 329878 - DNA, 255 bp, Zea mays
cggacgcgtggggcctcggctacggcggcaacaagaagctcgacggacgtcactcccagggccagcttatgcagatgaccatgatggttccaccttcgttaccgtgagaacactctctgaacaaggaggacagactggttcgctattgctggctggttgtgaagcacagagacgcggtgtatggactggagttctgctatgaggatggcggtaggaacgagctgagcggttttagccttgcttgtagaaaggatg

SEQ ID NO: 329879 - DNA, 149 bp, Zea mays
cccacgcgtgcgcgaagctccagtggagccggcccgggtcctgccttctcgtcgcctgggggttcctggcgttcgtcgtcgtgattgtcgtttgacgtctacagttcgacgaccacttgcacaagcggaaggagctcgtcgaggcgtct

SEQ ID NO: 329880 - DNA, 151 bp, Zea mays
  unsure (1)..(151): unsure at all n locations
gcgtaagggaaaacaaagcctgacgcggaggacagcacggctaagccatagaccagccgggggaacgaagagnagaagcagatcggagcacgcagcaacggcgatgtatagcgtgctgataagctggtgagaactacggtaccacggatca

SEQ ID NO: 329881 - DNA, 109 bp, Zea mays
ctgggtatcattttagtgcatgatgttttagtatagaaaccatgatagtgagattgacaagaggtatctgcttaaaaaaaaagaaagaaaagaaaaaaaaaatagaaaa

SEQ ID NO: 329882 - DNA, 128 bp, Zea mays
actacgagttgatctaggtggcgtctcccagtgagcttgatggcgctaaggaataatattagttcgttttgttgttatcatttatttatgtaagacttccgctttgtataatgatacttgtgatattt

SEQ ID NO: 329883 - DNA, 285 bp, Zea mays
agcgcgacgaacgtaaaatgtttctgcggagcatcctgaccgttgccgtcattctatcttcccgaagggcgtgtcacgcctgtaataagactacagctatcctggatcttgacgtggatcataacgcgcgatatgtttttaacaggctctacaaactctcgctcaaagagatcaaggccgtcccctaatacgagggtttctcgatggcctgcttatcacttcaccctttacacgtttccacatctgccttgatgaggaggactggaatcgcatccttgacctaat

SEQ ID NO: 329884 - DNA, 382 bp, Zea mays
ggaattgccggggcgacccacgcgtcccgagggctataattgttatgatcttatttcagatctgtttattatgcctgttcagggggatggtgagcctcgtacaaactgtaacaacggtcattacactgatttagagacattcgaacaatcaaaatgatctgcattgtatttacacaaccaccttcggatggagaaacgcgggctctcatcactatgcataccgaacatccaaaggctgatccacacttaatcaactccataactggcagaaagaggtggactggttgcacttcgaacaccaaatgatgctcaaatgcatgtactagctaatatcggagacggagaactacctgcagctcataactaaaatgattgaatggga

SEQ ID NO: 329885 - DNA, 462 bp, Zea mays
agctgctggagaggctcaaggaggagacggggctgcacgacttcatcatgtgctcgcgcaggcccatcaacgggaagctcctgccgctccgtctgcagctgccgcccaacaacgccgtcgtgcatatcgtgcttgtgcaggagtcatcaaatgtggcaaaaacttttgcttgaccagttgaccatcccgttcacaaaatcatctgattgaagatggtggaagcaacagcttgtgtatcaaatgcagaattgttcaacaattgtgtatgtattaactttttgatcaaaccgggtccagtgtggcggctaacacaagcagggtccttctgcctctagttgttctcattcatcatctcgtacttgctttgtctgtagatatgtgccatctaattctcaagattcatagggatctgtatagataataaggaacctttgaatattctgggttggtgatcttttttca

SEQ ID NO: 329886 - DNA, 123 bp, Zea mays
  unsure (1)..(123): unsure at all n locations
gacccacgcatacttttttttttttccttcttgacaattaagccatctatgacatctgnnacncnacccggccgcgtttatatcataacctacaccaaccttaacaggcttgtgtcccacgtc

SEQ ID NO: 329887 - DNA, 488 bp, Zea mays
  unsure (1)..(488): unsure at all n locations
gggattcccgggacgccccacgcgtacaagcaaccaanattgccgctcgtcaagccaataggatattggggccaataattacgtgcggctgggacttcttcgaagcaatgtactctggcggaagcatgatggaaggttttcttcggggcactggcaccttgtttggaacttatgtgggtggtttccatggtgaggagcggtttgggaagctagggtatcttgcaggaagccatgtcggaagctggggtggaggaagaattggattgatgatttatgatgtcataagcggactgaaatatatgttcatgtctgtccaacctaagtatgaatcatcgtcatatgcatcagaagatggtccagaatacgcaaaaagatatacaaaccaagaggagccaacatactatgaaccatcaaaggaaaagcaagaagaatcaaaatggtttcggttgttctaaatatatgaaccgaagtgtcccgcttaaactcaa

SEQ ID NO: 329888 - DNA, 331 bp, Zea mays
  unsure (1)..(331): unsure at all n locations
aaaaaaaaaaaaaaaaaaaaagaaaaaaaaaaaaaaaagaagaaaaaaaaaaaaaacaagggggggggggggggggggtagaggaatttgaggggggggggggggggcaaaaagaaatagggggggagagcgggggtataccacccttnnnccggggggggggctaagggggaaaaaaaaaatgggggggggggggaaaaaggatttgttttggggaagggggggggaaaaaaaaaaatgggggcggggggaaaaaaacccggggggggggaaaaagggggggggaaaaaaataagggggggggaacaagcccggtggtgagggggggaga

SEQ ID NO: 329889 - DNA, 58 bp, Zea mays
gattttgtttgtttagatcggacttgatggctgcacgtaaaggcactattgaggggat

SEQ ID NO: 329890 - DNA, 461 bp, Zea mays
  unsure (1)..(461): unsure at all n locations
taatttacccgaagccgcatgaagagagaggagagcatcgccgccgcgtcgagcatgtggcaaccggtgtctgggtcgcagggcagaggggcgttggtgtccgctggtgccaagggtcatccgcgtgcaagcagctggtcgcacgcgtcctcgaatttccggaggttcttcgccgaagcaccctgcgcgcctgcttcgcggtccgacgtggtcggcctatttgggcacccaattgaccggagaagaacaggtagcccaggaggagccgcacaacgaggagttcgacttgatctaggtggcgtctcctagtcgactttgtggcgccaaggatggactttagttcgctttatatttatcttttattttgcaagacttaagctatgtaataaatacttttatgatattatgacatttatctctatacactctgntatttatgtgttgtcttctttggcgcatat

SEQ ID NO: 329891 - DNA, 76 bp, Zea mays
accggtccgaattcgggtcgacccacgcgttcggtacccttcaccttgttctccgcctcagggtggtatgcagatc

SEQ ID NO: 329892 - DNA, 465 bp, Zea mays
  unsure (1)..(465): unsure at all n locations
cttatcacaacacacctgagcacagcggttatggggataatatggcagcttcattctgacgatgctgggtcattctatgtcatctacgctgccatctaaggccttatgaccatctcactactgtataacattgcacagggtggcttgcttccattcccaataactgcattcttccttataaacacactctcttggacctaccgtcgacgcacgacgccagactacgaggtgagcaacctgatcgatagcgcacgacttcatcaagacagtgaacactagcaacagagtacctgcaatatgcatcttctgcacggacttgatgaactgcatcccgccgattgtgcgccactacgtcgagcacatgggctgcctncgcgagctgatggtgttcgtcactgtgaggcatctgcctgcgacgtctgtgctgcctgaggagcgcttcctcttcgacaggctggaaccttt

SEQ ID NO: 329893 - DNA, 301 bp, Zea mays
ggcctcaagtacaccaacactgtctggaaaactggagtcaaaggtgtggaccgcacaactccttagttacatcatcttttcagtccacacgctgtcatcgagaattcacaaatcgacatatagatttgtgatccaatcacaaagaataacaaggccgggagctagctagtaaaggagcagggatttggtcctttaatttgtccaaatgacgatgctgttgatattttcaccgcttcattgcagtggagacccaaaagatgatgctggggacgttcagcccccagctagagccctatgtcta

SEQ ID NO: 329894 - DNA, 77 bp, Zea mays
ccggtccggattcccggtcgacccagcgtccgcggacgcgtgggcaaagaaaccttatgtattgtccagtcaaggga

SEQ ID NO: 329895 - DNA, 230 bp, Zea mays
  unsure (1)..(230): unsure at all n locations
ggaaactgcacttggtgtttttttctggatcgacttgtattatcaagcggtcttggaagaatgctactagttcatagtgggcacttncagtagctatgcatcctaagtttcaagtagattctgaagtagttgaatccgttggcccttttggtccaccatttcgaagcggatgattttggaatctggaacctttgaatgtttgccaaaattccgtttatgtccttaactta

SEQ ID NO: 329896 - DNA, 187 bp, Zea mays
cggacgcgtggggaaccagcagcctccaataagagccagccagagaaactaataaaactgtcggcgtcgtcatccgagcgaacagagccaaccgaccccgttcccaaggcaatccgtcgtcgacgtaccaccaccaccgcaagagcgagatggatatgaaaaggatcctcttcggcgtactcgtcgt

SEQ ID NO: 329897 - DNA, 127 bp, Zea mays
tcagcagctagcgatggctggaaccccggccacctgctcatcgggcctgccggttgcctcgggggccttggcccgccggccggggtttcgagccggggaacccccgccgttgccgacaatttcatta

SEQ ID NO: 329898 - DNA, 250 bp, Zea mays
tgtacacatgtgagaactgggtacagaatgtacggatctggcaggccatcgatcgcgaggtctggatagcactgagcgaggatgcaacttgataaggtaatgggctcaagtacgtcgtacttggtgattgagtcgatctcaatactcatcaccgttactctgatagcctttgccaatgcctacatagcagacttggacatggcaacgctgtacgctgacacacttgcacatactatgtgaccatagcctt

SEQ ID NO: 329899 - DNA, 104 bp, Zea mays
attatatatagataaggaaatattttccttaaaaatggagtacaagggattgttgagaactgcttttgttcatgatattaatatatatgatgaatatttcttgc

SEQ ID NO: 329900 - DNA, 211 bp, Zea mays
ctctcggcctcatcaggcccgctgccctccaccttcgcctccgcctccgtctccggcgggcccctccgctggatcgagtagaagaatcgagcgccgctactggcgaggggctagcggtcggcgcacagcgcggtatggcgagcggcagcagcaacggggagccaagcacggcaccgcatgcgaaccggtggtacgacctccggctgggctc

SEQ ID NO: 329901 - DNA, 158 bp, Zea mays
gagaggatcagaacgatctgcacggacatctgtcaagcccgagacactgacatcgatgagctctccaccgcgatgatcaggtacaactgccacttcattaagcacaactacgcaatgctcttaagcgccaggtacatccggcttcaacaccacaacat

SEQ ID NO: 329902 - DNA, 242 bp, Zea mays
caaagtgcatgatgggaatgcgactggccgtggatccgtccgccgccggggcataaccgcggggccatagccaaggccgcgctcgctgatgccctggtcggggccacgcgaccaagcgctcgagttgcgccatggctgttgcgcgcccgcgcgttcgccggggtccacgccagggccaccgcgcctggatggacgggccaccgatgggaggtcgcgccgggatctgcgggctcgatcgcgcg

SEQ ID NO: 329903 - DNA, 102 bp, Zea mays
ctcgttctgatcgcgacgagtcgggctatgatccttccgtcatcttggcataaccgggggggcattatcaaagtggggctcgcttattccctcctcggggcc

SEQ ID NO: 329904 - DNA, 219 bp, Zea mays
gcatccacacaggatgggtgctatcgtaaaaccacatgacagtgaaggcaaaccagagccgcaacatgccgggcaaggtcaggcatcaagcaacccatctcaagggggcggctatcctgcacaaccgcattactaccatggcaggattcaaccttactttcaaccccaacaaccatacgggggttcaatccttcaacgggccatgccttaccaacaaca

SEQ ID NO: 329905 - DNA, 105 bp, Zea mays
attagggaaaagatcaattcaatgacagccggtgattactttgagaagtacccgggacttaagaagaactttgttgattaaatacgtaacgattactggggatat

SEQ ID NO: 329906 - DNA, 163 bp, Zea mays
gcttgagctgaggggggagggaaggagctgattgcttttgctgaagaataatggtgtagtcagctggggtgaggcgatgtgcgttgtcagataaagcttagtcttgttgactctactaatctgatatcaattggtaaccaattggttaaaaaaaaaataaaaa

SEQ ID NO: 329907 - DNA, 101 bp, Zea mays
gagtttgcctgcttctggtgttctttatgggtatcgcattaatggtcctcaagggtggcaacaaggtcatagatttgatgacaccgtaatctttttgaacc

SEQ ID NO: 329908 - DNA, 248 bp, Zea mays
cggacgcgtggggaaaattacttaagttatagtattaattgtcagtaaaaaaatatttattttcaaatagttaaaatggagatataaataaattgaacaattttgcatagataaaattttatgaagtgtttgttatttacgtgcatttggaatgttttttgatttctcattattgattttagatattgaaaattcacataactaatataataattattagtctaaaaataaatattttacttataaat

SEQ ID NO: 329909 - DNA, 212 bp, Zea mays
cgagagagagagagagagagagaggtagacggagatggagtgcctgcttgggctgctcaaggtgctggtggtgcgaggagtgaacctggccatttggaaccggttaacccacagcagcgacccctacgtcttcttcggccacggaaagcataaagggaattcaagtttaaaataccgtacgatcaacccaaattggaacaaggagttaacct

SEQ ID NO: 329910 - DNA, 205 bp, Zea mays
acggagatcaccctgagcgatggcacccgcgtgccctacggcctgctggtctggtccacgggcgtcggcccgtcggagtgtcgtcaggtccctgcaccttcccaagtccccagcctggagggtcggcgtggacgagtggttccgcgtgcccacggggccggacgtgttcgcgctgggcaactgcccgggtttcctgaagggaacc

SEQ ID NO: 329911 - DNA, 334 bp, Zea mays
cagtccgacgtgccggaggtggtggaggccgtcacgcagaagaagctggaactcatggacgagttcatccgcgacaggcacgcggcggactcgcagcataggctcttgccgccggatccggagccgatggcaagcccagagccaggccccgtcgaagaggacaacgacgacatgaacgcgaccaaggcccttccagcgcccgaggagcctgcggcggctgccgcgcaagaggaaagcacagtcgggaaagccgagccagatgcctccctcatcgtggacgacgacccggtcgaggaggaggccgacttcctgaacctcagcgctgacgccatgt

SEQ ID NO: 329912 - DNA, 416 bp, Zea mays
atgttaaatcgttccataaccattttgatagtaatgcttcttctttttgcgaaagaatatagtttgggatatgacgggtctataatgatattatattactctattgatcttttcaaagcaagcatgttcttccattctgaatgttaatcgtgctcatccatttgtattgttggaccatcgtaagtatgtttttccacaaggaaccttttacggtgtttagagtctgattattgtccttataatgcctttcttaataagctgtaccaatggcgcgtctcacattttgtagaactcgtggaaattctcatggagcaaagctctatttgggatctgatgtcgatgactaccaaccccctttatccttggctttacatactttagtccatactattttctaaaacattttactatttgcg

SEQ ID NO: 329913 - DNA, 201 bp, Zea mays
cacgaccggaacgcccggagcgacccacgcgtacgctgacaaaacggcacaaacccaagccgaaacaaagaccaagagccaaggaccgggaaaatacgacaggaaaacaggggcagcacccgagaacgaaaccctcaccggaacaggccaaaccgaagaagcacgaacaccgaaaacaagaaccacagcagaagaaaacaa

SEQ ID NO: 329914 - DNA, 288 bp, Zea mays
gagagacgcacatctatctgtcaagcgacgccatggcctcgatcagagtcgaaggctaacacctggatggcggcggctgcctgaacggcatgatggaaggcatacttcaagatcatcctcacctccgaccccaagctgccttccatagtgttcagcgtgcacgacgcgagcaccctttaccgcggtgctcaatggcgccgcgaaggatgtcaatgactcgacccataccagcgccatgatcaccaacgatggaattgccatcaacccctgacaaagagtacgcaacgt

SEQ ID NO: 329915 - DNA, 303 bp, Zea mays
ggcgacgccagaacacgacgagaagacagactgggtgaagatcacgccagagctgatgcatcgacttccagctgcgacgagtcgagtgggggagcaagtcaccaaccacacaaaggaggcgaacatttgctactcagggccgtccaggagcatgagcggacagctgacgcgtgcctgacacttggcctgtgtggccctgacgtcgcctacgacgttcacttctgccgcatggccagagcatggctatccgtccaccacacgggctacggtcacgccgtacgtgggtacgccacatacacggct

SEQ ID NO: 329916 - DNA, 489 bp, Zea mays
tacacagagccatgacgtcggatgcgacgcatacgtacgccaggaagacgactcgagtaaaaaaggagcgggcgaacggtggccggacatcgacgacagctatctgcggtgcgagacgcgagaggcagcatgaggcacgagggacaggcgacgccggcgagcgacacccgaaagacttgagcgtagaggctgacgtgactgcacgagacacgagcggtggctctagtgtctactacagaaactgacaaccaccgaacggcgatggtggcggcaaccgaccgcggcaacatccaaagacgatgatcttctccgatctggcgtatctgggacgtccttcgactaagaccacctacgatctggaggcttcagatgcagtagccgaaccggaggccttagggtcgacatccagagactgcctcctatcgaactgtgtttatgtctaccatgatcatgcgcaatgcctactatttacactatttatgcattcta

SEQ ID NO: 329917 - DNA, 143 bp, Zea mays
taccagaccataacgtcgcatgcgacgcatacgtacgctcggaattcgactcgagtcaatatacacatgtcgatccttaaccgaacatcggcaacatctatctgtgttcctggacgccaaaaatagcaagtggcaccataaac

SEQ ID NO: 329918 - DNA, 362 bp, Zea mays
gacgacgatcccttgggcttgggcaggacgacggagagctgggccctctcggtgtccagcctggcccggatggtgccggcgtcgcagctcctgggcaccgggaccaccttgaggaagcgcgcccaccggccgccgtcggcccggcgctccccggtgaccttcagcctgggcgcgccgtcgggctggcgcccgccggtggccttcagcttcttccgccgggcgctgtacacgaccttcagaaacataaggcgcatgcagccgcgcaggcgacgcgctctctggtgcgacgtgcggtctcgccgtctcggcagtgttgccttacctgacacgtcgacgacgagggtgtccggctgcttcgtgct

SEQ ID NO: 329919 - DNA, 307 bp, Zea mays
cggatgcgacccacgcgtacgcttggagatcgtgacgtagaacctagacaggcactcgcaagctgacagaaccaagctcggttggaccgcgtaaacagcaccagcagcgtacagatccatagcagaaccatacaccagttacctgacagccacactttatactacacaccgatgttgatgaccgggtcaggaaccaggaggtgctggacatctgctgtcgctccatctacatcaggctggacacgtacaacaatctgaacagggacatgacgcagaacgcgttaaggctcgccggcttcaaggagct

SEQ ID NO: 329920 - DNA, 130 bp, Zea mays
gtcagacatacaatctatctcaaatgacactttcattcatatcaccgaattgtctgggagggaaactgtggttcggatcaccggtggcatgaaggtgtaggctgaccgtgacgagtcaacaccttacgct

SEQ ID NO: 329921 - DNA, 275 bp, Zea mays
gcgaggccggctcacacgacggcatccatgggactgcgactgctgcttgcaactgcgattcgatccatgctgggccatacaacctgttatgcatgttatggatccagatacttatttggtcgttagattttttgttgttatttcgttgttagatttttggttttctttgtttggttgtgaatatgtagaatgcaggatctactatgcatatttgtattttgtttttagcattgagctacttaagattttaaaaaataaatatcgaatttgtccta

SEQ ID NO: 329922 - DNA, 392 bp, Zea mays
cgcatgtgcttctgtaattttcgcaagaagcagtcaactgctccctgatatggcgctaggacattgtagtgaaccccgcacatttgtggagctcgacaacctgccagagcgctagatgtttcgttgagaagatagctcctctagtttggctttcctctcgttcagtcactgctttaaaccaaatttgataccactcgttgaagtcaacaactgggatgtggacatgtgaaaccaaaaaaaaaaaaaaataaaaaaaacaaacaaacaaaaaaataaaaataaataataaaaaacaataaaaaaaaaaaatataacaaaattttatattataaaataaaggtaaaaaccctaacaaaaaaaaaaaaggggggccttttaaaaggatccaattt

SEQ ID NO: 329923 - DNA, 188 bp, Zea mays
cccacgcgtccggagataatatgtttgggaggtcttttatatctcttgtatgggatttaaaattcattaacgatgattagagttctttagaaaatgctgtatgtaaatctttagggattactgtgttatcgttatatttatttaacatgatcttttggtaaagacttgtgcatatggaactttggtta

SEQ ID NO: 329924 - DNA, 281 bp, Zea mays
ggtaaatgaatgctcggttacaacgtgctaaatcctttgccaatgctaattctcaacagggagaacatcagtgaccggcatggtattcaggcataggcagtgatgttctccctgttgagaattagcattggtaaatgaatgctcggttacaacgtgctaaatcctttgcatctggccaaatttgtaaataagcactgggtgatgcccatcagtaaacacatgatgctactgctgttaaactaaatgtggcaaatttcataatgctaggtattgttctcggt

SEQ ID NO: 329925 - DNA, 257 bp, Zea mays
gcgacgcgtgcgatcggaggctctgacatcatactggtagccaggctggttctgatatgtgttacagtgtcagtggttatttcacgccggattgtggttcatttgctgaacactgagaggggagcgtacgaaccgatgcactacctcatgagagatgaagataatcacatacttaaggagaagcactacgaggctgtacgtcaggtttaaaaacaagtccatgaaggtaaccagacagttgtggtgcttggcacaca

SEQ ID NO: 329926 - DNA, 297 bp, Zea mays
cgcttacgtacaacaggacacgccaagcattcatcatcacagagcttactgagattatctctggtgcatcagcccttgacggatatgtggatagactatcatcacttgtccctttgtacccatttgcgttcctctcacatgtacgctactattcttccggcggctcacattcaaccctaatcgtttcactaggacttgatacacgtattcttacgcttgattgccgttatgcggacaacgacagttattatgccagagcgctctttgcatattgcaaaaagaatgttctacatctac

SEQ ID NO: 329927 - DNA, 347 bp, Zea mays
ggtcatccaactcaccttataatttagctgtgtctccatctatactggtattatacaagctcatcataatctaaattgataaaacaaactgttgaaagtatctctgcataaaaagaagttttttggcctgcacaacatctctttgctgtggatgcaagatattgacaggaagatctaggaaggaagcaaatctgatagcttctgagacaactgtagttgatatttatggtacttgttctagatattgaaacaagacataaataagtaacatataattcagtaaaatgtattgccattgtggctttgcgtggaacttagtttgagttcttacttcgatgccatcaagg

SEQ ID NO: 329928 - DNA, 235 bp, Zea mays
cttatatttggatgtttttattgttcccaggttactaggatattattagggggctgaagaaacaagacccaaaaaaaccttgaccagttcttattttcaaccgcaaccactctgtacccaaaaaacgcccatggaacctccgattaaaaaatataaaaattggaaactgtactgcatgctgttccaggaaacccaatgaccaaatggacaaacacaaaattgcagaaacaaaaat

SEQ ID NO: 329929 - DNA, 304 bp, Zea mays
ccggaatgacccatgcgacccacgcgtacgcatacaatggaactgcagcgcattactaacatatggaggctcttattgtgccgaggctacgatgaaattatgaggcacttgatgaggcatgaattatttcacaacttaggcgacgttagtgagaaaaggcgacgctgatatatatggtcattgtccttggtttgtccgttcgccagatatcaccattatcatatttattggatgttatataagcttctcggattagcatatgtggtaatattctctttcagatggtatgaggtcctgcgagata

SEQ ID NO: 329930 - DNA, 103 bp, Zea mays
agccgctacagctgcatcagccggcgacgccgattgctaggtccagcactatactatcgggctgcacggttatcgtctttccgataccagctatgctgctgct

SEQ ID NO: 329931 - DNA, 254 bp, Zea mays
acacttatatatatattggtgcttaaagagaatagaagagaagagaagatcgacaagagattggccgtaatggacttctaggagctgcacatactggcctagcagatggtgaagcacgaggagccggagagcgcgagcaagatgcttggctgcatgcttgtagaggaaccggacatccaggcaatgctgcatctcgcctacggcaactgctcacaggtacaccccaagatcagctacgctaaggccaatctgga

SEQ ID NO: 329932 - DNA, 312 bp, Zea mays
tacgctgtacgcacgcagtaccggtcccggaatcgccggatcgactcacgcgtccgaaggccatgacgacgtcctagtcttggctcttccttgctattcaagctactgcgctacgcgccgtcgtcatcgtcgtacaaccgactcgggctgggctcggtgcaccgaccttcgcctcactgcgcccgcatgcacatgcagccggcgaagggcactaaaccacactcggcaacctgtcgcgtagcctgactctgcgtatgctcagccagtactctgcgacttgtggcagacgaggttgcgcccgagctgcacgca

SEQ ID NO: 329933 - DNA, 180 bp, Zea mays
cccacgcgtccgattgacgatcgggaaatgatggacggagagggacaggcggaggcgtctcggtcgccgatacgagcgatccatcgacccatcggcagcggcagcggcagcggagcgggtggtggtctgcactgcactgcagccgcaagcggcggcgcagtgcggaaggagtaggtgcgt

SEQ ID NO: 329934 - DNA, 145 bp, Zea mays
gggtaaaaatgattaaacaaacttttttaatccaggcctttaaacaccaaatacaaagaaattcataagtatttaaaccttttgaaaataaaattgaaaccgttttcataattaaaggggataacatcaacaaatttttcctaaa

SEQ ID NO: 329935 - DNA, 296 bp, Zea mays
ggcgcacgcttgctgactacaacatccagaaggagagcaccctccaccttgtgctccggctcaggggaggcatgcagatctttgtgaaaaccctgaccggcaagactatcaccctcgaggtggagtcctctgacaccattgacaacgtcaaggccaagatccaggacaaggagggcatcccttcagaccagcagcggctcatctttgctgggaagcagcttgaggacgggcgcacgcttgccgactacaacattcagaaggagagcacccttcacttggtgctgcgccttaaggga

SEQ ID NO: 329936 - DNA, 212 bp, Zea mays
aagaagaatagcagccgaccctattgccgccgctggtaatgcccgcgcatggggttctctggctttggtcggctgcttcggttgcatcgtctggagccttgtgatttcacgccggtgcgaactcattgccgcgcctggagagagatgcgattgagggagactgcggatgcttttgtgcgactgaagttgtgcttgcacagtggcgacatgcg

SEQ ID NO: 329937 - DNA, 196 bp, Zea mays
ctaacgactatcattaccctttttttattgaaatatgttgggccgttaagggcctttcaaattattaagtggtgggggtccattttggcacttgggctagggttcatgccttgaaattaatttggttttctacactgctgagatgtgcaagcgttttacccagggggtgcactttacgggtttttttgggttggac

SEQ ID NO: 329938 - DNA, 312 bp, Zea mays
gtcgtactggcctgcgcgtgcctgcgcaggagacgtcgtggccatggatgaaaggcgcgggcacacggcgatcgccgctgacatacagggcatcgtgtcgactctgattgataaaaccatagactcgcaggctgagttgctacgacaattatcagacttcactcaatgccatcatagcatgaaagtgacgctagtgatgctgaccagcagcgagtgaatatagctgccgaggcaatatcgtaccgacctactactctgcatctacagcatctggaacgcgtccaggattcaagggttgatccttctgctatg

SEQ ID NO: 329939 - DNA, 230 bp, Zea mays
tacacgcgtcggttgtaagactgatgtattgttcatacagagagggatgttgcaaattgcgtggcagcgtaagcatactggcatcgtgaggacttggacaggatcaagaagcgagcattgggcaatggagcgtctgatagcactttcgatgatcacgaatggttggtgataccattcgagcgctctgggaagcagacaattcttatacataagggtgacttgcttgtagg

SEQ ID NO: 329940 - DNA, 203 bp, Zea mays
ttggcaactcctcataactgatgcaaggtcaacacaccgtttgactcacaatgtcagtgtcaggctccatgttcccagtggtagcgacctcatggtgactgaagtcacgttcgtgctgcatctaagcgtactctcatcgattcacaccatcatactattgaagattaccatcaggtacttcgactacacgattctacttgcta

SEQ ID NO: 329941 - DNA, 273 bp, Zea mays
acatgcctgtgtatgtgcgatccatgtggtcgccgatgcgggcacatgctgcgatggctgtagcgttggtgatgcgtgattgagcggctcaatggtgcgtgctctacaggagtcttactaagcacgagcatcacaaccagctatagctcggactggctgtacactcatgcgactttgtatgccaagccgacggatgccagtctcgacgttagccgctgctgttgtagcttcaaggtcctgaacaagccctcgttccatagcatgtgctcatgc

SEQ ID NO: 329942 - DNA, 320 bp, Zea mays
ggcttctcctccccctcttaccaagtcctcttcgggttagggttacttagggttttgtggaggggcgatggcggcggctgatgtggagtaccgttgcttcgtcggcgggcttgcctgggccaccagcaacgagtcgctggagaatgccttcgcctcctacggcgagatcctcgactccaaggtcatcaccgaccgggagacggggaggtcttgcggcttcggcttcgttaccttcttcttcgagaacttcatgctcgacgctatcgagaacatgaaccgcaaggagctcgacggccgtaacatcaccgttaaccaggccc

SEQ ID NO: 329943 - DNA, 387 bp, Zea mays
ctggcgctagtcacaagccgatcaagggcaagctcatacgttgccactcccgaaggaacataaccctgcttattccacactgacatgtcacccttgcttatcgcacactctcactagtgcaacaagagctttgtttatatcgatgtgcattccatcataaagggcacagtcgatgatcttggtagcatggaactaggctggtacaccattgtcgctcactaacactgcaggaagcgtctgagcgattatctcagattgcatgtactgactgccatacatacacctggagctgcattaccttggctcacgacaggccctgataacccgtatgcatccctacttaagtttgccgtgctcttgacggaacctctgaggctgaacaaaccc

SEQ ID NO: 329944 - DNA, 75 bp, Zea mays
cagcagggaacatcgtgcatccgagctaattcattaggtcaaaaatgacccgtgcaaggggatttacctcaagcc

SEQ ID NO: 329945 - DNA, 309 bp, Zea mays
caaatcactgtaatggggtttaagagggcatctcaagattccatcaatagatatatccgtgcgttctcattcggctcacgcgcacccaacgtcccttctccctgtcctaggcttccttcgactttgctctttttgacgattttatttcgtcgagcagcacaggcatggattagttagactggatggtcagaacacgaggtgaaaacggtgccttcgtcgcctttagcgcgcgacggcgtttgatggcttacgcttctgcatcatgaccttccaatagtacacgccctttatcgtctcttttaactcgtc

SEQ ID NO: 329946 - DNA, 254 bp, Zea mays
caaccgacaacacacggagaaggggaagggcggcgagggaagggctccgcgtcacgtgcgtactgtagctgctactctatggaacactccatccatcagcgctgacctccgcattgctctagataccatgcagtacatcgagtctgccgccaagatcaaaggccggagaaggaggacgaaagggtagggagtcagctatgggatgctcttcatgctggcgagtggcagatgacgacaaccttggcaggaggaag

SEQ ID NO: 329947 - DNA, 209 bp, Zea mays
gagacacgttcgaagacattgatcggctactctggaggtgccagtgagcaagctatgaggtcagccgccaagaagagctcgagaggcaatggccaccgcacggaaggatcctaagcaggttgataaagtcaacctgaaacccaacgagtctcacaaaggggtagtacggcatgcaagagtctgtgccgacctctgcggatcgcatatcg

SEQ ID NO: 329948 - DNA, 277 bp, Zea mays
gagacacatttgaaaccattgataggccatatataacagtccatatatctatatataatgtcagccgtgacaaaggatctggagtcgattcgcatgttacagaaggacattaagctgcttcttatactcaacgtgaccaccaatgaggctcacacagggagagaacgcgatacaaacactgtgcgaatccttgcggcatgcatatcgtcctgaaactgtgccaacgtctacacaactgaaggcttctccggtcataagttcacaatcttacgacctc

SEQ ID NO: 329949 - DNA, 384 bp, Zea mays
tcgctgtagtactcgatgcaccattcccggatcgacccatgcgtccaggcctacggacggacctcatgggcatagtactcctgtgaagggctctatggtccaacttgactgatgccaaggtaggtcagcgcacggagcctgcctacattgcttcagtaacattctggccgctgcttgtctccctagctttcatcaccttgccgaaaaagtgcgggaatccgttgcgagcctgaatggatcatactaatatcatgtcattacaataacatcaagcaacattctttgagctacgaaggccatttttccacgggtcgtcacagcttcctgtgtacagtatcattcaccgatcatcagcaaacatttggggcgcctggataaactgat

SEQ ID NO: 329950 - DNA, 372 bp, Zea mays
tccacagcaataagcttcatgagataattgctcctgtcaagagatctatgagccaactgactcgataccaagggaggtcagtctggttgctggcctacattgctttttgtaacatccctggccgctgcttgggctccttagcttccatcaaccttccggaaaaggccaaggattccgttccagcttaattgatccatactaatataaggtaataccaataccataatgcacaatcctttgagcttccaaaggcaatttttcccgggtcggcacaagttccggggaccggattaataacggttattaacaaaccttgggggcccctggattaaccggtacctttgaaattggaatggaatttacaccaaatta

SEQ ID NO: 329951 - DNA, 371 bp, Zea mays
gcgggaggttctagccgtttcctcctcctacagtccactcccactccgcagtgggacggcgccgccgccgccgggttctcgatcgggctactcccttcccttcacttcccttccttacccgccgccgcggcacacggtgcacgtggatgggctgcaaggggtccaagcacgcgctgcacgggggctgtggattggcggcgcgagcgccggagccgcagagtcgctcgggccgactggcgccgcggcactccgtggtcgcgctgcggtcgtccacgctcggaacgctcagcctcgaccgcgccgtggcggccgtcgcggcagcgggcctctctttcgacgctgcagcaacaggaggaggaggaggaggagga

SEQ ID NO: 329952 - DNA, 303 bp, Zea mays
cgaataacacaggtcagcgcgacgatggcatccctcgctaataacatcatggtcgggggcgccatccttgctgcgctcggctgcggcgattcgtgcgggccccctaatgtgccacccggccccaacatcatcaccaactacaacggccagtggctcatcgttagggccacctggtactgtcagtccaaccgtgcctgaactcctgacaaccgcttttctatgctggatcaagaacgtgaatctgccaccctacatctttatgactgcatgcggtaacgtgcccatcttcaatgactgctaggg

SEQ ID NO: 329953 - DNA, 432 bp, Zea mays
gctttctctattcgatggaaaacgcatagggtggtggcgcttgcacgccctggcgactgcttgcggcggcggtgtcctgcgcgcccgctccaaccatcctccggggcaacggcgacgtctgctcgcctacgtgcctagacggtgaggcagcgacatcaggacgcccgtgcgcacgcgtgcctgcacggcggctgtgcgccctcacgccggcttgccgaacggcgtggcggtggtgccatcctgcggggcggcgtggtggtcgcatgcctattcgccgggcggcgtggcggtcgtgcccatgagtcggatccacgtggctgcgcgcacgcgctactgagctgcaaggcgatggcgcccgcacgcaactctggcttggtagtggctgccagcccacaacaccagagaggcggtggtctattcctgcttcgtcgt

SEQ ID NO: 329954 - DNA, 398 bp, Zea mays
cccacgcgtccgtgaacaatggcgtcagcagccaccttccttctgatcatcgctgcagccgcatggacatcgctaaccgacgccgctccctcaccgcctccattcgtcccaccgccgccgtgcgcaccgccgcaatcggcggtggcgtttctccgcgcgcgctgtgcaaccacgctgtacgccgtggcctgctacgagtccctcctcccgtacgcgtgcatattccagaccagccacgtcaagctcgcccgcgccgtcggcgacgtcaacgcggcctggctccgctcgatctccaagcgcgtcaaggagctcgtcgcccgcggcgctgctggtggtggcggcacggccggcggtgccaagtcggctgcgctccgcgactgtgccagcacggtctcgtc

SEQ ID NO: 329955 - DNA, 215 bp, Zea mays
catatattcagacatttcatatcggttgcaaacttccattcttagaatctgtcagacgaaaacttctggcaattgagggcgtgccatattgtctacataaagatatgcagcttatcaaggcctttaatcatattaaatctacaaattgccagtctcatatatcaaaacgtattgacatggttgtatatgcttactgaatggccttttggtgccta

SEQ ID NO: 329956 - DNA, 215 bp, Zea mays
cggactcgtggggacctgcatcggcttgccgcgacaaccagaggtcacaggagataattgactgcatccccggacatctgccatgggaggtaaccccggacggcgtccagcatctcgactgaccaataggacgtgccgggaagacgatcctcgatattcgtacacacggttcctcttggaataagactcacatgcgggaccatcattgacaagct

SEQ ID NO: 329957 - DNA, 375 bp, Zea mays
cagaaggggaaaatgaggcatgggtgacaccgcggcggaagtgaccgagccacggcgaccgccggtgggatatcttcggccactcacggctgggttcgcgggatggtgccacgtccgaagttatctctccgtgatcgacccgcttcaccagatcactcaagcacatccagttcaacagtgcctcacatctttatccgcgttctgcagatatttacaatgctttgatgttcagcggtctactgaaccgaccacctatcatgcgcactttctcatgtttcttgttaagaacagggtagcgctccttaataaaatttgtctcccaaacaacattcttcaagtttgttatagggttcatggatcaattatgtatagatt

SEQ ID NO: 329958 - DNA, 262 bp, Zea mays
tcggtcaaagttcctttgtttctttcttgatttgtgcttgcgttgggttcggtgttcgatcggcgcatttgccgcatgggcgtggctgtcaaagttccttagcatctttcttagatatgtgcttgcgatgggttcggtgctccactttctttttatgtgattattaatctcgttttcagatgcatgtacacatgtatgtgcctgcaccatttggtcttgtgaaaacttgatcattgtattccaatctctagtgtagcaacct

SEQ ID NO: 329959 - DNA, 365 bp, Zea mays
ggtgaggaagaaagttagatcccgccattaccgtgagaggggtgagcgcatccgaagtcgctccttggctctaccgatgtttggtggctttgggtgatcgccggagggcctggatcgtgttcgagagtggctgggcgcgggagctctctaggctggagcaattgctcgacggagcaattccgtcgccgcagacccgtctctaaccgtggttgagcttctgcgcgcacagttcacggtacttgatacatgttgggaattaggggggtagcagcacgttcactttcacttttacaattacgctgcccaggcgcatccatgattttaatttgaaacctattgtcaaaggaaagtttggttattttttt

SEQ ID NO: 329960 - DNA, 439 bp, Zea mays
cgcctgctgtatccggtccggaattctccggtgcgacccatgcgtacgctgctctgacggcttgggactgagcggagtgtgtcatacacttatggactgcttgcttagactgccgtgcctctcttattggatcctgtaggcatgacctatatgcctttctacatgaatgcatgctttgatgactatagggcactattctacacaactactgacggcacgtattgtatggaatctgtgctaatcttatgttacatgtactgcatgcaccagatcatactgatcacatttatagacactgcatcactaatattctatacattctatgagaggcgataatcgaacaattagtgtttcatttaataatagcgtttgactgtctctatgttaaatttggactatagactacattctacactcgcaatctttgattaatgcatat

SEQ ID NO: 329961 - DNA, 113 bp, Zea mays
cggacgcgtgggcatataaacaagcgcacactaacaaatatcctttcgccaataaggggcgatagatccttgattgggctcgctacggcaatgcttgctactagtacccgtgg

SEQ ID NO: 329962 - DNA, 78 bp, Zea mays
cggacgcgtggggcagtgggagatcgagctcgggtggcatgaggcggacgcccggcacgcctggattctcaaggacgc

SEQ ID NO: 329963 - DNA, 436 bp, Zea mays
aaagagacaaaacctcgttttttcttgacccatgcttggctaaaaaaagaaaccaagaaacgccatgtctgatccccccggcgagacggaccataaccatcgcgatggaaagcaccggcgatcgcacctccaccacctgaatgtgcaggtccctcccgtcgccagcaacattggctgcttcgccggctgcttccgcccgtccccgacatcatcgtcttcccccgccgcgcacggcaccaactgccacggacacggacacggacacggacaccggcacgcggaccggccggcgttcccgtctctgatccggtcgccgtcggcgtggatcaaagcgaatggccagagcctcgggtctggcaggcacgcgcgccgtcggtcccaggacttccagtacgacgcccttagctacgcgcgtaacttcgacgagggctggagc

SEQ ID NO: 329964 - DNA, 375 bp, Zea mays
ctgtttttatgttaattgtattttgcctgcgatcatgcaatgtattttcttttctgaaatagctttggttattacagaactttttggtagacttaaagggtcctaatttggcctttctaccattactttcatttgaaggcggttcattggagaaacatacccaagttcaagattggtacattaatatatgctcgagtggtgaaagctaatagtatcatgaatcccgagctctcatgcatggatggtacgtcttttagtcttcagctcaatgttcatgctccttacttgatcatgataacttcagaagtatggcttaccaaattttattcgtcttatcatatttatccttattacctgtgctaacctgtgagcttg

SEQ ID NO: 329965 - DNA, 264 bp, Zea mays
cctgctgttccggtccggaattcccgggtcgtcccatctcgtctcgctctgagcgtcttctctcggggcggcatcgttgggatgcatcgtgtttggttcatccgattaattaattgttttttttatttacgtggtttgcgattggttaattgtttgtttgttcgttcgtttcgtggtcgtgtgaattgtctaagggtttgttctgtaatcgtgactcgattctaatattattatgatcccaattttattttatttttgtgattc

SEQ ID NO: 329966 - DNA, 446 bp, Zea mays
  unsure (1)..(446): unsure at all n locations
atccaggacaaggagggcatcccaccggaccagcagcgtttgatcttcgctggcaagcagctggaggatggccgcacccttgcggattacaacatccagaaggagagcaccctccacctggtgctccgtctcaggggtggcatgcagatctttgtgaagacactcactggcaagacaatcacccttgaggtggagtcttcggataccattgacaatgtcaaggccaagatccaggacaaggagggcatcccaccggaccagcagcgcctcatcttcgccggcaagcagctggaggatggccgcaccctggcggactacaacatccagaaggagagcaccctncacctggtgctccgcctcatgggtggcatgcagatttttgtgaagacattgactggcaagaccatcaccttggaggtggagagctctgacaccattgacaatgt

SEQ ID NO: 329967 - DNA, 338 bp, Zea mays
cctatcccgaccccctgccgctccttgtctactccaacgccttcttcacctgccctgcgtacttccgcttcatccacgaggaccttcacccatggcgcgccgttgtgggctttacccgctccatgttctatcgttctcgcgctcattacaacttcctgcttttctgtcatttgtgtcctttcttattattgtgcatttttgttttctttttttttgttttacttttcccattgttgttatttttatattttttttttattttgttgtttttcttttttttttattttatttttatattttttttatgtttttttttttatttgttttctttctttttt

SEQ ID NO: 329968 - DNA, 436 bp, Zea mays
aaaatttgcgtttctgttgggtacacagtggtgtagaaggagggccagtctcatatctgtctgctcgttccagtaattaagtcaagataaatgccaataaacaagttaagaaaaatgccatcatggaggacatagttgtccaagagttacttgatgatttctaggacactccttgggctagagctagctataaagttaagcttgatgattttgattctgattttgagtctgccctactaaaacaagaatcatgacctacatttcatttaattcctgcatgcagacccatgatgttgtattaactattccagtgtgcaattcatcatgtttcttatatctccattctactgctttaatgatatgtctagcatgtgtaatattcctaatcatggttcatctcgaatcgattgcatacaaaatgattatgtacgtatga

SEQ ID NO: 329969 - DNA, 85 bp, Zea mays
cggactcgtggggggaaataccttctaagtgtttatttttattttttacttatttcacgtcaatcaatggaaaattatgcttccg

SEQ ID NO: 329970 - DNA, 380 bp, Zea mays
cccacgcgtccgtgaagttccggaatgcagtggctaaggactactacttccagatgtactatgatgatctcccactgtggggcttcatcggtaaagttgagaagggcggcaaggatgatccgagcgagtggaaatactatctgtacaggcacatcatcttcgacatcctatacaacaacgaccgggtgatcgaaatcaatgtgcacactgatcagagtgcattggttgacctgacagatgataaggagaccaatgtggaattcctgtactcagccaagtggaaggagacaccaacaccattcgagaagaggatggagaagtacttcagctccttcaacatgccacaccacctggaggttcattggttctcaattattaac

SEQ ID NO: 329971 - DNA, 315 bp, Zea mays
  unsure (1)..(315): unsure at all n locations
cggactcccgggactactgcaaggctgcattgatctggccttggacccattggcccaagacttggtttattgcacaagcctaaccccggacttgttctnttacaggacatggggtacagcgctcggtattgctcactcttgttacctagctgcagcaactggaggccgtcgcttttacaaggagctgcagaagaagtggcacaaactggtataccatctggacctctgcttgagacaccagcgctggatcgatgcataccaaccaacttcaggagcttgcattatacgagctgctttaatctgccgtcctattac

SEQ ID NO: 329972 - DNA, 233 bp, Zea mays
  unsure (1)..(233): unsure at all n locations
ccaacancagcacagacagcaacacagaagacagggaacccacagaagaagggggaggcccacaagagaagacacggcaagcaaccaagaaaacaaaaaccacgacccccaaagagcaggacaagcacactcccgggaaccaagcaccaacataaggagaacaacccaagcaacaacaggagccaccactgcaacgccaaccccacagaccaacaggacaacaagaccaacca

SEQ ID NO: 329973 - DNA, 125 bp, Zea mays
atgcctcaaaaaaaaaaaaaatctaaaaccaaagcgcgaaaataaaaataaagggaggagaacacaatagatctatatccacaacgtatgctaaccagcgatttgcatgacgctagctccagatg

SEQ ID NO: 329974 - DNA, 375 bp, Zea mays
cggacgcgtgggcggacgcgtgagtctagaagctactgacagccactaatctgctcaagcgctgagagatgtgtccgtgagagcttaatgaatcgcattgcatggaaacatggacatagcctccgctctagatccgctggctcctactgcggacgaccatacccacggctgcgatatacctcagcaccgtagatgaggaggacaaggaggaggcagaggcgctgcctttgcccggacccggtggccgtggcgccgtgtgcctggagctgtggcacgcgtgcgcgggccccgtcccgccgcttgcgcggaaaggcagcgccgtcgtgtacctgccgcaaggccaactcgagcacatcggcggcgacgcggcgcgag

SEQ ID NO: 329975 - DNA, 427 bp, Zea mays
cccacgcgtccgcgggacgctggctccggcgggagcaccggcacctttgctccaaccctgcgacgttgtggacccgccgctgcctccagttaaagctgtgatcaccgccgacgcgccggcgccagaggcggctgacaatacctcctcggcgtccagctccaacgcggggaatggcctcttgtgggctgccatcgttgccctcttgtccctgagctttctgcgctgatccttcctcgatgatggcttccattgtactcccgcatgtccccctcccccctacatcctcgaatgtgctgtaacataatgttccttaaatagatataacctgtcattaacctgcacataaatacaggtcagaaaaagtttaccctgcaccaaaaaaaaaaattaaaaataaatttttattaaatttataatttttaataat

SEQ ID NO: 329976 - DNA, 381 bp, Zea mays
gaaaaactttccacttgctcaaaaaaaaaaaaaaaaaaataaaaaggacaaaaaaactggggagaaacaagcaaaaaaacacatgcatgctcacaataatagggggtcgtgtagcgttacttaacgttgtttctctgaccgtccttgtacggggtcctaactggaaataccctgccggttcctttctaagtggcgttgttgaacatcgtggtgtctccaaatgccatggtcttgcagaggttagcccctttggaccttatcatcatttgcacagtgtgcatggcgattgggacgccccctgggacggccctttgaacgtgtagggggtcctgcctttgaacagggttttcgcttcggttggcaaagctgttgcgcccggtg

SEQ ID NO: 329977 - DNA, 301 bp, Zea mays
tggcttctcctccccctccgggtcgggttcgggttcgcgaggttctccggggttcggttgcgcgggtgagcggatcgagatggcggcgtctgatgttgagtaccgctgcttcgtcggcggcctcgcctgggccacggacgaccactccctgcacaacgccttcagcacctacggcgaggtcctcgagtccaagatcattctcgatcgggagacgcacaggtcccgcggcttcggcttcgtcaccttcttcacggaggaagcgatgccgaacgccatcgagggcatgaaccgcaaggagctg

SEQ ID NO: 329978 - DNA, 194 bp, Zea mays
cgcgtccggcgcttatatggggactaacgcccatggatgaactaagctgcataactgcgacatatgtatgggtctaaggcacaccacatggggcacattgactaaaatatacgtcttactgtttgaaacataaggaggaagagaagagaagactaggctgtgtgcaaccaaagggctgctaacggctagggcac

SEQ ID NO: 329979 - DNA, 317 bp, Zea mays
ggaattgccgggtcgaacgacgcctgcgtcattgcgcaactgcgaaactaagaggatcactggctacttccttgtgatactctcggggatattggtaaaaagagcggtctagtttcatataccatgatccatgatggtgctatcttatgagaccatgtgcacattccatgacatctagtttcgatgaagacttgatagattacaagggatgtgaatgatggtcagtcaaatgagccaaagaagcttctgtctggtacaatgggttactgatcggcagtcaattgttgtagatgactttaatggttagtaccgatctg

SEQ ID NO: 329980 - DNA, 186 bp, Zea mays
ccggtccggaatgcccgggtcgacgcacgcgtcagcggacgcgtgggctgctgatccgcctgtcatccccctacttgttccaagatgcaatcatgcggggcccaaactcctcgggccctcggccgacatgattgcctcacacgctatcaagagtcgcctccacctacttccaagaggaagaggccg

SEQ ID NO: 329981 - DNA, 373 bp, Zea mays
  unsure (1)..(373): unsure at all n locations
cccacgcgtccgcaagaagtttgctcaccaggatgagtatgattcctcgattggcgtcgctgaaggggcaccaccagagctcacgtccccaaatccagcccaatgaacctctgtttctgttttctctttggcgccttaatcattttctgttggacagtgctggatcgttgatcggggtactgttagatgacactggtggtttatgttgacttttcctccccaataatcttggatcgagcgatgtgataaagctggccatgcacttcttccagattctgtattcggtatggntaaaatgggctccctttcataacctctgaagaagagttttagcaccgtccatattcgtcatgagttctgtactatgctttct

SEQ ID NO: 329982 - DNA, 238 bp, Zea mays
cggacgcgtgggcggacgcgtgggcggacgcgtgggcacaacgaaaacacaaacgcacacaagcacacgaggcaagggtgacgactgacgagagggggagagagagaggcgaggaaggagggagagagcacgggggcttgatcgaagatggatgccggagcaaaggtggtgaagaaggccgcggctgtgcgtcgcggcgggggctggcccaagaagaagccggtctctcgctccgtga

SEQ ID NO: 329983 - DNA, 288 bp, Zea mays
cgggtcgacccacgcgtgcgtccacgcgttcgcccacgcgtgcggcctttctctcgtcgacgatctcaggcgctcgcggggagtcgagtcgagaccagcttggttccgtcataaaaagctcacttagttgttgtccccgcctctttttttcgctgttcttgtttgattacatcatcttattttgtgcttgaatctaacctgccattaagtttttatcgcttcgttatttctctggtgtgcttgtctagttcctttgttgctctaaccatggacgcaggctcccgctcg

SEQ ID NO: 329984 - DNA, 187 bp, Zea mays
accggtctcggaattcccggatcgacccactcgtccgtccacacctactctctctcattttttaatttcccattcattatcactacctgggaccattgtaacatgttcccggatattgcactcctataccaccaatcatccttcctactcagcaatttcccattatcccttaatctcttatactccc

SEQ ID NO: 329985 - DNA, 210 bp, Zea mays
ccggtccggaattcccgggtcgacgcactcgtccgtccacacctgctctctctcatttgtgagttttccactctctatcactacttctgaccggggtctcattctctggaatttcggacacctatctcacttctcatcttccctactacgtgatatcacaatttccctaaaactcctatcatcccttactactctctcctttatatcaca

SEQ ID NO: 329986 - DNA, 334 bp, Zea mays
ctcactcgtgcgctcacacgtacctggattcaccaatctgtatcaccttttcggaccgggggagattctccgtggattaggcataactatctgaccacacatctccctttataagggctattagaatgaccctaacagaaagatcaactacgactccagcatgctttagatcaaacaaatcctgatgcacgtaaagaacttaatcttgtaagtaaaattcaactcataacgatctcactactactcagctcctactgcataatgagtgctacgcaatttgatactcacttaccttgattgaggacgcatatgcattacacaaaccccccttttt

SEQ ID NO: 329987 - DNA, 238 bp, Zea mays
attcccaactcgacgccacccttcctcctacacgaattattcactacattttgttttccacaatttatatatcttattatatatggctattatttcaaccgcttcaggcaatacaactttatcattaaatccaataatattttgcataccaatcctcacttctaacaactaatgtcatagctaaactttgttccactatcaactatactcatcatacaaaacataacgtaacttctac

SEQ ID NO: 329988 - DNA, 270 bp, Zea mays
aattcctcgggtcgactccacgccgtcgcgcctgaattactagaacatgatcgcgcacggctcgttacgaagcttcgaatcattacggccactcttcggggagttagatcttgtgaaagagtgccagagagctggtaacatcaaaagagctatgcatatctgtgctttaccatagacactcacacgtcgactgacatacgcttagtgctgcaactacaataggtatcacagactgggtgacataaaccgcttacatgtcaagactgagca

SEQ ID NO: 329989 - DNA, 365 bp, Zea mays
accggtttggaattcccgggccgaccgactcttccgcttctctagcttctagtctagtttttgattttgagctagcgtccatgatgttgtgaataggtaaattctcaacggaaaccggatacaaggtcaccgtgcacgaccaggttgctcagaacctcatgaagtttgtgtcggatcaggattgcccgcacctgttgttctattggccttctttttccggtaagaaaaccctaatcctagcgctcatcaatcagatgttcttctccttctctgagaacgttaatctgtataacaagacatggataatcgatacttgaacaaggacatttgagatataattggcttaaaatttttttttttttttt

SEQ ID NO: 329990 - DNA, 255 bp, Zea mays
attcccggctcgacggcacgcgtccggatattataaaggtcaccttgatatggttttctgcatcgcactatgctctggagaacagggttatctctcatgtgggctggatcgtaccattctcttatgggaccatccttctgaaaaaccgcatttcttactgctcgctcaaaggacgcctacagtttcttactacgcccattgcattctatttgctctctcctatggatgccgtatacacatgtatgatattcccaa

SEQ ID NO: 329991 - DNA, 321 bp, Zea mays
aattcgtggctcgacccactcgtccggatattataaacgtcaccttgatattgatttctgcatctcactatcctctggggtatatgtttttttctaatgggggctggaccttccaatactttaatgggaccatcgggcttaataacctctatgcttactgttcgctcataggatgcctacattttcatactactcccattgcatgatatttgctgtcgcctattgtttcctgatacacatttttgatattccttaaattcttaatttgtccatttgccaccttctctgtcatctctgattatttgtaatcccatgttttac

SEQ ID NO: 329992 - DNA, 444 bp, Zea mays
aatatccggctcgaggcacgcgtgcgctgacgcgtggggcacattatgttctctgtcataattttgcatatggattatatgaacaggattttggaaaatggattactgtgcttgttaattctgtgactggaaaaataattttcgggatactttatgaatgaacacattaaaggagctgtagtcttcaatgtttcaaaaagatctctgatgctatctcatgttaaattgtcagaaacttccacatctaggatcctttttgtccataactttatctctttacacatcttaattgttttgattttcacttattaacatgctatatatttttttttataaaccattactccttttttttctaaatatttttaaatagcttgatctattttgttccccaatatttttttctttttatctatatatttttttgatattttttcaatattt

SEQ ID NO: 329993 - DNA, 67 bp, Zea mays
attgtaatcaggtttctgaaaaaaaaaataaaagaggaaaaaaacaaaaagtaaaatgggacataaa

SEQ ID NO: 329994 - DNA, 173 bp, Zea mays
gccgggtcgaccgactcttacgatcataaacaatatgtcatcatttttgacttttctgtcaagcaaccttctcaggaattggtcaacataactcaggccactggtaaatgtacaatgaacatcttgatcaagccattaaccttttggagcatactaatctttgcagtaccaac

SEQ ID NO: 329995 - DNA, 346 bp, Zea mays
atcataagcaaatgtcggcaagttgggactattctgtcaagcaaccttctcaaagaattggtcagcaaaactcagggaactgggaagtgtacaaggaacagcaggatcaagccagcaaccggggggagcagacgaatctttgcagtaccaactgggtcatggatggctcccaggatgcttggaagcatggctatggctggggtcctgcagctattcagaccgatccatgggacaactgtcaatatagctatcaggttcctgacagccagggctcgtatggacactggactcactggagaagggcgaaaccaaaaaattttgggggaaccctttgggggttaagggg

SEQ ID NO: 329996 - DNA, 110 bp, Zea mays
aaaaaaaaaaaaaaaaaaaaaaaaaaaaaaaaaaaaaaaaaaaaaaaaaaaaaaaaaaaaaaaaaaaaaaaaaaaaaaaaaaaaaaaaaaaaaaaaaaaaaaaaaaaaaa

SEQ ID NO: 329997 - DNA, 210 bp, Zea mays
aaaaaaaaaaaaacacaaaaaaaacaaaaatttaaattaaaaaaaataaaaaaaaaaaaaagggaagggaaaaataaaaaaataggaaggacttaaaaaaaaaaaaaaaaacataaaaaaaataaaggggctgccgttttaaaggacccaattttactttcccttcctttccacttttattctcttttataggtccccctaattcaattt

SEQ ID NO: 329998 - DNA, 311 bp, Zea mays
  unsure (1)..(311): unsure at all n locations
cccacgcgttcggtcgccatggtcgccggcgggttccgcgaagcgacgcctggagcggaccttccacccttcccgcgtgtccgtctcctcgccctcgccctcgccctacccccgcagacgctgcgccctcgcaagccgcttccaggagccggcggccccgcggcggcacgcatggggttccctccagggtcgccttatcggtgccgaggaggcgtcgtgtgccgcttcagctgcaccgggcctnctcccggatgaagcggtagcgtgggagctcttcagcccgctccatcgtgtgcttctcgtcgccaccg

SEQ ID NO: 329999 - DNA, 330 bp, Zea mays
cccacgcgtccgcggacgcgtggggttgttcccatgcttactgcacctaacaaacgacggagatgaagacatggggtttgtgcttaatccagcagagagtgtggacgaatgctggttggagcagtttcttgaacgggacgccattgtggctgcgcgatccacttacactctcattctgacggtgtcatgggagcaggacaatattcctgaatacagattttgtgaaatgatcctcgagagctggcctaatcaaaactcgtatgactctgaagctaataaggaggtgaaactgacagcttatttgtcgacttaacacagacagtcgacaac

SEQ ID NO: 330000 - DNA, 292 bp, Zea mays
aggaaacgcaccatcacttatcatttggctttcatgatcttgataatgtagctggtggggtgtctgagtctgggtctggtggtcaaacacaatcatctttgctatgtgtgtcatcataccaacatatctatgatggaaacagtggtccaagtctgcatgtgcacaatggttttcacaactgtccaagccattagtccttcatccttcttaatttctcatagaagtggacatttcatggtatcatatggaaggcctttgaataggttggctgatgaatctctttctgttcatg

SEQ ID NO: 330001 - DNA, 246 bp, Zea mays
gcgcagacgcgctatgttgccatgaactttgctatgttgaaatgaacgcttgcatgggatgagtgatagctgctagaggggctgaccacacacaaactatatctgcttaatcgttaaacatgcgcgcactgtctaataggagcccagcttatctacgcctgcatgctaacaaatgattccacaacaggtcaacccaaaatcaattcaacggtcttaatttaacaacttcttggactgttaatacca

SEQ ID NO: 330002 - DNA, 73 bp, Zea mays
tatgttcagagtgttatgttgtaatgaacagtgttatgttgtaatgaacgcatgcaagccatgagtgatagct

SEQ ID NO: 330003 - DNA, 107 bp, Zea mays
tatgttcagagtgttatgttgtaatgaacagtgttatgttgtaatgaacgcatgcaaggcatgagtgatagctaaaaaggagaaagaaaaaaataaaaaaaaaaaca

SEQ ID NO: 330004 - DNA, 92 bp, Zea mays
acataaacaatggcgaaggctgtttctgttctcaatccgtctctttctattccgggttggctgtttcattatggtcgaagggcctatttctc

SEQ ID NO: 330005 - DNA, 87 bp, Zea mays
tatgttcagagtgttatgttgtcatgaactttgttatgttgtaatgaacgcatgcaagggatgagtgactggtcgacggtggtcggg

SEQ ID NO: 330006 - DNA, 79 bp, Zea mays
tatgttcagagtgatattttgtaatgaactttgattatctcgtaatgaactcatatattggatcagttatagctgatat

SEQ ID NO: 330007 - DNA, 425 bp, Zea mays
gtgagaacaagggccacacatggcttaattatgggaaggctgtagaataggagtggtagcttctgtaagatgacgtgaaggctctagaagagatgtatcatcaatgagaacaggctgatgctacttgggcattcacagtccttgggtacatcggcgaacttttatgcggagtcgtaggtagaattgcttcaatagcttggcttgcacatagtggcatatacatggtgattgatccttcactatctcctatcctgaatgatgtcatctttaagttgtattgtgtttggcgtctgacttgcactgcttatttggcattctacagcgtctatgcttcttatttgcaagtttcgctgtcgagaagattcttgcagttaatttagcgtttataacattttacccgttaaaatggggatgctctttaatta

SEQ ID NO: 330008 - DNA, 172 bp, Zea mays
accggtcttgaattccctggtcgacccactcatccgcggactcttgggtcaaaacccttttcccttctcccttctcccctctctgatctagtgcgggaactcctaccaaagctcgcgtcatctacaattccaatccctaatagctgatcatgctatgactactccttctatt

SEQ ID NO: 330009 - DNA, 160 bp, Zea mays
ttgacaacaacggccgcaaatggcggaattatgtgtatgcttcaaaacacgatttattagtccgggtacatctcatatagggtctggacgaaacgtatactcatcgagaacatgcctctgtctcttgtccattcacattcatgcccatcataggcaaact

SEQ ID NO: 330010 - DNA, 450 bp, Zea mays
cagcaatagaatgggtggcggcggctggagcccggcagcgagcggcgggagcagcgtcagcgaggatgactgagacgccgggtagaaagctgtcattgactccatcacgtccgggggattctgctgtttttagtactttggttcatctcaggtcttctatattgtgaggctttgtttattgaattaatctcattggttgctctttttgtcttatactctgtttgttatttctactctttatttttttctgtattaaatctttttatatttttattgagtttttttgttttttttgactttttttgtttctatattttttgtttttatcttttttttgtattgttatttttgtttattattcttttgtttgtaatctatttttttatattatttttccttcttttatatgtttgtggttctttttattttatattctttttcttttttttt

SEQ ID NO: 330011 - DNA, 216 bp, Zea mays
ataaaaggagttattagttctggaagataacgatgaagggtctggaagagatgtattctcaaagagaacaggctgaggctacttgggcattcacagtccttgggttcatctggaaacttctatttggtgtagttgggttaattgtttcaatagctttggttgcacatattgtcatatactagttgattgatccttccctaacttcttttcttgaat

SEQ ID NO: 330012 - DNA, 244 bp, Zea mays
ctgacgcgtgtgctgactcgtgggtcgattgaatatcatcggcttatggatatggagtggacaggttaattgtacaaggttgtctggcctgaagtacccaacagtcaataccaagatgtacttacagtataacaagatggatagacttgaaccttacgactccttttctgatacctttgtttataagctgatcatgttactgtgtttgatacacccatgatgggtacattgagaccatttatgt

SEQ ID NO: 330013 - DNA, 309 bp, Zea mays
atacatttttcagttagaccaaggtctaggtattggctgctaaaacccgttctataaccgtcatcaacttactctgaccaggttcatcaattcaaataagcaagataaaggacacctcaagccactaccaatctgattgattctatatggccatcatgctctttgcttgacttatatgctctagctatgactcacattgcacttgatagggccttattctagtatggtagctttaataatattgaacttagctctactaataatatatcttaggtagctacttatctgtgtgtccctgtctgtaacaca

SEQ ID NO: 330014 - DNA, 127 bp, Zea mays
tccacgcgttctgccacgcgttctggaaaaccatccgtctgaagcccgaaggcggattcttcaacagcggctggagccctgccttaccacaccaatcttctgcaaacccccctctcgtattccttct

SEQ ID NO: 330015 - DNA, 262 bp, Zea mays
cttcacttgtctgccctcgcgtgctcccgggcctctgcatcctgagccagggcttctgcccttagctccgatccggtccgactactaacccacgccgcataagccgcgcgacctgatcgcgcggtggtcgaggataggggaaacgcggcgccgcggttgcctgccaccgaaccgactcaggatatggaagaggagccctgatcccttcgtcccggtgcccttcggaccgatggactccgagcactggatctcgcgcctggcc

SEQ ID NO: 330016 - DNA, 435 bp, Zea mays
cccacgcgtccgcccacgcgtccgcttctcctccccctccggttcgggttcgggttcgtgaggttctccggggttcggtttcgtgggtgagcggatcgagatggcggcgtcggatgttgagtaccgctgcttcgtcggcggcctcgcctgggccacggacgaccactccctccacaacgccttcagcacctacggcgaggtcctcgagtccaagatcatcctcgatcgggagacgcagaggtcccgcggcttcggcttcgtcaccttctccacggaggaggcgatgcggaacgccatcgagggcatgaacggcaaggagctggacggccgcaacatcaccgtcaacgaggcccagtcccgcggcggccgtggaggcggcggcggcggcgggtacggtggtggccgtggaggcggcggctacggcggtggcgggcg

SEQ ID NO: 330017 - DNA, 352 bp, Zea mays
cccacgcgtactaccacgcgttctgccacgcgttctggaaaaccatccgcctgttgcctaacgggggattctccaacaccgtttgcggccctgcctcactacactaatctgctgcgaacccccctctcgtattccttctcgccatcctgccccgagcgcaccgtttataggccgccaggctccggcaccctcgcccgcccgggctcgcctggggtcggaatgccctgcttcccgccgtcgctgctcggagtcggtccacggctgcgctccttcctccgctactacgactcgctccagtccctctccctcgtactcatctacctccatattggttgtgcactgatcgtatcac

SEQ ID NO: 330018 - DNA, 315 bp, Zea mays
actgactcgtgtacggatttgtgtgcagatagagaatgatcgacatgggcttgggtaaccagatatgggagaggcgaaatgatgctgtctcattgaggggtatgaagtttatggactgtttgtagtcaagattgcatatagtgattcacctagttcattacagctgatgcatgtataacaccttaagcatgtactgctaggatttccatccaaccatattagactaatttagcattcacttatgtaaactgctagctactgtcaatggtgttgtttgacttatacatgctttggttatatttgtcaatatataac

SEQ ID NO: 330019 - DNA, 320 bp, Zea mays
aaaaaaaaacataaaaaaaaaaaaaaacaaattaaacaaaaaaaagaaaaaaaaaaaaaaaggggaaacaataaaatgaaaaaagagaaccataaaaaaacaaaaactatataaacaacaaaaaagaatatctggatagcgacaaaaacgatgtcgtaacacggcgtctttatctttttcgtttacgttcgcgacactttttgggttgccacgtcgcgtttatttgtggttgggtttgttgcatactacttgactgtctcatcatgaggaagccactagacttttacaccctgtaaaatgggaaaaccccttggttctcc

SEQ ID NO: 330020 - DNA, 275 bp, Zea mays
ctcaccggctccattcgaccattccatactttccttatcccctcccacttcgacttcctggctggcttcctttcttcgccatggcaaccatgtccctccgctccctcgccatggccatggccgataccgcgctaccgcccgcccacaagctcctacccacagtttcccttccgctcctctcctcgtccacccgcgccgcgccgttcctactgttcgccaggcgccacctgccgatcgcgcccctcgttaccttctgcgacacctgtgaggccaag

SEQ ID NO: 330021 - DNA, 214 bp, Zea mays
tctcaggccactcgcctgggacctcgaatcgatgaccatctggcgctaggaacttacaagcatacttactccttgtacgaacatgttgattacgcagttcaagcttgattacatcataccattctgcgccataatctaacctgccattgataacatatcgatgctgtataacgctgttatacttggaccggacgatagctgctctaaccaatgt

SEQ ID NO: 330022 - DNA, 262 bp, Zea mays
gaatttccgtctcgacccacgcttgctcccactcgtccgtccactcgtccatcctctttcttttttactatctctagctctcactgtggatctggtctataccaactgcgttcggtcataaaaatctcacttatttgttgtcccctcctctttttttctctgttcttgcttgatttcattatcttattttcttctttaatttatcctgtcattaattttttatcatttctatattatcttctattttcttttcttgttctat

SEQ ID NO: 330023 - DNA, 436 bp, Zea mays
  unsure (1)..(436): unsure at all n locations
gtccgtaaggcaccgccgccgcgtctcggctggaccgacaggccggccgatccgtcttctgatcctcctcctgctcctcctcctgcggctgtgcaggtcggcttcggggacgatggcggcgagggcggctgatgagaacagaaggccgggggtggggaggcccgcgccatgcgtccgagacatggggagccggcgcgcgctcacggacatcaagaacctcgtcggggttgcctcgaacccctgcgccgtcgccaagaagcccgtgctgcagaagagcagaagggacgaaaagaagacagcgttgccaagcagccggccaatgacaaggaaattcgtcgccttcttggcgagcaaagggcaacctgaatgtcagccgaccggagctggtccagaacccggagttgatccacggnaggaaccaatcggcgatggcacc

SEQ ID NO: 330024 - DNA, 405 bp, Zea mays
  unsure (1)..(405): unsure at all n locations
tcttatccctgcaacagttgatcagcaacttgaaaatcttcaatcagagaaatctgcccaaagtgaagaagcctcaaaagttccccaggacctcctctacaagagaattgcagaagtcaaagagaaggaaaggcaaaatgccttagaagagattatctactgttgggttacatataggttcatggaaaatgacatatatatgacacctgcattatcaccagggggtggccctgtacgtgacatatccgcgttgcctaatcaagaagacaaattgcgaaacatacactccgcagacgcctttgagatgatacaaaaccatctcaatcttatcatgggagaaaagatagcatcnaccgccgatactgntgttgagatcagcaacttgaatctttggaagctgtatgc

SEQ ID NO: 330025 - DNA, 242 bp, Zea mays
aatttcctgttcgacccacgcgtttctcttatccctgcaacatttgatcaacaattctaatttcttcaatcatagaaatcttcccgaattgagtaaactttaaaaggtccccgggaccttatctactatataatttcataattcaaatttaattatattcaaaattccttataatacattatctacttttcttttacatatatattcatttaaaatgacatatatattatacttatattatc

SEQ ID NO: 330026 - DNA, 292 bp, Zea mays
agatcgcgagcagtgtgttgtgttgtgttgtgtgggtgcagcacggtagcaggctagccatgtgccctgctgtgttgtgtcaccatccatctataataatcttatatctataccccaccttttgtgtaaaaaaaaaaaaaaaaaaaaaaaaaaaaaaaaaaaaaaaaaaaaaaaaaaaaaaaaaaaaaaaaaaaaaaaaaaaaaaaaaaaaaaaaaaaaaaaaaaaaaaagatacaaaaaacagatcaattaaaaaataacaaaataaaaaagaaaacaaaagaccgatatg

SEQ ID NO: 330027 - DNA, 258 bp, Zea mays
tacatcccgagcaatgtattttgatttgatgtttgatttcagcacattaccatcctcaccaggtcccctacaatgtcatagtcgccatccatctataataatcttatatctataccccaccttattattaaaaaaaaaaaaatataacatacattactacaaataaataaaataaactaaatacattaaaaatccaactattacttataaacaaaaatcaattcaccattttccacttcaatgtaaattccaaatcta

SEQ ID NO: 330028 - DNA, 317 bp, Zea mays
cgggtcgacccacgcgtacgagatcgcgagcagtgtgttgtgttgtgttgtttgtgttcagcacggtagcatgctagccaggtgcgctgctaagtttgggcgcatgcatctataataatcttatatctataccccaccttttgtgtaaaaaaaaaaaaaaaaaaaaaaaaaaaaaaaaaataaaataaaaaaaaaataaacaaaaaaaaaatcatacttaaattataataaaaaattatataaatctattatattattatatatataataatcatatttttaataatattaatatattaatatatatcattactaat

SEQ ID NO: 330029 - DNA, 110 bp, Zea mays
aacatgcatctactgaatatacttctacgactcactcaatccttcctcttaccgtctttttcacctcattaaatgcaaatccctcttctttattcaacacatatttacca

SEQ ID NO: 330030 - DNA, 203 bp, Zea mays
agatctcaagcagtgtgttgtgttgtgacttttgtatgcagcactgtaccaatctatccgtgtaccctgctgtgttgtgtggccatccatctataataatcttatatctataccccaccttttgtgtaaaaaaaaaaaaaaaacaaaaaaataaaataatacaaaaaaaaaaataaataatctaaaatgataataataattaa

SEQ ID NO: 330031 - DNA, 212 bp, Zea mays
cccacgcgtccgggttttaaatggagggtttaagtattaaacctttctggttttccatggtgatatatgtgctctgtctaggggaagtgccatggttttggggccatgcaacatctgaaaattgataaatttctcaaatgtacttatttgtattgatcgtgccaattcatgaatgtgtcttgactgtcaacatatttttcatcttcatattt

SEQ ID NO: 330032 - DNA, 429 bp, Zea mays
cccacgcgtccgcccacgcgtgcgctgaaacgcgggtgctagtgagctacccccaatattaggtgtatatgtcaggaaatggtctgatacatactactcacacatttatcacttggtgatacaatacgatctctgagcagcctaatgggctaggagcgactgcatgatagcagaaagctaatcttgatctctgccctataataggcattggcttatgtgacctggaatggctatacttatttgatgcacgcatgccagggtggacaccatctttactatcaattctaccaagcatctgatggtgactgtcttagtatagcttctactgtggacagtttgtgcatctagttgtctgaatctatgaagacctgactgatctatgattgaaacaatgatgctctatgtgaacttagggatattgtgtacgca

SEQ ID NO: 330033 - DNA, 185 bp, Zea mays
cccacgcgttcgtccacgcatgcacttaatttcgtgttgcagttcgctacgcgcaatatgggctggaactgtatgtaaacggtcttgcacatactactcatacatgttctcttgctgttactattcgttctctgagcagcctttgtgccaagagcgactcatgatgcagcattctatcttgtatc

SEQ ID NO: 330034 - DNA, 310 bp, Zea mays
tgcacgtaccgatctctaattccacccacgacgtactcccacgcctcctcccactcttactcttacatttggttacttctcagctaccaacaatattgggtgagattattaggaaatggtctaggtcatacttctcacacaatctcacttgattttacaatactttttcttaacatactactggtctaaatactactctttatacaaaaactacatccttatctttaccataaaataagcatccctttattttaccttgtattgctatacctatctaaagcacatataccattttttacaacatcttcac

SEQ ID NO: 330035 - DNA, 364 bp, Zea mays
ctgcacgtactcgacctcaattccgacccacacgtaactcccacacatcctcccactcttcctcttccttttggtttctagccagctacccccaatattgtgtatatttaaaaggaaatgtgcctatacatacttctcacacattttctcttatcaatacaatacatatctctaacatcctactgatctttatatacgactacatttaatcaaaaatctaatctttgatctctaccctaaaatatgcacccccttattttacctggtcttgctatactctttttatgcactcataccattttaaactccatattttctatcaattcttccaatcatctcatcttcacttttctcaaatacctcc

SEQ ID NO: 330036 - DNA, 91 bp, Zea mays
ccggtccggaattcccgggtcgacccactcatactttagaggctaaccactcttacaactgctttctgatactgtaaacatttaaacacaa

SEQ ID NO: 330037 - DNA, 171 bp, Zea mays
cccacgcgtccgcccacgcgtccgcacgacgcacgcagagccgcagagatccgtcacactggaagttttgaaaactgaactggaagatggcatcagcagagctttcccgtgaggaaaatgtgtacatggcgaaacttggccagcaggcagagaggtaccaggaaatgggtg

SEQ ID NO: 330038 - DNA, 193 bp, Zea mays
attccggcgcacgacgagctcactagtacatcaagctctctagactatcctatactttttacacatacataccacgatctcgggaaggtatagtatatactggggccggttaactagccttatctgtacagcacagagacttggaaaacacacatgcttcaacacataatggtgtggcattcattgattcata

SEQ ID NO: 330039 - DNA, 247 bp, Zea mays
cagacgcgtccgcccacgcgtccgcttcttctcgcactcccagacgggctcgtcctcgcgcggttgtcctgcctatcagggtgtaggggatccgactgagcatcctgcagtcggatgttgactaccggtgcttcgccgatggactcgaatgtgccacggactaccactacattgacacatgactacaccacctacgacaaggccttcgactctactaccatcctagatcacgatacgcatacgtacc

SEQ ID NO: 330040 - DNA, 339 bp, Zea mays
atattataaatgtcaccttgatttggttttctgcatctcactttgctctttagaataagtttttctttcatgtgcgcttgagcgtaccattctcttattggaccatttttcttaaaaaccgcaatgcttacttctcgctcataggaggcctacattttcataccactcccaatgcattttattttctgtctcctatatgttcctcataaatatttttgatatttctaaatttcttatttggcctttttctacccttttttttcttcacttattatttctaaaccccatttctactatttatctgttatttcatccttattctttttacccccaaaactt

SEQ ID NO: 330041 - DNA, 384 bp, Zea mays
cccacgcgtccggccctagtacctgcgcaaggtcccgacgaggcgcccctctatgcatccgccatacatagccgggtggggcagctctcatagactaggctggatgtggagccggacgctgaggtggcttaggatgatgtggcactaagtttggactccacgcacaatgcgtttaaagatgcgatggatgagtgggactcacacactgctgccagatcgattgatgatatggatgcatacctgcaacatctgagaaaggatgtacccatggtacagcattgcaatcataatgcatctgttgagactagtgtcactgcagatacaacactgaatgacatgattcaattggatgttggaatccaaatgcttgaatatgtgattact

SEQ ID NO: 330042 - DNA, 396 bp, Zea mays
cccacgcgtccgcggacgcgtgggcgctattgatagattaacttcagagaatcaggcaatgcgtttggaacttcataacatggaaattgctttacagaaatttcaagatttattcagtagtattgggcatgagggaatgaatagtttttcagcaatttctgaaaatcaggacgtacaggatgtgaataatgaacaacatgaaagggttccaggtacacaatgtggtctagcaaatgagcataccttggtaactgcagttgtcaaagaagccaccacacaaaatgtagatcaccagttggaaactgatccaggcagcatgcaagtacaaagcccagtgcacttcaagtctggtgcaatgccatctccggagctagtagctgcaaattcagaaaaagc

SEQ ID NO: 330043 - DNA, 430 bp, Zea mays
gttggcttctcctccccctccggttcgggttcgggttcgtgaggttctccggggttcgggttcgtgggtgagcggatcgagatggcggcgtcggatgttgagtaccgctgcttcgtcggcggcctcgcctgggccacggacgaccactccctccacaacgccttcagcacctacggcgaggtcctcgagtccaagatcatcctcgatcgggagacgcagaggtcccgcggcttcggcttcgtcaccttctccacggaggaggcgatgcggaacgccatcgagggcatgaacggcaaggagctggacggccgcaacatcaccgtcaacgaggcccagtcccgcggcggccgtggaggctgcggcggcggctgatacggtggtggccgtggaggctgcggctacggcggtggccggcgccgtgatggcggcg

SEQ ID NO: 330044 - DNA, 395 bp, Zea mays
gggctggcttctcctccccctcttaccaagtcctcttcgggttagggttacttagggttttgtggaggggcgatggcggcggctgatgtggagtaccgttgcttcgtcggcgggcttgcctgggccaccagcaacgagtcgctggagaatgccttcgcctcctacggcgagatcctcgactccaaggtcatcaccgaccgggagacggggaggtctcgcggcttcggcttcgttaccttctcctccgagaactccatgctcgacgctatcgagaacatgaacggcaaggagctcgacggccgtaacatcaccgttaaccaggcccagtcccgtggcggtggcggtggcggcggtggctaccgcggcggtcgcggcggccgcggctatggtggcgg

SEQ ID NO: 330045 - DNA, 55 bp, Zea mays
cgtacgcgtgggtcctaccagccttgcttttcccattacttgccttaccaacact

SEQ ID NO: 330046 - DNA, 91 bp, Zea mays
cccacgcgtccgcggacgcgtgggcgaaaaaaaaccctccgacttcgatagcaatccatttcttgaaacgatatagctataagctgcagcc

SEQ ID NO: 330047 - DNA, 367 bp, Zea mays
cccacgcgtccgcggacgcgtggggacacccacgccaagagaccagaggcaacccggtctccgtctcgctcctttcaccatggatcaatcggcagctgcacctccccggcaagacgctgctgcgacgaagaagccgacgacgctcctcgacgcgtacgaggtggagtgcatccgccgggagctgcagcggctcgtcctgaagcacaaccagagcgctgccgccgggggcgacaccgccgcggcagcgcttgcgcacggccaccgccgcagcgacgacagccacctccaccaccagcagcatcgcgcgagcagcggcgcaaagaaggcgacgagcgccaagagagtcagtccgtcgccgtcgtcgctg

SEQ ID NO: 330048 - DNA, 352 bp, Zea mays
cccacgcgtccgcggacgcgtgggccgcggagaacttccgcgcgctgtgcacgggcgagaagggcgtgggcaagtccgggaagccgctccactacaagggctccaccttccaccgcgtcatccccgagttcatgtgccagggcggcgacttcacccgcggcaacggcaccggcggcgagtccatctacggcgagaagttccccgacgagaagttcgtgcgcaagcacaccgcccccggtgtgctctccatggccaacgccgggcccaacaccaacggctcccagttcttcatctgcaccgtcgcgaccccttggctcgacggcaagcacgtcgtcttcgggccaggtcgtcg

SEQ ID NO: 330049 - DNA, 315 bp, Zea mays
taccgtccggattcccgggtcgcccacctcgcggaccgtgggcctgctgcgagcctcaaatgaagttcttgcaaggacgcgtacctaatgtgggggttaccgtcactcatttctgatcgctactgttctgcgcctgcctgtctggggcagtcattggttctctgacgtgcttcttactatttctgtgatcctcttctattttttttttttcattatatagtttcgtttcttatatatgtttttttatttttttttttttttttatatctttatttttttttttatttttttattctttttttctattattttttt

SEQ ID NO: 330050 - DNA, 353 bp, Zea mays
acaaggttcaccgagggctctaccccgacgccgcgccctccaccacccagacggcggcgggccccgaccccaaggctgccggcctgcgccgccgccgccgcgcgctcctccgcctccgcggcaagcgcctccgcgacctctcccgctgggaggccctcgcctccgaacttctcgcgccgcttcccgctcccccgccaccggctccgacatcccaatcccctcccgtcgctgcctcctcctcctcctcctccttggtctctgtcctcgacgagctcctcgcacaggctgacattcaagttgagctgatgaagaaagtgtgccagtggtgcgacgaggccaactctatctgcgac

SEQ ID NO: 330051 - DNA, 61 bp, Zea mays
gacccacgcgtgcgtggacacgtgggatcaaagggaggcattttccatttttgtcaatcac

SEQ ID NO: 330052 - DNA, 227 bp, Zea mays
gattgtagttcacagttgacagtaggttgaaatatagtgcttggtgaaatgtgtgagcgactgttcaagaagtgactttgttattatatataatcaaaacaatttatcatatagttacttataactactaattcctttctaaatatatcttttttatcatgtttttaatcttatttatttactatactattatatattataaattttttatttttactttttattta

SEQ ID NO: 330053 - DNA, 412 bp, Zea mays
aaaggacgtggacctgcggtgcgagtcgtgacaggggaagccgcgcgaccgttcgtccttctgccggacagctcctccgtggcaatgccggaagttgtcctctgactttgcacggtgaaatgagagtgcatggtccgtgcatcgtagctccgaggagaatctgcttgggggaagaagcgctaagctatgattggacccgggcgtggggattgctgcttgattcgccgtcttggcggcaggtcgtcgtgtcgcgcagccccagcccagccagaacgattcgccttctgcagttgcccttccaagtggccgtgtcgtagcttccatttgtttttcccctgtatttttacaagctgtacatattcgagcggccgagttcttccatgctgcctgaattggttttgggcgatctttg

SEQ ID NO: 330054 - DNA, 423 bp, Zea mays
cggacgcgtgggtttttttttttttttttttttttttttttttttttttattttttttttttttttttttttttttttgggttttgggtttttatttatttattttttttatttttatttttatattttttttaattttattataatttagtggaattttttttattttttataaataaaataatgaggtttttaatattatatatttttttttatttttttattttattatatattttatttatttttattgttatataattttttttattgtttttattttttaaatttattttatttgttaaattttattttttttatttatatttatttggatttatattatttttttattttatttttggttttaattttattttattttaatgtattttattttttatattattataatattttttt

SEQ ID NO: 330055 - DNA, 230 bp, Zea mays
aaaaaaaaaaatataagaaaaaaagaaaataaaataaaaataaaaaaaaaagaaaaaaaaaaataaaaaaaaaaaaaaaaaaaaaaaaaaataaagaaaaaaaaaaaaaaaataaaaatataaaataaaaaaaaaaaaaataatataataaaagaataaataaataaaaaaataaaaaaaaaaaaaaaaaaaactaaaaattataaaaagaaaaaaaaaataaaaaaata

SEQ ID NO: 330056 - DNA, 78 bp, Zea mays
aattcccgggtcgactccacgcgtccgccgacgcttgggctgacgcgtggtttgactcgtgggcgagaatatccttgt

SEQ ID NO: 330057 - DNA, 92 bp, Zea mays
cgactcgctccatacttcctcgcacgcctacacgaaccaaccgtttaaacagcatacaagcaaagctaataacttcaggtgcgtctcaccaa

SEQ ID NO: 330058 - DNA, 83 bp, Zea mays
cccacgcgtacgcgaacacgtctgataaaagagcataatagaaagcgaaaaatttcaggtgcgtgtcacctaaattcagttgg

SEQ ID NO: 330059 - DNA, 435 bp, Zea mays
atttactctgtgcctcaccttcgagtgagtacgtggtacttgatcctgttagtggcctggtcggactagatccgagggactgacggtttattcccatttaagtgtggtctagcctctaaggcaggacctaggcacttaagttggaataattcggacggttccgccacagctggtatcggagctcgtaccaccacagaggaatcaataaactataaataccatcctttttcaaagtaaaacttgatagaaacaaatgttggatagatcttaagacgatcaggatatacctaggacgtgaagtcgtatgataatagaagggtagctaggtggctatttgagtaagccctacaagctactataagggatgggagttctttcctaatccctctaaattgaaataagtcgtttaggacgaacatgcatgcattcttactt

SEQ ID NO: 330060 - DNA, 315 bp, Zea mays
acccacacttccgcccacgcgttctcggactcatggggttgtttccatgcttactgcacctaacaaactacagggattaatacattcggtttaggcttaatccatcatatagtgtggactaatgcttgttggagcagtttcttgaactgtactccattgtgtctgttcgatccacttacactctcattctgactgtgttatgttatcatgacaatttttctgtatacatatttttttaaatgatctcttacagctttccttatcaaaactcgtatgactcttaagcttattaggagggtaaactgacaatttatt

SEQ ID NO: 330061 - DNA, 252 bp, Zea mays
aattcccgggcggacccactcattcgatttactctgttccttaccttcgtttgagttcgtggtacttgatcctgttagtggtctgggtagactagatccgagggagggactgtttattcccatttaagtgtggactagcctctaatgcatgacctatgcacttatgttggaataatttctacagttctcttacatctggtattgaatctagtaccatctctttattaatcaatatactatatataccattct

SEQ ID NO: 330062 - DNA, 353 bp, Zea mays
ccgacccgagcgacgcgtccgctcatctaacgactcaactaaaccttaattatatgatgtcaatatcatatcacgactcgggactcaatgccaaagagtaggggaccttgatcgaaagaacgttacctgtgcctgcatcactagctcaaattaaaatggacgcagatagcttggctagagagtatggataccacatagtactactatctcctgcaaacaattctagtttccatcgtcccatgtctcctatgtatactgtttctgattactcaatcgagaacatacaatacatgcatagagagaatgagttacttactgctctattattaacaatggaacaagaaaccaatatt

SEQ ID NO: 330063 - DNA, 254 bp, Zea mays
gtcatctaatgtagcacactaaacaacaccttggagacgtcaagaaaatatcgaaacttgaggctgacttccaaagactacggggcctttaacaaagaccgtacctgaacctgcagcactaactgaaaggatcatgttgctggacatattggttcaagagtattgacaccacaaagctctactaacacctgcaaagaattctactttacatccacccataagttctataacatctgtaactgattacgcaattg

SEQ ID NO: 330064 - DNA, 182 bp, Zea mays
cgagcgacccgtcctgatggtgcaccaactgttactggagcggttactgctgcagatctggaaaaacctactgagcttccagaaccaggagtggggataaactctgcccctgatggaatggtcaaaaaagactggttgtctgatagctgcagttcatagtgatgcatagctcctgtactgtg

SEQ ID NO: 330065 - DNA, 315 bp, Zea mays
cggtccggaattcccggtgcgctcgagaccaacgcgcgcactcacacgtacatctacatgtgggatacttcagagacacaatatgccacaagagcagtggggtcttaataacgagcactggggattcctggctcaaaatcgttagacggaccgccgctatacgaaaacgcacctaagaattactctagctgcagctccactaccgccaattcagcccggtctcctgacaggcagcagactcgtgctacgatgcctgccgatttaacggcgctgtttcgatacacgcagacgccgtccaatgtgctggacctgctg

SEQ ID NO: 330066 - DNA, 178 bp, Zea mays
gaacgcgcgccctttctcgttgtctgactccttgtttacattggaaaagagtcttcgtttcatacgtaacgtcgctatagctggaggtcgggaaaaaaagtaattcttcctcaaagggcagtaaaccccattaaaaggtcactgcgaatccttcttttggggtgttgagttgggggac

SEQ ID NO: 330067 - DNA, 270 bp, Zea mays
ctaatcgacccaggcgttccgaccctactacaagggttgcattgcatcgttaatttaaggaggaccttttttcttaagaggaaggttaatgtgggactgaggtcggtgaaagatatggaaatcgaaccttatgtaacctgttacacaatattgattgattgacttgtcaaagcataatatctaaaagaagcaccaatgatttttttatgaaattttaacaaaaggacttatccctgatgttcacacatacacatcttttatataatgata

SEQ ID NO: 330068 - DNA, 296 bp, Zea mays
gtgttcgaacaagtctgtggcctgcgggcccttttttccgtcgtcctctggggtattttgctacctgggatgcgtgccaatcttttctccgctcctactcggcaggagctgaactgcttttgtgagggaaggctgaccagttttgtgggttttcccccttcactgttggtttcagtaaggtaggatggaaaacatattaaacaaaatcgatctgttgtatcaggatgttacatatataataataaaaaggctaataaagttccatgatttgagatgactcatcaaagaaattaatt

SEQ ID NO: 330069 - DNA, 60 bp, Zea mays
cccacgcgtccgcccacgcgtccgcccactcgtccgcccacgcgtccgcccacgcgtccg

SEQ ID NO: 330070 - DNA, 273 bp, Zea mays
  unsure (1)..(273): unsure at all n locations
tccgaattccagntttttcttttctttttttttttttttttttttttttttttttttttttttttttttttctttatttttttttacggctggttctttttgttttgggctacgtccttttttcaattcaccttccaatatttccaattctcaccactctaaaccccccttctcgtgcaaatccaaggggtgaacacacaacaggaccgtccaacgtaccctcacaagcacaaggcgcacatcgaccaagccaaacccacaaccaccacaccc

SEQ ID NO: 330071 - DNA, 145 bp, Zea mays
accggtccggaattcccgggttgtcccattctttttttctttttttatttttttttattttttttttttatatcatactttaattttttattttggtatgtttttatatgaatcagggctggtctataatccacttcaccttccc

SEQ ID NO: 330072 - DNA, 96 bp, Zea mays
gtcgaactacatgtctgctgggcagatatctgttcctattgtctttaagggtccaaatggtgcttgtgcttgaggttgtgcccaacacttacaatg

SEQ ID NO: 330073 - DNA, 336 bp, Zea mays
gactagctctagatcgctagcatccgctttagattatccaagcgttactactctagcaggccaggttttttcaggtcgagagtggggctttctatcaatcatcaacaccggtcatggattctaactcatccaatcacaggaatgtgccaatgatcttatttgaaaaacatctacgaatttttcacactctataaccttgaagccttaaaccaatttccatcctcatgacatctcatacttcaatattgcttttgtctttcatatttattcccatcttttgtatcttttaattaatacctccaaatattctattacctcatctatttaccattattt

SEQ ID NO: 330074 - DNA, 373 bp, Zea mays
gccagaatggtgcacgctccattaatgcacaccaacggtaacactgatcaataatgctagggcatcccaatagagctgctggatctaattactgactgacgggctgtcaggtcatcataagcatgtggtcggtgcagatagtgatctgccaaattctgactcgtgcccataggctttgattgctgagcttgagaagataaacaatggcacatgatatacaagaaatattgcgcactaccatgttgatattgtcataagggatgattctgttaacatcggaatgaaagctggagaggctgaatgagacgaacaaagttactactactaattggagactacattgtgacagggctatcgcatgacgcggttcgtg

SEQ ID NO: 330075 - DNA, 248 bp, Zea mays
gcgggccaacatctcgcggtggctcgccttgggcaaccggacctgcccgaccacgattcaggagctctaggacgacgccctgaccccaacgccactctacggccactcaatgccggctgggtcttcccgcctggttttgcattttggtttcttaatctgcaatcatggtttttcataatactgcaaggtgggcctgataaataattaaaaggtagttaatcttagatattgtttgaacgtatgggatg

SEQ ID NO: 330076 - DNA, 66 bp, Zea mays
acccacgcgttcgagctagctctagcctcataggccatattttgctcgtaggcttcactgcctcta

SEQ ID NO: 330077 - DNA, 371 bp, Zea mays
ttcctggctcgaccgcacgcatccggtcagactgccgtttgctacatcatcttttgcgaaaagcaacactgatcattcatactaggtcaacggaaaacagttgatgcatggaatcactgactgacagccagacctatcatggggagcacatggtggctgttgataatgatctgccaaattctgactcatcgccattggctctgactgcttagctggagcagttcaacaatggcaaagcatgttcaagaaatattgtgaacaacactgatcagattgacataatggatgatttacttgcgatggcaatgttagctgcattggctgaatcagacggcacaagctataactttgaaatggaaacagattctgac

SEQ ID NO: 330078 - DNA, 418 bp, Zea mays
  unsure (1)..(418): unsure at all n locations
cccacgcgtccgcggacgcgtgggcttggataacaaattatgttttatggttcctcagtttagagatgaatctgtgttatttgatgtgctaggtataaccattgaacctcgtttgccttcaagttgaataaaaacagggttgtcggaggtattttgtagttttgtccagaaatgcaatgtgttttcttgcccaaaggctgtatgtttacggcttacctagtggtgcttgtatctagcgaaatgataatatgatatgacagccttcgaatatcttctgtgctaatgatggaattgcaaaggatctaccatttattttcttcctcagatgttgcttatgtcctacaaagcccatgaaaaaccattgagctaatcttggagattntggctcaatggacagatttgagaagtgaatgggtga

SEQ ID NO: 330079 - DNA, 178 bp, Zea mays
gacagattagctatatagattatcagctgctgccttgcgggggtactctggggaaatggcgatactgcagacgtcaagtataagagacgaaacttctagagtcagggttgccgatagaatactggcaagagtgacaacttagattatggacctaaacttcaaggagcttgacaaaggc

SEQ ID NO: 330080 - DNA, 114 bp, Zea mays
acccacgcgttcgggacgagttcaggatcgcatgcggtcgttttagaggatccatgcttacgtacgcaggcaggctacgtcatagtgcttctagtatgagacctggattcaagt

SEQ ID NO: 330081 - DNA, 70 bp, Zea mays
cccacgcgttcggatagatcgtctattgctatcctgtcatttacaaactgttactcatctgaccatctat

SEQ ID NO: 330082 - DNA, 191 bp, Zea mays
cgcttaggcggacccctgtacggacgcttgactcctgcttcacggttcaggatcaccgttgacagctggagccatggagttcatcgacggcgcttcgaccttgtcccatgatgacgacgactacagttgtcggacgccgactgacgctgtgagccaggtgaggcctacgtagacctgtccgtctgatccgt

SEQ ID NO: 330083 - DNA, 258 bp, Zea mays
ccacgcgttcgtgcatacacgtataatctgataccgagtttacaggcgttgctgttatagccccttgagtggatctcctagagcctggtagggatggttcaagtttatcacgagcttggctctagttttttttttatattcaccttattagagaagattgtgatgtactatatgctgagggaatagctcgctagttgaatcccattgttatatatcctgttttagcacttaagccatgaattgtaaaaatggttgtaa

SEQ ID NO: 330084 - DNA, 159 bp, Zea mays
tggtgtaactggatgataccgtacactctggaaaacttgatacatcagaaaggtaaaacaatgtatttgttgagctacaaataacagagcactcatgtgacacggacaaatataagatatacacattggattatggatggagcgcgggaagacaagaat

SEQ ID NO: 330085 - DNA, 205 bp, Zea mays
ctcaaactaccagtgccgcgcctactctgttctcctctggctaatgctaatggcttgggggggacatgagagctggcctaggagctgtgtcaatcgtggttacgcggccagcattactgcactgatatctgctctgctgtcacgtgcgcatctatactcataatggacgctgaactctgaatatgacgtccgatatcctagaaat

SEQ ID NO: 330086 - DNA, 340 bp, Zea mays
  unsure (1)..(340): unsure at all n locations
cccacgcgtccgcccacgcgtccgaagtgtagtgctaggcgatgaagcaacatctctccacatgattcagctcgtggctgaaggttagataattagagatgacattgtgttgacttctccattcaaatcatgactaatgtaccaccctnctctcatcacangatggccaagctcctagctaattgaaatagataacagaaacaagaaaggagctcagttcgttatagaggcactggagatgaggtttgtaactatcattttccaattcaactgtgctgtactaagaaaggtccgtccttgatgtttcaacccactgattttaagacatctttaacctctt

SEQ ID NO: 330087 - DNA, 367 bp, Zea mays
gctgatcgaccgagatcggacaggcacgccaggcagctcatcaatgggacgagcaggaggaggaagcaagaagaatcctgggagctcgcgatgccgaggtggggggacgcggaggaaggagctgctgctgacgaggctgtcgcggcggcagcggcagtgaggctggccaacaagatccggaagcgccgcgcggtgtcgtcgtcggggggttcggacccggcggccgggaggcggctacggtccaggaggcccgcggtgctgctgccgcggcgccggaccagcgcgggcggggacatgtcggaatcgtcccgtggccggcattgccgcggaggcggtacccgcctcgccgacgggacatggccgtccg

SEQ ID NO: 330088 - DNA, 195 bp, Zea mays
gcttgaatgacatctgctatactatagcgcaagaattgtcaaccttgaggctctcttttgtgaagacactggcgtgctttgcaatgctcgctgactttatgatccagtcttccatgggaaggataccaatgacttgaatgagactagtgatgcacagcaggttcagatctcgaatcagcggcaagacatggacgt

SEQ ID NO: 330089 - DNA, 53 bp, Zea mays
attcccggactaccggtcgacccacgcgttcggcattcctcccatctcccaag

SEQ ID NO: 330090 - DNA, 220 bp, Zea mays
cccacgcgtccgcccacgcgtgctcggactcgtgggtccccaagctttgcattcgtccttctgtccttcctcacccggtcgtatgtctcgactcacccacccacccacagcatcagaaccgagggaattagggagcttcaggcggatccgtaacatccgcgaacggcgggaaccagggagcttcagtcgcctaaaaccggagctcccaatcgatccactg

SEQ ID NO: 330091 - DNA, 335 bp, Zea mays
tccacgcgtccgtctacctttgctgatactcgcgggtcaacatgctatgggttcggcgttctgtcaaatgtgaatcggacaaatgtaccaattaactgagaaaaattacaatatttaagcgaagtacatagttagactcaggcaggtcactttcaaacgcaatcaacgggtacgaactagtttaacttgccataagctacaatttcaattcgatccactgtgaccacttgcatatctctgaatgaacctgatcgctaccaatttcgtcaccggttgcacgagcatctattctgaagacccgctgaatgtgtgcaaaactccccattatatcaaca

SEQ ID NO: 330092 - DNA, 280 bp, Zea mays
cccacgcgtctgcccacgtgtgctttcactttttcgaccacgcgtccgctagcacataagtgggaccattaaacgccttgtgtcacggacatacaatagaccacactccacgtctgagtacgaattgataatgttatgtgttgatcaactacatgacattggctgacacccacactgaatagacgagattatcggtattgtttggctacgtaatcttatatttcgttagctgaatgattccttattggaatacttcctatgtttactgtatagataatca

SEQ ID NO: 330093 - DNA, 361 bp, Zea mays
aattcccggctcgagccacgcgtccgttatttcttttgctttacatttctgtttatagctgtacaacattctatcggattggggtcctgtgaaatggggatttgacaaatggacaaattaagtgtgaaaaattccaatatttaagcaaaatccacagttgcactcatgcaggacactttgaaacgcaataaacggttctgtacttctttaacttcccatatgttacaatttcaatttgattctctctgaccacttgaatatatctgaataaacctgatctccaccaatttccttacctgttgccccatcacctattctgactgacttctcaattagagcaaaattccccattatatcaaca

SEQ ID NO: 330094 - DNA, 248 bp, Zea mays
tcacactagctctagcatcttgagctaaatgttttcttttagcatttattttctttttaaacggtcatggcacactgttattgggacagggtaattacttaaatatatcaaatggattccacaaatcaatacgaatataacaaataggtagaacattccctatagatcaacaaagcttacgtacatttcccttccatgacatagcttttctatattattacttaaacataatttactattactaacat

SEQ ID NO: 330095 - DNA, 94 bp, Zea mays
caatttggagttataaatataaagttatcactttttgaaaggtaaagtaaagttctacatgggccccaaactgatttccctgagttcctcacga

SEQ ID NO: 330096 - DNA, 304 bp, Zea mays
gcactacgttatatcgtctagcaacgttcttgctgtagatgatggcatcaattgaactgatagctgctctgatgattctgttaatatactgtatcatgaactaactgatgctaacagttattatgccatgaatcactggtttgaaagagactccaacaggtaatcagatcgtaatgtcattaatcttgaccaaattatttacgacaatcatcctaaacttagaccctagactctctatccgcctgatgcataaccatgcttgatcatcagccttgaacggactactgagaagagccgaatggac

SEQ ID NO: 330097 - DNA, 94 bp, Zea mays
caatttggagttataaattgaaagttatcaccgtttgaaaggtaaggtaaagttctacatgatccccaaactgatttcccttaattcctcacga

SEQ ID NO: 330098 - DNA, 101 bp, Zea mays
acttctgtttcagtatggacgtaatctactcattatctactcaatgcctgaaacccaaatttccaatctacaagggatatttatcaatgacactataccac

SEQ ID NO: 330099 - DNA, 353 bp, Zea mays
cccacgcgtgcgccgccgcttgatgattacgcgatgcaatgctcggagaaggcataggttactgccgacgaggtcgtgaaggcgctcgccaacatccgcactttcgagcgtgtttcgacagatctctgttactacatgtgcctacatggtgcatacagagcataaactaaagcatgtgatgatggcctcttagacgcttactatagaggcacaaatatgaaactaccagcatgtactatagctctaatcctagatcttttacctactatgagcactgaatgatggcataagtagctatcaaatacttagaagactttaaaattgactcaatggatctgaagataaatatcatt

SEQ ID NO: 330100 - DNA, 196 bp, Zea mays
ccagctgagagccgacctggtcagggtagccaagcccattccgttctctcccggcgtcttctccctccggaccggggctcctgcgatggcgggcgtgggctccgcgctgcgtctgctctacctctccgtctacaactgggtcggcttcttcggatgggcgcatgtgctgcactacgccgtcctgacactgcctttg

SEQ ID NO: 330101 - DNA, 144 bp, Zea mays
cccacgcttccgaccagctttcaccttctttcccacgactccctatcgctgggcacgttgcacgcggaagggtggcgactgataacttgatcagcatggtgtcgttcgacttgcccaatgtgtatgtcttgttcaccaagctct

SEQ ID NO: 330102 - DNA, 328 bp, Zea mays
gccaagataggagtttctcatgttcatttggataaggagaaaattactagagcttctcgggtccattttttgcaaagataggaatttctcatatccattttctgtgatattcgttctgttatatagaaaatagtttgccaccattttctgcggtcacttatgcacagatcagagtgccccttgtgttacttctggttggttcatcaaaaaatttctttatctttgctttgctaagtatcatacttaatatatatctggagattcccaattttgctcaaaatggcactggtactagaatttgcatgtgcatgtatcaatgtatagtaaa

SEQ ID NO: 330103 - DNA, 302 bp, Zea mays
cccacgcgtccgactagatctctaactgttactccacaaactccaactttgcgtgaaagggaccattacaaggacaatgcgctagtgcgtcaccccctccctcttcactaccctctgaactacaaacttgtaattgcactgaccctaccggggcacctccttggctgcttgcatcacaactgcaccaaaatcccatgagaatacacaacaacgacaacgatcgatcaaccaaccacacactacacgaaacacatgaccaagcacacgcatactcacgcacttgagatgccgcactatcccct

SEQ ID NO: 330104 - DNA, 305 bp, Zea mays
accggtttcgaattcccggctcgacgccactcgtacgcccacgcatatgtacaattcgattcccatttttgtaattaatccaaattaacctgcacagtactattataaagggcatgtgctcttgaaaaacataaagtcatctcattaatcccccatatacaccatagtcattgaaaaaactctttctctactcatacccattgaattaaaatacacatttataaaatcaactatcatatcaactcatacaaaatatcaagatacacatactactcactaacgcctctctgaaaaccatttacatt

SEQ ID NO: 330105 - DNA, 395 bp, Zea mays
  unsure (1)..(395): unsure at all n locations
cacgaaactgccgaacataaacgagaccattttcaccaattgaatctattacgctacaccgggctccttgtcctcattgcgagcaaaaacgcctgagccatacttgtctgaccacctgatcgaactgatgacatcggcaacccttttattctccaacgagtataatcttgtagtcggcccattctttcgaaccctgctcatctatcgcccttacaacaatgtgacccacatcgacaaatacctctatgctcgtaccgtgctcgcactaactatgaaatattccaccancacgtgcaacttactacatttctacatccaacttcttccgcgacgtcatggccggccgctctaaaaaatccaagcttacgtccacgatcctgccacttactagctat

SEQ ID NO: 330106 - DNA, 339 bp, Zea mays
cgacccactcttactcacacacatacatccaatctattcattcactctaactttcctcacacaccacaacattcatgcttttttctcaactatcactgacctaaaactaacccttctactctcttaacccaatccctctattaatctacctacaacatacacaaacaccatcaaaaccctccttttcatatacacatttcaatctatcccaacctatcttatcaatacacaccaactacaacatcatcacactctcctcatattaatactctaaacatcaatctcctatacacctacacaactcacataatctccactaccatcatcatctgccaacct

SEQ ID NO: 330107 - DNA, 186 bp, Zea mays
aattgacggacgcacccacgcatccgcacataaactcctgctgtggattttacgcttactaatgcgacgctctaactggaggacggccaaatatgcaacgggtcagggtatatcctatctatcttaagacgttcaagaaactatctcgtccttatgataatgaacgtctttatcctgaacttaatc

SEQ ID NO: 330108 - DNA, 319 bp, Zea mays
  unsure (1)..(319): unsure at all n locations
ccgggtcgacacacactcgtgctgccaggaagcgctcctgcacctgttctgcatacgcccaacggcctaatatttaggtancctggtacaacctacatggtcctcgatccgtcacccatccgttccggatcttgattcttgccaatgcgtgcaagatttctgcttcgccgaggttaaattttattcttctgtcgaccttctgcggacaacccgcacgtttgcttggtgccctctatttgcctgctactcattgcgctccaatcctatgctaatggaacgatcctactcaacattgccatcgtcacttctaccatattcc

SEQ ID NO: 330109 - DNA, 425 bp, Zea mays
ccgttccggaatctgccggatcgacccactcgtacacaagtatcagtgccacttgaattttctgcatccatacaaatgccaactacttcgtttgctgacaatcaatctgggctaatgggcacacttacaatggttactcaattcagggaatctttcccaacccaatactctcagctgcgactttaatatttgtcatgcgttatataccatgtagcttaatcttccgtgcatgatcacattgcaatattgctgatagctcacacactcatctcatgattactcgctacactatcttatatcgcactctacatgtgctaacacacttcaaaatcagcttcataggtcagtaccctgataactatcatagaacagacctatatagacaatatctacacgttacacaggttactacttatggaaatttc

SEQ ID NO: 330110 - DNA, 226 bp, Zea mays
  unsure (1)..(226): unsure at all n locations
gccggttctacacactcgtcctaaantacccataccactttaatttactncatctatcaaaactcacactacttaagaancttttcaaaattctattgcccatctaaacacttacaaccatcactcaattcattaaaactctcctaatccaatactctctactatcactatcatctttaacatttttcatataacatataccttaattaacatacactcctcacaa

SEQ ID NO: 330111 - DNA, 328 bp, Zea mays
ctgcacgtaccattccggaattaccggatcgacccactcgtacacatataccatttattcatagattttctccattcttacatcactcaacaatcttgctgcattaacaaaatcttgcggccaagaacaaccatacaacgctatcaaagcaaagcttatattaaacacctcgcaattaccacgatcaccattaacaccattcattccaaatataccataaaaaatatgcaaccctacatgaccaatacacaccattcataacagcacacacacacaacacatcaatactctaaacattacaaccaaacacactgcacaagtccacata

SEQ ID NO: 330112 - DNA, 302 bp, Zea mays
ccggctcgacgcactcgtccgcctatgcgtgtgcccactcgttttcacattttctgcacgaggacgaccgaccgcgcacggtcatatccaacttgcttcaggggcttaaaactgatctgatatatcacatcatctaagcttccacgagaagtaaaagtttacatgacaaatctcacctatcaagcagacaggtacaatatgatccacaaaatcacaaacattgtagccactactgtaaactccctcacattcattgtccaagaatgaatccttctatcttttgcattccccaacgccatttg

SEQ ID NO: 330113 - DNA, 368 bp, Zea mays
gaattgccgggtcgacccactcgtcccatgaacccataaaactataatttttccttctcaccacaactacactaatctggtccttgctacatcccagggcccatggggcccaaagcagccattcagccatctcaaaacaagccttctaccaagcacaacgcagtgaacacgaccaccatgaacacttcccatgccaaaaagaccctacccacgttccattcctacatcaccgatgcccaccataaaaaacagaacacacacgccacacataacttctatacctacaacatctacatactcaatgcacttacacagacgctccatcacctgcagctattctccaatgacatatacctcataaactcctt

SEQ ID NO: 330114 - DNA, 330 bp, Zea mays
gacccactctaacacccaggcttccaccctacacccctctcaagtgttccatcccacccacacccatactcccaagaccatttctcaaattctcactgccccaagcacttcactactattccaacaccacctccccaatcttatactaccctccacacgcctacccccccctcaaatctatccttcacaaacgacatccaacaaaatacaaccaatatctacactcacctccatcactacatggatcaaaactacctacataactgctaactccccaactcccatatccttacaataaaacttattcacaatacgcaaacacaacaatca

SEQ ID NO: 330115 - DNA, 391 bp, Zea mays
aattcccgggtcgacgcacgcgtccgttttactcgagttacatgtcactgctacttttttcccggggtgcctttgatttgcgacagccagtatcagatgcgacaggggcacaagtaggatgagcggcgactatgctatatcgagagacacgggtgccaaggtcgttgtgctgcggtggtggcaggacatgaaggaaacgaaaaagcatgagccagggctgttcaacaacgtgaccgagtcacttaggcgaggaagagtaaggtgaatgcactcgtcgacgcctttgagactgacagagcgttatctagctgcaggaaaccatcaagcctgcttgctgctccagctattaaagtattggatattgtttcttgccatgagtgcttcttgacct

SEQ ID NO: 330116 - DNA, 277 bp, Zea mays
ccccccccccccccccacccccccaccccacccgccccccccaacctcccccccccccaaaaaccccccccccccacccccccccccccccccacacccccacccccaccccacccccacccacccaccccccacccccccccccccccccccccaacacccccccaccaccccccaccccccccacccccacaccccaccccctccaccccacccacccacccccacccctcccaacccccccccccccccacccccccccccccccccccccccc

SEQ ID NO: 330117 - DNA, 260 bp, Zea mays
acgcacgcgttcgcctgactgcgcgctccacatgtacatttacgcctctcgcctctcgccatggcgccgggatctatgacgcgcgtatagggagaggcttacctcttgcctccacagctacaacgagccccctgcccctccgtctcaaataccacgcgccctgatggacgacgtccacgccatggatgcggatctgtggatctccaaagtcaaggagggccagaacccattcgatcacaaacttaactaccactattaat

SEQ ID NO: 330118 - DNA, 252 bp, Zea mays
aaaagacatgtctcccaaaacaactatataatcactataacataattcagttcaaaagacatacagatccccccagaaaaccagatgtcattatgagactttacctccactttacctctctacatagtcaaaacaaagaacatgaaaataagaatacttaaaaacttcttaattggactaagtatattctaacttctaaaattcactacaacactcaataactattatcttaacagaattaacaaaatccaa

SEQ ID NO: 330119 - DNA, 450 bp, Zea mays
gtgcccacacgaagatgcaaaatggtggcacataatatactttaggcttgaagttcttctgcatttcaagaaggcatttccatctgaagaattgttatctgcaggagacaacaaagctgttgagtctgtttgcaggatactcagggctttttatcatgctgtcgaagtgatttgtagtcctatctgccccacagcaaatgtgtacttcaatgaactgtggaaagttagaacagttttgcaagaagaagcatcaactgatctcattgaacttgctaacatggtttgggagatgcaggaagcattcaatgagtactggcaaaattcatacttgtggcttttttcccgggaatacctgttgttcttgatcccagattcaaaattacttttatcgagttccgtttaaagcgagcttttggtaccaatgcggaaaagtatgtatctgccattcgg

SEQ ID NO: 330120 - DNA, 316 bp, Zea mays
gtcatgagactaagcttcaggatgttggctcatagtttactgtaggctctgatcactacgtgcatttggagaatgcatttcggtctggagaatagttatctgctagatacaacacaactgttgagtctgtttacaggatactcaaggctacttatgatactgccgaaacgatttctagtcctatatggcccacatcagatgtgtactacaatgaactgggcatagttagcaacagctttgacgtaaatgcatgaactgaactaaacaacttgctaacatgatacagggagatgcaggatgcattcaatgatgtact

SEQ ID NO: 330121 - DNA, 337 bp, Zea mays
accggccttgaattcccgggtcgaccgacgcatacgctcactcttccgattcctatctatgtgcaattgagaaacgtcataaccaatctgatactatgtaacattccaatactgtcgagggcaagcaaaattaactgactcaagatcctatataaaacctgcactacttgcagacggtagaatccgacataatattagacaaatatatagacgatgaccatgccaataacattcttgccctcaagagcaatgagccagcaaatccagagaacatcaagcatgaaatgaataacgactaacagatccagaatcatacaactgataaagatactttcct

SEQ ID NO: 330122 - DNA, 270 bp, Zea mays
cccacgcttacaatggagaatggcctatgcgtttatggtattttctatcaaatctgatacagaaggagtcagattacatgtacatggtgcaggtgaaaaattaaaatcggaatatagttatgtgtgccaaccctaatgttaccgttcaagattatgattatatttgtgtcttcaaatacaaaaaaaaaaaaaaaaaaataaaaaaaaaaaaaaaaatataaaaaaaaaaaaaaaaaaaaaaaaaaaacaaaataaaaaataaaatttgaa

SEQ ID NO: 330123 - DNA, 442 bp, Zea mays
gtttgttgctacaggtaagttacatcagttttctttcaatggttcgacgatgtacagatataacttgaaggttcctccatggtaccatagagaccctacataaaagaaagggggggggggttggttcagaaactttgaaagggttcttttatatagccccctttgaaaggggggctggagagagtactttgcagtttagcgtcaatacataaaagaaaggggagcttcttttatacagatacaacttgtagcatttccaaacagtccaggcagaggtatacaaggtatacaactgcttatttcatcacacgaccgcatatatgtcttgtagtatattaggtgtaatttagaatgtcttgtggcaaaggcaattttttaagtggcctaaggcaaagctcacatttggatgacaaatttggctttatttttttgcagtaatctt

SEQ ID NO: 330124 - DNA, 239 bp, Zea mays
ctgcagtggcggcgcctacccccacgcgccttcggcttccgctcctctcccgcaccctgcgctctggtcactgtagaagctcttattcctccaggctcctacggttctcgtgcagtgccaccaccatgggagatgagacctcaacctcggttgctccccaggaacaggaattcactgtgcaagctgggagtgtcaagcaacagcttttcgggctggtccttatgtcccttcgggctact

SEQ ID NO: 330125 - DNA, 298 bp, Zea mays
aaaaaagaaagaaaaaaaaggaaggaaaaaaaaaaaaaaaaaaaaaaaaaaaagaaaaaaaaaaaaaagaaaaaagaagaaaagagaaaaaaaaaaagaaaagaaaaaaagaagaaaaaaagaaagaagaaaagaaagaaggaaaaaaaaaaagaagaaaaaaaaaaaaaaaaaaaaaaaagaaaaaaaaagaaaaaaaaaaaaagaaaaaaaaaaaaaaaaaaagaaaaaaaaaaaaaaaaaaagaagaaagaaaaaagaaagaaaaaaaagaaaaaaaaaagaaagagaagagaac

SEQ ID NO: 330126 - DNA, 363 bp, Zea mays
cccacgcgtccggccagatttactaactctttgactttgaaggccacaatggggcaactggtggttaccacggacatggatggtcaagtagaacccacttgactttgctatgtccacatttatcgtatcggctctacatttacgtctgtattatcgcttttatgattggatgatgatgctattcttgatagatgttacacgattttggaggcgcttagcctccctttgatattcattcttgttaggagatactgcaatacattgctatcatatgtgttatatactgtgattacaatgcaacagtctaggttgtatcaaacaaatacttataatgctggccaactctaaagcattgtgaagtgt

SEQ ID NO: 330127 - DNA, 451 bp, Zea mays
gtacgctgctgtacatgctgctacgagcctacgatcgatagcagtctatgcctatgctcgatgccgatgtttatctgcatgtgatcgtattcgtatgcacggtcctctcaagctgagtgctttttggtgggtccatcgtcctatatatacgctcatcagttcactgacgactatataacgattgttggggttcagaaactacatatggtggtgctcgcccgatctctttcttgtatattcttcttattattagtctacttctctctctctctctctctctctgaaagaacaaggaactagatgtctcgtcttgtgcctcctactatacctttacgtgttgttcttccttttgtcgtccatggcttttcaccggtctgctgggtgaagtgaagtaatttacacgcatgtcttacgcacgcgctacttcagttgtccgcatatctgatcataa

SEQ ID NO: 330128 - DNA, 407 bp, Zea mays
gctccaccttcgccttttgctcccctttcccgccgtcacctacatccactcccaacggatcatcttcaacttctccacgacccccactcttatccactaccaccttccagcacaactccgccaccactacgatcgatctcttcatcgactagagcctcctcctattcctaaatactcttgtgtacccctacaagcacacaatctttctataacttgaccttcctcttctgacctgctccatcaacacctccacaccatcaactatcccaacatccactctcctctacctactctccaactctaaaactcctatttttcgaaatcttctactacccacaatctgtcaccacaagatctgaatactaatccatatttttcctccatcaaatcaatcgtctcacatatcc

SEQ ID NO: 330129 - DNA, 402 bp, Zea mays
caattcccgaatcgaccgacgcaaacagctcgctccacctccgccgtcagctctcctcttccgccctcaccgccgccgcctatcaacggcttattttcaacttctcgacggcccttacacctacccctaccacctcccatcataacgccgccaccactacgatcgaccattcctccgactagagccgtcatcgtcttctcaatacgattatgtaccggatcaagcatcgaagctttctataactggacctcttgctagctacctttgtctatcatcacttgcactccatttactatgccaacatactctcccttctgcaagtactcgacctctataactcaaattttttgaaatcgtttactagcctctagcattcaccatatgatctcaattctaatccta

SEQ ID NO: 330130 - DNA, 478 bp, Zea mays
  unsure (1)..(478): unsure at all n locations
aatacccgggtcggccgacgcgtacgttttcaccggtggccattcagcacgaacattatcaggtgtatcttgtgcatggagccggcgtctcagtctaaaacgtgaacgagtctcaagatggtcagctgctagtctcgagggaaacaattgacgatggacctctgggcgaggtgttcaagggcaagagttgccagtcagcatccgcggacatcttaactgaccattggacttcgactcgtgacttgcgttctccaaccggaatcctacaaatgtctagcagcaacacagtgccagcagagaatcacacgagtaacagtagctatctcatggcgaggattgcgaattctcagaccgttccaacactccactgagtgttcatcaggctggtctttgttgggaccacaaaataactgaagccatgttgatgtcctgagnttgctgatactaagttttcagtcgagtcttgtaactcctgttt

SEQ ID NO: 330131 - DNA, 55 bp, Zea mays
ggtggcactttttcgggaaaatgtccccggaacccctattggtgaatttttctaa

SEQ ID NO: 330132 - DNA, 384 bp, Zea mays
tagacaacacatatgcactcaatattgatatcttggtgcacaaagtatgtgcacttatcagatcttctttaaaaggatcacgggcttcttatggccgcaagctttcagtgtctgtcaacaatgatctggttcattaaggagcattcatacatatttgcttattttgattatataatgcattcagtgcttgaaaattatatgacataagaatctaatggtggttgtgatgacagacatgcatttcatcataattttgttgatgaaatatcaaggtcttaaggttgacctgttgtattttgtggtaatgatgtgaatattaaccctacaactattatgttgcggtcatcattaaatttcttagctcttacaaagtattaaccttac

SEQ ID NO: 330133 - DNA, 161 bp, Zea mays
cccacgcgtccgcccactcgtccgcccactcgtaccgccaagcgtcctcccaagccttcgcgcaaaccttctccgacgccttggccaatcccattcttcccgtcccaaattcagaccatcattacccgcgccttccgcgatctgtgccttaaagccctgcc

SEQ ID NO: 330134 - DNA, 142 bp, Zea mays
cttatactgaatggtcacaggtaaggaccgtcttatccgctcacgcccagcatgcaccctcatatgcgttaagaagacgctcgtcttacacagatgcagggcacccttaggacaccgtatcctctggatcatgcacgagtac

SEQ ID NO: 330135 - DNA, 302 bp, Zea mays
ggtaccggtccggaattcccggttcgaccggacgcgagcgctcttattgatggtgttatcggacattatgcttgctacaatggagatacatggtcatctgagctcgacattctttgtaaagctgagccacaaattatcacaacattcaagagtgcggaaggctaccattggtggtgtaaccatagatgggcttcttgcagcagcagctggattcttgattgggcttgcatttgtgctgataggatttttcaccactcaatgtgatcctgatgtattcttgaaccagtggctagctataccct

SEQ ID NO: 330136 - DNA, 287 bp, Zea mays
  unsure (1)..(287): unsure at all n locations
cgctcttattgatgcgggtaatcggacattatgcttgctacaatggaaatacatggtcatctgggctcggcattctatgcaaaagctgagccacanattatcacaacattcaagagtgctgatggctaccattggtggagtaaccatagattggcttattgcatcaccagctggattcttgattgggcttgcatttgtgctgataatgattttcaccactcaatgtgagcctgatgtattctggaaccaacatctagctatacccttggcacaactggcgacctatg

SEQ ID NO: 330137 - DNA, 255 bp, Zea mays
attcccggatcgacccactcgtaacacgcaaccggactaacttacgtatgcccttattctaaccatgtcacatgcatcaaaagctcgtctagtgtgaacctttgttgggaaagctagactcacatgaacatattatcaagcatcagtacctaatcttgcgtgtcaaccctaattgtctataattgcaacatttctacatacgaccctttcacatgtactaacccttaatctgtctaatccttgcattacctctat

SEQ ID NO: 330138 - DNA, 405 bp, Zea mays
cccacgcgtccgcggacgcgtgggacggaatcgatgagaatcgccgccagtttaacttcggacgacaccgacaaggtcgtctcagacgctaaggccgaggtagagaagacggggagaatggagccggtttcgccggcgctatctgacttggtcggcccgaagctgacgaagatctcgccagttgcaaccaagaggttttcgtaccttgagaatctgggtggaacaagaagcccgatagctagacactagctgctgtaagtaggggtttagtgggggtagatggatcatgccgtcgcaaagccttcggaagaaactttgtacatagcatagatgcccactgcgaacgtttgtctaacgataatgtgacatctaatcgactaatagaggcagaagttcttagagcgc

SEQ ID NO: 330139 - DNA, 70 bp, Zea mays
gtattatgttatttttttatattttttatttattttattttatttttttattatatttaattattttttt

SEQ ID NO: 330140 - DNA, 297 bp, Zea mays
atgtcactgtcgaggaccgcgtcgagcaccatcccgtccagcgacattgccatcagcccggtggccgcctggcccgccggtccggcaccggcgattccaagccctgcatcgaccgccgcgttccactggttcgaacaagtgccgtcgccgcggacaccaccgtcatcggtccaccaccgcggcgggcacaacctcgagctgcagctcatgccgccgtcctgcagcggcgcgggcggtgacgcgccaccacgtactccggcgggtccctcacagagccacgccggcgccatgggcatg

SEQ ID NO: 330141 - DNA, 389 bp, Zea mays
  unsure (1)..(389): unsure at all n locations
aaaaaaaaaagggagggaaaaaaaaaaanaaaaaaaaaaaaaaaaagagaaaaaaaaaaagaaaaaaaaaaacacaaaaaagaaaaaaaaaaaagggaaaaacaaaaaaaaaaaaaaaaaaaaaaaaaaaaaaaaaaaaaaaaaaaaaaaaaaaaaaaaaaaaaaagaaaaaaaaaaaaaaaaaaaaaaaaaaaaaaaaaaaaaaaaaaaaaaaaaaaaaaaaaaaaaaaaaaaaaacaacaaaaaaaaaaaaaaaaaaagaaataataaaaaaaaaaaaaaaaaaaaaaaaaaaaaaaaaataaaaaaaaaattaaaaaagaaacaataaaaaaaagaaaaaacaaaaaaaaaagaagaaaaaaaaaaagtaaaaaaaaaaaaaagaa

SEQ ID NO: 330142 - DNA, 339 bp, Zea mays
  unsure (1)..(339): unsure at all n locations
cccacgcgtccgtccacgcgtncggtcaaacaaggatgatgatttcttgggcgtggtcgacatattttcgcatggtggtgataagaaggcaccattgaaacctccagtgaggaaggcgctcgcaatgttcagcgggaaaagaaatccaaacgacaaccacttctctcgcaagaagtactaagctctgatctgtcgtcttctttttatgcacgcctgtggtaccgtagtctgtaatcccagcatgtacgtaatggttgaagcaaagtgccttttttcttgttagtggcgtatactcatcatattcatatacacagatatatataagcatgttagctatgc

SEQ ID NO: 330143 - DNA, 362 bp, Zea mays
tgatgtagagagtgtttgcctgctctcttttcttgggaggtagttaaaccaagggtggggtttatctggactggtgggaagaaattgggaacctctcgtctaccaaattctgctccattcttaatttgagggcaaaagactaaccttatgctctgcggcttctgcacgtgtgtacctcatgtctgatacttctggcctctctcatggtccttaccttggaacaacaactttctgttccttggcttctctgctcatcttggtaattaaggcatctgtttatagtacagcccaagacattgggcctgaacttctcccgtcattaccagatcacaaggtcaatctcaagaatctattgggaatgc

SEQ ID NO: 330144 - DNA, 436 bp, Zea mays
  unsure (1)..(436): unsure at all n locations
gggggggggggggggggggggngnnnnngggggggggggggggggnnnnnnggggggggggggggggggggnngngnnngggggggggggggggggnnggggggggggggggngnggggggggggggggggggggggngnggggggggggnggggggggggggggggggggggngggggggggggnggggggnngggggggggggggnnnggggggggnggggggggggggggggggnggggggggggnggggggggggggggggggggggggggggggggggggggggggggggggggggggggggggggggngggggggggggggggggggggggggngggggggggggggggggggnngggggggggggngggggaggggggggggggggggggggggggggggggggggggggggggggggggggggggggg

SEQ ID NO: 330145 - DNA, 79 bp, Zea mays
tgaaatcttgctgttgcaccttgtgcctcataaaaaaaaaaaaaaatacaaaaaaaaccgggaatttaaaaaaaaataa

SEQ ID NO: 330146 - DNA, 141 bp, Zea mays
tgaattcccgggtcgacgccacgcgttcgggtcaactagctttaacgcctcaccctgcgaatatggaccatgcaactctccgtaaacgtgtgttgttaatggagacagagtctattcctctttcaaagatacaacgtgttc

SEQ ID NO: 330147 - DNA, 267 bp, Zea mays
atttctgggtcgaccgaagcgtccgatcgatctcacggaataagcttccgtgttacctccattacgaaacagcaaagatccagcgcgcagagagagaatcgccatggcactctgaacaagaaaagaaagagctagagagatctcaggcagccagtctctgacaacacaaggtcggggaccaccaagctcgatccttgcttccaagggcgggggcagtagctccactactactactgctggtgctagttctgcacgggagacgaggtc

SEQ ID NO: 330148 - DNA, 451 bp, Zea mays
  unsure (1)..(451): unsure at all n locations
ggatgtcactatttatgccagccagattcgccagctatttggatttcacgagtcatcgactcgtcttcacagcttatgctatggcacctctgaccctcctcgtcgccctcacggcggtgttgctccgggtacagcttacgtcgcggctctgttccgaccgcccttcccagagcgcgcgcgacgctcaccggcagatttcaccacaacagcaaagtttctctatcagcttatgagacggacacttctgccgcggatagggtacagggaggccaccactcatatccagctctggctccttggtgccctgatatctcactcagagttcgatgttgtggatttccttatttgtgagatcgaggacaccattctggatggtctgcgtgcacgacgacagctgccatatgctcactatctatgtcacatttttgctcagctgattcgacctncacag

SEQ ID NO: 330149 - DNA, 320 bp, Zea mays
cggacgcgtgggggggtcacccagaccaagactgaggatatgaatgtgactaggaaggaaacgatgaaggggggagagaggaagggggacgggagtaggacggagatgattaatgcttcggaagagcgtgtgtaaacggacgataagaccgggactgaaaatgatagaggatgcgtgcggctctacattcctcttctgcacagaatgagtcctgattctcatttgtccaatggtttcagtcttttgctttatcaggtttactatgctgtattttgcatacactatctttactgatatcttcttattctcagcacctccaa

SEQ ID NO: 330150 - DNA, 439 bp, Zea mays
cccacgcgtccggtggatcgcttcaaggaagtgataggtgcactggaaacagccgtggagaggtcttcaatcctggaaccagaaagcgcagcagcagcttgtagcgtactagaatccttttgggatatggtgcctggatctggcagcggaggacaaggtcgacggcggcagctgaaggacagtcattctatacagaaggatgattcaagcaaaggacaaggcggtttgaatttcagtatcgtagccgctctgattgtgctactggttgctctgatagctggactgctcttcactggttccgccggatacccaatataatacctacgtaactaactgcgctgtaccccaccagtagatgcgaaaagcaaagatgttagaaactgttgaagtggagagttgaatttatttaatgttagaagctgttgttcacatctctatt

SEQ ID NO: 330151 - DNA, 287 bp, Zea mays
  unsure (1)..(287): unsure at all n locations
cgcggacatcagcaccaggcgctcccggactggcaccgggctcaccacgcctatgccaagccatncttccgggcacgcgcccgcgtgccgacgatcgactgccgttgccagtgacgacgcgctactcctccttgccggcgtattactcctctcgcgccgcatttcacgcagttctgcataggtcagccaagattcgagcgccggcgaggcgttgtcagagtggaaccagaacataagcttgaagaagctcaagtttcggcaaggcggatgtggccggagcgcgcgag

SEQ ID NO: 330152 - DNA, 100 bp, Zea mays
cggaattcccgggacgacccacgcggacgcccacgcgaccggaagccctctatgaataacagcggaaacacagcaccatgaccagcagggggcaaggagg

SEQ ID NO: 330153 - DNA, 448 bp, Zea mays
cccacgcgtccgcttccttcttgaagcttcgtggcgctgtacgaccgggaggacgtggaggggattgggctggacgacgcggccaagcgtctcggcgtcgagcgacgccggatctacgacatagtcaacgttctcgagagcgtcgggattcttgtgcggcgcgcgacggctcggtatacatggctcggattcgggggagtccctgctgcgctgaaagaactcaaggagagggcgctaaggaagatgtccggatcaccggtgttactgtcaatggaggactcctctactgccaacttatcagatgatgaggatgatgaaaaattgggcgatgctgatgaagatgctgagagcgagaagctcagccaacctgttgacaatacgtctgataagcctgacgcacccagctgccgccttagatctgatcatcggaaggagaagtcccttgggc

SEQ ID NO: 330154 - DNA, 184 bp, Zea mays
gtaccggtttcggaattccgaggtacgcgtacgcgtacgcgtacgcaccggattcgttgtccgatcgttctgctctgtccgacagtgagctgggtccggggatacgagtaggagatgccaccgacacactcagacctgagaataaatattggtattgcgtgtgtgatatttattagaagttaag

SEQ ID NO: 330155 - DNA, 110 bp, Zea mays
cagacggacgcccacgcgggcgaaaaaaaaaaaacaaggaagaaagaaacaaaaaaagaaaaaaaaaaaaaggaaagggggaaaacggggggacgggagccaagaaccaa

SEQ ID NO: 330156 - DNA, 282 bp, Zea mays
  unsure (1)..(282): unsure at all n locations
cccacgcgtccgcccacgcgtccggttctagatcgtgccttgcctcgtgtataataatactgttttgtatcgtaaaaaaaaaaaaaaaaaaaaaaaaaaaaaaaaaaaaaaaaaaaaaaaaaaaaaaaaaaaaaaaaaaaaaaaacaaaaaaaaaaaaaaactttctnttctncaaactaaaaaaaaaaaaaaaaaaaaaaaaaaaaaaaaaaaaaaaaagggtaatgattttaaaataaatatattaataacaatagtataaaaaaaaatatattttttta

SEQ ID NO: 330157 - DNA, 415 bp, Zea mays
  unsure (1)..(415): unsure at all n locations
gcaaggggtccgggactggacgggcaccggttataaataaccacacacgcttaagggctgaagcggaccaagcagtggcagtgattagccactatactactcgtaggtactaccagcgggttgcttgaacagtggaagagagcgagccgaggatggcgtagcgggactcgttgttggnggtcctgctgctgctggttgaggtggacgtgctggcgctggcgcgcgcggacctgacgcacgacaactgcgtgaagaacaagaaggtgactgagcataacctgtgcagcgacgacgtgacgctgatgctggagccgctggccaacagtgcgccgatgttcgtgggcacctacacgttgtacccgtgcagtcacgccgagttacccgtgtgctggtggacggagagcctgcgcgcgcc

SEQ ID NO: 330158 - DNA, 322 bp, Zea mays
taccggatcggaatttcgggcgggacctcatgttagttagccatgttgaacggtgcttatcgcaattttgatcgccacaggatcaatggcaacgcattggacaggacccttagagagatggtgacaacattctttataagggagtagggttcctactgattgcacaacgagagaagcagctcattaggtcctgtgtattcctggctttaaggacatctgagtaatgcacaaggtacccagacgtaagggtgacaatgactatgtactgtgctatgttgaaattgagaacccctaaaattcactcactacaatgcaagcttta

SEQ ID NO: 330159 - DNA, 404 bp, Zea mays
caccacacggcctccacccagatccagacatacaatcttttttcgctcacatcttcagctcccaggataagtttaaataactcggctagctgccaactgatctggtaccaaacacttgaccaactcctcatcatgttcaaagcattcctcattcactacttcctcaacctcaagaacaaccaccactacccctgatcacaaacctcatcaacctcgacatacacatacactatcgccgctgaaattgccaccctaacctttcagccttactgcaatggcatcaatgaccagatttctgacaccgctctaccatgacaggacccatcaattacaaatgcctcttaccaaggagcctaagttgcactgctcgactaccatgacacccatctcgccaccttctacaa

SEQ ID NO: 330160 - DNA, 473 bp, Zea mays
gaataccggggtcgacccactcatacgctcaccagaacccctggttcaatggttctttctccccccctgtcgctaatggtagggggagtagatatacaaagtcgggcgccatcacaaaactgttcccgttgctgagcttccaagtgcacagattaccgcatgccactgcctattgacctgctgcagattttccttattgatacagccattctttccatgggtggcatggccatggcttccctcgccaagcaccacaaggccaacatctcgatgcctactttaaagtgctgcttctggcagtttatgtgcttgtaattgccaacctaatcgcattttagattatatatgtctatccatatctctattccttgctggtgcttaccgtagatctaacatcattgcatcttacattgcttccaaatttttatgtccatgtgtaaaaaatattttattctatcgctattaaaatactt

SEQ ID NO: 330161 - DNA, 362 bp, Zea mays
cttccgctcaccataacccctggttcaatggttctttctccccccctgtggctaatggtatgttggggttaaacactaaggtcggccggcatcttatggcttttcccgttgctgagcttccaggttcactgattccctcatgctactgcctattggcctgcttcatggtttccttatggatactgccattctttccatgggttgcatggccattgcttccctcgccatgcaccacaaggccagcatgtctatacgtacttgaatgtgctactgctgtcactttgtgtgcttgtaatttccagcctaatctcattttatattatgtatttctgtctatgtcgcttttccttgatgttgtgtac

SEQ ID NO: 330162 - DNA, 426 bp, Zea mays
accggtccggaattcccgggtcgaccgcactcgtacgtccaaagcaaaattcccatactttttacgacatcatacttacctcactactcgcgatcgcgtccacttttaccataaggcacccaaattccactttcaacttcaagaacattataaactacatatcaaaatcacaaactctcttggatcaatacaactcaacccagattacatgattcacctacaatcatcataactatatctataatctatcttacatcaatctgccaatatcacttgccaatacatctacactagctaatccaaccagtcaaccaactacttcaattcattataacatactgacatttacactcaagcaatcagaatactagccacgactatatctatattatgacagacactccctcataatgtcgctacattatc

SEQ ID NO: 330163 - DNA, 283 bp, Zea mays
acgcaagtccaaccacagctacagatggatggtgcaccactgcgccaagtatcctcgaagccacgggttatactcgacaactgggtcgacaccgtcgagccggggcccgccaaggtcctgcgccagccggagccatggcgaccgtcggtgcacaccatcggacctctcgtgcacgccgagaacagtggctgcagcaaagactactcgccttgcccgagcgtggagtgtcaggaccggcagtccgccaaatcggtcatactcaatgccttcggctacagctgca

SEQ ID NO: 330164 - DNA, 379 bp, Zea mays
attcccggatcgacccaggcgtacgctcttgtagcccgccggagatccatgcctttttgatctctcgagtggacagaaaaaaagtgacaggtttatatctaacgaccgtgatgctccagaatctgtgggactacgtggtggcctgtcctcactcgtagactatcctcgagaagctctacaatgcctccaccttccaccctctcgttgtcatcaacatagtttctttttgatgcaaatgatgccgtaaacaccgacgactccgttgactccttagaccactacgactccgctctgtgccagcactatgtggcgcatcgtgttctcacccattgagcaaccttgccaccaagatcatgttcgccaacctcttttacctcct

SEQ ID NO: 330165 - DNA, 443 bp, Zea mays
attcccggccgtcgtagcttacctagctgactcccgtcaccatcaatcctcatctccccgtcctcccactatctccgcgtcgcgttcctatccacagtccgacgcgcccaacaacatccatccctccgcaagggggaaagcactctatctgatctgaactactgacagagatagagagccaaaccctatcactcacaaacacatcaacatatacactatcccccgcccattcatccatccatcgcatcgcacaccgatcagtctgtccatgactactacagctaatctagcacatcacaatagcatatcatctatctccgtcgcagtacccaccaccaccaccaccatgatcttcccccctgccttcctgcatgattcctcgaactggaacgataaccatcaacatcagcaccaccaacatcatcaaagccactgacaccttc

SEQ ID NO: 330166 - DNA, 322 bp, Zea mays
ctcccacccactccaccgcacccaccacacatctacctcactcccaaccaacaactgaaagatcagttttacatctacatcattcttcaccatatctatctctatcctatatccctacctcgtacctaacaacctccactcaactcctcatcctcctcatctacacccattgccactgcccatttccacaccccaaccccatctcaaccaccaaaacactcacctcgaataccctatctcctaccaccaatccacccgaccatactgccccctcctccaatcccaatcccaaactaccaaataccccaacttataccaaacc

SEQ ID NO: 330167 - DNA, 418 bp, Zea mays
gaattcccgggtcgaccgcactcatacttataacacaagcgtgatctgcattctgctttccggcatctgctacgtctaaggcttccgcgtctctatttcaccttcggaggccatactcacattcctagcttatcgttcatccatattatgactacacattctatcatctacactgactagtgttccaatctcactatgctaatcaccagatctaatctgacaacttttagcaacactcttaaataccatatttcaagtgtataacatctctgcatcaactaagctaaaataagttctatcgacaccaatcactgacacttctggcttcctatacaaaaacagattatagacaaactgccctctaaatggctcactattctatggcaatcacaacttaacgtctcaatgccaacttatc

SEQ ID NO: 330168 - DNA, 434 bp, Zea mays
aaagcagagtatgataccgctggttaataatgacgagaagggatccagtaaagcctgcaggctaaaagatacaaagagaaatgcatatgaaagtgttgatgtagacagtaagtttgactatgacattgtagatgataaacaagaatgctcctctgtgtcagaagtagccagcaggagttttgagacaaagcatgtcactactgctcaggaatgcactgaagattgtgattcagcagaagttacagaacaatgtcccaggggtcgagaaagtaagagcataggctcaacaattacagatgttactactcatgacacacataagttgtgtctgaatactatgaatgaattggccctttgtaggaagcaactttcaagagatggataggaagcaaggcaaattttttggattggttgaaggaattaatggccagtta

SEQ ID NO: 330169 - DNA, 437 bp, Zea mays
cgcggcacccggcctcacatggcgcaggcgcgcgacccagcgtgggcttggccagccaggggcgtgcctgtgcgggcacgcggcctcgccacaggcgtgcggccccggccaggtcccggcgcggtctcgacgctcggtgtgccgctgttaggcgggcgaggcctcgacggcacgggtgcggctggcatggccccgtccggccgtgggtgtccccggcgtgggcacgggcccagcagccccggtggcgtggcgtggccccaacagcccaagcggagcgggcgcgagactcctctggcgcaagttctggcgggcagcgctaccaccgtctgtccgcaagattgcagcacacatgtgtgcaagaacagcgccattgcagatgaggaccgacagatacataacaaaactgagtaagcataaatcgcataccatttttaatc

SEQ ID NO: 330170 - DNA, 335 bp, Zea mays
actcgtccgaccacgcgtccgaaaaccctagagctccctttccagtcgcgctagcgacacaaaggtcaggtctcttttaaagcgctggctggccacagctgaactcatccctcgagttttcgttgcgaacctgaatccccgtgtgacgctgctatacattcaagaccactaccgcacatttgcggctctcataaccccatccgttcctaggtaaccaccacgttttcacttgatcaacttccacgaccgcatggattcacaccaacacatcaatcatttcgatcgcaagacttctctgaggcaaaatctgtcaaccaatactaccaccgtctttt

SEQ ID NO: 330171 - DNA, 274 bp, Zea mays
ccggtccggaattgccgggtcgacccactcgtccgcacccattgcttacctattaattcgaagatttaactgaactcgactctcacatgacttaccttaattttgcccagaactatcatcgagctgaacacgaatcagttactatccatatccacttctattatattctcactcgtcgacatatccctactagttgcagatgttattgctgatcatccaccaattgtccgctccaatgctaacatgatccaacatgaacctctatgacttcaaa

SEQ ID NO: 330172 - DNA, 261 bp, Zea mays
caggcactgcgtccctgctgatttgtggtttgaattgggctcggatctctgttggggaccggtaaatatgacttggatgaaccttgatcttgacacaccgcagttgctatctgatccactgcaatgatcttctcaatcgtcgacagatgaatacttgtgacaaatgagatggatgatcatgcacagggagaccgaatcaatgacaacatgtgcctgtatgagcctctatgtagtgaaacatgccaaggcgcatcgacagtg

SEQ ID NO: 330173 - DNA, 81 bp, Zea mays
attcccggctcgacccactcgtactatctcccatgctctcatcaccaatcttcatttcatctttcatacctttcacttgcg

SEQ ID NO: 330174 - DNA, 223 bp, Zea mays
aattcccgggtcgacccatcgtccgccaactcctatgtaagtcacccatacctctcttacgacatcaatgtgactagagagtaaagccgtactctgtgagagcgcacaagctacgtcatcacgaatgacactctcaaccgtagcgaccctcctctcataacgtgacagaactactggcaagcacaacgactaccaaaatagcgtcttaacattcatattcctt

SEQ ID NO: 330175 - DNA, 306 bp, Zea mays
  unsure (1)..(306): unsure at all n locations
tcccggtcgacccacttaagttgggatgaccttttcatgtcgagattcatcaagctcaattgaagtttggttcagtctttcttggcaaactcagtctctgactcgacactgaacataccattgcctattcttatgtttttctgggccatgtggcgatcaacaggccatttcttacatgatgcccaccaagaaattgatanacagctaaggattgtaatgctattagaattctaaaccagtaacacagatcaatttggttgagcgccttgtccaagaattgttttatcaatcatattgtaaaggcac

SEQ ID NO: 330176 - DNA, 185 bp, Zea mays
attttctcaatctgatctagtcattcccactaaacaccaactccctactctatccatttacctattcaccatcctcatcatcactctcctcaccctcttcttcacctccatttccactacacaatccacttcctattatcccaatcacactccaacaccaacaccacccattacttatctttctc

SEQ ID NO: 330177 - DNA, 298 bp, Zea mays
cttctcgccttcttttttctctagtgctactgccactactgatccgacaggaaaaccgcggggaagagacgtgttcagagttctaactcgtgctgcttgctgtctgtaggcgtgctgaaatcactacaaactttacaagattcccctacaatggcgagcgatccgtcgacgttctcgccaatcggggtggacgccatgggcggcggctactttatggccggcagcagcagctactgaggcggcggcatttttagcgcccaggtgcctcactttcaccaccccggcgtgcttcttgacc

SEQ ID NO: 330178 - DNA, 179 bp, Zea mays
caccatgattcacctaacagagtggaaccctggctaatatatgcgtgacttgatgcaacacgtaacgctttttgccactgaactatgccttaacataggctgattactacgcatataatggacttgcatcactaacgctacatatatatgagttcagtcacatggagagcttgtatgac

SEQ ID NO: 330179 - DNA, 186 bp, Zea mays
gtgatggccagcccatcggtcgctacgacgacatgtgggcaagatggagtgtgaaggtcagtctgggaccaccttagcctgggagtcaagactggcctggcatacatctggcacagcgaggctagcaaccccttagttaacttggagaaggagtacaagggcatgttctggcaagaggacatcatg

SEQ ID NO: 330180 - DNA, 51 bp, Zea mays
cttacgatgatgccaatctgacgagacggtaccaactgatctgccatgcat

SEQ ID NO: 330181 - DNA, 410 bp, Zea mays
ggaacatcagatatcctgttgcatcaaattcaggttaaaatcaagtgggctgacacaaggagtggtgtgatcaagaagcacgagaaagaatttgaagacagagtggaagaggcctaaaaatcaattaaggtgagctagattaaactgaagcatttgttatgaataaatttgcatctgcttgtgatgagttatgctctgttttcttcattttcctacttctgccttactggctcatgtttagatatataattattttttgagtgttcatataatggcaactactgtattaaatagtgttgccgaaccatgtttcttacttgatggcagaaagtgaacaatttaagcatgcagacatcgacatacgatggcatgacaactacctctctgaatctgtatgaataatggatttt

SEQ ID NO: 330182 - DNA, 258 bp, Zea mays
aattcccgggtcgaccgcacgcgtccgccaaagccatggctctactcacccttgcattaaataaagtcctatccttcccttggggaggctctaaccgaccgttggcagcttcagcatatacaagattgatgactactgttacatctactatacctctactactactacttcacgctgtaacatgccatctcacattagatcatacactagcaccaccaaaatcaccacaccacctactttatcaactactactaggca

SEQ ID NO: 330183 - DNA, 145 bp, Zea mays
cccacgcgtgcgtccacgcgtgcacccacgcgttcgaccacgcgtgcggcgagcgccggggttggggttattatgttattttagctgggacttacttagtcaaccttatagtatggttaaagtgttcacattacacgtttggcaa

SEQ ID NO: 330184 - DNA, 300 bp, Zea mays
cggacacgtgaactatcacccttattatttttttatcatgatcactttaatcggggcagagcctattaagaatagcccaagcataaaccacttcgccacatactaacgccttataaacatggatctcatccaatcaaccaataaatgcatcatatcctctggtaaccatcctgaagtacccaaatacaaatcattctagtctgtaaaatctgacaacttgtaatactatgaccactaactgcccattataatttatcaagcacatcgattatgtatgcatatataagcatataccgtatc

SEQ ID NO: 330185 - DNA, 405 bp, Zea mays
cccacgcgtccgcggacgcgtggggttggcttctcctccccctccggttcgggttcgggtgcgtgaggttctccggggttcggtttcgtgggtgagcggatcgagatggcggcgtcggatgttgagtaccgctgcttcgtcggcggcctcgcctgggccacggacgaccactccctccacaacgccttcagcacctacggcgaggtcctcgagtccaagatcatcctcgatcgggagacgcagaggtcccgcggcttcggcttcgtcaccttctccacggaagaggcgatgcggaacgccatcgagggcatgaacggcaaggagctggacggccgcaacatcaccgtcaacgaggcccagtcccgcggcggccgtggaggcggcggcggccgcgggtacggtggt

SEQ ID NO: 330186 - DNA, 230 bp, Zea mays
aggagatggcggagcagatcgccaaggacctcgcgttcacggagaatgcggagccactggggaaaaacgtggtgtccccccgggaacaacaacaacaacttgacccggaaaaataccttgccaccattccacaacttattccaaaaccggaagttgtgggccttgccgaaccggttagccacgccctctttccagaaccttgcaatgtcgccattcttggggggcttaac

SEQ ID NO: 330187 - DNA, 185 bp, Zea mays
gacccactcttccgacagcaaaacgccagcaaccacctgtaatttatccacccaaaatccaatgactgttacatgtcactttaaacaagtatagacatcctcatatatattaacaagacatatattatcactaataaaaaatcacctatcttctatcatataatacaaccttataaggataccat

SEQ ID NO: 330188 - DNA, 413 bp, Zea mays
gtttattactatgcttttggttcatccgtcagcaactaaaaactgagtctcttgttaatgatatataagatgttccttttcccacgaaccaagtacgtgctacttgaccaactaccggaccgaattgcagcagctaatttgggacagctcacgccgaaattaaaaccttgtccaagcaataatcagtgcttctagacgtagaagcgatataatcattgtgttcgttcatcgatctgtcatgaaaacgacgcacgtacgtactcctacgacgtgcttcaaagattcctgggtttaataccacagctgtagccgagaaccgaaagcgatggtcgcacgtacgtttccagagggtatgttggtctctctcgccgcagtcgatgatgatgatgatgacgacgacgaccgtgcatttt

SEQ ID NO: 330189 - DNA, 81 bp, Zea mays
ggaattcccggatcgacccactcgtacgtccacgcgttcaaccacgcgtccgctcactcgaacttggcgctagatatgtca

SEQ ID NO: 330190 - DNA, 209 bp, Zea mays
tccgcatcttcacagcgtatcatcgtggttcatcgctcctactcctatcatccataaaatgtgagcggtattgatggcgcccaaggcggagaataagccggcggcgaagaaggtggcggaggaagagccctcggagaaggcggctccggcggagaatgcccccgcggggaagaagcccaaggcggtgaagcggctacctgcgggcaagt

SEQ ID NO: 330191 - DNA, 112 bp, Zea mays
gaaacactggatctatacactgatgtgatgtgctaaagaagctcgataagcactaggatggggtctacaatattgaatgagagtagcctaatattgatacataggatatggc

SEQ ID NO: 330192 - DNA, 322 bp, Zea mays
cgacagtcgcgcgcgcggagcatccgttgtcgggttacagaagtgtgcatgatgaaccgggcgatcttttgttcgatctagctccaccgacgtgcgacgaagaagatagaatgaaactacaacagctgcaatacatttgagctgcagagctagcttagtgcctgtttgggatcctggtctttcactgcctggtgtggtagatgaacggtggtgagcactcccttaagcctagtgtttgggaggaaaggggggctatacctagagagggaaaaccccacagataactaaatatcttatttaaatgtctttttaagccttgttc

SEQ ID NO: 330193 - DNA, 146 bp, Zea mays
ttgcgatatggagtaaaaatccctggattattaagtttagaagaatgttaacttcaaagtttattgcgaatttcaaaatttacctcaaccagagatcatccatgagcctatgggacccgaatcaaaatcttactcatggatcatta

SEQ ID NO: 330194 - DNA, 174 bp, Zea mays
gaccgttgccaagggacattgcaagaccttctaagagaacaagcaggactcacgagagggtagtgaggggactgatcgacgacaatgatagtcttcaaatgacccatgtcaatcgcagggactcatctcctatatcaaggactgaattcttcatatgctgtctagtatccaagt

SEQ ID NO: 330195 - DNA, 374 bp, Zea mays
caagccttcggcagatcatgcgtccatatacactgtttcatgatgaacctttgcaaggtgctcattgggatgcacattccccacatgggccttctaatggctatagtgatggtcatgatcatcatcctcacctgcatcgctttagcatcgctaagaagcaagttgaaccacataggctccatatgctcactaaagaggtgatctaactgactgaagtcatcgaaggaaaggaccatgtgcttcaaggctacagcgaacacaaactcgaactcttctcaaaaatcagaggacttgcaggaaaacctcatgacacaagtgccgatcatcttgtctgatctatctgagatactgtttagatgattgaatcttatcat

SEQ ID NO: 330196 - DNA, 338 bp, Zea mays
gccgatcattctctcacttatccactctttcatgatcaacactcccaagcgtcccattgggagccaccacccttacatggacattctaatcgctatgtcgatgatgccgtcgatagatgcctgcgctgcattctgactaccctgcacaacagtcaacgtagacttacacttgcttctcatgctcatcaaagagctccatgaactgaatgacgcccttgtctgaaaagcctttgtgcttaagggctacaacgaacagacagatgcacctattatcaacgatcaccgattctcacgaaaatctctgaccacaagtacccatcattttttatgatctatct

SEQ ID NO: 330197 - DNA, 446 bp, Zea mays
  unsure (1)..(446): unsure at all n locations
cggacgcgtgggggtgggttggcttctcctccccctccggttcgggttcgggttcgtgaggttctgcggggttcggtttcgtgggtgagcggatcgagatggcggcgtcggatgttgagtaccgctgcttcgtcggcggcctcgcctgggccacggacgaccactccctccacaacgccttcagcacctacggcgaggtcctcgagtccaagatcatcctcgatcgggagacgcagaggtcccgcggcttcggcttcgtcaccttctccacggaggaggcgatgcggaacgccatcgagggcatgaacggcaaggagctggacggccgcaacatcaccgtcaacgaggcccagtcccgcggcggccgtggaagcagccgcggcagcgggtacggtggtggccgtggaggctgcggctacggcngtggcgggcgccgtgatggcggc

SEQ ID NO: 330198 - DNA, 401 bp, Zea mays
ctgacccatgctcccttcttcactctctttcaccctccccttcctactggcaacattggcaactttcccattacagatcgcttgatcacaacttatcattcaattactccaattcacatgactgttcactgaccgctcacgcaaccactccagacgtgcgccctgttcacattcatacatcattcctagccgcaccactgctccaaacacatattgtacggtcatcgctgcattcactgatcatgcacttgtcatactaatttccaagatctaccaccatgattcatctcctgacctcactctcatgaaataagaataggccatactacaaataataataaacctattaaagcatcttccttacggctcaatccagggtatcatatcctacttatcatgaa

SEQ ID NO: 330199 - DNA, 291 bp, Zea mays
tcgacccacgcgtgagagattcgaacgggcacacgtgacctgattttagcacttttcagcacgaggatgacgagggatacaattgggaacttgctgacatacatgacctagcgagggaaggagcaactgaagatatagtgaagtatctggcagcgggtgtagaattcaacacgaaagattctgaaagcagtactgcgttgcactgggctggtgacccttgccatcttagagctagctaggctcttacaaaagcgaacgctgaccttaatgccaacgacaaatacaggaaaa

SEQ ID NO: 330200 - DNA, 246 bp, Zea mays
gacccactcgtccgccgacccatcgttgctacatcacatgagttcacttcttttccacactggcatacagccagggcatttgtgacattttcttccagatgtgaccttcttgatcagcttattatccgacacatgtatacatatttgacacatactcaccgactcaaatgccttgacacatctcatgattactattcacatctctataacactacaggatcataagataatccctttttcattttt

SEQ ID NO: 330201 - DNA, 412 bp, Zea mays
tcgacccacgcttgaggcactcgttcgcggacacgtcagccgactcttgtcaatttcaacatcgcctctacttgcgggatccattaggggatagtcgctacgagatgccaccttcaaaagtcgtggatgctccaaaattggatgcgcaatctctttctgtatcgcctttgagagccgcaccgctctcgaatcaagaaaggcttgtgctaatgaagctagcccttcaaatgaagaacagacctgactttccatagggaggaacaatgccatcaccggagttgcaaaaaccataaaaacgcacttcaagaatcaccctcttgctatcgtgaacatcaagaacagagcggacgggactccgattcagcaactgatatctgaactcgaggaggcgacaggatcggtgctagtgtca

SEQ ID NO: 330202 - DNA, 411 bp, Zea mays
caatttccgggtcgacccactcagtcctacaacccatactcctaaacctacacattctcaatattcatccacatctgacaacaataccgtatccgactacattcacacatcattcaaaccaacacttaacctactaacaacctacctttgttcataacactagatcaacctacacataatcctatactataacctacatatcctttcacatatattatccactatcctacaacattcactatacaatcaaacttaatacatactgctcaccaccttccatttcatcaacgaataattatcacaatatgcaactcaagcttacatgtcacacattatcaactaataatatacctctctaaacctttatttctacattaccacctcttttacttcaactctttataccttatt

SEQ ID NO: 330203 - DNA, 358 bp, Zea mays
cattccaatatttataacacctatgccaccaatgaccggcctagggaaaacatccaatgtacatgcaaaaatactgattcagctaataggcagtcatcttcggtcagtgctcgagatcgaccaacacctaatccttctggttatcctacacaatcttttgactctagtatgcctagtgctttcacaggccttcagggtcaaactcaatacatgcttacaggcgctggcagttcatcagcgaatgacttacccaatgtggaggccaagcttctatggaacacattttcagcacataggatccctttggagaaccttaacttaagtttacctgctcggtcgatgccaccccttacacctt

SEQ ID NO: 330204 - DNA, 438 bp, Zea mays
  unsure (1)..(438): unsure at all n locations
gcaatcgttaccggtgatttccctcttggttcttggtaacacctagccacctggtccgcattacaaatggaacaaaaaacaaagatgcgtgctttggtcgttttttattttccgattcgggataagctccccccttttttttcctggctgcattttgctgcacactggtggaacctcccgatctcatcctctgcctgtaaagagttcgcgggaaccggtggatctttccgtcatctggccagtggccgtctgatttgttcgtgatctccccgaccccgtgtttgggctgggacaaggagaaaccgccaaaggagagatttgttttcccgcgacactcggaaacacaagtgtaatcccccctaccgttctctctgctcaagtgtcgccattaatggccaggcctctnccataaagcaccatcaattcctcatgcaaaaa

SEQ ID NO: 330205 - DNA, 212 bp, Zea mays
cccacgcctgggccgactaccgcgaggtttgtaatataatgctacaaatcccatcattgtgacctgtgaaattctcccgtactactttcctagccaaacactctcgctccataagacgacggatacaatgataaacactatccatgaccttcggacctatcatcacgtcatcgctggccagttgcctcccaacactgacctgcaccgattcc

SEQ ID NO: 330206 - DNA, 246 bp, Zea mays
ccaaccttcgcttatatagttcctggctttctacacctttttcatgactgatatacacagcgtactctcgatcaatcatacaacaatagaacaccaagcctaaaatccactccttcttctgccctactgcctactactccttgtcctcatcctcactccgatcatcatactcgagcccactccaacaatcctacaccatgctatccaccatcagcattacccaccacctctgaatctcatctcctt

SEQ ID NO: 330207 - DNA, 420 bp, Zea mays
tctgccgggtcgacccacgcgtgcgccaacccttcggtgaaaatctcagtggttattcgaagcatcatgactcatctgattcagggtatatgcgttcaggaccccacgctactgtttgtattcaacgaagcgtgtgacatctgaatcttcaaccaatcgacagtgttcacagcctagacacttgtaccatgccaagagctaagtcaacaacacactgatcagatatcaacgaagatgatcgccactctgtcggaacttttgcatctagctccactaattttccagctgccttcgctgaacacacctatacaaatgcttctactcacactgtgcgagtgttatattctgcatggattctgacgtgagcagcaggcattctgaacccgctatctcaatctgaagattcggtagatcctgaac

SEQ ID NO: 330208 - DNA, 90 bp, Zea mays
aatttccgggccgacccacgcgtccatccaatcttggaagacctactcagaccctataagttcacctccagccatgcacgccacgggcac

SEQ ID NO: 330209 - DNA, 312 bp, Zea mays
ccgatcgtgcgtcccgccagctagccattcactttcctctctttcacttacgcttctaaggcttctctggcgctttaccaaaccttaaccggatcggttcccatgccgagcttaaacgaatgactggactgactacaactccatatccaattgcacttgaacggtcgctactagtactccagctaagccactgcttctctgctaacctctaacctccatccctattatacttccacaatctactaccgaaccctataactgtataccaggatactaatggcctctaccagatcgtgcgactacagcatacac

SEQ ID NO: 330210 - DNA, 428 bp, Zea mays
taccggtcctgaattccaggctttacacacgcgtacgcagacgcctgcgacgacgattgtgctgtcgcctgacccaaaactcttagtgctcgttggagagcctacaatattgcacacaggaaagctcatctacagtatgctcttcaacctactggtgactcaacatcacacttagcatagtatgactgagactcacagaagagggatactagccgacgcactggatgttcgcaatactgtgattaccattgctcttatacttcgcaatcctacacgtgatgtctctaactgtcctgtacgagacaccacacatgcatgtgatcctgctactagcggacacacttcaacatcctgtgacctacgaggtaccctacgactatgccctatgtcatctatcgggccaatgcaaggaagactcggatgcacat

SEQ ID NO: 330211 - DNA, 359 bp, Zea mays
tctcactcatccgtctccacatacccccttttacgtttcgtccaccaccatctacctatcggaccagtacaatcttcaagaacaacctcattaacctcgaccacatctaccctcatccaccttcactatctcaagcaccataaccattccacaaccttcacttaccccaccttcttacactaacacaccatcactcttcaacccctaccatcccttcttcttcagaaaccacaacttccactactttcacaatctccaaaacattttctactcccacaatctcaacatccagcctcatccctcaatccttcccaccgacactactttttaatccttcaactacaaagacccacatatct

SEQ ID NO: 330212 - DNA, 187 bp, Zea mays
caatttccgaaccgacccacgcatccactcactcctccaactccacaatcgcccttttaagattcacacacatacttacactgtatgggacttgtataatacttaagaccacactcaaaatattggtgctaaatatgtacgccaaactacttataaaacaaacgactttgcttataataggacaacc

SEQ ID NO: 330213 - DNA, 351 bp, Zea mays
ctgactcgtgggcgtgcataggcacatttttgtattaatgaaggacctactccagtgcgcgaactgtctactgtccatgggcgacaacaagtccaacgagaacatgatccagctgatcgccaccaatgcatgcatgaactcgctgacatccaatgctgtattgttcgtgtgcaccgctagcctcaagcccagctaggccaactacttcctcgacgactcgccctaagtagtaaggctaatacaaagtctctcctacgtctactatgagctcgcgcttgcgaaccatccacattaagacaaggactcctctttgcactacttgtgacaataggaaagagcgttgccttccca

SEQ ID NO: 330214 - DNA, 215 bp, Zea mays
gaaaaaccggcccgacgcactcaaccgcccactcctacccccgaaacttaaaccattcacaaccaccccaacaccaatgggcacatgctacttttaaaggaccccatcccacacaataaaaacaaccaaacactacatacaccaaatatccactaacacaaaacccaccaaccacacaacacataaacattacaaaacaaacacaaaaacacaaa

SEQ ID NO: 330215 - DNA, 284 bp, Zea mays
aaaccatacagattcttcacacttatgttccatgtccattccatcgggcaaaagagcatttacacaagtccattttactatgcttattatgcttgcgaaaattctgccatttacacactgcaaaagacttgaatcagtattggacgctcatatgcaaagtgcttgaccattacactattactctcagaggctaatacttgacttcctcactccaacatacttatctatcaattcatgcatgctgaaaacatccataacaaccttcatataacttcatactatat

SEQ ID NO: 330216 - DNA, 264 bp, Zea mays
gcgacccatggaatggcagcactgacattctagccactcaacaaccaccaccacctgcgcccccggtcgatccaggcagtggcagcggctctggcggtcctggtgtcggagggggccggcacatgcatcacggccgcagtgctcaacacggaccgtctcgcgctgctggcgctcaagttcggcgtctaagacgacccgggcagcgcgctgtacacgtgacgtaacgcggacgccgacccctgcgcctggtgtcagcgtcacatg

SEQ ID NO: 330217 - DNA, 329 bp, Zea mays
cacacacagcgtacggatccggaacaattccgcggcaccagacgtacactgaaccaggggccgctcagagatatccaggcatacatcattaacagcctgtcacgcgtacggctggtgaacccagacgatgactcctagcacctcatgatgctcgtaggtcacctgctgctcacttacattgccagcttcaaaggcctgtactggaccacgtcatagccgcacttcagatatgaattcattcctggccctagctttcataagcacatggataaccgctcatactagaactagctcgcatgtgtccaaacttttgccataatcgctggctt

SEQ ID NO: 330218 - DNA, 153 bp, Zea mays
ctgcaaatgctactcgccctgtatcatctcattaatcagcgctggctgtagtggttactcgcaccgtgactcatacactatccagcaccctatctccagctcctttcagtttctacactatctttctcgtcacgttcgccctctttccccgtc

SEQ ID NO: 330219 - DNA, 140 bp, Zea mays
actatctctctcctaagtgcacgagtgtggttagagagatcttatgccatgtacctaagcgtctgatactcatgcttcatcagatgactccagctgagaaggaaatgttcactctccatggaaagcttgatttctacaca

SEQ ID NO: 330220 - DNA, 413 bp, Zea mays
ccgacgcgtggggtgcaacccttatttttgtcttctaataccatcacaacgcatgtggagtaaaccaagcttttatacgcttcatgcttgcaaaactttacttcttattctaatgaactgctggtttgtgatgaagttttgtttagggttcagggtttggcattgtgtataaaggatgtgtttaattgctcaccccttattttgttcaccttcactggatgatatacaatagtatgtgctttcccaagaccctctagttcagaaacatgaaatgctcctgaatctccttatccaagacatcttttggtaactaacacactgcaggcattgccagaaatagctcaaaagattacaccgctggagaatgaagataccttgcttgattcttctggtgagactagatcttcgcacat

SEQ ID NO: 330221 - DNA, 238 bp, Zea mays
aattcccggctcgacgcacgcgtccgacacgctttacctgctccataccttgcattccttcctaatgtgcaactttagccataagtacactcgaatactacagttgactctgaatttaaaataaagaatctgaccaaagattatattacagaactgatctatcgaacgattttggcctattatacacagatgctacactactacatgacactgctacaacatattagtttcctctatc

SEQ ID NO: 330222 - DNA, 125 bp, Zea mays
cgagctccagcgcaagctgttctagttctacgacactaaactgaacattaaaggcctattgaactcctgcgtgaagttcattccgtccatcttcgactaaccgccggaagccctgagccacataa

SEQ ID NO: 330223 - DNA, 290 bp, Zea mays
accggtttcggaattcccggctcgactccacgccgtgcgactgtactgatgcgacatgccttgttatagactttattactgttagacgattcaccaaatcatgataacggtggctatcaatcctgcgtggagcatactgaatgctcatacttagacagggcttctaaaccacatagggcaagggaaaatctcaaggatatccaataactcggcaatatattactttgtgtcaccctatcaggttctgatcctgcgttgtcactataaggattacaatctgcatccctaat

SEQ ID NO: 330224 - DNA, 161 bp, Zea mays
aggacgcgtgggcgcagttgcacagccgtactctctccacttgcattactagcgacacgggccgggcagatgcgtcgaacctctacgctgctgcagaagccaagcctctctcgtgcaacgagcaccacacacacacgggatggcactcctggtgctgctcg

SEQ ID NO: 330225 - DNA, 309 bp, Zea mays
aaaaaaaaaaataaaatattaaaaagaatttaaaaaaaagcatataaaacgtgaagataaaaaaatttgtacgctatcattagcctaatgcatcccttttaaatcgatacttgcactcaagtcactgatctatctatcacaacttaatgactgccaaggcgtcatcgattcctgataataccataattccaataaacaccatgatcatcataggcgtttactgattgcactctgtgtcgaacgtcttatcaatccttatcaccattccaaactgcaaatagaacacccattctcgaaatctcccaatct

SEQ ID NO: 330226 - DNA, 366 bp, Zea mays
gtcggtcgttgctagccttcaactaactttccagagagcgagcggacgggggaggaggggcccggataggggcagcagtcgaattgagaagaactttcattctggtcaaggcggtgtaccgttcctgccctctccgacaaagctgagggagctcgaggctatactgactaaactcctacgctttatcgacttccagaacatgcacaatgccaattcttacgcatgctcaggaagtgctcccaagaatcaagactatgggttcaggatgaacacactagcagcagacgacgcaaaggacaagaattctcaatagcaggcatttgttgatactgctgattgcaaagcatcagatattgatggtcatga

SEQ ID NO: 330227 - DNA, 85 bp, Zea mays
cccacgcgtccgtgaataacaacaggcatacaaataaaatacattctgctactatattagtgagagtcaggctcctaatttgcag

SEQ ID NO: 330228 - DNA, 438 bp, Zea mays
ggaattcccggggtgcgcgactacgagtcccgcgccggcgccgtcgccgcgccggccgccgcaccgaccgcgagggctctcccgtgctactgggccatggagcgccacgagcgcaaggaccggaacctgcccaccaacctggcgcccgaggtgttcgacgcgctcaccgacgtgctctcccgccgcgccgcgcgccgagggggcgcggcgatcacggccgccccgccgccaccccagctcgcgctgcctgctccgcctccgcctccgccgcttcctcctccatcgccaccgaagccgcccatcgtccagccccgcgctccgcctcctccgctgccgcttccggcggccgtgcctacgccggcgacgtccgtttccgcggaggagctgacggggtcgtcggagtccggtgaggacgacgactggtcggacgccgtggcg

SEQ ID NO: 330229 - DNA, 327 bp, Zea mays
aacgcctccgaagcaacctcactacgctgacatgattttacagtccatacgcttacctcaacgtgatcgaggctttaagctcgctagccatcagccagtacattgagggcaaacatggcgacaaactcgttaccaactttcacaagcagcttactgcgcagctcaagacgctcactgtcgacgacaagctgacgagggtgaacaactccttcaagctgcctgccaccgacgccaatcccatcgccagcaactccaaggtacccaacgacgcgcccaatagcaacacctcgcactaagcgaatgccaataccgcttccaagcccaagg

SEQ ID NO: 330230 - DNA, 396 bp, Zea mays
taccgttcggaattccaggcacgactgcctgtcccagatggatacggctacagacgctgcagtttcgaggctgacaaatgaatctctgggactgtcttctcagatgtcccacatcctacacaccttactcaaccgccacaccctgtcgatactcatggatctttgcaacctctaagccaaccccgatgcattggcctccctcgtacgctagctctcctgtgctgctcctccaaccttcaccgatggttacctccttcttgagcaacgtcgaccagtaatcagactcgtcaattacgcccacgtactcctacggccttcaccgttcctactgagctgctaaaaagtctgaatgcaaccggtgtagttgttcaagcatgacaagatcttgctgctgga

SEQ ID NO: 330231 - DNA, 395 bp, Zea mays
  unsure (1)..(395): unsure at all n locations
cggacgcgtgggcccgtctcggttctcaaacaccgccgccgccgttctggcaacatctggccgtgaccccgtccaggtcgttgggtcagcccctatccttcaccttcacgacttcacctgcttctccactgcgcgccccgcccccggccccgtcgtgcgccctgctcagatccatcgcacggggcttgccgcaccactgcgccaagcaaaaggtgggcggccagcggcgcgtgcgcagatcatgcactggtaggactaatttgcaagatcttggaccgggatggttcgcctgttagttgtcttatgaagattggtaaggtgagaatgacgatgaggaatatacagcgaanatcatctgccctcggttctgatgcaggatgtggatcttctttatc

SEQ ID NO: 330232 - DNA, 327 bp, Zea mays
ccgacaccttacctaacttttatccaatttcaactcctatatacagcgagatccttgggttatgtttctacgacatgccccctacgaaaaatatccatacacccaaattacatcccaactctactacttgattgacttccaacacgtacctgtccttaaccaatgaattccaccactaagaaactaaaacctctatctcatgaaaacaccagacttcttatcgaacataacactgacatcaacctacctataatgaccataaaatcccacttaaacattcaccctctttctatcttgaacatcacgaccacaacttaccggactacg

SEQ ID NO: 330233 - DNA, 406 bp, Zea mays
gaattcccggctcgacgcacgcgtccgatcagctttgaccgactctttatcactttacagactcccgactaataatctaggacgagttgattttgacacatctaatgcaccaatatttatactccaaataacctacctatgttcataagacttatacagcattcataaacttgcatactttattgaacgtttctattaacacagataattcactatcaagaagaatcaaaactctaatgaatgactatctacatactcagcttatggaactatttcaaagcctatcattctattttcgcaccataactcaatactacaaatctaaaatactcaacatataagatgcttaactacttttacttcatcaacatctcttggtcgacaccgatatctcccttaatcctct

SEQ ID NO: 330234 - DNA, 280 bp, Zea mays
cacgcttgagccacgccttcgctgtcgcatgagatgagcatcactatgatttcactaatggaatacaatggggtacaatcgtacagtatcttacgagaggtgaagtaggtgataaggttcttattggacatatggtagaaaattgtggaaatctcagtggactaaatgcatcaactgcattgacggatattattgacatcatctatcagacgacaggattgtcaggatgatgactaagttcatctttttgacttgaatgacaaagaatggagcagtgctc

SEQ ID NO: 330235 - DNA, 392 bp, Zea mays
taccggttctgaattcccggctcgacccactcgttcggcaatatttacctgtgatttacctcttgtttcttggccacatctacccagctgctccggattactaatacaactatgcacacatatgcctgcttttatcgctccttattttcctattctggataatctcctctcttgtctacactgtcttcatcactctgcacactgttggaacctaccgatctcatgctctgactgtaaagagttcgcgggaaccgttggatctttccgtcatctggccactgatcgtctgatatgttcgtgatctccccgaccccctgtttctactggtacacggagaaaccgacatatgatatacctgttctctcgcgacactcggaaacacacgtgttatc

SEQ ID NO: 330236 - DNA, 195 bp, Zea mays
gccagcctttcctgtccctctccttcgattgctttcaaatctgcatcttcaacattcggtcacggatgtaatcgcttctgctagagacctacatctgatacagtacctataattaccggctgttctagactgtcccaacgatgatcaccgtatgcactacggattactgacccatgctcttgatctaccgctcaa

SEQ ID NO: 330237 - DNA, 147 bp, Zea mays
ggaattccaggcacgacgccacgcgtccgatgagatcataccatctaccaatctctttatcctcccaaaaatcaacatctcggaaacggcaccatataacaaggctcagatacacaccgaacacacctactcgcaatcacacgatca

SEQ ID NO: 330238 - DNA, 415 bp, Zea mays
gttatagagttcctggctggtggcacctcgttcgtgactgagatacgcggggactcgcgagcgagcaggcagaatggagcgccacgccgagaagccgctcctcgtgctgccctcctgcctcctcctccttgtcctcatcctcgccccgctcgtctccgccgtgcccacgccaagaagcctgcgcctggggagccaccagcagcagcacccgccggctctgaagctcagttcctctcaggagacgacggcgatcgcggcggcgatgatgaacacgggcaggccgacggcgagggtggacgtggaggtgaacgactaccagccgtccggccccaacaaccgtcacgacccacccaagggtcctggaagaacttgaacggtgctcagctggacgacgtacgcgccccaataatccttc

SEQ ID NO: 330239 - DNA, 417 bp, Zea mays
cggactcgtgggttcgcacgccgccccgtgccgtcctactcccagatctcgaggtctcggggccggcaccattcccccccgctccgatacacgccgagcgcaccgattgcaaatcagtcgtctccgatgctcctagcactcgccccgaccgcggcgtggagaggagaggagatcccctctgacgctgtacgagacagggcttcaagaccgacctctggcgcggaggacccataagctcggcggcggccgccgcgacatgaatggctcgaccatcccttcagtcgcgatcatgccctcgccggtcttcctctggcagcttaaggttgtgttgccacttctatgtggcttatgttagtgcaagataggttgggactcagttatgagaatgagcgttgatctcagagacctatttcttta

SEQ ID NO: 330240 - DNA, 209 bp, Zea mays
ggaattccaggcacgactcacgcgtccgttgaaatctgcactgcgcgctattaggtttgggtacaagctcttaagctcacgggcccgggacatttaccattcgatatgctaaaaatctacataaaatattgcaccacagagctccgccactactgctgcatccaaccaatgctgctctgactatagtacatcatatcgccgatgtactt

SEQ ID NO: 330241 - DNA, 323 bp, Zea mays
cacaaatctgcgctgcgcgcaagaagggatgggtaaaagcagttaagcttgcgcgcgcgggacagattccagtcttggtgcttagaatctacgtagaatgtagttccgcagggctccgccactaccgctgtgtccaaccactgctggtgttacttcgctgcttctactcgacgatgtactggatcgacggccggcagcgatgttccgacaccttcaatgcgtttgcgcaagtgctacggatctgtacatgcacgcgtttttgttcgatcgctacggtcacgaagtactgtctttttccgagacatactgtgcgtattgagctc

SEQ ID NO: 330242 - DNA, 255 bp, Zea mays
ggaattcgaggcacgagccacgcgtacgcacacgcgtccgcccacacgttcgcacttatcgtgcgcccacgcgtactgactagagatcgtatgctttccggccgactacattgctagccaaacacgctgtcggccatagccctctccaagaaaagtaagcaataactacgactgtctgagttcacactacattgaagctgtccaaaagctggcgcagcctttcatttatcactgaccacggaagcattgaccatg

SEQ ID NO: 330243 - DNA, 340 bp, Zea mays
cccactcctgcgtcgcttacttcctctattactacaaaagctccacctacatcataccgtgccatatcatatcatacacgctcttcaactacataccatatgctacagcaacatcactccatgtacaaatcataaaaacaacgccattctaactctccagcttcgatttgaccatcgacaagcgctaccgcaccttttactctactcgatcacaatactccttatcccctacttcaaggcatcaccatttgaagctgaccaagcgctatgacatcggtgcggacaaactgtctattgccattactcaaaccatcctaacaccctacctgtccgaacaaat

SEQ ID NO: 330244 - DNA, 166 bp, Zea mays
tcgacacctactaccactcgacttagattaagtacatgtacaccccttagccgctactgtccgaccaatatgctacaactattgaaggctaccaaagctattcctctgaagaaggaccacatcgatgcccaggccacacaacgctccaagtactcataatttccgg

SEQ ID NO: 330245 - DNA, 428 bp, Zea mays
cagacgcctctgccgacttatgatccgactcataccctaaaactatcaagcacacttggagtagctacaagtatgttagactatcagaactactgcaacctatgttcataactcctactgctcaagcaacaacacactattccaacttgactaatactgcaagaccaacgatactaactgactcactgtctgttaccacaactgggatctcgattgctctaatactttccactagtaccagcaatggttctaactcattcacttgagacccaaggtcatatacgagatacggcaatcataggatacacctgatcatactgtcactgagctcgtacatctagcactctgtcgtatatgattattcggccaatctaatgacgatcaacacgcacatccaggacaagtagctctttttgacttagagcatt

SEQ ID NO: 330246 - DNA, 343 bp, Zea mays
ggagttcgttgaggagtcacagagaaagtttggtgctactggtgaggcaaaggtttccttccagggttcgtcaggaacgaggcgtgtcgcaatctgaagcctttcgtcggttccgtctagctgcccccctctgattcggccatggagcggcagtccagcatccggctggtcgcgctggagaagctgaggagcttccgggggatggagaagcagaagagcttccgcgggatcatgtccctggagcggctgaacaaggacagcccggtgaaacgcggcgacacgccgctccacctcgcggcgagggccggtagcgtggcccacgtgcagaagatcctcgcggagc

SEQ ID NO: 330247 - DNA, 309 bp, Zea mays
ctgagccatagctgacccagtgagggtgtggctccggtaccagcctgagtgcgtcatgggctcgggaccatcgctacatcagtgcttctgctatattgcgttgaccgactatatccgcagacgcatgtcatcgtctacttaacctgcagatctatagctgtttctaccttggggagtagcttcataacatctggaataccattgaatgtgacacttcaccgatcgaactcactaatttaccacattcatgggcactcaacctgcatgcaataaatgtatcactactcaagtgactaactactacacatg

SEQ ID NO: 330248 - DNA, 450 bp, Zea mays
gtgcatgcaacctctcagattttatccagggatgacagggaaagtcctatttctcacaggattggcagaaatgattctcgcaatgattatgaaaaccagcattcaaaagatgctggaaagagccagtaccaaattattcatcaggaagattttggttcaccagggcaaaagaaacatgaagatgctatttcacaacagccacagatattgactcctgtccagactactgctcttagcatgcataatgaaaaggtatctgaaatggacagtcagaatgctccttcaagcattggaggtttgagcatgcaatcaggggattcgagtgctaacattatagcagagcaaagcctgggtcaaatacttcagagacatgatccaatttctcatattcctgggccacaaacgcttccgatcaccacacaaccacagaatgttacgtcttcattcgca

SEQ ID NO: 330249 - DNA, 267 bp, Zea mays
taccggttcggaattccagggtcgacgccacgcgtacgatgcatggaaactctcgcacatcacacattgactactaggcacgccctatctatgacagggctatccgaaatgactatcgcgatattaatgcttactaccaggaccgacaagctttacagagtcagtacgatctgaatgacgatcgcaatgccaactcacgacgtgcacgttacacagcacgaacactagttcacatcagccacgaaactaaactcacttccagactac

SEQ ID NO: 330250 - DNA, 337 bp, Zea mays
accaattcccaattccacccacgcgtcacgccacccgtccatttctacattgagagcttaccttctttgactgtgtatttatatatatgtatatgggttattccattacaaaatagatccaatacataatctaaaaattcccacattaaaacacaaacccgaactacattgaaatctaaccgattttatactaaaaaccggcttaacggcatcctaaaacataagtgttacagtgatacaaatacccaactaaccagattacacatcttaccaggcctgttttcaactactagcctttttatcttcttgcagactctaaacatcatgaatcattaac

SEQ ID NO: 330251 - DNA, 263 bp, Zea mays
attcccggctcgacccactcgttcgcccacaccttcgcccactttttcgccctttcgtcctctgctggcttctgggccccctggggttcttcttcgggttcttgagggtctcctttcttcggttatctgatcgagctgatcgagatggctgcttcatacctttagtaccgctgcttcctcgtctggctcacctgctacacactacgaccactacgtccacaacgccttcagcacctacgcttaagtcctagatcataatatca

SEQ ID NO: 330252 - DNA, 384 bp, Zea mays
atgtttatatatatagatataggattattccattacaaaataaatccaagacataatctaaaaattaccacatcaaaacacaaaccggaactacattgaaatctaaccgattttagactaaaaaccggcttatcgggatcctaaaacataggtgttagtgtgttacagagaccgaactagccggttcacacatctggcaaggcctgttttcacctactagccttattttcttattgcagactctaaacatcatgatgcattaaccctagatggaggtccttgggcatgcccatacattttttccccatattcatgccgtcggatgccgtagatgccgcatatagcatcaatgcaactattacatagaggaattaactacacgta

SEQ ID NO: 330253 - DNA, 268 bp, Zea mays
attcgagccacgcgtcacgccacccgtgcctctcaagctatcacacacacgctacctcatggcatttgactatctctgcatgtgcattattcaaaaagtatgaaaatcatgaacgtaatcaaatttcaattactgatgcacattatcctgagctacattctacatacaccaagcttatacagaaaaccttctgtcgcttatcctaaaacgaatgcttgagaaacttacacacacctgactgacactcacaggcataattgtcacccta

SEQ ID NO: 330254 - DNA, 365 bp, Zea mays
accggttcggaattcccggctcgacgccacgcgtccgctgacgcataatccacaaccgtaacgatttctacaacacggacgtacacataagcagaggcacctttaactaggcccagggcataaccaacatcaccttacactacatagaatactacagccaacgtatgaattctaccaccacatgttgctcatatactactaacatctacaattacaccgtacctaccatatgcatatactctactctgcaacaccagctcatgattaactagttcgattctgcccctaactttcagaaaaccataaagaaatgctcatacatctactagcttaaaaaattaaagacttatttaacaatctataac

SEQ ID NO: 330255 - DNA, 211 bp, Zea mays
ttccacggctcgacccactctttcgctgacacatactccgtctctcctgctccttgtgcaacattatacatcggggatcctagagactgacatctagttcgcatgaaatacgaatgctcctgaacaaacattcctattgctacctgagctaacgcaacacttttgacttatacacatagtttctgaccctgcctttgtaatccttagaata

SEQ ID NO: 330256 - DNA, 90 bp, Zea mays
  unsure (1)..(90): unsure at all n locations
taccgtttcgnaattcccggtcgactcacgcgtccgacggcgtctaatagcgatagactacgcattcattgatactgtgaatacttatac

SEQ ID NO: 330257 - DNA, 352 bp, Zea mays
aattcccgggtcgacccactcgtccggagacgccatgtttgtgttcaaccttcatttaaggaggtgagcgactgctacaatggcgggatgtgaccctcctgcagcggtgctccacgcgaccaccgccgtcccaatatacgccagtatagtaggtactcctataagttcctacttgcgtgaaaacactaccactaccagtcatggcatgactcagagtccggacatgtgtaggcaacatactgaagagatggctcctgtcgtcattattagcatctacgacgatgcgtcactgttggcgatgcaattaaagggcacgataagatactgctccactgtcacactattcgtggag

SEQ ID NO: 330258 - DNA, 333 bp, Zea mays
gagaggccatgtatgcgcacaactaattttatcggcgggaagatacacccacaatcgcgcagattttcccgccaccacgtgtgcaacacgcctccactaccgcaccacaaaaccccgcaccactaagtactcctataaatgcctacgagcgtgcaggcactaacactaccaatcaggacaagactcgaagcccgcacaacgaaacgcgatttacagcagctaaagctcctgtggacattatgatcatgcgcctcctcctgtcaattctcgaagtgcaaccccaagccacgagcagacactgctccacagacacaccttccttggttctctccc

SEQ ID NO: 330259 - DNA, 316 bp, Zea mays
attcccgggccgacgcacgcgtccgtccgagggatcactcttcgtactctgacatgtttgaagaggcgatcgttgccctaaagcagatgatttcttcaagctgcgggggcatcatcaagtacgtcgatggcaaccatgacacgtagctacccaccaaattacttaagcacctcactgcgcaccttaagaagctagatgacgccctcaaactgactaaggtgaagaactccttaaagctgccggtcaccgacgccaatcccaaagccgacaagtccaaggcacccaaggtcgcgcccaatcccaatccctcttcgaa

SEQ ID NO: 330260 - DNA, 424 bp, Zea mays
cggtctggaattcccgggtcgacccactcgtctcgaccacgcgttcggcgagcgcccccttttatttttttattgtattttttttttatggggaggaaaaaaaaaaaatataaaaaaaaaaaaaaaaaaaaaaaaaaataaaaaaaaaaaataaaaaaaaaaaaaaaaaaaaaaataaaaaaaaaaaaaaaaaaaaaaagggtgggagattaaaaaaaacaaagttaattttctggttcaattaaataaatagatcctttatattagacactaaattaaatgcttacttgcgtttacaaaaaacttggtatgataaaaaccttctgcaaatcaatcttatatgtttttaaaaaacatttgaattccgaaacttggagagttctaaatggcttttttaatttgatttctaaaactacattaatgg

SEQ ID NO: 330261 - DNA, 354 bp, Zea mays
aattcccttccgacccactcttcctaccaaaacatctcccaatctcctcctactttttccttcttcacacctttcttcattcgaggcgcttttaaaaattcaccaagaaatcctttccccatcccaaacaaattatcataaaaaatcaacttcctcaataaacctttccactttcccctttccaaacttatctgctacttcttccactgtaaccaaccttttatcttcaccaatttattcccaacgacactcttacccaacacctttttcacttttaaaaccatacaatttaattggctattcctcttataatttcatactacatatcttaaacactttactatttcatcactt

SEQ ID NO: 330262 - DNA, 254 bp, Zea mays
ctcaaccaatccttccttagaacttattgatcttagttttcttcctttaatctttatgcttacatcaagtgaaatgttcaaacaatacttgctacctcaacagaatcacccaaaaaatttcctatagcataaagccctttctaaaccctctaagaaaactataacgctgtatttacttcccattcttccttttattaatacctaaattcagtcttcaaacaaatacgaaaaactgaacttaatctcaaccttcc

SEQ ID NO: 330263 - DNA, 391 bp, Zea mays
cggtccgtattcccggtcgaccacgcgttcgccacgcgtagtcgttcgcgcaggcgtaccctttgcgaacgcacgtgcagctgatcccgggagccaacgtaaggtctcacggaatgcagtacttcctacaaccacgtttaacatgtgagcctatgcctaccaccaggagtcacacatctcagacagagagcttcaacaggagctggtgaaagaccgaatgcagtaccagccagcacagctgtttatggacgcccacgctgtatcacagatgttccctgacttgaagacttactactacataccatatggtgtcccaaaggctgatcccgcatatagaaccgctctgcattctatcatgattcatgggatcgcccctttcactggctttgca

SEQ ID NO: 330264 - DNA, 218 bp, Zea mays
cctcaacataagcacccaagaaatttgctattgcataatgccctgtctaaaccggcgaataaaaccagaaagctgtatttactgtcgattctgccttgtatgagtacctatattggggcttgaaagaaagatgaaaacgtgaactgaatcttaacgtccctgtatcctcctccttctgctatagagcccatctcgtcatgctgtcaaagggcaactac

SEQ ID NO: 330265 - DNA, 187 bp, Zea mays
gcgtacgaccgggcgttccagacccactcctgggattttttgcaaatctccatagagaacattcactgcaagatttaatagctgatgcgcgcaacctacatcacttatggcacccagatggaccagactattactatcaaactaaacgcgcctgcgagcacgccagatggacgactagaacatgctc

SEQ ID NO: 330266 - DNA, 333 bp, Zea mays
gaattcccgggccgacccactcgtccgaccaggcgtcaccgcgtatgtataacttttcggccgcttctgtcaagctcttaatggcggtgatctagcacctgccagtggaccgagacccgttcagatcttgcctcaccggctcgctctagctatactgacccttgctaatatcaggttctggaagtggcattaaatcaccattgaaaatggcctaaacagacgattcagcactgcatggactgactctatacttatgcatcttcaactagcatacgtcttactaaaattctctcttgtgaccaacactcactaatactgaatcactcttcttca

SEQ ID NO: 330267 - DNA, 337 bp, Zea mays
gaatacccgggccgacgcactcgtccgaggggacttctcggtgtctctcgaacgtttcgacgactacgaccaacctgccttacttgatgttttattaactctcagggggccgtgacttcttaacctaatgctcgatgatcacaatgatttgattctggtctctcttaaccttagtcatgagctaaaacttgagattgactaattccatacagatacacattttgatagcacccttcgtgaatcacctgaggatgatctacatggacgatcccacatgttttataatgacaaccatatagtattcgatatcacagagggacacttctagactgatgac

SEQ ID NO: 330268 - DNA, 388 bp, Zea mays
gatgtgcatgctcctgagtgtggcacttgacgactccaacatcatgcctggtgctgggcggattaccaacagcttcagacggctgacacatgataagttcatgggcgaaggtcgactcttgggggaactggtcgtgtctacatgcgagcttgttgagaggcgccacatacggtccatctaaagcgctagcataacggtgagcattgtgtgtcaagtgccgatgttcgtgctgatcgcagtctctgacttcttgtgagacatcgcacagctggagaacgactacagtgtggccaacgccgagatcaacaggatatgcaaggtcgtgatccttcagtcgatcatggttgggtacgacgttaactatataatgaggacgattgagaacttc

SEQ ID NO: 330269 - DNA, 420 bp, Zea mays
cggtctggaattcccgggccgacgcacgcgtccggaaggtcatgaccctacatgtccaacatttttcagaccgtactcagactgattctgggggtactttcaaaacctacacggggatgtcacatgccattctctgtacgcgagttgtcaattccgaaagacaacgttcacatgtacatagctatacgctgttcgcacttacgtacccacagtctaaaatgttccctgctgtcagggaaaagagtgtggtcgttgcactgttctactgttcaagatgtctgatatcatgtacaagatacagacacttctgagtgtagcgaccttgttcccacctgagctcttaaagctagacacgctgagtaactatggatggaactcaattgattgaatactcatttatgactatgcgaagactgaaaa

SEQ ID NO: 330270 - DNA, 354 bp, Zea mays
ggatcgacccacgcatccacgcacgcgtggagctcaccaactagccgaatctttagactttatgagctgcagaggagatgggggacgagcactagcatccacgtacgccgactacggagagcgatgattcgccccatgacactgttgctcgtctccgcctgctgcgcgctggcggagccggctgacgaggtcgatactgacggtattgtccagaacgggaacttcgacgatggcccgaccaagtctgcgctggtgaacagcacccaggtgtccgacgcgcacgccatgcatgagtgtgacgacgtccgacttcatggagtacatcgagtacgagcccaaagcgtgcgacatgct

SEQ ID NO: 330271 - DNA, 303 bp, Zea mays
tccggtctggaatacccgggccgacgcacgcgtccgctcggccggccgccggcagccgcccgctttgtcaaaggccgcggcagcgtccctccgtcgttcgtcttcagaggtggcgcggccttgagagcatctccagcgccaccatctcgccccggacgcgtccctcctctacatctccgcacactcagaccttctccatgcgcgcgaggaggtcgcggcagagcgcgctctgcacctagaggcactggcggtgtacgcaaaggctgtggacatggtggaggaacaccatgcggttgccggccc

SEQ ID NO: 330272 - DNA, 446 bp, Zea mays
cccactcgtccgagatgcttatgcagagctacagtcccgtaccacctgaacttgcaaggcgatgaggcatcaaaatttaagccaggctcaattcctgatagacctccaaggcgaaatgatacagtctttgcaaatcattgaagtaatctacctgagaagagactgaagatctttgaactattatgagctcaacttctacccgatggagggacctagtttagtatttatgagagggcatatattgtatcagatcttcattatggagattgatcaattgtggttcacatttcattgatctgaagaggtgctgttaatttcttatcattgccttttgtgttcccgttatgtggtttaatgtttgattttatagttccatcttgcttgtgttcagaataatatggtttaatggttaaccaatatgcattaaacttctgactagcttatgt

SEQ ID NO: 330273 - DNA, 442 bp, Zea mays
cggacgcgtgggcggacgcgtggggtgaatagtgagatgcagagaggacgccaaattacggcgcttgctaatgatctcagcacactggagaggacactagggcagtctgggctgaaggagcgggagatgctggcattatcgcacaagcaaaggcagctcaagggtcagctgcgagcattgtgtggctatgactcattgaatgatgtgttggattatggggataagctgcttttggcaccaccgctgatgcatggggagtggctcccacggacggcggtgtttgtgctcgtagatctcatggttgttatggtaggtcgcccgaaagggatatttaaggagtgcgggaagagaaataattcaagactccggctcatccatgatgaacttgtgaagcttggcattggggatggtgtgatggaggcagatttggaacacttaacaa

SEQ ID NO: 330274 - DNA, 239 bp, Zea mays
gacccacgcgtgcgtgtacgcgtgggcggacgcgtggggagattagcgatttgcatagaggacgccaaattagggcgcttgctaatgatctcagcacactggataggacactagggcagactgggctgaaggagcgggagatgctggcattatcgcacaagctaaggcatttcaagggttaactgcgagcattgtgtggctattgactcattatatgatgtgttaggtttatggggata

SEQ ID NO: 330275 - DNA, 252 bp, Zea mays
gaaatgtcatgtctgcgttcaaatatcagtctacgtgcggaacgacgggggcaatagctggaggattcactccaccatcagtgcaccacgccaccatccctgcctcaatcaacgtctcatcattacggacgcctataaatgcctaggtgcgtgcgggcactaccactaccatacagggcatgactctcaacccggacaaggataggctacatacggtaacgatggcgcctgtggacatgatgagcatgtgcg

SEQ ID NO: 330276 - DNA, 56 bp, Zea mays
cccacgcgtctgttcaagtgtacgggcactcgtgcgacgattcgtccgcgagcaca

SEQ ID NO: 330277 - DNA, 356 bp, Zea mays
cggacgcgtgggctcactggcggattagatgttcaaatgttcctaagaaatgtaggaaggggacagcaggatcattctctcttcggcgactcacgtaactgggagggactaataacttgaaatcaccacacatgcgcaactttggatgtccaggtgcttcatcttcgattccccttaccactggcagttctaggggaccaaatcgacgctatgcttcacgctctgtacctggggttgggaatttgctcctaggtcctcaaattgacgaagctgaagctcatgctgtttcactaggtgctggttctgaaatcactgcgttcatgcttgctcctgggactgaattgccttgtacagtg

SEQ ID NO: 330278 - DNA, 152 bp, Zea mays
gcttatcatggcgatacagacgcgcactgtcttgattcatactagaacgcgacacgttgggagccagatgctgatatacggcccgccccagcctagcacaatcgcaggccctatgacgcaaacgtgcacgatattagcctagagcagaggta

SEQ ID NO: 330279 - DNA, 64 bp, Zea mays
ctttgatgttctcagaaactcaagttcagatctgatagtgcatggaaaatcatgaaccctgagg

SEQ ID NO: 330280 - DNA, 293 bp, Zea mays
ccgccccggaatttccgggtcgacccacgcgtgcgctctcgtttcggcttccgaccacgctcctttctaaattaccccaaaacctgacgagctggacgaccgggccgtttctccaggccgacggatccgatgcagactactaggcacagacgggtatccaagcgcgatgctgtacttgtgctcagagatcggacaccctacctatggatcctccgtcattgtttgtgtactaagtcagaatgtgtatgatttagcaatggctaatgcaagctcccctgataatatgtcttaca

SEQ ID NO: 330281 - DNA, 246 bp, Zea mays
tctatcactagcgttcattctttcctcactttgatcacataaaccttcggggacacaacctggatacagacttgatgctcttgaacccatatctcctatcgaatctgataaagccactatacatgtaactggaccttaagctggagatctctagttgcacatcgctaatcacggctacacaaacgcttcaggctcttgtgctgccatcatattcatcagcggtcaatccgcaggcacacatgtcgg

SEQ ID NO: 330282 - DNA, 275 bp, Zea mays
cttctcactaatattttctatcttaagttcaccttttaatctcatgtacctacgggcgctctagtgctagtatcgaggatatagaacacaatctcaaatttaataaagcgctctataacgccaacattcactcgcatcggcatctacgccgagaacgccatgctcaagcgcaccgagcacattaactacctccgtcttacctctcgcctagacaccctcttaacccgccttttacacgcatgcctagattcacgtcatcgtcaaatccattcaat

SEQ ID NO: 330283 - DNA, 275 bp, Zea mays
ggacgtactccgtccgtccgctacggttctcactatttcctctcgaggctacgagaccgggtactctttgggtcatcccacgatggtacgctactctgggctcggaggaccggagagaaacgctcgccgacatggtgtgcagcgcctatctggacatgaagtgtatgactcttctcgactgcgtcatcggctataacagtgtgcccatattctacatcagtgacatgatcaccacagactacatacctacgatgtgctacaatatcagcgccaat

SEQ ID NO: 330284 - DNA, 430 bp, Zea mays
ctcctcgcattttccttgcaaccgattgcctatccccctcccaaccaaagaccgatggcgcccaaggccgagaagaagcccgcggcgaagaagccggtggaggaggagcccgcggccgagaagacgaccgccgggaagaagcccaaggcggagaagcgggtccccgctggcaagtccgccggcaaggagggcggcgagggcaagcgtggcaagaagaagggcaagaagagcgtggagacgtacaagatctacatcttcaaggtgctgaagcaggtgcacccggacatcggcatctcctccaaggccatgtccatcatgaactccttcatcaacgacatcttcgagaagctggccggcgaggccgccaagctcgcgcgctacaacaagaagcccaccatcaccttccgcgagatccagaccttcgtgcgcc

SEQ ID NO: 330285 - DNA, 189 bp, Zea mays
ctcctcgcattgtccttgcatccgattgtctatctttcttccaaccaaagaccgatggcgcccagggccgttaagaagcgcgtggggatgaagccggtggaggaggagcccgcggtcgatatgacgaccgccgggaagaagcccatggctgataagcgggttctcgttggcatgttcgtcggctaggat

SEQ ID NO: 330286 - DNA, 203 bp, Zea mays
cccacgcgtccgtccacgcgtccgccgattcgctcgtcgacccaattcggtccactaaggacggtttctggattgacacggaattcacttggggctccatgtacatgcagaatgatataccggcttactacatgcttgttactgcctgacatgtattctacacgtgtacctctatgcccatctgtgctaagtacttgctctac

SEQ ID NO: 330287 - DNA, 142 bp, Zea mays
ttcccgggtggacccacgcgtcctccatcttaaagcagcgtgaaggctaccgatggtagagagcgcccttctggggacctcggggatgctttcattctcgatcttcctgatccaaatgggcctggtttcactcacatctacc

SEQ ID NO: 330288 - DNA, 296 bp, Zea mays
gagccacttcggcggccgcagtaagaagctttgggtcactctgacgtgtgtaactcgaagcccgaggactactgaccctgatcctgcgtatgccgtgactgtgctaacacacatggacagatcactatgatcgggctcacgtgctgaaggctgcgctttggtaacaacaccatagacattatcattatcaaaaaccgcttattgcatgtcaacatgctaactgaattcctacttgcagactgcggtgtaaaggctaggggatatacgacatgacagtatgtatgagatctcctgca

SEQ ID NO: 330289 - DNA, 148 bp, Zea mays
gagagacgtcgaccttagagctaagtacttttgggttacatcgacatggcgatcactcggcctcaggtcgctttctcctggctcggggtgttcctcctccttctggttccagacggactgactacgacgttctcgctgactaacatct

SEQ ID NO: 330290 - DNA, 320 bp, Zea mays
cagacgcttgtaccactgaaagcaacggttcagactttcaacactggtgaaaagccagtagctaaagcagatcgctgtcatggcgaccgctaatggtgatgcaaagggtactggtgccactcacggttacagtggaactgttccaagccgacggagcttacgactgacgcccgatggaacttatatggagccgttgctaggaggcgtgacttctgctcgttacctaaaaaccacatattatggagatgaccagctcaggggcacaatgtgcatgggatgatggatctgtttatgcaaatgggcaatctagaacaaccaca

SEQ ID NO: 330291 - DNA, 260 bp, Zea mays
tgccgtaccggtccggaattcccggggcgatgactgcctactcaacttcataatcaaagctgttaaggactttgcttccttcagcgatgacctgggatgcgggcttgtctccctgggtgcctggatatgaacgctaccttccacgtatctgcatatggggtaatctcccaatggatgctgtgccactaggggtaaacttaaggtgaattggaaccttggtgcgggtatcgcaaattaaaacctgaaccctgccgtgaaaa

SEQ ID NO: 330292 - DNA, 127 bp, Zea mays
attctgacatatttaactcgtttgtcttttttcccttgctagttatgaatagaaacacaggaaatagagtaattttcattcaacatcaaatttttcttgagtaatatctattaatcttatccattct

SEQ ID NO: 330293 - DNA, 181 bp, Zea mays
gtcgcgggtttctcacacggcactcgagttgctaaccctgagtctacacaggctcgaggggcccatctccagctgacccgggccgaataacgtgtgctgtgcagacgaccttgttagccacttgagaacgcgccaccggatccgacccatcctgctctggagcacacagtgtaccacatgg

SEQ ID NO: 330294 - DNA, 59 bp, Zea mays
cgtaccggtctcggaattgccggctcgacgtacgcgtccgattgaagtgtaatgcattg

SEQ ID NO: 330295 - DNA, 285 bp, Zea mays
gcaaacccagaaaggcactaggacagacagaaaacaggagcgaggggtgcgtggcagacggtgcggagacagaagcctcactcctgcacactatgagtcttgttccagttcgagcgctttcttggatcgtgaggctactactcgtgctgtttgcagttgcatagaactgcatcggccgaagtgtacagcacggtttgttggccttgcccatgcgctacggtagggtactgagacgagcagcttggagacagcaatggatgcactcattgacgctgctatcgctgt

SEQ ID NO: 330296 - DNA, 265 bp, Zea mays
cccacgcgtccggaggagactcctgcggatgagcaggaggcagccgccgaggaggaggctgctgctgctcctcctgctggtgccgaggagcccgccgcggccgagcctgtcgccgaggcagaggctgctgctcccgaggagctcgccgcggacgagccggaggctcctgctcctgctcctgctggtccccaggagccggccgccgaggcggatgctgctgctcctgaggagcccgagaaggccagcgagtgaggccgtgcgcacg

SEQ ID NO: 330297 - DNA, 85 bp, Zea mays
gaattcccgggccgacccactcgttcgctgatataatgactgaagacatttttctttttacaactaaactccttaaggagaacag

SEQ ID NO: 330298 - DNA, 317 bp, Zea mays
cggacgcgtgggcgctcggccggaggcgttgcacctgcacgcttcagcagccgccaagcctgtcttgtgcggcaagcaccacacagacacccgatggcgctcctggtgctgcgcggctgcgccgtgccgccaggcgtccacgcggacccggcggagctccgactgatgcctccggcgctgacgccgcggcggctcgaggacgtcgtctcttctgcctaatccgagctgttcggagaggtggtgtcgttgtcccaggacagaacgcactactgtaccgctggcggtgccaacgggcacgccatcactgccgtcactga

SEQ ID NO: 330299 - DNA, 56 bp, Zea mays
gccacgcgtcgcggccaaagacttcggtcctacccagtaagcggccgccgacgcca

SEQ ID NO: 330300 - DNA, 90 bp, Zea mays
gacacgcgtggcggccatacacttcgggtttttcccagctacggggcgcaaaggcaaacggtcacatttgaggcggcaacggctcaccag

SEQ ID NO: 330301 - DNA, 236 bp, Zea mays
ctgacgcgtgggcacacgctcagatgcgtttcacatgcttgctggagcagcctccaagcaggtgatgtgcggcaagcacctgacagacacctgatggctctgctggtgctgcgcggctgcgccgtgccggcaggcgttcacgcggacccagcggagctgccgctgatgtgttcggagatgcctccgcgcagggtcgaggaagtagactcttctggctaacctgagccatccggaga

SEQ ID NO: 330302 - DNA, 238 bp, Zea mays
cggacgcgtgggcactcgcccggaggcgttttacatgcaagctttagcagccgccaagcaggtcttgtgcgtcaagcaccacacagacaccggatggctctcctggtgctgctccgttgtgctgtacctcctggcgtttacgctgacccggcagagcacctattgatgactctggcgctgccacctcggctgctcgaggaagtcctctattgtgcctactccgagatgttcggagagg

SEQ ID NO: 330303 - DNA, 260 bp, Zea mays
cccacgcgtgtgtggacgcttcatgtgggctgactcattctctggtaaagttacagatgtgatcgattgaggtgtgatccgcgatgctgtcggattctctcatgtacgatctctgggacaggagagaactgtggcatcttagcctcagctatcttgtacgcacgcgcataagcagctagtatgaccttgacaaatggccgtctgtacacagcatagctaggggagcatgtacaagatcaaatagcacttagagaacggca

SEQ ID NO: 330304 - DNA, 275 bp, Zea mays
atcacgtacagctcagccctccaccggtacagacggatcagtcggatcgagcaacatcccgggactgctctgtcaccaggtctttcggacgatgttctctcgccaggagtaaccagccatatccagcttaactatgagacgctaacacggctcctaacgctgctcctgccaagaagggatatgccaacacccaggccttaaaagtagccaaagctgcataatcttgatcagaccattggaccatgcacatacgaacgtacgtgacatttcaccac

SEQ ID NO: 330305 - DNA, 441 bp, Zea mays
  unsure (1)..(441): unsure at all n locations
atttattttatatttattgattttgaatttttgccattaaatcttcttgttaaattttatataatatactattaggtgagtgcctgtgcgttacaagcctgagtttctcttggatatcattctggatggcttgcggatgttgtcattcatctcataatcgtataacacatatttgtatatataagttatcaagatattatatgttccagatgtaatgcacggacactgacctatcttatataatacactaagtgagtgcccgtgcgtcacaggcccaagtttctcttcgatgtcatctcgaacagctcgcatatgtcatcctctatctcataactatataacatatatgtacgtatataatttattgagatattatatggccttgntgcaacgcacgtgcactgacctagtaatggtttatgagcantaagtgtgttggat

SEQ ID NO: 330306 - DNA, 345 bp, Zea mays
accacgcgtatgtccacgcatcctgaggttttgctgttatacgatctcgatctattatgggtgctatactatgcggggagtgcctgtgcgtgaacgccatggtctgtctagaatatcagacctggataggaccgcagatgtaggcatgcatttgatagtcatagtacacatgtttgtacttctaaggtgtcaagacattatactggccagatttagtacacagacgctgcactcactggtgtagtacactaagcgagggattttacgactaacggcggtgagactatgctatactgctgggatcccgtatggtatgacaagcttgatggcctcacggtatgatac

SEQ ID NO: 330307 - DNA, 262 bp, Zea mays
atgacgcgtatatggactcattgtcaatctttgccaattaatcttcttgataaattataggtaatatagtaatatgatactgcctacgcgctacaagattcaatgtctattgtatatcatatctggacgtatagcggatgtagtcattgatcttatacacctataacacatatatgaatatagtaagttctcaagataatatatgtgccagacataatgcactgacactgacctatcttatataatacactaagagagtgcc

SEQ ID NO: 330308 - DNA, 224 bp, Zea mays
accacgcctctgtccgcgagggcagttgtgtgtaacaccaacactcgcagtagcctgcgcgattcagctatcactccacgcctgactgtactaataagctagtattgatgatcctatcgtctagcacagagacatccgttctcgagatgagtagctatatgcatattgactgggctccgagttgccattgctgcgcctaggccgactgttcagtcagcctatac

SEQ ID NO: 330309 - DNA, 219 bp, Zea mays
ataacgcgttgcagtacgtgtctgtctgttcgttctcctcagactattacatccaagagggacttcgccatgtggtactcgttccagaaccacaatgactgcaccgcctacactaaatcgttcgagaacaaccctaaggagcctaggaccattgcgcaacaacaactcacctgtgatgaacaaaccagtatgcacagaagctatggtaatgtccaacca

SEQ ID NO: 330310 - DNA, 247 bp, Zea mays
cttaagcgaaagagtattagatcttaggtgaaattgactttgatctggacattcaggatggaaaccacgtgcatgttcactggtacagatcgcttgcattgcgacaagagtgacatgaatgaagacacactgtacgctaaaagaatatacgccgagaacaccatggcgaacggtctagaggatataagcttacttacgcttgcatgccacctcatcgctgttgtatagtgtctcctaacttcaatca

SEQ ID NO: 330311 - DNA, 297 bp, Zea mays
ttcatgctcaccgcacaaaatctgcagttatgccacgtaccctgtcgttgacggaatcgggagaattggtcttgcccacgagctctctatatgagcgaattctacaaaacgcactggcccctactgtgacgacgccaaccagaagctatgagtgatgctacacgtgtttcagatctgggtgaccaacatcaatcttaacctctggatcaccaaaccagctataaactagaaaggtacaaattcacacccatctacacacggacatcaggcacgtgtatagcatgaaaagatactaac

SEQ ID NO: 330312 - DNA, 282 bp, Zea mays
ccgacgcgtgcgcggacgcgtgggctctgtttagatgatcacatgcagttgtaacagccggacacaaggagttcaatgacgcggatcggaccgtccgtcaaggtgaagaaccataaagctctctactaacagacatagtgcatgagcctgtcacaccagatgaaacactgtccgctgagcacacaaaaaattgctgctacccaccgaccaccagaaaatgctgctgctgttatgactgagcaacatatcacgaacttggtacttacgccagacatgaatgct

SEQ ID NO: 330313 - DNA, 435 bp, Zea mays
ctccggttcgtgaggaggtaaagggcacatattgtgcaacatacttgagctgcgatgatcaaagtcacccggatatggttcctgaattttaccatggagtgcaacggactactgaaatggtgcagaaacaaatggctgatttcaggcaatattccaccaacagaaggcctagtgaattagggaacggctctcttaatgccaatggtacagcagctgctcagaggggctgggaagacgtggcgaagctagttattacagccttgatcaagctcttctcctttatacggctgttcctttccagagccaccgagagtaggctatagaaggtccgtcgcactgccacatcactagcagcagataagccaaagccgctccgagccgttagcgaagaagaagtgcgcgcctgactgcagcgcctggacagtctcgagtcgc

SEQ ID NO: 330314 - DNA, 211 bp, Zea mays
ctgacgcgtgggaggaggtaaatgtctgctactgcgcatcatactgatccatccatgacaggaatcgccctgatatacttgcaggatcacaccatggaatgcaacggactacctaaatggtgcaaaaactaacggctgcatgctggcactattccaccaaccggatgcctcgtgaataagaacacggctttcatagttgcaaaggttcata

SEQ ID NO: 330315 - DNA, 246 bp, Zea mays
gaattgcgtcagccacggtaccggcaaagttttatccagtacgccggatggtgcaggaggtactcatggctgccatacagggtgatcacgtgactgtacaacaggtacataccggactctgtcggtaatggctggggacctaacggagatccactggcctgcgtgtcatacaggcactgtcttgggcggacataatcggcgaggattacggtatatcttgtaatcctccagatgatcttaatagct

SEQ ID NO: 330316 - DNA, 105 bp, Zea mays
aagagacttccggtcgcactgaatgcggtgttagcgcatgtacacgccgagggtcagggcgtgcaacatgaggcgcgctggcttgcgtgcgaagcgcaccagtca

SEQ ID NO: 330317 - DNA, 276 bp, Zea mays
catgatcatatggtactacaacgacatctactccagctggcttctgttgcagcatagccggatgccaattaaggctgattgcaactgtgcactaatgaccagtttcaacaatatcttggagcgttttagggataatttctatcggctcttagaggttcgctgtgaacagatgatcaagtacttgaacttcagttatattcgaactattgtgaacgtgcatgatgatgtccatatcttctagaccaggttgttgttagtgcattgatatggctcaaa

SEQ ID NO: 330318 - DNA, 195 bp, Zea mays
gtaccggttcggacttcccgggtcgacccacacatacggatactcattggccgacaccttttgatgcttagacgatggcttcacgattcagacccgaggatttatcaatttacgcggtgcgagccgctcactgaggaggacgtcatggcactgtgcctcatcgccatcaagatgctcatagcggagaatcacttg

SEQ ID NO: 330319 - DNA, 352 bp, Zea mays
acagcgcgtctgctaggcatggtactgatcagtgactgcatgagctgctgtagcaagcgtgtataacgagattacagaccggcatgatgttagactaaatcaacttgtgctaggccgactgtatcggatccacagtggtgtgtgcacgagagatcgaatcacaatgcataggagtttatgcaccaacatgtccgttttctaacggggcgcgatgtttaatcggtccatcataaccactattattgatggcgtactcgtataaacactggtcgaataatgtcgatactgatgcgtgatcatacctaagggactatctatctcgatagtcacttactgcatcatatatttatga

SEQ ID NO: 330320 - DNA, 141 bp, Zea mays
cagacgcgtgggctatcaaagttggatgttgctccgcgtcttgatgatacatggaagacggggctctggttgtgaagatggcaggagcagcacttcgaatcgaaggccgactctagaacaaccaagacttacgcgcagcaa

SEQ ID NO: 330321 - DNA, 56 bp, Zea mays
actacacgactcgaatggtttcagcagatttgtgagttctttaccggcactatcga

SEQ ID NO: 330322 - DNA, 297 bp, Zea mays
catactcgtacgttaaggtgtcatcagatttctgagttatgtccagagtcctatgagacggtttatgagaagatacatgcgagagagttcgaattaagcaatttgcacgcaaagtgactggctactgactacgctgaactcacaatcctgcgacagaggttcaatttcaaggctaccaccaatgtctagctattataacgaaccaagcactgtcaatgttgaatcctgaaagatccccacaaccagagctaaatcaccaattcttgatctgtcttaagacaagtccatatcatagac

SEQ ID NO: 330323 - DNA, 175 bp, Zea mays
catactcttgggctctactactatctgcattcttaagcctcaatagagccgggttccggggcattgtataggatgcttctcatctagatactactaaacgctttcctaggcatagtgaacctacacttctactccttgctcaccatcatccaacgtatcattaattcatccaaca

SEQ ID NO: 330324 - DNA, 267 bp, Zea mays
ctgacgcatgcgctctaggactacctggatggctcggcgtgttctgctccggctctctgtggcgtcagccggagccgttgcctccagatcctactcgacggatccggtgatctggaatgcgggtactactacacattgccaccaattatacatcaacacatagactcactcaaagagcttcttgcaggtgtgtggactgttctagtatgacacttacgaatactcgttacggtgttccgggatccatggtaagtatgagtcgcgcgc

SEQ ID NO: 330325 - DNA, 204 bp, Zea mays
atctcctcgcattttccttgcaaccgattgcctatccccctcccaaccaaagaccgatggcgcccaaggccgagaagaagcccgcggcgaagaagccggtggaggatgagcccgcggccgagaagacgaccgccgggaagaagcccaaggcggagaagcgggtcctcgctggcaagtccgtcggcatggagggcggcgagggca

SEQ ID NO: 330326 - DNA, 77 bp, Zea mays
  unsure (1)..(77): unsure at all n locations
ccggccggaatcccggtcgagcagcgtccgcnacgcgtccgcccacgcgtccgcccacgcgtccgcccacgcgtccg

SEQ ID NO: 330327 - DNA, 310 bp, Zea mays
tttttatacaaaatgtattattatttgggtggtttcagcgtcaacatcaatccaattctttttcagtggtcaacacacaagcacaaatggcaaaacccaatccttgtttggagcaacaccctatagttggaagtccaaagcttctaaaatgaaggaaagtaatgagagagagagagaaaaaacaaatggtcaaaggcactgcacattgtggatagcagaatggggtgagcattaggtttttttttttgaaattttagaaggcctaatactcccgtgtggacagtggacccaaacgacatctgaaaatcgc

SEQ ID NO: 330328 - DNA, 144 bp, Zea mays
cccatcccatctcaccatactctgcaccgccgcggagaacgcgcccccgctgctacctagaacactgcttcaggccgggctgatccaaaaagcttctatgtccgggcgcaaactcctggaaatgctcagctgctaacttttcct

SEQ ID NO: 330329 - DNA, 499 bp, Zea mays
  unsure (1)..(499): unsure at all n locations
cggaattcccgggtcgacccgcgcgtccgctctgcttcgactctcttctccaactccgcctcggcgtcgtcgtgcgcttcgatcttntccatgtcgaccggatgggaggcgtcggcgcaataataggaggcgcctttgtttcgcccatcgccggcatggggaactagcttcgtggctgggccccacgccatgcaaaccagtgagaccaccgggaccgcatcgccgccggctgttgagccggaggccgaggacaaggtggaagagggggcgcgggcgaatgaggaggcggcggcgaaggtgggcggcgacgacgaggatgactgggaatcggagcatgaggggaggagaggcaggcggcagcggtgccggcgaggcggtgcggcgggggacagcgccgtggccatggtgaagcgggagctgctcacgcgctgcttgacgtgcccgctctgcgaccacctgctccggcaggccaccaccatctncgagtgcctncatacat

SEQ ID NO: 330330 - DNA, 247 bp, Zea mays
  unsure (1)..(247): unsure at all n locations
taaaattgagctacccctattanaaaccctacctantacatcactatccaatgattantctcaatgtaacttacatgtctaattcttcancttcttaaatggcattctcccggacatttcataatcgcagtatcagacgattataatctatgcatgtataattcccaccataatcccattcttaataccttttctccacatattaacacatagacatttttttattttactccacatagtaccatca

SEQ ID NO: 330331 - DNA, 313 bp, Zea mays
aacatcttcatgcacaccttcatctccaccacctcccaacccaatttcaaagaacatcctccctctattcatcccaataacaacctctaccagtccttcccccacctcaataactaacaatcagcaaaaccatatgctctactcaactaacacacaaatactacatatatatatatataccctgtgtgtcaattaatgcgttctaagctccttctcatgcaccttctttcttcctctttccccctcttattatatactgtaacccttgtctttcaacctcctcttctaaaaaccatatcttctctttccatac

SEQ ID NO: 330332 - DNA, 206 bp, Zea mays
  unsure (1)..(206): unsure at all n locations
tcatccaaaccttcatctncaccacctcctaacccaatttcaaanaacatccttactctatccatcccaataacaacctctaccattccttcccccaccctaacaactactaaccancataaccatatactcctctcacctaaaaaacaactactacatatatatatatatactctttttctcaaaaaatatcattctaacctcct

SEQ ID NO: 330333 - DNA, 328 bp, Zea mays
ccggattcccggtcgaccacgcgtcggagcggtttgactctgagtctggcacgcccccacccacacacacacatgggttttaatcaatgccagcggagaactactttgctcggaggaagaccaccaagaagctagacgcgtgcaatggcgaggcatgcgaaaggcggagcggagctgcacccgcgccgctcggcgccgcgtgcgaccggtcaaaacggcggagcagacgtgcgttccacgagctgtcgttccggcccctggactgctgtcatggctgcggagccggcgcctgtcacgcccctatgccgcttttctctttcgcagctct

SEQ ID NO: 330334 - DNA, 465 bp, Zea mays
  unsure (1)..(465): unsure at all n locations
ccggaattcccgggccgacccagcgcgtccggggatgatggagaagcgacacggcggcgactgtggttccggagctggaggcttcactgtgctccaccgcctcggcgccggtgtcttggcgttcctgctgccgcgggccgccggagcgaccgacgatgccaagtggcacgcccatgcccattccgccgctggcagcaacggcgccgtcaccgtcggccacggtgcccccgcgccccacgtgcacgcggccggtctcccgccgctctcggcaccggcgcccacagcgggagctgacgacctgccgccaccgcccgcgcccgtgccgacgtccgtgtcctcaccgccgagccgcgagcccggcccgcacttcggcttcccgctgcagccgggcccgggcaccgcgtccgctgcggcacctgngctgggacccggcggcgaggggtatccgttcatcggaagcaaccc

SEQ ID NO: 330335 - DNA, 367 bp, Zea mays
  unsure (1)..(367): unsure at all n locations
taaaaccaatacgaccgttatatttaaaaaatatcttctcacaaacaaaacncacanattctttctcaatatcacatcttcttctatcaacacctactatccttcacacccaccattctacaacaacctatcttatactcttcaataaaacaaaccttaccttctttcacaacatcttcctcctcctatcttatccaatcatcccaatcttaacaccaactttttacccacttcttcccagcatctcctgcttatccttctagtactgctcctttaactaaccctctatcccctacttcattaatactcttacccctacacttacatattaacaaaacaattattctcttttccaactttttcatat

SEQ ID NO: 330336 - DNA, 234 bp, Zea mays
  unsure (1)..(234): unsure at all n locations
aaaatnncatcatatcactcctcatcatactgatctctttccctctttgaataacaccttaaaacttacatctatttctcatccaaccaatatctctttcttacaaactcanacaactctccttctatagcccacatcaatatcctaaaccatctaatcaataaccagaactattacttcattcacttactccaaaacacttgcataccctaaatattacactctcatctctta

SEQ ID NO: 330337 - DNA, 107 bp, Zea mays
  unsure (1)..(107): unsure at all n locations
ggtccggaattcccgggtccgagcccgacgccgtccgtacaagacactgctattcatagcctagaacaatgatgagtgtagtatnntctggagggtnngccaacaaa

SEQ ID NO: 330338 - DNA, 329 bp, Zea mays
  unsure (1)..(329): unsure at all n locations
gcgcaccccagctcgcgctgcctgctccgcctccgcctccgccgcttnctcctccatcgccaccgaagccgcccatcgtccagccccgcgctccgcctcctccgctgccgcttccggcggccggggcggagccggagccgaagcggcggcggctgaaccggctggggtccagcgtggtgcgcagcgcgacggtgctggcgcgcaccctggtggcgtgcgaggagaagcgggagcggcggcaccgggaggtcctggagctggaggagcggcggctgcggctggaggaggagcgcacggaggtgcggcgccagggcttcgcgggcctcgtc

SEQ ID NO: 330339 - DNA, 285 bp, Zea mays
  unsure (1)..(285): unsure at all n locations
acacactcacctacttactctaccatttgatttctctcctagaggacccaacaatcacggccgtcctttttacacattatctacccctacctcctccacctccaactaccctnttcctccttcatcctcacccaaacctcccatcatccatacccccacttcctctccttctctacctattccctcactccctacagatccataacctaacctacatcatctaaaccctcatatttccaacttcattcacatctctacatttctaaaccacaccctctcatttta

SEQ ID NO: 330340 - DNA, 369 bp, Zea mays
  unsure (1)..(369): unsure at all n locations
cacgcgtccgcccacccgtccgcccacgcgtgcgtctactcgtccggtctgcccgcccccagtgcgggccaccaccacctgttcgttatcctcccccacacggtcncctcctctgcctcccagcgcgcgcagccccttcccttgctccactccgttgcgctccgaaatggcgcagctggttccttctccccgtgcttcttctcctcccgcgcccgttcctcggtcggcgccgcgaagagccttgtggaagacgaggcggagctcagcgactggattagcgacctcaaaactgactcgttccacctcggtctcagcagcggagacgaaggcgatgcgccgtccacccgcaggtcctcggtcggctcatcc

SEQ ID NO: 330341 - DNA, 433 bp, Zea mays
gcagaattcactcggatatttgggggaaataagaactgtcgtcactttcgctttgatgtagctgggagatagatgcccttattgcatcaggtgttctttagatggtaagaaagagggaaagaggacacggcaagtgctaggccggatggatggatggattgagcgacctatagtctggatctggatcctgctgtctcgcttgttgtggaacgttccatgaatgaatgcgtaggaccacttccgttagaattagtagtattgtgcaaggtaggcttcgaaatcggaagtggtagactaaattgtgtgtcaaggtacttctggtcgcagatttcagaagttgtaagcacttctgattaaggagatctttttttttgttgtttgacgtaagatttaaggagatgtttatattcgagaagtttgggaccagtcatga

SEQ ID NO: 330342 - DNA, 100 bp, Zea mays
  unsure (1)..(100): unsure at all n locations
cggaattcccgggtcgagcccacgcgtnccgctccactttcatcttttcgcggtttagaaaacctctatataatttcctcccactttcgccanngtcgca

SEQ ID NO: 330343 - DNA, 382 bp, Zea mays
ccccggcgacccacgcaaccgcggacgcctagtcttactcatgggcaatattatcaatcctatataaaaattgatacccgcggtacgcttataaatgaattgcggccgcatactatctaccacagctacctggattattatccatttctgctgtacttattgtattgtatcttattgtctctaaaacaaattaacattcccataggattacagtgtcacgcactatcaatctgtatctcatagattttgttctcttatataaattccttgctatattcacattcttatattcatctcaatagcaactccttactttccttatgttcatcattcaacatactactaaattacttgctctacctttttatttccatgtttgaac

SEQ ID NO: 330344 - DNA, 74 bp, Zea mays
cccctactctttctatcttgaccctctacctgggcaggtggtttcaaccgtgacacacgccacctccatcccat

SEQ ID NO: 330345 - DNA, 182 bp, Zea mays
  unsure (1)..(182): unsure at all n locations
aaccctaactccccaccccccgcnattttctcaaatctacttncccccccacccccnnnccaccnatccccaccaattccaatctccttctccctcaccatcaccctaccccttccccaccaatcccaaaccccaaatcctattcccaatccaacaccaaccttcccccccctaaaacccct

SEQ ID NO: 330346 - DNA, 310 bp, Zea mays
  unsure (1)..(310): unsure at all n locations
aacacccccactctttctgatgttagcgcctgctacctgtgcancgtggggttcccaccgggacacaggccccctccatcccatggcgcgcgccgccacctccaggctcgccgtcgtggccaacttttcctctactcgcgagtcgttcgcccgccacctccccatccctgccccctcgccatccaccgcaccgctcaatctgcctgaaccaacgaggaagcggcggaccccgttctggtcgtgtccgaccaggtcgttccatgccacaatgcaagtgtatacaacaagattactatgatgtgcttggagt

SEQ ID NO: 330347 - DNA, 291 bp, Zea mays
gacgcacgcgtccgttgaatacacagtaaccccaggaatcgattaaatcaccggaaagacaatactagggcttgatcatataccccacatgctggagcacatctagctaaccaccctatgctataacctctaaatgcacgacattaaacatactcaccagcagtcacagaacaatttttcaatacccaatcctcttcaaaatatttcttgaccgtgcataacattttacgcataaatcaacacattacaataaccatttatggtcaactgcacagcctctgataaaaccta

SEQ ID NO: 330348 - DNA, 113 bp, Zea mays
cttaccctcttattagctctaggctctagctaacctcaccactccttcgagaagccatcagccttcacatcgccaccaatggccactgccgaagtccataccccgaccatcct

SEQ ID NO: 330349 - DNA, 195 bp, Zea mays
  unsure (1)..(195): unsure at all n locations
gacccacgcgtacgcagacgcgtggtggattgttgttgtgtggtcactctattaaattgtacttaccaatttgtgctngaaatatttcatggaaaaatatgcttttgtaatccaaaacctattcatatcaaaaaaaaaaaaaaaaaaaaaaaaaaaaaaaaaaaaaaaaaaaaaaaaaaaaaaaaatacaaaagg

SEQ ID NO: 330350 - DNA, 209 bp, Zea mays
cgaacctccatacataatttaattacataatgaaatattccaaaacatcaattaacttctatctatatttaactgaatcatctggcaataataaatactcctctaatcgttattaattatcctctacattcttcattttcctacttatgccttactctctcatacttacatatataacaattttttgaatcttcatattatcacaacta

SEQ ID NO: 330351 - DNA, 222 bp, Zea mays
aattcccgggtcgaccgcactcgtccgctaacgcctttgtacatttaagattctgttttctttatggcacaacgacctcctccacatgcttaggcttcatagatacaatgcctatgccgtatcctttctaactctttcgatgctaccattaaacaacttgataatttatgcactcgtctaaatgtctcccatccaatccatatatctgctaacatttatctt

SEQ ID NO: 330352 - DNA, 266 bp, Zea mays
ttattttaaagggcgattaccccatacttacttatacaaccttatagcatatataacgtttacacaatacacatttcacaatgcacctgaacgcttacaccatcaaccttctaaatgctaacatccattttcccaaccagttcatttacttcaacaatatacaaacaatataatcaccaacacaaacactcttaactttcctaatttccatcctagtttattaaacttcatatatccaaacaactcaaacaacaaccgttacatca

SEQ ID NO: 330353 - DNA, 122 bp, Zea mays
attcgaagtatgaagatgactcaccgggtgatcgcaaccggtcaggaagcaaagcgattggagcactgctctaaactcatgctgatgcacttgccaataatgattcagcctatcatggtgat

SEQ ID NO: 330354 - DNA, 272 bp, Zea mays
ttttttttgtttttttttttttgttttttttttttttttttttgttttttttttttttttttttttttttttttttttttttttttttttttttttttttgttttttttttttttttttttttttttttttttttttttttttttttttttttttttttttttttttgttttgttttttttttttttttttttttttttttttttttttttttttttttttttttttttttgtgttttttttttttttttttttttttttttttttgttttt

SEQ ID NO: 330355 - DNA, 163 bp, Zea mays
ccctatccacacaaccacactatctactcttacatcccaccttagaatttctctaaaccactacacaacaatgacaggcttccaatcaccacaccaactcactctacctaatccacatccacctccaccaaatcatccaccatcaccaccgaatccacccatc

SEQ ID NO: 330356 - DNA, 108 bp, Zea mays
  unsure (1)..(108): unsure at all n locations
ggaattacccgggctcgacccacgccgtccggcccaaaatcaaccgaaaccaagggatctcatgtaagaagtctcttctattagtgtcancctaaattcagtgtcgcg

SEQ ID NO: 330357 - DNA, 279 bp, Zea mays
aatacccgggccgaccgacgcgtccgcgctatctactcttccgtcccaccccggagtggcgctgttccatcgcctaggacaggggcgccagaacctgcgcgacgccgtggttactgttggctccctgctattcacaaactcagtcgcgagaactatcatgcggggccgaacatggtgtctcttaacgtgccggagcgcatcgacggaagcgttctacagtgtcgcaaacgcaatgtgtagcttgacccccatgagaacagtgcgatctgcatcgcgaac

SEQ ID NO: 330358 - DNA, 250 bp, Zea mays
attcccggctcgatcgcacgctccacaccttgcctactcttccatcccaccttatagtctctctataccatcacctaaatccggttcggtggattttacacgacaccgtggctactgttaaaaccctgctattaccaaactcaatcgccttaactatcatccccctcccaacatcttgcctattaacgaacaaaaccgcatcgatcgacgttacctacagtttcgcaaactcaatgtctaacttgacccc

SEQ ID NO: 330359 - DNA, 100 bp, Zea mays
atcaaaatttgaactcgcccccccaacttcttggtaaggtttctataataaaggtatttaggagaacgttgaaggcggcaaggaactgcccaacggtgtc

SEQ ID NO: 330360 - DNA, 124 bp, Zea mays
ttctaaatgtactctccctgtatctgtcacattaatctcttccttttttttttttttctctcatcttaacctcttcactttccttctctctatctcccccttcttttgctttctttccttcctt

SEQ ID NO: 330361 - DNA, 145 bp, Zea mays
gacgcactcgtccgctgacgcgtgctctcgactcggcactatgcttttatcaatcaataacctactccacgtcccgttctatttactatgcatcggcgactacaatttcaacaagaacatgttccatcttatcaacacccatgcc

SEQ ID NO: 330362 - DNA, 97 bp, Zea mays
gaaatcgcgaggggaagcgtgacacctgactagctgagcaggcaggcggtagtggccgagggaaagcgtcctcgatctcgtcgtatcgtagctgccg

SEQ ID NO: 330363 - DNA, 160 bp, Zea mays
acccactcgtcacaccacacctactatgaggctaggatctagttttacctatatccatgtcagtagctggcaaagcttctatatcattactgcaacgccatctctatatatgaaatacatctccacacatactaagtgaacccttacataatcccacact

SEQ ID NO: 330364 - DNA, 370 bp, Zea mays
accggtccggaattcccgggtcgacgtccggccacgcgtccgggctttgctagatctaacttcatattaggatatgctgctgctgctgcatcaggtttgaattttactaatccttttctcaagcaattggatgaatgtgacacttatggtgaatcagtagaaaacactaatctggaagctaatggtccatgggaaaggaagagacagaagaagctcaaggctgtggttagagaggcacgggaaaagttttctaaccctagcagtgatgctttaaccatcgctcgtgccctgcagttctttgagttgtcagaaaacccagtggaattctgcagagccaattcacttcatcttaaaaccatggaagagatgt

SEQ ID NO: 330365 - DNA, 282 bp, Zea mays
  unsure (1)..(282): unsure at all n locations
cggacgcgtgggcgccgaggtacggcgtgacgtcggtctgcgggtcattttcacagatatactggaacatcaacctgattgcccgcctgaggttgttgagaagcttgtggcaatgcgggaagacattccaagaaaggaagccaaggagattgtacaagaatgcaaagagatatacgagaactcgctcgtggatggcaaccctcgcaagtcaggttttgtgttcggcaaattgaagtgcttgacagcatagaaaggcatatggaggaagcttgngcagtaagt

SEQ ID NO: 330366 - DNA, 227 bp, Zea mays
tctacgcctgggcattgtcgcctacctccatggggtttgtatgtctgcctacgacttctagagatgggcgacgctttgaccgtccgtccggagttcatcaacggccaccacttcttccgcgtgctcgacggccaccgctgctcacacgtctcgacatcgttcccagagcggatgcaccagattgtggccgaggaggcgacagctgccgcatgctcgtcggtttcgga

SEQ ID NO: 330367 - DNA, 386 bp, Zea mays
tgaattgccgggtcgacgcacgcgtccgcggactcctgggttcccttatatgatagcttttagggaaagggggttgtttttctggggggagtatagttgaagttcagtgacgtcaaaacttatcgaaggtcgccccacattatgtctgctaagtgcaagcttcacaaatcatacattcatactgttggagtgacccaatatatcctggtagaaagcaactgttgagcacatagatcttgtatcttagacctcttgcggagattttttttttttgcattgccacaaattagcgagcgaataactatagtgattagagattgtgaagtagatgcattgtgcgttagttgaaaagccacaatagtcaagcattgcacttactgtactag

SEQ ID NO: 330368 - DNA, 322 bp, Zea mays
cgatccaaactcacgtacgcttgcttgcaacatgcttactgttctatagtccaacctaaatacgagtcactggaagcagctttacaacatcgctactcgtaaatccctccccccacctcaacttaataacattgcatcacattccccttttgccaactggcctcctaccgaaatcccccagtctgataacacttctcaacatttgatcaggatgaatgcctaatagaacccgccctgtaacatcgcactaaactcgaaaactgttttgcttactcacagccataccgttactgtcgtcaacgacgttgctcccgcatacttt

SEQ ID NO: 330369 - DNA, 344 bp, Zea mays
  unsure (1)..(344): unsure at all n locations
aaaaaaaaaaaaaaatttatattaactaattctaaatcacaaaacaaaagaaatttttaaaacattttttccctccccatacctnccacnccctttatattatatactctcaccttcacactactacctctccatattttttcaccaaattcacttaaaattccatttcctttacccaactttaaacacctttcaaccctttaaaacccctctcctttccccaatattaactaatttcacctcaaaccacccttccttcccaacaattttacccccctaaatccccaactctttcaccccttttaaaacttttattaatctcaataaccaatttctaccccccc

SEQ ID NO: 330370 - DNA, 262 bp, Zea mays
  unsure (1)..(262): unsure at all n locations
catttaattaaatatacacctctatccaaacgtanaacaaangaagaattttaaaaacttatcccccaacttcaataaaatttcctatatattaaaaacctttcacaattctctcttctaacttaaaaatatttacttccttttaaaatatttcacttaaaactcttcaactcattccataaatacatcctccctaattacacaaaaattcatattccttcaatcaaaacctattaattcactctctttacataaaaattcc

SEQ ID NO: 330371 - DNA, 257 bp, Zea mays
  unsure (1)..(257): unsure at all n locations
taannncacatncaccnnacatttaatactttataataancacaanccattaaagcgtatttattataaaaaactatcccaccccccaanaacannatcttccattttaatttgttctactattcaccttcgaatacatttctattatattattccccttacatattttttttcattcctacacatactaccatttttcctcactcctacatttacttaaactataattactattctctttttcccaatttatacct

SEQ ID NO: 330372 - DNA, 300 bp, Zea mays
caccctattaaagtaaattccgtccgtcctaccagtgtggccgaaactaattgttccatgtcctccaaaaagaaaggatctcgttccaataccataccctttaatgaaggtgcttttccccccaatttcctatttatagctctaatactatagctggaatgacctatatgaccggaaccacctaaacatctatatgacccgaacggaacctcaacctatatgtatatgaccggaacctacacaacctactggacttgctttgctacttgagcctaagctatatgatctgaaccaacccta

SEQ ID NO: 330373 - DNA, 145 bp, Zea mays
ataacccactacctcaaaaatcttctcaacttcatttaactccaatctcccatcttcacccttaaaaaaaaccttaaaaatacaaacattgattttaccaacactcaaaactactttaaatccctccaaacccccaaccaaataa

SEQ ID NO: 330374 - DNA, 411 bp, Zea mays
accggtccggaattcccggggggacggatgagtctactcgttgacattcgacagatcccaaatcactcctgtggcggtagccgtggcatccccgaggagttcggctccttgatcatggaccatctgctccggagcatctggaccgcataggatacccaggccaaggcctccgcctctatcgcaagagcgagcgcggggatgccccccacgccaatgcagctgcagggatcgtctctcacactgccccgtatgctcagcaccaagacggtcgacgaggcgtggagaaatctcgtgcgcgacgaaccgccacatggggcggaccgcagctgacaccatccgcaccaccgccagtcaacgctctgggagatgactctggaggagttcttggtcagagcttgcgcggtcaaagag

SEQ ID NO: 330375 - DNA, 389 bp, Zea mays
  unsure (1)..(389): unsure at all n locations
actcatttctttctacaatcccaaattctttttggccatagccacnccatccccgaagattttttttaaattaacatccaccccctcctccnncncatctnaaccccatattaaacccataccaatacctccacctctatcacaatatctacctcctccattccccccactccaatccatcatcaacaatcatctctcacacttccccacattctcaccacctaaactntctacaaatcattccaaaatctcttncactactaaccctctcatataacttacttcaacttacaccatccttacacaccacactcaactctcttctatattactctataataaatcttantcaaaacttactctatcaaaaaaaaacccactccttcttc

SEQ ID NO: 330376 - DNA, 323 bp, Zea mays
gcaactttttggttcattggtcgctgcaagtattgcatggcttggaccatgtatgtatcattgtctttagaatttgtattgattgaaatcatgctttggcttaattacgtcaaacatgggcaggacaagctcctaataccatggctgatgattaaatttcttcacttgttacttcacctttacaacctgtccaatctcaagaatccaaacctttactctttattatgtttgaaagtttttgtcctatttttctatcactcctccatatattcattttttcgtttcttcttttaattctttttatttattctttttttattttt

SEQ ID NO: 330377 - DNA, 440 bp, Zea mays
cgcttccgcacacgcttcgggagccccagagatatagagagagggcggcattcacagccaggcagtcggggaggcacttccatggagtactactacgcctaccagcacagcagcagcagcggcagcggcttgagctcaaaggaaaaaaggccgccgctgaagcgggggcagctcaagcggcaaatcgtgaggaccatcagcagcctcgtggtgccgaggcacgccgccgtcgctggcgctgctgctgccgctgggtcgagggagacggcagatcgcggcagcggattcggcggaggacggagctacaactgatgatgaatctctcagaggaggcgtgatcagagatacgattcgcagcgtcaggtttgtgtgtacgtactacttgccgatgccgatgcaaaagcagcacgtagcgcatctgttgagcgcgtgttcttctt

SEQ ID NO: 330378 - DNA, 181 bp, Zea mays
attcccgattcgacccactcgtacgatctgcctcatctccgacctgaaattgcctaagttttatctcctgtcaaacgctaagcctgcactggtcgatttccccaatccagtgacccagcataccacagccacttcagtcaaggttctctcttccatcctttctacctataccaagttcaaa

SEQ ID NO: 330379 - DNA, 448 bp, Zea mays
acgcgtccgatcgccgggagcccgggacccctctgctccgcgccgctgccaccaacagcgacggccgagagggcgagccgcctgtcgcggggccgcgacacgaccggcaaccggccgaggggcgaagcaacaggccagcgtggacgccgatcgtgccaagcgcccagtcccgattccgccctgacctgtttaacagtacgagactctaaaagtccgccctggtgagtgtgcttcactgcttctccggttcttcccctcgcactggtcccgatggaatccgatgccgaggaggcggcggcggcggtggacccaggcgctggacggctgaaggggagcccggagctgactgtggacgcggacatgcgggaggtggcgaagagggccgcgtggagcgtcagttccttcaaggacggcaacggcgtcgcatccctgcgcgacgacaacctcg

SEQ ID NO: 330380 - DNA, 437 bp, Zea mays
ctctaattagctaccacataaagatcttaatttttagaggtatttttatcttccatagcgggttgaaatagaaaatcttggcattattaataagagcattatacatcgaacggacgtaaaaagcctcgaggttaacaaattccatttgaactcatctcttccagtggatagatgagtatgagcaaatctcaagaccaatctattccaacataaaagattaccacccaccagcgctctacgaaaagaaatgtttagaggaatcctattaaaaacattcgccactgtatcgctttttttatgagctatattatataaggacggaaatttcagcattagaggtttgttacccgtccacgtgtcctcccaaaatctaatctgcttttcatctttaagaataaaggaattgaaagggaaatatggtctaacctttttctaaa

SEQ ID NO: 330381 - DNA, 252 bp, Zea mays
gacgcactcgtccgaaagtcatcaccacatccagatatttgatgttgctattatttgctggatgctgcgtccctgtagaacattcatgctatggacacaaactcaagtggacgtggtgttcgacaattcaaaacatacctattgcatacattggaaaaggttcagtttctcaactttgttctttgcccacaataagtgaaatccatcatgattgatcttgagacaagtgcctggatgcagttagtcttacta

SEQ ID NO: 330382 - DNA, 311 bp, Zea mays
ccagagcagctcccccgccggcttcctcactaacgggtacggcggcatgctccgggcggggatgggcttggccggcggcttcaggaacggcgtcagcgacgcgcggctcaaggggcagctgagcttcccgtcccggcaggggtcggtgatgtcgcagatctcggaggtgggcagcgaggagctcgacggcggaggcggcggcagccccgaggcggccggcagcaacgccagcggcgcgccgcgcggctacgtcggcattccggggtacccgatgggcggcggcacgtgcggcgcctggtcggacgagccgt

SEQ ID NO: 330383 - DNA, 255 bp, Zea mays
cccacacgtcctcaatcgcatctttctggttctcctttttagcgacaaactcagggctatgcaacaattagtccagtccatgcacaaagctctcatacctaatttcaaatcaatgcttccagaaagtaaacatataacttcaactatccgatcggcaaaagttaaagaaaatctccatactgatccaacgtacaaacccatgaagcatgactacaacgacactatatttaatcaatacatactgcaactaacatc

SEQ ID NO: 330384 - DNA, 236 bp, Zea mays
ctatgacaatgactcaccgggatttcgcatctagtcaggaagcaaagccattagaacactgcttcaaactcatgctcctgcacttgccaataatgattcagcctatcattgtgataagagcctgttcacacttgtagcacttcctcacgttaaaaaccagtttactatcgtggtacacaaattttcacctgaaacaactcctgaaaacggctcatcacgaaatgacagccctcccg

SEQ ID NO: 330385 - DNA, 265 bp, Zea mays
gtacaccctacagaccacgcgtgatgcaaacagtgttgacatcagtgcatacatataaaggtatcggttgccacatgatgagacacggcttgcgtgacggtatacatggcgcttgatactgcgattgagagtggccttgtgagtgctcttgcgtactgtctagcgcgctctccgtatgcacttatatatgctcgaacatgtaaaggatcatgcatagcttataccgactctatcaccgtcttcttaatctactacgatcatgact

SEQ ID NO: 330386 - DNA, 236 bp, Zea mays
atagagccaagtacatgttctgcctagtctttgctacagcacgtcttcacctgcttacacgcctggttcctaatacttgctgcttttcttaaatcaagaaaaggtattgtcattatatctattcactctggatgtcctttagtcctagttttctgctttgtgcagagctatgcatacaagttgtggatgtctgtttgtcaattgtatatcaagatcgctagagcagtttaatttac

SEQ ID NO: 330387 - DNA, 349 bp, Zea mays
cactctcttccctccctctcggagtgtaggagtgagaagagagggagccagtccagcgtccaggcagccggacgcccggaccaacaccaccccgactcccccttcccccgacttaccggccctacctctaactctgccttacccacggtcccacgcacgttcacaagtctcgtcgtcgccgcaatggaatccgtcggtgacggtgactaccagctgcaccgcctcaagttcggcaagatgatctacttcgaggactccggcggctccagcagctgacccatccactgttgtggcagctcgcccgcgctttcagcgactcattagccgtctctcgtcggccgcttcgcct

SEQ ID NO: 330388 - DNA, 282 bp, Zea mays
gaatttccgggtcgaccgcacgcgtccgctgacgcgtgggctgacgcgtggtctgacttcttgtctcctatccttcgcccgccaacctgcgcaggtgaaggcttgtttcgcgcgactgctgtgacacgaggagcagcagcaacagcgcgccatggacccgtgccacttcgtgcgagtgctgttcgacaacctctcgctcagaatgcctgtggctccgaccgccgccgtggacggcgcggacgttcacacgtccacgtctgcgtgctactgcaatatccagct

SEQ ID NO: 330389 - DNA, 143 bp, Zea mays
attcccgggtcgacccactcgtcctcactgttccactatatgaaatgttccttgttaagctaatagatcccaagaacttccacagatatagatgcattgtacagtattcctacaattacattcacaataattattataacttc

SEQ ID NO: 330390 - DNA, 264 bp, Zea mays
aaaaaaaataaaaaaaaaataaacaacaaaaaaaaaaaaccaaaataaaaaaaaacaaaaaaaaaaaaaaaataaaaaaaaaaataaaaaaaaagaaaaaaaaaaaaaaaaaaaaaaaaacaaaaaaaataaaaaataaaaaaaaaaaaaaaaaaaaaaaaaaaaaaaaaaaaaaaaaaaaaaaaaaaaaaaaaaaaaaaaaaaaaataaaaaaaaaaaaaaaaaaaaaaaaaaaaaaaaaaaaaaaaaaaaaaaaaaaaaaaa

SEQ ID NO: 330391 - DNA, 240 bp, Zea mays
aattcccggctcgacccactcgtccgttcgtctaaaagtttacaacttcttctcctttattttttggagcacctaatgaggtactggtccaattttcctagagctagagctattccaaacaaggtccaaatcaatgctcatctcatttctaaataggtatttcacatgcccaccaacgatcttcattgatcttactgctcttttgcgattatcgttcagctatttatcacagatccttta

SEQ ID NO: 330392 - DNA, 434 bp, Zea mays
cggacgcgtggggattagtgctgcaaatgatatctcttaacgtagtgcattagtgtcagggtccacactacttagagtttgtagataaactacatgttgtatctcggagtcaatgaattgatgggaaggatcttccctgacaaagggaacttctggtgaaggcggtagagactagagaatcttaaccgatatgcttacatctgggctcgaaaatcaatgaaagtgtgaactttgtgtgcctgctgttaattaggatagctctatgttggttgtctgggttctcacatcctatgataaccagttgtccatcagcccctcacaaacgtgcagctgtgcaagtatattaatatcgtccttttctggcgctcatatatgcccaagtaattcataaatagtacacacatatctcttacagattgtttagtttttcattg

SEQ ID NO: 330393 - DNA, 263 bp, Zea mays
tactcggactggaattcccgggtacgacccacgcgtacgtatattctgctcattacatcaactttacattccacacaatcacaggtcatactagagctcgtaggattcacgcaagaataaccactgagacaagtactcacaaaaagctcacaactaccgcgatactaaagtcaggatgaacgaaccgctagagcaacttatccaaaacaacgacgaccgtcattacttatggtacattacaagcttacaatctcaacaagacc

SEQ ID NO: 330394 - DNA, 204 bp, Zea mays
gacccactcatacgaccaatccatacactcaccatgttttatcatttacacaagcaccactaccacaggggataggtgcaattcaaccgagggtatgccctcaacattcaatacactcactacataatctttatcctcatatactatcacgtacattcctaacacactctctaccttccctacatactctaactgataaaacac

SEQ ID NO: 330395 - DNA, 206 bp, Zea mays
cggtcctgaattcccgggtcgacccacgcgtacgcccacgcctacgcctacgccaccttttactcttaggaaacaacgcatatatctagataagagtttaacgtaaaagagggctaataattactacatatacccaaataccgccactacagactacctcatattaacgataataatgttcacctccaacaaggttttaaaatttt

SEQ ID NO: 330396 - DNA, 106 bp, Zea mays
acgtccgaaaaaaaaaaaaaaaaaaaaaaaattaaaatttaaaaaaaaaaaaaaaaaaaaaagggaaaagtaaaaataaaaaaaaaaaaagggcgaccaataaaaa

SEQ ID NO: 330397 - DNA, 426 bp, Zea mays
gaattcccgggccgacccactcgtacccatacaaatacaacaccctacaaatttagattctttactcataaactacattctatgtctgtgtcaaactttaaaggcgtaagggtcaaaaacaaacaaggcctaccaactcatcaactactctaagcgacctttcttaccactgatgtgatgcactttcatgtccttttaaatcactttactttccaagcactgccaatatctgtaaatgctacaaccttatttttacctcatttcaactgccccattctacttcccaatcttggaacacttttttacaaatacacttaattttcttcctatagccaacgcaccaacttaaaaccttatactgatctacttgacccattttttcaccttttttacatgatcccaatcatggtcacaacatccttagaa

SEQ ID NO: 330398 - DNA, 265 bp, Zea mays
tctatctctgttactcttcactaagtgtgattgtaacagtggtacctcttgtattctgtgttccacgatgttgcaattggttgcttgatctaatgatgtttcaacctcccatcttctaactatcatacatattctcccctgataataatgattacatattctgttaaaaataatttctacatacacatatcttcttataaatttaatttttatatctcataataaactccttcctttctatataaaccaaccttacttactcttt

SEQ ID NO: 330399 - DNA, 373 bp, Zea mays
gaattccgggtcgacgactcgtccgttgtgtctttggggtgaccagaatgctatttacggctctccaagtgaccaacaccaagggctcaacggtcgacacaacccgtgaagttggctgaaccatgcatttccccatgttgaacatccaccagtggtcacgcctcatgcatcggttgctccatttgatctgcacaagactagacaaggaattgcctttaagatcttctgggtccctagtggatacaaccagtccatctcctgtgcaattgagctttccattgcccgctatccatgagcatgtgttacaaactcgaccatcgtctccggttaatgaattgctacctgtgcatatagagtgcttgctagagggatc

SEQ ID NO: 330400 - DNA, 296 bp, Zea mays
gacccacgcgtgcactcataccccactacactaaccacactaccagtttccgttacacgaacctaccgaaacactgttgagatgactgcattgcactagccgcggcccatacaaaacatcctccccctcatcccctcctccatccccaactcttcaccaccatcaaccgtcctacaaatctatctacttatcttattgaataaaccacgaaataaatacccttgaatatattcatgcccttcttttcaaaatattctacttctacccttcaaacatcttcatcatattcatctttt

SEQ ID NO: 330401 - DNA, 292 bp, Zea mays
aattcccgggtcgacccactcgtcctagccagcaccccagggtgctttataaattttaattaacttcaatctaactggaccaacgccaatttttaaaggcagctggatctacataactacaccatgctttactagatgatcatcaaccacaacttacatactaatcatgcaactcattattacattccctcagctcaatacaactcactgatcttcttatacaatctatctttcaaaactatatactaccggacctaatcatctactattcatattcccattacaactaatc

SEQ ID NO: 330402 - DNA, 327 bp, Zea mays
  unsure (1)..(327): unsure at all n locations
ntgcntttttttttttttttagatttgttttaaatggaaggttgcctgccttttttttttacaacccaaccattattttaaaaaaccctccaattacattatccatcccctcaaatccattgccattctttaatactttaaaacacacccacccttttaatttatttataacattgtcattccaaaacccccaacccatattcatacatatttatttaaatatatatttcaccgataaactttcaaagccacacaccaagtccaaattccttcaaaatcttttattccctaaacccttcttttgtaaaaaacttaccccattctttt

SEQ ID NO: 330403 - DNA, 308 bp, Zea mays
tacacctattttgactttctcgaaaatttataagggcattcgaaaaattacacttttttcactataaaattttactcatcaccatattattatataacacattgttccaagttcccatcatttactcctcttcttaatcatattgatacatataattcaaatctctatactttatcaactatccttatatatttattatatttaaatatcaatattttatcaactttctattcaacttttctttaaccatcacttctttctactacttcttcttctcttataactataactccattaattaattttat

SEQ ID NO: 330404 - DNA, 195 bp, Zea mays
acccctatttatttatttatctaaatacattcaaatatatatccactcataatacaataacccttataaattcttcaataatatttaaaaactaatactatcaatattcaacatttccatatctcccttattccctttttttcttcattttgccttcctttttttactcacccaaaaactctatttaaattaaaa

SEQ ID NO: 330405 - DNA, 189 bp, Zea mays
cccactcgtacccccactcttacgcctatttttcgcttcacatgttaccccaaaatcttctcaatgagctgagattgtttatcaacctgattatgccaaataccaatatgttacttcaccacctctactcacattgcttcctatttccaactaatatacttcctatcttatatcaataatacttactta

SEQ ID NO: 330406 - DNA, 109 bp, Zea mays
cccactcgtgctcctatgtcctcgtcagccccttcgccgttctactagcactccttcatgtcctttgtcttatccgtacttttgttaacttatgtatacagaggttttg

SEQ ID NO: 330407 - DNA, 220 bp, Zea mays
accggtctcggaattaccgtgtcgaccgacgcgtccggagatctctcagtcatggatatgtttgcttttacactatgccaagaaaacaacagggccggtgtcttttataacttgcaagagcctggaaacattgcaaaggctattgtcggtgagaaggttggtacattcattatatgcacaagagatcatgtgctacatggaaacacactggttcaagaaa

SEQ ID NO: 330408 - DNA, 183 bp, Zea mays
cacacgcgtccgcccactcgacctttaatgtgacagtatcatcagataacgccagagcacagtgtctttttgaacgggcacgagcctgaaaacattaccaacgctattgtccctgagaaagatcttaccctcatcttatgcacaacagatcagcagctaaatgtaatcacacaggttcaataa

SEQ ID NO: 330409 - DNA, 346 bp, Zea mays
ttactctttctactctttattgttatacttttaccccaaatcttctaatggccttcgttattttcttcgtcattatgttaataccaatattttctcaccaccactacttacatttcttcctattccatctatgattctttgtatcttttttcaataattcttacatattatcctaaatcaagaatcatttctcatcattctctatatcacaattacttttcatcgttaccttctccaacaataccatcacatcttctaatgtcactttctaaattatatcaacataataacaatattccctatcttaaccttcatcatatccctcttattctctattcttcaataa

SEQ ID NO: 330410 - DNA, 501 bp, Zea mays
ccggccttgaattcccgggtcgaccgacgcgtccgcccacgcgtccgcggacgcgtgggcgcacattccaggaggcaaaccttctccatcaggggtggaagggcctacactgctcgagaaatcgcctgagctcaagcggaggtcctcttgaactgtgacatcgaattctgaggttggtgatgatggctgtctctgtggagtgtctgaatatggtggtgacaagggaaatggtggcccagtcttgtggtagctgactctctctccaggtagcaggacgtgctgtgtttgttgatcaatccaagtatcaaacggacctactatgttcatgtgaacttcctcaagtgctagttaaaaagttttcatgcttctgtcatgagattatgatcctagtagcatccttagcacacttgaaacgttgactcgtgtcctagtgtcgtttgtgttagtccatatgtgaacaatgattcatgttggaacatgctagctaacaccagatgattc

SEQ ID NO: 330411 - DNA, 85 bp, Zea mays
aataacctcttccgacgcactctatcctacacacctcctctccacctcactaacactatctactacctctatctcttctattata

SEQ ID NO: 330412 - DNA, 124 bp, Zea mays
cccactcgacctaacccacaactcaaccctacaacatcccttttccactttacacctccacaattaaaccagacatccgtaaaattttaaacgccctcccacctctcaaaatcaccacactcat

SEQ ID NO: 330413 - DNA, 283 bp, Zea mays
atacctcaaactcatatatctacatcttcaaccaccttctctaacactatttccctttccaaaatttcccatccatctattacatccatatcaatctcaccaaccttcactacaacttgtaatacattcttattcaatcacaacaactattaccctttcatttacattaacttctactccaactatccattatttcaatacttcaataaacactacttctcttcctactatattcacttcatcaattacccataatactcctatcttacttacacaattaaca

SEQ ID NO: 330414 - DNA, 152 bp, Zea mays
gccaagccttcggccaagccttcggccaattcttccgttgaccagcggattaccatgggtgggccctatggccttggccaggtccattttcctgaacctaattcctgggaacttgcacccaccttttgaaccataatttggttttccaaagg

SEQ ID NO: 330415 - DNA, 286 bp, Zea mays
atttatacattgaatctacatgatatatattcggtacatttgcccatggaacttaggttatttgcccatcaaccgaatatatatcctcttgattgaatgcatgaatgatatacgtattactcctttgatagtattaggaacattcctaaaactgtcggtgtatgacagacctatagataggcatgaaagctcattggctgaactatatgggtttgtgattaagattgtgtgcttaatcgatgctaaagcatatagacgctcaatatgttccgatgacacacgatta

SEQ ID NO: 330416 - DNA, 281 bp, Zea mays
atttatacatcaaatccacacgctttatatttgctacattagccactggatctagggttagttgccaatcaaccgaatatatatcctctacattcaatgcatgaccgataatgaatttctcctttcatactatttggaacattcctaaaactgtctgtgtatgacagacgatatctatacgtctaaacctcactggatgaactatatggctacctcatggtgatggtttacttcatctatgccaactcatttagatctactgatatgactcaattacacat

SEQ ID NO: 330417 - DNA, 338 bp, Zea mays
gcgtgactgactgaaactgagcactagggctttgagagtgcagcagaggagggcgaaccatgggcgaggaggagaaggcgaaggaggcggcgtccccggccgacaaaggaaaggaggcggtggagaagaagggcgaggggtgaggaggtgtggagatgattttctatggcttgttttttttaaatttatttatttttgtatgttattattttttgtttttaatttatatttttgtgttattgtttgttttttttatattattttttttttttattttgagttgttttgatttgtttattggtttatatttatttatttttttttattttttatttttt

SEQ ID NO: 330418 - DNA, 128 bp, Zea mays
gctttggaacaaaatgaggatctaattatttctgattatgaagccgatgtatctgcagcaggagatgcttgatatcatatatgcttggttgatagattgactttgattccagaatatgatagcttgcc

SEQ ID NO: 330419 - DNA, 179 bp, Zea mays
taccggttcggaattccggggacgactcacgcgacccggttcggcgaacggtcagttcatcgggaggatcgcccaactaattcgaagtaatcgcctggataagctagaactgcagtcattgtcaccaccggagccaccaactatgcgaataacggggactatgggcgcaaggctcgctg

SEQ ID NO: 330420 - DNA, 198 bp, Zea mays
catcacatatctttattttggtttatttttttttttatatttgatttttgttttttttttctcttttttttttttttgtttttttttttttttttttttgttttttttttatttctttatgtttttttctttttttttttgttttgtttgttttttatttttattttctttttgattttgtttcttatttttctcttt

SEQ ID NO: 330421 - DNA, 204 bp, Zea mays
cccacgcgtccgtttccgccggctacgagtttcgtgtgacatctgccacggtccgatagggttcgatcaatacctgtagcgggcggacctgcacctctgcgaggtatgctaccgtctagtggcggtctttgggctaagcgcgctcgctgagcacgcgcgctgcgactggctgctccataccgcctgtggcacgccctcgtacgt

SEQ ID NO: 330422 - DNA, 348 bp, Zea mays
ctctttcctcgcgagcgacgcgcgcttctcacccgcatcgccgatggagacgccgctgtccaccaggaggatcacccgctcgctggccgccgcatccgcccagaagagcgccgccgcagggatggactccgccgccctcttctccctgtccaagaacgccgtcgcaggggagacacacgtacagacgcgcgcggcccttcacgacatcaccaacgactcccccgtcgtcggcctcgccgcgggcagccttcacgccaccgacaccacccccgccaagacccgccgcagggccccgcgctgcacgccaggctccggggaggcgctcctgcgcggccaggtcaaggcgct

SEQ ID NO: 330423 - DNA, 421 bp, Zea mays
gtaagtcatttatagctactgttcatcaccatgccatcttatgtctccaacttctatattcctccagcagcctgtctagcattctctttttgaaacctgggaactcaaataaagcttatatttcctactttaggctctagtgcccaatcaaactttatctggctctttaatcttcctctaggcttatggtaagaacttgaacatgtgttcttttttctttttaagtttggtgttaattgcttttccaagagaaaaaaagatagttgtattgcgctttagtctttaataatcaaatgtggcaggttcatgtcagcctgttctatttaccaccatgatgcagcacatgtgattcaacatagaagtatttacatttacaactccgtttattaaggattcatgagctaacattttattgacattt

SEQ ID NO: 330424 - DNA, 453 bp, Zea mays
  unsure (1)..(453): unsure at all n locations
cccacgcgtccgcacccttggtgctaggcaaatctttcttcaagatctttcgacattctaggtggcctttctcgtcttatggtacccccattatgttattactttatggatccttcagagaggtgttcattgcgatgaatcgactttgtcgacctcatgtatagcttatctatacagatatatctttgttgtttatcttgaatgtgtgcaacgtagatgatcaatctcgggctactttgtttttagatttaacatcaatgcactttatatcagcttggttgttgaagaaagaaaacagatgatggtgaaaaggataatctaactaatccaagtaatccaatgcacatcatgaagctnttggttgtttaactttttggcaaaatttcattgatgctagagaagaaggcatcggcctgagcttctactgacctagtgtatggtctattaattata

SEQ ID NO: 330425 - DNA, 421 bp, Zea mays
gcacgtaccggtccggaattcccgggtcgacatagcctggcgcgcgggccgaccttacagcgtgaagcgcatgcttctgtgcgcggcgcgcatcgcgccgagcgcggtcaacccgatcacagagtggccgagcctgacgcgacatactcctgaccacgtgcacttgtctgggcagcggctgcagcggaggcggaacggctcgtgcgcctcgtgcggcatggctggctcaggtggagagctcgcttgtggcatcgaacgaatctgtcgtgagaatagcagcgcggttgagacaagcaaaagctctatcgcggaggcggctgctccttaggccagggagaatggagtattttctggtgtacagtcaacaggatccggttaccttggaaattatctaggggcaatttataattggggtgcactt

SEQ ID NO: 330426 - DNA, 383 bp, Zea mays
cccacgcgtccgcccacgcgttcgcccactcgtccgcccacgcgtccgcccggcttcacttcggtcgcagccgcgctccgcgttcctggggacgggcttgtgcggcggacccttggggccttgccctggcgaggtttccccttccccggctccagcggggcagacaccgtcgctgacgcctgttcccagtagcggtggcggtaacggtagcggtagtggtagcggcgggaccatcggtggaaatgggggagaaagtggccacaagaacaagaagctctccggtggtgccattgccggaatcgctataggctccgccttgggcgccggacttctcctcttgctcctcgtctgcctctgtcgcaagtcggggggcaccaggacgc

SEQ ID NO: 330427 - DNA, 446 bp, Zea mays
gacacgcgtgcgtgcacgcgtgcatacactcgtgtaaccacgcgttcgaccggcttcacttcagggcgactctcgctccgtgttcgcggcgacagtcttgacatgctgacccttgaggccttgcactggctaggtttacactaacccggctccaacggggccaacaccgttgttgacgcctgtaccgagtagaccaggcagcaactgatgacgtagcggatgcgtctcgaccctccatggtaattgtcgaaaaagtgtccacagcatcaagaagctatcctgacgtaccattgcccgaatccatacacgctccgccttgggcgtccaacctctcatgatgctcctcgtatgcctctgtatcactgtcagtagtgacactgactcggcctcaagatatgaccgcacttgaagcatctactgatgatcatgctgcattacgcaagaaa

SEQ ID NO: 330428 - DNA, 488 bp, Zea mays
ctagatcatttacatatactctgacattaatctcattttttaaataactaacgaaagcttaaattcgtattaaatgtgcccacctatttgtcatttacaaagaatagtactttatctatgcttgttggcgtactgattgttgcttcatttgaaatgttgaaatgaaaacattcttattgcttattcctttttttggtgatattactgccttctagacatgctttattaaagtgaaaatatttctctttttgttgaacttctaagtagtgtatttgttttgctgaggtttcttcttttatagtagaattttatttttttattttcttgtatttgttttttcttttcattatttttttgtacttgttttatttagtttttttttctttatttattcttattattttggtttttttttttatttttatgtttttttgttattatctatttatatttttttattgttattttttttattattatgttttttt

SEQ ID NO: 330429 - DNA, 362 bp, Zea mays
cggtaccggtccgaattcgagggtcgcccacgcgttcgcggacgcgtgggtgcagatatgagtcaccggcggcatcggaagacatattttccatctttgaagagctgcgttcaagtgaggagcctgtcattaacgagattgagccatgctacacgaatagctctgccaaatgtgaatcggaaattcaacaggttagcccaatgaccgatatattgctcgaaacgaaagccatagtttactcgaacaaaagccctatagatgaaagccacgcccaagatggcaacagctgggagacaatcagccatgaagacatgctggggtcgagcggttcgcctgatggaagcgaaccttgagtcagcaat

SEQ ID NO: 330430 - DNA, 167 bp, Zea mays
ctttctcttttgaagagatatttttggtctttggatagactttacccagacaagggcctgtcttttatgacaatgaggcttgctaccctaatagctttgccaaatgtgaatcgtgaaatttgacaggttaattcccatgaacgttatattcctttgaacttaaggcc

SEQ ID NO: 330431 - DNA, 135 bp, Zea mays
ggggacgcatctagagtgggcgaatccgatcgtgtgcgcgctgcgttgtccattggctggggatctaacaagatgcagcgaggatacaatggagcccgtaggtgagcctgagcgaatgcagatctactatgatat

SEQ ID NO: 330432 - DNA, 119 bp, Zea mays
cggacgcgtgggcggcacacccgagctgatgcagtactaccatgtcaacgtggtagtcctgctttgatagcgaccgacttgaatgagactacgagaccgttgatgaatgcagccccaga

SEQ ID NO: 330433 - DNA, 189 bp, Zea mays
cccacgcgtccgcccacgcgtccgctgagactgtggaacttcagattggtctgaagaattatgatccacagaaggacaagcgtttcagtggctctgttaagttgccccatatccttcgtcccaagatgaaggtgtgcatgcttggtgatgcccagcatgttgaggaggccaaaaaaatggaactggact

SEQ ID NO: 330434 - DNA, 370 bp, Zea mays
acgaagacttgctctttcaccctggtgcatcgagcaatttgcacgtccagaggaatggtcgaagttgcggttagacaaggtaaggtggttgacatgtatagttgagaggagggaagaaggtgcattatccattgtgccactgctatcaaactgcagaaatgtggaagagctctgcgtgtctgttgtgccatcgcagggcaaatggaggcggaatagtggcgatggaggaagtcatggtgtgcttggtggtaagagggtatcggtgaaacatctaaaggtcgttaggatgaagtacattgatgaaagcagaagtggatttaaactggtaaaggtcctgctcaagaacgcctctgcactggagaccatgaca

SEQ ID NO: 330435 - DNA, 145 bp, Zea mays
accaagacttgctatttcaccctgctgcatttagcaatatgcacatccagaggagtgaggggaggttcggatcgacaaagtggggatgttgacgtgtatagcatagaggagcgaataacgcgcgttatccattgtggcactacta

SEQ ID NO: 330436 - DNA, 95 bp, Zea mays
cacacgcgtgcgctcacgcgctcgcacagttgaatcgtcagattgcacgtaggtttggccggtcgtacaagtatatacttgaactggacgaagat

SEQ ID NO: 330437 - DNA, 80 bp, Zea mays
cccacgcgtccgcggacgcgtgggcgaaaaaaaaccctccgacttcgatagcaatccattttttggctgcagcttatagc

SEQ ID NO: 330438 - DNA, 426 bp, Zea mays
  unsure (1)..(426): unsure at all n locations
cccacgcgtccgcccacgcgtccggtgccgccgagcgggtggtgggagatatccggttgggcggagtcggcagcgggcgcaaggagtcactagcgaggtgcctgattgggattagtgaagggcggggtggtgaggtcgccggtggccggggcagtgctcgaggcagtggagggaggagaaagatgggtgcagacagaggaagaagaccatgcggcagaaacctttctgacacgcctgcacggacgacctttattctatggattgaagatgggtgtnctaccatctggagaaagagctctaaaggtatcaatgcaggccttccttctttcccttttcatgattttctttcttccctggcaattcagaacgggaggttctattggaagccaattacttactgagatcagcatttttatagtgaccact

SEQ ID NO: 330439 - DNA, 159 bp, Zea mays
gcgcctgtcgtgccgttccggaacgaccgactcgaccgacgacgcctccgaccactcgtcccgtgccgacaagcgtgtggcaggagatatcccagtgtgcgaaaccggcagcgtgcgcaaggagtgactatcgaggtgcctgagtgggattaatgaagg

SEQ ID NO: 330440 - DNA, 80 bp, Zea mays
ggagtcacctgctgcctaaggttccctggtcagctgaactccgacctcaggaagctggcagtgaacctgatccctttccc

SEQ ID NO: 330441 - DNA, 262 bp, Zea mays
cccggaatggccggatcgacccacgcgtgcggcgagaagcccagagagggagtagatagattgagagagagagagtgatcggcgcaaggagcaccgctgagcctgcgcgtgctgcttcaccgaatcgagtcagaccctgtccgaatccgagccgaggcatggcagccggaactgaggcctcgaaggcagatgaggctgaggatgactggcctaagcgggacagacagaggatgctccatgcatgagaccaggttggggatct

SEQ ID NO: 330442 - DNA, 54 bp, Zea mays
  unsure (1)..(54): unsure at all n locations
nccacgcgtccgtccacgcgtccgaaaaaaaaaaacagacagaaatatccatag

SEQ ID NO: 330443 - DNA, 142 bp, Zea mays
cggacgcgtggggtctcagcctagcgcgccgccacaatgcaggccgccgccgccgtcgtcgtccgccacccgcgcctattcccgccgtccccgggccgctccgcgcagcaccggcgcgcacccagcaccgtgcgcatggcgc

SEQ ID NO: 330444 - DNA, 251 bp, Zea mays
gtcaggcatccttcatccattgctcgtgtttaaaccaacatgtgtatgcattagggtatgggagttatcaatccaggtctgggttcaacctgactaacatctcattacagcttactgttgaaacaaacatctgtatgtaatattcattcctcaattgcatgatgattgcctaggatctctgaaacttatatccattacatcatgagatacctctttctctgtgctatcactatataactacttattcctca

SEQ ID NO: 330445 - DNA, 88 bp, Zea mays
agcaaggtcttcatccaagaacttctactcaatgatggcagctattgactacagcgtctgagttcatagtgaggtttatgtgacacac

SEQ ID NO: 330446 - DNA, 184 bp, Zea mays
cccacgcgtccgcccacgcgtacgaggacgaataacctttctaggctgacgacacagtggcgcttagcacatatcgggggagcggaacagctgtcaacatgctgcacatggatgggatgaaccctgaaccggaaggcgtaggaatcatctgtggctcacacaactgcaggggcgaagcaggaca

SEQ ID NO: 330447 - DNA, 129 bp, Zea mays
taccggtccggaatgcccgggtctgcatacacgacaaagggatgcgaacaacccgacgagtcaactttctatggctgaggagacatcggccgaaagcaagaccaaggcgaccggaacagcgtgcaacag

SEQ ID NO: 330448 - DNA, 189 bp, Zea mays
ccttccgccaatccttccgaacaacaacgcccgtttttccttgttggacttaaccccccttttcgtctcttctccaatccgctcccgtgctctctctctctccctctccgctgcctcagccgccgtcgctgtcgctgagccgacagattcattcggccggtcatggctgacgcgttgtgcaacggcgtc

SEQ ID NO: 330449 - DNA, 293 bp, Zea mays
attcccggctcgacccactcgtcctcacactcttgcgaaaaaaaaaaaaaaaaattaaattaaaaaaaaaaaataaaaaataaaagtatagattccaatctaacgaacacaatcatacaaacctataaactctaacataaaactacctaaatctaaatcatcttaccaaaattctacaacatctattacttacaaaaccctacttttacacaacttaatcgccttccacaacatcctcctttatccaactgccgtattctctaaaacaccctttccgacttaactttccatca

SEQ ID NO: 330450 - DNA, 340 bp, Zea mays
ttatctagctaactcttacttttttcgctagtttttctattaagggtcccataccctcacttttcttctttttgttcattatcttcaactccattttccttccttctaatataaattacaatcatatttcacaaacttcccataccaccttctacaaatattcttattctaccttcacaatttaatgaacttatccttatttaaacctctacaatcaaaactatataactatcacaacaacttttatcacttcacttttcaacaataactctaactacatttccttctactatctccctttcaacaattatcctcaattcttcattaatctaaccataac

SEQ ID NO: 330451 - DNA, 301 bp, Zea mays
gtccggaattcccgggtcgaccgcacgcgtccgcccacgcgtgcgaccacgcgtccagccccattagcgccgccctcccttatccgacccaaggccggcgccaacgccgcatagacctcgccggcgcctctgcgccgccccgagggctccggaggtgctattcgcgcgcgatccgacggtgcgtccgtcgatctggcatagattcagcggcgctgcgagctgtgaaatcgacttgagcggagatcagaaacatgctacccaacttgaaaatggcactagtacggtctctaagatagtcgga

SEQ ID NO: 330452 - DNA, 90 bp, Zea mays
ccctcccttatcctacccaagacaagctccaactccaaataaacctcacctgaacctctccaccacccctactcctccacatattctatt

SEQ ID NO: 330453 - DNA, 235 bp, Zea mays
acccactcatactgcaataactcacatgataacaatccatatttaagcgaacaaggtcatcatcgacgaacagactctttttatactgatcaccaccgacaacacaatgatccttcgtcaactaaaatcactcctcacgccaatgaacacactaacgcttcctgatacactacataaaactactcataacatcacttaatttagcacaaggatccacaaaataatccatcaacaa

SEQ ID NO: 330454 - DNA, 296 bp, Zea mays
  unsure (1)..(296): unsure at all n locations
caaacaccaaactcactcaactccttaactacccacttacacttcaacccaccacactaatcacaattcacacaaccccataccctaaaacctaaccaaaaacaacatacacaatcaactacacacaacatactaatacctcctaactcacaaccaccaaatcaaaacaatacacaccataccccaaaccactcaaacaacatattcccaccctcaacaccactataacacaaaaacacccacaaacacaacaaactcnacacactaactcacacactaaatacctcaaaaaacac

SEQ ID NO: 330455 - DNA, 294 bp, Zea mays
  unsure (1)..(294): unsure at all n locations
cccactctttctctcactcatacncaagattctttccactcactcactcctatatcacaggtatgtctctatactacgcgacacctacaccatcaatcacatctccacactctctatctacattaacaaccccaactactacaacctaaatccacttctgtctcacctaatctaatctataactcctatccttatcttcaatactaccctcaatatatacaatatactatttccacaccaacctaattacttactctatcatacactttatactctcctcctacccaccaaata

SEQ ID NO: 330456 - DNA, 190 bp, Zea mays
agttaactatcaagatcgcgcgccccacacacctacaccactaccttcaaatactaaatcacccccttcaacacctaccacacctacacacgcaaccattatctcaatccacaacctacatcagtcaaccatccacatccactataccaacaccgcaaataacctagctgtaattaacttcactgcaaca

SEQ ID NO: 330457 - DNA, 249 bp, Zea mays
ctggactttatatccaacaagtttcgctttaagcacgtcttttcaaacttcagctaagctagcttttcaactaccgcctccccaaccaaatgtatcagtggccacatcaatgtacattataacaatcaacttctgtctcttcacctgacaatccctcaatatccatctcgtgataccattatagacactacatgactttcatgtccacaactatctttctcaaccctttacttcaccttctctctccat

SEQ ID NO: 330458 - DNA, 171 bp, Zea mays
tctcccattcaaaaaatgaaaaaatattctataccataatctcacaatacttaatctcttactacaatctccatcacagaacttcattctataactcaaacatactcataactatatcctatactataaaaacccaatactatcaacaactaccctcttaaactctccaca

SEQ ID NO: 330459 - DNA, 370 bp, Zea mays
cttgtctccaccgcggtcctgcaccacggtcacctccaccggcgccgccgcctcgcccggcgtgctacgccgtcgtcgcgggagctgcggctgaggccccgctccccatggcgccgcgcttcggtcgggccacgcggcaacccataatcatgttactcgccatcctgtccgaatcgctgtaggaatgggagccaggggggagcatggatggaaggcaaaaagcatggcacgagaacgcgagaagatgctaaggttattgtccttttcatgccaactctagccggatatcttccccgatgccgctgcatattatttcggtcatcttcttgattcatgatttcgcgcagactctgacctcgaatcctttatg

SEQ ID NO: 330460 - DNA, 249 bp, Zea mays
aattccctactcgacccactcgtccgctcacacataccaccacactcactcacctttaccttaacccatcatacaacaatacacacgacatgatactatcttttagcaaaacaatcaacaaccctacttctaacaatgtaatcaccattcactcaccccacgcttcaaactttaataatcttaccttccattccctctatatccccctaccttttccaaccatcaataatattacttttccaacaaaac

SEQ ID NO: 330461 - DNA, 309 bp, Zea mays
  unsure (1)..(309): unsure at all n locations
ccacgcgtccggctcangcacttcccgttgatcagctccacctctacctgttcgctcggcccttcttcatgagctgggaccatgcctcctccatcagctcccgctccttgcgctccatctcgtatctctgcgcctgctgcttgaccttcaccctctcctccttcagatcgcgcataatcctgtcatctacctgctccatctgcctccagtgcctccgctctgcacctatctcaacctggacggctgccacatcgttgcttgccttgtcccggacccgttactttcacgccgtcttctcctaagccatcc

SEQ ID NO: 330462 - DNA, 371 bp, Zea mays
gaattcccggttcgaccgactcgttcttccagcttcctcctcttatcctctagcgttccccttcacggctgatcaatatactctctggtaggtattatactgcaagggacgcttacccttatccatatccctcttccgctcaagagctgaaggatgaatcagcatctcccgctgtcaatacagaagcagaaccagcaacctctgatccctaagcttctgctgctgcttaataccccgcctcggcttatccgtcctctgatgatccctataaggcctatcctgtcgctgatgtggcccataaagccatctaatgacgccgttctccttactctcactgctgcacctaacatcagctctagagatctattttc

SEQ ID NO: 330463 - DNA, 292 bp, Zea mays
  unsure (1)..(292): unsure at all n locations
actacattcatcacttttaccaatttacatctatactttacacatttatttttcaactctcttccaaatttatccaatttaaactaatccatcttttcaacaccttccactacataaactcttcatcacacaacttctcaacatcaccaataaccaacattacataaacctcttcaattcttatccctatttcttataaaatcaatanctacaacatattttaacaatnccaaatcaacaattttccttcttcactatannccttttctttatactattacttttcccttac

SEQ ID NO: 330464 - DNA, 319 bp, Zea mays
  unsure (1)..(319): unsure at all n locations
aattcccgnctctacgccacgcatcctgacagcgtgcatattcanaacgtgctgtccatcattaatcctaaacctcctgatataaaggcctgcttcattttcagtcccggtgctcctacagctacttgtggctcatcaatattcgaccgtccaccatattatgattaccccatggtcactatgaacagccccagtcaccatatctcgtccgtcatgctgcacaaggtgtacaatatcttcacgactattcttcatcttgctgattgcactgttcttgtggaacaacgatcgtggaatttacttgattttgcactgctca

SEQ ID NO: 330465 - DNA, 152 bp, Zea mays
ttcataactttctgtctatcattaatcctaaacctccttatatatagccctgcttcaatttcaagcccccctctcctacaactactttttactcatcaacattctacctttcaccatattatcattaccccattttctatattaacatcccc

SEQ ID NO: 330466 - DNA, 175 bp, Zea mays
catccaactttcaataccgtttcttctatatctatctccactgacccacctactaccactacctcaacaacatccttcatacctacttctaggtcctcgattctaagatcatcctatatccggagactcttatgtcccacatcttcggcttcttcaccttctccacttattactc

SEQ ID NO: 330467 - DNA, 167 bp, Zea mays
  unsure (1)..(167): unsure at all n locations
ccatctccactcattacaaatattcctnactatcaccatcatacaatccatantattacatctcatataaatntccattaatatccccatataattacatacaaacctaactctctacacttaccaatacctacatcaattacttctacccatnaatcatcatctca

SEQ ID NO: 330468 - DNA, 235 bp, Zea mays
caccccataacatacccaaagctacgttcattttaaaacatcgcaagcccttccactactactcaactatatccacctctcattcacctctctctctctaaataaccaacaatcaaacttataatccatacttatctaaaattactccaatactacaatcactttacacttctctccaatcctctaaataacatataatccttacaacatctattctccatccatcactacccct

SEQ ID NO: 330469 - DNA, 305 bp, Zea mays
tatcattaaaatatctatatacctcaaaataaattccattcttttaataaaatttcccattccatcccttatctttacaatcatatatccttactatcttttcactcaatctccaaaccttactacctatactatataaaaaaaatatcttatatttaattaactctatttctatcttatttcattcatcaaatatacaaactttcatctttcaatctattttccaacatctccaatcaaattctttccattcttttcatcattccaccaaaaccttatatattaatcctatcaatcaatacatt

SEQ ID NO: 330470 - DNA, 186 bp, Zea mays
catgttattgcttaaaaaacaatattgagcttgaacaagcaatccaatcttggtagaattttttctcaggcaaacccttttgagttcaattcagccaggacaactataggtttggatataataatagtacatagattggattgcttgttaaagctcaatattggtattgaagtgttattgcttaaa

SEQ ID NO: 330471 - DNA, 332 bp, Zea mays
cacgcgtccgaaagctcagggaaaccctaattaagaccttgcagtactacataaatattcacctccacaagaaggttatactttaccatcagcattttgaccctttaatacataatgcatcacacatatcttttctacaaaaatcccatatttcacacaggtgattaatatctcatcaacatctaacatctttttacatcgcaattcaaaacttaaacctagatataaaattccatctaacttaaaaaaaattacactatcaatccaaaatccacaaaaccttactcgctatatactctacaccgattcaactcgcttaaacataccttaac

SEQ ID NO: 330472 - DNA, 146 bp, Zea mays
tctcaatttaacacctttgatttcaacatcatcacacccattacccgacaagatctttttcaagatcacgtatcctacccaccactatcctactaaatcaacaaatcctatttaatattcctcacaaattaacaccatttaccaca

SEQ ID NO: 330473 - DNA, 445 bp, Zea mays
  unsure (1)..(445): unsure at all n locations
accggttcggaattcccgggtggacgcacgcgtccggcatttgtgttgcctagtcgagattctttaagcttgggagagaggacaatggcgtanccgtcctcgttgtgctgatggagacacggaagttaggaaagttgcaattcagatcattgcacttttcttcgacatttcattgtcacttccaaagcagaaggcatatcctaatgatattgatctggaatcctcgtatagtgctttgtcctcccttgaggagttagtctctattgtcagaagggaggcatctgttgatcaaactgaactatttcagagggttgtatcctcagtgtgtattctattatcaaaggatgagctggtcgtcttgctacactcttgtacgttggcaacatgtgataagataaaacagtcagcagatgcttcaattcaagctattatcatgtttattatc

SEQ ID NO: 330474 - DNA, 365 bp, Zea mays
gtagccatgtcgtctgcctcctcccctgcccccgcctttggctcctccctcttctcctcgtcctccgccgccgcttcttctgctccaacttttgggtcctccctgttcagggcctcatcggccgcgtccgcgccatcccttttcggtgcaacgcccgcatcctccgctggaacaacccttagcttattcggcgctgctacctccgccgcaagcagccctgggttcttcggcgccaccttcactgccgcaagcagccccggcctcttcggtgcgtccgccactggctctgcggcaacctccccgagtctgttcggtggcacctcgggcctattcggcgggacttcctccgcagcgaccaccccgag

SEQ ID NO: 330475 - DNA, 406 bp, Zea mays
aattcccggctcgacgcactcgtccgcccacgcttacgaccacgcgtctaaagatctcgatataaaccacaagtcttggggctctgtcgcacttcctacctgcttacattcattgcgcacttataaactctaacgtagaaaaattcatacattgcttcctccgacatatggcttgtacctgtgaactaataatccttcatcactacattgttaacttgcttgtattgtacgggacactaatgatggacttctgattgactctaattgacgaaagacaccacactcactcaatttccattaggacaactcctttgatacgtcattgaacccatactgcatcacattcgtcacggggaaccaatacatgacgttcagggtctgcatactcctcattatcttcacatca

SEQ ID NO: 330476 - DNA, 281 bp, Zea mays
aattcccgggtcgaccgcacgcgtccgcggactcgtgggctgactcgtgggagaaaagtggaaagaaatgagactggtcacccgtcggcaatacgtataggatgataaggcagctgtctatctgtgttgcgcttcactaagtgtgattgtaacagtggtacctcttgtgttctgtgttccgcgatgttgcagttggttgcttgatcgaaagatgtttcaacctcccatctgctagctatgatacagatggtcccctgataataatgatgacatattctgtg

SEQ ID NO: 330477 - DNA, 168 bp, Zea mays
gacccactcatcctcccactcttactaccacacgttttaagatttcactctaaaccaccgtttttcgatctctgtccacttcaaacctcctttcctcctataaccaccacttacacactagctaataaaactccatacctcctttcctccaacagacacccatgacca

SEQ ID NO: 330478 - DNA, 267 bp, Zea mays
atttccgttcgaccgcacgcgtacggccactactttctctacccgttcgcatgttaccgcctacaccttctacatattgtcaatgtcctccttcgatgctttttctgctccaaattctatctcctcactgtctatggcctgatctatcgagtccgccccataactactccctgcaactccctcctgctacgatgacacaacacttagattatatcccgctcctacctccgtcctaaacactcttgtgttcttcggctccaccttcac

SEQ ID NO: 330479 - DNA, 276 bp, Zea mays
ctccgatttaccatcggttatgacatccgaaaaaaccaggacgtctccaaccccttttaaaacgatatacggcttttaaactctacggaagaactaaacaacataatccaacatgcaaaacatcaccatcatttgactgaccactatctgatcaatcaataaaacctaccacataacctgtgaacaaacgatctacttaactctgacttactgaaaaaattctacacaatcaattactccacatctacttcacaaatttacaacaatctattatac

SEQ ID NO: 330480 - DNA, 412 bp, Zea mays
taccaggtttgctctgcggttttatcctataccatcttgggaagtttagagggtttttaccgcacatgaataggggtggttctgctcctgaagctcaagctcagaatgtctatccattgattggtcgtaaagtgatgagtctgtggcctgaatacaatagtttctatgaagcagtcatatacgaatattatgcttaaactggccttcatacacttgtttatgacatctattctgcatattaaaaccttctattctttgatcttaaataaatggtacctgaatacataatatcgcaatatgatgactcttggatagtcctctttacatatcttctcaatctttgttgcccaacttgttgccttattaaaccagcatttctctgtgttcccattcccatttcttttatatgaaa

SEQ ID NO: 330481 - DNA, 253 bp, Zea mays
acctatccatcttcaggagtttagtaattttacccacataatagggtattctctcctaaactcaactcataattcaaccattattgtctaaaattataatctttgcctgaatacaatattctataatcttcatatctaatattattctaaacgtccttcattcactatttatacatctatctcatatgaaacctttaattttttatcttaaataaatgttacccgaatacataatatttcaatatgatgactc

SEQ ID NO: 330482 - DNA, 327 bp, Zea mays
ggaattcccgggtcgacccactcgtccgcccactcgtgcgatctagctattcatgttactataatcttacctctaactataccaagggacaacgggccgagacagatagaggtacggtctacacaatgcttgactagctgatcatcttcaccaatggacagcctattctagcttcactatgacggccgctcggcgctcgagacgacacagactgacatatccacggcctgatgcactgctgactactagaggacctatccggatactcaagcttgtctcaggacaattacggtgttaaatctaccttacacaacgacctccgccttg

SEQ ID NO: 330483 - DNA, 289 bp, Zea mays
ctataaaaactccgatttttcgtttaacaaattcaccttttattacgctttccgcaaatttttataatgcctactcaatatcacacttttaacacctataaaattcaatcatcaccacataataattttatacatacttccaatttcccatcatttactcctctccttattcatattcacacaaattacttcaacactcttatactttaacaactatccatatatatccattatcatttaaattacaatattcattcaactttttactcaactataaattaaccatcac

SEQ ID NO: 330484 - DNA, 323 bp, Zea mays
attcccgttcgacccactcatccggtcatttcgaaactgcttccatatacatctatacactcacactatcttctactccacacgctgctttacgaacacatatatccattcatggcacacaatctagccgcatgactacacactgaattcccaaccctatacatcactaacctatgcatacattccaagcacatgacaccatcaacatcctctacaactgccacaactacaaaattcataatcagcatcactcccagatatcaatcccccacaatccttacattttctattgctcttataattttaaacaaccttcaacttct

SEQ ID NO: 330485 - DNA, 343 bp, Zea mays
aattcccgcctcgacgcacgcctcctaacgctcacatctacattctctatctgcgtttccgccgttaccgatcacgttctctaacgcacccttatacccatacctggcctccgatctctatccacaactagctacagaataatctacagatcattacacacacaatgcatacagtcctgtccatgatgttactgatacactgcacaacttaaactgatacaaatgtcatcactagccttgcaatatgatctaaattctacattatccctattcttgctattgctacacttactcttcttaactttaaccttacttccatgtacgacattgcttgagctcctct

SEQ ID NO: 330486 - DNA, 296 bp, Zea mays
  unsure (1)..(296): unsure at all n locations
cctacttcttcctcnttcttcccctacatcacctaagactctttccaaccacctttcctcctccactaccaccccttctacccaacctcctacccactctacatcacctacctctcccccatctactacaccttctacctctacctcctactccccctcccacttcactccaccatctccacacccccatactcatccttcaacttctaccccttcctcctctacaccctctaccaccacatctccatcctcaaactctctctctccctcaccccaccccctcacaaatacaccta

SEQ ID NO: 330487 - DNA, 406 bp, Zea mays
acgcactcgttcggactgctcttagtgtgaccggtttaacagtgagcggtcgattgggtttcggggagagggggtcctctatgtcagcgactacggatgctgcaaagagcggctcagcctcaccggtgctgtgccagcggatcggctgcgacgccgtattcaccgacgatgacaacctctagggctcctgccaataccaccccttcgcacctatgtttcatgactgcatgaaagaatggatctgctgcaagcaaagaatccatgatttcagcttatttttgcagatacctggatgcacaacatgaaagcatacaaccgaaaaaccaatcacaaaagctgtttcatctaaccgtacaaaggcaacaccgatccaatcctttaatcatggtgtgggagttgatgtgtg

SEQ ID NO: 330488 - DNA, 148 bp, Zea mays
atcaaatatggtttaaagattttaaaaaccgaaactctcttcggctttccgtaaatttaacatgacatacgcacactacatcatcttattacattctcataatcacatacaaactaccaccaaaaaatcctacaaattcttaatcaac

SEQ ID NO: 330489 - DNA, 263 bp, Zea mays
acgcactcgtcctcaccagtctccctcgcacgtttttcagcttctctccaaatctcgcccatctggagccacgtgtctctgtaatacggcgtacaggataagaggcgctatggagccctcctagcgaatcgagtcccggactgctctggagaatctgcctaggagcatggcgctgcctctgacgcccatcatggtgactgtgccgtctgctgcgaatcatggtctccaggagctgctctcctcctcgctgccagctgccggca

SEQ ID NO: 330490 - DNA, 369 bp, Zea mays
ctcaattttctcccacttctctcttctctttactttcctccgtctcttcctgcccctccgctaactttccacgagcatccggctccatcctcacccccacaccccaactcccctcgtccttcacactctccattattatgtccatatcgtctccttattttctatctatctatgataaaattctttatcacttctcttcataccaccatcaacaacttattcataatctactcaagatcctcacctacactctctgctatctctcattctctattctttgccatatttactacctctcctccactttcatcttttcatataatgactacatgcctctttatcacgtcttcaaaatcattatatcctatc

SEQ ID NO: 330491 - DNA, 434 bp, Zea mays
acgcactcgacctctcaattttctcccacgtctctcttctgtttacttgcctccgtctcttcctgcccctccgctcccttcccacggacatccggctccatcctcaccccctcaccccaactcccctcgtccttcactgtctcgatggtggtgtccatggcgtctccttatggtctatctatctatgataaagtgctggatcacgtgtcgtcataccaccagcaacaacttatgcagaatctactcaagatcctcacctacaccgtctgctagctctcgttcgctgttcggagccatggggactacctctcctccacgtccgtctgtgcatataatgacgacatgcctcttgaacacgtcttcaaaatcattatatcctatggcaaaagtgtgtgtctatgattccctgagtcaaattatctttcttcaatatt

SEQ ID NO: 330492 - DNA, 228 bp, Zea mays
ctagacccgccgtcgcctgctgatgctctccgaaccctatccctcctcatctgccgggtggaactacggcacccattacgctcaaacatgctgaatagctgacgcaacatgcactggctcggacacatcatgaacatccgatacttcatctacaccaagtgctttcccaaggataaagctatcaaacatcccttggtgatgaacattggtaaacaggctgacgaaaga

SEQ ID NO: 330493 - DNA, 463 bp, Zea mays
cgcaattttctcccacgtctctcttctgcccacttgcctccgtctcggcctgcccctccgctccccgcccccgagacatccggcgccatccgcacccccgcaccccaactcccctcgtccttcacggtcgcgatggtggtgtccatggcgtcgccttaggggcgatcgatctaggagaaagtgctggagcacgtggcgtcgtaccaccagcaacaacggaggcagaagctacgcaagagcctcacctacaccggcggcgagctctcgttcgctgttcggggccatggggacgacctcgcctccacgtccgtcggggcatagaaggaggacatgcctcttgagcacgtcttcaaaatcattagatccgatggcaaaagtgtgtgtttatggttcctgagtcagatgatctttcttcagttttagatgtgatagatattagtatgaaagattaaaactagaatgc

SEQ ID NO: 330494 - DNA, 236 bp, Zea mays
aaggcacctgatagtttatctctcatttctgaaatcagcatctaaagcaactttacgacattatcacaacctccatctgctaactcttccaacatgatctaattcaaatcaaataccacaaatacctctttatactaacatcacatatgaacatcataatcaaattcaatcattattctataactctctactcatttaaaataactctatacaaactctatccttctaatacccct

SEQ ID NO: 330495 - DNA, 336 bp, Zea mays
cttctcctccccttccggttcgggttcggtttcgtgaggttctccggggttcgtttgggggtgagcggatcgagatggcggcgtcggatgttgagtaccgctgcttcgtcggcggcctcgcctgggccacggacgaccactccctccacaacgccttcagcacctacggcgaagtcctcgagtccaagatcatcctcgatcgggagacgcagaggtcccgcggcttcggcttcgtcaccttctccacggaggaggcgatgcggaacgccatcgaaggcatgaacggcaaggagcttgacggccgcaacatcaccgtcaacgaggcccagtcccgcg

SEQ ID NO: 330496 - DNA, 133 bp, Zea mays
acccactcatcctcacacacctcctctccacctctctaacactttctaccatctctatctctcccagaatacgcgaaattcccaacgcctcttcccatcctcaactctccacaactgcctcactcctaacacc

SEQ ID NO: 330497 - DNA, 357 bp, Zea mays
cggacgcgtgggcggacgcgtgggttttttttttttttttttttttgtcagggacagaggacgtagcaccagtaacgactacgtataagatttgctaaatttaaacacgcaacgccagtgcacactacgcatgcagacaatggatcgaacgagaagcaagcagcaagcttgaaactatgcatagtccacgaggtaagctgcctctgcctacttgcagctggtcgcttagccgagcagcttcttgacggcctggaacctggcgtccttgtcgccgaacttggtgccctggtagtagtctagatagtccccgaacctgtaaggaccggggtacgcggcggcgccggcgtactgatccct

SEQ ID NO: 330498 - DNA, 367 bp, Zea mays
ccggtcttgaattcccggttcgacccactcgtccgtttactctttctttcttttctttttgattttttatgtcttttttaattctaagctttttgcttttaattcaatggtgaatgttattttcaatttttttaagatagaagacacacgcaaggtgttcgatgaaatgataattaagggtctcgcgcaccgatattgtcatttacaacaccttagtgcctgaatattagaaggcatgatgctcacataaaacattgtaagtgtaaaaacacatgacacacaaaagtatcattccatacgttatgacatttacttcattgatccatgtaatgtgcaaagctcctaacttttagcccttactaacatt

SEQ ID NO: 330499 - DNA, 94 bp, Zea mays
gaccaaaaaaagggcggcccttttaaaggacccaagcttacctccccgtgcatgcaacggcatacctcttcaatagggccccctaaattcaatt

SEQ ID NO: 330500 - DNA, 156 bp, Zea mays
ctttcgatcaatcatgcatccacgcgatctcaatctatcggtgaaccctgccagaccaacaaaagtctaacgggatcctctacatactattcacgctatccccacacagtgtactccgggccctaacgagggcggcaccgaaagacccccatcgat

SEQ ID NO: 330501 - DNA, 400 bp, Zea mays
cccacgcgtccgggaagaagaagaaaatcttttcctacgtaagggtccacttctgaggaagctagcagaaatcgctcggaaatgtgatctgaaaaatattagtgacgatgtggaatattgtttatcaatgtgtgtggaggagcgattgcgacgactcataagtactctcatacgagtctcaaaacagagaatcgatactgaaaagaccggacatcgactagttattacttcagatgttggtcgtcaaattttacagatgaaccagagagctaaggaagaatgggataagaaacaagcagaagaagctgacaagaacaagaaacaaactgaggctgatggcagtggtgctacagaattggaaaaagaaaaagaagaaagtctgccaaagaacgttaagccc

SEQ ID NO: 330502 - DNA, 337 bp, Zea mays
ttgacgcgtggggggtattcatgatcgattattcctctagcaagagcttcaagggtcttaggataaacttgccagctggagcgcaccctacggctgttactttctcataggggtcatcatctgttgttgtggcgtcgcatgcgcttctgggatcatctctttatatgtatgctgatgttaacgctccttcaaccgtggaaaacaaactgcatggaaagctttcttcacctgaaatcaagtgtagtcaccccaagatacattggtatggagtctgttctcaaccttgcaacataccgtgcatctcatgtggttggtgatgggagcactattaatcatt

SEQ ID NO: 330503 - DNA, 166 bp, Zea mays
actcgtcctcttcatcaaattagcatttttcatgctttatttcatcttaggctttgttcaaatttacattggatatggttatatataatctaccactgattccttactatccatatcttgctcatctatgcttgttttatttatttttattacttgtattttatca

SEQ ID NO: 330504 - DNA, 142 bp, Zea mays
ccgggccgacccactcgtccggtcatacatgcgagcacatgaacgcttcattacttgctttatgtaatctgagcacctgtcgagctattggcacacgaacacggcacatgtaatgaaatacggaaacaagcctacggcacat

SEQ ID NO: 330505 - DNA, 237 bp, Zea mays
ccggttcgacccacgcgttcgaaaataaagcaagcaccagaatctcatatttcccaaactcgcaagtcgcaacggccatgtgtgcacttccccaccgacttggggttctagtccttctagacgccgtcgtctcttctcactgctttcgtcgcatacctcatctgcgcgtctaactacctgctgtccaattacggcctccctaaagggctcattcctgactctgtcacctcctacaga

SEQ ID NO: 330506 - DNA, 308 bp, Zea mays
aatatgccgctcgacccactcgtccgtccacgcgtccgcttctttaatttagcatttcacatgcatgattccatcttaggccttgttactttcatacgttggacatgtcatgtccaagataccacttacgtcttactcttcatttcttgcaaaactaatccattactattaattctcattacttagattgtaacattctcatactgtcttaagattctgcgttacatatatgtctatccatattatacatccttatcactttattgtcactaaccactatttattacatctatcgtctaataatacta

SEQ ID NO: 330507 - DNA, 460 bp, Zea mays
cggacgcgtgggtaacacttctgcatatctgttaaataagtttcttgtgatctaacataaaggagttaccctatttctggatgcatcataggtgatgtgaagcgtgttggctttccaacatttgcttagtgcttctgcatagtgcattgagtagtactaaatttagttttgtgtggtctaggccacaccttatgctttgtacaaacaagcaagctaccatgatttctattggtgtgttgcagctggtctatgcatcacagttgttgtccttccattgaacgccgttgaattaattatgtcgatcaaatcaaaccctactcatgttcctgctgtggagctctgccataacgttgtatgtccatgtgatatattgctttcaagtccagttttggactgtccaatctctatctgtgctcaactcaagccgtgtggtttcatgttaattgatagcagcaaaaca

SEQ ID NO: 330508 - DNA, 296 bp, Zea mays
cccacgcgtccgcacctaccatcttcatcttcgacaacagcgtaatgtagtgtacatcgggagaggttacttgagagaagtaccaatccacactgtcaaccgagcaagcttctaaggctcatgtcaaattgacctacgtgccatcccatgatccttcgcaccaggtatctcgaagctcccaaggctaacattgctcccaaggataagaaggcgcataaccagactaaacttttcatgactaccaagccgtcgatataaccttcatacgctgagatgaatgtacaggcaatcgttga

SEQ ID NO: 330509 - DNA, 217 bp, Zea mays
ttccctggtcggccgacaccttcggctacgcttgcgcacacgcttccagctaatattgcatcatatattttaatggcccgtgtagggtgttaactgcacaaggggctgtatggtacaaattaacccactctaattcggtccaattagttggcaaactccatggcaaatccccttttgagtatttgtggaccatttgatggcccatttgatattttaa

SEQ ID NO: 330510 - DNA, 449 bp, Zea mays
cggacgcgtggggcgagtaagcactcccatcctcaatccctcccctccgcgggtgcgccggaaaccccgctgttcttcgccggagcactccctccccgttcccccgccgcccccggccccccgacctcgatatcttcggagcccgccgttgggggcctactgcatgctcaaatcgtagacactgggtcggggcgtggtagagatccgtccgggctcggatcgatttcttcgttcgctggtgagtagcctaggcaagctgggcggggttgtttaggagctcgctttggtctaggaaaccacctattttctgagtgagaacaattacatccaaatgaactctctccattcagccgggagccatttgcttgcttggcaccctattctagtgactctagtccatccacgcgtggttcagttaggttcttcagcgcgcaagatcgacctacact

SEQ ID NO: 330511 - DNA, 294 bp, Zea mays
ccgtttcgacccactcttccacttactcttttttctagtaatttctcccattctcaatccctccccttctcaagtcctcctgaaacccttctgttcttctccatatcactcccttccctttcccccaccttccccttctccccctacctctatatcttctgatccctccatttttttcctacttcattctcaaatcttatacactctttcttatctttttacaaatccttcctttctctaatcgatttcttcattctctttttaatatcctattctaacttatctttatttttt

SEQ ID NO: 330512 - DNA, 332 bp, Zea mays
aagaacattgttaaacctccacgggtattacatccattccatcccattctctccaagcttaacatgtactactaccactactaacaatctgacccttttttttcttaacacaacaaccaaattattaagtatcacacacaacacactctcacacacccactgccctaaacatacaccacttgcttttacgcacaaggaacaacactctacactcaaattaaaccacttttaaaattacccagccacctattcatcaactcttcacccctgcctttccaagtatcttttcatgtccccaacaagcgttaaactttcccaaattgtaaaaattt

SEQ ID NO: 330513 - DNA, 445 bp, Zea mays
ggcatcttcccttctctgggccgcacccgcagtcccgcaccgccacgcgccagagaccatgtggcgccgcgccggagccgggccgctcctccaccacctcgctgcagccgcctccgccgccgccgccggccgctgcattaatggacggccgctacctcctatgcccaccgcctcttggtcccccctgttccagcacaatcttggaatctcgtggggttccgcttctgtcggggctcccttccggagcctgtcgaaccagtcaagcggcggcggcgcgtgctggagctgcggtgcgacgggcgcgttcctctcctgcgggtcctgcgggagcgtgcagcctgtcgaccccgccgtcgactacttccaaatatttggcctaaaaagagagtataatataacggataataacttggaagggaagtacaaggactggcagaagaagtta

SEQ ID NO: 330514 - DNA, 422 bp, Zea mays
tccggaattgacggatcgacccacgcgttcgatcgcggacgagcagctgtagcatgataacactaaccaaacgtgcccatccagggtgactggtccgaggtgcgtggcgttgacccatggtgaataacggcaagtggttaacctccggactgaaagtatccatgccgtaatccaacgaaatcaactaggagaggataacgatgaaatcagctggtatcatcccaacaacggtagatctgaccgcatctacctacctggaagtcaatgtgaacggcgacagcgactccggctgctactgcagatttagccagaccgacgaggtcattatccccgaagccaaccatgagctgagcaagcatgtaaccctggatgatgcccctgctgctgctgctgtctcagcacatgcgtcggttctgccacct

SEQ ID NO: 330515 - DNA, 435 bp, Zea mays
  unsure (1)..(435): unsure at all n locations
aattcccggttggtggttaccgaagcttgagatatcgcagatagagatagaatatatacataagtaagctcctatagaattaacgtctagcgttctagctgttgtgcacattctacagcactaaccactgtgccaagagcaccagaaacagatcgatttcgcaaaatattaaaaaaaagacggccggaaacagaaagcgcaactcacccgatccaaatcggcgtgtacgtatgtacgcagtagatcagtgggagagatcgttaataatttccccatttgtagcggcggaagaggtcttgtgtcgcatcgaaaccttcaggctaaatgcttagttgaaactgttcccgtgattcttaagctatctatgtatntgaagattccccggcatgctttcgactatgaactgcaataatttgaatgcaagaggattgtttg

SEQ ID NO: 330516 - DNA, 304 bp, Zea mays
atcacccactctactactcgaagttactaccatcaactagcttcaacattagagtagagcgtgcctaggatggcggcaccgaagccctaacctgcggccctactactactgactgaagcccacatactgtcgctgtctcacgcgtacctgacgcacaacaactgcatgaacaacagcatgctcacagtccaaaacttgtgcagccacaacttgactctgacgctgaaacccctttccaacaacacaccgatattcgcgtgaacctacactttgcacccgaacatccacgcccagatctctgtgc

SEQ ID NO: 330517 - DNA, 463 bp, Zea mays
ggcatgggcaacgaagaagagctaattagatgcaacgtgatacgtaataggcaaatactagagtaaaaaactaagaaacctgcaaattatagaacaaaaaacatagataggaaggggggcatacagccttggcaccaaaccggcatcatgagcaagcaggagcatgtatcatatatctctgttaacatattgatttttacagcaaatcaactaacatctcttccctagatcggttgaatccagcaccagccacacaaggagaacatgaactggaagaaatataaaagaaaatcgcacctctgttcagtatcaaatacaccggcggaagcgccgtcacaccggccaccatcccctccacagtttccatccaactcaacacatggtatctagggacgtacgaataatcggtgatctcctgtgtgaaggcatcttctactccggcttcatctgccatagggtcatc

SEQ ID NO: 330518 - DNA, 447 bp, Zea mays
gttggcttctcctccccctccggttcgggttcgggttcgtgaggttctccggggttcggtgtcaagggtgagcggatcgagatggcggcgtcggatgttgagtaccgctgcttcgtcggcggcctcgcctgggccacggacgaccactccctccacaacgccttcagcacctacggcgaggtcctcgagtccaagatcatcctcgatcgggagacgcagaggtcccgcggcttcggcttcgtcaccttctccacggaggaggcgatgcggaacgccatcgagggcatgaacggcaaggagctggacggccgcaacatcaccgtcaacgaggcccagtcccgcggcggccgtggaggcggcggcggcggcgggtacggtggtggccgtggaggcggcggctacggcggtggcgggcgccgtgatggcggcggcggctacggcggtggc

SEQ ID NO: 330519 - DNA, 301 bp, Zea mays
gcgtactcccacgcctgctgatgcattcattcacagctgctgttgcaacacatgttaacccagcttgggtggggtgaaaggacgggtgccgggtgaacgtggacataccccaacacgagagccttttttattgaggaacaaactagcaaccgtgatgacccagctttctgaatcagcaatatggcgaaagagggagcccagataaagacaggccaccatataagggagagactcgtgcaccacaagaggacgcttacaaaggacaaagatgcaccccctgcacaagaatgggcagaaatga

SEQ ID NO: 330520 - DNA, 439 bp, Zea mays
cccacgcgtccggatgcagccattcccgccagttgttgctccacatgttaacccagctttctttggtcgtggcggaatgggtgccggtggaatgtggcctgatcccaacatgggagcctggggtggggaggaacaatcgagttacggtgatgacgcagcttctgatcagcagtatggtgaaggagggagccatgggaaagagaggccaccagagagggagtggtctggtgcaccagagaggaggcgtgaaagggagaaggatgcgccccctgcacaggagtggccagagaggaggcaacgggatgagcgtgacatggaccgtgagaggaatcgtgactatgacagagacagggaaaaagaccgtgacagggaaagagaccgagaccgagatagggagagggacagagatagggagagagagagggagagggagaaggag

SEQ ID NO: 330521 - DNA, 321 bp, Zea mays
cccacgcgtccgtgtcaccggactgcaaacatttgaaccagggcggagccccattacggatgggccgatgtcgtcggagactcgacgcagctgctgtccatacagcccgtggagaggccacccggcgtgttcccggccatcgacttcagctccgcgccgccgccgaaggacgctccgccgggcatgcccccttctcctctggactgagtgaattaggcctgccagcacagacggatttttctgtctatataggctccagattttgcctgtaagggaacagcattctttgtaggaagttgaccggaccccgttcctgcgttc

SEQ ID NO: 330522 - DNA, 242 bp, Zea mays
taccgagctagtgcctcctgttcatccttccttctcctgggtctccatcctgcgctggtccaccttgctacttggccctgcactgcccgtcgcctgccgatcgctcgtctggagccactgacccgagaatccgtccagcactccatgtaccatcacctgttctttcagagtaccatcagatctcttcaataggtctgaatgattactaatgtactgcatactcatattcattggattttata

SEQ ID NO: 330523 - DNA, 400 bp, Zea mays
gcgacgcgttgtcgctctcctggtgagcgttgaggccatccacaacctgtgccgagcctgagcctactattgagcggtcatgctactcatacctgacaaggcttgtgtacacggtcatgtcatgcgtgattggctgcctaatgttatactggcgtgtcaaaggccatgttaggagtatggcatgccaaactggtgccgtgccgcatgatccagtaaatgctgcctgagctacgctccagacattgtctgatgcgaacgcggacatctagcatgctcctcgtctgctgatacacacaacaggaccgttctatccagattgcatgagggccatacgcaatgccatccatgtcctgatcatagcctgctgtctaatctcatcgacgggatctggtcatgctgg

SEQ ID NO: 330524 - DNA, 357 bp, Zea mays
cggactcgtgggcggactcgtgggttctcctccccctccggttcgggttcgggttcgtgaggttctccggggttcggtttcgtgggtgagcggatcgagatggcggcgtcggatgttgagtaccgctgcttcgtcggcggcctcgcctgggccacggacgaccactccctccacaacgccttcagcacctacggcgaggtcctcgagtccaagatcatcctcgatcgggagacgcataggtcccgcggcttcggcttcgtcaccttctccacggaggaggcgatgcggaacgccatcgagggcatgaactgcaaggagctggacggtcgcaacatctccgtcaacgaggcccattcc

SEQ ID NO: 330525 - DNA, 59 bp, Zea mays
cacacgcgttcggctctaccaattgacatcacttaaacatgcttcacacccctgggaaa

SEQ ID NO: 330526 - DNA, 67 bp, Zea mays
  unsure (1)..(67): unsure at all n locations
tgcacgtactcggtccggaanttcccgggtcggacccacgtcgtccgggtctgactccgttctcgtc

SEQ ID NO: 330527 - DNA, 460 bp, Zea mays
accggtccggaattcccggggccaagatttgcatcaatgatgacagattactacccaatggtgctatcaagtatactagtttaccatcagtcaccagtccacgggactcaagcctttcttctggcagtcctccatcgccggcaagtattgttcttcatcaaaggaatgaccatgagagattacacaataatcagcaaaatttgtctgacctcaaacctcaaaggtacataccacctggagggcgtaactgttcaagtgaaatgactacatcagtaaagcatatgcagcctattgagggtgcttggttgcacagctcatcaaatgagcatttgggctccaataacgacaaatctcaagcatcttcacagttaggaaacgataattcaaatcccaagcaaattacttcagcagaaaatggaacatctgacaccgtgcagcaaaagccacagtatgctgatgt

SEQ ID NO: 330528 - DNA, 461 bp, Zea mays
cccacgcgtccggaccgcctggttccacttccaccacggcgtgcactagcgctacgccgaggccaccttttcttggttccttcaatacgcctactccggcctccggatcgggcaccacgtctgccccctgctcccggaatctttgccaagcggcgccgctactgtccggcaaggcgaccccgtctctcggccggcgttgatctggcgggcggagtggcggcgcgatgggcatctcggcgaggtggctcaagtcgttagttgggttgaggaaggtggggcggcagcagcagcagcggcgaaaggatgatgcagatgttggtcgaatgaaaaccgatgtcgccgaccagtttcattttcagattcagcactctcaagatgacaatagcattgctgcacaagaaattccagaggtttcttatggaaatgatccacctgaagatgattctaatgtaccttcatgc

SEQ ID NO: 330529 - DNA, 246 bp, Zea mays
  unsure (1)..(246): unsure at all n locations
acaaaaaaacaaaantataatcattctttctcctattatattctacccttctccaccatattataactacaaaaccatttatatattctattttttcaaatctacaatttatacttcctccttttacttcatccacttactttaatttctcaccaccatctcatacattactattccctttattcttaaccatacacatcctctattacataaaaaccacctactatatacaacatctatattcta

SEQ ID NO: 330530 - DNA, 566 bp, Zea mays
  unsure (1)..(566): unsure at all n locations
tccggttgggcttcctttccacatgtctgtnnattctgttccatattaccaagcacaatgnnttgaagatcatgtggatactcggtggagttcttatgaacccaggagaaacccctctttccctttaaagaaatttgaagtcnncttggttctcaaattttaaaaccaggccattanntggcaactnnntctgtgggttattttccatttcctcttctacttttcagaaagtnngtcacccaacncnncttcaggcnncttaaannaagttgtnncagtggagaaaaatgtcaagactttagagnnttagggttgggttaattctgaacctnntctcacacagnnttgcaagaactggaaccagcncgactttaccattnncactgctgcnnaagtgatttcttattctcaaagaagctaccgagcccgaaaatttnntgtgtctcaaagccaatacccttggtaatacttcgagccatttcagagatcataaaagctttgctttccttttttggcttccatttacccagtcgagtcaaaaatattcacttcccaaataaacgtgt

SEQ ID NO: 330531 - DNA, 245 bp, Zea mays
aaaccccgcccgacgcacgcatccacacaataccacacaccttctcacccttattctcccgttccagcgcctcataacatggcacgcccctctttataacaagaccgcgccaccctaccacacctccaccctccaccatctacactatcctccgctcctaccttgtctgactcttctactacaccaacctcttccccactcactccaaccactttaccatcatgcccaagcacatccaactctcc

SEQ ID NO: 330532 - DNA, 323 bp, Zea mays
  unsure (1)..(323): unsure at all n locations
accggtctcggaattacccgggtgcggaccgcacgccgtccggctcgtgccgcctgcnngaagtgnncggaagccgctctttgttannattgcntnnctccctttccagtgcnccgcgcaggtggcgcatcatngggttttaaggaagggggggcnngacaccggtattcgcnncattcgccagccattggannatccgcaacggcggcccgtcccgcanngcgcgtcgctanngcccgggcccggccccgcgcccgcttcgtccaacgggccgcgcgccgcgggnngcgggtcgcgtcgtgggccgcttggcctcgccgcgc

SEQ ID NO: 330533 - DNA, 239 bp, Zea mays
cggacgcgtgggcgcctggacagcggcctgatccgaaacctccaagatgccctgtaacgaaggcaaccaggagagcacgtgcagattatagactatatgatgttgaggtgactgtccaaagaagctacaagggtcatcatgcgccccttatttccctcatgagtaaatggacaggtaaaccaattggggggtaccctgtcacccttgaagttttggaggatagtcgtcacacaacaagt

SEQ ID NO: 330534 - DNA, 310 bp, Zea mays
gaaaaaaaaaaaaaaaaaaaaagaaaaaaaaaaaaaaaaaaaaaaaaaaaaaaaaaaaaaaaaaaaaaaaaaaaaaaaaaaaaaaaaaaagaggggaaaaaaaaaaaaaaaaaaaaatggggggggggtatataaaaaaaaaaaatttatttataggtgaaattaaaattaaatttaataaatgtggtaaaaaaaaaaaaaatattttaaacctttttttaaaactaaattaattgaaaaaaacaataaattacccaaattaaaaattttttaaaaaaaaataagtccccaaataatgcgtattacaaaa

SEQ ID NO: 330535 - DNA, 160 bp, Zea mays
  unsure (1)..(160): unsure at all n locations
aaaaaaaaaagggcgcccaaaaaaaaaaaaaaaaaaaaaaaaaaaaaaaaacacataaaaaaaaaaaaaaacatattnntaaaaaacaaacaaaaaaacaataccaccaaaagcccaccccccctcaaaaacccaaacacacaatcaaacaaagaaaaac

SEQ ID NO: 330536 - DNA, 123 bp, Zea mays
tcacctaatctgcgatcaccaagcgcattatatttaggagatgcaaactcaggtatatgccctattccctagagtaaatgacaggtaaaccaattgtggggtaccctgtcaccctggaggttt

SEQ ID NO: 330537 - DNA, 140 bp, Zea mays
gtcctgaattcccgggtcgacccaagccttccgccaacccttccgcggccccttggggtttttttttttttgcggtttgaagggtttgaatggggtggtttgtttccagttttccaaccgtttaagtaatgtggtttttc

SEQ ID NO: 330538 - DNA, 255 bp, Zea mays
attttatggcaaaaccattcatcaaagcacaggtcaaaaacaaaacaagctctccatacaatacacctatcaaaaacactactttccctatttacaaatacttccgttttgtcccttaccccaagaccaaaatctaccatattctaatgaataaaaaagtctttgattaatttccctactattttcaccttttttcttgttaaaaagaaaatgtctccaattatacgctctaagcttcccccatttccttcaaca

SEQ ID NO: 330539 - DNA, 173 bp, Zea mays
  unsure (1)..(173): unsure at all n locations
caaactcagctatagctatttgtgagggaaggacaccagcgcatggtcacgtcaacttctaccgcaactatnntaaaacnttcaataaaccaatgctttcttattataaatatcctctttatgcttaacttaagctttttggtgaatattttcttatgttcaatccttaactt

SEQ ID NO: 330540 - DNA, 469 bp, Zea mays
cggtcttgaattcccgggcgcgcacaatgcagtgaaccaggcacttgttgccacctgtttgggacttggcgcggagtactttcggattgtgctggggagcaactgtggcgctggtgtgctggacttcaccccacgggctgggggaggtcctcctaccgtctgccttaaccgcttaaatcaggtctgttagcatttccgcttggtaacaacttggagatcaaagaaatttcaccagacaatacagggaaaatggaagggtcaaacaattaaaacatggattaatctgcccccaaactgtatcttgtagtacagaccccaaactctcctgtcgctgggggaaattctgcgggaagaaagacgagcaagaggatcattctggcctgtcaaggggctacacaaagcagttctgagattagcttgggtggaacgggatatgcgccgctgaacatgctcgggactatacagtctc

SEQ ID NO: 330541 - DNA, 53 bp, Zea mays
gcgccagttcgccacctcctttgccttctcctcacacactcccaccccccccc

SEQ ID NO: 330542 - DNA, 268 bp, Zea mays
gaattcccgggccgacccactcgtccgcccacgcgtccgcccactcgtccgttcacttgtccgttttttgcaaataagttctgtgccgtaactgctggtcacgtgtaaggtggtgttgcccggtgtcaggaaacggcatcacaattatcaaaagctgttattgtattctgatggcttaagattaaaaaaaaaaaaaaaaaaaaaaaaaaaaaaataaaaaaaaaaaaaaaaaaaaaaaaaaaaaaataaaaaaaaataaatatttctt

SEQ ID NO: 330543 - DNA, 485 bp, Zea mays
ggtttttaattcccgggtcgacccactcgtccgaggtgccaaccaagctggtgatgcttagaaaaaggaagatgctactgtcccctcggagagggtgacctccaagaggaggaaaaagaatgacaagagttcaaaggagggaagaaaagaaacacaagaagcagccgatgggtcataggagactgccagtgcatgacctgatgaagaagataccactgctgtggacgtgaaggagcgtttgaagaagatggcttcaatgaagaagaagagatcgagcaaagagactgacaccggtgccaaaatcgccgctgccgatgccacatcaaggagcgcaaggcttgcggcggccaacaagaaagataatagtcattacaaccagcatcctgtgcggtaaatgggcataaagttttggatttgggtgctctgaattttatatttccttgtagttggactcacaataatacttttttgatctgtcgtattta

SEQ ID NO: 330544 - DNA, 305 bp, Zea mays
aattcccgttcgcgagcattcaacctttttttttttttttcccattaaattttaattttcttttcgaatttacttccccggttagtgtttatttttaaatagaccaagccccccaattctcctttttttttatcctcttttcattatcaatacaattttttttttattctttttctcctcaccatataaaattattattttctttaccatatttatttactactattcttttttatataaaattatttcttttatattttttatcatttaatataatcttcctacaacaattcattctaattttt

SEQ ID NO: 330545 - DNA, 442 bp, Zea mays
  unsure (1)..(442): unsure at all n locations
ggaataccggggccgacccactcatacatctatcgtgccccttgttttgcatttaattttttaaaaaaaaaaaaaaaaaaaaagggaaagttaaatttaaaaaaaggaaaggaacaaaaaaaaatcataaaaaaaaaaaaataataaaattggccgccccctttaaataatccaaccttacttccccttccatccaactttttatctcttctattattccccctaaattcaattcacttcccgcctttttacaacttccttaacttaaaaaaccctttctttccccaactaaatccccttacaacacatccccctttccccaacttcctttttaactaaaaaccccataccatattctcttccaaaaatttccncatccttaatttttatatttaacccccccttttttcttccccttttatcccctccttttttttttttt

SEQ ID NO: 330546 - DNA, 369 bp, Zea mays
  unsure (1)..(369): unsure at all n locations
attcccggtgtcgatcccacgtcgtctcgtcccacgtnnngtccggagaaagaaggannttgattctnatcgttcatttagcaataagaaaagggtctggcttcaggtgacgagatcatacatatccattccaacaatgttgggtacccatgataatcnncagggtggnngggtggggacctannggcttnnacttagtacccagtagcacaaaaaattaaagagggttctgcataaggtaaatagcnntttgtttcttaaccatttcannttcattccattatnntactgattgagaagaaacatgaaacgacgtgaattattgcaatccaagggcagaatggatggggatggatggagaatgaacta

SEQ ID NO: 330547 - DNA, 297 bp, Zea mays
tacatgataatccacgttgggggtggcgactatgctaacttagtacattatcacaaaattaaaaaggttctgcataagtaatagctttgtttcttaccatttcattcattccattattactgattgaaagacatgaaacgactcaaattcaatccaatgcatattgattgatggattgatattactaccgaaaaaaaaggttcactccgatctggcggcttatctttccacctttgtgtccttttattttattcctaccattttcttccctatccctcttcttacttcaaccaatat

SEQ ID NO: 330548 - DNA, 395 bp, Zea mays
gtgaggtgtactccagtagtagacaatgcactctatgttccttggatcttcaacagttcaactagggatgaaggtcgtccacatcaatcaaactactgatgaaacacaagctcgtattgaaggtgtatcagaagtaatcttcaaaggttcaaattttaagctgcaaacaactatcactgttctcaaggtgaaccagatagttgttgatgctcctgcggagacactgactaatgcaactggcctgccggatggatacatgttttctgtgaaaattaaggattcaattgagcacaatattggatcctctgcgaacccaattaatgtcccctttgaatgcaaggttgacccttcttttgttgggtttgttgagccatggactgagcatgccacaaaaa

SEQ ID NO: 330549 - DNA, 280 bp, Zea mays
cccacgcgtccgagcagagttacaaaacatgtcgatcatccatacatccatagctgtaggcgaggggtccgtcaatgccgcgcgcagcaagaatcgcgtcttggcaaccatgatcaagcgctgcacggacgggagcgccttcaccaaatgcgatgcctgcaacaaagacgtccaagacctcctaatacacatgcacactttcaaccgtcaagaaaagatcaggatgacgctcgaagcgcatgtagtacaaaagaccgaccatgtacccagtgctgaccga

SEQ ID NO: 330550 - DNA, 254 bp, Zea mays
  unsure (1)..(254): unsure at all n locations
gaattcccgggcagaggtgtccaagatggcggagganaangcggctgcagtgtgctttctctgaggagccgtttcttctgacgcggcgcagcttcttcagctggcgggaggggaagccgcttcttctctttttctgcccgtggatactcttcttctcgcggcaccgcttgggctcttcgttgcccccattacccttattcttccttaccaacataacaaccaattccgggccctcgccttcttcgaccttggaa

SEQ ID NO: 330551 - DNA, 420 bp, Zea mays
attttcgggtcgacccacgcgtgggcccacgcgtccggggtcccccaacccagaacaaaaagaatgggtcgacgaccaagaaaacattattaagcggtgttgtggaccaatcaggtgccaactccgggctagaattgtcaggaaacgataaccctagctacaccaactcgagcagtgctgtgccagtgccacccgcaagcacccaaccagtcgagtctgctgccgctgctgtagacgttgattcggtcgagaaaggcccatgtacgacaccagaacagccggcgaagcgaatagcgaccaacgttcgacgaggacggataatggtgttgcgaatcgcaacgagagaatgaagagcgacgtatgggggggatattgttgctggatactaaatattaacggcccaaattaaatgggggccct

SEQ ID NO: 330552 - DNA, 415 bp, Zea mays
gaatttccgggtcgacccacgcgtgcggtgctgggcttgcagatatcaacccgctggaagctgtcgctggaaaatgcactgttatatgtactggaaaggataagaggaatcgtgaaccatcccctcaggaactacaaattgctgattatatcttctatagggtctttgatgttaaaagtctaacactttctgatcagttaccagataaaattgctgcatttacagttgatcttcttctgaatccaaaagatgagctagtcatacctgcaaatgttctggtgaatccaaatgtggatgacggtatggttgccacagttcctacacccccttcagcagttaaattggaggatcgaagtcacgctgctgcactttcccttacgcagacaggccatgtggatgaaaatctgtctggcac

SEQ ID NO: 330553 - DNA, 83 bp, Zea mays
tcccgggtcgaccacgcgtgcggtatcggcaccgttcttccccgcttctccagtccagctcaccagccgcccccacaataatg

SEQ ID NO: 330554 - DNA, 317 bp, Zea mays
cccacgcgtccgcccactcgtccggccagtccttctgacaaactgtaactttgcagccacgtacatgtggtatctgctgaatccacgttgggatgcaacaatccatgtcgaaaatgtccctgacttctaatgcgacaaactcttgttactgtcctgttctcaaacagcttgcgtctgctgtcatcagagactattatctcaatgctgatcgtacgaaaacactctctgatggttcttctactctaaagtatcgcaacccagaatatttgctcacgctcaattatctaacattttacctctcactagtatatgctaag

SEQ ID NO: 330555 - DNA, 238 bp, Zea mays
gaattcccgggtcgacccacgcatccgaagcaagctgaggtagatcctctggttagtgcttgtggaagcattcatgatcgatatgcggatatgtggaaacatctaatggaaaggatggagcaattagcacagattggttctgcaacaggtatatataatacatttgttaggtatttggtctgtgttccacatgattcattgaattttagtcgacaaatatatgatcataatgggccta

SEQ ID NO: 330556 - DNA, 107 bp, Zea mays
tccactcctgcgcccactcctcctgccactccttctttcaaactgaactatccacccacggacatgtgataacttctgaatcgcaccgtatcattcaacaatccatc

SEQ ID NO: 330557 - DNA, 271 bp, Zea mays
gttcgacccacgcgtgcgtctacctttacaacccctcatacgtaccaacttaggtttacaattatgctttcaacaaaaccttcagtgaattcttaaacccttttgcgtcatcacacttcactacacattgtcagcttcaatttatctcaattctttccgttactactacattgaaccattatataacttcttatactacgaacaccaacaatattatactatattttaaacttgtattcatatcaaattactcttcttcataattcttccc

SEQ ID NO: 330558 - DNA, 298 bp, Zea mays
ccccatataagtttcaactgaggttacaatcattttttcaacaaaaccttcaagtagtactttaaccgcgtttgcgtcatcacacttcactacacaattttatttataatttacgtcaattcttttctgttcctgctacaatgaatgaatatttaactgcttatatttttaagaccaataatatcatactatatgttaaacttgtattcatatcatatgactttcacttataatttttcccaaaatatttaatccttgttaaatgtcttttttactcaaaatacctttcattgaattt

SEQ ID NO: 330559 - DNA, 302 bp, Zea mays
tctttgttctttaggaatcaattttattgtaaaaatatctttatttttaactatatcactgtaactattaacttctcctctaactttatctctgtcttaaagtcccaccacccactcctcactacttttgtcaaactgccaaatctactctgtacttatcttagattaaatagtgcgcatctattagtctctatacaaggtgctgtttgcactttgtacttcatatttggctctttggccgttgcaatatgctgagcttcacattcctagcacttaccacctttaattacaatcatcataaa

SEQ ID NO: 330560 - DNA, 163 bp, Zea mays
gacccacgcgtgcgtccacacttccaacccctaacaagtcccaactcaggtttacactcatcattccaaccaaaggtacaggttgttcttttaccctgtggcgtcatcacactttactacacacattgacgtcgaacttatgtacaacattattcgtcctcct

SEQ ID NO: 330561 - DNA, 85 bp, Zea mays
gaatttccggctcgacccactcgtccgaaccaacctgagctcactcctccgtttagccctagttttaaccttaactatccatctg

SEQ ID NO: 330562 - DNA, 288 bp, Zea mays
gcaacggtggtaaccgcagcaggggcggcgcgaggttcgagctgcagctgcacgtgtcggcgccgccgcccgtggctaggagggtggaggtggacggcggaggcgacggcagcgactcgtcgtcgtccccgagctcgtgcgtgtcgtcggacggcagtccagggagcaagtcgccgatggtgatcggcgcctgcacgcggtgcatgatgtactgcatggtggccaagaaggacttccccacctgcatcaactgcaagcagtcctgcctcgtggacctgcttcactgct

SEQ ID NO: 330563 - DNA, 72 bp, Zea mays
gacccacgcattcgctgacgcgtgggtcaacttcctgaatattgttctttgcataaagcagtggaagaggtt

SEQ ID NO: 330564 - DNA, 370 bp, Zea mays
caaggatagatataaggtacatttcttccatttgccatactgggtcattatttggcgtggacgcgcatgagagctgcgcatcattaaattaagagaagaaaacagtccaaaatggaccaaagtacaatgccaaaatatgcaaaacacaagaccatcaattcctgctgcgcacagaactacagcctccttctgcgcatgaaaacaacagtacgcaaaataagaacaacagcataaagtgccagcagaccacacacacaactgctcttcactaatcacccaacagaacccttgacctaaaaattgcagcaccaggacccataacctcaagatgtctagcactgggtcattattctctgttgcaattatgttc

SEQ ID NO: 330565 - DNA, 373 bp, Zea mays
  unsure (1)..(373): unsure at all n locations
caaaacctgttattatcaggtnatggttgttttctagtggtggaaggttgaagttggagctttgttcttggaggaatgaatggttattgtgaaaaagatctttatttttcaactatatcacgtgtaactattaacttggtcctttcaactttatctctgtgcttgaaagtgcccaacacccactcctgcagtacttttggtcaaactgccaaagtactacttggtacttagtgttagatgttaatagtgtgcatgtatttagtctctaatacaaggtgctgtttgcactttgtacttcatattttgctcttttgcccgttcaatatgcttagctgcacattcctagcacttaacacctttaaattttaatcat

SEQ ID NO: 330566 - DNA, 301 bp, Zea mays
gaatttccgggtcgacccacgcgtgcgccacgcgtccgcaaacagtctgatccaagatcagaatttaaagcgaataatttcaggtgcgggtgggctacaaatgtatggggacgttctcacttctgcgcctgctttgaggaagtgtttgtcttatgagcttgctgtggtggcttattctaatgatgttgctggttatatgttcactgatgctgtgctttatcatgttcttggttagaaagcattttataaatttgtgaagtggttcatctctcttcgtttttcataccatttttcttgatct

SEQ ID NO: 330567 - DNA, 295 bp, Zea mays
agatcctgaggtctttttccttgcattttggcttcaactgccgaattgggaggggctttaagatgactgattgcacctgggatcatgtcattccttgctaccaacaaatgcaggaatgcagtttgcaagacggaaagaccaactctgggtaggtccaatccaaggcgttgtgtcatgataatgatatgaaagctgtctctgtaaatggaaaacccatttaccatttatgggacataacattaaccagacactgtgtcatgatgtcagtgttgcaaaatcaaccaaggcaccctta

SEQ ID NO: 330568 - DNA, 222 bp, Zea mays
ctacgctcacgccactcattcgtcgtgcctacgatatcctgtctccatggccgcaacgaggctcggccgtcttgatacgcatgaatgtgacactgctcaccaacttcatccattaccttctatactaaagatacttcaaactccttctggactgtaaccctatgcaaactaaatttcacaatatctgtaccaacacttgtacgagctgacaagttttgaaac

SEQ ID NO: 330569 - DNA, 309 bp, Zea mays
cgacccacgcgtgcacatcacaacagcatccaccggcccattcttcctcatagccgactgttcaactcaatactgtccgcagtgcccacacgatcaacgcagcaacataatgcaccgaatctacatccccaagctagcaattcttctgctactctgcaccaaaacgtctcccgcctacctatcctctgcataaatccatgcgaacccacccaacaacctcgtgctcctcatgaaccgcaagaaccagacgagcacgctgcctgcgctgcgcaacatcacagtccatcgcctcatgcctcatgatctaca

SEQ ID NO: 330570 - DNA, 275 bp, Zea mays
gttacgcgcaggccatctagtcgtcgcgctttcgatgacgcgtactccatgaccacactcggtgatagctcgttagtacgcatgaaagcgaatgtgctcaccaacttgatctcgtcgagctgcgacaataaagatactatggatgccatatgggctggaaccttgtgcagactaaatttcacagtatcggagcaacacttgtacgagtcgacaagtttggaaacatatactctgagaaactacatgacactcagtactgaaggcatacgtgggta

SEQ ID NO: 330571 - DNA, 191 bp, Zea mays
cagatatcggccgccaccttcacctccaccgccccggcgcacgtgcgcgtcttgggcgtcggtcgcctgttctacttcggacacgactgacctgccactggcgcctacgaagaagacacatatgaagaagctcatcgtcaaacctcaaccagattcagtcgctacccttcgattgcctgatacggaacgtc

SEQ ID NO: 330572 - DNA, 369 bp, Zea mays
gaattcgagggacgactcacgcgtccgaccaccaccatcgacgctgtcaacagcgacctcaagacgtactaatcattccgcgagtaggctgtgtctgaacaacactcagctactcttatctaatttggagcactatcgtgcacgcgcgttatcctgatatgctgaccagtctgcaagagtatgttaatcatcatcctgttgtgatcatcgcacctagctactagtgacaactactgaagagacaggagcaaagagttaacatgagatgaatgcccctgaccgttatgagcgtttcgtcgtgccaaaaggcaccaagaaagtgtcctatgaaaagggatacaaagattgtgaaaggctgcatcatttact

SEQ ID NO: 330573 - DNA, 346 bp, Zea mays
attcccggacggacgcacacttacacaaggtccttgatcttctgctcccgaacatttccatttactccaaggcaatctggataccgaactcattaagtcacaatatgggcccataaactatcttctaaaaacgtctaactcccgctctataacaagactcctaccattacctaatgcaagatccacatctccatacgcatcaacctttcctttgatcttttcaaacactctttatcctaaggcaccaacgtcataaccaactttacctccttctacgcttttccatcgctctatatgatccaatattacttacacctacattctactttatagctcttctataatg

SEQ ID NO: 330574 - DNA, 288 bp, Zea mays
gaattcccgggtcgaccgcacgcgtccggcactacgttatattgtctaactacgtccttgctctttatgatggcaacaactgaactgagtgctggtctgatgcttctattgccatacccaatcatgtactaacttatgctaacaattattataccatgaatcacttgtttgaaagagacttcatcacgtaatcacatcataacgtaatttaactttaccaaaatatttatgacaatcatcctaaacttagaccctagacataatatccaacttatgcacaatcatgct

SEQ ID NO: 330575 - DNA, 442 bp, Zea mays
cggacgcgtgggcggacgcgtgggcggacgcgtgggcggacgcgtgggcggacgcgtgggcggacgcgtgggcggacgcgtgggttttcagcctcctacaccaattccttctaccactcaaagcaacctccagtcttccaacaatcctgaaaagccagcagctaaagcagatcctgccaaggcaaccgctaatggtgttccaaatggtactggtcacactcacagttacagtggaactgtaccaagccaacaaagttcagcactgacgcctgatggaacttatagggcgcccttgctaggtggagttccttctgctggttacctagacacgacatattatgggtatgacagcacaggggcacaatttgcatggtatgatggctctgcttatgcaaatggacagcaaagaacaaccacaactaaatcgtttccatcctcgtca

SEQ ID NO: 330576 - DNA, 329 bp, Zea mays
aatttccggatcgaccgacgcatccacacacactctgtcgccttcgccgactcctcttctagcatcatctcgcacccttaaccctacgcatcgtgtcacatctcagccgtcacgggggatttgatgctcattcaccaacaacttatagtactcagcgcaagctaccattattacaacaattcatgacagccagcatctcaagcacatactgacaactcaacctctattagcgctgcaaatggcacttgtcacactaacacttaccttagaacttttccacgccaacgaatttcatcacttaccccttatcaatcttatatcgcgccctt

SEQ ID NO: 330577 - DNA, 204 bp, Zea mays
attcccggaccgaccgacgcgtccacgcacgcgtctcgcctccgccgacgccgcttcacccttcacctcgctccatttcatatctgcgatatgacgaaactcactaggaactcaggacttgctgacacatatagacccaggtatcatactcacttgcgtatacgaatcaagaacattgaagcatctcagcattccaagtacttt

SEQ ID NO: 330578 - DNA, 291 bp, Zea mays
caattctcggatcgacccacgcatgcgatgatatatttgaatttgaggacatgtgttttgtccaaattgaatatgaaagacttacagggttcgagccaaattcgcatacgaagctccttaatgatatagccaaatctaccaagacttaccaaaaggtggaaacttccactttaaatgaggttacacttaattgatattgcaataatattcagacaatgcttcatgtctatcatgtacaggaacctaaaagtcatgaaagtgtgcaaatcccatattctgaagaaatattat

SEQ ID NO: 330579 - DNA, 430 bp, Zea mays
cggacgcgtgggcggacgcgtgggccgaggccaaggttccctcgtgccttctggaggcggcgcctacgccttcccgccctcctccaagtccaatgcctcgcggccaccggccccgacgcgcccgcgccgcggtggcacgcggcactgtccgccgcggcggggctgtacccggcctacgtcgcagccggcgcctgcgtggccttcacgcggtccgaggcgttccggtggttcgtggcgctggcgcctgggtcctacaccgctacgctcggctttatcatgctcgccatgggccttacgctccaacttagggacttcgacgccctactacgcgacaggcccctcgacattttgatccggtgtgccgaccaatacagcataatgcctggtgttggcgctatcattagccacgcgctggggctttccccgttgc

SEQ ID NO: 330580 - DNA, 453 bp, Zea mays
atgatatagttgaatttgaggacatgtgtgatgtccaaattgaagaggaaagagttacagagttccaaccaaaggcgcaaacgaagctccttaaggaaatagccaaatctcggaagactaaccaaaaggtggaaacttccactgtagatgtggttacacaaaatggaaagggcaataatattcagacaaggctccatggcgatcaggtacaggatcctaaaagtcatgaaagtgtgcagatcccagattctgaagaattattagcaactgataatagtaaaggttgcaatttagctaaactcaacaatgtccttgaagagtcagtccaagaggaaacaatagctaagtttcgttctgatttgcaaccaaagcccaggaaggcttcatcccatgttgctgtgattaaaattaatggtgctgcttgtgctccaatagttggagtttgtgacagcc

SEQ ID NO: 330581 - DNA, 281 bp, Zea mays
cgacccacgcttgcaatcatatatttgaattttatgacatttgttatgtccatattgaataggaaagaattacaagattccagccaaattctcatacgaaacttcttatttaaatagccaaatctcgtatgactaaccaaaaagttgtaacttccactgtatattttgttacacaaaatttaaatgtcaataatatttatacaaagctccatttctatcatttacatcatcctaaaattcattataatgttcatatcccatattcttaataattattatca

SEQ ID NO: 330582 - DNA, 392 bp, Zea mays
gtgttggcttcttctacccctccggttcgggttcgggttcgtgaggttctccggggttcggtttcgtgggtgagcggatcgagatggcggcgtcggatgttgagtaccgctgcttcgtcggcggcctcgcctgggccacggacgaccactacctccacaacgccttcagcacctacggcgaggtcctcgagtccaagatcatcctcgatcgggagacgcagaggtcccgcggcttcggcttcgtcaccttctccacggaggaggcgatgcggaacgccatcgagggcatgaacggcaaggagctggacggccgcaacatcaccgtcaacgaggcccagtcccgcggcggccgtggaggcggcggcggctgcgggtacagtggtggccgtgga

SEQ ID NO: 330583 - DNA, 294 bp, Zea mays
gatgctattgacactcctctaagccgcacctgatggattctatctttatccaggcattgggccgtcttggaaatgcacttactacgattacgtcaccactatctcttcgcatttgaatcatgtacaatgtcaaagagaaaccttgtcctcaggactgttcactgaacttagcatattatgcatttgcttaatcatcctaccattgtatgtgcctagcaagcccccatacctggtcccatacactccatcttactttaagcctgtcagaagtcacagtatctcaacatgaacctg

SEQ ID NO: 330584 - DNA, 227 bp, Zea mays
gaattcccgggtcggcccaacccttccgaattcccttgccgtccttgttgattggcctaagctttcccggcaaccaaacccggatggggttgaaaatgaagaacggcgacaaaatcaacccactccttaacaaaaccgaaggcatcgttcttagaacaacttaaaaccttcgtttggttttcggtcttccttattataaaccaaatggaaaaaatctttttaaagga

SEQ ID NO: 330585 - DNA, 330 bp, Zea mays
cggacgcgtgggaaaaaaaaaaaaaaaaaaaaaaaaaaaaaaaaaaaaaaaaaagaggaaaggaaaaaaaaaaaaaaggaaaaggaaaaaaaaaaaaaaaaaaaaaaaaaaaaaaaaaaaaaaaaaaaaaaaaaaaaaaaaaaaaaaaaaaaaaaacaacaaaaaaaaaaaaaaacaaaaagaaaaataaaaacgagatatacaaaaaaaaaaaaaaacaaaaaaaataaaataagaaaaaaaaaaaaaaaaaaaagaaaggaaaaaaaaaaaaaaaaacaaaaaaaacaaataaaaaaagagacacaagaaaaaaaaagaggaatgaac

SEQ ID NO: 330586 - DNA, 308 bp, Zea mays
acccactcgtccgacgcctcctgccacacatacgaccactcgttctcccactcgtacggctacttaattattagagagacccttgtcatatttattatgctatttgcgttgtaactttatgattttttttttatgtacctgtatgccttttatactcttgtacataaactactagttttagttcgtttatactgtccattctgtatttttgatgtatcatctctcaactctgccactgctacaccaacttatttcatgtataagtgtactaatacatggtcatcatcatgatacattccttatattct

SEQ ID NO: 330587 - DNA, 309 bp, Zea mays
gtttcggcgatgtcggggcgcggcaagggcggcaaggggctgggcaagggcggcgccaagcgccaccgcaaggtgctgcgcgacaacatccagggcatcacgaagccggcgatccgtatgctggccaggaggggcggcgtcaagcgcatttctgggctcatctacgaggagacccgcggcgtgctcaagatctttctcgagaacgtcatccgcgacgccgtcacctacaccgagcacgcccgccgcaagaccgtcaccgtcatggatgtctgctacgcgctcaagcgccatggccgcacgctctacggc

SEQ ID NO: 330588 - DNA, 314 bp, Zea mays
  unsure (1)..(314): unsure at all n locations
cccacgcgtccgcccacgcgttcgcccactcgtccggctccttagttatgaagcaccccggtcatgagaatcaggctatttacgttgtaactttaggattttttttttatgtacctgtaggccttttagactcttgtacataagcttctagttttagttcgtttatacggcccatcctgtagttttgatgtagcagctctcagctctgccactgctacaccaacttatggcatgtataagtgtactaatacatggtcatcagcatgatacattctttagatgcttggtcaatnttttagatgcttggtggtggc

SEQ ID NO: 330589 - DNA, 74 bp, Zea mays
cccacgcgtccgcccacgcgtccgcccactcgtccgcccacgcgtccgaccacgcgttcggccacgcgtccgat

SEQ ID NO: 330590 - DNA, 430 bp, Zea mays
cccacgcgtccgcccacgcgtccgaaaaaaaaaaaaaaaaaaaaaaaaaaaaaaaagaaaaaggaaaaaaaaaaaaaaaaaaaaggaaaaaaaaaaaaaaaaaaaaaaaaaaaaaaaaaaaaaaaaaaaaaaaaaaaaaaaaaaaaaaaaaaaaaaaaaaaaaaaaaaaaaaaaaagggggggtacattaaaaaagaccaaagtacacgtacatgcaacgtaaaagctaaactatagagaaaggaaaactaaattaaatacaaaggacagcacaacaaaaaagactggaaaagaaaaaacctggcgtaaccaaatgcaaattgattagaataaaactccctataccaaactgggaataaaataaaaaagcaccaaacgaagacccaacaaaaaaatcagccagactgaaaaggaaaagggaccccccatt

SEQ ID NO: 330591 - DNA, 63 bp, Zea mays
aattcccgggtcgacccactcgtccgcccactcgtccgtttacctgttcctaaaattataatt

SEQ ID NO: 330592 - DNA, 428 bp, Zea mays
agctttaccgagttgacacggactacaccagatatctcgtcactggtaagagaactgcccggctgaagcgttccatgcaaaagtggcacaacttctccgagagcttcatgcataaggaaggctcagaagaggaccaatatgagaaacctacatggtggcaacagcctcagaaacttgtgcatcttatggaggagctctgcaggggaaactggcgttcccatgcccaggagtcgtagttgatggtgtaccatcacgcccctctttatttactttgacccattgcagaatgcaaaatacgaacgtgggctggtgcagaggagtaaggtcacctggaccagtggactctttagggctctttatcgggtatttgtctctgggttcttaaaagtatgtagagagtgaatgaattcccggcatttttgcaaatg

SEQ ID NO: 330593 - DNA, 287 bp, Zea mays
gcagggctccgaggtcccagggtactgaccccccctgtcctcgtcacgtcagcgctgttggggggcttcgacacgctgtctgtctgctgcttccggcacacagcaatattttctatatttgtttctcggttcttgctgttgcctgctggtactaatagtatactgcgtataggttgtgggagtggccggtgatctgatctctgtgctggttgcattatgtgagtagttttatcgtacctgatatgtctccttgatactcaattggtatgtatataaaaggattttta

SEQ ID NO: 330594 - DNA, 201 bp, Zea mays
gagctggtggctatcgggaggcagtggatgacggcctccaggcccaaaggcgcggctgctcacagcaagatctgaactgaagcttcttccttccttccttccttgggtttcctttcctacctcgaaaactactgctctcgagtgaattgaactggctgtaattactaattactggggaaaaacacggtttaggttgctgtg

SEQ ID NO: 330595 - DNA, 289 bp, Zea mays
ccaggttatgagtaccagaactgtctacttgtttcttccataataacaaacggggcagctgtatttgtactcaaaaaaaaaaaaaaaaaaaaaaaaaaaataaaaaaaaaaaaaaaaaaaaataaaaaaaaaaaaaaaaaaaaaaaaaaaaaaaaaaaaaaaaaaacaaaaaaaataaaaaaaaaaaaaatgggagactactataaaggaccaaacctattaaccacggtaatgaaatgtaaaagacatttaaaagggtactcaaaatgaaattaactggcacaagttt

SEQ ID NO: 330596 - DNA, 100 bp, Zea mays
cccacgcgttcgcggactcgtgggaaaaattataaaaataaaaaaaaaaaataagggtagaggataaactaaaaaacaaaaaggaaataaaaaccaaaaa

SEQ ID NO: 330597 - DNA, 334 bp, Zea mays
  unsure (1)..(334): unsure at all n locations
aggaaacccacttattccgcgtgggtcaccagcatctcttcgaatttgaatcaagtaaagtgtcaaagagaaaacttgttctggggactgttcactgaacttagcagattatgcatctgctagataatcctaccattgtctgtgcctagcagtgcaacagacctggtcccatcactccatgtatgcctcttatcaaatatatggctccatgtattgggctatcaagatttattttggcttgtggttcttgttagataactacattatgtgacatttagtgttatnttctctttccagcttactttaagcctggcagaagtaagagtatctcaac

SEQ ID NO: 330598 - DNA, 345 bp, Zea mays
atcacatattatgagagtgtgctggatggaaagcggaggactgctgcaaggctggtgcgccgtgacgatcctatacctttgcgttgtatgttaataatctgctaacgactgcaattctagagattcatttaccgtaaaattgtgaccgctgtagatgactctcgatttaacactgagaccattcatatgaaacagtgctccctctctttttggactacaaaattttggcacatagcaggtgtacaaggttaaaccttttaaaactttcatctatggggttcgtgatagagtagccatgtttacgggctcgtcttgatcacttgtgctactgcaacatttggtcct

SEQ ID NO: 330599 - DNA, 299 bp, Zea mays
ctcgtgcgattacagccaatcttgaagagatgaaatcgcccactaagctttctggggcaagtggagacgccagtcgtgagggatcagaagatactgcacgccgtcctccttcagtgaaagcttctatggcagtttcctttggacagcgagctgcacatcgggcttccaccagggattcatctgcagctcgtcgaacagtcacccgtgatggtcatcgaagttcatactgaccatctcgccgtagtggaagccgtgagggtcctgatcatgaccgctctgaccgggaactggatcattct

SEQ ID NO: 330600 - DNA, 278 bp, Zea mays
accacacgtacgcagaacttacacatgcatttgtcaacagatcgaatctaaataagaaacggcgtcatttgctgctgattgtgcttgacaagtagagacatggatggactcttaaaattccatccatgtgttaaatgacatattcgagacatccttttctcaataaactctgcatcatttggtgaaaaaaaaaaaaaaaaatattaattaatttaaaaatataaaaaaaaataatttatcttatttctaaaaataattacaaaaatgaaccatatttt

SEQ ID NO: 330601 - DNA, 382 bp, Zea mays
cggacgcgtgggaaaaaaaaaaaaaaaaattaaaaaaaaaaaaaaaaaaaaaaaaagaaaaagaaaaaataaaaaaaaaaaaaaaaaaaaaaaaaaaaaaaaaaaaaaaaaaaaaaaaaaaaaaaaaaaaaaaggggcccccttttaaaaagccaaaatttaacatccccgtatttgcaacttaaaatctttttaaaagggccccaaaattaaatttaatggcccgtttttaaaaaactttaaaattgaaaaacccttggtttccccaaattaaatccctttaaaaaaaatccctttttccaaatttggctaaatacaaaaaagccccaaacaaatcgcttttcaaaaaatttgccaacccaaaatggaaaatgaaaccccc

SEQ ID NO: 330602 - DNA, 58 bp, Zea mays
agaacatgctaatgacacagcgtcaaatgctgcatttatagagcatgaggttcccaaa

SEQ ID NO: 330603 - DNA, 344 bp, Zea mays
  unsure (1)..(344): unsure at all n locations
ccactcgtccgacgaactccaaccagccctcttacattcgagctagcttatatcccggattacatctcctgatactatgggacggtttcaatgagttctgctgccttcttcaatcattatctagctaatatatgtagtgatggatatgctcacgcattcgctgattacacaaaagcaggtggttacaccatcccataatgaactgatagctgtaggagatggtcattcacgtaccatatctgatcctgcagctggtaactaccttatcagaccatttgatgaagctgnagatgaacccacttgagctagacccctttccatggtgcacatcaaattgattatat

SEQ ID NO: 330604 - DNA, 222 bp, Zea mays
cccacgcgtccgaaaaataaaaaaaaaaatttaaaaaaaaaaaaaaaaaaaaaaaaaaaaaggaaaaaaaaaaaaaaaaaaaaaaaaaaaaaaaaaaaaaaaaaaaaaaaaaaaaaaaaaaaaaaaaaaaaaaaaataaaatagtgaaacaaaaaaaaaatccaaatggctaataattacaaaaacgtcaacaattagaaaaccaatggaaatacctaaatt

SEQ ID NO: 330605 - DNA, 413 bp, Zea mays
ctctcattatcaatcactcagactctgttcgcgcacacatgggctatcttctagtcctaggatgcctctggatgagactacgtcatattctactccaagcacggatcttctcgtcgtctcctccaagcacggatcaggagcactgaaattctatctcaaccggttctgccgactgggtaacttgaattctaaagatgggtgtgaaggaaatgaatcttcaatattacaatagttacatccagtacctacgaagaataagggttgatccaagcacgaagtgaatgcgtgatggaatggcattctgcatttcttctaagttgatgcatgacagatcatggagaatgctggtggttgtgatagctatcacacactcttttggccaataattagatactctttttgttcagcaatgt

SEQ ID NO: 330606 - DNA, 266 bp, Zea mays
gctcgtaccggtccggaattcccgggcggacgcgtgggcggacgcgtgggtgcttaagaaggcatcaagtattactggctcagctggcatcagaatatttgctcatcttcttggaactattttaaggaatcttttactaatgcttttgttgtgatgtctattcttgttattatttgagattactctgtgttgtcactttaatgctctgttctttgtgacatgtgttaatctcactttattattcatatatattattcttcatctaa

SEQ ID NO: 330607 - DNA, 292 bp, Zea mays
cccacgcgtccgggatgaccgtgttggaggaggaggaggagaagaagaccgggctgccggggtacgaggtgaagcacaccaggttcatctacaacagtgacgacgagatcgagcgggtagatgaggctgatgcagctgaagctactgcggagcttcgcgcattgatgttcatgggcctgctggtgccggatgggaggcacctgcgcttccacgacgaggatgccgactaataagaatctcagttgtgttgtcaagtggttggttgtctttcgctgacaccagccaaaattct

SEQ ID NO: 330608 - DNA, 231 bp, Zea mays
cccacgcgtccgcccacgcgtccgttgcaacccctgctatggatgtcacatggatgttgagtgttgctcggtttgcgtggatcatgtagttctatactgagacgggttatggttttttttaaaaaaattggttaaggatgtaacaaacagagaatttgatgtgttatcaggctatgacaaacagatcctacatatacacataataaaaaaaatatatattattcttaatat

SEQ ID NO: 330609 - DNA, 119 bp, Zea mays
atgagatctgcaagtacctcttcaaggagggcgtgctgtatatccaagaaagagcttaaacggtggaaaaacacccggagatatatgtgcaaaatctacaggagataaatcttatgcag

SEQ ID NO: 330610 - DNA, 364 bp, Zea mays
atgacacctgcgaagtcctcttaacggatgccgaactgcatgacaaggatgacttctaagggttgaactacccggtgatggacgtgaacaacctggatgctatcaagaatgctcaaactgttaacgccaagaaagctgtccggcacacgccgtcctggggacactactactactgtctcatcaacgaccttattcagcacttacacaactaactgaaaactgcttctgacatcgggaatgccactgtcaaaataactcacaagatagctaccgccctatatgattctgacccatcgtggatacctgcccagggctctcaatgcgaaatgacaagagacttgaccaagcttcggtgacacggatg

SEQ ID NO: 330611 - DNA, 76 bp, Zea mays
tcccggtcgaccacgcgtccgttttttttttttttttttttttttttttttttttttttttttttttttttttttt

SEQ ID NO: 330612 - DNA, 308 bp, Zea mays
cggacacgtctgtgaaggcgtccagtaccttgatgatgcatgtagcgtgacctgacaagggacagtataaagcccctgcaagcacatccggctataatatgtactagtatgagcatgcagacaacagttgacaattgaattaatcatgtgatcatctatcattgaacggctctattcgtgaccatatatcaaaatatataagataatacagataattggaggatgttaatacagtgcagtattttggatgctgcgttttcatggggggcaaacaatttaaaaaaaaggcggtcgctctataggatcca

SEQ ID NO: 330613 - DNA, 292 bp, Zea mays
gcttaccgcgagcggtcgctctagacgatccaattttacgtactcgtgcattcaacacggtaacgcgcctataatgtcacctatagtcaattcactatccaactattcacaacgtcctggactgtaaaaaccctttcgttacccatctaaatcctcattcaaatcatcctcctttcgctatctatcctaacaccgaacacgcccacaccaaacgcccttcatatcattaacacaccctgcttcactaatgcaacacgatccttaactgtgcattaaacccaccaaataattt

SEQ ID NO: 330614 - DNA, 321 bp, Zea mays
cccacgcgtgcgcccacgcgtccgaccagttgtcttatcccgccatggttagctcttacgccacctgtcgcgcctcgccaagcggttcactctgcttggtccctgctatggctcgccatcgtttttcccagctcgaatcttgcccgacccaagctgaacttcatccatggccactatctattcttcctagacggactcaagcgccctagacttcggtggttttagcttgacaccaactattctagtcgtgcgtgctgatgtccgagctcgtcctaaatgaactacattggtgtccgtaccatgcccgtgcttatccatggt

SEQ ID NO: 330615 - DNA, 412 bp, Zea mays
gaacgacccactcgtcccacacgtacgaaaagtccaactaacagacccattacaactctatcctcctctaacactctcacggtatactgcaccatttaacattgaaagacctcatctgcatcactttatgcagccaatattcaacatctcctaactgccatgtacagtctacaccaaccaactcaatgacattacaataatgatagatacatgcatcactgacaagactatgatctatactatagaagcttgctaactagctaattaagtcatttatctgagataatcgactaccaatctttcacgaatcagcatatgtaatacagttaccttgacctattacccttttcaaccatttacattaacatagacaactattactacaaacacttcaactgatccactaacattc

SEQ ID NO: 330616 - DNA, 314 bp, Zea mays
tcctcctcacatttaatttttacacctcccccatcacttacccgatatggtttaatttaacactcgttaggaaccctttaattacacatcctctttccaaaatattcctacctttatctaaatgatactctcatccatttcctataaatcttattcttcacaccctatccatcatctttatatatatactattactccaaccatattcaacatcttcattcatatacctatttacatcaattttaaatatcaacttttctatataactctacttatcaatgtttactctcttctttattcttcatttttttacc

SEQ ID NO: 330617 - DNA, 379 bp, Zea mays
aattcccgctcgacccactcatacctcacaccaaaccctcacattctacttctcatcaccctacaaaattcccggccaagttcaatttaaaaaccttctggccaataaattcatccttacccactaacacctcaataatttcatcttcttttttattctacctcaatcacatctctttcctactattatacttctcaccctacaaacacatcataccatatctcaaccttcataatcacattcctttccaaaatacaactctcaaaacctccatttactacaattactccttcttctacaaatttatcaactacttcattaacatatcttcatctatccatacatcctttcccaatttcatacttcttcttttctaccc

SEQ ID NO: 330618 - DNA, 356 bp, Zea mays
cggacacgtgctctgacacgtgggattcgttcatcacctctacaaaattgcccaccaggatcaaactatagcctttctggcatagacattcaaccttcccctgttacacctcaatatgatgatcttcttgatggtacttcctcaatcacatctcttccctattagaatactgcttaccatacaatcacagcattccatattgcaacctacatgatcacattccttttcaaaaagcaacctggaaaacctcaggagactacaagtaatgcttcttctacaaatctagcaactactgcattaacatatttacacttccatgcagcccttccaaagttcatacagcagcgtatcgaccc

SEQ ID NO: 330619 - DNA, 352 bp, Zea mays
aattccttggtcgaccgacgcgtccggggttggcttctcctccccctccggttcgggttcgggttcttgaggttctccggggttcggtgtcatgtgtgaactgatcgagatggcggcgtcggatgttgagtaccgctgcttcgtcggcggcctcgcctgggccacggacgaccactccctccacaacgccttcagcacctacggcgaggtcctcgagtccaagatcatcctcgatcgggagacgcagaggtcccgcggcttcggcttcgtcaccttctccacggaagaggcgatgctgaacgccatcgacggcatgaacggcaaagaactggactgccgcaacatcaccgtc

SEQ ID NO: 330620 - DNA, 319 bp, Zea mays
cggttcggaattcccggctcgacgcactcatccgacacgtctccactcatcaggaatattcgttctcgccggcgtctacggcctacgggtcaagtaacttttaaacgttcgtccggccaatgaacggtatggaggcatagatgatcgatgtggtgctcaacgaccgcctgttgaagaatgtgcggttcaagtgcaactatgacgacaccatctgctacctcaataatctgtttacatcacatactgtgactcgcccctataatatcctcattcataattgttacaacatctacaattaccacatcaccctcaaagacta

SEQ ID NO: 330621 - DNA, 461 bp, Zea mays
tcccactcgtccgcttacatacaaacctgttagaatcttaggacattcgtgagcctgcttcggttcggtaggattatgcaccaggtgaagagcctgttctggtaccacctgttactgaagttgtttcacctcccaagtccgaggtgtccgatactggtgacttactgggcttttatgatccaaatccttctgtatcatctatatattaattgcaatttctctttccttgtctatttttcctacatatttttcttttctcattctctttttctctttattttaattatttttttttttttttttatttttttttatctattttcttgttttttttttttattatttttcttttttttttattttttcttttttttattttatttttttttatttattttattatttttttttatttattttttttatttttttatttttatttttttttatttttattattt

SEQ ID NO: 330622 - DNA, 367 bp, Zea mays
actccaataacaaatattccaataatcacacactccacaacatcactcattataataatttcaattatagcctttctacccatctaaaactcctttattacctcaatcattctattatattctgttcataccaatcctctcttccacaataattccaataccaccaataatattattcttaatcttcatttccatatcttcaatcactactcacatcactccatcaatatattcattcatttttatatttttttatacaaaatatactaattcacatctcttttctaaacttctctttcacctttcttgttttttattttaaacctttatttctactactactattattaaaacatttctcaaattt

SEQ ID NO: 330623 - DNA, 193 bp, Zea mays
cttaatgcctattaactgatacttaatccttaaacccttactgctgtctttcttgccaactgttacatcttcctcttttatcttttaatctgcatccacctctttcctctatttcttcatatcatacaattcataatctaaatatatatatataaatactattattacccttttctttctatttactatttat

SEQ ID NO: 330624 - DNA, 432 bp, Zea mays
ttcccggtcgcccacgctcgcccgacctcccaaaaatctggcggtatcaatattgccaaaggaatagcgagggagaatggacattcaaactggatgggcactctatttctctgctgactcattcgacaggtattgttcacagaatataaaacctcaaaatgtgatatttttatagttatcactaacctttaattatttaccttttatattatcttactcatttttttttattaatctaattcttatttaattttttattttttatttctttcttttttatttttttattttaattccttctttattaatttttctatttttttttttttttctaatcttttatattattctttatctttcttacatatttctattttcaatcacttttttttttttatttttttttttattattctttttttttttttttta

SEQ ID NO: 330625 - DNA, 348 bp, Zea mays
  unsure (1)..(348): unsure at all n locations
aactacaagccctgcatatggattatagnactaggctctcaacgatggggaaatgccagatttcaaagcaggatggcccttccatactttacatgtattctgtcggacactgttactaaagttcatccaactcttgatgactctgttggtgtccaatccattatcattagtctcgaaacaatatccaaactgtctaaaatgattaatgtactttaataacaaaaatccaatacgcttgcaaatattccaactctatcttcccaactatcctatccttgtaacttaatgtattctcccatggaggaacatcaaccctttctttacctaacattcataatctccttaaca

SEQ ID NO: 330626 - DNA, 217 bp, Zea mays
ccggttcggaattcccgggccgacgtactcgatccaaggatcagtaaacataccagacacttgttatcacaacaatacatgctcaacctatactgttaattctcaactggtgcgacagcgattctactatttgtgcttgaataatgctttagcatttcgaggtgctgcacacttctcattgtccatctatcataatatcttacatgcacgcactgat

SEQ ID NO: 330627 - DNA, 350 bp, Zea mays
gagcgcctgtgtggaaggagagggggggcgcggcctcaaccgggggttcgagctcgcctgctgcttgttcccgagtgcctgttcccgtcctagtttacatagggccgatctcttccctggattgactgccgccgccggtggcggtcggtcttagcgtcatcagagatcccgtctccagcagcaaccatctgggctgcccaccatcaccacgtcttcgactaacatcctttctctttataccatattgccaatgttttccgatgctgttgcaatgagcatgtcatcgaggatcttagcttttccttttagatcctatcttcttctaattattccgtcaggttacctatctt

SEQ ID NO: 330628 - DNA, 181 bp, Zea mays
aattcccgggtctgccgactcgtcctctaacgcatgatcagtactcttttaccgactcttgctttcttatactcctcttaatctctcgttctcttttataattcggatggtgctcattcacattagtccaccttctccaaagtcatcaatgctttcgatgtccattatgtcacctccaact

SEQ ID NO: 330629 - DNA, 394 bp, Zea mays
tcccgggtcggccgactcatacgtgcagcctccaatataatccgcaatttcgcttttatgccagaaaatgagattatcatggtggaacatattcattggttggaagctatatttcattgcttataaaaccagaatatataatatgatgagctcataacaaacatgctggatacccttgtcaatttagcacctttgctggacctgaggatcttcatctcatctaagccctcgttcattaaaatgaccgataaaggtgcaattcatgccataatgggtattctttcttcttccgtaaagccattgcactgtgctgctgctgaattgattttccgtcttataataaatccatactacgatccatttcttcttcctattattccacatatatacaaac

SEQ ID NO: 330630 - DNA, 295 bp, Zea mays
aatttccgggtcgaccgacgcgtgctcccacgcgtccggagagagagagagagaagattagagttaagagagatagagagagaggagtgagatagtcgctattggctgccgtgtagttaccttatactcatctacttctaatgatggataatgtgattgcctgtatctgacctatcatgcattacttgtatcctttcttttttcttaataatgctcctaccttcttctcctataatgtttataatgctctttaattcttttctcctttccttttcttaaatttataccattaata

SEQ ID NO: 330631 - DNA, 387 bp, Zea mays
gacccacgcggggcgttaacttctgaaccccaaataggtttcaactgaggattacaattattttttcaagaaaaccttcaggcattactttaaccctttggcatcatcacacttcactactataggttaggtacaaattacgtcaaattctttatgttctgctacaaagaaagaaaaattaacttcttataataagaaaacccacaatattatactatatgttaaacctgtattcatatcataataccttttattgataaaatttcccaaaatattttaactttttcaaatttattttttactctaaatacccttcctttaatgtttctctttagatttttcaataaaatccaattgttcttataattaaaaaaaagcttattctta

SEQ ID NO: 330632 - DNA, 155 bp, Zea mays
acgcatccaaacaaacctaagcttttcaattctcctatctcacattctccaagcctatttcccattaactctctccatataacaacttaccactatcaactttcaaatctactatccctaattttcatctttataaatcacacatttaacattac

SEQ ID NO: 330633 - DNA, 170 bp, Zea mays
aatttccggttcgacccacgcttgctctgacactttggcagactcttttgcatacttttgggctctcaatttcccaaccactgttccgtcctggtccaatgactacgagcagctgctcaaaacattccaaggctatttcactaactatgctctcatcatctccattctct

SEQ ID NO: 330634 - DNA, 134 bp, Zea mays
ttcccgggtcgaccgactctacacttgggttgatactgggcatcaagtacagtttataaatgtgttctaaagaattgcgaaccagtggcatttaaaaagctgtatgcccactaccctcatagccttaatgaatt

SEQ ID NO: 330635 - DNA, 234 bp, Zea mays
cctcccactcttcctttccgtttctgctttgattctaggactacgtgccgcgcgtactttctaacttgtcaggccttgatatttgttgaactagcgcctcatcctccaccttcaccactaactctccgaagaccatgcctagatccaatggcaactattctcctcttcttacttctcatcactcacctctttacctcaatactactgccttcttctaagctaattgctctcacc

SEQ ID NO: 330636 - DNA, 487 bp, Zea mays
attcccgggtcgacccactcgtccgcttactcttgggctacttcgttcattagattcatgtctatgggttctagatatctgtcaatgttaaaatttaaagcggccaggacccaatatttcttcttttttttttcctttttattcttattatttactttttttattattttgttttatttttatattttttttttttttatttttatttttatatatttttttttatttattttttatttttttttttatttcttttttattttttttttatttttttttatttattttatttattttattcttctattttttattctttttattatttatttttttatttattattttttatactatatttttatattactttttatttatttttcatacttttatttttttttatttttattttttttatattattattatttttttatattttttattttttttctttatttcattttttattatattatttatt

SEQ ID NO: 330637 - DNA, 336 bp, Zea mays
tcaagacacttcttaaagatgcgagggaggtgcataggttagcggacgggctcacttcaacgcctgctgtgaggaagtaagtgtcggatgagcttgctgtggtggctgagtctaaagatgttgctggggaatttatcacttatgctgtgcttgatcaagttcttggtgataaggcattttgaaaattatggaagtggttcatctcgcttcgtttttcataccatttggcaggatcttacataaaggtcctttcattcaagtttgttttgccagatgcaattcaaatgttatagatgacaatataatttgcttcttgtccatactaacattatttgt

SEQ ID NO: 330638 - DNA, 356 bp, Zea mays
aattcccgggtcgaccgactcttacgcttttgttgaaagtcgttcgagcttttgcttttagtatggcagtgtttacatacggcaatgttgatttttaaagtttgttaggcctttatatttccttttttttatttttttttttatatctttttttttttttttatctttttttattatctttttttttttttttttttttttttatttattcttttttttttatatattttattttttttatttttttatattttttttttttatttttttatttattttttattttttcttattcttaattctattatattttattttttatatattatatttattttctttattttttttttttt

SEQ ID NO: 330639 - DNA, 61 bp, Zea mays
cccacgcgtccgcaaacagtctgataaaagatcagaatagaaagccaaaaatttcaggtgc

SEQ ID NO: 330640 - DNA, 316 bp, Zea mays
cgacccacgcgtgagtccacacctccgcacacacgtcacccccggttaaagtataccctctgctgctactgcttaagaccatgatgcattctataccaatcactatacactctactatattgattacttacgatcatcagaattagattgaccactaatactcatgctgctccactattaagaacttgattatcatcacttaaaatgtccatcaatatcaaatgctacttttctaaccttacacaattagcattctacacaggaaatgatcctaaacgacctaatcttttatgatggatactacttccaacatact

SEQ ID NO: 330641 - DNA, 260 bp, Zea mays
cttaatttccggatcgacccacgcgggcgcttacaatgaaccttattcgtcagctgaaataactatttaaggtggcaaataacagcactggaatcggtatgctcttcagcacaacaggcgtttcaaaacgcgagctccgcttaacacgataacctactgctggatcacttaacgggcacctgcttctcaatgactactaatctatattgccgctaagtactctatgcttcccttgcggtctggctttatctacctctccc

SEQ ID NO: 330642 - DNA, 236 bp, Zea mays
atatagtattcacaatcttttaattacctcaaaacatggattctttgaaatttttgaaggccttatgaattccattgttccatatatcaatcaacattgactcactgaacaacaaaattcaatacacctaattttgctaatcaccacaaacttatttttacattaattcaacctataaattatatctttaaccaccatattattcaattcattttaatctcctaacttataataac

SEQ ID NO: 330643 - DNA, 341 bp, Zea mays
gaagtcccggctggacccacgcgttcgcggactcgtgggcggacgcgtgggttggggagtaatgtcccattatgccagtactgtatggaggctagacatgcattaaggtctgatttagttaataaggtgcgagaatatcctatatgtgttggagtttttgcacctgttgcaaactgcgggctacagtatagtttttgcgtttctaagggaaactggattgagatttgataaggatgcggtttgtaggaatttgcatgaacagttgagaacagatggcaaaatttacagggtactgcatacatgattgagaatgtccgaaaaattgatgtgaaatgccaaat

SEQ ID NO: 330644 - DNA, 336 bp, Zea mays
cccacgcgtccgcccacgcgtacgaccactcgtaccgcacaagtcacaacggtggccagggcgcacccatcagtcccgggttgccgacacactcctcctatagtacaatctgcttctcaatcatttcaacaactatatctcttctatctagctgcgacgccagagcacctatggaatacgaacggatcatccaggatgttgtggatagacaacaaccgtccgaaataccctagacaaacgcacctgccacgaccaattccccacaacctaacaaagttcgcgtcgcagcaggattgcccacgaatgacgctatatggaccgacctggtccgcgaag

SEQ ID NO: 330645 - DNA, 476 bp, Zea mays
aattcccggctggacgcactcgttcgcggactcgtgggcggactcgtgggctgattacaagggctctttgaaggaggatgtattggaacaagtcaacacgaagttaatggatcataagaagcgtagaaccaaggtaacattccgaagggaagtgtaatgcttgctcaaatttgttaactcttttttatgttcttctcatggaactcctcactgacgccggttttatgctagcttgaacactattcctccttagggtttgatgaaacaacattgctgctcaataaagaaaaggagcaaggcaaaacacacacaagggttagtggaaaagcagatggcaataaagcaaagtcagcagaacttgtgagccttggtaatgaaaaagagcaacgaagaaatcacacgaaagttagtggaaaactggataatactgcaaagtccgcgagagtttctgctacctgcgttgcgtacttaatgtc

SEQ ID NO: 330646 - DNA, 329 bp, Zea mays
cggacgcgtgggtcatcctgttccatggcctcccccaaagccctatcacgctgggacgggtgccatactagcgccccaaacccacacaacatgtacctcgtgtctcactctctttctcgcacgactttatcacaccaacccttacacctgtccgcgtctcgtgaatacctaccgctcaattcaagctgatcccctccgacgatacgtcttccacccttactctcttcacggctactccaatttaccgcctgtcagtatctactgaatatgaacttgcactttgaccctagtcccaaaaagcaatgactgcaccagcaccgatctgctct

SEQ ID NO: 330647 - DNA, 451 bp, Zea mays
cgcagatgcaaatgacaacgtcgtttgttttatttcttgtttggcgtttgagatctgagggcgtgagagctggacacgctgatgcaggtgtatccagcggctcacgagatcgttgacggcatggagcggtgcgcctgccgtttcgcggtgcagtggtcggatggaccgcgcgctgggagcatggaggaggtcggcattgagcgggtttgctgcgtgcagtcctcgccggtgcaagacccagtgcttatggagttcctggacggcgtgaccaagctggccggggatgccaacgtggaaacagtgtctcaggagatccacgtcgcgccggtagtcaaaggcggcgtccctgcaaacgcgtcaccgtgatttcaacggaaaatttggtccagcaagtaggcaagcggtttgatgtgcgtggttctgaggttggctatttggtgcctctgatttt

SEQ ID NO: 330648 - DNA, 117 bp, Zea mays
aacatgaataataataagataataaatttttctgtttacagccaacaggctttttctggctatggcacaaaactgggcggtgttgcacctgacattgtccagtggttcaccttacat

SEQ ID NO: 330649 - DNA, 227 bp, Zea mays
tcgacttcacgcgtacgccgacgcgtgagctcctcccgctccagttctttttcgggttcgtattgttctccgtcgttacgctttctttccaaaggcggatctagacggctacctcgcacagactagtaccgctacctcgtcatccacctcgcctggaccacgtacgaccactccctaacaactcctacatcacctacggcgagtgcctctactccaagatcattcca

SEQ ID NO: 330650 - DNA, 396 bp, Zea mays
aaaaaaaaaaaatataataataatataaaaaatataaatataaaaatataaaaaataatataaaatataaatataaaaatatataaaaaaaaaataaaaaaaaaataataataaaaatataatatataataataataaaaaaataaaaatataaataaaaaataaattaaaataataaaaaaaaaaaaaaaaaaataaaataaaataaaaaaatataaaaaaaaaaaaaaaaaaataaaaaaataaaaaaaaaaataaaaaaaaaaaataaaaaaaaataaaaaaaaaaaataataaaaaaaaaaaaaaaaatataaaatataaataaaaaaaaaaaaaaaataaaattaaaaaattaaaataaaaataatataaataattaattaataataatat

SEQ ID NO: 330651 - DNA, 70 bp, Zea mays
cccacgcgtccgcccacgcgtccgcccacgcgtccggatggtgctagcttgcacgataaaagaaaaattt

SEQ ID NO: 330652 - DNA, 239 bp, Zea mays
  unsure (1)..(239): unsure at all n locations
ggccatcggacgcacaaggacagcagagtgcaggaccggagcggagcgaccgagagtgtgtgggagagagatggcgtncagcgcctcgtctcccctgccgttgccaacgctctcgctcgccgtgatcctgctcgcgctgtgcgcccgcggcggcgaggccaggccgccaccgccgttccacggcgtgcgcccgttcgccttcgacaaggggtccacccagatcttcggcagcgccaacc

SEQ ID NO: 330653 - DNA, 440 bp, Zea mays
ggtcgactcacgcgtccgaaggacatatttcttgtcatatttcttgtagaaacgtacacacttcttgtcatatttctcagacatgttctcttggggtagggatactaacaaatgggttctaaaattgagttgataaggaaacatttgaaacaggaggaggaggatgatgatgagttattttttgtgttagttccagctatatatgcttccctttattctgaaaagaggccagtacacacttcttgtcgtagtggtgcacaaaaaattagagaaatgctcgatggtcatgagagctggtgcaaatctgagtttcgaatggagccagagatctttagagctgtagcaagctattttagaagagaaggactggtgcaagacacttcaaatatgagcattgatgaacatcttgggatattcatgtacatgaaatcttaaaatgc

SEQ ID NO: 330654 - DNA, 245 bp, Zea mays
gacccactcatccgtcctcttcccactatccatctaccttctactttaccaattaccacggctaatttcaccaggggattttttacaactcactccggaatcaaaaccttatccaaacaataatcagcacttctacacatacaatctatataatcattctcttcgttcatcgatctatcatgaaaactactcacgtactcactcctactacttcctccaaacattcctctcttaaataccacaac

SEQ ID NO: 330655 - DNA, 363 bp, Zea mays
ataccaactatctacatgttacgcgcaatgttgcactaacaatggccgccaagagattcgggcttcttatgcttcttgatatgtgtgtacacgctgactcggtgaccatagtacagaagtgctcacaagctactataccttacatagtatcggcgtacctcttagcagcttacgcttaatggatgtgaaaacccaatgattcatacctacaagatccttcgtgcgatctcagatcataggttaactctataaatcgtgcacgtgcgacaatcattatccctgaatcatgagttaccgtcagtgcatcaatcggcacagatcattacggcgcaacaacgacaacgactcgggctagcaaacctt

SEQ ID NO: 330656 - DNA, 396 bp, Zea mays
gggtcgactccacgcgtccgcggacgcgtgggcgcacacacacacaaccagatctcccccaaatccacccgtcggcacctcggcttcaagatgcagatctttgtgaaaaccctgaccggcaagactatcaccctcgaggtggagtcgtctgacaccattgacaacgttaaggccaagatccaggacaaggagggcatccccccagaccagcagcggctcatcttcgctggcaaacagcttgaggacgggcgcacgcttgctgactacaacatccagaaggagagcaccctccaccttgtgctccgcctcaggggaggcatgcagatctttgtgaaaaccctgaccggcaagactataaccctcgaggtggagtcctctgacaccattgacaacgtc

SEQ ID NO: 330657 - DNA, 189 bp, Zea mays
tcgactcacgcgtcccaaaaagaaaaaaaaaaaaaagaataaaaaattttaaaaaaaaaaatttaaaaaaaaaaaaaaaagaaattttttaaaaaaaaaattaaaaattaaaaaaaccaaaaaaaaagaaatgaaaaataaaaaaaataaataaaaaaataaaaaaaaaaaaaaaaaggcgcccccctt

SEQ ID NO: 330658 - DNA, 296 bp, Zea mays
cccactcatacactcactcttcccattcttattcatatccattttataattttcataaccatactcataccatggaacctttcaatactttaaagggcattcaaaattaacacacccaatatcctacataaaaccttcactactatcatactcactaaacctacataacttcatacaaatatttaaacaactaccttctcaataacattcctcccctcaactccaataagccatcaaatccatacaacataaatcattaaattaattacgacttacacttacaaaatcttacaact

SEQ ID NO: 330659 - DNA, 238 bp, Zea mays
cccacacgtcctcctacatgtgccattattttaggtttagcaacatacgctgaacatagagaactaggcgattgcaatcaactacagaccgaatcaacctgtcgagaatctgtcgctgtacttgtacatccaatataggacaatcgcgctaaatatgaagagatttcacactgacacatctacgaatgatcacactgtactgcaaatgcttaagctcaccatgatgtacatcaaagct

SEQ ID NO: 330660 - DNA, 242 bp, Zea mays
caatacgacccactcatccgcccacacgtccacctacaccacccaccattttaacaccaccaacacacacacaacactcgcataaatctaaaacccatcaacccccaaccacaacaaactaatgaaactcaatcacttcactataacaacacatatacaacaaacagactaaatattaacacataccacactcacacatccaccaattatcacactatactacaaatcctaaaccacaccaa

SEQ ID NO: 330661 - DNA, 416 bp, Zea mays
aatacacttaattcgactgcaagtagctgtacacatgaatcattgtcattgtgcaccagggctatctgcatttatggtttgtttggtttctagagactaatttttaatacttctattttattccattataacgcttaaattactaaatactgaatctaaatatacttttagtctacatatataccagcttaggtactaatatcgattataatggatagacttaaaattagtccctagataccaaacacccccttactcagacacctgttatctcatggacagatagcatacctgctcgactacactacatagacaggagccgctccttggctcatggatgctgccatccaaggcgcctattatgcagacaagcctgtctgttgcttgaatattgcatatgaagctgtttaatggac

SEQ ID NO: 330662 - DNA, 360 bp, Zea mays
cccacgcgtccgccgactcgtccgcggagttcaagaccagcaacatccaaacgctctggggagagatctcgtacgcatggcccacacagtgctacacacggctgacgctatagcgcatgggtcgaccgacacagatgtactcagcagatgatagctcacctgataccactgcgccacatctatacgtgccacgatcccaattccgctcatcgacaacacgtctctcatgtggaggtagacgcctacgaagggcgacgtacaagacgtactagctgaggacgactacgactacaaggaggactaggatccggaagaaggatgagctgagctggagctggatcgaacagcccagggaagagg

SEQ ID NO: 330663 - DNA, 218 bp, Zea mays
acacttcctcccactccttttagcattacaccactaccaacatccataagctcttatgaaaaatccattactcattacccccacatctatacacacaactcaactataccacattattccatccacacacataaactcatcaaattataaatcaccttataccactactccacatctatacttactaccatactaataccaatcatcatcaacacact

SEQ ID NO: 330664 - DNA, 288 bp, Zea mays
cccaggcgtactcgtacatgtacaagtactttagcactaccaacataccttgggcattgtgatagagctgatcgccaatacctacagaccgatgcgaactatcgaatatcattacatttacaagtctgatccgatatactatgatccaaagaaagtttcagaccgtgcatcctgtcatcatccaagatcgctgacctgtatattcagaagaagatgaacaccaagctgaactcgaagctgatgagcactgttatcgaaatgaatacaataatagtgcaatgcgtcatt

SEQ ID NO: 330665 - DNA, 177 bp, Zea mays
cccacacgtactcctacatgtacaactattttaccactaccaacataccttatccatgagtatagatttaatcgccaataactacatacctatacatactatcgaaaatcattacattcacaactatctcccatatactatgatccaaagaaaaattcacacttaccatcctgtcac

SEQ ID NO: 330666 - DNA, 197 bp, Zea mays
gacccacgcgtcctcccacacgtactcttacatgtacaactattttacctcaaccaacataccttatccattagtatatgtttaatctccaataaccacaaacctatacaaactatcaaatttcattacattcacaactctctcccatatactatcatccaaataaacaatctcacttttcatcctgtcactccaaa

SEQ ID NO: 330667 - DNA, 296 bp, Zea mays
cccacgcgtccgccgactcgtgcgtggatttcaagaccaccaacatccaaaccacctggggagaggtctcttacgcatgactcccaaagtgctgcacacggctgtagctataccgcatgcttcgatcgacacagatacactgcgcagattatagcttacctgataccactgcgccacatctatgcatgcaaggatcccaattccgctcatcgccagcacttctcccatgtggagatcgctgccttctaggccccaggaacaaaacgtactagctcaggacgactacgactactagg

SEQ ID NO: 330668 - DNA, 243 bp, Zea mays
gaaaacccggctcgacccactcatccgcccactcatccacccacacgtatttcgattacaacaccaccaacatccaaacgagctttgtttaattctaaaactcaccacccccaaactcctacacacaactcaatctatacctcatacctctatccacacacatacactcatcaaaatataccttacctaataccactcctccacatctatacatcctaccatcccaataccactcatcaccaa

SEQ ID NO: 330669 - DNA, 435 bp, Zea mays
aattcccggctccacccactcgtccactctctcgaatgcgctcactcatttctcttcacacactctactcttacataaactcctagtacatttctaactctcctcccatacacaacatacaactcttatcacccatatactgcatctttctatcatctcatgaacaatgcaaaccctacttaactaacagcaaccctcttaaagtactatacttaactttcttcccaagaccatcatcatcaacttatacctattagtactatatgaaacacaacaatctcttacccaaactatccttacatcatcaacttctacatatctcactgcatttcatcacttatatccaattccataacaaacacactttcgctctgcacataatccacaaaatctacatctcatattattcatctaacatactatcatcatacacat

SEQ ID NO: 330670 - DNA, 148 bp, Zea mays
ctaacccgtggactcccaggacccgttcgttgacaactacaaccaggcccaagtctaggagatggagtaaatggccatctatcgcacgatcgttgtaccatgtcggcgatcttgacgactactatgcaggccgatacgtgcttatccg

SEQ ID NO: 330671 - DNA, 342 bp, Zea mays
ccgggtcgacccactcgtacacccacgcatccacccactcgtccgcatctctctaactctctgctcacacgactaccttcatgtacttgtttattctcccactgccctagtgcttacccttacacttccctaacccaatccctctatgatcaaactcacccattcataaacaccctcccatatcacctattcctcttcccatgtatatctctcccaaccaatcttatccatcacatgtactgtgttccccttacctctctctcaaatataatcctcagctcccaagcttatatgtacctacatcacacacgtcatttcccctaccctcatcatctgccaacc

SEQ ID NO: 330672 - DNA, 301 bp, Zea mays
cccacgcgtccgcggacgcgtgcgtggagatcaggaccaccaagatccaaaccgcctggggagagatctcgtacgcatggcccacaatgtggtgcacacggctgcagctatagcgcatggctcgatcgacacagatgtgctgagcagattatagcttacctgatgccactgtgccatatccatgcatgctaggatcccaattccgctcctcgacagcaggtctcccatgtggtggttgctgcctacgatgggcgaggtagaagacgtactagctgaggacgactacgactacgacgaggac

SEQ ID NO: 330673 - DNA, 301 bp, Zea mays
cccacgcgtcctcccactcgtccgactacttcaagtctagcaacatccacaccctctggtgatagggctcgtacccataactgacatactgctgctcacggctgacactattgatcatgcactgactgacacagataggctaatcatatcatagagcacctgctgccactctgccatatctatgcttgctactattataattccgctccaggataacacgactctcatatcgaaattgctgactactatgcacgatattgaaaccgtactagatctggtcgactacgactacaacgaggaa

SEQ ID NO: 330674 - DNA, 232 bp, Zea mays
cccacgcgtccgccgacacgtctgtcgagtaacagactagcaacatccaatcggtctggggagagatctcatacgcataactaacacactggtgctcactgctgactctataccgcatggttcgacccacacagatgtactcagcatattatagcttacctactaccagtgtgccatatctatgcttagccactatcataattccgctcatcgataacctgtatctcttgtt

SEQ ID NO: 330675 - DNA, 87 bp, Zea mays
cccactcgtccgcccacacgtcatcgtcttcatagaccacctctaacaccacgagctggggatatatcaatgatccatcacttacat

SEQ ID NO: 330676 - DNA, 148 bp, Zea mays
aattcccggctcgacccacatcgtccgcccactcgtccacccacacctcatacacatcatacaccacctccaaacacacaggccgagtttaattcaaaaaaccataacatcaatactactcaccatagcactacatataacgcaaccc

SEQ ID NO: 330677 - DNA, 383 bp, Zea mays
tagacacatatttcatttattcatagattttctccaatcttacagcactcaacaatctagctgtatgaacaaatatctggcgaaaaagaacaaccatacaatgctgtcaaagcaaagcttatattaagcacctcacaattgccactatcaccattaacaccatacatcccaaatataccataaaaaatattcaaccctacatgaccagtacacaccattgataacagcacacacacacatcacatcaatactctaaacattacaaccaaacacaccgtacaagtccacagactctccagcaccatcatcatctgtcagttgacttataactgtgatagtacagagctgtcaatggatcaccaacacctgcaacagttaaacta

SEQ ID NO: 330678 - DNA, 149 bp, Zea mays
atcagtcatcgttcggcatgtctccttcctatcgcactagcagcatgcgatggcgatggggctgatccacatctacaaatgcacaacactactatgacgtgcttaggcatcaaagcagtccaatacacgcagagatcttttcagcctat

SEQ ID NO: 330679 - DNA, 100 bp, Zea mays
atcagtcgtagttcggcatgtctcactccttacgcactagcaccatccgttcgctacggggccgattcacatctccaaacccacgacactgctatcaagt

SEQ ID NO: 330680 - DNA, 127 bp, Zea mays
ctcactcgttgtcccgcatgtaatacactttacacactaggagcatacgttcgggacggggtcaattcaattgtccacacccaccacactgctctcaagtgctgaggatgtaacgcttcccaagacc

SEQ ID NO: 330681 - DNA, 154 bp, Zea mays
aattcccgggctcgacccactcgtccgctcactcatccacccacatcaattacactttacacactaccaccatacaatcggtactagtccaattcaaatctccacacccaccacaccactctcaattgcactcgacataactcaacccaatacc

SEQ ID NO: 330682 - DNA, 298 bp, Zea mays
ccctctcgttgtcccgcatctcatacattttcttctctctgtctatacgtatatgccgaagttaatctaattgatcacaccgatcacacctgactcaatagcgctgcatgttactctactcagaacatgcactagttttatgaaccatgcgtcgtatactgcgtatggtcaacgtcagcatactcctacttatatgaatcagttacctccatactgtccacaaatccattaagactcaacaatgacacatctcttgctacttaacatttattctacaaaacttgtctataaatctcat

SEQ ID NO: 330683 - DNA, 310 bp, Zea mays
ccctctccttatcccgcaaccattataatttcctcttccacactctgcctatagccctagttgactttaacagatgcctaccatcataaccgtctcaataacgctgcagacttcactacccagaacatgccctagtctatagcctatgagcccaataaagtgtacggccaacgacagatctaccgacctgtcaagaataattacactcatacctacaacaaattcataaacaaccacgagagctgcagcacttactacataacatccattctccaaaaattctatactgatcatatccaacactacaaac

SEQ ID NO: 330684 - DNA, 267 bp, Zea mays
cccactcttactcccactctttctccctaaacccctcgtaactgttctaccacactctcactcatactctcagtgccatttctaaaatctcactttcccaacacttatcactaaacatccaacacctcatctcccaatcttaaactctcctaccaaacgcttaaaccctctttaaacttaatccacacaaacgacaaccatacaatatcaaccaatttatacacttcacctccatcacattcactaattaacactacctacataact

SEQ ID NO: 330685 - DNA, 177 bp, Zea mays
cccacgcgtactactgcatctatccctactagcactctagcaacatgctatagcactaatgctgagccaaatctccaagatcacgacaccactacaatgagaccatgcttctcaagattattagacaagcagctacactatcaaccaatgactgattcactactaccttcatgacat

SEQ ID NO: 330686 - DNA, 159 bp, Zea mays
  unsure (1)..(159): unsure at all n locations
ctttcttntaacgccaaaaggaccccaacctacctacccggaacccgccattgccaccggggccagtggacattctcaaacccaaccccgcaacctcccgtgaccaagccaccgccgccgccaaagggaagaaccgccgccggggccaagggcttccgc

SEQ ID NO: 330687 - DNA, 208 bp, Zea mays
ctctctcgtagcgcagaatgaaacacaccttacacactacaagcctaccttcgctacggggccaagccacttctccaaacccaccacaccagtctcaagtgcccaggaagcaacgcgccccaaaagcagcagccgaccaatgcaccacgcacgtcggcagtactacctgcagcacatccataacctacagatctagatccggcacaag

SEQ ID NO: 330688 - DNA, 407 bp, Zea mays
cgctctcgttgtatcgaatcacatacactttatacactcttactgaacttccagtacgagattaatacgactgatcacacccaacacacttggctcacgtgcaatgcatgtaatgtgactcagaagctgatgatgacaaatgaagcatgcttgtttggcgcgtgatcaaacgctgtgtacattccttaatgtttacgccagcctaacgcatcgttccaatagatccacaagtacccaaagagctcgcagatgatcatgcgtaagatcagctcgaagaaactggtcctaatgatcaggctagactactagacctacctcagatccaatatcctgatgcatcatttatctgctcaaggcctctgttgcctagcttgtagtgatgttggacgactctaacatgtgctaca

SEQ ID NO: 330689 - DNA, 199 bp, Zea mays
cccacgcgtccgatggcatttatcgctacttgtagtctttcaacatggccattaaccacatagactgtagcgacttataagatagcactactccgatgggaccaaactttactcgtcatcctcatcgtcgtcatctgcgccgcccgaagagttgacttggttgagcctttcaatgagactggccttactttgctcgtat

SEQ ID NO: 330690 - DNA, 403 bp, Zea mays
agcggacattgacctgcaactcatccaatttcttccgcatggccaaaagcatatatcgagattaatatcaacaaagcagactgtcaggacctcacaccatagtgatgcaagttactggagtcagaagttaaatctgttttatcaacctgggccgtgaagtgcctttgaacagcatcaactaactgctccctggatggattagggcatgcatcctgttcacaaatgcagtcagtcagaacaatgaaacataattggctacttgcaattgatagtacgaccttgtctagaaatttgagctctacttacgagattgaagtggcgccaatatctcaacagtgcagtcagttctaacttgctcatgtcaactttctgcactgttaccagtcaaaagaatgtaaagata

SEQ ID NO: 330691 - DNA, 255 bp, Zea mays
acgcacgcaaccgaccgcacaaccaccggcaactcattcaatttcaacaacatgaccaaacccatagaccaagaccaatacaaaaaagcacacgcccaacacctcacaccataacaatacaacctacaagacacaaaatctaaacacatattatcaaccaatacccaaaaccacctaacaacaacatcaacaaacacctccctataaaaatcaaggcacacatccactacacaaatacaaacaaccacaacaaca

SEQ ID NO: 330692 - DNA, 168 bp, Zea mays
caccaacccaacccaaacaacataccctataccaccatcaaccacccaacatcacctaaacaacccacaacactaccacccctacatctatacacacacatcctcatcacaacccaaccccaacaataccaatatcacaccaccactatcccactcacaccactacta

SEQ ID NO: 330693 - DNA, 365 bp, Zea mays
cccccccccacccaccccccccacccccccacacccaccccctcctccacaccccccccacccaccccacctctcaccacccccccccaccccacacccaccccctcctcccaccccccctccacccccaaacccccccccccccctacccccccaaacccccccccccccaccccccccccccaccccccctccctccctcccccccccccccccccccaccccaccccccccccccccccccaccccccccccacccccccccccccccccccctaccccccatcccccaccacccacaccccccccccccccccccccatccacccccccaccccacctccccccccccacccccacccccc

SEQ ID NO: 330694 - DNA, 375 bp, Zea mays
aatttaaattggcccttccccaatcattaatagctctcatactactaacatatttcaaggttcgatcatcctatatagcactcatctggcttgtttctcctgcttttgcatatggctttttccaagctactctctcccctcttcgcctacctaaacaccttaacgttctcaccttcgttgtccatttctttgcaccacttctctcttctgctcctttggctattcgcatctcctatgtaatttttccaactatattacctatttacaacaatcctaccctactaccacactctctttaaaatctaatacctcccctttccatttcttttttcatttgttccacctttgtctatctgcttttataccttcatatct

SEQ ID NO: 330695 - DNA, 285 bp, Zea mays
gacgcacgcgtccgacggcgagtactttcacaagctttccgattagacctttatccacacagactctaagccggcaaacatacaaattggagatgacatgaagcccaaagctacggaatctggattggtccagcatgcaccagcatgatgggaagtgtgtcttcgtatagacaagacatgttggcactattggataccttgaaccatattatacactcactgtaccagttaccacaaaagctgatgtcatcagattatgtgacatcctgattgaactcattacag

SEQ ID NO: 330696 - DNA, 288 bp, Zea mays
aaaacccggctcgacgcacgcgtccgccgtccagtactaccttaagcccaccgactaaacgttagcggagatacactcgtatccggcaacattgcgcatggtaacgggcaggacgctctatgctatcgacggtgtatggatcaagcctgcactagtagcttgcgctatgtatcctctactagacaagacacgtgatcacgctcgggctccttgaaccagaccatatcataatccgagcagacaccacgaacatgcatgtgatcggatacataatcatcctgatcgaac

SEQ ID NO: 330697 - DNA, 430 bp, Zea mays
tctcactttactgaagttcatcattaacggatccattgccagactcaatcgctttagttacaaaagcagacctccaacgtaacatatacttcatatattgcttcaattcattatccatcttctttctataattgggatctttgttagatgtcaaccctgagattgctctctgcataggcttacaattcgctggatccaaatggcaatatcactataaaatggtatatcattcaatggactcctgatagatatatcataagtacaattacccacattaacaactgtatctctttcatcttcagcttgatacaccctggtttattctattaaatatcccattttcacctgtacaatataagttaatgtaacatggccaattgctgattttcaaacatacattaccgataacaataacaccatccaaaattta

SEQ ID NO: 330698 - DNA, 286 bp, Zea mays
tcgacccacgcatacactcacacgtcagccgctctttcactctttttttcatacaatctctcatcccaaaattctacgcacttgacactttaacataagcccattccatccaacaataccaattacaatcaataatctatcaatctctatattaacccatcatcctccttacatccataatacccacaccctttctaatacattgctaatattactaaactgcaactatcactctacaacaaccgatattatcattgtataaaaaaccttttaattctacatataa

SEQ ID NO: 330699 - DNA, 156 bp, Zea mays
cgtaacatagacttcatatatttctgtgaattcattatccatctcctttctataaatttggatctttagtttgatgtcaaccctgtaattgctctctgcatatgcttacgattcgcttcatccaaattgcactatcactataaaatgcgatatcat

SEQ ID NO: 330700 - DNA, 278 bp, Zea mays
gaatacccgggccgacccacgcgtacgcccacgcgtacgcccacacgtacgcccactcttccgaactacacctaaatcacgaactttcaaaaattaaaaaaaagcaaaagccaaaaaaaaaaaacaaaaaaaaacaaaaaacaaaaaaaacaaaaaaaaaaaaaaaaatagaacaacaaacctacaaaacagaacaaacaacatctacacaccaattaaaacaattagcacatacaaaaccaacataacaacatatacataatccaaattaaataaac

SEQ ID NO: 330701 - DNA, 114 bp, Zea mays
aattcccggctcgacccactcgtcctaccgctcctactggaacatgcataccgttttgctctactcaaaatctacacattctcatgcatatttatcattttcgaacgtcctcaa

SEQ ID NO: 330702 - DNA, 430 bp, Zea mays
cccacgcgtccggggagcggcactggcggctccggcgcgggcgcgggcgccgtggctgggtgcactttgtggcggccatgttccggtgcgacggctgcactcgcgtagccggccgctagtccaggaacatggcgacgctggatgacgatggtggggaggagcagcagcagcagcatgcgggcgttgcagcaatgcggaggttcaagtccgggaggagagctgcttcgtggtgagactaggcgctggccgcggcagctgtgggcgatgaggactaggggatggagatgcccgacagccaggacgctgagcagtggttccggcggccggtaatttatgttgtggcgagaaggcgggaaacgactggcgtcgccgggacccgtcgactgtggatgccgataggtgaaaccgactgtcctaggcgtctcgagct

SEQ ID NO: 330703 - DNA, 127 bp, Zea mays
accatgcctactggaacatgcataccgctttgatcttttgtaaatctacacatgcacatgcatattcatcttcgtcgaacgtcctctatctcccatctctgtaacctcacatagcatatgatgaatg

SEQ ID NO: 330704 - DNA, 356 bp, Zea mays
acctgacctaagagctttgtgctccgacataaacacacagtgcgaacacagcggtcagagcatcatctagatcggcaaacggcatccatactgcacctatgccacgacaaataccagctgctgagagcatccctgcatggaatgaatactggcgtcctactaatacaaccagtgttccatctctatcagatgattctagtgcacaaactgcgcatcactcaatacaccctttagactgcaagactcatacaaagcaatttacaccacttgactttgatttgagcacccaagtcaagcagacatcatcagtttctcatgctacagcagctacgatgccatctagtcaaccacaacca

SEQ ID NO: 330705 - DNA, 301 bp, Zea mays
gacccattcgtccaaccggaccaacgcacttagcgctccgacttaaacacataatgcgaacaccactatcaaggcctcatctagatcgccaaacggcaaccataccgcacctataccactacacataccagctacaaagatcacccctgcctcgaacgaatactcgtgtcctactaatacaaccagtgctccatctctataagatcctaccagaccacaaacaacacaccacttaatacaccctctatactgcaatactcatacaaatcactccacaccacttcacttcgatttgaccacc

SEQ ID NO: 330706 - DNA, 144 bp, Zea mays
attcccgggtcgaccacgcgtccgccactcgtacgcacacacttcctcaaattagcatattagatccacaacttcatcatacgtctctttgaaatccaacattaccaatcgtacaattcaaactccaacttactcctatactat

SEQ ID NO: 330707 - DNA, 268 bp, Zea mays
actctttgaaaaaaaaaaaaaaaggaaaaagaaaaaattaaaaaagaaaaaaaaaaaaaaaaaaaaaaaaaaaaaaaaaaaaaaaaaaaaaaaaaaaaaaaaaaaaaaaaaaaaaaaaaaaaaaaaaaaggcatcctatttaaagaatcaaatttaaattaataattaatacaacataaaatatttataatattgaacccaaatttaaattaattgcccatatattaaaaaataattaactagaaaaaccctgattataccaaattta

SEQ ID NO: 330708 - DNA, 392 bp, Zea mays
aactatcgtcgtttcactgaggcccaacaggtgttgtaagtcacaaaggttctgcacggtggcgcgggggtcaagtgcctgcccctaaagaatgtactagaaccaggtgacatccgcacgcttgctgaactcgggctaactgaactaccagccatgttacaggactcacatcctgctgttggctctactcttattggtggtgaaacagaacctctttacaggtatgaacaattttgctgcacaattctatatgcacccaaacaaagtatacaaaaacaatacccaacatagcatatatgatgctaattcttcttgcaaaaattgtccatagcttgctacaagacatctatctacacgtgacatgtatgaggagtttaagaagcatgctacta

SEQ ID NO: 330709 - DNA, 99 bp, Zea mays
ccacacctacgctcacacattctccattttttcattctgccccactacacatacaaccgaagattttacatcttagaaggtccatatcgtacaatctat

SEQ ID NO: 330710 - DNA, 376 bp, Zea mays
ccgactcgttttgcaactaaattctgcttttcacagaaacaccaccgcataggggctcgatccttttgtcccgtgaagcattgacgggcctgagcagggctacctttgctgcttccgggcagaaagcatcgatccattactgcaagttctcaataccgaattccgttatgcttaccgaatcgtcttatgaagggctgctcaatcaccgagctcccatgctcattctcgtattactacaatggcaataccatcgagctcttaaatttacatgaacatattcttgctcataacgcaactgatgatgactagcaaacgcagattataccactgaacataaacattgcagtgcccaaattcaaaacaatgactattctaa

SEQ ID NO: 330711 - DNA, 84 bp, Zea mays
attcccggatcgaccgcactcgtacgcccacgcttcctctcactcatcatcaaacttttcaacccaccccacccaccatgcaac

SEQ ID NO: 330712 - DNA, 220 bp, Zea mays
cccactcgtacgctcactctcgatcaaactttctattctaatccataatatctgggaacgactaaactaagacctacctggactataattagcattcaatctataacttataaaataaagacccgtaacctatagacacctcaacatactaacatgtaaaaatgataccataacataacctgatttaaatctataactcctacatactacaatatcacac

SEQ ID NO: 330713 - DNA, 382 bp, Zea mays
cccacgcgtccggtgccttcttgttgtggagcaaggaaatggtgctgagttgagtcttaagcctttcatgccattggcaattcaagtccttgagtgttctttcctttcgggcgtaagggcggggaaaattgatccattactgggagtgctcaaaccgaagtttgttatgcttccagaaggtcttaagtcgcggtgttcaataaagggggtgccatggtcattcttgtattactccaagggcaagaccatcgagctctcaaatttacgtgaagatattgaggtgcatcttgcaactgatgttgccttccgattgcagcctagacaactgaacgaaaccactgcagtggcgagattgagaacaaagctgcttgtaagcaatgga

SEQ ID NO: 330714 - DNA, 208 bp, Zea mays
attcgcgggtcgacccactcgtctctcaactcatattctcaatcgggtttcactattgtactattagccccaacaacaggttaattttcaattcatggaggacctagctctatttatcctacaagcactaattgataagctaaatatcaaatatatctaaatactatatattaataacaatactaatatataccatcctttagatatt

SEQ ID NO: 330715 - DNA, 395 bp, Zea mays
actaacctactgccctcctttttgatttatccatgcatatcttcataccgctcattgtcaacttatacacaagtaccacctatcttttccctttttttttttctttaattttcttctccccatcctcttctccactctgctctccatttatcatcactctaatttctttctctcattctttgtctaatcaacccctatatcacatatctacttacctaacataccctattacatcccttccttctcatttcatactcctatctctctcttttatatttctttctttcactgcttacttattttttatattactaactcacatttatcttcaatacaccccatatttccctccttatccttctctcattcccatcccacctactttcactttcctt

SEQ ID NO: 330716 - DNA, 400 bp, Zea mays
aattcccgggtcgaccgcacgcgtccgcggactcatgggctgactcgtggggcccttttttccttcccctccccgatctcccccaagccgaccgtaccagtttagccgggtgtctgcgatctcgctgctacagtcgctcctcatatcggcagatatctctttctaacgcaaggctgcaattgagtacattcattctttatcaagggcacaatctgctcgttctctcaatggtgctcgcctttgtcctgctagtatatcacttagcacccatgccgccactacgtcaagcacaccacaacctatgtcttccttaccctcttcatagaagactcactttgttggcctcaaatactaggatcgcatttttaccaacctctattgtctgcattacccttttctt

SEQ ID NO: 330717 - DNA, 341 bp, Zea mays
aattcccggtcgacccacgcgtacgcccacacttccgcccacgcgtccatccactcacttccaaactacaactaattcaaaacgcggaaccttcatactccaagtactagattaatcaaccaatgtacccaatatttaccctcttctaaagacaccatactatctgcctcttttatcctaagtatattaaggcctcagcactacacattacgaactgccatgcaggaatttttcaacaatttgacttataaatcgtcgtgttcaaaatacacaaatctgtcaataataatacgcattttccactgacgtgtcttacttaattggccaccccatattttctt

SEQ ID NO: 330718 - DNA, 417 bp, Zea mays
cgacccactcatccgctgactcgtcttgtcaatctctttctggacttgtactttctgtgtatcatcacggtgtatgtaacttttcaatcataccctcactaaatctcaactttctccttctgcgatcagttctagcaatccttcatcagtatagttatatctgtcattgcacacattctatacaccacaagttcttttacttcattctttcttgatgtaacattctcattgaaccaaactatatactgctaatcaaagttcatccacatataataattagtttccccaacatgtacatcacttaaatttatctcattaaacctttcacaaaaccaaaccttaaatttctaccttctttttctataacattaattataaattatctatcattctattaaacatatttcattcatttct

SEQ ID NO: 330719 - DNA, 286 bp, Zea mays
cccacgcgtccgcccacgcgttcgcccacgcgtccgctgacgataaacatggagcggtaagtcgtcaaaaaaaaaaaaaagagaaaaaaaaaaaaaaaaaaaaaaaaaaaaaaaaaaaataaaaataaaaaaaaaaaaaaaaaataaataaaaatagaaaataaactaaacaccataaaaacaaaaaacttaatatgataaacaatggaacattcacattgaaccaaacagagaactgtgaattaaagtgctcgatataaaataattaatttggctaacaggtaca

SEQ ID NO: 330720 - DNA, 287 bp, Zea mays
cggacgcgtgggattgcaacagattttgatgcattcactcttaacacatacaacacagggatcatcaaaattcatacaggtcacaacaatgtacagctacatctactaactcatgggtgtatatatatatgacagtggtaccagatcaaacatgtacgttgttgtgacctgtatgaattttgatgatggctgtgttgtttgtgttaagagtgaattgcaacagattttgatgcattcaatgcaacttaataccttgaagaaaaaatggcgtaataaggaaaaggccc

SEQ ID NO: 330721 - DNA, 200 bp, Zea mays
gcagcaggggagactgggagatagagagaggagagggagggtttcctcaaagagaacctggacccaggcccaagcatagaacactagcgttctctcaccagggcgggcgttcatcccagcagccatggcgatggcgtacaatatggcgactgttgggatgaacgtgaaggaggagtgccatcgctggttcatggagatga

SEQ ID NO: 330722 - DNA, 201 bp, Zea mays
acccatgcgtacggtaaaaatgcaatctagatattattcgtcaaggagtatagtagaaaggatggaagcttttcgggcaaatcgcacacgcatgctgtagttctgtccagaaaattttgagatgacatgttcattgactgaatatgggctcttggaatgtcttcatgagatgatttttcaagttctgactgtttactgaac

SEQ ID NO: 330723 - DNA, 341 bp, Zea mays
taaaaacattgccactatttcattatccattacgtattcttattcttcaaataacttcatcatatacgggttatttggaaattttgatcactctaagaacactcattaactcataatattctatttttgattcataattcttacctttcaccctcatttcacaaatcttaacatttattcaatcattaattcttattaactttcaaaaatcaattctatatttctctattattattgaactctttttccccaaactttcctcaacactgaacctatttcacacttttttatcattatcaataccctattctcatataatacaaacatcgttttttcttttc

SEQ ID NO: 330724 - DNA, 369 bp, Zea mays
  unsure (1)..(369): unsure at all n locations
gaatactcgtgtgatgagaaagtcccatgtcaataatgtgacttcttttgttgatgatcgtgctactttttaaaacatgtgcactgttttgcttattatcaaaatcctgctgagaatgctacgtcgaatactgtaggcgctgaaccgcgctggtggcaaggctggaaacaagggtgctgaagctgctcttacttccgtaagttacccttccagtcggaaatcctgatttcaaacaaacatagatgcattagcatgtgagaagcccaagttcccctgcagattgagatggcctctcttgtncngcatcacttangctgacactttgcatatttctggttctatacacgaggcaagacatcatttctttct

SEQ ID NO: 330725 - DNA, 401 bp, Zea mays
cccacgcgtccgagcaattccccgcgcgcgctctctccgccccggcactgggccggcggcgatcaccactcaccaggtgccaaggtgtcttgtcggccccttcaccaagtgttagtcgggtccttcgccggcgacgggcaccaccagtatggacgaatcacgaaaaagagctgtctctactgcaaatgatgaagactttggaaatgacttcctttcatcttggaagttaccaaaatcaggaaaagacacgattgacttcagtgttgactcagttcccaagagtagcaagaaattcagctttgacaacctagatgattttgggcttaatggagcctttgacaaattaccgtcctttcaaatgggcatgtctgatcttgatttttctagccctgacaagaaaa

SEQ ID NO: 330726 - DNA, 423 bp, Zea mays
  unsure (1)..(423): unsure at all n locations
cccggnccggaattcccggggggacgcacgcgggcgacgagaatccaatcctcgatcggccgcgtgcgcggcatggcgtctccgccgccggagctagtcgatgacgccaccgccgagagtctccttcggctcccaccggatgacccagcgtgcctcgtgcgtgcctcccttgtctgcaaggcttggcgggagctcctctctagccccatcttcctccgccgctaccgcagattccacggcgcgccgcctctgcttggtttcctctacaacatctacgacgaacgcccctgtgctcgattcgtcgtcgccgccgacgccgccaccgncttncccttctctgcaccggcgttcgatcaattcgatttgtggttcatcgagtgccgccacgggcgcgccctgctacaaactttcgagcgacatgcg

SEQ ID NO: 330727 - DNA, 225 bp, Zea mays
  unsure (1)..(225): unsure at all n locations
aatcctcatcngtttnnttttgcatggcgnctcccccccgcggctagtttatatttcaaccgcccagagtctccttcaactcccaccnnatgacccaacgtgcctcttgcgtgcctcccttgtctgcaaagcttggcgggagctcctctctatccccatcttcctcccccgctaccgcaaatttcacagcgcgccccctcttctttgttttctctacaacatcta

SEQ ID NO: 330728 - DNA, 338 bp, Zea mays
caaaacctgctcctagctgctctcgtgtgttttgttacatccaatattaagcgagagcgggctagctataggtaagaccgtaagaggatgatggtggacaggcagcgcgtgaggcaatgcgacattgaggtcatgaagatggccatgctcaagcacgaagaaaccttcaggcagcaggtccacgagctgcatcgcctgtaccgtatacagagggagctgatgatgacgacgagtgacgacctgaccggagccaagccggtgaccaccccccgccggcgcagcaagcagccgcggcgggcgctgccgctgggcctgcagcttccggccgacgagtacat

SEQ ID NO: 330729 - DNA, 357 bp, Zea mays
cccacgcgtccggtgggttggcttctccttcccctccggttcgggttcgggttggtgagggtctcctgggttcggtttcgtgggtgagcggatcgagatggcggcgtcggatgttgagtaccgctgcttcgtcggcggcctcgcctgggccacggacgaccactccctccacaacgccttcagcacctacggcgaggtcctcgagtccaagatcatcctcgatcgggagacgcagaggtcccgcggcttcggcttcgtcaccttctccacggaggaggcgatgcggaacgccatcgaaggcatgaacggcaaggagctggacggccgcaacatcaccgtcaacgaggcccagtcccg

SEQ ID NO: 330730 - DNA, 263 bp, Zea mays
  unsure (1)..(263): unsure at all n locations
ggttataccatgtcatttattactaaagttgatggtgaagcagcccaaggaatagctcattcatctgcggctatggtaatacattctgaaaatgggtatcaattacctgcatctacagcaactcaacaaccagtgccccagagggccactcaacagttccaagcacctcacaatccaaactttatgccaaatcggcatggattctcaccacatttcgggtctctaatgggtgtttcnccccaaaaaatcaaccactttttttt

SEQ ID NO: 330731 - DNA, 431 bp, Zea mays
ggaagagcattttctgctggaggtgatgtttctgcttttgtctgatgtatacataaaggtgtttacgtctttacctagtatgtgcaggatctaacattgaaagctggtttcttacatattttgcgtcgtcatctgttacctgacttttagtacatatgctatatgtaagcatatgctagctctgctatgtgtttgattcttaaatcagtcagctagaaatatggtgctgatttcttctgaaatgaatatttgttgaattacacaattgcaagttatacctaaacctcaggtgagcttcatcccttcattgtggttaattgtaattattcacttctgtgctccttgccccttaaggataaataatttaactgtaggtttctcttcttacttgaatttgtcatgggtttaggtgcctgtgtttctttacattg

SEQ ID NO: 330732 - DNA, 297 bp, Zea mays
gaattcccgggtcgaccgcacgcgtacgcccacgcgtccgcccacgcgtccgcccactcgtccggactagttctagatggcaaacgggcaaaatttaaaaaataaagaagaaaaaaaaaaaaaaaaaaaaaaaaaaaaaaaaaaaatgaaagaaaatataaaaaaaaaaaaattaattaaaaaaaaaataaaacgtttatttcttttttaatagtgcaatttatatttactcttttgtcccacattttacatctttttttactgggataaaaattgaaattacctatcttaattttt

SEQ ID NO: 330733 - DNA, 342 bp, Zea mays
ttttttttgtttttttttaaatttgggtggtctttttttttttttattttttttttttttttttttttttttttgcaaaaaaaaaaaacacacattaatttcccaattttaaaaaagataaaacttatggttttaattaaattccaggtaaccaaaaaaaaataaaataaattttggtcccaaattatgaattttttttaaatacaaccccacaaaaattaaaaataattttaaaattaaaatttttatctatacaaaaaattctttttttttcaaaaaattaataacttttttttttttttttggaatttaacctcccattttttttttttccctttcttt

SEQ ID NO: 330734 - DNA, 320 bp, Zea mays
  unsure (1)..(320): unsure at all n locations
ccggaatnngggacgacccacgcgaacgcccacgcgttcgcccacgcgtgttttgacacttggttgtgtactaacttggcttctaaaaggggctgaaacctcaccggaggcggcagcggcgtctacgctagggtttcggcgtgaggatcgcctatgacgactgctttcagacgtcccttccgaggccgcggcgccatgccctccggcacccgctacctccgccgaggctccgccccaggctccaacgacgtcgtcaagcccctgttcaagaccgtctttaccaccgtcgaccaagatcacccccagacacacagagacac

SEQ ID NO: 330735 - DNA, 186 bp, Zea mays
  unsure (1)..(186): unsure at all n locations
ggacgacccacgccggcgcaaaaacnccagccgctccaccttcttcaatttcttcttcctacaaagaggaancccctntgaacagtggcactttaaaatttggcggggacataacacactcactgggctactgcttcntcancttttttttttttttttttcttcccccacccaaactaccaaccg

SEQ ID NO: 330736 - DNA, 250 bp, Zea mays
cccacgcgtgcgcctactcactctcactcctacactcactaccacacccctgaggaccgcgttcccccgctacacacgaggggactatcgacacgactattcacaccctgagtcgctccttgactcgatactggaccataaacagcaccactagctgcttcactgggtccttccggaagccccgccaggactgggtgcccctcaccgtgaccgtcaccggcaccggcacctgcaccggagggaactcacg

SEQ ID NO: 330737 - DNA, 392 bp, Zea mays
  unsure (1)..(392): unsure at all n locations
accggnccggaattcccgggttgttggtttttaaattttttttttttttgactcaaagcagctcgatgtcattatctcagaagacagtagctgtgggaacgcaatgcgaggcgcagggaccggacagacactgctgctacgactacgagtaggaagaaagcgagaagaataaaagcgagcgaggaaagggatggcgggggcaccactgcccggccggcagcgggcagcctttggatcagaactacagtggcaggcgacctcctctctcctctctctttctttctgaaaaaaaaataatgcagatcttccgcaagttcccaagacgactggcgacaatgacccaccatgagcacagcaaagcatttcacccgtttctttctttttgggttcct

SEQ ID NO: 330738 - DNA, 248 bp, Zea mays
ggtcgaccacgcgtacgagatccggagcagccgcagtcccaccgatcccgccgccggtcgccctccatctcctcggcgctgcctctcgtttctgtggggaatggtcaagatgagccgtggtggtagtgccggtggtggtcaaagttctctgggttatctctttggaagcggtgagccccccaaaccagcagtggcaccagctgcaagtgctccacctgttgagaaaccatctgctgcaaagactgatg

SEQ ID NO: 330739 - DNA, 245 bp, Zea mays
  unsure (1)..(245): unsure at all n locations
aaaaaaattttttttttacttaaacttttctttttaaatcaaaaaaaacaaaggggntgtttcatttaaaaaggcaacgacaaaaaaacactttttttattactacaatatnaaaaaatctatacaaaataattttcttattattcattcttttttattattatcatcctatacattcattctattatcatatctactatttatatcaacttctctaactattctttttttttaaaaaatataat

SEQ ID NO: 330740 - DNA, 245 bp, Zea mays
ccgacaggacgcacgcatccgattgatgcttaatatgtattataaagtctttcctgttaactgccctgtggggttgtaaggatctcatttagttatggagaaagagaatattacttttacttatgaagttgaatttgtaaacagtgatatcatgttgccatcacggagtgatgcatacctgaagattgatgattctaagattcactgctttttcaatttatgaactctctgatggtaattctatt

SEQ ID NO: 330741 - DNA, 319 bp, Zea mays
aatacccgtcccgacgcactcattctcacactctttagttactttttaaccaccttatcagacaacatccatacgagactcttagactattaccaatacctgtcaaattctatatcatccctactactcttctacaacaatccacaacaaatctgacctactctgcttctctcatccccttcatcactcttcttatctccctattccatctctattctaggccatgaccatcaactcctaccgactcatcaagttcttcacagttttatacttcaccgtataaaataccatcattctcatattctacaccatcaacaat

SEQ ID NO: 330742 - DNA, 351 bp, Zea mays
cacacgcctatcttacatactgacacctctctagccaagcatcatactggcattcttcgagcactttaccctttcagcaagattgtctatcctgatcaagacagcaataacccaaatcatgccgatgacaacgaccattgacacgcaaattcctagattcccgaaactcacactgcctttgattctgttcctgctcagcttacacactacgtacaccttctccaaacgctcttacattatccattacacctaactcatgtttattaaacagcacctttttcaacaacagccttatcacaatccattctatcacgaactcaaaacttattactatatatactattattatcc

SEQ ID NO: 330743 - DNA, 275 bp, Zea mays
aaattatccaagcttactgacgcctgcatgctacggcttatctctgctctactctcacctggggatgcatcactttcctgactcttcaacggccactacttataaaaccaaatcgtcaccatatcttaccaccaacaacactaatctgaataaacatcatgccatatacacaaacattctccaaccaatctactcaagcaacatgtacacccacatttaaagctaccggaatatccatgaacaccgccttatccatcacatggtatcatactcac

SEQ ID NO: 330744 - DNA, 269 bp, Zea mays
caaagactatgaaccagtttgagctggctttcctccacttatgctatagggtgactagctgtggtatttagccacctccagggaacaagaagaatgacgtttgctcttgcaggcatgctctacggaaagctcaaagccagctgcatcatcaaattataaggatagagaatctcgagcttatgctgaaatatgaccaacatgattggaagctccataacagacaaatggaatcaaatctgactatgattcaaaagaaggcttgtataata

SEQ ID NO: 330745 - DNA, 212 bp, Zea mays
ctaacactatgaacgacttttagctggcttatctccacttatgctataggggtctttctgacttttggagccacctccagggaacaatattattgatgtttgctcttgcatccatgctctacgtaatgctcatatccagttgtatcattatatcatactgatacattatctagagcatattctataatatatcttaaatctttgtaaacttc

SEQ ID NO: 330746 - DNA, 180 bp, Zea mays
ccccgtagggatccattaccattactcctctcctactccctccacactcctactcactcccttctcccacctcattttcctcaccttcaattctcccattcttctcctccccaaactcatgttctctctctactttaaccccatcctcatgtccatcctcaaattcacatcatccaatac

SEQ ID NO: 330747 - DNA, 271 bp, Zea mays
tctgtttccattgcatcttttcgattctcttaacaatagggacatctcaatcattaatgtttttatctaattaaactaaattatatttctttatacactttaattcattcttcacaatttatcttctctatctcaatcatgcttttcaagaactataactgcatcaatcaatcacactataactcaatccactttaaattgcatatcttctacattaacaatgtctacatttcactttactttacaatattttctcatttattcactcctt

SEQ ID NO: 330748 - DNA, 304 bp, Zea mays
cccacacttccgtcgacccttattgttatttccagccaatctaacgcatctgattccatggtagcagcgccaagccctgagcaagacttacatgtcaagcatgaaggcggtgatccaggttaactaaaagacatacttggttacactttccgtcacgttgtacaatttatcatctctcgcgcacgcatgctttgcaagcgcaataactccgacaaccatgcccacgacaacttgatccactgtaagttccatacctacatgattaacgagttctagctcttactcccctgcacaagcatttcgc

SEQ ID NO: 330749 - DNA, 312 bp, Zea mays
aatacccggctggacgcacgcgtccgccggggcttccgctgatttttattgttatttccagccaatttaacgtggggcattccatgatagtatcgcaaagccctgagcaagacttacatgtccagcaccaaggcggctatccaggttaactaaaacactcacttggttacactgcccatcacactgaacaattcatcatctctcatgtacgcatgcttctcaacaacaataactccaacaagcagtcccacgacaacataatctacctgaactaccatatcttcatcattaacgtgttctatcagttactcc

SEQ ID NO: 330750 - DNA, 234 bp, Zea mays
  unsure (1)..(234): unsure at all n locations
gaaaacccggctggacgcactcattcgncggcaccaacctcagatcctcactgcttttttacgcgtacttgcgacggcctatttcggctatttctacacctacgttggcttcactgtccgtcgccttcccattacgggcttcccatatctcattcagtaccaacaagtaccaactgctcgtatacggatgctccagcacctcctggacaacagattattgccctactctttcac

SEQ ID NO: 330751 - DNA, 358 bp, Zea mays
gtcagatcagaccagcaacggatcgacctttgcttccgtgcagatggagcagatgctactgcagcaggtgttggaccaatttgttggacaagagatcgttgactggtgtgggagcgctgcaggagaaaacaaaggggggataatgtgtcatccagatggacccaaccaaagaaatagaatggaataaaattaaaggcgttgaacgagaaaaaaatgcatcaaattattgacatcaaaataaataccggttcgtcatggctgacacaactagtgaggaacctgccacaagtgaacagacaaagattgaagggctgatttttttgaaactagtgtgggtgtggaaaaacgttattatttt

SEQ ID NO: 330752 - DNA, 271 bp, Zea mays
caaatatcaattcttcacacaatttaaatcacctaataccatcgcgacttttacgaatccctttaacattacaaacgcacctaacaaccaagcagcaacccaaatatccaataacttccacattatctcactttttaacccactgatcaacttacactatccacatataacacactatctaataacaaaaactctacccaacttcactactaatcattctaaacttgttaattacataacatactacatcactatcaactaatacacattc

SEQ ID NO: 330753 - DNA, 368 bp, Zea mays
gcaagctcgccacaccctggacgcctgcttcttgtctgctcggcgcccctgcgcttgctggcttggatggcccttgccatggccgtacgctgccgagctccaagctccaactcggatctttctccctcgtcttccttcccacgagctcgcaccagcctctgcttcctgctcgccatggcgcttggcatccagctttctgcgcaccggctccttgctccagctcccacgcgcgtccgagctcgccccggctccagcttctcccaaggtcggcgatactccagtcctctgcgcagcgcgcacgcttagcttgcctctcttgcgcgcagtcctttgttcctgcgtgccacaatcctccagcttggttgccg

SEQ ID NO: 330754 - DNA, 382 bp, Zea mays
aattcccggctggacccacgcgtccgaaaccctatacagaactctcacactcgatttagatatatcacttacgggggaaaacttgcgtactttatcacactcaacggtctgactatacattaatgatatccagactcacattcaaagaatgcaataattagaaattgactggtttgttaaaccatttatatccctacactataatgacataacgcaaactataatttagatcatgctggacagatctcactatctagcaatcgacactaatgaacttcttatcatacgacatctggacatacgattacacgatatccttctattaatattcaaatgatgactcatctttcattcaaaatttacattgatactttgaatttac

SEQ ID NO: 330755 - DNA, 273 bp, Zea mays
aaactctagagagctcgcttacacttgagctggacatatcatttacgagggaatactggggcactttatgaggctcaaccatcataacttcatcaatgaaatccagactcacgattcaaagaatgcaatacgttacaattgcctcgtttcttgaaccattgagctacctacactataatgacataacacatactatagcttagatcatgctggacagtgtcactatctagtaatcgacactaattaacttcatatctgacgacattggtacat

SEQ ID NO: 330756 - DNA, 345 bp, Zea mays
  unsure (1)..(345): unsure at all n locations
ctcngtggtcttgttcactgtcagtgccatgtctccctgccctgcttgcttgtcatcggcaagtgacactacctagcctatagcaaggctacctttctcaggaggtgctgcagtgcaggttaccacaaaactagtgacgacgcggctagtttctacgttgtatatagttcttgctgcagaccgcgtttgtgtttacgaaagatttcacttttaagttttctgtgttaactataattgtatgatttgcgggctctggccggcccggaatactaaatgggcagtgctattcgggccagcccggcacgatctggcctccaccgtgccgtgctcgggttataatctggg

SEQ ID NO: 330757 - DNA, 59 bp, Zea mays
tttctttaaaaaaaaaaaagtaacaaaaaacaaaaaaaaacacctaaaaaggcatcacc

SEQ ID NO: 330758 - DNA, 183 bp, Zea mays
  unsure (1)..(183): unsure at all n locations
gtctccagttccccgtcggccgcatcgggcgctacttgaagaanggccgctacgcgcagcgtgtcggcaccggcgcccccgtctacctcgccgctgtcctcgaatacctcgccgctgaggttctggagctcgccggtaatgctgccacggacaacaagaagactcgcattattccgcgccacg

SEQ ID NO: 330759 - DNA, 197 bp, Zea mays
ctcacttggccatctgtgcaccgaacaattgagtcatgtgggttacctgcggaatacaatcctgtggaaactgaatacgtgatgtattttcctgcccagggagtaggggcgggagttgacattcaatctttcctctgatgatcctacaactgtaaccttgcagggcttattcttttgttaacctgtgttaaaccctc

SEQ ID NO: 330760 - DNA, 285 bp, Zea mays
  unsure (1)..(285): unsure at all n locations
cctccctcatgtacgancccataatccctacatcgactaacggttataatatctcttgcagattctggtactgaacaacttcacttcatagctctttcagagaggaggggggatcccaattaccaacataacgtctaaaaacatcattaaacagcctcaataaatatatcccagtgatagtttacttcttatttacataaatcctcattcctgggacagcatcatactcatctatcacattttgtgctatgtcacacagcttctaccaaaatttactcaacgtct

SEQ ID NO: 330761 - DNA, 371 bp, Zea mays
  unsure (1)..(371): unsure at all n locations
gtccgcacacgcgtccgcacatctcctcgcatttcttcncatccgatccccccttcgcaaccaaaaccccaactcgccccgcatcgatggcgcccaaggccgagaagaaacccgcggcgaanaagccggcggaggaggagcccgcggccgagaaggcgcccgccgggaagaagccgaaggcggagaagcgggtccccgctggcaagtccgctgccaaggaaggcggcganggcaanangggcaanaagaagggcaagaagagcgtggagacctacaagatctacatcttcaaggtgctgaagcangtgcacccggacattggcatctcctccaaggccatgtccatcatgaactccttcattaacgatatc

SEQ ID NO: 330762 - DNA, 348 bp, Zea mays
gtgtaagaagccatggccggtgtgcccccggtggttctctcgtcggtcgcggcaatgcatgccgcctagctcgttggcagcagcgccgggcggcccccgggccggcctggtccggggtacaggggcagtaagaaacttttgcagaacaagagagagaccctgatagtttttgctctcgttcagtcgttctctcctcttctctctctcacacacagaaacacacgcagaatggcaggagagagagagagagagagatagaaagggatgtatgaaagatctagcaagaagtattcttcgttacatgtatacaagacatggcaaatgaagcatcggtgatggcaaatcatg

SEQ ID NO: 330763 - DNA, 217 bp, Zea mays
  unsure (1)..(217): unsure at all n locations
tacccanttctcttcacaggtccacttccttggagttcaactcaagcaatacaatacgtcaaagggcccaaattactcttgacaagacctttactaccacgtcagctgtcagcaggtccaatataaccaacattgacaaagaccctctattcagtacaaacaagcacaacaatacggttgcaattttcagacatcctcactcaccactcaaggatcc

SEQ ID NO: 330764 - DNA, 203 bp, Zea mays
cttcacaggtccacttccttgcagttgaactcaagcaatataataagtcaacgggccgaaattactcttgagaggaccttcactaccacgtgagcgggcagcaggtcaaatacaatcaatattgacaacgaccctgcaatcactagaaacaagcacaacaatagggttgcaattttcacatatcctcaatcacagcccaacga

SEQ ID NO: 330765 - DNA, 152 bp, Zea mays
  unsure (1)..(152): unsure at all n locations
accgagccttcggccaagcgatcggcaacaacttttaacggcggctccctttccctccggtaatggtcctcctcaacccaatcccccccaagaacngccgccgccgccgccaagtccttacccacaaccgcgagcgggggcggcaacccccg

SEQ ID NO: 330766 - DNA, 293 bp, Zea mays
  unsure (1)..(293): unsure at all n locations
ggtcgaaccacgcgtccgcggacgcgtggggttccagcgaacgcacacagccgccgctgtttcttcatcttcctcgcagcgccggcgctgaggctcgggctctcancgacggcggcancngcancggcttcgcctcccgcctctctccattctcctcgcgccctcgcctccggtcctccgcacaccggtcggttaccctgcgataatggctcatcgtggacatctattatggactgaatggtcaacctcctgctcttatacgccattgggtctttcgctgcaatgagcctctc

SEQ ID NO: 330767 - DNA, 289 bp, Zea mays
agagcccggcgccggcgacgagcaagagcacgtggctgtcgccagagcgctcgcggcgctgaagccgcgagacggcggcgacggaaaggcggcgccgcctctgcagaagcacagcagcaacgggtcttcttcctccgctcttccgagaccgtcgctgtacagacaccaatggcggcctcggaccagtacccctgcccagcccctgccgccgaggacgggggccctgcccctgcagccgccggccggcccaaggatcctgcccccactgcatctgctacaacagccggcg

SEQ ID NO: 330768 - DNA, 97 bp, Zea mays
atcctcttctcccacatcactgtccactaaccctacccacaacctcggatcgttttatccccccggcgaactctaattcccccaaacactacctacc

SEQ ID NO: 330769 - DNA, 356 bp, Zea mays
gctcgcatttcctcccaatccatcccgccttcaaacccgaactccaagtcgccccgcatcgatggcgccgaaggccgagaagaagcccgcggcgaagaagccggcggaggaggagcccgctgccgagaaggcgccggccgggaagaagcccaaggcggagaagcgtgtcccagcaggcaagtccgccggcaaggagggcggcgagggaaagaggggccggaagaagggcaagaagagcgtggagacctacaagatctacatcttcaaggtgctgaagcaggtgcacccggacatcggcatctcctctaaggccatgtccatcatgaactccttcatcaacgacatcttcgagaagc

SEQ ID NO: 330770 - DNA, 351 bp, Zea mays
  unsure (1)..(351): unsure at all n locations
cgccgattccgcccgcacgtccttggtgctaccggaagggcctccgggcctccaggcctgcctcgcggggctaatcctccgcctccccttcgggatccaggaccaggacgcctctccggctcccggcacacgcctactcgctcccttcgcccgccgcattntcctcgccttcaatgctcccgtgcggctcctncccaaacgcaggtgcgcggtctacgggaaccccatccgcatgtccatcctcaagtgcagagcatccaagactgaggccctggcgcgcttcttcccgagagcggngttattgggcgaacacgaggcccaggtcgtgctcgtgcttgggggagccggagg

SEQ ID NO: 330771 - DNA, 151 bp, Zea mays
ccgggtcgacccacgcgttcgtccacgcgttcgccgacccctggggttaacgacaggcaatttaagggatctggtttcattggaacaatgggattccctgaacaagagttacatgtccagcattaaagtggttatccaggttaactaaaag

SEQ ID NO: 330772 - DNA, 266 bp, Zea mays
agattttcgtccaaaaaaaataaaaaaaaaaaaaaaaaagggcaaacaatgtaaaaaagtccaaccttacatactcgatcatgcaacataatcacctccattatactgtaaactaaattcaatttactacccaaattcatacaacttcccgactgttaaaaccctggcgactcccaaatcaatggccttacccaacataatcgtttcgcaagatatcctaatttcgaaaagtcccgtaccaatcaacattcccaacactttcgcac

SEQ ID NO: 330773 - DNA, 254 bp, Zea mays
ccacgcatccgaggacgcgtgggcggacgcgtgggaaaaaaaaaaaaaaaaaaaaaataaaaaaaaaaaaaataataacaatattatagcacaacaaaaaaaataaaataataattaaaaggggggggggaaatattaacaacaggggcggcccctctaaaaatttcaactttacttatccttttatgcaacttcaaacctcttctaaattttcccctaaatttaattccctgggccttttttttaaaactttt

SEQ ID NO: 330774 - DNA, 97 bp, Zea mays
  unsure (1)..(97): unsure at all n locations
aaatnngacctcctttctctttctttttccctcctttcattgactgtacaaaagaacagagcctaacctttaattttcattttctattaaaatgccc

SEQ ID NO: 330775 - DNA, 133 bp, Zea mays
  unsure (1)..(133): unsure at all n locations
aactaattctagatagctcttcctttttctttccttttccctccttttantgantgtaaaaggaccacggcctaacctttaattttcgctttctaataaaatgcgcactacgggtttcccctcctgatccttc

SEQ ID NO: 330776 - DNA, 195 bp, Zea mays
  unsure (1)..(195): unsure at all n locations
cccccccnaatgttttttgcagtccggtcaaaaaaccgggtccagccacgcgtccgatgcaacgtacgatcaagtgtgcagtctgtcctgggtaatggcccaaatatccttgggatgctccacccgattcttccacattgggtcgtcctccctctcaacggggaacaagccaatggggtgggtaaccaactccaa

SEQ ID NO: 330777 - DNA, 302 bp, Zea mays
  unsure (1)..(302): unsure at all n locations
acgcgtccgaaaaaaaaaaaaaaaaaaaaaaaaaaaaaaaaaaaaaaacaaaaaaaaaaaaaaaaaataaaataaaaaaaaaaannangggggggccccctcaaaaaattaaaaataaaataaaagggggggcgccccaaaagatttcatccttagttacccttaaattaaatttcagaccctttctttataatcactaaaattaaaaaaaccggcggttttttaaaatattctcgcttggaaaaacccccctttttcccaatttagtctcattaaaaaaaatcccccttttatcacttttc

SEQ ID NO: 330778 - DNA, 105 bp, Zea mays
cgtccaaaaaaaaatcggcgggcgcgtggtggcgcgcacggatgcagctccgggcattcccggtgcgagacgggaagcgttgcgccggcgacggtggtgcacctg

SEQ ID NO: 330779 - DNA, 243 bp, Zea mays
atttcccccaacccaatcggccccaatctccgctctccccactcctttcacatttcgcgaaactgtaagtggcggccggcggacaccggcgaggaggcgacggaccgacggcgcactccgtcgaggggacgcggaagacgtattcggcaacctacgagccaaggaggcgacgcggtgcggcgctgaacaccgtgccggaggcccggagcggcgggcgcaaccggcttggccgggcggtgtccg

SEQ ID NO: 330780 - DNA, 129 bp, Zea mays
cgtccgacacgctgcgacaaacgacacgtatcctatacaggcgcttctcaccatttccacattaaagcttcgtatggtatgctcctgagagtgaccctgagggggagggggggccttcattttcaatga

SEQ ID NO: 330781 - DNA, 309 bp, Zea mays
agtgaaaatgggttgtttttattaatttattatcccacgcgtccgcggacgcgtgggaaaaaaaaaaaaaaaaaaaaaaaaaaaaaaaaaaaaaaaaaaaaaaaaaaaaaaaaaaaaaaaaaaaaaaaaaaaaaaaaaaagggggggcggcccaaaaggaacaaacctaaattacgcgtgcaagcaacgtaaaagcccttcaaaagggtcaccaaaataaaattcacgggccgtcgtttaaaaacgtcgggacgggaaaaacccgggggtaacccaactaaaacgccttggaaaaaaaccccctttccc

SEQ ID NO: 330782 - DNA, 230 bp, Zea mays
gttccaccacgtgaacgctttctggtgacccaccttagacagtttgtacctagatacaagcaaggcatcttacagcaagcaagaaagcttttccatgaagctgggaacgacgctcctgcatgtgaaaagacccccgtagatttacatttggcagtccctgaaggagactctggacttgcccatcgtgctcagcatgtacttgatgaagacggtcgacctgtttcaacctc

SEQ ID NO: 330783 - DNA, 269 bp, Zea mays
  unsure (1)..(269): unsure at all n locations
gacgccgccgacgagtgctccgagcatcaaccgcctcggccacgaaccctaaaccgcggaacgacgcgcgccggtcgtccccggaggtcgtcgtcgacgctaaagcgagaaggctgctgggcaggagctcgtcggacatgaacaaccaccaagacgcaagggtggccgccctggtcaggangaacgtggcgctggaagagcaactgtcggcggcgctggcgagcaaggacgaagcggagaagaacctgtccctggtcatcgacagcaaa

SEQ ID NO: 330784 - DNA, 168 bp, Zea mays
ccgccgaggcagtgctccgagcatcacccgcctctggcactacccctaaatcgcggaaccacccccgccggtcctccccggaggtcctcatcgacgctaaacctaggaggctgctgggcaagacctcttctgacataaagaaccaccaccactcactggtggccgccc

SEQ ID NO: 330785 - DNA, 55 bp, Zea mays
tacgtcggcttgcatgcgacctcatagcgatctatattgtcacctaaattcactt

SEQ ID NO: 330786 - DNA, 56 bp, Zea mays
aaaataagggcaactcgtgcagcttttggaatcatccgacacccagcaaatctgaa

SEQ ID NO: 330787 - DNA, 413 bp, Zea mays
  unsure (1)..(413): unsure at all n locations
cagaatgccgggctggggtanaagtggtggtgggaactggggtagaggccctattggtaattgaggaacaacagaatgggtccggcagttggccgtggaatcgggaatggcatggttgcgccgccacccccgatgctgcctcanggaggcatgctggggcaggggtttgatcctggttatggcgccatgggaacgatgggtggtgggtttggtaacttccctgttggaccaagtgctgggccgtttcctgggatgatgcagccatttcctccggttgttgcaccacacataaacccggccttctttggtcgtggtgccaatggggctggtggggtggggatgtggcctgattccggcatgggggcttggagtgtggaagaacaatcaaatttatgggatgatgcagtgtctga

SEQ ID NO: 330788 - DNA, 283 bp, Zea mays
ggacaggaaacacatcaaccatggcagaggcagagtgccgcgcctcggatcggccgacgacttcgagttctgcatcctgtcgtccggcggcatcgtcccggccggagagagcgcggggacggacatgtgcgtggccgacgaggtcttctgccagggcaagctcctcccgctccgcgcctcctcggccgcagcctccgacggcgccagcgtcgccacgctgccgaggtcggagtcggtggcctccaccgtgggcctggtgtctcggtccggcaacccccatctc

SEQ ID NO: 330789 - DNA, 306 bp, Zea mays
cgcggacgcgtgggcaacctgctaaacaggattcagtgatgacagcagctctgagagctcctcagacgatgaaccttccaaaaaaccagttgccggtttaaaaaagcctcctgccaattgtagcagcactgatgatagcagtgacagtgatgatagtagctctgatgaggaaccaacaaagaagcccacggtccttttaaagaagcccactgtcctttcaaaaaaacctgtcacagcagtcagtaatggttcaaaacaggtttaaacctgatagcagcagctctgacagtagctcagatgaagatg

SEQ ID NO: 330790 - DNA, 281 bp, Zea mays
gggcaacctgctaaacaggatccagtgatgacagcagctctgacagctcctcagacgatgaagcttccaaaaaaccaattgccggttcaaaaaagccgcgtgcgagtagtaccaccagtgatcataccagtgccactgacgacactagctctgatgacgaacgcaccaacgaacgcgcacggtcctttcgaagaatcccactgcccgttcacaacaacctgtcacagcagtcactcatcgttcacaacaggttaaccctgatagcaacacctctgacacta

SEQ ID NO: 330791 - DNA, 430 bp, Zea mays
gcggtggcagcagctctagaacgacggatccccgggcagcagggatactcgacaatctcacagacatccgttactgatcaacttgtctcattaattaccgccccagaaagaaatcggaaggaaatctagagatgcatccatgaatcgggagtcggcttagaccaaaagctgacaaacttgacgaaagctgaaaatatcgatgttgaaggactttttatagttttactaatgatggggatcccattgattgatgagatacgggaaaattcagcatcaatttataaataatgaaaatgtactggagaatggatttacatacagaagacatacattggtcaccactcatgattagtgataccgtgtacagcattctcccggggcgatcgaaaggcagcactgtagggtacgtacgacagctttttcagacata

SEQ ID NO: 330792 - DNA, 345 bp, Zea mays
aattcacggctcgacgcacgcgtacgtgcaggcctgggtaaacgccttggtatacgcattggaactgggactgtaccaggtagtgtaccacctcgacgatctgcactgctgtcagcatggctggcatcgtgtcagggactggattaagcaaaggtgtaggggcagcttgaatggcagcgttaatgagaatggccaacatgatatccacgttgctacacttcgatacatctgtcgagatctatgtcattgtcgagttccttgtcgtcatgcttgtcctcaaattcaactgcatctgaaactactgcgtcaatgatggattcgttgcggcgtgtgtattgtcagctg

SEQ ID NO: 330793 - DNA, 377 bp, Zea mays
gctcgttggactaggttctgcccgttgctgctcgatcctggtctgcgtgggctgcgtccggactcgcccctgcttctggggcgaagagattttaagagcgccgagtagtttactgcgtccaaagaagggcctacgactaagagggtttaaggatggaagtgtcccgggacgaagaaccccaagaagagacggccctgtccgattaattacgaacccattcattataaaagtaaaggggattagttctcccatagtacctttactgagaatacttcggtagcggaaaactcggaggaggagctccctaaaacgaacaatacgccttaggctacctagttagagtgcgtgtcgcatacctaggttaatattcgtgcgga

SEQ ID NO: 330794 - DNA, 468 bp, Zea mays
tggatcccccggacagcaggaattcggcacgaggggaaatggaaggtcgtatcccttttgtttacagggctatagtcgagtacaagagcggcaaagacgatcacgttttagcaacatgggtcatcgagtcaccctcggcttcttacatgagactccccaccggggattctgatcgcttccaaatatccgatgatcgaatctttgagtcagatacttatgggaagttttccacttcatcatcatcatcatcatcatcttccatgggtgctccttctgctagtactaagattattttatcagccggagttcaatcgtcctgcgtgtctgctccgtttgacctctctccgcacggggccgtcgatacatgaaaccatcgcatacttatgggttaaactagggtctgggaatttcatgtatgttgaacatatatatgtatttctgtggacgttaatcattatggtcgggtac

SEQ ID NO: 330795 - DNA, 172 bp, Zea mays
tggttcctccctctccatgggcctctttgctgccgcatgcctcgccgcgtcctcctccgtgcccgtcctcctccgtgcctccgcctcctcgcggttttaggggtgcgtcgtcctgttccggcccctctctgcggctgtggcgccgcctgttgcctctttctatggcgttctc

SEQ ID NO: 330796 - DNA, 192 bp, Zea mays
ggccacgtgggttcctccctcgccctggccctctttgctgccgctcgccgctccgcgtcctggtccgtgcccgtcctcctccgtgcctccgcctcctctgggtccctgggcggcgccgtcctgctccggcccctcgctgccgccgtggcgccgccgtcgctccgcgtcctgtctttctcctcggcgcccgcg

SEQ ID NO: 330797 - DNA, 137 bp, Zea mays
aattaaggggtcgacccacgcgtacggtttatttttcatcgggtcagtggtggaactgcgaggttgtggttttatcatgtaggcaaatttgccaaatgtgtacatcggaaatatgggaataaaagcctttatcgatc

SEQ ID NO: 330798 - DNA, 130 bp, Zea mays
tcttttttttttttttttttacgccgtaatttcaattctcatggcactggggggatccccaaaagataataagtgagacactaatcgaacagacgcgccatgtggttcatagctccacacctaaaacgct

SEQ ID NO: 330799 - DNA, 281 bp, Zea mays
  unsure (1)..(281): unsure at all n locations
gtctgtgtggtttttgtttgttttggtctccaggggaactcatgctctcgtgccccgagctgagtggatgaattggtctgccgaatggtaaattgtcgaactgtatgtagattagcgtctaaaggcactaagtataagtagacctggggggtacgttcgcatacattcgacagggtacattatccaagcagggggtctaaggggagccatatcagttctatcangcataccatgattaaggaggcatactttgaggagtgagttccacagatctctacggc

SEQ ID NO: 330800 - DNA, 397 bp, Zea mays
aattcacgggtcgacgcacgcgtacgtatgtgactacctttgtttttatgcgatagacaaactaatagctattacatttgcagagttccttttttgcatattttatgtgccttgaagtacaggcacttgttccagctggttctcctaatgctaataagagtaaatccagaggaaatgacccggatgatgatctgtgtcttatggatccagatggcaacaatctgaaacctgatccaccctcccgctcgctttctagccccgtcgccatggcgtcctggctgacgtcgtggatgccaagcccatgcctgcgttgaaagagagggagaccagagacacccagtggccctggcggtagtagtgccaaggttctattcactgtgagtccgcgacgccccat

SEQ ID NO: 330801 - DNA, 266 bp, Zea mays
gtatgtgactacctttgtatttatacgagagacaagctagtatctagtacatttggacagttccttttttgcacactttatgtgccgtgaagtacatgcacgtgtgcgagtggttcacctagcgctaataagagtaacgcctcaggaggtttcccggttgatgttctgtgtcataaagatccacatgacaagaatctgaaacctgatacatccgcccgcactcattctagcagcatcgggaattagttctctcatagtacctttac

SEQ ID NO: 330802 - DNA, 412 bp, Zea mays
accggtacggcattccggcgtcgacccacgcgaccgcggacgcgtgggtgttgttttagtattttcatgttccttttccttgtgtcatgttctaagaagtatttgcactttgataagtgggcgactaaatcatatgcccatgtcaaacactaaatttgcatctgggatattcaacaaactatgcagatgtttagaacagcaagcactgacaatgaagctgtgatgtcaaaggcgccatcgaggcctgttaacaagccagtcatcaaagatataaggcgagcaggcaattataagtacagaatcgatgaattgaatgacccacctgtacgccatcctgggatacgttctttgctgcccttgccaggtggtgatctattaactggaggaacagatttgaagattcgttactggg

SEQ ID NO: 330803 - DNA, 72 bp, Zea mays
ttccggcgtcgacccacgcgaccgcccacgcgtccgcccacgcgtccgcccacgcgtccgcggacgcgtggg

SEQ ID NO: 330804 - DNA, 194 bp, Zea mays
gaaacacgcgtccgcccacgcgtccgcccagtcttacgcccattcactctgctgtctccttgtgataagttctaaaaattacttgcacttttgtgggtggacgatcaagagggtcaaggattatcatacactatcattcaacctcagagtacttctatactgtcacatattttcatttcactggccattgtttt

SEQ ID NO: 330805 - DNA, 217 bp, Zea mays
acgcaaacatacacgcctccgtacacgcgtcatcccagccgttcacagctttctggggtctccagttcccgccgccggtccagtcccgtggcgggagaccaagagggagtggatttcgatgcacatcaggcatacccgtatccagttcagaaaggcatgcatgtagactgtcacggcttgaccatggaaatcatgctgactgtgaaatgcccggtga

SEQ ID NO: 330806 - DNA, 471 bp, Zea mays
ttcttttttttttttttttttatgttcttttttttttttttttatttttttttttttttttttttttttatttattttttatttttttttttggtgtatgtggttttcttttttctttttaaatttttttttttctttttttttttcttttttcttttttttttttctttttttcttttttctctctttttttttattttctttttttatttttattttctttttttcttttttcttttttctttttttttttttttcttatttttttttttctttttttctttttctttttttcttttttcttttttttttttttttattctctttttctttttttcttttttttttattctattttttttctcttatttttcttatcttttttttctttttttctttttttttactcttttatctttttttttttttttcttttttattcttttattttttttctctttctttttcttt

SEQ ID NO: 330807 - DNA, 308 bp, Zea mays
gctggcgggactaggaaggagacaagtgaactcagagaagaactaccgcggcgggcgagcattgcaagccgagctgcaggggcccggagcggagaccggacgacggagacgtcgcttgcgatgtcgggggcaggatccgccgccgaaaccgccgtcgtcggcgtcgtcgcaagcgtccctagccagcagcagagcagtcaccgcgccgcggcgccgtccgtcccgtcgtcctaccccgtctgggagaacgagcggtaacgcggctgcagctttacgacgtcatcgtcgtcgctctgccacctgcccta

SEQ ID NO: 330808 - DNA, 170 bp, Zea mays
ttcagttctgaggcagtggtcccgttgcggttcggcgtgtgcgtggccgttgctggcgggttcgtcgcgtcggctcttttgcggctcctcggcgccccgggcgatgaggcggtctcggggactcgtgcacgactctgatgttgcctcgaagtctcagttcaaggtgttgt

SEQ ID NO: 330809 - DNA, 172 bp, Zea mays
gcccaaagctccgtccccgcggcccaccaaccgccgccgccgcctcacccattcattgccgtcggtacctctcgtcgtcccttacctgggctctgatccatccggcatcgggggccatctcttccacaccgtctctcctctatactctccgagcctcagtgctcgtcccctc

SEQ ID NO: 330810 - DNA, 179 bp, Zea mays
tttcttgctagttggactaggttctgacggttgctgatttatgtgcatgtcgcggggcgcgtaagtattcctatcgtggcacaaaccctcggatcagagtaccggagcgcgtacctcggcccataagtgcaagggagcacaccctgacgaacacccaggagaactaccccactgcgaaa

SEQ ID NO: 330811 - DNA, 354 bp, Zea mays
attccggcgtcgacccacgcgaccgggttggcttctcctccccctccggttcgggttcgggttcgtgaggttctccggggttcggtttcgtgggtgagcggatcgagatggcggcgtcggatgttgagtaccgctgcttcgtcggcggcctcgcctgggccacggacgaccactccctccacaacgccttcagcacctacggcgaggtcctcgagtccaagatcatcctcgatcgggagacgcagaggtcccgcggcttcggcttcgtcaccttctccacggaggaggcgatgcggaacgccatcgagggcatgaacggcaaggagctggacggccgcaacatcaccgtcaacg

SEQ ID NO: 330812 - DNA, 464 bp, Zea mays
  unsure (1)..(464): unsure at all n locations
gatcccccgagcagcaggaattcggcacgaggcagcactgagtcttgaccgccaaccccgcaaaaaagaaaaaactgaaaaactgatactagatgaaatctgtatcgattcagctttttttttgcactgaaaactgagtaaattgaaaaaaagttgaaccctgttttttagagaagtggtggatgatgtctaatgagaggcacgcttcttccaatcctacatctcctcaagaaaatgatgctatgttccttgatatacttcatgaagctccattatttggtcaccggaaaccaaggagtatagttgggggtgttnttttaattggtttcaataactggccggggttttttaaaacgcaatcttggctgcagcagctccttggatatttcagcctcttgggcatttagtcttaccattgctttgcagttgtgatgttgttcttttaatagtcacatgcatttttc

SEQ ID NO: 330813 - DNA, 282 bp, Zea mays
gatcccccgagcagcaggttttcggtatgaggttttgtgaagaaagtggcacaaaattcacaattacaattgagaagtaggagataacaatgaaaatttcaacacaaaagtcaatgaaatcaacagggggaactcagaattcaatcgtcatacagaacataggttttttaaatgataattattgagaaattaagtaaacagtcgccatcttgatcaccaccatcaaaatcactgtcttcttcgtttctccattttcatggtcacaaagacagtgcaatatct

SEQ ID NO: 330814 - DNA, 320 bp, Zea mays
gattcaacttccacctctctctttctttccactactcgccctctctctcttgcgcgcgcgtgagaacatccctccacgggcgcgcggcgcgggagcacccacggacttagggccggtggggcggggcgggggcgatctgatgccggcgcggcggtgatggcagcgccgtccgggggtgggggcggcggtgcgggggagggctcctcctccgtgcgcgcagcgatgacgatcggggcccacggggtgggccacgtcacagaaggcatgtggcacattaagttacgggatggcatgggactggggccatcctcagagccgtg

SEQ ID NO: 330815 - DNA, 409 bp, Zea mays
gatcccccgagcagcaggaattcggcacgaggagaatggctatgttaaaggatggtctagtgagccgggataatgagattagggaattaaagatagtcgtatccgatgccgagatgaagattttgggggaaaaagcgcagatcggagctaaggtatcgaaattgttggagaattggaggagaggctgcacgatgaaatcgaggcgttgaaaacagagattgctaagagaggtgattccattaaaattctaaatgaaaacctcgagaccttgaaatccgagagagatgagctcaagatgaaaatcgatttacttggaagaagaaagttgggttactaacagggtggaaattttcaaattgttgaaatggataagcaactgcaccgattacgtgtggaacacggggaatta

SEQ ID NO: 330816 - DNA, 186 bp, Zea mays
cgcgcagagcggtcatcctgaccggctgcaacgctgagtacttcgtccccgagaagaaccagggcagcggcattcggaagcggtgggcgcaataagtgcgtgggcctcttggcgacctgcgcgagcaatcgtctcaccacgaaactgcgcatctaggccaaagtttccatcgcggcttgtggggca

SEQ ID NO: 330817 - DNA, 348 bp, Zea mays
cccacgcgtccggctccggctcaaggacgagaagctggaggcgttccggtggcgcgcggtgagcatggacgtcgaggcggcgcgtctccggagccggatccacgagctggagggccgtctagcgcggcacgagaagcacagcgccgcgctggaggccctgctccaggacagggaaagcgagaacagagcactcgaggagcagctggagacgctccaagcgcaggcgcttggtgtggagatctgcacgccggcccgtggcagtggccaagacgacgggctcgacgaccagtgcatcgcgtgttcgcccgtggatgccgtccagagaacaatgtcatccggaagctcgcg

SEQ ID NO: 330818 - DNA, 148 bp, Zea mays
gtggcatatactgctctatagagttatttgtgacaagcgaactcatgttttcactacagttggtaacaatgcgaattttcaggctaatgcacactaaaagtttgaaacggtgcacatttactacttcaagtttgatggtctagaggat

SEQ ID NO: 330819 - DNA, 358 bp, Zea mays
cccccctctcacctcccacaccaccccccccctctccccccccccacccctccattcccctccctccccacaccccccccctcccccccctccacccatacacccccccccattccccctcacaaccccctcccatcacaccccaccccctccccccacaacccccctccatccccctctccatcccctctcaccccatccccccccccccctcccatccccctcttctcccccccacctcccatcccccccccttcccctcatcaccccccccccctaccccccatcacctcccccactcctccccacctcccccccccccccccccctctcccctcccatccccacccctcccccc

SEQ ID NO: 330820 - DNA, 242 bp, Zea mays
  unsure (1)..(242): unsure at all n locations
cggaaaacccgggacgacccacgcgtacggtgacacttgtcacattacataacctaaattcacattaggaccttgctaacaaatataggggtcggaataaaaaaaccgtagccactgcaanaccaaaactcacaaacaaaacacaagcttaacttccaatacaagattccataatacatgtaatagccctatcatttacactatgtaagcatacacatacaatatatttgtgcacaacattc

SEQ ID NO: 330821 - DNA, 314 bp, Zea mays
cggattcccggtcgactcacgcgtccgaaaaaaaaaaaaaataaaaaaaaaaaaaaattaaaatttaaaaaaaaaaaaaaaaaaaaaaggagaagagaaaaattaaaaaataaagtaataaaaaaataaaaataaataaaaataacgcttttttttttttaaaattatatttttcatttgtgtgatttaaaactttttttttttttaatataaaatttattattttttccgttcgttttaaattttatatctttatatataaaaaaatcatttcctttcttatattttttgcatacttgtttattactcctatt

SEQ ID NO: 330822 - DNA, 225 bp, Zea mays
ctgacacgtccagtttgacatagttactattaacaacttcaccataacaataaattcaggtgcattcatactggtgcggaagccacaacaaatcaaaaagttacatacataacaactatttcatctccagtacaagtttccagacgttgttctttactcatataattgcttgaataaaacacttacactactttttttcagtatcaaacgctctaaatgatatat

SEQ ID NO: 330823 - DNA, 271 bp, Zea mays
  unsure (1)..(271): unsure at all n locations
gcgtacgcccacgccttcngtttgtttccgcaactacttttaacttcttcagaactatatattcacatgtcattgttactcctaaagattttggaaaaatcaaagattgaacactaaaagcaactcttccagctttaaaagaagttttaggccgttgttgctgacaaaaagaagtactttattggaaaatgttgcaaggttgttttcaaaatcaaacgctcgaaagaaaaaaatggttcaagaatacatatgcagccttaataggactgtt

SEQ ID NO: 330824 - DNA, 460 bp, Zea mays
  unsure (1)..(460): unsure at all n locations
cggaattcccgggntcgaccccagcgccgtgccgcccacgccccgtccgcccacgcccgtccggcttttggttcttcatnngtcgttccactggcccaccgagacaaagcgcgccaatctcaaagggctgccatgnnattggtgttgctgcgggtnggacttgttattcctcctgatgatncttagtnagctgtatgcanggccacannccatccacctgcttttaaaagatgccactgtaagcccaagccagtgagcaatggtcccacccannagctggtgatccttcatatgaacccatggctcttcatgtctnttgatgaatataatgaggatganctgagaacttgagttgagaaataccatcattggataccggggcatcaaagtacaagtttattaaatgtgttctaaaagaatttgcaaaccagtggcaataaaaaaagctgtatgcccacta

SEQ ID NO: 330825 - DNA, 200 bp, Zea mays
  unsure (1)..(200): unsure at all n locations
agactgcaaaattgtacaaggagaattgtataaatttgctttatcaggatccactcntancatgcgattgcaaaatttaaaccttaaagacttcatcttttaaagttcttaaatactactcacttaatatttctactgtattttaatcatcaatattacctctgaaaattgtatgcaatttacctgtagttaactacata

SEQ ID NO: 330826 - DNA, 254 bp, Zea mays
ttcccggtcgactcacgcgtccgtataatacatatgaatgattataccaagctaaaatgacaaataagtagaaataactatagagatggttattaatatgagtatgacaatctaaaactgaactgttgttatacctatcctttcagaattcagggccggcacaatgtgctaccggctggtcactgtggctccgcagggagggatgatggagggaatcccttgtggggtttgccccaagattcatgaagtctctc

SEQ ID NO: 330827 - DNA, 378 bp, Zea mays
cccacgcgtccgcccacgcgtccgagcagctgcaaggaaatgctaaggttctagaggaggaaaggaataatatttccagtctccaggaaaaaaatgacgaaatcgttgctcgtttgaatttactggatcgtgaaattataaatgatgactcaagattcacatctgaagctgcacaaatgaaagatgagttggagaaaaagaagaatagtttgatttctgctgaaaagcaggcagatgattttcttaagaaatcggagaagaggctccaagatgtaacacttaaagttgaagaagaaactcaggcagctgctaaggagctgctggagcttcttgattccatggctgaacataaagagttcatggaaacaacaattgctc

SEQ ID NO: 330828 - DNA, 306 bp, Zea mays
  unsure (1)..(306): unsure at all n locations
acgcacgcgaccgcngacccctgggcggactcgtggtcggacttgtgggtgccaccagcatgcacaagggaggtggtgtttttaggatccttgtcctactgtgttgngtaaaccaccgggtgtagttgactgtatctggttgtttgtatgtatggacaagacaaaactagcactgcagatggtatggtaaggcgtaagcaaatacaatatgacattggtccagttccaggaatgaatggaatatgacattggtccgagaaaaatatatatatttattattaaatttttatttttaatttttttttt

SEQ ID NO: 330829 - DNA, 101 bp, Zea mays
cccacgcgtccggctgtgttgtgggttatgtgatactctctcctgcccatctaataatatatataaggtgtaatcactttttgctctatacacggaggact

SEQ ID NO: 330830 - DNA, 408 bp, Zea mays
cggacgcgtgggggctcgtctgcctctgctctgcccttgccctgcccccatatagtgcatgccattgccacccccaaagtgtaagcacaaccaacagcaaagaagagacgacgtcgatcgatcgatctcagcaaccaagcaggtcgtaggtaggcatggcggccgagaaagagggcgcggtggtgaccaaaggccacgactaggggatgaaagcggcggcggcgctgctggaagagttcgggctcccgccggggctgctgccgctggaagacgtgacggaggtggggttcgtgcgggccaccggctacttctggctcgcgcagcgcaagaaagtggagcaccggttccgcaagatctgcaagcaggtgagctacgacgtccagatcgccggatacgttcgggccaggg

SEQ ID NO: 330831 - DNA, 373 bp, Zea mays
ccacttctgacgaggcggcgtgtgagctacctggagctggaggtccagttctttggctatgtggcaagagggttgtggttagtaatttattcgatcagcaaccaagctccaatactgggagcctgcaacgacaacgtgtggcagacatggaactggacgcttcagctcctgagtcaccgactagttgtggaactgggaagaagctgtcctcccatgccgcagaggaagcgaagacatggcacccgtggctgaccggtacgcggcagtttatgcactgtcttcctcaaggcgaggaggtgttctccgtgcattctgcttgccgacccctgagctacggtgatggaagcatgccttgcaccacggtgtggaacgc

SEQ ID NO: 330832 - DNA, 236 bp, Zea mays
  unsure (1)..(236): unsure at all n locations
gctcctcatgtgggtcgacacggggctcgtcccggaggccgcggccagggggtttgggcccaagctatctcccgaagccggggcgcgggtgggggcctatacgcgcctcgcgcctggcggnctggaacataagctgcacgtcgtggagcgcacggtccgccagcttgtttgcggtgaggggatcgccaattgcagctcgcgagactccgtctggcgattccaccagaatgatcagc

SEQ ID NO: 330833 - DNA, 101 bp, Zea mays
cggacgcgtgggcggacgcgtgggggcaagtgatactctctcctgcccatctaagaatagagataaggtgtaatcactttttgctctatacacggaggact

SEQ ID NO: 330834 - DNA, 106 bp, Zea mays
caactttagttctttgaattctcttccagaagtttacaaagcggtgctgttttctaggaggccacaggacacatgttctctatatgcatgtctggaagcttttatt

SEQ ID NO: 330835 - DNA, 210 bp, Zea mays
gatgagctcatcaagaatgctgcctacattggcacccctggcaagggtatccttgctgctgatgagtccactggcaccattggcaagcgcctttccagcatcaatgtcgagaacgttgaggagaaccgccgtgccctccgtgagctcctattctgctgccctggtgctctccagtacatcagcggtgtgatcctcttcgaggagaccctg

SEQ ID NO: 330836 - DNA, 310 bp, Zea mays
cgggctcacccacgcgtgcgctaacgctagatctagagctagagctctagaggaggctatcttacatacacgctcatgcaagcttgtgggcgatgtattgggtcgcctatagtgaattcactggccagatgactacaacgtggtgaacagcaaaacgactgcgataaccatgttaatagccttgttactcatcttgctgtagatagctggcgtgatagctgacaggctagcaacgatggccgttccgaacagtcgtgcaaactgaatggcaaacgggacgcgcactgtaacggggcatgaagcgccgcat

SEQ ID NO: 330837 - DNA, 115 bp, Zea mays
accggaccggaaggctcggcccgagcgtcgcgtgagcgcacgcgttcgagacgccagcgtacggccgcctgcttgcgaccgcatacctcttgtatggtgtcacctaaagtcaatt

SEQ ID NO: 330838 - DNA, 230 bp, Zea mays
gccttacgttctttaagatccaagccaacttatccaaacgtgtgactctttagtacgggtacctgaaatccaattactagtccatagttttacatctacttaattggaaaaaccttgactttcccaacttaaatcgctttcaacttattccccctttacctaattgccttataaccaataagcccttaaccatatgcctttccaaccaattgcccatcctcaatctcaat

SEQ ID NO: 330839 - DNA, 163 bp, Zea mays
aattcccgttcgacccacgcgtgcgcactcgcattcgaactcgatctacctctctatcggatcctatctaagatacactctcacgcgctctgtcatctcttctagtaggtcacctatattcactcctctatccaactcactatatcttcttttacaacaactc

SEQ ID NO: 330840 - DNA, 170 bp, Zea mays
ggtccggaattcccgggtccgaccaacccgtcggccacgccttcggccaagccttcggactaggtctagaacggcagccggccgttttgaagatgccaggttacctacgcctgcctgccacgttataacttttctattggggcaacttaattcaattcaattggcggcgg

SEQ ID NO: 330841 - DNA, 218 bp, Zea mays
gtcattgtctctagtaaatgggagcttacatactcttgcatcccacgacatacatattatctaccactacaaaaattcaatctactcctcttcttaataccttgtaaccaatttttttatccatcactatacaaaaataaataaactatctatacatataatttttctcagatcactttatagcgtataagttaacaccgatccccatttccaacatt

SEQ ID NO: 330842 - DNA, 175 bp, Zea mays
  unsure (1)..(175): unsure at all n locations
attcccgggccgaccgacgcgtacgcccacgcgtacgctatatctcgagcttgctttctagagcatccaagctcacgcacgcgatgatacnacggcataggtcttctatcatgccacctaaaatcaattctctagtcgtacctatacaacatcgacactccgaaaaccaatcacg

SEQ ID NO: 330843 - DNA, 419 bp, Zea mays
atttgattctacacaacgttctacacattgctaggggggaattattattttattagggctactatatttaatttaatcgtccttcttttaccaactttataactggaaaacccttgcgataaccatattaatcctcttggaaatcattcttctttctacaagttgactaactaccaaaaaggccccaactaaccttctttacaaccatttccccatcttaattgccaattggacccctccttctacccattatttaacgccgcagttgttgttactaccatcatgattaccagtataattagcaatctacttaccaccgctttatttggttttcttcccttcttttttacttacttcgtctgtttttccccataaattattaatcgggtgcttcctttaatgctaccaattaatttttt

SEQ ID NO: 330844 - DNA, 62 bp, Zea mays
cccacgcgtccgcccacgcgtccgcccacgcgtccgcccacgcgtccgcggacgcgtgggtg

SEQ ID NO: 330845 - DNA, 61 bp, Zea mays
cggacgcgtgggcggacgcgtgggcggacgcgtgggcggacgcgtgggcggacgcgtggga

SEQ ID NO: 330846 - DNA, 135 bp, Zea mays
caggacacgccctgtaacggcccattaaacgccgcgtgcattgaggttacccgcaacgttaccgccacactttccaacaccctaactaccgctccttttagctccctaccctccttttttgccaccttcgtcggc

SEQ ID NO: 330847 - DNA, 98 bp, Zea mays
ctcacgctacatactaagcctacattgtaaacgatccaagcatacgtacccatccatcctacggtataactctactatagtgtcacccaaattcaatt

SEQ ID NO: 330848 - DNA, 157 bp, Zea mays
  unsure (1)..(157): unsure at all n locations
attacatactagcccatgctacgtgaganttcatgtaacatgttaactaaattctactcactactcaatacattacaactaccttactattaaaacaattgagttacccaacttattcaacttccagaacataatccttttgacaacaagcatctta

SEQ ID NO: 330849 - DNA, 378 bp, Zea mays
accacgcgtccgtccacgccttcgtccacgcatcctctagttctacatccccatccgtcgggctagatgatccatgcttacggactccttcattcgacttaatagctcttctataacgtcatcttaactcaactcactggccggctacctacaattaatttgactgcgaaaactctttctttacccagcttaattgctatgcagcacatacccatctctcctgcttacctactatcgaacatgctggctcctaactcgcactctaacatgtagcgcatcattaatggcgaatggtacgctccctacacccagacatgaagctccactagcgagctagctaccgctcgcttctctcgctttcttgccttcctttctacg

SEQ ID NO: 330850 - DNA, 123 bp, Zea mays
attccctcgtcgacccactcctccgatacatcatcagcagccgctctacaagatcctaccttacgtactcctccatgctacggcagaactcttctataatgtcacctagtttcaatacactac

SEQ ID NO: 330851 - DNA, 364 bp, Zea mays
tcctactagtactaaaccgacacctcctctaactatattatccatctcttacactctatctaaacgatgcatacttacgcactcatgcaacctaatatctatttacatatatatagttacataaaatcaactcactgacaatctacatacatacatacttacatagaccatcactacattaccctaattactcttctagcaatacataatattctcacctgctataataataacaaaaattccacaaactatctttcttaacaacagctcctccatattaatcactaatcgcaccccttctgcagctcatcatcaacctcacctgttctctttactacccgcaacatcactactattcttatca

SEQ ID NO: 330852 - DNA, 201 bp, Zea mays
tctagaggatccacgctcacgtacgcggtcattcgacgacataccctctatataatgtaacctaaattcaattcacatgccaccgatatacaactgtatgactgacaaaaccctaacttaatccaccttaatctacatgcaccacattcgcatatcgccagctgtcctaatatcaaataggcttcgcacccatcgcccttt

SEQ ID NO: 330853 - DNA, 255 bp, Zea mays
aattccctcgtcgacccactcctcctaccactctttctctacatctctagccttttttctagacgatccaatcttacatactcgttcgtgctatttcatatctattatataatctcacctacattcacatcacatatcctacctttactatcatctaactaaaaaaactctacctttactcaacttacaatctcttcactacataaacctttctccatctcaacttaatctaatacaccatatcctattttcctt

SEQ ID NO: 330854 - DNA, 153 bp, Zea mays
tcctgaattcccgggtcgacccactcgtcctcccactcttccgctcactcttcctcccactcttccgaccactcatccgactagttctagaggtccttcttcctctctagaggagccaatctaacttacacttgcatgctactttctacctct

SEQ ID NO: 330855 - DNA, 118 bp, Zea mays
tctctatattatccaagcttacttacgcttacatgctgcaatttttctaatatatagtggccccaaattaaattacattccccctcttttcaaaaccttgaccctgcaaaaccactcc

SEQ ID NO: 330856 - DNA, 76 bp, Zea mays
tcccggtcgacccactcgtccgcccacgcatacggttctagatcgcttttattttttcaaaattacccacccttac

SEQ ID NO: 330857 - DNA, 225 bp, Zea mays
accggtcctgaattcccgggtcgacacagcgcgtacggccagtccaaccaagtcagcaccctcgcgcttcaaggagttcacgcccatggcgagcaccaagattgcttcaaacagctggcgggtcatgcttgccgcgggcgttcccactgccaatagctgcagctgccgtgtcaacttcgcctcagcgcccaaccggctttgcaagaatcttgtggtccgggccca

SEQ ID NO: 330858 - DNA, 467 bp, Zea mays
  unsure (1)..(467): unsure at all n locations
cccgtcctgaattcccgggtcggcgaaggcggacgcccacgcgtccgcccacgcgtccgtccaggcntgcgcccacgcgtccggtaatttcatgatggtgtggtggaaccgtgggcgcttggaacatcaatacagtacaagagattgcttgttggaacagtcacattggtccgattacagcattgaagtgggcccctcgtcgagcgatgtttgcaactgcatcaactgccctaactttctggattcccaaccaatcgaattaggatcaggtgcctggagaaagaagggatgtgacttcatgtatgttaacgtagcaaatgttcatatcttgttcttttgtccaaaagatagatgccatgtatgaaatcacttcattaccatctgcggaaacattgacatgtttccaggcagatacttgctgtagtgctcccttatttatatgtactgtactaatacacctggcctgt

SEQ ID NO: 330859 - DNA, 155 bp, Zea mays
cccaaaaaattttcattttgcaaagaaaaattagttcatttttccttaaaaaggtagggttcctttgaaaaattggggttttaaacctacccctaaatgtttttttcaataaccaaaacctccggccttaaaaaaaccttaccaggttctttaag

SEQ ID NO: 330860 - DNA, 386 bp, Zea mays
aattcccgtgtcgaccgagacggacgcccacgcgtaccgggtatctcgcccatgtcaaggaaagcaggctcaaggaccatatgcagggagagccaactcaggtgagtcgcaaacctgtcctgcacatgcttccccacatcaaactgcctaatgatacgtatcgccagcttccgatattcttctggaattgagcatccattccatgaccgccctcttgaagctcttgcgatgccaccacgctaactacgggagattccacccattacaaggcacgcaatgttaaggccccacatagaacatcattcaaacaacgccaacgaggaataacatgctaacaatgccacagctgacgtcactgcataggctcctcatgtcaatatcatgat

SEQ ID NO: 330861 - DNA, 310 bp, Zea mays
  unsure (1)..(310): unsure at all n locations
tacctctctattttatcctatcttacatacacacacatccaacatcatgtatcttctataaggtcacctatattcaattcactatccaactcaatacaacttcattactaacaaaaccattacattacccaacttaatccccttccaacacatctttctttctacaactctcttaataactaacatacccacacctatcacccttcccaacantttcacaaacttaatcacaaattntactctcactataacatcccattaatcaccacatttatcacaactactctcatctttacctctacacttacca

SEQ ID NO: 330862 - DNA, 82 bp, Zea mays
aattcccgggaaaggagatatcgacgaggtttttaaggtggtggtggtgttgtgaggagctgctgccgctgctctccagtct

SEQ ID NO: 330863 - DNA, 255 bp, Zea mays
attcccggctcgacccactcgtcctaaaaaaaaaaaaaaaaaaaaaaaagaattagattaaaaaaaaaagaaaaaaaaaaaaaatgtaagtttaaaatcagaagaggtacccaccttacatactcttacatccaaacttcataactcttatataccaccacttaaatccaatttacttccccccattttacaacatcttttctttcaaaaccctaccattccccccctaaatcttcttttatcccatcctaattt

SEQ ID NO: 330864 - DNA, 380 bp, Zea mays
  unsure (1)..(380): unsure at all n locations
tgctctaccggtccggaattcccggggcgacggcgcgtccgcacacacagagagagacaagtggtttccgaagccaagtgtggactagcagtctagcgaccaggtagctcgggcgggagcaggcagccatcatgtcggaggagaagcaccaccacttcttcaaccaccacaagaaggacgaggagcagcccgccggcgagtacgggtactccgagaccgaagtggtcaccggcaccggcgagggcgagtacgagaggtacaagaaggaggagaaggagcacaagcacaagcagcacctcggcgaggccggcgccatcgncgacggcgccttcgcactctacgagaagcacgangcgaaaaaagacctcgagcacgcgcac

SEQ ID NO: 330865 - DNA, 315 bp, Zea mays
  unsure (1)..(315): unsure at all n locations
taccggtccggaattcccggggcgaccgccgcgtccgcggacgcgtgggcgctgctgcttactgggggtctttggatctttggangcatgctgaatggggatncnggttctggggcaattcttggcctagcagtcctcttaatctcaagggttgtcacattgaaagaagtgtttggcaaaatctgtggcctgggatacccttacatggtttgcaacacttataacaatggcttgctacctcaacaaattcggctgatctcttggtcagtgagacttgtgtgaagttttgttgaaggcttggcatgtcatggcaac

SEQ ID NO: 330866 - DNA, 330 bp, Zea mays
  unsure (1)..(330): unsure at all n locations
cctgaattcccgggtcgaccgacgcggccgtgcgtctcgtgcgcgatccactctcacatcttccgcgtccgatcccgtgagaagctcaagggccggaggccntcggagcggttcaggctcangtaggataggccttctgatgtacaaggaggcccccgacctggtcctagtgctactgctacagctccatctccagcatctattgcttctcgcccatatgctttatcttttccaccgtgttaagtcttctggccactcactttctgagttatcccctgtgcgtatctgaagctcctatattagaggtacttattatctaaagtctcaaca

SEQ ID NO: 330867 - DNA, 51 bp, Zea mays
attcccggtcgaccgcgcggcctcccacgcgtccgcccacgcgtcctccca

SEQ ID NO: 330868 - DNA, 271 bp, Zea mays
attcccgtgtcgacccactcgtactcttactcttgggaaaaaaaaaaaaaaaagaatatgataaaaagaaaaaaaaaaaaaaaaaactgaaaagtttaaaaaaaaaagggtagccaatctaaaaaaatccaaacttacatacccatacatacaacaacataactcttttatatttccacctaaatacaattcattcaccttttttttacaacttcctttacttcaaaaacccttaccttacccaacttaatttcctttcaaaacatacccc

SEQ ID NO: 330869 - DNA, 365 bp, Zea mays
  unsure (1)..(365): unsure at all n locations
taccggtctctgaattcgagcggcgcggactcngactcgtgggtcgcggcggggaggccgataggtggccgtggtgggctgcggcgagcgcggcacaggcctctggcgggagcgcgttgttccgacggggcaggagcggagcggcagtggcgatgccgttcaaggcattcggcatcgnctccctcttcgtcggctccggcgccaccgccgtcgccgctggggtgcttgccgcgggcgtctgatcggtggaggagatgaagggcgtgggcgctagcattcggcggtggatgggagctcctcctcgccgagcgggaggtagtgactaaccatcgcactgcaactgtggtggtctgtatgaacctctg

SEQ ID NO: 330870 - DNA, 254 bp, Zea mays
ttcccgggtcgacccactcttcctaaaaaaaaaaaaaaataaaaaaaaaaaaaaattaaaacaaaaagaaaaaaaaaaaaaagcaaagttaaatacaaaaacgaagaaaaaactataacctctcttatcctcccctccttactttcccctacattccacctcatacttcttctataatgtcccctcctttcaattctcttactccattatttccatccatcttccttctacaacccttcccactacccacctta

SEQ ID NO: 330871 - DNA, 450 bp, Zea mays
tggtcctgaattcccgggtggggccaatccttccggttgaaggagccgcagggcgagagctcttaggaggagaagaagaagaagccggaggaggatctggaggacggggccgcagataataagcagcccgaagcagagtcaaaggaggtggataaagtggaggcgaagactgacggcggtgacagcgagggagctgatacgaagcaggccaagggctcatcatcagagccgtcaaaggaagcccctgccgtctctgccaatgacgaggacgaggcaaagaagagcgacaaggccaatgacgccggcacggcagagcctgccgccgttactactgagaggtccctgcctttggcgccggcgccatagcacgcgtactagcatgagtaccggccgacctactactcctggcccgctcagacgatgctgagctaccacgcggcgcatcgcagc

SEQ ID NO: 330872 - DNA, 455 bp, Zea mays
cggtccggaattcccgggtgggcgcaagcctcccgctcccggctagctgaggacggtacacttgctcagaggtgcgacgtacgacgtcgacgacgcatgcgccacacaggggatcccagctctccgccgccgtgccccggatccacggcctccggggctacgccgcgcccagagtccgcggtgacagcgcttacgtccgtgagggtgggcaggaagaggtcgacgactcatggcatccgatgcacactgcatgtctaactgcagcaacctgatctggatgacgactaggacactatatatggtcagctatgagaagatgacttgcctatcgtcagaagagcatgtgcactaaaatcccggagcgtttgcaagtacagttgaacaaagtcatccggagacacaactactgtcactatcagatgatttaacgctagatgatcacgattcagagcgtg

SEQ ID NO: 330873 - DNA, 416 bp, Zea mays
cggtccggaattcccggctgggcgcaatcctcccgcgcccactctttccgtctctacgggtttgcagctgcagctcttcatgctccttcgcgtggatctcctcatcgtgggcgtgctcgctccttctcggtcttttacacctgcttcttctgtctccctatgtcatctatggtctgcttcccatgaaccagactcgttcctattccttgtgctgcttgcaccgtctgctccagattatcactttgttcgccagctctagatcgttaacagatagctaaaatcattgaccatagacactataccattcacatggacttatataccatggacgatactctatatattaacataccatggtcgacaatcctcagtaccatcttccgtactaacctactccctactacatactatcacat

SEQ ID NO: 330874 - DNA, 455 bp, Zea mays
ggtccggaattcccgggtcggcccaagcctcccgattaaggaattggatggagatcacggtttaggacctacatctagttatttaatactgggaaattcttgacgtaataacaacactaagattcaaccaacatgtgtttattcattttggcaggtgaagcatacaagggtaacgacgatgtcgacatggagggttgatacattctccatgttttaaggaaacacagaaagcacgcagaaatatccaagctgcgatgctagcgaacctgggtcctcaagttttttctgcatcggaactcatatgagccttgtgtatttttctgaagattctgtccgtctcgggtttatgttttgaggtctgtttgatcctgtctcttggccatcgcttggtcctggagtcagtcactcactaccaagtgtttcagaggtctgaactggtgagcatatagatctgt

SEQ ID NO: 330875 - DNA, 357 bp, Zea mays
actgaaacagcagacgcttactcaaaatcctatggggcctttcctttcctgcatgcagcaaatgctggcgctttggtcggacatactcacagaactgaagtctcaacggccaaatatttcactccagacaatatattcaatgcaaactattcgaatatcaacgaaacgcttatgaccaacgactttgacatactcactcgacgtggcgcaatgcatctctgactcatgtcatcgggaaacgggacacacctgataatcaataaatacacatcgcatcagatcctccggcatattaacaaactctgactgactagcgattgagcttttatcgagacctaggactcacatcatttgaat

SEQ ID NO: 330876 - DNA, 113 bp, Zea mays
acaacatctccaccaacctctcctcccacatgaagaaccctaaaataatggagcttttaaaaagcggcaccgcctccctacacaacatcaacatcgtcaaccaccacatcacc

SEQ ID NO: 330877 - DNA, 346 bp, Zea mays
ctgggcaactgccgtgccgagacctaccgatctcacgcgatggtcgcgattggcatcggatccaccgtctgtaagaggctgccgccgtacgagctgctactgctggtcgcttacgttgttgtctcgtgcacaggggttgcatatcgcaactcggatctagctcaagtcctgtcacaccaagtgcatgtacgacaagatcaaggttaacgccattgacgtcgagcaagtaccacatcggaagccccgacccgaactttcgcgatgcccagctgcccgaatcgcaccgcatatggctcaaggtgacgataacgtactggaacagcatgcactacgcggagaacgtgca

SEQ ID NO: 330878 - DNA, 363 bp, Zea mays
cgggtcgacccagcgtccgaacatgcctgcaacttcgccgtcgaccttccttcacgaatgtggcgttcgcatccggactgtgccccagttcgaatcgccaaagaccgggtacaacccccaaattcttgcgaatcggttggctgcaaaacaccgtgtacattaacttggtcccttaaagcctgccttggggaatcctttcaaacctggccttttgaaaattattaccagtccatagacagtggagccaccaccaggaccacttgaaatggaaaagcttttgcctgaggaaatagtcctcctagaaagaacactacctgatggaagcacaaaccaaattttattttattaacccagagatcttga

SEQ ID NO: 330879 - DNA, 218 bp, Zea mays
tacgggcgtaagaagacgacagaacggttgaacgacgttagcaaaaggctgccacggggaggagatccacagtgacggcggctagaccaatgccgtccgccagtcagcgaacatctggctaatggctcgacgtcaaaatctttattacgcaacaactccggctatgcctagctcgactagattatgtccatacactacatttatcacggctaaaccaa

SEQ ID NO: 330880 - DNA, 338 bp, Zea mays
gccacgctttcctaaaggtcttaatctggatcatgggcacactgggactgcacaaagggctcatatacacctccatgtggagaatgactcacgatcagctcagtgaggaaacacctacaacaggacccactgcacgagtaagatagatcatgattgatcccactgacaagtataaatcgtccagagacacgttcattaacatgactgaattgcttacatgagtgactctggatcagctcactggctgccatatggtgaatgctgatcactacgatatgctttcgtatactgctatgatatatgtccactagctatgacagcgatccatggagctagag

SEQ ID NO: 330881 - DNA, 350 bp, Zea mays
agaaaacgaaccatcacctccaacgtattcgacaaacattcctgcgaaaacttacgcgatagccatagcaaccacagcggatacccaacattacttagactgtcccaaatctacttgtcaacagagcatttcgcgttcatgagcttcaagatcatttgctgaacgagatccatgacctcatcctctatactgtaaatgctggtacaatactggcatctgatattattgacctgactacatcatatgttgcacaccagctgcacctagtccaattcctaaaactccagtacagtcacgccaagaaggaccattaatttcacatccactattcggacattcaccttaattac

SEQ ID NO: 330882 - DNA, 93 bp, Zea mays
accggtctcggaattcccggctcgacccactcgtccgctcatccacagctctctaccctattcctttctcaaatactctctcgggtcttccaa

SEQ ID NO: 330883 - DNA, 365 bp, Zea mays
atcttcaaaggcaatgaggactcgtgccagggactcacatttaactatcatattactcaaatacaactgtgttttaggaagccatagtgtacctttagatcttcaactactgtacaatgcacatacctcaaactactgctagtcacatcaatgctctggtcatcagcaaccatttcaacttctgatggccatatgctactagaaggaataactgctatgataacctgcctggtagaacctcaagcatgctgatactaggatccttcactatcgagcagaccatatgctccaatttaaatagcttgcatttgtatcctttgctggactgacatgtaaaactttaatctgcagaattctcactgggc

SEQ ID NO: 330884 - DNA, 412 bp, Zea mays
cccacgcgtccgaaagaatatgcttgtcaatgagtgactttcatggggaatcttggaatccaatgtggtctgttgcaaggtatgcacatttaactagcatattacttgaatgtaatgtgtttttggaagccatagtgtacctttagtttttcagctactgtacaatgtacatactcaaattactgctagtcaaatcaatgctctggtaatcagcaaccatttcaacttctgttgccaatatgctatgagatggaataactgaaatgatagtctcgctgttagtacttcagttatgctggtctagtgatccttcactatcgagcagtcaatatgcttcagtttaaattgtttgcatttttttcctttgttggtctgacatgtaaaactttattctgcagcattctcactgggc

SEQ ID NO: 330885 - DNA, 398 bp, Zea mays
taagaaggttcgcatcagcccttccctttcaggcaaggtggccctaaagtagggtgttttggctgctgaatgggctcgtcagatccaagacaaaaggagaaatcacttaaagctacatcaccatagaaatgccctaaagacggaaatgttgcctgaaccatacttcgatgtacatgtgtgtacaagcttcataagattcttattctgaagcatacaaagcagtgataacgtactatctactgtgcaagattacaactgtcagtactggttgaatgatatgaataatgtaaacttgcattgtatgcctgagttgaagattaaagcgccattgcaagaatggatctcactggaatagttgccaactgcatatctgagacgaaaaattggatcgacacgct

SEQ ID NO: 330886 - DNA, 423 bp, Zea mays
cccacgcgtccgcgccctttttttttttttttttttttttttttttttttttttttttgtttttttttttggtttttttttttttttttttttatttttttttttttttaaaaacttacttttcaaaaattttgcatttaatttaccccgggacaaatttttccaattttaacccccgttttaattttcttatgcccaaaaatttttccccaaaaccttcttttatttccccgtctttagaaatttcaattttgcaacattttttaaccggaatggtttttttccaaaaaatttttttttttgggatccattaaattcacttaaaaaggtccaattttaaaaaaagccccccttattttaaaactgaaaaaagggaaaaaattaaaccttgttttcgaaaacaaaatttttttttacaaggat

SEQ ID NO: 330887 - DNA, 252 bp, Zea mays
acccacgcgtccgcgacgcactcgtccgtacgcctgcgcgaacacctcagctggtttcacatctgttcttcagagcccactcatctgctacccttgatactctatcgagtttccacaacattatgtcttactccatcgttagaaacaccccaggacaccactaccataacgatcggttacgccataatatacattccatcattcattctcaccaatgttcaagacaatactaatatctcttaaatgctgatc

SEQ ID NO: 330888 - DNA, 332 bp, Zea mays
tccttcacccactaatgaccccaatctacctatttatttacacagcgccactccacttacatggagggctcttactcctggggggtgggctccaacaccaccatcctttacctcctccaaccattttactggattaataaaactttcttccacaaaccttaaccataatcattagtctccacgcagaaaaaaactacaaatattcaactttagtacaccacttttgtccctaattatacctcataataactcatcaaataatattacaccccctcttctttcccttccttattttattcatatctacacattcctcttacaaataatattca

SEQ ID NO: 330889 - DNA, 379 bp, Zea mays
gagatctacactcaaacccgggattaggtcaccatcgacggggtaccctccacggttgacgagaacgaagtcgggtcactacgcgcgtaaaccgaacgcctccatgctgctctcaagatcgagaatggccatcaccagctgaacaatcagagacaccagaaggtccccaaggaagcggatgccgtaccccaacagaatctcaagctacaggaacagatcagacccctgaaggcttccgacaccgacgccgccaccaccaacgagaggcaagctcaacctgcttctgaagccccgaaagaatgggaagtctcataactggaaattgcaatcgctgcagctgcccgcgccaacctcacggatgccatcatactactatatc

SEQ ID NO: 330890 - DNA, 158 bp, Zea mays
ggttatggttagttaaacctactgttctacggttgtggacgtcatgcactgctgtcggagtgggtgattaataatttaactttccttttcttttttttttaccggtcagtgtaatctcgttgctcttcagatttaccatatgtgtttcacattcaaaa

SEQ ID NO: 330891 - DNA, 144 bp, Zea mays
gtttacccactcgtccgggcggccgccagaacacttctgacaactttttaaagcactctttcaatccattccactaagactatatacgaggtccattgcaaaacattacgctacacatattcctgttctatctatacataatcc

SEQ ID NO: 330892 - DNA, 298 bp, Zea mays
cgacgcatgcgtacgacgacaaccttccacgtgcatacgacactaaccagcagcaccaaccatcatccgcgccgggcacacagcgcacactgatggcgtctgtcaccatgatggcgtccttccccgccgtggccatcgccgcgctgtcccgccgccgcaccatcggcgcggtcacgtcctccaagatctaccactgccagtagcacagcatcactccagcagccgagaccagcgccgacgaccacaaaggccacgccgtattcctcgcggctgctgacgaggtcgaggaactcatcgc

SEQ ID NO: 330893 - DNA, 431 bp, Zea mays
acgggtcgagacatgcctgcgcgaacacacaatggcaccagaaacgatgctcctaggagtatgttccgcgctgatgctgggcggagtcacgagcgcattggaagaccatgttgcgtcagacgtcgtgggcctggcgaggtgcaccgactgcacgaggaacaacatgaaggcttacgaccttttcaagggtctttaggtggatatcaagcgcaagaacagcaactgggacttcgagacaaatgccgtgagtgagatccaaagctccggagccttcaacgtactactcggcgtcgacctccactgcgccgactgtcacgcgcagatccacagctacctctataacgcgccttgacctaagcaagtactcgtcatgaaccagcccatgctatggcgtaccttaattgtcgtgcctgtcaagatgcactaaccgt

SEQ ID NO: 330894 - DNA, 98 bp, Zea mays
catactcgtacaaacatcaacacactcttctatacagagacacagatcgaaacgcaagaggtcattttcaccgtcattaccaccatcgttaccaccac

SEQ ID NO: 330895 - DNA, 167 bp, Zea mays
gctcatgggctctttccaaacttatcgcatgtgctgtacgagggtctgtaagacgatctgccggatggtcttcaagcagtagttccttccaagtgggactggccatcaacccaaaggcaataggatacctttatgtcaactagatcaagacctgccgaatgcccata

SEQ ID NO: 330896 - DNA, 201 bp, Zea mays
cccacgcgtacggctaaccttccagctattccttgaccttacattatcttacatgggggggcatcttatgtggcatgctgctccttcgagctatagataactcatttcccatgtctcatgtcacactgactgccacagtgatcctgactcatcttgaccgactcattcactattcactctgatatcggatttttctgcact

SEQ ID NO: 330897 - DNA, 357 bp, Zea mays
gaactccatcaattcatcgagccatcatgttcaaagccggctaccacaacttcagcgggggcgctctggactaccgcaggaaccctagcctgatccacactcacagcatgcttaacatctatgcctagcacctcatgctcatctacgcattctaagtctacctcatctcctccatcaccatcgaccaggtcgctgacccactttaactcggctagaactgctaccactactgactcggctactactactaggtcttagctcgatctcaacgtcaatgtgctcaagaacaaactgctcaccatagactccatctgcggattattcatgcataccatggtcaccctaaaggatccaatc

SEQ ID NO: 330898 - DNA, 404 bp, Zea mays
  unsure (1)..(404): unsure at all n locations
aacgccttcagcacctacggcgaggtcctcgagtccaagatcatcctcgatcgggagacgcagaggtcccgcggcttcggcttcgtcaccttctccacggaggaggcgatgcggaacgccatcgagggcatgaacggcaaggagctggacggccgcaacatcaccgtcaacgaggcccagtcccgcggcggccgtggaggcggcggcggtgggtacggtggtggccgtggaggcggcggctacggcggtggcgggcgccgtgatggcggtggcggctacggcggtggcggcggctacggtggcggcggcggctacggtggtggtggcggcggctacggcggtggcaaccgtggcggcggctacggcaactncgacgggaactggaggaactgancggtggggcc

SEQ ID NO: 330899 - DNA, 58 bp, Zea mays
cccactcgtacggcttctctgacagccagtgcttgacctttcattatgtgtcccatgg

SEQ ID NO: 330900 - DNA, 312 bp, Zea mays
cgactcgcacggcatgcatgcaatgtcatcaatggcctttgtggatcccacatgtgggtgaaccttatgtttcatgccaacgctctgaggttcaccttctttacacccaacgtcatattccactgaatctaactcattgaacataactgatcctgatgggtcctttacgtattccctctcctaaatgctttatctggactaccggaacacccaccttcaaagaatttcctgaacctgtgccgatgaaacaactggcaaagacaagtattgactgttcatcctaaagcttaaaaaccgttacttaattactcg

SEQ ID NO: 330901 - DNA, 310 bp, Zea mays
ggaattcccgggtcgacccactcgtccggacatggcatgggacatttttagggaattctttatccataccattaaaagatcaccggtttggatccataccatgactatatgacctacatgtggttccacatgagttaattacatgtggggtacatggtatatatctaaagtttggatcttttaatgctctagatccaatcattcgacacttttaacaatttcgttgacaatagcgtatactttgacctctactacatcgtccataccacctgacagtgctacctgtacgggtcttactcgccctcttcct

SEQ ID NO: 330902 - DNA, 187 bp, Zea mays
accggtctcggaattcccggctcgacccactcgtccggagacgcataggagtaaatatctatggttcttacactaccatacattactgaggtagggctaattgccatcctgagtcgacttcctatttctcagcgctatgatcacacgtcatgccatcacaatcctctatctattagctagaatgcta

SEQ ID NO: 330903 - DNA, 184 bp, Zea mays
acccttcggaattcccggctcgacccactcgtccgcagaccctcacgagtaaacatctatgtttcttacactaccataccctactaaggtatgccttattgacaacctgaatcgacttcatatttctcagcgtaatgatcacacgtatgccatcacaatcctctaactattaccatagaatgct

SEQ ID NO: 330904 - DNA, 419 bp, Zea mays
gccgaggatgccgcggagcacgggaagctggggcagtcggaggaccgagctatctaggaggggggggcgtgtggactggaggacttctgcgccatcaccattgatgggagcggagggctcagcgaggacatcctgcagcagcgcctgcagagcgttgtgcggcaaagggagcagctgcagcaggtcgagatggagctgcgtgcgcaggccattgcacacccgcagatcattcaggcgcaacaaagcttccaggctacttccaaggaacatgccgcagctgtggccaagatcaaggttgctccttttgcttcgagctcagcgtttctctactactagcttaaataagagtgtgcttcacttaccagttggagacgagttggctagtagtactgctcgttttcccatgattttggactttt

SEQ ID NO: 330905 - DNA, 423 bp, Zea mays
ccaacacgccgcccgccatcgtcgcgcctctcagcacgatatgtgacccgtacctggggatcttccggggcatcatcccgccgctcgggggaacgctggacctgtcgccgatcctcgccttcctcgtcctcaacgccttcaccagcacggccgcggcgcttccggcggagctgccaagctgctcggcaacggcgcagcatcaccagaggactgctgtctcaccctgctcggcgccgcatgaggcgacgctcagccagaggaaatggatgcggagaatgcggtcacagaagccacagggagacgatggtgatcactaggactcgtgagcccgtggatgtgttcctcaaatcgtcagtgccttgttgttaccaggctggggaccatgcttcgcatcagacgctcgaggtctgcacggcactgtgt

SEQ ID NO: 330906 - DNA, 381 bp, Zea mays
gttcctgtaacctaacccgacggcttgtcccacacctcactactaggcacttggaaagcacggttcggcgtcctcgattcctgaacttccaagatcgcctgctgcaagagtgtcttctccaccaatgtgccgatattttcttttgagatgcttgggttactttgatatctttctggtgatggatcgtgagttgttggcttgttgcattatgaattgcgtactgtaagtatccagtttgctgcttagcacttatacaattcgaaagcaaagctcgaagtcctggctgcctggctcttccttggagatggaagtttttgcacttccagaaatatcgggaacataaagtccatgtgatcttttgtgcctttaaaattgtggatc

SEQ ID NO: 330907 - DNA, 129 bp, Zea mays
ctgtgtttttaacgacgattcgacgtacaattgtgttgccatccgagtttgtgtgtttggataaacatatccatataactcttatcaaaaatggcaggcacagagagcgagagccacaaagggaaaaac

SEQ ID NO: 330908 - DNA, 428 bp, Zea mays
tcccgggtcgacccactcgtccgcccactcgtccgcccacgcgtccgcctacgcgttcgcggactcgtggtctgacgcgggggccttcacgaggaggagcacgtccatgagcaactcgtctagaagctgctcaactacgccgagcgcgacaaggagcatgacttctggctcgacgtggagcccaagttcctagacaggttccccaacatcaccaagcgcctcaagctcccctccgtcgcgcttgtctccaccgacggcaactggatcacattcatgaagttaaggctagacagggtcttacaagaccagttcgacgcataatcagttgaagaggcattggcttctaaccctgttgagttgaaatttgagaagcctgagaaatggacagctccgtaccctaaatatgggtttggatggtgggaaccctt

SEQ ID NO: 330909 - DNA, 302 bp, Zea mays
aattcccgggtcgacccactcgtccgtttacacctgcctaaacgccaacatcttttattatgcatcatgtttactatctaatcgatgcggtaacaaacccagagacatgtttacgtcctgatatagcattcatcccattttctcattactttgacatctacacagtcacaactacagctatctgtgttccagatattgtacatattcatgtcatccatcttcactgtccacttaatagattaatactgaagctactatgcaaaatcttcattaatttctagccacactgactctaactatca

SEQ ID NO: 330910 - DNA, 342 bp, Zea mays
ggaattactgggtggacgcacgagtccggcttgagaacgtaagatttgacttcgcagatgggtcacaagacctcagtgaactacaggggggtgcctgtgtcaccactgactatgttgagtatgcatttaatgccagtggcgacaaatcaagagaggcagcagagtcctgccctcttccctaaattaaaacaggcagtgctggtccctgagaccgtctgtgcaggagacaacaccttcaaacagaaaggcgatgacgtagacagcacacccttctccttgttccagttcaacctgccgattggcccttccaccctggcaacattcaaagagcgaaatggggaa

SEQ ID NO: 330911 - DNA, 159 bp, Zea mays
tttacgcttcttctcactcgacctctttcgttttaacaccttcaaattttcctctcgcgtagatgattatcaggatgggtgaactctatccgttcagcctcgacaatcagcactacatattatatcctactgcacatactgtctccagcaacattgatg

SEQ ID NO: 330912 - DNA, 364 bp, Zea mays
  unsure (1)..(364): unsure at all n locations
gtcaaataataccttgctctgatgcatgtgcctaagctgcacaaccgtaccctgcgagtacgtcatctgagtccgcactggaggtggccgatggctctgtgactgtcgccgaggcggaggaaccgaccccttcgagcaagcccaatgttaagttccgctaaataacttcgatactgaatacgcagtttattgcagactctcagaaggtgaagactgttccgcatctgatgactgacgatatcattgatcttatgatgcttccgaccatcaaaaggagatcgtcgctctttaatggcataatcatcacagtgcacanagctggtgttcacacgacaatctgtagcagaacgatcattgctggtgt

SEQ ID NO: 330913 - DNA, 206 bp, Zea mays
ggcgctctaaccttaaagctggtttttttatcagctacagcacactatacacgggatgcatcacctacaactgaggctgatccatacacacatcgaacacttcgaagcatgtaacataacacacaataaatacactcatcgcctccacatactgatacgcaattaaaacttcaatcctgccatcatctcacatctatcactactca

SEQ ID NO: 330914 - DNA, 451 bp, Zea mays
  unsure (1)..(451): unsure at all n locations
ggaattcccgtggtcgactccacgtcgtctcgtattcaaagaagtcgtacctgtgccctgaatctttgtctaacanaagattgggatgattgtacatgacagcgatcanccttctngatcttcggccttcagaatgccanntaaacattgctgtnntcgttgcaaggggttcctgtacatagtctncatagaagtcttgcataccagtgatcggcattcagactctagtcgagccagcaagaaatnnggcagtagcatngctggcctaatcagaatgggttgggttatttaccagaaagcttgacagacnctcgatggacatggcatttctgttgaggcttcaagagtttnggaaattggtgaagaaccatgcctttcattgcagccnnngtagaagaaagagataccaaggaatgccctgcatcnnatggaagggaccataactgatgcc

SEQ ID NO: 330915 - DNA, 108 bp, Zea mays
cccacgcgtgcgctgacgcgttttttttaacaccgccggactctctcacaaccggctgacttttttgaataaccggtagctcgatatgatacactgccgcaataccat

SEQ ID NO: 330916 - DNA, 338 bp, Zea mays
ctcatctgggtcaccctctccgacatgttcatcgacggggatgacccgtccaggatcgccttcaagacgcccaccgggctcggcaggacctaccccgtctccgccttcgccaaggaaggcgccaccgacacagaggccaagcccaaggacgcccccgcaactaccgtcgccgctaacggtgaggcagctgccagcaagtgaggcggcggcgacgtccggagcttttacttgtgggctactctccttactgtagtagctgtaattggtgatatttatagtgcctcctgaataacggtgtttgtacgtctactacctgcttgaatttagcgtgttttatg

SEQ ID NO: 330917 - DNA, 408 bp, Zea mays
gtgatcttccatttactggttgtgcaggaaggatatgctcaatttgtgtttttagatccatgatatgttgtcggtctgttgtttgtagtcctagatatcttcgtttttgtcactactaaaaacaccgatcggttctgatgtactgctatttattgctctgatatttttgtcatgtatgtgattggtgacttgggctttactagaggaacattcgtggtatagttttgaagagagaagtgagtcataaaattagagatatctgcattcattgtgatctatctttaacacttcatttttactgtagacatcaagtaagtggcgacatcacaacccctacaagtttgtgcctcaaaacaagaggatacaagaagttggaatgcttttgtgaaggcttttgcgaatcacttg

SEQ ID NO: 330918 - DNA, 142 bp, Zea mays
cccacgcgtccgatgatgtcaagcctgcatattccacactttcgccatccgaagcacccgagccttaagattatcatgatgtgaaagattagctatgatcccaagatgttttcaagcttggtcttactgaatgaaagtttgg

SEQ ID NO: 330919 - DNA, 159 bp, Zea mays
acctccgtagctccatatcatgggctcaactgcattttcaacctatcatctcccggcctcctgcaaatcctctcaacttcatctaaccctaatggattccctgcatgcaggtatgttcggcctaccccaacaagaaattcgagactctctcatacctac

SEQ ID NO: 330920 - DNA, 360 bp, Zea mays
gtcggaggccatgacgactgcgaggcttcgatcctcggcctccctacgcgttgcgtctgctcctccactactctgtgggtcccgtctcgactcctctcgccgtctccaggttcccatatttccaggtttctcattctattatctggttgcatttcccatcctccaggcctaaacgtcttgcaagacgcgacaactttcatgtgatcgactgcttgcacgcttagatactatgcgccacgattgctgctctcactatagaggctgaatgcagccttattgaccacctcctggagccgctaggattctcaactgcggactatgagccggacgctgtacgttcatatcctggggcagtctgat

SEQ ID NO: 330921 - DNA, 426 bp, Zea mays
attgcacagcaggtagctgtattaatctctaatattgcacgctgggattacccagaagagcggtatgtgtttatgatacagtctgccaatgttctaatttcccatcatgtgtttatggccttgtttcaaaccccgaagtaggtggcgattaaacattttgccatggctctgaagaattatggagagaaaactcagacgagtccttcaaagacaggcaaatcgctaagttgatttaagcaaggcagaaatccatccatattgtttcgttcaccaaagtgtgcttccagctacagttgactatggcagaagattattatagatcctgaacggactgactgctcgaggagtttcagtactggactgcaggtcccacagagggtcaatttttaatataccctgatgaaagctactgaacccaggtccaat

SEQ ID NO: 330922 - DNA, 394 bp, Zea mays
ggaattcccggctcgacccactcatcctatgacacctaccttcgaccataacatttttttaccttacactcatacaggatcaatgaagctgatatcaaacttcgccagctttcatcttgaacatctttatcatgtatcactatcatcactaaatcatcattctgtatcaaccacacatgactatataccttcacaatctatttccctcaaaaatcatttaacaatgatatacccacaataccaaatatattcaaaagttcacttctatgactacatttactcactactaaattctttctatacatcctgacttttttacttattgcatacattacacttataccaaattatcactcattacacatttctttcacacaaattttaaaatactttc

SEQ ID NO: 330923 - DNA, 377 bp, Zea mays
aattccctggtcgacccactcatcctcccactcatcctcgcactcttccaccgactcaagcgcaccgacaacctctccatcaacagagctttctgcacaatcctctacctcctatcaactcactcaatacatcctcaacatccactcctacacctcctacgacaccaaaacctctaccacctcaacacctgccatacctttacacgcacgacctactcaaacagtactactacctcatctcaacaccaatacaccctacctctacttcatcatcaaccactatctcatccaccacaacttcacctacccctacttctacaacttcaactactataccatctacaagctgcccatcaacgactccaacaacgccaccc

SEQ ID NO: 330924 - DNA, 438 bp, Zea mays
  unsure (1)..(438): unsure at all n locations
aattgtcacttgctctccctccaacaagctaattaaggccggtcgtcatccctcttctagctcgttttattatccatggcggaggagaagcaccaccaccaccacctgttccaccataagaaggacgaagagcaagaagagcaactcgccggcggcgggtacggcgagtccgccgagtacacggaggccacggtgacggaggtggtgtccacgggcgagaacgagtacgacgagtacaaggaggagaagcagcataagcacaagcagcacctcggcgaggccggcgccatcgccgccggcgccttcgcactctacgagaagcacgaggcgaaaaaagacccggagcacgcgcaccgncacaagatcgaggangaggtcgcgggcgccgcggccgtcggctccggcggcttcgcctttcacgagcaccacgagaagaag

SEQ ID NO: 330925 - DNA, 306 bp, Zea mays
tctcgacccacgcatccactcacacttacaatccattttcatcatatatctaactatcactatttcagttacatttgacatgcataaatacttcaattgatcatatacaatcaactacaacaacatcaactacatgatatttcattacaaatacttcatgtaagaatatcaccttcatatcatcttataaatatcttcttatttaaaactattattaatgccaacatacaacctcatcaccaaactttcaatatttaattctatccataaatttccatactctttactcctttacaattcctacca

SEQ ID NO: 330926 - DNA, 362 bp, Zea mays
ctaactgctgcacctgtgcttgtttatcactgctggcgagttgggcagtcttggggcgtggaaaacatggcttgtgatgtaggaggaaggaatggaagtggtctgttgtacttaaagaaactagatgaataatgcttgaattactgaaacttcacccttctttagtgtataaagtattcacctatgtgttgaaaattcttgtaaaccatatgcatcttgcataaaacctggacctgctaactggtgctgtaagaggcggttcctctaaaggatctcaacgtacgtacgcgtacatactacgtctacgttactttatagtgccatctatattgatatcaatggccaacggtttacaacttcat

SEQ ID NO: 330927 - DNA, 355 bp, Zea mays
aattcccgggtcgaccgacgcgtccggctcgggctcactgcgccaccagccatgttacaagacttaaaacctgctggtggctctagtctcattgggggtgagacagaaactcttgagagggtgaaaaaatttgcttcaaaatgctctattcagcccaaccaagttgaccaaagccattcccaagattgcctatattgggcttaattctcttgccaaaattcttcattgcttggttcaaggtggcttttttcaacggtcaaggattaagaagttgaaaaaccttcctactaaagcaattccttttgggtcaacacccaagattaatgatggcacatctgatgttggaacaaattgg

SEQ ID NO: 330928 - DNA, 267 bp, Zea mays
aaaaaaaaaaaaaaaaaaaaaaataaataaaaaaaaaaaaaaaaaaaaaaaaaagaaagaaaaaaaataaaaaaaaaaaaaaaaaaaaaatataaataataaaattaaaattattttaaatgataatataaaaattaatatttattattatataacctagtatttttataactttaatcttttttttaaaatgttgatattgataaattgctttattttataaatttatttgtatttcaatttttaaaatttttggaaattgtaatt

SEQ ID NO: 330929 - DNA, 158 bp, Zea mays
ctgactcgttctggcatgcgtacaagagactaccgattcaataccgaaggcaagactagtagagcatggtttgaattgtgacgaccatggcggctaccaagaacgcgtgccagactcatgacgagctttacgtcatgatggtcaatgccaaggcacaa

SEQ ID NO: 330930 - DNA, 258 bp, Zea mays
gtaccggtctcggaattcccggctcgacccacgcgttcgtcccactccgcttgtgggttccacgattttatcacgatgtgacgatacgagatcattggttgaatttctggagaccaaggccactatcctgatcgagttccttatcaagaaccatgtttaagacattatgatcgatgctatggctcaagaccatattagagtcatcaccatatataagcacttgcacaatccattcctgatagatggccacagattacg

SEQ ID NO: 330931 - DNA, 418 bp, Zea mays
ccaagatcatcctcgatcgggagacgcagaggtcccgcggcttcggcttcgtcacctgctccacggaggaggcgatgcggaacgccatcgagggcatgaacggcaaggagctggacggccgcaacatcaccgtcaacgaggcccagtcccgcggcggccgtggaggcggcggcggtgggtacggtggtggccgtggaggcggcggctacggcggtggcgggcgccgtgatggcggtggcggctacggcggtggcggcggctacggtggcggcggcggctacggtggtggtggcggcggctacggcggtggcaaccgtggcggcggctacggcaactccgacgggaactggaggaactgagcggtggggcccgcgcggccaagttatcctgttcgctaccgtgatgtttaccctagtcc

SEQ ID NO: 330932 - DNA, 464 bp, Zea mays
taccggtccggattcccgggtcgactcacgcgtccgcccacgcgtccgcccacgcgtccgagacaagtggtttccaaagccaagtgtgtgctagcagtctagcaaccagctagctcgggcggcagcaggcagccatcatgtcggaggagaagcaccaccacttcttcaaccaccacaagaaggacgaggagcagcccgccggcgagtacgggtactccgagaccgaggtggtcaccgtcaccggcgagggcgagtacgagaggtacaagaaggaggagaaggagcacaagcacaagcagcacctcggcgaggccggcgccatcgccgccggcgccttcgcactctacgagaagcacgaggcgaagaaggaccccgagcacgcgcacaggcacaagatcacggaggaggtcgctgccgcggcggccgtcggcgccggcggctacgtattccacgagcaccacgag

SEQ ID NO: 330933 - DNA, 439 bp, Zea mays
cccacgcgtccggattcttgaagagatcgagcttcttttgcaccacaagggcgaggatgtcttgcaactgcggatcaagctgcggctgcggctcaagctgcaagtgcggcaagaagtaccctgacctggaggagacgagcaccgccgcgcaggccaccgtcgtcctcggcgtggccccggagaagaaggccgcgcccgagttcgtcgaggccgcggcggagtccggcgaggccgcccacggctgcagctgcggtggcaactgcaagtgcgacccctgcaactgctgatcacatcgatcgacgaccatggatatgattattatctatctagcttgtggtggtggttgaacaataataagcgaggccgagctggctgccatacataggtattgtgtggtgtgtgtgagagagagagaaacagagttcttcagtttgctatc

SEQ ID NO: 330934 - DNA, 173 bp, Zea mays
attcccggtcgacccacgcgttcgcgacccgtcaattttcggttggccttttaaaacctgaaaggggcccactgtttaacggcctttggaacctggggtttttaccttcggtttcgggatttcggggttaaatgggccccttttatttttatttaccttaattccttttaagg

SEQ ID NO: 330935 - DNA, 136 bp, Zea mays
  unsure (1)..(136): unsure at all n locations
gcggccaaggtgggcatcatgggccgtagcgccagcagcaggggcaggctgcgcgcgcaggccacctacaacgtgaagctgatcacgccgganggggaggtggagctgcaggtgcccgacgacgtgtacattctgg

SEQ ID NO: 330936 - DNA, 82 bp, Zea mays
actacgcgtacgaccacgcgtaccgccgtttacccttggcggaggtttcaaccccttgggggtggcctacaaccccaaggcc

SEQ ID NO: 330937 - DNA, 314 bp, Zea mays
gaaaaggctgaaccggaagcccggcctgcataagagaaggcgagggcagaggctcttgccgtggaagagagggagaggaggagagcagagattgctgctaaggatgaagccgcagctaaagccagtgccgctgccattgaagctatcctagcccataaaaggaagacagagaatgaacgaggagcgcctgctcctgatgcaaacaccctgcatggtggctttctcagcaagctaggctttaaaacaaccggcgaacgggcacttcaaggcaatccaacacaaagcggagactatggaaaacgggcacttcatgg

SEQ ID NO: 330938 - DNA, 310 bp, Zea mays
aatacacctcaagaatttagttcttctatatgtcactccattatcgggcgggttctacacattgtcacgcaatgattacatcaattatccccatcaataccacactgtcaacctcaaaatttcacctatcctcaacaactacaaatctactaacacactttaaaattaatgttctccagcaataaacatagtttgtcaggcacaacaagtccgatcgaagctttcacttacatgagatccatactgcaactcatagtctcccacacattgaactgacagatagctaattgatacaaatgttaatacttat

SEQ ID NO: 330939 - DNA, 105 bp, Zea mays
accggtccggaattcccgggtcgaccaagccttcggccaagccttccgggaccccttggttaaacttaacctgttaatccgctttcaaacttggggggcattcct

SEQ ID NO: 330940 - DNA, 52 bp, Zea mays
ggaccactcaagcagcgctagacaacatgctctcgtccacgttgaccgtctc

SEQ ID NO: 330941 - DNA, 322 bp, Zea mays
accgtccggaattcccgagtcgacccactcgtccgacctagccagaacatactcatactattcatttcacattatcttgtacatggcgatcatgtactctgtaatgctactgactccatgcacaacttctgattctgataacgcaaagcctcaatcatgattcatcaacatgagcacatcacaagaatctaacatagcatcaaacagaccaaactcttatatggatctaagctacaccaaccctttgtagcgacacctaatccttagtatcaccaagcgtacaccgactgatcaaacgtacataatatcctacgcattataa

SEQ ID NO: 330942 - DNA, 205 bp, Zea mays
  unsure (1)..(205): unsure at all n locations
tncacacgaatttgccttgtttttaaccttgggaaattttaccgctgttgggaattaacttgttcggcccaagccggcagtttcagccaagttggcgcaaaagaagggccttcatgccggtgctgggtggaccaccattaagaagaagggaacttcaagggtcgtgccaactttctttaacccttttggggattaacgcattctt

SEQ ID NO: 330943 - DNA, 87 bp, Zea mays
gatggtattgctgggctttaccgtggatttaacatctcctgtgttggaatcattgtttatcgtggtctgtactttgggctctatgat

SEQ ID NO: 330944 - DNA, 314 bp, Zea mays
gccacacgaaccatgcctacatcaggtgctacaggaactagcaccgaacgtcattcgggctcatatagcgctagaatgtacccattgcatcatcaactgttcgtatcaacaaacagtctcttctagctttcgatccttacatcgacactgtatcacggttccaagataatgctcgctagacatgctcccagatcccgaaaaccggtataggctcaaataaggctatgatctcaaacaaggactggtccatatccttgacatgcctctgctggtattcatctatcataatactaagaaaccgaccatgacatcct

SEQ ID NO: 330945 - DNA, 296 bp, Zea mays
ctgacacctgggcgggcgcgcgttatcacgcgagcctgctatgagcctagagtggtcgggcacgctacctatagcatgagccccctacaatatcagaaccgccgcgatgagagacactactcctccatcgcgccatctgtgctccagggcttgaccaaggcggtggccatgacggtcctatacgacgacggtgacaagaccttcttcgccgtcataatattggctatgcaccataccatgatactggacctggcacgctacgtgactgcactaatagtgatcacagctgtatcagc

SEQ ID NO: 330946 - DNA, 395 bp, Zea mays
  unsure (1)..(395): unsure at all n locations
gcttggtgttactgacgtctacgatcggcagccatatcttataaagtctgccatcgactgtgangtgtgctcaagagcagatgtgtttgttggcaatagcttctcaacattctccaacctcgtagtgctgtccagaacaggaagggctgtataacctaggaaaggcaagctcatgtggcaagaacatcgggctttcatcgtatgcatacaatgtcatgggtggcaatggtggaccgcatagatggatgacggatatgtcggatgcaagcctgcaaaggttaagttacggaacaaataacgtttaatgccactgactttgacgcatagcacttgactgaacatgatgtatacgtgagggagtccctgtcagatttcatttatatagacaaaggaaa

SEQ ID NO: 330947 - DNA, 86 bp, Zea mays
cggacgcttgggttttttttttggtcttctcgtaaggttcgctttttttttttgttaacgcatataggaatttgtgaatggtgatg

SEQ ID NO: 330948 - DNA, 253 bp, Zea mays
cggacgcagccatcctaccgcgtgctcctgcgtagctagcgtatgcgtaggcgtagccgtagcagcttgtgcgagatggggagaaatgcttatggggagggcgctattggaggacacggacatgccgatgcggatgcaggacgctgggacctccgcaggctcgcagcgcactcgacctcttcgacgtcgccgactgtcgagccatacacgaccacatgaagactgagttcgacaagcggtacggcgtcaggtg

SEQ ID NO: 330949 - DNA, 56 bp, Zea mays
ggtaggtgctgggctagagtgtggtattgtggtagatgacttcgatgaatgggagg

SEQ ID NO: 330950 - DNA, 400 bp, Zea mays
  unsure (1)..(400): unsure at all n locations
agttctacgacggtttgaaccggcgttacctgtcttcggtggagccgctcatcgcggatgtctgggtatactattacgggntgttcccgcgccccttcgtggggcgggagcgggtggtcggcttcttcggcgagttcatggtgaccatcatccccgacctgcagttcgtcatcgacgacatctccgcctaggactccgtcgccttcagcgtcacctggcacctgtagtggacggggaggccgtttaccttcagcaggggatgcagcatttaccgcttgctcggttcttctgtctcggagcagcagcaacggctgcacattgtgtatggtcgatactgcgtggagcctgccgacaatcccggagatttggcactggtaatcatcacgggagtgacatggat

SEQ ID NO: 330951 - DNA, 128 bp, Zea mays
ctgacgcgtggtcgcgtgcgaaccaagcagtaccacaacaagaagaagcgtagtcgtcgccgtaaggaaaggcgcggagcatgatgtcgtggcaggcgtacgtcgacgagcacctgatgtgcgagatc

SEQ ID NO: 330952 - DNA, 230 bp, Zea mays
ggcgccgaccaggcttctgcacttcaacattcctctcgagtccggggagtacatgtcgaagcacgtcttcgactgaaagtgcccgaccaagggctgcgagctgctggatggaaaggtactgcctgtgatcatacaggtgatcactgatggcctcgatctagctgctcgtgatgttgctcatactagagcccatctacctactcatgtagtacgtgtcccgcagcgtgctc

SEQ ID NO: 330953 - DNA, 397 bp, Zea mays
cgcgtccgcacttgtttatttcttattccatatactgtcagcaaactagagcagggttttacaattgggccattgataagttattattctgcctaggttagctgtcagttttctatgatagagaaaattagttctactatatgtttttttctcgaacgagatgagcaaatgttggagaattctgctatacgttattgcagatggtacatgaactgaaaaaaaatatgtgcactctctaacaagaaaaaaagtgaaataaatttgagttcaatggacaaggctttactttattcgtgctgtgttgtaaaaaatgtcaacaacagtacactcactaagtcactagcaatataattcactttataccagtattctttatattgcctttctcttggttttg

SEQ ID NO: 330954 - DNA, 268 bp, Zea mays
caagcagctggaggatggccgcaccctggcggattacaacatccagaaggagagcactctccacctggtgctccgcctcaggggtggcatgcagatttttgtgaagacattgactggcaagactatcatcttggaggtggagagctctgacaccattgacaatgtgaaggccaagatccaggacaaggagggcattcccccagaccagcagcgtctgatctttgcgggcaagcagctggaagatggccgcactctcgcggactacaac

SEQ ID NO: 330955 - DNA, 148 bp, Zea mays
agcactcagagggcgtagatgcacagcagccacggggtgctcatactctgggggacgagcctgatgacggtgacagctaggacgctaagagcgtgcgcgagctgatgttgtctgagaccagtggtgaaccgcactggcgcaatgacac

SEQ ID NO: 330956 - DNA, 276 bp, Zea mays
cgagaacaacggcggcagcagcgacagttacggcgataggcgcggcggcggtggccctgcggcgggaggcaccagcaccaccaccagctgcaatggcttcgatggtggcgagcacaacgaagccgcggacgcgcaggcgacggggcaagctgccgtcgacgccgccgccttcacggagctgatccgggaccccaagagggtgaagaggatccttgccaaccggcagtcagctcataggtcgcgggtgaggaaactgcagtacatcttcgagctcga

SEQ ID NO: 330957 - DNA, 190 bp, Zea mays
caaacgttcacctacgctggtgcactgtcgtctaccgacacctagagattgatctcgactaggaacatcattctgtggtgactgtgtagctggtagctataacctacccgaaacaggtatcattatgtacgtgtggacccttgcctgactatctgataagttgactacgaacaccttcattaatgatcac

SEQ ID NO: 330958 - DNA, 274 bp, Zea mays
  unsure (1)..(274): unsure at all n locations
accggttctcggaattcccgggctctacccacgcgtctcggagagatgtcactatctctagttcgtcgtcactcgtttgccatgggtnccaatggtctcgtctgtggaaactctgcactttcagtaggtccanntctatcgtcggtttctagtctatatgccacgagttttgtcgctaacgaacaaactcagtcagatcgttgttggtgaactctattcatcgatggagcctttaatttgtctgcttaactatcgactcgtacctgttaaagta

SEQ ID NO: 330959 - DNA, 187 bp, Zea mays
cttctgatacgggcctaagactcagctgatcgcctaaggattggtacttgtgtggccaaagacctattcacatgacagggtacggggagcctcgagtggtggtaacctattcatactttgctacgatgtgatacggatgcactgtctatacgaggaactgctggccttaatgttcattcatcacatg

SEQ ID NO: 330960 - DNA, 206 bp, Zea mays
tccactcgtgcggtcatgacgctctggttgtctgtatctgggatagagacgcaataatacatgggctgtttactgccaacaaggtgaccacgatcttattgtatcgctgtgaattgcttatccctgtggtcgctgtatgccgtacttattgtcgcactgcttgatacttgtccaaatatactgctgcggtcccatgtactcgagtc

SEQ ID NO: 330961 - DNA, 191 bp, Zea mays
  unsure (1)..(191): unsure at all n locations
taccggttccggaattcccgggntctacccacgtcgtctcgtgatgtgtcaactggtttggctttggattggtcgtgcttcaatggggtgtcatttttacgttgcgtggctgggactaaaggggtaacgaaggtactttggcatgtccaaatgtcgtaggattatcgnaatccatcagtccatttcaggtg

SEQ ID NO: 330962 - DNA, 336 bp, Zea mays
cctgatcattgatgagaccacagtattgtttaacaccccgctcataggaatattattggggctgctactggaggtcttccgcatgtacgcaatcacacacgatgctccatataggctatatgccactgtccatgctgaattgcctgatgctcttacgaactctacatggtcccacatgcgtaatggatcaggactatgacatggagctgtactaaagctccaatgtggacatctataatgcagtgcagatcgaacttctcaatcctgaaatatatgaccaagatccctttaaagactatgactatgctgactcgtaacgctttaagtgagctgact

SEQ ID NO: 330963 - DNA, 170 bp, Zea mays
aggccacgcgtccaaccaagcatacatttgtaatacttcatagaacgccaagtcaatcaccggataggaccttttgaactacatgccaactcattatacagatcccaaaacggatatgacaaatttaatgggcgttacacataagcacattgatgtacatgccaagaaat

SEQ ID NO: 330964 - DNA, 366 bp, Zea mays
ggacgccatcgtcgacgttcccgccgggctgagggacgagcgctgcctgcgcgccgagctgttggagaggctgcatccgagcggatagttagcagcttggtatcctcgtcgccggccgtcctgaaaagcttgagctgatctacttcgtctgcggcaaatcaagccagcacacctagcgtttcgatgccggattgcttgtactgcgttctcaggcgtcaaatcacgctgtctgcatgttatcttcaacctcattattactggtgagtccactgatgatggtgtccgacaatctggcccgcatctatagtgccaagtacttcggttgtggcgttagtcgtatctactcctgttgaggacatatatatt

SEQ ID NO: 330965 - DNA, 271 bp, Zea mays
gggttcgtgggtgagcggatcgagatggcggcgtcggatgttgagtaccgctgcttcgtcggcggcctcgcctgggccacggacgaccactccctccacaacgccttcagcacctacggcgaggtcctcgagtccaagatcatcctcgatcgggagacgcagaggtcccgcggcttcggcttcgtcaccttctccacggaggaggcgatgcggaacgccatcgagggcatgaacggcaaggagctggacggccgcaacatcaccgtcaacg

SEQ ID NO: 330966 - DNA, 138 bp, Zea mays
cggatttccagttccaggctcgacccacgctttcgacgaggtttgcgcatgataaaaggaaatatgctgtaccttgcggaaaaattcctccgtatggttgaattgtggattttgtcaacaaaaaagggccagtggaac

SEQ ID NO: 330967 - DNA, 274 bp, Zea mays
tcggaattccagggacgacccacgcgttcgagctggttttttgagaaaagaccattgacccaccttgggcccgaaaggaatgttggaaggtaatattttgatcaacctcatctggggcattcttggattttgctttgctattggactctactaccgtactggaaaagaaaacttccttgtcacaccaatttctggtttccacgggtggcttggtggctttcttggggccctgaaacaactcttaccaaaccctgagcttcctatgtgctttttc

SEQ ID NO: 330968 - DNA, 306 bp, Zea mays
gccacgcgcagctccacagcgccgtcaataactcgccttgccctgggcaggagccgctcaggatcgtacccatatcatgcggcaccttattcgtcgtgcctggtaagatgcactacccgtccgaggaatgcgtcgtcgcgtatctctgatgccacatcataaaacacttagtagatttactttacaaggcaccccatccgttgccagatctccacccgatgccttgccacatcaaggcgacgtttccttaataccatcctgttcctgatcacaataagcctgcgccagaataccttgattgcacgc

SEQ ID NO: 330969 - DNA, 130 bp, Zea mays
cccacgcgtccgcccacgcgtccgcggacgcgtgggcacggcggtggcgccttctccggcaaggaccccaccaaggtggaccgcaacggcgcctacgtggccaggcaagccggcaaaagcatcgtggcca

SEQ ID NO: 330970 - DNA, 344 bp, Zea mays
  unsure (1)..(344): unsure at all n locations
tccggaattcccgggtcgacccacgcgntccggaagttcattccgccaaccgttccatttccttcttgaagtccctcacagtgccaaaaccggtggtggaagggggaaccttggtctctggctcaaggaaggaaacgaggaggcattgcatttcgatgcacatggtcttgagggtcaacggaagcagcatgatattagggggtgcaaatgtgtattccttggtgaatacgatcatgaccaaagccaggaaaaggttagcctgagaagattgtcccggcggccaaagtacttttgaaagctgctcctgttagcctgatgggcatatctattctggaactggaact

SEQ ID NO: 330971 - DNA, 115 bp, Zea mays
cggaattcccgggtcgacccacgccgtcccggtggctaatttttcaagaaaggggtcggtcctattgggcccgccgaacccaaatccggcccttttgttggccttaaccaaggcc

SEQ ID NO: 330972 - DNA, 176 bp, Zea mays
gcagattgtgatcctcgtacgctgctatgagatgtgcatgtggaacggccataatgcgacaggaagatcaagctccgtgggcgcctccgcaagcggatgaacaccaagacgtgccacgggcccatccacttccgcgcctccggcaaaatcctgtggcgcaccatccgcgggatgat

SEQ ID NO: 330973 - DNA, 264 bp, Zea mays
  unsure (1)..(264): unsure at all n locations
ccacgcgtnccccaaaaaaaaggttccgttatcggggcccggcccgaaaacacactgggtacatgcatcgaaaaatttgtcgagagttaaaatgcctagtggatctcttgagcgggttcctttaaatcaaaaggtcatttcgagaccacttgggccatacagaacaattctataactgtctctagatgatgggattatatgattatatgtatattatatattccggtattattggttgaagaaagcggcatgaaatttgtgtcc

SEQ ID NO: 330974 - DNA, 176 bp, Zea mays
  unsure (1)..(176): unsure at all n locations
aactgaaacttaacccttctttggtgtatgaggtatccaccttcggcgggaaaattcttgagaacggtttcatcttgcanaataaaagaaactaaatttaatgaaggaaatattgacaaggcaaggaaagctgaaaaggaataaaaaaaggcaacaagcaatagcgcaagaacaat

SEQ ID NO: 330975 - DNA, 161 bp, Zea mays
gcgccaggagtttgcggtggagccattctagacttgaatacatcttaattagttcgtcagacacaatcagaaaatggtcacggactttgagactcaccatcaagattacattgatgaatggtaccagcagggggatctgaactatgataatgaccaggcgc

SEQ ID NO: 330976 - DNA, 302 bp, Zea mays
cccacgcgtccggcagcagcggcagcggcaggacgaaggcaggagcaagagcaacggcggccctcggctcaagtcacatggcgacgacggcgagcggatcaggacccgggaccgggacggcggcgctgtgctttctcgtggcctgtctcctcctggcctcgccgtcgtcgttcgttgctgggactgaagcggcggcggcctacggtgcaagtgcaggcgcatgtgcaagcaggaagctgatgcagacatctgcgggagctatgggataccccggaactaatctaccaccagcgacatacccc

SEQ ID NO: 330977 - DNA, 123 bp, Zea mays
cccactcgtccgcccactcgttctttcactcgttcggacccactcgtcctcccacgcgtgcgcggactctttaattgtcaccgactatccaaataaagataaagttaactttgttttatcaaa

SEQ ID NO: 330978 - DNA, 203 bp, Zea mays
tgctctaccggtccggaattcccgggtcgcccaacccgtccgcgaccccttggccgaccccttggccgaccccttggccttattatcccttgcctggaaaatattaacaagggccccaggcttaaggcctgtgaccttggtaccggtttccatgggaaaaccattggaggtaattacccttgccccaaaaggaaggctaccct

SEQ ID NO: 330979 - DNA, 232 bp, Zea mays
cggatttcccggtccgaccaacccgtccgggaccccttggtcccgaccccttggccgaccccttgggcgggactttccaatgcgcgcggtaaggttggttaacttggcggcatgggcttccttggcggcgttttcgtgaaggccgtggccattaagggtcttgcccgcagcttcattttcgggagggaacttgccgttgccagggcctcgggccggttcattcggaaggccc

SEQ ID NO: 330980 - DNA, 225 bp, Zea mays
ccgcagccagagccggttgcaagacctccaccacggggcggcaaatcagcaaaatgcggcccaccaaaaggctcaggataacccgaaccaggaagctgaggaccgccgccagataatgcttgctcaaattttatcttctgaagcaggaaaaaggctttccggattagctttggtcaaacctgacaaaccaggagggggggaggatgttttgctgaaagctgctca

SEQ ID NO: 330981 - DNA, 339 bp, Zea mays
cgacttgtttcattgattcttgaagagatcgagcttcttttgcaccacaaggtcgaggatgtcttgcaactgcggatcaagctgcggctgcggctcaagctgcaagtgcggcaagaagtaccctgacctggaagagacgagcaccgccgcgcaagccaccgtcgtcctcggcgtggccccggagaaaaaagccgcgcccgagttcgtcgaagccgcggcggagtccggcgaggccgcccacagctgcagctgccgtggcaacttgaagtgcgacccctgcaactgctgatcacatcgatcgacgaccatggatatgaatattatctatctagcctgggg

SEQ ID NO: 330982 - DNA, 373 bp, Zea mays
agcggcgcctcgagggacgagggaggcagaaacgccccggtggggtcctggcgcccgacgtggaccaagaccccgcggaaggcggggtggcttaatgggaaagggaacccctgggggtcgaggggtcgacggagcccattccggggctggcaaaaccggagacgcccgacttctgggagggacctcagtgggaggccctcggcttcttcgtgcagtacatgtgggcgttcggcgtcgtcttcggcctcattgcttgcggtgtcgcttgggccacttacaacgatggtgcaacagatttcaaagacacgcctgcttacaaggagtcccaatcacaggagttccctgaggagtcagaatcatcaagcgctgatgt

SEQ ID NO: 330983 - DNA, 157 bp, Zea mays
tccggaattcccgggtcgaccaacccgtccaccaccggcaaggggcgccgaatcccccccgttaagtccaaccggattcaaaacaccttggacctggtgggaacttaaggcctcacccggccagtcaacggagtcaacaaggacacctttttgccca

SEQ ID NO: 330984 - DNA, 123 bp, Zea mays
cccacgcgtccgggcactcgcgcaagagctctactgccaatagttggttaagatactcaagaccttgtggtacttgatcctgctacatgtgcaattcacactaaggaaatgggtgatagtacg

SEQ ID NO: 330985 - DNA, 147 bp, Zea mays
ctcatgcgtgcacgaacgcaacaccagacaccgaccaatttgaagcggaggcgaccggactccttggtcggtcatgtcatgccggggctagggcagatgggggctcggttagggctgagcgaagcgtcatccggaggggatgggcga

SEQ ID NO: 330986 - DNA, 230 bp, Zea mays
cgggtcgacccacgcgttcggttcacaaaagcagtacccaattatttggtcttcgtctaagacgggaaaaagacccactcgatgcaggggcaatatatcggcgccagaaatggctggcaaggtctataaaaaggttgaggcaacccccaacgggagggtcttcttgattaaatccaaagcatttcccaaaccgggatacggaggcttgcttataaaggcggcgttaaacc

SEQ ID NO: 330987 - DNA, 256 bp, Zea mays
aatacattggtcatattacttgcgacttacagttagctttacctatgttcttgtattgtggagttgaaaatgaagcgagtgttgtaatgccctatgtcataatgtcatacgttcggattatttcttctttaatgggtgcgcaaaaccttgctagggtaagaagttaataaacttgatatcccccttaatttgattatttggggtccaaagctagttagtcaaaatattgtactaggttatctggcagagtaattta

SEQ ID NO: 330988 - DNA, 233 bp, Zea mays
  unsure (1)..(233): unsure at all n locations
cggatccggagttcccgggtcgacgcangcgtacgcatgcgcgaacgcgacttgcagttttcctgtgcctgctagcaagaggcagcatgcgagccaccgatgacgacgaagccatcgagccggcggatgtgctgtccaggcagatgatccagtgcacagcggcagatttggcgctcgaggacaccatctacgcgctcgacaaggcaatccatgaaggatccgtgccctttgac

SEQ ID NO: 330989 - DNA, 207 bp, Zea mays
tccggaattcccgggtcgacccacgccgtccgccaagccttccggccttggcttgccgaacccccaactttttgggcgcccctttcggaaggaagggttcattccggttaacaacttacttcggaacttaaaaatccgggaattccttcatttccaaggggaacgggccctccacaaaggggttgccgaccaagttttacaacggcc

SEQ ID NO: 330990 - DNA, 250 bp, Zea mays
aaaggaatgggtttgtgaacaaggattttgtcaaagcatgcaaagtgatggaaccaggaaagatattgttcatgggtgaacaaatgtcttggatgccaaacaggtcaagaaaggggatgaagacaggatcatcatcctctcagctctcacagtcgtggcctaaagatgataggaaaagcaaaaactatcagagcatgccacgtgaaaagaagcagcatatgaaggaactcattgcaaaagaagcgtcaac

SEQ ID NO: 330991 - DNA, 54 bp, Zea mays
cggacgccttggtcgacccacgcctccgttttacgcgtccgggcgactaccgct

SEQ ID NO: 330992 - DNA, 388 bp, Zea mays
  unsure (1)..(388): unsure at all n locations
cccacgcgtccgacatgggcaacggcggttgcgccaacgtcgtcgcgcccggctacacgaagggcgacggcctcggcgccgagatcgtcggcaccttcatcctcgtctacaccgtcttctccgccaccgacgccaagaggaacgccagggactcccatgtgccgatcctcgcccctcttccaatcgggtttgccgtgttcctcgtccacctggccaccatccctatcaccggcaccggcatcaaccccgcgcggagccttggcgccgccgtgatttacaaccagcaccatgcctgggctgaccactggatcttctgggtcggccccttcatcggcgctgcgctggctgccatctaccaccaggtgatcatcanggcgatccccgtcaa

SEQ ID NO: 330993 - DNA, 377 bp, Zea mays
gagtcgcgctcagtgctcatgtcgctttttcgccggttcgatagccacagccatgcggtgtatactctttggtttgatggcgctcgcaaagcaagattgacattgcctcggaagaacatctcaactgattgtatcagcacatgttgcatcttcacatgccacggatccaattggacgcactagtcttacgaaatgatgcacttgtaagaatgcctacaggcttgaggacctatttattctgctacgtttatgctaatcaagagctgtatataagagatgcatcgaatctgacaccctgacacacataattttgatcggaactgcactgtgctgtcattgactgccgattatatttgaaaagtcactgaaggatcttg

SEQ ID NO: 330994 - DNA, 147 bp, Zea mays
  unsure (1)..(147): unsure at all n locations
nccacgcgttcggccacgcgttcggccactcgttcggttcctggtctcgtcgccgcccggggtgcacaacgcgcccgcgaagcacctgcttggctttcagaaagtgtcgctggagccccggcacgcgcgcgtggtggcgttcaaagt

SEQ ID NO: 330995 - DNA, 86 bp, Zea mays
gtaccgttctcggaatctcccgggtacgacaccacgtcgtctcgcgggacagcgtagggctggacgtcagtgggcgttatctcgtg

SEQ ID NO: 330996 - DNA, 191 bp, Zea mays
  unsure (1)..(191): unsure at all n locations
ggnccggaattcccgggtcgacgcacgcgtccgcccacgcgtacggaaaatctcgcgctgatgttttctccagggtctccgtcttttcctgagagggtgctacacaagacgaagtgggggattacgagcctataacaactgatggctgtggtgctgcagccctctgacctacagggaactatggcgtgtac

SEQ ID NO: 330997 - DNA, 477 bp, Zea mays
  unsure (1)..(477): unsure at all n locations
cgtactcggtctcggnaattcccgggntcgactccacgtccgtctcgggagcacccaagcacaagtncagcacctcggtctaggccntgtgcgccatcnngccgctcggcgccttgcgctnactctacganngaagcacgaggggcgaagaagggactctccgagctacgtcgctatcaggcacatatgatcacggagggagggtcgctgcnctgcggcggcccggtcggcgctcggcgtgctaccgtnnattccacgagcactcacgaagaagggaagaaggggacctacaaggacccgccgaaggagggctagcngtgtcgagaagaaagcactctatccaccttcttcgggctgaaaccgtaagtaccggccccggcgcgccgactncgagctaagctaagctccgggcgcacaaacataccacacaacctggtttaaaattctgtactggcatgccgtgtgtaaatttggatg

SEQ ID NO: 330998 - DNA, 221 bp, Zea mays
acgcgtacgcccactcgtccggccggtggtctgcgggctgtttaagatggcccaggtgttcctttagtagatattgggtggccaacatatatacgagtacgtaattagcttcaaaataatgttcccctcgcctttatttgctgttcaagtccctgtaataaccgagaacgttaattgtagcagtgtgttttttatatgattaaataagtactatgttgtat

SEQ ID NO: 330999 - DNA, 427 bp, Zea mays
  unsure (1)..(427): unsure at all n locations
ggcggcccgagaccgcgggcggcggcggttgagccgtcgccgccgccgtagctgcngggcgcgaganggcggcggcgcccaagggatccggccgcagggtggtggttgtcaggcccgtcgacgaggacctttaccgcgtgccgccgccggacgacaacgacggcgccgccgctgtctcccgccttcccagacgccggaagcgtgcggcgaggaggagcttgtggatgggttgcttgggcctcaactgcgtggcctgaagcctgaagccagtagtagtagtacgtaggttttacaaggtgcattcgggcggctaattaagctcagtagtactactgattagttaagctgtatacgtatagtaagtatgtcgtgccgtgcgtatgggatctgggcaagtgtactagtactagtagttagtgggagagtc

SEQ ID NO: 331000 - DNA, 229 bp, Zea mays
cccatgaagatcttccagaggcacctcacaaacatgaggccctcatccaactaggctcatcctgatggattgtctgcctcatgacaaacatcaatacatacatttcttacgatactgtggggggcctgtccagagacgtcaacctcaaatggagacacggcccgggctcaggcgaacaccatgtctgcaacaaagacggcgcctacgtatggggatacaggccaatcta

SEQ ID NO: 331001 - DNA, 305 bp, Zea mays
gcgcaactgaccggggcgcgcgcaaatcttgcatacatagccgaaaggtcctgcctggccagcatctgcatgagaccggactcgatgcagggtatgacacttagctccatgtgcagaaggaagctaagacgtcatcaggccgtgacagcgatccatgagcaggcacgctcacaacagcctggagtgccaggtacagcaacgggagcggatgctgagaactgggtcacatcagctacactaccaggcagtgggaccgctacagtttagaacctcgatggtgatacagctcgcttcagagcaagtca

SEQ ID NO: 331002 - DNA, 399 bp, Zea mays
ggatgtcaggagaagcatacagtgacaatctctgctatcgttcgggtgttgaggccgggatgcagcagctcctcctcaagggtcctgcgggtgaggccatagagacccgtccattggagcatctcctcaaccgtggcaaacacagggcgagactccatgccattgttccaaatctgtgcatcctatttggggaaagagaaggaaggaagaattcgcctaacctggacaaacttgtccatctttagcagggacagaccatatcgcctgagcagcagcagcgagttgacgagactgtgcagcttgcgccgccaccaggagctgccgacaggaggtgggcgggccgtctggaagacgaagcttttgccgtcccagatccctagccagtcgtcgccgccggtc

SEQ ID NO: 331003 - DNA, 276 bp, Zea mays
ggaattcccggggcgacccacgcgtgcgcacacgcgtgagctcacgcaatgccatgttcgatgactactgcgcgaagtgcagacgttaacatcctatttataatcggtggtgctacactgcgttacattacgtgcatgctcgcccgtatcgaacctttactgtatatggtgcccagttcgatgaatgtaatgcatgatgctacttttgagcttcaatgtaaaatctatgccgtccggccccaacgcactcaggtttaatttgatgcaaaaaataag

SEQ ID NO: 331004 - DNA, 303 bp, Zea mays
cgcacgcataggctcgggtgagcgctggttcctctgctcggcgctgtccctgctcgccggtgaagctcactacctggagcggctcagcctttaaggatgcttcctaagcccagcccaaagtgctctacatgagctacgaaacgcccgcgtgatgcgcgcagccgcattcctcgagatcagcccatctcggcaccacctacagactccctggaaccagcgccctgctccctgctgccatgagctccaactcggattcatcccagctgacccttacccatagaccgcgtgtttctctaatcccag

SEQ ID NO: 331005 - DNA, 259 bp, Zea mays
taacgaatgatttcacacaccatacagttacgcctaaatggcagcaagtgcatatagtgggaaactctcaaacaagacacaacagatactaaatccagaaggcgaccagccaagtgtcaattgtatgcctataacaaatgagaacgaagccgttgtccctgaagcacgcgctggagaagaagggctcagatcgtagatctcggattcttggccctggtcaacacaggtcctcaatttgacctcgacgtgaagtaagcgt

SEQ ID NO: 331006 - DNA, 318 bp, Zea mays
agccacgcgtgcggttcagaagacgatgacacacatactgtattaagctgcatactcccacgaggcaccatgagcggattgtatgcagaggaggggggtgaaagagagacgtccgagctattcgttctgaaatcccaaactacgtgtttgtcgtgaagaagtcaaacatttttggacaatctcaagatatggtcttcttcagaacatatcctgatgtatgtctcccattcaagagcggagcgttgattcttcagtgtcatggcaagagctgtgaagtgatactagaagttcggaacgatcaaggtgaattcaaaaagc

SEQ ID NO: 331007 - DNA, 158 bp, Zea mays
gttcagaagacgatgaagcacattctggttctaggtgcatacttccacgaggcaccattcgtgatagtatgccgaggaaggaagtggaagagagacttccagctatttggtctggaattccaatctaccgggttgtcctgaaaaaatccaaccttttt

SEQ ID NO: 331008 - DNA, 60 bp, Zea mays
gccgggggggcggagtgggtcaagagggacgcgtgtacgtcaccggtcgaggagctgcac

SEQ ID NO: 331009 - DNA, 266 bp, Zea mays
ccctcgcctagtgctcagcagcggccgatgcatactcgttcgcgtccgtcggttcgggcgtatgtgctgcacacgatgaactctcggttgccgagcctctagagagccatggctggggctctgcagccgtcgtgccgactggcagctgtcgcgtgtacctagctcgattagcagcagctatagtaactgagcgagggcgtacatcaagcggagtcggccagctccgtctccgtatgcgaatctgagtcgcgcactcgtgatcttga

SEQ ID NO: 331010 - DNA, 286 bp, Zea mays
tactcctccgaccactcctgcgtcacatgcgctcattgtctattgcacgagcccgcttgcactagcgccttacttcctgaccgaggattctagcgccaacctgagcagcaccataaccgcccgtacgaccaacattagctccaacggcgaacttcgggcggacgcactcatacttgcagctcaacctgtaaaccaggactgctatctgagaaataccgcccggatgctcaacaaccctatggacaaacgaaaaacacatgcgttatcatacaacctttgcataaac

SEQ ID NO: 331011 - DNA, 268 bp, Zea mays
cacgcatacggactactacttcctccggtttctctctgcttgcgcactgtcacctgcccgcgccatcttcaaccgggaccgagatgaacattgatagcctcatgaagatacacccttgactctgcacacggagcatggtcaccatgctcacgagaaaaaaaggtgtactcataacaatcaccacgctcgacaataccactaacttcactctcaaaagattaagggtcaacaccatccctgcaatcaaagacttgaacatattcaagga

SEQ ID NO: 331012 - DNA, 213 bp, Zea mays
tgctcatcccagatgtacttaccaatttctcactcatcaacactccacacaatacgacaccttcaaatcggagtacgtatccgtcatgaacacgctattcatcatccaattcatcctattccactacttgctcatcctcctcttgcaagacatcaataacccttacatcatcaaccaagaccccatcttcaatatctacagtctaccaactca

SEQ ID NO: 331013 - DNA, 326 bp, Zea mays
gccaatcgagcgagacataccacttctttcttattcattgagaagcccatcccttagcggtgctaacaacaggccaaccgagctttgctactgaaaacaacgtaccggatcttattacaccataacctaggagtgaaacgatagatcttttcactggtacatgagtacataactcaacgctcataatgtataacatcaacagcttaaactaaggcccatgctatatttatgtgtttgcaaaacatctgataacgtacaccaaaaaagaaaagaactggacagcgaatataatgatccaagcgtaattacgcttgcttacaagcaca

SEQ ID NO: 331014 - DNA, 387 bp, Zea mays
cggttcggaattcccgggtcgacgccacgcgtccgcccacgcgtccgcccacgcgtccgcccacgcgtccgcccacgcgtccggcggatcgagagggcggcgtcggatgttgagtaccgctgcttcgtcggcggcctcgcctgggccacggacgaccactccctccacaacgccttcagcacctacggcgaggtcctcgagtccaagatcatcctcgatcgggagacgcagaggtcccgcggcttcggcttcgtcaccttctccacggaggaggcgatgcggaacgccatcgagggcatgaacggcaaggagctggacggccgcaacatcaccgtcaacgaggcccagtcccgcggccgccgtggaggctgcggccgtgggtacggt

SEQ ID NO: 331015 - DNA, 475 bp, Zea mays
  unsure (1)..(475): unsure at all n locations
cggtctcggtaattcccgggtgcgagcgccacgccgtccgtnngatggcatgtaaaatgggactcgttaatagttgtctgnaattttggtgtatgcacgtgttaacagcgcgagatctggagttatgggactgcgagaagnactggtgacttatccgttggaatgggcgcccagaaggtgcatttgagcanctaaacccttatgatcactaagggcttgatgtgttttaaagttttggaaattttcgatgtcgggaaacttnactcacagggaacgaattccttaatgagtaccctgacttccacttacaaagccgctgttcggtgtgagtgcagaaaggggattacggcctacnaattccaagagcataactttcacgcaaagcttnnntccgaagcttcttcaagaaaatgcttggcaagcaaggactcctatcccaaaagaccaagacnnttctncnngaaatattagaaac

SEQ ID NO: 331016 - DNA, 277 bp, Zea mays
cccacgcgtgcggaactatctggagctcatggctaacaatatgaattgctgcacggggcgtgactatcttgaagagtgtagcatatgagactaccccaagtcccatgaggggatatgacacaaatatctctgtatatgcgctggaacacataccgactcacctagtgttcacctgatctgacaaaatctgcttatggatactgtgctgattcaactctatgcacagttccttctagctcatatgtgttcaggcgagcgttctgaatgaatcaagctt

SEQ ID NO: 331017 - DNA, 69 bp, Zea mays
  unsure (1)..(69): unsure at all n locations
ctgctcgtanccggttcggaanttcccgggtgcgacgccacgccgnntccgcccgacgcgnntccgccc

SEQ ID NO: 331018 - DNA, 406 bp, Zea mays
ggaattcccggctggacccacgcgtccgccgactcctagccgaatatacattttttttacaactacgaacgacacatttactggtgtggaataatactgtcgtgcccatactatacattacacacagacgaaatcgccaaaaaaaccaatatgaagacgatgctcaccataaaagcagttgcctattgatcgacgaagctttagatactcaaaacaaacaaaccaccacctgggcatgctttttcaccacttgtaacaatccaaagcactatggatcaaatatccaccttctgcaagccgatcaattatacatacacaacaaacagctacttgtacctgatcaacgaaaaactcgattttttttacttccacataacacttatcgttgctcaaaagaaatttattc

SEQ ID NO: 331019 - DNA, 461 bp, Zea mays
attcccgggtcgacccactcgtcctcccactcgtcctcccactcgtcctcccactcttccgaaaaaaaaaaaaaaaaaaaaaaaaaaaaatttaaaaaaaaaaaaagaaaaaaaaaaaataaaaaataaaaaaaaaaaaaattaaaaaaaaaaatctaccccacctttccttcctccctttttaaagtttctatttttactttcctttccttccaacttcttactttttttttatttccccttaatttaattttatttcccctctttttaaacctttttaattggaaaaccctttcttttacccaatttattccctttcaaccccttcccctttttcccattttcctttttttcaaatatcccttcacttttcccctttccaaacatttccccatctttattttcaatttgtactttccttttaacttttcttttaccctttcttttttgttttttccccc

SEQ ID NO: 331020 - DNA, 251 bp, Zea mays
  unsure (1)..(251): unsure at all n locations
tttctctaaangatcaacttataaaacaacatatcacatcncanggccacccggcaaaaataataaatctttcatctcatcttaccaaaccagtccatacacacaataacctttcacccttatacacacctgtattaacacacattgagagcaaacatatgaaaaatacacaagaaacttattccacaatccacttacacataacaacatgttgtgaaactcaaacctctaacatgaccccatgggctcca

SEQ ID NO: 331021 - DNA, 226 bp, Zea mays
  unsure (1)..(226): unsure at all n locations
agcctaataattcaacatagcctttttttataatatgatacataactgttcttcataganttttaacaacagatagatggataatatttttgtttccatccattacaaatttcactcctacacatacatcattactgtaaatctatttcttatctcatccctcattaaatatccaccatctataatctttctaagaaatacaatgacaataatccatccattacat

SEQ ID NO: 331022 - DNA, 311 bp, Zea mays
ttcccggctggagccacgcgtccgactacgcctacagccacgcattctagcattcttatcgaaccgtctgcttcagatgcaaggggcatcactctcaccattgggagcctacactacatctgtcacatcgagacactcaactatcccttgaagccatatgaccatagagcatgccatacgctgccagtacatcctgatcacactgatcacatccatcactgcatatacagatgtgcttactcttatataccactacctctactccgatcttgttatgtaccatttccacaagacgaagacatcacactagc

SEQ ID NO: 331023 - DNA, 310 bp, Zea mays
gaattgccgggtggaaccactcctactgaagatgcgaagcaagctggcttaaagatcaagactgcatgtgctggtggaggacgtggcgaactgtgaactagagcaagattgccggcacactgctgcttgcgctcctcctagcatatgctgatgccgacattgaagtacttggctttaatattactcacaatctcatgagaacactctagcaggaccttatcatgcactgacataaccgactctacacttactccacagactataaatggacgcactttggactctataccatatgtcagagacatcacat

SEQ ID NO: 331024 - DNA, 387 bp, Zea mays
  unsure (1)..(387): unsure at all n locations
cccacgcgtccgcttgctctccctccaacaagctaattaaggccggtcgtcatccctcgtctagctcgttttattatccatggcggaggagaagcaccaccaccaccacctgttccaccataagaaggacgaggagcaggaggagcagctcgccggcggcgggtacggcgagtccgccgagtacacggaggccacggtgacggaggtggtgtccacgggcgagaacgagtacgacgagtacaaggaggagaagcagcataagcacaagcagcacctcggcgaggccggcgccatcgccgccggcgccttcgcactctacgagaagcacgaggcgaagaaggacccggagcacgcgcaccgtcacaggatcgangaggaggtcgcggc

SEQ ID NO: 331025 - DNA, 109 bp, Zea mays
cagaaacctatccactagctcacgcactcgatcgaggggatccagttcatgatctacttatgcactaactaccttgatctcaacgttgccctgaccattgtccaaacct

SEQ ID NO: 331026 - DNA, 225 bp, Zea mays
ctcacacgtacaatactgcgaatctttttctgctagggtcaacttttctatcaggggcggcttactatagtgctgaggtgttcttgatctcaacacctacccatgtatttatatcgttatatagaggcattgtgaatttgtatctacctcgcacacgcgtgatcaacctaccagacctactgattgacgcacttcaatcaacgataaagtgaatgaccgtgatcg

SEQ ID NO: 331027 - DNA, 88 bp, Zea mays
cccacgcgtccggttatgtatgcactcctcctatatatactatatattattatgatgtgcgtatactagtactgtgcaactctttgtc

SEQ ID NO: 331028 - DNA, 369 bp, Zea mays
aacacgcatccggcggcgcttgctcgggacacgctcgctccagcgatggctacggcaccagttgttgctgacgccgtcatgcctcacatcgtgccacctgtcacggctcccgtaccagatccgcgtttctccggccccaagttcaagctgcattcctagaccgcagttccgacagaagtctttaccaatgaccccacagaggacccaacacacgtatccaacgctggagcctacactgctactgctgagctaacgagatgatagcctcgagctggcaccggagcccgagctcgatcacgatgacgaagtggcggcgccaagctcgctcactgtcgtcgtcgcggacctggtggacgacgggctcgtcat

SEQ ID NO: 331029 - DNA, 390 bp, Zea mays
cccacgcgtccgcccacgcgtccgcacacaggctctgtcccatagatgtcggccaccacatggtgttcacgaccgcgctcgccgtcaggtggtagtcccggcgagcgagacctcccgactccaggctccctcccataggtcgccgccgcctcatgatcccgagcactacagcctccggagccgcgggctgtgcctggtgccggtggaccagacactgtagctgacccagagcaacggggccgacctgtgggcgccggcgaacacgaccaggcgcaggtgaggaggagcctgctgccggcctgtgccttcgcggtggacaaagccttcctcctctccggcaatgagggcatcgtcgctaacgtgagcacgttgcaaagctcgcttgcccat

SEQ ID NO: 331030 - DNA, 280 bp, Zea mays
gtagaacatgcgcacggcgcacctctatcaagcgacagctatcgacactcatgacttatgggtttacgaaaagcactatatgtgcaatgaacgccagctcgcgctcagaccgaacagcgaagagcagcttggctgcatgtggaacgggtgagcatgcagatactgctacaaagatcatcactagatatctagagacgcacagagagacgacgaagaaaccgcatagcgagatgaatttctaccaactgtacctctgaaaacattgcccattagagcacct

SEQ ID NO: 331031 - DNA, 266 bp, Zea mays
acgcgtacgacaacacgtacatgcactacatgacgtacttccacagccactacacgtacctcgatctgcgcaacgatgtaaatagaaaaggcccgacgcaatgctatacaaactatccttaaacacttgacctggctattatgtactacccgtacgcgtcggacattctcgacacatcttcctcgatcaataactgggatgctcactactgcgccatctactacgacgacacatggctcaaagctgatttacagcactctatatgc

SEQ ID NO: 331032 - DNA, 391 bp, Zea mays
gggacgcgtagcatagagcaataccttacgagctgttacgataacgatgaacacagacctgacctaggtcggatacgcgttgacgaagaccgtggattacgggcatttgtcacgctacaacgcatcattgacatgctacgtggccttgctcttctctttgaactaggcatcatattaagggcatgagtgttcattgacgacatgatgacttaccaagctatgactgagataatacctagagaacatgatgctcttaggagtctgaatccgatcacagacaccctggtacgcgacagatgacggccgccactctggcatgggaacggtgcaggcatgccgaatggcatcatgcactgatgctgtatgcgagctatgggtgtgaacaatttgg

SEQ ID NO: 331033 - DNA, 420 bp, Zea mays
gtccctaacggagtccgcgggccgcggcgtcttcgctacccgcccagtatcttctggcgagctcctccactcagcgcagcccctcgtctcccacccctcccactctctgctccacgaggtttgctacaattgcctcagaaggaagcccggggaagggcgcgcttcaagcgggggtgactacttctgcagcgatgcttgcagggaccacgccaaggggttccatgacattgacaagaatgtagattggtctttattcgattaccactgcagttcacgtgatctgaagtacccatacatggccaagcgccttgcttgcatggttatatcaggagctgctaatgcagattgccttaacatacttcagccagctctgttgcaccaggggacgctgattgagatgaaagaggaatttgagttgtg

SEQ ID NO: 331034 - DNA, 344 bp, Zea mays
ggtttccaaagccaagtgtgtactagcagtctagcaaccagctagctcgggcggcagcaggcagccatcatgtcggaggagaagcaccaccacttcttcaaccaccacaagaaggacgaggagcagcccgccggcgagtacgggtactccgagaccgaggtggtcaccgccaccggcgagggcgagtacgagaggtacaagaaggaggagaaggagcacaagcacaagcagcacctcggcgaggccggcgccatcgccgccggcgccttcgcactctacgagaagcacgaggcgaagaaggaccccgagcacgcgcacaggcacaagatcacggaagaggtcgc

SEQ ID NO: 331035 - DNA, 345 bp, Zea mays
atcacgcacccacaggacaactcaatgtatggtttgatcgctggcgtgaccgccgtaggcggctacgtaagccgctacggcattcgccgacgtcttcgtcggcatgcactcacgaaggctctaaccatggattcagtcgaggcagatatggaagcaaatgtgtcaagctaagcgatgaagttagatagccaggtccacctgatgggcatggttatcattgagggtatcatggagcatgttacagacgatatgacttacaaggagcatggctacgaccatggttactacaatgctgatgctcaatttgaagggaaagctcaagggctaactcgagatcttactgga

SEQ ID NO: 331036 - DNA, 262 bp, Zea mays
cccacgcgtccggtgaaggctcagggtaatgattgcatgaggctgaaggttaaacgagtctctatggagcacactcaccatacatgccaatacattccgctactcatgatcttcaaagagcatggccccattcgtagactcgatgaacctcacctgtcgtcaccgtcaaatactccggctctgtacactccttccaccctgtcgcatcctcccaagcccgctgctccacccactttgtcggagtctacaccaccgtattctc

SEQ ID NO: 331037 - DNA, 351 bp, Zea mays
taccggtccggaattcccggggtggtttccaaagccaagtgtgtgtactagcaaccagctagctcgggcggcagcaggcagccatcatgtcggaggagaagcaccaccacttcttcaaccaccacaagaaggacgaggagcagcccgccggcgagtacgggtactccgagaccgaggtggtcaccgccaccggcgagggcgagtacgagaggtacaagaaggaggagaaggagcacaagcacaagcagcacctcggcgaggccggcgccatcgccgccggcgccttcgcactctacgagaagcacgaggcgaagaaggaccccgagcacgcgcacaggcacaagatcacgg

SEQ ID NO: 331038 - DNA, 363 bp, Zea mays
gccaggcgttcggccacgagtgcgtccacgagtgcgagcacacgcacggccgctcgtccgtgctcgccacgctcaggcgttgtccacgcagtggctcaccggagtgacctggaaggacgcctgcaacggggacttggtgtactgttcatcactagcagtgtcagtcgctgtcgcgcatcatctataccctcatgaagaccgaggctcatgagatcggctacatctagtctcagcgaagctgctaacatgacatggagaagaagctgctcttcaagcggatctacttgcacccgctcggcctggagctcgaccctgacaagactgagcgactgcagctgcgagagatcatagcacagcgctgac

SEQ ID NO: 331039 - DNA, 365 bp, Zea mays
ggccgtctctccaaggaggagatcgagaagatggttcaggacgctgagaagtacaagtctgaggatgaggagcacaagaagaaggtggaggccaagaactcgctggagaactactcctacaacatgcgcaacacgatcaaggacgagaagattgcgtccaagctgccggccgatgacaagaagaagatcgaggacgccatcgacgcggccatcagctggctggacgccaaccagctcgccgaggcggacgagttcgaggacaagatgaaggagctggagagcctctgcaaccccatcatcgccaagatgtaccaaggcgcgggtgaagacatgggcggcgctggcggcatggacgaggacgcccc

SEQ ID NO: 331040 - DNA, 361 bp, Zea mays
cccacgcgtacggaaacagtgaaatcaggtgacgatggagaagtagatgccattcattagctactggagatctggtcagatgacgagtcatgtggtcataaaactctgtattcggtcggatttgacgatgtgaaagccagcttactggccacaacggctgacgaggaggctgcattgagtcctacattgcacatggtgcacctagtgtggtattcaactgacaagagacgtgtcacggtcaacttacaagctgattgacatgccggcgcctgtaaaaacgtagcggatagcatgccacggagaatgcctgagaacctatctcaactggatttgtgatcagatcatatgagtagagaaatga

SEQ ID NO: 331041 - DNA, 261 bp, Zea mays
gactcgcgtgcttaagcactcgactggcctcatggcgccggccgccgccaaggggatcggagcaagaggcattaacacagggcactggagcagcacatgcaagctgactctggacacttccgaccgcacgtggaaaacaagctagatggcgagcatattaaggaccctgaggacacatgcagctggctgtactgcttatgagaagcgatcacgggtgctgatgacagttggcaaggagctgatgcgctaaggcactggata

SEQ ID NO: 331042 - DNA, 274 bp, Zea mays
gatttatcataatttcaggaaaaatatgaacaaagcagactagaagctatatggatagactactcatgaatagtaacattgtatgaagcagctaagtgcaagtgacaacttatttaatataggatctcttaagaagtgtatttagaaggttatttaagaaaaaaatagacgagctcttagcgaatagcttatctctaccagacttcgtacacattgtctattaactgtatttataatctagtggttcagagttatattatacaatatcttagtt

SEQ ID NO: 331043 - DNA, 184 bp, Zea mays
gaggacggcggacttacagagcgcagataatatgcagttgtcgttggacaacctgagggcgatgacgtacaagctggcgagcttgagcctgaagacaagctacctgagggccctctcgagagctaacacgttgccgcggatacagagccaattgaggacatcttgactctacaacttgaggagg

SEQ ID NO: 331044 - DNA, 410 bp, Zea mays
cccacgcgtccgcccactcgtccgcggacgcgtgggtgccaggctggcatgggcgaggacagccctgtgtctgtgccgctgctcatctctcggctctaaaagcagacgagtagtagttgtgcatgggatggatcggcacctgagagtacgctgggacatcccactgattgccggacggaagcatggaggaagaagctcccctcgcttcgcttgtcctcggcatgaggcatgtgcctggcgttacttgtggcgtgccaagtgccatatttccctaaacttattctgcgtgggaaccctctattatgtatgtatactgtgaatttgtgactgttcaggtaacacgagttatcgtgacatcttcgtagagaaagataccgtatgtatgatgtatgtatgatatacatatgata

SEQ ID NO: 331045 - DNA, 393 bp, Zea mays
acgaagcattagtacaatcttacgagatactcatgctgctataatacacaacgaccaagccattgtcaaggacactaatccagtcatggccaacggaagtcgtactgtcatcacagcgcacaacccatctgccatgacagggcacgatggatcatgtatgaaatgcactcctgtcacaggtaggaaccgcaccagcgtaacagcgaagatgcgagacagagagacaaagactgtaggcaaccgagagctgatgactgcagacaagcagccagtacagaactagcaaaacgagccagaaaaggactgccagaacgccatgatgacacctgtggagtacatcatgatgacacgcatgtcctacatcatcatcatcctcatgatcaccttcttcaa

SEQ ID NO: 331046 - DNA, 237 bp, Zea mays
gtaccggtccggaatcccggtcgaccagcgttcgtaagcttaaacctcatgtgagactctaacaagtgatcacctatgactgtgggaccaaaaaagcttatatctgcagcttatccatgctacaattattacttctattaagaaaaagcgggctcttttaaggatcaatttacgtcctcacaaaacgagaattgcatgtcaaaagggtacccaatttgattaaaaagtcgacctttt

SEQ ID NO: 331047 - DNA, 362 bp, Zea mays
ggacccaagcgttctggatacagaggatcataatgagtgccgggaacatgccgatcggcctgaacagatagttgagctagggaaggatatatactgcatgccactacatcctgtgcaaaaattaactgaatctctcagacatcatagtgccatgaatggatactacagatcacttatcctgaagcaatagatatgcatgatcaatatgaaagaggtagctatcgaaggtgcagcaagatccacatcgaatctgaatggtaccgatgcaaccttttatacccattgtggtcatacgatgagtaccttagtgaaacatgcataggccgacaccgcagttaatgaggccgcagctgcaacacaac

SEQ ID NO: 331048 - DNA, 186 bp, Zea mays
gggggcttatttggaacagttttttacacaaaactcctgacctgtaaatcaattttggaaaaccgtatccggtggtcgatccatgtattaatagagtaataatgttactatgttcatccaaatctcaaagacgtgatggttgtgttgaaaaaacagcttgaatcacttgcttaaaaaaaaaaatac

SEQ ID NO: 331049 - DNA, 229 bp, Zea mays
cttccgattcacccgtgcacgcacgctttcatccactcatcatcatactttatgcgatcttatcatatcatcccacacagggaaacttgggccagctacccggcgtacaaaatatcaaacatccctaccaatgaaagacctcttattctccctaccatatttccaacacaatgttaatcattctctacataactacatcaccaccaacatcataccacatcgtaacctc

SEQ ID NO: 331050 - DNA, 263 bp, Zea mays
gggacgacaccttcgctccgcggccgtgcggcggctggcaaacctccgatgcgtgcgcacattgctgactgagtgagccatcgcgagctagcagcagcaggcacgccgagctcgccaacgatgaacatccagaggcccgatgactaaatactactgactagtacatggatggggacacctgctgacacgggatgaacctgccggacacagttggactgcacttaccgaagcagttaccgaaggtgcagcgcccaatcgaagat

SEQ ID NO: 331051 - DNA, 329 bp, Zea mays
cccacgcgtccgtgcatagttcagatgatcaaccctcgtggttctgattatattgagtgattagtcttgcgctcctatctgacgaccttatcaatgccactctgatattatatgcttttaatgttgcgtttactgatttcgatacactatgtttattgacgtcctatggtacattctcagccagatactgtcgccgcttcaaaatcctggccgagaggttcacggcgccggctcgcatccgtccttgccctggctgcaccttgcttattgtagttgaaatggtgcacgtgatgtatgcattgtaatcatatttccttagactgtcaaaa

SEQ ID NO: 331052 - DNA, 271 bp, Zea mays
cccacgcgtccggtcagtgcccctgccgccggtgaccctacctaccattgcgatcggtggcggaagcccgagcccgacaaaaaaggacccccgaaggcgggcccaacggcttcggcttccccgacgcccacacccaagcccaagccggccttggaccagtgccccatcgacgcgcttaagcttggcgcctgcgtggaccttctcgggaaccaagtgcacctcggggaccccaacgtccaatgctggccgctcgtgaaaggcatcgccgggc

SEQ ID NO: 331053 - DNA, 320 bp, Zea mays
ggaattccagggacgagtcacgcgtccggtggaagcagacgtgcggctgtacgttatctcgtgcaagcccgatgcgggggaaaggaatacttacgacgcgctggaagtgttagtcctccttgagacggatcgcaaatggcacgttcttacaggtttcgtgcatcgctcgattaattagcacatagagtgcttgcaattacagccagtacgaggtcatgagcttcaagctggtccaacatcacagcacgacacgcttacttactacatgaaggggataaccatatatagcgtgcctgcattaacatgcttaagaatgacaa

SEQ ID NO: 331054 - DNA, 282 bp, Zea mays
cccacgcgtccggctagttaatgctaaagattttgccatcgtttattgtaacctttgatgcggattgtattgtctaaattttctttagtcttatagcttgttagattggatcatatgcattgaaaccaatatataagaattgctttaaaaaaaacaaagaaaaagctatacattcttattaatgaaatctacaaataccatcgatgatattaaaaaaagatacatgaaaaacagataacacaatcaaagggcggcccttctaaagcacccaagtttacgtcc

SEQ ID NO: 331055 - DNA, 383 bp, Zea mays
ctcactctacccaattttcgacaatctttttttacaggacttcttacaataataacattgggacctacggggcatactccattctgcatcgagcattcaagaactatttattctattaattgcactgtattataattgggcttgtaccacttgagtacaattacttcatatgcgcatgatgatacatcacaaattacatctaccatgactgttattatatttacatacttcatattcttccttactacctagcttttcatctatgacctgtgcctgtctgtctacatcatccaagattacctactcgtgtatgacaccatcatacctcttctataatgtatatctaattcatttgattgtccgtatttttactacgtaatgac

SEQ ID NO: 331056 - DNA, 343 bp, Zea mays
gccacgcatgccttcttacttcggattctgcttatctgagctaccttcttggaggcgctcatgatttacaactatgagcatggctaagtacaacaaacgtttaatggatgttgcaaaaagcgactcacaggaccttttgttgaacaaactaatcgcagaagatatattaactgaataagaaagggacatacttctctggtcgcggaatattgcaacgcagataactcgtactacgaagcgagcacgaattgctgtataccacactacgatgttcactcgaaacactaatagcatatatttactttacaaacttcgaactgtcggaacaactgatgtttcaatt

SEQ ID NO: 331057 - DNA, 435 bp, Zea mays
cccacgcgtccgcccacgcgtccgcgtcgtcgtcgccgtggacacggcggcggcggcagcggcagcggcagcggcagcagcgatgcgcggccggcgtcgcgtccacctgcgggtgtacatgcacgacgtgatccgggggccggggcagacggcgatccagctggtctggggcgtgggcccgccgcacgcgaccatgccggggcggtccttcggcgacacggcggccatcgacgacagtcctcacggagggcccagacatcggctccgcgcccgtcggccgcgcgcgggcagggcacctacatgctcagctcgcagcgggaggggcggtgctcgtcgtggacgtcacgctcgcgctcaccgcggggccatacaacggcagcacgatcgtggtggccggccgcgaccgcgtacaggacgagacgagggagctcgcgg

SEQ ID NO: 331058 - DNA, 275 bp, Zea mays
gccacgcgtacgtgcacacgtccggttacacggacacaccacagggacggggagtagatgtagctgaacatgttgtggcatgtgcccaaagacgtgatggtgggcgcgttcgacgcggtcacgctcatcggtctcatggagttgttctacgaccaaacgctcaacgcgaatctgagcctctgatgcgagatgttcatgacgtactacacactcacgatctacctaagctacgcgctaattaccgtggtgtctcgcgccagcaatcgccgtgggca

SEQ ID NO: 331059 - DNA, 297 bp, Zea mays
cccacgcgtccgtccactcgtccgcacacacagagagagacaagtggtgggcactccagagtgctactagcagtctagcaaccagctaactcgggctggattacgcagccatcatctgatacgactggcaccaccacttattcaaccatcacacctaggtcgaggtgcacaacgtctacaagtactggttctccatgactgaggaggtcacatggaacatgcagggcgagtacgagaggtacaagaaggatgagatggaacacaggcacaaacagctcctaaagaaggcatgctcaa

SEQ ID NO: 331060 - DNA, 182 bp, Zea mays
cgcacaccatcactgcaactctctgctttcctcgccggaactgcatgcctgggagcgggcgatctaccatccgccgacgcgcacggccctgatcgccagcgaggactgacagcatattcagcgtttgctaaacaccaacgtggatgggaagcaaacgatcatgctagccatgacctcaatca

SEQ ID NO: 331061 - DNA, 287 bp, Zea mays
cccacgcgtccgcccacgcgtccgacccgatgtaccctggcggcagcttcgagcccctcggcctggccgacgaccccgaggccttcgccgagctcaaggtgaaggagctcaagaacggccgcctcgccatgttttgcatgttcggcttcttcgtccaggccatcgtcaccggcaagggcccgctcgagaacctcgctgaccacatcgctgacccaggcaacaacaacgcatgggcctacgccaccaacttcgtccccggcaactaagcttaacagctatgctatgca

SEQ ID NO: 331062 - DNA, 222 bp, Zea mays
cccacgcgtccgttgaaattcaaatgattgtaattagttcaatgagaaaaattactagcgaaaaaaaaaaaaaaaaaaaaaaaaaaaaaaaaaaaaaaaaaaaaaaaaaaaacaaaaaaaaaaaaaaaaaaaaaaaataaaaaaaaaaaaaaaaaaaagaaataataaaaaataaaaaaaaaaacataaaaagaaaaggataaaaaagaaaaatgaaagagg

SEQ ID NO: 331063 - DNA, 351 bp, Zea mays
gaattcccgggtcgacccacgcgtacgcacattcttcgtctgcataatccacgtactcatgaacaacacgtactatcctcatattggcgttaagggactatcttcaaggacgcaaggcaaactgaatcctacaagctccggacgcattagctcctaattcacattcaggatccagggcactctacgtgtaacttcactacgcatgatgcaacagatactggcaataattctcgaccattgacatcagcagatgtcatttggacgaggatgcactcatagactactactcctctgactattacttgcaaagcttaccctgtataaactcctgtgaagatcaagtaagttact

SEQ ID NO: 331064 - DNA, 251 bp, Zea mays
atcaaacattcttataagcttgagaatgttcatttcaatatcacataaatggggtctggggacattatctggttgtgaatgtgactacatgatttacaggtccagaaccattaaatcttacaaggtcacaacgataatatagactcttgactatatcaatagccaatgaagcctttatacaaacactagatgtatcatataagaatattacaatatacttatacttagaactactccttttgtacaaatta

SEQ ID NO: 331065 - DNA, 220 bp, Zea mays
cggactcgtgggcggactcgtgtgtagactcgtgctttgatccacgcttcaccaaaccgggctactgattcatgctcaataccttcgtgacccttctaaacgaatagtacaagatcaatattatcatgaagataatgctaaccatattccaatcactcatcttctcactcatacataacaacctcctgaatatgtacaacaccatgaactatttcaaaca

SEQ ID NO: 331066 - DNA, 402 bp, Zea mays
gcgacggcgctgccggagatggagacggagacggaggcggcagcggcgaggcgggcgagaggagtctctggagctggctttccagatgtgccagatcctagacaccggcctcgaccgccacaccctgtcgctgctcatggcgctttgcgaccgcggagccaaccccgaggcattggccgccctcgtccgcgagctctcctctgctgctcccccaacctccgccgcggcttcctcccccgtgagcaacggcgccgcggggccggcctcggcaattgcgcccacgttctcctccggccttcgccgtccctagggtttgtaatatccttctgttcccacgatgagactgcttgtcggttagccaactagatcccgcactatgcacttagctgtcgtgaacgcctg

SEQ ID NO: 331067 - DNA, 304 bp, Zea mays
ctcggtcacatttgcccgtcttgcaagggaaaggcttctggtcatcttggggtcaacgggccatctattcgaaatcagcttcttgtaacctgaactggtgctgctgctccaccatcaatttatactctacttcatatgagtcgatcagtactacgtactatgtctgctttaactcgttgctagtggaggaaacaggtttattcaaatcttacatctctggttattaaaactcatccattaagcagctgttgcgaacaacgaagctgacttgttcgatacatacatgactgagctctcaagagac

SEQ ID NO: 331068 - DNA, 396 bp, Zea mays
accggtcctgaattcccgcgtcgacgcacgcgtccggatcgtcaccccgggccttctcttactgtacatcgtcctaatcatactgggcgttcgcgggagctacctgatggccatcagcttctagaacaatcccttctattaattgctcatcatcgacatctagctcctcactaccgttgtgtcctaattggtcatctgccccatcacgctctaccactagcttttccacgtatacctcttatatttacaatcttacatgctcgttctactaactgctgcacctgtgctttcacattcctgctgtctagatgatccaagcttacactcgcgaacattcgacttcatatctcttttatagaatcgaattgatccaatttcacttaacgaaactttata

SEQ ID NO: 331069 - DNA, 287 bp, Zea mays
attcccgggtcgacccactcgtccgaccactcctccgaccactcttccgacacttcttaccctcactacattcacacacctacaggcttacacgctactgcatcctggaatcagtacaattcaccaccttcgcaccatcctaagcatcatccatcatcaactaataccacaaccgctactaggtcctcatcctctaacgttcctactaccacaactactgatattgctatgacaaatgctaagcatcagcaataaaacgatctatccaacaccattttactatctct

SEQ ID NO: 331070 - DNA, 221 bp, Zea mays
cggacacgtactccgacacaacagccacatccactgatactcctagttaagaccagctggtgcagcagattcattctgcttgagtcacatgtctcttactactactatctcaagctcacttttcactagcataactaactttctcaaccagacctcaccagacacaattcatcatgatgcattatgaataccaatactctttgagagcactacgaagacct

SEQ ID NO: 331071 - DNA, 322 bp, Zea mays
cccacgcgtccggacccacgcgtccgggcaagtgctccagcgtggtgtacggctggtggtgatcgctagctccatcgtccgcctagcccaccccgccaccggccgatctctccgccgttccggtccatcagagtggtactactacctatgagttgagcttttcttggtgcacgcccaccgtacttcctcttgattcttctaccttgatcagagttaggatctttttttatagttttatctttatgggatggatttggtggtatgtagaatgagtagtcgagcttctctttggggatttggaacggtggggaggttgactggt

SEQ ID NO: 331072 - DNA, 420 bp, Zea mays
cccacgcgtccggatatctacaattccaccagagcaaagaagtcttgatcaaatccaagagtacgtgcgtaacaaacatagcctgcccaaagaagtgtttgacggaggattcattcttgagaagatcgatggcccaatgtcgactggcagtctggtgcttgcggacaccgacatcgatagcaaccccagcgtgagcttcaactacttccagcatccacaggacctcaggcgctgcgtctacgggattcagacgatcgagaggatactcaagacaaaccacttcgctaaccttaccgccaacggtgccgggtacccgatggaaacgctgctcaatctgagcgtgtcggctaacataaacctgatacccaagcacacggatgacaccacgtccttggagcagttctgcagggacacggtgac

SEQ ID NO: 331073 - DNA, 433 bp, Zea mays
aaaaacacccaaaaaaccaccttcttttcctgcgttcccctgctcgatccccgacgagaattcgctcccgaacccatcgatctgctctccgcagtccgccgatccgtggatcgatccgtgcgcgggctcggtccgccccgggttccgatctggtcgccgactcgcctgaggagatgaacggcgccgggggcagccaccaccagcagcagcagaggctccggcagcagcagcagcaggcgctcctgatgcagcatgcgctgcagcagcagcagcagcagcagtaccagtccggcgtcctcgccgtcgcggcggcggcggccatgacccaggtcgtctccccggatcctcgcctctcgatctgctggtctgcgtgcgcattgggcagcagtaatgcgcgccgatctgcttgggagattttttttctttgctttga

SEQ ID NO: 331074 - DNA, 448 bp, Zea mays
  unsure (1)..(448): unsure at all n locations
gtaccggtatcgatacctggtagacccacgcgtccgatcacgcgtccgatcaggtaccgacgatgctcgtggcgatgaccgatgagaaaacggatcccatggtaaagccttcgtgggggggtacatatgaagatcgctcgacagatcgatagacatcagctgatacgagatgtactacgagctgcatctcgagctcgagctggtatgccatctggaaggccctgtggaagaccgttcacgatcaggctgtcaggtccgattaaacgaccgggaaatcgatggtgacgacctgtgggacgactcggggcatgacttagggagcatcatgaggcgcataacgatcgacttgccgcangacctgcagcacatgggccgtgaccgtctatgtgaccctgtagctacgactgtagcgaggatgctgtatgacaactattgtgacgactattat

SEQ ID NO: 331075 - DNA, 368 bp, Zea mays
  unsure (1)..(368): unsure at all n locations
acccacgcgtccgnttaagtgtccgagcacgccttcgcttgaactatcaggctggtgatcttgagcacatgggctgatgcacgtcactagagcctgacctatatctatagtgtacggtttgaccacagggagcgtcacagcactaggcaactcaacaaaaatcctctagcttgctgatgcgaaactctgcatctaccatgtgagctagtctgtgtttaacagactgcctattgcagtcatgactctgaataacatacagactcactggtatctcacactgctgctgactagacctctgatgtctacgaagcgtgtgagacttccgtatatggacaagcttataaacctgtaatcaagatcctaacagc

SEQ ID NO: 331076 - DNA, 225 bp, Zea mays
gatcttatcacatcaagtgagctactcctgacactttggtcaggctaatgatgccgtgcacaaggaccagcgatggcgaccaagggcatatgcttcctggcgctcgcatccgtgctacttgccgtaacttttgccgaatctgctctgaagccgcaagtgaagaagggcagctgcagttaaggtagcagcacatgcagccatcgctgaagctgacgctggaacctg

SEQ ID NO: 331077 - DNA, 373 bp, Zea mays
  unsure (1)..(373): unsure at all n locations
atcctgaaagacatgataataccgaagacagtcggaaacattttccagcaccagccccgctagatgatcagggcttgcgaagggaccctagacattttgagagagctttaggtagacctgatggtttccttgattcagtacctggaaggccttcatttgcaaaccacagaagtgcaggtttgcatgaggattttccaagaaagcaaaatgcaactgccagtcaccctgacttcctgtcacatggagcagaatttgatcatcacaaggctattggaatgcctaatttcagaaatccaagcccatttgctcaagggacaagtggccgtccttgtggccctnctaaacaccaagctggctctggtgacatgcattc

SEQ ID NO: 331078 - DNA, 439 bp, Zea mays
  unsure (1)..(439): unsure at all n locations
cccacgcgtccggtgaccttctgccacggctagagcaagtaagacggatgcagcgggaggaggggaaggtttctgacaaggctagttcatcgtgggcttctgaggcggtagctacaatggagatgacacactcgaagctcttccccttcttcatgactggtctccttccccaggaggccatgcaatacttggacctagtgtgccgatgcaccaagaacacgcgccatctggtctccatgctcagatctcttgcagagcgtctggaagatgcgaacccgtcaattatacacaacaacccaaccaaactgtatgagcacctncttgtaaagtccccataagcctcaaactgctctgcgcagcgatgcggtgctaacctttacttttcctgtcagtagtgcagcttatgtatttcgggttatttgaacgattgtgaaagcgt

SEQ ID NO: 331079 - DNA, 391 bp, Zea mays
tgttaagagatagataaaggcaccgctatcacggcgaacgcgacaacaatccaaagggtcggactcaacgctactggggacttctatcctcgcatgaacgaatgttggaggcaccctattgcatggaaccaactgctactcgccacactatggctaagcatcgccatcgtcgccttacctatctatctactcgatgacgccggctacaaccacctgtaccgtccctacgacgacaaccaccactagatcgcctgcaggatcagatactcggccaagaacctcgacccaactctacatagcactgctgctgctaataatcatacagtttaagatctcatatgagttagccatgaccatatatgtaatctgataccatatactactatgccca

SEQ ID NO: 331080 - DNA, 322 bp, Zea mays
actcattcgatgctgaaatacattataataccgagttcagactctatcattgcgtgcacctttcccgctagattatcacggcttgcgagaggaccctatacatttatagagagctatacgtacacctgactgtttccttgattcagtacctgtaaggccttcatttgcaaaccacaaaattgctggtctatattagaattttccaataaagcaacattcaactgtcattcaccctgacttcctgtcacatagaacaaaatgtgatcataacagccctatacgtatgcctaattacaatagtttcatcccatttgctcaacgt

SEQ ID NO: 331081 - DNA, 432 bp, Zea mays
  unsure (1)..(432): unsure at all n locations
cggacgcgtgggcgcggcgcggcgcggcgcggcgggcttcgctcgtcgaggctgtaagtctagggtggcgacctgcactcgctacaacccgcatctctccgtccccggcgacgactgcgtgagcagccgcagcactactaagagcggacagcggactatggaggtggaggccatccgagttcccttcgaagcttctcgaggataggtacgcggaagatagcttcgtcgtcaccattgcggcatcgtaaaagggcttagcaagaaagagctccaggaccttctgcaagagggcgccaagatgctggtgcgtgctgcaagtgctagaggaaatcggatcctcgggtcgggcgatgagatggaagggatgctgcagccacacgggcgttgagtcatgacgtgactgctcgcctggtgttagctntgtcaggaact

SEQ ID NO: 331082 - DNA, 370 bp, Zea mays
ttccctcctctagccactcatcctccctctctttgcctttaaccatgaactttaatatcaatcatctcgtcacaacttatatgactatctgactaacatccatgctcttactcatcaccatcttcccttcctatcatcaacacaactcaccatccacctcaccatcaaatcaaccttctatcgctatactctaatctcatcatacttgtcacacctcaccaatatctccataactatatcactccctcataacaagtattctctatattaaccttttcaccacaaaaatatcataccacacatatcaaccattctctctacctatatgcacatgaaactcaatctttcagctgatctctgaattccacat

SEQ ID NO: 331083 - DNA, 424 bp, Zea mays
ggcggccgaggcggtgcgggaggtggaggaggccgcggcggtgggcggtgaggccgtgaagggggcggtgacggaggcggagaaggaggtcgccagcgagggcctgcagctggtggccggcgcggagctcgccggggacgggctagtgcaagccgcggtggtcgccggcgccgaggcgctcggggtcgtcgtgggcctatccgtggtaaatggtatcctgaagcccgaggcctagatggtgtaggctgctgggccttgtagtttcggccgaatacaagtgtttgggctttaacgcttcgttgtcggatgacctcttcttttgtgtgtaaattgttattattataacaattattggagtgcggatatgggcagctagaaaagttgtgatcaattgtaatgctgcaggatttgaacaccaaacatg

SEQ ID NO: 331084 - DNA, 476 bp, Zea mays
gtaccggtcctgaattccctggtcgacgcacgcgtccgcggacgcgtgggtgcggttactccaggaactagtgcttttttctgaaatgccagaggggggaagcgatatgtggggagactgggagctaccaaggcagctccggcgcctgattattgaaggcatcgtcttctcacgacagcctcgatggatcaaccgctcctgtctgccacgcctctactccttatatctgatggtgcacgctgttgaagcacaggacctagataatctagcgaggttgccagagctccagtacctcatgctatttggtttcagctggcctccaaggtatactgttggcccagacgacttcaggaatctaaggttctgcgaagtgggcacaacgttcgagtttcgtaagggcgccatgccaaggcttgaagtgctgcgatttggagtttgtgtgccgttcgagcagttcccaacgaaggatgtgatcc

SEQ ID NO: 331085 - DNA, 165 bp, Zea mays
cccgtgtcgacccactcgtccgtaaagatttgataaactgttgcttagcctgacaatcggaagagtttaaatgttaaagagttgataaaaaaaagacataatggaaataaaaaaccaaaaaaaaaaaaaaaacaaaaacaaaaactaaaaaaacattaccaacaa

SEQ ID NO: 331086 - DNA, 398 bp, Zea mays
cagacgcgtggggccgctaagatcgacgcgccgactactaaccgcggcggcggcaaggtgcgagcaagccgaccggctgaggcaggacaagggcggtcactcgaagctggcgtgcccgatctgacgaaccctggagcccgacatgctaattcatgcagatccaccacgaggcgcgccaccccaagctaccattcgagccggagaagctcctcaacctgcactcctgcagccacgctgctgctgccgacgtcgtcgtcacttgcgaggccatcacctgcaagcccaagcccggcgtacgcagcagcctcaagaagtaagctcgctggcttggatggctcgcccgcctgcatggggcacaattccatgcggtttcaatcccatccgacgacccgatctat

SEQ ID NO: 331087 - DNA, 437 bp, Zea mays
attaccttttgcttcactgttgtctcttacattggcagattgtatgatataatagatagacattttaaccatatgcgattctcttgcaggttgttatgttgctccttaccataatttttgctgtagtccatagtggtatggcaagcctacgggaaagtggtgagaaaatagtgggggagcgtgtttaccgtgtgctgttcgctggaatttcactgcctttagcagttactactattgtgagtccttggtgctcttttcccaaaggcagatatacctcaatgattaacaaatcttactgtgccttatacagtttccatatcttttcaggtatacttcataaatcatcggtatgatggtactcaattatggcaagttcagggaatcactggcattcatgagcttctttggttctcgtcgttcatttcgttcttctttct

SEQ ID NO: 331088 - DNA, 374 bp, Zea mays
gaattcccggctggacgcacgcgtccgcttacacgagcgcccacacctccgcgcactctactaagcgactgcactctcctagtacgcacggctgtacaacgactggggggtctccaactacatgcggacactgttctacaactcggtgatcttgttcactatcacactgatagtgctcaacgtcatcacgggcaaccctctgatcaagttcaacaccgaccagatccccatgaacatatagcatgtactgatgcaacacccttaaaagaacggtacctctgaattcgactaccgagcaacatctatactctgcagccccacatacgatccaggaccttacagaattcatatgacgcagatactaagccatacac

SEQ ID NO: 331089 - DNA, 320 bp, Zea mays
gatgcacaagtcctgcaggatgtcgcatgataccatcgtcgtcgtgagcctgaaccgggggaatgcccttgggctgggggcatgccgatgcggttcaacggcgacaccgaaccaagcggatataccaccgagcaagaccgctaggaggaactgccatgctgtcgacggatgctcatacgctctgcaagagctggcagaactgatagctgtcgacgctgactggactaacgatgaatgcatatgtgagttccgagcttaccaccacacagagaacttgatttgtgacatctatcacatcacaagcaacaacgtcgacatgc

SEQ ID NO: 331090 - DNA, 367 bp, Zea mays
acgccatcgcgtccatccgtgccgcggaccttcatggtcaaccacttctacctacactactgccgtaagggaggcctcagatacggatacaaccatcattcttaggaagctcctactttgtcacggtaccgaaaatggctagtctcgctaagaggcctcaaccgctatgctcattcatgatggatacgtacaagaattcttgtgaacagaacacctgtatctgtccagactacgcgtagtttgaatgtaatcatatcatgctgatatacgtcctgtaaaacactggagaatattaatgaggtctgcattgatcctgttctaggggttgaagctgacaacgtccacgacttccgctctaaatgatcca

SEQ ID NO: 331091 - DNA, 62 bp, Zea mays
  unsure (1)..(62): unsure at all n locations
ggtccggaanttcccgggtgcgacggccacgtcgtccggtncnngtcgtgggccctttggcg

SEQ ID NO: 331092 - DNA, 433 bp, Zea mays
accgctctacaggctatctggcgatcacaatgctgagcattcagacccacatagggcgcagcttgctgggcatgccgcatcataatgctattctatctgcctatttatagtcatatttgacatcgtggaagtcttcggggtagatgttggactgaaaagctctcagtttcaggctttcagcctctcctttcttagcactcgtccaagttaagcatcaggagaaacgttgataatctcagaaccaggttactaattacctaactgaagatcatagcatgattccagctatgactcgatgtattaactgacatccttacctgcgaattaacaggggcaaccaatttccaactcaatttataaccttttctataataaagaaaccagtgatgcacattgtagttcacagctagcacttatgatacgcacatgcact

SEQ ID NO: 331093 - DNA, 322 bp, Zea mays
ctagaccattgaccggaccctggtgcccggcgccgagctgcacactgatgtcgaggcgggccacagcgatgacttggtcgaccttatgttgctctgcaacatgtccaggaccgacaactggcacaggcaggatcaccggccaccgtagctcgactgcaagggcacaagcgagggccaggcgacgctgatcagcagttacagtgacggcacaagcagattcagcatgacgccggacgcctgagcaacggtcaagggcatgacccacagcttcatcacggcgcgtgaatgccagctcaaggcaggcacctacggacgactgctc

SEQ ID NO: 331094 - DNA, 435 bp, Zea mays
gtggaaagcaagaactgccttgtggttgaggatagtgttatcggattacaggctgcaaaaggagcagggatgtcatgtataataacatatacaccttcaactgctagccaagatttcaaggatgcaattgctacctatcctgaccttaataatgtcaggcttgaggacctcaagctattactccagaaaactcttgttactggatagcaaagtgtcttgttttcccccaaagaatacattgaaaattttcttgatgcatgataatccacgctattattccctggacgttgaacagttggtgctgggtgttgaacagtagatgaatccaaacatacatcttgttgaacaattggtgctggatggtggaagacatgattactcagatagataattaatgcaactagaaagatagatagttacgattgttaaaacttt

SEQ ID NO: 331095 - DNA, 225 bp, Zea mays
gtccggaattcccgggtcgaccgacgcgttcgcccacgcgttcggacgacttgtttcattgattcttgaagagatcgagcttcttttgcacgacagggtcgaggatgtcttgcaactgcggatcaagctgcggctgcggctcaagctgcaagtgcggcaagaagtaccctgacctggaggagacgagcaccgtcgcgcatgccaccgtcgtcctcggcgtggccc

SEQ ID NO: 331096 - DNA, 262 bp, Zea mays
cttcggcgccacgcccggcgggctctgcgcattccctcgatacaaacgctctaaaccggatagcaacaatcaactggaggctcacacactcaccattgtccatacctccgtagataaccgccatgtttgcatacacatgatttacaacgcatttgaccgaaatatctgctgtaacacacggcagagcaattctctacaacgctatatgggacgaactccatagcactgttcatgctgtgcaccatatgactaccaaaacgcc

SEQ ID NO: 331097 - DNA, 358 bp, Zea mays
ggcatgcgcaaggccggccacctgctccacgtcgagcggccgtgcgcctacaaccgccaggggcagaggtggttcgcctacgtcaactccacagaagaccacgtccaggccagatgatcgacgcgcccgccccgctcctgctgccgctgatgcatgctgctacacggagatcacatgcatacatatatacacgttccgtctcagttgatattaattacctgtgcattggtgctgttcgttattgatgttgctattagctgcggctcccaagatagaagacgctggcagggcatccaacacactgtatgtatgtagtgggttgcgctggccccggttcagtacgtgtactctcgatcaa

SEQ ID NO: 331098 - DNA, 147 bp, Zea mays
gatccttggatgcttaatgctggttactcattgacttcagatacagcaggtgttcaggtgcgttgcatggatgcccctggtgacattattagaatctggatgcatggctgacttgaagaacgaatacgcttgacaccatcagaagtc

SEQ ID NO: 331099 - DNA, 199 bp, Zea mays
gacaagatatatacacaatcttcacgcggtgtagccatgtgtttgctaggaaccttctgtagagcaggaacctggataggaatggcatgatcacctgcatgaggttccaccgtactggctgctcaagaacccgagcgtcatctggttccggatcatcagctggctggcgacggacagattcataatcatcaaccgttac

SEQ ID NO: 331100 - DNA, 261 bp, Zea mays
ttctgggtatcgtctctatgatcctccttacagtcactgggtacatgactggtgcactggcatagctgcaccttgctgctgaacaccatgattcacactaccatgtcatacactttcggaggatcaactgaatccctccagtactgctactggctgatctactactacgcgcgatccgacatatctacctccatgcatacatgcctcttgattgagtacatcgtctggctctgctatgcattctgattaatgctagagata

SEQ ID NO: 331101 - DNA, 389 bp, Zea mays
attaccggtccgacccacgcttccgtaaacttatcctttcaaccctaacgttattctactccgcttaccacccttttgctcacctggctggattcccctgactatgatgccgcattcacatcgttgcttcatgatctggcaatttccatgctatcccactgaatggccagtttataacactggccccagtccttgtctgccaatgttccaaaatgctagagaatggtgttcatagtgctaggaagcttcctgctgcaacgatgtactcatccaaacacctgcttctaccaatatatggatgattgctggatgtatggcccaattgattacccctttttggcaaaaataaatgtctttgaccatcaatacattatctttgactaatgtat

SEQ ID NO: 331102 - DNA, 366 bp, Zea mays
cgctatcaggtttggccggctgacaaggatatacctgcgcgttgccaccgaggctgtgacaggggttaccgtcaatgtcacaccggactaggctgcctgctataacctaattgacatgctttggacttctgcttgtgcattcctactcatggctgttctgggctacatggaccagaatctggcttccaccggcttatccttgaccattgcgcctatcatatcagtctcctacgtccttattaccgttaccgactagtctatcaacctcatctacaatatgtacaacgcgcagagttactgcaccctctttgtcgacctaatcctctacatgtttgagaccgactgggctactagaggcatcgattt

SEQ ID NO: 331103 - DNA, 108 bp, Zea mays
gggtcgacccacgcgttcggtctcatgcgcaatccatgcgcacattgtccgtgtccgctctcgtgagaacaggaggaaccgggagcgccctcagagtttatgcgccgg

SEQ ID NO: 331104 - DNA, 304 bp, Zea mays
ggaattcccgggtcgacccacgcgtacgggagcccgttcttcggcggctacggttacggttggtcgccgttcagcttcttggcccccgggccgagcgtcgccgtcggggtcgtcggcggtttcaacacgctcgtcctcttcttggtgctgggcgccaacgtcggaactgacaggcggttcctcaacaggaacaacgaccattacgacgactactgtttatcagtgccaggctccttgtacgcacttcacctccgtgtgtaaaatatatattacgaaattcttcccgtgcggaattttaggaacg

SEQ ID NO: 331105 - DNA, 346 bp, Zea mays
ctcacaggctaagagaagtctactagcatcaaagcagatttgcagatagaccttgtgcaaggcatggagactttcacccaggagcatgtcatcggaattccattgacttcgtttgcatatgcccatgaggcacgacgacgaaaatcttgctgatgtgacatggttcatagaaaacatctgaagagtatcttcattcatctgatgaacacactgagccatataacagatagctacatgcaaggattcaaagaacacttaaccatgggaccaaaaatttcagaaactgtacaagggagactaagcttcggtgcacaggttctccaaagctgcggtattgataaaggct

SEQ ID NO: 331106 - DNA, 430 bp, Zea mays
cccacgcgtccgtccacgcgtccgcccacgcgttcgcccacgcgtacggctgaaggtgcgcaatccttttatgatgggcagagatctgatacaatggttggtctacaaaagcagtccatcaaggagtctaggtagcaacctaatactgaacgaactgaaactatatacgataattataatctttctcggacattagaaggtcttgaacaaagtgtacatgaagacattattgtgctatccaaggaactacacgaggctgaggatgctgaaaattctagacacatggagagattgaaggatataaatacacagtaccaggagatactattaacacttagagctcggctagcgaactatacagatgagttgctgctcaaggaatctctagcacgccagcagcaataccagcacgccatcatgagccattatg

SEQ ID NO: 331107 - DNA, 406 bp, Zea mays
tccagacgtgcctaggccactgacatacttctactctgtctgtcacctcaactaatccatggtcagcttgtactccacaatgctattgactggctggacaacttctgacattcagagcgcaaagcttgtgaatgttgcttgtccatctgcttgagtcaggattgaaatccactgtactactgcaggtctattcatatggtcgcttgatgcacccgtcctattttccgacatggaattctaacttcatccatcgatagcctcaagcatctcacgcttcaactgtggtatctaatatattctatcaagtttattgcccttaaaacatgcttctagccacgtttgaccatggcatgaagttcgcatacttaataacatgcgaatctaagcattgtgccactatcttaac

SEQ ID NO: 331108 - DNA, 179 bp, Zea mays
cccacacgtccggccaggctgacggccgctgacctgacatgtcatgcgcaccttacgctgggcacaggcgcgcatgccgctcgactgtaacggatcactgcgctgtctgtcgcactaatcaccgtgctcgcgctacgatctccgcgccagcatctctaccatgtgtcattgcacatcgt

SEQ ID NO: 331109 - DNA, 336 bp, Zea mays
agacaagtggtttccaaagccaagtgtgtgtactagcaaccagctagctcgggcggcagcaggcagccatcatgtcggaggagaagcaccaccacttcttcaaccaccacaagaaggacgaggagcagcccgccggcgagtacgggtactccgagaccgaggtggtcaccgccaccggcgagggcgagtacgagaggtacaagaaggaggagaaggagcacaagcacaagcagcacctcggcgaggccggcgccatcgccgccggcgccttcgcactctacgagaagcacgaggcgaagaaggaccccgagcacgcgcacaggcacaagatcacgg

SEQ ID NO: 331110 - DNA, 465 bp, Zea mays
accggtctcggaattcccggctcgacccactcgtccgcccactcttccggcttcaactaacaacgttactaagatcaaccctgacacgatggcacgggtcatttacttgcacatcatgcgcatagttccctactctgatcatgtaccaatggctgatgaaaccaccttgctggctaattcgtatggaaaacatgaactaactcaacgaatacatcatccaagaacacttatggacaatagtattcgttcataccgagagcactaaatccatcatctgtctcacgcaaaagctccacatactcagctcaagcaacccttatacttacttcatactcgctgaagacaccatctcaaaccaccttcaaacttacctcctgaatgcaatccataacgttcatgcatacctatatcgccttccactcatcatacactggtatcctatctatatacagacacatatgatat

SEQ ID NO: 331111 - DNA, 155 bp, Zea mays
cctgaaagaaacgattatatatgtctttcatcatatataatgaatggtcctcgattgaatggccaacaagcaaaccaatccaatggacctcggaataattactaccatggcatggaaaactattaacaacaaaatggttgaacctgaccattcca

SEQ ID NO: 331112 - DNA, 290 bp, Zea mays
cgaagccgaagcgaagagaaaggtcgaggcgggaggaccgcgatcccgtccgcggtcgtgcacggcccacatccgccgtagcgtgggcgtgcgcagctggccagcctattacgtgtacgtgcgggaggagctgtcagtagcgtgcggaccaccacgcagatgctgccgtctggcgaccgatctctgattcattgatgctttcgtgaaatgctcccgccagcgaacttctcctgtacgcgtgcatcaatgcttcttctactactatgccttttgtttatttttaaggagac

SEQ ID NO: 331113 - DNA, 328 bp, Zea mays
tcacacattattacctacatcgcctacttcaacatctacactgatctgctacccaacttcctaaatgaacccttcaacatctatgctcaattccgcgataacttccatttctacatcttcaaatctacagatatcatacaagaaaaccccacttaccatacataattcgatcaataaagctctcgtgacataatggcatactcctttctacagatgaattgaaatgttgtagcacatttacccaacatgctacatagctaccattgactttatactcaatgctgaatactaaatacttcttactacaattgcctatttcgtacctaat

SEQ ID NO: 331114 - DNA, 247 bp, Zea mays
ctaccagcgactcagcgagcgagagcagcacacactgcacgcagctagctaggagcagcagcagcggcggcgatggcggcctccatgatctcctcgtcagctctggcggtggcgcctcagggcctgccgcccctcggccgccgcgcctcctccttcgccgtcgtctgctccaagaagaagatcaagaccgacaagccctacgggattgggggtggcctgaccgtcgacgtcgacgccaacgggagaa

SEQ ID NO: 331115 - DNA, 249 bp, Zea mays
gacggggaaggaggccacacccgccgatcctggccgaaccacccactgacgagccgggggggacggctgctccagtcgcaagagaccacaccatggccgggtctggaacatcggatgcgccaaaacgctcgtgtgctcaagcacgagcaccgcgcgagggctggctatagactgcctgagcacgctcgaggcatccattagcgcacccgagaggcagaggcaatgactgcacgctgatgatagtgggat

SEQ ID NO: 331116 - DNA, 466 bp, Zea mays
cccacgcgtccggtcacaggcaaagcagatgcagatgctgatgcagccaagggactacggggagcgtgccttgaactatctggttgcgacgtcgagcacctggatacacccgcacatctgcgtcacgggcgcgaccaagcaactgaaagacctccttgagcttgagcacctcaacttccaacgcaccgctactaagggacagcaaggtacccgagagagaaaaagcgacgaatccattgccgccgccgctgctcgggctcgcagcggtggtttcctgatgataaacgggtggctgatagttcatggggtgcgtgctgcagttgtgctcacggtttgctgcggggccatgttcttcagcagcagcagcagatgaagaaatctagcagtgcctacccctaatttttgcatacacaagccacagtcacaatgtaattgtcaagtcttactgatggatctggctagcact

SEQ ID NO: 331117 - DNA, 346 bp, Zea mays
ccaacccttccggccccccaacctgttttcagaagctttttgtcccggcccattaaggggtcccttcaaaacccgggcccaccgccgaaagggaaggcccccttgccaacaaacccaaaggcctaaaacccgccgccattcggccccaaaaaaggccccaagttgaaaatcctgaggcggaagtcctactgttccaacggaatcggcaccttcttaaccttcaataaggatcttaaaaccctttacccgttgttgttccgtttaaccaagttgaactaccccggcttgtttaccaacaattacgctttgaacaagatctttaaggtgaatttattaaggccatttt

SEQ ID NO: 331118 - DNA, 327 bp, Zea mays
gaattccctggccgaccgcactcatacgctcactcgtacccccactcattccatcgattccttcaagataatccacagcatgtgacacgtgatctaactctagctcaactacctttccaaatacctaccacatccactcccagactatcccaaacataaacccatgccaataaatgcacatgatcaaccaagtacaattccctctaagtcttatgaaccataagaaatgaaccctataccctgtacacttcctacaaatcataaccgttatgccactcaaaaaactcctattcccaatcagacactagcatcataaatatcactaac

SEQ ID NO: 331119 - DNA, 174 bp, Zea mays
gaattcccggccgacgcacgcgtactctgcgcgagctcctcagaagtcaacatttacatctacttctgtctctgaaaggcatgtacaatttatctatgacattatctaactctaccacccaaatactgtacacacataatctctcatacataatctaccggctctacatctcat

SEQ ID NO: 331120 - DNA, 196 bp, Zea mays
attcccggtcgacgcactcttccgctgctattatgtcactaatacctaagacctatccgttctgtggctcaaaacttggacttggcatgattccaaaatctcatatccttcctatttcacctcccttgcccttttactcatcttacttgcctttctctctttaccttctccctctattccttcatttgaatcccat

SEQ ID NO: 331121 - DNA, 350 bp, Zea mays
  unsure (1)..(350): unsure at all n locations
gtactcggtctctggaattcccgggcctcgttgtctggtcgtgatgctgtactcatgtaaccgatatgcccaaatattcttggtgccctctcctcagaagggaaccgaacgtggacgtgagttttgctcgttccagttccatggtatgcnnntctgtttcagcatanttatgtagtnntgtgtctacctggttttttnnggcagttgttacaaannaaaaaaagaaaaataaaaaaagagggcctggctgcttcttagaggactccaanngtcttacgtacccgcgtgcattttgcgacgtcattagctttcttctattagtggtgcacctttaaattcaattcacttgn

SEQ ID NO: 331122 - DNA, 461 bp, Zea mays
  unsure (1)..(461): unsure at all n locations
gaattcccgggtcgacgcacgcgtccgcccacgcgtacgcacacacacagagagagtcaagtggtttccaaagccaagtgtgtactagcagtttagcaacgagctagcgcgggctgcagcacgcagccatcatgtcggacgagaagcaccaccacttgttgatccaccacaagaatgacgatggagcagccctacgtcgagtacagttacttcgagaccgatgtgtgtaccgccacctgacggggctagtaccagatggacagtgtgtgtcgagaagagctctggtacactcagaatatctgcgagacacattgacttgaagcatgtgattgctgatacaattggtcttacaggtcttggaagcctnctttctattttcagcagcatatgttcgtgcttatcttctgctgctgtaccttgctttgatcactcctatcatccatgacttctacaactacgat

SEQ ID NO: 331123 - DNA, 376 bp, Zea mays
cccacgcgtccgcccacgcgtccggcgggcgacagcatcagcttcttcggcgtccgccgggacgaccaggaggagtctcacgtcgcggtcgtcggagggacggggcggtccagtggcgcttccggctttgccgttgtcagagctgctggtggtgtaccagaaacggttgggaataatgtcagcctaaccaaattgctaagtttcaaggggcatttcaagtaaaaggctgcaaaatttgcagaaacacttactgtgttgcaaagcttcaatgtttttggaagtcaacttctgatcacaaatgtatccagaaaactgctcatatactgtatacgagactgatatttttcacttgagaatggggaatttgtgcactgtc

SEQ ID NO: 331124 - DNA, 500 bp, Zea mays
  unsure (1)..(500): unsure at all n locations
ggaattacccgggtgcgacgccacgtccgtccgcaacactaccggggtaaaacgcgggctatgtagcactctgagtgatcgcgctgcatatctgtggtagagggccnagttcgcctgccgagtagtcatcgatgcaagggctgagacanagcacaggcagattatacgaagaattgcttaaaccagtggtgagtgatttcntgatttgtatgaacttcaattacttctgtatgcagcatcatcnttcatatatgctatatcntgctagattatctgtatgacactcccttcctgttgctcactggaacatgtttgtacctcaacttgggagatatttttgtacggctaggccttattctaagaaaacatcaatttaaatgtgggacagagagtttaaggtaaatgaaaatttgaatatcctgttgacttgacacatcattcatttgtgcctagataaaaaggaacgccttcgacttatctactactactacaaacacaaa

SEQ ID NO: 331125 - DNA, 53 bp, Zea mays
agctactccattgcattatagacctctactctgtatgcacatatataccacaa

SEQ ID NO: 331126 - DNA, 258 bp, Zea mays
cgcgttcgacggacgcttctgcggcccctgtaccaatccttgaataacatcatcagcgatgatcggggtgagatgtcgggggcagattcggacaggttcacattcatcatccagctggtggagagcctacactagctcgtacataggcctatgtagcaaatagccgattcatacactatcatggacattacagacacttacgtgacttacatcaggttcctgtccactgaactaatcacccctaccaataacataaca

SEQ ID NO: 331127 - DNA, 347 bp, Zea mays
cccacgcgtccggcggctgcgcggtggtgttgagggccggtcctgggccgctgtccgatgtcgagcccggcctggatgaggactccatcgacgtgtaccgtaccaaccgcatcatccctgaggacttccagtacaggaagtattactgacactacacctatctcgaacgccaagacacgatcggcttctgggaggatgtcttcgaatgctaccatcaagctgatccttctgaactcttccaagcactcatcttctcagcatttcctcttgctatcatactgtgtatgatctgtcaaagtgcctgatgagtacctatacatctttaccgtcgacatgatcatagtcat

SEQ ID NO: 331128 - DNA, 343 bp, Zea mays
gttacacatcacttagtacgatccaagcggtctagatcacgtgtcagcgtcgacgtaccgggaaggtaaggctctgagactgatgctgtggcatacatacgttcacgagcggctgatgagctagatctaaagacatcttataaactctgccgtcgttgtcattgactatcgaagcgcaaggccgcagtcctagagctatacatagctaaggctgatgaagttctcacttcatggagcactgatatgatcattgtactcgtggagcacctagctgaccttgttgacgtgcagcatgcatggatatacgaaggagaccgcaaggctgaagaccttgaaggcatgt

SEQ ID NO: 331129 - DNA, 308 bp, Zea mays
ttcccgggtcgacgcacgcgtccggcacgcctttagctcggtacttcctgcagtccatgctccgtcactcacaccttggcccgggttaaccttgggacggccagggcctaccagatcaccgcggtctccagcatgctactcccgcagaccttactatcaaacacgtcggcaacgccgcaagtactagggctcgtcttgtgattgcaccggctctgcttgcgctcttgccagtagagcatcactcacataatgacgcgctcatatacaagtgccacatctagatacacctacactgtcactacttgatc

SEQ ID NO: 331130 - DNA, 83 bp, Zea mays
aattcccggctcgacccactcgtcctctgactcgtgcgaaaaaaaaaaaactaattaaaaaaaaaaaaaaaaaaaaaaaaata

SEQ ID NO: 331131 - DNA, 406 bp, Zea mays
acgacgccttcctttacaccatgtacacataacaaatccttcaatgaagtactcacaatggctattataggggaatcttgcacaacatcgtgatgaacagaaaaataccggcaccactgcgtatatatccttttcactaaggtttgtaccggagctgctcctgcaaattccaagcatgtcgacttgactacttattgtccatagcaaaagccttcctcctggcaatacagactgcaacaactgaagacacttctaactacacacgttcgactagttcactaccccttctatattcgcacatatactgataattatcacaatacgatatccagaaaactacatgattcctgtcatacagtatatactgaaagaccatataccgaattcactgcgtgtatctatatgt

SEQ ID NO: 331132 - DNA, 467 bp, Zea mays
tcccgggtcgactcacgcgtccgatcaagcgtagcctcgctcacggctacggttccaaccgccaccttgctctcagcgaggaggacagatgatgggtcatgaatgctattcaagcaaacactgtaaatttcgtgaaaaggatgaacgagataactcaggcgatgaaaactgctcacaatctcttggactctcaaggcgagacccttgagatcatacaacatctgtggtatgagctacatgtaccattggcatatattggactaccaggacatctacatgataaggccgatctagatcgtgcactgaacgacttgcaagatgaaaaacctatattctatgacatgattacgcataagatgatgatacgacatgtgcactagtgtctttacgattaatgatctaggcatgaagaactattagatgatcgaactgttgagataatatagcatttgtccagtacaaatgca

SEQ ID NO: 331133 - DNA, 438 bp, Zea mays
gattcttgaagagatcgagcttcttttgcaccacaaggtcgaggatgtcttgcaactgcggatcaagctgcggctgcggctcaagctgcaagtgcggcaagaagtaccctgacctggaggagacgagcaccgccgcgcaggccaccgtcgtcctcggcgtggccccggagaagaaggccgcgcccgagttcgtcgaggccgcggcggagtccggcgaggccgcccacggctgcagctgcggtggcaactgcaagtgcgacccctgcaactgctgatcacatcgatcgacgaccatggatatgattattatctatctagcttgtggtggtggttgaacaataataagcgaggccgagctggctgccatacataagtattgtgtggcgtgtgtgagagagagagaaacagagttcttcagtttgctatctctctctgcat

SEQ ID NO: 331134 - DNA, 287 bp, Zea mays
cggactcattgcttcactcacacgtcactttcttaatcagacatacaagcctctcatcaggggtcatttagatggttacatcatatctaacatactcctacaagcacagctacttccatggctcacatatattatcaccttaatccagttacacacaccatactaccagacactactggctcacaatataaccataccactacatccaatacagctatcaatactcactatatcactacacatacttcaattatccaagatacaatcaacatctaccactattctat

SEQ ID NO: 331135 - DNA, 238 bp, Zea mays
agtacatcctcctctactctcgaaacctttctgtagactacctctactgtcaacacaccggcgacttccagggcaagattactgcgaccaccggcctatatctaaactacatttctagatctttacacctactctgatggcgactgatcaaactatcgagaactacaccatgcaaaaccataatgactataacctctacaacccctacatcgtcatctacatatataagtacttaact

SEQ ID NO: 331136 - DNA, 301 bp, Zea mays
gaattcccggcgcgacgccacgcgtcgcgccgtgcgtaaacgttaatagccttgctttttattctaataagctccaacaaccgataggtgtctttaacatgggagctggcattctactgatacatatagacagtacttctcagacacaattcactctgacacaattctaagatagctggtcacaggataacctacaatcacaataccgcttactatccaagatctttacccccaggatatctcgttcccataacaatcccgaaaccaacttattatcgtgtggaccacattatcctcttag

SEQ ID NO: 331137 - DNA, 434 bp, Zea mays
  unsure (1)..(434): unsure at all n locations
tctgcgaggagtacagcagcagcaccgacgccgtcaaggtcaggaaggcggcgtcctgggacctcgcccgggcgctgccccgcgcgcacggcggcaagcagtaccggtacttatctatctgtcactgtgcctatctatctgtcactgtgccctttgtttatcactgctctgctccgctctccgtctaatccgagaacatgatgcatgcttgcacgtacacacacaggcaccttgagggcgcgtcgtccctgccagcgttcgcgccgacggcgttcctgttctgatcatggcgtcggcgacggcggcgactcgtcgtcatccaccacgacgacgacggcggtgaagacaataagaaccaaccaaaaccactacacgaagcatatatacagattactgtcaacgtattgtagaaccaaggatctatngatatatat

SEQ ID NO: 331138 - DNA, 291 bp, Zea mays
  unsure (1)..(291): unsure at all n locations
gcgcggcgccgtcgtacttacgctccagggcgccggagatgggcgcgtnctactacccgcgcaagtgcggttacggtcgctcttgaggagcacgatggcgacagagcggtggcgcctgctcgccagttccgaggagcctgcgatgggcaacaagatgtacgctcacggatttggggagggatcacctgcacgtaaagcggcgatcaagctgccgcacttctttaactacatcgatgtcaacagtgtcctagcacagcttgagagttacaatacggaagcgtacttggagct

SEQ ID NO: 331139 - DNA, 440 bp, Zea mays
cccacgcgtccggcccgccggcgagtacgggtactccgagaccgaggtggtcaccgccaccggcgagggcgagtacgagaggtacaagaaggaggagaaggagcacaagcacaagcagcacctcggcgaggccggcgccatcgccgccggcgccttcgcactctacgagaagcacgaggcgaagaaggaccccgagcacgcgcacaggcacaagatcacggaggaggtcgctgccgcggcggccgtcggcgccggcggctacgtattccacgagcaccacgagaagaagaaggaccacaaggacgccgaggaggctagcggcgagaagaagcaccaccacctcttcggctgaccgtagtaccggccggcgcgcgaccgagctagctagctccggcgcacacaaccacacacctggttaattctgtactgcatgcgtgtgt

SEQ ID NO: 331140 - DNA, 388 bp, Zea mays
tggacttcatctacgcagtttcgggtgctttcaactgagagtcatgtgtgtttgttgggggttccttggtactccctccgtttcgttttagttgtccctggatagtgcatatatgaactattcagcgacctctaacgttaaaccgagatattatcatcaacaccatgtacgtgttccctactaccgctactaggcttgcttttctgagcatgagattcagaaagttcatcttgtattacaacacaatgcacggctgctaactgatgccgtaacccgtgaatgcaacactcaacgctacagcagatgtacgagcctccatttataggatgcagtcttaagaactctcaacttcgacatcattcgattgctataccagaacctctaatac

SEQ ID NO: 331141 - DNA, 96 bp, Zea mays
aattcccggctcgacccactcgtccgccaagtctctgcacacctttaaaatcaggttctactcatactacaacgggagatcatgggcgcactttca

SEQ ID NO: 331142 - DNA, 307 bp, Zea mays
cccacgcgtccgcccacgcgtccgttcatgtaaagcatctgagtggaagagaagagaactgcaggttgaaagtggagaatgaaatgctgaaggaggaaaacaataggcttattaggcaggaacagagcaatgctcctgcccctgctccctgtcccagatgcattaatgatgcggtgcacctactgctcgagaaagaagttgaacggctgaaggctgcttaaccagatgctgcaccaagagttgcagctacaaggctcggatggcgaaactcatatctcttcttgactcgctcagagcttatcatggc

SEQ ID NO: 331143 - DNA, 449 bp, Zea mays
ggacgatgatgaggtcgtagtcaaccatacctatggggttgatggacacattcggttggctaagcgaatggtgagtatgtagtattctgttttactcagaaatgaaacaggattgaactcatatatttgcaggaggctcaaactggagttgtcccgagcccaatcgatgtttataggagagggcatcgagcgaaaaacagtgaaatctccgatgagctgtgtagtcaagcggccgttgagcgtatggagacatacgagcaggagatggttaagaagtatggagaagactacgattggcgaggagcgcctaccatcgacgctgaggttgtgcattcacttggcggcaaggcgcatggacgatattctatgtttaccggtgttatcgattcgacggagttgcgttctcgtggcggctcttcgtcgcaagcgggctgtggtagtagcagccg

SEQ ID NO: 331144 - DNA, 132 bp, Zea mays
ggtttaactcttgattagctttgaaattgggagggcacttaagatggtcgagctttataaggaccaggggaaagcctttttcttggaaatggccctaccttacccttggaaggaacttatccggattattaa

SEQ ID NO: 331145 - DNA, 308 bp, Zea mays
cacacacgtgtgctctctctcgtccggtgttcagctggaccacgcttggcgatcattagggcgacatcctgaggtccttgggcgaccacctactcatcagacgttacacactattcgtctatcactatcttgttcgtttaaaggtgatcacattaactgtcaaacttcacactaatgattaagtcgtgatcctagtatagcctggacagcatacatttgccaatctaatgactgtctatactatcttacaaggagacaagatctcctcctccatcactacttcgacaccgacaatatagaccaactac

SEQ ID NO: 331146 - DNA, 431 bp, Zea mays
cccacgcgtacacacacgcgtgcgcggagacccgttcggatcatacagggacccagccagagctacgaagagtgcaagctcaaggagatcaagaacggtcggctcgccatgctggacatcgcacgcttacgattccaacatacggacatccctatctccgtgcctctcgataaccttggcggccagctctgcgaacgctgtcacaacaacatgctgagacatgcatcatccctagatcgatctgccatggacaggaacacaggacgattattactactaggcactacgcactgactgcctacatgcaggagcagctcaacgacgacgactgcgaatctaggacttccgtcccctccggaaagctctgcgcatgtaaaggaaaaggaaattggaaccatgtagcgcacttatagcatgcatgacagcaatcg

SEQ ID NO: 331147 - DNA, 467 bp, Zea mays
gaccatcgcgcaccagtttttaggcagcccttcgctctacgaccaccagggcgctatctggagggctctaggcgctcatcaacgctcccaaccaactgtaattagccttgcacggaagctaccaacaggtgatctgtataccatcaagaaagatgacaatggccaggaatacttggacgacaatgacctgacttataacgatctgccgatccaacaggcgcagagaacagaccacatactatgccatctgctgtggaacatctgtcaaaagaagttatgccagttacatactaaaaacttgtggccaacattcccatatctataaacatgacatcagtagggcccaattatgttgcatccgtactggtggtttgatcatttgcagttaccgaaacagcgaaactttaatggtatgtttatggagtactgtgctacatgactcttgcatatcgagcatggtgtaaaat

SEQ ID NO: 331148 - DNA, 463 bp, Zea mays
ccgagcctgcccagctgctctcatttctctctgcctctcgcgctgggcgggccgtcttgggggctgtcaaggtctccagccgagctcctccctgccgcagccaccacatgggcgctcatctccctactccatggcggcacctcctactccgtggtagcgagctcgcccctgtattcctgctcgcccagccctactctgctgatagccggtggccgacgacgtcgatttcagctccctggacgtgcgcccctgatccccatgtcccagctcctccccacctcctacatggtcggcgccatccccagcgctccctgctccagcacgtgtccatggccgtcaagtccctcccatggtcgagcacgtccctgcgttccgatgttggacaccggactgcgctgctcgtcctcaacctcgctgatgctattttactggtgcatgtcctcgccctacgccattgaacaac

SEQ ID NO: 331149 - DNA, 326 bp, Zea mays
ccggttcggaatcgacgccacgcgtccggtgacgcgtgcgtgctagagatgaccctgtgcgacagtcaccacgtctgctctgctcagagaatcacgtgccagtcgtgaccatgctcacaattctttacccaccgtactcagaacattctagggagacgctggcctatatgaaacttgatccataatcagtctcagaacgcgaagaagaagtggaagtccctggggcgacgacaacaccacattttgagtctcacgcatggtctcacttctactttagcatatgcgggcctgagactaactcatacataagcaaaggtgcggcagcg

SEQ ID NO: 331150 - DNA, 57 bp, Zea mays
tgagttatttgataacggcgaaatcgatctgctatctccataacggcatacaattct

SEQ ID NO: 331151 - DNA, 76 bp, Zea mays
cctttccgtgtggctggtaatcctttccttcttcaagatcgccatcaacaacggcgtaaggaacttacaattattc

SEQ ID NO: 331152 - DNA, 212 bp, Zea mays
gtgagcgtgtcaacactgatgaaggcgattatgatttgtgagcttgccccatgtgatgggactgttgcctacaatcgtagtgtaatgtgctggtattctcgaatgccatatcccatagtctgccatggcttggaataacatagtgtctgactgatatgtcacgaggcactttatgtagtacttacagaactactacaatgttgtactataca

SEQ ID NO: 331153 - DNA, 129 bp, Zea mays
gattcccgggtcgacgcacgcgtacggtccccgactgctctctactctctattgttgacgactgggctaccttctacacagctgcgctacgctatgtattcaggtcgcgtgctctatacttgtacctaa

SEQ ID NO: 331154 - DNA, 204 bp, Zea mays
cggacgcgtgggcggacgcgtgggctcagttttcatgggcctttctgttcctcaatactgcaatgagtacacatctattgctggttatggtcctgttcacacacattcaagatgggtatgtaacatttgttctttttttccgtgaaatcttacaattctgtggaaagataaataaagtactcacatcggttgtcttgttcaaaa

SEQ ID NO: 331155 - DNA, 371 bp, Zea mays
cggacgcgtgggcaaaagtagatgataccagaagccagaaaccatcagacaacacgcccggtgatgatggtgtatgcgaacaatctgcagcggagatggaagatagcggcacaaaagctttgccgtaccaatcggaaaaggaattgactgaagaaaccattgatccgatcaccgcagcacaggctacacctgaatcaattgctgagacaaatgatgacagcacagtcagtgaggctatacagacaccggaaacatttcctgaggaagaacagcagcaacaaatgaaagaagtgaacgatgaatcaacgaatggactggatcatctcatgaaccccagtaacccgaatgatttgagaaacccacatatggat

SEQ ID NO: 331156 - DNA, 340 bp, Zea mays
cgccaacgttgcagcctaccgggcctactttcgacgccgcgaactcatacacctcggtgggcgaaatcggtaaacgccactgtcacctaggcatcaaaattctcatgggcatgtgccttaacaattctatcgacctcgccaacgccaccattccattgactcacggcttgtactacaaaccccttgagtcttgtaccaaagccctaatctctttgttaaacatcattaagccattttttgtccttttttatttaaacccctttttcataataaaacctttctgaaaccttttttctaaatattattttggaatatccttatccttattttttggcttttt

SEQ ID NO: 331157 - DNA, 298 bp, Zea mays
ggaagctgttgttgctgccaaggctgctggagatgacatggttttggtcaactaggtaagataacctttcgcttcatttatttgttagtgcttgtgttcgtaagtttttctagtcttgtatcctaaaaccgtactactctgtttatgtcctcttgttcttgctttgttttagcatatctgtgagatgcattgccactttttgtactgctcaccttctgttttgacctggtcatggcagttcacaaaaagatggaatatatctgtaccaaagtttcaatttattatggacagttagttc

SEQ ID NO: 331158 - DNA, 317 bp, Zea mays
tcccgacccaacccacccgtccgccagatccctccacccttcatgatttaatataacttgacatggtaaacgattgtgcatggtccattcctttgcaccctggacaacaaagctactcactaccaaacaactttcttccgcatatgccgagaacaacccacgaacaagattacaggtcatcctctatatattaacaaacgcctggaccactcaacattcaacccccatctttcagtcacaatcatcgagagcctttatgcggccatataatagcaaaccacctctatccaaaacaaccttgatgaaccctttctcca

SEQ ID NO: 331159 - DNA, 468 bp, Zea mays
atagtccggtcactgtggagccagcaggagtggaagttgcagtttttcgtcagatagacgtggagtctattctccagcttcttgcgcagcgagggctctgcagcgtgctggtggacttcagagaggccggcgaaagcttcgcgtcgcttctgaacgacttccaggaggacaagctggtgcagaaggtcgtcgttgaggtcctgcccttttggctcgcgagcgacgggctcagcaacctggcatttggtggcagccaatcgttcccgttgaagaacttggagctcagggatgtgaatgggagtgtgctgctggaaggctatgtgtaatagcctctcttctgtcggagattggcattgtttgttttccctcgtgtaaacagatagccctgtaatatacttgcaagagccgccacgagccatgtgggggtttgcttttttatatatatagttgaaaatcaatgccatgcgt

SEQ ID NO: 331160 - DNA, 358 bp, Zea mays
gtcttacgatgttgtggggactcaaattgtccagacaggtgttcctgcttccaaagcgggtctaattcgaggaatggagggttcaattgcaagccttgctgagctagtcatgcttgctatggctataattgcaaatgatgtgtcccatttcggcttcctggccatcctgtatgagtcatcacttgctggtgcagcatggatgttctgtcagtggttaacaaatccaacacatgatcaaagggaactatttatggttgatcccctatatcaagttcaggcaatatattggatgacgcatgaaacaaccaggaaaactgcatgcgcctacttgctggtggtgcttggctgatctgcaata

SEQ ID NO: 331161 - DNA, 278 bp, Zea mays
cccacgcgtccgcccacgcgtccggttcgtcaagaaccgggagctggaggtgatccactgccgctgggccatgctgggcgcgctcggctgcgtcttcccggagcttctcgcccgcaacggcgtcaagttcggcgaggccgtgtggttcaaggccggctcccagatcttcagcgagggcgggctggactacctcgggaacccgagcctcatccacgcgcagagcatccttgccatctgggcctgccaagtcgtgctcatgggcgccgtcgagggctacc

SEQ ID NO: 331162 - DNA, 440 bp, Zea mays
gccatgcgatcggcgacagtatctggcataaggccaatatggctcacgagagggacgccgagaaagacatgtcgtgagaggcagacagttgggaggcaaccctaaagacatgaacataccacgcatgatctgcatgcgtaccttcatctgcaccacctccaatgcctagtgccatgaacatgcagacgcgacgtatccaagcaacgacctctaccagtgatttcgcaacctcaagaatgatcttgcactagaagcatatgatctggtcagctaaaagacaagtactacatatatatatctacactgggtgtaaatgaatgggttgttagctgatgctgatgcagatggctcatacgtggatcccaatgtgattacgtactgtgacccttgactggcaacgaactgtgcataaaaccaaaaaaaaaaaaaaaacccacgcg

SEQ ID NO: 331163 - DNA, 199 bp, Zea mays
cggacgcgtgggagatgcagcccctcgcgccggcggggtaccgccgcgcgccggagatggaggagaaggtggaggcgtcggtggtggacctggaggccgggaccggggagactctgtacccggggatctctcgctgggagagtgcatgttcgatggggctacgttcgcaaggtctacagcatactcgctgcacagctgc

SEQ ID NO: 331164 - DNA, 218 bp, Zea mays
gagcttgctcgctgacctagtcctacctattgacttgcttgccatggcctgcatctactgtgacgacgtcaccgggcttggcttcagcttacccttatcagaccactccgtgatcagaaggatgttcttcatcatgctcgcctatctcctcaaggccaccagcatcgcctacatggtaaaggctgacatcgccctgtttgctctgcgggctcaacacc

SEQ ID NO: 331165 - DNA, 96 bp, Zea mays
cccgggtcgaccaacccgtccgatcccaaaagcctcgaacccctttcttttttccttcggcggcggttggcaccccagggaacagccacattggcc

SEQ ID NO: 331166 - DNA, 84 bp, Zea mays
ctcccccatggtcgacccggagctcgaggcgctcgaggccgggcccgggctcccgcaggcgcggctccgaagagttcaagccct

SEQ ID NO: 331167 - DNA, 157 bp, Zea mays
gttcttgaaccaatcggcttattggtgatgattaatcaagagggggcgtccatcatgccggaaccagaaccggttcaatgatctacaagccggagataatggccattggactggtttccatgtattggaagcaagttaagattgatccacaagattt

SEQ ID NO: 331168 - DNA, 115 bp, Zea mays
  unsure (1)..(115): unsure at all n locations
cccacgcgtccggctgtcctctgtgctatccgctagggtttatctgctcgaggaatggcgtcngtgcaggtctccggcgcgggggtcggtgccgcggccttctctgtgaaaggga

SEQ ID NO: 331169 - DNA, 153 bp, Zea mays
ttccaaagaggagggccgggcccgggcccggacccggaacccgaaaggttaagggggtaaccccgaattcaacaataaacctcacaaagcgcctccccggttgccacctcaaaaaaaaggccccgaatgccatcaaggagatcaggaagttcg

SEQ ID NO: 331170 - DNA, 172 bp, Zea mays
cggtccggaatttccggggtggacgccacccttccgaaaaaagtgttggggccgccgttctggaggattaaaaaagaaggttccaccaaccgggggtggcaagaagccgccaacccctttggccacccccggaattgccccgaaccacccaaaaaactcgggggttggggcc

SEQ ID NO: 331171 - DNA, 183 bp, Zea mays
ctcgaactcgagagtctaccataccatctacatctaccaagcaagctacgccgtcggggatggatagcaaagagagaaaggaactcgtcatcgtactaagctcgacatgccgttctgtatgccgtgcctgggatcccacaccggttcctggacctcttcgttgggccggcattcatgacggca

SEQ ID NO: 331172 - DNA, 101 bp, Zea mays
cgcttgcactatgaaaccctgcaggccctatgggcttcatgaagctcaatggggtggtctacggggaggggactaacggacgataccccatgctagggacg

SEQ ID NO: 331173 - DNA, 72 bp, Zea mays
cccttttcttggttagctttggtttcctggggccgaattcttcttcttcttcttcaaccttgttcgttccct

SEQ ID NO: 331174 - DNA, 163 bp, Zea mays
  unsure (1)..(163): unsure at all n locations
cgtccgcccacgcttccgcgcagaattgcagcttaacgatcggatctagcagatttctctcagggtgatctgcggcggcgattagcgtgcggatcggagatggcnacaagcgcgtggaggaggatagcggcggcccggtcctcctggagccccgccacggtgt

SEQ ID NO: 331175 - DNA, 245 bp, Zea mays
cctactcttcctttttctcactatctttccttccttcactccatatcccactgggggggcctataccccgacgcatctaatctgctcccccctcaaggcgaaagtgaccatattgacctcacgctcaccaagcttctcacccggcttttccccaagactgatatctcggatcctgatgcttgcactctccgcccccggaactaccacacttctatacatgcttaaactcgcctagatcctaccac

SEQ ID NO: 331176 - DNA, 351 bp, Zea mays
  unsure (1)..(351): unsure at all n locations
accggtccggaattcccggctcgacgccacgcgtcctcccactcctcctcccacgcgtccttcctctcgttcgcacacacacatanagagactggtggtttccaaagcacaagtgtgtactatcagtctatcaaccagctagcctcgacggcagcaagcagccatcatgtctgaggataagcaccaccactttttcatccaccacaactatgactaggagcaacccgccggcgagtacaggttctccgagaccgaagtggtcaccgacaccggcgagggcgaatgcaataagtacaagaatgatgaaaaagaacacaagcacaatcagcaccttggcgttgccggcgccat

SEQ ID NO: 331177 - DNA, 329 bp, Zea mays
aacagattgacacggtgggaggaaaaagacaatggtcagcaacttactcggagcagagattttttaattgtggtacccgtggtgctgttcaataagagagcatcatagtgttgcataaataagtgtgcttatgattcatatttgctcattgcaaattggagttatttgtgttgtttctttgtatactcaacaaagagatgttaaccacttgtgtttatctcattgccacactcagttatgtcacgtaacttcattttcatgttttattttgttccagcaatgtagtttatctttggtttaatagctctttctttgtaaaacaacatttt

SEQ ID NO: 331178 - DNA, 267 bp, Zea mays
tctccttcccggtctcctccgcccgttgccttcgtcccctccatctccggctgcgtggccggcgagcccgacaccgcgaatcggatccgccgacaaggcgagagggaagagatggggctcacgttcaccaagctgttcagccggctgttcgccaagaaggagatgcggatcctgatggtgggactcgacgccgccggaaagaccaccattctctacaagctgaagctcggcgagatcgtcaccaccattcccaccatcggattcaat

SEQ ID NO: 331179 - DNA, 129 bp, Zea mays
ggggggagggatggaagcctcgggccgggatttccgggttggcccaaggcttccgggaagggaaattggcggtcctgggggcctgaccaaactttccgtggttgttccattcgggggcaatgggctggg

SEQ ID NO: 331180 - DNA, 296 bp, Zea mays
aaaaaacataaataaaaaaaaataaactaaaactacctaaaaataaaaacaagccagaagcggttttaccaggcgaggcgtgcaataaccttatcctcaagttctgcgaagcgcctttccaagtacggcgtctccaaggagctgtcccacgcctgaataccctgatccatccatttttgtccacctcgctgtgtacgtatgtgtaacatatggttttcatctacctgttagagccccgagagcttcttaagcataccagcgtgattacagaataacagcattcaatcaaagccaag

SEQ ID NO: 331181 - DNA, 93 bp, Zea mays
gtgaaatcattttgcatgttaattttcattaacaatgatctagctagctagctagcggcttaattttcattgctgggaaacaagctagctagc

SEQ ID NO: 331182 - DNA, 65 bp, Zea mays
tgagaattgaaaatggaagaggcaccgagaacagtctggaagttctggaaggggtggggtttgaa

SEQ ID NO: 331183 - DNA, 230 bp, Zea mays
cccactcgtcctcgaagcttgccttcttgtttacaccctaaaactaaaactagagtggtcggctgcaacaagcggtacgtacgtataggatgaagagcaggagcagcactctgttggtgatcctagttctccaggcccttctgctctcttcggctgtggccaaaggacctgcatggccgaaaaaacattgtcttgtcggcgagtgcaccatcttgtcaggcgtgtggacc

SEQ ID NO: 331184 - DNA, 54 bp, Zea mays
ccgtgaatcaacctgtaggcagtttgaggagaccagctccaaccgtggtggcta

SEQ ID NO: 331185 - DNA, 306 bp, Zea mays
  unsure (1)..(306): unsure at all n locations
gtaccggaacggaatggccgagccaaggcttccgaacaaataaattgtcgcctcctctggactggcagcattatgcgtctgaattgcctggggggtacttacggagcaaagccctaaacggctntttgttgtacgccagaaattctatgaattactcgagaatggtctcctacctgaaggtgttgtgaataactcgttggctgaattactgatgaagctagatgcggatctgaaacatgatatccggctctgggcccgacattatgaacacccgatgcgcgtgcgatcaaaaggtattcttcatct

SEQ ID NO: 331186 - DNA, 64 bp, Zea mays
gttcaacgataatggtctgggtccacgtacaatccgcttgctcaaggacaagttccccgatatt

SEQ ID NO: 331187 - DNA, 169 bp, Zea mays
gacgaggttcgccgccatcacgagatccttaatgaggatgtcacgctcatcgaatccggcagagttccattccccaactacaacacgcagggaggctggaactaaggagtgaaagatgatgtgaagaaccaccagacaggaactactgctacgcatgaaatagatatct

SEQ ID NO: 331188 - DNA, 145 bp, Zea mays
ctgtcatccgaggaagaagataaaaagtttacagaaaaagagaaagaaaagccaagtgaggacagtatcaaaaaaattctttcaaatcagcgaaacttaaaaaagtattgtaaaataccctccggcaacaaccatgattaaaggc

SEQ ID NO: 331189 - DNA, 279 bp, Zea mays
tgggcccggtttacattccggcccaaattcccgggaacaaaggattccaacgatggtccctgcattttcaccatcaattttgggttctaggcatgcctctatgacatcgaaggggaaatataacattgattattacagccgtgtatctgttctgataggggaggggaactgacaacacacctggcttcaaatgatgatgggagtgcattcctgtgtacattctatacatctgatattacctctgatataaacgtttgacgttatgttaaacaatttgtt

SEQ ID NO: 331190 - DNA, 423 bp, Zea mays
ctgcaacaacaagccaaccgaacaacagcgaagctgctgccgtctccggtctgccaccaccaccgtctgtgttccacgatcctagcagagatcaagagaaaaggagagggagtacagagtctagagagacggagagaataatggacgacaagagcaagaaggggaggcggaggtccacgccggggagccctggctgccctgcggcggggctcaagggccgggggtcccggtccccgcccggccgctcggtgcctggccggctggcgagcctggtgaaggcgcagagggccaggctccacatcgtgcgccgctgcgtcaccatgctcctgggcttgaaggattaacacttactactagtactagcatttaagcaggccctggggtttttttttcttttctgaattggtctcttctggcctggcc

SEQ ID NO: 331191 - DNA, 397 bp, Zea mays
gttctgctggtctttgatcatgactcgtggatgacgatctgaactctgacggtaccagggcacaagtttctttctgaaaaaaaaaattctcccattcgaactgtcttgtaaggctgagcaaaccatagtttctggactaactatgattgttacatgaattttattgccttcatgttagaacttagaatgcagcgtctatgaaacgactggtaatatgtggcctatcccatttcagaaacatttatgtaagttagtatgtgtcactttgaattaggagggtgaaatctgccatgataaccgaaaactgtaacccaagacaagagctttagtttgaagccagcaacaaaatcatagtaggatatgtgagatgtcatgcatttgactatgcctgacatct

SEQ ID NO: 331192 - DNA, 361 bp, Zea mays
gtctgggtagagtacactaccgaggaagctggaggtgctgctctaaaagcaatgaatggacagatcataaacggttggatgatatgacgcgatgctgctaaaactagatcgagagaccgactatctggcggatctaataaagcatcacgaccacactatcaggctacatgactgacatatgtacagaacttacagatggcgagttgagataagtactagagccaggaatagctgggggatgccgagccagctgatctgattgtacttcattgccatcgtcttgtgctaactgctcgtaaatgaatactgccagcagacaattatgtaaatgcagctgaagtgaacgattactaacttgtac

SEQ ID NO: 331193 - DNA, 394 bp, Zea mays
gtgacccccgtgtattgtctatgctagtttctgttgacatacgaagtgtttgtaggtgggaaattttttcagattaaaaaaaaaaaaaaaaaacaaaaaaaaaaaaaaaaaaaaaaaaaaaaaaaaaaaaaaaaaaaaaaaaccaaaaaaaaaaaaacaaaaaaaaaaaaaaaaaaaaaaaaaaaaaaaacatataaataaaaaaaaaaaaactaaaaaaaaaaaaaggggcgccctcttaaaaatccccagtttaaatccccttccattcccatttaaagcctctttaaaacgctcccacaaatctcttttcttggccctccttttaaaaaactggaccttgaaaaacccttagcttaaccaaattaatacccttaaaagaaaaccccctttt

SEQ ID NO: 331194 - DNA, 327 bp, Zea mays
aaaaaaaaaaaaaaaaaaaaaaaaaaaaatttaaaattaaaaaaaaaaaaaaaaaaaaaaaagaaaagggaaaaattaaaaaaaataaaaaaaaaaaaaaaacataaatgcccatccattctaaatgatccttctttacctccccttcctttccacgccttacttttcctattttgtcacctaaattccttttattgtccccctttttacaactccttttctggtaaaacctttgctttccccagtttaatccctttgcatcccatccccctttccccaccttccctattacctaattacccccctcctttcccccttttaaacctt

SEQ ID NO: 331195 - DNA, 367 bp, Zea mays
cccacgcgtccgcagggcgcgtggctgcgtggtggcgatggccgacctgctgggcgacttgggcgcgcgcgaccccttcccggaggagatcgagagccagtttggggagaaggtgctgggcaacgtggacacgctccaccagatcctcatccccaccctctccgcgctctccctcgcgagcctcccgctgcagcccgacgcggagccgctctccctcgacgacgcgcgcaggctcctcttcaaggtcgtcgggtggaggctcgtgctctccgacggcgactgcgacgaacagcggcccgcgcgggtgcagtgcctttggaaggtgcgcgacgagaccttgggtcaggagctcatcgtcaggatcaac

SEQ ID NO: 331196 - DNA, 301 bp, Zea mays
ctgactcgtacgctgatgactactgtgatttccacctacatcttccctgtaaggtggagggtcatctagaccacgaccaactccacgtcagcctaggccgtaaccgaacacgtcaccgagctcaacactgacatcttcattcctatcttctaggctatcggcaacaccgccgtcgacctcgacatgtacatcgacttgtacaccccatgctacgtgccgggtaccatgattccttacattttccataagatcctcgacatcatcttcctcatgctgtacttcaaccagtactacatgcctc

SEQ ID NO: 331197 - DNA, 450 bp, Zea mays
tcggtcactcgatagcggttataatcgccacagtcgaggtactcgcagaatgtatcgtctctctgaacggtgatggtcttactaatctgtaacacgtactttgatgtctcttactggtttgttctccggtggaactttatcaaggcaaaagcacatcagcttatttcacttccttcggtgaacatcgaagactgcgagaacatcccaatttcggaccaagtcatgttaacggccggtaccattgacccatgtgtcgtcgcttgttgtgtagccaatgtctctgaggctgtggcaacgaggtatttcttacaacgcacgtaagcggacaagtcattagacagtcaagccgctcatgtgcacactgatggtgattttgtccaggctgatgagcatcggccacattcagtacgtgggtgcaagaggaaacctgtatctgcagagagtttgatg

SEQ ID NO: 331198 - DNA, 429 bp, Zea mays
cgctgccatctcttccgtttctccctctctccccactcctctctagtggagacagcagcaccattattgacgctaatggcactgacaactccattcctctccccggcgctccctctgctcttccccctctctataaatcgcgagctcatgacccgtggagcctgttcctggctgcccaacctctccacgcgctctgttttctctctcgtcgtggaactcgccgccgccgcccctattcgtcatcgtcggagtcaccgaacacctcctgtcgccagcacgtgggttcccgagcgcctcgtcgatcccgccgccggtgtcccgctgtctcgactgccggttggagttcctgcctcatcgttgaccatcaccagctcgcctgtcgcgctgtgcgtagaaacagagaagagaaggttaaaggtagaagaaaga

SEQ ID NO: 331199 - DNA, 327 bp, Zea mays
tgggctcttcctccccttccggttcgggttcggattcgtgaggttctccggggttcggggtcatgggtcagcggatcgagatggcggcgtccgatgttgagtaccgctgcttcgtcggcggcctcgcctgcgccacggacgaccactccctgcacaacgccttcagcacctacggcgaggtcctcgagtccaagatcatcctcgatcgggagacgcagaggtcccgcggctacggcttcgtcaccttctccacggaagatgcgatgcggaacgccatcgagggcatgaacggcaaggagctggacggtcgcaacatcaccgtcaacg

SEQ ID NO: 331200 - DNA, 452 bp, Zea mays
cccgcgcgtacgcaagcttcgcttcatctgcaacatgtacaggaccgggtgctgggtgcgggagtatcaccggacaccgtcgggcgtctgcaatggcacgagcggatgtcaggcgatgcttatcagatgctacatcgaccgctaaagcatgttcagcatgacgccgtaggcctgcgcagcactgggggccatgacctacagatgcatcaaggcggtggaatgcgagccccatgcggtcacctacggacgtctgctgacctccatgaaatccattatgaccaacgccagcggctgctaccagcatctgaagggcgcttgcgcaaccgcccgctaggtcgtaagcttcagcagaatgcaggaacctaacctgtcttgctcggacatgttcgacggctaccgctagcgctttgcgctgtgaacctggtctgcatcgccatcgcctttgcagacta

SEQ ID NO: 331201 - DNA, 83 bp, Zea mays
aatacccgggccgacccacgcgtacgctcagggagctggacggccgcaacatcactttcaactaggcccagtacctctggggc

SEQ ID NO: 331202 - DNA, 189 bp, Zea mays
gtcgaggttcaacccgatcggcctcgccgtctaccctcaggcctcagcagacgggaacggggacgatttcaagagcgtgtggatcgccatgttcaggatgatcggcttcttcgcccaggccatcgtcaccgccaagggcgacgatcgagaaccatacccgagcacggagttcaaccgcagtgaacaaca

SEQ ID NO: 331203 - DNA, 263 bp, Zea mays
gagaaccaatcttaccagagatgatgttttcgtctctgaagatgtaaaatgtcacggtttccacaagtgtccaaatgcggtactgaagatgcagcagcaactccccactactcatatgagaatggcatccgttctgtttgccgcgcattttaagctgtatatgcttattatgcatttgggcttgtacctcagtcgatatgaacgatgtatcctttgaactaacgcattataatttttgaaaccgttttagccagaaattaaaa

SEQ ID NO: 331204 - DNA, 420 bp, Zea mays
cacggtcctccatcagctgtacgagatgaatcccccagcctacacctggctctatagtgacatttctgtcaacgatccattagatggcgattacttccttcgcttgctcgccaaggagaggcaagacctcgctgagagagtgatgatcacgcgccttcacctatacggcaaatggatcaagagatgcgaccacgcgatgatgtacgagcggatctccaaagagaacctggatatcatgcgccaaaggttggtcgagacagtggtctggccgaccgatgacacaaacttcggcgagtctaaggattgacgcggagcaatagctgcttcaatagatgctgtatattttcttcaatgttttttgactggctcatttctgtatatggcagttctgcatgaatagaacagttgataggggtctgt

SEQ ID NO: 331205 - DNA, 378 bp, Zea mays
  unsure (1)..(378): unsure at all n locations
cgtcggtcctcgcctcctctgctctgttgagctgctctctccctctatcctctctctcgattccacttcttgaccgacacggcaatggcgaagggtgggctgagcaagcttaagtgcatgataaagaggtggcactcctcgagccggatctcgcgcacgccgtcagggtgctcggcgcgctctcacgacgtcggcgacgctggcgccggcttcgctctggagaactcgtggaggaagggcgtcgctgcctcgtccgtctttgccttctgcggcggaggcacggngtcggcatcgttccacggcaccgacggcctgccccgggcctccacaccgtctacgtctgcaagtcgcgccgccgctacctcatcgccgcggacc

SEQ ID NO: 331206 - DNA, 367 bp, Zea mays
ggcacgcgtgcggtcaccggatccatgttcgcattcacctgcccggccgtacgcggagccctacgatgagcaagatgatgctcgatttgtcacacagcctgtcagcatgcatgttgttgttaaccccgtctaaagggcctgataatgtgcatgtgaccatttttatgatgaataacgtcataattaatgctaggtcaacgactatgatcacgttgatgatcatatcatcgtatcgatgatggatccaatccaatgtgcagtcaaatgcagagtcgttgcaagataaaaagggcggacgatctggcggatgctatataagatccaagtttatgtaagcgtgcatgcgacgtattaggtcatctatagt

SEQ ID NO: 331207 - DNA, 381 bp, Zea mays
gctgccccaatctccggtggcgaccatttggaaggaataaaagaaaagaatacaaaagaaaaagaatcgcttttggaggaggatgttgctttgaagaggttcaaatcatacaagaacagtgtgaaacaggtctccaagattgggaatgttctcactttagctgttgtattcggttgtagctacgagcttggtttgttggcggcaagcatgaagtgaaggaaaacacagccattattccgggaagtgatccatcagcgtagactgtcattctatcacctcgtgtttttagcctgtctgtctctctcttattttgtcgtgcaccatgtataaaataaaactaaactaggttaaccttgatttgcgaataacgttttctgtttc

SEQ ID NO: 331208 - DNA, 251 bp, Zea mays
cgcaggcctacggtagcatcgttcacgtgttcctcatgctggacaagctcctgatgcagcgcatcaatgaccagatcacagattattgcacggccattgaaagcgattagagctgacttagtgtgacagcttactttgaactgtataacttgacacgagctgacaaatagaaatccagcgatggctaacgactaggacggtgacgtgagtgtacgagatacagagcatgcactatcgatagcatctgccga

SEQ ID NO: 331209 - DNA, 71 bp, Zea mays
cccacgcgtccgtctgcttgctctggggggaaggagagagagagagagcgagagaaagatctagtagagag

SEQ ID NO: 331210 - DNA, 118 bp, Zea mays
  unsure (1)..(118): unsure at all n locations
ggaanttcccgggctcgactccacgccgtctcgggccgcctcgtctccctcactcgagaggcgtagtatgtcgcanngctgcagctcggtaaaggtcagatgtgtgactgtactcgtc

SEQ ID NO: 331211 - DNA, 460 bp, Zea mays
agctcgacgacgaggttagcgacgacgactcaccagcctgctcctcttccgccactcgacgtctgaaacgtcgccgcgcagttcttgctccggcggcgaaaggggagggcaaggcacaggccgcactggagaacctggaaacagccatggcgaacagcgcacagttcgtcgcgcttctgtgcgggtgtgagcgcctgtcccgtcggacctacgacgcgtacctctacctcgggagtatcatgtttggccgacacgccgagaagcaaaggctcctcaacttcttgctgcagcagcagccaggcgacgactgcgcaccgactaccgtcctaccaatcgtcggcgctcttgcggccgggaagaaaactctggtcggccacgtgtgcgccgacgacagggtgcgctcgaaattcgcttcggggctcatctgagacgagacgacttactcctgaacaccgggcac

SEQ ID NO: 331212 - DNA, 414 bp, Zea mays
ggttcgggttcgtgaggttctccggggttcggtttcgtgggtgagcggatcgagatggcggcgtcggatgttgagtaccgctgcttcgtcggcggcctcgcctgggccacggacgaccactccctccacaacgccttcagcacctacggcgaggtcctcgagtccaagatcatcctcgatcgggagacgcagaggtcccgcggcttcggcttcgtcaccttctccacggaggaggcgatgcggaacgccatcgagggcatgaacggcaaggagctggacggccgcaacatcaccgtcaacgaggcccagtcccgcggcggctgtggaggcggcggcggtgggtacggtggtggccgtggaggcggcggctacggcagtggcgggcgccgtgatggcggcggcggctacggcggt

SEQ ID NO: 331213 - DNA, 450 bp, Zea mays
ggatcatgtctgaatcacttctcaacctttgacgagcaagattgtgtggagtagcaccggaatgatccaagccttttttattttttttcatgatggagatgatgagttctttcccatacaattggagtccagccctatgtgggtcagcgaaactaactttagtcaacaatcagctcaagtacataaaaatgcaccaaatcgtcatgagcccagaatgaacagtacttgaacctggagcattaggattacaacagccaccatgataaacatgctggggagggtggcgctgactgaaggaccggtgaatgggctgcaaactagttgcggaagaccagctaacaaactcctatatggatattcttaggagtattatataatggagatgggctatcgttcctagtgtgacccgactgtagtcgtctgctgattattttgactatctgacaacac

SEQ ID NO: 331214 - DNA, 141 bp, Zea mays
ctcgactgatcgctccgtgccgacttacccttcgatccgctggagctgagcaaggaccgggcggggctcaagtgataccgggaggcgcatctgatccatgggcggtgtgcgagtgccaacgggactgacatcatcctgggg

SEQ ID NO: 331215 - DNA, 77 bp, Zea mays
aattcccggtcgacccacgcgttcccacgcgaacgtggaccggatgtggcacatctggtccactaagctgggcggga

SEQ ID NO: 331216 - DNA, 254 bp, Zea mays
ctccgttcatggattgcaatcctggctaacatcacgatggatgtcgtgtgtgctttaatcaccatctctaaaattgatgccatcggtcacacgattctaagatctatgtcggagttggattccttgcatatacatacacagattacgaagcaaccggtttataacaaacatatgtcttctgttctgcctgttgcccaattctcttttagtgtagcctacttacaataattaaaagaacagctggtgtctggttg

SEQ ID NO: 331217 - DNA, 204 bp, Zea mays
gtggaggcggcggctacggcggtggcgggcgccgtgatggcggcggcggctacggcggaggcggcagctacggtggcggcggcggctacggtggtggcggcagcagctaccgcggtggcaaccgtggcggccgctacggcaactccgacgggaactggaggaactgagcggtggggcccgcgcggccaaagtatcctgttcgct

SEQ ID NO: 331218 - DNA, 389 bp, Zea mays
atgagctcgaggctatgggcagcgacggcgagttcgacggcgacttcgacgacgacttcgacggcgacttcgacgacgaggatctcgatgaattcgaggacgactctgatgatggttctgagcgcgaagccgggccctagcgcggaagacgctgagctgcagagctctgctcgctgcttattgcgttttttggtattttttacggggaattcaaacagaaaaaacagtaagttagaactcaacggatcaatcagtatgtgttgtgctaaaccggttgttgtaatctcctattttgattgggttattcgaaaattgtaccgcgtcaaagaacagatcttggcgtactgtaattcgcagcggtgaaaaatagtatttcatttttttgatgc

SEQ ID NO: 331219 - DNA, 178 bp, Zea mays
gccgacccggagactttcgccaagatccgctagctggaggtgatccactgccgctgggccatgctgggcgcgctcgggtgcgtgttcccggagctgctcgcccgcaacggcgtcaagttcggcgaggccgtgtggttcaaggccgggtcccagatcttcagcgaggggcgggcttgac

SEQ ID NO: 331220 - DNA, 322 bp, Zea mays
  unsure (1)..(322): unsure at all n locations
ccgggcggagcgtcaggttccaggtgaacagcgtgcatacgtgggcgagcgccgcgctgacgaacgacggcatgtgcatggaggggttcaagggccagcccgccgtcgtgagggaggccgtgcggaggaacgtcgccggcgccatgcacctcacggncatcgcgctcgctatcatcaacgccatggccaagcaaatgtagtaggggtacggtatggtgttaccacggacgtgtatagatagcatcgtgtgtggatgccttgtgcatatgtacagtacgtatacgtctctctgtgtgcttgttcttgtctgatgaaatgatca

SEQ ID NO: 331221 - DNA, 59 bp, Zea mays
ctctcgcgtacgtagtttttgcgcttgtcttttttcatttcgtcaaacgaaactcggcc

SEQ ID NO: 331222 - DNA, 144 bp, Zea mays
caagactgctgatcttggtggaaagtcatctacatgaccatgtacaaattccctctggggtgacatattacaatcgggtggcggtcttttcttcctattgttccgccatcccaatatcattttgtcgcatatggggacggactt

SEQ ID NO: 331223 - DNA, 437 bp, Zea mays
  unsure (1)..(437): unsure at all n locations
ctccggngttcgggttcgtgggtgagcggatcgagatggcggcgtcggatgttgagtaccgctgcttcgtcggcggcctcgcctgggccacggacgaccactccctccacaacgccttcagcacctacggcgaggtcctcgagtccaagatcatcctcgatcgggagacgcagaggtcccgcggcttcggcttcgtcaccttctccacggaggaggcgatgcggaacgccatcgagggcatgaacggcaaggagctggacggccgcaacatcaccgtcaacgaggcccagtcccgcggcggccgtggaggcggcggcggtgggtacagtggtggccgtggaggcggcggctaccgcggtggcgggcgccgtgatggcggtggcggctacagcggtggcggcggctactgtggcggcggcggctacagtggtggtggc

SEQ ID NO: 331224 - DNA, 345 bp, Zea mays
  unsure (1)..(345): unsure at all n locations
gcgaccacgctcgctgtgcttcttcttttctcttttgtcgtcagtctggagacaagctggatacgaatctagctgcagtcccaagacctaacctctatgctgagagaccgctgaaggaggggtctcattcttgggagaggaaagcacccgtggaccactgaaacacacactgatcaaaccgaaaggatgtcttcggcggggcatttgagagtttggtcacgggggctatcttcagcgtttattttatttttaacgcaagccttcgcactgaaaaaacaagggtgtccaacncttgcactgtatctgtagcagagccctcctgtcggctatatatatatatgataa

SEQ ID NO: 331225 - DNA, 363 bp, Zea mays
ctagcaaccagctagctcgggcggttgcattcagccatcatgtcggaggagaagcggcaccacttcttcaaccaccacaagaaggacgaggagcatcccgccggcgagtacgggtactccgagaccgatgtggtcaccgccaccggcgagggcgagtacgagaggtacaagaaggaggagaaggagcacaagcacatgcagcacctcggcgaggccggcgccatcgccgccggcgccttcgcactctacgagaagcacgaggcgaagaaggaccccgagcacgcgcacaggcacaagatcacggaggaggtcgttgccgcgggggccgtcggcgccggcggctacgtattccacgagcaccac

SEQ ID NO: 331226 - DNA, 241 bp, Zea mays
  unsure (1)..(241): unsure at all n locations
ctcgccctcgctgttgccctttttgcctacactgttgctagtggctcggctgttactgctcctcgtccttgaagaggcagtcgcgatgtagtattgacggaaattctgggcaagagccagtctaatgtacattctgtgatcagagtctagaaatgttgctgcatgatttgcaataactatagttgtccctgcgtcaaacttcgtcttgtgttcatcagtccgtgtttaaaaaaaaaanaaa

SEQ ID NO: 331227 - DNA, 342 bp, Zea mays
attcccgggtccgacccacgccgtccgcagctaggctagcgttccctcttcttcacctttctaacaccagcagctcgatcgctctgtagtgcagtaatggccgctcgctcctcctgccagcagctggtcccggcggcggcggcagcgagcctggcagcggcgctgctgctgctggcggcgggggccgggacggcgtcggccgccgtgagctgctgcaaggtgacgtcgtcggtggcgccgtgcctcgggtacgcgatgggcagcgcggcgtcctcctacgcggcgtgctgcaacacagtgcgctcactcaacaaccgcgcgtcgtcgacggcggaccagcag

SEQ ID NO: 331228 - DNA, 52 bp, Zea mays
cccacgcgtccggggcgctggaggtgatccatcggccgtgggccattcttgg

SEQ ID NO: 331229 - DNA, 136 bp, Zea mays
cggacgcgtgggctccaggaaagggttcgtactcatggcgccgccgcagccaaaggcgggcctcttcgttggcatcaacaagggtcatgtcgtcaccaagcgcgagctgcctccccgcccgtgccaccgcaagggg

SEQ ID NO: 331230 - DNA, 178 bp, Zea mays
gtcaacagacaacctggaaacaggttcatcatcaacttctttatggcctacccaaacagatggacttttgcatcaaggttttcctactaacttcaatcaacaacaaatgttcaaagatgcacttccagatgtgggaatataaaaaatggatccggcttacaatgccctctttgggatc

SEQ ID NO: 331231 - DNA, 92 bp, Zea mays
cccacgcgtccgcccacgcgtccggtaccagcccaccgccaggagccgtcctacaccgccgacggcttcagatgagcgtcggctaaccacct

SEQ ID NO: 331232 - DNA, 380 bp, Zea mays
gcgtgggctgccatgaaggcgggcgctgctgtagttgcgggcaaaaacaccgaggcggtcagtacctagcagagactgccgaccgtgatcactaacccgatgccgggctccgatgagttccgcaggttcgccggcggcgcgcccgaggtcggacgcttcggggacgtcaaaggtatcttgggccacaataagggccaccggcctgcaaaacccatccaagaaaacggagataaactgcgacgccacactcaaaagcttgtttggcgggagggacaaggttgggatgctgaaaatcaacaggctactgaacgctgacttaccgaagaactagcatgcatcaatccgtggggccagtgatcgcgctttggtaaaggactttc

SEQ ID NO: 331233 - DNA, 303 bp, Zea mays
cgggcagacccactcgtccgcccacgcatacttttctacatactctattatctaatacctgcaacactgataccagggcgggcttcttttaaaaagatgaaacacaccccaattcagtctaacattatctttgctcatcaaatacctccaaatattaacacacacaacatcatttgcacatacaacctcaccatctacccaaaaaataatatcttccacaactatgtgaaatcacacatccacttacatttatctcttcctctaatctaccatacacatattcatcaaattaagatcttcaaa

SEQ ID NO: 331234 - DNA, 302 bp, Zea mays
gtggaggcggcgactgctgctgtatgtaaaggggagccgctgcgtttctaggcgtggactgatcccatgccggagctgccgaaccctgataagaccgacttatgtgatgggcctcagtgtgaggccctcggatctttcgtgcagtacatgtgggcattgggaatgacattccacctcatttgttgtggcgtcgctgaggccacctactacgacagggcaactgattttagagacacgcctgcttacaaggaatacacatcacaggagttacctgaggagtcggaattatcgagcgctgatgt

SEQ ID NO: 331235 - DNA, 171 bp, Zea mays
gagttccgggctagacccacgcgtgacgcatgctgtgaggatgacgatctattgcatggcaatggcaatgcctatccaacatgagacgttgatgtgattaacctagacgtgatattttcagatcttgtacagatagagaacaaggttgataacctttacatgagttaaacg

SEQ ID NO: 331236 - DNA, 205 bp, Zea mays
gattccggtcgaccacgcgtcgcacgcgtcgccaccgtcgccactcgtacggtgggtaagctcctgggcggctgtgctgctgcatgccgctgccgcctccttgctggccatattataagagccggggagatggctagaggaggagccaaggccggggttaactcaggaccacgccacgtaacaagcagaccggcccggccgccgg

SEQ ID NO: 331237 - DNA, 92 bp, Zea mays
acggactacaatggccatggagacttgcttcatagcgtgtgcgcttcacgcccccgctggcaggaaggacaggctcctcgtcagcaacctgc

SEQ ID NO: 331238 - DNA, 310 bp, Zea mays
aattcccgggctcgacgccacgcgtccgtcgacactttcgcatacaatcttaaagttatcatctatagaccccatgaccgggataggttccttctatgggacggcctgccctataaaacgtcatcccgagcattaaatttcctgaagtactctcttatctgaaacccctattgacctatgactacgtaaataacaacccctaccagtatctcccccgttccataaataaatccattgacactagctctactagacctgtataacaactctacataagaagcattatctttttctacctccctaatcctac

SEQ ID NO: 331239 - DNA, 238 bp, Zea mays
cggacgcgtgggcgttagcggtatagcttaactacttctacccaccgccttgggacaccatcaagtccacgtcggacagcgcttttagcgtcaacacactgagcaccttcttgtggtgacactaggccgctactacggtgccgcctgacagacaccgacgaatggtgaacctatctttgtcgccaactgcctttgttcgccctgcgtactccccatacggagaatcatgtgcctggct

SEQ ID NO: 331240 - DNA, 98 bp, Zea mays
atccggcgtagcctcagtcgtacggacccagtcgtcgggcgccctaaatcttctggccggcgcctgtagaacttgttcaagatgatcaacacgtgcct

SEQ ID NO: 331241 - DNA, 160 bp, Zea mays
ggaattcccgggctcgacgccatctgcgtccgtccgtccaacccgctactctgtcccgctcgaaaggtcgtcgtcgggcccatcctcgtcatctcgcggcgcggcgctcaaagtatgcgacgaggcgagcgtgcagccccctctccgccccatgcccgaa

SEQ ID NO: 331242 - DNA, 288 bp, Zea mays
gattccgggtcgagcacgcgtacggtccgcctccccggccttccgcgaccgctggctgctctagtacggctcgctcggcctggtcggcgccgatgacgacctggacgacgacctctacagcttcctccccgtcgacttcttctcggctccggccccgctctacgagagcgagcgggaggacgcctcgggcaggagggcggaccgagggcttgaggtggccgcgtggggcatcgacaggtggaggagggcgcacagtggtccgacggagaccccgaggttctcggagaa

SEQ ID NO: 331243 - DNA, 387 bp, Zea mays
cccacgcgtccgcccacgcgtccgcttttccacagctttggttcgggttcggctgctggggaggatcagtgctctctaagcctgctagacacggctctgccccacgcggccaacccacagtttgcttttcaaaagcagcagagggacttctgggaggatgccctacagaacgccttgcctaccggtagtgagcaaagacaggaggaggatgggcttttagtacccaactttgatggccagttacatgctgaccagacaaaggttgagttctagtccctggcgatcctcccaaggttgatatttttgtatataggtgggtaccaagacctgtggcaaacaaagctctctctctctctgtgtgtccgaagctgaccatcattagagtct

SEQ ID NO: 331244 - DNA, 209 bp, Zea mays
gcgactcatcgagcgacagcatcacacactcagctagctaggagcaccatcaggggggcgggcaatggcagcctgcatgatctactcatcagctctggccgtggcgcctcacggccttccatcactaggccgccgcgcctcctccctactaccgctctactccaagaccatcatcaccatggaccagccctacggaattaacgccgtcc

SEQ ID NO: 331245 - DNA, 296 bp, Zea mays
cggaagctgcgggtcgcctccctcttccatgcagatgcaggaaaagaagctttctaaggacagcgtgaaagatttatcagctgatctacaaaaagtcatagatgactacatgaaaaagatcgaatccatccagaagcagaaggaacaagaactgatgaaaatttagacctcaagctgactgtatggctggtgaggaataatcgcctccgtgaagcatggacccctgcatatgttggtgaattcacaatgtagtgatgtgatgttttctgaagcaatttgtttggttcatggttttg

SEQ ID NO: 331246 - DNA, 57 bp, Zea mays
ccggaattcccgggtcgacccacacgtacggcttactatactacataaactcgtacg

SEQ ID NO: 331247 - DNA, 136 bp, Zea mays
  unsure (1)..(136): unsure at all n locations
aattcccgggtcgacccacgcgttcgtccacgcgttcgnccacgcgttcggttcaccggcgccgccaaagccgtctcgctggtgctccccaacctcaagggcaagctcaaccggatcgcgctccgggtgcccaccc

SEQ ID NO: 331248 - DNA, 354 bp, Zea mays
gtttcattgattcttgaagagatcgagcttcttttgcaccacaaggtccaggatgtcgggcaactgcggatcaagctgcggctgctgctcaagctgcaagtgcggcaagaagtaccctgacctggaggagacgagcaccgccgcgcatgccaccgtcgtcctctgcgtggccccggagaagaaggccgcgcccgagttcgtcgaggccgcggcggagtccggcgaggccgcccacggctgcagctgcggtggcaactgctagtgcgacccctgcaactgctgatcacatcgatcgacgaccatggatatgattattatctatctagcttgcggtggtggttgaacaataataag

SEQ ID NO: 331249 - DNA, 174 bp, Zea mays
accggtccggagttccgacccacgcgtacgcccacgcgtacggctccgtggcctggtggcccttaccccgctggccctgccttccggtcgccgcgacggtgccgagggggctgccccagcaccacgcgcgcggggtccgaccgcgagaggggcgggggtcgaggcgcttgcggc

SEQ ID NO: 331250 - DNA, 269 bp, Zea mays
ctgacacatcgttcgacactctctaccttacctaaacacgccttccatcactactatggccggcttccttttgcgccaccgcatccaaaaaaagatagatacaacgcgctccaggagctgaaggccaaggcccagacaggcccaattggatgctctggtttcataaaaagtgcatagaaatgagcattggccacccacccatttgctaaacacctaatagaacgattagacagctggtgacacgtggtgcgctccactatatgatatat

SEQ ID NO: 331251 - DNA, 371 bp, Zea mays
gccaggtcgtgctcatgggcgccgtcgagggctaccgcatcgccggcggcccgctcggcgaggtcgtcgacccgctctaccccggcggcagcttcgacccgctcggcctcgccgacgaccccgaggccttcgccgagctcaaggtcaaggagctcaagaacggccgcctcgccatgttctccatgttcggattcttcgtccaggccatcgtcaccgggaagggcccgctcgagaacctcgctgaccacattgccgaccccgtcaacaacaacgcttgggcctacgccaccaacttcgtccccggcaagtgagggaggcgccgccggtgacctttaggtgtcccggatgcatgtgagcgcacgcctgttttc

SEQ ID NO: 331252 - DNA, 231 bp, Zea mays
  unsure (1)..(231): unsure at all n locations
acgcagttcctatcaacattcaccataaactcttcatccatactactcccacctactaacagtgtcatttacaagacatatggctctcaaaatantccacacctcacacaatcacaaataatctccattatcccctcactacaaaacctcccttacctccactctattattactatgctataaacaacctttacaattgctaactcgccaactcaactctaacaacccctt

SEQ ID NO: 331253 - DNA, 57 bp, Zea mays
ccgaggactgcggtctataatggaggacattctgacagaacaatgtttgaattctga

SEQ ID NO: 331254 - DNA, 360 bp, Zea mays
gctatagaccagctcgcttttactactacacgctacacttaggctggacatccatatcatagctcgtcggaatatgcatgagggacgagaatcaccgataccaccactctgttacagcagaggaagagacgaggagcaattcgacgcctgaacgtcagtgagtgcaccggctcaccatggccacagcgacggacgaggtgtccacgggcgagaacgactcgacgagtactacagtgatgagcatgaacgcagccgctaccagcacctcggccacgccgatggcatcggcggctacggcttcggactctactacaagcacgaggcgaagaacgacccggagcacgcgcacctacacaagat

SEQ ID NO: 331255 - DNA, 396 bp, Zea mays
cccacgcgtccgcccacgcgtccgtgacgggcgagttcccgggcgactacggctgggacgccgcggggctgtcggcggacccggagacgttcgccaagaaccgggagctggaggtgatccactcccgctgggccatgctgggcgcgctcggctgcgtcttcccggagcttctcgcccgcaacggcgtcaagttcggcgaggccgtgtggttcaaggccggctcccagatcttcagcgagggcgggctggactacctcgggaacccgagcctcatccacgcgcagagcatccttgccatctgggcctgccaggtcgtgctcatgggcgccgtcgagggctaccgcatcgccggcggcccgctcggcgaggtcgtcgacccgctctaccccggcggca

SEQ ID NO: 331256 - DNA, 270 bp, Zea mays
cccacgcgtcccctatcaccacgtcaagaactactggaacaccaagctcaagaagaaggccatgggggccaggagcatccgaacatacttcgcggcgcccgccacgccggcgctctcgcccggctcctcgtgcgtcaccagctccagcggcgacttgcgcctcggcgcgaagtacaccgagccggcgccgactcggcagtaggcccggctcgtacgctctggcgctacgcggaccgagctcgcgcccgtgccggcagtcgcgcacctgga

SEQ ID NO: 331257 - DNA, 378 bp, Zea mays
ttggcttgtcctccccctccggttcgggttcgggttcgtgaggttctccggggttcggtggcgtgggtgagcggatcgagatggcggcgtcggatgttgagtaccgctgcttcgtcggcggcctcgcctgggccacggacgaccactccctgcacaacgccttcagcacctacggcgaggtcctcgagtccaagatcatcctcgatcgggagacgcagaggtcccgcggcttccgcttcgtcaccttctccacggaggatgcgatgcggaacgccatcgacggcatgaacggcaaggagctggacggtcgcaacatcaccgtcaacgaggcccagtcccgcggcggccgtggaggcagcggccgtgggtactgtggtg

SEQ ID NO: 331258 - DNA, 185 bp, Zea mays
gtattttacatatttacatagccgtggttatgaacattatcttcaaaacaccgggttcaggctcccttgtggatgaggtcgagctcaaccacatactgcgggctatacttgctgactacgatgatattatggtcttacataaggctgacttcattattgatccaagcctagtgtatggattctgt

SEQ ID NO: 331259 - DNA, 328 bp, Zea mays
cgatctcgatggcgaaccctcgcgtcttcttcgacatgaccgtcggcggcgccccggcgggccggatcgtgatggagctgtacgccaacgaggtgcccaagaccgcggagaacttccgcgcgctgtgcacgggcgagaagggcgtgggcaagtccgggaagccgctccactacaagggctccaccttccaccgcgtcatccccgagttcatgtgccagggcggcgacttcacccgcggcaacggcaccggcggcgagtccatctacggcgagaagttccccgacgagaagttcgtgcgcaagcacaccgtccccggtgtgctctccat

SEQ ID NO: 331260 - DNA, 161 bp, Zea mays
cggcgctcgagcccgagcgccgccaacggcagtggcttgggttcccttgcggtcaacgggaccggggccttccggaagaatgggcaattgcctcaaaaggagattccttccaacgtaattggggccgaattcaagaacccgcttccagaactctttgggaa

SEQ ID NO: 331261 - DNA, 226 bp, Zea mays
cccacgcgtccggcctcttccccgtggccgggatcggggaggccgacgcgctggtctggcggaaccttccggagagaggtcccccctaattccccttaacttttaacgcccccccctctaaaaacccctttgttttctataggactccatttaagtgataggctcctctgatcatatccaggagaaggctgatctgctataccctttgattaacggaaggcaactt

SEQ ID NO: 331262 - DNA, 243 bp, Zea mays
caattcgagggacgagtcacgcgtcccgtagataggaccctgtttccaactattacactattagtgaatgctcctaatcagagtgcgtggactatgttgaagttgctctaatgcaaatagagcccaaacctacattttggtctcctactcttcaataacgcgtacatcgttcccaacttagatgtgtacactctcaaccgattctacctacactgacttatcgccggcctgtgcaagtacccc

SEQ ID NO: 331263 - DNA, 198 bp, Zea mays
caactattacactatcagcgaatgctcataatcagagtcagtggaatatgttgaagatgctcaaacccaaatagaccccaaacctacattatggtctcctattctgcaataactcgtacatctttcccatcttcgatgagtgcacccccaaccgatcctacctacactgactctttgtcggcctttccaaattcccca

SEQ ID NO: 331264 - DNA, 349 bp, Zea mays
agcttgacaacattaaaaaataaagagcccaatagaaacttataaaggatcggcaacaagcataaaacgaagccaaaatgaactacgctgaactgatacggagaaacccgttgattaatatcaacaattctggctccttcaatgttaataaaatgttagacgacaactatctattcaataatcaaacactaagatagaccaatacacctaaactgttcatcaacgacaccatcaagagtgatttccaccgtaaatttcttcagaagtacattaagtgactctctcctctttcacaattcatcctttaaccccttaatcttatcatgtttgtcttataactaaaaatcat

SEQ ID NO: 331265 - DNA, 333 bp, Zea mays
acgcctcacgcgttcttcggagcgtggcctatgcacacatgttccattccagtcctagatgatcatcttggggtccggagggataaaaagaagctcggccattgtgaagagagatgtcactgacctgccaccatctaagaagcggatggcctaacgagacactgtcattttcacaccattctgtaaccaccggactagtgtgtaaagcctaattgacattacaactctgaatcgcgaaccatctttggaaacatgtgacgaaaacttgatcacaactgttgatgcgcctactgagccgcttgatctatatatggaacggagagatgcatgtta

SEQ ID NO: 331266 - DNA, 411 bp, Zea mays
gtcacgcgagaagagacgcattgacacactcgcacacgaacttgttagcgatagctgtggtggtgtggatcttcacgatcaacttaacgtcgacaggaccgtgtcatttatcgccagcgctgactcacaacatataagcgcaaaatggtgaacacagcatgcacacggcaatcagaagatcatgaaccacatgacctgtataaaagatatagtgcgccgctaatgcaacatgaactatgacaacgtcgacttcgacacgtacactaacgccggcgagcaaacacctgaagagctgtatctcatgcagacagaagctgtcatccataagctgatcacagtgtctgactagatcctcaacaggtataaggattacgaggacagaatgatgtcacatgtcaggtccaacatcct

SEQ ID NO: 331267 - DNA, 461 bp, Zea mays
cccacgcgtccgagaaaagcttctactagctacatatatatatatataccagccgatgaaccatgcatgcagtcacatgcggcatagaattagcagctagcgacggtgaggaggatcgaaaggaagaagacgtacgagatgaaaagagagcgaggcttacatggcgatgagagtggtagctctggtagccaaggatgacttgcctgtgtgctggccacgctcccctcatgcaaggaccatctcgtgtcgaccgacgagcgagcgagcgatcgatcgatgacaggatgacgaagcttggggtgtacgttggtctctcacgggcagtctccttggctagccctgactcactcttaccgaccatgctagcctctgcatatgtcgtgttgctgtacagattactggtcagtgacctagctagtatgcaagacaatgcgcttcgtcagcatgtcacgagcgatgca

SEQ ID NO: 331268 - DNA, 275 bp, Zea mays
aatcgacccacgcacccactcatacatcgagagtctatactatcccattaccctttccagctggatacatccatcacagctcctggcgaaattccatatatcgaggctcaccatctttcatatgatattaacctaaacttaaccttagatatccaacaaaccagaacaagattatcaacttcttcatagaccacatgccaagccatgccttcaaacaagatcaactaaatcacttctaacacagatattactatgattatccttacaaaattcta

SEQ ID NO: 331269 - DNA, 250 bp, Zea mays
actcagctttttcaatactgcatcacctactctctcactgtcaaattctaaatcttctcgcggtcccccatcttcaagaatgccaactacgcctacagctactatctattcctagctcatcatcagcgtataacgtactcactcatatttatttatatatttacatacctatatagatctccatagtccataccaaccatctgtgtcacttcatctcctccttcaattctatctcctcctcccatgcata

SEQ ID NO: 331270 - DNA, 464 bp, Zea mays
  unsure (1)..(464): unsure at all n locations
cccacgcgtccgcccacgcgtccggattcttgaagagatcgagcttcttttgcaccacaaggtcgaggatgtcttgcaactgcggatcaagctgcggctgcggctcaagctgcaagtgcggcaagaagtaccctgacctggaggagacgagcaccgccgcgcaggccaccgtcgtcctcggcgtggccccggagaagaaggccgcgcccgagttcgtcgaggccgcggcggagtccggcgaggccgcccacggctgcagctgcggtggcaactgcaagtgcgacccctgcaactgctgatcacatcgatcgacgaccatggatatgattattatctatctagcttgtggtggtggttgaacaataataagcgaggccgagctggctgccatacataggtatngtgtggtgtgtgtgagagagagagaaacagagttcttcaatttgctatccttctctgcatgt

SEQ ID NO: 331271 - DNA, 357 bp, Zea mays
tcgacgcacgcgtcacgccacccgcaaaacacactcgaacggagactgaaggagctccctatcatatgcctcgaccgggtctacggctgatgcataacttcattcatgccttcgatcatttcaactgctttctgcacttctatatctttcattataaggtgatcaactgattctgacgtcatgcggcattgaaccttgctgtcgcacaccttcagttagcctctaccactgctccatcgctcggaggcactttcttgtacttctttctgtgttgcaatgtgcatatgcacgagctgacctatcatacttactatttaatggttaactcgtaatgctcacttgtgattacagactgac

SEQ ID NO: 331272 - DNA, 349 bp, Zea mays
cagaaacatgtgccatccaggactgccgccgagctgcgcggtcaggcggcgggagcagcgggcggccgtggcaccgtcgctctcaccgtctgtgccatgggcgcgccacggtgcgccgcaccactactgcgtgtgctcgcccacggcgcaccggggctcgttcaggtgccgatggcaccgcagcggcttcgagtgggggcgccggcggccgttcgcgaacacaccggggcgtgctgaagccgggccggcgatgcacgcgcggatggcggcgccttgacggttctccggacggcgtccggcacgggctgtcagtcccaaactgtatattggtatggtgtgtagaagatgc

SEQ ID NO: 331273 - DNA, 310 bp, Zea mays
cccacgcgtccgcgtcgaggccgcggcggagtggcgcgaggccgcccacggctgcagctgcggtggcaactgcaagtgcgacccctgcaactgctgatcacatcgatcgacgaccatggatatgattattatctatctagcttgtggtggtggttgaacaataataagcgaggccgagctggctgccatacataggtattgtgtggtgtgtgtgagagagagagaaacagagttcttcagtttgctatctctctctgcatgtttggcgtcagtctttgtgctcatgtacgtacgtgtgtctacctgcatg

SEQ ID NO: 331274 - DNA, 183 bp, Zea mays
gcggcgcttgccctagctcaagggatgaggcgtactcgatgctcatgccttgatctttcagccaaagaggcgttaacacaagcaagcgcatgatgaacgccaagatgtccacaagcttgctggtctcagaactgtaactgttctacatgaacactctggtaggagcccacctgccattgatgg

SEQ ID NO: 331275 - DNA, 294 bp, Zea mays
taccgtccggaattcccgggctgaccacctctggactcgtcccgagcggtgacgtaggcagccgctgtgacgggacacctacgggactaacacttgaaaccagtggaaacagcgaccggtgatgttcacgagtggatggatcactgcaactatgatcgtcaggactgtctgtggacctagtagtacagcgtgattaagggccaccagcgcctacaccgacacccactgagcgattcgactacgaagcacgtctagtgctcttgctagaccgttgcagagctgggactatgttac

SEQ ID NO: 331276 - DNA, 433 bp, Zea mays
  unsure (1)..(433): unsure at all n locations
ctcgtaccggtctcggaanttcccgggtgcgactccacgccccgtccgcttcaggggccagttttggcaccccattanntgatgggcntncaaagttnctcgccttggagcctcgtccatcggcgggagaccatnntgtcactggctagaaacctatgcnngggaagggaaggggcatctgagcctnngtcgaggagggtggtgnnngtggttggccttggtgaggccttcnttagtaaataccccaatnncatctttgggtatggttttgggtggaaatggtggtnntggcaaccgtnntgtttaatttaatgccgcaangncctgctggtgnnngtttcgggaatggaaaggaaaggactcnntggtccctgggaaacaaagctnnngcggagaagggannngcctgtcangnntgtattggggtgtctgg

SEQ ID NO: 331277 - DNA, 348 bp, Zea mays
attcccgggtcgacccacgcatccacgcgtacacacccgtttcgtacgcgtatccgtcggcatggcgacatggctgggtgcctggggacgcgtactatcctcactatgctcagcaggccccttcgctcgcctaatctctcgccgtggccttgccggtgccgcacacgggcatgggtctgcgaatgtgccctcgcggaaagatccagtgagccgcaagcacgtggaatgacgagcacttagacctgtctagcctcacaatgaggggcgacctctctaatgggggtaacaagcttgttagtggcaagaaggctgccctgactcaggtggcgttgcaccacgcgtcatact

SEQ ID NO: 331278 - DNA, 302 bp, Zea mays
gaaacgaacaaggccttactgatttttcatccctgctgacggaagcttgatttctccgtgggtgatgctatggatgtgatcagatcagccatttgcaagctgattgcagccacggatgagtattgtggcagtgggcaatcccaaaatatagctctcttgttataggttagtttattatgagtagcattcggcttatgtttttctggaccgtccccattatgcattagcttgggctgcttggctgtatgtaataataagcaacattctgcttaaaaaaaaaataaaaataaaaaacaaaacaa

SEQ ID NO: 331279 - DNA, 324 bp, Zea mays
cagactgcctgtccactgttggcttggcgacttccttcgctccgatcccctccgctcccgaacgggcgatctttgcatggcagcagcagctggctccaaggggcgggcgatcgctggaagcttcgtcagccgcgtactcgccggcaaggccgtctagccgaggagggccgcgcacgcctcggcgtacgacaagaacctggatgaccaggtgcgcccggcgttcgagccagacgatgtgatctgcagcgccctgagcccggacaagtactggagccctgaccccaagaccggcgtgttcggtccggcagctgtggaccccaagct

SEQ ID NO: 331280 - DNA, 257 bp, Zea mays
acccactcgtccgagccacctagcacccaatctgttttacctgatgccacatctctggtaggtacaagcctacaatctttgacagatgatgctataattactccgatacaaaatcgtctctgcttatatatctctgtgtcatactagcacttattatgttgcaactctatcgattaaatactatatttgatctaattgataattaccataatcacagatgcactcatataaagttgattttgtagacctaaatttta

SEQ ID NO: 331281 - DNA, 389 bp, Zea mays
gcggcattgaaatgatgtgcatatgatatgaattgatacatatccttggttgaagtccagatcattcaaatgggatgctcaagcaagaactcctgagcctgcagaacttcccaaaaaatattgggggaagaaaaaggagaagttttcctggagatgaatctcacaaggagatggaatcattgctacaaacgatgactcttgtgaacagagagtgctgcatatatatcttaatgtgtagatctaagccttcaagtatgagcacatgtacatgctcatgtacattcgattgttagatgcaatagtatactatcaatgtgaaatgtaaatccaaatgcttcagcaggtcatgaccaagctaatgatctaactagggatggacatcttgactc

SEQ ID NO: 331282 - DNA, 227 bp, Zea mays
gctacaacagcacctagattggccgcgcatctatcatcagcgtgcggagcgtctaatgcggatccagggaaccattgctcatccaggatgctgagtgttgctaataaagctaacgttaactctactgtcaggagtaactgcatcttgatgcataactacagtttacagacgttactcacttcattgtggagagcgatctgatccatagatcgtgcaggctgtgcttg

SEQ ID NO: 331283 - DNA, 324 bp, Zea mays
attccagctaggcaaatggcttcttcaaggatacttgctcagcaactgcaccagtctctcggacgtggaggcggcggtggacgtggaggtcgacgaggagcaggacttctcttcagcggagaagactacgacgaccccggcagacggctccttaactctgccagctctggcgaccctgaacctttcttgcctgccctcttctctcttttgatcgatgggttgccagctctggatctgaaattctgaacgcatgggacgcgagctgtgtgtagcatgaataactgcgctagttgttggatggacgaactcaatcgcgctcgcatg

SEQ ID NO: 331284 - DNA, 313 bp, Zea mays
caaaaacgggaggacctcaccgtgcaatggaaatgctttccaacatgaaacagtctacaggaagacctgatgttgtctcctatagtactgtccttggtgccttgagtcatgctggcatgtttgaggaggcatcaaagctgatgaaagagatgaatacattggggtttgagtacgatcttattacatattcatctatacttgaggctattggaaaggttgatcatgaatgtgacccttaaggttggaagtgtatcatgtgcaatcactcatttggtgcaagcagagcattcaatctaaatctagcaatttcata

SEQ ID NO: 331285 - DNA, 382 bp, Zea mays
tctctctctcgcccccccccccccctgctcgcggcgcagcggagccgacgcgatgccggggaggaggaaacggcgagcaccaccggccaagtcgcagaggcagacggagccggatccgcaaccgcaagtgccccctggcgccgacgcgccgctggaagagcggctgatatggggcagccaacaagaaagcgagcgccggattactgccatcaaagccataaaagacgcggaggctgggaacatacattaccagttgcaattggcacggtcctattattccgaggagcaattggagggaaacgccatgcagtattttcaggagaacttgcacaatctgtcggttgttccgaacgaagaatatgatgtgcttgagctgaaatgg

SEQ ID NO: 331286 - DNA, 254 bp, Zea mays
gttctgatcgggccggcttccctaatcggccactctaaaccaaccagcccgactaatcagtgactaatcgcgattagtcggacgacttgaaaatagagttactgcagcttgagcacaatgtttccttcgtactaggctactggcatatttaacacacttattcttctggatttgacataattgttcagttggctgaatcatttggtcttttttatcaatagttgacatttcttgtacagtattggtagtagtgt

SEQ ID NO: 331287 - DNA, 380 bp, Zea mays
gtttctcccggccacgcacttccgggaccccaacgacccccagcgcaactggatcccctgcgacggctcgcggaatccaacgggttctttaaatgatgttggaagtgtagatgtcttctcttggataagctgtttggatcttcgcactctcgctgtgctgacaaattccaccctgtccagctcaagtgatccacataatatatctttccattacttaatacctgaaggaggcaacgattaattgtcctaccttaagctaaaagtcttgctacctgattcagatctcactgttactagtcagaagcaaatcaaggacaagctaaacgttgccactccagaaagaaattttctttggttattccacactgaattgtcaccct

SEQ ID NO: 331288 - DNA, 178 bp, Zea mays
ccgtaccggtccggaattgccgggtggacgcacgcgtgcgctgacccgatgcgtggctctggtctgcactaggggtgcgcctgttgcgcacgggagctgggcaaaccgtctgtgcgctagctaggtgcccaggccatacatcagtccactctgcgagccatcgtcggggggtcgagga

SEQ ID NO: 331289 - DNA, 303 bp, Zea mays
ccggtcccgaattgccggatggacccacgcgttcgcatatagctaatgtaactcgaatccagaaacgactgtgtcggtgcccctaacagtgaaagggcatcacagaatcatggcggtgggcttgaccacaacgatgtctactgccgatcttcttatctcgctgatgagtatcatgatccatgttacagctcctgagaacaagcaggtgatactgatcgaccgaatagaagagctggcgacaacatgggattcactgatcattccagcagggatgtatctgtacttacgtcttaacatgggcaa

SEQ ID NO: 331290 - DNA, 287 bp, Zea mays
cccacgcgtccgcccacgcgtccgctcctagctcctctactcgccagtcgccatgggcaagatgaagatcggaatcaacggcttcggaaggatcggcaggctcgtggccagggtcgccctccagagcgaggatgtcgagctcgtcgccgtcaacgaccccttcatcaccacggactacatgacctacatgttcaagtacgacaccgtccacggccactggaagcacagcgacatcacactcaaggactccaagacccttctcttcggtgacaagccggtcaccgtct

SEQ ID NO: 331291 - DNA, 289 bp, Zea mays
cccacgcgtccgcccacgcgtccgcaaagcggcagtgcgtagagaggatcgtcgaacagaacagcatgaagatggtcatcgttctcgtcgtgtgcctggctctgtcagctgccagcgcctctgcaatgcagatgccctgcccctgcgcggggctgcagggcttgtacggcgctggcgccggcctgacgacgatgatgggcgccggcgggctgtacccctacgcggagtacctgaggcagccgcagtgcagcccgctggcggcggcgccctactacgcccggtgtggcag

SEQ ID NO: 331292 - DNA, 342 bp, Zea mays
  unsure (1)..(342): unsure at all n locations
ccggtccggaattcccgcgtcggacgcgtccgcccacgcgtccggccagaagagcaaagatcaacaccaggtccaggggcagcagcagtagcgtggcgaaggggtcaccaccaccagccttccagttccagtgcagggcgtcgactttcgcggcggacaccagccttcggctcgagctggacgagaaccccgaggcgatcatctcgggggcgtggcccgggaactgctccctnctcagctacgacgaccttcgcgcctacctcgagtcgcaggagacggcggcccaggcagacgatcagcgcggcgtggcgctcctgagcgagaccatgttcacacccgtgc

SEQ ID NO: 331293 - DNA, 270 bp, Zea mays
gccacgcgtccggacacgcgtccgtccacgcgttcggccgtatgaggagctcagctatgtgcggtgtccaaaacctacaagttatagcatgggggagtgctcgtgtactcctgttcggttctttgtaattgtgtctatgcaaagatcgggaagtggatggtttgagaccttgatgaatagtcaccctaacattaggtccaatggcgaaatctttaacagagtgggttgcacagaaaatatctcgtttatcttacaaacacttgacacgct

SEQ ID NO: 331294 - DNA, 68 bp, Zea mays
ccacgcgttcgtaaaagtaatttagggctctaacaaattgtggagaaacattttgaatcgtgatccat

SEQ ID NO: 331295 - DNA, 183 bp, Zea mays
aaaaaaagaaaaaaaaaaaaaaaaaaaaaaaattttaaaaaaaaaaaaaaaaaaaaaaaaaaaaaaggaagaaaaaaaaaaaaaaataagagaaaaaaaaaatataaaaaaaaaaaaaaaaaacttaaaaaaaaaaaaggcctccccctttaaaggtcccaattttacgtcccctgcctttca

SEQ ID NO: 331296 - DNA, 110 bp, Zea mays
  unsure (1)..(110): unsure at all n locations
cccacgcgtcctcccacgcgtccgagaggctatataaaacaatattcttgactattgcaccaggggggattatcaccatcanctccgtcgtggacaccaccatcgttgcc

SEQ ID NO: 331297 - DNA, 169 bp, Zea mays
ctcacgcgttcgtcgccggcgaccctcaacctcactaaggcagaaggagcaccatgatggggggatgacacggactgtaggctctgacccgtgaactgatcactcgtccatttcgtactaaggggttcaacccagtaaccaagtacctgagcacctactagatctgtac

SEQ ID NO: 331298 - DNA, 207 bp, Zea mays
cccacgcgtccgaaaaaaaaaaaaaaaaaaaatttatttaaaaaaaaaaaaaaaaaaacaaacaatggagagattctaaaaattaaatacacgtacatacaaaataaataaactcttatataatgtcacctaaaattaaattcactgaccgtcaaattaacaacataataactgtaaaaaccctttcgtaacccaacttaatcacct

SEQ ID NO: 331299 - DNA, 211 bp, Zea mays
cctgaatccggtcgaccacgcgtcgaaaaccgatcgctgcgtcagtcctttctttcgacccgtgcaccagggcacgtcaatgcacaatccggttggtcggcgatgcgagacatcaaccccacacacagcgagaaggagtatggacacacagcgagaggcccaactgagtcctgacttgcagtggcgtgccagcggttgcctgtgcttacgc

SEQ ID NO: 331300 - DNA, 369 bp, Zea mays
cccacgcgtccggtattggatactgtacaaaacccaatgcaaaatccattatcaggttatgggtagattctgagattctggcacacaatccaatgcagaatttaagaggtgtttggttcataatgggattctagaatgaaattctgaaaatgaagtacgaaacaaacagggcttaagttggccaagtttgcaactgctttaggtggccatctgaagcataaattaggaagttccttaaagtgcatgtaaattttctaggtgaatacgatattacacaacaaaattaattcgcaaaatggtccagcaatgtgttgcaattgatggcattcacatttttttcttgttccttggcccatttagttgactaca

SEQ ID NO: 331301 - DNA, 176 bp, Zea mays
cccacgcgtccgcgcacgactgcgtgggactttgtgtgcagatacctggtgcagacccagatgggcaacgtgaatggacgactgtggacaagcacatgagcctggtcatatacccgacgatcaaggcggatactaaggccactacctgaaccggctcttctaccaatgctacaact

SEQ ID NO: 331302 - DNA, 68 bp, Zea mays
cggttatatcatggagctctgcgtctctaccactggctgggttcgtgccaacggcgcgcccatattct

SEQ ID NO: 331303 - DNA, 291 bp, Zea mays
ggcggaggtgccggtgcaggaggcggctatggtggaggagctggtggtggatacggtggaggtgcaggatgtggcgccggaggcggctacggcggaggagctggtggtggtgccggtggtggctacggcggaggcgctggtggaggctacggtggtggtgcaggtgctggctctggcggcggcggtggttatggtgctggtggcggaggtggaggtggcatcggcggcggtgtctgaatcagcgtctcacatgcatgcatggtggtgcaagctgcaagcagaagcaagtgc

SEQ ID NO: 331304 - DNA, 264 bp, Zea mays
aaggaaaataacatctattttgctgggctccagaccgacggcttgactctgtgggttcctacgacgtggacgtgatatttctgctctccaggtcaattccttctatggtctcccccctccgggacaccaggtaacatatgcgcctcaggctggacatggtccttatggagggatctaccacccagcacattctgtggcaggagctactgttactccactgttccagccatttcacacaatggctggagctgttgaaatagttgg

SEQ ID NO: 331305 - DNA, 210 bp, Zea mays
cccacgcgtccggcgcagaccaagccttagctctgcgagctatgtaccatctaataattctggccgtgtcgtaccatggtaactgctaaatagaaaaattgaagaaactaccaaccggccctggcttgtattcacccttgaaccatttttttcttggaaaaaaaaaaaaaaaaaaaaaaaaaaaaaccccggaaaaaaacgcattcaaaa

SEQ ID NO: 331306 - DNA, 261 bp, Zea mays
cccacgcgtccggcggcagcttcgaccccctcggcctggccgacgaccccgaggccttcggcgagctcaaggtgaaggagctcaagaacggccgcctcgccatgttttccatgttcggcttcttcgtccaggccatcgtcaccggcaagggcccgctcgagaacctcgctgaccacatcgctgacccagtcaacaacaacgcatgggcctacgccaccaacttcgtccccggcaactaagctcaacggctatgctatgcaa

SEQ ID NO: 331307 - DNA, 245 bp, Zea mays
accaaccttgtcatacttgtatcttttatttctaatgcacaactcttatacaatagggaggcttcctaaaaaaaaagggaacactcactatacaaataccatctggaaaaactccttcaaaatatacactgaatccaatttaattctcatcaaattcactagctaatactacatgacacttaactaaccatatattacgcatcaaaaatttagaatatctatcacttgataccccatgacacatt

SEQ ID NO: 331308 - DNA, 326 bp, Zea mays
  unsure (1)..(326): unsure at all n locations
gtccgtgaattcccggtgtcgagcccgacgcgtctcgtcgggctacttttcgcggtgttcatttggtgaagggcgaagctgacccgtacggtggtgatccccgggtgatacgggggagcggcgacgaccctcgggtgggcaccgtgtaaccaacccggtggttcaagcccggtacggcaaggagcattctgtcgtgaccgtccgaccttcgccgcttgtgtcgtgccgactcccattctcgcttgccgcttcttcattccacttccgtgcggccctactggcgaacatcttcgtnggtggacaatcgtacccggaaggattgcgag

SEQ ID NO: 331309 - DNA, 371 bp, Zea mays
  unsure (1)..(371): unsure at all n locations
gtccggaattcactctggctcgaccgacgcagtccgccacagcgtacgaacgcctacaaccagacgatctatatgaccgcgccagtactgactcgagtgtggcccaacaacaggcccttctgcgcctccgccttcggcgtgagcttctacgtgccggccaagaaccaggcggacccgccgtcggccgagggcctgcgcgtggaccgctgggccggggccaggtacgcggacgtgcgccgcttcgggggcttcgtggcggacgccgacgtcggggagcaagcggcgcggctcgaggccagcctacagggcacccggtgggccgccgacgttaacgacgctcgcagggccgaaccggactngccctacaccgt

SEQ ID NO: 331310 - DNA, 318 bp, Zea mays
ttcccgggtcgacccaagcctcccgaatcaatgggttccaagcccgagatcaaattggtgctatgctcaactcatttaaccggggggggctttccgaatattctggggcattagaaaatcttaccctcaaaaagccttctgaggtatttgcttcccaaagcccaaggcttcccattgcccgccgcacttgccttcaagcgcttaagaccatttgcgccaaattccaccgtacttgcaaagcccttaaccttcttgtcaccccggcattaagtggcgtctgcctttaagccctgcaactttcgaaaacggcttgtcttc

SEQ ID NO: 331311 - DNA, 107 bp, Zea mays
accacgcgtcccgcctcagcgcgtgcctttgccctacggcatctccagcgccggactggtccagtgcctatagcacccggacaccgcttagtccattctcaacacca

SEQ ID NO: 331312 - DNA, 458 bp, Zea mays
cacacacacagagagagacaagtggtttccaaagccaagtgtgtactagcagtctagcagccagctagctcgggcggcagcaggcagccatcatgtcggaggagaagcaccaccacttcttcaaccaccacaagaaggacgaggagcagcccgccggcgagtacgggtactccgagaccgaggtggtcaccgccaccggcgagggcgagtacgagaggtacaagaaggaggagaaggagcacaagcacaagcagcacctcggcgaggccggcgccatcgccgccggcgccttcgcactctacgagaagcacgaggcgaagaaggaccccgagcacgcgcacaggcacaagatcacggaggaggtcgctgccgcggcggccgtcggcgccggcggctacgtattccacgagcaccacgaagagaagaaggaccacaaagacgccgaggaggctagcggc

SEQ ID NO: 331313 - DNA, 436 bp, Zea mays
aaagtgcagaaaaatgctaggcacaacaaagtattcaggaagctcacagaatcatcgggccaagaagaaaaagaggaaaacaagttgtgagaattgcatacagcagtttcttcgtctgtggcatccacgacaaaaaatgtatgttggatgttggatagttgacttcgatcaaggaactaaaatgcatactctccagttcattgatcaccatactgaaaagtttgatttgaaagaagaagaatggcacttcttggaggtcgactctgatgaagattgatcattgaagttttattgcatccttgtacaaggaatagtcgtgcaagatgatattggcatgaggtgtggttaagtctcaacttccaattatgttgtgcatctttggaaaatgtaatctggccagtaacctttggaggatgaccgacttcgtgagagtttt

SEQ ID NO: 331314 - DNA, 309 bp, Zea mays
accagcagctacttctctgcatgagccatgatgttgtctgatgctcttactagggctgccaaggccgcggctgatctggccgctcatggcagacagagttaaagtgaaaaacaaaacatacaatccatcctttttcagttactaaacatgaggacgaacaccttaataggatgcttgaagtgttgttgttcgatgtatatttataacagacaacattgttgatttgttgtataaattaaaaggagacgtacactgcgtttgcactgataagtttgattattgcaaatggagtcgagtgatcgtgcaaaa

SEQ ID NO: 331315 - DNA, 250 bp, Zea mays
aataacactcttaaactggacagagtctaccaaccaccttgactctcgtcaaggtgtcccttcgcaactagcccacctactctcgccgtcctcttctagaacgactacacgacctaaaggtcttcgattgtctacgcacccagcttacatccaacctgctcggccttcaacctgacgttccactataactcaccatgctcctgaactactgctgccagcacggtctctactgcttcctagtgctccttat

SEQ ID NO: 331316 - DNA, 225 bp, Zea mays
taatggactggtacattaatatagttaccctttcatacacacacatgatcactcacatatcaattttgctggaccaaactcttctacttaaatttttataacatcactacacttcatcaatcatcatatagcctaatattatcatgcacatactcgatcagaattctccaactatttattaatcaatgttgattggcgaatttacacatacagatccgtaattac

SEQ ID NO: 331317 - DNA, 259 bp, Zea mays
cgctaagatggaggtttccaccaaccattttcctgacgcccatcaagcaagacaccaacggggtcgtccttccatactacgggtacagcattaactggaactatgggatactcccatatacatgggaagacccaacctctgcaaattctgaggttgaaggagcatctggcgataatgatcccgttgatgttaatgccattggtgtacggactgctaatacacagcatcgactcatgaccctgacttaagcatagtaccc

SEQ ID NO: 331318 - DNA, 391 bp, Zea mays
gcaggacgtacgtacgtacatagatcgatccatcgatcgctagctagctgacgaccatggcttggctacaatctgccggcggcaggggccgttaatgtaaggtcgttcgacgacgcgcaggtgtcaaaactgaagtactgtcactcgtgcggtgcctgtctaactagggccactagacaatgcagtccaggcctgtgatgcatggtgccgttgccgcttgtgcgtcatgatcaatagaccgttgctcatgctacatcgcctgcacctagcgagcctgtcaaactactcgtggtctataccatcatactcttattcatacatctacttttcatacaaggatgtattcaacttacatattggattagggtgcaatgaacgagtaacatgttca

SEQ ID NO: 331319 - DNA, 402 bp, Zea mays
aagataacatctaggatgacgttctaactatacgacaactaatacactaacggcacatggtgtcaatactcatagcacagcggacatccgatcacgacaaacaacaacactcaaataaaccttcactgatacaaagtcctactgaatcaaccatcaaagcatccatcgcgaaaattacaacggacaaacatgaacgatacgtatgtatccacttatgagacacgacaatggaatcatatcactgttcagcttaatctgtttgtctatacatattatcctattcgacaactaccactgtacttatgatattcttcttgttagatacttggaattgactgccatactggagccatggtaaacttctaaaatggacaacacagctatatcgagtgatgctattca

SEQ ID NO: 331320 - DNA, 308 bp, Zea mays
cccacgcgtccgcctacgcgtctactgtttcatggacctacacgagtacgttcccatggcggggaccgtcatgttcagagagctgcttcataactatcctgattcatactacataaaatctctatctaactcagtaaatatctacttgagtcatatcattgatatagatgaattacaaaagatacaatgagctctactgaagaatgcatcacgtcgaagtcatttgttaaagatatgtaatacaaggatactctacatcttacatcagctatctgatatggacataattaatatcaatactaacgtat

SEQ ID NO: 331321 - DNA, 417 bp, Zea mays
ggaatacccggctcgacgcacgcgtccggcgcagtaatgtactcgttcgacagattcctatagctgctaactaggtatagtcctttgtatgtgtccatagaaaagctggcctcgaactagcgtagcatcaacatcaacatgggttcctgggtgcgcaccatcacgtcgcccttccggaagatgctcagcccgcaacagcgcgacggcaagaagacgccgcgccgtcgtcaccaccaccaccaacgacgccagcagcaatctccttctacttctccttcttcttcatcagccatggaggaggagcacatcggcgagatggagataagcaggtcgcaactctactgcgaggtgattgcgtgcacgtactatgacgtgcaagtcatgtggtccatgctcgacaaggccaggatctgcatc

SEQ ID NO: 331322 - DNA, 321 bp, Zea mays
gacccacgcatccgctctactcttgcgagtcgatagctcgatgctagctacgatttcgagactcgcagcgcccatggcgatggacacgcaagccttggccgacacgcgctacctgatggacgacaactgagctccgtatgccaagctcgagaacctgaactcgcagctggagctgatgacggcgtactacagcagtccggacctgatcctcgcgttcaccgacgaagcggtggacgcgcactaggagttcgtgtccccctagctggaccacatcgcgccggacgacatcttcggcggtaacacacgacggactgttccaca

SEQ ID NO: 331323 - DNA, 403 bp, Zea mays
gcgcgaaccagacgcagacggcgcagcgcaagtcgtattcggggacgacctctccgccgtcaggttcagtgaaagagaaggtgaagccgaggctcgacgacgggggcgtcgggttcccgccgttccggttcgggggaggcggaggaggaggaggcggcggcggcagcagctcgtccggcgggttcatcctcttcgtggtcgtcctgctcctggattacctcaaggagttcgagaggaacctgcagaacgggccacggaggagcggcagtggctacgacgactggctggcgccacagtagattcctctctctctctctctcacacacactctcggtatgtggtttggaagagaacgtgtactacgtctctacacgagcatgtgttgcagagatgcttcggtgtt

SEQ ID NO: 331324 - DNA, 263 bp, Zea mays
cccacgcgtccgcccacgcgtccgcggtcgcttttgcggacgcgtggtcgctcacaaggagagcgatcaagtgcctgaacgaaacggagcccatcagctacagacccgtctgcggttacaaggctgcaaccactgactacagcctgatggccatggccaggtcctacttcctgcggacgctggagccgataggcatacgcgtccagatactcaacatcacggagctgtccgactaccgcaaggactgtcatcccactgtgttc

SEQ ID NO: 331325 - DNA, 248 bp, Zea mays
cggattcccggctcgacgcacgcgtccgacgacgcgtccgctcacacctccgctttagatgcctcagctgatctgatcacactctgatggctttacacaggaactagacggctctcccatggacaaatctaactaccacacgacgcatatccaagccttgaaatcacacatcaactgcatcttatagcccaacctctactatcaatacaactatactataacctacatggacgtagccactaacataa

SEQ ID NO: 331326 - DNA, 378 bp, Zea mays
gacgacttgtttcattgattcttgaagagatcgagcttcttttgcaccacaaggtcgaggatgtcttgcaactgcggatcaagctgcggctgcggctcaagctgcaagtgcggcaagaagtaccctgacctggaggagacgagcaccgccgcgcaggccaccgtcgtcctcggcgtggccccggagaagaaggccgcgcccgagttcgtcgaggccgcggcagagtccggcgaggccgtccacggctgcagctgcggtggcaactgcaagtgcgacccctgcaactgctgatcacatcgatcgacgaccatggatatgattattatctatctagcttgtggtggtggttgaacaattgtaagcgagtccgatcttgct

SEQ ID NO: 331327 - DNA, 265 bp, Zea mays
actacccatacgcttacctcaactcccataacaaagcccgtataactctccagggtggtgtccatcctctgcttcgtgccgacataaacataccatcacttcaagcccagccgcgtctaccacatacagctcgtcactagcgagaaaaccctattaaaggacgaagacttattgaagaggtttaactcattcaataactgtattaaacatttctacaagattgtgaatgtacttactatcatctataatattaggtacaaactac

SEQ ID NO: 331328 - DNA, 178 bp, Zea mays
cccggcccgacgcactcgtccggccgacactacacataaatcctagagtttaaccatctcccttttcaccacaagggcgagtttgtttctccactgcggatcaaccaccaaacgcctctcaagctccaagatcagccagaaatacccacacctcaatgagaccagcaccgccacacaa

SEQ ID NO: 331329 - DNA, 425 bp, Zea mays
cccacgcgtccgggaggaggaagacgatgaggggatggaagtggacggggaggcggaggatgagccggggtggccgtgtggggcgccggaggcggggcccggcgagacgaggccggcagcgatcctcgtggcggacgcggcggaggtcgacttccccgtcatctacgtcaacgccgccttcgaggccgccacggggtaccgcgcgcacgaggtgctcgggcggaactgttgatgctgaagctgtttctattgcgttccagaagagaggttattttgatgatacaaagtcgtgctccagttccaagtctaatgattccttagagttggttgacattcaaatttaggatcctagtggtgtttgggaaacagttctatggatttagagtcaaggggagatttgttgtaatatgcctctaattcctttt

SEQ ID NO: 331330 - DNA, 281 bp, Zea mays
aattcccggctcgacgccactcgtccggcgtctcacacttgttatgacagctttttgactatcatctacatatttgttatcgaagatgattttcatttcaaaattcacaactaccacttcgttaaaaaattcaatgcattgtatgaacaattttatttaatgagttcaagagaagactttattcttgcacaatttgtaccacgttgtaaactctgtctcacaggtatttgctacacatgtcgtacatttaaacatcttacttatatattctcattttaact

SEQ ID NO: 331331 - DNA, 119 bp, Zea mays
gagaaactcacgggtaatacatttcatggaagtcctgtgagggtgaactgcggtccagcgcgagttacagatggatccgaaccatgagcaccaatgggtggaggtggtgggactggata

SEQ ID NO: 331332 - DNA, 321 bp, Zea mays
cccacgcgtgcggcctggcggcgctgctgcgtgctgctggcaacctgctgacagccggggacgacctgttgctgatgcacgctatcaacgcacccgactacaaccagagccaggccatcctctgggaatccaactgctccccgttgatttccctcttggaactctctgaccctatcattgggaaaaaatatggagcaaatcctgacatataaaccttggacatcctgaacactacagctacccagaaggatatcatgatggttgataaagtcctgtggactgatccgcgtaagaagctctgtcaagttatgcatgataccc

SEQ ID NO: 331333 - DNA, 422 bp, Zea mays
gcagaaaaggagatcaaagaaaaaaagtcatcaggcaaaaaggtgacaaagggtgaaggagaatccgttgaagcagttcttcccagcaaggatgatctgaggaagaccattactgaaatcctcaagaaagttgacttcaacacggcaactttcagtgacatccttaagaagcttgacaatcactataaaatggatctggccccaaagaaagaagccatcaaagttatgatccaagacgagttaaccaagttatcagaggaggacgaaggagagggagccggagacaccgagaagaaacagcagcagcctcaggcgaaggagatcgaggcatctcgttgattatcgccgcaccaactcgagaacctcacccctgatcgtgtatgttatggggcatgatgtgtatgcagccttcacaccttttt

SEQ ID NO: 331334 - DNA, 259 bp, Zea mays
cgattcccggtcgacccaccgtccgccaagcaccaagaccaagaaggactactgcacagattataaccttcaccgctactataagaaacactacctcttcctctcttcactttggccttttacctatcctaccttaccacggtgctttttcttgacaatatgaaacccttttaaaatgttcacatacttttccaacccaaatacttcgttgaattaatcactcatcagaaacaaacttccctatacttttgtcaacata

SEQ ID NO: 331335 - DNA, 122 bp, Zea mays
tccgtcgaccacgcgtccgttagacctacaatggtgagtctgtaccaggtctgccttctcgggtggctataccgcaccaatccggcgacagctgactcgatcaaggtatggaacaagccggt

SEQ ID NO: 331336 - DNA, 477 bp, Zea mays
  unsure (1)..(477): unsure at all n locations
cgacttctacggctgctgtgagtcttctccgccccaggccggcagttccagccaagagaggtgcctccatgcggttgctgggtggacgacgatgaggaggaggggagctgcaggggtcgtgcgagctttcttcaaccctctcggggatgagcgcatcctccgagaagccattaaggagccagtagcattcatgggtggtgtgtttgttgttcttttgagttttgtcttttatgtgtattttcttttggtttgtttattttcttacattgtatgtttttatatattttttattttataattttgtgttattgtgtgtgtataatttatttttatatttttattttttaatantatttttttttatcttattattttttctttattattttttattataattatgtattattattattattttataatttttttatatttttatttttttataattataattattttatttttttatta

SEQ ID NO: 331337 - DNA, 356 bp, Zea mays
  unsure (1)..(356): unsure at all n locations
atcgaccgcacgcgtccgcatggcagcagcacaagcaagaaccacactttctcccttctcctgcgaacangncgnctgggtgccggggcaagttcaggtgcggctccagctgctcctgccgcagctgatgcatctgctgcggtatgtaccctgacgtgtagaccgacttccccaccttcgtcaagaccactgtcctcgctcagctgccgcctctattcaggatccaatctttcttacgcgtgcttgcaactttatattttttctatattcttacataaatttaatttattggccttcattttatatcctttttactggtaataccctatcgttattctgcttttatattcttttct

SEQ ID NO: 331338 - DNA, 171 bp, Zea mays
  unsure (1)..(171): unsure at all n locations
cccacgcatccgggacatacaacttgagctttaaaaaacaacgaccccgaacggaaatgttggactccaagagccaaactacancccaaagcnaccccacnaaaaatttcagaccatccaaagagacctgctgatgaacacccacaaccaccatttaacatgctaaggaac

SEQ ID NO: 331339 - DNA, 388 bp, Zea mays
cggacgcgtggggtaatggttctgaccagacttcgggtgatgccaaaaggttggctgaaaaggattttgaatttgtaaggcacgttgaaccactttcaagggaggtggttgtcactaatccaatagggccaagaccaagatcgtgttctcgcaagttaacagcacttgtactaactagttcatgggttgtactatttgctacagagatgcacataccgcataaccgtcgacaaacaatgccccaacccaacctgaagtgcaggctgtaaataatgcgcctccttcaaaagcatctcctcctactaaaacaatagaccctaacaaggctgctggtataaacagtcattttactgatggccagaacaccggctactttattacggaccga

SEQ ID NO: 331340 - DNA, 251 bp, Zea mays
ccagatctgctccatcctcaccccacataagccagctcaagagcatggttcgtcaagttagcagtgctggtgctcaaagttccttgggttatctcttttgcaatcaataggcccctgccacaaaaccgtcaacaaacaatgccccagcccaacctgaattgcaccctgtaaaacaatacgcccttcttcaaaaaccatttcctactactaaaacaaatagacccctaacaaagccttcccgtaataaaaca

SEQ ID NO: 331341 - DNA, 244 bp, Zea mays
atttgatttcttgtctgagcagaaaaaggagttcccactatctaaaaaatggttcaatgtggggccagggggttgttgcttaatggccacatcccaacatggccactggctgtgggtggccacaacggttatccagggggcaaggtgttcgtttctgctgaacagttaggtcatggagattactctgcctcacgcacataagtatttcgcatggtgtatactcttggagtcaacaatgaatcca

SEQ ID NO: 331342 - DNA, 66 bp, Zea mays
  unsure (1)..(66): unsure at all n locations
cgcccacgcgnccgcccacgcgtccgcccacgctaccgctcacgcgtccgcccacgcctccgggga

SEQ ID NO: 331343 - DNA, 319 bp, Zea mays
ggcggtacatgcaattctgaaggacctgtttgaggctatcaatgaaacacatgagctgaagcagttcacccttcgtgtggaagtaggcatgcacttttgagtcattggatagaatgagggatgaaagcagaaaatacataaagctagttgacatggaatgcactcttgacagtgattcttcaggaagcttcccaggatgttgagaggggggaatcaagccactctatttgatagattaatgactctatcttaacaatggcaactgtctgcatagtaatatgggtgtcgacttgagaactcatcaaaattattgttattg

SEQ ID NO: 331344 - DNA, 67 bp, Zea mays
  unsure (1)..(67): unsure at all n locations
gcaaccaccgcagacggcgagaggactacaggacaaggcagnngcgggccgggggggtaaaaacgca

SEQ ID NO: 331345 - DNA, 54 bp, Zea mays
gccatgagtgcacattatttggggtcattcttttgacataaaaggggggggggg

SEQ ID NO: 331346 - DNA, 265 bp, Zea mays
  unsure (1)..(265): unsure at all n locations
ctcggaccaggcagagcgccatctttcgggtccctngctgaattcccgatcgctcgctctgtcgaatttaaagaagctagcttctaccattacgtctctggcgttcggcagcaccgtagctgctgcccttgcatcttctttatttagttatcttttttcttttcttttttttattatctatttcttttattttcttttttttatttttatttattttttctttttatttctttttttttatctttctattttattatcttttctt

SEQ ID NO: 331347 - DNA, 404 bp, Zea mays
gtcgaagcgaggcaggggaggttcggcggttaacaagttacgcatgacgctggggctgcgggtgacttttacggtgaactgcagcttacaacactctccctcactaaaacttacaacatttcttcatgatcataaactccaccaccaactccttctccacaatcttagtctgcaacttggtctacacagaacctaaaaacaacaaattttaatgatgaatcaatgcaaatgtgcactgaagctaatcaacataagtccatcaaaccatccactaacgttgaattcacaaattgtatagccacttccttgaccagaaagttttgtataagagctgattttgcatgggttgtcttttttgcatttggtgtaattttaaaaaaattaaaaatttgcttgatgtgttt

SEQ ID NO: 331348 - DNA, 327 bp, Zea mays
  unsure (1)..(327): unsure at all n locations
gacccacgcatccgntcaaacctacgcacactaggtttttcgtttaacaaaacacnacanacnccggggcaagtgtacaattttaaagtcccctccgccatacaaccaccccctaactaaaactcaccacattatttcatcatcacaaactccaccaccaactcctcctccacaatctaatcctccaacttcatctccacatcatctaataacaacaaattttaattattaattaatacaatatttcactgaaactaatcaacataagcccatcataccattcactaatgttcaatccacaaatttaataaccacttcctctaccaa

SEQ ID NO: 331349 - DNA, 387 bp, Zea mays
  unsure (1)..(387): unsure at all n locations
cccacgcgtccgcccacgcgtccgacgagttcgagggtgaggagtccatctttcgcaggtgtgcggcgggaggtgatgcgcgccggcgtgcttcangagatcaagcgccgccggaggtacgagagcaagacagacgagaagaagcgcaaggcgcgcgaggccggacgccgtaaccgtcgcatgcgtatgatggacgagccgaggttcccagaagaagactcctactcgacctttaaggttcgtgactaggacaacgacaactgtgaggataacaacattcttcatatttctttttttatattttttatttccttctattcaaattgtttaatgttcaatttttaacttttatatccattattctttaatattttatttttttattta

SEQ ID NO: 331350 - DNA, 353 bp, Zea mays
ccactcgttcgtcaccctcgctcagctatctacaagaccccgggtcaaggagcattgccatctactaaagtgggtaactgtgtcagatgattttagtgttcttaatcttgccaacaagatatgtaatgcctcagagagagtcctcgaggatgcagtgaagaagcttcaggaacatcttaaaggaaagaggtattgctggagcttattagctattactaactctactttcttgcatgcctactatgatgtttgtaagttattgtctactaaatcctcaatacgtcgtgtcatatcgtgtgttcctaatggacttgtttgctaatatttagtacaagttcatgtgtgtgtgctgt

SEQ ID NO: 331351 - DNA, 351 bp, Zea mays
aaacttcttccacggccgattccccccttcctgccccggatcatgttctttttcctctgtccttcttatgttgtatcctttctttaatttttatcttttattttttatttttttctatcttttgtatttttttcttttttaatattctttttcttatattattattttttattaatattttattttatgctatttttatttattttttttttattttttatattattattttttttatcattattttatttttttaatttattatattattatatttattattattttttatattatatttatttttttattttttttcatttttattttttttttttttttttattatta

SEQ ID NO: 331352 - DNA, 441 bp, Zea mays
  unsure (1)..(441): unsure at all n locations
gctcaaccatctaccagcgactcagcgagcgagagcagtcacactgcacgcagctagctaggagcagcagcagcggcggcgatggcggcctccatgatctcctcgcagctctggcggtggcgcctcagggcctgccgcccctcggccgccgcgcctccttctttgccgtcgtctgcttcangangaagatcaagaccgacaagccctacggtattgggggtggcttgtcttttactttgataccatttcttgagagtgcgtttatgctactaatgatttcatttatttctatctatttaaatttgactcctattcagttgactaactatttttctttattctcatataccattttatttctttcctatgggcaccattttttttttgtatttaatttgactttttcttttttatatttctattcttcataaaaactttttt

SEQ ID NO: 331353 - DNA, 240 bp, Zea mays
cccacacgtccgaacacttccaatctaacattaccttatacaaccacaaaaagggggacctgagttcatttccatctacccgatcctttaatcaaccaaaaaaagaggcattcttcatatttcccttcgctctacatatttcatgcttactatacctttcatactatctgctacttcttatataatctcacctaaattcactttacctgcccttctttaatatctttctgactggcaaaa

SEQ ID NO: 331354 - DNA, 299 bp, Zea mays
  unsure (1)..(299): unsure at all n locations
gcccacgctcgccacgcgtcgaaagatcaagtattcccggagccgagggatacttggacaccaaagatgcctgcgantcctgccaagctagcctagatgagctatagatggttaacgatgccacgtattcggacttggtttgtcatatggccgcaatgttccgtttttgttatatattcaagtttttacatgtcatttgtgcagtttactttttatttattttttatataatattgtttttctattttttttttttatttatttttttatcttattttttttattttattttttttgtt

SEQ ID NO: 331355 - DNA, 425 bp, Zea mays
  unsure (1)..(425): unsure at all n locations
gcccacgcgtcgcagccaaagatggagatcaacttaacaaatgcggatgtgggagatctgaggatacagatctcgctgtcatggacatgcgacaggaattccataacgatctggatcatgactgnatatttggctcgttacctgaaaactacatagcttttctatacttgacgatgtcttaaatgccatcgactgtcaggcagatctgcttatgtgctgatgcgttcttgcatgcaatgccaggaaattgcttcatcaatatcgctaaagagcattgtcaactacggaccaatattgtgttctggcactaggatgttttgaggatgttatgtttgaagaaacttgagacttttttttttcatctaattaattatcagacgtaatttgtggtactaaaaatacttttttataaattgttttgaacc

SEQ ID NO: 331356 - DNA, 372 bp, Zea mays
gcgaaattgtgagcttgaaacttgatttgactaatcttgagcagagactatttgacgctgagagattgtcccaacatgctggtgagcacaaagctcaatttgacaaactactgggagaacatgagctccagctacatgaagcacagaaaactattcatcaacttgtatgggagaataagcaactgaaggagttgttgcctgtaagagctcctaaacaatctcctcctggatctggatggaaagttaacaaaacattggagaacggtgtgcatgcagaatgcgaaagtggcgatgtaattcttgaaaatatggcaaaacgaaatgaagaatctgaacttctaattgagcagcttaaggaagagcttcgagaac

SEQ ID NO: 331357 - DNA, 267 bp, Zea mays
ggctcaggaccacatcaatatttacaagtggtgggttcctttcaatctgttccaccaggtagttctcagtcagaattcttcgctgctggcgccgagtgggcccaccaccaggacatcatagttaaattgaatgatatttggcagcaattcatgctgcgcaggatcaagtcaacaggattcaataccatctcatctgcttcttctaactggtgctgctgtctctccttagctctcggctcagaaagaagaacgcagccccagctctat

SEQ ID NO: 331358 - DNA, 183 bp, Zea mays
gtcgagacacatatcacatcattatttacgttccaaatatccgtcccaacaccggggagagtgttaatttcatacatcaatatttttacaaatacctctcaattcacacacatacacatctcttaattcaaccaaaacatcatcctttcatacacttacttttttttttttataaccaccaaa

SEQ ID NO: 331359 - DNA, 201 bp, Zea mays
  unsure (1)..(201): unsure at all n locations
ggccgaccgcacccaacgacacaccacanaacacttcatatttgactttaaaaacacacatcccaacacagcggaaatgtaaatattaataaatcaatagccctacaaatacccanccactcacaaacatacacatctcttattttaaccaaaccatcatccattctatcacttactatttatttcttttacatccaccaa

SEQ ID NO: 331360 - DNA, 273 bp, Zea mays
aaaacaacaaaaaacaacaggaaccgcaaaattgcaaaacggacataccccacccccaataacaaataacaaaaataaacacaaacaaaaaaaaaacaaaaaacaataaaaaaaacaaacaaaaaaaaaaaaaaaaaaaaaaaaaaactaaaaaaaaccaaaaaaacaaaaaaaaaaaaaaaacaacaaaaaaaacacacaacaaaaaaataaaaaaaaaaaaaaaaaaacacacatacaaatacaaaaaaaaaaaaaaacaacaaacaaaaa

SEQ ID NO: 331361 - DNA, 351 bp, Zea mays
ttcccgggctcgacccactcgtccggatgattctaggatatcttcggttcctgtttattattccagaaagctactatcgctattgtagcatcttccactgtatatttctgaaatttttagatctattgtctgtcctttatttttatatctaatatctcattatttttctccacttttttataatcatttatattttatttcatttttagttttattttttttattttttttatttttttattttttttttatttatttttttttttttttttctttcttttttttttttctttttttttctttttttttttttttattttcttttattatttatttctctttatttttttt

SEQ ID NO: 331362 - DNA, 335 bp, Zea mays
  unsure (1)..(335): unsure at all n locations
attcccgggtcgacgcacgcgtccgcccactcgtccggcggctgcgactaccttttaggccgccatcacctgcggtcagttnatgttcaattttaaacggggcctgtcctacacccgcttcacgttgtccgtccccttctcatcctgctttatctgcttatttaaccttataatctcatttagtatcttacttttacattctatttttttaattattttatatctatattttttattttttttttatttatttcttttatattattttttatttattttatatatttatatattatatatttattttttttttttttatattcttttatttattt

SEQ ID NO: 331363 - DNA, 318 bp, Zea mays
gatgtatgttcttaatttcctggcgtggttattgttatcgaattaattgatactttatcagggtctgtttaacttacacctgtgtctaacttaattcgcttcacagatattcccgtgtctctttccatttttcatgcaatattgttctttttactcccacttttcctttattatttttttctttctttctatctttttattatctttttctctttttttttattttttttaattatttcttctattttattattttttttttctattatatctctttttttttttttttattcttttttttttattttatcctctttt

SEQ ID NO: 331364 - DNA, 320 bp, Zea mays
attcccgctcgacccactcgtcctctaccctctctaccccggctgcttcttctacccgctcggcctctcctactaccgttatgccttcatttatcatatggttaaccatcttattatctttcttctttccatgttcttctttttcttttttttatatcttttctttcttttttttatcttttattttttttttttttctttttctttttttttttttttttttttttattcttttttttttttttttttttatttatttttttttttttttttttttttttttttattattttttattttatattttttattttttttat

SEQ ID NO: 331365 - DNA, 429 bp, Zea mays
  unsure (1)..(429): unsure at all n locations
catggtcacctccaaagcaagacccaggctgcttctacaaggagctgtacaaagagtgagtgccagcggggatcttgagtgaacctggcgggtagagtctggttctgttacacttgtaccactgaagagttccgagttccaaaagagaaagagaaaggtaaagcagacaggctagacatgatcattagctggcaatacataggtgcggattagcacggaaagtagctcacttactagcaggcaattctttcgaagtcttaaggccatactgagctgggctggtttggctcagcgttacatactgtgtacaactaatgcccaatgtatcctttcccaacacaatgctgntctgatattctttctcttctttctgtacgtgtccttggtttttatgggacattctatttctatacaagtatacatgtgnga

SEQ ID NO: 331366 - DNA, 322 bp, Zea mays
cgggctcgtgggccggattctgtccggctttaattaaagataccagatgaggcgggaatgtatgcatttatttcgtttgatggcaaaaggaggcagcaactgtcaagaggagattctgatcgtatatccattagtcagcacccactcccaactgttaataaatcttaccaaactggtgattgtttccgtaacctgatcagttgtattaactttaactagatatttatctctaatgcactatttgcactataattttttttatttgtttttttcatttttatttttattctcatatatttttttttttttttttatttttttt

SEQ ID NO: 331367 - DNA, 69 bp, Zea mays
aacccaacccacccactcaaccacacgaatcacatacacttccaccccacctttccaccctccaccacc

SEQ ID NO: 331368 - DNA, 280 bp, Zea mays
ccggtctcggattcccgggtcgacccacgcgtgcgcccgcgcgtccgctggaggtcatccactctcgctgggccatgctgggcgcgtggggctgggtgttcccggagctgctcgcccgcaacggcgtcaagttcggcgaggccgtgtggttcaaggccgggtcgcagatcttcagcgagggtgggctggactacctcggcaacccgagcctgatccacgcgcatagcatcctctccatctgggcctgccaggtcgtgctcatgggcgccatctaggggta

SEQ ID NO: 331369 - DNA, 280 bp, Zea mays
attcccgggtcgacccactcgtccgtacgaccttttcagtgctatagtataggattttcttttgacggccattaaaccgcctcagggtgccttttcaaagagcgctcctgctctcactagttcaatcattcctctcctaagaaacttctactcttctacatttccttcttctttacatcttctttcattatattttctttatcttcattttttattattttttattattatatttttttatttttaatattattattttttttatattttattttatatt

SEQ ID NO: 331370 - DNA, 299 bp, Zea mays
tctcgaccagaggaagactgtagccatgatattgatataacttcagacgaacctggtcgcagccctggtcaattccatcaccactctcatcaaatgtatggtacatattatagcagacactcactccacagggatcatcgcaagcgcatactaatccaagatccaggcttatctccactagatgaagactgtatctattaaaggtaaagaacttcatactaactttttctcatcccttattgtttccattattattttctttacaatttatgatactttttttatcatacatttttatt

SEQ ID NO: 331371 - DNA, 361 bp, Zea mays
aattcccggctcgacgccacgcgtccgtagggctagtcccccttccttccatccattcatggcatgcgtcagcaccttccagagctgccccattgccagaagagcaaagatcaacaccaggtccaggggcagcagcagtagcgtggcgaaggggtcaccaccaccagccttccagttccagtgcagggcgtcgactttcgcggcggacaccatgcctcggctcgagctgtactagaacccctaggcgatcatcttggttgcttttctctttaacattttttttttttactactacgatttttttctctttacttcttattttcattaaactttcttttttattttgttctatttttttttt

SEQ ID NO: 331372 - DNA, 216 bp, Zea mays
gaattcccgactcgacgcacgcgtcacggcagtccatttgctgctagaggctccggttaccttctctcggatgcggctcacgtccctgtacaggttcaacgtggcgctgggcgtctgacctcaacaagcaagaaagcacatggcaagcggcaaggttgcacatgccaccctcaagggcccgagtgaggctgaatgagatcttcattggactgaccc

SEQ ID NO: 331373 - DNA, 230 bp, Zea mays
acagctatctcctaaccctgtttatcttttggacaactctctagattccatcgctaatgtaacattttcacacctactaccaaatctaagttgaaacccttctcaacctcccaaagaagatacaaacattcaggaactaccctttccctaacctgattaatatactactgctttacccattactatactcatacacacttacatcacatatccacttcacactcaaccct

SEQ ID NO: 331374 - DNA, 321 bp, Zea mays
cccactcatcctcctactcctttattcatacctatctcattcttaccaatccacatcttcccttctttaatgtcacttttatatacattatctgcactatcataatcatctatatcttacttttttctcttttttcctttatttttttttttcttttctttttatattttacttttcactttttctttttttttattcttctttattttttacttcttttatcttattttttttttttttattttttttatttattttattcttttttttttttttttcatttcttattcttcttttttttttttttttttttctcttttt

SEQ ID NO: 331375 - DNA, 121 bp, Zea mays
ttttttttttttttttttttttttttttttttttttatttttttttttatttttttttttttttttttttttttttcttttttttttttttttttttttttttttttttttttattttttt

SEQ ID NO: 331376 - DNA, 362 bp, Zea mays
  unsure (1)..(362): unsure at all n locations
actcgtccgctgcattggtaatntaataaaatctcagttacttccagattctaagcctaaactatcttggaaaatttttatctcttgattcatctactgtaaacataatactatttcaatcgagtctagaatcaatttataataatgttatcatatcattttcttttttaatttaatatctcttttaatttcttattattttattctttttatttttttactcctttatttatttattttttctatttctttatttttatattttttttctttttattttatttatttcttttatttatttatctctttttttttcttttatttatctcattatatctttcttttttttttttatttttttt

SEQ ID NO: 331377 - DNA, 213 bp, Zea mays
cttttaattatccctacacactcaacttctaccattaaccaataaatttaatacactacttatcaatcatcccaatacaacactacttcacaacaatctcttacattaactcaatatatctccaacaccattcttacaaaaacttacatactcaacaactactctttccctaaagctaaaacctcttattatttcctcctattaacaccttta

SEQ ID NO: 331378 - DNA, 177 bp, Zea mays
cccacgcgtccggtgtttccagaagtctaattgtcatgtcatttgtcactaagagcatactatgagaataaagctgagtaggtttgtatacacttataccgtgttactatgttagtgaaatagtgaagtaacatcatttgggaaccttgctatgacttatgagcttattctccttct

SEQ ID NO: 331379 - DNA, 454 bp, Zea mays
tattcctcggtcgacgcacgcgtccgcaagagttctcggcttctcgcgagtcgcgacagataaagaggtcgagaaagaggcggatgttcggttaagatgcatagcagcagcatgaatagggagatcagctaggcctacgacaccattctctttggcatcaacgcctgcttcaaagtcgaccttgccacgtcgtatctgttctagtctactatccaatctgagactaagttctggtctgacatgattaagttcgttactgattctatatactgatctgttttaatatccttaagttttttattcataatttgtcttttgttttcattattttttttgtgttatgctcttatttttatttttatacctttttttatatatctttttttttttttattttcttttgttttttttttttttttcttttttctttatttttataattatttttttattt

SEQ ID NO: 331380 - DNA, 120 bp, Zea mays
attcgtcgaccacgcgtcgtatgtaggtcagagaacctgaacgatatctaagatgaggataccagagccatgacagccatagactgatacaaatataacagtaacctgacaatttaacta

SEQ ID NO: 331381 - DNA, 259 bp, Zea mays
attcccgtcgaccacgctcgccgcctcgccacctgctgagattctagttgcaccccattccactggtcgtattctcacttggatgacaatagatttctgtgcttccattcaggactctatttctttcatttttttcctttttttattttttttttttttttttttttttttttttttttttttattttttttttttttttttttttttttttttttttttttttttttttttttttttttttttttttttttttttttt

SEQ ID NO: 331382 - DNA, 378 bp, Zea mays
cccacgcgtacggccatgcatccgcccacgcgtccgctcgcgcgtctgcggactcgtgggctccaagtggtgcaagaaggaagagagggcgcatgatgatggaagatgaggatccattgatatgcactgtcactgaatcttttaagactctttcatgatgcaatcaagcagtcatcaccatcatccacagtccgataatcctaccgaacctatggactatgatgaaacagattcctgttgttgaaagagaacatatagctgactactatgtctacttgtgcgagaatacatcccttgcttatgccttcctagagatggaactagatgatcaaatggtatgggtgtctaggtacatcaagactcatctctgctgattga

SEQ ID NO: 331383 - DNA, 349 bp, Zea mays
  unsure (1)..(349): unsure at all n locations
ctcggcttggtcctgctcaatgaagggggaggggctcgctgagagcgtgtcgggccttcgttgagggctctatggagaaggnnttgaagcgccagtgagaaaatcccgagctcgcttcacgtactgtagatcctcacattatccatgcctgcaagggcatgggaagatgggattcggcaatgcatgattctntgatcatgaatagttctcggaaaactctgatcgccgaaggatcatccatacatcttctgcattcatcaaggggtaccttctatcgctgggagaatagaagatgcctgcaaagtatgtcaagtgacatgagcatccaagggacaagaacattcttgtg

SEQ ID NO: 331384 - DNA, 76 bp, Zea mays
aactaccgggtcgaccgacgcgtccgaccacgcgttcgcaacatatggcttttaaagtttagaaccatgatcaaaa

SEQ ID NO: 331385 - DNA, 228 bp, Zea mays
caaacgcgccacagctcgagactcttagagatttgatgctgcagcattaactcaaggtgtaacaggttacgtcagctgatgctgcacacaatatcttgatcaccattaaacaagacagggatagactactgtcacagttatctataactgatgtaactccattcacagatctaaagatcccactggccaacatatataacacatcttcggacgatacatttatcaaga

SEQ ID NO: 331386 - DNA, 435 bp, Zea mays
  unsure (1)..(435): unsure at all n locations
aattcccggggtcgatcccacgcccgtccgcgcccctctcgatggggggcttcgtcccgcaagggtcnttacggcatcctcgctggcgcagnnctgctcctcacgcgaccgccgtnnctccgccctctaccgggttctccaaccccatccctcaatcgccacgcctcnntccgactccnnccgggcctcgcgcctcgtgcctcnngccgtcctgggcccttcatcctgggatgatcccattgtanntcattatcagcaccaagccacccacactatatttcgttttccctgggtnctgttcacagttgtgccttgagccnnntcagcatcggtnngtggcttgtgcctaaccacccaaggggannaaatcgttctggagggcctttagtggctgaccggcnntggcgtggtgnnngtttctctggacctggcgta

SEQ ID NO: 331387 - DNA, 250 bp, Zea mays
cccacacgtccgaggacgcgtgggcggacgcgcggggcgagccgcaacttgtggtctatggctcgcaaggaaactagtgtgaatctgtagtgcatgccaggactaataacctggatgagactgacatttctaccgtgtcactcgcaactgcagataaccattagctacatcggagggtacagttcatacccgtatatagcgtaaatgtgatgtaaatgcagtgggcatgacttccgcaaagtaatcctga

SEQ ID NO: 331388 - DNA, 369 bp, Zea mays
aattcccgactcgacggacgcgtcacgccggctgctaatcgacatctatgtcatagtttgacatccgctccaactgggatggaaattgcgtttgtggaagttcgtaaacatgggctgtggcttttggctaaaaatgtgaaacagtatatccacagaatacttgttgaggctgacttcagtgctggaactggtgatgatttatgggctgctgtgggcgaagctggtaaaaacctttacgcttaaggcgaattcaaagagtcgcaagttgcaaaccttgatgtctatttggtgaaaaagggttggacttttccctgatgttataaagaagaaaacattgcgccatcttgaaaaatgagataatgtcttaac

SEQ ID NO: 331389 - DNA, 293 bp, Zea mays
acggatccatccacgcgtccagtaaagggaaccttcacttagctaccaaactagcgattataggcctcacatcggtgatgggtcgtacatgtaacgagatctcaaaactgggagctgaagagcttaagacagctcataaggctgatggcatagcttgatacaacacatacataagatcatcacttccaagacgaagacgtctagcaattcatgtgtatggttgaaactcacatattgctgatgctgataaactccagcagctatcttgaactataatatatcacgtacaatca

SEQ ID NO: 331390 - DNA, 335 bp, Zea mays
  unsure (1)..(335): unsure at all n locations
cttctacaaataactttacaaacgaatnatttccaactttaaatcttcaattaacctttcttttaaaatctcattcttttacacttttaccacttaaaaattcctaattccaaaatataaatataaatttaaatcatacatgctatacattatcattaactttcaatacataaattcttattatcacctaaaatatctcacttactaacattcaattctttccaaatcttaattccatacttaactttacttattttccttaaccttacatactttgtacaactaattcccaatgtatcctttcccaacacaattcttttcttatattctttctc

SEQ ID NO: 331391 - DNA, 169 bp, Zea mays
attcccgggtcgaccgcacgcgtccggtggatgtcatattttgagctatgcctatttaaattaatacaataattaatataaatatataaaagtatatttttgccttatggaaatattttggattgttacactagtacatacatgtgaaatatggattttcacgtcgata

SEQ ID NO: 331392 - DNA, 141 bp, Zea mays
cagcacgatatcacaccaagctttcacttacttgaaccatgagaacgccctccgggtgggggttctatacacgtgccgctacctttgccaatcgctggcctttttaatattcacaatgacttagatcgatgggctcctgat

SEQ ID NO: 331393 - DNA, 211 bp, Zea mays
aattcccggctcgacgcacgcgtcacgccgtgactacctctgcaatccgagcctttttttttctcacatcatatcttgccaataagggcatacgtatgaaaataaaacgggctacgtttgtatacacttataccgtgttactatgttagtgaaatagtgaagtaacatcatttgggaaccttgctatgacttatgagcttattctccttct

SEQ ID NO: 331394 - DNA, 137 bp, Zea mays
acgcgtccgcttttgctggtctgctgagcttaatcatgcttttatacggcttgtacatgtggggagtcgtgattgatctgcaccgcgctaatacgttgtcttcgactgccctaataagtggcgcttatgaggactga

SEQ ID NO: 331395 - DNA, 435 bp, Zea mays
  unsure (1)..(435): unsure at all n locations
cccacgcgtccgtggttgtgatatacttgggacctgaaggctggtacaatatttgtgaggttggggtatttgaggtggacttgagcacaaaccctttcagattcactgagaccaacagcttggatggcgactgcattttcatcagcccctgcagcagcaattcattctgtgcatgtccgtatgacggagtcgaagatgatcttatctacttcattggtagcctcaaccactcaagaaatgcgtcccctttggataagtttgtgtacaacatgagggatggtacattggcgccatttgctttggaaataacagacgacgaccttcgggcaccagatggcagccggatgaatccaacatggctacttccttctgaatgaacagctgctatagatcaattctggtaattgcgctgctacctngatgtgatgtgccatg

SEQ ID NO: 331396 - DNA, 273 bp, Zea mays
gcccgtggtacggccccgaccgcgtgctgtacctgggcccactgtccggcgagggcgggagctacctgacgggcgagttcccgggcgactacggctgggacaccgcggggctgtcggcggacccggagacgttcgccaagaaccgggagctggaggtgatccactcccgctgggccatgctgggcgcgctcggctgcgtctttccggagcttctcgcccgcaacggcgtcaagttcggcgaggccgtgtggttcaaggccggctcctaaatct

SEQ ID NO: 331397 - DNA, 194 bp, Zea mays
cccacgcgtccgcctacgcgtccgcttttcgctagctgaggacggtacagcggcacaggagtgctacgtacgacgacggcgacgcaagcgccacacatggcatcccagctctccgccgtcgtgccccggttccactgcctacggagctacgcctcgcccaggtccgcagccgcagcgctaatctacaccatggt

SEQ ID NO: 331398 - DNA, 167 bp, Zea mays
cccacgcgtccacccacgcgtccggtctacagctagggactcgcgcacatcttcgacgagtccggcgtcatctaggtcgccgaggttatctacaacagataaactggccattaccgtacgtttggtataattactatgagcacttttacggaagctgacaatgccat

SEQ ID NO: 331399 - DNA, 242 bp, Zea mays
gattcccgtcgacccacctcggtgccgtacctcgccatgggcgttacctaccctgccatgttcccggggggacaccaagagtgcagcaatatcaactccaacagaactgtctacttcgggaggatccacaactaagtcacgtggcaatccgccaggcctgtcatggctcactcatgcaactgcctcatcagagatgttccgagtggcagcattcatgcagtcagagagcttctgcctgtaca

SEQ ID NO: 331400 - DNA, 431 bp, Zea mays
agactacaaacttttgggtcgtgtcataccagcccaaagggtagaaacagtggcgcaggtcgatcctaaaccacgttatgttttcgttgggccgtgacgatcagtccgacccattacccatatatttgaacaatataaaatctaaatattacaactaaataaagtccatagcttactaaattaaagatattaaacaatactaacatcatttaaccacataaagtgcaaatattacaacaatgtaaagtatatagcttactaaattaaaaaattaaacaattactagttagatgcccgtgcgttgcaacggcaatacaaaatatttttacacaataattacatataaatgaacaccacatatataatccaacccaatatcttaaaaaaaaattggcaacaattaatacagaaataaactgatacatattaat

SEQ ID NO: 331401 - DNA, 387 bp, Zea mays
cccacgcgtccgcccacgcgtccgtccacgcgtccgcccacgcgtccgcccacgcgtgcgggtatatatgatggtccttcctgattcaccatttgctcaacctccccctgctcctgacatggaaagctacctggagcaggcgtgaagcgttgctgattgatatttcgtccgccgctcggtctctctattagtcatctgatctgagtgtggtacgttgctacctgccccccgcccacagcaagtgtacgttgaggtcaggggtgcatactgtgtgtgagtgagtgcgtgtgcgttgctgagtgtgtgtgatgcttacttggatttggagaacatgctggattgttagtagtgggtagtactgcaatgttatgcctgaacatggctgga

SEQ ID NO: 331402 - DNA, 261 bp, Zea mays
cggaattctccgggtcgacgccacgcgtccacagacacgcaccttacagacacacgcgtacaccttccgcagccatggcatcagtaacgttccgggcgttcgcgccgagcgagggataatcacctgacggcaggacaactattcctcgtacgaccgtaccgagctcaccaagcctatgtacgtcttcgtccggggcaaggtctacgacgtcaccttcggccgtggcttctacggccccggcggcgcctacgccgtcttcgc

SEQ ID NO: 331403 - DNA, 208 bp, Zea mays
gaattcccgggtcgagccacgcgtccggtttcattgattcttgaagagatcgagcttcttttgcaccacaaggtcgaggatgtgtggcagctgcggatcaagctgcggctgctgctcaagctgcaagtgcggcaagaagtaccctgacctggaggagacgagcaccgacgcgcaagccaccgtcgtcctcggcgttgccccggagaag

SEQ ID NO: 331404 - DNA, 127 bp, Zea mays
ttcccgggtcgtactccacgtcgtccgcccactgcgtccgcccacgcgtcctctttactcgtgggtgccagcagagcaccaccgggggggaccgatcaatggaggctggtggagcgtggtgcctgag

SEQ ID NO: 331405 - DNA, 184 bp, Zea mays
cagactcctgggcagacacgtgtacgtttccgtcctactaggcaggaatgccacggggacgtcgttaattggcggatcagcatcatgtaccatcatgcgtgggaggtggctatgagctacgcgagcccacagtatgagaaggtgcaatgcttgaagatggataaatagcatcgcgaattctgtt

SEQ ID NO: 331406 - DNA, 154 bp, Zea mays
atctgaatctccctagcaatctctagcatcagattctagtgccaaacaaagctctagcggccttgttactgtcccaatagcccgtacgaaacatacagcgacaaaatctaatggccgccaggatccaaggaagcaactggccaccaaggccgca

SEQ ID NO: 331407 - DNA, 308 bp, Zea mays
cccgggtcgacgcacgcgtccgcggacgcgtgggccgacgctactcgactccttgtgagctgtccgcaagaatcttcacggaggggtctatagcatggagagcgtcgagggcgacagcaagtcggccagcaccgtccggctcctcaagtacaccgaggcggtgccgatgctgacgttcgccaaggagaagcttgagacggcggacgacgagaacaaggtggcgtcgtacagcgcggtggacggcatagctggcggatttctacaagaacttcaagatcacgctgaaggtgactcctgctaaggctgac

SEQ ID NO: 331408 - DNA, 196 bp, Zea mays
ccggcacaaggggctaatacttacgtgcaatggtcttggtataaggtactcagtatggtgaacgcgctcaagggcccacagtttgcactcatctgcagtcttggagaatctgtaatggaagcctttgatctgaaaatggtatagtgcatcagtgccatgtttgaaagccaaatattgaccacttgagttcatccta

SEQ ID NO: 331409 - DNA, 405 bp, Zea mays
gaattcccggctcgactcacagcgtccggtcaggcgaggtatgcatgtggcgctcggcctctgttggagaagacaatgaaaattgcggttgagggtttggtcgacatctttcttagtgtttttcatgagaataagaccaacgattttagattgctggatgcgaatggtttttgacaactgatgcctgagcttgagtattttgagactgtactgcacacgtacttctcacctgaggcgcaacaggctatgaaatctttacaagagaattagttggaaaaggcctgtgaatgtgttgcagaagccatggaaaatcctggacaccaacttcgaccaaccctgggcagtgaagatacagcatcggatgacagacagccattcatatcacctgttgatttgcttgggctt

SEQ ID NO: 331410 - DNA, 447 bp, Zea mays
ttatgtttgtgatttttgtggagaaacaccttaggcagttgggtggagaagaatcaagaaagctctcgtccaacacacacctagccctctacataatcattgattttgaatcgtctccgttttcctatattttctatactcatttacttttattgatctcttaatatatattttcttcatctctatttatttcaaacttattcttattttcttatcttatttttttcttctttctttctctattatttttttttattttttattttttcttttttttttctttctattattttttttttctttctttctttttttattttcttattttttatatattttcttttttctctatttattttttcttttatatttttctttctttttttctcttattctttttttttttttttttcttttttatttttttatttttcttttatttttttt

SEQ ID NO: 331411 - DNA, 360 bp, Zea mays
tcgactcaagccacgcgtacgacgactatagaagtacgacccttcgctttgatgaggcacaatcaaaagatgggtcgaggcgctctgctgcagctggatcagcgagatgtactacaactaggcacgcaatttgcggttatttaactctactgctattggtgatatacttccggaacacgattatagagctactctgccacagacgttgcttttactctcggcacagcaatctacgaaaattattacatgagaccttagctggaaacaaccccgtgaaagtgttgcatgaagccatggttaaatcctggacgccagcttacgaccaaccacgcggcagtaataaatacagcgatcggatga

SEQ ID NO: 331412 - DNA, 363 bp, Zea mays
ctcgactcggaattcccgactcgagccacgcgtacgacgacgcgtagatacgaccgatcgcatgagatgagcacgctagatgtacatgatcgtcgtcgcaagtgctctgcgtgcgagcatgatcaaccatatgaactataactaggcgcgcagtttgcggtcaactaacaatccacctatagcagctatacttcaggtccacgttcatcaacatataatggcacagaggttgaggagcctgacgacaaagatatctacgtaaactattacatcgaccatagctgcttcaacacccgatatgcatgcctgacgagaacttacatccaaatgctagcgcatggctaggaatcatcatcttgagca

SEQ ID NO: 331413 - DNA, 166 bp, Zea mays
cagaccatactcaaacacgatctctttattggacaagacaataacaagactggcgcgggtatttttaaacatcattcttaatcatatgaactacaacataaccaaaaatatgagacccatgaatactaaaccattacaacacataaaccacgaccaagattatcaa

SEQ ID NO: 331414 - DNA, 244 bp, Zea mays
agcgtgcttcatggcgatttgaggatcggagtcatacggtcagattgcaatggggataccagcctatacaatcctgctggacactatggacacaacgaggcacagcatgcgatgtccaggaccactgcatatactctagacttcgacagcccctatagcaatgacactccgatgcaccatgtgaggcagaagctgatgcatgcgtatcaaatctacgatcagaatccatagtacccagtcattg

SEQ ID NO: 331415 - DNA, 307 bp, Zea mays
cggacgcttagctaagaatgattcattgagatctcatgagctgaaacataaggacggatatctatgtggatacgatgctaatgcataccaactatatctatggacacaacgagacacagattgagatttcctgatttgctgcattaattagggacttgtacatcacctattaacaggtgatacctaaacaaccaggattacagaagtgtaggaacctacatctactttaccattacttgaatcacttcaatttattcaacgctggctaccgctcatcagctatgtccataatcgaacactacctata

SEQ ID NO: 331416 - DNA, 246 bp, Zea mays
tctggcatgagggagtcgtcaggctatgagtaagacctgtgtgatgactgatggtttggctttgctatcgatctaactctcctatatgcaccatgtgtgtagcatctgtatcagcgcgaatcagaagttgctcacaatacatcagggccagttatggcgatcactgtaaaagctattgatcaaacagccgctgtcatcttagtgattctgcatgacaggaagcagaagtgcttcatgccactcata

SEQ ID NO: 331417 - DNA, 336 bp, Zea mays
acacaccactcaacactacaacccacacacattcaaacacaaccaactcacctatactaggaaactttaaaacccactccaggaatatttaacaccaacctcaactcactaaccttcctccaaaatttttaccatgaacttttactcaccccaatctctcaaataccatctctactatttcaccattaacaacactctttaataaccccatacctaatcacaaccccaactcgctcatactcaaattcaactttaacacacaacgtcacacccactataccatccaatcttacaaactcctgcattccacttcatatctttactatattttcacct

SEQ ID NO: 331418 - DNA, 385 bp, Zea mays
cccacgcgtccgcccacgcgtccgcaaaattaggcatagccgcttaggtgctactcactctaagctactagtactccagtaggcaagcatcagatcacccagctgcgctacaaacaagtggcgtttaattgtaaaaccaaaccattttttttctctatcttcttcttcttctttttccctcccctttagattttttttataagccagccagatagtggcacccataggagagaagaacacaaggaaaccataaaagaaagagagggaggccctgattgggattctaattgtaagctagctaggttgcccacctgaaagcaggctggcagctaggtcgagtaacccacggatggatggattggaatggaatggaatggaatggatg

SEQ ID NO: 331419 - DNA, 395 bp, Zea mays
ctcggatggaggctcgactcgagccacgcgtgcgaccacgcgtccgaagaacactttaccgagaagcgatcagagcgaggcacggcgagggcaacgacagagccatgagttaccagaaggtccctgagttttatccgccaccagggtactcgcatccgcacccaccgccccaggctccaccgcaagggcctgactacccgccgccgcagcaaccacctgcggggtaccagggctactttaacgacggccagcaaccctacggctatccgccgccacaaggctggccgctctttgctgctgctgcatggtggacgagtgctgctgctgctgcttctgacatacatgcacctgaagctcgctgggtcttggcatcgaggcacggcaacatttgagcg

SEQ ID NO: 331420 - DNA, 272 bp, Zea mays
gaattcccgggtcgactcacgcgtcccgtcacgcgtccgctctgaccggttattcagctagatgagctcagtgtgatcacactaagatggaatgacaagagaactagtcatcactccgttggaagtatgtatatttggccagagggcgttctaagtcatcgaatagttgactcttgagggtatatacgcttacatacctgctatcgcttcaactatgcttatagccaccatggctgcagcaacgacgatcactgacgctaccagtatccgtc

SEQ ID NO: 331421 - DNA, 231 bp, Zea mays
cggtcctgattcccgggtctgcccagtctaactcaccaaccaagcatacctcactcactacaaacaatatacaacacgcgaaagttctctctcgagatgcgatatttaaccaacacctggcagagattacaacatcatctactacaaaagcttctacgtggattgcttccattaacttgcacgccttgcaagcacttaaagaccaattttgcctcatccactataactact

SEQ ID NO: 331422 - DNA, 190 bp, Zea mays
accaaccaagcaacctaacccacaccaaaccttaaacaacacacccaaatacacactcgactgcccatttaccaaccaacaccgggccgatcaaaccacagcagcaactacaacagcttatacggttcttgcttccactaactcgcacgccttgccaccacacaatcaccaattaggcctgaccaactat

SEQ ID NO: 331423 - DNA, 150 bp, Zea mays
ggtcgactccacgcgtccgcccacgcgtccggactccacgcgtccgttcacgcgtccggcgagggccgccctgagggggtatttttaggaccatgaaataccatgtgtatataaggattactacaaagagtacaaatcttaatattttta

SEQ ID NO: 331424 - DNA, 480 bp, Zea mays
ggatccaacgcgacacgaaagtctgaccaatagttgtttacatacatcctacgtgcaaattcgctgccgaatactctttgtgactgtgattgcagatatccacggactttgatttgatgtaaccaaggctgagaatcaggagccactttttaggcgcagcctgatgagaacgggacatgagattcagctcggatgtagcaagcgtttcgctggtgtgtttgggggtgcattactgcatagctaattttgattttaatcttgatgtgttttatgatgtcctaatttttgatgtattattaatttttgtgttttgtattttttctaatttcttttttctttatcttttatttttttattgtttctttttttttttttttttgtttttctttgtattttatttattttttttatttttatatttaattttttttttttattttttatttttttattttttattttttattttttttttttttt

SEQ ID NO: 331425 - DNA, 188 bp, Zea mays
acaacccacccagccccataaagcaaccttccatgcaacccatcccaccaacacctacccgcacatttacaacctctatacgcgcctcttctacatcccactccctacaaagaacccacccaacctcaacgcccacctcaccaccaacaacccactgctacatctctccttatttcaccctccacaca

SEQ ID NO: 331426 - DNA, 161 bp, Zea mays
tccaagtacctttactgaacaagattttgattacagaataatcaaacaacatcaagagcagcattatcagaagcttcagggcaaatataaaaacaaagagaatacaacagaacactcaactcaacattaacctgatcactcatatcctaacatccctacca

SEQ ID NO: 331427 - DNA, 294 bp, Zea mays
cggtccgtgattcccgggtctgcccacgcgtccgcccacgcgtccgtgcagactacgttcttggcggttgatagtttcccgctggcgattgttcgcctgtcagttcatgtacgtatgtatgtgtgtatgctactctgcggtggctaatgctttttctgatgcctctgtcgttgtgtgttcatcaccgtcgtgtgcgattgttctttgggttgtctttgcctcaataaaactgcttcattctccagtattctatagatgagtgctatgtactctgtacaacatagaacagagtac

SEQ ID NO: 331428 - DNA, 298 bp, Zea mays
attcccgggtctgcccactcttacacccactcgtgcgctcacactacgtacatccctttagcctgcgacacccttcctatctacctccgaccacttcaaacacgcaagtaacaatccacattaacgtctacaccactaatgctcctcaacaacccctgctacttgaccgacaatcatcactccagcaagatctagacttctgccgctaccccatacgagctacagctccaccttgcagctgcctacacctcaatccactctacctactacttccaaccttacttctccatttccaccc

SEQ ID NO: 331429 - DNA, 484 bp, Zea mays
tcggtccttaattcccgggtctgcccgctcttacagatcgttctatcgttcttccgttcgttcgtccaaataatcttcttcctgtcgttatgctcccagaattcttatcaatcgttcgttccatcgttcatcgttcgatcatagttcctatccatccttcatcgttcattcataccaactattcaccatcactatttacccttactatttaccgctactatttaccgctactttttacctatactttctaccgttactttttaccgttactatttaccgttactatttaccgttactttttacctttactttttaccgttactatttaccgttactttttaccgttactttttactgttactatttaccgttactctttaccgttactttttaccgtattttttaccgttactatttacctttactttttacctttcctttttatcttttctattttacctatactttttaactctacttttta

SEQ ID NO: 331430 - DNA, 264 bp, Zea mays
cggaattcccggctcgacgcacgcgtccgccggatcacccggttacacctgctgattcacgttcaggagctatcacagctagcggcgactccttttcagatgatatcatctcttacaccatcctacaagtactactgtagctccagcatgatcctgctgcagctcatgcaactgcatgagccctaacctggagaccgtcgtcgtcagcaacatcaaaaccactgtcctcgccgcgccgaccaccaaggccagctccctctgttt

SEQ ID NO: 331431 - DNA, 193 bp, Zea mays
ctacactacaccacaccacacactcattaccgctatcacacacaccctataccagcgagttatttccatcgtagaccgagactcaacaagctataagctatgccaacacaggaataatagatggcggcgtccaccgagacgaccgtctgtgacctgaagactaccactatcatataggctgctgctgctgcca

SEQ ID NO: 331432 - DNA, 399 bp, Zea mays
cggtaatgcaagtgagtgccaggaaaccatgtatcatgtgagatcatgtgagtttaacatgggcattttgtatacctttttattcagcctaggtataaatatttattcttttgggttttaattttttttcattagtgggtactgcatataaaggtccttgcgccaaactggtttaatgtcggataaaaaaaattatagattgtaaagtaatatgcactttgcacgaaagataaattttgttttgaatctatagaaaaattgtgatatcatggaccatggttagtttacatagatagtagacttatgtttgcgattggagaagtaagaattagttagacttatgtttgtgattggaggagaactaaaaatcagttcatattccttgctacttgaaacggt

SEQ ID NO: 331433 - DNA, 307 bp, Zea mays
gcggcaccaacatggtcgactacgccatggacatccacagtccctctacgaccgacgacgtgcccgaggacatggtgaagcgccgtgccaggtcgctccaggctcaggtcgctcgaggaggccgaccccgctcgtcgccttctccgaacccgcgctcgtcaggagtcaggcccgacaacagtcaacatccacatgctcagagcgatccagatcggcctgacagatggagctctgatcagtatgccaattcagtttgagtgtggtaactactcatgggctgctgattacctttaccagtattgtgctt

SEQ ID NO: 331434 - DNA, 313 bp, Zea mays
cccactcgtccgcccacgcctacgcccacgcgttcgctgaacactacagctacccagagagggtatcgtggtggctgtgaaagtcctgtggcgcgatccgcgtgagaagctctgtcaagttatccatgataccccgctgagctgctcggttataggaagcaggggccttggcaagctcaagagggtgctcttgtgaagtgtcagcgactatgctgtgaacaatgcaacctgccctgtcaccgtcgtcaagtcaacatgcacctgacgttgatcttatcgcctagatgcctggatgtgatgctggaataaagat

SEQ ID NO: 331435 - DNA, 205 bp, Zea mays
cggactcgtgggctgacacctgctgattgactttatagtaaagctcgcgctcgcacggagagagtctcggagacgcttagtgagatggcacacaccatggcgtccatgaccagcctgctgcaggtcgccctgcccattctgctcgccgtcctcaagaacaggaacgtcttacacttgtttaatctcgtctaagaacatttctttc

SEQ ID NO: 331436 - DNA, 439 bp, Zea mays
cccactcgtccgcccactcgtccggtgcacagactctggcacggctcaagcggagcaggggagactactgcatgcgattgacgtgttcttccaggagtcgggcaggagacaacatcaacatgctacagctcgacaagagacagtgccaggggattatggaccaagacagggcagcagggcccgtcgccccaaagagaatatatccggtccaggatggatccggatccggcactagtgagcctacgcctacgcctgcgctcgtgaccgatgcctgccgtgcccaggttgctgctggcttgtgttcggagcttccacgcttgatttgtggggaattccggcgatcagctccgacgctcccatcttacgagtcacgaactacatccgcttccaaagaaacatgatatcttgaatcctaagtcatgaatcctgagtcagaaac

SEQ ID NO: 331437 - DNA, 382 bp, Zea mays
cccacgcgtccgcccacgcgtccgcaagcacaagcagcacctcggcgaggccggcgccatggccgccggcgccttcgcactctacgagaagcacgaggcgaagaaggaccccgagcacgcgcacaggcacaagatcacggaggaggtcgctgccgcggcggccgtcggcgccggcggctacgtattccacgagcaccacgagaagaagaaggaccacaaggacgccgaggaggccagcggcgagaagaagcaccaccacctcttcggctgaccgtagtaccggccggcgcgcgaccgagctagctagctccggcgcacacaaccacacacctggttaattctgtactgcatgcgtgtgtaatttgatggttcacaataatga

SEQ ID NO: 331438 - DNA, 347 bp, Zea mays
ggtgggttggcttctcctccccctccggttcgggttcgggttcgtgaggttctccggggttcgggttcgtgggtgagcggatcgagatggcggcgtcggatgttgagtaccgctgcttcgtcagcggcctcgcctgggccacggacgaccactccctccacaacgccttcagcacctacggcgaggtcctcgagtccaagatcatcctcgatcgggagacgcagaggtcccgcggcttcggcttcgtcaccttctccacggaggaggcgatgcggaacgccatcgagggcatgaacggcaaggagctggacggccgcaacatcaccgtcaacgaggcccagtcccgc

SEQ ID NO: 331439 - DNA, 208 bp, Zea mays
ctcggattcccgggtcgtcccactcgtcctcagcctcatcgaactctacctgcctttctctcttccctggctgcatctgcaggatctcggattatacttccaggactggttaaccatatgaacccagcacagaccatgcacgtctacatcatctatctgacacactcatgtacgacgtacctctcacatttgattgtcatactaacga

SEQ ID NO: 331440 - DNA, 426 bp, Zea mays
gagagacaagtggtttccaaagccaagtgtgtactagcagtctagcaaccagctagctcgggcggcagcaggcagccatcatgtcggaggagaagcaccaccacttcttcaaccaccacaagaaggacgaggagcagcccgccggcgagtacgggtactccgagaccgaggtggtcaccgccaccggcgagggcgagtacgagaggtacaagaaggaggagaaggagcacaagcacaagcagcacctcggcgaggccggcgccatcgccgccggcgccttcgcactctacgagaagcacgaggcgaagaaggaccccgagcacgcgcacaggcacaagatcacggaggaggtcgctgccgcggcagccgtcggcgccggcggctacgtattccacgagcaccacgaggagaagaaggaccacaagg

SEQ ID NO: 331441 - DNA, 280 bp, Zea mays
ccggtctcggaattcccgggtcgacccactcgtcctcccactcgtccgcccacgcgttcgtacagctctagtggaggaggaggaggggactattggaactgtacttggtgaaaggtgatggatgccagggagtacttgtacaggaagaggaagagagactcgtgtgattgtagtagaatagaatggaatggaacgtaatggattgcatgtgcaactgtaagcagctgcaaactgcaatacttgcagtggagtgatggacaactcaatttataagcaacct

SEQ ID NO: 331442 - DNA, 254 bp, Zea mays
ttcccgggtcgacccactcgtccgcccacgcgtccggacgaccactccctccataacgccttcagcacctactgcgaggtcctgtagtccgagatcattctcgagcggtagacgcacacttcccgcggcttcggcttcgacaccttctccactgtggacgcgatgctgaactccatcgagggcatgaactgcaaggagctgaacagccgcaacatcaccgtcaactaggcccagtcccgcagcggccgtggagg

SEQ ID NO: 331443 - DNA, 233 bp, Zea mays
gcggcttcggcttcgtcaccttctccactgtaggaggcgatgcggaacgccagcgagggcatgaacggcaaggagctggacggccgcaacatcaccgtcaacgaggcccagtcccgcggcggccgtggaggcggcggcggtgggtacggtggtggccgtggaggcagcggctacggcggtggctggcgccgtgatggctgcggcggctacagccgtggcagctgctactgtgg

SEQ ID NO: 331444 - DNA, 236 bp, Zea mays
cactcttcctgtccatttaacttatggttttgattattgcaatctttaaattcaactgtgcttcttaaaaggcgtatctgtgccaaaattttaatcacttcaatcaccctagcttatacaataactctttctaatcatttccatagttgtattcaatgtttttttttgtcttcatcttcattcaatcaaccattctttatttgtattattttatttcctctaacttatttatctca

SEQ ID NO: 331445 - DNA, 177 bp, Zea mays
attttgtgcttgaaatttgggtaactaggaccgggcagaacatatctatggggtgggctgatggcactgacatctgaacatatgccctaagtctgttgtaatcgcaaaatatttttgcttataaaatcagttaataaaaaaagaaaaggaaaaaataaaaaacataaatgataacat

SEQ ID NO: 331446 - DNA, 176 bp, Zea mays
catggccgtctccggcttcaccgtctcctttctcgcctgcgccttcctggccagtcgaggggcgttgtgcaccagctacacgctaggcagccgagtgtcagataggaaccccatcattagcaggaacctgtagaggaatggcttgatcacatgcatgacattttcctgggactggc

SEQ ID NO: 331447 - DNA, 188 bp, Zea mays
cggacgcgtgggttctcctgcccgctctttttctgcgtctgctgcttacgaccgaaccggagcccggagccctaactaaccctatgaggcaggcggcggctatgatggtgtactacacgctgttggtaggcgcggagctggatggccttaccaacctgcagtccctgcacggttgcaacgacctcaac

SEQ ID NO: 331448 - DNA, 408 bp, Zea mays
cggacgcgtgggttgggggccagcctgagttcgtccaggtcgacacccgcaacgcaggcgtgttggaggaagcgctgcagggtcagtatcatactagcagtcatgtggtagctgttcgcggagttgccaaaccggaggcagctgcgacgccggcgaggcgctcgcgccccatccctctggcttccgtggccgtgtggagtctggttgccactggcgccgcaaatgctgccgagctatgggaccccttggccctgcacggatcatcaggactcgtcttggctgaccttggtattggagattggtttgggggtttgctgttttcagctgggcagcaggctaatgaggctgtccaagatcagttgtctgctcttagtttctctagcctagcagttatttttggtgctggac

SEQ ID NO: 331449 - DNA, 122 bp, Zea mays
accacgcgtacgtccacgcgtccgcggactcgttggctaacacctcttccgttgcgaggggcaatcggatgctgtacaagggaatctatcctaccataaatgatgaatacatcagatacaat

SEQ ID NO: 331450 - DNA, 234 bp, Zea mays
aattcccgggtcgacccactcgtcctctgactcgtgggctgtgttcccggccaattcttgcaatgaccttgtcgtcaagttctcgaaggctctttccaagactgcggctccaatgaacttgctcacgcctgaaaaccctgatccattcatttctgttcaccacgctatgtacgtatgtgtagcatatggtttacatctacctgttataaccccgagagctggagaaactagcta

SEQ ID NO: 331451 - DNA, 293 bp, Zea mays
cggactgcgtgggcttgagcctgcacctgttgtcgttgttccacggcgtatcgtcggttgagtgccgggggcgatggcggcgggcgcaggtggttgcttatggcggtcctgcctgctatccaatttattcagggcacggacgatcagacggtcccggtcgtgctgctgacctagttccgcgacggcacctacggcgtggccgtctttcgttttcaacgtttctcggtgttttactcgtctgcttgatctgggctacattacgggcttttacatggtggacgactagggcgtgc

SEQ ID NO: 331452 - DNA, 280 bp, Zea mays
gccgtggaagggcagggctgcatcacgccgctgagcctgaagcggatgctcgccaggctcggctcccaccaggacgttgccgagtgcacggccatgatctgcaggttcgacctcgacggcgacggcgtgctcagcttcgaggaattcagggtcatgatggatgcatagctaacggattgtgttgtgtgaatacgtgtgattatttacttgctgcttgtttttgcctgtcgtccgaattcaaacgtcaattaattactactagtttgtttctgtgtcaaaa

SEQ ID NO: 331453 - DNA, 248 bp, Zea mays
cggttacacgcgatcatgctaccagcttcaaaactaaacgaacacaggacgacacaaacatgtttcgaacattacagacaaacttaaaggatcaccacgacaggcaacttgatcaactaaacgatgcatatatcctacttaacagtattgcagtcacatagatgcagaggatagcataagaggtcagcaaggtgccatcagtgaggaaactactggggaattaaacacaaagccatagctagatctac

SEQ ID NO: 331454 - DNA, 199 bp, Zea mays
ccgggggcctggtcgccaagccgatcctgaccaggcctcgaggctgttcggcgtctctagcggcatgaagcggatgcgcgacgacgacgacaccggcgaggaacaagccgaccaccgggccccaaccgatgggaaaaccggagccttcgatcccgaaccatcgcatggagccgtcgccgaagtcgccggaccagcatcc

SEQ ID NO: 331455 - DNA, 433 bp, Zea mays
cgcgactcgggggacatctacatccatgagtatcggacctggatagtatgcgcgacgagggcgttttgatacacatcctgcgctctgtcgcactggactgagacgagcacgctgttgttgatggtgctgatggtagttggatgtgccgagggcagctggtggtctgaagtcataaagcccggtacattcaacagccacgagctgtcgccgaggtgcacgcttaccggcaccagagcgagtaacgctacctggacgtcgtctgacacactagcgtgcagcgggacctctacggatatgacgcacgatctgcgtacaaccgagttcagagccagacttttagacggctgggctcctgtgaccaagagaggcctgctgagtaagttgctgctgctcggtggacgatcacttttggcatacgtgagagcgtcggcat

SEQ ID NO: 331456 - DNA, 165 bp, Zea mays
attcctgggtcgacccactcgttcgctgatgtctaggacaataagcagaaggctttatgcattgagaattacagaaagaaatatggggatttgctgtacaccttatctgatattgatgtttaaaaggaaaaagaatgtgggattttcattgaaatgaacaacaaa

SEQ ID NO: 331457 - DNA, 278 bp, Zea mays
ctatgtcggcccagctccattgcaagatatgccaatgcaaatagctgcaccctatggccctactgcctatcatatacatcacccgttctcaatggacaaagcattaaccatcattagccacgaagattattcgatcatacaacttgcaaacaatttgaggacagcactgaactgaacaactgataccaacatcactcgagccaatgctaccctgaaatcacattccccttttgtgcacctgtcctccctttcaaaatgcacacttgtggactccaaat

SEQ ID NO: 331458 - DNA, 341 bp, Zea mays
cccacgcgtccgcaaaaccatccacactttcccctttccccttctcttcccaaatcgtagcgagcgcgagaccacgcatgcgtggtggttgaccgcagcgtcgagcgcagaccacgcacgtcgtcatcctctagcggccaaatccatctccggcgtgcggcggacgtttgagtctccgacgagcggtggtggtggtctccagtgagcggtgcgggcatgtctcccaggtgcgcggcgtgggctagttctcctacgagcgcggcgctgatccccctggcgggcggcgctggcggtcccaggcgtgcgacagctatgttcctggccggcagcgctaacggatc

SEQ ID NO: 331459 - DNA, 95 bp, Zea mays
actcgtccgatcggtaaccccatcctgatccacgctcatagcatcctctccatctggtactgccaggtggtgttaatggataccttctaggccta

SEQ ID NO: 331460 - DNA, 262 bp, Zea mays
tcccgggtcgacgcacgcgtccgcggacgcgtgggctgccgcctacgaacacttttgtctactccgcacaggagcctccaccggagtgagtttcctaacagtggtcgaccgtccatcctgacatggcttaacacgacgcacatgcgatgcccgagccacatgacgcacctgcacggctacaagagtccgcgctggacggactcggcatccatacaccagccgtgccgtatcagatgcgacgagatgggtaagtgatctatcg

SEQ ID NO: 331461 - DNA, 223 bp, Zea mays
tcggtctcggattcccgggtcgaacgcgtccgccaggcgttcgtccacgcgtccgtccacttgttttaactgaagggttttcatgcaccggggacgggttacccaagatcttgatggtcggcaacagataccatgaccctttgcttaaagcgatggaattcctggtgtccagattattgaaaccttgacaaggccttaaggatctagttggaagcccacatta

SEQ ID NO: 331462 - DNA, 290 bp, Zea mays
aattgccgggacgaacgactcgtccgacacctcatcaaccgcgacccaataatcgtgcgcctggacacacgcatgatctaaaggcggctcataacgtgccaccagtgaaacttgatgttctaccagatctgacagtgcacgatgctactcgccttgaagatcggcctattccactgctaactccttggctctccatgaaggctaaatctctaaatcggaaacactcatcctacacggacaggcatgcgcgctcgatacatccagcatcgtcgccatatacagggactgaa

SEQ ID NO: 331463 - DNA, 305 bp, Zea mays
ctcacgcgtccgcttcagcatgggctgggcgtacccgcgcacgatctacttcaacggcggcgagtgcaagacgccgccgtcggactcgtaccccgacctccccaacgccgcgcccgccgtcggctcgcaactggtcctgtccagccgacgtctcggcgaacatactgctgctgctcctggtggcatgacccggaccgaaccatggacaaggcctgcttgatgaccatgcgtatcgtaccctgtgcaccgtgcatactgtactaggcaaggcatacgatacgagtcctgagaccatgcctgaacac

SEQ ID NO: 331464 - DNA, 456 bp, Zea mays
taaaaagaaacatataaaaatcaaaatgatttatttatcactacgaaaaaagaaaacaattagtgagggcttgatacatcatactggaaggagacaaaaagtgaaaaaacactcacagtgcaatgctaactttggactgaaacggatcttagacttaactaaactggtgcatgaatcatgatgtcatgagacctttgcttagctacactgaccgctgtcatttctctagctatacgcgtactcgaatttggatacatgcgttgctagaggattatgcgtatgtttgtcactaggtgtccctctcattcatactttgcaactttacgtcactgggatccatctatctactagataattgagctctctgatagactaaaggtgcgaatgatcgtactagagctaatatatagttgactcactgaaattagctagcttaccaatatctagctaactatt

SEQ ID NO: 331465 - DNA, 149 bp, Zea mays
cggtctcggaattcccgggtcgaaccactcgtccgctgactcgtggggttacagggaaactccttatgttaacgagaccagtggaggtcacggtgttcatcgataacgaaggcatgacatatcacacagctcatttctggacagccttt

SEQ ID NO: 331466 - DNA, 450 bp, Zea mays
tccacgcgtgcgcccacgcgttcgcccacgcgtgcggaccatgcaagtggagacaactggaaagaatgaagcactaacagccaagatgcaggaacacacagacctacagcatgagaaagatgagttggaacaacagttgctggaagtgaggaaggaactggatggtgcctaccacaccatagcaaatcaggaagaacaggcttctgtgagggagataaagtgggacgcttttaggaagtactcggaggatcgtctggaagctgagcagcagcgtgctgaggagctggaactacaagtagcagctcttaaacaacagctccaagaagctgagatccattataagcaaaaggaagaacatgtttctctaagggaggttcaatgggaagcggatcaaaatcattccctggatgagcttaacgctcagcgtcagtatgccacggacttggagaa

SEQ ID NO: 331467 - DNA, 207 bp, Zea mays
tcggtctcggaattcccgggtcgacccactcgtccggacccactcgtccgcccacgcgtccgcatgtgaatcgcactgttagttaatgcttggtgctgtcagtcttgttgggagtctgactcgtaaagctcattatcatcggaagtgtttgtcggaggagtgctggcactaactatttatcttcagttggttgtcgtgttgccaaaa

SEQ ID NO: 331468 - DNA, 446 bp, Zea mays
  unsure (1)..(446): unsure at all n locations
gctgcgctgtgtcccttccatacacgacgaggaccaccatcggcgccccttccttggcgggatggacagcatctgcgccgtgttctctagaggcagtcacggccgtggatccctactacccccactgccaccccgaggacgcttccaagcagctgaccttcactgagttctttgacaacgctcctcagcgcttctattttgcgcggacgagactcaatgcttcctcctccgtgccgccactactccgcccgttccctagcgacgatagcgggttagggtttctgtacctggagccaccacctnctctgtcgtgtcctctgccgcctccaccttatggttggtgctcaggccttcgggacttctgtcggcatcgcgcacccaccagcatgtcaatgactctgtctacatgtcaacatggtctaattcgtgaggcangtgtgtggatc

SEQ ID NO: 331469 - DNA, 309 bp, Zea mays
gcgacgcctgcgttgactcgttagccggatgctacctgtggcacctagcacgagcctgcagagacatcatacacactaccatgagcaagcgactacatagtacgcatgtcaacctgcatggcgagtacgaacatccgaggacacgcgttgaatgtagacgcccagtcacttgcgcttgtaaatatggctaggctcgtacatacgtagctagcggaaccagggtactcagaagatgacacgcactgaacctagcccagctatgtgaactggcacacgcacatcgcgactcgagcttgaacacgacaacga

SEQ ID NO: 331470 - DNA, 365 bp, Zea mays
catactcttctcgcgcaaggacacgtgcccggagtgcgactgcgccgggttcatccggggggcgggcgcgacgctgcgggcgaacgcggcgaggaaggacgaggcccagatcgtctgccctaactgcaacggcctcggcaagctcggacagatcgacaagtagctaaataatcccaagctcatatacatgtgcatatatgcatggaccaaccaaactgctcctttgtataagctctaaattaaatctcgtctccaacagtgtctgaatgtatatgctgagtgagggttaattgggccggaaatatacccggtggcttggcaaaaaccgatgtggggcattaccatggtggccgtgggggtggtgg

SEQ ID NO: 331471 - DNA, 339 bp, Zea mays
gttctctgaattccctggtcgaaccactcctcctggttgacatatatagtactaggatcattatttactgtacagacaacaatcacccaaagggatgaattctataaccatacgaatgcaagcattcagctacacacttacctcaaggcacctgtctcctacactcatcacaatcccaactcttacgcaccaccattccacagccaccactaacctgctaacttttccgcgacatctaacaacaatcatgcatctgtccggctcgaacacgaacacgaacttgaaacctgacagcaccacttaaccctacagaacagctatcacctccgtcatctacaa

SEQ ID NO: 331472 - DNA, 343 bp, Zea mays
ccggtccggaatacccggcgggacccacgcgtgcgggacctactagcgacaaaccgctcttctaaacaaaaacctctcagctaatatggcggaatcttatacatcgatcacaggcctctcccatggcgtcctgccaagaacgctcaccctcagcagaaccagcacagccgtgaccagaagaacgccgcccgcatatggcaacgccagtccccactccggccgacgaaccgctatcggcctcttgctcactgtcataacaagctggaccatgtcctagccctcacgcgccgaaaccgtctagaccatcaagattgaaacactcgtcttcaacgttcgcatgacc

SEQ ID NO: 331473 - DNA, 89 bp, Zea mays
ggggctgtacatgagaccaaaggctaacaccttgtccgttcctatcggattacacctggaattgttccagctaaggccttattcggcac

SEQ ID NO: 331474 - DNA, 415 bp, Zea mays
cgcccgtgcgtccctctcacgcagtgcgtccctctcacatcgcgccgccactccggtcgcgccgccaccttccctctccctctcaccgatccacggcgacgagctactgccgctctgccgctactgccgtctcatacgtacgaagacgagcgagggcagctactgccgctctgcgtacgccgccccgtcatcccaccgacctcacgtgttccgatgcaacgcagctgttcaagaacaggcaaaacagacacctctccaacaccccagatctcctgttcaagaacttgctccaggctagagataaaagcactaaggacgaggtttcagttgtcaaaaagagtccaaaatgaggaagttcccatggcagaggaagctctggcggtaaacattaaccaaaccaatttaatcagttgga

SEQ ID NO: 331475 - DNA, 452 bp, Zea mays
  unsure (1)..(452): unsure at all n locations
ccggtccggaattcccggttcttcctttttgttccttcccttttttataacccncccgggcttaacccggagccagtcgtctggctagggtggggccgccgccgccatgcctggccgcatctcaggaaggtctgccccacgcccagctccccgtgctgcttcactgaggaacccgccacatccagcacgccaggctcctcctccagctcctgttcgagatggtggtggctccatgtttggaggaattgggtccaccattgctcaaggtatggcgtttggcacgggtagtgccatggcacacagggctgttgactctgtattaggtccccggaccatccagcatgagactcttgccacagaagctcctgctgctgcccctgctgctccagcgatgaatgctgatgctngcagcttccattctaaggctttccaagattgtctcaacaactatg

SEQ ID NO: 331476 - DNA, 352 bp, Zea mays
  unsure (1)..(352): unsure at all n locations
cggtccggaatacccgcggggacccacgcgtccggtcttcttgtgttttctagcgtttttctctgccagaagaacaggattctgcggaggattttttaagagggccgggaaggccctccacnacaagcttataaggaggagctcaccaagccttctcgtatcataagctttccaagttggcctactactactacgcttgcggcgccgaagttccgtggtcgctgctcgagaacatggaggccctctccaccatctcgatctcatcttgatgagtttagattgcctagaaacgtactccgtggctggcttcttatgtctaacctggcttcttaagtagcttcttcttattctt

SEQ ID NO: 331477 - DNA, 86 bp, Zea mays
taagatgggtcgtggtattagcagtgggggtggtcagagttccttgggctatctctttggcagtgacgaagctccaaaatcatttg

SEQ ID NO: 331478 - DNA, 375 bp, Zea mays
  unsure (1)..(375): unsure at all n locations
ggaaaacccgcggngagggatgcgtncgcgcactcgtncgaaaaaaaaaaaacctcatttttaaaaaaaaaaaaaaaaaaaaaaaaaaagtttgtaaaaaaaaaaatacccccccccaaaaaaaaacaaaaaaaaaaaaaaaaccccaaaaacggcaaaaaatttaaaaaaacaaaaccaaaaaaaaaaaaaggggggagcccttttaaaagaaaaaaagataccaaaaccctgttaccaacttaaaattttaaaaaaaacccaacaaaaaaaaaaaccaaaagcccaaattaaaaaaatcgccaaaaaaaaaaaacctttccaaaacaaaaaaaaaagccatggaaaaaaaacacccttcaaaaagtaagcaat

SEQ ID NO: 331479 - DNA, 398 bp, Zea mays
cccaggccggccaagccccgcgtagctaccatggcggcggcctcccgtcgagcggcggtagcggcctcccgtcgagcaaagcgcttggaagtacgctagtttgttgtcatgaagaagtcattcaagttccttccattggtgcataaggctgcaacaccatctagtggagggtgttctggacaaagaaagcttgtaccttaaaataggaggatacaagaagctggagtggttgtctgaaggcttttgaactgcttgaaacattagtgtagctttggtgcttttgtgactgatcagctctggagcagctagagcgatatagttgtgggcttttgaacaatagttagagtgatagttagagtgatatgaaacattagtgatctagttgtgaatgatattat

SEQ ID NO: 331480 - DNA, 86 bp, Zea mays
cggaattcccgggtgggcccaagccttccggcctaccaaaaaagccaaaagcccgttaggttacttcgctgcctgaggagccccgg

SEQ ID NO: 331481 - DNA, 366 bp, Zea mays
tgactcttgggctgactcgtttttctggccgacctctcccgttcgcaggtgggggggcactggcgagaggcgtcgtccgtctctaataatctacttcagagcacggtgaaggcggcgtggatctcttggacaaccttcctggtgctggtggtgccactgatcatcgtgatggaccgggagcagcagctcaacgacctttagctgcatcagcagacgcttctgggctgtgcctcaacttcgacggcgaccaagttgattgatccgtgcatcgaccctttcgcatccacccctctcgatctgtagaggtatctgatactatcaagttcatcattcgagttactatcaaggtcatcattcgagttacta

SEQ ID NO: 331482 - DNA, 93 bp, Zea mays
gccacgcttccatagaaacgagagggtcgctccaaccgcagtaccggttgggggggctgagttcgacctcagactgcctatctactgcctatc

SEQ ID NO: 331483 - DNA, 174 bp, Zea mays
cggtccggaaaacccggggggacccacgcgtcgggggtcccttctctcaaaaatcattttataacaagccaaactaacaagcctgagaagggtcttttcaataagggggcgccctacacccataattctaccgaagaaagaacgctcctaggcgatgacagggattactactgc

SEQ ID NO: 331484 - DNA, 281 bp, Zea mays
ccggtccggaattcccgggtcggcccaagccttccggttttttgggccattatattttttctgtccttctaaaagtggccttatactgtctgcaggagcctaacttaaccaaactctatattcaaacctaactctttaaacagtgaaggctgcagtccaaaaccctggcaaaatatggtttggcccggttttatgcacgatttgttgggacattgagctcaccaatacgaataagtggacgtgcaaaacattattctagcactggtgatgtattatagaca

SEQ ID NO: 331485 - DNA, 256 bp, Zea mays
cgaatgcctggaacgcggagatcggataccggaagtcatggtgaacaggtccggggggaactggagtatgacgtcgtccccctggagagcactgtgggggcgctacagtgcttcccttatctgggggacgtgcgcatcttcacctacggctgtagcatggctcaagagtgcgagtgtggcggatgccgctgcagctagccttactctcgcccgaagccaccaccagctggaagttctttcacagacgcgaccgtga

SEQ ID NO: 331486 - DNA, 115 bp, Zea mays
ggcactgctgtgatggggtgggtggagtcgaacgggggggcttggcagccgtctcccagccgggaggtccaccctggtccgactgcgaaactcctacttcaccggagcaggctac

SEQ ID NO: 331487 - DNA, 139 bp, Zea mays
cagcctctgccagccacctccccgtcgctctcacgctctttgtgcccggcggggggggtcttccgctccagctgactccttccgtctgacgcacatggccttcatcgccagatcttgcggtctattcttcgccatgcct

SEQ ID NO: 331488 - DNA, 398 bp, Zea mays
ctcgttctcatggccgagcacaagtcttcctcaagcgtcgcctgctgtaccaggggcgagctccccacgcccaccgctactcctagcccctctcctccctggatttcgcccagtctccatctctctttctagccatggacggcgacctctcctgcctacagcagggcgtcgacatggggctcgcccctgcaacctcgcctcgctgggtttcctcagggcgccgggatgctgcttcctatacatcgtgcgactccctggtgcttgctctcgccctagtccatggagcagtagcagccacgacactccttcgtgtcgcgccctcgacgtgttcgatgaaatactgcaacgagctccaactcgatctgcacagcccctgcgcgacgtcacaaactccgctc

SEQ ID NO: 331489 - DNA, 248 bp, Zea mays
gattcccggcgcgacccactcgtcctcccactcgtccgcttttctatagcatgtatcagtccaggactcgttttttttctgtcgagtatccttgcaagttccgactccctcactcatctccgttcgtccgtctcaccgacccctagctcctctccacgccggacacgtccagattctatgcctactactatcgctaacgctcttttatctccgaggctatgcaccatcttcttcattccattctccca

SEQ ID NO: 331490 - DNA, 153 bp, Zea mays
ccgacgcgtccggcgaggcatcggaatgtatacatagctccgtacagtgagcactgtgcggcattcgacccgtcggcctgtgcatgtgcttcatctatgtaggcaactccgcctacatccagaacattgcatggcgcgtgagcgaccagacta

SEQ ID NO: 331491 - DNA, 329 bp, Zea mays
aattccctctcgacactaatcacacctcatactctctaatcttcgctcccttttcttgactgccaacaacttcttagggctgatttatctttaccacatcacattcatcaataattctatcttcaatgactctagttcattctctacatacgctttctctatcagcacaccaccattctactcctaaactactactcgataatcatctcgatcaaatatctatatttactccatcaagcaaatcaccactatgcctctacatctcataatagattatctgcaaaactcctcatgctacttcaacattcgtcctgttaaacatcttagca

SEQ ID NO: 331492 - DNA, 171 bp, Zea mays
gattcccgggtcgacccactcgtccgcccactcgtactaccactcgtccgctctgccttcgccgctccctattccttcagacgctctttccactcggtacaattcgtcaccagcccgcgaggcgccatcaccgacagggcgctagtagacacggactccactaataaggca

SEQ ID NO: 331493 - DNA, 373 bp, Zea mays
tgccgatctcgtggggagccacctgctataccgactgctggagcgcggcgactgcgcggttgaacaggataacttactcacgcgtctcaaggaccacctaccccaccatctacagaacacaagttacaagattatcccccacgacgctcaaggagcccatagctggtctacgtctacacagatctaccaccattgcctgaaacagacactctcaagcactacacttacaacgctatcaagaccatatagacacaaggtgtaataacactgtacatactagcatatgacataatgactggctcaaggcacctacttacaagcactatctatggctatggagaaccgctgcatcaccataaagtggaaacctaat

SEQ ID NO: 331494 - DNA, 209 bp, Zea mays
aattcccgggtcgactccactcgtccggtggagatctcatcacacaacagactctattctacgccatgttcaattcagacgcaggtgatgtttgacagaaccgaatgtccaataacgcctactatcaggaggcttactagctcgggttacatcttgagcagactattacggaagctcgctccgaccgttcagcaagaaactacacgata

SEQ ID NO: 331495 - DNA, 221 bp, Zea mays
gtccctcgcacagacagggcctgtttttatggatcgtgactcaacaaccatcacagacccttttaaagtgcaggagctacctatacgaccttcatcggacatatgaccagcgactactacgtgtatccaactgctctcatctggccaaatgctaacattcatgaactaacatactattagacctttcaggagatgccttgcatctcgatggacaaggccct

SEQ ID NO: 331496 - DNA, 229 bp, Zea mays
gcacattcatccacactaacgaacgttctctagctccgatcacgagctagctgaagtcgacattcgccgctgtgctgaacagcacgaagacgcctaatgcgatcgctactgctggtgagaccgcgactcgtactatctcctactgctgaacgccatggttggcgagcaccttctctttatgcagagctacgagctcgacgcctactgtgacattttaacacccgagctc

SEQ ID NO: 331497 - DNA, 200 bp, Zea mays
aaaaaaaaaacaactaaacactcatatttttttaaaataaaatcagaacctactaagggatgggtttttaaaaccaatcacgttctaaagacgctcttgcagatatgaatgaatatcgtgcctagacaaaacaaacttacaaggcttgctgaagctgccatatataatgatcatctggtgatcgatgtatatttcaatga

SEQ ID NO: 331498 - DNA, 415 bp, Zea mays
ctgggccatgctcggcgcgctcgggtgcgtgttcccggagctgctcgcccgcaacggcgtcaagttcggcgaggcggtgtggttcaaggcgggctcccagatcttcagcgagggcgggctggactacctcggcaacccgagcctggtccacgcgcagagcatcctggccatctgggcgtgccaggtggtgctcatgggcgccgtcgaggggtaccgcgtcgccggcggcccgctcggggaggtggtcgacccgctgtaccctggcggcagcttcgacccgctcgggctcgccgacgacccggaggcgttcgccgagctcaaggtgaaggagatcaagaacggccgtctcgccatgttctccatggtcggcttcttcgtgcaggctatcgtcaccggcaagggccccctcgagaac

SEQ ID NO: 331499 - DNA, 233 bp, Zea mays
cggacgcgtgcggagcccgccatcttttctaacaccaccacctacatccccaaggcgtgcttctaccaccgaactatccgaccgcccgagtatccaccaatgcagattgcgaccgacgccaaggagatcgcaacggccgccaccctggtcacgccactagcgatactgggcctacgaacccgcatcagccgagtagaagcgagctgcggactagacaccacctacatcgcaca

SEQ ID NO: 331500 - DNA, 155 bp, Zea mays
ccactcatcctaacaaaaaaaaaaaaaaaacaaaaaacattaaaaaaacaaaaaacaaaaaaaaaaaagtagaattataaaaaaaaaaagcagcccaaaacccatacaacaaaacaaaccccaaaaacacccaaacacacacacacccatatacc

SEQ ID NO: 331501 - DNA, 118 bp, Zea mays
attacgcgtgggttaacaaactatcaattaggagatcgatgcttatcatatggagcataggcgtatgatgtattgcataccatgctctagaatgtcattctatgatgtgaacagagca

SEQ ID NO: 331502 - DNA, 163 bp, Zea mays
gccttttcagctgctaatggccttgacatttagtggtgcaaggctccagaaaatggactgattgcttcagaccttgtaagtggatcttgatgtacagccagagaaagcggctgaaagaggaggctatgggggtgagcgatatgaaacgatcgagtcttctaaa

SEQ ID NO: 331503 - DNA, 344 bp, Zea mays
cattgtttgcccaattccataaagccggatccggttgcaccaaattttattaccctggtggggaatggccctttacaaccattggtccttgccttcaacctgggattgattagaaaaaagcttttttcctccgtcaacccttttccatatttaagggctctatgtgtcttttgctctgagagaaagtgcatatgagactctgctatctcgtgaaaaaactcttgcatgaggacccctatacacatgtagaaatatagagaatttcacgagaaagcctcacatctgtctttcacagctctcatacgacattgtatgttataaaagcggcgaagcactactagcta

SEQ ID NO: 331504 - DNA, 255 bp, Zea mays
cggagtcgttcagggacgccgcgcatagcttctcacaaggcggcctggactacctgagggaccccaggactttgcacgcacagagcatgctcgacatatgaacctgccacgtggtgctgatgctcttctcaagggctaccgcgatgcttgtggatcactacgtgaatggctggacctggtgtcaccgggtggctccttatatccgctgtgcctggtctacgacatggacatatgacaacgagctcaatgtgaggg

SEQ ID NO: 331505 - DNA, 325 bp, Zea mays
gcgcctctgcctacctactctcgcggatttcgacagacagactacgggttcggtcccggggtgcttatcctgccccttggggcatgtacaatcatggatggaaggccaacactgaagcccgaagactacagaagagtcaacgagacggatcatgcatatatgcatacgacgatagacgaggaataagcactgacagagctcaatgccaatgcacataatgtgcgcgataggatgcatgtgctctgaagaaaagcgtgcagacatgagactggtcacccgtcttcattacctagaggatgataaggcagctgcctatcagcgttgc

SEQ ID NO: 331506 - DNA, 125 bp, Zea mays
gcccgccgctagctcggcacctcaagaagttcgacacctgggacgccggcccggcccgcgttcccggcggaaccggaaaggtcattccaccggcggtggccccgccggggccgttccggaaggcc

SEQ ID NO: 331507 - DNA, 197 bp, Zea mays
cgacccaccgtcgccaccgtccgaattattctctgttctaacaacgcaatgcagggcacggaaatttcaaggctgaggctatcaagcatggtggctggctagcgcatgaaagatactacatatcctgaactaaaaatgagccccacagtatacaccgctatgactcagcactatcccctcaagaacatgctataacc

SEQ ID NO: 331508 - DNA, 215 bp, Zea mays
aattcccgactcgacccactcatccgttgactcctactatatcaccttatctcacttctaacacaacactaaatcattgcaaactggtataatccatacaactgtgtacaactagcatacatactaatatatcctcctgattaccaaaatactacgccttacttaacgcccactacttatccaccattatcaactgacttaccgcccataaaatt

SEQ ID NO: 331509 - DNA, 232 bp, Zea mays
cccactcatcatatcactcgattccttttatatagcccacaccaagctcatgtaacgtggtaaacgcactagggagatcggtccatgtcctctacaaaaagacactgacaatcaatacaatccttgctcatagcacatactgattacaccttggacgaatacctaaccattggggaacttactactcatgatgctataaaacactatgacactgtcacacaaaccatatatg

SEQ ID NO: 331510 - DNA, 409 bp, Zea mays
ggaacaacagccagcgccatgggcacgtctactaccgtagtcgtcgtgctggacacgacgaccgtggccgggcttggactggcgccaactgccctatcgcgcgtggcgtaacgcgcggaacaggctctgctgaccgtggcagctcacgcggagatgagtccgttgatcatgatcagcctgagcacggacgtgacggtctttatgggacggagtgccttctgaaacttctcaacgggtagaacgtgtgagagaccattgtgcgccgagcattaacggtaagacgcactttgacatcgacacgaacgcgccaatgagttctagaccgtgctaagtccaaagacgacgaaggctttaaccgtggtcacatcctcgtgtagggctcgataggtcacatagccgtctactacat

SEQ ID NO: 331511 - DNA, 360 bp, Zea mays
tacgcgtacgcccacgcgtacgcctacgctttcagtcatttctctgccatccataagatcctgagaacaggcgtctatagcctttcaggcgagttccaccaagacttcccagcggctgcatacctcgacagtcacgtaaacctaccactcaatgtgctgggaacccgatggctcacatagatgcacagcgctatgcattccatcccctgatcagccgtggagcccgaccgcgtggtgcctgagcaaccgaaagagctcctcccgaggctggtctacgagttcttccgcattaccgcaacttcctcttgctccacgtactccgactcggacagctccatggacctgtgcagctgtccgttc

SEQ ID NO: 331512 - DNA, 312 bp, Zea mays
ctagcctggaattgttggaaggaaaggagcttccgggagttgttgccttgaatgaagccgccactgtgactgtatgaagcatgctttcattttgtttcgtcttcgtcttcatgtgccgttgtatacttgctacattctcgcttgcacctccccagccgctcgctcgaaatgtaagagaccaatgttttatagagccaatggaaatcgtttgaacaacgacgacccaaatagtatgtgctttaccgagtgatctttcctcggtaacgtaactagtgatataaaaaacattcaaaggcaaaaaaaaacaacatg

SEQ ID NO: 331513 - DNA, 365 bp, Zea mays
acgcgtccggttccgcaggatacttacaagacacctttttttagcagtaactcctcaatcgctatcggtcgccatctctagctactggaaggcctaaggacttagcaatcatggcactcatcaacaataaggctaatatctccgtcaactcacacgatgctgataccatttactacacagaatcaaaacacgacatcaaatccagtcactctatactcatatccaagaccaatgaccctgcaaccaaaagcaagccatattataatgaacgtcattcatcataggcctagaatgctgtctacttacactactaccagagagatccacactacaatgagccgcatctagatgaccacaagctatgc

SEQ ID NO: 331514 - DNA, 337 bp, Zea mays
ctgctcgtaccggtccggaaagacgaatgcaccaagcttgatgacggcatcttccgtggtgttaatagcttcggtttcaagtccgaggggacggaaaggaagctctccaaggatgacgactgagcgatatatcgtccatatagtctctcgatataaacttcgagcggtgtgatttataaataagccatattaatgtaataatgctttaataagcagttcatatgtgtgtcgaaaatacgttttaattttatactactactacgtgtgcatgcactcttcatgtgtaatgctttacttgtaatttattgcgaataaataaagagagtatgtctcaaaa

SEQ ID NO: 331515 - DNA, 387 bp, Zea mays
agcagccaaagcagggccggcccgacgggagcctgcaagggctacatcttcgccatgggggtcacggaggagctggacacgtggccggagcaggacacgcacgaccggcggtgggtcgctcccgccgaagcctaccagctctgccggtacgactggatgcgggaggcgctcaccgcgctgctggagaggctgccggtgctcgaaccggtggtggctgccgcggcggctgcagccacggcggaactgacgaccgaccaagctggcatgtacatgatgctgcaggcgacctcggacggcgctgtggcgctgtgctagctgattgatggacgacattggtgttcgattctcagctagtcacgaggtcttagtatgccctgcaagtgtcgt

SEQ ID NO: 331516 - DNA, 384 bp, Zea mays
aattcccgggtcgacgcacgcgttcggtgcgccgctgacacttccgttccggggcgacttccgcccgctcgccccgagcgccggaggatgatgtgcgttttggacggttcttgtccggtccgtgcgtgaatggaggggaggacgtgtcggaaggtaatcagcttctcgtcggcgggacaggggggcgaggaggctgcgaggcgagagacgccggatgagacacggaagcggctggaggagctggatgcgctgctggaggggctggtcgaggcgtcgagcccatggtgcggccttcaacgccaccttgtcctccggatccgtacttggaccgaggcaccgagccaccgagccatgataacgggacggggatcatcagccgatgag

SEQ ID NO: 331517 - DNA, 291 bp, Zea mays
  unsure (1)..(291): unsure at all n locations
cccacgcgtccgcagacgcgtgcgctctgccagcgggcggtgatatgggagtagcacgactggcgagccaacgtggcgagaggtgtctggctgctctgaccatacctgttgctggcgctcgtgaacctaagcgctcggtgctcactcgcggcctccgcagatgagcctgctggatgccaacangagctggatgaggagaagaccagtacgagggccgcttaccaggaattcggtggcgctgaaacgtcatgggctatgtctgacatcgcttgggcgtttaatacgacattt

SEQ ID NO: 331518 - DNA, 342 bp, Zea mays
cccacgcgtccgggacaacctcatctcggcgctctacttcatggcgctcttctcactggcgtcaaacgtcccagcagagcccaagacggcgacggcgagtccgcagaaggacggcgagcggctgtcggtgctgaacggtggcgcggcggtcgctttgtccttcatcatctgcaaggccgggtcggccatggccgcgcggctggggctccagggcggcacgctgccctgcgtcacggcgctggccgtgttcctggccacggcgttcccggcgccgctcggcaggctggcgcctgccggcgagaccctggcgctcatcctcatgcagctcttcttcgccgtcgt

SEQ ID NO: 331519 - DNA, 424 bp, Zea mays
  unsure (1)..(424): unsure at all n locations
gaattcccgggtcgacgcacgcgtccggtgggttggcttctcctccccctccggttcgggttcgggttcgtgaggttctccgggggtcggtttcgtgggtgagcggatcgagatggcggcgtcngatgttgagtaccgctgcttcgtcggcggcctcgcctgggccacggacgaccactcccttcacaacgccttcagcacctacggcgaggtcctcgagtccaagatcatcctcgatcgggagacgcagaggtcccgcggcttcggcttcgtcaccttctccacggaggaggcgatgcggaacgccatcgagggcatgaacggcaaggagctggacggccgcaacatcaccgtcaacgaggcccagtcccgcggcggccgtggaggcggcggcggtgggtacggtggtggccgtggaggcggc

SEQ ID NO: 331520 - DNA, 433 bp, Zea mays
ccaaaatattaataaacgctagttgctatgaaaaccatttgcctttttgactcttcgacgccgtctactagtgaggaacttgcattgatctttctgcatagtacagtactacttgctttctttacagtaaagtattagctagtatctgatgtgtgtctccaatttatatatatttttggaacctcatgtgtggccgttgtgagatctttctcgatggtagatattgaggacttgttttcaaatgcttcgagttaagaataagacaacataaaaagtgttaaatattaaagtccttcgcctatcaagacattatgtctcttcgggtataataaattcttgacgaaggttaatgaaggaaaaagccttcgtgaacacaatggatgataaggaagaattcatatacgaaatacgaaaaattatatagatatcatta

SEQ ID NO: 331521 - DNA, 326 bp, Zea mays
aaaaaaaaaaaaaaaaaaaaaaaattaattaaaaaaaaaaaaaaaaaaaaaaaaaaaaaagaaaaaataaaaaaaaaaaaaaaaaaaaaaaaaaaaaataaaataaaaatataaaaaaaaaaaaaaaaaaaaaaaaataaaaaaaaaaaaaaaaaaaaaaagggctctcctttttaaagtccccaactttatatcccctccattcacctaaattacttttttattaggcacctcaaattcaattcaattacctctcttttaaaaacgtctatacttaaaaaccctttcattttccaattttttctctttcaaaaaaattccccttt

SEQ ID NO: 331522 - DNA, 420 bp, Zea mays
accggttcggaattcccggtcgactcacgcgtccgcctcgatcgggagacgcagaggtcccgcggcttcggcttcgtcaccttctccacggaggaggcgatgcggaacgccatcgagggcatgaacggcaaggagctggacggccgcaacatcaccgtcaacgaggcccagtcccgcggcggccgtggaggcggcggcggtgggtacggtggtggccgtggaggcggcggctacggcggtggcgggcgccgtgatggcggcggcggctacggcggtggcggcggctacggtggcggcggcggctactgtggtggtggcggcggctacggcggtggcaaccgtggcggcggctacggcaactccgacgggaactggaggaactgagcggtggggcccgcgcggtcaagttatcctgttcgc

SEQ ID NO: 331523 - DNA, 397 bp, Zea mays
gtgacgtgggcagatgaagttataggatagggtcagggtgtagatgaggacaccactggtggaaatggttcaagaagagtgatgattgttaaggaaggagcaggtagtgttcaagctctgcttggtgtcatgcggctactgaagtatctttctggtttgacattatttagaaaggatgagaaagttcatatcgtggtacattctggaacaggaacaactgctgtggggttagctcttggagcggtatgtctaggactccagtggagggttactgctgttatgcttgctgacacacttgaaggatataaacatcgacagagatctctattatctgattttgagaaagttttcccggaaatctaccatggcatggtcgaagatgctactcatgacaatc

SEQ ID NO: 331524 - DNA, 387 bp, Zea mays
cggacgcgtgggccggcgactacgggtgggacaccgcggggctgtcggcggacccggagaccttcgccaagaaccgcgagctggaggtgatccactgccgctgggccatgctcggcgcgctcgggtgcgtgttcccggagctgctcgcccgcaacggcgtcaagttcggcgaggcggtgtggttcaaggcgggctcccagatcttcagcgagggcgggctggactacctcggcaacccgagcctggtccacgcgcagagcatcctggccatctgggcgtgccaggtggtgctcatgggcgccgtcgaggggtaccgcgtcgccggcggcccgctcggggaggtggtcgacccgctgtaccctggcggcagcttcgacccgctcgggc

SEQ ID NO: 331525 - DNA, 379 bp, Zea mays
  unsure (1)..(379): unsure at all n locations
ccaattgtcacttgctctccctccaacaagctaattaaggccggtcatccctcttctaggtcgtttcattatccatggcggaggagaagcaccaccaccaccacctgttccaccacaagaaggacgaggagcagctcgccgccggcgggtacggcgagtccgccgagtacacggaggccacggtgacggaggtggtgtccacgggcgagaacgagtacgacgagtacaagaaggaggagaaggagcacaagcacaagcagcacctcggcgaggccggcgccatcgccgtcggcgccttcgcactctacgagaagcacgaggcgaagaatgaccctgagcacgcgcaccgtcacaagatcgangaggaggtcgcggcggc

SEQ ID NO: 331526 - DNA, 239 bp, Zea mays
tgccagcgtaacatgctgcgtgcgactaacgctcgtgaaagtctaaggtgagcttgcctagagcgcggtgctgcagccgagactgaggacgaagcttggccatcaaatcatgctgaaggaattcatgctgtataggcctctccgtagctatgaacagcatactccaacccttgcttcgctagatccagcgggtgacattatcaggacgcttgtagtggggctctgacttatgcatatca

SEQ ID NO: 331527 - DNA, 276 bp, Zea mays
ctgactctttcttttaacctgtttattcttttcatattgcttttttactcttaggtggttttttactatattacatatgatcttattatcgttctttaacattttctttccttaattactccttccttactgcaactgtctgatcgatgtatgcctaaccacggcttccctccacagagggcaagggaagtctttcaccttgcccagacctatggtttgtactccaagcttcagagcatgaatgactaggagtggtcgctggacctgcggtcgctc

SEQ ID NO: 331528 - DNA, 344 bp, Zea mays
gacccacgcgtccggccgccgagctacctgacgggcgagttcccgggcgactacggctgggacaccgcggggctgtcggcggacccggagacgttcgccaagaaccgggagctggaggtgatccactcccgctgggccatgctgggcgcgctcggctgcgtcttcccggagcttctcgcccgcaacggcgtcaagttcggcgaggccgtgtggttcaaggccggctcccagatcttcagcgagggcgggctggactacctcgggaacccgagcctcatccacgcgcagagcatccttgccatctgggcctgccaggtcgtgctcatgggcgccgtcgagggcta

SEQ ID NO: 331529 - DNA, 464 bp, Zea mays
cggttcggaattcccgggtggacccacgcgtccgcgcagccgcgcccttctgcttggctatggccaccgtcgtgccgaggatttgtggatcgctctgtgttcggcctcgacagaaactctggacgctcggacctcgccgtggacgctgatcgcctctgtttttctctggtgcgcgcccctgtgcttgggtccttgctagcagccgagcagctccttcgcgccgcagtgctacctcgtgtgcgcgccctgccgaagccccttacgactgtcggcaactccccatcctctagttgtgctcgctgctggccctgtggtgagctccctgcttcatcctcgccatggacgccatctagcacgcgcgcgccggatgtatttcctccttcgcgcagtgccttggtgactgtcgagtagcacaccaggcctgcgcagcctcgtcgcgtctgtatagccccagttgcaatgca

SEQ ID NO: 331530 - DNA, 355 bp, Zea mays
cggacgcgtggggcggcgtccgggagcccgtggtacggccccgaccgcgggctgtaccggggcccactgtccggcgagccgccgagctacctgacgggcgagttcccgggcgactacggctgggacaccgcggggctgtcggcggacccggagacgttcgccaagaaccgggagctggaggtgatccactcccgctgggccatgctgggcgcgctcggctgcgtcttcccggagcttctcgcccgcaacggcgtcaagttcggcgaggccgtgtggttcaaggccggctcccagatcttcagcgagggcgggctggactacctcgggaacccgagcctcatccacgcgcagagca

SEQ ID NO: 331531 - DNA, 245 bp, Zea mays
gcgacgcatacggcgacgcatgcgagcacgcgtgactattagtacagatattgtcacagctgagattcagtacctacaactgatgactaacagcagatagcagcactcacagacatatgagatctcgattatagctactggatcctgggccattgaggtcaccgattgaagctcacacggacctgattctatcagaatgctatatctaacggagattgatgatgctgacaagctgactggagtta

SEQ ID NO: 331532 - DNA, 266 bp, Zea mays
ttaccgttcggaattcccggctctacccactcgtcctcccactcttactctgactttctctcatcttcgcacgatgacctttatcgtgattatcgagaatattctactaacactacgacttaaaaactctaatacacagcacaaccgcaacacaacatcattatatatcctcactaccaccttatcacaaacatctataatatacacatcccagattttatccatcatccatacattaacaccttctactagttaccttacattca

SEQ ID NO: 331533 - DNA, 357 bp, Zea mays
  unsure (1)..(357): unsure at all n locations
tgaagactaccaacctcagatatcagattttgggcttgcaaagtggctggctgacaaggtgacccatcatgttgtgtatcccattgaaggcacattcggcgagcatctatgcgttcgggttactaggacatgggacttctatgatcctggagatgataaaaaacttctgcattctgatcttgtactgctcgatgaggaggttcataaagcatggttaccaccttggctagcggcacaatatgctcattacgtggattgagggagaggaagcaaaaatgactttatgggagaatatgcagaaagctgaagcagaagcagccatacaaaagctngtgataaaacttgaaaagaaaaggc

SEQ ID NO: 331534 - DNA, 447 bp, Zea mays
gccgacatggacttcgaatcagagtcagtcccatcttacctccaaccagaccaagaacggtgaactcagcttacctgctgcaccaactggccatgcagcagtcccagcaaaccagcagcaggtagtgaaactgttgtgagagaatgacgttagatgttgcgtactttttagtgttgcttttgtttatacccaacatcatggtagttatttggtttcctttagctctgtcatgtgcgctaacaaccagttggcctattgcaacatggggccacgcttttaaattttattatctctaaaataaattagcacgtttcgaatttatcccaatgaacgtcagagaagaaaaatgtgatgaaggagaaggtaaaaaaaaaacttaggatgttctctctttatgggtgtggcagtttataaggtagaataaggtagaagacagaacacctgaat

SEQ ID NO: 331535 - DNA, 437 bp, Zea mays
cccacgcgtccgacttgctctccctccaacaagctaattaaggccggtcgtcatgcgggttctagctcgttctattatccatggcggaggagaagcaccaccaccaccacctgttccaccataagaaggacgaggagcaggaggagcagctcgccggcggcgggtacggcgagtccgccgagtacacggaggccacggtgacggaggtggtgtccacgggcgagaacgagtacgacgagtacaaggaggagaagcagcataagcacaagcagcacctcggcgaggccggcgccatcgccgccggcgccttcgcactctacgagaagcacgaggcgaagaaggacccggagcacgcgcaccgacacatgatcgaggaggaggtcgcggcggcggcggacgtcggctccggcggcttcgccttacacgagcaccacgag

SEQ ID NO: 331536 - DNA, 249 bp, Zea mays
cacccactcgtcctcccactcctccgatcgctttttccaacatcacaccctaactcatcttacgcatcattggaacttttataaagatcatcccgatccctaacctctataacaactattcctacttaatcattaactacatcaccaatacaacatcacccgacaactactactaacccgataaagatctcaaccatatctcctaactcctcacctacttactactccttacccaccacccatcaccac

SEQ ID NO: 331537 - DNA, 62 bp, Zea mays
cccacgcgtccgtccacgcgtacgctgtgctaaaaaccactggttctgtgtggattcaggag

SEQ ID NO: 331538 - DNA, 208 bp, Zea mays
cacacgcgtgcgtcgacacacgcttcttagaccccttaatgatgacttacatgagctgggtatatagtgtgctacagtgagactctctagctagccaagatgactaccaatgcggaggacttcacaatcaacctcatactgtatcatctctctgcctcacattacaacatcttaccactggcctatctagggactattctgctaatca

SEQ ID NO: 331539 - DNA, 334 bp, Zea mays
aaatatacacgggttgtgactccctcggccatcgtcaagactcgtgaggcctccgagcgggcagcggagagatcaaactgagagatggagagagggagagtcgtgctcgcgggttgtgtccgtggcccggggggaggaaattttctgggcgcctccacctttggtgctcgcgccatcgacgaagaaaggagagcaaagagagagaacagagagtgggtcaccgcgtccgaggctagcaccaaggaacccaatgccgccatggtcggtgtccgcggtgtcgatgtcagtttccacgggatctggctcgtcggcgcgctcgcggattccttcgcgt

SEQ ID NO: 331540 - DNA, 147 bp, Zea mays
tatagatcctcaaatgaagtaattacacaggtattaggtcgtggcaaccgattgtcaggcaatcaggctgtatatgttcgatgcggtatccggttgcagaccgtaagaattatattttctatttgtcttttgatttggttttcctct

SEQ ID NO: 331541 - DNA, 244 bp, Zea mays
gattccctggtcgacccactcatcctccgactcttccatctaccctcactaacatttgactctaccatcctctacgggacccacgggctcttctaccaccacttggaacagctcctatgcctactactctaccacctctctctcatcaccatcatcatcaagcgcaaggacttctactacacactgatcaccagcaacaagatactcctcataacatcacactactacatgcatcatatccgtc

SEQ ID NO: 331542 - DNA, 439 bp, Zea mays
  unsure (1)..(439): unsure at all n locations
cgcgactgcaagttctagattggagaggcctaaacgtgttgttccccgagcattttctgtttctaatcaaagaagtttgttcggaataaatggtggtgtgaccaatccattggccaataaggataaatctggtgataaaagtagcatctctccagcaagcatgacaaagaagagtacgcatgtggcacttaggaagactttgcagcctgagaaggcatttcatcctctggaagaggactcctttctacacaaaattagaggagaaacataaagctttggaagcagagaaggacgaggctgatgccaggaaaaaggaagagcaagacgttgctttaaaacaactaacgaagtcattggtgattagagcgaaacccatgccaagcttctatcatgaagggcccncaccaaaggctgaactgaagaaagtgcctcctacccg

SEQ ID NO: 331543 - DNA, 276 bp, Zea mays
aaagcgcactactcgattattacggatgtatagaaagagccgagtgtgcactgtaatggacggttagctgctattgatgtgtcttgtgttagttgactaaaagcttcaacagccatgtgtacaaaattcagtttacaagcaaagatctaaggtcgatcgatgattgatcaatcctcatcaaccaaggcaacttcaaagcgctacttctctacgagacgctcgatctcgacatcatccacgaccctgaccaggtggatgactacttcagggacacca

SEQ ID NO: 331544 - DNA, 329 bp, Zea mays
cacgaacctgcagaggactggtacgagtacctgcctgacgtaagcccgtgactttctgcgggggggatctgaacaggatgaggctacgactcatcgactgaaaggtgtcctgtatcgtgacggccataaacggagacagcctcacggcgctcttgttgtccaacatcggacatgagctggcccacttactcacgcacctctaccgtcagcttacagctctggctgtggatagtgtacattgcacctaggcctgatcatcatgctcaccttcatacgcatcggattcaatgacctgatcgacgactacttacagaagtgaagcggattag

SEQ ID NO: 331545 - DNA, 367 bp, Zea mays
gcggatcgagaaagatattgatgaagttgtgaaaattgctcgtcaagcgaatactaaggctgatgcattggatgatgactacttatcagataggctataacctggatgtggacaaggatctgccgtgggccgatcaatagagcaatctactgaactaactactgagatattgaaggagcggttggatgactttcagaccttgtgagaaaccttcagacaagagtttcggcaggatgatcaaagaatggtttttactgtgactggtactggtactgatgatcagactgttgatgactcgatagataccttgataggtgaccaaatattcgaagatgctatccaacatgctgtacaacgtcagatacta

SEQ ID NO: 331546 - DNA, 392 bp, Zea mays
  unsure (1)..(392): unsure at all n locations
cccacgcgtccgcccacgcgtgcgcggattcgtgggcgggagtactcacggaaaggcgccgacaagcctgcaacattcaagcttccggaggcagtgcccagcacggagtgagaacccaacacagtcatagatcgtatggaacactgcagagatacttagccccgccattcacttcgtgtatagcctgatcatttacagagagccgtaagcctgtatagtatctgctctctgactccacatggtatacctgtaaatcctctgctagtgatagctcgggtcgattacccatagagacacttacattgcagacgcataacaagtgttcacagaaagccttaatccatagaacactggcacatacttttacaggatggcattatgtcaaanaaaaa

SEQ ID NO: 331547 - DNA, 61 bp, Zea mays
gagccgtacgtcgggaggtgcctgctcatctcccagatcacccgccaaccaaccccccggg

SEQ ID NO: 331548 - DNA, 241 bp, Zea mays
gaaataactacatgcatcttctcatcttctgtattgagtacatagaacacttgtgcagcacgttctgcgagaacacgggtcatgtttatattctactttctttaagtataccagtgtgagtaccagtgtggtccgtagttattcattatcacccccacgggatgttgtacccattgacacttaaataaagggtattttcatgcttgggccaaaaaaaaaaattgcaaaagaacaacaaaat

SEQ ID NO: 331549 - DNA, 238 bp, Zea mays
atgaggatggattcctctacatgacctacagtggtgagaacaccttcgggctcctctagatggctcaccacaatcgggtctgccttgcccttgcttccctactgatgccctgcctcgtgtaaataagacctgccaagcaattgtgtatattctggtttcctcgctcaactgctggaagtctaaaacctaccttatcatggacaccgtttaaattaagtaattgactggacctgaaaaa

SEQ ID NO: 331550 - DNA, 432 bp, Zea mays
  unsure (1)..(432): unsure at all n locations
gttgaaggctaccgttctactcggaagcaaagctgatgttctttgtatacttgtggtgccctaagacaaaggtctttagattgtcctttgcttcttctatctcacagtttagtttttggcaacaggctgatgtgtgctttcattacagggaactacgtatgtttatggaactttctttaaaccatatatttctcagcatgagaatgaaatcgaccggaatctccttgagctgagagctcgagccaccgacacggttgtactttattttcagaaggctgcttcggcaggacaaagtactttctttgacgttttaaaatatgttgctgcccagtcaccttctcagaaatcaaggcaacgccttcatcangtgtgtgtggatcaaatgcactattactctctnttttgtcaaaaaaaaatccattgaatcatttg

SEQ ID NO: 331551 - DNA, 76 bp, Zea mays
gcagtcagtagataagtcgtaacctgcgttattctattcttgcgacggaagcaaaatctgcacgagagacagacga

SEQ ID NO: 331552 - DNA, 419 bp, Zea mays
ctccaccgccgttcgaatattccaagcttgatattggaggaggaggggaggggagccgagcgcagaaccctaattacctccatcgattgctaacagctcagatctcagaggcaggggaggtaaaatgccaagagcaaatgagatgttcagggcagattctagaatgatggtggtttttggtgccttgacatcgaaaccagagcagctgacattcgaagaaaccctcagatttgtcaagaaagtgaaggcccgcgattacatgctatacctgtcattgttcgacattcttggcagaatggaactatcccagctcgatgcctaccgagagttacagctgctgtttggaaaccacccggatctgtgcgaaaagctcgagaagttcaagccaccggtgcctacatagcatgcagcaaacaaca

SEQ ID NO: 331553 - DNA, 131 bp, Zea mays
cacaagtagtcagtcagttcaaactagcttcgtccagtgtgttcagcgtgccaatctcagatctccactgcatgcaagctactcatcacttcaaaccatatgtgccaagtggaactcttaattggatccgg

SEQ ID NO: 331554 - DNA, 465 bp, Zea mays
cccacgcgtccggtttcattgattcttgaagagatcgagcttcttttgcaccacaaggtggaggatgtcgtgcaactgcggatcaagctgcggctgcggctcaagctgcaagtgcggcaagaagtaccctgacctggaggagacgagcaccgccgcgcaggccaccgtcgtcctcggcgtggccccggagaagaaggccgcgcccgagttcgtcgaggccgcggcggagtccggcgaggccgcccacggctgcagctgcggtggcaactgcaagtgcgacccctgcaactgctgatcacatcgatcgacgaccatggatatgattattatctatctagcttgtggtggtggttgaacaataataagcgaggccgagctggctgccatacataggtattgtgtggtgtgtgtgagagagagagaaacagagttcttcagtttgctatctctctctgcaatgttttt

SEQ ID NO: 331555 - DNA, 258 bp, Zea mays
cacacgcgtccgaactcatcacagcttcttgcaagacataccagtgcactgagcagatggctaactacaccggtagggcgctacacgtaattcatgacagttatcggcggatccagctgatgtattcagacatcccaataccagttgctcaggctcagaggcattaccaaccgattaagagccaccggatggtgacctgcgatcatccaccgatagaaggaaccgctgtactgtacaccaggcacactgatgctgttg

SEQ ID NO: 331556 - DNA, 139 bp, Zea mays
cccacgcgtccggcaatccacacaagcactttgacgtcacacgggcgcttcgcacaaacgcaccaaacggccgcaccaatgggttactaccaagaaggggactactggtccgaagaagtgaagtccgtggcccccggcc

SEQ ID NO: 331557 - DNA, 432 bp, Zea mays
cgacgaggtgaggtgcttccacctcgagggtgggggcggcggcagaggcggcggcgtggtggaggccgtgccagagaggttcgacgacttcgatgttgtgttcgtgtgctacttccctggaatgggagtctccgcgggggcgctcctcaaatcgctggccaagaggtgctcaaaaggtgagacctgttgaaacggcaccttatcctttcttagcttgttgtttcttgtttcagacttccagtggactgagcctgaggtggttagaaggatgcggcttattacgctgtgcattgcgtttgctaaatcacaactaaatcatttgagatggcaaattggtggggtttagagttgaggtattgattgatcagattggttattatgaggctgttgttgccagatatcatattgcatcaagcccctaacatatacttg

SEQ ID NO: 331558 - DNA, 358 bp, Zea mays
tccgggtcgccccacgcgtccggttatgcctgcctacacttatccgacgttcctatcactagctatataagaccaaatctgtggggaccaacgatgagctgatgatccatgccaagctcccaattgatatgcagcccgccaaggtgtacgactaccgggagctgttaccctagatatctgtcatgctcttctacagcatgaacaccatcgatgtcgacgaggtcacggtcgatatcgtcaagtttcagaagctcacagacgaattgacaatgctgaacctaatgggacagatacctgcgactgttgacgacagattcaaactattttaaagcaatgcgattttcaggtatcttgcata

SEQ ID NO: 331559 - DNA, 60 bp, Zea mays
agcgaaccctagccgtactcagcgacttattttagatctcctatccatgacgttcaagcg

SEQ ID NO: 331560 - DNA, 56 bp, Zea mays
accacgcgtccgcccacgcgtccggcttactatgttaggtgccatactaatcatgg

SEQ ID NO: 331561 - DNA, 308 bp, Zea mays
  unsure (1)..(308): unsure at all n locations
taccggtccggaattgccgtttcgacctacgcgtccgggaatcggcaacaagcaactgctgcgactgaggactgatggactacgccttctcatacggtcggacacaacggatggtattctcacctgaggaagcctacactgtacctcatggaacgaaggcaccatgtgatcgcaaacgcatgcttcgagctaaacatgtncggtatcgtcagatgacggctacggctaaagcgaggagggtaccatcttcaggtacgaggacgtgcccaggaacaaccagcacgcgctggtcataacgcttgcgcaac

SEQ ID NO: 331562 - DNA, 194 bp, Zea mays
acacgtacgcccgcgtccattttaaacgacatcatcacttacctttacttcaaccacacctactacaagatcctgtctaacctcctctgcgctttcccctatctattcctccatatcatactacacttccaccattgctcttctcccaacactacgtctccaacatctaccaccttctcatactactactacct

SEQ ID NO: 331563 - DNA, 523 bp, Zea mays
  unsure (1)..(523): unsure at all n locations
ccggtctcggaanttcccgggctcgactccacgtccgtccgaaacgagtgatagctcaggaaccagtttgaatctttgtgggtgannaaagtgagccctgcagaatcgccgggggagaagcgtggcnncttgtgatctcatccatagngtgaagaaatttctagtagtccccttgggacctagtattnngattaagtgcctatcctnngtttataatcattcntnntcccagaccacggctttgagaatngctttttgactttggcttggcattcanngcttgtgatnncagagctgatagtnntcttcggtaccttccatcttcataatcannggatggnnttgatcaagtcagaattcatcttcagatgtttccaagactgaaaaaggaatttttggctctgtgtactnattagggaaattctttgagagattagncacttaaaattcctttgaatacaatccccttttctcgatgtacccttctatatataatcgtattgcttgattcatctacatgttt

SEQ ID NO: 331564 - DNA, 436 bp, Zea mays
  unsure (1)..(436): unsure at all n locations
cgccgctccgtggcagaacggagagcgcaaggtcgacggaggagggcccggctccaacagccggcaggtcgcgccggacgacaccggcatcgtcggaagcgtcggcgacggtagtagcagagacgagactttctatgaagccaccgcctggttggaattagactgcgaagatgatttctacagcgtcaacggaggtaaactgaatccccaaccaaaagatctgacgcctgcgagatcgttcgcatcccgaaccagtggccggaacactccgtcacctagaccccgcgatctaccgacgctggcggcgatcctcaaggccgaacccctgaagccggcgncgacgccgacgccgaccgcgggcccgcaaaagaagctgggcgacctcctgcgggaggcgcaagacgacgacgacgacgacaatgacaccggcgtcgac

SEQ ID NO: 331565 - DNA, 235 bp, Zea mays
cggtctcggaattctccgggtcggaccgcacgcgtctcggttgggttctactatcacgacgacaatacatggtggaagctctgcgaagaatcggagagtggggtagtgtacgctcggcagatcggtggggagtctgagggctactctcggacacggcttgatcgagagtgaagagtcaccggccggacatacaagcatgctgctatcccgctcgcatctacctttcatcttacaa

SEQ ID NO: 331566 - DNA, 188 bp, Zea mays
gtcacgcattctgttcaacgatacctcaacgtggtagtcgctcatgtggtcatgcatggggtcgacttctccgacaaccctaaaacgattatctctctctggtttacggaaatcactgtgctgctgatcaccatttcagatatgtcaacctaccatgcttaggcagtccttatcagatgctgtgcctt

SEQ ID NO: 331567 - DNA, 380 bp, Zea mays
cggacgcttgcttcgacccacgcatgcagtcacgctcacggctgccttacaagggtagggtattgacaatactccgatgtgcaagatcgccgaccagaaggcccctgccgtcagcttactcccaatagccctggccgacgaccccgagcactaccaccagctcacagtaaaggagctcaagaacgctcgactgcccaccttgtacacgctaggtttctcggtacacgtatgctcatcgtcaacgccatgaccgagatcctccctaaccacctcagtaaccaatacaacaccaacgcatactcctacctgagaaacttcaagtacctcaactaagctaaacggctatgctatgcctactcactggcattcggattctacac

SEQ ID NO: 331568 - DNA, 229 bp, Zea mays
attcggaggttccgaggctacgacgtcacgctgacgcaggaagctataagctagccaagacaggaataataatggcggtgtcgactgaggcgagcctctctgatccatggacgacaactaccttagctgctcgaagcgaagccaacgtggtgatcgtcgaacaaaggagggcagtcgcctggcgcgtcaagttggtacccgcagttgaccgccaaggtgatgcaaaagc

SEQ ID NO: 331569 - DNA, 334 bp, Zea mays
acctgggcgacctggttggtaccgcctaggctgctaaccttgcttttggggcgcactgtgagtcatcgactctagtcataccttactgtgatgggctttcggtctcttacattttatgggttgagaatgcctctgatgtgatatgcaactggcttgctgctattaggcatgatgggctggccgggcaaatggtctacatatgcttctacttctgtggcatatcattcctcatctgtatcgctgatagaggcatggacctcgtcttagatatactaggtgtgccgacgtgcacggagatgtagatgagcatgccatattgatcgatatatatttt

SEQ ID NO: 331570 - DNA, 281 bp, Zea mays
ctcacccataagacgacgaagtaccgtaccgccacgtggcttacacacaccagctgtgcgtgtggcacgcacagcgcagggacgaggataacgctctcttactggacaaagacgatggacgacgaccaattccgtgagcatcttagcgggatctacctgaaaagcgaggcgagacatatggacatcctgagttaaatgaactggcatacgcaaggaatgatgaatcctaacagcacctgaaccgacaaaggcatgaccattgagaagatcctgaggctcat

SEQ ID NO: 331571 - DNA, 238 bp, Zea mays
gaaactagcactgaagagcgagattgttcgcttcagattaaaaatggctgtttagactggtatagttataatttattgagacaaactatcacagagagtggcctgctcgctgatgctccatccacatgttgattttggttttgggtcgtcaaagcttggcccgctcatcctcaactttgcattctgaacctatgttctcttcctccaaccacagaaatgcatctctgtatgtatcgat

SEQ ID NO: 331572 - DNA, 188 bp, Zea mays
ctggaaagtggttctggttgacaacaccgacttcgtcagggaactccagtgagaaccgggccggagcacccaggtgctgagactgggtgtagtttagcagggcttgtgatccaatacgatgtgggctagaggttgtgctgctgctagcctgctaatgcaactgctacatgatcttgtttggcagtggt

SEQ ID NO: 331573 - DNA, 447 bp, Zea mays
tttgattcatgcatttgatcatttcaactgctttctccaattctatgtctttaattatgaggggatcaattcattctggagtgatttggtattgaaccttgctgtcgcagagcttcagttagcctctaccactgctccatcgcttggtggcactttcttgttcttttttctgtgtggtagtgtgcatatgcatgtttgacatataatacttagtatttaatgttaaactgttaatggtcacttgtgttttcagaatgagatgaatgagcgtgagttgtgtgcactgaaatctgtcattaagtgcattgaagatcataaacttgaggagcagtaccctgtggacccacttcagaaaagggttttgcagctagagaaagcaaaggcagacaagaggagggctgttgaagcagcccagccacagtccaagaagcctcgtgccaatggatc

SEQ ID NO: 331574 - DNA, 455 bp, Zea mays
gggaactgagtgcataaacaccaccacgtctatagaagagcacttgcacaaggagctccccgacccagttgatctgaaatccatggagatgactgtacctgatcagcatgagccatctttcaatgaaccagaacatgtactcaaagacgatgagaaatccgagggtcatttctctgaagagaaagtagatgcaggagctaatgagattcataatggagggcaagatgacaatggtggtgtcaagactatatatgaatgtgggattgttgagaaaaaggctgaccggagtgtggataagacagtgccgaagactgaagtggctcaagtatggaggaaggatgatccaaaaggcaatgacgtgattgaagaaaccaaaagcaagctcctgctggaaaggaagagcccggtgaaagccttggtgggggcctttgaaactggattgtcgttcaaggagt

SEQ ID NO: 331575 - DNA, 445 bp, Zea mays
cccacgcgtccgcgaccaccgcaggaagatggaggccatcggggccggcgccgtggggaggctggccacgaggaactcggtcaaggacctgctgctgggcattggaaagggtcgaagcggctgcgaaccgctgcacctcttcccgtctgccgttctgacggtgaaccgcgggccgtcgccggacttcaagacggcgcacgggatccaccaatggtggcggcccgacctgtcactggagtgcaccgcgcattactacacgtgaaccttttaccctgacttcatgaagctccgtcctcgaatatctcacttcactccgggaattggattgaaagcttgaaccgacaaaaggagaagcgtaacttttcaaacatcggtacccttcgtccgttgaagacttagttgcattgatgattttgatataaccttttttaaaaagatttttttc

SEQ ID NO: 331576 - DNA, 427 bp, Zea mays
gttgctggtctatactatgtcaatctatgaaaatatggctgcaaattaaaaagacttgggaatggggggagacgtccccttgactttagtcttaagaaggggcctaccaaacccgggaagaaggcaggaacctcatgtgagcaggcttctttggctgccgtggaaccatctgtgctgtttcatccagggaggtgggcacacagccatgcagcacagggatcgaaccctggtggggagcgccacacctcgggtgctgaaccactgcgctattagcgcctctacaaacacgactgtaattgcttatatgattaaaaatgtggagattacataagaattttactaacatggtctatcccatacatgaacctggatcttttggagtctttcctgattgatgtacccatatatatatatatatatatatata

SEQ ID NO: 331577 - DNA, 242 bp, Zea mays
gacggacacactcgtatacataactagccacatctaatacgcgcaggcaggctcgggggctcatgccaccaatggcaagggatggcgatacgcctcggagcggcaacagctcaggggttcgcgggaccggctgacaagaagcaatgcgacggcgtcacgcacgtggtggatatgaacgattacagtgatctaaatgggctcaccaaggtgaacatgctaggagtgcgcatgaccgtctacta

SEQ ID NO: 331578 - DNA, 246 bp, Zea mays
tccacacgtactgggacccacgtgtacacatgggccgggccatgcgcgcgcatccgggctgcacgcgtaccatcagcctgctctatgaggcctacaggacaagaaagggggggaccatctgcaggtggataaagaacgtggccaacggcgaccacaaggagcagcatgtacatgacccgcaccgccgcgctgccaagaaagtgcagcgtaagcctgccatgcatgagcagaacctacggcaactga

SEQ ID NO: 331579 - DNA, 246 bp, Zea mays
gaattaccagctcgacccacacgtccgctcacgctgccaagtacgcttgccatcgatgacattatgaaagtatataccggcgctttgaggggagactattatcagcagcgtggtgtgctacacctacacttgcataaaaaactggacttgtaagagatggaaaagatcgtagctaactgatcacccagaagaaggccatccatgagccggacttgcacaatcccaagctcgagacgcctaatccta

SEQ ID NO: 331580 - DNA, 217 bp, Zea mays
gcagtatatataccgggaacaacggagcctgttctgcagagcgcgtgctggaccgacgcgggtggtttcacttcgtcgaatgtggtgaactatcttctatttgggggactatacacagagcaccgtgccctgcgcgaccctgttgctagcaataatgcgcattatactgtgcacgaacgagctgagacatgggtgcagacttcaatgctgatctgat

SEQ ID NO: 331581 - DNA, 139 bp, Zea mays
ccggaattccgggtcgacccacgcgtacggaaatatgtgcacgtggagtctgtagctacattgaaccctgggaccatatcgaaccctgtcgcagcatgcaaataggaggtgtgacctaagaagctaacttcgatcgaca

SEQ ID NO: 331582 - DNA, 311 bp, Zea mays
tcccgggtcgactccactcgttcgtccactcgtccgcccacgcgtacgaaattttgtactgtctcagatttgaaggatccaaacaagaaatttaattttactagatttgaaaggaattggtttgagaagtaaaaaaaaaaaaaaaaaaaaaaaaaaaaaaaaaaaaaaaaaataaaaaaaaataaaaaaaaaaaaaaaaaataaaaaaaaaaataaaaagtaaataaaaaaaaaatatataaaaaataaaaaactgttgacgaacaattagaagatagtaaaaaaatataattgaaacaaaaaaaattgga

SEQ ID NO: 331583 - DNA, 144 bp, Zea mays
aatatatgcagaatgggccactttaagagagattacaaacgacaccagacctactaaaatgatactagatagatctcaacacaatcaaccttatgataagcacctcctccataagaacaacattaatcaattataccaactact

SEQ ID NO: 331584 - DNA, 60 bp, Zea mays
gtttggagactacgtacgcctgaagcaatagcaactttgcgagaaaaagaaaaaaaagag

SEQ ID NO: 331585 - DNA, 334 bp, Zea mays
cccacgcgttcggcaagactttacatatgatcggctcggagcgcatcatgtgagggcgtgtcacaattgaccggatatcgctttgaagatccttacttggattaatactgatgactgcgaaggaacctatcattgccctgtacaagatggcattaacggacgagcctattatgactacatctcgtctgcgcacggatgaactactgtgtgtctaacatctactgataatggtctatattaccctgaccagacgacgtgtcattcggtggagattgatgctgaatatgatcattgggcagttcgatcatctttgtacgagctgcataggactggt

SEQ ID NO: 331586 - DNA, 329 bp, Zea mays
gagacacgtgtgcggacgcgtttgcaggtgatagccgtaaaagctgcacatactgtggttgagccttctgtaatgcggttgctgatgatgcacatgaatgcttacacggccagggtcatgaaggcgtacaactatttgaggagctatatctgtgacctgacaagtgcaatcgagcccactacgtctaagacgaagactctgtaagtaataatactcatggattacaaactgtctggagcttgacaacgtggagaatctgacggtgttgcagagatagaaacactgagtatcttgacggacccattcggaagtacttctgatactgtgac

SEQ ID NO: 331587 - DNA, 326 bp, Zea mays
aggcgacgcgtgggtgcggttcggcagcatagcaagaagagaaccagtgtgctagtgctgcgagctgcggcctagctacctactacggcgcagctagcagcggcggacatgagcggggggcgcgaggagagcaccagcagcaggtggccagagctggccgtcctgcgcgcgctggcgcgcgacgcggcggcccgggccgggagggagacggcggggtggcgcggtccggagcgggaggaccaccgtcacgggcacggtcacggcaagacggccaaggtcatgcacctgctgatctggggacccaagtgaggtgaagcgaatcgctg

SEQ ID NO: 331588 - DNA, 101 bp, Zea mays
cagcagttctctgctggatgtgatgtattcattgttgcaatcatggccgggcattggcgacctctatacctgctacaaaactactgcaacgcctataaaaa

SEQ ID NO: 331589 - DNA, 436 bp, Zea mays
  unsure (1)..(436): unsure at all n locations
cgaaacaaccaatgcctccaccaaaaatcggaatgttagtgcgtagacttataccagttgcatacaaagtgtacaatgcaagaattttgctgatcaacaacttgaagaggcttatgaaagtagtaccagtaaaaggctgcaagtattgcagcgagatacatgttggatctgttggacatcctttccgaacatgccgaggaatgtcatcagatcaacgtagaggagaacatgactggngaagtactctagtggaggcagttttcttacccgtcgaagcctatcatctagaggaccgtctagggaatcgcattcctcatgatcagaggtttactgtaccccgcattcccgctctcgtggaactttgcatccaagctggagttgaccttcccgagtaccccacaaagcgtcgaagaaagcctatcattaaaatcggaag

SEQ ID NO: 331590 - DNA, 107 bp, Zea mays
aacctatctggggctgcgattcgaggacctatatggacccatccgtaacaagtacgtcatcacactgccaagcttcaagaatgaatccatctatacggatatcaaat

SEQ ID NO: 331591 - DNA, 436 bp, Zea mays
  unsure (1)..(436): unsure at all n locations
cccacgcgtccggaaaagtttacctcatattggtatcaaggttgatcgatcacaaatggcagttgcttctagaactaggtaaaaaaacgaaaatatgaatgttgtagctgacttgatgcatggttatttgttaggattactaagagatagtaacgaacctcacaatcattacggcagctcagtacctatctccaaataaaaacttttgttgatgcggcaaacatggacaagtaggtcctttaatcaatatttgtttggcgaatttgtggtgtacatgcccatatgataaatggactgtagaaggattgaatattcaaaagtgcacatgtctctgatgtgcttataggttatgtcattgaaactggaagtgtangtagccaatttctacgataccacaggatgtactgncctatcttctatgagcacacccagtgct

SEQ ID NO: 331592 - DNA, 301 bp, Zea mays
cggacgcgtgggtgcatcccaaatgtgtgatgtaaactgagacagaacagcagccagatgaagcagagatttgctgaaaaaaaaaaaaaaaaaaaaaaaaaaaaaaaagaaaaaaaaaaaaaaaaaaaaaaaaaaaaaaaaaaaaagaaaaaaaaaagaaaaaaaagggcgaccagctgtataggatccaagcttccatacgaatgcatgctacactataatattcctatagcactacctaaactcatgtaataggccgacattaaaaaactggtctactggaaaaaccttgacggtacct

SEQ ID NO: 331593 - DNA, 359 bp, Zea mays
cggacgcgtgggcgccgccagggactctctggtatctcgccagggccaggaacgcgcgcctcagggccgccgtctccgacaaggacggcgcgctgcagagcctccgacaggagtacaagtgcgtcagggtcagtgaggctgcagcacccccgcgtcgtccgccaccaccacgacggcgtgcagaacccccgcgtcgtccgccaagaccgcccccgcgccgggctacggcctcaatcagcgccttccgaatggcagcagcatgaagggaacgccgcggtcggcgtcacagcggtggacgccggacaagccacggacgccgagcaaccggcggacgtactctatccgcgagccgggcaaac

SEQ ID NO: 331594 - DNA, 380 bp, Zea mays
ccgactcgttcgccttcgcattccatctctcttgggctgtacctttgattcggggagggtgataatagggtcaggcctgaaagccagtgattaacagtgcaagaaaacacatcatatcactgaactgctagctatgactaggagctgcagagcgacccatctgtggtattaccatagaatattcaaagcgacgtgagccatacagtgcaaaaggtactagatctatatatgaatggaatcgaatgaatgactgaaaagccacctttaaaagttagacagacttctgactccaaattaaacttactcaattcaattggaactactgctatgatctgcatgatgatacactatgacacatatagagcctacgagttcacatt

SEQ ID NO: 331595 - DNA, 190 bp, Zea mays
acgcacgcgtacgccggcatctataccttcctcttcttcgttttgcaaaccttccccgaggatcaccaaaacgacaatttcacacggctggcggggcttatactgcgcttccccaccagctacaccctgctgaacaatgatgagctggacaacacgaaagatattgcgccagacaacttccggctagact

SEQ ID NO: 331596 - DNA, 141 bp, Zea mays
ccgaattcccggctcgacccacgcgtacgcgcaactcgtgtgctaataactacagatggttgggcttcaagacctgaccttcaaccgtgttgacctggtcttaaataataacctcccaattaatcttaaccttaacttcca

SEQ ID NO: 331597 - DNA, 101 bp, Zea mays
ggaattcccgggcttgtcgaactcacactaagcttagataagtgctgggtttgtgggaacatcgtttgtgcaatataaatgagatggtgcacctacaaaaa

SEQ ID NO: 331598 - DNA, 256 bp, Zea mays
taccggttcggaattccgagggtacgacctcacgcgtccgataggcttcgctagacaaagacctgctaatgatggtctggggtgaatgaagaggtagatggaaacagaacagaaggctggttgtttgtagtgaaacactgaatatggtgttgagctattcatattcattggttcaattttctccatagcattctagaatagagtatttgatggttggtgaaacttcgctcgcaaaaaaaaaaagttgtttggatcc

SEQ ID NO: 331599 - DNA, 417 bp, Zea mays
ggaattcccgggtcgaggcacgagtcacgcgtccgcgcacgcgtccgctcacgcgttcggccacacgtccgtgtaggagtgcgaatacgcttagttcaggccgctggcttggttgtatgtgcctttgatcagcagctagaatctggtgaacgagaagtagcttgagaccgacaacggagatctggccgacaggatatggccggacttaaggagccgatcgaagccaagtaacggctcttcgacggaaatgacattggacacaccaattacgatccatacagcacagtctgctcactcagatgagtaatgactagatctacggccacatgctcatcaatgctggcatgatattggagaataatcagacactggtagagctccgagttccagtcggagacgaccgagtaggctgcatta

SEQ ID NO: 331600 - DNA, 318 bp, Zea mays
ctcactcattcgcccacgcgtacggattcagttttcacttgcctcatacttcgacagggacttgctgactcgcacggaccgcgaggactactcgcagcactggatcaatgacatgaattacagctaccactgtcaactatatatgaacgctaccctgccatcctcctcgtcaactaacccattggagaagctctcaaccatttccttgtccaatgacactctgatcctatgaccctgcataatgaacactacgtttacgactctctactgggcacagatatcaataacggtcgtcttgacctgctcttcattatcaga

SEQ ID NO: 331601 - DNA, 432 bp, Zea mays
cccacgcgtccggatccacagatgtttgagggagttacgcatgtgatatgtggtactggaactacagcatttccgtctaagcgctgggatggagataacactccagaacgtgtagattgggatggcatcagaaatcttgtcagtgccttgccacagacagtcaagagactggttcttgtgtcatccattggtgttacaaaatacaatgagataccatggagcatcatgaatctctatggtgtgcttaagtacaagacgatgggagaagactttgtctgcaattcagggataccattcacgattattagggctggaagattgacagacgggccctacactgcgtatgatcttaatacacttgttaaagctacagctggagagcgacgagcagtagtcataggcaaaggtgacaagctcgtgggggaagttagc

SEQ ID NO: 331602 - DNA, 338 bp, Zea mays
  unsure (1)..(338): unsure at all n locations
ggcaattctatggagcaatgactgcccacactagtagatgcatgaggaggatggcgcggtatgatatccaatgcgcatgcgattaatgagatgctctgatgcattcaatgcgacctgttgatatctgcctctgcgacgtacactctgaaaattttacgtaacgaccgttgctggtgtctctacaggcattgaacctactcatacatcgaacggtcgacacgaattcgtacttactttatgtgacgctcacattcgtgtgaaggctactcagtatatgttctatctactgctntaaatgcgttcacctgttcactgttaagcatcatcgctggaaatat

SEQ ID NO: 331603 - DNA, 322 bp, Zea mays
agacatcgtataaccataataatattgaactcatgcatttatactagtgacaatgaatcgtgcacggcattttaacgctggaattggtctacatcgtactaaagatttagaaataaccatagaaattgcttgctgttgcaccaaagtgctgtgaactatccattgtcgctttatgcatacattgttggtttacaaatgaaacatagaactctcatcatgtgcatacattattagttactatggtgaccacaatgtcgaaatggtactcaacttgtttatgactgccgcttataggcaactaatatgacattactagcaatga

SEQ ID NO: 331604 - DNA, 201 bp, Zea mays
attcccgctgcacctacgcgtacgcctactcgtactcccactcttacaccgtatcacttccgcgatctgtcgcttttcttggtgcagtgctcatcgctcgatcgctcagaacaaaaaatactagattttcgcatagaatctttcgccttccaaaacaccgtacacagtttgtcccctacccgaactctctgacgaacccct

SEQ ID NO: 331605 - DNA, 302 bp, Zea mays
cccacgcgtcccgacattctctcttgattcaccggacacagaggatcctggagataggacatacaccaatattcggcacagcgatatcagatgcacttcgagcttacaaatcaacctctctgccatgcctctaatatacctattgttacaccgtgactcatctgatcggctacaccactattatcgccgatacatgatcaaactactcccattctcacttgcatatgctgcgcttctatgctgtcatgcacaccctgataaactcactctcctctctcaaatacatcacatgccacactctc

SEQ ID NO: 331606 - DNA, 352 bp, Zea mays
  unsure (1)..(352): unsure at all n locations
ggaattcccggtcgaccacgcgtccgccacgctncgncaagcgtcgggattcacaggacctttaggctcaaggaggaccgcacagatggaggcgaacagcggctgccggagggaccatcgcccggcggacggcgttggctggcgaggcacagtcgacgcggcaaaggcggcggcaggcaaggagcccgtaagcccgggcactccgtcctcggtggccgccggccgcagcagctgtgaggagaggcgcgcggtggacggcgtcgccctgcctgggtggaagctcgacgccctctgccaggagtcctgcccgtcgccggccatgagggcgcgctttccctactacttctgaagc

SEQ ID NO: 331607 - DNA, 222 bp, Zea mays
aattcccgggtcgacccacgcgtacgccgacgcgtacgcgtaagcatgcgcacatttgcttttcttcctaacttgccgaaagtagggtgaggatagactgcaacgctgtgcggcgatctcatactactaccgtcctgtcctgatccagctcaccaacatcctagtcaactgcaagcaatgcttaacccaagctgactaccttgaacttaaagatgatcatca

SEQ ID NO: 331608 - DNA, 143 bp, Zea mays
acaggagatcaagacgaatgccctactgcattctgggcggtctgaccgcatacgtgaccgcggacgggtgaaagggtatgggcaaaggcatgtgcgatactgtcgaccagacagggacgaacagttccggctacaggccagat

SEQ ID NO: 331609 - DNA, 182 bp, Zea mays
gggccaggtggtcgatacatatgccgatatgcacgcggattgatccccacgaccggtgcgactggctcattcaaacctgcacgggactatgccaatacttaaccaggtctgtctcccgctcatagcttggttttctgcttgttgctaacgcttcgtgcgacggatgtccttgtaaatgctgg

SEQ ID NO: 331610 - DNA, 99 bp, Zea mays
gaattcccggcccgacccacgcgtgcggatactcactaataatatgggagtctccttctgttgcttgccacaatatttaggggcaggtttcactggcta

SEQ ID NO: 331611 - DNA, 180 bp, Zea mays
cccacgcgtccgcccacgcgtccgacatctaataatctgcttatgtattatcatagtctagctatctagattatataattcacttaaaaaaaaaaaaaaaaaaaaaaaaaaaaaaaaaaaaaaaaaaaaaaaaaaaaaaaaaaaaaactaacaaacagcaaaaaggacgaagagaacgaa

SEQ ID NO: 331612 - DNA, 361 bp, Zea mays
  unsure (1)..(361): unsure at all n locations
ggcacgccgtggacgggtgccgcgagttcatggcggcgggcgcggacggcacggcggcggcgctcgcgtgcgccgcctgcgggtgccaccgcagcttccacaggcgcgaggtggagcagcagcccgccgtcgactgctgcgactgctccttcaccacctncggcgcctgaagtgaactcatatatatatctacgatgaatcgccggcggctggccacgccgcttgagtgagctgctagctagcaggtgggtggatgggtgcatgcatggggtgggaccgacgatcatgggggcagggcagggcattcatcaaacggtgtgatttggccggtgtagtcgatcgtaggtgcattatattcatc

SEQ ID NO: 331613 - DNA, 412 bp, Zea mays
  unsure (1)..(412): unsure at all n locations
cccacgcgtccgcccacgcgtccgatagcatccgcggatctgactcttctcataattggtctctgccgcgtgcgccgncctgaccttgcgctgcangtgctcgacgaaatgcccaacctatgcctcgctcccggaagggacgcgtaccgcgcgattgtgcctgctctctgtgatgctggcatgcttgatgaggccacacacgtcggctatttcatgatgtggccggtgtcgcagaagggctgtgatgcagatgttatggtgtaccggacattgctggccgcactctgtgcggctggccggngtgaacaggctgagctggttctggataaggtgctcangaagggtctgagatcaccaagtagtcgtcggtctcttcgtgggccaatgctngctgtgcttagtgtcgaagatg

SEQ ID NO: 331614 - DNA, 397 bp, Zea mays
agaacacgatgaccggatccttgagcttgttgcgagccactctggtcttgagacactgtgagcatttcagacagatctcagggcatgaatcaagctttaaatcttgcttgtgcacaactcgtcaaggttgaatactctgaatattagtgagtgtatcatgccagaccaggttagtctgacgccaactgcacagacactactggaataaaattggggatactttgagaatcagagtcaacctgacgcaggctacaaattagagaacgaatatccaagtcctttactgcaccggtacaatatgctgtatatgatgacaaatgagagacagatactggtgacatatgctggtgtacttaaaaagatgaactcgttgaatacatgcctgtacaaacctgat

SEQ ID NO: 331615 - DNA, 310 bp, Zea mays
ctgactcgtgctcggacgcgtgctccgactcgtgggcagacgcttgtgcaccaggccaggcaagtaagcacccgcgcgcgtcaaagagttcacacccatggctagcaccaacattgcgtctgacaccttgcggttcatgcttggccgaggtcgtgcccactgtcagtagcggcattagacgtgttagcttctcctcagcgctcaaccggcttggctggaagcttgtggtccaggcctttgacgagtctccggcataactggagcccacggctgatggttagggcgccttggccaccattcttagggccga

SEQ ID NO: 331616 - DNA, 183 bp, Zea mays
tacacacgtactatcccagcttttctttatcaatatgtccgactattttctttcagggcggagtacaatatgcgcgactctcgacacattacttatgagtaactttacaaatcatacgccagaaccatatcctttctctatacattgctcaacgcactttcattgactatacaccaataatgt

SEQ ID NO: 331617 - DNA, 315 bp, Zea mays
acgcagtgcatgcatacggtcaggagggctgtttagctcatatacgaggctgatcacatctcgggcgggtatactccggtgagttcactggagttgggtggcaagatctatgacatgatggtgatcgccctcgacctgagatggataaagtccaacgtgcaggacaactaagcgctgaactttgaggccagcccagagccaaactactctgacgtcaccatgacgtacgtgcatacgcccatggaagagatccccgagaaccatccgtagatggaccagagggacatcccatacgcatacttaactgcattttta

SEQ ID NO: 331618 - DNA, 220 bp, Zea mays
cgggactggatcgtatctatccggctttactttagaatgacctacggatttcacaaggtgagggtgaatcggactacgagtctggacacattactcatgaatgacttcagaagtcatattgacgaaccatagcatccctgtatccattggcaaacatactatgattctctatcgaccgatgatgtgagaccattagcactgatcaagctcaactgcttga

SEQ ID NO: 331619 - DNA, 365 bp, Zea mays
cggacgcgtgggcggacgcgtggaggtcggccaggaccaggatggccgtcgtgcgggcgtacgagcaaaagcagcacccggccaacgagtgtgcggccgcggctgccgtggcggtggcgctggtgctgccggatgtcgcggaggctgcgcctgggatctccacatcgctcaagaacttcctcctcagcatcgtctcccgtggggtcgtgctcgtcgccatcgtcggcgccgtcaacgccgtctctaacttgcatcccgtcacgcggtgctgagctgtatgcgtcgttgtgtgacgtatgatcgtacctatgtactgagatctgttcccccgtgtgcttaccaatgaaaacagggtttaatgcatg

SEQ ID NO: 331620 - DNA, 419 bp, Zea mays
acgccgaatctcacgcgaccacccacgcatacccggattcgagggtacccatatcgagaacaggcaagcgatcgcaacagcgatgaaccgctgtctcctcctactcgcctgcatcgccaagacgacccaaccaacttatcgcggataccatgccaccggcgtgaagagaatcatacgacatggacatgaagagccatactacatgcatacccaacacatgtataacctgcacttcatgaagcctacggcgatcaatgtgacacctatcctagctgggagcggatagcactagtgtcggagaacctgaatatacagccatattgcaacactaagacgactgtctcaggctgacatgattcctatcgctgtctgcatatgcctacttattttcagacacattcttttgaaagaaaaagctt

SEQ ID NO: 331621 - DNA, 394 bp, Zea mays
gccgcccctgttcctgaagatagtctactatcctctaagactgcgccttgcctcacacgagacatggttgttagaatctagtccttaacgaaggctcaacacgaacagcccatggctgcactctgatatcaagaaaagtggtcccatgttttcttttatatcatctgcactaaacgaagggaagactcgtatgtatggagttgtccttgccgaaagagaatgtggttctggataatgcgagttgtcagggaaaccatggactcatgctatatacttatttgggacagtgaaacagcgcatgatacatctaaacattgaggattttgtgcatgactactattcactacagaagttcaagatggtgtatcactttcagattaatctaatgagtgac

SEQ ID NO: 331622 - DNA, 400 bp, Zea mays
  unsure (1)..(400): unsure at all n locations
cccacgcgtccgctaagctggccaaagctattttcaattcagtgataaattgctgcatgtaggttctagggcttcaaaggttgacactttgttcttttatagcaagggaagtgtctcaatatttttttggtctatgttgatgacattgtagttgctagctctntataggatgctattgatgctatgctccaagatttgagttcagagattgcatcgaaggacctaagacaactccattacttccttggaattgaggtatagaaaactggtgatggcaattacttgtctcagactaagtacacgttagattcgcttttaggttgaaatgatgaattgcaggcctactttgactttgccagtacttcagaaaagttaagaactggtgaangtgaactactag

SEQ ID NO: 331623 - DNA, 149 bp, Zea mays
ccgttacccggcgtcttaaaccctagttcccattccatcttcgattccgctccgccggcggggatttagtgcttacttcttgagcgctaacctgtatccactgtcaagcgtgagccagtacattgctccactctgtacgttacatatgc

SEQ ID NO: 331624 - DNA, 350 bp, Zea mays
cggacgcgtgggcggactcgaactttattttactctctattatacatgatgagggcgggatctactgacactgtactgctccttactaagctggcatttcaatgcaagagaaggtaccttcatgccttcgctctgtggaatataatgaagaatgatgtcagctacaaaggtcaagcgaactttcttcataccctatcggatatcagctcatccatacataatacatcaaggatccactatcattcatggatagcgtgtttgatgtcctcttcacgcttgaccttaatgaggatactatgcatgaatggataagtcgaaccttggaggcttttctaatatctaaggaaaac

SEQ ID NO: 331625 - DNA, 386 bp, Zea mays
cgagtacgcgctgcgctccatgagggccggcggcaagcggcgggtggtcgtcccgccgggcctcgggttcggcgacgacggcgccgacttcggggaggagcacgtccaggtcccgcccggcgcgacgctcgagtacatcgtgcaggtcgacagggtgtccatcgcgccggcgtgaggcggcagtagatagatcgcagtcctgtggtgttctgatctttattccatggctcggctcggttcttctgtactggcagtctgacactcggtagcgtgaccacaattgttctagacccatgggacaagttcattctcgttttttcaagcaagatctcccaaaagagcagagagatttctggagcttgcaaaccaagctcgttttgagcttc

SEQ ID NO: 331626 - DNA, 259 bp, Zea mays
ctcacgcgtccgatcacgcttctgatcctaccgtgtgagctcgacgcctcgggggacacgtccagacttacaccctaagctcaactattacaacacaacatcatcttgccgatcacataacctcaaatactaccttacatgtatcatctcatcgatcagctttcatatgactttgaatacggtcgttgatccaaatgctgaagactatgctgcatacactggaacgaatgatgatatgcatgtgcacatgcatctgctc

SEQ ID NO: 331627 - DNA, 391 bp, Zea mays
  unsure (1)..(391): unsure at all n locations
tgctcgtactcggttccgtgaattcccggcgtcgactccacgtccgtccgtgctttatctccannttccaagnnaagatntgtnngcatccgtgatnngtgaagactgnnnaaaatatgctgtctggtgacaaannacgagaaccccgtgtaagaatcgcnttgattttgnnngtgttgcttcngnnccttgnannagcttnncaaatcncnncagtgacctatgaaacgggcngnaaatactggaaccgctnnntggttaccanntggcacnnctgaggggttcttcnnaatggannaatccctttacatacagnngaaatgcngnnatgtttaccagnncttcgggaaatctgtnnttgtgggaagaaatatactgctnnngtgatatg

SEQ ID NO: 331628 - DNA, 334 bp, Zea mays
cggaattcccgggtcgacccacgacgtacgaccgtgtccatgttcaacgacatcaacacgcagctggacgtgaaccagacctactacgggaagctgggcgagctccgctgcctgttcgcctacgacgtcgccatctggagtcccgtcaccaggtctttggcaaaggtacggctgccacagcatcagcttgtcgaggactactacctcgggaagcacaggctgagccacgcgcagagcatgatcgggatctcagggctgccacatggcgctcatgggagccctcgacggataccggattgtcgacgggccggttgattaggctattgagccggtg

SEQ ID NO: 331629 - DNA, 299 bp, Zea mays
ttttcacaaaatgcagctgccatcttgtgtaataagtttaaagcaaagttggaggagctagcatgcaagacacacatcagagctcccagtcatgtaccaagaaaactaaatcccaccggataatgggtcacttgagagaagcagtatgaagctagtaataatgtgtgagtccacccactgtccgcacaattaaatagtccattcccacctgggacacatggcttcatcatcaaaaccgtatactgtgtgcattgtgctgcgcagaaaactatttcgacggcctgtctgctggattgact

SEQ ID NO: 331630 - DNA, 108 bp, Zea mays
gtccggtgctcggaccgacaaagcgcttggctacaaaagttggaccgtggggtgggagcggcgggtctacggtggacatcacggcagagcctcagcgtctgaagagca

SEQ ID NO: 331631 - DNA, 354 bp, Zea mays
accggtctcggaattcccggctcgacccacgcgtacgcaggcacgtgtgctctcttgcatcatggcatgtccctacaggttttgagttatggggtgtgtctctatggatgccaaaaagctcctgcagctggtcgaagagaagaaaaggaggatcctcgagaagaaagaagccccactaaagtggcagcagaagcttgaagcaccagttaacgtcaaagctgatgcagaagcgaaggcgaaaaaactaacatcaagatagcataggaggagaggagattcttcctcggactctgacagtgactatgacagcgaatgtgatcggaaacaccggaggaagaaggatcgtagaaggaa

SEQ ID NO: 331632 - DNA, 438 bp, Zea mays
  unsure (1)..(438): unsure at all n locations
actggatgtgccaatagaaggttgtgacctgtttgtttaaaccgaaaattaggccatgggcttatttagtgaaccatgccccaaatttgaatttaccattatccctctacgactaaactcatgtaaatgaatgtttagataatttctttgttggacataaaatgtacccaagcttaaaccaagaatctcaaaccatgtctccttctagaaccattcccttgttcagttgatgcaggttgaggtctctattgtatttggcctctccttgcggattgcattgttgctttatcaacccaacctgngaaagtcatgcctgatcattttccttaatttggtgtcattgatttcttcatatctattgaaggcataccaacttcatcttgtgattgttttcctctgtatctaatcggatactaatccttgaccttgtaatctctg

SEQ ID NO: 331633 - DNA, 93 bp, Zea mays
gtcacaataccacaaattgggagcagctgggattggtatgctggaacatggagtgacaaagtcaaagaacaagaggacaagaaaaggaaagat

SEQ ID NO: 331634 - DNA, 72 bp, Zea mays
ttcttgtggaggaacaagaacatctctgctggaatacttggtggtgtcacagcaatctggatctaatttgaa

SEQ ID NO: 331635 - DNA, 326 bp, Zea mays
ggttcttgcatttgatttactactcatgcttagtaattgtcatatgtaatttagtagattgctcacccgcgctagaaattggagaacaggctaccactgtcctaggatctgataccctctcatttagttagcaatgaatgtggaattaaagggccatcttagaaagtgaagagatgagaaagcgaacgagaaattttcattgcctgagattctgtgctatataggtgagtattagataatattaggcacattttcttttggtagtatcttacttgatgttggccgttggcattacatcgtggtgttgctttaagctagttagcaac

SEQ ID NO: 331636 - DNA, 86 bp, Zea mays
caatctaaaacctggttccccggaagaacccttcggccgtggttcgacggaagccttcccggcaacttcggtttggatccttgggg

SEQ ID NO: 331637 - DNA, 189 bp, Zea mays
  unsure (1)..(189): unsure at all n locations
cccacgcgtccgcggacgcgtggggcgcagctgcagctccgcaaggcagatgttgctgactcgtctgtccagcgtttcttgctcgtcaacagcgcagcagttgcatgcgggcgtcggcaagttcgccgccgncgcatgctggagctggaagaagaagcgcgaggagctcccctgcttcagggccagact

SEQ ID NO: 331638 - DNA, 82 bp, Zea mays
caagaaccgggagctggaggtgatccactcccgctgggccatgctgggcgcgctcggctgcgtcttcccggagcttctcgcc

SEQ ID NO: 331639 - DNA, 55 bp, Zea mays
cccacgcgtccgcccacgcgtccgaccactcgtccggacacgcgtccgcggacgc

SEQ ID NO: 331640 - DNA, 320 bp, Zea mays
gacgagcgatcgatacagccgtgccaacatatcacctgcgacgccgcgaccgggatgggcgtcaattgcaagcctatacatatcgacctctgggtcaacctatagacggagggtatgcttaaacatcaatgtaagctcctaacgcaagctagatcacacagagtaagagggacgactgagacgccttccaacaatgctgaagtacgcagcttatgaaatcacgatgcactgctagaccattgacatcatcatgatcgatagtcacatgatacatccttactgaaaggtacgccacctactaatcagacatctgacgacta

SEQ ID NO: 331641 - DNA, 159 bp, Zea mays
gaccgtgcactggtactacgactggcaagaggacctggaggcgtctgcgagggaggagctgctgcgggaggagctgctcgaggagattgagcagagggttgggggcctaagggagctggaggaagcgagcaaggaggagcagctcacaaagtgatcacg

SEQ ID NO: 331642 - DNA, 457 bp, Zea mays
  unsure (1)..(457): unsure at all n locations
gtttggcacgctgaaatggttctgattctacctggaaaccgccggatccatgccaaaagcattgttcctgattcattttgagtgtggaacggctagaaacggttagctcgttttgcctaccaaagagaaacacccaaaacccagtttagctggagaatcactacctnccccgaactcaccttgaatntacctgtattttccactgacatcaccacaagacccatctnctctggtcgcccctaagcacctgttttgattgtggngaccctagggagggggcaacggatgctcgattntgcttgattctagtctaggtagctcctgtggctgtatccatgggagagaccaatgtttgtgtgaggatgaagaagacaagaagatactaggtacgacttgggccaaaaagaaaagataaagggttgtgtccagtaaaaaagaagaagctgatgagcccgtc

SEQ ID NO: 331643 - DNA, 104 bp, Zea mays
attcggtcgaccacgcgtcgccacgctcgggacgcgggcgccggcccggacagctcacgcgctgcgaaacatcgcggagcggcgtgctcagcgacctgataaga

SEQ ID NO: 331644 - DNA, 149 bp, Zea mays
gatgaggatgcaggaggtccaaacactccagcagaagcagatgctgatgaaatcattaggtctagcattccatatggtagtccagtccaggagtctgaatctgatagagaagaggaagatttatagcacggacgaagagagctaggaca

SEQ ID NO: 331645 - DNA, 438 bp, Zea mays
aacaaccctcccgagcctaactactactcctaccatggcggctacggcgccgtcccggcgggctacggacctgcaggcgtctctggcgccggcgggtggggcgcgggctccggcggcggtggcgggtacgcacacggcggcgtggaagcgccgacggtgatgtgccaggacaaggggccctgctacggcaagaaggtggcgtgccccaagcgctgcttctggtcctacagccgctccggcagcggatacggagccggaggcggcggcgggtcctgcaccgtcgactgcaaggacaagtgcaccgtcacctgctgatggatcgacgggtagagctaactagctatctgctcatggctctccactcgatcgatgacgatatatactactacatacagtgtgtgtgcgctggtactatatatatatatatatatatatata

SEQ ID NO: 331646 - DNA, 433 bp, Zea mays
cagaaatgttccccacaaaccaccgtaccctcctgcccgtccaccgagacgtcaagcggatgaatactcggggagtgagagggaggagtcagagtacgaaacggatggcgaggatattgaacattcactgcctcgtggaagaagggaggacgagctggatgaggaggaagaatacgaggaagatgttgaagaagaagaagcgcctctgtcggatgaagaaatggaggtatgatatcttggcctagattcagattcttctgaagctaacatatcaaagaacggaacaatacttcatgtctttacatcagacaagaaggttcacggaaatcagttcagaggagggggcattggtgtagttcttttttcttcttctaaataatcaaaatgggactcgcgatgcatgcaccgaaacgtaagagagaatcagggggtg

SEQ ID NO: 331647 - DNA, 429 bp, Zea mays
  unsure (1)..(429): unsure at all n locations
cccacgcgtccggtgagaacggtggggagtaagtccgagagaggccattctgaagactcacttatgtgtggcgaaggtctaggtctattcacagagttatccgatcgagagcttagtctttacacaagcatccttgcgaggcacttcaatgacgactagggaaagcttccgcgcttcttgatacctcattaaaaaaaatattggagtcgttgatcttgtcttgcgtctctatcttaatcatgcttccacgctttacttattatttaactagtttgtgtgtttatttttctagtttagatcgctaggctaagtgatatgattgatacataggttgtgtaaccactcctttgcggttgcggtagggatatgaacacacatataggtaagcctagtggttagtgatatntgcatacctcgaagtcttgagtg

SEQ ID NO: 331648 - DNA, 106 bp, Zea mays
gggaaacatgggaacttcgatttctagatctctactgctatttttctccaaaaattgtaataaattttgatagtcattggtcatttagtggattttcttctaagcc

SEQ ID NO: 331649 - DNA, 403 bp, Zea mays
ctcacgcgcacgttcaacgtcagatgcagcgactgaagtgctgaccactacgcggcatgatacgaagattgctacgtatatgggatattcttgctgatacatttgtgtaagcatgcacgccctcgcactcacactgatataggagagaatttagatgagaataaggatgacagttaactaggcaggaaggcatgtatccatgactagactgaatacctgactgggcataattgcagctgttagggctagtgtgcagcctaatgtgcacaatgaagtttcattggaacaaagataattagaatataaatcctttgaaaaatgataatctctaggaaaaactcatgtgccaaactagccctcaaacatatgctgacaaggaatcagtccatgaatcacaggatca

SEQ ID NO: 331650 - DNA, 311 bp, Zea mays
ataattcacatgagggctatccaacttattaatcagctaggtccttcgagtcaatgggggccgcccatgatacagtatggactcccataatccatgcgacaatgacttcataggccatggacctattacatggcgtccatattggacgacccgcccagccaactgagatcgccactagcttcaagatcttggctatccaggacagcagctatatctcagggtagagttttcatcccaatggcagagtagtggtaaaccgatatgttttacgctttttatgaatgtagtataacgtatgaaaacttttctct

SEQ ID NO: 331651 - DNA, 345 bp, Zea mays
aaaaaaaaaaaaaaaaaaaaaaaaaaaaaatttaaaaaaaaaaaaaaaaaaaaaaacaaatgggggaaccaaaaaaaaaaaaaaagggggaaccaattttaactccgcggggagggggacgtcatatcccttccttgggtgctcctggttgccagtctttgggggtcgttttttggccgtttcgtctgttaaacccctggcgtgtcttcaccttttggcctggggggtcattcccgtttggcccggtactgtcttggcttcccggcccttttcggtcggcctggcgaacggttttccgcccgggacggtttatgggtcgcgccctgtaccggggctttttgcccg

SEQ ID NO: 331652 - DNA, 75 bp, Zea mays
ttctaaaggttccaactttacttccccttcctttcaacgtaatatcttttctatagggtcacctaatttcaatta

SEQ ID NO: 331653 - DNA, 231 bp, Zea mays
aaacatggctgcctttttccttagcgaagagtctgtaacggctgggcaagttgctgccatctaaccacaccctcccatgactagcatagtatgttacacccttcccattattaacatacatgttggaatccattccataagttgtccatggcactttcctgaatccaatggctgtagaccatgctggtttatactttgttttatgcaatcttatatttccgatttcaaatt

SEQ ID NO: 331654 - DNA, 371 bp, Zea mays
gtcagctagctgctgcctacccccagcaatttcttccattcaaccaactggcagcattgaactctgctgcttatttacaacagcaacagctaccaccattcagccagctagctgatgtgagccctgttgccttcttgacacaacaacagttgttgccgttctacctgcacgctgcgcctaacgctggcaccctcttacaactgcaacaattgctgccattcaaccaacttgctttgacaaacccaacaacgttctaccaacaacccatcattggcggtgccctcttttagattgcctaatgagttatagttcaataatgaagttttttggatgatgtttgggctttccagaaattaagacagttcatttct

SEQ ID NO: 331655 - DNA, 281 bp, Zea mays
ttcccggtcgacccactctctctaaaataaaaaaaaaacaaaaaaaactacaaaaaaaaataaataaaaaacacattaaaggggggaaaaacaaaacaaaatacacatacaaaccacacatcctcatccttcccggagttcccacattctttccccccttccattgctatcattcctttccggtcctcccctattccatcgctccttaatgctgttccccacctacctgactttccccccctttgttcacaccttctttctgttccctctttgctttcccc

SEQ ID NO: 331656 - DNA, 349 bp, Zea mays
aaaaaatgataaatgcaagtgtatgaaacaaagtacaattacctataaatcgtggtggactctgggaaagtgaaccctatacgcctgatcatttcctacaaaacattacgatgatgccagtgaacaatcttatactctacgatgatacacttgcgtcttaagttaagataacccctactaggaaaatattaagctcttcgtcattagagccataccatctctttgattaacctgaaccaaacttggtggattcttagaccggagagacttatcactgaaacgtacacgttgtctgaatagtgattccaacttacactcctgccatgctattattgctactatgcttgtt

SEQ ID NO: 331657 - DNA, 415 bp, Zea mays
tcctcccccaccggttcgtgttcaggttctggttcgtgggcgagagggaagagatggcggcgtcggacgttgagtaccgttgcttcgttggcggcctcgcctgggccaccgacgaccactccctcaacaacgccttcagcacctacggcgaggtcctcgagtcgaagatcatcctggatcgggagacgcagaggtcccgcggcttcggcttcgtcaccttgtccacggaggacgcgatgcgcagcgccatcgagggcatgaacggcaaggagctcgacggccgcaacatcaccgttaacgaggcccagtcccgcggcggccgtggaggcggcggtggcggatacggtggcgggcgccgtgatggatgcggctacggcggtggcggtggaggctactgcagtggtcgtggaggcta

SEQ ID NO: 331658 - DNA, 248 bp, Zea mays
gacgaccactccctccacaacgccttcagcacctacggcgaggtcctcgagtccaggatcatcctcgatcgggagacgcagaggtcccgcggcttcggcttcgtcaccttctccacggaggaggcgatgcggaacgccatcgagggcatgaacggcaaggagctggacggccgcaacatcaccgtcaacgaggcccagtcccgcggcggccgtggaggcggcggcggtgggtacggtggtggccgtgg

SEQ ID NO: 331659 - DNA, 278 bp, Zea mays
aaaaaaaaaaaaaaaaaaaaaaaaaaaaaaaaaaaaaaaaaaaaaaaaaaggaaaaagaaaaaaaaaaaaaaaaaaaaaaaaaaaaaaaaaaaaaaaaaaaaaaaaaaaaaaaaaaaaaaaaggggaggccgtttaaaaaattccaatcttattaacactttccagaaacttaaaaatttaattatggcgcaatatattttaatttaaatgcccgactttttaaaacttaaaatttgaaaaaaacttggtattaccaaataaaatcctttattaaaaa

SEQ ID NO: 331660 - DNA, 384 bp, Zea mays
  unsure (1)..(384): unsure at all n locations
cccagctgtgcaagcctataggctacaacaagcaattgcggcgagcgtcttacaacaaccaatttcccagttgcaacaacaatccttggcacatctaacaatacaaaccatcgcaacgcaacagcaacaacaattcctaccagcactgagccacctagccatggtgaaccctgccgnctacttgcaacagcagttgcttgcatcaaacccacttgctctggcaaacgtagttgcaaaccagccacaacaacagctgcaacagtttctgccagcgctcagtcaactagccatggtgaaccctgccgcctacctacaacagcaacaactgctttcatctagcccgctcgctgtggccaatgcacctacatacctgcaacaacaatt

SEQ ID NO: 331661 - DNA, 213 bp, Zea mays
accacgcgtccgaaaaaaaaaaaaattaaaaaaaaaaaaaaaaaaaaaaagaaaaaggaaaaaataaaaaaaaaaaaaaaaaaaaaaaaggacagacattttaaaggaatccaaatttacatactaatacatactttttattttttttttttttttgagttcctaatttcatttcactggccttggtataacaacgttattatttgaaaaccc

SEQ ID NO: 331662 - DNA, 58 bp, Zea mays
aaaaaaaaaaaaaaaaaaaaaaaaaaaaaaaaaaaaaaaaaaaaaaaaaagaaaaagg

SEQ ID NO: 331663 - DNA, 191 bp, Zea mays
taaaaaaaaaaaaaaaaaaaaaaaaaaaaaaaaaaaaaaaaaaaaaaaaaaatgaaggtaataaaaaaattaaaaaaaaattcataaaaaaaaataaaaaaaaatataattttaactaaattaaattaacatacactaaattttacaacatataaaaatataaaaaccatttcttttcccaactttataaa

SEQ ID NO: 331664 - DNA, 335 bp, Zea mays
aaaaaaaaaaaataaaaaaaaaaaattaaataaaaaaaaaaaaaaaaaaaaaaaaaggaagggtaaaaaaaaaaaaaaaaaaaaaaaaaaaaaaaaaaaaaaaaaaaaaaaaaaaaaaaaaaaaaaaaaaaaaaaaaaaaggggcgccccttttaaagaacccaactttacttccccttcatttcaaaataaaagcttttttaaagggcccccaaatttaaattaattgccctttttttaaaaacttcgaaattggaaaaaccttggttttccccaatttaatccctttggaaaaaatcccccttttccaaattggcttaattacaaaaagcccc

SEQ ID NO: 331665 - DNA, 197 bp, Zea mays
gctactgaataaaacactcttggttctccctttaaaaaaaaaaaaaaaagaaaaagaaaaaaaaaaaaaaaaaaaaaaaaaaaaaaaaaaaaaaaaaaaaaaaaaaaaaaaaaaaaaaaaaaaaaaagaaaaaaataaaacaaaaaaaaaaaaaaagaaaagaaaaacaaacaagaatcggctagagcaaaacaagg

SEQ ID NO: 331666 - DNA, 410 bp, Zea mays
  unsure (1)..(410): unsure at all n locations
gcgcggaccgtccgggccagcggcggctgatcctatttttagaagcgaattaccgagacctgcacccaagccaccacatgccatacaaaccctagataacccattcggaccgtctgcgtatgacgccagacatcccgaatataatgtcggacggtccggccacatggccggacagtccgcgcatggagtcggacggtccgcgtatttaccggacggtccggcacagagttttttaaggaagatggatatctaactccgtattcgtcccagctagactccccatctcaccatacgacancacagcatcataatataatctatcaaacctgtgagagtgagaacctttcggnccctagaaagccagaaaggatggccagtcctatgagcctcatanggcatgcattaacgcg

SEQ ID NO: 331667 - DNA, 88 bp, Zea mays
aaaaaaaaaaaatattaataaaaaatttaaaaaaaaaaaaaaatggtctcccctataggaaagggttaaatttttgggggggctatac

SEQ ID NO: 331668 - DNA, 164 bp, Zea mays
cgcaccctttcatcagcctgcctgtccactgttggcttggtgacttcctccgctccgctccgctcccctccgctcccgaacggtcgatctttgcatggcagcagcagctggctccaaggggcgggcgatcgctggaagcttcgtcagccgcgtcctcgccggca

SEQ ID NO: 331669 - DNA, 344 bp, Zea mays
cctacggtgatggcactcctgattcagctgggaagtaggtttccaccggatgtatggtacgtacctttggccattgtctcttgatcggtccagtgttacgtcactactgtagagaagagaacggttttggtccttgaggcgccccgtgtactggtgttgtcgctgtagaattgttacttaaacagtatggtgatgattaatctcagcattttttttcttgcagcaaaaaaaaaaaaaaaaaaaaacaagatgaaatatattattttgtaattatgaccaggtgtactgtgctatacattaaaagtatatatttgtgaaaaaaaaaaaggggcggccgttttaaa

SEQ ID NO: 331670 - DNA, 363 bp, Zea mays
aagcggcagtgcgtagagaggatcgtcgaacagaacagcatgaagatgggcatcggtctcgtcgtgtgcctggctctgtcagctgccagcgcctctgcaatgcagatgccctgcccctgcgcggggctgcagggcttgtacggcgctggcgccggcctgacgacgatgatgggcgccggcgggctgtacccctacgcggagtacctgaggcagccgcagtgcagcccgctggcggcggcgccctactacgccgggtgtgggcagccgagcgccatgttccagccgctccggcaacagtgctgccagcagcagatgaggatgatggacgtgcagtccgtcgcgcagcagctgcagatgatgatg

SEQ ID NO: 331671 - DNA, 420 bp, Zea mays
acaaattgtatctgctactacttgatatggcttttgatggacaagaaatgatgcgaagaattttgggcagctatagtctgcaaagtctagaaaaagtttcaattgggctgggactacaggcgctgagagtacacatgtcagatgatacaactcatctattcatcacaaggacttccaaggaagcgcaagatgtactttggctcttgagcgtaactaacttgcccaaattaaaccacaagatacattttcaaagttgggagaacatccaagtcaaattgttcgagaaatgtattatacgcagaactgcatatacgggaatatgtctctactctatgttgatgttctggaggaatgacgttgaagaagactcccgttttattagatccatctttgtcattgaatgctccatattggtgtgca

SEQ ID NO: 331672 - DNA, 114 bp, Zea mays
gtataactactactactacgaggctagctgcgcgctgaacacagcgctgtaaaggagtgttggtgtgctaaattcagaatgtgtaagtttaatttatgttattaccagttaacc

SEQ ID NO: 331673 - DNA, 383 bp, Zea mays
  unsure (1)..(383): unsure at all n locations
gaccaattaactagcttcttctagctctagctaggctcgtctgctgcaagaaggtgacagcgcaggcatggaggggaaggaggaggacgtccgcctgggcgccaacaagttctcggagcgccagcccatcggcacggcggcgcaaggcacggacgacaaggactacaaggagcccccgccggcgccgctcttcgagcccggggagctcaagtcctggtccttctaccgcgccggcatcgccgagttcgtcgccaccttcctcttcctctacatctccatcctcaccgtcatgggcgtctccaagtccacctncaagtgcgccaccgtcggcatccagggcatcgcctggtccttcggcggcatgatcttcgccctcgtctact

SEQ ID NO: 331674 - DNA, 358 bp, Zea mays
cccacgcgtccgctcagaggtgggttggcttctcctcccccaccggttcgtgttcgggttctggttcgtgggcgagagggaagagatggcggcgtcggacgttgagtaccgttgcttcgttggcggcctcgcctgggccaccgacgaccactccctcaacaacgccttcagcacctacggcgaggtcctcgagtcgaagatcatcctggatcgggagacgcagaggtcccgcggcttcggcttcgtcaccttctccacggaggacgcgatgcgcagcgccatcgagggcatgaacggcaaggagctcgacggccgcaacatcaccgttaacgaggcccagtcccgcggcggccgttga

SEQ ID NO: 331675 - DNA, 243 bp, Zea mays
cccacgcgtccgaaaaaaaaaaaaaaaaaaaaaaaaaaaaaaaaaaaaaaaaaaaagaaaaggaaaaaaaaaaaaaaaaaaaaaaaaaaaaaaaaaaaaaaaaaaaaaaaaaaaaaaaaaaaaaaaaaaaaaaaaaaaaaaaacaaaaaataaaataaaataaaaaaaaaataaaaaaatgaaacaccataataaaaattattttaaacccaaaaaactcaattgctagaaattctaactggc

SEQ ID NO: 331676 - DNA, 442 bp, Zea mays
  unsure (1)..(442): unsure at all n locations
gcaacatagaaagcacaatagtgtaccaacaatggcagccaaaatattttgcctcgttatgctccttggtctttctgcaagtgctgctacggcgaccattttcccgcaatgctcgcaagctcctatagcttcccttcttcccccgtacctctcaccagcggtgtcttcggtatgtgaaaacccaattcttcaaccctacaggatccaacaggcaatcacagctggcatcttacctttatcacccttgttcctccaacaatcatcagccctattacatcagttacctttggtgcatttattggcacaaaacatcagggcacaacaactacaacaacttgtgctagcaaaccttgctgcctactctcagcaacagcagtttcttccattcaaccaactagctgcattgaactctgcttcttatttgcaacaancacaactacca

SEQ ID NO: 331677 - DNA, 177 bp, Zea mays
aaaaaaaaaaaaaaataaaaaaaaaaaaaataaaaaaaaaaaaaaaaaaaaagaaagaaaaaataaaaaaaaaaaaaaaaaaaaaaaaaaaaaaaaaaaaaaattaaaaaaaaaaaaaaaatttaaatttaaaaaatttttatttaatataaaaaaaaataaaaacaaaaaaataaa

SEQ ID NO: 331678 - DNA, 361 bp, Zea mays
  unsure (1)..(361): unsure at all n locations
cgcaccgccgtgctgcttacagggaggtggcgctcgctgggaggcggcagcgcgaggctcgcaaggaggcaacgcgatacctgtaggcggcctcgttgagacgttgtccctatcgtggaggtcttcctctcgacccagcagccgtagcccagctgtagcccaactcagatctctgctgtaacgtcatccaataggctaaggagttccttggtgcttccggtgacaagcgaaaggaagtcatctgcagtatggaggaggcagataagctcagtggttctgctgcaaggctaaggagttccttggtgcttccggtgattctctntctgttgtaaagcagctatcctgcgagtgcctctacaca

SEQ ID NO: 331679 - DNA, 378 bp, Zea mays
cccacgcgtccgtctcactctcagctggtcgctcactcttgcagctccacccttcacgcagtcttaggctcttagctctaggctctagctagccgcgccactccttcgtgtagccatcagccttctcatcgccaccaatggccactgccgaggtccagaccccgaccgtcgtggcggccgaggaagcgcccgtggtggagaccccgccgccggccgtcgtgcccgaggagtctgcccccgccgaggccgaggccgaggccgaggctgaggctgctgctcctgctgatcccgaggagcttcccgcggccgagcagcaggcagccgccgagcccgaggccgctgctcctgctggtgccgaggagcccgcggcggccgatc

SEQ ID NO: 331680 - DNA, 339 bp, Zea mays
acaaaacgtctgtacactcgtacgtcgatttgttagatatagtttgtatagatgactaggtgggggtaataaaggaaggtggatcatatgtgcttactgtagcgataaagatcagtacattgctacagcttctattggatgatgacattctggattcgcatactgcatactacgaagccggcggctagaatgtctaaactcatgtactatgagacgcagcagagaatgagatacttgttgtacaacttcaaggaccaccagaactgctgctcgatctacgcttggaaggagatcaaggactgcagctggtgcgactacagagttaagcacaaagggtgc

SEQ ID NO: 331681 - DNA, 321 bp, Zea mays
attccctggtcgacccactcgtccgaaaaaaaaaacaaaaaaataaaaaaattattttaaaaaaaaaaaaaaacaaaaaaaaagaaaggatattataaaaaaaaaaaaaaaaaaaaaaaaaaaaaaaaaaaaaaggacaaccaatctaaaaaacccaaccttaccctctcttactttcccaatcctaattccccttattttcccccctaaattcattccattgcccctccttatatatattcttaacttgaaaatcccctcctttacctctcttaatacctttccctcacttacttttttccccagttagcacattccctt

SEQ ID NO: 331682 - DNA, 232 bp, Zea mays
aaaaaaaaaaaataattaaaaaaaaaattttttaaaaaaaaaaaaaaaaaaaaaaaaaaaggggcttattataaaacatctgaccctattaaatacaccaaaataacatcttatttcttttttatagtcccctctaattaactctctcttcatcaattttcaccaccttaacttttaaaacactttaattcccaaccttttactcttctaaaaccatattcctttcacccct

SEQ ID NO: 331683 - DNA, 380 bp, Zea mays
gctggcttctcctccccctcttaccaagtccttctcgggttagggttccttagggttgtgtggaggggcgatggcggcggctgatgtggagtaccgttgcttcgtcggcgggcttgcctgggccaccagcaacgagtcgctggagaatgccttcgcctcctacggcgagatcctcgactccaaggtcatcaccgaccgggagacggggaggtcccgcggcttcggcttcgttaccttctcctccgagaactccatgctcgacgctatcgagaacatgaacggcaaggagctcgacggccgtaacatcaccgttaaccaggcccagtcccgtggcggtggcggtggcggcggtggctactgcggctgtcgcggcggcggcg

SEQ ID NO: 331684 - DNA, 72 bp, Zea mays
aatataattacttttgtaccaaatttatgtatttttatcaaaatacttctatcttcattaaacttctttttt

SEQ ID NO: 331685 - DNA, 155 bp, Zea mays
aaaaaaaaaaaaaaaaaaaaaaaaaattataatttaaaaaaaaaaaaaaaaaaaaaaaagaaaaggttaaataaaaaaaaaaacaaaacaaaaacaaaataaaaaaaaaaaaacataatcttgtccattttcatgtctcccaccttccttcccct

SEQ ID NO: 331686 - DNA, 156 bp, Zea mays
attcccggctcgacccactcgtccgaaaaaaaaaaaaaaaaaaaaaaaaaattatttaaaaaaaaaaaaaaaaaaaaaaaaaagaagatataataaaaaaaaataaaaaacacataaataaaacaaaaataaataatatttaaaattacataaaat

SEQ ID NO: 331687 - DNA, 145 bp, Zea mays
gcgggggatagtcggaggcggagaggttgatttaccagccccaatcaccgccctcgggcatgggtataacagccgcgggcagggtataggccaccatggtctggccaccgcaggtgaccaggttcgcccgcctgaccacctacac

SEQ ID NO: 331688 - DNA, 417 bp, Zea mays
cgcgaaccagcagtccagcacacagcacagcacgactcgggcgcgccgcgcacacggagcggggtgcacgcctcgccggctcaccaatcgacaccctgtccaaccagcaccacccggcgtcgtcctccctggcggggggttaggctagctagagctgtacagcgcgagagcgacgaacggcaggtcgatcggcggtcgcacgtacgtcgtcgaccgagagcagagcaggcgaccgcggcgccagagatagttcgaatccgattccgacccatccatgggggttcacctgctgaagaagcagcactcgtcggcgccgtcgtcgctgggccgcggctccggctccgggtccgcatccgggtcgtcggtgtcggcgtcgtcgatgccgcccaaggggtgcatggcggtgcgcgtggtggg

SEQ ID NO: 331689 - DNA, 359 bp, Zea mays
  unsure (1)..(359): unsure at all n locations
tcccgggttcgacccacgctgtccgcgtaaaataaaattataatntctatataanttgattctatttaatttactggaaaacacatgtaacggttcccatgtagaccggcgccgtgagacccacatagtgctcatctcatagcaacgcatagacataccatgcatgcaacatagctactttggtaagaccaatactgacatagcgccacacggcgaacatacagacacggcttacgcacatcatgatgcctcgagatacatccggttcatacatcatcaccttcatgtcagtgttccatcagtgaccgcacgcatggtggccggcactacatactaagctcccattacatgcgtgctcc

SEQ ID NO: 331690 - DNA, 383 bp, Zea mays
  unsure (1)..(383): unsure at all n locations
aggccattagctttatctactccagagcgcagttgaacccgatcgacaccatgagggggttgcgtcgttgccctcgctctcctggctctcgctgcgagcgccacctccacgcatacaagcggcggctgcggctgccagccaccgccgccggttcatctaccgccgccggtgcatctgccacctccggttcacctgccacctccggtgcatctcccaccgccggtccacctgccgccgccggtccacctgccaccgncggtccatgtgccgtcgccggttcatctgccgncgncaccatgccactaccctactcaaccgccccggcctcagcctcatccncagccacacccatgcccgtgccaacagccgcatccaagcccgtg

SEQ ID NO: 331691 - DNA, 464 bp, Zea mays
  unsure (1)..(464): unsure at all n locations
cacagaccgccaccgccagtcgccattgctcactgctctgctcagcgctccatgtcgtggcccaaattccgtgactcatcttccttctctttgccaggctgcgcgtgcataccacggacggacgcactgcccccaatctactgtaagtaatctactaatctgtaaatctgtaatccctaatcctagctttgtggccatatatggacgcacgcaccgcccggagaaggacctgcccttgccgctgccgtcggctcgcacgcgcacgcccatgccccgcttgccgccgctcctcttcctgaacagcctgcacggcttctcctcggttgctgcaagcctgcaaagagctccgtggttgtaggctgtagcctactagcctctccctcccccacccncacacggccacacacttgtcacttgnngttttgtttggatattgttcgaatccctcgctgaaatcatgtatt

SEQ ID NO: 331692 - DNA, 389 bp, Zea mays
  unsure (1)..(389): unsure at all n locations
ccgaaacaaaaataatgcacagtttcatatctaagcttttgagggagaagtgtangagattaatgcattctgaatttaaaaagattacacaaagaaatagacgtatttctagaagtaaggttgaagtacatacctatcttacagtgaggttcttttttctttcagagtgaatatgatggtcattggagtaatggaatagttattgacagagaggaaagagaaacagtagttgtgtaattcctcgcagtgaagaaaaacaataatgtaagtgtatgctctaaaaatgaagagaaaactgcacaacctaacccagtttatatgaaactataactctgcaatgtgtcacttcgatccttagatatcctttaagttgggaacaaatagttttg

SEQ ID NO: 331693 - DNA, 378 bp, Zea mays
ttcccggtcgacccctcgtcctaaaaaaaaaaaaaaaaataaaaaaaaaaatttaataaaaaaaaaaaaaaaaaaaaaaaaaagaaggaataaaaaaaaaaaaaaaaaaaaaaaaaaaaaaaaaacccctacctacttaacaattccttccttccatacccatccatccaacttcaatcccctttattattcccccctatatccaatccccttccctcccttaaacaaccttcctatctcaaaaccccttcctttccccaacttaacctccttttcatcccaaccccttttttccacctaccatttaaccataaacccccccacctacctcccttccaacctctttctcatcccgaatcctcaatttaaccccccttt

SEQ ID NO: 331694 - DNA, 452 bp, Zea mays
gtgggttggcttctcctccccctccggttcgggttcgggttcgtgaggttctccggggggcgggttcgtgggtgagcggatcgagatggcggcgtcggatgttgagtaccgctgcttcgtcggcggcctcgcctgggccacggacgaccactccctccacaacgccttcagcacctacggcgaggtcctcgagtccaagatcatcctcgatcgggagacgcagaggtcccgcggcttcggcttcgtcaccttctccacggaggacgcgatgcggaacgccatcgagggcatgaacggcaaggagctggacggccgcaacatcaccgtcaacgaggcccagtcccgcggcggccgtggaggcggcagcggtgggtacggtggtggccgtggaggcggcggctacggcggtggcgggcgccgtgatggcggtggcggctacggcggtggcggcg

SEQ ID NO: 331695 - DNA, 307 bp, Zea mays
cctgatccttagtctgagtaggaaacagcgcagtcagctcatcaatacattgtccaatggcagaaactgcaagtaaacaaaaactgaaaaactaaaaaaaaaacctctggatgtcatgtaaataagtgtactttgtatgttctccaatgttgtttccttcatttgtctgattgaatttctaattaaaaaaaaaaacagaaggtacaagcgttagatactacatcaaagtcactgaacatgtaaatgctcaagtaaaaactcttgaataaagcttaaccaagaaaaaaaaaaagggcgccccttttaa

SEQ ID NO: 331696 - DNA, 214 bp, Zea mays
ggcttggcggaatcagcagggtaaagttgtttggcctgattaaattgcataggttggtgatgatgcctgtatgccggcattggacagctagcgtggtagtatgtttcttctttgtttttctttctgctttttcttttttgtcttgccaggtcattgttttgttggatcaatgacctggcaagacataaaaaagatcaggcttgacctccttaac

SEQ ID NO: 331697 - DNA, 435 bp, Zea mays
cggacgcgtgggctagaatcttttgacatgttaggttttgaagaagtgtcaacgacaggctgcttagtgaaataacacatttttcatttttcttttgttaatcagttgaggtactttatagtactccattccagtatttttaattatgtccacttgattatgaaataaaggtttccttcttaattgaaacttggaattgggaaggtcgctcttaatggctattacttggatccttatatattaatctttaaatagtggagcgagccccaacccatatgtgtacactgggttttatttgagactcaaatatttttatatctccatatccgtgagcgtttcacatttcatttcacgaaaaagcgctattcttctagaagcccacaacagatcactctaacattgcctagccacaacattctttcgactgacggtgat

SEQ ID NO: 331698 - DNA, 228 bp, Zea mays
cttaaagacttcacgcataataatcctataaatctgcttacaaaacataccaagacccatcttgataccaatgctaacatccagtgcaccaaatcaacagtccttcaatgccacatagcacactcacctgacgttcattgaacccttacataacacacttatcacttccttcaccctaacgaagctaacactgactaactacaactaaatgcactccaccatttacac

SEQ ID NO: 331699 - DNA, 98 bp, Zea mays
aaaaaaaaaaaaataaaaaaattaatttaaaaaaaaaaaaaaaaaaaaaaagggaaagagaaaaaaaaaaaaaaaaaaagaaaaaaaaaaaaaaaaaa

SEQ ID NO: 331700 - DNA, 434 bp, Zea mays
aacacaccaagcgaagcgcactagcatttacctaacaacaatggctaccaagggattagccctccttgcgcttcttgccctttttgtgagcgcaacaaatgcgttcattattccacaatgctcacttgctcctagtgccattattccacagttcctcccaccagttacttcaatgggcttcgaacacctagctgtgcaagccaacatgcaacaacaagcgcttgcggcgagcgtcttacaacaaccaattgcccaattgcaacaacaatccttgccacatctaacaatacaagccatcacaacgcaacagcaacaacagttcctaccagcactgagccacctagccatggtgaaccctgccgtctacttgcaagagcagctgcttgcatccaacccacttgctctggcgaacgtagttgcaaaccaacaacaac

SEQ ID NO: 331701 - DNA, 83 bp, Zea mays
ctttttaaaaaaaaaaagttgttgcgttcaatttgtggactgagagcagggagaatagtttgggcgcaacaactttttaaaaa

SEQ ID NO: 331702 - DNA, 67 bp, Zea mays
aaaaaaaaaaaaaataaaaaaaaaaattttaaaaaaaaaaaaaaaaaaaaaatggaaaggaaaaaat

SEQ ID NO: 331703 - DNA, 394 bp, Zea mays
ggcaaactggacattcttgtcaatggttctgccggcaacttccttgcctccggggaggatttgaagcccaagggattccggactgttcttgacattgacactgtgggtacatacacaatgtgttatgaagccctcaagtatctcaaaaagggtggaccagggagaggtccttcctctggtggcctcatcattaacataagcgcaacgctgcaatacactgccgcttggtaccaaattcatgtctctgctgccaaggtacttggaccttctctgaaccgctctgcaagagaaaatcgatgaagtgtgtagatttctgctgattgatcggcttctataagctggcgttgacggtatcacaagatcattggctctggaatggggaacagattacgac

SEQ ID NO: 331704 - DNA, 461 bp, Zea mays
  unsure (1)..(461): unsure at all n locations
gtttcggaattcccgggtgctacccacgcgtctcggatgggattaggnccatgggaccacagctatctgtgattgggcgaaacttgaaacctcagttttgaaaaggggatgggacgtaccatagctgcagtgcgaattctcagtttctaagtgagctgaaatggatgccttggaagcctngattacttcgtcaaatgtaaaatgaaatctgatggcntttctgaagaaaaagggctttgcctcattcattcgtgtgtttatcagcgagcctttgtcggcttgtttggagttggatcccaagctgttaatggagcgattggtcactgcccgtggctcattccttgcttgctgtgaaagtctgcaaggcctttgagattggaagacaattgattttgtttgaacctgaatgaaggccttcgctctctcaagtttgtctatttgctgcaacaaagttgggggct

SEQ ID NO: 331705 - DNA, 230 bp, Zea mays
cccactcgtccgaaaaaaaaatataatttaaaaaaaaaaaaaaaaaaaaaaaaagaaaggaaaaaaaaaaaaaaaaaaaaaaaaataaaaaaaaaaaaatataattttaataataaaataaaaaaaaaaaaaaaatgccatcctttttacaaattccatctttccttaacctttctttcaaatttctttttttttcaattttataacttaatttaattcccttgaccatt

SEQ ID NO: 331706 - DNA, 362 bp, Zea mays
tttttaacaagaaatgttacgcacatgacattatatatatgagttttaattagctgtttgacaagaaaattagaagagaagaaaattaacgacggcatgagtgaccaccttggtcgtgggtattcgtttcatatagatacagatgtacgtagtattatatatgagaacgaagacgtgcacaggctccagctagctatcaagaatcaaggacgcggtagatgacgacgaagcagggcaggatggccctggggttggccacgaagagctcctcgaggttcccgtacacgctgctgctggcggcgtcctcacccgccaccgagtcgaacgggccttcctgatcctcggcggcagcggcggacgtg

SEQ ID NO: 331707 - DNA, 451 bp, Zea mays
gtaccggtctcggaattcccggctcgacctacgcgtccgcggccgtgggcgtggcggggctgagagggtcagggttggttagcagcagcaggaccggcttgttcgccggcgactgcaagaggaaggctcgtcgcccggcgtgctcggcctgggccctcaggcagagccggatcggcagcaggagcaggagcaagaggggcctcggcatcgtctgcaacctcgcgggacagtacgaggattccttcgacgacgtccagcggcaactgatgaactacttcacctacaaggccgtgaggaccgtgctgacccagctctacgagctgaacccgccgagctaccgctggttctacaacttcgtcgctgtcaacaagcctaccgacggcaagcatttcctacgtgctctcggcaaggagaggcaagagctcgcagagcgagtgatggtcaccaggct

SEQ ID NO: 331708 - DNA, 391 bp, Zea mays
cgcacgcgtccgcccacgcgtccgaatacactcactggcaagacaatcacccttgaggtggagtcttcggataccattgacaatgtcaaggccaagatccaggacaaggagggcatcccacccgaccagcagcgcctcatcttcgccggcaagcagctggaggatggccgcaccctggcggattacaacatccagaaggagagcactctccacctggtgctccgcctcaggggtggcatgcagatttttgtgaagacattgactggcaagaccatcaccttggaggtggagagctctgacaccattgacaatgtgaaggccaagatccaggacaaggagggcattcccccaaaccagcagcgtctgatctttgcgggcaagcagctggaag

SEQ ID NO: 331709 - DNA, 207 bp, Zea mays
aagaaacctgccaaggttgtcccaaatatagaaccggttgaagagagaaaggaggatgctttggataaggagttattgatgaaacttaagatgtcgcaaaacaagtttccttcagaatttaagtccaccaaaaacccaaaaattggtccccaggtgcctttggaccaaggaacctttaataatccagaaaattttccattccccaaa

SEQ ID NO: 331710 - DNA, 191 bp, Zea mays
tccctctctacccactcgtcctaaaaaaaaaaaaaaaaaaaaaaaaaatttaattaaaaaaaaaaaaaaaataaaaaaaggaaagtttaaaaaaaaaaaaagcacaaaaaaaataaaaaaaaaaaatataatatatcacctctttaaaaattccaatttttcttccccatcctttcaactccttccttttt

SEQ ID NO: 331711 - DNA, 184 bp, Zea mays
tgagtctgtaataatcaggacatgattaatttaggtaaagtaatacatctatggccgtcttcctttcattcagaaaaaaaaaattaaaaaaaataattttaatataatagtaaaataaaaaaaataaaataaacaaaaaaaaaaaaaaagggcgaccgttctaaaagatccaagcttacataca

SEQ ID NO: 331712 - DNA, 79 bp, Zea mays
aaaaaaaaaaaaacaaaaaaaaaaaatttaattaaaaaaaaaaaaaaaaaaaaaaaaggaaaagttaaaaaaaaaaaaa

SEQ ID NO: 331713 - DNA, 339 bp, Zea mays
gtcggatgttgagtaccgctgcttcgtctgcggcctcgcctgggccacgggggaccgctccctccacaacgccttcagcacctacggcgaggtcctcgagtccaagatcatcctcgatcgggagacgcagaggtcccgcggcttcggcttcgtcaccttctccacggaggaggcgatgcggaacgccatcgagggcatgaacggcaaggagctggacggccgcaacatcaccgtcaacgaggcccagtcccgcggcggccgtggaggcggcggcggtgggtacggtggtggccgtggaggcggcggctactgcggtggcgggcgccgtgatggcggtgg

SEQ ID NO: 331714 - DNA, 293 bp, Zea mays
  unsure (1)..(293): unsure at all n locations
ccgaaacaaaaataatgcacagtttcttatctaagcttttgagggagaagtgtangggtttaatgcattctgagtttgtgcagattacactacgtgatatacacatgtctcgaagtaacgcagaagtacatacatatttgacactgaagtggttatttatgtcatagcgattatgagtgccacacattcaccagcttagtcatctttaaaccttgcttctagcccatggtatacttatgtctccaggagcgtacagaggactcatacttggccgtgttagacgatgacatatg

SEQ ID NO: 331715 - DNA, 333 bp, Zea mays
cccacgcgtccgcccacgcgtccggctcttgctgttgtggctaatgttgggaaacgagctatttcttctagatcggtggcccatgctcttcataatcggcattggatcactgacattgagacccctcttaatttgctagggctgcaacaatatcttagcctttgggatgctttaaggcgagtggtgctcactcaggacgcggatcgacatgtgtggattcatgctacctctgctcagttctcttcgaagtccagtgatagggcatattgcatgggttcgattaccttcgaaccatggaagaggttatggaagacttgggcttcacccacatgc

SEQ ID NO: 331716 - DNA, 364 bp, Zea mays
cccacgcgtccgcccactcgtacgcccactcttccgaaaaaaaataacaaaaaaaaaaaggaaaaggtaaaataataaaatgaaaaataaaaaaaaaaaatcataacaaaaatccaaataaaaataagactagcctataatagcttacctatcatagctaacttatttattacaccttcgaagaataataaaacttcatcaaatcgaatgacttccctaactataacaacatatcccattacaaaacctatatttcctcctctattataccatcttcctttaaaagcattcttcctatgccacccagaatcataccacctccatcacctaagatcattcctacagcttcaccaaacttaccttc

SEQ ID NO: 331717 - DNA, 446 bp, Zea mays
  unsure (1)..(446): unsure at all n locations
ggaattacccgggtcgactccacgccgtccggcgccgactagcaggttgtattagaattaactctcagctcacnagcggcatgcaggtgcatcccctggcgagcgcgtgtcccggtgatatgtcgccaaagatcaaggggcattagacggacaagtgcgaaggatgtgagcatgcanttgtgcacgaatctgcgacgccttcgtaccaacccaagagcagcaacacgattacatctatatccgtcgcttaaatccgtttcgtttcatcgcatgcatatgtatcatgcatgttcactgtaatgataagagcacgtgaccctatctttggtgatatggatcacccaccacaaaacggcctattggtttttatcctaatccatatatagattggatgagattgagagagttaaattcttaacaaatcagaatatctcttaatgtctcct

SEQ ID NO: 331718 - DNA, 229 bp, Zea mays
ctgcgcttgacaagatactgcatctgaggtaaagtaaggaacagaaaaaccatgtgtcggtccatggtcctagctttggctgtggatgctgaagacgaagcgcacatggttggtcattcatcgtgaatgttaataaaagaaatcgatcacatgcagtacttgtatctagagttcttcctaaaaaaaaaaaaaaaaaaaaaaaaaaaaaaaaaaaaaaaaagaaagacaa

SEQ ID NO: 331719 - DNA, 275 bp, Zea mays
ctcacgcgttcaatatagccttcaagatattcgctatggcaggggctatagcacattcaagatagaatgcatgtgtgcatgcgtatgcacatgagaatgcagataatatatatgacagtctctacgagtgatatatctagggatataatgacggatggcatgtccttcatcatgaacgtgatcaagaaagactttatacatgtctgcatacataagtacaaattaatgatgggatcaatcatttgtgcagacgagcatgttgtagagcatgtttt

SEQ ID NO: 331720 - DNA, 183 bp, Zea mays
ctgcgtgcacaggaagcatgctattgcgtactccccaaagaccccacgtttgcaaaatacatcaccaaccataacaccgcccaaacctttacctcgtacggtatatccatcctcaaatgctaagcaagctctcaacgacatcgcttcgcttgatattgctcttgtgagtaacatattcagctt

SEQ ID NO: 331721 - DNA, 264 bp, Zea mays
aaaaaaaaaaaaaaaatttaaaaaaaaaatttaaaattaaaaaaaaaaaaaaaaaaaaaaagaaaaggtaaaaaataaaaaaagtaaaaaacaaaaaaaaggacgcccattcttaatgttccaatcttacaaccccttccatccaaccttattactcttttatagggccccctaatttcaattcactgcccgttctttcacaacttcttacctgtaaaaaccttgtctttccccaccttaatcttttttaaccacatccccttt

SEQ ID NO: 331722 - DNA, 343 bp, Zea mays
gtgcgctagccgccgcctagctgcactgctgtatttttgtttcaggattgctgctgctggtcgcattcaatctttgggcctcccggagccgccggaggcgcgttttactgttagccttactactcttactccctgtagctccacgtagaagaaaccgatgtcctgcgtctggcaatttttcttagtccaaaaaaaaaaaaaaaagaacaaaaaaaaaaaaaaaaaaatataaaaaatagataataaaagtatactaagatagcaaaactgtttaacataccttaatacaacatatcaatttctgtggctcccaatacatgaaaatgtaggctggccgttttaa

SEQ ID NO: 331723 - DNA, 557 bp, Zea mays
  unsure (1)..(557): unsure at all n locations
gaattacccgggctcgactccacgcccgtccgaacgcgcgtcgaagccgaagcaaggctaatgggcctgtgagtctggatnncgaaggcnncctcgctcgtatgccgaccagtgtctggcaggaccgtcatcgcgttcttcggtggcccgccctgcggcccgagggcgctccgcgcccctagccccggtcttccgcacgcccgtcccgcggcngatcgtcgccactttcgcccgtcggcttctttcgtcgcgcttccgctcgcccgcgcttcactcttttcgccgcccgtcccgccacttggagccganntggggcctcgtgccctgcaggggctacctagcnagtaccttccccacgcccgccgcccgacgcccgccttagatcgtatttattcggagtggctatccagtacgtactttagtagtagtgagaatttggttcggtgctgtcgtgtcgtcgtcgcatttntgggtcggatcttggtttcctttggtgccagggaggggtttctattacccatgtcgcgggtgtcggtttgtgtgaatctcatcccccc

SEQ ID NO: 331724 - DNA, 364 bp, Zea mays
gaattcccggctcgacccacgcgttcgatcccagatcagcttggacagtctgttacccactgagaaaatcatggcactagggtccgggatctatcttctgtgcgcaagatcttaggctgcccgtcaggacgctttgtcgttctccggcacagcgaacggtgtcaccagcgcggcatcagggaaaacaccggcctgacttagctacgtgccgatctaggccgaccatgtgatcggtatagcacacacacactctaaacttttacaggtcctaaacaatctccaaatattctatttgtcagacagatggctacaaagacattgtgcatgtatatttaggagtttgtaatcatctagaatggtgcac

SEQ ID NO: 331725 - DNA, 62 bp, Zea mays
cccacgcgtccggttaattgtcatacatgctcccttcgtaaaaaaaaaggagtcttaagtgc

SEQ ID NO: 331726 - DNA, 347 bp, Zea mays
gatcgagcggccccttttttttttttttttttttttttttttttatttttttttggtttgttttttttttatattttattttttattttttttttttttttttttttttatttttatattttttatttttattaaaaaaaaacctagccaaaattaccactaaaaatcaaaaatcccactttttaaaaaaaaattattttttaactaaaaacttaccaaaaagaccaacttaattttaaaaacttaattccaatttccttactcaaactaaaaacccaataccttctttaactaaaactcttatacaaagatttaacactataactacttcaaataatttaccctag

SEQ ID NO: 331727 - DNA, 161 bp, Zea mays
aaaaaaaaaaaaaaaaaaaaaaaaaaaaaaaaaaaaaaaaaaaaaaaaaaaaaaaagaaagaaaaaataaaaaaaaaaaaaaaaaaaaaaaaaaaaataaaaaaaaaaaaaaaaaaaaaaaaaaaaaaaaaaaaaaaaaaaaaaaaaaataaaaaaaaaaa

SEQ ID NO: 331728 - DNA, 349 bp, Zea mays
aaaaaacaaacaaacacaaaaaaaaaaaatttaatacaacaaaaaaaaacaaaaaaaaaagaaagaataaaaaaaaaaaaaaatacaaacaaactaaaacacaatccaaaatacataactcatcaaaacctacaccctcctcttcatatttcccttctacatccccacaattaatccatttaccttctctatatcaatccttttaattccaaaaacccttcctatccccaacttcttctactttgacaaaatccccctttctccaattttcttattacccaatatctccccccttatccccctttccaaaattttttcatcctcattgcttttttctatcccccccttt

SEQ ID NO: 331729 - DNA, 84 bp, Zea mays
atgacttcttatttctttaaaaaaaaaatttaaaataaaaaaaaaaaaaaaaaaaaaaagggaagggtaaaaaaaaaaaaagaa

SEQ ID NO: 331730 - DNA, 349 bp, Zea mays
cccacgcgtccgcccacgcgtccgctctaccttcaaagggcgaaggcagccgatctcaagcccgattccccatctcgccctgcccgccgaagagcgcgcaagcaccaccgtcccggcagcgcggagatcggtccactccatccacgcggcgtcaggcgagcggggcgcacggacgctgcgaccgatggatctcaaggatagcctctccaaatttaagcaacagcaggagagatgccagtcatcactggcgagcatagctgcttcgacctcaaagccaaagcacagggcccaaccagcgcatgctcctaacgtcccagcaagaccatcacaacctattaagttttcaaat

SEQ ID NO: 331731 - DNA, 320 bp, Zea mays
agaacattgtgtagtcatgtttagcaagataccataaagagtgtatcctttcagcctacgcagagaacttggttgttcaatcatgtgcctcactgaatattgttagatgcacaggatggatgtaattctgaaaacttgaatggttatcaagaagtacttcataaaaaaaaaaaaaaaaaaaaaaaaaaaaaaaaaaaaaaaaaagacaaacgatctaaaagaatacggtcttctttctcaatgcattcagacataataactcttttatagtgtcaacctaaattcaatttactggcccattatttacaactccattgact

SEQ ID NO: 331732 - DNA, 237 bp, Zea mays
  unsure (1)..(237): unsure at all n locations
tcgccttctctcgcgagaaccgagaggctagtaccgcatccagtggntggggcttcggtatggggcggaagcgaatggcgccctgggcgaacgccgctataggcgtaggaaacccctaaattacgacggtcgatgactgttgaagatgtngccgacgccgacttcggataccggaggaaagcccgaagcagctgaaggtcttccgctgcaactggaaggatcccgccggaaggtgtt

SEQ ID NO: 331733 - DNA, 234 bp, Zea mays
gaatacccgacccgacccactcatacgactggataaccatatctacaatatttcctttaacactgtatcctttaatccaagggcgagatctaatacacacaaggcatcgcctcacttaacatagataaattcacttaatgcatctaatacttaaaacttgaatgtttatcatgaattactcaataaactattaaatgaaaaaaatatctattaaatttacaaataacacttata

SEQ ID NO: 331734 - DNA, 281 bp, Zea mays
aattcccggtcgaccacgcgtacgcgatgcttttcacgacgaagagcttgctttcagggacagccctaccggaaggcaccaggttcaggggccactgctttcctgatccgcataggttcgcgctacgggcatacgcagactccatccccttcagatacagccagcttgacgcgatcctaaggataaaaccgatccctctagggtccaagaaggcggagcaagtctctgacacactacgggcatgcgaggccgagttctcggacgcttatgcctgcgccatc

SEQ ID NO: 331735 - DNA, 346 bp, Zea mays
cccacgcgtccgaaaaaaaaaaaataaatttaaaaaaaaaaaaaaaaaaaaaaaaagaaaagaaaaaaaaaaaaaaaaaaaaaaaaaggggggccgcccttttggatccacccttctttcctcctccttcctccgacttaattcttcttttatggtgccacattacttttatttgctggccgtttttcaacatcgtcactgctgaaaccctcctgttgcccccctaattaaccttgttgcacatcatccttttttcacctggtgtcgtattaacaaagccccccccaatgatctttcttaccaacagttccgcactcttggtgactattgcgccccctctttttgc

SEQ ID NO: 331736 - DNA, 234 bp, Zea mays
gacccacgcgaccgcttccccgtcgccattctcattgacctactatcgagttctacccccaacctcgcaccgtgtccgtcttcaacgacctttccagatagatcaccccacattcccacaatcaccttacctacctacatacatcgacgaacctagccctaatctctgacaacgcatagagcaacgaccacttaatctccacattaaccagcaatctgtcacaagatcatatca

SEQ ID NO: 331737 - DNA, 293 bp, Zea mays
aaaaaacaaaaaaaaactaaaaaaataaatttaaaaaaaaaaataaaaaaaaaaggggaggattataaaacggcggccgctttctagattccaacatttacttccacttgcatgccatttattagcttttctctcgcactcccttaattcactccactactccaccgtttataacatcttcccttgcaaaccctctgtgtatcccaacttattcacttatcaggatattccctttttgccagctggcgtaaatacgatgagctccctaccaaacgtccttctcatcagttact

SEQ ID NO: 331738 - DNA, 69 bp, Zea mays
aaaaaaaaaaaaaaaaaaaaaaaaaaaaattaaataaaaaaaaaaaaaaaaaaaaaaagagaaaaggat

SEQ ID NO: 331739 - DNA, 191 bp, Zea mays
ctagtcaagagaagagtcgaggaacaaccttgcattcgcagacggcgatcatggaggcgtgagctactgcggctgcttgtctctcgaggttctcctcgaaaggttagcttcaacctgaccgccagttggtccgtagggcgtacaaggacgctgagtgcgcatctactcaccaagcctctgccgtggtgcgc

SEQ ID NO: 331740 - DNA, 93 bp, Zea mays
aaggaaaaaaaaaaattaaaaaaaaatttttttaaaacaaatacacaaaaacataacaagaaagatatccaacgcttccggccacgcgtccgt

SEQ ID NO: 331741 - DNA, 61 bp, Zea mays
ttttaaaacatacaaaaatacacaaaaaaaagcataatttaaaaaaaacctaggccccaaa

SEQ ID NO: 331742 - DNA, 380 bp, Zea mays
ggaattcccggctcgacccactcgtccgaagaaaaaaaaaaactaaaaaaccttttttaaacaaaaaaaaaaaaaaaaaaaaaggagaaaatatcaaaaaatcaaaaaggacaaaaaaaaacaaaaaggtcgtcccttctatacatcccatacttacttccccctccatccaacttcttagcttttctataagcactcctaaattcacttcactgcccatcttcttacaactaatagacttgcaaaacctttcctttacccaacttaactgcctttcacaaaatcccccttctaccacatgtcttaatacccaaaacgcccgaaccgatcacccttcccaacaattccccacccataatggccaatggtacaaccccttt

SEQ ID NO: 331743 - DNA, 203 bp, Zea mays
aaaaaaaaaaaaaaaacaataacaaattttattaaaaaaaaaaaaaaaaacaaaaaaaagaaggcttaataaaaaaaaaaaaaaaactttaacaacttcattaaaatccaaccttacttcctctttcattccaaatcatacctttcttataaagccacctaatttcaattcactgaccatcttttaacaacctcaaccactgc

SEQ ID NO: 331744 - DNA, 379 bp, Zea mays
ctgaaggtgctggctgcagaaaatgagcttcatggcttcaataactagctgtatgatctgcagattcttggactgttgagctgtttaacggcagatattaacagttgcagccttacaggtgcttcgtcaaatgttgaggcattgctgcttaataactgtttgggggatagagtttgggttatacactgtaggtgaatcttcacgttgataccacaaacaatgtgtggaagtttcaaaaccattaaaaaagaagatgtgctacaatccaatggcgtcaaatcaaacaaaaagagtctgctcatgtactaaatgctagtaggctgctgatgaagcttactatagggaattcaaatagggccaacgaattctattcctcatc

SEQ ID NO: 331745 - DNA, 437 bp, Zea mays
agggcgtgcaatcacacaaccctcctggtcaatgtcgccgacctcaactcgtcgccgtagcgggttgtacctgggatgtggggcagcaacaagaaaccgaacctcgacttcaccctaggacggatataatccgcactgtctatctacacctcgaccatcagctgagccaaccgagatcgatcgatcggccggccatggatacgaagctagatacaggctagagctagctgcactgcatacataggttgatctgcttctaagctgccatgtttatgatctgatggagcatgtgcgtgcggtatgcatgcatggtcgtagcgagggaacaatgaagaagaaccaaaacgcttgaagaaatgaaaaaagaaggcgcgctaggagtaaagaataggagatatggcaaccgtggatgggatccaggaacaaattaaagctag

SEQ ID NO: 331746 - DNA, 381 bp, Zea mays
ccgacgcgtccggccgctctcgggacctttctctgctcctcgccgacgatgccgccgccgcctccttttacaccggctgcgggctcgcctcgttcctcgcgtcccaccgcaaccgctccttcggccgcgcgcgggcgtcgccgtcccgcgcctcgccctccgcgcacttacgctcgctgtcgtggagcgtgtcccgcacctggtcggcggcgcgccagctgcaggccatcggagccggcctggccgcgccgcgcgccaccgaggcctcctgcggcttcgccgcgcccgcctacgccatgggctgcctgctccacctcgccgcctgggcgctcgtttgccccgtgccgtgcccggactcgcgccgcgcgctgcaagcgcacc

SEQ ID NO: 331747 - DNA, 118 bp, Zea mays
atgtattatgcaaaacattgtccacacatgttataggctgaaatcggaactattcgtgatagttttagactaaagaagggcgactagctacaagtgcagaatcaactaccaaaactgc

SEQ ID NO: 331748 - DNA, 285 bp, Zea mays
gcgtcttctccggcggcgaccagtactatctaccatgggtaaagcgagtcggcgcgagatgcattacgcagcatgtgtactgtgcgcgtgcaaatccagaatgacgtagctctgacgtgggctcgcaatattgtcgcgagctctttacaatcatgatgataactatgaggaataaataaaacagaaaatcgactgaacacataggaaaacaaagtgtatcaaaatgctgaactcaataataatgcatctacatgcttatctaaggcacgtccattttagagggcc

SEQ ID NO: 331749 - DNA, 360 bp, Zea mays
taagtaattaaagaatggcattaacagttttctataaaccacttaaaaaattataataatccgacaatttcaccactttttagagagcatcaaagattctgtcttcccaactgagcttatacccttttttgacaaatctatactgaatgtcaatcttgtccctactgattaagaatttactgagccattcaagcattctactccttttgaaaggtaactaataaacctcatcgaaccttctgataataatacttccaatgctacttcttattcttctgcttccactagtacaactgcttctaggactatcacaatgaaccattctttaccatcaaccttcctacaaatcacgttctcaaa

SEQ ID NO: 331750 - DNA, 294 bp, Zea mays
cagggtatttctctctgacagaagttcctgattccctcggcagtggcgtggttgcctaggtttgctgtctgtttttgagctactcgttttttcgctgtcttgtgctcgctgtcttccgtggtgtttcagtagcaatggaaaagggtgagtgagcctgtgttgtgttacaagcatcccagttcaatgggaaaacaaacacataagacatgaaccaactgaacagcttgatttaatggaaaatgctaacacaactaacatgacaaataaaaaacagatataacaagaacaacagat

SEQ ID NO: 331751 - DNA, 127 bp, Zea mays
  unsure (1)..(127): unsure at all n locations
aattaccggctcgagccacgcgtccgccgacgcgtccgnccacgcgttcggctgaacacagcgctgtaaagtagtgttggtgtggtaaattcagaatgtgtaagttgaatttatgttattaccaaaa

SEQ ID NO: 331752 - DNA, 421 bp, Zea mays
  unsure (1)..(421): unsure at all n locations
ccgacgcgtccgcccacgcgtccgcccacgcgtccgtggaaacccaggtgcagctgggtctggttaccaaggtggacatccaggctcaaatagaggaccttggggcagtcaagctccatctgcatatggaactggagggtatggtggcagtgctgggtatagtgcttggaacaactcttctggtggcggcaatgctctgaatagtcaagcccctggtggacctgcaggctatggaagccagggctatgggtatggtggatatggaggggatccatcatacgctagtcacggaggatatggngcttatggagcacgtattgatagtgctggcaatcctgctactggtggatcatctggatacaatgcangctatggaagtggtggtgccaactctggctattcaagtgctnggagtgatcct

SEQ ID NO: 331753 - DNA, 315 bp, Zea mays
ggaattcccggctcgacccactcgtccgaaaaaaaaaaaaaaaaaaaaaaaaaattttaaaaaaaaaaaaaaaaaaaaaaaaaaaaaagcaagattaaaaaaatataaagagatacaaataaaaaaaaaaatacatacaacataataaacatacataaataaataactaaatacaattaaataacaaaaaattttacaacttttaaaactgctaaaaccttgaaactacccaacttaatctcctagcactaaatccgccttttaaaaaatactttaatctccaaaaatctcacccctatctcctttaaaaacatt

SEQ ID NO: 331754 - DNA, 309 bp, Zea mays
ccacccactcatccgaaaaaaaaaaaaaaataaaaaaaaaaatttttaaaaaaaaaaaaaaaaaaaaaaaaaaccgacaaatttaaaaaaacccaactcaacaaacccatacaaacaacaacatacatactacaaaataaccacctacaaacacttcactaaatcccaattacacacaccacttactcaaaatcccttactttaaaaacacttccattacctaacaaaaaatccccctaacaaaaacccctttaaacacaaaaaaccctaccccaaccccccttaccaacctttccccacacccaattt

SEQ ID NO: 331755 - DNA, 466 bp, Zea mays
  unsure (1)..(466): unsure at all n locations
tcggtctcggaattcccggctcagaccgtcgcgtcgatatttaatgtttcagcttggttggtttttaacttggcccttaataaaatttttggttgtttaataatcttaatccataaactaagttggtatgtagtgacgggtaagaaatactgtggtggtttggacctcagttattggccagatgaagggcgaaggccattatcagatcctcgtccacctttgggctattgctgacaagtggacgagtgtcgtacacctctccaattccccccttcaatgtggtcagtgttgaatcatctacgtcatacagtgagcaagggcatactgatgagggaagggatgacatggatttttctcgttcgagcatcaggttttgtgcgttgattatggtgtgctcgttggtgagactgcgacgtnctcgttcaagtcagctgataatcgtgtccttcaagagcaactactacag

SEQ ID NO: 331756 - DNA, 343 bp, Zea mays
gaattcccgctcgacccactcgtcctagaaaaaaaaaaaaaaaaaaaaaaatataaaaaaaaaaaaaaaaaaaaaaaaaaaaaagcaaaatttaaaaaacaaaaaaggcctacctacttcatccatccaaccttcatctaccatccttccaacatcaactctctcattttaccccacctaaatcacaattctttccccctccaattcccaacactcactattcttaaaaccctatacttacccaacttaatcatcttccacaacatacacctttctccaccttaccaaatttctaacagcccctacttcatctcccttactaactacttctccactctattct

SEQ ID NO: 331757 - DNA, 368 bp, Zea mays
ggaattcccggctcgacgccacgcgtccgagacggtctagaaagacaagcccatatgtttggaatggaatattatcgtttttatagattttgttaatctgttagtatgtgtttggctgcactctaatacatcatatatttcatccgtctcaaaaaaaaaaaaaaaaaaacaaaaaaaaaaaaaaaaaaaaaaaaaaaaaaaaaaaaaaaaaaaaaaaaacaaaaaaaaaaaaaaaaaaaaaaaaacaaactaataacaaaaaaaaaaacaaaaaaaaaaacgcctgcccttttaaagaacccaagctaacgaccccgaccatgcaacttataacgttttacatggggcccccaaaattaaatcacctg

SEQ ID NO: 331758 - DNA, 367 bp, Zea mays
aattcccggctcgactcacgcgtccgggcgaagctggtccctgaaaccaaaggtaagacactagaggagatccaggactcactaagcaccataagatagtaatgaatttacttcacactacagaataattaattctaagatggaaaaatgggaatttacaggacacagcagaataattccaagatggaaaacgaatgtaccgtcagacctctgctcatcgatagatatgtatacaagaaacaatatatataattctcacgtcctcccgcttcccctccctttctctcccgcaccacctccgtgtaatacgtagtgtactgtgtaccctatgtaagttaaggaatgctgcagattcagattacgcatt

SEQ ID NO: 331759 - DNA, 360 bp, Zea mays
  unsure (1)..(360): unsure at all n locations
agaccattagctttatctactccagatcgcataagaacccgatcgacaccatgagggggttgctcgttgccctcgctctcctggctctcgctgcgagcgccacttcacgcatacaagccgcggctgcggctgccagccaccgncgccggttcatctaccgncgccggtgcatctgccacctccggttcacctgccacctncggtgcatctnccaccgccggtccacctgccgncgccggtccacctgccaccgncggtccatgtgccgncgncggttcatctgccgncgncaccatgccactaccctacttcaaccgcccggcctcagcctcatccccagccacacccatgcccgtgcca

SEQ ID NO: 331760 - DNA, 269 bp, Zea mays
aaaaaaaaaaaaaaaaaaaaaaaaaaattatacaaaaacaaaacaaaaaaataaaaaaaagcaaattatacaaaaaaaaacaacccaacaaaaactttaaatccaaaacactctctcttcaataaccaaacttacatacacttacctgccactccatacccatcttttagacctaccaaaatttaattaaatcccacctcattatccaacgtactacactgcaaaatccttagcattccccaaattaatcacctttccacaaatccccc

SEQ ID NO: 331761 - DNA, 178 bp, Zea mays
cctctcataaccccctcgacccactcgtccccccacgcgtccgcccacccgtcctaaatataaaaaaacaaaacaaaatcaaaaaaaaaggcaaatttaaaaaaaaacattctccaaaataccaacctaactacacaaacatcctaacccataactaatatataatgacaccaaaatt

SEQ ID NO: 331762 - DNA, 439 bp, Zea mays
cacagttcctccgaccagttacttcaatgggcttcgaacacctagctgtgcaagcctgcaagctacaacaagcgcttgcggcgagcgtcttacaacaaccaattaaccaattgcaacaacaatccttggcacatctaaccatacaaaccatcgcaacacaacagcaacaacagttcctaccagcactgagccaactagatgtggtgaaccctgtcgcctacttgcaacagcaggtgcttgcatccaacccacttgctctggcaaacgtagctgcataccaacaacaacaacaattgcaacagtttctgccagcgctcagtcaactagccatggtgaaccctgccgcctacctacaacagcaacaactgctttcatctagccctctcgttgtgggtaatgcacctacatacctgcaacaacaattgctgcaacagattgt

SEQ ID NO: 331763 - DNA, 266 bp, Zea mays
acccactcatccgcaggcatcaaccatctacttactattatatcactacaacacataaccactcaatggtgcactctttaaaaatactcagctaccaactacattctacaaccatttattcacattcaacatccataactccaaaccactttccaccatgctctatataacaaaccttctcttaactatatcacaaacacatgatcttttgaaaccaaccaatctcataacattaacaccatattataaacttaccaccacactca

SEQ ID NO: 331764 - DNA, 422 bp, Zea mays
gtcatgttttattattgttgttctattctgttcatgataagactattatgtgtaaaggccaaaattggtaggagaaaaaatataataataatactaagtaataatgttgtgagaatttgtaaaacctttgagacttattagtgcctttccttttcataatcaaataatgatattaaaatggtcgtgtaaccaataagtgaataaaagagtggacatctcatacttatgaaaatgtggtatcattaccaaaataaaataacactaataaataaataaataaataaataaataaataaataaacaaataagtgcacatcatactggagttttattttgtgcatctgaaataagtttgaaattcataatcaagatctgatttgaaatttaaaacaaaaaaacttacaaaagaataggaaaggaaa

SEQ ID NO: 331765 - DNA, 313 bp, Zea mays
aattccctggtcgacccactcgtccgacggaggataacaatcataaaaattattttaaaacaaaacatacaaaaaaaaaaaggaaggctttataaaaaaaggacgacgcctatatacatcaccaacccgtctaccatatctcgctttcccttccttttctccaactgtccatgtccctacttatcctacccgccttactaccactcaagatctcatcaattcctttaatttttccgcatttaataacttttcgtctcaacctccattccctaactttcttactaacgctatcacttgcatcatctcacacttc

SEQ ID NO: 331766 - DNA, 238 bp, Zea mays
agaatacccggctcgacccactcatgcgctcactcgtactaacacgaacttttatgtataccgctaaaattaacaactctaggaacggttactcaaactagcggctgaccagcatcattacattcaccaactcttagactgccaacacaaatcctatcttacttacatccaagactcacattaccgaccttttaatcatgattctgagcttcaacctgtaaacacatatgaaaactat

SEQ ID NO: 331767 - DNA, 399 bp, Zea mays
aggaaacgacaaacctccacatctacctcaacaaccacgagattacctccacgccagtcacctttatcagatgatatgctcctgtgctgacatctatatgcccaccgactcgaaccacacggagaacattcaggatcttgaccagcttaaccgcaagctcaaccagatcgatgatgaggtcgccatcttccatcatatgcaagccaaagtccacaaatacattcacgaacgtgacccatacttcatatcatctgatgctacaagatcatgtatacaccaggccttgacatgttggaaatatagattatgctttcaccccacaataagtgcatcatcatttccaagcatgttgaactatcaacaaggtgacaatcttgactgacaaatttttcatccaaa

SEQ ID NO: 331768 - DNA, 362 bp, Zea mays
aattcctggtcgaccacgcgtccgaaggaacaaaaaaaataaaaaaattttttaacaaaaaaaaaaaacaaaaaaaaaagaaagctattcaacacagaggacgccgaaccaagcaaaacaatactgtcacacaaggacggccgaccaagtgctggttctcgcactacgcctccacggcgctgaactggccgggcgccctccgggtgccgcctcatcgctctccgagtctcgcgcttcctgcccctgcttcctgtgcttcctgttcaccagctccctcctagtcgcctccgaccccgtgcgcgcgctccctgtcgtgtcgccgatctccgcccgcggctgcgttcccttgctcgacgacttcc

SEQ ID NO: 331769 - DNA, 373 bp, Zea mays
  unsure (1)..(373): unsure at all n locations
gtcacttgctctccctccaacaagcttattaaggccggtcatccctcttctagctcgtttcattatccatggcggaggagaagcaccaccaccaccacctgttccaccacaagaaggacgaggagcagctcgccgccggcgggtacggcgagtccgccgagtacacggaggccacggtgacggaggtggtgtccacgggcgagaacgagtacgacgagtacaagaaggaggagaaggagcacaagcacaagcagcacctcggcgaggccggcgccatcgccgncggcgccttcgcactctacgagaagcacgaggcgaagaaggacccggagcacgcgcaccgtcacaagatcgangaggaggtcgcggcggc

SEQ ID NO: 331770 - DNA, 197 bp, Zea mays
actcggttctgaattccctgctctacccactcttcctaaaaaacaaaaaaaaaaaaaaattaatttaaaaaaaaaaaaaaaaaaaaaaaaagaaagaataaattaaaaaaacaaaaaaaaaaaaataaaacaaaacaacaaaaacattaataatcaaaaactcatctcattctctcaaaacttcataattttccttt

SEQ ID NO: 331771 - DNA, 259 bp, Zea mays
aaaaaacatacaaaaacacaaatttattaaaaaactaaaatacaaaaaaaaaaggaggcataacttaaacaaacaggaaaaaaaaaatcgaccaccactctaacctcttcctgttctaactctccttccatgccacgcaatactttttatttaggcctacttactttcaatctcatttcccgccgttctacaacttccatcactggaaaatcccttcttttacccactttattcgcttttctataatttcccatctacc

SEQ ID NO: 331772 - DNA, 125 bp, Zea mays
gaattcccggctcgacccactcgtccggtcaaaaaaaaaaaaaaaaaaaataaatttaaaaaaaaaaaaaaaaaaaaaaaaaaaaagaaaacttaaaaaaactaaaaataaaaaaaaaaacatac

SEQ ID NO: 331773 - DNA, 411 bp, Zea mays
  unsure (1)..(411): unsure at all n locations
ctggccaccaccttctcaccagttttcccagccgccattctgcgatcacgcctgttgggtggttcctgctgcgatctgcgcttgtgcgatcggccgtcatgttacggcacacaacgacgccggcgtctgtcgtcgtccgcttgatcggcaactgggtagcgtcgcatcgaacgagcgatcttgtcgcctgatccattgatccaactgtgttggaagaacggcgtcgtctgcaaacagcgaggcagagaagcttcgggcgcggcaaagcagcggcgtcttgcgcatagctacggcgggcgtggacagaacagcggcagggcggngagaaaagacaaggtttgatgtgatgtgtatttgacaataaggttctatgtgcgtncgaattgtatgtcatatatgcatgtgtttgat

SEQ ID NO: 331774 - DNA, 375 bp, Zea mays
gccacgcgtactgatgctgccaatagagctgcacagagaggcatacaaccttggggagcactttgaagaacccttgcaagattatcagcgtgctgtacactctatacaagccactatgcttgatcgaaccaatgctttcaagcagcactacgatatgaatcatgagaggctgtatcaagagcttaatcttgacatattcaagttcatgaaccctgaaacgtatgccgaagcacaatctgagtttccagacttgaaagcagacactgaggaggctgctcacatatttggactcatggatggactaatgaatgaagagcatgctcgtttgccagatcatattacacttgatattggactatcattccatgaatatgc

SEQ ID NO: 331775 - DNA, 366 bp, Zea mays
aaaaaaaaaaaaaaaaaaaaaaaaaaattaataaaaaaaaaaaaaaaaaaaaaaaaaaagaaagataaaaaaaaaaaaaaaacaaaaacaaaaaaaaaaaaaactatttttaaaccttaaccggccgttttaaagaatccaactttacttacccttgcttccaacgtaataccttttctatagggccacttaatttaatttcattgcccgccgttttaaaccgctgaaactgtaaaaaccctgcctttcccaaacttaattcctttgaaaaaaatccccttttccccaattggcttaatcccaaaaaggccccaaccaatcgcctttccaaaaagttccccaccctaaatgccaaatggaaccccc

SEQ ID NO: 331776 - DNA, 413 bp, Zea mays
caccagcccaccttaattccatggcatctttttttttattattattctgtgtgaaggtggattcctaggctgtaccgcccatctttctctacctgtttgtaagatatgactttaggggtttcggcctttattatccctagtaggcccattggaataggaacttttttggcattgcacattagaattttcaagtgttggcatggctgtttagttctatggtggtgactcgtgacctgtataatataatttagacaatggaatatacagcatttgtggtacagccatgtgacaaaaaaaaaaacaaaataataacataaaacaaactaaaagctaaaaaaaaaaagagatactatacatgccaatttattaaaaaaattcattcttacacaaaaaaaaaggggcggcctcttttg

SEQ ID NO: 331777 - DNA, 295 bp, Zea mays
atacccggctcgacccacgcgtgctccactcttcctaaaaaaaaaattaaatttaaaaaaaaaaaaaaaaaaaaaaaaagaaagatataaaaaaaaattaaaacatcataaactgaaaaaaaaataaaaattaaaaaaaattaatcaaaataaaaaccaaaaaaaatttaataaactaaaaataatcaacaacaataacaataaacaataaaactataacacatatttacaacctgaatgcctttttctactccccacttattctgcaccttaatctccttaaaaattctttttt

SEQ ID NO: 331778 - DNA, 182 bp, Zea mays
gggtatcggaagtgccatctcattgcccattggctcatggaatgggtggatgggactgacaaacatgttctggttcaatgatgaatactggaatcgcacaggaaaaatatactgtgacattgcgacagtgcaacacctaaatacaaagacttggaaacaaacaacttgctttgttctgttct

SEQ ID NO: 331779 - DNA, 371 bp, Zea mays
cgaaaaaaaaaaaaaaaacaaacaaaattatttaaaaaaaaaaaataaaaaaaaaaaacgaagaattaaaaaaaaaaaaaaaaaaaaaaaaaaaaaaaaaaaaaaaaaaaacaaaaaaaaaaggccgccccttctaaaggatcaaatctaactaacccttccttccaatgaataacttttactaaaatctcccctaaattaaattcactcccctttttttaaaaacttcttacctggaaaaaccttggctttaccaaactaaaaccccttcaaaaaaatccccctttaaccatctgcccaaataacaaaaagcccccaaccaatcccctttccaaaaaattccccaccctaaatgccaaatggaacccccc

SEQ ID NO: 331780 - DNA, 347 bp, Zea mays
acgcacgcatccgccggcacgtacacagacacacaccatctcattttcaaaaacaacaccctaccctctgggaggctttacatacaaacgcggccatcccatctcatccctcttctaaactctccacaaacttcaattaacttaccatcatcattcacccccatcactatcaaaacactttccttaccaacattaatctccatgtactacatacaccatattttctaccgcctttttatcaaaaaccccaataccaattaccctttcaaacaaatccacaacctaaatgtcccataaaaccctccctcttccaaccctttaaacacttttaactctaatatcttact

SEQ ID NO: 331781 - DNA, 272 bp, Zea mays
ttgattttttttttttttttttttttttttttatttttttttttttttttttagtttgttttttttttatattttaattttttttttattattaattaaattttaatttaaattttaaaaaaaaaataaaaataaacaataacttcattaaactatataatataataaaaaacaaaataaaaataaacaaaaataaaaatattaaaaaaaaaaactaaatcaaaaaccataatataatacaacacattaccataaaaaaataacattacatt

SEQ ID NO: 331782 - DNA, 261 bp, Zea mays
gcgagccacagctatcagccgaggttagttctcgacttccgcacatggtggataagcagcgccaggggtactagcattaaaggcccgtagaccgctaggacgtacacgtggccgtctcgcacaatacgagtacaatgcgatgcctggactacgagaggaacctgctcacgtaaaccgaggtggacgccatcggactcctctagatgtagtcctacatcttcaagcacacgaaccgtgaatatgcgactgtgactgtgtttt

SEQ ID NO: 331783 - DNA, 140 bp, Zea mays
cccacgcgtccgctgatgaaaagaatggtgcttctgaatctttccacaaacagtgtgctggtgcccggtaatggctgttggattaatgtaggtttgattcaattaatatttaataatagtcaatgctaatagtctacttt

SEQ ID NO: 331784 - DNA, 329 bp, Zea mays
cggtctcggaatatcccgggctcgtacccacgtcgtctcgtgcgcactacacactacaactcgagatcttcctcccataatccacacctgtcggcaccctccgcgtgcaaggagtgcagatcgttatgtgacaaacccgtgactaggcaaagacgtatcagccgctcgagtgtgtgagtgcgtcatgacaaccgattgacacacgtataagtgccaagtatccagtgacacaggacgggccatccctcccagacgcagcagtcggtctcatcttttgcatggcacaacacgcttgaggaccgggccgcacgcctatgctgacatacaac

SEQ ID NO: 331785 - DNA, 177 bp, Zea mays
aaaaaaaaaaaaaaaaaaaaaaaattaaaaataaaaaaaaaaaaaaaaaaaaaaaggaaaggtataaaataaaaaaaaaaaaaaaaaaataaaaggccggcctttctaaagtttccaagtttacttacgcttgcttgcaacttcatacttcttctatagttttacttaatttcattt

SEQ ID NO: 331786 - DNA, 209 bp, Zea mays
aaaaaaaaaaaaaaaaaaaaaaaaaaaaaataaaaaaaaaaaaaaaaaaaaaacaagctagggtacacataaataacggcacgagatctattatataataatacaatacatacaattcattgatacgggttagataatgtattgactgacaaaacttttgtcgacctgaactctataacaacgagcagatcgtcaactccatagctttc

SEQ ID NO: 331787 - DNA, 142 bp, Zea mays
attccctggtctacccactcgtcctaaaaaaaaaaaaaaaaaaaaaaaataaaaataaaaaaaaaaaaaaaaaaaaaaaaaaaaaggtgtaaatttaaaataataaaaaaaaattaaataaataataaaaaaatataatata

SEQ ID NO: 331788 - DNA, 218 bp, Zea mays
accacgcatccgcaatatcttcttttcactctttggcgctcatgattccaccaggatgcgtcagcctccacacatggcaggtgcaattgaaaacccacttacagacagccttacacatctgcacaactctatcactaacaagatcaaaatctcaacatagcttatatatcccagctcatgtaatctcaaacacaacccatattctgacaatctaacta

SEQ ID NO: 331789 - DNA, 322 bp, Zea mays
tcccggtcgccacgcgtccgaccactgttcccacggaggccgcttcttcttggcgatggacgtgccgcgcgccattacctgggcatggccgacctatccaccggtcactcacacggcccgctagcggactgctggcggcgcagcctagcggggcggcccgagggaggcgctacttctgcggcgggaaggagcatcgggcgtcgcgcgcggggcggcctggccggctgaaagcgcggcgccgtgcgcgcccagagtcccgacggcgaggctcgcggtcgcggcggacaggccgcggaggctggtgctgctgggcgccgatacg

SEQ ID NO: 331790 - DNA, 328 bp, Zea mays
taaaaaaaaaaaaaaaaaaaaaaaatttaattaaaaaaaaaaaaaaaaaaataaaagaaacagataaaattaaaattaaaaccaaccaacataaaaaatactcactaaaataataacaatcttcctaattccatcctactcactgccatacattcccgtatattcactctcacggcttcattcaactcgtctatctccaacttattaccctttacaacaataattcccaaatctctaaaccccattatgccccatgctcaatatcatttctcactcaccttatatctccaatttccaacataccattttcccccgatctaatacatat

SEQ ID NO: 331791 - DNA, 345 bp, Zea mays
  unsure (1)..(345): unsure at all n locations
tcccgtcgccacgcgtcgcaaagcgcagcgtgcagctgagcagcgccggcagctggatggcagtggatggagtgaaaaagagccgccagaaacagaggaagcaggctggggcttcgtagatggggaagtctccagccagggccgggcgaggggtggcgagtcagtctgcagtcgtcggtcggacaggtcagtcgggcgcacggcgcggtccaagtcgtcgcgagagaaaagcctgtgccgcggaacggacactcggggaaggcctggtgccgtgggcgctggtggtggggacggccgaagctgctgctacatccacctgcggagccgcatgctgntcatgggcag

SEQ ID NO: 331792 - DNA, 108 bp, Zea mays
aaaaaacacaaacaaaataaaaacaaaaatttaaaaaaaacaaacaaaaaaaaaaaacaaagaaaagtttaaaactaaaaatatgaacctcataaaaaaatacaaact

SEQ ID NO: 331793 - DNA, 298 bp, Zea mays
atacccagcccgacccacgcatacgcccgcgcgtaattctcatacattttccctttctaaaaaaaaaggactcttaagggcactttaaaatttaaaaagggacaggcccagctaccgttcacaatctataaccttactcgactctcaagctcctaacgtcactattattaacaaattgaagcatactattgcctgtgagaaaattcaacgtgtcatacctggaataaatatctcacatccacataaatgttattcatataacatccaacatgaaaacactatattatcccataatata

SEQ ID NO: 331794 - DNA, 218 bp, Zea mays
gtggagcgtaaatgatagtatggtccttgttaaagtcaaaaaaaaaaaaaaaaaaaaaagaaaaaaaaaaaaaaaaaaaaaaaaaaaaaaaaaaaaaaaaaaaaaaaaaaaaaaaaaaaaaaaaaaaaaaaaaaaaaaaaaaaaaaaaaaaaaaaaaaaaaaatggcagaaacatattaaaaattaactaaacattattatccttagaaaaatcaaca

SEQ ID NO: 331795 - DNA, 378 bp, Zea mays
gcggccagtagcagcggagcagccttcgcggcgcccgccacgccggcgctctcgcccgcgtcctcgtgcgtcaccagctcctccagcggcgacgtgcgcctcggcgcagcgtacacggagccgccgccgcctcggcagcacgcggggctcgtacgctctgacgctccgcggacggagctcgcgcccgtgccggcagtcgcgcacctggacggcgcctgctggccggccgcggcggcgctggacgtgctcctgcccgagctcggcggcgagcagctgttcccgtacgggtacggcgacttcttcggcgggctgcaggacagggccctggagcagcagctctcgtcgtgctacttccccaacgtggccgagatatggggc

SEQ ID NO: 331796 - DNA, 231 bp, Zea mays
aataccctgctcgacccacgcatactcccaaccttcttaacacacatattttaatttaaccaaccattattatacacatggaactgttaaatttaaacaatgaattcccaaaccataaattcaacatcaactaatacattaaatatacttcttatttaaatccttacaaagcataatatatccaattccaatatattacttaattctacaaattatactttatatatcaac

SEQ ID NO: 331797 - DNA, 329 bp, Zea mays
ctcccccggcgtacctccggagatccaccccgactaccaccggtgcctcggcgatggccgcgtcaccaccgaaccaagtcccgcgtccctggtcccgccggcggggcccacgccaggcggtccctccgtctctcatcgacagactgcgcgccggttcgcgattatcagcttccgccctactcggaaggagaccggaccctctcagacgcgttccgggcttgcagcctgtccgctaccgcgcgcgatgcagcccgtccgggggagcctgagattgagtgcacaggggaaggggtgttggttcgtggaggccgaagccagctgctccctcg

SEQ ID NO: 331798 - DNA, 326 bp, Zea mays
cccacgcgttcggacgagcgcgtacgtaacttattgggaggctgcgcgtacggcaactcgggtcggctccgcgctcccctaaccggctgccacttgtctcatggcggaagtggaacaaccctccgcccgcgccgctgcgaagtgagaagggaaaacacgaaacgatcgagggaggggacgacggagcgagctagctagcggcgcggcgggcgtcgctcggcatggacgcggaggctgcagcggccgcggcggcgacagcggtggacgagagggagcggctgctgacgaacttcgcgtccgggaggacgcagccggctgcgtggcgg

SEQ ID NO: 331799 - DNA, 300 bp, Zea mays
ggacctggcacgaggacgtcctaccgacatccataacgcgcgacggaggggcgcgcaccggcggtcctggcaccgcgcgggtcggacatgttctccacactgagaaagacttcacggacatacacttctgacctgccggctttactcttaggactgccggcagagtcgcaacgtgcctctcggccgcacaagtcacatcgcactagaggctgccgagagcctgtggaagacatcgacgcgcgcaacgtgctggagcggctgcagacggcgcacctgtaccggctgccgaggctcagggcg

SEQ ID NO: 331800 - DNA, 445 bp, Zea mays
  unsure (1)..(445): unsure at all n locations
ctgggaagagctcgtgagccgtgcattgaaggcaatggccgctgttcgtagatgctgcgtgctggccgcggtgctgctgtggtcggcgctcgcttcagcggccacggccgcgccggcgcctgtggtggccgggccggtgtccagggtggaggacgccaccatgttccggatatactacggtcagagcttcaaggtcatcaagaactccggcgatggcaagagctaccttctcatgcagaacacgtccaagatggcatccaagacgaagtactgcacggngaggattaagtcgttcgtcatccccctcgccagcttctccgtcgacaccacgacctctccagtgtcattctttgagctgcttggagtgctagagagcttgaaaggaataacatcgaaccaagtcgcttctcagtgcgtgctccagtcatatacaagtggaaatgcc

SEQ ID NO: 331801 - DNA, 295 bp, Zea mays
aacaaacaaacaaacaataacaaaaaaaatttacacataaacaaaaaacaaaaaacaacaaagaggacaagatcaaaaaaaaaacagaaaacaaaaaaccaaacaaaaacaataaacaaaaacaacaaacgggccgccccctcaaagactcccaactttacttccccgcacttccaacctcaaacctctcctatcacccccccaaaatcaaactgcctgccccccactttcaaacctatatacctggaaaaccccagccataacccaactaaatcccctctcaaaccatccccct

SEQ ID NO: 331802 - DNA, 406 bp, Zea mays
cccacgcgtccgcccacgcgtccgcccacgcgtccgcccacgcgtccgcccacgcgtccggacgaagtgccagaagcgcgcgagcatccaaggactttggctcctttccatggttcttctagcgtcgtcctctcttgtctgtgcaagcatggcggtagatgggcaaaccaaagaggacatcaacgcaacgagtgtgacgagcatgaacatgacgaggtcgtcgtcggcgagctacaacatgactggcggcggcggagaacttaacagaggtccgtgcgtcgtgagatctggattctactggtgccagaacattggctatccgaccatgtcggagtgcttgaagaactgcgaatcgtaaagcactggagtatagaaaaggaataaagtggtctctgctagcttaaaa

SEQ ID NO: 331803 - DNA, 210 bp, Zea mays
cccgcacgttcgcccacgccgtttttaattctaccgccgacaaggtctacatggggagggatccatacaagagcctcgcgccgacggtcagattgttggcctattgattgatccatcactcctagctactcctactctggtcgctgcctattgattgatccatcaatcctgttaattttcagaagagtttcagaagagtcttaataaaaa

SEQ ID NO: 331804 - DNA, 250 bp, Zea mays
aaaaaaaaaaataaaataataatataaaattaaaaatagactactaacaaaaatggaaacggacaaatactcacggcggaacgtctactagatctaagctatccgatcaagccatgcaacaaaagagcgctcgaatatataactttactccaaatgactgatggacgttctatactcactgtactcaaataactatggggatcctcaacttacatggattgattaacatccacctttcaccagttactgc

SEQ ID NO: 331805 - DNA, 59 bp, Zea mays
aaaaaaaatacaaattataaaaaaaattattcaaaacacaaaaaataaaaataccaaaa

SEQ ID NO: 331806 - DNA, 270 bp, Zea mays
gccttgccaaatgcaaatattggagctcttgaaatattgactacaatgatacattaactgtgaccgaaaatgatattcttctgcaatgggatggcagttaatttcttggaaaaaaattccctcccatttgtgcggtgattggtgattggaattaaagccggagtgagggagatgcctgcttttgactctatggcgggtattaattgtttgttgggattatgcattagcctcaagagttgcttggccatcggatgggaaagactttttatt

SEQ ID NO: 331807 - DNA, 56 bp, Zea mays
agagcataggtttcttgaaggaagataccgagtcaggctcatacttcacaatgaaa

SEQ ID NO: 331808 - DNA, 185 bp, Zea mays
gggtcagcgcagtgatcaacctttttaccatttaagtgatcagtcttaatattgtacatgcacttgggcacacacttggaaacacaggtgccctaccagacacacgcatgatgcgtgcatacactacatacaaagacgggagccatgtccacgccacgtacaggcacagggctcgccggtcacac

SEQ ID NO: 331809 - DNA, 193 bp, Zea mays
gtctaccaccctattaagcgcaaggtctcagtctcaccgacacctattcaatcccaatcggacacactagtttctcctcgatcctcatctcctccctctctcgagtcaagagcagatcatctaccaaacaagctcttctttcgcttgcaatccatggagctcgacgccgacaaactgatcgccaccgatcttc

SEQ ID NO: 331810 - DNA, 341 bp, Zea mays
tccgggtcgacccacgcgttcgtaccctacctcacgtcccggatcctatccttcggccaaggtgagttacacgctgggcgggggttggtcagccgtcggcaaccacctcattcccatcagtctcaccgtcgccttcgaggcaaactcgaatcctcctccgtcaccacatccacagccgttccgagcttgagccgtctgttgctccggtaaattgcccttcatcttgtttcctgtagagagaggtcatttattgtgaccgcatgccttatattaagacaagtcgtgtcaagttttctgaacgatgggagcttattgaaccaaccatcctggtgttggatgcc

SEQ ID NO: 331811 - DNA, 312 bp, Zea mays
cttagattgacaagtgacgaccaaaccctatgccatggcttggcgcggcgccgccttccgatccattatcggcgacgtacgtgctcgcgccgcatcccagtcttccaccgacgcctcgcgcctccggtcgacagatccacttaccgacccctcgcgccggacgttggcggggatgtcggggtccccggctgcggccgcggtgaagctcaccgggcactctgcaacgagcgtgctggcgtgctgtgagctctcccagggccaaaatgggaaggatgggtgatgaggagatcagaccgaatgattcaatatcct

SEQ ID NO: 331812 - DNA, 234 bp, Zea mays
gtcacttacatccaccgtctcgttttcctatccaagcgcaccatccaccgcagcgcataggtgtctctatctcagccatggcccacccagaacaccaacaggacactccgaatctcttcaaccgatggaccttctatcatctcctcacgaacgacatctcccttaacgactacctagctgtgaacgctacgaagcacgcgatgtacctgccgcacacacctgtaccttactcca

SEQ ID NO: 331813 - DNA, 238 bp, Zea mays
cccacgcgtccgcagaaacacaccaagcgaatcacattatcaacaacctaacaacaatggctaccaagatattatccctccttgcgcttcttgcgctttttgcgagcgcaacaaatgcgttcattattccacaatgctcacttgctccaagttccattattacacagttcctcccaccagttacttcaatgggcttcgaacacccagctgtgcaagcctataggctacaacaagcaat

SEQ ID NO: 331814 - DNA, 139 bp, Zea mays
attcccgagctcgacccatctcgtccgaaaaaaaaaaaaaaaaaaaaaaaaatttttttaaagcactaccgatttaaaaaaaaaaagggtgtctttctctagagtgcccagcctttcttcctctttaattcaacctaat

SEQ ID NO: 331815 - DNA, 198 bp, Zea mays
ggccaacgtgcgcctggtcgccgacgtcaggctgctcttggacttaaccaaaaggaactgggtgcccttcccccggttggactcgtccttcgtcaaataccggccgggggccaccgtgccaggggtcgacgtcagcgagtggctggctttaacccccgtttgtttcggcaaaaaaaccaaaacctttgccgccttttt

SEQ ID NO: 331816 - DNA, 173 bp, Zea mays
  unsure (1)..(173): unsure at all n locations
ctctgctagcatatanggactatcacctgatctacgttgccagcatctagcttctcgcacacggcggcncgattccgaagcgcacacactcgctccagccaaaagcatcgcagcttctaatcgatcggagagcacacacgaatgtcgtacgtgcagctctatgctgctggagt

SEQ ID NO: 331817 - DNA, 108 bp, Zea mays
cccacacgtacgaaaaaaaaaaaattaattttataaaaaaaaaacaaaaaataaagacaaggatatatataaatgttgggtgtgaattaatttataggccattaaatc

SEQ ID NO: 331818 - DNA, 266 bp, Zea mays
gcacgtcttgcaagttttaaagtaacagaagaaaaaccacccgaccccaaggtttaacgaggggccttttgttcaacctttgtggtccacaacccaaccagttccggagattaatttatgctggaagtaggggcctgaacccgctggaggtaaaaaggtcccaaaattaaaaccttcaatggcatgtaaaataaggttccggaaaaaggaagggggtggggcgtcttttgccataaggtttcgaataaaaggaccgcggtcctttt

SEQ ID NO: 331819 - DNA, 395 bp, Zea mays
taaaaaaaaaaaaaaaaaaaaaaaaaaaaataaaaataaaaaaaaaaaaaaaaaaaaaaaagaaaaaaggaaattttaaaaaaaaaaaaaaaaaaaaaaaaaaaaaaaaaaaaaaaaaaaaaaaaaaaaaaaaaaaaaaaaagggccccccctttaaaaaaaccaaattttacttccccttcattccaaattaaaaattttttaatatggccaccaaaattaaattaattgccccttttttaaaaacttctaaactgaaaaaaccctgccttacccaaattaaatccctttaaaaaaaatccccttttcccaaatttgataaataacaaaaaaccccccaccatatccccttccaaaaattttcccacccttaatttcaaaattaaccccccctt

SEQ ID NO: 331820 - DNA, 234 bp, Zea mays
  unsure (1)..(234): unsure at all n locations
aaattttatttaaaatttattaaaaaactaagatatacaatttatacggcgagattgtcttcaatctttctttccaaaacctcctttnncatgtttctctccctctttattaaattactttttacccatcttcacattcttatctacatcttttnttaaaacacattgtttggttttatttggttgatcattaaaacaaaccttgaagacacccataaaaacacattccaacac

SEQ ID NO: 331821 - DNA, 52 bp, Zea mays
cccacgcgtccgcaaagtttataaaaggtactgttactattgttgcagtgtg

SEQ ID NO: 331822 - DNA, 69 bp, Zea mays
gaattccggtcgaccagctccgacacgcgtacgattttcgccactcaggttcagaaaaaaaaagggcag

SEQ ID NO: 331823 - DNA, 241 bp, Zea mays
cgaattcccgggtggacgcactcgttcgatttccgtccaaagcgtttccccgaggagtatctcgtgcctaccatgttgcgtatgcgctggggcttcaagacgggagcatcgcatgccgagatggaccctgacgctcgagtttattatctgcggtgaccaactgaccacaaaattgtctatttttacgtgctgaattcaacaaccaagtcgcattactaaaaagtattgaacataaaaactt

SEQ ID NO: 331824 - DNA, 215 bp, Zea mays
cccacgcgtccgatctttattgtatagataacgaatggttatagttatttattcttgtgtggaagtggtattggatttttttagcttggggttaaagaaaagacagtcatgtactttgcatcttttttgtatttatgttttatgctaaattgtggaataacactatattagttgttagcaaagaatttctgagatattaaggttgatgataaaaa

SEQ ID NO: 331825 - DNA, 375 bp, Zea mays
tcccggctggagccacgcgttcgattaaagctcattcaatcctcccggaattatctctaaccaaacaaggccttatgtgagaaagtgattcaaaataaccaggactattagtggcttcgtgatataccaatatgtgacaaaatagttgatgacacgagcatctaaatggaactcaatttcatgtgttgactctttgtttacagtcatcgagaggatggtgacaatggcaagcctgatatcaagttggttggtgagcagcacgccagtggtcgacggggggttgttccatcataatcatattacagctgctgcaactgacaagcccaatgcatcttctcttccatgttggatcaacactcttgtaatgtattattt

SEQ ID NO: 331826 - DNA, 241 bp, Zea mays
  unsure (1)..(241): unsure at all n locations
tcccgggccgaccgacgcgtccgccaacgcgtacggttctcctaacttggggcaaggagggaggttggattacagtgcactgagtancgatctaaatgtgactcctgctgggtcgctcgtggtagaatgtattgcgcgaagtcgtctactgcgatcaagaggtactctcggcctgtccagcgtacgtcatggatgccgatcgcatcatgcgcgtactcgccatcgatctcgagggggcgcg

SEQ ID NO: 331827 - DNA, 349 bp, Zea mays
tccaagcgcccacactacatggtctgcttgtttttgacaaacatctaaatcgccggatagggtatcgaccctcatggatgcatagtgtctttcctatatcctgtggtctagaagacgcctaagctgcagcgcgctgtgatagagttcacatctaacaagacggcttcacttgcccttctatgcctcaagctctactgcctccttctgcttcttattattccactgtcttactctgctacgcctctgaacagaagcctgtcgctgactaggaaccttctgcagcccgcggatgaccctgctccagaggttcccgctcccgaccagcaaggtgccgatgctaatactggta

SEQ ID NO: 331828 - DNA, 419 bp, Zea mays
ggaattcccgggtgcgagccactcgtccgctgactcgttcttccacgcgttcgctcacgcttccggatccctgccggtgctgtggccatggcctaaaacttccaactgcagagcctgcacggcaagtcccgcgtacgcgtctacaccgtctggcgccgcccggccgcggccgtgggctacgctatcgctaactggaacgtcaacgacagtatcgtctacgactggctaacctgatacacctacagcgacaactacatgcaatttcaccacagattccatcatcaacaccgtgcatgtcaacagccaaagagtgcacggaagtggtgtccatggctgaattcgccacgattcttggaaggcatttcaccatcttgtaccctgacgtctcagaagccacggtgactatcgcagagcgccca

SEQ ID NO: 331829 - DNA, 268 bp, Zea mays
gaggaatcctacttggttacaacatccctcccaaccaactctgactctaaatgaattggatgcacgcagttctattctgttttatatctaactcaaatcatagttggtttctaatatagcctaagagaatcctggacaactaagaccgtagcctatgtataacatattctaacaaaagctgcctggcctaagcagctgagattgtgctgcctggccagggcaaccaagctgcctggcctagttgtaacatattctaacaacgtttact

SEQ ID NO: 331830 - DNA, 93 bp, Zea mays
aaaaaaaaatacttaattaaaaaaaaaattttaaataaaatataaatataaaaaaaataaagaaaaagtgaaaatattaaaataaaatataaa

SEQ ID NO: 331831 - DNA, 185 bp, Zea mays
gaattcccgggtcgacccactcgtccctctagacaccctaaacaacatactatactctctcaccaccataacttatccattggctagtcttcactttacctttctcatcactcattacaaattctacccttactatacaacccataccattacaatatttaaaaccatacttataacataacaca

SEQ ID NO: 331832 - DNA, 128 bp, Zea mays
aattcccggctcgacccactcgtccgaaaaaaaaaaaaaaaaaaaaaaaaaaaaaattaaaaaaaaaaaaaaaaaaaaaaaaaaaaaagtataattaaaaaaaaaagtacggccaatctaaaagttcc

SEQ ID NO: 331833 - DNA, 363 bp, Zea mays
cccacgcgtgcggtgatgctcgctagcactatctcatcattcaattctgacttcagaacggggtaggctttccctgatacacagactcatgcccgaccaaatgtcgatcattgaactaactgaatccaaaacataaccatgatcacaacatcaggtgctttcccctacacgttgagttttgttactgatagtttcacaacatcgacagcaccaactaatgctgctacacacatcaacagtgctgcccaaggtagctcatctcagatatttaattctggtgtggccaagaacgtagagcaaccatctggatggtctggttattaactgcacatcgacatgcgttaaccatcattctggtcaaaa

SEQ ID NO: 331834 - DNA, 310 bp, Zea mays
tccctactctacgccactcgtccttcttcggatcccacaccgatgaaaggataatatatcgagggtcagaataatttctgggtagttattttccataatctcgtgccacaccaacgactatttctactccctcatggccaatgccaatgaccacgtcaagctactcgtcatctacttcatagccccctgttgcagttggtgccaaatgatcgcccccgtgtactcatactgctccagcaagtacccttccgcagtctttctagaagtctacattctactaactgctggaactctcgaacatctacttctt

SEQ ID NO: 331835 - DNA, 313 bp, Zea mays
ttccctactctacgccactctttctaaaaaaaaaaaaaaaaaaaaaaaaaaaaaaattaaaaaaaaaaaaaaaaaaaaaaaaagaaagaaaaaaaaaaaaaaaaaaaagtaaaaaaaaaaaaaaaaaaaaaaaaaaaaaaaaaactaattaacaaacaaaaataataaataaaacctaataaaaaaaaaaccctttaatcacaaaattttacatttctctaaaataaaaaactacttacacaaaactatcattttccatattattaattaactcccctaaatcataattcaaactatcaaaaatctcctttta

SEQ ID NO: 331836 - DNA, 144 bp, Zea mays
gaattcccgggtcgaccgacgcgtacgcctaactatagtatcaagtatgacccagattgacaataatctaccacggccttcaaaaacgttggagattattaatggtactgctgtaagcctgttaacaaagttaatgcgtatgac

SEQ ID NO: 331837 - DNA, 288 bp, Zea mays
cggaattcccgggtcgaccgacgcgtccggagattcatgacgctcacttgttagagcattgcgattaaccgagtatcccggatctaccggcaactgcatatctttgaagcatcacacagtgccctgtggatacggaagatccagctcccggtccttccgaggccaatgtcgccacgatcagcagcatattgctcatactagcagctatacgctgtgaccctgacaaaccgagcttcatctcagccttatgacgacgtctactctaactaactggtgacctgagatccc

SEQ ID NO: 331838 - DNA, 286 bp, Zea mays
  unsure (1)..(286): unsure at all n locations
gaattcccgggtcgaccgcacgcgtccgaccaggcgtacgggaagcccagtcgccgaatgccatccacaatagcctcatatcgaatctgtnagcgtttctagactgccgaggaaaaaggatccgtgcgcggctgatctcactactataagtatatcgcattccgcgagttacaaggacaactgctcgatgtccttatgtttgctgcttggtaataccgatctgttcgctataatcatcgatcagcgtgatgtgaaccactgtttacattgctcgcgtactaataaa

SEQ ID NO: 331839 - DNA, 478 bp, Zea mays
cctactctcagcgaactagctagtttctgtccatttcaactcatactatctggcatgtgatactcatgcttcttattgtgcaactaacatacatactatctcattcagtccagtctattctgtctgcctatctccccagtcaatttcttccattcataccatactgacagtcattgaaccttctcctgcttaatttaccagcagcaaccaactactatccattcagctcagcttaagctggtgtgagcccctgcttaccttcttgacacataccactagttgttgctcgttctaccaagcacgctgcgcctaaacgctggcatccctcttaccaactgcatacaattgctgccattcataccaacttgcttttgacaaaacccagcaggcattctaaccaacatacccatcatttggtggttgcccttcttttaagatttcttaatgagttaatagttcaataattaaaggttttttg

SEQ ID NO: 331840 - DNA, 266 bp, Zea mays
tttgattattccgttcggtgtcgcatactttgccctctgatggcttataacaggaaagcagatcctgaaagtttacgttcctagctactagagctactgacgaatgtggccacacatgcacacgaggatcatcacggctctgatggtttaccagaccaccatgatccgcttcatgtccctgaataagttcgcctactccttcattctaatgcccctgcttacatccagcataatcttagcctacgtatgccacatgcacttttacc

SEQ ID NO: 331841 - DNA, 106 bp, Zea mays
gccacgcgtccgctgtttggatcattatataacaacatcgcatatgtcttgtgtatgtaacattttttagtcgggaactgctaatgctcagttaagaagtggcgac

SEQ ID NO: 331842 - DNA, 78 bp, Zea mays
attccctgctcgacccactcgtcctaaaaaaaaaaaaaacaaaaaaaaactaaactttaacacaaaaatacaaataaa

SEQ ID NO: 331843 - DNA, 101 bp, Zea mays
attcccggctcgacccactcgtccgaaaaaaaaaaaaaaaaaaaaaaaaaaaaattttaaaaaaaaaaaaaaaaaaaaaaaaaaaaagaaaatatttaaaa

SEQ ID NO: 331844 - DNA, 201 bp, Zea mays
  unsure (1)..(201): unsure at all n locations
taccggtcttgaattcccggctcgaccgacgcgntacgtcacgccgtccgnccactcttcgttcaagttttccgtaaccttgtccaatcatgggcatgggggtgtggccattttggaaaagtggccacttttgtttatccagccatttgtacaactggaggccatggttgattcaaaggaccggccgttgttttcttccgg

SEQ ID NO: 331845 - DNA, 409 bp, Zea mays
  unsure (1)..(409): unsure at all n locations
ccaaacccgaactccaagtcgccccgcatctatggcgcccaaggccgagaagaagcccggggcgaagaagccggcggaggaggagcccgctgccgagaaggcgccggccgggaagaagcccaaggcggagaagcgtgtcccagcaggcaagtccgccggcaaggagggcggcgagggaaagaggggccggaagaagggcaagaagagcgtggagacctacaagatctacatcttcaaggtgctgaagcaggtgcacccggacatcggcatctcctctaaggccatgtccatcatgaactacttcatcaacgacatcttcgagaagctcgccgccgaggccgtcaagctcgcgcggtacaacaagaagcccaccatcacctnccgtgagatccagacctccgtgcgcctc

SEQ ID NO: 331846 - DNA, 411 bp, Zea mays
cgcaggcgtcggcgcagtcggcgacagggtctacggacacgggaccgggaccgaaacggcggcggggaacggcggcagtcacgccgaggctggcgtccacgattgcttccagcactcgtccaagcgctcctcgatccgctccatgctgcacgacgaatgcgtcgaaggcatcctctacgggctcaaacatgcgacgatgcatttcatgatgcagctgctgaagaatcccatgtacattgtgtggcccctcctgatgccggccgtgatctgctcctccacctgctgctacgctagccagtacggtatacaagtttgcttgcatcacatgagctgtcacgatgacatgactgatgagatgactcatgaactgatacatgctcatgatgactgtgatgacgaatatcttgactg

SEQ ID NO: 331847 - DNA, 345 bp, Zea mays
ccttcacaaaaaataaaataaaataaatgaataaacgcaacggatggaaggatatcttcgagtaattaacgggaggagatgtagggagagagagaaaccaccagaggcgagcgagcaggtgtgggcgtggcgtgggggaggcgccgaggcggtcgggcccgtagataagagtcgtctcacctcgtcgtcgcagcctcgcatcgcacgagaggagaaggagaggggaagggctagagagagaaacaaaggtggtagtagatgtgagccaccctctttgtatccctcgtcaacttctcctaccaacttctttttcctcccccaccccttccttaccgtctcgcgccc

SEQ ID NO: 331848 - DNA, 95 bp, Zea mays
caaatgcatagttcatacgaatcagagtacacgatgcacacaacttgatgtctctatcgtggtttggaacatgatgaacatgcgaatttcgtggt

SEQ ID NO: 331849 - DNA, 437 bp, Zea mays
gaagaatgctctgaagaatgagccagaggtagaactgtaagcacactgattctgcttccggttcatttttgattgacacttgacagtactggttttatgcgacattaatcatcgcaagtactagaaaatggagaaccgcagcaagactaattacgttcgaaacatcaagtgatgctcatgttgggtcttttgctccagttgttagtcatcaacaaaactagacaccttttgctggtcctctttttgggggtgtaattggatcgtgtaccaagactagcatcatttgcagcaataatactagagtagtaagattttgaatttaaataacttatgtcggtcccttctttcagtattatctatgtcaaatcatcgttcaagtctcttttcctgaggaccagaccttgtttttggttccatgccgtggggtctttctttgg

SEQ ID NO: 331850 - DNA, 215 bp, Zea mays
ggtttctgcaaaaaaaaaaaaaaaaaaaatttaaaaaaaaaaaaaaaaaaaaaaaaaaaaggaaaaatgaaaaaaaaaaaaaaaaaaaaaaaaaaaaaaaaaaaaaaaaaaaaaaaaaaaaaaaaaaaaaaggggcggcccttttaaaggatccaagtttacttccccttgcttccaacgtcataccttttttttagggtcccctaaattcaatt

SEQ ID NO: 331851 - DNA, 130 bp, Zea mays
gacccacgcgtccgggtttctccccctctctctttcttgtagctttgctgtttccgtttgcccccgtttctttcttttgggtggttctaagctttaactaactggaggaagaaagattcagttagaacgc

SEQ ID NO: 331852 - DNA, 322 bp, Zea mays
aaaaaacaaacaaaaaataaaaattcaaaaattaaactaaaaatacacaaaaaaaagaacacgagaaatataaaaaatctcaaaaaaaaaaaaacaaaatatcataaaaaaaacaaaccacaacacagatgtaccctcaaatgcatgtgcaccattttccaaatttcatgccatatcgacaactctattctccactttaccccatgcctatgccaaactattcgccaaatgtccattatgcatcacacggaaataattatcttcacatgcccagtgcatgttcacatttaactgcagcatacgctaacccttaagtttcaca

SEQ ID NO: 331853 - DNA, 365 bp, Zea mays
accacgcgtccgagcgaatcaaagggcgctcgacaagcctttcaagtacagactacagaggagagccgggcagcgagacggctgacgatggggatgagcctcgcccaggcggtggccgcgctcgcgggcacgtgcgcgcggcgcctgtcgcgggcggcgcgccggctgcgcccgcgggacggcgtctcggcgtgcttcttgtcccgcgccatcgtgccgttcctcggcggcggcagcaagggcgtcaagaagtcagtctcctcatcagcatcatcctactcgtcgtccaagttggagaggacgaaagcggcgccggaggatgaggacgaggcggtggacaggctgatgctgatggagatcatgat

SEQ ID NO: 331854 - DNA, 188 bp, Zea mays
cacacttatgctcccacaatgatacttacacaccatacatcacatcccttgctaccattcccactattgaatgaacgaccataaattgcctacttgccaacttccattcaaacaactctatggtgcactcctcttctgcagaacacttctccatatctcactcattggctgacaaaaatcttatgcta

SEQ ID NO: 331855 - DNA, 445 bp, Zea mays
caaagagaaagaagagtccaagcacaagcactactactatcatcatcatctatggcttcgtcatccggctcccccgtcttcaagatccttatcgtcgtcgctctcgtcgctgctgccctttcgtcctacggagcggcggagtacatctgcatccagccgtgctgggagctgccgcactgcgacgcctggtgcagggacgccaagttcgccaagggcggcgactgcgtcgacttcggcagcggcctcacctgctgctgccgtcggtagctagggtagctgcgcgcatgcacagatgcaggtgccagagtgccagtggagaatggagcgtcggtctctctctcgtctcgatcgtgtaagataaatatatggcagatgataatgcacaatacaaataaacgggagaagaaaaaaaatccaaggatctcgcatgcgttggttccataca

SEQ ID NO: 331856 - DNA, 305 bp, Zea mays
aaaagaaaaaaaaaaaaaaaaaaaaaaaaaataaaaaaaaaaaaaaaaaaaaaaaaaaaaaagaaaaaagaaaaaaaaaaaaaaaaaaaaaaaaaaaattttttcaaaaaaaaaaaaaaaaaaaaaaaaaaaaaaaaaaaacaaaaaaaaaaaaaaataaaacaacggacaccacataaaaaacacaaaattcccactattagctaaacgcaatgaaactgtattcatcaacaccaaaaaaaacagctaaatagcgccttttaaaaaaaagaacaatgcaaaaaacctcactgaccaccaaacaa

SEQ ID NO: 331857 - DNA, 192 bp, Zea mays
cccacgcgtccgaaaaaaaaaaaaaaaaaataaaaaaaaaaatagttgtgccttctctgagcaaaaagaaaaaaaaaaaaaaaaaaaaaaaaaaaaaataattgtgccttttttgaccaaaaaaaaaaaaaaaacaaaaaaataaaaaaaaatctagccttttatttgaccaaacaaatatctatcattagc

SEQ ID NO: 331858 - DNA, 255 bp, Zea mays
gtggaatgttgtttgcttataccgcagttttcgactaaaaaaaaaaaaaaaaaaaaaaagaaaaaagtaaaaataaaaaaaaaaaaaaaaaaaaaaaaaaaaaaaaaaaataaaaaaaaaaaaaaaaaaaaaaaaaaaaaaataaaaaataaaaaataaataaaaaaaaaaaaaaaaaaaaaaaacaaaaaaaaaaaaataaacaaaataaaattaaaaaaaaaaccctacaattacaaaaatcaataccaatag

SEQ ID NO: 331859 - DNA, 260 bp, Zea mays
gacccactcgtcctctcagtccaactaccacccatcttaacctttttccaacatcaccatctactaggactaagtcaaatttcacaccttcaatgacactcaataactattatacttcttccattatgaccaactataaaaaacacccacactatctaaacacttacctaaatcaacattctactacaattacctactctacaaataacaacccatcacatccttcatctcagtttactcacaaccatctacttcctatt

SEQ ID NO: 331860 - DNA, 166 bp, Zea mays
cacttcttagttaccatctgcagcgacctttctcgggggtgctagccggatccgcgatcggggaaatcccaagctgctccacaggcccgagggtcggtcgtcctcatggcggggatcctggcgtgggcggctgacgtggtcggccgggccggtgtcatcgacctct

SEQ ID NO: 331861 - DNA, 430 bp, Zea mays
  unsure (1)..(430): unsure at all n locations
cctcaacacgctgggcatctcgctggcgctcatcgactacgcgcccctgggcgtgaaccggccccacatccacccgcaataacaacgacaaaaacgacatggactttaagttaattttcaaagatttcgtaaaaaagttaattttcaaaggtataatgatagtgttataattactttctaccttcgtggattgtatgctgcatgttatattttgtctcaggattgtgcgtattacgttttgacttgatgctgtagatgctacaacagcaacctccacgtctaaaaatatatacattgttatgcgctatcctttgaaactttataatcacattatctttacaactaattaagtactcattgtaggcgtncacacgccgcgagctcggggcgggacagcctncacggtggcggggtcacgctgaacagggag

SEQ ID NO: 331862 - DNA, 128 bp, Zea mays
aaaaaaaaaaaaaaaaaaaaaaaaaaaaataaaaaaaaaaaaaaaagactgccgctctaggggatcctagcttacgtactcgtccatgctacgtcataactcttctatagtgccacctaaattcaata

SEQ ID NO: 331863 - DNA, 253 bp, Zea mays
cggacgcgtgggtagaaaatgtatggatataatgtaggagtatcagcctatcaggagtaggtatgagatgtaaagctcagcccgtagtttagatgtaaagttttgtactgagtataaaaaaaaaaaaaaaaaaaaaaaaaaaaaaaaaaaaaaaaaaaaaaaaaaaaaaaaaaaaaaaataaaaaaaaaaaaaaaaaaaaaaaaaaaataaaaaaaaataaaaaattataaaaagaaaactaaaataaattaa

SEQ ID NO: 331864 - DNA, 281 bp, Zea mays
gacttatgtccagttcacatggtacccaacttacatgaactcaacatttcggtgggctgaacaaacacaagctcatgacattattgatccgtgctatgacttgacgcagatgatagaactgcatgctctgctaacgatctagcgacggagactagctattctatgatggagatagtctgagaattacagcttatcaccagactatgagcttagtccttgagcacacgatcgtgctgtgaaatgcgcgtaatatagcgctcatactctgctgcgatacgaaa

SEQ ID NO: 331865 - DNA, 87 bp, Zea mays
cattgtacttgtacctcagaagtcagcaagactgcgacaataattgcatcgcgtctgtagacagcggaatgcatgagtagctactgt

SEQ ID NO: 331866 - DNA, 256 bp, Zea mays
aaaaaaaaaacaaaaagccaacacaatcaaaaccaaaaaaaaaactacattccggtgggaatagttatagcaagggaacagacacgcgcgtaccaactccatgatgaaatgtaccatcatcaagcaaaaagctgcaaatactgcagggaagatcaggaacacccaacaaacaaccgctataggctatagtggtcacatttctacatttctgcacatcgatcgttacaggtttgcaaccccacaccccccaatgtaa

SEQ ID NO: 331867 - DNA, 240 bp, Zea mays
aaaaaaaatacaataacaaaaatttaaaatttaaacaaaaaaaaaaaaaaaaagtgaaaacttaaactaataacaaacaaccaacataaaaaaaaaaaacctacactctaaaataatactaccaacaatacacatcctcatccttaactgaccttttctactcctccttcttttttactttccctacattatagtattcatatctatccacctctctccatacatctacatcttatatct

SEQ ID NO: 331868 - DNA, 429 bp, Zea mays
ctattctctctgcatttcaaccttctgatcctcctcttgactttcctctcgcggcagatatataatgatctatattcagaccaggacatctacatgacactaacggaacgaagcactggactcctgatgctatgcatcctatgcccataattgtcatttatactgcactaaccgattgtcgcccacctacacataagtcagcagtgcacaaacgttgctcaatctatactcgcctgcagcatatacatactccattgctacgttgtctacctgttgatgcacctcatgacccaccctcaattacattagccaacggacgtgtaccactaatacaaatcctaataggacaagcacgtcgttatcagattgctcaacggacacttctggctcgaatgctacatcattctaataggcatgctgtaccagtac

SEQ ID NO: 331869 - DNA, 346 bp, Zea mays
cgcttgttcctgcggcgcctcccgcccacctcctgctggtcctggccctcctcgtgatcctccgccgcggcggcagcaggaggaggaggaggagggataggggtagccggctgtggcggcgcgttgacggagcgcggagacgaggtggaggaggccgacgcggcggacccccgcgggagggccgcggcgtaggaggaggagcagctgctctcgctgaggtggatgagctgctccgccgccgcgagctcccgcgccgtgaaccgcgccgggttcggggcctgcgcctcgtcggccatggccccgcgcggtggactgaggacggatcgatcgacgcaaacgccggcgg

SEQ ID NO: 331870 - DNA, 307 bp, Zea mays
aggaataaaagaagcctgcaacccacctaaatacagaaacagaacctactaaacgtaggacaacacaacaaaaacaagaggaaagaagaagaagaataggcgtagacggcaagagacagcacacaaacaaagcgccggccactctgtggaccccgcctacgcgtccgcccccaccccacagggcctccttttctagagggggaccaaattctctcgctcaggccgatgagctacaccgtcgtcacgggctatcccgccgcgtaccccaccttattccccgcctgcgcctcccccgatatggcccctg

SEQ ID NO: 331871 - DNA, 215 bp, Zea mays
  unsure (1)..(215): unsure at all n locations
cagaattattattatttaaaaaagcaagagtcaaatactagcacaatccattacatgacggactgtantgcgcccatgtatatatatggtactagtactgatacaataacagtacgtagcctctattcggctcatgttcattgacatggcttattctagtcccactgaaaccatacgcacacgggtgggcccgaactacgttctacgtcaattac

SEQ ID NO: 331872 - DNA, 300 bp, Zea mays
aattgatagccaccagcttgtatgcaagcttgccatagatgggaagaaggggaaggaggggcaatcacagcaatctggacctggcaaccagcagcagcaacagcaacagcagatgctgccgggtggtccgcaggaaattcagggaggcctgggccttggttcacaaatgggagcacagtatggtggccctgggagtggtatgccttcgtttggtttaggtggcgttggcggtgggtttgggggtccaaacccttatgctaacatgccatcttccatgggtggaggatgcgcaagtgggtt

SEQ ID NO: 331873 - DNA, 427 bp, Zea mays
gcgcggtcgggtcagttgccaccggccctgccacgacgagaccaccacggcactgaggtgagctatatccatacgtccgctagtgaatactagtgtgctagggaacgaatagaagacgcaatgaaaccagtaaaagaaaagcttgtgttgtcctgtcgtggcagggccggtggcggtgagcgggcccggacctccctgctttctggggcctgccggtcgggtcagttgccggaaatgcccccgtggtagactagtagactgtagaccggagcaaaatcttggacttgacgatggcgtggaagaacaccaagaaatcaaccccacagctgctttgttgtcgggtcgggtcggatccatctgcgggtactacctgcgtccagctattcatatgtacgtgtacaggtttatttatttacatacaacattt

SEQ ID NO: 331874 - DNA, 369 bp, Zea mays
aaaaaaaaaaaaaaaaaaaaaaattaaaaaaaaaaaaaaaaaaaaaaaaaaatagggaaaagaaaaaataaaaaaaaaaaaaaaaaaaaaaaaaaaaaaaaaaaaaaataaaaaaaaaataaaaaaaaaaaaaaaaagtgtgatatctttttagagtttcaatgttttaatgatgttaaatataaactaatcactttttatttgcgtaactaaatttaaattaatttgcggttgtttaaaaaatttgttaattggaaaaactttgagtttacaaaatttaaccgcttttaaaaaattccatttttactgaattgaggtattaagaaaaatgcccaaattgttgacttttacaaaaatttgaccaattta

SEQ ID NO: 331875 - DNA, 275 bp, Zea mays
aattccgggtcgacccacgcgtgcggatacatcgaggcttatgacaaatcaaagatgtaggaagtggaggctgatcatgtgcgtgtatgtgttggagcgcgcggatggtctactaaatgatcccaggattgtttcatgatacttgttgtcatcacatgtttgagcaatattactacattgttgatctactagttccttacgatatttgttttcgttcctgcctatggttgatggaaaatgctattgtgctaactggaaaaaaataaaattataat

SEQ ID NO: 331876 - DNA, 180 bp, Zea mays
aaaaaaaaaaaaaaaaaaaaaaaataaaaaattaaaaaaaaaaaaaaaaaaaaaaagaacaaggaaaattaaaaaaaaaaaaaaaaaaaaaaaaaaaggccgtccgttttacaggttccaatcttccttcctccagcatgcaacgtcttacttcttctatagtgacaccaaatttcaatt

SEQ ID NO: 331877 - DNA, 361 bp, Zea mays
cctttcccctccagtaggtagagtggcgagaaggatggtggccgtgtccacggcggggatggcgagctcgctgctcctccggccgcgcgcgctcctgccaccccatccgattcctagctccagccgccggccattgccagctccgcgtgtacaactacaggggagcatccaggagaagccgggccttccggcgaaaagcgacggcgagcggaggcggccggctgggacgcggctctactcgctggcgccctaccctctgctgctggccgcgctgctgccgggagctgagccggtgacggccgtgttcgcgccgttcgtggagctggtgaagacgtgggatctccccggctggctcgtgcac

SEQ ID NO: 331878 - DNA, 407 bp, Zea mays
caggcataaaaattggttgttagtaattttattagtggtttttggatggacgtgtgatatttatctagctgtacagaataaatactatagtgatgaaaatgaactgaatgcatgcatactgatgaacaatcttgtaacggggcacagtcctactgcctattactcactatcagtatggctgtacatacgaatttaacacatttgtctctcattttgtggtcgaaaactgctccattagtaactttgcatacctaaagcaagatgttctcatctgttattttatatagcattattttgtaatgttatgatggaatcaggagtgtaactgttaattacaagtatgttctgatgccttttgaaatccattgaagattttaatagaaagtgaccatctacaaagagtgtcg

SEQ ID NO: 331879 - DNA, 359 bp, Zea mays
  unsure (1)..(359): unsure at all n locations
ccggttcggaattcccgggtcgctcttgcgtccgnccacgcgtncgcgcagccctgttccaatcgctgctgtccaaggcggcggggcgggccatcaacccggtgcacggcgcggtggggctgcttgggcacggggaactggcacctctgccaggccgccgtcgacaccgtgctgcggggcggcgccatcggcccgctgccggagcttggcgccgggacgggccacctgtacgggccccccgncgncaccgacaagcgcgccggcggctggtccaccttctccacggcgaagcgggcgcggaaggccgncgncggtgccggggcgccgcccgcggcggaggcggcggcgtactgcgacct

SEQ ID NO: 331880 - DNA, 106 bp, Zea mays
ggttcggaattcccgggtcgacccacgcgttcgcccacgcgtccggttccccgagtacctaatgtgatatcaagactcaattctcgaatggaagatatatgtttgc

SEQ ID NO: 331881 - DNA, 151 bp, Zea mays
ttttgttttttttttttttttttttttttttttttttttttttttttttttttttaaccaatcccgaaatgaacttttcatttaaaagggagaaaaagggccctattccgctgcttgattcagactaccaatttctgaaaattattttgca

SEQ ID NO: 331882 - DNA, 215 bp, Zea mays
acaaaacgaacatactaaacaagtcttatggcaggaagaatccattgacttcggcgcgatattctccgcccatggtggcgcttatcttcaaatggctataaagatagcgacaacgttagattatcgcaagataaccgccgtattactgcggctgctatgggaataccccgacatgacagctatacaacatctatggcatgagctccgctcctcca

SEQ ID NO: 331883 - DNA, 239 bp, Zea mays
gaaaaaaaaaaaaaaaaaaaaaataagaaataaaaaaaaaaaaaaaaaaaaaaagggaaaagggcaaccggcgtacgggatccaggatcccatcctccttcctcctacatgctacctcttatatattgtatcctgaaaccaatttacagtccactggccgacatcttacaacactggtaactccctaaacctctcccatctccaatcttattcgcctcataccacatttccccttttgc

SEQ ID NO: 331884 - DNA, 226 bp, Zea mays
gctaaccccgcaaccctcttacaactacaacaattgttgccctttgtccaacttgcgttgacagacccagcggcctgctaccaacaacacatcattggtggtgccctcttttagattgcttattagttgtaattcaataataaagttttttggatgatgtatgtggccaaccagaaataagaagttacatttccaaaaaaaaaactaagatatacaacttatgaat

SEQ ID NO: 331885 - DNA, 197 bp, Zea mays
tgaatgaaaacggttaatggataaaaaaaaaaaaaaaaaaaaaaaaaaaaaaaaaaggaagaaaaaaaaaaaaaaaaaaaaaaaaaaaaaaaaaaaaaaaaaaaaaaaaaaaaaaaaaaaaaaaaaaaaaaaaaaaaaaaaaaaaaaaaaaaaaaaaaaaaaaaaataaagaaaacctttattaaactgaaattaat

SEQ ID NO: 331886 - DNA, 63 bp, Zea mays
aaaaaaaaaaaaaaaaaaaaaaaaaataaaaaaaaaaaaaaaaaaaaaaaaaaaaaggaaagg

SEQ ID NO: 331887 - DNA, 198 bp, Zea mays
ggaattcccgggtgcgacccacgcgtctcgggatgtgcaaacactagcttagatgctgctctttctagcatgagaacctgagctgtgaggtgtgtggtacaggattttcctccgtcgcttcttctatctccattcttacttggcttgctgagttgcccggcgagcctgacgaatcgatctgagcagcaccttgctgtt

SEQ ID NO: 331888 - DNA, 201 bp, Zea mays
cggaattcccgggtcgtacccacgcgtctcgcccacgctgtccgaaaaaaaaaaaaaaattaaataaaaaaaaaaaaaaaaaaaaaaaaagagaaggaaaaaaaaaaaaaaaaaaagggcggacacttctagaggatccacgcttacttacgcgtgcatgcaacctcaaagctttactatagtgttacctaaattcaatat

SEQ ID NO: 331889 - DNA, 63 bp, Zea mays
aaaaaaaaaaaaaaaaaaaaaaaaaattaaaaaaaaaaaaaaaaaaaaaaaaaaaaaagggtg

SEQ ID NO: 331890 - DNA, 284 bp, Zea mays
gttcaatgtggtcattgggccaggaatctagtggttgctgtcggtcgctcgttctagatggattatgggctatggaacctggagtgccgtggtgctgcaaacatctcatgtttcattctgaaatctttttagatgtataatacgtagtagttgaattttctgtaaaaaaaaaaaaaaaaaaataaaaaataaacaaaaaaaaaaaaaaataaaaaaaaaaaaatatataataaaaaataaaataaaaaatagtcgttctttttaaaagaaccaaaaattaaaag

SEQ ID NO: 331891 - DNA, 79 bp, Zea mays
  unsure (1)..(79): unsure at all n locations
ccgcgggcgccccctccctttccggcgccctnncctctcaaagtaaccnnntccacagnncctctgtcnnngcggcatc

SEQ ID NO: 331892 - DNA, 190 bp, Zea mays
aaaaaaaaaaaaaaaaaaaaaaaaaattaattaaaaaaaaaaaaaaaaaaaaaacaaagaaaggtttattatccaagcttacaaacacaatcatgcaacatgctatctacttccatatactcacctaaatccaaattactgtccgttgatttacaacttcaaacctgggaaaaccctatccttacccaac

SEQ ID NO: 331893 - DNA, 437 bp, Zea mays
  unsure (1)..(437): unsure at all n locations
ctaggatctttctctcctccactaaaagctccatgggagaggtcggctggggcttgagggctgaaaccatggagtttgccgagtgccagggaggagctgctgggagccaagacgacaatgccatggagaggggcaggggcgagcgctagggaggagaggggctcgatgaccagcgagctgggagaggcaccgagttgcaggagggggtagggacggtcggcgcagggagctctggcgagcttggcaagactgcaggcttgggggcgacgacagccatggagagaggagcgcgagcagggaggaatccaaggggaaatcgccatggggggagcagggagatgaggtcgccgacctggcctggtggggtttctgcattcgccacgacagggagaaatcccagaaggaagaccacgtggnggagcagccgtccgtgcggt

SEQ ID NO: 331894 - DNA, 236 bp, Zea mays
ggaggatggtgaccaggaggatcggaagaagaagaagaaaaagaacaaggaaagcaaggaggctcctgctggtgaaggtgatggtgagaagaaaaagaaaaagaagtctaaggaggtcgaggaagagcctgttgtggctgctgcttcagaagttaagaagaagaaaaagaagtctgacgctgatggtgaggatgtcgcaatgcaaaccgaagaatcaggtaagaaagagaagaaaa

SEQ ID NO: 331895 - DNA, 445 bp, Zea mays
  unsure (1)..(445): unsure at all n locations
gcccagcttgctctctctgctcttccccctcacacttctccctcgctcatcactcatggtcgcacagtcacactacagagcccagagccctagtgtcctcccctcccctccccatggcccctcaccgcctcctccagcttctactgctcctcgccgccgccatgaccaccgcccggtcccagacccagtcaccagccgccgcgccatccacctcaccctcctctaccgccgccgccgccccaagcccctcatcctgctcctccccgtcgtcctccaaggacacccacatcttcacctcgcccgccgcgtccccgtcctcgtcccacgccggcgccaagctcacctncccggccgncttccccgcgcccacccactcnccgaccccaccgacggcgactgcggcgctggttcttctggccgcgtcgctgacggtgggtccgatggt

SEQ ID NO: 331896 - DNA, 366 bp, Zea mays
cttcgttggcggcctcgcctgggccaccgacgaccactccctcaacaacgccttcagcgacctacggcgaggtcctcgagtcgaagatcatcctggatcgggagacgcagaggtcccgcggcttcggcttcgtcaccttctccacggaggacgcgatgcgcagcgccatcgagggcatgaacggcaaggagctcgacggccgcaacatcaccgttaacgaggcccagtcccgcggcggccgtggaggcggcggtggcggatacggtggcgggcgccgtgatggaggcggctacggcggtggcggtggaagctacggcggtggtcgtggaggctacggcggcggtgggggatacggtggtgcaaacc

SEQ ID NO: 331897 - DNA, 281 bp, Zea mays
gcttgtagcagtgatcgtgtaaacgtgtattctgtctgttgttcttggctttgtcagctgcaatatgttttggaattaaaatatactactactactactaaaaaaaaaaaaaaaaaaaaaaaaaaaaaaaaaaaaaaaaaaaaaaaaaaaaaaaaaaaaaaaaaaaaaaaaaaaaaaaaaaaaaaaaaaaaaaaaaaaaaaaaacaaaaaaaaaaaaaaaaaaaaaaaaaaagaaaggcaaacaaaaaggaacccaaatttaatccacacggacttggaaa

SEQ ID NO: 331898 - DNA, 321 bp, Zea mays
cgaagacgcctgctcgccgccggctggaaaccgtcaagccactgcttgagaccttgggcctcctgcactagcagcttgcgcgccatgcagtaacggcgggcgtgtggtttattacaaagggcaaatgcaaatcgagttgctcaaactcaatactcctactagtaaaagtaatgatgagatagatttgatagatgggtactcgaatatgctacagtacaattaatgcatctcaggcgatcaagcagtaattaaaccgaaattaatttaagcatcccctctttgatcgaaaaacagaatatgatgatataaaaaaaaagaatg

SEQ ID NO: 331899 - DNA, 286 bp, Zea mays
cccacgcgtccgaaaaaaaaaaaaaattaaaaaaaaaaaaaaaaaaaaaaaaaaaaaggaaaaaaaaaaaaaaaaaaaaaaaaaaaaaaaaaaaaaaaaaaaaaaaaaaaaaaaaaaaaaaaaaaaaaaaaaaaataaaaaaaaaaaaataaaaaaaaataaaaaaacaaaaacacaatataaaacccttatattatccaccaaaaacttaaataaaaacatcttatattcatccaataaataaaatttaaaaggaacactgtaaaaaaacataatcattataaaa

SEQ ID NO: 331900 - DNA, 81 bp, Zea mays
ctgcaaaaaaaaaaaaaaaaaaaaaatttaaaaaaaaaaaaaaatataaaaaagaaaagagaaaaaaaaaaaaaaaaaaga

SEQ ID NO: 331901 - DNA, 412 bp, Zea mays
caaaaattgaagatgaacttactgaagaaagagccaagcatgacaatagtagtgatgaggactcatgtggtgattctggcggaaagaacaagaaagcaaagaagactcgcttcactcatgcagtaaagggaaagggcaaatccaaagtctgatgcttggtgtacatagtcggcagcattttgacaagaaagcgtccattaaccagctcctgatgcatctccttttgtaccatcttgccaactccctcaccccccccagctaaggtgctgaagacccgtatgaaacgcatgctgatagaccccatagttgtctcctgcatcaatgctcctaaggagttagccagttaggtttcggactcttttgaatcctgacatgcttatgatcacttgtcatttgtcaacgaggcctttta

SEQ ID NO: 331902 - DNA, 378 bp, Zea mays
gccaaccctgtttggtttgattattatagtactggttttccaacatacagttcactagcatgtgttagccatgagttggaccatgtgatttccccccactccactccccccccccccccccccaaaaaaatgatcttaaggtattaagttttaactcagtctcccacatggcaaaattcttgtctgaattttctttaaaaagtgcacttttacttttaattgtacagaatctggagaattgtagagtatcaagttaattttgttctgtttaagatatgtaagaaagtacataaatgtactttaaattggtgaatattttgtttatagaaagacttaaagcttcaattttgtgttgattttttagattgataccatttt

SEQ ID NO: 331903 - DNA, 417 bp, Zea mays
ctcttttaaaatgtcgatgaattcaatctgtggcttaaatatctcgtcagaacagtgagcttgctgagatgtttcatctcactcttgcattactcaatgcaggtgcttgttgctcatcaaggggagcgggaagtagcagcacacccaccttcattctcataataatgctgtccagacgcagccatgatctaattagaaacttcttgtcaaaggatgttcgttcttaactagtcgtgcgcactgattaattcagttcatgttgatatggttgtcttaccattgctagcagatcattaatgtctgatatgttggcttaacacatcttgttggatgaagttaatacagcctgcactgcaacttccgcactctcgcgatcgtgtggaagacgtgggcgccgttgagggtcaaaatcttctt

SEQ ID NO: 331904 - DNA, 66 bp, Zea mays
aagaaaaaaaaaaaaaaaaaaaaaaattaaaaattaaaaaaaaaaaaaaaaaaaaaaagaaaaagt

SEQ ID NO: 331905 - DNA, 410 bp, Zea mays
ccaacgcataacaaactgaacgggtcttccaccaagataacattactaaacagtatggtggacgcaattaaatgctaactcccgactagaacactaaggaaacgataaccatagctacacagaacttgagcagtgctgtgccacccgtaagcacgcaacacagtccagtatgtagccgatgttgtagacgttgattccgaccagaaagggccaggtacgacaccagagcaacctgtcaagcgaagggcacacaacctgcgactaggactgagaactctgctgcgaaatgcaccgagacaaggaacacccacataacagatattgtgttgtcgcgcatcaaatggggcaacacatgatccctagctagggtaactcgagctattacgcagactgggctaactcacgtacga

SEQ ID NO: 331906 - DNA, 329 bp, Zea mays
tcggttttggggcgcgtcaccgtccctgtttgtttcgttgggtctgatgtgtgcggcggtcgcttggctgtgactcggaggggtccaagggaggtgggacgtttttcggtcgaagcggaaaactagcgggaatggaagggcgaggcagtcggcaggccgagggcggtggcgccggataccggctggtgccggtgcacccaaagtgcgacaatgttcgttgccagaagctgcaccgcctacttgcgtctacgtcatgcgagcggatgctggcgccactctgcaagcaaagatagatgaattcaagcccaatctttcagatgatagctgac

SEQ ID NO: 331907 - DNA, 428 bp, Zea mays
tggcttggaacctttgggctgctttatgtgcttgtaatcacggaagacgtctatctggtcccgtcagactctgataacgatatcgtgcccgccggcgcccccgacggatacggaggaaaagcagctgttaaacctcgcgtaaaacactcatatagagaagcctctaggagcgaagttcacgtagtcggcgattcgggcgtcgtcgcttatagagtccatcctagaacggacgaaacgacgtgaggctaaagaggacggtgggaatcctaagtatccggagacaagacaaactagcccagcggtacaacagaaggtccaacccggctcttcaaagtaagcgacctaaacgacagatacgacgaccgggtccccgaggagggattatatctcgaccccatcgggttaaaccgcgggagcatagttcgcgc

SEQ ID NO: 331908 - DNA, 103 bp, Zea mays
cgcacacgtcctgagatggctaccatttatgatcaacacctatactgagagggttgccgtcacttggacactgtccatcacttacatacatcaccttacacat

SEQ ID NO: 331909 - DNA, 424 bp, Zea mays
aattcccgggtcgacccacgcgtgcgcccacgcgtccgcccacgcgttcgggggtcgtccgtggagggtcaccggcgggtagagatagcaggctatgcctgagcacaaatgtttgatataatccgtcccacgatagcaagaaaatgatacgcgatttctgagcacaaacttttgcactcagatgatcgtgcaaacagttagcattttaagaaaaatgttgcagttcaatgtaactgcaggaatgtctctgatgtagcctcttcgatgtggcagccttaacaatcgatgtgctacagttactctgcctatgtatttactatactaccttggccttgtatatccttttgatgtaagcgcagctggatgctgaaccccccggaggctgttagggacaattacaaaccgtcataatttggcccagata

SEQ ID NO: 331910 - DNA, 177 bp, Zea mays
tggcctggaacctttgggctgctttatgtgcttggggtggtgcgtcgaacttcccgtagatcatcgtcggcacagagttggaggacgcggtagaatgtccgacggatcatgggccttatgtattgattacgctacggttcgccttcggtatatccacgaccgaattaatccaaagcg

SEQ ID NO: 331911 - DNA, 348 bp, Zea mays
tttggtctgatttatgtgcttgtagagaccgacaaactagtgaataaacctcctctccatcgggacttcgataagaaggaacacgcatcgtaatcgcatcctaagttaagattgttagaagtcaacaaattattattagtcttcttggggatcccgttcaacgggatcggggccttcggcgtcttaataaggttattggtgtaagttttcttattttcgttataagccttattgtttttgttctacgtattcttcttcgtatttacgggaacgtttttcaggaccttcttatttttcacgggcggcgcctaattcttggtgttcttcttattgctagccgtaaacggc

SEQ ID NO: 331912 - DNA, 397 bp, Zea mays
tggctctggaacctttgggctgatttatgtgcttgcgctactagtacactaggcaatcctcgcctcgataagaagctagtcgtcgcgaatcggaccgacggttgcgggaagctggcggcccgcgaggtagcaactaaggaagaagccgcgaaaaaggcctctaaaataaacgcctaggtctccgcagaaccgaatgcgactaagaattctgtcggcctagtcgccgtcggtgtctccgggggccctaacgtttacgtaagcaataccgcggtggttactcctaccgttatcggctaggatttcgtatagaatgcggagagcctttagcgcactattacgccggaagtcacaaacgacggtaaagactcgtatgctcttgccatcacgttactcaccg

SEQ ID NO: 331913 - DNA, 403 bp, Zea mays
gcttggaacctttgggctgatttagtgcttgtttatgtgcttggcccgaggtaaatacgcagagagagaggggctaatgggtatcggagtaaagaccagtcgagaagtcggtcgtagctaggagcctagagggtggtatactatcggacgttgtcgataaagcccgaactcctcacgtaatgaataatgagtcgcgtggcgtagcccgcgacccttcggtaacctgccctcacgcgaccctattagttttagttctattgttgagcgtcctaccccccccacggccctctacttcaactactactgggaattaatcaacgaagtatcgtgtgtttaccccttttacggccctctcgcaactaatcagaaacgactaagcattaagtagcgcataacgtgacgt

SEQ ID NO: 331914 - DNA, 302 bp, Zea mays
tttgggctgatttatgtgcttgtttatgtgcttgtccggccttactggcttggagaggagaagtcagtcaatcagtaggagtcgcgccggcgcgcgcgcgcgcggagggcagtcgtagtcggggtcagtcggaaaggctgggagttacggggaggggttgggcggagtcgaagtggactgagaataagactaattgttaggctattcctgttaagtgttgtaatggttcgtctaagaaggtgcatgagtctcaatagtctcgtgatgttcaagctgtgtctactgctgcacttaattgtggt

SEQ ID NO: 331915 - DNA, 410 bp, Zea mays
cttggctggacctttggtctgatttatgtgcttgttacttctcgttccgctgactacttactgattgttcttcgtctggtcctttatgtttggcgttcgtgccgtatattagggaggagtcttcttgattgattggttacgagtcattaggtcttcttcttgggtattctagttcatttgttgttgggtatggttcatttcttgttaggttagttgtaggtgcatttgttgttggtacatggtgtgttgttatttacggttgttggtgggcatttctttttgttgtagtaggatctcaagggtggtaatgatggtccttcgaaaggacgtccggttgtctctcgtcgtcgtcgtacgtctgatacgcgtcctcgagcctgctgctaggggtcctaggtatggggacggtg

SEQ ID NO: 331916 - DNA, 247 bp, Zea mays
aaaaaaaaaaaaaaaaaaaaaaaaaatttaaaaaaaaaaaaaaaaaaaaaaaaggaaaggaaagactgccgatctataagcatccaaacttacatatcgcgtccatccaacattcataatatattcaatcgagaaacactaaatcaaatacgattggcacgtcattttacaacgcacgcactggcgaaaaccactggcagtatacccgaacttacattgcctttcaccactattcccctttcgccag

SEQ ID NO: 331917 - DNA, 382 bp, Zea mays
ggcttggaacctttgggctgctttatgtgcttgacctgactcttctttactattcctactgctattctctgatggtagatcagggggtaggtttactctaattggtggtagttcagggtcctactttttatttttaaacttacgttgtctaggccggagactaacgcgcgttcgtctgattctatcggactctagcttttacgctgcttcctcatcctctgtgctatcccgaccccgtctctcagcccgaccccgtccttaccgcggcgaccagcggaaacccctctaacggctagagagggctaagccggcggatccgtattttatggaggtacggacgccgagttcgcctctgaggagcgttcgtacttgggaccactat

SEQ ID NO: 331918 - DNA, 70 bp, Zea mays
ctttgctgatttactccttgaacaaaaaaaaaacaaaaaaaaaaaacccaacccaaaaaaaaaccaacaa

SEQ ID NO: 331919 - DNA, 410 bp, Zea mays
ggcttggaacctttgggctgatttatgtgcttgtttatgtgcttgtttgtgttggactgcacggagggtaggtggatgaggaggagggacgagctctcctgggtccggatgaaattagaagataccttgttttaagaagagtgtcttactaggcagtaagggagtatagtcttgaaagtatacagacgttatctctggtagcggaaattccagggaagtcgcgaggccgttcttcggagaggacactaacgaacggtccgtggcgaacatcgcggaccctcccaattaagccaacacgtcgcacggtatatctatagaaccccgtatattcgagagtcgcttgataacgatagtcggtttaaagcatgagcatagacgggtcgacggcgcgtagacaaagaaatttacag

SEQ ID NO: 331920 - DNA, 107 bp, Zea mays
ggacctttgggctgatttactgcttggggagtccttcgatatgtctaagtcccctgagcgtgctgatgctgacgggtttgagggaggtgaccaggctagtgatcata

SEQ ID NO: 331921 - DNA, 78 bp, Zea mays
tggcctggaacctttggtctgatttagtgcttgggaggatggagagtgttagtgaggacctacggagttagataaggt

SEQ ID NO: 331922 - DNA, 355 bp, Zea mays
ggctctggaacctttgggctgatttatgtgcttgtttatgtgcttgcggggacgaacttcccgaacttcctacgctagagaaggacggcacgtccctactgccggtctggtgcgtaaaggtcccggaagaagtacctaatagcccagaaggaaccatacgtaataaagttgaaggcgtaacgcactcgcctttatgttcctacccattttagaaggtaaccggagtagtttaagtagctggtatcgtgttagacgtacatcatgtaaaatgttcatcggaagttatcggaactgctgctgcttttggcctcgggcccggataggctttcggaatgcggtatcctaggcgtatgac

SEQ ID NO: 331923 - DNA, 423 bp, Zea mays
  unsure (1)..(423): unsure at all n locations
taccggtttcggaattcgccgggtacgactccacgtcgtgccggtggccaatgctcacaatcnttgaaactcctgtattcaaatnnattggtcaagggtacctttaggtgagttggctgnnctgaaaccctcccaatngnnaaatgactggnntcatggacctcataggtactcttagagtagcttgagactatgactgttattgggtacctctgtacaaatgtattccgcataaacgctttaaacttgagggcaataacttagtgtgtcgtatctcttatttgtttgttctctttcagacgattacctagaaagcgctagctanagattcagagctcgtaaatgccttagaaatgccaacatgtgctagaattcgtgtctagtaaaaataaatacctcnntctcagttaagaaaataaaaag

SEQ ID NO: 331924 - DNA, 275 bp, Zea mays
tggacctttgggctcgatttagtgcttggtaggcccctgccccatttaccccggccctccggccgttataccactcaacgattcagtcggtacatccacaccgtaacagtacactccgaaactcggaacacccgattattattcttctagtcattcggccgtacgttatagactcgaaacctcgaaacgtcgcgatcgcgatcgcgaggcacgaaaaaatagcgcaaacaatgtggccgttcatgcatacgcgcgataccccacatatgcgtaag

SEQ ID NO: 331925 - DNA, 373 bp, Zea mays
  unsure (1)..(373): unsure at all n locations
ggccctggacctttgggctgatttatgtgcttgtttatgtgcttggagtccggctctcccgttacccccgacggttacccaggagacaaggcgttaagccatccgaaagtcaattcccccagtaatacaacgaaagagttctctcctcggctcagtttctaagaagtaacaaagaacgtacatcgtctcataaataagcacacctcagaaaacattaaataatccggattaagcggcctgatagtagccatcgtcaccgcagccgacggcaaggatacgcggacagtaaacgcangtgatctcagagtcgccgcgcgcgaaagaggtctcgtcaagtagtctatcgccgattacgagttttacgaaatcaacg

SEQ ID NO: 331926 - DNA, 391 bp, Zea mays
tggacctttgggctgatttatgtgcttgtttatgtgcttgggatgcgttggttaatgatgagctggtgtctaagaaggtggcggtgtattagtttgcgcttgctgttactgaggttagtggtctgtatccttagcctcatcttgagggggctcctcttggtaggcgtgggatggagtcggattatggtgctgtggtggctggtcatggggctattgtggatggtattaagcatcggtcggctaagaatctgcggggttttgagcggggtgagaaggggcatacttgtacggtgtgtgatgcggttgttaaggagggatatcgtggtactgttacggaggtacctcatcgtgctaagattccgtttaattttaaggcttatgttgctgctca

SEQ ID NO: 331927 - DNA, 202 bp, Zea mays
tttgtctgattagtgcttgaaaaaaaaaaaaaaaaaaaaaaaaaaacaaaaaaaaaaaaaaaaaaaaaaaaaagaaaggaaaaaaaaaaaaaaaaaaaaaaaaaaaaaaaaaaaaaaaaaaaaaaaaaaaaaaaaaaaacaaaaaaaaaaaaaaaaaaaaacaaaaagcaaaaaaaacacataacaggcaaaaacccaaaaa

SEQ ID NO: 331928 - DNA, 338 bp, Zea mays
ctttgggctgctttatgtgcttggaggacgtagttaataatcctgtctgcggctatcatattaccggtaaggagaccgccgattcgcgttccgattgtactaggaagtccgtagacaaccgtatcggctcttagggtccttctgctcctaatgtcgccggcggaggaatgggtctcgggtccggcctctcttcttcggagtgttcgctcgccgatcacggtaagaagcttaagtctggccctattgcgcatttacttttttaggcgcttatacttgcggccgagttacataatagcgcttcgcttatttatctctcttctgagtatatcgacgccgtc

SEQ ID NO: 331929 - DNA, 294 bp, Zea mays
ttggcttggaactttgtctgattagtgcttggatagatcggaatatgggtttaccatccctatcgtacggccttagtggctagtcttgttgcgcgttggtaaggccagccagcaagggcatatcatatttatactttactttactttacgtgcgttatgatgaacgaaaacatcagttcgctagatctctctctcgttgttaacactctctcgtcagttctcgccattctatcgatgattactaattaccagctctattcggatgtaaatcgtaacagtcaatcggttaatctg

SEQ ID NO: 331930 - DNA, 348 bp, Zea mays
tttggtctgatttatgtgcttgaaaaaaaaaaaaaacaaaaaaaaaaccccaacaaacaaaaacaaaaaaaacaaaaagggaacgggccaaccaaaaaaagcgaacacgaaaaaaaacagcacaaacaaacgaaaaaacaaaaaaaaaaaagggttttttttcccaaggggtttaattcctttcttttccttactttattccaaatttttttcaacgggttttttaaacttaaattttggttttttcccctatttttcccattttggaaaattttggggtccttttaactcaatttttccgtaattacctttttccccttttgccgtttaaaactttaaaggtttttt

SEQ ID NO: 331931 - DNA, 359 bp, Zea mays
tggcctggacctttgggctgatttatgtgcttgtttatgtgcttgaccctgtctctgtacgctgtaagttattgacccgcccataggtgtgggagtctttgatgatgatcgagttacgcgtggtggtgtgacttccgttgagtcttgtgagttggtgttgtgttggtctatggagtgggatactcggtagtagaagaagaagtttaagaggggtggtgttggtgggaggtgtctgcctgtggtggaagatgacgaggatcctgaggttgatcctgaggatcccgaagttgatcttggcgacctggacccggagtctggggaaagggtcgatgatgatgctactgagactaagtttcctg

SEQ ID NO: 331932 - DNA, 432 bp, Zea mays
gcttggaacctttgggctgatttatgtgcttgcttatacttagccgcgggggtcaacttgacctttatcgtttaaaatttcattcttacgttcgtctgtatgttcgtggtccttctctagtagaatggcgttataatttagatacccttagcctggtgtagcggtaattgcggaaacggcagtaacggcggtgctagggtcgttaacagcagtggaggcgatgggagtagtggtagcggcggcgacggcaatcggaacgacggaagttccggcatcgatagtggccgtaatagtagtaacggtgacggctttactaacccggacgacaacgctttcggtatctgccgcgtttgcgggaacgataacgatagtagtagaaacttcctcggtaacggttatcggaattataatacatgagggggcggcggcggc

SEQ ID NO: 331933 - DNA, 346 bp, Zea mays
  unsure (1)..(346): unsure at all n locations
tggacctttgggctgatttatgtgcttggaaggacatcaggcatattgaacgagtagagccggttaggagctagccgcccgttcgatcctaagatagtcccttttaggcggtaagtctaggcaaggtaatagtacaagtaccctgtcgggtatacgcggtaagcgtaccgcgcacttctacttacagtccataactcgcgcccgctacacacacttgacgttcntaccataggattcggtaatagcagctttaaactccgatttcgtcgggccggattcctctctcaaaacgtcctgacatgagttaagtaaaagaactatagtgaggntagtatccgagtacgag

SEQ ID NO: 331934 - DNA, 390 bp, Zea mays
  unsure (1)..(390): unsure at all n locations
gcttggaacctttgggctgatttagtgcttggactcgcataacacgaagcatctgagtcatccaaatgatgaattaacgttggacgtcgtactggaaaaggagtagggaaacgagcaccctaaatagaagaagcctatcgacgtcaccgaacgtcatcttagaagcaccgggtcgctcttcatagtagctatacccgtaaacagagtcacggtacactccaaatcaagaagacctaaggaggtagaggatgaccgtatcgaagtctcgaactcggacgactgtcacaccaaagtacatctatgttgaaccatcgtatgaaaagaatccgggaagtcnaaggaggtaacggacgacgtcgaaaccgtcactagctccgacttaaataacct

SEQ ID NO: 331935 - DNA, 393 bp, Zea mays
tggcctggacctttgggctagtttatgtgcttgtatagacgacgatgttcaatacgacgctattaccgacgacgttgagtacgacgctattaacggctccgttgagtacgacgctgtaaacgacgacgttataacgctatcgtgatgttgctctgtagaccacgtcgtaatagtagccattacctacgcctaatttaacggttacgatgaccttatttacgcctccatagtaatttcccgccggcgtcgtacctcagacagaaacacccgcgccgcattaaacaacgagccgatacgttactgtgcgcgatctaccaccaccaataacaaaataagcccttccccactaaaaaaaaaaaaaaccaaacaaaaaaaaacaaaaaaagaaacaaa

SEQ ID NO: 331936 - DNA, 314 bp, Zea mays
ggcttggacctttgggctgatttagtgcttggcgggggaagagacgacgtgggagatgcatacggatgcgtcgttgctggcggagtatacagttgatctatggagtggtggtcggcctttgggtgtggtgtgctctcggatggtggtggagaataagtagcctgagtgggtgtcggttgggtctgattctcgttgtttggatcgggagaaggcggtgtgggttactttgggttggatggcgtgtgaggcttctagttatcccaagagttcatacgctgatgcctagtagactgagagtggctaggagtttacgt

SEQ ID NO: 331937 - DNA, 283 bp, Zea mays
ccagctacacccacgcatcctacaaaaaaaaaaatacaaacattataccttaaacaataaacaacaacacaacaaagacaaattaaaaacaaatcaacacctacatcactaacaaacccaccaaaatctaaactcaaaaacctctaatacattaccctaaaaacaaagacttcccagatcaataaccttaccttcacttataaaaccatcatcatccccatcaacatcaactacaccattaaccccctattacactacctctgcatactctgcaaccacaaca

SEQ ID NO: 331938 - DNA, 391 bp, Zea mays
ttgttttttcttttttttcttttttttttttttttttttttttttttttttgttttgttttttttttttttggcaaaaccaaaaagctaaaatttttttacccttgggaaaagcgtttcaaaactggtgacggtaaaaatggccatgataatttttttgcaaaaaaaacccccccctttttacaagaaacgggggtttttcaaaatggcttttttaaaggtttcaaaccccgtgactgcttttttggcaccctatcccaattcctttggcttcgggaaatatgcccattgtacagcccccgcttgggaaaggccttttcccaatgaaaagcatttgccttttgggcctacccatatttgttccggaccaaggggaaaaaaggccccccccg

SEQ ID NO: 331939 - DNA, 171 bp, Zea mays
ggccctggacctttgggctgctttatgtgcttgatgcgataccgacggcggcggcggcggcggaggaggaggaggagtatccgactgcgcgacggcggacgggggcggaggcggcggtggcggagtgaccgtaccgccacccaattccggaagcagaggcggaggcggagg

SEQ ID NO: 331940 - DNA, 334 bp, Zea mays
tttgggctgatttagtgcttgtattagagaggacgccacgggactataccacccacaaattaacatgggtaacgtccggaggatgctcaagacccgcctcccgcggcggcgtattctcgctaagcgatatataaagacccacgaacacacgctcaggcgctttagcgggctaaggtcacggaccgatcgaaatccgcgtcggagtagtccctatcgaacgggacgacataagcgcgggctgcgccggcttaatatccttccgccgtcacgcgaagtccgctctacgggaagaaggcggccataagaccctcgacctcttaacgttgagaggaga

SEQ ID NO: 331941 - DNA, 400 bp, Zea mays
ttggcttggacctttgggctgatttagtgcttgtttatgtgcttgagtagtcctcgtccgtctcggggggaaggagagagagagagtgagagagagactcagcagagaggtcagtcaggcggcttctgaatgaagacgccggtggcgcctagtgggtaggcggcggaggcgttggtggagtcggcggtggtgggtagttggatgttgctgtttaagatgaaggtgctgtagtcggcggggtgtccttcggttgttcttgagttggttgcgcttgcgtagtctggtgattatggttattctgttcatctttatattaattaggtgtcttcttgttttaggctgcctgtggttaaagatgaagcgcctcgttcgcctgagggggcgtcggataattcgggct

SEQ ID NO: 331942 - DNA, 366 bp, Zea mays
ggaacctttggtctgatttatgtgcttgttgatgtgcttgtggatgtgcgggtcgcgcatatggctctttctccttcgctagcaggagagcgagagcgaggtagtgagcaggagataaggggaaacggggaagggagtgtaagggagtgacgtggtggtggtgggtggtgaggcggaggagaatacggtggtgcggtcggccgttaagaatatttctaagactacgtttcctaagtctttgtttgctggtttccacgacgcttgtgcgtgtacgaaggtagcggggacccgtggtagtgacgcgtatcattctagggagacgtgtactgtgtatcctgcggcgaaagaattgacggcgactgggta

SEQ ID NO: 331943 - DNA, 371 bp, Zea mays
ggctggaaatttggtctgatttatgtgcttagaaaaaaaaaaaaaaaaaaaaaaaaaaaaaaaaaaaaaaaaaaaaaaaaaaaagggaaggaaaaaaaaaaaaaaaaaaaaaaaaaaaaaaaaaaaaaaaaaaaaaaaaaaaagggaggttataacaaaggatttaagtaaatgaatgtgcgtaagtaatggaaagatagcaaaacggggtgattaaaaccaaaccaatcggttatgaatcaaaaatgacattgagcgggaaaattagggatggatttaatcaaaaaggtcggaaaaaaaatttttaacggtatatagatcgaatagtaaaaaggtttgtattgactgtttccataaaaagcagtgtaatt

SEQ ID NO: 331944 - DNA, 334 bp, Zea mays
cccacgcgtccgcccacgcgttcgcttcagacaccatcgacaacgtcaaggcgaagatgcaggacaaggagggcattcccccagaccagcagcggctcatctttgctggaaagcagcttgaggacgggcgcacgcttgccgactacaacatccagaaggagagcaccctccacttggtgctgcgcctcaagggaggcatgcagatcttcgtgaagaccctgaccggcaagactatcaccctcgaggtggagtcttcagacaccatcgacaatgtcaaggccaagatccaagacaaggaaggcatcccaccggaccagcagcgtttgatcttcgc

SEQ ID NO: 331945 - DNA, 369 bp, Zea mays
ggacctttgggctgatttatgtgcttgacgtcatctcactcgcatacactcgtcactaagaatcggagatcgtatgtaccgacgggtcgtccgggaatacggacgtagatatcggcgacttctaagccggtcgggatatggactagtctacgatagataccgtataagtcatcgcggccacgctaatcgcggccaagaacggcggatcagtattcgatgcgtcctaatcccgatgttgaacagttgagggaaagtatcgacgccgaggatctgacatccgtctacactcttggaacggatatttcggtttgcggttcttgtaatgttgatgagtcgactgaggaccggcttgcagacgtctctacatgt

SEQ ID NO: 331946 - DNA, 407 bp, Zea mays
ggccctggacctttgggctgctttatgtgcgtggctgattagtcgtgaggtgagactgtgctgtctcctaagtagtcgatggatgttaagtggtagcctatgattgtggctatggataataggacttctaagctggatgcggaggtttctagagctaaggcgaagtcggtggaggatacggcggtgtgtggtgtgtcgctacgtgggtcgggtagatcggggtcgctgttggtgtcgaatttgtggtaggtgcgttgtggttttgatgcgtcgcttgcgcttggttcggatccttttggtgttgatgatgttcgtcctatggggtcgcatttggtggagtagtcgtagtcctagagtctttattcgtagagtactggtggtagctctgagagttcggataattggac

SEQ ID NO: 331947 - DNA, 296 bp, Zea mays
ttggacctttgggctgatttagtgcttggcttctctagcatttcgacgccaattacgttatagcgaagatccttatcggggagaagttcgcctgcgagtccgctctcgacgatgagcggtccaacggcgaacctactataatcgcttaatagtgcggcgtcgtaactaccaaagtgagaaagcctcttagcgtctctctggtcgtcagtctcgtccgcgattatacctgcgaccgggcctccggaatattcgagggcatacccgcccttacgggcgcgcatctcgacggcctacat

SEQ ID NO: 331948 - DNA, 407 bp, Zea mays
ttggcctggaacctttgggctgatttagtgcttggagaatcgggataaggccaagatcaccccttccttcatcgagaagttaacgatgctcgacctacgcgtcttcccgaccgtaatttccttaccggaggtatgtggaaaaaccggcgatcctaccaaaggagcgcccgttgctccttcagatccggaccctctaccctccgagacgaacttgcctattacggctaacggggagttacacttctcggatacgagaggagaatcagacgatatagtagtccctaagaatcctaagaagcggggaggcacagaacccttctcattccccggaagagcatctagtttcatagaaagccctacttacgaatcagacgagaagataagcgttctctccaagcctatggccc

SEQ ID NO: 331949 - DNA, 246 bp, Zea mays
tggccctggacctttgggctgtttagtgctggcgattaggttgtgccggattggacggatgagggcatcgtggctagtgtcggatcttcggagtcgtagttggattcgtggttcggcttgtgggtgtatatgccttgggttttaattgggtctattatcggggtgttcgttacttatgatgtggatcctgggggggtggttgcgcctacgggttttgggtactgtcatgagggtctgtgcctggtc

SEQ ID NO: 331950 - DNA, 428 bp, Zea mays
tgctctttctgcatgtgttgctaacgcgacaattttccctcaatgctcacaagctcctgtagcttgccttcttcccccataccttccatcaatgatagcttcagtatgtgaaaacccagctcttcagccctataggctccaacaagcaatcgcagcaagcaacatacctttatcacccttgttgtttcaacaatcgccagccctatctttggtgcagtcattggtacaaaccatcagggcacagcagctgcagcaactcgtgctacctgtgatcaaccaagtagctctggcaaacctttctccctactctcagcaacaacaatttcttccattcaaccaactgtctacactgaaccctgctgcttatttgcagcaacaactattaccattcagccagctagctactgcctactctcagcaacaacaac

SEQ ID NO: 331951 - DNA, 324 bp, Zea mays
acatcgcttgctttcataatgccaatcctgggtttgactcccatatcggataacacaggtacaggatgctctaacatcttgaatcctattgattgataaaatcatttgcagctcattaaaaatactccaattcgatgagaggctgacactaaagaaactttccatgaagttcaatctcttcattaaattcctccaaaattcctatgtaacaagccattacataggaattgcacgagatttgtcaaaacccaatccttattccccaacgtgttattcctatattgtttcaatcctatactgatgtttggatactacattgtgaat

SEQ ID NO: 331952 - DNA, 253 bp, Zea mays
taccggttcggaattcccggctcgacgccacgcgtccgcgcagaggcagcaaagagaagccatattacagctgcacaggagaggacgagcgcaggggccaagaaagcaccgcccgtcccggtctgtcggtatggtggcggcgatcgcggtggcgtcggcggggctcgggatgctggcgggcgtggccatggccaacaggtcgttgtcgtcgtcgtcgtgcgacggcgccgcgcagtggacgtccgggggcccg

SEQ ID NO: 331953 - DNA, 448 bp, Zea mays
ctgatttgggatttttaggcctgtttgggacgcagaaattggaaaacacaggaacaggatgctctaacatcttgaatcctatggattgagaaaatcatttggagcacaggaaaaatacgccaattcgatgagaggctgacacgaaggaaactttccatgaggttcaatctcttcagtaaattcctccaaaattcctatgtaacaggccattacataggaattgcacgggatttgtcaaaacccaatcctttttccccaaggggttattcctatagggtttcaatcctctactggggtttggatactacatggggaatcgattggtttcctgccctggaatcagtttcgttaccggcaaattttgtgttctcgctctgaccagccgcgaaggccaataacatcttccaacaaggatctactcaacagtaccgcgagctgtttggtgagg

SEQ ID NO: 331954 - DNA, 271 bp, Zea mays
cttgacaggacatgctgcgctatcgtctatacttcttacaactccattcttgtgcacattctggtggtcttcctatgcctgaccgcctttggcttcaaccgcctctactaccgctcacctatcaccacttcaacattcacatacagcttcaactccacatattacattttaccacttccattattactacatatctacaattgaacccacttcaatccttattctctgatcacacttactactcaactgtgctataatacacctgttcctt

SEQ ID NO: 331955 - DNA, 148 bp, Zea mays
  unsure (1)..(148): unsure at all n locations
taccggctctcggaattcccgggctcgacgccacgcccgatccgaattggggatagcctaccaagctnntgtatgcaagtctttgcgcattagnatnngggaagaaaaaggggaagtcaggggggcaatgcgacagcannnatctgga

SEQ ID NO: 331956 - DNA, 428 bp, Zea mays
  unsure (1)..(428): unsure at all n locations
ggaattcccgggtcgtacccacgcagtccgagcttaccagatactcaaggattaatgatctctatcaactctcttggnnaggggcccaagtgacagggagactgtagtcttgagattcaaggccaatgcagatgcctgcactcactaaaggcgaacttaaataggatactcttgcatactcacaactgggcagcctcctggataagaaatcaacgtagatacctgactcgtgactaccttcatgagncgcgaaagaagcaaaggagtatggccttattgatggagtaatcatgaatcccctcaaggcccttcaaccacttccagcttccagttagtcatgaagtgtgctagaactccgtcaaacatttttgttgtatcaatgtgtctgttggaaaccctggctacgtaatattctacgtncaaatgca

SEQ ID NO: 331957 - DNA, 295 bp, Zea mays
gccacgcgtcactccacgcgtacgccatcacttctatcttcattcgctcctattaatgcccagttcttcttaccctttacaattcccacatattttatccagattcatatttacatctagctactctatctatcttgctcactactcatctccatcacttcaaactaattctactatatccatacttatcactttatatcaacatatattaaacctttctttcatcatcatgcacatgtatacatacatttccgaattttatatccgtttgacataagctccttactttgaccac

SEQ ID NO: 331958 - DNA, 130 bp, Zea mays
aaaaaaaaaaaaaaaaaaaaatagaaattaaaaaaaaaaaaaaaaaaaaaggagaaacggaggatattaaagaattcgaggacctggcaacaagaaacagcaacagtaacaagcatacgctgcctaatgg

SEQ ID NO: 331959 - DNA, 70 bp, Zea mays
aaaaaaaaaaaaaaaaaaaaaaaaaaatttaaaaaaaaaaaaaaaaaaaaaaaaaaaaagaaaaaaagga

SEQ ID NO: 331960 - DNA, 219 bp, Zea mays
aaaaaaaataaaaacacataacaactttttaaatttacacataaaacatccataccaaacgaaaaggtgaaatttaaaactttaaatataccttaccaaaattctaaaacgttctgccgttatactacatccaatcttacgtcatacatccatccaatgtcatacaccatttttattgccacctaatttaatttatttaacctacatttaacaactcaa

SEQ ID NO: 331961 - DNA, 431 bp, Zea mays
cggacgcgtgggccccaacgacgtgtctcatcgccatcacgaggaagaagcccaagtggagcaagatcctggcgcacttccgctcgtccagctccgacatgaaggagctcgtgctgtccctccccaggacggcgcagtctgactccggcgaaaccgagaccgagccgtccgtgaccgccaaatcccgagccgagccgtgagtgactagctcccggtcgcggtctcgttctctcatgtatagctgctacatcccttagctagctgcacacagagcgaggctactgtatagctactacgacgaagaagtcgccgataagcaagtgtgcagtgcaggcacgcgtccatcgatcggcctaaagcggctgcagcagtcggtcggtcggtcggtcggcgtggattaaatgatcggacatatacgaatggtgcacacg

SEQ ID NO: 331962 - DNA, 55 bp, Zea mays
agcagcatgacattgctgacacaccatttccatctataatggacaacagagagca

SEQ ID NO: 331963 - DNA, 126 bp, Zea mays
ggcgtgtctatgcacacgcaaacgcacttacaagggcgagacgctctatgaggatccaagcgttacgtagcgcatgcatgacgacgatgatagcctcttctatcagtgacacactaaattcaatat

SEQ ID NO: 331964 - DNA, 254 bp, Zea mays
accggcccggaattccgggtcgcccacgcgtcgccacgcgtcgtcctcggccatcgcttctcagctaactgggagcactgggggaggacatcgagccggctcgctgaccccggcgtgaccgacccgtcggtgcgcgaggcggcgcggatcctccgcctgaccccgggtcgcggctggtccgctcgagtgctccgggggcgactggcggcatcgcacccgcatttggccaacaccaagtcctggcgtatcgtacc

SEQ ID NO: 331965 - DNA, 245 bp, Zea mays
cggactcgtggggtcggagatgtcccttaagattcagccgcaggctagcgccggcccgcttcgcgcctgctttggtggaggtggtgagcctagtgggagcacatcttgcttcttcctgccccatctccctgtctagcctaagctgcatatgatcgtccttcgtgatttcaacacttatgttattcacaacaccattgctcttgatccccttttcagtagagtctaagaatttgacaattgcaatt

SEQ ID NO: 331966 - DNA, 261 bp, Zea mays
actaccattatcaagtccccgaaagcatcgtttcagactagatgctcccactaaagctccggggcttgttctactggttctgaaccaaaccgttcaccagcaaactttcctgatcctctaccaccatcaccttcaatgaaatatgacgagattcttgctccatctcattagctgatcaagcaatcatctatcctgcatgctgttattgaaccaagtgctactgaaattatcaatctcatgcatagcctacatgaatgctac

SEQ ID NO: 331967 - DNA, 280 bp, Zea mays
taccggtctcgaattcccggctcgagccacgcagtccgcacacgtattgctactatcgtctactttctacatctttagcttaccacttatgacatagtcacatttatagacttgtcatcggttacaattcacatactagaatcatgttagctctactacctattcttgttaaataattctgacccctttctacacataatcatcacttctgagttctatactgttacaatgttcgtatacgctaaattcactttattcacatataatttccctaaacttt

SEQ ID NO: 331968 - DNA, 157 bp, Zea mays
ttgttttttttgtttttttttttttttttttttttttttttttttttttttttttttttaaaaaaaaaaaaaaagggccgcccttttaaaggatccaagcttacctacccgtgcattcaacgtcatagcttttttataggggcacctaaattcaatt

SEQ ID NO: 331969 - DNA, 165 bp, Zea mays
aaaaaaaaaaaaaaaaaaaaaaaaaatttaaaaataaaaaaaaaaaaaaaaaaaaaaagaaaaaaaaaaaataaaaaaaataaaaaaaaaaaaaaaaaaaaataaaataaaataaaaaaaaatcacaaaaaaaaattataaataacatacaattaaaaaaaaata

SEQ ID NO: 331970 - DNA, 381 bp, Zea mays
gccgattgggattaagccattatcctttatctgattccatgggtgcatcaggtataaggtcatcccaagccaggcttctctgctttgtggtgactgctattgcaaaattagcaacatgccacagtgagttgcttccgagggcacgcgtgtcattgggtaaggtcactcgttcccgaacctcatacaggagggtctggcaacgggcctgtgactatttacggctcatgaatgaaccagccatctgtttatctgtactgggaccgtccaccgtccaaggaaatggtcctggtattgtgaattggagtgaatgatgaacatagatggttgctcatgttccttttaccttttagcccagcaaaaaggttcaccgtctcataattt

SEQ ID NO: 331971 - DNA, 54 bp, Zea mays
accggttctcaattcccgctcgacccactcgtcccaaaaaaaaactataacaaa

SEQ ID NO: 331972 - DNA, 173 bp, Zea mays
cacgcgtccgaaaaaaaaaaaaaaaaaagaaaaaaattaaaaaaataaaaaaaaaaaaaaaggaaaaagaaaaaaaaaaaaaaaaaaaaagggccgccgttctagagggtccaagcttacgtacccctgcatgcaacctcatagctcttttattgggacacctaaattcaatt

SEQ ID NO: 331973 - DNA, 273 bp, Zea mays
cccacgcgtcctaaaaaaaaaaaaaaaaaaaaaaaaaaaaaaaaaaaaaagggaaagggttcctataaggaaaaaaccaagaaaaaaaacacaaacatacaacaacataaatagggccaaagggcctcctaaatccaatttaatgtccgcccccttacaactttatacctttaaaaatccctgacttacttcaaattaactggcttgcattacaccccactttaattggaaaaacccttacctaacccaacttagtcgaccgactttccaaac

SEQ ID NO: 331974 - DNA, 142 bp, Zea mays
aaaaaaaaataaaaaaaaaaaaaaaaaaaaaaaaaaaaaaaggtcggacgatatagaggatcggagctatcatacgcgtgcgtgcatacatcatagtctttctaatagagtcacctaaatataactcactgaccttaaatgc

SEQ ID NO: 331975 - DNA, 391 bp, Zea mays
taccggttcggaattcccgggtggagccacgcgtccgcccacgcgtccggggatgacatgccgtggccaatgcaaacaattgttttgtgggagcggcggccgttaagttgttgtcagtgtgagagtggtgatgcgatcatgatcctttttacctagagtagctcccctttgtgttagcctgaacgatgttttgcaagccgaatgttccgaactctaggattatttggattacaaaacttacatattccatcctcaaaaaaaaaatagaatatgaaaaaataaaacaaacattgggcaatcgttctagaggatccaaactatcctacgcgtttatgctacatcatagctcttctatggggtcacataaattaaatttactggccattgcttt

SEQ ID NO: 331976 - DNA, 280 bp, Zea mays
gtcaaatggtcccataatatctgtcccaaagtttggcatacatcggcccatataccttacttggaatgtcgacaaatgcggggattgtgttgctgtcctcgcgcaccatgaagtcaccaactccctaacaatcatcggctattctattcttcaaactgtcaatattcttatagcggctcatgtaccctattctcatcatccatcgatgcatctcagcctcttatgatacattgtactgctcactctgctcttcatggttatgtgacaccaggcctcttac

SEQ ID NO: 331977 - DNA, 392 bp, Zea mays
accggtccggaattcccggcggcgagccacgcgtccggccacacgtactctctattcatcactatctctacgtccttatggaagctgggtcaggtaaactcatagctgcgttgaacagcagcacattccacgagctgctcacatctgatggcattctatccttactgtatacatgctacaacaccagcatgtgcatcttcaaaaccccagaatctacctacaacaccgagaaagctatacttatcaccctatttctaggtccatcataactgccgcttgacctaactcatttagagacacaatgaccatcaattatgtgccgaaactcttaatcataactccagctgactttttcattaacaatattatttcgtttcttaagctgatcctta

SEQ ID NO: 331978 - DNA, 164 bp, Zea mays
aaaaaaaaaaaaaaaaaaaaaaaaaaaaaaaaaaaaaaaaaaaaaaaaaaaaaaaaaagaaaaaaaaaaaaaaaaaaaaaaaaaaaacaaaaaaaataataaaaaaaaaaataaaatcaaaaaaattcaatttaaattgccgttaaattacaacaataatacat

SEQ ID NO: 331979 - DNA, 277 bp, Zea mays
taccggtttcgaattcccgggtcgagccacgcgtccgaaaaaaaaaaaaaataaaaaaaaagaaaaaaaaaaaaaggcaaataatatagggaaaaggaaaattaaatacgcgagcattccacaacatctcgtgctctattgtgttaccgtaaattgaatcacactggccgtcatgttacaacgactactactgcgaaatccttgacatgacccaaattcatcgcctggacacaaattccgatgcttatatctgtcgtaatgtcaatgatgctggaat

SEQ ID NO: 331980 - DNA, 65 bp, Zea mays
aaaaaaaaaaaaaaaaaaaaaaaaaaaaaaaaaaaaaaaaaaaaaaaaaaaaaaaaaggaaaagg

SEQ ID NO: 331981 - DNA, 51 bp, Zea mays
cccacgcgtccgcccacgcgtccgcccacgcgtccgcccacgcgtccgaag

SEQ ID NO: 331982 - DNA, 277 bp, Zea mays
cgcagcgtctttttacgctttctctcacgcatacaatgactagtgtaaatttatattgacaatagcttaattatgaaccaacctataaatacatttatctttttagaacaaaacaaaattacatacacataaatgtcatcctatatctattatataagctcacctaaacttaatttattgtccatatttttacaacatttttacttgaatatccttgactttaccaaatttaatatcttttcacatattaatcttttttacatttttaattatattt

SEQ ID NO: 331983 - DNA, 52 bp, Zea mays; identical to SEQ ID NO: 85258

SEQ ID NO: 331984 - DNA, 392 bp, Zea mays
ggcaaactggcagcagcaagtactactagcgcttgctaaaggccaggagcccaggacgcggaggtgctcgctgtcgctgatcaaccgcgcgccgtcgcaggcagcacagcaaccagcaacagccaacagctaggcaggtagtagtagtatacatgagcaggttcgcggggcagacgtccaccaggccgtgggtggggatggcgggctctggcgccaccgcgtccgagcctgccgccgccgacgtcgcgagggacgacgccacggcagccatgaggggcgccggtgccggcgccggcaccaacgccagcgccatctacttcggcttcgcggccacggcggtcctcgtctgcatgttcctcctcatgggcatcttagagcacctcatcaagccc

SEQ ID NO: 331985 - DNA, 385 bp, Zea mays
gcaacgcgttggctctataactcacacacactcgcgagcgaatgcaacgaagaagaggaggaggatgatgcatggacaagtgcaggttggtgacccacgagcactcgtcaaggtactatgggtgcatgatgaaactccgactacgatgacagcttcctgagggccctggcatgccggcaagctgtacagcttaaacaggtcgatcgtgacgacacgtacctggtactgaatcaggggtgccatctgtccgaagtacaacgtactcgacacacagggactgatcaagaccactgtcagaagaatcatcgagtggctcaaatgcaaggtttacgacgacctctactgtggactatcaactgatctgattaacgcgagactactgaat

SEQ ID NO: 331986 - DNA, 356 bp, Zea mays
aaaaaacgtacggactagaacttaaattacacaccaaaccgaatatatattatatatgggctatatatctagtagccgagtacaacctagcaacaacgggcaagcgctaccaaatggcgcctctaggagacggcggagctgctgccgcggcggcgtccaacaacctggtggtgtcattcggcgagatgctgatcgacttcgtccccaacgtggacaggctgtcgctggccgagtcgggcggcttggtcaaggcacccgtttgcgcagcctgccaacgtagcctgcagcatcgccaagctcggcggatccatacgcttcgcaggcaagttcggcgacgacaagttcgggcacatgct

SEQ ID NO: 331987 - DNA, 429 bp, Zea mays
gggatctacaaaagatgtctggtaattctacagcaaaagttggccactggaccacagatgagataaaagcactaaggacgaggtttcagttgtcaaaaagagtccaaaatgaggaagttcccatggcagaggaagctctggcgatgatatcacaatcatttaggcaggtcgttcttgatgtgaaagttggacccccttcatttgagaaaggtttagctgacgatattttgtctcttctcaggagaacaaattgcaagaattgtcttgtctgggcaaaaagtgatgatataggaagagagataattaaattgtctaaagatgttattgttggctatgttgtcatggtggataaatttaccaatagaagaacggagttagtgaggattgaaggggctaaagttgctggcatatatcatcctttgatccatg

SEQ ID NO: 331988 - DNA, 432 bp, Zea mays
  unsure (1)..(432): unsure at all n locations
ttgtttttattcctgacgacgcccgcagccgacgtcgccgacgacggaggagcagcacctctcgtctgtccaccgctgaccgctcgtttgtcagcctagcaccggggtgcatgaacgcccagtatatgctacagcaccgccgcccctggccctgccgcctgcgccggtcgttgccctgtgcactccgcgggcctcgggaatggccaaccaggacatttatcggtttgcccaccctctcctgtcttctcttctctcccgcccgctctccctctctcccttctctccggcttccgattgggtattgtttattggcttctggctttaattaattactgtatttgcatgttcaggtatgttgctcatccatctcgtatgatgaagtgttttatgctctnttccaattattgttgcaagtagcataattagaacatg

SEQ ID NO: 331989 - DNA, 419 bp, Zea mays
cccacgcgtccgcccacgcgtccgcataaaaaaaaaaaaaaaacaaaaaaaagaaaacgagaaaaatgcaaaataaaatataaaaaaataaaaatcaaattaaggactaaaacgggaacttattcttccaaggtttcctaaagaacattagttcatatatttttttgggaaaatgaagtttccaaaagggtttcaaatccatggtggtgtgcgaattgattgcagtaaaggcgatgggtaagctgataccagtgggttgagaattagaccatcagtagcttactctttcccatatttaaactataatctacactacaaaatagtgcaaaaggtgttcatagtgacctatgaataatataatctacactacaaatatagtccaaaatgtgtttgtagtgaccatatatgggtgaacattg

SEQ ID NO: 331990 - DNA, 296 bp, Zea mays
cccacgcgtccgaaaaaaaaaaaaaaaaaaaaaaaaaaaaaaaaaaaaaaaagagaaaagaaaaaaaaaaaaaaaaaaaaaaaaaaaaaaaaaaaaaaaaaaaaaaaaaaagggagaacgaaaagaaggaaccgaagctatagtgcaaatgaatgcaaattaatagagcgggaaaaagagaaataaaaataaaggaaaaaaggcagacgtggcaaaactaaaaggatggggaaaaccatgcgggtaccaaaataaagggaaataggagaaaaggcccatatggatagtaggcgaaa

SEQ ID NO: 331991 - DNA, 157 bp, Zea mays
aaaaaaaaaaaaaaaaataaaaaaaaaaaaaaaaaaaaaaaaaaaaaaaaaaaaaaagaaaaaagcaaaaactaaaaaaaaaaataaaaaaaataaatacataataaataacactaactataattttctcaaaaaatatacaccctaaattaaacat

SEQ ID NO: 331992 - DNA, 377 bp, Zea mays
tggacttgctctgatcctatgtgtgtgtggctatgcttgtgctcaatggtgggcacttttcagttaaagttttgtagtgctgtctgtcagttgctgcctcaaacttggaatactacttctgtttggcacctgaactgcttatcaaaaactttatgtataccagttacattccacttttaaccaaaaaaaaaaaaaaaaaaaaaaaaaaaaaaaaaaaaaaaaaaaaaaaaaaaaaaaaaaaaaaaaaaaaaaaaaaaaaaaaaaaaaaaaaaaaaaaaaaataaaaaaaaaaataaataataaaaaaattaaaaatattataataaaataaaaataatataaatataatttaaaaaataaaagggggggttttttta

SEQ ID NO: 331993 - DNA, 314 bp, Zea mays
gggacttgtaaatgttgggcgattgattaagctgggctttcaaggtatcatttgcgggcgctatttgagttcagggaacaactcatttttcttcaggagaggcaggtgcacacatctacttttttttttcaaatgaaacatatgaccttaaatttgaaggattatctactatctagtgaaacataaactctcatgaatgtaaatgaaaagggataacctcacatttgtcacacacacatacgtaggcataaaatattgctaaacttagaagacatatggatgattgaattcattactttattttttacaagaca

SEQ ID NO: 331994 - DNA, 313 bp, Zea mays
taagtcctataggctcccagactcccttgcaacaaggactccagctccaatgaatgcgtcagctccaaaacagaaggatccatcaaagccatcgaaggtgtcaaaggccataggattgttttctgcctccagccctgcactagaggctgcgatggcagctgctgtcaaggtggctgacgcggaggcaaaagcacatgatgcgcatgatcagacgatggaggcagaaaggatcttcaagatggccgaggataccgagtctctcctcataattgcagcagagatctatgatcgatgttcaaggggagagataacc

SEQ ID NO: 331995 - DNA, 278 bp, Zea mays
gccgtaccggaattcccggggcgacccaagcgtcccaaggcactttgactctgctaattccattgaggacaaggacacgatcattgagataacgggggtccaaaacttgggcaagtcattatctacacaacattgtgacacgcgcagcgatagatcatcatcgcgcggttctagactttactggcatgagttcattgcgaccaaccagtctttttgagagtattgagacgcttgcataggctgtcgagcgattaacagagaaaaggctatatatctct

SEQ ID NO: 331996 - DNA, 345 bp, Zea mays
cgacaatggcaagggccaaggaagacgagcagatcatgggaattgacctagaatcttgcaatctagcaaaacgatcattttatgatgccatgcaacatgacattctagaaatatgggtggctaccacgaagtgagtgtagcattatgtattatgttctcatttgttcatcagttgcaacaactatttgctaaactctttgaattttgtaataattggaatgtggtcgcatggtcagactatgtttgctttctaaaacactcatgtcttagtttataggtcgtgtacacttatttaagttattggttgattaagatctgggcttcaagtgcaaaaaagaagacgag

SEQ ID NO: 331997 - DNA, 122 bp, Zea mays
gcgagaggaagacaagcgcacgcccacagagcggggaggcacaacgcaccgaagcaaaagagcgctgcaagaacaccagagcagaacaaacaggcatgcaaggaagcggacaccaaaaggca

SEQ ID NO: 331998 - DNA, 297 bp, Zea mays
gcgttcaagtaccaactctaacatgagacgttcacctaaaggtcatgcaccgaactctgcctggtcagaaagaattgctaggcgatcatgcgttcacttcgaggagctcatatgtctacacttattaagctacacacctgacatacttcatggcaccatctaccattggtctacagcgacagcttgtcgagacattgactacctcaggacgattgctggacatcgtactgttcctgtcgaaatctgaaagaattacgtgtgtaccgagtggaagcacgagcttatcacattttatca

SEQ ID NO: 331999 - DNA, 137 bp, Zea mays
accggtactgaattctcggatcaacgccacgcgtccgatgaggctgccgcgtgtggaccggtctctgaccacctgcgaaagatggacggggagctcgccgtgatttgaccggtcactcaggattggcaaccgctcgt

SEQ ID NO: 332000 - DNA, 263 bp, Zea mays
tctcggaattcccggctcgacgcacgcgtccgtccacgcgtccgaacacgcgtacagctctcagtcacctgcgccgccgccacgttcggggggggcctccaatacggggagttcaattgaccgacctcgttcttctggacaaggtctactaacgtattaacatttccgccgtcaacaatgactcttcggtcacacactatgatatttttcaacacaatgctattttcgctcacttgcagcactttactatctatgaccagttg

SEQ ID NO: 332001 - DNA, 211 bp, Zea mays
aaaaaaaaaaaaaaaataaaaaaaaaaaaaaaaaaaaaaaaaaaaaaaaaaaaaaaagggaaaaaataaaaaaaaaaaaaataaataaaaaataatacaaaaataatatatccaaatatttattaactatctcaatgtctctctgtcttcactctaagtattaacttttttattgcttcttctaaatttatttttttgtccttcttctaaa

SEQ ID NO: 332002 - DNA, 62 bp, Zea mays
aaaaaaaaaaaaaaaatacaaaaaaaaaaaaaaaaaaaaaaacaaaaaaaaaaagaaaggat

SEQ ID NO: 332003 - DNA, 233 bp, Zea mays
cccacgcgtccggctccttgcaagtggtgtttatgttagacgactgcgtatggggccgagttcttggattcagcagacttaacgcatgtacaagtctgagactccatttttctatgagacatctaatagactatatgacataactttaagactcagtattataaatgcagttaatagacaaaataaaattcaccccccatccacatgcttgcgacaaaaagggcgtctattct

SEQ ID NO: 332004 - DNA, 422 bp, Zea mays
gtttttgctgtcttcttatgcatatctgaagatgtagtgagttttttttagcagagattgcatagtttcagtttggtcccttgattacgttgcctccttgaccatttttaggtggagtgttcatatcagtgtcagccctttgttggaatttaactattaaattcattcgtaattctcttgtagtgttataatcaaatgtgtaggttgcatgtaaccataggtatcctaccaaattttgtgtttgtggacggatgttctgcggggtttttttttgtgtgtcgatgctatttggcattgcttatatcggtttcttgtgttgatgaacgccgatgattgtttccacttagttgtctgatttacaatagttaacacgacacgacatccattctacacattattaccttaaacgtaagaatctgatg

SEQ ID NO: 332005 - DNA, 335 bp, Zea mays
cgtccggattcccggtcgaccacgcgtccgaaaaaaaaataaaactaaaaaaactaaaacaaaaaaacaatctaataaatacaggttggttactaacatcaagaaagacacatcacatataagatcatctgactaaacttgagtggcccgttcttaataacccaagctactgttaaatctcttccaagaccaaactttttcaccatccacctcatatctcattacaccggcgatcttttcaaacctaagttccttaaaaaaccctatcgtttccaattttaccacttttatgataaatgctattttccttgtgtgcccacattaaacataggccc

SEQ ID NO: 332006 - DNA, 109 bp, Zea mays
aaagaaacaaaaaaagaacacaaaaaataaaaaaacaaacaaatataaaataaaaaaggggaaaatactactacaacgagaacgcaaaactaaggcagctacagatact

SEQ ID NO: 332007 - DNA, 293 bp, Zea mays
ggtaaccagctgccgagggaggaaccctagcggcacactgtgcatgtgacggcggggctcttcactacgaccggagatacggctgcatcggctacatctactcctcctccatccacgacgacgccgcgcaagctgccagcctgcatggtcacctgactgatattactcgctaactgtgtctagcaagcctaatagtccaccatggatagccttaagcacgaaacactggacgacaccatgctggccgctgttgatctcatgcttgggctgcaatactgtgtgataccggacga

SEQ ID NO: 332008 - DNA, 261 bp, Zea mays
aaaaaaaaaaaaaaaaaaaaaaaaaaataaatataaaaaaaaataaaaaaaaatgaaggaaaaatataaataaatagaatactattaataaaaaaaaatttatatcgtatactatcttacttaaaggatccaattattatttttgctttttttctcacttttaatattttatatatttgcacttaatttcaattttttgttcttattttaacatttttcttacctggataaccttttgctttatccatttaaatatttttt

SEQ ID NO: 332009 - DNA, 250 bp, Zea mays
ccacgacagcaatgccatactagggcaatagttactacaatacaatttttgtatgtggctagctgttcatattttacactctaccatcatatgatcatatctagcgaagtaaaataaaaaaaaaaaaaaaaaaaaaaaaaaaaaaaaaaaaaaaaaaaaaaaaaaaaaaaaaaaaaaaaaaaaaaaaaaaaaaaagatgaaaaaaataaaaaaactaaataaaaaaaaccatgcattgaacttcctaatt

SEQ ID NO: 332010 - DNA, 389 bp, Zea mays
cccattcgtatctccgtcgccatcgccgctgactcctccagagacgcgtctacagctgctcctcttcagtggcgtcttcagtggcgccgtttcctgctcgcagtcatggtcgcacggaacgtgctgcggctcgtggtcggcgttgccgttgccgtcgccgtcgccaagtaaagagagacagggaggcacactagacggcggcgtggacaggagcgagtcaagcagaggatggaacggggactgcaaccggcactggactaccatgtcgactatgataacttctatggggattctgaagatcatgaagttcagcgtctacgtctgcgtgcacgtctcgctgacctacgtggtcacctacgacttcaagaccgtctagaagatcatgggca

SEQ ID NO: 332011 - DNA, 140 bp, Zea mays
cggcgtcacgtgcagcaggacgctgcgctcctacttgttagccgaatccagcgtcggtgacccagacagagcgacagaccgagtgacatggcctctcacatcggctctcaccgaggccgtctactagggcctctgatact

SEQ ID NO: 332012 - DNA, 121 bp, Zea mays
catgtacgtacatggaaagctgatggcttcctgacttttaatttctgggcaggtcccaaaattttcgccctgagaatgagatattatatagataacatacatacataccatattcgttgcc

SEQ ID NO: 332013 - DNA, 231 bp, Zea mays
aaaaaaaagccaacgacggcaccgatcttaaagcccagaagagctcaagtacaaaaacgggtggcaaacaaaaatgagaagagataaaaaacaacttaatataaatatacagtgtactccttgaacggcattcaagtttacaaatccttctttacgtgcgcttccgtctgcattcagggcatctactggtacttaagtggcatgatcttcacacttttctactggacaaac

SEQ ID NO: 332014 - DNA, 320 bp, Zea mays
cgtaccggaactgaattctcgactcacgccacgcgtacgcagactcacgcgaagcaggacgctgcacacctacctgttagcctactccagagtcggggagccagactgagcgacagaccgactgacatggcctctcacatgggctctcaccgaggccctctcctactgcctccgatactgccttcgtaaccgtgcctacagcctgctgaaggaactgatcagcgaactgcacctacgcatcgactatcactacgaagccaattcggtacatgctctgcatgatcttattgatcagcttgtagtccacattgctttctaca

SEQ ID NO: 332015 - DNA, 209 bp, Zea mays
ggcactcctagccctaggtcatcgtcaacagcttgatcatggacgacttctaggggggttaaggcacttgccatagtggcttaccaactcaatatgtcacaacatactgctctgtacacatagctgcctacaaccattccacagtgccaggtactaatgttacttctagacccattcacctagattattcaaagatctcaattgcaata

SEQ ID NO: 332016 - DNA, 261 bp, Zea mays
cgcgtacggactcgggtcaaaccctaaacacggagttgatttatccgatgcagccacgaggtaggtgcactctgcgtggtggcaggatgccatataccagattgttggggatgccaatgcgaagaatatgaagttcactgagactgttgaacttcatatcgttctgaagaattatgattcacacaatgacaagcgtttcaattgcttctgttaaagttccccatatccctagtcccaagatgaatgtgttcattcttggtg

SEQ ID NO: 332017 - DNA, 74 bp, Zea mays
taaaaaaaaaaaaccactcaaactaaacatacaaaaaaaaatcctactacactgaggagcctctacaactacag

SEQ ID NO: 332018 - DNA, 231 bp, Zea mays
tgcttggtgttgttgtagtttgtagctgtccgtgtgtagtaatatccggtattgatgctttacggtaccgttggtagcgctcggctgacttgacggtctttatgaagaaactgaagaagagtatagagagtactaataataagtcgtagtcggcgacgaaaagtggtaagcatatttcgggtcataagattggctcgaagatgtcgtgtaatcgtaaaggaaagtcgacta

SEQ ID NO: 332019 - DNA, 390 bp, Zea mays
  unsure (1)..(390): unsure at all n locations
cccacgcgtccggggggggggtagggagggcttcacgagcacagctttctcggtgaaggtaaagctgtttcggagacccgtttggcaaaacagctttgcatgtatttttagaacatgatctcacagaatcccagagagccgacaagtgtgaggggaagctgtgaaacgttaatattttcagctaatcccaccttattcccatgtgaaggcacagtttaaggagcttcatgggtgaagctgtttccaaaagacctgcttggcaaaaaaacagctcacaacatctcatgaaactgttggtgaagctgtgccaaatagacccttagttacacaataatacaccttgatcattatcagtaacagttatgttgntattggattcacagctgatgc

SEQ ID NO: 332020 - DNA, 397 bp, Zea mays
  unsure (1)..(397): unsure at all n locations
ttggacctttgggctgatttatgtgcttgtttatgtgcttgtcttgttatggttgtagtgcttttaatgagtgtggntctactgcgctactcgcggagaatggtatgaagttggagcctgggtcggttttgtacggggctgagtaggtgtgtgtggttggtgaaaagccttggaaggagtccgatgagaccggcgcgttggcgggccttgctaagacctgccatctgttgcctctatggattattgagatggtcagagcggctgttggcgcgtctggtacttttcccgaagtcttcagccgtgaagtggcgtcgggatcctgcgagtgtcatcccgggttactacacgagccatccctatacgacaagcacgtagatacacgggtagcagacgaagt

SEQ ID NO: 332021 - DNA, 370 bp, Zea mays
tttggcctttggtatgtgcttggttatgtgcttgattgttgtgagacttggtcttgtccttagaagtcctcggaatgttggccttacgagtgctcgactggttgttgttacgggtcgtgtcggacttatttttaaagctgatgagaatagtaagaaatcgaaaaggttcaaggtccggaagtacatttaattaaccatattggtatggtcgaaatagacgtgcgacgagcctcgggatatggtcttgtatcatggaggttaaaaagagactcgggacgtctcgagggccgttgtggagcttgactcagtttccgtatagattactgcggatagcgtcggaactactgcgctgaatttcgatacgatgtct

SEQ ID NO: 332022 - DNA, 409 bp, Zea mays
acctttgggctgatttatgtgcttgagtcgggtcgctaaggaagttatcatccataactaaaataagcatacattaccctcgtgagacgctatcggcgaagctcctccccatatacgttatcgaactcggactcagtagtctagtcagcgatgcgaattatagacagcgttaatcgagaacgtagaacgttacggcgcaaatttcataacaggtttttaagaatacgactaacgtatcattctcaacgggtacaacacgtcggtaaccgtcggctaagaacttctctaggccgagtcccgggataccctaagcgtcagatagactgcaattccgttttaaatacgcagcgttaacgtgatagactacgtcatcaagaataatggatcacgtacggtcgcgtaagtccct

SEQ ID NO: 332023 - DNA, 415 bp, Zea mays
  unsure (1)..(415): unsure at all n locations
tggcttgngacctttgggctngtttatgtgcttgggaaagagtccatgtcgtcggggccacgggtgagtttgcctgcgtcttgggtgtgtagtgtgtctagttctaaaggttctattcatgtccatcttgaggagaattctgatgataagagtgagtcctcttctagtcttaattttgcgtctaagaaggcgtttgcgtctacttattatggtaagtttgctcgtgagctttagactactgcgtagcatgctgatgaggtcccttttgttgttgtattcaacccttccttacttgattttcatgattgtgttaccgtctgtcctcgggttcttcatgctgatgataagcctcatagtgtgcggacatttgcgcctaggggtaggaatggtggagaaacggtggaagtggtgaggt

SEQ ID NO: 332024 - DNA, 329 bp, Zea mays
tttgggctgatttatgtgcttggttgttattaggcgtagagctccctgctactctcctcttggtgaagaatttttagctgtttattagactatccgccaaatcccgccgaggggcgacggtggccctccctgtaaattctaatcttgaggtagggtccaaaaagtccgacgagcattcctctatctgtagtcatactatcggtcattaagtccttaaggacgatccggtcgctcatatcctgcccctggtcgtctttctgcttaagcacactaatgcagtaaggcggcccaattataccgacgtgtctgcgaggtcgagtggaaccatc

SEQ ID NO: 332025 - DNA, 268 bp, Zea mays
ttctgcacacacgatgcgatacgcaacgccatcacacttcatgagggacgaggagatgcacagccgcatcatcggcatgaacgaggccgagctccacggccgccgcatgagcgtcaacgaggcctactgccgtggccgtcgaggcggcggctacggcgggtacggtcgccgtcatggcggcggcggctacggcggtggcgggcgctacgatggcggcggcggctacggcggtggcggcggctactacggcggtggcaactacggcggt

SEQ ID NO: 332026 - DNA, 415 bp, Zea mays
  unsure (1)..(415): unsure at all n locations
tttgggctgatttatgtagcttgtttatgtgcttgtttatgtgcttgtacggngaccgaggcccgtgcgaaaaccctgcttgcccggcgcggcgtcaaccgacgacacaccccggccacgtcccgtacgcccgcctggccggacgtaacaacgggtcggccatcgtccctacgctgaactcgaccatcctcgaccgacgtacacttcccccggtcgccggtcagtgaacgtccctagaaattattctcctcgcccagtcaccccgggtagcaagctaagtagcgtcccgcaccccgcaaacaggtacctcccacgccaacaaactcgcacagaaataaaaccggctacctaacaactaacagcaccactagaaccataccctcgcatcataataaccaccccaactaataaggcc

SEQ ID NO: 332027 - DNA, 341 bp, Zea mays
tttgggctgatttatgtgcttgcgatcatgctttcgtttttatttaggttataatcttcggaacaaaaacgatagaaaggaaatcgcacagcctgacgaacgggtagcccgttgcggccccggaacaaaaaaaaaaaaaaaagcaaaaaaaaaaaaaaaacaaaaaaaaaaaaaaaaaggggtggttgcctccgaggatttaaccccacgattttcgttacgtaatgctaaagcctcctaccagggtaattcaacccaaactaacgcggttgggcccaataatcctggaatcggaaaaattccggggcaattaatccaaactgtctcggagaaaacttttc

SEQ ID NO: 332028 - DNA, 61 bp, Zea mays
ggaactttgggcggatttagtgcttgtttagtgcttgtttatgtgcttgtttatgtgcttg

SEQ ID NO: 332029 - DNA, 399 bp, Zea mays
  unsure (1)..(399): unsure at all n locations
cttggacctttgggctgatttatgtgcttgtttatgtgcttgtggatgtgngggtgggcctatgcgacactggattcgacttcattagtcacggtaagaagcgacccgaactccttacgataccctggagctttaccctatctgatcttatcgtcgcgaaaccgcctgccccggggttactccatcgcgtatgcgttccgacaccgtaaaaaaacaaaacaaacaataacattcaaacaaagggcggccaccgaagtcttcttacctcttccgtctttaaataaaccttttccgtccntaaacaaacttcaacgcaaagccccttaacaccgcacgggaacactcaccccccatagacttacacacggacagccgaaccgcaaaaaaaagaaaaagggt

SEQ ID NO: 332030 - DNA, 64 bp, Zea mays
tttgggctgatttagtgcttggagtaatttactaccggcggcggaatcccccagacccgccacg

SEQ ID NO: 332031 - DNA, 373 bp, Zea mays
  unsure (1)..(373): unsure at all n locations
tggcttggaantttggggtggtttatgtgcttgtgtcgttctcttcttcttattgatttcttaagttttactcttcttatttcagtgtgggttgtgttcttacttgtaatgttgtacttggtggtggtcttggtgaatttatttttgttgtggaaatggttctaggcattctcttgttagttgtcgttaagttctgtggtgctaaggattgttctaaggtgaggaattaggtttgttgggcttggtcggatcttttgttgttggaggcggcggcggcgttgaagaagaagtttgtttttgatgtgctgatgctcttcgcgttgaagaagaaggcttggtggaaggggcgcgaggagacgagtttgggtgagaa

SEQ ID NO: 332032 - DNA, 398 bp, Zea mays
ggcttggacctttgggctgatttatgtgcttgtttatgtgcttgtgttgcggtggttttgtcgtcttcgcgtcgtgtgttgggtgttgtggagtcggttaggtcggagtatttgtttaaggatggtggtctgtctagttcgtctgctgctggtgatcggggttgaaagggtatgcctaattagcttagggctgtttactagacgggtagggccggggagtagtctagtactgatcctgctacacttattggtgataatcctcatgagaatggttcgatgggtatggacgatgaggtgcctgagtagctccctattgacactcatatggtgaagagttcgtagaagttgcggcattcggcgtcgggaaattacgatcataggggcgatgtgtctgtgta

SEQ ID NO: 332033 - DNA, 449 bp, Zea mays
  unsure (1)..(449): unsure at all n locations
tggcttgngacctttgggctgatttatgtgcttgtttatgtgcttgagtccgtagatcccggcccagttagggtacccggaaccttcgctggcatacccatctacgaggcagcgataccacggcatagagtcttagaaacctcgtccggagtgtggtagcaccttatattagccgacgcgcggctcgcgggtcgcactcccgtggaaacggcgaattaaaagttatcacctttcggtgacctcgagactgatgaatcccccaagacacctaggacatcaggcatattgaacgagtagagccggttaggagctagccgcccgttcgatcctaagatagtcccttttaggcggtaagtctaggattcggtaatagcagctttaaactccgatttcgtcgngccggattcctctctcaaaacgtcctgacatgagttaaagtaaagaactat

SEQ ID NO: 332034 - DNA, 280 bp, Zea mays
ttggacctttgggctgatttatgtgcttgaagaaaccgtcgccttcgtggacgaggagtaaatacttcgcgtaccacgctaagagtgacccgaagaccctcatagcgacgagatcgatgagcggacgcatagaggcgtagcccacacgaacgtattagacggcaacactgacggcccggaacggctatagccgggattcaccgcttacgtcaaacgctgactcgggtttggtaacatcctcccaggcgggtacagtcgggacgacccgacaggccccccc

SEQ ID NO: 332035 - DNA, 312 bp, Zea mays
ttttgtttttttttttttttttttttttttttttttttcttaccgttttttggtcaactatgcttgaacaggtctattgcaactagcaccccatatgcaaacctatcaaatgaaaatgtcattagtggcataactcctgatatcatggtgaagatgtggcccaaaaatatgtattgtctataaaacaatccttctcaacattttggtagtccccattggaaacattttacaggtccctggaaacttaaaagtcaattaacttttatgttggagcttttcaagaaaaccattttgctaaaatgcattatcaaa

SEQ ID NO: 332036 - DNA, 313 bp, Zea mays
ttggaactttgggctgatttatgtgcttgtttactctggtcagggccaggctgctctgttaagctgttacgacgtagtagtttttggtgtagtagttgtagttgggtacggtgttgttcttgttcttgtaggtcgtcggtgggtagttattgtagcggggcgggactttgttgttgacggtgtagtagcatggtgtattgctcttgtagtagttcttggtgacgcggggttagttcttgatgtaggtgtatcatgggtaggtattaattttctagtagcatcatgttgtgttgttggcgttggcgtaagtgtt

SEQ ID NO: 332037 - DNA, 193 bp, Zea mays
tggacctttgggctgattagtgcttaggatcccggctgacactcaacgcccccacgaggtcatgaaggacctggtcccagagtcatcatttactagaagctcaggaacccgcctagagttatcatccaggaccccggccagagaccaacgacatcgcccggcccctcgcataaccgaccgaaagcacacatcc

SEQ ID NO: 332038 - DNA, 372 bp, Zea mays
ttggacctttgggctgatttatgtgcttgctaaaagacctaccgttgtagtaagactaagacatcaaaggtagagaggagcccacgcgtgggcgaaaccgacgagaaggcaataacgaaaactggactagaataccccgagttaagtggcttttagaatcggaccgccgtcgtcgagggctaagaccataaaactcgggaagtgctcctacagatccggtgggtcgtgagcgttacacaatcgtctaaagatcaaaaagtcataagaaagtacaacgtcaggagacggtgttctagaacggctagtcggtgggagtcgtcgttgtcgttgttacggagtagtaaaacctaataatacaagtcacggaagtat

SEQ ID NO: 332039 - DNA, 386 bp, Zea mays
tggctttggacctttgggctgatttatgtgcttggctaccttatccttattaactcgctctttaactccctccgtcgtcttaacgtgtctcgcccatctggttagtggaaggggagaggagggtgagacgatggcggagaaggcggatgtggggtcccttgatcctgatgtttatcctgactgttctcctgtccgtttggatgttgatcttgatggtaaggcgaagtcgtcgtctccttcggttgattgtaagttcggtcttctttctcttcggcgttttgatcgtaatgcggtggagttggcgactcatgagtggtcggaggtatcggaaggtaaggatgtggcgtcttcgtgtgttcatgctggggataagtttatccggtgtg

SEQ ID NO: 332040 - DNA, 395 bp, Zea mays
  unsure (1)..(395): unsure at all n locations
ttggcttgngacctttgggctgatttatgtgcttggactgaataatcatagcatacatatctcactgactctcgcgaaccaacccagccacgaatctgactacggtgtgtttttaaaataattagaattttagggcgccttcggcttctaatactggtggtgcgatggccggttgtgctgctactgagtcgcctgttgataaggcgtttaagatggtggagaatccttggtcgtcgcgtattggagagtgtagtgcggggaagcggcttggtaagtgttcgtatcataagggtgtggtgccttattgtgcggcgtttgggcctacgcgttagggtggtgatactatggtgggtaatggtatgggtggtgagctcgtgactggcgatgtttggcat

SEQ ID NO: 332041 - DNA, 67 bp, Zea mays
tggcttggacctttggctgatttagtgcttgtcagcctcagctcctctatccgacttccccgcattt

SEQ ID NO: 332042 - DNA, 332 bp, Zea mays
  unsure (1)..(332): unsure at all n locations
ggcttgngacctttgggctgatttatgtgcttgtcccccccccccccccccccccccgcccccccccccccccaaaataaagggggacagggaccccaggaggagtagcagggacggatcttacgagggaacctaaggaaccgcgggacgacgatatattcacattcggacacacccagcccctaaattcaacccggcggacccgctcgaaaaccgctcgtcccgctccgagcgtcatcgaaccgacggtctatacagccgacaatttgaagcagtgccgtcggattagcggagtacgattcgatacgtccgaaaccggatccagacgcagg

SEQ ID NO: 332043 - DNA, 424 bp, Zea mays
ggatgtcatgctgtttagaattgctttggcttttgcctttatggctcgagtgccatgagaccttttatatcatttctttttactaaacaaaatctttgttcacactcaggcaatgtgagttgaacttataaacaaaagttggttttactaatttattaaaattggcaagtttgtgatgctaaaatttcacattgaaggccaaaacattgccactcgttgagtcattgttcaaaagaactacagggaccatcatctgatgtaagcttgtgattttgctgggtaatcccttaaccgttgtcaggtggatatatctttaggacaactttgtggggacccacaggtctatatttggtcgataccttcttaaaacacatcttttgatgatatcgagtttctgttgtgtatgtttcataaagtcctgctg

SEQ ID NO: 332044 - DNA, 362 bp, Zea mays
  unsure (1)..(362): unsure at all n locations
tttgggctgatttatgtgcttgggtgttcttatcgtgnnnnttctatctctcttcctagtctagggcttggtggtgaagggaaggtaagacgcatattgtgaggaagaagacttagaaggagaagggttccgagtttcttgagcctgaggatcttgccgtttaggtccctcccgactcggagaatgggaattaggagtctaacagtgattctaaggattcgcatactaataacgtcacttagacggacgccattgggagtaggaaggtcgccgctacttatgctttacattgntcgtgtaaggttcctaggaagacttacgctagatcctgtaaggaattcggagaagaaacctaatggtaa

SEQ ID NO: 332045 - DNA, 414 bp, Zea mays
tggacctttgggctgatttatgtgcttgtttatgtgcttggattattcgtcgcgtgatactgaaggttagtattctagtgttgttgttactgctggttatgatggtagtgctcgggtatagcttgagaatccttttgagccaaagttcgaggaggccgtcgggacgacaaaggatcccgacgaattcggaatctccgtattaatcggctcccccgccggaggcatgaagcatacggcgacttaaggcgaattcggagccgctacttgaggaaagaaggcatagcggggaatagacccctcaacagaagaaacgtcccgacgttcccccctgccgtccacgccaacccccatttaaaaataaatctaggctacactcgtagcatcacaccaccaccaaaacacgcaacacggact

SEQ ID NO: 332046 - DNA, 344 bp, Zea mays
  unsure (1)..(344): unsure at all n locations
gttggaattgggtgattatgtgttgttattgttggnttgttttggttttgggagattgtgagagtgagatgagggaagtnataagttttatngagttgattgattattaaaggttattagtcttcgnttgttattgttctgtctgatgttttctcctgcggttctgtcctagattcatgagttctaactcgtagtccggcaaccggctgcacagctttctactactggaacggcggggctatcactccctttatattcaacgcggacttgaaggtagagaacttcaacgagacggccatagttggcgcgtccctaagttcctagaacccttcatgtaagcgttc

SEQ ID NO: 332047 - DNA, 383 bp, Zea mays
  unsure (1)..(383): unsure at all n locations
ggcttgngacctttgggctgatttatgtgcttggatgattcttttttctttttgtacctctctatgttgttcgtgtctcttttgctgtgagacagataatttcagtctttgctcttccgtccatttcttctcttaattttctcttgactctcacaaaagatttgaaccctgaacctttttctgaatttgtgacttgtgtcccttcctttgtttaccctggctctcgacctggtgtggacctgtcgtgtgggagtttttgaggccgtgcgtgcgacctggacggtggagttggngtctgagggtagttagttggcggactcgcttaagtattttctcggtactgcttttatgtcttagaacactgcactaatagccaacccgga

SEQ ID NO: 332048 - DNA, 430 bp, Zea mays
  unsure (1)..(430): unsure at all n locations
tggcttgngacctttgggctgatttatgtgcttgtttatgtgcttgtgtatacactcatcacatcacatctcaggaagtaaggatattattgttacggtagttaagacgtccgtaccgcctgtctcttcagtctcccgcgtaagtgttatcagcgtgatgtacaccttagggtatccgttattagctacgttaccgggcattacgaatttacgtacgtagcatcgtacgacgtaataggggtccgttagtccgacggtgcgcttgctttcgacgtcgtagtaatcgccggttccattgtcctagatgacgttagcgacgacgttatagacgacgatgttcaatacgacgctattaccgacgacgttgaatacgacgctattaacggctccgttgaatacgaagctgtaaaagaagacgttataacgctat

SEQ ID NO: 332049 - DNA, 100 bp, Zea mays
tggaactttgggctgatttagtgcttgaaaaaaaaaaaaaaaaaaaaaaaaaaaaaaaaaaaaaaaaaaaaaaaaaggatggttgtgtaaggggaattaa

SEQ ID NO: 332050 - DNA, 363 bp, Zea mays
  unsure (1)..(363): unsure at all n locations
ttgggctgatttatgtgcttgatggtgngggaggataagaagngttttggtgagctgtgtcnnttngtgtaggngtgggnggtaatgtggaagagtcatgatttgtnggaggaggatgttaattgttttaattagtattatgatgatgggtttaagnnttggtctgagtatnatgntattgaggtttatgtttcttctgatactcctgttgataaggatgatgttcgacttttactggactcgctgctgggttatctgaagtctggacgtatgaacgaacgaataaataacaacaatgaacgggacgcgtacgcacactgctacgtgtacgccttatgatgagatgggagcacattatggcgc

SEQ ID NO: 332051 - DNA, 378 bp, Zea mays
ttggaaccttggctgatttagtgcttgtagatgtaagaaaggacagtcggcctcgtctccgtttagttttttcgtggtaacggtcacagggtcacatagccattagacctattggcgcatgcggctaccgctatgtccagtgaacagtgccggtcgacggtcataggttctgagagagagtgcggcaactcttatagaacccctcgagccacggcccgctggcgctggctgccgtcgtcgaaaaggatcggaccgaaggcggcggcggggtcccggagtgcgcaagtcctggacccgcggccaaccggtcgcgaaacaaggagagaccgagagggatagaaagaggacgaccgcaagcttagtgactcactacacact

SEQ ID NO: 332052 - DNA, 420 bp, Zea mays
  unsure (1)..(420): unsure at all n locations
ggcttgngacctttgggctgatttatgtgcttgtggatgtgcggggctgtagtttttagcactaggcgacgagtttattattaaaggacggcggtgaaggtaacggtctagattgcggtggtagttttagagggagggagaatagtaggagtcgtagttgtagttgtagcttactcggcagcaattgtagtttcgtggttaacggatgcagttggagcttcggaggcgagtggagtttgagcttcggaggcgagtggagtttgagcttcagaggcgagtggagtttgagcttcagggtcgattgcagtttaagttttaacggtaacggcaataacgacgtcgtcgtcgacgctgacgtcgacgtcgtcgtttgtagcggtccttttatcggaagtaagctatttcgagtgtcggtgggtt

SEQ ID NO: 332053 - DNA, 383 bp, Zea mays
  unsure (1)..(383): unsure at all n locations
ggcttgngacctttgggctgatttatgtgcttgtttatgtgcttgggagcaaatcggttaccgttaacctaatgtcggagaattaatcgaggactccaaaaggatccctcgaaaactattacgaagtacacgagcttacggcgaggcttcgcagctgctctatacacgggaagcgggtagaggcggtcatcaattaatactaagaaccaaccacaagactaccgccggtcgtaagggacgtccgttccgagacaaggtcctatacgtgagagacgggtacagtagtcggcgccttaaccgagttagacctataaatatggtcatcagacgttatcacgaacacggagggcgccccatcggtcggagccctgggagtcggcggt

SEQ ID NO: 332054 - DNA, 417 bp, Zea mays
  unsure (1)..(417): unsure at all n locations
ggcttgngacctttgggcntgtttatgtgcttggcctgcgaataagttgctatatttatctgtcgtcgaattaggagccttacttactggtgtctatctttatgactagtgctgctgtccacttgtaaacactctctccttctcccgtagctggtattacgggccttgatcctaaactgacttttccgactgacactggtttgtccgctgaaaagaccgacgacttaagtacggttaatgacaaggacccatcgtaggccgcttggccatcggacgacgtccgtaaggaggttggacctcctcacgcgaaaggttacggcaccgacgagctatcgacgagggaagctaggaacgcaatttgcgaacctccctagtccttccacgaggaaaaaccaaaaaccaagacgatattctaaa

SEQ ID NO: 332055 - DNA, 127 bp, Zea mays
tgcttggacctttgggctgatttatgtgcttgagatactgttgacttccaggctacgctaagtcactccccgacgacctaccggccgagcgtccgtgcgacgacaacaacgggaacgccgtccggac

SEQ ID NO: 332056 - DNA, 158 bp, Zea mays
tttggtttttttttttttttttttttttttttttttttttttttttttttttttttttaaaaaaaaaaaaaaaagggagcactttttaaaagataaaagcttaggaacacccaaattaaacagcttggtttttttatagggttacctaaattcaatta

SEQ ID NO: 332057 - DNA, 287 bp, Zea mays
  unsure (1)..(287): unsure at all n locations
ggacctttgggctgatttatgtgcttgttgtatgtgttgtggatgtgngggtattnngnntaattaagttngttgtagggtacagggtgggctgaagaatgatgagaacttgnggaagggagggtggaggagaaggaagaagaggggatgagggtgaacttgttggagagaaggggagtganggtgaggtcggtggcggttgtgagggtgcctcttgtcgtggttactggtggtggtgcgcttccggcgtaaggggtgccttggggggactggttcagagcctgcgt

SEQ ID NO: 332058 - DNA, 334 bp, Zea mays
tggaactttgggctgatttagtgcttgaaatataagcagggccaggaaggtggtggttagtggtgagagtgtgagaggaagagtaggaggaggggctggttacgatggggaaggtgaagttgaagaagtatatggtgaaggagactgttgtgaagactgatgtggtgatgatgaattggggtggtggtaaggttgggtaggtggattggtcggggtaggataagggtgggtacgtgaagtcggtgcgtttgtctcgttgtattttggtgtttgatactaagcttacgtagacttattatgaggtgtgttattttaagtcttttcctgagttgga

SEQ ID NO: 332059 - DNA, 385 bp, Zea mays
ggacctttgggctgatttatgtgcttgtttatgtgcttgtttatgtgcttgacggtacttactaagaccgcaggggcgttcgcggctcctacttctgttccgtcttccgcccttggccacgcggaggtggaaactcgtgtaaggttcaacttccaccacttcggtgtacgtaggagtaacaaggatcgcgtaggtctgcgtacctagtaaaattctggtattagtgggcatcgtaagggtagcgctttttcccctaaactacgtcaccgcattcccgaacgctttacggaagatgaggtagaggagggacggtatcagctgcgagttgttactcgtacgatcaaacctaaagcactcgagcgcccacgtaaccgattcgcggaac

SEQ ID NO: 332060 - DNA, 282 bp, Zea mays
  unsure (1)..(282): unsure at all n locations
ggaactttgggctgatttatgtgcttggtctgttgnggaacgtattgatgattggntggattggtggttctggacggttgaggcggcggtgaggactgaggctactgcttggagtgtggagtcgaaagtgaaggttgatatggaggacgatgatccttacagtactctctttcaattcgttagtgtggctgcctctcgcggccacccctagactccgggcgtataccgcgtggtgacgcatacgcctgcaataccagctgcctcctaccaccctctcgaaaa

SEQ ID NO: 332061 - DNA, 451 bp, Zea mays
  unsure (1)..(451): unsure at all n locations
cttggcttgngacctttgggctgatttatgtgcttgtggatgtgcgggtggatgtgcgggtggcgtttattctttcttgtaggttgcgcatatgaatgtgctttggctgcatatgcttgcttctgagcttcttactaagaattcgtcgcctgcgatgttggtgattttgatgttagctgttactgcggtggttagtaatgtgctttatgcttaggttgttgcgtgtcgtggtgtttgttatggtgctggtgcgtgtttgtgtagtggtggttatgatcatgagggttcgcttcattgtctttctagtgtgaggtggtttcctgttgctgctgattcggttaggtcttgtgttgctagtgctgatgtgaggaattggatggtgcgggctgggctgggtgttatttccggtgagtctcatcatgttactgtgagttgtaatgtgtgttcgggg

SEQ ID NO: 332062 - DNA, 436 bp, Zea mays
ggcttggaacctttgggctgatttatgtgcttgtaatttcataggacttaataggtaactgtagtcggtactccattcccactatttccggcttcttaataactactagtttcaccatagtagccattcccggcgtacccaccggtataaaatactagggtataataatcataataatccgcgtcagtaaattccgtcgttcatctctagtaatagtagccctccttacctaattaatcagtcgtaccgaatctcgtcctccacccgtaataataataatcattacctagttagtcactcgtcgttcatttttagtaaccctccttacctaattaatcgatagtaccgaatctcttcgtccacccatagtagtaataatcatcattacctagttagtcagtcggcgcgagtttcgtcattcctccgatataattat

SEQ ID NO: 332063 - DNA, 359 bp, Zea mays
  unsure (1)..(359): unsure at all n locations
ggacctttgggctgatttatgtgcttgtagtacntaaaaatatattaagtgaagtgtatcagtaatgattcaatattaacggtcgttaaggcaccagtttcttccgtgtcctccgtttccccagcgagtgtaataaacgtgcctaccaccttatagagtctatccgtcttcagcgttagcaccttatagccttctttattagccatcctaacgggtcctgaatacttagttgcgtaagttcataggtcataatcagtgtccgtggtgagtgttccataataattaaccgtttaaccgtaataataacttccggtatactcaatttcataaattaccgtaatgtaataataataataata

SEQ ID NO: 332064 - DNA, 132 bp, Zea mays
tggaactttgggctgatttatgtgcttgtttatgtgcgtgtttatgtgcttgaaaaaaaaaaaaaaaaaaaaaaaaaaaaaagaagagaaggggaaaaaaaaaaaaagaagaagaaaaaaaaaaaaagaaaa

SEQ ID NO: 332065 - DNA, 374 bp, Zea mays
ggacctttgggctgatttatgtgcttggcttgtcctccgaggagcgcggcccgcaccgtaatcaggacgctagcgtactagtcgttttagctcgtacacgtccgaagcacacccctcggcgcccgcttttacacctagcgctcgcagacaagagatacgaaacgctttaagccctccccgacttacggcgaattcatccaacactcgagagacacatcgggggaaaacggaggtcgtggtaacttccgcgtagccgggttgcggaacatagtacacgtaagcgcccgaccgcgtaatacctcccaccatccggctgtaacacagacgggtcgagttgaatagtaaggcaccccgacctcgtatcgtctttgcgc

SEQ ID NO: 332066 - DNA, 437 bp, Zea mays
tggctttggacctttgggctgatttatgtgcttgtctttttagttttgagactcgtctaataacggtgatgtggtgttatacttcgtcttgtgttgtcgttcctgcgctttcctctgtgtctgaggtcgcggagggttctgaagaggggttttgtgggtgttggtcgtcggcttcgtcggatgattcggttgcgtggctgctgtatctggttcctcctggtctgtcttaggtgtgtgggcctgactctgaaccttgttctgttgatgattttaagtctctgtcgtattgtcatggttagcattctcatgacggttctgcgtcgcctgtttgtcttattttatgccccggcggactagcggattagaatgtagcttccgaacccaccgacgtcgggtccgacacgacttcggtggtagaacttctcgttctcgactcc

SEQ ID NO: 332067 - DNA, 437 bp, Zea mays
  unsure (1)..(437): unsure at all n locations
tggcttgngacctttgggctgatttatgtgcttggggaaaaggaccggtctcgagggcatacggagaccatcggtcctagcgtcttagcaagagagtagactcataagacagtcctagcgaattcacgtcttaacactatcggctaaacttccgtgagttctgctacgaacttattaaaggccggagatgaactacacgtccttcataaggtagagaaagacggaacttccgagctcccagtctgctgcgtaaaggtgccggaggacgtacctaataagtccgagggacccctacgcaataaggttgaaggagtaacgcactcccctttctagacctcctcgttatagaaggtaactgaagtcgtcaaagtcgtcaagaaagtgttcgatgtccctcatgtctcttgctcttccgaactgatcggaactgctgcggc

SEQ ID NO: 332068 - DNA, 326 bp, Zea mays
ggcttggacctttgggctgattagtgcttggccagatagctcgaggcataagtaaagagcatagtgaatataccacgactgtggtcggcagttgcgtctaatgcgctactacattcggaaaggactcggtcaccatcctcgacgaggttccgagtccgaacgagtccgtaaagcgtgtcgtaacttcaggcattatcacacacagtcgacgaactggtcctcactcggtatccggacggtcgtcgaaacatacctgtcgcacttaagagactcattcgcaagaggtcgcgacgacaatacgagagtcaactgtcgtagtaactccg

SEQ ID NO: 332069 - DNA, 408 bp, Zea mays
ttggaactttgggctgatttatgtgcttgtttatgtgcttgttctttcgttggtatgggtgttggtggttgcgcttgctatatggcgcttaagaggtaatgatagacagacgaaaaacggaagtacgactcgcactgggaagacgacgaattagtcctaaaactaatagacttgaaggaccggtgaccgaagtcctagaggtgaagcccctaataagaccccattagtataagaagcctcggggcgtgcgactcatgcgagaagtcactcggcacaacgaatttatagttactaaacgtcgatttattaaagttaaagttaaagttagcactggaagccgccaatactctaaggtgctaaaccgtcgacgaaacgtacgtatgttaaaaaaagaaattattaaagtag

SEQ ID NO: 332070 - DNA, 92 bp, Zea mays
  unsure (1)..(92): unsure at all n locations
ttggaantttggggtgatttatgtgnttgtttatgtggttgaaaaaaaaaaaaaaaaaaaaaaaaaaaaaaaaaagaaaaaaaaaagggaaa

SEQ ID NO: 332071 - DNA, 414 bp, Zea mays
  unsure (1)..(414): unsure at all n locations
ggacctttgggctgatttatgtgcttgtttatgtgcttgaggatttccgtcgatcataatacttagaaggagagtatttcttatccggcgtcgtgctccacgggcggcacgtagactcccgcgaaaatttccatcggtaagattactatctccgaggcggagctcctagacattaccgataacgctaaggttaagacttaggataaggagggtactttgttggattagtagtgctccactcccgttggtaagtagtcggaggacggatgtatttccgtggaccataatacctagaaggagagtatttcntattcggcgtcgtgttctaagggaagaacgtagactcctgcgaaaataccgatcggtaagattactattccggaggccgagagtcctgatattaccgacaacgcg

SEQ ID NO: 332072 - DNA, 437 bp, Zea mays
  unsure (1)..(437): unsure at all n locations
ggcttgngacctttgggctgatttatgtgcttgactatctttacgggcggtcctttttaccacggcactgcgaagggcgatcattcgacgactaagggtcgtcgcgcgggcttaaagaagagggcggcgatttcttgttagctttcttcgaagtagatcctttggtcggtgtcggaggagactaagtctaagcctactgatatactgcttaaacccgggtatggctgcccttagatcattgacgagaagtagaggcctcccggtaagtctaaggtgcaaggcgtcgtggcgtagtgataagctttaccctctaaaactactaaatcgcgacatccccgcccgcaattccgtcgcatcaagccccgcagttggacggcccgggagtacggcttggctcctcacggaccgccttacgtcctcgaaatcgtacgctcacg

SEQ ID NO: 332073 - DNA, 433 bp, Zea mays
  unsure (1)..(433): unsure at all n locations
ggcttgngacctttgggctgatttatgtgcttgtttatgtgcttgtttatgtgcttggaagtccacaatagaagtcgacggacattagtgctatccaacagtcttagaataaggacactgatgttccacagaactccgctccaccagcactagaggcttcgttgaggtagtcgccgacgtggcatacgtaacctcgaaggattctgcttgtaaggtcactaacgaaatatacgagtcgaagtagccctttatttcctgcgcggaagcaggtaacgtagtccccgagctaccggacagaacgagggacgaaagtaagaaaaacataccaaagtcagccgatacggaacgtagtcatccgatagcagaccctcctaggaagtccttttaggacgccgagaggggcggaaacttaaattatctccaccccgacaga

SEQ ID NO: 332074 - DNA, 476 bp, Zea mays
  unsure (1)..(476): unsure at all n locations
ggcttgngaactttgggctgatttatgtgcttgtataactaatcattcaacctctctttccgcacgtgagtcgtatcttacacccccgtgcgcaaggaaagcgaggtgaacggccggaccctgagaccctgatagaataacggcgaagtcggaacggccatctaatcggatcattcccgcgatagtaagggcgacacgctacactcagacaatccataagtctgctgtcgacgtctataaacccgggaagggtaccgagtccttatcagtctcctccggcacggtaggaacgaactcgtctaatacaccctcagggtccgactcatccaaagtacctatatgagaaagaaattagtaaagttactaggaccgaacgcgtcccctccgacggcggcgcatctaaaaccccgagaaagtcgcagccttgcctaagcagggtaaagagacacgcccaagctccaaccagtaatcatatc

SEQ ID NO: 332075 - DNA, 358 bp, Zea mays
attcccgtctgtacccactcatccacccactcttccttctacgatttcgattttcacaccccccctatgttctaggtgccagggtccttcttatccttcgctggctactatcaactaccattctacccattgttttgttctgtaacttttcctctctcttacttcttctcctcagtttctaatattatcttactacctacttactcatcactaatctttcttttccatcttattctccttttattatattatactatcaacatccactgtatcaacattctttaaatatatattctatgttatttacatgctaatgtaatgtcaattttaaaaaaattctttatatacattttacttt

SEQ ID NO: 332076 - DNA, 353 bp, Zea mays
gcggccgcgagctctatggcttgtactgcagcctacctggcgcgcgggccctcacagagggagccagtgcgcctgctgtagacatgaccctcaatgacacgctcaactgagccgtctactggcatctattctacaagcacgtgtccaatctgatcatcaaggaccaggacgacatagatgtggataacctctacttcgtcgataagctcattgcctatgcggacactaagcacatgcacttgaagagccgcgatatctacaatactacatgggcaccatgcatcactaaattcacatgacacgaggctgcagattaccggatctacatgatctacaatgattgcaaggaggac

SEQ ID NO: 332077 - DNA, 197 bp, Zea mays
aaaaaaaaaaaaaaaaaaaaaaaataaattaaaaaaaaaaaaaaaaaaaaaaaaaaaggaagaaaaaaaaaaaaaaaaagaaaaaaaaaaaaaaaaaaaaaaaaaaaggggcggccgttttaaaggatccaagtttacttccccgtgcttgcaacttcatagcttttctatagggtcacctaaattcatttcattgc

SEQ ID NO: 332078 - DNA, 333 bp, Zea mays
accactcgtccgggaaccttacctatctgctgccgccgccgcctaattcatcctggctgggctctagctgctatctgggtgcgacttcacatactctattcctgaatggacgaataatatataacatgcatgtacagctagcgaccatgtctgaatgacatcttcgttgctagctgatgctgctactgctacctgtcactttggtgttctaaaagactctgatgaagcgttctgaatgtctgcatttcaagtttgctatgtgacgttaaaaaaaaagccgtatcttagatcttgatgaagccacggcatctatagacaacgctactgatgcta

SEQ ID NO: 332079 - DNA, 185 bp, Zea mays
gccagtctgtcgctggacaatgatgagttctagagcaattgtggactgtgtttgtaaggggaggcagatgctagcgttgatcatttttcactgtacgtttcttccttctggttggtggtacgtgctctgctgcaatttcaaaaaaaaaaaaaaaaaaaaaaaaaaaaaaaaaaaaaaaaccaaaa

SEQ ID NO: 332080 - DNA, 74 bp, Zea mays
gaattcccggctggacccactcgtccgttcaatcatctagacagcctcaatatttccgtcaactatgcccaatc

SEQ ID NO: 332081 - DNA, 391 bp, Zea mays
tgagacttcaattaatctagttaatctagtctcccttctactaaagactggggcatggccagaggatgttctttcacctctcagtgctttgcggaaagttgcacgatcattgtgcatcatcttgagctatgcatcttctgcaactgttgatcaaatatatacttgtgtgctgaatggtgaaaactcttccaagtcttcaatcttacacttagcattgctgatagaaggatttcctttggattcattgtctgatggtacaaaggaacttgctatgaataaaatgtttacctcttttgctggctatctggagagctactccaagaaccaccgatttatcaatgtgccaacttgttaattgggcgttttaggacttcctatacatgctttaacc

SEQ ID NO: 332082 - DNA, 238 bp, Zea mays
gacagatcagagccacagctatcaccatcaccttgcacccaacgcccacggggactgacatatctaccatagttgccggcggcgacatcaccaccatagcacttgtccacagctgcatttacagcaccaacaatactctactcatgagcaatgccatctacagatacgttctgaacacatgagtgctaccgcacgaacatgatagcatgcatcatctgcggctggttaccgacatgca

SEQ ID NO: 332083 - DNA, 213 bp, Zea mays
cgacccacagccttccgcacattaatcttttcatcttaacccttttcgaagttgaaccaccccaagacccccttgaggtctttaaccccttgacccttgaccattttcaagttaaccatatttcgcttaaccacttccctgcttttaattccgccaaacaccccaaaattcttgcccaattccccgggcgcttcttccaaaaaccgtttccca

SEQ ID NO: 332084 - DNA, 73 bp, Zea mays
tccctggtcgacccactcgtccgaaaaaaaaaaaaataaaaaaaaaaaatttttataaaaacaaaaacaaaaa

SEQ ID NO: 332085 - DNA, 335 bp, Zea mays
tttttctgcttcgcgtctggggtttttcttaattaatttaggcagcacatgaataaaggtcatgcaacgttcaacaatgttctgctgacctattatgctccaattcgtgaagaatcttctgatgattatgctatcatcttcttcaatcgcttatggattatcatcatgtcctgctcgctgctgcaccatttactaacgacgttctgctgctaacgactctaggagtttgtggtgtgacgacacttaatgaatcctacaagatgcttgttaccacattcttgtacgatgctcatggaattgaaaatctgctgctaccaacaaaggattacctttat

SEQ ID NO: 332086 - DNA, 307 bp, Zea mays
accggtctcggaattcccgggtggacccacgcgtccgcccacgcgtccgtagctagccagtgtccttgcgaagtgcaagcagcggagtgggctgtatttcctgatcaaataattttgcctatggcacattctgtggaaactttgacggatctttgcctgcttttctatgcgatgtaagctgctgaaacctgcactcatcaaatgttgtgtatgcagatggtaccatgcatttgtttccctgaatggcttcaaatgaaatgaatgttttttttaaaaaaaatctatttaattaatttaatttttaaaa

SEQ ID NO: 332087 - DNA, 139 bp, Zea mays
cccgggtcgacccactcgtccgaaaaaaaaaaaaaaaaaaaactaaattttttaaaaaataaactaaaaacaaaaaaacgaaggttacttataaaaacaaggcagactatttataatttctagtttacccaaactttca

SEQ ID NO: 332088 - DNA, 231 bp, Zea mays
attcccggatcgacccactcttccgcaaaatctcaaaaaccattcctatttatacaaccatacttcaccccaccctacctgacgcctataaactcactcatgtcataacaaaatacagtctccaaatatacccttctcattcatacaattctaatcttataatcttttacacatacaaccaataattcccatatatataaacttcatataattttccaaatacccaaaacc

SEQ ID NO: 332089 - DNA, 410 bp, Zea mays
  unsure (1)..(410): unsure at all n locations
gttgaagctgaagggtaaagcgctggacgtgaaagatggtggagtaaagaaaaagaaggggtaccagcatgagaagtcgtctcagactgaatctgataagaatagagatgaagagaacccacatcttgactatgaccatctcacaccagcagagcgccgatacatgaaacagaagcagaagatcgacatgcagaagatagccaaagtcgccaacaagtcacacaaggaccgcatgcaggacttcaaccagtacctagctaagctcagcgaccactacgacgtccctaaagttggtcctggctaacatggccaatctagctgtgttacgcacgaacaattgtatgctgagtgggtctatctagttntctattagcattttatatatcgttttacagttgttgtaaaacgac

SEQ ID NO: 332090 - DNA, 403 bp, Zea mays
tacttgttcttaattcccggatcgacccactcgtccgaacaagtttactcactattgccatttctttacgctaataagtccactctcaaagcgtcgttcacctaactacttaccgtcctctaatacataaaacctactcaattaatctgcaatactactttacctacaatacaatcttaaccagctaacttattgatcaaatatcaccaattactcaaactcatccattaaaattcccaattttctactgaaacatactatgatctgtatataaaccacataacattcactactataatctcctgtatgatttctaactactgaattacatataaatcactaactaatctactctatcttaccaatactctcttaacatttctcttctgatttaacattacat

SEQ ID NO: 332091 - DNA, 282 bp, Zea mays
caatttatgactgtggggataaaggaaattcattctggttacaggattgagagtgcggttgctgaaaagtcacatgaagatcacgcagagcatgatcatgaacaccatgagcatgagaatgaacacgaccatgaccatcatcaccatcatgatcatgatcatggtaagccttgatgttggaacattattatggcatgagctgactgacgtggtagtatcaaactcctgattctctatgatcagtagcactcacttgtaccaccaattaggaaatgatgtgca

SEQ ID NO: 332092 - DNA, 340 bp, Zea mays
gccaccgtcggctcctagcaagggtgctatgacgacgactgctatagctccgtgtcaggattcagcacattagtcatgacatgctgaaactccatctatatagacactagatctattgacataactgtaaacgtatataataaatgcagtcattgtcacattatgcttgtgaagtcctcataggaaaggataactcttgaataaaatgctctggaaagtacctgcctacaatctggacttgcgaacaatcgaataaatggtgacaatgaggctaattgtcttacgttgtacttgatgaactctagagtattatcactcgtcaaactgaaaacgggaacta

SEQ ID NO: 332093 - DNA, 325 bp, Zea mays
ggaattcccggctcgaggcacgcgtccgcccacgcgtccttccactcgtcagtcctctcttcctaccacgcttccgctcagttcgcgtgggtattatccaaattaagaccgaagctccttgaccgtctgatctcctgtccaaatacaacctactaatcactatcgaccaacatctcttttatgccacggtctacacccgagcaaagttcattttaccagtggatccctactaataaaggaagatgattgcgatctcatcttgtggatctatactaactccctactcactttcgctacacatgatgtacactcataataaatgtat

SEQ ID NO: 332094 - DNA, 168 bp, Zea mays
attccctctcgacccactcgtcctcccacacttccttccactctccaaccttcttttcctaccacccctcctctcacttcacgaagcttttatccaaatttagacctaacctcctattccttctaatctcatcaacaaatacaacaccctaatcatcatctaccaaca

SEQ ID NO: 332095 - DNA, 366 bp, Zea mays
cccacgcgtccgggaggcgcgtgctcttctccactccacctccccctccccccccgcgggcgccactgacgccgctcgttcgcgcagttttggtcttctggccatcagggcaggcggggaacccgcgggagccaggcgcgcgatcgagcgagcggagggaggaggaggatgatgcacgccaagtccgagtcggacgtgacgagcctggcggcgtcttcgcctccgcggtcgccgaagcgtggcgttgccgtggtcggcaccggcggcagctgcggccgctactacttgcagagcccgtcgcggtagtcgcacgactgtggcggcagctggcgcaaggtgctcaacgaccagggctggaccgagtgc

SEQ ID NO: 332096 - DNA, 261 bp, Zea mays
ctcatatacaacctcgacctcccgtatcgctctgggcaccacgcctactcggggccgtcgtcaactccaataatcacctcctccaacctgctcttcaatctgcggaacctcttctacctgcacgcctaccaagcatccatcatcaacagctacgatcctagactcgactccaactcctactctgagctcgacaccatacaataccgctcctacatcgccctcggctcctaccacttggtgatcatctagatcgactcgtca

SEQ ID NO: 332097 - DNA, 83 bp, Zea mays
aaaaaaaaaacataaaaaaaaaaaaaattaaaaaacaaaaaaaaaaaaaaaaaaaaaaagaagggcttaaaaaaataaaaagg

SEQ ID NO: 332098 - DNA, 57 bp, Zea mays
cccacgcgtccgaaaaaaaaaaaaaattatttaaaaaaaaaaaaaaaaaaaacaaaa

SEQ ID NO: 332099 - DNA, 418 bp, Zea mays
gtgcaacccctgccatgcatccgtccttcgcgcatccatgggctggcactgtccgggggtggccatatgaccagtccgggcgcccaccaccgccgccagcgttcaacgcccttccacaatacaacagcttcggcagcacacccagtgcctatggaggcttctacggtgctcctccccctccgtatggcatgccctacgggggagctgcaccccctggtttccaggcgcccgcaccagcataccaagcgacgccctggaaccccactcacggtggtgcatggcatcaggacgcccttgcacactccttcaacactatgacgctcaatccaccgaacgctacttccgagtggtatgccgactccggtgcaggatcacacatgacctcggacgctggatttgcaaaccatgaacgtgatcg

SEQ ID NO: 332100 - DNA, 228 bp, Zea mays
gtcgggttcatggtgtcggccgccatcatggcgtccgtcacgctcgtgaactgcgcggcggcgtcgttctacgtgaaggtgaagccgcagaagagcatgtgggttggcttactgaaggtggtggttgttgctgtcaagaaccgtgaccttgtgctgccagaggcagatcatggcgctcagttccattggttaccgggttcgacacagacggttccatcaaacaaaatc

SEQ ID NO: 332101 - DNA, 262 bp, Zea mays
aacacgcgcacggcctcgcacgccattatctcaaccgtcacgctccatgaactgacgggggcttatcgctcgtacttgaagcgcatgctgcaccactagcatgtgagaccacttacatgtgctagaggttctgtctggaaagaaaccggaccttctactggcacacgcacatcatagaactcagttgctttagctacctctgacgtacaacacgctgccatccgacatgatcgcagctctgaacacttcatgcatgacaccg

SEQ ID NO: 332102 - DNA, 311 bp, Zea mays
aacccacgcgtccacccactcttccgttcaactcctatgcttatcactgccactaccaccagatcgagctagtccttctcacaaacccgcatgctttactgatacacctacaaatcttcatcttaacacacatatatctccactacatctaatcctcacacacatccaccattaatctcatacctaacacataaccctcttcacttatcccatacttcacatactcaacgcacaaacgaattccactatcgtctaactgatcctcaccatccccataatactgatcctttcactttccacactcaatatta

SEQ ID NO: 332103 - DNA, 235 bp, Zea mays
ttttatctcaaaaaataaaaaaatcattaaaaaaaaaaaaacaaaaaaaaaaaaagaaagaaaaacttaaaaccgagaagaacatattaaaaaaaaaaaactcctctaacatacccattcttccttaccactacactcaaaatcattccccttattttaaaaaacttctccttacacttacccccattgttcctaaccccaccatttttaaccccactgcttactccctatccaa

SEQ ID NO: 332104 - DNA, 289 bp, Zea mays
aaaaatcttaaaaaaaaaaaaaataaattaaaaaaaataaaaaaaataaaaaatggtagcaaaataaaaaagggctgcgggcatttaaaattacaacaacgattgctaagaacaacattaccattgctccactgttctatactcatttacacatgtcaattcctcttcacaatctatacacactctttatacaaaacttatatcatacacaaaccttaatttttacactcgctactcttccgtaccaacatccaatctcactcgatataaatccctttcactatgacct

SEQ ID NO: 332105 - DNA, 285 bp, Zea mays
gtggcccatgacatgttcaccatggactaccgatgcccgctctcggccttccaggctgtcggcatctgcttgagctgcttctacaccaaattggcctgcgcgtaaaggagggatagaagcagtggaaccggagcctctatgattttttatgcatatcggtcgtgcatggttgaattctgctacctgactgttaacctggaaccgggaccctctttgcattttgttcatgggttcgatgggaatgtgaaaaaaaataacacaaaaaaaaaaccttaaacaataacc

SEQ ID NO: 332106 - DNA, 333 bp, Zea mays
ccgatgactaagatcctcggtggggattctagaagacagagaactctgctactgtgggagtgagctcaagggatcaatggattctttacgcacattggcctaggttgagactgaccatggatcaacagttgcttgagacttcagtaactttgctacactgaggcagcttgctattgacaaggttcaaccggtggtgatatctttgaaacttggtactctcatccagtatctcagtggttcttcactgcgcatgctttcagtcggtgaagaatcatgtgaatacttcaggacgatggagtctatgtgcgcgtccgatctaactgatctgatagc

SEQ ID NO: 332107 - DNA, 394 bp, Zea mays
aaggggccctgctacaggaagaaggtcacctgccccaagaagtgcttctcctcgtacgagcggcgccggcaaggggtacggcggcggcggcggcggcggcagctgcaccgtcgactgcaaggtcaagtgcacggcctactgttgattcgactcgtccgctgctggcgcgtagcggtttggcagtgggcggtgctagtggctggcggtggcggcctgctagctgctgttggtgtgatggcgcgtgtgcgtgtcggtgagctgagtaccgggtggttaacttgtgttatcatccccaatagtatactagcgtacttctcgttctggggactatttatacgtagaccacgatatgcgtaggggcggtttatttctaagataagaatataagatgctc

SEQ ID NO: 332108 - DNA, 403 bp, Zea mays
gaggacttctccggctgcacgacacctactggcgggactgacggcacgttccggtcggatctacaccagctcctcctatgaatactgactacctccagcatcaccaactatcttctcctacgccaaaagctgcaggaacagcaacaggccattgagctccagagccgacacctcatgggtcttcagcttctcgaccttaatgctcagcgctgatgctgcagcagcatcgccactgccgacaccaattgtctataccttccaatccagcctacctgtgagcaccaccgcagtctagtcgccatcgacgtcagagtcctggcagcagctgctaaagctgaggagcggatttgctctggatgtgaaggtcaactgtggtgataaagatgaatctgctcgcgaggcg

SEQ ID NO: 332109 - DNA, 387 bp, Zea mays
cgaccatcatcacagatcatccacagaggagaccatcttccgtgtagagactagactggagagagagggggatatatggcagacatcgtccaaggtgtggagctcgtgggtggagtccgccgccgcgtccggggtgaggttcagcgtcgcgctgcacctggagcccaagaccgcgctcgccctggccgccgccgatggcctcttctccgcctagctagctagctagcctagctgcttccaggcccttctcctgagtgagcagagcactgagcagcagtagtcgagttcttctggaccatataatacaatgcgcggttcacctgtacattcattcttcgcttctcctgcgctcattgatatgcgcatctgcttgattggtttctccct

SEQ ID NO: 332110 - DNA, 415 bp, Zea mays
gtggaatccagtagcaacaatagagcaacaatggcgaccaagatattttccctccttgggctccttgctctttctacatgtgttgctaacgcgacaattttccctcaatgctcacaagctcctatagcttcccttcttcccccataccttccatcaattatagcttcaatatgtgaaaacccagctcttcaaccatataggcttcaacaagcaatcgcagcaagcaacatacctttatcgcccttgttgtttcaacaatcgccagccctatctttggtgcagtcattggtacaaaccatcagggcacaacagctgcagcaactcgtgctacctctgatcaaccaagtagctctggcaaacctttctccctactctcagcaacaacaatttcttccattcaaccaactgtctacac

SEQ ID NO: 332111 - DNA, 323 bp, Zea mays
gtttctttaataaaaaaaacagcatcatataacgaaacattcacgtcgataccaggcgcatcttactatacatgtgcactcataatcataatcttgaacaatgtcctcttcacactcacacttacttgcaaattaactctttctgaactctacatccatctatagacccacacatacaccaagtctcacaactcttagccctgctattagaacatacaatacttcttatacccattaataacgtttaacattaccatgggattcaaatttcctacaatttaactctttctagaaatatacgatattgatcattccatcatttg

SEQ ID NO: 332112 - DNA, 440 bp, Zea mays
cccacgcgtccgcccacgcgtccgctttaaataaccagtgttgcaaaatatttgttggcttctgtgttactccatctgttccatagagatgacgtgcagtcaaagttgaccactttatccacctatacacacgaaagtgtttacagagccagcattatgtatctagaaatttgagaaatatttctagttttcagaacaaaaggcttatattggactatttatcctcttcttaatataataatacacacctgcgtgttcgagaaaaaaaggctttgctgttgtatttcatgtttctcaaaacaaagaaataaattccgtggtgattttcgatctcatgaatgacaaatgttataaataattacattctgtgttttagaacctattttcctggtcactgagttcatactcatcaattaatatgatgtggtgtcaacactaac

SEQ ID NO: 332113 - DNA, 335 bp, Zea mays
cccacgcgtccgcccacacgtacggtcacttcgatcgaaaataatacaaacgagaaggaccctaactataaacaaaccaaaaataaaataaaaccatcctatacatcctaatcacaaaacaactacgcacacttctggctagacaagttcaccaccgcacggatacaaccacatagactaccaccgttctgacctacaagtgactatctcttgccctcttaccacaacttctgacactggctaaaactccacgctcaagtacctattcggctagttcaacatccacattaagcctcttcgcggcatactccatagggactgtccacctcttctac

SEQ ID NO: 332114 - DNA, 433 bp, Zea mays
  unsure (1)..(433): unsure at all n locations
gcgagcgcagcctcctcgactgcttccgcttctgctcccttgggtgcaaggtgcgtgcgacgagctctgtcgcattgcgcgtttctatacgcgtcgttgtcaacgtccccttctcttcttgttttgttggtacgcgcgcgcgcagatagtgggcacggcccgtggctaccgtcctgggaagaagaagcacggcggcggcggcggtaacaagaagagggcgtcgccggcgccggcgcttaaggacgtgcggtctgactcggaggactcgtgcaccagcaccagcggcgccagcagcgacaagagcagcgtcgtgcagagctccccttcgncgncgacctctgccagccaccgnccccccgggaacaagcgccgaaagggcatcccgcacggtcgcccttgggcagcctcatcgtcgagctctaggactcttcgt

SEQ ID NO: 332115 - DNA, 403 bp, Zea mays
  unsure (1)..(403): unsure at all n locations
cccacgcgtccgctgttgtatcattgtggccataagttattttgggggataacttgggttgcggatgattcgttcagcatgtcctcgtgctcttcacagggatcatgtccagactcacactgggctcgttgctcggccttgttgagctagagatcctccaacacagcggcaccgacaccaaggctcagaagtgtttgaaaaggaaagagaacaaacaaaaatgggtatagtcaggaataaggaaaagcattgtggatgggattcattcttttctatggttcacctcgttctggtgatatatgaaatggtacatcagataagtgggaagaggaagtataatgcaatggataatcataaaaagtgatcactctggagtatcctgtatctaccatttntatttact

SEQ ID NO: 332116 - DNA, 78 bp, Zea mays
gagccatccctccgtagttagcttcttagagggactatggccgtttaggccaggggggttctcaactatgagttcccg

SEQ ID NO: 332117 - DNA, 413 bp, Zea mays
  unsure (1)..(413): unsure at all n locations
gagcatgccatgtcatgctggtgcctgcaaatgctgtatctgatgaggaattccatggcccatgttgctggtgtctcaactgctgcaagttttggtggtcggttcttatttgagcccatcctggtcggtattggagcttgtacagaacaacaccgaagtgcatgatattcttgactgaataaaattaattgacgacacttgttttacgtaagggaaagatgaggataatttggagacataggtctaaccacccggaaatagtaagcgggattctctggtatgtnncttttttatatagtgtggcatgagtcgtgtcaacctcagctcagctgaaagggctcaagttcgtgccacaacacaactggaagagctgcngccgtggccaaaggaggaaatgccaaacaacagcaaca

SEQ ID NO: 332118 - DNA, 342 bp, Zea mays
aaaagccaaagccaccaggccagcaacaatagaagcgagcgagcgagcagcagtaggcgagcggcgcgggcgaggagcagaccagcacccagcagccctcgtcggggggcgggagttgtagcttgatgaggcgtcgcctttgcgcgtgtgctgtgactgtgactctgccgctaacccggttgcatttctccatcttatccctctcccgcttctgcttcctcgtctcttacttcgttctgatcccgctggcgaggatgcattcgcatttgcggcactcaatgtagccctaccagaaggtggtgaagatcgtggacgtcactgtcagtgtggtgtacaatgtgc

SEQ ID NO: 332119 - DNA, 172 bp, Zea mays
gaattcccggctctacccactcgtcctaaaaaaaatacaatattcaaaattaaattataaaaaaaaactatacataaaataagagccgaaaatataactaattaaaaaaaaaatacaacaactaaaaaactatctacaactccctacccattcactcttctacctctcctat

SEQ ID NO: 332120 - DNA, 264 bp, Zea mays
aactgctagtcgaagataattaggtgcagcgtttatactaacataaaaccatgggttgagacatatcccgggtaggccgtaacacaggcagtctccgctctgttgctagtggcaagcgctgcctgtcctgtgtctgtttgtacgttgacaatttgattccgttgctcaaggatagaagaatattgatacaggagacccgaggactggtttgttttttgcaaaaaaaaaaattacaaataataaaactaaaatacaataaaaata

SEQ ID NO: 332121 - DNA, 356 bp, Zea mays
aaaaaaaaaaaaaaaaaaaaaaaaaatttatataaaaaaaaaaaaaaaaaaaaaaaaaaggaagaaaaaaaaaaaaaaaaaaaaaaaaaaacatacaaatatagtatatccattcttactttcccatcctttctatccccttacactcttctttaatattcacctaaatttaacttacctaactcaatttttcatacccacattttttccaaaacccctctgttaacccactttattcccctcccttaatatccttttttcacaacctcttttaacagcgaacagtcctttccaaaaaccctttcccaactgttctttccaccttattcgcaactttaactccccatttgcccgcc

SEQ ID NO: 332122 - DNA, 276 bp, Zea mays
ttcccgggtcgagccacgcgtccgccaagattgataacactcatctttcaacctatcaatatagtagtagttctttctttagaggaaaaaaaaaaaaaaaaaaaaaaaaaaaaaaaaaaaaaaaaaaaaaaaaaaaaaaaaaaaaaaaaaaaaaaaaaaaaaaaaaaaaaaaaaaaaaaaaaaaaaaaaaaaagggccgcccctttaaaagacccaagcttacctacccgtccattcaacgtaaaaacttttttatagggccacctaaatcaaatt

SEQ ID NO: 332123 - DNA, 249 bp, Zea mays
  unsure (1)..(249): unsure at all n locations
cccacgcgtgcggttgatcctgaggcatgtacgtgcttgcttgacaccaatgcttatggtgagattatgtagtactgtatgtgcacagattgatggagtacacaaactaagctcgtatcgctagagaatcatggtactatgaataggcatttggatcagcgtgtttagttctagtaagataataccacttctcaattaatgcaattccagcctcccaatgttttgtcaaaaaaaaaaaatnnttaatat

SEQ ID NO: 332124 - DNA, 297 bp, Zea mays
cccactcatctcttgtatcacataccattattgccttttttcttttgcgtgaccaaataattacagcgggaatatcttttaccttgtttggcatcttccacataatcaatttaaacctccacatttggggctaccacaataataattattatgatcaccacaataattcctattttcaccacattaattattaagttgatcaccacattatatacttcttatagcacattgaaggcatcttgtataatatcaagtacaatatcaccgtctaacactgctactagttcttctaccaca

SEQ ID NO: 332125 - DNA, 399 bp, Zea mays
ggaattcccggtcgagccacgcgtccgcccaaatcctctactagtatatcgggtttctattgcactaactggcattaatactacgctgaaatcactggacagcattaccgatccaagcacaattctaactctacataagagcgcctcacatcacaatcctgcacatcattttaccattttattcttaaaatcattattccatcaaatctatctatatcattaatacatccaaactttagatatataccataaacctcacatagtcattcactcatgttgacccacatctaaatgagatactaatggtatggatccaaaatggcaatcttttaatggtatcgatccaaatttcccattattcttttatgaacattatacttatcaagtcctacccattcc

SEQ ID NO: 332126 - DNA, 435 bp, Zea mays
ccaagatattagccctccttgcgcttcttgccctttttgtgagcgcaacaaatgcgtgcattattccacaatgctcacttgctcctagtgccattataccacagttcctccgaccagttacttcaatgggcttcgaacacctagctgtgcaagcctacaagctacaacaagcgcttgcggcgagcgtcttacaacaaccaattaaccaattgcaacaacaatccttggcacatctaaccatacaaaccatcgcaacacaacagcaacaacagttcctaccagcactgagccaactagatgtggtgaaccctgtcgcctacttgcaacagcaggtgcttgcatccaacccacttgctctggcaaacgtagctgcataccaacaacaacaacaattgcaacagtttctgccagcgctcagtcaactagccatggtga

SEQ ID NO: 332127 - DNA, 188 bp, Zea mays
cctgggcaaaagccacattaggacacgaatttaaatccaactaacacccacataccacttacagtcattaatcgtggtttcacgactaaacgcgacaagagccaatgtctgacgattgctgaccgacatgtacatgctgtaaaagatcccaatcagcttctaacaattctacatgatgactatgaaca

SEQ ID NO: 332128 - DNA, 370 bp, Zea mays
ctcctccccctccggttcgggttcgggttcgtgaggttctccggggttcgggttcgggggtgagcggatcgagatggcggcgtcggatgttgagtaccgctgcttcgtcggcggcctcgcctgggccacggacgaccactccctccacaacgccttcagcacctacggcgaggtcctcgagtccaagatcatcctcgatcgggagacgcagaggtcccgcggcttcggcttcgtcaccttctccacggaggaggcgatgcggaacgccatcgagggcatgaacggcaaggagctggacggccgcaacatcaccgtcaacgaggcccagtcccgcggcggccgtggaagcggcggcggtgggtacggtggt

SEQ ID NO: 332129 - DNA, 363 bp, Zea mays
tcgcgcctctctacgcctcggttttacccaccggaccccctccatgtcgcatcattcatcctgggtctgctccactccgcccttctacccactcgccgcaccatcaggccccacgcgcccttcctctgctcctacacccatgtaccgatccctaccatggtcgtcgccgagtcgaacagccccgacgatttcgacagcctcgtagccagctcacgcaaggacctgtacaggatccgccccctcgttccgcagttgccgccgccggtggaagacggagcgttcgcgctcgccgccgtgcaggccactgtcttccgaagccgtggcctctgcctcagcgtctccgtccaccacgctgcctgcgac

SEQ ID NO: 332130 - DNA, 328 bp, Zea mays
ccttgccacatctaacaatacaagccatcacaacgcaacagcaacaacagttcctacgaggactgagccacctagccatggtgaaccctgccgcctacttgcaagagcagctgcttgcatccaacccacttgctctggcgaacgtagttgcaaaccagcaacaacaacagctacaacagtttctgccaacgctcagtcaactagccatggtgaaccctgccgcctacgtacaacaacaacaactgctttcatctagcccgctcgctgtgggcaatgcacctacatacctgcaacaacaattgttgcaacagattgtaccagctctgac

SEQ ID NO: 332131 - DNA, 348 bp, Zea mays
ggaattcccgctgcgagccacgcatccgacttatgatactgatgcttcctcccactataaagctccgttctcaaaaactatctacgactgagaacactgctcctgcgtgctatgaacaaagactactacctatctaatactcctatgctaaatctgtcatactaaagtatacgttctccataaaatccacacattttatatctcaagatactcctaatgatattccctaaatacaagctgaatataaacctttacagacttttaaactgaaacgtcttcttcactgaattactcaaccaagactcttattatcaccatttaacgtattaatcacattattccacaaat

SEQ ID NO: 332132 - DNA, 349 bp, Zea mays
ctacctctcccaaatttattttccactacttttaccactaggacgtgcatattgctcctcctgctatctataacgactacaatctacctaatcttctctgctatacactactaatccccattccattttaacacaaacatctactcctttgattcctaataccatcttctaatatcaatatacttctcaatcacatatactatatcctcacattttcataattttcaataacttattctatcaagcatccaatccattctatattaattaaaatctgtcctctgtaaacatgtcaacttcctatctttccacattctcaatcaatctaaatcattacctattcatctct

SEQ ID NO: 332133 - DNA, 301 bp, Zea mays
aacactcatttgggccacaaggccttttcccaataaaaactgcaggtacctaatgcgagtggttacactgtcaacgaacacaaaccaaactttgactctgttcttgcgaccccactagataaatcactctctgattccatccacagcacaccatttgaaaaaaccgtctataactctatcccaggcacttcagtgcacatatccttgtccgaatactctgtccctagcacaccgatgcataactaagcttttgactattctgtcacaaccactccgatgcataacacactctttgactctg

SEQ ID NO: 332134 - DNA, 96 bp, Zea mays
cccacgcgtccgaatgacatatttatataacaaaaaaaagaattaaaaaaaaaaaaagggagggaaattaaagggataagggtgaaaaaataaaaa

SEQ ID NO: 332135 - DNA, 409 bp, Zea mays
ggcttctcctccccctccggttcgggttcgggttcgtgaggttctccggggttcgggttcgtgggtgagcggatcgagatggcggcgtcggatgttgagtaccgctgcttcgtcggcggcctcgcctgggccacggacgaccactccctccacaacgccttcagcacctacggcgaggtcctcgagtccaagatcatcctcgatcgggagacgcagaggtcccgcggcttcggcttcgtcaccttctccacggaggaggcgatgcggaacgccatcgagggcatgaacggcaaggagctggacggccgcaacatcaccgtcaacgaggcccagtcccgcggcggccgtggaggcggcggcggtgggtacggtggtggccgtggaggcggcggctacggcggtggcgggc

SEQ ID NO: 332136 - DNA, 307 bp, Zea mays
aaaataaaaaaaaataacataatatctataacaaaaaaaaaaattacattaaaccgagctggaaacataaaactctaatgcttaaaaaacaaaaacaacaactactaaaattcaaccactttactagtttcatccctactaccttatccatcaaccaatattctccgttctaccaccacacttcaattaactctccaactttattaaaattgcaacatttgataacattcaaccaactaaatttaactaacttaccaaccttctaccttttgcccattattgcaattgccataaattatatttctta

SEQ ID NO: 332137 - DNA, 328 bp, Zea mays
cggttcggaattaccgggtggacccacgcgttccggtagggttggagacgaatgcacaagcttgtggtgcctgtcagcttgttgagaaggaggtcacataagaatttggtagtgaatatatatacccctgcctgcgtgcaggtgctggccatgaaagatagtagctgctcgggacttacatggctatgcctggtattgctaaagcagtggttgatgttggctaggaagttggtgcggatgcaagttgccatggtttgactcggtaaagcagtgatcacgatcgcttttagcttacatttctatgctttataaacttgacttaaagtgg

SEQ ID NO: 332138 - DNA, 207 bp, Zea mays
cctaatggttacctccaacaattttcctccaatcaaacttaggggttggggaccctgccgggactaccgccaccaaccttggacgctatcttaaggggccaacagttcccaacagatccctcccctgctatggagatcgtgcagaaccctaaagcatacccactggctgatgcgcagctgaccatgggtatcctcaatgtcatccat

SEQ ID NO: 332139 - DNA, 273 bp, Zea mays
  unsure (1)..(273): unsure at all n locations
caatntgaaaactgattattacattgactgctagtttttaaaaaaaaaaaaaaaagagaaaaaggaaaaaataaaaaggcagacagataaaaaaaaataaaaaacaaaaacaaaaaatcaaaatctaataaaaaaaaagggcaaccgcctctcgttttcaaagttccaatcttccttcctccgacatccaacgttttatcttttttatcctaaaaccaatttacaatccactgccctacattttacaacctggaaaatccaaaaccttcccat

SEQ ID NO: 332140 - DNA, 278 bp, Zea mays
taccgtttcgtaattcccgctcgacccactcgtccgaaaaaaaaaaaaaaataaatataaaatttaataaaaaaaaaaaaaaaaaagaaaattgttaaatttaaaaaaaaaaaagggcatcccttctctttattccaaatttactttccctttcttgcaacaccataattctttttttttgccacctattttcaatttactttcccttattttacatcctcttcactttaaaaaccctttccttacccttcttattttccttccatttcttccccctt

SEQ ID NO: 332141 - DNA, 277 bp, Zea mays
  unsure (1)..(277): unsure at all n locations
gtaccgtccggaatgcccgggtcgacccactcgtcctcccgctcccccacggtactcatccgctagcctgcgattcctccntacgccaccgccacctagcgtggagtaccgcctccncccttctccnatatcttcatcggcgaacaaatcccaccacatcccgccccttccatggagtccgtcgttaaccctaatgcatacccgcttgctgatgcccaacttacaattgatatcctccatatcatccaacaggccccctactacaaacagcttaata

SEQ ID NO: 332142 - DNA, 280 bp, Zea mays
  unsure (1)..(280): unsure at all n locations
ccgnttctaattcccgctctacccactcatcctcccacacgtccaantcaaactataatttttaaaattcctgtcnnccacaagaattttgttaattttaaaaaagactagggctccaacaancttaatnacttctcttaattactatctatcaaagaatttctctttaaccgtcatcttcacaaacctaatttaatttcatacaacaaaaaaaaaatttcctccctttttaaatttccaatttatattacccttccttccaacaacaaaaccttttttt

SEQ ID NO: 332143 - DNA, 301 bp, Zea mays
  unsure (1)..(301): unsure at all n locations
ccccagtcctttaaaaacccttcttgctttttaaaaactacttctatacagtcntaagttatttaaaaagataacttaaacccctgacaaactcttcttccggctcaataaaatctacatgattccacctcctccttctctcactggttctcatctacataaagatgacatctccttctattacaaatttgttaccaccaatgaagtcaattcctttttaccatcctcatctattaacgacctttcatcgacgtcaaccgaaaaggttcatttgctttacctaatttcagtgctacatacc

SEQ ID NO: 332144 - DNA, 207 bp, Zea mays
  unsure (1)..(207): unsure at all n locations
cggccaactaaaatccccattttctcgttttggatcattcccctgtttattggcctgggtgatcgattgtcctcaatagtttcaacattcnagtaactgttgcgggaggtgccatggaagcattggaattcttaaatgcgaacaacagtcatgttgaccttattttgactgactactgcatgcctgatatgactggctatgatttgc

SEQ ID NO: 332145 - DNA, 384 bp, Zea mays
taccggttcggaattcccgcgtcgacccactcgtcctcccactcgtccgaaaaaaaataaaaaattaaaaacaaaaaaaaaaacaagagaaaaaggaaaaaaaaaaaaaaaaaaaaggaaaaaaaaaaaataaaggggggccgcctttttagatcctccattcttaccccccccttcctacgacttaatccttcttttttttccccacctaaaattttactacccgccttcttttaacaacctgacttctaaaaaaatcctttccttccccaaattaatctttttgcaaatcctccttttttcacctattgcaataacaaaaaagccccccccacctttctcccttaccaatttttccccctccctaattaataatgcgccccc

SEQ ID NO: 332146 - DNA, 152 bp, Zea mays
aaaaacaaaaaaagcggaatacatagagaggatcgtcggacagaacagcatgaaggtggccagcgttctcgccgtgcgcctggctctgtcagctgccatctcctgtgcaatgcatataccctgcccctgcgcggtgctcaacggcttgtacg

SEQ ID NO: 332147 - DNA, 294 bp, Zea mays
aatggccccatccacccactcattctctcctacattccacaactctatatacctcactacccacaccctccataagaacagttatttatcctaacccaaacataatccataacactatcactacattactaactctaatccacataaaaacaataactacatcattcacattacgaatctcattaacaaaataacacacacccacttccttctacaaaaccacaacttacatccccactaattaaacacttattcttctacatcctatactaatattttaaacacccaaaaata

SEQ ID NO: 332148 - DNA, 363 bp, Zea mays
cccacgcgtccacaaatcatttacttccctgctaaggctattctcagatgcaaaaagaaaaaaaaaaaaaaaaaaaaaaaaaaaaaaaaaaaaaaaaaaaacaaaaaaaaaaaaaaaaaaaaaaaaaaaaaaaaaaaaaaaaaaaaaaaaaagggctgcaaaccaaaaaaatcaaaacttacattcacatgcatgccacttctaatctatcaaatattgccccctaaataaaattcaatgcccaccattttaaaacaacgtaaatggaaaaacccttactttaccaaacttaatcgcctattaaaacatcccattttccccaatttgattaattttcaaaatgcccacaccaatcccccttcc

SEQ ID NO: 332149 - DNA, 72 bp, Zea mays
aaaaaacatacaataatacaataacacttaaaattactacaaaaaaaaaaaaaaaaaagccaacggaaaaat

SEQ ID NO: 332150 - DNA, 393 bp, Zea mays
ggggagctcaagtcctggtccttctaccgcgcgggcatcgccgagttcgtggccacgttcctcttcctctacatcaccatcctcaccgtcatgggcgtctccaagtccacctccaagtgcgccaccgtcggcatccagggcatcgcctggtccttcggaggaatgatcttcgcgctcgtctactgcaccgccggcatctccggaggacacatcaacccatctgtgactttcgggctgttcttagccaggaagctgtccctgactagggccctcttctacatcatcatgcaatgcctgggtgccatctgtggagctggagtggtgaagggcttccagcagggactttacatgggcaacggtggtggcgccaatgttgtcgcacctggctacacc

SEQ ID NO: 332151 - DNA, 203 bp, Zea mays
aaaaaaaaaaaaaaaaaaaaaaaaaaaaaaaaaataaaaaaaaaaaaaaggagaaaagaaaaaaataatataaaaaaaaaaaaaaaaaatagggggcggcctttctatatcaatccatacttacttcagcgtccttgcaacgtaatagctctttttttttgtaacctaaatttaatcaactggccggcgtttacaaccattct

SEQ ID NO: 332152 - DNA, 122 bp, Zea mays
attccggtcgacccacgcgtgcggccactccttccgcaccccaatttcgcccaaccaccggcgccggcgccccttgcttgggccgtgcgtccggtggacttcaaagtcctcaaaaaaggacc

SEQ ID NO: 332153 - DNA, 92 bp, Zea mays
ccacgcgttcggttggcttcttctcccccttcggttcgggttccggttcctgaaggtgttcggggttccggtttgtgggtgaaccgatccaa

SEQ ID NO: 332154 - DNA, 426 bp, Zea mays
ccgcaattcccggatcgccccacgcgtccgctctgcattttttaagattcaaaaaaacattccttattttatacgcggtaaaacaacgagccttgataattcaccggatcttcttagtattatctctgacaaaaaaatataaagtctgtccccacaaatgcaaattagtttcttgattttcaattggttgttaaatgtctgacatgagcaatcagtttggttagcataaaaggatggtgattttgacaactacacagtttgtaggaacaacaataaaaacacttcattatatattagggctctatgatgttcaccattcatggcttcctaccagatcacacattgcataaatcaagttctacgctattggttacttttcagagattcagacagaacatttatattcttgttcctggattgagcata

SEQ ID NO: 332155 - DNA, 390 bp, Zea mays
aaaaaaaaaaaaaaaaaaaaaaaaaaaaaaaaaaaaaaaaaaaaaaaaaaggaaaaaagaaaaaaaaaaaaaaaaaaaaaaaaaaaaaaaaataaaaaaaaaaaaaaaaaaaaaaaaacttaaaaaaaaaaaaaaaaaaaaaaaatcttgattttccagtcttaatttaaataaattacaataagcaataacataaaataacataaaaaaaatggatattttaacaaatacacattttgaacgaacaacatttaaaaaactaaaattatataaaaacctacatatgataattcacaattcatgtttttaaacatatatcacacattgtttacattaaaaaatacactattgcctactttttaaacattcacacaaaacatttatatttta

SEQ ID NO: 332156 - DNA, 334 bp, Zea mays
gagatccatcccgctgagtgctacaaccacgacattgctggtgctggtcattctaatagggcactcatggctccaggcgatatatgaccgaatgcaggcttgagggatagaaccatcgataacaagcatcgagcatcttctgattaggtatcttctgcaggcttttttacgttcaagagataaattaaagcctctagaactgaacggtgcatatatacaatgttggacggcaggaaggctcttgattgctgatctagcatgatcgttagcctgcggtatcagaaacacgattgactcagagcatttggctaatgagatctgagaggctttaaat

SEQ ID NO: 332157 - DNA, 186 bp, Zea mays
cacacgcgtacgcccacgcgtccgaaaaaaaaaaacacaaaaataaaaaaaacaagaaggaataactagaacgcaaggaaatataaaaaaagtggcggccgttttaaaggacccaagcttatgttcccttgcatgcgagctgataaatctcttttaggtgcaccaaaatccaattcattgaccgct

SEQ ID NO: 332158 - DNA, 356 bp, Zea mays
gcgatgctgcaggcaaaaggttaggtatggacaagcaacttgtgcaactatgggggcgtcatccagcaatcccagtaacggatgctgagcgtgagtcaacaacgcacgacctttggaggattaaaactgaagccgaaacacctgcagatgacactgtcggcagcgctgtatatatactcagaggatatcaacactacaaagatcccatcttacccgacatgatgcagagtaccaagcttcctgtgctcaagtacatgtagcatcaatcacagttgcctgcaattacacaagttcactgtacacgtacacatgcagaggcattacaagttgagagccggagcacaggccatctagat

SEQ ID NO: 332159 - DNA, 204 bp, Zea mays
cggacgcgtgggcggacgcgtggagaaaaaaaaaaaaaaaaaaaataaaaaaaaggaggggaatataaaaaaacaaataaaaaaaaacacatacaatctaagaaataaaacatactatagcagaacctggattcaaacaattccatctaacataatacacaataacaagttatacattcttgacgttaatgctgtttattttct

SEQ ID NO: 332160 - DNA, 371 bp, Zea mays
ctacttctaactgtcaggctcatgcttcatcacctctcactgaagacgacacggcatgctaaaaatatggctaatgaatcagcatcttaggtgaaagaaacagaatcatatcacgctccggacaggcaggaacacgagacagatgactatcaacggttatacataactctagcactacgcaatgggcctgatgagtacattcatactagcaactggaatgcctatgcaagcgatgccgattgtaggtcccgtacatcaaacatttggacacttatgaacctaggttatatggcctggcatacacgtatagtctacaccctgcagatgactacatcttgtgcctgacggacttgaacatgcgacctatttca

SEQ ID NO: 332161 - DNA, 381 bp, Zea mays
aaaaaaaaaaatatatgaataatgcatacataaaaaaaaaactgaaattaaaacggaagggaaaaataaaactaatgtatatacaatctaaaaaaaaaggggcagccgttttagagggtccaggcttaccaactcgtgagggcaactgattatcaacattaaagtgtaacaaaagttaaattcaatggccatgtgttcacaacagcatgttctcgaaaaacctggtggtgtcccacctaaatgaccttgatctacatccccttttaaccagctggcttattttcctactggtcggaaccttgcgtggtctgcaactgttgctcaacctgattggcaattggtacccgctttaacacggcacttgtacccgctctggagccc

SEQ ID NO: 332162 - DNA, 425 bp, Zea mays
ctttcccctgcaagggaaagagaagaacagagacacaccagtgtatagggtttcggcttgcctgtgcgtgttactgtcgcaatggcaggaggtctcttctccatggagcacccatgggcctctgtttttggcattctaggtacgctgctgcctgtgctgtgttgtgcaccaggaatgctggatttcgttctcaccgtacgatacgacttgcatgcatggcagcatgatcgatggcatgatgcgtgccaaacgattgctcgtcgtcgtcatcatcatcactcatcagtgttttttttacaccgagtgaaaatattcccacaggtttactgacagaaattcccatatgatatgtatcttcctttggtaatttcctgcaggcaacatcatctcatttctggtgttcctcgcaccagtgtaagtgcact

SEQ ID NO: 332163 - DNA, 298 bp, Zea mays
ccggaattcccgtctcgactccacgcatccgtacaaaaaaaaaaataaaaaaaaaaaataaataaaaaaaaaaaaaaaaaaaaaaaaagggagagatataaaaaaaaaaaaagaaataaaaaaaaaataataaaagactacctctttaaaaatcccaaccttacatcctcttcctttctacgtcttacctctactttagttttacctaatttctattcacttgcctttcttttccatctcataatctggcaaatcctttccgttccccaatttaatcgtcttgcactacatccccttt

SEQ ID NO: 332164 - DNA, 437 bp, Zea mays
cggaattcctggctcgacgccacgcatgcgtccaaatgcatctccaaatctgaaacctgctgctattgctttcatcacttgcttaaaggcggggtgatgttatcactcgccacgcaaatgatcttctcgtgactgacaccatcttactcgggtaagcactgactggctataccgaacctgacattcctcttaaacgacactgcctcatctatcacatatgcttattaatccatccaaagtacagaggaagccatacactatatgaggatcataccacaaccataagggaccctcggacattgggagcagttgaatctaactcagcatcatgatccatgcttgacatccttgtgaggataacgacgctaccaacaagctgttggaggcctaggacaacaattctcctaagcagttgttactcatgaaagtttgccctg

SEQ ID NO: 332165 - DNA, 373 bp, Zea mays
acaaaaaaaacacacatacaaccaaacatacaaaaaacacaaaattaataaataggacggaaaaataataacatatgaccatgacacaaatacacaagaatactacaatatctatactatccctttatatatctaactatatattatgaactacttacttctcttggcaagctctataccttaactcgactatgcttttgaaatccttcgcttactatgttccatactcctacagagtgaaagattgatggtaatacgtgcactatcaagacttatctgatattaatatgaatctatctatgacacatctacttggctaacaatctctccgaactcatcaacatattctaccattaatacaactgctcgtata

SEQ ID NO: 332166 - DNA, 360 bp, Zea mays
gaagagggacgagggtaatcacagaggtctgcgacacggagacctgggtcccggtgatcggaggaactgagctgaccatgatcctgacgacaggactgctctgaacgctgacgagccttggccacaggacagactatatgatcatgcacaacatgggcctggccattctaatacaagccgtcctctacttagcgctgataaccagcttcctcatggccatcgggcttcacatctacgcgagctagtagacggccggaacatgatgacatatacagactaacaggatgctccgacggaggcatccacttcaagatctgcggttccagctacggtcgtataggctgtctctaattctatgga

SEQ ID NO: 332167 - DNA, 385 bp, Zea mays
tactcggttctcgtgaattcccgggtgcgacgccacgtcgtctcggtgcccactcattgtgcgtctactcatgacatcgcatcatcagactcgagaggacatatgatcaaagcggggccagattaatgctgacctatcaacaagctataccaatgactacccacactgatacacgacatcattcatcgcaactcaaacgtcagcgaaccttacactctttcaacaacatacttctgcagcagcaagaactgtgcttgatgtactaacaggacatgcagaggctgacccatacttactcatctgtatcacttgaaaatattgctcattctgatcaacttgtcccaacaagggatcctgaaacacacttactatccatgatcgaata

SEQ ID NO: 332168 - DNA, 350 bp, Zea mays
cccactcgtccgcccactcgtccgaaaaaaaaaaaaaaaaaaaaaaaaaaaaaaaaaaggaaaaaaaaaaaaaaaaaaaaaaaaaaaaaattataaaaaaatacaaattaaaataaaaaaaaataaaaaataatgtttctttttttgtgtcacctattttaatttctctgcctttcattttaaaactttttttttgtgtaacactatttttattccctttttattctttttaaaacatatccctttttaaacctttggttttaccacttttatgccctttcctttcaattttcttttcagattctcattttttatggaaaatgtcacgccctttgtcttttcccattaat

SEQ ID NO: 332169 - DNA, 403 bp, Zea mays
gtgacaagcaattgttttagatgctcatgtgttatttgccttcagtttcttgatgtagttgatgcctaaattctggtaccttgttaatcgtactggagatgctacttcatgtggagttggtgatgtacgatgattatcacgagtacttcaagcgctcatttgaggaaaacatcgctgcgcacgtgcctcagggagtggaatggggttacaactatcgattgggggaaatcaggcataggagggcctgttgacggaccaagtgacgaggcaagattgtctaatgattttgaagttcattatattggcagttgctgatgatccattatgtgatggaccgagtaaaccaagcaattcgtgatattcaactacactttgatgactgtgacgtaccagcatgagatgt

SEQ ID NO: 332170 - DNA, 408 bp, Zea mays
taccggttcggaattcccggctcgacgcacgcgtccgcttatgactgcgctttgcttcactgactaaggagcatagaatgtggagaattttaccttgggccaatcaaaagggcactcataagagactctactgaactaactcaatagaatcaaaggatagaatagaggaaaatgcaaatagaggatgaacggtatgttctcttggaaaactgctgctagaacgtttatgaatcaaacacggtatactagatgtgctcggactaaatgatgacaacatgttataagatctttcatgttaagtctactccttgcatactgaactgtggaacaaattcgttatacagaacattacagggcttatgctagagagcgatggagacatatataacctgtgacacatgtatggtg

SEQ ID NO: 332171 - DNA, 272 bp, Zea mays
gccagccgcatgtcgagtcggtacacgcgcccgccacacttatcgcagcgagcgggagatctcatacgacagtgaatagtggatggactcatgggccgctctcgatgctacaggctcatctacccctgcctctgaaccaatctttctgctattgctgctgctgctgctactgctgtggctgcgaatggggaacaggaaggctacatcaacgctgacatagctaacgttaatctcctggcagctgatataccatatgacagataccacatgat

SEQ ID NO: 332172 - DNA, 364 bp, Zea mays
gccgacgctacggcggtccacctattacaagcgccgggaccgtctgtgccataagggtagggagctctacggtctgtgcgacgcggacctggtgctgcatcctattctccagctcctggaaggtctaccactaccgtcttggcaccgtactctgcgtaacggacctgtgcgagagggacgactgcacgacgcacaccacggtctggaccgacatgctgcaggagcggagcgcggagctacagaaagctgagccgatgtgccagctggtgtagaatgagctgcaggacatgacagtggacgaccgctagcagtacacagggcctgctgtctagctgctggaacacagtctgcaggccgtcgtgca

SEQ ID NO: 332173 - DNA, 343 bp, Zea mays
ggctaagggccgaatcgcaccgtactgtacggagaagcttgtgcaaggttctggagcggtcgatggacgcagcgagcatccgtgggcttctctaccacgaggagcaagaagggaagctctgctccgtgcactgcgtcaacaccgccctgcaaggccccttattatccgagttcgacctggacgcgctcgccgtctacctggaccaacctgagctcctggtgatgctcaagggctacctaagctctggtgcgggctacgctgctgcaggggacttctttgtccagcgcgagggctctcacaacgtctcccttggccaagattacagcattccagttcagcacat

SEQ ID NO: 332174 - DNA, 107 bp, Zea mays
aaaaaaaaaaaaaaaaaaaaaaaaaaaaaaaaatttttaaaaaaaaaaaaaaaaaaaaaaaaaaggaagaaatattaaaaaaaaaataaaaaaaaaaaaaaaaaaaa

SEQ ID NO: 332175 - DNA, 327 bp, Zea mays
catcgtaatcaccttggacattttaccaaaacctctggctcctcataatacttgctggtatcattacaatctcgtagttttacttgttgggcttgacttcctactatttataaacacaatacccagaagtctttatgtggtgtcaaacatagttttcactaaaatttcataatcgcctttccactagctacctcatatttttgaaacgcaacttgtgactttacccaaatgaaattaatcatatctccattgcatactccccccataaatattcccaaaatttctttaaagattgattttatcatcaataagcctcataatatccac

SEQ ID NO: 332176 - DNA, 183 bp, Zea mays
accacgcgtacgcccacgcgtacgcccacgcgtccgataccttattttaaaaaaaaaagaacggaggaagcataatcagacaatgaaaactaaaagaggcggccgatctagacgatccaatatcacatacacaggcttaccacattatagctcttatatagtggcacctaaatacaatgccca

SEQ ID NO: 332177 - DNA, 375 bp, Zea mays
aaataaaaaaacataaaaaaaaaaaaaaaaacttaactaaaaaaaaaaataaaaaaaaacatgagaatacaatatctccaaacatatttatggaacacgcttaacctcccatgcatactagcctataacgcctcctatactgtcccccaaaacctattatttggcaccaaggtttataaccaacggaactgtcaaaaccctgaatgcatcccatttcatctccaatatcaactaattccctattagccctgatacccatatacccaaaagctcagcaccatttgcctttcacatcatttgtatatcctatatctcccataatactcgccctgtgtcatctcatctgactcccataattcatggattactcgcacc

SEQ ID NO: 332178 - DNA, 153 bp, Zea mays
aaaaaaaaaaaacataaaaaataaaacaaaaatttaaaaaaaaaaaaaaaacaaaattaaaaacagaataaataaaaaaaaaataactataatataaaaaaaaactaaattcaatacactaaacaaacaatatacaacaatataaactaatat

SEQ ID NO: 332179 - DNA, 457 bp, Zea mays
  unsure (1)..(457): unsure at all n locations
gcggcatcagcctggtggagatgaactacctcgaggtggacttcttgttcggcatcgcctgggacctcaacgtcacgcccgccgccttcgcctcctactgcgccgtgctccagagcgagatggcctacctggacgacgcgcccgcgcccgtcgtcgaggcgcccccaaggctgcactactgctacggcgccgccggcacgtctgaccgccacgacgaccccgccgcggtcgcagcagccgccgcagcctgccaccgtcacagcagccagccgcagctcactgtctgatcgaccggccgtgcaagcgtgcccgaccggtggatgcagccgtttcttttcttttcttttctttgttgtcctggcggngcgcgctggctggtggtgtcgactcgtcttcttccttggtgatggtctgtcttggtacatatgtgttggtcgttcggtgctagtgagctctc

SEQ ID NO: 332180 - DNA, 175 bp, Zea mays
ctccttattccccctcacccacccttcccaaaaaaaaaaaaaaaaaaaaaaaaaaaatttaaaaaaaacaaaaaaaaaaaaaaaaaaaagaaaattttcaaaattaaatatccaacttacttacacccatcttccaacatctaattcttttacaaccaatcctaaattccttcca

SEQ ID NO: 332181 - DNA, 434 bp, Zea mays
  unsure (1)..(434): unsure at all n locations
cccacgcgtccgctcgtccttgataagtgagcaagcggcaagaaccagcggcgcgcccatgtgggggagagacttatacttccacgacgagctggcgtcgctgttcgcgcagcggccggcgccggccggagaggcgatgatgacgcaccagcaccagcagcagcaacaggcgccggcgtcgtggttcgcggactacctgcacgcgggcgccccaggcatggggatggactacgacctgctgtgccgcgcgctggacctgccgctgccgggggacgacgtcgtcaagagggaggaggagctgctgctggtggacacaggcggtgaccgaggaggcttcgccgcgcccacgcccacgcccagcgggggcggcacggcgccggtcacgcccaacaccacgtcgtccatgtcctgctcgtccagcgaggcngcgggcg

SEQ ID NO: 332182 - DNA, 329 bp, Zea mays
gcgagggccccaaccagagctggaaggagctggcctgtggggacgaggtctacacaccaaggcggtacgctcctacttcgcctgatcaggctgaaccaggctactgtggataccgtgccgcggctgtagggggctacgcgccgacgcctacggctggcctaatggaaccaggctacggcgggtacccttctacagcagctgcagggggctacgcgcctcctactgcaggtgctcagatggaaccaggctacggactgtaccctactacgccatctgcaaggggctactcgccgacacatacgactgtgcctgtgcaggagcctgactac

SEQ ID NO: 332183 - DNA, 348 bp, Zea mays
atgtcaagcttgctattcccgtttcaccctaacatatacctataacacgacattgtcaattatatcaccgaatctagctatcctgctcatgagaagatcaccttaacactcccacatacctattcagactgccacatatctatatactccaaccttcattacttaatccagaccatacacataacagaatcagacataccactatcacataaccctactacattacatcatattagactggtcacaactacacacttgaagcatttactgctcattgaccagtcacttattatgatactagctcactagatcgacaaacatcacgatatcatacttcatgacgataat

SEQ ID NO: 332184 - DNA, 216 bp, Zea mays
gttcggaattaccggctcgacccacgcgtacgttgatatactgtgtactcccattttcctcagaatgatcaactacctgatgaataagtggaaaggatatatcataacttagataccaggtaccaaaaaaaaaaaaaaaaaaaaaaaaaaaaaaaaaaaaaaaaaaaaaaaaaaaataaaagataaaaaaagacaagataaacaaaaagctaaaag

SEQ ID NO: 332185 - DNA, 373 bp, Zea mays
gtcccttgggccatccttagcttgatcccaagtcttgctcgtgcagctgctcgtcggggtctgagaccaggcgcgaggatgctggcggtgttcagcggcgaggtggtggaagtgccttcttgagattgtggaaaggtcgagccagactcatgaccacaagacgaaggcgtgcgaaccttgcagagcgcttactgacgaccatctgcacgcgtcaacgcgtccgggcagttaatatagctctggcgaatttgctactcgcacgacagccatgccctactgcgctcaaagtcgatcgttgcgaatgatgcagtgatctgactgttcgaagaaatttgctggacaacctgaggcacatgagccggtagatcatgct

SEQ ID NO: 332186 - DNA, 438 bp, Zea mays
cccacgcgtcctaaaaaaaaataaaaaaatattttaaaaaaaaaaaaaaaaaaaaaaaaagaaagggtaaaaatataaggtgtgataaaccattcttttctaattcatatttctatttaattctattttttttctattttttccaatttttcttactcttactttctacttcttttttttttttttaattttccttttttctttctattttctgttcttttttttttcaactttcttatttattaaatacctctttttacccttattttttctcttttttattatttcttatctttttctctttctctttttttattataacccttcactaatcgttttttcaatcttttctttatttttatttttttttttttattctccctttatctgttttttaactcttcttttgtttttttctttcttcctttttctttcttt

SEQ ID NO: 332187 - DNA, 309 bp, Zea mays
aaaaaaaaaaaacaaaaaaaaaaaaaataaaaaaaaaaaaaaaaaaaaaaaataaaaaggaagtgaaaaaaaaaaaaaaagtaaaaaaaaaaaaaaaaaaaaaaaaataaaaaaaaaaatccaaaaaaaaaaataaaaaaaaaaaaaaaaaccaaaaattaaaaaaaagggggcgcgttttttagggttccaaggtttaatcccgggggttttcaactttatagcttttttttgggaacccatattccaaataaagggccctattttttaaaccttttcactgggaaaacccttgggtttcccaatttt

SEQ ID NO: 332188 - DNA, 54 bp, Zea mays
  unsure (1)..(54): unsure at all n locations
nccacgcgtncgaaaaaaaaaaaaatttataaataatatatatatataattata

SEQ ID NO: 332189 - DNA, 66 bp, Zea mays
cccacgcgtccgcccacgcgtccgcccacgcgtccgaaaaaaaaaaaaaaaaaaaaagggaagggg

SEQ ID NO: 332190 - DNA, 315 bp, Zea mays
attcccattcgaccacgggtacgcgacttccaccctcgattcgatcctagctgacttctatgattcttggactcgctccaccatgggccattgcacacgatgccaaccgaacggccttcattgtacatcatctccagatgatcataccacctgaaagatcaatcagttgccaaccctaatgctttctcttaaaagtgtaaacgatgcgctcctaccttactctgcatgaactatgccagatgtcaaattattccatcacctactatactgtcagataaatgtgtaatcatgtgccgaaatcagatctgttcaatg

SEQ ID NO: 332191 - DNA, 292 bp, Zea mays
gttgatttttctgacagcgcgtctcttgctgctgctttgaagctcgaccagaaggtggtcaaggaacgcccagtcagaatcagatgtgctgttccaaaaaaggatgaccaaaaagtcaatgacaatgggaactcagatcatctgaaaagtgaaactaggacatgctatgaatgcggaacccctgggcactcttcttcttcttgccctaataagaaggattctgaagcaaggaagagctatgaatgtggcaccccggtgcacctctcttgtgcttgcccaaataataacgatt

SEQ ID NO: 332192 - DNA, 313 bp, Zea mays
atcactctgctgatgttagatggagccaacctactggtgataaatgaagagaaggatgcagcagatcggaagctttggtgttggaattcctcatcatatttgcatggcgcagaagaaataggttgaggcttgattctttttgcttgttgtgtttgccctatagtttggatattgccctaactgcctaaggttgtctccgtcagtttttcaaccacacctcgtgttctatattttatttcaaactctactctgtaaatacggtaaatagtgcactctatattataaaaataaattttgtatgactatataaaaa

SEQ ID NO: 332193 - DNA, 348 bp, Zea mays
tcccaattcccatttcgacccacgcggtaccacgcactaaccctcaaccttcgtcttctgcatcactcacaacaagctctaactccacaatgggcaacttacccccatattctcagaaccctccacactatatatcaacatacaaaaaacctgctctgattatgaaccactcgctcaacaactataaatctcccacttatcattattcccatccacaatgctagacgccctcgtaaaaaataccagacctccaattgacctattatatgttatctagtcaaataaaagcgccattatatttcacaaaaaaacatcaaaataaaaaaacaacggcccctctaaaagatc

SEQ ID NO: 332194 - DNA, 313 bp, Zea mays
aaaaaaaaaaaaaaaaaaaaaaaaaaaaaagaataaaaaaaaaaaaaaaaaaaaaaaaataaaagtaaaattacaaaggaaaaaaaaaaaaaactcctccactttatccaatcctactttccctacccttccatccaaccttttttctcttctttaacttcccctcaattcacttcactgtccttcattatacaacttcttacctggcaaaaccttttctttacccaatttaacctcctttcatctcatccccctttccccatctttcttattcccaaacatccccgaaccgacctccctttccaaccttatc

SEQ ID NO: 332195 - DNA, 372 bp, Zea mays
caactagcaacatagaaagcacaatagtgtaccaacaatggcagccaaaatattttgcctccttatgctccttggtctttctgcaagtgctgctacggcgaccattttcccgcaatgctcgcaagctcctatagcttcccttcttcccccgtacctctcaccagcggtgtcttcggtatgtgaaaacccaattcttcaaccctacaggatccaacaggcaatcacagctggcatcttacctttatcacccttgttccttcaacaatcatcagccctattacatcagttacctttggtgcatttattggcacaaaacatcagggcacaacaactttacaacaacttgtgctagcaaaccttgctgcctactct

SEQ ID NO: 332196 - DNA, 69 bp, Zea mays
aaaaaaaaaaaaaaaaaaaaaaaaaaaaaaaaaaaaaaaaaaaaaaaaaaaaaggaagggaaaaaaaac

SEQ ID NO: 332197 - DNA, 71 bp, Zea mays
aaaaaaaaaaaaaaaaaaaaaaaaaaaaaaaaataaaaaaaaaaaaaaaaaaaaagaaaggaaagataaat

SEQ ID NO: 332198 - DNA, 370 bp, Zea mays
attccctttcgacccacgcgtaccaaaaaaaataaaaactaacataaacacccaatgattataaaaaaacatggctatacactgctaggtggacccaacaaaggcgccactgcaagcaactctaatggctcctatatgacctaacttaaactcaccaaactctccattcattcgcaaaattgacaccgcatgccccatatttaagacaaagtctcgccacctataaaacatacggcttggtataccccttgttacatccaactgcaacacctatcaacacattcccaataatcaaacactctctatctcaaaaaagacgccccctatctcggtgccatacctaatctcgaacagatcaatactctgatca

SEQ ID NO: 332199 - DNA, 158 bp, Zea mays
gtcattgcaacctggactctacttagctccttgttcgagatccgccgctccttccgggggggcgaatccccttctttggggtcattgagcttcgtcaaggcgcagctcatccgcctctctgtattcgccataggagagcctacaagcatgggaggcct

SEQ ID NO: 332200 - DNA, 226 bp, Zea mays
aaaaaaaaaaaaaaaaaacacaaaaaaaaaaaaacaaaaaaaaaaaaaaaaaaagagaagagaaaaaaacaaacactgtaaaaagaacaaaaatacaaaaaaaacaaaaacaaaaaaataaataaaaaaaaagggtcacctattttcaaaaacctggccttactttctacagcttgctctctgtgaaaccctttaccttgcccctctaattcactttgttagccca

SEQ ID NO: 332201 - DNA, 267 bp, Zea mays
gaattccggtcgacccacgcgtacggctgacgccaggaccacccaacccactgcccttttcagagatctctccgcctccgccgggtacttcagtcgggcgactattccccgtacggacttacccgattgcacggcatcactgtcttgatgccgctctgccgctcgggatcatcgctgagcatgctctgcatcatgggcaacgcccactatttcatccacaatgcacgagcacggcatgccgaagcacatacctaacgatatgttcga

SEQ ID NO: 332202 - DNA, 74 bp, Zea mays
aaaaaaaaaataagaatggaaaaaagtataaaaaaaaaaaaaaaaaaaaaaaaaaaagggaagggaaaataaaa

SEQ ID NO: 332203 - DNA, 318 bp, Zea mays
  unsure (1)..(318): unsure at all n locations
cggacgcgtgggtggcttctgagtcctatggtgctgttacgatggtcacctctctggatatgctaaactggttgtgccctgcaatgtagcccggctagaagctcttctgtttgaagcgaaaagtgaatgggctgaagctgaaagagcttacacgcaaatcctggaaatcaatccatttgaccagattgtccacaagcggacgcgtgggcggtgagaacgaaatccagcattcctggtgcacaacacagcacaggcagcagcgtacctagaatgccgncgtcagccggcggcaaccctgcgagcgacagcgccgcgggc

SEQ ID NO: 332204 - DNA, 430 bp, Zea mays
  unsure (1)..(430): unsure at all n locations
gagagaaggaaaaatatccccaaaccctagctcccgatctcgatggcgaaccctcgcgtcttcttcgacatgaccgtcggcggcgccccggcgggccggatcgtgatggagctgtacgccaacgaggtgcccaagaccgcggagaacttccgcgcgctgtgcacgggcgagaagggcgtgggcaagtccgggaagccgctccactacaagggctccaccttccaccgcgtcatccccgagttcatgtgccagggcggcgacttcacccgcggcaacggcaccggcggcgagtccatctacggcgagaagttccccgacgagaagttcgtgggcgcaagcacaccgnccccggtgtgctctccatggccaacgccgggcccaacaccaacggctcccagttcttcatctgcaccgtcgcgaccccttggct

SEQ ID NO: 332205 - DNA, 271 bp, Zea mays
aaaaaaaaaaaaaaacaaataaaataaaaaaaaacataaaataaaacacctataaaacaaggcaaggaaaaactcgagcaggcactatcttaaatttttctctgcttccacacccttccatgcatcaccatccttttctctatctgatctggcttatctccagcgccacccaacttaaccccctttcactacatgccccttttgattactgccttcatagcgattactccctatccccttttcgttcttcccagtatcaattactcttatc

SEQ ID NO: 332206 - DNA, 174 bp, Zea mays
aaaaaaaaaaaaaaaaaaaaaaaaaaaaaagaaaaaaaaataaaaaaaaaaaaaaaaaaagaaagtgaaaaaaaaaaggatgcataaaaaagggcgaccactttaaaggctccaagcttacgtactcttccatgcaacttcataacttttctatagtgtcccttaaattcaatt

SEQ ID NO: 332207 - DNA, 207 bp, Zea mays
ttcatactttatgacaaaaaaaacaaaaaaaattaaaataaaaaaaaaaaaaaaaaaggaaaagttaaaattaaaacggtgtaacggttccccattatacaacctcaaccatgcgaccttatactcgctctatagttcctatctaccatctctatgttaagcctcaacccttcaagctgccctacttcaaatacccttaactccccc

SEQ ID NO: 332208 - DNA, 219 bp, Zea mays
aacaaaacaaatttacaagaaccaactatgtattctatgcaaactcataataccccaacagtctttgtacttattcttgcacaactctgtgtttacatttaacatacaataatccctaaagttacacattatttatcttctaaacttttagtttcctcacataactaccaatatttaccaccttttttacctctataaatattttcgctatatccatca

SEQ ID NO: 332209 - DNA, 432 bp, Zea mays
accggttcggaattcccggctcgacgcacgcgtacgtgtaaccgtgctttagtctagcaagtttttgctattttactgtatatatactcgctggatcctgatgcatgggggtaggtgtcctgagtcaaaaaccattgtgaaaatagtaccaacacacctgccacatcaagaggtaaactatacaaaaaatcacatttcataatctcttgctgacctgctattttcatccacacttgttaccgtctggtttcgctctaaaagcgaagcttatgtccatctgcatgtattgatgtgggttttttatttaatatattatgagtgctaccagcatgatctgttccattctgatgattggatggatatcgcataaccttagagtgctgaatttactaggtggtcgattcagatagaaatcatcgtacgacgcatact

SEQ ID NO: 332210 - DNA, 304 bp, Zea mays
cagattctccgcactctcttcatcggctagtcttgtatccttcaccgcgacatgagaacactaggttgcaaccagatgttgctctgacttcgccgcttggtagctaaagctagatgatggagttgctagcttcacttgcggatgcacgcacgaaggcatcttgttaccttctgtgtatgcataacccctgttgtcaaagtctgatattaatagctgaccgtttgaagacaaagggacgtattggattcatgcaatagcgtaatcttgaaaacaaaattctgaataaaaattggcttttttccgg

SEQ ID NO: 332211 - DNA, 369 bp, Zea mays
attaacatggttgatcattcttagatcaaggttcatgtccttggttgttctgcagtggacaagccacttgactaaggctgtattcgcgaattcatcatactttgaagtaattaaattcccaggaggaataacaattatccctccacaaactgcttttcttctacataatcctcatgcctcatttaatattactctgaactatccgatctacaaattacaagacaggacttatgagtcaaaggatcaaatggatgctggactactactcaatccatatgagaatctgtatatcaaattgacaaattcttaatgttcgacgattcttcctccaacaatcgttcataccttcatagacctctaagtctgaaa

SEQ ID NO: 332212 - DNA, 307 bp, Zea mays
actcggttcggaattcccggctcgagccacgcgtccgaaaaaaaaaaaaaaaaaaaaaaaaagattataaaaaaaaaaaaaaaaaataacaaaaaggttaaaaaatctaggaaagaataacaccaaactactatctcttttacacccttcactcttttacctcatctttaattcaccccactgtctactccatccttccaccttttatcaacttactgcttccacaattaaatccctttcataataaaatccattaccccatcaaactcattacctatccatcctaaatccttttctatactttcac

SEQ ID NO: 332213 - DNA, 285 bp, Zea mays
  unsure (1)..(285): unsure at all n locations
tcggtctcggaattcccgggtgcgagccactcgtctcgtgggaactgtgttaggtcaggtcccttgttgtccttgcattttcagactatgtatggaacgcatttgggtaatgtacnntattcggcgagatcaactcatttcaagtaacctttctgtctaatgtcttcctatcctgttaatcgtctcttaganntgtttggcgtgtcctggtttgagatttcagtctgctagtctgcataattctgtaccttgttgctacagtctatttgtactttcttaatgtaa

SEQ ID NO: 332214 - DNA, 340 bp, Zea mays
attcccggttcgagccacgcgttcgcagaatgtcgcgcgccgctagcccgcaatgcttcaaccaaacagaccggtttttggagcccggggatctttagcactaggacggccatcggcaccgttgctgcatacgcgcaactctgttaatgtaccccgggagcagctggtcgtcgtggcagcgcgggtacctgatgagctacttacacaggtccaacatcacggtcctgaacaggttctacacactgaccctgtcggcgaacagctcgctgcacggcattgtcattcggctgcgggcactctcagagcgtgctgatcaaccgcgttctacaggcttctgggc

SEQ ID NO: 332215 - DNA, 161 bp, Zea mays
tcccggctctgccacgcgtcctaaaaaacaaacaacacaaaaaaacgaattaacaaaaaaactaaaaaaaaaaaaggcaggagaaataaaacatggaaaaactaccaaaatataacgaccaatctcaaatctactacccactctttctatcctcttccatc

SEQ ID NO: 332216 - DNA, 373 bp, Zea mays
taccggtctcggaattcccgggtcgaggcacgcgtccgccaagatcatcctcgatcgggagacgcagaggtcccgcggcttcagcttcgggacctgctccacggaggaggcgatgcggaacgccatcgagggcatgaacggcaaggagctggacggccgcaacatcaccgtcaacgaggcccagtcccgcggcggccgtggaggcggcggcggtgggtacggtggtggccgtggaggcggcggctacggcggtggcgggcgccgtgatggcagtggcagctacggcggtggcggcagctacggtggcagcggctgctacggtggtggtggcagcggctacggcggtggcaaccgtggcggcggctactgcaac

SEQ ID NO: 332217 - DNA, 372 bp, Zea mays
attcccgggtcgggccacgcgtacgctggagcaaacggagcatgctgctcttagtacatttcgtcgagacgactgtatcttcgtaggggctttcctaccaggctacgtccaaggctggtgcacctcctatccctactcaagctgctgcaactggttgcctacggatatccaaccttcgtacacaacttcctattagcgatcaggttctaatggcagtactcatgctgcaacttgttcaggctaacgtacttcagtcatcgacatgccactgagcgacgtcgaaggctacactataatgacgaccactgagcctggccagttgcaccactggaactgaacacgctaggccaagaacggcatacattgcaactg

SEQ ID NO: 332218 - DNA, 209 bp, Zea mays
ccggtctcggaattcccgggtcgagccactcgttcgaaaaaaaaaaaaaaaaataaaaaaaggaaataaaaaaaaaaactaaaaaaaaagggaaggaaaaaaaaaaacaaaaacgtaaatcgcatgcggcacgttcttaaggatccaagctttcttcctcgtgcttgcgacgtcttaccttttttatggtgacgcctataattcaattg

SEQ ID NO: 332219 - DNA, 420 bp, Zea mays
gaaaacccaattcttcaaccctacaggatccaacaggcaatcgcagctggcatcttgcctttatcaccctagctcctgcaacaatcatcagccctattacaacagttacctcaggtgcatttattggcacaaaacatcagggcacaacaactacaacaacttgtgctagcaaaccttgctgcctactctcagcaacagcagtttcttccattcaaccaactaggttcattgaactctgcttcttatttgcaacaacaacaactaccattcagccagctacctgctgcctacccacagcaatttcttccattcaaccaactagcagcattgaactctgctgcttatttacagcagcaacaactactaccattcagccagctagcttgtgtgagccctgctaccttcttgacacaaccacag

SEQ ID NO: 332220 - DNA, 462 bp, Zea mays
cctgcggtaccggtccggaattcccggggggactgtgcggcgctgctcgcggtgctgtcgagcgaccgcttcgacgtgtcggtcgcgtagctgatcgccgggcaccggcttgcgggcgcacagcctgcgggcaaccccgggcaggcgccggacgccgtgcccgatcctcactcacgggctccgagggccgcgtgaagcggcgcgctgtgcctacagcgggatcttgccggtacagatgtccttgaacatcacccagtcgcccatcaagctgtagatcggatgccgggacgtggcggggcggttcttcttgaagaagaagtgcccgacccacgcgaacccgtagccgcagactacaggcgctggcagccacagtcagttggcccttgcgatcggcatcggtactcagtctatcacgcctagcgagcctaccaaatgcatacgccgcgacgtcaggttctggtg

SEQ ID NO: 332221 - DNA, 234 bp, Zea mays
caaaaactacatttttctcaaccttcaaagtcgatccaaagagggccatttcgagtcaagcttggacccctaaagatccagcaactgacctgaaatataggcacctaacatgctccgaagcaggatccaccaggtgatgaattggaagctttatgctcagcaaattgtgaatgccactagagctatcaagtcaacgaggctcaggcaagcgaaagaggaggcttatctagaaat

SEQ ID NO: 332222 - DNA, 332 bp, Zea mays
gggagattgcatgcatggtgagctgcaatatatagatcatgaaacccttttcaccacctacctaacaagcatatatatatgccatgtatacacatgacctaatgcatgcattctagcagagaaaccctaatcaacaaagatcatgggggtgatgcatggacatggatggattgatcgatcactgcaccggaggtcgatgtccatctaaatatgtaaagtagagtagctatccggccgacgatgcgcacgcttcgcggtgaaacatcgtttttttttccttctccggtgggcggagggtccaaagattcgccgattcggatggacgagctggt

SEQ ID NO: 332223 - DNA, 262 bp, Zea mays
aaaaaacaaacaaacaaaaaaatagattaaaaaaaaaaaaaaaaaaaagacaaggagggctttaaaatccaagtacgagagcacagactagccaactattagatgattatttagcgctacctaacttcatttcaccggcctgtgaatcacaacttcatgcactggtaaaacattctcgacactgatctctatcggttcacatactatattcatgtcgatagtttgcgatctaacgacaaggcccgcaatattcatccttcct

SEQ ID NO: 332224 - DNA, 144 bp, Zea mays
gtaccggtcctgaattccctcgtcgacccactcgtcctctcactcgtgcgataaaaaaaaattattaaaaaaaaaaaaaaaaaaaataaaaaaaggattaattaaaaaaaaaaaaaggcaaatttataataaaaaaaatacaat

SEQ ID NO: 332225 - DNA, 365 bp, Zea mays
cccatctgcggatctgaccgcacataacaaaatcaaacatggaaagacaaaccggaggagcaatcaaacaaaaaaagaaacaagaaacaaacaaacacatcaaaatacgtagaccaaccaaaagacgcaaaaacatgaagagatacacatacacacaagtggacgcccattctaaggagccaacataacgccacggacgcagtgctctaccactacatgaactggcgcagcaaattctactccaaggtcaccctttatcaagtcaaggatctgaaaaacccccaggtgaccaaactaaatgccttaccagacttaccagttcataggcctgagtatggcactcacaagggcacgacacacacctt

SEQ ID NO: 332226 - DNA, 94 bp, Zea mays
cctgccgtcaccggtccttaattcccgggtcgagccactcgtcctaaaaaaaaaaaaatataaaaaaaaaaataatttaaaaaaaaaaaaataa

SEQ ID NO: 332227 - DNA, 354 bp, Zea mays
aaagcggcgcccatcaaacaccaacattaaaatcggtgctgaagagttgttaccgacgagagacaggcataactaaggtgctggggcggggcccaaatcaccgattaaagctaggtttttgtgtgacttgggaacacaacaccgcggaaccttcgtaaggacgctaagctatctgttcctcgaggaaattacctgtgaccatagaaatatgattaaagatcatatgcttattattatgttgttgttattgtacatcatatagtcgcgtacagttttgaaaggaacattagtcattagtttatattgtatacttgtaaaacttcctcacagggttgttttggttttcatttctac

SEQ ID NO: 332228 - DNA, 282 bp, Zea mays
aaaaaaaaacaaataaaacacaaacattaaaaaaaaaaaaaaaaaaaaagataccgagggggaaatatccagaattaaggggctaaaaatacaacccaaataactcaattaaaagaatagaaaaaaatgggactcggtttcacaggacccgacgtattcttcgtctggcatctcacctatatgttcctctttggtgttacctatgtccatttcactttccttcattttccatatgcttatactgggaaaaccgttattgtccctcatataatctccttgagc

SEQ ID NO: 332229 - DNA, 413 bp, Zea mays
  unsure (1)..(413): unsure at all n locations
gagccatcgacgctacaccaccggcgatcaccttccggatctagcggcctaggtgggcgctcacagctccaacgccgcagaggttcgccaacgcatcgaccagatccaactctggcaagaaggtagaaaattctacttttgttttcgcacaaacactccaacaaaaaatattgtacctttgtattcgtacaatccctgtcacagtatcatatctacattttttgggtctacctcaatgacaacaaccctctcaatacctttgaaggtgtgatgtcaatacctagaaagctgactgcatttgtttaaaacattggtttcgtagatgtggttatgattttggcacaaacagaagcgtgcccgagaacaagctanggccctttgcgaatcagatgctaattactgcaattggtggt

SEQ ID NO: 332230 - DNA, 346 bp, Zea mays
cccacgcgtccggccaatcagagcgtgttcctggtgaagttccagccaacaatatctgggttccaagaagccatgagagtgcatacccatttctccaccagaaaccatggcaaagaagagttccagctgatgaaaggcagcaaaggtaagaaggctgcctccactgatagcctggaagagctgctgtatgcgcatattggggtcgtggaagacctggggctgctggatgagggaacaaagaagagatgcaaggtcatgaggaagaaggaaattgaggcaaatgcagaggcaacactgaatttagaagtttattaggtctagtactaggatccgaaccatttgaagt

SEQ ID NO: 332231 - DNA, 67 bp, Zea mays
ggactcgtggggcaaaaaaaaaaaatataaatataaaatataaaataaaaaaaaagggggaaaataa

SEQ ID NO: 332232 - DNA, 273 bp, Zea mays
aattcccgggtcgacccactcgtctcgaaaaaaataaatgaaaaatataaaaaatatttaagaaacactaagatattaaataaagggggtactacaatgtttatgtggcgatatcaagtactcttacatgcgaatgtataactttccaaaggagtatagtaaattaaggtaactggccagatcattacaaggtcctgattggcaaaacctatacctatctgatgttaatcagattaaagaaagatcgaatttccccagcttgcagtatatcca

SEQ ID NO: 332233 - DNA, 260 bp, Zea mays
cctgaattccctggtcgacccactcgtcctaaaaaaaaaaaaaacaaaaaaaaaaattaaaaaaaaaaaaaaaaaaaaaaatataggagaattttttaaaatacatgggagaaaaataaataaaaaaaaaaaaaaaaaaaaataaaaaataaaaaaaaacatttatcaactttagggctcctcataattcttttcttttcctcacttatttttcttccatattattttccttttaccctatttaattcatctccaatatt

SEQ ID NO: 332234 - DNA, 148 bp, Zea mays
aaaaaaaaagagcaaataaaaaaaaataaaaaagaaaaaaaaaaaaagataaaaagaggaaaaaaggggcgggcgttctggaagaagcaagatgctgtacacgtgcatgcggggtcatgcctcttctatggggtcacctaaatgcatt

SEQ ID NO: 332235 - DNA, 389 bp, Zea mays
gcagccagctcgagcccaaaggagagaacccaggttggcggcggcgctccggcggcgatggactccccctacgctctccacctcgccatcgccgcgctcgtcggcgcctccttcgccgccgcctccgcctactacatgcaccgcaagaccctcgaccagcttctccgtttcgcccgcgaccagcagcgccgccgcaaccgcctcctccccgaaggcgacgaactggaggacggcgaagaggaccctccgccgcactgggatcatgatcgccgcaccctgcccatcccgacgggcctcccgccgctccacaccggccgagagggtaggccagttgtttctccaggttcgactaaaagagttggacctattgttagaccgactacacccaa

SEQ ID NO: 332236 - DNA, 155 bp, Zea mays
aaaaaacaaacaataaaaaaaaataataaaaaagggcagacgatctaatagatccatgcttacttccgcgtgcatgcaacgatataggctctactatagtgcaacctaaatccaatccactggccgcaggcttacaacgtccaaggctggcaaaa

SEQ ID NO: 332237 - DNA, 429 bp, Zea mays
attgtcactgcccctcttgggctgcatgagcttatggtggtatgtgcttgtgagttccctctgttatttctatcattttcagcagctgttagtagagaagccaagtagatatgacgtggatatggtttgcagttattaaaacttagcagttattttggaattttgttaacaaatagatctctagaattgctgtcctcttctggaaaaagaatgttgaaattttctacaaaacaaaattataagtaatatctatgtagatagtggccttgtcaaccttcatgtatgtgtaccttgatgttatgtcgtatttgcatagtgattatttttaaggtctaagggcatttaagtactgtatactgtaagggcttatgtagcaactagtgtcagaaatgaactataagtgtataaaagtgtttaaaaagcaatttt

SEQ ID NO: 332238 - DNA, 373 bp, Zea mays
gatgaaattgcacaacatgcatcaaatgtgggaaacaaatcacatcatgcgtatacggtcagcaagggacaggatgggggatcatgatgtctgcgctgctatgtctagagcgctgatggataaaagtgaaacaatcacactagatatatgtacctctattatgcctgtcgtcaccaatcttctggacagcaaaatagacagacactcaatcatcgcatcggaatcgttcgtgaagcttgtaacgacttcatgtccaatgatacatacaacagtatcgacaggtccttgtgttggactagaccttgatgcagaacatacgacgcagcgctgcaacttatgcttcatcgaattggagaaagccaaaaataatctt

SEQ ID NO: 332239 - DNA, 313 bp, Zea mays
cgtccgcggacgcgtgggacgattcattggacacgatgtacgaatacatgtcatagcgcatgcacgagagccattcctttggacagcacgacagcttatctagatgcgattctttcagcagcaatgctgacaacagtaggaatgacactcttgcgaggattgattctttgcacatcacttcagatcaaggtgggggcaacatgttgacgaggtacgatggcacgaacagcagctgcaaccatgactgaatcgctacgtctgcgaggataggttaggtgaagagcatggactgcgacaatcggtgctactctgt

SEQ ID NO: 332240 - DNA, 105 bp, Zea mays
aaaaaaaaaacaaaaagtggcgtacgttctaagaggatccatgcttcggtacgcgtgcgatgcgatcgtgtctcatcgcattatagtggcacctcaattcaattg

SEQ ID NO: 332241 - DNA, 439 bp, Zea mays
  unsure (1)..(439): unsure at all n locations
cctcagtagcgtagcgcatgtggcaatattatcgcgtctaacgacgctggcattcactgtgtcatcactcctcggactcacggcgttgtcacgtctatatgcctntcacggccgcgtngagctcgtggctgtgccgacgtagcgactcagtccagcgcggcgcatccgcatgtgctgtgatgctggcaacagcctacaaggatgactgcactgctcgcaagcaccgtgcctgctgtgaacagctctgtctcggagcgtcgttcgtcagccaacacctgactcaccgggatgaaccttaggctgatgctcaacttcgtcggattctaccagatctgcaaactgagcatgattccggtggtctgtctcatggcatgggtgctcaacagcaagcactacaccactaaggtcatatccgcagtcatcgtcgtggccgacggtg

SEQ ID NO: 332242 - DNA, 334 bp, Zea mays
ggcgtcggatgttgagtaccgctgcttcgtcggcggcctcgcctgggccacggacgaccactccctccacaacgccttcagcacctacggcgaggtcctcgagtccaagatcatcctcgatcgggagacgcagaggtcccgcggcttcggcttcgtcaccttctccacggaggaggcgatgcggaacgccatcgagggcatgaacggcaaggagctggacggccgcaacatcaccgtcaacgaggcccagtcccgcggcggccgtggaggcggcggcggtgggtacggtggtggccgtggaggcggcggctacggcggtggccggcgccgtgat

SEQ ID NO: 332243 - DNA, 122 bp, Zea mays
aaaattttagatctgcaaaggaatgcatgtgtaacaaggccttccattgagccgatgttcggtccatcatgcatgcactcggccattgaacctatcagaagggacgctcacatgcattcact

SEQ ID NO: 332244 - DNA, 259 bp, Zea mays
ctgacgcactcggatctgcacctggatattatcagaatgtgtatcataatatacagggtgggctacctatgatggcacctgagattacgatggatcacatggtggatcagattcagcctgcgacacaggctgtggcacaggctatgcaccatgagattcaccgtgattctcaatctaatgtgacacatatggagcatcatatgcatcggcctggggatgggcaatgggaccctgacggacacattgcgcgacatcttat

SEQ ID NO: 332245 - DNA, 381 bp, Zea mays
gggagagacattggatttaggagcttttgctagatgtgttgagccacttgcctctttgtggaggaactagctttgatttcagcttttgtgctgattttgttttgttggctggctagtggtgttgagccctactttttcctctttgtgaggacaaaccgttttatacttggtcgtgttgagtcgttgcccatttctttggagaccaagttttgcttactttggatgacttgtttggccattttctggcttttggtcatttgagtgagtttctcttcttcttcttcttcctctttctgcttatatatgttcatgtggtggtgttgacattgcactcattaaatgggagattgcgaacacaagattgagttgctccttgtggtt

SEQ ID NO: 332246 - DNA, 75 bp, Zea mays
aaaaaaaaaaataaaaaaaaaaaaaataaaaaaaaaaaaaaaaaaaaaaaaaaaaaaaggaaaataaaaaaaaaa

SEQ ID NO: 332247 - DNA, 190 bp, Zea mays
aaaaaaaaataaaaaaaaaaaataaataaaaaaaaaaaaaaaaaaaaaaaaaaagaaaaaaaaataaaaaaaaaaaaaaaaaaaaaaaaaaaaaaaaaaaaaaaaaggggcggccgttttaggggttccaagcttacgtccgcttgcttgctacgttatagctcttctatggtgtcacctaatttcattt

SEQ ID NO: 332248 - DNA, 443 bp, Zea mays
aacaaaaacgactcgaggccaaacgcttgcaaggacagctcaaaactgtacaacgagtggagtcatgtacaacgagaactgcaccgaactgctgaaccgcatgtagtgggccgtggtctacgtcaagatgcggctctttgacggactgcacgacgtgctccggtagcagctcttcgaggggtcaccgcacgcctagaacgcttactgctccttctccaacgtgcgccagtggatcatactcccaattgcatatgcttattagtatatagtacaagctccagtcccaattctccttctgtgctcctaccaccaccgagcttgcatgccgctcatgtcacggtcgacaacctgaatgtgcatctgatattgcgaacatggcagcttggccgttggatttgtgctatggtgatgtatggaatgattaaggcggttgtctttgtgca

SEQ ID NO: 332249 - DNA, 274 bp, Zea mays
caagaccatccaaactcggatttaaattcttttggaaacctttcgtaaaggtgcagggtcgactgtacaggcagcagggtttcttacaatactctaagctgtgacaaacttgtttggcaactcatgcttgcaccagtggcttatgacccacttttctgagatcattgattctgtgtcaaacttcaagtcttcttttagcaagaatgcacaattggcatatgtcacgcttctactgaactactctgctctttccattgaatcaaatgaagaacat

SEQ ID NO: 332250 - DNA, 160 bp, Zea mays
aaaaaaaaaaaataaaaaaaaaaaaattaaataaacaaaaaaaaaaaaaacataaaagtagggataaacaacaaaaacgtgaagaaaaataaaaaaacaaaaataataaatcataacaccaggccaacaaaaaactatataaaaggcactacaaaacctg

SEQ ID NO: 332251 - DNA, 312 bp, Zea mays
cacacacaccgatcaggtagctgtcactgtagcacgatcgtactaaaaccagcggcaccaatagatcgacgacacgcgcgcgatccaggtgaggagcgaaagacacggtggccttttcgaatccgacggacggcgcgtagcgctagctagctctctaggcctgagaggaggatcgtgggacgaggatcatatacggacttctagtgcactgctgtcacagtggtagctacggtggcttcgctgcctcagcagttgaatgtgctgatctacgacacgctgtgctcgacggtcgcgatcatggcacacgatgat

SEQ ID NO: 332252 - DNA, 76 bp, Zea mays
aaaaaaaaaaaaaaataaaaaaaaaatttaaattaaaaaaaaaaaaaaataaaaataaggaaaaggacaaaaaaaa

SEQ ID NO: 332253 - DNA, 303 bp, Zea mays
ccggttccgaattccaggggcgcgccacgcgtccgctctgtttcaaggtggattgtttgggtcaaaagaatgaaattttgctgctgaaggtcggtcaaagcgatatggtggtgggatccatgggaggaacagacttcaatcacgccggtcaacaagtctggaaactgcacatatactggtggggactcgctcgggaaaacaacgctgactacacttctggcttgcatatacaattatgagagctggcagaggtacaagaaaaagatggtggcttgcgagagttgattgttgcgaaagctgatt

SEQ ID NO: 332254 - DNA, 291 bp, Zea mays
ccaagcctggaaaggggaccaggatgaattggctgcggcctactgcgccggcggcactgggttgaacgatggtggatcgatggagaccaagaacgatctctccgccgacagcggcatgacgatggagacgacgaaccgcggagcgcagaagcgccactggggacactacgcggacgagagcctgcacacgcgcatgaaggcccacgcgcagctcgactacatctacacggacgacgccggcgagcgcggatactaagccaccaggatggagtatgccggggctgaggacaa

SEQ ID NO: 332255 - DNA, 282 bp, Zea mays
  unsure (1)..(282): unsure at all n locations
taccggtcccgaattccagnggcgagccacgcgtgcggatcttactagacacaacgagttctagcatcttggtcattcagcaataatgatggtcggccggttgataaattatgngggcagaaatataatgccacccttcatgctgatggttcgattcttgggccgcttacaaatcttcactatgctgggcttaacttgccagtttggcttataccatctttagttcacgctatagagttatcaaccacagactcaattcattttctgaagcaatggttgact

SEQ ID NO: 332256 - DNA, 347 bp, Zea mays
gttgcactacatgcttcttctagcattctttgttgctcatgcacgcacaacaggtgggctgacctaagaggacagcaatgctaggaacatgactatgaccaagaccaggtcattgggcgacatacttgtcagccagattgacgacgggccatgctatatagattacggtcttaatgagtacgtgtgcataaagactaataagtgctataagatctacatgctcttcgttgcgagtagtcaacgatcatgatgaatccattatacttcggagacataattatactgccgagacagactgttagagatgacgctagttagatgctggttcactaaaatattatgtaaca

SEQ ID NO: 332257 - DNA, 391 bp, Zea mays
  unsure (1)..(391): unsure at all n locations
cgtagagagaaggaaaaatatccccaaaccctagctcccgatctcgatggcgaaccctcgcgtcttcttcgacatgaccgtcggcggcgccccggcgggccggatcgtgatggagctgtacgccaacgaggtgcccaagaccgcggagaacttccgcgcgctgtgcacgggcgagaagggcgtgggcaagtccgggaagccgctccactacaagggctccaccttccaccgcgtcatccccgagttcatgtgccagggcggcgacttcacccgcggcaacggcaccggcggcgagtccatctacggcgagaagttccccgacgagaagttcgtgcgcaagcacaccgnccccggtgtgctctccatggccaacgccgggcccaacaccaac

SEQ ID NO: 332258 - DNA, 113 bp, Zea mays
gcagggtctgcggcggctagatgattttcggaagggcattggaggactacgcgtaggcggttatgaggaagtgccaattgcataggcaaaagttttagctagctttaaaaatg

SEQ ID NO: 332259 - DNA, 323 bp, Zea mays
cccacgcgtccggactaattctgtttaaattatctttttcaaggagagagctctttgatcttcaagaaaggtagcatactttggcacaatttgctatggaagtggctagagaatcacaagtgaggaatgttgaaggatgaattggagcagaaaattaagtattggtggtgaggatgttgaaatctgcatggaaatttcctcaaaacctgagagcttcaaatgttattggctgcttcacgcgctctttgtttttcaaccatactgtgacttgtgttttgttctaggatgttgtggctataaacaagtggaggtttatggagcta

SEQ ID NO: 332260 - DNA, 59 bp, Zea mays
cccgtcacgcgaacgccaccgctgccagcgtcggttacctacgctggcctgaggaaccc

SEQ ID NO: 332261 - DNA, 331 bp, Zea mays
gtcatcgtgctacattgcatagcaaattgtaaaatcaatgttagtgctctgtgagtagttaagtgcatcatgcttagatatgctgctcagattaactaatgtacgatacaagtactgacaagtaatgagatagattgcacaaaatcatgaacttctttcaaattcatctgttttcttgctggtatacaaagaccaatatgagttatgcacgaaaattcatatgtttctgcttaaaagaagggaattcatttgtgaagtatgttatcttcagacttgcatatgatgattggtttctcgaatgatgtttctagggatgctcttatgtgaaata

SEQ ID NO: 332262 - DNA, 57 bp, Zea mays
aataaattatcaaaaaaaaaaaaaaattatatattaaaaaaaaaaaaaaaaggacaa

SEQ ID NO: 332263 - DNA, 86 bp, Zea mays
ttaccactgatctatacacatcatctttagttacagaccagttcaatactatactcgggcgggtcaatccaaaacctgggggggca

SEQ ID NO: 332264 - DNA, 132 bp, Zea mays
atacaacatacatataaccatcgctatttcactacacacaaataaaatgcttaaacatgggcgggtaaattcaaaacttgggggcgcattctataccacaccttacaataccccattatataataccactat

SEQ ID NO: 332265 - DNA, 66 bp, Zea mays
aaaaaaaaaaaaaaaataaataaaaattaaaaaagcaaaaaaaaataaaaaagaagaagaagagag

SEQ ID NO: 332266 - DNA, 392 bp, Zea mays
  unsure (1)..(392): unsure at all n locations
gtcgggcttcttcctctcccagctcttctcgtcctcgcggggcgcctcgccgacgcggacgccgccattcccgctcaagcagccgtcagcagctccggccgcgcgcgccccgccgcagctcttcagctggccgggccaccaccagccgcagcagctcccgtcgcccgcgggagcgtcgccgctcttgccgcccggcccgggcgcgttccacccgtcctccgcgcgcccaatgccgtcgttcccaggcggcaaggacgagggccacatgttccacctnccgccagcggcgcaccacgggactaacaagcagctcgctgagcacatggacgagcacaaccaccaccagcagcacccgatggggggggccggcggcgactcgcccgacggcgacc

SEQ ID NO: 332267 - DNA, 148 bp, Zea mays
gccacgcgtccgaccacgcgtctcgatagcgctgatgttataattatcgacgggcacgtctacactattgtgactgttgtcaattcgcaactatttggtgacatcaatgttcttaagtctgtgccaattcaggtgactgacgatgtaa

SEQ ID NO: 332268 - DNA, 153 bp, Zea mays
aaaaaaaaaaaaataaaaaaaaaaaataaaaaaaaaaaaaaaaattaaaaaaaaaaaggaaaaataaaaaaaaaaaaaagaaaaaaaataaaaaaaaaaaaaaaaaaaaaaaaaaaaaaaaaaaaaaaaaaaaaaaaaaaaaaaaaaaggtaa

SEQ ID NO: 332269 - DNA, 241 bp, Zea mays
gttcatgacgatcatgatgactttcctgagcttgtccctggatagacattttacggggccgtttaagagaaaatggagtccgcattattatgctacatgcctgctcgcgttaaaccattccattacaagggacctgttgagaactctgacctaccttatttgtccctgtggaacatggtgctgtcatgatcgatatttttgtatggccagctcgtgggattatacatgaagcatgcctgtt

SEQ ID NO: 332270 - DNA, 249 bp, Zea mays
ggtaaacgtgccggcccagcgatcgttatcatctgactaaccagtcaagtaccccgtctgaattgacttttgaggaccattgtgccctgttgaacttatgtcttaccttctgaagtccgatgtgtctggtatctacctgaccgtgcatctatctgatgctggtcttttaatagaaaagcaagcttccgttgaaatttattgtcaatgatggcttacgtataaaggttaaaaaaacggcggcctttttac

SEQ ID NO: 332271 - DNA, 287 bp, Zea mays
cctcatcctctcatgatcttactacgacattcggatagagatcttgatctgtggccatgaaccagatcgacatgtgggcggatcccttccgcgactgcgtctaggacagcgtccgtctcttgaagctctgctacatgtcttaccggatggaatccactaacgtgtctatgccaacgatattcaggactatattctatggctaacaaggtttttcatctagatcatgggattgtcatcaacatcctcatcaatgccaatcgtccaggttaccatgtctacaatgctac

SEQ ID NO: 332272 - DNA, 343 bp, Zea mays
ctcacgctttcaaacagactcagggccttctgctattcaaaactgcaccaggggcaaggtcaccagccagtgaatgactgagtgcagaactagcccaaaccctagaccccgcatccaaatatcccaccaatccaccagatgctatccaagaaaggactctatacaaccaaactccgacttcgagctacatcgatccatagatggtcccggactcgaataccacgcttgctatccatgacgacgaacccatcgtctcctatgtagatcgatcgatggccacagacacataatcaccgacgccgacgacggtgacgactcttgtgatccgcaactaggtataacc

SEQ ID NO: 332273 - DNA, 65 bp, Zea mays
ccggttcgaattgccgggtcgacgccacgcgtacgaagaaaaaaaaaaaaaaaaagttaggaatt

SEQ ID NO: 332274 - DNA, 329 bp, Zea mays
gttctagatccgacggccttccctttctataacttctatatcctatcactggctggttcatatttggaggattgacaattatcaatgacaacaaattctctatatataaagtaacattttcatacacttactaattaatatataactatactttatatcaataaaaaaacacttctaataaatacacatatacccataaaaatactacctaaaactgacacaacaagaatcaattactaactatataaaaatagcattcataaaggacactatcaacatttttctaaacaatggatcctacgctaactttgaaaaaatgcaaataccaa

SEQ ID NO: 332275 - DNA, 90 bp, Zea mays
aacaaacacacatactgtcgcctttaattcaaacactctaaaatcttcaagaggtaaaggcccgaacctcgctagcgttcaacctcttta

SEQ ID NO: 332276 - DNA, 416 bp, Zea mays
tcccgggtgcgacccacgcgtacgctcacgcgtccgggacatcaacgcaactagtgttacgagcatgaacatgactaggtcgggatggtacagcttcaacatgtgcttgaagttgcttacaacttaacatatgttctttcgtcataagaacttgaatttacttgtgcacgatcatatgctatctgacatgaacaaagttcttgataaactgctaattgtaatgctctggattatacatttggaataaaggggtttttgataattggtccaatattaattgcccttcttaacatttgctcattctgaattgattattgttcttgccctgtttctgctcattaatctcacttctttttttttttactttcatttggtttatttcacttgcttgtgtatttttgtccgttttttttatt

SEQ ID NO: 332277 - DNA, 85 bp, Zea mays
ctcggaattcccggttcgacccacgcgtacgcatactcttacgattacgcatccgtccaatcatatcgctcacgctttccacgac

SEQ ID NO: 332278 - DNA, 375 bp, Zea mays
agacaactagcaacatagaaagcacaatactgtaccaacaatggctgccaaggtatggtgcctccttatgctccttggtctctctgcaagtgctgctacggcgaccattttcctacaatgctcacaagcatctatagcatcccttcttcccccgtacctctcaccagcggcgtcttcggtatgtgaaaacccaattcttcaaccctatacgatccaacaggcaatcagcagctggcatcttacctttatcacccttgttactgcaacaatcatcagccctattacagcaggtacctttgatgcatttattggcacataacatcagggcacaacaactacaacaacttgtgctagcaaaccttgctggctactctc

SEQ ID NO: 332279 - DNA, 435 bp, Zea mays
ccgacgagggtggcggcgtcgaggcgtgggacgccgtggacctcatgttggcgtagggcgtacgccttagcaggggggcccagcgccagcgccagccccagccccagcgcgcgcgtgccgcgtgccgtcgctgtgaacggccgccgcagctgttttggatcgagtaataatattattagtagtataatgtttctccaagcagctaagataattgcaagccttgctgggtggtattactagcactgctatctaagagtatgtactagcaggatgggtttatctagcttgttgctaaacagaaaattaatctaagaaaacagagatatggtctgttaattgccggctctaactaatggccggcgataatctgttaagctacctcagattgaccatctctatttcttattataaactcattttcctcgtctattattt

SEQ ID NO: 332280 - DNA, 334 bp, Zea mays
aaaaaaaaaaaaaaaaaaaaaaaaaaaataaaaaaaaaaaaaaaaaaaaaaaaaagaaaataacaataaaacaacatgaatggactattcacaatcaaacaaacacttaaatacacatccaacacaaccaacataaatttatataaaccaaccatacacaaccttccttcaccaaccactctatatacaactacataactatcaccattcacaacaatcctattaataaactcctatttcactatcacatctcctgcaattgccattcttaccaatactcctacacattacatcctcaacatataactatgcatacaaatctcataaataacct

SEQ ID NO: 332281 - DNA, 68 bp, Zea mays
tcccaattcgacccacgcctcacgcgtccataccatatatattaagattttagtctagcacaaaactc

SEQ ID NO: 332282 - DNA, 84 bp, Zea mays
ggttagctaccatggatgtttcatctacacaccagcttggtttgttatttatactaaggaagaacaaattctagtcttatgatc

SEQ ID NO: 332283 - DNA, 370 bp, Zea mays
  unsure (1)..(370): unsure at all n locations
acgttgtcctgcccaccgncagcccctcctctgccccccgccggccgtccacctncaggcccgcctctacccgccgncctgctctggccgnctnccctcctctggccgncgcccaggcacccaccgncagccgtcgaggcctgcaccgncctctaatcaccgnccaggcgtccacctctgactgccgcccacctncagccgtcgaggcttctggtggaaactcgtttgctaagatggaaagaggcaatgactactatgttgntaggaaaagtgatgtggtggcaagttacaaaactctaagtgattgccaaggtcagatttgctcttcggtatctggtcctgctgcaagtgcctacaagggtcactcttg

SEQ ID NO: 332284 - DNA, 435 bp, Zea mays
agggaagaaaggtccacacaggacactcctccttcgtctttctccttcctcggcgctcgctgctgcattcgcgaacacgcatcgaccctacgactacgagtagcgagagaggattgatggcggcgcagctgcggtacatgatgagccattattttggtaccccacctagcaaggttcgcgggatcgctcccagaaacgtccgagttgcagttcccaatttttttctctttctttccaaaatcattttctgaagaattctccccaaatcctgttcacttctttggttcggggttgacggggttctttgttgctaacgaggcaggaggtgatccaagatctgtactacgccttgaggacaaagggaggtttgacccccaaggaggaggagacgctcctggcttgcaatttacttcctggtgtttatttcatcgtggg

SEQ ID NO: 332285 - DNA, 429 bp, Zea mays
gaaccctcaaaaaactaactagctagcttagctaaccccggccgatggacatggaccggaggttcaacgtcgactggagtgccaacgagatcgagatggtgagatctctcatcgcttgtcacggcgccagcaacagcacgaacgacgacattgtggatgagctccaggcaatgttcccagggaaggataagcgccaggtaactgacttgtacgttgagcttgtggtggagatgataaacagtggggcagagctgagcagcaaccagctcctgctcaactctggtggggtgcacagcaggacgatggatgggtatttagcagacgagatgaaggcgaagaggatgctgctggaggaacagcgccgtaggaaattagttgctgttcctcgacaggataaccaacaacgtgcaaggaggttttggactctgg

SEQ ID NO: 332286 - DNA, 347 bp, Zea mays
aaaaaaaaaaaacatacaaaaaaaaaataataaaaacttaaaacaaatatataaaaaaagggcaggggctctattagaatccgggctgatttcacagtacatactgaatcataacccgtgctatcgaaggcaccaaaattcaattaactggacctcattttacatcattgaccactgggaaaacaccgtcgttactgaaataaaactgcttgaaccaaattcaagtttactaaaatggcttactatttatcaagctcggatcttagcatttatgcctacaatgctcacccttgatggcaaatgggcaacccccatgagcgacgcattaaaccccgtaggtgcccttt

SEQ ID NO: 332287 - DNA, 152 bp, Zea mays
aatggattacgaaacatttctatcttaacaatataacacatgtttatataaaaaaaagaaaaggaaaaaaaaaagaaagggaaaacaaaaaaaaaaaaaaaaaaaaaaaaaaaagaaagggcacaacaactaaaagaaccaaacttaaaaag

SEQ ID NO: 332288 - DNA, 431 bp, Zea mays
cccacgcgtccgtgagtcttcaatgagagctgattccagttatatagaggtgaacaaggttttgattatttctttggttaatttggtgcaacatatagaggtgaacaagcttattaaaggaagatccttgtacaatcaagagttcatacaatagatgaaacgatattgtgattctctcaatggtggcttcatgagcaagcaatcattcaccttgttcactaaaatttcagactgtagctcagataaggctttgagcattccttgctacaatgcttccgagagaagggaaaccggcaaaggggaaaagagacgaatagaagggcattggtgccctctcacacacaggccaagtatacatccacatgccacaaggctgaagcttccacatgaacaagagaatggatcgtgatagctattgcaagatgatgcac

SEQ ID NO: 332289 - DNA, 232 bp, Zea mays
gtcgacccagcgttcggttaagttaaagcaacttattgactactattgaaggttgatctcgggagacggggaattaatccggtgttgctttcatgcttaaattggatcttatagtcttattccaacacctaacatgtctcttgttcaatcttcctctgtatcatattgtatgcatagatttttgatgggtcctgtgaaaccttggcataatctatacacatgaaataaggga

SEQ ID NO: 332290 - DNA, 298 bp, Zea mays
gatgggtgaagacactcagctgcgtaactctcgactcgacttggttcactaatcgttttgggtacgcactcagcttcgaacatgtagtagcaacttttagatctagagccatgtgaaaaaaggcaggtttgactttaacccagatgtttagggatttttcgagcagcaaactgtgacagtatgtatgcattgacaatttaaagctgaagtctggaccggtttccatgaaaaaaaagcccaaaagaaaaaaaaattccaaacaattgcacagcccaaaaggcaaaatgggacgcaccat

SEQ ID NO: 332291 - DNA, 180 bp, Zea mays
aaaaaacaaaaaaaaaaaaaaaaaaaaataaaaaaacaaaaaaaaaaacaaaaaagaacgggtaaaatcaaaagaaaggaaaacaggaccgcctctttagaggatccaagtttcacgacacatccttacaacgctctaattcttctataatgacacctaaatgcaattcactgcccacat

SEQ ID NO: 332292 - DNA, 431 bp, Zea mays
atcaaatacaagatcaccgtttctggctgaatatcatatcacagacactgcgcttcgggatcaaccaacgctgggcgcagctcgtcattagctactgattctccattctctggaagccactatctaaaagcactggctaaagaagatcaacctttgctccaggtcgatgaaactacatcttaaatgcactgtctcccataacaccctttatgctcatttcatcagaacgatccactgtcgttcattatacactgaatgcaataaatcactcacgcatcctatgaacatagctctcctaatatcgctgctctatgctgatacctctggtgacatgctactcttactaatgttggcacttctgaacaacgcattctatttcaagcccttaatgaaccagccgatatagatcgacaatcaaattcttaaaacaa

SEQ ID NO: 332293 - DNA, 138 bp, Zea mays
cccacgcgtccgcacactcgtacgcggacgagtagtcagacgcgtagttctccgtcctgttcgggtccaagaatacgcggtggtcgaacctagagaacgtgctgctttggggatctgtgcggtagatagatgactact

SEQ ID NO: 332294 - DNA, 388 bp, Zea mays
gcggacgcgtgggttgcggctgtatgggcctagtctgggcctctcgtggtcggatctctcgagctgcactgccttctgtcgtacttggctcgcgtcacctcataccggggccgactgtcacgcctgtccatccatggcggtgcagctgctagactgctctgctccttgcggacacctgctggtcggcctgaccgacttctgctgtcgcgaaccactccatggatgctccagcgagcccttgtctcatggcgacgcgccgttgagactcccagccgccccagctcggagtcctggtgtcgcgatcgcttccagccggacggaataaccagcgatgggagaacatactgatcgacacagatgatgctatgaacgaactgagatgacagac

SEQ ID NO: 332295 - DNA, 254 bp, Zea mays
tcgtcggccacctacgtgcgttcggcaaacgtacaaggagatggacgtcggaggcgtcgacctagcccgccggcgtgatcctggagctgtccgggctggtgatccaccacgatccggacatctggggaggcgcgcgagttcaggcctgacaggttctccgagggcgtgtctagggcctgcaatgacccctggggcgttgcttccgttcggttagggcccgtgcatctgcatcggacagaactttgcgctgttgg

SEQ ID NO: 332296 - DNA, 242 bp, Zea mays
  unsure (1)..(242): unsure at all n locations
cggtccgtgaatntacccgggtcgacgccacgtccgtccgtggcacggcgtgatgganntatctcactnccctttgagaaggtgtcgaactnccaggctcatctttactctccnttcaccacgtgggtnngccagggagtagccgcctattcaggaaccaatcaaaacntcattgggctgagtgcnncttgcagaatgaagtnntgatcaacgctttgccaagggggctcgttcnncaacag

SEQ ID NO: 332297 - DNA, 119 bp, Zea mays
gaacgaggatagcgcttgtggcgctcgctcgaattgttcggcgtcatcggagagatcgagttctgggacacgggcggtcgctatgatcgtggccagctttcgtatgcgtgcactgtaca

SEQ ID NO: 332298 - DNA, 424 bp, Zea mays
acgcgtacgcgccacatgatattatgcgggatgctgctatttcaacattgacaactgattgtgaacacgagcgctgtcgtgccatgtaacggctgctgttgggatgcgtgtcacacgggaactattattctataccacacagaatagagacattgctagcgtccagataggacctacgctgacattattgctgagctctcagcatatgctgattcatcatcacagacgatcagtccttttattgatcctatccatagtttgaatatgcctaactatgaaccccagcggtggtcatttttcagaaatcttgcacaaaatgagtttccaaaaaaggatgaggcccaagatctggcaaagatcgaggaaggagtttatcccttagatcacttagagcatgatacaactaatgtgaagaatttggatc

SEQ ID NO: 332299 - DNA, 183 bp, Zea mays
ttcccgtgtcgacccacgcgtacgtccacgcgtccgaaaaaaaaaaaaaaaaaatttttaaataaaaataaaaataaaaaaaattactggtaaaggaaaaaaaaaaaaaaaaaaataaaaatacaaacataataaaaaaaaaaatacataaactaacatataaaaaaatatctacatcttttg

SEQ ID NO: 332300 - DNA, 312 bp, Zea mays
  unsure (1)..(312): unsure at all n locations
cggaattcccgggtcgacccacgcgtacgcgaggacatgtacaaggaagagaccggagacatcgagcaagactccaactcctcctccgacaacgcgccagcaggaagcaaggccaagacggcgtcttcgcgagacaaggaggaccacctggcgagaagctgctgcacgccgcgggccgtctgcgagagcagcagccagctgagcgagccaccaggaggagccagcatgagggccatgagcgtcgccgtcgncgccgctggagcgcccatggggttattccagaacgagcctggccacgaccacgaccacgac

SEQ ID NO: 332301 - DNA, 392 bp, Zea mays
attctccgggtcgacccacgcgtacgcccacgcgtccgaaaaaaaaaaaaaaaaaaattataattttaaaaaaaaataaaaataaaaagagataaaaataaggcaacacacatatcgtgcgcacaagcttaaaaaggcggaccagttcaacgataacgaccttatggagagcgtgactcgtagctccttgttcaacttggttgtacatttaagtatagtgcgcaaaacacctttcgtttccaccatgttctccagctacatgcaatacatcttcggctggatcctcttcttcggaataccctgtatcgtcatcgtcttctcaatcgttctgttcctgctcgggaccatttcataccgcttgtacacgaccgttgcggacagccccttctctt

SEQ ID NO: 332302 - DNA, 171 bp, Zea mays
catgccctaggaccagggtgtacttcacgctgtctcacaggacctcgaactgggcctacgatccctgcacctgaagacgaaccggtatcaggatgtggtcacaaggaggagcctctatacgaggccgacgtcgctcggaggcgcgcctatgttgtcaactgccgaggcacc

SEQ ID NO: 332303 - DNA, 419 bp, Zea mays
acctacgcgtacggctgattggttgcctgtgcagttcctttgttttataaatactagtcatgctgttggggcaagggaaatgacttcacacttttttattgattctgatctgatgcatccttagtgtagcactttagaaggttcattaggctgtaatatttttgcatgcctcaagaaaatcacttttctatctagagaattaggtttaggtaaagacatttttttatcttcgaccatcatgtcaagaatagtggtattttagaaagcatgtcgtcaatatgttgataccatttttttttataaaaagtgatgtagcatgtcgtatatttgtaaaaaaaagaacatttgcataatactccctccatttttttatttgacgttttgcagttcatttgtccataagctggcgtcaaataaaa

SEQ ID NO: 332304 - DNA, 365 bp, Zea mays
  unsure (1)..(365): unsure at all n locations
caattaactagcttcttctagctctagctaggctcgtctgctgcaagaaggtaacagcgcaggcatggaggggaaggaggaggacgtccgcctgggcgccaacaagttctcggagcgccagcccatcggcacggcggcgcagggcacggacgacaaggactacaaggagcccccgccggcgccgctcttcgagcccggggagctcaagtcctggtccttctaccgcgccggcatcgccgagttcgtcgccaccttcctcttcctctacatctccatcctcaccgtcatgggcgtctccaagtccacctncaagtgcgccaccgtcggcatccagggcatcgnctggtccttcggcggcatgatct

SEQ ID NO: 332305 - DNA, 380 bp, Zea mays
ggaattcccgggtcgacctacgcgtacgcccacgcgtccgtccacgcgtgcggatattctttatctgatctatactacaacagctgatggagcaagggaaatgacttcacacttttttattgattctgaatctgatgcatccttagtgtagcactttagaaggttcattaagctgggatattcttgcatgcctcacgaaaatcacttttctatctagagaattaggtttaggtaaagacattaccttatcttcgaccatcatgtcaagaatagcagcattttagatagcatatcctcgatatgtcgataccattttgttttataaaaagtgatgtttcatgtcgtatatttgttaacaaaagaacatttgcataatactc

SEQ ID NO: 332306 - DNA, 320 bp, Zea mays
  unsure (1)..(320): unsure at all n locations
caattaactagcttcttctagctctagctaggctcgtctgctgcaagaaggtaacagcgcaggcatggaggggaaggaggaggacgtccgcctgggcgccaacaagttctcggagcgccagcccatcggcacggcggcgcagggcacggacgacaaggactacaaggagcccccgacggcgccgctcttcgagcccggggagctcaagtcctggtccttctaccgcgccggcatcgccgagttcgtcgccaccttcctcttcctctacatctccatcctcaccgtcatgggcgtctccaagtccacctncaagtgcgcca

SEQ ID NO: 332307 - DNA, 360 bp, Zea mays
  unsure (1)..(360): unsure at all n locations
cggaattcccgggtcgacccacgcgtacgcgctgtcaccgtcactgtcacagctgccactgaatccatcgggcgtgttgatgctacatctgccgccactgtttctgaatctttacaagaaagctccaatactttccacgtcgaaacgacagcaacggaagccgcttaatttgccggtcatcacctcgggtctgtcgcccatggtggaaacatgcacgaaaacacggtggtagtagtagtagaatgctttctcttgtacatcgatttgtttttgtgaatattgcaaaatcggtttgtagaatccaatgtcatgttgaggcggccgttgatgcgccagagccctgctttggagctccgacng

SEQ ID NO: 332308 - DNA, 288 bp, Zea mays
gaatttccgggtcgacccacgcgtacgcgctggcaccgttactgtcacagctgccactgtatctatcgggcgtggcgatgctgcatatgggggcagcgtgttatgaatctttgcaagaaagctacaatactttccacgctgaagctgacagatgcgcgtggcaggtgaattggccggacatcacctcgggtctgtagtccatggtggaaacatgcactacaacacagaggtagcacaagcagaaagcggtctcttgtacatcgagatgacaatgtgaatattgcaaaa

SEQ ID NO: 332309 - DNA, 275 bp, Zea mays
gacgtacgcgtccggtctcgaacgccgacattgaagcctgttggccgtgctcaccccggctagcaggctacgcgccaggtctccaactttggttcactcatctggcactatactgacgctcgccatcgccagcgactaactaatcaccctcagtgaacatctcacgctggtcagatgatcgagggaatgacagtcccagaagcaccgatcaagtaggctatcgaacatatacagacacatttgcacgggaatgactatgaaggcatacacctatt

SEQ ID NO: 332310 - DNA, 107 bp, Zea mays
gctttttggaaagatggaacttattttaaattgggattttctcaaaactagaccaaaagggaagggattaatgccatattaatcccctattggacacttgcccaatg

SEQ ID NO: 332311 - DNA, 371 bp, Zea mays
gtctccaacgccgccattgaagcctgttgtccctgctcaccccggcgagcaggctacacgccaggtcgccgcctctggcgcactccgttggctctatcctgacgctcgccatcgccgttgagtaactcgtcaccctcaatgttcgcctcacgctcgccaggtgtttgagggaatggtggtaccaggagcagtgatcgtcttgcctattgtatttatacggaaacatttgcacggttttgtctatgtttgcatacacctattgtatgtatacttctaactgttggtatggaggtgacctgcaacttctcaaccaaggcgagcacagtcacccttgtgccacagcatgccctggactctaccaacaccgtgaa

SEQ ID NO: 332312 - DNA, 157 bp, Zea mays
cccacgcctacactgaggctatgactgtggatatgaatgtgactatgaaggaaacagtgaaggggggagacaggaatgtggacgggattatgaaggagatgattgagcgtttggaatcgcgtgtgaagacggacgaggaaaccggggacgaaaagga

SEQ ID NO: 332313 - DNA, 430 bp, Zea mays
attcccgggtcgacccacgcgtacggttggcttctcctccccctccggttcgggttttggttcgtgaggttctccggggttcgggttggtgggtgagcggatcgagatggcagcgtcggatgttgagtaccgctgcttcgtcggcggcctcgcctgggccacggacgaccactccctacacaacgccttcagcacctacggcgaggtcctcgagtccaagatcatcctcgatcgggagacgcagaggtcccgcggcttcggcttcgtcaccttctccacggaggaggcgatgcggaacgccatcgagggcatgaacggcaaggagctggacggtcgcaacatcaccgtcaacgaggcccagtcccgcggcggccgtggaggcggcggctgtgggtacggtggtggtcgtggaggcggcggctacagcggt

SEQ ID NO: 332314 - DNA, 235 bp, Zea mays
gcgtcaggcatcctcctatactatgactgttggttggaatgtgactacgaacgactcgtcagggtccggtagagcgacctgcacttgattacgaacgggacggttgcgccatcgccatcgaccctgaaagcggtacaggaaaccctggaggccaccgcagctgtcgaaaaaatcaccgggttcaccgctacgcggatccccttgtactaccccttctgcctcaacggagtcagca

SEQ ID NO: 332315 - DNA, 313 bp, Zea mays
cccacgcgtccgcggacgcgtggtgccggagatccatgcctttgtgagctcgagtggagagaaggaattaaggagcagtgaatagcgatacgaccgacatgctggagaagctgtgggacgacgtggtggcctggcctcgctccggagacggtcctcgtgaagctacgcaaggccaccaccgtccgaccgatcgtagtcgtcgacaaagaaatgactacatgcatcttctgatctgctggattgagtacattgaacacttgggggacacatttggcgaagaacacggtcatctttatcttctactttctttaag

SEQ ID NO: 332316 - DNA, 399 bp, Zea mays
gtccggcactctgcagtcccatttctcaaccataaggttctcacaccatcttcttcttcttggtgattcgattcttccttggtgcactgttcttgtacttgaattcagctcccatctagtgtgttagccacacctcgccccatccgaagtcccacctaaagaagcagagagatagaggcaacaatggcgaaagacgggctgagcaagctccagcgcatgatcaacaggtaacactcgtcgacccgcatcgtctcccacgccccgtctgcatcatcagctccactacggctccacctactgagactcacactgcgcctcgatccacagcgcagacgaggtgtccaactgcctgcacccggtctacgttggtaagtctagccttctgtaccttttcatcta

SEQ ID NO: 332317 - DNA, 285 bp, Zea mays
gtactgatcttagacgtatgctcactggcagcacttgcaatgtctcccaggatttctgggccttttctccatgcgcacggcgtatctccttcttcgactgctctcactgtgacggtgagacattcgaaaagtccatggcaactgaaacgtgaacatatggtgtatgtttcttcccctaattcggtcgtatttggatgcttgagtcctgcattgcatgatgaagaacattctcagtctctcgtcgcgtgtaaatattttcattcaagatctatcaggttaccgaag

SEQ ID NO: 332318 - DNA, 373 bp, Zea mays
aaagccctcctgtatcgctgtcgtctgcacgcctagggactctctgcctcgccgggggagcgatgcagccgctgcaccaaccgtcgatgaacggccaacacggtccgcctcctccgcagggatccggggttcccacggcttcgcagcagcaagcgccaccgacgtcgtactaccagcagcagcagcagcagcagcaggggccaccgtctcagtactaccagcagggtaccgcacaggcgtgggcgcagcagcaacagtacgctccaccgccgccgcagtaccgcgcctcagatgcagcagtacgctctaccaccgcagcagtacgcccttccgcagtagcagcagtacgccgctacgccgtagcagcaatacg

SEQ ID NO: 332319 - DNA, 436 bp, Zea mays
ctctgatgatcctggtagtccttatcacctgcctttaatgcctcacaacacagcaccggactggaatatcatggaagaattagatgattggcctgtgctcgcaaagaaagaatacgatgactggcttagttcaaaggcttcatcctcttataaccctgttgatgatatattaaccactgagatgaacagttagctgccacaatctttcacctacggaggcttcattcctcaatcatgtgcacccggtcattcaagtttaagtgacaacacgaccaaggaagagccctctatgacatttactggttttcaaggatgcactgtcagtggaaacggaatgccttcatctacagtgccaatagatgatatctatggatatcgaggtccacgttcacatcggatcttacgtacgccaatgccatcttatggtaatgatata

SEQ ID NO: 332320 - DNA, 216 bp, Zea mays
gccacacctcctcccactcatcctgtcctccactctgcacttgacgaacaacacaaacgacccgatcatcttcaacgcgaagacgacccaccccacaaactacttcgaacactcaaaccactacatccccattccccagaccaacactcactttaccgatactattcacccgcaacacgactttccacccaacatgcactacatctacaccttcct

SEQ ID NO: 332321 - DNA, 134 bp, Zea mays
tccgaattacgcatgcacccacgcgtccggaccgttgtataaaatgtatggatataatgtagagttcagtctggtgagaggaattgacattgaagctcacccgtatttaatcaaagtttgtactgactataaaa

SEQ ID NO: 332322 - DNA, 355 bp, Zea mays
ccgtcgcggccgggtcggcggtccccagttctcctccgcttcttcctccacgctcccgtccccggggcgcgaggaacttcccacttccaggcccagcttgtctggttaggattagggtcgtcgcttcgcacgtgtccggtgtgccgccgtcggagatgtcgcggacgctggtgcagccggtggggcagaaacacctcaccagcgtggccgcgcacctatcggccgcgagctaaacgaggatcctaaccttaaccctgggcagactgatactctactcctggatgacaatactaaactacttcggcaacaacattcccatcaacggatctatgtctggctgtcatcgcgaagatca

SEQ ID NO: 332323 - DNA, 302 bp, Zea mays
aaagagccttcactgcaggcgtctgtgctaagtcctgggccagctcgccaatccgatggtccggctgaacatacaggtgaacacgccgctaaaaagcaagcgacgtaaccaagggcgacgccaaggcggacatcaacgccgctatcagctctgctaatatccctttgactgtcacgttcacagacacttgcgcaagctacgacaccaacgtcgagatcgagaagatctaggagaagctccagctgaagaggcacctgaagatgcacaccatgctgaacacttacatggcggatatcctcgcc

SEQ ID NO: 332324 - DNA, 160 bp, Zea mays
attcccggctctacccactcatcctaaaaaaaaaaacataaaaaaaaaaaatttaaaaaataaaaaaaaaaaaaaaaaaaaaaagaaaaatgtaaaatttaaaaaaatttaaataaaaaaaaaaaaaaaaaaatataaaattaaaaataaaaataaatat

SEQ ID NO: 332325 - DNA, 261 bp, Zea mays
aattcccgactcgacccacgcatccgccgatccgtcctactccacaatccacatttaccctccacttcttcctacacactccgggacactgctcactatcaacttgtgactaacatgcccagctaaacttcctcttataagagacctcaatttccaccttctccctctcactcactacccaaaccttaaacactatcccccacatgttgtatcacatttacctgactaactacacctaccacataaacctcaacagcttca

SEQ ID NO: 332326 - DNA, 116 bp, Zea mays
  unsure (1)..(116): unsure at all n locations
ngtaatcttcccattaatttttcacttaaacaatgtggtacatgtaatagaaactggtgncattaataaagacatagtagtatcacgtttttggaaaaaaaaaaaaaaaatcaaca

SEQ ID NO: 332327 - DNA, 262 bp, Zea mays
catcccttaatacctcaacgttcattaaccccgcgtccagttcatactcgtaccatccacaaggtctatcgaccatacaacccctgaacatgtctaatctctcccatttctcaaacatctttcaacaccagatcaacacattctacatctactacaacgtcaaacttccattttacagcaccttcaagccttatcccaccaatctcaggtccaccattacacactatacagctcttatcctatgttctaccagcttcataca

SEQ ID NO: 332328 - DNA, 102 bp, Zea mays
aaataataggtcatatacacattaattggtcactgaaacaatgtggtacatgtaataggaggaggtgcattgaataaagacatagtagtatcacgtttttgg

SEQ ID NO: 332329 - DNA, 369 bp, Zea mays
ttcccgaattgacgcatgcatccacgcgtgcgaacacgcgtccggaagatgctcatgcatctagttccgtggctacgcagtctggggcaagctcgtgaaagtcaaggtttcgtacaagctctcggacgccgacaagaaggcattcctcaagaccaaggctaagccggcaaatgccgccgctgccaagaccaccgcccccaagccggccaaggccgccgccgacaagtcaaagaatgcagcggctgccaagccaaagaaggccgctgctgctgggaccaagcgcaaagtgcccgagaagaatgtcgtggcgaagcctaagaagtcccccgccgtcaaggccaatgccaagccgaagaccgtgaagtcccc

SEQ ID NO: 332330 - DNA, 163 bp, Zea mays
aaaagaaaaaaaaaattcaaaaaaaatataaaaaaataaaaaaaaaaaaaaaaaaaaagagataaaagaaaaatattaaaaagaaaaaatccaaaacaataaaaaaaaaaaaaaaaaaaaaaacaccaaacaaaacaacggaactactaaataaaaaactaaa

SEQ ID NO: 332331 - DNA, 265 bp, Zea mays
gtgacacacggttctcctggacattcttacgtgccaactattgctgacgaagcaagtggcttaggaataatctgctgatgtctgcaatacaggaccttccagcagcgcacttcaatcacactaagaaccggaatacgatctgacatcatgcgctctaagctcacgcggggagtctgtaaaatccattgtctatataccgtgagcgtacggattggacttatacactcagttctgagaagtagaaaggctgaccaatttatcatat

SEQ ID NO: 332332 - DNA, 196 bp, Zea mays
aaaaacaaaaaaaataacataactggttaaaaattaatctacaacaaaaaaaaaaaacgagaaagagaaaatttaaaaccgagaaaaatccacacccacaatcacccaaatatcacaaacaataactttccaataatataacccaaattcaatgacacccaactacaattcacaacaccatagaatgacaaaaccc

SEQ ID NO: 332333 - DNA, 420 bp, Zea mays
gtgacttgtacggcgaccgaagccaccgccccagccacgccatggactctctcctcggcacgggcgccttttctggcgacgacgctgacttggacaaggcgctgttcaccgtgcccgacgcctactgcggcggacgggccggaggactattctcgctaccgcaacccaagtcaggccgcgccctgctcttgtactgcctaccggcgcccaaatccacccttgagacgcgtcttctgctgtgatatcggcgcccaaatgcggcaacgcccccacgttctcctgcatgccggcgcccaagacttacggaggaaaccctaagcgcgttgtacagaaccgaccgcagccgatcctgcagtacgcatgcgacagctccgacgacgacgaggactacgccaagaagcgccgcgccagctacaacga

SEQ ID NO: 332334 - DNA, 180 bp, Zea mays
acactcttgccccagccgtccgacaaaacggctaccaaacacctgactctttgccggccgcgaaggtttagcattggcgggggcatcgccaccgctgccgcatacctcaaactgtgttattgtaccccacgaccagctgctctgcgtcgcaccgcgggtacctggacacctaccgtcacg

SEQ ID NO: 332335 - DNA, 380 bp, Zea mays
accacgcgtccgccgaggactttcttgaggttgacatggaccaactgatggaagtcgggaagagctaccgcgtacatgtgatgcctaccttgtgctccatcaggaacggacggacgctcgagagctattgataccgtcgacaaggacgagcttcaggacgccgataggaagtacgccgccactggcactacgacggctcctggctcagcgtgcgactaactcaggagatgtgatgtgtagcaaatagcgcgcgcacaccagtcgtgaataaataaatagatccattaataaactaatcagatgaagggcaacgtacgacgacctattagtggtacgcgcggtagtagctagcagagtatgctccgacactgtgacgatct

SEQ ID NO: 332336 - DNA, 370 bp, Zea mays
ggaattcccgggtcgagccacgcgtccgacgaatcatgcggcgaatgctgcacacactatatttcgtggagacgactggatctccggaatcgcggccctaccaggctacggccaagtctgcttcagcccctaagcctactcaagctcctccaaatggttgaatacggaaacccaatctttgtaaacaatttacttttaacgctcaggttttaatggaagtactcatgatccaacttattgatgctaacctacttcattcatcgacatgccactgctcgacgtcgggggctaaactataatgacgcccatagctcttgatcgacttgcatatctgcatattgaataccctatgctaattacggtattacaa

SEQ ID NO: 332337 - DNA, 363 bp, Zea mays
acggcgtataccacgagcgcaccaaccaccaccaccatcctcatccttcgcgaggagggcccttcgtcggggaagagaacccgccaggagacctacccttcctcaatcctccgaccctccatggcctcctcctccctggccctccctccaatctctctcctcctcgcgctgctgctcctctccgccccctcgccgtccgcctgcgcctcgctttccttcctcaccgcctcctccaacggctccgcctccacctccgccgacccggagctggaggacctggccccggagcccaccttcctcgaggaggtcatcgacgccgtctcggagaagtacgactgggatccggacgccgaggtcagggtc

SEQ ID NO: 332338 - DNA, 102 bp, Zea mays
aacaaaacagattaaaaaaaaaaaaaaataaaaataaaaaaaaatataactaaaaataaggaagcgttaacttaaaaaatgggcagccgctgtttgtgctcc

SEQ ID NO: 332339 - DNA, 348 bp, Zea mays
cccacgcgttcgcactaatatgatgtgtagtatatttgagtcaccttatgatgagtggtatatatatgattttaaaaatttgtaaaataaggtactgttggaggtgtttttttagaagttgagccctttatttagggcattgatttaagacaggcttggagatgctcttagtccattcacaatggaagtttaattagatattttataacattaattagtataccacataggatttgttggaggtgtttttttagaagttgagccctatatttagggcattgatttaagacaagcttgaagatgctcttagtccattcacaatggaagtttaattagatattttatgac

SEQ ID NO: 332340 - DNA, 426 bp, Zea mays
ctcctctcctttcagcactctctggacactataattgcccggttacgctccattctgagggtgctaacttctaactttagtatacatgaagactactgaaatgaccatcatctagcaagcagacgcatatgaaagggagaagatctacgtctaacgcaagcaaatccacatgtacgagcatttctgcataaatctggcgcaataattggactacacattcttcaagagcaatctgccttgtcgcggctagagtactaggatatcccactagaatcggatgacaaccccgacattgaaacctaccattcccagcgaacatcgaaagcgacttatgcaatgccatgctgctgccaaattgctccctgttggtgcttccaaccggattgcgagagaaactgttgacactgagcatggcaagagctcgat

SEQ ID NO: 332341 - DNA, 369 bp, Zea mays
ctcatgcgtcccatgttctgctgcacgtctagatgcctgaacgtagcatccatcggggggtgctttgcacacgcctagaatgccatttatggacctacatgtcatgtataatgtatactcgtaacccaaaccaagaatagttgaaacggcaggcgctgtaaactatctaaactcactaactcttgcatgcaacctgatagctatggtatatggtcagctcacattcaaacactggccgtatcacataaacgtcaagactggtaaaaccttaaattgaccccactaaagcgtactggaatacatacacctttagaaaggtttcattaaaacttacaagtatagaccgatcaatctgcacaacagatgctc

SEQ ID NO: 332342 - DNA, 345 bp, Zea mays
atggcatacacacgctagcgtattggacatatggtctcatttatgcctgtactgggatgttgtctcttgacattccgatcacatcacgatctccgtatttttcgtctgaatcccagagaccaataatcgatcatcttagctggttactagctgcttctataatgtaacaagcgctaccttattcatgagccatacccactgattactggttgtatctatgacataaatgtagctacacatccgcaacatgtacattacacacaatatgaacttatctgacgtaagatactccttccatttgctatgaaacacatgttgcccctgcaggattcttgctgtacacac

SEQ ID NO: 332343 - DNA, 426 bp, Zea mays
  unsure (1)..(426): unsure at all n locations
tggcatcttacctttatcacccttgttcctccaacaatcatcagccctattacatcaggtacctttggtgcatttattggcacataacatcagggcacaacaactacaacaacttgtgctagcaaaccttgctgcctactctcagcaacagcagtttcttacattcaaccaactagctgcattgaactctgcttcttatttgcaacaacaacaactaccattcagccagctacctgctgcctacccccagcaatttcttccattcaaccaactggcagcattgaactctcctgcttatttacagcagcaacaactactaccattcagccagctagctggtgtgagccctgctaccttcttgatacaaccacatttgttgccgttctaccagcacgctgcgcctaacgctggcacnctcttacaact

SEQ ID NO: 332344 - DNA, 345 bp, Zea mays
ggaattcccggtggacccacgcgtccgtggactattaacgtacttaatttggctctcacaactatgactatatcatctgcactagtatgattacgtgcacaaagcgttacacatcattctacaccatctgctcctacaactccacctataaaatcttgatgaatcctttcactggcaccagcactttcgattccagtacctactttgcttgaaccatcttaattatatgctacaacttctaataccctacaagctgctgcctaatgtgcaccaccaacaatgtcatatgctcaacctactacacgcattaagctatcatgtctatctacagctactttaactact

SEQ ID NO: 332345 - DNA, 357 bp, Zea mays
atccatctaccacgcgcggccaaactcctgttcttccacctgctggctgctcctgccgcccgtgcgccccaaacccacccgcctcgccgtccccgcaggccgcagcctgctctcggctcccgccgccgtctaccgcgtcctgcggctgcggtgttgcgtcacctcgggttcgccttaacttccacaatcctcgccgtcctggtgctccgccgcccctccctttgtactcgcgctggagctgcagatccaccgcgacctggcgaccaattcctcctcccgctgaagaattggcgaccttggcctccgcccccgcggcgcggaggagtcaactgtggtagcaaccaccgcggaggctgc

SEQ ID NO: 332346 - DNA, 146 bp, Zea mays
gcgtgacctaaaaaaaattgactggacctaatttaacaacgttgcaactgataaacccttgccgaaaccgaatataatcgactagcagcacacccatctttcttcccaacacttaatcaccaaaaatcgccaacggaacgcccttt

SEQ ID NO: 332347 - DNA, 227 bp, Zea mays
tcctctaacactctcatacaaactcttggattttcaccttctccctgctccttacggcacggctccctaaacccacccgcctgaccgtcccccatgcctcaaccttctctcggcttccgtcaacatctacctactccttcgtcttctctgtttcatcacctatcattccacttaactttcacaattctcatcattctcgtacttctccaccccttcctttatactca

SEQ ID NO: 332348 - DNA, 375 bp, Zea mays
tggtaagttcatgctatttcgacattttcacgggctgaaactttaaggtagggttgggttcctgagtcggttgggatggagcagctccgtcctagagattttagggaggctgatcgttcaacatttaaacacttgttagagtcactctatcctacatggaaccaattcaaacaataacaattgagagcggagcagctccgtcccaccatgcttcagtaccaaacactatctaagtaaatcctgatgtaccacatcttcattgcttgaacagagttgagatgagttccataggagtttgttgtgcaattgatccctcagcatgctaataagcaatgtgctttcttaggagtttgagtaaagcagtcaattttattc

SEQ ID NO: 332349 - DNA, 369 bp, Zea mays
ccggttcggattcccgggtcgacccacgcgttcggagcctgatacgctattcccgttcagagtttacctaaacgatacttctcataacggccggaagcctaagatgcagaaaatctcagtactaagccgtagcttgacagatatgctgatgtccatgttgacattcgactgagatgaacatatacacgaatgcaattaacgtccacttacatacatctgatgaatcctaagatgacatatgtcttacaccttctgagattccccttttaacacatccaacttgtgaaagaccatctttatacgccaccatgatctcttgcagctaatcaaaatacacatggatcacgattaacacgaaaagatgatgaa

SEQ ID NO: 332350 - DNA, 277 bp, Zea mays
ttctttttcattttaattaatggggattgatttattataaatatttgcctgttcttttattattttatcttatttcttctttaatttttatttctcatatttttcatttattattcttttataatttttcttatattcttttttcatttttaattataaaatttttaaatttctttttttttttttaatatttttttttttctatcttttttatctttttatttatcttttctttttaattaattttttcttttcttttttaaatttttatcttttt

SEQ ID NO: 332351 - DNA, 113 bp, Zea mays
aaaaaaaaaaaaaaaaaaaaaaaaaaaattaaaaataaaactaatgaaagataacagtgggggttcaatccttaccaaaatgctgtaaacgattatctatcgctatctaggtg

SEQ ID NO: 332352 - DNA, 137 bp, Zea mays
aaacagagaggacatgccatgtgtagcgtacaatagttttgactggttcgcacagctggtacagaaatactgtattgatatggacggcacgccggaggcagtgacaccaatggattaatacttgcaatattttcctg

SEQ ID NO: 332353 - DNA, 274 bp, Zea mays
cccacgcgtccgcccacgcgtccgaccagaagctgactgtgtgatagatggacggaacgacgttcgaagacgacccgcaggacacgttcgagcaagagggtgatgaagaagactttgcagatgatgtcgatgagaactaagtctaacgatgcaccagtcaccttcctatggaagagtgtccatgtttaattctattgtactttgatgatgatactttttaagacactattgtctaaatgatgtaataaagttactctactctctttacgccttt

SEQ ID NO: 332354 - DNA, 229 bp, Zea mays
actaggcgttgggttgtgccttttacttgtaccagctccggcactcaacacaggggaggcttatgtactgagagagagagagaaagatgtcagttgtagctcatcatctacacaaccagtctggtattctggcgtgggtaccgaacgatgtgttaaagatcttctgactgtctgacgagaactactgcctgtgcgttcgagacagtgccttagcgctggacgcagtcaa

SEQ ID NO: 332355 - DNA, 284 bp, Zea mays
agatcggagagaagctccttccataattattgaaggttattgaacatatttgggagagtcactgtcctttggatgtctgctactcgtacaggtatagatctcgcattatggtgcactatgactctttgggacatacatatacatatgtgcaaactatacataccgagaatcctactcccagttcaatgactcgccagtaatttcagcatcgatatacatctggtacgactcattctaaatttaactcgtcttatgcgtcaccttaactttactgctatagctat

SEQ ID NO: 332356 - DNA, 116 bp, Zea mays
aaaaaaaaaaaaaaaaaaaaaaaaaaattaaataaaaaaaaaaaaaaaaaaaaaaaaaagaatggaaaaatataatatattgtaaaataaaaaataataaaatataaaaaaaatta

SEQ ID NO: 332357 - DNA, 433 bp, Zea mays
caacaagcaacatataaagtggcatccagtctcttcaatagagcaacaatggcgaccgagaggttttccctccttatgctccttgctctttctacatgtgttgctaacgcgacaattttccctcaatgctcacaagctcctatagcttcccttcttcccccataccttccatcaattatagcttcaatatgtgaaaacccagctcttcaaccatataggcttcaacaagcaatcgcagcaagcaacatacctttatcgcccttgttgtttcaacaatcgccagccctatctttggtgcagtcattggtacaaaccatcagggcacaacagctgcagcaactcgtgctacctctgatcaaccaagtagctctggcaaacctttcttcctactctcagcaacaacaatttcttccattcaaccaactgtctacac

SEQ ID NO: 332358 - DNA, 322 bp, Zea mays
ccgagcccttctatcacaagatgttcctatactcaccaagaataactgattgaagcgtgctgtgtcatatctgcaatcgctactcacaacactctatttaaaagcacgagcatcttgatattcttgtacacatcaacgtctagggtacatccttatactatgtacttcatctcccatcaccatattagatccaacctttacgtctactactgctataaaaactcgaccaatttctatgttgctaatatctctgatatcaggtcgcgctctgaatcaaactccaattccttatatttgcacttattgtgggtcgtcaatcttc

SEQ ID NO: 332359 - DNA, 437 bp, Zea mays
gtatgactaagaagtgcctttcaaaattcctaaggaattgcttgttggcatggggttgaacagttggagtaacttacgcctgaccgctgagagttgctatgcagctacaggtgcattcagctcagctccggggcgaagccaggaattacatgtagggaggccggccgaaagagccatcttgtaaaaaaatgatcgcggttcaactggtttggttactcgcacttagcgtctgtctgagttaatacttgacaaaaaaaaaaaaaacaagcacagctcaactggttaggtttctcgtagtggtggtggtcgtttgggttaattcatcgacttgacacggttgctcctattttattttctatatgtattctagatagtgagggtttattggattttgatcgtagacgctaatcagaacctctactgaatggatgccttcg

SEQ ID NO: 332360 - DNA, 353 bp, Zea mays
cccacgcgtccgaaaaaaaaaaaaatatataaaaaaaaaaaaaaataaaaaaaaaaaaaggaaaaataataagaaaaaaatagcctaaacaaaaaaaaaaaaaaataaataaaaaaaaatgagtaaatatatatagaaaggtcggctcctttcatggttcagacgtttatcaacttcgtttctggggtcttcattcttatttcgcgcaccctaatttgagtaagttgtccccttttaaaaaccttgcgtaatgtaaaaaatttgggtacccctagtttttccctttaggcacaaatcccttttcttgaattgccctaatctttgcacggcccataaatgtcggctttttaaaa

SEQ ID NO: 332361 - DNA, 218 bp, Zea mays
caaaaaaacaaaactacatataaaactttaatttaaaaaaaaccaaaaacaaaaacgcacgtataatcaaccacataccaactacaaacatataactaaaaaaaaaaaaaatcttataaaaccctccatccttcactaaaccactataaacacattataaactccaatactcttcacccctctcatctcattccccacatttcccttccaacccttcc

SEQ ID NO: 332362 - DNA, 410 bp, Zea mays
gtattctctcactgcgataaattcctccgtctgtccttgcagcttatttcaaggtatgcaacatggctttcatgtggtttatcagcacgtaaagcttctgacaggagcccaaattcacctgcagatgctgaatgggcactgtctattcctatagaagatttcatatatgtaagttacatctgcaataatgtctgaactcgtcatgtcccaataggatctagcgtttttcattctgtactatggacctagctgcttaggactgaaattttgggtgctattgtcctatttattaacattattctatgtttctgtattaagtttatgcttagcttgaaatttctggagtttcgaagtagttataagatgactagttgcttcagaagtgctcagtaagtctgcaggaagtcact

SEQ ID NO: 332363 - DNA, 113 bp, Zea mays
aaaaaaaaaaaaaaaaaaaaaaaaaaatatggcgaccgatactagaggatccaagggtaggtactcgtgcatgctacaacataactttcgtatactggcaactaaattcaatt

SEQ ID NO: 332364 - DNA, 237 bp, Zea mays
aaaaaaaaaaaaaacaaaaaaaaaaaatttataaaaaaaaaaaaaaagacaaaaagagtaggtacaaacataaaaacatgggcgattattgcaaatcctcccattctttctggctactgacttcgacttaatatgtcttttcatacaccacaatccattcaatttactcgccttggtacaccaacctgtttggtcagaacacggtgttgctcaccaacttggtctgcttgctcttcc

SEQ ID NO: 332365 - DNA, 59 bp, Zea mays
cccacgcgtccgaaaaaaaaaaaaaatttaaaaaaaaaaaaaaaaaaaaaaagggaaag

SEQ ID NO: 332366 - DNA, 380 bp, Zea mays
cccacgcgtccgcatttctagagtaagtgatactctgggggcatctcccgctcgcttagctgtgcccgccaggccatggagcgtgaggacgccgacggcgctctcgattcgtgggctcaattctgcactctttccaacgagcttctcgccggagacggtgatctcgccgtcggcccacgcctagctcccgtcgttggtgacctctgcacacgcggcctcgccacgctcgtccgcgactactattacgccctttgcttgcattgcatcccgtgttagacttgtgctcatgcgcttcactgcatcctgttgtatctggatggatttgaccaaatgcaaattgccaacatttttattaattaaaattgctactgcaatgtctc

SEQ ID NO: 332367 - DNA, 439 bp, Zea mays
ccggacttgaattcccggctagacctacgcgtgcgtgcacgcgtcagatagacattggtgtaatatttaatgtgacggtccctcagatggcctaggtgcattattccaagacagactgcatatgaccaaagtgttacagcaacatctttagggcgccctgcaatacatgaagtcgtatggatgacaagcaaccgaacctgaagtcaactcgctgatgcacatcatgaatgccagacgcgtgctaacgtcctgtggatctacgaagcatgcctgccactgactctgcttggcacattcatgaacagatattggagcgacatctggacgagccaacctttctacttggcaacatgggaagacttggaagcactcaagcacacctttgctgacgctccagcttgtgggcaaactgggtctcatggatgaaggaatgtcagta

SEQ ID NO: 332368 - DNA, 481 bp, Zea mays
tcttgaattcccggttcgacccactcttacacttcacgcttaaaatacatttacactatagctaacaacccatatactcacacaatgggcgtgttaaattactactacatatagaccatcacactatcaaacactcctactacagatactttcacttctatataccatttactaatactatatacaatcttatcctcccaccaccatactactaacacttactaacctaaataatcattatcatcatactactaactatactcaaccatatcaatatcatacctactatatatctataccaagttctatacctacctcatactctactataacatacatatccatatacatttacatatactcaaatatctatatactaatgaactattcaatcattattattaaacactcacatagagctttaacttcttcacaaatatcttaaatatttaaatccactctttattcaatactcatactt

SEQ ID NO: 332369 - DNA, 217 bp, Zea mays
cagattcaaatccactctctaagaaacatacatctcattctcatcttttccacgattcgtattctatatatacttcagcaccatactccaattaactctcacattatacatacccatactcaaaaactcacatatactaatctattatttattaacaatatataatatccatcatcaaaaaccataactaatctataaacaaattctaaacctatca

SEQ ID NO: 332370 - DNA, 310 bp, Zea mays
aaaaaaaaaaaacaaacaaaacaatgacaattactatatacaaaaaaaaaaaaaaaaaaaacgaaaggcctaaaataataatacaagaacaaaaagccaaaaaaaccaaataaaccgaaatctgatcaaagacagcacaaaaacatgaaatatagggggatgaactttatgctgacctggcctaatcacaattctcaactggtcctttgtccttaatgaccagcccccgattgaaacttgcttcccgatcgcttttgcaatcaagactggagaaaaccatcttgatgcctatgttattcacgttatccaa

SEQ ID NO: 332371 - DNA, 241 bp, Zea mays
gaattcccggttcgaccgactcgtccgctccatgtatacatcaacgaccatcctggctacaatctacaacttctcaaacctgggtcagatttacctcactcgtgtctacatctacatcatcatattaatcaccatcagcctctaccactcaactagcctcctcgaacatcattcattacacactaccatctctatcaaattactcagcctttcatcaagactcaattctcccaatatatac

SEQ ID NO: 332372 - DNA, 300 bp, Zea mays
aattcccgggctcgacccactcgtcctaaaaaaaaaaaaaaaaaaaaaaaaataaatattaaaaaaaaaaaaaaaaaaaaaaaaaaaaagattaattaaaaaaaatcaatataacatatcccataacctcatacactttcatacttccccttttctctttcattctttcatctctattctttcctcttccctacttttttcaatttcttctctattaaatccctttccctcccctacttaatttcctttccatatatcactctttttccaacttcttttttacccaatcttccttctcca

SEQ ID NO: 332373 - DNA, 368 bp, Zea mays
cgtccgagtcaacctgcggcagtctacgctcctgcagatgtgcatgaatacatgtgacactgcggatggcgtgttcacagattgacggatcctagatctagattaagagctgggtatgcctcttagctgatgtaagcactctcgatagacacttcatctttactggcgcggacactgtccgatgatctgagactttaccgaacaatttgctggactcaaccgatactgtgtccacctgaaatctggtgtctatgatgacttgacagagcatgcatgatgacacagacagacagtgtctcatatactacaccgctgactacacagatcaactaatgttcaaccttcatatacgcatcactggtctggac

SEQ ID NO: 332374 - DNA, 370 bp, Zea mays
aaagacattctcattcacttgctaacgatacaatgagatccatctcattatcaggaaggttactacttacacttacaacctattaatcaacaatcatttactcaaccaattcatacacaacatccctaccaaaatcagtcctattgccttacaaactagatctacctactattattcctataccactgacccaactactgccaaattaacctcttactctatctacaatcacttaactaacattactacctaaagcaccaataccttacaatatattcaataacgacaaaataatcccttgactacctaatatctatccaatcactactacttattctatcaattgcttaattaacttgctgttgccatc

SEQ ID NO: 332375 - DNA, 189 bp, Zea mays
cagctgcactagagtaagatgaggctcgagtcattaacgctcccggtcgacgtactattgtcgcactcattctcactcttcttgctatcatcgcctccctcgctctacatcatactctcctgctccaatgctttctaatgtctacacttcctctctaacgtgacacgactcccattgctcatctccttc

SEQ ID NO: 332376 - DNA, 188 bp, Zea mays
gaattcccgggtcgacccacgcgtacgcccacgcgtccgaaaaaaaaaaacaatactttatcatttatgtaatatctaataaataatgggaaagtaacaaacctatacctcccaaaatttcatctgacttacccttatcatacccttaacttaataacctactctctccaaatcttatattataatta

SEQ ID NO: 332377 - DNA, 458 bp, Zea mays
gcttggagcggtccaagcgccctgcgaagcaaactacgccgatggcttcggcggcggcgtgggagggtccgacggccgcggagctgaagacagcgggggcggaggtgattcccggcggcgtgcgagtgaaggggtgggtcatccagtcccacaaaggccctatcctcaacgccgcctctctgcaacgctttgaagatgaacttcaaacaacacatttacctgagatggtttttggagagagtttcttgtcacttcaacatacacaaactggcatcaaatttcattttaatgcgcttgatgcactcaaggcatggaagaaagaggcactgccacctgttgaggttcctgctgcagcaaaatggaagttcagaaggtcatctataactgtaattcattttagtactcaattcagtactaccgagcatttgtagtgaaagatgttaggttagtttggcatc

SEQ ID NO: 332378 - DNA, 253 bp, Zea mays
tcctgaattcccgggtcgaccgcactcgtccgttccctcttgtacaccttcagttcctcgattttctactcccataacacaaatagggcgcgtgttattcaacctgttagactccaaaaacactgatctcgactgatgaacctactacattcacctgccaaaccgcatgctcctcattgtacctactcatccatagcctcctttagatacaacccacacacatgctgcttattgcactacatgacatcaaggc

SEQ ID NO: 332379 - DNA, 389 bp, Zea mays
aattcccgggtcgacccaggcgtacaggacacgcgtccgagacaacgagagctcggcttctatatttacttatgcgcgatcagatggtgaagctgctggcgatgcaagctcgacgcagcaagtgttaaaagactttcatgtccatacatatactgctggcgaaacataagaagcatgtgaggtagctcgaaacagcatagaacttcattgaactgctctttcctcttatgctgagcatgatgctctaaaggatgactcgacgaccactctcatgcaacactgctaccgatctcagcacactctgcatatgattattgatagcgtcggagacaatgaagctgcgctatctgaggtctagagcgtgaacgacgagatcgatagcgtattat

SEQ ID NO: 332380 - DNA, 345 bp, Zea mays
aaaaaaaaaaaaaaaaaaaaaaaaataaaatttaaaaaaaaaaaaaaataaaaaaaaaaagaggaaaaaataataaataaaaaaaacaaaaaaataaataaaaataaaaaaaaaaataaggggcgcccgttttataggttcaaagtttacttacccttgcttacaccttcattgctttttaatagagtcccttaatttcaattatctgcccacttttttacaacttcgtctcttggaaaccccttcctttccccaattaattgaccttctaacacttcccttttagtcctttttgctttttaccgaaaaggcccttccctatcttttttccaaacatttgcccat

SEQ ID NO: 332381 - DNA, 415 bp, Zea mays
agctattgaagtttgactgccaagaattctaattaaaaccatctcgctcgatacattttggatgtgcaaaagctcacatattctcttctattgatacacatgttggatatttgctatctaggtactcagtgccccacgtatttgacgtatgtctgtaaataagtggcacattcgagcgctcttcgctctgccattgaggtggatcgaagctgccacatattttctccgcaggacatcggcacgaattttgtcttagcaaaccagttaattttgtactctttagattctttaattggttccatgctctctttggtacttttcatgtcagtttgctttgcaaacattatcagcgtgcccttgtagatttcgtaatggttatatgtatatgccctattgaaattgtcaaaaataaaaa

SEQ ID NO: 332382 - DNA, 156 bp, Zea mays
attcccgggtcgaccgcactcgtacgaccaaacctaattaacatctctcctttagtttgcctaaaccagcttcatattcccgcaagcttattattaaatcaccgaccaccacaacaatcacaacccttcttcctctacctaactctccaccttcat

SEQ ID NO: 332383 - DNA, 437 bp, Zea mays
  unsure (1)..(437): unsure at all n locations
attcccgagtctccagccaaccgcatccagtccacccccatccccctcgaccccgacaaacccgacccgatggcgcccaaggccgagaagaagccagcggagaagaagccggcggccgaggagaaggcggagaagacgaccgcaggtaagaagcccaagtccgagaagcgcctgccggcctcgaagtcctccggcaaggagggcggcgagaagaaggggaagaagaaggccaagaagagcgtggagacctacaaaatctacatcttcaaggtcctgaagcaggtgcaccccgacatcggcatctcctccaaggccatgtccatcatgaactccttcatcaacgacatattcgagaagctcgccggcgaggccgccaagctcgcgcggtacaacaagaagcccaccatcaccttccgcgagatccagacctncgtgcg

SEQ ID NO: 332384 - DNA, 386 bp, Zea mays
cagggtcgagccaggcgtacgcgtacgcatccgatatgcgcccgggactgatcctatttctgtacaactactacaagcaccaggtgcgaggaatgttggaggccgttagcttcaggcagacggacatgcacccgaccgactgagaagacaaagaggaccgccgcaacgtctggctttccggcacatgcgctgttcagcaacccggaagatctacgacccgctcgaggaagacgccttacgcaccgtcctagaccaattcgacgaccatagttacggcgttgagctgtacttaccgatgaccatggcatgctcaacaaccagtgcgactaggactaagactgttgccaatctgaactgtcgcagggtcaatctaagctagtatgcac

SEQ ID NO: 332385 - DNA, 242 bp, Zea mays
aaaaaaaaaaacacaataaaaaaaataaattataacatacaaaataatataaaaaaaaaaagggaaataaaaaaaaaagaaattagataataaaaaatggcggatgctttggaggctcaggtcttgctttcacgagcgtccaatgtcttactttttgtttcgggccctttaaatatattttagtggccggtgttttaaactgctgggcctgggtaaacccgggctttacccagcttaaccgt

SEQ ID NO: 332386 - DNA, 441 bp, Zea mays
accggtccgcagtttccgggtcgaccgcacgcgtccgcccacgcgtccgggacaggaggacggacgccagccgcccagcagccaccgctagtccggtgctccgctagccgctagggcagggcaagtgtgtgttgtccgccagcctgaccgcctctccgcctccggtgctcacccagtcggccagtcgcccgcctcgtcggccgccgcctcgccgcgcgcagcgcgctgccaggaaataggccgccaggcgcccgcagtgcctgtccggcgtggtgacgtccgcctcaagctgtcagactgccgctcgacgctcgttacgcacgccgtcagcccgctagtgtaaggatcagaaagtctgccacaggcaacaagtgaggaacctagcctagctacgaggattcaaggaacatgggagaaaatgggtacaactaggacaacagc

SEQ ID NO: 332387 - DNA, 227 bp, Zea mays
gaattcccggctcgaccgcactcgtcctcccacacatactaatacttatcacctgggattaccactgctactctccctacctaggctagtcacctacctcatgcgctcactgctcttcatgcaatttccttctactaccctacctatttttacaagcttctccttcacaacttatgctacaacagcttcaatccaattacatttttcgcaaactatcttgaccccac

SEQ ID NO: 332388 - DNA, 244 bp, Zea mays
aacagagaaaacataccataataagaagcccccgtttttgtacaggtatacatatcttttaacctttggactttgtagaaactacacagtaactttcacctattgagttctgacgttgggtacacatgctcaacaaatctgcaagaatcacaggccttgatcccgaactactttacgcgccagagaaagaaaaagaaagaaaaaaaaaagggttcctagtagtgttaccctatgacgaggagct

SEQ ID NO: 332389 - DNA, 247 bp, Zea mays
cccacgcgtccgcccacgcgtccgaaaaaattaaaataaaaaaaaaaaaaaaaaaaaaaagggaaaaaaaaaaaaaaaaaaaaaaaaaaaaaaaaaaaaaaaaaaaaaaaaaaaaaaaaaaaaaaaaaaaataaaaaaaattaaaaacacaaaaaaaaaaaaaaaaaaaaataataaaaaaaaaaaaaaaaaaaaaaaaaaaaaaaaaaaaaaaaaaaaatatacactaacataaaattataataat

SEQ ID NO: 332390 - DNA, 328 bp, Zea mays
tccggaattcccgggtcgaccacgcgtccgcccacgcgtccggcacatactgtgctgctgttaccattagaaatataataacgtatgtgaggccggtgcatatatatatgcatcatccatctacctgcgcggtgcaaaattctgaataaaacctgcataaaacctgattgagcacaaacaacagcagctgcagctgcaagccccacgagcaagaggatcgccctggtgacggtagggaacaacggcatcgggctcgagacgtgccagctgctgtcttccagcggcgacatggtcgtactgaccgcgaggaaccaggcgaggggattgg

SEQ ID NO: 332391 - DNA, 300 bp, Zea mays
cttgaaatcgcacactctcaccaccgtcattctcgtatatgttcgcaatgtaaaagcatcgatcgtgtgtggtgactgtggtcgccgtatacctgacgtaaaaaaacagcagtccacattcggggggtcgtcgacacttgcaccacgcactcatcgctgcacccttgagaacacgagacacatctaatggtcatcgtgtcttgacagagtagtacaatagttaccatcgtgtcttgtcggttaatgtgatatgatccaattttgggttgggtgatctaatggtcatggtttttttttggt

SEQ ID NO: 332392 - DNA, 377 bp, Zea mays
gtccggaattccctggtcgaccgactcgtccgaaaaaaaaaaaaaaaaaaaaaaaaaaaaaattaaaaaaaaaaaaaaaaaaaaaaaaaggaaagaaaaaaaaaaaaaaaaaaaaaaaaaaaaaaaaaaaaaaaaaaaaaaaaaaaaaaaaaaaaaaaaaaaaaaaaaaaaaaaaaaaaaaaaaaaaaaaaaaaaaaaaaaaataataaaaaacaaaaaaaaatttaaaaaatataaaatataaaaaattaaataatatttaaatatattaaatatataaaaaaatttaataattaatttatttgaaataaattctagaaaaaatattaaacaaatatcaaatatatgtatcaatataaaaaaacaatataaaaata

SEQ ID NO: 332393 - DNA, 296 bp, Zea mays
ccgacgcgtacgcatagtgtgtgttcagcaaatgatttaagctcattgccgccgggtccacgagggagaaatgaaacactatcatcttttcctccctcttcaatagagctctgttcgtctcccctcgtataaattgccgaccaccgtctcaccttaaagaccgccttgctgttcgtcaaaatttcccatcttacgcaactactattactccggtcgcagccttaaataccttccgccaccgctattacttgtagccctcctccatgccaatcaatattcatggtgaacaacatcca

SEQ ID NO: 332394 - DNA, 412 bp, Zea mays
tccggaattcccgggtcgaccacgcgtccgcccacgcgtccggttgaggccaccgccaccgccgcagcaggatatgtctggcgcaggcgggaccaggtggcccggtggcaatcaaatctacaacccttttgcaccaacggctgcggcggcggctcagagagcggaggctgaccctgagtacgaggatctcatggcatcagttggcatgaagtagcgaagactgctggctggcccctgatctgtctgtggcacaaacacagaggcttcttcctattgcttgccaagatgtgcgggttactaatctcctccaatgtatctctagatggtactgaattccgttccatcatagacaggtgccatgcttgaacgaaaaacataaataaaaaataaactagtggaccttgtttgagac

SEQ ID NO: 332395 - DNA, 448 bp, Zea mays
ctttgcttgacaacccactacattgatgcatactttatcttgaaaaaagaagactattgcgttcagggttgtaaaatatcaccctctcgcatacaagcttttaatgagattgctgagaggtctggatttccttcaaaggctggattaattcttgatgttccaaattgttgcaattcgacacacaacatgattatggaggccattgagtacaaagttgtcttgaagagatatgctgaggaacaacttgagccttcaccagatgatgaatagtggacaaattctgaggcgattggagagtttcttgggggcatttgaggaagctacaaaagtattctcaacacatagaagtccaacatctcatttgtttttgcataatgtgttatgtattggatccatcaagctctaagaaattaaaattggcaaatcaattgggtgcttgaagatctaa

SEQ ID NO: 332396 - DNA, 96 bp, Zea mays
gggtcgacccactcgtccgaaaaaaaaaaaaaacaacaatatattttacatttaaaaaaaaataaaaaaaaaaaaaaaaaatgaaaatatcataaa

SEQ ID NO: 332397 - DNA, 222 bp, Zea mays
attcccggctcgaccgcacgcgtaccgatacgtcaaaccatcaacttccattttctttatagaaataatataacctttgaagggcagggcgcttcatcggtactattaactataactactctaactaagtcaaattcattcatctataaatagcgacctgctcaaatcatatctacactccccacatcatttttacctgtacctctctaactaaaattattc

SEQ ID NO: 332398 - DNA, 454 bp, Zea mays
gaataaccgggccgaccgactcgtacggaaagagtcaaagcccgtctcgaatagcttactctcattctgatctctttcaggtttcgtattctatatatactagagcacaatacttgcctgatgtctaacaatatgcattgccatactcatttcctcatagattcttctggattattttttgacaatagataatcattttgatgaaagtccgtagctattctgtaatctaattcagaaccgatcaataattcattttttcaaagataaaaacaattacataacatatgggcaaagattgtcataatatgttcaaacatgaaccatgcaatatatacatccatactttacaactgtagtatcagtagaatgcacagacataaatattatagtagtaaaacacattcttagcaagttattgccattatattaacatcattcacagttacacaccact

SEQ ID NO: 332399 - DNA, 453 bp, Zea mays
gttctcctacgtgttcgagaaaaaatagcttgtctagcttacttgttagcttaagctttcgtagcaagtaacactctcaagggcttcatcttgtgaaccatcatagctgtcttccgcttgttttagaaaaattgaggcacttcgaggttgagattattagttatcaccttgcttgtcttgtatccagctttaagtgcctcagaacatgaagcttacccaaaggtcttcataatgattaggaagtcagtcaaggctggatgtttgttcgaatattggatagggattcagagaggtttactcccttcaagttagaaaaacaaagaatggtatgtttttgtggtatttttgggtcagtctaggataaagtatttatgatccttctttaattgtttcagttagcagattgtaacattgagaacactattacttgtttttctaccttctgaaaatact

SEQ ID NO: 332400 - DNA, 372 bp, Zea mays
acaaacataatatacacagctgatcgatcgagctgcataaacctgcacgttctacctagcagggcccaagatgtcaggcttacttcccaattccgtgcgcccctatcgccgatcttctgatcttcactctccacgcctccgccatacatgcgcagatacctgcctcggcaactaccgacgccgccgtggccgtcacaaacccgcatccaggaagcactggcactgtctgctgtatattgggcgccagcggtccggactctcgtctggaactctacatgcacgacatcctgtgccggtcgagcctgacagctcatcccatcaccggtttgctgggcatcatctaccacgggcatgtccatttcgcgcggccca

SEQ ID NO: 332401 - DNA, 390 bp, Zea mays
ctcaagagtccggccacatgagagaaaaagcgtacgctatggacgccggggggatgaaagggataatctaggacatggacgccatggaggtggagaagctgatcttgtacatgctcaagatcgacgtcaagaagctgatctacctcaagctcaaggcgctcgtctaatagccgatctagctctacgtcggcgcgctggtctttcacgcgctcctggtcacgggcgtctactggctcgtttgcgcggtcccggacacgcggcgcttacagcgtcgtctgccgtgtcgtctacagctcaatccccatggtcatgcgcctcaaggaggacagggcaaacggcatgcgtcaagcgcagtaaggaggtcattggccacggggacaccgagctcat

SEQ ID NO: 332402 - DNA, 289 bp, Zea mays
tcggtcctgaattcccgggtcgaccgcacgcgtccggtcacaactccggccacatcagcattaaactataccctgtatacatcccacaccatgaaacgtctcatcattaacttccacgccatgatacctcacatccatatacctaatatcctcacgatcatgatctcttagatgatctaactacaacttcactcccacgtcatctacccgatcatgctttaacatcattcactattcattcacaacctaatggacatgaccatttcaaccattttcttacagcaaccct

SEQ ID NO: 332403 - DNA, 58 bp, Zea mays
gctatacatcggcagcacgctgacgcgcacttagcttttatgctatccactacgacgc

SEQ ID NO: 332404 - DNA, 432 bp, Zea mays
cccaacccctgttagggttagggtttcctattctaactcttataatattatctaataaattactttgtagtctttgtcatatgccatgtgacttatattggcctaagttgttacttttgtttctgtacgtatatggggattcagaatgagaaagagtgtagcaaattaatataattaggtgctgcagtttttctctatgcaatgctattatgaacttccttttgtatttagcacaatcctgaacttcactggtagcatttaacattattatttaatctaaaacagagcaacaaggtgctctgtatttaagagtggtatttgtagtgagtgaaatgatgatttggaaattatcatattagtatatcatatttatgtgtggatgataacaagtactatgttgcaacttgtgagacaattttttagtgtaaggat

SEQ ID NO: 332405 - DNA, 146 bp, Zea mays
catatcatacaaatcatacaacaattacatctcaaaaaaactacaacactaacaataacaaaaaaaacctctaaaaataattatgaactaatcataaaaaacaaaataatatataaccaaaaaatacaaaaataaagaaaatcccc

SEQ ID NO: 332406 - DNA, 171 bp, Zea mays
gagagatctagtagagaggctagctaggtggtcctcgaacgaagatgttggcggtgttcagcgggcaggtggtggaggtgccggcggagctggtggcggcgggcaaccggacgccgtcggccaagacgaaagcgttgcaactggtggggcgcttcctggccggcttcgaac

SEQ ID NO: 332407 - DNA, 142 bp, Zea mays
aaaaaaaaaaaaaaaaaaaaaaaaaaaaaatttaaaataaaaaaaaaaaaaaaaaaggacaggggatggtgactgatccaaacttacatactctagcattcgacaataataaatctgatatagagttacttaactacaattt

SEQ ID NO: 332408 - DNA, 424 bp, Zea mays
ggcggcgtcggatgttgagtaccgctgcttcgtcggcggcctcgcctgggccacggacgggcactccctccacaacgccttcagcacctacggcgaggtcctcgagtccaagatcatcctcgatcgggagacgcagaggtcccgcggcttcggcttcgtcaccttctccacggaggaggcgatgcggaacgccatcgagggcatgaacggcaaggagctggacggccgcaacatcaccgtcaacgaggcccagtcccgcggcggccgtggaggcggcggcggtgggtacggtggtggccgtggaggcggcggctacggcggtggcgggcgccgtgatggcggtggcggctacggcggtggcggcggctacggtggcggcggcggctacggtggtggtggcggcggctacggcggtggcaaccgt

SEQ ID NO: 332409 - DNA, 143 bp, Zea mays
gaattcccgggccgacccacgcgtcacgacgcccaacgttaaactcacacaacttcgtttttttcgacgaccaaatcatccggggcgggcactttttccacatctacaacaacatttacctccacttcatgaaccacaacaca

SEQ ID NO: 332410 - DNA, 195 bp, Zea mays
attcccgggtcgacccactcgtccgaaaaaaaaaaacctaacaaacctaaaaacttttattattaaaaaaaactaaaactaaacaaattgaggactttacaatataggcactactatctcaacttactaccttatctacactaacatcatactttatatcactttcctactttttaacaccttcaacatactaaa

SEQ ID NO: 332411 - DNA, 257 bp, Zea mays
ttcccggtcgacccagctcgttgtgcttggggaggagaaaacgaaaagactataaagggctgggtctgacgaagattgcgttcacggcagtgtgagtccgcgagctggcgcgcagcgacccgtgcaaacaagctccactgtggccttctgcgctcgaccgctgtctcagtcggacacggcactgctatcacacaacagcctctcgccagtgtcgggcaagacagtgtctgctgtcagggtctgacacctggtcttga

SEQ ID NO: 332412 - DNA, 409 bp, Zea mays
aaaaaaaaaaaataaaacaaaaaaaaaaaatttaattaaaaaaaaaaaaaaaaaaaaaaaaagaaagaataaaaaaaaaaaaaaaaaaaaaaaaaaaaaaaaaaaaaaaaaaaaaaaaaaaaaaaaaataaaaaaaaatggccgccctttttaaagatcccaagtttatttccccggcctttcaattaaaaactttttttttggacacccctaatttaaattcattgaccgctttttaaaaacctttcacctttaaaaaccttggctttccccaattaaatccctttcaaaaaaattccctttttccaagttgccttaaatccaaaaagcccctcacctttaacctttccaaaaatttcccaaccttaaatggcaaatggaaccccccctttaacccttcttaaaaccc

SEQ ID NO: 332413 - DNA, 162 bp, Zea mays
aaaaaaaaatagaaatactacatactgaaatttaaacaacaataaaataaaaacacagaagaggggtcttcaactttacatgatccaagcttactaactcctgcatacaactgtatcaactctcctatattgccacttaaattcaattcaatgtcctgaccg

SEQ ID NO: 332414 - DNA, 267 bp, Zea mays
  unsure (1)..(267): unsure at all n locations
gtgttctgctatactgcagcagcaaccaaccactgctgcattcggattatgcactgacatgcgggagcgccaatgagtggctgcgatggcctggtcggcacattagcgatggtcctccgngccgccgtaggaacggccgcaaccgatgctgccgaagccgaccagatcgctaatctacctgaacagccggcagctatacttttcatacactccgactacggcaacgcagacccagcgtccggtcggtgcctcttctactggttaatc

SEQ ID NO: 332415 - DNA, 218 bp, Zea mays
gactactaagatacttgcttacacagactgctacggtttcagatagatctatcatctttcattggaaagggtatcattgactgggctcaggtgctctgaccagcttgtgcgctgtcataccatccagctgggatacactactcggatctgacgctgtcaacgtccacatgaacagtaactagtaaatgcacatacttaccaaacctttcatacactga

SEQ ID NO: 332416 - DNA, 303 bp, Zea mays
aaaaaaaatatgccatcccaattcatatagcctccaaatctacaaccccgtgactccaaaaaaacaacccttttataactccccttaatttaaataacattccctttttttaacatcccctaatctgaaaaatcccaggcttttcccaacttactcactttgaaacacactccattttccccacttctctccttttcaaaaatcccccttttctacctttttaaaaattactatcaacccaaaatgtaaactgttcccccccttatcgccccctattaaccccaacggaccttcctttttccc

SEQ ID NO: 332417 - DNA, 442 bp, Zea mays
gtccggcgaggcagacgagttcctctcgcccctctgctccagccgacaacctccacggcagcaagcctctcccatggcgcttgcagcaggacacagagccccccatggcgcccttcctctcctcggctccaagggtgtaggcgagctgcagctcctcctcttccccatgggcgcgtcccccctgcagccgagctcctgcacatggcgtccatccctggtctcccttgcgcaggggtagaggcagccatggccggacctctgctcggccaacagcttgggcgcctgaagttccctatgctcggcgccccttcctgcgcagcgccgcttgtccacccctaccccagcgccccctctctcccatggccgagcagcagctctgctcgccccccctcttttttccccttgtgcagcaacaccaacctgctcttttcctccacaaaac

SEQ ID NO: 332418 - DNA, 321 bp, Zea mays
aagcggcctggcacacgaagatccattattcttctgctacatccgacaacctctgggggagtgaactttttatatggcacttgtaatacgtcacaaactcctatcatggcgcccttcactctatatgatacacggtcttaggcgatctcttactactccttttaatccatgtgcacaatacacctgctcaccagctaatgaacatggcgtacatgcctgttctgccttgcacacgactacacaccttcatgatcttacctgcgctctgataacaggttgctcgcctaaattacgatatgctcgatgtgcctttcttcacat

SEQ ID NO: 332419 - DNA, 285 bp, Zea mays
  unsure (1)..(285): unsure at all n locations
cccacgcatgcggatggaggcatcgtacttccaggatcaattgagactagaccacatgctggtgagattgttattgtctgcgaccggatatattttatacttaacctcatttacatcaatgattcggtttacacacaacttgtctactacacttatgctncgcacatacttgactttctatgacgcacgatcatgtcatttccaactaagatcacataattgctctttttgacagtgattatcttaacgatatgagctcactgcatgatctcattcttatcaaag

SEQ ID NO: 332420 - DNA, 221 bp, Zea mays
aaaaattataacccttcctcaaacacatcacctaaaataactacgaaccaaaaatatatatgggcgctcttcacatccatggctacgaactcttccatcctaatcgctcactacactataactatacacaattccaatcccatgctcccaaccttcatcgccacctacacctaaacccctctcataacacacctatcactgcattcaacgaatacatattt

SEQ ID NO: 332421 - DNA, 362 bp, Zea mays
  unsure (1)..(362): unsure at all n locations
cgtgaatgtgtctcatacatattcctctagggctcttgcaaaatccaatggtttatggattaggtggtgacctcccttcggttaaagatccgcgacaaagtttctaagttgagtttgatctttgaagtgcaaaattgttttgatcataccttgangacatcctaaaagcaggtttgggattcatataacgagtttttaatgagacaaacaagttctagggtcaaaggcaatatgaatgacatgttagattcaagtattcaacaggatctctaggagtagatcagtggggtaaactgtgttctgtanggtaatttcaggttcttaactaatatatcaaaacagtattagattgttaccgtcag

SEQ ID NO: 332422 - DNA, 357 bp, Zea mays
cagaaacacaccaagcgaagcgcactagcaacgacctaacaacaatggctaccaagagatgagccctccttgcgcttcttgccctttttgtgagcgcaacaaatgcgttcattattccacaatgctcacttgctcctagtgccattattccacagttcctcccaccagttacttcaatgggcttcgaacacctagctgtgcaagccaacatgcaacaacaagcgcttgcggcgagcgtcttacaacaaccaattgcccaattgcaacaacaatccttgccacatctaacaatacaagccatcacaacgcaacagcaacaacagttcctaccagcactgagccacctagccatggtga

SEQ ID NO: 332423 - DNA, 402 bp, Zea mays
tccggaattcccgggtcgagccgcgcgtcaccccaattccaatctacccggccgaaccggcctactggggctgcatggttcccggaccttgagccctgccataaccgggggagcacccgtcgtcgtcgtcatcgcccaccaccaccagtgctccttcattcgtctcgtcatccggggcagctgacgactcatcatcccacgctctgggcaagcgcccccgggaccgggagggtgacgatgggagaaactgctgcaacgccaaagtgtgggctcccaagagcatccggatagactacgtggacgatgttgccaggagctcaatctggtccctcgtcgggatcaaaggcgaccagacgaagcagcaggacgcatcatacgaccactccggtgggcacagcaagc

SEQ ID NO: 332424 - DNA, 331 bp, Zea mays
cttaatttacctcattgatgtggtagatgatatactcttctatataaacttagtcaaactgcactctcttatatttctagttggagggagcatttattactcttaacatattacattgttcgtgaatccttttattacatgatttatgttggtcaaattttaactggagactactgtacttttatcagccatatgtagtatactagtatgccatgtttaataggatcatagcaacttcagaccctggagggctccttgtatttgttccatttaagagctttcttgtttgcaatggccataccaataaaccccaccaaacttatcttttttg

SEQ ID NO: 332425 - DNA, 365 bp, Zea mays
ccagcatagatctcgtgctcgccactatgattctgtacagcatcgcatcagccttctggagccatgtcgccgacgtcacaccacaatccacaacccgtcgaagcgaagcaagcaatggccggagtcggatcgaatgccctcgccgatgccgccgatctggcagacgtctccttctcggtggccgacgcggccgaggcgcccgcgcccagtcccgtttccgccaccgtcgcggcgtcgtcgccctttgccgcggttctcgtcgcctccgccgccgccttccttttggccgccgtccgcaattgagccgatggggcctcaagcctgcaggctacctagcagaacttcccccgccgcctcggccgccg

SEQ ID NO: 332426 - DNA, 360 bp, Zea mays
aaaaaaacaaaaataactaacaaactatacaatacataactcaggccttctaaacatccaggctgacttacacatgcgggcgacttcataactattctatactaccacctaacttcaattcactgcccacctttttacaacatcatcactctaaaaaccctgtcattacccaactaaatccccttacaccacatccccctttatccaattaacattataacgaatatccctccaccaatctccctatcaacacttccccaaactaaataacgaattagactctccctttaaccgatcattaacctcaacatgtcttgtagttacacgcatacttacccctacacttgcaatcaccctaac

SEQ ID NO: 332427 - DNA, 270 bp, Zea mays
ccgagttccatttgatttccttgatccaaattaatattctccccctaaatgaatcatcaaaggtgagtctcaaaaaaagcgcgtctcatgccaattaaagaatccattgatcacaaagaagctttgttccaatccccctaattacccatcctcttcatcaataactatggcttcttctgcaactctgctaccataaacatgtgctccaaatgccacaatgatattattactaatcattatcatgccaaacttgctttctactctatcgac

SEQ ID NO: 332428 - DNA, 424 bp, Zea mays
gatacttggtcaatcattgcatatttgatgtttcatcaaaccaataaaaatgccactttggcatcttatgttcagtatttccttccctgtttcatgaagcatgccttttgcattgatttgatgctgcagtgattttgttgctgccaaatgcaatgttgcttatatttgtcagattgaacagaatcacactgtagctaatacagtatgcaaagctctcatgtcatagattaagaaaactcaaaaccagtgattaacaaaatggtagacctgggagagtgcccccatattctttatccacttctacctagttattctagagcctaaggctattcggactcataccactcttaatttggactctaaaagaaatattctattcttggcaacaaaattctttaccctatactacaattcttcgcagtca

SEQ ID NO: 332429 - DNA, 395 bp, Zea mays
gaaagaggcttgttatgttcctcacccttttacatttccgcctcgatgttctctaggggggctatttggaatgcgacttccaatagaagatatattatcaatgcaaagagaaatgatttaataaaaacaaaaaaaaaaaaaaaataaaaaaacaaaaaaaaaaaaaaaaaaaaaaaataaaaaagaaaaacaaaaaaaactacaaaaataaaaaaaaaaaaaaaagggccgcccgctttacaggacccaattttatgtccccgcacatgcaaagtaataactcttctatagggctacctaaactaaattaactgccctcgttttaacaactccgtgattggaaaaaccttggctgtacccaatttaatccccttgcaaaaaatcccttttttccc

SEQ ID NO: 332430 - DNA, 288 bp, Zea mays
gatacttccctgctattcctatatcctatgcttcatcactccacttaaaataccactctagaggaagctcatcaatgtcggcttcattggatcataaaacatcctttatcacttggatgcatgctgccatgaccccgatggacccatactctgcatcaatatacttttgctacattgaacacaatcacactatgaactaatacatccatgcaccactctgatatgataccttaacaagactcaagcccactgactaacatacttatcgacctcatcgagaaccgccat

SEQ ID NO: 332431 - DNA, 172 bp, Zea mays
gtgatctatcacgctcgcgagcgagagagactcacatctatctgtcaagctactccccagtgtaagcacactcgtacgggaacaccggcatacttgcatattgctgcagcacacgatggaaagtatccctcatgatcatactcacctctgacctcaaactcccttacaaagt

SEQ ID NO: 332432 - DNA, 188 bp, Zea mays
gtttatgtgatgtggatctatcattgtgcaatactaattaaatttgtataaaaaaaaaaagaaaagaaaaaaaaaaaaaaaaaaaaaaaaaaaaaaaaaacaaaaaataaaaaaaaaaacaacaaaaaaaacacaaacatacaacatcataactcttatatcatgacacctaaattcaattaactaga

SEQ ID NO: 332433 - DNA, 162 bp, Zea mays
tcccggaattcccgggtcgaccgacgcgtccgaactttatgagcaaaaaaaaaaactgcgttttattcacgtcaatcatcgcctccttcgaggacgtcatatatacatgggcagtgggcaccgatgatatacaccatcaaactgaataacctccccgggaaa

SEQ ID NO: 332434 - DNA, 357 bp, Zea mays
  unsure (1)..(357): unsure at all n locations
taccggtctcgtgaattcccgggntcgactccacgccgtcccggggccatgcccaacccgaccccagcagcgcctcattcttcgcgcggcaaggccagctggtaggatgggccgcgacccatggtcggattaccaagcatccagaagggagaaagcactctccagcctggtgctccgcctcaggggtnggcatgcnagatttttgtgaagacatntgactggcaagtaccattcaccttggaggtgngagaagctctgacatnccattgacaatgtgaagggccaagaatccaggacaatggagggcatgtcccccagaccagcagcgtctggaatctttgcgggccaagccagctg

SEQ ID NO: 332435 - DNA, 224 bp, Zea mays
aaaaaaaaaacaataaaaaaaaaaaaaaaatcttaaacaacaaaaaaaaaaaaaaaagaacgagaaattacaaattatcaggttcctatcttacgcactccttcatctctacttcttacttattatatataatcacctacctacacttcactgtactcaactttactacaccctaaattgtaaaaacccttgagttacataccttattctccttatattatatc

SEQ ID NO: 332436 - DNA, 371 bp, Zea mays
  unsure (1)..(371): unsure at all n locations
aattcccctgtcgacccactcgtcctcccacgcgtccgcaccaccatctaaaacgtgttttctacccatcccattatcttcccccgtgctacagtcaccacattctgatccgggctanactcctatatccttcatcttaaccatctccattccttcgattccatccatccctaatatctcaacaccttccactctcttcatacatctctctctttctctattacgactcattatccatctcttctttacttttactcttcctcctcttcttctcttccaacgtactaactcaactcacctcttccttcaacataccttttctatcccataacatctttcaatacatctccttatctacaattattaactta

SEQ ID NO: 332437 - DNA, 256 bp, Zea mays
ctttccggtcttgacctctcttttctggatttatcttatgttgatttcacgtgtgcttttcataaaaacgggcttttttcacgagcataccttcaatgtacaaagtttcgagatgttgatgccgaaggctccatatttcacaatgcaactttgcgtgaatgttaatttactgcgccaaatcttcgtggggctttattagctgttgcatgccttcatagtgcaaatctataataagcttgcttattatactttaact

SEQ ID NO: 332438 - DNA, 313 bp, Zea mays
aattcggtcgaccacgcgtcgccaccgtcgttgttatgcttctggggctggtgcttatcaacctgctacacaacaatctgtgttgggcagtttaatggacacatggacaacataagacgaatttggctctcaagcaactcagatttgattcacaatgagccgattcctagacatcagtggagatgtataagtgcatctttacactctgattgatggacaccctagtggtccaattttggaacggattatcttatatggttttgaccagattctctaattcagcttttcagattgacaagatttagcaaagcgc

SEQ ID NO: 332439 - DNA, 225 bp, Zea mays
ctactgattgcttctcaccaccaactcactgaatcagaaagaccacacactaatactatacgcattcttaggtccgtcagtctcacaagccacatcaacacattggtagcctgcacctaccacgaggccacggaggtggccgaggcgcccgtgtcgacggacaccgacgctacgaccgttctggcggactgcacgctgctgcggatcccttaccgcacgcaggcg

SEQ ID NO: 332440 - DNA, 359 bp, Zea mays
agcacgtacccgccaccgccggagtcaggctcggcctactcagtttatccaaggtcggcgacgccaggcacactggaccgtgcgctaccgtactatccggcgcctcccgtcggctcgtattaccctccgccggggacacggtacttcgaggtcgacggcgcggccaggacgccgtcttactacccaccgccgagtcaatacccgtaggagttcggcggataatctgcaacgttgtggaacagtggacgatgtttccaaggttgctccgccgcttcccgccatgattgccattgaagacaggtcatattgccgcggtgcgtggcgtgggtgctaggctgcaatatgccggcttgttcggg

SEQ ID NO: 332441 - DNA, 262 bp, Zea mays
ctcatgccctatttatacacgtaattttatacatgttgtgtaagcctggggccaccggggtccaaggtgtggtcttggggtcctgtaagtcacgacatgacggtgcactgtattgttgacttgggtccgctgattttctgctgagagccgatgtcgaggactaatggatgtccgtactcccgagcccttagaggaggggtcgtccataccgtagttgttgttacaactccgatggattagcttgtgagccactgtgcttctc

SEQ ID NO: 332442 - DNA, 365 bp, Zea mays
accctacaaaccattgcaacgcaacaacaacaacaacagtttctgccatcactgagccacctagccgtggtgaaccctgtcacctacttgcaacagcagctgcttgcatccaacccacttgctctggcgaacgtagctgcataccagcaacaacaacagctgcaacagtttatgccagtgctcagtcaactagccatggtgaaccctgccgtctacctacaactactttcatctagcccgctcgcggtgggcaatgcacctacgtacctacaacaacagttgctgcaacaaattgtaccagctctgactcagctagctgtggcaaaccctgctgcctacttacaacagttgcttccattcaacca

SEQ ID NO: 332443 - DNA, 360 bp, Zea mays
gcagctatcccggccgggctggggccctctcctaccggccccactcacatggttccccatggagagccccaccctctggctcccaccggtcgtgcttctacgatggcctccggcggcgttctccggcccactcgacacactacccgccgcgctctacgcgttccactacgtccaccgtacgctggtccacccggtccgcctcgcccgactgcgccgcgccccggcccccgtgccgctcctcatcgacgcctgcgccttgggattcaatatcctcaacgcctacctacatgcccgctccttcgccctacactccagccgccaggcgtccaccttccgctgactcgctgggctggccctctt

SEQ ID NO: 332444 - DNA, 240 bp, Zea mays
aggtgatggaattatcacaataaagatgtagacataaatgtgtgtatatacattctgtgacacttcaaagtttcagtatatgcaaaactgaatatgctgcttcaaaaaaaaaaaaaaaaaaaaaaaaaaaaaaaaaaaaaaaaaaaaaaaaaaaaaaaaaaaaaaaaaaataaaaaaaaaaaaaaaaaaaaaaaaaaaagaacgaaaaaataggtgttttctatcgtgaccccaatttaa

SEQ ID NO: 332445 - DNA, 59 bp, Zea mays
cctatgtcaaactacaatatgatatgtacccttgctaaataattgtttcgtttgctggt

SEQ ID NO: 332446 - DNA, 246 bp, Zea mays
aaaaaaaaaaaaaaaaaaaaaatagattttttatacaaataaaaaaaaaaaaaaacaaaggggcgcacgttgtggggtgcctttcttctcccacgttcttcccacgtcttgctcttttagtgccacctattttcactcatttgccttcactgaccacgtctgactggtaaaaccctggaaatcctaacttaaccgaacttaatccatcccccttttatccagctttcgtcatttggaagatgcccg

SEQ ID NO: 332447 - DNA, 360 bp, Zea mays
ggccggcgagaagaacaagatagacgccgccttctgttactgcggcgtgcagtacgcagccgtccaggtatggcgcggtacgcctaacaacccgttgtggacataggtggagctcatgaaccaaacagaaatgctttcttatatatccaccctttgtaacgtgtctccgtgaggaatgagtccatagtatctcccatcgccgattacaatgactgctccgacctttatttcttctgaactgatctgagctggactgacgtatgtaacagccatggatgcaacgaatcatggaaaaattgatgtgaaaacgaaaggttttgtgtgttctggtgcaacttaagaaagatgacggctcccccg

SEQ ID NO: 332448 - DNA, 361 bp, Zea mays
ccaggagcgcctcatctagctctaaccttgactccccagctccaaaatcttcggtcccgttagctgttcctcctgtaagccaggctccgccagcaacactgatcgccactacaactgcagcagcaataatgcctagaggtacggtactgctggctgcatcgtagttctcgttgctctcttcctccactgtattgaaattgtatcgttcttgtccgtccgatgcagctgtccctcaagctaggaaggcgtcccttgctcgattcttggagaaaaggaaggaaaggtagaatccatactcttattctcggtgattccattccaccacacatctgttttggttttgaggcagatctgcaactgt

SEQ ID NO: 332449 - DNA, 284 bp, Zea mays
cgcacgcgtacgagccaccgcagcattcacagcgcccaggagaaagacgatgcaggtcatgatgcagacgttcacggggacgctgacagggatgaccgtcaccagcaaggtcgccagcaacaacgccatggacaatatccaggacaaggtccaggtcaaggaagggatccagccggtgcagtatcccctgatgtatgtcgaggagcacctgaaggatggccactctatcatggactatgacattacactggagtttacgcttaagctcgtgcttaggatcattg

SEQ ID NO: 332450 - DNA, 367 bp, Zea mays
aagcgaatcacattatcaacaacctatcaacaatggctaccaagatattatccctccttgcgcttcttgcgctttttgcgagcgcaacaaatgcgttcattattccacaatgctcacttgctccaagttccattattacacagttcctcccaccagttacttcaatgggcttcgaacacccagctgtgcaagcctataggctacaacaagcaattgctgcgagcgtcttacaacaaccaatttcccagttgcaacaacaatccttggcacatctaacaatacataccatcgcatcgcaacagcaacaacaattcctaccagcactgagccacctagccatggtgaaccctgccgcctacttgcaaca

SEQ ID NO: 332451 - DNA, 278 bp, Zea mays
ggcaaaaaaaaatgcggcgagccgttttaaaaagaacccagtttacttgcgcgttcttgcacaaatattatctttcctaaaacgccccctaaactcaattcactcccctttgtttaacaacgccttcacggaaaaaaccctgtcttcaccaaatttaatcccttttccccacatcaccttttccccatctgtattaataataaaaacccccccaaatatcgcccttcccaacaattgcccacctttaataccaaatgggacccccccaccatgactac

SEQ ID NO: 332452 - DNA, 106 bp, Zea mays
ggaattcccggggggacacacgcgtgggtgttcacgatccaagcttacggctttttgcgtgcgacgcgctaaatgttctatggtggcacctaaaggtagttcggtt

SEQ ID NO: 332453 - DNA, 197 bp, Zea mays
gaagccgccgccgcttcaatgtccatattcaccgcaagagactgagatggggggttggggcattatccacaagaccaaggcctacttcaagcgttttcaagtgaagttcaagataaagcgcccctgccatacaaacttcaaggcccggattaagcttatttacccagaccaaaaccagttccatacaaccatattca

SEQ ID NO: 332454 - DNA, 413 bp, Zea mays
caccggttcggaatttccgggtcgacgccacgcgtccgcccacgcgtaacggagacgcgatgggtgcgttcttccgctggcgggtgctattagtcgctgtgtacctacccgtgacacatatccctttttttggagcgctggactactcaggcaaatctggcatcgcgacctttggcagctgacttagtcccgattgttgggctgtaggaaacaaaacagaaccggttcgaggtccctagatctctgcgtagaggcggcgaggcacccgaatccggcaaaaaagggttcgcggtttgccttggttgggaggagcgcaggagcccggcgtcaaaacccaatcttggcgcccgggctgccgtgcgccatcgtcttctcccccctgtggtgtttagggagaggagaaggccggtgga

SEQ ID NO: 332455 - DNA, 369 bp, Zea mays
cccacgcgtccgctcagaggtgggttggcttctcctcccccaccggttcgtgtggaggttctggttcgtgggcgagagggaagagatggcggcgtcggacgttgagtaccgttgcttcgttggcggcctcgcctgggccaccgacgaccactccctcaacaacgccttcagcacctacggcgaggtcctcgagtcgaagatcatcctggatcgggagacgcagaggtcccgcggcttcggcttcgtcaccttctccacggaggacgcgatgcgcagcgccatcgagggcatgaacggcaaggagctcgacggccgcaacatcaccgttaacgaggcccattcccgccgcggccgtggaggcggcggtgg

SEQ ID NO: 332456 - DNA, 315 bp, Zea mays
gcatttgcagccagtcgtcagccggcgatctttcaatcggactatgcagacgatgcaagtcctgctccgacaccggaccgacctcatgcggcaccgataccgccaggtgacagtcgtatctggatgaacagccatgacggcggaacgagtacgctgccccgagatgcagcgaccccctctgcgtcaagatgaaatgaatcaacgatacctcagacttggatcccctggtggcctgtctgggagatcttagttttaggcacataacgggtgtaaatcactggctaaataatgacaataatatttccagagttaaaa

SEQ ID NO: 332457 - DNA, 175 bp, Zea mays
ctttcaatcggactatgcatacgatggaagttctgcttcgacaccgcggcgaccttatgcggcaccgataccgtcaggtgacagtcgtatctggatgaacagccatgactgcggaacgagtactctgtctcgaaatgcagcgaccccctctgcgtcaagatgaaatgaatcaact

SEQ ID NO: 332458 - DNA, 244 bp, Zea mays
cccacacgttcggctaaaggctataggtttcttcaaaggtccaatacaaattcctggactatagactgaagtatggcaggagatcttccaagatctctccagttcaaaggatgggattacgggagcttagaccacagctgcctaagccattccagagtacacaaaggcttacactgatcctataaaatatggcatattctatcccaccacattcaccaaaccttgtatgaaaaggctccacttt

SEQ ID NO: 332459 - DNA, 193 bp, Zea mays
cccacacgttcggctaaaggctatagtttttttcaaaggtccaatactaattcctggactatagactgaagtatggctggagatcttccaagatctgtccagtacaaaggaagcgattaccggagcttacaccacagctgcctaagccattccagagtacagatggttttactatgatcctatataagatggc

SEQ ID NO: 332460 - DNA, 303 bp, Zea mays
accggtcctgaattcccgtttccgactcagacctacccgtccgctgacccattaaggttccatgtcggattccttcacactactatggtgcttcaccgagcgatgggattgatcaagtggctacaggtgaatatgcacagcctgctctagagatacatcatctgctgctattcaatgtctgaaatgctcttgtctgccctaggcatcgtcatctagacaaggaaacagtctaccgtaatatcatacaccgtaatacatatgttatgaagttacagcgtactgatactgaagatccattaaatg

SEQ ID NO: 332461 - DNA, 254 bp, Zea mays
tgtgcagccttgactaccatatcgcattcatctttaatccgctgatgcattaacctgggatgggcttgattatctagctcttctgcaatatccacagcattatctatgtttatccaatccgctgctacatactcacaaacatgtacttcttaaacctacccagataacacactacctggaaaaactcctatcaaattatacatgtactgatgattctgtaccgattacacaatatcctcacactcactattcta

SEQ ID NO: 332462 - DNA, 78 bp, Zea mays
aaaaaaaaaaaaaaaaaaaaaaaaaaataaaaaaaaaaaaaaaaaaaaaaaaaaaaaaaggaaaaaaaaaaaaaaaaa

SEQ ID NO: 332463 - DNA, 297 bp, Zea mays
cccacgcgtccgctccgccccgctccactctcctcctcctcccgggccggccgactccgatggccgtcgtcgaggccgccgccgccgaccacgccgcgccgccgctccaggaggaggcaccgggcgcgggcgcgggcgctggcgccgacgccggggagcgcgagatgcgggatctggaggacctgctctccaagctcaaccccatggccgaggaagtcgtccctccgtccctcgccttccttgccgccctcacgcccgtgctcgtcttcctcgttggctacggctgctacccggtcg

SEQ ID NO: 332464 - DNA, 167 bp, Zea mays
ggagcgcacacacacacaaccagatctctccaatccacccgtcggcacctccgcttcaagatgcagatcgttgtgaaaaccttgacgggcaagacttattcacctctcgaggtgggagtcgttttgacaccattgacaacgttaaggccaagatccaggccaaggag

SEQ ID NO: 332465 - DNA, 70 bp, Zea mays
aaaaaaaaaaaaaaataaaaaaataattataaaaaaaaaaaaaaaaaaaaaaataggagggataatataa

SEQ ID NO: 332466 - DNA, 96 bp, Zea mays
cggtctcggaattcccgggtcgagccacgcgtccgctcacgctatctctctcacgctcactttcctttcacggtgactgccaattcagtggggggg

SEQ ID NO: 332467 - DNA, 367 bp, Zea mays
cacgttgactttttcaactgtctgcccctgatgtccgttggctccctacagaggccgggcgggccgcatcaccagggtcgcgccatgacacctgcctccttcgtctccgaccccgcgcccgttccctagccccctaagcctctctacctccggggccctgtcatcgcatgcgccgtcacgctggcctcgtttcttctcctcgccgccgactacgccaccaggcgagcacggtcctctccggccgctctactctcccacccagctgtttccaccaagttcttctccttcgacctgatgcgctagtaccctcactaccctgccggcttcacccaaggtatcttgtacgcgggaaatgacacccttttcg

SEQ ID NO: 332468 - DNA, 450 bp, Zea mays
ctctatctctattcattccccgcctcatccctagccagccgtcatagctagggtctgcggcgacgtcgccaccatgcgctaacagctatcaggacggtatgccccactcccagctcgctgtgctgatcgactgacgcaccctccacagccatctcgccaagctcatcttccagctgctgatcctgatgctggcggctccatgtttggaggcattcggcccaccattgatcaccgtctggccattggcaccgatagagccttggcacacatggcttcacatgctttactaggtgctcggcccattcagcatgatactgtagcctaacaagctgctgctgctgaccctgtcttaccactgatgaatgctgatgcttgcagcattcatcctaagggttaccaagattgcctcaacaactatggcagcgagatcagcaggcgacagttatacct

SEQ ID NO: 332469 - DNA, 116 bp, Zea mays
aaaaaaataaaaaaataaaaaaaaaaatttaaaaaataaaaaaaaattaaaatcggtgggaattaaaaattagatatggggggtcactttgtcggttccatctattcctttcccat

SEQ ID NO: 332470 - DNA, 173 bp, Zea mays
cggaattgcatgctcgacccaagccacccgtccgtcgtcccatggatggaaaccaagcttgtgttcctcttccactctctcagaggagcaaaggcatcttcagcatgggcttctcggggagaaaggggcataatttctgacatacgctctcagggcgcaatcactggaaggtc

SEQ ID NO: 332471 - DNA, 322 bp, Zea mays
  unsure (1)..(322): unsure at all n locations
acctgtcctgaattccctggtcgacccactcgtcctaccacacctacgctaaccatcacgcactcccttctaccattcaacccttacactcagggcggaccaaccttaggtanccacatttcacaaccctaacttcatatactacctaattctcactttcaataacttcatcaatatcaccaccaaattcacctacatcaccctacaacaacatctcaactctctccaaacacaccttacatatcacacttgtccataatatcaatcttctatacaaataaccaacacttcacatcattcctcatcaaagaacaccacttac

SEQ ID NO: 332472 - DNA, 191 bp, Zea mays
tccacgcgtacgcccacgcgtccgcccacgcgttcgcacagattcgcaattactgggggttggatgatgatggatgatgggagactatcggatatcatgtctagcacaacggcttgtcaaaaaaaacaacgacgatgaagattttgtggaaggccatggtcgaatgtcatgtcttgctgttacactctata

SEQ ID NO: 332473 - DNA, 91 bp, Zea mays
aataaccactgttccgggctcccatgtcactcgctttgagctgcctctataccgtcagtgggggttcccgattggctggtttctaggctga

SEQ ID NO: 332474 - DNA, 336 bp, Zea mays
ggtgtaacctggtcacctagagagcagttacctcctggcatccttggtcctattaaaaataagcctttcttgcttgaagatgggcgcctactgtgttgatcatcagttgaaagttggaattcttggggtgcatggcttgaggtattcagattgttgtttgattctatttttgcatctctttgtaccccttctgttagaatggacagtccttgtgtagtgtattgagctgtctcactgattcattaaattgcaggttcgactgctcttggtgtgcccttttttgagtacctgttccatgatgatgtaaatattccttttgattctatttagcacttg

SEQ ID NO: 332475 - DNA, 122 bp, Zea mays
aaaaaaaaaaaaaaaaaaaaaaaaaaaaaaaaaaaaaaaaaaaaaaaaaaaaaaaaaagggagaaaaaaaaagaaaaaagaaagaaaaaaaaaaagaaaaaaaaaaaagagggagaaaaaaa

SEQ ID NO: 332476 - DNA, 454 bp, Zea mays
cccacgcgtccgaaaaaaaaaaaaattttaaaaaaaaaaaaaaaaaaaaaaaaataagagaaaaaaaataaaaacagataaaaatgttaaataatataatggaattatttttgattttattttttttaatctatatctatattatacttcttattgttttatattatgtcaattaattttttattttttatattatctgattttttatactttatgattttttttatatatgaatttttctttttactaaattttttatttatttgttattctattttttatattttatactttatttttattttttaattttatctttcttttattttgttttttttttttattctattttattatcttttctatcttattcttaatcttatttctattttcttttattatatatgttattatttatgaattgtcttttcgttataatttttatatatttttt

SEQ ID NO: 332477 - DNA, 93 bp, Zea mays
gaaggcgtcagctgctcgtgtgcttactcttggaagctttctggctgctaggtagggagatggtagtacaactatgaagcctgaagatgcaga

SEQ ID NO: 332478 - DNA, 101 bp, Zea mays
gcctgccgtaccgtccggattcccgggtcgaccacgcgtcgccaccgtccgaacgaggccttatttcaagcggccatatgccaatggagagctgattatga

SEQ ID NO: 332479 - DNA, 364 bp, Zea mays
cccacgcgtccgataaaaaatatgtatatataaaaaaatactataatataatacaatagtttgaacaaagctaaaaaatggataaaaaaaaaaaaagtaataaatggacggtccaaccatggggcctaagcttatcaggccccaaggttatctacgctggcttgcacatgttaccgctttagacttcgatgtcactctaatttcaattgacatgcccatgactatcaaaggccagactgatacaaccttgattgtcccgaagttaatcacattgtacagattgccttttgtccagttggcctattaccgaagaggccatcgacgatcggccttaccagaatttggactgcctgaatgcctattg

SEQ ID NO: 332480 - DNA, 147 bp, Zea mays
aaaaaaaaaaaaaaaaaaaaaaaaaaattaaaaaaaaaaaaaaaaaaaaaaaaaaaaaaaaagggctgacaatttaaagggtaccaagctaaaatacacatgcatgcgacgcaatcagctcttgtatagagcaacctaaatgcaatc

SEQ ID NO: 332481 - DNA, 382 bp, Zea mays
ggattatccagcgagggacgccggtttgatgctcgtactgctgcctggttgcccgaggcggctgtggcgggtcgaccatgtacagatcggcgtgtgtcgtgatggcgtggaacgtgttacggttctgcactgctctagcgtgggctaggttcaatcatgatcctgctcgtgctcgcgatcgtcggcgttactctactacgctgtcgtgctatgcaactacagtgctgtcctgatcaccggtggcggcaccactctggtcgcgctcgcagtgatgctctgcttgcacttcctgcttgctatgcttctatggagttattcatctgtcgcgttcactgaccctggttctgttccaccagatcggaatcttgattctgatgtggag

SEQ ID NO: 332482 - DNA, 77 bp, Zea mays
aaaaaaaaaataattaaaaaaaaaaaatataaaaaaaaaaaaaaaaaaataaaaaaataagggaggtcaatctagaa

SEQ ID NO: 332483 - DNA, 338 bp, Zea mays
ctccggggttcgggttcgtgggtgagcggatcgagatggcggcgtcggatgttgagtaccgctgcttcgtcggcggcctcgcctgggccacggacgaccactccctccacaacgccttcagcacctacggcgaggtcctcgagtccaagatcatcctcgatcgggagacgcagaggtcccgcggcttcggcttcgtcaccttctccacggaggaggcgatgcggaacgccatcgagggcatgaacggcaaggagctggacggccgcaacatcaccgtcaacgaggcccagtcccgcggcggccgtggaggcggcggcggtgggtacggtggtggccgt

SEQ ID NO: 332484 - DNA, 375 bp, Zea mays
  unsure (1)..(375): unsure at all n locations
gcaatttcttccattcaaccaactggcagcattgaactctcctgcttatttacagcagcaacaactactaccattcagccagctagctggtgtgagccctgctaccttcttgatacaaccacagttgttgccgttctaccagcacgctgcgcctaacgctggcaccctcttacaactgcaacaattgctgccattcaaccaacttgctttgacaaacccagcagcgttctaccaacaacccatcattggtggtgccctcttttagatttcttatgagttatagttcaataataaagttttttgtctgatgtttgtggcttcccagaaataagaaagtacatttctagattcttaaaaaaaaacnaaaattcaaaa

SEQ ID NO: 332485 - DNA, 445 bp, Zea mays
cccacgccactctccctactcccttcctccctctctctctatctctctctctctagctccccatgcagctggcgaccaagccctcccatgctcctccctcaccttggaagctctcccatggcgtctccccctcctctacggcagcaaggtgtaggaccgagagatgatgatcgagctagtgatgtggtgccaaccacaagatgcagtcggtggacgacccaaggaaggatggacttaaccagtggatgctcgccaagcgagtacctccccagcaaacactctctaagtgttaaattaaaggtactccttaggatgattggttgatggtgcgacttggccttcatccctgccaccgggatagatggtcgagtgggttactgcttccgcaggagaggaccaggaggagtagtgtggccaggcttcggcatgttactcggttcttctc

SEQ ID NO: 332486 - DNA, 340 bp, Zea mays
gctacgtcaccttctccacggaggaggcgatgcggaacgccatcgagggcatgaacggcaaggagctggacggccgcaacatcaccgtcaacgaggcccagtcccgcggcggccgtggaggcggcggcggtgggtacggtggtggccgtggaggcggcggctacggcggtggctggcgccgtgatggcggtggcggctacggcagtggctgcggctacggtggcagcggcggctacggtggtggtggcggcggctacggcagtggcaaccgtggctgcggctacggcaactacgaccggaactggaagaactgagcggtggggcccgcgcggtcaagtta

SEQ ID NO: 332487 - DNA, 224 bp, Zea mays
aaaaaaaaaaaaaaaaaaaaaaaataaataaaaaaaaaaaaaaaaaaaaaaaaaaagaagaaagataaaaaaaaaaaaaaaaaaaaaaaaaaaaataaaaaaaaaaaaaaaaaaaaaaaaagggggggcctatttaaaggatccaagcttaggttcactggcatgcatgataaaactgctttaatagggtcacctaaataaaattaactggctgaggtataaaa

SEQ ID NO: 332488 - DNA, 317 bp, Zea mays
gccacgcgtacgggtatacccaccactcgatgcaccacacgagggcacgagagaagaaccacttccatggccggagcctcatcgagagctgctagcagcatcgctaccgagctcttgcgttagctctgacttactgtcgcacgtacgcttgtgagacacgcgagaaggcacgaacgattagcttatacattgacttggagcggcatctgaggttccaaccatcataagagagatgatggtacggaagagggagcgcgactgccagaacacgatgcgcatgacgacgagcatgacggactacgcgctggccgacgcgc

SEQ ID NO: 332489 - DNA, 197 bp, Zea mays
attgattgagatttatctcaaaaaaataaaaaaaaaaaaaaaaaaaaaaaaaaaaaaaaaaaaaaaaaaaaaaaaaaaaaaaaaaaaaggaaaaaaaaaaaaaaaaaaaaggggcggccgttctagaggatccaggcttacgtacgcttgcttgcgacgtaatagctcttctatagggtcccctaaattcaattcat

SEQ ID NO: 332490 - DNA, 206 bp, Zea mays
cccacgcgtccgaaaaaaaaaaaaaataataaaaaaaaaaaaaaaaaaaaaaaaaaaaaaaaaaaaaaaaaaaaaaaaaaaaaaaaaaaaaaaaaaaaaaaaaaaaaaaaaaaaaaaaaaaaaaaaaaaaaaaataaaaaaaaaaaaaaaaaaaaaaaaaaaaaatataaacaaattaataaaaaactttaaaaatacaaaattaa

SEQ ID NO: 332491 - DNA, 368 bp, Zea mays
cccacgcgtccgcgttgcttcgtcggcgggcttgcctgggccaccagcaacgagtcgctggagaatgccttcgcctcctacggcgagatcctcgactccaaggtcatcaccgaccgggagacggggaggtcccgcggcttcggcttcgttaccttctcctccgagaactccatgctcgacgctatcgagaacatgaacggcaaggagctcgacggccgtaacatcaccgttaaccaggcccagtcccgtggcggtggcggtggcggcggtggctacggcggcggtcgcggcggcggcggcggttatggtggcgggcgccgtgacggcggttatggcggcggtggcggctaccgcggtcggcgcgaagt

SEQ ID NO: 332492 - DNA, 365 bp, Zea mays
tttgagcattcagaaacacaccaagcgaagcgcactagcaacgacctaacaacaatggctaccaagatattagccctccttgcgcttcttgccctttttgtgagcgcaacaaatgcgttcattattccacaatgctcacttgctcctagtgccattattccacagttcctcccaccagttacttcaatgggcttcgaacacctagctgtgcaagccaacatgcaacaacaagcgcttgcggcgagcgtcttacaacaaccaattgcccaattgcaacaacaatccttgccacatctaacaatacaagccatcacaacgcaacagcaacaacagttcctaccagcactgagccacctagccatggt

SEQ ID NO: 332493 - DNA, 227 bp, Zea mays
ggagattggtgctcgggtcaataatgatggtgattgtgacggagtgccctgcaaaataattaataattcgtgtgaaaaagttgattatatggttcctgacaaaaaaaaaaaaaaaaaaaaaaaaacaaaaaaaaaaacaaaaaataaacaaactaaaaaaaaaaaaaaaaaaaaaaaaaagacaaagaaatactgcatttacgaaaaaaaacgaaaaaaaggcattt

SEQ ID NO: 332494 - DNA, 108 bp, Zea mays
atccatatggattgaaaataaccgaacaagcccttggagggtagatcggaggagtcgtgcagcagtagcactacgtcctgtgaaaagagtatcatctcggttttaaaa

SEQ ID NO: 332495 - DNA, 392 bp, Zea mays
cgccatgttcgcgggtctcggcgagctgcccgagtgcgccatggtgttccggcggcacgccggcgacgggatttcggtggcaggccgggtgaagtgaagtgaatcctgaattgaaggtcctgacatgtgggccggggcaggccggactccaataaaaaccagataaactcatgtagagctccttgatctatctacttttggcttttcttccgttcctcttgtcatcacctagcttttcttctttcatccttctctgattggttgtttatacacaaacacagacacggtagcagatagaaaaacttggcatttttgcgtttgcacagagttgattcggtggacatcaggggtgggtttgagaaggacacgcggattttttttttctctcaatg

SEQ ID NO: 332496 - DNA, 337 bp, Zea mays
cccacgcgtacgaccacgcgtccgcctacgcgtccgaaaaaaaaaaaaaaaaaaaaaaaaaaaaaaaaaaaaaaaaaaaataaaaaaaaaaaaaaaaaaaaaaaaaaaaaaaaaaaaaaataaaaataaataataaataaaattaaaaaaataaataaaaaaaataaataaaaaaaatataagctattatcaagatctactaaatagtaatattttggtactattatcaatgtctatgtatctgtatatgctcatattcttgatgctgaattgtactgaatgatgttgcttgaattcaatcgtgttactgatgatattgcctattcaatagatgcat

SEQ ID NO: 332497 - DNA, 155 bp, Zea mays
aatgaatctatattacagcataatgtatagactagagaaagtacatcctaggagtttacctcctttcatttaaaagttgctgtctttatctgtacatgcatgtagctcggctttttttgtataagtgagtcatggttgatctttgtctacaaaaa

SEQ ID NO: 332498 - DNA, 79 bp, Zea mays
ggacgaccgcactcgtacgaaaaaaacaaaaaaaaaaaaaaaatataaaaaaaaaaaaaaaaaaaaaaaaaaaaaggag

SEQ ID NO: 332499 - DNA, 337 bp, Zea mays
cggatcaacgcttattctaccctactatactgttggatgttctttggaagtccagctcaggaggtaaaggatgcaggtcacgaagagcatcctatatgatataaatggagtagcctgtgagcagggagctcacgtcgcatcaggcaataactatatctagggtcatctatacacatccatgtgggaaggattgcgaggcatggctgaaatggatggtgcatgtactagctcgtagcagagcaaggcacggagattatgagagctacaatgtgcttctcagattgacgatgcacagttgactgaggtgaaagagatagcgatgaccagattggaaaga

SEQ ID NO: 332500 - DNA, 222 bp, Zea mays
aaaaaaaacaataattataccctactttatcatagaaaagatgaaataagaaaaaaaaaagaatataaaaaaaagaaaataataaaaaaagataacatataaaataataaaaaaatttaaaaagttaaataaatttaatttgatgtcagtcgatttctaactgaacgtgctgtcaaaacccttcccttgcttaacttatttggcttacttttgttatggctt

SEQ ID NO: 332501 - DNA, 413 bp, Zea mays
cccacgcgtccgcagcaattatcttcgtcggtaagatcggtcattccgcaataggacgatttcaggttcatggatggaattcaaacttgtggggtccctaaatgatttgaaaatgatggtattccatcagcaagcagcccatgcatggacaaacttgcgtgtttcaaagctgcgttacaaggcaatacttcttattacaatactgtaattcagaagacacaaaacacgccacgaaaccacgcgcgtcacgctcatctggaagttgatgcaacgaacctaatgacgtaactgacgccctaccatgcacaacggaaattgagccaggtatgaatctcactgtagctagctctgattggtcagtttattgagacgatccggacgctgctattgacaaactgtcatggggactactg

SEQ ID NO: 332502 - DNA, 428 bp, Zea mays
gtctctctactttctagtattaattatcaataagttggtttggaaaaaaaaaaaaaaggaaaaaaaaaaaaaaaaaaaaaaaaaaaaaaaaaaaaaaaaaaaaaaaaaaaaaaaaaaaaaaaaaaaaaaaaaaaaaaaaaaggggagaaaattttaagggatccaaaattaacaaaccaaaaaaagggggggattatttttaatatagggccccttaaatccatttaatggaccgaatttttaaaccttggggactggaaaacccttgaggttccccactttatacactcttgggcattggaaaattttggaagttgggtaaataccaaaagggccctaaccaaccgcttttccaaacggttgaaaacccaaaagggcaaatggaaccccccttgaaaaggggctttaaccccgaaggttatggggga

SEQ ID NO: 332503 - DNA, 140 bp, Zea mays
cccacgcgtccggaagagcggtaagtataggacagtgactaagctaatacttgtgtctggacctcgctagtggccggtcgaccctggctaggatgcacactcacgcgatgcggtatttgcccacgcgtccgaaactatga

SEQ ID NO: 332504 - DNA, 369 bp, Zea mays
cccacgcgtccggatcatttgctcgttgattttcatcttctttgcagccaaaagctgaaaaaaactgcagaagttaaaaggcaaacacaattgataagtgccacggaagttggtagagccgatacaaccaaggaaaatgaggagaagagcagcagtgttccagaaatactcaacgcagcatgtagtaacaaggagaaacccaacaaaatcgcaacagacggatgatgccttggctagttgactgggaaaatgagatagcttctggaacggacttcaacttgaattcctgaaatcataagttcgatgtgcgcaatgtcaagaaaccacaattggtcatgggttctctggcattttctcatggaagtgaag

SEQ ID NO: 332505 - DNA, 322 bp, Zea mays
aaaaaaaaaaaaaaaaaaaaaaaaaatataaaaaaaaaaaaaaaaaaaaaaaaaaaaagaaaaaaaaaaaaaaaaaaaaaaaaaaaaaaaaaaaaaaaaaaaaaaaaaaaaaaaaaaaaaaaaataaaaaaaaaataaaaaaaaaaaaaaaaaaataaaaaaaaataaataaaaaaaaaggggggcgggatctttgtagtgatataggttagattctctatgactaggagtattattcttttttgagggcctccctaaatgagatagttggtgatgtgaactatcagtgtgagtttggaaaaccctgggtgtgccccttttt

SEQ ID NO: 332506 - DNA, 365 bp, Zea mays
ggtcccggatttccccgggtcgacccacgcgttcgtcaagccgagaacggtgtcaaggctgcatcagctggcgcagacggagccagccgacttgagctccaggaaagtagcacgggcaacaactgccacgacctatccttcaaaacgatcctcgagacgacgactacgaccatcgcagcggacgcgtgcgatgaagggaacgaccaagacgagtgcgtgcatacgcagctggttgttgacgcgcaccgtcgctacttctactcgcagcacaagggcgagccgcgaccgacagcgacgatgacggtgcatgccgccgctgcatgaaatgatgagcggcagacgagtgattaaatgatggaccatcc

SEQ ID NO: 332507 - DNA, 232 bp, Zea mays
gccactgtggcatgctggcaaaaaaataattaaaaaacaaagaaaaaaaaaaaaatggaaaagggcagacgttctagaggatccaaagcttaagggcccgtgcatgcgaaggtttagctcttcggtaggggaacatagaatgaattaactggccgatagtgtacatcgtgttgaatgggaaaaccctcgcgtaaaccagcttaactggcaacaccatgtggccacttagcat

SEQ ID NO: 332508 - DNA, 355 bp, Zea mays
gctctgccgcggggtgctcttcgtcccggggctcatgggcgaggacagcccgatgttcgatttcgaggagggcctggaggaagggcggttgtccgaggactgtgacgacggatttggattgcctgggctgaaggcttcagggttggcacagacaccggtggccgagaagaaggtattccctgtgaggttggggaagttcaagaatgtcggaacccatggtgcggtggaaggtggccatgccaatgccaatgccaatgccaatgctaatcccagggtgttgactagggatgaaggggagagtagcagcagcaggttggatggaaggagatgcttctccatgggcacctatcagtat

SEQ ID NO: 332509 - DNA, 307 bp, Zea mays
aaatagatcttatagtccccatggctgttgcatgcatgtaagatgaaaaagtattatagggcttaataaaaaggaagtaactacgattttgagtgtccaaaaaatatacacagatccattcgaaataatgaatcaattgctgatgctagctaaagtaaggccttttggtcaagataagcagcttatgaactggaatcaccatcttattgactgatttgctccccctttattaaaacagccttgctggtattgaatcgctctgcctgcgaatccaatcgctttcgactatcgaatttgctttcagcat

SEQ ID NO: 332510 - DNA, 376 bp, Zea mays
attggttataatagtagtagtagaagagaaaatagaaaaggcaagccattccagccaccaaaaacacttgtactatgttcctgtgaccttttggaggctttcaacctgtcaggaatcaggatatttgatgcatccaattatctaaatccaacaaatcttggtattatgcttactgtataatcatggtcgtattattttttagtctgttgatatttcactggcataaattgtttcttctgtgctttcatatccactatgtaacccatgttttattgtttgtagagaactacaatttatgctcaagtcaatgctgctcttcgcaaaataagagacacatcagagtttgtccaatcttttgcatcagagcatcttaaga

SEQ ID NO: 332511 - DNA, 63 bp, Zea mays
aaaaaaaaaaaaaaaaaaaaaaaaaattaaaaaaaaaaaaaaaaaaaaaaaaaaaaggggaat

SEQ ID NO: 332512 - DNA, 411 bp, Zea mays
actggatgtaatagtaatagtagcattttgcctagaatccgctagccatatccagggagtaattacactcgtactaggtgcctgtgacctgaaggtgtccgcctgcctagacacaatcaggatatttgatgcatccaactatctacattcaacgggagtggggcttatgcagacgggctaatcatggtcgagttatacatttagacaggtgatctcacagtgacatctcttgaaacttgagaggcttcatatgggccatgtaacacatgtctaagcggaaatggaccacttcgctttaggcgatagtgcttacatagttaagcccaataagatactcatgacagatagtccaaatatctgattcagggcatccttacacgccgtgacatgaacacgttacttgttctcaag

SEQ ID NO: 332513 - DNA, 221 bp, Zea mays
cccacgcgtccgaaaaaaaaaaataaataaaaaaaaaaaaaaaaaaaaaaaaaagggggggaagatataaaagaaaaaagaaaaaagtacgctagcattcgtggtactaggttttctatagtgtgacttaaattgtatttgttggctgtatttttacatcgttgagactgggagaaaccctgtttgtaccaattttattggaattgcactacatgggacct

SEQ ID NO: 332514 - DNA, 347 bp, Zea mays
acttctccggaatttccggggcgacaccacgcctgccagcgacttgagaatccaggaccatattcttaggaatatggagtgattgtcactgcgaaacttaccatggaatagcgcaccctgcattcaaaaatcctctatggcccgatggtgatctgtaggcactcaatggcgcgagtacaattccacaccttagcagctcacagctatggttcctgtaatagggtaccttaacatacttttctgcgtcccttccatcggcttactcttacccagcgacgacactcctaaagggatcagacttactacatctcgattgcctgaacgctcagacgcccgtcacaagtcca

SEQ ID NO: 332515 - DNA, 424 bp, Zea mays
cacacgcgtgcggctctcctataccctgcttgctgtgttcactaacacaactcagctggctgttccggttcccgctctctgtaacatggttatgcacatgtatagccctgattcgcggcggagactgggcatgcgctcggagcccagaccaggttacaacgagagcaaggccatccctgattccctgatgccttcttccttgagaaggcctccgctgaggcgttcatggagcgagtcgagtcggtagtgggcgaggtattcaacatcgtcaggcagtggcaaactcagcagcagaagcaggtccaggagttccaggcactacacgacacacacttggctccagatgagcattcatagtatttcgtcttccatgtcaataaccctataaactctttaataattgacctctcgatgatgtgttatc

SEQ ID NO: 332516 - DNA, 64 bp, Zea mays
tttttttttttttttttttttttttttttttttttttttttttttttttttttttttgtttttt

SEQ ID NO: 332517 - DNA, 189 bp, Zea mays
cccacgcgtccgaataaatgaaatctgcaaatccatcatttgttagcaatcttctatctaaatttccggtgggttttgtttcctacatcagaaaaaacttgattccatacgctgtaccgaccttggaaaaaaactgttcgacttcagaggataattgtaaaatggctattaatgtgaacaagtccatgc

SEQ ID NO: 332518 - DNA, 447 bp, Zea mays
  unsure (1)..(447): unsure at all n locations
attcccgggtgcgacccacgccgtccgttntcacaatgattctacattgtcatttttccagctatttatcatcggctcttgtgaaggtgcgtggcctatgttgggtgtataaagagtctaacttaatatatccgttctttgcagtcgcacacttcatgtgacgactggtatattatgctaatatatacgtcttcctctcacacgccatttctcccttttgacatattgaagtaaaacctgctagccacttggaggatccacagattatatgatgcgctataaaagtactctccgtgttgaaatgtttagtctccatcctcggtgcataacacggttttgctggacagtactgtgcggaagagtacaatagacataagcgatggtattccaagcagatggcttttgggtatttcatagtctgacaaatttcattttcctgttaataaa

SEQ ID NO: 332519 - DNA, 176 bp, Zea mays
gatacgcatgcttgaaccctatgtttcatattgggacccatacttgtagagtggcggggatttgatctacgataagttctatctctagctctacaggcagctgatcctgctgattaacaacctagtcatcgatcaggtgctttgtcaagctcaacatcatccacatcgacgatctt

SEQ ID NO: 332520 - DNA, 198 bp, Zea mays
aaaaaaaaaaaaaaaaaaaaaaaaaaattttttaaaaaaaaaaaaaaaaaaaaaaaaagaagagaattttaaaggacacactgaaaggatccaaactatcaaacacaaacaaacagggcaaacattttaaaaaatccaaacctaaacccaattcattccacgtccttttacaactaaaggaccgccaaaaccaattta

SEQ ID NO: 332521 - DNA, 347 bp, Zea mays
cccactcgttcggccgtagttgttatttttcgaatgtcggcgctgccggagttgttgggaagagcattcggaaacaactcgtccgattactgggttcctggaacatgactacttgacatgtgataggcgtatatctgatctgtggactgttggcgtatcaccgcattctacacatctaatggtagcgtatgtgcgagaactggagcatgtaaatgtctttaaactggcatctgattgagatgcggcacaactgctgatctggcatgagacatgtctgctatcggcgaaaacgattcaaacagcgttacggtcgaactcagaggctgctgtacatgaatttggttgcg

SEQ ID NO: 332522 - DNA, 308 bp, Zea mays
ttttcaaatgaagctacatttcattttctcacctgtatcatggctatgtgaagtgggtggccatgttggagataaaacttaatgcatattccttcttgcagtgcacagtctgcgagatggtattgatctaatctatcgtcttaatacacacccattctacctttgacacttgatgaaaactgaaggcactggacgaccaagattatcgaacgcaaaaaagcatgtcgtgtagaaattttacctgcatactgttgcgtaagccgttagctggacagactgtcgcaagagtccaaagacacagcgatgtc

SEQ ID NO: 332523 - DNA, 216 bp, Zea mays
aaaaaattgggactacatactgaaaaattattttcactggcttataacacatctatacgagggaatacaacatccaactataagagatctatatctctagcgcctaataatgttgacccagattatgatgacactagatcctgcgctcaagctactacgcaatccttgtgtaagacaaatctgtctacctctacctaaatttgaaaaccgggaaca

SEQ ID NO: 332524 - DNA, 150 bp, Zea mays
aaaacacaaaatacaacacaaacttattataaaaccaaaccaataataaaaaacaaggagaaaatttcaaaacacaaaaaagacaaaaaaaaaccaaaacaaaaacaaaaacaaaacaccaccaaaaaaaaacaccactacaacatccat

SEQ ID NO: 332525 - DNA, 302 bp, Zea mays
aaaaaaaaaaaagtaaaaaaaaaaaaattatataaaaaaaaaataaagaaaaaaaaaaaggggtgaaaaaaaatggaaaaaagttaagaaattatttaatgagggcgtctgttttaggggatcgtcgttttcttcctcgggcttgctctggtcatgcgttttttgttggttgacttaacttcattttactggatgttgctttccttagtcgtgactgtaaagaccttggcgttcccgatcttaatggccttgtactgctttgccttttttccggttggggctttccctgtagggtctgaccc

SEQ ID NO: 332526 - DNA, 112 bp, Zea mays
tggcactgtcgaaatgggcgtgcgcaggttcatgaagccgatcctctactagggcttcatgttacagcgagtcatgcctcgattcatgagccaacgcggctacttcacccgc

SEQ ID NO: 332527 - DNA, 313 bp, Zea mays
aaaaaaaaaaaaaaaaaaaaaaaatattaaaaaaaaaaaaaaaaaaaaaaaaaaaaaaaaaaaaaaaaaaaaaaaaaaaaaaaaaaaaaaaaaaaaaaaaaaaaaaaaaaaaaaaaaaaaaagaaaaaaaaaaaaaaaagagaaataaataaaaaaaaaaaaaaattaacaacaacggataaaaaaaattaataatgctaccgtagtgaccccttggctattcggaaatctccgtcattttcaaacatttcgacttgggaataaacgtcgtttaggccatttagcggttgggcaccaaaaactttttcacctg

SEQ ID NO: 332528 - DNA, 260 bp, Zea mays
cttcacttggataacctttcgctgagctcatttcaataagacgtttcggagccatggaaatgctatgtcgcttggagtcaatgtggatgcctaatttcaaatttttattcttcatacatttcaaaaaaaaaaaaaaaaaaaaaaaaaaaaaaaaaaaaaaaaaaaaaaaaaaaagggcagccaatctatatgatccaagctttcgtactcattcatgcgacatcatagctgtactatggtgtcacctaaactaaatagag

SEQ ID NO: 332529 - DNA, 374 bp, Zea mays
gctcgccgtggaatgcaccgacgacctgtcggtaccggcggcctcggatggccgaggtggtggctaggatcgaggtcatcgtccggagcgcggagctgaaggcgaaggccgacacgtgaggatgacgcacttccatagcatctctccctaacctgccagctcggtcgatctctgtggttattttaagatcttgatgtgcacattgcgcggcgatgtacatgttcgtaacattagtcactcttcattatttctctgcaagataaacgcgcagactcaagccgtctacctggagcaagtgctgcgggaggcatactcgcacccggccctcatcctaatcatgctgcggactgcactgcaccctatcgggtgctacc

SEQ ID NO: 332530 - DNA, 170 bp, Zea mays
cccagcgtccgaccaatggacttttttttatgaactaaacaaacggcatccggggctgtgatacaagctttcgagcgctgcatgcacctgttcaagttaatgaccttcacttaaactcaatcatcctgccagggatttacaacgagggacacttctaaaaacccaacatt

SEQ ID NO: 332531 - DNA, 197 bp, Zea mays
  unsure (1)..(197): unsure at all n locations
gtggcgcgcgtctacctgggcggccagaacgtgaccctggacctcgctaggttccggcagacactggcgaggatgcactcgcacgcgatgcggcagaggctccggcaggagagactgtgatggccggccggccatcggcgacaggtgtacgcacgcacggcggctgactatgctgntccggaccggtagagggagcg

SEQ ID NO: 332532 - DNA, 425 bp, Zea mays
cccacgcgtccggaccaactagcaacatataaagcacaatagtgtaccaacaatggcagccaaaatattttgcctccttatgctccttggtctttctgcaagtgctgctacggcgaccattttcccgcaatgctcgcaagctcctatagcttcccttcttcccccgtacctctcaccagcggtgtcttcggtatgtgaaaacccaattcttcaaccctacaggatccaacaggcaatcacagctggcatcttacctttatcacccttgttcctccaacaatcatcagccctattacatcagttacctttggtgcatttattggcacaaaacatcagggcacaacaactacaacaacttgtgctagcaaaccttgctgcctactctcagcaacagcagtttcttccattcaaccaactagctgcat

SEQ ID NO: 332533 - DNA, 71 bp, Zea mays
aaaaaaaaaaaaaaaaaaaaaaaaaatataaaaaaaaaaaaaaaaaaaaaaaaaaaaggaaaaaaaaaaaa

SEQ ID NO: 332534 - DNA, 197 bp, Zea mays
tacgagtttcagaaatataatcaagaatctggtggtgaggtgcatattacttagcctaggatacaggtgatagttcgtcaaagtttgaaggccatgattaattggccccgcatgaggatcatcaatgagaccctaatcctgatactattcggatcaatagctacaagatacgtgtaattaaagtcattgatcatgga

SEQ ID NO: 332535 - DNA, 202 bp, Zea mays
cggtccggattcccggtcgacctacgcgtccggcgagagagatccggagcagccgcagtcccaccgaccccgccgccggtcgccctccatctgctcgccgctgcctctcgtttctcttttcaataatcaagatgagccgtgggggagtgcccgtggtgggcaaaggtctctggggtatccctttggaagccgtgaacccccc

SEQ ID NO: 332536 - DNA, 275 bp, Zea mays
aaaaaaaaaaaataaaaaaaaaaaaaaaaaaaaaaaaaataaaaaaaaaaaaaaaaaaaataaaaagggaaaatataaaaaaaagaaaaaaaataaaacaaaatataaaatacctaaaaaaaagtggtgtaaaatattggtttaaagctatgttaaattatcatgataggatgttacaagatgaatactctatcatatcccttttaagaagaaactttatcttaaagttcatgtactacccatagaaatggatcctatagtaacacattgaacac

SEQ ID NO: 332537 - DNA, 103 bp, Zea mays
tttgcccggccggcttccaagccggccgaaggaacccgaaaaccaaggcaagaaccccggaagggctgagggaagggccgccgggcatggctcgccggccggc

SEQ ID NO: 332538 - DNA, 459 bp, Zea mays
  unsure (1)..(459): unsure at all n locations
cgacgggccgctcgatctccacctctgaagtggctgcttgtgatctagatctgaaagctgcagtggttgacagctgagtgtgaaactgtgaatcgaagatgagcgtggtgggcttcgacctcggcaatgagagctgcatcgtggcggtcgcgcggcagcgcggcatcgacgtggacgaactgctggaagtcgcgaagatctacggcgtccatgtgatgccgaccttctgcttcatcaggaacggcgagacgctcgagagctttgctaccgtcgacgaggacgagctccgggacgccgtcaggaagtacgccgncgctggcactacgacggctcctgcctcggcgtccgcctaattcaggagatgtgatgtgtagcaaatagcgcgcgcgcaccagtcgtcaataaataaattaataaataaataaataaataaataaaggccaacgtacgacgacaaat

SEQ ID NO: 332539 - DNA, 328 bp, Zea mays
tgcctgctcgagataacctgctgattggatgaatctattgcaaggatggttaccgagtactgatgctatttatgttgtataagatgatgtgcgctatgttgtctgatgtttttatatatattataatggtgacgaaaccgaggtaaaaaataatttatatatgtatactggtgtgattgccttgctaaaaaaaatttttggaccaaatggttaaatctttgacatagaacatgcataattcataatttgttcttgatcgttattggtctttttatatcatgatctatttggctgatattgattattttcttgatcttgtttattcttt

SEQ ID NO: 332540 - DNA, 65 bp, Zea mays
gtactactaccaccaccatttgtttatctgatgaatgaacggtgacgatgatgacgatattgttt

SEQ ID NO: 332541 - DNA, 265 bp, Zea mays
attcccggtcgaccacccttccgaaaaaaaaaacaacaaactaaaaatactaataaaaaacaacaaatactacactaaactacaaaaaaagggctgaatactctaaacgattcaaatttaaatctccttattttcgaatacttcatactttaatataggaacctaaatatagataactaccccatgcttacaaacgtttttattcaaaatacccacgtttacaaaaattatattttctctaattacttcactttttacaaaattt

SEQ ID NO: 332542 - DNA, 339 bp, Zea mays
aaaaaaaaaaaaaaaaaaaaaaaaaaaattaaaaaaaaaaaaaaaaaaaaaaaaaaagggaaaaaaaaaaaaaaaaaaaaaaaaaaaaaaaaaaaaaaaaaaaaaaaaaaaaaaaaaaaaaaaaaaaaaaaaaaaaaaaaaaaaaattgggggggcctttttaagggaaccaattttattaaccctttttttaatattaaaagtttttttatagtggacccaaatttaaatttattgacctggttttaaaaaaaaaatttttggaaaaacctgggttttccaaaattaaattgtttggaaaaaaatacctttttaaaaagttgggatatttgcaaaaag

SEQ ID NO: 332543 - DNA, 209 bp, Zea mays
accacgcgtgcgcccacgcgtccgaaaataaaaaaaaaaaatggaaccggaactgtgcgacaaagacatacacgaaaatcagaagacaatatactagaacagaaatgtacaagctgaaaaaaggggcggccgttttagaggatccaagtttaggtacacgtgcttgcaacttcttagcttttttatagggtaacctaaattcaattaag

SEQ ID NO: 332544 - DNA, 101 bp, Zea mays
cccacgcgtccggatacgctcatacatgatcatgtggcacactcatcacaggactatccatgcactacgagattccattaacatccttggcacattactgt

SEQ ID NO: 332545 - DNA, 156 bp, Zea mays
aaaaaaaaaaaaaaaataacaaaaaataaatataaaaaagaatcacaaatgaagtccgataatagaagctaaggtcagacctactcgagcatcctacataatatatattgtaaagtgacatccaaaactctattacactggcacgacattttacaa

SEQ ID NO: 332546 - DNA, 465 bp, Zea mays
gcaaaaaaaaaaaatgcctttttgaaaataaagatttcaacttaaaaaaaaggttttttccataaaatttttttttaaacaattaaattgtggtattaacaaaattttttgaaaccttttattcttttttaaaaaaaaccttgggatttatttcaaacaaggtaaaaaatcagggggtggaaaaaaccgtggaaaaaataaaattcttgtaaaaaaaaataggggggttaaccttttataaaacgctcagtaaaaaaatttgataaaaaaatttttttccaatttgggtttcttaaaaaaagttcttttaaagggatattttttaaaattaaaatttttttgaaaaaaaaattttacgggccctttttttttccagttttaaaaaaaaggcggggggggctcccaaaaaattttttggaaaaacccgccttttttttatctttaaatatttgaaccctttttttt

SEQ ID NO: 332547 - DNA, 172 bp, Zea mays
aaaaaaaaaaaaaaaataaaaaaaaaaataaaaaaccaaaaaaaaaaaaaaaaaaagggggaacaagaacgcggacggccgcacaagaggacccaagcaaacgaacgcgagcaggcaacgacataagcacaccaaaagggacacctacaaccaagccacaggccgacgagaa

SEQ ID NO: 332548 - DNA, 143 bp, Zea mays
gtccgattcccggtcgacccagcgtcgcacgcgtcgaaataacaaaattatggtatggatagaatcacaatgaatctgaaacaggtctatacagataacgcacacatgtacataaaaagaatggaaaaataaaagggcggcgt

SEQ ID NO: 332549 - DNA, 363 bp, Zea mays
gccaggtgtacgtactagtactagtagatgcgtcacatactatccagctacgtactactactagccggtgcacatcactagcgatgactgccatccacggtagccatgcgtgcccaccgttgaagatgggtcaagtccgccaccagcctcgccgtggtccagcgtatcaagagcagcctcagcctcgtcagcaaccgccgaaggatccggagcatgcacgtcttgaccgactacggaaggatgaagtgcatgacgctgtcgtacgtgtacgcgatgtcgacggacgagacgctgaagcacgtggactagctgctgagcgacgacctgatgcactaggtggactacatgatgctcagctgctgg

SEQ ID NO: 332550 - DNA, 199 bp, Zea mays
accgttccggaattcccccggcgacccactcatccgctttttctcctcctgccgttcgtccgttttagcttgcaaagctctcggcagctgttgccatttcaagcgccggtgcgccctcaattacccatgcctgtcgcccagcccccaacttctacgtcatcgtagtgggcgccggcatcatcgtcagcttcactgctca

SEQ ID NO: 332551 - DNA, 102 bp, Zea mays
aaaaaaaaaaaaaaaaaaaaaaaaaaaattaaaaaaaattaaaaaaaaaaaaaaaaagggaaaaaaagaaaaaaaaaaaaaaaaaaaaaaaaaaaaaaaaaa

SEQ ID NO: 332552 - DNA, 231 bp, Zea mays
tttcgtcgtacacctcacccgctttcctttgctccactctagcgacgcgatttctgtgctcttttgagattaaattatcttggactgctgttggtctggtcggcggctggtggcatagggatggagaccgcagctgcgatggtggagggcggagtggggcggtttttgttggcgccggcgatgttcgcatctctgccggctgtcttacaggttggtcatttaaaaaccttt

SEQ ID NO: 332553 - DNA, 316 bp, Zea mays
cccacgcgtgcgcgtcgccgttgttgctgtgactgcagcgttggcgggccttgtaccgactaaatgggacacaagcggccttattgttaccgggaagagcttccgcggaagcagatccctatgatcaggtgccaagaggtcgttacaataccggagaacgcacatggtaaggcccaagggaacgcacaaggccaccacagcctgactacattaaccacgagcactattacaactatagcctcctgtattgcatgctctaaacattgctagacaaatgcctgtatgcatcaatgaacgctcgagaccggtgccacaa

SEQ ID NO: 332554 - DNA, 187 bp, Zea mays
aaaaaaaaaaaaaaaaaaaaaaaaaaaaaaaaaaaaaaaaaaaaaaaaaaaaaaaaaaaaaaaaaaaaaaaaaaaaaaaaaaaaaaaaaaaaaaaaaaaaaaaggggcgccctttttagaggccccaattttacgtccgcgttcttgcaacgttataccttttttatagtgccccctaatttaaatt

SEQ ID NO: 332555 - DNA, 277 bp, Zea mays
aaaaaaaaaaaaaaaaaaaaaaaaaaaaaaaaaaaaaaaaaaaaaaaaaaaaaaaaaaaaaaaaaaaaaaaaaaaaaaaaaaaaaaaaaaaaaaaaaaaaaaaaagaaaaaaaaaaaaaaaaataaaaaaaaaaaaaaaaaaaaaaaaaaaaaataaaaaaaaaaatgaagaaacatcattttattagcctagcagtaaatccctaataacgggagataacgtaaaaattatgaggttaagaacgatcgcgcttatcaacaatttgcgcagtttgaa

SEQ ID NO: 332556 - DNA, 89 bp, Zea mays
ggtcgacccacgcgtgcgaccacacgtgcgaaaaaaaaaaaaataaattattataatgatttaaaaatataaataaataataaagaaag

SEQ ID NO: 332557 - DNA, 273 bp, Zea mays
cggcaaggagctcgacggccgtaacatcaccgttaaccaggcccagtcccgtggcggtggcggtggcggcggtggctacggcggcggtcgcggcggcggcggcggttatggtggcgggcgccgtgacggcggttatggcggcggtggcggctacggcggtcggcgcgaaggtggcggcggcggctacggaggcggtggcggctacggcggtcggcgcgagggtggcggtggcggctacggcggcggtggcggcggcggctggagggactgatg

SEQ ID NO: 332558 - DNA, 184 bp, Zea mays
gcgagagagatccggagcagccgcagtcccaccgaccccgccgccggtcgccctccatctcctcgccgctgcctctcgtttctcttttcaataatcaagatgagccgtggtggtagtgccggtggtggtcaaagttctctgggttatctctttggaaacggtgagccccccaaaccagcagtgg

SEQ ID NO: 332559 - DNA, 105 bp, Zea mays
gagagcattaacaacaaacctgcaactgctgctgaagagcggcaagtacacactatgctacgagacctttcttatgacactgggcaactgcaaatgacagctgat

SEQ ID NO: 332560 - DNA, 134 bp, Zea mays
taaatcacttacatatataaaattttcataactttctatcatacatctactctaatatgttaatgtgtatttttagatagcctgataattactcttatacatattttaatatcttaactccttcatcaatcttt

SEQ ID NO: 332561 - DNA, 146 bp, Zea mays
tcccactcatactaaaataacaaaatttatgtatctatagaatcacaaatcaatggtgaaagggggttcttataacagaataatactcacatatacatatattcaaatttaattcattaaaattgtgcaatcttaaatttaattat

SEQ ID NO: 332562 - DNA, 238 bp, Zea mays
cgactgggttgctcgtgaagttttcaacattgagagtgatcaaatccttagctgcttgcttttgtctctctattttctccttgtgtatttttaagcgtttatccatgaacaaagtatcggtactagggtactactaaaccaaggtatttaggctgtttggctcaggtttaaaaaaaatacttactatactcaaattaaaaggccatgaacaaattgcacatttaatcattgagggtat

SEQ ID NO: 332563 - DNA, 179 bp, Zea mays
ctgctgacatcccactgggtggtggcggccggcgctgctctttccgcggacggctcagtcacctttgcgctgtacgtcgcgacccacacgcctacgaccgactcccaagcggccgacctagagacactcggggggctctttgacacacgcctgtcgtatgatcgctcacatacgctcat

SEQ ID NO: 332564 - DNA, 281 bp, Zea mays
  unsure (1)..(281): unsure at all n locations
tccttattcccggtcgaccgcgcgtctcttaactaatgcacattcccggagaatattggtgaagcaataacttgatattgggttctaaaccaaagaaagaantggttataaaatcatctgccacatacnanccaaaaaagaacaatgaaataaaggtttttgaaaattcaaattaaatttcaacggatctttcttaatatatctcacaaatttcagtattttctttcaaaaaaaagggatacttttccatccccttatcttgaggtcccctaatcaatttt

SEQ ID NO: 332565 - DNA, 304 bp, Zea mays
  unsure (1)..(304): unsure at all n locations
cccacgcgtccgcccactcgtacgcccacgcgtacgcccacgcgtacgcccacgcgtncgcccacgcgtgcncggcattaaaacttattgttgaaaaaaaaaaacaaaacaaaaaaaaaaaaaaaacaaaaacaccaaaaaaaaaaaaaaaaacaatcctggacacaaaacaaaaaggctaaaccaccacgcactactataccgggcgcgaactcaaaaaaatccaaacctacaatcgcgctgatggcaaatcatactttttgtatgggtcgcctaaaattaaatcacctgccccccttttaaa

SEQ ID NO: 332566 - DNA, 430 bp, Zea mays
ttcttcccccataccttccatcaattatagcttcaatatgtgaaaacccagctcttcaaccatataggctgcaggaagcaatcgcagcaagcaacatacctttatcgcccttgttgtttcaacaatcgccagccctatctttggtgcagtcattggtacaaaccatcagggcacaacagctgcagcaactcgtgctacctctgatcaaccaagtagctctggcaaacctttctccctactctcagcaacaacaatttcttccattcaaccaactgtctacactgaaccctgctgcttatttgcagcaacaactattaccatttagccagctagctactgcctactctcagcaacaacaacttcttccatttaaccaattggccgcactgaaccccgctgcttatttgcagcagcaaatactactaccatt

SEQ ID NO: 332567 - DNA, 180 bp, Zea mays
cgcgtccaaaaaaaaaaaaaaaaaaaaaaaaaaaaaaaaaataaaaaaaaaaaaaggcctgccactcaaaaaaaaaccaagcttacttacacattcatgctcccctcctaacctttctatagtatcccctaaactcaacttactatccttatttttaaaacaactatacttttaaaaccc

SEQ ID NO: 332568 - DNA, 447 bp, Zea mays
cggaattcccgggtcgccccaagccgtccgcacctggcaccttataaggcacattagtgtaccaacattggcagccaaaatatttggcttccttatgctgctgggtctttctgcaagtgctgctaccgcaaccattttcccacaatgctcacaagctcctatagcttcctttcttcccccatacctctcaccagcggtgtcttcagtatgtgaaaacccaattcttcaaccctacaggatccaacaggcaatcgcagcaggcatcttacctttatcacccttgttcctccaacaaccgtcagccctattacagcagttacctttggtgcatttgttggcacaaaacatcaaggcacaacaactacaacaacttgtgctaggaaaccttgctgcctactctcagcaacagcagtttcttccattcaaccaactggctgcattgaactc

SEQ ID NO: 332569 - DNA, 345 bp, Zea mays
  unsure (1)..(345): unsure at all n locations
ccgaattccgggtcgaccaccggtccgcctccccctccggttcgggttcgggttcgtgaggttctccggggttcgggttcgtgggtgagcggatcgagatggcggcgtcngatgttgagtcccgctgcttcntcngcggcctcgcctgggccacggacgaccactcccttcacaacgccttcagcacctacggcgaggtcctcgagtccaagatcatcctcgatcgggagacgcagaggtcccgcggcttcggcttcgtcaccttctccacggaggaggcgatgcggaacgccatcgagggcatgaacggcaaggagctggacggccgcaacatcaccgtcaacg

SEQ ID NO: 332570 - DNA, 73 bp, Zea mays
tcccctgcatctgccccgccgagcggatcccgcccgcctgtcatgtgagtctaatatcccgttctcacacgcc

SEQ ID NO: 332571 - DNA, 163 bp, Zea mays
tccggaattcccgggtccacccaacccgtccggccggcccgctagctattcaccatcgctagctactacacctctcctatcctatgttctcagttaactttctgtcagacagtagttttgttttccttcgtgtaatcccctagatatatatatttccatttct

SEQ ID NO: 332572 - DNA, 193 bp, Zea mays
  unsure (1)..(193): unsure at all n locations
aaaaaaaaccanaaaataatttattttaagggttcccctattggggtaaaaaaagccaaattattatatcagtttaacaaaaaaaccccttctcctttctttattttttaaacacctccacaatttaaaaaaccttttccaaataaccggcccccaatccactttggtaaaacaaaaaaataaatcttttttt

SEQ ID NO: 332573 - DNA, 236 bp, Zea mays
aaaattaaaaaaaaccccacattttttttttttttccaatacaacaaaaaaaaaaaagtctaatactttttcttcactcactccacaacttttttatttttttctttaagaaccccaaaaccaaaatcatcctcgatcggtaaacgcaaaaatttttttttttttagttcgggaccttaatacacacaccattttatttttttccccctcgcccgcataaaaaaaaaaaaacaaaa

SEQ ID NO: 332574 - DNA, 86 bp, Zea mays
aaaaaaaaaaaaaaaaaaaaaaaaaaaaaaaaaaaaaaaatttttaaaaaaaaaaaaaaaaaaaaaaaaaaaggggggttttttaa

SEQ ID NO: 332575 - DNA, 72 bp, Zea mays
aaaaaaaaaacaaatagcaaacaaaaaaaaaaaaaaaaaaaaaaaaaaagaacaaaaaataaaaaagagggg

SEQ ID NO: 332576 - DNA, 379 bp, Zea mays
  unsure (1)..(379): unsure at all n locations
aaattaaattnacctgtacctnttnntcttcctcctcnctcttcttaagcagacttttttacaaaatcttgcacccaaancacttctnttgttctcacttctaaacttcttcttatacctttcatatataatgtcttcttcccaaatctcgccttcatatcatgttttctatttgcactgcatcttcttcaacacatttctcacttttaatttcccctttaatatcattctcaacatctttacagtttcttttttacacttctcatatctactttcattgaacctgatatcacttattcactcactcccataacaatatcatcatctccaatataacatcaatttccatttcatcatcttcactttcacgattatcatc

SEQ ID NO: 332577 - DNA, 301 bp, Zea mays
aaaaaaaaataaaaaaaaaaaaaaaaaaaaaaaaaaataaaaaaaagtcaaacactataaaaaaataggaagttaattattcatacatacaacatacataactcttatataaaaaaacctaaaataaaaattcgctggccctctttttacaacctaattactgtaaaaaccctgtcaataccaaacttattctttttgcaccccataattcatttcactacctctcgttataaaaaataggcccttaaaaaaccttcttcccaacaaatttacagcctttatggaaaatcccactttccct

SEQ ID NO: 332578 - DNA, 210 bp, Zea mays
ggcttctcctccccctccggttcgggttcgggttcgtgaggttctccggagttcgggttcgtgggtgagcggatcgagatggcggcgtcggatgttgagtaccgctgcttcgtcggcggcctcgcctgggccacggacgaccactccctccacaacgccttcagcacctacggcgaggtcctcgagtccaagatcatcctcgatcgggag

SEQ ID NO: 332579 - DNA, 134 bp, Zea mays
attcttgttgctgctaacatggatatatatcttattgtgtctgctaacatataaatcacatattttcccaatactgtttgcatctcgaaccagattgttcaatatcccaactcgacacatacgtcatattcggc

SEQ ID NO: 332580 - DNA, 95 bp, Zea mays
caagcatcaccggcaggagctctgggcagcgtgcgcacgtggggtacctatctcgctctgctagcctacgatggctgatcaccaccggggtgcga

SEQ ID NO: 332581 - DNA, 354 bp, Zea mays
caagcaacatagaaagtggaatccagtagcaacaacagagcaacaatggcgaccaagatattttccctccgtatgctccttgctctttctgcatgtgttgctaacgcgacaattttccctcaatgctcacaagctcctatagcttcccttcttcccccataccttccatcaatgatagcttcagtatgtgaaaacccagctcttcagccctataggctccaacaagcaatcgcagcaagcaacatacctttatcacccttgttgtttcaacaatcgccagccctatctttggtgcagtcattggtacaaaccatcagggcacagcagctgcagcaactcgtgctacctgtgatc

SEQ ID NO: 332582 - DNA, 265 bp, Zea mays
cgtcgccaccacctctgactttacctcttctgactatcattccctagcgatgcatatactataaatctgctatgcaccccaggtatctgtgtatatacatcccatgcacccttcacataatgtcaacttagaaaccctgccctcggactctatttgtgctgtcttaatacatacggtatctttcagaactgccaaaaccagagcagccttgtgatgtctagaggagctctccgctcagtgacggcacatgagtgtgcactataga

SEQ ID NO: 332583 - DNA, 261 bp, Zea mays
gatcacactcgtagagagaaggaaaaatatccccaaaccctagctcccgatctcgatggcgaaccctggcgtcttcttcgacatgaccgtcggcggcgccccggcgggccggatcgtgatggagctgtacgccaacgaggtgcccaagaccgcggagaacttccgcgcgctgtgcacgggcgaaaagggcgtgggcaagtccgggaagccgctccactacaagggctccaccttccaccgcgtcatccccgagttcatgtg

SEQ ID NO: 332584 - DNA, 285 bp, Zea mays
cgaccgtcttccacagcccagctcacgcacaactttccttgcccttttcttcgactctaccccatctcgcgggcatgggagaccccacccgcgcggggagcagccgggctcgagatcgcacccgctgcggtgcgggcccaagcgggagctgtccgcgtatattggcgcgcgacgacccacgcgggggcgctggaacctcgggcacgcttcacgtacggcgccgaccgagcgaccccgcgggcgcaggcgagctcgcgcgctcagtcgcgcgcgcgcatgccgctc

SEQ ID NO: 332585 - DNA, 508 bp, Zea mays
  unsure (1)..(508): unsure at all n locations
cggaattcccgggtcgacccacgcggtgcgttcttaccccataccttccatcaattatagcttcaatatgtgaaaacccagctcttcaaccatatangcttcagcaagcaatcgcagcaagcaacatacctttatcgcccttgttgtttcaacaatcgccagccctatctttggtgcagtcattggtacaaaccatcagggcgcaacagctgcagcaactcttgctacctctgatcaaccaagtagctctggcaaacctttctccctactctcagcaacaacaatttcttccattcaaccaactgtctacactgaaccctgctgcttatttgcagcaacaactattaccatttagccagctagctactgcctactctcagcaacaacaacttcttccatttaaccaattggccgcactgaaccccgctgcttatttgcagcagcaaatactactaccatttagccagctagctgcagcaaaccgtgcttccttcttgacacagcaaca

SEQ ID NO: 332586 - DNA, 281 bp, Zea mays
  unsure (1)..(281): unsure at all n locations
tcctcccctgnttaacattaacaaacactatctatataaatccaagacaccttacctagctgctgcccccaaccttaaataattttctcctcctctctaacaaacaactatctttgtcttcgcttcctcccttcctgaatttactaataatatataacatccatttactgctaacaaccatttctcaatgacatcttcattactcctccttcttctactgctacctctccttttgaccttttaaaatactcttattattgcttctcaactctttcatttca

SEQ ID NO: 332587 - DNA, 479 bp, Zea mays
  unsure (1)..(479): unsure at all n locations
cggaanncccgggtcgacccacgcgtgcgcaactagcaacataaaaggcacaatagtgtaccaacaatgtgcagccaaaatattttgcttccttatgctcgctgggtctttctgcaagtgctgctaccgcaaccattttcccacaatgctcacaagctcctatagcttcctttcttcccccatacctctcaccagcggtgtcttcagtatgtgaaaacccaattcttcaaccctacaggatccaacaggcaatcgcagcaggcatcttacctttatcacccttgttcctccaacaaccgtcagccctattacagcagttacctttggtgcatttgttggcacaaaacatcaaggcacaacaactacaacaacttgtgctaggaaaccttgctgcctactctcagcaacagcagtttcttccattcaaccaactggctgcattgaactctgctgcttatttgcaacaacaactaccattc

SEQ ID NO: 332588 - DNA, 259 bp, Zea mays
  unsure (1)..(259): unsure at all n locations
tttgccctagcctcggttctcagttatctctaaaaaaaaaaaaaaaaaaaaaaaaaaaaaaaaaaaaaaaaaaaaaataaaagggggggaaaaaaaaaaatttttttaatatatagnccaaaaaaaaaaaaaaaataatttttaactccataaaactaaaacggccatgctctaaataaaaaaaataaaaaatacccaacccttctaaaaaaaaacaataaacaaatactaaaaaaaaactttatagggaatccttttt

SEQ ID NO: 332589 - DNA, 328 bp, Zea mays
  unsure (1)..(328): unsure at all n locations
aaaaaaaaaaaaaaaaaaaaaaaaaataaaactggttttttaaaaaaaaaaaaaaaacccaaaangggaaatttttaaaaaatttttatggcccaccttcctccccttcatacaaagtcgccccccttttatagggtcccaaaatttcattcccttccccccgggttaacaacttcttttctgtttaaaaccatgccaatacaaaactcaattttttaaaaccacatccctttaaaaccacctgcctaaccaactaaaatccccttacaaatcaccctttttaacaattttccattataaataaaaaatccaaccccccttttatttc

SEQ ID NO: 332590 - DNA, 60 bp, Zea mays
ctctgcgcgcgctgcatcggcgcccgccgggaggcggatcccgcccgcctcgtccatatt

SEQ ID NO: 332591 - DNA, 143 bp, Zea mays
ttttttttttttttatattttttttttttttccacaatttaaatctttcccactaccggggggggtttcttttacggggtcgaaaaacacttttccgataaatcaatctaataaaaaacaatcgatatatttaatacattaag

SEQ ID NO: 332592 - DNA, 166 bp, Zea mays
tagctactacacctttcctatcctatgttctcagttaactttctggcagacagtatttaagttttccttcgtgtaatcgcctagatatatatatttccatttctaaaaaaaaaaaaaaaaaaaaaaaaaaaaaaaaaaaaaaaaaaaaaaaaaaaaaaaaaaataa

SEQ ID NO: 332593 - DNA, 207 bp, Zea mays
aaaaaaaaaaaaaaaattttttaaaaaaaaggttaaaaaataagggcaaaaaaactccaattatttttaaatataaaaaaaaaaaacttttccaattatattatttaataaaaaataaaaaaatgtaaaaaatcttttttatatgttcgccccactcaaatttataggaaaaaaaaaaaattctacttttttttaataaaactttta

SEQ ID NO: 332594 - DNA, 224 bp, Zea mays
  unsure (1)..(224): unsure at all n locations
cccacgcgtccggttggcttctcctccccctccggttcgggttcgggttcgtgaggttctccggggttcgggttcgtgggtgagcggatcgagatggcggcgtcngatgttgagtaccgctgcttcgtcggcggcctcgcctgggccacggacgaccactcccttcacaacgcctttagcacctacggcgaggtcctcgagtccaagatcattctcgatcggga

SEQ ID NO: 332595 - DNA, 339 bp, Zea mays
tttttttttttttttttttttttttttggtttttttttattttttttttttttaaaaaattccgccttttttataataaaaaggaggcccccacaaaacccctttttttcaaaaaaaaaaaaaaaaaaaaattctcccattatccttcccccaacaccccgggaaaaaaaatttttttttttttaccccaaacacaaaaaaaacccttgtgtttaaacccaaacatttctttttttctacccccccacacaaaaaacaaacctttttatattttttcctcacaccccacctaaaaaaaaaaacaaaaaatttctcccccccaaaaaaaaatcccccccc

SEQ ID NO: 332596 - DNA, 117 bp, Zea mays
tccggaattcccgggtccacccaccgcgttccgaaaaaaaaaaaaaaaaaaaaaaaaaaaaaaaaaaaaaaataaaaaaaaaaaaaaaaaaaaaaaaaaaaaaaggaggtttgtttt

SEQ ID NO: 332597 - DNA, 216 bp, Zea mays
  unsure (1)..(216): unsure at all n locations
ggannnccggtcgacgcgggcgtccgaaaaaaaaaaaaaaaaaaaaaaaaagaaaacaagattattataaataaaaaggaaaataaaaatttatggggggtgtatgtcttataggacgaccacttcctatcccagcacctgatctactgtatatggcattccaacagcaagagacgtgtttcgtaacctgcagaagagggggaaacttctgttaaa

SEQ ID NO: 332598 - DNA, 153 bp, Zea mays
aaaaaaaaaaaaaaaaaaaaaaaaaaaaaaaaaaatatataaaaaaaaaaaaaaaaaaaaaaaaaaaagggcgggcctttttaaaaaaatccaggcttacttacccttccatgcaacctcataacttttctataccttcacctaaattcaatt

SEQ ID NO: 332599 - DNA, 294 bp, Zea mays
  unsure (1)..(294): unsure at all n locations
aaaaaaaaaaaaaaaaaaaaaaaaaaaaaaaaaaataaaaaaaaaaaaaaacaaaaaaaataaaaaaagggcggacttatttaaaaaaatcaaagcccgccaacacatatattcggctctcacccttattcaattctattctcccttnccttttctctcttgctccattgtttaaacctggggagacccgcaaatttatttcattttacctaactttaacccttttgccacctttcaaaacttttgcaaattccccattatatccacttttcccaatctttctttttatttaaa

SEQ ID NO: 332600 - DNA, 141 bp, Zea mays
  unsure (1)..(141): unsure at all n locations
taaaaaaaaaaaaaaaacaaaaaaaaaaaaaaaaaaagtttaaaatggtcttctcttattaaataatccaggctgtacgtacatataaatacaacagtcctccctcttctatcatntctacctaaattcaattcgctcccc

SEQ ID NO: 332601 - DNA, 266 bp, Zea mays
  unsure (1)..(266): unsure at all n locations
taatggtggcctgcctaccataataaaaataatatataccatgtaagccagacaccaataaacagantctttttacaaacgtgaatcacatccatgntgnccggctaacatggtatatattatctttattgtcgtctcgctaacatgataaatacacatatttttcccaaatactgctctgtcatcacgaacccagacatgttcaaaagccctaactcagacacatacgtcatattctacgaggccaagatcaatattaccccata

SEQ ID NO: 332602 - DNA, 266 bp, Zea mays
caagcaacatagaaagtggaatccagtagcaacaacagagcaacaatggcgaccaagatattttccctccgtatgctccttgctctttctgcatgtgttgctaacgcgacaattttccctcaatgctcacaagctcctatagcttcccttcttcccccataccttccatcaatgatagcttcagtatgtgaaaacccagctcttcagccctataggctccaacaagcaatcgcagcaagcaacatacctttatcacccttgttgtt

SEQ ID NO: 332603 - DNA, 283 bp, Zea mays
aaaaaaaaaaaaaaaaaaaaaaaaaataaattaaaaaaaaaaaaaaaaaaactaataggagagcatatataaaacaatctaaagaaaccaaactaacatacccttgcatgctactaaataactcttatctagtttcaccaaaattcatttcattggccgtcgtttaacaacgtagtactctgataaaaccctgtctttacataccttaaatcgccttgctacaaatccccattttgccaactggcttaatttcaaaaaggcattcaccgatcgacctttccat

SEQ ID NO: 332604 - DNA, 240 bp, Zea mays
cccactcatcctgcgccactctatatgccctctaccatttgctccacctcaatgccctaccctacaaccagcccttcctaaacatgctcagcatgtactaccactatcatatcacctaccagttcacatgcaccaccatcacattactacccttcacagctcctcctctctattacatcacactctcctacttctaattcctctccccacactccaacctcaatttctaccacctcttct

SEQ ID NO: 332605 - DNA, 130 bp, Zea mays
cccacgcgtccgggagggggagcaagcattttccgtccgtggaagaagatgtcttacgtagtgcctcttctgcactcgttgtgggcggtggaccatgccatcctcgccgaggaggagctcctattcatca

SEQ ID NO: 332606 - DNA, 335 bp, Zea mays
ggctggcttctcctccccctcttaccaagttcttctcgggttagggttccttagggttttgtggaggggcgatggcggcggctgatgtggagtaccgttgcttcgtcggcgggcttgcctgggccaccagcaacgagtcgctggagaatgccttcgccttctacggcgagatcctcgactccaaggtcatcaccgaccgggagacggtgaggtcccgcggcttcggcttcgttaccttctcctccgagaactccatgctcgacgctatcgagaacatgaacggcaaggagctcgacagccgtaacatcaccgttaaccaggcccagtcccgtggc

SEQ ID NO: 332607 - DNA, 263 bp, Zea mays
actccacccactcatccgaaaaaaaaaaaaaaaaaaaaaaaaaattaaataaaaaaaaaaaccaaacaaaaaaaaccagccaattaaaaaaaaaatacgccaacacaaaaaaaaaacaaaaaaaacaaaaaaaaacaaaaaaaaaacaaaaaaaaaaaaaaaaaaaaccccccaaaaaaaacactcaaaccaaactaacccaacaatccaacacaaaaccctttcaaaaacaaccccaaaacccaaacaaccccccaccaatc

SEQ ID NO: 332608 - DNA, 152 bp, Zea mays
gcaagttcaattgataacactgctgatgcctttttcctgatagcagaccactcttaatttgcgggcattcttaagggtagcagctgcatacctgtaaagttaaaggccaaatgtgggtttctgccttcttcagattttttttaagaagataa

SEQ ID NO: 332609 - DNA, 455 bp, Zea mays
  unsure (1)..(455): unsure at all n locations
cacgcatccgatgattaccaccaccagtagcagggctctgatctctcgaggtggcgggctcttcagggacgggtttcataatagtctggtgctggcgtccgactgctttccatgcacgtcgaggtcggacgaggacgcagagacatgctggccagtggctgcggccacaggccccatcgttgtggcaccagcgacgaggaggttgtagtcgagcagcgtggcgcgggtgtcgttccgcgtatggaggcactatccgctctacattcgccccatcgttccatggtagctaaggtacccgtaccaccaactctctgactctaacgatcaatcgatctgctttggctagggaggtctcgattggtagatgcatgttgagtgcttgcggtactgatgcggacngagcttgagagtcggattgatgcatattgtggttagcgattgactacttgtttgcc

SEQ ID NO: 332610 - DNA, 151 bp, Zea mays
cctatatgctccaacaagcattcttatcaagcaacatacctctatcaccctagccattttaacaatctccagccctatctatccttcactcatcattacaaaccatcatctcacatcacctccatcaactctttccacctatcatcaacca

SEQ ID NO: 332611 - DNA, 142 bp, Zea mays
ctagaacctactgattccttgtcaccatcttttcttctcctccaccacaacctctcggggagacttcttcatatgtcctttctactctccaccctctactattcatcttatcctagtccatacacccctacgattctcctat

SEQ ID NO: 332612 - DNA, 373 bp, Zea mays
gaattcccgggtcgacccacgcgttcgctgaagatgatacaacgtcagaagaggtcttcattatggagaacaatttgcctaatgatgtgggggaattgctaaattattgtaatttcgcaagagttccaacatgaccacgatcagtgcttgcaaacaggaatgtttaaccagctcaaaaagtaatcgatgtgttcgaactggtcaatccagttactcctgaagaaatgtcccatatggcaattgatagagaagctaacaccaattccataactaattttgaggaaaacagtaaagactagctctgtggtcaagaccaataacgtgcttaagaaattaatatctgcaatcaagttggctaatcaatggcatttca

SEQ ID NO: 332613 - DNA, 109 bp, Zea mays
gcagaaaccacaccactctactgacgcccttactagcatgtaccattttccttcagccatgagtaatttagaatactcacatcaacattcgtggccattggccatgttc

SEQ ID NO: 332614 - DNA, 255 bp, Zea mays
  unsure (1)..(255): unsure at all n locations
attcccgctggagccactcatccgaggatgacagaaaagaaactttatagttcgatgaatgggcagtttgccgtggttttntgataatttgtacttcgtctgttttcgcttctgttgtcgtaccattgtcttaatcgatttgtggattttgaagtctccttttaaaaaaaaaaaaaaaaaaaaaaaaaaaaaaaaaaaaaaaaaaaaaaaaaaaaaaaaaaaaaaaaaaaaaaaaaaaaataaaactttctaaat

SEQ ID NO: 332615 - DNA, 445 bp, Zea mays
  unsure (1)..(445): unsure at all n locations
tcgcagtctcgctccacaaccacaactattcatccactaccggctccctccctcctcctgagaaccccgaccgcgggcgaaccaaaccctagcgagcgaggcgatcagcgtccggcgaccggcgacagagcgcaatggagacgcgcccggcgccttgcgacctcgaggcggccgtgcccgcgggctccggggctgcaacggcggcggcggcgcagcaggaggcacccgcggcgaagaaagtggcggaggaggaggatccgcgcctgcgctgggccttcgtgcggaaggtgtacgccattctctccctccagttcgcgctcaccgcggccgtcgcggccaccgcgtgcctcgntccgccgatcccgcgcttcttcgccttcggcccccccgtcgtcgtctggtccacgtacatcgcgatcctnctgtccccggtcatcgtcatgtt

SEQ ID NO: 332616 - DNA, 174 bp, Zea mays
gaattcccttgtcgacccacgcttcctcttactctttagaaaaaaaaaaaaaaatattataaaaaaaaataataaaaaaaattaaaaaaagatattttataaaataaaataaaataaaaataataatattaaataaatacatatataaataataatatataattatacatatat

SEQ ID NO: 332617 - DNA, 171 bp, Zea mays
taactttttagaattaatttgtgtgatattgataatattttccacgtataaaaaattaaatggaaaggtattatattaatataaataaattaaaaaaataataataattactttacttctaaattaatccttatcttactttctctttcattcttcattttaatctttttt

SEQ ID NO: 332618 - DNA, 231 bp, Zea mays
acttctcttctacactccacacgaccgcctcattccaactgcatccaactcattctcacacatctcctcttcatacatcctccaacttcatccaccccaccaatatcttccacccagatacatccatctttcatactatctcaataaatccctttttcactattcaaccttcatccacaattttattatacctcctcaattacattcccataaccatttcactctccatac

SEQ ID NO: 332619 - DNA, 206 bp, Zea mays
cactcatccgaagaaaaaaaaaaaaaaaaaaacaagtttatttaaaaaaaaaaaaaaaaaaaaaaaaacagaaattttaaaaaaaagaaagcaagaaaaaaaaaaaacaaaaaaaaaaaaaaaggcccccccccctaaagaacccaacctaacgtacccatccatccaacatcataactcttcaatagagccaccaaaatccaatt

SEQ ID NO: 332620 - DNA, 338 bp, Zea mays
ctcggtcggattccggagccaggcgtccgcggacgcgtccagaccatacacggctttgttttcaaggactacccggagccccataggaggttttctatacacgtggggcgagcgtgaactggaacttcgctctaaacgacccaggcttatctcgccttgccttcatctacataggcgcacaaaagaacgtcctaccttcaatcgactggcctgccatctaccgcatggaccctgataaaacccttcagttcctcacgttaatcatgctggacttcattactctttctgacgacgccttactatacaacagcccgccctgctatgccatttacaacagt

SEQ ID NO: 332621 - DNA, 60 bp, Zea mays
aaaaaaaaaaataataaaaaataaaaaaaatttaataaaaaatataatataaaataaaaa

SEQ ID NO: 332622 - DNA, 129 bp, Zea mays
gttctgccgctctcgatctaacccacacgggcagagctcattatctactactgtgctaccaccttcaatacactaaaccttacttcatgttcctagtcctgcttaaggcccttgcctgttactagcacc

SEQ ID NO: 332623 - DNA, 170 bp, Zea mays
tcggtccgtgattcccgggtcgaccgacgcgtccgataggatcgactctgtctgacgctttcctgtttggagatacctgctcctgccgactaccgagagttatcctactcagtctgcgtgctggcacggccaactaggatatcaactaggatgagtcgaggaggaatggc

SEQ ID NO: 332624 - DNA, 137 bp, Zea mays
ggattcccgctcgactcactcatccgggttgctggtcacaaggacttccttgtatgaaatccttatctgaagcatcatctacgtacttctttaaaactacatcaccactcttaacttctgccaaccctacaccctta

SEQ ID NO: 332625 - DNA, 168 bp, Zea mays
ccggctctacccactcatccgcctccacctatttcctcacctcgttctactaactcaccacatatcacataaacctgaccattatataaaatacttacccccaaaaccatctaataactacaatacatacatacatattcccatctaatccaaaacacccttcttcaa

SEQ ID NO: 332626 - DNA, 225 bp, Zea mays
tccggtcgccacgcgtccatctcggctctcgagtccgacagatagagcgattcgaaatatcaaggcgcttaaagagatcacagccacacacctcctcgcatacccgcgtcaaaccacctgccgcgacccgtcagcaccatcaacgaaccagtctggcgcagaaagtcggacaatccaaagaccgcctaacatccaggaccatcccaatcttcagtccaagccccg

SEQ ID NO: 332627 - DNA, 358 bp, Zea mays
ctcttccgaaatgattccccatcttcagacgattacatttataacacaaatgctacttcaaatggatacgtttaattttaagattacacaggacatgactctctaagaatttcataaaataacaatcacacaatactaaagcactacttgcattaaacgctcactacaggaaacatgaagttgacaaagattagcactctctgcaaccactttcaaacaacaaataacatcatgaacttctcattaaactcacttcttacaacgatcatatgaatgaaaacccttaacttcattaccatgccaacaaatctcatagcatcaactactccctgaaacctacttaatgaaaaatgtacta

SEQ ID NO: 332628 - DNA, 92 bp, Zea mays
tcttcctcctctgttaggttctaccattataccttcggcgtccctccttccggtctgatcttttcttaaatggtctctccacaggattccat

SEQ ID NO: 332629 - DNA, 247 bp, Zea mays
attcccgtgtcgacccactcttcctcccactcttcctaaaaaaaaaaaaaaaaaatttaaaaaaaaaaaaaaaaaaaaaaaaaagaaagaataatttaacaacctttctaaaccatccaagctaactaactcatacatccaacataatatcatcacaaaaattaacaccaaaatccaattcacttacctcctattaacaacattaaaactaaaaaaaccttatcattacccaactaaatcaccttac

SEQ ID NO: 332630 - DNA, 217 bp, Zea mays
tcccgctgcgacccactcatcctatgagatttcaactgatcttgcttatatatctcacaagtttcagaaatttctcagaaatttatttaatactttgccatccccttatcttgattttctcctattcttttttctttttattctttttatatcttcttctcttattctcttatttttttttttttttactttttttcttatttattttctttttttt

SEQ ID NO: 332631 - DNA, 257 bp, Zea mays
ttcccgggtcgacccactcgtctcgatcgagaagtggcatagaaccgtctcctgctattcttctcaaagccactcccagatccttactgtgatgctcaatagaagagaggtgtccgccgtccccgaaacgatcaacgaaagacatgctcagactaatatcatcaagcttgcaaataatatgcatttctccattcccgagatccgccaattcaaagctatcacccaccatgacacttgcatgttccgacattaacgct

SEQ ID NO: 332632 - DNA, 380 bp, Zea mays
ccgcactcgtccgctgctcgcctctcgttccgaagcttctcctctcgcgtatcctacgcagttttttaaagacccggggagcggacctgttctaatctctcctctcatctctctctctctccttctattctatatcatctttttatgtctattttcattttttttctttctattctttattaatttttctttacttttttttctattactttttttattttctatttctcttttttattttttttttttttctcttttcttataatcttctttttttcctcttttttttttatttttcttcttattttctttctttctttcttttattttcttattctctttcttttatttctctcttctttatcctttttttatctttt

SEQ ID NO: 332633 - DNA, 300 bp, Zea mays
tcccgggtcgacccactcgtccggctgtgtgttcaaacagagggtacacttcatattgtctgatagaatacaaaagggaactttgtaagttttcagtcaagtaacttctgtagaattttaaaagagcaatactgtaactgaaatgttgctactactttacatcagtttcatcctggggcatataattgcaggtaccctatctatagaatcccaactggaccaacactcaaggatttggatgcatgtttcttgacatttcattacttatcaacacctaccaatgatactgatcccagttca

SEQ ID NO: 332634 - DNA, 192 bp, Zea mays
gacccactcttcctagtaggtccttaactactcatccatatcatgtgccttacatctgcacttattctcggctcgttcatttcaaatttttatatcacaaacccaatcaaacttaaataatatctatacaagaaaacattactcattaacttttacacaactccttactcataatttctataccctcacaat

SEQ ID NO: 332635 - DNA, 265 bp, Zea mays
ttcccgggtcgacccactcgtccgcggacgcgtgttctgactcgtgggcatttatatagagggtggaacctgaatctttacgtcggtcccctttagtacctcgtcatccaaaatcatatatggagatcatggaaacgatacaaaagggctagcgtccatactatatacagaatattaaccacaaccctccaaatccttatcaaccaatctcataaccccatatctcaccgaaaccacaaccatggtaaaaacatggtcaaggtaa

SEQ ID NO: 332636 - DNA, 382 bp, Zea mays
gattcccgcgggagccacgcagtccggggagacgatcccacctcgcctgttaatcgcatcccaagacttcaaccttcctttgcatcttgtgatacggttcgcatgtccgcgacagatccgggcaaacgggccgatgcagttcttcggctgctcgtcgctgacgtcggtcgcgctcaatgcttctttttttccttctttttctctataatttttttcttttttttatttttttttttttattatatttttttctttccttcttttactcttctttatcttttctctttctttttttattatttttttttttttttttttcttttattttttggtttattaatatttttttctttttattttttctatttttttattttttttt

SEQ ID NO: 332637 - DNA, 336 bp, Zea mays
ctttctctccttccttattaaggactttaatttccatctatcgctgcatttttatacattccagcagcccacaacttcacatctcaatatacatcacaattttaatccatttcacattttcaatcataccattgaattcttcctcaaccttcaaattctaattcctccaaatcatgattatcaaatatctatcctgaacattgtatcttttaaaacttcaaattccccatataactcatacttttttactactttttctaataaatcactatacatatcacttctacatattcacataattctcatcattccaaacaatttacttcctttttatta

SEQ ID NO: 332638 - DNA, 285 bp, Zea mays
ttcccggtcgaccactcgtccgagttgatcatttctgcattaataactctagtagttgattagttcttaggatcgtaaattaggtggtaggaatgtaggcaagtaccattccaaggaattgaaagagagctaagcctaaggaagagaatagcaagaaaaaaaggaaatgttcagtgttaagcttaatgttttgtcacgaggacacacttcatgcataattgttacgttctaaatttgatccatttggtcttgtgggtttgattacattacagttctgcacatacc

SEQ ID NO: 332639 - DNA, 230 bp, Zea mays
cacgcgtccgatggactttcgctgtatctgtatgatcgccagcttttatctcaacttcagccgggtggatcacaccagggaccacgtagtggtgcacgacgggtccgactgtagctgctatcatagtgctgcataggacgcgagccagtatctgtaaggatctatgtatgtctatactacgtcctactcgctgtgactcgtacgcttctcctccgtctgtgactgtcata

SEQ ID NO: 332640 - DNA, 188 bp, Zea mays
attcccggtcgaccgactctcgcaaagcaacctctatgacatctttactatcaccacacatactacaaacgtgattcttaatctccttcccttgctgacacctgatcagctgtcaacctgtcttgctcatccgtgatcatccaacacatctctccttccgaccatcctgtatagatctcttctcttca

SEQ ID NO: 332641 - DNA, 240 bp, Zea mays
ttccctggtcgacccactcgtccgctccgtctctcgtgggcgtggcactacttttatgccatcgctgccgccctactccaggttgccatatcatctgcggccccttcgcctgcgactatcaccatccatcataaatagcatcaagcactcgaacttacagcgagattgaaaatgatagaaggcaactacatcagatcgatccaagaagaccccattttccttgctgcatactatgtactc

SEQ ID NO: 332642 - DNA, 309 bp, Zea mays
ttcccggtcgactccactcgtccgctgactcttgggctccaactcactagtacttttccgcctcaatcaggggggcagttacctgtatctcttctcttagttgctctgactctattctttccaagtggaagaagaataggatgctgatgctcaagtgtaagctcctgaaaatgtgacatatatctacttaatcttatattagttacttattattttatatttttttatgtaaattacctttttttttattaattattatttatattattttatataatattttttctatttatttttttatatttttat

SEQ ID NO: 332643 - DNA, 186 bp, Zea mays
attcccgctggacccactcatccggactcctattagtgttccctctttattctaaaccttgaggcttgtgaacacacaagtaattttttctaacactcgtacctcttaattgtaactgattgccatctcataaacttcttatcaacatctctttttctcaagtgactgcgaattctatcctttttt

SEQ ID NO: 332644 - DNA, 160 bp, Zea mays
ggaattcccggggcgacccacgcatcctcgcctgaccagcaacggctgatctttttcggcaagcagctggacgatgatctcacgccttttttaatacaagcttggacagccagagcaccctccacttggtgctccacctcatgtgtggcattcaaatctt

SEQ ID NO: 332645 - DNA, 68 bp, Zea mays
ttttagtttgaattaagtacatttatgtaagagttatttgacagcgattatgaaatcgagaattatct

SEQ ID NO: 332646 - DNA, 406 bp, Zea mays
attcccgggtcgacccactcgtcctgcattgtctattcaaataattgagttttcatttaggtatttgacttcattcttattgagtcgaaattataaattatggtcttcttccatcactccaacatattttgaaaccaaccatgaatcaagaattagtttcttaatccctatatctgattcatttagactgtatcctactgcatatgatatattgttaggttctatctatgatccttcttactactcttcactgttcgatgatgtcctaaacaatgcatgcaatcatcaaggtgataaacaaaattttagtaatgacaattgttcaacatcttcatgccatacaccactacttaaatcttttgctaatgatgtttaaagttgactaaaaataccctttaacttctat

SEQ ID NO: 332647 - DNA, 288 bp, Zea mays
gaccgactcgtccggcatggtccattcaaataatcgggctttcatctaggtttttgtcttcattcttattcgttcgtattttttacatacatgtgctactcccatcactccaacatattttgaaaccaaccattaatcaagaattattttcttaagccctatatctgattcaattagactgagtcctactgcagatgatatattttgaagcttccatctatgatccttcttactactcatcactgttctaagatgtcctaaacaatgcatgcaatcattatggtgata

SEQ ID NO: 332648 - DNA, 183 bp, Zea mays
ttccctggtcgactccactcttcctgcttctgcttgctctggggggaaggagtgagttagagctagagagagatctagtataggatgtatctatttagtcctcgaacgaacatgttcgctgtcttcatctttcacctaccagtatatcactaattattttcttaaaccctatatctttttcat

SEQ ID NO: 332649 - DNA, 203 bp, Zea mays
cctctcacaaccatccacctactccatcctcaactaccgcttcaaaccatccaaactcaccctcaccaacaaaatccataccatactatccacacacgctctaaaccttctttcttaaaacgtactccattatctaccttcagttcgtgctcaccattgacttaaacaacaccgtataccatatcaccccgatcccactctta

SEQ ID NO: 332650 - DNA, 237 bp, Zea mays
aattcctggaccgacgcggtgcgcccaggcgttctaaaaccgagaagagaccattcctaaggaaaacaatcctgaaaccaatccgttggtctgcatgaggaatttgaggagcatgctaagaaggcaaagaccttgcctgaaagcacgagcattgagaacaagctgatcctttacggcctctacaagcaagccacggttgaagatttgattaccaatcgtccggccttattttaccaa

SEQ ID NO: 332651 - DNA, 259 bp, Zea mays
cgacccactcttcctgaccatccacattcatattcaacctattacttcaagtatagagtatagagctctacacggacgattatatttatacattttaaccaaccccaccaaaggtttcaaaatcacccaatgactccaaagaacataagaatgcaacactcaaagatcctaagaaagcaccaaatgattctaaaggactgaataaagcgcttaaagatcctaaagaacattaatcattccaagacccaaactaacatac

SEQ ID NO: 332652 - DNA, 161 bp, Zea mays
gattcccgctcgacccactcgtccgaagaaactgctgctgagatggtttactactcgcttttggtgggctcaaaaacttagttttcttttcaacctgcagcccacctccccctgctactaccccatcttcccctactacctcaatctcaagtactagaact

SEQ ID NO: 332653 - DNA, 233 bp, Zea mays
  unsure (1)..(233): unsure at all n locations
gttgactctngtccacctagttcaccatcatgaatgaaagatcagtgagcaaccggcggtgtctttaagactaatcgactgtgcgccctaatacaagaaagtcgtatcactcgatagcaaacccgcacatggagtcaaactgaatcggacncattcaaccaactgagaagagaccattcacatgctcaatctttaactcaaacttacctatctatcaactcacatcagagcgc

SEQ ID NO: 332654 - DNA, 428 bp, Zea mays
gattcccggctgcggcccacgcgtccgggccacctcgcctactcccacaccaactaggcgctcctccgccccaggtcgttgctcgtccaaattcgaggtgtgctggctgttccagggggtgcttgacaacctgggtcgtcttagccagcatcactttctgttattcaagttcgctaactagtttcttttttttatctattccttcaattacttgcttctattattctcttttttcttttaatattctatttatttttatctttatttatttttaacttctttatttatttacttcttttttcttctattattttttttttatttattttttttttatattttcttttttttttttttttttattcttttttctttcttatttttttttcttttttttatttttttattcttttttttatctctatttt

SEQ ID NO: 332655 - DNA, 128 bp, Zea mays
aaactactacacaaactacaacaacacatatacctaaacccacaaactcacacctaaatatacacaacaaaacctcaaccaaacaaccaacaacaccacaaacaacaacacaaacaaaaatatacact

SEQ ID NO: 332656 - DNA, 200 bp, Zea mays
atacccggccgcccttattcaatttttgaccactcaacacacatacttttatttacaaagactatcatacatacttcaaagcacttttataaaaaaacagccatacacttcaatacttaatacaccaatctctacaaacacaactaacttaccccatctacaaacattatcaaacttataccaaatctcttaattaaaac

SEQ ID NO: 332657 - DNA, 433 bp, Zea mays
cgcacgcgtccgaacttaattcggtttaatggaaatgtggcagcacacctcatgttgttgttggagttgctaatggttcagaggaaattgaagctgtcaatttgatagacgtgttgcgtagagcaggagcaaatgttatcgttgcgtctgtggaggagaatgttacaaattgtgacctctcttcatatgtttaatctaatagctgatattatattgtattaattcatttaaatgctatttttattttttttgtattgctttttgtttatttatttttctttatttttttatttattctttttttgtttttgttttttttttattatttttttttttatttattttttttttttttattatttattttatatattttttttttttttttatttttttttattttttttattttttttttttttatttttttttt

SEQ ID NO: 332658 - DNA, 87 bp, Zea mays
  unsure (1)..(87): unsure at all n locations
aaaaaaaaaaaaaagaattttatataaaaaaaaaaaaaanaaaaaaaaaggaagggaaaaaaaaaaaaaaaaannanaccccccccc

SEQ ID NO: 332659 - DNA, 450 bp, Zea mays
cccacgcgtccgaagaccagttcccttctcctgatcgtcctgttcctcacagcatcagccatggttggccttaccggataagcaggctgtccccgctgcacaggatactgcctttcacattgtttactttgactcgttttatttctctttatcttattattttctttttttattttttttttttttttttatttattatattttttttttttttttttttttttttttttttttttttttttttttttttttttttttttttttttttttttttttatgttatttttattttttttttttttatttttttttttttatttttatttttttttttttattttttttattttattttttttatttttttttttttttttttttttttttttttttttttttttttttattttttttttattttttttatttttttttcttattttttatttt

SEQ ID NO: 332660 - DNA, 452 bp, Zea mays
cagaagtggaaggaagcaggcggccactcatggttaagggacgcacgggacagcgctgcatgcgttacgttttttgcaccatcctcggatacaagaggtccaagtcgaaccagtacgagaccacgtcgctcattcagatcgaggtggtgaacaccatttatgacttcactttttctctttcttgcttctgtctgtcttttactttctttttatttatattctattttactttttattttttcttttttttcttattttttctttttctattttttttttttttttttttatttctttttatattgtttttttttttttttattttatttttttattctattttattttagtatttttttttttttttttttatttttatttttttattttttttctttattttttttttattcttttttattttttttatttattctttttttttttattat

SEQ ID NO: 332661 - DNA, 79 bp, Zea mays
ccaatcccaatccagccacgacccacgcatactcgcaaaacctcctctacatttccaactatgcacccctcctccactc

SEQ ID NO: 332662 - DNA, 224 bp, Zea mays
ccggattccagctacgacccacgcatcctaaaaaaaaaaaaaaaaaaaataaaaaataaaaaaaaaaaaaaaaaaaaaaagaaaaagaaaaattaaaaaattaaaaaaaaaaaaacaaaaaaaaaaaaaaaaaaaaaaaaaaaaaaaaaaaaaaaaaaaataaaaaaaaaaaaaaaaaaaatataaaaaataaaaataaaaaaaaaaaaattataattaaataa

SEQ ID NO: 332663 - DNA, 62 bp, Zea mays
cgatcgagccacgcgtccgagatgcctaagatggaccgatgcgatagggaaggatacagaca

SEQ ID NO: 332664 - DNA, 287 bp, Zea mays
cccacgccgtcccccacgcgtcccgatgaactcaaccctttcaacaagaaccataatcgaccggttcctttgttgtccctcccaaacttccccctgaatgaaatgccactctgcctaaccaaggttacctgttgcctggcctgccccgcccttctcccttggccctcttcctttctcctctccccgcgcgggtgtttgcgcgtgtttagagggccatatgccacctgtaaagcttgaacaataaaacatttgtgcacattcacatgtgtgaatttttttccttcttt

SEQ ID NO: 332665 - DNA, 73 bp, Zea mays
tccctctctacccacgcatccaaccttctcctacccaacctatcctctttaaatttctctatcctatccaaaa

SEQ ID NO: 332666 - DNA, 116 bp, Zea mays
ggcaacctccacctcagatttcgtcctcctgctcctcgccgccgccgccggcctacgtctgctccccggctcgctggcgtggcacagcagcaactgtgcaccgggcgcgcccggca

SEQ ID NO: 332667 - DNA, 395 bp, Zea mays
tcccggctcgacccacgcgttcaggatcctattgccctcacgctaccatttccgccaattcatcacagccaccagacttcgctcgccttacgtatacaccaacccacctccataaaccgtatgcacagccaccttaatggtatctcttcatcttctctttcctacaacaggactacttccatctagctcatgacagataccaccttatctacattttctcatcctgtattgctaattttatctccctatttcttcttttttatttttttttttttatttttttattttttatttttttatttttttatttaatattattatttgttttatttttttatttttatttttttttttttactttttttcttttttattttttttatttattttttttt

SEQ ID NO: 332668 - DNA, 225 bp, Zea mays
gacgcgctctgtatcggctcattaagcccgtcgttttttggtgtttttttatttttatcttttcttttttatttattttttttttttttttttttttttattatttatttttttttttttttttttcttttttttattttttatatttttatttttttttttttttattttattttttattttttttttttattatctttttttatttttttttttttatttttt

SEQ ID NO: 332669 - DNA, 436 bp, Zea mays
tgcccctgctcacgttcgccgggcgcttcctcttcgggatcccgaccatcctggccgtgaaagtctgcttcaaggctctgtccaagtggctgctgcccgttttgtgcatcaccctgttcattcttaccttgtcattctgctacttccagttctttatagcttacagctcatcttcaatatacttgtttttctcttctctttttcatcttttgcttttactttatttttttttttatgttttattttttttttttttcttttttttttttattttttttttttttttttttttttttaatgtttttttttattttatattttttttttttttttaattatatttttttttttttcttttttttattttctttattattttttttttattttttttttttattatttttttttttattttattttaattttttttttt

SEQ ID NO: 332670 - DNA, 122 bp, Zea mays
tcgcacacgtccgtgccagttccatgttacctcaagctaccctgtatctggcatacgtaggattgtcatcttccacatcataaccttcaacactgacatgcattctttaaatcttctattca

SEQ ID NO: 332671 - DNA, 142 bp, Zea mays
  unsure (1)..(142): unsure at all n locations
cggcggctcancancatcacaaccactgccctaagatggtgaagtttctcaagcccggcatggtcgtatttcttcttcaccncaccttccccnnccggaaggcggttatcgttcgcgtgttctatgatttcacctcttacct

SEQ ID NO: 332672 - DNA, 484 bp, Zea mays
  unsure (1)..(484): unsure at all n locations
ccaggacagcaaagaaaacgccagcgtcgactacgtcggcggcggcgacgataccggcncggtaccggcacctgctcagcaaggacccagcgaggcgaaggggaaagcgaaatcgaagcagcatacggcggagatggaggagaggcagcccgtggacgccagagtgactgtggagtacgaccaccgaggcgtctgttgggtctacttgagccttatgccttctcttgcttttattagctacaactcatttgctatctgatttctagttttttattttttactcttctttactcttttattttttattgttttgttaatattttatttactttatattatatttcacnctgtttttttttttttatttataagcccaannaaaaatggttattttcaattttttataacaaccaatttttaaattaattttttttattatatttttatttatatatatatttttttttttattttattttatttt

SEQ ID NO: 332673 - DNA, 86 bp, Zea mays
  unsure (1)..(86): unsure at all n locations
ggtccggaanncccggcgcgacccacgcatccgcaacaagactctacacaacctgttcttcgtctatatgaggctgggtctcttca

SEQ ID NO: 332674 - DNA, 425 bp, Zea mays
atcaaatacatactggctcactcgagtttccttcacccagcagttcgtaaccacctgctaaatgatcaaaaagatggccccctgcaaagtagcagcagccttactcctgttgatcacaacaatttccgtcaacaccgtaaccgggtcgcgatgtaacgctcaggagaagaaccagattgtgagcttgtgccaaatgtacatccagagaggaaccctcgttcagcttccatcccaaactgggccatgctgtgctgctgttatagagcctgataggtttcacagggtttatgcagatgaagtgcatttgcggtcttttttacccttgatacttttttaattattatctatcttttatctatttttttttatttttattgattacttttctctatttttgttttattttttattttttatctttttta

SEQ ID NO: 332675 - DNA, 417 bp, Zea mays
cgcacgcgtccgaagaccatttcccttctcctgatcgtcctgttcctcacgtcatcgtccatttctgccgatccggagaagcaggcggcccccgcggcacatgagactgccgtgcacatcgtgtacgttgaccgtccctaggacgctgaccctgatgagtttcacattctcaccttttattttttcctttttagtttacatattgtttttgtttctttgtttttattattcttttacttcttttttttttttttctttttttttttttttttctttttttttttttttgttttatttatttttttttttttttttatttttttttttttttttctttttttttatttttttttttttttttttttttttttttttttattttttttaatttttttttattatttttttttttttttt

SEQ ID NO: 332676 - DNA, 100 bp, Zea mays
taattggtgtaatggtatcgtattggttttttgagcattgagttactcatagtttctgatgtttttttattatcgttaaacttttaaaaatatttaaaat

SEQ ID NO: 332677 - DNA, 402 bp, Zea mays
taaaaaaaaaaaaaaaaaaattaaaaattaaaaaaaaaaaaaaaaaaaaaaagaaaaagaaaaaatataaaaaataaaaaaaacaaaacaaaaaaaaaaaaaaaaaaaaaaaaaaaaaaaaaaaaaaaaaaaaaaaaaaaaaaaaatcaatcaaataaaatacataaaaaaaaaaaaaaaaaaatataaaaaaatttaataaaaaaacaatataaaacaaaaataaaaataatataataataaataaaataaaaaaaataataaaaaatcaaaaaaaaattaaaaataaaataaataatataaaaaaaaaaaaataaaaataaaaataaaataaaaaaaatatataaaaaaaaaaaaaacaaacaaattaatataaataaataaaaaaaaaaaaaaaataaa

SEQ ID NO: 332678 - DNA, 307 bp, Zea mays
  unsure (1)..(307): unsure at all n locations
cgcactcgtccgtggagagcgagtgttagagttggaactgatgtgttttattcttncggtgggtttcttctgttcatataacatccccnaaccctgctggtcagataagatttgtgaacacaccttgcgactgagagagaaggcgtcttataatttgatatgaacaagaatcaacaatgttcattattaaaaaatattaacaaacatatctatttattttttattattattatctaatattattctctctttaatttattttcttattatttttaattttttcttctatatttacttttttattttt

SEQ ID NO: 332679 - DNA, 311 bp, Zea mays
  unsure (1)..(311): unsure at all n locations
tccggaanncccggggcgacccacgcgtcccaaaaaaaaaaaaaaaaaaaaaaaaaaaaaaaataaaacaaaaaaaaaaaaaaaacaccgaactctaaaaaaaaaaaaaaaaccaacccaacccaaaaaacaaaacaaaaaaaaaacaaaacaacaaaaaaaaaaaaaaaacaaaaccattggcccattctcaaatatacttacctcaacctccacacaatttaaagaaaaattcccatcacttcctactaaaaaaagaaccaaaatccccatttcaaaaacacccaacactaaaacaaccttaaaccaaa

SEQ ID NO: 332680 - DNA, 262 bp, Zea mays
  unsure (1)..(262): unsure at all n locations
gtccggaaaacccggcgcgacccacgcatccgcttcatttcaccatgtcnntcagcaatcgatttgctgnggccnccnccctcacctcggccgtttattttatatcttctccacacctcccaccanctnnanccaaaaaatactaaacaatatcacctttacatactttctataccattaacaattacctctattttttcaaaaactctatcttttatctctttatctttattcattattattttactatttttttaaattt

SEQ ID NO: 332681 - DNA, 101 bp, Zea mays
gcgactacaccctacaggtgtcagtcattcaatttccctgggtcccattagcatcatgccttcagaaccttatacgactctgttcagtccatcaaacctac

SEQ ID NO: 332682 - DNA, 432 bp, Zea mays
atcccgctcgacccacgctccgcccaccgtccgcccacctccgatcagttttagcatggattgctgataatctggctatggactgttattggaatcaaccatttgcatctcttttattctctaaagatattataactcattttaaagatctacctactattttcatcttttttttatttttttttattattttttttattttttttatttttttttatcctttttttttcatctttattattttttatttattttatttttttattttttttatttattattttatttttttttattaatttttttttttttttttttttatttcttttttttttttttttatttttttttttttatttttatttttttttttttttttttttttttttttctttttttttattttttttattttttttttatttttttttt

SEQ ID NO: 332683 - DNA, 96 bp, Zea mays
taatcaaactcctttcatgcattcaattataccaaaaacacataaacataaacgcaaagcaaccttttacaattcatgtcaccccatcaaacctac

SEQ ID NO: 332684 - DNA, 420 bp, Zea mays
cgtccccctgcatatactaacactgcaaaactgaaaagggtgatagcaaagtacaagtaggattgtgtacatggcagctgttatgtttttggttcttgcaaccatgtcttctacctccccatcattctgccaagctgggggctgcatcggctgcccacggtctccaccaccgccgtccgatgagacatgctactaggacctcaagtgttcggcttctatgtgccaccttggttgcatacacttgtgcttcattgtttctgtttcttactgttcttttatgttcttcttctttttactttgattcacttttttgctttttttctttctatttcttacttttttttctatatgtttttcctttttttttttacttttatttttttttttttttttttatttttttttctatttttttatttt

SEQ ID NO: 332685 - DNA, 271 bp, Zea mays
  unsure (1)..(271): unsure at all n locations
taaagaccccancatcaatcgttctgttcatatactgcttcatctgtgtgtggtttctgggttttctatctttcttccacanccatcccaagagcacaaaccagatttgtaccctctcaactataataatatagttggattccacccgcacacatatagctgacaatccttaccttacacccaatgcatataacaattaatatctcattcctctaaaaagagagcctaaagccctatttcattttcacccattactaattctgattaaacc

SEQ ID NO: 332686 - DNA, 283 bp, Zea mays
  unsure (1)..(283): unsure at all n locations
cgacaacaccaagtactacgagatcctcggtgtgcccaagtcggcgtcccaagaccgcctcgttaaggcctaccgcaaggcanctatcaagaaccaccccgacaagggcggtgaccccgagaagttcaaggagctcgcacaagcctatgaggttttgagtgatccatagaaacgtgagatttatgatcagtatggtgaaaattcccttaaggaaggaatggttgttggtaatttctttcctaattcctttttcatcaacatttctttcttcataattatttat

SEQ ID NO: 332687 - DNA, 70 bp, Zea mays
  unsure (1)..(70): unsure at all n locations
ggttcggaacccgctcgggccagcgtccgggctacagacgcgccaggcgtccttcagtagncgccggccc

SEQ ID NO: 332688 - DNA, 474 bp, Zea mays
gattcccgttcgacctacgcgtccggtcaaaggttgctgatgcgatggatgttctccacaatgtgtcccatcatcaaaactgaaacagtccgactattcagcttgctgcattatcactaaccgaaggcattatctcctaacttgaaagccataacaaactatcttcagtttgcaattgagtgatgtttccagaggttatctggcacatgacagtattgctccttttttttcttctatggttgtacttgagttctgttttcgtatatgcactcttctgtttactttcttttatgctattcatttatttttaatgtttttttctttttttcttttttgtttttttctttaatttttttatttttattttttttttattttcttttttttatttttttatttttttttttttttttttctttctttttttttttttttttattttttttatttttattttttttttttttttatttt

SEQ ID NO: 332689 - DNA, 428 bp, Zea mays
ctcttcagctcggtgctgtggatcttctacgcgctggtgaagaccaactgcgagcgtctgcttaccatcaacgccttcggctgcggcgtggaggcggcctacatagtcctctacctggcgtacgcgccgcggcgggcgcgcctgcggactctggcctacttcttcctgctggacgtggcggccttttcgcttcgtcgttttcttttctcttttttttctccttttgcttttcttcgttttgttctttggctttttttttttgtttttttcttgttcttttttcttttttttttttttttttttttttttctgttttttttttctttttttcttttttttcttttcttttttttctttttctttttttttctttttttttttttcttttttttctttttttttttccttttttttttgtttctttcttt

SEQ ID NO: 332690 - DNA, 440 bp, Zea mays
agagaaactaccaccaaaaggtcctactaaattcttgatcaacttgagagagagatggtatctgatcgccaaagaattgaaggggcacctcctccggtggttgagagttccatgccttcaccgcctgcatatgaagaagtcaatggtatattcatgaggaatacggtcgcatagttggtcgagaccgtggagtatttcctggcttatgcaatttaatcatatcgagcatagagcgacactgatctcaacctttcagcttgtgactacatagttgtttctaaaggtttcttacaattgatggtccgattgttaattcatttttagtgctttctttttcttttacttcttcattttttattctttttcttttttttctttgttttttttttctatttttttatttttttcttttttttttttatttttttttttgttttttt

SEQ ID NO: 332691 - DNA, 127 bp, Zea mays
ccacacgtcccagaacaacaacaacacaacttacattataaaaaaaaaaacaaaacaaaaaagaaaaagaaaaaattaaacatataaaaaaacccaacccacaaaaacaaaaaaaaacaacaacaaa

SEQ ID NO: 332692 - DNA, 89 bp, Zea mays
  unsure (1)..(89): unsure at all n locations
ccgggtccgacgccacgccgtccggcgngaacctacaacaccgcactctacactactccagtctgtgaatccgccccacccccgcaccc

SEQ ID NO: 332693 - DNA, 76 bp, Zea mays
cattcccaactccacccactcctcactacatactatataaactaccaccaaaattttctattaaatctttatcaac

SEQ ID NO: 332694 - DNA, 492 bp, Zea mays
  unsure (1)..(492): unsure at all n locations
tccggattcccgggtcggcccacgcgtccgagcaaatgcctccccggagctcatcatacaggctgatcccagaccatgctaggcgncgtcttgttctcactttattgcccaccgctggaccataggcgaaggctctatggtgtttaaaccttgctctttctgattcttcgttgtgccataggcaattcaaggtgtagaatctgaccattattggaaagccaaacacgagctggcgccaatgtgttgcataatgagaggcggtatgttcgtgcagccagccttttgccgcctgttttaatgcaaaatctgattttacttaagcagtgtgaggggaagtgtgttggtttattttattatttttttatatttttctatttatttttttttttattattatttttataatgtggttttctttttatttatactcttattttttttatttttttcttctctattttattttttttttttttttgtttattttattat

SEQ ID NO: 332695 - DNA, 97 bp, Zea mays
aaaaaccaaacaaaaaaacaacaaataacaaaaaaaacacaaaaaaaaaaaacaaaacaaaacacaaataaaacataaaaaaaaaaacacacatcac

SEQ ID NO: 332696 - DNA, 359 bp, Zea mays
gcgcacgcgtccggtcaagtcgaaaccagttctaatgataggatcagtgtatctctggagatacgttattgtttaccctaccgtatctgtaaagtaatgatgccggccgaactacctttcctaacgcgtttgggcagaaattcgttgctgtcaccatattttgactgttgtttttttctttttgtcttttgatttttttcttttttttctttttttttttatttttttttttttttttattttttttattttttttttttctatttttatttattttttttttttttttatatttatttttttttttttgttttttttatttttttttttttattttattttttatttttctttttttt

SEQ ID NO: 332697 - DNA, 131 bp, Zea mays
ccttattccctctcgacccactcatcctaaaaaaaaaaaaaaaaacttttaattttaaaaaaaaaaaaaaaaaaaataagaaaaagtataattttaaaaattttaaaaccaaaacaataatatattataat

SEQ ID NO: 332698 - DNA, 414 bp, Zea mays
tcggtctcggattcccgggtcgactcacgcgtccgcccactcgtccgggcttgcgtccggttattcccaggtgtcagtatggactggttttgtttgtattccattctactgtttcacaagttacatgtatatttatcgagtctattgaatatagttcttattatcatttttcatgttcaatctctttttttcttgatcagatcaattcttttctttaattatttttttttcttttttaaaatttttttatatatttttttttttttttttttattttttttttatttctttattctttttttttttatctattttttatattttttttattttttttttttattttattatatttttatttttttttatttttttattttttattttattttttttatatatatatttatattt

SEQ ID NO: 332699 - DNA, 124 bp, Zea mays
  unsure (1)..(124): unsure at all n locations
agacattatcacgtattgcttcactgttacatgcagcgccatacccaaccaggatctgctgtgttttactattaccaccaccacctcnaatccaanacctacacttgcacttccaatacctacc

SEQ ID NO: 332700 - DNA, 243 bp, Zea mays
agtcacatccatcatccatccttgcttccaagcaccaactaatcaaataacgagcagccttattaaaaattactcaccatccacaaacaaaaatcaacaacctcacttctaccttctactgatactgacactaacaattgcatccaatctgttctctcttcataaagaaaccatcctccaaatctaattcttcttctccctccaaaacttttacatcttttcactccataccccatctttttt

SEQ ID NO: 332701 - DNA, 446 bp, Zea mays
gccatccccaaatgctaagcaagcgttctgcgtcgtcgcttcgcttgctcgggctcgttgtgtaacatatccagcttatgaataaattatgtggatcaaaaaaaaaaaaaaaaaaaaaaaaaaaaaaaaaaaaaaaaaaaaaaaaaaaaaaaaaaaaaaaaaaaaaaaaaaaaaaaaaaaaaaaaaaaaatatattaaaaatatacatttttataatataaaaaataaattttttaatttatatttaatattttattttttattattttatttatattaatatttttatatcttttagggggtggggtagttatttattattaattatatatttgttgttatcccttcaaatcataaaaaacacaaaaaattacatctatttctttttatttttaaataattttataattatatccttaaaattaattttctctatatctatttta

SEQ ID NO: 332702 - DNA, 438 bp, Zea mays
cccactcttccgaaaaaaaaaaaaaataaaaaaaaaaaaaaaaaaaaaaaaggaaagggttaaaataaaaaaaaaaaaaaacccaacccaaaaaacccccccaacaaaaaaaaacccaacaaaccaaccccaccaaaccacaaaaaaaccccacaaaaaaacccccccaaaaacaaaaccccacccccccataccccccccccaaccccaaaaaaacccccccctccccccaccaaaaccccctaccccccatccccccacaccccacctcctaaaaaaccccaaaaactcccccccattcccccctgcccaccacaatcccacccccaaaaatccccacaaaacccccccccataccctcccctaaaaccccccccccccctcctctcccccccccccacctaaccccaataccccccccccaaccccccaaccccc

SEQ ID NO: 332703 - DNA, 438 bp, Zea mays
  unsure (1)..(438): unsure at all n locations
tccgtccgnattcccggctcgcccacctcccccacctcctcgacctttgcttactctacaaaacctcccagggcaggttgtttaatataacttaccncaaagaagttntttattttttcatattcttctcatcttttaatcaatcttttttttttttattctttctttttattttattttttattttatttttttattttcattatttctttctttatatttctttctatattttctttatttttattttattattttttttattttatttaatttttttatttattttaatctaatatttcatttctattcttttaattttttcattataattatcttttaatttttttttttttattctaatttttttttattttaatttttctttttattttaaatattaatactattatttatatttattttattatctattta

SEQ ID NO: 332704 - DNA, 144 bp, Zea mays
  unsure (1)..(144): unsure at all n locations
ggtgtctttacatgcatgatccacgttaaccacactggctgcctttactcatggttgatcacatcaggggcactttgcatctggggctgnttcttcgaccaacttctcaaactgagttgatcgtttactctgatgtcgattggg

SEQ ID NO: 332705 - DNA, 247 bp, Zea mays
  unsure (1)..(247): unsure at all n locations
ctcgcgctctctcncgggggggttctttttcngtttnntcncccnttcnnnncnttnttttncttttttttttcttttctttttttttttttttttcttttttttttttttttcttttttttttttttttttttctttttttttttcttttttttttttcttttttttttttttttttttttttttttttttttttttttttttttttttttttttttttttttttttttttttttttttttttttt

SEQ ID NO: 332706 - DNA, 63 bp, Zea mays
cgtccgattcccggtcacccacctccggttgcttgaggatgattaaataactgcctcctcata

SEQ ID NO: 332707 - DNA, 266 bp, Zea mays
cggactcttgggccgcgcgctttgctctggcgagaagggcgtgggcaagtcggggagtctcgctccactacaagggctccaccttccaccgcgtcatccccgagttcatgtgccaaggcggcgacttcacccgcggcaacggcaccggcggcgagtccatctacggcgagaagttccccgacgagaagttcgtgcgcaagcacaccgcccccggtgtgctctccatggccaacgccgggcccaacaccaacggctcccagttcttc

SEQ ID NO: 332708 - DNA, 275 bp, Zea mays
aaaaataaaaaaaaacaattcaacaaaaaaacaacaaaacaaaaacacaataccaaaaaacaaataacaaaaataaaccaaaaaacaaaaaaaataaaaaaaaacaataaacaaaaaaaaatacaaacaaacaaacacaaaaaaaaaaaaccaaaacaaaaaacaaaaaaaaaaaaaatccacacacaaaaacacacaaaaaaacaacacacacaaacaaaaaaaattcaaaaaaaaacaaaaaaaataaaacaaacaaaaacaacaacatacac

SEQ ID NO: 332709 - DNA, 158 bp, Zea mays
  unsure (1)..(158): unsure at all n locations
caagaacccccaccatccccactcgcctgcagatcgattcgcgaaagagacgggcgcgttctcatcttaccgttcccnnaccccccctctcctcgctgactcggctcccctcctccgccgtcgcctgaagctaagcaagttgtgaccacatattcatt

SEQ ID NO: 332710 - DNA, 121 bp, Zea mays
  unsure (1)..(121): unsure at all n locations
tctgcaagacggcctcggccaccattttcagatggtgtagcgcggcaacagggacggtggcactctagccagcaccaaccccccaaccgccattgcnaacaccttcctggtgcccataaac

SEQ ID NO: 332711 - DNA, 56 bp, Zea mays
tgcaatattgataacctgaaaaatacatatgttttaaaatgtacaaccatctaata

SEQ ID NO: 332712 - DNA, 51 bp, Zea mays
ccttattcccggctctacccactcttcctggagtctttctcctccctctcc

SEQ ID NO: 332713 - DNA, 394 bp, Zea mays
ggaagacacacaacgccaccatcatctccgccaatgacagtacttttacaaagtgggcaaggaaaacctacctgtcagccttcctcacctgtcacagcagatttgttcaatgcggcgaaaagtttggagttcggatccttggggccattctcattgggacttccctcaacctcgacacagtttgaggaagaattcccagcgcttcctactagaaagagagccgaaggccccatttcagtggcgcccagcgctaaggctgttgaaaccaaaagcaggtcagaagagagtgaagagatgttccgactgagaaatgaatctgatttccctcccctccaagctggctgccgctgagactgacaggacgtcgagataatccatgctaatcgtaatggta

SEQ ID NO: 332714 - DNA, 158 bp, Zea mays
ttcccggtcgacccactcgtccgcagcatttatccttgctaggcttctttgtctacaaataaacatggtatttttcaaggtagtcctttttttactatctcttgagaagtttatttttattattttacatttcataacattgttatatataaactgtt

SEQ ID NO: 332715 - DNA, 139 bp, Zea mays
tccgcgaatttgctattggctcgttctgcccacgaccccggacgctatactttcagagttcagactcacaatcgccgggagccaccgcaattcccgccacacgtctgccgtcgacgagttggagtactgcgagttgtgc

SEQ ID NO: 332716 - DNA, 280 bp, Zea mays
aaaaaaaaaaaaaaaaaaaaattaaataaaaaaaaaaacgccgcccccccttggaaagtatacattattacatcctccatcctacaacataattattctataatatcaccaaaaaaaaataaactacccgccattttacaacaacttcactactaaaaaaaccccatcaccaaacaaaataatcttctagcaaatcatccttttttcacctgctttcataataaagaagaccccaccaatcatcattcttaacaacatttcatcactaataataaataat

SEQ ID NO: 332717 - DNA, 265 bp, Zea mays
  unsure (1)..(265): unsure at all n locations
catggcngctggcgtggccattgcctactgcggcgcagaggcatcgcctncgcncgcgacggtcctctgtgcctcaaaangcccgtgcggcctttatcctggtgctatctcagttatggcaagtagtttcatggcaagttgaacatcttagcagaaaagtgccatgaatagtatgtagtatgtacgcttatgtttgtaacaatataaaaatatatatatatcattagctgcaaaaggaggtcgttttcttagaccttattatttt

SEQ ID NO: 332718 - DNA, 343 bp, Zea mays
  unsure (1)..(343): unsure at all n locations
taccgtccgnattcccggtcgacccacctcccgaccctggtgcaagattaccttcggaacaattgtctttatagataaccggtctttccttagatactttatacagtcnaatgccgcattttagtcgatctttcttctccagttgctgttggtgctaggaggccttgagctgttgagggtacttgccctgcntntattatgacgtatatgtacaagtctttgtgttgacaattacacggtgtttttaatttcagtgatacacttccagtccttcatacgtacttcctggatgtttcaatttgcattctagttagatattgatccatctgttctatattaaaat

SEQ ID NO: 332719 - DNA, 238 bp, Zea mays
  unsure (1)..(238): unsure at all n locations
taaaacacaaaaacacaaaacattaccttatacaacacaaaaacataaaacagcgcgccgcttcctttttaaaaaaacacaaacctcccccccaaccnccctcctaaaactatccaacctaactcacccattcatacaactacaaaatcacctatacacaaaccaaaaacaaacccatttaccaattactaccaacatcttaccaataaaaacccttacctaactcaccttattctcc

SEQ ID NO: 332720 - DNA, 52 bp, Zea mays
aatagaatggcagaaaacctaaacgttaggatggcgaaaagagaaaagaacg

SEQ ID NO: 332721 - DNA, 106 bp, Zea mays
aaaaaaaaaaagaaaaaaaaaataaaataaacaaaaaaaaaaaaaaaaaactggaaaggtaggaatacacaaataaaaaaaccacaccaaacaccaaaccaacacc

SEQ ID NO: 332722 - DNA, 266 bp, Zea mays
tcgtactcatgggctgactcatttgttttaaaaaaaaaaaaaaaaaaaaaaaagaaaggtaaaattataaaataaaaaaaaaaaaaaaaaaaaaataaaaaaaaaaaaaaataaaaatttaaataaaaaaaaaaataaaattaattatttttattttatcttatataaaaaaaaaacaattaaataaaattaaaaacttaatttctatttattatattttctttattaaattaaatctttttttataaataaattttttttttata

SEQ ID NO: 332723 - DNA, 62 bp, Zea mays
aaaaaaaaaaaaaaaaaaaaaaaaattaaatttaaaaaaaaaataataaaaaaaaaaggaag

SEQ ID NO: 332724 - DNA, 330 bp, Zea mays
actcggtccggaattcccgggctcaaggaaacctttatccatggctggaggtatcatactacttctgcttgtcatccccctcgtcgtgagaagggaatggagtgtcatgggggagagatccaactcgttctcacaggactccaataattctagccctgctgaaaacaaactcgaaccaggtcctcttttcatattggttatattggttatttattagggatcagtgagcttcgaattgagtaaatctgtaattacttctacactactaattatcattatgtgactgctcgtaaaggtgaaaagtccttcgcatcggaagcatactgtgag

SEQ ID NO: 332725 - DNA, 369 bp, Zea mays
aaaaaaaaaaaaaaaaaaaaataaaaaaaaaaaaaaaaaaaaaaaaaaaaaaaaaaaggtaaaaattaaaaaaaaaaaaaaaaaaaaaaaaaaaaaaaaaaaaaaaaaaaaaaaaaaaaaaaaaaaaaaaaaaaaaaaaaaaaaaaaaaaaaaaattcccctttttttccaacttttttaaaaataataataaaaaacccttaaacccaataaaaaaaaaattatccccctctccaattttttttttttccaaaaaaaaaaatcaaactccctttccttctacttttttcttttcctccttttttatcttaaaataaaatcttttttatcccccctaaagaactcttaaaatattttttttttttctct

SEQ ID NO: 332726 - DNA, 311 bp, Zea mays
agagagaagaatgcacacaagagtgattccaatcacaagaggacttatggaagcgttgctcgatgtactagtgcatcacgtgatgatcaggtgacagttcgagatggatattacacgaatgaagcacaagaaggatcatggcatgctcagaatgagccaggccttctgtatactgaaggaattcacaaattcatttgcggcaaaaacatttgcgacgaacagaccgttccagcagaacacagtagacacgatgtatgtcagggaaaactagaagaaattaaacgagggaaagaacatatcaaaatgcccca

SEQ ID NO: 332727 - DNA, 184 bp, Zea mays
tctacccactcatcctcgatattcttactataaaatatcacatatttaatccaacctttcacatatacaacacttggcaatttcaagatttctatactactcctctacattatcaaacatttatacaatgcaaaaatactaactcttgcaacaactttcttttaatcttatttatatattattt

SEQ ID NO: 332728 - DNA, 159 bp, Zea mays
tctcctattccctctccacccactcttcctcgccagtccacccattccattccacttccttctctcacaatccactctaactcacactgacctacactacacattcatatcatgcttacactttccccatccccatcctcctcacatccaacccatctc

SEQ ID NO: 332729 - DNA, 452 bp, Zea mays
  unsure (1)..(452): unsure at all n locations
cgagcatagatctcgtgctcgcctcctttattctgcacagcaacgcatcagccttgtntaaccatctcgccgccgccacaccacaatccacaacccgtcgaagcgaagcaagcaatggccggagtcggatcgaaggccctcgccgttgccgccgttctggcggccgtctccttctcggtggccgccgcggccgaggcgcccgcgcccagccccgtctccgtcgtcgtcgcgtggttttttgtttttttttttttttttttgttttttttttcttgttttttttttctttttttctttcttgggtggggtggtttttttctttttctttttctcttttttgttttttttttgttttttttttttttttttttttttttttttcttttttttctttttttcttttttttgttttttctttttttttttgttttttttttctttttttttttttt

SEQ ID NO: 332730 - DNA, 253 bp, Zea mays
gcgcggcaggaggacgttctgaaacacgagtcactgggctgctacgtcacgcactgcggcgagaactcggtgctggaagctgtgctgcaaggggtccgcatgatctgctaccctgtctccgcagaccatttcgtcaactgcgcctacgttgttaacttgtgttaaagcatgagtggacctgcggatcagatgacagtgaactgcgacgcgccgctcttaatgcggcatgcgctgctacaagtggaggactttt

SEQ ID NO: 332731 - DNA, 262 bp, Zea mays
  unsure (1)..(262): unsure at all n locations
tgccgtcttgctctccctgaggtcccgatccggcattctcgcntcgcgccgatggtatgccaaccttgctctcgaattttggcgaccccacattcccacggcgcttgaagaaatcctagccccgtgctgccgcgctgcagacggcacgcacggcatccatggagaacgacgcgaaggaggcgaggcaggggcagcacagggtgttcccgtgggggatgctcaaggtgttcctgctgctcggcttagggctgtccgcggccgg

SEQ ID NO: 332732 - DNA, 369 bp, Zea mays
attccccgcccgacccatacgtccagtcacacttccgtatcacttcttctttttttcctttatctccctgaatcaccatttgccggctacttagagttccaaaataaccaaatcatacttacagattctcatcataatacaattccttacctacaaatctacactatacaactacctaccactactttcataacaccttcataaactacaccgaaaacctatactcaaaaatcatcctatacacacacacacatatgtacctctaattaaacttcaacaacttatccacgtatcaaacaatgccgaaatccattaacatcattaaccccaatcatctctaccatcatatcatcaacttctactaatccc

SEQ ID NO: 332733 - DNA, 109 bp, Zea mays
gttggtgttggtgctcggagagtgaggtctttgtttcaagctgcaaagaagaaggcgccagtcattttcttcattgatgaaatagatgctatgggttcaactagaaaac

SEQ ID NO: 332734 - DNA, 369 bp, Zea mays
  unsure (1)..(369): unsure at all n locations
cccacgcgtccgcccacgcgtccgcccacgctttcgcaccatgaagcatttgctgaagatgcctgcatgagagaagaataaggtctgagcatggtcctgcttgaaattttggccgctcaattctgcagctagcagaaaagcactgcttctttctaaggcatgggagtgccgtatgaagcttacaatagaatgaagcagcctcgcccgcaattctgttacctagtactaattgcgttgtgtcacgtgatagcttatgtacctgacatattcttttattctaattatactcattcatctacctttcgagtttcgactgtacatattatccaccgngtggaatggaaggactgagttaacatgtgatacgaa

SEQ ID NO: 332735 - DNA, 329 bp, Zea mays
aaaaataaaccccccccacccaacaaaaaaaaaaaaacaaaaacaaaaacaaaaaaaaaacaaaaaacaacaacaaaaaaaaaaaaaaaaaaaaataaaacaacacaaaaacaacacaaacaaaaaaacaataaaaaaaatcaaaaaaaaaaaaaaaaacacaataaaaaataaaaaaaaaacaaaacaaaaaaaaaaaaaaaaaaaacaaataaaaataactacaaaaaaaaaaaaaaaacaacaaaaaaaaaaaaaaataaaaataaaaaaaaatacataaaaaaaaaaacaaaacaaaaaaataaaaaataaaacaaaacaaaaat

SEQ ID NO: 332736 - DNA, 140 bp, Zea mays
aaaaaaaaacacaaaaagctaaatcaaacaaaccaacaaaaaacaacaacccgcaccataaaaaaaaagaaaacaccaccacccccacaaaaacaaaaaacaaaaaaacacataacaaaaaaacaaaaacaaacaacaaa

SEQ ID NO: 332737 - DNA, 383 bp, Zea mays
  unsure (1)..(383): unsure at all n locations
ctataatatttatttgctagttagagtnttatacttacgacatgctagatgtggttatccttatagttggttagcctattgtagaaggtggttgaacttgtactttgagaccaaatatatattgcatacttgatattatactattatttgagcttgtcttattgtactcttatctgttcttatgaaggttagaggaatgtgtttggggtgagtaatttttttgtgttgtttcctctatccatggccatggaggagcaaaggaggccacctagctcgaagatagcgccagtgtccatgaaggcgtcctctgcaaatgcgacgcttcaaggcatgaagaacagaagccattttcgaagggacaggaaaactgcgctgcaacaaga

SEQ ID NO: 332738 - DNA, 427 bp, Zea mays
aatacaccttcggatagtactacagctgttttctcgagacaagtggtgtattaaacggtcgaaatgttcatttgcacaacaacaaatcagctatttggctcacattatcagtgcccgtggtgtagctactgatcccgaaaggtgtcagccatcgctaattggccttgtcctcaaatagtgaaggaactacgcagctttctttgattggctggctactaccgcaaatttgtccgtaacttcgaagtcatatcaaaactttgactcttctgctcaagaaacattcagtgtttgtgtggacgtcagtacatgatcatgcttttaacgtgctgaaacagtccttgtgcttggcgcatgtgttgaaattgcccaactttggacatgcattttcaggtgaaattgacgcagcaacaactggaatgggtgcaat

SEQ ID NO: 332739 - DNA, 154 bp, Zea mays
cttaattcccgcctccagccacgcgtccggttgcgtgctccccccaccttctcctcttgtacctgccctcggtttctgatcagcgaacgttttaacccgcggcgtctccctgctgctcctcgcggcggtgctcctcctccaggccctcctcctc

SEQ ID NO: 332740 - DNA, 169 bp, Zea mays
cgcacgcgtccgcgtcactcaacacatcacaggcagctcgagagagagagagagacgaagatgtcgtggttcgggcaccaccaccacaaccagccggctcccccggcgtcgggccccaaccaggtgttcaagatcttctgccgcgccaacgagaactactgcctggccg

SEQ ID NO: 332741 - DNA, 120 bp, Zea mays
ttcccggtcgacccacctccgccacctcccttactgtctggtatgatgttatcagacatgatcaaccttgtgggcattacttcataacacccatatctatctttacttaacagcaatcac

SEQ ID NO: 332742 - DNA, 96 bp, Zea mays
attcccgggtcgaccgcacgcgtccgcacgacccatgaatgaatggtctttggctctttgtcctccagttcgttatgtgaactctgccgtgctact

SEQ ID NO: 332743 - DNA, 232 bp, Zea mays
gatgctattatgtgatttcatatgattcagaagcattacaataactgcctacatgagctgtcaggactatactaatgcttaagaaacagcctacatcttatgtctactaaagtacagcgagctgcaatactataaggctgcaccaattactaactttaaagatggtcaacgtgtttcaaagagatcagagtgaaccaaaataggagatcgcagctactaaaatgctatgact

SEQ ID NO: 332744 - DNA, 426 bp, Zea mays
gccgtttgggattaagccaagagccaggatctgattccatgggtgcatcatctagaaagtgagtcccaagccaggcttctctgctttgaggtgactgctattgcaaaattagcaacatgccacagtgagctgcttccgagggcacgcgtgtcattgggtaaggtcgctcgttcccgaacctcagacaagagggtctggcaacgggcctgtgactatatagggctcatgaatgaaccagacatctgtttatctgtactgggaccgttcaccgtcccaagaaaatggccccggattttgaatttgaattaaagagggaccaaaattggaacttaaggtcccttttaacctttaaaccaaccaaaagggtcacccgcttataaattttcaatttgccaacttcttccaaccgaatggagaaaatatttt

SEQ ID NO: 332745 - DNA, 139 bp, Zea mays
ctctggtgcaactcatctttccagatccatttttttcctactcccttcacatctcatcagcttggcttccatcaggaccctccccacctaccgacacacctatatcaaacacacccatacccacttgccaattctaaat

SEQ ID NO: 332746 - DNA, 223 bp, Zea mays
ccacctccacccacgcatcctaaaaaaaaaaaaaaaaaaaaaaaaaataaataaaaaaaaaaaaaacaaaaacaaaacgaacgaattaaaaaaacaaaaaacacaacaccaacaacaaaaacaaaaaacaccaaacacaccaactactcacaaccccacctataccttcatcatcaccaacattaactacaccctcatcttcactccctaccacttcaacctc

SEQ ID NO: 332747 - DNA, 174 bp, Zea mays
ctcacgcgtacgttacaccatcgacataggtcagaacgacgtgtctgcttacatgcgccggggctacgagcaagtgcttgccaagatccctggatttggtgctcagatcaagtgcaccatcgacacactgtactcgcacggggcccgtaagttctggatccacagcaccggcgc

SEQ ID NO: 332748 - DNA, 65 bp, Zea mays
ccggctctacccactcgtccgtcaaactaaaattggtttattgtctccaagactcactcttatca

SEQ ID NO: 332749 - DNA, 355 bp, Zea mays
ccacgcgtccggtcaaacttaaaattggtttattgtgctccaaggtgtcactcttgtgagtagagggagaacacggtaatattgcaccatgttggagttattttgtgtggttgaacttgaaaaacaattcttcaaaacatggataacccatactttattgcaatggtgtgacatgagtacatgacatgacatgacatgctaaggcagaaaattatgttgcagcagtggtatatgtgtggttgcagcttggtaggtaaaattttatgtcatgtgtcagccgaatcatgaaaatatggctatgtttagtcatgtactcctattgctcttttaatttggtattaaaatatgaattttc

SEQ ID NO: 332750 - DNA, 135 bp, Zea mays
ttcccgggtcttcccacgcgtcctcctgcccctggctcatgccttattttaagtctccaggttacagtcgagtacctcaataaggggtattgttataatttttcattcgccttcacaccctcctcatcttcaccc

SEQ ID NO: 332751 - DNA, 74 bp, Zea mays
agtgttcatcgatgttttagactacacatttgtatattttgtcgagagcatcagtttctggtacactaccaaaa

SEQ ID NO: 332752 - DNA, 76 bp, Zea mays
attcccggatcgacccactcgtcctcccacacatccggtataccactatccgttttttaatttgagtcgtcttgtg

SEQ ID NO: 332753 - DNA, 61 bp, Zea mays
gtcctcaatgatagcatggaatccagtgcttctgttataatctcatctggtccatcatata

SEQ ID NO: 332754 - DNA, 60 bp, Zea mays
cccgggtcgacccacgcgtgctcaaatcaaaagtcacagataaccttaccaaattatgct

SEQ ID NO: 332755 - DNA, 267 bp, Zea mays
  unsure (1)..(267): unsure at all n locations
attcccnntcgaccaggcgtccgcgggcgcgtggnctnactcgtgggttcgagtcagtcagtcagttgcgtgccatgncatggtctgatctgatatatgatnatnctcatnccnncntcntntcctcccctggcctcctggggcgcttctggcgagcagtgtgttgtgttgtgtgggtgccgcacgctagcaggctagccatgtgccctgctgtgttgtgtcaccatccatctataatcttatccataccccaccttttgtgtgatg

SEQ ID NO: 332756 - DNA, 458 bp, Zea mays
gcaggctcgctgaaagcagtaggcaacaatatccggatattgtgtcttcaagtgtcaacggcagtttctagtggatcagctagcgagccaaagaagcgggcgtccgaggaaaggactagcaccctgaagaagtccaagcaagagggctctaaaccatctcctttcaagcagcaacaagtgcctaaagtgaatatcggatagaatatcacagcattgcaacagaacgaatctcctttttggaagacttattcagtgtcagttcttgttttaacctttaatttctttaatttttgtattttataatttttgttcttaatttttcttacttaatttttacttttttctatttttttactattttttattttttttttctttattctttattttttatcctttattaatcttatttatttttttattatattatttatttttttatttatattttttttatt

SEQ ID NO: 332757 - DNA, 173 bp, Zea mays
  unsure (1)..(173): unsure at all n locations
aaacaaacaaaatcatcaacnactaaattccaaaaccccccaaacactcacccgccggtttatataaatatttaaccaaaccaccccacacaatacnnannncttattccaacaaaaaccaaaacaacttccatctaaaattacaccaacaaataaaacaaactcaactatca

SEQ ID NO: 332758 - DNA, 352 bp, Zea mays
attcccgggtcgacccactcgtccgttcaggcctccgaaaaaaaattaccaacctaccctctcttctcctccgctcctctactacgtgctctgtccatttcttactccacctacccactcctcatccattacaggtcttcatcccattctaaccatgataatctttttattctttcttatttctattttattaaacctctttttatattcaattttatccatttttatctttccatataaaaaactattttttaaattttatcttttaaaattcttttcaatatccatctcaatcaatcacaattttaacatcatcttctactttaattttatattcatattcatcttcttt

SEQ ID NO: 332759 - DNA, 431 bp, Zea mays
ggattcccgggtcgacccacctccgaagccagtgctaatgtggttccatgatgatatatgattgtgtattggtaatggacccttataaggcgattacagttgctcaaaaagggaactttggaaaatgcattccgaataatttcaaatagtgcctataaaagccctttatcaatcattgactttttctaattatttcatttaatccttaattttccctttattaatatttttactttctatttttttttattttaccttatatatttcttttaaattttttttttatctattttttaatttatattttttttatattgttttatttttagtttttataatttatttttcttgttttttaattatttattttataatttttttatttattttttttattttattatatatcttttttatttttttttttttta

SEQ ID NO: 332760 - DNA, 454 bp, Zea mays
cccactcgtcctgcaaagcactggaaatccaatcgaggtagatatctgttgtaaacagcctcaaggactcgaactcacgctttatgttaccttttcatgatagctcactactgctattgctataataacactataatacttgataactaatataatcccattttcctgattaatttatactttaaatatcctccatgtattgtcatactttaactatcttcttcttttcatttataaatattattattttaattttttctcttttatttctttttaatattcttttttatcatttattttttttctttattttttatttttatttattttttttttttattttttttttttattatttattttttttttttttttttttttttttatttttttttttttttatttctttattatattttctttttatatattttatattaatttttataatttt

SEQ ID NO: 332761 - DNA, 165 bp, Zea mays
attcccgggtcgacccactcttcctcttttgttgatgtcctcaaggatttaggcttcctccctagcatcaaagtttacgataacgccaaaaattttatttgcactccacatcacaccaccatccaataccattactaccttatcaaacattactccaaatactac

SEQ ID NO: 332762 - DNA, 226 bp, Zea mays
  unsure (1)..(226): unsure at all n locations
cggattcccggntcgaccgacgcgtccggcgggagtgcntanagaggatcgtcgaacataacagcatgaagatggtcatcgttctcaacgggtcttggctctgtcagctgccaccccctctgcaatgcaaatgccctgcccctgcgcggggctgcagggcttgtacggcgctggcgccggcctgactactatgatgggcgccggcgggctgtacccctacgcggag

SEQ ID NO: 332763 - DNA, 173 bp, Zea mays
taccgactagaccccctttctgattccgctgagccacgtgctgtccacgaatctgttcactctcctcaccgaggtccgcaagaactgcacctgctccttgcttatgccctactgcaagacccatgttactttttattacttatactaattcatttttttatttcctttttttt

SEQ ID NO: 332764 - DNA, 221 bp, Zea mays
ttttaatagctatctaggattcattatcttccacggcataaaataatagcccacgttaaattaaaaaaaaaaaaaaacaaaaccaaaaaaaaaaaaaaaaaaaaaaaaaaaaaaaaaaaaaaaaaaacaaaaaaaaaaaaaccaaaaaaaaaaaacacaaacatacaactacaaaactctacctacactttcaccaaaataaaaataacaaacaatcattt

SEQ ID NO: 332765 - DNA, 251 bp, Zea mays
attcccgggtcgacccactcttcctaaagaaaaaaaaaaaaaaaaaaaataaaaattaaaaaaaaaaaaaaaaaaaaaaaggaaaaagttaaattttaaactcatacataccacaccctaacaacttctataactttactataaattaatttaaattcacttcactttacaacttcttaaactcttaaaacacttaaaaaaacctaacttaatcccaattcaatcacatttccactaaatccatctttctt

SEQ ID NO: 332766 - DNA, 517 bp, Zea mays
  unsure (1)..(517): unsure at all n locations
aaaaaaaaaaaaaaaacaaaattaattttaacnccaacaaaaaaaaaaaaaacccgcagggatgtntatatataatannacccaaccaanaaccaannnnnnnaaaanaaaaaatataaaatataattatccacaataataataaaataatataaaattcctaaaataaactaataaatattattaaataaaataataaataaacaataaaaataaaaaaaataaaaaaaaaaataataacattaaaataaaaatataaaataaaacaaaataaatatataaattaaatatatatataaatactaaactaaaaaaatatataataaaacaaattataatatataaaaataaataaaaaattaatataataaaaattataaaacaaataaaaataaataaaataaaataaaaatactaatttaatatataatataataaatataaaatataatacaataaaaataaataataaaaaataaaatatacataaaaaaaatatactaattaatcatttata

SEQ ID NO: 332767 - DNA, 235 bp, Zea mays
ttccctatcgaccactcgtcctcccactcgtaccaaaaactaaaataccatttctaatatttaaacacaacttaaaaaacaactagaaaatgtataaatataaacctctccatacctctaaacacacaccttacttcaaacacataccataaatatcatcctcctactaataactcacactttacttacattcaaactctaccatttaatttatcaaaatttttccaacataatc

SEQ ID NO: 332768 - DNA, 181 bp, Zea mays
aaaaacaaaaaaacaaacaaaaaaaaatcaaatccctaccaacaaacaaacacactaaaaacacacaaaccaaaaaaaaaacaaaacaacccaaacaaacaaccaaacaaacataaaaaaaacaaaacaaaaaaaaaaaaaaccaacaaaacaaaaacccaaaaaaaaaaaacacaacaac

SEQ ID NO: 332769 - DNA, 121 bp, Zea mays
  unsure (1)..(121): unsure at all n locations
attactantaaaaaattatttctctaaattcccttcaatccttattcaataaaaaccccaatcttttttatactcnatcaaattttaaaattctttttttttcacaccaaattntcatttt

SEQ ID NO: 332770 - DNA, 262 bp, Zea mays
attccctggtcgacccactcttcctgctgcctcccttttttttttttttttttattttttttattttttttattattttgtaaatgttaaatttaaaatttactttttctaacccttaaaataaattataataataaaaatttttacattaaaaaaaaatactttacaaaataaaaaaatactccatattttaaaaaatttcaaacactttttataaattactttaaaaaatccaattttaaaaaaaatataaatactattt

SEQ ID NO: 332771 - DNA, 192 bp, Zea mays
tcttactctttactccttgttttttacttaccccgagtacttttactaatccgtacttgttaattttaaccttacctctcccaccccttcctcttctttctcattgttaacaacatctacctcaacatttactcctatcacttcgactattaccactttctcttccactacttcaccaccttctttctcttt

SEQ ID NO: 332772 - DNA, 223 bp, Zea mays
atttttaacaacatctacctcaacatttactccttccacttctacaattaccacttcttcttccactacttcaccaccttcttcctcttttatttttccaatttctacaaccatctctttaaaatccttcctcttttaactttaacatatactatctatattaattcaattatccttacctatcttctttcatcttcttctaattctttcttcttctctctat

SEQ ID NO: 332773 - DNA, 222 bp, Zea mays
gaattcccgggtcgacgcacgcatagctcccaggcatccgcaccacaccttttctgcttcttcctcctcctcctagcacagctgacactgttcaattttaaacctgtgatcacctctcccagcatctgcaagtgcaactgttactccatctgctcctacaccagctcattcatcttcatgttttttaacttttataccttctataccatcatttttaatacc

SEQ ID NO: 332774 - DNA, 64 bp, Zea mays
aaaaaaaaataaaaataaaataaaaataaaaaaaaaaaaaaaaaaaaaaaaaaaaatatatatt

SEQ ID NO: 332775 - DNA, 209 bp, Zea mays
ttcccgggtcgacccactcatgccttgatgattgtctaaaatatttctccggtttaaggtcaactaattaacactaacgcaagggttaaatctaaaaacttaccaacctacccctattacagccttacatatcataccatcatctccattttacatcttatcatctacttctttttattgctatcaaactatatccactacaaatatat

SEQ ID NO: 332776 - DNA, 237 bp, Zea mays
aaaaataaaaataaaaatacaataaaaaaaaaaaaaaaacaaaacaaaaataaaaaaatataaaaaaaaaacaaaaataaaatataaaaataaataaaaaaaattttaaaacaaataaataataaaatataatcaaaaaaaaatataaaatacaataaaaaataaaaataaattaaaaaaaaacaataaaaaacaaaatataacaaaaaaataaaaaaacaacaaaaaaaaaatata

SEQ ID NO: 332777 - DNA, 254 bp, Zea mays
  unsure (1)..(254): unsure at all n locations
ggaaaacccgggccgaccgcacgcgaccggatcaacntncataacgcgatgatgttgcattcccatatagagtacgggatcccaganagatcaatataaaagatactgctaaccaacccatcctacatcnttagtggccaaagagtaaacgcggagctgatagagtaccagatcctgtgctgccgagcacactcttctggacagtggcttctgctgctgctccacccgaaatggaagtccggcatggacaggga

SEQ ID NO: 332778 - DNA, 131 bp, Zea mays
agctaactaccctcacgctggctcgccaccgccgcctcagcaggcgtgggaatctgttcgtcgctccctcggagaataggaggcagctctctcttcgtccgccattgctggctcttcctacccctacatgc

SEQ ID NO: 332779 - DNA, 97 bp, Zea mays
atgcaagcagcgccgcgtgccccgctgtagcaccaagtgggtctgcctccagactctgatcgtcttgtgcctggtcgtctccatcgccgtcgccgcc

SEQ ID NO: 332780 - DNA, 326 bp, Zea mays
  unsure (1)..(326): unsure at all n locations
attcccgggtcgagccacgcgtccgtgcagctgcaagaagtttgaagctgctgggattcaatgctgtcatgtactgaaagtncgggatctcaagaatatcaaagaacttccagaacaatatattttgaagagatggaggaaagatgctcgttctgttcaaattggggaggaacctacctatgggtctggcagtgtcatgcgatcaacctcagaagctcgattcagtatcatgtgtcggttggctagcttgattgcttcaagagctgccaaattcgaggatttgatttcatatatcgaaagttagtcaaatgcttttcagaaacatc

SEQ ID NO: 332781 - DNA, 76 bp, Zea mays
aattcccggggcgagccacgcgtccggcgagcatagaactcccgctcacatctttcactcagcacacccactcatc

SEQ ID NO: 332782 - DNA, 80 bp, Zea mays
ccgacaccaacactgagactatgactgagactattaatgaaactatgaatgaatcaagtaggtttgtagacaggaatggg

SEQ ID NO: 332783 - DNA, 82 bp, Zea mays
agtcgatatacatcatccttaatcgatctgaaacgttatatgtaaaaaaaaaaaaagaaaattttaaaaaaataggacagcc

SEQ ID NO: 332784 - DNA, 176 bp, Zea mays
  unsure (1)..(176): unsure at all n locations
acccgngccgacccacgcatccnaacagaacataaaataaaaaaaaaaattaaaataaaaaaaaaaaaaaaaaaaaaaaccgaaacgtttaaataaaaaaattaaaaaaacaaaccacaaaaaaaaaaaaaaaaaaaaaatnctcctcctttaaatacacccaatccttaattaca

SEQ ID NO: 332785 - DNA, 110 bp, Zea mays
  unsure (1)..(110): unsure at all n locations
aattcccggctcgacccacgcatccgtggtgtttactgtgacccttatcccttatatcaagttgatcataccatcacttatccagatnttttattcttctggggtctcat

SEQ ID NO: 332786 - DNA, 282 bp, Zea mays
  unsure (1)..(282): unsure at all n locations
accggncggaanacccgggtcgacgcacgcgtccggagagaangaaaaatatccccaaactctatctcccgatctcgatggcgaaccctcncgtctttttttacatgaccgtcngccgccccccggcgggccggatcgtgatggagctgtacgccaacgaggtgcccaagaccgcggagaacttccgcgcgctgtgcacgggcgagaagggcgtgggcaagtcctggaagccgctccactacaagggctccaccttccaccgcgttatccccgagttcaatg

SEQ ID NO: 332787 - DNA, 94 bp, Zea mays
ctgctcgtctcccgtccgttttctgattcccactccgaccaaaaccctatctacttggtgattgtggaggggaggagatggcgtcagctgatgg

SEQ ID NO: 332788 - DNA, 61 bp, Zea mays
ttaatacccggctctacccactcatccagagagcaactattcttgatctcgaatctaccac

SEQ ID NO: 332789 - DNA, 320 bp, Zea mays
ggaattcccgggtcgaccgacgcgtccgtgagcattcacaaacacacctagcgtagctctactagcaacgacctaacaacaattgcttgcatgacattatacgtccttgccctcctcgccctttttgtgagtgcaacaaatgcgttcattattccacaatgctcacttgctccgagtgccattattccacagttcctccctccagttacttcaatgggcttcgaacacccagctgtgcaagcctataggctacaacaagcgcttgcggcgagcgtcttagaacaaccaattgcccaattacaacaacaatccttagcaca

SEQ ID NO: 332790 - DNA, 190 bp, Zea mays
  unsure (1)..(190): unsure at all n locations
accggaacggannacccggcgggaccgacgcgacggaaaggcatacactacgcccccacccatgactacaaccagacgagcaaccnnttcatccgatcatggaataaagggtgtcccaccacatcaccaancccaacacnacngacatgagcgcggacgccggcaccgacagggtgatggggggggctgg

SEQ ID NO: 332791 - DNA, 353 bp, Zea mays
cttggaatctcacttagatgaccaaatgatctcataccccaaattcctttctatcaagtcagtttattcatagaatgacatccactctcatatacaaagatcactcaagcagtagcaacaagtaaattcgcaaatgcaaacttgggtatcatcaggaggacctcaaattcttactcacacacacactactcactctaacacctttctagaccccactcaagaataatatcagctcatataaatttataatttttacccccaccctttttttatgcctcccctcgatccactactcattactaacctttatattgatttttctataaaaaaaattctaccacaatccttttttt

SEQ ID NO: 332792 - DNA, 194 bp, Zea mays
  unsure (1)..(194): unsure at all n locations
ctattcccggctcgacccactcgtccgcagctagctacatggactcctgcttttactttnctcatacagccactcctgcactgtccgccttcttctcctactcccctgcctgccaccaactgccaagtttccaagtgcatataccctccctgcctcacaaacaactccaccctttactaaataccatcatgttc

SEQ ID NO: 332793 - DNA, 139 bp, Zea mays
tggatcctcatcatatgcatgcttatctacatacgattgtgatgtttatcgttcagatgttctttcatagcttattgtatatcatagatcatatcatcgttctccatatcttattccttgagttacttcttgtctttct

SEQ ID NO: 332794 - DNA, 338 bp, Zea mays
cgcacgcgtccggcctcttcctggcgcgccgcaccgcgctggagatgctccgcgacgcgggtacgccgttccggaggaagagctcgcccgcaccctcccggagttccgcgcctggtgggaatacaggccggagctcgaacgcctcgccttctccactaccctcacctccgacccgtccagcaaggtgaaagttgtgttctgtccacctggacctgtcaaaatcgcagctatccggctgatatataccgaattcaaagattagaacttgtccagactgattctgatactgcagggcaaaataatgtttacaaccatagaatgcatcaaggggatctttc

SEQ ID NO: 332795 - DNA, 73 bp, Zea mays
  unsure (1)..(73): unsure at all n locations
aaacccnncccgacccacgcaaccgcacgacccatacnaaaccaaccaaatcatctacaacaacaacaccaaa

SEQ ID NO: 332796 - DNA, 274 bp, Zea mays
  unsure (1)..(274): unsure at all n locations
cccacccaacgcacccagaccancgacaccaaaaacaaanacagttttntttacngcnnnganaacaaaaacactcgcccgttttatttaaaatttcaaaaccccaccaccncnncanaananaaattcaaagagattgtcaagtcttacgaatcaattaaatcttatagaaaaaactctttaaatttattcaaacttccacttttatcttatcaattgttaaaaactcttaccttatcactctcgaattaatttttccttttatatttaatca

SEQ ID NO: 332797 - DNA, 55 bp, Zea mays
gggcgcgcgagggaggagaataagtttttgcctatagcccggtctcgtctgtctc

SEQ ID NO: 332798 - DNA, 51 bp, Zea mays
attccctgctctacccacgacatccccgaccactccccaaatcctatctcc

SEQ ID NO: 332799 - DNA, 82 bp, Zea mays
  unsure (1)..(82): unsure at all n locations
cccactcgtccgtatatatataccttttaccgtatacctgtctcaaattctcaactnagaanatttatagataggtctttgt

SEQ ID NO: 332800 - DNA, 241 bp, Zea mays
gagcaactagcaacatagaaagcacattagtgtaccaacaatggcagccaaaatattgttccttcttatgctccttggtctttctgcaagtgctgctactgctaccatttttccgcaatgctcgcaagctcctatagcttcccttcttcccttgtaccttttaccagctgtgtcttctgtatgtgaaaacccaattcttcaactctacaggatccaacaggctagcacagctggcatttta

SEQ ID NO: 332801 - DNA, 120 bp, Zea mays
  unsure (1)..(120): unsure at all n locations
taccggctcggaatanncgggggcgacgcgtccgcgcacgcgtccgcccacgcgtccgcctactcgtccgggccaaacgacgcgagagcgctgctncttttatataaccaccgcggtggc

SEQ ID NO: 332802 - DNA, 182 bp, Zea mays
  unsure (1)..(182): unsure at all n locations
accggnccggaattcccgggccgacctaagcacgctacagcaaaaaaaaaaaaaaaaaacttatttcacaaaagccgacctctatataccgccccgtttaatttaaactttcatacaacccccccccacatatatacttcaactaaattaaaacaaatacccaatattttacctccatcata

SEQ ID NO: 332803 - DNA, 117 bp, Zea mays
ctataatacccagctctacccactcttccgaaaaaaaaaaaaaaaaaaaaaaaatattaaaaaaaaaaaaaaaaaaaaaaaaaaaaagaaaattttaaaaaaataaaaactccaacc

SEQ ID NO: 332804 - DNA, 56 bp, Zea mays
tctacccactcatccggcaagatgatctactccagctccaattataggttcaagct

SEQ ID NO: 332805 - DNA, 76 bp, Zea mays
ttcccggctctacccactcatcctaaaaaaaaaaaaaaaaaaaaaaaaaatttttaaaaaaaaacaaccactctaa

SEQ ID NO: 332806 - DNA, 236 bp, Zea mays
ccacgcgtccgcccacacatccgcggacgcgtggtataaaataaaaaaaaaaaaaaaaaaaaaaaaagaccgtattaaaaaaaaaaaaaaaaaaaaccccacccacaaaaaaaagggcccacctttctaaaacatccaagcttactcccccatccattccacgtctatcccctttacactgccacctaaattcaaaccacttcccaaccttttacaacatcttaactccaaaaacc

SEQ ID NO: 332807 - DNA, 241 bp, Zea mays
aaaaaaaaaaaaataaaaaaaaaaattaaataaaaaaaaaaaaaaaaaaaaaaacacccgcttataaataaaaaaattttccacacccaaccaaaccaaacaaacataccctttcttccaacactcaaaactcaatttcacttgccacctaattacaactccctgaccttcatttcacaacctcaacccttctaaaaccctttcctaccccaactcatttcccctccatcacatacccctt

SEQ ID NO: 332808 - DNA, 333 bp, Zea mays
cggaattcccggggcgagccacgcgtccgcgtcaggatgacgtaaagcagaactcaccaggcatttgaggggcatggcaggtgtgtgaatcaatgtccggaaacggaagccagttgtttccagggttttctcgagaaatcttcacctgccaagcctgaagacctgaactcggatgcactgggttttgatttgaaatttaatgtatcctatgttgcctaccattgtttgacaaccatttatccgaacttttgatctaaaagacagcgggaatataattgtgcgcgagttaagcttgaggtcggtcgttttgacgcttcctctatgtactatctt

SEQ ID NO: 332809 - DNA, 322 bp, Zea mays
cacacatttactgctaaccgcatctcacacacaggctgggtgggcttgttgcgcaacgagctttgcctcactttacccgcctcggagccatggctaagctcgcgctggcgctcctcctcctgctggccgaggctgcctccgcagttgtcagcagtgctagccacctggatctcgacctgggcttactgtactctggtgaacgcccgagggagagccgtggaacggtggccgagtgcctcgcctaggagtctgatgaggagggccttgatctggctggatcccaccgtcgtgcgctctacggctgtaggtacattagctacgg

SEQ ID NO: 332810 - DNA, 327 bp, Zea mays
gaaagggacattgataactttttttcatataaaacacattcactggaaaaaagattgtaacacaagcgtttccacggcaaataaaggctactctctagtaaaaagatttacaattccaaaagggaatgctccgaacggggctacaagcattttggcaaatgaacaccttttaacgaccctttggttaaaataaaggtcataacacaatagctggtccaggcttttaacctaatccacaaatttggtggaaaaaaaataggcctgacaaccgggttaaccgaaaagcccaagaaccctttgcaaaacccctcagaaaaaacaattaaa

SEQ ID NO: 332811 - DNA, 168 bp, Zea mays
cccacgcgtccggttggcttctcctccccctccggttcgggttcgggttcgtgaggggctgcgaggttcgggttcgtgggtgagcggatcgagatggcggcgtcggatgttgagtaccgctgctttctcagcagccttggcttggccaacgaccaacaattccttcaa

SEQ ID NO: 332812 - DNA, 211 bp, Zea mays
gattcccggctcgaccccgcgtccgttttttattatttttcttttttttatttttatttttaccattattaattttttccagtgcgagattttttacattatttcttatatccaataatcttttcaaaacttcccactcctctataaccttaataacaccacctatcatatcttttcatatttaatgccattgactactattctattagac

SEQ ID NO: 332813 - DNA, 330 bp, Zea mays
ggaattcccggcgcgaggcacgcgtgcgggagcgtggggatccgctggtgttggtccgcatcatcggcgacgtggtggacgcctgcttgctttgaatgctcgctccgcgcttcctacgcctcgcgcgaggtctccaacggctgcgagctcaggccctccgtcatcgccagaccagactgacgtcaaggtctgctgacccgtcatgcgcaccttctacaccctcgtgatggtagatcctgatgcatctagccccagctatcccaaccttaaatagtacctgcactgacatgtcactgatattcctcagactactgtagtatctaatgggac

SEQ ID NO: 332814 - DNA, 153 bp, Zea mays
cccacgcgtccgctccgctgttgatatttcgtttggttctcctttccgtcttgtccggggccgaggccttcttcccctcgctccccagcttcagcaggcagatcagatccattcaaccacgaacaggaaagaaagtaagaagcctcgagggct

SEQ ID NO: 332815 - DNA, 254 bp, Zea mays
agcaacatcccgccaccacttcctcctcctcctccgctgtctgcggccgcgcgcgccgacgtttttttttttccaacggaggccgtcgcgcgctgcctttagtttcggacccatccatccatacatagccaacatcacctatagcaggcggagggacggaggaccgtccgtctcgttcactccgcgccgcgcgtggcccgatccagcccggccctcggatggtcgccgctggcacgtacagcgacgacaccagc

SEQ ID NO: 332816 - DNA, 205 bp, Zea mays
aaaaaaaaaaaaaaaaaaaaaaaaaaataaataaaaaaaaaaaaaaaaaaaaaaaaaagaaagaaaaaaaaaaaaaaaaaaaaaaaaaaaaaaaaaaaaaaaaaaaaaaaaaaaaaaaaaaaaaaaaaaaaaaaaaaaaaaaaaaaaaaaaaaaaaaaaaaaaaaaaaaaaaaaaaaaaaacaaaaaaaacataaaaataaataa

SEQ ID NO: 332817 - DNA, 63 bp, Zea mays
cccacgcgtccgaaaaaaaaaaaaaataaaaaaaaaaaaaaaaaaaaaaaaaaaaagggaggg

SEQ ID NO: 332818 - DNA, 172 bp, Zea mays
cgatcacatgcatatggaatgccaatcatgtatataatctattggcaaataacaaagctgtgttcctccaaaaaaaaaaaaaaaaaaaaaaaaacaaaaaaaaaaaaaaaaaaataaaaaaaaaaaaaaaaaacaaaaacacataaacaacataaaaaaaaaaaaaaataaa

SEQ ID NO: 332819 - DNA, 419 bp, Zea mays
  unsure (1)..(419): unsure at all n locations
gggcattggacactggaggaacgttgtgttggtggtaactgaggtttgtgcttgtgtgtagatggagaggttaagcaccaaccagctctacagttctggtgttcctgtaaccgtaccaacatctctgccttgtataccagtctctctggatgagagcttcccgaggcttcccgatgcacagagtgttttgatggagagagaattgaggagcactccactaccacctcaccagacaactgttgctcctatccgtggtctgtttcactccaatactggatctgttggtcctttgtgctcaccttcgtctgtaaggttctcttcgcattcaaatcctgagcaataccccaaccacaattcatacaattctcaagtaccaagcactgcangttcctcaacgctngaatatgggtcacaatatg

SEQ ID NO: 332820 - DNA, 543 bp, Zea mays
  unsure (1)..(543): unsure at all n locations
actcggtccggaatttcccgggtgcgactccacgtcgtctcgtcccacgtcgtctcgnngttcgtcctatgtagttctctcagnttgatgtcgccctggtgatccagtggaggagtcctcctctcggggnntttatgatcatactccactactccggcgtccgcactccatcgctggtccagtcccttctctcgtcgtctttccctcttactggcttcgtatgtctnnntctcatgaaccctactctgctccccatcattatgcctacgcnncccttcttcttcccactttcctcctccttcctcttttaccctttccatttctagtaagcatctactcgtgcctccgtctttctcttccgatgtcagttcttctgcctnntcgtcgtcgccgttttcaagtcgttcgcctaaataccttctttagcttgcatgccacttncctactgctgctagcaaaagacctttattactagtgtcaattaagttacgaaaaaaataataaatataaaaaaggtcggcccgtctagaggatccaagctta

SEQ ID NO: 332821 - DNA, 78 bp, Zea mays
cccacgccacccagaaaaaaaaaaaacaaaaacaaaaattcaattaaaaaaacaaaacaaaaaacaacacgaccgatt

SEQ ID NO: 332822 - DNA, 159 bp, Zea mays
tcgattcccggtcgacccacgcgttcgaaaaaatcaaaaaatacaaaacaaattttatacaaataaaaaaaaaaaaagaggggcgggttactaatcctaaattacatcgcgtgcattctaaaagatccctcttctctaacgccacctaacttcaataaa

SEQ ID NO: 332823 - DNA, 87 bp, Zea mays
ggcgtaagcagccatgcaggtatcaaaaggtatcagcgtcaccaatcttcatggagcgcacatgctccacgcttccgcaatacgcgc

SEQ ID NO: 332824 - DNA, 82 bp, Zea mays
attcccttgtcgacccactcctcccatccagttcttctccaatgctcacgccactttaacttatgctctgactcaaactcaa

SEQ ID NO: 332825 - DNA, 276 bp, Zea mays
ccggtctcggattcccgggtcgaccgacgcgtccggatggcggcagcaccggacgggacgcggtttactcggagtcgaccccgatccagaggaggagatattcatgccgagtggtgtgccgtacctatctacaatttggacgacgtgccagcagtagctagcgatgctgatgtgcgtacatgaacaaggtcgaggagccagacacgatgtgcctatgcatggagctcagctcctagcttatgaactatggtcagatagagcatgcgcagaacgcct

SEQ ID NO: 332826 - DNA, 161 bp, Zea mays
taaaaaaaaaaaaaaaaaaaaaaaaaaaaaattaaaaaaaaaaaaaaaaaaaaaaaaaaaaagaaaaatttacaaacaacaaaaaaaaaacccaaaaaaaaaaacctaacaaacaaaaaaaaaaccaaaaatactacacctttctatacttcccaaaccct

SEQ ID NO: 332827 - DNA, 178 bp, Zea mays
cgaccgacgcgtccgaacgatctcaccaccgagtgctgctacaatgatacagtggtcctacacccacaactcgggcaaggggttcagctccagcgtgatcacacgaacaacgtctcgaataccatcgtccatcccggcacttgaaagaacgagcacatcacagattcatggtatctga

SEQ ID NO: 332828 - DNA, 59 bp, Zea mays
aacaaacaaaacagagaaacacagacaagattattcataaaaaaataagaaaaatgaaa

SEQ ID NO: 332829 - DNA, 273 bp, Zea mays
ccggtctggaattcccgggtcgaccgacgcgtccgcggaggcgtgcgcggacgcgtgggaaaaataaaaaaaaaaaaacaaaaaaaacagcaaaaagaaaattttctagaaaagagatagggtgcgtcatctggcacagactgcagaaaatccaaggaatccgtatcctacacgtacttgcatagcgtccacaagctgacctctgaatcggacgtgctcgatgatgagtgcacgctgaccatggagacgcgccacatcgagaacaatgacgtg

SEQ ID NO: 332830 - DNA, 107 bp, Zea mays
aaaaaaaaaaaaaaaaaacgaaaaatttaaaaaaaaaaaaaacccaacccaaaataaaaaaattaaaaaaaaaaaaaaaactaaaacaacaaaatacaaaaataaaa

SEQ ID NO: 332831 - DNA, 201 bp, Zea mays
aagggccataaaataaaatagaaacacaagagtttgaaagacatgcatagaaagaggaaacaggagcagcttttcaaaaggtctgcgcaagctacgccgagaaactggtccgatggcctggtctgcacgtgctcatggccggctctgctccggtgacctctcgtgggtcgcagcagcaccgtgcacttacgggccctgagc

SEQ ID NO: 332832 - DNA, 237 bp, Zea mays
cggtctggaattcccgggccgaccgacgcgtccgatcggctaaaacaaacaaaaaaaaaaaatattaaaaaacaggaaaaaaaaaaaaacataaggaagatttacaacgggagaataggcaaaccacaaaacgggcgcacgctctagatgagtcaggcatacgtccgcactcatgccccatcataacaagcttatgatcgagatcaatatcagtgccatgcccgttcagatccaacc

SEQ ID NO: 332833 - DNA, 233 bp, Zea mays
aaaaaaaaaaaaaaaaaaaaaaaaaataaaaaaaaaaaaaaaaaaaaaaaaaaaaacgaaaaataaacaataaaaacccaaacaaaaaaaaaaaacaaaaaaaaaaaaaaacaaaaaaaaaaaaaaaaaaaaaaaaaaaaaaaaaaaaaaaaaaaaaaaaaaaaaaaaaaaaaaaaaaaaaaaaaaaaaaaaaaaaaaaaaaacaacaaaaaaaaaaataaaaaacacacaac

SEQ ID NO: 332834 - DNA, 224 bp, Zea mays
cggacgcgtgggcggacgcgtggggcgaatttcgtggtattaaaaaaaaaaaaaaaaaagaaaaaatataaaaaaaaaaaaaaaaaaaacaaaaaaaaaaaaaaaaaaaaaaaaaaaaaaaaaaaaaaaaaaaaaaaaaaaaaatcaacaaaaacaaaaaaaaacaacaaaacaaaaaaacacaaaccaacacaacaataacactaaacaacatcagcaacaat

SEQ ID NO: 332835 - DNA, 435 bp, Zea mays
acaaaaaaaaaaaaaaaaacgaaaaaattaaagaataaaaaaaaaaacacaaaaacaaaaaaaaaaaaaaaaaaacaaaaaaaaacacaaaaaaaaaaaaacaaaaaaacaaaaacaaaaaaaacaaacaacaaaaaaaacaaaaaacaaaaaaaaacaaaaactaacaaacaaaaaaaaacaaacaccaaacaaaaacataaaacaacaaacaaaaaaaaaaaaaccaaaaaaaaaacaaaaaaaaaaaacaaaaaaaaaaaaaaaaaaaaaaaacacaaaaaaaacaaaaaaaaacaaaaacaaacaacaccaaaaaaaaaaaaaaaaaccaacaaaaaaaaataaaacaaaaaaaaaaaaaacaaaaaaaacaaacaccaacaataaaaaccacaaaaaaaaaacaaaaaacaaaaaaaaaaacaacaaaaa

SEQ ID NO: 332836 - DNA, 226 bp, Zea mays
ctatcgacccactcgtcctgtggtgcaagttctgaaataaaataatcttttttttttcaaaaaaaaaaaaaaaaaaaaagaaaagaataaaaaaaaaaaaaaaaaaaacaaaaaaaaaaaaaaaaaaaaaaaaaaaaaaaaaaaaaaaaaaaaaaaaaaaaaaaaaggtcactcccttttaaaatatccaaacttacctacccttacatccaacttaaaacttttt

SEQ ID NO: 332837 - DNA, 255 bp, Zea mays
aaaaaaaaaaaaaaaaaaaaaaaaaaaaattaaaaaaaaaaaaaaaggaaaaaaaataaaagaaggtctttgcgttcttgcggcgtccatgctaacgtactcgtgcttgcaacgtgatacctaatttatagtgacagctaaatgcatttcactggccggacttgtacaacgttggggttgccaaaaccatggggttaccaaactaaatcgctttggacaacttccgtctttggcaagatgccgtaatagatagga

SEQ ID NO: 332838 - DNA, 145 bp, Zea mays
ccaaaacataaaaacaataacccacatctaaacctcaaatcacactatcaaaaacaccaactaatcacacttcacatacaaaaaatcattatacaaacatacaacacatccacaatcataaacatacaatactaaaaccaccaaa

SEQ ID NO: 332839 - DNA, 266 bp, Zea mays
attcccggctcgacccacccttccaaataaccaactaaaaaaaaaaaaaacaaatttaaaaaaaaaaaaaaaaaaaaaaaaaaaccgaaactttttaaaccttacatgccaaaaccaaaaaaaaaatccaaattaaataacacccaattccctcaccttaaatttccaacgtaaaaacctcaaaaaaccctcccataacccaattaaatacccttccacaacaacaacctttttccaaaaaacctctaacacaccacccaaaaacc

SEQ ID NO: 332840 - DNA, 340 bp, Zea mays
aaaaaaaaaaaaaacaaaaatataacaaaaaaataaaaacacaaaaaacctcacgtacaatttcaaaggtgtggcgcccgaccacataaactataacaaaaaaaccactctagaccaaagaacaccaaacaaaataatcaacccccaaactcacgacaaccaccacaatcactacaactcccaaataaacaccgaactctatcacacttacacacagacaaacaaacgcattccattcaccaacacacacaaccaaccagcacaactaatccaataccacaaccaacaccactcaaaacctaccgagataaccatccaaaaaacaatccaatacatacca

SEQ ID NO: 332841 - DNA, 241 bp, Zea mays
caaacatcctaatacaccaaaatcaccctaccaatcatagttcccaacatcttataatttcaatcacattaatattgaaaatattataaacaacatctacaaaacaaatctttaagaccattacaaatactaccacaaactatcatacacaacaacacacatcaaatctcaactactttcaaattaaactcacataataactcttaacaatacaataaataacatagacaccaaaatcaca

SEQ ID NO: 332842 - DNA, 392 bp, Zea mays
ccgggccgaccgacgccaacgctcggaccacccaaccctaaagggtcagcatgccttgaagcacgtcgctacatcaaacatggcccatttatacagggagcagagccacccctacaacaaccaaagccacaacaccctcaccaactcaaccaacatccagtacactcaggctatcatgaaccactagctaacgaccaacccatgacaacataaccaactaaaccttgaacgatgcagcagcacctactaacagtctcgctaaaactacatccacatctaaacctaccaatccgccaactaaaacaggatgcccatccaaacagcttaacggaactaactttcaataaggacacaataaaattcgccaaaaaactccaaataaatcctcccaa

SEQ ID NO: 332843 - DNA, 219 bp, Zea mays
aaagaaaaaaaaaaaaaaaaaaaaaaaaaataaaaaaaaaaaaaaaaaaaaaaaaaaaaaagaaaaaaataaaaaaaaaaaaaaaaaaaacaaaaaaaaaaaaaaaaaaaaaaaaaaaaaaaaaaaaaaaaaaaaaaacaaaaaaaaacaaaaaaataaacaacaacaaaaaaaagggccaccgactaccaggtccccacgaacatcccccatcatcaa

SEQ ID NO: 332844 - DNA, 138 bp, Zea mays
gacccccccttgaaccgggccttaagccccgccggtgtggggggtacccccaaggtgaccggttcacttggcaagggcctaacggccggttctttcggtttcttccctttctttcttggcaacttcggcgggttttcc

SEQ ID NO: 332845 - DNA, 328 bp, Zea mays
gttggcttctcctccccctccggttcgggttcgggttcgtgaggttctccggggttcgggtgcgtgggtgagcggatcgagatggcggcgtcggatgttgagtaccgctgcttcgtcggcggcctcgcctgggccacggacgaccactccctccacaacgccttcagcacctacggcgaggtcctcgagtccaagatcatcctcgatcgggagacgcagaagtcccgcggcttcggcttcgtcaccttctccacggaagaagcgatgcggaacgccatcgagggcatgaacggcaaggagctggacggcccgaacatcaccgtcaacg

SEQ ID NO: 332846 - DNA, 273 bp, Zea mays
gggagcaagatggggtccggatctttcctttaggtgctggccaataacttcgatgtccttggcgggcttccattttggtcgtatgcaaagctgttctttaactgctggttggtcttgccttggttcaatggtgctgcctatgtttacgaccattttgtccggtcaatgtttgtgaaccgtcaaatagtgaacatatggtacattccaagaaatgagaagctaggtaaatctgatgatgttctgtcagctgcagagagatatattgaacaaaac

SEQ ID NO: 332847 - DNA, 95 bp, Zea mays
aaaaaaaaaaaaaaaaaaaaaaaaaaaaaaataaaaaaaaaaaaaaaaaaaaaaaaaaaaaagaaaaattttaaaaaacctatttctaaatccca

SEQ ID NO: 332848 - DNA, 98 bp, Zea mays
aaaaaaagaaaaaaaaaaaaaaaaaaaaattaattaaaaaaaaaaaaaaaaaaaaaaaaaggaaaagaaaaataaaaaaattagagaaaacccaaccc

SEQ ID NO: 332849 - DNA, 152 bp, Zea mays
cacctcttctctaaaatcaacttactttttcaacccaacaacccagttcaaggcatgcttccatcccacatatgacaatcaaccatcttccataatctaaataatcaatcacatacacatcattaaacagcaccttccaaccatacagacac

SEQ ID NO: 332850 - DNA, 190 bp, Zea mays
gggggtgctgctctccgaccccgagctccgaaggccgcagcatcaggcgcggcccccctcgggtgtgaccgagatggcgctgccgaatcaggggaccgttgattaccccagcttcaagctcgtcatcgtcggcgatggtggaactggtaaaactacatttgtgaagaggcatctcactggagaggttggg

SEQ ID NO: 332851 - DNA, 147 bp, Zea mays
  unsure (1)..(147): unsure at all n locations
ttaccccatcttcaatctcttcatcatcatctatacttaaactactaaaactacatttttnaatactcatctcactccacacttttataataaatattaaccaaccattctttcataacatcatcccattaatttcaccactaacta

SEQ ID NO: 332852 - DNA, 102 bp, Zea mays
attcccgggtcgacccactcgtccgaaaaaaaaaaaaaaaaaaaaaaaaaaaaatttaaattaaaaaaaaaaaaaaaaaaaaaaaaagaaaggtttaatttt

SEQ ID NO: 332853 - DNA, 302 bp, Zea mays
gaattcccgggtcgacccactcgtccgaaaaaaaaaaaaaaaaaaaaaaaaaaaaaatttaaataaaaaaaaaaaaaaaaaaaaaaaaagaacgggttttataatttaataaaaaaaaaacaaacacataaaaaattcgggctccccctttatataatccaaacttacttccccttacttgcaacttctttccttttttatagttttaccaaaattaaattcaccccccttctttttccaacccctttactggaaaacccctattcttccccatcttattctctttcaaacaaatccccctt

SEQ ID NO: 332854 - DNA, 390 bp, Zea mays
  unsure (1)..(390): unsure at all n locations
gaattcccggttcgacccactcgtccgccaaaatccaaatcaccacatccccccatttatttatggggtttttatgtccacctccgccgccaggtccaacttatcccacnaccaccctctaccatatcgttctctctgctctccttccccgctaaacccaccatcacctccaccaccatatctaccccttccccaagaccctcccgctccacccatgtccatttcctctattacgcccgctgcctcctcctccgccttcgcgcgtcgtctcaatatcctacgacttcgtccacccctcggtctctgccttcttattacttccacaacctcatttactaccccaactactttcgcattttttacaccactctgttcgtactatatcattca

SEQ ID NO: 332855 - DNA, 71 bp, Zea mays
taaaggatccaagcttacttacgcttgcatgcaacgtcatagctcttcaatagggccacctaaattcaatt

SEQ ID NO: 332856 - DNA, 445 bp, Zea mays
cgtaggcatcactatctctataagtctacgctcatgcatactctgccacatccagggccgctttcttttcgcagttcttcctgcatctgttccaaggtctgctcaaagcacgacaccgaacgggaaagataatggcaacgatgatcgccgcgatgcgcgtgctgttccgcgcgctgaacgacccggtgatggacacgctcatggccacccgcacgtgcccgcgctcctgccgggccttcgtcgccgtcgacgtggacagcgagctccacttcctgcgcctgtcgctgtgcctgcagatcaagctcaagtactagtgcacgcactgcctcagccggttcctcaccctgtacagctgacagctcaagaacgagctacactacgctacacatgcacctatacatctattcttgccaatctccttgccaagcgcccgtcggccatgaca

SEQ ID NO: 332857 - DNA, 371 bp, Zea mays
gacggacgcgttctgccgacagcctttcagctgttgtacaagctatctttattcatgtgtttgggagatatgagtaggcttttttatgaaatccgcgtaataaaactggtcagtgccattcgaaaaatcttgtccgcttacgagaaatattctgatgctgtaactggtctgagtggtaaagacccgtcctatatcttactagcattagaagccatggctaatggtagagattctactaggctctcttgggaccttgcccttgagtcttgcatctcaaacacttcttggtccttcaactattgttagccatacatgcaaacattcaaagcatctgaaagatcatgttacctctccaccatgtactaccattg

SEQ ID NO: 332858 - DNA, 448 bp, Zea mays
  unsure (1)..(448): unsure at all n locations
attcttcgtcatttggcaaggggggatcccgtggtggtggtgactactatggtggaggcagcggtggtggttatggtggtggcggacacggtggagctggggctccgagtgcctgggattgatgttacagttgctcccaagtagaggggtctgccaagtttaggtcactttttactctagttctatttaggtatacatttttggtaggagctgttatacagcaacaagtacaaggtgaatgtggtcatcccctttcttcttctggttgctactggctgcagtcttaatcttgcagatgttcattacgaagagggtcttgaggacattcaagcacacgagattcctagttaggtgaaattccttggtagggatagtagctaggctctgacaagtagtgcttggtgccctntgctctttttccctttgtcagcgtcgaattttggtggtc

SEQ ID NO: 332859 - DNA, 145 bp, Zea mays
ccaagataatgacatgaacctgtatttcaacattctctggtccaaatctgttttgttatcgtgagcataatgctgtatatacaagcgtatcgtcttctctgattattatatatacatggtatatatatatagatgttccagctgc

SEQ ID NO: 332860 - DNA, 449 bp, Zea mays
gccaaggccatcttgctttcaaggataagcttagggctctcagatccgtaatacctgaagtgcgatattattttaacttgcaatattttgtatataggtcattgatctggcaacttctcttgcaaaagttgcggatgtggatagaaatcttggtaacgaaagtaccgcagttgagggttttgaggaagcaattcgatgccttgagaagttgaagctggattctgaacaaactaccctcgaacagcggcgcctctcggttctcgacttcctgcacaaccagttggccgataagtaagacatagtcttctcctaagaaggcaccaccagcagatatctcctcatggtaatgttcaactctactacataaagttccctttggaaagagttggtctagaagcagcgatgagtgtgtgtttaccatcgtttgaaactttgtcacggcacaaaat

SEQ ID NO: 332861 - DNA, 378 bp, Zea mays
tcccacgcgtccgaaaaaaaaaaaaattaattaaaaaaaaaacaaaaaatataaaaagagtacgattttataaacacatacatacaacaaaaataaaaattatctattctcactcctgctcaattctctgtccctccttctacaacgtctttactttaaaatccttccccctacccaccttaatcggtttcccttccatccccctttaacctgctgcaatattctcaaataactactcacttacctcccttcccatcagtttttcaccctctttcccaattggtactcgccctgtaccatttcatttacctctaactctctaatgcctactcgcatcttgacatttccattttcctatgccctacttccctctccttt

SEQ ID NO: 332862 - DNA, 204 bp, Zea mays
aaaaaaaaaaaaaaaaaaaaaaaaaataaataaaaaaaaaaaaaaaaaaaaaaaaaaagaagaatatattaaaaaaaaaaaaaaaaaaaaaaaaaaaaaaaaaaaaaaaaaaaaaaaaaaaaaaaaaaaaataaaaaaaaataaattcaaataaccaaaaaataaacaaaaacaacactattaaaaaaataaaaataaacaaat

SEQ ID NO: 332863 - DNA, 275 bp, Zea mays
aaagaaaaaaaaaaaaaaaaaaaaaaaaattaaaaaaaaaaaaaaaaaaaaaaaaaagggtgcgcatatatacaaaaaacaataaactaatataaaaaaacaaaaaaaaaaaaaaaaaaaccaaaaaagctcatccctttttactgaacaaaccttgcctttccttcacttaatgaccttcctctacattctccttacttaatttaaattaatttcccggattttttcttcgataccccttgccaacatttgctctcccttactctattttccta

SEQ ID NO: 332864 - DNA, 365 bp, Zea mays
cccacgcgttctactaaacatgcacataaactgacttactttcagtcaactttatgaagtgtgacttattgttggtcaaatgtatgaagtttgagtttttaaaatctaatccgcctagtaaaaatgaactgaaggagtatctctgaaaaattgcagcttcaaaatcacgtactagatgttcatgagcttttcatagaagactactattcatacatattatgttcccatacttgtttcacgattatccttgcagccattcaaatgttgatgccctgtactctttatggaggttacaaaccgtatagtcaaacttatatgtgtcaagtttgtaagggttttcatggaaaatctgaattgtattgcag

SEQ ID NO: 332865 - DNA, 241 bp, Zea mays
  unsure (1)..(241): unsure at all n locations
cgacccacacctactcctactcataattaataacaactataaaatttaattttctgaaaaaaacatatcacacaaagacgagttaaatttataaaaaaaaaaaaaccaaccactaatngttctgccttcctaaagaaccaaatcttacttcccctttcatccaacataataactattccatagtgccacccaaattaaaaaaactccccgaacatttaacaacattaataacttaaaaacc

SEQ ID NO: 332866 - DNA, 227 bp, Zea mays
tccggaattcccgggtcgacccactcgtcctaaaaaaaaaaaaaaaaaaaaaaaaaaaaaataaaataaaaaaaaaaaaaaaaaaaaaaaaaagaaagaataaaaaaaaaaaaaataaaatacacacaaatacaaaaaacttaaaaaccaaaaaaaccaacaatactacttttcaattcattgacccttattcttaatctcttcataccctatccttcacttttccc

SEQ ID NO: 332867 - DNA, 295 bp, Zea mays
cccgggcgtccgggcttctcctccccctccggttcgggttcgggttcgtgaggttctccgggggtcgggttcgtgggtgagcggatcgagatggcggcgtcggatgttgagtaccgctgcttcgtcggcggcctcgcctgggccacggacgaccactccctccacaacgccttcagcacctacggcgaggtcctcgagtccaagatcatcctcgatcgggagacgcagaggtcccgcggcttcggcttcgtcaccttctccacggaggaggcgatgcggaacgccatcgagggca

SEQ ID NO: 332868 - DNA, 261 bp, Zea mays
aattcccgggtcgacccactcgtccgaaaaaaaaaaaacaataaaaaaaaaattaataaaaaaaaaaaaaaaaaaaaaataaaaggagcaattttaacaaaaaaaacaaaaaacaaacaactaaaacacaaacaataaaaaaaactcaaacaaaaacttacacaaaaaaaaaaaaaaatacttacccaccaatcaaccaccccaattttcttcctaacttattcttctcacactacatcattttttatatctcccccctat

SEQ ID NO: 332869 - DNA, 199 bp, Zea mays
aaaaaaaaaaaaaaaaaaaaaaaaaaaaaataaaaaaaacaaacaaaaaaaaaaaaaacgagaaagaaatacacaaacatacaaaaaaaaaaaaacaaatataaaaaaacctaaatggcgctccgttttacaggatccaacattacgtccccttgcataccacgtgttagccctcatcttaatccccttaaatcaaatc

SEQ ID NO: 332870 - DNA, 378 bp, Zea mays
  unsure (1)..(378): unsure at all n locations
caaccttctccgccgccggccgccggctcctctccaccgccgcggcagcggcagagaaagccgagctccccgtccctatcgcccgtcttcgccagctcgcccgcgctggccgcctcgacgacatcgacgcgactctcgcgcccctgttcccttcccaccccgtcgccgcgctctcggccctctccacgctgggcctncccgaccgcgcctncgctctgctcggcaccatgacgtcgcccaataccgcgcacctgaacgcggtcctcggtccactcctccgccgncgncgcctggccgggctcgtgccctcaatcctcgccgcgcatgcctctgtcccgcgggacgccgtcacggacagcatcctcgccaagtcgctct

SEQ ID NO: 332871 - DNA, 153 bp, Zea mays
cggaattcccggttcgacccactcgtcctcccactcgtcctaaaaaaaaaaaaaaaaattatatataacaaaaaaaaaaaataataaaatagaaaagtttaaatattaattttacactccccccccctctatttttttccaacacttcttaca

SEQ ID NO: 332872 - DNA, 376 bp, Zea mays
aaaaaaaaaaaaaaaaaaaaaaaaaaataattaaaaaaaaaactaaaaaaaaaaaaaaaacgagcgtcttttctaagaggctccatgcattacttacgcatgcttgcaacttcgtatctcttctatcgcatcaccttaattcaattcaatgcccgcatttttacaacttcaagactcgaaaaacctttgcgttcccgaattaaatcctcttggtgtaatttctcctttcaacagttaccttaatttcgaaattgccatcacatcacggctttgcctacaagggctcaacctgaatgacaaatggtacacgcacttaactggtccttaaatcgcaacatctttactgattacccccatcatgcccggtacatttgcc

SEQ ID NO: 332873 - DNA, 345 bp, Zea mays
cccacgcgtccgagcagctcgccctggcccgacgcctctgctcggccagcagccttcgcgcccgtattcccctgctcgttctcccttacgcagcagcagccgtaccttccctgcagcgcccctctccatttttcccctctgctccctgtgcggcgagctcatgtgctcacagcacctctccctgccttctctctgtccccagcgaccagcagcaaggacaacccccttccctcgctcctttcggatgtgcgcgaggtgttcgacacaatgcctgcgaggaaggaccgagagatgatgatcgagccagtgatgtggtgccaaccacaagatgccgtggtggacgac

SEQ ID NO: 332874 - DNA, 149 bp, Zea mays
atcccggtcgacccaccgtcgcccacctccgaaaaaaaaaaaaaaaaattaaaaaaaaaaaaaaaaaaaaaaaaaaaaggagggaaaaaaaaaaaaataaaaaaaaaaaaaaaacaaaaaactaaaacaaaaaaaacgctgcccatttt

SEQ ID NO: 332875 - DNA, 324 bp, Zea mays
  unsure (1)..(324): unsure at all n locations
accacgcgttcgggtaaatgaatctcttggtttgcaatccaaggatgatcctaagaggtgtgnttctactgagcatgagattgctcttcacgtggtgatgactctatatagcactttgcacagtcacaatccttccatccttatcatgagttccattagttcaaatgcacatacacctatgcttttgctgctgtttacgttgattacccctgtatcatactctaaatctacaatatagcgtatcctgcacattcgctcacacccccactttatcctcctatcttgactgtccatctacccaaacattaaccatagccatttact

SEQ ID NO: 332876 - DNA, 325 bp, Zea mays
gaattcccgggtcgaccgactcgtccgaaaaggactgacctcggccctctcctcttgttcttctgcttccccaccgagtctcctcaggcccgtctctctctctctgtcccctcccttcctcgcctccgatgccgccgactcctccgctcctcgagccgcgcgactacctcggcgccggcgccacctagtcgtgctgctcgtcgtgctgctcctactgccgctagggcacattgccccacctcgcgctgcggatcgtgcttccggtgtccgacgactcccccggtcgcggcgcggacactgaacacgcccgcgcccacgtctactc

SEQ ID NO: 332877 - DNA, 295 bp, Zea mays
tccggaattcccgggtcgacccactcttcctaaaaaaaaaaaaaaaaaaaaaaaaaaaaaaataaaaaaaaaaaaaaaaaaaaacaaaggaacgcataatttcaaaaactaacataacaaacattcaaaaaaaatatataatctacgtgcctctctttacttcccttccttacttactccttcttccacattaatactcctactatccttccacttactttctttccactgcctctccttttaccccgtttttccctgtaacaaccttgcctttacccacctaactttccttcct

SEQ ID NO: 332878 - DNA, 222 bp, Zea mays
attcccgggtctacccactcttcctctgactctttgtcttactctttgacttactcttgtgaaaaaaaaaaaaaaaaaaaagagaagaattatataaaaaaaaaaataaaaaaaaaaaataaaaaaaataaataaataaaaaaatatcaattaataatatatccaaaaaactaaaatctcatacattgctcacattttttataactgtaattcttataaaaa

SEQ ID NO: 332879 - DNA, 203 bp, Zea mays
atcacatcttttgcgtatccattttacctttcatataacataaaagcgctatgatgggaggctctcgtggtgataacacttctgaatcaaatattatactcctaacgataccacgcttcttcaatccatagcttatttattatattatatgctcttgtgacatcttcttccctggatagcttgatagattcagctatagactt

SEQ ID NO: 332880 - DNA, 307 bp, Zea mays
acaacacctactacgaatatcaagaacccttcggataaatgagcgctgcgccggggggagtgttactcctacttgcgactgctgctacaacctaagcccctgatgtgcaatcgtccatcttaagccactcgctgaaccctacgttgaggcgcgcgttgaccaatctacttctgaagaagatggtaggcaaccatgtgtcgcaatgctaccactaccacatcatgcgcgacgacccgctcatcattgcccgcgaatagaaggagcgtccagctaaactggaaatgctgaatcgacttgacaagggccc

SEQ ID NO: 332881 - DNA, 369 bp, Zea mays
tccggaattcccgggtcgacccactcgtctcgcccacgcgtccgccagtagtcatatgcttcgtaaaaaaaaaaaaaaaaaaaaaaaaaaaaggaaggaataaaaaaataaactacgcttcatcactgagatgatgcgggatgctttgcgccagaatgctactgacactgcaaccattttatctaccgaagctcaccatgacaacatgcactcaacacaccagttcacaggttgaatccatagtacgcatcagctttatgactccctagatttactagaatttaaaccattaaatgatgagagaattggcattatacaataaacttttggaaaacgtgttgacactggagtcgtattattaatcaacgg

SEQ ID NO: 332882 - DNA, 302 bp, Zea mays
cccacgcgtccgcccacgcgttcgcccacgcgtccgcgtttgtatatctaagcacagtactgctcattgcatttgggtttcatggattttgtcttcattatcttatatttgttatgcaccctcattttttgtgcaggaggcatgctctcttacttcccaagatctcttgcacggaaacacatccaaagatagcacagcttctagaacatcacaaacctaatgtgtcacttcttatgctaaagtgtgcagagtgcgatagcttctctgctacagaaaactttgaaaaagatggcggttcatct

SEQ ID NO: 332883 - DNA, 233 bp, Zea mays
ataaaaaaaaaaaaaaaaaaaaaaaaaaaattaaagcaaaaaaaataaaaataaccgggcccgcgtacacctatataatacaaatctccatctactctagtgtaaactacaataaagttcactaacccaatttttaccacattatcactcaaaaaactcctgacctacccaactttttcattctgctattattcactccattgccctccggcatcatatgccgtacacatatt

SEQ ID NO: 332884 - DNA, 205 bp, Zea mays
agggttggtttttttaacgcgtggggttacaaaccccaagcggcccttttagaggacccaagcttaaaaacccctcccttcaaacccttaatttttttattgtgacacctaacttaaattcacacgcccgactttttacaacgtccgtgactaaaaaaacccattttttaaccaacttatatcttttaaaaaaaataccccttta

SEQ ID NO: 332885 - DNA, 297 bp, Zea mays
gaattcccgggtcgaccgcactcgttcggatcgctgaaactagggtgcgccgcataaaatcacgtacgtagtttttgagctcggaaaagccatctcatcgtttgtgatcccacgacctgttgcttaacatgtggcatctccgctgcaaccgagtacctggactgaaatgttcatgttatcgtcaactaacaactgacctggtttacttcaggccctactgtataattacaggaattggttggtccatctttgctgatttccacagcattcttatggtaaaattattactgggagttt

SEQ ID NO: 332886 - DNA, 237 bp, Zea mays
gagacggagatagtattgtcatcccgtcttccctcacccagtcaccctgactggacggcgggcggctgatgcgcttgtcatcccctggtccctttccttttcgggccccttgggaaaatttttggccgccgtttggccgatcgttaaaggctgaataaccggcgggtggttcggattaccatcgccgactggaacgccttctacgttaacttggaccgggccttcattcaccccaac

SEQ ID NO: 332887 - DNA, 439 bp, Zea mays
cccacgcatccggctttgcgtgtcatcttgtttcggaccttggtgtaccactgcggggcggaggtttactccttcacacattgacttcctaggataggcttgccaccgcgttttgctagatgagtcgcgaaataagcttttacttcctcgctgctgtgggtgaagtgactgtaattcactaattttgaactaacaaaacccaccgttgatttgtatgatacgttttgttcaacagtttgcgtaccatctttcactgtggtccatcttaatcaacaatcaattccgcaatcatctcaaactcatgaagcaagtaatctgagatctccagttgatgtcaatgttggagatggctcttaaacctcacctgggcagcaaaatggtctggtcactctctctcagataatggacttttttggatcaatgctcccaggcgaaaatg

SEQ ID NO: 332888 - DNA, 113 bp, Zea mays
attggtggtgccctcttttagatttcttatgagttatagttcaataataaagtttgttgtgggatgtttgtggcttcccagaaataagaaagtacatttctagattcttaaaa

SEQ ID NO: 332889 - DNA, 160 bp, Zea mays
agcggaccagccgctgaaagaaaagggttcctggcccaactcgcatccgtgtcaccgcgtgcgcgggtcgaatcatccttcttccgtcaccatacatactgtagacagtcgaacaatcgccggctagacgcccctcttctggacgccgcacgccttgacg

SEQ ID NO: 332890 - DNA, 218 bp, Zea mays
atccttaaacccaagaattcaccttcgtcgcccataacgccataccttttgtgctatccagattaccaccaaaactgaaccttgaaccctatctcgaatggtatcaacgactcattcttaaattacgaaagcttcaatcacaaaatgttctactgctcccaacataaatataataccacatgttatattgaaacatatatatccatcatccatatacc

SEQ ID NO: 332891 - DNA, 218 bp, Zea mays
aaaaaaaaaaaaaaaaaaaaaaaataaaaatataaaaaaaaaaaaaaaaaaaaaaaagggagtgaatatttttaaattaaaaaaaacaaacaaaaaaaaaaaaaaaatgttctaaaattttataatgaaacataatattttattccttcttccaaagtttatatcatcttatcttaaaaataaatttaaattaattaacttgactctcttttaaattt

SEQ ID NO: 332892 - DNA, 365 bp, Zea mays
ggaaaaaaaaatctcatcgactctatcctgagtcctgactcctgacatctccgagcgtgagcgtccccgtccccggcgccgtacctctcgctattgtcctcggtgccgcaccttctacatctctgtctcaccgctttagcacgtacaccacgcccgcctgcgctagatcccatctgaagccagcggacatcatacccttgagcgctagctgggctgcatctctaacctccacaggcagcaagcgagcgtggttagcgccgcagtggtttcaccgaccttaaatcgggccgtaagctcgaggactgtcactaatttcttgagcttaaagtgtcagaggggttaataccgcagtgtatgagggtgac

SEQ ID NO: 332893 - DNA, 169 bp, Zea mays
taattcccggctcgaccgcactcttcctaaaaaaaaaacaaaaaaataaaaaacttatttaaaaaacaaaccattaaactactatgtttagttgttcaatttaactttatgacaaaccccccaatcaatacttacacattcctttaaaacaatcccttcctacaatata

SEQ ID NO: 332894 - DNA, 74 bp, Zea mays
ttctaaaggacccaagcttacttacccatccttgcaacgtaatagctcttatatagggtcacctaaattaaatt

SEQ ID NO: 332895 - DNA, 368 bp, Zea mays
aaaaaaaaaaaaaaaaaaaaaaaaaataaattgggccgccccttttaaagatccaaggctagggtccccttccttccaactcattactcctcttttatttcaaccaaattcaattcaattgcccgcgttttacaaccttcttacctggaaaacccctgcctttcccaaattaattcgctttcaacaaaatccccttttcgccacttgccttattaccaaaaaggccccacccatccgcctttccaaccatttccccaccctaattgccaattggaaccccccttttaccgcccatttaaccccgcgggttttgttgtttacccccaggttaaccgttcaatttgcaagccccttacggcccgttcttt

SEQ ID NO: 332896 - DNA, 260 bp, Zea mays
  unsure (1)..(260): unsure at all n locations
ctactcactacccacaccactacattttcctacaaaaacgaccaatactatactaagcaaaacttaacaccatggaagaccnacccacccaccgtcatctccactctcatcttcctactccaccgccacgacctgagctctaccatcgctcactctctccactccacctacctatcctaccagtgaataaaccatgacatctttccccacgttcttctaccccctctactgccctcatcatcaccttcatctctaccacc

SEQ ID NO: 332897 - DNA, 273 bp, Zea mays
ccggggggctacggcgacctccagcgcggtcggtggcatgcacggcgaggcgcagcagcaccgcaagtaattcgtcagtgaggacggcgctcaaggccgcgacggccgcgaccttcggcgggtcgatgctggtgctgtccgggctgatcctggccggcaccgtgatcgcgctcacggtggccacccccgtgctggtgatcttcagcccggtgctggtgccggccggcatcgcgctggcgctcatggcggccgtgttcgttacctccggcggcc

SEQ ID NO: 332898 - DNA, 155 bp, Zea mays
ccacgacacaaccaaccatcatctgaacaacaccgatgcagacctgcccaatcctcaccctcaccctgatcacgctcactacgaccaccaccacgctattcatctccaatcccaaacaatacactgcactcaacattaatccgactaccaaaaat

SEQ ID NO: 332899 - DNA, 251 bp, Zea mays
ccccgactcgctttcaccatacccctacctaaattaaaaaaaaaaaaaaaaaaaaaaaaacgaaacgaaaaatttaaaaatttgaaaaacccacccaatctaacacacaaccatacattacaagaacaacatctactaaaataacctccataaacaacacccatcccacttaaaaatcctacctacacgaccactaaaacactctcaccacccaaacaatccacatcactcaacattaaacacactaccaa

SEQ ID NO: 332900 - DNA, 337 bp, Zea mays
attcccgagtcgacccactcgtccggtggtgcaagttctgaaataaaagaatctgtttagtttcaaaaaaaaaaaaaaaaaaaaaagaaagatataaaaaaaaaaaaaaacaaaacaaaacaaaaaaaaaaaaaaaaaaaaaaaaaaaaaaaaaaaaaaaaaaaaaaaaaaaaaggccccccttttaaaaaaaccaaacttacctacccctacattcaaacttaaaaccttttaaaaagtgcacccaaaatcaaatcaactgcccttcttttaaaaacctcctaactggaaaaacctctccttacccaaactaaatccctttaaataaaatcccctt

SEQ ID NO: 332901 - DNA, 278 bp, Zea mays
ctactgctcacttaattcctcgatcgacccatgcgttcgtctactgcatccatccacacatccgtctacccttctctaaataaatttaacactaaatgtgaggcttataaaaaaactaatacaacaaaataaataactactacacacaaatattcaaaatcccaattatgataaaattgtaaaaagaagtctattactaccttaaaaaaagtttgatacaacccttaataagatccactttattccaatctattctttttaatgtgacaacattattt

SEQ ID NO: 332902 - DNA, 346 bp, Zea mays
attccccgacccacccactcttccgcaacaaacactaaatacccataaaatctatttacaaaaaacaaaaaaaaacaccaaagaacgcttacataataaaattaaacaaccccctacctacttactaacctcacctcccaactttcaaccaccctacctaacactccacaccctacaacttaatcactttcctataaacttcccaaattcaatatcactctccttcttttcaaacttacctatcttcacaaaccctaacttatcccaactaaatcccataacactacatcccccttatcccacttttcctaatacccaaaatccccaaaccaatctccttttcaaa

SEQ ID NO: 332903 - DNA, 256 bp, Zea mays
cattcactcccatccatcatatatccttactacatcactcacacttcttcacaaaccctattcttatactccaatattttcctcaaatatttattcatttataatctaaatctccctattatctacaccaaccatcctctattctaattaaaatatcaattattctcaaatcaataatctacattctattcatccacaactcaatcaaaactttctccatttcatcttattaatcattacaattttcttaccccac

SEQ ID NO: 332904 - DNA, 60 bp, Zea mays
acccactcatcccaacatagcctttatctattcctgtcaatttattcttcttacataatt

SEQ ID NO: 332905 - DNA, 85 bp, Zea mays
catatatccttactaacaccactcacacttctccaacaaccatacacttatacttcaaacattaactccaaatatcacaacactc

SEQ ID NO: 332906 - DNA, 321 bp, Zea mays
acccactcgtccgaaaaaataaaaaaataaatatataataaaaattacataaaacactaaaaaaaaaaaaacaaatgaaaagctaaaaaaaacaatttaaatataaatataaaaaaaaaatcaaaccctatctatatctcaaagaacttatacactaatatcttaaagttccagataatgatttctaaaaatgtaatattgcatacatttcactcattcattctgactattctgaatattcagatactgtcgccctaaaattccatataaacatttatcgagcttgttagcaatatatactacttatacatccttacactt

SEQ ID NO: 332907 - DNA, 78 bp, Zea mays
ccaaaccgacccactcaaccaatcggctctctttatccttctattgatttttcttttactaacatcaacatcgtatta

SEQ ID NO: 332908 - DNA, 189 bp, Zea mays
catctacccatacacttccataccttcataaatacacaacctatatcctaaatcacatcaaattgatccataaatcttactccattcatacaactcactaatataaactcatttatcttacatcaaccacatattaatcaaacatatatatatcccatacaaacttaacatcaatactaactactcatt

SEQ ID NO: 332909 - DNA, 328 bp, Zea mays
cccacgcgtccgcccacgcgtccgcggacgcgtggggggttggcttctcctccccctccggttcgggttcgggttcgtgaggttctccggggttcgggttcgtgggtgagcggatcgagatggcggcgtcggatgttgagtaccgctgcttcgtcggcggcctcgcctgggccacggacgaccactccctccacaacgccttcagcacctacggcgaggtcctcgagtccaagatcatcctcgatcgggagacgcagaggtcccgcggcttcggcttcgtcaccttctccacggaggaggcgatgcggaacgccatcgagggcatgaa

SEQ ID NO: 332910 - DNA, 258 bp, Zea mays
cccgagtcgaccgacgggtccgaagggcaagtacatctcccttctcttaggctgggttttcgggcggctacagagctgaagcgaccgggtgacacggtaggttggaggcaccgtcgcactgtacactctgccagttctagatgagaaacatgaggacaacgtacatgcactcggtgagaaggctattaatgaactacagcggggttatgcagttcacgatgataattgcctgatatacatagctatgcacctgcttaa

SEQ ID NO: 332911 - DNA, 349 bp, Zea mays
  unsure (1)..(349): unsure at all n locations
actcgtcccaagggcaactacatcttcttgtcacacgctttcccttacacaatcctcccttctcactcagtncagtttaacaccacctttcacatccccttccccatctcctactcatacatcaatccctatatcctcccattctacacataactaaccacttcaattatgtctaacatcccactagtccgttaactctatattaccagaatacttatcctcctccccttcctctaatctattctcctatacccatccctattcacaacaaacaccctccatatgaaccaccttatttacctcataacaaacccttccacgcttcaataccactccatcataacctact

SEQ ID NO: 332912 - DNA, 356 bp, Zea mays
aattcccgggccgacgcacgcgtccggctatgctgctcttcaacccagagctccatatgccataacatcagccgcgaacacactgcgttgtttctcgaaatatgtgctgactacatcactgcactcgactattaccgcctgctctaaactcgacatcgtccgcgatgaccgaactggtaaaactacactttgtaacgatcatctcactgcatagcttgagacgacacatgctccaaccattgatgcggaacatcatcctatggatatcaccactaactgtcctaacatcacgatctactactgtcatacacgaacgtcaagatacgccagatgacctcacgcatggatactatatc

SEQ ID NO: 332913 - DNA, 225 bp, Zea mays
ctcacgcatccggagcaactgctccatattcttgtatacctactgtaaactcgttgctaggctggcgaatcaacaatggcgcgttcataagcaactgtaaacggatgcgacactcggaaatacagttgcttacaaacaggcgcagacttcttcaccggaatgctagctgttacctactgatgtgcaacttcaagcaattcacgccttgcctgatattgctgaact

SEQ ID NO: 332914 - DNA, 297 bp, Zea mays
  unsure (1)..(297): unsure at all n locations
cttgggcgtacgcggacacagccccgatccgaatcgtcgtccttgcgagcctcgccgatgccccggtcccctcccctcgcttcaagatgcagatctttgtgaagaccctcaccggcaagactatcaccctcgaggtggagtcttctgacaccattgacaatgtcaaggctaagatccaggacaaggagggcatccctcctgaccagcagcggcttatcttcgccggcaagcagcttgaggacggacgcacactngctgactacaacatccagaaggagtcaaccctncacttggtgc

SEQ ID NO: 332915 - DNA, 339 bp, Zea mays
ccgggtcgacgggagccacgcgtccgattatctcgccgttcccatggacatcgatctctggcgctagacatgctaagaggcaggcttgatcagtgcgatgtatgaccgaatggaggcttgagggattgaaccatcaataacaagcaacgtgcttcttctcattacttatcttgtgcacgctgttttacgttcaagagatcaatcaaagcctctagaactgagaggtgaagatatccaaggtcggaaggctggaaagctctggattggagatctaactgcctcgtgtgcaagtggtatcaaacacatgatagacttacaacatgagggagaggagataga

SEQ ID NO: 332916 - DNA, 221 bp, Zea mays
cgttcccatggacatcgatctcttccccgacatcgaccttgacggcctgctcgcctccttctccggcgaccccgccgccgtctccggcctcatcatcccgtccacgcctccgccaacgccgtcgacggcgcacgatgcgcaggcagtgtcgccggattctgtgacctcccggacgaacccactcgatgaggtggcgctctcagagatcgagaggctcctga

SEQ ID NO: 332917 - DNA, 217 bp, Zea mays
  unsure (1)..(217): unsure at all n locations
aaaaaaaaaattttttttaaatatnganannnaaaaaaaagggggggaattttttaaaaagaacgccacccacccccccnccnctacaacaaaccaaaaaaaatatattaaatttctttctccaatggggggcccccgtttaaaaaaaaaaaaattttttttcccgtccatccaaacgaaaatccttttcttttcgcccccccaaaataaattaacg

SEQ ID NO: 332918 - DNA, 199 bp, Zea mays
cccacacatcccaacacgcctctctatagtattaaatcttacgcacacgttctagcggaggcatacttacataatcgtgcatgctacattatatctactctatagtgtcatacaaattcaatacattgaacaccctttcacatacccaagtaaatggaaaaccataacattacccattttactaatcttgcaatacata

SEQ ID NO: 332919 - DNA, 85 bp, Zea mays
acgcgtccgcctacgcgttcatacccctctcggaattctctgaccctatcattgcgaaaaaatgtaggggaaagccggacataga

SEQ ID NO: 332920 - DNA, 93 bp, Zea mays
cccacgcgtccgataatgcagtaagacgacacacattatcatgtgtggtatgaccaataatagatccatggtcataataaagttttggttttc

SEQ ID NO: 332921 - DNA, 238 bp, Zea mays
  unsure (1)..(238): unsure at all n locations
ccgggtcgaccgcacgcgtccgcccacacgtccggcctcgccttcccttccccaccagcccgtctctctcttctctctgactgtctctctcntagccgcgtccacctcgcaacaacaagcaagcgccaccaaatggcgcctctaagagaccgcggaacttcttccccggcggggtccaacaacctggtggggtcgttccgcgagaagcttatccactttgtcccccacctggcccggc

SEQ ID NO: 332922 - DNA, 314 bp, Zea mays
tgtaattcccgggtcgaccgacgcgttcgggtggccgaccccaaccccagctggccagttcttcgccggcgaagagcacttcaacgggggcgcccaccccgtggcttggtgctttgtggcccgccaaacccatcaccccaaccctcactcgagctacttggttaacttcgcgtctttcgatctgggctgaatgcgtctttcgatctggacctaactgaccattacccgctcctttctgggtatattctcaccttacctggagaaaaccagaggggatttcaagaaggccaggggcaacaaccaaaccaaacttc

SEQ ID NO: 332923 - DNA, 380 bp, Zea mays
tacacaacacacacacaaatactctccattttattccatctcaaaggataaaataatggtgtgtctctccaacaagcttttccgcttcctcctcctgctcgttcgatacacacgaacgcaatgcagaccgctgactatcttctccgccaggaagtcccaatctcatagcttccacttcaagggaccttactcgatggacgccaactgcgcaaacgtctgcctgaccgaatgtttcaccgtctgtatatgcaaagccctacgccaccgctacttctgcaccatggactgctaatactgcctaatctctccatccctcagctcgtgtcctgcgtgtgcatagccgcaccatatcagtaaaacatgcatgcatgcattaccta

SEQ ID NO: 332924 - DNA, 217 bp, Zea mays
  unsure (1)..(217): unsure at all n locations
tcccggaccgacccatccgttgaaacctaaattcttaatgggtccacctaataattaaaatatatatctaaaacctaaagaatgtttttaaataaaaaatgtctggaaactttnttaaaaaaaccctaccaaaaaaaaaatcaaaaaaaaattaaaaaattccttagaagtaaatcccctaaaaaactttataaaaattatccataatacacccctc

SEQ ID NO: 332925 - DNA, 56 bp, Zea mays
cccacacatccaacctcaccttcccttacttaccatccctactttctcttctctct

SEQ ID NO: 332926 - DNA, 198 bp, Zea mays
  unsure (1)..(198): unsure at all n locations
ggtccggaattccctgtcgctctgccgcctcccgcccgggaacagaaccttaaccacaacctggtgcccggctcccctcaccaagctnnctggaagggggttccgggaacggaggggttcccctcaaaacgcaatttccgtcttttttaaggcccccggcccgaaagtgacaaaggggtttcaccccgtgggcacggg

SEQ ID NO: 332927 - DNA, 284 bp, Zea mays
  unsure (1)..(284): unsure at all n locations
taccatacataatttacatccattttccttantaataaattatggatcgcntcttttaaactatcggcgcaccctcacctaattctattnaaaacttttnatttaccaacaaaaaagaaaaaaccaacatgtaatcctcacctactggtctaccttatctaccgtccacttaattataaccaattttttttattttttaaaaaaaaaaaaaaaaacnnctgcctgttttcccaaaaaacccaaaaaaaaaaaaagttcggaccntttnnggggtccaagcttac

SEQ ID NO: 332928 - DNA, 139 bp, Zea mays
  unsure (1)..(139): unsure at all n locations
gaattccgactcgaccgcagtcataaaaaaaaaaaaannntaaaaaaaaaaaattttttatttattaaaaaaaaaaaaaaaaccgcggaagaaattttaaaaaaaattggcccccccccccaacaactttaattctaaa

SEQ ID NO: 332929 - DNA, 273 bp, Zea mays
  unsure (1)..(273): unsure at all n locations
cccactcgtccnttaaaaaaaaaaaaatgttttcataactttaacaaaacaaacacaggaagccatatttaaaaaaataggggccccccctcttaaaatttcaatcctaccttccccttccatccacacgaaacccncttgncctagtacccttctatatatatatttttttcccccnnnnnccaacggnngaangggaaaaacccgggggaacccaaaataaaaaccctccaacccaatccccctttgcccacttgccaaaaaaccaaaaag

SEQ ID NO: 332930 - DNA, 238 bp, Zea mays
  unsure (1)..(238): unsure at all n locations
catcttaatccgctaccatacataatatacatcccagttccttaataataaaatatgttaggtttaaccaaaactttctcccaccctatataaatcttttcaaaactttttaaaaaccaaaaaaaaaaaaaaaacccccctttaatccttaaataccggtctaacggaattacccgggacctaaataaaaatttttttttttttttnaaaaaaaaagaaaaaaaaaaaaangggggaa

SEQ ID NO: 332931 - DNA, 162 bp, Zea mays
  unsure (1)..(162): unsure at all n locations
gtcgaccgcacgcgtccgcatggaaatggattctctcacatccattgggattgatctttttccaanaaaacgtaggtgatcttaaataaatgctgcatttcctcttaaaacatctgtaggtcttggaggttatctacgtgtcatgggatctccaacagattt

SEQ ID NO: 332932 - DNA, 77 bp, Zea mays
taccggtcaggaattcccggatcgacccactcttcctattgttactagaaattatgtttcaaaaaatttttttttca

SEQ ID NO: 332933 - DNA, 206 bp, Zea mays
  unsure (1)..(206): unsure at all n locations
atcctaacaacttcaaccctgtttagaggctctatcactttaacatancaaccatatgtagacaaatttaaaccactgattacctcctcatacaaatttaaatccaacagggaacataaacctgataggggctttcaaaaaactttttactaacttgaaaatatatataccttaaagtcttcggcaattttttacaaccccatggg

SEQ ID NO: 332934 - DNA, 131 bp, Zea mays
  unsure (1)..(131): unsure at all n locations
ttcccgggtcgacccaagccttccggtggttccnttttattttgccctccaccagggttaaccaatttttggaaccactaaccggggggccgaacttttaccaattcaccattttcccaagaggatcatac

SEQ ID NO: 332935 - DNA, 62 bp, Zea mays
atccccggggcggccgacgcgtccggagggccccaatgttagccccaaggttttttcgagaa

SEQ ID NO: 332936 - DNA, 222 bp, Zea mays
  unsure (1)..(222): unsure at all n locations
acgcgtccgcgctgatnntttctttgaaaaacctgtgtttattgtttccttaaccccaagaaatgggtgtactcctaaaatcataaattgcctctccaaacaaaaattagggcaaggggttaaaattggtattggaagttaaacctttaaaaattctttacttggcttccttaccattttcctgggttttatgaccaaaattccaatttttcccaaattggg

SEQ ID NO: 332937 - DNA, 220 bp, Zea mays
  unsure (1)..(220): unsure at all n locations
cctgggtggacccacgcgtgcgggtatttctgctgaatataatgaaaatgacctgtgcacattgctttcatatttcaggcggcgtcntcagacacctggactttttctattgctttggttgtcacaaaaaatgccaagtgtcatttaaggtcttgtgaaaagggggagaactattgattccatttatttaacttacggggttgagcttactgtacaggtt

SEQ ID NO: 332938 - DNA, 82 bp, Zea mays
  unsure (1)..(82): unsure at all n locations
attcccgngtgagagcgacgcgtccggaatgccctcatctttgatcttggaggtggttcctttgatgtctccctcctcacca

SEQ ID NO: 332939 - DNA, 82 bp, Zea mays
  unsure (1)..(82): unsure at all n locations
cggaattcccggctcgaccgcacgcgtccgaaaggnnnnnnnttaccaaactaactaattctttagaaaaaaaacaacaaaa

SEQ ID NO: 332940 - DNA, 74 bp, Zea mays
  unsure (1)..(74): unsure at all n locations
cctcggccgggacggaattcccggggcgacggattcggnngaaaaaaaaaaacaaaaaaaaaaaaacttttttt

SEQ ID NO: 332941 - DNA, 67 bp, Zea mays
cacctaaaatcaattctcttgccgtcgatatacaaccatttgagtgagggatcttttacgtgtcccg

SEQ ID NO: 332942 - DNA, 253 bp, Zea mays
  unsure (1)..(253): unsure at all n locations
cggaattcccggggcgaccgacgcgtccggtgttatccacttagcactanctgcttgaattactcttccggagccctaaaantcgggggggggcgcccttaacaggggccaaaagaaatttaagggggccatttgcaaaaccacctcaaagtcttgccagggggcttcgggatttcttcacccctaccactttagttgaatcacacccccaaactacttcaatggagtcttcacagggcctacttagtttcca

SEQ ID NO: 332943 - DNA, 159 bp, Zea mays
ctgcgccctggcagcgtctgccgacgcgacacacttcaaggtgggcgggcacagtgggtggagcgtgcctggcgccggcttctagccctacaacacctgggcggggcgactccggtttcagatcggcgaccagctgctgtttgtgtaccccaaggagac

SEQ ID NO: 332944 - DNA, 352 bp, Zea mays
  unsure (1)..(352): unsure at all n locations
tcccgggtcgaccgacgctatttttcaatgtcacnaaccanagcacgaagattttctatatgcatcacaaaaagctaactgagctgcaatatatgtggagctttatcaaatcttcttancaggatcccatcatcttcacttaccaaatattatacccatgatcaaaaccatggccgaatctaacactaatgctgaccaaatagagactcttatcggtaataatcataacctgcctgagttacctgatcatgaatctatctgatacttctcttgcttgtctccaaccaaacatccttcagcaaaccaaggtggtgcttatacccactgcgttgatttccaacctctgcattaa

SEQ ID NO: 332945 - DNA, 115 bp, Zea mays
ggcatcatcaacacatacacacaccaatgttcacatgctcttgccatttattcggagggggcaattatccgatgaatggcaatcttctcttaatacctcgcgggacttgcatggc

SEQ ID NO: 332946 - DNA, 134 bp, Zea mays
aaaaaaaatcaaaaaacaaacaatctaaaatatacaaactaacaaacacaaaacatgcaacagcataaactaaaatataaaatcacctaaacaaaaataaactatccaaaattatacaaccataaatactataa

SEQ ID NO: 332947 - DNA, 141 bp, Zea mays
cggattggaattccgacgtagacccacgcgtccggcaaagacgagccgacgtatctgatgatcgtagttctcttcatcatcctgaagggcgcagcgcgcttgatacctgttgacatgcatcatctgacggccttactggcc

SEQ ID NO: 332948 - DNA, 63 bp, Zea mays
cttcatatctatcaaccttatttatctatctaatcctaactcttatctatactattcaatcac

SEQ ID NO: 332949 - DNA, 207 bp, Zea mays
cgcagcagcagccatggttttgctcttgttgacgttgggcgctgaggcccagatctgggagctcgcggagcaagacctttaaggggtggtgctaccacagcaccaactgcatctccgtttgcatcaccgagggggagattagcggggtctggcagcatgggatttgcatgtgcacctatgagtgtctcacgggtaacgatacttgcc

SEQ ID NO: 332950 - DNA, 419 bp, Zea mays
gagaaactagcatttgttgatgtttgaagtatatttatgtggatttgtgacttccttgatctcctctttcaaacaattggttcattattattattggtatggtggtgttatcgccccatttgcattaagctgctcactaagtcaaagtagtaaaaagccatggctgttgctacctagaagatgttgtgtatattcaaatcatagagcttgtgttttgggctggagatagcacaaaataactactaaaactatctattatcaagtgatccatttgcaattttttcaatctgacactcacagactcactgggtatatttcaaagctgggaagaagctaacgatataccatacttagactcactggttaaggttatgagtgcattggtttgtaaaaaaaatatttcatggtcaccacagtat

SEQ ID NO: 332951 - DNA, 207 bp, Zea mays
ccctctcgtacctgagaagatactcttcgcggacaagcaatactggaccgctgcagaggctagcatctaacattattcgtattttatttttttctccagtcactggggctagatctacaaggcgattatatattatagatctaatctggctataatttacgtataaatccataaccaactagatcttcattctgtatttatgaggaa

SEQ ID NO: 332952 - DNA, 154 bp, Zea mays
attcccgtgtgtcgacccactcgtccgttttttttttttttttttttctcttatattattctttattacttttttaattattctatcgtctagttatatccaaattaattactcaaactaattaaccccttccttcttaatcattttcctcttt

SEQ ID NO: 332953 - DNA, 271 bp, Zea mays
attcccatttctacccactcttccttagacactaatgttttccctaaaaaaatttaaaaaaaaaaaaaaaaaaaaaaaaaaaaagaaaaaattaaaaaaataaaaaataaaaataaaaaaaaaaaaaaaaaaaaaaataaaaaaaaaaatcaaaataaaaaaaaaacaaaaaaagacctcccattttaaaaaatccatattattttccccttccttccaacacttaacccttcatttaatctcccctaatttaatttactttccctatttt

SEQ ID NO: 332954 - DNA, 319 bp, Zea mays
ccttcacaaaaaataaaataaaataaatgaataaacgcaacggatggaaggatatcttcaggtgatgtaacgggaggagatgtagggagagagagaaaccaccagaggcgagcgagcaggtgtgggcgtggcgtgggggaggcgccgaggcggtcgggcccgtagataagagtcgtctcacctcgtcgtcgcagactcgcatcgcacgagaggagaacgagaggggaagggctatagagagaaacaaaggtggtcgtagatgtgagccaccctctttgtatccctcgtcaacttcttctaccaacttctttttccttcc

SEQ ID NO: 332955 - DNA, 169 bp, Zea mays
cccacgcgtccgcccacgcgttcaggcttgttttgtttctccaaaaaaaaaaaaaaaaaaagaaaaggaaaaaaaaaaaaaaaaaaaaaaaaaaaaaaaaaaaaaaaaaaaaaaaaaaaaaaaaaaaaaaaaacaataaaaaaaaaaaacaaaaacttaaaaacaaaaa

SEQ ID NO: 332956 - DNA, 89 bp, Zea mays
ctgattatgatagaattataaaaaatattgaaaggggggaagcaagaatatcccgcaagggtgagattatgaaggctattgggaagaag

SEQ ID NO: 332957 - DNA, 168 bp, Zea mays
  unsure (1)..(168): unsure at all n locations
ccggtctcggattcccgggtcgacccacgcgttcgcccacgcgtncgtccacgcgtccggttggcttctcctccccctccggttcgggtgggggtgcgtgaggttctccggggttcgggttcgtgggtgagcggatcgagatggcggcgtccgatgttgagtaccgct

SEQ ID NO: 332958 - DNA, 81 bp, Zea mays
cccacgcgtccgaaaaaaaataaataaaactaaaaaaacaaaacaaaataaaaaggagagggcgacacctactacgggacc

SEQ ID NO: 332959 - DNA, 87 bp, Zea mays
taattccctggtcgaccgcactcttactctcattttcacagacttcttccattccacattcaccataacactatagcatatcatcaa

SEQ ID NO: 332960 - DNA, 89 bp, Zea mays
accggtccggattcccgggtcgacgcacgcgtccgcccacgcgtccggcaggagcaggaggggttcgtcatcgcgtggtggccgcgccg

SEQ ID NO: 332961 - DNA, 274 bp, Zea mays
cggtccggaattcccgggctgaaactggcgtggatatgctgtacgtcgtgtcctgcttgctgtcggtttctgaagcttttagctggcagggacaggctgctgttggctttgctgattgcccaaccctctcctgtaatattaatcctaccagagaaacttaaacttgactcaaccgatatgctattaaataaataaagcaagcaagttaggataaaaaaaaaaagcaaaataataatgaggcaccaataagaaagactaaagaaaaccaattcat

SEQ ID NO: 332962 - DNA, 341 bp, Zea mays
ctgctcgtaccggtccggaattccggcggacgcgtacgggtgacgtgcccgctgtgccgctcccacctgctgccgcgccggcgcgccggcctgcttgagatgggacggcttggcgacggctagtatagtcgcccgtccgtccgtacctggttgtttccttgccacgtgacgtgcgtgcccgtgcccgtgtgctgggctttcaggcgcgcggcactggtgccggatgggggcggaccaaccgtgaactgatcgcgattaggacgatggactaaccaccaacctgatgtcattaatgaatgcgcgcatagtaaatgaacctgcatagatgatgcttaactact

SEQ ID NO: 332963 - DNA, 160 bp, Zea mays
ataccctatatctctatagccaacacacacacagatactctccattccattccatctcaggggatgggaataatggccggtctctccaccaagcttttcgtggtcctcctcctgctcgtttgttacaccggaacgcaaggcggtccggtgactatggtgt

SEQ ID NO: 332964 - DNA, 131 bp, Zea mays
attccctggtcgacccactcttcctaaaaaaaaaaaaaaaaaaaaaaaaaaaataaataaaaaaaaataaaaaaaaaaccaaaaagacacactcaaacattcaaaataattatctcatatataatatcacc

SEQ ID NO: 332965 - DNA, 299 bp, Zea mays
ccgaatcgcaatttcgggctagacctacgcgtacacccacgcctacgtcatcgaccaccgggtcatcgacattcgtcacaaagccatttggaccgcggcacgttgtcctcgcgctcgtgtagcccactttgatgtcgtcttcctttggccgcatccgacatctcgccagttgcccctcatctccctaccgagcgctgctgtccatccttgtgcaacaaaaatcaccgctggctacattgttggctcactggtcggatcctttgccattgcatacctgtgtgacacatttatctctgaca

SEQ ID NO: 332966 - DNA, 84 bp, Zea mays
atcgaattgcaattcccacctacacgtacgcgtactcgtacgcctatgacatcgtccacttgcacatctactctcgcctctaat

SEQ ID NO: 332967 - DNA, 281 bp, Zea mays
accggtccggaattcccgggtacgacctacgcaacaaaacagatgtggaacaagaagagagagcatgaagagcagcgtgaggcgaccagagaggagcgagtctatacttggagggatcagcttgaatcactgtatagatagaacggctacgactaaccaatctctgaaaactgaatactgaacatcggatcaaatctaatgtgcataatccactacagcgacactgactgtaatgtctacattgactgatcatctcatagcggccttgaatctgaccagat

SEQ ID NO: 332968 - DNA, 230 bp, Zea mays
aatcattgcctttctcctacacatgatctatacgaatacccttccttaccatcactggcggtatcaccatatcgtactgtcatttcaatatgcaaacctataccaagaccctacacctatatactatcacactccatgtataacttctgacaccattaacactgtcatatctaagaatccctactatcatgacatacatcctgaatacccacatcttctattttaccact

SEQ ID NO: 332969 - DNA, 430 bp, Zea mays
cggacgcgtgggcaaactacaaaatgaagtttgtttcttgtaccttgctagtatggcagggccaattctaaaagggaatttattactctattacaattacaaatgcgaggagcatatctggttgggaaatagactgatgatgactgcaactgcagggaccaggagcatggactgcacatcaaagatgtcatagatcgtctcaaactaccagatgatgtagtcagtgcggccatccaaggtcatgttgatgtgggcaacatttacaacacaattgatgacttccactacaaatctgtccggaatggatgaccacgttgcaagtccagcgttcaagctccgtgtaagtatggagcccgttcaaggaagaagaaaatgtaaccctctttaggatcgcctatattttgcagataggcttcatggtcaacagctt

SEQ ID NO: 332970 - DNA, 185 bp, Zea mays
cggacgcgtgggcgaaccccgccaagaaccctagcacgggcaagccaaaacgaccgtggtggccttgcttcttatggctcgattgacttcttgcgcccatttctggaaacaagccattcccggagaacagggaaccacttgaaccccaagtggggtttccccggcccttttcggggttcccgctt

SEQ ID NO: 332971 - DNA, 229 bp, Zea mays
acctgtccggaattccctggtcgacccacgcgtacgattgattgagatttatctcaaaaaaaacaattcatatacaaataaataaaaaaaaacaaaagggggggtttctttctaacaggacctagctttcatacacaaacaggccgcccgttctataggattcaagcgtcacgtaacataccattcaacgtcctaacttttataaagtgtaacctaaataaaatccact

SEQ ID NO: 332972 - DNA, 99 bp, Zea mays
gttgggagggtatttttattgcttggtggacgtatgacttctacctaaaccgttggccatttaaagtcaaacattaggtgcagaaacgaagcctatttg

SEQ ID NO: 332973 - DNA, 282 bp, Zea mays
cggacgcgtgggcttctggtcttcctcgctgctgccgtcatcgtcttgtcctgctgatcgtaatagaatgcttccaaatcgatgtgtcgcatcgcatggtctctttattactactagtacgtacctttttttctttgttcggtctagttgagacaagatttagaattaagacgctggttttgggtggacctcgttaatgatgtaattatatatttgttccttcgtctaaggctatttttaatggtggtttcatgcaaaaaaaatatacaacagtatgactgg

SEQ ID NO: 332974 - DNA, 405 bp, Zea mays
tatacgcgtgcgtatgtagatcagacggctctactatacaggctatgttggtcgctgtgtggtgcactgaaaggtgtgatacaatggggaaaccatgctctgtacaactcagtgcacgacgcagttctggccattgtagattttatcaagagggtggggcccataggctgggactacctatggagctagatacagcacttgttatatcatttgtaactagattgggctctagctcttgtgtgtcttctccaattgtgacatctagcgtgagcattatcattgggacatttttcaatagagatatgctatgtgtcttatcaccccctgtatcagacatgcatcccgttcttattctagtatggagtatcacatatggtaaaagccgtaggaatcttgatagaaatt

SEQ ID NO: 332975 - DNA, 394 bp, Zea mays
gccacgcgtgcgttttgtcatggcgtgcgcgccatgtacgccttggagtactggtgctggcggataccacttatgaccagggatcctcgtaatggctcgtgatggactaccaatggtagtgcgactatattgttcacatccatgctggtcgcaaacaatggagaaccaaccaaccaatctgacgagctttagattcatcaaacaaaatgaatccattcacctttttactcggaactcagcagatgtaatactttccaagaaatgagccttcattccctgccactttcatagtttctttcgctgatccacactgacatctatgatttttggagcaaactctgatctgttttgactagtttacacgtttgtgtgtggaatctgaagagctggtctg

SEQ ID NO: 332976 - DNA, 225 bp, Zea mays
gcggggaaggggggtgccgcgaaaaagaacccacggcgccccggtcgccaaggaaaaaaaaaaataaaaaaaaaaaaaaaaaaaaaaaaaaaaaaaataaaaaaaaaaaaaaaaaaaaaaaaaaaaaataaaaaaataaaaaaaaataataaaaaaatataaaaaaaataaaaaacatattaataaaaaaaactataatattcattaatcaaatgaatacattct

SEQ ID NO: 332977 - DNA, 302 bp, Zea mays
tcttactctgttcttatcgacttctctgctctgttactggggagttccgaattgctaactcagacagacagtgctgacaatgtgtttgtgtttgaatgtaaacagaacaagaacagaaaaatagaagattgatctgtcaaaaaaaaaagaaaaaatcaatacgtagatagcttattaaaaggaatataagctgaataagctactgaaggttgaatgggataacctgtctgtaaatgcccccatatgctctgggcctaagtcacgctacattaaatcatttgaagattacctgggcatgtttg

SEQ ID NO: 332978 - DNA, 174 bp, Zea mays
cccacgcgtccgccgtcgtgctccccgacgacgcgcccatgcgcaagtacatccgcttctaccgcgacttcgtgctcgccctcaacagcgcgctcgccgccgacgaccgcgtcgagatctgccagctccccgtcggcgacggcgtcacgctctgccgccgcgtcaagtgaaaaa

SEQ ID NO: 332979 - DNA, 105 bp, Zea mays
cccacgcgtccgagcttccagttgcctgtacacttcattaaatcgagcactagcaacggagatagctagatagaggaagactaatattactagttagcactagat

SEQ ID NO: 332980 - DNA, 291 bp, Zea mays
catatttataatatcgtagacatgtgttctaaaaaaaaaaaaaaaaaaaaaaaaaaagagaaaaaaaaaaaaaaaaaaaaaaaaaaaaaaaaaaaaaaaaaaaaaaaaaaaaaaaaaaaaaaaaaaacaaaaaaaaaaaaaaaaaaaaaaaaaaaaaaaaaaaaaaaaaaagggggggccgttttacagggacccaggttttgttcccctggtttgcaacgtaaagattttttttaggggccccctaatttaaataaagggggggtgttttaaaaaaggtttgccgggaaa

SEQ ID NO: 332981 - DNA, 100 bp, Zea mays
cccacgcgtccgcccacgcgtccgcggacgcgtgggaaaaaaaaaaaaaaaaagagagagaaaaaaaaaaaaaaaaggaaaaaaaatataaaaatataaa

SEQ ID NO: 332982 - DNA, 208 bp, Zea mays
cggacgcgtgggaaaaaaaaaaaaaaaaaaaaaaaaaaaaaaaaaaaaaaaaaaaaagaaaaaaaaaaaagggggggcctctataggggccccatttttatatacgcgtgtatgccacgttatatctcttatatagtgacctcaatatacattactgtggccggatttatacagcgtcgactctgaaaaccccgtggtgttcccaatt

SEQ ID NO: 332983 - DNA, 143 bp, Zea mays
aaaaaacataaacatataaaaaaaaaaaagaaaaaaacaaaaaaaaagcaaaaataggggggactacactactggggcggcctgggtcttaacttgagctttcaccaagctcccctcgcttggttctctttgccctcattttt

SEQ ID NO: 332984 - DNA, 283 bp, Zea mays
aaaaaacatacaaaaataaacataaacaagaaaaaaacaaaaataaaacaaaaaaaaacgggattcaaaaactggagaaacagataaagagcaattaaacggaacagaaacgtgacatccccccattcatttcccctgtttatttacaggttcattttccttctggctgcggtcagctagccccatggctgtacatttctaggtcaaggactagtgaaaacgcggcattgttgaactggaccgtgaatgcatgtagccgcacatgtacatccttataaaattt

SEQ ID NO: 332985 - DNA, 390 bp, Zea mays
cccacgcgtacgaatgggatcaaatgtgttattggaagcgtcgggctaaacttcccggtagtatgtgtgattgagagcaggatggatatcaaagggattagatgtgagtataggtgggagtggatcggatgcattgccatacgcaggcgtatacactgaagcatcaactgtactcctcactgcatgcctgtcctcgcctaaggcaaccactgatgaaccccgcatgccacacacacccacactgactcacacactcgccgacaactacagcaccaactccagtccccccaacaactgtctcaacaactgggtctgtcattcacgcatgcatgcataacgtcctcgtgaactacgactggtactacgacttcatgcatacggtcattgaca

SEQ ID NO: 332986 - DNA, 182 bp, Zea mays
tcgagcaggagacaggctgggtagtggaatctaatgctaccaggatcggatcaacggcttgtgcgcttcaattggcggccgccgcattaaggttgtggtgaccggccccaaggggtacctgggaaggcggctgtgccccgcgcttgccggcgcgggccacgccgtgcgcccgcttgttcggc

SEQ ID NO: 332987 - DNA, 53 bp, Zea mays
ctggaacgatcatatacacaatcgagttaaataagttgtgatttgtacttgac

SEQ ID NO: 332988 - DNA, 255 bp, Zea mays
aaggtaccgcaactgtcgggtctcaggctccacgagactgcagcatgcgttcagaggacgcaccctgacggatcgttcacctacgttgacgtctacatcggcacatacaaactcatcagcgcatgccaataagctaggttttgactaccctatgctgtcatgcttaggctactgcggcagccggtacaccttacacctgagcgtaggatgctgcggtacgaagcaggttaactctacgtcggtggtggtggggaa

SEQ ID NO: 332989 - DNA, 274 bp, Zea mays
cccacgcgtccgcccacgcgtccgcccacgcgtccgcccatttcaaatccttcgatcgcacagcgccgcccgccctcacgcagctctctccgatggcgcgcacgaagcagacggcgaggaagtcgaccggcggcaaggcgccgcggaagcagctggccaccaaggcggcgcgaaagtcggccccggccaccggcggcgtgaagaagccgcacaggtttcgccccggcaccgtcgcgctccgcgagatccgcaagtaccagaagagcacggagct

SEQ ID NO: 332990 - DNA, 281 bp, Zea mays
cccacgcgtccgcccacgcgtccgtggatggtaagtactttataataaaaaaaaaaggagaaaaaaaaaaaaaaaagaaaaaaaaaaaaaaaaagaaaagaaaaaaaaaaaaaaaaaaaaaaggtcctttggtctatcggtttctagcttacgtgctcttgcatgcaatatcttaacttttttatattgtcacctaatttcaattaactggccgacagttcacaatttcgggcctgggaataccttggcgtttcgaaatttactttgtttgcatcatattc

SEQ ID NO: 332991 - DNA, 80 bp, Zea mays
agcacggaagattgttgtcgctgagggcctgcacaagatggttgaccttctacgcggtggcgacactaggatttcggagg

SEQ ID NO: 332992 - DNA, 318 bp, Zea mays
aaaaaaaaaataaataaaaaaaaaaaaaaaaaaaaaaaaaaaaaaaaaaaaaaaaaaggggggaaaaaaaaaaataaaggataataaataaaaaaaaaaaaacaaaaaaaaaaaataaaaaaatataaaaagacaacaaaaataaggggggggcgtttttggggttcctttttttggattctggggctcgcgagggtttttactcctttttggggcccctcctcttgatattttggggcgcttgttttaatcgttctttggggtttacccctgggggttccccatttttgggcttttgtgaaacaccctggttttccg

SEQ ID NO: 332993 - DNA, 294 bp, Zea mays
cccacgcgtccgaaaaaaaaaaaaaaaaaaaaaaaaaaaaaaaaaaaaaaaaaggaggaaaaaataaaaaagggaggtaagaatataaaaaatgcatgcatcattatagcatgtttgatagggtttcgttattttattttgttgccttaattttttcaactggccgactgtttaaaccttggtgtttgcgaactcagtggcgtttcccaactttttcgttttgcctgatgtcgtctttttgctggggctcgtatttatggttattcctgttattttcgcattttgaatgggttt

SEQ ID NO: 332994 - DNA, 431 bp, Zea mays
aattcattcatcttccatggaggccatgcccaggccaagtgtagctccctcgttgcagttgcagctccgcccgtgcccgaggtggccgagccggaagcactgcccaccgtcctccgtgccaagccggagggttgcttgctcgtcctcggcggccgacgccgacgtggtcgacctcttcgacgccgctaagctcactgtggacaagttcgtgacgagcggcatggtggtggggctcggctccggccctgcgtccgccctggccatccagtacctcggcacgcgccttcgccggggctctctcacgggcatcaccgcagtgacctcgtccgtgctcagtgcgagcgaggcagacaaggcaaggatacgggctaacagctaccaggaaggcacccagattgattttgctttcactgatgctgaagcgatcgaag

SEQ ID NO: 332995 - DNA, 436 bp, Zea mays
accgcaggctcccaaggcatctcttcgcaggttccttgagaagagaaaggatcggtaggttactcttgctgctgttgggacgacaagactgttgttttaacgatacagctcttcgaggaggatctatctaatctgtaatattcattgtttcagccttactgcgaaagcaccgtacccgggttccccttcagatgttacacctgtgaagaaggagatgtcggatggtcagccatggcttgggctgggacctcagatcgccaatcctgatctgagcttgtccaaggaggcgagccagtgatcgatgatccagcatcaccatcttcaaaactgcgatactcaacagccatgtgtggaagtgttctgttttgggcccctatcattccgggttttttttcgcatggataaataggttgtacgaaagtaaagaacacagcta

SEQ ID NO: 332996 - DNA, 297 bp, Zea mays
cccacgcgtccgcccacgcgtccgaaaaaaaaaaaaaaaaaaaaaaaaaaaaaaaaaaaaaaaaaaaaaaaaataaaaaaagacaataaaaaaaataaataaataaataataatgaaataagatcaaatacatagttgatactgtaataacaaatagaggaaaaaagcgtgcgagctgttcaacagtgttacaaactggtatatcattcgtgttcactatttgcagtggtttcgagaacctcttggattatgataattttggactcttgtataatcattaatgatgatggtatatat

SEQ ID NO: 332997 - DNA, 246 bp, Zea mays
aagagacgacggactataaaaaaacaaagaaaaagaaaaacaaaataaaacacaggcgcatacttaagcgatggtaggcataatacatgtacactggtctctatatctgtgaacaacgcgggcgcatcggcaagtcacgtggaagtacgagttacaagtgaatatacggtggatggaccctatatgtaggaagactggcttcacatacgcgagactttgttgcaaattcaaggggggatgcaactg

SEQ ID NO: 332998 - DNA, 256 bp, Zea mays
cccacgcgtccgcggacgcgtgggccgccatcttccagggcggagagcacatcatcggatgtgtgcgcagggtgctcgcaatagacaatcgatgctactacgattaagcagttgtaagaggatttataatatggctgatagtcaatttgagagctgcagtggtatagctcaagattatcagtgtaatacttatatttgacctgtgaacagacaaacatactctcgacattattggttagttctgataactgtactg

SEQ ID NO: 332999 - DNA, 73 bp, Zea mays
cggtccggaattaccggctcgagcgacgcatgcgtccatgcattgcttaccataagcgaatgccgatgcggac

SEQ ID NO: 333000 - DNA, 310 bp, Zea mays
cccaagtgtcagtcgacgaatctggaatgctaagattgcaagaaaggcctatgtcgcgctagccagagaggcatcgagcgcacaagtgtgtacaggcagatgtatgcatatggctaccaacaggtgcatccataagcgccccaagacgagccacgagcagcgcacgcgtgccgaccagcagcagccgacgcttcgcaggttcccgaagcagatgcggggcccctacacgaaggcgatcctgtagctcgtgaggtatagaaccctctagctcgccacttttgactagcacgaacacgcgcgtagggtctac

SEQ ID NO: 333001 - DNA, 116 bp, Zea mays
accaaccaaagtcctcacaactgattaactaagcttccttcaaactccaacgggggtataccaaaagagaccacaatcacaatcccaattgcaatagcaaataaacatataactac

SEQ ID NO: 333002 - DNA, 294 bp, Zea mays
cccacgcgtccgcccacgcgtccgaaaaaaaaaaaaaaaaaaaaaaaaaaaaaaagagagaaaaaaaaaaaaagaagaaaaaaagtacaaatgatatatagtgattcagatttatttaaacgtacttgcatatgttataagcgattagggggtgccattttatgggttttaattttccttcggtttacttgggaggccttggtatttctttgggtattttaaattaatttgcttggccgtatttttacatttcgaaagttggaaaaattttgaattgtccgattttatttgctt

SEQ ID NO: 333003 - DNA, 433 bp, Zea mays
agcgtatcatcgttttccatcgctcctactcctatcatccagaaaatctgagcggtattgatggcgcccaaggcggagaagaagccggcggcgaagaaggtggcggaggaggagccctcggagaaggcggctccggcggagaaggcccccgcggggaagaagcccaaggcggagaagcggctacctgcgggcaagtccgccggcaaggagggcggcgacaagaagggtaggaagaaggcgaagaagagcgtggagacctacaagatctacatcttcaaggtcctgaagcaggtgcaccccgacatcggcatctcctccaaggccatgtccatcatgaactccttcatcaacgacatcttcgagaagctcgccgcggaggccgtcaagctcgcccggtacaacatgaagcccaccatcaccttccgcgagatcc

SEQ ID NO: 333004 - DNA, 283 bp, Zea mays
  unsure (1)..(283): unsure at all n locations
aaacgactccatggatttcgtttgaggacaatataccggggcaagtattacatcgtataccaactgcagttcagcaccgtaaagatagctagtgtacaatgcatgcatatgcctcattggtagtgtagtttagttctttgtatcgttaatctggaagtggctccagtatgtcaaaatgctgttttattttcttctttcctgggttgtggagtaatgtgttagacagaactagccacctttagcaatttatgtaaatctttttagcctttaaaaaaaaaaacan

SEQ ID NO: 333005 - DNA, 64 bp, Zea mays
ttcgtttttccatgtttccttgtctccagacctggacttggactgctattgatttttgtttcag

SEQ ID NO: 333006 - DNA, 286 bp, Zea mays
  unsure (1)..(286): unsure at all n locations
cagtaccgtccggattcccggtcgacacgcttcggcggattgaggggggatctcgcctatagattccnctctttcatggattttgatgcgatcgtaatattgtcagtagctctagattcgtcggtagctccagcatgagtgtcggtggtagttctgtgcctgtaaaaacttgggatagttgatcgcgtgtgatcagccgtcatgctcctacagtctctatgaacaagctaagctataatagtattttgctatcctatgatccccgggttgttggcttattgttgtc

SEQ ID NO: 333007 - DNA, 61 bp, Zea mays
aaaaaaaaaaaaaaaaaaaaaaaaaaaaaaaaaaaaaaaaaaaaaaaaaaaaaaaggggga

SEQ ID NO: 333008 - DNA, 191 bp, Zea mays
gtcttttgcatctggagtcaatgtgaacaagcagattgtcgtattgtctttctcgtaataaatttgtcaatgttgagcccttaggcttgaattgtgggaccctttgttcgttttcctagactctgatgctgtatgcaactgaaacgagtaaatctatgatcttaaggctgcagtatgttcttgtgttaaaa

SEQ ID NO: 333009 - DNA, 305 bp, Zea mays
aaaaaaaataaaaaaaaaaaaaaaaaaaaaaaaaaaaaaaaaaaaaaaaaaaaaaggagaaataattaaaaaaatgataaaaaaataataattttaatttatttataatataataatttttcttatattgtaaattaaatgtaactcaactgattctatttttttatcttcttgtctgtttaatgcgtttttttacctattttgattgttttgttttacatctttttttccttatttacttgatttttactaggtctgatcttatttctctttagattatttgctctatctttatgattattggt

SEQ ID NO: 333010 - DNA, 262 bp, Zea mays
aaaaaaaaataaaaaaaacaaaaaaataaaaaaaaaaaaaaaataaaaaaaaaatgggtgataattaaaaaaaagaacaaaaaaaaaaaacaaaaaagggcaacctatttaggggttccattcttacgtccccgtgcttgcaacctaataactcttcttttgtgccccctaaattcaatccctgtccttagttttcaccagtttttctggtaaaaccttgttgatacccattttaatcgccttgcataatatcctcctttca

SEQ ID NO: 333011 - DNA, 87 bp, Zea mays
catacatggcagtgcatgcagatatgtgtattcattctttggcggtgcactcttcaacctgtgcaacgtagacaaagcttgtatcga

SEQ ID NO: 333012 - DNA, 221 bp, Zea mays
cccacgcgtccgtctgtacagaatagtcatttgttgccaaaacgatcagtgttaccatgtgttcggcttgcttgtgtctatcctttcttgtgattgagttcgactttcagagtttgcaatgcgacgaaattcctcaaaaaaaaaaaaaaaaaaaaaaaaaaaaaaaaaaaaaaaaaaaaaaaaaaaaaaaaaaaaaaaaaaaaaaaaaaaaaaaaaataaa

SEQ ID NO: 333013 - DNA, 138 bp, Zea mays
ggcataaaacaaatgtattggtctactacaggtaccccaaatattttctggtcctttcagcaccaacaagagccatacgcatatctagaagacaaaatgccgggcggacgatcaaccctgtgaacggcgccctggggc

SEQ ID NO: 333014 - DNA, 65 bp, Zea mays
ggttatcacttcaaaaaaaaaaaataaaaaaataaaaaaaaaaaaaaaaaaaaaaggggataaaa

SEQ ID NO: 333015 - DNA, 356 bp, Zea mays
  unsure (1)..(356): unsure at all n locations
cgcatttcttcccatccgatccccccttcgcaaccaaaaccccaactcgccccgcatcgatggcgcccaaggccgagaagaaacccgcggcgaagaagccggcggaggaggagcccgcggccgagaaggcgcccgccgggaagaagccgaaggcggagaagcgggtccccgctggcaagtccgctgccaaggaaggcggcgagggcaagaggggcaagaagaagggcaagaagagcgtggagacctacaagatctacatcttcaaggtgctgaagcaggtgcacccggacattggcatctcctncaaggccatgtccatcatgaactccttcattaacgatatcttcgagaagctc

SEQ ID NO: 333016 - DNA, 56 bp, Zea mays
accggtccagaattcccggggcgacccacgcgttcgcacactcctgccattgcttt

SEQ ID NO: 333017 - DNA, 300 bp, Zea mays
aaaaaaaaatatacaaaaaaaaaaaaatatagaaaaaagaataaaaagaataaaaggtggaacagaatagaaagaggtatgataaatgaatgtctaatgaacacacctcttttgtcgggtccattctagcctatttcaacacggctgggggggggcgttttcaggtttcccaggttctggtcccctggtcgtgctcttttagctttgttctgcgggattgcaattttttcttttttgcctctctttctctctctctgtgatgggacaactggtgctctttccatattgatagggttagac

SEQ ID NO: 333018 - DNA, 356 bp, Zea mays
caacgaggtgcccaagaccgcggagaacttccgcgcgctgtgcacgggcgagaagggcgtgggcaagtccgggaagccgctccactacaagggctccaccttccaccgcgtcatccccgagttcatgtgccagggcggcgacttcacccgcggcaacggcaccggcggcgagtccatctacggcgagaagttccccgacgagaagttcgtgcgcaagcacaccgcccccggtgtgctctccatggccaacgccgggcccaacaccaacggctcccagttcttcatctgcaccgtcgcgaccccttggctcgacggcaagcacgtcgtcttcggccaggtcgtcgagggcatggacg

SEQ ID NO: 333019 - DNA, 384 bp, Zea mays
acttgccaaacgcctgaacgaaggaggaggggcgagacatcgcaaaggagctcttgaatgacctcctcgacggcacttcatcatccaaagcgaacaagaacgacgacgaggagcactccgccagcaccgctggactcttcatcttcaacctctccgtcggcacatcctccccgcagagcatgcccggcatcctggacatcgccagccagctcgtttggtggcagctagtgcgcgccctgcagcaacgccggcgactgccttccggcgcccatcttcctgcccaacagctcggccaccttcgcgcggccttccctgcggtgaccagaagtgcaagctgctcagcgagaccttgccctgcgacgaggacacctgcgattacatagc

SEQ ID NO: 333020 - DNA, 84 bp, Zea mays
gtttctgttgggacagtttcctgaaattatgttttgccctaggataatcttgcagttatggaaccttgttatattgtatcctgc

SEQ ID NO: 333021 - DNA, 58 bp, Zea mays
ttcccgggtcgacccacgcgttcggaaacgccgtcgtatactcgagcgtgcaggcctt

SEQ ID NO: 333022 - DNA, 277 bp, Zea mays
ccgacgcgtccatgaatgaacacgcgcgatcgcatgacatgacctaccacagctgctaagtgcttgcaatctggtaagccacactataacagttaataacgtaggtgtgattggcctcaactgtgtctctatagttctgaacctacctgatgtagccatcactgtccttgcgccgattaacatgctctctctgttcgatcatgacgaagacgttgacactgtatgcatactcaatggtactggtcgagccaatcaccgaaatgctgacgaggccact

SEQ ID NO: 333023 - DNA, 65 bp, Zea mays
gtatttgttagcaaacaatttttgagatattaaagtcggtgataatataagtgttgttcgttttt

SEQ ID NO: 333024 - DNA, 134 bp, Zea mays
  unsure (1)..(134): unsure at all n locations
gattaaggcactgggaaacctcctgacaccgtactcgcaagtcaagcaacaaatttgagggattttgtgttgtactagggattgcttatgttattatctgaattggtggtttcttttcaaaananaaaatnnaa

SEQ ID NO: 333025 - DNA, 147 bp, Zea mays
  unsure (1)..(147): unsure at all n locations
gtccggaattcccgtgtcgacccactcctcccgccaacccttccaaaaaaaaaaaaaaaaacttttttttttctancatnncaanaaaaaaaaaagaaaggactttattttattacttttcttccccaacaaaaaaaatcataaaat

SEQ ID NO: 333026 - DNA, 191 bp, Zea mays
  unsure (1)..(191): unsure at all n locations
gcgtcaggcntnnnntnntncccaatgtgcagtgttatactcaagcattgcacagggccaggcctcatctgccaattcagcccctcgttcaaaatcacagcatcagcgacagcatgcggcacataatctgccggatagctattcatctgccaaccaacctgccacttttacacaacagcagcaggagaaac

SEQ ID NO: 333027 - DNA, 89 bp, Zea mays
gggtcaccttactgaccggacgcatgagttcattgacggtactgactggttcatgaggccgctctcatgtgcgtgggctggaaacagaa

SEQ ID NO: 333028 - DNA, 138 bp, Zea mays
cccacgccttccatttgcccatggagcagctttcttcctgaaggaaaggctgttggcccgggtggccccttccagggtccttgtttttaaaaatggtggcctcttcccattggctattctaaggaaaacctcgttgga

SEQ ID NO: 333029 - DNA, 105 bp, Zea mays
cggacgccttggcccgcatcctctcataagcttccttccacattcgtctggagatctcgcgggggggccttggccccatccaccagcttggtgattcccttccgg

SEQ ID NO: 333030 - DNA, 107 bp, Zea mays
gctagctcttgttgttgttttgcatgtttgattgggtgtcccttcccagtcgagatggaggaatgtcaggcgcacgtacagacgtgttattacgatatttctcccct

SEQ ID NO: 333031 - DNA, 294 bp, Zea mays
cccactcgtccgcccacgcgtccggttaacttacagcagaatcaccatggagaggaggcgcgtggaatttataatgctttgtagtgtcttgttgactactttctaagaaactggtccgcacgactcgcataagactttcaatgggaatgaggaatgatgtcgtgtgctcactgctgaaagttaaccggacgcgttggcggacgcgtggtcgggcgcgtcgctctagacgatccaagctgacctgcgcgtgcatgcgacgccagagctctcttataggagcacctaaattcaatt

SEQ ID NO: 333032 - DNA, 56 bp, Zea mays
cggtccggaattcccgggtcgaccgcacgcgtgcgtccacgcgtccctaccataat

SEQ ID NO: 333033 - DNA, 71 bp, Zea mays
aaccgccatttccgaccaagccgtccgccgactccgagtattaccttaaggaggcctttatctttttcacc

SEQ ID NO: 333034 - DNA, 381 bp, Zea mays
cggaatgaccgtaggagattaattctgctttaacattctctgacaagagcacatgaggacgctcggaggctgctttgcattgtcttttcacatactacatgtctcagattcgatcgatcaagttctgccccgtcgaaaaaaatactagctgttgctactttacagggctttgtctcagcgtattggtcgttgctgatatgcaggctcttgagcatggcggccatgatttcttgatcatcttggatgttactagctgatcggcgttccaatgacgttgtctttgcagaacgatctttttctcttaaatgacgaacaacctccacactaagctttttctgtgccatcatggacggaccacaagactgtaccgttcaaagcttt

SEQ ID NO: 333035 - DNA, 60 bp, Zea mays
cgaggatcaacgtccacttgtaccagatcactattcctgccgttgcagcgcggcgggttc

SEQ ID NO: 333036 - DNA, 163 bp, Zea mays
ccggaattcccgggtcgacggacgcgtccgggggaagatgagtcgctttattcaatggtcgttcgttgccggttactctgaaactaataaggcggaggatttggtcattacctaacggatgtccttccgaccttaaattttattggtacaggtaccccccctt

SEQ ID NO: 333037 - DNA, 364 bp, Zea mays
  unsure (1)..(364): unsure at all n locations
aaccnccagtcccgacccgaccgacgcgtgcgtcagatcacacacatttctcgtcatgaaaccctttcaagattacctgtgcgcctggcaacgaatcgcattattgaacttgttcaactccggaccatcactaggcctgtgatattggcaggttcaaaagcttctgttactcggccattgcaaaaagctgaaaggtttcggactgaactgctcaaacgaggcgttcttctaattcctgtgatctttggggcttctcagaaggaccaaaccaaaccaaggggttttggtgcaagaagagcttctgcatcagttccttctgttgggggtgactttgaaaaacgtactgattctattgcagcaaaat

SEQ ID NO: 333038 - DNA, 343 bp, Zea mays
gaaaacccggcccgacgcgacgcgtgcgcgtggactggtccttcttgtgagtgttgatcggccccctagcatacccagccagaaaaggatcgctattcacgcctatcatttccccctactattcagttgaactctagctccaagtactggacgctctcgcctttgtccaggcaatcctgtgaaacgcacatgccccccagctcatccgtggaacaaacgccttttgtagttcaaataatgataactagggtgcaagatgcaaaggaaactaactaaaaaatgctgtacgaaaagacatgacgttccttcaaagaaacaattttaaactacacaaccggggggg

SEQ ID NO: 333039 - DNA, 112 bp, Zea mays
gtcgaccgacgcgtccgaaaaaaaaaaaaaaaatataaaaaaaaaaattttttttaaaacacaaaatggcccccaattagaaggttttttttttatttccccctcccaccca

SEQ ID NO: 333040 - DNA, 229 bp, Zea mays
  unsure (1)..(229): unsure at all n locations
ttcccaggtcgacccactcgtcctcccaccccttccatttattaaaaaaaaaaatttatttaaaaaaaaaaaaaaaaannannaaagaaagattttttaaattaaaaaaccnncccccccccctaaaaaactccgntttacctatcaaaaaatcccacctcctttccccccacaaaaaaaaccggggtcccttttaaaaaaaccaaatttccaaccccttccccccaaa

SEQ ID NO: 333041 - DNA, 129 bp, Zea mays
ccaaggctttctcccacccttccattcattcacctttaattaatttgtttgggggttccgggggggggttgatcatttctggaaccaaaactttggccccaactcggttcgtgtcgtgaataaaatcct

SEQ ID NO: 333042 - DNA, 219 bp, Zea mays
  unsure (1)..(219): unsure at all n locations
attagctagaaaaagaatgccgatcatgcttcacataagccattagatgcctaacctcggggagggccaggaggcttcttccaaaaggaaaaaacctaggcgtgcaccacccggtttctaactattctttcaatatatactgagtactgactcgtacaatatagctttttactgtctttttgcnncaaaaaaataaaattataaaaaaataaaaggggg

SEQ ID NO: 333043 - DNA, 62 bp, Zea mays
cgaattgaatttccagactagacccacgcgtacgcgtagaggttggctgatatcggggtttc

SEQ ID NO: 333044 - DNA, 343 bp, Zea mays
  unsure (1)..(343): unsure at all n locations
cttttccaactaactccaaatcttnttttcctgctacaccctggtcccgaaaataactgtctcgagaatgatgccaacgtgtacctttcattttggcttgaccatctcctcctctctctgcaacaagcttcctcactaaacccgactccatgcttcacacacaaaactttgaatgagatacaaactntcgcgatccccaatccatttgatccctcctttcccatactaatatcagctaggatgcaagattgttactctcgtcactgacaagaacattggccttttctttcgatatgcattcaccattatgttcaaaaaagttctaagcaagtcccacagttct

SEQ ID NO: 333045 - DNA, 222 bp, Zea mays
tctgcttttacactctgattctctcctactttttttagtccttggtactgttttaacgcacatatattgatcagacatgtatgtaaatattacttcttgctcgctgtcaaaaaaaaaaaaaaaaaaaaaaaaaaaaaaaaaaaaaaaaaaaaaaaaaaaaaaaaaaaaaaaaaaaaaaaaaaatgaaagctaaaaaatgaactaacctagtaatggaaaaga

SEQ ID NO: 333046 - DNA, 68 bp, Zea mays
tcccgggtcgacccacgcgtgcggcaatttgcccaaaagggtattaaattttttttggttttggaaaa

SEQ ID NO: 333047 - DNA, 216 bp, Zea mays
gccacgcgtcccgttattttaggttttaaattaagtttttttcggaacttcaattttccaatgctaaattttttctcaaaaaaaaaaaacccttggttttgtaaaaggaaatggccggtcttttaaaaaaaaaaaatcattattgaaagaattttaaaaactttaaaattatggaaattaaaaccctggacattcttagaggttaaaatttgcctt

SEQ ID NO: 333048 - DNA, 144 bp, Zea mays
  unsure (1)..(144): unsure at all n locations
cggtccggaancccggggggacgcacgcgtccgggggcgcgttctcccactcttccgcttactcttattctccagcacaacctacatcggaagctcttactttttatcatcatctaccctcactaccaacaatccacatcaaat

SEQ ID NO: 333049 - DNA, 69 bp, Zea mays
  unsure (1)..(69): unsure at all n locations
cggtccggaattccgggcgggncgacccactccccccacaccttctaaaaaaaaaaattttaatttttt

SEQ ID NO: 333050 - DNA, 57 bp, Zea mays
gccacgccttcctccaattatttcttgaacttctttttttccccttggaatctccca

SEQ ID NO: 333051 - DNA, 158 bp, Zea mays
gggtcgacccacgcgtgcgggcctggggctttgttttgtgggaattattgaccaataaaatgccatttgaaggcatgtggggtggggagccggatttgcctgttgttttcaacaaaaggcgccaacttttccttgagagaacccccaagaacctgggg

SEQ ID NO: 333052 - DNA, 206 bp, Zea mays
  unsure (1)..(206): unsure at all n locations
aacccacccaccacccacgcgtactgnaatttntttttnnaaattatttttcatttttattccattttaanncctnncagagcggctaacttctttttcttcctccccccaaccaaaacccccaacttttccttaagaaaccccccaagaacctttgttcattatacaatcaatcttggttgaagatccttccattccaaccaatt

SEQ ID NO: 333053 - DNA, 84 bp, Zea mays
tccggaattcccgggtcgacccaagccttccggcaagtcttgatacaaccatgcatccaaccgttcatgtttgctatggaaaac

SEQ ID NO: 333054 - DNA, 148 bp, Zea mays
ccgattccggtcgacccaccgtcgggacgctggcctctacctccttccctctttctttgttataccgggggggccagggggccttgggattgcctggccttaaaggccccttagccgttaattcggtttgaaggggaaggtcgccaaa

SEQ ID NO: 333055 - DNA, 120 bp, Zea mays
tccggaattccccggtccaaccaacccgtccgcggggaccttcttacccccctaagcttaaccaagtccttcaccttcattggccccaaggagggggaggaggccaccacctccttccat

SEQ ID NO: 333056 - DNA, 261 bp, Zea mays
actaagatgaagccgctggctgtaaatccttgagccatagagagctcatattaacacgcgccgatgcggctacctgaccatctgctgattcttccactagcaatgtaaatgctgatgacacatatattccagatggacgtgccatatacaagctccaagcttacgtcagccatatgcgaacctatacccactgcatacactaccctaactatagtctactagacggcatgtacacaatctttactgacaaaaccgtgcagt

SEQ ID NO: 333057 - DNA, 181 bp, Zea mays
aaaaaaaaaaaattataaaatataaaacattttaaaaaataaaaaaaaataaaaatataaatagaatatttataaatacaaaacaatccataatttaaaaacaaaaacatacaaaactcaacaaaattaatttatcaaaacttattaaaaattctcttcccttttttaataacccaatttt

SEQ ID NO: 333058 - DNA, 288 bp, Zea mays
aattcccgggtcgaccgacgcgtccggttggatccagtgacgaggtcgagtacagcctgttccctgtgcccaagcacggcttgccttgcggattatggagacaaaacaagtgcttcgtcgacagaaaggggcgtgagaccgacgacgatgatgtggaggatattttagtttgactcttgagttaggcatgaatttaaccctcaagctagctagagaagttttttttccctttgaaatatttctttgctcgtctttcttctggatcaaattactttggtggacaagaaa

SEQ ID NO: 333059 - DNA, 335 bp, Zea mays
attcccgggtcgacccacgcgtgcgcaaggagctcgacggccgtaacatcaccgttaaccaggcccagtcccgtggcggtggcggtggctgcggtggctacggcggcggtcgcggcggctgcggctatggtggcgggcgccgtgacggcggttatggcggcggtggcggctacggcggtcggcgcgagggtggtggcggcggctacggaggcggtggctgctacggcggtcggcgcgagggtggtggtggcggctacggcggctgcggcggctgctggaaggactgatgtgtgggcccatcctggcttcggtcgagttatcttatctatctatag

SEQ ID NO: 333060 - DNA, 202 bp, Zea mays
aaaaaaaaaaaaaaaaaaaaaaaaaaaaaaattaaaaattaaataataaaaaaaaaaaacaagggatatagaaatatccaaacttaagaacacaaacatacggcctgactattttgatgttccatcctcttcaacccaatctttcgaccttatagctccaatttcgtgactcgtaaatccatttcattacccatctttttac

SEQ ID NO: 333061 - DNA, 452 bp, Zea mays
  unsure (1)..(452): unsure at all n locations
gaaaatcgtccaggagatgactaggatgaaggatgagaggaacagactgaggatgatcatggcgcagtacatggcggaggacctggcatcgttctccgcgcaggatctgagcaaccttgagcagcaaatcgagttctcgctgtacaaagttcgcctcaggaagcaagagctactcgaccagcagctgctcgagatccaccaaagggagatgcatatgccagcagagcagggcggctacctgtgcctcatgaacccggctgcggctattgctagcgggcagcaccagcaggctggcgagatggtgggaattaacccgaggccgttcccgtggtgggacgtgggagccagtggcagtggcagtggcagccagagccagcagcagctgctgcacggccgggacgccgcggagtcgtcgatgacggcgctcgggctgtcgncgcaactgcatgggt

SEQ ID NO: 333062 - DNA, 341 bp, Zea mays
ctcggtccggattcccggtcgaccacgcgtccgcccacgcgtccgcccactcattctcatacacgttgacagacacatacttacactcatcatggagcactacatgtcggaggacctaacatcattcatatcacatgatctgagataatttaatcagacaatcaagtcttctatgttcataattcgcctcataaaacatgagctactctactagtacttgatgcaaatccactcaaaatagatgcatattccatcagatcagcatggttacctgttcctgatcaactcggatgcttctattgctaacgagcattaccacaatgttcactatattattgtaa

SEQ ID NO: 333063 - DNA, 381 bp, Zea mays
acccactcgtcctaaaaaaaaatacaatcactaactaattaaattaaaaaaaaaaaaaataataaatatattaaggtattacgtactatatccgtaaataaaaaataaaaactaaacaaatataaaataaaccaaaaataaccttacttaacaaaacactataaaaaaaatccctccttttaaaacttccatacttaattcctattctttccaaactttccctctttattttattcccccaatttaaaattatttacccctattttaaaaatgctactcctttaaaaccttttccttccccaaattaatacccttttaaacaaacccctttttaccactttcctttattataaaaattccccctcctaaccccttttaaaa

SEQ ID NO: 333064 - DNA, 377 bp, Zea mays
gaattcccgggtcgaccgcacgcgtccgcccacgcgtacgaaatcggcgcatgtgatctcctctgagaaagctgcagcggtgccacgtgtgtccggctaagagttaagatgcctttcgaatgtgaacccaataataatgcggtgcgggtgcggccgggaaatcacaggccgaaccgaactgctgaatgaaagagaccactcacgctgctgctgtgtcaggtcagcgacgagacttttgctccagctgccggggaccatccaaaaccagccattatagatcaaatcaagtagagtttaagtgctaggaaataattcaatgcatggtgtatctttggtaacgtgacatgacaacaatgcaatgcaacgcggcgggtttc

SEQ ID NO: 333065 - DNA, 409 bp, Zea mays
ccggaattcccgggtcgacccacgcgtgcgcccacgcgtccggcaagcacggtgctcaaactcaccaaaacattgagaaacgccttttgagttgcaggtagatgctctatttataccggtgacaatcgcctcttctggcttttagcagtttgatggctatctttacttagctatataatgtatctgagactgcaaactttgtgtcactgaaactgctcgaggttatatgctaaaaaaaagctccaactgtcaaggaccatacaaaaccagccattatagatcaaataaagtaaaagataaagtgctaagaaataattcaatgcataaaaaaaaagggggtcccttttcaaggctccaatgttacgtacccgtgcatgcaacgaaaaaatttttcattagggtcacctaa

SEQ ID NO: 333066 - DNA, 132 bp, Zea mays
cccacgcgtccgtggaaaaccctcgttttcattgataatggcaagatagggcttgccgctctggaggatggaaacttacatacgcgtgcatgccactctatagctcttctataatgtcacctaactacaatt

SEQ ID NO: 333067 - DNA, 77 bp, Zea mays
aaaaaaaaaaataaaaaaaaaaaataaaaattaaaaaaaaaataaaaaataaaaaaaaaaatgggaataaatacaaa

SEQ ID NO: 333068 - DNA, 355 bp, Zea mays
gaactgcactgtctatgttttgtgctattatggttgtttaatggcccaatcattgcatatagattctaaaaaaaaaaaaaaaaaaaaaaaaaaaaaaaaaaaaaaaaaaaaaaaaaaaaaaaaaaaaaaaaaaaaaaaaaaaaaaaaaaaaaaaaaaaaaaaaaaaaaaaaaaaaggtagaccttattaaaggatccaagttaacttactcgacaatgcaacgtcataccttttcaaaagtgtcacctaaatcaaattaactggccatcttttaaaaacgatttaactggaaaaaccttgtcgttaccaaattaaatggccttgaaacacatccccttttctcaaactgcgttaa

SEQ ID NO: 333069 - DNA, 241 bp, Zea mays
taaatgcacatacatatctactgatcacactttcttcgcaaacgccccactcattgcatatggtctataccaagtagccacacagctacaaaactattaattaactcatactactgctataaatactattgaataacgaagaataaacctacctatacgtaatatcacaatactctacacttaccttaaattgtaccaatctctgtaaatcattactatcaactgaagcactttaataact

SEQ ID NO: 333070 - DNA, 402 bp, Zea mays
aattcccgggtcgaccgcacgcgtgcggattcaaagactacaaaattctacccgtcaatcgggacctatcaatcattcaatcaagtctgtccctgggatctttttgaaccaaaaacgtccttataaaactggaaaccctgaaagggtttaatagtatattaatgattttttaattggaatggtccactgaattctttaataatttgtaatgccaacctaattaattgggttttttggttaatggggcctaatatggcccattccccataatgaataaaatgtaacttgccctaattttggggtaaatgtgtgttggtaaattagtcattaggcaactttttaatgctgggattcattagaacaccatggaaccttataattggttgggtaatggcaccaagg

SEQ ID NO: 333071 - DNA, 214 bp, Zea mays
tactcatcgatagactctcactgatatggaatcacatccaactgcattagggctaactactcaaccacagtataaaatggtctctctctacaattatcatacaatgctttcaccaccttttattgaatcatcttataatattgtaatcattacatacgattattcttatatcactacaacttaattcttatcccctatgacgacttattctacc

SEQ ID NO: 333072 - DNA, 461 bp, Zea mays
  unsure (1)..(461): unsure at all n locations
tcgcattttccttgcaaccgattgcctatccccctcccaaccaaagaccgatggcgcccaaggccgagaagaagcccgcggcgaagaagccggtggaggaggagcccgcggccgagaagacgaccgccgggaagaagcccaaggcggagaagcgggtccccgctggcaagtccgccggcaaggagggcggcgagggcaagcgtggcaagaagaagggcaagaagagcgtggagacgtacaagatctacatcttcaaggtgctgaagcaggtgcacccggacatcggcatctcctccaaggccatgtccatcatgaactccttcatcaacgacatcttcgagaagctggccggcgaggccgncaagctcgcgcgctacaacaagaagcccaccatcaccttccgcgagatccagaccttcgtgcgcctcgtgctccccggcgagctcgccaagcacgccgtc

SEQ ID NO: 333073 - DNA, 370 bp, Zea mays
tgcccttcacggaagatggttcgctgggaagatgatttcagcgacatttatgtccgctcgggagtggagtacgaagttccgaaacttgtgagcatatgccgggaagagttggccagacctgcatagttcgtttggagtattctcaagtgctgtatcgttggatggtagacgaacaccttattgattgtatgacaggatagttgcagcaccgggcgtcactatcagtacaatgcttgatgtactttatttactgcgtcgcagtgaccaaaccttatttttgtccaccgaatgaaatgccctatcatctccaaaaaacaaaaaagtattatcccaacaatatgcaatgtaaatttaaaaaaaaaagggcggc

SEQ ID NO: 333074 - DNA, 352 bp, Zea mays
gcatcgcgcattatcgatgccaacgctgtgtgaagtgagaaagggctaattctagacccaagactttggtctaacggatcatgtctttgtaactgaatcatttgatgcaacaggcagcagctgccgacactgctcgtggcggtgtacgtcctggtggtgggcgcagcagcagtgtgcgacatgagcaacgagcagttcatgtcgtgccagcccgcggcggccaagacgacggacccgacggccgcgccgtcgcaagcatgctgcgacgctctggcggtggcggacctcaagtgcctgtgcggctacaagaactcgccgtggatgggcgtctacaacatctaccccaagcgcg

SEQ ID NO: 333075 - DNA, 349 bp, Zea mays
aataaccggaccgaccgacgcgtccgacgacgccatctccaacgtctacgtcaacatcttggaacacccaaaacttactagggtcagggctcctttatcacaccatcaccatacttacaacactgctaatctccaccttcaaagtaaaacacgtcgctaactgcacacaggtctacaatatctctaaaaacacatatgatcagaaaatctccatacgtcatcttccactcctaatgattaccagtcctaacatcacccaaaaactcataaatatctcgattcaacatcatactttattacctattacatgcctcatgaatttaactgtttacatgatcatcagaaacct

SEQ ID NO: 333076 - DNA, 270 bp, Zea mays
ctccacgcgtcgcgtatttgctcaagaagcaccagtgctaaccatgtgacatagccttaacacggatggggcattgggctcatgatctggctactataccatagacaacaaaagccaacaacctccattccaacgctgactccttgaatgttaatctcacacgtgacgacctcaaacaaattgtatgacagatacattcactttacgtggctcatcaaccacaatgcagatcgtatgcacatacctaacgatattatgcccatacaccaa

SEQ ID NO: 333077 - DNA, 217 bp, Zea mays
gattagtatatccaaagccaattctaaggttaaatttaaaggtcctactggtattaccggggaccgggtccttttggttccaccgggccttgcctttttcagacttggcctattttttaaggaggcattcccaaagtttaaactaacatacaaggttggccgccaacttcctaaaaaatacagcatggtcctaattccgtggaaccttccaaggaaa

SEQ ID NO: 333078 - DNA, 65 bp, Zea mays
cccacgcgtccgcccacgcgtccgatccattaaatttatattgattgatatttttatagtggtat

SEQ ID NO: 333079 - DNA, 74 bp, Zea mays
ctctccggaattcccgggtcgacccacgcgtgcgcactaacaccagctaacacctctttctctcctgcaataat

SEQ ID NO: 333080 - DNA, 231 bp, Zea mays
attcccgggtcgacccactcgtcctctgactcgtggtctgactcgtgttaaaaaaaaaaaataaaataaaatcactaaaaaaaaggataaaaggaaaatttaaaaataaaaaaaaaatcaaacactctatactatccaagcttacacactcttccatccaacgtcttaccttttctatattgccaccaaatttcaattcacttccctcctttccacaactttctcactgtt

SEQ ID NO: 333081 - DNA, 83 bp, Zea mays
aattccctttcgacccactcatactcccactcgttctaaaaaaaaaaaaaaaaaatcaaaaataaaacaaaaaaaaaaataaa

SEQ ID NO: 333082 - DNA, 240 bp, Zea mays
aattcccgtctcgacccacgcgttcgaaaacacatacggtctcttgcaaaatcactttatcatatgctcacaagactttattcacggaatcgcgacaatttaaccttacttcctagaagcatcaacgttcctcatgcccttcaagctctagtttccacataggacgcttcacatgaatagcaaaccctacattgattgctgctactcttacaaccatctcgactatatcaactaactaat

SEQ ID NO: 333083 - DNA, 267 bp, Zea mays
cgtactcgctccggaattcccgggtcgacccactcgttcgtccactcgtatggccactcatgcggagatttataataaacacgcacgaagtctctcgtggggtaagcattgtactgaatgttctcacttaacgcacctttgaatgtatatctgcacatctttcatagtgtgcacactataatcaagcaagacatcattatcttctgaggttttacatttaatttcagaattacttgaacaatactcacaccatatcacatatcatag

SEQ ID NO: 333084 - DNA, 409 bp, Zea mays
  unsure (1)..(409): unsure at all n locations
cccacgcgttcggtccgtggcgtcggcggcgtgggcgtcaaggggcgccggcgcgcaggggcagcaggcgcgaggcgggaccgggacagcggcggcgtccgcgtcgacgctggggcggacgctggaggccatcggcgagcccgagagccccagccagagccaggtgtcgtcctctgcctccttcgggcggaaggtggcgcggtcgcgctccgtgggctgcggcagccgcagcttctccggggacttcctagagcgcctctacaacggcttcggcgactgcacgctccggcgcgtcgagtcccaccgcgagcccaagccccacaggatgcgcggcggctgctgctgcggaagcctgggcaacctncacggagctggcgcagacgacgctgacgacgaggacgaggacgac

SEQ ID NO: 333085 - DNA, 403 bp, Zea mays
acgatcatggatccagcgaataattgtcatgaacagggagcgaggcttgaatgttcaaatgtcacacggcgagtttatgattatgtatcacctcctggtgtataattcctttgcttctcagatggatctaacttgctgcgacaagaacgagcgtgcccatactcatactactatataaccgaatacagcaacatatgataagtcatctgtaacaagacaatctactattgtccaaatctgacgaggatactactgcatattggaaattggctaacgagctggttgataaatggagtcgaccaatattcaacaagagcacgagatttgaggacatgaagagatatgatgatgaaagagcaccttacaggcggtcacaaatgaagaaaccttcatcgagtagctc

SEQ ID NO: 333086 - DNA, 402 bp, Zea mays
aattgaccgatcgactccacgcctcccatagaggacatttgcaagaacaatctaaagtaggaatgtgatcaccacgatatccgcactcgggtaaataattaccttggaccagtacatgacgaacgcatgcaatacataaatattcaagctgctgaccggaaattattaactgacactccaactgacttgcaacagaatgatcgaatacatcatctgatcaaaagtgctctattaaatgtcaatatggtatcgtccaaatatcaccatgagactactgacaataggaaattgagctaaagagctgcttgataaatggaatcgaccaatattgaacacgagcacgagattagctgacatgaatagatatgatgattaaagagcacattacatgatgacacaaat

SEQ ID NO: 333087 - DNA, 378 bp, Zea mays
gaagaagaatgtgagatactcactaagatgcaaatttaagagtacaattctataagatgctggtcaaggaaaattccatagcctgttggtcaaacatacaatcgaacattctagtacgcctcttaactatgtctcaccaaattactgtgaatcagttcagttacgacaccgatatccgaagagagcagcttaagaaaagtggtctgggaaaggtcattatgtttttgtcacaaatctgacgaggagactactgcaaataggaaattggctaaggagctggttgaataatggagtcgaccaatattcaacaagagcacgagatttgaggacatgataagatatgatgatgaaagagcaccttacatgctgtcacaaatg

SEQ ID NO: 333088 - DNA, 269 bp, Zea mays
tccggaattgacccacgcgtccgaaaaaaaaaaaaaaaataaaaaaaaaaagttcaaaaaattaaaaaaaaaaaaaaaataaccatggaactgaccatataactcaggtcaaactatcgcacgcatacctccgaatcccattctcctatatcttgcaacctaacttcaatcaacttgccatgctaacccaatatcaactactcataaacccctcacaattcccaacttaatcgaatctcgctgaataccccatttaccaattttccctt

SEQ ID NO: 333089 - DNA, 302 bp, Zea mays
ggaattcccgggtcgaccgacgcgtccgtgggagtctaccacaccgtcttcgactatggcaagctgagggttggcttcgcagagtcgtgctagggatatggtttggcagcaacccgtccagaggcaaacgcgtaatttgtgtgtttatgcgaccggcgatgtgtgtatatatgctactacatgtttagtgatgctttccgagacctgagacaacgcccgtctgttttaacgtggcgcaagaataattctggttctggatgtaaaaaaaaaattaacaaataagataccaaagtaaattacat

SEQ ID NO: 333090 - DNA, 187 bp, Zea mays
aattcccgggtcgacccacgcgtgcagcccactcgtcagccgcatctatagagagttatggagtctcttgtacaacgaatgtcactatcgtaaggggatatcaggttgagataagagcaactttcctagttcgtcgctcgcttgactgctgacccatatgagcttctctaccacctaggtcatgccc

SEQ ID NO: 333091 - DNA, 294 bp, Zea mays
cccacgcgtccgaaaaaaaaaaaaaaaaaataaaaaaacaaaaaaaaaaaaaactaaaaaagggcataaaaaaaaaagaacaatgaaaaaaaaaacgcatgctcgcttttcagtccccatccttacttactcttgcctgcaacattcctacctttttttttagtcgctccctaaatttacattcacatggccgttcttatccaactttatcactgtgaaaaccctctcattccccatgttattctccctgatatacctccccctttctccagttgtctcaataacgtcaaggcc

SEQ ID NO: 333092 - DNA, 53 bp, Zea mays
aaaaaaaataactcataatttaatactacattataaatcaacaactaaaataa

SEQ ID NO: 333093 - DNA, 204 bp, Zea mays
cggtcctgaattcgagggtcgactcacgcgtccgctcacgcgtgcgcggactcgtgttagcatttataggatgttccatgaccttcttgtacccgagaatcgctcgtgtggccatagacatctccatcacttattctgtatggaaggctaagaatggaactgacgcatgcaaagcctgtacttctaccaacaaacctgttacta

SEQ ID NO: 333094 - DNA, 416 bp, Zea mays
gaattgacccacgcgtccgcccacgcgtgcgcgaactcatatgttcttttttaaactttaatattcatcatcttacaaggctaacggggcttttgaacagggccactaaaaccagacaacatcaccataaactaaaaaaattcatatgtccaaacagatcatacatattccttttaactcttctaaaaaaaatctctaatcttctaaaacaaccccacatacaaaaacatacttttaaccccaagtccaaattaagacttttacttaaacatgtaacacaactagtgctacttaacatactccatcactatattcttctacatataactaagacactttaaatgatccaaatttacttactcatgcataccaaaatataactcttatatatttatacctaaaatcaattcactttc

SEQ ID NO: 333095 - DNA, 252 bp, Zea mays
atttccgggtcgacccacgcgtggcgccgtctcctcacgcgtccacgtacacgagcttaagcttctcgactccgaacactcatatcgacaccgatctcttatctcagggctcaagagagagcatgcacacttcctacatcataacgttcaacaagatctacacatgactatcgatcacctcatgctctccgacgctaacaaatgatctggctgggacacgaaccatcctaattatatcatatctatatacct

SEQ ID NO: 333096 - DNA, 264 bp, Zea mays
ttcgagggtcgactcacgcgtactcccacgcgttcggctgatggtgcttacgacaaattgaagcctgcatagaatgcggcatcaggagatgccattgttctgaatactaaggctattcaggatgaaggctgttgagaagagcaagggagaaagaaagggcatcttctacaagttgtctgtattagacgcagtattactacgtagtgtcatggcacattgactgtatctgttacctatgttatcgcggatcatgtatgtagaagg

SEQ ID NO: 333097 - DNA, 446 bp, Zea mays
agaccatcaccttggaggtggagagctctgacaccattgacaatgtgaaggccaagatccaggacaaggagggcattcccccagaccagcagcgtctgatctttgctggcaagcagctggaggatggtcgcaccctcgcggactacaacatccagaaggagagtacccttcaccttgttctccgcctcaggggtggtatgcagatctttgtgaagaccctgactggaaaaaccataaccctggaggttgagagctcggacaccatcgacaatgtgaaggcgaagatccaggacaaggagggcatccccccggaccagcagcgtctgatcttcgccggcaaacagctggaggatggccgcaccttagcagactacaacatccaaaaggagagcacccttcaccttgtgctccgtctccgtggtggtcagtaagtcatgggtcgttta

SEQ ID NO: 333098 - DNA, 365 bp, Zea mays
  unsure (1)..(365): unsure at all n locations
cccacgcgtccgctcttcttcacctcactaacaccagctagcaactctttctctcctgcaggaatggccgctcgctcctcctgctcccagccgcagctggtcgcggcggcggcggtcctggcagcggcgctgctgctgctggcggcgggggccgggacggcgtcggcggcggtgagctgcggcgaggtgacgtcgtcggtggcgccgtgcctcgggtacgcgatgggcagcgcggcgtcgccctccgcggcgtgctgcagcggggtgcgctcgctcaacagccgcgcgtcgtcngcggcggaccggcaggccacctgcaactgcctcaagagcatgacgggccggctcggcggcggcgtcagcat

SEQ ID NO: 333099 - DNA, 226 bp, Zea mays
attctacgatttggtcctccagttctccttatgtggagactgtgattgtgacggactgtgttagtagtgttagagctcgaaggtgtcattcgatgtatatttgttcttgctctaacaaatgccctaataataataataaaaaaatcaagataatgcattagctaaaacaatactaaattaaagagacatcttttgtagacaaaatacctaagatacacgattatca

SEQ ID NO: 333100 - DNA, 350 bp, Zea mays
cccacgcgtccgacctgatggaagctttgataactgggaagtaaccaacctcatggggggggactcctgaaaccgccaggttggtggagactgaagaacgcggatctacttggcatggaaagggtatgtggtgcagtgggtctttcctgtagttacaagtcttcgttgccactatgagtggatactgtagcgaatgaaccaagacgaaatgatgctatgttaacttaacgtctgtggttgccttgaactctggaaccgtaatgctagcatggttgttggttgcgctaaaaaaaaaaaaaaaataaaataaaaaaaaaataaaaaaaaaaaaataaaatataaagaaaaat

SEQ ID NO: 333101 - DNA, 275 bp, Zea mays
caaatttgcttttttatactatacctctcctactcttaagagacctatttcaatgggtgaaggccctacatttctccaatataatccacaacatttttcacacagtattatactttatctccattttctatccatatacctatacctcttctcaagacatatttcaaaaataaacccaattttataaattcaacttattaaacaagtacaattacctctaattcttattaaccttaataattgaaccctatatccttttcaaatactacaaaaca

SEQ ID NO: 333102 - DNA, 267 bp, Zea mays
cccacgcgtccgaaaaaaaaaaaataaaaaaaaaaaaaaaaaaaaaaaaaaaaaaaaaaaaagaaaaaaaaaaaaaaaaaaaaaaaaaaaaaaaaaaaaaaaaaaaaaaaaaaaaaaaaaaaaaaaaaaaaaaaaaaaaaaaaaaaaaaaaaaaaataaaaaaacaaaattttttatggaagaaaatacctattataacacaaaatgataaaaattatataatagataattttcataaattggaataatttgaaaaggattctaaaa

SEQ ID NO: 333103 - DNA, 70 bp, Zea mays
aaatcttacataatgcttattggtggtcggtaaacccataaggcaagaaaggcatacaagcttttaaaga

SEQ ID NO: 333104 - DNA, 318 bp, Zea mays
gtcagctaacttggggaacttgaaactggatggttcttctgaaaactatgatgaaagcagagagggaaatgtttatgactttggacacactggaagaacgcttcaactggcttacaatgaaacatgattgggtcactaggatgattcactaggatctataattttttgtagcactatgtcccattttcagtgctattatgtatctgtttaatcctttttactgcggtttgaacttgttgtgacattattgtggatggattgtacctccatctattattgcaacatgtttggaacttgttatgagaattatgtttagct

SEQ ID NO: 333105 - DNA, 232 bp, Zea mays
  unsure (1)..(232): unsure at all n locations
cccacgcgtccgcccacgcgtccggtgctgaagcaggtgcacccggacatcggcatctccgccaaggccatgtccatcatgaactccttcatcaacgacatcttcgagaagctggccggcgaggccgccaagctcgcgcgctacaacaagaagcccaccatcacctnccgcgagatccagacctccgtgcgcctcgtgctccccggcgagctcgccaagcacgccgtctctg

SEQ ID NO: 333106 - DNA, 396 bp, Zea mays
cccacgcgtccgcccacgcgtccgtgaggtgcgtggccctcgagagggatctctccagctgcaggcaggaggcccaccgccttgccaccgagaagcaggagctggccgggcagctgggcacagagaggcagaagatggatgagctgaagcaggatatccgggtgatctgcggcgacttgctccagcgggaagggcagctcacgtcgatttacaccaagtccaaggccatcatagagagctgcaaggcctcccaggtagctactctgctttgatggtttcaatgaccgctgttggcttgtgcattttttatacataaaaacagaaggacagcatttttatgttgagattatatccttcgttggcgttgcaattataatttcatcctcagtttttttt

SEQ ID NO: 333107 - DNA, 216 bp, Zea mays
ccgcattcgtgtacctgtatctttacttatgatgatgatgatgtatttccttcgtgtctgatagtaagtaattcacggccaggtcattgtagactctggtaaccgtttcggaaaatctagtgctatatctggtggatgattgtcaaaaactatgcaaaaaggcaatgctaacttttgtgaaaaacatacatgtagttttatcaaggaaataaaaat

SEQ ID NO: 333108 - DNA, 323 bp, Zea mays
  unsure (1)..(323): unsure at all n locations
cccacgcgtccggcccattgcaaaaggggtgtgaccacattgccaggatgcaaaaactgcacgacgttttgtccactgccagtaatcctcctctgaatctctggtcaatttatagttcaaagctattgttgtaattctgtagtctgcactctgcacaatatatntcttagtgcccagttccagatcacgtggtgtgattatgcgtgggtatctagaccatatgtaaataccaagaagttaaacaaatgtattatagcgtgcttgtttgaggaacaaaanaaataaaataactaataacataaataataaaagaactatttact

SEQ ID NO: 333109 - DNA, 418 bp, Zea mays
ggcgcccgagggcatgaagagcctcggcacgtcgtactccatgaccagcctcggcatcgggagcttcctcagcagcgcgctgctctcggctgtgtcgcacatcacggagcgccacggccggaccggctggatcctcaataacctcaacgcctcgcggctggacaagtactacgccttcttcgccattctcaactgcgccaacctcatcgccttcttcttcgtgtgccggttctacgtgtacaacgccgaggtatcccgcgtcgtcgacaccgggagcagcaagcagaagcgggaagtggcgatgcagccggcggccgtgggcgcagtggaggccaccctatagtagctactagtgttccattacaaatgtagctgtcatactcatacgtacgtgaaaagctctgcgtgtacattgcgt

SEQ ID NO: 333110 - DNA, 242 bp, Zea mays
gcgtccgcgccaagatgtaggccggctcgggcttgataaaaccatttttaaatcttcgaactgcaacaactggggggggggcgtcagactttatggcccaaggataaatctcttagttgaacactctgacgtgatgaatctggagcgcctatggtgctttaatatgcgcataatctacttgaccttactttttgtctagctgatctttctaatctataagtataaatgccattccccttcat

SEQ ID NO: 333111 - DNA, 316 bp, Zea mays
  unsure (1)..(316): unsure at all n locations
gttgactaatgttagtgtttgtggcggaccattgtcccttaatgggctacccatttgcactgggcatgcttctttttcttaaatgtggtatgtatgtgcaagtgtttgaagtttaggctgtcatgctatatgtcagctatcaaagtaccaaatgcaactactgttctgagctgtttgcttgttacgaaacagctttccaaaaaaaaaaaaaaaaaaaaaaaaaaataataaaaatnataaaaaaaaaaacaagaaaaaaaaggactttatgtagttaagaatgaacctataaacaaattgttctgaatttattact

SEQ ID NO: 333112 - DNA, 72 bp, Zea mays
taggggatggaaagctcacgtgcgcgtgcatgccacgtcatacctcctctatagtgccacctaaattcaatt

SEQ ID NO: 333113 - DNA, 190 bp, Zea mays
gggctgcctactcctccccctcttaccaaatcctcttctgattatgcttacgtacggtttttaagacgggcgggggcggcagctgatctagattacctttacttcgtctaccggctacgcctgttccaccatcaacgaatcgactgcataataccttctactaatacggccatatccttcacttcaaagt

SEQ ID NO: 333114 - DNA, 378 bp, Zea mays
atcgctttccgaaaggcggattgatgggtggtgggtctggtgcgcggtagttgtcggtccaccctcaccctcaccagtgggcagtgcagtggccagtcactcactcctacccacctgccgatcttggctgccatggctcgcttgctttggttctcactcaaaggaaaggaaccctctctccacggtacgaccgggaccagaagcatccgcgtctgccgggccccacctaccgtcctttggcatccggagggccgtgcacgcctcggcgtacgacaagaacctggaggaacaggtgcgcccggcgttcgtgccggacgatgtgatcggcagcgccgggagccccgacaagtactggagcccccaccccaagaccggcgt

SEQ ID NO: 333115 - DNA, 356 bp, Zea mays
gtatgaattatgtcataaataaaagctagggaaccttgataaataacagagagtaggatgtataccacgaaaaaaaaaaaaaaaaaaaaaaaaaaaaaaaaaaaaaaaaaaaaaaaaaaaaaaaaaaaaaaaaaaaaaaaaaaaaaaaaaaaaaaaaaaaaaaaaaaaaaaaaaaaaaaaaaaaaaaaaaaaaaaaaaaaaaaaaaaaaaaaaaaaaaaagggggggggcgtttaaaaaaaacaaaaaaaaaatccgggggaaaccaaataaaaaattttttaaaagggccaaaaaaaaaaaaaaaaatggcccaggttaaaaaaatgtgaagagggaaaaacccaggggttaccc

SEQ ID NO: 333116 - DNA, 217 bp, Zea mays
  unsure (1)..(217): unsure at all n locations
cccacgcgtncgcccacgcgtccgctttgctacagcagctgccatctggcacttctggattacaacatgcagaatgttgccgtttttctacacatggaggtccacttgttccattccattttgttatttcttgtaaatgattctaggcctgaaatgaaaaaaaagacatgcagttcattgtcagtacaattccagtggctactgtggacttagctca

SEQ ID NO: 333117 - DNA, 73 bp, Zea mays
  unsure (1)..(73): unsure at all n locations
tatgacttctcagcaaatgctctatgcacctaattttactgtgaatgaggaactgctnnnnnnnnnaaaaana

SEQ ID NO: 333118 - DNA, 422 bp, Zea mays
ggaattgtggcgaacgtcttcattgttgctccagaaagtttagcatccctggttgaaggaacccccagcatgcgaaaggatgccttgaggttcattcagctccgggatgattataagacagcgaaaatcgcttcgatgctcaactatatcatgtccgagtaatgagtgaagtggaaccggtagaccgttacactttgctgctctcgtggactattgatgccgcctgtataaatgaccttcgaaattatgtatatttgtggttccaatttatctgtattgctagcctgttttgattgggccttgctcagtttgagctgaacatgctggtcagcttcatgaggctttttcatgggttatttataagttattttctcatgtatattatgttttttattaaattttgtaatttaatttatatattt

SEQ ID NO: 333119 - DNA, 312 bp, Zea mays
cccacacgtacgcggacgcatgctctaaaattggaaaaactatgcttaaggggaacggtaaaatactgtgggggctgaaataaacttaccaattataactattaatacataaaagttcaaagcactttaacattaccatgaccagatctaagttctaactctcttgtaagcaatcttattgataggactctcatacctttgttgaacttccttaaagatacttgcatctctaataccgagattgatcatgttctactggttgttggtatgactacattaccatatctccatttaagttgtttttttatatat

SEQ ID NO: 333120 - DNA, 360 bp, Zea mays
  unsure (1)..(360): unsure at all n locations
cgtcggtctcagcgctgcaaccgttcgctcgcctcaaggctaacgacggcgctccgagtgctcctgggcgcggaggcggcggcggcggcngcgtgtcttcgaggccggctctgaagacggaccagttcctccgcaccgtcgcgccacagcatcatcggcaggaagtgcagttcctttcctccgaccataagaagcctcagccccggccggctcctggaccaccccttattggcgcagaggtccatgggacgatcgatggagctttcgattccgggtacctcatgacggccgtcgtgaatgggcagctcttcagaggcgttctgtttgctccgggacctggggttacggctccgagaccga

SEQ ID NO: 333121 - DNA, 124 bp, Zea mays
  unsure (1)..(124): unsure at all n locations
cggacgcgtgggtgaaaacggaaagtgaagttcttatnaaaaaaaaaaaaaaaaagagaaaaaaaaaaaaaaaaaaggggaaaaaaaaaaaaaaaaataaaaaaaaaaaaggggaaaataaaaa

SEQ ID NO: 333122 - DNA, 352 bp, Zea mays
attttgctgccaaaaaaaaataaaaataaaaaaaaaaaaaaaaaaaaaaaagggaaatgaataaaaaaaaaaggggaagtaaataaaaaaaaataaaaaaaaaataaggtctaccttaataaaaaaatccggtcttcctttctcggggtgtcctgccttctttccctcttctttcctacctccttattttcttttcattgccccctttttccttactccccccctgttaaaccccttgccttcctttaataaccctccttttcccccatccatctttctttcatatatttttcctctttcacccccccccctttctccattctcccctttctttctcctctttttccttttt

SEQ ID NO: 333123 - DNA, 383 bp, Zea mays
cgggcttcttcgccagctggtgagcattcggagcccaaacaatcgatcaaataaatcaaattaaatctagtcgctgttgcctgctttttgatttcacttgattccttctctggtggtacgtgatggctctccgtttcttgtatgcatgtatgtatgtatcatcacagttgtgggtgcttctctggcggcgaaaccgcgagatagatagattcagtgttggaccgagaaccatggatggatggatggaacatgcatgcccagtgattgtttgcgccggtgaaagttcaatttgtccggatttattttctctgaaatagtatatgtttttttttctccatcggtgagccggtgatcttgtcaatttgtacaataatcattatatg

SEQ ID NO: 333124 - DNA, 81 bp, Zea mays
aaaaaaaaaaaaaaaaaaaaaaaaaaaaaaaaaaaaaaaaaaaaaaaaaaaggaaagggaaaaaaaaaaagggggaaagga

SEQ ID NO: 333125 - DNA, 95 bp, Zea mays
gtcctgtattagttaagctggacttgctcgaataaaaatgaaaaaataacgggaaggaaaacatgaaagaaggcagggaaaaataaaaaaaccca

SEQ ID NO: 333126 - DNA, 352 bp, Zea mays
cccacgcgtccgacaagaacaagatcacacagtcaaaaggtgctacttactatacacgcacaaaaaacatcgaccaggatggcatctccaacccgtcaggcaccggcaccggcaccggcaccagcaccgccaccgttcctcgttactcccatcatgctgatgctgtggctgctgctcgcttcatcgcacacgcgcggcgccatggccgcgccgcccaacacggaggcgctctcggtgctgtgcaatggcgcgtcctacggcgccggggaccccttcgcgacgagcctggcgttcgtgctgtcggagctggtgtccgccacgccggtccgggcaggccacgacttctacgaca

SEQ ID NO: 333127 - DNA, 351 bp, Zea mays
ccaacgcatcagaattagctttaatgttctagaaaatctacttattatactgcaccagttaaatgctgtgattgctgtgaaatcaattctttcatgcgaaaagcgtattgattttttacactcacttttggataagtttgttacacctgaatcatttcagggagaggtgtcaagtctacttgacaaagaggaaatatcttccatatttttagagtttttggttctctttggggctgttggaataatttatattttatagtagttactactaatatctaaggtcaggatttacatgtttatttacaatattgtctatctcaaacgattcctgcctttatacttgataataaa

SEQ ID NO: 333128 - DNA, 139 bp, Zea mays
tagttctagctttagctgtacttttgtttaggtcatcatttgattttcaggtgaacaatccgattgggcatcttaaacatccctatttgtaggatgaaactcagaactggtggctaccaataaagtgctgttttttttc

SEQ ID NO: 333129 - DNA, 372 bp, Zea mays
cccacgcgtccgaggacgcgtggggtccgatcgatgcacctggggctctgcgctctcatgactgctggattagtaacaatcctatacacaccttctgagtatgagcatcagtcgcaatcaagctcatggctagacacaggggggatatgggaaaagaggagctctgatccctgatatgaatcttatgctaacattcagggggacgatgtatatgaaacaatccaaaatctgaatgcaggtgaacagaagctcattgtatggactcctgaatattaacaggactgagctcgacgctaggacacacatgctgccagaacgtgagtcctcaatcataaagctggagcatgccaaagaaagcattacctggcaaac

SEQ ID NO: 333130 - DNA, 346 bp, Zea mays
accacacatactgggacgcgggtgactctgcggtcgaagccaccgacgacggtaagggactgcgcatgcctgtgatcaaggaacggaaccacgacgggacgctagacttctggctcataaggaaggtcaccaggcccttgaagctgaacaaggacatcaacgctctgtaccatgagggcgcctacatggtcactgccagctacttcaacaacggggacaaaatcatctacaccgtgcagtcgcaggaacacaccaccacgatcggcgaaagaagcctaccgggtctcgcataggctgcacgcactactccatgctccgtacatcctcgagagatctgagagagacc

SEQ ID NO: 333131 - DNA, 311 bp, Zea mays
cccacgcgtccgcccacgcgtccggcggcgcaatgttgagcaagatatatcaacgatgcgctttgtctgcattcaaaggattcatctattgatgtcacaagcctatgaaaactggcgagtgtgaatcctgatctacgactccctgcgatcataatcctgtgactgctggttagtgtcaaatgcagtctgttaaacttcttgatgcggtcactaatacaagttcatcaaaaaaaaaaacaaaaaaaaaacacaaaaaaaaaaaaaataaaaaaaaaacaaaaaactaaaaaaacaaaaagacaactaaaaac

SEQ ID NO: 333132 - DNA, 240 bp, Zea mays
aaaaaacataaaaaaacacaaaaaaaaaattaaaaaaaaaacaaaatatataagggaagacctatatatgaattaaaaggagttattctatcgatgtcacaagcctatagaaaactgacaagtgtcagtcttgatctacgactccctgcgatcatactcctgtgactgctggttagtgtctaatgcagcctgtcaaacttcttgatgcccccactaatacaaggtcatgactctggaaaa

SEQ ID NO: 333133 - DNA, 454 bp, Zea mays
ccggtccggaatgtcccaggtcgaccgatgataatgagattgttgatgcagaatgctactctttatgcatgtccattctggaataagcattaaaagctgtctttcagaaaataccaatttcagtaagtactttaaatcggcagcatgcacattccagtccttgtgtatactatcattactttatagcttgttgcatggactaagcacttaagataaaaaattacgatggcttatctgaagaatttgatgtgttcaaggaaaaagaagaatttgatgtgttgtgcattttgaaaagacatatttcatgcagtgcttatcaagagcccttcgggatgagaatccaaaatttctgatggcagcatcaaccttgctcctaccatttcaacccctgatggtttcagctgtccacaccgggataatggaggtttcatttgctaaacgagcatcaatagat

SEQ ID NO: 333134 - DNA, 242 bp, Zea mays
ctaagagcgacgttacttgtcagtcaatgtaaataaccaaggacctgcccatttggtatgactgtactgttgttattaccgaacccattctgtttgcatcttgggagctgttttgttgtcgttcatggccatgcaagaaatgaaataacatgccaaatgtacggctgagggctgacaacactaggaatattgttaaacaggaacactgagtttcttgtgaggatgtcatgatagcttttctg

SEQ ID NO: 333135 - DNA, 409 bp, Zea mays
cggacgcgtgggaaacaacaaatataaaatagaacagaagaaaaaaaccaaaccgagatagaaaaaatacgagaggagctcggtggaaagtaacatcaagcttgtggctccagcgtccagaggatgcgtcactgatgagtaggctgtgttacattctgttcggttgcgcacatgatgcgttttcaatccaaggctgtttgccaggaacaaccatgctgttagagtgactcatgatagcgcagtttgcgtatggcaggtataataataaaatgcccgtttctattagctcagcaatgctacagaatctgctgaataatcgaccgtaatatgtctgtttaagcttgtgagcaatcacatccttttcagtctctcacttgctttgcttgtcccattgcctctactaccttgt

SEQ ID NO: 333136 - DNA, 256 bp, Zea mays
aagaaaaccgctgttagataagaaatacactgctgtgtattagtagttaatgacaagagttcttggtttttgtatgtaaccatattgtggatcggatccattgttcttccccatggacactactactaccagtctaccagatcgatgttgaccttgtggcagttgctgcagttttttttttttgacagagaaatctgtaccttatgctgtgtgtgtttagaataagaaaatttttctccaaaaaaaaaaatcgaac

SEQ ID NO: 333137 - DNA, 474 bp, Zea mays
attccctggtcgacccactcgtccgaaaaaaaaaaataaaaaataaaaaaaaaattaaaaaaaaaaaaaaaaaaaataacaaaaagaaaaaaaataaaaaatataaccatataaaaaaataaaatccataaaaaataaaacataaacactactactaacctatctaccaaatcaatatatatccttatatcaattgctgcaattttttttttttgacatacatatctgtaccttatgcatgtgtgttatttcagaatatagataaattttttcttccattatatcaaaaatcgtaaactatcttttatatggcatccgttttaaaggatccaagcttacctacgcgttctttctacatcttatctcttctatattgtcaccttattttaattcactttccatcgttttacaacgtctttactgtgaaaaccttttctttacctatcttaattttttttcattacattctccttt

SEQ ID NO: 333138 - DNA, 380 bp, Zea mays
aattcccgggtcgaccacgcgtccgcgctgttttgcctcttccccctacccgtttcctcccttcgtgctggttgtggttctaaggtcctgattgccggccgtcccgccttcttccttgccaagacgagactctcctcctcctgccactgctaccgctgctcctctcaactggtgaactggatcctgatttggggagaaggttaaactggatgcctatgtaattaattgcatctctttaccattctacgtactactagtattgaagtaaaaaaaaaaaaacaaaataaaataaaaaaaaatataaataaaaaaaaaaaaaaataaaaaaaaaataaaaaaaaaaaaaataataaaatcataaataatttattattataaaa

SEQ ID NO: 333139 - DNA, 377 bp, Zea mays
cactcctggcacatatgtcgacgcaggtgtaggcggcgtcgctggagtctgcatggtcaggggagtagactgggaggaccagaagagtgaagaccgacatgacctatgcatgcttgatgcgaatggaaacgtaaatcagcacaccgtctactgaagggatagactacatgtatcctgatcaggaatgatgcaccaatacgctgacccatgcaggccaatcgaattcagatcaaccatgcgatctactatcacggacatcacaaggcatatcatctctgctagtatatcaagtgatatcactaccggttgtgcatacatagctgaatagccacgatatgctattgaagatgctgttaccaactatgacgaatggtact

SEQ ID NO: 333140 - DNA, 372 bp, Zea mays
  unsure (1)..(372): unsure at all n locations
cccacgcgtccgcccacgcgtccgcccacgcgtccgcccacgcgtccgccgacgcgtccgcccacgcgtccgtatttttagcctaatgtttcaggtcaaagggccatacttcatagctttttgctcctcattgttttaagtgaaagggcgccaactattcaaaatttactctaggtagataattttcattgtcgagttttattttggtatatgtaactttttgtaattgggcctaagcgtattggagcactctaagttaacaggtgcttgaagctgatgatgaaattatacagcttggatgaataaacctttgttgtagtgacataaggagtttcgaaattacaaggaattttaaaaaaaaaaaaanaaaan

SEQ ID NO: 333141 - DNA, 405 bp, Zea mays
gaattcccgggtcgacccactcgtccgcccacgcgtccgatgatacgtttatcttgtcgttctcctactcttcctaccgcacctccgtgcactcttccgtatttttagcctaatatttcaggtcaaactgccatacttcatagctttttgctcctcattgttttaagtgaaagggctccaactattcaaaatttactctaggtagataattttcattgacgagttttattttggtatatgtaactttttgtaattgggcctaaccgtattgtagcactctaatttaacatgtgctataagctgatgatgaaattatacagcttggatgaataaacctttactgtagttacatatagagtttctaaattacaaggaattttaatttacctaactttatcttcttat

SEQ ID NO: 333142 - DNA, 162 bp, Zea mays
cgcatgcattgtgtagatttttatatacatatctgtacgcccttgcaatggagagggcgggacatgtgcaacacgttgtggatgaacgggccaggatgctgcttaggtgtgatctatcctatccatccatggataataaagaagtttgtggattgctgtttt

SEQ ID NO: 333143 - DNA, 379 bp, Zea mays
gaattaccgggtcgacccacgcgtacgcccacgcgtacgcaaagggccggccggtgtctggagaagctggtgcgcactgtacctagggcccagtgcccattcaaaaaagagaatgcactaactgtcagacatgctgctgaaatgggatgatggataccgcgacacattgcttacactgatacacatacatgctgtactgaatctgctgagccaaatcagaagcagatgattacaagctggtagctaggacatgagcaccctttgtggggtattcttttatggtcctatttgattgtatgtatacttataggaatgaaggcaaacacacctaagcagcatgtgtgatattcccatgtgctaataaagaaaatggcttgtt

SEQ ID NO: 333144 - DNA, 457 bp, Zea mays
cggacgcgtgggcagcaaaggatttagatgaccttctcttagcacacgatgaatatctgaactcgatactggagaaggccctgcttggtgaacattcccaaggacttttgaggaatctgtttgaactgtttgacattattttacagtttcgaagccatgctgatcgatggtttgaaaggatatatgagttgcagctaaggggaaagggtaaatcaaaatcaaaggatacaggttcatggtttgatggcggcagaaaagctatgatccaactagctggagaacttttctggaaaatgggtgaagacctggatagcatcgcaaaggattatacagcttctcttgatgcttttattacgcagctgcccatgcaacagcacgtcgatttgaagttccttctcttccgccttgacttcactgaatattacagtcgtgtttccttcaacaaatgaatgtgagc

SEQ ID NO: 333145 - DNA, 287 bp, Zea mays
atattatttttttttattatattatttatttttggttttttttttttttattgttttttttttttaatatttttttttttttttatttattttttttaatttttttatattattttatattttaaaaaaaaagctgatcaaagtttaaaaaaaaatattagaaaaaaataaaaataaaggttaaatcatttatcaaaaaaaaaggtttataatttgatgaaaaaaaaataaatatgattcaactatctggaaaacttttaaagaaaaataggtatgacttagaatag

SEQ ID NO: 333146 - DNA, 362 bp, Zea mays
tgttagatctctcaacagtgtgattgatgcaatccaaatgccaacagaccaaagctgcgcatccaatggaaggcccctgatgaaccatctgccagtctatagaaatgaacggccccaggtgaaccaaacaccataagtaacccgagtgagccatacaccggttgcaaccatggctaaccatagaccagtagcccatggaaggcacctggcgagccaaacaccacctgctgatgggaaacctgtgacgaaccaaacatgagtagcatatggaagatccctgatgagccaagtaccagcatgcttatgggaaacctctgacgaaccatatagcagtgccaaagggaagacccatgatgaggcac

SEQ ID NO: 333147 - DNA, 435 bp, Zea mays
  unsure (1)..(435): unsure at all n locations
ctcgtagagagaaggaaaaatatccccaaaccctagctcccgatctcgatggcgaaccctcgcgtcttcttcgacatgaccgtcggcggcgccccggcgggccggatcgtgatggagctgtacgccaacgaggtgcccaagaccgcggagaacttccgcgcgctgtgcacgggcgagaagggcgtgggcaagtccgggaagccgctccactacaagggctccaccttccaccgcgtcatccccgagttcatgtgccagggcggcgacttcacccgcggcaacggcaccggcggcgagtccatctacggcgagaagttccccgacgagaagttcgtgcgcaagcacaccgncctcggtgtgctctccatggccaacgccgggcccaacaccaacggctcccagttcttcatctgcaccgtcgcgaccccttggctc

SEQ ID NO: 333148 - DNA, 411 bp, Zea mays
cggacgcgtggtcagactcgtgggcggactcgtgagctgacacctgacgcgttctacgcttcaattgggactggactgatccacaccaggcacttgagtaggagtatgcggcatttgaacaggcaatcatgctagctagacctgattagatagacagcgttcgcttccatgtcaaatcatggacacctacaaggtctattgcacctgacgagtcgttcaccacctgcaactgggaaacctgtgtcgaaccaaacatcattggcaagtgtaagatccctgatgcgccatgtatcagcacctgatgggaaacctttgactaatcacatagcacaagctatatgcaagacccataatgaggcagaaaacagctgagcgttgaaggcctcagatgatccaattacctgtagcaga

SEQ ID NO: 333149 - DNA, 246 bp, Zea mays
ctgactcgaggatgtgctcgtcacatatttgactttgtaaagaagatttagtgtaacgggagacaagaagtattggagatgattgaatatgttaattgatttgctagttagcagaggtgcaatcatccaattatgaatgatgttttgtaatagcctagtatataggatgattaagataaacatatgttatgacacatagtatggatcgactgccatatgttatatgatatagagcggttcatatta

SEQ ID NO: 333150 - DNA, 338 bp, Zea mays
gaattcccgggtcgacccactcgtccgcccactcgtcctaaaaaaattaaaaaaattataaaaaaaaaaaaaaatatagaaaatagtgaaaatttaaaattttcattagcataaatggacactcattcttcatgttccaatcttccttactctaccttcctaggccatagtttttcatttactgtcacttaaattcaattcactgtcctcaactttataccttctcatctgttaaaacttttgccttccttatttatatcgtattggcccacatccatctttcttcatatcctttactctcatctattcccgaatagatcgccttttctaacatttct

SEQ ID NO: 333151 - DNA, 317 bp, Zea mays
taccggttcggaattcccggggggacccacgcgtccgaacggttaccagactggccaggccagggatgaccaaactgtgctacaacggacggaccggaagaagctgaacgtgaaatccattgtgaagaccctcctgaagtgagtgcaccaccgtgttgaagtgcagtctgcccaaagtctgttatctattgtatccccagtgacctttgtcatcctcatgttggacgtcgtcgtgtatttgtaactgtcggagttgcaacaaaacttgtgtgcttgcgtcaacgtgtgccgtcttgctctaataatgcactatctgc

SEQ ID NO: 333152 - DNA, 199 bp, Zea mays
cccacacttcccaaaaaaaaacaaatactttaaaacacatacaaaacactaaatgggtaacgtaaaaaagaaaaataaaactaaaaaaaggtcaaccatttctaatgccccattcttacaatacatctacttgcaacgtctccacttctagtatagcttctccttatttcaatcaattgcctgtccttttacaacactg

SEQ ID NO: 333153 - DNA, 230 bp, Zea mays
cggacgcgtgggcggacgcgtggggtgtggtttgctcgttagagcttattttcggacatgcaaaaaacatgcttcctatgtgggatgatggttatctttatatttgtatgttaattagtctctttgctgttaaaaaaaaaaaacaaaaaagaaaaaaacaataaaaaaagcaatagaattacacaatgaacaaaaaattgatcgtaattagatgaaaaaataccatgaat

SEQ ID NO: 333154 - DNA, 122 bp, Zea mays
cccacgcgtccggcgacgcgtacgctctctggccaggttcgatatgaccggaatgtagaggattctgggtgctccatacatgctaacaggacttatacagaaacagctcgggcattgtagct

SEQ ID NO: 333155 - DNA, 420 bp, Zea mays
cccacgcgtccgttaagtatggacgactttcgctactgaagctacctgggggctaatgaggatttgatcgcgcttttgtggtgtcagttcaacactgacacttacatataatctccatataatccctcgccatactaactgcatgagttctaataatttttcaagcatcactcactgtttatatactacgctataacttagcagagatgcaagatgttacgtacatcatatactcgatgtctgtacgctgtgctgagttagtgtacgagctgaatcgaatgcatgactgtgtatatgtatatagatgaaaacatccacatggaatgtaatacggaaaactaaatctccaactgatcggtttaaacgtctagaatatgcaatattaaacactcgtgcattagagctcgtacgtatcttata

SEQ ID NO: 333156 - DNA, 443 bp, Zea mays
cccacgcgtccgaaaaaaaaaactaactttaaaaaaaaccaacaaatcaagggcctatgcgtgaacaatcaacaactgcaccaacatatgccaaaaacgagaacttacccagcagcgagtgtaaagccgaaggcgccacgcgcaagtgcttctgcaagaagatatgctagtaataaccttggctttgctggcacaagcaggtccgttgcacacaacgcaattcacgcatcatatctgaactccttacgcgttgctgtctactcgaccccgttttctctttcgatcgatttcgtagcttcctgctgctctcttcttttcccgcgaataatatgctacatgggatctcacttgtgtactttctgcatccgttggtagtcaagaccaaccttcttcccgctgtcacgtttgattcaaaatggatgtactaatgcaactgttcgttc

SEQ ID NO: 333157 - DNA, 419 bp, Zea mays
attattatgatacgcgtcattgtaggttagctagctgttccttgtaccattaatcagaagttcattcatgcatgaattgacaacctgtcattgctttcgtttctggggttcaagtaaaatcgtttgactgcttgacgagttcagtgtcggtgttgccatgtaaagtcgttcttgtaatagtgaatgaatagttcccggttggaactagtggttttttacactgctgaaagccatcgtggttggcaataatgtctcatggtcaatgaaacgtgaaataattctgcctgtaaaaaaaaaacgtggtaacaaatctcaacaagctggtggagctaccaaaatgatccatctgaagttactcagaacaagatgcaatcacagattgattatctttcgctgaaataaaaaaggggcttccgttt

SEQ ID NO: 333158 - DNA, 321 bp, Zea mays
tggacgcgtgggcttctccacggaggaggttatgcggaacgccatcgagggcatgaacggcacggagctggacggccgcagcatcaccgtcaacgaggcccagtcccgcggcggacgtggaggcggcggcggcggcgggtacggtggtggccgtggaggcggcggctacggcggaggcgggcgccgtgatggcggcggcggctacggcggtggcggcggctacggtggtggcggaggcggctacggtggtggtggcggaggctacggcggtggcaaccgaggcggcggctacggaaactccgacgggaactggaggaactg

SEQ ID NO: 333159 - DNA, 434 bp, Zea mays
aaaatgaaagagaataacaaaataccgaatgctaaaagacagatacaccaaacgagactgagggcgcagatgcacagagcgactgcgactcgacgtctgtggatgatcactccccttcgcctaccgcggtgacggcaaacaaggtgggcttcgaactggatctgaactggcccccgacagcagagaactaggcaagccggagtttttggctgacgacttactagcttccttttcccttatgccttcatcaggaatgttacttgtggttgttaaggtcctgtatggctgtattcttgttctgtagactaagagatggggagtcttgtaaatattgttttccgtcgagacggaaatgaactgagatctgttcgtctgtctgatcaagccggcgttgatatgggcttaagctatggagtattgattagtaattgcca

SEQ ID NO: 333160 - DNA, 304 bp, Zea mays
attccctggtcgacccactcgtccgaaaaaaaaaaaaaaaattaaaaaaaaaatttttaaaaaaaaaaaaaaaataaaaaaaataaggacccgtttacaaagggtaatggtaaaaactaatttataaaatctaaaatttatgtttgcaaaaaagtactaaaaaaaaacaaaataaataaaaacaaaatcttagaacttaaaaatgactcactatctaaaggttcaaagtttaatctcacatcatttacaatgaaaacctcttttatctggagacctaaattaaaatcattgtccttcattttaa

SEQ ID NO: 333161 - DNA, 161 bp, Zea mays
cccacgcgtccgcccacgcgtccgcccacgtttccgatccggtcacgagaggagcgtttagtaggaccagaaccggatttggtcacatcaggtgagcatctttgtctcggtcgtctgatttgactgttctaatccatgtttgctagtataatcttcttttt

SEQ ID NO: 333162 - DNA, 304 bp, Zea mays
gaagaaacatgtcttgtaagatactccttcaaaggatcgggtgcctgtagctgtactctgacacctgcatggattgatgtcttgatgatgtagtgcaatgtagcattcagaacaataaagacatgtttcggactgcaaaaaaaaaaaaaaactaaaaacaagctaaaaaacaaaaaaaaagaaccaaaaaaagacaaacaaaacctacaaaaaaaagccataatggcaacaagtgaaaaaaaaaaaaaaaaaaaagggcgccccttttaaaggatccaagtttacttacacttgcatgcaaggc

SEQ ID NO: 333163 - DNA, 95 bp, Zea mays
gtgaattgcagaatcccgcgaaccatcgagtttttgaacgcaagttgcgcccgaagccttgtggcggagggcacgtctgcctgggcagtcacgcc

SEQ ID NO: 333164 - DNA, 363 bp, Zea mays
tgggatactgccggatatcgtcaacaattgttccagatcggagtattggatcaaatgagagtgtcagcaattgcttgttaaaaaacaaaaaaaaaaaaaaaaaaaaaaaaaaaaaaaaaaaaaaaaaaaaaaaaaaaaaaaaaaaaaaaaaaaaaaaaaaaaaaaaaaaaaaaaaaaaaaaataaaaaaaaaaaaaaaaaaaaaaaaagaacgaaaaaaaaaaaaaaacaaaaataaggtacgcttttttaaaaatccaataattattcaatagggtaaccaaaattaaatttattgaacggggatttaaaacttaataactgggaaaacttttaaaaaaacccaacttagggaaaaacctgg

SEQ ID NO: 333165 - DNA, 222 bp, Zea mays
tgggatactgccgtatatcgtaaacaatagttccagatcggagtattggatcaaatgatattgtcagcaattacgtgttaaaaaacaaaaaaaaaaaaaaaaaaaaaaataaaaaaaaaaaaaaaataaaaaaaaagaaaaaaataataaaataaaaaaatgaaaaaaaaaaaaaaaaataaatatataaataaaaataaaaaaaaaaagagacatcaatat

SEQ ID NO: 333166 - DNA, 202 bp, Zea mays
tccgggtcgacccacgcgttcgtccacgcgttcggtggagactgcggccttcctgaacgcgtgcgggctctgcaaacgccgggcttgggcctggctacaaacctttatctacaagggctaagtggcattctgccagcaggagtgccgggagaagcacatctgagtacgacaacctctacttgcgcatggagcatacctgctt

SEQ ID NO: 333167 - DNA, 310 bp, Zea mays
  unsure (1)..(310): unsure at all n locations
gaattcccgggtcgacccactcgtccgctagagttgaaacccaacaaaaaccatatgtcaaggttaaagcgataggctaaatctttggtatatttcattttttcaaatctcttactgcttctttatgtcaacttcgaccttcctctctctctctctttttattgctattgtgacttgaaagatgttagaacaggtattctacatttatgttcttctcatccggattgctataagttttcttcagttctgcacaactagttgctctgcangatagtgtgtatccgctttatgctaacttatatgcattttg

SEQ ID NO: 333168 - DNA, 401 bp, Zea mays
cccacgcgtccgcccacgcgttcgcccacgcgttcgcccacgcgtccgttttttttttggtttttacttcctgagaaggatgatttcattcagctcaccatcgatacagatatacatgagcagaaactccaaaaaaaaacaggtcgtaatttacaaaactcaagacacaacaacagtcgccgaagcttaaaacgagaggttgtcctcgacgaggcagccgtcgtcgaagctccacagcggcatgtcctggtccgccgcggcggcggcgttgctctgcacggcgtcggcgctgaacaggctgtccagcgactcgtacgcgccggcgtcgaagaaggcgacccacgcgttcgtccacgcgttcggtcagaagaagcaaggaatataaatataatgttcttagt

SEQ ID NO: 333169 - DNA, 432 bp, Zea mays
cccactcgtccgcccacgcgtccgtattttcctggtttagcacactcgaggttggacaggcacatctcgagatggttcgggctggaccagtccaagtaccagtgggcgctcaacgactattttgagaggaccggacaggttatcccacactttagtttctcgttcttctgtttgtagtttgtcagtcttgtttgtttcggttggatcaatatctctgattcctctctggcaggcatgtgttctttttttattttgaaaagaggaaaacctctgcctttaagaaagcaacagtatctcggatcaccagtttaccggagaaagcataacagataaactaatcctgatacagaattaaatttcaatgatgtctaaaatcatcacaccactaggcttagtgagtgtgccaagcaatgcaagggcgtgttgcttttt

SEQ ID NO: 333170 - DNA, 119 bp, Zea mays
aaaaaaaaaaaaaaaaaaaaaaaaaaaaaattaaaaaaaaaaaaaaaaaaaaaaggaaaaaggatataaaaaaaaaaaaaattaaaaaaaaataaataaaaaaaaaaaaaatataatat

SEQ ID NO: 333171 - DNA, 159 bp, Zea mays
attctccggctcgacccactcgtccaaaaaaaactatactcgaaaaaaaacacgtttctaaattataaaaaaaacaaaataaactaagggatcaagtaacaagctcaacagtactaaacaaacacaaatgaaatataaaatacaaaataaaactacaaa

SEQ ID NO: 333172 - DNA, 370 bp, Zea mays
gccacgcgtacgatcgcgcggtctgccacgcgttcgactggatacgctctggttgaggactgtctgtgcgccgagcgatcttacgcggacgaacagagctgcgtcttggatgcatttaacatgatctacgcgcgactcactgtcagatgttaacttggagtgcttgatatcgtggaagctgatgaactgagtaccgatagtcctggcatatgtctacacatagctgagaggcctcgagcgatatggcacagagtctcatgcgttccgatgatattgatatgtcccaggcccatatcaagaaagctctagttatagacactgacaacagggatgatatgatggggtacaagaggctggacgagaaggtcta

SEQ ID NO: 333173 - DNA, 297 bp, Zea mays
acggacggacccactcatgctatgactcaaaaactgctacgggcctgcgatattagatgacagagctactgcagagacgggggcacgcccacccatctctgaggtgcacatctacactgccgctggctacgcaactgcatgccgtggagggagcaaacatctcaggtactgttgacacgcattgaaatgtgcatcttactaacacaactcacgattgaccgccggtatgtatcccacgattatgaacaacacctggcgaccgctgtcatgcaactactacacatttcaagccacaag

SEQ ID NO: 333174 - DNA, 293 bp, Zea mays
aattctccggtcgaccgcactcatccgcccacgcgtgcgtccacacgtactaaaaggtcaagctcttgcttatgagtactgaatcagggtatgtgaaaccattgcacagacttacctgaacatttatcaggtaggtacctccatgcaacttaacactgaatagaaggttaatcttacttattgaatatccataaccagcgctccatatattaactagccaaacaagtgctgcatggactatggttcacatatatctgacttcaacggttaccaatcatgttcacacatgtcat

SEQ ID NO: 333175 - DNA, 248 bp, Zea mays
ggaattctccgggtcgacccacgcgttcgcccacgcgttcgcgacgtgtacagcttcggcgtggtgctgctggagatcctgatctgccggaggtgcgtggaggcggagtacgtctaggggagcaacatcgtggactgtacgaggcgtaatgtcgccggcggcaacttcatggacgctgcgtactgtgcataccagctgacctgtgaggcggtccagcactagacggtgttgtcgctcggcatggatcc

SEQ ID NO: 333176 - DNA, 216 bp, Zea mays
cacacgcgtgcgcacggtttggcaatggcgcactacagattgcactatacaagaggctatgtccatggcgtgaagagaacaggaatattgaaacagtatcaaaaatgggagtgacgagtgttttagtagagaacggggtgaaccttgacatgtttaagctgggtctcagtaactttgcaactaactaggctgccttcagcataaaagatgattaat

SEQ ID NO: 333177 - DNA, 443 bp, Zea mays
ttgagctgtcaggtcggagctcctctgtgtaacgcttgcctggaactgcttcagtgatttggatggttattgagatgagtgcgagcagataactgcaagggtgcacacctggatgctcattaagaggtgtgactaacaatcaaagaagatcaagaggagcaaggatgttaaaaagatcaaagtgcactagatacaagtactagtacacactgggcgtctgctatactggaacaagcctaccagacgcatcaatctattgccataggtttgatcttctatgacctaatagatagtatacatgccagcgtttaacaaaactacgactgctaaaacattagtagcacacaattctactgtatgtaattacataacctaatctattacacctgtaatatcaaaaatggccggacctagcatccttccaaaaattccagcatacctaa

SEQ ID NO: 333178 - DNA, 412 bp, Zea mays
cccacgcgtccggaattacttcgcgtcctttacccagtttttatccattgcttgatggaggtagtggcagagggacatatgcacaatgctcggtcatttttccatacatttcgggaagctcataaggtgatgcattcaagggatcttcagaagctggaaggcatcctctctccttcacacttggaggttatttagctctgcactacattgtgccattatgttgtgaatggacccatgtattggaatgtgaattgtgaacccataaccctaaacagggttgggtgtggtattaatagacttgagtaattgggtctggcccattacaacgagggtgagacggtaattacatggggaaggccccaaaccctagacgggtagtctaccccctcgcagtcacaactctatcctgtac

SEQ ID NO: 333179 - DNA, 428 bp, Zea mays
  unsure (1)..(428): unsure at all n locations
atacaatgtgttccattcgtatgatgttggtagttgctacatacaaatacagcaaactagtagaatcgaggacataaatagtcacaatccgaatatcattgtcctatagcgcccaaaatcttgggtgccaattctcataatctgagtcatctgtgtcatcactttcagatgatgaagctgctagatcttcaacgcgcaatatgtatttagcaacctgatccaggatgtatcaggtaacagaggtcgtagttttacttcatggtgtctattcttagggcaatggtgtggagaagcacatgtgaagttgctcagccaaataactgatctgcaatgcgcacatagtgctctatttgatacaaatttccatgacgcgcattcttcatacttagtgtggaaggactccttncagctaaagcttggataatttg

SEQ ID NO: 333180 - DNA, 334 bp, Zea mays
aattcccggctcgacccactcgtccgcccacgcgttctctgactcgttttcagcaatgcttcactcaaaacaacaaactgggcctggccacatacataattcaacaaactaataaaaatcaaacacatcaacactgacaaaaaccaacaacaatggcccaatctttcccaaacccaagcttccctacccttacattctaagtcatagctcttataatttttaacctaaataaacttcaatggcctcaagtttccaactttctttattggaaaaacccctggctttcccaacttaatctagttgcaacacaaccccctttaggcaattcctaaaa

SEQ ID NO: 333181 - DNA, 439 bp, Zea mays
ctgacacttggtcaggctctgggcctccatctgcctcaatgtctactacaagtgcgacggggccgttgtcgaacgtgcctaagctgatgtcattctgggacgatgaactcatcatgtgtcacagctacaagatagacgagccgtggatatccgtgctgaacacacaatacagcctgtggaacaacgctaaccaccatcatcgtgctaacctccgtacatcactagcgcgcgatctagaggctccacgatttcgtacgctactatgccaaccgatcgatcaccattcgggagaacatgcttgaagaggatggccgtcctttcaaagagatggaaatggtaataaagcagccttacacaactctattggacatgctgacaacgcagattcaggacatgaaggtcatgacgacactggacatcctatcgtcgtactcaacag

SEQ ID NO: 333182 - DNA, 190 bp, Zea mays
tcttctcaagcttcttccgtaaaacaaatataatcgcacacttctaatcttacatactcatccttgcttgttacatacaattgctaacgttcttgctgcatctaattctctatgattgtaatccgaacaatgtgcatttaactaaaatgtcgcttttacctgaaaaaaaataccattgtaatgacatatt

SEQ ID NO: 333183 - DNA, 408 bp, Zea mays
cggacgcgagggaagaggttgactgtagattatgacacccttctgctgctactagtgaagctggaagctgaagaagaagtgcctcgatcattacactttggttgactactataggacatgcagccttgaggagctatagcagtctagatactataggggctctagatatgaaactataggattattgctaataatgtcaaatgcttaataattgaacttgaaaccataagaatggctaagagtctgatgcataaggatttgagatatatggattggagatatatgaatattcgacgggtggaattcaggagaagaaaaggaacttgttttcaagaatgcactgcgttgctcggacgagagacgggacggaataaaatgcgtgtggtctgtaaaggtcccaagcttacg

SEQ ID NO: 333184 - DNA, 408 bp, Zea mays
cggactcgtgggcggacgcgtgggctggattgcagttttattttatgttcctgctgtaaggtgacttgccgagacatagttatcattggttatctataatagctcaatcgactcgtgcaatctgaaggctctgctatatgcggtaaggtcgtctatgtaactttgtcatagttgatgtcagacggctcaaatctgaatgctatgtatatgtggtaagttcgtctatgtggttgcgtcgtctaaaatgcgcagtttttggaccgtaataaatttatagaagatgcataacacgccaaagttctgtgagagcattgttttaattttgccgtaatgaaaatcattaatgttcaggggcggccattttaaaggtcccacgttttagaagattcaagcttacgtactcgtgct

SEQ ID NO: 333185 - DNA, 342 bp, Zea mays
aattcccgggtcgacccacgcgttcggacaataccaaaaaaaaaaaaaaaaaaaattaaaaaaaaaaaaaaaaaaaaaaaaaaaaaagaaaaaaaaaaaaaaaaaaaaaaaaaaaaaaaaaaaaaaaaaaaaaaaaaaaaaaaaaaaaaaaaaaaaaaaaaaaaaaaaaaaaaaaaaaggggcgccccttttaaagaatccaactttactttcccttcattgcaacttaataccttttttatagggcccccaaaatcaatttcattgccccttttttaacaacttattaactggaaaaaccctgggtttaccaaatttaatccctttgaaaaaaatcccctt

SEQ ID NO: 333186 - DNA, 393 bp, Zea mays
cccacgcgtgcgctgtactcgcgttggcctgcaataatcctagtgagatatgccggaacagtcactgcgggcctgacatatctagctgcgtcagtcagctctactccagtgtatgtacactgaggcatctgtaatgttcatgtgtatagcctgcagcgtgatgaaccacttactgggatctgtacagggctaggtcgactagctctgaattcatgtggatagagcggaaccggatggacctgaatcacattcatgtcaaactacttgttaacattgctcaatcccactcaatccatgtgaaatgagaataaccgaccaagccctgagagggcacgttacttcattcacgaaggattgggcacttgaagttaaaagaatcatacacatcttgtt

SEQ ID NO: 333187 - DNA, 153 bp, Zea mays
cggacgcgtgggtttgcatcagttttgctgagccgtttttttatacgtgaggatttagagtactaacaatttaagtccaagaaaaatcaacagtgaagttcaactcagcagattaaatcttcaaagtgccgtttttaactgggagttgagctc

SEQ ID NO: 333188 - DNA, 54 bp, Zea mays
cgttaaactcatgcccttcttgttcataaataatttttcacacaaaaacaaaaa

SEQ ID NO: 333189 - DNA, 253 bp, Zea mays
  unsure (1)..(253): unsure at all n locations
ccggtctcggaattcccgggtcgaccgcacgcgtccgtcagatcatagcgtagctcagcttgaatataactgtaacatcacgcctgttttgtgaaagctcgtgccttgctcaattgtgccactttagcagacatccccagctcacctcatcctggctggagatcatatcatatgcagatatgaaatggaacgttggatcagagttttagtggacgctcaattttttttgaggtagcngcnnataaaaataaaa

SEQ ID NO: 333190 - DNA, 144 bp, Zea mays
tcttactcgttggaaaaaaaaaaaaattaatttaaaaaaaaaaaaaaaaaaaaaaaaggaaagttttattataaaaataaaaaaaacaaaaaaaaacataccctaaattacaaaaccttaaattattttataataactcctaaa

SEQ ID NO: 333191 - DNA, 295 bp, Zea mays
cgacccacgcgtgctcccactcttcctttctcctttcctgcttcttcatcttctctccaagggcccccccttcggggagtgcggcttcttacagacgagcggcccctccatcttcttccactccatcatcttcttctccctcgcctccgtcttcctcatctccatcggggtgcacatcaccacttactatccgtctagccccatagccgggacccagatctttcttcgttacagtctgcctttatatacttatatacatacattctcatttacattccctctaccacttttttca

SEQ ID NO: 333192 - DNA, 393 bp, Zea mays
accggtctcggaattccctgttcgacccactcgtccgaaaaaaaaaaaaaaaaaaaaaaaaattaattaaaaaaaaaaaaaaaaaaaaaaaaaaaaaagaaaaattaaaaaaaaaaaaaaaaaaaaaaaaaaaaaaaaaaaaaaaaaaaaaaaaaaaaaaaaaaaaaaaaaaaaaaaaaaaaaaaaaaaaaaaaaaaaaaaaaaatattttaaaaaaaaaaagggtgggaatttttaaatttactaatcttttttagccttttttttaaattttaattctttttttatttaacaaaaaattaaattaatcttccccctttttttataaaatcatcttattttaaaaaattttactttaaatatttatttttttttaacattattacccttttt

SEQ ID NO: 333193 - DNA, 428 bp, Zea mays
  unsure (1)..(428): unsure at all n locations
aaaaaccggcggacgaacaaccccacctccactctccaacatttttcnnacntcatatnccacagggagggctttttacatggcggagccgcccctcatcctactacctcattatcttctcaacttcatgtagctatattctcacttcttcaccgttatataaatccttttttcttcaaataacgattttaccaatactgatgacaacttatactctctccatattgttcatcaaataattttataattactcctacctctttataatgaactctttatcattaatgccatcactattcccctatacttattctttttcctaattaaatttcacaattacaattttacatctttttactctttttttactttaacattacatcctttacatttattcccactcttccacttctaatatcatccttttt

SEQ ID NO: 333194 - DNA, 216 bp, Zea mays
  unsure (1)..(216): unsure at all n locations
ctttttctgcaacccattccatnccnncggaaagattgtttataataggggtcgaccccanccancattattatntgcttatcttttatctttactagttttgtcttcctatatctttctttctttctcccccccctccctcctttcgactctttactgaaacttcttatagattctcaatatttttttatcttattcctatgctactttttaaaa

SEQ ID NO: 333195 - DNA, 253 bp, Zea mays
  unsure (1)..(253): unsure at all n locations
gaatnccgggggggacccacgcgtgcgtccattttttcatcttattcaggtccactgcaccccctgctcgtcactctccagggcccgtatcaaggggcacgagctgcactgaaagagcaagacggatcttcaagcacatctcaaagagcttaaataaaaactcttcctcctacgcgtggacaatgtaaccggcggggctgccaacaagctctccaaaatcaagattgtgcacacctgcatcgctcgcgtgctc

SEQ ID NO: 333196 - DNA, 325 bp, Zea mays
  unsure (1)..(325): unsure at all n locations
aattcccgggtgcgacgccacgcccgtccggnaatgttgtgaagtggtggagtcaacaggtatcctnntttgttgaatcaagnncttcttggagaaggattgggtctaactgatagaagataaggggtgaatattannnnattgctaaanncttatacaattttattgtcatacattaccaggatatatttaatttctanncagagaaattgttcgacngnngtagtcttatagatgcattgtcctgcatcttttacgagatatggttagtcatttttgaccattttgtcaatgatctaagcatannggtatttgnnngatgtta

SEQ ID NO: 333197 - DNA, 101 bp, Zea mays
ctggaacacctgcagaagcatctcgattcgtccttgaagcacataagatctacaaggacacaacacatggttgatcaactgacagaacttcagaaaaagga

SEQ ID NO: 333198 - DNA, 140 bp, Zea mays
aattcccggtcgacccactcgtccgaaaaaaaaaaaaaaaaaaaaaaaaatttattaaaaaaaaaaaaaaacaaaaaaaaaaaagaaatttattaaaaaagttgggacgccaaaacaacaaccaccctctaacaacataa

SEQ ID NO: 333199 - DNA, 295 bp, Zea mays
  unsure (1)..(295): unsure at all n locations
tcggaanacccggggcgacgcactcgtcctcccactcttcctctcatctacatttcttttctcaccttagtctacatagaataccgtccgtttttattgtagcgcaaggaccactccttctcctatctacccccttacctcgtgatggacctccttccgcaccagacgtgcaacctgctcaagacctctttctttctttgcctcgtgctctatgacgcgcgcctgttctcttcgctcatgtccaacacctttaactacatctacaccagcacactgctcaagatcccttacctca

SEQ ID NO: 333200 - DNA, 189 bp, Zea mays
  unsure (1)..(189): unsure at all n locations
gaaatcccgnggtggacccacccgtccgcccacccgtccnaaaaaaaaaaaacaaatttatttaaaaaaaaaaaaaaaaaaaaaaaaagaagggtttaaaaaaaaggggcgcccgttttaaaatacccacccttacttccccttccttccaacattataactcttctttagcgccacctaaattcaatt

SEQ ID NO: 333201 - DNA, 128 bp, Zea mays
  unsure (1)..(128): unsure at all n locations
accggnccggaattcccgggccgaccgacgcgtccgcatggcgcctctgcttgattcgtgtttcatctgttatgttctgagattcatgatgatgcggtgagaactgaaaggcccgtggcatgcttctt

SEQ ID NO: 333202 - DNA, 204 bp, Zea mays
  unsure (1)..(204): unsure at all n locations
caccggnccggaattcccggggcgaccgacgcgtacgcccaaccctccncaatattcattttttggttgtgtctggagttagtcagttcagggcttgggtatgtattatatactgngattacaacacaaggttctaggttgtattaatgatatgtcctgatcattcctgtgcccgttcaaaaaaaaaaaaaaaaaatatttttt

SEQ ID NO: 333203 - DNA, 360 bp, Zea mays
cgaattcccggggcgacgacgcgtccgattttaaaacttataaatgttttatacattcaaattgtaattctttttaatcattttctggtggaatcactccgatgattgggtaatgtaaacttattgtaacatgtaatcattttgtaataaagaatttatttccgctgcggaaaaaaaaaaaaaaaaaaaaattaataaaaaaaaaataaaaataaaaatcagactaataaggctctaacataaaaaaaggccaatacacgcaaaaatatatctactatagcccctgtttacctggcggtcgttctggagtacctacccctttatgtcctggaactcgccggcaactctttctatgacaac

SEQ ID NO: 333204 - DNA, 246 bp, Zea mays
cggaattcccgggtcgacgcgcacgcgtccgcccacgcgtacgtccacgcgttcgggcgcaaaccttttcaaccggccgcagcccaactccgccaccgtctacgactggctctacagcgacgagaccaggatcaaccaccgctagatcgggcgagatggatggacagtgaagaggccatgtttgctggtccttgggggtatctaaaacgcacgcatgctctaatatagctagtcatcactatatat

SEQ ID NO: 333205 - DNA, 255 bp, Zea mays
gtcacctctgcatccttccaacctaactaatttccatacatccaaggacctttggggcggactgaattctgggtggcgcagaccatcttttcacctaacggtgatggactaagacgagatcatgccctaccgctcggagctatgacatggagatcgctgaaatatgtgctccaccacaagagcacaactgcatgctcatgaacaggattgtgcacaacattgctcgtggggaacaagaggactggtacaggcgcc

SEQ ID NO: 333206 - DNA, 525 bp, Zea mays
cgggcgcgacgcacgcgatacggcagctcttaactcaacatcaacactaggcattgtacagatcttctagatgcattctgctttgcccgacagacaatggtttgacgatcctgtagcaatatcatgacatgattcctttactagttagatattggagtgtcagtttggtgaacaggctatttcatgactctcatattacgacagaacacgatctagcatgctagtaccgcactcgaaccagtaagaggtgttcaaaccggctttggtggtcctgagtgtggcatgaaggctttggaactaggaatcgcttgaatttcttgatgttacccagtggaggctttggtgttggcaatttcgtccactttcagcttgtgtccaaacattggcttcgggccagtgtttcctgataagcttcgaggagcaagatgatgcttagccatggcttctttcgcttggtcgatgcgcgtgctagggcaagttcttcagggttagcttggcggtagcgtttgttagtaggccatttta

SEQ ID NO: 333207 - DNA, 388 bp, Zea mays
acccatacaacaacacatactctaactctagatttgcgttctcaaccacttattttttttattacgagagggtcaatactaaactgtgactagactcacacaagataaccatctttacattttacagcaaacgaccaccagtaagaccttatcaagcatgctacaaaaaccgaccttgctgcaatggattttcatcacacaaatctaacaataagtctctgtaatgtacatccacctacctacacatattgcgccatacacgcactgtttgttaccatatcatctggacagtcattctttcatcacataataattgctcttctacgactgtcacaactatcagtccaaagaccatcttcaaatactgacatttcaaaattttgataca

SEQ ID NO: 333208 - DNA, 165 bp, Zea mays
gttttgcgccatttgagctgggggatgcatctgtatcgggcccataatgtagtatctccgttttgaaaaaggtttgagtttaggaaaagaattgtttactgtagtgattcaataacccttcaccctgtctgcattacaactttcatatatgatgtgaacgttttg

SEQ ID NO: 333209 - DNA, 288 bp, Zea mays
  unsure (1)..(288): unsure at all n locations
ccggnccggaattcccggtggacgcacgcgtccgcggacgcgtgggcggacgcgtgggttgactcgtgggcggacgcgtgggcggacgggtgggcggacacgtgggcggacgcgtgggaaaaaaaaaaaaaaaaaaaaaaaaaaaaaaaaaaaaaaaaaaaaaaaaaaaaaaaaaaagggaggaggttaaaaaaaataaaaaatttataaaaaaataaataaaatataataaattataatgtgtgtaattttataaaaaataaaattttacttttttttaaaaggaaa

SEQ ID NO: 333210 - DNA, 355 bp, Zea mays
  unsure (1)..(355): unsure at all n locations
ccggggcgaccgacgcgtccgcccacccgtccncggacccctggggtcccaagttcggtcattttagttcgctgctttagggcatgtcttaacccaggtccttatttttctcagttctttttaagccatgccaagggctgtattccccgtatacggtacagatcgcgaaatccctatcagggatggtttggtgatatcagggtttatatgttttcctgaccgtggtgactgtcctgttttcattcttctttcttcgctgccctgtattcattttgtcaagctggggcaggcatccaagtatttggcaatgtatatttgagcttgcaggatacaaaggaaacgaattgttttgtat

SEQ ID NO: 333211 - DNA, 351 bp, Zea mays
  unsure (1)..(351): unsure at all n locations
ggaaaacccgggccgaccgacgcgtccgagaagaaagaagactttccttgataccttgtgcttatcaaaatgcagttgatacaaatntgtacgtaccattctcccatcgaataaagtctgacaatttattcctttttcaaaaaaaaaaaaaaaaaaaaaaaaaaaaaaaaaaaaaaaaaaaaaaaaaaaaaaaaaaaaaaaaaaaaaaaaaaaaaaaaaaaaaaaaaaaaaaaaaaaaaaaaaaaaaaaaaaaaaaaaaaaaaaaaaaaaggggggggcccttttaaagaatcaaaattaacttccccgtgcttgcaaagaaaaagtttttttttggggcccccaaaatta

SEQ ID NO: 333212 - DNA, 308 bp, Zea mays
gtccggaattcccgggtcgaccgacgcgtccgcccacgcgtccgcccacgcgtccgcccactcgttcgcccacgcgtccggcaaattgattaggttgaaaaaaaaaaaaaaaaaaaaaaaaaaaaaaaaaaaaaaaaaaaaaaaaaaaaaaaaaaaaaaaaaaaaaaaaaaaaaaaaaaaaaaaaaaaaaaaaaaaaaaataaaattaaaaaaaattaataaaattaacctaaatttaaaaaatttgttaatttaaaaaaatcttacttaacaaaaataaattaacttttattaaattaatttttttt

SEQ ID NO: 333213 - DNA, 399 bp, Zea mays
cgggcggacggacgcgtccggaaccacaaggatcacgctcattgtatttatgtctaaatggtggccaacctacgcactcggtggactgtgatgatggactggacttaaaataccacctttatccactacacataccgtcacactacacctgagtttatgcctccaatcataagcggatgattaactctttagaaagccaagatcactctgaccacaaaccgaaaacaatccttgaagaacacttcttctctatgaggccaccgccccatgatggatggcttctaagagtaaaccgcgttctcacaaccatcttacgatgtatttgcattcttaaaatgttagttgatgatggcattctcacgccaaaggcagattgattgatgttgtacctggagcacc

SEQ ID NO: 333214 - DNA, 157 bp, Zea mays
atcccggggcggccgcacccgtccgttattttttggtggccttccttcttagaattccaaggcaagtccctgtaatttgggggggttttgtaggttgcacccttgtggtcattgtttttgaaattttctgttttgaattgatccattatatatgaag

SEQ ID NO: 333215 - DNA, 315 bp, Zea mays
aaaaaaaaaaaaaaaaaaaaaaaatatatatttaaaaaaaaaaaaaaaaaaaaaaaatggccgtttatatataaaaaaatacatactaaaaaaaacctccaaccaatttaaaatctcacattctttcttccccttacttacaacctcttaccttttatttacaaccacctaaattcatttaacttaccttaatttcacatcaatccacctgcaaaaaccttctctttccctaattaaatccctttccaacacttccccctttatccatctttcttataatttaacaaccttaatcctatctcctttcccaacttt

SEQ ID NO: 333216 - DNA, 289 bp, Zea mays
catccttctcaactatcttttatcctcatgatattaacaaatcatctacggtactatccaaaatatacatctgatataaattattatcttatattactacattttacctaaactattttacatctaatataattataagttcataatcttatatatattttctatatatgatcttcaactatagtaatctcatcttatttattaccaacataatctttattacttaaaaaaacatcatatttatatttaatctaactatcctatattttaattcatacatacataaact

SEQ ID NO: 333217 - DNA, 316 bp, Zea mays
  unsure (1)..(316): unsure at all n locations
caggaggagccgctccttctgagacgacatgataaccatggtgtactgctgtttccagcttttgtaccactttgcactgcttttcgtctctctccgattccgtcgaagcacaagggtggctgctggtttaggtcgcaaaggcagaaactcggcagtcgtagggaccattaccagcatagagcaagcacccagctgagggagtnctatggaggaaagatacccagaggagcgacgcgagcggaggccatcaagcggggacgccgagcaggctgattacacgcggctacagcacgtgccatgcatgctgcttcgcgac

SEQ ID NO: 333218 - DNA, 262 bp, Zea mays
cgaattcccgggtcgacgcacgcgtccgtattgatatactcttttcaatataggaaccatagtccgtataagcattatcctattgatggtgtcgaggatcatcttgtcgagaggaaaataatttctaacagggtgaggacaagaacctagggatgatcaataggataatgcttatacggactatggctcctgtattgatatgcgtttttcaatacggtcgcgtctgtcgatccgggcaatccggaccggaacctgcaggcgt

SEQ ID NO: 333219 - DNA, 329 bp, Zea mays
gccggatccggtcgccgacgcgtcgccacgcgtcgccacgcgtcgtgactttcactctatatacttacagctacggcgtaacaagtcgcaatccctctcagagagtcagaaatggcatacctcatagctgtttcgcggctggcagacacgagccagtcgcagtgcgctgggtccggctgatcctgagctcggcacgtcttcccggcggaggagcctgctggactgacaagccgcggcaggcgctctgcgtaccaaacggcccgtctgcaggcgatccgggtccatattggacggccgttcacccgcgcaaaggcgggtaccgacttctc

SEQ ID NO: 333220 - DNA, 230 bp, Zea mays
  unsure (1)..(230): unsure at all n locations
ggattcccgggtcgaccgacgcgtccgcccacgcgtccgcccacgcgtccgctgtagctgctctccccgctcttgaaatcaacaaggaatagaaatccatggaggctgggcggcatcanatagtggntgacggatatctaggatggatggatggatggatggaacacagcattgcacatgcagctaaagcttctgctagatcgatcagagcacggccaccttttccacag

SEQ ID NO: 333221 - DNA, 292 bp, Zea mays
tagaaataaaaaaaatcgaggtgtatacaatttaggaggcatttaactggtatttgaaagttagattgtgctgcaatttaccattcttgtaatttagtattaaaaggctattcctgttttctcctgaaattcggaatgccgcaccatgtttctatccaagtaactcctttatgcatgtcttcatttgggtttggcagactcaagtgttacttgatgaactttgtgacttaaagagaaaggaacaaatgctgcaagatgcaaacagggttctgaaaaagaagcttggctagtt

SEQ ID NO: 333222 - DNA, 199 bp, Zea mays
gcggacctgggaaaaaaaaaaaattaaattaaaaaaaaaaaaaaaaaaaaaaaggggggtactgctattcggaacagtataactcaagcatcatgatgattgttgatggcttcaagtgtgaccaatgtttgcttcgactctcacttgaagccatcaacaacaacatggatgcactaaaataatcttcttgtataactca

SEQ ID NO: 333223 - DNA, 97 bp, Zea mays
aaaaaaaaaaaaaaaaggaagttttaataaaatattagaaaaaaaaaaaaaaaaaaaaaaaaaaaaaaatatcaaaactttttaaaaaattaatact

SEQ ID NO: 333224 - DNA, 394 bp, Zea mays
gaatacccgggccgaccgacgcgtccgcccacgcgttcggttggcttctcctccctttccggttcgggttcgggttcgtgaggttcgccggggttcggtttcgtgggtgagcggatcgagatggcggcgtccgatgttgagtaccgctgcttcgtcggcggcctcgcctgggccacggacgaccactccctccacaacgccttcagcacctacggcgaggtcctcgagtccaagatcatcctcgatcgggagacgcagaggtcccgcggcttcggcttcgtcaccttctccacggaggaggcgatgcggaacgccatcgagggcatgaacggcaaggagctggacggccgcaacatcaccgtcaacgaggcccagtcccgcggcggccgtggag

SEQ ID NO: 333225 - DNA, 240 bp, Zea mays
ttccgcaagaggatggggaatggcctaagttaacatttcctagttctagcttaaatccttgtagggggctgttaaaaggagactggtggtctctgccatcaaaaccctgtgcagaatagtggtacgtgcttctttacttccctattagattcagtttatttctatgtaatgcttgtttttcatgtaacatcctttagattttgttgttcagtgatatctgtctcgcataatttgtcttac

SEQ ID NO: 333226 - DNA, 195 bp, Zea mays
  unsure (1)..(195): unsure at all n locations
aaagttcaagtaggggtataccccctggtgggttttcttcaagaaaagaagagagaaaagaaaaaacacnaaaaaaaacaaaaataaataaaaaaaaaaataaataaaataaataaaaataaacaaaaataaaaataaaataaataaaaaacaaataaaataaaaaataataaaaataataaaaaacaaaataaa

SEQ ID NO: 333227 - DNA, 331 bp, Zea mays
  unsure (1)..(331): unsure at all n locations
accggntcggaattcccggggcgacgcacgcgtccgcgtagtcaaaatgaaccgtttgttgttttggttcagatacgatgatgtttcgtttgtaggttcgacgttggttgctgaactcgtaacattttattgtcggtattatgtaaaaaaaaaaaaaaaaaaaaaaaaaaaaaaaaaaaaaaaaaaaaaaaaaaaaaaaaaaaaaaaactaaaaaaaaaaaaaaaaaaacaacaaactaaatcaacaaaaaaaaaatataattaaaaacaaataaattaaataggggggaggctttttaagataccaaatttaaaaaaaacgcgtacgcaa

SEQ ID NO: 333228 - DNA, 326 bp, Zea mays
  unsure (1)..(326): unsure at all n locations
ccggaccggaattcccggggcgacgcacgcgtccgcngacccctaggcngacacttgggtttttattcattagtttgtcccttgatatccgatggttttaagaaaatggtgtgttaatctgcttttccacaggcttaatgctatctggacgaggtccttttatgaatcttgatttggatgctcagctctttcatacgtctactcctaatcaaaatcccatcacatttcatgttattggtagacctcttgaaaactctggtgtttaatcagtatgtcactgcggataacgctgtcaaaagtaaaaaatacacaatgtttaaagaaat

SEQ ID NO: 333229 - DNA, 214 bp, Zea mays
caacaccaccaactccctgccgggactcctgctcgccctctgatcactctgagggataaattaaataccatctctatctatatactacgtatcatccttgtcgtccgcagtcattcagtgcaaccgtgtgtatgtatgtatctacgtacgtattgtatttctatcccatccatggccgtatgtcacttattatatatatacaacatatctcatc

SEQ ID NO: 333230 - DNA, 425 bp, Zea mays
gtaagcatagattctagagaatatatataggaaaaacgtatgcaaaaaatattcgagttgctgcatgctttactttttgtggacctggaaggcatgtctttgtataaagttgaagtaccttgaagtgctgctaactggaaggcttcagagaccttattttcttcacagcatccaagacaatgttcatttcatttcaaccccaccattactcctttcctatcataaagaaccatgtgttcccatgaatagatgtgacacaactcacaaaatatcagtaaagccatactacagaacgagaactgttaggatagtgattacatgcttgagaaatgcaatgtcaacataaagagcttgacacgagatcgattgtcgaggcaccatctattgggactgctatacccaaaaggtggatcaatgccaacata

SEQ ID NO: 333231 - DNA, 308 bp, Zea mays
ccggaattcccgggtcgaccgacgcgtccgcccacgcgtccgcacgcctagtttctctgtcgattcctattcgtcgtctcttcagggctggtgcgcactgctgcgccgttctgttaaccgaaacaagaactctgtgtattcctgtaccgagctgtgcatgttttttttttctttccatcgtggagaatttaagttattatccgtttgctgcaaggtttgccgtctcattttatgcgttgggatgttggcaagaaagggcagatgtcatgtgagaatttaagttaagtgaaatcgattcagggttttct

SEQ ID NO: 333232 - DNA, 263 bp, Zea mays
aaaaaataaaaaaactattaaaaaacaaattatcctttcaaactttaaaaaaaaaaaaacgggagcggttttaaaataaataccccacctactacataaaagcacacaacctctataatcaaaatttttctaactataaaaatcaagctcatacccactcacttatagcctacataaaatgctaactaaccagctcttctcactccttttactcttgatcacactattttatcaatgaacaattactttataccccatcctta

SEQ ID NO: 333233 - DNA, 315 bp, Zea mays
gacccaggcgtacgtttttcaactacttaaccatgaggcccatgattctttgttcatctcggatcaaactacctgatttgtttccaacaatggtgtctgggcccaacaatatttacctttttaaatcactaccaatccacctcactaggccttttctgtaacatcatacacgacccttacgatttcaaaacatatcaccatttatcaacaaaaacaacttattatattttgtgggccatctctctaaaggatccaatcttacgtaccctttcattcaactttatatcttttctattgtttcacctaaattcaatt

SEQ ID NO: 333234 - DNA, 177 bp, Zea mays
  unsure (1)..(177): unsure at all n locations
caccactccacagcactatcaagagtgtatagaacanagcatacagcaccgcccaccgtttgtttattttatgatgagtgaggtacaaacctacctattactatatatgcttccaaaagacacgtcttatcttcactgatatactaagtattattttataaattatattgacttcct

SEQ ID NO: 333235 - DNA, 121 bp, Zea mays
  unsure (1)..(121): unsure at all n locations
tccaagacctaccttcatttttcccacaccatccncaataacggctacggtcgcttctaaaaacgtccctgcacngtacaataattctccacttccaagactgctaatcatggccattcca

SEQ ID NO: 333236 - DNA, 252 bp, Zea mays
agacaaaatgactgcaggttccgttttgaataaaaggattcgttcatgaaaaacggaacgctgcagtcattttgtctgaggcgcttaaggaggcccgtgcattcaggaccgaagccttctgatgtacccatctagccctagagatcagactatttatacacgcaatgttcaagttcttttcttttaaaaaattgtccaaaatatgtgactgtacaataagctaaaatcgcactatgtggactatatattagt

SEQ ID NO: 333237 - DNA, 181 bp, Zea mays
aaaaaaaaaaaaaaaaaaaaaaaaaaaaattaaaaaaaattaaaaaaaaaaaaaaaaacgagcagaaatagacataaaatacatacatacacatgcatactacagaaatatataatatatagagctacctaaattaattcaactggccgacttttaaaaacaatggcgactgccaaatcaa

SEQ ID NO: 333238 - DNA, 325 bp, Zea mays
aaaaaaaaaaaaaaaaaaaaaaaaaaaaataaaaaaaaaaaaaaaaaaaaaaaaaaaaaagaaaaaaaaaaaaaaaaaaaaaaaaaaaaaaaaaaaaaaaaaaaaaaaaaaaaaaaaaaaaaaaaaaaaataaaaaaaaaaaaaaggggccccttttgcaatttatttttaaattgtaagcggccgttttaaagattcaaatttttggaacgcttttttgaaacgtaataatttttatattggggcccttaattaaaataaatgggccgtgttttaaaaacgtttttaactggaaaaaccttggcgtaaccaactttaatggttt

SEQ ID NO: 333239 - DNA, 386 bp, Zea mays
ggatgaactgaaccaagtcttcctgtacaggttggtgctgctacatgcagttatttttgtcacaggttttcccctcatctcccgagctaagaccgctcatccctggacacaacgcaacacagtgtcgagggggatcgtgaggcgagagccggccggagactcagtcctcgaccggtcgtggtggtgttcgcatcggcagatcagaaggaaaaccaaaagaatataagaccgagagctcttggagccgtcgtcgatctagtcggaggccttctcgacgatgctctcgagccgcggccttcacacgccgacgcgggcgccgctgcgccggcttcagtggccgccgtctgacgcggccttttcggagagcagctccctcaagtagttgt

SEQ ID NO: 333240 - DNA, 51 bp, Zea mays
gtgacattgatagttgaatttaaattaggcggaaaaggcagccggctgaag

SEQ ID NO: 333241 - DNA, 202 bp, Zea mays
  unsure (1)..(202): unsure at all n locations
acgcgtgtgggacgacggacgccaaggcgcaagctgacggtcaagctgctcangtcgcggaggaccacgatctgtacactcgcgatggccttgatcgccgaccgtagagtgaggaaccggatcacttccaccgaggtcacctatgacctagttgatctcatcttgtgcatgacgaagggcaagcccatcgacgtgacccacg

SEQ ID NO: 333242 - DNA, 67 bp, Zea mays
ctgagactgtggaacttcagattggtcttatagaattatgatccacagaaggacaagcggggcattt

SEQ ID NO: 333243 - DNA, 315 bp, Zea mays
catgtttgtgttaaatgccttttctatccaaatagaacacacaatggacacatgtaagcagatatgtactccaatctttagattttcgttgttaaaacactctatttgtttaatgatgttattgtcaattaaactaggatcagtggtcttctctataaaggtatatgttgataaaaaaaataaaacaaaagataaaacaaaaaattaaaaaaggaaggccggtctaaatagtccatcctagcttaccttcgcgtgcatgttaaggcctagctcttctgtagagttaagttaatttaattgactggccttttatat

SEQ ID NO: 333244 - DNA, 314 bp, Zea mays
gccacgcgtacgggtgtcgcctgcgacagtgattgcccagctgctctgcatgatcagcgtcacagcgttcatggacagcgtcgttggagtctacaatggctcgtccttcgacccagtcgagatcatgcttgtgatcattgaccgctagcttgcaatgtcatctatactgtactagtcgatcttgcacgatacgcccagatttggagccacatagtagtcgcatgtgatgcttgtgtaatgatatgataccgagatctgtatctatatatgggggtccacaggcattgcgacatgaggatagctgctagacacga

SEQ ID NO: 333245 - DNA, 485 bp, Zea mays
cccacgcgtccgaaaaaaaaaaaaaaaattaaaaaaaattaaaaaaaaaaaaaaaaaaaggaaaaaattgaaaaaattaaaagaaaattaatactacatatttatataaattatactttaaaatctctttaattataatttatagttattattaaatatattattttaataaaattcatattgttataaaattaaaatattttttggaggttatacttctgtcgttaattatcttattctcttattgttctatttctattttgctatttgactttttattctttcttttttgtaaattttttatcttctttttaatttgtattacttatctggctaatttaattgttacttttattgattcttttacatttttttattttttttttttaattttatatttttactttttttattttcctattttactatattttattttttatattttttattatttttctatatctttttatatattctttttt

SEQ ID NO: 333246 - DNA, 274 bp, Zea mays
aattcctgggtcgacgcacgcgtgcggaggcgtgtaatcactcgtaagtaaccgcttccgaggttctgaccattgctgtcaaccggggggactcgtcaacagcgaagggagtttagggacctcgtatgtctaatggttgaccctttgagaccaggagacttcaaccaagcgctaattgagttaggagcaacatatatgtatcaagacaaaacctggttgttctcaatgcccactctctagccactgtcaagcgctttcgctttcccgtgtaaaa

SEQ ID NO: 333247 - DNA, 192 bp, Zea mays
aaaaaaaaaaaaaaaaaaaaaaaaaaaaataaaaaaaaaaaaaaaaaaaaaaaaaaaaagagaaaaaaaaaaaaaaaaaaaaaaaaaaaaaaaaaaaaaaaaaaaaaaaaaaaaaaaaaaaataaaataaaaaaaaaaaaaacaaataaaaagaagtaaaaaaaggataatggaagacaacatcaaataaaa

SEQ ID NO: 333248 - DNA, 117 bp, Zea mays
cggacgcgtgggcggacgcgtgggctcgtaacataattgcccggtccctgttctagttgtggcgcagtctggtttgttttgacatttgttttcaaggttcatccttatttgcattgc

SEQ ID NO: 333249 - DNA, 255 bp, Zea mays
acccacgcgtccgctcggacacggtcacaacatagcttgatttcgtgcttgcccttactgaaggggactctggccagctctgactgccgactgtcgtctacaagaatggcatggtctagtccatccacgatgcttgtgttctgatcaagcctggtcgtatcaaggtggcaaggcatactggtggacatatcctatcgcatggtcacggtcgatatagattaccacatcgaattttgcctcaacagcgatttctgt

SEQ ID NO: 333250 - DNA, 255 bp, Zea mays
cccacgcgtccgcccacgcgtccgcccactcgtccgcggacgcgtgggattttttcttagatgttctctcaagttaaggcttaagaaccagaagtgtgaggattgtttcgtattagatattctgccttgccttgtactacttccttctccgagtattgtaatgactatacaatctgttggcttgtattgtaccgctgctattgacccagccagtattttactgcacgagaaagtggtgtgcacgaactattctta

SEQ ID NO: 333251 - DNA, 365 bp, Zea mays
cggacgcgtgggcggacgcgtgggcgggtgggcagaagaaatcattggaagcagcaggcgctatgcagccttcaagcaaaaagcagaagacatctggaggctcccaggaacaaagtatcgatgaactaaatgatgtcacagccgctagtggtgttaatattagggaagaggaagaacagttactgtctgcccctaatgaagagagccttgcctcacaagaagcacgaagaattgcaaaggaagaagaataaaatcttttcctacgtaagggtccacttttgaggaaactagcataaatcgctctgaaatgtgatctgaaaaatattattgacgatttggaaacttgaattttaatgagtgtttag

SEQ ID NO: 333252 - DNA, 446 bp, Zea mays
gagccacaagcgtatggattagacgcagcatccaaactgtgacagtctgtgtgcatagagcatttaaagctgaagcctggacagtttcaatgctatggggggcggatttcctttgctgtcccttaacccaatgcgcaaaattggccgcagggcgttgctcggagtggcgaacgaatcgacaacgagctcgccatcactgtgaaccgaactctgactctctacgtagtcgcctgcctgagcacctaccacaaccagggacgagacagagcgcgtgttccgcaagttcgacgcgaacggcgactggcagatctcgcggtccgagctggctgtgcttgtcgagggcgtgggccacgccgtgaccgacgactaggtgtctcgcatgatggacgaggattgagctttaaaattttttaacccaatgattctaattttttaatttttttttt

SEQ ID NO: 333253 - DNA, 280 bp, Zea mays
gttgtaatgtaagggagatgtttaaattcttgggggatagttgtatgatggtgccagcgatgatgcagtgttttctgaaaaaaaaaaaaaaaaaaataaaaaaaaaaaaaaaaaaaaaaaaaaaaataataaaaaaaaaaaaaacaagaaaaaaaaaaaaaggactaccgttctaaaggatccaagcttacatacgcatgcatgcaacaactaagcttttctataatgtcacctaaattgaattaattggctcgcatttaacaacttaggaactgtaaaa

SEQ ID NO: 333254 - DNA, 338 bp, Zea mays
taccggttcgtaaatccaggctcgacccacgcgtacgcccacgcatccatccacattttcctactattgaagctgcggttgcagtggagcgtccgggggtcaaggaagcggtggatgtggctattgatctgaatccacctaaaattatataacttgcaacgacaatggacattactcaactcttacacacagctatgaacatgttatacaaatatgacaccacacatgaatatgtctagctaagaggcatagctgtctgatgcatatcatgtgtaacacctcaaggcttgtcatgtagttcatgaaactggcatgatggtatacattactctcttcaa

SEQ ID NO: 333255 - DNA, 206 bp, Zea mays
gaattccactatcgaccgacgggtcccctcacttcatataccactccctatgaggactcaatttcacacacagccgacctttgtttaggctggattaacaggaaggcaggagactcatactgcatgtcatgccatcacctcaacttcatccgtcgatacatatgccagctctctaccgatccacgttgaattccttatctttgcat

SEQ ID NO: 333256 - DNA, 334 bp, Zea mays
ggtcgacgcacgcgtccggagcattattgattatgtacatctattaggtacattatttccttgtcaattgaatacatgacttgcgatgtgttaggatactggtagtaaataatagcgtgtatatgttactactcttttactctttttgtcattattatattatcttttgttcatcctgtttgatatcagttaaagggtattctttttttactatatgctttttttattataatttttatctttatttttattttattttattatttcttttttttttttcttttattttttctataattttctttatataattttttatttatttttatatttt

SEQ ID NO: 333257 - DNA, 178 bp, Zea mays
cccacgcgtccggcgggtgctgtgcgtggagagtgttccacgcggctgacgtttctagtagtgtagtggacctgtgaccatggtggattctttcatctgttcaatgaaaaaaaaaacaaatattttcacgcaaaaaaaaaaaaaaaaaaaaaaaaaaaaaaaaaaaaaaaaaaaaata

SEQ ID NO: 333258 - DNA, 304 bp, Zea mays
aaaaaaaaaaaaaaataaatataaaaagttttattttaaaaaaaaaaaaaaaataaaaaatgaatggattatttaaagggcggccggctttataaatatccaaagcttaacttacacaatcatccgccttcttatctattccatcctacctccctaaatcattcacactaactcccttttttacaactttctccactctaaaatccattgccttacccattttaatcaccttccatcaaaaccccttttctccaccatccctaattacctaacagcccttcccccattgcccttcctaatattt

SEQ ID NO: 333259 - DNA, 296 bp, Zea mays
ggataggctgaacgccgagaagaagaaagaagcgaagaggctggcgcttgccagggtggacgagaacgtttgccgatcgatcccacgcaaaggggcagggcagcagcggaacctgaatctgcaacaacactaacccagggaagaagctggctctgaagtgtgtgcgtgtgcgtccatctagcacctgtggtgaaaccatggtttctcctttacccgtcggctaggcatctaacttatgtgtgatttgcgtgttcgcttggaaatgaggcctactaaaccgattcggctgtgtttta

SEQ ID NO: 333260 - DNA, 420 bp, Zea mays
cggacgcgtgggcgcgcatcggcgagggctgatgcagcgccgaggagtgcgagcggatggtcgccggcgtcgacgccgacggctgcgtcgggttcgaggacttcaagaagatgatgtgcccccagccgcaagccgaagccggcgccgccgggcgggacaaggcagaggccgaggccgaggacaaggaggagtgacgggtgtagtcaggggggaacgggaacggctggagttgtttgcgtctcgcgttcttttcacctgtacgcaggaaatactcctcctgcataagactactgtacttttggataaaaaattttatttctacatgactatcacgtagatgtaaaaaaaaaaagttgcaattcgcgacttttgccccagcctcaaattcctaaaatagcactgtttattttggtacctatg

SEQ ID NO: 333261 - DNA, 475 bp, Zea mays
  unsure (1)..(475): unsure at all n locations
aattccggggtggacgcaggcgtccggtttacgtgaaaatattggtgctttggtgcatgcacttttactggctaagccagtgggcgtgaagaaaacttcgaggatgtcggatatgtgaagaagttcacactgagtagcacaatgggacccggacttnctgttaccataccatcactatctgtggccgccgatcactataacaaggttcaagtcagctaagtcaatacagtagaacatcgaatgtagctttctttctccaatagccgcggcctgcagatggcggcttgtttggcagtggagcttaaccattcagcaaggttgagatttgggtggcttgctgttttgttattggggataataccttttgtggacaaggatcattcaacaaacatcataacctataactttattttatccttgtcactgcaattttgagattgcgtngcttgtctacctatgttatccagagtcttgt

SEQ ID NO: 333262 - DNA, 441 bp, Zea mays
  unsure (1)..(441): unsure at all n locations
cggaattcccgggccgaccaacgcgtccgcggacccgtggccggacccgtgggggcctctgtccggggggagatggagcctctgaccgaaggaaggcaacgccggaactggagcaagccgtcgcacgccgagaggaccaatatgccgttgccggacatccggcgcagtgtctccctgccgcgcgggaagaaccctcttgtgtgaatctagctcgtttcgccaaccaggcattctttcattggttgtttgtttctttatcctgtggttcgatccgaatgtaggctctacggctgtgtagaacacgtcatccggatgcataacacaaagtctgtcgagttgcttccaccaggctcccatgaaaacgcaaagttcacgctcttatgcgcgatgtaaaaaaaaaaaatnaaaataaaataaattataataaaaaaaaaagggcgg

SEQ ID NO: 333263 - DNA, 380 bp, Zea mays
taccggtctcggattcccgggtcgacgcacgcgtccgcactgttagtgtctcgcgtgcacctttatctcttcatcggtagatgttgtcgaaatagtgtaaatgttactggtgctctgttgtgcttctctaaattcaataatatttgaattggggggggggggggcacgcttgagtacgccaagcttatagtcttgtctgcttgacttgaacgagtgctactgatgctagcatatcaggctgatctgacgcatacaaaagctatccgactatgaatcccaaattgctcatcgcatctcgccaacttatgaaattttacaccacagctatgtgcaaggattttgacatgtagtgctgatgtatgatcctccgtcatttgcag

SEQ ID NO: 333264 - DNA, 306 bp, Zea mays
ccggtccggaattcctcggtcgacgcacgcgtccgcggactcgtgggctcgagcggtttttttttttttttttttttttttttttttttttgttgtttttttttttatggtggttgttttttttttttttttgaaaaaaaaaaaaatgctttttattttaaataaaatttagttttttaccaaaaaaccatttttattaagcataaaatttattttatttaaaagctatactctatttattccatatttacaagccaaacctctatgtttctaacttttgcatttaggaaaacatattaaaaattt

SEQ ID NO: 333265 - DNA, 401 bp, Zea mays
aaaaaaaaaaaaaaaaaaaaaaaaaataattaaaaaaaaaaaaaaaaaaaaaaaaaagaagggaaaaaaaaaaaaaaaagaaaaaaaaaaaaaaaaaaaaaaaaaaaaaaaaaaaaaaaaaaaaaaaaaaaaaaaaaaaaaaaataaaaaaaaaaaaaaaaaaaaaaaaaaatatggcccctctttttaagggtccaattttttttttcccttattttatattttaacttttttttattgtttccctaaaataaattttattgcccattttttaaaacctttttattgtaaaaacccttttttttcccaattataatgttttttgtcaaatatccttttttcctaaatttgttatatttttaaaaattctccctcacctttttccccttttataaaaattt

SEQ ID NO: 333266 - DNA, 415 bp, Zea mays
aaaaaaaaaaaaaaaaataaaaaaaaaaattttataaaaaaaaaaaaaaaaaaaaaaaaaagaaaaaataaaaaaagaaaaaagaaaaaaaaaaaaaaaaaaaaaaaaaaaaaaaaaaaaaaaaaaaaaaaaaaaaaaaaaaaaaaaaaaaaaaaaaaaaaggggccccctttttaaagatcccaattttatttccccttttttccaacttaaaacttttttattagggcccctaaaattaatttaattgccctctttttaaaaatcttttacttggaaaaaccttgggtttcccaatttaaatcccttttaaaaaaatctccttttctccagtttcttaaataccaaaaagccccttaccatacgctttttaaaaaattttcccaccttaattgtcaaattgaacccccctttt

SEQ ID NO: 333267 - DNA, 92 bp, Zea mays
cccacgcgtccgaaaaaaaaaaaaaaaaaaaaaaaaaaaaaaaaaaaaaaaaaaaaaaaaacaaaaaaaaaggggcgaacgcaatcgggggt

SEQ ID NO: 333268 - DNA, 111 bp, Zea mays
ctcggaattcccgggtcgaccgacgcgtccgcccacgcgtccgaaaaaaaaaaaaaaaaaataataaaaaaaaaaaaaaaaaaaaaaaaaaaggggaaaaaaaaaagagag

SEQ ID NO: 333269 - DNA, 331 bp, Zea mays
accggtatctgaattcccgggccgacccacgcgtacgctattatgtcaccaaattaacgttgggtattgcggtgtggttagaggaatccatagcggttcgtctgccttgaatctgctgtcagttatagattcagattcagaaagctgaaagttagtttggtagtcttgaggggatgaattatgtcaagctagtttactggtgttaatgttgtaatttacactagcatgtttgtaattgacataactttatctaacttgaatatgcccttgggtaccttggatttgtgactatattattattggtctttgaatccttcattaatgtaccggt

SEQ ID NO: 333270 - DNA, 280 bp, Zea mays
ttcgacttatctaacttgcctgtgggggtgtccatgcaagagggggtggacataaacctgacgctggaacaaatgacctctctattacaactttgtgctgttacttgtacatggctacgtctatctcgtcttatgctatcaaagacatcctgcttaaatttgcagactaaccgtatgctgcacatctagcaaacatgctcaagtatgcacgtcttaccacatttactcagttactctccaataaataatgctattcatgatgccgattacctgcttatct

SEQ ID NO: 333271 - DNA, 210 bp, Zea mays
taccggtctgaattccctgtcgactccactcgtacgcccacgctttcttccacacattctaccacttttccgatacaaatgtaatcttgtaaaaatgagaaaaaatttaaaaaataaaaaaaataaaaaaaatataatattaataaaataaaattataaaaaattataataattatatttaattaattttaataataatattatttttat

SEQ ID NO: 333272 - DNA, 454 bp, Zea mays
ccagctcccgcacgcgccgcaaccccacgttcccacccagcgccattctttggaccttgctggtgcacgcgtgtccgatcgccaaccatggcggccggcgccggcaagtcgaaggaggcggaccccgcgcggtgcaggaggcacccgaagcaccggcacgcggccggggtgtgccctttctgcctacgagaccgcctgtcgcgcctctcggccgccgccgcgtccgcgtccgcgtcgtcctcgtcatcgtccccgtgctcgtcgtgggaggacgccgtagcgcggtcgtcggcccaggcgccgcggccccgccgcggaagcctcgcgctgctgctgcggcaggaagggagggaggcggcgtctgcggcggcggcgctgcccgcgggcagccgagcggagcaggaggagaggaaagccaaaaggggcagcttctgggcgaggcttcaacagcagc

SEQ ID NO: 333273 - DNA, 388 bp, Zea mays
attccctggtcgacccacgcgtacgaaaaaaaaaaaaaaaaaaaaaaaaaaaaaatttaaaaaattaaaaaaaaaaaaaaaaaaaaagggaaaatggaaaaaaaaaaaagaaaaaaaaaaaaaaaaaaaaaaaaaaaaaaaaaaaaaaaaaaaaaaaaaaaaaaaaaaaaaaaagggctccccttttaaaggacccaatttaacctccccttttttcaaaataaaaaccttttttttaattccccctaaattaatttaaaggcccttcttttaaaaaccctttatttgaaaaaacctttagtttcccaaactaaaaccctttttaaaaattcccctttttccaaattgtcctaataccaaaaaccccccaaacatattcctttccaaa

SEQ ID NO: 333274 - DNA, 398 bp, Zea mays
aattccgggtcgacccacgcgtacggttggcttctcctccccctccggttcgggttcgggttcgtgaggttctccggggttcggtggggtgggtgagcggatcgagatggcggcgtcggatgttgagtaccgctgcttcgtcggcggcctcgcctgggccacggacgaccactcccttcacaacgccttcagcacctacggcgaggtcctcgagtccaagatcatcctcgatcgggagacgcagaggtcccgcggcttcggcttcgtcaccttctccacggaggaggcgatgcggaacgccatcgaaggcatgaacggcaaggagctggacggccgcaacatcaccgtcaacgaggcccaatcccgcggcggccgtggaagcggcggcggcagcgggt

SEQ ID NO: 333275 - DNA, 261 bp, Zea mays
cggacgcgtggggcgcgggtttaacggatggtaggtttcagggcagcctgtctgcagctggaccgacgctcattgcaaagggacgtgttcttaagcacacgagtttatatctctcttaggccttgaacaaccaaagatcggcatggtctacgtttctcttgtcggtggttacttcacctcattaaaactcattaaaatgattgacacgcgacagattattgggttggcaactcctttgtgggaactgcatgcataactaag

SEQ ID NO: 333276 - DNA, 393 bp, Zea mays
acacggtgtactacatggctccgctggccacgctgatcctgtcggtgccggccgtggcgcgggatggcggcgccgtgctggggtggctgctgacgcacgagtccgtgggaccggcgctggcggtcgtcgtcaccttcggggtgctggccttatgcctcaacttgtccatcttctacgtcatccactccacgacggcagtcaccttcaacgtggccggcaaccttaaggtggccgtggcggtgctggcgtcctggatggtgttccggaaccccatctgcgtcatgaacgcactcggctgcagcgtcacgctcgtcggatgcaccttctacggctacgtcaggcaccgactctcgcagaaccaggcgcccagagcccgcttggagatgcagatgc

SEQ ID NO: 333277 - DNA, 422 bp, Zea mays
  unsure (1)..(422): unsure at all n locations
gaattcccgtggtcgactccacgtcgtaccgcatccaaccgtcaagggggggtctatcctcccatcgtctttcgcccaagtccgttgcccgtgagcctctgccgcgggatgggcagaggccgtgccgcgcttcgccggatggaaagaatgctcgtcattcggcgccatcccgagcctgctctgaagtgtgagctatttggagggccgatatgccacaaagtagaatcaaatttgatcatnnttaggctctnnntcggtgatangnntctagacccaaacatgnntattgagaaatgcccagctgtaaatgcccgtttgcatttaatcagtgtccaattctcacaaattactgcgttcnnctcctaattacatattgtctcntgtcagtggtattaaccttggtgacttaccannnattatgc

SEQ ID NO: 333278 - DNA, 400 bp, Zea mays
ctattgaggcccgtcgctatgatgctggtgtataaggatctattatcagtcgacaagctagtgacaaagtgattgacctactacgagctcacgaacgtcgtcttgctctaggtctagagactgtcggtcaaccgatgacctgtcgaagtcgacattgcagcaaattcatcaccaaaaggtagcaaggactatagagctactgacacaactatcatggtgtgtgaaatcatggacacattgctgatacgacagcaacctgctacagccacgagatcatgaaggtctaacattaacggcatacatacacgaatctcactgctgtgtcgaaatcacagaatgctgatgaattcacaccggctgtatactgaacatccatgcctatgactagcacgctgaacga

SEQ ID NO: 333279 - DNA, 279 bp, Zea mays
cttgatatttggagtttcgctgccagtcattatagaagattgtaattttctatgacttatgttaaaaatgagtagttacatgtgtttttttagataatagataaaaaaacaggctttcacgtattttatggtcggaccttatggagtgtttgaaaaaaaaaaaaaaaaaaaaaaaaaaaaaaaaaaaaaaaaaaaaaaaaaaaaaacaaaaaaaaaaaaaaataaaaaataataacaaataatataaagaaaaataaattcaattcactgtcacgtaga

SEQ ID NO: 333280 - DNA, 448 bp, Zea mays
ggaattcccgggtcgacccacgcgtacgcccacgcgtccgaaaaaaaaaaacataaaattaaaaaataataaaaaaaacaaatataaaagggaaaaacgggcaatttaggaggagacaaaaaaaaaaacgcatgcatcttacaagatacctcttttataaactcatctataataatttaatacccctgaatattccaactctacttactttaaaaaccctggcttttccaaactttatacctttaaaacccatgcctctttcgactgattccgcattaacaaaaaggccctttcctaatgtcatatccaaccatagtgcaccctatatggcgaattttacaaccctttttcaagctcattaaccattgtgctcctccctattactcccaatttaacccgtacaatttactggttcctaacacccagtcctttccattttttaccttcc

SEQ ID NO: 333281 - DNA, 105 bp, Zea mays
taaaaaaaaaaaaaaataaaaaaaaaacaaattaaaataaaaaaaaaaaaaaaaaaaaaaaaggaaaggtaaaattaaaaaaaaaaaataataattacaaattaa

SEQ ID NO: 333282 - DNA, 282 bp, Zea mays
cccacgcgtacgctcgaatgccatagcccatagttagccatggcttggaataacgtaggggctgaccgatatgccagtaggcaccttatctagtacttacagatctacaaaaagtttgtactatacatatatggacaaccttataagtggctatgagtgtacctatcctaacgcttatcccaaatggtgtatcagcgtcatattgtgagattgtgttcaagcaaacataattcaaatatcaaagtattcttgaatgtgccttacccaaaactgacaccatca

SEQ ID NO: 333283 - DNA, 321 bp, Zea mays
aaggcacgtacaattgcaaggaccagtgttggaacatacgatgccccatctttaacaagcggagaggtttgaataggcatgcgaacttattcaaaatataacgctgcatttaatccaacttcatttgctatactctgtaacagactctctcacgtcctacatgcgcgatccctatcgaacgcaaccacgggaaaagtttaacaacatttggcactgtaagtgccatataacatagtctccatttcaattgccgcttcagtgctgctgtcacaatattatttcggcatgacatcatttatgtcaggcgggctgatggccctt

SEQ ID NO: 333284 - DNA, 159 bp, Zea mays
cggacgcgtgcgcggactcgtgggcagacacgtgggtgaggctacaatcattcgactggaactggaatggccgaggttttgctggccacagctcaagtcacaaaaaaaaaaaaaaataaaaaaaaaaactaaaaaaaaaaaaaaaaaactactagcaaa

SEQ ID NO: 333285 - DNA, 230 bp, Zea mays
attcccagttcgacgcacgcgtacgctttcttttacatctttatggggcgctgttcttgttcactacgccaccaacctcatagtgtccaggtcgaaagctcggatggttttgttactcacacttgtactaattttcatgcatctatggatcgacaatactcatactgtcaaccaactgaacccacttccctatcgtgctcaactagctactttatacccatccttttctt

SEQ ID NO: 333286 - DNA, 70 bp, Zea mays
aaaaaaaaaaaaaaaaaaaaaaaaaaaattaaaaaaaaaaaaaaaaaaaaaaaagaaaaagtgaaaaaaa

SEQ ID NO: 333287 - DNA, 76 bp, Zea mays
tcggacgcatgtgccgacacctgctcagactcgtgaaccgacgcttcggaaaaggacaggaaaaaaaactatagat

SEQ ID NO: 333288 - DNA, 470 bp, Zea mays
tcccgggtggacgcacgcgtccgcggacgcgtgggggataatgaacgggaggtggtggggggagggggcaccgggacgtgtgtcgcttggacatgtgctagttgctacaaatttgtcgaactaattcacatcagcattttaaatcaatacatatcctctgtctctacctcatcttcagactcatcctcattcctctgaacgccgactgtctgaccctacaactctggaacatgctccaacaaagctctacgcctactactcgagctggaactagtgcccttaaacactaagtcctcctttctcataacataggcgctctcttcgcaagtcccttagtgaacttctagattttcagagagacacttagaattttgtggactaatatgactgttccaccaccatgagcgggattttcctgagtgcacctttctcttcatcttcaccaaaatataagaaaatcttctctgata

SEQ ID NO: 333289 - DNA, 351 bp, Zea mays
gaattcccgggtcgacccacgcgttcgaaaaaaaaaaaaaaaaaaaaaaaaaaaaataaaaattaaaaaaaaaaaaaaaaaaaaaaagaaaaggaaaaaaaaaaaaaaaaaaaaaaaaaaaaaaaaaaaaaaaaaaaaaataaaaaaataaaaaaggggcggcccttttaagggacccaagtttccaaacccttccttgcaaattattattttttttttggtgtcccctaaattaaattaattggccgtctttttacaacttattacctggaaaaaccctgtctttcccaattttaatatccttggagaaaattccctttttgcaagttggcttaattccaaaaaggccct

SEQ ID NO: 333290 - DNA, 186 bp, Zea mays
cccacgcgtccgaaaaaaaaaaaaaaaattaaaaaaaaaaaaaaaacataaaaaaaaaaggagcatataaaaaacaagaaaaaaaaaactaacaaacaaaagaaccaaaatctttataaaaacaaaaaaaaaacaaattaaattttcaacatcatactccttattctaatttaactaacaaaactt

SEQ ID NO: 333291 - DNA, 351 bp, Zea mays
caggtcattgcagcttaacgcctctgatggcttacgcaccttgaccgagcagatcaactgctactacctaacaaacggatccaactggtactgggtcacctactcttactaacgatggcctgccaagaacttaaactgtgcgtgactggttctattaatgcatagtgtaaattgtctggaccactaccaatatgttacccaagccttcacgttcgcttatacagcgtcaatctggatctccatgaccagtactagctagggagtgtgtgacatgtgcatgtgctctgtagactgttatggcctcttcctgttttcattgcatgcgctctttgtaccatgtaaagcctctga

SEQ ID NO: 333292 - DNA, 160 bp, Zea mays
gcgttctgcttctgtgtttctccacagtgtagcttatttgttgccatgggaataaaatgccttgtactaaattgattgatggaagttgcatcaaaaaaaaaaaaaaaaaaaaaaaaaaaaaaaaaaaaacaaaaacaaaaaaaaaaaaaaaactaataat

SEQ ID NO: 333293 - DNA, 169 bp, Zea mays
tttctttttcatttcattttcttttcccaaattcttcttttttcattttttatttttatcctttatatccctttttcttgacttttatctcttttttttttttccttttttttttttttccttttctcttttatattttttctattattttgtctctccttattttttt

SEQ ID NO: 333294 - DNA, 208 bp, Zea mays
accgaattgcaatttcgacctagacgtacgcgtgcgcttacgcgttcgcggacgcaaggtgcgatttgaaccttaacctaacaagatcaacggctagggacaaactaaaacggagcgcaacggaattctgggtcacctactcttagcaacagttagcttggcaagatctttttccgtgcgtttactgtttcttcttatgcatcgtcta

SEQ ID NO: 333295 - DNA, 238 bp, Zea mays
acccactcatccgcacaaccttccgcagactcttaagcttatttattcctcatttaaacacctctacagtgagatcttttatcccgaacattgacaactacctattccaacactccacactgattataacacataatctacatttcaaagaccatccacatttttctaccacatataactcccaaatctatttaccatttatcaatcaatttaatccatatatacttctattcctatc

SEQ ID NO: 333296 - DNA, 245 bp, Zea mays
cggacgcgtgagcggacgcgtgggcggacgcgtgggcagacgcgagggtgtggatgttggcctgcactttgaagagcaatctatatgaaccacgaggcatgctgataaaaaaaaaaaaacaaaaaaaaacaccaacagaagaaacagaaaacgaaatccaaaacaccgaaagaatggaacattcaaaacgaaagaggacaacagctccaagaagcatgaggtgaaagactacattgaaacaaggg

SEQ ID NO: 333297 - DNA, 403 bp, Zea mays
aaaaaaaaaaaaaaaaaaaaaaaaaaaaataaaaaaaaaaaaaaagccaaccaaagtaggtgttccatacttacttacccttccatacaaaaatgtcgcccattttttaggttcccctactttctattccctttgcccccctttttaacctttctttctggtaaacccctttcatttccctaaccttttttctttaccctctttttccttttaccctttggttcctcacgtaaaatccctttctaaaatacccttttttatcttgtctctttaattattaatgttccctcccttttttttttacaattatttcctccttctttttttttttcctcccccttttttgtttctcttttttctccctctataatttttttttttttatatatttccttcttttttt

SEQ ID NO: 333298 - DNA, 214 bp, Zea mays
tgcagcacctctagtacaaaataggttgccgggccagccatgccaaacaaccatggcagcatgctgtgaactagaggtgctgcatccttgtgttcctgtgccccatccaatgtgtatatctcatatttgtccgtgtcacatgaatgctctgttatttgtagctcaacagatacgtttttctccccctttctgatgtatgaagtttgatcttgcc

SEQ ID NO: 333299 - DNA, 136 bp, Zea mays
accacgcgtccgaaaaaaaaaaaaaaaaaaaaaataaaaaaaaaaaaaaaaaaaaaaaggaaaaggaaaaaaaaaaaaaaaaaaaataaaaataaaaaaaaaataaaaacaaaaaacataataaaaaaaaattaaa

SEQ ID NO: 333300 - DNA, 294 bp, Zea mays
attttgttgaggtgtaggctaattaatctttttttgttgaggcagtgatttatatgtagcggtcaccatttgattgttggatgctcacgatgtaatcgagcaattaaccgacattgttctggtacgaatgagagttataggagttgatcatttttttctctggttcagaattccacttgtatgattggatgagctccctgtttattatgaaaactaaaagagaatgatgtcattatgggatgaatcatgtgtatggcttggtaaaaaaaaaaaaaatataaattaatttaatat

SEQ ID NO: 333301 - DNA, 387 bp, Zea mays
gtccggaattcccgggtcgacgcacgcgtacgcccacgcgtccgggcagagctccctaagctgaaggaagaaaagccaggtctaacgctgcggcaatacaaagacatgatatggaaactgtggaagaagtcctcagacaaccctcttaaccaggctgctgactgaattttgcaaccctactgaatcttatgtgtaattaaaggccaaccttcaaacagcactggataggtgaattgtgttggtacctttttcttggagtggatgcgcactaaaccgtgcatcataaaggtgttccagtctcggctaataatttccaaatctctggagcgtatgctgaatgaagtgctcttgtttatgcaactgttggattgtttagtcactagactt

SEQ ID NO: 333302 - DNA, 232 bp, Zea mays
aaaaaaaaaaaaaaaaaaaaaaaaaaaaattaaaaaacaaaaaataacaaaaccggtaaggttatataaggtacctaggcgaactaacacataccaacatagctatcaattttgttctaaagacaactaaatggagcttcactatctagaagatccacaccttacttaactcgttcataccaatgtcataactcaactatattgtcacctaaattaaattcactttccctcc

SEQ ID NO: 333303 - DNA, 117 bp, Zea mays
gtgcttgtaatataacttgttttttcccccttcatttccagccccgatgtaacaggccattttggttttctaggtacttggtgactcatttctagcaatagggctgtcatgttgtac

SEQ ID NO: 333304 - DNA, 403 bp, Zea mays
  unsure (1)..(403): unsure at all n locations
cccacgcgtccgcccacgcgtccgggagaaggagaaaatagatgcagagggcgtgagtgtcaagacagcatgcagcgggtacgaggatttgtgcagcgacgcggaacgcaagttcaaagaagtcttggctcagctgcggcggaagagcgccaggtgatgcacaagctttgggtatcgtttcgctgcttctaactctgacacctgtttatgctgtagggctgtagttttatctatgtatcgcagtgggctcagatcgatgtgctgtggttacttttgtgcaagccgttcggtatcgtttatgtatctgtaggtatccatctatggcttangaagcctgatgaagtctcgactctttataattgctactcctatataaattgccagctagttggaccgtacttaa

SEQ ID NO: 333305 - DNA, 200 bp, Zea mays
ctgactcatacatccactcttaccaaagtctgagctaataaatgcaacttacgtgactatgaaggggcgattcatacaatacgatgatatgtacagctactcggaacgcaggcttaactaagccaccactaacatgccgctgaagaacgccatctgatacaaatgcaacatctctcacttcaatgctaataactatcaca

SEQ ID NO: 333306 - DNA, 209 bp, Zea mays
cccacgcgtccgcccacgcgtacgccgactcttgggctgacacgtgggagttcgcatagactaagtgtaatagacgggtgcgcttcgataaggcgtaaccatatgaacatatgtgcgataactgaaaccttacaggccactttgcatgagaatacgccttacatactgaaaaccccaactgctaaaagtgtgtgcacattgccaattat

SEQ ID NO: 333307 - DNA, 221 bp, Zea mays
catcataatgcaattatctacaactgtttatttattaaaaacaatttgcctagcacagaaggcttttttacttgggaaggaatgattttttcatagtatccaaaccaagatcaattaaagtggataaattgattaacatttatagatacttccatgttattcacatcatcttaaccgttattttacattttgatgatcatcttcataatttgtatgccttt

SEQ ID NO: 333308 - DNA, 228 bp, Zea mays
gattcccggctcgacccactcgtcctagtaaaaaaaaaaaaaaaaaaaaaaaaaataaaaaaaaaaaaaaaaaaaaaaaaaaaaagaaaaaatataaaaaataaaaaaaacataaataaaaaaaaaaaaaatataatataaaataaccataaatttaatttatttcaacctatttttatactaactttttctacttttaaaacccttttatttccttaacttaatttc

SEQ ID NO: 333309 - DNA, 179 bp, Zea mays
tataattactgtcctttattcctgatgtttgttttgtagttgaaactcacattgttttgtcatttccatctcgattttgtatgccgtgaccacgaaagattaaatgttttcttgcggtttctaaaaaaagaagagcccgctgacgaaaaagccccaacaaggacgaacgctatagacga

SEQ ID NO: 333310 - DNA, 432 bp, Zea mays
tatgcactcggtccagcaggtcttacgaatgctaatgagagtaaatccacagggcatggccatgatgatgatctgtgtctcatggatcccgacggcaaaaatatggaacctgagccacccttccgctcgctttatagccccgtcgccatggcgtcctggctgacatcctcgatgccaagcccatgcctgcgtcgaacgagagggagaccatagacacccactggccctggcggtagtagagccaaagatctattcactagaagtacgcgacgcgccatggatcgcgtgcagccgacgatacctccgctgccatctgtccacaaacagacgactctggcggctaattgtagcacttccagagcggagacgcgttcaatgctccggttagatggtactttcgacattgaaacttgctagcaacttttacggatg

SEQ ID NO: 333311 - DNA, 294 bp, Zea mays
aaaaaaaaagacttgatttaaaaaaaaaaaaaaaaaaaaaaaaggaaagttataaatagaaaggcagacaagatacaacaccatcaaaacatcccccctttcattcacccccatttcctctcataactttccaattcattcccctaaatacatttcacttaccctcaattaacatcaccctaaatttacaaaacccttacttaacaaaccttaatctactctaactaaatcccctttcctccaatccccatattacccattatctccttacctatcacccttacaaccattttc

SEQ ID NO: 333312 - DNA, 291 bp, Zea mays
attcccgggtcgaccgacgcgttcgcactggtcaacatccatgatcgtttcgtccataacacgtggactgagaaatcttgctctcgtgggatgtccaagatggggacactacattatagctgctatactattggaccatccaatacaacattgttacgccagaaaataccattcatgttataagactccaggtattctggatttaccccaaatttgtcagatcctcatttagaaatatcccgaacttttgaaccatcattgccttatattcataatggctctcatatcaac

SEQ ID NO: 333313 - DNA, 175 bp, Zea mays
cacgcgtccgtgcttctccaaaaaaagaattaaattaaaaaaaaaaaaaaaaaaaaaaaatgtaagtaaaaaaaagaaaaaaggaaaaaaaaaaaaaaataaaattaaaaaataaaaaattaaaacacaataataaaataaaaaaaacaaaaattcaaatcaaaaataaaattaa

SEQ ID NO: 333314 - DNA, 306 bp, Zea mays
aattccctgtcgacccactcgtccaaaaaaaaaaaaaaaaaaaaaaaaattgatttaaaaaaaaaaaaaaaaaaaaaaatgtaatgtaaaataaaaaaaggagagaaagaaaaataaaaaaaaaaaaaaaaaaaaaaaaaaaatccacccattttaaaaaatccaaactttccttccccctttcttccaaccccaatattttttttttcttccctcctaaatccatttcctttcccttctttttccaacttcttccctcgaaaaacctctttattccccaatttattcacctttcttaacttcccc

SEQ ID NO: 333315 - DNA, 68 bp, Zea mays
aaaaaaatcacaaaaaaaaaaagtttttattaaaaaaaaaaaaaacaaaaaaaactgtaagagttaaa

SEQ ID NO: 333316 - DNA, 457 bp, Zea mays
actcggtcttgaattcccgggtcgaccgcactcgtacgcggactcgttggaaaaaaaaaaaattaaatttaaaataaaaaaaaaaaaaaaaaaagtaaagtataattaaaaaaggtggaaagacaaaaaaaaaaaaaaaaaaataaaaaaaaaaaaaaaaaataataaaaaaaaaaaaaaaaaaaaaaaataaaaaaaaaaaaaaacgcctccttttttaaaaattcaaattttataaacccttacttccaatacattcattttttttttctgccccctaatttaaattaatttccccttttttaaaaactattaaattgaaaaaacctttctttaccccaatttaaaccttttaaaaaaaaaccctttttcccaattttactaaattccaaaaaacccctaaccaatcccctttccaaaaattttcccaccctaaatgaaaaattgaacccccttt

SEQ ID NO: 333317 - DNA, 375 bp, Zea mays
taccggtcttgaattcccggggcgaccgacgcgtccggggggaacagctggagagaggccttttcaatgccgccatcgacaggctctttggcgccaaggaacgtgaggagagcggggagaggatgaaggaattcaagatcgctgcggccaaaggcatcggcatcggcgtcgacgtcgacgaaactgcgtctccccgcacggatttaaccgatttggttgatctcataaaatccttctgagctcatgacgatcgatctgttgggtgatgcctactctgtccatcgtgctcgacttgtcttcctactactgtaccactgtctgtgctcacttccacgttcctgacggtgttgtgatctagcgtatcattgtgcgatc

SEQ ID NO: 333318 - DNA, 418 bp, Zea mays
ccggtcttgaattcccgggtcgacggacgcgtccgcggacgcgtgggtctcctcaccatttgggctcctgccgagagctcaccgagctcggaccgtcgaaaggcgcaagcccggtggacatgccgaataacacatgcaagctctgctcccggcgcttcaccagtccccgcgccctcgccggtcacatgcgctcccattccctcgtcaaagctcatgctgaggccgcggaggcagcgaatcggctgatctcttctgcatcctccacgtccaccttcttcatcgccgccgacgactaggacgtcatctcgaagattcccacttccacccacggactctaatagaatccgaatcgcagccttctgttactcgattccagtttatcatatcgcgaaagctagtctgaatacacctcatcgta

SEQ ID NO: 333319 - DNA, 189 bp, Zea mays
ggaattcccgggtcgaccgacgcgttcgcggacgcgtggggcagcacatccaaaagaaaaaaaaaaaaagaaaaaaaaaaaaaaaaaaagaaaagaaaaaaaaaagggggggcgctcttcaagatccaaccttacttacgcctgcattctacgacataactcttctataatggcacctaaattcaatta

SEQ ID NO: 333320 - DNA, 243 bp, Zea mays
attccctggtcgaccgactcatcctaaaaaaaaaaaaaaaaaaaaaaaataagatttaaaaaaaaaaaaaaaaacaaaaaagacatggttaacttagaaaaagctccaagccatacaacaaacccttcctaaaaaaacctatactataaaacaactccattatccaaaatttatcaacctctaaaaacaacataaaaaacttaaaaacccatacaaataacactttcttttactcatcccaac

SEQ ID NO: 333321 - DNA, 125 bp, Zea mays
accggtcctgaattcccgggtcgaccgacgcgtacgcccacgcgtccgcggacgcgtgggttctatcccatttggtgtaatattttcactgctattgtcaatggaaagccgtcggttgtatcccc

SEQ ID NO: 333322 - DNA, 339 bp, Zea mays
aattaattctcgacccacggatgcgttcgttacacctagtgtatattgttgctcaactttataagttcctcttgtatatcaagcgaggttaaaataaaatggccgaaaggtataacaacttgcatctgtacttttacttctactctataagtcgtgtccagaaacgactattacttaaatttgcaaacccccatttaaatgcatcatggctgcagcgtaatcagagcgtaactctaggtagcacttgatctgcaaacacacatttgattttctcatggactcaccataaatgagagattgatagtactttcattatataattcacacatcgcgtttcta

SEQ ID NO: 333323 - DNA, 170 bp, Zea mays
ccggtccggaattcccggggggaccgacgcgtccgcggacgcgtgggtgtagttccaaggcaggtgtaatccttagaaacatctcttggagagcttctagccttggagcactcgatatctgccattcaagaagagtcagagattcttcacctacccatgatattggtgct

SEQ ID NO: 333324 - DNA, 194 bp, Zea mays
acagttctataattcccgggtcgaccgcacgcgtccgaaaaaaaaaaaaaaaaaaaaaataatctttttttaaaaaaaacaataaaaaaaaacaagaggacctttttaaaaaaggtgcggcgcccccttttatatttttcacctttcaatgagatccttttcaccttttattaaccttttttttgcccttcttt

SEQ ID NO: 333325 - DNA, 164 bp, Zea mays
  unsure (1)..(164): unsure at all n locations
aaaacctttcacccatcttccccaccttcttctattttttaaatttttcccccgcannctacccccccttgttttttttaaaaaaaaaaccccctttccctcttattttctttactctctaattcttttcattcatcatcttctacctaataaacccctaaaat

SEQ ID NO: 333326 - DNA, 137 bp, Zea mays
ccgcccacccttccgaaattttgccttggcggccgccactgccgattcaagttttgcaaacggttccttcttctttgcggttcggattggccccaccaaacaaaacgggccccaattcaaccggcggcaaggccccc

SEQ ID NO: 333327 - DNA, 275 bp, Zea mays
gtgggggggggggggccatgcaagcggaaaactccgtttggacccttttcacattttaaaacttgtggaaaaaaaaattgcatgtaaataactgggttgttgcggatcttaaagatccagtgggatttatgcaattttggcttgaaaatttgcttctgtttggcaattttcatgtaacataatttaattcacccggacaacagactccccttttcttattttgggaaatattaagcatgtaccttcaaaaaaaaaaaaaaaaaaagggccgcccc

SEQ ID NO: 333328 - DNA, 319 bp, Zea mays
cgtccgcttcggcctaagctgccaatcagctgatcaattctaccaaggaatcatccaacacatgcgggctcaagataactggggaaggggagcgttttaccaagaccaacccttatactgcccttgtatactgctgcactcctcactaaaaacctttacctccataacagatatatatatctatcgtgtactaacttctaacatttttttagctttggaactaacagacacttgtattatagtgcataaaatacctatccccctccgtggccatataacccttaagtcgatctatcttttaatgaggcgtttgacgtaa

SEQ ID NO: 333329 - DNA, 171 bp, Zea mays
ccggccaattgcccatttgcacctgtagtattagagaattagctgagatttccttttcaacttacattatgatccattatctcttcagctactgctagtgaaagagttgtttgggtcatgcccacaaactaagcatgtcacaggttcttaggcatatgtttttgttaggag

SEQ ID NO: 333330 - DNA, 368 bp, Zea mays
  unsure (1)..(368): unsure at all n locations
caggnncggaattcccttctcgaccgactcttcctcccactcctccttctagcgctcccttttttttttttccctccgcagtgctacccnccggagttctctcttacgggggctggacagcatcatcatatcatcttcccttccttcatggattgatgcttgtctgccctctgcttctgctgcctcctatactccttcttcttatattgataaattccgaccaactgattctacacttctacaatttaaactactatctttctattctaaatatacagatatacatctttaactgttttgagcctataattctatcatgctattttatctttttcatatcataatttgtcaccctaattttttatttc

SEQ ID NO: 333331 - DNA, 438 bp, Zea mays
gtgttagatctctcaacaataagattgatgcaatccaaatgccaacagaccatatcttctgatggtatttttggcgccgtgatgaaccaactgccattctatagaaatgaaaggccccatgtgaaccaaacaccatatgtaacccgggtgagccaaacaccggtagcatccattgcgaaccaaagaccagtagcaaaaggaaggcacctggtgagccaaacaccatcagcaaatgggaaacctctgacgaaccaaacatcagtagcaaatggaagatccctgatgagccaagtaccatcagcaaatgggaaacctctgacgaaccaaatagcattgccaaatggaagacccatgatgaggcagaaaacagcataatgaggaaggccccatatgaaccaaatacctgtatcatatggatggccccatacaaacaaaata

SEQ ID NO: 333332 - DNA, 142 bp, Zea mays
  unsure (1)..(142): unsure at all n locations
tcccgggtcgacccaccgtccnaaaaaaaaaaaaaaacaaaaaaaatttttataaaaaaaaaaaaaaaaaaaatggggattataaaaaggggggcggtcttataaccaacttaactccgcccccccctaaaacccctctttt

SEQ ID NO: 333333 - DNA, 314 bp, Zea mays
acaggtccttaattcccgggtcgacgcactcgtccgctgtaaactgatttgctccatcaccatgttttgtttacatatgaaccctactcaacggggtctctatacaaggtgagtgcgtatgttcaatgctgctttcatcatacttatcatctcttctatttctttcaccatcctccctcccctaattatttaaaccctcttttttgttaaaactctatctggtgttcttgccttaaccctgttttcttgagtgcacattgccatctcttcttccaacacctttgttgcattatacaattctaataagctcattt

SEQ ID NO: 333334 - DNA, 363 bp, Zea mays
tttccgggttggacgaagccttccgccaacccttccgccaacccttccgcccacccgtccggccaaccccaccctaccgtgagtgaagccctcaaagaggcttgcttgcaaaccttcgataaagcaatccacatataatttctcattttttgtgtccaaactccaaagtttgtggtaattttgggtctgttggaaaaaaggcccctgattgtcattttgtttttgtcggccatactgtgaattgaccctttgagttgtccatcttagcggggttttgtgcttccttggcttggtttatccatccaaataataacctgatactatgttttacattttatgcccatgaaccattgatggatatca

SEQ ID NO: 333335 - DNA, 302 bp, Zea mays
  unsure (1)..(302): unsure at all n locations
tttctgtaattaccggctcgacccacgcatccgcggacgcgtgggtaaaaaatataaaaatatttatttcaaaaaataatctataattacaataagctgtnttttaaaagagggaagggggcacaaacataccaaattatcaaacatattacagtgcctccttattcacattctaccagccctctttttacaaactttgccacttttttaatcccctccgtccccaaattaaaacacctttcaccacatatctcttttttcctccaacttaaatacctattaggcccccacctttttacctt

SEQ ID NO: 333336 - DNA, 376 bp, Zea mays
taccgttccttaattccctggtcgacgcactcgtcctatcacacacatcacaccttcaacaagagtctctcttcgtaatgatagctatatgctcggtgttatcctaccaggcaaagttgatccattgcccaatctcatcaaagtacactagtttcctcatcctccatattatcttacactcaccctcgaccagcacatacactagatcaatcgtcatcatccaccatgccatcaaacacttgctactcaatatcatccacaaaataccccaactccacaatatctctcgttaagaacaccgcatggacgcctactcctagcacaagaccatctcctattgtcgcatcgtctgcgtgtccaactatcataatcgttt

SEQ ID NO: 333337 - DNA, 289 bp, Zea mays
ttccgtttaaagcaagctgaaccatatttgtcccaggaacgtgcaaatgttccacggaatgaggttgacaatctgagacacattgttatggtaaaaaatgcacgaattgaggaagattatggcacccatatcgctgatcttgacataaatgagttacaagaccggcccaggcgaaggattgaagaactccaagtatttgaagggacacaccatgattttttcagcttgaaaactaggatggtgcctagcattggggagtttttgtcaaaaatggaggccctgaaacaaa

SEQ ID NO: 333338 - DNA, 265 bp, Zea mays
ccgtcgaattccgggtcgccgcactcgcacgctccccacctcgcacctcgcggaaactgaagggggctcgaaccaggcgagaataactgatataggcaacaacaaaattgtccccgtttatgcttacccctgtgtgtgtctgtgaattgttataccgccctccctactgtctgtacagcgaagcgagtgcttgcggacactgggcgcgcgcagggaatgctcgaggcattcattaccggcaaaccacgccccgagatcaagatat

SEQ ID NO: 333339 - DNA, 88 bp, Zea mays
gaataataattacagaacaatacattgaccggagatgcaggctgtgctatgttgttgttgtttgacaattttaagtaatacagactta

SEQ ID NO: 333340 - DNA, 409 bp, Zea mays
aaaaaaaaaaataaaaaaattatattaaaattttttttctaatatcccttcaaaccccccaaaagaagtttttttttaaacagagtcgcactcaccccctcctatccttactcaaaaccaatctattttttcttataaaaccctttatattctctcttatctaactttttactttcttttttttatattcctaatttattcttccctccctctccttttaataataatctctttcttccctttatcctcttttcttccttttttttttttttctcctccaatatttctttcctttttctacccttttttcacacatcctttccatcatatataactctctcctcctttttctcccatatttttattccctctctttttatatatactttctcctctttctccccctctt

SEQ ID NO: 333341 - DNA, 124 bp, Zea mays
ggtccggaatttcccggtcgaacgaagccttccccgaacccttggccggacccgtggtttttacccttttaaatcggtcctccttccccgccctgggtgagattaaagcggtaaagatccccgt

SEQ ID NO: 333342 - DNA, 250 bp, Zea mays
ttaattcccgggtcgaccctctcttcctatctttataccaatgctaattttaatccttcacaaaaaaaaacaaaaaaaaaaaaattgtttttttttaaagagtgacgtagatacaaaaaactaaatacaaaacatcaaaattcctcttcctttttatttactcccaacctacctttccttccatccaccatcattcttttttattctttatacctacatccatttcacttcccacctttttttacttttt

SEQ ID NO: 333343 - DNA, 69 bp, Zea mays
ccggttcggaattcccgtctcgacccactcgtcctcccactcgtccgaaaaaaaaaaaacttttttttt

SEQ ID NO: 333344 - DNA, 438 bp, Zea mays
  unsure (1)..(438): unsure at all n locations
ccggnccggaattcccgggtcgaccgacgcgtccgccgagtgctacgtctacctgataccaccgttgaaaacagttgcctcctacagggagaaatgggatattatgaagcacgacgggtgcggcttcgacaaaatagaggctcaggcgagggtttctccattatggaaaagccatgcagggccaacactctaaaatggacatgacagctctattaacaggtaacgacgctttcaaactcacgccgtcatatttccgttaccatatacgtgaggcctgctcgctcttgatgtcgtccacgcccaaccgagtctctgccaaaccaaaccctagccgccgcaccagagcagccgcactgaaaaccccatggatcgaactgctccccgcgtcgctgttgcagaggctgtagatgctgcacgtgccgcggctgttgctgcggt

SEQ ID NO: 333345 - DNA, 299 bp, Zea mays
ccttcctccaacccttcctccaacccttcctccaattcttcctccaacgcgtccgctttgaactgcagaaaattgtgtgcgtggagacgagctaatatattcattacgtttaaaaaaaaaaaaaaaaaaaaaaaaaaaaaaaaaaaaaaaaaaaaaaaaaaaaaaaaagtttttatttaaaaaaaaaaaaaaaaaaaaaaaacatctaaacaaaaaaataaaaaaaaataaaaaattaacaaaaaaataataaaaaaacaaatatatttaaaaaatatataaaattggcgtcccctttt

SEQ ID NO: 333346 - DNA, 371 bp, Zea mays
  unsure (1)..(371): unsure at all n locations
ctgtaattcccggttcgaccgacgcgttctcccactcgtcctcccactcgtccgcagactctttttgtctcatgcgcaatccatncacagattgttcttttccgctgtgcgtgagaacatnacgaacccttatcccccgcatctcttcatgctccgttatgattgcccaattccaggtcagggcccaccgctcccatgttctgcttccacagcatctcctcctgctgccgctcctcgtacctaatttcaggaatgcgattcatggcttatttctctcacctattggataatggacttttcctgttttaaaaccaatgtactgtacccccctcatgttaaatttttagtacaaattttggttcgttctttac

SEQ ID NO: 333347 - DNA, 100 bp, Zea mays
ggaattcccgggtcgacgcacgcgtccgcccacgcgtccgcccacgcgtccgcgcacgcgtccgcccacgcgtccgcccacgcgttggcggacgcggggg

SEQ ID NO: 333348 - DNA, 297 bp, Zea mays
cccacgcgtccgcccacgcgtccggacgttcacccaatagtctttttatacgcgctctggagctgtaaaagctaagagcggacttgtttttatgctacactgttttccgttgtatcattgtggtttgtttgtccagaggtgtgtagaaatactcaacatggaattgtgatgcttaaattgttgagcttgacaggacattatattgtgccaccaactcgccatggtctggaagttgtaataagagtgatcatgaaacagggcataaatctattgctagtacttttttagtggaaaccc

SEQ ID NO: 333349 - DNA, 77 bp, Zea mays
ttttaaaggatccaagtttacgtacgcttgcatgcaacgtaatagtttttttataggggaacctaaattaaattaat

SEQ ID NO: 333350 - DNA, 447 bp, Zea mays
aattcccgggtcgacgcacgcgtgcgctcaggactattgggcatggtttgcggttgttttttttaagtcttttgaacttagttaggtatttggtggttggtaaatgtagcaaccaactcgtcgttattatttatttggagttatggtttgcgttttttttgtgtgtgtgtgtgtgtgcaggaaatctgttgccaagctccttttgccccgacgtttcatccataacatcttcatcgttctcagcgttatcactggattccagaagtgaaaaatagcattaatcagagtcataccatgacattgacttatcaatgggctgcggatatctgtacagtacaagttgaagcacttttgaagccctcttctgttacacacgctagcagtgttgtataatgcttgtcttctgcttgcattttgactccaaacttgcagttttgctttttgtaa

SEQ ID NO: 333351 - DNA, 151 bp, Zea mays
  unsure (1)..(151): unsure at all n locations
gccacgcgnccggccacgcgnccgcgggagcgaagcaacagccaacagggaccaaagggggagaaggggagccagcgccgcgccccgagaggcccacggaagccagcagaagcgcgcacaaaaccgaccgaaggcaagaccgccgggccag

SEQ ID NO: 333352 - DNA, 190 bp, Zea mays
  unsure (1)..(190): unsure at all n locations
ccggggcgacgcacgcgaccgngcccaaccaagcagcaanaaagccgctggcacagcatgcggcaacaagctnggcacagggctgaaaggggggagcgnaaggcgagaaagaagagcgactggacagggagagcatnaacggancgactaaactttctgaagagtatataaacattatactcacctgtac

SEQ ID NO: 333353 - DNA, 339 bp, Zea mays
taccggccggaatccgggtcgacgccacgcgtccgagctgcggcgtcatcggcccacctgactcgacaggctgcagctacgaccccagccaggggctagagcaacgagaacgaatgagctagtagccgaccgcgtatctccatcatggccgagctggtcgcgaggcacggacacgagctgcagcgggacagccagagcaccggcaggcgcatcgcggtgggctgcatgccataccgcgtgcggtgcgactgcaagctggaggtgctcgcgatcacatcccagaaggggcacggcatgatgttccacaagggctgatgcgaggtggacgagtccatggac

SEQ ID NO: 333354 - DNA, 199 bp, Zea mays
ggaattcccgggtcgacgcacgcgtgcgttttttttatcaaaaagatgatttctcgattaaagcaaccggagtaacactgtaacagcgaaatatttggggacaaaagggtatactgtgtgtgagcaaaaagggtgtattgccttgtgcgtatgttggcgcacttcatgctgaaaaaaaaaaaaaaaaaaaaacaaaaat

SEQ ID NO: 333355 - DNA, 260 bp, Zea mays
tttttttttttttggttttggttttttttttttgtgttttttttttttttttttttttttttttttttttttttttttttttttttttttttttaaaaaaacctttttggaaaaaattttaatttttgggaaaaattccttttggaaaaattttataaaaaaatcaaaaatttcttggaaatgaaaaatttttaactttggaactttaaaagccaatttaaaaaaggggaaaactgggtggtttttccccttttatcccc

SEQ ID NO: 333356 - DNA, 282 bp, Zea mays
cggaattcccgggtcgaccgcacgcgtccggtcgaccattccggcgccccgcactaggtgtggctgttgttgctgttacatctgactggactgtgggattagcgacgagtacgtgactgaaaaggttccatttgatgaggcgatttgaagaacggagtatataaacctgtacataactctaggtcatgcaatgcaagtggttgcgatcgtctgagtatgtgcaggtgcagcatttatgttgttggtacttgggtgatgggtagcaggcatatgcttgggtag

SEQ ID NO: 333357 - DNA, 183 bp, Zea mays
  unsure (1)..(183): unsure at all n locations
acgcggncgcccacgcgnccgcccacgcgaccggaacagagaagggagagggatacgagcggcgacgcgaaagagggcgcaggaanaaggggggaggcgngaggaggaggactggcgggagcgcaaggcacaagncacaagccggggagcaagaggaggggaccagaagcgangaggaagaca

SEQ ID NO: 333358 - DNA, 150 bp, Zea mays
atttctcgggtcgacgcactcttgctataaatcattccgaaaatcaaaactagattttgtttttatttatctataatataaatgggatatagtattatggactaggggttaacttaaaaatattcattacataatccaatataattaact

SEQ ID NO: 333359 - DNA, 168 bp, Zea mays
aatttccgggtcgaccgacgcgtgcgcccacgcgtgcgcgcacacctacattgcttcatcttttgaagaataccgatctttacagggattttgttactcttccacggacaatcactaactacacaaccccttctacacctaccaagaacagcttgtgtacaagatcat

SEQ ID NO: 333360 - DNA, 230 bp, Zea mays
taccggttctgaattcccggctcgacgcacgcgtccgaaaaaaataccaaaaataaaaaaaaaaattttcaaaaaaaaaaaaaaaaaaaaagaacaaggtcaaaaaaaaaaagaggaaaagaacaaacaactataaaacatcatcactctaaacactcacgactctcaatgacaatctatctaatcatatacagaaaatatcttcaacaacctcagccaccctctactaa

SEQ ID NO: 333361 - DNA, 297 bp, Zea mays
gaattcccgggtcgaccgacgcgggcgcccacgcgttcgtagcacctctcattgcttcactgattcatcaactacgattacccagagtgtggtggcgacacaatcatggcgctgcccgtccagccaatcatccgtgcccgagctcactttcacggttagcatgtcatcctccagcaacctaatacccttgccctaaagttctgtgcctacatctacgtaccgatggatctatcctttgtacccaagcgcctgtaaacaacatacaccgtaatgtacacaaatatctacattatttct

SEQ ID NO: 333362 - DNA, 366 bp, Zea mays
aatttccggctcgacgcacgcatgcatccacacgttctcagcacctctcattgcttcactgtttccccaactgcaattaactagagtgtagtgtctacacaatcatggcgctggctattcatccaatcattaatgctcaagctccacttcttcgtgagcatgtcaccctttatcgacctcttatccttgccctattattctatgcttatctatatataccgatatctgctttattattacccaatactttttatacaatattttcacttaatgtactaaattattttgatttcgtttctattaacaatttttacaagtttattactctatatcaatcttgatgcttatcatttactatattaatat

SEQ ID NO: 333363 - DNA, 81 bp, Zea mays
actcggttctgaattcccggttcgacgcactctttcgacaacacatactctcactcatatttcgatttcaacatctactaa

SEQ ID NO: 333364 - DNA, 290 bp, Zea mays
  unsure (1)..(290): unsure at all n locations
ccggnccggaanncccgggncgacgcacgcgnccgcccacgcgnccgggcgacgcngaaccggaaagcaaagaaccagacacgggggccaaggcgggaggcgcgcagcgaagcccgggcacggcagaacgcggcgccgaagacanggcaagggcgcccngagaacgnggaggcagcgcagaaggcccngcgggngcgcgcaaaggccaacgcgggggcccagcacggncgcnacaccggngagggcgagagcgangaagccaagaaaggcangacccagaagggcnacac

SEQ ID NO: 333365 - DNA, 244 bp, Zea mays
aattcccgggtcgacccacgcgtacgtctgatagcgagagcaaaaaaaaaaaaaattagattaaaaaaaaaaaaaaaaaaaaaaaaaaaaaagaaaaattaaaaaagggaaaagaaaaaaaaaaaaaaaaaaaaaaaaaaaaaaaaaaaaaaaaaaaaataaaaaaatactataatataaattaaaataaattaaaatatataaataaaaaaataataaaaattaaataaattaaatttataat

SEQ ID NO: 333366 - DNA, 244 bp, Zea mays
tttttaaaggttccaagtttacttccccttccttccaatttaataccttttttatagtgtcacttaatttaaattaattggccgtttttttaaaacttcttaattggaaaaaccttgtttttaccaaatttaatccttttgaataaaatccctttttcccaagttggcttataaccaaaaaggccctaaccattctcctttccaaaaagttgcccacccttaatggcaaatggaaccccccttt

SEQ ID NO: 333367 - DNA, 307 bp, Zea mays
acccactctgaactcaaaaataatataaatttcaactaaatcttttgattttattcctataattttatatacagtcatcgtttatatttaacagtagttattgcccaaatatacttataaatttcaacccttatctattttaacttttataaaaaaactattactaactacattaatccatttttctaatacaaaattccaacaatttctctaacttaataattaatttctattccaaaattctaatcattttcttactttataaattttttaaaaacaccacttaaatttctttacaatacccttt

SEQ ID NO: 333368 - DNA, 358 bp, Zea mays
caaaaaaaaaaaaaaaaaatcaaaaaaagtttaaaatttacaacaaagaaaacaataaaaacgttctgttacaaccggaaacggagctcacacaaaaacaataaaaatctatcttataccaaatcacataaaaaaaagcaccctccccctacataccccaattttattccccctacctttctactcttactcctttttaatacacaaccaaatttcatttcattgccacccttttaaaaacccctaacctctaaaacccctgactttccccaacttattccccttcaataacacccccctttctccctctacctaaacaccaaaaacgcccactctattcgcctttcccacaatttcc

SEQ ID NO: 333369 - DNA, 172 bp, Zea mays
aattcccggctcgacccactcttcctacaacacttaatactcaccagaattaattttcacaacaaaaaaaaataataacacgtcatgtatatttataacggagctctgctccactcatatacaacacaatcatatatctcttaactacttctatccatatctcaaaataaat

SEQ ID NO: 333370 - DNA, 193 bp, Zea mays
cccagcgtgcgccgaccattattcagatttttcgtacatcgccataatgttcgataaagtatatattacaacgtgggtaggccatatcaacattcataactattgtgcattttagtactctatatgtgtatcctttatatgaatagatacactgtacttataatagctcatgtaactcatccctttgctcctt

SEQ ID NO: 333371 - DNA, 369 bp, Zea mays
gaagaacgcgccaaattatgcacataaatttaagctacaccgaaggcaaaaaaaacaacgggcaacttattatgcgcacgcgaatactcagtaactctcgtctccatgactaccttctaggccataataatcattagttggatctgactcaaatcctgctgaaagttcatctgcatagtcaatatcacattaatgccttaaacttataaataaactatgacctattattgaaaggtgctacacatttacaacaccctctgcatcacattttacataaaccattgtcagttacccatactctcccactgatattcaatgctatagcgtgacctcatttccatagacagatcacatgtttacaacgttgtg

SEQ ID NO: 333372 - DNA, 308 bp, Zea mays
  unsure (1)..(308): unsure at all n locations
ccggnccggaanncccggggggacgcacgcgnccgccggcttggcatgaagggtgcaggcctcgnnaaaaagctagagacgngngggangngggggganagnagcagggggnnatatatattcagttgtgtgtttactatttaatgcgaggagtgaaaataatagtacctgtaccagtctgtgtatggttattacttccaaaaaaaaaaaaaaatttataaatttataaaaataaaaaaaaaaaaaataaaatataaaaataaatataaaagaaaaattaaaaaaaaaattaaattaaataataaatt

SEQ ID NO: 333373 - DNA, 68 bp, Zea mays
aaattgtcacaagctgacttcatggcgttaaaattaatcacagaaacaggataatcaagaactagatc

SEQ ID NO: 333374 - DNA, 205 bp, Zea mays
aattcccggctcgaccgcacgcgtccgcccacgcgtccgaaaaaaaaaaaaaaagttttaaataaaaaaaaaaaaaaaaaaaaaaaagaaaagttaaaaaagaaaagggggaaagaaaaaaggacagccgctctaaaggatccaagcttacttacccttgcatacaacgggatagctcttttataggtccaacctaaattcaatt

SEQ ID NO: 333375 - DNA, 285 bp, Zea mays
  unsure (1)..(285): unsure at all n locations
ccggnccggaanncccgggnggaggcacgcgnccgcgnncggngaggcgccaggagngaggccgagggcagggaggagaaggacggacagnnggggggacgcagcgcaggagaggaacaagggacncaggagcnagggngangngagcngaaaaaaggcangngacgcaacgcaagagcagcggagcnncnaccccagcnncnnaaaccccccacaccagagaacaaaggagggcaaacgaacnaggaggcngnannganccancagcagcncncccgnnccgcg

SEQ ID NO: 333376 - DNA, 377 bp, Zea mays
  unsure (1)..(377): unsure at all n locations
ccggnccggaaatcccggggcgacgcacgcgtccgcggacgcgagggcggacgcgngggaggcgccgacgcagccgaagacgggccgcagcgggggcatcaacaagggccanggcgacaccaagcgcgagctgccacngcgcccggcccaccgcaaggggaaagcaacgaagagggngaccaaggncaggggcccaaacagagagggngccggctgggcaccgaaagagaagcggancaccgagcnncagaaggnnggcaaggacaagcgcgcncngaagcnngccaagagaaagcnnggaacccacaagagggcaaagaagaagagagaggagaagaagggcgagcacaggaagaggagaacggccgagacgcaca

SEQ ID NO: 333377 - DNA, 56 bp, Zea mays
tccggaattcccgggtcgaccgcacgcgtccgcccacgcgtccgcccacgcgtccg

SEQ ID NO: 333378 - DNA, 461 bp, Zea mays
  unsure (1)..(461): unsure at all n locations
cggaattcccgggtcgaccgcacgcgtccgcccacgcgtccgagcggatcgagatggcggcgtcggatgttgagtaccgctgcttcgtcggcgggctcgcctgggccacggacgaccactccctccacaacgccttcagcacctacggcgaggtcctcgagtccaagatcatcctcgatcgggagacgcagaggtcccgcggcttcggcttcgtcaccttctccacggaggaggcgatgcggaacgccatcgagggcatgaacggcaaggagctggacggccgcaacatcaccgtcaacgaggcccagtcccgcggcggccgtggaggcggcggcggcggcgggtacggtggtggccgtggaagctgcggctacggcggtggcgggcgccgtgatggcggcggcggctacggcggtggcggcggctacggtggtggcggcngcggctacggtggtggtggc

SEQ ID NO: 333379 - DNA, 397 bp, Zea mays
accggtctcggaaattcccgtggtcgacgcgcacgcgtctcgcgcgcacgccgtcggctcgcagcacgccgtgatgctgacctgccgagaatccaggcttgcgtcgaccatcgggctgcggctgtggcaggccggagtcgtcgtgtatctagacatccggaggtggatctgatgagctgaaactgaagctgcacctgagccgctcagctgccgttgatagatgccctctgtttgctctgttttacgatccataggtgatgcatttattggctgaggggtcatttacaggtctgagacagagatgaggatgtgtaatactatcaatgtgacgacgggagttgtgaatatgctcatataagcagatcacattcgtgcgatgccaaatgacatggtggac

SEQ ID NO: 333380 - DNA, 302 bp, Zea mays
  unsure (1)..(302): unsure at all n locations
ccggnccggaattcccgggccgacgcccgcgtccgaaaaaaaaaaaaaaaagaaaacaaaaggaaaaaaaaaaagaaaaagaaaaggaaaacagggagaaagaaaaacagagaacagggccgaagaaaacaaaaacaaaaaaaaaaggaaaaagaaaaaaaaaaaaaggggcgcccccccaaacgaacccaggccagcgcccccggcccgccaagcaaaacgagcgggaaagggaaccccaaacacaaaccacgggcccggcggnaaacaaacagccaccgggaaaaccccggccgaaccca

SEQ ID NO: 333381 - DNA, 179 bp, Zea mays
taccggtccggaatagccggggcgagccacgcgtccgaaaaaaaaaaaaaaaaaaagaaaaaaaaaaaaaaaaaaaaaaaaaaaaaaaaaaaaaaggaaaaaaaaaaaaaaaaaaaaagaaaaaagaaaaaaaaaaaaaaaaaaaagggggggaacaaaaaaagggaaaaagagaaaag

SEQ ID NO: 333382 - DNA, 384 bp, Zea mays
gaattcccgggtcgaccgacgcgtccgcccacgcgtccgcccacgcgtccgcggactcgtgggttgccattgattaacggggttgagctttgtagtaacatctgaagagttgagagtttccttggatggttgaaccaccagaatacatacaagtttgagtagacaatgcttctatccttgtaccctcgtggagtctttgtgaattgcctcgtaggaattttggtttttacatgatcttgaggcataaggttgtaaaattagtcgaaaatctgtatctgttgtaaagggcatggactttggaccactgaaatggctgtcaagctttcgtatactgcaatgtatgctgttcaaaagtcaactattcaaatattcgattattccttg

SEQ ID NO: 333383 - DNA, 236 bp, Zea mays
cccacgcgtccgcccacgcgtcctcccactcgtccgcccacgcgtccgcttaggcttaggattatgcgaattcaggatcggacagattagtaatcattcagccaacttaatcatcttaacaataaacttgaattcatcaaacaactcaatgaaaagctcctactcaaacgatcatgtgataatctcctaatacttgaagtatgtaacttacacttgacagaaatgtgatcatctga

SEQ ID NO: 333384 - DNA, 313 bp, Zea mays
attcccggctcgacgcactcatcctaccactcgtacgaccactctttctacgatttctacatctactaatacctatacgtcaaatgtatattcaacaatgggccatgaccctcatcccaatcatcatcccacctgcttcactctctactaatcctaataccatataaacaacctattctcataacccatttcacacttactcatcatctcttctcatcttatcatttatcctctcccatactaccataaacatcattatccagtatgacattacatgatattaactatctgtataacattttatccatttact

SEQ ID NO: 333385 - DNA, 231 bp, Zea mays
cgaattcccgggtcgaccgacgcgtacgcccactcatccacccacattgaacatgagataatactatctctccatatactgggtaggggtaaacttaaaagggcggtggtaaatataactatttaacgatattaccatctattattacgataaatactattgaaccaactgctgttgtgacctatgagatgtccatttaatcctataatgcaactgtcaacatgatgttta

SEQ ID NO: 333386 - DNA, 269 bp, Zea mays
ctcgcatctacctctagcacattgtacgagggaaaggttcagaggtagtacaatgggtatgtgccactcatcaaagaagtcggcggttaaacctctttttcttttgggggttgggggaagattcattttgagatgaaaataattcctttgcagaagatacatacaaatttggactgggaattttagcagtctaaccagatacatctggatagatattgtaaaagagatacagctggatcaatgagcattctttctttcacatttaaaac

SEQ ID NO: 333387 - DNA, 367 bp, Zea mays
  unsure (1)..(367): unsure at all n locations
accggnccggaatacccgggtcgaccgacgcgtccggcaagcaacagatacacaagctgcttcagttcaatcaagaacaacaacccctgcacgaggagaggataggaggctcaccggtcgcgaccaaattctcccagagacggtcggaaatgaggagccaagcgctgctcttcctcacgatcgcccttctcaccgtgctcgcgcgatccatcaacaggcaccaccaccaccaccactcccacgttcaaagcatagggcagtgagcatcatcatgatgaggaggaggaggaggtgagctggcgagccgggcgccggcgccggcgcgcgcttggccgtgctgcgacagctgcggcggctgcaccaggtc

SEQ ID NO: 333388 - DNA, 294 bp, Zea mays
  unsure (1)..(294): unsure at all n locations
ccggaattcccgggtcgacccacgcgtgcgcccacgcgtncgtcgagcacattgtacgagggaaaggttcagaggtagtagaatatatatatgaccggcctcaaaaaaagtaacttgttagtttctttttcttttgggggttgggggaagattcattttgagatgaaaataatttctttgcagaagttacataccaaatttgactgggaattttagcagtctaaccagatacatttggatagatattgtaaaaaaaatacaattggatcaattaacattttttcttttagattt

SEQ ID NO: 333389 - DNA, 316 bp, Zea mays
  unsure (1)..(316): unsure at all n locations
catatanntttaacnntttgacnnaaggatgtnntatgagcntnntggatgnnnaaatgaaaggganntaatttcttagagngnntccacccanacaaattcttcactttgtgatgaacacannagcatggtcatttatctttcacnaagaagggcnnctttatttttcattatttannatttcaatcctcaagtcttcccattccgtcgtatttcgtgttggtgtggatgaaagctggggaataaccaactcatcttcaacacagatgaaactaaatatggtggatgtgaaaccctcaagagtagtcagtatatg

SEQ ID NO: 333390 - DNA, 289 bp, Zea mays
aaaaaaaatacaaataataaaattatttaaaaaaaaaaataaaaaataaaaaaaaagggagaggttatttaaaaagagcgggtatgcaaaaaaaaaatatatttaaaaataataaaaaaaaaaaaggggcgcccgttttatagatttcaagtttacgaacccgtccattcaatttaatatcttttttttgatgtcccataatttaatttctgtgcccctattttaaaaacatcttaattgaaaaaactttgaagttaccaatttaattttcttagaagaacttcctttt

SEQ ID NO: 333391 - DNA, 321 bp, Zea mays
  unsure (1)..(321): unsure at all n locations
accggnccggaattcccgggtcgaccgacgcgtacgcccaaatctactcattgtatatactttctattactgatcgtccagcattaaaattgaggactgttaatctagaagcagcgtctggctacaaaaaacatttttctttgatcattacaaaaacatatctatccaaatttttatatattaatttaccgagccaccatcatttttgctctagacactctaatatgctatcttgaaacgtctgtctccctattgtcttatcaattcaatccaatcaaataccattttttcttttcaattttatcacatgaacttactaca

SEQ ID NO: 333392 - DNA, 362 bp, Zea mays
  unsure (1)..(362): unsure at all n locations
ccggnccggaattcccgggtcgaccgacgcgtccgcccgcacctcctgctagcacagggtgcaagggaaaggatgacagacaggacaatcgagagcggcccatcatgaagggcggcggggggtacacaactgtatctgtcgaccgtgtgcggaacaggttattctgacatgactataaaagcgttgccgagggacgaacctacatggactgggcatgcaagcactgtaaccagacacattcgcatagatgataggaacgagctcagaactggtcaatgaggatcaagcctatgcaatccaggggcatgctgctccctagggcgaacaacctaactaatcctactttacctactgttacctgc

SEQ ID NO: 333393 - DNA, 357 bp, Zea mays
  unsure (1)..(357): unsure at all n locations
aaaacttcaatttcctatttcaagttatgactattccttccaattanctgatcgggtttaaatactgttgggcaaagtttttcataaacatatatttaactttnacaaggatgttatgagcttggatgaaaatgaaaggataatttctagaggtccacccaacattcttcactgtgatgacacaagcatggtcatatctttcacaagagggcctttatttttcatatttaatttcaatcctcaaatctcccatccgtcgtatcgtgttggtgttgatgaagctggggaataccaactcatcttcaacacagattaaactaaatatggttgatgtgaaacccttaaaaataatcaata

SEQ ID NO: 333394 - DNA, 70 bp, Zea mays
gaattcccgggtcgacccacgcgtacggtcaacgctaatacactggacattctacatgtgacatattcca

SEQ ID NO: 333395 - DNA, 267 bp, Zea mays
  unsure (1)..(267): unsure at all n locations
atacaactcaaattcnacaaaaattttttttttttaaaaaaaacaaaaaaaaaacaccgccccgtttttatttaaaaagttggccaaccccaaaaaaaanccnnnccnttttatantatccaatcttacttactctttcatccaacttcataccttttttattntatcacttttttttttttcatttcccttcatattacaactttttaacttttaaaaccctccctttacccaatttaatcccttntcaacacatccccttttctc

SEQ ID NO: 333396 - DNA, 238 bp, Zea mays
  unsure (1)..(238): unsure at all n locations
accggnccggaattccgcgggtcgaccgcacgcgtacgcagccccttcccaaccgtcaataatgttgggagttttgacatctccgcggcgctgcgggttgtgcaaggcaagcaggcgggcagtccattcttcgcttggatgccatggcgcctggtgtaaccaactggtagcgtgtgaggaggcttcgttgtattgactagtgcatatttctgggcaaaacagatgcgtttggttgccc

SEQ ID NO: 333397 - DNA, 190 bp, Zea mays
gtccaccaaggcggttcgcatagacagcgccagcaaccaaaaacgtgaagggttctaaaagaagggggggaggaaaaaaaacggtcggccgttttaaaggatccaagcttaagtacgcatccattcaacctcatacttcttttatagcgccacctaaattaaatccaccggccgtttaataacaacgctc

SEQ ID NO: 333398 - DNA, 408 bp, Zea mays
gaattcccgggtcgaccgacgcgtacggagctgactagttcttcctaaaacctgtgcttctatcagacatgaacaagctcaggccccagatactaaaaagcagaggcaagcagaaacagcaccagccaagtgacagtcacagtggcgaacgcaagaaccccacaatcagcagcagcgatagcataaacaaccgcaagagaaacggtgcaggcacctaacaaatcttgccccagctggccaacagatcaaggcacagttaactgagaactgactactacagctaagaccttttctttttcactgtactgtggcctactgatttctcacgtaaatattagccctggatttgcaaaacgcaacgcaatctgtaaactgatactgcttgagtcgaatcgatcgaaatgattc

SEQ ID NO: 333399 - DNA, 51 bp, Zea mays
  unsure (1)..(51): unsure at all n locations
gaattcccggntcgacccacgcgtgcgcggacgcctggactaaattttccc

SEQ ID NO: 333400 - DNA, 265 bp, Zea mays
  unsure (1)..(265): unsure at all n locations
ccggnccagaattcccgggtcgaccgacgcgtccggagctcactacttactcataaaatctgagcttcattcagacatccacaaactccagcgcgagatacttaataagaggtgcatctataaaacctaccacctattcgaaacccaagctttcgaacgatagaacatgcactctcagacacagaagtccattataccaccccaatagaacagccgcacgcaccacttaaatcatatccaagacgtccaactcatcatcgccagc

SEQ ID NO: 333401 - DNA, 358 bp, Zea mays
  unsure (1)..(358): unsure at all n locations
cccgggtcgaccgacgcgtacggagctnactacttcttcctaaaacctttgcttttatcacacatcaacaaactcaaggcccagatactataaaaacaggtgcaaggagaaacaccaccanctaattnacaatcacactttctaacgcaagaaccccacaatcagacacagcaatagcatataccacctcattataaaaggttcacgcaccaaataaatcttatcccagatgtccaacatatcaacgcacagctcactgataacttactaatacatctcaaaccttttctttttcactttacttttctctactaatttatcacttagatattagccctggatttgcaaaacacaactc

SEQ ID NO: 333402 - DNA, 143 bp, Zea mays
  unsure (1)..(143): unsure at all n locations
accggnccggaattncccgggtgcgaccgaacgcgtacacggtgtgtgtaaagctaataaaatgtcntagtgcagtgaattgtaaggaacaaccattgaatcattgtggctgcgctggattaccatggtgagcgtaatggtgt

SEQ ID NO: 333403 - DNA, 380 bp, Zea mays
  unsure (1)..(380): unsure at all n locations
cggtccggaattcccgggtcgacgccgcacaagttcctggtcaagtcgccaccgagcgcgctgggatcgaagctcangatgcacgggaaggccctgcccgcgagacccgccgccgtgtcaccgccgccgcccgtgaaggcgcaggcatcacctgcaaaaacgcggcgctgctcgttctcgccgtcgaggttggcgacaaggctcatgtcgcctatcaaagcgaggctgtcgctgggcaggagcagggacagcggcgtcggtgtcggcggtggcccgatgagcgggctgaagcaacggccaggtgttagcttgacggtgcggacggtgtcgagcaagatatcatcgaggtgatgatcttcgtttgtcttcggcgtcatgtg

SEQ ID NO: 333404 - DNA, 183 bp, Zea mays
  unsure (1)..(183): unsure at all n locations
tttttcaataactacatcccccacatgctcggtttaaaaaagaagaggggcccccccaacaaccccaancccaacatcactttcctccagacccataccttctaacaactatatctccccggagtgctttacatttattctttcttcaatgccaccaacacccataccaatttttccaccaac

SEQ ID NO: 333405 - DNA, 136 bp, Zea mays
ctgctcgcgcggcgcttggcggcgggcgcggcccgctgctgggcgggtggaacccgatccctgacgtgagcgactcgcacattcaagagctaggcgggtgggcgcttgggcaggcgaagcaccaaaagctggccgc

SEQ ID NO: 333406 - DNA, 221 bp, Zea mays
atattatatagcatatttgtgtatttattatagacagttactattttacaacttgttagacaattttttagtataaagattcttctttcacataatcatttataatttttttcttaatttaattttatttcctccttttctttatttttttattcctttaattattattttattttactcatttattttataaatcttttatatttaattttttattttat

SEQ ID NO: 333407 - DNA, 350 bp, Zea mays
tcgacgcacgcgtccgcacacgcgtacgtgcactcttccgaggatatgaaacagaaagtttctaactagtcaaagggtgaagttgaagatgatgagggggattgtaatgaggacgaggatgagtaaatagtacgatggggaacagcagctatgcaattgaagtgtttgctgctttacttatttatctaatatgctgaaccttttgatgttatatgctgtaaggaaaatctgtacatgatggtaccttatggtattgcatgctggagttcccctttaacccgaagagcctgatacttttaccagcctcgtcagcatgtctaaacagttgctcacttgttttatcgactaat

SEQ ID NO: 333408 - DNA, 406 bp, Zea mays
taccggttcggaattcccgggtggagccacgcgtccgcccacgcgtccgctggaaagaagaaatggagctgatgcattttggaaatgttaacctagccgaataagttgacaggtgaagagcaggggaattgcagtgaagtctggcggtggcggcaaggggacgagagaatgtgtcaacacgagagactcgtttgcttgcagaggaggtatcatgacaatggatgtcgccaagtcctccgtgtcgaccatatatatatgaagaataataagaaaacacaaatacccaagtatttagaagcgttgaatccagatgtggcatgaggtcggagccaacgtgtacttgcatacgttacgtttatatacatgtactgctctgctgtaaaaaaaaatatataatattataaat

SEQ ID NO: 333409 - DNA, 263 bp, Zea mays
gaattcccggcgggagccactcatccgcccactcgtccgcccacgcgtccgctttttgtcacgtgcgactgtcgtacaatactatagcgcgctcagaatgctgggaggtgcaagaattcatccccagtccagtcacgaaatggtttgcgtcttgactatatcgtgtaatcttattcagttattcttggttgtttgggtcaacttcgagtcattcccctgtttatatatcttttatatcttactattcctatatattttatcct

SEQ ID NO: 333410 - DNA, 319 bp, Zea mays
acccacgcgtaggcttcatatgaactgctcccttatgcgtaatgtgtagcactcgtacacatccattaccaaactggcagactgtgtgctattttcaatgagtagatccggtccccgattaacccactaacataatcatcaccatacaccataaatacttatacaccgatactaatctcaccacttaatgaattcatctacatatttctcatgctaccacttatgcactaactacacacttatttttttttccggtctcacatcaatcttctcctactccctgcatttctttattgtatctcaaagatccctaacttgc

SEQ ID NO: 333411 - DNA, 438 bp, Zea mays
cgcacgcgtccgagcatttgcacgcttgatcatagaaaatcttacactgtttcctccaatccacgctgtatgagacctaaaaatgcttaacgacccttcaagtttgcttttcaaggaaattttaacagatattgcccgtgctgattactttgagcctattaggaccttcgatgagtcctgcatggctgactttttcaaaaaaacgacctctttatctcagcacctggtatacaatcctaaagaggtatgacggcagagagggatcatcatgctttgatctttaagaattcttttgttagctcaaagactacaaaggacccttctctatgatgtatattgtatgctctctgaaatttgaagaattctgtatgaaactttggttgccttgagcattattgtatagcgcccgatagggcgctactgtttctaggttaaatt

SEQ ID NO: 333412 - DNA, 333 bp, Zea mays
  unsure (1)..(333): unsure at all n locations
acgcgtccgctgcaactgggcgcaacagccgatacactagctgaccgacctgctcggacacgcacacgacgcatcaccaccgaggatggcagcttcataatcatgacgagcacgacactaccctgtaactacgactcaaggcccagcatgctcgcctcaaaacaatgggtcccactcgctaaccaggccaacctactatgccaagaaccacgactgtccctagcggagaatctnagtagaccgtagacgcactactaatgacaacaactactaccactgcacaaccacatcactatgtactcgatgccatgcgctctctacttttccacgcta

SEQ ID NO: 333413 - DNA, 269 bp, Zea mays
ggaattcccggagggacccacgcatccgaaaaaaaaaaaaaaaaaaaaaaaaaaaaaaaaaaaaagaaaaaaaaaaaaaaaaaaaaagaaaaaaaaaaaaaaaggggcgggcacacaaaaagacccaaaccaaacaaacccaaacacacaacaacaaaacaccaaccacaaagccaccaaaaaccaaaacaccagccaacaacaaacaacaacacgcacagaaaaaccccagcccaaccccaacaaaaccacccaccaccacaaccccc

SEQ ID NO: 333414 - DNA, 403 bp, Zea mays
gcgtccgcggacgcgtgggccttagacagggggcatattgaccccatttgtaagagtttgcatcggagcagccacaggtatcacaggcgacaatactgtctaacgtgcgcgacaagtcaaagctggatctctctggtctatggcactttcatgctatacatacgcggtctatctctgcattaccattgcaaatctacgcttaatcaaagctctggtggttatagagcacctcaacaagctgcaagtgctctagtagtcccacccaccactgtccatccacagccacaccactctgtgcgcgggggcgtgcgttttcgacttttccacgccacggtgtatgcgtacaaatgcgagtagtgtagcatcatcatcatcttgtctcgagtgtgatttctgtggggtt

SEQ ID NO: 333415 - DNA, 143 bp, Zea mays
ggaagcatgtagtgattttgaaactactgttcttgctcaaaaaaaaaaaatattcatcagaaaaacttcaaaaatcggaagcgacaatacaaactaaacgactcaacaagaaaaaacaaaaatcacttacaaaaatgacactt

SEQ ID NO: 333416 - DNA, 421 bp, Zea mays
  unsure (1)..(421): unsure at all n locations
acgcgtccgcggacgcgtggnggcggcggctgatgtggagtaccgttgcttcgtcggcgggcttgccggggccaccagcaacgagtcggtggagaatgccttcgcctgctacggcgagatcctcgactccaaggtcatcaccgaccgggagacggggaggtctcgcggcttcggcttcgttaccttctcctccgagaactccatgctcgacgctatcgagaacatgaacggcaaggagctcgacggccgtaacatcaccgttaaccaggcccagtcccgtggcggtggcggtggcggcggtggctacggcggcggtcgcggcggcggcggctatggtggcgggcgccgtgacggcggttatggcggcngtggcggctaccgctgtcggcgcgagggttgtggcggcggctacggaagcggt

SEQ ID NO: 333417 - DNA, 289 bp, Zea mays
cccacgcgtacgcatacactacatccacaaaatattcctgctcaaaagcattcttgctactatccaattcggactatgtgtggagtttactgggtcacaatttagatcttcgacgaaatagaattcctcaccatctatagcaactatcgaccacctatagaacaaataccacaagaaccttactttcccaaaaatccataaggcaagtacaaagaccaggcggatctagaagctccaagactacaataggctgcttgcgatccaataccttttctatatgagtcaacta

SEQ ID NO: 333418 - DNA, 83 bp, Zea mays
cgcgtacgatcaacactttgttgttgatcacttatgttccaaattctgagtttgacgctggagcatgcctcatttgatgctgg

SEQ ID NO: 333419 - DNA, 363 bp, Zea mays
  unsure (1)..(363): unsure at all n locations
gcacgcgtccgcggacgcgtgggtgcgacgagtccgacgtctgctccgcggccgactccgcccggtggagcagcttccaagccaccacggcgcccgcgtcgcccacgtacaacctcgtccacccggcctncgactccatggagctggacgggacgacggcagccgtcgaggagttcgagttcgacaagggccgcgtcgtcacgccatgggaaggcgagcggatccacgaggtggccgccgaggagctcgagctcacgctcggcgtcngcgccaagtgaagcgaagctctcaagcaaagctcggatctttgagctcccgtactgcaaatgccgcgattggcagaaaaaaaaatgtgtacgtact

SEQ ID NO: 333420 - DNA, 181 bp, Zea mays
gggtcgacgcacgcgtccgggagatggctagatattaccaagtggtgtatgctctttatgaagtgctacaagatgtagcaaataaaaacattgatgatcaggtgttgcggtgtgcagacatggttgaagaaaatggtcgtcatttcaagaactacaagtacaacattattcccctcaattt

SEQ ID NO: 333421 - DNA, 431 bp, Zea mays
ccggttcggaattcccggctgcgagccactcatccgtagctttttgtatttgcctgttgattcttatatttatgtttattaagtgggggaatgggtagcttctaagaagggagggaacaacatccatttgatgtgaatcattcatggcacagtatgcaatattggcatatgtggtactatacatacacacttactgtactcacaacatatataatagaatggttgattaatttattaattataaattataaatgtcgtcctttctatatgatccaaacttacttactctttcattctatttttttacttttttattattgttcccttatttctattcacttcccttttttttattatttttttatctttaattatccttttctttttttattatttattttttttattttaatttttcttttacctttttt

SEQ ID NO: 333422 - DNA, 62 bp, Zea mays
acccacgcgtgcgaccggaacgcatcacaccatcatgctgttatggcattgatggattctat

SEQ ID NO: 333423 - DNA, 73 bp, Zea mays
gagaacataaagaacatgattttggatatacctgtcaaagattgatacatgtttcccatcgaggcaatttcca

SEQ ID NO: 333424 - DNA, 262 bp, Zea mays
acgcgtccgcccacgcgtccgagcctgcccccacttcgatggcagtttatttcggctgttgcacttgggctcgtctgctctagaggtcgggtctggtctggtctggtccgctaagctcattctctcaatgaggttttcgccgatttgcagtgtgtataattacatattcctgtaaacgaacaacgagaagaactactcttctatgtcctcagatataatgggtccagagtttaagatttgtaccaaaaaaaaaaaaataaaa

SEQ ID NO: 333425 - DNA, 322 bp, Zea mays
cgacccactcgtccgcactattgtaaccctaatgacagtaaaacccaccgtgtgtctgctaccaaagaggaggggccttgtataggacatgcatacggtcacaaaccaccaaggtgccgtaaacatgcactgccattcaaatagtgtgagaagttgcgtttctaaaaaaaaaaaaaaaaaaaaaagataataaaacaaatataattaaaaataaaaaaaaaaaaaaaatataaaaaaaggggcggccgttttaaaggatccaagtttacttacccgtgcttgctacttcttaccttttttatagggtcacctaatttaaatt

SEQ ID NO: 333426 - DNA, 252 bp, Zea mays
attcccggtcgaccacgcgtccaaaaaaacattatttcttcatctattacttttttatttataaaaataacctaaaattacacgtaattgcttaaaatccactttggtcaagacataaacaaaaaacttttaatacggggtccctcttactttcttttttatatcatttttttccctttctttagatcccaatcttttttcttcctatttcctaactattaattccttttttacttcacatttacttaattt

SEQ ID NO: 333427 - DNA, 333 bp, Zea mays
cccacgcgtccgcggacgcgtgggccttgcccatttctcctcctacgtgactggcatctctgggtgttggcatggggctatcgttctatggttccagatgttcactgcactggtgttagcgtttagctacttcagtgcatcaatggttttgtgtgcaagtccttaatatgtaatacatttttgaggttttcatcatgcagaattaaataaatattataaagtaactatgaaaaaaaagaatttattgcatttcatttataaagaaagaagttaaaaaaaagtgtggcccctttagaggatccaggcttactaacgcgtgcttgcaactttata

SEQ ID NO: 333428 - DNA, 428 bp, Zea mays
gaatttccgggtcgaccgacgcgtccgcggacgcgtggggtgctgcagctagtgcggttgatgcagatcttgaccctcttattgcagggcttcgtccaatgcgacttcgagagaaactgggcagggagcttcgtggccggcttggtttgagattgttcaatatagatatgattagagaacttggaaccaaagatcggtactacataattgatatcaactacttcccaggttacggcaaaatgccaggatatgagcgcatgttcacagacttcttactaagtctcgcacaaagcaagtacaaaaggtacttaagcgggacatgaggtgcaaggaagtttgtgaagaccatgctactgactagatggcatataacggtggcaggtatgctttcccaccgcgccaatgtacatttgctggagacataagca

SEQ ID NO: 333429 - DNA, 429 bp, Zea mays
actcggtcctgaattcccgggtcgaccgacgcgtccgctctctaaaatttctgctgtacatgaaaaaggcactgttgctaaagcttctgagaaggatggtaaagcacacaaagagaagaggggtgatcaaaatttggagataaaggcacttcgcaataaagctgctgagtggcaattgaaagtactcgagaacgagggcattctgaacgcaaaggagaaagaaagggatcaaagagttgcagagaacaatctgaagatgaacgcgttgaaatctgaagtcgaatcggagcacaagtgccatgcggagaaagaaataaaaataaaggaaaagcttgaaaaggttgctgaattatgctctcaagctgattccgttgctgaagctggaaataagaaaatacaagaaatctgtgggaagtataatcaaatttg

SEQ ID NO: 333430 - DNA, 282 bp, Zea mays
gaattaccgggtcgacgacgcgtacgcccacgcgtacgcggacgcatggaaacttttagactaactcaggtcctagcgtgtctgttctcttgaagtggcaggggagacttatcatctgcctaatgttttgatacccctttccgtactacttggctcgtaattaggtatgccatatacgcttgctattccatgtacatgtataaatcttacacattctactggcccaattaacatgagtatgcatattatctatatttgtgttcattatacgtattgctgata

SEQ ID NO: 333431 - DNA, 337 bp, Zea mays
tccggtctagaattcccgggtcgaccgacgcttccgctctctccgcacagcagctttgcgaaaacctttttaagcaaaccaccggagcatcggggctgggtctggctgagccagggcagaggactattacaacgaaattgacatggggtatgaggatgagcccccataaccggagattgaggaaggatctgaacaagagcttgagaacaactaatatgcccctgatgacatcataagtggttagggttaacataaggagcaggataagaccaagcgtgaacgcaaatcaacttgatacatgacgaagtactaacgtgctttcatcctgagtacacga

SEQ ID NO: 333432 - DNA, 104 bp, Zea mays
taattccctggtcgacccactcgtccgaaaaaaaaaaactaaaaaaataactaaacattaaaattttaaacaaaaaaaaaatacaacaagaaaccgtttaatat

SEQ ID NO: 333433 - DNA, 286 bp, Zea mays
ttctcctacccctcctgttctttttctttttcattaagttctccaatattcggtttcgtgaattatcaaatcgagatggcgcccatcaaattttcaatacctttacttctttctcttccttttcttttccacttactaccacttccttcacaacaccttcaacatttactactaattcctctattccaatatcatcctttatctatatactcatattttcctcttcttctacttcttcaccttctccactttatatactattccttaactccattcatttcattaa

SEQ ID NO: 333434 - DNA, 319 bp, Zea mays
gaactaccggatcgacccacgctaacgaaattctacacaagcataccaaacttatcattttcatcaatctaaaatataaaaataggaaacggttccatcttaaacaagagatggatacaaatacacactctacatcatcttcctactttgccttccttcactaaagttccatctctcgcttcttccaagcaccaccaccctcttcactctctttcatctcaaccatctctaaactctccattacactacattcttttttataatcatcacccatccaacaatatccattcctatacatataaatacattattattaatt

SEQ ID NO: 333435 - DNA, 369 bp, Zea mays
ttctcggtctggaattcccgggtcgacccacgcgtgcgcccacgcgtacgagccatgccatgtccacttctctgcctgcaacccgttcgccgggtcccgtgcccgttgtctttggcatctggccaaccactagactttgcttctaaaccagaggctccatctgtgtgccgccttgttttactagaaatccttcttgattctatcctttttcacttgtcctgcctagtttttttacttatcctgccattgtacaaacaatttctccagtgcttgtagcttgtggacttgggatggccaacatgtcatgaatacaaactgagtttgcttcagatatatttttttggggtgccttccataaattaaattttt

SEQ ID NO: 333436 - DNA, 232 bp, Zea mays
aattcgacggtcgactgacgcgttcgctgacgcttctgctgacgcttggtctgactcttgggctcgaaattgttttccgcgggaaatgtccatatatcccggagcttgtttttcgccatactgtcttcaattccgcttcttccttaacggacttcacttggacacttactacctctggcttcacaacatcttaattatctacattcattactctaattccaagatcatacta

SEQ ID NO: 333437 - DNA, 353 bp, Zea mays
ctgaatttctgggtcgaccgacgcgtccgaaaatgcataaatatgatgccctctggatatctgcactctatttcggtgattctgaatgtgatgtggcgtctccctatgtactgtgaggaaacatagttttgatgctaaagttgcctaggaatttggtacggtgaagtggcagtggacgttaacaatgttaagttttgagcatttaaattaaacctttgctctgataaaaaaatacgtaagtcatgcatgttaacaaacacattctatcatataaaaaagggcggccgatttacaagatccaagtttacttacgcttgcatgcgaggtcataccttttcttaagtgtaacctaa

SEQ ID NO: 333438 - DNA, 293 bp, Zea mays
cgacccacgcttacgaaacacttacacgaaaaccacgttttcttattgagcctcagttcacacacaacgatttggtattttacaagatgcgtgacggctcctatatttcacctgatgaacaacatcttattaagcaccccactctatcttactatattacaatatgcgaccagcatataatggaatctgtaatagatcaaaccctaactcctttttctgctttacagaccaatacacactatcatcagtgatttcctgcaaactctattcatcaaaatatatcttctctagaa

SEQ ID NO: 333439 - DNA, 364 bp, Zea mays
gaattcccgggtcgaccgacgcgtgcgggtgcaagtcatgaacctctctctctcatctcggcatttgaaatcagtgtgtttaattgcgtacttggtctctctctctctggctaccgtggtttttggaagaactctctagatgtacaagttaatactactagtactttccacacctattgcagctgaattagagaactgtttttgagttctcatgcattattagagttgtcaagggttcatgaatcaagttatccagctagctactttctttctccctgcttctacttctatagtggaattaatttctccttctttctcgggggttttttttgttcaaacttggcttgtaccaattatgattgct

SEQ ID NO: 333440 - DNA, 225 bp, Zea mays
ccgctccggaattcccgggtcgaccgacgcgtgcgcccacgcgtccggtgattgtaaggaataagtaaactccctggtaaaatatatgattaaggggtggaggttaagacactagagagaatataggggggctctaactaccatggcttaatcatatattttaccagggagtttagtgattgtaaggaataagtattatacatgtctttatcaagtttttttttc

SEQ ID NO: 333441 - DNA, 218 bp, Zea mays
aaaaaaaaaatttaaaatttaaaaaaaataaaaaaaaaaaaaagaaaaagtttaaatttaaaaaagataaaagggcatccattcttataattctatacttactaacactttctttcaatttcatatctcttctatattcacacttaaattcaattctcttttccttatttttacaactttcttaactttttaaaactccttttcttttactcaaattt

SEQ ID NO: 333442 - DNA, 183 bp, Zea mays
tccggtctagaattaccgggtcgaccgcacgcttcacgaagaattaacataggccaattatatcttttttaatgatgtatactgagtttgcggtgatcaggaccctgtgtcaccacctgggtcaattttactaaacattagcaccactagccttaaatacatactacaaagtctgatttactc

SEQ ID NO: 333443 - DNA, 281 bp, Zea mays
gaatttccgggtcgacccacgcgtgcgcccacgcgtccgaccacgcgataccattcttatacttcataacatcttcaggatttcaacagaccaggttgaacactaatggtgatctgcgtgaacatgctcatacactgacagagataaaatatttcaaaaaagtgatgaccttcattgagccacatctagtacccactactctacaattgattaccaactacatactctcatgacgaccctataactaaatacttattaaagcatatcatgattggcacaat

SEQ ID NO: 333444 - DNA, 343 bp, Zea mays
gaattcccggtcgacgacgcatccgatcacgacaaccgctacagacgctcagactatccataatagaaggaaacggaatggctgagcgcctattcctaatctcgtgcgaagaacactacgaaactttttcgccaatactcgagaaaggtgctagcgtactcactgtcgaacttctactgaaccgcatatccatatataaacttgagttcgagatgcaaccccttttcattgaccgagtcaaacagacccgttcgtctcgcttgttgaatgacactgtgcatggccggtttgtacatgtacccaaccgtacatcagcctattcagttcaagaccaatgtatatg

SEQ ID NO: 333445 - DNA, 351 bp, Zea mays
  unsure (1)..(351): unsure at all n locations
gaattcccgggtcgaccgacgcgtacgcccacgcgtccgctgtcgtcgagtcatatttattgtgatcatcatggttgtttggaggacaganaggcgagcggagcctgtgtaggtgttgccatgagaagaccaaagaggcaaatgccaggtccaaccaacgtgagccctctttgttttggacttttggtggtgatgttgaccagaccattgatgttgaagtggcaagaatgtcagtgtcaacagtaatcggataaatagatggtatttccctgaccctttgtttgtagaacttgaatgaacctggggacagaaacacatttgagggttcttgtataaatcaaggtcaagatc

SEQ ID NO: 333446 - DNA, 387 bp, Zea mays
cggtcttgaattcccgggtcgacggactcatacggcaaaggactactaaccttgtgaagcggctttagcctactgaagtgaagtcccgagaaaggtcattttggatccggcgtcggagtgacacggatctactaccccaagggcttttaatgggtcatggaggatgtccccacaagcgcagcttcattccagcagtcatactgtttcatgactggtgaggcagatccagcaagctctactacatcaaataacgattctgcttcctttgaccatccatttgcttgatgtatgacacgcttttcactgggaaaataacacttaaagacacatttctgtgttttcaggaagaaaagatatacatttgttcaagtcattcaccatcattcc

SEQ ID NO: 333447 - DNA, 340 bp, Zea mays
tattttattattatttttttttttttatttattattttttttttttttatttatttttttttttttttttttttatttttttttttttttttttttttattttttttattatattttatttattttttttttttattttattatttttttattttttttttttttattttttttatttttttttttatttttttttttttttttttttatattatttttattttttttttttttttttatttttatattttttttttattttaattttttttttttttatttctttttattttttattttattttctttttttttttttttattttttattttatttttt

SEQ ID NO: 333448 - DNA, 285 bp, Zea mays
tccggtctggaattcccgggtcgacgcacgcgagacggcgactagagcatggcgttccagtttcggatgctggatcggtctgggctcgagagtcagagtcactttccatcgtgggggatgagcgagcccgttgacatgtgcctccgcacggctctgtatgagtcccacgccatcatcttctgcgtcaaggaccaccttctgcgcatggcgcgcttggacagcgtcttctttagtagagcgtcatcttgaactccaacctgctcagaccctctcaatgctttacgt

SEQ ID NO: 333449 - DNA, 382 bp, Zea mays
  unsure (1)..(382): unsure at all n locations
atcccctggtcggccgactcatactgcttctactctatctcgactcatttttcgctctctantctccaccccttcctctagcaatagtaccttctcaacccggcaaatgatctcactaattatgattctattgctaattcaactttattctattgctcatttttaggatgtactctcctgattccctactaatgttttttctattttccctaaacatgatttctcaatcactatcaatgtgacatgaaacgaagcttctacatctttgatttccaatatagttaatcctatttttattaaacatccatctctctcttcattataaattcattataagttttattatcattttacattcacttttatcattttacaatttctt

SEQ ID NO: 333450 - DNA, 334 bp, Zea mays
ggtctagaaccaccgggtcgaccgcacgcgtgcgcatactcgtgggttgcagaatatttgggctttcagagctcgcaactggcaattcgcatctgcttatatttgatatgcagcaagcctgactatcacaaacatgtgaggaatgccgttgtaaatcagctgaaggagttcatgatacactataaaggttatgttccaatctaatataacgtacacttgcagaaaactaaaaggcctgaggaaatcggataccatgttaccttacatgcatgttcagacaggttagctgctaaaatctatttgttgactatctttcacatacacatgcctattt

SEQ ID NO: 333451 - DNA, 127 bp, Zea mays
aaaaaataaaaaaaaaaaaaaaaaaaaaggaaagtgttaaaaaaaaaaaaagggaaagaaaaaaaaaaaaaaacaaaaaaaaatacaaaataataaaacctaaaaaaaaaaaataaaaaataaaaaa

SEQ ID NO: 333452 - DNA, 272 bp, Zea mays
ttcccgaaccagacccacgcttccgcccacacgtcctctgactcttgttaaaaattataaacccaaacaaacatataaaagataaagtaaaaataaaaacagatcacagcaaaactaaataacacatcaaaaaaaaaaccaataaaacaaaaaaatctataatataaaataaaacctatatcaaaaccctcacaaaaacatcctacaacttacttccaaaaacttttcactaataaacaaaatattacctattcccatcttacactattaaa

SEQ ID NO: 333453 - DNA, 310 bp, Zea mays
attcccggctcgaccgcactcatacgcccactcgtcctcccactcgtcctaatagtattttgctaaaaaaaaaaaaaaaagaaaaaagtaaaatttaaaaaaaaaagaaggaatataaaaaaacacccactcttaactttctcaacttacatacacatccattctacatcactaccacattttatattttcacctaaattcaataacctgccctccaaataacatctatctatccatgaaaacccatccacaaccaaaccaaatcaccttccactacattccccttcttccaactagcttatcaccttat

SEQ ID NO: 333454 - DNA, 316 bp, Zea mays
tccggtctggaattcccgggtcgaccgcacgcgtgcgcgcgagactgtgcgaccgtgagtgcttcttggtcagggtctggatcgtcccgaagtgtccgttgtcgcccgtgtgcgtgtgtgatgggtttctgtcgctttgtagcagtagtagcagccttgcctgttgggctggtagtggtacttccagtgccaggtgccggctgactgtagtgtgactctgaatgctgcatctgttctggggttgaaaaaataaataaaatccaacaaaacgagctcccttcgaagcgcaaaaaaaaaactgaaaaaaactttaaat

SEQ ID NO: 333455 - DNA, 363 bp, Zea mays
atttccaatcgacccacgcatcactcaaaataacatccttccttccaaaaaaattttacaataaaaaactacaatacataaaacagctaaagttaaaattataacatcatcacggtactccaaatacaattatacaataaacccctactacacttgttcaattatacctcttctcatataccatacactcttaccctccaccattttctactccacaatcttaattaaactgctcaaatcattattactattcccaatcgataccaattcctacccattacataaatttccttttcccacattatattttttcaaaaatttctatctcttacattctttcttcttataaattcatctcacata

SEQ ID NO: 333456 - DNA, 193 bp, Zea mays
aatttccaattcgaccgacgcgtgactcaacctactgagagcccagtcatttcactctgcaatccttctcagcacaatatccaaggggtcaggccaaaattcaaaccgaagaacgctgtacacatctctcaccgacaacatctttacggtgaccgcacaagatactatagccaactccaggaaattcaccaaa

SEQ ID NO: 333457 - DNA, 396 bp, Zea mays
  unsure (1)..(396): unsure at all n locations
actatcattaccactttcacaacaccgaatatgccctctacagctcaacatcgatcaagagccnaagaagatattcatatcgggtttggcaaactattatccatataacctgccaaagtttctgtccactaaaaacactctcatctcactattgctcgaatccagattctcatagcatgcttctctaacgactaatgcatgcacacttattcctctataatctatatggatatcttcatcaccaactcactaaatctttagcttatcaagaacgctttcttagaatgaatctacttacatagcggcatctcatcatgacatggtaaataagaaaaagaagcatctgttttcatttaacctacagcaacttattgatcatcaacacaagtctcactt

SEQ ID NO: 333458 - DNA, 271 bp, Zea mays
tcctgaattcccgggtcgacccactcatactaaaaaaaaaaataaaaaaaaaaaaataaaatttaaaaaaaaaaaaaaaaaaaaaaagaaaaagttaaaattaaaaaagggggccgcttatcaaacatccctttttacttaatcctcctttctatcgtatatcatattctatactcatatcccattcaatttatctcaccattttttttacaaccccttctcttttaaacccttctctttacccaacttattctcctttcatcaaattcct

SEQ ID NO: 333459 - DNA, 286 bp, Zea mays
attcccttctcgacccactcttcctcaataaatatcatcttttttccctttaaaatataaataaaaaaaaaaaaaaaaaaagaataagttaaatttaaaaaaaaaaaaatgccataaaaaaaaaaaaaataacatattcttacaaataatattttccaccttttattttttaaaattactaattcttcttactttctttttatttttcaactctttcttaccattcttctcctttttaattttattttttatctcattatattccattttccttttttttttcttt

SEQ ID NO: 333460 - DNA, 398 bp, Zea mays
cggtcttgaatctgccggtcgccgacgcgtacgcccacgcgtccgccaaaccctagctcccgatctcgatggcgaaccctcgcgtctgcttcgggatgaccgtcggcggcgcccgggctggccggatcgtgatggagctgtacgccaacgaggtgcccaagaccgcggagaacttccgcgcgctgtgcacgggcgagaagggcgtgggcaagtccgggaagccgctccactacaagggctccaccttccaccgcgtcatccccgagttcatgtgccagggcggcgacttcacccgcggcaacggcaccggcggcgagtccatctacggcgagaagttccccgacgagaagttcgtgcgcaagcacaccgtccccggtgtgctctccatggccaacgcc

SEQ ID NO: 333461 - DNA, 195 bp, Zea mays
gaatccaccggatcgaccgacgctaacgaccactcgtacgctgaacatgagttttccctctcaattcacaaacatttctacatgagaacagttgacattggacaattcccgggcgatcctgaacacaaataagctatactcctacaaactaaccaagaccacaaacaacaaaactactctgacatttaccaacac

SEQ ID NO: 333462 - DNA, 354 bp, Zea mays
tcgtgagcggacgcctttttgccattaacacccccaagttcgacgtggagcaaaagtagggcttctacacctgggtggagatctactgcgcccccaagcctgcgctgctgctgtccaccgttagcacgctctacactctatggctcgacatccatcagtgcatcttcagcttcttcaaccacttccgcatgcacacctactgctcctagatgcatatggaaatgatcagcgccgactcgataaagcaagagctgttcaagaacgcttgctatagcggatgctgcttgtagaggggcatgtcatcatcgcatgggaggaacaataagaagaggcagcaataaattaatcttaaac

SEQ ID NO: 333463 - DNA, 217 bp, Zea mays
cctgaatttccgggtcgaccgacgcatgcgctctgctctgaggactggaggtagtgctggtaagctttctttgcttctggaacaacatccggtaatgtgtaactttacgtgctagcaactacttgctgtttgatctcagacactttaatgatccacttcctgatatactctacattctataacctttcggtctctcccttaacattatgctagccac

SEQ ID NO: 333464 - DNA, 249 bp, Zea mays
attccgcgggtcgacccactcatccgcatacactatattataattactagaataactttattaccttcaaataactacatcttgaaagggcttaaacttaatgctcgcgaacatcatcatctcctctatatccatttccatcattaacttcttcatcaactacatcttctaaaaactttccttctactccttcaaactctctcttttcaacaagaaccctaccatcacctccctctagatccatacctc

SEQ ID NO: 333465 - DNA, 300 bp, Zea mays
gcgtccgaagaaacaaacggcgacagcaaacacatataagaagaggaggaagaaagaagacgagcaggctgacaactaagcagatcggggcgccaactaaaaaggggaccgccgatcggagagaacacgtcgacggacgccggcaggcacgacagagaggaggaagacgagagcaagctcaaagaggacgatccgctcggctacaaggacgcgcccgaggacaccttgccgatcaagaacggactctcgagctactacacccgcaagtctaaggcgggcaccagcctcaacgaggccaca

SEQ ID NO: 333466 - DNA, 228 bp, Zea mays
aataacttagtgggagaatccttctttcctagggaaagggtcaaaggtttaaaggctgaaaaattctccttccaatatggtttttataaaaaacaactatgccagaactcacatgaaaaaacatgtgttggaggcacacattatgggaaaaacggtaaaaaaataggagtacagaggtggaacacatgaaaatacaaggtggaaggcatgtgttatgtggaaataagt

SEQ ID NO: 333467 - DNA, 145 bp, Zea mays
gaattcccggctcgacccactcgtcctaaaaaaaaaaaaaaaaaaaataaaaagtttaaaaaaaaaaaaaaaaaaaaaaaaaaaaaggaaaaattataaaggaaaaaagggaactaaagtccttcctttttaaagcttccatcct

SEQ ID NO: 333468 - DNA, 185 bp, Zea mays
accggtccggaattcccggtgcgagccacgcgtccggcactccttatggatacacccaagctttccctttccttaattatctaggcgccaaatcgggcttttataacgaccgacggggcttaaactcccgaaccgttgctggatgcggcccttgaggcacctaaacacaccctgatgactcctgt

SEQ ID NO: 333469 - DNA, 336 bp, Zea mays
accggtttcggaattcccggctggagccactcattcgaagaaggtcccccaccaaatgctgcacttaataaggtgcctcctacccgtgccaaatcgccaatttttacaagttcaaggggaaagaacttcagtgatacaccattaacacctgtctgagaaaattccaatgcaacatttactcctccacatcgtcacattattcttagtcctaaagactctaacagagttcaacaattctctccaaataatcttttgtcaaccaaaacatgatttgtcaaagcttatcttaaagccctttgaatagcatttattattctatctctttattcttttttc

SEQ ID NO: 333470 - DNA, 175 bp, Zea mays
cactcgtccgcggactcgtgggtgaatattcaaccgcataaaaaaataaaaaacaaaaactaaaaaaaggaaaaaataaaaaaataacagggccattttaaaacgagaccaagcggaacaaacacacacatgcaactaattaccaaaatctataagatcacctacattcaattca

SEQ ID NO: 333471 - DNA, 185 bp, Zea mays
atcactgtactacagaagacttcaaacttgctcaaatttatatcgatgactctgccgacgaactgatgtatactaaagcaatcctcaaggatatcaaaacgctctatacaatataagtaacaagctttgttaccacttcacaccatgtacatattgcactactcaccgtctaactgatccttaaa

SEQ ID NO: 333472 - DNA, 250 bp, Zea mays
gttatacatcccgagccatcaatgtggactattccagcttacctccacgagcatgctggggcttagctaagagagggggttacttaatttcaagttattaaccttcttgacgcaactcccaacttgggaaaaccaaggccttcccgacctaaatttccaaacgttaaaccctcaattctccaagtggcacattaaaaacaatgcctgaccagttcggaatcaggaccaagggcccaaattaattggcaac

SEQ ID NO: 333473 - DNA, 369 bp, Zea mays
  unsure (1)..(369): unsure at all n locations
taccggtcctgaatacccgggtcgaccgactcatacagctacacatccactttcttacacatcaactttactccctcatccatcattaccncatctggctcaatttcaaaaagctcgggtgctcaaaacacccccacacaaacaagcanccctcttaatacacaccacctcatctattcccccttaacaagccaaaatcgcacaatttttttcctagcctaaaccacaaccattataacccaacatcaaactctaataataaccttgatacttacaacatctacatcttcaaagttcttaaacttgtacacacctacattatcatcttctccaacgccatttccattattaacttcttcttctaccaca

SEQ ID NO: 333474 - DNA, 467 bp, Zea mays
  unsure (1)..(467): unsure at all n locations
taccggnccggaatncccgggtcggccgacacgtacaaaagctccccccgtcacctccctcgcccttttctcctccaccgtcgacgtttcccaccgcggcgtacttataaaggccggtgttcatgaaaacnatncatgatctgatccgcacagacttgcaacagtacatggcgagcgtgaccttgcgcgccggatgccgctcctttttcttggccgacctctacatgccccatctcgtcaactgcgtcattctctccacctcccagcgagtcacccggatgcagtagctcctgcgctttcatgagccatcaaatactctcccaaaccgtcaatcaatcttctatgactaactctcatcatcttttcttatcaatatcaaacttccaagttattattttcctttttttaaaactttattctctccaaccgctgttaaacctaaacagcagtaaaaagagtctcaactg

SEQ ID NO: 333475 - DNA, 165 bp, Zea mays
  unsure (1)..(165): unsure at all n locations
aatcacaacaacacttncttacaattcttaatagcagcatcccaatatattttttttttttgctcccggaacaaaacaatatttttatcatattctttaaatcttttccatcttatcatacaactccaaattcctataaatcacatcatttcctaattttatcca

SEQ ID NO: 333476 - DNA, 264 bp, Zea mays
  unsure (1)..(264): unsure at all n locations
accggnccggaanncccggggcggcccgacgcgtacacggacgcntnnncngactcttggggaagaactgaaacatcaagatggtgtttgcttctgcagtttactattgagaagagtgggctaaactaaantcatgtattatgctatgcattcagaagatgatgctaaactgaataagcacatcaatctgatttttctatgcacttttactatgtttgtattatagatatgcaatgcaatctatgcactaaaacgttcaactct

SEQ ID NO: 333477 - DNA, 338 bp, Zea mays
  unsure (1)..(338): unsure at all n locations
accggnnccggaanttccccgggtgcgagccgcacgcgtaacagcggacgccccgtgggcggaccgcccgtggggaagaaaccctgaaacccatcaagaatnnngtgtttggcttcggtacagtgtttacctattggaggagtagtgagtgcgtgaaannctgaagnntcatgtnnattatgnnctatgcnnattcagaagaatgnaatgctaaactnnngaataagcnnacatcaagtcgtgagtttttctaatgcccactgagactatnnngtttgtattaattggttatgcccaatgcaatctaaatgcactannaaacgttcaacttcttaaaa

SEQ ID NO: 333478 - DNA, 210 bp, Zea mays
tcattaacagtctgtctcaacttgtaccaacgcacatcagcctgaaaagtactttcacatctaccattccgatagactcaaagccttcggacctatatctgtgtctctcaaccgtgccaaccataatcaacaggtcattgtattctcttgtatcaggcaaattttaatataatatatgactgtgttaaatattattatagactctccttc

SEQ ID NO: 333479 - DNA, 454 bp, Zea mays
  unsure (1)..(454): unsure at all n locations
ccggnccggaanacccgggtcgacccacacatacacccactcctccgcattcacacctgccgttctaaacaccaatgcaacatctacccngccgcagcgttttaaaaaagggaggcctaaacacactaacacactacaacaatgctccccaaacagctgtatgccaaccaaaacaatatttgtcaaggctgaacataaacctttttctttagcatggagcaaccaaaccctgtatttctctgtacaaacctaattgcctaaccttttccatttccatccatttttgcttctattttatacccaacatctccagcaaaagaatgctttatttccaattacctttttcatctccccttcaccttatccattttcttacattaccctcttactcctaagaactcttttccgcaccattttacatttcattttaattacttttggatccttttattcc

SEQ ID NO: 333480 - DNA, 191 bp, Zea mays
  unsure (1)..(191): unsure at all n locations
ccggnccggaanncccgggtcgacccacacatacacccactcgtccgcatacacgtgggaatttttataacaccaaaacaacatctacaccacccgcggtttttaaaaaaaaggtggcctaaaaacactcnccctctataacaattccaaccttacatcctcgtgcctcccacaacataacttttctatgc

SEQ ID NO: 333481 - DNA, 178 bp, Zea mays
aaccaaaacaagatttgcaaggctgagctaacgccctctttttatcattgaacagccaaacacaatgtttctctgtacaaacccaattgcctaaccgtttccatttccatgcatttttgcttctatttatacccaacatctccaacaaaaaaaggctttagggccaattacttttttc

SEQ ID NO: 333482 - DNA, 103 bp, Zea mays
  unsure (1)..(103): unsure at all n locations
cactcttccntcctctcaaaacagttcgtttactaagaccctgttctacccccggggctgttttttatgaaaggacgctcgctcaaatactnctntcttctat

SEQ ID NO: 333483 - DNA, 309 bp, Zea mays
aaccagttgaatcgtaaaggacttcaggcaagtgtttctcaccattttttatttcccccccaaagaatatatatgagagctgtgtatctaaggtagaaaataattaggctttagaacacaagctgctgtagtttttgtcagttctcaccatcttttcaggaacatcatattcagcaaaccaaaatcacgtctcaaacctcattgtcacacttaatcatgttcttcttagtcctaagtttcacttctgttttttaatctcatgattaaatatgaacaaactgaattgttgcaacatggtattttaaaatt

SEQ ID NO: 333484 - DNA, 136 bp, Zea mays
  unsure (1)..(136): unsure at all n locations
ctggctcgcgctccncaactcctgccccgtctggcgccacgagatgcccgccgacaacgccgccccgcgcgctgacgccgacgacgccgcggacgaggacgccagggtcggcctcaccatctggaggctccccggc

SEQ ID NO: 333485 - DNA, 433 bp, Zea mays
  unsure (1)..(433): unsure at all n locations
accggnccggaatncccgggtcggcccgcgagtacggttcaaactgaggtcgacatatatgctgtataaagacaactttgccttgtactatgtggtggtgttcttagcagtggtagcgcgtctaaaacatccttcaacatcncacaacattgtgaacagaatctgctgggccttctgtgtttatttggaggcagnnacaattaatctttatttgcgctngaaacaaaataccaagattgttgagccttttacagctcattattgtttttctcagtttttttcaaggcttttttttcgttcatatttagttcttttttttttttattttctttttatcttttctttatgttttcttttaattcttattatcttttatttttatactttttttattttttcttctcttattttacttttttttttaatcttttta

SEQ ID NO: 333486 - DNA, 83 bp, Zea mays
attttaaactgtggtattgcaatgactaaagtatattatagtatttcaaaaaaaaaaaagggggagggaaaaaattttttttt

SEQ ID NO: 333487 - DNA, 381 bp, Zea mays; identical to SEQ ID NO: 258879
  unsure (1)..(381): unsure at all n locations

SEQ ID NO: 333488 - DNA, 427 bp, Zea mays
cggacagctggggctttggctactgcaactgcgtgttgacaattgagggttaaaaacaggactataaatggcccgatgcgtatatctgcaggtggcatgaccagcgatggctgtcgaaccttgaattaatagcacatgatgtagattagagtcagcgtggctagagaatggggattccaacgcacgtcaggtgctaatgctgttcgtgatgtcaacatgatcatatgtgatgaactgctgatctatatacactgagatacatgtactgaatgccaacatggagcaccaaatgtgtgataatcacctgctaatatagctgtctgatgaacagatggatgtgattactgatatgctctcatgtactgatactgctactgtccggaaactatgggctgacgttctagaaggcccaggcatacttacgcgt

SEQ ID NO: 333489 - DNA, 411 bp, Zea mays
cggtactgacccagctcgtacccacgcctcctgccactcttgctcgcacagcgtgcgccactcgtccgctcccatgcgttgggttcgactgcacaccttctggggtggagttcggagatgttagctcatacgttcccgcaagctcaactttcatgaagggcagttgtcgtgaacgctacattctactcggcttgcccgatgaatgaccttgtcactgacggcacgttcgctctcgttgagaagctggactgcttcaacagctgggttcctgcctacgactactacgactggtcactacgcttcaagtggtcgagaccgtctaagctgatcccgagaagcttcactacgcttgaatggaccattcctgtagactccccctcttgcgtttataggtttaagcattttggtgcc

SEQ ID NO: 333490 - DNA, 442 bp, Zea mays
atgaaattggaccgatcgtagctaatagcaacggtggagttaaccatagtagaaatgaagggactgagaatttgtcctcagaaaaggaagcagctgacgatcattcatcggtaagcaaacctgtgttaccggatgcccacaaattaacagaccaagagaatggaaatgatgcagtatagagagtggatgttagcgtagctagtcgttctgttgcatctgacgcgttcactgaaaatcagtggctcagacgtgtctgcttcatcgacgcgcgtatagctgtgaggcatagtgagcaatagtttcacgaacatctatcaagaatcacacgaagatgcagcatgaggcaaatttgtttcaaactataaaccacgatctagggttaagcccttttttctttttccccacgaattttttgatgtactgtaggttatgtgatgcatat

SEQ ID NO: 333491 - DNA, 204 bp, Zea mays
agctcgcctgctgcagagtctaaactccaaacgatctgtactaacttatcgataatgaggagcttatgctgtagaacctcgactagatctatcgacatcgaacccagctggagaaaaacctatgacgaatatgctccatcatgattaccgtagcttgaatctcggactcagcatctaacgcagcactgttgaaagcacattagt

SEQ ID NO: 333492 - DNA, 254 bp, Zea mays
aaaaaaaaaaaaaaaaaaaaaaaaaaaaggacggactttataataagatccaagcttacgtgggcatgcgggcaacgttataggggatccaatctaatcacctacatccaactaactgatcgttgttttacaacgtcacctctgttaaaaccattggccttcctaactcaacgtccttactggaaaaacccctttcttcccctacctaattagctatatagcccatcaccgattgcccatttgaccaattttcc

SEQ ID NO: 333493 - DNA, 237 bp, Zea mays
gtcacgcgtccgcgcacgcgttcgatttttcaaatcttttttctctttacagggagaattgcacttgcggtagaacagtacaatgcattctattaatactattagcagtgcaataatatgtttcatacattctatttttgaagttccagacatcattaatcaatttataacttaatttatgaaatggagatttatatattgttcgtttgtttctatgtttacatatgttttttacgg

SEQ ID NO: 333494 - DNA, 333 bp, Zea mays
cacactcagaaatgctcccttcttagagcatgatgttcccaaatccacaacaaggtttcaggcgcaagacctgaaggggcccgctaaatcatgcctagactgacaagtctctagcggagccccatccacggagatcttcagaaatgaatcggacgataaatgcactattattcactcacagccattctgcattgggacttttgatggtacttattagaaagatctgctgccttctgtagtatctatattccataacaactgcgagaccaaatctttccgatgcccatggtatgctagctaaaattagactctaacttatccgatccactaatc

SEQ ID NO: 333495 - DNA, 327 bp, Zea mays
cagactcgtgggcggactcgtgggccgacacgtgggcactgcaccggtgccatatgccgggcaagatgcacaagatggccggcatctcggatgcagacattgatctcgacgttcttctctaatactacgacgacaagtcttactataattctaaatccatgatcaacaagtctcgcacttgtcacgcactactaggagatttctgcacgcataagatcaacgagggacacgacatctatacgctactggaaagcgagccgggcaactactacatcctattacaagacgaacacattatctagatctaagaaatttgttcctggttac

SEQ ID NO: 333496 - DNA, 318 bp, Zea mays
cccacgcgttcgcggacgcgtgggggttgttcacttggtattttgtagattaatctggggaagctttggtctatgttgtgcatgtgtaagaaaatgtatttgtatggattgaagttcgtggcgaaagaaaaagaagtagaaaaggactcgaacgtttttatatttcgataggaatatatgcgatgtattgtttgatgtgtgcgatttgtagtttgtataattatattttggttgatgtggtgttaaaaaaaaattttatttttttttttattttttaaattttataataaagggttgcctttttttaggatccaatct

SEQ ID NO: 333497 - DNA, 148 bp, Zea mays
tgccacgcgtacattgttaagggacctaatttccttatcaagtacctacctggacaattgggagcatttgaaatgggaccgggacaatcacgcattactccaatggcccaagtcacaaaggcaattctcgagaacccaaatgacaaca

SEQ ID NO: 333498 - DNA, 90 bp, Zea mays
aaaaaaaaaaaatataaaaaaaaaaaaaatttaaaaaatataaattaacaaaaaacaaaagagagatacataaaaatttactcttgaaat

SEQ ID NO: 333499 - DNA, 154 bp, Zea mays
tccacgcgtccgtccacgcgtccttccactcgttcttcaactcgttcttcggggcttgcggataaatgctaggcgagaaacattcttgtgtgtagttaatacgtcactctgatgtttttgttgttgttgacataatagcagtgcatgttgttct

SEQ ID NO: 333500 - DNA, 432 bp, Zea mays
ttcccggatcgacggatggatgcaagcaaactcatatccctaagaccattatatcattaagccagtccattctcttaccacaggtttcgggggaacccaaatgcgggtcacaacacttaagactacaatacctgcccggcaagtactctccgggcacgttcagcacactcaagctgaatatcccacccagcctaatggatgccaaccgcaatatcaatctacactccatgcgctacatatctcgatcgctactaccctgatggctagcagtaaccaggtgcaaaagctctgagaatatcagctgaggatacttcacctttacaagcctcttgatctagaatcatacaatatgcattcttcattggtcttcttaccaacatttcttgaatcatttatgagcaatacacaagaatgctttagaagtattattac

SEQ ID NO: 333501 - DNA, 264 bp, Zea mays
acgacgcctcccacgactcctccgaccactcctgcctacaaaagtactccggaagatgcggtcagctgtacagctgataagcgacatcgccaaggcttgcaatgcgaactaaactgaattataatgccccttcatggagcgcctctgctggcatggtcttcaataatcatgcttcactcacgccaagcacatctacatctcggacatgatgaaccatgatatccagaaggcgacactcatcgtgctgggagcggtagaactgct

SEQ ID NO: 333502 - DNA, 318 bp, Zea mays
agctcgtatgcgagcgatgctacgtgcactcgtctcctcttattgcagtagggcaataggagtacagttaggtgtgttgccgtggttgtagttgccgatgtgtttgttttatgggctgggctcggttgatgtgttctatgtaagaaagtaactgtattgtttatgcagataccttaccatgcatgctttaagtagcatatcataatctataatgaatatgttttatgtatattactataataaatctcttttttttttttacttattatatttttttatttattttcttattatatattattcttttatatctatatt

SEQ ID NO: 333503 - DNA, 251 bp, Zea mays
cccacgcgtccggcccaggctcccatcggccaaggactggtgtagtggtgtggagtgtggacgtgtgtgtgtaagtgtaactgtgtctgactctatatgaggttggcaggtgcaagttgctatccaccgtcctcgttggctcgttgagacttgagaatactttgaggttgcaatttcaaactgcactatgatgttgtaaactgggagttaagtattacgtgtactgttaaactcaaaaaataaaaatttat

SEQ ID NO: 333504 - DNA, 245 bp, Zea mays
gccacgcgtcctgctactcgtacgtgcactcgtccgttcacgcgtgcgcaaggtgttcggggcctgtctacgtgctacctggggccgcaacattggcctgatgctgctgccatgtagcccagcgctaccccctcggcttcaccgtccgcggcggcaacgactgtgtaaactacatcgggtgctagctcctactgtggtgcgtgctttgatgactatagggcatgctttgcgctggcatctttgtt

SEQ ID NO: 333505 - DNA, 372 bp, Zea mays
ggaattcccgggtcgacccactcgtccgatgaaattattattaaaaaaaaaaaaaaattaaaataaaaaaaaataaaaatatattaaaggattaatattaaaaattttaaaatataaaaaaaaaatatatatattttttttatttttaataatattttataatatttttaattttttattattaattatttttaattttttatatataaattttttttattttatttttttttttattttaatttttttttatttatttttattatttttattttttttttttttattttttttactttatattattttatatttttttatatatattattttttttatatttttattatttttttatttaatttttatttt

SEQ ID NO: 333506 - DNA, 243 bp, Zea mays
cccacgcgtccggcccaagctcccatcagccaaggactggtgtagtggtggggagtgtggacaattgtgtgtaagtgtaactgtgtctgactctatatgatgttggcatgtgcatgttgctatccaccgatcttgatggcttacttagacttgagaatacttttaggttgcaatttcaaactgcactattattctgtaaactgtgagttaagtattacatgtactgttaaactcaataaataa

SEQ ID NO: 333507 - DNA, 308 bp, Zea mays
gttcgcgttagtgtcggcagagacgaagacgggagcggcagttcaggtgaatcaagccggaaggaaagcgccgaagacgaacacaagagtggcctctcccacccgacgctggatgggctcccggttagtcggttacgcaacgcggtgagatcacttgggtccgttttgagaccgcagaggagacagttaccagtatagcacatttcctttaaccgcccatgtaaattcaaggtcgacagaccacacacacagatcattgatagcgcgtacagggagaggaaggtacacagacagaaatggaagagagt

SEQ ID NO: 333508 - DNA, 55 bp, Zea mays
aaaaaaaaaacactaattaataaaaaaaataaaaaaaaaaaaaaaaattataaaa

SEQ ID NO: 333509 - DNA, 67 bp, Zea mays
cggacgcagtggagtgggcgggcgtgcccacacgctatcttaaatttatctgggaccaagggaccat

SEQ ID NO: 333510 - DNA, 232 bp, Zea mays
ggaccggtccggaagacccacgccgaccgcacgcgatcgttaaaactgatgatgggctagcctcatgccctaaagcctgaaatggatgaggggctctggcaatagcaggaggcctacggagggctgcttcctaaggctagttatatctaaacagcagagcgtgtaccatccttaatcccccgggatggagggccaacagcaacaagatgcaccatcatcttacttctttaac

SEQ ID NO: 333511 - DNA, 379 bp, Zea mays
acccgactatattgggtttcaccgaggagagggttcgaagaaacatggaattcttgatgagggttgtcggattggaggtaccatacatcgcacgaaggccagcgctgataaattatagtattgaccgtcggttgttgccacggaattgcttgatcaattttctcagggcaaaggggttgttcaatgacgaggctagtttcctttctgtcgccgctataggcgatgagaaatttcggcgccgatacgtgcatccttacgaggaggattttccaggccttgctgctgcttttgcttctagctgtgctggagaacaccaatgggaacgggtttattaggatgacaggcgaaaaataaagaaagctgacaattggtctggaaa

SEQ ID NO: 333512 - DNA, 121 bp, Zea mays
tacattccatccaatatctacatatatattagacataatcagaaatattcagggattaaggaattctacaaggtgatgttgggtatgaacaactttatcaacaacatctacatgaaacaca

SEQ ID NO: 333513 - DNA, 332 bp, Zea mays
ggtccggaattgccggatggacccacgcatgcgttcgatcatacgtacgatctagactgcctcatcgggctcgccggtggtgacaggatgatgtctgcgaccgatggcaggaagggcaaggacatcactgacgcggctaacagaagcagcagaatcacggagcacactgcttctaacaagaacatgcatgtctggataccccacatcgattctgcgattccacaacgcctaccacatagttagatacgcgtaccaggacacaaacaagccatgtaagacatctgacacagtaaacgcttgtaatcagtcagggaaaaaacatgcaagccgtg

SEQ ID NO: 333514 - DNA, 125 bp, Zea mays
caccatccgccaggtgtctatgatcctactagacatgctcagcattattcgtggactacggagtcctacatgcagggcatggacattattagatagtgcagattcatgtacatcttgaacatcta

SEQ ID NO: 333515 - DNA, 268 bp, Zea mays
ccggtccggaattcccgggtcgacccacgcggacgcacgacgtccggcgggcagatgctagacattacgactgctgctggtgagaagaacctatacgacacatggggcatgcgatacaacatattggcatcttgattaaattacatccggaagagcattcttggacagatcactcaacgtcagtaagtaagctatatctatttggttgcatggctcactgccttgctaatttcgctacatgtaatgcaacgttcacatttgtactctg

SEQ ID NO: 333516 - DNA, 221 bp, Zea mays
tgccacacgttctctcccaacttacctccatagactcctgcactaaataaagggctattgggaacattttacattacacatgacatcagctcacatcactgtatcacgcaactcaacttgcctgcctactagaaataacttcttctcttgcttactactcctagcactcttcctactcttctacattctcttctacctattatacaatctaatcatacact

SEQ ID NO: 333517 - DNA, 342 bp, Zea mays
tgtagtcgttccaacatcaatcaatttgttattactgctcgtaattcttcctcgcatacgggatacttcaataaggaccaatggactaccacatcatattcatttatgcacatttagaatatcatctaaactaacctctttcacttatcagattccaactttgctctcccactctgatgctccatcttcactatcatgaactaactcatattccttcactgtcgaacacattccatcttcttgccacataaatcctagtagatcgcttactatatctactgatcaagcatcatcctttttccaatcggcctaataactatcaatacttcatataaaacttta

SEQ ID NO: 333518 - DNA, 334 bp, Zea mays
  unsure (1)..(334): unsure at all n locations
cttcaactacnacaactttctcatagtttttttttatacgaatgcaagctccaacacattttcctttcattactttcaccccacataagctatcgatacattcaaacttatcttattttccattaaccctttcacccataatcactattacatcaaaaccgattgcttaacaaaattttcctccatatattgccccctccctcaaaaatatcatttctgcattccttaatatcctttccaacaatatatattgcttactttgtacaccaaccacatacacaattatttcccaaaacccttttttttttttttttcaattcccctacaaaaattt

SEQ ID NO: 333519 - DNA, 433 bp, Zea mays
  unsure (1)..(433): unsure at all n locations
ccacgcgtccggtagctgtcgagccggtctccgtttccggcgcgcgcctnnccctnctgcgacggcttcttcggctgggcgcaggtcggagcccctgctgttcctgtgcctgtactcggcgccccgcgggtgccacccggcctgcatggactgcgtcaagtccagccttagcgccgacccgcctgtgtaccagtgcatggaccgcgtcccctacttttttctgcgccgcttcaccgcgccttccgtctccgccgcgcggtgaccactctgccgacgcctaccccgcgactggtctcttgttgctctttgagtcttgacccaacccacccaccaccaaaccggtttcaattcttttttccaacccccacccgctggtgaattagtgtacttctaactttttaacccacctttagattaatggtttttttttttt

SEQ ID NO: 333520 - DNA, 109 bp, Zea mays
  unsure (1)..(109): unsure at all n locations
acttggggggttaccatacagcaatgctgctactgtatgaagggtggagtacacattcnaaagggggggggggggggataaagaaagaaagatatcggacgaccaatct

SEQ ID NO: 333521 - DNA, 194 bp, Zea mays
ctctagctctgcgtgcgggtttttctcttccctctacattatatcacctccatcctcaataattccatccatatccatatctactttttccatacaaacaacttatcttctctatccctatagcacaaagctctcatatctctacatccatttttctcttcatagtgatgcatcatcgcatctataacaatatc

SEQ ID NO: 333522 - DNA, 329 bp, Zea mays
  unsure (1)..(329): unsure at all n locations
cggnccggaattcccgggtcgacgcacgcgtccgcccacgcgtccgcccacgcgtccgcccactcgtccgcccacgcgtccgcagctcgcgttgactacgtccctgggctttgtgcacaccgccaaaaaaaaaaaaaaaaaaaaaaaaaaaaaaaaaaaaaaaaaaaaaaaaaaaaaaaaaaaaaaaaaaaaaaaaaaaaaaaaaaaaaaaaaaaaaaaaaaaaaaaaaaaaaaaaaaaaaaaaaaaaaaaaaaaaaaaaaaaaaaaggggggggccctttaaaaaaatcaaattttactacccggggttggcaaactaataatttttt

SEQ ID NO: 333523 - DNA, 302 bp, Zea mays
  unsure (1)..(302): unsure at all n locations
ttcctactcaaccacaccctctntagtatatgttttacgaccaaatgatctntcacagtcanctgccaaaagaaaaaagcgccccacaccaacaaaatctaccacaacaaccaaactaaaaacaaaaaaaaaaatcaaaaactaaaaacaaaccaaaacaataccttactataattacaatcaacaaaacaaaaaaaaaaaacattatatagctcccctctctttaaaaaccccatttcactccccactcttttaatccttttaactttcttttaactttacataaatctatttaaacctcc

SEQ ID NO: 333524 - DNA, 209 bp, Zea mays
cggaattcccgggccgacgcacgcgtacggtaacattcttgatcgataactaacatgttatgagtggagggtatattcttatcacaccgaacatgtgcatgtagcccctgtttccttctatctcgtgttctttcatgtaaccatcacaatatatatacatgttgcttaaataaacaaaaaataaaacaaggaatgtactattattatat

SEQ ID NO: 333525 - DNA, 300 bp, Zea mays
  unsure (1)..(300): unsure at all n locations
caccggtctcggaattcccggggcgacgcacgcgtacgcggacgcgtgggtttgcattgtaggctgtatcggttgtgttcgtgtgtgtttgcccgcgcgcttttttggccgatgcttgtgctntnaataactgcccctcctttgtttgtgatatgccaaaattttgaagtgagtacagtacaaccaaacatgttgatgatggaaaaacgaatggagaaaggggaaaaacaaacaaaaatggtttgggacggcagtgttccatggtnnaaaaaaaaattnaaaataaatattataatttat

SEQ ID NO: 333526 - DNA, 413 bp, Zea mays
  unsure (1)..(413): unsure at all n locations
cggtttggaatacccgggccgacgcacgcgtcctcccactcgtccggccaaccgcttcatgtcatttgtaaacgctggaacctctccgtggacgaaatactggctttggggcaagaaaaaaaaaaaaaaaaaaaaaaaaaaaaaaaaaaaaaaaaaaaaaaaaaaaaaaaaaaaaaaaaaaaaaaaaaaaaaaaaaaaaaaaaaaaaaaaaaaaaaaaaaaaaaaaaaaaaaaaaaaaaaaaatnggggcgcccttttaaaaaaaaaaaatttatattccccttcaattaaaaattaaaaatttttttttagtgcaacaaaaaaaaaataaactgccccctttttaaaaacctttaaactaaaaaaaccccgctttaaccaaattaaataccttttaaaaaaaaacccctttt

SEQ ID NO: 333527 - DNA, 297 bp, Zea mays
  unsure (1)..(297): unsure at all n locations
gaattcccgggtcgaccgacgcgtcctgtcacactttatcctacgcaagcacactgntctgaactgggagagaagaataccatcgcgcgacgggattacaatattagggagtagagcacntactgttggccataaagacggcacaagaatggtgaccttataagagctatgatgatgcttcctccaaaaaagataccaccatctctgcacacgcatatactgactgtgctgaatgatacaatggtgcgccaaactgctatcgacgttaaatgtgtgctgctgatgtactacaagaac

SEQ ID NO: 333528 - DNA, 303 bp, Zea mays
  unsure (1)..(303): unsure at all n locations
cggtncggaattggcgggtcgacgcacgcgtccgcccacgcgtccgcagtatgtatttttgccttgcgatgcagtcccataagtattgctcccgccaaaaaaaaaaaggggaaaggaaaaaaaaaaaaaaaaaaaaaaaaaaaaaaaaaaaaaaaaaaaaaaaaaaaaaaaaaaaaaaaaaaaaaaaaaaaaaaaaaaaaaaaaaaaaaaaaaaaaaaaaaaaaaaggggggggccctttaaaaaaaacaaaattaacttacccgggcttgaaaaataaaaatttttttaattgggaaccaaa

SEQ ID NO: 333529 - DNA, 153 bp, Zea mays
aaaaaaaaaaaaaaaaaaaaaaaaaaaaaaaaaaaaaaaaatttaaaaaaaaaaaaaaaataaaaattatataaaaatatatatattaaattaaaatatatttaaaaaaaataaaaaatttaatttctttttcccttcatttaaaaattataa

SEQ ID NO: 333530 - DNA, 312 bp, Zea mays
ccggttcggaattcccgagtcgacgcactcgtcctctccactcgtccgaaaaaaaaaaattaaaattaaaaaaaaaaaaaaaaaaaaaaaagtaattgttaaattagaaaagggggtaggaaaaaatacttaatttatttataataaataaaaaaaaataaaaaattttcttgccactctttattttttttttttttcgttttttttttaatctttcttcttttatatccatttggttttcttttttattcccttttcttattttatttattttgctttataaaaatcttctttttaaaaccttttcttttt

SEQ ID NO: 333531 - DNA, 461 bp, Zea mays
  unsure (1)..(461): unsure at all n locations
ccactcatacctcccactcttcctcttactcttgtttataatttaaaaaaaaaaaaaaaaaaanaaagttaatgttttttttaaaaaagaaaaaagccccccccaatcnnnntntatcttatttctttaatctatcttcaactttattttcttatttttattttttatattttttttttttttatttntacaactatttatattataatcatttttacctttttattctctttcattcattttatttcctattattcctttaaattataaatcaattttcttttttcatttaatcctattaccatatactctttaaacaatacttatacattctcctttataccttttcaatttttacatatctcttacttcatttccaattattttctattccaatttcaatcaatctatttatctattcatttttctaataacttactttatctttaactttatatatc

SEQ ID NO: 333532 - DNA, 369 bp, Zea mays
gaatacccggcgcgacccactcttccgaattataataaaaaaatttaaaaattaatataatttaaacaaaaaaaaaaaaaaaatgttatttttattttgaaaaagaacactgcccccctctcccctccaaaccccccatcctacttactatcccctcttttcctcccctcaccttaatttaccacttttttttttttttcacccttatttaaaaacctctttattttctaaacccatttccttcccaaaacactcccctttccccactcttactccttttccaacatcccctctctctattccctctccaccattttctctctccccccccccttttttccctcccccctttttcgtccccttattttc

SEQ ID NO: 333533 - DNA, 148 bp, Zea mays
  unsure (1)..(148): unsure at all n locations
ccctccccttaacccttggcaaaattaaaaaaacagggnntaaaccggggaccggggaaaaagaaaaaggagacnngggaacccaaaataaaaaaaaacgggccggccccttaaaagaaccaaaattaccttccccgtcattccaacc

SEQ ID NO: 333534 - DNA, 471 bp, Zea mays
  unsure (1)..(471): unsure at all n locations
tcttcctcccacgcgtccgaaaaaaaaaaaaaaaattttaaaaaaaaaaaaaaaaaaaaaaataaattgtaaaatttaaaaagaagaaggggaaaaaaataaaaaattaatangttttttatattttcaatttttcctttcttttttttccatccttacacctcttccatttttctttttaaactcctttaactaacccccttttcccatcttttcaccttctaaatccttaaaccttccaatttacccctttttcccctttccccctttccccttttgccctttttcttttttattctccgactcttctccttttcccactttttaccattcttttatctttattttcactctcccttttcccctttttttttccccttttttcctctgttttgttactcctttccttcccctttttattttttcactttcctagcgcccctttcccttttctttttttccctttttttc

SEQ ID NO: 333535 - DNA, 110 bp, Zea mays
tacctaaattactcttatttgacacatcttaacaccatcaaaactcccaaaaccacttcattaccatactccatactcttaactatattaccgttttttccatactacac

SEQ ID NO: 333536 - DNA, 222 bp, Zea mays
  unsure (1)..(222): unsure at all n locations
cccgggncgaccgacgcgngcgnggacgcgtgggcggacgtttgggcggactcgtgggtctgtttggataagggggatggagtccaaatgcttaggatttagtgcaactttgaactaaatttctagagcaacccccttatttgagcacccatgtatgagccagattatgtgattccctgtaccatcaaccagttgactaataaatactcacctgttgcctgt

SEQ ID NO: 333537 - DNA, 238 bp, Zea mays
  unsure (1)..(238): unsure at all n locations
cggaattcccgggtcgacgcactcgtcctataactccattctctactctatctataactctaacggcaaggatctcaacgtccgtatgttcacctttgaccagacccagtgcctcttctttctcnttttcttctgcatctactttatcttatctactcttctattaaccaaattatgttattcccttctccttttttcattttacttactaatacttacctttttttctattaaaatt

SEQ ID NO: 333538 - DNA, 170 bp, Zea mays
accggtcttcaattcccgagtcgacccacgcatccagatcagtctataactgatactttcaaagtttctatcgtgatcaatagcactccctttttaagacacagcacacggacttttgattatgaaacatctagtactttcattaatttatattctatacaaacctacta

SEQ ID NO: 333539 - DNA, 192 bp, Zea mays
ctttcacgttaggaaaatgtgtacatggcgaatctcgactagcactgctcttagggaccaggcgatcgatgagttcatcaagattgttgcccacactgctcactctgaagaccttactgtggtctaacgaatcctaatgtctggggcgatacatgaccgaagcggcatccattggactgttgggtgcttcat

SEQ ID NO: 333540 - DNA, 268 bp, Zea mays
cccacgcgttcgggccaaggtggacgacagcttcttcatcgcggcggggctggcggtgccggtggcggccgtcatcggcaagagggccagcgggcagatcccctacgtgaagagcgtgaggctggacctggtccccaacgtcgtgttcgtgccgttcgtgacgctgctcggcatcatcggcgccaccgcgtggcaaatgagcagcaagagcgctaccgcccaggatgacgaggactccaactaggaggagaagaagaaggagacgatg

SEQ ID NO: 333541 - DNA, 327 bp, Zea mays
gtaaaaaaggcgtgcaactttgacgttaactccagctactgccggtcctgcatttaagggcatgcgtgtatttttatactatgttccagcaagtgtgtgtattttttatataccatctaatttttgttgtctgctagtttacttttaaactatagcacgataaataaaaaagaatggagatggtatatatgatctagctaaggccttgttcggttattaattgtcctattccatatgtattagatgggattggaaaaaattatgaataatgttcacttgtttggattataaacaaactcaatcttgttcaatccatatggattgaga

SEQ ID NO: 333542 - DNA, 469 bp, Zea mays
ctcggcgcgccattcccggatcgacggacgggtgcacgcgtccgagactctatcggatgagcacgaggtcaagatgtccaagatcaaggactccggtgatagaaggatcatgcggaggtcggagagatagtctcacgtcccaagggcacctgcggcaacactcatgtttagctactgctcctgctgcaactgaccagagatggctattaaattctgaggctaatccactaattctaggacctaattttggtgctctccaactctcttgctcttacataccctagctgtgacatttctgaaataacatcttacacttgtccgtgccaagatttatgtcgaaccaattttcacagatacctgctgaatgcttctgtgtaacccagttctgattgggctattttaccgtgtagatctggctcctgtaggtacaattcaagctttactgcttcaatctgccaaactagaatat

SEQ ID NO: 333543 - DNA, 294 bp, Zea mays
cggacgcgtgggcggacgcgtgggtttcgcatagaaagttgatcatagcaggcctgtggcggccttctctggcatgtaatataagtcaaagttgtcccacttgaagctctggtctttttgtccttggactttggtttgcgttctggtgaggtagtagttggtatgttcgggcttcaatcctagatgtcatgaaactgttgtaatttcattgcttcagtaatgaactttggattggtccgctgtgaaaaagtacccaaccctcttggtgtgtatgtttcagctctaaaaaagcat

SEQ ID NO: 333544 - DNA, 181 bp, Zea mays
acgcacacgtggacgcacgcgcggactcctgatggcaaactagtcataaactgacctccagcatccaggggagacatgctatataagtcgaaaatcacccacttgaatctctagagcatatgtgcacagactttgctttgcgttgtgctaaggtactagccaggtatggcacgggattcaa

SEQ ID NO: 333545 - DNA, 127 bp, Zea mays
tccggaattgaccggatcgacccacgcgtgcgtccacgcatgcggcgcctcaccttatacatttagctcatacgcacacttcagggctctgagatgacatgtcatggagaatacaatatacacactt

SEQ ID NO: 333546 - DNA, 205 bp, Zea mays
tgcccgtaccggtccggaattgccggatcgacgcacgcattcgttcacacgtattaactaataccttctgcatatgaacttgaaagcttaacttagtcatatgggctcatagtcataggtctatagtcataagattaatgtaaatcaatttctataccattatctaatctatgaacatttatttacattattttatcttctaaac

SEQ ID NO: 333547 - DNA, 187 bp, Zea mays
taccggcccggaattcccggatcgacccacgcgtgcgcgcacgcgtggactgcgacgccacaccagtgcccaattgcattgattcctactcggtccctacatggtgcctacaatggatgtcgtcgggcccgatcactccgacttctgtgccaagcctgccaccaacgggtaggcccagtccggcgcc

SEQ ID NO: 333548 - DNA, 159 bp, Zea mays
gtcgctggacaaccctttggtggccatggagtgcttcatcttcctgtagcactaaccttgtcctgacccgttctgcgctgtgagcaaattactccacatagttttagcaggagtaaaggtggtggtgttggtagcagcagcaggcagtaggccagtagc

SEQ ID NO: 333549 - DNA, 263 bp, Zea mays
gtaccgttccggaattgccgggtcgatcgcacgcgtcttcattgagcttgactggcggcacccctaggatcaagatcgagctatgtaactcgagcagggggagacgtaagcccgctggcgctatatcaaggactaccaatccatggccttctctctcaacatatccattgagtaagctctcgaagattatgacaacgatgaactctagcattttttaagctagaacctcatttttcttatctcacagcgatgggttctccatt

SEQ ID NO: 333550 - DNA, 288 bp, Zea mays
ttcccgaattgacccacgcatgcactctaacgtccatacactctactccgcagccttgccgttctcagaacttgctattgtcttcggcactgggttaatcttaatggggtcacgggttctaatctgattccaattccaatgctcaaggaccttacagccaaattcatatagttaaagcatggcgtacatgatctgatctttcaaccactaaactaattcatacactcggtttccagacacgttcttatcaaacagggtgatattcctataaatgtgaatatcatactc

SEQ ID NO: 333551 - DNA, 104 bp, Zea mays
tttttaaagtttccaattttacttacccttgattccaaatttttatttcttttatatgttaacctaatttaaattaattggccttatttttaaaaacttttaat

SEQ ID NO: 333552 - DNA, 95 bp, Zea mays
ctagcacacctaggtggggtagacagatgtttctaagcagtgattcatatattattgagaaatcatatagtactaatattggcgaaacataagac

SEQ ID NO: 333553 - DNA, 402 bp, Zea mays
accggtccggaattgccggatcgacccacgcatgcgtcccgtactactgaggccgcatgctggcctagtacgacgtacaagtatacctgggcatctggagactaccaatgcgacatctatagcatacatgctcattcaccccacgaatacctagacttacaaatataacactggctaaaactcgaagctgcactattgcagtctcgccttaccgatacgtgctgaccataatatcatgtgtgtaacaagggacacaatagtggcacgtctaaagcattgcgcgaacaggctcacactgccaccactacctttacagttccattatgagcagccattactagtggatctcctagtttgacaggttcgcgaacaaaaaatctgcatccttctcaaaacacacac

SEQ ID NO: 333554 - DNA, 184 bp, Zea mays
cacgaattcactgctggttagtaacagagaattctccggttaatgtctgctcttggcattctgatgtgttcttggcgtatgaacaacttagatcgttgacgattttccggcaagctggtgcatgatttttgctcgatcatgttcttactcaatgctgagtgcaactcagatacgctgcgtcttt

SEQ ID NO: 333555 - DNA, 348 bp, Zea mays
cactgtccgtccggtgtctacgattatactagacatgctcagaactcttctaggaataaggaattctacatgctggccatgggcatgcataactattgcagattcatgtacatcttacacaactacattaaccactcgagctatggatcaaattcatgcgttatctctacccgtgtgaatgctacattaactcaacatttgtgctatgtgtaataatgttgtgacatgtcatattctacggctgtactacaatcaatagatgtgatggctgcccaagtctactgatctggcagtattgtgattttaatagccgcccgtactatgaatccttgattacagacttaacca

SEQ ID NO: 333556 - DNA, 101 bp, Zea mays
taccgtccgtattcccggtcgacccacgcgatccgggactctgggcggacgcgtggggttttgattgaaaaaaaataagatatattttatgataggatagg

SEQ ID NO: 333557 - DNA, 367 bp, Zea mays
ggctgccggtccgacagcaatcaatttgttcgtcaggctggtaattcttcatggcttacggtatactacaatgaggtccaatgggtgcgcacgtcatattgatggatggacatgtggaatatcgtctgagccgacctcttctactgatcagatgcatgctaggctctcgcctctgatgctccatcttcacgatgatgaactaagtgctccgcctggcctgctcgaacacattccagcttcttgcgacattgatggatgtagagggcttgcttgagctactgagcaagcagtattctgcttctgatcggccttctgactatcaggacttcattagagacttcacaagacaactctttcggatgtcttc

SEQ ID NO: 333558 - DNA, 296 bp, Zea mays
cccacgcgtccgtccacgcgttcgtccactcgtccgcaagtgcgcttgtcggccagtgccgtgtaaatttctgagagttggtcttgtgttattaccaggttttgttcgtttctttcgttttggagagagtggtgctacctacctgcactgctacactagactaatctgtgtgaatggaatactactgtactttgtctttcttctaaaaaaaaaaaattagactcttactgattctgtaataccgtactgattctattagcattattccgtcgtaaactgttaatttaaacattttt

SEQ ID NO: 333559 - DNA, 179 bp, Zea mays
tcagactcgttggcagacgcatttgcagatagatgacttatccgtgtaacttgggactctacttatatattgtatgtaccagctgctcaaaaaaaaattaataaaaaaaaaaaataatacttataaaaaattaataaaaataatttaactaacaattttaaagagaaaataaattaaag

SEQ ID NO: 333560 - DNA, 318 bp, Zea mays
cccacgcgtccgcccacgcgtccgcggactcgtgggcgagggcatgaacggcaaggaggtggacggccgcaacatcaccgtcaacgaggcccagtcccgcggcggccgtggaggcggcggcggcggcgggtacggtggtggccgtggaggcggcggctacggcggtggcgggcgccgtgatggcggcggcggctacggcggtggcggcggctacggtggtggcggcggcggctacggtggtggtggcggcggctacggcggtggcaaccgtggcggcggctacggcaacttcgacgggaactggaggaactgagcggt

SEQ ID NO: 333561 - DNA, 60 bp, Zea mays
tgtttctggtgggattcaagttcaaccctgggattattgtgaaaaaaaaaaacactagag

SEQ ID NO: 333562 - DNA, 341 bp, Zea mays
ggcagaactaaggttcaagattatgggaaatggtgagtcagtggcacttttttggagagcaaggtgcaagagtacaagtctgcgaggatatcaatgggcaaaggcacatttgtattttttgactccaaagcgatttcagttgtaatagaaataacttattgtgtgagatcttagaaactcatgctgatagtattcaaaattgctggtcttatattgtgacaatgagagattattagtcactaaaaaaaaaaataaacaatatattaaaataaaaattaaataataaaatttgatactatttttaaatatagtattaaaatgtgaaatattttacacttaat

SEQ ID NO: 333563 - DNA, 198 bp, Zea mays
cccacgcgtccgcccacgcgtccgcccactcgtccgcccacgcgtgcgggcaggtctccatcatcctccgtgggagagaagatggtcatggagtgcgtgtgtatgtatgtgtatgcccagggcgcgcgcgcgcggctctgggcgagtcacagtagagatgcaatatcatgtatccagtatctacattacatactaagc

SEQ ID NO: 333564 - DNA, 377 bp, Zea mays
cccacgcgttcgtcaactcgtctgcaaactcttactacaacgcttactctaacatgttcgttgttgatgataacaattatggaatgataacaccagattagcgagaccactacttgtaccatggcatgggtatgagattactatgatatgataccatttatcatagactatgatatcactacaacgctattgatgcttaaatggaaggtcttgatggatgctatgcatgagctcatgaaatagctttgacgctttatcgatacaaacgctagctgaacatggtattctttgaggacgatagtgcttgctacaatattcaatcgactgctgtatgctacgaactggttgagctaaacgcacatcgaagcttactctat

SEQ ID NO: 333565 - DNA, 96 bp, Zea mays
aaaaaaaaaaaataaaaaaataataaaatttataaaaaaaaaattaaaaaaagggaaaaaagttaaaatgaatatggataaataaacatcatgttt

SEQ ID NO: 333566 - DNA, 447 bp, Zea mays
atcagcgctctttttactgtggtcaggctcagagctgctctactagttatcagatccagggctcatgtgatatcatactctcctgctacaacgcgtgggagagactactctggctctcccacgagacacgaagcctatcggtcatctcctgccaatcgactgccacaggaacatgaagagcatataaagcggaggtcctactctcctgccaggagatatgatgctgacaatggctatgagaagaggtctcccacaacagacagggaccgatctactatgcaccgcatgtaccccataagatactgacgcttacctcctggatcccgctccaggtccgccgacgattcttctgttgccagggactgatcgaccgatggatgggtacaatatgaatggtatgcgcatgaccagcatggtcatgcggtcaataggcctatgtctttgtca

SEQ ID NO: 333567 - DNA, 439 bp, Zea mays
cttggtcgcctggcaaagtgcgttccatccgagcggtgatgtgagatgtgtcccccctattcttcatcggtttgcttgcaatgattgagatagatgtgctcattcgccttgcagaaaatgaaaaataaagatatctttgtgcccagattcagagatggtttgactacctaatcatatatgcatggtacaacagccataaaactgaattttatttggctagaacctgaaatggcggaaactctcaggaatcatggtgcaaccgtgcatggatcacttgtctaaactagttacatcattttgattaagaataaggattacctgatggttgtctcctattttctgttgtagtgcaaaccgtctaaagctgactgttggatggggttggcgaaggtgtgcttgaataaggatcacctgaaggcgtggagtccctggctgctgg

SEQ ID NO: 333568 - DNA, 358 bp, Zea mays
cacgtctctctctctatatgtgtccgtccctgatgggttatgtctcaggtttcaattagatgatggtatacggtatgataatggacgtattaccgatgactggatgactttactgaagtgtagaaaacttgttcaaacaactagttgctgaaaatgcacaaaaacatacaagaagcgctgatacctgtaaggttatgttcatagaagaaagggtttctgcaagaacatgaagtgtccctacaaaatcaatgttagatgtggacgatggggcccatttgcaagctttgaacaatttgcaaagctcatcaatgagagtgggaagatttgttagatagaatagtgtgaggcattagggaag

SEQ ID NO: 333569 - DNA, 332 bp, Zea mays
gtcactctggttggacagggtacacaatctacgtctcagtatttttgttctgatggtctcggtattgaatgcctaggtgagttttttttagctgtgcacaaaaaaacagttaaactcgatggtatctcaactgctggagaaatgctagtgccctatttttggctgtggaattggaaaaaaaaaaaaaaaaaaaaaaaaaaaaaaaaaaaaaaaaaaaaaaaaaaaaatataaaaaataaaaaataaaattaacataaattaaatatttatatactataatatttattttatatataaattaaaaaaaaatggggggtccttttaaaggaatc

SEQ ID NO: 333570 - DNA, 240 bp, Zea mays
cggacgcgtgggaaaaaaaaaaaaaaaaataaaaaaattaaaaaaaaaaaaaaaaaaataggacaaacgtaataaaaaaaaaaaaacttacgtactcctacatgcaccaagtcttactatcctatacattcacctaaataaaatttcattagggcgtcacttttaattcaatttatattgccaaaaccttatacattacttaacttaaatatctttgaggtcatccaactttatccattt

SEQ ID NO: 333571 - DNA, 262 bp, Zea mays
cccacgcgtccgcagagaatcactgcacaaaaacctcggcaaactcttatctatgatctgcagactgcagtgcaaaatattgttttgcattgtagacaacactattatagagtggattttgaaattagatacagagataaataagctgctggagtaagttagcctcaaactgattcgctacaaaaaaaaaaaaaaaaaaaaaaaaaaaaaaaaaaaaaaaaaaaaaaataaaaaaaaaaaaaaaaaaaaaaaaataaaataa

SEQ ID NO: 333572 - DNA, 435 bp, Zea mays
  unsure (1)..(435): unsure at all n locations
ccggaattctccgtggtcgacgccacggcgtctcgatcgggttagtacctggcagtcatccatctggggaggtatctcatccttgggtnncccgtgaatgggtnncagcgatagtggaccgatnngtgccatcgtacatcttcatctggcttccatcaacttactatctgcactnatattgcagttggaatgctcatcangtgtctattttaatctggcttcctttttttccatcagctcagcagattnnagaatagatcccttctancctttttcaagctgaaagggtcagtanttgaaatatagaaaagtaggttatgctgaagtgatcaactgttggcatantgtcctcactnnttaatggggcaatatcttctttgtaacccggtttgcgaacccttattatgccttatatggaataccattgatgggttt

SEQ ID NO: 333573 - DNA, 315 bp, Zea mays
caaacatacatcaaatataaatatacgctctcaaatatctagtacttataatgtgataggatcacatgtattgttgatatgccagatggtaggcttcattgatgtctttaccttatcttttacaggttaaattttggaatcgcaggaggttgaactcatgacctttggacagcctcagataggcaatcctgcatttgctggttactttggttaaccaagtcccaaaaacaattccgtgtgacccattaaaaatgatattgtgcccgaattaccaccgtattattattacctaagtgaatggacaatccaccactt

SEQ ID NO: 333574 - DNA, 278 bp, Zea mays
atcaaatttcaatatacgctctacaaataacttgtacttattttgtgataccatcgcatgtattgttgatatgccagatggttggcttcattgatgtctttaccttttcttttacaggttaaatttggatcgcaggaggttgaactcatgacctttggacagcctcggataggcaatcctgcatttgctgtatactttggtgaacaagtcccaagaacaatccgtgtgacccatcagaatgatattgtgccgcatttaccaccgtattattattacct

SEQ ID NO: 333575 - DNA, 334 bp, Zea mays
cagcacgacgcggcggcgagctacacgccgcatcaggaggccggcactgacgagttcatggacgaagaggccatcttcgagatgccgcagctcctgcggaacatggcggcggggatgatgatgagcccgccgaggctcagccccgacaccttcgacgagtcgcccgacccgtccgaggccggggagagcctctggagctaccatgacccgcagattgttgcacacctagctagcttggccatggcaccagcagtgtggttatatctcataccatcatagtgtactactagttcacaccacctgctggttagcatacccagagaagttgattatt

SEQ ID NO: 333576 - DNA, 76 bp, Zea mays
accggtcctgaattcccgactcgacccactcgttccatcactaatgattctttcttaatttttgttattatgcttt

SEQ ID NO: 333577 - DNA, 295 bp, Zea mays
ctacttgtctcggaattcccggctcgacgccactcgtccgctgactcatgtgcagacgcgtgggtttgttaaaaaaaaaaaaataataaaaaaaagaaggtttttataaaaaaaaaaaataaataaaaaaaaaaaataaaaaataaaataaaaaaataatttaataattaatcaatttttattaattcattcatataattattttactattattattatattatataaataattaattattaatctattttttttatttatataattatttttatttatcttatttatttttttt

SEQ ID NO: 333578 - DNA, 169 bp, Zea mays
gaattcccgggtcgacgccactcgtccgatcacatcatagtacatgcggtgctgaaacttctccaagtgctggcccaaggtcaaggcgatcaagaggcatcaggataggaacattgtggaacaccgcagtcatcacggacgttcaggaagcatgcgcctatgatggcta

SEQ ID NO: 333579 - DNA, 328 bp, Zea mays
tacttgtccggaattcccggcggcacgccacgcgtccggtttggaggggatcagttcaccattctgttcaatgtctccgcttccatggcattggctgctttcattgcgctgggtcttaactcggtgatctctgcttactgcttcttcagctaggtttcatagagctaccgtcgtgcattgcatgatgtgaataatactacctgtatgctccttgcagcactgaaccttgattcatgtcaaattcctacacgatttctgtaaaatccctaaactccaaagcgggcctatattgttgcagcacattgagtcaaggttggcctttaaaatt

SEQ ID NO: 333580 - DNA, 265 bp, Zea mays
aattcccggcgcgagcgactcattcgatgggaactacaggggtcttggttattgtttggcgtgctttggtatcacaactgggtgggaaccagcagaagcggcttggaggatgtctaccgccttggaagtccctttgagcttattgagctactcacatagcttgtgcatgaagttgtgacatctgcaggctgaagctatatacagttaaaaaggcatcggtacgcatctgtatctgtaatcattatgtttatccactctatgtcta

SEQ ID NO: 333581 - DNA, 298 bp, Zea mays
taccggtttggaattcccgggtcgacgcactcgttcggccgacccaaataacacagatccatgaagtcaaagaaaagaaagggaaaagaaagtttgggaaagttcgtgcatactattgttgcagacacaatggttactggagtcagaagttgacatgtcatgttgtaacaggatcatcgtcttctgttcagttaggccttatttttgctagtcctcgaactaatggaaaactattccatctttaaggccccatcaaattgtaatgttttactatgaaaaggttggctcacccttgtgt

SEQ ID NO: 333582 - DNA, 320 bp, Zea mays
aattcccgggtcgacgccactcgtgcgaacgactttggggaaaccgaagccagctgaaggaacttcctgaatcgaattgcccaggagccaacatacctagagctttggttttccttgtattgaagcaaggatatgtggaagcgctcggcacatagcctgctttggcactgcgagttgaaactaaatggaaaacggaggccacctgacgtaaatgagtgcgattgtaataaattgtatgtagttcatagctgggttggtatcagagttcaccatttcgtttttactgtagcgaatttcgttttttaaccaaagtttgacta

SEQ ID NO: 333583 - DNA, 78 bp, Zea mays
aaaaaaaaaaaatacacacaaatataggatttaaaaaattccaaacatcaaaacaaacaagggccaaaacgcaaaggg

SEQ ID NO: 333584 - DNA, 187 bp, Zea mays
gcctaaggaataacgtcatgatttttggagaccacaagggccataaattttggcaggtaattttaccccgggctattaagggggggtcatactcaagggaaagaacaacgaaacattaacaatgaacacgacagtgcaacgtgcatgggcatagcagtaaccaactttggcgctcttttggatttta

SEQ ID NO: 333585 - DNA, 148 bp, Zea mays
ttatttatttttattaatgttttaatgttttgatattattcctatttatggagttttgggtttttttctaggggctaaggaataacttatttattatttaataacttaaattatctaaaataataagtaataaatatatactattact

SEQ ID NO: 333586 - DNA, 246 bp, Zea mays
taccggtttcggaatacccggctcgacgcactcgtccgaaaaaaaaaaaaaaaaaaaaaaaaaaaatttaaaaaaaaaaaaaaaaaaaaaaaaaaaaagaaaaaaaaaaaaaggaaaaaagaaaaaaaaaaaaaaaaaaaaaaaaaaaaaaaaaaaaaacaaaaaaaaagactaaaaacatcaaaaacaacaataaccagaagaaagcaacgaagaaagacctaaagaagagaaacaacaagataa

SEQ ID NO: 333587 - DNA, 55 bp, Zea mays
attcccgtctgcacgcactcatcccgcatttagctaaaaaatactattatagctt

SEQ ID NO: 333588 - DNA, 55 bp, Zea mays
aattcctcggtcgacccactcgtcctatgtaggaagtctcgccgcaagcttgcat

SEQ ID NO: 333589 - DNA, 300 bp, Zea mays
gaattcccggcgcgagccacgcgtccgctcatcagcgaagcatgaagacattgtttttgagaacttgaggtccggcaatggggaggggtcctagtctcaggctcaggctgttggatgcaattgatcgttgcagtctctgtcacttgcttgctcatgatctttgggactctgagcatcacaaggcgttttcactgatgcttatctcggtaagaagattcgttagcctcttgcctgtgatctcaccatttactctaccctgggaatggaccggttgcattgtaacattacgtttacatgagt

SEQ ID NO: 333590 - DNA, 454 bp, Zea mays
cccgtctaaaaaaggacaaggcagtggaaggtttacgtcaggacgtaactatgggtcattggaaggggaggcacctccaccaggctatgtctgtcgctcttgcggtgttccaggccatttcattcaacactgctcacaggaaaacaagatacctccacctggatacatttgctacagatgccgaattccagggcattttatccatcgttgcccaagcattggtgatcccaagtgcgacaacaataaaatgctttgttctcttgtcccagtagttacacctgtcaatggcattttggattcacttgtcccggcttcccccgttagtgctgttgatgacttgccagcaaagcttcactgcaagctatgtaaaaaagtgatgagagacgcagtattgacaagcaagtgctgttttgatagttttgtgatagatgtaagtggttttcattttttcata

SEQ ID NO: 333591 - DNA, 361 bp, Zea mays
ggttcggaattcccggttggacgcactcgttcgatcacccctaagtgcagcttttagacggttcgacagttggattttcattcagcacaaggggcatatgatcatgctcaatgatgtctaatatcagactacttgtcctgacacctgtattcaatgtcatcttcatgcagcgaacgttttgctcatgagattaggctatgatgtccttcatctgcgtatcattatgttacttgatctggttgtatcacttatctttgcatgttcacctttttttttaccatctttagaccttgttctctagtcatcttcagattttaagctatgaatattccttatttacagttgatttattattagaatc

SEQ ID NO: 333592 - DNA, 293 bp, Zea mays
  unsure (1)..(293): unsure at all n locations
cagataaggcttttttgaaatgtaaccatctgtcaagggcaatgaggtaaggaaccctttccccacagtgatgtccgctactgctcatctcagatgatactacagtggcngcatcctgtgcccatcgcttcccaaggtgcttccgtttgccttcgcgacccttcgccgtcgccaaatgccatagctcaaaggagatcagtgttccttctttctacaaacatcatcgtactcgtcgtcgcaatcgcaatatgacaaatgaaagagcttccaagaaaagtttgctgagaaaagat

SEQ ID NO: 333593 - DNA, 302 bp, Zea mays
tcgacccacgcgtacgatcatattgaccaatttggcttgaatatttgctaaaaaaatgtaattcacgtgtgatctctctcgggtctagcgttacagcagcaggcacaagacgcatactgcttaatggtcacaaacaaggcttacagtcacagtcctacgaacaaatttgaagctaatctgctcctggtacgcctaacaaatactctatccgtatctttttagttatagctggatagttcaatttttgcactattcatcgactactaaaacgaaacttacatagttagtgttacacccttgtt

SEQ ID NO: 333594 - DNA, 314 bp, Zea mays
taccggtttggaattcccggctgcgcgcacgcgtccgatgacagaaaggttcctgttaccgtcttttatgatactaagaggaaaccttcagcgcaggaatatgtaattggtggccatgtaaaccaggaagggtttcccaggaaggcatcaaggtatgagtttgatgataataggcctcagcaaaatattccagacagtcagcatttgccaaggatttataatacagattttgagaatttaatatatccagatagttcatgaaatacaagcaaaatggaaactaggatgacacatggtggaatgctagagtatgc

SEQ ID NO: 333595 - DNA, 233 bp, Zea mays
gaatacccgggccgacgcactcgttcggtgtgcccttcggcgagaaataaactcctatgctgggaggctgtcattgacatgtatgggcaatgcgttatattcattacagtgactggcattaacgtagattagcgaatcacggtaaatacattcattcttgccagtatcgatggctgtcactatatttcgttcttacaaaacaacatgcatctctagagatcttgttctttaaa

SEQ ID NO: 333596 - DNA, 79 bp, Zea mays
ctcatctcgggtttcaaaaaaagattaaaaaaaaaaaaaaaaaaaaagaaaaaaagaaaaaataaaaaagggataaggg

SEQ ID NO: 333597 - DNA, 427 bp, Zea mays
  unsure (1)..(427): unsure at all n locations
ggggggnggggggggggggggggggnnggggggggggggggggggnggngggggggggggggggggggggggggggggggggggggggggggggggtggggggggggggtgggggggggggggggggggggggtgtgggggggtgggtgggggggggggggggggggtgggtgtggggggtggggggggggggggggggggtgggggggggggggggggggggtggggtgggtgggtgggggggggggggggggggtgggggggggggtggggggggggggtggggggggtggggggggggggtggtgggggtgggggtgggggggggggtgggggggggtggggggtgggggtgggggtgggggggtggggggggtggtgggggggtggggggggggggggggggggggtgggggggtgggggggg

SEQ ID NO: 333598 - DNA, 175 bp, Zea mays
ggtcgacccacgcgtgcggagaggcgcgcgctgcccaacgccagggttttgatccatcattctctgtgctgtgcgcgtggtctggctactgtcatctggatctcaggccaattagattctcaagctgctctaccgtcttaacaagatctaccagtagtcacacactccagcccat

SEQ ID NO: 333599 - DNA, 191 bp, Zea mays
cggaattccgcgggtcgacccactcgttctggagaaaggcgtcccggcactactcgagttggaggttcaacagtctcagggtgaatctggtaaaggacgggtcggtaaagctgggtgtctagtgaaaaccgtaccgactctcgttcttgtgtgtgtgtgttgtgtgtgtgttcatgtagttttaggtcctt

SEQ ID NO: 333600 - DNA, 297 bp, Zea mays
  unsure (1)..(297): unsure at all n locations
gcaaaacatatactaataatactagtaggtcattttttggagtcactctatccttcatgaggtgagtcatcataagtgcatatctatgaattttggtnnaatcaatcactcctcatttaaaaaaaaaaaaaaaaaaaaaaaaaaaaaaaaaaaaaaaaaaaaaaaaaaaaattttaaaaaaaaaaaaaaaaaaaaaaaacatttttataaaaaaataaaataataacatctatataaatataattttaatatattaaataaattataaattttattccccccttttatataataaaa

SEQ ID NO: 333601 - DNA, 262 bp, Zea mays
ttaaaaaaaaaaaaaaaataaaaataaaatttttttttaaaaagaggaaccaaaaaaacaaggttttttttataaaaaggggggcggccgcccccttcactttttcccttctttttttccctccccccctacttgttagctctttttttttaatcccaaactaaaatccactttccctcatcttttcatccactttaaatctcttaacccacccttttcccaccttaatttcttaacaacacatccccctttcccctttttt

SEQ ID NO: 333602 - DNA, 316 bp, Zea mays
  unsure (1)..(316): unsure at all n locations
tcccttttannatttcttttctnttctnttattttatattcattttttcttaatcaacctccttttaactctctttttattccctttttatacccattaactatccaatgtnttcttccacaatcaatttcctatttcataacttccaatcttaataatatattacctatctaccacntttttaatttcttctttttcacacctcaaactcaatagttctattctttgcctcatattttttaccatacataatacaccttttttttttttcctttcttttcccaatttttcttttttaatccttcattattttttt

SEQ ID NO: 333603 - DNA, 305 bp, Zea mays
  unsure (1)..(305): unsure at all n locations
aatctaatgcgccggtttttttcaactgttctgggttaacattnccttcttnttntatttacactacttttctcaatgaacaaacacattcattactcttaagaacattcccaatttctttccccacnttttatctcacaaatatttttactactcatactctaattaaacttntttttaaaattccaaaaaaaataatcatacttcaacaagcccctaaaatttcatcacatttctttttctctctttctatttatcatataaacaaacactaactcttacaaaagcaatatctatctcacatt

SEQ ID NO: 333604 - DNA, 151 bp, Zea mays
tctggggaaccaacctgtttaatggacctagcccgccttaccggctcgtgtaaatcctctgtccatcaattctgtaactctgttttatcgattaatgaaaagaaccgggcttgctcgccccataaaaaatttaaaaaaataaattattttt

SEQ ID NO: 333605 - DNA, 216 bp, Zea mays
accggttcggaattcccggccgacgcactcgtccgcagagacaccatcccgcccctccattgcttataccaattcttcaagagcgacacattttgatattgtctgtaagaagctcgagtgcacttacgagcataaccccaacaacgacgtcaacttgacgcatttgcacttatcactactaaaactatcacaactcactaacagacccaacagatt

SEQ ID NO: 333606 - DNA, 156 bp, Zea mays
aaatccaataattttccccattacctacaaaaaaaaaaaaaaataaataatatacttattaaaacaccaaaaaaaaaaatttttttttattaataattaaaaaaaaaaaaattcttccccttttttataaaatccaaacattctttacccattaat

SEQ ID NO: 333607 - DNA, 264 bp, Zea mays
  unsure (1)..(264): unsure at all n locations
cggattttnagcacctgtataaagttctagggctcgtgttcttacaacacacacacaaaaagagagagacgtgcggacattgatgactgatgacatttttgcggtggatcaattgttccggaagaagcgggcgaaaaatggtggtcgagggacaagcacgttcctgtcgtgccctgtggaaattcctagccgctgctgcaacccatcaccaatgtgctctcgttgtcccttttctctactatactactacttctgcattccttc

SEQ ID NO: 333608 - DNA, 247 bp, Zea mays
  unsure (1)..(247): unsure at all n locations
gaaaaaaaaaaaaaaaataaatttaaaaaatttattttttcttcctctctaaaaaatccaaggttactttctcattcaaggaaccaagcttcccttctcttncntcccccaaattcaatttactatccttccacctacatccaattcactggcaaaaccctacaacttctcaacttaataaaaccccaacacatcccactttatcacctttcataatatccaacattcccccacctatcatccttcc

SEQ ID NO: 333609 - DNA, 397 bp, Zea mays
  unsure (1)..(397): unsure at all n locations
ggaatacccggcccgacccactcgacctcttactctntttcttactcgtggtctttctcttgggaaaaaaaaaaaaacaaaaaagaagttttttttaaaaaagaaagaagagcccacaaacacccctcaacatttccttcccccctaaatcacccccccttacttcccccttctttctaccttctacctcttcttttttttcccctaaatttaaaacacctcccttctttttacaccttctcaactcttaaaaaccctcccctttcccactcttaattcccttacacctcatccccctttccccattttcctttttttcctatatacccctcccttaattccctttcctacattttctctccctttttcctatctcctaccccccctttttcccccc

SEQ ID NO: 333610 - DNA, 296 bp, Zea mays
  unsure (1)..(296): unsure at all n locations
tcaatcttaaaccacatcattacattcttaaagtttttgaangacaagctgcccaattcatcatctttattcacatctatggatatcccaccaccccgtgtccctctctgtatcttgggttatgttttcattggaatctaccacaccgtcttctactatttcaaacttaggtttatcttctcagtattctcctaattattttgtttggcatcaaccctttcaaattcaaactcttaatttttgtttttattctaccctccatttttgtatttattctactacatttttaattattc

SEQ ID NO: 333611 - DNA, 338 bp, Zea mays
  unsure (1)..(338): unsure at all n locations
tccgaaaaaaaaaaaaaaaaaaaaataaacaatttttttatttctaaaaacaaaaattancnnnaggaatgtttttttaaaaagggagccccgcccccccccccccccntacntcccctttcatccaacctcaatattctcttctatttcccccccaaaataaaattcactccccttttttttccaacttccaaacctaaaaaccccttccctcccccaccttattcccctttcaacacattccctttcccccctcttctctttatccctaaaaccccccccccttttcccctttacatcattaccccactccttaaatacccatttttactcccccc

SEQ ID NO: 333612 - DNA, 352 bp, Zea mays
  unsure (1)..(352): unsure at all n locations
ccccncccttctccttcccctctttcttccttttccttcactctctttctttccctctcccttctttttcctccctccttctcccccccttctcatcctcttttctttttttttcccctttctttttcctctacccttcctcttcttttcctccccccttttttttccttccttattattccctcctctctcttcccaccccctatctttccccctttttccttacttccctctctccccctctccctcttttttattctttctccttccttccctccctccttctcctcttttcattattttctcctncttctcttccccttccctccttcttatttcctctctttttctt

SEQ ID NO: 333613 - DNA, 270 bp, Zea mays
  unsure (1)..(270): unsure at all n locations
ttaatttccggtcgaccgcacacaaactantctacaaaacaagtaaatcaacatatatttttacatacactacacaaaacatttatgttggtttttcttaaaaaagatcagaacaaaaaaaaatttccntaaaaaaaaaaaaaaaaataatatttaaaatataaaaaaaaaaaaaataaaaaaaaaataaaaaatttttttttttttttaatatcaaaaaaatatatattaccttatatttaatatatcatatcttttttttttcttctt

SEQ ID NO: 333614 - DNA, 318 bp, Zea mays
gattcaaccctgattcccactagccaaagttcttttccacccgtttaattccctcgagtggcatgcatatatgggggcgaccgcgtgtcactgcaaaaagtccccaactccgattgctatgctgtaaataattgccttccccgaagaccccccattccttccttgattaaaaaaaatcacgagacactgccattcaatggtacaaaagaccgagcttgtgaatgtcaaatttctgcgcaactatcgattcttctgcttacaatatgcttgttttaatcaagctttactttctttttcttcttaagtacttctccatgt

SEQ ID NO: 333615 - DNA, 388 bp, Zea mays
  unsure (1)..(388): unsure at all n locations
aaaaaccaatctaacaaacaaggtcgtagtctaactccttacagaanccaaaaggcggccatttttttatagtggagttggtctcatagtttctcgttttcttatattactcaccataagcttacaattctttggctgcacaaggtttggaccattttgttcataaattgcgatttagggcagccgtatgcagtcatccatttgtatattcttccattgctgtgataagatggtaagaatgctcaaaatttttttttggttaaatgaaaataagaaaaactcattttgattctaaaaaaaaaaaaaaaataataaaaataaaaaaataatatgggcgtccgttctaaaggatccaatcttacatactctttcattcaacatcatatct

SEQ ID NO: 333616 - DNA, 429 bp, Zea mays
  unsure (1)..(429): unsure at all n locations
gaattcccgggtcgacgcactcatactcccactcttccgctctattacactcctctcttctgctgaacttccctaatttaacctgcagacttttctaagagggaggaggattacnaaccacatcaacaanttcttctagcaattgaactctactaatctaaccttcaaaatgaactcttatagatcaccattactatccacaacaacaacattacaatattcatcgggagatcaattcattaccgctcaacaattatcatcactatcacgcatcaaactccattaccattgttagaccgtcttctattcaaattgactttttcaacactattaacccaaaattcacaccacacctaaattaatcatcggttttctacattaattctacatatcataatgatatttgttatcttgcatctatattttata

SEQ ID NO: 333617 - DNA, 249 bp, Zea mays
gtccggaattccggggtggacgcacgcgtccggttgttctttcggctaggttgatctctctccttccctcttttgcgtcaggaaggagcaggttgcatacctgatctgagcactgtaattatttcttcagttctaccaaaaaaaaaaaaaaagtataaaaataactataaaaaaaaaaaaaaaaaaaaaaaaaaaaaaaaaaaaagtaaaaaaaaaaaaaaaaaaaaaaaaaaaggggggccgttttaa

SEQ ID NO: 333618 - DNA, 456 bp, Zea mays
  unsure (1)..(456): unsure at all n locations
gaattncngggtcgaccgacgcgtacggcgcatgcggagctgggccgcgcgcacgctctcctggaccactccgtgcggcatgtggaggccgcgctgctgcaggtgacgggctgcagctgccgctgcaagttccgggcgcgtgtgactggcggcggcgccatgagctccgaggtggccagctacgtctcctccgttgtcacggccgagggcggcgacgccgaggtggacgacgacgacccgtaccgccaccaccggcagctcaccgccgacgacgacgcgccgagccacgctaggatgatggacatcaactagcggccggccggcgcccggccatctcgtactcgtacgtcatgcatgcaacatttttttccctccttctccttcctccccagctcgcccatgcatgcactcctttctggctagcaagcatggacgagaggccgtgatggatggatc

SEQ ID NO: 333619 - DNA, 444 bp, Zea mays
  unsure (1)..(444): unsure at all n locations
gaattcccgggtcgaccgcactcatcctcccactccttcaacctctcttactcatattctttccctatcccatatgattaacttgacggttatctctaagtgagcagacgacattccttatttttcacatattccatattatatatcaatattatcttaatcatagccttctacacatacacttctactacttttcatcaaccaaaaaattacaaaaatgagtgtctacaatataaatgaccctacaatcttttcgaaatatataaccaatatcaatttctttctactgattttaattatatatacncaacttttttttctaatcaaatgtcaaaaataatcttaactttgaaacctctacttacttcactttattatacttcctccatattattttaccaatttaaatttattatatcaaaccttccttatttccattttaca

SEQ ID NO: 333620 - DNA, 504 bp, Zea mays
  unsure (1)..(504): unsure at all n locations
cccgggccgacccactcttcctcttactctttttctctttctgcccccctgtttttttttgtgagncgttgattttctttagttcaatttttaaacgttcaagccgcgactcttttnncttcaacttcccatccaccttttccaatttcttctttatatccttttcctccttttctctaaatccatttttttttattttctttcttcttccatatcccctctccttattcttcttcattttatatccttttatatatatataccttactttattctttttattattcttttctatattctattctttccctttttcttttacttattttatatttcattctctatatttattatttttattcctatttcttccttctttttatcttatatttctttcttcaattctttctactcattctttttttttttatataaattttctatattttacattttcttccttattttattctcttcatatccattaattattctatcttattt

SEQ ID NO: 333621 - DNA, 252 bp, Zea mays
tcggaattcccgggtcgacgcacgcgtccgaaaaaaaaaaaaaaaaaaacaaaaatttattctaacaaaaaaaaaaaaaaaaaaaaagaaaggttctaaccaaaagggggtcggggccacacatcacacttcctcttacatacaacatattacaactcaatttacgtccttcttaaataaaatcaacttcccctacttttccatcgatcatactcataaaccccttaacatccccattttaatcaacttcct

SEQ ID NO: 333622 - DNA, 406 bp, Zea mays
gaattcccgggtcgaccgacgcgtccgcatacctgatgctggtgggatcgcctctgttccctctggcactgagagccacatgagtagctctttttgcagatggatggcggtggaagcgactagtccaaagagtcttgaggatttacgagctagccttgtaggttgcaaaatatgcacgtatactgccgatgaccaatgataggatcgatcctgcgcccttagttgataagtggccatgatctttgcatggatgatcagtatctgtcacggttttatctttgttgccagtctgtataacacacatatagattgttgtgacatttatttgcttgctgtttccacaatgtactgtcttagacttgtagccatatgctagtttattgcttcaagagcttgatttcaatta

SEQ ID NO: 333623 - DNA, 236 bp, Zea mays
  unsure (1)..(236): unsure at all n locations
ccatggcctctcctactctgggcgcgacggcatcngacgtaggggtatcctctgaggctggatgctancntggtgtgtgtggacagtggactgcatcttcccttggcttgtacacatatagtagtgaacatgattcatttacatctattttcttccacgaacagatcttataccataacacactgaaacacgtcggagtccggtcctctttctaaaaaaaaaaaaaaaaattaaaa

SEQ ID NO: 333624 - DNA, 431 bp, Zea mays
  unsure (1)..(431): unsure at all n locations
gaagctcgcgtcctattccgcctattctttctcgctataacatgaatcccacctgtacgtcttcttagatccagagctcggttcncctcttccttcctctttatctttccaatcactccttctcctaattcaccaattccttcaccaagttcacttcttcttattctcatattactattctcaattgtttttttagacccttctcaatttattctttttatgtacttatatattatatatcttcttcttttttactcctttattttttattatcatttttttattttccttctttattttttattcatttttttcctatcactcttttcttttacttatttattatcttttttacattttttctttctcttttcttatttttttttttaatctttttttcctctcttttttactttatttcattttatttt

SEQ ID NO: 333625 - DNA, 280 bp, Zea mays
accggctcggaattcccgggtcgacgcacgcgtccgctttccttggtcctcactgagaacccccttcggttgcgaatatctattcactccggtcgtgccctctggagtgtgggcgcggtacagccgattttgttacatatctaggccattcagttgtaaaactgccatcttaagtgtaaatacgtgtttaccaaaggttgtttttgtccatttcaccttatgagcttctctataacacacagttaacacttaacagctactccacatttgcagtctcctt

SEQ ID NO: 333626 - DNA, 71 bp, Zea mays
tataatatccatacttacttaccctttcatgcaacttcttatctcttatatattgtcacctaaattcaatt

SEQ ID NO: 333627 - DNA, 473 bp, Zea mays
gttttgaattcccgggtcgacgcacgcgtccgaaaaaaaaaaaaaaaaaaaaaaaaaaaatttttaaaaaaaaaaaaaaaaaaaaaaaaagagtggattattaaaaaagaaggaaggaaacgcccccccctctttaatttccaaaattccataccccctttctccccacattatatcttttttattttcccccctatttaattttctctccccctttttacacaacctttactcttaaaaccccttattttcccaaatttatatccttttataacatatccctttttccccatttcgttttatccaaaaaacccccacacttttccctcttcaaaaattttccacaccctatttccaattttacaccccccctatcacttctttttaatcccggttattttttttttctcccactatttccccttttacttttcatttccctattaccccccccttttcatatttctcccttc

SEQ ID NO: 333628 - DNA, 319 bp, Zea mays
  unsure (1)..(319): unsure at all n locations
gtccagctggcactactgttccagcctccagtccacatcctcgtccaggtgcatactgcagggagggccacgctnnacacnntataaattacgtactttcgccaatcttactccacatacttgtatactcatgtattacacccatgcttattgttgctctcaaccactactagcactactatttgtctagttccataattacaagtacctctcccctcatattaacttgatcattgtccgtgtataatggactatttgccgaaaataaaatatattacaatccattctttctaacaaacaaattgaaacatctttaatt

SEQ ID NO: 333629 - DNA, 200 bp, Zea mays
  unsure (1)..(200): unsure at all n locations
ttaaaaaaaaaaaatcctaacgtggttttcctttaaaagctggtggttggccttcacctntttacatttttagtctagggctccttttaaattgtttgcatagtggctcgatttttttaccccaaaacaattctcatgttcgtctgcatcttcttcttccaccttatctatcaaccttatgttcatcttcatctatatat

SEQ ID NO: 333630 - DNA, 152 bp, Zea mays
gcgagccatacaccaatttagggctgccccaaccctcacctactacattcacgaaaccttgcaccttctcaaaagtccagcgagcgaaagcagctccctcaaatgcacggcaacgactaatgcatcattgccaatcaccagaggaagagcat

SEQ ID NO: 333631 - DNA, 340 bp, Zea mays
tgatcaattcacacatataggatggacacttctgacgtgcgggataccagctgattatgtggatcagcactaacatacacatattcacaacaaagatgggaatgcacctgttgaaagtgttctagcatcggataatctacccagaaggttcaagagtctttctatatggacaagagacttacatgttgtaaaacccaatctgttgcgcagttcaaggatgtacgggactacattttgtcagaatgcccgattgaactttcaactctcttatctgaggtcaaacaagaaccattcaacctttctgaccactatgaatgggttacttgtgacataaactttg

SEQ ID NO: 333632 - DNA, 209 bp, Zea mays
tgcaagttcatttacagtggataatagatgtacattgtgctggagcgttcgttagcttgggtatggtaggtgatcgagagcagtgctgtgtaatataaatatactcttgttgttcaccgtacgacgtacagttgctcttttgtagcactgatctcgtttttcattcatatgtaatctctaattcattcgtaaggctgctttcaagttcc

SEQ ID NO: 333633 - DNA, 260 bp, Zea mays
gactccacgcgacgggctccaagccactatggaacgaaatttaaccgaacaagcccacaagtgggaggggatcatacagagtgggccatagcaactctatctgggcgccacccgatgagccactgcgtcgcgacgcagataccgaaagcacctgctgaacgagaccatgcatgcggaaagtaagcccaaaggtgcacgagtatagctctgctgaaaaaatacatagatgcaaggactcccaacctgtgaaaccattcaag

SEQ ID NO: 333634 - DNA, 302 bp, Zea mays
cggaagggccggctcaatccacgcgtaggagcccacctgcacagacctacgatcgaatccgagcacgaccaacacgggagagacgcttccatggatgctagcgaaacatgacggcaagcaaccgatcaagactagtctacccaggccgctagactgctccaaggtcctatacaccgtggatactggacaaattgatccagcctttggtcctcaacacacttcacaggaacacgatctaaagacaacccctgaaatctcaaaccaagcattctcagcaaagcctcaactataccatgaaaggg

SEQ ID NO: 333635 - DNA, 372 bp, Zea mays
ccgcttaatcataaacttcactatcaaccagatactcacacgacatactatgaatacacttactgatgccacatctattggctcattgccatgaattcatgcatctatacatccatatataacaccttatacacaatttgtatcgaaaagctatatgtttcaccatatgctgcactactagcgtattccctaatttttaccatcaatgattcatcatactgtaacttgtactaacacttgaaccaactataggcataacaccaatcgtatctccaattcagctcttgatgccactatacaagacgtttatcaaaaagaatctcttcaaggatcacttgaagagcaaattggagatcctatattatgtacttt

SEQ ID NO: 333636 - DNA, 374 bp, Zea mays
ttcccgggtcgaccgcacgcgtacgccaagagttgatgcaggaaaagagggcgaattagcaactgcttcaaggccagggggtcgatgtttctttttagaatgacaggggtgctactaatggcaaaccatggtcacagaaacaggcaacgtgcatgtaatgcactccttgcttatgtgtctttgtatgcctttaaattctttttcttttatttcttacattttatttccactttctatattttttttcctgttcttcatttttaactaattatattttttatatttttattcttttttccttttattatttattattttactttattatcttttcttttattttttttttattattctttttttttttatatact

SEQ ID NO: 333637 - DNA, 253 bp, Zea mays
ttcccgggtcgacccactcgtcctcccacgcgtccgatgcatgcttctaccattttcacatcatacaaacaaaacaaattaaagggccttatttaaaaaatcatagggccacaaaataaacataaaaacacctattataacaaaccttatactaaacatatgcactaaaacattcttttcgcataccacatacaacattcatactttccattctcaaattatccatctaatattaaatacttactattattta

SEQ ID NO: 333638 - DNA, 178 bp, Zea mays
acccaacactatcttcaactgttctcaacttcaagatctttccctctcaaacaatgttatctcaggcaaactacctgagctaattggctgaatgacataccttaaacatgctaacctgtatgacaatgcctttgcccgtttgaaccccgaaaacctcctctactctaccaaaccttaa

SEQ ID NO: 333639 - DNA, 161 bp, Zea mays
ggattgccgggtcgactccacgcgtcggcggacgcgtgggcggacgcggggtcggaaccaccatccaatgagacggggggccgtattagatgaggggcgcgaccacatggagaaagcagacaccactaaccctaatcccagactttgctttctcgcttccc

SEQ ID NO: 333640 - DNA, 213 bp, Zea mays
tattccctgtcgacccactcgtcctaccacacttctcaccacacatactcaccattcttacaaaaaaatctatcttaaatctaaacgagaattcttaaaaattgcttgcctatcacataattattttatacacaacattattccctcaacttacttttgattcaatcttataatctactatatcctcttaacaaattctattctttttcttta

SEQ ID NO: 333641 - DNA, 309 bp, Zea mays
ttccccggtcgactccacgcgtcggctagtccctacccaacagccaacttatacatgccgtcattgaatacgggggcctgatccaataccatggccacatcgatctcgccaccacccgacttaatggctctcgacataacaatatcttaagctcttataaccttctacgacttagactatcaaacagggctatcttacgccaactacatgatccaattggctcgttgccaaacattaaacgcctaaaccgatctaacacaggcgattccgaaaggactccagaaaacacttgtactctaccacacttaa

SEQ ID NO: 333642 - DNA, 309 bp, Zea mays
gagttagcagcaacacacaatatttatggacaagcacaatttccacattgccaatgaagtacctctgcctggacggtacgagtgggtcccagtactccactaggagtgtcatatggtgataatatgggattacaagagccattagactggtattttaaatctaacaactagaagaagctttgactaaccatttagattgcttgaggctcttggttaacaagcttcaaaggaaacgaactgtttagaaatttccaatattcgattagtagaccagtagtgtctttctgatctgaaaggtgtaccgggggg

SEQ ID NO: 333643 - DNA, 310 bp, Zea mays
accgtaccggaatggccgggtcgacccacgcgtaggcccacgcgtacgcacacaacacatccaatgaaacactccaacggctgggggtgtgctttagcaggtggcaagtgccgataagcatcacccgccaaggcatacggaccaggccaagactagctgcatcaatggagtacgctggcctgcacggaacaagccggaaccatgacataaatgcgagacgttacacggagacgagaaagagcttcgcagagccggagaacttgtacgtgcattgtgacgagcttaagcaacttcgactaaccatggagat

SEQ ID NO: 333644 - DNA, 160 bp, Zea mays
acgcgtccacggacgcgtgggtaaggtttaaatgcagtcattttggagaactcccttgttcatgcttttgtcgggcttcttcaaaaggagagaggactttcttcatgacatgatggcatgtgaggcatcttccttttctccgcaacccttgtcatggcct

SEQ ID NO: 333645 - DNA, 161 bp, Zea mays
gtgaaacacaagtcattctgtcacatatgatcgtagatctcaaccagatcctattctcgtgggtcttttcaaacatgggtggtgcatatcaacaataacagaaagtttgttactcaatttattcatcttcttccaactgatctattatcttacacttcagt

SEQ ID NO: 333646 - DNA, 151 bp, Zea mays
cggaattcccggggaaatagacaatggggctacggcagtcgaacactgggcattgtaagaaacaacaccacagggggcgggggactttgacaagggcgaaccaacgtcttggctaacaggcataagcatcacggacatgccaagactagat

SEQ ID NO: 333647 - DNA, 226 bp, Zea mays
gggtcgacccactcgtccgtcgggcgtgcgcagacgcatgggcgcttgctccgctgtcaacaccttctgggggggcatatgccatgggggcgtacaactatgtagtcagaactatggacgaggaagcagtcagacgtgatgcgcttgatgcatagcgtgctccactggtagtacaggcagcacatcgtacatagtgctcctcaccaggcctacccttgacatcatg

SEQ ID NO: 333648 - DNA, 73 bp, Zea mays
tctcctgaattcccgtatcgacccactctttcaatcactcttcctcacctacttactcacacctatctcattc

SEQ ID NO: 333649 - DNA, 484 bp, Zea mays
attccctggtcgaccgcacgcgtccggtctgtaaattgatttatcaggacaatcctcaatgtagtggttttggtgtagttcggatttagcactatttaattaagattcgggtccttacatcaacaatgcattcatgtggtctcacagtggcacttttattgaagtgttcgtagctttcaaagttcttatctctttttacatatatgatcacttacttttatagcactattcatagcattattcttcatacttatgtttatctctttgttttttatacttaattcttttatttcttgtctcattttttttttttattttttttcttcttttttttttatttatcttatagttttttatatgttttattttttttgttttttttatctttctattatttcttttttattatttttctgttttttattttttttaattcttatttttatatttttatattttttatttttctattttttattttttt

SEQ ID NO: 333650 - DNA, 183 bp, Zea mays
ttcccgggtcgacgcgcacgcgtccgctataagcctacatagcgcccctacgattgaatttcactcctaagactatcataatactacgcgcaaaatctaaaagtacgaggaccattcatatctcacctcataacttacatctcaactcagcatccatgacaacaagtcataattttactcgta

SEQ ID NO: 333651 - DNA, 199 bp, Zea mays
tgatcctctgcttgtttcaaacgcctcacaaagaggtcgatggtcttgttagctgcaggggtgactttttacagcatcggcgtactaagtggctcacaatctatacaacattaactctcttgattcacgagtttgttgattgttacgatatgccctttgattcaagataagaacttctgaacccttacctttactttta

SEQ ID NO: 333652 - DNA, 232 bp, Zea mays
ccgttccggaattcccgggtcgactccacgcgtcgggtttggtcaaatttgacaagccctagtgtaaattcaaagcacatgaggagggttcatttcgaccggggcacgatactgatcggaatcaacggcatcagaaggatcggcaggctcgatgccagagccatcgtccatagcgaggatgttctgctcctgttcggcactaccaatcacataacgacggtcatcatttact

SEQ ID NO: 333653 - DNA, 204 bp, Zea mays
cctcctcgacgccctatgacctcgtcatgaaagccacgaatcaccagagtgcaagcatgcgagcttctggtattcagaccatgccataacctcacatgggagaggagcagtgaccgatagcgccaccagcaggctgagagaagtgcagtttgacagatcatctacacctagtcgtggccacactgatgtttacttctgggtagc

SEQ ID NO: 333654 - DNA, 69 bp, Zea mays
accgttcctgaattcccgcgtcgacccactcatacagtattgtatcaaatctcatcatattaatatttt

SEQ ID NO: 333655 - DNA, 218 bp, Zea mays
cacagaggatctcggccggcagggacgttgcctagggcatacagctactgtacgtatctatcatacctcgcctggatcgaaaccataggcgcatgacgaacgcacatgctcaccagaaccacgtcaacccaattctgctctgcgtccacattaacctggccatggcaatgtggcaccagcactctggacgagcatggcagaactgggactgcacacat

SEQ ID NO: 333656 - DNA, 114 bp, Zea mays
cgtccgcccacgcgtccgcgtgtcagttttcgccgtcatgctagcgacagctctggtcgttatcagcacgaaaaggccttacagcttgtcgtcgagggaaaggggaggaggagc

SEQ ID NO: 333657 - DNA, 257 bp, Zea mays
ccgaaaagcacgaaaaaaaaaaaaaaaaaaaaaataaataaaaacaaaaaaaaaccaaacaaacagacaggttcaaacaaaaacaaagcccacccaaaaaaaacaccaaaaaaaaaaacaacaaaccaacaaaaaacaaacaaaaaaaacaacacccaacccaaaacgacccacaccaaaacccccaaccaccacacccaaaaacccccaaaaaaccacaaaacacaaaaccccaaaccacaacaccaaaccaacaa

SEQ ID NO: 333658 - DNA, 185 bp, Zea mays
gctcggttgctcctccgccagcttcatggactactatatgcccatcagggactcccgcaagcagggattcatgggggtggcgtgccgcaatagccagccgatgcggctctactccagcctgtggaacgcggacgactgggcgacgcagggcgggcgcgtcaagacggactggtcccacgccccct

SEQ ID NO: 333659 - DNA, 208 bp, Zea mays
  unsure (1)..(208): unsure at all n locations
cttagcccctgatgatcatatngctgactcgtatcaagaatcaagatctggcaggcagctgtccttgccccttctcctgtctctgggtgggaggataggttagtcgttggattaggttggggagcgggaggtcggaggagtagttaggtaatctgtcctagtccatcaatcaacgacgtgtttcattatctctaatagggctatcgat

SEQ ID NO: 333660 - DNA, 319 bp, Zea mays
cgcagccaaagttgaaagctgagttggatacaccaactctcttctaaggccctgcatatttccacagggaaggctgtgatatgtttcttgaaagatgacgactcagttcctgttgtcgatgattggggaggttgtgttggtattgttcaccgtgatgattgtaccttgattgtaccaagctggatgcacctcttcttgtgcctacttcaaccaccgtggagcacgttattgacctactccttagggagaaatccgagatggtggtggtgaagagcggtaacatgtacgaaggcagcttatgacccttgggtattttttt

SEQ ID NO: 333661 - DNA, 184 bp, Zea mays
gaaagagaaggaaggagcggcacacctacgtcttataccatgtgaagaagactaccaaagctgagctccgctgctagagaaaggcccgattgttctaaccctgaaggaactgctaaacgacatcgaaattcaaaacccgaagtacaagaggcaccgccgtctactcgaaccgagtcaaacagac

SEQ ID NO: 333662 - DNA, 186 bp, Zea mays
  unsure (1)..(186): unsure at all n locations
ggcagatgaatcaggtcgaaaaggctaaatccgattgaagaccacatcagcaggcccaagaanaagtttagcagcaaaagccggcgcatttatcgagaagatgatagaggatcctcatgttaatgcacgactgcaacaggacttattggcagatgaaggcgagaccccgagtttatttgtggtgtc

SEQ ID NO: 333663 - DNA, 154 bp, Zea mays
  unsure (1)..(154): unsure at all n locations
accaaaaaacangaaaagccgggcagggttcaaaagcacgagcggagaccaatacacagaaccaacgaagacccggcaacccaaaagcaaaatcacagcacgaacaacaacaggcactcacccgacaagaccacaacaagctaaacccgaacaa

SEQ ID NO: 333664 - DNA, 182 bp, Zea mays
acagggccgacccactcgtccgcccgcgcgtccgcccatatcgatcgtcgaatccctccgtttgctacgcgtgcgtgtgagggtgatatcgagcgccggccggcctgcacttccgccgtgttgtgcgtacgtacgtacgtatacatgtatgtatgaatatgcccgcgtgtgatgcacgaata

SEQ ID NO: 333665 - DNA, 189 bp, Zea mays
cggacgcgtgggaaaaaaaaaaaaaaaaaataaatataaagaagggccgccccacaagaagaaggatgccaacggacgcctgcaggcgacctaaaagcccaccaagagggccaccaaacagcaaagcaccggccgacggccaacaacgtcacgacagaaaaaccgccggagctacccaaataaaccgcc

SEQ ID NO: 333666 - DNA, 161 bp, Zea mays
ccggcgcgtgcgcccacaccagcctcaatccgagggcggacgcacaaaagcgcgcgggagaacctctgcggaggcgcgcgggccgctggtgacgaaccaagaagagccgaggaggcagagccgcggacggcaaagggcagcggctgggaaaacccggaagc

SEQ ID NO: 333667 - DNA, 149 bp, Zea mays
aaaagacataaaacaacaaaaaaaaaaaacctaattacaaaacaagacaaaaaacaaaaagaagcaagctttaaaagataaacgagcacagccctaaaaacacaaaaggccggaagccacagagctccccaccaaacaacctagcacct

SEQ ID NO: 333668 - DNA, 266 bp, Zea mays
ggctcgacccactcgtccgctgactatttgatggtttggctgccagatcgcattggactgtctgacttagcatgtgctgaaatgtccaatatatagcatggattacttagattttgaatgtgctcaacatgctgaatcatcatagatatgcactgctgagtgagtttgcatgtgttacctaattcctaacgcttccacattggccttcgtatgcttgcagctctgatctggagctagctatatcacttcaacagcaagagtttgag

SEQ ID NO: 333669 - DNA, 155 bp, Zea mays
  unsure (1)..(155): unsure at all n locations
gacccactcgtccgccaagacaatatgcaatactgcagtatcccagcctcnttgagctgctgctaaccaatgaaccacagaaggctttagttaaccacattcccaacgaaagttgactgaacccaaccacctttgccgaatttcctaaaccattt

SEQ ID NO: 333670 - DNA, 163 bp, Zea mays
gcggccacgctccaactccagatcactctcacctcaacccagacaaaccaatgcaagcctagatacgaccatggacaccacaatcaccgcagcaagaagaaaccaaaaaaacaaagctaccagcatcaaacacctcaacccaaaaaacaagcacaacccacaa

SEQ ID NO: 333671 - DNA, 94 bp, Zea mays
aatttccgggcggactcgttcgcggaggcgtgggaaaatttaccgagctatttagtgtaaataaaaaaaccaaaaaacaaaggaagggtttttt

SEQ ID NO: 333672 - DNA, 290 bp, Zea mays
gtccggtagaagggaactattgaccaaccaatgctggctgtggaactgggcaggcatggcgccagagagctttgcagctccatctggtcgctgttttagagcatctgactagctgttagcgctttccctagtttctctctctccatctctatctataaacttgttccccgttacattttccttatatcccgaagaccctgatgccagagtatagatacaccaaacacctggtgtctgacaatgtaacttctcgtcataccccttacaaagtgactattacagctcttttc

SEQ ID NO: 333673 - DNA, 249 bp, Zea mays
  unsure (1)..(249): unsure at all n locations
ggacggcagaatgcaacgtgagtatttcatcagtagtgtgtggagctcaggacctatcatggagcgattcattgcggcttcgtcctgccgctgacgaatagcaactgactcgctggtaacgcttctaccagtttatgtacctccctcctnacctataaacgtgtgcccggttacattttccttatatcccgaagaccctgatgccagaggatagatacgccgaccacgtggtgcctgacaatatgactg

SEQ ID NO: 333674 - DNA, 196 bp, Zea mays
  unsure (1)..(196): unsure at all n locations
tcccggtcgacccactcgtccgatcgcgtgcgtcggcatgagaaattttgttgcatcagcttgtgtcgggtcgnatagtgcggaagctctttttcacgttgcctgtggtgtatcttaatttgcgccgaggccttatgagtgactagtgtttcaactgtaactggattgcacattttcgtcgcatggaatgtactat

SEQ ID NO: 333675 - DNA, 182 bp, Zea mays
cccggctcgacccactcgtccggtagaagattccatcattgcataactcgactagtgttagtagtatatactcttgggcaagattgtttttgtagccatgactcatagtatgtagcagtatggtgatggttggattaattcagcttttttgctcttgcttggtgttcttcaaaaaatttaat

SEQ ID NO: 333676 - DNA, 127 bp, Zea mays
cccggccgacccactcgtccgatcgcgcgcgtccagcctaaagtgccagttacttacagggtaaggctcgacacaaccggcaggattccagagatggaaaggtgcacacaacattgctaaaagttga

SEQ ID NO: 333677 - DNA, 170 bp, Zea mays
acccactcgtccggcagctagagcacaaacaccaccagaacatccattattctccaacagaacctacaccaagtcagctttatatagcacaatggaagacccatactcacactcacactgacggctccacgactcaccatctctgcctgacatcacataacctcctcacg

SEQ ID NO: 333678 - DNA, 290 bp, Zea mays
  unsure (1)..(290): unsure at all n locations
tcgtccgcccacgcgtccgcccacgcgtccggatgccttttttcttgcaacgactactggtagtagacctacttgttgcagttgcgagcggcatgtaaagctgaagcatgtccagtccatttttgtttgatgtaaaacttttatcggctagaattttgaccgggcttagaagaggcagagtatgaggcgtttggatgtcagttcctttcccagggtttaattnctgctagaggtaagttcctatgttggagctctaatgtttatctggttggattccaggatttaaattg

SEQ ID NO: 333679 - DNA, 109 bp, Zea mays
ccaacgcgcccgctaaaatcgcaagcggccgctctaaaggacccaagctaacttacgcgggcatccaacgtaatacctctacaatagggccccctaaattaaatcaacg

SEQ ID NO: 333680 - DNA, 51 bp, Zea mays
aaaacccgggtcgacccactcgtccgcacgagccctaagcgccacagccac

SEQ ID NO: 333681 - DNA, 118 bp, Zea mays
gacccactcgtccggaagcatcataagcgccacaaaaactaaactaaaaacaaaaccaaaaaaaaaaaagaaatgaataaaaaaaaaagaaaacaaggcaaaacaaaaaaacaaacaa

SEQ ID NO: 333682 - DNA, 276 bp, Zea mays
cggacccgtgcactcacacgaggagaagatccatgagacagacgcaacaccaggcaagggaccgagaaccccgaccaacagagggcgacgcgccggcacctcgaccgcagcgcgcgtaaccagcacaaaacagcacggctgactgtcgcaaggaacgtgcaagacacacactacgaccgggcaataagcatggaactattaagagtggcggccaaggagaacagaacgagctccgctgcccgatcatgccaacatgaacattaatgaatgtgcgag

SEQ ID NO: 333683 - DNA, 159 bp, Zea mays
cccaggcgtccgaaaaaaaaaaaaaattactaaaaaaaaaaaaaaaaaaaaaaaaagggagagaaaataaaaagaaaaaaaaggaaaaaaaaaaaaaaaaaaaaaaaaaaaaaaaaaaaaaaaaaaaaaaaaaacggaacgacgacaagaagaagccac

SEQ ID NO: 333684 - DNA, 236 bp, Zea mays
ggaatacccgggctcgaccgactcgtccggcacaggcgttctgcctagacggaagctcgtcctataccatatatacagacgctacggcagaagactttgatgatgctcagcgcgccatgattacggatacacatcgatggaagcaaatgaccaacatatatgatcaaggctctaacgtcgagcagcgtcaacccttgatactctggccatggtgtgggccaacctaacaacggctg

SEQ ID NO: 333685 - DNA, 306 bp, Zea mays
gccggacgcacgcgtccgcccgcgcacgccgccaagaaggcattccctaagaccaaagctaagccggcaaagggcgagactgccaagaccaccggccggagcgccggccaaggccagccgccgccaagtcaaagaaggcagccaccgccaagccaaagaaggccgctgccgccgggaccaagcgcaaagtgcccgagacgaaggtcggggcgaagccaaagacaggcgccaccggcaaggccaaggccaagccgacgaccgcgaaggccccagcctccaagaaggcacggaaggcctccacatgag

SEQ ID NO: 333686 - DNA, 228 bp, Zea mays
cccactcgtccgcccagtcgttcggccgagacaccgactacttcgttctcgcatatatatgatagaataggggccggtttcctaggacgtgctgaggtagatgcttctgcggtggcgcctacagacgaaaaggggcagaaaatgcatacctaacatccgctcgttgccctaggtgtgtacccacatgtgtatcgatgacataggcaggctgatgaataatcatcaggg

SEQ ID NO: 333687 - DNA, 199 bp, Zea mays
cggacgcgtgggacggcattgacaagggctaagcatcgagcacggatacaaggaaaaaggtcgactttacccagcagcatgccagccaggcacaaactagtgaaggacgcacgggaccgaggctgctaccgctaaaccagcgacgatggggatccgacgaatgcatgcataaacgccatcatagatcacaacgatcccg

SEQ ID NO: 333688 - DNA, 78 bp, Zea mays
cccggccgacccactcgtccgcatgcgctcgacaacacatcaacaacagctacacattaacccaaaatacacctatac

SEQ ID NO: 333689 - DNA, 148 bp, Zea mays
acccactcgtccgccgaggcgccccaacacccgagaactaccctcccagcacccaaaaccacagccacaggaagagacatttgaagccacggaaggcacacacaataaaaccagcaaagcccacaaccacaagagcccccaaaaccaa

SEQ ID NO: 333690 - DNA, 70 bp, Zea mays
atcacatccggcggctaaatccaacgccctacaaggtgagcataaagcaccaagctgaacaatttaatcc

SEQ ID NO: 333691 - DNA, 245 bp, Zea mays
ctggaccttcagaccgtcttacgaccgagtcgatccaagcactgaaacatgcatgaatgttgggtttactcacgcgtatgggatccatgggcaatctaatatagacattagcgtggcatgaccaaggaccaatcgcgagcctctgctcacacgaccactaatgccaaaacacacgggtacgtaggagcctcacataagggcggttccttgtgagtaatttatgtatatcattaatacattctcgt

SEQ ID NO: 333692 - DNA, 184 bp, Zea mays
  unsure (1)..(184): unsure at all n locations
ggcggccaagctgtggaaacgagggagacgaggaggacaagggaaagaaagcctaccggcgtcggggctccggctcacctcggacanccccaaaaaaaatctcgcgtggccgccggcggccaccaccataactgccatgatcagcatcctcgcgcaggaccgcctcctcgggttcgccctgggt

SEQ ID NO: 333693 - DNA, 66 bp, Zea mays
  unsure (1)..(66): unsure at all n locations
ccaacgcgtccgnaaaaannnnanntatggtaaagaaaaaaaaaaanaaaataaaagggaagggtt

SEQ ID NO: 333694 - DNA, 476 bp, Zea mays
cgcctgctgtacctgtccttattcccgttcgtccccgcgtccgcccggtttggctgtagcatgttgtgagatgagaaggctattttgtcaaaaaaaaggggggggaaaataaaaaaggagggggggaaaaatataaaaaataaaaatattattaaatggggggggttttaatattatccaatatttatttaacggtaattcaaaattatttactttcttttttaaacccttaattctattaattccccctctttttccaactttttggcctcggatttccttgtgtttcccacctttttcccctttcaacactttcccttttttttttttttccctttaatctaattcccccccccggttttttattaccaacttttttgaaacccctttttccccccttatttatccttttttacccctttttccttttccgtttttgttttttttacataattttccccctttttttttctttt

SEQ ID NO: 333695 - DNA, 379 bp, Zea mays
  unsure (1)..(379): unsure at all n locations
gccacgcttnctaaaacatattattatattcataagactatctaatcaaaattaaagaaggggttaataaaaaagaaggggggggccgctattaataatccaaacttacatacccgttcatacaaatatttagctcttcaatagtgtcacttaaatttaattaatttgccttctttttacaacttcattactttaaaaaccttttctttaccaaaattaataacctttcaacacattctcttttctccagttgtcatattaacaaaaaggcccacaccattctccctttctaaaaattttcacatccttaatggctatatttactccccctttaccttcactttaatccctataattttttttgtttactctcattttt

SEQ ID NO: 333696 - DNA, 190 bp, Zea mays
ccgaaaaaaaaaaaaaaaaaaaaaaaaaaaaaaaaaaaaaaaaaaaaaacattataaaaaaaagggagggaactataaaaaaggggggacgggcgtaacttttctatagcctccccttctttcatttggcttcccctctttttatatccttgctactggttaaacactttcaccaccttaattattcttt

SEQ ID NO: 333697 - DNA, 281 bp, Zea mays
  unsure (1)..(281): unsure at all n locations
ctcttttgtacataaaaattcatgatgttataaggtaagaacaatatatttacattgggngggtccaaatcacatgcgggacggcaaaaaaaatctctctttccttcagctgtcactaccataactggcgtgatcagcattctcgctcaggagcgcctcctcgggttcaccctgggttccgcctacatagacaagattcgtactctaccatcgccgtgccatctaccgttaaatctctgaatccaacgggtcgccctacttttaccaacctggtgaaattg

SEQ ID NO: 333698 - DNA, 152 bp, Zea mays
ctctaaaaaaaaaaataaattccatgaaaaaaaaaaaaaaaaaaaaaaacgcaaaaaatggggaggggcctacctactctagaggttcgacatcttacgtacctcgtacatgctacactataacttttttatagtgcaacctaaatcaaatt

SEQ ID NO: 333699 - DNA, 126 bp, Zea mays
cccacgcgtccgattttctcatatgtttaaactcagaggacagttcctcagatgtttaagatcagacgagagtggatcatagtttttttccttagtgatgattcctggctgctatgtgccttcttg

SEQ ID NO: 333700 - DNA, 336 bp, Zea mays
tcgttcactgcatcttagcgtctactggtgtggagtgacaagtggagggggtagctgcagctgtatgcaaatgcaaaaatattacttccatcgttctacaaatccacccttccaagcttaagttatttctagagaatgtgactaaatagcctcttgttcttgcattacatacattaaactgtcttctcctttttaaaaaaatcaatataatataaaaaaaatttaattattataaaaaataaaaaaaaaaaaaaaatcttttaaataaattaaaaaggccgccccttttaaaaatacccaattttacttccccttccttccaactttaaaactttt

SEQ ID NO: 333701 - DNA, 71 bp, Zea mays
gagccttctttaactagaatatgggttactgcatgggtctttcacttaaaaatcggggactgctttgttcg

SEQ ID NO: 333702 - DNA, 296 bp, Zea mays
  unsure (1)..(296): unsure at all n locations
ccgcgaacccttggccggacccttggtcggccccgtggccggacccttggccggacccgtgggttgtttttcatttcatgcatagtgctgtaaattgcacccttgctgtgaaaatttataatccttgtcgtctgttgtaccttacacttcagtttaggatgtgctgacaatcagtgagcttattatgtccaaataagctctcttttttttaacgtttgatttttagtcnnaaaaaaaaaaaaaaaaaaaaataaaaatttaaaaaaaataaaaaaaaaaaaaaaaaaatttaaaaa

SEQ ID NO: 333703 - DNA, 294 bp, Zea mays
aaaataaataaaaaaaaaaaatataattatataaaaaaaaaatacaaatcttccaaaggagagtaaacaaatttgggtgggctttcatccaccctaaatacatattttataaaggctcctaaactgattaaactcttcagcttcttaattcttccttacttcatttaatttgctattcttgtttcatatctgtatatgcatctaacttttttttaaaatttaattttttccttttgtgaacctatatcaaactttttttttttggattcatccctttatatctaataaaaataa

SEQ ID NO: 333704 - DNA, 395 bp, Zea mays
aaaactaataaaaaaaagggagttttcaaaaatcatacgcccccccacctcctcaatactccaaaataaaaaaaccactaacctaaaaaaaatatcaaacaaccaaactacgtgccccccccccttttattccccaaactttctccccccccctcccccctcatatccctttcttattcccccccaatttcaatccccctccccccctttacccccccccttcccctataaacccccctccctccccccttttttccccctcctccccccccccctttcccccacctccccttttcccaaaaatcccccccccttccccccccccccccttgtcccccccctatttcccttatttttccccccccttttctcccccttatacccccccctttttt

SEQ ID NO: 333705 - DNA, 53 bp, Zea mays
aattcccggggggcccactctcctcccactctcctctctcctactttttttat

SEQ ID NO: 333706 - DNA, 197 bp, Zea mays
ttaccatttaaaattatcacaaaccttctgaacactaccaataacttttcctatattacatgtatacatactctgcataccctttttacaacaccaccatcacataatatttttactcctattctacctaatatacttactaccaccttactttacttttattaactttttacttatatactaacatcaacaactta

SEQ ID NO: 333707 - DNA, 303 bp, Zea mays
caggtaccggcccggatttcccgggtcgaccgacgcgtccggccgcctgatggccctccagctcagcagcagccacagcagccaattcagaactgaagtcctgtcaagatgttgggtattggtactgctctaactgctcggcaggagaatgcaacccccgtgggtcaccagctttcgtaatttcttaatttgtggttaacagtaaaaactttgttgtattgcttatcaacgtttgaagaaaaaccgtgagatataccggatgtatccagcttctggattttgtggtacctgctgagtttcatc

SEQ ID NO: 333708 - DNA, 251 bp, Zea mays
gaccggacccttcccacggggaagcttttgttctgatcacgcgcgcgtacattgtccagacttgcttgcaccacatcggagggaaaataataataatcgtgtttcaacttaaatgattttcgtttcgtctcttgtactgcttacagcgtcgtcttcaattagcgagtgatgtaaaaatgcgactgctaatcttgaccgctaatttactggtatctcagcatccatgtgaaaccttgatgacgatataatca

SEQ ID NO: 333709 - DNA, 152 bp, Zea mays
  unsure (1)..(152): unsure at all n locations
aaaaaaaaaaaaaaaaannaaaaaaaaaaaaaaaaaaagggccgcccttttaaaaaaaagggggcttcctaacgcgggagggcgaggtcattaccttttgggtcggcccccctaaattaactaaattgcccccccctttaacaacaacggaa

SEQ ID NO: 333710 - DNA, 372 bp, Zea mays
atcatacattcctttgctagattgtatcatataagcttcatcgaattcaagggagaaatgaacataactgttgctttgcagcacagtttagcaagaaaaattaaccacgcaatgtgcctctgggttgcttgcagggaatgcgaacatcaatggtatttcggatacctaattctagttgtgcacttgtgctgtcaatgtcacaccatacatgtggtagagagagacctacatcctgaaaccacatagcttacggtgattattgagacttcagagagcatctcgagcagcaatcctgcatacaattgcgtccgggttttcatatgctttcatttctccgcgaataatgagaacttttggtaataccagctcatc

SEQ ID NO: 333711 - DNA, 150 bp, Zea mays
tccgatgccaagttcctccacatcttgtgtttttagaccatccaccgcgtgaagttcaatgagtaattttataccgccaacacgtccggcattctcgtcgccgacatgtcctttcaactttttgttccaaccccttgacattttccgctt

SEQ ID NO: 333712 - DNA, 236 bp, Zea mays
  unsure (1)..(236): unsure at all n locations
gaaanaccgggccgacgcacgcgtccgctcgtacaaatcattgtgatcacctcaccttttccagcaacaccgaaacccaggcttttagaacatattctactgtccagtcgcaaactcaaccataatgtctcggacaaacaacaacttattatactcttcggaagccaaccacgatcatctaaacccgccctatctctcatgctatttacaaatagcatatgcaatggtctgctccc

SEQ ID NO: 333713 - DNA, 188 bp, Zea mays
  unsure (1)..(188): unsure at all n locations
taacattccaccccccccccccacnaccataaactcaaaatgtctaccttcaccttctactcaaacaaaactatcaccaaatctccccactcaatcattcatatccacattaccatcctatcctactaactgattttatcctaactcatcctctcttttcatcaaaacattcataacccctcttccct

SEQ ID NO: 333714 - DNA, 444 bp, Zea mays
  unsure (1)..(444): unsure at all n locations
acccactctactactctaagtttctaccattcttctngcttcaacantataatgtagcttgccaattttttcttggcctaacccctcttcnncttcccttcttcttctttcttctgcttcctttctttctctgtctctctctgaccttactcacgacaacttcttttataacatgaaagtaactgttcttatccttttcatccactactttactcttactctttatcctttttccaacatcccttctttttttctcttctcctacacattttcattctttcattctcaccttattttcctttatcttttttttctttattttatttttatcctttatttttatattttattattctactacttttttttttttattctaatttttcttttctttttttttactatttaatttctttatattttttattaaattatttttctatt

SEQ ID NO: 333715 - DNA, 367 bp, Zea mays
  unsure (1)..(367): unsure at all n locations
acgcgttcggcttgtatcggtccaatctccctgcttagcaaactacgccgatngctggggcntagtcagtttatgatcccactgccacnnancttaaaacagcgggggcggaagtgattcccggcggcgtgcgagtgaaagggtgggtcatccagtcccacaaaggccctatcctcaacgccgcctctctgcaacgctttgaagatgaacttcaaacaacacatttacctgaaatggtttttggagagagtttcttgtcacttcaacatacacaaactggcatcaaatttcattttaatgcgcttgatgcactcaaggcatggaataaaaaagcactgccacctgttgaggttcctgctgcaacaaa

SEQ ID NO: 333716 - DNA, 320 bp, Zea mays
ggagatcatgtggctgctgaaaatcaaaagaaacaatccaagaaagcaagtgcccatgtggacgaataagttgtcatgccgtcgtttaaagaccgtctggcaacttctaatatcaacgactcctctccggatcattctgccatggaaactgaattcacagaattaacagaacagcagtatgaatacaaatcgacagacggagcaagcaaaagaggcggacgaaagaaagcgtcatcatccttggcaacgatactatctgatgttgatgaggaagttctacatgtccaaactcacaataaaggtactggaaggtagcccgc

SEQ ID NO: 333717 - DNA, 186 bp, Zea mays
  unsure (1)..(186): unsure at all n locations
aaaanngggccgacgacgcgtccgtaaatcttatcaccactccatatcaaattatctcactccaccaaaacaattgggcatgtagacgaatatgttgtcataccagccattaaaaaccctctcacaacttctaatatcaaccactactcttcgaatcattcaacagcacaaactgcattcacagaa

SEQ ID NO: 333718 - DNA, 246 bp, Zea mays
ataaaaaattctttatcatacatgcatacaatgccaatccacattccattataaatcatacaaacccatcacctatgtattacaaacttttatttaacaaaatcaaatctatactttatatcaaaatattcttattacttcaatttcttttccattttcaccaaatttccatataattttaaataatattcttctttcaatttcttcaaactattaaattacataaacaatttatttcatcaatac

SEQ ID NO: 333719 - DNA, 340 bp, Zea mays
cccacgcgtccgttcacgcacacgctatctttcaacttcaaacatgaccctctcacggaggacgctgtgcacaccttccatgtcacacataataaaccaccacgagcagattgctaaccgctctacaccacctctgttctaacactcctgacacattgccgtcaagagcacgtagctgatcaacaatatcgataggcagtctctcatagaccttgtcatgcatcacatattcctgctcaacgacgaagctcatgtggtgaatatcttttccactaatcccacatgagacaataactttcctgaatatgctacagaaagtcgcttttctctacgatacatg

SEQ ID NO: 333720 - DNA, 225 bp, Zea mays
gagaaatcagattggtggcaagcatacaaatgctccttgccgcgtaatatggccatggaaagaccatactactgcatgcagatgagcaggttgccggtgaagtcgtttgaccgcaaaccattcttgaactcaaagatgggacgggagctgtgcgtagccgatgtgaccgttggaggttcgatcaagctggtgctggctacaagccacctggagagcccatgccct

SEQ ID NO: 333721 - DNA, 250 bp, Zea mays
cccacgcgtccggtgatgcacacgctatgttgaagcctctaacatgcccctctcacggaggaccctgtgcacaacttccatgtccacaaaaataaccaacacgagcagattgctaaccggtctataccacctctgttataaccctactgacacattgccgtcaagagcacgttgctgcacaacaatatcgatatgcaggctctcatagaccttgtcatacatcacgtattcctgctcaatgacgaagctc

SEQ ID NO: 333722 - DNA, 293 bp, Zea mays
  unsure (1)..(293): unsure at all n locations
gcccacgcntccggngcttcacactcaatcttttatcctttatcaccccccactctncnaaggaccctagttcacatttttaaatgctccacaacacaaaccaccacnagcatattcctaaccgcccaatactacctctcttataaccatactcacacaatgccttcaagatcactttgctccacaacattatctacatacagtctctaaaagaccttgtcatccttcacatattcctcctcatcgacgaagctcaaatgttacctatctctccctctacttccacattatac

SEQ ID NO: 333723 - DNA, 471 bp, Zea mays
ccgcactgttcatcatcgtcagtatgaattgtctattgccttcaaagctttctttcttggtcagctttacattgaagaaatgttctgctcaacctcacaattatatactatacataactcatatattatcttgttcaacttgcactatatttcatttgagtacttaccttttattgatctctctttaatctaaactagtgttcaagttaaaatatttatattatataattaattaaatttttattttttatattttattatatttactctttcttttcttatttttccaattattacctttcttaattttattttgtttatttttctttcttaatcttttatccaatttttttatttatttttttattttatttaaatattttttattcttttatcttaattctaaatttacaatttttattttttctctatcttatctttactttcttatatttttcttttatttatctt

SEQ ID NO: 333724 - DNA, 262 bp, Zea mays
tccggtctctgatttcccgggtcgacccactcgtcctcttactctttttcttactcgtatacgaggttctgctttatggacccgtccttccatctgggggcggcttctatgatgctagggccagttctttatctgcactgtgtcctccatccttgtgtcacaacattttacatcgttcctaataatatcactccttcatgtttctatttttcaaaaattcttattctaataatttatgtcttaattattggtttctttttca

SEQ ID NO: 333725 - DNA, 330 bp, Zea mays
aattcccgggtcgaccgactcgtcctcccacgcttcctcttactcttggtaaaatttattttaaaaaaaaaaaaaaaaaaaaaaaaagaaaaatttaaaaaagtagggagacaaaaaaaacaaaaaaaacgggcccccccctctaaataatccaaccttactaacccttccattcaacatattaccttctctatattttcaccaaaattcaattcactacccctctttttacaacatcttaactgtataaaccctgtcttacccaaacttaatcccctttaataacaaccccctttcaccagcttgcttattaacaaatagccccacacc

SEQ ID NO: 333726 - DNA, 372 bp, Zea mays
  unsure (1)..(372): unsure at all n locations
ccggnctcggaattcccgggtcgacccactcgtccggagcgaaacaaacagcgcctcctcctccttctcgcatgctcctcctccaccatccgaaccgcgtatgttctggcaggggcatcggttcctcaacttcctcctcgcctgcatggtgttcgccttcgtcatctcttggctcttccacttcaacgtccccggctaacatgttctttggcgcacatacatggcccccgaataaaaaaaaactccaaaaaagccattactccggacgccgggtcggtaagttagcggatctggaagaacaggctggtgggtgctgggttggttgaagtaaaagctcgacatggggccggttgacttttatactgtcatttt

SEQ ID NO: 333727 - DNA, 59 bp, Zea mays
gtttttaattcccggtccgacccacacatcctacccttccatcatctaactctcccttc

SEQ ID NO: 333728 - DNA, 507 bp, Zea mays
cggaattcccgggtcgacccactcgtccgatccccattctcttacgatgatcaatctttttcgttctcaaaatctctcgaccagaatgcggatagtttatctcatgggctcgccagccatcatgaactactggagagaatgtcttgtaaccgtcttatctgatgatgttttcattacttctctgtttaatctttatattaactttttttttttttataaatattattaattatatattttttttatttcttatttttaatttctttttcttatttttgttttatatttttttaaacttaattttttttatatattttatttaatattttctctatttatttaatatgttggttttaatttaatttattttatttttttattttatttctattataaattatattattttttttatctctcattttttatttataatatttataattttttttttttatttttattttaatatatatattattatatattattattttttatattttt

SEQ ID NO: 333729 - DNA, 358 bp, Zea mays
gtccggaattcccgggtcgaccgcacgcgtcctcccacgcgtccgcgaagaacttgtgcagtatgcatttagctagctagctgccattgttgcgagagtagctaagctaggctgaggcgacgtgggaagattcgctcgctggtccggctcatctggagagcgaccgccatcatgctcatgccggccagctcgtggctcttaaagttttttaaatcatgtctctaagttcgtggactgcatttcacactttgttttgcccgcaagttgttgattaattcgccgaggccaccaatggcaggtgcccatgttgctagttaaaaaaaaaaataaggtctgccgcgctgatggatccaagctt

SEQ ID NO: 333730 - DNA, 427 bp, Zea mays
attaaaggtggtgcggatgctttctgttggcttctggtcctgggctgatagtttccactaggctggactgtgcatcccaagttggaagtgcctggctggtctcattctaatgcctggacctttcttgtcctgtaatcgtaggcacgtcttaatgttttttttaacatatcttttatctctgttctaactgtaatagtatttctatccatctacatttatagtctctcttattctcttttctatattttatcttttttctttcttatattttttatatattttttttttttatgtttggttgttatttatatttttttattacttttttttatttattcttattattttacttttttattctttactttttcttattctttatttctttttttttttttactttctttcttaatttacttatttttta

SEQ ID NO: 333731 - DNA, 476 bp, Zea mays
ggaattcccgtgccgaccgcactcgtccgctgctgagcaggtagatgttgctattctctaggttggcctaggagggaagttcgagtcagctatttttgttgttagtgctggcgaatgtcctgttatctcaaaatacaaagcttcttttctcacctaatctcctaaaatggaaatgtttgactcattttttaattcttctttgaagctgattgtggacttatcctttctatgtagatatattctttcctttttatcattttctttttcttatttttttttaactaatttaataattttttttttcattttttatcatctattttttattatttattttatttgtgctttcatttttcttaatcttaaatatttaaatttctttatattttatcttattatatttctcttattttctattttattttatattctttatatattctctatttatttatcattaatttttttttattttt

SEQ ID NO: 333732 - DNA, 59 bp, Zea mays
gaattcccgtttcgacccactcatcctaaaaaaaaaaaaaaatatcaaaaatttataat

SEQ ID NO: 333733 - DNA, 326 bp, Zea mays
tcccgggtcgaccgcacgcgtccggtgctgtggtcggtgtccatcgccgtcacttcgttcggcggccaccggcggaccatcgcgtccggctgctccggcttgagcgatgcggtcgttggccgtcttcacgtacacccgacgcacagtgttcacggcgccgtcgtcggcgcggccgaagccgaacctggcggctcccagagctgccggccacgggcgcatcataatggatgcgagcgtggagtcctcgtgggtgcattgctggtacaggatcgcgcgctggtgcttctttctcatctccacgctcgtctgagggcggtcgtcttcca

SEQ ID NO: 333734 - DNA, 469 bp, Zea mays
acggtctcggaattcccgtgtcgaccgacgcgtccgcccacgcgtccgctattcaccccccctctatgcttctatcactatccacttataaacttgagacggtaatcatgttcctagctagattcaaccatctaaggagccatggaatgatgtttgtttcctatcatatttttaaattagccacacaagtgaactaggttaagcactgaagctattctaatttctaactacagcactttgcttccttcttattttataaaattagagtatggtaagtgcagattcttagcaactctagttagggatggtattgggctctaggttttatactattaaagtttaaggataggattaggattgggctctatttctattcatttttgaactaaatattattaatgtgctaatcaaattgtgaagagattttgattatttccaccctcttagtctagttaatcttattttccta

SEQ ID NO: 333735 - DNA, 278 bp, Zea mays
  unsure (1)..(278): unsure at all n locations
gaattcccgtggccgacgcgcactcgtccgcggactcgtgggttactattagtcttctgttcccccacataccctcttgataccggatggaacatttttctgtaggggggcgcaaatntacaactagtatttctgctatcttgtacagattacagaattctccttgcttgcttgagttattggtgtaacatatctctgttaatttgacacatgatctgaccagcttgtgtatctttattttttccctttcctatctcttcatttcatatttttccttt

SEQ ID NO: 333736 - DNA, 477 bp, Zea mays
ttcccggtcgacgcactcgtccggtggcctatggctctggacttctaatcacttatgttgcgctgaacctgatggatgggcagtgacaacctgccgttgggtacgtcgttcccttcactcttggcaccttgatcgcgcttggatggaatagaggggagctgcttaacctgttggctaggtgtgagccattattagtttgcactcatattcatatgctccttcttcctactactttattctaacctcagtgttagtataaatttaataatggttttctatcttttatttattattttattttccttattgtttatattttttcttatattggggttgtgttatttttttttctctctttttatttattactttttctattaatttcttttatactttcttactttatctttttattttactttattttatcttcattattctatttttcattttcttttttttcttattttttttttt

SEQ ID NO: 333737 - DNA, 300 bp, Zea mays
tcccgggtcgaccgcactcgtccgaagcaagccatgtggaggagggctttagctatggtcctgttcatggctggcgccgggctgctctcctgggctggcggcgcgggctctcatcatggcttgtggagcatcatcaccctgcccatgttccagagcatgcttagccaccgtggcttacatgcgttttccatttcaccttctacacctactactccttcatctaggcctccagcatgttccctgtcttatgcaccactctttacaagcaaactctcatgtcttatctcaacttcttttttt

SEQ ID NO: 333738 - DNA, 164 bp, Zea mays
  unsure (1)..(164): unsure at all n locations
ggatttccgancgaccaggcgtccttccactcttcctcccactcatacgcccactctttttttttatttttttccttataacaacgcgagagtgtattcttaacactttgaagagcaatctttttatctctatcatttctactacatatacatttacctcatat

SEQ ID NO: 333739 - DNA, 280 bp, Zea mays
acgcgtccgcactcactacttataagcatatctcagtcttttatccacacaaaggtccctacaattcatgcaagggtcctacttaacggcgtgggtggctgcaccacatcacagattgcactgcagataaacttcttaaccataatactgctaggtaccatcgtatatcacaagcaaatctactcctgataggtacaagagcttatctaccattcctatagttcatgctttttatcctttactataacactgtactcatatataaactcctttatccata

SEQ ID NO: 333740 - DNA, 139 bp, Zea mays
  unsure (1)..(139): unsure at all n locations
tcgtcctaaatcaccatcctaacgatgtgatggagtttggtttttcccccaagaccnaattccatcggtacgttttactcattcgttgagacatgtttctattttccctttttaataattcttattcatatatatacat

SEQ ID NO: 333741 - DNA, 172 bp, Zea mays
cggaattcccgggtcgacgcacgcgtcctgattttttttacactttactggattttctttccctgaatcggaattggtctttgggggagctatttttacacctggtgagggcccattctaatatcctttcctataaatgcacataacattttaccaaatatccttaatagtc

SEQ ID NO: 333742 - DNA, 133 bp, Zea mays
  unsure (1)..(133): unsure at all n locations
ttcccgtccgacgccactcaaactaaactacttcatacttaatggattttcatttcaagccnccaatacatctnnaaaacgacgatttattttataaaccttaccaccctaaacaactctccaccattttatc

SEQ ID NO: 333743 - DNA, 126 bp, Zea mays
  unsure (1)..(126): unsure at all n locations
tttgtgatgtcgcatcttgtgcactcggctttgtataatattgngcttgcctgctatagggaccgctatcctgtattatgggatgggatatatactactactactactggtttattttcctttaat

SEQ ID NO: 333744 - DNA, 311 bp, Zea mays
gtccggaattccctattcgacccactcgtctctctcttcactcgtgagttattaaagtttttactttcagaaaaactcaacacctttttaagacagttctattgatataaacaaaaggcaaccctctttttatcaattattacaactattaaaaataacttacaaattattatttaattcaattcaaaatctaaataatattaattataatctaaatctaaaataattaaaatcatattataatttatatttatatcttaataaattaaattataaatattcatttaatatatatataaataatataatat

SEQ ID NO: 333745 - DNA, 330 bp, Zea mays
ccggtcctgaattcccgggtcgaccgacgcgtccgcaaaaacctttcctgagacgagtatccgctttcattcatgccagagcttatttctcagatgtcggttcaactttatggccagctctctgaagttccactcacaatttcacatagttgctgctactgcaaccgggacaaccttgattagtccgcctttggacactgattcctgcgtttaaccgacagataacgaagcataatgcggttatatagcgggcgctaatggtcactgagtagttagcatgcagatactaccctcctgtacagctttttaataaatatagtagcagtggta

SEQ ID NO: 333746 - DNA, 209 bp, Zea mays
  unsure (1)..(209): unsure at all n locations
ccggcccgacccactcatcctcccactcttcctaaaaaaaaaaaatttactataaaaaaaaacaaaaaaaaaaaaaaggaaagatattttaaaaaagtaggaaagccccccccaacacncccaattccccctaatcttattactcccacctctttcttcccccttcctcctactttaatcctcttcttcacttcctccaaatctaattc

SEQ ID NO: 333747 - DNA, 432 bp, Zea mays
ccggtctcggaattcccgggtcgacgccactcgtccgcccacgcgtccgggtgaatcaaagttagttcttatcccaattgtcgtcgctgtagactgtgctttcccaccttcagacaaggttggcataaattccgtccaaagggaaaatgaggaaatagtgccaatgaaggcgatgaagatggcatgggtgccttatgttccccttgagaaccggctgagcaggattgacattttcaaaacaaatatattcacgctcggatgcacacagcgaatgtctgcactgaagcatctcaaaattgagagagtcaagaagtttgactactgcatgccttgtaagcttaatcgagtttgtgcataatattttatgacgcttcatctacattattagtaaaatggctgcaatggaactctttgtcaggttatttcattgga

SEQ ID NO: 333748 - DNA, 292 bp, Zea mays
  unsure (1)..(292): unsure at all n locations
accggttcggaattccctggtcgacgcactcgtccgtctgaagatagaactattccattatttgttattgctgagcggactaagctttcaggcaagttcttttaatgtcttcttatgaanagcctctcggttcatcttatttagggaataattgatgaagtgtacagtacatttcacgtatcatgtgtccagcctatatttctttgaatttcacatgtttatgtctttttctaccgatttgattcctttgtttgtttagttctttccttattttttttttttctatctttat

SEQ ID NO: 333749 - DNA, 161 bp, Zea mays
attcccgtttggaccgcactcttctcttaaactatcttattccacctatttttcttttttcacggtcacattctcattatgggcaggttcatttatacacttggagggactttttctattttcttcatctatacttttttttatatctctacaaattttac

SEQ ID NO: 333750 - DNA, 273 bp, Zea mays
  unsure (1)..(273): unsure at all n locations
cgaccgacgcgttctatcaaacattcactaactctttccttcattttattctnaaagacaagagaaaaactcacaagaatgacttttcttgaccggtggcaggtcaacaacttnttcatcaaccaaatgaagagcctttctaatccatctcatctcattccatttgcacataatggagcttgttctcctatgatagaccgtttctttgtgtgtttagggcaatacctcgcatttgctttgagaattataatcgtggttaaacctgacaatgac

SEQ ID NO: 333751 - DNA, 398 bp, Zea mays
accggaattgaagggccggccggagcgtcgcgtccgtctttcgtcttatcttgctcaacatctcttttgctctgatcttgggagtgccagtcggtgtgcgttgtggccaaggagaaggaaaaaacttcttggacagcatctgcctgcgccggtctgatgggcttgggttgcttcgggtgcttcgcgccggaggtggttgaggaccttaagcccttctagcccgactactcgttatgtgccgtttcgaggaggatggttctgccggatgttgccatctgctactcgcacattttcacctttttggacctgcttgtctcttaccgtcttcttttcctctcttatttggttggataatgttgtttcgtttagtttttcattgtcattttcatgttttttat

SEQ ID NO: 333752 - DNA, 65 bp, Zea mays
acccactcatactctatattcttttccccaaaaacgctttcttttttaatcatctttacctaata

SEQ ID NO: 333753 - DNA, 446 bp, Zea mays
  unsure (1)..(446): unsure at all n locations
ccggnccggaattccctggtcgacgcacgcgtccgcctctcctctcctcttgctcagtctctcgttggctctgttcttgggagtgccagtgggtgtgctttttggccaggagtaagggaaaaacttcttggacagcatcttcctgctccggtcttatgggcttggtttgcttcttttgcttctcgcctgaagttgtttttttttttaatccttttaattcatattacttttatatttcctaaacctatattaatttctaatttttttttatctaatatttattttttttttttttttttttactgtttttataattattttttttttccttaataattattgtgggtgttgttttttttacattattcatttccttctcatttctttatttataattttttatcgttttttaaaatttttttattatttttttatttttatttttt

SEQ ID NO: 333754 - DNA, 79 bp, Zea mays
gtttttaattcccggtccgacccacttcttcctctatattcttatctccaataactccttcttttttttcttcttcacc

SEQ ID NO: 333755 - DNA, 410 bp, Zea mays
aattctgctctttgactcaaggggcggatctattaaaccggaaaccgggactaatctcattgtgacattttttaggggatttcatcacatttaatcctattttataaactcaaatgtcatccgaaattctatttaacttatggaaaaataaaataatttctctttcaatcccctccaacttctgattatttaagttcctaaacttatccttattgaacttaaatccttttttttgaattgtaagtgtttatagaaaaatatatttacctgcttgtgatatatttttattttttttattttttttttttttttcttatttttttttttttcttattttatattttaaatcttacacttaatctcttttttattattttctttacttttatttaaatttttattttatattt

SEQ ID NO: 333756 - DNA, 481 bp, Zea mays
cggaattgacttgtcgaccgcgaccgatctcgtccggtcctctaatgccatgttccgtgtcttactttttcacttcaagaacacacgttagagaggtgttttcccttaggaaggggtcgctcaccaatgccaaaagtttccttgaggatgttatctcccactatcatgccatcccgttccgcatgtattgtggtggtttttttctcatatctcattcttattctttccactcaaatttttcattgactctattcttttctattcttttatattcattttatgtcccttttttaattaattttttatttcaatttcattagtaattttgactcatttttttattctctttttttgtgttgtatattcttattttttattgttttttttatctctttttcttttaattatttttttcatttttcatctcttattatttcttacttttatttttcttctattccattttaatatctaattcatt

SEQ ID NO: 333757 - DNA, 284 bp, Zea mays
tttggaattcccgggcggaccgcacgcgtccggaaaactagaaaaggctcctcccgtctgcaacgcccctcatctccctctaccccgagaggcttacccgatggcgccgaaggcggagaagaagccagcggataataagccggcggccgaggagaaggcggagaagacgaccgcagggaagaagcccaaggcctagaagcggctgccctcgtccaattccttcggcaaggagggcggcttgaagaaggttaagaagattgccatgaagagcgtgtagacctaca

SEQ ID NO: 333758 - DNA, 396 bp, Zea mays
  unsure (1)..(396): unsure at all n locations
ccggnctggaattcccgggtcgacgcactcgtccggcattgtggatttcagagacggtatacgcttgtaaaaacaatcatcatcctctccgtctgtgaatgacgaaggtgaggcacgcgacntatcatgctataggctagcatccgtgctaatattttgtggcaccccttgatccattccaaagcgaactctgttgtgagttttctatcgttttgccactgcctacaactgttctgcgctttgccctttattattttttattattattcttattaatatatttgggctgccgtttctatgattatccattcttatcttactctttcatgctacctcttaggtggtggtgtagtgtcttctaaattttatttttctgtcccggtttttttataactt

SEQ ID NO: 333759 - DNA, 441 bp, Zea mays
  unsure (1)..(441): unsure at all n locations
aagcgtcctaaaaaaaatatatcaattaattatataaaattatattttaaaaaaaaaaaaaaaaaaaaaaaagaaagtttaaattaaaaggctggcgggctaaaattcccnccctttcttcctcatactaccaacattcttatctctttcatttaactccaaattttttttctaccaccccatattttacaacttcttcccttttataactcatttctccccaaataaaccttctttttacctaaccatacttttctaacattttctataatatttttatatccctctccttatatctcttctaaactatttcctatatcttttattatattttttccccccctttttctacttattatatcccctttttttattcttttaactcctcttttttttccatttacttctcttttttaatttctaatattttatctttttttt

SEQ ID NO: 333760 - DNA, 82 bp, Zea mays
cggaattcccgtgtcgacccactcgtccgctcacgcttcaggacatctcctacttcatttcctttatatatcaccattaacc

SEQ ID NO: 333761 - DNA, 199 bp, Zea mays
ccggtttcggaattcccgggtgcgacgcactcgtctcgctccatctcgtccttccactcgtcctgtctctttctgtccgcccatcgcgtccggtaaatgcgagggcgttacctgatactcgctggttaatgagatttgtggatttgggttgagacatatggtgatttgagataatctaagttctgtgggttcttgatcc

SEQ ID NO: 333762 - DNA, 112 bp, Zea mays
tgaattcccgggtcgacccactcgtacggttggaaattttactgaataatggaagatatcttaggttcaaaaaaaaaaaaaaagggaagggatatttaaaaaggggggaagg

SEQ ID NO: 333763 - DNA, 378 bp, Zea mays
aattcccggtcgacccactcgtccgcccactcgtcctcccactcgtccgcccactcttcctcttactcgtgttctacatgaccatgtatgattttaacgaacagactgaaaacatgaaacaaattcaggatgctttgtcagctcctcttggagcttttgctgatttcgacgaggatgaactgtaagctgaacttgaagaactggagggagcagagttggaatctcagcttcttgagcctgttgcagctccttcggttcatccagtgcatgtcccagccaacaagcaaccatctcgccctgctccacagaaagttacatcttaagattattaacttgcttcacttcaagctgaaatggctttgtgatcatgttctcatg

SEQ ID NO: 333764 - DNA, 379 bp, Zea mays
  unsure (1)..(379): unsure at all n locations
gaatttccgggccgaccgacgcgtccgnccaggcgtccgttaccattctgatgacagtcatgtttcctctgttaatgacgataagatgatccggtctgcatcatatgttcttttctaccgacaagttcgacgttcaagtacagcggcaaacggtcgtccagctgacattgaaatggtcgattcactagagacatatttccccagatcaaagcctgactataatatgtgaatcgagatattgagatcataccagttatggacattacatgtctgctacgaaatggaatatctgtgtatgaaacctttgacatttcgaggcatgtcagacaccttaggacctaatagcgtaatctcttgaatctgcacatctatatgattg

SEQ ID NO: 333765 - DNA, 315 bp, Zea mays
tacgtaaaaattggcatccaatttagcattatagacacttaaaaaataaaaagaaaaaagtaaaattaaaaaaaaaaaaagtacaaaaaaaaaaaaaaaaaaaaaaacaaaaaaaaaaaaaaaaaacaaaacacaataaaataaaatgattaactaaacacatacttacaaagaacaaaatcaaaatataatactataactcgaaataaacaaatcacaacatatattaaaacttcataacttgtaaaaaattaaaaatccaaaaaaaaaaactactacaataaaaatcatgttaaaaaaacttacaaaaaataa

SEQ ID NO: 333766 - DNA, 311 bp, Zea mays
aattcccggctggacccacgcgtccggaggcgaaggactacgtacaaggtcactttcacaggcttctataagcttgacgccaaagtctgcatccagatacgtgctgccgaatttgaaggtttcaaccccaaggcagaactctgaaacggttttaattgttcttaaacttgataagtctatgcgatatacttttgtacaaaatcgtctaatcaataaagtgggcacgtgcctaaggaccctaccctactttgtctgtatgtacatctactgtcacacttaaacagtacctgcagctatgcggtgttttgggc

SEQ ID NO: 333767 - DNA, 220 bp, Zea mays
  unsure (1)..(220): unsure at all n locations
attcccgggccgaccgactcgtccgcccacgcgtccgcggacgcgtgggcgtgattttgcttgaccatattactattagtccatagatnaatgtatnatattcaacttcaaccttaattaacttaacaattatatctagatgtcattcaaacaaagttcacaatattgaagaaatgattctctcaatggatgctcaataagatgtgactcaagaatggct

SEQ ID NO: 333768 - DNA, 319 bp, Zea mays
  unsure (1)..(319): unsure at all n locations
atttccggatcgaccgacgcgtgcgcccagacntccggtggcaacggatgacacttatattttaggtgaactttataagctcaatgtttccgtcctatatctattgaaactagcatccaaagaggaacagggtgattatgtcggtgcatggtacagtatgcttctgtcctgtgctcaagaattgaagcatggcgtggcactttggcaagagttttatcatgcaaatgtctgcgacagagtagtttctgaaagcggtcactactttattgctcttggggagatatatagagttgcacagattttatacttatcctttcaa

SEQ ID NO: 333769 - DNA, 272 bp, Zea mays
gtgaacaagtgtttagcttaactgattgatgattacagcatggttaagttcatttgacatgatttgagacccgaaagcatcatacaatatgtgctatcttctatctacacatgtatccagtatggtgaatattcatactttaaggtcaggtacttctaataatactaatactaaccactggatgctattgtaagtgcaaactggttgccaacattcatatatggcggagtgagacttttttactgtatggcgcaagcattcaaaaacctcct

SEQ ID NO: 333770 - DNA, 330 bp, Zea mays
  unsure (1)..(330): unsure at all n locations
aatccccgggccgacccactcgggcggatgcgtatcattctcataagtttcaagctttacgccaaacgaccaccacctcagcncccgttcaaatttaaaaagcccctagcccctccaaaaaaaccaaaacaataaacaccactaaaacacaaaatcactctcaaacatcaacctctaaccccataacccctccaaaccaccactctcaccacctacaaaacctccacctctccacaaaccatcttctacaaacactcatacaaccaacctccattctcctttactcaccaaccaaaccaacaactaccacatcactctatccacacaaca

SEQ ID NO: 333771 - DNA, 117 bp, Zea mays
atcttttaaggttaacctttataataacaaacatagtatttttggttataattaatgaaacatttatttaaaaacaatctatataaatcaattttactaatcacatacaatcaatat

SEQ ID NO: 333772 - DNA, 363 bp, Zea mays
attgatccttccaatctaactgtgctttgcattgataagattatgttcaaatttaaaggagctcagtccctccagagcatctgccatctgaataattctcaatagaatggaatggttgtgccttaatgttccttgccatggttaattttcctttatacatcttgccataatgtccacattctaagggaccactgtcacctggaaaccttttccaatactttttccccattcaatgtacatatttccatcccttggtgttttagctgttctcatcaaatctaaactgaatcttggtacattggtgtatccttaatttaaacactgcaattttaaaaagatttttccccttttaaattttttgct

SEQ ID NO: 333773 - DNA, 243 bp, Zea mays
tattttatttttaattttttttttattattcttttaactgaaacaagttattttaaaaattccacagccccatcaaaaacatttaacccaaaacaaatatcaatcaatattaatttataaaaataaccaaattatttaaatccaacccatcatattcatcaatacccttatacaaaaacatcttaaactcaacaatcctatttctaaaccccttcccttactctttaccaaccataaacctaa

SEQ ID NO: 333774 - DNA, 110 bp, Zea mays
  unsure (1)..(110): unsure at all n locations
ctctanggaccgatagaacattgagccatcccatccaccaaaggtattctgccaatttttaaagcatagaacccctaccatattctttaatttgtacgctcaaatatact

SEQ ID NO: 333775 - DNA, 126 bp, Zea mays
  unsure (1)..(126): unsure at all n locations
taaaacgaaccaatacatggagattgtctattatacactatgtacatctttaagtcttatgttaacatttacatagccctatcatacaaccnncgggggaggggtaaccggcatgcctattctaaa

SEQ ID NO: 333776 - DNA, 208 bp, Zea mays
ttactgtcttcttattcatatcacgacccaggttattttaaatattccaaatctccatcacagatcagaacccatttctacaataattacctaccaattgccttttagaaaccatttaaaaacaatcctcaccctctaacacataaattcactaaaaaacataaatctttaactcaataaatcctataaaaaattccctccccttaca

SEQ ID NO: 333777 - DNA, 252 bp, Zea mays
acgttcaaagcctatcacaatttctttaacttcataactctgaaggccatgtaaatacttatatgttatctgaccttcaacaactttgtcaacaactctttcaatctattcccaaccttatacttaacaacaaatctaagaccaaactgactatccatctttactcaatccacataaatctccccgctatccttcacgacccttacaacctaacctcttatatcgctaatagacacacctctactaatatca

SEQ ID NO: 333778 - DNA, 228 bp, Zea mays
actcagccaatgaagtttgcatctctgcctaactgaggtcacccaccgataaactgagagacttgctgcgcaaatgatcctcctaaaagcaacctgcacctctatctgatgattgaactcataggctcagaataattacataactttgtaactgttagcactttaccgttaaacaatgtcattgtcaccatccatatgttgattgtttgctcgcttgaatgtattaag

SEQ ID NO: 333779 - DNA, 113 bp, Zea mays
tcttccatgttgtgttcatagctctcttcataccgtgtggtaaagatacttttatataatcccatttcattccctatcattctcatacccgttcaagattatccaatcaccac

SEQ ID NO: 333780 - DNA, 299 bp, Zea mays
caatctacccacgcatgcacccactcgtccacccacacgtcctcccactcttgatttaaaaaaaaaaaaaacaaaaaaaaaaaaatgtaaaattttaaaaaatctaaaacccaaaccacatctacaaaatcaatactataatactaaaataatacctatactctatcatcattcattaatcactcatacattcctctttcatcttatcccacttcaaatcaatctaataaaccaactactatccaacccaatacactcatatttaaactaattccattacaccaataatcacaattcta

SEQ ID NO: 333781 - DNA, 147 bp, Zea mays
tggactctccctttaactgttcatttaaccccgcttattttcttgtttcccccaacttcacccctacactttccaacccccctatccccccatacttttccctttctaccctttctttaatcccaccattcttctgtttttcccctt

SEQ ID NO: 333782 - DNA, 222 bp, Zea mays
atttccgggtcgaccgacgcgtacgccaacgcgtcggatccaatcgatggatcgttcgatctcaaacctctcgcgagtcgaatggggctccgtgctgtttttgacctgcgtaattaccaatctgcgtggcttactgaacacaaggctgccttgcttgtactgtaccttcttgaagcccaaaactgagtatatattattgatgaatgacgacatgcaaatgtc

SEQ ID NO: 333783 - DNA, 328 bp, Zea mays
aattcccggcccgaccgacgcgtacgaacgatttcgagtacaattcgacttaaacttacaagaccttactcagctattgagattctgttccctttcataagagaactgtacataccaacaacggtcgctgctgttgtactaccactagtatgcaatgtggaaccaataagctttgtatgcagcgactgaaacttctacatgtgtaagactgatcagtaaagtctcgctggactctggctcattggcgcttacaactttattcatgaaaaaagatccattaactctaaaattaaaagttggccaacaacatgtttctaaagaaacaatt

SEQ ID NO: 333784 - DNA, 201 bp, Zea mays
cccacgcgtccgcagtcctgcagcacgctctccaatgcgtcgtagcgtctcaccaactcggggacggagctatatcaagtcaccacaacacacaagttcacacttaaaaaaattcctatattaaaatgatatcacccgcacaacaagatctagacccatatctttatatcccacaacaagcgttatgtcacatatattgaa

SEQ ID NO: 333785 - DNA, 224 bp, Zea mays
aatttccgggtcgaccgcacgcgtgcgcccacgcgtccgcccacgcgtacgcggacttgtgtttctctcagtcagctttatagctccgtgaatgtacatttatatcgctttacatttattatttatttttgtaagacttccgctatgtaataatgacataataatgacatttatgatatttgtgacatttatctctaaaaaaaatactatataaaattcaaatt

SEQ ID NO: 333786 - DNA, 110 bp, Zea mays
actgcaattaaattctccaattaattttttagacaacgttcatctcatatttgaattcgtaaaccctggaaacatgagccatgcaaagataaaaatgagtttgttttaac

SEQ ID NO: 333787 - DNA, 299 bp, Zea mays
aatacccgggccgaccgcacgcgtccgcccaggcgtccgggatgaccagttttacattttctgttgctgacgaaaagaatcgatcatgttcttaattaataagcgaggaatgcaaatgtttattgtttggactagagtgaagttgcatcagaagttgatgctgaagcctgaaggcactcgaaaaatgttgcagatgcatttctacctgtatggcaatatttagggagtcgaatatctgctgtatgtcaatgagaaaatgggttttcaaaaaaaaaaaataataaaaaataaaaataaaa

SEQ ID NO: 333788 - DNA, 190 bp, Zea mays
aattcccgggccgaccgcacgcgtacgcatggatctagtggccggtgaatcactgatcaaagagcgagcagccgccgggttgaattggtttgtttgatccctggatgtggcggctggcgaaccgcttcttcttccacaaagattcagacaaaaccgagcttggatagaactgaagaagatttggcgaacg

SEQ ID NO: 333789 - DNA, 396 bp, Zea mays
gctccacctccaccatgttttcacctttccctccatcaccttctccttcgtccatcgcctcatttacaacttctcgagcacccccacaccaacccctaccaccttccaccataactcctccaccactactatctacctctcctccaactataacctccaccaactcctcaataaattagtgtaccttaacaagcatcgagatttactataactggacctgattctctagacctagctcgaacatcactttcacaccattcactatgccaacatccacaccctccatcaagtgctcaacctctaaaacccatatttctgtaaataattgactatccaagatcatccaccataagatctgaactctaatcctctgttctcttccatcaaatcaaatat

SEQ ID NO: 333790 - DNA, 387 bp, Zea mays
cggtctcggaattcccgggtcgaccgcacgcgtccgccaacgcgtaagcggatacgaccctacctttcaacgcccacttaaactgctactgctctggaaaaaaatgacactgtgccaacctgctagaaatgattacagaagcatcattcaatcccatctgaccatcgcacacctgctacgatgttgctatttactacgatgccctctagactccgcctgctaaatagtgtactgatagctacatatagaaattcagatatacggacgctactcacacgatttctatgctgtcctactcctacgaactcaacagctttctctacatcacgcactaaacaagatggctctcaatgtctccagatcatcatgtacatactaaccgatcat

SEQ ID NO: 333791 - DNA, 269 bp, Zea mays
aattcccgggccgaccgacgcgtacggtcgctgacactatcagaagatgtgtacattacaagcagggaggtggagccagcgtttttgtgaatgataagcgtctttggtcatttgttcattcttttttttacaaaaaaaaaagagtatgtaacatgagttatacaactaggctgttcttcgagaaacaacctgtaactgtctgtcatatacttgacgaatgagaagcgttttcgtaaaaaaaaaaaaaaaaatataaaaaaatactacaa

SEQ ID NO: 333792 - DNA, 101 bp, Zea mays
atcacccaacctccatcgcaaattcaacccaccctctatcgccacattaagcccagcatgtctaattcttacacccatccaaacctctacacttgccacat

SEQ ID NO: 333793 - DNA, 228 bp, Zea mays
  unsure (1)..(228): unsure at all n locations
aattcccgggccgacgcacgcatacggaagatctttccacgacagctgaacactacttatatcaaatgaaccaccttacgaantaggtggattcttaagctcatgggaacctacaagaacttgtacagctgatctctaaatctggtcgcagctccatactcaactacaaatgtggaaccaaaaaaataatccacttgtccaaaatcctcttaaaggcccccgaaccct

SEQ ID NO: 333794 - DNA, 112 bp, Zea mays
aatttccaaaacgacccacgcgtaactaaaaaaaaataaaaaaacaaaaaaaaaaaatttaaatttaaaaaaaaaaaaaaaaaaaaaaagaaaatgtaaaattttaaaaata

SEQ ID NO: 333795 - DNA, 222 bp, Zea mays
tcattcgtcctccatcttcctttaccatccctacactatcgccgagctgcggttacccttataccgaccctacccccctatcacattatatccccaacgtattctacattcaccacatcttccccttccttctttccactaacgtcatcatctaaatccttttatttacccttacctacattatatacctcaactacaaacatcacttatactactaacctt

SEQ ID NO: 333796 - DNA, 316 bp, Zea mays
gaattcccgggccgaccgcactcatacgctcaatcatacaatactactacttttacatttacatatactacaaaaactacggggccggggtacatttacaaatatctaaagccattctataactacttacacaacataaatcacaactacaataatgactaaccatcattacccatactctacaccctctacatccttatatatactcttaccaccatcatgtaactcacctctcttcaccactctatcatcaacttcatacaataccacttcacccactactttcccaaccttcctaccaccattcataagaaca

SEQ ID NO: 333797 - DNA, 383 bp, Zea mays
attccctggtcgaccgcactcatgctgataatatacatatactacacttataaaatttttatatattataacaaattctcccaaaagattgattattaaaaagctctgccccatctcaatataaccattttaccacatgcccttcatctccccaagtttgacaaaccattcctaccacataaatccactaaacattttacaactccgaaatcgccacatattccaatataatacctaatcgctatacaccatgctttaatcatatcaccaccgtactcttctcaacatctcttctactttgtttatctatcttatcctttaactactaagattcttttttcccttaccaatttttaaaacaatccaactacccatttcccctt

SEQ ID NO: 333798 - DNA, 339 bp, Zea mays
aattcccgggtcgaccgcacgcgtgcggcgggtcgagatggcggcgtcggatgttgtttaccgctgcttcgtcggcagcctcgccttgtccaggtacgaccactccctccacaacgccttcagcacctacggcgaggtcctcgagtccaagatcatcctcgatcgggagacgcagaggtcccgcggcttccgcttcgtcaccttctccacggaggaggcgatgcggaacgccatcgaaggcatgaacggcaaggagctggacggccgcaacatcaccgtcaacgaggcccagtcccgcggcggccgttgaggcagcagccgctgccggtacagtggtgg

SEQ ID NO: 333799 - DNA, 333 bp, Zea mays
attctccgatcgaccgacgcgtactcccaggcgtcctatggagaactgaagctttttttgttatactgattatgagttacctgtagtttggttaaaataaaaaaaaaaaaaaacaaaaaaaaaaaaaaaaaaaaaaaaaaaaaaaaaaaaaaaaaaaaaaaaaaaaaaaaaaaaaaaaaaaaaaaataaaaatttaaaaaaattaaaaaaaaaaaaaataaaaataaaaaataataataatataaaataaaataaaattatcataaaaatctttaataattaattatattaatttttatataatttaaaaatattattttatattaattaatt

SEQ ID NO: 333800 - DNA, 335 bp, Zea mays
  unsure (1)..(335): unsure at all n locations
attctcctgtcgacccactcgtactagcgtctctacaaaatctgttcactaccgttacggttttaccagctgcgccttttccatcggtctgttcaaacttcattgtcgctctactctctcctncattaccttttgcctctcatcttgtccacttgaaactgatccacatcttaataacataactttcttgtccaaatttaatctttcttctttcaacaatacaaggagtcatttacaacaagttttttacttttttattccttcatttttctaccttctcataacaccttctatttttaatttcccaaatttctatcttaatatcttattaccta

SEQ ID NO: 333801 - DNA, 326 bp, Zea mays
ggtccggaattcccgggtcgaccgcacgcgtgcggtgatatacgagtcatccagcaaatatggttgaccgacgattgatgtcgattctgttttggtctcttacctccaccacccatggagctattgtttgaggaaactgtaagcaaagagatgtcgtgggaaaggaacgtgtcgtcctccctagatctttcactttggcgaattaggaggcaggtgtgataaataagagtcttgctagttcgtcgtcgtccatgttgtcatagatcctgtcttgtgtgttcatgttactgtgatgcaggcaattgtgtgttgtgtccgggcgttaa

SEQ ID NO: 333802 - DNA, 329 bp, Zea mays
aattcccgggtcgacccactcgtccgaaagaaaaaaaaaaaaaaaaaaaataaaaattaaaaaaaaaaaaaaaaaaaaaaaagaaaaagaaaatttaaaaaaaataacaacccctctaaaaaaatccaaaacttacaaacacatacatacaacaaaataaaatcttctatactgtcaccaaaatccaattcactgcccctctttttacaacttcataactttaaaaaccctcccttaacccaacttaatccccttacactacatccccctttcaccaactaacccattacctaacagaccctaaccaatctcccttccaaacattttcc

SEQ ID NO: 333803 - DNA, 342 bp, Zea mays
agccttcctggtagctagacttttacctatgctgagaacatcatctggtacgactctgttcatttcaatggttcacgacccatgactgaagctgctcaaagctccattctggatggtgtacatcattacgagctccaatgttgatgtcagtggcctctctttctcgatcttctccatttttactttaccttatctttcttttttaatgaaccacttcttgtgctcctgatttccttttttttttctttgccattactctttttattccattgttagttatggtctcctaaatttaatcgatcttacaaactttctcttttcttttaaaataattttaaataa

SEQ ID NO: 333804 - DNA, 348 bp, Zea mays
gaattcccgggtcgaccgacgcgtacgcccaggcgtccgcccacgcgtccgttccgtttaagacgtgttttgatgtgaacgatcagtagtgtgcttacaaacaagtgatgccctattcttctttcacttcttgccgcttttccaatggttaaaacattcccttctaataattcttacaccttttttttttctttctttgaaaagaacctaataattcttaaattgacccaattgtttgaattgtaacacgcacaaaccaaggttcgtcttttctacttttgtataagattgtgcctctaataaaatggtctaaaccccttactaagggatctgcttgaaacaaataat

SEQ ID NO: 333805 - DNA, 273 bp, Zea mays
  unsure (1)..(273): unsure at all n locations
tcaaactatctatttttagtactagcantgtcgtttcnttttcagctntgtttaaattgtattaagacatgcccttnaccatcaccantatctttccntttgaatcanttntaatgcattcatcntcattcttggctcttcctgatctatctttcattaactatctatattatatcattatcaatgttattcaattattctttttcaaaaaaaaaaaaaaaaatctgcctctctatattatccaaccttacttacgccttcattccacttcat

SEQ ID NO: 333806 - DNA, 295 bp, Zea mays
aattccccggtcgacccactcgtgtctacacacatacccaagaacatcctttagattatccataccataactaacaccatggatatgttctacactaacatttacacttccattaccattcttatctctgttctcacctcttacaattctatcttcattgtcataattattttcgttccaccttttgctctacctttatctctttactaatccttttcactttcctcaacacttaacataatatttcctacaatcttcactcataacataaattaactaaaaaatttacataaaa

SEQ ID NO: 333807 - DNA, 336 bp, Zea mays
  unsure (1)..(336): unsure at all n locations
cggtccggaattcccgggtcgaccgcacgcgtgcgcccgcgcgtccgggggcgacgaaaatggcttcaacgaccgccaccaaggacgacggtntagtcggctacgagcgccggcgcgagctgcaggcgttcgacgacacgaagctgggggtgaaaggcctggtggactccggcgtcaagtccatcccgtccatcttccaccacccgccggaagccctgagcgacataatttctccggcgccgcctctgccgccgtcgtcgccctccggcgccgccatcccggtggtggacctctcggtgacgcggcgcgaggacctagtccagcaagtgaagcacg

SEQ ID NO: 333808 - DNA, 380 bp, Zea mays
aattcccgggccgaccgcactcgtccgcccacgcgtccgaaaaaaaaaaataaaaaataaaaaaaaaaaaaaaaaaaaaaaagaaaaagaaaaaaataaaaaaaaaaaaagaaaaaaaaaaaaaaaaaaaaaaaaaaaaaaaaaaaaaaaaaaaaaaaaaaaaaaaaggccccccctttaaaaaaaccaaattttacttccccatcattccaacataaaacctcttataaagaccccccaaaattaaattaatttccctttttttaaaaaccactaaattgaaaaaaccttgcttttcccaaacttaatcccttttaaaaaaatccccttttcacaaattgactaaataacaaaaagacccaatccaaaaccctttccaa

SEQ ID NO: 333809 - DNA, 276 bp, Zea mays
aattcccgggtcgaccgacgcgtacgcccaggcgtccgcccacgcgtccttccacttgtccgcccacgcgtcctccgtcctgtaacgaattcttatgtagtagggctttcctgctttgttaaagaataaacaatgaggtttcagttttggtggcgcaaaaaaaaaaaactaaaaaaaaataataaaaaaaaaaaccaaaaaaaagcaaaacttaccatatattaaaaaaaaaaactaaaaaatttaaaaaaaaaaacggggcgccgttttaaataa

SEQ ID NO: 333810 - DNA, 204 bp, Zea mays
tttcacccacgcgtcctcccactttttcgaaaaaaaaaaaaaaaaagagaaaaaacaaaaataaaaaaaaaaaaaaaaaaaaaaaaaaaaaaaaaaaaaaaaaaaacaataaaaaaaaaaaaaactaataaaaaaaaacaaaaaaaaataacacaacaccaaaaacacacaaatataacaaaattccaccgtatacaacacaca

SEQ ID NO: 333811 - DNA, 373 bp, Zea mays
ggaattcccgggtcgaccgcacgcgtgcgcccagcgcgtccgcccacgcgtccgcccacttttccttaagaagtagatcatgcacccactggtgatgacttcgtctagtgtccctccgttcaatgtcgtcgtcgtcgtcgtgtaccttacgtgacatgctgtagcacgtacgctagcagagcagcacctcaatgtccttgggtttgctttgctggctctctgttttcgtcttgtgttgcttttaatctggcacaggtttctaaattataataatgaatacttttttgtccattaaaaaaaaacaacaaaacatctaaataaaataataaccaaaagacatcttgaaccattatcattaacaaacactacaatt

SEQ ID NO: 333812 - DNA, 227 bp, Zea mays
ccaattcccaactcgacccactcgtcctaccacacatcctcatacttaaccaaaatgctctattttcctttacacattttacaacaacgatcatgtaatatcctcctactatctccacattttccactcaacatccttctaaccatccctcaacaaataatcacactacccatactaaccacaaatatacctacacaatccttattacaaacccttacttctcaaca

SEQ ID NO: 333813 - DNA, 181 bp, Zea mays
attccaccctcaccgaccgtacccctgttctcctactcttcaaactttagctttatcctccatacccttaccaaacgcctatgtagcttcacacaacactaccacaccgcaaattctctgccactcatctcgtccaggaaaacctccactgcaccgcccatcccttagccgactactacca

SEQ ID NO: 333814 - DNA, 279 bp, Zea mays
aattcccgggccgacgcacgcgtgcggttgtctcatgtcgatgctgtcccacattttcttccccatgtttttctggcgtggagattgtaaggttctacaaagtcacggtctccaaagtgacagcttgcttgattttaaacagtgtcgacagtgttttgtctctacacagattgcagatatagcggtttaaacagttcgctttaatccgaaacgaacaggctattttacctgaatcataaaacaaaaataaaaaaaacctctcaataaaattcaagcaaa

SEQ ID NO: 333815 - DNA, 148 bp, Zea mays
ccgggccgacccacgcgtccaaaagaaaaaaaaaaaaaacaaaataaaaaattaaaaaaaaaaaaaaccaacaatgttaagagtccaattttaaaaacccgtggatgcaaactaaataactcttctatagagacacctaaattcaatt

SEQ ID NO: 333816 - DNA, 341 bp, Zea mays
  unsure (1)..(341): unsure at all n locations
aattcccgggntcgactcgcacgcgtgccgcagaagacccagaggagaaccaacccagatgccgatgtcccaagtgaccntgtcagtcccatttatttcctatgggacttcgggattgtacccaatttnntagaagtcttacnntcgaatttctgtaagggcctaaagaatnccaatcagaaatgtgtttatttgggttttaggtcccagaattatttagtgcannatctgatgcccgtttgaatttnnctgttttccttttttaaccacccatgtacccaatangaaccattttcgggacccagtcattatnnngttcctngtatttctctttttcggtg

SEQ ID NO: 333817 - DNA, 213 bp, Zea mays
attcccgggtcgacccactcgtacgataggcttaaccacactaacacctactatttactctatctctctaccaatatacgggcacagtataatcatccttccagacaattactgtctatactccatctatcatttcaactttgctactgctgatgacatccagaacaccaacatcttctatatcctatgatctccatccatcctgacatctta

SEQ ID NO: 333818 - DNA, 169 bp, Zea mays
aattcccggctcgacccactcgtcctaaaaaaaaaaaaaaaaaaaaaaaaaaaaattaaaaaaaaaaaaaaaaaaaaaacaggtataggagaccttaaaaaacatacacatccatacaacaatataaactctactataatataacctaaattcaattcactctccatca

SEQ ID NO: 333819 - DNA, 390 bp, Zea mays
cccacgcgtcctgctgaacagtgcaacacttagatttgtatttaaccaactgaaatgtttgattccacttataaacgtttaaatcatataatgttgtttatataaaaaaaaaaaaaaaaaaacaaaaaaacaaaattataataaaactaaaaaataaaaaaaaaaaaaataaaaaaaataaaaaaaaaaaaaaaaaaaaaataccaaaaaaaaaaaacatacaaaaaaaaaacgggagaccctttaaaaggatccattttctctacaccttaatatgaaatcaaaacatttttttaggaaccaaattaaattatgtgaatgctttaaaacttgatgccatgtaaaaacctttgatataccaatttaatacccattatactaattcccctt

SEQ ID NO: 333820 - DNA, 313 bp, Zea mays
cacacgcgttcgaggacgcgttggttatttttttgagattttcattactgggttaactgagagatcaaagatgtggctaaccacataaggtgtacaaaatgatgctttgaatttagctacataccacaaagataaacctacatgcctgtacaaacattaaatgcccttgcggacagctccggcagcatggagcccaagtgccccaagaagggccccaagttccccaagaaggcttacaaagtggggacttcatttgcactgagtgctgtcacatgctcgtgtctagatatgtggatcatatgtgttctgatct

SEQ ID NO: 333821 - DNA, 315 bp, Zea mays
cgacccacgcgtgcgcggacgcgtgggcgtagccgtggtgcaactctccacgtacttggtgctgtaggcgctgcagtgcgacgggcgcctttgccgggccggctggcagatcctcgtcgagtccttcaccgacttcgccatgctctcgcatacactgtggatcctgttctaccaccggctgctgctgcccaagctccgcaagataaccggtacggaggaggggttcacgctgctccagcgccagggcatcaggatcgtgctctgcactggacccatggtcatcataggcattgtctaggacacgacgccgtgcca

SEQ ID NO: 333822 - DNA, 74 bp, Zea mays
aaaaaaaaaaaaaaaaaaaaaaaaaaaaaattataaaaaaaattaaaaaaaaaaaaaaaaaaagaaaaaatggg

SEQ ID NO: 333823 - DNA, 223 bp, Zea mays
cccacgcgtccgggtacctgttgaggtgtgtaagacagtagctagcaaccgtatgcctgggtttcctgtttgggtgcgtgacttgccgactttctagctgcttctggggttttgacctcggtaaggaaagaataaaaagataatcggagtgcaatgctaaaaaaataaaaaataaaaaaaaaaaaaacaaaaaaaactaaaaaaaaaaaaaaaaaattaaaaa

SEQ ID NO: 333824 - DNA, 385 bp, Zea mays
gggagaatgatgcgatgatcaattcaaccatcagaattctttgttctccaacgatgaaaggttttacgcgtgagaataaacagcgcagagtggtgagcgctatataaaagcactgggcttgcactgttgttagtggttcatttgctttcttagattcggatagtacagttggtggatccatgattgatgtggatacatataccatgttgccatggcagcctgtttatcacacattcacttcaactagaacattgcggcgccctcacgggcgccctaccaaaaaaaaaaaaaaaaaaaaaaaaaaaaaaaaaaaataaaaaaaaaaaaataaataataaaaataaataaaaaatataataatttacaatttaaattatttttaatt

SEQ ID NO: 333825 - DNA, 210 bp, Zea mays
aaaaaaaaaaaaaaaaattaaaaaaaaaatataaaaaattataaaaaaaaaaaaaaaaaaaaagaaaaattgaaaaattaaaaaaggaaaaaaaaaaaaaaaaaaacaaaaaaaataaaaaaaggggccccctttttaaaggttccaacttttcttccccttcctttcaactctttaccttttctttaggttcccctaatttaatttcct

SEQ ID NO: 333826 - DNA, 260 bp, Zea mays
gctaagtagatagaccagattaaatgacattttcctatctacaatattacggacccataggacaacttacatgcccatgtggaacaatcaacttatcacctcatataacccattatcattacacatgcacataaattcctttacatttcatttatataactcaacctgcattatattatcattggttgcacgttttctatataaattctgtgacattaccaacttacaatattgatttcatctaaaatgtaacatatttt

SEQ ID NO: 333827 - DNA, 309 bp, Zea mays
ttccctttcgacccacgcgtgcgcggacgcttgggcttcgggcaaggtggcctttcatatctgttttcaccttgacatggttgcaaagcacggaatgtattggactgacctacgagaaatggctgctctgcgctgttggttcacatagggtctctgtatagacgcttgtccatatcaagtaacctgtttagaccaccataccaatatcaaatataggctgctcgctgtatcatgtccacggttacctacgcttgcatacgaacatatgctgcttctatactgtcgtcaacatctgtttagcatgacaca

SEQ ID NO: 333828 - DNA, 405 bp, Zea mays
gctggaggcacaccatctgctaaatatacaacgtgagtgcatccctgtcaacagccgtgacaatgtgggtgctagtgttgagactgcccccgagagggttaccagctacaacaccatcgcctacaacgttcgattgaaaaatgctctggcaaaccataaggactttcacattgacatatgccctcatatactcacgatgaacctcaataaggatcaccatgactaataacgcctgaaattacacgtacttgtagaggtacaatatatgtatcaagagattgaaatggtctataacctgtaaatctatcactaagagcatcaatattagcacttattaaaccttattactaccgatgttactacctaatttatatacttctctaaaaattatgcttaaaaaaatat

SEQ ID NO: 333829 - DNA, 213 bp, Zea mays
cctgctgtcatgcatttaagttttggagaccaaaagggaaaattagactaaattataacaaccaaaaaaacttaaatataaaaaaaaaaaatataaaaaaaaaaaaaaaaaaatatcaaaatctaaaactaaaaaatatccgtataaaccttaaaaaggccaaatttaaatagtcaaatttcatatgttaactacaataatcatgctaataac

SEQ ID NO: 333830 - DNA, 302 bp, Zea mays
gctttatgatcctcaaaaagcagatggctttccataatcccatgcaagatgatctgccggggaaccagctacatgttaacactctcatccataccagccaataccgaataatatcatactcctagaaaggcttcacaggccgctatataccaatgtattgtaggaaaaaacatcttgggttacccaagctaaaccaccttgaacatcatggcacctgtctccaacatagacaatatgagagaagaccgcatagatcgctgttctgaacaggggcatcaacctacaatgagcgaaggggacac

SEQ ID NO: 333831 - DNA, 72 bp, Zea mays
cgaaatgatctcactaacatattcaaggatttcatttcgacaatgaaagttgagaacagaagttacaatgtc

SEQ ID NO: 333832 - DNA, 171 bp, Zea mays
taaatatctgccttgcgttattgaagaatgtataagcctaaaaaaaaaaaaaaaaaaaaggaaaaataaaaaaaaaaaaaaaggccaaacaatataaaaaaataccaaaacataaaaacacatacatgcaacaacataacaaatactatagtgacacctaaatatcaataa

SEQ ID NO: 333833 - DNA, 272 bp, Zea mays
gtttcttttattaaagggtcgtccgagtttcttctactaaatggtgggtcagaccgagttgttgtttttgtttttggtctgaattgaatagagtgtctgcttgttaagactggaatgtgttatgtgcctttgttaagactggaatgtgggaatctttgagtgattcggcatgtaactaactggaggccacgagatagtttgacgcaaggcctattacccccttggaggagagtgacgatcaaaaacaaataaactaacaataaacaaaaata

SEQ ID NO: 333834 - DNA, 255 bp, Zea mays
ctcaaaaaaaaaaaaaaaaaaaaaaaaaaataaaaaaaaataaaaaaaaaaaaaaaaaaaagaaaaaattagaaaaataaaaaaaaaaaaaaaaaaaaaaaaaaaaaaaataaaaaaaaaaaaaaaaaaaaaaaaaaaaaaataaaaaaaaatgggagaactttttaaagtttacaattttaatattcaataattcaaatatattaactttttaattttaaatccaattttaaatcaaaagcccaaatttttaaa

SEQ ID NO: 333835 - DNA, 247 bp, Zea mays
cccacgcgtccgtggagtttaaagcctttgtggtggctcggtgctgttttttagggtgtgggctatgtggatggcatagtcatctttgagaaaaaaaaaaaaaaaaaaaaaaaaaaaaaaaaaaaaaaaaaaaaaaaaaaaaaaaaaaaaaaaaaaaaaaaaaaaaaaaaaaaaaaataaaaaaaaaaaaaaaaaaaaaaaaaaaaaaaaaaaaagaaaacaacattaaaatgaaccaaaaaagaag

SEQ ID NO: 333836 - DNA, 339 bp, Zea mays
cgaacagttggacacactgtgctgaaatggtgtgatggatacagtgacacattacttgcagatacatactgtgctgaaaaaaaaaaaaaaaaaaaaaaaaaaaaaaaaaaaaaaaaaaaaaaaaaaaaaaaaaaaaaaaaaaaaaaaaaaaaaaaaaaaaaaaaaaaaaaaaaaaaaaaaaaaaaaaaaaaaaaaaaataaaaaaaaaaaaaaaaaaaaacataaaaagaaaaaacaagaaccaaaaaaacaaaaaaaattattaaaaacaaagctgacgatacaacgactgagggctgtgagaatcgaccaggattttaaagaacgacctttagttac

SEQ ID NO: 333837 - DNA, 261 bp, Zea mays
caagtttgagagaaaaaaaaaaaaaaaaaataaaaaaaaaaaaaaaaaaaagaaaaaaaagaaaaaataaaaaaaaaaaaaaaaaaaaaaaaaaaaaaaaaaaaaaaaaaaaaaaaaaaaaaaaaaaaaaaaaatcataattataatatagagaaaactaaataaaaaaaacttgaccgaaaaattacaacgtaattactggaaaaaccctaactttcccaaacttaatacaacttgcagtacatactcaattttatagct

SEQ ID NO: 333838 - DNA, 414 bp, Zea mays
cggaccctgatgggaggcggacagagatcatatgtactgcttgtggaggacacttggggcgacatattcaaaggggaggggtttaagacgcctaccaacgagcgacactgtgttaacagcatcttgcttaagttcaatccgtcccccgaggaagcctgacggcagatgaactcccaatctgtaactcaacaacagaatagatctggactttgtttgacgctttcacattgcgtagagagctatgagatcgaatttgtcattcctcggatcatttggaatatgatgtgaaaaatgcaatctcaagtgctggtctttggtgataaatcaatgtacctcagttatagatgaataggccatgtatatgctcatgctcaaagaactaacttagaagcagaacccttgttttgttggtct

SEQ ID NO: 333839 - DNA, 317 bp, Zea mays
cccacgcgtccgcttttttttttttttttttttttttttttttttttttttttttttttggttttttttgtttttttttttttttttttttattttttttttttttttttttttttttttttttttttttttttttttttttttatttttaaaaaaaaaaataaaaaaaaaataaaaaaaaaaaaaaatataaaaaaaaaaaaaaaaccatttaacaatttttttaaaaaaccaattctaaaaaagaccaataaaaaaaaaaaacatatttttttttagcaaaaaaaaaaaaaatccccaaaaaatagtttaatatg

SEQ ID NO: 333840 - DNA, 410 bp, Zea mays
cccacgcgtccgcttcaagggcgccgtgccggggctcacgcacatcgagcccaacaagcggaggctctgcctcgagctcgtgcagtccgcggtcatggtggccacgcgcgacgacggcggcgcgcacggcgacgccgggggaggtgggagcgacggcgggagcttcccgaggggcggcgacgccgccgacgacagcttggtgagcctcaccatgaactccacgctcatgtaccagggccaggagatggcggcggcgctggccggcgacgccaggaaagggagcggcggcggccgagggagtccgtccagcttgtacttccccaatggcttcgcatgagtatttaatctccttcatcaagcaagagcaatgcattttcgtttctctctacatatatccatccaaagatgat

SEQ ID NO: 333841 - DNA, 52 bp, Zea mays
gttctgacaaatttgtctatcgatctttgattctctgctcttgttaaaagaa

SEQ ID NO: 333842 - DNA, 322 bp, Zea mays
cccactcgtccgtgctacggtaccatatactgctcaccgggcgcataaccatgctaagagttatcacgggtatgatcaatttgtgatggctgattgctgacaaatggaggtggctgttcatatgttactactctatatcccacacgtgaacgcaatatgtcaaaagctgtatagccactgtatatgctacgaacgagagcaactgtactaagtcttagagctgcatcgataagtcctgaatactgatattgatgatgatacatctaatactgtattggtcacaactcctacctagccttgtggccacagcttctccgggact

SEQ ID NO: 333843 - DNA, 434 bp, Zea mays
  unsure (1)..(434): unsure at all n locations
cggacgcgtgggctgacacgttgccggacgcgacagctgtcgcgacctctggcttaaggcggcatgatggctacacctttgacagccgcatccatggcatactgcatctcgctcagagcatcgatgaggacaattctcacgacgccagagctgaaatacctgctatgaaggattactcctatcagagcgagacctaggacgtcaactaagctgcacaccactcacgagtatacctctagacatatgactaccgaaatcttgactactgtttgaggactcactcacaacaacttgcttcctgcacaaacactcaatgagttccggaggaatcacatatgatacattgctatacagattgttcttgttatctggaatcctactagtatagtacatgttctacatgtcngttttgcctgaaaaaaaaaatnanannt

SEQ ID NO: 333844 - DNA, 441 bp, Zea mays
  unsure (1)..(441): unsure at all n locations
tgttctttggaggccttgtgggttttttttgcggtcttttaaagccgtatttggtgaagatatttgtgggtggtccttttattcactaatctttgtagcgtgatcttcaagctccggcaaacaatggacgttccattttggttttttgatgtaccctttttttagatgttgttttgtagaacaccatgcaagcttcacactcatagggcgaggcaccaggaaaaaaatctcgctggaacctattttgccagctagtattacatgctgagttgccggtgaaactaaggcaccagttacattacgtaatgagcacacgaagactgtcgtacaatctgngagcaaggatcaccaaaccgttttgggtaaaaaaaaactgctatccacggtagaccggtgaaaaccggcaaaatcgacaaggatcaccaaccgggtttttttttg

SEQ ID NO: 333845 - DNA, 363 bp, Zea mays
ccggctcctgcgtcggaattctagggtctctacctttcctttggttttatcgatgtctcttgtgtttgtgtaagctagcaaacggttccagaaagcttttgttaagattttgatgacgctaagaggattgatgctactatgctgtactcaagattccatgctgcattgcgatgctaaattaaagaacctctgctaccttactttaaaaaaaaaaaaactgaatgagggcaagttgctatgccaaaaacgtaatcaatacaacgcccggactgtacttacccaggagaagactgacttcaactagtgcaaaaactgaagcacatggtgagacggactgagatacgcacacttaattgccaacca

SEQ ID NO: 333846 - DNA, 296 bp, Zea mays
cccactcgtccgaaaaaaaaaaaaaaaaaaaaaaaaaaatattttaaaaattataaaagaataaaaaaaaaaaagatacattggaaaaataaaatagatattatcatactaaattcaatccaacatacccaaacattcaaactacttaactatctatatcctcacgttacttaactacaattatcatttcatttcatatcactttacactttctaacctctatttcttacacatcttaatcgattatccttacaacctcttttactcccttaccatctttcgcaatacgccctttc

SEQ ID NO: 333847 - DNA, 282 bp, Zea mays
cggacgcgtggggtgctccatgcttgacgtttaaaaaaaaaaaaaaaaaagaaaaaaaaaggaaaaataaaaaaaaaaaaaaaaaaaaaaaaaaaaaaaaaaaaaaaaaaaaaaaaaaaaaaaaaaaaaaaaaaaaaaaaaaaaaaaaaaaaaaaaaaaaatcgctttagatattaaatacacaaaattttatatgatgctaaattcatagtcttacttatcatttaccaaaacataattatatagcatgagtagtaatattaaaactatgtgaaaaattaa

SEQ ID NO: 333848 - DNA, 303 bp, Zea mays
cccacgcgtccgcccacgcgtccgcggactcgtggggaatgcacatcttacgatttttggggaccagtattcataggtttttagttagcaatgtgttgttggcccgttgctagtccttgtaatacaagcccacctgtttttttgcgcacggcaagacttaaactgacaacattttgtagtaccttttattttgtatcacctgctctatacacgagttttcttggaacatcggaaaaaaaaaaaaaaaaaaaaaaacaaaaaaaaaacaaaaaaaaaaaataaactaaaaaaaaaaaaacatta

SEQ ID NO: 333849 - DNA, 256 bp, Zea mays
  unsure (1)..(256): unsure at all n locations
cccacgcgtccgcggacgcgtgggcgagatcggtaatacagtaatgctcctcaatgttacggaaaaaaaaaaaaaaaaaaaaaaaaaaaaaaaaaaaaaaaaaaaaaaagaaaaaaaaaaaaaaaaaaaaaaaaaaaaantgggggagggtgggaggtngtaaaaaaaaaaaaaaaggtnnntaatgggggggggaatggttgaaattttaaaaataaagaaaatgaaaaagagtttgaaagtacataaataaaaa

SEQ ID NO: 333850 - DNA, 217 bp, Zea mays
  unsure (1)..(217): unsure at all n locations
attcccaggtcgacccacgcgtacgaataaaaaaaaaaaaaaaaaaaaaaaaaaaaatatatattancaaatattgtaaaataattggggagggaagattattaaatatacaggcttaagaacttataaaatggggcgtcctttttaatatatccaaacttctttcccagtgcatacaatggtaaaaatttaatatattgtcccttaaattaaatta

SEQ ID NO: 333851 - DNA, 101 bp, Zea mays
  unsure (1)..(101): unsure at all n locations
cccacgcgtncgtgcagttaacgtgtgtggtgttctgctatggtttaaagtttaaccactgtgcatagtcagtcaatgttagcttccttgtccttgcnnaa

SEQ ID NO: 333852 - DNA, 169 bp, Zea mays
gctgtgctgaccacctcccctgttacgcgggcgacacggaaactacatcgggtctcacggggcggcctgtgacatgcaccggccgcctgtagcgtcacggctgaggactatacatttggagctcatatctcggaagaaagaggagcggtgaggtccagccccccgttgc

SEQ ID NO: 333853 - DNA, 157 bp, Zea mays
  unsure (1)..(157): unsure at all n locations
atggttngactgctgtcttcatccactgtttcttactgctcttaattatatnngggntccatnttttgtactcaacgaactatacaatacattccagcattcacctgatttggagaagctcactttgggccgntgcaagttctcaaaagatcccaag

SEQ ID NO: 333854 - DNA, 295 bp, Zea mays
cttattcgtcggatctgtcaacattacctgtaaactctcgattactggctgaagggtgcgatgtgctccatcgaatcctaccgctgcaaagactgattctgtggaccgtagtagatcatacataggaattcaacagctagtatgttggtgtgggatctatatgaggtatcaaaccttaactacaccctctacaaatcaatatttcttgattttagcatcataaaatgaatgtatttgccgtatttatacaccgacgtgactttgaaaaacatgtatgtacacaatttaaatgatt

SEQ ID NO: 333855 - DNA, 403 bp, Zea mays
cccacgcgtccgcgcctgggccacggacgaccactccctccacaacgccttcagcacctagggcgaggtcctcgagtccaagatcatcctcgatcgggagacgcagaggtcccgcggcttcggcttcgtcaccttctccacggaggaggcgatgcggaacgccatcgagggcatgaacggcaaggagctggacggccgcaacatcaccgtcaacgaggcccagtcccgcggcggccgtggaggcggcggcggcggcgggtacggtggtggccgtggaggcggcggctacggcggtggcgggcgccgtgatggcggcggcggctaccgcggtggcggcggctaccgtggtggcggcggctgctacagtggtggtggcggcggctaccgccgtggcaaccgtggc

SEQ ID NO: 333856 - DNA, 182 bp, Zea mays
gtctcgtgttgcttgatttcgtattcgttaatttgagcctgaatgtttctgtatgcatcaggatttgctgatgataccaccggcaattgcagttgctatctctaagactcttactggattgtattgtatgctgtatggtgtgagattcggtgaaacaaattcgtatttggcagttcgaattt

SEQ ID NO: 333857 - DNA, 127 bp, Zea mays
aaaaaaaatataaaacaaaaaaaaatataaaaaaaaaaaaaaaaaaaaaaaaaaaaagcaagcgtaaaaacaaaaacaataccacatccaaccacttttataaaccaacctataatcccattctaat

SEQ ID NO: 333858 - DNA, 332 bp, Zea mays
gccaccagcgctcgtcacctccaatcaacaaattcccaatccgccgcttcccatcccgcgtgcgccgctccatttgatcgaattcccgatggcgcccaaggccgagaagaagcccgcggagaagaagccgacggaggagaaggccgagaagaagcccagggcggagaagcgcgtgccgggcaaggagggcggcgagaagaaggggaagaagaaggccaagaagagcgtcgagacgtacaagatctacatcttcaaggtgctcaagcaggtgcacccggacattggtatctcgtccaaggccatgtccatcatgaactccttcatcaacgaca

SEQ ID NO: 333859 - DNA, 295 bp, Zea mays
  unsure (1)..(295): unsure at all n locations
naaaaaaaaaaaaaaaaaaaaaaaaaaaattttattttaaaaaaaaaaaaaaaaaaatataggaaggggtttttttaatattttaaaaaatccaaatttaataattcttaaaataaaaaaaaaaaaaaggccgcccgttcaaaagaatccaaattaacttccccttcctttcaacctaataacctttttataaccccccctaaatcaaattcactgccccttttttaacaactccttaactgaaaaaaccctgcctttaccaaactaaatccctttgcaccaaatccccttttcc

SEQ ID NO: 333860 - DNA, 178 bp, Zea mays
aaaaaaaaaaaaaaaaaaaaaaatttaaatttttcaaacaatataaaaaaaaccaggaaaaggtacaattaaatactaacaaataacccctcctatagttttacataaattcaaatttactgcccctttcttttccaccttttatttcttttaaaatccctccctaaatccaacttaa

SEQ ID NO: 333861 - DNA, 101 bp, Zea mays
ttttgctttagtaaaactaagtaacatcaactgtgagccaacttcaagtactatgagtgaggatcactccaactatgatagtagtgtatagctacacattt

SEQ ID NO: 333862 - DNA, 255 bp, Zea mays
cggacgcctgggcagacgcgtgggctgactctttggcggactcgtggatttttagttgcgtttttaaaaaaaaaaaaaaaaactaaaaaaaaaaaaaaataaaaaaataaaaataatatataaaaaaataaaaaaaaataaaaaaaataaaaaaatacaaaaaataaaaaaaaaatatattaaaaactaaaaaattatactttttaaataaatataatacagtgacacccctttaaaaaaataaaattttaaata

SEQ ID NO: 333863 - DNA, 245 bp, Zea mays
  unsure (1)..(245): unsure at all n locations
cggacgcgtgggtggcgatcaagaatccgaagctgtcggcgatgcggtgccatgaaagggtgtttgcaaatatgtacaaaacataataacatgtgtaggttttgtgaatgattttgttgtggtgcttattgatggtttatgtgatgtggatcanaaaaaaaaaaaaaaaaaaaaaaaaaaaaaaaaaaaaaaaaaaaaaaaaaaaaaaaaaaaaaaaaaaaaaaaggggggaaaaataaaaagat

SEQ ID NO: 333864 - DNA, 234 bp, Zea mays
  unsure (1)..(234): unsure at all n locations
cggaattcccgggntcgaccccacgcccgtccgcnntccttttgacnaagnaaaatcattnntgtgtcttacaatnncaaaaaatacaaatcaagaaaatctcaactggcgtgtgtggnnngagccagaaagaaagggcggatgaaagttcaaaaaagggtngnntcgaagggtgcaacnnncaagtttctttccttaagcannagctgaaggggaacctccaatnnntttttg

SEQ ID NO: 333865 - DNA, 427 bp, Zea mays
cggaattcccgggtcgacccaacgcgtccgcggacgcgtgggggaacccgatactcgtgttaactgtatagcccctggttttgttcctacgcggggggctagtttcctcacagaaaatgagaccattaggaaagagcttaacgagaggaccaagcttaagagattgggtactgtggaagacatggctgcggctgcggctttcctggcatctgacgacgcatcatacattacggctgaaaccattgttgttgctggaggggtgcagtctaggctgtaaatctggctgaagtttatatttacttggttaataatgtgtactagtgccctaggcgtggctaataatgtgtactagtgccgctagagcatcaggctaccttctatatatgacaggcaactctaaaagattttctatatcttattcctcttc

SEQ ID NO: 333866 - DNA, 176 bp, Zea mays
tgaaaaaaaaaaaaaaaaaaaaaaaaaaaaaaaaaaaaaaaaaaaaaaaaaaaaaaggggggggcggataaaaccaaaaaaaaaaacatacgggccggcccttctaaaggatcaaagcttacgtacgcttgcatgcaacgaaataacttttttatagtgtaacctaaattaaatta

SEQ ID NO: 333867 - DNA, 379 bp, Zea mays
  unsure (1)..(379): unsure at all n locations
atagactgtgaacaagcgagagaagcaaagaccagaaagtattgtgctgagtgcgtgctaagccacatgcccagatacttgaggcaacttgattccaaatacgacttttagtaacctattgtgtcgtataattccgttattctctgctagacctagtaatggggaacaactatctccaaaagtaacatttggttaggtgaccaatgatgctttcagataactgcaacgtctgatgtcatctaagttcgctcagtatatatatgacaaaagtgcatcagatttttctcactcaattcttcttcctagtttggtagacaaaagttgagcattagaaagcataaatttctcaggagaagcttgcagacagacanctgttttg

SEQ ID NO: 333868 - DNA, 315 bp, Zea mays
aaagactaaaagaacagaataatttattaaacctaatccaacttatatacaatactcgtagttgatattcaaacatttgatgtgacacgaactaaacttaagtcaggggaaccatgtgagccattaatactgggtttaacttctttttatctccaggtttactctccttggcctaatccatttttcaggatttttgatggaagaaattcatgtgagcatatgcatgcacacataaacctgtgttgtttcagcctttcaggatacagcatggtgagcaggaccagttgggcacgtgctccatcgactgcgggtgca

SEQ ID NO: 333869 - DNA, 76 bp, Zea mays
  unsure (1)..(76): unsure at all n locations
nnaataaaatatttaannaaaaaaaaaaaaaaaaaatttaaaaaaannnnnnnnnnnnntgggggngggttnattt

SEQ ID NO: 333870 - DNA, 282 bp, Zea mays
cccacgcgtccgcccacgcgtccgatccctccccccccattcaatagatcgtagtgaggagagtgattacagcgagcagaaatagtcggcatttaaaataattcgtggctttcgagtttgtaacagcgtgcgggttcaatcctgcccgtaattttcctttgtaataataacatgagcaaaatcttgacagccggcagcgaatgtcgctctggagatggcaaatgtgtgttttgaactgaatggtaaatgtgcggttctcttgaatagtatcttggctaaaaa

SEQ ID NO: 333871 - DNA, 317 bp, Zea mays
aaaaaaaaaaaaaaaaaaaaaaaaaaaaaaaaaaaaaaaaaaaaaaaaaaaaaaaaaaaaaggaaaaaaaaaaaaaaaaaaaaaaaaaaaaaaaaaaaaaaaaaaaaaaaaaaaaaaaaaaaaaaaaaaaaaaaaaaaaaaaaaaaaaaaaaaaaaaaataaaaaaaaaaaaaaaaaaaaaaaaaaaataaaggtacctaaactatataagatttaaaaaaaaaatcattttgaaaacaacttaaaattatcataaaagggaccccataaatgtaatattaatctaaggtgtaaaaaaaaaaatacttaaatggaaa

SEQ ID NO: 333872 - DNA, 438 bp, Zea mays
ctcacgcgtccgatccgctgtcgcatgcgctgtatttcaagctctactccatgaagtgcagctccaagagcaacaccagcagggacgcgggcatggacggcaccgcagcaagagccaacaaggacgcgaacaagggcacggccggacgcacggccaacaagccgaggacgaagtccgtgacgaggtccctgaaggcccggctgcagcgcatcgtgcggcgtatgaagaaggatctgaacaaggaccgcgacgcgcagggcgtccgcacgtacgtggccgtctacctggacgacgtgctcgagtacgtggtcgaccaggtgctggaccttgccgacgacaatgacaaggacaacatgatgacgcgcatcatgctgctggacatgctcatggacaagcagctcgacgaggagctgggcaagctgatgatcggcgacagca

SEQ ID NO: 333873 - DNA, 123 bp, Zea mays
cccacgcgtccgcccacgcgtccgcccacgcttccgcggtctcgtgggaaaaaaaataaaggaaaaaattagaaaaatttataacaaataatatataaatatatctcacttattttattgttt

SEQ ID NO: 333874 - DNA, 391 bp, Zea mays
ctcacgcgtccgatcctctgtcgcatgcgctgtacttcaagctctacttcatgaactgcaggtccaagggcaacaccaccagggacgccggcatagacgccaccgcagcaagagccaacaagaacgcgaacaagggcacggccggccgcacggccaacaagtcgaggaagaagtccgtgacgaggtccctgaaggtccggctgcagctcatcgtgcggcatatgaagcagggtctgaacaaggaccgctacgcgcagggcgcccgcacgtacgtcgccgtctacctggactacctgctcgactacgtgctcgaccaggtcctggaccttgccaacgacaatgacaaggaccacatgatgacccgcaacatgctgctcgacatgctcatgga

SEQ ID NO: 333875 - DNA, 356 bp, Zea mays
ataatgtctctgatactgtctttcatccgttttactgctatcgctagtgcatcaagtctaggtggaacataataaaacacagggacgcgtacaaagtctgcaccacaagcagagtacaaacagaggctattaattgcgctgaaccaccaatggttgagacgtcaatgaataggtaaactattaacttgctcattttcgagctccttctcattgattgtattctatgtaaggactcgacgatggacgtcttgcacacacgaatccaatcattgtagttcgaaaacttgaaaacgtactcgaataagtggtcgaactggtcatgaaaattgccggccactctagcaggtccaacatta

SEQ ID NO: 333876 - DNA, 268 bp, Zea mays
ggtcgacgatagatcagattcagagttgctttcactggttatcttgtgaagcggccaagcgtaattatttatgcgacataacctgtgctattgtaatgtgtcacatgcttatatttgcaataaacagctctaggtggtcagctttgtctgccgcaatgagcagtgtatcgatattgtggttttgaattgtttggatctagaaaaaaaaaaaaaaaaaaaacaaatagaaaaaaaataaaaacaagaaaaataataaaacaatgcatgg

SEQ ID NO: 333877 - DNA, 423 bp, Zea mays
acccgagcttatgatgcagggggtctcgggcttctatgcgacgatcatgctcaaatgtctgcctgcgggcatggcgggcccgatcactgctcttccggacctcccgaccatccacacgacgatcgacaagaccaagcgcgcccattggcacacggcacatacggacgcctgacgcacgcactgtgcacacgagatcggactttgagcgagacctacataggccactgtatgacaatcctgccatggcgtaagcagatgcgtagctgtaatctgtataagaagacactatgtatgagctcctgcggaaccctagaaagtgcatagctgtgaccaaactggactctcacgggctgaagaagccggcggaccgtgctgatgatacaaggttactgacggatgcatgcgactagatcattgacatgc

SEQ ID NO: 333878 - DNA, 185 bp, Zea mays
aaagcctgtctgtgacagcacagttgcgaggatcacattttggccggcgaatggaggctcgtgaaccgcttatacgtcacagaggagggggctataagcgaatcagtaccaggtaacatacagtgcgtctttaaggcgttggagcagcacctttacacctctgaaggaattctggaaagttatga

SEQ ID NO: 333879 - DNA, 418 bp, Zea mays
cggtccggaatgaccgggtcgacccacgcgttcgcccacgcgtccggtttcgatgtgatgcgggtgatgatcttgcttagcaagatgctcatctcgtaggactttcttatgtgtctgtaatataaaataccggacgcgttcgcgaaaagtacaacttcaagagctgaaagaaaggcttctatgcatagttgggaaccctggagactgaattataatgaatggggctgcccgacgttattctggaaaacatcagatgttaagatcaagagcatttctgcagttggtggtgctgaatggaacaagcccgtctagaatgagagcgtctatcaatagagaaggtattgacttttccgatgctcaaaacatgcatccagtgcaggaatgggaattagcatagaacctgcaaggagctcttgag

SEQ ID NO: 333880 - DNA, 291 bp, Zea mays
cggacgcgtggggagcttgtattcacgcatgctgctgctgttgccaaacttgtgtaccgggggattacccatcggcgtattccatatgctggtggacacgctcgtgctgtctaacgggctatcgattgtcagacacctgacaacctgggagaatccctaggcaatgatgccggagctgaccatgcgagacgcttgtgacaagctcggcatctacagtctcttcaatttaagactccttctgagcatcgctatgatcgggatctgtactggggctaacttgggaattgacaa

SEQ ID NO: 333881 - DNA, 449 bp, Zea mays
gcgacgtcgacgggggcctgctgcgacgggaagccgagcgcgcgaagaagatgaagcgcgcgcagtccgtcgccagcggcgcgcagtctgctccgcctccgcctccgcccgcgccgccgcacgtcgaggtgctggagctgcgcgtgtcggaggtgggcgaccacgtgctggtggtcagcgtgacgtgccgcaagcgacgcgacgccatggccagggtgtgccgcgccatcgaggacctccggctccgtgtcatcactgccaacgtcacctccgtcgccggctgccacgtgcacaccgtcttcgtcgaggtagataaaatcgaccacatccaagtgaagaacatgattgaggctgctctcacgttgctcgacgcccccggaagcccccacagctcgatgagctattacgagacctaactatgttgagcaatgcttttccgacgtctacta

SEQ ID NO: 333882 - DNA, 384 bp, Zea mays
aattcccgggtcgacccacgcgtacgatcattacaaaaaaaaaaaaaaatataaaatttaaaaaaaaaaaaaaaaaaaaagaaaaaagaaaaaaaaaaaaaagaaaaaaaaaaaaaaaaaaaaaaaaaaaaaaaaaaaaaaaaaaaaaaaaaaaaaaaaaggggcgaccgttcaaaaggacccaaggtaacctaaacttgcatgcaacgccaaaggtctacaataaagccacctaaattaaattcattggccgatgattaaaaaaaacttaacaggaaaaaccttggaataaccaaattaaatccccttaggaaaaaatccactcttagctactgggcataataccaaaaagccccccactgatcgcccttctaaacagttgca

SEQ ID NO: 333883 - DNA, 320 bp, Zea mays
gattactgttgacaaaaccattctacggaacgcacgacttaacaccatatggaagctcgtcgggtcaacctgatgcataaatgtcactgacgcttagaaggctatctggctggcgacttagttgataatggtgtgttttgccatatatagcaatggaccatttcattttatggacaattgacttctgggtggttggctatacaaaccataggtaggtctgtaatgactattctaactcgatggaccgaactattgtatgcagactactccaaactggaatcatgaataaaatgtggtactatatgctcgtagacattttc

SEQ ID NO: 333884 - DNA, 439 bp, Zea mays
attcccgggtcgacccactcgtccgaaaaaaaaaaaaaaaaaaaaaaaaaaaaaaataaaaaaaataaaaaaaaaaaaaaaaaaaaaagaaaaatttaaaaattaaaatagacaataatacaaaaaaaaaaaatattatataatcatacctaatttttattttacttattatttttttccatatttcttaattgttataactcttttttttaccaaacttaatttctttacaatttattccttttttaacatatttctttatattaaatatgcccttacctattacctttctcatcatttatccattttaaatatttaactatattattcttatacctttaattttaattttatatattttttttgttactctcagcttttcttttttcctttttatatccttatttttcgattttttttatttctttccttttttttt

SEQ ID NO: 333885 - DNA, 277 bp, Zea mays
cccacgcgtccgaacacgcgttcgcgtatcttctgaagaccggtctacttgacgctaaattcgcatggagtgtcaaacatttattaaacgcatgtggaatcaaatgaagttggactaataaagacaacaacaaaagcaaacaaaatcaataagagacatgctataagtgaaatgacaagcacatcatgatcaccatgtaagaacttacataaggacctggctgtgaatcgaaatatcgaaagccctttaagaaagaaactgtactgactatttaatg

SEQ ID NO: 333886 - DNA, 420 bp, Zea mays
cccacgcgtccgcggacgcgtttttgctgtatccatcagggaagatgctacacaaaccaggctaactttacaccgtcaaggtgagcagatcatgcggtctcatcaagtagcagctgacattgagcaggaccttacagtgagtgagaagcttctgggaagtctgggtgggctattttccaagtcatggagaccaaagagaaatcatcagataaaaggaccagtctcaggaaataactattctgcgacaacagctaacgacacggaacagagggggaagctaggaattgccccagcacgtcaagaatatcccagtcatgtacaaaccacactagtatctgcaatggaaaaagttcaagctgagagaacaaagcaggatgatgcactttccgacctgtgtagcacattgggacaactcaagga

SEQ ID NO: 333887 - DNA, 319 bp, Zea mays
gtctatagtgtaacaactacgataagtagcaggaagattgagcgaagcttgagttatctgtgaaacgatgaaaatgtctaacgcactgaattagtcttctttaatatttttcataaattaaaaaaaaaaataaaaaaaaaaaaaaaaaaaaaaaaaaaaaaaaaaaaaaaaaaaaaaaaaaaaaaaataatgtaattaaaaaataaaaaggtaggaccttttaaatgttaaaatcttaaataactttaatggcacactaaaacctattaattgggggacctaaaaaaaatttaatccggggaaaatttaaaaagtttcc

SEQ ID NO: 333888 - DNA, 439 bp, Zea mays
ggtcgacccactcgtccgaccacgcgtccgaccactcgtacgcccacgcgtccggttctccccagccgcaagccgaagcgggcgccggcgggcgggacaaggcagaggccgaggccgaggacaaggaggagtgacgggtgtagtcaggggggaacgggaacggctggagttgtttgcgtctcgcgttcttttcacctgtacgcaggaaatactcctcctgcataagactactgtacttttggataaaaaattttatttctacaaaaaaaaaaaaaaaaataaaaatgaattaaaaataataaaaaattatataagaaaaattaaaaacacatattatgaaatataaaaaaaaaaaggggggccgttttaaaggatccaagtttacgtacccttgcttgcgacgtcatagcttttttataggggcacctaaatttaattt

SEQ ID NO: 333889 - DNA, 143 bp, Zea mays
cggacgcgtgggaaaaataaaataaaaaatttaacaaaaataaaaaaaataagggaaacaatgaaaaattaataacgcactgaaattaatcttatttaatatttttcataaattaaaaatgcaaaatactctactataatata

SEQ ID NO: 333890 - DNA, 430 bp, Zea mays
cccacgcgtccggaaccttgcaggtttcggggtttcagtattctcccagcccacagaggggtagtgagtgccacatatcatcttccactgatatagcattcagtttttgtattttcagtaatgcagtagtaatgtacttatggcagtatgcactttgcggctgaaattttagacggttcaacttcagagatggctaacaatgggtctgagtcaacaatggatgcgaagcgtagggccagtcctgtaccagcacatcataactccaggcagatgaacaacaatcatcattctacaactactactactaccaccaccacgtcatctgctccagctaaagtgacaaaggagcaaaagcagagtcttgtggaccttgacaggcttgattctgccaggaagaggctccaggagaattaccaagaagcacaaaatg

SEQ ID NO: 333891 - DNA, 436 bp, Zea mays
aaaaaaaaaaaaaaaaaaaaaattaaaaattttaaaaaaaaaaaaaaaaaaaaagaaaaatggaaaaaattaaaaaaattaaaaaaaaaacaaaattaattactcaaacattataaataattgacttctattattccagtctcttaatttcttttcttttgcctaattttttttaattcttgttctgttaaaccccatgtattttcccatattattctgcttttcaacactttcccctttttccatttgacgtattttccataagtcccttacggttcgcccttcctttcagttatgctttctaactgctaattggcaccctcatttttccttatcattaatcccaatgctttttttggctatcggtattctataccctttcctctttaaaccccctatttcctaattttttccctttttttctttcttttctttt

SEQ ID NO: 333892 - DNA, 163 bp, Zea mays
ctgaatcgctgtgaaatatgcgttaataattttatctcagatgttaaaacatggagatatgggggaatattgtcaactatatgaataggtacaggcattaaaattaattgtgcagcattttgctaaaactcaaaatgtaaatgaaacttattacggaacactt

SEQ ID NO: 333893 - DNA, 376 bp, Zea mays
cggacgcgtgggtgaatgatggtccccaattttttcccttcccatccatgtttgcaaatggtacacaattttgtttgtcacttttgtgaaccgttggagcagatatcttcaaaacaggctgcagtctggaaatattgacacaggaaactattttaacagtcaaaaaaaaaaaaaaaaaaaaaaaaaaaaaaaaaaaaaaaaaaaaaaaaaaaaaaaaaaaaaaaaaaaaaaaaaaaaaaaaaaaaaaaaaaaaaaaaaaaaaaaaaagaaaaaaaatttaaaaaatccaaaaataaaaaaaaaagggggggccctttttaaaggtccaattttttcaccccgtttctataaacttataacttttttttaagggccc

SEQ ID NO: 333894 - DNA, 358 bp, Zea mays
cggacgcgtgggctaagggcatgatgggaagcctgcagatcagaaccatggaaattatggatgagctgaggaagtctgtagatcagaatatgccgttctacattttcctttcccctttgtagctaccatggcaataacaatgagaccatcaaacagctgtgcatttaagtatggaaatactcccgtctgtgtctgtaataaggacgtttcatgtggctgaaacctgccaattctgttaatttttgcatgacttcttgttcaactggtgtgaattgtatactttgttcacgaagcactgatcataaaaaaaaaaaaaaaacaaaaaaaaacaatagaacacaaataatatacctaaact

SEQ ID NO: 333895 - DNA, 285 bp, Zea mays
aaaaaaaaaaacacacgtacggacacggacttaaaaaaataaacgcacaccagcttactcgggaacaagtgaacacttcatagcatctaaagtatttgtcaggatggcatgatagggaaatgcatatgactttggacacacttgaaaaacgcttgatctggcttacaatgaaacatgatagggtcactgggatgattcactaagatctataattggttggagcactatgtaccattttcagtgctattatgtatctgtacaattctttatactgcggtttgaact

SEQ ID NO: 333896 - DNA, 397 bp, Zea mays
cccacgcgtccggtcacggactcgcgtccacaaaccacaaccagctcactcaagaacaaaagaacacttcatagcatctcaagtttttgtcaagagggcagagagggaaatgtttatgactttggacacactggaagaacgcttcaactggcttacaatgaaacatgattgggtcactaggatgattcactaggatctataattttttgtagcactatgtcccattttcagtgctattatgtatctgtttaatcctttttactgcggtttgaacttgatgtgacattattgtggatggattgtacctccatctattattgcaacatgtttggaacttgttatgagaattatgtttagctaaaaaaaaaaaaaggagaaaaaatttaaagattcaaaa

SEQ ID NO: 333897 - DNA, 420 bp, Zea mays
aggtatcagaagcagcacaatagcgaggctgtgcatgactagctcttttactggaggatcagtaccagcttgatttgctgagcttgcacactacagacggatctttacctttggataatgaaatcttctgggggaccataaatataatatatagatattgatggtgacaccctggatgagttgatgctttcctgttacgcatatgaaagggttacgcccacttcttacattttctacaaattttgatgagcaagctcattggaagcttgttaaagagatgataactcagatatgcgctagttctaaagatcaccggtgagcaaaaacttttcatgaccatgtgtttgtcttatcatttgacgatggaaatgttttgttttcaaactatcagattttggttccccataatgagattgataa

SEQ ID NO: 333898 - DNA, 290 bp, Zea mays
gttaactcggggacacgattagcatagcattttgtccctggggctgctttccatgtcaggtgaaaacaatacaaaagctatcgtgtacagatgcaatgtattttcgttctgattttgtagcgcttaaaaaaaaaaaaaaaaaaaaaaaaaaaaaaaaaaaaaaaaaaaaaaaaaaaaaaaaaaaaaaaaaaaaaaaaaaaaaaaaaagggcgtccattttacaagatccaagattacttcctcctgcatgcaaagtcatagcttttctataggggcacctaatttaaatt

SEQ ID NO: 333899 - DNA, 162 bp, Zea mays
ctacaaatgcacttaaacgactccattacatttcatgccatcttaccatgcgtgcacagacaggtattcttttgcccttccgaatgcaaagtttgaaaagctcgtccacggatttgggtcttcttttgcccacccgaatgccaagtttcgaaaggctcggct

SEQ ID NO: 333900 - DNA, 372 bp, Zea mays
cggacgcgtggggtaaagatcatcttgcaataaaaaaaaaaaaaaaaaaaaaaggaaaaaggaaaaaaaaaaaaaaaaaaaaataaaaaaaaaaaaaaaaaaataaaaaaaaaaaaaaaaaaaacaaaaaataaaataaaagaaaacaagaaaaaaaacttatgaaggaacgaaataaaaataatagcaactataacttcacattgccgactatttcaaaccagaaaattttagccggaaacaggttaccacctgagtattagaaccctcctcgaaaagcctacaaacgcaatgccttgtaccaacagctgaagaaaaaacggatttcggacacccaattatatatacccgattcttttagaagcatacccc

SEQ ID NO: 333901 - DNA, 108 bp, Zea mays
  unsure (1)..(108): unsure at all n locations
gtccctcatgcctcnncggtggagttgtcgctagcttttcccgagtatggaaaagatttgtctgtgaaacacacacttggatgtctagattgcanggtagttttcaaa

SEQ ID NO: 333902 - DNA, 387 bp, Zea mays
gtgggcaaatatgcaaggaaaaaaaaaaactacctaattataacatatactaaataacaagggctaataaaactataaagctaaaaacgagtctaaaaaagcgatggcatacaagaggctgctgctggcggcgctgtgcatggtggcggcggcgctgctcgccgtgcggtcggaggcccacggcctgtaagacttcgcaagcatcgactcaacaccggagatgcagaccttcttcaagcccgaggccgctgcgctcccggaggccctggacgcgttctccatgcccgacgccaccatggccgcgaagccggatgccacgtcgatcccgaccaccaccaccggcaccacagcggcagctgcggtcacctccgccactgcaggcactac

SEQ ID NO: 333903 - DNA, 178 bp, Zea mays
actttttaaacttacgcttgttacactaacatcaacattaagtggaatgcaaacatgttacctaacttctctatgacaacatatatgacactttgtacaccatgctaatatcttttatcttgattatctccaaccacacaatatataattaaaatactactattacattatttaatac

SEQ ID NO: 333904 - DNA, 364 bp, Zea mays
cggactcgtgggctgacgcgtgggaaacaatttaaaaattaacataaaacaaaaaaaccatgaataattcgataaaactaatcaaaaatataatataaccgcatcaaaccaattcatgcttaaaatcccattgcatcttgctttaaggtgtcctcctgtctatcaccctctatctttttctagtccttttcttcatttccaactctgtatcttcctccataatccttcttgttgctcatcctttttaatcctttctgctctttctctctccatctcctcctctactgtgatgcatctagcttttaacctctgtttttattagtaacttgcttttgcctcccatccttcatccttttattatatt

SEQ ID NO: 333905 - DNA, 361 bp, Zea mays
cccacgcttgacgccacgcgttcgtgcacgcatcctcattctgatcaccaaatgctggatggccccaataatggatacctagcaccgcaagtgctaaccgggagctactcatgaatgtagctatcactaaatactgacactgcactgtatccaggctcagatctaaacgacagatactacatcaaaacagcttgcatagagctactactgtgataaaacaccgaacaccggataaatcctgcacttataagtcctggacttgctggaccatggcagattactcatttgggacagcattatatgttactgcatctgcatcaaatctgtataaatggctacactatcctgctacgaatcagat

SEQ ID NO: 333906 - DNA, 411 bp, Zea mays
  unsure (1)..(411): unsure at all n locations
attcccgggtcgaccgcacgcgtncgcccagcgcgtccgcccacgcgtccggttctagaccgtgcattaccaaaaaacaatagacaaggcgcaaggtgaaaaaaaaaactgaacaaaaaataataaaagagcgccagtttccaacattatgcatgatgggtactagtactggtgacggccggcgattgatattctggatcagatactagatattggtgacccccgtaagaaggggcttcacttggctaaatagtgtaccacttgtgcatactatcctttgcttactctaccttcttgttccatgtcagttctcaaggtgacccacactacaatcgccgtttgcatgcagtgccctcccttcatggcaaatgaaatgccctttacaccgaacttttaaacgaacccgatcac

SEQ ID NO: 333907 - DNA, 376 bp, Zea mays
catcattgaggcactgtctgcttccgctgcgatcgactcaaggtaacgcacactggggtctcaactgacgctggccttggcaccgagtactatgcgtcagttcctgagccccgtcttaagccacagatccaggaatctgaccagccgtacatatggaacattgcaggtgaccacttcaaggacactgtataaacctcatggagcggtgacgtcacctttgacttctttgtacccaatgagaactaattgcctgtacttctatcacactgtggtctgcagtgtttcatctgctcgctgaattcatgagccctctggctagaaagttataatgctctgtactctacaccgatgtaaatatctaaggtccctgtttgct

SEQ ID NO: 333908 - DNA, 130 bp, Zea mays
gtgcatacttgaactgtcagctaacactgagtatttcaccttgtcatccaatgtattctggtacttggtaaaatcttacaccatcctgtaaataactgggttgttgtaataatatatgcttttgctacgc

SEQ ID NO: 333909 - DNA, 308 bp, Zea mays
cggacgcgtgggggcacgggcgcgggcatgggtgccggcgctggaaccggagcaggcacgggcatgggcgccgggacggggaccagcaccggagctggcgccggcgccgggatcacgacccccggggccctgagcccgccgttcggcggcacgggcgcctacggaccggcaggagcaggcagcaccgactacagcgacgctgcggcgccgcgcgtgtgcaggctgcacgtggtggtcgtcctcggcctcggactagtcgtcgccggcgcacctatcctacggtaggaggtgtaagtgggacggaaggg

SEQ ID NO: 333910 - DNA, 174 bp, Zea mays
ttttaaagtatcttctgaactaaacagcaccatttcggagttatcttaaactatataaaaaaactgaactcactattcatcaaaataaatcatttcaaaaatctacataaactaaaataatattaacaaatataaataaaaaacgccagacttctttaaaatatccaattttac

SEQ ID NO: 333911 - DNA, 338 bp, Zea mays
cccacgcgttcgtccacgcgtccgaaaaaaaaaaaaaaaataataaaaaatgtaaaataaggaaaaaaaactaaaaaaaaaaataaaaataaaaaaaaaaaataaaaaaaaaaaaaaaaaaaaaaagataataataaaaaaaactaaacataaaaaaaaaaaaaaataatgggcgtgctttttagaggcccaaggtttggaagactttttatagcaacgaaacgacttcttatatgcacaccttattcaagcccgaggccgcggttttaaaagaggccctggacgaaaactccatgcttgccgacactatagccgctaagccaaaagccacttttatc

SEQ ID NO: 333912 - DNA, 214 bp, Zea mays
ccgggcatgtaaatccagctgtgcaaggtcaaggctacatcaacccccaggagcgtaacatcttcttgcgggggcacgcacgaggttctaggcctgctggaccttcatcacctgggtcttatcgcctaccatcagcacctggatactatggactaccttatacacttcctaactatgatcgggtacctacatctatgcatcctagggggcacaa

SEQ ID NO: 333913 - DNA, 349 bp, Zea mays
ggcgatcgagcaccgccatggggcaaccaagaacagagctcctcgccctcgcattccttgtggtcgccctcgccgccgccgtggccgccgcggcgacagaggtggtagacgcggcgccggcaccagcgaggacgaggacgacgacggcggggtgccggcgcggcgacctggtggtgcggcagcgggcgacggggcgcgtggtggaggggaagcccgagtacgcggtggaggtgcggaacgcgtgccggtgcgcgcagtcccgcgtgctgctgcgctgctaccggctcagcagcgtagatggcgtggacccgcgcgctatacgggcccgtcgacggcgagcgctgcctgc

SEQ ID NO: 333914 - DNA, 435 bp, Zea mays
atcacgcatggcgttctcgcgactacatgcgttctcgtcgtgctgaactgcctaatcatgttccaaacttactacatgcaagtgcttgacagctttaagaccttctacaccaacgtgaaccaacagaccgtgctctacatgggtaccgctaggcttaagagtgttatacagatggatgttgcgtacgctctaaagcgccactgccagtactctgtacggcttgcctggctgatcgcatgtcttaccttgtctgcaaccgatgcctacgccggctccacatgtaactgcgtcttgattggcttgatgtagagagttatcagattccaatatctgtgacgtgcttcgatattgactggaatcatgtgtgccatcagagctgggaaatcgtgatccagatgtcaccatgttcagaaacatgagatgttaaaatctaaa

SEQ ID NO: 333915 - DNA, 233 bp, Zea mays
cccacgcgttcactgacacgtcggcggacacgttaaacctgaagcatgtgggcactttcagggctttataatcctaagccgtggacaccatgcaccttgcatgaactaacaagctttgaacactgatacgactattctcatcatctcctgcgctaacaagcacttcactgatcgtaatctaagcatcttcataggcatactactactagtacttgctactgctgattttacac

SEQ ID NO: 333916 - DNA, 115 bp, Zea mays
cgaagggatacgacaacaacttaagatgaaggttcaggcacacgacttgtttcggttgcaccccgtgatggtcagcatcggatgcagaccatttcatcgatctcttgtgaatttt

SEQ ID NO: 333917 - DNA, 423 bp, Zea mays
attcccggatcgacccactcgtccgaccactcctccgcgcgtacgaaaacgcgtttgacacagaaaaagctgaaacgaaagctaaggaaaatgcgatagataaaaaagcaaaaaaagaaaaaaataaaaggggcggacgatttaaagggtccatacttacaaactcttaaatgcgactgaatcactttcttatagctctacttatatatatttcactggccttaattttccaaatggtctacttgcaaaaccgtgtgatacccaacttaatagatttgcctacttgcctatttacccgattggtgcattagcatataggtcaacctctatggccatttccaacagttgccctaactgatcggcaaatggtacgctccttgctacgttgcttatagcgcagcttgtgtcataggttctcgcacc

SEQ ID NO: 333918 - DNA, 303 bp, Zea mays
aacataagtaccacgagtcactgcactgcttgcatagagaagggactggaaggtgatgaagtacaagcgctgtgcactgatgtgcatgctgtcatgtgtaccgattctttcataggtacatgaacatactgtcaccaatatgaactgttacatgcatgcagatgaagcttacatatgatccatgtacggtcatactaattgaaaggctgactttattcaagtcctccctcagatctaactactgacatacggactactaattctactgactgccattgaacaatcagtatctcaagacactga

SEQ ID NO: 333919 - DNA, 463 bp, Zea mays
  unsure (1)..(463): unsure at all n locations
cccacgcgtccggcattgtcacaggggatatcgacaataccgacaaggtgctcaatgaagaatttggttctctgaatttcagtgagaagggaaatgaagataccttcgtgtcaaaccaagggttagaatatcctatggaacactcagcaggagccagtagaaagaaatcaggaaacagtgagagattctctagcagtctgttagatggaaatactaaactggttagccatgaagtttgtactaaaacactgtactatcttagtcggtttgaccggatgaaagacgcttgggacaaagatgcaaatagcctaccaaggagggctgttggtacgatggaaatgataggaaaagcatctgcaattcgacatgccgaaattgctgagttggacaaanagattaatactctgaaggaagagattctggcgctagaggcagcttgagaaagggaaatctcctgagtgaa

SEQ ID NO: 333920 - DNA, 262 bp, Zea mays
cggacgcgtggggagtcatttttggcatgctcatcgccctgccgatcacgctcgtctactgcatcctactcggcctgtgaccgtctcatccccaattccccatggaggacgccacccactgcattgctgcaactgtaaagaccactgctgccgtcacttcccgttcatgggagacatggccagcaaggacgggagatagaactgctaccacattggccgtcgcttgcagactagtggcgtgtactatctctctctatctatc

SEQ ID NO: 333921 - DNA, 306 bp, Zea mays
aaaaaaaacacaaaaaaatataaacaaaaccataaacaaaaataaaaaaagcgaaaaacacgctaaattttaaactacaaaataaaataaaatacacaaaaactcaaaccgacggcccaacatctcctatcgaacactcatccggatcctgtcaacaaacatcagtctacattgatatcttctctagcagtctgttacctggaaattctaaactgcttagccataaaccctgtactaaaacactgtactatcttattcggtttgacccgatttaagacgcttgggacaaagatgcatataccctac

SEQ ID NO: 333922 - DNA, 354 bp, Zea mays
ttcccggtcgactccacgcgtccgcggacgcgtgggaaaaaaaaaaaaaaaaataaaaaaaaaaaattaaaaaaaaaaattacatggaaaaaataagaaaaaataaaaactacatattcttatagaatacaatgctcttactgatcgtgaacttcaaaaggagagatctattgtatctgtcatcactaatcccattaactaagacgtggctttatatcttgcccagcattgctaaccctgcatatgccatcctctataggatgcaagctgatgaaccttcatttaaaatgtgtactttagaatggagttcttagcttgacgagcttttcattgctctcaatatctatcccctga

SEQ ID NO: 333923 - DNA, 333 bp, Zea mays
ccgacgcctgactccaaaccctttcgcctccgtcgacggctgatagctccagcgccctctgggacggctggccggatgtcgtcctgccgctacgagctatgcatctgcttcgtcgattcaacatgggtaagacacgctgtgtgccagttagctcgcgtgcttaagacccacacgaggcacctaactgggcctggactaaccctacaagatgagccatgctcggaacaagatgaatacaccttaccctggatcatgccactctctggcaatatgtgccaagaagagtggcatgatgagcacccaggctgtctacgatctactgatcaatgctca

SEQ ID NO: 333924 - DNA, 301 bp, Zea mays
cccacgcatccgctgactcttacattaagcttaattacgacaacatactggggtcatttgggcaattcttagaccgaactccagccgacaaaacctttaaaacgtacctctaatagctcactctttactctgaaataaacaaaataaactactcacactatacactatcacaaccttcaatcctattatcattctacaactaactatcctttttgtctaacatatatacaattcaatcgacgcttcataacacaattttgaattaccataacattaatccttcccaacttaataatctttc

SEQ ID NO: 333925 - DNA, 190 bp, Zea mays
cccacgcgtccgaccacgcgtccgaaaaataaaaaaaaaaaaaaaaaaaaggaaaaaaaagggaaaaaaaaaaaaaaaaaaaaaaaaaaaataaaaaaaaaataaaaaaaaaaaataaaagcaataacacaatgaattaagacccaaaaaaaatgcaaaagggccatgctatttacccatcaacaaaatc

SEQ ID NO: 333926 - DNA, 457 bp, Zea mays
aattcccgggtcgacccactcgtccgaaacaaacaaaaataaaaagataaaaaaaaataaaaatttataacaaaacataaaaaaaaaggaggaaagtggaaaataactaaatgggtaagagcatcaatatcaccttggaaaaaaagaagatgaaaatgacggggagcttgtagtatctaaaatcttcttccagttggcaaataagagtatggaaatttctgaaacagaaactgcttgtgaagaacctgaagcacctgcttcagtgattggtccgaaaactccaaagacaatcacaccgcagccacgtcatcctaaaagtagtccatgtgaaactcagcagaatatttccattgtgcaagatcagctactactggacagcgaatgctaacctaccatgcctattgttagtctggacgatgatgctatgaaccctgcatggtgtgctgtatctgaaaaa

SEQ ID NO: 333927 - DNA, 439 bp, Zea mays
  unsure (1)..(439): unsure at all n locations
cagccaatggcaccacatggaggatgtctggcgactgcggtcctnctcgtatcgggaaccgtatgcngagtggtgttgctcaacagcgaggcgggttctggcgttgaggtgggttccagcgtcgaggcggtccccaatggtgaggacccaccgggatgcggcggggcggtgctatctgcccatcaacaagatcttgcattgctcggtcgactgcccgacgtatagaagaaaggttgaagatgtcatggtgagaggcttcaatctagccatcgttcacggcggcgacaaggtggttcaccacgaattcgcgttggtatagaggcattttcttaccattcttncttncttgggtatctcttcttcgtctggcaagagcgggcgctgataacggggttagaaacaaagaaactgaagcanatgatgaatgttcntttcattt

SEQ ID NO: 333928 - DNA, 401 bp, Zea mays
gagccatggccttatctgcgaacctcaagtctactgcaggaaactgtccgagaaagacgagttcttggtgcttgctactgacgggatttgggacgtgctgccgaacatggaggtggtgaagtctatgatatcagcgcctgacaccttccaaagcggcgaggcagctgatctaccgctcggtctgagcgtggcgactcatgctctcgacgtgcatggaggacgactgctccgccatgtgcctgcacctgaaccggtgggcctgacctgctaccatcgagagcatcagatcactgatcactgctaccgacagacactatgtcgagcacacctttcacaatcatcagtttccgtatgactctgacgagcaactgtcccgctgtgatcgacgaggtgaccacggt

SEQ ID NO: 333929 - DNA, 232 bp, Zea mays
actactagcacgcagttccaggcgcagagcttcggggccaagagcaagctagctcttgccgtctatacctgctcaaagagcgaggaccgatcgccagcactcgctcccgatgccggacgcctattctcaagcccccacaaccgtaaactcgccttttgcataactgctccaactatagcccataaagaactggtacctgttgccggaccttcgctactcggtctacttcttg

SEQ ID NO: 333930 - DNA, 242 bp, Zea mays
gttaggacttgctaataagctgcatactatttgtttgcttgagaatccgaaaatgtcagtgctttttcatgggttgtagcatctgcgtggccccactttttacgtgactcctaagtgttttcggctttgtttacacttgtaactaacgaagaaatcctgggatgactgggtcgcaacttctttaaaagatgctattcttattatggaaatttaatcggagactgacaatttaaagtcacctc

SEQ ID NO: 333931 - DNA, 90 bp, Zea mays
accggtcctgaattcacgggtcgacccacgcattcgaaaaaaaaaaagatacaatatcgaatgctaagaacaaatcgaaaaagaaaagag

SEQ ID NO: 333932 - DNA, 82 bp, Zea mays
cccacacgttcgatacgagcaagctgcttgttcaatagcacctagctaggcgtagctactgggttgtacaatatatctaagc

SEQ ID NO: 333933 - DNA, 320 bp, Zea mays
ctagcttcacaggaacttgtttttttaccagttaccgacaaattggagggccttcgacctggaagccctggtttgactggtgtagttcttggaaactacagtgagatattgccacttatttcttctgtcatgcggtgcatccttttgtgtcgtggcattttacgcattattaacatagttaacatgaggcttatgaaagataagtacccatactacactgactcattttcaacgatgtgtgctttcttcatattctcgcttgtgtacctgtaccacaaataaaagactcacaaaaaacgggcaacctttttaaaggttcc

SEQ ID NO: 333934 - DNA, 324 bp, Zea mays
atatgacacaggttcgaatacagcgagcacaactgcattctcagcattgaatgcagcaagggcaacccgccacgggactacgggagcgctgccacgacgacctaccataactacttgcactgcagcgtaagtagatcaacgtctacagatatcacgcgcatcgacgatccaagaacaacagcagcaacatgaattgcataggagacctcaccatcacatcatgaggaagcctctgctgactcaatagctaaattactgacaccatgcatgcatgccatatcactatgaatggtccagcggtacccctaccatgcgtgcctttta

SEQ ID NO: 333935 - DNA, 269 bp, Zea mays
tcgacccactcgtccgcggacgcgtgggaaaaaaaaaaaaaaaaatacaaaaattaaaaaaaaacaaaaaaaaaagaggaaaaggagggctgtaaagaagggtcgtatgttctataacatccacgtttatatgcgcttctatgcgatgctatagtgtctcctatgtacactccaaaagcccatagttttagcacgcttttttacagcgaaaaccattgggaaaaccctgcttattcccatcttagtacattcgcattacatccgctttt

SEQ ID NO: 333936 - DNA, 354 bp, Zea mays
gcaaaccagattaatttattcgtacagcataaagacagaataagacaccatttacaagccactgaatatgtatagtgatccactggcgcagaagtcagattcaagattcatttcgtctataaaaagtagtttccagaaaaaaaaaaagaaaaaaaaacaccaatgcaacctgaagaaaactgagaataaactaatgatgcaaagacatggaaatggctcaccaggagtcctagttacagatgcttactggagattgcatacttgatcttgttgttagttatatggcattctgtagatatccatgagtaacttgaatctatctgaagattcaactggactgaccggaaaaacctt

SEQ ID NO: 333937 - DNA, 172 bp, Zea mays
atttcgagaatcaactaaccaacaaatccgtagcccaggtgattcgctgcctccctctggccaaaccaaaatgggatgaatcttctcatgcagcttttttcttattcagggcgctgcgaagcatcaaggcaagggggtaaataaaataagggggaagaggagttgtcacgat

SEQ ID NO: 333938 - DNA, 208 bp, Zea mays
cccacgcgtccgcccacgcgttcggttatattgtctatctatttgtgtgaagggagatggccttgatggatggattagcttcgctaatgctttagtttgttgctgctgctgcttccgtttgctactgatgatgcttttactgtattttactactttagtttgctcgacaaactattgtgatgatggataaagtgtgttgtgatggtgg

SEQ ID NO: 333939 - DNA, 274 bp, Zea mays
ccgacgcgagcagccacgcgtccgcaagtctggaatgaactagtgacatgtgaacaggacgatgatcgacataatcaggggaccaaaagggatggacctgacgcaggaataaactacagagaagatgaagagggattacaaaccagagcggatgatgctatgactgagattatactacctggactttatctcgtacttctggtctagtacatgccatcatcggttgctggactgctaagtggactatagtgcattgatggtctccacgctatgc

SEQ ID NO: 333940 - DNA, 433 bp, Zea mays
caaattccaacctatgtgaagcagtttagctcccttaatcctaccaagtaagttctctcgaaaaaaagagacacttccaattttaatgcatatgtaaacctacaaaagatgttcatgtaggaccatcaactccaaaaaattattagtaatgtctttactacaagaatcaccctccatgtccatgcataaactatcaacaaccacacctcaaaggcaagttccttcaaatttatacccgtacaatctaacacttacttaataccaacttaaatattatataaaaaatataacaaatttattatgtacaacaggtttctagagcattagcctaccatgcatgtcaagaaaacacaccagagtatttcaattttacttcgccctcttttttaacataatatacatatcactggtttttagcataccacctcatgct

SEQ ID NO: 333941 - DNA, 318 bp, Zea mays
atattttttttttttatgggtttttgggaattttttttttatatttttatttactatattattttatttatattttttgaatttatttgatttttaatacttacaattttaatgttctctaagtgttaacaacgactaaaaatgataattacttaaaccaatcataagaatctgatagacataatcaaaagttcattaaataagattttgatatatacacaatcgctataaattaagacttgagaatatagctagattatgatcatcagatacaagactcagctagcaccatatttaaagctgaatacccagtttttc

SEQ ID NO: 333942 - DNA, 332 bp, Zea mays
aaaccagtgtgtgtcattattacaaaacgaacatgcatgttctgtgtctgaaacaaagaggctaatgggctatacagaaaagctgatgaagctgaaccgacgacactacacgtcttgatcacatgaaaataaacgctgcaagaatgtacagattgaatattgacgattttggctctgaaaattaggacacaaacctggaatggcatgctctaatttgtaacccatgggatattgtatttgtatgccaatatttcctcaaacgtaaacgaaattgtaaattcatggccacattttacaaacctgtgacggtataaacccttgtgttacccaaa

SEQ ID NO: 333943 - DNA, 279 bp, Zea mays
taccggtccggaattaccgactcgacccacgcgttcggacactcgtccggaagattcccgtttaaaaactgcaatggcacaaatgcttgagccatctgtgtcttaaagagacttatttatatcatgcaaaagcatgtgactcgaaacttttatagactcgaattgctttctgccttaatgcaactgtataattgaacttatgaacgaagatcatgcagactctgaagctttgttaccttataatggacattaaaccgtattctattccacaagaaataa

SEQ ID NO: 333944 - DNA, 232 bp, Zea mays
cttagtatgaattagattcagctgcataatgcctgtcacttgcgtacttccatgtaagggaattctcaaaaggaagcaaaatcttgcccaaaaaaaaaaaaaaaaaaaaaaaacaaaaaaaaaaaaaaaaaaaaaaaaaatacaaaaaaataaaatccaaaaaaaatctcatgaacatacaaaattcattagctaacattataagaaacccatatcataccaaccacacata

SEQ ID NO: 333945 - DNA, 298 bp, Zea mays
caaattctgatcttgagcttactatccaaataacttaatactaccaagtaagtaaataagggaaaaaagggacacttgcaataataatgcataatgtaaaactacaaaaaagggcgatgtatgaacatgatcctagcttaaattctcagtcatgccactactacactaatcactctggatgcccatgcgtaaactattggcaaccacatttcaacggcaagactgttaaaacctatacccttccaatctaacacttacttcataccaacttacatattatatctgacatattaccgat

SEQ ID NO: 333946 - DNA, 361 bp, Zea mays
ccggtccggaattgaccggatcgacccacgcgtgcggtttagctgagacgccattgggctccatgtgctggcgccttgttaactcacagagcgcgtgggggctgaatctgtttgagcagcctacttgcaatcatcctgagctgatgctgtgctgctggtgcatgctatactatcattacttatcggctccgctgtagcttcttacccaccggtgacattagttcggtacccgtatctggatatttttttagccttcttcgttggattgttcaccggtgatggcatgtattaacagacatagttacatacagatgtaatgaattcatgtctggatcatattgctttcagttgcacaaattaa

SEQ ID NO: 333947 - DNA, 434 bp, Zea mays
atttgggcgtggtgattatctacttgatggctatgactatccaagctacatggatgcacaggaccgtgaggatgcagcctacaaggataagaagaagtaggaccaagatgtccatcttgaacacagatggtagtgtcaaattcagtagctatcgggccatcagcctgtatgcctaggtgatatgggacatcaaggctagccctgtcgtgtgaacgtgtagattgcgattgatcacctaacgtagcatgttagggtgctattatagtatggaggaatcttgacccactgagcttgacgcccacttagcaatgtaggcattgaacaagaggcacctatctcgatctacagcgctgtgtattacgaattggtgcgactatgttgctctattttcctcaggcttatatcttatgaaacatgatacttttgatctgtgc

SEQ ID NO: 333948 - DNA, 233 bp, Zea mays
tgaactcaaaccatcttatgagggtcaaacctgtttctaatttctaaaaaaaaaaaaaagaaaaaaggaaaataaaaaaaaaaaaaaaaaaaaaaaaaaaaaaaaaaaaataaaaaaaaaaaaaaaaaaaaaaataaaaaaaaataaaaaataaaaaaaaataaaataataacaaaagaagcccaaaacgatcgacacttaacaacaggtgcgcaaccttaatggagaatggg

SEQ ID NO: 333949 - DNA, 358 bp, Zea mays
cggacgcgtgggcaagagccaaatcgccaaagtttggtcgttctaaaaacaggtccacaccagagactgaagaaaatgctaccgcggaccagcctgcccacctgagcctcgaggagaatgtttctcaaaccggtgtgaaaaaaccaaccccgttgaatccagcaaagaagccccagaggaagtcactccccagattgccatctgaagaaaccggtccgcttgatgccacctcaaggcagctaataaagagcgccaagctggatgcagttagtgctctggagacaggatcagctacaggacaggtacaactacaaggaagtgagacggaaacagattctggtcaggggccagttgaagc

SEQ ID NO: 333950 - DNA, 242 bp, Zea mays
cggacgcagtgggcgcgacgtcgtgcgcaggacgccgtgggcaggactcttgcggatgaagacaagggacttaccgtcctacggagatcaatatgtccatcttaatgtcagcatccgcgaagatttaacgtgtagacagcggtagctgatcgaggaattacggaaagacgagcaaggatatcaccacaatgacgccaaggcagcagctggagcatcaccgggacagccggtcttaggagctc

SEQ ID NO: 333951 - DNA, 325 bp, Zea mays
aaaaaaaaaaaaaaacataaaaaaataaaattaaaaaaaaaaaaaaaaaaaaaaaaaaaatggtaacatgaaaaaaaaaaaaaaaaaaaaaaataaaaaaaataaaaacataaataaaaaaaaaaaaaaaggggatgccgttttaaaggttccaagttaacattcatgtacttgcaacataatactttttaaataagcacactaaaattcaattaattgaccattttttaaaaaaaagtgaattgtaaaaaccctttatttcccaattttaacaccttataacaaaatacccattttccaagatggcataaaaccaaaaaggccc

SEQ ID NO: 333952 - DNA, 356 bp, Zea mays
aaaaaaaaaaaaaaaaaaaaaaaaaaaaaataaaaaaaaaaaaaaaaaaaaaaaaaaaaaaggaaaataaaaataataaaaaaaaaaaaaataatataaaaaaaaaaatataaaataaaaaaaaaaataaaaaatttaacttataacaactctaaaaatggatttggtaaatcatgatccatgacgaaaatgatctaacttgataaataaaaagcttgctcttttatatattatgatttaacattttactaaaggtactttcaaatttgtaacatgttgaaattgtgatgaatctctaagatcacttgcatattagcgttgatgaattcagctctcattcaatcgtcacagttgaa

SEQ ID NO: 333953 - DNA, 324 bp, Zea mays
cccacgcgttcgcccacgcgtgcgcccacgcgtgcgcggacgcgtgggaaaagaaaaaaggaaaaaaaaaaaaaaaaaaaaaaaaaaaaaaaaaaaaaaaaaaaaaaaaaggaagaaaaaaataaaaagaaaataaaaataaaaaacaaatatagaaatgagataagataaagaaaagaagacaggaaggaaatgatctatgtcgatagatgaaaagcttgctgtctgagaaaacctggttgaagattatactaaaggtacttcaaaatatgccacatgttgaaattgggatgagtgtaaaggggcacttacatattagcgttg

SEQ ID NO: 333954 - DNA, 313 bp, Zea mays
ctgtgatttgtatgtaccctgctcttcaataaagtagtgcccaaccatgttactgttacgccccaaggaaaggtgggtgactttgttagtgtaaaaaccagaagttttgaatctatgtatgttcattaattttgacaagaactcttatcattatgaaatgaataaaagggaaaatgatgtgttgtttgaaaaaaaaaaaatatgacaatataacacaaaccagaacgacaagtataattactacaaaaaaaactttctaattgaacgatctctgacatactatatatgagcaacagatgtatgtccgaagctt

SEQ ID NO: 333955 - DNA, 412 bp, Zea mays
ggtggatcagccttatgtagaaggaaagtgcctaagttgtgcttgcccttctgtgcctagtactatatttcaagaagatccaattgaaccaaaaactggaataaaatttccaacatttctggaagacgactccagtccatctgcagcggtccttgttgggataggtttcaaaggcatgagagtgatgagggtcaaaaatctgaacctctacgcttttggtttatatatgcaaccgacttctatccgtgagaagctgggtcctaagtatgcttcatttccaactgacaagctgatggagaaccctgatttctatagtgatcttctcaggtatattgatgtatcattttcatcatatttctcagcttcttttgcttacccttaggttccatttgtaaaggagatttttgaatct

SEQ ID NO: 333956 - DNA, 364 bp, Zea mays
ccggcccggaacgaccgactcgacccactcgatcacccactacgtagacggacaacgtgcctcaacttgtgctccactttgtgtgcctagggctatagttcaccaaaaagcgataaacccgctaactggcatcaaatctgcaacattgctggaatacgactgcattccatctacatccatccttggctagataggatggaaaggcatcatagtgatgaggctcaaaaatctgaacctgtacgctaacgggatatatatgcaagcgacttctatccatcagaagctcggtcctaagaatgctgcattcgcaactgacaagctgatggacaaccctgaatcgcatagtgatcttttcagcatattg

SEQ ID NO: 333957 - DNA, 219 bp, Zea mays
gaattacccactcgacccacgcctcctaaaaaaaaaaatacaataacattaaaaaataaaaaaaaaaaaaaaaaaaaacaggaacataggaatttttcatacgttcactatcttcaataccaaaattatcttatatcatcttacttaatttattttcactcaccctcttatcactttaaaatgaattgaccgtcactttacatactccatctcaataaa

SEQ ID NO: 333958 - DNA, 93 bp, Zea mays
tcggacgcgtgcgaaaaaaaaaaatccaaacttacatacacaataacatacaacgtaataacgaaaaatataaagacacctaaattcaaatta

SEQ ID NO: 333959 - DNA, 154 bp, Zea mays
aattcccgactcgacccacgcgtacgcccactcgtccgcccacacgttcgaaaaattcaaaaaacacaaaaatatagaggtaaacatacaaatatacaaaatccatttagccataataaatatatgttagtcctataaccctaagtgtccaact

SEQ ID NO: 333960 - DNA, 284 bp, Zea mays
gtccaacttctggtgctcctccagctccaccgactgctccacagcctgcgttgtcctatggtcccccatcagaggggaaccactgattctgttccttaggcatgacttgggaggccatatgaagtatgtgcagaaaggctgttcctttggaggttgatgttgtcatcttttaactaaggccatttctatcatcctgaattcaagagattattgagaaaatcttccaaaaaaaaaaaaaaaaaaaaaaaaaaaaaaaataacatcgcgagctttaaaaatatcaa

SEQ ID NO: 333961 - DNA, 270 bp, Zea mays
tccacgcatgctcgaactaatgctgcaactctgaatgcatccactgatgattgcaatggggagtgttcttctgtgaattcaccttcgaattgccgatcgaatcatgatacgcatgacgacatgctagaactgttgggccctctgcttggcactagttctatcgctaggcgtaaagaaatacttgctgtcatactaactgtgtctaggcttgactttacacttgactagtcaactgcttattcagaagctctatatgaatctgaacatgga

SEQ ID NO: 333962 - DNA, 426 bp, Zea mays
ctcctagataaacttgtccgtgaaccaattgatggaaatgcttggcatgcagatcacatgatacctggttataaaggaggaggggaatgtaaactcgagaacatgagaacactgtgtgtggcttgtcattatgaggtcaccagaactcagcacaaggaactaaaagaaataagaaagaaggctaaagagcacttgaaaaacgccttgaataaacaaaaggataaaccaagtgaagcaacagaagaactagatgacgaatcgttgctgatagctgtcccgggtagtgcctactccttaggatttcctggcaacggatctgatgaaaaggctgctgaatagggcatgtttcatttaccttgattattgttcaaaaagggcgctggtattttttagctcgcgtcctttttttggacatgttaaatgcta

SEQ ID NO: 333963 - DNA, 362 bp, Zea mays
gagaaaaaaaagaaacacaaatgataaaaaatgaaggaaatacaactaaaatgggtacctggggatcgagcgcgagtctgaaagcctactcgttaacttgacaacactgtgagtggttagtcatcatgacgtcaccagaactctgcacaaggagctaaaagatattaccgagcaggctaatgatcaccttgatgaacgccctgcttaatcataaggatcaacctagtgatgtcaccagatgacgtacatgacgaatacgcgctgatagctgtccctggtagtgcctactccttacgaattcctgacaacggatctgatttaaaggctgctatataaggcatgattcatttaccttgattatt

SEQ ID NO: 333964 - DNA, 250 bp, Zea mays
atcgcgccagaccacacgccgacagcgacttctgcaccagcagctgggagcgcgcgaaacgagtcggaggacaggcagaagccgaaggcggatgataactacagcggcaactggctgaacccctgggcggagcccttcaggccttctatgacgctgtaccgatggctggtgaccatggaggcgacggctgagcatgatgatgaggactctttgcgagagtggtggcacctggtgtgcgtctgcacgaact

SEQ ID NO: 333965 - DNA, 239 bp, Zea mays
aaaaaaaaaaacaactatataccttactttttaaaaacttaatacaaaaaatatggggtgggttcaactaaataatgagccttggtcagcaatcctatttatccctttgtcatatacgagacttatctcgttgtaaatttcctttgggttcaaccaaatataatcaactaaccccaactttacatatttgtctaccataataaccctgtcgaccaaatttttaaacactttaatgaaca

SEQ ID NO: 333966 - DNA, 68 bp, Zea mays
  unsure (1)..(68): unsure at all n locations
gaaaaccgggccgacgcacgcgtncgaccaacctttccgcactctctctgcgtcaccgaccgacctga

SEQ ID NO: 333967 - DNA, 247 bp, Zea mays
attcgaggcacgacccacgcgtgcgatcacacatccgtgctcaaactttttaaatttatgagccatacaagaatctatgagcctcagttaacaccaatgtgatggtgagacaaaaatcaaagtaattcatggtgcatgccacaaggactctctcataggtgatcctgatattactcaccttgtggagaaacgctacctctacaagaccactctatacattttccattcctacaccctttaaatcata

SEQ ID NO: 333968 - DNA, 388 bp, Zea mays
tccggatttcccggtcggaccaacccgtccggcaaaatcccaattgtaaacaggaaaaggtgttttatttccaaacattacaactgttagggaaggggtcatggaacctggagttatgatcctacttttgtccctaaccaagggttacgtctagtcttctctcctgggtgcttgatatctcatgccatatcaatgtatcagtacttactattgtttgtcgatataaggaattgctgacgtgcacataaaaatgttattctatatggactcagacacacacgttgttaagacaggttcatttggtaataactaatcattatcttccatgacttaccatttatgttactcatttgccatataagcccactctaaactaagggacagttaa

SEQ ID NO: 333969 - DNA, 436 bp, Zea mays
  unsure (1)..(436): unsure at all n locations
cggnttggaatacccgggcagacccacgcgtacgctcacgcatgaacctacgcttgattcatctcctccttccgctcgaacactaatggaggaagctttgcttaaaacatatgctgttctgctcaaaaaaaaaaaaaaaataaaaaaaaaaaatgaactacaaacccttataaaaaaaaaaaagggggcgcccctttaaaaaacaaaattaacaccccggcattaaaaagggtgcccctttttaaagggccccaaaattaaaatcccttgccgcgaattttaaaaactttttaatgggaaaaacaatgtaattcccaaactaatatttttaaaaaaaaatcccttttaaaccatttggttaaaaaacaaaaagccctaaaaaaaacccctttcaaaaaattggcaattttaaataaaaaagggaaccccccttttt

SEQ ID NO: 333970 - DNA, 303 bp, Zea mays
cccacgcgtccggcggatggaggcacactctggccctctccgagaagaaaaatgtcttctcctgggggaggggcactagcggacagctcggcaacggtgaaatagtcgacaggtggttcttaccccgtgcgcgagctctcagtgtctatgtcttcccctgccccttgtaggaacacgcctgtgctgatctgatctgatctgacaactaacgtctcaccatcctgaaggaacacacctgtcctgtccaatgccctgacctcaaatggtcctgcctgcagaaacctaaagtattccacggaagcc

SEQ ID NO: 333971 - DNA, 183 bp, Zea mays
ccggggccgacgcacgcgtccgaaaaaaaaaaaaaaaaataaaaaatttaattttaaaaaaaaaaaaaaaaaaaaaaagagaaagttaaatttaaaaatggggcggccgctctataaaatccaagcttacttacccgtgcatgctacatcatagcttttatatattgtaacctaaattcaatt

SEQ ID NO: 333972 - DNA, 269 bp, Zea mays
  unsure (1)..(269): unsure at all n locations
tttacactcccttcacaacatgaagtagctgtcagatttttaactggccacttcctnactnccttactaacacatgttatccaacaatgattttattaccaaatatcttactgctaaaagtttactctataccatatactacctcttcaagacgaatttgttgaaactaaaacctaagtactaaaaactataaacttaaatgcatgaaataaaaaaactaaacactcatttaaaaacattaaccactaactttcttaaaaaaataataa

SEQ ID NO: 333973 - DNA, 329 bp, Zea mays
  unsure (1)..(329): unsure at all n locations
tttttaattcccggcccgacccactcgtccgaaaaaaaaaaaaaaaataaaaaatttactttctaaacaaaaaaaaaaaaacacaaagccaagttaaaatttaaaactacgcaagccccacccaanaaatcaactttacaaatattaatatacaaaaaatcctatcccctttcacatacacatatcttaacactatccacatctaaatcatctatatttttcccttatcccctattttaatttcattatcccctttctaaaaaccatcataattaaaaaacccttttctttccccattttttatacttttcccccctccccattttccc

SEQ ID NO: 333974 - DNA, 426 bp, Zea mays
atcagcaggttcaagcaatcatgtggaggcgttgagagtatatcttctgtcaagggctggttccagattgaagaaccagttccaagctggagagggcatgattacagttgactgcatcgaaggttatccaccggtcagtttactgctaggaaagcatgtttttctaagtgcaggggatttttatctggctagtcgatcctagtttcgtttgctgcatcccaattttgactgcctcacccattgttttgccgcaatcagcttaaaacagcttggttccatttatgcatctcaccgaagtcatgtattcagtaaaggtgaaagtctcaatgtacgcttatatgctatagcatgatatgcatttgcgcccttgggctgggcacatgtaagctaagattttaaaatattcggctatggttcccatatgtg

SEQ ID NO: 333975 - DNA, 346 bp, Zea mays
  unsure (1)..(346): unsure at all n locations
ttcatataaaaaaaaaaaaaaaaaaaaaattaaaatttaaaaaaaaaaaaaaaaaaaaaaagaaaaggaaaaattaaaaaaaaaaaaaggaaaaaaaaaaaggggngnnnntttggggggtccctatataaaatcccaatttactgccccgtccatccaccgtcatagctctcctaaacccaaccaaaatccatccactcccacccttttaacaacaaaacccctggaaaaccccagcctatccccaactaaaaccccccccataacacccccctttttcaaactgaaaaaaccccaaaaaaccccccccccaacccctttcccaacatttacccaacctaaaacc

SEQ ID NO: 333976 - DNA, 117 bp, Zea mays
  unsure (1)..(117): unsure at all n locations
ctgagttggtaatatcctagattgcctgttttacatcanaaaaaaaaaaaaaaaaaaaaaaaaaagtgaaaattaaaaaaaaaaaaaaaaaaaaaaaaaaaaaaaaaaaaaataaaa

SEQ ID NO: 333977 - DNA, 367 bp, Zea mays
cggacgcgtggggagagaaggaaaaatattcccaaaccctacctcccgatctcgatgggggaccctcgcgtcttcttcgacatgaccgtcagcggcgccccggcgggccggatcgtgatggagctgtacgccaacgaggtgcccaagaccgcggagaacttccgcgcgctgtgcacgggcgagaagggcgtgggcaagtccgggaagccgctccactacaagggctccaccttccaccgcgtcatccccgagttcatgtgccagggcggcgacttcacccgcggcaacggcaccggcggcgagtccatctacggcgagaagttccccgacgagaagttcgtgcgcaagcacacctgccccggggtgc

SEQ ID NO: 333978 - DNA, 346 bp, Zea mays
  unsure (1)..(346): unsure at all n locations
gaattnccggtcgaccacgcgtccgaaggctcttgaacacacgcgtatcgtgcagaacgccgacccttccggcgtgtacagagagaggtagatccatctaagcttctgtcgcagtgtcacccgagctgccccaccccaaactgtttggattagcgtctgtttgatgggtgggccctgggacgtgacttgatacggcaaattgccctatactgatgtatcctaccctgttgaacaatcttcttgcctctctctatatatatgaatatgaatgtacatgttctaagcctctctgaagatttttgtaacatattcaatatgacagccaatattagccctaaaagagtct

SEQ ID NO: 333979 - DNA, 368 bp, Zea mays
  unsure (1)..(368): unsure at all n locations
agcatctacgtgagtgatcagaccggtggcccgccgatgataggtgtcaagggaaggacgaaactggagctgggagcctatcgaaccatcctgtatccgctatatacagcatatcctgtattcccacagtgaaaaggatgcacctggtccttctnngttcccagtttggtggaatgcacccttctacggtaagtaatcaaagcggctacgtgttcaatgcattgctgnnncgcatcttatctgctagttagaaatcaaagcttgtcataccgttcgtaaactgaggacaaactgannaaatggaatggtggcatcagggaggttgtattntggtacgggcttgccgaagggtcaaaggctagggtgtg

SEQ ID NO: 333980 - DNA, 357 bp, Zea mays
cggacgcgtgggcggacgcgtgggtggtgatattacagttgaattgccactctttatatggacgaagtaatcgtatgataatgataacaccattgtgacaaaaaaaaaaaaaaaaaaaaaaaaaaaaaaaaaaaaaaaaaaaaaaaaaaaaaaaaaaaaaaaaaaaaaaaaaaaaaaaaaaaaaaaaaaaaaaaaaaataaaaaaaaaaaaaaaaaaataaataaaaaaaaaaatggggggggagatttttaaaggaggaaaatcaaaattgagtgacatgaaaagggattttttttttttggggggcgaaaaaataaaattgtggggcgtttaataaaaagggggttcatgaaaaa

SEQ ID NO: 333981 - DNA, 128 bp, Zea mays
gtgactcgtgggcttgcccgtttttgcattatgtgaaaaggctttgatctggagggaggggacactctttcacacaccttaccactgcactacccatcctattatataaagcgccggaaactgatgct

SEQ ID NO: 333982 - DNA, 377 bp, Zea mays
cccacgcgtccgaaaatatcagtttttggtgcttattcagaaagaaactaaaatgactttcaaatggcaaattgcacactttttataagctatgttgttctcacattagaccagttgattaatattgaacaattaatacagcaaaaaaaatgccatgaaccagctactatgtatgaacttgataagtatttttagcaggcactcaagactattacagtggactattcgtgtgtcacaagttttttgtagaaccagcacttatgatggtatttttcccattgaagctaaaactttttttattggtagactggttgctgggattgaaagaaaaattaactaagcgtgttatgagcacgtgattatttttgttaagttgc

SEQ ID NO: 333983 - DNA, 147 bp, Zea mays
ttgggaatgcaaaatatggggatctcatatttctgtaaccctaaccttctgaaggcttagtctggtccaaaatatggatgactaggtcatgtttgacggctttagctttctttggtaatggttggccgaaactaatttgaccataaa

SEQ ID NO: 333984 - DNA, 229 bp, Zea mays
aataaaataataaaaaaaaaaaaaaaaaaaaaataaaataaaaaaaaaaaaaaaaaaaataaaaggggtggccgttttatattataaaaatttacatacctgttcatgaaacgaaatagattttttttagttgaacttaaattaaatcaactgtgctgcatttaaaaaagtcataacttgaaaaaccatatggttcacaaaataaatgggtttgtaacaaatctccttt

SEQ ID NO: 333985 - DNA, 363 bp, Zea mays
cccacgcgtccgcccacgcgtccgtccactcgtccgcccacgcgtccgcccacgggtccgggacagttggaattcctcccaaaattcttcatcgaagaacaacaattccagttcttgggacgattgggacgaccaaggcaagaagggtgaacctgcgaaaccgcaccaaagcagtgactcctgggctggctgggatgatgggaaggacgatggttttgatagtcctggttacaacaaccacaacagctctaacaaggggagcaaccacaacgggacttccggtggctcattttggagggaaggcggcttccgctgaaaccgttctcttctccatagagttatactttcagagttgttacattg

SEQ ID NO: 333986 - DNA, 83 bp, Zea mays
gttgtgaacaagttaaatgcccaagacattttgtattgttccattccagctcaagaattcgaggctaagcattgcacaggagg

SEQ ID NO: 333987 - DNA, 237 bp, Zea mays
attctcgggtcgacccacgcgttcgctcacgcgttcgaaaaaaaaaaaatacattttttaatttttaaaaaaacaattataaatacgtaaatttgtataaatatcctagagataatttcaatattacaaaaaatcatttcacatactattccattatccaataagtctccctccttgaataaccctcattcctttaaccatgtttccaatttaaattactctatcactattaagctt

SEQ ID NO: 333988 - DNA, 302 bp, Zea mays
  unsure (1)..(302): unsure at all n locations
aacggatatcaagatagaaatgcattaatgtttttgtgatgtgtagtataactgatattgaccccttgatctctaggtacaatagtcgngnnngnnangnnctnnnnnannnctnnancngnnnctgcataccgggggttgggcatatcctgcagttagatgatcaatggtgattagatacatgttctggaaccaatggtcagatgacagatggcatactaaacaccctattggtctctaatattattattgtcttggaattgcaatgcctgtgaagtacattattaatggcaggcccaggc

SEQ ID NO: 333989 - DNA, 415 bp, Zea mays
ggagattgggcggctgcagcagctctaatgctgaccttaacagcagcaagtttgaggacggctacagttagccaatatgttgtctgtctatgtcctcgcgaagtactagagcagtagctacataccgtggtttgtccatatcctgttgttagatgatcaagggtgattagatacatgttctggaaccaatgttcagatgacaaattgcaaactaaacacccttttgctctctatctttattttttttttgcaattgcaatgcgtgtaaagtacattatcaatgtcagccccaggcatatcaataaaaaaaaaaatgaacacacaaaaaaaagaaatataaaaaaacatttagaacaaaagggaaagagacctattgcgatctgcaccaaaaacaaaaagcattaacattgaagct

SEQ ID NO: 333990 - DNA, 244 bp, Zea mays
agagaaagctcagggagccactgatccatttggtcagcttcgccagtgatcaagcattcgggtgattgaccctgatgacctgctggtatagtcgctagggaggagcgaactaagcgagagcgatcccacatttgatcagaggatgtgggtagagacattcaggggattatagacctggtccttgacaagggacgagattacatattggaacgtaaacagcatttggctacagatctatcacgat

SEQ ID NO: 333991 - DNA, 272 bp, Zea mays
cccacgcgtccggccagtcatacgaccgatccctagtcgattcgtgcctttccacacggatatgctcacacgggcccgtgaaggtttgatccaggccgagcggaccgcggtggcggcggcggatatagcttgcacaaaagacgagatcacatacaatgaaccactggatctgatacgactcagtctcgacgagcgcatctacgtaaatctacgactctaccgccagctgcgcgacaagcctcatgcgaatgatcaacatttaaacatgatac

SEQ ID NO: 333992 - DNA, 421 bp, Zea mays
cccacgcgtccggccaaccgttggatacatcgctcatgaggccatggtctagaaggactagagcgtaaaggcagctggcgtgtggacatgcggcgcgaccaactacgtgacgcttgagatcaccatcattcatagagactacgatgcatacatcgtgaagaacctcatagatggcctagacaatgacaacagtactaataaggagatcgacgagcctgaacaacacgaccatagcaagagacagatcatgcagaaggatttgatctacgagaacattacatcgaaaggttcacatagacctcaagcagccatagaaggcaacatacgacctgagcattacaaggatgacctagactaaaataccgatctttaccaaccaagattgaatggacaaaatgtatgctattggacaacattgaat

SEQ ID NO: 333993 - DNA, 189 bp, Zea mays
  unsure (1)..(189): unsure at all n locations
cctacgcgtccgtctttgccctcttgtgagttccaagaagattagagaggagatgatgggcgtcctcaggaagatgagagcggctggtacgcacactgacaagaagaaataaagcatttcaagttcatgaatgtgtnnganngagtagatgntcttctattgcccaatatatatacgaccatcagtctt

SEQ ID NO: 333994 - DNA, 293 bp, Zea mays
cccacgcgtccggttatgtgattgtgagttagatgtgctatgtgaaaaaaactaaaaaggggaccacacaaaaagagaagcgaaaaaaagaacatgactaactacgcataaacaaaagccaagcactacaacgccagacagccccctataatgaagtgagaaatgaaacgagcaatcactagatccttacgatcccaggaaccactctaaatgtaccagccgagacctacagaactaccagccaacaagccaaccacgccctcctactaggatattatctatccctactttcc

SEQ ID NO: 333995 - DNA, 97 bp, Zea mays
gcagggcctccacgcattcaacctatcatttaaacccccggcgcaacaccaagccacgggaggcaattaaaatagaaccgcggccatccaagaccgg

SEQ ID NO: 333996 - DNA, 419 bp, Zea mays
cccacgcgtccggatcacactcgtagagtgaaggaataatatccccaaaccctagctcccgatctcgatggcgaaccctcgcgtcttcttcgacatgaccgtcggcggcgccccggcgggccggatcgtgatggagctgtacgccaacgaggtgcccaagaccgcggagaacttccgcgcgctgtgcacgggcgagaagggcgtgggcaagtccgggaagccgctccactacaagggctccaccttccaccgcgtcatccccgagttcatgtgccagggcggcgacttcacccgcggcaacggcaccggcggcgagtccatctacggcgagaagttccccgacgagaagttcgtgcgcaagcacaccgtccccggtgtgctctccatggccaacgccgggcccaacaccaacggcttcc

SEQ ID NO: 333997 - DNA, 347 bp, Zea mays
gaattacccgggctcgactccactgcgtctcgtgcccagctggcaacctgagcaatgtctatgttattatctctctaccgttcatattttattgtgtcgctggtttaagttaacaaaatgaccgacataatatatcatagaaccggactccaagagactcctattagcagctggcttcctttgtaaatgcacggttagagaccgatcgattctgacagtgcttgattactttacggagggattatcgaacggtacgaaatgttgtctcaaagtacttagtaatgatgtagtcatagtcttgatgaccagtatacattctgctttgaacatcgtctagtctattaaca

SEQ ID NO: 333998 - DNA, 288 bp, Zea mays
ccagctcgtaagggggcttcagcggctaagcgctttccttaggccccagctaagcttggagcagtctggtacatgctcctgcttgcttatccatgaaataatgcctggacagtctgtagatgttgcgaaaacatggtgccccctgtggttgccgcgtgtgtagtaagtatctctcagtcgtagtgtggttgaagcatctgaactcttgagcggtttgcctgtgatggcatatgggtcaaactaaaaaaaaaaaataaaaaaaaaaaaaaaaaaaaataaaaaaataat

SEQ ID NO: 333999 - DNA, 291 bp, Zea mays
gatcgatcgatctgtggtgatgagtgtccttatctgtgtgtttgtgtttagttccagtcgtctgtgaggaagtcagttatgtttgagtgagaggggtacttcgctcttcggtgaacactgtacttgtcatgaggagagttttcatacccggagtgtaggaactctgtactgtactcggatccttcctttttcatcgaagtgggttttattttatcaaaacaaactcaaaaaagaagcacttaaaacatccaaaagacatatagcttgttgaatcattgaacttaaaacgct

SEQ ID NO: 334000 - DNA, 365 bp, Zea mays
aaaaaaaaaaaaaaaaaaaaaaaaaaaaattataaaaaaaaaaaaaaaaaaaaaaaaaaaagagcaaaaaaaaaaaaaaaaaaaaaaaaaaaaaaaacaaaaaaaaaaaaaaaaaaaaaataaaaaaaaaacacataaataaaatataaaaaaacaaaaataaaaaaaaggatagactgtaaaaaccctcacaatacctaactcaattaatcttgaataaaataccctttatgctatctaccataataacaaaaaggtccttactttaaaaccctttccaacatttaaatcattctgaattactaattaaactcactttgaaacaaatcattatatccaacagtttcatatattacaaacaattt

SEQ ID NO: 334001 - DNA, 356 bp, Zea mays
catatacgcagtcgcgtagcatgttttcttatggtaatgcatatgcatgataggaagaggtccagaatcgcgacagagttgcagaggtcacgaatgaagctgatgaactaaataatatcaacaaaagtaacaataattatctaagaaagacaagccaattgcaagcacaaatagagatgccactgttgaatatcaagctgattaccaaactattggattgccaaatatcattgagaatatttcaaaaactggtcacattcttgctgagatgcttagcgaagaacaagggctaaatctagagatagattaaaacatacctgatattggtttgacaatctttaaaggacagatggagc

SEQ ID NO: 334002 - DNA, 380 bp, Zea mays
cccacgcgtccgcccacgcgtccgctgcgtcataacaactggaacagcagacacagggaatgggatgctattaatgatttaagagctgacatgggtagacttcagcaagggatgagcagcatgcagaggatgctggaagcgtgcatggacatgcagctggaattgcagcgttctgtgagacaagaagtgtcagctgccttgaatcggtttgcaggacctgaaggattgtcgatggatctgtgtgacgatggatcaaaatggaatcaggtgaggacaggaacctgctgcgtatgctgtgattcacagattgattctctactgtacaggtgtgggcacatgtgtacttgctcgaaatgtgcaaatgagctggtgcgcagcgg

SEQ ID NO: 334003 - DNA, 169 bp, Zea mays
aaaaaacataaaaaaaataaaaaaaataatttaaactgttaaaacacaaaaaaaaaatcaagagaaacggtcaaatataaaactgatttaagacaaatatataaagggcgtccattattcaaaatacttgctgtctaacaacagcatgaaacttgatgaccctagttta

SEQ ID NO: 334004 - DNA, 249 bp, Zea mays
cccacgcgttcggatacgcgttcggacactcgtccgagcacgcgtgcgaaaaagaataaagaataaacagataaagacagaagataaaaaaaaataaagaaagtgaaaaataaataaaaaaaatgggtggcagctatataggttggagaatgatgttaggacatagcagttatagaggttcaatttagtaaaacatatataaaatgcagtgactgtagctgttaacagtctgattgggtaaataatgga

SEQ ID NO: 334005 - DNA, 81 bp, Zea mays
gttttgaacaagttaaatgcccaagacattttgttttgttccattccagctcaagaattgaaagctaagcattgcacaaaa

SEQ ID NO: 334006 - DNA, 424 bp, Zea mays
ggaacgaccgcacgcgttcgcggacgcgtggggtggcgccttaggcacgtagccaaacaggcctaaatcctctacatcctggtgccatggatatgagtcatatgacttgtacatataatcctgtttattctatattctatggaaaatgcttatttaacttgttaacaatgtaattatgcttatgatatttggatgatgatattgctcttgtttattaccatttttattagttatccaacttttaactcttgtaagttccatccgtcttgtatgggaatgaccattgagcaagcaaaacagatagatcattacatgtgctcggattgtgctaaagtaaatggtgcaaagtgaccctcaaattcatactgaatttcaccaaactcagattctaagattgaatcaaatatgctcatgagataaatgc

SEQ ID NO: 334007 - DNA, 84 bp, Zea mays
gttttgaacaagttaaatgcccaagacattttgctttgttccattccagctcaagaatgcggagctaagcattgcacagaaagg

SEQ ID NO: 334008 - DNA, 298 bp, Zea mays
taaagagctcaacacctgatcgatccgtgtacagtaagcaacacgttatggaacaattcggcgattgattgtacaataattgaagacaaggtttataactttaaaaaaaaaataaaaaaaataaaaaaaaaaccaaataaaaataaaaataaataaaaaaacaacatctaaacaaaaaaaaaactaaaatacataaaaagaataaataatggcactaattcctaaataaaaaaaaggggttaatgcttataagaatccatgttatatgactcatgaattaaccaatatgattataatt

SEQ ID NO: 334009 - DNA, 227 bp, Zea mays
cggacgcgtgcgaaaaaaaagaaaaataatttaaaaaaaaaaaaaaaaaaaaaaaataaaggaaaaaaaaaaaaaaaaaaaaatacaaaaaaaaaaaataaaaataaaatataaaaaaaaaaaattaaataaaaaataaagaccgagaggttataatcgttcacgtgatataaatgccaacaacaaaatataattcattgataacctaaacaatattgaaattactt

SEQ ID NO: 334010 - DNA, 406 bp, Zea mays
cccacgcgtgcgcccacgcgtccgcccacgcgttcgtccacgcgtccgaataatatataggcctgtaacaacggcagggcagagtggaaggtcgaccccaccaagcggaggccacggtctgaaactcaaactgggtttcaactgacgctagctggcttggaagctcgaggatggatcgaagactatgatctccttcattgtgccctgtcaggctacctacccctgcaccctgttggttattggttaaaatggttattgaccaaaggtgtcctgcatcaaacaaggctcaccttgatgttaatgtgctgagggatctaatgtatcattagcgttatccagctcttgtttacgtgctccatctcaatccatgcacgttaggatggattgtctaatctagttcaaattt

SEQ ID NO: 334011 - DNA, 68 bp, Zea mays
cccacgcgtccgcgggagcgagagtgagaaaaaaaagtaaagagtactgtatagccagctattcatgt

SEQ ID NO: 334012 - DNA, 446 bp, Zea mays
cccacgcgtccgcagaggtgggctggcttctcctccccctcttaccaagtcctcttcggggtagggttacttagggttttgtggaggggcgatggcggcggctgatgtggagtaccgttgcttcgtcggcgggcttgcctgggccaccagcaacgagtcgctggagaatgccttcgcctcctacggcgagatcctcgactccaaggtcatcaccgaccgggagacggggaggtctcgcggcttcggcttcgttaccttctcctccgagaactccatgctcgacgctatcgagaacatgaacggcaaggagctcgacggccgtaacatcaccgttaaccaggcccagtcccgtggcggtggcggtggcggcggtggctacggcggcggtcgcggcggcggcggctatggtggcgggcgccgtgacggcggttatggcggcggtggcg

SEQ ID NO: 334013 - DNA, 345 bp, Zea mays
attcccggttcgacccacgtctgcgggtatctatgctcagtaacaatgtctcagtttatgtactatatagacacgctaacattagtggaatattgagcattttactgccttaactatcactgtatttccacttaatcacctcacaaaatactcttttttcatgactcatacataatttctgcttattaaacttaaaataatacggcctgccgctcatgcacatccaaacttacttacgcgtgcatgcgatgacataccttacctatatcgttacctaaattcaaatcactgaccgtagatttacaacgttctgactggtaaaactcttgattcacccaacttaat

SEQ ID NO: 334014 - DNA, 123 bp, Zea mays
gaaatgctaagcaacgaactcgtattatcgattgtggatctctagctttgatatcacgttagagtggacgcactgataaccagtttaacataaaagtttaagcaatccacttatacttttctt

SEQ ID NO: 334015 - DNA, 339 bp, Zea mays
taaatgctaatctacaaacttgtattatctattgtgcatctctagcttgggtatcacttgagaatgttcgcacttatgaccacactaacattcaactttaagcactccacttatacttttcttataaacattaacacttactatctacttaatacactttcgctctaaaggatccatgcttacctacacgttcacacaccttcacatccattctatgctgtcacttaactatattgcactatcaattcttttacaacaccgtgactttaaaaacctttgcctaaccacaactctatccgttcccaactcattctactttctgcagattcccatatatct

SEQ ID NO: 334016 - DNA, 221 bp, Zea mays
cggacgcgtgggaaaaaataaaaaaaaaaaaaaaaaaaaaaaaaaaaaaaaaaaaaaaagggaaaaataaaaaaaaaaaagaaaaaaaaaaaaaaaaatggaaaaaagtttttatggtttaaaggttccatacttttgtttgcttggttttaatttttttattttgttacttagtttaatttaattaggtcatatgtttataattttataaactggtaaat

SEQ ID NO: 334017 - DNA, 240 bp, Zea mays
cccacgcgtccggccactcgttcgggcaacttcaactgaatttacacatactttacaaggggatctacacaattgtgacatgatgtgtttctacaggcaatcgttgtttactcattcctcaataattctaccctcaaggtaccttgatgatttttacaattctgctttttcggaccgtaaattcaagctattcttcataggccatgctcatttacactgatacttccaaagatattcatt

SEQ ID NO: 334018 - DNA, 412 bp, Zea mays
agccgccatcgcgccgccgaccgccgtcgacagcctcgacgacctgctcatcgacatagggctagacgacatcgcgagcttcttcgcgtgacccgcgcgttgtagctgaccaagggtagggaatcaaatcaaagcagccgatgtggcgtagtatgtgaccgagccctctggctctgcttcctgaaactggaacagaacagaggagggaagagcaccagagctctgcttcctggggtccatgcagatgcaggatgcaggcgtaaaaacctaggagatgaacaagagtagagactgcattttttacccctctttttttgtgaatcttattgctcttccagaggactgagggtattgtgtttgcattgtattattgattattaatgtcaatgggaaaaataagatccttcgtgcc

SEQ ID NO: 334019 - DNA, 234 bp, Zea mays
attcccgtttcgacaccactcgttcgagccatcatcgcgccgtcctgcgccgtctattgtctcgacaacctggtcatccacatcgagctaaccacgatcgtctgcttcgtcacgtgacccgtgcgtaagagctgaccaagggtagccaatcacatgaaagcagcccctatgacgaactatgtgaccaagccctttaactctgctttcagaatctggaacagaacataggacgct

SEQ ID NO: 334020 - DNA, 259 bp, Zea mays
cccacgcgttcgccacctactgccgcctatcggtagaaggatccgacgggggatacccgtcagatagcgatggaccgttcgaactgcgctactgccgggcttagaacccgagacactcataactaccttactagggactagagcccatacagtgatctactaaatcccagtacagtctcgagtgtcaagagaagaatctgaacctagaagagctactggatcctgatggtagagacacacgatgagcactccaagacgg

SEQ ID NO: 334021 - DNA, 309 bp, Zea mays
cggacgcgtgggaaaaaaaaaaaaaaaaaaaaaaaaaaaaaaaaaaaaaaaaaaaaaaaaggaaaaaaaaaaaaaaaaaaaaaaaaaaaaaaaaaaaaaaaaaaaaaaaaaaaaaaaaaaaaaaaaaataatataaaaataaaaaattaataaaaaattatataaaaaattataattatatataataatatataataaattaaaaataatttttttatttattaaaaaattatatttttggaattatattttttaacttttttaattttttttatttttaattttttttatttatttttttattatttt

SEQ ID NO: 334022 - DNA, 253 bp, Zea mays
cccacgcgtccgcccacgcgtacggaatgcttcacatgtactttcttatgagtcatgactgctttgcaggttcattttctatatagataagtgaagttgcattaagtgtgtgttgagtcgattattgtcgtattatcctatgaaacccctttattttcatggtatcgaaaaagctctatcgtgccagataaacataggctccttgcctcaatctgctgtaatcttggtggttcactggacttatggttcctga

SEQ ID NO: 334023 - DNA, 62 bp, Zea mays
aaaaaaaaaaaaaaaaaataaaaaaaaaaaataaaaaaaaaaaaaaaaaaaaaaacatacgg

SEQ ID NO: 334024 - DNA, 60 bp, Zea mays
aaacaaaaaaaaagaattacaaaaaaaaaattataataaaaataaaaaacgagtataagc

SEQ ID NO: 334025 - DNA, 69 bp, Zea mays
caattccctctcgacccacacgtccgattttaactcataaaatgtcttcaacctttttaccaaaaaaca

SEQ ID NO: 334026 - DNA, 304 bp, Zea mays
gaccgacgcgtgcgaaacgctagccgtcatatctcactatccattcgagcacgatgccgagggaaagtgacgagggatgtctcgcagaatggcgtcggccaatgtcgtcgcggtctctcgcaaaaaaaatgtgtagggtcttttgacaatcgattgcatcaatccattagatgacaatatcatgtatgtggacttggtctatatgttcctacaggaccgcatcttggccgcctgcagaggacctgtgcccatttaacactatagaaccatgtgtgaccagaatactaacttaaccgtaacctca

SEQ ID NO: 334027 - DNA, 219 bp, Zea mays
cgcccgagccaagcgttcggtcgatctgctctgcctcatcccggcatgctccgccaccagagtaccagaggcggcatgcggctaatcgctgaaaccgtactgctgcaccatagtcgtgaactaacattaaatggacttacaggcagatatctattgacatggctcaaactcaatcattggcatgagctgatgttgctcactctgatcctaatgaacctt

SEQ ID NO: 334028 - DNA, 199 bp, Zea mays
aaaaaacatacaaaaaaaaaaaaaaaaaaaatcaaaaaatatttaaaaaaaaaaaaacaaaaagaaaaactaggacaaaatcaaaaatcaaacacaaattaaacaacaaacatctaaatacataaaaatataaaaaacctcaccacatttaaatcgaatatattcttaattccattactatctataacataacttattt

SEQ ID NO: 334029 - DNA, 336 bp, Zea mays
gattcacgcgtcgacccacgcgttcggcagcacatcagctcgatatttcgcgctctttaccaaagccaacagccaagcagtcttgtgattaatcagccaaattcacagcgatcacgtcgtccgtcaccagaacctcatgtctgctcttgctcacactgatcctcgtctccgtggtggcgatcttgcccaactccctatgccatgcaaccagggctgtctcagcaatacgtatacattgggaccctaatcatcctgcctgcatacgctcatgctctgcttctgtgtgctcttactctactcttacgctctatactgtcggcgtcccttatgaacctt

SEQ ID NO: 334030 - DNA, 263 bp, Zea mays
gacccagtcctacttcaacgcgcggctccgagctttgcgcactactcgatattcatggctcttgacgtatacgagaactactacctcatcaaataccgcttaccccaggacatctgcttccatctagataatacgtcctctgcacatatctatgtcagattgaataaatgtcagctcaatgtatgacatgatctaggatgacctcgaagactattcgcactttgtcgaagctacttccattcaccctaataaactcaatcaca

SEQ ID NO: 334031 - DNA, 337 bp, Zea mays
aacacgcgtactcccacgcgtcctggcactcgtccggctaattgactagacatgagagtgcggatcaggtatatgatacgagacagagaggcatttacgatgattgagagctgcatggtcatcatggatatgatccagggctgcacgaaacgcgcatttaagatcctatgggctacgtacatgacatcagcatgcacatgtaaccatgagatgtataggataggtcagattaacctaatctatgatcatatatactagaatacctgaacaaatcttaagatcttgctaaacaactgtatcctttacataaaccattacacgatgcacgatcatcaca

SEQ ID NO: 334032 - DNA, 337 bp, Zea mays
accacgcgtacgcccacgcgtccgcccacgcgtccggtgaagtgttcggatcgcggtgacggcatctcgtaaattataggagaaaattctgattgtactacgatccatagctacattattatcctgtataatatgcacatatgcatgggatccgtattttatagctgatgggttctgttgctcacaaccttttgtatatctcaccatcatatatatagatagtgcatattaccctatgatactattatccacgctggaatggattatcaaatcttcattaaatggttatccaatcaatcttttttttaatctatttttttaattattatcattactt

SEQ ID NO: 334033 - DNA, 107 bp, Zea mays
aaaaaaaaaaaaaaaaaaataaaaaaaaaataaaaaaaaaaaaaaaaaaaaaaaaaaaaaagggaaaaaaaaaaaaaaaaaaagaaaaaaaaaaataaaaaaaaaaa

SEQ ID NO: 334034 - DNA, 452 bp, Zea mays
cccacgcgtccggtgctctgtgctcagcctcgacttccaccctctctcccgtcgcctcactgcagccggcgtggaccacgacgtcaagatcttggaggtattgtcggatggctcggacggcaagtgtttgtgaccttggtaactccgttttcattaaccacacacctctagcaaggagtacaacctgaaaccaattggtgatgctggtcctgtaactgaggcgggagggatctttgcctatgcccggaagacatgaatgattgcgttgaaagctgctgcatgagggaaaggtaaaataattgtatttcatgttaagttcctatgcatatcaagctataaaattgagccttgtcgatacatattgttgtgtgcttagattagtcttcatataattgttgttcagggataaaatgggttcatattagtcacttgtgtttgatagtttcatgtat

SEQ ID NO: 334035 - DNA, 335 bp, Zea mays
cccacgcgtccgacttgaccggcggaagttctgcctaaatttgttgtcgaacggatgaacgagtatattgtcggtgctatgccagcaacagagcttattttgtcccgaaaaaaaaaaacagaaagagaaagagaccattgaaaactacgaaatcattaaccacacacctataagcaaggagtacaagatgaaaccaattggtgatactggtcctgtaacttgagcaaaagggataaaaagactatgccccatttacatgaatccaatgttttgaaagctgctttatgaaggaaaggtaaaataatgggaccccaagataaattactatgcatatc

SEQ ID NO: 334036 - DNA, 274 bp, Zea mays
cccacgcttgacgcacacgcgtgcgaattgaccggtggaagttctgactaaatttgctgtcaaacggatgaactatatattgacgttattataccaacagcacaccttattttgtcccgaaaaaaaaaaattactagactaatgtgtaactaactgtaagcaacagagtatccaaataacgtgtatcgatttattcgtgaacaatgctatcaagactgaaaccgaatttaaaaattaaaacttagataaataaaaagtgtgcaccttttataag

SEQ ID NO: 334037 - DNA, 344 bp, Zea mays
gcataccgcatattttaagcatcccatgaatgctcaaaaacttcgtatgctgcaattgatggatcttacattccgggttggcaaggtatgctcatccgtatttgaagattgacgttgtttataacctgatactattatttgataagatacatatagtcttgtcagttggctttacctttcgaaacattttgattgttattgtatttaataataacatattttcgtctttcctgtaaatacctgttaaagttaacccttatttctgttacagttttaaaataaattatttatcttattataattattattttatttctttcttatattattttttatttttttta

SEQ ID NO: 334038 - DNA, 242 bp, Zea mays
gggtcgacccacgccttccgtcgtggtcttagcaatttcggttggcaatatttcctcggcttttcctttggctgctacgaggcttccaaatcattctgggaagccctctccacttccaaaaccaacttctccattctctgcatagagactaaaagatttctcttgtggtattcaaagtaataaatcaaaccatttccaaagatcttaaagccctaacttgtgaaattttcttaccgaccgtt

SEQ ID NO: 334039 - DNA, 147 bp, Zea mays
ctcagacgcgcgatgagcacagacgacggttacgaatttcagccactacatgaccgcaggaacaggtacgggttcaaacaggggacctagacactcagaagacgaggagccagtacgactggctcaactggcgaacagaacaccctg

SEQ ID NO: 334040 - DNA, 233 bp, Zea mays
ttgaatctctggaacttgcgattagtgacttgagacctaaagaattttaaaggttcagttgccatttctgcggggcgaaagatgtggtacagatgccaaaaacatcaccgggctggaagtgaaaaaaatcatggagcagtggcatggccgaagagtggcacacgcacaaactactgaggagagggaaagccattggaggagacagcagcccttctggaatatcttgctaacaa

SEQ ID NO: 334041 - DNA, 224 bp, Zea mays
accacgcgaccgccacgcgtccgggaacagccatcacagatgagcagaacacaacagcgacagggccgacggccgaataagcggggagcagcgcgacggcaccaaacccgacacagaagacgaaggaccccagaacagcaacccacaggaccagagaagaccaaagcacaacaggcacacacggcgcaagggcaaacaggaaccgcaacaagaaaaggaggaag

SEQ ID NO: 334042 - DNA, 427 bp, Zea mays
gtaccggcctgaatactcggccagacctacgcgtccgtccacgcgtccgctgacatttacagatctttatttatttatagtgtcccttcatacacagtaatgctcatacttattatcgggtattccaatccctcctctacatagatacaacaaatctaatttgttccttcctaatatcgtatattggcatgttcactcattgtttgggagcatcacaattcacaaactcctttgcacatgttgcaacttttactggatcaggtatgatatcccagaaaaaaatgtaccttgctttgttatattacttgctaatgcacccaactattctaccttttgcatatatatattacttgcactgcgtataaaatacttggttagaaagatataatattccttatcggttatatttacaagatggtttaatgcg

SEQ ID NO: 334043 - DNA, 145 bp, Zea mays
cggacgcgtgggcggattcgtgggcggactcgtgggtttacctgataaaacaaacactagccgactagttcattcaggctggctgagctaagacaggatgaataacggctggttgagctcatgcatgacatttatttgggttgat

SEQ ID NO: 334044 - DNA, 429 bp, Zea mays
cccacgcgtccgctcgcattgtccttgcattcgagagtttatccccctcccaaccaaaggccgatggcgcccaaggccgagaagaagcccgcggcgaagaagccggtggaggaggagcccgcggccgagaagacgaccgccgggaagaagcccaaggcggagaagcgggtccccgctggcaagtccgccggcaaggagggcggcgagggcaagcgtggcacgaagaagggcaagaagagcgtggagacgtacaagatctacatcttcaaggtgctgaagcaggtgcacccggacatcggcatctgctccaaggccatgtccatcatgaactccttcatctacgacatcttcgagaagctggccggcgaggccgccaagctcgcgcgctacaacaagaagcccaccatcacctcccgggagatccagacc

SEQ ID NO: 334045 - DNA, 253 bp, Zea mays
cggacgcgtgtgcggacgcgagttgaaaaaataaaaaaaaaaaaaaaaaaaaagaaaaaatgtaaaaaaaaaaaaagaaaaagagaaaaaaaaaaaaaaaaaaaaaaaaaaaaaaaaaaaaaaaaaaaaaaaaaaaaaaaaaaaaaaaaaataaaaaaaaaaaaaaaaaaaaaaaaacaaataaaaaaaaaaaaaaaaataaaacacaacaaaaagcaaaaaaaattaaacaaaataaaaaaaaaaaaaacaa

SEQ ID NO: 334046 - DNA, 254 bp, Zea mays
aagcagctctttgtgcttttgaagaagctcgctgcctccggctagtttacgagggtgaagagctcctggaagctgctggccaccgactccaagcccaaggccgccaagcccaaggcacccaaggccgcgcccaagcccaagctctcagcgaaggcgaaggccaagaccgctgctaatcccaaggcggtgttacccaaacccaaggccaatgccaatgtcaagcctgtcgcttctgccgacttgtttcccaagcc

SEQ ID NO: 334047 - DNA, 88 bp, Zea mays
ccgaaccggaccacccggccccgacccacgcgaccgcccacgcgaccgcccacgcggccgcccactcaaccgcccacgcgcccgaaaa

SEQ ID NO: 334048 - DNA, 110 bp, Zea mays
accacgcgttcgatcgatcagttttacagtttcaagagaaagagaaaacatgaggaatgttttccacttctcagaggactagaaatattgaagaaagaaaaaaggattta

SEQ ID NO: 334049 - DNA, 142 bp, Zea mays
acccacgcgaccgcggacgcgttggaggcaccgatctagaccatacagcgacagaggagagacgggcagatgggaaactaccagagggcacgggagatacaacaacagaaaagaccgaagccgaccagaaaggggaccgcac

SEQ ID NO: 334050 - DNA, 77 bp, Zea mays
cgggccgacccacgcgttcgtccacgcgttcgtgagcatctatttgcacctatccaagtgaaaggtgatgtggcatt

SEQ ID NO: 334051 - DNA, 245 bp, Zea mays
acccacgcgtccggccaagacgtgcaggaacggagtcagcgattgcgaggcgcgagagccagcaccgcgacaggacgacctcccagggcgccacggagagcatggacccaggcgagccacgccgcggggaacaagccgagggcgtccgacgggagcagaaggcgacatcgcgcaacaagcagggcgaggagcaaagcgagagcacaaacgagcgcaagcccaagagccacgcgaggccgggccca

SEQ ID NO: 334052 - DNA, 65 bp, Zea mays
acccacgcgaccggccaagacgagcagaaacggaggcagcgaggcaaggccggagagccagcacc

SEQ ID NO: 334053 - DNA, 272 bp, Zea mays
acccacgcgaccagccaagacgagcagcaacagactcagcgaggcaaggccggagacacagcaccgagacagggcaaccatgccaggggggccacggacagcaagaacccaagccagccacgccacggagaacacgccgaaggcgaacgaccagagaacagaaggcgacaacgggacaacaagcaagcacagggagcaaggcgagagcagaaacgagcgcaagcccaagagccaaccaacaacagggcccaaaacaccaggccaaacaaaaa

SEQ ID NO: 334054 - DNA, 464 bp, Zea mays
  unsure (1)..(464): unsure at all n locations
ccgacatctactccattccgagggttcttgccccgatgccgtagaagtacgcgaggtgcacgaagaaaaactttggccgttaccacgtgagcgagccaccagttgagcatttgcgcgatccactgtacaagacagagagggagatcatgaaggttttcttgaccaagcactacagaaacaggcgcgctgatgacccagatttttttcttgattttgaggagatctatgttattgactcgagaacaaggtcaatcacaagagctaaagttatggttagtgttcctgaaggaaagaaaagagaccggcggaacgacctgctactgatccgtgacgggggtgagtctttcagaatcatcgacaagactaaaagggacgacgcaagcactatcatacanagagaggagtgggccaagtcgagacaagacgtggagaagcatttcaggaagctcagagactttgactac

SEQ ID NO: 334055 - DNA, 65 bp, Zea mays
aaaaaaaaaaaaaagagggctaaatcaaaataaacaaaaaaaataaaaaaaagggaaaaataggg

SEQ ID NO: 334056 - DNA, 86 bp, Zea mays
cccacgcgtccgcggacgcgtggtaaaaaactaaaaaatcaaaaaaaaaaaaaaaaaaaaaagaaaaaagggaaaaacaaaacgag

SEQ ID NO: 334057 - DNA, 168 bp, Zea mays
aacttgcccaaaattttgagtcgaattttaatcactctcaggtcagactgaattttccaaattcgtattcgtgcgagtgatgaatttttaaataattaccggatacaccgattttcggaacaacgatgttccgaacatcacgaaaatttaggaagagtccggatagat

SEQ ID NO: 334058 - DNA, 458 bp, Zea mays
tgtgaagacatgggctggcaagaccatcaccttggaggtggagagctctgacaccattgacgatgtgaaggccaagatccaggacaaggagggcattcccccagaccagcagcgtctgatctttgcgggcaagcagctggaggatggccgcactctcgcggactacaacatccagaaggagagcacccttcaccttgttctccgcctcagaggtggtatgcagatctttgtaaagaccctgactggaaaaaccataaccctggaggttgagagctcggacaccatcgacaatgtgaaggcgaagatccaggacaaggagggcatccccccggaccagcagcgtctgatcttcgccggcaaacagctggaggatggccgcaccctagcagactacaacatccaaaaggagagcaccctccaccttgtgctccgtctccgtggtggtcagtaagtcatgg

SEQ ID NO: 334059 - DNA, 360 bp, Zea mays
aacgacccactcgtccgagaccaaacatattcattcaataatctcagaagacacatttttaacgggatcaaacggattggatcgaaggcgctcctatcctgtggccaggtctcggtgctaatcgcgtgtatgttcagtggtgggattttgcgatctgacacggtttctgatcttggcgattacatgctcccacttgccgattcaaaccataaatgatctgctgatgcgacctccgccgccagtgactctccacctgatgtctgcagaccgaccaggcaatcgagcctactttcaagccggtgccggcatcatgtaagctgactgcgcgctcaccctggaatcacaaggaccaggcttcgg

SEQ ID NO: 334060 - DNA, 439 bp, Zea mays
  unsure (1)..(439): unsure at all n locations
aaatctttaagatgcctaaatagttcaaaagaagatatatagctttgtagcattatagctacggtaatgtacttgaactgtataacgtggagatattgtatgtgaccatgtcatgtttggtaccaaatatagccacaatgaaatgtctttttaaaatggttgttttattttgatgcttatattattgaatcaagaagggtagacctcgtgcagtggtgagagctgtctcactgagtcaccatgtcgcgggctcgaagcagcctctccacatctgcaagggaaggcttgcctcggtttatcctttttccagaacctactcatgtggggagcctctgggtctgtcctttcttttatattattgaatcagaatcttgntatgtttgacaaatattcttcttgttcagatgatgtgggctgctgattttgatgaagaagcagt

SEQ ID NO: 334061 - DNA, 407 bp, Zea mays
accacgcgtccgcaattggccgcactgaaccccgctgcttatttgcagcagcaaatactacgaccatttagccagctagctgcagcaagccgtgcttccttcttgacacagcaacagttgctgcctttctaccagcagtttgcggctaaccccgcaaccctcttacaactacaacaattgttgccctttgtccaacttgctttgacaaacccagcagcctcctaccaacaacacatcattggtggtgccctcttttagattgcttattagttgtaattcaataataaagttttttggatgatgtatgtggccaaccagaaataagaagttacatttccagattctaatgtgaaaaaaaaaaaaaaaaaataaaaaaatataataaaattaaataatttaatttaatt

SEQ ID NO: 334062 - DNA, 346 bp, Zea mays
aacaaacaaacacacagaagcgaaaagaactattcatgaattaacctaggcaaaataacccaagggtgataagtgaaaactgaatcagtatgtctggcaaccaagaagaccacacactgaagctggtaagacagcaagtgcttgcaaaccagtgagcacccttaagatcctcatcaatggaatgctcaccgctgaagacacgatgcttgcataggggaacctaaactgcagacatcatcgagtgcattcacaaagcgctgcatctgaactacgtgccgtcgaccatcatagccctataagacgtcatgaacgtatccccatgccagctatccgtgtaaggcccctg

SEQ ID NO: 334063 - DNA, 192 bp, Zea mays
cacactttccatagcatactcaagtcgatatactgaatggtcttccaacactactatcaaccatatttatacatcattagaggattcatgcacctgcccctcaaccgtgattccagacactcaccccaaaacatcaaagagtacaaccaccaagctcttgctcacatctccatccacttcaaacatcatggc

SEQ ID NO: 334064 - DNA, 156 bp, Zea mays
agtctttgctatacctgatgtccaactgctaattcaagctttagatgccaggattatggcacggcgtgcaggtcttcattctacatggatctgtgaactgcgaccctcatcatcatcgcgcgtactaacataaagtgctatcttatctggtggaga

SEQ ID NO: 334065 - DNA, 244 bp, Zea mays
ctttcttattccaaattttatccattatcatctacttactacttatcagtgaatatgtgcaatattcatatggtcattgtatttcacatttctttcaatatccaatatcagatgataagtcttccttttacactaaaatcaaccatctttatacactagtgacctttcttgtttccttctccttaattgctactacctaacttaattatataataatattactaataaaacatataataataac

SEQ ID NO: 334066 - DNA, 209 bp, Zea mays
aattaccgggccgttcacacgtgccgccagttcgaagaacgcatactctacaagtttttcaaacagttcgctatcctaagggccaagtgccttttgacttggaacacggcgcatgctgctcttgtcctatccattgagaaaccaataacccatgcactaagcatcttgctatcactatatattttcccattattatcacactgtaatat

SEQ ID NO: 334067 - DNA, 382 bp, Zea mays
cccacgcgtccgcaaacaggtggagatgaaggacacattctacgatttccatctgaacacgagagccgtcaggtcaacgatagtgcatttccaggtcaacaacaagcagtggcaggacgtttgggtgtgcgctatctgcagttagtcttgagtgatactagctgcaatttaatcagatcgatcaggtggatgggcatcctcagcagccgggaggagtgactccagcagggggttggaaagcttgcaatatggtatggcaggacgtttcgagatggacgaatctgttgaaacgggtcaccttgagttcctcattttttttgcaagttcatttgctgcatgttcatttgtggcacgccttttcgtgttaatgggaaattggctc

SEQ ID NO: 334068 - DNA, 463 bp, Zea mays
gaccaactagcagcatagaaagcacaatagtgtaccaacaatggcagccaaaatattttgcttccttatgctccttggtctttctgcaagtgctgctaccgcaaccattttcccacaatgctcacaagctcctatagcttcctttcttcccccatacctctcaccagcggtgtcttcagtatgtgaaaacccaattcttcaaccctacaggatccaacaggcaatcgcagcaggcatcttacctttatcacccttgttcctccaacaaccgtcagccctattacagcagttacctttggtgcatttgttggcacaaaacatcaaggcacaacaactacaacaacttgtgctaggaaaccttgctgcctactctcagcaacagcagtttcttccattcaaccaactggctgcattgaactctgctgcttatttgcaacaacaactaccattcagtcagctagct

SEQ ID NO: 334069 - DNA, 438 bp, Zea mays
cccacacttgccagacggcgtcgaatctgagaggcaaccaatggacacatgctgcacttcgggacagctaacaactacactagatcacttagacgagcacaagtcccaactgctggaacagcttcatagcctagattgctgacctgaatctgctgcaaacggatttgcatgcaagcacaccctctcattggaaccaccccaagtaggaagatgaccgacctatggcatgatagggaactctcatgcatgagtgaattcatgccatgctgtcaatctcagactactgcatatgctagtgcatatgactcgtgctgttcgatacggtatgagctatcatgccgtacgaagactgctccttaaacgtgatgtggacaatagtcttttctgtataccacgttgtcatggaaagatgccttttagacaagtttttccagtgtt

SEQ ID NO: 334070 - DNA, 345 bp, Zea mays
cccacgcgtccgcttcggtggtaacgtatatgtacgttatttcggtccctccctcaggcaggatcggggccgcgattgactagtaggcaggcgtcagtttattcttgttccgatctgaccctgcgcaaatgtcaaagggcaggcagagacattgttgctgcgtgggggccaggcggtcaggccaatcgacgcggcggtgagtggtaaaagcgtgaggcgcttttggacacgacaacgacgcgcgcgccagacgcgcgagagcattgttgctgtcttgctcttgccgccgtgcgcgtgccgtcgatgccggggccgggacctggagaccgcatgctttatttgtgc

SEQ ID NO: 334071 - DNA, 449 bp, Zea mays
caactagcaacatagaaagcacaatagtgttccaacaatggcttccaaaatattttgcttccttatgctccttggtctttctgcaagtgttgctaccgcaaccattttcccacaatgctcacaagctcctatagcttcccttcttcccccatacctctcaccagcggtgtcttcaatgtgtgaaaacccaattgttcaaccctacaggatccaacaggcaatcgcaacaggcatcttaccattatcacccttgttccttcaacaaccgtcagccctattacagcagttacctttggtccatttggtggcacaaaacatcagggcacaacaactacaacaacttgtgctagcaaaccttgctgcatactctcagcaacatcagtttcttccattcaaccaactggctgcattgaactcttgtgcttatttgcaacaacaaataccattca

SEQ ID NO: 334072 - DNA, 66 bp, Zea mays
cccacgcgtccgaaaaaaaaaaaaaaaaaatttaaaaaaaaaatttaaaaaaaaaaaaaaaaggag

SEQ ID NO: 334073 - DNA, 147 bp, Zea mays
aaaaaaaataaaaaaaaattaaactaataatttatataatacataaaaaaaaaaaggctaaatgtacaaataaactctaaaaaagggataaaaagtaaaagaataacaaaatacaattataaaacgtttactatttaaaaaaacaat

SEQ ID NO: 334074 - DNA, 239 bp, Zea mays
atattcttttggcaatttgtattgcttttaaaaaaaatctacttctttcactaaaaacttcggtatccatgtgatatccgatgtattctacataactccaaaattgctaccgggcaatactcacccttacctattcttttaactgatatgtccaccttttcaggttattttggctattcattttaatgattgtatgtatgtgcctatgtatgataaaaaaaataatgtcgtttttttaa

SEQ ID NO: 334075 - DNA, 290 bp, Zea mays
gacccactcttcctctcacgcttctgctcatgtttgtccacgatttttacatctccagttacacggatattattagcgtgctttaagacataccatgggcctcatatatccttcattccttccttcgttaaccaaatgatcatttacaaacatcttctatcatttctactcatccatttatatcactattttaattaatacacctcttacaaaacacaacacaaccccaacttatttatccatgttcacgcttacatgcttacatccaaattttataccattccccattt

SEQ ID NO: 334076 - DNA, 435 bp, Zea mays
  unsure (1)..(435): unsure at all n locations
agacaatcacccttgaggtggagtcttcggataccattgacaatgtcaaggccaagatccaggacaaggagggcatcccaccggaccagcagcgcctcatcttcgccggcaagcagctggaggatggccgcaccctggcggattacaacatccagaaggagagcactctccacctggtgctccgcctcaggggtggcatgcagatttttgtgaagacattgactggcaagactatcaccttggaggtggagagctctgacaccattgacaatgtgaaggccaagatccaggacaaggagggcattcccccagaccagcagcgtctgatctttgcgggcaagcagctggaggatggccgcactctcgcggactacaacatccagaaggagagcacccttcaccttgttctccgnctcaggggtggtatgcagatct

SEQ ID NO: 334077 - DNA, 404 bp, Zea mays
cggacgcgtgggatttatctggtcgaatgccaaattttctaagtggtctaaatcttagtaaactagacctaccgtacaataataatttccaaggagaaagatcaagaactggtctatttgataatcctacagtcatatcgctagatggaatctgggattgtgtggaggagccatggttttgcatatgcctccttgccatgttgcttcaagaatagtagggagtgcaacattattgatcaaaaatattgatcccaatatttgggttcatgtctctcgtattgcaggtgtagttttactcctagaaaagaggacatcaagaagagcatatagatcagagcaatcttattatgagcattttgagacagttacctataactgacttagctcaagcacacatgacttct

SEQ ID NO: 334078 - DNA, 330 bp, Zea mays
aaaaaaaataaataaaaaaaaaaaaaaaatattaaaaaaaaaacaaaataaacatacgggaatgggcttgtactgtataacagctgtacatactcaatcataccactgtcaaaaatggtccctagtttaacccaatctgaattgactttccaaaattgtccaacgatttggctgctaaaaccatggcatcaccaaacttattccccttgcagtacatacagctttctcaataaatcatcatatcgaccagtcttaacccgatcgccatatctaccagttacacacttctgtatggttattgttacttccccatcctactgctctttaaaa

SEQ ID NO: 334079 - DNA, 73 bp, Zea mays
aaaaaaaaaaaaaaaaaaaaaaaaaaaaaaattaaaaaaaaaaaaaaaaagggggaaaaaaaagggaaaaaaa

SEQ ID NO: 334080 - DNA, 345 bp, Zea mays
ggaattaccggatcgtccgacgcgtacggacgggtgcaatatgacgacagatggtgaagataaatataatgattctgatggggattatgggtgataatcttagatgaaggcgagagattatcacctgacaaatgcgattatgattcatgtgatcaggatacataccactgatgatgacacaggatgaaacatgaactcctaaaaagccacatgctggcttgaagagaggtgctgaaaatgctctaaaaacgcctctttatgataagaaagcaaacgttgacacaccgacaacctagaaaacacttggcaagataggttccacccatgtggcatctacacactcag

SEQ ID NO: 334081 - DNA, 255 bp, Zea mays
gccaatttggagaacgcatactcgacaagttattcaaagagtacgctcgccgtgttgccaagcaccttgagactgagaaaaccaagcatgctgttcttgtcctatccatcgagaaagcaataattcatgtgtgaagtgtcttgtttctcactatatatctttccattattatcacatggtaatatatgtttgttttgaaaaaaaaaaaatgctatataagaaaaaataaaaaagacaatagaaataaccgatcat

SEQ ID NO: 334082 - DNA, 286 bp, Zea mays
aggcctcctgcggctgctctaagaggggcacaggcactcacacgctacacatgagcatcggggacatgggcatgacatgcatggccactgcgacgagcaccagcattcagacaccgttgctgagaatgcttgcgaccatgagtgccacgctgagctcaacagtgtgcactctgcgtaaacacaccactgccatgaccacgaccatgatcacggacagcatgatcttgcagagatcgaggaacccgtcaaagactgccactaccacgaacagcactgcttgcatgag

SEQ ID NO: 334083 - DNA, 401 bp, Zea mays
cccacgcgtccggcgtgtcatagaaggagcaaatcataactacacctcacatcgcaaagaaggtgctgatgcagtagtagatttcatcacgtccaatgtaaccgtataataaggctgggggatgaatgtcattccagaccacttggtcatgcacctatcgatcccctccatcatggggcaatactggtactaggtgtctattatcttctgaaccgaaaaccccatgtcatgcaggtttgatatgatgatgttgctcgtatgtgctcttaagaattactgtaaatattgaactcctggtagacttgtatgccgcagctcgcagtttatataggctcatatctctatagtttttttctttcttctttgttcgagggctctattcccttgctcttttttgcatg

SEQ ID NO: 334084 - DNA, 355 bp, Zea mays
tacagctgcaacaagagaccgcacggctttttcataatacgaagacatatgtgacgagctgtgggcacatcaccaagatctctgtggaagtgtacctcaacgcgctaggttatacctactacgtaactctcaccgtgccttaaacctacgggttttactgctagccgcatcatagagccggaatggacagcgagatcaccgtctactaattaggctagctatcgatcgatatccatacatgtattaactgttgctatctgctttgtactccgtcgatctgtacatctctacatgcttccgtctttacacaccatcctctgatccgactacgtatgtatgcatgctactacactga

SEQ ID NO: 334085 - DNA, 234 bp, Zea mays
catttgactcacgactgcgcctccatgcccagcgttgtaccggcgagctcctggcctgcttcatgactgggactcgccagctgtcgacacgaatggtcctgagaccattccgcattacactgcttgtggagcaactatctgacatacctgcggatatgcagcttgtgccgcacctaatcgggtgactctaaaagccatgcgtcaagctcgtaataaagggcgcgatcttgctcg

SEQ ID NO: 334086 - DNA, 164 bp, Zea mays
gtttctgcaggctggcgtatcccccgttgtgcttttcgaagagccgactcggaagatcaagggagctatttagaacgccatgtacacgcactcactctatgcatgtagccaattttaacgtcaatccccagaggggtagccgtacttcgctaaaaggtgctgtc

SEQ ID NO: 334087 - DNA, 459 bp, Zea mays
ccaagcctcagcccctctccccgctcgtgtctccaagccgcaacggctcagctcctcttcttggacgccgaaaccgggcaccgtcgtagcccctgtctccgctcgtctccgggaccctgcttggccctctccggcgaacctctgtgcccctgctccgccgccagttcgacgccgcctgctccagatcgacgttgtcgtcctccgtcctttgtccgcctgctccagatcgacgactcctgctccagatcaaatccggcctccgtcctctgtgcccctgccctgccgctcccagatcgacgccctaccgctccaggtcgagctgctgctccagatcgacgcccaactgctccagatcgagctgcttgtcccagatcgacgctaaggggcaaaagaaggattgcctgccaatgatagtgatgatgtggaggaggtgtctccaagtgttgaggacaagcaagc

SEQ ID NO: 334088 - DNA, 391 bp, Zea mays
tgcacgtactcttcctgaattacccggtcgacccactcttcctaaaacaaagcctaattaacttatactaaaaaatcctcaaaatcaaactaaacaggaaacaaactgcaaaaacaaaaaacctaacatatacaaaagtccaccccttctaacaaatctaatctaactatccccttccttccaacttaattactcttttttattctcccctaactacaatcaaacgcccttcctttaaaaccttctcaatcggaaaaaccccgtcttctccaaatttatctacttttcatacaatatccatttctctatctacattatcatcaaatactcccttcccaatctcctttcctaatactactcctaccttatctcctattataacccccccttt

SEQ ID NO: 334089 - DNA, 300 bp, Zea mays
gataaacgcagctctgttgagcattcaaataagcatccactagtcaggcaatccctcaattaatgtccaagcaccaaaacttggtagcggcaagttgagtaacacatatctgccatctagcacaagtaatcacgcacttctaggggtctcaagttttatgaaaaagctttgataaacagatagattagacagttctctgtattccaaataactgtttgtatcaagcaatttggtcttgtttttttaggggaagcaatttggtcttgttacccaaaaaaaaaaaaatattattataatttt

SEQ ID NO: 334090 - DNA, 142 bp, Zea mays
cccacgcataccgaaatcaacaacgcccgcggttgtgcatggctaccatatggcgtccattacggctctcttggtcaacttgtgcgccatcctgctgcacccttctgagtgggacactccggacgagatcggcccagagccg

SEQ ID NO: 334091 - DNA, 209 bp, Zea mays
accacgcgtccggcgtacatcgtccctttgcccttactagcaaccgataatccgccggcgttgagatgttggttcatcacggtcttctatgtgacgactagctcctgtccgattcattcaactacaacgagctctagaactgcgtgctgcgggaggtcttgggaaagtggatgacctatggttctgttcatgtgtacattgacgccaat

SEQ ID NO: 334092 - DNA, 153 bp, Zea mays
cgacccactcttactattctctctatctagtcaatcatatatacatatatacacttacgatccattcggctttattagatccatgtgagctatctgcaactacatgcctattctttattatccaataattccttaaattgacctgatcatact

SEQ ID NO: 334093 - DNA, 375 bp, Zea mays
cggtcctgaattcacccgtgtctgggagctgcactaccactactacccggttcataaaactccggttgaacagtaaattgcccattgtcctactgcgtatgctcgaacctcttgctgagaaaaccttgatctaagcctcatgtatccatgatccattaattgtactatcgccacgcttatgaacgaacttggacatgcttgtatcacaacgcatgatcactctgtattcttcctattgatatcttaaatttactcaactggtgattccttttcagatttttttatatatgctctatgtttacgcgactacgccggctttctgcaaacagatctcgttctccgttacttagtaccattttacaaataatagttctt

SEQ ID NO: 334094 - DNA, 118 bp, Zea mays
atccatcatctacaactacttctacatctcaatcggcgacttatatatttcatggatcatatattcaactcttcttattatttttattactatatttttattactttaattctttata

SEQ ID NO: 334095 - DNA, 313 bp, Zea mays
ggaagccctcgcctcggcgcctcgggcgctcttcccgcgcgcgtgcccagtggcgacgccgggcggcccagcgcggcgccgctccgccgctcctcacatctgcagggcctccgcggcggccggggaggagacgacgccgccgccgccgccggcggccgctcccaagaagatcctcaagaagaagcccgtctactcgatgaagaaagggcagattgtgcgcgtggacaaggagaagtacctgaacagcatcaattatctgtcagtgggacacccgcccttctacaaggggctggactacatataccaagaccgc

SEQ ID NO: 334096 - DNA, 276 bp, Zea mays
ccgaattccccgttcgacccacgcttccgttaaaacaaaaatctgataattacactcaatacaaatactaaaaaaaactggggtctaccaatgaaactacgcttataataatgacacataatacttataatgcatacaataatatatctcacactataaaggatccaaccttaactactcttacattcaacttcctaattctgatataagctaacctaattctaattccctgccccatcatttaaaacatcttcactgttaaaacccttcctttac

SEQ ID NO: 334097 - DNA, 88 bp, Zea mays
ccacgcgttcgccacgacgcgtgcccggctctactgaacccgtcggcggacgaacccatggtctgtccgctcccgtggaggttcatca

SEQ ID NO: 334098 - DNA, 230 bp, Zea mays
  unsure (1)..(230): unsure at all n locations
ccggnccggaattccgggtcgacccacgcgtgcgcccacgcgtccgggaagcacgaccagcatatgtcacagagggccagcgtcccacactcctggtgcagagccttcgcgctccattcccatctcctggtctccagtgagatgtgccccagctcctattggcagcaatagctattctccgccttcctttttttcttctcttcttcccttccctccggctggatttcggt

SEQ ID NO: 334099 - DNA, 403 bp, Zea mays
  unsure (1)..(403): unsure at all n locations
ccggnccggaattccccggtcgacccacgcgtgcaagactgcccgcaccgctgctaacttgctagcatacttcctctacacgcacgcacctccaaagacaggcgatcatgatatggctgccgatggtcaacctgtaatcgataaacacaaaccacactccttggataatcctatatatttggctggggatcgtccagctctaatggacaaagataaaccaaattctttggcgcatcctctccaacacagttatgacgaattaccagctcaagtgcattcagctattgcacgaccatgtggcactaattatcatgctactaaaacacgatcgcttccacgttcatcacccaacaagtaatcctggaaaggtaaacctggatctaaaaataatgttgcatttttt

SEQ ID NO: 334100 - DNA, 182 bp, Zea mays
  unsure (1)..(182): unsure at all n locations
ccggnccggaattcccgggtcgacccacgcgtgcgcttatctccaaacaggactggcatggattgtttaagatggatcagatggaaaaggaactaggtgaggggtgcacattcaatggttgggttgaacggcctatcaccttattcaccaacgtataaatacgagtttaactcacaaaaata

SEQ ID NO: 334101 - DNA, 222 bp, Zea mays
cgggtccgcccagtatttcaaactatttttcttattttggttgcttcagttcttggtattgcatgatcagcttcagcagcaaggccacaaccggagatacaaatacggggttataaaacataatgcaaatcaactacatatccaaacctctgttttagttaattatccagccgtccaactgctattggggtttcccctcaacttttagcccatgaatcctta

SEQ ID NO: 334102 - DNA, 460 bp, Zea mays
cgttgttgaatctagccctcttttagaaactataagttttgtatgtttgaaattgcttgaatgatagaatcttgtccgtgtctgcctgaaaaaaaaaaaataaaattttttttttattattaaaaaataaaaaaataaaaaaaataatttttttttttattaaaaaaatatttataattaataattttttttaaaaattttattatatattattattaattaatatttttatttttttttaaatggggcgggcccttttttaaaaataaaatttttttttttttaaataaaaataaaatatttttttttttggtgtaacaaattaaaaattatgggacgtaatttttaaaatgttgaattttaaaaaattttgttttacaaaaataaatattttttaaaaaaatattttttttataaaattttataaataaaaaaaaatgtctaaaaatattttttttta

SEQ ID NO: 334103 - DNA, 358 bp, Zea mays
gttgattatcatctagaatatacaagaataagcgcgagtggatgtccaagtatatatgttattgtacaattcagggaacacccttgctattattacttgtgcttccacccaatatgtgatgtttggacatccactcgcgcttattgttgattatcatctagaatatacaagaataaaaatcttgcaatagaaattcgttaaacatcgtgatagtctcaaaatatggaggaaatgtgaggacttgaaggtagtgatgtcataaggttcacggctcttggtgcgggcggacacaacactttttttttagttagcctagcctttaaatggaatttactaattgggggcggcctaaaacttg

SEQ ID NO: 334104 - DNA, 185 bp, Zea mays
  unsure (1)..(185): unsure at all n locations
acttgaggaacgtcagcgcaagcactactctttcaaggataagtcctattctgaagaatgagaccgggggaaaagctcaagccagctactcctttattgttcaaagagagatgctcatgttatgatacttccacgagaaaccnanactgatgactcctatgtggagcctaaaagttatgatgaga

SEQ ID NO: 334105 - DNA, 123 bp, Zea mays
  unsure (1)..(123): unsure at all n locations
ggaannnccgggncgacccacgcgtgcgcgtacgcacgcaccgggacaccagtaacccccaacagcgccactgtacattgcgcgcgtaaagcttggttagatagccgtcatgggctcactcaa

SEQ ID NO: 334106 - DNA, 416 bp, Zea mays
cggacgcgtgggcatgaccgtagagaagtttaaaaacatcatggctgttgacaagaaggttgctgatggtctgttgagactcatccttctgaaaggaccgctagggtgctgtgtatttacgggggattatgacgggaatgcactcgatgaaaccctacatgcattctgcgacaactgagacatcccagttttggacatcacttctgtatgctagtactaggctatgtatcaatcagagaaaatattgtggtgtacattatcttcactgcctcattggtatattctttgtcagaaataatggtatattgttttaaagggctgtttgaagttgtagaagaaccatgcttataaactggcgtcaggtgttcttttaaaaaaaaaaatatttttttaaaaaaaaaattctttttttttct

SEQ ID NO: 334107 - DNA, 401 bp, Zea mays
caacaatttctaccagcactgagccaactagctgtggtgaaccctgtcgcctacttgcaacagcagttgcttgcatccaacccacttgctctggcaaacatagttgcataccaacaacaacaacaattgcaacagtttctaccagcgctcagtcaactagccatggtgaaccctgccgcctacctacaacagcaacaactgatttcatctagccctctcgctgtggttaatgcacctacatacctgcaacaacagttgctgcaacagattgtaccagctctgactcagctagctgtggcaaaccctgctgcctacttgcaacagctgcttccattcaaccaactgactgtgtcgaactctgctgcgtacctacaacagcgacaacagttacttaatccact

SEQ ID NO: 334108 - DNA, 345 bp, Zea mays
aattaagggtcgacccgcgcgggcaggaaaatacatgtcccaaggacgagaagcagacattaatcaatcattttcatgagaagcttgttaagctgaatgacatgatgaagacacatgcctctaaaaggatagctgataaaaggcatatgttcatggaggaatttgtggctgaattctactaagagtccagtgtcatggcttgaggttgaacaaccacattttgagcctgtttcaaatagtgcacttggcgaaccatttcttaacaacccatgatgatgttggatacctggcctacttttttttcgatgaaaccatgttaataaacaatcgtttgtgcaatctatt

SEQ ID NO: 334109 - DNA, 286 bp, Zea mays
cccacgcgttcgtaaaaaaaaaataataaaaaataaatttttaaaatttaaaaaaataaatataagggggggactatataaaaaaaaataaataataaaaaataaatttaattggggcggccgttttatagaatccaagcttacttacccgttcattcaacttaataatttttttatagtgtcaccaaaattaaatttactggccttctttttaaaacattcttacttgaaaaaccctttttttaccaaatttaaaagcttttgaaaaaatactttttttaaaaat

SEQ ID NO: 334110 - DNA, 393 bp, Zea mays
  unsure (1)..(393): unsure at all n locations
ctacgctagcctgctcctcaccttcgcggcgtcgcagaccaagacgcaccgcacctgtcgctggacatcatcctctgcctcgtcgtcctctttgtctcctggctcatcaccagcgtccgcgaggagaaccgcgcgtgcatcatgaaagtgctctgctgcagcagccgggacaactgagcaaaacatatttccagcaccagcaccgntcattcctctctcttaacttttgcttgttcataggtgatgcgatacttgcttaattttaactggtttttctcagctagtacccatgaggaagtcacaaagatattttacgtgccagcagtggtatgtactctaatctgccttgctattggctgtgagagaaattaacattgcgtatggtaatcttag

SEQ ID NO: 334111 - DNA, 319 bp, Zea mays
cggacgcgtggggttggcttctcctccccctccggttcgggttcgggttcgtgaggttctccgggggtcgggttcgtgggtgagcggatcgagatggcggcgtcggatgttgagtaccgctgcttcgtcggcggcctcgcctgggccacggacgaccacttcctccacaacgccttcagcacctacggcgaggtccttgagtccaagatcattctcgatcgggagacgcagatgtcccgcggcttctgcttcgtcaccttttccacggaggaggcgatgcggaacgccatcgagggcattaacggcaaggagctggacg

SEQ ID NO: 334112 - DNA, 347 bp, Zea mays
cccacgcgtccgggggcgatgtgaatgttttgagaccaggtcctcaagcagtgatgttgcacggaggggtaaatcggaccttagaagaagcaaagtctatcagcaattcatgcaggcggtagcagcattggcgtctagaaccttatgtcccatggttgaaagctttgagctttttccgcttatccactaagggttctttactctgctgaataaatagctgtcacatgtttaagctgtaacaagcacttgttacacttggtacataatcatggagatacgtgcttatctaatcattatgtgaaaaatgttatattcacggattatgagttttacttttgtctgtgatt

SEQ ID NO: 334113 - DNA, 146 bp, Zea mays
ctgacgcctggtatcatctttattaaactatatatctataatatccatcatgtcttgttaatggcgagtatacttactaggaaggggtgctttctctctcttctattacttcttcatttcatatcctattgctcatcatatatata

SEQ ID NO: 334114 - DNA, 460 bp, Zea mays
cccacgcgtccgatcaatgaaggaggttaatgatgctgctcctaatgcaattgagattccagagatggaaccatcacaaagacctttgggtaagaagaaggcaaaagaggcggcacgtcagggtggcaatgatgcttgcaaagaagcattgaagtttctgtaggcaaaaaagattgaggatgatgcagagaaggagatgaagagagaagaaagacatgcaaagtcatttgctctggacaaagagatgcttgaactataaaaggagaggattgcgctaaagaaggagaaggttgccaacgaggcaaacaataatttcttgaagaggattgcagaagaagatagaataatgaccattgatctcagtgccatgaatgagatgcagcagcaatattacctgagcattcatgctgagattatggctcgtcgcatgaattagatcatagctcactgctagccttgt

SEQ ID NO: 334115 - DNA, 456 bp, Zea mays
cccacgcgtccgagtcgaccaacttttcgacctatttttctagttttctaggttctgataccggagtgacacattgtgtcaaatgtgaaaatcgctgatacattttactcaagatccaaccatagggacactcggtccggccaccatgtcataaaaccttgccacataccctccaaatttgtcaccagaggaggggaccaccgccacaaagttagcaagagcctttaaatattattcttatctctcatgtttggtatctatgtctataccactatataattgactagtttaaactttgcaaaaccaatccaaccaaatcacccccacacccgtaagtttcgctaaatccaccaaacagttgcacctagacttaacatatcatggtttagatcactatataaacccgtcttttttacccacatccaatggacaatattatttgaatcattcatcata

SEQ ID NO: 334116 - DNA, 298 bp, Zea mays
  unsure (1)..(298): unsure at all n locations
cccacgttttcggngacgcntgggccgacccgtgccgactttctaatattctatattaggagggggggctcctatcgcgtagaatggttccactactatgagcatcgtagcggtatacggatggtttgcaagcatgacaataattcgggcacgatatccgagatcttttacaaggtgtttgatagcatcaagcatgatgaagatacgtgcgcggacgaacagaacgacaacacccatatgcacgcgtattaggacaatgtgtgggagctcaacgccacggccagacaagcccgggaca

SEQ ID NO: 334117 - DNA, 402 bp, Zea mays
cccacactttcgagaacacgttatcgctatcctctgatgtcccgagccacttgctaggggacgtgaattataatctagtggactcataccaacattaaattatatatttaaaacactaaccatatatagtaaacacgcttgtacttaataaccttaaacttagagatcatgccatgactgttctcaccaaaaaaattgctttgattatcatttacatcacttgtataatctatgctgtgacacataatgagcagtactgacagggagcattctatttacaattattagacttttccactaaaatttctatttaacaatatataatatattattacaatctatttgattattgaccacttatagattagtcctttcttgtgtattgacctttccatatctacc

SEQ ID NO: 334118 - DNA, 292 bp, Zea mays
aaaaaaaaccaaaaaaaaacaaaagagaggaaaaaaaaaaacccgcaagaaaaaaaaaaaggggggaaaaaaaaaaaaaaaaacaaaaagaaaaaaaaaaagaaaaaaaaaaaagaggaaaagagaaaaaaaacaaaaaaaaggaaaaaaaaaaaaaaaagaaagaaaaaaagaaaaaaaaaaaaaaaaaaaaaagaaaaaacaaaaaaaaaaaaagaaagaaagaaaggaggaaaaaaaagagaaagaaaaaaagaaagaaaaaacgaaaaaaagagaaaagagagaggag

SEQ ID NO: 334119 - DNA, 72 bp, Zea mays
  unsure (1)..(72): unsure at all n locations
cccacgcgtncgaaaaaaaaaaaaaaaaaaaaaaaaaaaaaaaaaaaaaaaaaaaaaaggcggggttaatat

SEQ ID NO: 334120 - DNA, 364 bp, Zea mays
  unsure (1)..(364): unsure at all n locations
cggaattnccgggtcgacgccacgcgtgcgaaacaagaacctgataatcaacttcattctcgtcccgtaggaggaatttgaaaacccaaacgtgcaggtgtgatacttcagctggagctgcaatggcaacgcccgatttgtccccggtctcgccggtgcggcgggactacaagcagtgcgcgccatcctcctcgtcgtgcacaattctgagagtgcatgactcgtccgcggccgatgctgtacgagcattacctgctgctgccggaactgtctagcttttgggaggccggttgctttctggagtgtgctgtctatggcctgtttaaaccttctcttcatgctcttgatgtctcctttcgcctgg

SEQ ID NO: 334121 - DNA, 291 bp, Zea mays
  unsure (1)..(291): unsure at all n locations
accggaaaaaaattcccgggtcgacccacacattcgggtacgcttttttatcccaaaaacatcaaataacttcactcttatcaaataaactacatcgcggcgttctattaatactgcatccatcctccttnacaaatacataaacacctctttaattctcttccttaaaaaaccttcccctgataataataaacttttaacccacttctctatcttcatctctccaactcgactttctattctactaacacttatatccaatattcctcataacataagaaactattttta

SEQ ID NO: 334122 - DNA, 415 bp, Zea mays
  unsure (1)..(415): unsure at all n locations
acagtgaacatggtgacaatgcatgggaaggattatccgtcttcgtgtacctctcgccacccataatacaatatacaaattacccttaaggccttaactatatataaattacctcacacaacagatacaaagcatatacttatatgcaaagaaacacacacattgataataacagaactagttaactgccgaggctgaaacaaccaacgtcgtggaggaggcagtagtagtagtagcacccaggccgccctgggctactagtacccaggcccgaccttgttgacgagtgcgagcgcgttgctggtgacctgcgcgacctcgacgaccctgccgcggacggcggcgcgcgtggcggcnttcactgcgcgggacgagagcccgtccaggcaggtgttctcgtccgtgagcgcggcgc

SEQ ID NO: 334123 - DNA, 222 bp, Zea mays
  unsure (1)..(222): unsure at all n locations
ggtgggttggcttctcctccccctccggttcgggttcgggttcgtgaggttctcccgggttcgggttcgtgggtgagcggatcgagatggcggcgtcngatgttgagtaccgctgcttcgtcggcggcctcgcctgggccacggacgaccactcccttcacaacgcctttagcacctacggcgaggtcctcgagtccaagatcattctccatcgggagacgc

SEQ ID NO: 334124 - DNA, 115 bp, Zea mays
aaaaaaaaaaaaaaaaaaaaaaaaaaaaaaaaaaaaaataaaaaaaaaaacaaaaaaaaaaaaggaaaaaaaaaaaaaaaaaacaaaaaaaaaaaaaaataaaaaaaaaaaaaaa

SEQ ID NO: 334125 - DNA, 121 bp, Zea mays
ccggaattcccgggtcgacccacgcgttcgcggacgcgtgggcggacgcgtgggctacgactccggctgcagcgaggccgtggagctcatgggtcgagtggtcacgttctttgctgggaac

SEQ ID NO: 334126 - DNA, 70 bp, Zea mays
caactaccggctccggaattcccgggtcgacccacgcactccttccacgcctcctcccacacattcgtcc

SEQ ID NO: 334127 - DNA, 349 bp, Zea mays
gggtcgagcaggcgtccccgtattacgccaagacggctgctgactgctggtgaggtgccatgccgcacgctcggaatcgcggtgccggcattcgtcgtagtatgagctacagacgggcatgtgcagcgcagaaaagatgcttatactgggcatcatcaacgctgaccggacgctgagcacaccgaagcattgacggtagacggtatctgaaccggagctgcttagatcttgttagtacgcgctatacactaggagaagccttcaagatggctacaactaccattaagctgcgtaacttatgatgagaagaaacaaagggcggacgatctagaccatccaaacttacgtg

SEQ ID NO: 334128 - DNA, 54 bp, Zea mays
cgtacgcgttcgaccacgtgttgcatcctcctatgctgccaaaccgcacaattc

SEQ ID NO: 334129 - DNA, 415 bp, Zea mays
accggaactgaattcccgagtcgagccacgcgtgcgctgatcggactgggattgaccgtcgtttatagatcaacacacctttcacggacccacgcgagccttgatgcctgtgatgccatgaatcggctggctgatcatgtccaggatatggagctacttagcccattctaacttgacactgatatagcgacgcgttatgactatgcgactggattcataacgaccagagtagagcttgataaattgcctgttcaatcattgcatgtggtaacgtatcagtgtataatgcatctcatactgcgacaaaacctcagctgacttgaagcaagatgtagaagaacttaggccgggcgatctatataccctagcttaggctccgaacgttcgacggcatagcaatcctatagtgtcacct

SEQ ID NO: 334130 - DNA, 79 bp, Zea mays
ctgatgcctaacgcgtcgcatcttctgacagcgcaacagagcctagacgaactcgtggaatctggatggccaccactct

SEQ ID NO: 334131 - DNA, 182 bp, Zea mays
cattaacaaaagatatgcaggttcaagaatgtagtgatgctttatttcacattttcttcattccctcatctaagattatatacaaagtcatttacattacggtaacattcttagatgagggaatgaagaaaatgactttgcatataatctttttcaggatagttcttgtgcaaaagaattac

SEQ ID NO: 334132 - DNA, 337 bp, Zea mays
ccgaattcccgggtcggcccacgccgtccgcgaacccgtgggcggactcgtgggcactcgtacccatatcacggcgcctgcagtcgacagcggggggaggcggaggctgagcagttgaagagggctgtccgctagttctacatggacacgcgctacgggccatgcctcggcgtgacccgtacctaagctgtgcatccgtgccgccggtgctcggtctcgcaccgtctacagtgctcttcggcttttgcgccgacgaacagctctgcctatgggagggccgcgtttaggctactggcgggatgcacattcattgctcgcgtttagccgacatgctcca

SEQ ID NO: 334133 - DNA, 186 bp, Zea mays
cgaattggagtttcgactaggcgtaccgtgacgcgtggtcagactcgttggcacgtgattgcacatcacggcgcttgcagccgtcagcggggggaggcgtaggcttagcatctttagagggcggtccgcgagttctacatggacacgcgctacgtgccatgcctcggcgttacccgaccccagctg

SEQ ID NO: 334134 - DNA, 140 bp, Zea mays
cgcctgcggtaccggtccggaattcccgggctgtacaggatccaagctgacgtacgcgttcatgccacgagatagctcttacatggggtcaactccattcaattctatggccgtgggcataacccggctatactggcaaa

SEQ ID NO: 334135 - DNA, 120 bp, Zea mays
cggagcgacccacgcgaccgagcacgcggccgaaaaaaaagaaaacaaaaagaaaaaaaaagaagaacaacaaaaaaaggggggggggcgcaagaggagccaagcgaacaaacgcgagca

SEQ ID NO: 334136 - DNA, 60 bp, Zea mays
aaaaaaaaaaaaaaaaaaaaaaaaaaaaaaaaaaaaaaaaaaaaaaaaaaaaaaaaaaaa

SEQ ID NO: 334137 - DNA, 255 bp, Zea mays
gagcacaagtaatctagagttgccacccagagttcttttgagctgacaaagcgtagatatgggtcctatcaaatgttgcttacaggtcacacaaatgcaaaatatttgtggagacgagtgcccattaacctcatacaaagtatctgtatgacaaaagtcccactactcactggacgcggaaatggcacttgacttcgttaataatctaaaaagattggcagcaattaacaaatagttcttttaggggaaataatt

SEQ ID NO: 334138 - DNA, 208 bp, Zea mays
gggtcgagccatacgagatcgttgccgttcaggacgcctgcgcgttttagctgcgcacgtaccggcagcgcggcgggcgcacgatacccggccggccagcgatagagcgcgtactgatacgggccgcggcgcacacgtgaaccgtgcagcaacggttcgtaatagccggtgacgagcccgtcgagcgtgccgtcggtgttcgcgagct

SEQ ID NO: 334139 - DNA, 52 bp, Zea mays
gcctgcactaccggtccggaattcccgactcagagccacgcgtgcctcaagg

SEQ ID NO: 334140 - DNA, 331 bp, Zea mays
agacgacttgtttcattgattcttgaagagatcgagcttcttttgcaccacaaggtcgaggatgtcttgcaactgcggatcaagctgcggctgcggctcaagctgcaagtgcgggaagaagtaccctgacctggaggagacgagcaccggcgcgcaggccaccgtcgtcctcggcgtggccccggagaagaaggccgcgcccgagttcgtcgaggccgcggcggagtccggcgaggccgtccacgggtgcagctgcggtggcaactgcaagtgcgacccctgcaactggtgatcacatcgatcgacgaccatggatatgataattatctat

SEQ ID NO: 334141 - DNA, 139 bp, Zea mays
gcgttcaccgcctctccacagtggcggatctaggttttttatacaggatgtaccgtaataaattttttatatgcaactgtatatacagttttatagtagatttgataaaaagtttgataaatagatataatgtttagca

SEQ ID NO: 334142 - DNA, 460 bp, Zea mays
ggcgttcagcaaatcagcggcgatctgaaggagaaggatgaatgcatggttgggctggggcctgggcccttaggctatccacatgttactctatatttactctacagactataccactattcctagcttaatcaccaaaattccttactctaaattactcaccaaaatttgtagcctcatatacctctatatatcaactactactacatagtctattttattctatttcattctaactacttttttctctaaaaaaataatttttaataattatttttaattatttattattttattttatttatttattttttatattatttatttgttttttatttatttttttatttttttttatatttatttttatttttttttatttattttttattttttttttttttttttattattatttaagtgttttttattttaatatgtttttttttttttttatttt

SEQ ID NO: 334143 - DNA, 169 bp, Zea mays
ccgggccggaaagcccggggcgacgccacgcgaacgggcaacgagaagacgaaggaaagggcaccaggaagaagcgaccgaaccagcacgacaagggggacgaagaaacacgggagaagccaaagccaagaggaaccacggaccaagacgccaacaggagcaagggaaa

SEQ ID NO: 334144 - DNA, 99 bp, Zea mays
gacactaagcagactaacagatagctgaatgaaaaggctgcattcaagcttcatctgataccggggtattttacctatttatatattacgctatattta

SEQ ID NO: 334145 - DNA, 201 bp, Zea mays
aacctgaattcccgggtcggcccactctttacgacggatcccatattacacacagtaagaatctatctgtatctgtctgttcattgtctctctggtggggataccatacccacgaccttgacgtatacacacagactaaactaattaaggcacctatgctttgcattcatgataccatgatcccttttaatttttctcaat

SEQ ID NO: 334146 - DNA, 58 bp, Zea mays
gtcacgcgtccgaaaaaaaaacacataggtaaaaatatgaattaaaaaaataaaactt

SEQ ID NO: 334147 - DNA, 468 bp, Zea mays
accgaaccggaattccggggtacgacctacgcgtacgcgtacgcgtccgaagcatacgattgacgcatcatgcagcaccctgtgttacttacctacgtgcatcggacattcgactagcccatacatttcagacatgcatgctcactatggacatctaaattgcagatatttatgcacatggtgagctaccattatgctcatgatcaagacatactctgacaccttgatctcatcgtgacataactgggcctactcgctgtgctgcatgagctgcacttgtgccatctttgcgagcaattgctgcttcatagtgatacgcaatttcaactgaatggacgacgcttcacaagatcatgacttggacagcgctgataatactcatataaaacattttggaacgcatccccctgttagcaattgacgtgagatcgatatggatcgtacggatttacgttcccagcagttgca

SEQ ID NO: 334148 - DNA, 298 bp, Zea mays
ccggaccggaattcgcgggtcgaccgcacgcgtccggagctgaggagttccttatatgcagtttatgatgtcacaatagcatacaagcatcggcttggagattttgtggacaaggggtgtggcgttcatccttctgaagtccacatccacgtcagaatgggtgagcttcatcacatccccacaacagaagacaagataacagaatggatgtggaagaggtgtatgcagaaagaccaacttctggcagatatctttatgaatgggcacttttcttgtgaaagaactgaaggagatctgt

SEQ ID NO: 334149 - DNA, 247 bp, Zea mays
acgccctgtgcacggttagcctgacagcagttcaaaggatagtcatcacacctcattacaacaacactgacggacagcgtcagcccataataaaggtttttatgtactgtaacatcaaaactacaaacctaagaccagtcatatatttgacgaagcagtgaagagaacacatggtctataaaaaaaaaaaaaaaaaaaaaaaaaaaaaaaaaaaaaaaaatggcggaaaatattaaaaaaaaacaaa

SEQ ID NO: 334150 - DNA, 98 bp, Zea mays
actagattgtgtgttttgtgttgagttgtttcacgatatacggcctcagaatagaagttcgctttgaaatgaagtaacgctcgctgatttatgagtta

SEQ ID NO: 334151 - DNA, 280 bp, Zea mays
cccacgcgtccgatttgttaagggcttcatgttgagaccatgaataccgactgtcggcgctgctctcatgtacggtggtgtggcctcgagcctgattaactgttattacaataaattgctggacttgttctatccaattgttatgaatcatgtattatggttgcatgggtacaatttcttcatggaatgtgaatcgaaacattccacatcaattggtgtgcgtgaactctggttcgtccttgtacacaatacaagattcatctgattaattacacttaaa

SEQ ID NO: 334152 - DNA, 124 bp, Zea mays
tataaagaggagctcggacaaggcatatcgccatcattcggggaacaattctaagcgcggaacgctccatcgctctaagggaaggaagctatcttttaacattgcgtaattcgcgcactgcatt

SEQ ID NO: 334153 - DNA, 96 bp, Zea mays
  unsure (1)..(96): unsure at all n locations
ntaaaaaaaaaaaaaaaaaaaaattttaaaaaaaaaaaaaaagaaaaaaaaaaaaagggtaaggggaaaaaaaaaaagggggaagggaaataaaaa

SEQ ID NO: 334154 - DNA, 274 bp, Zea mays
  unsure (1)..(274): unsure at all n locations
aaattttaaaggaggttttattgaaaatttatgggctccgtagcgttgtactgataaccaatggcaacacaagtacacaacgttggctaagcgccatgtagcagaatttgcttgtagaagagtacagaccatgcatccatggcgaacgaaggccatgcacgagtacaaacgctacgctggtggatgaagtgtttcgtgtcgaaaaggcgtgctgtttgttgggcactgtactccattaaacagcatgcctatctattangcgtggcgcgcgcgc

SEQ ID NO: 334155 - DNA, 312 bp, Zea mays
tttccgggtcggccgacgcgttcgaccacgcgttcggggagccacgccctttacttcgttttgggctcccgggcgcgacaacacgggggggtgtacaccacatgtgcgggaagcactactgaggggtgatatggaccaaaagaagatgatcgtgcgcgtgatgtggtgccaaccacaaaatgcagttgggggaggacctgtagaatgatggactttacaagggggtgctcgtccaaggagtggcagccaccaaacactatttaagtgtggaaatcaagggaaggccccggtgtatgtataaccattatatat

SEQ ID NO: 334156 - DNA, 338 bp, Zea mays
cctacgcgtgcgtccacgcgtacggactggcttccgtacatatccaagaaccaaacgtgacgtggctagtccatgacttggtggcgtatcacgatccaagcatcccctcaggacggtggctcccgtggtgattgtgtccgccggactaggcatgctgatcgtcgtatcaatagccaacctgtccctgaggaacggtctcgcgggcaccttcactttggacacacgcacactctgtgccacgtgcggctggtccctgcgcgtatagtgcatatgcaacccgtgatccaacggggactacaggtggctgacctgcttctggtccgggatgatgccctgcc

SEQ ID NO: 334157 - DNA, 357 bp, Zea mays
cggacgcgtgggcggacgcgtgggagacgacttgtttcattgattcttgaagagatcgagcgtcttttgcaccacaaggtcgaggatgtcttgcaactgcggatcaagctgcggctgcggctcaagctgcaagtgcggcaagaagtaccctgacctggaggagacgagcaccgccgcgcaggccaccgtcgtcctcggcgtggccccggagaagaaggccgcgcccgagttcgtcgaggccgcggcggagtccggcgaggccgcccacggctgcagctgcggtggcaactgcaagtgcgacccctgcaactgctgatcacatcgatcgacgaccatggatatgattattatctatct

SEQ ID NO: 334158 - DNA, 365 bp, Zea mays
cgtccgcgcgccatggcgatggcgttcgcggctgcctccgcctggagcctcagtcttacagccgggtccctcccgctgccccagggtctgcgcccgaaacctagccaactcctccatggcgcgaccagctcgttcccgcggccacgccgatgcgggtggggcgccgtggtgcgctgcgcgaagcgcacggggaagcagcggtacccgtcggagaagaagcggttgaacaggcgaaaacaagagttgctacgccaggccgccccggaggaggggagcaaggggcgggagtccgggtactggcggctctcgaagctcgctgtttccgcccgcgacgacccaggcaaggacttcaccggcatcttcct

SEQ ID NO: 334159 - DNA, 324 bp, Zea mays
  unsure (1)..(324): unsure at all n locations
acgcctgccgtacctgtccctaattcccgggtggagccacgcgtccttcanagccagtacagcaagctttacagcaagggcatcctcaangggggcctcggcttggggaaaagcgactaggtgaggtcctcccatctacnactactatttgattcatcctgggagtcttcatccatctacactttttctgttctggacanctagtaacaaccgctgcttctagctacattccttactggactgtacttgtgtgatgacatcatatcttcgcgtcgcgcttactgaagaactacacattgcactaactactaacggttctttcgt

SEQ ID NO: 334160 - DNA, 490 bp, Zea mays
  unsure (1)..(490): unsure at all n locations
acgcctgcagtaccggtccctaattcccgggtcgagccacccatccnntcatgtctatcttctggtcgattccctatatacctcattgaacatcctttggggtggtgaacatgaaatcaggatagggctctccaatcattctacataanagccctcaacataatgagttaacattcaacattaattcgtatctgaaaaagacttttctcttntgcctcttcatcaagatgatttaaccatctaacttatcatcattgtanaagtatctataacctcttctcttcaacaaaatcaaacccccgtgcattttccccttccttttgttttaaaatctttatcaccttaaatgatgcattaacttatatgaatctttttttttacatattttattttttctctttttatttttaattttatttctttatatttaataaaatttttttttcctttttatattattttatttttttttttttttctttttattttt

SEQ ID NO: 334161 - DNA, 53 bp, Zea mays
ttcatcacttccaaatcttttgattcttctttaccttccaatcctttgacatt

SEQ ID NO: 334162 - DNA, 248 bp, Zea mays
accttcttattttatttctatactcctaaaaaaatttttaaataaaataacttccaaatataattttttattgtactttgctcatcttatacttgctacctcacattttttcatttctttcatctttattttccacctttattattcctattaccacataatttataccactaatatttttttttaataaaaataatacttctaatccacattatatctctttcccttaatatcttttttattctatt

SEQ ID NO: 334163 - DNA, 268 bp, Zea mays
  unsure (1)..(268): unsure at all n locations
gaccctaccttcgccaatgttacctatgcggcttccaanaataaatgaggccggcgcttctcctgctttggcaatacctacttttcatcatcacaacttttctttgtcatcctttctcttatcttttgaaccttttacatcttgtagcattttcacttttatctatttatttcgtaccatctttcttaaaaaattaaatttttatttttatttttaatttttaatattactattattttttttttttttttttatttcttttttattt

SEQ ID NO: 334164 - DNA, 313 bp, Zea mays
  unsure (1)..(313): unsure at all n locations
gtacgcctgcggtaccggtccggattcccggtgcgagcacgcgtgcgcccacgcgtccggtgtatttgttctaacagatcgcgacgctggtacaacgcantgacgggccagactgggccactatgggagtgtggggaaagaccaaatagtttgtgtatgtaaaagtggtgattctatcattctatgtatgctgatccatagtagcctatcatgtgcaaacgctattgccctttgggatttggcatttcactgtatataacatatcatcggctcatcgccgtattggcgcatccatcggtgtcttgggttaccc

SEQ ID NO: 334165 - DNA, 151 bp, Zea mays
  unsure (1)..(151): unsure at all n locations
ctactttctcctctactttctcnacctcccctacttcttcaantagggagtcatggaatattcttatatgtagctccttcctatcctcctctctancttcattgtatttaaattcatttcgtccttcattcatttcactccatctgttatc

SEQ ID NO: 334166 - DNA, 382 bp, Zea mays
ccactcatcctcccactcattctcccactctttctcttattcctaattctttacatactttaggcataagaataatcactaagggcgctgctttcttaaaacccttcaaatattcacattttattattattctacttcattttatttatatccggtacgtggtaatatatacttattccaatacttcacttaatataatattcttttaccttttctaaaccttctactactccatttcaaatcttccattactctttaaccaacttcacaccccctattacaaaattttaaatttactattcaacactctttccttacataccttaaacaccattctttcccccattaaatccctttattaacttataatttaaattctttt

SEQ ID NO: 334167 - DNA, 181 bp, Zea mays
  unsure (1)..(181): unsure at all n locations
ggggagcacgcgcagcgcgtctccgtcngagaacccgtcgacctcgactttctctggccgcgggattcgtcctgctccccgctccatccatttctccctcctatggcgcactccttcccctagtcgcccatgggcgcgccctctggttcttcccctggcgtctccttctctggttacagct

SEQ ID NO: 334168 - DNA, 104 bp, Zea mays
  unsure (1)..(104): unsure at all n locations
caacattaattctatcatccaagctttctaatgtggtcattatngcttgggttttgggggggtgggnggtttcccacataatggcgctgagttcaagacccacc

SEQ ID NO: 334169 - DNA, 185 bp, Zea mays
  unsure (1)..(185): unsure at all n locations
ttccaattacattaactactctctccacactgacttaataaaccttttcttacattcttcttaccaaccactcctctcatctttcttatcattataacctttactttagactttcctttcctcattttattctactcnttatttatttttctaatcaactcttttatattctttttttttttaaa

SEQ ID NO: 334170 - DNA, 202 bp, Zea mays
  unsure (1)..(202): unsure at all n locations
attcccgcgtcgacgccactcatccnctgacttntcttctcctccccctcaccttcttattccaattcttctacttcgtcccggttcaccttccttggggagcggatccatattctncttccaatctttaatacctcttcttcttcgacctactctctctttccactgacgaccactcccttcacaactccttcatcaccta

SEQ ID NO: 334171 - DNA, 321 bp, Zea mays
  unsure (1)..(321): unsure at all n locations
taccggtccggaattccccgggggaggcacgcgtggcctttatgacactaacaattaaaactgtggccaaaaaacctatcccactttcanatcaggggcaggataaactttgctgggagggggcaacacaaacatttattangggtgctcatattgcaccaactgtgcctgtgggacaaccaccaccctgctcacaacatttcatacgcatctccccacattaactggagaataacatggaagaggcgtcggcttttttacataatacaatctctacggtttaagctgtgccttctgttgttcgtgcaataacaaacacac

SEQ ID NO: 334172 - DNA, 131 bp, Zea mays
  unsure (1)..(131): unsure at all n locations
aacttcaagttcaaccccttcaactgctcatcacattcatctactaccattgatatcattattatctatctagctctttgtgggtctttaacaataataanctaagcctatctggcttccatacataatta

SEQ ID NO: 334173 - DNA, 264 bp, Zea mays
aaagtgatctttgcccacttcatcccttcacttctggagtgtatctttcactaatgggggctcatatttagggcctgagaaaaatagccactcttactcaaatataattaattagagcctcatctaatccttggactccttggagcccttcatacatactttccgggtggcctttattgtctataacttcttcacaacttgttcttttggcaactaagaattgggcaccacccttctattacattcttacccaacaagcctttt

SEQ ID NO: 334174 - DNA, 73 bp, Zea mays
  unsure (1)..(73): unsure at all n locations
taccggtcctnaattcccgggtggacgcactcatcctttttcctttgcttctcctcccctctcccttctcttt

SEQ ID NO: 334175 - DNA, 436 bp, Zea mays
agcgcgctcgcgcctgttcacagccggatgttgatagagctacacccgggtcctagccgggcaggttctgttcgtggacgggaagttagacaaggcgatctcagcattcgaggagcttgcgcgggaggaccccttcaactatcgtcctcttttctgtcagggcgtgctgaaccttccccttggaagggaggcggaatcatagttcatgctcgagcgatgcctctaggacctcggctacgcgctaatcatagatccgtcagtgatgtatacaccgaacgtggataccgaattctattgtgataagcctcatcccgcgaatgtttgacctgttactctacagcggatgatcttaatataatggaacacttgcatttttgtaccctatacgaattataattagggaaatttcctaacatgtttccgttattcttattat

SEQ ID NO: 334176 - DNA, 380 bp, Zea mays
  unsure (1)..(380): unsure at all n locations
cgggncgacccacgcgtccncccacgcatacgccgatcttcttctagtgtacgcaagttccgaatgttgaatttttttggggaaggtatgaggaaaggaggaacccaatgtggtggacttcctgatcgtacttagcaccatttcaaattcctggttaacgtacttgatattttttgttaatgaagggagtttcatcacgttcactttcactctaatattaaagctgctcaagcgcattcattttttaattattaacttgatgtcaaacgaagcttgttttttttactattcatgctccattttttattcatatcatgttgtatgtttaacctttcttttctattctatttaataatacttaagtatgttcttttttgttc

SEQ ID NO: 334177 - DNA, 297 bp, Zea mays
acgatcgctagcgcacgcacataagcacgttgtcggaagctcaagttacaagaagcaccggggactggtcgatggcgggccaggctcttctatcctgtcggcagctgctgtggcggccgctgcagacggcctgctgtaggtcggccgccaggaatgcgcccttcgcggtcagtgccagctacagacatccagacaagcaaagtgccacacagacagctggggttctgagtccaagcagtccctctcctacctagaaaggacgctgcccagggactatagcatttacccgatgggcct

SEQ ID NO: 334178 - DNA, 203 bp, Zea mays
gacccacgcgtgcgaccatgacaacccaccccacgactacacatcatagcacactcaccgtagaaaaacccatgggcacgggtgtattggtgtacaacctctacaataccatcatcaacttctacagcgacaactgcatagtggacagcctaggctttactcgaaccaatccagcgctttctgtcaatcatgccttgtaacac

SEQ ID NO: 334179 - DNA, 77 bp, Zea mays
  unsure (1)..(77): unsure at all n locations
aatncgcgggccgacccacgcatccgtcaactcctaccccttcagcctctttatctttttttagatctcacccatac

SEQ ID NO: 334180 - DNA, 347 bp, Zea mays
cacacacactcttctccccccagttcggaccccggaggagccaagccatttcgtgcacctgctgctgtctccttcaccagtcaaccgcccgcctcggcgcgtcaccgcgcctggccgccgacccgccgcgcatcgctcaactgctcgtttgcaaagcccggaagcaggacgccgtcgtaaaccagagagacgtctcgcgccgcgccgcgctcgcgctcctcgccggcgtaacggtcgcccccagcgccaaaatgggtcccgccttcgcggcatactgataagcaggtaacttaccgagcatgcaatcggggcacgactctcatcaattcagcttgccttaattaacc

SEQ ID NO: 334181 - DNA, 297 bp, Zea mays
  unsure (1)..(297): unsure at all n locations
cggggtcggctcangacatttctactactgatccgccgatgcgtctgcagagcctgaccgttgaggccggcgttgccgtggactccatcgagttcacctacagtaccgtcacaggtgtttagactcgcaccgctgtgcgatggggtggacttggcgttaactttcgtaagcttgatcttggctacgctgaatacgtcaaggaagtttctggaacgtacggcgcattctaaggtgtgactacccttacctcgttcatgattgtcaccatcacctccatagcttgtgtgccatggggca

SEQ ID NO: 334182 - DNA, 226 bp, Zea mays
ggccgaccacgcgttcgtccacacattcgcacaaattggaataggttctttcattgccatagctgggtgttctatgggctctatcattaaggcttaagagtgaatatgagaaaatgataaagagctcatgactgccgtaaataatattattttgaccttcctctgacacaatatctgttacattcactacctacttttattcctctgttttgttttcatcatttat

SEQ ID NO: 334183 - DNA, 60 bp, Zea mays
aagcttacatacgcgagcatgcgacgccatatttactctatagagccacggaaattcaat

SEQ ID NO: 334184 - DNA, 86 bp, Zea mays
aaaaaaaaaaaaaaaaaaaaaaaaaaaaaaataaaaaaaaaaaaaaaaaaaaaagggaaaaggaaaaaaaaaaaaaaaaaaaaaaa

SEQ ID NO: 334185 - DNA, 305 bp, Zea mays
caatacatcttccgccactaccaccgtcttcgaacctggcgctggccctcgaaccgtcagtggcaacggcgcgcccggcgctgacgggttcatgttccagaccaccaccgactgtcacgtacagggttaaatgatgagcgagaggaggggaaggaagcaaaaagccatagaccttggtggctacctctctagctgctgctccacctcctgccgatggcgtgggcggtaataaactatctctctttatatctcgccgctgctggcgttactgctgttgcagagatgcaggaatgaaaagaggggtg

SEQ ID NO: 334186 - DNA, 288 bp, Zea mays
cactcgttctatgtaaatgggaacaaagatgctgtgggcgatgaatcgtttgagatcatacggggaccggctaacacggagggcgccctggacgcctacgtgtacacagcgaccggtccgaccgggccaagcccgataaccctgatgccatcgttggccgacctgcccgtgctggtactgcggggagaccgagaccccttcaccccgatcgacaggcccgttaggaagtttttaaccaacctccacggacagcttccgaacttgaccctactacatagtggatggcgt

SEQ ID NO: 334187 - DNA, 243 bp, Zea mays
tggaatcaccggcggcctcccgccttccattccaacactctcggaagaaaggtaagaacggggagcgccatggtcacgtttacagaccgctcgccctcgtgctgtacccgtacaccgtgtggcgacttaatgtgaaggagtttacccaggcgcgcgttgcgatcttctcgatgctcgcgctgtagtcccaggccatcctcgcggagctgagcccgatggtgaacatcatcctgaacacgggcg

SEQ ID NO: 334188 - DNA, 280 bp, Zea mays
agtaatcatccaaagggtaccgcctctgattctaatacatccttacaaaaagaggaccagggtgctccaagggcacgtttacagaccgtcgtacccatcctcttaccgtacaccgaaggcggacttaatgtgaacgagtttaaaaacacgcgcgtagcgatctactccatgctcggttaattatcccaggcgatactcgcggtgctgagccccataatgaacatcatacacaacacggtcgagtcgctcatcaacaacccctttgaatacttcaacaacc

SEQ ID NO: 334189 - DNA, 300 bp, Zea mays
accacgcgtgcgtaatatgtacccaaatttttaaaggatatgaagaggactcacccaagggttttctagccggctacccaatatttgactttccatctgttcttcttgatggctcatatcaccatgtcgattcaagtagtcttatcatttcaaattgcagtcatatgatcttttcctgagggaatgaggaaaatctgtccaaggcttctacagcctataatgaaagttgaagtgataactctctaacatcatatgtgtgatgtctattgcttatttgaactctaaatgaagacacgtcaa

SEQ ID NO: 334190 - DNA, 266 bp, Zea mays
cccacacctctttatcccttcgtttacagttcttacccaaacctacctatttggggaatcgttattttcttatccttccccccttcttagtactacctttttttataactaccctctcaatctgctatagaatcctttcttttcaactaacatcatttcttttaatctcttcattaaatatatctcttccttaatcttcttattttatgctcctttcaacttctacttccactacttatacttcctttactattattactactatt

SEQ ID NO: 334191 - DNA, 230 bp, Zea mays
ccagcgttcttgactcttgcggctctttgctcacatctaacgcgcctttgggcatccattcgcatcggccgtgtcctctatcctttgagatggtcgacatgataccatatccttggttgatgcacctaccccttttcttggggaacctatggacctgattactgtcctgcatcttcttatgaataagtcatgtgctcatgatggccttgttaaaggtcttcgtgaggctg

SEQ ID NO: 334192 - DNA, 230 bp, Zea mays
cgggccgacccacgcgtccctttcctttacatattaaagatttgtttttaccccatatactctatctggcgcaccggaacactttcaaacctccatctttatttttcctttactcattaacacactcattttcatatccttttactatttttccattacctttttctctttatccgctcttttctcctttaacttaatctccttcaatttccttaaatttctactacatt

SEQ ID NO: 334193 - DNA, 297 bp, Zea mays
gagaaagagttggatttcaatttataggtcgttgtctttctctgatgtgggcggccattacggcgccggggcggtgtcttttgctatgaacctccggagctacagcgcctcctacgagcgaccgactacagctgcgccgtccacggtgcatcgcgccatgagcgtgagctcgtggagcacgccgcctgcgctcgcgtccgtgcagcgggccgtgagcaccaagagcggtcccaccgtcgccgtcggtggccgggccgtcccggggctgaacctgcgcttctacatcgccttctacgc

SEQ ID NO: 334194 - DNA, 170 bp, Zea mays
ggatgatgtatgtggccaaccagaaataagaagttacatttccagagggtaagggaaaaaaaaaaaaaaaaaaaaaaaaaaaaaaaaaaaataaaaaataaaaaaaaaaaaaatatttaaaaaaaaaatattaaaaatttctttttataaaaatattatattcaaatttt

SEQ ID NO: 334195 - DNA, 355 bp, Zea mays
  unsure (1)..(355): unsure at all n locations
ccgcccggaatncccgggtcgacccacgcgttcgagcacgcctggcgttgttgtttttcgcaacatgaaacctaccctagaaagcttcataacggcggggcgttcatcttacacacgatagggtggaagcaccatcgacgcctgaccccgtcatgcagtaaatctaaggccaacatacggcttccaattcattgttctacagcaacatccactgtaaaaaactacaataagctggacggctcacgcacagggacattcaagtgcaagaccgttaacctcccttagacgatggacttcacgttcacaacaacggactctttgatcaaactggagcaagactcgaccgtatatatga

SEQ ID NO: 334196 - DNA, 432 bp, Zea mays
cggacgcgtgggctggcttctcctccccctcttaccaagtcctcctcgggttagggttccgtagggttttgtggaggggcgatggcggcggctgatgtggagtaccgttgcttcgtcggcgggcttgcctgggccaccagcaacgagtcgctggagaatgccttcgcctcctacggcgagatcctcgactccaaggtcatcaccgaccgggagacggggaggtctcgcggcttcggcttcgttaccttctcctccgagaactccatgctcgacgctatcgagaacatgaacggcaaggagctcgacggccgtaacatcaccgttaaccaggcccagtcccgtggcggtggcggtggcggcggtggctacggcggcggtcgcggcggcggcggctatggtggcgggcgccgtgacggctgttatggcggcggt

SEQ ID NO: 334197 - DNA, 430 bp, Zea mays
  unsure (1)..(430): unsure at all n locations
cccacgcgtncgtggagaattgtcaaccaccgggatatcattccaacagggccacgtcttgaggggctattgccatgtggaagcattattttatcttataatttggggacgcaaaagaagcaccggtaagtaacagcattctagatgatgaagaccaaggtgacgtgataggggagtacacacctgatgttcttgttactgaatttatgaaaggcgagaagcaacttgtggaaaaactactgcaaacagaaataaatttactccgctcaatcaaggatggttcggctcttatgcagcacatggaagactcctactatgtcacccttcttgagaatgtgagatcaacttattaagtggcagatactgccaatgatgaataccaattgacagcgtgatcctagtaaaactgcacagctgaacatcatggact

SEQ ID NO: 334198 - DNA, 364 bp, Zea mays
aagcaacatagaaagtggaatacagtagcaacaatagagcaacaatggcggccaagatatggtccaggcttatgctccttgctctttctgcatgtgttgctaacgcgaccatttttcctcaatactcacaagctcctatagctgcccttcttcccccataccttccatcaatgaccgcttcagtatgtgaaaacccagcccttcaaccctacaggctccaacaagcaatcgcaacaagcaacttacctttatcacccctgttctttcaacaatcgccagccctatctttggtgcagtcattggtacaaaccatcaaggcacaacagctgcagcaactcgtgctaccagtgatcaaccaagtagc

SEQ ID NO: 334199 - DNA, 228 bp, Zea mays
gacccacgcgtacgcccacgcgtaacactaacaaaatttctctagtgcggatattccagcctctaaacatacacggaaaagttttaaacaaacaaacctgcctaacactcaccctttcactctattttaactataaagaactttaattcctctcgtcccttttatatctgatatcccccaaacttactcattaaaaaatacttcattcacatcatgtttaatcttgac

SEQ ID NO: 334200 - DNA, 87 bp, Zea mays
ggagatctgtcttatatattgatgaggagaaagatgcccaaaggcaaaaaaaaaaaagtggggacaataacaagtccatcagctgct

SEQ ID NO: 334201 - DNA, 442 bp, Zea mays
ctagcaacatagaaagcacaatagtgtaccaacaatggcagccaaaatgggttgcttcctgatgctccttggtctttctgcaagtgctgctaccgcaaccattttcccacaatgctcacaagctcctatagcttcctttcttcccccatacctctcaccagcggtgtcttcagtatgtgaaaacccaattcttcaaccctacaggatccaacaggcaatcgcagcaggcatcttacctttatcacccttgttcctccaacaaccgtcagccctattacagcagttacctttggtgcatttgttggcacaaaacatcaaggcacaacaactacaacaacttgtgctaggaaaccttgctgcctactctcagcaacagcagtttcttccattcaaccaactggctgcattgaactctgctgcttatttgcaacaacaactacca

SEQ ID NO: 334202 - DNA, 297 bp, Zea mays
cccacgcgtccggtcccagtatggcttgggcaaaaccttaagccacccaggaagagaccagagtagcctccaactgtctcaaccattaaccagtgaagttacttcaaccaacctacaccgccagtcgcctgtgccttcgagtcctagctccgaccggtgaccggatgcgggatgtataccatgctctgacgccgagcggctgcctgctcgcgcccgactccgcctggtcgcctgatggacgaccgccgatcgccacgctgagcgccgcggcgtgccctgtcccttatatgcttgctg

SEQ ID NO: 334203 - DNA, 221 bp, Zea mays
cagaggaggaacgcgaccaatcttgctctagtgaggagattccaggctcttggaatacacggaaaagtttgaaacaggggaaagtactagtgattcagcttttgttgttcttctgtctatagagaattttaatttcttctgtgagtttttgtggggatatggccaaaacttcctgatgtaaaaaatacttgatttaatttaggtttaatgttgagcaaaaa

SEQ ID NO: 334204 - DNA, 143 bp, Zea mays
cccacgcgtacgcagacgcttgttctgacacttgggctgtgccagacataaaggggtcaggaggacattgtagactaaggaacattttataactatcgttgtatcaaaactgttctgaactgtaatgttattttccaaccccc

SEQ ID NO: 334205 - DNA, 460 bp, Zea mays
gatagatggaggatcatcacacggacaggaggatatccaaggaggccggcgagggaacgaagctgaccaggagcttccgctacgaggactacagcaccaggcgagtcttcctgcgcagctacccgctgcagtgggactggtcgccctcgcgggacgacgacgacgacgacaagcaggacggccaggatgccgccgacggcgacgagtgctgctgcagcaggcggtggaagagcaagatggtggcggccgtcacggagtggggggaggacaagctgctgctgctacgcagggccaagaagcgcctcgcgctctacctcatcggctgccaccaccacggtcgccgcgcgctgcccttcccgtcagcctcacccgccggatcatgcaccgtcgccatgatgctcgccttcagatgatcgatagatattcaccaccgtacgtgcacgcacggcgcgcgcgcgtg

SEQ ID NO: 334206 - DNA, 242 bp, Zea mays
  unsure (1)..(242): unsure at all n locations
caaacccaancccgggtcgacccacgcattcgtccactccttctctcacacattcaatctaattttaacatccattctctctaaaaactatggtgaattttcgcatatcttcaatcaatctcaaactcttctaaaccattacttcatactataatctatcccctaccatacttaataaacttatttaccattatcctttctctaaactattcctactttcaaacattccctctccttttcat

SEQ ID NO: 334207 - DNA, 261 bp, Zea mays
ccgacgcgtgtgcatacacattggctttcacttgtgtcaacaagagcccgattgacactcggggcgggtgctgtttgtgatacatcaacggacacatcttgctgcaacggaagatctactatgacgaggcctttgaaaccttttcgtggaaactcctccctaacgtatctctattcgaggtgcgctttgaggaattggaggcgctcattttctgcgctgcttacctcgtccattatcatttgtcattgggtgaagccagtt

SEQ ID NO: 334208 - DNA, 437 bp, Zea mays
cccacgcgttcgggacaaaatcggcaaccatgggtgacagcgaacttctccatggtgggggggaacacagggcacgaccggcgctaaagtaggtcagggacacgaccgacgatctctgatggccaagcacacgtaacgacaatgcccacgagctgggaggaaggatgcatggcacggtgtcaacggtcggatccgagcgcgaggtaggagctcgacactacaacagctacagtcatttttggcgtctaggagccgacgaaaataggtcctttgctgccaaaaataagctattattgacggcttgaggcttattttcggcggctcgtgtctgccaaaaaaattagcccaaaaataagattttattttcggtggctggagctcgggcaccaaaaataacatattttcggcggcttgtgagctgaccacggaaaataaca

SEQ ID NO: 334209 - DNA, 196 bp, Zea mays
attaatccttgtatagaacaatcttatttattaccaaaaggtctctgataacctggggcggggcttcaagctccttgtcttcctcaacctacaagtgctcaacgaaatacacatcccttcagtaaactacaacttccgtcacacctaactatatgattctgatgtattcggagaacaatgcctggcacgaattcat

SEQ ID NO: 334210 - DNA, 99 bp, Zea mays
ttttcctatctcccttcttaacatattcccatcttgaattgtaaatggaaccctccttataccgttccttataccccgcctatttttgatttttccccc

SEQ ID NO: 334211 - DNA, 283 bp, Zea mays
tccacgcgtcctggcgagcttccgatgttaccgccagctgaactcatgttccatcccggggcatgatggggagaattttctggtggccgcctgtccttctagaactgttaggccctgtttggaatcttagggggcgttttggacataagtttttccaaagttttttgaagaataatgcagtattctcaaaaactttagtattatataccaaaacttctttgacatactatctaaattctcttttttcaaaactaaaatattacaaattcttgctctcttttta

SEQ ID NO: 334212 - DNA, 445 bp, Zea mays
accaactagcaacatagaaagcacaatagtgtaccaacaatggcagccaaaatattatgctgccttatgctccttggtctttctgcaagtgctgctaccgcaaccattttcccacaatgctcacaagctcctatagcttcctttcttcccccatacctctcaccagcggtgtcttcagtatgtgaaaacccaattcttcaaccctacaggatccaacaggcaatcgcagcaggcatcttacctttatcacccttgttccttcaacaaccgtcagccctattacagcagttacctttggtgcatttgttggcacaaaacatcaaggcacaacaactacaacaacttgtgctaggaaaccttgctgcctactctcagcaacagcagtttcttccattcaaccaactggctgcattgaactctgctgcttatttgcaacaacaactac

SEQ ID NO: 334213 - DNA, 115 bp, Zea mays
  unsure (1)..(115): unsure at all n locations
cggaattccgggtcgacccagcgtccgncgaaacatacggcaggacagcgaaacacaggaccaagaaaggcagaacaaagacaaagggggcgggtagagcatgggaaccggcaac

SEQ ID NO: 334214 - DNA, 230 bp, Zea mays
tccacgccttcgccaaaaccttccaactaatgctaacctctaggccatccctacggcagggggcccactcgattaactcaaaccctaaaagaacttgcccacggccatgcactccattcttctctgaactgaactcacctctcaaaccatgctccccttcattcactaccacacctactcgattggacataatacctaccacttcgacatcaatattaccaaccctcata

SEQ ID NO: 334215 - DNA, 112 bp, Zea mays
cctacacctacacactgatattgactcttcttattcccttacatcatactaccacgggccggggcttattcatcaataccaccatctcctacaacaatttcaaccctataaa

SEQ ID NO: 334216 - DNA, 103 bp, Zea mays
ccggtccgaattcccgggtcgacccacgcatgcctacgcccctatccacgatctcttcatcttatcctacctttcacccttccccttggggagggggcccatt

SEQ ID NO: 334217 - DNA, 228 bp, Zea mays
  unsure (1)..(228): unsure at all n locations
ccgggncgacccacgcgtgcgcggacgcgtgggcaaggctgattatccttctattttcttccatgtttcctcacactttagctcgtttgggggtgtgtacgtgcaggttgacgtagttataatgttaaaggactaatgttcttattaccaatttattataacaagtgtgtgcatataaatttttctgagctcttaagctgtgagcctctcattttaaaagtgtttata

SEQ ID NO: 334218 - DNA, 113 bp, Zea mays
aaacagcttgtatgtaacacaacaactaatgctagaaagcatgcactacattaccataatgggattcatttttgtatgagcaataaaaaccattccacgctgttagtatggac

SEQ ID NO: 334219 - DNA, 225 bp, Zea mays
gaagcgcgctagagacatacacttatacctattctgctctttattatgatgattaaaaaggggaacattagggcgttcttcgcatactccttatagtccaaactctgtatccatccctagttacttactcctttattgattaccatttgattgtttcttccggtttttatcaatctcttaaatttcttcatactttattttattcatacatctttactttatttt

SEQ ID NO: 334220 - DNA, 210 bp, Zea mays
cggactcgtggagactagttctacatctctttctgtcgttcgtcatctacaacctttcctgggctgattcatctatactacaatcctcttaaaacacgttccgcctatcataagattttgtcaactatctaaacgcccccattggtaggatcatctttaccacatgcgctccagtttgatgaatcttcatcttctctacccagatgcatt

SEQ ID NO: 334221 - DNA, 103 bp, Zea mays
tctacacctacaccccgtggaagacctttcttacgacgcggatcacattcccacgggccggggctttttcatctacatcagcctttactgcgccatgttcaac

SEQ ID NO: 334222 - DNA, 171 bp, Zea mays
cggacgcgtggggcagcgcccaattaagctcgtgcacgtgatgcggggccggcggcgtgatacactgttgaggcagtttcgtttgtaacaagctattatgcaaagacaaatgcagtttgagaggcccaccatgtaacacacgtgatgacaccatagagcgcagctagaaat

SEQ ID NO: 334223 - DNA, 165 bp, Zea mays
cctacacctacatccctacctatcctcttttttttccactgctcatattcctatgtgcccggcattattcaacaatactacaattcccttcaagaatgtgcatcctataaaaaatattactgttacctgttaaaccccccccctctttgccttgtcatttccaca

SEQ ID NO: 334224 - DNA, 282 bp, Zea mays
  unsure (1)..(282): unsure at all n locations
cctcgacctacacacatacatactttcttctactacaccaccacaaacattgtggggccggagaagatcggagagtggggcgactaccccctcgatcgtcgagatcttaagactgctcttgacctcctcatcgcggtgaaggtcatggtcgacaacatcacctatatccgctccatcttcttcatctacatcatancctatgtcaaaccttactatgacggctcttagtatttcccccatgcttacgtggactacaagattgacctattcacgtttcacgag

SEQ ID NO: 334225 - DNA, 363 bp, Zea mays
agccatcctttcttcaatcgcaccaacatcctattatcctccgccctccagatgggggtgggtcaggatcctctatgtcgcgactaattcctgattgttttattcacttaaaatgagctctataacagcttcctgaaccatttccagggaacaccttatcatcgcacgccctactcatgtgtgcattcatgctacatcctccgactacctttcttagaactactgcctctcttacacacctgtgaacttcattaatattgattacacatcccccttacatcagcaccctccttttaaaagtaactattcctacaattacattaaatatatacattcagactctcactgattgtttggatccac

SEQ ID NO: 334226 - DNA, 191 bp, Zea mays
aggacactgctgcccggctataactaacttttttcacatgatggagacccatctgttcacgagccccagcgtgtgtatttgatcgaccctagatttccttctactacacacactctacaacattcacaccagcttacacaaaccctattactatacagagacgctacatctactctacttatacccctgct

SEQ ID NO: 334227 - DNA, 328 bp, Zea mays
cccacgcgtccgggttcccatgtcagcttttttagagtgctgtccattacaagccatatcgcgcagcatgtcttaaatctgcgtcccttgttattactttccttagtaaaatttggtggcttccctttttatattcttcctgtcaaggcctctgtgtccctcctcttttgtgttttgtttctctttatctccttctttttggtttgttaatcccttttaacttttttctcttgcatttttcctttaaaaaaaaatattatttgttcgtccttttctattagttttcattctttctttctctttcttttctatcattttattttttttt

SEQ ID NO: 334228 - DNA, 172 bp, Zea mays
cacaacaatggacgccgacctatctctcttcttatccatgcaacaacacacccaccgaccgggacgggtttcaaaccctgagccccaccacataaagtgcgctggtcctataaggcaccacctcactttcgcgtacgtccaaacctatacctctataaagcctaactttaat

SEQ ID NO: 334229 - DNA, 209 bp, Zea mays
ccggaattcccgggtcgacccacgcctccgccccgacctccgtactaccttacatacattttttccctttcagccttccaattgctcgtgtagcattatcatacatttctcgacttactcatcacttcttttatacaaccaaaatgcctctctatagagcatttcgacatcaacactattatcacatatccatcctatgttaacattac

SEQ ID NO: 334230 - DNA, 269 bp, Zea mays
gcgtgttaacttatccactccctcggcactgcagctcagtgcccttcccagcctctcgctgtcccgccgacgcgcacgtcctccgcgccgagcccagaggcagacagagggggcggccatggcgtccatcccgtgcaccttccagctgagcacggcggcgtcgaggagggtatcgccgcgggcggcggcgcatgggagaggccaaggaggagggggagcggtgcttaagacgccgctgctgggcgcggggaggcggagcctggggtggc

SEQ ID NO: 334231 - DNA, 295 bp, Zea mays
accaaacaatacgacatcgcatacggaaaccaacaagcaacataaaaagaaggaatcaaaacgcgacaataaaacaacaatggcaaccaaaaaaaaaaggggtggccattctaaaggatccaactttatgtactcctaactccaccaatataccttatttactgagaaacttaaataaatttcattgtccgcccataccaaacatcaatgatggaaaaaccatgccataacccaactaattcaccttataggctataacaatcactcgaagtgagctaaataccaatatgaccct

SEQ ID NO: 334232 - DNA, 57 bp, Zea mays
ctcatcttttaatccattcccatcattctttttttacatctctcaataaaggatcca

SEQ ID NO: 334233 - DNA, 227 bp, Zea mays
cgtcgacatacatatacctctggttgctaataacgtatttatacaactcttgtgtggacggggggctacagttagcattacacttgcttccactattgtgtagtcatctgtttgcgtatcgctctcatacattcaccaactatcttatgtgagaagattacaattcctgacccatatccgatacatgaacaaattaatacttgcatgcacagctttaaatattcatt

SEQ ID NO: 334234 - DNA, 291 bp, Zea mays
gactaggaacggtcgtcgcccacggggctgttgatccgccccaccagggggccgcccaactgcacgtgaaggcagccgtggagccccacacatatgacggcggcgatcttaacgtacgtcctacttgtcataccaacgccacgtaaacccgccagaactgctacacttgcccgtgactgctccagtagtactgtaacatacatggcatattgcaacaatggcgccatgccagcgcaaagattacactggaagaaagaccggcacctgatcgcctgtgacatgtcatatgac

SEQ ID NO: 334235 - DNA, 431 bp, Zea mays
cccacgcgtccgcccacgcgtccggagaccaacaagcaacatagaaagtggaatccagtagcaacaatagagcaacaatggcgaccaagatattttccctccttatgctccttgctctttctgcatgtgttgctaacgcgacaattttccctcaatgctcacaagctcctatagcttcccttcttcccccataccttccatcaatgatagcttcagtatgtgaaaacccagctcttcaaccctataggctccaacaagcaatcgcagcaagcaacatacctttatcacccttgtttcaacaatcgccagccctatctttggtgcagtcattggtacaaaccatcatggcacagcagctgcagcaactcgtgctacctgtgatcaaccaagtagctctggcaaacctttctccctactctcagcaacaacaa

SEQ ID NO: 334236 - DNA, 92 bp, Zea mays
actacacctaaatccctatctatcttctatttttttcacttatcatatgactatggtcctgccattcttttaccctactacaactccatatt

SEQ ID NO: 334237 - DNA, 330 bp, Zea mays
cggacgcgtgggttcaacgcttattcatgatctcttacttggatgaagaaatattgatggtgagagatgctgctggagcacctgacgtcttaaccagacttgaggggccgcaaccgaatccaggtgacggcacagcagatgcagtgatatcggaatatgaaagctaatgcctcagtgctgactgtagctccgcacctagctcctgtttatggctcctttctcctctttggtcattttctcagtctcgcgcgtatataaagctatctagttctagtgttgtcaacgatgatgaccactcgagtgtttttactttaatacataccattttgt

SEQ ID NO: 334238 - DNA, 186 bp, Zea mays
  unsure (1)..(186): unsure at all n locations
tttgtacttcctaatatttccattgacgttgtgaacgatactactctggggctttctttgcaggtttatcaactagcntcccccttcttacataaatgtctgtcgtggcaaaacccaatgtgtatccaactataactcttgctctggctctcgctctttatatgcatcaagttaaatatacagaca

SEQ ID NO: 334239 - DNA, 94 bp, Zea mays
  unsure (1)..(94): unsure at all n locations
aaacgaacnaacggagaagaaggaaancggaaagggagcgccaaaaacaaagaagggggccaaaaaagaaaggacagaggcagcaaaaacgagg

SEQ ID NO: 334240 - DNA, 232 bp, Zea mays
  unsure (1)..(232): unsure at all n locations
acccacccatcccccacgcgtncanttaactttttatctattctttcacacacactaaacttgacccccacgttttttgttaacaaacaaaaaaccaacttcctatttcttaaaacctctgaccaatgactagactttctccataatcaccatcctattaaatctgagctctctttattcaactatgtgcttcgatattacatcttttctttaataatacatttccttcttt

SEQ ID NO: 334241 - DNA, 411 bp, Zea mays
  unsure (1)..(411): unsure at all n locations
gaanncccgggtcgacccacgcgttcgcccacacatacacccacacattctttcacattatctcccaatcaaaaatcattagtgtctgcgtcatctatactactcctaccaacacctcctataacaacacttcttatcctcattttcttttcattttcattaaagatgccacttattactattcttatttacattcccaacacatacatcctacttctttctttttttactaccaaaactctttaccttctcccctaccactatcctatctttttttacaccttctccattacttcttatcatttttttatacattccaaattcaaacaacaaaccttattttttatttttattttccactcaataataattcattccttatattatacttcatccttccttttttacttt

SEQ ID NO: 334242 - DNA, 155 bp, Zea mays
gtataacaacaacaacaactttttcaacattaaataccattactcactgggctagccttggggaaccctttcatctacctacatctacttttatctagcccgatctctgtttaaacaacacctacgtacctacaacaacagtttcttaaacaaat

SEQ ID NO: 334243 - DNA, 447 bp, Zea mays
  unsure (1)..(447): unsure at all n locations
ccggnccggaattcccggggccctttattttttttttttttttttttttttttttttttttttttttttttttttttttttttttttttttttgttttttttttaagggcaaaatgtatcccttttttatatgggttcaatgtgggtttttttttaccgaactgtccaaacttatttaaaaaaatcactgcgagtttacaacaattcacacccaacacaggcggtggacacaacccatccaataatttttcatgagtacaattgttgaatcatcggccaatttcttcaaaattattaattatttatgatgttcattttactattgtcggtagaaaaagaaagtcccttttttttttattaccccgattgttaccccttttttaccatttttttttttttactaggttttttttgttttaaacacctttaaaaacctttttctttttt

SEQ ID NO: 334244 - DNA, 227 bp, Zea mays
cacacatacatatactataattgtccatgtcatcggctcgttcctatggggccttttgcggcctcccttcatataggccactgagacctgcttccctttcgcagttgctcatcttcatagccacctcggaagctcgtggccgaggatccacatatatagcatctgtcttttatactaataggtcttagtttttgggagaatctacacatcgcatatacttggtagct

SEQ ID NO: 334245 - DNA, 285 bp, Zea mays
cccaatcataatacatctacaaaaaacagcatctatttctatactacaaaaaatgctcgacaggtctggcagatccaccttaacgcctgcccaccctcacacgatgcaccttctacttcgtcctctaatgctcaaacaaaaacattaagacctacaacccctacactataaaaactccttcttacacccaacttctacgccaactgttagaaagggcaattccaacagacgacttacagttcaactacaactaccgcacaaacctttacatatactgcccaatct

SEQ ID NO: 334246 - DNA, 138 bp, Zea mays
  unsure (1)..(138): unsure at all n locations
nccaaacaaaaaaaataaacttataaccgatttatacacaaaaacaaaaattactcccccctcgttctattttatccaaccttacttacccctccattctacctaataactcttttatatgtgtacctaaattcaatt

SEQ ID NO: 334247 - DNA, 235 bp, Zea mays
  unsure (1)..(235): unsure at all n locations
cggaatngaccgatccactccacgcgtcctccaactcttaccctgactcgtagtcagacgcttcgtctatttctatatcgggggcggtggggttagatgatccaagcatacgtacacctgcatccaacctcataccatttgtatacttttacctaaattcatttcaattgccgtacgtaaacaacgttcagacttaaaaagccatagccttattaaacttaatgcacacatttac

SEQ ID NO: 334248 - DNA, 252 bp, Zea mays
  unsure (1)..(252): unsure at all n locations
gacgacccacgcgnccnnaaaaaaaaaaaaaaaaaaaaaaaaaaaaaaaaaaaaaaaaaaaaaaaaaaaaaaagagaaagaaaaaaaaaaaaaaaaaacacaaaaacacaaaaaaaaaaaaaaaaacaaaaaaaaaaancccacaaaaaaaaaaaaaaaaaagcacaaccaaaaaaaaaanaaacaagaaaaacgccaaaaacacaacaaaaggaaaaaccccgaagaaacaaaaaagaaaagcagcagaag

SEQ ID NO: 334249 - DNA, 261 bp, Zea mays
caaaaaattccttcattattccacagggctcacttgcttctattgccgtgagtacacagggcctcccaccagatactctaatgaccctcaacatccactccccaagcctacaattacatctaaccctagtgcgagcgaccacaacaaccaactgcaaataccacaaaatccttgcacatgcaaatcttacaaaaatagcacacctcacaacaacaactactgcattactgagacagctagccgaaaaaaccttgttaccaa

SEQ ID NO: 334250 - DNA, 304 bp, Zea mays
ccggggcgacccacgcgtccattctaccatcaacaacaatttctgcaccatttaataccaatatctcattcagcgactccatggagaattcttccgtatacctacaactacttaaatatattccgcactcgttttaaacttcacctacatacttactacatcatttattatatcaatttttaccatctcttacgcaactatctacttcatacctttttacttacttacaacataatatactattaaaaacaattttctttatcctaatattttttaatattcacttctaatatccactttcaat

SEQ ID NO: 334251 - DNA, 295 bp, Zea mays
gcataccatcaacaacaacagctgcaacagtttatgccagtgctcagtcaactagccatggggaaccctgccgactacctacaactactttcatctagcccgctcgcggtgggcaatgcacctacgtacctacaacaacagttgctgcaacaaattgtaccacctctgactcagctagctgtggcaaaccctgctgcctacttacaacagttgcttgcattcaaccaactggctgtgtcaaactctgctgcgtacactacaacagcgacaacagttacttaatccattggcagtg

SEQ ID NO: 334252 - DNA, 116 bp, Zea mays
acccacttccattaaatatttcttacctattttattaccaatccacacactgtcaatcttcgcaccctattcaatataacccatatcaaacctacttccacataaactcaccttta

SEQ ID NO: 334253 - DNA, 305 bp, Zea mays
  unsure (1)..(305): unsure at all n locations
atcatgcttcctctttacctactatgacatagcaactatatgtgttagaggataaacgacgggcatatactaantctataccaaaacttacctcttaaaccgaggcaaattccaaaattataattccttaaacactccactcatattgcatgagtatacatatcataaaatcctattcttataatccttatcaacacttgtgccacacctttaccgaatgcactcacggcgtatatcagatctttataacctgcgtttgacactattacattctttcctaattccatcaatactaatcttttata

SEQ ID NO: 334254 - DNA, 451 bp, Zea mays
aaaaaaaaaaataaatataaaaataaaaaattacactaaaatataatcaaaaaaaaataacagaatattataatacacatacatacaaaaaaaaaaaatataatataaacaaataataatcccaaactatataaaaacaattcaaaaaaacattcatgttgcccccccttttaaaatatcaaatttttattccctttctttccaaattttttttttttttttttcttcccaaatataaatatctttccccttttttttaaaaacaatttcttaaaaaacctttccatttccccactttatttttttttaaaaataatcccctttttctgttttgggtaatttcaaaaaaacccccccccttaccccctcccaaaaaattgcccactttaaatttcaatttgccttcccctttaccgcccttttttacccccccaatttttttttttccccc

SEQ ID NO: 334255 - DNA, 258 bp, Zea mays
actaatccaactatcaccccagctttcacttttatttccactacttctcaaaagaagtcagttaacataccacctttcaaattaaaatccaaatttaaatttttacttctttctcttttccattttaccttccttattttctttataaaattccttttaacaacctttctatttttttcccctcctcaccaatatcttctttatttttaatatgtctttatcaaaaattctttacaaaatcaaaattttattaacaaa

SEQ ID NO: 334256 - DNA, 69 bp, Zea mays
  unsure (1)..(69): unsure at all n locations
cggaattcccgggntcggacccacgcccgtccgnnggtcattcttatcagcttattctgggcaccgcca

SEQ ID NO: 334257 - DNA, 251 bp, Zea mays
ctgactcgtgaggccatgcaccctatttcatctgcttccccatctccaacgtaggtggcacctaagccatggctatgcactcgacatttcgttctaatcgtagggcatgtgctcccctgcccctctatcccacgactactctcccttaccatctcctggctagttcaagacacccaaccttcttatccctgctcgcatcccgctcgtggagctcccttcctctaccttgtccagcgtagatctcacccatc

SEQ ID NO: 334258 - DNA, 163 bp, Zea mays
gtcacgcacaaatgcatgtgaaggtggagacgtgcgccttggaggccgaggatggcgcggcggctgtggtggaggccgcaaagcagcacggctcgtatctgctctttcttggccagcgcccgctgtatcacgccgtgatgcgctgactgaaggctctgtggca

SEQ ID NO: 334259 - DNA, 328 bp, Zea mays
ggaattggcgggtcgacccacgcgttcgaccacgcgtcctagctcggacaaggcacaacgccatccttcggtttccttgctggcgtcccgatcgctcgctcggtcgaaaagaaagaatctcgctttgaacatggcgtctctggcgttcggcagcaccgaaactgcagccgtggcggtgaccttcgtgaggacgcggtcggcgcgccagtccatgcttgtcgtgcctcccgctgacatcatgggcagcccatcgccggccaccgacgacaatgtccttggcgagaccatcttcggcttcatcttcaagaaagaccaacttgttgagacg

SEQ ID NO: 334260 - DNA, 140 bp, Zea mays
accgacaccatttaaaagatcagagctattcaacagccactcaaaacagattgaatcgggcgactcaacccaatactgtccggaagcatcctctacttcacgttccgtcagggactcacctgtcatcaacgcgactttca

SEQ ID NO: 334261 - DNA, 282 bp, Zea mays
acgcgttctgacaaaatggccaacgaatagagaagggggtaagaccgatgggaggaaaggtactttgttgtctgacattgaaaggatcatgtgtggacagtttatatgtattagaacaccttaatcaagtataactataatcaagttacggtttatcacaagtttttattcgtgctacctgtttttcaattgtaaaaactaatggcattgtttgcatgtacattaacccttttaaattccttttagtttctaaattgatgctgatttttaaaacttatattt

SEQ ID NO: 334262 - DNA, 407 bp, Zea mays
  unsure (1)..(407): unsure at all n locations
ccggtccggaattncccgggntccgacccacgcccgtccgnnattttgtaagaagccttgctctttgcnnttcggttaccatgcctattnactctctnntttggtttaaattactgggcanggcgaacttgtgttggttgtgaagggaaatttgttttctacaaaanggaattattaatatgtggattccctctgtcatgacagtattacacgtcaacccttatcaacatcattgagtattcgtattaggtctaccgatcatatcanctttggcgtctttgtgtgtaccttggttggcaactggatggctttgaaaacctcaaccgattattatctgaaaanaatatatagttttcctgaaattttgtggtttcccgtgaccttgtttggcacgaagaaatgtcatt

SEQ ID NO: 334263 - DNA, 204 bp, Zea mays
attacaaataatccatttttactttcaatccatgctacactctctccaaaaagattactagcagcatcatccttattgacacctgcatatctttattacaacaagaatcataatacccgtcatttcttcatcaacgaactattactgcaaacacaaataaactaccctcacaatgttatagatatactatcatctcacttattc

SEQ ID NO: 334264 - DNA, 206 bp, Zea mays
tacctcacctacgatcactttttcgttttaattacattaccattactacggggacttctgcggagagtcttttaattaagcatggctcctctctttctactgaactactctttttttcttttccgttcttaacaacatcttttttatagagctcaccctatttaaatcaattgtcccccgtttttcataaaagctacaatcccatc

SEQ ID NO: 334265 - DNA, 274 bp, Zea mays
attacgcaaaactgcttttgcttccggaccattctaccctctcttccgggctattaccgggcgcggccatcttttgggcacaagaaaatgtttttttcaaaaaggattcttaaacggggctttccttggcactgaattttaaaaacaaccctatcaactttatcattattttttaggtattctatcctatcactttttctctttgtttgtaccttgtttgcaaccgagtgcttgtaacctcaacgcctcttactcagaaaatataacctttttt

SEQ ID NO: 334266 - DNA, 249 bp, Zea mays
aaaccatgaattcctcagggatcttgctgccattctcttgcttgtatgtaccgggagcggcattgttcataccaatggacattgttcaatataacaacaactctataacagaaaggcccgtggctttatgtttgtacgatagactatatccaataagtactctaacctctgtactgcttgcatatgatagcaattcatttgctgtattttcctggttcaatatcggtcacatcataatcttctattatt

SEQ ID NO: 334267 - DNA, 371 bp, Zea mays
ggcatcaaagattttggcgatgaatatgcactataagcatagtcacggatgcgggcattggtacagaatcaactgccagaaaacattcatcacagcaaggaattcatcaaatatgaccgacaaattgccaaatccataagtaaacttatgccaactactgacagtgtcagagcaagggctagtgagcttgataaagctttaaatggacaggattggccccagtccaatctcttgttgtctatttgcaaacaagattatttccattgtctatagtagaaatacaaaggacacgaccttttgaaatttagcctttgcgtgtggatatgtcatgctattagttacatatcaagtaccagacgcaatggattatc

SEQ ID NO: 334268 - DNA, 242 bp, Zea mays
gccgcctgtctgcctgttctttctacactcttgcaatcgactagactacggcgaatcgtgagtgcataggattcctttgcttgtaacttcccggtgaccaacataaatcccattttcctgcttaacctatactatcataccctccaatcggagctcgaccacactatttaccactatggtaggttctagcgcatttacatgaagtaacgctttgcttttgtttactatgaggatgaacttga

SEQ ID NO: 334269 - DNA, 324 bp, Zea mays
actatgctctagcatccgcagcttccgcagcctgctaggctttgcagatgacgaccgcggggcgccccatctgtgcgccggccaaggaacggaactcaacaaaagggcaccctcatcttcggcccctcccagaattaatcattacaggacatcttatcacacacatgcctatagcctagaaatgacagtctacagacccaacatgagttacagaacatgaatctcaatgaagaacttgaagaacgtgcgctcatgcactactctttctacgataagtcctattccgaataaagagaccggcggaaacgctctagccatctactc

SEQ ID NO: 334270 - DNA, 292 bp, Zea mays
ccgacgcgtgggccgacgcgtggggagaagcactaagaacggggaaatcgatagatcagcgggcatagagtccctgcccaggaaccctaccctactccaggacatgcttgatctgaggcgcacccttacccaccggcaccagatgtgtacccgcctccgcctacgggccttggacatccaccaacaccccatgacacgtaccctccttcgacacagggttcttacccccaaccacagcatgctccaaccgtgtaccaacgatacttcaacgaccagcagagtgcttactacc

SEQ ID NO: 334271 - DNA, 304 bp, Zea mays
ccctccacaacgccttcagcacctacggcgaggtcctcgagtccaagatcatcctcgatcgggagacgcacaggtcccgcggcttcggcttcgtcaccttctccacggaggaggcgatgcggaacgccatcgagggcatgaacggcaaggagctggacggccgcaacatcaccgtcaacgaggcccactcccgcggcggccgtggaggcggcggcggtgggtaccgtggtggccgtggaggcggcggctactgcggtggcgggcgccctgatggcggaggcggctacagccgtggcggcggcta

SEQ ID NO: 334272 - DNA, 317 bp, Zea mays
cgcgtccggcctccacaacgccttcatcacctactgcgatgtcctctagtccaacatcatcctccatctgtagaggcacaggtcccgcggcttctgcttcttcaccttctccacggaggaggcgatgcggaacgccatctatggcatgaacggcaaggagctggacggccgcaacatcaccgtcaacaaggcccactcccgcctctgtcgtggaggcggcggctgtgggtactgcggtggccgtggaggcggcggctactgcggtggcgggcgccctcatagcggtagcggctactgccgttgctgctgctacagtg

SEQ ID NO: 334273 - DNA, 281 bp, Zea mays
cgaccacattgaaaagaaggacaagaaaaagaagaaggagaagaagaagcgcggttaggggcacgaccacgactgcggccacagtaacagcagcagctacagcgactgagatctggtgtcgcagcacaggtgcaacacaagtatgcttgctggatggatgattcataccagctgatgctgatgtagtgtttcactggtgtcatgcatgcatgtatcgtgctattataatcaaaaagaaaaaagaaatatcagtcagggatggtttggtttgcatgtgatct

SEQ ID NO: 334274 - DNA, 211 bp, Zea mays
ggcacgcctatgctttctcttatgccagagcttgttaaagtgcacaaccgttggaactgcgtcgacagcgtctgttgacccctttattaacatgaatgagcataccgtgtctttgtcgcagcaccttgcgttcacgattaatatgtgctcatctcttcgcatccggagcttcaacatggaggtgcacatcttagcctctagaccgggatcc

SEQ ID NO: 334275 - DNA, 284 bp, Zea mays
aattcccagacttcttctttccttttggcccctgttaccttctttacagaaggtgtcagagcgactcttacacttttgcaatctgctggtctgaatgaacaccacgtccttacaaggtgccttttcgcttgcctgttcttccatgcataccacctgatgactcacacgactttgcctatagtgtactcctgtcactcattctgtggtcacctgtcttaaacatccaggcttcattgtaacatcacagctgctcttcaagactccatgttgtattatctactctc

SEQ ID NO: 334276 - DNA, 359 bp, Zea mays
ttcgacgcgttgtcgaacacatcggggcgtactcctcactaatgccccaaggaaaatgccccgttgcgtgtaatctgcggccaacaaacatcccattattatgatcacaatcttcgagccgcggatctgcgttccttcttcatgcccccagcggtgcgacggcgggaattaaaataaggtatgtttttaacttatgctccaccaccgcccgcgtgacatctttattacaccgagcgcatattctagtctccgatgctctttttgcgcgtttgtatttttcatccaacgtgaggtttttttcacggataatttccctgctcttttaaaactcttaaggcacaacacactgcgcacgagat

SEQ ID NO: 334277 - DNA, 266 bp, Zea mays
tcccggtcccaagcacgcgtccgttcacgcctctttccagatggttttctattcttggcacacaccattttattagtcacgaaagtgagcttatgctaacatctacagctattctccttattatcattatgttattccccttcatgaattttataccatttagttgtacacacacgctagtaatacatacttatcctgcattgccatctgttaatacacacaaaaaacgggtctaagtataaaaaaataaaaaactgtaaacactt

SEQ ID NO: 334278 - DNA, 219 bp, Zea mays
gtcctgaattcccgggcccaaccacgcgtcctttcattcctccttccagatgtttttctattctttgcacacatccttctactttgtcccggaagagagcttattctaacatctacatctactctcctcattatcattatgttaatccccttcattacttttataccatttattcgaacacaccttataattaatcatcactacccttcattcccatta

SEQ ID NO: 334279 - DNA, 128 bp, Zea mays
accacgcgtacggccacatcgttttccatgctaagctcacatcatcttcctggtcccgcatggggtctttttttaagatctacaactgatctccgggtcggcctctttttaatacccattcttattta

SEQ ID NO: 334280 - DNA, 374 bp, Zea mays
ccagaaccagacgagcacggacggaccttcgcatgccgcatccctccacgtgcacgagttccgaggcgccccttcgatccgcccggcccggccctcttcaccgcgcgcgcgcgtccgtcgctagcgtttggccgtctccctcttgagccccgagtacccccacgacgcggcatggaacctcgccatgagggtccacccggctccgcggaagcgcaccatcgccgtgcagcgctgcgccacggcggctgcggcggcggctgcgggcgcactctgcgggaagaagctgcgccgcctgccgcacatcttcgccaaggtgctggagctccccttcgcggccgacgcggacgtgtccgtcgaggaggacgcggcggcgc

SEQ ID NO: 334281 - DNA, 177 bp, Zea mays
acctaacctaactagcaccgtcgctcctcctttttccacatacgttcacattcacgagggagggtgctccccttaaatccggccggtcctatcctcttcaccgtgcgcgcgcgtacattactagcgtttggacgtctccctcttgatcccctagtacccacacgactcgtgaaggaa

SEQ ID NO: 334282 - DNA, 459 bp, Zea mays
gaatttcggttcgacccacgcgttcgatcacttctacatctctcggtcgcttctcacatactcaccaagcgtcttcaccaatggcttacgaccactatgtggactactgctcggatgacgtgaggtccgtggccccggccggcttcggccgccacggaggcggcgtccagcaacacgtcgtcaaggagaagttcgaggaggttgacacggtcttacgcgcctgctcctaccaccaccaccaccaccatggtcaccactgcggccaccgcttcttggtgcgcgagaccagggtctatgaggacatcaacacctgctccgtcgaggtccacgatcgcatggagagcttcctcgccagggcttactgagccgccctgcggacggcatccacgcccgttcgtgcctgcctgcgtgccttatgtatgcccgcggttgactggttttacaaggtcatcgtacttg

SEQ ID NO: 334283 - DNA, 219 bp, Zea mays
acgccgaggaggaaaaggacgcactgcagcgggacaactctgagctgtccaacaccgttaggaagttgaacagagatgtcgccaagttggaagttttcaagaagacacttgtgcagtcactccatgaagatgacagcagtgataatactgctcccagggaaagagctgcaacagcttcaaatttctcctctgcaccatcagatgaagattctgcatttt

SEQ ID NO: 334284 - DNA, 102 bp, Zea mays
ggaaattcctgttccacccacacctccccccatactcttttcattcttcttttttatccttttttatccaatcaattaccctatatcccaaagaaaccttta

SEQ ID NO: 334285 - DNA, 478 bp, Zea mays
  unsure (1)..(478): unsure at all n locations
cggaattncngggtcgacccacgcgtgcgtccacgcgttcgtccacgcgttcgtccacgcgttcgagtgattatttgcacctactgtgctgtgtactcggatcaggaaacaatgaatagtttgtccaccagcttcgtgagaatttctaattcgctctggtcccatatgtgccatgaccacgtttttatatacaagtaaagcttcggtgtgtcttttctaagttagcatcttaattacatcaagtacctacaaatgaagctcatagagaccatttccctaccggtcatgttttgctttgcggttaatgactgccctaatagataattagatatgcagtcagatttgggactgaaagtgaaggtcgtgtttgaccaacagaagctgttaaactccagaaataaacaagccgcaaggttgcacgtgttcgagctaccatactatggttttgagcgcgttttcacaatagtttgatctaaat

SEQ ID NO: 334286 - DNA, 135 bp, Zea mays
cgccgccgtggtcgccttcgcgcctgggggcctcgctggtggcgcaccctttcttcgctcctcatccttcgggggccttcctgccgcctgggggcttcctctacctcttccgcgcgtccgaccagcctgtcccct

SEQ ID NO: 334287 - DNA, 189 bp, Zea mays
cggacgcgtgggctgacacgtgttctgactcgttttcctaccgcttccaccttccaactgagggccgggggtgacttccagtcccctccgcatttctcaccgcctttctttccatgtgaggcatcttctctccttctttctttgttctctccccccattcctcctttgactatcgcacaccttcttttt

SEQ ID NO: 334288 - DNA, 140 bp, Zea mays
taattaataattattacaatccaaagcatggcatattaaaatcaaatctataaattattcatgagaggtttctaaccgctcatgattgcgatctccgctcatatggttgattgcgtcggaaccgtatcatttcactggtt

SEQ ID NO: 334289 - DNA, 224 bp, Zea mays
cgggtcgacccacgcgtgcgcagcattccacacaagcacttctacgtcacacgggctctgcgcacagacacaccaagcgtctgctcgcgagtggcttactaccaggaggtggactactgctcggaggaggtgaggtcggtggccccggccggcttctgccgccacggctgcggcgtccagcagcacgttctcaaggagaattccgaggaggtcgacacggttta

SEQ ID NO: 334290 - DNA, 374 bp, Zea mays
caaatctgtacgtctaccatctgtttttccattactcggcctgtacatttgttcttggtgggaggctcgttttaaatacaaaacaaactttttaatgtcacggtcttttaccagatccactgtagtactctactagttttcaattcactaataataaaataaccatggtataaatttgacctaccattgacctattctttgttttcttttatttaattgaatttgtattcaatactataattcatcttacttattcttataattaattttaactacttttctattatattatagtatttctctttcattactactaatcattatgtatttgtaccctctctcttttgtagattattccacatttctttttatct

SEQ ID NO: 334291 - DNA, 453 bp, Zea mays
  unsure (1)..(453): unsure at all n locations
cccacgcgtccgcagaagctgggaagaaagtggaagaggaatttagcacttgccctctgtcagtcctaatgatgagcgttaagaacaacaccaagatactgaaagcaaacatggcttgttcagtcgggcagcggcagcagaggggatggggccaatgacggaggcggagaggagaacccatcgatttggtggcgtaagtgggagctcatcgaggccgccaccggccggtccacctcttcaataatcgtccttcatcgcccttcagttgacctgagatctagaatgacacaacagaggggcgagggttgttcagtgctttgacatgtgtgcaactattcaagcacaatggttagatgatatccncattcatcttagattattacattgtggtgttcggcttcttcagtcaagcagcaatcatgcaacatgccttactgtagttttttatcaact

SEQ ID NO: 334292 - DNA, 468 bp, Zea mays
ttacgggtcgacccacgcgttcggcatccacacaagcacttttacgtcgcacggtctctgtacacaaacacaccaagcgtttgcaccaatggcttactaccaggaagtggactactggccggaagaagggaagtccgtggcccctgccggcttctgcccccacagaagcggggtccaacaacacggcgtcaaagagaagttcgaggaggtcgacacggtcttacgcgccggcgccaaccaccaccaccaccaccatggtcaccactgcggccactgctttttggtgctcgagacacatgtcgaggaggacatcaacacctgcaccggcgaggtccacgaacgcagggagagctttcttgccagggctaactgaaccgcccggcggccggcattcacacccgttctgtgccttcctgcgtgccttatttatatctgtggtttgactgggtgttcaaggtcatcgtactt

SEQ ID NO: 334293 - DNA, 137 bp, Zea mays
acgctatgctccactttctgtttactctcattattgccattcttttgctagtgatcaccagagagatttttaaccatctcttacacctgtaccatctcttcttcctcttgttctaaagcccattatatgtttctcac

SEQ ID NO: 334294 - DNA, 302 bp, Zea mays
aacaccctgacaagctaacaacacacgcagcgccgtgcgccatgaggacaaaaaccaaccatcgcattgtgcccctgctgctggtatccatcacactgatcacacaggccgacgtctgcccatacagcccgacgaccgatgcactgtgccactccgccgaacgacatccttcaacaccatgccatgcaagggaatatctatgtcggcgtgaacaaatacgtgaaactgccccgcgaacacgcataagctaatcgcgtacatggacgcgctcaaagaactaacacacgccataatctggacca

SEQ ID NO: 334295 - DNA, 71 bp, Zea mays
aattcccggttcgcccactcgtccgccacacgttcgtcttattcagatctcagtgtatgcataccaaacca

SEQ ID NO: 334296 - DNA, 247 bp, Zea mays
  unsure (1)..(247): unsure at all n locations
ggaggaggtgaggtcggtggccccggccggcttctgccgccacggcggcggcgtccagcagggcgtcgtcaaggagaagttcgaggaggtcnacacggtcttacgcgccggtgccaaccaccaccaccaccatggtcaccacggcggccacggcttcgtggtgcgcgagaccagggtcgaagaggacatcaacacctgcaccggcgaggtccacgagcgcagggagagcttccttgccagggttaac

SEQ ID NO: 334297 - DNA, 230 bp, Zea mays
  unsure (1)..(230): unsure at all n locations
ccggctttggccgccacggcggcggcgttcagcagggcgtcgtcaaggagaagttcgaggaggtcnacacggtctcacgcgccggtgccaaccaccaccaccaccatggtcaccacggcggccacggcttcgtggtgcgcgagaccagggtcgaagaggacatcaacacctgcaccggcgaggtccacgagcgcatggagagcttcctcgccagggctaactgagccgcc

SEQ ID NO: 334298 - DNA, 293 bp, Zea mays
cccacgcgtccggtctcaccattctaaacatttttcgaatctttgtttttaaaatcaacactcgtatttattgcctgaatcttctttttacccaaccaatcgaccaaggatactttcaaccagggcggtccctctattggttccatactttcctacgccttcttacgcaaatataactatttctatgtgtgcataattttatttccatgactcttttcttacatctgcttgactagaaaaccccttggctttccaaacataatcactttccataacattgtattttcaccagt

SEQ ID NO: 334299 - DNA, 195 bp, Zea mays
  unsure (1)..(195): unsure at all n locations
gccgcagtaccgtccgtaattccgggtcgacccagcgttcgtccagcgtncgcgtttctgtcctttttttttattttgggggggcgggcttcaagttaaaaggggacgggcatttattatttgtgaaaaccaatctttttttttttaactcccaaccaaaaaaaggaattggttactttcctctttatttcttta

SEQ ID NO: 334300 - DNA, 236 bp, Zea mays
  unsure (1)..(236): unsure at all n locations
ccaccaccgaaccggaaaacccgagtcggcccacgcgtccggcacacancanatacctacgactccagctctgttcttattgagcacctacctagttatncggggcgtggaactcaagaatgtgtggcttgtgaaaaccgactaccgattgaaccatcatggcggcgtctttttatggcctatacaattagggcagcggcttgggctttagggtcgttcacgccaagatcggctgt

SEQ ID NO: 334301 - DNA, 394 bp, Zea mays
cggaattacagtgtcggcccgcgcgtccgtccacgcataaccacggaagatcggggctggatcatctgttaccaccccatgatacgcgctacactgtggggcgtgcattccagctctgtctaccacacaaaaacgaattaaccatccattctactttttatactgacgcgcactattaggctcattcgcaatgctaacagatcatagaaaagcatggcgcgtttcgaaaagagtaccagcaaaatacgcacctttcccacaaatactatatcagcgatccaaaagaggtgcacttacacctaattgatttcatcggccgggaaaccacgaaagcccgccaattatctatgggagctttattatggcggctgggctgctaaaaacttgtattttc

SEQ ID NO: 334302 - DNA, 282 bp, Zea mays
gaaccagctggttatcctcttgcacgttcgctcatgtgcacatcccgtgttagcatcgatggcgaggtgaccattcgagacacacagacacacctacagttgaagcccaaggctttcttccttaacaaggcccactacacctcggattcattgttagtcatcaaacgactttcccttaatgatgtgttctatgaacaaaacacaccctgttaggtttaagtctaatttgtttactatgaataacgcgtttgttgcattccacacccactgcccctttttgct

SEQ ID NO: 334303 - DNA, 461 bp, Zea mays
tccacgcgtccgccaactagcaacatagaattttcaatagtgtaccaacaatggcagccaaagtgattttgcttccttatgctccttggtctttctgcaagtgctgctaccgcaaccattttcccacaatgctcacaagctcctatagcttcctttcttcccccatacctctcaccagcggtgtcttcagtatgtgaaaacccaattcttcaaccctacaggatccaacaggcaatcgcagcaggcatcttacctttatcacccttgttccttcaacaaccgtcagccctattacagcagttacctctggtgcatttgttggcgcaaaacattaatgcacaacaactacatcatcttgtgcttggaaacctcgctgcctactttcattaacagcaggttctttctttcaccaactggctgcattgaactctgtttcttatttgcaacaacaactaccattt

SEQ ID NO: 334304 - DNA, 212 bp, Zea mays
caggagccctttgagggctatgacttgcatgttctctataatgcttcaagtgagtgtgcatgcgtggggacagaaatgattagcccttgtatattcctatggaaaacttagcccttctactattatctaagtgcatcatgtataccaaaatatggacagaaaaaaccatgtacacagacgcaatttttttaacatcatcatatactttaaaa

SEQ ID NO: 334305 - DNA, 265 bp, Zea mays
gtggtttaacagttgcagcaacctgtggccattacttttctggcaacgcatatgcaaggcgcgtgggggagttcctgaagaataacaagaatgttgttgtgcaaactagacatatgaagatcaattctacaccaccagtgtctgagctagtgcatctcacgcctgccagagctccatctcctgatgaaagacatgtgcatcttttgatataatgatattcatttaaacactcgtctctcttgtagtatgtataaaattaacttat

SEQ ID NO: 334306 - DNA, 485 bp, Zea mays
aaattaataaataatggaaatagtttttttaattattatttattttattttatttttatattttataatatattaatatttttttataattaaataaattaatattataattatttttattattttaaaaatattattattataaataaataattataaattaataatttattaataattaataaatatttaataatttataaataatatttttaattattttatatttaattattaatttattattaatttataaattataattataattaataaaaatttaaattaattttattaattataatatttttaaaattttatattataatatataatatttatattttatttaaatatttttactattataataaaaatttttaaaaattatttaaatatattataactattaattatattatatttaaaaaaattattttatttgatattaataatatttatataatatacttataatatatata

SEQ ID NO: 334307 - DNA, 184 bp, Zea mays
catcaaaaattttatttttctctaacgatatctcaactaccgcggggtttataaccaccgctggatctttaacaccttgactcaaggattgactcctctggaatacaaaagatataactctgctggcctggcttgccattctgatgctgacgacgactccatcattgttaagcaagttgaaaag

SEQ ID NO: 334308 - DNA, 284 bp, Zea mays
tcttgttaaaaaaaaaaaaaaaaaaaaaaaggggaaaaaaaaaaaaaaaaaaaaaaaaaaaaaaaaaaaaaaaaaaaaaaaaattaaaaaaaataaaaaaaaataaataaaaaaaattaaaataataaaaaaaaaaaaaataataatatattaatatatataaaattaaatggggttttccttttaaaaaaaaaaaaatttcatatccctttattattaatttaataatttttttttttttatatataataaaatattttgtgtgtctttttaaaaatttcttt

SEQ ID NO: 334309 - DNA, 288 bp, Zea mays
tgccactcgttcgacggcgtcgacgagaagtgtctagcccctagagcgggtttagttagaggcgtacgggctgtcgttctcgtcggcggcggcttccattatcagtgtttgcgagagcactaccttctgcatgtgtccctagcttttcactctttgcgcgctgtctcgctactccttgtaacatctttttttgtcttgggcctgcacgtttttttcttgttttattttttttttgttttttttagtttttatttttatttttattttatatttatttttttttttttt

SEQ ID NO: 334310 - DNA, 344 bp, Zea mays
tccgtaattcccgggtcgacccactcgtcctaggtatttgtatatccaatgaggggttttgttttcaaacatcaccgcgattttctgggaggggggttacacacattatgaaggactacttcttgtcctgcacaaatcttttatacttaatggctcgttcaattctgctccaaatcaagtttatgcttacataatctatttttactatgtatgttttattcttccacatacattggttttgctttcaattttatgtttttttctttatactaatattaagttcagttcttactgtatatttcctttttttgtaattactaaattctttgttcctttttttattt

SEQ ID NO: 334311 - DNA, 264 bp, Zea mays
  unsure (1)..(264): unsure at all n locations
acggaanaaaatgaccggggggggcgccacctcccaaagaggggtatccgaccgtcaaaaatttttttctaagggcatggatatgaaccaagcgcgggtgtattttaagagatcagactttgactttccacaagaaccagcaaacttggcaatgcgttgctcttatatttttgaaagagattaactctgtaacgcgtgccgaactcaagccattctgtttcgaggtagtaacaaaagacaagacatactacatctcttgcaaaa

SEQ ID NO: 334312 - DNA, 398 bp, Zea mays
gaggtggtctgcgagaagcattaacatgacatgtgggaaaggggatctgacatacatatgctgataaaggaaactagagaaaagatggcgaggaccttgggtatgatagtagaagagactgaatctggaacttaagatgattgcaactacaaaacagttaattagggtcattcatccaccatattgttatgaggtacccaaggtgacaatggcttaccagtagttggatcttgcaagttggttccagtgccatattgcgcaagactactgcgactaacaactagagggaatgcggtgttaccttcttctctggatggaagcattactatttgttgttgtgctgagattgcattgtctgcgatggatgtacagtacaggtcgcacttactgaaagcttc

SEQ ID NO: 334313 - DNA, 88 bp, Zea mays
ctaccggtcctaattcccgttcgaccactcgtccgtacttgtcaattagaagcatacaattttcttttttctaatattaatttacata

SEQ ID NO: 334314 - DNA, 178 bp, Zea mays
cacccaaacaccaacaggaacatttatgataacccgcccaagggagaaaaaaaggagggggagagggaaacgagcaggaaaccgacaaaaggtgggagagaaacaaaaaaacgaccaagacgaagcgagaacacaaaccggacaaaaaaaaaggaacaaagaaacgcccgaaaaagaa

SEQ ID NO: 334315 - DNA, 274 bp, Zea mays
ccacccaaacaccaccaggaacacccaacagaaccagcccgagtggaaaaaacagcgcgggcagggggagccgctacagaaaaccaccacccggtgggatagaaacaaagcacgcgaagacgagcgagaaaacgggcggacaaaaaaaaaaaaaccacgggacgcgcgaaaaagaaaaaagccacggcgcacaaggaacagaccacacagcaagaaatacaaacggggccgccgatgccagcaaggaaggcaggaaaacacgacgacgcaagaa

SEQ ID NO: 334316 - DNA, 167 bp, Zea mays
  unsure (1)..(167): unsure at all n locations
cggaatncccgggtcgacccacgcgtacgtagagcttctagctataatcctaggattgattttagctttatgattgttcatgagaggaccatggcaagagggataccacaaccgtgtcgtgtgcaacatgacaaaccattcatagaagataccaatagggacatgct

SEQ ID NO: 334317 - DNA, 295 bp, Zea mays
accggttcggaattcccgattcgaccgcacgcgtcacgcatacaaagacattattagactggttatggaatatattatactctactcattgccacttacccgggttggggggaatgccctctgatcaaatccttctttgccctgtacatgttttacgaccagattcgttaattggaggtgcttattatcctgtgacaagccttctcctttattatccttacctacttcgtcagtttatctttattggttctgtactgtacgtggccttagttagaggcgtttcccactcaccttt

SEQ ID NO: 334318 - DNA, 141 bp, Zea mays
attttatttcgacccacgcgtggcatattatttcattcatttcctaacatacatcttatctgttaatacctaccaacatataaccatcccgtggatcaacatccacccttcgttcctaaataacctaaccatatttataac

SEQ ID NO: 334319 - DNA, 63 bp, Zea mays
ggtggagccctcttttagatttcttatgtgttatagttcaataataaagttttttgtgtggag

SEQ ID NO: 334320 - DNA, 340 bp, Zea mays
aggacattattcgactgggttgggatcatatatacctacacattgccgcttaccagggctggggcgagtgccatctgagcaaatgcagctgtgccctgtgcatggttgaacggcagatcgtgataatggaggggatcatgtgcctgcgagaggccgtctcctatactatgcttacctacttcgtccattaatacggcttggtgctgtaccgcacgtggcccaaggaagaggcgagggccagccgtcattcacgccctgcactgacatagaagaggtgagcgatgtgtaggattatcgcatgctttggcggccttgcactggcataggatttgtctagggc

SEQ ID NO: 334321 - DNA, 325 bp, Zea mays
atccattctgcatgctaacgttttatatcttctccccgcctatggcactactgggcttaacggcaaactacccaaggctgatgcattaacaacaacaccaaagatctccgacatggttttactggcaagcatcctacttgacacttacaccaagtctttcacaccctcacaaacattgttattgctataccccactcgatggcctctcaaactcacgttaagatacatgttttcgcttataacacagatgttgtcgaggataccaacgttatcgctatcgatatatacaaatccactcgtgactcttctaacaatatttattgag

SEQ ID NO: 334322 - DNA, 284 bp, Zea mays
ttcctcctagcacagctagcgcttgctccctttcgtctgagatcatgacttgcgggagctgggagtgcatctgcggcgtcagcttctcctgctgcagctcatgcaactgcatgttccttgacgtggagaccgccgtcgtcagcatcatcaagaccatggttcttgctgtgccgaccaccaaggccagcgctggcggtttctatgcggtcacctagggcggtggcttcgactgcaacacctgcaactgctgtaccagctgtgctttcttctgttctagctgcaac

SEQ ID NO: 334323 - DNA, 354 bp, Zea mays
gggcagcgagaagcggcgaccaagtgcaagattcttttgtttgattcgtatcctttgtttttgttgtaacttctcaagtttttccgttctgcctggccaagtactagcgtcctgctcttctcccaagattgggttgcattgcatgtaaaaaaaaaatgtaacgccggagcagcgacgctttgtgggctggcgaacaggtgtggtatgcctacaatacaaaggctagcaagcagaactggctgggtaaacacacagctctgctttcttcttcttcgacattttcgcaagttttttttgtgtgtgtgtcctgtaaacatcaaggtctcaataaagaaagggaaccgctttttttgt

SEQ ID NO: 334324 - DNA, 100 bp, Zea mays
ggcacagcacataagtgatatacacataacacatgaacggaatgcctctagctccgttttacaggtgtacgcgcatttctaagtaagcttatagttcttt

SEQ ID NO: 334325 - DNA, 120 bp, Zea mays
gccagggattttcttttccccggccagttttgaggcttttcagcgttggaactaatgacgacttccttccttgaagacatcatattaattgccctaatcagctatctagtagttaattat

SEQ ID NO: 334326 - DNA, 314 bp, Zea mays
cggacgcgtgggtgtaaactgaacaagaatgcattgtctttagccgctccgcgatcacagtacaagctgactacggctgctcttcctccaccatgttgatcacggcccgcgccacctcgacgctgtcgcaccctgcagcgttcacgacgcggcaccgctcttcggtgacagctccgcagcggcggacgttgacggccctgcacagctcgaccttgacggtgccgcaccagtcggcgcgcgcgggcttgcaccgggccaggcgcaccccgtcgaagcttttgacgttagcgcgccggcaccgcgtggcgcggagc

SEQ ID NO: 334327 - DNA, 243 bp, Zea mays
aattttatatttttgaataaatattttgaataagataatggtcaaagttttttgaaaagaatcaataatgccatatttttgtgaacggaggtggtacctgtgctttcatcagtgatatgcttggcggtgtgttttcattttgtatgtggttacattaggccaatgtttccatagcatgtatatgcgcggtcgcaaacgatagtttcctgaatgagtaatgcgagaacatgctgtaattccaaa

SEQ ID NO: 334328 - DNA, 306 bp, Zea mays
cccgacgcaagaacgtcggaggcaaagtccttggtttcttttattaattaaagggtcgtccgagtttcttctattaaatggtgggtcgaccgagtttttgtttttgtttttggtctgaattgaatagagtgtttgcttcgttaagactggaatgtgttatgtgcctttgttaagactggatcactggaatgtgggaatctttatgagtgattcggcatgtttcttaatataaaaattctcttttttgtttctaataagtacttttcaacatcgttttttattttccattttcttgtttattttttt

SEQ ID NO: 334329 - DNA, 249 bp, Zea mays
  unsure (1)..(249): unsure at all n locations
cgaattcccgggtcgacccacgcgttcgngcacgcttacgctcacgcatgctgtaatgcgtctcgcgttcggttcgctgcgacacttcacgagatggagaaatggatccccgatgagtctggtggtctatctgcatgagggacgcaaacctgaggaggccgtactctatcaggctcttgccaacctcgaggcgcataatgaggagggtgtctagggcctcgaagcctacatcttcttgcttagtgatga

SEQ ID NO: 334330 - DNA, 63 bp, Zea mays
cgggtcgacccacgcgttcgccaatgcatgcgcttcttgcgattcgtcgtgtaaaatcagggt

SEQ ID NO: 334331 - DNA, 316 bp, Zea mays
aggttctccggggttcggcttcgtgggtgagcggatcgagatggccgcgtcgggtgttgagggccgttgcttcgtgggcggcctcgcctgggccacggacgaccactccctccacaacgccttcagcacctacggcgaggtcctcgagtccaagatcatcctcgatcgggagacgcagaggtcccgcggcttcagcttcgtcaccttctccacggaggaggcgatgcggaacgccatcgagggcatgaacggcaaggagctggacggccgcaacatcaccgtcaacgaggcccagtcccgcggcggtcgtggaggc

SEQ ID NO: 334332 - DNA, 441 bp, Zea mays
cagaaacacaccaagcgaagcacattagcaacaacctaacaacaatggctaccaagatattatccctccttgcgcttcttgcgctttttgcgagcgcaacaaatgcgttcattattccacaatgctcacttgctccaagttccattattacacagttcctcccaccagttacttcaatgggcttcgaacacccagctgtgcaagcctataggctacaacaagcaattgcggcgagcgtcttacaacaaccaatttcccagttgcaacaacaatccttggcacatctaacaatacaaaccatcgcaacgcaacagcaacaacaattcctaccagcactgagccacctagccatggtgaaccctgccgcctacttgcaacagcagttgcttgcatcaaacccacttgctctggaaacgtagttgcaaaccagccacaacaaca

SEQ ID NO: 334333 - DNA, 64 bp, Zea mays
  unsure (1)..(64): unsure at all n locations
ggaaaaaaaaaaaaaggaaaattttaaaatttttttataataaataaatataaggggtanttgg

SEQ ID NO: 334334 - DNA, 325 bp, Zea mays
agtgagcacagctcgagccatctttcggagttctcaggcactgcaccacctcggaagccatggctgctgcttctgcctccatggacaggatctcccagagggtgtcgtcacaggaggtcccgaccgacctcaccgaccgcatcggcgactgcgtattcactctacacaaggcggtgatcgtgcccaagtgcggctacatccgccgggccggggcggctagccagacacaaggcccggagggcggcgccgtacagctggaactactcacactgacgatcggcgctgtcgcctatcacaacgaggctcgctgttggtactgcgacag

SEQ ID NO: 334335 - DNA, 256 bp, Zea mays
cgggtcggcccacgccttccaaaagggttttgttaccttgtaaaccaactatggttttatttaacaatggtaaactgaccggggccaaagtgctccggaattaaaattaaaaccgtcctcctttaaaaaaaaaaaaaaaaaaaaaaaaataataataattattaaaataaatataaaatatattaattataaaaaataaaaatattaatattttataatataatatttgggggggggcccttttaaaggaataaag

SEQ ID NO: 334336 - DNA, 445 bp, Zea mays
gtcacatagatgcagttgatctcagtgccctggattgccctctctgaaaaggaagtgatggacactattgcatgcctcccatccgacaaagctaccgggcctgatgtgtttactgggaggttttataaaacctgttggaacattattaaggtggatctaagaggttttataaaacctgttggaacattattaaggtggatctaatggaggctctggctgtccttcatcaaggcaatgctcaaaagctttggcaactaaattcgtcctatctcatttgatccctaaaaagatggatgcttcttcgcctggtgatttcagacctattagcctaaattggtcacaaacatgcttgctaatcggctgggccctcgcctgcatgagttggttgcagctaatcaaagggcttttgtcagaggaaagtcaattcatgataattttatgctag

SEQ ID NO: 334337 - DNA, 435 bp, Zea mays
  unsure (1)..(435): unsure at all n locations
tctcgctctggcttttgttgttcaaggctcatagcatgatgatcccctcctctccatgactccgtcgccatgggcacgtatagctctgatcagcttcaaccatcatggggagtcaagagtcggagcaggccaaggtgctcccgggaaccgactgcccgcagcagccaccggcgagcaggacctggcagaggaggttcgacgatgaaggcaagaacgtcgccatgttcagcatgaccatgagcgacctggtggaacttatgcccttgatggtcaaaatactcaagctgcacgtggaagaaaacgccgaaggccgagtgggttaccaaactctatctaggattattgcgnttctttctctctctctctctctctcttggcaacacccagttcatgatcatgtttcagtgagtgctgaaacatgactaaagcatgact

SEQ ID NO: 334338 - DNA, 413 bp, Zea mays
cgggtcgacccacgccttcggggacgcctgggccccttccccatcttgtcgagggggaggccaattccggaacccgccgcctaattcaatggggcccaaaggccgggaggaggccggccgccaggaacctggcgaggaagagcccgccgccgaaaaaggcaaccgcggggaggaggccaagggttggaaggcggttcccggcggcaagtcccaagcaaggggggtggcgaggaggaaggggaggaggaaagaaaagaagtcggggagacgtacaagatcacatctttaagtgctgaagcggtgcacccgacattgcattcgtcagggcatgtcatatgactcttatcacacatttcaaagtgcggcgagcgcagctgccgacacagagcacatactcgggacaactcgtgctg

SEQ ID NO: 334339 - DNA, 462 bp, Zea mays
cctcgccaaaggggcccttgttttggttggtttaatgggtcaaaaaatgaggaagaggaccaccctactggtaaaaaacatgaggggcatgttctaagtcggggagaggcgagcccagtaaatgggtggctgataccaacctgacatggtccatgatgctccactaagatgcagaagtccagtgctgtattcttggtgtcgctgaaaccaaaaactaactttcagaagccttttttgtgttttgacacgtctagcagtctagcagaactgcagaagtatataacaatatagaacgtgcgcttgatgagcgtaagtagagcatgttccgctaatttaaataagagcctttgactgaaagcgtgacatatattttggaaactgagaaaagaagagcttaacttcgattgaagcagtgacgtaattttagaatatgatacgatgtttatcattcaataatatagg

SEQ ID NO: 334340 - DNA, 235 bp, Zea mays
agccatggcgggcaccttctgctttcttcttcaccagtcaaccgcccgcctcggcgcgtcgacgcgcctggccgccgccccgtcgcgcagtgcccagctgctcgtctgcaaggctcgtaagcaggaagccgcctgtggaccattagacgacgtttttgcgccgtgccgtgctcgtgcttctcgccggcgttactgtcgccgtcggcgccaaggtgggttccgtcgccgcggcata

SEQ ID NO: 334341 - DNA, 301 bp, Zea mays
tccacgcgtccgggttgacaatttcttttatttctattacttctacaacaatgaggcttttggagtttattgttggggaacccgcaacttttaatactcttagcttttagattctttggttgacaagtacattattataattctttaaacttacttaccgtacctattcccactgtctgtaaaacataaagtatgcgagacgctatctttctttttaccttacctactttttacttttctcttctcttgtaccaatttttaatatttactaccgtttaatttattttatttatacaattca

SEQ ID NO: 334342 - DNA, 347 bp, Zea mays
cgcgatgctgggctggcgcttaatgtctattgtcttcattgacggttaacatgtatggaggaggaaccttgtatgccagttgaaggtacttgttactttatcacacctcttaattcacccaactatatggaccgctatgcagaaatctttgctttctacattgaaacctatacataaatgttcaacactaagacttgcctgagctttgctttacgcatcttgtaccatattgatgcaaatttgcggttttaatcgtctcaagtctttaacaatgtgaatttgttgtaagggaagccaactgtgtacctataactaactgatttcacgaattatctaaacagattgct

SEQ ID NO: 334343 - DNA, 378 bp, Zea mays
ccggaattcccgggtcgacccacgcgtaagatcctgagcatcattttgttagataggatgctcttttcctattttcctatgagtatcctctcacgggggaaggcatgttctggtgtaagcgtgcgcggatccatctgtagacctcataatgttgatacaatttacttatgtccctaggaggcgtagctaaactcattttatacactccagagtgattaccatatgttgataaggcgacagtaactataataggtgatattcaactttacatagttggtccataacttgggataaatcatcaaagtgtggctgaagctgtccgttttacgcatttaatcaaatctgcggtccaactgtcacaggcaaggttgataacag

SEQ ID NO: 334344 - DNA, 216 bp, Zea mays
  unsure (1)..(216): unsure at all n locations
acccacgcgcccgaccgacgggaggacgagacagaacaacggggatttanacgacgacagggaaaagagaagacggggcaagacaaaaaggaacaggggggcaggaaggaacccaaagacaccgcacaaggagcaacgggagacaacagagacgaaccagcacaagacaaacaaagacgcacagcagaggcaaagcaggcaagacccagcaacaca

SEQ ID NO: 334345 - DNA, 276 bp, Zea mays
ggcaacactcaaaacctgatcacaggatgcattttttataattaccttgtttacaccaatttggtgggcggtggctaaccaaacattcttcacacttacaacatccatgtcgggtcaaatttcgagcgatacaagtgaatttggaaccgcagcactcaacaaacattccgggagaaaagccagcatcttccatgttcttttttttttgctgcgaccaccaccccttgggggcacaacagtccacccattcggcgttttgagtttgcttggggggcc

SEQ ID NO: 334346 - DNA, 411 bp, Zea mays
tcccggttcgacccacccgtccgaaaaaaaaaaaaaaaaaaaaaataaaaaaaattttttttaataaaaaaaaaaaaaaaaaaaaaaggggggaaaaataataataaaagaggaattcttactatttttataaaaaaaaattaaaaaaaaaaataattaacaaatatatatggcccccctttttaattaaacaacttttttttcccctcttatccaaatattaactttttttatttttccccctatttcaatatattttcccgttttttaaaaaatctatttttgaaaaaccccttgtttccccaattttattccctttctacatatttccccttttttcctcttttcttatttctaaaatctcccccccttttccccttcccaaatatttgctctttttatatttttttt

SEQ ID NO: 334347 - DNA, 249 bp, Zea mays
gcaatagcactgggcgccgccggcacctggcctgaggccgtgatccagtgcctcctcttcctgctcgccgctggcatgctcctcgcgcttcactccctcccccgccgcgccgcccttcggctgcgccgctccggcgccgccggcggctcctacgcggcccagtcgcgccggcacttcgctcagggtgcccagcttctcgcccgcgcgcgcgctacggcccctatgcccccgtgcccgctcgtccgcgcg

SEQ ID NO: 334348 - DNA, 410 bp, Zea mays
taaaaaaaaagaaagaaggaaaaaagaaaggagggaagagaaaaaaaaaaagaaaaagaaaaaaaaaaatttttaaaaaggaaaaaaaaaaaagggggtataaaagaaggggggaaaaaaaaacaaaaaaaaaaaaaaaaagaaagaaaaaaaaagaaaaaaaaaaaaaaaaataaaaaaaagaaaaaaaaaaaaagaaaagaaaaaaaagaaaaaaaaaaagaaaaaaaaaaaaaaaaaagaaaaaaagagaaaaaaaaaaaaaaaaaagaaaaagaaagataaaaagaaaaaaggaaaagaaagaagaaaaaaaaaatagagaaaaaaagaaagaaaaagaaaaaaaaaaaatggaaaaaagaaaataaaaaagagaaaaaagaaaaaaagaaaaaaaaaaaataaaa

SEQ ID NO: 334349 - DNA, 87 bp, Zea mays
aaaaaaaaaaaaaaaaaaaaaaaaaaaatttttttaaaaaaaaaaaaaaaaaaaaaaaaaagggggaaaaaaaaaaaaaaaaaggag

SEQ ID NO: 334350 - DNA, 79 bp, Zea mays
cggatttcccggttcgacccacgcttccgcggacgcgtgggcggacgcgtgggaaaaatttttttaaaaagataagaat

SEQ ID NO: 334351 - DNA, 277 bp, Zea mays
  unsure (1)..(277): unsure at all n locations
ggcgcctgagtctcccgccctcgccgggccagcgccacccgggtcgtcctcgtccccggccggcgggcgctcctccagccgggccgtcacgggatacgcggcagcgctggctgacgcgtgcgtccgtgcgggcacgctgcgccgcgccgcgcgccacgcgcgcgcgctcctncaccttnttctccggctagagcggcccctggaagagggcgccgtcgcggtcgaggctggcatgactggcgctgaccagcacctggactcaccgataggcagtcat

SEQ ID NO: 334352 - DNA, 361 bp, Zea mays
attgaaggtggcaggtgctcgccattgaaggtgctcgcgtcccgaacttgcatacgcagctagagaggcggttttgaatcagttttggattttacggcaaggtccaagactttcaccgtcctcttcagcagcagtacaaaaagtgattttaccttttgtctctgaggccttgttttattctagaatttgttgcaaatgaaagatggaccaggacacccattcccttggttggtacaatggagtggttcaagtccaaaatgccaatcagaaggggctttaaatggtttattattcctcgaaaagaaagaacaccatggcacaaacttattttgccattttaatacaattccgtttaagcttt

SEQ ID NO: 334353 - DNA, 421 bp, Zea mays
tcccggttcgacccacgcttccgcggacgcgtgggaaaaaaaaaaaaaaaaaattttattaaaaaaaaaaaaaaaaaaaaaaaaaaaggggaaaaataaaaaaaaaaaagggagaaaaaaaaaaaaaaatataaaataaaaaaaaaaaaaaaaaaaaaaaaaaaaaagggggcggccgttttaaaggacccaagtttacttccccttgtttgcaacgtattagtttttttttagtgtccccaaaatcaaattcattggccgctttttaaaaacgttgtgactggaaaacccctggcttacccaaattaaatccctttgaaaaaaatcccctttttcccagttggcttttttacaaaaaggcccgtacctttcccctttccaaaaagttgcccacccttattggcaattgggaccccccctt

SEQ ID NO: 334354 - DNA, 382 bp, Zea mays
gaacagcctggacgagcacacaagtactcatatttcttttcacgaatatttgatggtcggataggaactttgtgtgtatggcatcggcaatccaaagtatccaatcctgatttcactctctatgcgatagcacgggagcagggttcttgttacgtagacagatggaagtgcaagctctctcgagaaacatcaatggcgagtagaagcggcactaagaagtagaaacatgagtttgagcaatttcacacggacagacggcttgcacacagacaacaaggtggaactgactcaatatgagcatttacaatacaaatgtttaacgaaactctgatcttgaataactgatggtgcattcctgatcttcttagatagtctgcatgct

SEQ ID NO: 334355 - DNA, 125 bp, Zea mays
cccacgcgttcgcaacgaagtgcgagcgatctttcgtccacacgactcgaaccaccaccaccggggatcttccgcaccactcgcggggctcatagcgatggtttcgctcaccatgatgtcgtcct

SEQ ID NO: 334356 - DNA, 446 bp, Zea mays
aacctgctccagtcactaattgggctctctctttccttcgtttgccatttttatttgtcaccaccagtgcccgctcttcagcaagtgctcactcaccattgacactgtcaccaggcccgacaacggttgctctgaaaatgtcagttctctttgaccatcaattttttcttcttcttcagaatccactgtcaggaaagaaagaaataaaaaaaatgagaaggtcatcaataagagcgtgctagctaatgtgcgtgcatacaggcgcacggtttgagcggcgagcagttagccgcgagagaagtcgagatcatcgacatcgcatccgtgtcgcgggactactggagcaaggcgatcggtgctccgagcgtcgacctgactgccttcaagtcacagcggacagatcgaggcccccttctcaagggatggatggactcgtgccatccggt

SEQ ID NO: 334357 - DNA, 376 bp, Zea mays
cggacgcgtgggcggacgcgtgggcggactcttgggcgggttcgtgaggttctccggggttcgggttcgtgggtgagcggatggagatggcggcgtctgatgttgagtaccgctgcttcgtcggcggcctcgcctgggccacggacgaccactccctccacaacgccttcagcacctacggcgaggtcctcgagtccaagatcatcctcgatcgggagacgcagaggtcccgcggcttcggcttcgtcaccttctccacggaggaggcgatgcggaacgccatcgagggcatgaacggcaaggagctggacggccgcaacatcaccgtcaacgaggcccattcccgcggcggccgttgaggcggctgcggtgggta

SEQ ID NO: 334358 - DNA, 144 bp, Zea mays
gattatgggtgaggtgaatttttagtttctaaacatttttttactttatttagatacttgagttcaaagataaatatttctcatttaaataatttaaaaatattttttattacttttttaatttatataattatattttaattt

SEQ ID NO: 334359 - DNA, 354 bp, Zea mays
tccacgcgttcggaacaacaaagcgagggaagctgtgcagaaagcctttggaactgggcggaacagcaaagggggcaacacaggagaattccatcgccacaatggtggcagccatggcaaggacccctacaagagatctgcttaaccttgtgtcggtcgaggctcgtccacattgatacacctatatcgtgcctacacctcaactaaaggagagtgtggtgatctatccgtgtactggaaattacttcacttgtggccagcgctatacattcattatcttgagctgcaggtgttcctggtcagctggtatgtacacacactatcattatactgctgcagaacttcattgtaaaa

SEQ ID NO: 334360 - DNA, 73 bp, Zea mays
aataatgtaaaactccagtatcatcatgagaatgatgctgattcatctagtggccgggttgcgtggggtctgt

SEQ ID NO: 334361 - DNA, 465 bp, Zea mays
gtggaatccagtagcaacaatagagcaacaatggcgaccaagatattttccctccttatgctccttgctctttctgcatgtgttgctaacgcgacaattttccctcaatgctcacaagctcctatagcttcccttcttcccccataccttccatcaatgatagcttcagtatgtgaaaacccagctcttcaaccctataggctccaacaagcaatcgcagcaagcaacatacctttatcacccttgtttcaacaatcgccagccctatctttggtgcagtcattggtacaaaccatcagggcacagcagctgcagcaactcgtgctacctgtgatcaaccaagtagctctggcaaacctttctccctactctcagcaacaacaatttcttccattcaaccaactgtctacattgaaccgtgctgcttatttgcagcacaactattaccattcagccagctagcta

SEQ ID NO: 334362 - DNA, 76 bp, Zea mays
acgaatcatgttttcatggctgaaacaaatttcagaataaaatccattcaacaaaagaataggtacaaataaataa

SEQ ID NO: 334363 - DNA, 69 bp, Zea mays
aaaaaaaaaaaaaaaaaaaaaaaaaaaaaatataaattaaaaaaaaaaaaaaaaaaaaaaaaaaaaagg

SEQ ID NO: 334364 - DNA, 62 bp, Zea mays
ccggaaattcccgggctcgagcccactgcgtctcgaataaaaaaaaataaaaataaaaataa

SEQ ID NO: 334365 - DNA, 53 bp, Zea mays
aaataaaaaaaaaaaaaaaaaaaaaaaaaaataaaattaaaaaaaaaaaaaaa

SEQ ID NO: 334366 - DNA, 384 bp, Zea mays
gtgccggtccggaattgcagggtcgacccaggcgtacgccacgcgtgcgaagagaggagggatgcatcacccaatagaggctcaagtagtctgaccacttaatagaaacgggggaccactagagactgctcactcttttttcttgatgtctggaactaggtagggggataaaacttacaatgagtgttgccttcgtatggccgtgagatgattgtatatacctcctgctgcatatagctcgcgtcaatggcatcgcagtatttggaacgtcgcctgactagcttaaggtggcgtatgcacagacatctaataaaaagcagctactgtcttattactgaatgacacagaagcttttcctccagatcgcttgtcacaaggatattc

SEQ ID NO: 334367 - DNA, 466 bp, Zea mays
cccacgcgtccgcatgacttgagcatgctttctaaattgacatttttggtgtttacttgggctaaaaactaggattcttgcatttttctgccatgtgctgtttacaggtgaaattgtgttgttcagaaacaaactttggcatccgtttctcattctcctaactgcatttacatgtattcattttccttttggattgtagctgaaagcagtcctttcccacctagatgaataccttaatagattttacaatgttttgggagctaggaattgatgatacatccagaccttggtagttttaacaaggtcttccacacatgttctgatcaacaatcaagatggtagcactgtgtcttctatgaccacaaaccaattcttgtgttcccttgacatcgataacataaacatagttgaattttgtcactttgtgaaagacatcaatataatccacatgggaaatttcttaatc

SEQ ID NO: 334368 - DNA, 303 bp, Zea mays
cccacgcgtccgaagaaagcaaaagagagtcatcgactctcaattttattctctctacgctggcttttgcctgtggcaatgaatagcgcattagcatcatagaagtattagcttggtcaatggaagttgttcatgcgcttcttcattgctgaaagtgttgtcatcttgtcgaactcacaataagcttagataagtgctgggtttgtgggaaaaaaaaataattacattataatattaatacatttaaatttaaatataaactattagttatttcattctctgtgttgttttgtgtggttaagt

SEQ ID NO: 334369 - DNA, 272 bp, Zea mays
caccagtggagagggccaaagaagtgaatgcagtgatcaatgagccactaaagctacaagaaaaccatacacacatgtctgttttgtgagaggaaccaaatgtcgatgtgacgttttcatttgatttagtaggtgtgctttctatataagatagttcgctaggtgactgcatcaggtggtgcgtaaaaacttagcacattggtaatgtataggagttggcccatatgtatgtttgattgtggttggtgagtttagtattattttgaaattta

SEQ ID NO: 334370 - DNA, 268 bp, Zea mays
attcccgggtcgacccacgcttccgtacatgcatacagggacaaataagttttttttgtcatcaatgagccactcactttagaagaggtccatacgcacatgggggcggttcgactatttcccaatttctaattcacctactcatgtcatttattattattactttctatattatataatactctatttcatctgtcataaattgatctttaaaacttaactcatctgtaatatatatgttttaactccattttttattttttatttt

SEQ ID NO: 334371 - DNA, 112 bp, Zea mays
gtaagttttgctgccgcacaatggaattgttttgatgaaggctggagtgcctactatgctataagcccttaaggccatgttcgtttgatcccatagggattgagggggattg

SEQ ID NO: 334372 - DNA, 381 bp, Zea mays
aaaaaaaagaaaaaaaaaagaagaaaaaaaagaaaacaaaaaaaaaaaaaaaaaaattaaaaaaaaaaaaaaaagggggcaaaaaaaaaggggaaaaaaaaaaaaaaaaaaaaaaaaaaaaaaaaaaaaaaaaacaaaaaaaaaaaaaacaaaaaaaaaaaaaaaaaaaaaaaaaaaaaaaagaaaaaaaacaaaaaaaagaaacaaaaaaagaaaaaaaaaaaaaaaaaaaaaaaaacaaaaaaaaaaaaaaaaaaaaacaaaaaaaaacaaaaaaaaaaaaaaaaaaaaaaagaagaaaaaaaaaagaaacaaaaaaaaaaaaaaaaaaacaaaaaaaaagaaaaacaagaaaaaaaaaaaaaaaaaaaaaaaaaaaaa

SEQ ID NO: 334373 - DNA, 302 bp, Zea mays
ccggaccggaagtcccggggcgagccacgcgtacgaccttctggtcggcgccgagtaccattaagtattcatgttccacaaggagattcttcgggacgacctccacgatgatggcgggagaatactatctctgatttacttcaagctgctatggctggtgatggagaatgacaccatcaagtacttgaatctgttctaagataaccaaatcagtaactcaaatatacaacaatgcatacagctttgcaatcgttaaataatggatgaaagacgaattaagcaaacatcagtctaaaattcat

SEQ ID NO: 334374 - DNA, 262 bp, Zea mays
cggacgcgtgggaaaaaaaaaaaaaaataaattattaaaaaaaaaaaaaaaaaaaaaaaaaaataagaaaataaaaaaaaaagggggggaaaaaataaataaaaaaaaaatatctttaaaataaataaaaaataaaataaattatattaatctcttatataattataatttatctttatataatcggttagtgatttataatatatataatatttttattacttttttttttttatacaatttttttttttttattatctta

SEQ ID NO: 334375 - DNA, 454 bp, Zea mays
ggttgccactgttgttgggcatgaggttgggcatgctattgcgaggcactccgctgagcagatcactaagaacctctgggtggcgaatcctgcagattgtcatcctgcagtttatttacatgccggacttgataaatacggtgtcaacactactcctcaggctacccttctcacgaaggtaaggcttctgtatttcaagttgctcattgtgatgcatcctagatgtgataagcttcatgttttactaaaggtggctcacctaatattctgaaacaagtaaaatgcaaaattgaactgtataagtagacctcaatgttgctgtgtcatgcgtcaggtactcaggtcagattccttcaagtagacacacaacaaactagcaggggcatctaaatatgtcagctcattgtatggttgtatcataggtcgatgaacatacagacaaagatatcaaaac

SEQ ID NO: 334376 - DNA, 123 bp, Zea mays
  unsure (1)..(123): unsure at all n locations
ccggnccggaattcccgggtcgacgccacgcgtccgcccacgcgtccgcggacgcgtgggaaaaaaattaaattaaaaaaaaaaaaaaaaaaaaaaaaagaccccgcccgtccggactagtgg

SEQ ID NO: 334377 - DNA, 321 bp, Zea mays
aaccacatatacatatatacaatacatatcccttgtgattacaagcaatatgattaatcataacatgtccgcctgcgaaggctgatgaattatcctatctaacctgaccttcatgccagtggcttgattcattatgaaaacaacctctaaccaagggcacaggatgtgatacagcctacactgactgggctgaacattactggacttcagaagccagagacatagattatacagagtctgcgcagctgggaaatcttacacactgtacagctttactgtgaggaacataagagcatggtcaacgacacagtccagcatata

SEQ ID NO: 334378 - DNA, 58 bp, Zea mays
cggacgcgtgggtactgctccccctacttttttttttcgccatatcgaggttctcctg

SEQ ID NO: 334379 - DNA, 61 bp, Zea mays
ggggcgccaagaaggtgcgccggatcaagaagtgaaggggggaacaaggatcggatggtta

SEQ ID NO: 334380 - DNA, 372 bp, Zea mays
cccacgcgtccgctcgcggtggcgagggagaaggcgttgggggctactaaggaaggcgggtcttctgaagtggcattcgcggaggtcgtgtggagatttggacaagagcagctctccgtcggtaaacggagaatgcgattgaattgatcactggtgtgctggtgtggcagatggactgcgaacgtatatatactttaggattcaatatcacttagtattttgacagtacgagactaaaatattgcatctgtggtatgggaataaaattggattcaagcagagcgccacttgcgttgcgtgttacaatgtgattgtcagttctaccttattttatgaatcaatccactgatgattgtgaaaaaaaataattta

SEQ ID NO: 334381 - DNA, 395 bp, Zea mays
gttgaagtttaaaagattataccattccacatgttcaaatcgtctcatcctgtattagataagcttttcctttgtatcatttgacatgtttaaaccatctcaatcgatattagataagtttttttttcaatttatactacatctagcctatcatattattcatatacatcaccattccaaactcgatcatttcttatattgcaaaatccaatacaacatatatatatatatatatatatatatatatatatatatatatatatatggggggggggggggggggccaccactattttcctaacctggattcctttttaacctatttttttcattagcccacatgggggggttttaatcttatttaaatatacttttttttgaaaataaaattcttt

SEQ ID NO: 334382 - DNA, 324 bp, Zea mays
cggacgcgtgggggatgatgggttcagccaagacgtgtaccagatcggccttctcctggccgtgatctacttcattgtacagggtctgaaggcgaccctgtgaccggctgcagcctgtcgaagaatgtagcctgtgtgcagtatacatgtatgtaactatgcctagcaacattataaaatacgggcatatatcatcctgccatctgacctgcgacagatttgtgacctttcaccactgctgtcggtgatattagtttggcacgcaagttgccatataaataaaaaaaaaaaataaaatatattaaatattaatattaaattaaa

SEQ ID NO: 334383 - DNA, 371 bp, Zea mays
aattctaaattcaacaataaaggaaaaaaaaaaataaaaaaaaaaaaaaaagaagagaataaaaaaataaaaaaaaataaaaaagaaaaaataagaaaacaaaaaataaaataaaaaaaaaaaaaaaatatagaaaaaaaaaaaaaaaaaaagggaaaaaaaaaaaaaaaaaaaaaaagtaaaaaaaaaaaaaaaattaaaaaaaaaagaaataaaaaaaaaagggaaaggaataataaaaaaaaatataaaaaaagaaaatgagaaagaaaaaaaaaaaagaataaaaaaaagaaaaaagtagtaaaaaaataaaaaaaaaaaaataaaaaaaaaagtaaaaagaaaaaaataaaaataaggaaataaaa

SEQ ID NO: 334384 - DNA, 321 bp, Zea mays
agaaccttaactcaacttacctgctgtttctatcttccatgcagcattcccaccaaagcagcatctttaggatgagctagaatggcctacatttccacacgcattcattcttacataatcatgcagaatcacgtttcttgcattcatcgatataaacgaattcttattatatatctacatcttgctgtaaaaattctgttatctaccacaccacttcaatattttctctctctacacttttggttttgtgttaattctatttactatttttttatttattttatttttttatcatttctttttaatcatatatattttatt

SEQ ID NO: 334385 - DNA, 368 bp, Zea mays
tgtttttttcctgagtagtcttgtcatctgtgcatgtaccttggctatgatctctacagattatatgccactgcaacctcttgaagatgaagaaaacacaactatcaatttcttatatcctctggaacccccgatagtagatgagttcgactgggaaatggatgattacgaggattttgcagatcagaaagtccaagaaggtagcctgcccgagggcgagaaagaaaaattcaaggagttcctgaaggagaaggttagagaaaggaagagagagctgtgacaggcttaaaaaacccaggaagaaagctattgatgatatggatcctgcgatgaaagaggcattcgagaatatcaaattttacaaattt

SEQ ID NO: 334386 - DNA, 414 bp, Zea mays
cacgatctctaatatagaattactttcatgatgacacagatcaaaccagattttctcaagttgttattttgaaatgattaatgagctctatgtatttaccatttgtcttacagagtagccattacaattcttttttgttcacaatataataaaagcatataagaactcttttaacttcaaattttattggctggagaaagttttcacaacaataagcatctcatttgtttttaatattctgatgctacaatattgagacgcttagctctctgctaaatgaaccatttctcttcattctttgttggttcattggatatggtcaggtatgaagtcattttggttcctggcgtgcaatctttgtcaaccatggtaccattgtcatagtccacactcctttgtgtccgtacaggtttg

SEQ ID NO: 334387 - DNA, 344 bp, Zea mays
agcagaggaccggtattggacattatttgctctcgactagaacacaactaaatctgagggaggtgctatatgtgcaacgacagggtgttctaatccagctagcattggtgcgctttggtaatagggatcattattgatttcatgactttttgtaactgaagaccaactggttctaccggctgccgggcagagaaaattcagtaccttaacatactagcacacacgtgacacagggaggataatatagtttacgtcatgattatggatattacatgcatattacacatgtattcaaaccacacatttcacgagtttattgcaagacttgtattcatacgacacat

SEQ ID NO: 334388 - DNA, 442 bp, Zea mays
  unsure (1)..(442): unsure at all n locations
gtgctcagcctcttctcctggcacaacgagaccatctacgtctggacgcacctgctcgggtgcatgctcttcttcggcctcacgctggtgcacctcggccagtacttcccccaggtggctgatctgattgggcatctctcctggccaatctcgaaggtcgctgaaaatgtctccagcaatattggagatgtcctatcaggcgcggccatgttcatccagacgaacccgagcctggcctcgcacggcacggcggtggcgtcgcagacgacgcggtggcccttcttcgtgttcctggcgggggccatgttctgcctgctgagcagcagcgcgtgccacctgctgtcgtgccactcgcaccggctgaacctgctgctgatccgcctcgactacacgggcaatgcggtcatgatcgtggtctncttctttccgcccatctactaca

SEQ ID NO: 334389 - DNA, 415 bp, Zea mays
gctggcttctcctccccctcttaccaagtcctcctcgggttagggttccttagggttttgtggaggggcgatggcggcggctgatgtggagtaccgttgcttcgtcggcgggcttgcctgggccaccagcaacgagtcgctggagaatgccttcgcctcctacggcgagatcctcgactccaaggtcatcaccgaccgggagacggggaggtcccgcggcttcggcttcgttaccttctcctccgagaactccatgctcgacgctatcgagaacatgaacggcaaggagctcgacggccgtaacatcaccgttaaccaaggcccagtcccgtggcggtggcggtggcggcggtggctactgcggcggtcgcggcggcggcggcggttatggtggcgggcgccgtgacggcggtta

SEQ ID NO: 334390 - DNA, 277 bp, Zea mays
ttaataaccggttcgacccacacttccgcaaagagactctcctgatgcttgccttttctcttttataagaactaccatcttttctggggctgctttatttgatacgggaggaggccttcctactatatcctcttctcataccccaacttctgaacttaaacaatattttcccgattaataaaacttttttttacttttaaataatattattttaactacctaaataatatgtattatctatattccatatacatattcttactaactattatttatt

SEQ ID NO: 334391 - DNA, 431 bp, Zea mays
cccacgcgtccggacgggcttctgggtgcctaggtatccaccgcaagccttgacgacgcgccgccgcccgtggaccacgccgcggccgcgaggaggcgccggaggaggagggccaacagggccgcccagctgctgggggctgctgcgggtgcgccgcagcagtggcgcccctcgctcggcgacatctgcgaggagtacagcagcagcaccgacgccgtcaaggtcaggaaggcggcgtcctgggacctcgcccgggcgctgccccgcgcgcacggcggcaagcagtaccggcaccttgagggcgcgtcgtccctgccagcgttcgcgccgacggcgttcctgttctgatcatggcgtcggggacggcggcgactcgtcgtcatccaccacgacgacgacggcggtgaagacaataagaaccaaccaaaacc

SEQ ID NO: 334392 - DNA, 330 bp, Zea mays
accggtccggaattcccgggcggacccacgcatcccgacacccgttccctatccggatgctatccctgttgacggcacttgactgccgcacgacggtgctctacttacccggggctaccgggtgactactatccaactggatgatgatagtagacatgcatcctgacttcaccctattattgctgccccgctacactcggatcgtgctcctactatggagtccatgtggagggaaatgctgaaaatcctttattctgtcttaggcagtatccaggacctggcgcaaaagtcggatccaggtcaactaaatatatggggcattgatcattg

SEQ ID NO: 334393 - DNA, 348 bp, Zea mays
cggacgcgtgggttctcctccccctccggttcgggttcgggttcgtgaggttctccggggttcggtttcgtgggtgagcggatcgagatggcggcgtcggatgttgagtaccgctgcttcgtcggcggcctcgcctgggccacggacgaccactcccttcacaacgccttcagcacctacggcgaggtcctcgagtccaagatcatcctcgatcgggagacgcagaggtcccgcggcttcggcttcgtcaccttctccacggaggaggcgatgcggaacgccatcgagggcatgaacggcaaggagctggacggccgcaacattaccgtcaacgaggcccattcccgc

SEQ ID NO: 334394 - DNA, 172 bp, Zea mays
ctttcctttctcccctgtgctgcgcccctggtgttgtgattgggacctgctgtgtgcttgtgagtgatttttttttttgtagagaaaagaaagaaatatgggaggtttgttttgctctgcaaaaaaaaaaaacaaaaaaaacaaaaaatacaaaaaaaaaaaaaatactaac

SEQ ID NO: 334395 - DNA, 271 bp, Zea mays
gggttgggttttttttttgggggtgggggttttttttttttttttgggaaaaatacattttttgcttaattgcctgcttgcttcattggattttggcaccggggtgggtcgttacactcttaaaaaacatcccctatagttttttttgcagaccataataatttgtttgatggggtttggattcagcaacacaccctttaccaccttttttttttttttttttcccccccccccctgttcccgcttttggggccctttatattttgggttt

SEQ ID NO: 334396 - DNA, 218 bp, Zea mays
cttgaagtatacacacagtagaaactaattaaggcacgtttgctttgctccaggagaccaggagcgctctgatgttgtcgtgttcctcgcggcatggccttctcggcctgttgtactcagtagcgccgcagagtctctctagcatgagacgacctcgaggagtctatgttgtcgtctatggatggaacagtcagcatagaccaaggccgtgacctttc

SEQ ID NO: 334397 - DNA, 51 bp, Zea mays
cccgcgctctgctcctcccagatctagactttctgtgctgaacatggtata

SEQ ID NO: 334398 - DNA, 377 bp, Zea mays
aaaaaaaaaaaaaaaaaaaaaaaaaaaaaaatttttaataaaaaaaaaataaaataaaaaaaaggggaaatattatatagagaaaagtgaaattaaataaaataaacaaaaaatttaaaaaataaaaacataaaaaaaaaataaaaattaaaaaaatgggggggcttttttaaagattcaaatttttcttgcttgtttttgtaacttataattttttttttttggccctttaaatcaatttcatggccctggtttttaaaagggacgctttgtaaaacccttggtttacccaaatttatttgctttttaaaaatatctttttttctacatttgctaataacctaaagggccctcatttatctcttttccaaaaattt

SEQ ID NO: 334399 - DNA, 343 bp, Zea mays
cccacgcgtccgggtgggttggcttctccttcccctccggttcgggttcgggttcgtgaggttctccggggttcgggttcgtgggtgagcggatcgagatggcggcgtcggatgttgagtaccgctgcttcgtcggcggcctcgcctgggccacggacgaccactccctccacaacgccttcagcacctacggcgaggtcctcgagtccaagatcatcctcgatcgggagacgcacaggtcccgcggcttcggcttcgtcaccttctccacggaggaggcgatgcggaacgccatcgagggcatgaacggcaaggagctggactggcgcaacatcacccacaa

SEQ ID NO: 334400 - DNA, 176 bp, Zea mays
cccacgcgtccgggtgggttggcttttttcttctctccgcatcgacttcaacttcgggaggttcttctggaatcgggggcggggtttattcttatctatatgacttcatctaattttaattacccctacttcttttgctgcctcgcctgcgccacagactatcacttcctacacaa

SEQ ID NO: 334401 - DNA, 327 bp, Zea mays
  unsure (1)..(327): unsure at all n locations
cccacgcgtncggctaagggaatagatgcacttggtgtagccacattaagttctgcaacgtctgcagcagcctccagattgccattcggtggtggaccatccccattgacctcactagatgacgaagatgccacaaacttaagaaatctgtatcgcctgctcctacttttatctaaggtttctcagaaggaaaatccatctccaattcctgaatataacagtgccatagagaaggaaggtggtagcacggatgaacttgctcttgcgctgtatggaatgacctctctgccagaatttcttccaggtcttttctgtcattcctgagct

SEQ ID NO: 334402 - DNA, 444 bp, Zea mays
cccacgcgtccgatagaaagcacaatagtgtaccaacaatggcagccaaaatattttgcttccttatgctccttggtctttctgcaagtgttgctaccgcaaccattttcccacaatgctcacaagctcctatagcttcccttcttcccccatacctctcaccagcggtgtcttcaatgtgtgaaaacccaattgttcaaccctacaggatccaacaggcaatcgcaacaggcatcttaccattatcacccttgttcctccaacaaccgtcagccctattacagcagttacctttggtccatttggtggcacaaaacatcagggcacaacaactacaacaacttgtgctagcaaaccttgctgcatactctcagcaacatcagtttcttccattcaaccaactggctgcattgaactctgctgcttatttgcaacaacaattac

SEQ ID NO: 334403 - DNA, 270 bp, Zea mays
cacacgggcgctgcgcacagacacttcaatctgttgcaccaatggcttactaccaggaggtggactactgctcggaggaggtgaggtcgttgtcccctgccggcttctgtcgtcacagtttcggctttcagcactacgttttcaatgagaagttcgaggaggtcgacacggtcttacgcgccggtgccaaccaccacctccaccatggtcaccacggctgtcacggttttctggtgcgccgagaccaggttctaataggacattaacacc

SEQ ID NO: 334404 - DNA, 348 bp, Zea mays
  unsure (1)..(348): unsure at all n locations
taccgcnccggaattctccgggtcggacccacgcgtctcgcccacgtcgtctcgaaaaataaaaaaaanaaaaattttataatttttaaaaaaaaanaaaaaaaaaaatgggaaaaaaaaaaaaaaataaaaagggaaaaaataaaaaaaaaaataaaaaaaaaaaaaaaaaaaaaaaaaaaaaaaaaaaaaaataaaaaaaataaaaaaaaaaaaaaaaaggggggggcccttttaagggtccaaatttttcttccgggtgattgaaaagtaatatttttttttttggggcccctaaataaaattaatggggggggttttaaaaacgggtgaacgggaaaaacctgg

SEQ ID NO: 334405 - DNA, 448 bp, Zea mays
gaaacacaccaagcgaagcgcactagcaacgacctaacaacaatggctaccaagatattagccctccttgcgcttcttgccctttttgtgagcgcaacaaatgcgttcattattccacaatgctcacttgctcctagtgccattattccacagttcctcccaccagttacttcaatgggcttcgaacacctagctgtgcaagccaacatgcaacaacaagcgcttgcggcgagcgtcttacaacaaccaattgcccaattgcaacaacaatccttgccacatctaacaatacaagccatcacaacgcaacagcaacaacagttcctaccagcactgagccacctagccatggtgaaccctgccgcctacttgcaagagcagctgcttgcatccaacccacttgctctggcgaacgtagttgaaaccagcaacaacaacagctacaaca

SEQ ID NO: 334406 - DNA, 96 bp, Zea mays
cccacgcgtccgcggacccgtgggaaaaaaattaaaattaaaaaaaaaaaaaaaaaaaaaaaggaaaaaaaaaaaagggggcggccgttttaaagg

SEQ ID NO: 334407 - DNA, 100 bp, Zea mays
ataagaatgaccgatcttatataccagcttctgctaaacaagcacaagattccagatggaaacgaatactggccaactaatccagaagtaagaagctact

SEQ ID NO: 334408 - DNA, 87 bp, Zea mays
  unsure (1)..(87): unsure at all n locations
naaaaaaaaaaaaaaaaaaaaaaaaaaaaaattaaaaaaaaaaaaaaaaaaaaaaaaaaaaaaagaaaaaaaaaaaaaaaaaaaaag

SEQ ID NO: 334409 - DNA, 263 bp, Zea mays
  unsure (1)..(263): unsure at all n locations
aaaaaaaangaaaaaaaaaaaaaaaaaaatttaactttttaaaaaagaaaaaaaaaaaaggaaaacggggaaaaaaaaaggggggaggggaaaatcgggccccccttaaaaaaaaccaaaagctacgaacgcgggcaggcaacgaaaaacctctataaaagggccaccaaaataaaatcaacgggccgcggtataaaaacgcgggaacgggaaaaacccaggcgggaccaaacaaaaacgcctggcaggaaaaccccctttcg

SEQ ID NO: 334410 - DNA, 171 bp, Zea mays
ctgtcatactggttgagtggtactctaccgtacctgcgcgtgggaatcggtcgtctaggtcgttagcgacgcgagcggcggtgacgagcgtgccttctaagagggagagcgggagcactaaggcgaggatgagcgcgttggtgctgggcgggccgcccgtgcgcaccacca

SEQ ID NO: 334411 - DNA, 254 bp, Zea mays
gtctggggctctgaccgccggcaaaccggcaacaaagttggagatgacaaaaatgcttgatcaaaaaatcattttcgcaggcaatatataaaaagatattacctcatagggaaaagaaagtaatataaataactccgttcttttttatttattgtgttttagtataaaaattaaccattagatgataaatatttgagaacagatgtagtattatatttagtattatattgtgaaagtattaactatttaggttt

SEQ ID NO: 334412 - DNA, 254 bp, Zea mays
ctcacgcgtccgcgttccttttcaacggactttgcatttttatcatacacagacttttcttatgtggttcctagttttcgtcaggcgacggcaatactttgttgggcaaagctcgttgccacattctaggcattcttttcttagtggaggcactgctcatctgagttctgatatttttcaattgacaggccacatgcgcaaaggcctaataggagatagaaatatgttactactgtgctatctatcgcactcca

SEQ ID NO: 334413 - DNA, 68 bp, Zea mays
cccacgcgtccgcggacgcgtgggaaaaaaaataaaaaaaaaaaaaaaaaaaaaaaaaaaaaggaaaa

SEQ ID NO: 334414 - DNA, 165 bp, Zea mays
  unsure (1)..(165): unsure at all n locations
caagctgaaaaaggaggagtgcatggagacgtgggagaagcacgccaagaggaaggccgtnnaacgggcaccgtgtggaaggagctggagaaggagaacagtgagttcttcgagacgtacaagagggaacggggagggggaggaggaggaggaggccccaggaac

SEQ ID NO: 334415 - DNA, 122 bp, Zea mays
  unsure (1)..(122): unsure at all n locations
acccacacgtccgnagtcttagaatatgcctttttaatattttaagctctattcacagacatatggaaacatgatgctatacaggaaaacttnnnnaatatgtaatggccctcttgtttgtt

SEQ ID NO: 334416 - DNA, 443 bp, Zea mays
  unsure (1)..(443): unsure at all n locations
tgttgttcaggctccacacttgacagggcacaggttagggcgccaggagacggggagaatcggtcgccctgaaaaaagagcagagtgtnannctttccccccggttcctagttttggtactactacaggctcccgctgcatcatccccaacgaaccagcagagctcgcaagcaacaaaagagaaggacgaagcaggcgcagccgccacacggacacgcagcagagcatcgccgcagcggtccagaggcatgggggccgccgccgccgcaaagcacgccttgcaggttgtcgcggcgggaggagatgctgggcaatcgagcttcagcgccaactcaccccccaccaccggcgccgggttcgtcgccctcgacgtcggtgaagctttgtctctggccggcgacgccggcccttcgggcacgcccattgtgccggcccggacaccc

SEQ ID NO: 334417 - DNA, 345 bp, Zea mays
  unsure (1)..(345): unsure at all n locations
gacccacacggccgccaacggcggcgggcgaggccaagccgggacaaggggaaaggcacgaggaacagagggggaggacagcaacaacaggggggagcaaaannnacaggaggcgggcgccncgngaaccagagcaaaagagcggcngaagacgcagangcaaccgcgcccaaaacagannnccaccgcgnggacggcgagaacgcggagagcgcaccnccaccaaagaagaaggacnacaagcgggcnaaacaacnccggcgggaggaggaagcggaagccaaggaggagaaggcgggagagcaagaagaggaagacgggacgacgaggacgaaaagaaacaga

SEQ ID NO: 334418 - DNA, 380 bp, Zea mays
  unsure (1)..(380): unsure at all n locations
cccacgcgtccgcccacgcgtccgccaagtccgcccatctccacccgaagcccttgtgcaagcctatctgatccacatcgcggacanntncttaccaacttccgcaaaatcatggaattgaagggtcttcgcaaggcggaacaaacgcagctcctggacctcttttctgcattcaaagcctcgcccaaccacgccgggctcgtcgacaactcgcccttcctcaccccgatttctcttcaagcgccaccttcatcaacgggcggcttgggaggtaatgtaagcagcgtgatgggcaacatgggtacgcctgggctagcagccggacgcttcgacgcagctggcttgggcaatatgttggtcaatgcttcgagggattgggt

SEQ ID NO: 334419 - DNA, 320 bp, Zea mays
cccaaccgtgttcccgcgccgcccacgaactactctccggcgctgcccatgacaacggtgtcgagcgcgctctaataagagtgggcggcttcacgcggacgcacgctgtggaacaaaccatgaaacacatgaatctactatcgggtcgactaaattgaatcaactgtgcggctgtagaaaagaatggcacaggaaaaacattgaggttacccaactgaaacgggttggagtacatgccctttttgatagctggaggaatagtaaagagggccgaaccagacgacgtttagaaaagtggcgcaacctgaagggcaaatggg

SEQ ID NO: 334420 - DNA, 326 bp, Zea mays
  unsure (1)..(326): unsure at all n locations
atttcctttccttttgttctcaagtctttcttagaatgtcactcataactagtaatagtatttcttttccttttgttctcaagtctttctaaaatgtcactcataattggtaatagtatttcctttccttttgttcataagtcttctaagaatgtcagtcatagctggtaatggtaatcatggttgtaacctgatttgtagtgagagaccagtaaccatataatgagctatgttcttatgagataaaagctggagacttttttttgnaaaaaaaaaaaaataaaaaaaaaaaataaaatttattaaaaataaaaaaataattaatt

SEQ ID NO: 334421 - DNA, 245 bp, Zea mays
  unsure (1)..(245): unsure at all n locations
cggacgcgtgggcgaatctcgatcttcgccgttggacgagacgatgatcgtctcgagtctcgaacgagccccccgtgtaagctcgagcgntnnntctgatgacgccccccgatggcccgatcacgttcgagagtatgagtacataggaagagtttggagagaaagggttgcattgatcgagatgtacaaaaataattaacttcgaaccaaagaagacttttgctttgtaaaaaaaaaaaataaaa

SEQ ID NO: 334422 - DNA, 487 bp, Zea mays
  unsure (1)..(487): unsure at all n locations
acgccagcacgtaccggtccggaattcccggggccctccattctttctttcactaccactgtttccttctcttttttttttctcaatgcttcatttccttttctggtgggctttcttcctgtctggggggtnnnnnacctgtgcatcaagaccaaggccacagtaaatgatcagtctgctaaaaagcatcagaaggtgaagagcattctttgccaggactgcgaaggaaatggggcaatcgtatgcaccaaatgtgaaggaaatggggtaaattctgttgactattttgaaggccgatttaaagctggatctttatgctggttgtgcagaggcaagcgtgtaatcctatgtgggaactgtaatggtgctggcttcttgggtggatttctaagcactttcgatgaaactgcgcaatagtcatcggtttagcacttttgatggaactgccccatagtcattgggttaatttatggttaagttactttga

SEQ ID NO: 334423 - DNA, 423 bp, Zea mays
tttgacgcgttggctgacgcgtgggaaaattttttttttttatttattttattttttttattgggtttgttttttatttttattggtgggtgtttctatatttttattttatatatatatattaaatttattatattataattttggggggtctttttttggggtttcaagttttttttccttttctttcgatttttttttttttttttggggtcctttaatttaaattatttggccttgtttttaaaactttgtgcttggaaaaattcttgctttaccaattttatttgctttgaaaaattttcttttttttccagtttgtttattatctttaaggtctgatcttatttctttttcataatttttcctattttttttggttatttggtctttccttttattggtcttttatcctgggggttt

SEQ ID NO: 334424 - DNA, 450 bp, Zea mays
tagccttcaaaaaattctggaacgaaaaagtcgaagttagttctctatttagcggattacctttattcttgtattctattaagttatttatcctaaggattttttgctattataaggtataaattctatggacattcgtagtagttttaattcatcgctacgggctaaaatattaattcgagttctagtagtacaggttcacatggccaaccgagctggaaaagctggtgggtatattgcaccacatacgagtagtccttcgcataatgataacacacagcataataatccaagcagtagtttggatcctcctgcttcaccgagattgcaccctgagttttcacactctgattggttactattagcttataaaataagagaaataagaccatatttttatataacaaacctgagtaatattttttctcaaccagaagaattatgctgcgt

SEQ ID NO: 334425 - DNA, 68 bp, Zea mays
  unsure (1)..(68): unsure at all n locations
cccacgcgtccgnaaaaaaaaaaaaaaaaattttttttttttttaaaaaaaaaaaaaaaaaggggaag

SEQ ID NO: 334426 - DNA, 167 bp, Zea mays
ttttggcatggacgtgatgaagaggcttgtttgttgtatgaggaacttgtgaagagccatggaagcatagaagctttttttgtttttgtaatgactttaactctcacttactttgttaaggcagtacatttctagaagaaactttagccattgtctagtcttaaaag

SEQ ID NO: 334427 - DNA, 143 bp, Zea mays
  unsure (1)..(143): unsure at all n locations
cgctgcgcacagacacaccaagcgtcggcaccaaagtcgtactaccaggaggtggactactgctcggaggaggtgaggtcgggggccccnncctcaccggccgtcacggcggctgctttttttatcacggcttcaaggagaag

SEQ ID NO: 334428 - DNA, 436 bp, Zea mays
ccgaatggcatggccgacccagacccacccgtaatgtagctccaactcttaacgtgacgagttttactaggctgcaatggccaaagagagcgactcttctgaggatgaggtggccccaaggaatacctgggagacgtgcctctagagtaatacaagaacgaatagcacattgtgtatgatatcgatggaagatcaagaaacatgataaggaggggcgcattgaggcctacctcaggaacgcacgtgatgccaagaattgacatctcagatgcaaatgtggggagacggtgccttatcaatgacgagtaggttgattctttgctagctagcggcaccattgctcaccacaactggtttgtttgagcaacttaaatgttactctttaagaggattctcatttttaaccacactcttgaagtatcacactagcttttag

SEQ ID NO: 334429 - DNA, 338 bp, Zea mays
aaatatccccaaaccctagctcccgatctcgatggcgaaccctcgcgtcttcttcgacatgaccgtcggcggcgccccggcgggccggatcgtgatggagctgtacgccaacgaggtgcccaagaccgcggagaacttccgcgcgctgtgcacgggcgagaagggcgtgggcaagtccgggaagccgctccactacaagggctccaccttccaccgcgtcatccccgagttcatgtgccagggcggcgacttcacccgcggcaacggcaccggcggcgagtccatctacggcgagaagttccccgacgagaagttcgtgcgcaagcacatccgccccg

SEQ ID NO: 334430 - DNA, 431 bp, Zea mays
gaccaacaagcaacatagaaagtggaatccagtagcaacaatagagcaacaatggcgaccaagatattttccctccttatgctccttgctctttctgcatgtgttgctaacgcgacaattttccctcaatgctcacaagctcctatagcttcccttcttcccccataccttccatcaatgatagcttcagtatgtgaaaacccagctcttcaaccctataggctccaacaagcaatcgcagcaagcaacatacctttatcacccttgtttcaacaatcgccagccctatctttggtgcagtcattggtacaaaccatcagggcacagcagctgcagcaactcgtgctacctgtgatcaaccaagtagctctggcaaacctttctccctactctcagcaacaacaatttcttccattcaaccaactgtctac

SEQ ID NO: 334431 - DNA, 467 bp, Zea mays
aactagcaacatagaaagcacaatagtgtaccaacaatggcagccaaaatattttgcctccttatgctccttggtctttctgcaagtgctgctacagcgaccattttcccgcaatgctcacaagctcctatagcttcccttcttcccccgtacctctcaccagtgttgtcttcagtatgtgaaaacccaattcttcaaccctacaggatccaacatgcaattgcatcaggcatcttacctttatcacccttgttcctccaacaatcatcagccctattacagcagttacctttggtgcatttattggcacaaaacatcagggcacaacaactcgtgctagcaaaccttgctgcctactctcagcaacaacagttacctttggtgcatttgttggcacaaaacatcagggcacaacaactacaacaactcgtgctagcaaaccttgctgcctactctcagcaacaaca

SEQ ID NO: 334432 - DNA, 366 bp, Zea mays
cgtcctcgtacataaccccccaccccaccgcgtacagcgttccctctcgcgccccgcggtgagctacgcgcccgctcgccttagaccatgggcctcccgccgtcctcctcgccgtcgtcgctctccgccgcgtcagcgcagcccacgcccctgcacctgcacctcccgaccaaggcgcccggccgcctcccgctgctccccttctcgcgcgccgccctcccgccgccgctgcgcctccgcattgcgcgcaccagcctccccccgggcacgcccctcccgcgcgcgctcctgccaccaccctccggcttcgacgtcggcggcggcggcgccggctttggcggccatgacgacgacgggcacaaccac

SEQ ID NO: 334433 - DNA, 360 bp, Zea mays
gggctccgtgatgggcgacgaacgcgttctgttcatcatggacgaccacgagggcttggccgactccaagcgcatcggcgtggcctacaacctgcacatgcaaaccaagcatttaggcctcctaaccgaagtgctttttgcctcgaaaggtgatttcacgctcggcttcaccaggcttataatgcaactaccatgacacctgaagagggtatggactcacgtctgcaacagagggcacgcaaggcggtacctcaactgcttgtaccatggactaactgactactatgtctggacatttctgaagatcagcactgcatcaatgagcgatgtccaagggcgcctaattgtggacaagctaat

SEQ ID NO: 334434 - DNA, 74 bp, Zea mays
attcccaggtcagacccactcgtccacccactcgtccacatatacacaaccttttttttttacttttcttaact

SEQ ID NO: 334435 - DNA, 385 bp, Zea mays
cccacgcgtccgctcggagcagagcagtggttgctgctggtacgttttcgtagatagagatagatatactactaggagtctaggagtagtatataaaagctgctgctacgtgtttgtttaattgtctgttggtggacaaggcaggtgaagagggacgataggaccatgcataccatagatggaggatggcatcttttgcaatcagctttgggattactatgcgatgtgttagccttttatagctagccattgtccaatcgacaactgctccggctacacaagagcgattccaagcggcgtgccaggactaggagggagggattccgtttctcgtgaggaaagcttgctacctacctgtcgcgcactcgcgcaagagccccattcg

SEQ ID NO: 334436 - DNA, 397 bp, Zea mays
  unsure (1)..(397): unsure at all n locations
cccacgcgttcgcccacgcgtccgcggacgcgtgggttgacacttgcggtctgtaaggtgattgaaatgtgtcttataaatcagacacccggggcctttccccctgtnggttgttgctgtgggtactttagttgcttcattagaaggctcgggtgcccggtcggttttgttgtggaggtttgtcagggtttcaactggtagagtcgttttaccgtcatagatggtgttatgctttattttgtttttttctgtttttcctatctgttttattttttaatgttttttgggcggtcgctctttttgttcttattttttttgcgcttgggttgctgatttatttatgtttttttttgttgttgcttatttgttatttgtgtggtcggcgtttttctttctt

SEQ ID NO: 334437 - DNA, 368 bp, Zea mays
cccacgcgtccggaacaattgaaatgataagtaaaaagtattgttccttcaaatcaaaggtgagactatctacataacactaaatggggatactttaaataattatttcaaaataatatatatcttaaacatctaaacctgctaaataacttaataattattactacaacatatttaattcataattattaaaatacctaattccttattaataaaaacatagtgttcgccccctttaaatataccaaacttatcttcccctttcttcaataaaaattctttttttattttgtcctctaatatttaatcaattccccccctttttacaaacaccttataccagaataaaccccttttatctaccccat

SEQ ID NO: 334438 - DNA, 419 bp, Zea mays
cccacgcgtccggattcttgaagagatcgagcttcttttgcaccacaaggtcgaggatgtcttgcaactgcggatcaagctgcggctgcggctcaagctgcaagtgcggcaagaagtaccctgacctggaggagacgagcaccgccgcgcaggccaccgtcgtcctcggcgtggccccggagaagaaggccgcgcccgagttcgtcgaggccgcggcggagtccggcgaggccgcccacggctgcagctgcggtggcaactgcaagtgcgacccctgcaactgctgatcacatcgatcgacgaccatggatatgattattatctatctagcttgtggtggtgggtgaacaataataagcgaggccgagctggctgccatacataggtattgtgtggtgtgtgtgagagagagagaaaca

SEQ ID NO: 334439 - DNA, 370 bp, Zea mays
cccacgcgtacggaggtggtgcggagtccgaggcttagccgtcgccggcggcgtaacgagcatggattcatcgagctgagcgggcatcggtgtgttatatataatctaatctaaggcagagctgggtgctccgaaggatcgacgtatacgggtattgttgatatctacggcttgttgtatagcatgtccatcgattacacaccaaattactccgacatccaaacaaaacaagtatatatgtacagttgcacgttgattcatgtgtgacgcgtgtatatcgtccggagcagaaaattagcttgggagggatttcttccatacacagatttttttatagaaactctcacactgaaaagctaaatatatattt

SEQ ID NO: 334440 - DNA, 263 bp, Zea mays
gtgctaggatgttccggtctggccttgttgtgttcactcttcatgggtcactttcacattactactgccatatatgcgaggggctgtggccattcaaggattggtgggttgtccctgcaaaggttgtattcgatcataccatctgggctgcgatctggaacagactctactttgtgtgcttgggtttccttcggttggaatcacctacctctattctacaacgagctcaagtccacaattctttcttatgcttactgcttgtt

SEQ ID NO: 334441 - DNA, 72 bp, Zea mays
atcgtctcgaataacataaagggtccttcattttcattgcagccattccatagttcgagggcgagaatgtcc

SEQ ID NO: 334442 - DNA, 74 bp, Zea mays
attcccgggacgacccacgcgttcgaacaggcctactgccgacaaagcgcttcatatttttaaattacaactac

SEQ ID NO: 334443 - DNA, 332 bp, Zea mays
  unsure (1)..(332): unsure at all n locations
gacagcaaggaaagcccattcttatggtagggacaggcttacaacacagaaatgaaagcagagngacccatccacagcagaagcagatggaagcactggagcagcaccaggcaagagatcgcattcacctcgcatggcgccaaccacagcgaaacaagagaggagagagggccacaacaactcacgagacgaccgcacaggaaagaaccaaagctgctgcattcaagtgccagctgccagccgggacacggtggacgcatgctggtcgacgactccctatccctagcagcagccacggcccacggccaaccgggatacggctcccttcattc

SEQ ID NO: 334444 - DNA, 186 bp, Zea mays
  unsure (1)..(186): unsure at all n locations
cccacgcgtccgcggacgcgtgggcgacggcgaccttcgcggcggcggcggcggcgggcggcgccgacgtgctgatcggcgggccgggagaacanaaataacgcgcgncnggnccccgcggcggcgcgccgcgggggggcggngggncccgngcggnctagcgggcccggcctccttcggagatct

SEQ ID NO: 334445 - DNA, 353 bp, Zea mays
cccacgcgtccggcttctcctccccctcttaccaagtcctcctcgggttagggttccttagggttttgtggaggggcgatggcggcggctgatgtggagtaccgttgcttcgtcggcgggcttgcctgggccaccagcaacgagtcgctggagaatgccttcgcctcctacggcgagatcctcgactccaaggtcatcaccgaccgggagacggggaggtcccgcggcttcggcttcgttaccttctcctccgagaactccatgctcgacgctatcgagaacatgaacggcaaggagctcgactgccgttacatcaccgtttaccaggcccagtcccgtggctgtggctgtgg

SEQ ID NO: 334446 - DNA, 133 bp, Zea mays
gatcctcgccgcaggccccaacttctgaactaaagcattgtgatccggatgaataaaacgatggcgtgcgtgcttgggtgcgtgtgaagatgattacgacgactacgactaaaaaaaagggttggatcgatga

SEQ ID NO: 334447 - DNA, 315 bp, Zea mays
cccacgcgtccgaacgcacacatttggaatagtgactgatatttttcttgttgacggttgtgtttatatgagaaaatacactatcaggatacacgtgtttacgtgagaaaaaaaaaaaaaaaaaaaaaaaaaaaaaaaaaaaaaaaaaaaaaaaaaaaatgttaaaaaaaaaaaaaaaaaaaaaaaaaaaaaaaaatttatataaaaaaaaaaataaaactgatggccttttttttatataataaaaatatatataagaaggggggggtttttaaattgtttattattttttattatacataaattatttctttt

SEQ ID NO: 334448 - DNA, 264 bp, Zea mays
cccacgcgtccgattgagtccagtttagctttttcatttttttactttatgtttaccagctattatatatttttgtaagaagaggttagttctacagaaatagaaaagcaaaaaagagttgcatacagtggcgaattcgctggactgatatagcaggcttgagatgttagtggtacatgggtatagtagtaattgagggactaggaggatgtgattttttattagttctgaagcttttggaccttgcttccggacaaggctggc

SEQ ID NO: 334449 - DNA, 337 bp, Zea mays
ctagcaacatagaaagcacaatagtgtaccaacaatggcagccaaaatattttgcttccttatgctccttggtctttctgcaagtgttgctaccgcgaccattttcccacaatgctcacaagctcctatagcttcccttcttcccccatacctatcaccagcggtgtcttcagtatatgaaaacccaattgttcaaccctacaggatccaacaggcaatcgcaacaagcatcttaccattatcacccttgttcctccaacaaccgtcaggcctaatacagcagttacctttggtgcatttggtggcacaaaacattagggcacaacaactacaacaa

SEQ ID NO: 334450 - DNA, 323 bp, Zea mays
  unsure (1)..(323): unsure at all n locations
cccacgcgtccggtctcggtatatactaatgcatggttttgctttagtgtgtcttgttgtggctgctagcattaggtgataaaggcgtgggtgaccaatgaagttgggcagcttttttagtgtcctcagcatatctgatagagaggtttgctaaagaggtttcttccacgatcctacagactaccagtgctaccaaggcaaacattagccaccagacatgacatgcttattccttatagtctggtgcccatcttgtccaaacataatctagaagagtgtacaaccactaatgaccttgtgtcacgttcatgctctggccttnt

SEQ ID NO: 334451 - DNA, 105 bp, Zea mays
  unsure (1)..(105): unsure at all n locations
ccggnccggaaaaaccggggcgacccacgcgaacggccacacgaacgcacagagaanccacaaggaagccaaagggaccgcgccaaaaaaaggagggggggggca

SEQ ID NO: 334452 - DNA, 447 bp, Zea mays
gcaacatagaaagtggaatccagtagcaacaacagagcaacaatggcgaccaagatattttccctccttatgctccttgctctttctgcatgtgttgctaacgcgacaattttccctcaatgctcacaagctcctatagcttcccttcttcccccataccttccatcaatgatagcttcagtatgtgaaaacccagctcttcagccctataggctccaacaagcaatcgcagcaagcaacatacctttatcacccttgttgtttcaacaatcgccagccctatctttggtgcagtcattggtacaaaccatcagggcacagcagctgcagcaactcgtgctacctgtgatcaaccaagtagctctggcaaacctttctccctactctcagcaacaacaatttcttccattcaaccaactgtctacactgaaccctgctgcttatttg

SEQ ID NO: 334453 - DNA, 166 bp, Zea mays
acactaacgaacgaactcttgctcctttcactatctagctgaggtcgaccatatcgggtgtgcttaacagcacaaagagtccggcacaaaaaaccactctttttttttttcccccccctatctttctccacttttactcccatcacctcactactattttcatact

SEQ ID NO: 334454 - DNA, 254 bp, Zea mays
cacgacacgaaccgagcaagaaccgtacgagtcgagcccagcagcaggatggcggcggcgagcgggaaggcgccgtcgctggtggtggcggcgagcatgggcgcggtggaggcgctcaaggaccatgcgggcctgtgccgctgggactacgcgctgcgctctatctaccaccgtgccgtcggcacgccatggatccgcgcgctgttcgccatgctttcggactccttttttgtgcctgctgaatactttctttt

SEQ ID NO: 334455 - DNA, 201 bp, Zea mays
cgtccgcagcacaatggacgccgccgtctccctctccctgcccctgcaccaccacgcccacggcccgcttccgctcccgcacgcggcgccccaccaccttcactgcgctgtcccgctcaggcaccacgccacctccgcgtccggcgtaaccgcgccgccgtccaagcctgacgttcaggctcctccagcggctcgcctgag

SEQ ID NO: 334456 - DNA, 187 bp, Zea mays
acgctgcattcggatctgtcaggtgaaatgcggagtgagaggagacaccagaccagcttgcaacgcagtcggaatggtcgaccgtacgatcctagtgattgaccacctctatagacgaccagtttatgtgcgcacgaaggaatgcagtatagattatccagagaatgggcctcttccacctgacgct

SEQ ID NO: 334457 - DNA, 250 bp, Zea mays
  unsure (1)..(250): unsure at all n locations
ttttgcaattttttcgcatacttttctaaattaaattttttcccacgattttttgaccaaaaatttttnnnggtccaggatatggttctacttagcccagtctcggcgaagacttctatagcgctgcgttataactatccgacaggtttcatcacgatgaaattgtcgctttataatttccctgttaaatcattaaatttggtaatgtatcagtgttaaatgtaaataaaactaagacaaaatttcaccg

SEQ ID NO: 334458 - DNA, 209 bp, Zea mays
cggcttcggcttcgtcaccttctccacggaggaggcgatgcggaacgccatcgagggcatgaacggcaaggagctggacggccgcaacatcaccgtcaacgaggcccagtcccgcggcggccgtggaggcggcggcggcggcgggtaccgtggtggccgtggaggcggcggctactgcggtggcgggcgccgtgatggcggcggcggct

SEQ ID NO: 334459 - DNA, 130 bp, Zea mays
gcgcgctgccagcccacgccgggcctggacgcaggcgctgctccgccaggctcgcgcgcgcagggcggctgccaggtcctccaggggagccgtcctgctgcggagacgcgtagactgcgacggggaggct

SEQ ID NO: 334460 - DNA, 558 bp, Zea mays
  unsure (1)..(558): unsure at all n locations
cctccccctccttctttctcctctccccccccctcctctcttttttttcccccccccccctcttctttcctcctccctcccccctttctttcctctctccccccctttttcttcccccccccccccttttttttcctccccccccttttttttccccccttcccttttttttccccccctccccccctcttttttctcccctctttttcccccccttttcnnacagtactttccttttctttctctccctcctcctctctctcctcttctcctctcccctctcctctccctccctcccctttttttccccctcttctctctcctcttcctcccctcttctccctcttcccccctccctcctttcttctttttttttctcttcttttcccctcttctttctctcccttttctctccttacttcttcttcctctccccccttcccctccctcttccttcctttctctttcttctcctcccttttcttccctctcctctccataatcttcctctctcccctctccttttcctcccccctcttctccttncccttctctcct

SEQ ID NO: 334461 - DNA, 279 bp, Zea mays
  unsure (1)..(279): unsure at all n locations
ttctctgtttttcacactactataattttactattattttttttncccgaccgggagacggggaggtcccgcggcttcggcttcgttaccttctcctccgagaactccatgctcgacgctatcgagaacatgaacggcaaggagctcgacggccgtaacatcaccgttaaccaggcccagtcccgtggcggtggcggtggcggcggtggctaccgcggcggtcgcggcggcggcggcggttatggtggcgggcgccgtgacggcggttatggcggcggt

SEQ ID NO: 334462 - DNA, 160 bp, Zea mays
  unsure (1)..(160): unsure at all n locations
aaatttattttttaaaaaatattttttttatattaaattatttattanaatataaattttttattatatataaaatatttattttactatattttttttatatagatatatatttttttttagatttaatttttatttaattattaaattatttttaatt

SEQ ID NO: 334463 - DNA, 169 bp, Zea mays
gccaagaaggagatgcggatcctgatggtgggactcgacgccgccggaaagaccaccatcctctacaagctgaagctcggcgagatcgtcaccaccatccccaccatcggattcaatgttgaaactgtggagtacaagaacatcagcttcactgtctgggatgtcgggg

SEQ ID NO: 334464 - DNA, 75 bp, Zea mays
agcagtttgttgtaacaattaaatgaggcgccggatcctcacgccatcgaaagtttgaaacagcttggttgttgt

SEQ ID NO: 334465 - DNA, 122 bp, Zea mays
aacgtggtgcatcagcatacctgctgctgccgccgccgccgccagttgtttgctgtggaaagctagatgcatgcgtgttgtaaaggaacctgaagcgttgcatcggtcatgattcatgcatg

SEQ ID NO: 334466 - DNA, 132 bp, Zea mays
  unsure (1)..(132): unsure at all n locations
caaacatatttttttgnnccataagcatgcatgtgcagcttcatatgcataagctctgccggcttgtgatatacatggagctgcggnggttgtgcatttttttgtaaccatgtaccagtattattgtgtcat

SEQ ID NO: 334467 - DNA, 273 bp, Zea mays
ccacccgtccgaaaaaaaaaaaaaaaaaaattaattaaaaaatttatttataaaaaaaaaaaaaaaaaaaaaaggtggggtttaaaaaacaaaaattgtcgaacaaaaaaaaaaaaaaataaaatttaataaaattaacttacattataacaacatataaaactataaaaacctccggccctttttaaattttcaaattttacttccctttctttccaatttaattttttttttttttgaacacaaaaataaaattcactccccccattttta

SEQ ID NO: 334468 - DNA, 310 bp, Zea mays
gcgcggcgtggtgggcgttcgggacttcctctttttcgacggcttctgcgggtgggagggcgggcagctgcgcgacgaggggcgcgcggggctctggcatgtcgcggcctgcagcgccgccgtgctggagctcgccaccgtcgtcaagggcgggctctgggaggaggtgcaggggctcgtcggggagaggaggctctggtgacgacctcactctcactgctgccgtggggcgttcaatcttcaatgtaattattatgagatcgatcgatcgatcgacttgcaagtcaaaccaatgcatccatccatttcg

SEQ ID NO: 334469 - DNA, 344 bp, Zea mays
tggacaggtactacctgtactacgacgagccaaaaacggtgttccctgacgaggcgtgctatgaccttgtcagctagttctgcgaggctccgtaccaggacggcgtttgcaaggagctggctcacgcctgaagaccctgatccatccatttctgtccaccacactatgtacatatgtgtagcagatagtttacatgtacatgttagatccctgagagctggagaagctagctagcgtgcttacagaataacagcagccaagcaaagccaagggtgtgtatataataagcatgcctatggttgtgtcaaatgcgaatgtatgtatagttaaactaaaatgaaatg

SEQ ID NO: 334470 - DNA, 233 bp, Zea mays
  unsure (1)..(233): unsure at all n locations
taattaaaaaaaaaaaaaaaaaaaggccgcnaaaaaaagggggggggaaaaaaaaaaannaaaaanaaaaaaaaaaaaaaacaaaaaaacaaaaaangggaagaaaaaaaaaacaaaaaacaaaaaaaaaaaaaaaaaaaaaaaaaaaaaaaaaaagagaaaaaaaaaaaaaaaaaaaaaaaaaagaaaaaaaaagaaaaaagaaaaaaaaaaaaaaaaaaacagaagccaag

SEQ ID NO: 334471 - DNA, 107 bp, Zea mays
atttacattctcctaactccttcaacttaccgttctgtccataccaaacaatcaaccttatccaaagctttcatataaccaccaccaccattccatccccctttaat

SEQ ID NO: 334472 - DNA, 226 bp, Zea mays
gactgtgcaaagcgagctattcctgcttctctcaagcagagagtcatactgaatttttgagggtccgtaacaagaaagcgcatggcaacttaaaaggccttgtctacttcattaacaccttctattccctggggtcaggcattaaggccaggtaacggcttccggcattcccaaagtcctaaacactattggtattcttcaatcaacggtgtactttcaggaccac

SEQ ID NO: 334473 - DNA, 360 bp, Zea mays
tcccggtccgtgctcaaattaatcaaaggcgttcgcaacgtcaactaacaataacaacccggggtcggaccatcctcgcaggtgctacttactagttactactcggcagcagagggctggggctagtcaaggccgccgacgacggacggcgcggcagcggaagcagtgctctcccgtttcgaccccctccccctgcagcgtcatgttcatcagctccagtgcttctgtgtagtagattaggggtgcagagaagaagaggaggacgacgacgacagcacgcggcgacctaatgcgaagcggcaggttgtggttgtggttgcgtgcgtggacgcgtcctcgatcgttcgtcgtccatccggg

SEQ ID NO: 334474 - DNA, 109 bp, Zea mays
  unsure (1)..(109): unsure at all n locations
aaaaaaatgaaaaaaaaaaaattattaaaaatttttttaaaaaaaaaaaaaaaaaaaaaattaggtaaaaaaaaaaaaaagggggggaaaaaaaaanaanananataat

SEQ ID NO: 334475 - DNA, 474 bp, Zea mays
gggccgaccgcacgcgtacgcacaagcacctgctatagttttgtggtgcgatcattaaaacgcggcccgccaaaatggcgtggcttttattgatagagtgctgcgcataaacattttcgctaggacagatagctgttgacgaggcatgcacagtggatcagagggacaagatcacaacggactgcagagagttcatcaagctgaaaggcccctgtacagccccgacgtacaccgacaactgctgcttcttcataagagcggtgcccaatctatacatggagtgcatcattcgcctgctctccaataaacagaataagaagtacgacttggacaagatccggcttcttgtcatcgtcctctgcaatccacatccggagatgacgtaaaatgtggtgttgcacctagattctgatggactgcatcctttcaacaattttgaatttgatctatacaaaccctactgtatttgtttta

SEQ ID NO: 334476 - DNA, 57 bp, Zea mays
aaaaaaacgacgggaggaaaaaaataaataaaaaaaataattaccacttttattaac

SEQ ID NO: 334477 - DNA, 459 bp, Zea mays
cggacgcgtgggattttcagcattcagaaacacaccaagcgaagcgcactagcaacgacctgacaacaatggctaccaagatattagccctccttgcgcttcttgcccttttagtgagcgcaacaaatgcgttcattattccacagtgctcacttgctcctagtgccattattccacagttcctcccaccagttacttcaatgggcttcgaacatccagccgtgcaagcctataggctacaactagtgcttgcggcgagcgccttacaacaaccaattgcccaattgcaacaacaatccttggcacatctaaccctacaaaccatcgcaacgcaacaacaacaacattttctgccatcactgagccacctagcagtggtgaaccctgtcgcctacttgcaacagcagctgcttgcatccaacccacttgctctggcgaacgtagctacataccagcaac

SEQ ID NO: 334478 - DNA, 242 bp, Zea mays
gcggcaggtaccccataccggagctgtggaacttcaaggaggaccggagagcaccgatgggcgaggcagtagcctacatagtgaagcagtggaaggtgagcaagaggaagcattaggcgggcctgatgcctgatggcccttgtgccattggttcctgggtcgatgtccctgacagtgagagctgagaccctgatcccctgactttttctgctgatggaagacctagtaccagtagcactact

SEQ ID NO: 334479 - DNA, 388 bp, Zea mays
cccacgcgtccggacgcacacaagtcgcagtttgctagctcccaaccgagccaggaaaacggacgccgtgcagctcgctcgcgcgcgccccacggaaagagagggcaggtaggaataatgtaccaggccatcccgtacagcgccggccagccgtggccgcggccggccccgacgatcggtcctgacgtggcggaggaggaggggttgctggcggcttcgcagcagcaggcgtcgacgccagcggaggcggcggcgagggtggaggaaggagaggtgcggcgcgcggtggcggagtgccccgtgctcgtggtgggcgtgcgcgggtgctgcctcagccacgtggtgaaacggctgctgcaggggcttcgggtgaaccccgccgtgcacg

SEQ ID NO: 334480 - DNA, 455 bp, Zea mays
atccttgttccacaacaggtcatacaggagttttgttacaaagcttggtcttccaaagctggggatgcattttgcggctagcgatgatcacttggtgcgtgaagctgctctaagcggcctccttgagttgtcacaggaccagacatctggtaatgcgctacctgaccaagacaagctgaaaagagatcctgaagagccgaatcgaagggatcagtgcgatggactctgacgatctccatgccgcacacgagaagcgcagctggtggacacactaatgtaaatgttgttaattaggaagcggatcccagtgtgtgcacgtattgtgcagttgacacttgaaatagcggcgagcataagtgatgattggcgtctacttcatctcttcgctaatggcaaaaatcgtcaacctaggtcagctagggaagaagaagagcggcgtctgccgaagcagcaac

SEQ ID NO: 334481 - DNA, 388 bp, Zea mays
cgctccgctcttggctctccccacctgcgggcgggggctgttggttcgggggggaggcgagggaatccgcctgcggctgaatcgggggagagggcccgcatggcggaggaggacaggcagcggcggtggcggcggcggcggttcgcgaacctgcgcagcgtccggtggcggatcgatctcggcatcctgccggcgtcgcccggggcctccgtcgacgagctccgccgcgccgccgcggattcgcggaggaggggagcctgatttggccacttgctggttggtgcgcttcttgtcggcaggattctcttctctttggttgggtggtccgctggtgttctcgtcctctcatgattatgacgagagagagagagaaaaaaaaatttggctt

SEQ ID NO: 334482 - DNA, 195 bp, Zea mays
tattttggctcacacttttttttttttgaaaggacggttcaacaacgcgagcgaaacactgaacgccggcgggtacaactgatgaggcatccatatatatatatatatatgcatggcctgcgggcggatgagtttgctgcgcgcctgcgttattacatgcggtagttacctcaccgagaggtaggtactgctacc

SEQ ID NO: 334483 - DNA, 428 bp, Zea mays
  unsure (1)..(428): unsure at all n locations
tttaaaaaaaaaaaaaaaaaaaaaggttcggtttattttaaaaatggtgggtaaaaaaaaaataataaattaatatattttttatttcatattttggtacctacatnaattttattattatatttatattattatttttttttttatatttttaattttttatattatttttttttttttttattaattaatggaaaaaaattaataaatttataatatatatttttatataataaattaaaaaatttatttttaatttaaaataaaagaaataaaaaagggaggagaattttttaaatatttttttttttttgaaaaaataaaaaataatattatttattttaaaattaaaggaatataaaaatggaaagttttatatgtttaaaatttttatttttttttattatatgttttataaatttttttta

SEQ ID NO: 334484 - DNA, 384 bp, Zea mays
  unsure (1)..(384): unsure at all n locations
cggaacaaanacggggccgttgcatttaaaaggttgggtgggtccccaaaaacaaagaccacagaaccccttcttgttgttttctgcgatggcaactaatttactgcaagggtgtatggatggattcacatcatcctctggcttcaccatcttcaccatcatgaatctactaaggatcataatatactactgaaccccttcttgcctactttggctatcccaattaatttactccatggatgaatggatccacattattctctgtatggcttcaccattgtcaccatcatgattgctaataaatcatgcttatctttatctatttcctattccaaattatttccttcggcctctatatttctactttataaatatctaccattt

SEQ ID NO: 334485 - DNA, 576 bp, Zea mays
  unsure (1)..(576): unsure at all n locations
cccggggtcgacgccancagcgtctcgcccaccgcgataccgcggaccgcgnttgggcccggccttctcgcgccggcttcgccgccgagcccagacgtgctgcgtgggtgaactctgcttgtgcgaagggacggccacnngccggcgaccatanntttgcgctagttggtnncggagcagtggagctagatgtnggtggcctttaatctatcngnnaccgtcannctgctggcttcnnatagcatctannngctgacgcaaagtgtcaattcgcgntttcctttcaaattggtttnnntccccctttcggtttggcttaaatnntcgattcaaatatgangatnnngtttttgtacctangtacccatantnnatataagngacngtntnnctataantnnatttgtntcaatcacncaaagaaagcnnatgggatgctcaaaaggggaagctcttgtatttggattgagggaagggaaccacccagtattttaccttgtaccgaatntgataaatatgtttntatatttaattgatatcactggatatatatataaaagatatcgagaggacagt

SEQ ID NO: 334486 - DNA, 120 bp, Zea mays
gggccgggcaacacatataaactttccactcttattaacccttttttgtctcctcatatctcttctatacttccgcctggtttcaattcactgggggccgtaaacaacatcttaactact

SEQ ID NO: 334487 - DNA, 222 bp, Zea mays
cccacgcgtccgcggacgcgtgggcaagcacttcgacgtcgcacgggcgctgcagcgagagacgacaccaagcgtcggcggcaatggcttactaccaggaggtggactactgctcggaggaggtgaggtcggtggccccggccggcttcggccgccacggaggcggcgtccagcagcacgtcgtcaaggagaagttcgaggaggtcgacacggtctcacgcg

SEQ ID NO: 334488 - DNA, 371 bp, Zea mays
gaattcccgggtcggcccacgcgtccgcccacgcgtccgggcttctcctccccctcttaccaagtcctcctcgggttagggttccttggggtgttgtggaggggcgatggcggcggctgatgtggagtaccgttgcttcgtcggcgggcttgcctgggccaccagcaacgagtcgctggagaatgccttcgcctcctacggcgagatcctcgactccaaggtcatcaccgaccgggagacggggaggtcccgcggcttcagcttcgttaccttctcctccgagaactccatgctcgacgctatcgagaacatgaacggcaaggagctcgacggccgtaacatcaccgttaaccaggcccagttccgtggcg

SEQ ID NO: 334489 - DNA, 436 bp, Zea mays
aaataagacgacttgtttcattgattcttgaagagatcgagcttcttttgcaccacaggggggaggatgtcttgcaactgcggatcaagctgcggctgcggctcaagctgcaagtgcggcaagaagtaccctgacctggaggagacgagcaccgccgcgcaggccaccgtcgtcctcggcgtggccccggagaagaaggccgcgcccgagttcgtcgaggccgcggcggagtccggcgaggccgcccacggctgcagctgcggtggcaactgcaagtgcgacccctgcaactgctgatcacatcgatcgacgaccatggatatgattattatctatctagcttgtggtggtggttgaacaataataagcgaggccgagctggctgccatacataggtattgtgtggtgtgtgtgagagagagagaaacaaagttct

SEQ ID NO: 334490 - DNA, 447 bp, Zea mays
cccacgcgtccgagcaaggagcggctgtggcagtttgtcagtgcaacgcgcagaggcaggggctacattattacatccatggatcatccaaacaagatcccccacggcaacgacgagaagaagaaggagcacgagaagcaggtcgagcaaagcaagacccacaggacgcgcgagaagaacccaatcaaggagccggagcccaagccgaagaacgaattcgaagtcccaaaacccatcccgagaatgagccgccaaggcacgtcgagggggtagtaatctcctcaaccctcattcgtctcggtctcggcgatcaatgcatccattgttcgatcgatatatatagatcatatataggcccacggtcgaggttatgcgtcctgctagctatactccgtgattttacgacgttagtgtgtcctagcagctataccctcggtcgttgtatgt

SEQ ID NO: 334491 - DNA, 468 bp, Zea mays
  unsure (1)..(468): unsure at all n locations
ttttactcnntttctttctctttntcttacattttttcttatcttcaaacacatnctgtctgtttcttttaaaaagtgggggagatataatcattaattttattactattatatattttaatataattatctatcaatctattaattttttaattcctattatattcttttaaaactttataatatttatatttttatattaacatcatatttatcattacttattatctttttttttatcgatcttttttatttattattttttttttaaaaaaaatattatttttcctatcatatattttttttttttacaattttttatatttcctatctattctattttttattacaaatctaaaaatttatttatttaaaaaaatacaatataattttttctcatttatcaacatttatattttattctctcatattatataattttgtttatttattctaaattataatata

SEQ ID NO: 334492 - DNA, 388 bp, Zea mays
  unsure (1)..(388): unsure at all n locations
cccacgcgtccggcttcttttgcaccacaaggtcgaggatgtcttgcaactgcggatcaagctgcggctgcggctcaagctgcaagtgcggcaagaagtaccctgacctggaggagacgagcaccgccgcgcaggccaccgtcgtcctcggcgtggccccggagaagaaggccgcgcccgagttcgtcgaggccgcggcggagtccggcgaggccgcccacggctgcagctgcggtggcaactgcaagtgcgacccctgcaactgctgatcacatcgatcgacgaccatggatatgattattatctatctagcttgtggtggtggttgaacaataataagcgaggccgagctggctgccatacataggtatngtgtggtgtgtgtgag

SEQ ID NO: 334493 - DNA, 166 bp, Zea mays
gctctaacaaagacgcccggactaacgcatttatgtacacttttactgatacatactctggtggagagaacccgagcggcgcggtagaaacccgactagatagctacactacacacttacagatggcctgcctcaggatgaagttcgacgacgtaaacgacatgag

SEQ ID NO: 334494 - DNA, 414 bp, Zea mays
aaaaaaaaaaaaaaaaaaaaaaaaaaaaaaattaaaaaaaaaaaaaaaaaaaaaaaaaaaaaaggaaaaaaaaaaaaaaaaaaaaaaaaaaaaaaaaaaaaaaaaaaaaaaaagtaaaaaaaaaaaaaaaaaaaaaaaggggggggcctttttaggggtccaaattttccttcccggggattgcaagttaaaattttttttttggggcccccaaatttaatttcctggcccgctttttaaaaccggtggtctgggaaaacccttgggtttcccaaattaaatggctttgaaaaaaatccccttttccccggtggggttaaaaccaaaagggccccaccaaatgccctttccaaaaatttgcccaccttaatgggaaatgggacccccccttttacgggccttttaagcgggggg

SEQ ID NO: 334495 - DNA, 181 bp, Zea mays
gatgtcgcaatttgttgcttgatcgaatgatgtttcaacctcccatctgctagctgtgatacgcattggccccggctgataattattacctattcctgggaaaaaaaaaaaaaaaaaaaagggggggccgtttttgaggttccaagtttacgtccccgtgcatgcaacgttttagtttttt

SEQ ID NO: 334496 - DNA, 345 bp, Zea mays
cccacgcgtccgcccacgcgtccgcacaagcacttcgacgtcgcacgggcgctgcacacagacacaccaagcgtcggcaccaatggcttactaccaggaggtggactactgctcggaggaggtgaggtcggtggccccggccggcttcggccgccacggaggcggcgtccagcagcacgtcgtcaaggagaagttcgaggaggtcgacacggtctcacgcgccggcgccaaccaccaccaccaccaccatggtcaccacggcggccacggcttcgtggtgcgcgagaccagggtcgaggaggacatcaacacctgcaccggcgaggtccacgagcgcagggagag

SEQ ID NO: 334497 - DNA, 220 bp, Zea mays
ggctgggttaactaatttaggtttcgtttctgttgtttctttgttgggctttgagcatttcagcttctcttggtttcttattttagttacagaaaaaggaaaggcaatgggatattgacttgtatttatcactgatgtcgactgggtgactctggattatggagtattgctccattggatagttttctgcatttcgagacaggaaagtggttttttgcgg

SEQ ID NO: 334498 - DNA, 66 bp, Zea mays
  unsure (1)..(66): unsure at all n locations
ggaattncccgggntcgagcccagcgcggntccgcccacgccccgtccgnnattttganngcattc

SEQ ID NO: 334499 - DNA, 386 bp, Zea mays
aactgactaggcacagggaggagagacgagatcatgaggaagcaagactcccatgtgctctgcttgttccaggggggcggtggggcagctgctatggcctgggtcatgcacaccatctgcggacacgcacgtaagacaggctacaactcgtgctaacctgatgcgaaggcgcggatacagagctttattctcatcaacggcgtaaggaagacactagctctggcttgggctcggagcctgtatcagaaatcgaaataatataagactgtcttcaacggatcgcactgccgctcccacacgctaaatttacgggctacagcgcacacgctagccgatcaactattcacgctaccaggcgctctacgcggatgtgccctctagacagc

SEQ ID NO: 334500 - DNA, 67 bp, Zea mays
gtacaatcttacattgttcatactgccttcttgcaatcatgcaatgactatctttagcaaagaaagg

SEQ ID NO: 334501 - DNA, 442 bp, Zea mays
  unsure (1)..(442): unsure at all n locations
cccacgcgtccgcggacgcgtgggtgtcgggctgtccacgcgccggaaggtgccgctattcgccgtggctgagcccaggctggcggtgcacctgtacagcgcgaccgactgatccaatttacgacatttttatccttagtcgtgttttgtgctcagttttaaactttcagtgctatagaacagaaagacaaaactgagaaaaaacacaactaaagttaaaaatgaacacaccagcaaaaccaaggacaccaccttaaaaaacccattgtatattaatgaaagccagagcctctatatacaaaactacttgtattatatatttgaaagtctatgttttgtatctcataatgttggatttctatatatcagatgagtaaactctattttaatttanaaataaatanntttttttanaatttattttttattttaaatatttttt

SEQ ID NO: 334502 - DNA, 431 bp, Zea mays
  unsure (1)..(431): unsure at all n locations
cttcgtcggcggcctcgcctgggccacggacgaccactccctccacaacgccttcagcacgtacggggaggtcctcgagtccagagatcatcctcnatcgggagacgcagaggtcccgcggcttcggcttcgtcaccttctccacggaggaggcgatgcggaacgccatcgagggcatgaacggcaaggagctggacggccgcaacatcaccgtcaacgaggcccagtcccgcggcggccgtggaggcggcggcggtgggtacggtggtggccgtggaggcggcggctacggcggtggcgggcgccgtgatggcggcggcggctaccgcggtggcggccgctaccgtggcggcggcggctaccgtggtggtggcggcggctaccgcggtggcaaccgtggcgggggctacggcaactccgacgggactgga

SEQ ID NO: 334503 - DNA, 102 bp, Zea mays
cccacgcgtccgcccacgcgtccgcccacgcttccgtagaactagtccccacgcgtccgatgtgcgagctctcagtaataaagtattagagatctatatttt

SEQ ID NO: 334504 - DNA, 298 bp, Zea mays
  unsure (1)..(298): unsure at all n locations
ccggnccggaattcccgcctcagacccacgcctcacgcttccggtccgtgttcgtggaggtaatgtgaaatcggacacttctcagtaaatcaggcgcgggcaccctggagtgaggtggatccaacacgctaatcagcacggtgcatcctctccacccattcccgcagccagatgggccagtcgacggctcagataatagactggacgtctggatccaagaggtttgatccctttaatttgcattgaagtgccagcttttggtcaggaaggtgatgctggatgatgctgacggactttg

SEQ ID NO: 334505 - DNA, 171 bp, Zea mays
  unsure (1)..(171): unsure at all n locations
aaacacatacttccaccaaanattttttttccaacncaaacttacctcctaacaatcggcttttctattaaaatcgcgtgtcaactcacaaccacaattacctttatcaaaaacttcttatttctaacattcctttaattttctcatcttcatctatttcaatatattttt

SEQ ID NO: 334506 - DNA, 372 bp, Zea mays
aaaaaaaaaaaaaaaaaaaaaaaaaaaaaaaaataaaaattaaaaaaaaaaaaaaaaaaaaaaagggaaaaaaaaaaaaaaaaaaaaggggagggggcgcccgttttaaagtacccaagcttacttccccttgtttgcaattttatattttttttttttggtcacctatattaatttttctgtccttcttttaacatcatctttcttgtatataacctttgtttttcctcaattattattttctttttataataactactcttttccgccagtttttttttatctccataattaggccccacacttaattttctcttttcacaaaaattttccccccccttttattggtctaaatggtaacccccccctttt

SEQ ID NO: 334507 - DNA, 417 bp, Zea mays
tgtacttgtatgttgttagatgagaagattatgacacatctactgttggagtctttaagcaacaaaagtgccttatacgatgatgtcaaggttttctgcaatctcctcttttccagggagattcaatgggcagacagatgacggaagtggaaacaacaagtcagatcaccatgttagtggaaacaacaagtcagatcaccatgttatgtttggagggaatttattccagtcggtatcttgctctggttctggccatgaacagcctcgccacgccatctggttccatcagccctttccttattggatgagcaggctcgttcgctttcagaggtgacagcaggtttgctcctgtgaccctttccagaatatcatgactcgcggattgagatctcgtgatggttcatggttgcgagtact

SEQ ID NO: 334508 - DNA, 379 bp, Zea mays
ggaattcccgggacgagccacgcgttcgcccacgcgtacgcgagaggcgatggcagcagcatctttgcgctgttcaaggagggaagtactgttctatactgagatgcaaatcgcgagtccatgatcgttgaagctgaaccgtgaagtagttatactgcttatgcttttctttcttatagtaatatactccggctcaaaataagtcaatttctaaaaatacttaaaggcaaaatatcttaaagttggacaaatttataaggaagggacccgcggttattgttttatggccaccaaaggagtccatattgaaaatattttaatggggcttaagggcccctaaaaaaaaaaaaaaaaaaattaagggggcggcggttttaaa

SEQ ID NO: 334509 - DNA, 461 bp, Zea mays
ggtgcccggggaaaaggcggtaatgacgactccccccttccttgtggctgctgctggtaccatatcacagaggtgtttgtcagagttgtgaaggcccatccgcttgggcatcaaggaagagcttagctttactgccatttttgtaatctgatccggttggtgggccagggcaggcaaccggggggagttattggcatctgacaacgcccccccaatctttgccatatccttatacatataaaacgctctaactaacacttgtttagttcgtccagaatctctgtacacgcacgcacgcgtgtattattatgtgtataagtctcggccgttccttttccttggtgtggtgtagctccgcgacccagctgagatgatgcttctccgtgcctgctcaaaaggcagcaacacggttccagatgatcaaacgatctatcgaagcaatacaaaacgaggcgcaaaga

SEQ ID NO: 334510 - DNA, 193 bp, Zea mays
cccacgcgtccgacaactgcaacaattgctgccattcgaccaacttgctttgacaaacccagcggcgttctaccaacaacccatcattggtggtgccctcttttagattgcttatgagttatagttcaataataaagtttttttgctgatatttgtggcttcccagaaataagaaagtacatttctagattct

SEQ ID NO: 334511 - DNA, 268 bp, Zea mays
  unsure (1)..(268): unsure at all n locations
attccacctacgcgtacgctcttatcctctcaatttataacccaatcactttaaactcctatcaacatatgctcccctctcctatgtgtcatctccnatcaagggaaaggaatattatctacttcctccagcatccctccgtcaacataccgtcgaatcaaggctaccctcctaaggacagctatcccacaacgttttaccactcatccatctacccctcctctactcatttctaccctcatcatttttacccacaacaggtcttccc

SEQ ID NO: 334512 - DNA, 444 bp, Zea mays
  unsure (1)..(444): unsure at all n locations
atccaggacaaggagggcatcccaccggaccagcagcgtttgatcttcgctggcaagcagctggaggatggccgcacccttgcggattacaacatccagaaggagagcaccctccacctggtgctccgtctcaggggtggtatgcagatctttgtgaagacactcactggcaagacaatcacccttgaggtggagtcttcggataccattgacaatgtcaaggccaagatccaggacaaggagggcatcccacccgaccagcagcgcctcatcttcgccggcaagcagctggaggatggccgcaccctggcggattacaacatccagaaggagagcactctccacctggtgctccgcctcaggggtggcatgcagatntttgtgaagacattgactggcaagaccatcaccttggaggtggagagctctgacaccattgacaat

SEQ ID NO: 334513 - DNA, 150 bp, Zea mays
cggacgcgtggggacccagcggcctcctaccaacaacacatcattggtggtgccctcttttagattgcttattagttgtaattcaataataaagttttttggatgatgtatgtggccaaccagaaataagaagttacatttccagattct

SEQ ID NO: 334514 - DNA, 582 bp, Zea mays
  unsure (1)..(582): unsure at all n locations
gcacgtacccggtccggaanttcccgtgtcgagcccacgtcgtctcgtcccacgtcgtctcgcaccaaattacccaagtatttgtgtggcccgtaataaagaagccctggtcaatcttattagaggttgcaatacaattaggcaaagggtgggtgntatcacgtcgacaacggccttctcgttaccaatatgatgggagagaatcgggtatggcgtgccttcgggtgattnggtatcaattaccaanannggcaggacccctggtatcattattgcatgatggcatattgatcccccgtggcttacccacattatntnnctaaatgattantcattgctggaccaaggaagctggccaatgtccccctacccgttgttcgaaaatggggatgtgggaaatnnttctcgaaatctcccaaaacaagattggcgatagattagtttgccgacctggtttgtgcccaaaggtcaagaccgaattcaggggtaatggtcccaagaatgcccctcatagctagcaacgaccctgatgcttgtgttcaataatcgtccaacgatctgcacgaagctcgtcagggaaaa

SEQ ID NO: 334515 - DNA, 244 bp, Zea mays
  unsure (1)..(244): unsure at all n locations
ccacgcgtccgtccacgcttactttttctctttttcggacacgtattcccccacactggcgtttcccaaaaacagaaagaagccnctccacacattgcttctaataacaaaactctcataactcaaacttttcctactatcttcaaaatttcagatagaagtcactatttataagggaaaaaatatactaaaattatcatttactcatacaatagtaatttttctaaccataccatctattatc

SEQ ID NO: 334516 - DNA, 133 bp, Zea mays
aacctcctaacaccaagacccaataatttttcttttttaaggacattaacttcacttccatctagagcttttcatacaatgccaagaccccacctttcctcaaacacaccaagaaatacactcaattcatcct

SEQ ID NO: 334517 - DNA, 335 bp, Zea mays
gcattcacctttaaaaaaaaaaaaaaaaaaaataaaaataaaaaaaaaaaaaaaaaaaaaaaaaaaaaagaaaaaaaaaaaaaaaggggaagggaaaaaaaaaaaaaaaaaaaaaaaaaaaaaaaaaaaaaaaaaaaaaaaagggggggccgttttaaaggaccaaagtttacttccgggggcttgcaacgtaaaagtttttttttggggcccccaaaattaaattcatgggccgggttttaaaaacggggggacgggaaaaacccgggggttcccaaattaaatggcttggaaaaaaatccccttttccccagttggggtaaaaccaaaaaggc

SEQ ID NO: 334518 - DNA, 89 bp, Zea mays
ggaattcccgggccgatctagaggatccatgcttacgttcgcgtgcatgcgacgccatagttcttctatagagccacctaatttcaatt

SEQ ID NO: 334519 - DNA, 115 bp, Zea mays
ggaatttccgggtcgagccacgcgtccgcccacgcgtccggtgctgaactagccgcagcttgtaaaatatggaaggagatcaaatttgatggtttcaaagcgatggataccagat

SEQ ID NO: 334520 - DNA, 381 bp, Zea mays
gtagaataagaggtgctaccccactgtttgctgtgtttctatggtcaaaaaaaaaaataaaaagaaaggaaaaaaaaaaagaaggagagaggaaaaaaaataaaaaaaaaaaaaaaaaaaaaaaaaaaaaaaaaaaaaaaaaaaaaaaaaaaaaaaaaaaaaaaaaaaaaaaaaaaaaaattggggcccccccttttaaaaaacccaatttttcttccccttctttccaaattaatatttttttttttttgccccctaatttaatttccctgccccttttttaacaccctttatcctgaaaaacccctggttttcccaaatttaattcctttgaaaaaaatcccctttttccaagttgggttatatacaaaaaaccccccc

SEQ ID NO: 334521 - DNA, 220 bp, Zea mays
  unsure (1)..(220): unsure at all n locations
ggtccggaattacccggtgtcgacgccaancgcgtccgcttttagttgatcttttaggtagcacagtctttgggttgatatttatcgaatatnggnctattttnnnctatttnnaaattgacgctatnnatgcttagtcgcgacgaaacgatgttatttattttttgggttatttattatatngnagataacnntgtacaannntgagtttgggggtatg

SEQ ID NO: 334522 - DNA, 289 bp, Zea mays
  unsure (1)..(289): unsure at all n locations
tatcctatcattccanaanttattcttttttctaaaaatttacttcataaatcttnatgtctccatattactagaggataagtcccatcatatccctttcctcataacatctttttattttttctatttttcctattcctaactaatcttacactactactaatcattttttttccattcttattttatctattctatcccacaaatatcacaactattactaacatattacaccttatatatttttttcttatcattccaaaatatctcttatttttttccttatttt

SEQ ID NO: 334523 - DNA, 375 bp, Zea mays
  unsure (1)..(375): unsure at all n locations
ggcttctcctccccctccggttcgggttcgggttcgtgaggttctccggggttcggtttcgggggtgagcggatcgagatgggggcgtcngatgttgagtaccgctgcttcgtcggcggcctcgcctgggccacggacgaccactccctccacaacgccttcagcacctacggcgaggtcctcgagtccaagatcatcctcgatcgggagacgcagaggtcccgcggcttcggcttcgtcaccttctccacggaggaggcgatgcggaacgccatcgagggcatgaacggcaaggagctggacggccgcaacatcaccgtcaacgaggcccagtcccgcggcggccgtggaagcggcggcggtgggtacggtggt

SEQ ID NO: 334524 - DNA, 374 bp, Zea mays
  unsure (1)..(374): unsure at all n locations
cccacgcgtccggcgggctggcgctactgtacatggaaagtgcttctgcttgcaggttgctactactcggtcgacatgggtatatgcttttcatgttactgtctttgatgtgtatcgatcaggtgccgaatgtgatactttggcttgtaaaaaaaaaaaaaaaaaaaaaaaaaaaaaaaaaaaaaaaaaaaaaaaaaaaaaaaaaaaaaaaaaaaaaaaaaaaaaaaaaaaaaaaaaaaaaaaaaaaaaaaaaaaaaaaaaaaaaaaaaaaaaaaaaaaaaaaaaaaannnggggggggccctttttaagggaccaaagttttcttcccgggttttgcgagaaaatatcttttttttggggccccttaatttaa

SEQ ID NO: 334525 - DNA, 378 bp, Zea mays
ccactcgtcctgttagcgtcattgcatccttttcggcgaacctctcaaactccactccgcggatcccatctaagagctgagaagagtgtaatactactatatcgcaaacaaatccagccacaacgagtggacagacaaactaacaaagcgttcctacataatactctctcataatctaaagttaaattacacacccatcttttgctacatagcagtatacttttatgaatcaccgcttttattaaacttcaaattaatctacatgtatacccctgcccagatttaactatattgttaccgtattactcaccgatcattaaaaaacaaatcttacaatctttaaaaactaataaattaattcttattatatttacttaa

SEQ ID NO: 334526 - DNA, 150 bp, Zea mays
tcgaccacgcgtgcgcgggcccaggtaacgctttaacgccacgcacgcttgtttcccggcctgttaaacggccccaacggcctggtctttgccggccccaaggcgtggtcccccttccccttcaacggcggcggggtctttgcgggccgc

SEQ ID NO: 334527 - DNA, 216 bp, Zea mays
ctagaatctactcgtcgagtcaccatttataatgctctatcggactcggagtctcggacagcagagcaaagcaagagccgctgcgcaagtatagtctctgacaccggccgaccctgccctgcaacccaagccatggctgacaacaacaaccggcggaaccacgggcagaccttgctcgccggcgcgggcctgggcctgctcgccgtgaactcgggc

SEQ ID NO: 334528 - DNA, 170 bp, Zea mays
ctagcttttcactttcactacacgtgtacgagctcactgatctgatctcatctcaattctgacagcgccggtaggacggactccgactctccgagtgcgcgcgttgatcgcccatgggcaactacctgtcgtgcacgctggccaaggcgcccgggccgaggcccggcggc

SEQ ID NO: 334529 - DNA, 322 bp, Zea mays
  unsure (1)..(322): unsure at all n locations
ccgggtcgaggccacgcgtcacggatgatactgcggtggcggcgtgaagttggcggcatcttgcatncgtcgagatannatcgatggaaaggagctccgtgannatgagaggacgaacgaccgagtatatcggtaccctgaagatagaataccagactcatgtgaggctagtcttggccagatctattgtagtgcatacataagagatnactctggcaaagggttggtcgtcccaaccgggctggccccaaagtggaaagagtatgacnncgtgcatgtggcagtggcagcacncnaacgttggtgggattgaaatcgatcg

SEQ ID NO: 334530 - DNA, 280 bp, Zea mays
tagctcctgtcttctgatgtgtgctaacgcgaccattttcctatactcacagctctatagcgcccttttccccataccttccatcaatgaccgcttcagtatgtgaaaacccagcccttcaaccctacaggctccaacaagcaatcgcaacaagcaacttacctttatcacccctgttctttcaacaatcgccagccctatctttggtgcagtcattggtacaaaccatcaaggcacaacagctgcagcaactcgtgctaccagtgatcgccaagtgctt

SEQ ID NO: 334531 - DNA, 253 bp, Zea mays
cgcgggcgaccacgtgcccggccaccatgctctcgcttttcttcttcgacctagaccccaacctcacccgtcgccgtgcgttatcgcgctctgggccaccacagccgcgccctcctattcctactcctcctcatcgcccgccgtcggacccacgccggccgacgcggtggtcgagcttctccgcctggtggctgacccaagcgcggacccctgacccctctttcggaagctttcacattatctttacgcctac

SEQ ID NO: 334532 - DNA, 105 bp, Zea mays
  unsure (1)..(105): unsure at all n locations
ccggaacggaangcccgggtcgacgcgaggcgaacgtccacgcctccggcgttaactacttatttttttatatangcacgcacaaaattaaatgcagggggcggt

SEQ ID NO: 334533 - DNA, 415 bp, Zea mays
ccggggccgggctcagcctggcgtccgtccatacctaccgccgccgtctcggtcggatcctatccatcgtggagaagctggggcatgtggtccgcaccggcccgacaagcaccaagaaagacgcgctggccgcgctgctgtcgctggccggcgagagggagaacgtcggaaagctcgtgagcgccggcgtcgcgcaagtagccctgtctgcgatcagcgaagaggagaccgccgcggcagtgctggccgcattggcgaagcgcggcggcgcggatgcgatcgtgggcatcgatggcgccgtggcgcgtctggtggccgagatgcggcgcggcacggaatgggccagggagaacgcgacggcggcgctggtgctcctgtgccggcggatgggcgcgcgggtggtaatgcaagggat

SEQ ID NO: 334534 - DNA, 332 bp, Zea mays
  unsure (1)..(332): unsure at all n locations
cgaacgcgtggttcctccctctttggatacattcttttatcccattgggctaactacactgggtggtggcctaccactatatcagaagatacaaaatcttttcacgatactcaacactccttcattgacaactattcactcttttaagccaaagaactatcgcaccatcgcaatgatgttctccaagacttctgtccttctctaactgccctacaggccactctcgcagttgctggcaacgccatcgtcagcacccgttgctcttacgatatcntggtttggtctgtggaccagtcgcacacctcgggagcaattcgtgtgcctgcttcgtc

SEQ ID NO: 334535 - DNA, 341 bp, Zea mays
  unsure (1)..(341): unsure at all n locations
ggaannacccgggctcgacgccagcgcgnntccggctanngcacctcatctnntgcagcaggcgtgagctcgttccgacccacgatccgtgcccgtgtgtgtggggtgggaggatgtgctacangnncagcttaccgcttcnnccatggcngnnagccaggtngnnatgaagaaagcagcncnncggtgcacctttcgagtgccgagnnngggccttgnntcaggcngctttngcgctcacngnncggcccnncggcccnncggttcaagcgnnntcgtcaagtgcccgcnccatccanngcctcgagaagtggcgaacgtacccccaggtggtgggcagc

SEQ ID NO: 334536 - DNA, 351 bp, Zea mays
cctccacggccttcgccggcaaggccgtgatcgtgccgtcgtcgtccgccttcggggaggggcgcgtgacgatgcgcaagacggcggcgaaggccaagccagcggcggcgtccgggagcccgtggtacggccccgaccgcgtgctgtacctgggcccactgtccggcgagccgccgagctacctgacgggcgagttcccgggcgactacggctgggacaccgcggggctgtcggcggacccggagacgttcgccaagaaccgggagctggaggtgatccactcccgcttggccatgctgggcgcgctcggctgcgtcttcccggagcttctcgcccgcaacggcgttaagt

SEQ ID NO: 334537 - DNA, 398 bp, Zea mays
gtagtagcagccgcagcccaaacggttggcttttctggcagctgcacagcagacccttggggaagcttttctggcagctgcagctacatgattttgtctcggtgtagtagcagccgcagcccaaacggttgtaggggtgaaaacgggtagggtacccgaaacgggtaccggatacggatactcattcgggaccatttttcggatacggatacgggtatttttatattcgggacggatacgggtaatacccggatagtacagcttcggattcgggtcggatatggaacgagtactacccggtaaatacccggatattcgggtcggatacgggtacccggaattcgggtacccgatttttctttttctgcataataatatagttataaaaacatgacttt

SEQ ID NO: 334538 - DNA, 229 bp, Zea mays
  unsure (1)..(229): unsure at all n locations
ggaanacccggggcgacgccgacgcgtccggcacgccccagcttggctggttatantattagtgttgttcgccgccaaagaaagaaacggcctgctggcttcactctcacgccttccaggttcaaatgttttgagacgtgtacctacacgtnngcatgtggtttcaaagaaatggcggacctngctggcgttgcccaatggaagatactggcccacctcttttgctttt

SEQ ID NO: 334539 - DNA, 179 bp, Zea mays
  unsure (1)..(179): unsure at all n locations
cgttttaccaacctgtcgctgacctgggggaaaaccacnttggcgttaccctcaacttaatgcgcctttgcanngcacatcctcccgtttcgcccagctgnngcgtaatagccgaagaggctccgcacctgatcggcccttcccaacaagttgcgcagacctgaatgtgcgaatgggac

SEQ ID NO: 334540 - DNA, 71 bp, Zea mays
agaggagccaagcttacatacgcgtgcatgcgttgtctttgctctcctatagagtcacctagggtggggtt

SEQ ID NO: 334541 - DNA, 181 bp, Zea mays
  unsure (1)..(181): unsure at all n locations
cgcgctcttccgccgcaacgcaacctcgtcctttctcgttgtccgcggaccctcccggctccacgtngggcgcccaggcccagcacccgttcctcacgctcctgggcccgccgttgccgccggacaccgaggcggcggagccctccggggaggaggaggcgccgccggatgaggcgctcga

SEQ ID NO: 334542 - DNA, 301 bp, Zea mays
ggggggggcgcgcgaacaaaaatttttataaggtgtttttttattatagaaaaaattcacgacgcgggtcttacaaatccctatggatcgttttcatcaataagatatatcacccaaatgtcacaaaatgtctgttcagtctgtttggatgtcatcaacccacatggacccaatgtttgatcttgcaatgtgttcaggcttccttccacactttgtatatccaatcctctgaccattaaatgagatcagctgcgttgagatgcggatcgccctgttacaacaaaagtgaagagtctgtaaa

SEQ ID NO: 334543 - DNA, 173 bp, Zea mays
ccgcgcgtccgacaggatcttgcaaggttagggacccaggggttacacattttataactgaaaaacacatgggcggtttttgaggttgccaagttttaatttaaatgcaaatccacttggccaccaccatgtaccaaagcaggcttttaacattaaaggagaatgtttttttt

SEQ ID NO: 334544 - DNA, 231 bp, Zea mays
  unsure (1)..(231): unsure at all n locations
aaaaaccgggncggcccaagccgtccgaagggttctttccatagagaataatatacagtttattcgacgaaagaaacgaatgtaatatagagatatgagtggaatgcagcaaccgaactggcggaacaggcttccgttttcaatttcctgtgggaagtcgggtagggaaatcctggggggtgatttggtttaataaaccttgcctgccgatttgaatctcgtttaaccagc

SEQ ID NO: 334545 - DNA, 369 bp, Zea mays
  unsure (1)..(369): unsure at all n locations
gaaaacgcctttacataaaaaataataaacatttttattttacaaaaaacacatatgaaatctggctgtttttattgaatgcaggcacccaacngacaaaacaaacttacaatttccatttccttttcaaagtcatgtaacgcaatcctgtagtgtgtatttgattcatcaaccattcctgaccatttgaatctcttatcaccaacaaaaaaaaaaaaaaaaccctttcctatttatattatccaaacttacttacccattcatgcaatgttattccttttttatattttcacctaaatatcaattcactggccgggggttaacaaactttaaaactataaaaaaccctttatgtaacctcaactcaat

SEQ ID NO: 334546 - DNA, 108 bp, Zea mays
  unsure (1)..(108): unsure at all n locations
accggancggaaaaaccggggccgaccgacgcgtccgcccacgcgtccgcaattcttctaatgaaaatattattaaaaaaaaaaaaaaaaaaaaaaagggggggggtt

SEQ ID NO: 334547 - DNA, 132 bp, Zea mays
  unsure (1)..(132): unsure at all n locations
accggaccggaattcccgggggggctggatntaaataaagccatacnaatgatgctngacgcatttttncgcacaatggttctgccccatctaggggcaagctaaaggcagcttttcaaaaaaatttaaaaa

SEQ ID NO: 334548 - DNA, 207 bp, Zea mays
cccacgcgtccgctcttggatgccccttcttttccatcttcttcctcctcaaacctgggcgggcgctcaccatacaaaaccctagccacccccctacccatttctccccctcctccaaggtgcaaccctcccgcgtggttctccgacgtgtggctgcgatctcaattggagtttggagggaggaacgacgaagggaacaacccaagg

SEQ ID NO: 334549 - DNA, 305 bp, Zea mays
ccacgcgtccgattggcccaactagcaacatagaaggcacattagtgtaccaacaatggcagccaaaatatggggccgccttatgctccttgggctttctgcaagtgctgctacggcaaccattttcccgcaatgctaacaagctcctatagcttcccttcttcccccgtacctctcaccagtgttgtcttcagtatgtgaaaacccaattcttcaaccctacaggatccaacatgcaattgcatcaggcatcttacctttatcacccttgttcctgcaacaatcatcagccctattacagcagt

SEQ ID NO: 334550 - DNA, 93 bp, Zea mays
ccccatcctctcaacaaacaaacaaacaacccaaaaactctctctccatctaacctaccattctctcacttcatcctactaccaatcaaccaa

SEQ ID NO: 334551 - DNA, 102 bp, Zea mays
ggacgaccacgcgtgcgacaatagttattgggggtgtatgtttgtgattataatttgttcaaaatatataatctaacggatgtgaaattaaagtgtcaggtc

SEQ ID NO: 334552 - DNA, 416 bp, Zea mays
ttccaggtttcgacgctagccagtcactctctatacacagtcacttctgacacccacgttgtgtaccgcccttcggcatcaatcgttcattctctcagcaaacaaacaaacaacccgaaaactctctctccgtcgaacctaccagtctctcacttcatccgactaccaatcaaccaaaatgcgtttcgctatctccgtcgctgcccttgctggcgccgccatggccgctcctagcgctggctaccccgagggcaagcccgccgacaacgtcgtggttgagtggaccaccgtcgtcaagaccgtttacgtcaccgagggttaccgatacgaggctcctaccttcactgccgtctacgaggccccagcagtcaccaccacccctgtctatgaagctcccgcttaatccactggcaagc

SEQ ID NO: 334553 - DNA, 144 bp, Zea mays
  unsure (1)..(144): unsure at all n locations
ccggggtcgacgccaacgcgtccggtacatgctcaaaccacagngactgactttactcttggaacaangcnnttggtgcaactccaagcgaaacgagcgatccatgagtggctgatgcacatattcggctgtatcaaagcaggc

SEQ ID NO: 334554 - DNA, 57 bp, Zea mays
cggaaaacccgggtcgacccacgcgtacggcctacggcaacaagaagttcgagacgc

SEQ ID NO: 334555 - DNA, 77 bp, Zea mays
gtacatcaatcatcttcaggcatacgagctgtgttctctttaggcgctcgagacctgctggggggcgttcgtttcaa

SEQ ID NO: 334556 - DNA, 327 bp, Zea mays
  unsure (1)..(327): unsure at all n locations
cggggcgaccgcacgcgtacgccccccagtccggaccccggaggagccatatcatggcgtccacctcctgctgcctactggaccattcaaccgtccgcctcgaggcgtcatcacncctttcactcctcaagccgacgcagcggaagttccgcgccctgcactccctcgctacgctcgtctgcagtccacgcgtacgaccacgcgtgcgcccacgcgttcgcccactcgtacgaaccaccatccacgcactgctagtaagcgagcttagctactgatcgtcgttaagcactctttagcttgatctttctaagcggttagctggtagca

SEQ ID NO: 334557 - DNA, 415 bp, Zea mays
ttaaaaaaatatttttttttttttatttatattttttatatttttaaataattaatataatttttttttttttattatatttttttttttttttttagttttaataaaatatattttttttttttttttatatttaaatttttttaatttttatttttttattttttgttttttaatttttaaattattttttttttaattttattttattatttttttatattaaattatttgttttggatggagtttatttttttttttttataatttatttttattttttttaattaattttttattaatttaatttttttttttttatatattattatttttatttttttttttttatatttatttttttttttatttttaattttttatttttattattatatattatattttttatttt

SEQ ID NO: 334558 - DNA, 467 bp, Zea mays
cgagctggtagatgacggagcccgccacgatagtccataagcggccggcgaaggagtcggcgactaggccgccaattataggggtgaggttgggagaagccatggaagttgttgagcgtgttggaggcgtcgacgagcgtcaactgcagctgctgcgtcaggtaggtgatcaggttggcgttgaacccgatcgttgcgaaccggtcgcagaaatcgtttgatgcaccaccacggacatcttagctcttgtttagcttttacactggctacaatatatgatagacgcgttgggtagtagagactagagaaacacttcatctaggatgaacggcacggtcttgaagccgccctgcttcctcttgtcgcccagatccccttcgccatgccatcgcctgctggcgtctttctccaacatgcctgcaaggtgtgcagcagcacgggaaccagagatccctccctaggagttg

SEQ ID NO: 334559 - DNA, 206 bp, Zea mays
  unsure (1)..(206): unsure at all n locations
cccactcattcgcggacgcgtgggcggactcgtgggctttccacctgctggccgacccggggtctccggcggctaagccggcgcagcggatctcacaattcnctctgccttcgtcgtcctcccgcggtccggccccgctcctcgcgttcacctaggaggcggtttatgctctcaatgtgttcgtggccccgcatcttgaccccatc

SEQ ID NO: 334560 - DNA, 180 bp, Zea mays
  unsure (1)..(180): unsure at all n locations
aaaaaannaaaaaaaaaaannaaaaaaaaatttttttataatttaaaaaaaaaaaaaanaaaaaaaggaaaaaaaggaaaaataaaaagggcgcgggccgggttnaaaaaatccaagctttacttcacccgtccatcgcaacgtaataactttttttatagggtcacctaaattaaatta

SEQ ID NO: 334561 - DNA, 98 bp, Zea mays
acagaaacgaagattcgcagcctgggtatcgttatggcacaaatattaatcgagattgaaaagccacaaagttggaattaaaatgggaatttagctgg

SEQ ID NO: 334562 - DNA, 291 bp, Zea mays
  unsure (1)..(291): unsure at all n locations
ccggnnnccggaaggcccgggtgcgacgccacgtcgtctcgctccacgacgtctcgtcggacgtcgtgtggcggctatcgcatctcgttccgcttccttctgtgtggacagagtgttcttcgagcgagcgacggaggacgtacaagatactaccgggcttggctgtggcttgttctctgggacgtcctcgactcagcagacactcctcgctgtactaaggagggagctaggagaaagatgatagcgtagatggcgctcggacaaacttctcggctcggacattcgcaggtg

SEQ ID NO: 334563 - DNA, 453 bp, Zea mays
  unsure (1)..(453): unsure at all n locations
acccacgcgtacatatatacactataatgttcattggnaaattttttgattatttcactggtaacattaacgggttttctgtaaattatcaggcccttcggcttaataatatttttttattattttcaatcatttataatacatcatttaaacttttcacaaccatactatatatatttattcataattcactaattataacacaacttaatttttccattattcatatcaaaactaaaattatccaaataaatgaatcaccaaaaactcttcatgttcatactatatttaatactaatacaatattatatactcttacattttacctcttactttcttactatatagcaaattcaatactataaaaaatccttaaagataaatcatttactttctattgatcaattctataaccttcagaaactaatcaatccttataatacactttcttat

SEQ ID NO: 334564 - DNA, 63 bp, Zea mays
aaaaaaaaaaaaaaaaaaaaaaaaaaaaatttaaaaattttaaaaaaaaaaaaaaaaaaaaga

SEQ ID NO: 334565 - DNA, 197 bp, Zea mays
ggaccgggcgcctggtaataaaaaaaaaaaggggcggttaagacaagctggtacctcatgcatatattttatggataacaatatgccggtacaaccgactggaaccgcgtccaataatgctgacaatcctttgcgctggcgtaacaaaggccgacacgcttcaacatgcacctgagcaaggacccccgacggcataa

SEQ ID NO: 334566 - DNA, 78 bp, Zea mays
  unsure (1)..(78): unsure at all n locations
ggccgaacccgtcgacccactcgtcaccngagtattgaatggaaactttcggcggcagaacgggtatgaactgtaaga

SEQ ID NO: 334567 - DNA, 422 bp, Zea mays
cccataccttccatcaatgatagcttcagtatgtgaaaacccagctcttcaaccctataggctccaacaagcaatcgcagcaagcagcatacctttatcacccttgtttcaacaatcgccagccctatctttggtgcagtcattggtacaaaccatcagggcacagcagctgcagcaactcgtgctacctgtgatcaaccaagtagctctggcaaacctttctccctactctcagcaacaacaatttcttccattcaaccaactgtctacattgaaccgtgctgcttatttgcagcaacaactattaccattcagccagctagctactgcctactctcagcaacaacaacttcttccatttaaccaattggccgcactgaaccccgctgcttatttgcagcagcaaatactactaccattta

SEQ ID NO: 334568 - DNA, 328 bp, Zea mays
aaaaaaaaaaaaaaaaaaaaaaaaaaaatttataaaaatataaaaaaaaaaaaaaaaaagcggaattttgaaaaattttaggaaattgaggaaaatattattaaaaaaaaaattaaattaaaaaaaaaaaattattgtcttccctcttttttaaaattcaaaatcttttttcccctttaattaaattataattttttttatttgtgccataaaaataaaatcttttcccgatttttataaaaactaattacttataaaatttttgcatttccaaaattattttttttataaataattcttttttggcatgtttgttattaattaaaaa

SEQ ID NO: 334569 - DNA, 211 bp, Zea mays
cggccgacccacgctttctaaacaaaatacaattacttttttttaatttttacaaccaaaaacaaccgacattacgcaaatcttacccggtaaacgcaattttataaactttttacacatatacaaaccaacccacacaacctttacatcattcttttatcaatgatcattaatgtacatctcccaacttctttctcatctccaacttatc

SEQ ID NO: 334570 - DNA, 434 bp, Zea mays
  unsure (1)..(434): unsure at all n locations
cggaaaaccgggccgacccacgcgtacggcaaccggtccagcactttcacgctcagctctagcaatggctgnctccaccatggcgagctcctccacggcgatggccggcacccccatcaaggtgggctccttcggcgagggccgcatcaccatgcgcaagaccgtgggcaagcccaaggtggcggcgtccggcagcccctggtacggccccgaccgcgtcaagtacctcggccccttctccggcgagcccccgagctacctcaccggcgagttccccggcgactacggctgggacaccgccgggctgtccgccgaccccgagaccttcgccaagaaccgcgagctggaggtgatccactcccgctgggccatgctcggcgcgctcggctgcgtctttcccgagctgctctcccgcaacggcgtcaagttcggcg

SEQ ID NO: 334571 - DNA, 460 bp, Zea mays
  unsure (1)..(460): unsure at all n locations
gggttggcttctcctccccctccggttcgggttcgggttcgtgaggttctccggggttcggtttcgtgggtgagcggatcgagatggcggcntcngatgttgagtaccgctgcttcgtcggcggcctcgcctgggccacggacgaccactccctccacaacgccttcagcacctacggcgaggtcctcgagtccaagatcatcctcgatcgggagacgcagaggtcccgcggcttcggcttcgtcaccttctccacggaggaggcgatgcggaacgccatcgagggcatgaacggcaaggagctggacggccgcaacatcaccgtcaacgaggcccagtcccgcggcggccgtggaggcggcggcggtgggtacggtggtggccgtggaggcggcggctactgcggtggcgggcgccgtgatggcggcggcggctactgcggtggcggcggctactgtgg

SEQ ID NO: 334572 - DNA, 151 bp, Zea mays
aaaaaaaaaaaaaaaaaaaaaaaaaaaaatttaaaaaattaaaaaaaaaaaaaaaaaaaagaaaaaaggggcgccctttttgggggatccggccttacttccccttgcttgccacgaaataatttttttatagtgccccctaaataaaatt

SEQ ID NO: 334573 - DNA, 187 bp, Zea mays
cgtggcggcgcggcgcgcccatgcccggttcgcgcatgttcttcttcgcctgcgcgggggtggacggggccgtgtacgcgaccggcggccactacacctataagaacgcgctgcgctcggtgctggcctacgacccgggcgcctacgcgtgggcggggcttcttttctattttgaggatcgctacta

SEQ ID NO: 334574 - DNA, 390 bp, Zea mays
  unsure (1)..(390): unsure at all n locations
aagagaaaaaaaaaaaaaaaaaaaaaaaaatataaaaaaaaaaaaaaaaaaaggaaaaaaggggaaaaaaaaaaggggaaaaaggacaaaaaaaaaaaaaaaaaagggggggggccgccaaaaggaacaaaagcaaacaaccgggggcggggaaggaaaaagccgnaaaaaggggcaacaaaaaaaaaaaaaaggggcggggngaaaaaaaagcgggaaggggaaaaaccggggggaaccaaaaaaaaaggcgggggaaaaaaaaccccnnnncccaagggggcaaaaaaaaaaaaaggccagaacaaagggaccncccaaaaaggggccaacccaaaagggaaaagggaacgcccccnaaaccgggaaaaaaagggggggggggggggg

SEQ ID NO: 334575 - DNA, 312 bp, Zea mays
tttaaattttttcattctttacacccaccgtcgaataaaatgctgtacttatatgcacacacgtttgaaatgcattaatttctgtttgatttgatcttgtatcattacgctctcatcttcatttgctctgttaaattctctattattttttcatagtctgtaaattttatgtatgatatcttttctagattatactctatttttttcctaaaataaaaattaaatctgtttcctttctaatttatccatacttactttcctctattattttacatcataatcttttctatagttttattcctaaattttatt

SEQ ID NO: 334576 - DNA, 261 bp, Zea mays
aaaaaaaaaaaaaaaaaaaaaaaaaaaaaagagagaaaaaaaaaaaaaaaaaagaaaaaaaaaaaaaaaaaaaaaaaaaaagaaaaaaaaaaaaaaaaaagaaaaaaaaaaaaaaaaaaaaaaaaaaaaaagaaaaaaagaaaaaaaaaaagaaaaaaagaaaaaaaaaaaaaaaagaaaaaaaaaaaaaaaaaaaaaaaaaaaaaaaaaaaagaaaaaaaaaaaaaaaaggaaaaagaaaaaaaaaaaaaggaaagaaaa

SEQ ID NO: 334577 - DNA, 173 bp, Zea mays
ctggtgctgattatgtcttttaatcctgtgtttgccggccaaaactttatcgacaggcgggtaattaaaagggcggacgcgataattatattttcttataatgctatgaacccctgtattgaggtttacacttttctttgtcctaaatatgcctacaatgttatttaagcttt

SEQ ID NO: 334578 - DNA, 296 bp, Zea mays
gcccggaattcccggtccgaccaatgaaaattggttattttgttaccaaggaattttttgtttttttaacaaaacagcaatcctaaaggggggattaaaaattcctgcaaatgggatccatacggtcaaaaggtcccctttacaggatgttgttgtttttgttggctcaaatataattggaatggagggattcagcattggtgccatcaggtttgtttttaaacaccaacttggttttccccacacaatgccaccaacttgaatttttttttgttttttaattggaaggaaaagaa

SEQ ID NO: 334579 - DNA, 392 bp, Zea mays
aaaaaatttttaaattttaaaaaaaaaaaaaaaaaaaaaaaaaaaataaaaataaaaaaaaaaaaaaaaggggggggcctttttaaaggaccaaagtttactaccccggcctggcaaggaaaaatttttttaatggggaccccaaaattaaattaatggcccgggttttaaaaccgtgggaatgggaaaaacccgggggtccccaaattaaatgccttggaaaaaaacccccttttccccagtggggtaaaaaggaaaaaggcccgaaccatcgcccttttcaaaaatttgccaacccgaaagggaaaagggacccccccctgaaccggccaataaagcccggggggggggggggttccccccagtggaccccttaaaatttgcaaggccct

SEQ ID NO: 334580 - DNA, 319 bp, Zea mays
accgggagagcacccctcctagggcctttgatccatggccctaaaagattcggccgtggccactcgggggccaaaaaaggctcctccggctttttttttttgccctggccgccgtggccgccttcctctttttaaagttggccaccgccgtcaatggggactggaccctcgattcccggggtccgccgttgcggaagagggtcaacggcaaggccgggtggataactggagctagccgcgggattgggaaggttcttgcaatgccactttccaaatttaggggcaaagctgttcctttttgcccgtaacaaggaccccc

SEQ ID NO: 334581 - DNA, 446 bp, Zea mays
gcccggaattcccgggccgccccacccgtccgattggcatgtggccagggggatgtttttatataaccattttttaaaggcacttgagaaaggctgggagaagggcatttttatctgcagggatggggtgacctccaaaaggatgggcaggaaaataaccaggctggcctattttaatggctataatgggggggacccctttgttggccttggaatgggacctatgtttcattctgggccactaattttccatcatgccaccgaaacctaagggcgtttggttgggggccaacctattccaattgaccctatcttaccatgggaaaaaccaaagggggttaccatggaaggatggatggccaactgcccctgttgatggaagctggcctgcccatttggggcataccatcctggggacttgggccggggcaaaaatcctgccaaag

SEQ ID NO: 334582 - DNA, 437 bp, Zea mays
ggcccggaattccggggtggaccacacgcttccgtgaacccttggccggacccgtgtttggccttttggccaaaggtttggccatgatcctgtggggcggtaaaaagaaccgtggggcctcgaacaaccccaacggcaagggggacgacacctccaagcccatgacggacccattttgccgtgggaccagaaactcccccagggaattaaccttaattaacgggggcaggaggaactccgttggtttgcacagaaaggggttcagggagttgtactgtttaagcccgggatccaagtaccagtggtccggaaggtttgcttacggggtctaagggccggcattgttgaatctcttaatgtttaatcccgaaaacacttgggggggggtttataccttgtgcaacccaaatctttaggtttgctattatttggaaaat

SEQ ID NO: 334583 - DNA, 426 bp, Zea mays
cgggcccggaattccggggcggaccacagccgtccggggcgccgccaccgccggggaatttttggttgttgttaaggcctgggcgtgcccacaaacccatgcccctggctgtggattaacgtgccccgaaaaaggggacctgtttgtttagattaagggccttgcaggtggcaaagttttataggttgaaatcaaccaggtcggtaaggaggcaggcatgtaaaaactaaggctgttttaagttaattggtccaattgggacctgaatggtattaagctaaacttttgtgaagggatttttttaaaaaaaaaaaaaaggggtggccgttttagaggtaccatgttttcttccccgtgcatgctacgttttaattttttttatggggtccccaaaatttaattaaatggccttggttttaaaacctt

SEQ ID NO: 334584 - DNA, 487 bp, Zea mays
  unsure (1)..(487): unsure at all n locations
cgggccggaaatnccggggcggcccaacccgtccaacaatttaattggtttttttaaggaaaaattttttattttaaaaaaaaaaaaaaaaaaaaaaaaaaaaaaaaaaaaaaaaaaaaaaaaaaaaaaaaaaaaaaaaaaaaaaaaaaaggggggggccctttaaaggaaccaaagttaactacccctgcatggcaacgaaaaagttttttaatagggcccctaaaataaaataaatgggccgtgttttaaaaacgtgggaccgggaaaaacccggggttacccaaattaaaagccttggaaaaaaatccccttttcccaagtggggaaaaaaccaaaaaggccccacccattcccctttccaaaaattggccaaccctaaagggcaaagggaccccccctctaaccggccaataaaccccggggggggtgggggtaaccccaaggggacccgtaaaatttgcaaggccctaaggccccgttcttt

SEQ ID NO: 334585 - DNA, 214 bp, Zea mays
aaaggggaccccccctgtaccggcccattaagcccgggggtggggggggttccccccagggggcccgttccatttgccggggccttagggcccgttcctttggtttttttcccttcttttttggcaacgttggccggttttccccgtcaggttttaaatggggggctcctttaagggttccgtttaagggttttacggaaccttgaccccaaaa

SEQ ID NO: 334586 - DNA, 227 bp, Zea mays
ccaaccggccgggccccccggcggaccagggggggaacaaaaattggccttacccgccggcggggggggggcggacaccgcaacaggcaaaaaactccgggcaacctggcaaaggaaaaaacaccaggaaatcggccaaccaaccaacccccggaacggtttaagtggaaggcggaaggcaaaacggtcaacccaatggaccaaaggaaactaatttttccccaagc

SEQ ID NO: 334587 - DNA, 444 bp, Zea mays
ccggcccggaattccggggcggccccacccgtccggaaggacctttttgggcaaccggagaacagggttttttttgcctcccaagttccggatgatccgaaggccaccaacaagaaaaccctgccaaaaaaaaaccagaagctgaaagagcttttgcaaaagcttttggcgtccggcaccaatcaaaggggggtaataacggccctaagggagaaggtaaaggtgctggaccggaggttgccccccaggaagagaccaaaggggggggggcccaagccatccaggcatgcttcttgggtccactgaagggataagtttgtagggtttggaggtttaatgtggtttggatcccaaggtggcttcctgggtccagttatggggcactgggtaggaatagccatgctggggaactgggcttggttttgaccaccacaagggggggca

SEQ ID NO: 334588 - DNA, 172 bp, Zea mays
cggaattccggggtggaccacacccgtccggaaaggcagttccggttcctcctttctgtgttgtcttccggccaactccaacttttttttgggttccagcacacaaaaacgtgttctcccccatggccggccacctgttctggccgaggtttccggagctgaagggggccat

SEQ ID NO: 334589 - DNA, 453 bp, Zea mays
aaaaaaaatatataaaaatataaaaactaatttttaattttttaaaaaaaaaaaaaaaaaaagaaataaaagaaataaaaaaaaaaaaaaaaaaaaaaaaaaaaaaaagggggggccctttttaaggatccaaagcttcctaccccggcctgccaacgtaaaattttttttttggggcccccaaattaaaattaacggcccgtgttttaaaaaccttggactgggaaaaacctggggttacccaaataaaatgcctgtgaaaaaaatccccttttcccaaggggggaaaaaaaaaaaagggccctaccaattcccctttccaaaaattggcccatcctaaagggcaatgggaacccccctttaacgggccaataaatcccggggggggggggggttccccccaggggaccctttacatttgcaaggccctaagcccccgttcttttgtttttt

SEQ ID NO: 334590 - DNA, 256 bp, Zea mays
cggccgacccggcccggaattcccgggtcgaccacacccttccgcctgggtctgggggggacctatccatccaatttggggggggggggtggcattttagtggggctttgttcgggggaggctctctttcaaccacatgaaacctggggccttttgccattgatggaaagggtttaaggccctcttcaaatgcttatgttggccagtcctgaccgcgttcctgaaatgaccttaaggcccggattagggttgacct

SEQ ID NO: 334591 - DNA, 245 bp, Zea mays
gcaaaacatcctaactatagtggaaggggttaaacctataatcaggggccccgaggggacccagctttggaccaagtccttggctagccagggataatatcgaatctgaaagcatggcatggcaatccataattggtttactggaccacataatgcatgggtaacttatggatgtcttttggggtttaagtatggtgggaataccttctttgccattaaaaaaaatgttaattccttttcaaaaa

SEQ ID NO: 334592 - DNA, 340 bp, Zea mays
cggaattcccgatcggaccaagccataagtttactcttcgggagggagaacatttgtatttttggttccggaccaaccgccggttccatggcaaaccaaccttgcttgcagggccaattatattgtataaataaggctgtgggcccttttttatttggcttgatccaacaagcgggctaagtcggcgtcttggcttttccttttataacacataaaacatatatccccttccttgagtgaatgcttgtggccgtcttgtcaaatctggacctacaaggttccttcaaacctcgagggttggttttttaataagaccatgtttgattaaaccctattggtt

SEQ ID NO: 334593 - DNA, 456 bp, Zea mays
cccacacccgtccggaaggggcacctgaggatttaggtaagtttttggcaccggggggggaagtcaacatgggggatcctgaaggtggaactccgttgaattgggttgttgaccggggccatttaagtgttgtgggggttttggcaaaactaaatgcggccctgattgccaaggccaccgaagggcaaacggaactccactccgctgttgttggggaaagagaaaacatttaaaaattgctggtgaagcatcatgcctcctttaaaatcagggatgaggttgggaccacggaacaggacttgtgccttccaagttgtgttttattgaaccggccaaattgacatccaaaatgctccttatcattagcgtgcctttaagttgtgcccgaccttggccaatggtgtttttatttatgggggacatatggtgtgccttgtgtgaatggccgttcttggt

SEQ ID NO: 334594 - DNA, 409 bp, Zea mays
aaattaaaacaaataaatggaattattataattattaaattaaaaaaataagggccgctctttttaaaggaccaaagttaacaacccctgtgctagcaagataaaattttttttttggggtaactaaatttaaattaattggccgtggtttaaaaacgctgtgactggaaaaaccttgggtttcccaattttaatcttttggagaaataatccccttttctccggatgtcttaataccaaaaaggcccacaccattctgcctttccaaaaatttgcccaccttaattggaaatgggaactccccctgatcgggcctattaagcccggggggtggggggtttcccccaatgttactctttatattttgcaaggatcatagtgcccgttctttaggatttatacctttctt

SEQ ID NO: 334595 - DNA, 403 bp, Zea mays
ccggcccggaattcccgggtcgaccacacccttccgcgaccccttggcttcaacaccggtggcttttgtttcccgccgttccggtccggggaaggcggagaagtagaaggcgttgccgtcaccatttcgtccgggggtttcatccttttgggggccgtcctgttcctggattacttaagggggtcctaggggacccttcaaaccggcccacggaggaccggtagtggctacaactccggcctggcccaccattaaattcctttttttttttttttaacacacattttgggtttgtggttgggaagaaaactgtgctctcttttttccacaaccttttgttgcataaatgttctgggttcttttggcgtaatctctttttttgttacaaaaaaaattatttttt

SEQ ID NO: 334596 - DNA, 346 bp, Zea mays
cgggcccggaattccggggtggcccacacccgtccgggaggtggatccattacctcctattttaatttttgcttaaccccagggttggggccctccagaggagcccacccttgtcccaactttccatttaagggggtggctggttcaataggccaatcttatatcctaaggctggcctttatttagtctataggtcctagttaaaataacaaatgctgcttgcagcctgggatattgggggggggaccacattgtggatggcttatggttaagaaggtaatgtatttttttggggaggggtaatattgtggcattatttttggcaccaatgttgcttggggtaaaa

SEQ ID NO: 334597 - DNA, 463 bp, Zea mays
cgggcccggaattccggggtggaccaaggcttccgaccacaaccatggacggtggatctaccacttgtggcaccggaccaaagcacagggggccgggaccgggttccagttaacaatccaggcttatcctgtccacccccagatggccagaccagacccgaccgcccgccagggcaccaccagttttcttgggtaaggtggtggtaaatggatggcgggaaaactaaatggtggttaccttctttccggttgggctggtttccgtttttatggttaaagaaccgaccgctatggatggtatattggaccgagggggaaccagcttgcagcctttatggggaaaggtttaatatgctttggcagggtggaagttggattttgggggatcaggcctgcagcattgtaagggactccatgcccatgaaaaaaattgggttaaatgggaatgtttcagggtttaagg

SEQ ID NO: 334598 - DNA, 360 bp, Zea mays
  unsure (1)..(360): unsure at all n locations
acccggggcggaccaaggcgnccgccaacccggccgggacccgggaaggcggcaataaagaagaaggcggggccaaggggcaagcgaacgaggggccgccaggaggcagaaaacaggctcccgaaagaaggacccaaaaggggaggcccagaaaccagaacggcggaaaaaggggggggccaaaaggaaacacccggggaaaaacgagggccaagcaaaaaaacaacgaaggcccaaaaccgccaaaaaccgccggagggaagcccaaagccaggggccacaaaaagccggcggagaaggaggccaaaaagaaaggcaccgggggaaaacggaggcggaccggaagggaaacggaccccc

SEQ ID NO: 334599 - DNA, 258 bp, Zea mays
aaaaaccggggaaacggaacaatgaaccggggggaggcaacaacaggccgaagggcaaaccaaaaaaccctggggcggcagggcatccaaaaaaatattccgccggggaagcaaaccagggacctcccttggaggaaaaaaaaaaaaaaaaaaaaaaaaaaaaaagaaaaaaaaaacagaaaaaaaaaaaaaaaaaaaagaatagaaaacgacaaaaaaaaaaaaaaaaaggaaaacaaagaataaataactaaaaga

SEQ ID NO: 334600 - DNA, 294 bp, Zea mays
  unsure (1)..(294): unsure at all n locations
gggcccggaannccggggcggacccacccgtccgagagaatgttaaattcgccaaaacctaggatttttttttttaaacaccatccctggggccggttctgccatattaccagaccaccccaccgggaatggggaagggctaaacttgatgtttccgatgcgcaccggcaaagaaggcaccggtgcctggattaacttgttggcctgggaccgggaaaattaacctgttggtttttgtttggccctgaaccggggggggctgtggccaaaaagactctgtccaaattttgattt

SEQ ID NO: 334601 - DNA, 339 bp, Zea mays
ccggcccggaattcccgggtcgaccacacccttccgccacacccgtccgccaacccgtccgttgtggttttttcctccccctccggttcgggttcgggttcggaaggttttccggggtccgttttcatggttaagcgaatcaagatgccgccttcggatgttaagacccgtggtttctgtggtggccttccctgggcaacgaacaacaactccttcaaaaacgccttatgaactaacggtaaggtctttgagtccaaatatacatccttaatcggagaacccatagatcctccgtcttttttttattaactttttccacgaagaaggtatttctgtaac

SEQ ID NO: 334602 - DNA, 342 bp, Zea mays
cgggtccggaatccccgggtcgaccacacccttccggcggtccgggcccttcccaaggtataggtatgaggataagaagaagaacctttggaaggcgccgcttggaactggccggcccaatttattaaggtctggatgggatgtatatatatattaatctaaacttatatggattcctgaggttaaaaaatttaaaaaaaatataaaatatgggtggcctctttatagattctcaactttatttcccctttcattcatacatatattttctttataggtttcatctatattataatttttgtcttttttttttcaactttttaattggaaaactcttttttt

SEQ ID NO: 334603 - DNA, 359 bp, Zea mays
ccggcccggaattccggggtggaccacacccttccgcggccccggggccgtttttgagctggagttgttcatgagccacaccaggccctactgggctgaaatggttaacaccgggtccactaaaaaccgcagggggatcggggggcgtgctgcccacttggccattggggtaacgaccaagctggttgggctccgcacccgggaggccgggtggtttggtttttggcttaaccgccgacctggatgtggccatccctttctgtgggaaactacttggctggggcttggttggacctgaaacccagagtcactccaacttttttgcaatcagttcctcctaaaagggggcaatttccact

SEQ ID NO: 334604 - DNA, 236 bp, Zea mays
  unsure (1)..(236): unsure at all n locations
cgggccggaaanccggggcgggccaacccgcccgggggggccaaccaacccccnccaaaaacaacataaaagtcggaaccacccaaagggcggggggccaggaggggggcggccagggcaaggcagggcaaggaacagcaggggggccgcggagcaagggggggcccgccagcaggaaccaggagcaggcgggacaaggccccacccaaggcaccgggaaagggcgaaggcaggaa

SEQ ID NO: 334605 - DNA, 84 bp, Zea mays
  unsure (1)..(84): unsure at all n locations
aaannccgggtcgacccaaccggcccgggtcccttgggcattaatcaaccctaaaggttaaaatttgggttaggggaagcctct

SEQ ID NO: 334606 - DNA, 348 bp, Zea mays
  unsure (1)..(348): unsure at all n locations
aacgggccnnggaannccggggaggaccaacggggcggaaaaaaaagaaaacgaaaaacaagaaaacaattaaaaaatttaataaaaaaaaaaaaaaaaaagggaaaggggaaaaaaaaaaaaaaaaaaaggaaaaaaaaaaaaaaaagggggggggggcaaaaagggaaaaagagaaaaaaaagggggaggggaagaaaaagaacaaaaaaaggggaaaaaaaaaaaaaaagaagggggggaggaaaagaaaaggagagaggggaaaaaccggggagtaacaaaaaaaaaaagaaggaaagaaaaacccataaagaagagaggggaaaaaaagaaaagggcaggaac

SEQ ID NO: 334607 - DNA, 470 bp, Zea mays
ccggcccggaattccgggtcggacccaggcgtccgttcaggggtttggcgaccgggggggcttggttgatggctccacctaaggcaagcggtttggaccattttttaatggcagaggaagttaaatttaagttggccgggggttggaaaaactgggatgagcctgtaaaggatctcccaacgttgggggtgggccattaatggggatctgtattccacatgtggatgggatcaagatttgctgggcagcgaaggggaaatgtcctgatgtcctttaccaccagggaggcaggctttgcgatcccacttatttaacctgtaatggttcctatggcccaaagtttgggccctatattttcccaatgggcatcgtatccaacaatccgatttggggcagaagcagcttttaagcagttggggaatttaagcccacttgtggttaagcaatttttacctttacttaaacaactt

SEQ ID NO: 334608 - DNA, 367 bp, Zea mays
cggaattccggggcggaccacacccgtccggctaatgccggggcgtccccacaaatacatttttccgggcggtggaataacggccaccggggaggggtatctgtttgattggattaagggccttgcaggtggaaaagtttaataggcggaaatcaaccaggtcggtaggggggcagtcatgtaagacctaaggttgttttaatttaatttgcccaatttggaacggattggtaaaatgtttaatttatgaagagggtactctttatggtgtatttctccaacctatcttattaaccttataataaattatattatagggttgaaccttatctcttttataattataacaaaaataaatatagggcct

SEQ ID NO: 334609 - DNA, 178 bp, Zea mays
ccggcccggaatccccgggccgaccacacccttccgccacacccgtccgcggcccctgggttttaatttatttttacagaccggtacacccagcctcatggaattttaaaaaagggcggcgctttacttcccttttaaaaaaaaaaaattcaataaatatttaaatcaaataaaataa

SEQ ID NO: 334610 - DNA, 186 bp, Zea mays
ccggtccggaatccccgggccgcccacacccttccgaaaaaaaaaaaaataaaaaaaaaatttaaatttttaaaaaaaaaaaaaaaaaaaaaaaatgggggggccctttaaaaggacccaggttacctatcccttccttccaacttaatacttttctattggggcccccaaaatcaaattaattgc

SEQ ID NO: 334611 - DNA, 416 bp, Zea mays
  unsure (1)..(416): unsure at all n locations
cggccggaaacccgggcggcccacgcggcccaaggccaagggggggacccaaagaaaacccccggacctcaagacccggaanaaccnggcggggangggccaaccaaggccgggcgaaggaaccacccaacggggaacggccaacaacgggaccccngccccaccaanagccaaagggggccnaaacgggccccnnaggacggacgacccccaacaaancaaccggccaaaggacccnngggaggaagaaaccagggcggcggcccaacnagggaggcggggccaaggggaccggggggaaaccgcaggaaaaccggccaaccagcccggagcccccacacaggccaaaggccaacgggacggggggaaccaccaccagaaggggcccggggggcaaggccacccaccagacaaag

SEQ ID NO: 334612 - DNA, 392 bp, Zea mays
cgggcccggaattccggggtggacccacccgtccggatttggttttcaattgcaaaaaacttttttttttcttttggccgccagggactcttacttgggaatggctgcccatagtaagctttcgggttgaaggttctccttttttgtgaaatcatgccttgttccaaatggaaaccgggtttgtggcttaagtccttgaccaaactccgttttgtaaccggcagttcctattgccaaagggccaacaacttgtttgtttcattacgctaacaagcaaatgggggaatgggtggggtgtttcttttggtgaaaattttttttgccatgttcaatcgagcagtttattatgttgatcagaattgggcggctggtttattgaatccaattttcct

SEQ ID NO: 334613 - DNA, 242 bp, Zea mays
tttaaggggaccaaggttaacttccccttgcttgcaacgtaatagttctttaatggggcaaccaaaatcaaattaatgggccgtggtttaccaccgccggaccgggaaaaacctgggcgttcccaaattaaatggccttgaagaaaatccccttttggccggtgggggtaatagcaaaagggccggaaccaatggcctttccaaaaattggccaatcctgaatgggaaagggaacccccctt

SEQ ID NO: 334614 - DNA, 418 bp, Zea mays
acccggccttgaatacccggtccgccccacccttccgaaaaaaaaaaaataaaaaaaaaatttataatttttaaaaaaaaaaaaaaaaaaaaaaaaataaataaaataaaaaaaaaaatcaaaaaaaaaaaaaataaaaaaaaaaaaaaaaaaaaaaaaaaatgggggggccttttttaaggatccaaattttcctaccccttctttccaccttaaatttttttttatggggcccccaaaatcaatttcttggccctttttttacaacctttggttttggaaaaccctggtgtatcccaaatttatatttttggaataaattcccttttcccccattgggtatataatcaaaaagcccccccctattccctttccaaaaattttgctaactcttaatggtaaaagggccccccctttt

SEQ ID NO: 334615 - DNA, 394 bp, Zea mays
  unsure (1)..(394): unsure at all n locations
aaacaagggncccgccggaggggacccaaaggcagagggggcggaaaaagaagtccaaaaaaaaggagggcccaaaccggaaaaaaccggcggnggcccccggaggaagnnnngggncaaaccataaataagtttaagcaccacacaagttggaggccccaaattcccccaacaccccaaaaggggcggaaggcaccaaaggctaatggaaccattggaccctaaaaaagaaccaaccaagggggaaacgaaaacataacccccaaaataatggaccaatttccgattccaaaacaaaaaaagaagggggggtggcctcaaccctcaagaaccatcctttggggggggggaggggggccaagaaggaaaaggggggaattggccaggaaaaagg

SEQ ID NO: 334616 - DNA, 211 bp, Zea mays
acccggcccggaattccggggtggaccacacccttccgaaaacagttgaaggagggccgtaccttactttattacaccatccaaaaggggggcaccctcgaccttttgctccgtttccgggggggtaagtaagcaatgggtcgtttaacttgccattttgccggcgtcgcttggggccctttcctaatggaggttgctgaatatattgttt

SEQ ID NO: 334617 - DNA, 247 bp, Zea mays
cgggcccggaattccggggtggaccacacgcttccgcggcccctggggttaaagaaactccggcttttccgcccgcaaggggaaccttagccacaagggccttgttgaagcccgccgggatcggggcccggtcggtcccgccttcaaccagcggaggggtttggttgggcgtcccgggtgggcccaagaaggccggggtgtccggttcctggtcgtctgggctggcgggcgctttttttttggtgtt

SEQ ID NO: 334618 - DNA, 411 bp, Zea mays
  unsure (1)..(411): unsure at all n locations
acgggccgggaaanccggggaggaccaacgcgtccgccaacgcgacggcaacccgccaggacaacaagacaactggttacccggaagctcaagctcggggctcccaggtacaggcaggccagcctcaacaaggagcgagcgagcgggggcaacgggaagggggggggcggggccctccaccggggggcaggcacaccggacggggccaagcaccgggcccggggacaacaacaacggctccaactcgggggggcgggcaaggcgggggggggggcggccccggggacggccgcggccgccgacccgaataaggggcaacgggaaacccggaagggggcgagagcggccaacggggggggagccccgcaacaaaaaaggcggaaggcggcaaaacaagcaaagggggaggga

SEQ ID NO: 334619 - DNA, 225 bp, Zea mays
  unsure (1)..(225): unsure at all n locations
cggaatnccggggccgaccaacccgtccggccggatacaggttggggttcgccgcggcttttaacgttttctacccgacccctggggtccatcgatggccgggtttttccggccccggatggctttggaccgggtttccaagcaatcaggaacgttcctataaaggccaaggatcctcctgggagatcccagattatttaaaagctacttctatgcttttgaaaa

SEQ ID NO: 334620 - DNA, 413 bp, Zea mays
  unsure (1)..(413): unsure at all n locations
gcccgaaatnccggggccgacccacccgtccgcggccccttgggtgaaactgccaccagccttttttttattttatgcgaaagcaaaatttagggcaaagagggccccataaggcaaacttaccctgtaaaaaccaccaaaggaggtttttggtcttacctaaagcagggcggttaaggctaaataaaaggatgctgattccatcctggtggataatgccccggaaaagaaggttctggaaccaaaaccaactttttacttctggacaaaccaagcttggtggactccttgctcaggagaagttatttaagtttctggaaaccagcgcttacttccttgtgaaaccaggcccttttggattaatccttctccaggacttctatcccattggggctctgtactttgcacttgac

SEQ ID NO: 334621 - DNA, 336 bp, Zea mays
ggaaccccggggcggacccacccgtccaagagtccttggcaaacggcaagcttttttttttggtcctggtggccaggaggtagggcctgaacctgaaaacccaccttttggtttgggttccaactaaggatcactaaaaagaatggcttttggtaggagggctcacagtaccagggatatggcatgcagattgcttggtcaaaatggcccaagttccaacacctcccccggcaaattgaaaatccaagccgacctggatttgtccagcgatgccaagaatcatctttttaaaaacttggtcggtttatcaggcctatttttgggcctagtttggtg

SEQ ID NO: 334622 - DNA, 297 bp, Zea mays
ggaagccgggcggaccaaggcttctacccattgttaccaaaagcatttagaattttaatggggaaataacaataaggtgggcgagtttaaaaaggtgtccggcgacttccatagtattaaacttaggagttatttcgagggcacatctggagaaatttgtttcttgcaaaactaagttgcttgggttttgaaccatattgaaattggtaaaatatttaattccctttaagcaagaaaaggtttaatgaaattttctaagtttcttataatgagccccctaacttttgcccttacaat

SEQ ID NO: 334623 - DNA, 334 bp, Zea mays
ctttgccgggcacctacggttttaactgcaagccgaaccaaggagcaggaatggccggcaggaccacagtcaattaaagttggctttccattcaaggcatctggacctgtttgtcctccgcccgtcaatggatgatccatccatctttactggtttccctaacatgtccaccatttaaggcaccaaataaagtccgtcctggggggaaaaaataaaaaaaaaataaaattaaaaaaaaaaaaataaaaattaatagggggcgcccgttttaaaggaccaaggttacctacccctgccttccaaggtaaaagttttttttaagtgtacctaaaat

SEQ ID NO: 334624 - DNA, 405 bp, Zea mays
cgtccgtcctccttccgtggacccttgggcggttctttagaattgttggttcccaccaggaacatgctggaggacggggggttcaaaatttcaaccaatcgacacccaaaaaaaactgttggatttaatggagcccacgtctttggtaaccggccacgtcctaaaggagcctggttgggcgatattagctaggttcattggacccaatcctgtttttggtttggccgaaccagcttaaaaatgaccccccccctagaaatggtccactccgtcttattcggggatggagcgttttttcttcctatatggtaccaggtaaaggttgtttcccacccccaaagtaatatttaaatgacctgctttggttcaattttttttcttggtcctagtgccgtgaatttggtt

SEQ ID NO: 334625 - DNA, 269 bp, Zea mays
gggaaggaccgggccgaccacagccttttcgggccacggtttaccaaactgcattttccatttcttgaaggcggcacgttccggggacgccgggcaggaagctggggcccctccggcctccacccttgttgtttgccttgctgggtcgttcgcggcctcggttggccgacctgggctttggtccaggtttcctgggtggcccgccggaaactcagtagggctgtctcgccggataccgtcccgtcctctaggaggggggctcccggaat

SEQ ID NO: 334626 - DNA, 454 bp, Zea mays
cccacgcgtccgccaacaagcaacatagaaagtggaatacagtagcaacaatagagcagcgatggcggccaagatattggggatccttatgctccttgctctttctgcatgtgttgctaacgcgaccatttttcctcaatactcacaagctcctatagctgcccttcttcccccataccttccatcaatgaccgcttcagtatgtgaaaacccagcccttcaaccctacaggctccaacaagcaatcgcaacaagcaacttacctttatcacccctgttctttcaacaatcgccagccctatctttggtgcagtcattggtacaaaccatcagggcacaacagctgcagcaactcgtgctaccagtgatcagccaagtagctctggcaaacctttctccctactctcagcaacaacaatttttttcattcaaccaactgtctacactgaaccct

SEQ ID NO: 334627 - DNA, 348 bp, Zea mays
cctacatgactcagagcgcgcagcttattttttgaggaaagatgccagtcaacaaggagcttcaaaacatcaaggaggttgtggacattaacctatcaagctagatcaatatcttataagttaaccatgtaaacacgaagtgcactgaccgtcttttgcaggatattatcatatctatcaaggcgagagaatcaatttgattactatgctcaaaaaatactatatattaatacccaaaacttattttgccgctcctctctagaggatccaatcttactttctctttctttccttaacattaattttttatattgttacctaaatttaattcactggccctatttttac

SEQ ID NO: 334628 - DNA, 245 bp, Zea mays
aattcccgggtcgaccgacgcgtccgcacgactgtgcctagcatgcgtccgcctttttttctggacgccctctggccactcacgcacgagttctttccggcgcgcgtcgtacaatttacacttttttactcttcgctttacactgttgctgcggtggccttctttctcaaggctaacgtgttctggtttctgttttgaccatttctactgtctcgacccactgtatgagcgctccatggtttttt

SEQ ID NO: 334629 - DNA, 492 bp, Zea mays
  unsure (1)..(492): unsure at all n locations
cggaanncccgggtcgaccgacgcgtccgcgtgccgccgtcgtcagaggagcttcagcattcaccagtcagagtccaaaactgatcagcgggcagtcataccgtgttnggtngtgttgttaccgtccgtctgatacgaaccaatttttttgcttcttctaccgtcttgacgccatttgtcgcgcaacgtatactgaatcacgagtatagcttgggtttagctggcctctcgccggccgcgtggctttcattttccgggaaaaactattctttttttaaggacttgtttggatgcacaatataatcctttattatatagtctagcaaggtattatttaaaaaaaaaaaaaaaaataataaattaaataataataataaaaaaaatttttatttattatttttttattaaattttaaatttaatattttaaaatgggtgtccttttaaataattaaattttttttatcccttgctatatattaattaatttttt

SEQ ID NO: 334630 - DNA, 488 bp, Zea mays
  unsure (1)..(488): unsure at all n locations
gggnggacccactcatacatccactcattcatattttctcaactatacttttctttattcactaactctattattctagggactttctaaaatctgggcgggcacaaaaatttatattatcctatattatcaatctttatcttccaaattctaatattactaacatatagttccatatactatacctttctttatatcttcatctatcattttaactactttctttcctttttctatacaatctataaaaataaaatatattaatttaatttatatttatattaaattaatatcttataatatttcttaacaaataactatttttattttctaataattaataataataactttctcttaaattaattttatttattttttaatttttttatttttattattctttattcaaattattattatattttatttttcattatatatttcctaattatctttcttttataataatatctataataattttt

SEQ ID NO: 334631 - DNA, 100 bp, Zea mays
gccgaacccggcgacccacactctcctgaacctttacccacttactatcacgcaccaacaggtgtactacagggagtgacgttgctattgacgagccatg

SEQ ID NO: 334632 - DNA, 304 bp, Zea mays
gtcagcaggagcagcagcggcggcggcggttagaaggctgctaactggtggccgggcggtcgcctcgagctccggggcgcctccggtccggcggacggcagcagcagcatgtcttcggccgccccgctgctaggcgacgaggccggcggtggcgagcccgctctttggacgccgccgccgccgtactcgtgggtggggcgcgtggtggacgcggccgatgctcgcgcgcagtatgggatcgcggcgccgttggtgctgaccagcatggtctactactgcatcctgctattgtcggtgttgttct

SEQ ID NO: 334633 - DNA, 264 bp, Zea mays
aaaaaaagggggcaagcccttgatttttgttgaaggggtccaaacccagttcctttttgtagctgggcaaaaacaagccacaaatttattttttcacctcttaacggggcagggggggatacctcctgataaaacctcctttgtggggagaaaattcccctattgttttgtcccggggaacaccttcacattaatttttccctccccagctttttcgggaaacaaaaacatattgcccttataatttgtcccccctgccttttt

SEQ ID NO: 334634 - DNA, 177 bp, Zea mays
gaaaacccggccgacccactcttccgtcaaacctttcaccaataatcgcttttttttttgaaaacccacctcattaaccgtatgggctatcaacaaacaaggggggggagcaacatacctttatcatccttctttcaacattatacatccttatttttaattctatttattatacaa

SEQ ID NO: 334635 - DNA, 189 bp, Zea mays
gtcacgtatgtagtataacatctgtgactacactacagatgttatatatcatgtagtgtagtcacgtatgtagtataacatctgtagcagaacatgatatattcggttttctgattgtgatatctgtacgtggctacactcacatgtgagatttgaataagtcctgcagcctcagggctcagctagcac

SEQ ID NO: 334636 - DNA, 87 bp, Zea mays
cggacgcgtgtgcggacgcgttttaaaattattttttaaaaaaaaaaaaaaatataaaaaggggggtattataatattgagtggatg

SEQ ID NO: 334637 - DNA, 412 bp, Zea mays
cggacgcgtggggtttcttctgattgacaactatgatgtgcagaggaaggaggcgattgcacgctgtgtgaggagtgcgtttggggtgctggtgaagaaaggagtggttccgtcattggagccattgacaggttgtgacaagttatcaccactgctgaggcaaaagcttctggcatttttatctgatacttgtgaggcagctgaagaagcttgtgggaagacaatcaatggggtttctaaaggaacagagttgaacaagagaatttgctgaagcatgcacacaatttatggttgtcacaaccatctctactaggaatgaatttagcacctattcgtcgggatttccttgttttggaaactttcgtagacctgttaagaggaaacagatggtgctttgggtattatataatga

SEQ ID NO: 334638 - DNA, 161 bp, Zea mays
cggacgcgtgggcggacgcgtggggcttctgtccacagtatatatgtgggatatatatctgtggacaaaaaaaacaagaaggcagggcatgttgggatatatatctgtaaacaaaaaaacaagtttgggcttcggtccacagtatataagctgttttcaca

SEQ ID NO: 334639 - DNA, 418 bp, Zea mays
  unsure (1)..(418): unsure at all n locations
ggaantcccgggtcgaccgcactcgtccgcctccttccgctacactcacgctcccactctacccaaaacgaccgctctcggcnccctccgcccttctttccaccaccggcagcacctcatactaccatcaccacacctatcggcatctaagcatctccctcctccagcacctctagcggtgattgcaattgactctttcttgtccttgaatagcatgtttttcagttccttatcgaccgttgtcaccttggctgtctttcattctcccgtagtcttctactaactgcttctatctgctgtcccgtttccagtgcatctgtttttactgcggcagttccaatgtccttaagtctaactaccatgacttccatctttatcttttcaattagcttttagatagttctatatactcttttta

SEQ ID NO: 334640 - DNA, 410 bp, Zea mays
aaaaaaataatataatttaaaaataaaaaattatttattatataaaaaaaaatataaaaaaaaagagggttaaataaaaaatgggggaaggtataaaaaatattaaactaattatttaataatttaaaaaattataaaaaataaaaaatatattactggggcccttttttaatttttttttttattttttcttttttttctattatcttttttttttttttgttttatttattttaattttttcctccttttttttattctcttttattttttaaaatcttattcttaactttaatttatatttttttaattaatatttttttttttataatttttatttataattattactttctctttctttttttttttaaccaaacattttcttatttttattttttatttaattt

SEQ ID NO: 334641 - DNA, 203 bp, Zea mays
cacatatttgatctgtataagtgttacttgttatagctgatgtagaacaacattagcagccatcggtagcacacatgcaatgaaatctaaccccctcacctttcctctgaaaaaaaaaaaaaaaaaaaaaaaaaaaaaaaaaaaaaaaaaaaaaaaaaaaaaatatataataaaaaaaataaaaaaaaattatatattatata

SEQ ID NO: 334642 - DNA, 270 bp, Zea mays
ccggtccggaattccgcgatcgacccacacgtccgacagctcagcgtctcctctgtccaatgctattattcttggctgcagcataacacttggtgcaattttgttacgtcgaacgggccgtattatcaatactcactcctgctatttcatgcatatattatttttcatttttaaataatttaattatatttaatataatctttttttttattaaaattcattattaaattatttttttattttattctctcattttatatttaattaata

SEQ ID NO: 334643 - DNA, 139 bp, Zea mays
gagctgagcaactgttgtagtgtagtctcaaactcaaagcgtttaggtcttgacatttggcaaactaaaactcagaaactgttgatgagtagtgtttttttttcgtttctctttcctggatttaactattgttattgct

SEQ ID NO: 334644 - DNA, 425 bp, Zea mays
cggaattaccgggtggaccgacgcgtccggactagttctagggcggtcgaatccgccagcgcattcgctgagcaccgccagccccgcgcgcggaggtcggagggctacgggccggagtccgaggggaaggcagaggaggcaagcaggcaggatgggtgccgctggtgacgccgcggcagcgggcacgcggtgcgagctctgcgggggcgcggcggccgtgcactgcgccgcggactcggcgttcctctgcccgcgctgcgacgccaaggtgcacggcgccaacttcctggcgtccaggcacgtgaggcgccgcctgccgcgcgggggcgccgactccggggcgtccgcgtccagcggcttctgcctgtccacggccgacttcgtgcaatcgagggcggcgccgcccccagggaaaggcaaaagga

SEQ ID NO: 334645 - DNA, 463 bp, Zea mays
  unsure (1)..(463): unsure at all n locations
ccgggctgaagaggacccaatctaacnttctcttgcattctactacatatttcttctatattttcacctatattcaattcgggggtcctacaaataacaatcggggggacataaaaaaccctttcataacccatcttaatctaattacattacatccacctttcactattttatcttaatatcaaatttttctttaccattcttcttttccaacaatatctcattctatatatctaatattaccctcccttttattatccattatatctctctcttatttttatttactactcatatttaccatttctactttctaatcttcctattaatttatttttttattattatctttttcatattttaatacttattacttttttaatcttaaaatatcttataatatatatattactttattttatatattaatatttttaatttttctttaacatttatatatttt

SEQ ID NO: 334646 - DNA, 359 bp, Zea mays
cccacgcgtccgaaaaaataataataatgactagaaattggattaagccctaaattaaacgcagttgctttcaaaggggggggaaaaaaaaaaaaaaaaaaaaaaaaaaaaaaaaaaaaaaaaaaaaaaaaaaaaaaaaaaaaaaaaaaaaaaaaaaaaaaaaaaaaaaaaaaaaaaaaaaaaaaaaaaaaaaaaaaaaaaaaaggggggggcccttttaaaggatcaaagtttacttccccgggtatgcgataaaaaattttttttatggggcccccaaaataaaaaaaatggccccgtttttaaaaactgtgggaggggaaaaacctgggttttccaaaaaaaatatttttggaaaa

SEQ ID NO: 334647 - DNA, 418 bp, Zea mays
gcccacgcgttcgccacgcgtcgcccactcgtcgccacgcgtccggattaatgagagagtttactaggaagggttatcaaggagaggcagcggaaggagcaggtggacgtggctgtcgcgaccaagttcgcagctcttccatggaggttcggtcgtgggagcgtcatctgcgcgctcaaggcctcgctggatcgccttggcgtctcttcggttgagctctaccaactccattggttggctcatcagccttttctcaaccgatttctcaatctctctctctctctttctatgtgtgtgtggactgtggacactgtcggttaactcttggcatatcctttttaggccagggatatggggcaacgaagactacctggacggccttggagacgctgtggagcaagggcttgtgaaggcagtc

SEQ ID NO: 334648 - DNA, 145 bp, Zea mays
ggtcgaccacgcgtccgcggacgcgtgggaattttgaaaggtgattatggttattgttgaactcgatgcttcattggaggacttgtacatgggcggtgtcagtaaaggtttgaaaagagaaaaacgtcttaaagccaccaccaga

SEQ ID NO: 334649 - DNA, 433 bp, Zea mays
ctcgctctcgctgctccgttcctgttcttccgctccttctccccacctcgttttggctgatcaaagttcttgttcgcgaacactttcctctgcctgacactctgagttcttggttaatgagcctgtatagacccatcggccatcaccagttcactactcgccaatcgacatgtcaggacagagctcaagctcctatggtgacactgatcctggcacagacagggcatacagcaccacctccagcagcatccggtggggtccgcacggccgcggcatgacggcctgcctcgtcgtcgtcaatgtcgtgctcgtcgccctcgtctacctctacttctggagggtgttctcccgcagaagcgccgcgtccccctcagcagctaaccccacggaccacgacgacgatgcgtcttccacatcgacgccgccgtcgccg

SEQ ID NO: 334650 - DNA, 344 bp, Zea mays
cccacgcgtgcgcgctgggatctagcacgcaagcgagcgagagagccaaccacctatgtgttaagcgactccgcgttcttgaacggagtccgaggccaacactacctatggcggctggtggcgggggtgtcatgtggatagcggtgctttaagatcatgtctcagtgttcgaccccgcgctccttttacaagcgtgcagggcgcctaaggcacagcgctttaccgagcggcttaagtactccgtgtatgacttcaaggttcagtgctagaccagttcaattatcacaaactatggattggtggtcaaccctgagcagagtgcaggcaacgagctttttgaaaca

SEQ ID NO: 334651 - DNA, 130 bp, Zea mays
cccacgcgtccgcggacgcgtgggaaaaacggctttaaagtctattttgtgcggtagttggtgtaggccgcttcgtcccgaagcgatcttggtaaaagacttattcgtgttgccaaacgacacaattcgt

SEQ ID NO: 334652 - DNA, 380 bp, Zea mays
tgaactggtttatgctaccgtcatatttttagcgttagcttatgcccgaggtcgtgggtgcccgcgcgcggtatgacgagcgccaccgccatcgtcgcctggcatggacttgtgctgcgtactagcctcccccttcccaacccgacagggcgagccaccacgtcggtctcactttccgcgcgccccgacactccaacccgtctaatgattgacccgtctagcccgatgccgcggactcctggtcggagcccagtcatgctcatctagagctctacctaggcattcgttgcgggtggcattagcgaccaaaaactgctggtcgagaacaaggcgtacccgcaggcggtggtgtgctacactggaccctgacgcgcaccctg

SEQ ID NO: 334653 - DNA, 267 bp, Zea mays
ctgtgagatctggaagagtgtttgctgtttccttctcgatcgcatcttgtgctgtaatgagagaagaacatgagctcttgtcacggaccgagcgccttcgtttctcaaaaaacattttggtttggatcagagtatgtatgtgtttgcttgcttgcttggtgcccagtgccaatgaacaacaaccttgaccgtgcgtggtttgcttaaattaaattgcttattaataaatgaggcggcactgtgattgatgctgtcggttattgtgct

SEQ ID NO: 334654 - DNA, 431 bp, Zea mays
cccacgcgtccgctcgactccaaggtcatcaccgaccgggagacggggaggtctcgcgggttgggcttcgttaccttctgctgcgagaactccatgctcgacgctatcgagaacatgaacggcaaggagctcgacggccgtaacatcaccgttaaccaggcccagtcccgtggcggtggcggtggcggcggtggctacggcggcggtcgcggcggcggcggctatggtggcgggcgccgtgacggcggttatggcggcggtggcggctacggcggtcggcgcgagggtggtggcggcggctacggaggcggtggcggctaccgcggtcggcgcgagggtggtggtggcggctaccgcggcggcggctgcggctggagggactgatgtgtgggcccatcctggcttctgccgagttatcttatctatctata

SEQ ID NO: 334655 - DNA, 81 bp, Zea mays
ggaattcccgggtcgaccgacgcgtccgcacccaagccgccgccccctaccctcccttttttctatccacctccccttcct

SEQ ID NO: 334656 - DNA, 208 bp, Zea mays
  unsure (1)..(208): unsure at all n locations
ggaannccgggtcgaccgacgcgtccgaaaaaaaaaaaaaaaaaaaaaaaaaaaaatttatatttaaaaaaaaaaaaaaaaaaaaaaagaagggaaaaaaaaaaaaaaaggggggggaaaaaatgggcggcctttttaaaggatccaaccttacttacccttgcatgcaacgtaataatttttttatagggtcacctaaattaaatta

SEQ ID NO: 334657 - DNA, 75 bp, Zea mays
ttttaaaggatccaagtttacttacccttgcttgcaacgtaatagtttttttatagggtcacctaaattaaatta

SEQ ID NO: 334658 - DNA, 173 bp, Zea mays
aaaaaaaaaaaaaaaaaaaaaaaaaaaaattatatataaaaaaaaaaaaaaaaaaaaaaagggaagaaaaaaaaaaaaaagggggggggggggcggcccctctaaaggatccaagcttacttacccgtgcatgcaacgtaatagtttttttataggggcacctaaattaaatt

SEQ ID NO: 334659 - DNA, 429 bp, Zea mays
gttggcttctcctccccctccggttcgggttcgggttcgtgaggttctccggggttcgggttcgtgggtgagcggatcgagatggcggcgtcggatgttgagtaccgctgcttcgtcggcggcctcgcctgggccacggacgaccactccctccacaacgccttcagcacctacggcgaggtcctcgagtccaagatcatcctcgatcgggagacgcagaggtcccgcggcttcggcttcgtcaccttctccacggaggaggcgatgcggaacgccatcgagggcatgaacggcaaggagctggacggccgcaacatcaccgtcaacgaggcccagtcccgcggcggccgtggaggcggcggcggtgggtacggtggtggccgtggaggcggcggctactgcggtggcgggcgccgtgatggcggtggc

SEQ ID NO: 334660 - DNA, 432 bp, Zea mays
cgaagcggaaaagaagatcaaaaaatcggggagaaaccagaactggagagaagaaaatggataaatttatggccagagccggagccgagacccgccccgcttgcgctctccgccgagcgccccaccccctctccgtccgcgatgcgccgggcgaagccgccgccgcagcagccctcgccgtcgccggagattcggtaccgcggcgtgcggaggcggccgtcggggcgctacgccgccgagatccgggacccggccaagaagaccccgatctggctcggcacctacgactgcgccgaggccgccgcgcacgcctacgacgccgctgcccgatctctccgcgggcccaccgcccgcaccaacttccccagcgctgcggtccgtgcgccgcggcacagggctccctccgcctccgccgcagctcccacggcgccg

SEQ ID NO: 334661 - DNA, 491 bp, Zea mays
cccacgcgttcggcttgaccggcttttttttgttgatgtcgattgaccctaacgcggtggctaatttattgttggggcggttttacttaacttttttattttaactttttcattattttttattaatttttaatttatttctttttttttaatttttatttttttttttatttatttttctttatatattttatatttttttttaacattttttttttttttaatttttttttctttttattttttttttaatttttatttttaattttattatttatttattattaattatattttatatatttatattatttatatttttatttggtttttatatatttttttctttatattattttttatatttttactattatttatattttttttttttatataatttttaattttattttttattttaattttttttttttaatttttttatacttatttttttatttatttatttaaaattattattatttttt

SEQ ID NO: 334662 - DNA, 461 bp, Zea mays
  unsure (1)..(461): unsure at all n locations
ccggnccggaattcccgggtggctccgcagccagtcccgggctcatcggctggatggggccgttcagcgtcccggccatcaacttcaacagcgggacggtgctcttcttggccagcatcngccaggagctggcccacttccccacgcccccgcccgtcacctcccagttctggctgtggctagtgacgtggcacctgggcctgttcatcgtgctcaccttcggccagatcggattcaagggcaggaccgaggactacttctagaagtgaagcggttaagatcctatccatcatccctggtgctgcgctgcgttgcgttgcgtgcgtgctcgccgctatcgaacctttgctgtatagggttccgatttcttcgaatgtaatgtatgatgctacttttgagcttcaatgtaaaatctatgccgtccggccccaacgcgctcaggtttaaaaaaaaaataaaaa

SEQ ID NO: 334663 - DNA, 409 bp, Zea mays
  unsure (1)..(409): unsure at all n locations
gaataatcaagaagggggtcgtaagtcaaggcgcgctcatggaatcctcantaacgtaaggacgcggttaggaatggtgggtagagtgaggatgcaggtagctggaaagtatcaagattgtacatgggattggagcaacgtgcagattcacataactgccacatcacatgctctttgatttggtaccttccggtcctccacagctactgtctgttcttcacctactctgatcggaacaaacaaagaccatagcatgcatgcgctgtagaaagcatccacctggaattaaggtattaatttatcctttgaagtgtggacagcacattgacaaaggctaaaatgtttagtatctgaaaaggattgcctcgtcagggtgagatttttcttcttcttctttcccngttctttc

SEQ ID NO: 334664 - DNA, 450 bp, Zea mays
catacttttctaccaaaaaaaaatttttttttaaaaaaaaaaaaaaaaaaaaatagggaagattattaataaagtagggggggaataaaattttcccccatatcttaaattaccaaacttactatctcttccattctatatttattcctttttttttattttctcctaatttttattctttttcctcttttttacaacctcttttctgtttaatctctttattttactcaatcttatttcttttcaatattttccttttataccttcttcttttttttcatatattccctcttaattcacctttcctttattttcctttttttttaatttcttatatttttatcccctttttttttttcttatttattctctttatttttttttcttatcatacatctttcttatttttatatttaataattcctttatctttttttcatttttttattt

SEQ ID NO: 334665 - DNA, 390 bp, Zea mays
ggtggtggtggtggtcgtgcttcctatatttgtgaggctgatggcttggctgccgtttatacaatctttaagggggtggggttgagctttattatatggttttgtttgagagttcatggctctgcatcctgttcctactggatgctggtcagcttttcttctatcaagtacattctggtttaaaaaaataataatataattatttaataacaacaatttcttttaaatattattttttaaataataatatttttaaaaaattttcaataatttttaaaataaataaatatattttatttatttagggggggtcgccctttttatataccaatttttatttttcctctttcgccaaaattatttttttttttttttctctcaaattaaata

SEQ ID NO: 334666 - DNA, 242 bp, Zea mays
cgcgcgggtgagccggtgaccctcctacttttcgccaccctgctggtatatcccgcctgtcgtccacgccatggccgccgaatatacactgctctccctgccatgccgcctgccctcgccgttccctccgccggtgcctactacaacccgccggctgcctttctcctcttcggctgcagcatccaccttccctctgagcccactcttctggggctctttatccacgctcactttttttcttt

SEQ ID NO: 334667 - DNA, 115 bp, Zea mays
aaaaaaaggggggggatataaaaaatataataataattaaaattttttatttatataaaattattaataatataaatattatttaaaaaataaattattaatttttttttaatat

SEQ ID NO: 334668 - DNA, 274 bp, Zea mays
cggacgcgtggggtctttctgcatgtgctgctaccgcgaccattttcccgcaatgctcacaagctcctatagctgggcgtcttcccccgtacctctcaccagcggtgtcttcggtatgtgaaaacccaattcttcaaccctataggatccaacaggcaatcgcagctggcatcttacctttatcacccttgttccttcaacaatcatcagccctattacagcatttaccttttggtgcatttattggcacaatacaattatggcacatcaacta

SEQ ID NO: 334669 - DNA, 261 bp, Zea mays
  unsure (1)..(261): unsure at all n locations
ggggggacccacgcgacgnccacacgnccgcccacgcgaccggggaaccagaaaaggcccacgaacgaaacaggggggggcacccggaaggagggcggggaaaaaaagacaaaanaaacaagagaagcaaaccagcncggaagcggacagacccaccaagccgacacaaacgaacaaggccaaaagggacacaaaccgaaaaagcaaccgaagaagagccaaccggagggaccaaaacaggacggcgaaaaaacaaccaca

SEQ ID NO: 334670 - DNA, 425 bp, Zea mays
  unsure (1)..(425): unsure at all n locations
ggaannacccgggctcgacccacgccgtccgcccacgccgtccgcccacgcgtnccgttacgnatcctcggcagnccaggaggacttcgtcgcgccgacttcctccaatactcatcgacggcatcattgaacggggtcatcaaggangaagctcaagatcatccccaaggacgtcaggtgggtggaggtctccaatgccatctactacacgctggtcaacgacttcatgaagccacgaattgacgatgcaagcaagctactctatatgaattaagctgatgtacgtggagtttttgttaaccaaatgctcctttccttttttttggtgtgtgtgtgttcattttcgcaaattgatgagatgctattgtatggtgtgaatgttactgtatacaacaggcaggtcagtatctcccttttatacaacg

SEQ ID NO: 334671 - DNA, 206 bp, Zea mays
  unsure (1)..(206): unsure at all n locations
gtcatatctagctagtagctcccttataagttcactagagaagcatntgagggaggagccatgtctgttgagaagcaccaccaccacctgttccaccaccgtaaggcataggaggtggaaggcgcctttggctaggttgacttttagttgaaagtgaattttcatacatctcatggtatctatttgttttgttcgatgtatttttc

SEQ ID NO: 334672 - DNA, 311 bp, Zea mays
  unsure (1)..(311): unsure at all n locations
aaagagggccganccacgcgtncgnccacacgtacgacgacgactactttacgttttttggcagccaggaggacncgggggccggctgttttaataccatggactgcatcatgaacggggncatcaaggagaagctcaagatcatcctcaaggacgttaggtgggtggaggtcttcaatgccatctactacacgctggtcaacgacttcatgaagccacgaattgacgatgcaagcaagctactttatatgaatttagctgatgtacgtggagtttttgtttaccaaaagctcctattcttttttttggtg

SEQ ID NO: 334673 - DNA, 328 bp, Zea mays
cggctaccagccgtgcgccaccaattacctctgtgtgttcggcgacacggccggggacttggtgcccgaccgcttcctcggcgaggaggaaagtaagctgatgcagtacgtgtactagtttaacgagtcgacagacctacaaccgatagcgttcaataacaatgtaattgttcctttgaagaacttttttagatgatattaattttattgttttttcttaatgtatattttatttttatttattatttataaattttataactttgtgatttattttattttttacataatagcttatattagtattttattctattaattttttttt

SEQ ID NO: 334674 - DNA, 233 bp, Zea mays
cggatattcacatggatcttgacttcaagtttttatttaccgacctcctcttcgactcaggaatagggccaacattcaccctccaggatggtttcttacactacctcaaggggatcttcatgctgctgagctacatcgtgatcgagcatccttttttgttccgaggcaacctgtaaataacaacaatgacgctgcgctgtcgttgtcaactggcactttgagtgcacacgctg

SEQ ID NO: 334675 - DNA, 359 bp, Zea mays
gcaaccagaagtgttaagtcccaacagctttattagtcttaggctacgggcactcgtgcgcggcggctgtttatgacacgagcatcgaaagcaagagcactaactacagcaattggatgcggctgtctacgctgcgaaaacgccatcgattatccgcataaacagcttatcatggccgacaccctatagaggtcgcctctgctttggagatgtcaactgtatgttacacaataccacagtttgatgcacgtacggaccaaagactatgttgcatagatatttgtgtcattcatgtaaaatgtatgtggtagatcgatacacaagaaaataatttagtttgttaatttgaaactttgtca

SEQ ID NO: 334676 - DNA, 98 bp, Zea mays
  unsure (1)..(98): unsure at all n locations
gaaaangggccgaccacgcgtccgaccacgccaacgataacccctcacattaccggtggtggaccagaccaaagaagaggaggggggcgatatttata

SEQ ID NO: 334677 - DNA, 354 bp, Zea mays
attagcacactaaaattggcgcatacagataacgcacctgcaaagtgggatcatttgaacatagttcagcaaagggccgacgcacttgagtcactcctcaagctctacgcaaagcttctggaggagaggctcgatgagctcgccgacgtttttcgaccatttggtgagagagctgtgtcatccggagagatgagcatacaatgatgtctgaccataagcctgatgactccaccgaagttttgagagtccccaacaatgcttttgtagcagcgattcgtttcaacatttttttgtttttcaaataccatttcgagagtgtaaataacttcaacggaattcaaaattgatgtactt

SEQ ID NO: 334678 - DNA, 198 bp, Zea mays
  unsure (1)..(198): unsure at all n locations
cacgcnnccgngaccatttnaaatacatttttatttgttacacccccncagctgctgagacgtcacatggttttcaagcggataagaagcaaacaangtcaggttatagcacagaacttagtccaaactttcgtatgaacgtccatttgcgcgcatggtttatgcttctgcactggaagatgcctacggtactggttc

SEQ ID NO: 334679 - DNA, 214 bp, Zea mays
agggacttgcctactatggatggggttcataacctgagctgcctgaactatttaatactagtgactatattaatgaaaatagtaagtcaatgctctgatctttcagaagcaaatcgttggcgttatgataatttgtgacttaccttgtcttatgttctgatccttgctaatgatgttaatattggacattttctttgactctaccttttgagtc

SEQ ID NO: 334680 - DNA, 396 bp, Zea mays
ctcaagttccggttgctccaaagaaaattgtttagttttctagcatgaagcaacgcgtggcgtagctgaagatcacagattggcatgtctacataataattgctggccgcacctgtctacagtatgcatgtattcctaaattgtaaaataagtgaaaaaacgcatatgtgcgcgtgtatcatggtgtgtactcctaaattgtaaaataagtgaaagaaaaaacaagtggatcattgaatgttgaaggatgtttttgtaaccagatgttctttagactctgttttttgtttagagaaattatattcccttttcgtgtttatttattttttttttatttacttttattgattttattttttttcttaagtattctctatatatggttgtgtcgatttt

SEQ ID NO: 334681 - DNA, 198 bp, Zea mays
  unsure (1)..(198): unsure at all n locations
cggacgcgtgggctggcaaagcgattttgngtcggtggcgcccctcgggtaatcggggggtgccttcgaacatttggaaaggatcatgttgacgttgcaggcactagcaagggagctgaatcaaaattgtgaacctttgcaaataccctgaatcgtacaacagaatggtggctgaggtaaagaactatgtaaaaaaca

SEQ ID NO: 334682 - DNA, 116 bp, Zea mays
cggacgcgtgggcggacgcgtgggctagatatagttattagttgtaattcaataataaagttttttggatgatgtatgtggccaaccagaaataagaagttacatttccagattct

SEQ ID NO: 334683 - DNA, 262 bp, Zea mays
cccacgcgtccgcggacgcgtgggttggattttaattgatacatttgaaaaatctgaaaactaaaatagaagtataaatttgaatttggaatagaaaatagaaagtaaaagagaagggaagaactaagaaaaaatcctacataaaataaaataaaatcagaataaacatccttcacacttataatattaaattatactattcaaactaaggaccagttattcacaaaagtttgaatttaaacttgaactcaaattggatttg

SEQ ID NO: 334684 - DNA, 444 bp, Zea mays
  unsure (1)..(444): unsure at all n locations
accgggnccgaccccacgccgtctcgcactcaactatatataggaaaaaatacctggttctttttttgctgttcnnttaccaccatagagtactctgcagtgtcaagtatttttactcctcggtcgcgttgtatctccaagcgtattagagtatgcttttaacgttatantcgttgtattttcaatggcatcgatcttcgaagccaatcgttcattagttctcgtatgaagttgtactccctcaagcanagatnngaggatattttggaatatgaaccaatgcttgtgttgcaaanttccagatattaatgtatgcacgcatggtgaaaagggaattggtttgttgagaaagaatcgtgagtgattattttcctggcaaaatgtggtggttctaattgacatatgaaagaccaatgacttgatttcgtcgtattaaaatgtgca

SEQ ID NO: 334685 - DNA, 215 bp, Zea mays
ggctcctctcctactcctaccactttcttgtcttcccatccccgccgagaactccgagggccggcttgtaccgaggccaagggtccctcgttccttctacaggcggcgcctacaccttaccgccctccttcaagttcaatgcctcgcggtcaccggccccgccgcgtcccgtccgcggtggcacgcgacactgaccgtcgaggcggggctgttcc

SEQ ID NO: 334686 - DNA, 213 bp, Zea mays
  unsure (1)..(213): unsure at all n locations
nctcaacaagcatagtattatgcggagcttatcttatcccagcggcaagaaggttgtcaagatcgcaaggaccagttttggagcaaagtgtaaaaccaaaaaaaaaaggaccgaatgaaactaagaacgcaaggacccttttgagtccatgtccatctctggcgtggcgtggcgtgcgcaccctactctgcccgttcatgcagtgcaacaaca

SEQ ID NO: 334687 - DNA, 348 bp, Zea mays
aaaaaaaaaaaaaaaaaaaaataaaaatttttttataaaacaaaaaaaaaaaaaaaaacaggcggggttttttaaaaaaaagttccgctcaccaacaaatcttagctttcattcatttattttaaaaatctatctttaaaacaatttttcttcactagttcattcttatccattcctcaaatacatccgttctccaattcttcttcttctctataaatttcctaaatattttctacttatcttaatcaatcagacatccctttttaagccgcccccttcaattttttactattttttcccgcaataaacccccgcccgccgacacaaaattttttttttttttttttt

SEQ ID NO: 334688 - DNA, 350 bp, Zea mays
  unsure (1)..(350): unsure at all n locations
cacggcctgacgcgccggctccaaccactactatcaccaccatggtcaccacggcggcgcacggtttctttgtgcgcgagaccagggtcgaggaggacattaacacctgcaccggcgaggtccacgagcgcagggagagcttgctcgccagggctaactgagccgtccggcggtcggcattcacgcccgttcgtgcctgcctgcgtgccttatgtatgtctgcggacgactggaagagcagggtctttttttttttttttttgttttttctctcatttattttcccgnacgatataccaccttaaagctcgggacttgaattaaactttcttttttatttgctaataaaa

SEQ ID NO: 334689 - DNA, 278 bp, Zea mays
ctagcaattagctcatcgactccagattggttaactcgacaccatgaaggtgctgatcgttgcccttgctctcctggcgctcgctgcgagcgccgcctccagtacaagcggcggctgtggctgccagacaccaccgtttcatctaccgcctccgttctatatgccgcctccgttctatctgccgccgcaacagcagccgcagccatggcaataccccactcaaccaccgcagctaagcccgtgccagcagttccgatcctgcggcgtcggcagcgtcg

SEQ ID NO: 334690 - DNA, 406 bp, Zea mays
  unsure (1)..(406): unsure at all n locations
gaaaaaagggccgacccacgcgtacgcccacgcgtccgagccagttctcctgattcattttgagtggaggccaaagtcgctggtcaccggctcggttgaggtcgatacagggaccattgaaaagagctcgaaggttggaattgctgtggccctcaagccctgattgattatcaagactattttttcttctaaggtcctagcatgactgtttgggtcatatcaggtcagctggggaaaacaaaacngngggggtaaccggcatcttttggtcgttgcagtctgttgatttcatgaactgcgaaacggcacaaagaggaaacagatgggacatctgcttagcgctcttgtaaatgagcaacttctaaaataatttgagcccatttgaattctgaacttgtttacaatg

SEQ ID NO: 334691 - DNA, 385 bp, Zea mays
  unsure (1)..(385): unsure at all n locations
cgcgncgcccaactccaccgtcccacgaaacacactttattatctgccgtctgccccgaagcggagaaccggctgccagacatgaagagaaccagagcgcancagcccaaggtcgaggagccgcaggacctcgccgccaacctaaagccgcagcgccgggacaaacagccgaggcagcccaaggcgggcgccaaagcgaagcccgccgcgggcccgcgcgtcgcggcggccacgacccttgccgccgccgccgcagcaacagcagcaaatgccgccttggccgcgtcgtcgcccgggccggaaacggttccgaccgtgcccgacgtgtgcgtcggcggggacaaggaccaggacgcgggacacgagcgccgtgggacttggacct

SEQ ID NO: 334692 - DNA, 364 bp, Zea mays
ttttgtctgcaattttgtcgcatggtttttatgtcctgggcggcgtatatgcaagtaacagatctggtattacagctgaacagctggaatgggtacatcagacaacactcaaaattcttcaggaaatggccttctagcattgttatcagggttcactgatatagtttgtaacataagaagtataatgctgcacatccgtagctattgaagagcctttttaagtggtcacatatctttttgttgagaagtggagtggaagaaacgataatgggttatctaaagccatatatcacttcagggaagaatggtgccacgttgtgcaatccacaaattacttacaggcttgggattgatatgaccatgt

SEQ ID NO: 334693 - DNA, 64 bp, Zea mays
cgacggagaaagggcaaaaggcaacaccgtccgcgacgtccactatggcagcctcgctccaagt

SEQ ID NO: 334694 - DNA, 289 bp, Zea mays
  unsure (1)..(289): unsure at all n locations
cccacgcgtccgaaaaaaaaaaaataaaaattttttttattaaaaaaaaaaaaaaaaaaaaggggggggggaaaaaaaaaaaaaaaaaaaaaaaaaaaaaaaaaaaaaaaaaaaaaaaaaaanngggggggccgttttaaaggatcaaagtttacgtacgcgggcatgcaaagtaaaaacttttttataggggaaccaaaattaaattaactggccggggtttaaaaacggggggacgggaaaaaccctggggtaaccaaactaaatggccttgaaaaaaatacccttt

SEQ ID NO: 334695 - DNA, 390 bp, Zea mays
  unsure (1)..(390): unsure at all n locations
gaaaaaaggggcgacccacgcgtacgaccactcgtncggactaattctagatttttttctttaccgcctaaaaaaaaaataaggggcggtgccatttaaagattgcgtcgccccaaacaaaatggacgctcggcataacacaaactgcctttgttcaacgatggtaggcatgacagccgttcatcgcaagcggagccgctggcacatgaggagccttcttaatttcgtcatctccaagctccatccagagcacacgcactcggancccagnaccaaaagcanggctggaggacaagaacatcgaacaacattctgtgtccttcaccttgggacaaaaacaccccacccatattttacacccaacccttggctgactgcttcaatggatct

SEQ ID NO: 334696 - DNA, 235 bp, Zea mays
accaacgcgaacgaccacgcgtccgctttcgcgcaccgaaccattgttattacaacgaacaacatggcatttcgcggggcttcttatgacggacgtggcggccgcataagcggacgtggcggatttactcctcgtggaggacgcggtggcatgggagcctcattcggacccccagacactgtcatcgaaatgggcaaggtcgcacactactgtttatacttttttttttgcgaat

SEQ ID NO: 334697 - DNA, 161 bp, Zea mays
aacaccagcagcaggaaatggcgatggcaccgccagcagcaaccctagctattcgtggctcgtgccctaaccactttatctctaaaagacattttttgttgctcgccaacgaccaccattcccacacttttttttttttttttcccctccttacatcacct

SEQ ID NO: 334698 - DNA, 196 bp, Zea mays
aaaaggccgggccacgaacggtcgctgttttgttcctccgaacacgaactactgcaatcctctaaggctatgtcaaatcacagaatcagtctaatctgcatgttgggcgtcgtttaaaaaaaaaaaaaaaaaaaatggcagtcgctttagatgatccaagcttacttactcgtgcatgctacgtcatatctttttc

SEQ ID NO: 334699 - DNA, 428 bp, Zea mays
  unsure (1)..(428): unsure at all n locations
aaaaaacggggggaaggaaaaaaanaaaaaaaanaaaagaaataaaaaaaaaaatgggtggaaaaaagaaaaaaaaaaaanaaaaaaaggggggggggaaataaaaaaaaaaagggggggggaaaaaaaaaaatnaaatnaaatataataaaaagaaaaaataaaaaaaaaaaaaaaaaaaaaaaaaaaaaaaaaaaaaaaataaaaaaaaaaaaaaaaaaaaaaaaaaaaaaaaaaaaaaaaaaaaaaaaaaaaaaaaaaaaaaatgaaaaaaaaaaaaaaaaaaaaaaaaaaaaaaaaaagaataaaaaaaaaaaattttttaagagaaaggaaaagaaaaaaaaaaaaaaaaaaaaaaaaaaaaagaagaaaaaaaaataaagaaaaaaaaaagaaagaaaaaagaaaaagaaaaaaaaataaaa

SEQ ID NO: 334700 - DNA, 92 bp, Zea mays
  unsure (1)..(92): unsure at all n locations
taaaaaaaacgatgtgtaatataacatnngtgcgtaatacaggaaagaaatcaaaagggtgggtagatcaatctaagaggtcgattcccacg

SEQ ID NO: 334701 - DNA, 382 bp, Zea mays
  unsure (1)..(382): unsure at all n locations
ggaacccttcgagcatcctattgactcccatgtgctggttatgncggcgcagntcacaagggggagctttatcaacctgtttgtgcgtcggactggcccaagcagcacggagctgaccgtggagggaaggccatccgaccagctgggcaggagaaacctcactgacagtcccgtatttgacggccgtggccctgacgccagccttgtggctcgcgtacagggagtcgctacccagatgggcgacgtgcgccagttgtacaccgtcgtgtttcatgagaggccgtacaagggctccaccctcgtgacccgatgcgctatgactgtagggtgaaactatttttgttttttttttccgcaccggtaacttttattttttttattt

SEQ ID NO: 334702 - DNA, 373 bp, Zea mays
cgcgtccgattacaatcagctcaaagtactccagagcgcagaagaacccgatcgacaccatgagggtgtggctcgttgccctcgctctcctggctctcgctgcgagcgccacctccacgcatacaagcggcagctgcggctgccagccaccgccgccggttcatctaccgccgccggtgcatctgccaccttcggttcacctgccacctcctgtgcatcttccaccgccggtccacctgccgccgccggtccacctgccaccgccggtccatgtgccgccgccggttcatctgccgccgccaccatgccactaccctactcaaccgccccggcctcagcctcatccccagccacacccatgcccgtgccaaca

SEQ ID NO: 334703 - DNA, 200 bp, Zea mays
  unsure (1)..(200): unsure at all n locations
ccatccaccatagtgaggaggttggacatgcatttacttatgcacccgngcttgccttactgggggtgtgtagctgtttggttagtgtccatccataactttgatttaaaaaaaaaaaataataatataaaaataataatatttcgtctcgttctataggatccaagcttacaatcgcttgcatacaatttattatcttt

SEQ ID NO: 334704 - DNA, 222 bp, Zea mays
accacgcgcacggagatctccaacatgttggttgagagcacaaagcacgcggacgcggcgagggcggacgaccagaagggcgacgccgaccgcaccgcgagcgggaacgaggaggaggaacgcagggccgcggccaggcacacccgcgacaggctgaagggcaccaacgccaacgacccggtcgaggagagcagcaaggacaaacgggactcccaggagagc

SEQ ID NO: 334705 - DNA, 219 bp, Zea mays
  unsure (1)..(219): unsure at all n locations
gacccacgcgtcggcattgcggtgactcaaaagngtttcattttcactacgacagcgccaaggagcggcgggtcaccaactcctggtggacgactattccacacctgtggaggaaactcatccggtgcatcatgcccatcgaggtggccgtcggttatgtctcgaccaacgccggatacccgattgagctgctaaacattattactctgtgctgttcat

SEQ ID NO: 334706 - DNA, 82 bp, Zea mays
tggcgtaatagacgaagaggcgccgcactcgatcgctccttaaccaacagttcgcgcatccatgaatggctgaatgggacgc

SEQ ID NO: 334707 - DNA, 126 bp, Zea mays
gccgggcacgcgtccgccctagacaaaggaacccatctactttctcatatcaagcccaagcaagcagccaccaccatgtgccattattagaagccatgggcatgatcctacaccagctccagctcc

SEQ ID NO: 334708 - DNA, 384 bp, Zea mays
  unsure (1)..(384): unsure at all n locations
ggncgacccacgcgttcgtggacgcgtgggcggacgcttgggcggactttttgttatattgtccatattgacaattaaatggagggaagatacattctaattgtatgcaaacctgatgtttgataactattagtgtatctgtttacattgtatactaatgaacaatatttgttccatgtttgacttttatttcattacccctttacgtttggcaggacaaaagctgtgccacctttttttttcatgccaactaaaccaatttttgatgtatccacccatttgttgagcagaacaaggaaaaggtttttaaaaaaatggaaattttatgcgcaggggttgagcttaactcggtttttaaaaagcattttgtggagctattttttt

SEQ ID NO: 334709 - DNA, 241 bp, Zea mays
  unsure (1)..(241): unsure at all n locations
cggacgcgtgggtagagaaagccatagcatgctataagtacagngagcgcaagagcccaacaggcgccagagaaagcaccgtccggccggtccgcgccagtatggtgacggcgatcgcggtggcgtcggtggggctcgggatgctggcgggcgttgtgatggtcaacaggtctttagtcgccttttttttgttacttatgctttgttatgctcttgtattatgtatctttgtttttttctt

SEQ ID NO: 334710 - DNA, 275 bp, Zea mays
ccgggaccccacgacgcggctggtgtcgacgtggctgtccgggatcgcgccgcgcctgacgttcccggccgtgtcgctgcagctgaacgtgacgctgctcatcgtggtggccgtgcacaacccgaacccggcctccttcgcctacgcgtcggggggccacacggacgtgacctaccgcggcgcccaggtcggggacgcggagatcgagcccggccgcgtgcccagccgcggcgatgccaacgttaggcttgcgcttacgctccagtccaaaccgt

SEQ ID NO: 334711 - DNA, 313 bp, Zea mays
  unsure (1)..(313): unsure at all n locations
cgggccgaccccacgccgtccgcggtactcgttttgccggacgtcttgtggctttacgccttttttannaaaaaaaaaaataaaaataaaaagaaaagtgaaaaattttataataaataaataaaagaaaataaaataaataaaataaaatttataatatatataaataaaaataatttatataaatatgtataataaaataaatttaaaataatatataaaaaatttnttttggtgtgtctcttttttaaagttatctaaatttttcttaccctgtctttgtcaacttttaatattttttttttttttttcc

SEQ ID NO: 334712 - DNA, 363 bp, Zea mays
gaccacgcgtccgggtgggttggcttctcctccccctccggtttgtgttttgtttcgtgaggttctccggggttcgggttcgtgggtgagcggatcgagatggcggcgtcagatgttgagtaccgctgcttcgtcggcggcctcgcctgggccacggacgaccactccctccacaacgccttcagcacctacggcgaggtcctcgagtccaagatcatcctcgatcgggagacgcagaggtcccgcggcttcggcttcgtcaccttctccacggaggaggcgatgcggaacgccatcgagggcattgacggcaaggagctggacggtcgcaacatcaccgtcaacgaggcccagtcccgcggc

SEQ ID NO: 334713 - DNA, 375 bp, Zea mays
accccgcgtccgcccacgcgtccgcccacgcgtgcgcacacgtttgcgtttacatcgccccttcgcccacacgagcaagcgataatccggcggcgttgagatgttggtatatcaggatctcatatgtggcgacgggctcctggcggatttattcacctacagggggctcgaaaccggttttctgggggaagtcgggggaaagggggtcaacccagggtcttgttgatgtgacattggtgcccaaacaatccgcgggggtggtggaggacaaagcctttgacacaccagtggaaatgggggtgattttggtgacaaatttcggtcacgaggagcatccttttttggacagaaaatatttgggttctaccataaaaa

SEQ ID NO: 334714 - DNA, 437 bp, Zea mays
  unsure (1)..(437): unsure at all n locations
gtgctttagtatgcccacgcgtgtttccatatattaatgcncnnggataaaaaggggatttgcgggtagtagnnnttttctcttgtcgacgggcncnncagggcgcccggctggtacctttgtnngatattntnncttgcttgggacccgcgttntnntatttggcgagtntnnttctggagtgggttaaatnnaccattggnnnatgggttacnnntttttattggggcatgtggaagaccacatnnntacattatgtgcgagggcgaacctgtttcacaaaatttannatgaatcncnntccacttnnatttgtatgtggatggggttatagaagattactcttattggttataacctctntcacccaactctattannatggatatttaatcnncttttggnngatgaatacgttttatcaagtattgggcctt

SEQ ID NO: 334715 - DNA, 274 bp, Zea mays
accacacgtccagtggagttgcaccaaccttttgcatgtttttactagactacttacttgtctggtgagggccctatcacgatgaaagcggtatgtcctgtgggccatataaagattgcgagtatcaatgtataatcatcgtcctgaacacgataaagcgctagtttggtcaaactggaggtgctctacaacaactttctagccctataaggggcgctggttctaaagggcctaaattgacacttacttgcatactacaacgcatatttattat

SEQ ID NO: 334716 - DNA, 378 bp, Zea mays
gcggatacggagggggatacagtcgtggcctagctgctgctgctccatccattgaagatcaagctcagttcccaagccttggtgggaagtgaagggcgcccagctgctgctgtcaccgagcgttgtgttgtctgctgttgtcatatttaaattttgtccgacgttaaatttctgtgccacggtttaaacggaacaaataatgatgttgcatgtggctatctttagttatgtggtacttgacgtttgaataccggagttgttgtttatcagaaataaccttcaaattttgtttgccagtcttttcttgggggggggggtttttttttattttttcttattgttttgttttttcttttttttattgtttgataattattt

SEQ ID NO: 334717 - DNA, 265 bp, Zea mays
  unsure (1)..(265): unsure at all n locations
ggccgaccgacgcgnccgcccacgcgtccgtggtatttgaggtatgtttttctctggacgacctgaccactgaggttggtaatgcttgcatttgggtgtgagacaacaatgcgccttacaatgtgctcatttctgactgtggcaagatggttattcagttccctcagtgctatttctaaaacatgttctggtttatgtgagccaagatcttcttgacactctatttgatcccagctgtgtggtagatcaattgtcacattttgct

SEQ ID NO: 334718 - DNA, 296 bp, Zea mays
cggacgcgtggggcccccaggggccagggcttgtcattggcggcgtgtccctaatcccaccgccaggctctgggcaccaaatttccggcggcgatggcacccgctgaggcgaggccagggttccggcgcatgttctccgtttgtgccttcgcgcgcgccgaaggcgctcgccgcgcgccctaagggcgacccatgccgcaaccttttcttgctcggcataagcaagcgtaccacatgtgagggactgagagaagcgcatgcggagcttggtgcaagcatagcatgctcgaccttgt

SEQ ID NO: 334719 - DNA, 299 bp, Zea mays
ccgggtcgacccacgcgttcgactacgccccataaccagtggttttttactttttgtcgcagccaaactcgagcgggttttgcacgtatttcgtgcggcttacgcaactcccgtactccatgcaacatgcacagccgcacccacatgtcatgatcttctactgtgttcacacgacaccgccggtgtactactccaggcaggagctgaatccgcatcatccatcttaatcaatgctcgccgtctgtaccttttcatgcgataccctcacgctcatgctgctccggatctttactactatt

SEQ ID NO: 334720 - DNA, 275 bp, Zea mays
gcaatcgattcttggatgtctctatttgtattgatagacgataatccagtccagtcgagtgcgctcgcgtagaaccgggtttgtctctgtaattactcctctctttcgaatcatgatgagtcgtcgttctaactttttttttagatttctactatatacgtaaaaagatcttatctagaaaagaaaagttagaacgtgttgccatttgcgaacgaagagagtattatgtgtaaattttgtatttgtttgttgtagtagagaaaattgaactttgt

SEQ ID NO: 334721 - DNA, 306 bp, Zea mays
cggggcggcccacgcatccggcaatcgatactttgatgtctctattttttatctatagacgataatccataccatgcgagggcgcgcgcgtagaaccgggttagtttactataaatactcctctctatcgaatcatgatgagtctgctttctaactttttttttagatatttactattatacctaaaaagatcttatctagaaaataaaagtactaacttgttgtcattttttaacgaatataatttatttgtaaaatttggttttttttcgatgagatattataaaatttaactctttcatataa

SEQ ID NO: 334722 - DNA, 221 bp, Zea mays
  unsure (1)..(221): unsure at all n locations
caacgaatcagctcnaggcacgggggggatatattataacaaggggggcaccttgtactcagacccacatgatatttctccaaaagcacctgcttctaccattcctagaagcttggctactagctttagctaattttattctgtgccttcaaaaacaagtgaaagaggcttattgttcaactacttaatatccttaattttattcatttcacttaatgcta

SEQ ID NO: 334723 - DNA, 300 bp, Zea mays
aaaaaaaaaaaaaaaaaaaattaaattttaaaaaaaaaaaaaaaaaagggaaagggaaaaaaaaaaggggggccggcaaaaaaaccaagctaaaaacccgtgcacgcaacgtcaaagcactataatagggccacctaaataaaaaaaacgggccgacaataaacaacaacgagacaggaaaaacccggacgtaaccaaactaaaccaccatgcagaaacacccccaaacgccagatggcaaaaaaacaaaaaggcccgaaccaaatcgacattcccaacaaatacacaacctgagggggg

SEQ ID NO: 334724 - DNA, 106 bp, Zea mays
cgggccgagaaaaaaaacaaaggaagaagtttgtgtccaggtttcagaattttttgtttgtaattaccattttgcatgacaagaatgagatactgtagatattaat

SEQ ID NO: 334725 - DNA, 261 bp, Zea mays
cagacattaggtgcatgtactctcccgatattaccgttcgtttcatcacatgcctagctccctcgtactatgttgagatggacgctcatctaccgtgcgtgccatttctcgtaaggagactgtcaccgtcagattattctatagtgtaaagctggctgaaactatgtattattttcttttactatgttgtatggcttggcgcatgatgccttttgcaaaaacggttactgaaagtttgtaactgttcttttagcctttcct

SEQ ID NO: 334726 - DNA, 261 bp, Zea mays
aaacccgggcgaccacgcgtccggaatacctgcagactttggtcgacaattgctttgttcttagcagggaagtacacatcagaggcgagcaaacagcatgagtggtgccatggacatagcacgagccgcgtgacccatcatactacatacatacacctatcactatcatagaccagagattcagagctcaggagctcaggatgtgtcgttgtatgctaactatttattgaatgaggtagagaaatgtttttaccttctttt

SEQ ID NO: 334727 - DNA, 347 bp, Zea mays
aaaaaaaaaaaagggaagggtaaaataaaaaaaaaaataaattaaaataaaaaaaagaaaaaattaataataaaaaaaataaaaaaataaataaataaaaaaaaaaaaaaaaaaataataaaaaaaaaaaaaaaaaaaaaaaaaaaaaaaaaaaatataaaaaaaaaaaaaaaaaaataaaaaaaaataaaaaaaaaaaaaaataaaaaaaaaaaaaaaaaaaaaagtaaaagggaaggaaaaaaaaaataaaataaaaaaaataataaaaaaaaaaaaaaaaataaaaataataaataaaaaaataaaaaaaaaaaaaaaaaaatataaaaaataaaaaaataaaa

SEQ ID NO: 334728 - DNA, 366 bp, Zea mays
tgctcgttcgggcgtcagtctgatggatatctgcataattcgccctttctagcggtctcccgggcatgtacgcggtgacaatcattgggttctagggcattttacacagagagagcggaacaacagttctttagagtaattttctgacaatgtcttctcttagtcatttacttgttcttgtgtttctctatgttctgcttttttactcatctgaatctcgcaaaccccaagttctttatgacactggatctagcgattatggtgcaaaaggcacaagatgggctgttctaattgctgcatcaagttattattataactacatgcattatgcttacatatgccatgcatatcatgttcttctaaaag

SEQ ID NO: 334729 - DNA, 74 bp, Zea mays
ccaccatgagcgtggtgatcctggaccgctccaccgtgcgcggcttactagcggactaagcgggcttctcgcgc

SEQ ID NO: 334730 - DNA, 403 bp, Zea mays
cgaccgatacgtgcagaaaggcctctttctagatgccgcccgggattatacacatccattgttccactacaaactgggattcatgaatccctacaccagtaatatcgtctgtacgacaacacttgaatcacaatcattgataaacatatcactattagacaattacaaacatgatgaccactttatccagttgctcaacacgcaccttaataacaattaagaccattttctacaactaacactgaattatgtatcaaactacaatggcttacagacagaatccctcttgaacaagctgtcatgtaacgctcagactatcagattctttgacgtcaccaatttaaaccctcatgagctcgattactgtgtccatatcaaatttaaagattttgaccatattttt

SEQ ID NO: 334731 - DNA, 356 bp, Zea mays
gatatctacagaatgcacccttactagcagccgcctcggtcttttactctttgacccaacaaaaagaaaatggaacattgtcacatgataaacagacataaagttacatgagatctctcttactatccttgttcctagttcttagcttttcaccgtagcgaatcatccgtgtcttgcaacgccgtggttagagatctttaccttttcctctcactacgtggttcaaggcgataactgtcaaactaactgcttcaaccgtatcataacgctcaacagtcaagtccaaacccttgaggaccatcatggcgtttgccatttcattaaaaatgctatctcaagagtctctttctctttta

SEQ ID NO: 334732 - DNA, 449 bp, Zea mays
ggtgggttggcttctcctccccctccggttcgggttcgggttcgtgaggttctccggggttggggttcgtgggtgagcggatcgagatggcggcgtcggatgttgagtaccgctgcttcgtcggcggcctcgcctgggccacggacgaccactccctccacaacgccttcagcacctacggcgaggtcctcgagtccaagatcatcctcgatcgggagacgcagaggtcccgcggcttcggcttcgtcaccttctccacggaggaggcgatgcggaacgccatcgagggcatgaacggcaaggagctggacggccgcaacatcaccgtcaacgaggcccagtcccgcggcggccgtggaggcggcggcggtgggtacggtggtggccgtggaggcggcggctacggcggtggcgggcgccgtgatggcggtggcggctacggcggtggc

SEQ ID NO: 334733 - DNA, 294 bp, Zea mays
accacacgatcgaccacgcaagatcccatttaaatacgatcataacatcacaaagcgtttgcatttatatcatattaggatcatcctataatcgtacctgtctcaaattagctatcaacctaagtgactatttattacacgctcacaaatcgatatacgatgccatacgcaaaatcatacacactaatacacaaccatacacgaatagatctctggcacattttcgcacttccaagaccagaacctatcaacgtagacacatagatccctacatatagatcatataatattctc

SEQ ID NO: 334734 - DNA, 384 bp, Zea mays
tgcttcatggctttctacgactctcgtatttcaatctactgcaactaccgtgcacactctagtcaacgcccgcgggaaggcggaatcagaaattagatctgccctttctctgaccttgtgtatgcctgcgaacagagctgatcctgtacgaactatgacctacttcatctcctgtaacatccacggaagaataagccatgcaaggagtgatcacaaagttcgcggttacatccatggtgatgtggatggccccggttgcaatcggttatcggttttactaaccacacgttaccaactctgacttgcaagtcattctctgtgcaaacactcaccaaaagtcaactgactgtcatatcggttaaaatggtgatactgttaaacata

SEQ ID NO: 334735 - DNA, 344 bp, Zea mays
attcccgggtcgaccgcacgcatccgtaccggacctacgaccgctatgtgccatacttgattgcaaagatggataaataggctataggtggggaagaccaacgatctagggggccctatcttacatacgcttgcatacgaatttaatccttctgtataccgtgcctctaaatacaattgaatgacctacacttgacacacaggatggactgttaaaaccctgccattacccacctctaaacctactcatgacatcactgtttccccagatgacactatagccataagacccaatctaatagcttttgataacaatatctcaatctgaatggcaaatactactcc

SEQ ID NO: 334736 - DNA, 359 bp, Zea mays
acaagggtgtgatcgaagaggagcactgagggacaattagttgttatcggttgagttggagttggtgtttggcttgcaattttctcaaggagaactttgtaatccgttaggatgtgttgcggaccattatcttatcctactttattatcgcatccgttgaagactgttgacgcctataatggcaactgaagactctttagaatccatgctaacgaacacgtacatgcgccagcatcgcctctctctaggcgcacccaaactcaatggccgtgcccgttaaaaaaactcggcttcctttctaaaggcacccgacttacttgcccttgtatggcgtgacctaaatttcatttacggcccct

SEQ ID NO: 334737 - DNA, 425 bp, Zea mays
tccggaattaccgtgtcggttagacgcaagcgtacggtctggactatacaaacttatgtactcttgccttccaacatgtcaacggtttatcgggtgagcctaaatgcatgaactggacgacgaaatacaacaatatgactcggactaccgtatcttcacacaacttaataacatgtgctaacatgtatactatgacacctagagtaatcacctataggttacgaccagttgccacatcacaatgaagctcaggatgaatggcactgcttatataccctgtattggccctatttgacaagaacattctgtggtttcactcagagggaccagtgctattgacagacccctagcgagatatcgtatcattctaggaactctatattctgcaccagtgacgaattgtcaacaagggcgttataaatatg

SEQ ID NO: 334738 - DNA, 448 bp, Zea mays
cgtgtaccaccgcgccctccggccgctgctgcactcgtcgtcgtcgcgctcgggcagccaggccacgcccgtggcgcccactgccgccgacatcaactaagcgactgctcgcttggctgctcgcggtgcagcaggagtgcgcgcagcttcgccgctcggaccagccgcagcgctgtccgcttgagccggagctgcggcactctcgcgggccagacgctggcatgctagccatgccactcctggcctgacccttcttcttgcgcttcgcacctttccgccttgcccacacgaacctctgacgaacctggcttcctttgcgcgcctcgctcctcctctcttacccctctcgcacgcccatcccatatcattccatccggcaccctcttccttccgaaaacgacatactttgctgcgctccacgagtcgaaatgaagccccgtcgtccttg

SEQ ID NO: 334739 - DNA, 294 bp, Zea mays
gaattcccgggtcgaccgacgcgtccgaacttgcccaaaattctgagtcgaattttaatcactctcaggtcagactcaattttccaagtgcggattcatacaattgatgggtggttaaataattaccggatacaccgattttccgaacaacgatgttccaaacatcacgaaaatttacgaagactccgtatagattaaatatcataataaaggacgatcgctctataggatccacacttacgtacacttgcatgccacatcataactcttatataccgtcacctaacttcaata

SEQ ID NO: 334740 - DNA, 330 bp, Zea mays
cgtacgcgtgcgtaaccacgtgctcgtacgtttaggcggacccgtgggccttgacgggtaggacttgatcgacatgagcgacgcgcaccagatatactagatcgcgtcctgattcgagttaggcacatggaccgctgcaaatatgacgacgctctaggtccttataccttagcctaacagctataatacatctagatctaaggacctcacgatgatgtgttctctgtgacacttacgaactcagacctgctagacagacctggccgtccaaatctgcttacatatatgaactgaccctattattgtgcgtatcgagctgcggcatcctct

SEQ ID NO: 334741 - DNA, 311 bp, Zea mays
gctatgcatgctccaaacgaccaggctcaggcatccgacaacgtcactgttctatggcgtgggctaaattcaattgatgaggacaacaaagaccaacataacgactgggaaaaccatgacgagaccgcaggatcatacgccttgcagcgcctacgattaccgccagctgacataatagacttcagagcccgaacgcatccagctacacaacgatctcacagcctgaatcgccaacgtgacgcacactctcacgtctcattaaccgccatccggtgtcgtgcatacagcgcagctggctccgctacacttgc

SEQ ID NO: 334742 - DNA, 408 bp, Zea mays
taacaacgatcatttttatatagatgaacctgctgactctgatcggggggatcctgatcaatgtaaggaagtccacagcattatgctaccgaccaacatgattattaccatggacatgacgctaaccccattacccatcacactacatacatacaccttgctctagcacacaccacagactcaaagcataggacctcaagatctgtcaataactcctaatctgacgatcgaacgaaggatacaacgctctcaaccgacatctcacttcttaccaatcgcgccatcaatcatccaccatctcacgcatcatacggcaagacctccgatacagcaacaaaccaacacagaagtctacaaaatctgtggtgtacgacagtgcacttgatgcagacagacattatatcgaca

SEQ ID NO: 334743 - DNA, 138 bp, Zea mays
atacaccgtaccgtcgtctctgtttgcgtttctgtcaagtgtgcatggaataatactgtaactgtgtttcctgccgggcaatgcactgtgatatgatgcccaacgaataaatgtcgcttttatttttattcgacttcc

SEQ ID NO: 334744 - DNA, 442 bp, Zea mays
aagagcatctatggagactgcctttcgtcgtaggaagttatttgcatcccaaaatgtgttggcagctacaaatttttattttcattctaccagaggacaattggacaccaaaggccaaagccacggaggacagcacgataacaagcaaataaccatacgctaatgatagagaagagaaatgatttctgagagaatgtgggcagattgttaaaaccaccgcgacaactaaaatatgtagtgctttatgtaatagtgaactagcaatggcatggactttgccctgcttgttttctttatgtgatatactagtgatgttgtggacaaaaaaaaaaaaaaaaaaaaaaaaaaaaaaaaggagaaatatataaaaggattaagtttacgttcacattcatgctaagaaataaaaaggggcggccgttttagaggatccaagtttacg

SEQ ID NO: 334745 - DNA, 380 bp, Zea mays
taccggtccggaattcccgggctgtacaagacgtacgctgaagctcccgaccgtgcggcagccattgtaccgtacagtgccacctaaccggagaaaccgtgccaactgtgcacatccgatgctcacggaagacagtgttcatgaatgcattaatccgcttgtagcagatcagtattctgctagttgagctgataagctagagcgaatcaccgagcactgtttgcagcactagcgcaccttgaatgcggacatggacaccgtctgccgcgtcatatactacgccgtctttctagaccatacgcgcatcgtgtgatttgcagtcgcgaccaatctagctactattgctgtgaatatcatgcatgtcttgctgcgcatatgtt

SEQ ID NO: 334746 - DNA, 352 bp, Zea mays
accggttttgaattaccggaccgacccacgcgtacgtccgacaacaaacctaaccggtctccatacttcaacccatacgccatgtcacatcaagaggggctagtcataaccatctaggacaggcctagcctactttcatcgctcccactgctacttgacgagcttcgttatcttcgaaagttactgattgcactagtcagcgtgctacgatgtgcccatctcatccagtcctgacgctctacttatcttaccttacaccaacagctactgagttcttgatgacaaagatctacactaactctctattccttacaactgctatgctgctgtagacttgagttacttaagccta

SEQ ID NO: 334747 - DNA, 119 bp, Zea mays
ggggagactgcatcatcaggttgtatgagacgcaatgcaaactactcaccttctctaataagcgctggacatgtgtactttgtgttgggctattcgcattctgttccaaacaagttgcc

SEQ ID NO: 334748 - DNA, 284 bp, Zea mays
cccacgcgttcgcggacgcgtttacggacgcttgggcaacgctaacaaatcagcgtcactatgggttcatattcagcgcctgagtgatgcgagtgttgtcagcagatagccatgaatttttgctcctcctgaaccttgatgtgctatatgcccactctctgcgtcacagcgtagtcattaccttcaaagggtgatgccaccatgatctagaactgcatcaccgtttgcaagagctaggtctatacctgcagtttctgcaagctctgcacttgcatgttcaccaa

SEQ ID NO: 334749 - DNA, 394 bp, Zea mays
  unsure (1)..(394): unsure at all n locations
ggcgagcagttacatgggccgccgcgccaagctcaacttcccggacgccgccgccgccgcggcggcgcgggatgtgcagccgcgccgcccgttgcccggtcagagcctccgcgagaactgcgggtccaacgccgcgtcgccgctgcacgtggcggtggcgcgggcgccgaccacgctgcagggaacagggccggcgccgcccaaggaccaggacatctgggacggcttgaacgagatcatgacgatggatgacggcagcttctggtccatgccgtgatcctgctacttcggccgtccatctccggatcttcctctgggtgntgtgcgtttatttttatgatgaccagattctacgggtgttttttaggggaagagaatcataaattgaattttg

SEQ ID NO: 334750 - DNA, 436 bp, Zea mays
cccacgcgtccgatatgactcaaaatctcgggtgatcacacttccagaagcatcaaatgcgtaaacataggtgactctacatttacgccagtaactataaatggatgctctttggtctatattccaaatgtgggagacatcacaccagctttgaagaacagggagctccagagcttgtgaattctatagaataaaggtggttgtccgcacagtatagcaaactgcgaagcctgcaactactagagtttggtctgtagcaggctcagttgggaatgtgtagcagagcatgatccatggtgtggatgaattgcagagtactgtgctgtgtgtgtaggaaggaaaagctgccgcctgccgattgtgcagtcagtctagtacgttggtatgcgaccatctcaagtctgggctttgattttaagcaatgatttttggcaat

SEQ ID NO: 334751 - DNA, 79 bp, Zea mays
aaaaaacaaaaaaaaaaaaaaaaaaaaaaaaaaaaaaaaaaaaaaaaaaaaaaaaaaaagagggaaaaaaaaaaaaaaa

SEQ ID NO: 334752 - DNA, 229 bp, Zea mays
agtcgctgcctgtgacagtgcataccgtcgtagatccagtgctctgtacatgtaactgctggttaagggctcgaacttgaaggccatcaaccatttgccaacttcatggactatgtggcgagacatgccccttgtacgggtttcgcaatatcatgtctcctatatctggctaataatgacgaaagatataaacgcatacaacaaaataaaaaaacaaaaaaaacaaaaa

SEQ ID NO: 334753 - DNA, 378 bp, Zea mays
accagcccagaaaattcgcagccgccaaccacccgaccccacatggccacatgcgcgaccgcgatgcccacgccgtgagcccgtgaggcgcgccgctggagccgtcgcagccgttactatgacctcgccggcccccacctcctggttctccggcctctcgcgctcctcctccaccatggccggcggcgtcgcctcggcccccacccccgcctacgcctacgcctacgggcccgcctccgtgttcctccccgacgcgcccaagtccgtaatcggcgccggctccggaggaggcaagcggaatcatctctgcggggcgctgttcaagtacggccccaaatctgcgcaggtagcattcaagactgggggattttaaccatc

SEQ ID NO: 334754 - DNA, 290 bp, Zea mays
  unsure (1)..(290): unsure at all n locations
gccacgcgtncgcaatacatcttcctagtttccggatttaacgttcacgcaagaaccagatgattacaacccaaaagtcaacaggttttcaagctcaaatagtctccatttatgagcagcctcatcaaaacgaaagaatccagcaagttgcccacacatgatacacgtctaaatctcaatcacccaaacggcctgccccaacatgcaccagattcaaactaaacatacaacttctgatctctcactgaatatttggatgtaaccacgaaatccatggatcaaagctcgac

SEQ ID NO: 334755 - DNA, 243 bp, Zea mays
acccttgtacaacatatctctcactcctttcttatttcactgaccgaccaaactctgatgccgatgaaaaccaatactgggacgggcatcacaaatccactaaatctcatcatcttttctctccacacactcaactctgtatgatcaaaacctgacctttttccattcactttgactttccatgatcccttcatgtatactacacttccttaccaaatgatcattttcctcaataaaaaacat

SEQ ID NO: 334756 - DNA, 419 bp, Zea mays
attcccggctcgacccacgcgatacgtcgggatctccaattcgcttcctacttttcatgcacacaaaaactaaaacgattgggatgggtttacaccctcaaaggggagataaaccctgtatatatctgatgattgttccttcttattactgcaatctcaatactcctaccatctgctaaaacttcaaaatgcaactaaccatatgatcacaatctcactctctttgcacaaaggcttcagatttccccaccaacaatgttttcgacttctacttcactatatgcgcaaaatatcctattcaatcacttatcctcttgcaaacattcattcaatccatctgattcatctcatctagatctaattatcactgtcatcttatatttaaccccttccacctataacataatacctattttact

SEQ ID NO: 334757 - DNA, 350 bp, Zea mays
atggaatcaaataaaaaaaaaaaaaaaaaaaaaaaaaaaaaaaaaaaaaaaggaaaaaaaaggaaaaaaaaaaaaaaaaataaaaaaaaaaaaaaaaaaaaaaaaaaaaaaaaaaaaaaaaaaaaaaaaaaaaaaataaaataaaaaaaaaaaaaaggggggccccttttaaagaaccaaatttaatttacccgttcttgcaacataaaattttttttttggtgcacccaaatttaaattaattgcccgtttttttaaaacattttaattggaaaaaccttggttttaccaaattaaatccctttgaaaaaaatcccctttttccaagtgggcttaaatgcaaaaaggcc

SEQ ID NO: 334758 - DNA, 413 bp, Zea mays
aattcccgggtcgacccacgcgtacggacggatctactattacacaaccaacattttttcttaactatccaattcacatatcagcatgctctattccacatcgaagtcggcttatccttacttagccattccaactttacatttcctatccatatatctacaatgcgtactctgatctcacatacacaatttatcataaaatcccattatacaatcaaattaaacatcacaattctaaccctactccaataactaatgatgtcaaatctaccgatcttgaaagctactactattacttgtatgaatcttctttaaaccaccacttattgacttcattcgaatactgaatgccacccacatcatgaattgacctcagtatctacctgttattaatgatttttactaactcttct

SEQ ID NO: 334759 - DNA, 283 bp, Zea mays
atacgatacaccggaccacctactctgcctgcctatttgttaactgtgcatggaataatactgaaagtgggtttcctgccgtccaatgcactgagatatgatgcccaaccaataaatgtacctatcataattattctacttccaaaccaaatttaaataactgacataataaccaaaaagcacaaaaccgatcatccttcacaacaaatacacagcctaaactggtacaatgatacacgccatgtaacaatgcattaaccccactacatgtacagtctacaca

SEQ ID NO: 334760 - DNA, 89 bp, Zea mays
aaaaaaaaaaaaaaaaaaaaaaaaaaaaaaaaaaaaaaaaaaaaaaaaaaaaaaaaaaaaaaggaaaaaaaaaaaaaaaaaaaaaaaaa

SEQ ID NO: 334761 - DNA, 196 bp, Zea mays
cacgcgtgcggccacgcgttctgggcgcggacgctgtcgctcgcgatatttgcgagagagagagaagagagggcccgagagccgaggacgagtgcagtctggcatgcgtgatgctgcttcggagcgcgtcctcgccgctgctcaactgcaggcgcgcgccggctgcggaggcggcaggcgagcacctcgcggtggt

SEQ ID NO: 334762 - DNA, 351 bp, Zea mays
  unsure (1)..(351): unsure at all n locations
cggacgcgtgggcgacgcgcagncgcccattccgcatctcgccctcccgtcctgtcccgtggcgccgttctccgattggccgccgaccgcctcgccctcgtcaacaaaagcccaccgcaagcgagcgagcgagccaccctccccgccgccgccaccgaccccgtcccgcccccaccccgactgctcctgaccgccggcgtggagtgcccgggctccacctgctgcgacgacaccctccccgacacgcgcgcccccaccgactgctccgtttgcggggggagccggggctccggcctcggcggctttcaaagccccctgcctcacaacaggatccaaaatcccggcctagac

SEQ ID NO: 334763 - DNA, 384 bp, Zea mays
tagcaacatagaaagcacaatagtgtaccaacaatggcagccaaaatattttgcttccttatgctccttggtctttctgcaagtgttgctaccgcaaccattttcccacaatgctcacaagctcctatagcttcccttcttcccccatacctctcaccagcggtgtcttcagtgtgtgaaaacccaattgttcaaccctacaggatccaacaggcaatcgcaacaggcatcttaccattaatcacccttgttcctccaacaaccgtcagccctattacaagagttacctttggtccatttggtggcacaaaacatcagggcacaacaactacaacaacttgtgctagcaaaccttgctgcatactctcagcaacatcaggttct

SEQ ID NO: 334764 - DNA, 292 bp, Zea mays
gccgcacctgctcgagtactcgttcatgtctattaacactctggacagtgacaggggtatcatgctttctggctgctcacaaggactcactccaggcggtcgtcagaaacgcctttgccggtgccgatgctatgctgatcgaggcgttgcccaagctggagattgttgccagcttcagtgtggggcttgataagatagatttgaccaagtgtcaagaaaaggggatccgatttaccaacaccccttgacgttatgactgatgacgttgcggattttgtcgatctgtttgatg

SEQ ID NO: 334765 - DNA, 112 bp, Zea mays
ctctgcctatccgttaaaaactgacctgatttcacacagatttagcccgaatttttaactaatactaacgcttgcaatctaggtggcactttttcggtgaaatgtgcacggt

SEQ ID NO: 334766 - DNA, 391 bp, Zea mays
gcctgaggtaccggtccggaattcgagggacgacgtcacggcgtatttgcagacacaattagaagaaacatggaaagcattgttttcaagccttagatatgggaaaaactttagtggtccgggctgtttccgccatgctgttttatcaccattaggatacgagactgcattgtttaaagggcttagcgaagacatagattgtcaaggtgcttctgcacatgatctatggcaaagccccgatgacaaaaaaactgctcggttatctgagtttggagaaatgatcagagactcttttggatttcctgtaaacagacatcattctgataagacagtctcgggtcattataacatcctctttgtccgtcgagaagattatttagcccatccacgc

SEQ ID NO: 334767 - DNA, 215 bp, Zea mays
cccacgcgtccggcaaggcatccttccggtctggaaggaagaggagggggaggaggaggccgcgaagtagtaggttgcgcaggcgcatacgcatacacatacacacagggtgctgccgtgaacatacacatgtaacgctgtaaagttcatctgctgtgaacatacacatgtaacacagatacttcagtttcagcagttaaaaacctaccgtcgtt

SEQ ID NO: 334768 - DNA, 282 bp, Zea mays
ctagtcgctgccacatggccttggctactgcttctgcacccgaacccctccttcagagtcagccacaaggaaaggggcgtgcgccacgcacatttctcatgcctacacaactcctctactagccttaactttgccaggcaaacctgtgatcacttccattcactcgtcgctttccagacatctgctctatgaagcaatcttggcgtcttcatgctaagaatggcacaagcaacactaaatgtggctactaatgggtttggtacgattctcaagaatttctta

SEQ ID NO: 334769 - DNA, 453 bp, Zea mays
  unsure (1)..(453): unsure at all n locations
agtcaccaggctagcttctactgatgaggtaaaagctgcgtacgagaagatgtgtgaagaactaaatagcaaagaactagaagaagaggagcttaacaaggaacatgagctcctaaaggttctcggcataaatcaggagtcataatgcctcacttcactaatttcctgtgcttcaatcatatatgcgccattgtaggaatcatttactatactatcaacggaggaagaacgaagattatatgattggagcttgtcaagaagtggacagcctgagcgatatgtctggccatttgaagttgatccattggagttggcaccagatcctccaaaggaaccagaagatgagttcccaaccaagctcgttggctacttcttactggcgtggttcatactctctgttggcctctcggtggccctcaacaaatgaagattttctncccaaaagaacatgaa

SEQ ID NO: 334770 - DNA, 234 bp, Zea mays
cacagccgtccacacaagcacttccacatctttcaggttctgcacacacacacacctaacgtacccgcgaatctcttactacgaggaggtggactactgctcggaagacgccatgtctgttgccctggctctcttcatcccccactaacgcgtcttccagcatcacttcttcctggagaagttcgaggttgtcaacactgtcttacttcgccgactcctactaccattcaccac

SEQ ID NO: 334771 - DNA, 84 bp, Zea mays
accgttctcgaatagccggacccacccacacatccgttcagataatcccttccactatttttatttttctgcacaagcatcaca

SEQ ID NO: 334772 - DNA, 115 bp, Zea mays
atcctgttcgctaccgtgatgtttaccctagtccagagggtttatcttcgttcgtgtcgtgtttgttgttgcccatctgtgtttttgattgcaaggtcgctctgtgtcagttgtt

SEQ ID NO: 334773 - DNA, 59 bp, Zea mays
accacagcgagcgagagcaaggcttccaatttccaccgcgagaacaagtctcagccaaa

SEQ ID NO: 334774 - DNA, 126 bp, Zea mays
ggaagaaggaagcaagaaggaggaccgagcaggcctatgccctaaggtagacccgaccggggcactgcggagcaagaccgggcggacggagggctgactgacaggcaacggaagggggcgacagag

SEQ ID NO: 334775 - DNA, 221 bp, Zea mays
acctcgccggccacactcgtctttctcacgagccacagcccacaggcacaggcaggctctggagctcagtccacccatcgcaggggatggcgtcgtcgctcgccgtggcaacggtcccgtctctggcaggcctggcatgcataaacctgtgcggcggcacctcgtccctagtggctatgaacggctgctgtttgctctatgggctaaacgtggtggacatg

SEQ ID NO: 334776 - DNA, 223 bp, Zea mays
cgaagagcagcccaggacgacaggtctgttcttccataccgaggtggtaccgtcaccgccaaggcgagtacgataggtcgagatggaggacaaggtgcacatgccatcagcacctcgggaggccggagcatctgccctgcgccttacgactctacgagaagcaccaagcgaagaacgacccctagcacgcgcacagacacacgatcacggatgaggtcactgc

SEQ ID NO: 334777 - DNA, 441 bp, Zea mays
cggacgcgtgggcacggcagaaagatggaccattcgcacatggatcacggcggccacatgggccacgacatgcctggcatgggcggcgacgggcccaagtgcaacatgaacatgttgtttacgtgggacacgaccgacctctgcattgtcttcccctcgtggcatatctcgggcaccggctcactcatcttttcgctactcgccgtagtcctgctcacagctgggtacgaagctatccgagaaatatcaaggcgctatgaggcgtactcaaagggtatcatggagggacccagagacgacgcagatgaatctagctcattacttggcccagggagaaacggaggcgttgggcgtagtgccgagcagcagatgaagatgatcaaggctgtcttgtatgctgtgcaggttttctattcgttcttcatcatgctgcttttcatg

SEQ ID NO: 334778 - DNA, 361 bp, Zea mays
gtaagatcacttctcgaaaaatcttaaagttattgcgttcggcatgcataactggaacgggggaagcatcagtgggctgggtcatttattaaggatttgtccgtgccgatagcccttggcacgtgtcgggtatattttgtctctttacagtctggacatttatgcacatattcagcatgctagggtatgatgacccacgcaccgttgaataataaaaagaagcctttatcgaccagatgccctcgatcatcttctgcccagccaagatcctgaggctctgggatgacatgggcagcgcagaggtcgtcgttagttcatcgaaccatacactacatatactagcttgttaattaaatgcttt

SEQ ID NO: 334779 - DNA, 295 bp, Zea mays
ccaaaatagatccccatgggttccataatgtttggtcccttttgagcagtttgccgaacccgccatttgaaggcggctttcaacgttccttgcctttaccggcccattcttcttaatggtaggtttaaacttaactttggctgctttggaccctggattctcacgtcaagcgttgtaccacataatgatggagatacagaggtgcactttcttgaacacttcttacgtgcaatcattagcattgacagtatagtcttacactaacttatactgcacgatcacctgatgagataca

SEQ ID NO: 334780 - DNA, 272 bp, Zea mays
ccttccgaattaccgactcgacccaacgcaccagtcgcttctcaaccaggccctaagtatttcatccgagggacctgctctcgctcgggggcactaacctcgaggtcaacaagcacgctcgcctgtgctgtcacgtcatcctcactccggagctgtattgcatggtcgtctctgtcccccaacctaatacccgggaaattccctaatggccttcctcgaccaatgtcaaagtgcggcttttgactctgtgagccttcctttatttccctgtc

SEQ ID NO: 334781 - DNA, 461 bp, Zea mays
agaaagtggaatccagtagcaacaatagagcaacaatggagaccaagatattttccctccttatgctccttgctctttctacatgtgttgctaacgcgacaattttccctcaatgctcacaagctcctatagcttccctttttcccccataccttccatcaattatagcttcagtatgtgaaaacccagctcttcaaccatataggcttcaacaagcaatcgcagcaagcaacatacctttatcgcccttgttgtgtcaacaatcgccagccctatctttggtgcagtcattggtacaaaccatcagggcacaacagctgcagcaactcgtgctacctgtgatcaaccaagtagctctggcaaacctttctccctactctccgcaacaacaatttcttccattcaaccaactgtctacactgaaccctgctgcttatttgcagcaacaactattaccattt

SEQ ID NO: 334782 - DNA, 267 bp, Zea mays
catacgcgtgttcgactaggccagatttaatgtccgccgattgttctgtgctagggggcacgcgcatcgactgtgatgggtcagactgaactgttaagcctggtcgccatcgttcgtacgtgcgttcgatgcttggcgctgttgatcgctccgtatcatccaactgatggtggtgtatctagaccgatggcttaatgattagagtacataaacaactaacggtgcatggcccatgacttacttatcttaatggagtcatcgattatg

SEQ ID NO: 334783 - DNA, 258 bp, Zea mays
attccagttcgaggccacgcgtacgcgcaggcggacgcttctgccgtacttgcggatgtcccttcatcacccggcatgctaccgcccgtaccagagatacatgtgtactgatcatggttaagcacgtactccgatccattcccatcccatgaagccatgataatgatgatatgatccatggaccatgcatggtgctctggtcgatgccgtacgtgtgtccctgatacaatactattgtagtactgatgacccataaaa

SEQ ID NO: 334784 - DNA, 259 bp, Zea mays
taccgatccttaattccgagggtcgacctacgcgtacgatcacggataggctcctcatctggtgatacttcatgattgcagacgtgcgctccaggatgggcgcggagctcatcacgagatacgcgtaggagctccccatgacggacaacgtgatgcacattgtatgcatagagtgtacgatccagtgctatatcacctttgagcactgctacacgtaccacgactacttcgtgtatacgtacattaattcgacgacggg

SEQ ID NO: 334785 - DNA, 206 bp, Zea mays
gcacgtaccggtactaattcggggacgacgtacgccaacattacgcgaagctcacatgtggggtcgcttcaagatggaggatgagcaccacaggaagggcgatgagcgcctcatgatcgtggtgggggagctccacaagaaggtctccgtggagcatattgatggcatctcgtagaagatcaagggcacgatcaccggtgagcact

SEQ ID NO: 334786 - DNA, 309 bp, Zea mays
atccaaagtataaagttctggggagttcatattcatggattgcaagaaaagttctcactgacagttcgctaaagcttcgatcaactttgcagactcttctttataaggatggcactttccaaattgatcgcctggaatctttggtaactgagtcacttcgtgcaagaacagaagcattcattgggcagaaatgaacaagatgtcgacagtaccaaatgtgcctgatacgaacgcctattgatggagatcatgtatcagtaaatgaaaatgcaagaagatatcttcaggagattgctaagggaatagatg

SEQ ID NO: 334787 - DNA, 459 bp, Zea mays
  unsure (1)..(459): unsure at all n locations
caaccaagtagctctggcaaacctttctccctactctcagcaacaacaatttcttccattcaaccaactgtctacactgaaccctgctgcttatttgcagcaacaactattaccattcagccagctagctactgcctactctcagcaacaacaacttcttccatttaaccaattggccgcactgaaccccgctgcttatttgcagcagcaaatactactaccatttagccagctagctgcagcaaaccgtgcttccttcttgacacagcaacagttgctgcctttctaccagcagtttgcggctaaccccgcaaccctcttacaactacaacaattgttgccctttgtccaacttgctttgacagacccagcggcctnctaccaacaacacatcattggtggtgccctcttttagattgcttattagttgtaattcaataataaagttttttggatgat

SEQ ID NO: 334788 - DNA, 388 bp, Zea mays
gcctgcacgtaccgattcggaattcgacggacgacgtacgcgtccgcggcatatagcgtggtgcctccaggaactcttggctgagcagcatcgagatgctgggggcgcccaacagtttactgtggggcgcactgaagatgcgcatgcacacccataggaagctacactgatcgcaactggcgcatggtaccaacatcggctgcatctatataaccagtaggtctctcagatccacaactgactattatcgtgggtcaatatgcgtaagagttgatcatatagcttaacatgcgcttgacatctgcctgtaaaacttcctgtttataatcaatgtactagggtttgtgtagtataatacttcataacacaaaaatttcaacatatgtag

SEQ ID NO: 334789 - DNA, 375 bp, Zea mays
cggacgcgtgggttttgggggtttcctgccaaggaactctttcttttatataatctcaaaaaagttgtttttttttggtatgggctgggttctatcaagggtttgttaaggctattagtttaccatgtagcagaaaaactattgggacgtgaagttttttcacgtacattgtaatactttggtatttttgtctaccagatgaaactggaagtccagagcaaaaacttttttaaaaaaaaaaaaattaaaaaaaaaaaaaaaaaataataaatataaaattaattatatattataaaaaattaatttgtaatatatataaaaatatttataactacttataattttattaatttataaaaaaagggggggcctttt

SEQ ID NO: 334790 - DNA, 101 bp, Zea mays
aaaaaaaaaaaaaaaaaaaaaaaaaaaaaaataaaaataaaaaaaaaaaaaaaaaaaaaaaaaaaaaaaaaaaaaaaaaaaaaaaaaaaaaaaaaaaaaaa

SEQ ID NO: 334791 - DNA, 103 bp, Zea mays
tctataggatccaagcttacataggcctgcatgcgacgtgatatcttatctatagggctacctagatacacttaactggcgcgcggtcctacaacagtcaaga

SEQ ID NO: 334792 - DNA, 140 bp, Zea mays
tccggaattcccgggacgactgccacttaccgtctctctattccgcaatacattgtgccagttacaccgtcgtagcacatgtctacatggtcggggcaaatgacttgggtcccagattgcactatgattcacattcacta

SEQ ID NO: 334793 - DNA, 301 bp, Zea mays
gtccaagttccactagaacgtggtgcatcagcatacctgctgctgccgccgccgccgccagttgtttgctgtggaaagctagatgcatgcgtgttgtaaaggaacctgaagcgttgcatcggtcatgattcatgcatggccagcctgctgcctgtaacaacaaactagtattgatcttattgagaccggaaactgtaaaaaaaaaaaaaaaaaaaaaaaaaaaaaaaaaaaaaaaaaaaaaaaaaaaaaaaaaaaaaaaaataaaaaaaaaaaaaaaaaaaaataaattaaaagaataata

SEQ ID NO: 334794 - DNA, 293 bp, Zea mays
cgaccgactcgtccgctagatcacattctctgtggcacctttcttttccaaccctcatgtgcatgtttcgcgttcggtttcattgaccagggtgactcttttctccatcttccacgtttctcaatcgaaatcgatcacttctacaatatatttctcttatatgtacattctaaagcaagcttatctatatatcatcataacacagttatcacgacctgttccattaccaatctcctgttaacccttccaataatcctttatctagctaatgatctatctattttactatcttc

SEQ ID NO: 334795 - DNA, 452 bp, Zea mays
cccacgcgtccgtgattcttgaagagatcgagcttcttttgcaccacaaggtcgaggatgtcttgcaactgcggatcaagctgcggctgcggctcaagctgcaagtgcggcaagaagtaccctgacctggaggagacgagcaccgccgcgcaggccaccgtcgtcctcggcgtggccccggagaagaaggccgcgcccgagttcgtcgaggccgcggcggagtccggcgaggccgcccacggctgcagctgcggtggcaactgcaagtgcgacccctgcaactgctgatcacatcgatcgacgaccatggatatgattattatctatctagcttgtggtggtggttgaacaataataagcgaggccgagctggctgccatacataggtattgtgtggtgtgtgtgagagagagagaaacagagttcttcagtttgctatctctctctgcatg

SEQ ID NO: 334796 - DNA, 407 bp, Zea mays
ggaacagatttagagggtggaacagatttagagggtgtttgatttttatggactaattcatagtttgtctattatattctattgtacactctaagttgacaaatacggaaactaaaatatagattttaggttctgtatttggtaatttagtattcagtaatttagagactaaaatgaaataacatgaagaagctaagcattagtacttagaatccatacactgccttaaagtacgtgctggaactgtgaatggttcgtatactaaagcctggattagcccttttatgagattctgcgtttgcatggcaattgcgaggactgacaattgtatcataaagcacgaaatcttggttgtacgattgagctatgctgcatgcgatacttgtggcgcttgtttagcgaccgca

SEQ ID NO: 334797 - DNA, 318 bp, Zea mays
cggacgcgtgggcggacgcgtgggaaaaaaaaaaaaattaaaaaaaaaaaaaaaaaaaaaaaaaaaaagggaaaaaatgggcggccgttgggaaagaatacaaacttacatacgcatacatacaacataataaaatcttatatagagtaacctaaaattaaattggggggccccctttttaaaaatccaagttttcgtacacctctttccaaacccaaattttttttttttgggcccctaaatttatttcactgcccgcgtttttaaaaagagggacttggaaaaaccctttcttaaccaaatttaatcctttttgga

SEQ ID NO: 334798 - DNA, 353 bp, Zea mays
cgatccaattgtcacttgctctccctccaacaagctaattaaggccggtcgtcatccctcttctagctcgttttattatccatggcggaggagaagcaccaccaccaccacctgttccaccataagaaggacgaggagcaggaggagcagctcgccggcggcgggtacggcgagtccgccgagtacacggaggccacggtgacggaggtggtgtccacgggcgagaacgagtacgacgagtacaaggaggagaagcagcataagcacaagcagcacctcggcgaggccggcgccatcgacgccggcgccttcgcactctacgagaagcacgaggcgaagaaggacccggagca

SEQ ID NO: 334799 - DNA, 192 bp, Zea mays
aaaaaaaaaaaaaaaaaaaaaaaaaaacaaattaaaaaataaaataaaaaaaaaaaaaaaagagaaaaagaaaaaaaagaaaaaagaaaaaaaaaaaaaaaaaaaaagggggcggccgttttaaaggatccaaatttacgtacccgtgcatgcaacgtaaaagcttttttataggggcacctaaattaaatt

SEQ ID NO: 334800 - DNA, 159 bp, Zea mays
  unsure (1)..(159): unsure at all n locations
ccgccttccccccttttttttccccccattacccctcctcccttttccccccnnttnnntcccaaaaaaaatcaaaaaaaaaccaaacaaancaaaactcttaaaaaacaaaaaaaaaaacacccaaaaaaaaaaaacccccaaatttaaaaaaaccaa

SEQ ID NO: 334801 - DNA, 304 bp, Zea mays
  unsure (1)..(304): unsure at all n locations
gcctgcacgtaccgtctcggattctccggntcgacccacgcgttcgcggacgcgtgggaaaaaaaaaaattaaaattttttaaaaaaaaaaaaaaaaaaaaaaaaaagggaaaaaaaaaaaagggtaaaggggtaataaaaaaaaaataaaaaatttgtattatttattattaaaatataatttttttattttatttatttttattttttttttttttttttttttggggggggcctttttaagggttcaaatttttttttccgttttttgcgagttatttcttttttttttggggcccaaaat

SEQ ID NO: 334802 - DNA, 86 bp, Zea mays
aaaaaaaaaaaaaaaaaaaaaaaaaaaaaaataaaaaaaaaaaaaaaaaaaaaaaaaaaaaaaaaaaaaaaaaaaaaaaaaaaaaa

SEQ ID NO: 334803 - DNA, 380 bp, Zea mays
  unsure (1)..(380): unsure at all n locations
cccacgcgtccgccagcctcaagttccactagaacgtggtgcatcagcatacctgctgctgccgccgccgccgccagttgtttgctgtggaaagctagatgcatgcgtgttgtaaaggaacttgaagcgttgcatcggtcatgattcatgcatggccagcctgctgcctgtaacaacaaactagtattgatcttattgagaccggaaactgtattgcacatggtaaatcaatgtacanaaaaaaaaaaaaaaaaaaaaaaaaaaaaaaaaaaaaaaaaaaaaaaaaaaaaaaaaaaaaaaaaaaaaaaaaaaaaaaaaaaaaaaaaaaaaaaaaaaaaaaaataaaaaaaaaaaaaaaaaggggggccgttttaaaggat

SEQ ID NO: 334804 - DNA, 189 bp, Zea mays
caacaattgctgccattcaaccaacttgctttgacaaacctagcagtgttctaccaacaacccatcattggtggtgccctcttttagatttcttatgagttatagttcaataataaagctttttgtctgatgtttgtggcttcccagaaataagaaagtacatttctaaaaaaaaaaaaaaaaaggacg

SEQ ID NO: 334805 - DNA, 394 bp, Zea mays
cccacgcgtccgccaacgcgtccgccaacgcgtccgccaacgcgtccgcccacgcgtccgttgattcgtggaggggtagatcgagaaacagtgagaacttttcagcacacaggtcaaggaggaagcgaagtcggagcaaggagtctggttagttgtaaatagttagcctctttttggagcacatgaattcgtaggaatcgtgcagaaatttacaggaatcgtttaacttcgcacgaaaaattcccgcactccgaacatgcggagtggcttctgatatctactgatgcttcaccgttcgctacagttctgtactgacactgcgtagtgcggtcatagcatgtcaattcgacccgtctcagcgtctgctatgtaatacaggatatttccgtgctat

SEQ ID NO: 334806 - DNA, 439 bp, Zea mays
gcctgcagtaccggtccgaattcccggggccggttcgaggagatcacgttccaggccgacgaagagcaggtgcggttccagggctctgggtgcagctccgacgacggaggcgggcaggctgagcagtgcgccggggacggaggcagtactgtaactgaacgttcagaccagccatgacctggttcctcgcaggagcaactcctgttttaaaaatctgaaaatgtcaccagtgcagccgcacagctgcttgtaagtgaacttttttgtggctctggttgagcatacgatcgttaagacggatatagtttgaagtttcaacaggcaagtgctttccctgatctttggtggtggttttttttccactctaaaactggtttgtagaactcacacagaatgacagaatagtgtattataaatagataaccaaagacagttggat

SEQ ID NO: 334807 - DNA, 357 bp, Zea mays
gcaaccggtccagcactttcacgctcagctccagcaatggctgcctccaccatggcgatctcctccacggcgatggccggcacccccatcaaggtgggctccttcggcgagggccgcatcaccatgcgcaagaccgtgggcaagcccaaggtggcggcgtccggcagcccctggtacggccccgaccgcgtcaagtacctcggccccttctccggcgagcccccgagctacctcaccggcgagttccccggcgactacggctgggacaccgccgggctgtccgccgaccccgagaccttcgccaagaaccgcgagctggaggtgatccactcccgctgggccatgctcggcgcgctc

SEQ ID NO: 334808 - DNA, 452 bp, Zea mays
ccggtccggaattgccggatcgacccacgcgttcggcggagcaggtaaacccaaccgtaatccaccttttcagaaatgaaattgggcggtggagggcggctccatgttctactactctgcaccccaaactcgaatccacctgcaacggagacattatatggctgtttgttggacctttcatctgggagtggagctcctattctggatgcacaacaggtgtttgagtggttgcttcaaccccacacagataaaggtaaaaaggtcggtcttcctcttcaatctcctccaaagagggttaaacaaggatcactacacatcaacgattctaccagctaaaaggatttgcttaatgcagaatgcctcaccttatgttatcgatcctaccttaacccttcagtcatgcctgttacatacaactcgtgtgctgatgcttatgttaacctcagatgacg

SEQ ID NO: 334809 - DNA, 257 bp, Zea mays
  unsure (1)..(257): unsure at all n locations
ggggagtctaacaactgcacttgctgccattgtcggggagtgcgtgtgtgtagtgcancagctattaacaccacagtttgagtgtgctagcggcgtgtgtttttatttaggcgacattgtcgattaaattcttgtgtcgggattattacctttaccttacgtgctggtttagtttggcaccctgtatctgtatctgtattggatcacgcccacccttggcttaaatcagcattagaaaattctccatgtttgctgtt

SEQ ID NO: 334810 - DNA, 285 bp, Zea mays
  unsure (1)..(285): unsure at all n locations
gtaccgtccgaattcccggtcgactcacgcgtccgccantnnngaaacantngnnatcactctcttcatctttacaccagcaacgttcaaaaacacgctattcgtgcctattacctaaacaccatttcgggaccattctatgcacaaatggaacatcacgatgcttcaaaatctacaactatgcaggcagaaacacttgtaatcactctcttcatctttacaccagcaacgttcnnnanaaaaaaaaanaannnaananaaaanaaaaaannnnnaannnnnnna

SEQ ID NO: 334811 - DNA, 326 bp, Zea mays
atcgcacaagtaaacccaacctttatgcattttcttaaaaatgaaaatatccggtggaaggcggatccatgatggactactcggcaccccaaactcatatacacctgctacggagacataatacggctgatcgttggaccatttatgtgggagtggagcttctattctggatgcacaacacgagtttgagtggttgctacaaccccacacagataaaggtaaaaaggtacgacttcctcttcaatctcctccaaagagggttaaacaaggatcactacacatcaacgattctaccagctaaaaggatgtcgcttaatcgcacaatg

SEQ ID NO: 334812 - DNA, 57 bp, Zea mays
tcgcctgcacgtgccggtccggaattaccgcatcgacccacgcgtacgcccactcgt

SEQ ID NO: 334813 - DNA, 188 bp, Zea mays
ctgtcgcgtgagcactcacgtgcagggggatagtgtaatacactattctacttactgatctgcacatgctaacgactggggagtgaaagtcatatgtgaaacaaatcgggatgacgcgatggataaatagaaatattttgcattgaaacatgatgatttttgagatcagctctatgattgaatatctc

SEQ ID NO: 334814 - DNA, 244 bp, Zea mays
gtaggacacagcacaacacacctggaatgaacaagcagccaacaccggagctgacaatcacgctcatgggaaagctctcacccgttaaccttgctacacttgcgcacacacacattgggtatatgcaaacgtaacattacacaggagcagccgcggctgcgtcctgcagcgtgtgcttcaaggactacctcccggtgataagggagccgatagataatgactggctgatgcggaacatgacaag

SEQ ID NO: 334815 - DNA, 153 bp, Zea mays
gccgctcgccggactgacaccagagacagactacgttgtgttcctggaggacagcaccacgccggggggggcctaccgaggcgtgagctaccccaaccacgagaccgccgcagcctggggcggaccgaccgtcattcgccacgccgtgtgcct

SEQ ID NO: 334816 - DNA, 317 bp, Zea mays
gccgctggccgcgctgacgccggcgacggtctacgcggcgttcctggtgtacggcaccgcgccggagggggcctaccgcggcctgagctacccggaccaggagacggccgtggccgtgggcgggcgggtcgtcgcgcgccacgccgtgtgcctccgccccgacgacgccgaggcgcgcaagttcaggggccgcggcgccggggaggaggcgaggaggccgagcctgcgggctgacgggtgggaggagatggagatgggacgcctggcgcacgccgccgtggaaagcggcggcggggggggcgacgtctgcgtggtgc

SEQ ID NO: 334817 - DNA, 292 bp, Zea mays
cactgatccagtgccgcgtctacctgtccaagccggggcggcggtcgtgatcgatgatggctcgtggctgtgagagaccgaagagagaagaagatgatgggagggggaatagtgcccattttgggtcggccgtcgaggtctcccgccggcagtcggccggggcagtggccattatgatgatgatgacggcggggtggctgctatgtatgtaaatctatccagacatgtagggatgttctaatccgtaatataaatggtattttcagttccaaaaaacatggaaagcacaaag

SEQ ID NO: 334818 - DNA, 376 bp, Zea mays
cggacgcgtgggcggacgcgtgggcggacgcgtggggtgaggttctccggggttcggtttcgtgggtgagcggatcgagatggcggcgtcggatgttgagtaccgctgcttcgtcggcggcctcgcctgggccacggacgaccactccctccacaacgccttcagcacctacggcgaggtcctcgagtccaagatcatcctcgatcgggagacgcagaggtcccgcggcttcggcttcgtcaccttctccacggaggaggcgatgcggaacgccatcgagggcatgaacggcaaggagctggacggccgcaacatcaccgtcaacgaggcccagtcccgcggcggccgtggaagcggccgccgtgggtacggtggt

SEQ ID NO: 334819 - DNA, 311 bp, Zea mays
cgacccacgcgttcggtcaacctggtggcctgcgagggctttgagcgtctggagcgagacgaggtgctggggaagtggtaggcgctcctgaggatgcccgtgttcatagccgttccttctcagtatacttgttaatttcactattaatactctgctgcagagctactcggtctactacaagcttgactaaagggaatgcgtgctatacctccattggaagaacatgccccgtattgttttatcggtatgtgctttatgttgacttcgagagaatgatcgtctcttgcaaaatgattcttgtgactttctac

SEQ ID NO: 334820 - DNA, 64 bp, Zea mays
cccacgcgtacgcggacgcgtgagcgaaacaacaagtttttttgggtttccctttccttttccc

SEQ ID NO: 334821 - DNA, 217 bp, Zea mays
atggctaatccagcaaggcttaccaagtgcgccttgggtatatggttccttaaggatatcgagggggggccattctagaggatgcagtcttacacccgcgctcatgcgacggcctagcctgggtaaacagccacctaaatgcaatagaatgcccgtcgcttctaaacggagatactggaaaaaacgtgatgatacgacacacttagaccgcatgcat

SEQ ID NO: 334822 - DNA, 320 bp, Zea mays
cccacgcgtccgcacagcaatccaccaagcacttcgacgtcacacgggcgctgcgcacagacacaccaagcgtcggcaccaatggcttactaccaggaggtggactactgctcggaggaggtgaggtcggtggccccggccggcttctgccgccacggcggcggcgtccagcagcacgtcgtcaaggagaagttcgaggaggtcgacacggtctcacgcgccggcgccaaccaccaccaccaccatggtcaccacggcggccacggcttcgtggtgcgcgagaccagggtcgaagaggacatcaacacctgcaccggcga

SEQ ID NO: 334823 - DNA, 273 bp, Zea mays
tctgcctggacgacctgcgcgcgatggacagtctctacaagcagattaaggtcaagtcgtcgcgcaagggctacattgtgctctaacggatgatgattgccaacacgcaccactgcttcgcatcctgcgccggcctgtgcctcggcgacgtcaacggtttcaagacgtacgcgattcagaacgggtaccagtatgcaggctcgcggttaggccacagagcactgcaactgcaactggaggaaggcgcttttgttactgcctagggtcactgaa

SEQ ID NO: 334824 - DNA, 190 bp, Zea mays
ttctcacataacaaaaatgtaattttatggcttaagcaaatttacccgcccgggtactgctttattattataaagatatatactataacgagcctactacctacctaccgatatgcacgccggcaatgttaataattcgaactactattttttttctggctcttcctacttattccgcgatcaacaaatg

SEQ ID NO: 334825 - DNA, 353 bp, Zea mays
aataagacgacttgtttcattgattcttgaagagatcgagcttcttttgcaccacaaggtcgaggatgtcttgcaactgcggatcaagctgcggctgcggctcaagctgcaagtgcggcaagaagtaccctgacctggaggagacgagcaccgccgcgcaggccaccgtcgtcctcggcgtggccccggagaagaaggccgcgcccgagttcgtcgaggccgcggcggagtccggcgaggcccgccacggctgcagctgcggtggcaactgcaagtgcgacccctgcaactgctgatcacatcgatcgacgaccatggatatgaataataaccaactaacctgggggggtggg

SEQ ID NO: 334826 - DNA, 263 bp, Zea mays
gaaacccacagcagccgctgctagccgtacgatggcatacaccggtgacgtcgccgccgttgctgctgccgcggctgccgccgccgccgaggcttcggcgcgaccggcgggcagcagcagcacccaaccgctggcggggcgcgtggcgatcgtgacgggcgcgtcgcggggcatcggccgcgccatcgccacgcacctgtcctccctcggcgcgagcctggtgctgggctacgcggcgcgcgccgacgaggcgggcgcgctgg

SEQ ID NO: 334827 - DNA, 193 bp, Zea mays
cacccgttcgataaatgcccatcccattttgcacccggattttttatttattgtactactgaacattactggggtggtttcgctgcaaaagagtgttatatataaatagcaagaatgatattattatcatcatcttactcctcattctttttgtactaacagctgtcttttttatcccaatatcacaaaataa

SEQ ID NO: 334828 - DNA, 243 bp, Zea mays
ggaactacctgctatcgatcgccctctcgctgacgacactcatggacgacaacgcgatcggcaccaactgccggtgtatcccgctgcccttcatatatacccagctccagcgccagcaccgtgccactcttcatacccaacgtcgcctccaagcgtcacgaagacgacacggagaccgttaaaggttgcggctcgaaacctcggggcgagcccactaacctggcgacggatggcatcttcatc

SEQ ID NO: 334829 - DNA, 344 bp, Zea mays
gattgtttcacttcagcttccgggagctgataatatcgggaggttagtacttcgtagtgtctcttagtcatctgtatgtattccatcttttataatttattattcaattgggtgttttagtgtggctgtggaaaaggtgtattggtctgaatgagggcttgtatttgtttcccatgaattgtttgtttctggaaaggaaactcccatagtttccaaacaacatcattttttttcttgaagtttttcacttgatacctgatgaaatccgaagaaaatgcaaagcaacgagaagcattgtctttgcagaactgtaaaaaaaaaactaaaaaaaaaaaggggcggcc

SEQ ID NO: 334830 - DNA, 262 bp, Zea mays
ggacctacctgctatcgatcgccctctcgccgacgacactcgatgacgacgacgcgaacggcagcaactgccggtctatcgggctgggcttctcatatacccagatccagcaccagcaccgtgccatctacatacccatcgtcgactacaaccgtcacgaagacgaccaggagaccgttgaaggttcccgctcaaaacctcggggcgagcccactagccaggcgcccgatgacatcttcatgtcggcgctcttcaaggacgc

SEQ ID NO: 334831 - DNA, 355 bp, Zea mays
cggtccagcactttcacgctcagctccagcaatggctgcctccaccatggcgatctcctccacggcgatggccggcacccccatcaaggtgggctccttcggcgagggccgcatcaccatgcgcaagaccgtgggcaagcccaaggtggcggcgtccggcagcccctggtacggccccgaccgcgtcaagtacctcggccccttctccggcgagcccccgagctacctcaccggcgagttccccggcgactacggctgggacaccgccgggctgtccgccgaccccgagaccttcgccaagaaccgcgagctggaggtgatccactcccgctgggccatgctcggcgcgctcggc

SEQ ID NO: 334832 - DNA, 292 bp, Zea mays
cccacgcgtccgcagagttcgttcggcgctcgccggggtgactgacgtttctgtctccctgccgtatagtaattgctgcgctagcacgtctcgacagacagacagatagatagataaacatgcgccatcgtctatagcggaaagatgcaataatgtgtatgcatgtattcgcgcggatcgatcgtttccctctgaactaagattcttgctcttttcggcttacaaaacaaaaagccgctgatggagacaatggaagagcaacgagacaatgacaagggactacaacatgacc

SEQ ID NO: 334833 - DNA, 257 bp, Zea mays
ccgggtcgagccacgcgttcggccacgcgttcgcattttgccacaatgctcacaagctcctatagctttccttttttccccgggcctctgaccagcagtgtcttggggttgtgaaaacccaattctttaaccctataggatccaacaggcaatcgcaagtggcatcttacctttatcaacctgtgttgcttcaacaatcatgaggcctattacaagaggtacctttgggggctttattggcacaaaacataagggac

SEQ ID NO: 334834 - DNA, 201 bp, Zea mays
cggacgcgtgggcggacgcgtgggggagagacgccgcacgacgactgaggccccctgaccgccgccggccggtggcggaggcggatgatggtgtatatgcatgcatgtgcgctttgcttcagaaacgtacggggctgcctggcctaggcctagctgattttggtctcaaaaaaaaaaaagttacgttcatttgctcctttt

SEQ ID NO: 334835 - DNA, 168 bp, Zea mays
tacgcctgcagtaccgttccgaatttgccggatcgacccactcgtccgcccactcgtgcgagctcttcatctgtatcaacgaggaccatcgtagccatttgcgattcaggtgacaacaagataacgatttgaatgcgaatatcatctaccgctactggtaactgctct

SEQ ID NO: 334836 - DNA, 109 bp, Zea mays
acgcctgcacgtacacggtccggaatctgccgtggtcgacccaagcgtaccggtcacgcgtcgcggcatcgtaaatgccctattcgagatgcatttgtagccatcatgg

SEQ ID NO: 334837 - DNA, 65 bp, Zea mays
actgacgcaccattccgggattgacgcacgcatccacgcgaccgacgaggcggagcgcgctcagg

SEQ ID NO: 334838 - DNA, 212 bp, Zea mays
ggccgaccatatatggcgactcgccatcctcaccgaaccctagccgtacacgcgacttaaatcaggtcatcgaccatcggttagacaccgtcgattacatgaaccactagaacagatcgggtacattgatcacacctcgtcgtccgagagacggaagccaggacctttggcaaaatggagcaggaactcaaggacaaggcaaaccgaatctg

SEQ ID NO: 334839 - DNA, 338 bp, Zea mays
gcgagagcgagagcgacagctagagcgagagcgactagagcgactgcgaggaggcgttcctgccgcacggcggccggacgcctcaaggacgcgtgcagcacagctaccgataccgcggccgcgcgtacaagcacgaggctgacaacctacacggcttgcgccgttaccagtcctactacagccgcgaggatctcggcgggcgactccgttacgagacctaccagagcaccatccagtacaccggctccgcgaccaagaaccggcacgtgctacgctacctcgcgtaggcatatatacgctctcatccaggtgcattgcagcacgtgcacctacgcata

SEQ ID NO: 334840 - DNA, 349 bp, Zea mays
gccacacctacagcgacacctagagctagagctactagagcgactgttaggaggcgttcctgcggcacgggtgccggacgccgtagggcggcgtgcagcacagctacggctacttcggctgagcgtacaagcacggggcttgcaacctcagctgcttgcgccgctaccagtcgtacaagagccgctaggatctcggcggctgacgccatgttcgagacctaccaaagcatcgtccattacaccgcctgctcgaccaataaccgtcacgtcctacgctaccgcgcgattgcatatatacgctctgatgcaagtgcattgcagaacgtgcacctacgtatataggtattcc

SEQ ID NO: 334841 - DNA, 170 bp, Zea mays
cggacgcgtgggaaaaaaaacaaatcttcagtttagaataaaagtagctataacacaagcaccagcatgaagcaaacatggaaagaaggatccagtactgcaaggttgaaaagagaaagttagatcgtaacaagaaaaaaaaagggggggccatttaaagggttccaatt

SEQ ID NO: 334842 - DNA, 357 bp, Zea mays
gtgacaggtcgagctacacggggccatactgcaacgacagcaactgagacccggcctgactcccgccgagcgcgcacgagcaggcgcggggccctgcctgcagagatctgctgcatagcatgggaccccgagggcatgctgggcgcgccgcagggcgggcacatagcgcgcctcgcgttacgccgccagcctcgagagggactccgaggcgcgcgaggccttcgagcgccaggtgcgcgaggagaaggagcggcgccgcagcgagcgcgaggcgcggacgatcccggacacggacgccggcctcgtcgagttcttactcgacaccgacgcgcgcgagatcgagatcgagatcggcag

SEQ ID NO: 334843 - DNA, 224 bp, Zea mays
acacggtccggaactgaagtttcgactcaagcgacgcgtccgaccacgcgtacggaagaaggcgaaagtgtatgtttcaaatcaggaagaccactacaggtgggggatagaaggatacgaaagaaggcgaaaacaaagggtgggtggctctagtaggatccaaggttccgtacccgtacttgcgacgctacacctgtactatagcgacacgtaaattgaatgaa

SEQ ID NO: 334844 - DNA, 343 bp, Zea mays
ctgacgcgtcgaccgtgtgacacagctagtggcttgcgagcgatcgggtttggacttgggtggcattatggaagcctacttcttgggggacagcgtagagggcgtacgagttctcgtacgcggcgtaggaggacgacattggctcgccttgggattccgaaccgtgatactcgtacacgagcagggagtacgtgggctcctgaggcatagttcgacaactactacagctactacggcttcagctcctgctcggaccgcttccagaacttcgtactcatgaccgagttcccttattttcagcggggcctgtccaggttgttccacgtgcagttgcagatcttcg

SEQ ID NO: 334845 - DNA, 176 bp, Zea mays
aaaaaaatattaaaaataaaaaattttaaaagattataataaaaaatttaaataaataataaatggaaaaaaaaataaaatatattgaaaaaaaaattaaacataatataacacacataaaaaaaaaaaggggcggccgttttaaaggatccaagtttacgtccccgtgcttgcaa

SEQ ID NO: 334846 - DNA, 215 bp, Zea mays
cccacgcgtccggctggcttctcctccccctcttaccaagtcctcctcgggttagggttccttagggttttgtggaggggcgatggcggcggctgatgtggagtaccgttgcttcgtcggcgggcttgcctgggccaccagcaacgagtcgctggagaatgccttcgcctcctacggcgagatcctcgactccaaggtcattaccgaccgggaga

SEQ ID NO: 334847 - DNA, 334 bp, Zea mays
ctcacgcgtgcgccgagtcacaccgttagtacgattgctttgtgatcggccatgcaatcaatcgagcatcatgagttgcagactcattgtgtcacaagcttgatgtcgcacaagttctggtgctcagatcaagaggaggacatagtgttgcccgtttactgggaaatgctctacacgttgacgtccagggagttcgtttgctggccgaccgagcttgacgactactccaagtactccgtatccagctccggcttggaccgcttcgaaaagtccggtctcatgacgcagctgcctatgttcaagcggtgtctgagcatgatgttcgacagcaagt

SEQ ID NO: 334848 - DNA, 255 bp, Zea mays
ttcacgcgtccgctgagatgcacacagacgcttctgcgatgtgcgggcactgcacacaatcatgggtagcgtcgtcacgaaaggcttattaccactagttggtctactgctcgttggatttaacgtcatgggcccgtgcagcgttctgccgccaatgaagcagcctccagtactgcttgaacaaccacatcttttaggacgtttactcgatgtaactcacctggcgcaagcaccttcacgcactaccatggtcac

SEQ ID NO: 334849 - DNA, 252 bp, Zea mays
cggaatcgaccgcacgcgatcccacgcatgcgtccgcgcgccgtaccacgacggcgtctgcacggagctggcgcacgcctgaggacgctgatgcatccattgctgcccagcacgctatgtgcgtatgagtagcacatgggctacatctacgtcgtacagccctggcagctggacaagctaactcgcgagattacagaataccagtagacaagcaaagtgaacagcgtgaatataatatgcatgccttgggtt

SEQ ID NO: 334850 - DNA, 229 bp, Zea mays
ggagcgcggcgcgccacatgcgtgcaagcgcaaccaatcgcctcgccgtgcgctcggctttgcattcctcgataacgtgagtaacctgggtggctgatcaaggctttgacggcggcaacaaccttcttccctaggcgcctcactgcgtacatccgcacagcgcccactcgtacataacccaccaccgcgtacagcgcgtctctctacacgcccgccgtgagctacccca

SEQ ID NO: 334851 - DNA, 330 bp, Zea mays
ggttggcttctcctccccctccggttcgggttcgggttcgtgaggttctccggggttcgggttcgtgggtgagcggatcgagatggcggcgtcggatgttgagtaccgctgcttcgtcggcggcctcgcctgggccacggacgaccactccctccacaacgccttcagcacctacggcgaggtcctcgagtccaagatcatcctcgatcgggagacgcagaggtcccgcggcttcggcttcgtcaccttctccacggaggaggcgatgcggaacgccatcgagggcatgaacggcaaggagctggacggccgcaacatcaccgtcaacga

SEQ ID NO: 334852 - DNA, 218 bp, Zea mays
aacacgcgtcctagacgaagcccgtcgagcacacagtcacgtgtaaagcatgcaaccactcatggcttggagctctaggagcaacgcgagggtacttattgaccttgcggcgctgctggtcagacttagcgcgctgagcagcgccgcgcacgttgatgcaagacgcgcccgtcatggaggctcggccacatccagccacgccggagcttctgaaacct

SEQ ID NO: 334853 - DNA, 357 bp, Zea mays
cggacgcgtgcgcagacatgcacacagacgcttggacgtcgcacgggccctgcacacatgcacacctagcgtcggctccaatggcgcactaccagtaggtggactactgctcgcacgctgtgacgtcgtgggactgggccgccttcggccgccactgatgcagcctccaacactacttgatcacggacaaggtataggacgcagactcgatctgacgcacctggtgcaaccaccaacactactaccatgtgtcaccacagcagcacacctatacgtaggcgctccagatcaaggtcgaagaggacatcaacacctcggccggcaaggtccaggagcgcaaggagagcttgctcgcca

SEQ ID NO: 334854 - DNA, 358 bp, Zea mays
caacgaacgatcacgtgaagttacatgctagaagccaaaggtaacgctacaagaaagtgatcattacagccgtagaaagagaaaatgtgataaagttttttttctctcgaacgtacaagaaaactactgactcattatattaagataggaaaatgtgacaaagttcatgtgctcttcaatctttcagctatgtgcaaacgatgatacagttattaaagttgactataaagtggaaactgccatgagaaaacgtctagctccggatccagatgttttttttttcacgagaagagataaagatgtgtgtgtttttttgctggatttggtttagtgtacaagatggatctaaatggaatca

SEQ ID NO: 334855 - DNA, 114 bp, Zea mays
cagcttgcaaatggagtgctgaactagccgcagcttgtgaaatatggaaggagatcaaatttgatggtttcaaagcgatggataccatataaaataaaaaaaaaagcaaaatag

SEQ ID NO: 334856 - DNA, 342 bp, Zea mays
cggacgcgtgggcggacgcgtgggcaaaatactagtagtgcataatataatatagtaatccggtccataacaacgccggcaggacctgtcttcggtgacaatacagctttcatcataaactaaaaaggtcccggcgcaaaaactatttacaaaaatgcccgtcgtcgacgtcgtctgtcggaggagagcgtctctcagcttagtagtaccgaattttcctcgagcgacggctggagcggcatggcctgcatgggcgcctgcgcgtcgctgctgaaggactcgacggtgctgctggtgctgctccggcaaccggctgcggaaaggggcccgcccaaggggtaa

SEQ ID NO: 334857 - DNA, 147 bp, Zea mays
tgcctatggcatttggaggttcccatgagccagcagcttatggggtgccggtttccatcggaggccttaaccctgagtgtaacaagaagcttcaggctggcatcgattttatcctggagctaaaggtgtctgttaccaaatcacgct

SEQ ID NO: 334858 - DNA, 198 bp, Zea mays
cattgatgcgttttcacggtagtacaaggatggaactggagtccaaccggcagcagagaacacgcacggaatccacaccatgcgtagtctaatccaatcgacgtcggcagattgccagccgtcgtatagcagacagagagagagtgagactgcattgatggatagtaacgaatagagggcgatcacgcaggacgcagc

SEQ ID NO: 334859 - DNA, 344 bp, Zea mays
cggacgcgtgggcagcaatccacacaagcacttcgacgtcgcacgggcgctgcacacagacacaccaagcgtcggcaccaatggcttactaccaggaggtggactactgctcggaggaggtgaggtcggtggccccggccggcttcggccgccacggaggcggcgtccagcagcacgtcgtcaaggagaagttcgaggaggtcgacacggtctcacgcgccggcgccaaccaccaccaccaccaccatggtcaccacggcggccacggcttcgtggtgcgcgagaccagggtcgaagagggcataaacacctgcaccggcgaggtccacgagcgcagggagagc

SEQ ID NO: 334860 - DNA, 248 bp, Zea mays
aaaaaaaaaaaaaaaaaaaaaaaaaaaaaaaaaaaaaaataaaaaaaaaaaaaaaaaaaaaaaaaaaaaaaaaaaaaaaaaaaaaaaaaaaaaaaaataaaaaaaaaaaaaaaaaaaaaaaaaaaattaaaaaaaaaaaaaaaaaaggggggccctttttaagggtccaaattttacttcccggtgtttgcaacttaaaagtttttttaaggggcccccaaaatcaatttaatggcccgctttttaaa

SEQ ID NO: 334861 - DNA, 110 bp, Zea mays
cggacgcgtgggcggacgcgtgggtttttttttttttttttttttttttttttttttttttgttttttttaattttttttttgatttttttatttttatatataatttat

SEQ ID NO: 334862 - DNA, 182 bp, Zea mays
gcctgcacgtaccggacctgaagtttcgagtcagagccacccgtcagccgtacccgtgaccctaagcttcggtaatagatgtctcccgccttccgatgtcctttgcgggtagtcccctctccgctatcgcggatgactgcatatgaccatgcctgatcactctgctcaagaccgttctcaag

SEQ ID NO: 334863 - DNA, 138 bp, Zea mays
accgtcttgaataaccgggccgacccacgcgttcgaaggagcttacgctcatgcagaccctcggtttggtcttccacataggcttctaatccttgggactgtacgagaagcactaggggtacaatgaccctgtgcacg

SEQ ID NO: 334864 - DNA, 324 bp, Zea mays
cggtccggaattcccggtccgacgcacgcgtcacgcgtgctcgtacgctagagcaggaacttgcttactggtggcacagctgccgcgatgtcctgcaaggtgacgagcaaggtcaggacataggggaggttcttgcacgcattcggactcactatctcatgggggagcgtacttgtagttgtcgtcgaatctatctaagccctgctccatgacgtacagatggagcgtttcggagtcgcaagtaacagcattttactcgggttcatggagacgcttatgacgagtacacgagactgtgggccctgtccatccactcggctgcta

SEQ ID NO: 334865 - DNA, 335 bp, Zea mays
gagaggtgagagcaggaaaatgcaggctggcggtactgccggctgcttctccggcgatctgtccggcacggtcatgcctgagagcaggtgcttgcatgcggtccgagtcctcggcacaaggtggagcgtccttgtagctgacgtcgaacctaccgaagtcgctcacaatgactacagctcaagcatctgggtgtcgcccgtggatgacctgtaccggcttggtggcgatgcgcgcgaactgcccatgatctcaggggccatacgagtctactcagttgatgcagcgagcaagagtgtggtcggggtggacagggactacctgtcctacggcgagc

SEQ ID NO: 334866 - DNA, 285 bp, Zea mays
cggaattcccgggccgacccacgcgtacgcgtacgcgtggtagctgtcaagacattggttaagccacgccgacccaagcagcggctcctcgatcggacgtcaacagaaggctgagaaggtgtctccactatcgaggacgcacccttatgctccgatgattcagtggcagacactctagttcaccgtgaattaaacgtcttacagaggctataccctacatgagcagcatgcggcagaccttcgaaataggccaacttcacccattggcatctatgcggaccaccg

SEQ ID NO: 334867 - DNA, 117 bp, Zea mays
ggtagatcaaatcaaggaatatttcatatgcctttttggcaactgtttcagttgggtgaatgcctggttaagctttcgcttgtgtttcggaaaaaaaaaaaaaaaaaaaaacacaaa

SEQ ID NO: 334868 - DNA, 435 bp, Zea mays
tcgcctgccgtaccggtctcggaattcccgggccgacccacgcgttcggctttggccgctcatggggttcattatctgtaccggccgtgccctacccttcatgatcttggctacatgatccttacgcagcttgatatagaatggggttacatcagtgagaccttgcttacattcggattcatgatctccgactcgtgcacactacatcctttcattcttataactacacgctaatacactgtactgatctggcgcatacaacttcgctacttatgagcccctgactttacttcaactaatatcactttatgcacatcacgctttcgcacctactcatcattgtaacgagggctcgcctatggctctattacaacaatgcgcaaacgcaattgaggacgttacgctcactgtagcagcaccttaaattcatcgatt

SEQ ID NO: 334869 - DNA, 109 bp, Zea mays
ctcaaccgcgctggaggagcgcgctctttcctgatagaaacttgtaacaagtgggtgagcatgtaactgtgacagcatgttcggtattgtcagggatttagcactggca

SEQ ID NO: 334870 - DNA, 107 bp, Zea mays
gctacggcgagcgctactgcagggcgggcgccttacacgatgcaagcttaggtgcgcgtccatgcgacgtcggagctcttctatcgcgtcacctacatgtactttag

SEQ ID NO: 334871 - DNA, 100 bp, Zea mays
gtcttctctttgtagtccagcagcatctgtaagcctgcttagttatgcctttgtttgttgtaagttgtaacttgacctggaatcaaattcatttaagatc

SEQ ID NO: 334872 - DNA, 347 bp, Zea mays
cggacgcgtgggctgacgcgttggtggataccggcgggttaacgatttgactaaataaaatgctagcttgctggactatgtaccttgtactacgtgcaaagatctgctgcatcggatgggaccccgagggcatcctgggcgcgccgcatggcggacacatcgcgcgcctcgagttccgccgccgcctcgagagggactccgaggcgcgcgaggccttcgagcgccaggtgcgcgaggagaaggagcggcgccgtagcgagcgcgaggcgcgggtgatcccggacacggacgccggcctcgtcgagttcttcctcgacaccgacgcgcgcgagatcgagatcgagatc

SEQ ID NO: 334873 - DNA, 82 bp, Zea mays
aaaaaaaaaaaaaaaaaaaaaaaaaaaaaaaaaaaaaaaaaaaaaaaaaaaaaaaaaaaaaaaaaaaaaaaaaaaaaaaaaa

SEQ ID NO: 334874 - DNA, 395 bp, Zea mays
gtctgcctctcaccaaccgcggcttgccaaccttctaattagcctttgacccacccccccgccggccgccgctgcagaccatggagcacgcgtccgccttcctcgcgcgcgcgctcaccactccgcttccggcatccgccgccctcccgcggcgccgcccggctcgcgtggccgtcgccgccgcggcgccggagcgcaggccgccgggcgcggtggcgtccaccaccaactacgtcgtgccgctcgacgcggcgccgtccgggatcacgcgcccgctcgtcgagatcctccgcgacctcaacaagcgcgtcccggacgccatcgtgcggccctcctcccggcgcgccttcgacttcgaccccgtcatcccctggtaccatgccaataggatgctc

SEQ ID NO: 334875 - DNA, 81 bp, Zea mays
taagaaagtgcatttctagtttcttatttttgggaagccacaaacatcagcaaaaataagaaagtgcatttctagtttctt

SEQ ID NO: 334876 - DNA, 282 bp, Zea mays
agagcgcgtacacggaccctggttccagcgcctattgctgcaacatagagcctacaaggtgggacgctgtatacgatccaagcttacctacacttgcatgcaacgttatagctattctgatagtgtaagacaatattcaagtaacatggatcgcggactaacaacgttcaggactggttaaataccatggcgtcaccgtaacttagatcgcctggcgcatacatacgaactttgagtaacgtggcagtgctagcaccacaggctgcgaacatgatcgacact

SEQ ID NO: 334877 - DNA, 245 bp, Zea mays
cgcatgacgtaccggtccggaattcgagggacgagtcacgcgtgcgggtgcaggttcgttacaaggtaaatgtcaattggacgggcgatgtgcccttggacagccctctgtgtgcatcaggtgcgccggtgcgctggcgactggttctgaacgaagtgaatcagtgcgctctgagactgctgatctggacgtgttaccatacgtgttggatctcgaatgaggaccgcagcatggtttgagctatt

SEQ ID NO: 334878 - DNA, 359 bp, Zea mays
ctgcgacactacttcagacgtaccagtagctccattaaggttcgacatggccacgctcgtcaggcaccttatcctgagctcctactcatcatcgcaatgccgccggcgcacaatgacgctcgacaccatcgtggtagactagaccatgaatcatgtaatgcgcatgccaatcattcgcagagataccatgctctgattgctgtcatcttagagaagttgtcaactgcttatgcgttgttgtcttgtaacgaacaaaacaactttagtgttaggttcatgttgcaattttcaaagctctgatgttggaactgcaaaaaaaaaaaaccaagccgagctggggaaacaattactacgagcgc

SEQ ID NO: 334879 - DNA, 219 bp, Zea mays
ctcggtccggaattcacgggtcgaccgcacgcgtccgctcctctacgtcatcccaccacatttggcttttccaacgaaaatgtcgtgcgccggagcggctgtcctcttctacaggctcgccgtttatgccctcattgcgttcgaggctccggcagtattacctaatgctaggtagtcctgccaaggtaccggccatgttaccgaatgcatgcattcctg

SEQ ID NO: 334880 - DNA, 345 bp, Zea mays
  unsure (1)..(345): unsure at all n locations
ccgacgcgtgggcttgaatacntcgactcggttgatgttgggaccaaaactacagccgcgaaaaatgaggcgttctactagctccacgccgtggctgacctgaagacggaccaggcaccgacggaggcacctgatgcaggcagccctgccaaggcaccggccgagtcaccgaaagcaggcagtcctgcagctactgccaaggcacccgagtctgctgccacgagaactgaccacgctaaggcacctaaagccgccttcactcccgacgatgacgctgccccatcgtcgtcggcgtataggaagtctggtccagctgccgagccgaccaccgacgtctctacaccg

SEQ ID NO: 334881 - DNA, 317 bp, Zea mays
acataagcagaaatacaaacaaagacatttgactttacacgaggcgctgcacacaaacacgccgagcattaagcaccaatggctgactaccagaaggtggactacttgctcggaagaagtgaggtcggttgccccggacgtcttgggccgtcagtgatgcggcgtccagcagcacgtccccaatgagaagttcaaggaggtcgacacggtctcactctccggagccaatcagcactaccactaccatggttaccacggcagacactgcttcgttttgcgctagaccagtgttgaggaagacatcttttcctgcaccg

SEQ ID NO: 334882 - DNA, 259 bp, Zea mays
aaaacgatacgatttataaatttatcgaataatttcaacaccaccaatatcaacaacccaggcgcatctcgctcaaaggataattgtcacacttccgctcgcgctcttactctttgccgggtcagggcatggcctcgtgaatccggatgcagcccgttctcccaagccccccatccacaatgccatatctgacctaacggacacgatcgtgaaagtgctgggattccatgccaaggggctcaaagtgtccagcttctac

SEQ ID NO: 334883 - DNA, 274 bp, Zea mays
cgcttctacatgatcttacatgagctgctttactaacaaatgagagtataaccacaccttatattctaccctatttatgaatttctccatcccaaacctcttccttatatttttaatgcctatattgcatcctatctcttttctattccacaaactatttttatctacaacctgcattacctaatctcacaatccacacatatacatagtcacagttccctgcttcaagctccactgaggcaaacaggatcagagaaatgttccataactcact

SEQ ID NO: 334884 - DNA, 336 bp, Zea mays
aagacgacttgtttcattgattcttgaagagatcgagcttcttttgcaccacaaggtcgaggatgtcttgcaactgcggatcaagctgcggctgcggctcaagctgcaagtgcggcaagaagtaccctgacctggaggagacgagcaccgccgcgcaggccaccgtcgtcctcggcgtggccccggagaagaaggccgcgcccgagttcgtcgaggccgcggcggagtccggcgaggccgcccacggctgcagctgcggtggcaactgcaagtgcgacccctgcaactgctgatcacatcgatcgacgaccatggatatgattattatctatctag

SEQ ID NO: 334885 - DNA, 358 bp, Zea mays
  unsure (1)..(358): unsure at all n locations
cacgatcggagtccaagtccatcccatccagatccactcgaccccgatggcgccgtccatctccgtcggcgcagcggcgcagtcccgggcggcgggcgcgagcacgaagaagagcgcggacgaggtggagctcctgcggcggcggaacgcggagctggagcgggaggtggcggcgctgcggctggagctgggcgcggcgcggcgccgcgccgagacggcggaggaggccgaggagcggctgtgcgtgcagctcggcgacgccgaggtcgaggcgctcgagctcgcgcgcgcctaccaggcccacgtncacgagctcgccagggagctcgtcgncgcgcgcgcggtcccggtacgcccg

SEQ ID NO: 334886 - DNA, 94 bp, Zea mays
  unsure (1)..(94): unsure at all n locations
cccaagcataatnnaactcatttttatacttttttacccacaagtgcccttcatttttgggggttcatacgtgcaatctctggcctttgtcact

SEQ ID NO: 334887 - DNA, 319 bp, Zea mays
  unsure (1)..(319): unsure at all n locations
cacacaagcacttcgacgtcacacgggcgctgcgcacagacacaccaagcgtcggcaccaatggcttactaccaggaggtggactactgctcggaggaggtgaggtcggtggccccggccggcttcggccgccacggcggcggcgtccagcagcacgtcgtcaaggagaagttcgaggaggtcgacacggtctcacgcgccggcgccaaccaccaccaccaccatggtcaccacggcggccacggcttcgtggtgcgcgagaccagcgtcgaagaggacatcaacacctgcaccggcgaggtccacgagcgcanggaga

SEQ ID NO: 334888 - DNA, 244 bp, Zea mays
cccacacgtccggcgagagatcttatctttttcgcccgaacatgagggctaagtggaaggagaagattatgaggaggctgaagaggaatcttcctaagattaggcatccatctaagtagatcctgatgcagtgtccttcatcaagtggaagatagttgattggtctttcatcttcctcttggtttttcctgttatgtctggccctaaaatgcttaggcatctaaatttcctgtttttgaacttt

SEQ ID NO: 334889 - DNA, 375 bp, Zea mays
cgagaggccgccgatgcttatgccggcggagtgcgtgatcccgacggtggagatcccttcgtggccggcggcgccgcccgtgggcgtggggccgtgcgggtgcccgtgctgcgcgccgtgctaccagggctactacgagggctgcaggtgctactgctgcggcaggctgtacggcacgaccgtccgcccgttgccagcgccgtgcggggcctacaggggctgccggacgttcagcgacgacgacccgtcggcggcgtgtagcgtcatgtgaagaatggtggtgttgctttggatttgacaggaacatgcatggtgaactatactcttggaacgaataaataaatgtgttcattaggcagggggtggcgttttgct

SEQ ID NO: 334890 - DNA, 99 bp, Zea mays
gacatgtgcagtctctggcgactgatgttcagtgatcttgctgttctattgtttgtatattcgtgtcggattgttaattctgagcagccattgtttgct

SEQ ID NO: 334891 - DNA, 182 bp, Zea mays
  unsure (1)..(182): unsure at all n locations
nccacgcgttcggcttcttctactacacgacgacaaacatggggaagcctgctaagatcggagagaggggcgaatacgccggctagcgtcgagatccgagggctactccggaccgtctgatcgaggagaaggtcagagtggacaacagaatgctgtatgcgttctatgtccttaatctacat

SEQ ID NO: 334892 - DNA, 172 bp, Zea mays
gtcgacccacgcgttcgctaaagggcgtcggcgcttatgcctgcggtttgcgtgatcccgacggccgacatggcttcgtggtcggcagtaccggctgtgggcgtaacactcattctggtagccatgctgggcgccgtgctaccagggctactattatggcctgaggaactac

SEQ ID NO: 334893 - DNA, 307 bp, Zea mays
cggacgcgtgggcggcggtggcggaggaggagaggctgctcgcggctgcacagcatcatcaggcgtcggcggtggcggatgcggcggctatgggggaggaggtgcgactggcggtggcggagtgccccgtgctcgtggtggggaagcgcgggtgctgcctcatccacgtggtgaagcggctgctgcagggtctcggggtcaaccccgccgtgcacgaggtcgccgacggcgccgaggcgaagcttattgccggggtcgtcgacggcggcggcgacgttgcccttccggccgtgttcgtcgggggcag

SEQ ID NO: 334894 - DNA, 257 bp, Zea mays
cccacgcgtccgaaaaaaaaaaaaaaaaattttaaataaaaaaaaaaaaaaaaaaaaaaaaaggaaaaagaaaaaaaaaaaaaaaaaaaaaaaaaaaaaaaaaaaaaaaaaaaaaaaaaaaaaggggggggcgctttaaaggaacaaaatttacatacgcgggctgggaaagaaataatttttttatagggccaccaaaattaaatattttggccggggttttaaaacgttgggaagggaaaaaacctggcgttacc

SEQ ID NO: 334895 - DNA, 212 bp, Zea mays
aattaccgggccgacccacgcgttcgaccacacgtttcgattaaaaaaaggagggttttttttttgaaaaaaaaaggccttccctaggggaatggaaaaaaaaaaaaaatttcacatgcattaacacatattattgaactaaggataaatgggcgtcccctctaaaacaacaaagtttacgaaaatcgtattccgaccttttgaaaattttt

SEQ ID NO: 334896 - DNA, 542 bp, Zea mays
  unsure (1)..(542): unsure at all n locations
ggtccggaatttcccggtgtcgatcccacgccagtccgcgtgacgcccgtggtgcggacgccccgtggtgggggattaccatttggattgaatcccttaagggaagacactatcacaagagagaaatataaggcgtaatagtatagcgccctcctttgcctttgtgtttagaagcaataacaagaattctctgttgtcacncnngaggaaaagaagagatacgttctggataacattgtacaatcgtcatacttgaaattgactatattcagttgccgcctattccaacattatatgggagtacaatttatgctttctcgctttacgaaatatgatatttttttggacaatttctatataatagcaaagccttattcctatttntggtacttttggatttcaaggacttttagnccccggtttagtgataggaaccagagaagcctttctagnttatgaaatcgggtattagaacccatggtngggggccttggttaccaattccgaataccgctattacattgtttagcgctagttttttg

SEQ ID NO: 334897 - DNA, 370 bp, Zea mays
cccacgcgtccggtcgatgggtggagcactggtggctgtgtcagtatggctcaataagctttatgacagactagtagaagatgaagatcttccacagttagcatctgttgttgtattgagaggagaaatggagaaaagcacagttacaagaggactgccaatcgccaaagttgtctactcctttctaaacgatacactatcagcgtccttccattttccaaaatggaacaagggacgaatcatatgcttgaagtcccaactaaaaaggctgcagtcggccgtagactcctcaaatgggtctcttgcagctggttttgtcgacatgacaaactcccgtctgccggctcccggttccaagatatacacaagc

SEQ ID NO: 334898 - DNA, 234 bp, Zea mays
ccggacctgaatttccggctcgacccacgcgtacggatatcttcacgttgatagcagcatttgttatttgaatgaaacgcgccactctctgggggcgtgcaactttctactgagagcattccatcctcgtatgttcctttcatcattccatcagctcttccagcacatcagctacgcccttcagtagcttaatcacctcccccattgaccatccatgacactaatgcccacact

SEQ ID NO: 334899 - DNA, 348 bp, Zea mays
taccccaccaccaaagcacttttgtgtctaaatcatcttctttacaaattggaagaaccctttttcacctataatcctgcttcctttcgcattaattccccatcttttttacggtctccctgtacccttctaaacactaaccccatcaacttactctccatcctacaaaaatttactgacattcccactcccctattcaaatcaattcagggtcgtctatctagaccatccaatcatatttacccgcgactactacttcatagctcctttattgtttctcttacattaacttttctttcttttaccatcaaatctaccgaatccaaaaacactctttttccccaactt

SEQ ID NO: 334900 - DNA, 86 bp, Zea mays
aaaaaaaaaaaaaaacaacaaaaaaacaaaaaaacaaaaaaaaacaaaaaaaaaaaaaaaaacaacaacaaaaaaaaaaaaaaaaa

SEQ ID NO: 334901 - DNA, 362 bp, Zea mays
cccacgcgtccgcagcaatccacacaagcacttcgacgtcgcacgggcgctgcacacagacacaccaagcgtcggcaccaatggcttactaccaggaggtggactactgctcggaggaggtgaggtcggtggccccggccggcttcggccgccacggaggcggcgtccagcagcacgtcgtcaaggagaagttcgaggaggtcgacacggtctcacgcgccggcgccaaccaccaccaccaccaccatggtcaccacggcggccacggcttcgtggtgcgcgagaccagggtcgaggaagacatcaacacctgcaccggcgaggtccacgagcgcagggagagctttctcgccagggctaac

SEQ ID NO: 334902 - DNA, 324 bp, Zea mays
acggcgctcttgcaaaggcgcacgtacaaaagggcaatctaccagcccagaaggccctacggtctgttcatgtgtggctgccgctacctgctaaccactcaaaccaatccaatccaatggaacgcacggtgattgacctcatgaacccgctcgcttttgtaccccctgaagaacgtggggctgttgctcatctggtgctacaaccatatacactcgatccaccccaccccgcattgggcgttagggtacatatacaacaacccggaccataacaagaagggcgctgctcctgggcttatgcttacgtcaccccagaaccaaagt

SEQ ID NO: 334903 - DNA, 346 bp, Zea mays
gcttcgcctcgccgccagccctgccgacctagacctgcctcaggcggcgccggcgccggcgccggctcagttgaccatcgtgtacggagggcgtgtgctggtgctcgctgacgtccccgccgacaaggcggcgggcctgcttcgcctcgccgccggcgcagcagcggaacgtgcagaaacagaggcgatcggtgccaagcgccgcgaccatgtctccggctctgcgtctgcgggcgctgacctgccagttgcgaggaaggcgtcgctgcagcggttcatggagaagcgcaaggctcgggtcgccgccgtccgcacggagccgtaccgacggccggacgtcagcgac

SEQ ID NO: 334904 - DNA, 68 bp, Zea mays
aaaaaaaaaaaaaaaaataaaaaaaaacaaaaaaaaaaaaaaaaaaaaaaaaaaaaaaaaaaaaaaaa

SEQ ID NO: 334905 - DNA, 279 bp, Zea mays
cgctactgtagcgctagaagccaatgactagctgatgtggaggcaccgaacaggtggtccagtggcgcaccggactggtccagtgcaacgcagacagaaaaattgtagattcctccaatggctacaactgagtgggggtagagatgtacagaaggcttgcggtccaaaagcacgaacggatgcacgctttaccgggccagcacgactcgctttgaccgggttcatgccagaccgaccccgattggcgtgccgggcttgtgtacagtacacaacctgttg

SEQ ID NO: 334906 - DNA, 342 bp, Zea mays
ggctactgtcacgctagaagccaatgactatctgatgtggaggcaccgaacaagtggtccagagggggaccggactgatggagtgcaccgcacacagaaaaattgtcaatacctccaatggctaccactgagtgggggtcgagatgtacagaaaggtcagcggcccaaaagcacgaaccgacggacgcttcaccgggacggatcaacattgcttaaacacgtgttcataccatcccgaccccgataagcctctcggccctgagacaaccaaacaacctcttacctaaccggacacgaacaggctattagggatggtacacctgcaggctctttaaaaagccg

SEQ ID NO: 334907 - DNA, 407 bp, Zea mays
  unsure (1)..(407): unsure at all n locations
cccacgcgtccgagcaacatagaaagtggaatccagtagcaacaatagagcaacaatggcgaccaagatattttccctccgtatgctccttgctctttctgcatgtgttgctaacgcgacaattttccctcaatgctcacaagctcctatagcttcccttcttcccccataccttccatcaatgatagcttcagtatgtgaaaacccagctcttcaaccctataggctccaacaagcaatcgcagcaagcaacatacctttatcacccttgtttcaacaatcgccagccctatctttggtgcagtcattggtacaaaccatcanggcacagcagctgcagcaactcgtgctacctgtgatcaaccaagtaactctggcaaacctttctgcctactctcagcaacaac

SEQ ID NO: 334908 - DNA, 361 bp, Zea mays
cccacgcgtccgagcaacatagaaagtggtatccagtagcaacaatagagcaacaatggcgaccaagatattttccctccttatgctccttgctctttctgcatgtgttgctaacgcgacaattttccctcaatgctcacaagctcctatagcttcccttcttcccccataccttccatcaatgatagcttcagtatgtgaaaacccagctcttcaaccctataggctgcaacaagcaatcgcagcaagcaacatacctttatcacccttgtttcaacaatcgccagccctatctttggtgcagtcattggtacaaaccatcagggcacagcagctgcagcaactcgtgctacctgtgatc

SEQ ID NO: 334909 - DNA, 102 bp, Zea mays
cctgcacgtaccggtaccggaattcccgttcgacgcgagcgtccgctcacgcgtgaggacgctactggaccatgttgaagctgcccatggtaggctgtaaca

SEQ ID NO: 334910 - DNA, 278 bp, Zea mays
ggccccgggagcaagacgaaccgcattcatggcgtcaagagcggcccaagcggggggatcaacgggggcgggggcgggcgctacaaggacaagaaggacgtggaagacgcgcaggggacggggggcacgaacgccgacaccacgaacggactgcgcagcaaggcggacgaggactgcaagcggacgcacaagggcagcacggggctgtacgagggcaacaccagggacaagggcgacgcaccccagcatcagtggaccagaaggacggggcccaacaa

SEQ ID NO: 334911 - DNA, 114 bp, Zea mays
tgccgctttgaagttgatcttgttgaaatttgccacccgaataactgcaactgtggacggcttgcatacctccccgtggccggagtggttctcactgcgaaggatcttgacgct

SEQ ID NO: 334912 - DNA, 197 bp, Zea mays
  unsure (1)..(197): unsure at all n locations
agaaaggagcanagaacaaacgaggagagaccgcaccacacaccncacgccngaaggccagagcaaaacccncacggccgcgcccaaggacaacgangaacancgaacaaccaaacaaagcaaaggacgaccagcgcacggaaagcaaaacgcacagcacgccgggcgcaccacacacagacacgagcggaccgcgc

SEQ ID NO: 334913 - DNA, 189 bp, Zea mays
ggtgtttgtttactcaagctatatatggttattggcaagtaataagtatacatcggatttgcaaccggtgctgaaaagggggtgagtaaagagggaaaattgtgggccaatcagaatctaggttttatgacgaacgggatcttatacacgaacggaggagcaaaatactttccggtcaggatcttccag

SEQ ID NO: 334914 - DNA, 327 bp, Zea mays
gtttcattgattcttgaagagatcgagctttttttgcaccacaaggtcgaggatgtcttgcaactgcggatcaagctgcggctgcggctcaagctgcaagtgcggcaagaagtaccctgacctggaggagacgagcaccgccgcgcaggccaccgacgtcctcggcgtggccccggagaagaaggccgcgcccgagttcgtcgaggccgcggcggagtccggcgaggccgcccacagctgcaactgcggtggcaactgcaagtgcgacccctgcaactgctgatcacattgatcgacgaccatggatatgattattatctatctagc

SEQ ID NO: 334915 - DNA, 164 bp, Zea mays
ccggaccggaattcccgggtcgaccgcacgcgtccggtttcattgattcttgaaaagatcgagctttttttttaccacaaggtctaagatgtctggcaagttctcatcaagctgcgggggcccctcaagctacaagttcgtctagaaataccctgacctttatg

SEQ ID NO: 334916 - DNA, 242 bp, Zea mays
  unsure (1)..(242): unsure at all n locations
ccggnccggaanncccgggacgacccacgcgaccgcccacgcggncggcanagagaaccaaagaacagangaggagcacgagaaggggcgggagagggcaagcgacanccagnncagaaaggagaagaaggggcgacacgnacgcaggacgacgacaccagagcaagaaggacccaganaggcaacggaaacgaggaaggaagaagagaaagcaagggacccgcaaaaacaggagngacaaa

SEQ ID NO: 334917 - DNA, 177 bp, Zea mays
gcggccactagcccacacgtagtccatgcaaataagaagacatcagccgacaacgcagaggcttcctatgccaacaaaatccaggacgacttctggtcgacgctacgcgatggcattaaagctacacacctccacacgtgcaacgagttctggcccctctctcaacatcccaacctg

SEQ ID NO: 334918 - DNA, 437 bp, Zea mays
  unsure (1)..(437): unsure at all n locations
gcaaaaganaaaagaaaagagcacacccgggactctgttctcgtaaatcaaactcgtaaatggggattattaatatttaccaagctatttggtgtagttaattaagtttcgattaagtgaatttgcttgaattaaaagtaattaggtataaggactaaattgtatatagggtgaaaggtaaattatagattaaagaaaaatttaagggactaaataagcaattatgccattgacattaaatgaagcggcgtaaggatgaaaatatttataaaatttaaaggtaaaatatatattatttttagggttttgtgaggatgtggtagttgtttgantagnttgaatggagtggtgtgggttatancatattatattatattatattatattatattatattatattatattatattatattataatatattatattatatt

SEQ ID NO: 334919 - DNA, 117 bp, Zea mays
ccgggccggaattcccgggtcgaggcacgcgtgcgcacacaaacactgagacgtcacacgggcgttttgtttcatacacaccaagcgtctgcaccgggggggtactaccaggagggg

SEQ ID NO: 334920 - DNA, 231 bp, Zea mays
  unsure (1)..(231): unsure at all n locations
ccggggcgacccacgcgnccgcacacnannccnagagagcagggtttaactccgaatactcatccgacacccccgggggctccattcaccagccctggggcaagaacaccagagcgcgaggcccaaagggggagcgggcacacacgccgcccgcaaagccaatgcccgagcgggcgacccacggcacccaaaacggcggccgcatggagacaccgcggcccgtgccaccac

SEQ ID NO: 334921 - DNA, 255 bp, Zea mays
  unsure (1)..(255): unsure at all n locations
ttngacgtgattcgggcgctgcgcacagacacaccaagcgggggcgccaatggcttactaccaggaggtggactactgctcggaggaggtgaggtcggtggccccggccggctttggccgccacggtggctgcgttcatcatcactgtcttaaggagaagttcgaggaggtcgacacggttttacgcgccggcgccaaccaccaccactaccatggttaccacggcggccactgcttctttgggcgcgataccag

SEQ ID NO: 334922 - DNA, 414 bp, Zea mays
cccacgcgtccggcttcccttcttcccccgtacctctcaccagtgttgtcttcagtatgtgaaaacccaattcttcaaccctacaggatccaacatgcaattgcatcaggcatcttacctttatcacccttgttcctccaacaatcatcagccctattacagcagttacctttggtgcatttattggcacaaaacatcagggcacaacaactcgtgctagcaaaccttgctgcctactctcagcaacaacagttacctttggtgcatttgttggcacaaaacatcagggcacaacaactacaacaactcgtgctagcaaaccttgctgcctactctcagcaacaacagtttctgccattcaaccaactaactgcattgaactctgctgcttatttgcaacaacaactagtacta

SEQ ID NO: 334923 - DNA, 111 bp, Zea mays
cggaccggaattcccgggtcgacgcaagcgtcccgtcacccgaaccgggacccgacgcttggttttttttttttcaaaaaaaactcaaaatagggtggggacaaataccac

SEQ ID NO: 334924 - DNA, 377 bp, Zea mays
  unsure (1)..(377): unsure at all n locations
cccacgcgtccggaggcaggcaacctgcgatgactggtgtagatgctgatgctaacatgggaaggccagcttttagtgcatccaagctccggggaagatgcggatcacgacggcacggcgagatcagttcccaccgaggcatacatctttcttcgatcatcagttcgtcttcggtcctcaagcaaccttgcacgccgcagagtttaccagagcagcagtcctagaaccatagtagtgttcctaaacgtcgatggcttcgctgagattgtatatgtccccattacttcgttgtgttcgattccgtcctcttctgcttgttttctaaccttagagaaacggtatanggcaggctcgcagttgcaccggcatttgtcgat

SEQ ID NO: 334925 - DNA, 96 bp, Zea mays
  unsure (1)..(96): unsure at all n locations
cggacgcgtgggnaanaaaaaaaattaagaatcaatgggaaaagaaaatactcgaggactaagggagacaataaataggggaaaggagcgaacatt

SEQ ID NO: 334926 - DNA, 241 bp, Zea mays
gacaagcgctagcgtaaacgcggtttgcacactaaccgcaaccactttcaatagcggggctcttgattgcttgaacatgcagggctgctgtatcagagaatgaacacatacgatcgtgacgaatgaacacattaagctcgcgtaccaaggtggatttcatcaacagagaaagctggataatactagctgacagcgtgatgccctgaacacagtggagactgtgtggccttacgaaattgat

SEQ ID NO: 334927 - DNA, 161 bp, Zea mays
gaccggaccggaattcccggcgcgcaggctgtgtatgcaagtggaggaaaagcacatggaatgttcattttgttagcttacgacatccactcgggccgggttaaggttcggcgtggaggggccccaagatctgctgctcttatcttccgtccctccactca

SEQ ID NO: 334928 - DNA, 354 bp, Zea mays
caacaagcaacatagaaagtggaatccagtagcaacaatagagcaacaatggcgaccaagatattttccctccttatgctccttgctctttctgcatgtgttgctaacgcgacaattttccctcaatgctcacaagctcctatagcttcccttcttcccccataccttccatcaatgatagcttcagtatgtgaaaacccagctcttcaaccctataggctccaacaagcaatcgcagcaagcaacatacctttatcacccttgtttcaacaatcgccagccctatctttggtgcagtcattggtacaaaccatcagggcacagcaactgcagcaactcgtgctacctgtgatc

SEQ ID NO: 334929 - DNA, 291 bp, Zea mays
aaaaaaaaaaaaaaaaagaaagaaagttatagaaaaaagaaaaaaaaaaaaaaaaaagggagtggggaaatggaaaaaaagagagaggggaaaaaaaataaaaaggtgaacaaggaaataaataaatttaaaaaataggggggggcggtctgaaagaataaaaggttactaagccacgaatgcacaataaaaacctcataaaatggtgactgcaaaacaaaaagaagggggggatttgttaaaatgaggagacgggaaaaatctagaggtttcgaaaataattgcttaggg

SEQ ID NO: 334930 - DNA, 401 bp, Zea mays
ctgccctaccggtccggaattcccatttccacccgcgcctaccctcccaccaactacgtgtacatctctcgaaccactttgcttctgatctaaacacccaccctctgtcttatcctcagggggggcgggctactaatctacaacaccaacgccctcttctggtaatgatatccaatgcattctcttcttccgattcatccttaaaatcacattgtttgactataatctaacctccatggatactcaaccttccacatgtaacaataaatagctctcctcttcactacataatcatcatactatatctgtataaaacaactcaacattaaaaacatacagccttcccctttatatgattcattcttacataactaatacattcctcctctttatttctttta

SEQ ID NO: 334931 - DNA, 239 bp, Zea mays
atcttcctgaacaatggtcttcatgtggaagtatagtattttgccacgttttgagctgaaaaaaaaaaaaataaaaaaaaaaaaaaaaaaaaataaaaaaaaaaaaaaataaaaaaaaagaaaaaataaataaaataaaaaagagataaaacatatataaatccaaaagtaagaaaaaaaaaaaagtgaaagaattaaaaaataataaaaaaaaaaaaaggggggatgattaataagat

SEQ ID NO: 334932 - DNA, 109 bp, Zea mays
tggcccggcacgctgcgggcggaatctccagggggggggacttataccataccacatgaactgcctgtgcagctaatgatatccaataaatgctcttctagataaagac

SEQ ID NO: 334933 - DNA, 259 bp, Zea mays
cccacgcgttcgcccacgcgtccggccgacgccgccacgtccccacgaaaaagaaacaaaaaagaagaagacgacagactgccagaggcatggcggccacgagctccgcctgcgcggcggtagcgctcgcgtccttcccgtgcgccggcttcacctccggcccttcccgcgtctcggccagcagccaccgcggtcagcggcactccagggccgccaccgtcagatgttccagcaacgtcgccaacgtgtcccaaggcgc

SEQ ID NO: 334934 - DNA, 316 bp, Zea mays
ctcgtcgcccaccgccccattagcgccgccctcccttatccgacccaacgccgccgccgccgccgcatagacctcgccggcgcctctgcgccgccccgtggcctccggaggtgctattcgcgcgcgatccgccgctgcgtccgtcgctctggcatcgattcggcggcgctgggagctgtagaagcgagttggttggagatcagaaacaggctacccaacttgaagatggcactgcgacaggctctaggatggtcggaaggggaggttatgcgaccagagtcaaagccctgctcccggttaatgcggcagactgcgg

SEQ ID NO: 334935 - DNA, 350 bp, Zea mays
  unsure (1)..(350): unsure at all n locations
gaaataaagcagacaagaaattgaagggaaaaaaccctcctcttgctcggccgtgggcaaaggcccccggccgacgttcctgcccatcgatacccctctctaatccctcaccgatctagcgaccataacagagatgcttttcaggtcgtctcaaataggctagcactcctggcttgtggttgttggttgccagtttgctgcctctgttttctccttaagttatgttagtggtgtatcttgtaagtgtgtcttgggcgtgtgtttttagggttactttacttcccattgtactctcttctttcttaatgaaatgatacacaattctcttannnaaaaaaaaaaaaaaaata

SEQ ID NO: 334936 - DNA, 142 bp, Zea mays
actgggtacagtctgggaatatctacatggcacgaagttgaatgaagaccccggcttcgaagttctacctcgatgagcgggcagatggcgttggggcgctataccattatctatgagattacgaatcaaaaccacttcaaac

SEQ ID NO: 334937 - DNA, 56 bp, Zea mays
cggacgcgtgggcgagatcgtgcgcctcacgcgcgaggtcgtgcccggcatgatcg

SEQ ID NO: 334938 - DNA, 292 bp, Zea mays
gccagatcactgcattggtgatccggtcacttcaattctttcctatccaaggtcacaggtttgtttgtgagcttgcgaaccctgttttttttccctgtgaagccatatttgttctatttttttgttgaaaaaactagagtcccgagataatatgggatatatatgtgatgtaatttagacgacagagcatgctgtacaaaagagtttggaaaatgttattttctgtgggcttgttgttttgttacttatattataaaatataataagggcgggtcgtcttttgaggtatcca

SEQ ID NO: 334939 - DNA, 202 bp, Zea mays
aaaaaaaaaaaaaaaataataattaaaaaatatttaataatataatataaatataaaataatagggggaaaaaataaaataaaatggtggaaaaaaataaaaaaataatttttaatataataatttattttatattaaatggggggggcttttttatgggatcaaagttattattcccgtccatgcgaatatttattttttt

SEQ ID NO: 334940 - DNA, 158 bp, Zea mays
taatttattcacgatcacaatggacttggcaaatattatcccatcagtatttgtcatgagagcctcagtctactctcgtatcatcttaggtttttggatcccttcgttttgaaggaactgaaatttacttaatggagtaggttacttggtttacattc

SEQ ID NO: 334941 - DNA, 279 bp, Zea mays
attatattattttatattttttattattttttaattattatataatatttttttttttttattattatatatttattataaaaatttataaataaaaaattttttattaaaagtttttttttaaaattatatattatatatttttatttatattatatataattttatatattttagtagatattaaaaataatttattaattttgattaaattttatttctttattattatatttattattatattatttattatattaaattttatttcctaaaatt

SEQ ID NO: 334942 - DNA, 452 bp, Zea mays
cccacgcgtccgaaaaaaaaaaaaaaaattaattaaaaaaaaataaaaaaaaaaaaaaaaagggggtaaatataatatcatttgggataaaaaaatatttattaatatatttttatttattattatattataatatatttaattttttttaataattaattattttatataatattatatatttttaatattatatttaataaataatatattttttttttttttttttatttttatatattttattatttttataatttattttatttctttattttatttattattttatattttattttttatttatttttattatgttttttttataaaatattttattaattttatattatatattatatattatatatcttatttttatatatttaaatattatttttatttttataattttatttttatctctttataattattatattatattt

SEQ ID NO: 334943 - DNA, 81 bp, Zea mays
aagactcgtcggcatgtccacaagtcttgttttttgtgagtagcccacccatggtcttttgagggactatctttgtggtac

SEQ ID NO: 334944 - DNA, 343 bp, Zea mays
cccacgcgtccgcagcaatccacacaagcacttcgacgtcacacgggcgctgcgcacagacacaccaagcgtcggcaccaatggcttactaccaggaggtggactactgctcggaggaggtgaggtcggtggccccggccggcttcggccgccacggcggcggcgtccagcagcacgtcgtcaaggagaagttcgaggaggtcgacacggtctcacgcgccggcgccaaccaccaccaccaccatggtcaccacggcggccacggcttcgtggtgcgcgagaccagggtcgaagaggacatcaacacctgcaccggcgtggtccatttgcgcagggagagctt

SEQ ID NO: 334945 - DNA, 425 bp, Zea mays
gggttggcttctcctccccctccggttcgggttcgggttcgtgaggttctccggggttcggtttcgtgggtgagcggatcgagatggcggcgtcggatgttgagtaccgctgcttcgtcggcggcctcgcctgggccacggacgaccactccctccacaacgccttcagcacctacggcgaggtcctcgagtccaagatcatcctcgatcgggagacgcagaggtcccgcggcttcggcttcgtcaccttctccacggaggaggcgatgcggaacgccatcgagggcatgaacggcaaggagctggacggccgcaacatcaccgtcaacgaggcccagtcccgcggcggccgtggaggcggcggcggtgggtacggtggtggccgtggaggcggcggctaccgcggtggcgggcgccgtgatggc

SEQ ID NO: 334946 - DNA, 183 bp, Zea mays
gcctgcacgtaccgcggactaattctcgggtcggcccacgcgtccggggttggcttctcctccttcatcatttttttttcgggtactagagcgtttccggggttcgggttcgtgggtgagcggatcgagatggctgcatctgatgttgagtaccgctgcttcgtcggcggccttgtctgggcc

SEQ ID NO: 334947 - DNA, 391 bp, Zea mays
cgatctgcaagtctcgctacgtagcagtgcaataaaaaaaaagcagccgcaatggcgagcagcaccatggccctcctccacggccttcgccggcaaggccgtgaacgtgccgtcgtcgtccgccttcggcgaggcccgcgtgacgatgcgcaagacggcggcgaaggccaagccggcggcggcgtccgggagcccgtggtacggccccgaccgcgtgctgtacctgggcccactgtccggcgagccgccgagctacctgacgggcgagttcccgggcgactacggctgggacaccgcggggctgtcggcggacccggagacgttcgccaagaaccgggagctggaggtgatccactcccgctgggccatgctgggcgcgctcggctgcgtc

SEQ ID NO: 334948 - DNA, 275 bp, Zea mays
tgggcgcgggagtcgcctccgactaagtatcgcgctaaagcggtcgctcctcgtgcggccgcattagcgcgctacatatacggtgggatagctaacagcacatgtgggctgtcgtcatcctaggtcgtaccacactttgcctatagtgaagtcgaataaaatcacttgttcggtcgtctgtaatgtgaccatttggtagagcttccaacgcgtttgatgcatatcttgtgtatactatatatgtacctaaataggttggcataattatggtcata

SEQ ID NO: 334949 - DNA, 326 bp, Zea mays
  unsure (1)..(326): unsure at all n locations
cccacgcgtccgnaaaaaaaaaaaaaaaaaaaaaaaaaaaaaaaaaaaaaaaaaaaaaaaaaagaaaaaaaaaaaaaaaaaaaaaaggaaaaaaaaaaaaaaaaaaaaaaaaaaaaaaaaaaaaaaaaaaaaaaaaaaaaaaaaaaaaaaaagggggggggcctttttaggggttcaaagtttatttccgctggcttgcaacgtattagtttttttttggggtcccctaaattaaattaatgggccgtggtttaaaaacgttgggattggaaaacccttggcttacccaaatttaatgggtttgaagaaaatccccttttcccaag

SEQ ID NO: 334950 - DNA, 260 bp, Zea mays
tggccgcgacagacgcgtccgccaatccatccttctttcgcagaaacacctttttcgtctgcccctccttaccgactagacaaggggttctattacgcacaaggaggacatcaccacagaaagatggtctatctggtggatcactagaactcttacctgtgcaagatgacgctcatacacaacaacgtgaacctcaagtccaatatactgtctttcttcacacccaatcacatattcctatacttcaaaaccatcaacgg

SEQ ID NO: 334951 - DNA, 63 bp, Zea mays
taccaccccgcctaactccccggcgacccactcctcctctccaactatctaacttatgatacc

SEQ ID NO: 334952 - DNA, 99 bp, Zea mays
gacggttagtctctcatgatgcatcgtattttgctgttcactcccatacaaaaataactagggctattctaggaggctagggggtcataacttacaaaa

SEQ ID NO: 334953 - DNA, 191 bp, Zea mays
accaaacaataagtctgaatccctcattcttgcatgcatataatgactgcagcactagtacgtcaattatgtctatgtagaggaggaatgatttatgtactagtgggcgcccgatataaaggatcaaactttacgtacgcgtagcatgcgacactgaacttgtgatatggtgtaacttaaaataaattcac

SEQ ID NO: 334954 - DNA, 85 bp, Zea mays
agagacttgtggctatgtgattgatgtagcgaaacaaggctgtgatgtgttaactctgccttataatattttggttgaacgtgct

SEQ ID NO: 334955 - DNA, 93 bp, Zea mays
  unsure (1)..(93): unsure at all n locations
ccggncagaaattcccgggtcgaccgcacacgtccgatatcatctttatctatagaactcaccatctttttgacgtgagctatctggatctca

SEQ ID NO: 334956 - DNA, 64 bp, Zea mays
gcgagacgtgcagtctgaatctcttattcgtgcatgcctataatgaccgctacactagtacgtc

SEQ ID NO: 334957 - DNA, 371 bp, Zea mays
cccacgcgtgcggcctgtatcccttattctttcttgtatataatgtatgcagtacaggtatgtccccgcagtctttggagaagaagatggatttgtgaagtgatagcacagaaaaaaagtcatcaggcgcttctggtggtagactggagactgggctggagaaatgttggagctggaaggaaacgcacggatggctcctgcttgacaagtgtaaaggcaggcggcaagcacggacgtcgagtcgaggccccggacggctccaagagcttctttctccaatccaatccaatccagaaccctgactgcagtccatggcattgtagcgctaccatttgtccacgtccgatgggtgaagtgaagcatgactgact

SEQ ID NO: 334958 - DNA, 354 bp, Zea mays
tattttcagcattcaaaaacacaccaagcgaagcgcactagcaacgacctaacaccaatggctaccaagatattagccctccttgcgcttcttgcccttttagtgagcgcaacaaatgcgttcattattccacagtgctcacttgctcctagtgccattattccacagttcctcccaccagttacttcaatgggcttcgaacatccagccgtgcaagcctacaggctacaactagcgcttgcggcgagcgccttacaacaaccaattgcccaattgcaacaacaatccttggcacatctaaccctacaaaccattgcaacgcaacaacaacaacaacagtttctgccatcactg

SEQ ID NO: 334959 - DNA, 396 bp, Zea mays
  unsure (1)..(396): unsure at all n locations
cccacgcgtncgcccacgcgtncggctcctgtgaaccccttccagcatctaatggcgacgccggtgatggccaacctgtggacgacgacgatggcgagtagcgcaaacgctgtgtcagcaactgccatttctgagactagcatcgagatcgtctcgctttgacacctggctgcaactgaaaatgggcaggacatggtcaaagctttgattagtttgtccaccggtctctttctccttcggtatgctgatggtgcacgactgcacccgaacggtgaacttaactgttaactcttgcgaagctctaaatgtctntgctgcgttgctttgagctctcaagtctgaactgtgaacatgtgttctcatgcctaactttatacgatgatttgattttttttt

SEQ ID NO: 334960 - DNA, 208 bp, Zea mays
  unsure (1)..(208): unsure at all n locations
cccgccatctaaacacaaatcaaaatcagtgtgcgtgcagctgcatgtggccatcctgccgttgccatgtnataggggcggcggggcacaaaaatttttcattatccaccactattcgtatcgaactgctggatattggtgctcgggtcaattatgatggtgattgtgacggagtgcccttgcaaaataattaataattcgcgtgaaa

SEQ ID NO: 334961 - DNA, 80 bp, Zea mays
ggtcgcctgcagcgtaccggtccggaattcccgggctgaatggcgaatgcgaccacccctgaagcagagcattaagcgcg

SEQ ID NO: 334962 - DNA, 326 bp, Zea mays
cccacgcgtccgaaaaaaaaaaaaaaaataaaaaaaaaaaaaaaaaaaaaaaaaaaaaaaaaagaaaaaaaaaaaaaaaaaaagaggggataaaaaaaaaaaaaaaaaaaaaaaaaaaaaaaaaaaataaaaaaaaaaaaaaaaaaaaataaaaaaaaaaaggggggggcctttttaagggatcaatgtttaaatccccggttttgcaaagttaaattttttttttggggctaccaaattaaaatcctggggccgatgtttaaaaaggtcgaaatgggaaaaacctgggggttccccatttaatttcttttgaaaaaaatcccctt

SEQ ID NO: 334963 - DNA, 204 bp, Zea mays
  unsure (1)..(204): unsure at all n locations
cccacgcgttcgnnnaaaaaaaaaaaaaaaaaaaaaaaaaaaaaaaaaaaaaaaaaaaaaaaggaaaaaaaaaaaaaaaaaaaaagaaaaaaaaaaaaaaaaaaaaaaaaaaaaaaaaggggggggccgttttaaaggatcaaagctaacgtacgcgggcatgcaaagtaaaaacttttttataggggcaccaaaattaaatta

SEQ ID NO: 334964 - DNA, 118 bp, Zea mays
gcctgcacggaccgggccggaattgccggatcgacccacgcgttcctttatggaggtatgtcggggttcgggttcgtgggtgagcggatcgagatggcggcgtcggatgttgagtacc

SEQ ID NO: 334965 - DNA, 110 bp, Zea mays
cacaagcatgaagaacaaaacgactccactgcgtctattattctaacattcgggaacaaatggaacacagccaacaaccgtggtaaccaacaaaaccacagcgagcgagt

SEQ ID NO: 334966 - DNA, 223 bp, Zea mays
gcggtttgctagagctagctctcatgcgggacgtgtcatactactaataaggaagcggatagtgaggaagttgaccgctaactcagacacgtataaacttattgcaacatatgtattgagacatttaccattactatctcaaagaaagctagtccaggggtcatataaagatgtcgaatcacatttctcaaacaaaaggagtaaggccaccgcactagaggat

SEQ ID NO: 334967 - DNA, 242 bp, Zea mays
ccggaattcgcgggtcgcgccacgcgtccgcgcgcaaagctcttcctcgtgtaaagacgacgagaaatttatgtactctcgcaccacctcacaaacagacctgatcctctccgtttctttttgtttcccttttccctcttccgcgattccgtcgcccggttcaatttggacgcgcgcggcgtaaggcgcccggcggaaaccgccgaattcccctcttcctcgcgcgtgctcagcgattcgag

SEQ ID NO: 334968 - DNA, 173 bp, Zea mays
caaagatcttggaaaggtgcttcgcccttccctcacttcaggggttatgtaaattggacaggtagctgcagcaactatgcaggggtaaccttttttttttggagctatatattcatgaaacatgaactgggcagcatgtgctatagaataccatgaagaaattagcgggctcc

SEQ ID NO: 334969 - DNA, 180 bp, Zea mays
cccacgcgtccggagaccaacaagcaacatagaaagtggaatccagtagcaacaacagagcaacaatggcgaccaagatattttccctccttatgctccttgctctttctgcatgtgttgctaacgcgacaattttccctcaatgctcacaagctcctatagcttcccttcttccccata

SEQ ID NO: 334970 - DNA, 283 bp, Zea mays
cggacgcgtgggcggacgcgtgggcgagaagtcgagagaaaagacgtgtcaacgtcactacgtcagcgtcctctggctgcggcatccatgggcgacaaccgcaaccttccgccgacctgggccaccacgggcggcttcggctttctgaccctcaacttcggggtcggcatctaccgggcgtggggcgacttcgcgttcattctgctggtaacaggctcggacttcggtctggtacttctctttcggtggcttcgggactaccagcgcgcggcgcccgggttcc

SEQ ID NO: 334971 - DNA, 372 bp, Zea mays
agcgtgagaaacttcgtggaaaaggggccggcggcaccgtaccagtcgtcgtccagttacctcacgcagcagctcagcagcaacatggcgctgagagccgccgcctcctcctcctcttgtgcgtcaggctacagcgttcagacgaaattcacgtcgctccggccgttgccgccttcggtcgtcccttcccatgcctacagcgcgccgcctcgcggacccgccaccgtctttcacccgtcagctcctcccgtgccgtatccagcgagcaattctggcggtcctggcagcagcggcgcggtgttggagatcgagagcgtgaggtggagcgtggtgggatcgaagcctgagggctcggagcgtctgaggagctgc

SEQ ID NO: 334972 - DNA, 63 bp, Zea mays
aaaaaaaaaaaaaaaaaaaaaaaaaaaaaaaaaaaaaaaaaaaaaaaaaaaaaaaaaaaaaag

SEQ ID NO: 334973 - DNA, 399 bp, Zea mays
ctcatctcgacagcaacctagccgacaagatgagagccaaatggaggaagaagcgcgttcgccgcctcaagcgcaagagaagaaagacgagggctcgctccaaataaactactcgcccctcaatctcagctgccaccccaattctgaacgataacgatcaatgaacgaaacgttgtctacgcactacctttccgcccactcgcaattgctggccgccgcttttcgctacttcggttcaccgggctacgtcattcggcagacacgcgacactgcgagcttgtaagctaccaccatggaaggtcacgcttgtgccggattgaggatcatcaaggctgctggtcaactacacgttgaggtgctcgagagtttacttgactcagatggtcactctaacaccgg

SEQ ID NO: 334974 - DNA, 84 bp, Zea mays
tccagaattcccgggtggaccgacgcgttcgaggacgcgagggttttctttttttttttttttcatatcatatatacatccata

SEQ ID NO: 334975 - DNA, 339 bp, Zea mays
gggttcgtgaggttctccggggttcgggttcgtgggtgagcggatcgagatggcggcgtcggatgttgagtaccgctgcttcgtcggcggcctcgcctgggccacggacgaccactccctccacaacgccttcagcacctacggcgaggtcctcgagtccaagatcatcctcgatcgggagacgcagaggtcccgcggcttcggcttcgtcaccttctccacggaggaggcgatgcggaacgccatcgagggcatgaacggcaaggagctggacggccgcaacatcaccgtcaacgaggcccagtcccgcggcggccgtggaagcggcggcggtgggta

SEQ ID NO: 334976 - DNA, 382 bp, Zea mays
cccacgcgtccgaagcaatcgcagcaagcaacatacctttatcacccttgtttcaacaatcgccagccctatctttggtgcagtcattggtacaaaccatcagggcacagcagctgcagcaactcgtgctacctgtgatcaaccaagtagctctggcaaacctttctccctactctcagcaacaacaatttcttccattcaaccaactgtctacattgaaccgtgctgcttatttgcagcaacaactattaccattcagccagctagctactgcctactctcaagaacaacaacttctttcatttaaccaattggccgcactgaaccccgctgcttatttgcagcagcaaatactactaccatttagccagctagctgcagc

SEQ ID NO: 334977 - DNA, 245 bp, Zea mays
gtccggtttatcgacccgattgactgattttcaataggaagtgcatactcaacctcttcgtggtgcaagtatagggcatgggggctctactatcatcaaactattgacggaatagctcaaatctatggatcctaagcaccctgagggagcaacggatgaaatagagttggatcttgtttagcaaagtacgtttcataagcaactaaataattgcaccttcgttattacattcatgtggattaaac

SEQ ID NO: 334978 - DNA, 357 bp, Zea mays
  unsure (1)..(357): unsure at all n locations
gatgaaatggattcctgttaaagagaaattggttcttctcaagaaaatggtaaaacctaatgtacaaaaaggtatcaacagggggtaaatgaaattcaacctcatattgagattgctaagatgaaatggatttccgttaaggaggaaattggttgtcctcaaggaaaatgcagaaccttatgtacaaattggttgtcttcaaaatgttggtcatgtagctgcaagcctacaacanagagaatcaacaatggtggtgatgctacacatgtagaagtagcaatgttggtcttgtaaatccaagatttggttgtgatgaatgatatctatgataatatatngctaagtatatgtgatgat

SEQ ID NO: 334979 - DNA, 132 bp, Zea mays
gcgcccatttgataacagtatacacccaagagtattgtcaagattggaagatccaggacaacatatatcatggatacaacatctggatcaaagattgtcacataacatatagtggacttgggtgtatgattt

SEQ ID NO: 334980 - DNA, 461 bp, Zea mays
cggacgcgtgggcaatcagtgttaaatcgaagcctctgcatgccgggttggtctttctgcattgtaccttaaacaaggagcttcatgactttatcagagacacagagggttgttatggctttattggagctacagttggttcaatcaagaggcagattaaaaagccaaaacctattccagttgatgaagttgaatcaattattagagaagagaaggaggaacaagagagagttgacagagaatttgaagaaatggagaatatgggaaacattgagcctttcagtaaacccgttgaagaatctgaacttatgttaatgaataagatcaagaagcagtttaagaaatcgtcctcacagggtggcactagacacagtgctttttcgcctggtgcaactgttcatgttctctccgggccttttgcagacttcactggttccatcctggaagtgaatcgcaaaaac

SEQ ID NO: 334981 - DNA, 302 bp, Zea mays
cacagcaatccacacaagcacttcgacgtcgcacgggcgctgcacacagacacaccaagcgtcggcaccaatggcttactaccaggaggtggactactgctcggaggaggtgaggtcggtggccccggccggcttcggccgccacggaggcggcgtccagcagcacgtcgtcaaggagaagttcgaggaggtcgacacggtctcacgcgccggcgccaaccaccaccaccaccaccatggtcaccacggcggccacggcttcgtggtgcgcgagaccaaggtcgaggaggacattaacacct

SEQ ID NO: 334982 - DNA, 64 bp, Zea mays
  unsure (1)..(64): unsure at all n locations
cggacgcgtgggttagattaaaaaaaaaaaaaaaaaaaaaaaaaaannnnnnannnnnnnaggg

SEQ ID NO: 334983 - DNA, 351 bp, Zea mays
cccacgcgtccgcggacgcgtgggccgccgcgtgctcgtcccaaccctgtcgccggcaagccatggcgtcgcgcttccgctccttcactcgcccggccgccgccgccttcctccggtccactgccagccgaagcccctccgcttcccttccccgcaccctcgctcctgtccctagggcttcggccacggggcggcgcatggctctggcgcggtctctgcaaccgctgcacagcgccgtctcggcggcccggctgacgtcgcggctgggggcggaggtggaccgggccgtgtcgcagggtacgctctgcagttcctacccgggagtctgagtctgatacagtagacaggtct

SEQ ID NO: 334984 - DNA, 445 bp, Zea mays
cccacgcgtccgtcaccttactattctacattagaaaatctatactgagtgtgaaaggaagcatataccctgttggacgttgttttcacaagttctttgttgaccttggtggatttttctcagtttgtgaatgagatgaaaataatgaccttggagccccgtcaaccatggtctacaatcgccttgtaaattgtataatagctaaagcctacatcaaagtatttataccctttacatttgcgtctggagaatttactctcttctgttttccattaatccactgtccacttactcatgagttctctgagatattgaatggaacgtaaacaatttttgtggagccttgatggatgtggattacagtttactgtatggtttgtgattaacaaattcctgctgttactcttgtctgcagatattctgtatgactcgtggtcaccagcga

SEQ ID NO: 334985 - DNA, 292 bp, Zea mays
  unsure (1)..(292): unsure at all n locations
cacgacgtcacgcccacgcgtacgcggacgcgtgggtgaaagagttcgctgctcaacaagacgacnacctgtagaatacagaagggacttaaacggtttgcatactgttttatagaactaacatcttctatgtagcaacagggatacaggtcatccaattaagtattaccaaactacgaatcccacattttggacactgctaggactgtaaatatttaacattgtaaatctaaacccaagcattctgcgatattatgcatctccgcgtcggaaatgatttctggggcgataa

SEQ ID NO: 334986 - DNA, 318 bp, Zea mays
  unsure (1)..(318): unsure at all n locations
aaaaaccggncgacccacgcgtccaacaattattaatctccataccaacatagaattttcttttcttcaccccatcccaatttcgggcttctacttatacatgaccgggccggccctcaccatatcaactatccctnacccttacctcatcaattcctctttcttatataacactttctcatcctcctcctacactactcttatctaccatcacttcctctttaacatcatccattccacccttctactatctcttcatctttcattcttctctatcctaattactaaatcactttcattttatatctacatcttaac

SEQ ID NO: 334987 - DNA, 405 bp, Zea mays
  unsure (1)..(405): unsure at all n locations
cactgattcaaaatgcaagtttaaagccattacacaccgctgtggaatcaacccagagcagtggaccattgtttggtgggcggggaatgtttcttttatgtggagtactttttgtatcaagatggaggaagcacaagacgaaagtcatatacgacttaaagaaaggccggtacattataacacacatcagctgatgcttaaccttgtgcagaagaactatatttatactacaggaatagatgttgtgttgtacaacaatgtaccagttcaattatttgtgtttttattttatgtagcatagctgggtgggtagagcattgaattttncacaaatgcgtttagaataatgtgtaaacaagtttcccttggtttaattgaaattatttttgtcgaaaaattataccc

SEQ ID NO: 334988 - DNA, 424 bp, Zea mays
aattatcccataaaaaccctttccaaacacccgattcacattcaaacaaataccgtggacatgagctccaacgacgtggggcggccccgtcgacaacgagtacaagtctcgcaccggccaatcagagatccccgtccagagcgacgaggccagcattgagcgtactgagtatgatgctggtggtgactccgacaagcagttagagaaggatgagaacgacgccattgacaggagcaacattatggatgagcgcactcgtggtgcggccaagaagcctggagcctacaccgagcccggggatgaggaggatgttgataagttgactgctggcggtcaggatggtacctctttgggccgtcagtaggagtcggatactatatcctttttgacaccacagcgaataagaattttttctatcaaccat

SEQ ID NO: 334989 - DNA, 404 bp, Zea mays
  unsure (1)..(404): unsure at all n locations
cggacgcgtgggcgagcggatcgagatggcggcgtctgatgttgagtaccgctgcttcgtcggcgggctcncctgggccacggacgagcactccctccacaacgccttcagcacctacggcgaggtcctcgagtccaagatcatcctcgatcgggagacgcagaggtcccgcggcttcggcttcgtcaccttctccacggaggaggcgatgcggaacgccatcgagggcatgaacggcaaggagctggacggccgcaacatcaccgtcaacgaggcccagtcccgcggcggccgtggaggcggcggcggtgggtaccggggtggccgtggaggcggcggctacggcggtggcgggcgccgtgatggcggcggcggctaccgtggtggcggcggctaccgtggcg

SEQ ID NO: 334990 - DNA, 193 bp, Zea mays
agggtcagttgcaaacagccaaatactccatatcatcgatcgagccaccgactacgaagtggatgatgaaaatacttgcatggctgctattgcatagcttgacaaattgttagacacggcatagtacatcacagtgcgtcaggctgctcaacgctagcctcatttctacaacctttaatagctgcatcctact

SEQ ID NO: 334991 - DNA, 51 bp, Zea mays
cccacgcgtccggtgttggcttcttttccctttccggttcgggttcagatt

SEQ ID NO: 334992 - DNA, 201 bp, Zea mays
  unsure (1)..(201): unsure at all n locations
aatncccgggccgagccacgcgtccgaaaaaaaaaaaaaaaaaaaaaaaaaaaaaaattttatttaaaaaaaaaaaaaaaaaaaaaaaaagaaaagggaaaaaaaaagggagaggggggggccccccttttaaaggatccaagcttacttacccgtgcatgcaacgtaatagcttttttatagggtcacctaaattaaatt

SEQ ID NO: 334993 - DNA, 397 bp, Zea mays
  unsure (1)..(397): unsure at all n locations
ccggnacggaattcccgggtcggcccacgcgtccgatcctattcagacaagtttctgaagattcattttgttaacaagagctccaatctttgccgggttcataagaaggccaggttggatcctttgcctgctggcagttgacaggatcttaggtttccctgctatggttagggcttagaagtgttatatggtcttcggtgaacaaatttaatgtgttttttttataaataaaaattaaactggttatgactatggcccaaatacatattttgggctgggatcgtaaggatgttgcatggtgaacagatttaatgtgttttttatagttgattacatgcatggatcgtgttgatccttgctgctgtatgatttacccaccactttatttattattatt

SEQ ID NO: 334994 - DNA, 215 bp, Zea mays
  unsure (1)..(215): unsure at all n locations
cccacgcgtacacccacacattctaaccctacaccattctctttattttctttcaccccaccaccacncctgcgttgtgtcttttaaacccgtgtgtcgcggcacataccaatccatctcctccctnctctacccctcttactccccctaccatcttatcatcattatcaaatacattattctctctcttcactcacttcacatatcctcttcca

SEQ ID NO: 334995 - DNA, 122 bp, Zea mays
aattcccggtcggccacgcgtccggaaaataatgttttgctctcgtggatctgcacgtgacgaggagagttcagttgtcgtgagcgatgtgcgttgggaatattgggatgtggtccttttct

SEQ ID NO: 334996 - DNA, 57 bp, Zea mays
aaaaaaaaagggggggggaaaaaaaaaaaggtgtagggaaaaaaaaaatatatttat

SEQ ID NO: 334997 - DNA, 391 bp, Zea mays
cggacgcgtgggggaagagaagcaggtagtgtacgacggagggagacagccagacaggacaggagcctaccagaccagaagggcatgccgggcgccccatgcaacgtcgagccgacgggccgccggttgcgctggagcgggctcggacgccggcgccgccgtaggctcccggtcgcccggctcggcggcgagagggccgggcgctgtcggtgagttctgtggcggctccggctgtgctggcttacggcaaggtggctactgcgcgcggatcgcatgctggtggcgatctacatggttgttttcgtgggctcctctgttttcatctgtgcgtcttttttcacctgtttgccgtggtttggtctgtagtcctgtttcgcaattcttttttttt

SEQ ID NO: 334998 - DNA, 376 bp, Zea mays
  unsure (1)..(376): unsure at all n locations
cccacgcgtccgcggacgcgtggggtgtttttttgcatgagaagaagaattcgcaggtgtggcaggtcatttattccagtgcgcattggcttcnaacatgggctattttacagaaggcggagttgcgacctatggttgtggaggctacgcagtacttggtgcaggtggccatggactatttttcccgggctcatgggtggcggtctagtctgcggattgattaccattagagtgtgtggattatcatctttattttgtctttaagctgtgtgcttcttaagcagaggctggaagaaatttcaagaattgtatcccctcgatgtaatgtgcttgaaattattaataaaatctttctttatcataaaataaatttatt

SEQ ID NO: 334999 - DNA, 232 bp, Zea mays
  unsure (1)..(232): unsure at all n locations
ggaanncccgggtcggcccacgcgtccggctctagccactctccacgctcccttctcccctgcaaacacactcacgcccgccgaggccacgttctatcacgttgtagagtcgtgcaccaccacctcctgactccattcatgagttccagtccattcttggcctggtcgttctgttgttcggttgggttcattattactttttttatactttttatttattcaattttctttt

SEQ ID NO: 335000 - DNA, 226 bp, Zea mays
cccacgcgtccgcccacgcgtccgcttacgttttcgcggacgcgtgggcgcgctaggtgaggactgtacagcggcacagaggtgcgacgtacgacgactactactcatgcgccacacatggcatcccagctctccgccgccgtgccccggttccacggccttcggggctactccgcgcccaggtccgcggtggcagtgctgtcttccgtgaggttgggcaggaaga

SEQ ID NO: 335001 - DNA, 56 bp, Zea mays
acccacctctctctaatatccaaacttacttctttttcattctacgtcattctttc

SEQ ID NO: 335002 - DNA, 408 bp, Zea mays
attcccggccgacccacgcgtccacgcttacgggcgattttttgatctggaggttgtagcgctcatcatcgccgtcttaggcgggatgcttcgcgccctcggttgctctggccaatctatgcgcaaggggctcaacggctggaacaaatcctcgtcgatgctcagggacgggttcggggtgaagtattccggattccttcacataatgccgagcgaggtttgtagaggagattgacagattcagccgatttgcgctcgtcttcgtcattttttttgcacccagagtttctagattttctttacaagtcctcccccatagtttttggcaattgtggcgacaagttttggagttctccccgtcggaagagattgatgagagatgtctccgttgaaccagcaacaggttct

SEQ ID NO: 335003 - DNA, 96 bp, Zea mays
agcggacaagcggcgatgtataccggtggcgcgctccctgccacgacacactctcacaacgcttacacacgaggcctagtcaacatctacgagacc

SEQ ID NO: 335004 - DNA, 103 bp, Zea mays
  unsure (1)..(103): unsure at all n locations
acgatccaagtttccttcccccttctttccacccatttgttcttccagagcggcacctaaanncaaagcactttttcaaagaccacaaggccctcactnctac

SEQ ID NO: 335005 - DNA, 350 bp, Zea mays
attttgagcattcagaaacacaccaagcgaagcgcactagcaacgacctaacaacaatggctaccaagatattagccctccttgcgcgtcttgccctttttgtgagcgcaacaaatgcgttcattattccacaatgctcacttgctcctagtgccattattccacagttcctcccaccagttacttcaatgggcttcgaacacctagctgtgcaagccaacatgcaacaacaagcgcttgcggcgagcgtcttacaacaaccaattgcccaattgcaacaacaatccttgccacatctaacaatacaagccatcacaacgcaacatgcacaacagtttctaccagcactg

SEQ ID NO: 335006 - DNA, 175 bp, Zea mays
gtccgttttccaggtcgaccacgcgtccggcctgctgtgatcatgtaccctgtcaaactgcttgtacggatggcatgacgtgacctccatgtgacaagctgatatatagcgcgaccggaatttgccgtgtaaaattactctacttattaaatagaatcagaacaggtgtttcatt

SEQ ID NO: 335007 - DNA, 454 bp, Zea mays
  unsure (1)..(454): unsure at all n locations
cggaattncccgggctcgatcccacagcagtccgcattcttcccggagtctttagtatttttagacagtatatctatatagatagaccttagagccgagtagcagagagcagggccaggccgatataatagaagtatgcagctaccttacagagaaagagctcaaagagaatagtagtatattaagtaagcaagccccttcctagggtagcaatattattcattcattttagtagccaactagggagactagacaagatatctcattttcccaggatagtaaatcagattagtctatatataaataaaaaataaataaaaaaaataaaaataaaataaaaaaaataaaaataaaataaaaaaaataaaaaataaaaaataaataatgggctggccggctctagaaggatccaaagcttacagtacgcttgcatgcgtacgttataagcctcttt

SEQ ID NO: 335008 - DNA, 227 bp, Zea mays
cgcaagcctgcgctgcgattttatgtctttctgctaccttgactctaaaaatatgcataggagtcgtaaaggagcagcgaagggcaccataaaggatctgcagtgaccaggctggcactacactgagcacagaacaacactcttcgctgactggctagtggcagcacggtggtgtggcacaggtcatggcactcggaccagcgccacggatcactgttctaccgtgc

SEQ ID NO: 335009 - DNA, 226 bp, Zea mays
cccttcctcccacccttcctcccacccttccgcccacccttccgaaaaaaaaaaaaaaaaaaaaaaaataaggaaattttaaaaaaaaaagggggaaaatataaaaatttcattatttaaataataaaaattttaaaatctttaatatttcaataattttactctatattatttttcctcttctttttttttttccccctctttttttttccattcccttttcttt

SEQ ID NO: 335010 - DNA, 81 bp, Zea mays
gaaaaaagaccagacccactctttctccctttccttcactactttctctaattttttttttacctacacttccaaaacttc

SEQ ID NO: 335011 - DNA, 320 bp, Zea mays
cggacgcgtgggatacggcgtctgcaactgtttctctcagggcggacgggggcgtggcttggagcggtctaactcgccgagatgcgggggcaaagcggttgtccagcgcccggctcctcacggcggtgacaaaatcggcagcggaacatcacccaaggctgccgctcgtggcgacttcgcgtcttccaacctgagcaagcctatcaagaagcagccgcagcagcatgcgcagaggctgttgctgcggcggtcggcgtcggacctcggcagtcgcgtctttcgtaccgacctcgactcgcctgcttcgctcggggttacta

SEQ ID NO: 335012 - DNA, 379 bp, Zea mays
  unsure (1)..(379): unsure at all n locations
ccacgcgtccnnagtctcttccncatattcttaatttttctttttttcctgaaatccttcaccctcaacaagattattttctaaaaagacatatgtctcttctctttccctttcatcttataaatcacatctcccaatctctttatttcattcatcatttcttttattctacttcttcttttttctttatctctttattaatcctttattttttaatattttttcttctctcctctctctctttcattatcttccatatactacacttcttcactctcctaattatctttttttttatcattttttctcccttttccttacttattcttccttccataaataattttacatttacctttcttcctctcctatattccct

SEQ ID NO: 335013 - DNA, 147 bp, Zea mays
  unsure (1)..(147): unsure at all n locations
accggtccagaattcccgggtagacccactcgntccgaaaagctcgacctagttattttctcgcgcttgctctacaagaaaagcaacccatcacagcgctctttcgaggcggataggacaggatctagaggtcgctagccatggcgg

SEQ ID NO: 335014 - DNA, 322 bp, Zea mays
  unsure (1)..(322): unsure at all n locations
ccgggtcgaccgacgcgtccgcccacgcgtccgnntttttttttttttttttttttttttttttttttttttttttttttttaagtgtttttttttttattgtaagttttttttttttttttttttttttttaaaaaaaaaaaaaaatttttttttaaaccaccacctttttttctaattttccaaaaaatcttttttcccccccctccaattaccaaattctattccccctcaaaacccttaaacccaaaaatttttttataacccccatcaaacccaaaaaatttttttatccccccccccccctacttatttaaccctt

SEQ ID NO: 335015 - DNA, 336 bp, Zea mays
  unsure (1)..(336): unsure at all n locations
cggaanncccgggtcgagcccacgcgtccgcaaaagctcgccgcaagtgtatacatccttaggaactagcacaggcccaagggatacacgtgctggttccaataccaccagcgcgcaccacctctcgtacattatccttggtcttcacctccacctacacctacatctcaagctaccgaacatcaggaacgagaagacagggttagactttgtcgaagccctcttcgctagtggaggtatcgaccatcactcgtcgctataccccgatggcgatcgacgatcgtgagcttccatgttatgtgttgtgatacttgagacttttattatgactatgta

SEQ ID NO: 335016 - DNA, 222 bp, Zea mays
  unsure (1)..(222): unsure at all n locations
cccacgcgtccgcggacgcgtgggcgcgagcatttcaagccgagctgcaagggcccggagcggagaccggaagagggagacttcgcttgcnatgtcaccggcagcatccgccgccgaaaccatcgtcgtcgcaatcgcaagcgtcccgagccagcagcagagcagccaccgcgccgcggcgccgtccgtcccgtcgtcctacgccgtctgggagaaagagcg

SEQ ID NO: 335017 - DNA, 85 bp, Zea mays
cggacgcgtgggcggacgcgtgggggtagatattcggagggtcgaagaaggaggatgccatccagaaccagtatgagttcctgat

SEQ ID NO: 335018 - DNA, 313 bp, Zea mays
  unsure (1)..(313): unsure at all n locations
gaaagtggtagatgatgaaccaccanaaatttaatttaaaaaaaaaaaaaaaaaaaaaaagggaagaatattaaaaacccaccgcgccggcaaaaaaaatttttttataaaaaaaaaaaaaaaaaaaaaaaaaaaaaaaaattttgccaacccctttaaaaaatcaaaccttacttccccctccattcaacgtaataatttttttttaaggtcaccaaaatacaattaactgccccccgttttacaacatcttgactggaaaaaccctgcccttccccaacttaatcccctttcaacccatccccctttcccc

SEQ ID NO: 335019 - DNA, 162 bp, Zea mays
  unsure (1)..(162): unsure at all n locations
accacgcgtgcgcccacaactgatgaaactagatcttttgttcccccgactatctcacattcgcgaaattactagactcctgggcggcctncgctatataacacaacatacctttccagcctcttcaaacttcccacattacaacctgatttgctttaacaa

SEQ ID NO: 335020 - DNA, 201 bp, Zea mays
  unsure (1)..(201): unsure at all n locations
aaaaacccgggccgaccgacgcgtccgaaaaaaaaaaaaaaaaaaaaaaaaaaaaaatttttttaaaaaaaaaaaaaaaaaaaaaaaaagggggaattttaaaaaaaaaagggggaanggcccccccttttaaaaaatccaagtttacttccccgtccatccaacgtaataatttttttatagggccacctaaattaaatt

SEQ ID NO: 335021 - DNA, 151 bp, Zea mays
ctttaatttggatcccggctggggcgtgctgcgtacgtgaagtgtgattagtcgaaggtggcctgatttgagatgtgcatgatgatccttgtgtaattttattaccaagtctcttcttatatttacatgttcatttgcttgcttcttgcat

SEQ ID NO: 335022 - DNA, 350 bp, Zea mays
  unsure (1)..(350): unsure at all n locations
acccgggtcgacccacgcgtacgggtcgtcgtcgaagctgtgttgcgtctagtatttctactgagccnnacngnccnatgactgtgcntatatagctccccgctggcctactcangacncaataatctaatgtttagagcttaccaggttttacagctctatcagtttacttttgtttttctgctcttcgttttttaagaattatttctattgtgtgaattaattagtgctttccttctagttttctgatcaaaaaaaaaaaaaattggctgtcgcttctagacgatcctagcttacttactcgtgcatgctactgcatatctcttctatattttctcctatatttaatt

SEQ ID NO: 335023 - DNA, 106 bp, Zea mays
aaaaagagggggggggggacaaaaaaaaaatttttataaataaaaaaataattataaaaaaataaaaaataaacaaataaataaaaaataaaaaaaggggggaatt

SEQ ID NO: 335024 - DNA, 256 bp, Zea mays
aaaaaaaaaaaaaaagaaaaaaaaaaaaaaaaaaaaggaaaaaaaaaaaaaagaaaaaataaaaaaaaaaaaaaaagaataaaaaaaaaaaaaaaaaaaaaaaaagaaaaaataaaagaaggaagaaaaaaaaaaaaaaaaaaaaaaaaaaaaaaaaaaaagaaaaaaaaaaaaaaaaaaaaaaaaaaaaaaaaaaaagaaaaaaagaaaaagaaaaaaaaaggaaaaaaaaaaaaaaaaaataaagaaatgaaaa

SEQ ID NO: 335025 - DNA, 84 bp, Zea mays
gggatgatgatccacaatcccatctaaaactaaaagagttaataaagattgttaaggtgagggaaaaaaaaaagagaggggggg

SEQ ID NO: 335026 - DNA, 112 bp, Zea mays
aaaaaaaaaaaaaataaaaataaaaaaatatataattaaaaaaataaataaaaataataaattaacaaaaaaaaaaaataaaataaaaagaaaactaaaatatattttaatc

SEQ ID NO: 335027 - DNA, 482 bp, Zea mays
aaaaaggccgccccacccttccaaaaaaataaaaaaaaaattttaaacataaataattaaaacaaaaaaaaaaaaaaaaccgggggttttttaaaaaaaaaccggggaaaaaaaaaaaacaaaaaaaaaaaaaaaaaccaaaataaaaaaacacaaaaaaaaaaaaaaaaaaaaattaaaaaaaaaaaaaaaaattcccccccccctttaaaaaacaaaaaaattccccccccttcaaccaactatatatcttcttaatttggcccccaaaaataaaatcctcccccccccaattaaaaactttaaacataaaaaaacctcctcattccccattaaaaaatctgtacaaaaataatcccttttcccaaactcttaaaaaaaaaaaaaccctacccccaatctcccttccaaaaaaatgccctccctcttattctaaaaatcaccccccctctcttaccccccatataaactccccctttttt

SEQ ID NO: 335028 - DNA, 54 bp, Zea mays
acggtctccctcttcctttcaataatttttttaaaattaagccaccaattagaa

SEQ ID NO: 335029 - DNA, 446 bp, Zea mays
ccgacccacgcgtacggacgtcatttaacaatatttcaccggtttatgtcatctcccgcctcacctaactccgccgcccctattttgcagaggcggcgggctatataaaacataacaatttctatcaccatccattcatgatcaacaaggactgtgccaactcttgcgttcaacataaccttcttttcttcagatattgcatgcacaagatcccatttaacaaataatgcatgtttacatttgaatgcccatgagtcaaaagccactatatcttacggacgcaacttgttatatatctatcgattgtatgtcatttggcatgtactccattttaaaagttatcaatttagactttatacatatattcattcgaaatatgctattaattcttaacaaataacaccttttattattattaccaactaatttactaaattatatatatt

SEQ ID NO: 335030 - DNA, 288 bp, Zea mays
atccggtcgaccacgcgtcaccccgcaccaccgacgctgggatgaaggccgtgccagccgacagccggccccgggccgatccgcgaccaagatcaccattcgtttcggggggcggcgcggagcggctctgggaagggcggacaggttgggctggcgcatcggctctgccttggccatgtcgcgctcgctactcgtggtctctggtgactgctcgctacggaccgacgcccgtcgcgacacctgattctggaggagagagggaatagtggacaatggggacagtcacac

SEQ ID NO: 335031 - DNA, 267 bp, Zea mays
gagaaacaggaaagctctgtacatcttatttcttctatactccaattgctttgaactggatgggtcataaacctatacatcgatccatatcaaagcaattggagtatagaagaaataaggagaaacaggaaagctctgtacatcttgcattttgctgttgtttgtcgaagtttcaatgtctgtcgcgtgacaaaatatagttgtaatttatattttggcatgcacgaaacaggtgtatttattcatttttgaacgaaattttatgtc

SEQ ID NO: 335032 - DNA, 341 bp, Zea mays
cagagcgcacttgctcctagtgccagaattacacagaaggggggggggggactaaaataaccttctaacatccagtcgcggaagagtagacgggagaactagcgctagcggagagcgcgtaacaacaacgaagcgaggaaccccctgatgagcaggaacctggagaggaatggcaagaacaccagcatgacaacaacaacaacaggtgctggcaagaacgagacacctagccgcggagaacccaacacttaaaggagcagaaagcgtccgaccaaaacagaacaggcgtaagggctcttcttctaagcatcggcaggagctggccaattcccacgcccccg

SEQ ID NO: 335033 - DNA, 439 bp, Zea mays
cggacgcgtggggactactcgaggaaggagtgggggtcgcaaggttgctccaggaagagacccgcccgcgctgcggccagagattgatggccaggcggcagagcaacggcgcggcgggcaggcggtcggggccgagctgtgcccgacggtggcgttcgaggggcatgccgttgctacttggggaagaaggccaaaaatcgatctcagtgcgtggctccggcgttgtagatctgctcgcgtccgatggcgtcggagatgcaggcagtcgcgtgcacgcgcgggctttgaacaaccagatctctggtgtgctggccacgcctggtgacggccagccagctgcacgtgcgatggccacaccctggccacgccccgtgatggccagccagcgggacgtgcaatggccacgccccgtgatggctccggcgaccacgaatcgtcg

SEQ ID NO: 335034 - DNA, 148 bp, Zea mays
cgaccgacgcgtccgaaggaaacaccgccgccgccgcgccttccattttagtactcgcggaggaaaggaacaccaggcagcgccatggtcacgtgggggaccgccgtcgtcgtgctgtccccgccgtccgtgggcgggcttttttggg

SEQ ID NO: 335035 - DNA, 213 bp, Zea mays
cccacgcgtccgttttttttttcgaaagagcgcaggaggactgcgcacccatatattaaaggagagggaaaataaagggccataatgatgatatccatctatctatctatgtaactggtttatgtaccatgtacctgtttatgtaactggttaccagtgttatccatctatctatctatctgtgaagacttgagtcttctaaattatgaaaaa

SEQ ID NO: 335036 - DNA, 289 bp, Zea mays
taaaaaaaaaaaaaaaataataaaaaattttttttattaaaataaaaaataaaaataatattgggtaataaaaaaaaaggcggccggtctaaaaaatccaaacttacttaccccttcattctacatcataatttttttataatttcacctaaattaaaattaacttccctccttttacaacatctttacttgaaaaaccctttcttttcccaacttaatttctttttaaaacattcccttttttccaattttcttaatattaaaaaatccctcacctatctccctttcc

SEQ ID NO: 335037 - DNA, 327 bp, Zea mays
aaatccccggtccggcccacccttccgaaaaaaaaaaaaaaaaaaaaaaaaaaaaaaatttttttaaaaaaaaaaaaaaaatataaaaaaggggtggaatttaaaaaaaaagtgggtgggaaaaaaaagccctccctttttaaaaaaccaaatttaacttccccttccttccaactaaaaattttttttatagttcccccaaatttaatttaattcccctccttttaacaacttctaaactggaaaaccccttcgcttacccaacttaatcccctttaagaaaatccccttttctccatcttcccaaaaaccaaaaaacccctaacc

SEQ ID NO: 335038 - DNA, 448 bp, Zea mays
cggacgcgtgggtctggtatcattggaatttattcatcagtttgacaaataacggcttaggggcaccagaaaaagaggggggcatgattccacagtccgtgcagtgtcgtggtttaaggatattgaaatggtgttcgttgttctggaccgtttgaagactaaatatcttcagtcatgtatacaataaatcttacagtcggtgaggaaattgcttgttaaatcttgcatttacttatataactggtttccagcagcaataagtctatatgtaaaacttcttgatttgtatatgctatgctttctgtggagcagggatacttactcttttttttttacttattttgtttttattttatgttatattttcattattttttttttaatttttttatacttatttttattgatttattttttttttttattatttattgtgttccctttttta

SEQ ID NO: 335039 - DNA, 182 bp, Zea mays
ccgggtcgaccgacgcgtccggatagaggtgcaggtcggaagggtcgacatctataggaccgtgtcagagctcatggaccaagggtcgtcgtcggcgatgcgcgcgagggctaaagagctcgctgcaaaggtgagagccgcaatggcgaaaggcggttcgtcggacgcccacgtgaaagaca

SEQ ID NO: 335040 - DNA, 217 bp, Zea mays
cggacgcgtgggaaaaaaaaaaaaaaaattttttttaataaaaataaaataaaaaataaattggggttaattttaaaaaaggggtggatataaaaaaaaattatttaatattaattttaaagggcggccttttttaaatatccaattttatatccctttctttcaatcttattttttttttatagttttacctaaaataaattattttccctttttt

SEQ ID NO: 335041 - DNA, 267 bp, Zea mays
cggacgcgtgggcggacgcgtgggcggattcttgggcggacgcgttggctgaaattggggaaaacttgaagtagggtggtaaaaaaaaaaagggatattaaaaaaaaaataaggaactttttttctaataattaaaatcatttttttgattttttttttaaatttttaaaaggattaatttatattttttaagggtgtgaaaaataaaattattaattttttttttttttaaaaaaatttttttattatgttaataatttttgtaat

SEQ ID NO: 335042 - DNA, 67 bp, Zea mays
cggacgcgtgggcccctacgcccgtttctcttttgttgcgcaacatcagaacacaagcgaggaaccc

SEQ ID NO: 335043 - DNA, 375 bp, Zea mays
  unsure (1)..(375): unsure at all n locations
accggnnncggaatncccgggtcggaccacgcgtnccgcggacgcgtggngatacggtcgtctggcaactgtgttgcctcagggcggacccgggggcgtggctgtcgtacttcnntaactcgccgagagtcgcgccggcnnaaagcggttggggtccagcgtcccggctttctctcacggnncggtgaccaaaannntcggcagggcggaaccatcanncccaaggggcttgccgctcnngtggcgacntnntcgcgtnncttccaacccnntgagcaaggggcctatcaangggaagcagcncgctagtncagcatgccgcccagaggcttgttgctntgtcggcggtcngnngcgtcggaccccctcggcagt

SEQ ID NO: 335044 - DNA, 139 bp, Zea mays
ccggtcgaccacgcgtccggcaaagctagcaccttccttctccttcgctctacaagctcgatcgaccgacatggcctagaggacgaacgcgatggcggcgccgcggccgcttctgcgccggatgcttttttttctggag

SEQ ID NO: 335045 - DNA, 111 bp, Zea mays
  unsure (1)..(111): unsure at all n locations
cccacgcgttcgcccacgcgtncgtttactttttcggcaaggacccctgatgctacagcaggatctgctaaagttgggcgtggtgagaagcacataaaagctctttttttt

SEQ ID NO: 335046 - DNA, 71 bp, Zea mays
aaaaaaaaaaaaaataaaaaaaaaaatttttttttataaaaaaaaaaaaaaataaaaagggggggtttttt

SEQ ID NO: 335047 - DNA, 139 bp, Zea mays
gtaccttccggaattcccggtcgacccacctccctgaccgttggcttactcgttggatttctttcacaaagtattggtgtcaatcctgaaagcactcttactcaaaacgggcggacatcttaaccttttaatatttttt

SEQ ID NO: 335048 - DNA, 318 bp, Zea mays
agttgaagaagttgtctctcaagctgagaatccaccagcgaagaataacttctacttcgacgatctatggagtagacccagagcctcctgcaacacaaggcaagccccggtgatgaaacagccaagttctgttgtttttgctcaaaggtgatgccaaagcaggaggaagaacactaaacttgtttgggggaggatgttttgtttcccaattatgtaatattaagttctgcactcgaacaccttgttatgtaataagtactctttctatattttataagaatgtaaattatgttattggtgaaaaaaaaaagttaattt

SEQ ID NO: 335049 - DNA, 275 bp, Zea mays
ccacgcgtaaaacactacacgacaccaattttagcagcttgttatgccaccaataatgactctcattaactgcagcatcttcaagatcaagcgcgccctaaaacacccgcaagccccctccgactaatcaccgacgaatcgtttgcatctgtccaatcccaagggccaccacgccgatttactctaactggcggccgtattcgacgtcacggtcaccacctattctgtcaaggccactatcttcgatcactaccttaagaaaaacaaggccaaca

SEQ ID NO: 335050 - DNA, 257 bp, Zea mays
cggaggaaccggcccggaattccggggtggaccacacccttccgcccacccgtccggtcctttttttcaaactttttttgccaagagcacaaggccctgaccttgagccagttttgggccagggggggggaaaccgatttaaggtttacactggtaaaggtttaattaaccgacaactatacccctgaaagttattacccccagttggtactaacaaaggagggagattggcttagcgacacaggcaaagtgtaaag

SEQ ID NO: 335051 - DNA, 293 bp, Zea mays
ccggatcgaccacacccgtccgccacacccttccgaaaaaaaaaaaaaaaaaattttttatttttttaaaaaaaaaaaaaaaaaaggggaaaaggaaaaaaaaaaaagggggaaaggggcgccccttttaaagaatcaaagttaactaccccgggattgcaaggtaaaatttttttaaaaggggacccaaaattaaataaatgggccgcggtttaaaaacgtggggactggaaaaaccttgggtgtcccaaattaaatggctttgaaaaaaatccccttttttcaagtggggg

SEQ ID NO: 335052 - DNA, 122 bp, Zea mays
gaattccggggtggaccacacgcgtccggtcgaggagttcgggagggcaccaataagggccggggtgaactccagcgtcgtcgggttaaagcccgccgcggaagtgccgaaggccgccgccg

SEQ ID NO: 335053 - DNA, 295 bp, Zea mays
aacggccggaatcccggtcgaccacacgcttccggcactagttttagatcgaagcggttccttattttttgaaattttcaaccgttttaccagtggacagtattagtggtcggggtgggaacccattcaagttaagggcttgggttgcgtttggactccagggcaaaattgtcttaaggatttaaaggaaaagcggactttatttgagctgggcataattaaaggacacccttgttgttattgttagggggccaattgctcacttgaaatttaggtattgttgtttcccattgta

SEQ ID NO: 335054 - DNA, 275 bp, Zea mays
gtcggccggaggaaccggtccgaaattccggggtggaccacacccgtccggccaaaggaatcttttccaaaaaaaaggttgttttgaaattctttttgaccagggcctggttttttttttgggacatttaatacaagaatacatggggatgcaatagtttcaaaaaaaaaaaaaaaaaaaaaaaaaaaaagggggggccgttttaaaggatcaaagttaacttacgcgtgcatgcaaagtaaaagtttttttttagggtaaccaaaattaaatta

SEQ ID NO: 335055 - DNA, 308 bp, Zea mays
aaaaaaaataaaataaataaaaaataaaaaaaaaaaataaaaaaaaaaaaaaataaaaaaaaaaaaaaaaaaatataaaaataaaataaaaaaaaaaaaaaaaaaaaaaaaaaaaaaaaataaaaaaaaataaaaaaaaaaaaaaaaataaaaaaaaaaaaaaaaaaaaaaaaaataaaaaaaataaaaaataaaaaaaaaaaaaaaaaaaaaaaaaaaaaaatataaaataaaaaaaaaagtaaaaaataaaaagaaaaataaaaaataaaaaaaaataaaataaaaaaaaaaaaaaaaattaataa

SEQ ID NO: 335056 - DNA, 217 bp, Zea mays
ggccgagcacacccttccgccacacccttccggccacagtgtattattaacactgatatcttttacttaagccaacctctatttgcctccaaaatactaattaacgcgcagggcataaacataataaaggccaaaacctcaaaaaaagtatgggccctcaaccttgtgaagctaccaagaatcttaaaagaaggtttcattatccttcccatttttt

SEQ ID NO: 335057 - DNA, 428 bp, Zea mays
  unsure (1)..(428): unsure at all n locations
cggaanncccgggcggaccacacccttccgccacaaacacacttcaacaagttttacccgcctctaatccgaacggnccgaatggcgcaaaaggatcaaattttcctagtgcagcttcaattccttaaagttctttccccggatgcacttccggaacaactttttttaggaacacggggcgcattgcaaccgtgttaggatttttttctagaaatttaacttggttcccttatacttttataatcctttattcctaaattccatatcttattttttatactcttaaatttatctttaatatgtatttaattttattttttataattaaattattagtcttgttttatttattaatatattttttttatttttatatttttataatttatttattaattttttttattaattatattattatttttaat

SEQ ID NO: 335058 - DNA, 445 bp, Zea mays
  unsure (1)..(445): unsure at all n locations
cgaaaacccgggccgaccaacccttccggaaaaaaaaaataataaaatcaataccactgtgtttcctcctaaantttcaaattcaatccgggaaatttccaaggcaaaatgttttaaattctaaaaaaattttcaaaaaataatcaacttcttaatccacactccaaagaataattataatccaaatgattccatctatccattttaagttttccttcatcttaacctttttcattttaatcttttgtcccattttttttttaaataaatcactacattcctccaacttaccttttttttattttcaatttcccctttattaatccacaatccaattttaatattttatttaatttaatatcattatattttttattttctaattatttttaatttctttttttatcctcctttttatttatttctttattatttatcttttttt

SEQ ID NO: 335059 - DNA, 377 bp, Zea mays
cgaaatccgggtcgaccacacccttccgccccccttccgcaacggtttggtgtattacttttgttcgttctgatttttaaccggctttttgttttaagaatgggggggaccctctaaataataaactgcatgtattttgtccaatccattaaggaataaattgtggccagcattttggtttacttaaaaaaaaaaaaaattaaataaaaaaaataaaaaaaaaataaatattattaaaaaataaaattaaaaaaaataaaaaaaaataatttatggggttccccttttaataatccaacatatctaccccttcattccaatttttataatttttttttggttctccaaaaaaatattaatttgcccttttttttaat

SEQ ID NO: 335060 - DNA, 198 bp, Zea mays
ccgggccgccccacccgtccgaaacctaccccttcttaaaggaaggccttcctttattttttcttaaacctaatcgccccccacggcaagtttatttaagaagggggccggacatggaaaaagtgaaaaccttggcttccggcaattttaccggcccgctcactcttgcttaataataaatatttatcctttcctttc

SEQ ID NO: 335061 - DNA, 315 bp, Zea mays
  unsure (1)..(315): unsure at all n locations
aaaacccgggcggaccaacccgtccgaaaaaaaaaaaaangaaaaaaaaaaaaaaaattaaaaaaaaaaaaaaaaaaaaaaaaaaaaaagagaaaaaaaaaaaagagaaaaggagaaaaaaaaaaaaaaaaaaaaaaaaaaaaaaaacaaaaaaaaaaaaaaaaaaaaaaaaaaaaaaagggggggccccactaaaaaaacaaaatatataaaccctagatacaaaaaaaaaaaaataaaatataagagaaacaaaaaaaaaaaaaaatgcccaggataaaaaaacataaaaagaaaaaaacccgggttccacac

SEQ ID NO: 335062 - DNA, 265 bp, Zea mays
ccgcaccccccgaaaaaaaaaaaaaaaaaaaaaaaccaaattttattaattaataaaaccacaaaaaacccggtacctattaaaaaaaaaacgccttataaaaatccaaaaaaaaaaaatattgcccccccttaaagatcccaattctttctccccggtccatcaccgtatatttttcttttgctcccccaaaaattaacccaatggcctaatttttccaaacggcctctttgaaaaacctctcccttcccccaaaaaaatatct

SEQ ID NO: 335063 - DNA, 423 bp, Zea mays
  unsure (1)..(423): unsure at all n locations
aaggggnggaaaaaaaaaaaaaaaaaaaaaaaaaaaaaatataattaatataaaaaacacaaaaaaaaacctggtaatatataaaaaaatttaaggccccatcccattccataaaaaaaaattttttgtgtcctcccctttaaaattcccaattttttccccctcgttctcgaatcataaatctttttttattccccccttaaataaatttttccgccctctttttaaccaaacccttactttaaaatacctgttttcccctaattaaattttctttacacaaattccttttttctccattctattttatcctaaattatcctccctcctttctttcattaaaaaaatattaaataccttttttgtcttttttattcttcccctttctttctctctctaaattccccctttatttttttctat

SEQ ID NO: 335064 - DNA, 481 bp, Zea mays
acgggccggaattccgggttcgaccacacccttccgaactttataaacaataattaacagattaaattattcctttgaacgaccgttaacagggaagggtgtccatagccttggggggggtttaactgttttgcaactaaattaagttttcaatgagtccaaacttaaatggaaagaatttttttggcccttgccaaaaactactttaaagcttgcagcctataattttgttttaaaatgttaattccaacatgctactactgttgttagtaaagtagtcattttttttaagttgatttttttgatagcctttacatgccttcaattcaataccgattttaactggatccgatccatgccatgccatgccccttatcctgacttccagggctcggcctttttattccagacaaacctgtgcttggtcttttactggatcgtgttgtcgttttatacattattatttttttttttttttttt

SEQ ID NO: 335065 - DNA, 451 bp, Zea mays
cgaaatacccggtccgaccacacccttccaccaacccttcctccaacccttcctttatccctatttttaaaattctatcccaatattacttgtccaattttaaccaagaatcgtgctaacaaaaatttaatatacattaaatatcaacataattaaatattccatttaaattaccaaaaatttaaaattaatttaatttctatatttttaaatttttaaacccatctatatttttcattaaaattatattatatctttattaatattttactatcttttattatcattaatttttttatatattattaattatctcatatcaattatataatttatatataaatatatatttctttttataatgttttattatatattttatattattttttataattataactttacttaatattctataatataattttactttctactatatatttta

SEQ ID NO: 335066 - DNA, 361 bp, Zea mays
gacccacccgtccaattggccaatataaattaactaggcctgatcttttattctttcccccatacctctaattcggaactcgctcccttcacaaaagttggggggtttttaatcaaaatcctttttttccttaaaattaaactttaacttcttattcctccttaaataattttttctttccctccaaaaaaaattaattttaaaaattaattttcttcctttttaattattccaaccttactatttctttcattcttttttatattttttttttatttttatcctaaatttatttttacattcctattttttacaattctttttttccttttttaatactcttttcttatttcacttatat

SEQ ID NO: 335067 - DNA, 303 bp, Zea mays
cggaattccggtgtcgacccacccttccgcccacccgtccgagcccaccagctaattggcttgtctccgtccgccggccgtccgtggtcaggcaaagattcgtttccttttgggggctcctatcctttccttccttcctgggaacctttcccctgaaggcttgccttttccctgttttgggatggctattggtggcgcctttatgttttttgtttttttttttttttcttttttctattttgtttttctttgttttttatattattttctcttttgttattttattttattatctttgttttt

SEQ ID NO: 335068 - DNA, 183 bp, Zea mays
cgaaattccggggtcgaccacacccttccaaccttcccttttcctccagcacaattttttataatccacttttaatccacaaccaggagcggtttttttaaaccagaggttggaacccaataaccataatatatttccaaaacatcccttcctataatttatttaactataccaaattcccaa

SEQ ID NO: 335069 - DNA, 361 bp, Zea mays
aacgggcccgaaattccggggtcgaccacacccttccgttccaaatccacccacaaaacctttaggagccttattttttttaattcgtaatagcgcggccgggagtttccgaatttggatggggaaatgcttttcctgaattgaaggatgcttttggttccgatgatcccagactccaaaggaaagctttaaatttaatccaatacttgttgaacaactccaaggcaaccaggagtgttgccacaaagcttggttttccaaagctgatgatccaccttgggtccagcgatgattccttagggcgtgaagctgttttaggcggcctccttgatttgccccggaccaggacatttgttaaccc

SEQ ID NO: 335070 - DNA, 249 bp, Zea mays
ggcggaccacccgtccggcggaaatacataaaggaagattggtggcctattccttttaagtccttaaacaataaggttgcacaatagattttaaggaaatgaaaatgaggataatttgaatggtgataataacaataaaggcgattatttgaagaactgaccccttgcccttggttcaaaatgttgtccgtggataatgtggctggccggacactgaacctttttggaagattttttgttgtggttgtt

SEQ ID NO: 335071 - DNA, 113 bp, Zea mays
  unsure (1)..(113): unsure at all n locations
cccggaanncccgggccgacaggctcattaaagggcccttttagaggatccaagtttacttccccttgcttgcaacgtattagtttttttttggggtagggtaaattaaatta

SEQ ID NO: 335072 - DNA, 294 bp, Zea mays
  unsure (1)..(294): unsure at all n locations
cggnccgaaattcccgggtgggccacacccgtccggggtttcccgaacttccccgccatttacaaattttacagcaacggaatccccttgccggcggagaccggtttagaggccatggggaaccttcttcccccccatggtaaagctgtgggaggacacaaccgaccacgtcctccgttttaaggggccgaaaataataaaaaggaaccgttctttttggttaaaggtcaaggagtttttaaggcaaactatctctgggttaaaccctttgtgaatccatattttatctgtttt

SEQ ID NO: 335073 - DNA, 313 bp, Zea mays
  unsure (1)..(313): unsure at all n locations
tccnaaaaaaaaaaaaaaaaaaaaaaaaaaaaaaattaaaaaaaaaaaaaaaaaaaaaaaaaaaaccgggaaaaaaaaaaaaaaaaaagagccccaaaaaaaaaaaaaaaaaaaaaaaaaaatggcccccccccccaaaaaaccccaactaaccccccccgcccaaccacctaaaaacctctttaaaagggcccccaaaataaaaaccccgcccccccttttaaaacctcctaaccggaaaaacccctcccttccccacctaaaaacccctcaaaaacaacccccctttccccaattccccaaaaaacaaaaa

SEQ ID NO: 335074 - DNA, 464 bp, Zea mays
ggccggccacacccttccgttttaatttaaagagcgactaaattgaggaatataccaagcgataacctaatttggaacgcgaaatccttcctcaaggggggggagcctcttcccccgccgcccagaaccatttgaagctgatccctggcatccccaacaacttgtccttggactgcttggccccctttctctaccctttcaaccgatcaaatcgctgggttttctcttgttttctttatccctcttttattatattttctttctttttaattttattatttttattatattactcatttttttaattttatttttatattatttaatgtgtttgggtgttattttttattattaattatattcattttttaaatattttcatattattttaaatttttattatttttttaatttatttttctttttttatcttatttattctatatttatttttttattttttt

SEQ ID NO: 335075 - DNA, 218 bp, Zea mays
gggtggaccaacgcgtccgccacacccgtccgcccgggctggttagttccgttcaattggcccgcctaacctttagcctcggggccaggggaacagtggcgatgctgatgcaaggccccttgttagtgacggactgtaccccgacgggcgtagggtggttgtcttcgtccgggcggggtcggttgggcccggcggtcgggcccacggggaagcggggc

SEQ ID NO: 335076 - DNA, 253 bp, Zea mays
  unsure (1)..(253): unsure at all n locations
cacacccttcctaatcaatctatttctattccccttttcaatactccaaagaatcgaaccctttccagtgccctgtttcattataaattgcctcggcaacctatattccaccnnaaacttttttctctttccctcctttttttttttttacttatttattttttttatacattcttttttttttttttctttcctttttttaatttttatattttttttatttttttttttcatttttttttcttttttatat

SEQ ID NO: 335077 - DNA, 309 bp, Zea mays
  unsure (1)..(309): unsure at all n locations
cgaaancccggggccgaccacacccttccgcccacccttccnttttaacttttaatgtcatttttcagaaaatcttaccaaaattgaaggtggcttttatcccattgggtttgaacttccnaaaccaaaattccaatataaattttaaagttaccaaatttgtaaaaaaatgtaattatttttttccaactaatttttttaatgttcccccataatttaacatgtttaacctttttaaacacctattatacactttttatttcacaactttttacaataacttttaattttacttaaaaaatttctttt

SEQ ID NO: 335078 - DNA, 373 bp, Zea mays
cccttccgaagttcacctgaaccaacaagccctcccaaattttttttaacaagttccagaactctctcaatcactagaaggttcctaacctttcggggtccacacttactttaatcggttcaaaccttaaccactacatccgaaaactgttttacaacgggttgatcaattccaccatgagttccaaagtcttaaatttaagcatggccaagccttccataaagttcaacagcacccatttcccataaaagttattgaatttccttatccaacccccttaaaaaaatggtttttttccattcaattaccaaccaaaaatttttcttttgcattcccaaatactatccaaaccattccaaattataatattccc

SEQ ID NO: 335079 - DNA, 159 bp, Zea mays
aaaaaattaaaaaaaacattccaaacatatttttccaatcctgaaaaaattgaaaattttaaactataatttccaattacttttaataaattcctttttaaaaaacaacattttatttatttgttttttactaatataaatttttaatattattttttt

SEQ ID NO: 335080 - DNA, 415 bp, Zea mays
  unsure (1)..(415): unsure at all n locations
cgaaatncccggtccggccaacccttccaaccatccaaacttccaagttaccaacaactgttccagtttttttccaaacaataattgaactgaaaatttaaaacctttatgggcaaatttttcctaaaaggcctgttttcccaccgaaaccaccaaaagtttaacaatctatccattaaaatttcctaaaactacacttttccaaactaaatggaattaacaaccttccaatctgttggaatatattgcaacctagtaggattaaaatatttatttcaaaattaaaaaaaccttccattgaaattttctaaaatcccttttaaaaaaatntaaaactcgtatgatcaatatataccacaactnttatttaattctatggtataatttttatacaatttacagaataactttttcc

SEQ ID NO: 335081 - DNA, 269 bp, Zea mays
ggggccgaccaacccttccgcccacccttccaaggtaatcaacatcaccattttcaacctttgcccatccaaatggtcccagcagggccaattttgaggttattttccccacccccaatttaatccgaaaccccttcttggaacgtcgtaaaatggtcttgaatgtcttcaacccaaaccggccaaacgtttcaaaggacaagctccttggaaagctcgttaagctgtccaaggccaaaaaggacaatttttccgttttcggtttaaaa

SEQ ID NO: 335082 - DNA, 287 bp, Zea mays
  unsure (1)..(287): unsure at all n locations
ccggaanncccgggcggaccacacccgtccggccaactaaccctacaaaaaactttccatgtctacttttaatgcttcgcaaccgcaaccaaggtgttggtcggtttttctgtgatgaagaagtaaatgtccttaaccgcagtttcaatccaagctaatattaaatttggtgtaacgtgagccctcaaaataaaggttccacatgtttaaatggttttaatgtcagtcctaacctcaaaaaaaaaaaatatattattatataaatttatatttattaatatatatat

SEQ ID NO: 335083 - DNA, 283 bp, Zea mays
ggggggaaactgcctaaaaaatatttaacaaaccattttaccaattccggccaatctttcctttggagagtgtgccaatttttgagtggaccaacctttaatctcctccccaaccagttttttaatcacctaaccaacctgcttcaccatcccttctctttccaaaccttccccaacttcccatttaaaaccttaaaaaaaattccaaggtttataccaattccggtgattcctcccaaaaggaaacccttaataaaccttagccaccccaaaaacccttttt

SEQ ID NO: 335084 - DNA, 499 bp, Zea mays
  unsure (1)..(499): unsure at all n locations
cggnccgaaatacccggttccgccacacccttccaaaaaaagttttttccttccagccatccaaattctattttccccccccccccaaaggaaaaaggagacttataaggtgttgtttggtgcaaaaaaaacttcccttaatttatattttgttatggttttccttaaacattttttctcatttttttattatatttatttttttttttttttaaatttatattattatttttatttttattttctttttattattttatttattctttttatttaattattttttatttatttttttacttttttactattataattttatttttattacatattttattttatttaatattttattttgttgtttgttgatattattttttaatttattatttatttatatttattttttttatttatcttatatataatttttttttttttattctttttttttaattatttttattttattttttattctttttttatattttat

SEQ ID NO: 335085 - DNA, 331 bp, Zea mays
  unsure (1)..(331): unsure at all n locations
aaatnccggggccgaccacacccttccggttgtgaccaatcgccactttccaattacttccgttccggagggaatcatgaaggaggggcggcaactgaaagcgggggcgttcggttttccgcccccggtccacccggggcccacccccttggggtggatcggcatcggcttaatggccgggcccttggccaaccccttcttctcggcagggtccccggtaaccggttaccctcgaacgccgtccagggcggaaagccttttctcggcggccccaagctctccggactttccgtcctctttgtcctccttttccacactggtttttaccatg

SEQ ID NO: 335086 - DNA, 401 bp, Zea mays
cgggccgaccacacgcgtccggcagggcccaaaattaagtggcctttttttgaaaggtgtaaaatgctgaaagataaaatatggcgcggcgttttttttgagaaggatgggtttcaaagtgtttttataaccattccgttgtccaaatttaacttggatttttttccggttaaaaaaaaaaattttgggttgttttcaacagtaaaaagggttttaaaggggttaattccatcctttggccatgatcttgatggccttttatttaagggttggtacaatccttatgtaactcgaactaattaaggtttcctgaagtgtaaatcccttgggatgaattttttgtattttcttttccgcctttccaatgtattcttttacttggttttcttttttgagtgggt

SEQ ID NO: 335087 - DNA, 373 bp, Zea mays
cggggccgaccaacccgtccgaaaaaaaaaaaaaaaaaaaaaaaatttttaattttaaaaaaaaaaaaaaaaaaaaagagaaaaaggtgaataaaaaaaaaggggaggggtaaataaaaggggcccccctttttaaagaaccaaatttaccttccctgtctttgcaaattataatttttttttttgggcaccaaaaataaaataaattgcccgtgttttaaaaactttggacttgaaaaaaccttggtttacccaaattatatctttttgaataaaatccttttttttcaagttgggtaaaaacaaaaaagtccttacctatattctctttccaaaaatttgccaactttaaattggaaattggaacccccct

SEQ ID NO: 335088 - DNA, 140 bp, Zea mays
acacgcgtccgccacacccttcctcccacccttccaatgttgcattaatttttacaaaaactaatttaaaccatggtattgggacgtttacccaggagttagcacaccaaactatcaatggatccaccatgaggccgggg

SEQ ID NO: 335089 - DNA, 434 bp, Zea mays
cttccggggtgtctaaggatctcctgacctccttccttcttgtccttttcctcccttccccggttacggaggtcctgttggttgctacggagaattactacaacaacaacggcaaggagaaaacaagtaaaccaaaatcttcttaacctaagaagcctaaccgccaattgaaaactttggccggttgttagaaaaaagtgcaaaattgccaaaactagtacgccgacaacaacaagcagaagtttgccggtttccaaggagggcggcaacggcaaaacaaccctttccgggttcggctttggcggcgtgaaaaccaaggtgctgaaccctttccaaaccaatttttggcaggtgcaaacctttttggaccaaaaccgcttcctgttcagggggatcaaccccaaccacgagtccaaggggcccgggaacttttc

SEQ ID NO: 335090 - DNA, 323 bp, Zea mays
  unsure (1)..(323): unsure at all n locations
ccgggccggccacacccttccgatttaataattatactttgtccaattttaccattaatccaaccttattaaatttgggcctgtgccacttttactatgtgccggggataaaaaaaaacnaanccatttaaaaaaaatccttttttttcttttaatttttaacaagaatcccttccacttttcccaaaatgctttttccaatttacaaacccacagttgtaccattaactacctaatattttttttttttaaagtaaattttttttgtttccattaaaccctttttttttttttttaaaactattaaacaatttaccattttt

SEQ ID NO: 335091 - DNA, 298 bp, Zea mays
cggggcggcccacacccgtccgttaacatttaatggggttggcaaaagcccattttgtttgttgattatcccacctggccattggctgttattaaggccattggatggggctggcccgttttcaaatggctctacataattgccttttacttcctgctgcccataataaatttcctaatcctgctttaccctaagtaggagggcttggaacctcgcccttaggaaaacctagggggtgccccgtccattgcaccggaagaattttcggttttgcctcgccccatatttgaccggatgt

SEQ ID NO: 335092 - DNA, 359 bp, Zea mays
tccccggccgaccacccttccggaagctgttgatgaaggcaaggcatatctccttcccctgcccgaagctgatcctcccgagggggaacctaactttaaggagggcccagccttccccagccccggttttgcctgcagtaacagaggacaacggcccgaactgggggtgggtgtcggacctgggattgaagccaaggcatttccaagccccggcccgttgcctccccccaaaattaataaaagccaaaacgggacccccgccatttcaaaagtctcctttggccgtttgaaccaacttttttaactatatttaatttttagatttgcgaggaattgattaatctattttagaaataaca

SEQ ID NO: 335093 - DNA, 105 bp, Zea mays
  unsure (1)..(105): unsure at all n locations
cgggncgcggaattccggggtggaccacagcgtccgacaatccgggcttggatgtccgggggcgcagtttcctagttccggacttgttccgggggaacccttgaa

SEQ ID NO: 335094 - DNA, 464 bp, Zea mays
ggccgaccacacccttccgaaaaaaaaaaaaaaaaaaataaaaaattttattttaaaaaaaaaaaaaaaaaaaaaaaaaaagagggttaataaaaaaaaaaaaaggaggggccccccctttaaaagaaccaaacttacctaccccttcattccaacttaaaatttttttattagggcacccaaaataaaatcaattgcccgcgttttaaaaccttcttacctggaaaacccttgccttacccaaattaaatccctttgaaaaaaatccccttttcccaagttgggtaaataccaaaaagcccccacccattcccctttccaaaaatttccccaccctaaatgccaaatggacccccccctttaccgccccataaaccccgggggtttgtgggtttaccccaaaggtaccctttacaatgtccaagccctatacccccgttctttttgttttttcccttcttttt

SEQ ID NO: 335095 - DNA, 491 bp, Zea mays
accccgggcggaccacagccttccgacccgtttgaagttgaaggcccttttgaacttccattcccaaggttgcaagtccgtccatggggaaggtgtgcctgttaacgggcaacaaaagcatcctcggggcgttggccttggtggccgtcgccgctttgatgttggtggccttttggttgccccggccgggccgccggggttttttttggaagcacggccacggcccatggccggccaagccgttgttccggttaaaagtcgtcgttggaggtttatgatcggttaaaagtcgttgtgacccgccagaagtgccatgcctggtcaatctggaactgtttgcttttttgtaccccgggtagcatttgttggttctgaaaccattatgcttttgacagttcatgtttttgggtttgggaaaaaatatttatttttttttaaattttttttttttttcaatattttttttgttaatttatattttttttttattt

SEQ ID NO: 335096 - DNA, 487 bp, Zea mays
ggcggaccacccttccaagcttgttagttggataagttctgggttgttcgggggaatgggccaccaccaccaaaagagtgatttaccttaaaattgggagatgttgtttttgttagtggaatggaaaggttaaagattggggaaattgtgactcctaggaagggaaaatttccggttgagttgattcgttttttgtaataatggaactggtttattttaatgtttgaaactttgattttaacggtccacattttttcttttttgggatgagatttttgttttaagtattatctttaattgaatttgaaagtgttggacgtggtgttgaatttttttttattttaatttttttttttttcttttatttttttttcttttatttttttatttatttttacttttttttttcttttgtcatttatatttttttattttttatatttatcttacttaatttttttttttttcatctttatttttttttttt

SEQ ID NO: 335097 - DNA, 282 bp, Zea mays
ccgggccgaccacacccttccgaccattattttgcggacctgtcccagtcttttcaaagttgttttccaaaaaaccatttgccgggtattcaataatattggggcgcccgtccaatcaattaatctgttttttccaatcaaaatccaccggtacctgttttttattttttaaccttttccacctgaaacctattccctattttttttttaactttttccacctaaaatagtagtcatcgaagttttttgattggatccaccaatatttttgattgtttggtt

SEQ ID NO: 335098 - DNA, 381 bp, Zea mays
  unsure (1)..(381): unsure at all n locations
cgggnccggaatccccgggccgaccacacccttccaaccttttgtttttggtaaagaagccaggttttaggaggcggttagaccattttgtaaggggcaggatttggttttagggcgcggtgcgcacctgaccaaggctattcttttgggcctctgcaaccggcgtgaaccacacaccgctatcaacctgttggcgtccatgatatcagggggttgcttgccaaatgaatcgactaacactatactggttgaaggctggcctaatgaaggctgggtaaaggaggcaggagaattgttggctaaattgtgctctaaaggagttgtgattaaaaaccttatgaagaagggatccattaaattgctaaatgggcctacacaaac

SEQ ID NO: 335099 - DNA, 270 bp, Zea mays
cgaaattccgcggccgaccacacccttccggtcttatgcaaacacagccactgaaggcttcctaccagatgatggggtaaagctaactggccttggtttaaagaattaagggggttcaaccaatgttcaatagtcaaattttggataaccggaaattgggccttaaaatttgaagagttgttggggttaagcctcggaaccaaataaaaccggccggacctattccccttgttcgttggtgtaaataaaggttgaatttgaccgggcccc

SEQ ID NO: 335100 - DNA, 351 bp, Zea mays
ttttcaactaacttttgttttaccaacactcattgcccatccaagcagctttttttaacctttaggtttgtctaaaaccattaccccttttaaaaaataccatactatgtacctcaacctcttttaacccattaccctaatttacctcaaccttttccatccataccataaaaagtgccaaattttttattaaattcccacccaaattaattattatatttacccccctttattccaccaatccctcttccaaatcctaaaatctaatgttccttataataatatccaattcccacttttattcactaattcttatttttttcacccacattttttcaataatctttttat

SEQ ID NO: 335101 - DNA, 403 bp, Zea mays
aaatacccggtccgcccacacccttccgaaaccattaaaaatccttgttttaattttttataaaaaaaaaaaaaaaaaaaaaaaaaggaaggaaaaattaaaaaaataggaagggaaaaaaaaaaaaaaaaaaaaaaaaaaaaaaaaaaagggccgccccttttaaagattccaattttccttccccttccttccaacatattatttttttttttgggccccttaatttaattcccttgccccccttttaccaccttcttactttgaaaaccctttcctttcccaaattaattccctttgaaaaaaatccccttttccccatttgccttaataccaaaaagcccccacccattcccctttccaaacatttccccaccctaattgccaattggacccccccttt

SEQ ID NO: 335102 - DNA, 256 bp, Zea mays
  unsure (1)..(256): unsure at all n locations
attccggttggaccaacccttccgccacacccttccggccttgccggcttttccttctaaaaccgcggcccgttcccccccgccggggtaaggccccgatttgagggggccattnccggnaaaaacggcctaaagttaagggagcaggtgaagaacttaagggccccactcaaggttgccggggcttccgttgttttgttcgggaccaacttcaacaggttctctaagaacctaaacccccgttccgtaggccttt

SEQ ID NO: 335103 - DNA, 436 bp, Zea mays
aattcccgggttggcccaaggcttccgccaacgcttcggccaacccttccgccaacgcttccgagacaattccggagacctacgtcctgaggcccttaataaactaacatgcgatggaataaacagggggtggccacttccattagatttccagggattaatgtttgcccgcaattagggaaatttgtcagacctaaccattggtgggggcaatgtaccgaactggggtttttgggccataattgtcagttaacaatggtaggaggcttcctaatttgtgctgtttaagaccaatggcaatgctacttggtctaaggggtgttacccaggttctttctgggaactttagttggctggatccttatggtaatgtggcgaatatgggaccataatatgttttaaaaaaaaaaaataaatataaataattattataaat

SEQ ID NO: 335104 - DNA, 440 bp, Zea mays
gggccgaatcccgggccgaccacccttcccacagttttaacctagtggaaccggatttaattattaaaaccaggttaaggttcaattaaggggtttttttcccaacccaagggtgtgaaaaaccaaaataaaaaaggttttttggaacccgaaaagcatttaacggttttccgccatcccaaccttttttataatggtttcgccaataatttgttcaaaccctttgccaaaaaaaaaaaaaaaaataaatataaaataaaaaaaaaaaaaaaaaaagggccgcccgttttaaagaatccaagtttacttacccttccttccaacgtaatagtttttttttagttgcacttaaattaatttcactgcccgtgttttaacacacttttacctggaaaaaccttttctttcccaaattaaatcccttttaataaaatcccctt

SEQ ID NO: 335105 - DNA, 332 bp, Zea mays
cggaatcccgcggccgcccacacccttccgcccacccttccgattaatttcaattacaatattgggggggggggccttcctcccttgcgcgagtttgttcaaaatgggcggcgccaaaaccgccttttccgttcccgttacctcgaccccggccaacggcccttcccctgcctttttccccggcgtcgtggccttcctctttcggttccctgtttcgccccattgccttcctccatccatccttgtttgttaatttttttttccaattttttttctttttctccattattttttctctacatttttcttttttttatatttttattttattt

SEQ ID NO: 335106 - DNA, 256 bp, Zea mays
tccggaataatgatgatcaaggcgtcaatcctggtgcttatttgggccagcaaataactgttcaagacggggtacctgctgctattggcggggattttgctcggcctgaagttgcttaaaagatggaagccgggattgccgaaaagaacttcaaaattgcaaggctgcctgatagggtccagtcctatgaagctgcaaacagggaaatgtcccaaagaaaccaaaaagctatcgagacgccaaggcaacaacccag

SEQ ID NO: 335107 - DNA, 495 bp, Zea mays
  unsure (1)..(495): unsure at all n locations
aacacccggtccgaccacacccttccggggccttttccgcttccctggccccatatttttccaccccaaattttcccntcctcaacccgccacttttcaaagtttcccagcacctaataatccctaatccccccttgtaactttttcactaaccaattacccccctcatgcccctcccacccttttgatttaccttttcctcttttttttaaactctaacaaaccttttcctattctttaatttccctccccccttcccaattaatcacaatttttttcttaaactctttaccacaaaaaatctcttttccataaatcttaattctcaaaaatattttttttttcttccactatttctttccaaataattattattttttacactctaaatttttttaactaaaaattattttttattttctttaaattataatctttcttatatacactaattttttatttttatatattaccctacatattttttttaacata

SEQ ID NO: 335108 - DNA, 327 bp, Zea mays
  unsure (1)..(327): unsure at all n locations
ccggnccgaaatccccggggttgtaaattccaaccgccccttctaaagaatccaacctaccttcctcttccttccaacgtattacctctctaatggtgccacttaaatcaaattcatgtgcctccttttaccaccttctgacctggaaaacccctgccttaccccaacttaaccgctttccataccatccccttttccccagttgccttataacctaatagcccctacccaatctcctttccaaccagtttcccatcctaaatggctattgtaacccctccttttatctattctttaacctctatgttttttgtgaaaataattttt

SEQ ID NO: 335109 - DNA, 266 bp, Zea mays
cggcccggaatccccgggccgaccacacccttccaaccacaacccaacaaccctaaacaaacaggtctaccgccttcggaccccattcccggcggggcgtttactactacacggcggggcaggaaaccctgccccccaagtccttgcctgcaaaccaaaaggagtgccaggccccgaccgtaaccaaggtcctgccggcccaacggttttaccccgcctgggagtcccaccacgcagcccttaagagggccggccagtccgccaaa

SEQ ID NO: 335110 - DNA, 401 bp, Zea mays
  unsure (1)..(401): unsure at all n locations
gggccggaaatnccgggtcggaccacagccttccgcaaatcttttgattaaaagcagggggtgggctttgttcaaacccttgccatggcggatcagtggggggattcggcaaacaaggggagcattaagaaggtaaccaagggcctgaaccaaggaatgggggttttgtttggggttgaaggcttcctgctgatcttttttggggggaactatgccttgattgtgtttgcccaaaaaacgctcccgccaaaaaaaaaaaacccgtttttgaaaaaaaactttaaaaaggaaaagttgaagcaggggttttttgccctggaagattaaactgccttgcggcggtgcctcctttccaaagttccttatttactggatttttagagaaaaaaattttttttttt

SEQ ID NO: 335111 - DNA, 387 bp, Zea mays
  unsure (1)..(387): unsure at all n locations
gccggaaatcccggggcggcccaagccgtccggtggttgttttgtgtttgcaaaaacaagctttatttttcttttatgggaataaccgttaacgcggcctcaaaccaatatgaggtgggatgaataatgttttttggctgaggaattggctcgcaaaattaatgaatccatttcaactctcaaaaaaaaaaaaaaaaaaaaaaaaaaaaaaaaaaaaaaaaaaaaaaaaaaaaaaaaatttaaaaataaaaataaaaaatatttattaatagtttaattttactaattaaattattttttattttttatattttntaaataaaaattatattttaaaaaaagggggaaaaaggggggctcttttttataattcaaatttttttttcc

SEQ ID NO: 335112 - DNA, 430 bp, Zea mays
  unsure (1)..(430): unsure at all n locations
aaccggnctgaaattcccggtccgaccaacccttccgaaaaaaaaaaaaaaaaaaaaaaatttttttatttaaaaaaaaatataaaaaaaaaaaaaggatgggataataaaaaaaatgtgggggaaaaaaataataattttaatataatatttttattaaataaaaaaatattataataaaaaaatttatttattaaataatgtgttttctttttttaaatattttttttatatcatttttttttttaattaattttttttttttatgatattttattttatattaaattttctcaaaataaaatttttttactttaaaattttttttttcactcaattttattttctttattatttactttttatttatatttttttttataattattattttaactcaatttatttttttttttaaaaattttttttt

SEQ ID NO: 335113 - DNA, 58 bp, Zea mays
atttcccaattccgtcctattgtttaaaaaataacctgatttaccaaaatttaaaccc

SEQ ID NO: 335114 - DNA, 298 bp, Zea mays
cgaaattcccgggcgcgccacacccttccgaataaggttttatccctttatcgaacttttctcagaaaaccaaaccaaaaccccttccgaaggtttattttttaacacgggcgagccttccccaaaccaaacccatggcgaccaacaccaaccgccgaaccaacggccaaaccttgttcgccggcccggccctggtcttgttcccctgaaactaggccctcgcaatttaccttccaaggggcaacacggcccccttccttttttatatggggtccttttctattttattttttttttt

SEQ ID NO: 335115 - DNA, 330 bp, Zea mays
aacgggcccgaaattcccgggcggaccacacccttccaaaaccaaaaggcaaaaatggagttgtaccattattgccggaggatgaacggatcagggttgagggttttaataatggtgccggttccttgaaccacctaaattttttgtttgttttaaggcctaagggggcatccggcccatttgtgaacttaagtgacggcctactatttgttgccgccggtttggttggccattattaaatcaaccagggccgttttgtaaccatggaaaaggtctaaggttttgagcctggtattatttaaggcatcctaatttactgtaaaacctttt

SEQ ID NO: 335116 - DNA, 278 bp, Zea mays
cgggccggccgcccttcccaaaaaatttttccagctttttcagaaaaactttttctttcttgaacctaaaaaaaaaatgcccgacctttaaatagtccttaagatgcctcaacaaaaaattaaaggttctgctccatcagttttaataaatagttaaaataaggtttcctttttccacattcaccaattaattcctttttattctccccctttctatttttaaaacttcattttccaaatactatattttcttttcccatttcattacaatcatcttt

SEQ ID NO: 335117 - DNA, 391 bp, Zea mays
  unsure (1)..(391): unsure at all n locations
aaatnccggggccgaccgagccgtccaaaaaaataattcgtttaaaataaaatatatattaattatttaacgaataaacatanttaacgtagtggttatattaataaccaggggggtcaaatatggataaaattaaaaggcctaaaaggaaaaaaaaaaaaaaaaaaaaaaaaaaaaaaaaaaaaaaaaaaaaaaaaaaaaaaaaataaaaaaaaaaaaaaaaaaaggccgccccttttaaagaatcaaagttaacttccccttcattccaaattaaaaactttttaatagggcaaccaaaatcaaattaattgcccgctttttaaaacactcggaactggaaaaaccctgccttacccaaattaaattcctttgacaaaaatcccctttt

SEQ ID NO: 335118 - DNA, 418 bp, Zea mays
  unsure (1)..(418): unsure at all n locations
ccgtccgttttgggcctaatttggtccttttacacaatttatacttttgacctcaacaagaacaaggattcgggtgtcctttagttttgggtgcacctcctttcctgtaaatgacctgaatgtaaacatggggggggccatcggggtaaatttaaacatggttttttgcatttaaaatccatcctttcctgttnttaaaaaaaaaaaaaaaaaaaataataaaaaaaaaaaaaaaaaaataaagggggcggccgttttaaaggatccaagcttacttccccttgcttgcaacgtattagtttttttttggggtgccttaaattaattcaattgcccgtggtttaccaacgtcggaactggaaaacccctggcgttcccaaatttaatccctttgaataaaatccccctttttcaagtt

SEQ ID NO: 335119 - DNA, 400 bp, Zea mays
  unsure (1)..(400): unsure at all n locations
cccgggccagccacacccttccgacctagttttaggccgttttttcagttttgtttgaaaatcccaacctgccaccnccggtttcccctttccatatgtaatgtcggccctcttaatatcaactcttgttgccaattccaagtgaaaaattttgccttataatccatattgaaataataaccatcgtccattttccaaaaaaaaaaaaaaaaaattaaaaaaaaaaaaaaaaaaaaaaaaaaaaaaaaaaaatttaaataaacatttaaaaattaaaaatttatttatataataaaaaattattataaaaaataataaaaatatgggggggcccttttaaaaaaaccaaattttatttcccctcctttctaattaaatatttttttttatttttccccaa

SEQ ID NO: 335120 - DNA, 280 bp, Zea mays
  unsure (1)..(280): unsure at all n locations
aacgggnccgaaatncccgggcgggccacacccttccggttttagaggatccaagtttacttccccttctttccaacttattacttttttattagggcgagctaaattaaattaacgggcggccgtttaacaccttcttaactggaaaaaccttgcctttcccaaactaaatcgctttgcagaacatccccttttcgccagttgccttattaccaaaaaggcccgaaccaatcgcctttccaaacagttgcccaccctgaatggcaattggaccccccct

SEQ ID NO: 335121 - DNA, 297 bp, Zea mays
  unsure (1)..(297): unsure at all n locations
accggnccggaaatcccggggcggcccacagccgtccgaataaggtgggggcttagggatggttacctttttagaccgctcctcccaccctgggtttttaattgtttaaagctggccagggggcttaatttggttgggggccgccccctaaggggggctagggtggcccgctcaactaaggagggcccttaaaggcgtcgggtcgggggtttaaggcgtgggggtttggtaaactggggatggggggccgggaggctaaaatatataataataaacctaaattggcaaggcaatggt

SEQ ID NO: 335122 - DNA, 465 bp, Zea mays
gaaccggccgaaatcccgggccgaccacacccttccaatattaattaaggggcctggacctaaatggaaggggtttcctaacaactgcaaatattaagactttatttaaagacgtccgcgggaaatgaattgaggaagggacctataacctttgcttaaaaaacgtgagggatgaaatctggaccatggtaaaacccgaaaatcctttaaggatcttgttataaaacctttttttttgcaagcaaggtggaactgtccccagtttgttattaaatttccgtggttcctggcccaacaccaccaggtaaaatcttttccagtataaagtaatactaagtgaaattggcattaaatttttattttaccaataaactctatctttgttccttaaattataaaatttcttaaaaacttcttttatcctaaattttatattatttgatactaattttttttttaaaattt

SEQ ID NO: 335123 - DNA, 209 bp, Zea mays
cccgggccgaccacacccttccgaaccattcgcggaaataattgtcccctttatcatattccatccaacctttcctaaccagcgagtctttttaaacacctgtaggcttccattaaaccaaactgttaagagataattttaatgccccccaagctttccttttaaagttttttccttttccttaaaaaatgttttatgtaacccctttt

SEQ ID NO: 335124 - DNA, 363 bp, Zea mays
gtccgaaacctggggaaaccttttgaacaggtggttttttgttggaccttccaaatgggtaacagggttgttccaaagggcccgattgaggaagggttaaggcaaaccctgcctgttaatgatggttaaattccagagtcctggttagcaaggtcttttaagattaaccaggctgggtttctgaggggcacctttattgtaattccaatgggcgtttccaggaccaatgaggagctttgggatggtaaattttaggaggaacgctttaatccaacaaaactcctggccattctaaaggttccatcctattgggcccgggcagacaatttaatttccaaatgttttttttgcaaaaaaagattt

SEQ ID NO: 335125 - DNA, 204 bp, Zea mays
gcccgaattcccgggtccgccccacccttccgaaaggaggacctcgaccagggcaaacccccttcgttcggttccctggctgaatccccaaccgacggctcgttcgaaaggaaggaggctggctttaaccatggcgtttttgccgttcggcagcaccgaaccggcggccgtgccggcaacctaaggggggccccggccgttccc

SEQ ID NO: 335126 - DNA, 214 bp, Zea mays
gtccaacctaatcacagcctgttgtttgtaaccaggttttaaggtttgttatccttaaggttgttaaggcgtttgttcttgttgtcaggaggagaaatcattaattaaactggttttataacatccaccacaagaattttccttgttaactaaaaccgaaatgctctgtagttgtatttttgggtggagtttaagggtgtgttcatttaaaatt

SEQ ID NO: 335127 - DNA, 322 bp, Zea mays
gcccgaaattccggggtggaccacaggcgtccgtgtttttttttcttgccggccgccaaagagatcgccatttggactgagtccttttcgtttttgtcggccgcaagggagctttttcgggccgccgttttactcggttgccagggagaaccagccgttggttgaacctggccattaatttcttagccgggcccaggcaactgaccgtccaaccgtcgttgaatcggccggcagccatactcggttgttaagtctggccggcgaaccggggccctgggggctttcccgtcggggggcgcgtcccttattgcggccccccccc

SEQ ID NO: 335128 - DNA, 344 bp, Zea mays
  unsure (1)..(344): unsure at all n locations
cgaaattcccggtccgaccacacccttccgttgccccgattcttttccaatggtttttggttttggcctcgttggaactttacccggttgggcaatccaaagtgggtggggggggccggncctttaccaaaagtttggttaacttgaaccgtcagaattggcttagggttgccttaacaaaacagcaacaactgccaatttcaaacgggggaaggttaccaagctgctgaattttaacccaaacacatctttaaaacctaattaatcaaacaaccttttttttccttgataaaaaaaaataaaaaaaattatttattaaaatattttattataaaaaaaaaata

SEQ ID NO: 335129 - DNA, 201 bp, Zea mays
ccgaaaggcccgggccgaccacacccttccaaggcaatgaacaattttttgtggatattgtttaaggaagcactaaactccaatgctatctggagtccttgacaagaccggtggcaagctaatccaaacatcaaaaaaaggtcctaccagccttaataaaaaaaaaaaaaaaaaaaaaaaaattacaaataaaaattttat

SEQ ID NO: 335130 - DNA, 406 bp, Zea mays
  unsure (1)..(406): unsure at all n locations
ccccccaaaaaaacccntactaaattatttatttcccccctctcttttcttctaccccttcccacctttttttttcttcccccccccccccctctaaaaatcccaactcttccaccccccttcctttccccacctaataacctccttcttttggcccccccccaaattccaatcccccccccccctccttttccccccccctaccctttaaaacccccttcctttccccccccttatatcccctttccacccatcccccccttttcccctcttttcttaaacccaataaccccccccccattccccctctcccaccatttccccccccccatatccccattttccccccccctcttccccccccttaacccccccctttttttctcttcccccccccttttccccc

SEQ ID NO: 335131 - DNA, 329 bp, Zea mays
  unsure (1)..(329): unsure at all n locations
ccctccgcgaccccttggccgacacccttggccgacaccctggtaagaagttgaagccctaatnataccggccgtcttttaaatttctttggtgcccaataccctcaactagaaaatttaaccaagtccaataggttttgaaatttaataaagtccaattcctcaaagttacctaccccattctcccttgccttccttaaccctcttaccaacctcaatatttttaccctattaaaccaaatctatatgaattgtaaatctatttataaaccctttaatttaaacctaccaattttaataatctccacccatttaaagttttccttacc

SEQ ID NO: 335132 - DNA, 267 bp, Zea mays
ccaaggccgtcttgaacccaatttctttgttgggaacaaccaccccaacggggccgaattgtcactcgttctgggtggaaacaatcttaaccttaaacatgatgttcggaacctttgccgttgccacggacacaaaaccggtggttaagttggcggttttacaatttattccccaattttaaatccttttaactttttaatggctatttcctttttaaaccaatacttttttgaggtcaattttatttttaaaactttttttttaaa

SEQ ID NO: 335133 - DNA, 421 bp, Zea mays
cgaaatccccgggccgaccacacccttccgttaaaaacctacggccctttcgaacctttttttaccggaagtaccactccttcccgggccgcgcttccataaaggaatggcgcgtgctccactttctttcaacaacctggaatctacctcaacccatttgccttttacttccaacccttgtaatattaactaccaccatatccagttacctgttttgttttcctttgtcttcttcaaccgctttaatcgcccggttccaatcaaccaaccttttaatttccaactccaccattttttttcccttattttttaaatatttccaataaataaagacctcaatcccctaaaaattgcactttaattcaaccaaaaaaaaaaaaaatggccgctcttttttataaaatccaatttttccttcccc

SEQ ID NO: 335134 - DNA, 396 bp, Zea mays
  unsure (1)..(396): unsure at all n locations
gggncgggaatcccggggcggaccacacccttccgggaggggaggccaccaaggtaaaaaccaattggttgtttccctccgttttagctttggggtgggccaggtgcagcagccagcaggttttttttaaaaaggctggtaggggtttggggccggtaaaagaggtggcccgagattaaaaccgtcgttggcccagttgaattaagcttgccttgcaggaaaggggggggtttgggcttagggtttggccttttgaaaggcgtggtcctttccttttttccccttttcctttttggattatagggagtactccggccgcctggaaacaccgggctggttctgggccgttacctgatggtggggagggggcttggcttcgcctgtgttttgtttttg

SEQ ID NO: 335135 - DNA, 386 bp, Zea mays
ggaaccccggcggaccaagccttccaaaagtaaacccaccaagttaaaaactttatgttgaatccctccgttttacctctgggagcgtccttttccagaagccagggggttttttttaaaaaggctggtgggtttttggacccagtaaaaaaggttgtccaaaattaaaaccgccattggcccagttgaaataaccttgccttgcagaaaagtggtgtgtttttccttagggtttgaccatttaaaatccgtggtcctttccttttttcccctttttctttttggaatatagggagaactccagccgcttgtaaaaaccgggctggagttaggccgttccctattgtggtgaagttggcttggctttccctgggttctgcttttgc

SEQ ID NO: 335136 - DNA, 290 bp, Zea mays
gcaacaaaaccagggcgagattaacgggggggggggccaccccctgtcctccaagttggcccggtacctggaccggggaggcctccttggccaaggaccaactgttggacccggggcactggttccgccaggggggggggctcatttgcggcctgttttgggaagccgtcccccttgtgggggccgtttggatcgaactgttgccaaggaggattttggaggccatggggcgctttttaaggagggtcttttggtttaattaacccttttcctgctttgggggactttag

SEQ ID NO: 335137 - DNA, 218 bp, Zea mays
tccgccaacccgtccgagggggggcggccctttgttcaaaccaggggttggttttaaccaggagggggagcgcttaagttgggacttccccgccccgtccaaaagcagggccgtttggtggccatgggtctgcaggaggagttcagaggagccccccaagaaggccaaaaccttgcctgccaccacgacgaacaagagcaagctggtcctttacggcc

SEQ ID NO: 335138 - DNA, 408 bp, Zea mays
caaggcgtccggccccgggccggagtaggttggaatcttttttcttttgagaggacttctgcaaggccaccggggagccctacaagtgcaaggggtccaaaccttgaggccagggttctttcaacgacaaaccgtccagaacggccccaagggtcctttccataaagaataatttccaaatttttcgccaaaagaaacgtttgttttttttttttttgagtggattgcagcaaccgaactggcggtccaggcttccgctttccatttcctgttggaagtcgggtagggtaatcctggggggggtttttgtttaataaaccatgcctgccaattggaatctcgtttacccaaataaaaaaaaaaataaaaaaaattatttaaggcctaaaccaaatcaatattctgggt

SEQ ID NO: 335139 - DNA, 254 bp, Zea mays
cggatttccggggcggacccacgcgtccgccacacgcgtccgttggttggttcggggtcctgatttactgttggtggacctactctagtagaggtggatgtggaacaggcgcactggttccatgtgtcccaaggggccattttgttttgccacgtaggcccatactacaattggcggttttgtgttgcatatggggttggagagggcctactccaaattcaggcatgtgggaaatgggacctttggatttaaat

SEQ ID NO: 335140 - DNA, 428 bp, Zea mays
  unsure (1)..(428): unsure at all n locations
cgggncgggatttccggggtggaccacacgcgtccgcccacgcttccgccaacgcgtccgggtttttgtccaggtggctggccagaaaccattaacgggttgcccaagcctggcggggtaaatggcttttttggcaggcggttttccttggggccaaaccacaccttgggggtttaactgggcccaggggtgggacccaagcttgggaaaggagggaccatttgggtttttggttttaactaggaaggaggtcccaggattttttagaaaacgggaccaggtttgggcctgccttccttggttgtaaccttagatgactgaaaggtccctttacctttggcggccagaccatttggcctttagtttttgcatggattatggggaggtctgttatataatatataatataaatattttatttatttata

SEQ ID NO: 335141 - DNA, 133 bp, Zea mays
gtccgcccacccgtccgaagaagagaggagctcggccatggtttagcgccatggtccggtttcctggtggagattccctatcgctcgctggtgcgaaaggaaagaagctagcttttaccttggcgtttctggc

SEQ ID NO: 335142 - DNA, 468 bp, Zea mays
tccgggcggacccacccgtccgcccacccgtccgacgattttacaaatcatcctgtttcttggtaggccgaggggttttccagagtggtccattggtggaaaaaattaaggggctggggggatgctccctagtggctcgttaatttccccgggtcccggacctttcgtggccttcggggttctggcgattttcgggccaggttcttttttggcgagttttttcgcttttccggccaattagctgaattagggtcccgggtggatttttggtgggccaattttttatcccctggaaaggaggtggtttattttttaaagcaggggttagggttggcctttattttaatttaatttattttctttcgtttttacatttattttattttattcttttgtttattggttttttttttttcttcttcttttactttttctacgttttttgttttcttcttttctttcttcctt

SEQ ID NO: 335143 - DNA, 423 bp, Zea mays
cccggcccggatttcccggttggcccacccttccgggaaagggcatgcctccataaaacatttaattcaatttggcaccatctacttcggacccattttaatttgtggtgggcctccttcaaggctcagtaaatggcaaacaggaccttccaacaggcagcggcatgggcctgtttatggggggaaccaggggcccggttgctaaggccaactcaccaaactccatgcattcaattgccccagcttcgtttcttttgccagcaccctcggcttaaattggcattttgttgcctgctcctaagccctcaagccaattgatttcaccaaccttgtcttaaaacctacctcctttgcaaacacctgcaagccgaccttaggaacccgagccatttgagtttaaaagctcggtccaaaggttttctg

SEQ ID NO: 335144 - DNA, 424 bp, Zea mays
ggccggaggtaccggcccggatttccgggttggaccacacccgtccgaaataatctaacacccgattcgctcttgactttggtggaggggttaagcgtgccatctaaggcgggggagcactaatttccggctttgcttgggaccaagggtgttgcgggccccgcctttttaagggcaaagtccttgaatgacgggtctgaaacaggcgttgttggaaacaaaaagggccagctggagcagtcacctgatctccgggccgttgaacatttggatctcgccatgtttaagcgtctgaagtattctgggccattgggatcgctgcctattgacagcttgataaagcggttgaccagtgggtgaagtccagcgggcagttaattttgcccactgggttacctactgatgatcaaatggcaatcccgga

SEQ ID NO: 335145 - DNA, 398 bp, Zea mays
cgggtccggatttccggggtggaccacacgcgtccgggtttgtgtggcccccaaaggcttggcctgttacgtccatagggtcttccatccaatggttaaggagcagggttccttcgccggttttaaggccgaaagcttcgggaagaatctccaaagggagggcagttttctgagggttggggggtaaagagcgatgggttgaacattcgttcgttttccacacgtgtccaactcctaccggaggggccctgccattggcctagaccggatattttaatggctccaatattaattttaatttcctttggctccgtccttttaaaaagctttttgttttttttggggttctccaaagagttctttgtacctatgttttacaaatcttttatttgtttaaa

SEQ ID NO: 335146 - DNA, 391 bp, Zea mays
  unsure (1)..(391): unsure at all n locations
cggattnccggggtggaccacacgcgtccgcccacccttccggggacccgggggcaaaacccccctgggtttggattgatttgtttggctggaggggccgggaattaagcttttacttcctcgctgctgggggggaagggcctggatttcggaatttgggacctaccaaaaccccccggggattggattgatttgtttggttggccagttaaaaaaacatttattccaattccaccgggttttgctggataagtcgggaaataagcttttggtgcgcccctcctgggggtgcaaggcttgcattcccggaattgggaacctataaaacccccttgggggaacctaaattaatttcccggccgccggttttcaaacgtggggccgggaaaac

SEQ ID NO: 335147 - DNA, 390 bp, Zea mays
tacgggtccggaattccggggtggaccacacgcttccgaggacccttggccggacccttggccgtccttttggccggccccttggcccgggcccggaaggagtcgttggcaaggaagctggccgcccgaataagcgcattgagcagggcaaccgacaacgcaatgaagttcggaaggaacctttcaatggcttaaaaccgaaagggccaggccaagacaacggggaggatcctgaggatcgtggccggggccaacgccctggttggttaagcctaattcccctgggtggggcggggctccggctatatataatccttttccctaattttttcaactttgccggtaattccggttattagaacaaacgcaacggagttttgggttccttgc

SEQ ID NO: 335148 - DNA, 280 bp, Zea mays
tggaataccagggcggaccacacccttccgagacacccttggccgaccccttggccttttcttgtggccggccccttgacccttccccggaaggattctttagcaagaaaggaggccccccgaataacccccataagcaagtcaaccaccaccgccattaacttcccaagaaacctttcaatagcctaaaaccaacagccccaggccaaaaccaccgagaagttcctcttaatcgtcaccattcctttctccttttttggcttaccctaagtccctttgt

SEQ ID NO: 335149 - DNA, 346 bp, Zea mays
tccggttccggatttccgggttggaccacacccttccgaacaagaggccgaggcaggaccccgctctgtgttgttcaccaggtccaccaagccgttggaaagcttgtaaaaccccggttggggcttacccaaggccggggccctgttgttgttgggttccgccgccgccgccggtttggcctacccgttgggggaccccgtcaacggtttttccaacgccacccgcttccggtcctttttaatttccttaatggccctccggttggcaacaaactcaaggaaggccggttccgccttaattttggccagcaggaagaagcataggaccgtgtccctaactttttcc

SEQ ID NO: 335150 - DNA, 174 bp, Zea mays
ccttccgaaggccgtaagcccacggttgcttaaggcttctttcatcgggctgggcccatacccccgcggggccccacaggtggtcaaggcagtttttgtaaagagcaccttgcgtcccgttgcctgcccttggaacggccttccggagttttgaactctttggccgttccaact

SEQ ID NO: 335151 - DNA, 423 bp, Zea mays
gggcggaccacacccttccgagtacccttggccgtcacccttggccggacttttttcccccctggggcttaaaatcaccccgagggagaaaatattaagggtggccgccaaaagcctaaaaagccgaggccacatttcctgattcctgatggttggcaggttggttagggcttgtattgcgtaaggccgtccgtattggaccttgttaagtggctagggtggttggtgtaactagtagtattattgttgtcaccagacaacgacgccaaacctgaaaaggaaaactgtgctattaactcgtttttaagtctttaataacgaagtttaaggtcccgaacttgcctgaccttggccccttaattggctcttcttcttttttggcctgtactttgcatagcaactttttacaaattttttgggggt

SEQ ID NO: 335152 - DNA, 154 bp, Zea mays
  unsure (1)..(154): unsure at all n locations
gggncgggaattccggggcggaccacacccgtccgactagttttagatcccagcccaaaaaaaattaagagggcggccgttttagaggatccaagcgtacttccccgggcttgcgaggtcttagctcttttttggggccacctaaatcaaatta

SEQ ID NO: 335153 - DNA, 149 bp, Zea mays
  unsure (1)..(149): unsure at all n locations
ggaanncgggccggaccgagccgtccaactagttctagaccccaccccaaaattttatattgtcggccgccctaaaggacccaagcgaacttccccttgcttgcgaagagttacctcctttatagggccacctaaatccaattaacggc

SEQ ID NO: 335154 - DNA, 303 bp, Zea mays
  unsure (1)..(303): unsure at all n locations
gggngggaatccccggccaaccacacccttccagccctcttacctattttcgccgtcctttttctcatttaaagaacttcccaacgaaggagcggggtcttaataacaacaacggggagattcccaacccactgttccctcaacccccccaacctaaacataataaccaaccacttttagttggtccccccccttccctactttaagaataagaaccttttctacagtaaaaatatcccccccctcctcccccctataaaacaaattcttttctttaagatccttaactttgtttccccaaaa

SEQ ID NO: 335155 - DNA, 365 bp, Zea mays
cggccggaccaacccttccgcccccctccttaaatccctcagccttttcttctttaggagaacctcccccccaaaagaaggatctttataaaaacaagagagaccccccccacccccttttccctctaaccccccccacctgacctaaatttcctaccacttcaagtcttcctccccccttccctccattaatatttatacccttctatactattaacatacccccaccacctcccccctaaatccaatttcttacctaaagtccctatccttgttatcccaaaaaacctcctccccccccaattaatttccctcaaaacccaagcctcttttaaaatccctccaatatctcctcttatcccaaa

SEQ ID NO: 335156 - DNA, 386 bp, Zea mays
gggttggacccaggcgtccgcccacccgtccgaacaggattccaaagccttttttgttttggagaaatctgatgtggctctagaaggaaaagtagtggggcatttttggttagttcccaatgcaaaccaagctttcttttgggttaccctcaggagggtttttcttggaagggttggaacccctgccaggctggctgttagaggtttttttttggtccttaaaaagggccagggctttggattgctgggcccaattggagccgggaaaccatcttccattattttgtggatgggcctcattaaacctacttttggtcctgcttttgtccccggatgggttttaattttggccttgggcgccttttttccaattttgggggggggcc

SEQ ID NO: 335157 - DNA, 325 bp, Zea mays
tccggggtggaccacacgcgtccgcccacgcttccggacaagggggttcatggttgttaaaaggctgcttgaggttcctgttgcccagtaaaccggaggggtcctgccttttactctttggaggaaggtggtccaaagcaccaatttgcctttaacggcccaagccttggggtttaatagatcctccccggaaccaattactccatgtttttagcaccaggtgtttaataaacacttccctgaaacatttactccaacacttgcttgcatttaattgttgggcaccaggtggttttgttgctgggtttagcttggccattattta

SEQ ID NO: 335158 - DNA, 434 bp, Zea mays
gggcggacccacccttccgcggacccttggggccgcgtccaaggagattttctttaggctcggcggcctctcaaagaagaacttcaaggtgttcgccagttccagaatcggggccaccagcagcctgcctgacaagatcctcgccgaaggcccaaacttttgaactaaagcattggttccggttgattaaaacattggcttccttccttggttcctttttaaaatgtttccgccgccgccgccaaaaaaaaaggggtgggttcgatgggccaccttagtattagtttagctgggtttggccatgggggcgtctggggtggttatctataaggctgcctgccttcctaaagcagttataatatccaatttaaaattctatccgggaagcggtggtgtcaaaacaatgctttacacacccatttgcacagcctttc

SEQ ID NO: 335159 - DNA, 395 bp, Zea mays
cgggcccggaatccccgggcggaccacacccttccgggaaggcttaaggctcgggggaaaggtgtctgtccagacaatcggccgtggaaagtaaaggcacagtttacccaagaggcacattcctaacaagggttgtttaactccaactccaagggaggggcctttggagcccatttccaaatggggaccattgctttctttggggcaaattttttccaaggggttcctccgaacctatcaaggggacctgaaaggtcctggcttggccaccaaaggaagcctggaattggttttgcctttcgctttaccacaaccaaaatggtgggccctctacaggtcgcaggccctggattagttgccttaagtattgtccagaaaatttccaagagggtttc

SEQ ID NO: 335160 - DNA, 270 bp, Zea mays
  unsure (1)..(270): unsure at all n locations
cgggncgggaatccccgggtggaccacacccttccggccccaccaaaccaaaccattaagcattttcttcaaccaaagaggcagcgaccacccggggggccccaagagggagaagcgggcgtccaccagccctcctttcaatccaattggccttggcggcagcgaccggcaaaagccggaggttccccctgccctgcgggttgcttagccatgcctttaaggccgaccagcaccaattgggggccccggccgccccggccacaattacct

SEQ ID NO: 335161 - DNA, 383 bp, Zea mays
  unsure (1)..(383): unsure at all n locations
tacgggnccggatattcccgggcggaccacacccttccgaaaaaaaaaaaaaaaaaaataaaaaattattttttaaaaaaaaaaaaaaaaaaaaaaaaaagaaaaaatggggcggccgttgtgggggtccaaggtttccttccccttccttccgacgcattactttttttatagggcaccctaattcaatttaactgcccgccgtttaccaccgccgtgcctggaaaaccccggcctttcccaaacttattcgctttgcacaaattccccttttcgcaggctggcttattaccaaaaaggcccgacccattcgcctttccaaacatttccccacccttatgtggcaattggaccccccccttgtccggccctttaagcccggg

SEQ ID NO: 335162 - DNA, 345 bp, Zea mays
gtccggatttcccgggtggaccacacgcttccgccaacccttccgccaacccttccggaaggtttggaaaacctaaatgagttggccagggctggagggcccgtttacccactagggggtccagatgaggggcttaaaaaggaactaatggtttttgaaaatcctggcctgaaaatggaaggcttagggcccttggggggcaccagcctaaagttcaaagtccactcctttaaaatccgtaggggcatcctggggctcattttagggttcgcaacattactgtgcccaccacacctaacagtattcaggggtgttccaaacccaccgttgtaagccgacgttttg

SEQ ID NO: 335163 - DNA, 454 bp, Zea mays
cggatttcccggtcggccccacccgtccggttaactttttccccttcggcctggccttttattccagtggaggaaggaagcaggcctggggaggttatttcgggccccaaaggttttcagccagttccttggggaattgaccctagcgaccggggggctcgttctgattgctgcaccgggggccagacctgcacctcaattgttgattcagaaaaaggggtcctgaaaccaagatgtcgtccttgggttggggttcctatggattcaaataagcctagtcctccaggaattaagaaggcccagcctgttcctgatggtggctgctgccaaatggttaagtttggcttgggagaaaggaaatcttgctgttaaccttctaagaccaatgttggtccagggggagctgggcttcgttatgctttgcccctgcaatttttgggcccctccaagaaaa

SEQ ID NO: 335164 - DNA, 184 bp, Zea mays
tcctccacccttccccccatctaccttcccttttattcttttaaaaaagactccacgccctggaagagtatttttaaaaccaaaaagacccacccatcccacatttaaacttaccctatccaccagtttcctctttcctttatcctttacctccgtccaatccctccatcttaactttttaatt

SEQ ID NO: 335165 - DNA, 123 bp, Zea mays
cggaggaccgggtcgggatttccggggtggaccacacccgtccggttttagaggacccaagcttacgtcctcttgcttgcgacgtattagctcttttttggggcaacctaaattaaattaacg

SEQ ID NO: 335166 - DNA, 430 bp, Zea mays
ccggcaggtcccggtccggatttccgggttgagaccacacgcgtccgaataaaacggttccttaagatgcggaacctttcaagaaggagccgaagagccagccatggttgggtttaggaccgattgccggggtttccagcctgaacctaagttggtccccaccaccccagccttattaggccggcccagcaccggccccaaccttgcccgggaattggcttggccactagaccgggttgggaacccataaatatccttagttttggggtttaagggtccgcttttgtcggggttttacgccctctggtcgcatagttctggatgtaaagaaaggtagccggtcatgcccataactggaggtcgaatggaattttttggggggttttaactctacgtggcctttgaatttggcatgtctaaggataaggtt

SEQ ID NO: 335167 - DNA, 236 bp, Zea mays
cggcccggaatccccgggtggaccacacgcgtccgcccacccgtccgccaacccgtccgggggggtcaacccggccggtttcaaccccctcttttgaagaagcggcccggacctttgttaccctagaaggaaggccccggcggccaacaagtccccggggaacgtggcgttccgggggcccggaaacaacttccccccggccttcccaaggttcgaaaaggccaaggccccccaga

SEQ ID NO: 335168 - DNA, 483 bp, Zea mays
  unsure (1)..(483): unsure at all n locations
tccgaatttccaggttgaaccacacccttccgnaaaaaaaaaaaaaaaaaaaaaaaaaaaaatttttttaaaaaaaaaaaaaaaaaaaaaaaaaaaaaaaaaaaaaaaaaaaaaaaaaaaaaaaaagggggggccgttttaaagaaccaaagtttacttccccgggcttgcaaggtaaaaatttttttttagggcccccaaaattaaattaacggcccgcggtttaaaaacgccggaccgggaaaaacccggggtttcccaaattaaatggctttgaaaaaaatccccttttggcaagttgggttaaaaccaaaaaggccccaaccaaccgcctttccaaaaatttgcccaccctaattggaaaatggaaccccccctttacgggcccttaaagcccgggggtttggggggttcccccaagtttgcccgttaaatttgcaaaggcctttggccccgctcttttggttttttccctttcctttt

SEQ ID NO: 335169 - DNA, 53 bp, Zea mays
  unsure (1)..(53): unsure at all n locations
gggnnnggaanacccgggcggacccacccgtccgaaattactaccatgaaacc

SEQ ID NO: 335170 - DNA, 403 bp, Zea mays
cggaattccggttggaccaacccttccgttcctttactcaaaccttttccggaaccgtttcaacttctttccttgacccttgaacacagggatggactggttttttaaagggataaagttaaggccaccctccaaagacttgttcaaattgacaagttaatcgatttgttttttcgggggttccaaagggggcccttgtaaactgctgctaactagtctgtccggagttggcttaaacaaccgttagtcttatggagctgttcgtcggaacaaaaatcgcctccctgtttttcttctgggaagtttggattgattaattcctaataaaccggggcatagttggttttaatgtaaagggcttatagcagggcttggtaagcattaatcctgctggtttccaaat

SEQ ID NO: 335171 - DNA, 302 bp, Zea mays
cggaattcccgggcggaccacacccttccgcccacccttccaacctttctggatttcttcttttggtccgattaaagaaccagccggccagccaaggccaccggagcccggggccggccccccggccagcccaaacctcctcccttccctttttcttccgtttccaacagcaaggcatgggggaaaaggcgaggaccttggcccccaaactaaaattcccccaggggaagcacgacggccttccgttgccaacaagcccgttgaaccggccgtcaccccttggttggcgccaccgcaacccc

SEQ ID NO: 335172 - DNA, 407 bp, Zea mays
cggttccggaattcccgggtggaccacacccttccggcccccaagagaaacccttttccccattctgtcggttgaggaagaggaggagaagaggaggaggttggtttcctccgattgggcctaatggtccaagcgttggttccgtcccaaggtccttcccccgttgttgtttccaatttaatcgttaattcggtttttatcattcggggattggggtcttcggggttggttggttggatctgccgggttttgccattcccggtttcggccgcgtccttggtccaggtgtccccgttgttcgtcccattggccggggccttggccttttgttggtacgggttggggggcaccttatcggccaaccccgaggtgcggttacccaatggatataaggtcgtccgttgtcc

SEQ ID NO: 335173 - DNA, 420 bp, Zea mays
cgggtccggatttccgggttggaccacacccttccgatcgttaaagcacccctaggtcctggtctttgttagaccggctttttttcctgccggggccgccttaagatagtgctgcgacccgtttcggcctctgttggcagggaaatttccccccaggaaacttacccgattcaacctttttttttttaaaaaaaggcccccgtggtttttagcttgatgcacctggatttaagctagctgttgctgtaccggtccctttgtttttataattttatggcccagcaattcttattttgacctaactgttccatggtgtccgttcccaacttccttggtggctggggcttttgtttacccattgcaggaaaggactggaaaatggctgctttaaaaaaaaaaattttccaattataaatttaa

SEQ ID NO: 335174 - DNA, 423 bp, Zea mays
  unsure (1)..(423): unsure at all n locations
ccaacccttccgttacacaattcaagctaatcccaccaccaatttctcctcaaaggataccataccataccaagaagccttttctaacattctacagaaacccttaacctccnntccctttatctcccctcctttctttttcactttataatttcattattcattattttattaatcatttaattcttatttttttaatattaaattattaatataatttttttttaattatttaattaataatatatttaaatactttattaatttattttataatatatttatttactatttttttaattaattcatttattattccttaaattttttaattcttctatttataatataataaattatatttatttatttatttttcttataataaaattatattaatttattattattattatatttata

SEQ ID NO: 335175 - DNA, 164 bp, Zea mays
gaattcccgtccggaccacacccgtccgaacaaaacaaaacaaataagcaattatttctatcaaagagccagcaaccaccccggggggggcttctattaaaagcaaggaggcacccctcccccctttgaaccacaagcccatggcaaaaaggaacggcaaaaac

SEQ ID NO: 335176 - DNA, 317 bp, Zea mays
cggattcccagggcctaccacacccttccgtagaattaaaccttgcgcctttttcggctgttttttcctgaaggcccccacctccttaggaatgacttttttaaccatccgggaggtaatcctcctgtccctaatttccttttaccgccttttaagcccctacaaggcccccccttcttcggccctcggaagcaaggccttctaaatccccgcctaccccccctaaaccccttgaagaaaggcctctttccaattctttgttatccgtagccaaccatttataaatggcttatcgaatttttacttcgttaatagtt

SEQ ID NO: 335177 - DNA, 424 bp, Zea mays
gaattccggtccggaccacacccttccgtccaaatttcaaggatccttttggggaggtttcaaggaaggaaccggccattgaaaggggcaacctttgcctgggggaggaggaagccattccattggggggaccagctttccctggttaaggtggctggaatttttattgtccacaggatggtggcttcgcattttacaaggggcctgaaatggtttaaccagaaagccaaactgttgctcgaaaggaaaccatccattcaaatgtcgttgaaccagataattgccccaagactcaaaaggccgttttagcaggcccagagggagaaattcctgctgaaaattctggtgggccggggtctgaaatggccaaatgcaccgggatgccgaaggatgctccaccacttacagcagcaggtgcaattcc

SEQ ID NO: 335178 - DNA, 281 bp, Zea mays
  unsure (1)..(281): unsure at all n locations
cccgtcccaaccacacccttccgcccacccttccagttgccttttcctccccttttaacaaagtccccctcagtttagagagaagctaacttttttgagaagggggaacacccccncctaatgtgaaatcccgttcctctttcaacaggccttgcctaacccaccaccaccaagtcgctgaaaaatccctctccctccacacggaaaaccctcaactccaagattaacttcaacctcccaagaaaaatcccacgacctatttgtcccgacaagacaaaacc

SEQ ID NO: 335179 - DNA, 140 bp, Zea mays
ccttccgccttttgaagagaccctgttaaggcccttgttctttaaaccaaatccaaattcaatagtaagcatttattctcccgcgggggggtttcttattaagtcccggtaaccatttaatttagtccctttccttgcca

SEQ ID NO: 335180 - DNA, 368 bp, Zea mays
cccttccgcggaaaggccgtccccggtgccaggtttccttatttcaccggaagaatgttcctggtagggttggcccaaggccatcaggggcggaatctcttaaaagggactccagccctgaaaaacccacaggcggtaattcgccccgccccctccaaaaggtgaaaaagggtttgggcaagctagctgaagcagtgttccaccggagcccaaagaaggggattgttgccgaaccttcaccatgtgtaactcctaaccaaaacattcaaccggccggggaaagcagggtttcagtaccatttgtggccgtccaaaatccaggggtcgacggttcggggtcgaaaccagtttaccaccaccaaagccct

SEQ ID NO: 335181 - DNA, 375 bp, Zea mays
tccccaaatccacatacaacccttccccaaaaacttctcaagtttcttcgcgcccaaccttttcttttttgagaagggggctacccacatttcttttttaaaaccctattcaaaaaaccttaactacctaacatacctactgctccacccctataaaatccaaacttatcctcctctcctctttaactattacaacaatattggtccccccaaaatcaaataaattccccggtattctcatacacaaaaacctttaataacccttattttcaccattttttacactcttttaccaaatctctttttttatatacatgttatattaaaaaaaagccaatacttatcccttttcttaaaattcccccccccttatta

SEQ ID NO: 335182 - DNA, 349 bp, Zea mays
  unsure (1)..(349): unsure at all n locations
cttcctccaaattaatttcctaattttaatttgtccaaaataataatttttcagggcagacccattataataaagggaggggaaccttaaaaaaaaaaaaaaaaaaaaaaaaaaaaaaaaaaaaaaaaaaaaaaaaaaatatggcctcccctccaaaaaaatcaaacttaacttacccttcaatccaacaaaaaacctttttaaaatttcaaccaaaatcaaatcaacttcccntcttttaaaaactccttacactaaaaaacccttcctttaccaaactaaatctctttcaaaaaaatccccctttcccaaacttccttaaaaccaaaaaaccccaaaccaatcccct

SEQ ID NO: 335183 - DNA, 315 bp, Zea mays
  unsure (1)..(315): unsure at all n locations
cttcctttccccttttcctccccttaaattcactttgttttcacttaccaaaaaaaatttccaaggggaggtttttttccaattccagtctggaaccacactcctaccnccttcccctttcccttctccttaccacttaacattttnttctcttccccaacctttcctccttcccctttctttcccccctttcctaaactccaactccatcccaaaccttttccctttaatttccacccccaccttcctccacaatttcctaatccataacaaccccttattccatccccccaattcccatttcccaattttttc

SEQ ID NO: 335184 - DNA, 333 bp, Zea mays
  unsure (1)..(333): unsure at all n locations
tcctaccccttttccaaccctctttttctacccctttgaaaaaacccaaaggtngggctcttatcctaaaccggcccgcganaacctcctcccttaaaataaccacccttcaaatcaaaaccacccatccaccccaaatccaacccttgcctctctatttccttttaacaccaccaccaccaaaattttttagacctttacctaacatttcctccttttaaaaatcaacctttaattaacccccaaaataattattaactccttccaattttccaatttttaattttaatccctcaaaagtttactntaaaaaatcctccaccctttttattt

SEQ ID NO: 335185 - DNA, 390 bp, Zea mays
ttcctctaaccctttttacctatttttaaatcgcgtccggcctttttataaattccaaccttacggcccggtccttcctacgtaatggctggtctttatttccacctaaattcaattaactgcccgcctttttccaacttcttaacttgaaaaccccttcctttcccaaacttattctctttccacaacatccccttttccccagttgccttattaccaaaaagcccctaaccaatcccccttccaaacattttcccacccttattgccaattggaaccccccctttatctcccctttaaccccgccggtttgtttgtttacccccatttttcccatttaattttccattccctttacccccattcctttcccttttttcccttcctttt

SEQ ID NO: 335186 - DNA, 328 bp, Zea mays
  unsure (1)..(328): unsure at all n locations
aataaaccaaaatccatccaaatatttttcccttctatttccataaccccnaataaatcctccattcgttttttttaataaaaggccagaccttccacctttcccntttccccctttttcccttttttccaccattctccctccctttttttcctaccccaaaaccccttttattttttaaaaaatcctaaaaaccaattatatccccaactcttttccttcatcctntatcttaccaccctataaaccctttaaatttttttccccaataaccatttcccattatcctcccccttttaaatctctcccttttttcccccctatttac

SEQ ID NO: 335187 - DNA, 298 bp, Zea mays
  unsure (1)..(298): unsure at all n locations
atccggggccgcccaacccttcctcccacccttcctcccaacacccccttttttttttccccccttaaaccttccttaggtgccgtttttatttttcttagccgcgttttcctttaaccccnttcccataatatttttcccctccacctcaatttcctataaaaaacctctccttctccatccctttttccttttcaatcctaattcccctaccatcctccttntttcccatatccatcaccaaaaccttttactttaaccttaacaactttttcaccaccaccttccattttaacct

SEQ ID NO: 335188 - DNA, 145 bp, Zea mays
  unsure (1)..(145): unsure at all n locations
attccccttatctcttcccccccttttttttctaaccctaaccttttcctttacgacagctttttatttatttcagcaccgctccatttttttttntttttcctctctctttttctacaacatctctctctttttcaatttcttc

SEQ ID NO: 335189 - DNA, 259 bp, Zea mays
  unsure (1)..(259): unsure at all n locations
aaaaaccccattattttcccgccaagatttttttttaaatatttgcgcagccttttcctcctnnnnttttttnacaatccttttcccccaccctttttcccccatttctaccatcctcctattccttccttttttttcccttacctttaaccaccaattttttaatttttttaaaccccatttttccatccctccatttcccaccatccattctctcctatcttctaacctttttttaccctttttcctccaccaccct

SEQ ID NO: 335190 - DNA, 470 bp, Zea mays
  unsure (1)..(470): unsure at all n locations
caactttatctttcccttcctttctttccagcccttcctattccacggcaacgttttttttatataatccgtcagccaccctttttcttcacctttcctaccaatttaacaccaccatattccaaaccttttctttttaattcaatcttccttcatttatttttttccaactctaaattcctaaactcaaatacatttcttttatttcttctttaatcaactaattcttaattaatttatcttactattttttttccattattttaaaccnaattcttttaatatttttattaatattttttaattaattttatattatttttatcccatatattttttttattttttcttttatatcttttttattttttaaaaactatattttattttttatttttttttattatttttaatttattttatattttctttttattatattattcatatattatttttatcattttttt

SEQ ID NO: 335191 - DNA, 308 bp, Zea mays
  unsure (1)..(308): unsure at all n locations
gaanncggggcggaccaaagcaaacaagaaaaaggacctccccaacggaatgtctgtccttcctgccgtcccttcccttccggtccgcgtatttctaaaactgggggggggcctttaaacaccctctttaacaacctgtccaaccaatgcaacaccaccataatccaaaccctttcggtttaattcaacgttccataagtcaatttgtcccaacctaaaagcccaaaactcaaaaacagtccttttaatccttttttaatctactaaggcctaataaatttaactaccttttttttttccattattta

SEQ ID NO: 335192 - DNA, 368 bp, Zea mays
  unsure (1)..(368): unsure at all n locations
attccccctatcttcaacatatcttatcttcatatctccancaaacantaacagcccttttttaaacacttaatggaagcccttatttntcaccttnatnacntttttttaactcttctaaaaactccaactcaatttttttcttatnaacttcnntctttcatttatntcctttcaacttattaaaacactctcatttatattttttcatcaataactaacaaaaaaatcatatacactaactatttctacaaattataacttaatatatatctttcctaataccataacctattcacatctttanattttcataacccttttctttctcttcctaacattacctatcttattacttttatttttat

SEQ ID NO: 335193 - DNA, 151 bp, Zea mays
  unsure (1)..(151): unsure at all n locations
ccttccttttccaccctaaatttgggcctaaccaccttttttttccaaaaaatccccattttnaaggaagggttccttttttccaaggcaccgacccaccttttttttttccccaccaaatnccttaaaattcctaccaccaccaaatttt

SEQ ID NO: 335194 - DNA, 390 bp, Zea mays
  unsure (1)..(390): unsure at all n locations
cccttcctattccctttccccacatttttaataactttattttatttncaataccaccactccaagacaagcttttttctacacgagggagcctttttcttctaaaaaaacccctattccccccatatttcttttaaacgaaaaaatattaattgaacgccccattaacctatttttcaaaaataaaaattgtaaaaaaaattaacctttttttttccaaaaaaaacccaaattgaacccatctatatcccaaatttataacctaaccttaaatctttaacaaaccaatttattctaatctttcattcacacaaataattttaattttaaccaatcttatctccttttaaaaaaaaaattatttccccctattttaaaaaaaaataaaaa

SEQ ID NO: 335195 - DNA, 343 bp, Zea mays
  unsure (1)..(343): unsure at all n locations
cggggcgagccacatccttactcccacccttccnaattaatccttatataatttaacctcctttncccccacaanggcaacaggtttttttaaatgcgggccgacctcctctttctcttaatcctccaattccctcaaaaattccccttcccttataaaaacaaccacctccttcctatccactttcttcttttctttttcccctaaaaaaaaaccccacccctatttctttaacccttcttttattccttcatttcctcccactatttacatttcctatccacctacatttcctaccctttcaacttttatccccatcaatccacgcccttttttttaattt

SEQ ID NO: 335196 - DNA, 336 bp, Zea mays
attccggtttggaccaacccttcctccacacccttccttccctccgaaccctcctgtttggaacatttttaacctaaggcgggggtgttcccttgaatcaggggaggaaaacgtttccaaactttttaaatacacattagaattcaaacctaaccctaaccctttttgggtttacaaggttttccaattttctttttaccttacatgaaaccggcgttccttccgtcccggttaattttttatttcaacttccaaaccaaacggttaaatttttttttaccttttaactaaaacttttttcaaaaaaccaaccgacgaagattggcttttgttttt

SEQ ID NO: 335197 - DNA, 410 bp, Zea mays
  unsure (1)..(410): unsure at all n locations
tcgaaanncccgggccaacccaccctatacctttttaccttatccaacctaacttcctcttttttccaccccaacaccctttttccggtacctctttttttaaattgagcagccccccttttccaccttctttccttcaaaaccccttccttaccccaccttatcccccttccatcacacccccctttccccattttctttattaccaaaaatcccccaaccaaccccccttcccaccatttccccatcctaaatctcaaatttaccccccctcttaccttcccataaacccctctaaattttttttttccttactattntacccgttcatttttgtattcttatattcttcctcttccttttccactttcttttcattttattatttatatctttcttcttacttcctt

SEQ ID NO: 335198 - DNA, 378 bp, Zea mays
gggcggccaacccttcctccccatttcccattttcccattttctttttattcttccgtccttaactcccccgttaaggttttttttttcctgaggccgggttttcaaaatttatttaaccttccttcctttaccattttggccttatccaattttattacctacttttattaccatttttttttaaaaaactaataactctgaacctttattttttttacttccttaactttttctatagccaccattccttctttcccattttattacatttcacattatcacctttattaatttttcctaccatacatatttatgaaaacctattccttttacctttattttttcaattttaattttttttaaattatttttatct

SEQ ID NO: 335199 - DNA, 265 bp, Zea mays
  unsure (1)..(265): unsure at all n locations
aaaccggggccgaccacatctcttacatttcccctttccttaaatttcttcttaattttccacacccccctaacccacctttttaagaattttttttaaatttgaaccgccatccaacatccttcatttcctttatttttntccatttttaaaaacctccaaaaattcaaattcaaattttctaacctaacctttcttcctcctccacctaccacctattcctcctcccctttttccctttccataaacccaaataactctccca

SEQ ID NO: 335200 - DNA, 209 bp, Zea mays
  unsure (1)..(209): unsure at all n locations
acccctccttttactttttcaccaaaacccccnctttctcgagggccgtcatcttcaccttagatccggactcctttacccccntttcccccccttaccttccnccaagaccctccccccttaaaacctccaccaagcccatatccttttaatttccttattnnntcaaggctaacccaaaaaaaaacctaaaaccattccattccttt

SEQ ID NO: 335201 - DNA, 287 bp, Zea mays
  unsure (1)..(287): unsure at all n locations
aaaattcccctctccaacttcctttccaatttaccctaattgaaacctattaagtgggtttctcattttccacttgattggngccttnnttttnttcatatnaaccccccaaatttcccntttccttttcattttaaaaaaaaaaaaaaaaggccgccctttttattatttccaaccttacttacccttcctttcctacttattatcttttctatattttaacctaatttcattttattgccccctcttttacaacattttaacttttaaaaccctctctttaccta

SEQ ID NO: 335202 - DNA, 165 bp, Zea mays
  unsure (1)..(165): unsure at all n locations
cccccataaatccttttccttttgaataaccaccaaccaaaacctttcccggnaagaaaaattttaaagccggccggccttttatcccaaccttccttccccttccttccaacttaataccttttttttatttccccctaaattaaatccacttccctttttttt

SEQ ID NO: 335203 - DNA, 204 bp, Zea mays
  unsure (1)..(204): unsure at all n locations
ccaaaattcccttttttccttttttttttatttaccatttaacccctaaaagaaagcttttttcttaattttagtcagaattncctccannttttntccacctttaaattacctaatttcccctttaaaaatttcctatcctaattgcccaaaaactatttttttcctcccaaaaaaaccatttatcctcaaatttaaaatttc

SEQ ID NO: 335204 - DNA, 318 bp, Zea mays
  unsure (1)..(318): unsure at all n locations
gtaaaataaatccnngaacccaaattataatttttttaaaagaatgaaaaattaaannaaggaccgttttttttctaattcagagcgccaatcccctcctttttcaccacccttctaatcccaaaaaaaaaaaatcctaaatcttttatttaatccaaccnntttttcctaccctacctattcctatcccatttaaatccataaaaaaaaaaccccaccctctccaaaaaaaaaacctccaactcctcctaccaacccatacccaaaaaaaaaaaaaaaatccccccnttctaaaaaacccaaccttacttccccttc

SEQ ID NO: 335205 - DNA, 98 bp, Zea mays
  unsure (1)..(98): unsure at all n locations
acgggncgggaattccggggttttaggggatccaggtttacgtccgcgggcttgcgacgtattagtttttttatggggtaacttaaattaaattaatg

SEQ ID NO: 335206 - DNA, 131 bp, Zea mays
gggccgaccaacccttccggttgttgcgtcggcggcaatttcttagtcgtttttttttaaacaaacaacccaataatatgggatgggttttattattctaagaatttatctttaaaaaattttaatattat

SEQ ID NO: 335207 - DNA, 310 bp, Zea mays
gaattccggggcggaccacaggcgtccgccaatggatcggaaaaacctcccgaaaggacatcggttggcaaacaacaacaagcgtcccgggttggttggggaaccgaagggttgcggggacaagaacggcttcaatttgccgggccgaagccggggcccttttttggttgcggtccttaataacgcgcaggccaaccaggggcagaggggggttgaagaaggaagaagcaacaacggtttgcaattgccgccctgttcggttaaagaaggggagggaggaccttatttacccggggggcctctttatagt

SEQ ID NO: 335208 - DNA, 247 bp, Zea mays
tggaattccggggtggaccacaggcgtccgccaacgcgtccgattggttttagaccggtcgggcgcggcctgcaattgcaagccggggaatccaaaaagccggcccggccgaagggtcaatcgttgtttccgccggttgcaagatcggagccagcagggacaggtcgtcggggaactagccttgctgaaccccggggaaaaaaagggaaaggtgaaaaaagggtggttggcggtccccttcgggccg

SEQ ID NO: 335209 - DNA, 278 bp, Zea mays
attccgggaccgacccacccaacccggaccccttggcctaaaaaaaattttaaacaattctttctagtcccttcacggaaagcaccggatgggatgagctaattaccgttcttatttctaagattttttacttttaaaaatgttagtcctgattcatgtatgtaaaatattcttctcgcatctataaattttattctttatgttttatatttttatggttaaaaaaggttgttttttcattatcatattaattttaaatttttatgctttttctctcc

SEQ ID NO: 335210 - DNA, 472 bp, Zea mays
gggaattccggggcggacccacgcgtccgcggccgcgtgggtttaaagaaaggaattaaaccagttttaaggtcctgtcgggataggacccttagggggggcccattccgttttacttccggggattttaactttgaaacgggaggcgccgggaagcggttaaaaatggcccaggccttaaaaaatttgtccaggcaaggccaatttttccggggtaccaaagggcagaagcccaatcccgcctggatttttaaaatttgcgatggggggcgtccaaaggggtaaggaaattaattggggtgggcttaggaaaccggggccccccaaaccaatttactttccggtgggggggggggggggaagaagggtggccatgtggcctttttcaactgggttaaaaaaaaaaaaaaagggggggccgttttaaaggatccaggtttccgtccgcttgcttgcaacgtattagtttttt

SEQ ID NO: 335211 - DNA, 220 bp, Zea mays
gggtccgcccacaggcgtccgccaactcgtccggttggcattaactattaagtttggcccaccagagccaccatgggccagggggacttgtttaaaagcgggggcgctgaacccccccgttggcagaagggccgggttcctggtgggaaccttgcaggggctgccgtcaaagcgggcgtttgggccgttgtccgtgtgccgggtaaccactctccgtccg

SEQ ID NO: 335212 - DNA, 142 bp, Zea mays
tggggcccccccctgtagcggggctttaagcccggggggggtgggggttccccccagggtgccctgttaaattttccaccccctataccccggttctttcggtttatttcctttttcttctggcaagttttgccgtttttcc

SEQ ID NO: 335213 - DNA, 214 bp, Zea mays
  unsure (1)..(214): unsure at all n locations
gcccggaattccggggtggaccacacgcgtccggtggtggtggtggtggtcgtaagggaacaacggcaacccgcaacggccgttgcttacggggcggtgttcgttcggccggggcttgggctttttccggggaacgggggcaaccaagccgggcttgttcttggacccggccccggtggaaaggaaggaagaccactnttatctttttttgtcc

SEQ ID NO: 335214 - DNA, 423 bp, Zea mays
gacccaggcgtccgcccactcttccggggggccaaggtctttgtgcttttttgggggcaggccaggagggaatcgaaaaggcgggacccagggttgttaaccaccgtgccctcttcattttgggaaggaattgtaagggaaaggacttctttggcccttttgaaactgacagggtttattttggttgaaggaaaccagaaggcttgttgttgttccagactaaaaaaaagggtggggaccttaggtgtttttttccttgggaagggtttaataacttttctggaaattttaaactttttttgtttgttagaaaccgtaaaattggcgcttgttggggtttgttcttccccatgtaaactgctttttttaatggaagttttaaaatttttgtgtggttagaaaaaggaaagttttttcaagttt

SEQ ID NO: 335215 - DNA, 336 bp, Zea mays
gaatacccgggccgaccaacgcttccggccgtgttttacgctttcccaaatcttgtggtcgaagaattcgggggagtttacaggtggattggggagaggagtttaaacaataattttaatgggtttagggtttaagaacctgaggcgtacttgaatgggtggaatggttattcaaaggaatgttgatcaaaaacttttccgttttaatttaaaaaaaaaaaggatcaaaaactgtttcccttttttttttaattttgggaacaagggtttaatattaggcttaaactggccatattgttaattaaaggtttgggaaccaaatgttttattggttgt

SEQ ID NO: 335216 - DNA, 396 bp, Zea mays
gcgggaattccggggccgaccacacccgtccggttggttgttaccataaagaaggggaggccacttgagccatccaggggaaggggtttaagagttttggttgaagttgtccgaaggaaggagggaaaagccggaaggaaaaaatagaaggggttttttggccttttcctaacttaatttaaattttccaactgtaatggttttggtttgttaaggttgaacttaaaaaaattttggttttgtgctgaacggggcttttggtttgtaaaattaaaaaaattaattaaatataaaaaataataaatttatattaatatatataaattatatataatatataaaaaaaaaaataattaaattggggggggcctttttaagggtccaagttttctttcc

SEQ ID NO: 335217 - DNA, 365 bp, Zea mays
cggaattccggggtcgaccacaggcgtccgggctggatctggttggggactacataaaggtttttaaaaagcaggtaagggggttgaacaacggccgggcaaattgaacttgttccggggggggaaggttgaaggacccgttaaccagttaaaaggagcagaagccggcccttagaatggcccggccatgcttggcccgccgaagggccggcctgattgacccttccgggccggccgggggttaagttggtttgaagcgttcttcttgaatgggggtaaaagtcgtcaaagattagtagtttaagggtccgtgttcggttttccatagttaactgaatgagtagtccgtagtttgtattccatgc

SEQ ID NO: 335218 - DNA, 284 bp, Zea mays
gggcggaccacaggcgtccgttccgatctgggtggaggcggccatcggggtttattacccaacgggttacctacttggataggagcaatgcaacgataactaaacctattcttacttaatggaccaaccagggaaaaatgttttcaacgttaggacgacaggttgttaagggtgggcaaacttgaactggacgggcgcacggatttcaatggtgccaacagaaaaggtgcggatttgagagaaattcgaccttttggatttttagagaggattttgataccgtt

SEQ ID NO: 335219 - DNA, 455 bp, Zea mays
  unsure (1)..(455): unsure at all n locations
gggaatnccggggcggaccacacgcgtccgcgacccctgggccggccccggggaacatttccaggtttggctttccatcttaaggccgaggatcccggaatttttgaaacctaaggaaggtcaaaggggggcctgttggttttgccaagcaaactttaagggcctgttggagggttaaaaaatttaatcgtcctgaaggcataaaataatggttggtggtaaataatcttttccctggtttttaattgggaatcttggctggattttgggggaatccttttttatttcccctttccatggtcccttaatttaatttcggtttggagggccagacctggagtcagttaatgtgtccaaagttgcgtttgaggctgcctgtaattgaatggtttggcatgtgaggaagatttaaatgtgttattcaactttgggggtcatgatagtggcccatattt

SEQ ID NO: 335220 - DNA, 423 bp, Zea mays
  unsure (1)..(423): unsure at all n locations
acgggnctggaattccggggcggaccaacgcgtccggaaatcaaaacaagaattttaacgtaaaacgggcgttgggaacagacacacaaagcgtgggaaccaagggttaattaccagaagggggactactgttcgaaggaggtaaggtcgttggccccggccggtttcggccgcaacggggggggggtcaagaagaacgtggtaaaggaaaagttcagggaggtcaaaacggtttaacgcgcgggggcaaacaacaacaacaacaatggtaacaacgggggcaacggtttggtggggcgcaagacaaggttnaaaaaggaaataaacacttgaaccggcaaggtcaacaagcgcagggaaagtttcttggccagggttaactgagccgcccgggggccggaatcaacgcccgttcgggcttgc

SEQ ID NO: 335221 - DNA, 315 bp, Zea mays
cggggcggacccaggcgtccgccacacccgtccggttttggattgggccaatttcctttaccatggaacgtaaaatccccgatccggcggtaggaagataaaatccccgcggggaccacccgtttaaaggttttccatgaggcgttaatggttgggacccgggactgaactgttccagtggcttgttcccaccgtgtaacccgaaccaaattaaagttcccccctttttttgggtttgggcgtgtgttggaactgttctttgaatggccaaacaatgacctctgttgccccttttaatggcatttgtggaaaatt

SEQ ID NO: 335222 - DNA, 122 bp, Zea mays
  unsure (1)..(122): unsure at all n locations
accacacgcgtccgttgttaaatttaacttttttgatggcttaatttaactgctgccagggaagcctttttttaagtngcagtaaggttcttttagtctgaacccttttctaaccgttggat

SEQ ID NO: 335223 - DNA, 135 bp, Zea mays
  unsure (1)..(135): unsure at all n locations
ggaaatncccgggccgaccacacccgtccgggcaatccgttgaataatccgaatggaaaattaattttcgctgttaagttgggaacctggccggggcttgggttaaaaaaaaaaacaaccctcccccttcccttt

SEQ ID NO: 335224 - DNA, 316 bp, Zea mays
ggcggacccaggcgtccgtttttttttttttttgggaagggaagcattttttttggttcgttttcaatggaataataacgcagggttggatccatgggctggatgaaccccggccggccggaattaattttagcccgccaacagaggcaactagataccgaaataaaaggggtaaacaccatgatcgatcgattaattatgacaaaaacccgtccaaacatgcttttataaccgattttggatccatgataataacggaaggacttcgttgatggacggaatgcctcgggtgggcgtgattttttagtatcggaac

SEQ ID NO: 335225 - DNA, 322 bp, Zea mays
cggcctgttttggaaaagggaagggcttttaacctgtttttgctgttttattttctcctccttggtcggtacatatttaaaatggtaacaatttttggggagggaatggaaaaccattcccatttttttaaacagtattataaaaggccggacctgttttttaattccagcctttatttaaacaatgtttggagtttgttaactttggaggaaattaaaaataggggttgcgatggtatttgtgtgtttgcaatttgaaatggttgttgcctgaaataattatttttggtccactggttctatgatccttaatttgtcctgc

SEQ ID NO: 335226 - DNA, 260 bp, Zea mays
cggaattccggggtggaccacacgcgtccgaacctttttggaaggcccaaatttctaacctaaggcagtgtatccgtatgaataaaacatgggctgccttccctgggtctttgggaaaattattccaacaccatcttcaaaaaaaagggtgtaggatgaatatgccaccttaccattagattagttggtttttgcaatggttcctttgggggtggtcattaataaggttgactgcttagggtaaagcaatttcttttttt

SEQ ID NO: 335227 - DNA, 158 bp, Zea mays
gaacgcgccttgtagcggcccattaagcccgggggggggtgtggttccccccaggtggaccgttcaattggcaagggccttagggccggttcttttggtttttttcccttcctttttggccacgttggccggttttccccgtaaggttttaaatgggg

SEQ ID NO: 335228 - DNA, 426 bp, Zea mays
  unsure (1)..(426): unsure at all n locations
aaattccggggtcgaccacacccgtccgggggaccgtttgaatggggtcgttggactggaggtgcaggggggcctgcaatccggccggggggatcaagtccgtcccctcccaatccggcaaaggggaggatccaatctggagcgcctctttttgccaggagggggatggaataatggaaggattttttttttccagccccccccttgtttgggtgcaggcccaggccatagttgaattaaagggttcgggtggggtccacacagggggttaaaagaaggggaggcttgcttgtttgatccaggaggaaaccactggagcccaatttttaattttttttgggngggagggttcaaaattgggggatccagccatccagggctaaggtgggtgggattccatggtttttttaagccgttagggcaaaa

SEQ ID NO: 335229 - DNA, 307 bp, Zea mays
cggaattccggggtggaccacaggcgtccgaatcctcggtggtggggcttttgggttcccaattggacaacggttttttcggccacttcgggtcggggataacttacttgggggggggccgccttcccaaggggcggccgggtggtttaaggtggttggccgggggggaccgcccgggggggcagggggggcgcttccgccccagcccggaagggggaggtaaggtgatctttttctttcttttttattttttttttgttctttttttttattatttatatttattttatttatatttttccttatt

SEQ ID NO: 335230 - DNA, 440 bp, Zea mays
ggaataccggggcggacccaggcgtccggcagtgtccaaaattaggttgcctttttttgtaggggggaaaaggttggaggaggaaataggcggaccactttttattgggaaaaataattttgggggtggttttaagggcattccgtggtccaattttgccatggattttttttgggttggaagaaaagattttgggttgctttaaccagtaaaaagggtttttagggggtcaattcaatcctttggccatgatgttgttggcctaatatttaagggttgggccgatccatatgtaactggtcttaatgagggtttcttgagggggaaataccttgggaggaattttgtggccttttttgtggggtttacaaatgatattcgtaaactgtttttctttattggggggggaaaaaggaaattcatggttggtgcccggttgg

SEQ ID NO: 335231 - DNA, 440 bp, Zea mays
  unsure (1)..(440): unsure at all n locations
cgggnctggaataccggggcggaccacaggcgtccgcccacgcgtccgccaaggcgtccgggtattgcttttaaaataatccagtaaaacttttaagccggaacgaggatttgttgggggccactaataaggtttgagcagggaagggatccaaaatttgttgttgggggtgggtaaccatttttggttgggtccatttgttaagttttggttggttccatattggagatttttttggtggtttccatgcttccttccactccacaaatatggtgggcgaaggatttatgtccatgcttgccagattattgccaggggttggaagttttgtgttggccttattttaaaaaagggggttggaaccgtaggtggggttgggatttaattagctgggttggtagtagtgggggtcggaatcgttttgtgaaagggaccaggct

SEQ ID NO: 335232 - DNA, 354 bp, Zea mays
gaattccggggcggaccacaggcgtccgcccacgcgtccgcccacgcgtccgggtaatgcttttaaaataatccagtaaaatttttaagcgggaacgatgatttgttgggggacattaataaggtttgagcagggaagggatccaaaatttgtggttgggggagggtaaccatatttggttgggtccatatgttaggttttggttggttccataataaagatttttatggtggtttcctggcttccatccactccacaattaaggtgggcaaaggatttatgtccatgcttgccagttttttgccaggggtgtgaagtttttgtttggccatattttaaaaaagggggatggaa

SEQ ID NO: 335233 - DNA, 432 bp, Zea mays
cgggccggaattccgggtcgacccacccgtccggttaacgcaggcgcaggggcccaactggttgttttggttgcttaaaattccttgttccacggcttcttccggggttccgcaaccagtttcccttgaaaccggaaatccgggataggaggaagagaaaccggccggaaaagggaagggggtccaggaccgataaaggaatttttgcccggggtcctgccaggttgttagaatcctggcagccatggttttcctgttgggttctgggagattttgggggcgacggactcccttaatgctggtccttggttgttttgggggttcccggaccagaagcggcagcgccaaaggggaaacctttgttgactgggccagggcatggcttaagttaaagaagaaggggaggaggacctttttttttgatttttaacc

SEQ ID NO: 335234 - DNA, 259 bp, Zea mays
gggactggaattccggggccgaccaacgcgtccggggcaaattggatggatggacatgggaatatgcggttggagggggataataggtcctatggggaatggttcgaactaggggaacgcatggggtccgtaaacacaggacttaggggggaaaaaatcctaggtaacttaaaacaccggaaatttgttttaatataatgggaagatcctccaacaggggtggaaccatgttgattttgccaggaagactacccggaag

SEQ ID NO: 335235 - DNA, 387 bp, Zea mays
gggaattccggggcggaccacaggcgtccgccacacgcgtccggggccgcgggggggccgttttggttccagggcagcttaccaagggttccggccttccggttaaaccgcgcttggttaacataaggatttttttggtggtcgggcaggggaaaaggttcgttgggtggtttggttgcccccgtgggattgtgggggtttggggctcctccggggattgtccccgggtttttatttggggggtaaagggggttttgccttgggggcggccccaaggttggccttttttcttgtggacaacgcatattgtttgtcggttggtagggtggtagggttatggtagcggggtagctgacctttttccttccgtccttgtcctgaccaggg

SEQ ID NO: 335236 - DNA, 443 bp, Zea mays
gaaaacggggccgaccacaggcgtccgaaaaaacgccggtttccggaacaaggtcttgttttattaaaacaagttgccaagcggtttggaggggtccaatatatttatggaggagtccctaaaggcgccagtggagacctattcggtgaccttaacgtgtgctgggatcttacgttttttattggaagccgaacaaaggggcaggattggtcggtaggaccccagttaattaatgcttgtttttaattctatgttcttggacttgtatgtacttctccggttgatggttgatgcatccatttttatttgtttttcctcttgtttcaccatttttggtactcttttatttatattatatatttattttataattaattatttaatatttaataggggtgctgttttttaaattttaattttttttatttttttttcttttttta

SEQ ID NO: 335237 - DNA, 223 bp, Zea mays
  unsure (1)..(223): unsure at all n locations
aagggntaacaaccagaagggggccaccggcccgaaggagggaaggccgggggggaaggccggcaacagcggcaacgaaggggggaccaaaaacaaggccgnaagggggaagaacagggaggcgaccacggacaaacgcgcgggggccaacaacaacaaccaccaccagggcaaccacgggggccacggaaacggggggcccaaaaccagggccaaggaggac

SEQ ID NO: 335238 - DNA, 203 bp, Zea mays
  unsure (1)..(203): unsure at all n locations
acgggnccggaataccgggtccgaccacacccgtccaaaagtttcaccattgtaccatggaccggggattaaaaaggagcgtcggggaagcggccgggggcccgccaccgccaaaggtgtcccggtgggagcccagggatttccggtggttggggcaaaggttaacgggcgctggtccgcccgccgccgccgccgttctgggt

SEQ ID NO: 335239 - DNA, 119 bp, Zea mays
cctaaagcccctcaggcctaagttcaccaccacgaaccaaccgccagaaagagggacgaatggcgagctctcagtgctgcgataacccgccggccctgaacccggccttgggggagggc

SEQ ID NO: 335240 - DNA, 290 bp, Zea mays
cggggccgaccacgcgtacgaaatctcccacctagggtttcggttttttgtattctacctccgcgaaaatcccaaggagcaggtttttgtaatttaggacccgccaccgagaaaagaacgaggttgacgacaacaagttctagtttgtctataaggaatacttactgtatttcttttaggtaaccatcattttttttttttttctttcaaattcatcttcctagatgggaccctccacttcttcctattttgcttttttttgtttataatgtttctcttttttctttttt

SEQ ID NO: 335241 - DNA, 118 bp, Zea mays
gtcgtcgtcgtcgtcgtcgtcaagggacgacggccacccgccaccgccgttgcctacggcgccgtcgtcgttcggcctgggcctcgggctcttcccggcaacgggggccacccagccg

SEQ ID NO: 335242 - DNA, 311 bp, Zea mays
cgcgtgttctacgccttccccaatcttgtgtccggagcactcggtggagtctacaggttgcatggggagaggagtctaaaccatcactataatgtgtttagggtttcagtacctgaggcgtacttgaatgggttgaactgttattcgaaggaatgctgatccaaccctttccgtttttatttagaaaaaaagaggatccaagactgttttcctttttttttttatttttggcacaagggcttcatattaggcctaaacttgcccatctgtattattaaatgttttggtaacaaatgtgtttatggatgtaa

SEQ ID NO: 335243 - DNA, 342 bp, Zea mays
  unsure (1)..(342): unsure at all n locations
gggcggacccactcttttttttttttcttttccccccctcgccttttgttttgaagaagagaaaaaanacnnagtgattgttgttttttttattttggcccggcctctacaacacccctctatctttttacttttatttttttttcttttttcctatttcttttctcatttatttttttcctttccttttttccttccttctttattcttttttttttccttctttttttttcctttctttatttttccttcatttttttcttttcttcttctctctttcttatccttttttcttttttctttcttctctcttttttttttcccttctctttttttctcttt

SEQ ID NO: 335244 - DNA, 130 bp, Zea mays
  unsure (1)..(130): unsure at all n locations
cccatgcttttgnactacctttctcccagtctcctttttcagacaaaacagtatgcaaatggatagtttttttttatttttggccagcaccattaccccctttctaagcccagcaaacgtcattctaagc

SEQ ID NO: 335245 - DNA, 343 bp, Zea mays
gtttgctgctaccataaagaagtggttgcctcctgagccatacaagggaaagggggtcagatatatggatgaagttgtccgaaggaaggaaggaaaagccgggaagaagaaatagaaagggtttttttgccctctccttacttaatttaaattttcccactgtaatgtcttcgtctgctaaggctgaacctaagaaatatattgttctgtgctgaacgtggcatatagttgtaaaaaaaaaaaaaaaaaaaaaaaaaaaaaaaaaaaaaaaaaaaaaaaaaaaaaaaaaaaaaaaaaaaaaaaaaaaaaaaaaaaaaaaaaaaaaagggggggccgttttagg

SEQ ID NO: 335246 - DNA, 334 bp, Zea mays
tgctggatctggctgtggactacatcaaggatcttcagaagcaggtcaaggtgctgaacgacggccgcgccaactgcacctgctccggcggcggcaagctgcaggacccgttcaccagttagaaggagcagcagccggcgcgtagcagtgcgcggccatgcatggcccgcgcaaggccggcctgactgacgcctccgtgccggccggcggttaagctcgcttcgagcgctcctcctcgattggagtaagagtcgtcgaagtatagtagtatcagtgtacgtgttcggctttacatagttaactgaatgagtagtacgtagtctgttatacatgc

SEQ ID NO: 335247 - DNA, 404 bp, Zea mays
gcatgtgttgctaacgcgaccatttttcctttttattcacaggctcctatggctgccctgggggccccataccttccatcaatgaccgcttcagtatgtgaaaacccagcccttcaaccctacaggctccaacaggcaatcgcaacaagcaacttacctttatcacccctttctttcaacaatcgccagccctatctttggtgcagtcattggtacaaaccatcagggcacaacagctgcagcaactcgtgctaccagtgatcagccaagtagctctggcaaacctttctccctactctcagcaacaacaatttcttccattcaaccaactgtctacactgaaccctgctgcttatttgcagcaacaacaactactaccattcagccagctagctactgcctac

SEQ ID NO: 335248 - DNA, 442 bp, Zea mays
aaaaaccgggccgaccacgcgtccgcccacgcgtccgaaaaaaaaaaaaaaaaaattttattaaaaaaaaaaaaaaaaaaaaaaaaagaaaggaaaaaaaaaaaaaaaaaaaaagaaaaaaaaaaaaaaaaaaaaaaaaaaaaaaaaaaaaaaaaaaaaaaaaaaaaaaaaaaaaaaaaaaaaaaaaaaggggggcccttttaaaaaaaaaaagttaaaaacccggggaaggaaagaaaaaatttttttaaaggggccccaaaaaaaaaatcaaggggccgggtttaaaaaaagtggaaagggaaaaaaccgggggtaaccaaaaaaaaaacccttggaaaaaaaaccccttttcaaaaggggggaaaaaaaaaaaaagcccccaacaatacccctttaaaaaaaatggccaaacttaaatggaaaagggacccccccttta

SEQ ID NO: 335249 - DNA, 138 bp, Zea mays
gatccttctggaatgccccaacttcttaactaaagcaatggatccgtatgaataaaacgtgggctggcatgcccgggaccgtgggaaaattattaccacggcaacgacaaaaaaaaaggggttgcatcaagaagccaa

SEQ ID NO: 335250 - DNA, 342 bp, Zea mays
  unsure (1)..(342): unsure at all n locations
cggaannnngggnggancaggcgtccgacaaagcgtccgtaaaaaaagggtcaagatgttcattcttatcgttaacaatcagccattgggatgggcatttgttggtatccttcccatgtctcttgaattgcttcgttactgacatcactctgtgacctgccggcgattttcgcacgagggttcttgtttgtttctaggcgagctgactgcagtgcgcaggaacgctttccgtgaggttactatactgttattaagctggatcagctcgttatgacagctctgtttctaatttcttgttggcctcggcaagcttgttgggagtaaatttaataagcctttgat

SEQ ID NO: 335251 - DNA, 230 bp, Zea mays
catcctccgtcgtcgtgcctctgcgctccctactagaccaccgtcttctccgccacctccggtccgagatcacctacctcggggagcgccgccctccccacgtgccgccgagtagcttcaagtcgttcgccgtggaggaccgcccgggggagcagtgggtgcgcctcgcgccagcgcgggagggggaggcaaggaggttaaggtattttcatatattttttatgtttttt

SEQ ID NO: 335252 - DNA, 210 bp, Zea mays
atggccggccttccacacattctctttttcagatctgtgtcagaacctttcactcaactccaactactaatatcaccttctcacatactcatctcccgccttactacctgctactccatgctcttttacactcagcacctcattaatttacaatttcccaagatgtctgcttgataactttacctctttcatgtatctattatttgttat

SEQ ID NO: 335253 - DNA, 349 bp, Zea mays
  unsure (1)..(349): unsure at all n locations
gacccaggcgacnanatagccttaacctcgnccaagggacgattttgtttccatgagcgnggngatcctgaacggctgcgctgttcacaatttcggggcggacaaacccccctacccgcgcagcctggacaccacaaattgctgcctggacgccaacacctacatagtgctggcccaatctaagttataggcgggctcaaaacctacatacttatcgtcggttccatccattcttccaccaaacaaataatgttcgcaaacgatttattttcattcaagccacgtccctcgctgctattgaggctcccgggacagaagcggcagcgacaaaggtgaaacctttgctgac

SEQ ID NO: 335254 - DNA, 224 bp, Zea mays
  unsure (1)..(224): unsure at all n locations
gccgaccacgcgtncggaaacggnaagacactttgtttccttcgtcttttcttaaaaggagcnctccacagtcacggggagtgctatattatttatttaagcgcgatccatcacgtatatctgacgggaaacactgcccctgtgagtcgaatctcactccctcttcagggacacgttccatctctctgcttcagtcccacacgttgcgatgcacgaggaagttt

SEQ ID NO: 335255 - DNA, 161 bp, Zea mays
gcgtccggcatgcatatgagtatctccaggcttttaggtgtacgaaccgggaccgggcatagaggaggtgaaatgcttcggactgccgggggcacaatatctgttgccggcatttgcaggaagggggcatgcaaggtcggcccgtggtctaactagcaatc

SEQ ID NO: 335256 - DNA, 178 bp, Zea mays
ttttagaggaccaaagtttacttccccgtgaatgcaacgtaaatttttttaatagggccaccaaaataaaatccactgcccgtcgtttaaaaacgtggtaactggaaaaaccctggctaaaccaaattaaatcgctttgaagaaaatccccttttcgcaagttggaaaaaaacaaaaa

SEQ ID NO: 335257 - DNA, 178 bp, Zea mays
  unsure (1)..(178): unsure at all n locations
acgggccgaccacgcgtccgcccacgcttccgaaagcccttggttgccatnnttanntcctaatgaaatgaaccaagaccgggagccttttatacggttgcgctggagttctaaacctctgtaatatctgatgttcttgtggatacctgtttcagaattttcggttcctgaacccagt

SEQ ID NO: 335258 - DNA, 214 bp, Zea mays
aaaaaaaaaaaaaaaggaggagaaaaaaaaaataaaaaaaaaaataaataaaaaaaaaaaaaaaaaataaaaaaaaaataaaataaaaaaaaaataataaaaaaaaaaaaaaaaaaaaaaaaaaaaaataaaataaaaaaaaaaaaaaataaaataaaaaaaaaataaaaataaaaaaaaaaaaaaaaaaaaaaaaaaaaagaaaattggtaat

SEQ ID NO: 335259 - DNA, 232 bp, Zea mays
aaggggcccaaacaaccaccggttgaacaagttgcagccaaacaacccggggttccaacgaagcttgggcttgcattattttaccatgttttccatggggctgctccaccccgtcgtcccggagaaacaaagcgagggggaggtccgcccccaacgaccaccaccagcagcagggccacccccacgggcggggaccagggcgcccacgtgccccaagggtgggccaagagga

SEQ ID NO: 335260 - DNA, 248 bp, Zea mays
  unsure (1)..(248): unsure at all n locations
aaacccgggccgacccacgcttccgaccctacaagatccactcttccgaacacgtgcattcaaccncatacctcttctatgggccgccgtaaattaaataaactgccgcgcccaacaacacccacaaaactgaaaaaaccttgcctttacccaacttaatatccttccaaaacacccccttttgccacctttccttatatcaaaaaatcccctacctatcacccttccaaacatttgctcacccttaa

SEQ ID NO: 335261 - DNA, 207 bp, Zea mays
cgcacgcttttcacctacctcaagattttcatcattcccccaaaagaatccaaccgtgcggccgctttcatacaacttgatggctctacaataaattcacctaaatccatttcactttccctctatatacaacattttatacttaaaaactcttctttacccaacttaattcctctttataacatccctctttctccactttcctta

SEQ ID NO: 335262 - DNA, 64 bp, Zea mays
aaaacccgggccgacccacccttcctctaactaccaacaaccaaatttcctccttctctgtcac

SEQ ID NO: 335263 - DNA, 232 bp, Zea mays
ggagggcgtgggccaaaacttccgcaatatctgtatgatcgtcaaccccatcaactccaaggtgggcgttataggccaccttggactgatcacacttaacgtacgccgtacgccccatccgggatccaaattaaagaacttctttttctattaattacagttattgtaatttggttgctgtcacggtggtggcatgatttgagatgtgcatgatgatccttgtgtattttta

SEQ ID NO: 335264 - DNA, 363 bp, Zea mays
caattaactagcttcttctagctctagctaggctcgtctgctgcaagaaggtaacagcgcaggcatggaggggaaggaggaggacttccgcctgggcgccaacaagttctcggagcgccagcccatcggcacggcggcgcagggcacggacgaaaggactacaaggagcccccgccggcgccgttcttcgagcccggggagctcaagtcctggtccttctaccgcgccggcatcgccgagttcgtcgccaccttcctcttcctctacatctccatcctcaccgtcatgggcgtttccaagtccacctccaagtgcgccaccgtcggcatccagggcatcgcctggtccttcggcggcatgatc

SEQ ID NO: 335265 - DNA, 353 bp, Zea mays
cgaaattcccgggtcgaccacacgcgtccgcccacgcgtccgcccacgcttccgcctatgttttcgaaaaaaaaaaaaaaaaaaaaaaaaagaaaatataaaaaaaaaaaaaaagaaaaaaaaaaaaaaaaaaaaaaaataaaaaaaaaaaaaaataaaaaaaaaaaaaaaaaaagggtcggccttttaaagaatcaaaattaacttacccttcattgcaattaaatagtttttttattgtgccacctaaataaaattaattggccgttttttaaaaacttctgaactggaaaaaccttggcttaaccaaattaaatccctttgaagaaaatccccttttcgcaagttggctt

SEQ ID NO: 335266 - DNA, 88 bp, Zea mays
caaaaaaccaaaaacgcaccgtcctgtaacgaattcactaagttctagttcttttgtgctttgttaagaatataaacaatgaggtttc

SEQ ID NO: 335267 - DNA, 307 bp, Zea mays
ccgccttcggcgaggcccgcgtgacgatgcttaagacggcggcgaaggccaagccggcggcggcgtccgggagcccgtggtacggccccgaccgcgtgctgtacctgggcccactgtccggcgagccgccgagctacctgacgggcgagttcccgggcgctacggttgggacaccgcggggctgtcggcggacccggagacgttcgccaagaaccgggagctggaggtgatccactcccgctgggccatgctgggcgcgctcggctgcgtcttcccggagcttttcgcccgcaacggcgtcaagttc

SEQ ID NO: 335268 - DNA, 331 bp, Zea mays
ccggaattcccgggtcgaccacacgcgtccgaattgtacctgtccatgcatatatgatatatatatgtggtaacgttgtgaaagcaaacaatcttgggtcccaaaaaaaaaagaaaaaaaaaaaaaaaaaaaaaaaaaaaaaaaaaaaaaaaaaaaaaaaaaaaaaaaaaaaaaaaaaaaaaaaaaaaaaaaaaaaaaaaaaaaaaaaaaaaaaaaaatttttggaaaaaccaaaaaaaaaaaaaaggggaaaaaaaaaaaaaaattttaaaaaaaaaaaaaaaagggggggggcctttaaaaggatcaaaatttactccccctgttttgg

SEQ ID NO: 335269 - DNA, 160 bp, Zea mays
gtccgaattcccgtcgacccacctccgcgaaccttgggcggacacttggacttcctattgcgaggatagcccgaagggcgtgcttatacaccaaacggggtctaaaccaaaacttgacaacctaaaaggcttgcaagacattaaacataaaatttacttt

SEQ ID NO: 335270 - DNA, 156 bp, Zea mays
tagacgcgagcgccccttttttttttttttgaacataacgttgggatacagtttttagactgttaaacgaaagaggaatagaaaggtcgcctcacggaaggtcctttcttgggaaagtgaggaaggggtacatcagttttccttcgccggcgtttt

SEQ ID NO: 335271 - DNA, 209 bp, Zea mays
accacgcgtcctaaaaacttcttcatcgcctcctttgactgttggagtagtttggcccccaaaccccccgacagaaccaattacatacactcgcgaggcccccaaaaaaaaaatccaaactgaaccccctccttctaacaagatggtgatgcaatcatgaaatgattataatatacagacgcactcctgtttgtgttcagccccagccc

SEQ ID NO: 335272 - DNA, 123 bp, Zea mays
aaaaaccgggccgacccacgcttccgcaagtctctctacgtaccattccaaaaataaaacacccgaaatggcaaccaacacgatggcctttttctaaacatccttggccgaaaaaaccataaa

SEQ ID NO: 335273 - DNA, 427 bp, Zea mays
cctacggcgaggtcctcgagtccaagatcatcctcgatcgggagacgcagaggtcccgcggcttcggcttcgtcaccttctccacggaggaggcgatgcggaacgccatcgagggcatgaacggcaaggagctggacggccgcaacatcaccgtcacgaggcccagtcccgcggcggccgtggaggcggcggcggtgggtacggtggtggccgtggaggcggcggctacggcggtggcgggcgccgtgatggcggtggcggctacggcggtggcggcggctacggtggcggcggcggttacggtggtggtggcggcggttacggcggtggcaaccgtggcggcggttacggcaactccgacgggaacttggggaactgagcggtggggcccgcgcggccaagttttcctgttcgttaccgtgatgtt

SEQ ID NO: 335274 - DNA, 69 bp, Zea mays
aaacggaccgccgggcgccgaccaggccaaccagcccagggacaaaggggttaaagcgcgggggaacca

SEQ ID NO: 335275 - DNA, 253 bp, Zea mays
  unsure (1)..(253): unsure at all n locations
cgtccggaacaagaagtnccaaaaccccctcaccttctagatctctctcctcccaanaaccacatgagacgggtcttttctacagacgggggggcccaacaaataacccgtccaaaattatggtctgcacttgcctatttcaccggtggaagtgaaacacactatcatccattaatttcaaatggcgccagtagcgctatagttagatttttttggctgttctttttgtacagtacctattgctaaaaaagat

SEQ ID NO: 335276 - DNA, 147 bp, Zea mays
cccactcatccacccactcttctctttttagtcgttaaaccaatacataaaaactttgtaggcaatataataatattcttgcgaacactcataaaatctgaccacctaaatgatccaactcctcctcctggaacttgttcaccattt

SEQ ID NO: 335277 - DNA, 272 bp, Zea mays
aaaaacccgggccgaccacacgcgtccggttacacgcaagcgcaagtcctcaacttttcttattcgctgcctcaaatcccctgctacaccgccttcttcgcggttccgccagcagcctcccctgcaaccgggaattcgggataagaggaagagaaaccgttcggcaaaaggaaaggagtccagagcgataaaagaatctttgaccggagtcctgccaggctgataaaatcctgtaagccatggatttactgttaggttctggaagattcttt

SEQ ID NO: 335278 - DNA, 164 bp, Zea mays
cccacgcttccgaaaaaaaaaaaaatatttttttttaaaaaaaataaaaaaaaaaataaaagaaaaaaataaaaaaaatggggggggccgttttaaaggatcaaggctaacttacgcgtgcttgcaacgtaaaagtttttttttagtgtaacctaaattaataa

SEQ ID NO: 335279 - DNA, 142 bp, Zea mays
aaaaaccgggccgacccaacgctccggggacgcgtttggtcgccaaaaaggtgttaatctccaaacgcgtgatgtataccccttatgcacaaaatcgatggatcttcgactctaggagttgagagatgcaattagtattgcc

SEQ ID NO: 335280 - DNA, 165 bp, Zea mays
cccacgcgtccgaaaaaaaaaaaaaaaaaaaaaaaaaaaaaaaaaaaaaaaaaaaaaaaaaaaaaaaaaaaaaaaaaaaagggggcggccgttttaaaggatccaagtttacgtacccgtgcatgcaacgtaatagtttttttatagggtcacctaaataaatta

SEQ ID NO: 335281 - DNA, 209 bp, Zea mays
ccggcccggaattccgggcggccccacccttccttatagggttttgttattaccccatgaagcttttattggcttcgattgatattgggagcggggttgctggttcccttgaaaaaaaaaaaaagggccggccgttttagaggttccaggtttccttccccttccttgcaacgtattagtttttttttggggtcacctaaattaaatta

SEQ ID NO: 335282 - DNA, 394 bp, Zea mays
  unsure (1)..(394): unsure at all n locations
aacgggcccgaatcccgggccgaccaacccttccaacccttccggaaaacctgcctttttttttttcaattttccggggccaacttaatgggtggggtttctggaataaatatccttccccccaaccccataggcccgaatcttgaaatgggttaaatcttcgaaataatggatttctttagtgtnaaaaaaaaaaaaaaaaaaaaaaaaaaaaaaaaaaatttttaaatttatatataataaaaaaaaaaaaaaaaaaaaaaaaaataaaaaaaaaaaataaaatttgggccgccctccttaatgaatcaattttacctacccctttcttccaacttattatttttttatttggtcccctaaatttaaattatctgccctcttttttaaacct

SEQ ID NO: 335283 - DNA, 331 bp, Zea mays
  unsure (1)..(331): unsure at all n locations
cccaggccgaccacacccttcacgtttttttccttaaaaaaaaaaaaaaaaaatttttaattaaaaaaaaaaaaaaaaaaaaaagagaaaaaattaaaaaaaaaaaatgtaaaaaaaaaaaaaaaaaaaaaaaaaaaaaaaaaaaaaaaaaaaanggggcccccctttttaaaaaaccaaattttctttccccttctttccaaataaaaattttttttttttgtcccccaaaataaaataaattcccccctttttaaaaactcttaacttgaaaaaaccctttcttacccaaattaaatccctttaaaaaaaatcccttttttccaatttt

SEQ ID NO: 335284 - DNA, 149 bp, Zea mays
aaccccccctttaccggccctttaaccccgccggttttgttgtttccccccatctttcccgttacatttgccagcgccttacccccctttcttttcgtttttttcccttcctttttccacactttccccgtttttccccttaaattttt

SEQ ID NO: 335285 - DNA, 163 bp, Zea mays
ccgggccgcccaacccttccgttattttaaaaccgaaaccccccccctttttatttttttttcgaccacaaactttttccagccttcatcatgtgttcctaggattgcaaccaaatcagccaaattccataactccataaaatggtctcccttttaaaatgaa

SEQ ID NO: 335286 - DNA, 479 bp, Zea mays
  unsure (1)..(479): unsure at all n locations
cggaatnccggggtggaccaaggcttccgccaacccttccgaaaaaaaaaaaaaaaaatttttatttaaaaaaaaaaaaaaaaaaaaaaaggaggaaaaaaaataaataaagaggagggaaaaaaaaaaaaaaaaaaaaaaaatttataaaaaattatattaaataataaaattattaattaattatttattaaatatatattattaaattttaaaatttaataaaaaattgttatttttttttgttttttatattaataccattatcccaatctttgatttatcattttattgttttttttttattcttctttttttatatatttttattttttttttattaatatgtttttgtttaattttttttttttttttatttttttattatttttttatgtctttttttctttttttatttttttttttatataatttatatttttttctttcttttttttttttttttttttataattatt

SEQ ID NO: 335287 - DNA, 222 bp, Zea mays
cgaaattcccggttcgaccacacccttccgcccttgcttaaaaagtaatcgaacttttctttggcctctttacagtaatatagagcccaggtttctaaataaataagctgggtatatatatatttcccccccccccctaattttttttactaaaattgtaaaattaaaaaaaaaaataaaaaaaagggcctttcctttttaaagtatccaatttaactaacc

SEQ ID NO: 335288 - DNA, 253 bp, Zea mays
cgaaattcccggttcgaccacacccttccgcgacacccttggccgaacccttggtcttactcttggccgaacccttggccgaacccttggggccatattaactgaagggacgaaactgataacagtaaatcccaacaccaaggtcttgcaggcaatgcagttaataacaaaaaaccgcttaaaaaacatcccggtaatcaacggaccgggaatcctgggaatggtttcaatcggcaacttcttccccccgttg

SEQ ID NO: 335289 - DNA, 375 bp, Zea mays
  unsure (1)..(375): unsure at all n locations
aacgggnccgaaatcccgcggtcgaccacacccttcctttgttcttcgcaccttgcttcgccctaatttacttggttggccccccttccccccgcggggttttaaacaactcttgtttgtacaacaattccccccctcctcattcccactttttctttaggaattacgtcctctttaccatcttgaacaacaccgcttttccttactcattaaccaacgccatttccttttttatctctatttccaccaagtccttccccataaggcccattgtggaattactttttgcttttttttttacacattttttgtatttcacttaccaaattatttaattatccttttcttattaaccttctctttttttttatttta

SEQ ID NO: 335290 - DNA, 407 bp, Zea mays
cgggcccggaattccggggtggaccacacccttccaagccgggcaggacccccgaccactaaacagtgaaattccacttgtgccttcaaaccaattgttgttccttaaaccaattggggtaattttggggggttaaaatcggaaggcccttcaacaggccctttgttgttgaagaagagttcctcaggaaattccaggagtttccgtttcaattaaactttaagttggcgatggtgcacgcgtggttaatggttgccggccgtgcccttagcaccaaaggaaccttccacaccaaggttggccatggggggacgatgccccagggcttggttgttgtggatgcaacgcacttgtacccgggcttaagttacataaccgtaaaagactacttggacgttttccttccc

SEQ ID NO: 335291 - DNA, 79 bp, Zea mays
ccggcccgaatccccgtccgcccccccttccgttcctaaaccccaaccgcctcccctttttttttttttttttttttag

SEQ ID NO: 335292 - DNA, 484 bp, Zea mays
  unsure (1)..(484): unsure at all n locations
aaaaaaaaaanaatannnaaaaattaaaataaaatttttttatatttannaannnaaaaaaaaaanaaannggganaagggattaaaaaaaaaaaaattgaaaggtaaaaaaaaaaaataaanaatataaaaaaataatattatataaaaaaaaaaaataaaaaaaaataaaaaaaaaaataaaattaataaaataaaaaataaataaaaaaaaaaaataaaaataaaaataaaataaataaattaatataataaaaaaaaaaaaaataaataaaaaaaaaaaaaaaaaaaataaaataaaaaaattaaataaaaaaaaaataataaggggaggagggataaaaaaaaatataataaaaaaaaaaaaaatataattatataaattaaaataaatatataataataaaaaaataaaaaaaataattaaaattaaaatatattaatattaaaaaataaatataataaaataagaatatattataaa

SEQ ID NO: 335293 - DNA, 372 bp, Zea mays
  unsure (1)..(372): unsure at all n locations
gggngggccaagccgaccgaacagaaatcaaaacaagcacttcaacttattacggcccctgccaacaaacacacaaagcgtggcacccaatggttaattagcggaaggtgaactactcttcgaagaagttaaggtcgttgcccccggccggtttcggccgcaacggcggcggcttcaacaacaacttcttaaaggaaaagttcaaggaggtcaacacggtttaacccgccggtgcaaacaacaacaacaacaatgttaacaacggcggccacggtttcttgttccccaagaccagggtcaaaaagaacataaccacttgaaccgggggggtccacaaccccaggaaaagcttctttgccagggttaattaag

SEQ ID NO: 335294 - DNA, 451 bp, Zea mays
  unsure (1)..(451): unsure at all n locations
ccgnncggaaatnccggggcggcccacagccgtccggttcctggattccctgaagatcttaagttggaggtttgtttggatgaggttgcctaagggctggggatcatggtcccaaaccgggggattgaacctgaaaaccttgaagttggggtttttttgcaaccccttaattacggagctaatgatctacttttgccctaagttttttttgaaccatgctccattttttttgtaaccccagattaatgccaaatttagttgaaattaaaggtttaagtttgctggttttttgcctaatgtttccagtcctggggccatactttgttttttaagcgacaaaaacttgttgaaaactagttaatcttagctcctgggtaatgggggtttttttaaccttaatgtttagattttgtcctaagttcagttaaaagaattatttttttgggttgcc

SEQ ID NO: 335295 - DNA, 323 bp, Zea mays
  unsure (1)..(323): unsure at all n locations
ccgaaatnccggggcggaccacagccgcccgggaccccttggcttaagggtaacagttaacataatcccgtcgtaagtcgtaaaactagctggtagcaacctaaaaggacccggcggtccttccttccaaacgtccttccccttgggcccctccgttttggcaacatggccccgttggcctccgccgccttaattacttctttccaaaggctggggtccgccgccgtttttcccgtagcctgttggtcctggggctgttgttcaaccggtggtggtttttcttactttcctactgtttaatggtttttttttccctttttttt

SEQ ID NO: 335296 - DNA, 221 bp, Zea mays
aacgggcccggaattccggggtggaccaacgcttccgccacacccttccgaaaccgggaggttgttgatccttgtaaatggccagccttatggaactcggttgtaaattttagggtggataaaaggattccatgcctttaatgcaaagattaaattaaacatgaaactgttgaactgggtaaggggggaaacaacttttgaccacaggagtccggggtttc

SEQ ID NO: 335297 - DNA, 335 bp, Zea mays
  unsure (1)..(335): unsure at all n locations
cgaaatnccggggccgaccacacccttccgcccacccgtccgaaaaaaaaagcctgaaccttttgccgttgccgaaccggttccgcgcgggaaccctccggggccggggcggaagccnaaaaacttaaccaccccgaatggaaaggaaaaaaaggctttgttggcaaaaataatggccaaaatacccggttacaaaaaaagctaagttaaggaagcaaacaacaaggcggaccccgccggtaagaacagaaccagttcttaaggtcgcatcctaaactcgtttcttgcccttgcccggtccttggtcaacaaaaatttttttaggggggggtggg

SEQ ID NO: 335298 - DNA, 402 bp, Zea mays
  unsure (1)..(402): unsure at all n locations
ggcggaccacccgtccgtttaacctggggggccctaaaacaacaaattcaaggaggaaccaccattgcttttaagggctgaataaaaacaccaggccgtgccaattnaatttccaaaaatttcaccaaaaaacttaaggcccttcaccaaaggaattgtttttaccattttccactttttaattattgccctttgaaaaatgaaccgcttcaattaattaaaattttttaagggtttaataacttgcggcaaatctttttgttggccatttaaaaccaccaggaccttatttccacacttgttttctttttaaagatgaagtcctaaaaaccttattttacctgaggcaacttaaccttactccaaccttttgttttgaattgcttttcaaaaccaggtttt

SEQ ID NO: 335299 - DNA, 371 bp, Zea mays
  unsure (1)..(371): unsure at all n locations
caaaaaaacaaaatgaaacctctaatgggaattaatttaaatgaaataccgcctccatatttcaagtttaaaattacaaaaactaagtttccctttnaaaaaaaaaaaaaaaaaaaaaaaaaaaaaaaaaaaaaaaaaaaaaaaaaaaaaaaaaaaaaaaaaaaaaaaaaaaaaaaaaaaaaaaaaaaaaaaataaaaaaaaataaaaaaaaaaaaaaaaaaaaaaaaaaatataaggggctccccttttaaaaaatccaaaattaactccccgttaattccaaaaaaaaatttttttttaatccccccaaaaaaaaaataaatgcccccttttttaaaacctttttctggaaaaaacccttgctttcccc

SEQ ID NO: 335300 - DNA, 365 bp, Zea mays
  unsure (1)..(365): unsure at all n locations
cggaatcccggggccgcccacacccttccgggaacctcctaactttccaccaattcctattgaaggtccaaaaagtaccaaaaagtcggggggccataaaaaatcgtgggaggcaccancctttatccacccttaaaccaaaaaccaaaaaccttctggagcctcccaggaccaaagtttcgataaactaaatgatttaccaccccttagtgttgttaattttagggaagaggaagaccagttcctgcctgcccttaaggaaaaaagccttgcctaacaagaagcccgaaaatttccaaaggaggaagaagaaattcttttcctacttaagggtccacttttaaggaaactaccaaaaatccttc

SEQ ID NO: 335301 - DNA, 63 bp, Zea mays
ccaacccttccgcttgaaaaaaataaagaaaatgcccccgactaactcccgcttgaacttccc

SEQ ID NO: 335302 - DNA, 207 bp, Zea mays
  unsure (1)..(207): unsure at all n locations
caaccacacccgtccgaaaccccngaccaaacgttaagtttcaattatgggaaaaacacaaaaccaagcgcgagattttaattaaaaattggctcgaaaaacaaaccaacctttaatttctcaatcccttcctattccttaaaacacttaactaccttttccttacctttctatatctttttttatttcataattctttcttctttc

SEQ ID NO: 335303 - DNA, 386 bp, Zea mays
ggaaatcccggggcggcccacaggcttccgacttagttttagccaacccttccgaaattccttgtccttggggtccaactttgtttggggcaccaagcctgcttggggtaggcctgggccattattgtttacgggacctggtgccgttgcctgtagttgggtgctaatccaatctgtggtaattcctgttggggtttttttggtaatatccgaatgggggtccatatttttttactggtcccttagggcatccaccgggttgttggcagagggaagaagaattgtacccggtggagctgaagatacctacgggttggaaaaaatccattggggatctacggcggccctttttgtaaagggcataacttttttgggtggggtttagc

SEQ ID NO: 335304 - DNA, 413 bp, Zea mays
  unsure (1)..(413): unsure at all n locations
cggggcgcgaccacagccgncctcccggtccaaacaccaagccacttgaaactttcttttttccctaaaaggcccctttaagggggaagcacaaccctttttttggggggttaaccaaacattttaattcttcccgccacccccccaaaactgaatgcctcccttccagaatccattggagcccacactacttcttcctgcatttaatccggttaaaaccatttttttctaaccatccattaacccattatcctgaatgtaaatttgtttaaaggaacaaaaaattttcaattattaaaaatccgtacctttgccttaaatgagaccaatattgaatgttaagacctaataatcttgacccatcattccttccttccagttagaataaaattggatgagtttatagattctgg

SEQ ID NO: 335305 - DNA, 394 bp, Zea mays
cggaattcccgggccgcccacacccttccggaaaaggccttttccaagtgaatcattttccttggcggttcttagccttttgtaacggggagggttaaacctgttgcggggaaaatttaatccattttttgttggcagggttccattttttgttgttgttgaaaaatttccagcaccaccaaaggcagttccttttttattccttagagggaccccagggacctgttatttcgtccaattgaccaggggtcttaacggaaggaacctgcccgccattttactgcaaagattgttcctgtttcaaccaaatttgaagatccttccattgaaggggggcgtggtaggtttgccatgtaaccaaccaccaggccacctgcagtggaaattgccaaac

SEQ ID NO: 335306 - DNA, 206 bp, Zea mays
  unsure (1)..(206): unsure at all n locations
acgggnccgaatccccgtccgccccacccttcctaaaccccttaccaaacgctaatcttcttttatccgacaaccaccaaaccctgccccccgttttaattaaaaattgcttcgaaaaccaaaccaaccttattttttccaaccctttctttacctctaaactcttattctcccttccttcttattcttatttctttattttaatt

SEQ ID NO: 335307 - DNA, 442 bp, Zea mays
  unsure (1)..(442): unsure at all n locations
ccccgggccaaccaacccttccnaaaccccttgtccaaccccttgtcctcattattctttaaggtatcccttctcttaccacggagggtctaacatactaagtttgctgtgtcaccccattacacttatttttattgaaccatttttcttaatcatttgttaccattactccccctatcttaataatttttttttttttttccccataactttatttcacccttttttaactaaaaatatttttaaattctttttttttccctactttttctatattatatatctcctatttatctcttattattactttctattaaacccttattattttgcgtgttgttcctatatttctttattttttattactttttttattttttattttttttttatttttttttttttttttttttcattattttatctattttttttcttaatt

SEQ ID NO: 335308 - DNA, 261 bp, Zea mays
cgaaattcccgggccgaccacacccttccgcgaccccttggccgaccccttggggttaattcctttttgagacaaattttaaattttggggaaaggtttgttgaactggggagggtccactttaactgaaatttgttaccaatcatggaaagaaatgtaactgtttcctttttgttttttttggacctccgttgaaacccaatctttttttttttttggttccctaatggcctttaaaccccgttgaacccggcctttttt

SEQ ID NO: 335309 - DNA, 187 bp, Zea mays
  unsure (1)..(187): unsure at all n locations
cgaaannccggggcggaccgaggcgtnccaatttcccaaaaccctaaaccagggcccatttttttaagcccacccccttctttccaagggccggtttaaccactttaattgtcgggatacccaacttaatcccttaaaggacccaggacccgttggttttggttttggaccgaaaattgccaggatt

SEQ ID NO: 335310 - DNA, 294 bp, Zea mays
cgaaatcccggggccgaccaacccttcctccaacccttccgcttgggtaccaactttaataacttgaacttgccccccgccgtttggagcaacgtccaacccttgttcttgaagaccaacccaagttccttaatcttggtgaagaacttcaaccgttacttgcccggcgggaacgaaaaaacggcgccgccaagaacctcccccttcctcgctttaatgaacggcttttcttcttaatccgccaagaaccccttaatgtttttaacaataaccggggccaagaacggtttgaac

SEQ ID NO: 335311 - DNA, 425 bp, Zea mays
gggcccggaattcccgggtggaccacacccttccgcgacacccttggcccggggcccaccttggctaaaataaagccgaaggctttgttcgggcaaggcaagttaaaaaaggtcccgggccaaataaccttggccacaatcgtaacttacatgatcttgggcttcctggtcgggtcctccgtttaccttgcttacaggtcctgttggccaggcacaggaccaccggaggcattggccccccaggggaactgatcccccgccgactgcttggttgatctcgctgtggtggattaatccggttggggtaaaatttttggttgttgctgcttaccaattggggtttttggaccttgattaggttgtttgttgatccggttccaccgtacccgttgttttttatgtgaaattttttccttttatttaat

SEQ ID NO: 335312 - DNA, 468 bp, Zea mays
ccggcccgaaattcccgggccgaccacacccttccgaaaaaaaaaaaaaaaaaaaaaaaaaaaaaaataaaaaaaaaaaaaagggccgcccgttgtaggggatcaaacttaactggcggggccttccaacttaatactttttttatagttcaaccaaaattaaattaattgccctccttttaaaaacttcttacctggaaaacccttgcctttcccaaattaaatccctttccacaaaatccccttttccccagttgccttattaccaaaaagccccgaaccaatcccctttccaaacatttccccaccctaattgccaattggaaccccccttttaccggcgcataaaccccgccttttttttttttaccccccagctttcccttttaatttgcaagtccctaatcccccgttctttttctttttttccttttcttttttcccaactttctccgtttttccctttaa

SEQ ID NO: 335313 - DNA, 332 bp, Zea mays
cggaattccgggtggaccacacccttccggaacctaattaagaaggtaaaggtcttgatccggaggttgccacccaaaaaaaacacgcaagggtaaggttccacaagcgatcgcagccttccttcctgtgtcaactgaaaggttaagtttgtaaggttttgaggtttattgttgtttggatcccaattttgtttcttgtttccagtttttgtccactgtttaggtttagccatcctggggaactgtgcttctttttgaccaacacagggtgtggcatgtcctgaatttaatgccgtgttaatgcatccaactccatttatttttttgtgggc

SEQ ID NO: 335314 - DNA, 364 bp, Zea mays
  unsure (1)..(364): unsure at all n locations
aaatcccggggccgcccaagccttccnnaaccccttggccaacccattcaattccttttttttcttaaccgcaaattccaaaaaaaccggggtttttttcctgaaattcccagttaaaacaaacnccttcccttctaaattctttaaccctttcaaaacctgaacgtccaaggccttttccaagaaaaatttccttaggtttggcggctttttaaaaaaaaactttaagtttttccccagttccaaaatcgggaacaacagcatcctaacttacaatatcttttcctaaggcccaaatttttaaactaaaccatttaatcccattaattaaaacgttggtttttttccctccttcctttttaaa

SEQ ID NO: 335315 - DNA, 447 bp, Zea mays
gggccgaccacacccttccaaaattcccttacttaagtttactttccatttttccgcccaccaccaaacccgggcgtccgtttaaatttaaaattgcctgggaaaccaaccctaccttttttttccaaacccctttcctttcctttaaacactcattaaactttgcttcatctccttttttttatttttccaataactactccaccccttccaatttcattaaccaacctatccttatttgttaacaaatttcttctccttctttcttatccattatccatttttattttcccatttttttttcctttcttgtattggcgtaccaaattttttttttatattatttttaaattacttattattattactattctccccttttttttattttttattttttcttatatatttacttcttctcctttctttccttctctattttattta

SEQ ID NO: 335316 - DNA, 290 bp, Zea mays
  unsure (1)..(290): unsure at all n locations
caacctaacaaactttaacttccttttccaattacttttactcttactcaatttcctcggtgccctgtctttttcctaaattgttttgtcctataaccctacttnaatccctttccttttttaaacattcctccaatttttcgtttccgttccctcccaaaccttcaaatttttccccctacttaattcaacccttcaaaattccgttaaactttttccttaattctccttattccaatttttttcccttcaattaatcgaaccttttgttgtccgaaacacctttaata

SEQ ID NO: 335317 - DNA, 427 bp, Zea mays
cccgggcgggccacacccttccaaaaaaaaaaaaaaaaaaaaaaaaaatttaattttaaaaaaaaaaaaaaaaaaaaaaggaaaggggaaaaataaaaaaaagggaagggattaaaaaaaaaaaaaaaaaaaaaaggggcccccctttttaaagatccaaattttcctcccccttctttccaacttataattttttttttgttgcccctaaattaaattaacttgcccgcgttttaaaaccttttaacttgaaaaacccttgccttccccaacttaattccctttaaaaaaattccccttttcccaacttgctttataaccaaaaggccccccccggttcccctttccaaaaatttcccaaccttaattgcaaattggacccccccttttaccgcccattaaaccccgcggttttttttgtttcccc

SEQ ID NO: 335318 - DNA, 227 bp, Zea mays
cgaaaaacccggtccgaccacacccttccgccaacccttccgtttttaaaccccaattctcttcttcgaattttaataccccttcttgcggggttttcttaactttgggcagggacaacaactccttcaaaaaccctttaacaacctacttcaatttcttcaattcaaaaatcatccttaatccgaaaacccattatttcccccttttttctcttcataactttttc

SEQ ID NO: 335319 - DNA, 414 bp, Zea mays
  unsure (1)..(414): unsure at all n locations
aaannccggggcggcccaacccttccaaccaaaccagccaccctaaaaaaacttattttcctcccctgtcaagtttcctttgccttgtccccaatcccgttttgcctgccagatccaacctttcaaaattacccaaccaattcccttttttgtttcccccaatgccgaagaaccattcaacccccaattaccatcaacctaagaaaaggaagtttttgttgaaccaccaccacccaagaaggcccccaaacttaagttacctgaatttcttccagttgccggttccccagcccgcgttttccttcgttggcttttacggcttttcaaaggacaaccccttcctcttcctcccaatcgttaaccccttcaattttcccttaaaggccttctttagcccctttatacaaccttttg

SEQ ID NO: 335320 - DNA, 386 bp, Zea mays
ggaacccggggcggaccaacccttccgatggcctggaccctttgaaagctctttaataatccggaaaccaccaaaacctggctggcgcggagaagttccaaggggtggcgaagccattccacccatttgttcccaaggaagattcttttttttcgaaatttaaagtggagttgtttaaacttgtttaacagttaattggtaatcacttcctgaacacttacccaaattttggcaggaccatacctgtcggggaagcaaaccgttacccaaaggttcctgtccccaggttcctggaagctggtcgatttgttttaaaagctgttccaaatgaatctgttttggtaacaataaggcctgttttaacaagcagggcctaaatgtccttt

SEQ ID NO: 335321 - DNA, 430 bp, Zea mays
cgggcggaccaggcttccgtttttaaaccgcaaccgccttaatcttgtttctttcttggaaccaaccaagcccttaatcggggggtcaacttaaacccaagttagcggttaatccttatttcctaaaaaccttgaccggattaattttttaaattaattaaataaacagttgttttgacctactttccaagttttagtttaaaaatcttttaaaggaaacaacttaagttccagttaaccgaattccgcccagaacatcccgtcctattgcttaattttgaacctttccagtcttttcttactttattttccttattttaaaacattttttttcttccatttttcttttaaaataatcccttttcctgtaaacctaattttttttttttaattgcctttcctttttttttcctagttttttgggtccctt

SEQ ID NO: 335322 - DNA, 296 bp, Zea mays
cggaatccccgggcggaccacaggcttccaaatccttcctaataatcacttttgtcctgtttattattcaaagccaccaaaaatttttgagccgggattaaaatccttcctgtaggggaaataaaaaacctgcctagccatcctacaccctatttgaatttaccacctttttaaccaccttattccccttttaaatcaacaccatttaaataatatttccataacatttttttttcctcaaaaaaaaaaaaaaaaaataaaaaattaattttaataaataaaaaaaatataataaa

SEQ ID NO: 335323 - DNA, 314 bp, Zea mays
  unsure (1)..(314): unsure at all n locations
cggggcgggccaacccgaacacggccagcccccttagcccccttttcctttcctttctcttccctcccttcctccccactggggccgcttttttccaataaagtgtttagaaccaaaaaatcccttaaggnttccaattaattccttaacgcaacctcaaccccaaaaaacttaattagggtaatggttaacttatttgcccatccccctaataaacatattttccccctttaacttttaatccaactttctaaatatagaactttttttccaaacttaaccaacactaaacccttattcgttctatttttttt

SEQ ID NO: 335324 - DNA, 335 bp, Zea mays
  unsure (1)..(335): unsure at all n locations
cccgggccgaccaacccttccgaaaaaaaaaaaaaaaaaaataaaaattaaatttaaaaaaaaaaaaaaaaaaaaaaaaggaaaggtgggctttcctatttggagagtccaacctaacnaccccttccttccaacttaaaacttttttaatatttcacccaaaatcaaatcaactgcccgccttttaacaccttcgaacctgaaaaacccctgccttacccaaattaaatccctttcaaaaaaatccccttttccaaatttcccaattacaaaaaacccccaacccatccccctttccaaaaatttcccaacccaaaatccaaaatggacccccc

SEQ ID NO: 335325 - DNA, 365 bp, Zea mays
gggggccgcccacccttccaattagaataaaccctccattggtgtttactgttaatttggttaaccatgaggggggtggtttcttacttggttctgggaccaatgcctaaaaaaaccaccttgttgccaaattcttttggaagaaataaaggacccaaggccttccttaatggaaaaaagttgttggccaatatttttgtttcaaaccggaagttttaaatcgatgatttttttaatccaaaggcaccacatactgagcttaaaccacccttaatacttagttcctggttgttaaagcaaccttttaaagcaaccttaaaacttagctcctggttgcatcccttaaagttaatgcattcattttt

SEQ ID NO: 335326 - DNA, 90 bp, Zea mays
  unsure (1)..(90): unsure at all n locations
gaattccnggcctgtgggggatcacaagcttacttccccttgcttccaacgtattagtttttttttggggtaacctaaattaaattaggg

SEQ ID NO: 335327 - DNA, 474 bp, Zea mays
cggggcgggccacaggcgtccggccaaataatttgttgggggggaccaaaaaaattggttttgggggctctgaattgtttagagggggccggttgatgatgtcgaaagggaccattaacattttaagggttggatggtggttttggggggcgggtaatatcaatatatacgggtggccaaactagttgggtggatggagtttgaccgtggtggggtaattggaatggggttggggatagtttcccaggatttttaatcggttttccatgggctttggggaccctaaatggataagaccggttaccaaggattgatgtaggttaaaagtctaagggttcatgacagctgttagtggggccttttgtggtccaacttttgttcttgttaaggaggctggagtctgtttatttggcaaccattttggttttgtgggttggatgtcaaaaaaaaataattctttttttctttcttttt

SEQ ID NO: 335328 - DNA, 302 bp, Zea mays
  unsure (1)..(302): unsure at all n locations
aaaaccggggcggaccaacccttccgngaacccttggtttttcctgaagttggcctttaaactcctaagccccccccggcggcccgttccaattgtagattttttcgggtgttcccatccaacccagttccagttaacttgggcgggcgtcctggccgggccaagcgccgggaagtttttttaccaagccgggctttttcctcctttgttgggggctccggtttaagttggccctgggcgcagccggggttttttaatgacccgtggtggagctccattttaagcggccggacggtccggtt

SEQ ID NO: 335329 - DNA, 372 bp, Zea mays
  unsure (1)..(372): unsure at all n locations
gcggaaatnccgggcggaccaacgcttccgccaacgcttcggttaaaccttcattttacttttggccggaaatctttgccaaacggggaggtttgaatttggcccggggaggacaaaatccaagccaaaggcataataacaaggaaacccaagaacttaaagcaaggccgaagccggtttggtccaaaaaaccgaatgttaaattggtcctaaattttttgcaagctaagttgtacttcggaaagaacgccaagctaaaggcttctaaaaggaagttccaggatgtggccaaagattcctataaccctaataaccaaagtaccttccatagggggggtcctgaaaacctgcccaagtatgggaccactaaca

SEQ ID NO: 335330 - DNA, 392 bp, Zea mays
ggcggaccacacccttccgaattaccaacgtttttgggacctatttaagtctccagctccgttaacataatggaaaggggcaggataataaaaacgggggccggttttatcgccccacaaattaatgaaggcggtttaaaatttatcgcccttgattagcgtgaaagcagtaggccaaataccaaaattggttcgttggcctggttaaccagccattaagcttactggccagaccagattgcttaccgttgggggtttgaactgttgcctacttgtttcaaagggtttccacatcctaatttagtaaaaaaaaatgatttggggctttgttcgactaggcatttgtgttttgtcttaggggtggggagctgttttaccctacttttcttttt

SEQ ID NO: 335331 - DNA, 303 bp, Zea mays
  unsure (1)..(303): unsure at all n locations
ccaaggcgtccgncaacacttccgttaattttaatccccgtacttttctttccaacctcccaatcaacccaggggccctttaaatttttaagggggcaaaccataacaaaatccatccttccaaatcaaaatccccctttatccacttttaattttcccaaatcaaaagtcaaaatccatttaaccatccccaacccaaaagtaatcccaaaaatttccttttcttctccaaccacaaaaaataaaccatttttatttatcctatctccctctcaaaaaatgtattttttcccttttatttct

SEQ ID NO: 335332 - DNA, 488 bp, Zea mays
accggggcggaccaacccttccaaaaaaaaaaaaaaaaaaaaaaaaattttaatttataaaaaaaaaaaaaaaaaaaaagagaaggggaaaaaaaaaaaaagggaaggagaaaaaaataaaaaaaaaaaaaaaaaaaaaaaaaaaaaaaaaaaaaaaaaaaaaaaaaaatgggggggctgttttattggtttaaattttttattctgttgttttggaatgtaaattttttttttttgggaataaaaattaaattttagggggggtgttttaaaaattgttttttttaaaaaacttttgtttatcaattttttttttttttgttaaaaattttttttttgttgtgttttgtaatataataaaaggggtaaaaaatatttttttttttaaatattttgtaattttaattttttatttgtattttccttttaaattttttattatatgttttgttgtgtgttttttctttaattttattttttttttttta

SEQ ID NO: 335333 - DNA, 303 bp, Zea mays
ggcccggatccggtggaccaacccttccggacccttggcttgttggtaattttttgcaacgacaactgcggaccaaattttgtggggttgggaactaaaactgcacggatttgacatagttgataggttttggcattcgccccacctctttttctcaaaaaaacatttggagttgacatttttttttgatttgatggttttatgttatttttgtcaggttgaatttcttgtttgaattttttgggagggttttttttaaaaatttacaaattgttggtttttattattttatattatttttta

SEQ ID NO: 335334 - DNA, 395 bp, Zea mays
ggcgtccgttttttcaagttccaaagggggccatcgcgttggcctggtaatcttgtccaaacttccgggaaagcgtccttttgatcagggaatgggccccccggcctagctggttggttgaaggcaccagccgaccaccaaacgatggcgcacgcggccaattaaacagcataaggttaaggcccggttgccgtcgttaagcgcccgggccaccgaaaacttgaaagcaagggaaatggtggccacgcgttccccggcttgttgggccgccgggtccttttccaagtcgtccaggcccaaggcgtccaggccgccggccacgttttacggcaggtcgttccggtggaatacggtccggccgttttagaggacccaggcttacttacgctggcatg

SEQ ID NO: 335335 - DNA, 387 bp, Zea mays
cggggcggaccacagccgtccgccacacccttccaaggaattcccggccaggattaaatttaaaaaaaaccgccaccaaccggggatgccttccttgaacttgtggaccaacataaacttgaaggggttggccacttccgccttcttggccgaagcttccaagtccgttgccaacataatgggaaagcccaaggcctacttaatggttgttttaaagggttcggtccttttggcttttggaggtccccagaacccaccactttacggggggctgttttccatcggaggcctgaaccctgttttgaccaaaaactttattgctggcttcgtttttatcctgaagtaaaagttgttttttccaaagtaacccttttacctaaagttttt

SEQ ID NO: 335336 - DNA, 197 bp, Zea mays
  unsure (1)..(197): unsure at all n locations
ggcggaccacaggcgtccaccaaaaatatccggccaaccccaacctcctttatcttattcaggcaagaacccataacccagaaggcttgggaatacccgggggggttcccaacccaacggccaattnttcctcttcctccttagccgggcaaccaagggccgcctcctcctttgtaaggcccccaagccttccccac

SEQ ID NO: 335337 - DNA, 467 bp, Zea mays
  unsure (1)..(467): unsure at all n locations
cggaatncccgggccgccccacccgtccggttgaagaaggaaggtccggggttggaagggttatttttcgccggatttcccattgattgggaaaattgggtttccctgccgcgtcctttttaacctttaactttttagggatttcttcagtttttaaattaaaaggggatttgtccaaccccaatttccatttaatttttaatttaaattaattttaatgtaataagctttaagagaggtgtccaccatttggttcctcactcgggttattacctgggcccgggttgggggaggcagaaaaaattaaagggaccattttgtttggaaaaaaaattgaggaaaaatagttccttacctcattttaaccataaatttgtcgtcgccattcgttttaaaatgcgtccgaaattatttttttttttttttaattaattaaaaaaattattaatttaaggtcccacttttta

SEQ ID NO: 335338 - DNA, 246 bp, Zea mays
ctttctttttaaatttatggagataaacctcaatcaatttatggtttttttttaggaaacacaggccgaaataagggccccatattcgagtccatttaatttgtaattaaaaaaatggcacctccaacattgggttgttcccttaccaaaccagggtttttaaaaaaaaactggttgtttggcaccaatttttgttcttttagaaaggcaccacccaatggtttagccccttttaggggataaagt

SEQ ID NO: 335339 - DNA, 450 bp, Zea mays
  unsure (1)..(450): unsure at all n locations
cgggnccggaaacccggggtggaccacacccttccggggcccttcttgattggtggcctaatttgattcggttggttttggggggaccaccagggtgggttgaccgaagaggaaaaattttttccttggaatggttgtttgtttttagattaaaataccaaaatttttttttggttggaataacaaatgatttttgaaccattttttcaaaaaaaaaaaaaaaaaaaaaaaaaaaaaaaaaaaaaaaaaaaaaaaaaaaaaaaaaaaaaaaaaaaggggggggccgttttaggggttccaggtttccttccccttgcttgcaacttattagtttttttttggggtccctaaaattaatttaattggccgcggttttaaaccgttgggcctggaaaaaccttggggtacccaaattaaatggcttggaagaaaatccccttttcgccagtt

SEQ ID NO: 335340 - DNA, 319 bp, Zea mays
ggggggggccaagcctaccgcccacccatcctaaaaaaaaaaattttttttttctaaacccaaataaatcaaagggtgcatgtttttttcttaagagaacgataaaaatctaaaccttaataccagtatattctacttttattaaaaatttatttagttaatctaaaccatgtgtttttaattctttttctaaattctgaaaattttctataaggatccttttaccaatcttaataaatttttttttaatttccaaaaatttaatctttatccaattaatattttatttatttttttctcttaattttatctataaaat

SEQ ID NO: 335341 - DNA, 361 bp, Zea mays
cggggcggacccaggcgtccgggccgtttttccatttaagtaccatggccttgtaccattttttaaaggaaaccaggtctttggaaattttcgttggaatttggccgtggttaactcgtggtttcatgccatccttaaggctccgttgggccatcgttttgggggggtttgaaatggaatggggtggattcccgaatcagccgggttattgaaataggaggtattttcaaaaaaaaaaaaaaaaaaaaaaaaaaaaaaaaaaaaaaaaaaaaaaaaaaaaaaaaaaaaaaaaaaagggggggccgttttaggggatccaggtttccttccccgggcttgcaacgtattagtttttttttgg

SEQ ID NO: 335342 - DNA, 457 bp, Zea mays
  unsure (1)..(457): unsure at all n locations
ggcgggccaagccgaccangaacccttggtttttaatttaaaaagaatttttttttcctaggaccataataccaaaggggggcttaaaataacaaatgagtgaccccaattttttccttattatttccatttttccttttccaaaaatcctctgtcctataattaatgtttttttaacctaaccattttaacctttcaaatttccaaaatttttccaaataaaaaaatattatataaattttaatataaattatcataaaaaatttaattaataaaataaaaagtccttcctttttaaagtaccaaacttaccttccccgttcttccaatttataatttttttattattttcccctaatttaattcaatttcccctcttttaaaacctttttccttttaaaaccctttcctttccccaatttattcctttttaattaaatttctttttttccaattt

SEQ ID NO: 335343 - DNA, 433 bp, Zea mays
  unsure (1)..(433): unsure at all n locations
cggnccggaancccggggcggaccaacccttccggtggccttgaaccaaaaaataaagggaagtttgttgcctgaataagtaatgggattgtacggaccatatttgggctccaggggactttcaagtgagccaagggattacaaatgcaaggggcttaaaaataactaaaaagttgggtaaactggtagcctaacatggggactcctaacaacggccctttttggggccaattttgttgtccggcctggttcttttgaaactgtgttttggcaaccaaattaacaacgtggaaccgacaagccattgtttcctttaagaagggcagccgaccaagaagataagaaggatgtgccaaggccgggaacatactccaactttttttttaacctaattttttccttggccagaatgtactcggcaatgcttttgact

SEQ ID NO: 335344 - DNA, 407 bp, Zea mays
gggcggacccaggcgtccgcccacccgtccggaaattatggggctatggtgaataaaccactggtaaggctgtttggctcagttgtttcgggtggaccataaatgatttaatattaatcctgcgtaacattaattaactgttgggcaaaattgatatggctttcctgaaaaaaaaaaaaaaaaaaaattaaaataaaaaaaaaaaaaaaaaaattaaaaaaaaaaaaaaattaaaaaaaaatggggggggccttttaggggatcaaggttaactaccccgggcttgcaacgaataagtttttttttggggtccctaaaattaaatcaatgggccgtggttttaaaacgccgggccggggaaaccccgggggttcccaaattaaatggcttggaggaaattccccttt

SEQ ID NO: 335345 - DNA, 411 bp, Zea mays
  unsure (1)..(411): unsure at all n locations
gggnccggaatcccggggcggaccacacgcgtccggggcacgctgggggtacagttccttattggcttaggttccaaactggcagtcttttaagggggttgatccgaatgcgcggggaaggatttttttggttattttttacgcaaccgtaatttggttggttgaaattaaaaacgtcgggatttacatcgggacggcaactgccggggggatatttaacgggtaattacttaaaataagttggggttccatttggttggtttttttcccaatgggggcgatcggtttaatggtggttttgggcagggggctaagtaacaaggccaaggccgggggttcacattaccaggagcagagcaatgaaggttaaggtgaaggcgaaacttctactttttaatgggaaaaggttaa

SEQ ID NO: 335346 - DNA, 380 bp, Zea mays
aaccggggcggaccacagccgtccggccacagggaacccgctttcttaatccggtttccgtggccgggggccgcttaacttaagcgccttaaccccaacggaggcggggggaacctttgaagtaccggacccggcttttggggccaatccgggtaaggggttcgatgtccgtttgcccctgatggatccgaaccggttgaccggccccgccggttccgacgccgacattgccattgactgggataccgatgcctttgtgatcccaagttttagggttgaagaatttgttttcggtgactgggaagcttaacgggttaccgatcctgaacaacctccaaggcccagcaaggttccagggaccttttattttggaccacacg

SEQ ID NO: 335347 - DNA, 416 bp, Zea mays
cggaattcccgggccgaccacacccgtccggccggttggggcggggcctttactggcccttgcccccggttttgcggcggttgcggtcggagcaagccagccccggcaggaggttaactttcaattacaacccgctaagttaccccctaaacttcaacaacggccgggccgcccccgcccgggccccggccggggccgactttgtctttgcccccggcaacaacaaccccctacggtaaatcggggtccaacaatccgttgccaaaagccaaatggggttttttttccttgttccggaccccgttggcttttttcaactctcctggggtctggctttttcgataaataggagtgggtgtaatgaaaaaaaaggaagttggtaaaaaaaaaaaaaaaggccggcccttttaaaggat

SEQ ID NO: 335348 - DNA, 164 bp, Zea mays
  unsure (1)..(164): unsure at all n locations
cgggncgggaannccggggcggaccacacgcgtccgaaggcgggggttcaggaactacggaaggtttggccggttttgcggggccaacggcttgcggaacttatatggaagcggcgaccagcggaactgggccaagttcgtaacccggggcctgtttttctttt

SEQ ID NO: 335349 - DNA, 367 bp, Zea mays
  unsure (1)..(367): unsure at all n locations
gggaaanccggggcggaccacaggcgtccggcttgggttggggacggggccgcccggccttaaggaataaactaactcttgccttaatacgtatcaatagccggggaggtccgtgtttgtggtaggttttacgcgacctaagttggggggcaggttaaaaccccgaccgggctggaagaagcatcgttgggtggacaggttaaccaaccagcagaaacgtaatcaaaatcaatggacaacaagccgttgcctaattcaaaaggcaagccccttgcccccggaggagccccgggggggggcttgcttggggcggccggcttccaaccggggtggaacaacaacttgttcaagttttaaaaggccaagt

SEQ ID NO: 335350 - DNA, 433 bp, Zea mays
  unsure (1)..(433): unsure at all n locations
gggaannnnggggcggaccacaggcgtccgaccaattaaattcttgggccggggcaaatgtcgccaccagggatgacaggtaaggtttcgtccaatcgaagtagggttatttaatgcggggatcagatttggggctatggcattaatggttccctgtggtggggcaccatgcattttggtttaagttggtcgatgcgaccaaagtggtttttgttggttgggagctggggtcctgaatattaactttaataatattaaaatgggcccgaaaaaaaaaaaaaaaaaaaaaaaaaaaaaaaataaaaaaaaaaaaaaaaaaaatataattaaaataaaaaaaaaaaaaaaaataaaaaaaaaaaatgggggggggccgtttaaagggatcaaggttattttcccggggttggggaggtaatatttttttttatgg

SEQ ID NO: 335351 - DNA, 286 bp, Zea mays
actgacccgcctttaagtcaagaatcacaagttggacaaccggggcttttgttggccgcccgcccggaccaaggttggggggttggggccccaagggcccgggccattggttaagcccgcccggccgacccgccggggcgggccgcctaaaacttcctttccaaacggccggtttgctgaatcctttgcggacaatttaaaacgcgtcggggcattgtaggtggcaaaggggcctttgctgcccacgtctatggtgatccagcccgtggtggtacggtttcgtttt

SEQ ID NO: 335352 - DNA, 429 bp, Zea mays
ccggccggaacccggggggaccaaggcgtccggttcagggccaggtacccggtggtggccggtttggcggccgacgcttgaattgggaggtttgggggtaaattaattttgtctggcttttgggggggttaagggtggggctggttggttggtggttggtggtttggttaccaaataatttgaatggaaggacgtttgtgatgggcctgttgaatagttggggttcttagtcctggattacactgttgggttaccacatgacatgatgtactggggggggcttgggtggtggggtaattccatgaccatgatcagtattttgattaaaaaaaaaaataaaaattataaataataaaaaaataaaaaaaaatatataataaaaaaaaaaaaaaaatggggggggccgttttaggggatcaaggtttactt

SEQ ID NO: 335353 - DNA, 401 bp, Zea mays
  unsure (1)..(401): unsure at all n locations
gggaannccggggcggaccacacccgtccggtcagacggaatggtccaagtttttggccattccaggggggccaggtaaaggttgtgggggccttggcccaaatccttaagatggagaatcggttgaaggaattgaggggttaactgaactgcctaaaaaaagacctaaagttgggcctcgcaaagcccaatcagatgtattaggaaggagaaccaagctgtcaacacatccaactttttgtaataggaggcggcagatcaagcagggttcaaatcccaactgggcaactactactgttgaagcccagggttcaaattggcccaagtttttggccccaagccgttttggtgggaggaaatgcttcgatccctttggtctgcactggactgaacatgatgaa

SEQ ID NO: 335354 - DNA, 481 bp, Zea mays
gaaaacgggcggacccacgcgtccgccaacccgtccgaaaaaaaaaaaaaaaaaatttaaataaaaaaaaaaaaaaaaaaaaaaaaagaaaaaaaaaaaaaagggggggcggttttaaagaaccaaacttaccttccccggccttgcaaggtaaaagtttttttttggggcaaccaaaattaaattaatggcccgcggtttaaaaacgtgggactgggaaaaacccgggggtacccaaattaaatggcttggaagaaaatccccttttcccaagtgggggtaatagcaaaaaggcccgaaccaatggcctttccaaaaatttgcccaccctaaagggcaaagggacccccccctgtacgggcccttaaagcccggggggggggggggttccccccagggggcccgttaaattggcaagggcctaagggcccgttcttttggttttttccccttcttttttggcaacgttggcgggttttcc

SEQ ID NO: 335355 - DNA, 392 bp, Zea mays
gaccaggcgtccggcccaaagctttaggtttgggggatgggttttatatctattttcctgaaagggcccatggggggcgggacctgttccatgcaaataaaattttcccccaccatccattgtggccggccattgcggtcactggaggagctttagaggaaccagttgttgtcgttgtggggattttccaagccaggttccaaaattcctccttgccccccttttaaaaacggtcctaaggccccgttgggtttaattagtctcggttgggttcacagggcctaaaagtgttaaaacttaattaaattcctcataagaatcctaaaatgtcctttaccatctttccgccttacctttttttccactgcatttgaattaaataaggggcaaaa

SEQ ID NO: 335356 - DNA, 255 bp, Zea mays
cggaataccgggtcggaccacacccgtccgttaaaaaggccgttttagcaggcacagaggttggaaaattttgttgaaaattttggggggccggtttttgaaatggccaaaggcaccaggatcccaaaggatgttccaccactaacagcagcaggtgcaaatcctgttgaagacaaagcttccttgaaagacctttttgggcaaacagagaacagggttttttctgcctccccagctccggatgatccaaaggcc

SEQ ID NO: 335357 - DNA, 211 bp, Zea mays
aattgggccccgccctgtaccggcccattaagcccggcggggtgggttggttccccccaggggtgccgttccacttgcaagcgccttagcccccgttcttttggtttttttcccttccttgttggcaccgttggccggttttccccgtaaagttttaaatcgggggttccttttagggttccatataagggttttacggaacttttacccc

SEQ ID NO: 335358 - DNA, 382 bp, Zea mays
ggaatcccggggccgaccaacccttccggccgtggaacagccaataatggccttttccttttggcgggggcaaagaaggagggcgggaggagcagtcgccatgtttggcttaatccacaaaatcgaggagaacctccacatggggggcgaccccaaaagggaggttgagccccacaggagggccggggggcaccacaggagggaggagggggggcaccacaagaaggacggcggggagcttaaggaaggcttcgtggaaaaaatcaaggccaagatcaccggcaggcacggcaacaagtccggcgaccccaaggaaaagaaggccaggaaaaagaagagggggaggaagaaccccggcaggggccacaaccccaacggcggc

SEQ ID NO: 335359 - DNA, 341 bp, Zea mays
cggggcggaccacacccttccggtcaacggtccataaggtaatgtggtccaggttgaaaggccaagactcgaaaccagttcgggggaggcgtttttaatcgactgagggctaaggaatgtaccttcctggtttttgtccattagtggaagcggaggctttaaagggggtaaagatggtttaataagggtttttaatctgccccgatgggtttggttttgggcttttaacgattaattggggaagcccatgtttttttagtccaggaactgttagtaaatttttaggcttttaattaagcccgacttttaaaacctaaacgtccgtttgtgaaagccccaaa

SEQ ID NO: 335360 - DNA, 416 bp, Zea mays
ggggcgggccacacccttccgttcttggcttagcttgcaattgcttttaggtgctaccgccatctctcttttgttgtggaggggaatgtaaacgccgggcgggtggcaaaaattcccatggcaaccttagccacaatggccctgttgaagcccgccgccaaggcctgggggcggttggatctttctacaagaatcggaatggttttgttgttcttctgaccggggatgactgcaaaaaaggttgtttttttattttatgattttttaataatttatattgtatttaattattatcaacttttaaaccctaatattctttgtttttgtgttctaataataaataaaaattaaggtttttccttttctttttattaaattttatttttactttattgcttcttaaattcttttctttt

SEQ ID NO: 335361 - DNA, 447 bp, Zea mays
  unsure (1)..(447): unsure at all n locations
cgaaattccggggccgaccaacccttccgccaacccttccggccgaaccccccttaaatttttttttccaacaggtttttaccctgggcggacagccccggttattgtggggaaatttaatctnaatgggattagatcattgcaattgttgtttttaaacaagaaatgcttattaagcccaagtaataacttcgctttgactacttccttgccttttgaccaaaccgcccgtcgccaaaaaaaaaaaaaaaaaaaataaaaaaaaaaaaaaaaaaaaaaaaaaaaaaaaaaaaaaaaaaaaaaaaaaggggccgccccttttaaagattcaaagttatcttccccttccttccaacttaataatttttttttggtttaccttaaattaaattaattgcccgtcttttaaaaacttcttaattggaaaaaccttggcttacccaaatt

SEQ ID NO: 335362 - DNA, 240 bp, Zea mays
  unsure (1)..(240): unsure at all n locations
cgggnnggaaatcccggggcggcaccacacccgtccgacacccacacaagtggaagttggctagttcctaaccgagccagaaaaacgaaccccggccagttctttaacccccgcccgagggaaaaaaagnccagttagaaatattgtccaaggccatccggtccagcgccggccagccggggccggggccggccccaacaatcgttcctgacttgccggaggaggagggattctctattt

SEQ ID NO: 335363 - DNA, 244 bp, Zea mays
aaaaaaaaaaaaataaaaaaaaaaaaaaaaaaaaaaaaaaaaaaaaaaaaaaaaaaaaaaaaaaaaaaaaaaaaaaaaaaaaaaaaaaaaaaaaaaaaaaaaaaaaaaaaaaaaaaaaaaaaaaaaaaaaaaaaaaaaaaaaaaaaaaaaaaaagaggaaaaaaaaaaaataaaaaaaaaaaaaaaaaaaaaaaaaaaaaaaaaaaaaaaaaaaaaaaagaaaaaaaaaaaaaaaaaaaaaaaa

SEQ ID NO: 335364 - DNA, 444 bp, Zea mays
  unsure (1)..(444): unsure at all n locations
gcccgaaanccccgggccgcccacacccttccaattaaaaccaattaccaccataaaattcccattattgacccaccaatgccacccaagaaatggtcctacctaatcctgctggggcttactcaaaatcctcttccccaacccattttccaacattcttaacaacctccaatactttccttttttccccaatacttttaaccaccgtttttttaagtttttaaaaccccaatttttaaaccttccagaatccaccagccaatcccagcagccatttaaccttaataacccttgttcttccaacacccgtaagccttataccaccatttccctttgttccatttgttgcaccaaaccataaaggcccaccacctccaccaccttttcctagaaaaccttgttgcctactttaagaaccagaagttttttccattaaaccaactg

SEQ ID NO: 335365 - DNA, 381 bp, Zea mays
cggcccgaaatccccgggccgaccacacccgtccggcaatccaactgcaaccaatttggttccaaaatattactgcttgtccaaatcaatttttttagctcgcccagaaaaagggggggggacgccaaaataaccttaaaaaagcagtacacgggcttttccaactacccatccaatttaaacctcttttcaaattccccgaacccttcttccaaaacaaagctaaaattctttttttacctggccaacccaaagcctgcttcctccttttccgggagccctaactgaaacctggcgaacccgatgatctaaaaccggttgaagcaactgaaggacaaaggcccgtggttattgcccccaaacgccggggccaaccccatt

SEQ ID NO: 335366 - DNA, 312 bp, Zea mays
  unsure (1)..(312): unsure at all n locations
cgaaanncccgggccggccacacccttccaaacccctcccccaagtcctacaagccctttctcccttttcccaattgcccccctgtgctaagttttattccaaatatgcgctgccactttacaatcaacctaaaccttaaggttctgcttccttatcccataatttgccagaaaaattgtctgttcccaatttttatccttttaatccttttgaatgcccctaattccattatcctttcccctttctctatttataccttcctttttatctttttaaaaattttttcaattatccacctatttatttttctt

SEQ ID NO: 335367 - DNA, 389 bp, Zea mays
  unsure (1)..(389): unsure at all n locations
aaatnccggggccggcccaggcgtccgaaatcgatccccctggatgtcggacccctgaaccattttaccattccttgcccaattgttagaggggggcttcgaccaggtgaggggggggccccttccttttttaaacaccaaaaaggccatgtaaatccatttgtggagtaatttgccccaaggggatgtaataaaagggttcatcaaggaaggacccaaggtcccaccccaccattttccccagttaattgccccatttttaaagtcgtaaccactgcctggcctggctggctctggtggtcaaatcttgattaagttggcctcgtcctccccccattataattggtggttttgatgtcctgttgcgtcgtcaaaccacatcctttttt

SEQ ID NO: 335368 - DNA, 222 bp, Zea mays
  unsure (1)..(222): unsure at all n locations
ccggcccaaanccccgggccagccacacccttccgacacaccccgggcctttcgccgacaccctaaaatgtcccccaaaaaccggaacctgaaggtgggccactcttaataaaccatgcgggcccccctaanttcctttttcccgaaccttttccccccaaacggcttaaatttcgccaagcccttttttttaaagcccttttccaaaattttaaccaaggc

SEQ ID NO: 335369 - DNA, 368 bp, Zea mays
aacgggtccgaaatccccgggcggaccacacccgtccgaacccccccgcttgggcgaattcaattcgccataaacccaagggaattgggaagcccggttaggttccttgtggttagggggcgccaaaagcaaaaaccttgaagaaggttaataaagaacaagaacccaacccaatcaaaaaacggaaggcaacgccaagggttggtcttcgccccggaacccggaaaaaatctgtcctgtttcgttggttcgccccgggccgcctgttgggggtccctttaattttctctggtcagacttttgtttgttttttttaatatctctttatttatatatttaattcatgtttttggttttttttatttttt

SEQ ID NO: 335370 - DNA, 396 bp, Zea mays
  unsure (1)..(396): unsure at all n locations
cgggnccgaaatccccgggccgaccacacccttccgccaacccttccggaaggttaaaattttttccttttaaagcctgcccccctttctccgggtggtttacttgggttggttgagcggtcccaataaccgtttttttgaacttttgccttgaggaaatcgtttggtaaatttttggatgattcgtttacatcctatttcgtcaattcttgaaaataaagtgaatttttactttttgtttaatttcccttgaacctttggaatttgtccgtttttaaccaaattttttaatcatccctaatttttggccaatattatatattaatttattgggggtgtggggttgtttaaattatttactaattttgtgctttcttttttttttttccaatttta

SEQ ID NO: 335371 - DNA, 422 bp, Zea mays
cgaaattcccggttcggccacacccgtccgaccccacaaagttccaactttgtaaattactatcggggccaaaaaacctttcccctacaaggtgtttttccaagacctaacgggggaaccgttcaataacaaataatttccctggcattccggactagagccttcatgccaggccctgggccggccccaagtatttttttttttgtggaacaactttatcaataatggacaagttttttggacatgttgcgtttttcaaaggccaaacacttgtcttccccgtggaaaacgggatttttcccaaatggttaatagtttcttaagaacgttaatctaacgaaggaattgtcaagattcttgttcattatcttccctgtttgctctgttagtgttttattgaactttttttttaaattgttttt

SEQ ID NO: 335372 - DNA, 411 bp, Zea mays
  unsure (1)..(411): unsure at all n locations
ccggccgaccacacccttccaccaatcctaccgcccttcattttcttttttatattttaccctttcccaaaaanacccgactgtttttatttttaaattttcgaatgaaaaaacatcntaccaccaaattatatattttatcctttacattttttacgattcaaccttttttattatttcaatccattttttttttctttctaaattttttaatttttttattttttttcctttttttccttcttctatattttctttttttccttctttttttttcttttattttctatttttttttttctttttttccttttttatttttttatctttttgtttactcttttttttatcattttatattattatttcttttatttatttatattttttctttatattttttctttaatt

SEQ ID NO: 335373 - DNA, 395 bp, Zea mays
ccggcccggaattcccggttggaccaagccgtccgccaacccgtccggccaggataacctgcatgacttttccccggaactgcttgcgaagggcccggaccttaatcggtttcgggctaatcgcttgaatggggccgtccagcgtcccggccataaacggaaacagcttaacggggttttttttttccagcatcggccagaacctggccaatttcccaacgcccccgcccgtaacttccaagttttggctggggttagggacgtggcacctgggcctgttaatcgggctaaccttcggccagatcggattcaagggcaggaccgaggactacttcaagaagggaagcggttaaaatcctatccataatccctggtgctgccctgcgttgcgttgc

SEQ ID NO: 335374 - DNA, 349 bp, Zea mays
cgaaattcccgggccgaccacacccttccgcgacacccttgggggccggttcgcggcgaaaatccggaacccgccaaaccccccccgcgttgggttcgtaaccttgaattcgggggaggccgagaaccccccttacaactgggccgcccggcccttgaacggcccgttggcaagaacaaatttcccggggttggcaacaacttccggccgtccggggccaacatgcaattccggttcaaccgtcaagtcttcaagggaccccggacccggggacccaaaggcaagggcgggccattgtggccgtcataattcaaaaccctatattccccaacggaaggggcggcaaaca

SEQ ID NO: 335375 - DNA, 454 bp, Zea mays
  unsure (1)..(454): unsure at all n locations
cgggnccgaaanccccgggcgggccacacccttccgccaacccttccgaatccaataaaattttacctttccaaaaaaaattaccatgcccctgggggagggttaacaattttaagttgggcactggaatatataaaaaatttgtggtttcctccttccagtttgtgtttgaaccaattgataaccattttccggataatcctcaattgatttcctttacttttcgggtaatacaatttgatttgaaaccaaatggtgtttcctttggtaggccactaaatttggcatttagtcttgatgggggttttgttgaacccaaaccttaagggaatgcatctccagtggacttgattttaaaatttgtccttccattcgcttttaaattcctttataaaaccaaccttaaggccagggttgttactttgcccaaaaaaattgggtgtatggttgtttt

SEQ ID NO: 335376 - DNA, 448 bp, Zea mays
cgaaatccccgggtggaccaacccttccgccaacccttccgcgacacccttggaattttattcggttgcccttttttttttttttttgtttttttttttttttttttttgttgttttttttattttttttttttttttttttttttttttttttttttaaaaaaaatttttttttttaaaaaaaaaaaaaaaaattttaaaaaaaaaaaaatttaattaaaaaaaaaaaaaaaaaaacttttccaaaattttatattttttttttttaaaaaaatttaaacctttttattttaatcccctccttttaaaatttaaattcaaacccttttattttttttaaaacaaatttttctttttttcaatcttaataaatttttttaacctttttaaaaaaatttttttcttttttttttaccaaatttttataaaattttttttcccccctttt

SEQ ID NO: 335377 - DNA, 437 bp, Zea mays
gccccgccgtccgtgaacttaatttaatctgtaacccatggcttttttcaccactttccaaggtttattctgggggggttccataatttttttggcgtgctttattcttaatccccccccaccaggtggccaacccaaaaaggccagcattgttgggaccttgccattgcccaaaacagggccttcggccaccatacttgttagccgtattgccaccggcccttcctttttaaattccggttttaatgagtccttttgcaaaaggactaataagtcttttaaaaccttgttcttttgcttggcaagttgtcacccataataatgaattcatgatcctgcgaaaccttaatgatcctgcgaaaccagacggcaaaagataaggttagttaaatcctgtttaaccaaatttttttttaccacccaattttcccatttta

SEQ ID NO: 335378 - DNA, 489 bp, Zea mays
cgaaatccccgggccagcccacccttccgaaataaaaatttttattccaatccatcctctttagctaaaaaaaatccggttcgcccgaatggattatctccccttgggggaggtccacaaaaaaattaccattaaaccataccaatagcctacggtctaccatacttaacggaatcaaaccaccggaaaaaaaaaggttaatcgtaaccaaaaacaaccacaggccaatccttccttggaagtaaaaattttccatttattaacccctttcctaattttttcctttctacaaactctatcccttttttaaatatttttattttttttactttttttatatgggtgtggtgtttttttatatttttatttaattctataaatatgttttacttcttttatctatatattttattcttctctttatttcttttattcatttttttattactatattttttattttttttcttccatatattttttccctat

SEQ ID NO: 335379 - DNA, 291 bp, Zea mays
aaaaccccgggccgcccacacccttccacgaccccttggaaccattcttttccttttttccccccccggccccttttccttcacgaggagtccaatttaaaaatcggtgggcaccataaccaacccaataatccctaacttcttaaacatatattaatctttttcaacgcaccttaacttcaaaattaaccccccaaatccaactttttataaccctttatttctacttaactcttttaaccaaactaattaacctttctcctactttccaatattttttttaaaatttta

SEQ ID NO: 335380 - DNA, 369 bp, Zea mays
cggtttaaaaaaccaaagttgccgtccccaaccttccaacttaatacttttttaatatttcaacctaaatcaaattaattgcccttcttttaacaccttcttacctttaaaacccctgccttacccaaactaaatccctttccacaaaatccccttttccccagtttccttataaccaaaaagcccccaaccaatcccctttccaaacatttccccaccctaattgccaaatggaccccccccttaaccgccccattaaccccgccgttttttttgtttcctcccactttacccttatcatttccaattcccttacccccccttccttttctttttttcccttcctttttacccactttcccctttttt

SEQ ID NO: 335381 - DNA, 351 bp, Zea mays
aatcccggggcggcccacgggcgtccggaatagaattttttttggccggccataaaaccccttatacttgccgcccgggaacccctccggggcgaacaaggtcaaccaggccctgggggagaaactccggccctcttacggggccgcttccgcaaaaccgggggccggtgaaccaacccttggccccacctgccggggttcggccgccggggcccccttagggggggtcatgtcctgggctccctgggcccccacataaaccacaaacccaaatctggctttgcaggaccatggccggatctgcaaagaacttttaaaccttcctaaaagggaacgggggctggcttttaa

SEQ ID NO: 335382 - DNA, 127 bp, Zea mays
ccggggcggcgccaagccttccacttagttttaaaccgcaggcggccgttcgttttaaaggatccaagtttacttccccttccgggcgacttattagtttttttgtggggtaacctaaattaaatta

SEQ ID NO: 335383 - DNA, 170 bp, Zea mays
ccttccttccggcttccgcaatcccatcggggtccccattcaaaaggccccttccctgaaaagcacgcgttccttttgaaagtccgccagcactaccaagaccccaacccagaactttttaaccaccaagttctgcctccccttaaccataaacccaatattcaaaacct

SEQ ID NO: 335384 - DNA, 274 bp, Zea mays
  unsure (1)..(274): unsure at all n locations
ttnnnnttttttttnttnnttttttttttttntnntttnttttttttttttttttttttttttttttttttttttntttttttnntttnttttttttttttttttttttttttttntttttttttttttttttttttttttttttttttttttttttttttttttttttttttttttntttttttttnttttttttttttttttttttttttttttttttttttttttttttttttttttttttttttnttttttnttttttttnttttttttt

SEQ ID NO: 335385 - DNA, 462 bp, Zea mays
  unsure (1)..(462): unsure at all n locations
gggnctgaaatccccgggccgacccacccttccgcgacacccttggccgacacccttggccgtccccttggcttccagggtaaactgaaccttaaccgacaacaacggccccgggggcggcttaaaaacaatccatatttttcccgccgtcttcggcccttgcggttcgaaccgtattaaccttttttacctacccatgatcacaatttgcttgtttactactactactgaataaaaaacctttcccgccacgtggtccttgtttttttttttttaaaaaaaaaagaaaacccgcccatttccttttggttgtttggttaatttttaagttcatccggcctttattaatttccatttccccagtcccaactcttgcccatgcatccattttcctaataatccactaacttttttttgttaaaaaaaaaattaaaatataataaataattaaaatattattat

SEQ ID NO: 335386 - DNA, 489 bp, Zea mays
gaaaaaccgggccgaccacacgcgtccgcccacgcgtccgcgaacgcttggggtattgttcaacgacgtgccaatgcaataaactgagtgtatcatattggaccaaaaggggaaaaaaaaaaaaaaaaaaaaaaaaaaaaaaaaaaaaaaaaaaaaaaaaaaaaaaaaaaaaaaaaaaaaaaaaaaaaaaaaaaaaaaaaaaaaaaaaaaaaaaaaaaaaaaaaaaaaaaaaaaaaaaaaaaaaaaaaaaaaaaaaaaatttttttttttggcccttttttcaagggacccattttcaaacataccggtgaatagaaaataaaaaattttttatatattttcaaaaaaaataaaaaaaacggccaccaattaaaaaaagtggaaatgaaaaaaaaccttggtaacaacaaaataataacctttggaaaaaaaatccttttttaaaaatttggtaaaaaaacaaaaaactccccaaataattttttttta

SEQ ID NO: 335387 - DNA, 260 bp, Zea mays
  unsure (1)..(260): unsure at all n locations
aaaaaaaaaanaaaaaaaaaaaaaaaattaatttnnagaaaaaaaaaaaanggggaagtgaaaaaaaaaaaaaaaggggggcgcccaaaaaaaaaaaaaaccattaaaagataaaaccctgaaataaaacaaaaaaaaatattaagaaaaaaaaacaaacaataaaaaaatgaaaaaaaaaaaaaaaaaggaacggaaagaaacgcacaggaaaaaaaanattataatttattttttttttttttaaacggcacccnggg

SEQ ID NO: 335388 - DNA, 129 bp, Zea mays
ccgaccaaaaaaaaaaaaaaaaaaaatttaaaaaaaattttaaatttcaaaaaaaaaaaaaaaaaaccgccaaattttaaaaacaaaacgccccccccaacacaaaaaaaccccacaaacacccttccc

SEQ ID NO: 335389 - DNA, 251 bp, Zea mays
aaaaaataaaaaaaaaaaaaaaaataaaaaaaaaaaaaagaaaaaaaaaaaaaaatgtaaaaaaaaaaaaaaaaaaaaaaaaataaaaaaaatataagataaaaaaaaaatgaaaaaaaaaaaaaaaaaaaaaaaaaaagaaaaaaaaaaataaaaaaaaataaaataaaaaaaaaaaaaaaaaaaaaataaaaaaattaaaagaaaaaaaaaaaaaaaataaataaaaaataaaaaaaaaaatatattat

SEQ ID NO: 335390 - DNA, 528 bp, Zea mays
  unsure (1)..(528): unsure at all n locations
aaaaaaaaaaannaaaaaaaaaataaaaaaaaaatttaattttttaaanagnaaaaaaaaaaaaagggaaggaaaaaaaaaaaaaaaagaaggggagggcgggnaaaaanaaaaaaaaaaatataataaatatataaataaaataaaaaaatataattatttaatatataaaaaatataagtaaataataaagaataatatatataaatattaaatataaaagaataaataaaaaaaaaaaaaaggaaagatatatatagagaaaaaataaaaaaaaaaataaaaaaataaataaataaataatatatatgatatataagaaaaaaaaaaaaaaaaatataaatatataattaaaaaaaaaataaaaaaaatatataaaattaaatgatagaaaaagaatataaaatataaaaaaaatataattaaatataaataaaaataaatataaataaaattaatatataataatatataatataaaatattaataaaataatatataataataagaatatattataaatatat

SEQ ID NO: 335391 - DNA, 202 bp, Zea mays
  unsure (1)..(202): unsure at all n locations
gaacgggggaannaaaaaaaanaaaaaaataaaattaattttaattttaagaaaaaaaaaaaaaaatggaaggtaaaaaaaaaaaggggagggggaanaaaaaaaaaaaaaaaataaaaaaaaaaaaaatataaataataaaaaaaaaaaaaataaaaaaaaaaaatatataaataaaaaaaaaaaaataattaataataat

SEQ ID NO: 335392 - DNA, 469 bp, Zea mays
  unsure (1)..(469): unsure at all n locations
aaaaaaattaaaaaaaaatattttaacatttttttatanacccacaaaacacaaaccggcttgtttttttttaaaatttttttgcccaacacaaaaattcanaacaatataaatattctatttcttaatctttttttttcttttttctcattattttctacttttattttttatttatttattttttaaattttattctttttaatttttcactcatctttcttatatttttttacttattttattttttaatctaattaaattttttttttcatttttttattttaattctttttcatttcctttttctttatctctaaaatacttttttccatatatctttaaattatattttttatatataacaatttattttttatttttttatttttctctttttttatttttttttttcttttatctattcttttttttattattatttctatattctcattttttatttata

SEQ ID NO: 335393 - DNA, 282 bp, Zea mays
  unsure (1)..(282): unsure at all n locations
tttaaaaaaaaaaaaaaaaaaaaaggaggggtttatttaaaaagaggggggggaaaaaaaaaaaaaannanaaaaanaaaattataataaaaanantaaaaaaaaatgttaaagaaatagaaattataaaataataaataaaaaaaataaatataagataatagaaggaaaatattatgaaataaaaaaaataaggaataaaaaaaatatattataaaaaaaaaaggaaataaattaattataaagaaaataaataaaaaatataaaaaaaaattaaataaa

SEQ ID NO: 335394 - DNA, 402 bp, Zea mays
  unsure (1)..(402): unsure at all n locations
gggaaaccggggccgaccaacgcgtccgaaaaaaaaaaaaaataaaataaaaatttaattttttaaaacaaaaaaaaaaaaaaacgccagcgttaaaattaaaaaaaaagacgggccaaaaacaccncccaatttaaagaaacccaacctaccaaccccagccacccaacaaaaataccttttttaaagccaaaccaaaattcactgccctgccctaaaaacaccaactacttacctggaaaacccctgcccatccccacttaaattgcctggcaacacatccccctttcccccgctgacaaaaactctaacaggccaaacccgatccccctcccaaaaaaacccccaacctaaatgccaaacggccccccccctgaaacacccacaaaaccccgcccattg

SEQ ID NO: 335395 - DNA, 312 bp, Zea mays
  unsure (1)..(312): unsure at all n locations
gaaaaacggggngggacccacgcgtcacgnatgtattcaaccttttttaaaaggatttgcctccgactggcgcacggaagccacgggggcgaggggtttaacactcagctgggcagcaaaaaaaatcgagacgcaggagtcatggccaccgtcagcgccgccgtggtgaccaccatcgttgcccgcgccgcgatcgccaggcccaatgctctagggctgcctgccctgagggcaaggagcgagagggtgcggtgcatttactccaaggacgcggccccagtcagcaccaagggcgcaggctcgtcgctgttc

SEQ ID NO: 335396 - DNA, 358 bp, Zea mays
  unsure (1)..(358): unsure at all n locations
aaaaaaatttaaaaaaaattttttttttaagngnaaaaaaagaaaaaggggagggttaaaaaaaaagggggggtaaaaaaaaaaaaataaanaaaaaataaattataaaatatatattaaaaaaaaaaaaaattaaaaataaaaaaaaaaataattaaataattataaaattaaaaaaaataaaaaaaaaattaaaatataaaaaaaaaaattaaaaattaaaaaaattaataataaaaaatttatttaaaaataaaataaataaaaaaaaaaaataaaaataaaaataataatataaaaaataaatatataatatatattataaaataaaatataataaaaatttattatatataat

SEQ ID NO: 335397 - DNA, 322 bp, Zea mays
aaaaaaaattttattttaaaaaaaaaaaaaaaaaaaaaagggccgggcttaaataaaaaaaagggccggcccaaaaaaaaaaaaaaaaaaaaaaaaaaaaaaaaaacgggcccccctcttaaaaaaaccaaacttaacaacccctaccatcccacataaaaactttctaaaactttccccaaaaaaaaaaaaactgccccaagtttaacaacaccgaaacttgaaaaacccctcctccccccaactaaatccccttaaaaaaaaaccccttttacccaactgccaaaaacccaaaaagcccccacacaaactccttctcaaa

SEQ ID NO: 335398 - DNA, 387 bp, Zea mays
  unsure (1)..(387): unsure at all n locations
gaaaacgggcgggccgacgcgaccgcccacgcgnccggggccaattggaattcctttatggctgnggaaggcaaatcgacggagcgcgtgattaatgactacatcggcacggcaaaacaactccaggaggaggctgccgccttttaaaagtcttttaatagtgttgccaaacagctatttgtcagatgagctttgtcccatttcctcattagaagcatatcattcgatccattggggatctgtgaaccatgtacctgtttatgtaactggttaccagggttatccatctatctatctatctgtgaaaaaaaaaaaaaaaaaaaacggcgccccctttaaaggatccaaatttacctacccccgcatcccacccaataccttttttta

SEQ ID NO: 335399 - DNA, 450 bp, Zea mays
  unsure (1)..(450): unsure at all n locations
aaaaaaggtccggggggaaaaaaaaaaannnnaaaaaaaaataaaataaaatttttttttattncaaccaacacaaacaaaaactggttctttttttttttaaaaaattgcccgccccacaaaaattaaaaataaattaatttacattttttttttatcttttcttttctttatttcttttttatcactacttcttttttttttttttttttttttttttatcttttattatctttttttccttctttttctattttttcttttatatttttcttttccttccttttacttatttctctactattctatttttcccctttttatttttttttatttctacttttattccctttcttttttttattattctattttttctcattatttttctcttctcttttttcatattcctattttttttttcttcttattttttattttattattttt

SEQ ID NO: 335400 - DNA, 272 bp, Zea mays
  unsure (1)..(272): unsure at all n locations
cgggnccggaaaacccggccgaccacacgcgtccgactagttctagaaccggcaatgtggtttgttttaacccaaacccctttggggtggtccgggggataatctaaaacggggacggcaaagaaaccataacctggtcactaaactagctaggtccctactgcttttaaaagtctggataataaaccgggatgtcatgaccggtatttcctttttaatcttgttgcttgcttgtctgtccatctatgtaataataaattaataattgatcc

SEQ ID NO: 335401 - DNA, 118 bp, Zea mays
  unsure (1)..(118): unsure at all n locations
aaaaaaanacaaaaaacaaaataaattttattttaaaaaaaaaaaaaaaaaacggagcgtttaaaaaaaaaagggggcggcaaaaaaaaaaaaaaaaaaaaattaaaaatataactct

SEQ ID NO: 335402 - DNA, 281 bp, Zea mays
gaaaacccgggtcgaccacacgcgtccgagaagatgaattaatgaggaaagtcattgagtttataacagttacctggtgtgcgaagtgagatgcattggaccgggcgcacgggttgctgagggtgtggtttgatatggttgaacctgaaagcaaccggtatttaaacatttttgcctggagttatgaacattattatgtaggatttgattttttatttgaagttgatgggttgtattttttttattattttttttttttaaattttttttttttctacatt

SEQ ID NO: 335403 - DNA, 469 bp, Zea mays
  unsure (1)..(469): unsure at all n locations
aaaaaaaaaaaaaaaaaaggaatttgtagaattaaaaaaaaaaagaaaagggggnnnaaaaaaaaaaaaaaaaaaaaaaaaataaaaaaaataataaaaaaataaaaaataaaaaaataaaaaaaaaaaaaaaaaaaaaaaaaaataaatataaaaaaataaaataaaaagagaaaaaaaaatatattaaaaaataaataaaaaaataataaaaaaaaaataaaaaaagaaaaaatataaaaaaaaaaaaaatgaaaaaaaataaaaaaaaaaaaaaaaaaaataaaaaaaataaaaaataaaaaaaattaaataaaaaaaagaaataaaaaaaaaaaaaaaataaaaaaaaaataaaaaaaaaaaataaaaaaaaaaaaaaaaaaaagaataaaaaaaaaaaaataaaaaaaaaattaaataaaattaaaaaataaaaattaaaataaaatataaatataaaaataaa

SEQ ID NO: 335404 - DNA, 76 bp, Zea mays
aacctttgggggctggggttggacctttgttttttaatataagcctctattaaatacgatgtaaaatagttaagat

SEQ ID NO: 335405 - DNA, 270 bp, Zea mays
acatatactttcctcaaatctagtcttaactagaaggtgtctatttttctaaatcacttataacaaccttctattgtggcctttttctaaaagcctgtcttgaattacttttttttcttccttttaaggtttccaattgctattctatcctcactttacttcctaatcttagtctttctcctcgtttttaaccaaattccctacttttttattaattttctcatcaacactatctttacaatacctttctattttaacattttttttttt

SEQ ID NO: 335406 - DNA, 90 bp, Zea mays
  unsure (1)..(90): unsure at all n locations
aaaaaaaaaaanaannnnnaaaaaaaattaaaatttaaaaaaaaaaaaaaaaaaaaaggggggggaaaaaaaaaaanggggagggggnaa

SEQ ID NO: 335407 - DNA, 144 bp, Zea mays
gggtggatccggcggacagcgtcacagatcttagctgatgtgatttatgaatgaaaggaggtgggcaaatttacgacgagggataacgggaaagcaagggatatggatttgtttgtcaaactgatgatggtaggtgtgcggaat

SEQ ID NO: 335408 - DNA, 145 bp, Zea mays
cccaaaccacaaaaactacctgcggggggttttcaataaagggtgttgggaacatgaccaacccaaagggttactttttgtggttctgggactacaagtacaatgatgagaacaccgcctcctttgtaaccctaaacaaggttgg

SEQ ID NO: 335409 - DNA, 391 bp, Zea mays
  unsure (1)..(391): unsure at all n locations
aatcccgcgtttgagacccccttcttcagccaaactagaaactacgtaccttgaaccaaaaccctgggtcatctagcacaaatatattttttttccttttcgcctcgatatatacgaacggcagtcagccaaactaattccacaatgtatggctgttccatggcgtgcagatgacgagagtttagtggtcatgcaccgtttccttgagaagattgagggggaggtacttgagtattcgtccaaagatgtcaacgaaaccgaagtgggcatgtgataaagactttagaccattagtacttgatgttggcgaaaaggctatactngtactatttatttacagaatgaacatgtgatgtaaccctcgatttcatgaggcatgattatgaaaaat

SEQ ID NO: 335410 - DNA, 347 bp, Zea mays
  unsure (1)..(347): unsure at all n locations
aattnccgggtcgagcccacgcgtccgacccgtatcaccacttctttaaccacctcgtcgttttgctctcccttatctcttccaacgctactttttttatgtggggagggacacaacccaccacttgtaaggaccagccatctagctcttgacccccacaaaaaatgtgtgctgatcacgcataaaccgattgatcatctagagcggatcacgatctcgctcctcgttctgtagacctctttgttggtacacctccacacacattcttccgtattaccatgcatcgctttagagcctgcactcagctcaatctctataaactaaactcataaccctgttcctttact

SEQ ID NO: 335411 - DNA, 427 bp, Zea mays
gcgtccgcccacgcgtccgcggacgcgtgggggagcgttttttccaccttaacaaagttaagcttcccatggtgtctagaggagcttgagggtgagcgcaacgcgcaggggcggctgccaccttacatccatggataccgggtcatgcaacaaagcggcagcgccaccaccaccacgcaatatcgagaagaaccagcaggtcgagaaggaaccgatcgaggagaagccgaacgcggcggcgcaggtcgagaagaaaccgatcgagaagaagctcaacaccattattcgctgcggcacaagagattaatatctcctcaatcctcattcgtctcggcgattgatgcatccattgttccatcgatatataatagatcatatatgatacggtcgactttatacgcgttctgtagctataatcggtggtttg

SEQ ID NO: 335412 - DNA, 73 bp, Zea mays
cccacgcgtccgcccacgcgtccgaaaaaatttttttaaaaaaaaaaaaaaaaaaaaaaaaggaggggaaaaa

SEQ ID NO: 335413 - DNA, 114 bp, Zea mays
aaaaaagggccgagcccacgcgtccgcaaccagacagaaaccaacactcatgtgcctaactttttcggctacaaaaactacggggcgggttttttttacaacagggcgtgctcc

SEQ ID NO: 335414 - DNA, 195 bp, Zea mays
  unsure (1)..(195): unsure at all n locations
aaaaaccgggggggcaagcgtcccggacgcgtggacaggacacttgggctttctttgtttataggcagcacactcanctaggcagcatattttatcgagacgcgggagccatccccaccgtcagcgccgccgtgatgaccaccatctttgcccgcgccgtgatctccatgcccaatgctntatggctgcctgcgt

SEQ ID NO: 335415 - DNA, 500 bp, Zea mays
ggaaaaccgggcggccacgcgtccgactagttctagggcgtgtgtgtggcgtttctcctccgtcgtctgtcgaggcgtggtggggtgtatcttgcggggcgcggggccgctcgtccgttaggtgcagcgtcgttggcgaggccggtccgtgcgccgtctgcggtcgtttgtaggacccttaccggacgcttcgtctgctccggttggccaccctatgtttggtcaatatgttctttcgtctacttttgcttatttaccatttcgtcgttctcaattagtggtataggtttatgttttttcttcttttctattctttgtcttattttctatagtattgtatgttttacttttaattttttattttatttatttttatatattattataacttttttttttttattttcaaatattcttatttttattttatttttttttttttactcttctatatttttatttcttctatagcattcgcttttcatattcttttatttttt

SEQ ID NO: 335416 - DNA, 97 bp, Zea mays
gcgtccgaaaaaaaaaaaaaaaaaaaaaaaaaaaaaaattttttaaaaaaaaaaaaaaaaaaaaaaaaaagaagaaaaaaaaaaaaaaaaaagaggg

SEQ ID NO: 335417 - DNA, 162 bp, Zea mays
ggtttggaattacgggccggcccacgcgtccggcgccaggcactgccaagccaagctcgtatatctcggggaaacacggcaactaacccgaggggcgaggttattaatatggacggcgccaacactgccaaggagcgacaccagaagaacgacgtccgcaac

SEQ ID NO: 335418 - DNA, 248 bp, Zea mays
cggacgcgtgggtaaccgtcgaagcgttctttctcttttcttctttttcacgcacgccgggggatgattagaaaacgaacaggatctcgaagctgagtttatttgttacggtggtcgataaggtcaaggcttctgctgttacacctttggatccaatccattaagatgaattacccttgcatctattgtaattgtgtggttatccaaaaagggtgcatttaatcattactatttttttgacggggtgt

SEQ ID NO: 335419 - DNA, 414 bp, Zea mays
  unsure (1)..(414): unsure at all n locations
aaaaacngggccgacccacgcgtacacccacgcgtccgaaaaaaaaaaaaaaattttttaaaaaaaaaaaaaaaaaaaaaaaaaaaaagaaaaaattaaaaaaaaaaaaaaggaaaaaaaaaaaaaaaaaaaaaaaaaaaaaaaaaaaaaaaaaaaaaaaaaaaaaaaaaaaaaaaaaaaaaaaaaaaaaaaaaaaaaaaaaatgggggcccctttaaaaaaaaaaaaaattatcaaaccctataaaaaaaaatataaacttttaaatatgaaaacaaaaaaaaaaaaaaatacccactttaaaaaaacataataaaaaaaaaaaccttgtataaaacaaaataaaaaactttacaaaaaaaccacttttacataataagtaaaaaaaaaaaaaaaaaagccccaacaaaaact

SEQ ID NO: 335420 - DNA, 254 bp, Zea mays
aaaaaaataataaaaaaaattttttttttttaaaaaagaaaaagaaaaaaaataagaagagggggggtattaaaaaaataagaggggggaggaaaaaaaaaaattattaatggaatgggtaaagaaaaaaaaaaaaaaaaaaaaaagaaggaaaaaggagaaaaaaagagaagaaagaaaaaaaaaaaaaaaaaaaaaaaaaaaaaagagaagagaaaaaaaggaaaaaaaaaaagaaaaatataggagggaag

SEQ ID NO: 335421 - DNA, 112 bp, Zea mays
caaaaaaaaaaaaaaaaaaaaaaaaaaatttatattataaaaaaaaaaaaaaaaaaaagggaggggaattttaaaaaaaaaaagagggacaaaaaaaaaaaaatggggcggc

SEQ ID NO: 335422 - DNA, 139 bp, Zea mays
atggatgtgatcacaacttacgtaaagattgtacggctaagcaagggtatgactttgttttgttaaattgtagaggttagtgggcagataactccctgcatgacagtcaaaaaggggaagtttagctgtacaaattggg

SEQ ID NO: 335423 - DNA, 382 bp, Zea mays
cacgtaccggtccggaattcccggggcccttttttttttttttttttttttttttttttttttttttttttttttttttttttttttttttttttttttttttttttttggaccggaacacaagttttgatttattccaactcatcatccggaacatgggacccaatacaagggtcgatcagtgggggtttttgagatgaaccaaatttgttaaatcccccccagcaatttattgttgcccttgtccgaagggattttgagctcgttaatcctttttctgaggccctcccctttcttgttgccgcccatgagcctgtcgaggggggccttgatttcccctttttccaggtggtccccgggaaccttcgggcccacctttcaa

SEQ ID NO: 335424 - DNA, 325 bp, Zea mays
aaaaaaaaaaaaagggggagcccaccacacaacctaaaaaaaaaaaaaaaacgataaaacaaaaaaaaaaaaaaaaaactaaaaacaacaaagaaaaaaaaaaaaaaaataaaacaaaaaaaaacaaaaaataaaaaaaaaaaataaaaaaaaaaaaaaaagaaagaaaaaaaaaaaaaaaaaaaagaaaataaaaaaacagaaaaaaaaaaaaaaagataagagggaacaaaaaaaaaaacaaaaaaaaaaaaaagaatgaaaaaaaaagaaaaaaacaaaaagaaaaaaaaaaaaaaacaaaaagaaaaaaccaaatcaaaaa

SEQ ID NO: 335425 - DNA, 302 bp, Zea mays
  unsure (1)..(302): unsure at all n locations
acggtcccgacccactcttacgataccaacatgctacatacaaagttgtantttattacaacaanagaacaacaaaggggacgaagatattatcactactgatggtccttacaaatattacatttgttgctaactcaacaatttaaccttaatgctcacatgcttctatatcttcctttttttcaccataccttccatcaataatatttcagtatttgaaaacccatttctttaaccatatatacttcaacaatctattttaacaagtaacatatctttatcactcatgttatttactacaa

SEQ ID NO: 335426 - DNA, 404 bp, Zea mays
caggaatagcaaaaatatttgttggcgagcttattttaacaggcaagttcagaataatacgttggcttttttttcctatggagtccgattttctacagcgtagctgaaatgtatattatgtacgttgtctaaggatgataaccaacatccaactgtaagctcacctagtatgatcttgcttttttagctggcttctgcattctgtggtccattttcttctttccacctcgctacgatccaaggaacttgctagcagaatttgtaggttccaacagaagggatggctttcttggttggtgctttctcttgacaatttcactgtgtattgcatcaagagtagtcatgagtgagaggaaggattcaggacccatcaagccttgtcacatcatggaggcatacagaag

SEQ ID NO: 335427 - DNA, 316 bp, Zea mays
  unsure (1)..(316): unsure at all n locations
gaaatccgggccgacccacgcgnccgaaaataaaaaggaaaaaaaaaaaaattatattttaataaaaaaaataatatatatttgaggggtataatataaaaatatgggtagtataaaaaaaaaataaaataaatttggtctctttttttaaatataccatatttattatctctttatttaaaattataattattttttataattaatactataataaatacttttttctttttttttaaataatatttaatatatataataaatataatattatttatatttatcttgaaatatttattataattataattttata

SEQ ID NO: 335428 - DNA, 67 bp, Zea mays
cccacgcgtccgcggacgcgtgggctgaaagaaagacgaggtaggaattctctccctcagggaaggg

SEQ ID NO: 335429 - DNA, 438 bp, Zea mays
cagcattcaaaaacacaccaagcgaagcgctttagcaacgacctaacaccaatggctaccgggatattagccctccttgcgcgtcttgcccttttagtgagcgcaacaaatgcgttcattattccacagtgctcacttgctcctagtgccagtattccacagttcctcccaccagttacttaatgggcttcgaacatccagccgtgcaagcctacaggctacaactagcgcttgcggcgagcgccttacaacaaccaattgcccaattgcaacaacaatccttggcacatctaaccctacaaaccattgcaacgcaacaacaacaacaacagtttctgccatcactgaaccacctagccgtggtgaaccctgtcacctacttgcaacagcagctgcttgcattcaacccacttgctctggcgaacgtagctgcatacc

SEQ ID NO: 335430 - DNA, 347 bp, Zea mays
gccactcctacaagcaacatcaggaacacatttacactagaggtgctcaacctgctcggcaggtgtaaccaagactatcggggtgtctacacaacattatatcataatacaccactcgttcaagaatacgaagagctcaggatgtgcatgagatcactctgaatcaaaatacataggtccattcgttgaagatcaaatatgaaattggactatataggatgctgctacgctgacttctatatcatattcgatacggctaatcactacggatagcatttgggacaccatttatagaccacatagcaatcgccgatgtagctattcgctacctaatatgtaaagactga

SEQ ID NO: 335431 - DNA, 96 bp, Zea mays
  unsure (1)..(96): unsure at all n locations
aggccngagcccccaatatcaaaggaaatgatagcattttaatgtctcggggatatctaacagcaatacgcgggggactacttcgcactagtggtg

SEQ ID NO: 335432 - DNA, 181 bp, Zea mays
cccacacaaacgcttcagtctctctcttccactcacatttttgttttcccgccccagcaaccatacaaagagacgtgtttttaaactaaagagctgggaccaacaaccacctgccttaaccacaaaaatcattccaatgatacaacgcaaccatgaacagagaacaggcactatgacccca

SEQ ID NO: 335433 - DNA, 144 bp, Zea mays
cgggccgacccacgcgtacggtggatagcttcgctgaatctccagattttgtttcttggaaagctcgaatccttaccaccggaaaaatcatgtaatatggcggccaactctgaaattaacccctattgcatatatatatgtatg

SEQ ID NO: 335434 - DNA, 166 bp, Zea mays
aggtggatctactcacgatggaccatgctttttattctcggctggcttctctacggagctggtcaagcttaacgaactcaagggtggaaagacactaaggttcaagggccaatcacatatcttcagataggacggacaggactacctagtgaaccagacactaatc

SEQ ID NO: 335435 - DNA, 224 bp, Zea mays
  unsure (1)..(224): unsure at all n locations
acgcgtncggaccccttctatattacaatcgattccactctttctttttctaactgccaggcgcctgcatagagcgtgatttctcatgaccggggtgccctaaacacaattcacaagctcattcataacaacaacgttctctgggtacaccctgacaatgccctacttcatctccttacgatcacctcccctttcgacacttatcaaactcctgatactgtcac

SEQ ID NO: 335436 - DNA, 292 bp, Zea mays
cccacgcgtccgcggacgcgtgggcctttttttcctctctctactctccaagttctcgtggggcgtcgaccgctctacacgtgggttgccaacctggacaccgaagtggaagaaggaagcagtcagcatatggattcatggatcagcagccagccttctgtgagccttgacctgtgcgtgggccttgccccgttcagacttcaccaccaggcgccggtggccgtcttctttcccaggcccaagctgcttgtcgaggagaactttctcctgccgccttcaaagaaagaaccat

SEQ ID NO: 335437 - DNA, 328 bp, Zea mays
  unsure (1)..(328): unsure at all n locations
cggggcgaggccacgcgtcacanccattattgaccgtctcccttatgcgtttgttatttaaagagagcagagaagagcaggtgggggtgtctgttatcatccacaggggcgtggaaaagctccacatggggggcgaccacaagaataaggaggtggagcaccacaagatggccgaggagcaccacaagaaggatgagggggagcaccacaagaaggacggtgggtagcacaaggtatgcatcgtggtaaagatcattgacaagatcaccgtctatgctctgttacaagtccgtctaccacatggaaaagaaatacaagaaatataaga

SEQ ID NO: 335438 - DNA, 166 bp, Zea mays
gaatcatcttacctgttcagatttcttctcctcttttcgcaacccggtttgccgaccaggtgccggctttccagagtagccaggcgaatcccgagtctggtttgcgcgatggctgaggagcattccaacccccattcccagctagctgcggagagggaggttatgg

SEQ ID NO: 335439 - DNA, 341 bp, Zea mays
gacttccggtgcgccggcgcccgcttcttctatgtcgaggccgaggcggctgcgtgggagggcgacatttggagcatgtggggaaccgagccgttgccggtgccggtgccggtgccggtgccggtgcgttcctgttgtgctggtcttgctctctgccgacggtagtgtcttggtacaacagccggaggatgtgtatgctaggtagctagttgactagatgcgatggtgtgccgagtgtgcatgttggcgttggtccaactacattgattgtgcacacttgtttctgtcttcttgtccgggcagacttgcttttttttattcttgagcaacttctgtatttt

SEQ ID NO: 335440 - DNA, 435 bp, Zea mays
  unsure (1)..(435): unsure at all n locations
acccacgcgnccgccacgcgnncgaaaaaaaaaaaataaaaatttttttatttataaaaaaaaaaaaaaaaagagagcgagaaatttaaaaaaaagggaaggaacaaaaaaaaaaaaaaaaaaaaaaaaataaataaaaaaaaaaaaacaaaaaaaaaaataaaaaaaaaaaacaataacgggccccccctttataaaaacaaaatcaccccccccctccttccaaaaacatatcttcctttttagttcccccaaaaaaataaaccttcccccaattataaaaactcttacccagaaaaacccatttattccccacataataagccattcaaaaaatacccctttttcaaatcaatcaaaaaataaaaatcccccccccatatatccctcaccaaaaaatgttcccaccttaaaaaacataaatccacacccccc

SEQ ID NO: 335441 - DNA, 89 bp, Zea mays
aaaaaaaaaaaaaaaaaaattaaaaaaattttttttaaaaaaaaaaaaaaaaaaaaaaaaaggggaaaaaaaaaaaaaaaggggggggg

SEQ ID NO: 335442 - DNA, 240 bp, Zea mays
cccacgcgtccgcccacgcgtccgcggacgcttgtttgggtccttcttcgagcagaatgacatgttccgcctgaactatggctaaaagacagtcgaaaactcttgtgatgaacgaatttgttaagggcttcatgttgagacgatgaataccgactgtcgccgctactctcatctcctttgtatctcctctgttggctgattaaactgttattacaagaaattgctggacttgttttttcc

SEQ ID NO: 335443 - DNA, 168 bp, Zea mays
attcaattaattgggggttctatattatttagtggggctactttccccaaccaaaagcaatcatttatttccttttcctggggggtggaaaattaattaaagcttagatttatgggcaaaagatttcaaacgatacattataataaaaaagttttaagttcttacact

SEQ ID NO: 335444 - DNA, 272 bp, Zea mays
acccacgcgtccgctaggaaacctgacctaccttagtttgctagtactttcaaataatagatttagcggcccaattcgtgccatttacaaactccaaaacctaagtgttagactactgtatttgtatttatagtatgtctaatattggtagttagtccttgattgtaggcccttgattagaggcccttgattgtaggcatgtagggctgtgctttgccatgtgtgccacgacgcacagtctattcatactgtacatttccatggtatacaat

SEQ ID NO: 335445 - DNA, 125 bp, Zea mays
aaaaaaaaaaaaaaaaaaaaaaaaaaattatttaaaaaaaacgggcgatcgttaatataggatgcaaacttactaacgcttgcgtgcaaataaatagattttttttatagttacctaaattcaat

SEQ ID NO: 335446 - DNA, 97 bp, Zea mays
cggacgcgtgggcgggtggagctctatttattcccacgctcccgcctccccggcaaacacacttacgcccgccgaggccgcattctagcacgttgtt

SEQ ID NO: 335447 - DNA, 348 bp, Zea mays
ctccacacggtgttcagtgtagagagagagtatttttttatacctctgatcaaccatatgagcccgttctttttaaaatccggcgcggccctaaaaacatcatatacattttctttcttcgtaatgtatgcatctaatctttaatgtctgcaaatgtttaaattaacatttctcttcttctctctttattactttttgtattaaaccctttttattttatttctaaagttttagtttctcactctttttctcttataaacattcttccttataatttttacatcttttctattattctctcactattcgcttattccaataattttattcatttattcctttatctct

SEQ ID NO: 335448 - DNA, 340 bp, Zea mays
cgtccaccggcttcgagatcaagttcaccgtctgacccccccgtcccgcgacaggttggcgggtcgccgcgcggtcttgaacggtctattcgtgcactactactgcgaatctgcgattaaagatcagaggcgacatctaatgtaccgtagtctgtttacctgaattcctgaaaagctttgctatctgcttgggttggaattcatgccagattgtgggtataaacctgtttccttactacctagtgtccaagtcggaatattaataagctatgccaggattcagatcgaaatatttctgtcaaaaaaaaaaaaaaactacataaatgaaaaagcaatgaac

SEQ ID NO: 335449 - DNA, 214 bp, Zea mays
ttcctacaaacactacatcacaacattcactttcacctccacatacaatctctttagaactggatatattacttatttgactgctccagatatatcctgctcctactaaatactgcatacaaattctgtattctaactaatgatctcatctctcattatcatatcaaatcatttaacctgaatgacatatcaatcttactaaacttaaccacat

SEQ ID NO: 335450 - DNA, 375 bp, Zea mays
gtccttaccatggacaccaaggaacaccaatcaaagtttcatatttcagttacaaacactgatgatacttgtttggatgcatctgctggtcgaaggcagactgcctcagagatcaggcttcctatgttctctgcatgcaggtggcatgcaaaacagatgtgggagttaaatgcgaatggaaatcttgtgagcagctattcaaggttatgtgccacagtggaatcaagggacgaaggaggtatatattacataacttttttattttgaactaagtgacatcactatattttcctatgaaatataggtaccagtggaggtcgggcatggattgcaactggaagtgaaaggagaatctatctcgcatttttaatctcg

SEQ ID NO: 335451 - DNA, 361 bp, Zea mays
cgacgacctgtaccctctgagctacatgtccaagcccaagcgcctgcacactcaaccagagggcgacgacgacgacgggactgcgcaggacggcgcgagaaggaacgggcgcgagagcagagatactggggcctcgaaacgcggctcgggaggcggagggggagggggagggggaggaggaggcataggagccttcatgggatgggtggctaaaacggcggtcatggtggtgggcagccgtctggataatgaaggccgatggatacgagtccgggacatggcggaacggcggcgccaggctggacattgcggatctgttctgcggcggtggtggtatgcaggcagcggcggcgagcggcgg

SEQ ID NO: 335452 - DNA, 266 bp, Zea mays
tccaccttcaagaaaacgatactatttgcccttccaactctatgcagacacatataggctcgatactaataccaaaaggacatgccacgtaaatccaacctctaacaaatcgctacatgacaatattgtattccatgaccgacacttatctctatcgcacaaatctaaaattgacgactgaattacgcatcatacatattgaaccatatcatgctcaacctttgatcgctaccatttacatactaatacattactagataattgct

SEQ ID NO: 335453 - DNA, 404 bp, Zea mays
ccgatagcgaaccaagggcgacgtattcgccgccggagaagattcctacgcgtcgttgtttttggctgcaggcgtcaacatacacagcggcgaggaggtggctatcaagttgttattagataatctgatactgttcgtgcaccatttttctctgtcgtggagttatatgcctggcattcggcatgagtttgttccatatgcaaacatatcatggtcaaccattgctagcaacggtttcgtgaagaatttgtgtgtagattatgggatgacagaaaatggatgatgttctgcatgtaattgctttaaaaaagactggcatggtcccgagctatatttttacatgagtaataacaagattttcaaaccaaataaaatcaataataatatcaagcatggatttacca

SEQ ID NO: 335454 - DNA, 56 bp, Zea mays
gtagtatctatcatattggtacccctgttactgagtataattttgttttcatatcc

SEQ ID NO: 335455 - DNA, 184 bp, Zea mays
gaaagttttgcaagaaatcaggagattagttctaataagcaaaagaagagaataaggaatgtgaaagggctcaagggagaatgtcacaccaaatcaacttatgtatgtgcaacaacttgttaattctctttttgatgcttctggtatattaatttccttacaagggcttagacatcttaactct

SEQ ID NO: 335456 - DNA, 335 bp, Zea mays
aatagagcaacaatggagaccaagatattttccctccttatgctccttgctctttctacatgtgttgctaacgcgacaattttccctcaatgctcacaagctcctatagcttccctttttcccccataccttccatcaattatagcttcagtatgtgaaaacccagctcttcaaccatataggcttcaacaagcaatcgcagcaagcaacatacctttatcgcccttgttgtgtcaacaatcgccagccctatctttggtgcagtcattggtacaaaccatcagggcacaacagctgcagcaactcgtgctacctgtgatcaaccaagtagctct

SEQ ID NO: 335457 - DNA, 345 bp, Zea mays
tcttccttcctctcgtccaacactactcaaggatgcatttactcttccacctcatcatcctatagacgggcatttttctatattcgtgctcccaaatcaaactccacttccactaatcatattcgattctactctcctattcacatacctctttgcacattttacacattcatactctcatgccaaattcatcatatcatctcactattaaacgccattactctactcactctgacttaacattatatcacatcccataaatcttcaccctatatcttcccccaaacgataacctcatactctttcctactatcaatgcaaaactccacgctaactctaactttc

SEQ ID NO: 335458 - DNA, 305 bp, Zea mays
cagaaagttgcaacatgaggataattcacctgatggtgccagacctcttatgtcggaagcgtgggatgggcgatcctcaagttcacatgcatatgaaccgtctttttctggtcaaggattcaaatctccagaaacacccgattcgacagtgcctgtcaagcatccttctgcgatggaacctgtgacttcctctcaaagacctggcagctcaacatcggcaacatcagagcgcattggtgcaaactcagtcgctggtgctcctggctcgtcaccaagctcttcaataggatctcttaccgctgaaa

SEQ ID NO: 335459 - DNA, 263 bp, Zea mays
cacacacgtgcaacaacacgatcatccaccttatctggccacaccttttattctttaaacatgccactgtcgatcctgcatggcgcgaacatctaacccgccatattttactgaaacatcataatttgattaaacacaccattcgacacagactatcaaaccaccttcctctactcaacttacaacttcatcatctagaccaagcaactcaacttcggcactatcatacctcacttcctcaaactgactccatctttctcctg

SEQ ID NO: 335460 - DNA, 212 bp, Zea mays
aaaaaagaaaccaaaaacccccccctttattgcaataaccccataacaccaaactatttattacaaaaacttttccaaacggggaaaaaaaccccccatcaaatcggcccggagaaaacaacacccccaaaatattaaaaattcccaccctgttataactggaaactcctagggctacaacccgttatttaaaaacacggaggcccccccgg

SEQ ID NO: 335461 - DNA, 266 bp, Zea mays
tttttatatctttattctttttccttttttttttttttttttaattttttttttttttgtgttttatttaaaatttttattggtcttacaaaaaaaaccataaacccccctctataatcaaataaccccaaaacccctaattatctattaccaaaactcttccacaactcacaacaaaactcccatcaaaaccaacaccataaaacaaaacccacataatataaacaaatcccaccctaaactaactcaaaacaccatactctaca

SEQ ID NO: 335462 - DNA, 326 bp, Zea mays
cccacgcgtccgcccacgcgtccgcatagaaagcacaatagtgtaccaacaatggcagctagagatattttgcctccttatgctccttggtctttctgcaagtgctgctacggcgaccattttcccacaatgctcacaagctcctatagcttcccttcttcccccgtacctctcaccaacggtgtcttcggtatgtgaaaacccaattcttcaaccctacaggatccaacaggcaatcgcagctggcatcttacctttatcacccttgttcctccaacaatcatcagccctattacagcagttacctttggtgcatttattggcac

SEQ ID NO: 335463 - DNA, 469 bp, Zea mays
gaaccggaggttcgggctaggcgtacgcacgggtgcaagcaagacgacagtacgggtagaggtccgtggtcacggtgttgtgtggatcaatgatgacggcttcaaacgcaatgtcagctgagaatactatcactagtattacttcatttataataatgcgacgagtgcttggcattctattgtggctcatgtaactcatgcacgcatttctcgtttattcatcattctcctcttgccttgaattgaggatgggcaatgagaacgtgactactgaagaacaagaagtttctgactgtgcaagggctaccgatgagaacgccatgcctcactatgctgccacctctgctactgctatgcatgtccccctcatattcgctgctcaggttgaggtggttccggtacatagacctgatgagatgcatgttccaagttgatactggacggaaacaacttaaggtatgaagatgtg

SEQ ID NO: 335464 - DNA, 67 bp, Zea mays
caataataaagttttttggatgatgtatgtggccaaccagaaataagaagttacatttccagattct

SEQ ID NO: 335465 - DNA, 306 bp, Zea mays
cggacgcgtgggctactaccatttagccagctagctgcagcaaaccgtgcttccttcttgacacagcaacagttgctgcctttctaccagcagtttgcggctaaccccgcaaccctcttacaactacaacaattgttgccctttgtccaacttgctttgacagacccagcggcctcctaccaacaacacatcattggtggtgccctcttttagattgcttattagttgtaattcaataataaagtcttttggatgatgtatgtggccaaccagaaataagaagttacatttccagattttaatgtg

SEQ ID NO: 335466 - DNA, 67 bp, Zea mays
caataataaagttttttggatgatgtatgtggccaaccagaaataagaagttacatttccagatgct

SEQ ID NO: 335467 - DNA, 344 bp, Zea mays
gtgggttagcttctcctccccctccggttcgggttcgggttcgtgaggttctccggggttcgggttcgtgggtgagcggatcgagatggcggcgtcggatgttgagtaccgctgcttcgtcggcggcctcgcctgggccacggacgaccactccctccacaacgccttcagcacctacggcgaggtcctcgagtccaagatcatcctcgatcgggagacgcagaggtcccgcggcttcggcttcgtcaccttctccacggaggaggcgatgcggaacgccatcgagggcatgaacggcaaggagctggactggcgcaacatcaccgtcaacgaggcccagtccc

SEQ ID NO: 335468 - DNA, 394 bp, Zea mays
cggacgcgtgggttcagaaacacaccaagcgaagcgcactagcaacaacctaacaacaatgggctaccaaaatataatccctccttgccctccttgccctttttccaaccccaccaaagccttcaattattccacaatgctaacttgctcctagttccataattccacagttcttccaaccagtaacttaaatggctcttaaccacccagctgtgcaagcctataggctacaacaagcgattgcggcagagcgtcttacaacaaccaattgcccaattgcaacaacattccttggcacatctaacaatacaaaccatcgcaacgcaacagcaacaacagtttctaccagcactgagccacctagccatggagaaccctgtcgactacttgcaac

SEQ ID NO: 335469 - DNA, 388 bp, Zea mays
cccacgcgtccggctagttgctgcctacccccagcaatttcttccattcaaccaactagcaggattgaactctgctgcttatttacagcagcaacaactactaccattcagccagctagctgatgtgagccctgctgccttcttgacacaacaacagttgttgccgttctacctgcacgctatgcctaacgctggcaccctcttacaactgcaacaattgctgccattcaaccaacttgctttgacaaactcaacagtgttctaccaacaacccatcattggtggtgccctcttttagattgcttatgagttatagttcaataatgaagttttttggatgatgtttgtggcgtcccagaaataagaaagtacatttctagattctaaa

SEQ ID NO: 335470 - DNA, 282 bp, Zea mays
  unsure (1)..(282): unsure at all n locations
tcttactcacacgcactcttactgctacaagactacttctntactgtcactaccaatattcatcagacagaattctaaatctacacactaagccaatttcacattattattatcactacaacattcatatcaatctatcattaatcctactttacaataaaaaaaattacactacactctatccttacttatattaaatatatcaactctagtacctacctctactatactaaatcatacactatcgtcgataaaccatatacatcccgctactcatcacca

SEQ ID NO: 335471 - DNA, 439 bp, Zea mays
cccacgcgtccgactaaatttaccccattttatcaacaatcactcccaattataatcggctggcttctacatcataagcatagccatgttacattacctccttatcatctctcttatttataaacactatcccaaactctcaatcacttcaagctcttcaagatcatacattccaagatcatcaattatctactaacatttctctccttcacactactgaatataataccttcacctcctataacactacatatacttactacaatactatgtctaataccaacccttacattcttttcaccacaacatagctttcttattatctcatttatcttattcgcaactatcagtatcattcaaccattgatgactacactattttgactatttcaacaaccatgtacctctatccaactcctttttttgactataccatatc

SEQ ID NO: 335472 - DNA, 182 bp, Zea mays
atgcgacagccaaaattcatcatgcaagcctctacatatacacgctcagccttattaaatttctcaagatatactaccacttttctctcctactatatcagattcaattctacctcaaaaaaactcatgagacaccctaacctctatcctcctatatatatccgcttctctactcaacactc

SEQ ID NO: 335473 - DNA, 140 bp, Zea mays
tcgacgggttcagaaacctgagatgcgcaaggaagctgacgagcgggaggccctcacgggccgcaccgctggccgaccctgatcttctgtgaagggttcgagttggagcacgcctgtcgggacccgaaagatggtgaact

SEQ ID NO: 335474 - DNA, 119 bp, Zea mays
tccacagcttcataaaccttatatgctcatttaatcttaccaactacaagcactcagggagcttactactgacccccactggagctcatatccaagattccagtcgcactacacctatc

SEQ ID NO: 335475 - DNA, 388 bp, Zea mays
atcgaccaaagcgtcgacgcctcctcgatggccatctcggcctccatggagaatgctgcgggcgcggtggcgggggcaagtggcgccggcggtggcagcgggagaggcaagaagaaagggatgccggccaagaacctcatggcggagcgccggcgtcgcaagaagctcaatgaccgcctctacatgctgcgctcggtggtgccgaagatcagcaaggtgatcaaccagcctcgtccattcatctcctattcgtcgtgtttcccatctgtgcttattagtgtatagttacatatagagtattatgctttgcctatatatgctgagttttttttatttatctataatggtggtgagtaggattctatcctacgaatatatttttcacttc

SEQ ID NO: 335476 - DNA, 249 bp, Zea mays
cccacgcgtccgctgggaaagtccttagggcctccgaagaaaaagcttctcatcttagagggtaatggtttacttgtggatatcaacgaagactaccacaacgctcacatggctgatgccaaggttcgaagaaaattagtattccgaaggccttactgcgatgattttctcaacttttgtgctctgaattttgagctaggcatatggtcctcaaaagaaaacaaacaaactaaaacaaacatatactat

SEQ ID NO: 335477 - DNA, 269 bp, Zea mays
cccacgcgtccgaggactcctgagttttttttttaatataaacattttctttcaataggttggactcttttacttttttggaaccaacaaacaaaaatccataacttcttttgctctatcatataaaataaacataccgttcgcaaaaactacacaccacaatgcaacttttaagatccgaaactaaaacaatacctaacttttacataaagctgcactattacgaatatctaagaaaaaactcatatatcctaaactcaaatttactt

SEQ ID NO: 335478 - DNA, 147 bp, Zea mays
gtaatctgaggttgtgcttaatgactgaatgaataagaatgacacaacagattacacagggaagcatttctgaatgtcttgatagcttcaaatttatacattgaatattgtggtaacaccaatttcattaggctgaccattcttttc

SEQ ID NO: 335479 - DNA, 291 bp, Zea mays
actagttctagatctcaagcgacctttcttttttacatgttgctgcacacacaactgggggtgtttttaaaattatgggtggatgttcacacaacacagcacggcacatggctagcctgctaacatgcggcacccacacaacacaacacactgctcgccagaagcgcaaaagaaggccaagggaggacactatacagacatcagccatcatcatcctctcatactcagagcatgccattgtacgcagctgactgactgactagaaacacacacagttacaccactatacta

SEQ ID NO: 335480 - DNA, 144 bp, Zea mays
  unsure (1)..(144): unsure at all n locations
gaaaaacgggccgacccacacaaacggcatggttttcgtcaacaaaacccaatttcaaatcttttgtagcttcatacgctgctgccgcgtttttctaaaaggaacgtgggcctacctaaacacantcttcaacattacataaat

SEQ ID NO: 335481 - DNA, 157 bp, Zea mays
cccacgcgtccgcccacgcgtccgtttctgtattactgtcctgaactctggatggtgtgtgttggctatctggctagacgtgcatgtgcccagtttgtatgtacaggagcagttcccgtccagaataaaaaaaaacttgttggggggtttttcttct

SEQ ID NO: 335482 - DNA, 215 bp, Zea mays
acgcccacgcatccgaccacacttacgtttctttattactgacctgaactctggatggcgtctgattgactatataactagacgtgcatgtgcccactttgtatgtacaggaccaattcccgtccataataaaaaaaaacttgttggggggtttttcttctaaaaaatacttaatgacaacacaaacaccaaacaaaaatataacattccataaa

SEQ ID NO: 335483 - DNA, 247 bp, Zea mays
atattatccctccttgcgcttcttgcgctttttgcgagcgcaacaaatgcgttcattattccacaatgctcacttgctccaagttccattattacacaggtcctcccaccagttacttcaatgggcttcgaacacccagctgtgcaagcctataggctacaacaagcaattgcggcgagcgtcttacaacaaccaatttcccagttgcaacaacaattcttggcacatctaacaatacaaaccattg

SEQ ID NO: 335484 - DNA, 223 bp, Zea mays
ctattttcaaacccaacaaaaactttcattaacctacaacactcactttctctaattactttaatcacacacctcctaccacacattactatactttgcttccaacacccatttaaacacccctaattactaccacatacaatttctataaactccctccctcaaccaactaccccctcccaaacaactttacttccacatttaacaatacaaaccatctcaa

SEQ ID NO: 335485 - DNA, 355 bp, Zea mays
agaccaactagcaacatataaagcacaatagtgtaccaacaatggtagccaaaatatggaggctccttatgctccttggtctttctgcaagtgctgctacgacgaccattttcccgcaatgctcacaagctcctatagcttctcttcttcccccatacctctcaccagcgttgtcttcagtatgtgaaaacccaattcttcaaccctacaggatccaacaggcaatcacagcaagcatcttacctttatcacccttgttcctccaacaatcatcagccctattacatcaattacctttggtgcatttattggcacaaaacatcagggcacaaacactacaacaactcgtgctaac

SEQ ID NO: 335486 - DNA, 387 bp, Zea mays
  unsure (1)..(387): unsure at all n locations
ccggccggaaataccggggcgggccaccactcgtccgggccccttggcccgaattcttcccaggctcttatagcttccttttttcccccgtacctgggaccancggtgtcttcggtatgtgaaaacccaattcttcaaccctacaggatccaacaggcaatcacagctggcatcttacctttatcacccttgttcctccaacaatcatcagccctattacatcagttacctttggtgcatttattggcacaaaacatcaaggcacaacaactacaacaacttgtgctagcaaaccttgctgcctactctcagcaacagcagtttcttccattcaaccaactagctgcattgaactctgcttcttatttgcaacaacaacaactacca

SEQ ID NO: 335487 - DNA, 122 bp, Zea mays
  unsure (1)..(122): unsure at all n locations
acccacccgtccggccgataattgagtaataatgtgtcacgcatcaccatgggtggcagtgtcagtgtgagcagtgacctgaatgaacaattgaaatgaaaagaaaaaagtattgttcccna

SEQ ID NO: 335488 - DNA, 92 bp, Zea mays
aataatgtctcacgcattaccatgggtggcaatgtcagtgtgagcaagtaccttaataaacaatggagatgaaaacaaaaaagtattgttcc

SEQ ID NO: 335489 - DNA, 53 bp, Zea mays
cggccgaatcccgggcgcccacgccttcgctaaaacgcggccggcctttttaa

SEQ ID NO: 335490 - DNA, 206 bp, Zea mays
cccacacatcctctcttttatctaacctttacaacatcactgtctcctaacatgaacacggtcactcataaaatagtggagataacatacaatatcactgcccgcctgccttacatcaataaacacaacacaactttcattctcacctatcattcctaccaacacttccctcccgtcgagtttatgatacaaatacctctatccac

SEQ ID NO: 335491 - DNA, 83 bp, Zea mays
tgtttgggtgtttccttccatcatcacttgctgaactgctctagtatttgcatttgggagggaagtctgtcgctgtacgagcc

SEQ ID NO: 335492 - DNA, 134 bp, Zea mays
  unsure (1)..(134): unsure at all n locations
acccacgagaacgatttcacatatctccttccatcatcactttctaaactgctctantataaacattcggcgccgaattaaaaactttgaccaccgccaaaaaaaacaaaaaaaaaaacatctcgcccacccct

SEQ ID NO: 335493 - DNA, 392 bp, Zea mays
agcattcaaaaacacaccaagcgaagcgcactagcaacgacctaacaccaatggctaccaggatattagccctccttgcgcttcttgcccttttagtgagcgcaacaaatgcgttcattattccacagtgctcacttgctcctagtgccagtattccacagttcctcccaccagttacttcaatgggcttcgaacatccagccgtgcaagcctacaggctacaactagcgcttgcggcgagcgccttacaacaaccaattgcccaattgcaacaacaatccttggcacatctaaccctacaaaccattgcaacgcaacaacaacaacaacagtttctgccatcactgagccaactagcccgggtgaaccctgtcacctacttgcaacagcag

SEQ ID NO: 335494 - DNA, 370 bp, Zea mays
gcacttgcaaaaagaccaaggaccataaggaggcaaaatatcagggcacaacaactacagcggcttgtgctagcaaaccttgctgcctactctcagcaacagcagtttcttccattcaaccaactagctgaatggaacttggtggtttattgcacaacaactaccattcaggcagctagctgctgcctacccccaacaatttctttcattcaaccaactgggatgattgaactctcctgcttatttacagcagcaacaactactaccattcagccagctagctggtgtgagccctgctgccttcttgacacaacaacagttattgccgatctacctgcacgctgcgcctaacgctggcacccttttacaa

SEQ ID NO: 335495 - DNA, 342 bp, Zea mays
gtccggccactcatattgaacaagatactgtagtactgtcctcaactacggcacgactacaacagcggctcttactagacgagctggctatctactatcgcatgctacaggttcttccatgcaatcagctagcttacaagaactctgctagatgattgccacactagacacgatacatgtatctctctcactgactacaaccaaacactccactccaataaccgcataggatggttcaactctaacgtttaatatcggtcaaaggatttcatccgatacaccaagattagtggtacgatcaatattgccattttagagcaccagcatcactgatcaacacat

SEQ ID NO: 335496 - DNA, 283 bp, Zea mays
cggactcatggggtttattcttgttaccatgtattaatgtaacaatctctatctcgatggagggttacttccagtcatgtgttggttttcctggagtcaaccaaacgttatttatttttgtgttaacgtcctaatcagacggatgctcttgggctaaacagattcaattctatccttgctgaataaagaacacacaattgtagccacataataacgtgatatataaatatttctttcccaactccttacagcaaccaattttccatttgctacaccaatcctt

SEQ ID NO: 335497 - DNA, 232 bp, Zea mays
aaaaccggggcggcccaagccgtccggaaaaacctccataaggttctcccccggcttgacgcgttgctttcagttcatccgacacggggggtatcttctaatgtggcggacgaagaggaggaagaggatgctgaaagtctctatcggagactgcggaaggggaaggcactgtcgcaggactacacagatgacctggtgccgtcgttccgatccatgcccgaggacaagctgc

SEQ ID NO: 335498 - DNA, 259 bp, Zea mays
gacccacgcgtacacccaccccttctcccactcctcctcctacttcccgacacttaagcaacttgaacatagggggcttttcataaaggacatgcagcacctcatcaccggatccacagcaacatccctcatccagtccttcatcatccacctataacactacctttctctctacaacacctacgacacaactctcctacaatctacattctcgtcattttcctcacctacgtacaacatctacactgctcacgcttac

SEQ ID NO: 335499 - DNA, 174 bp, Zea mays
cccacgcgtccgcccacgcgtccgcccacgcgtccgctaatggcgactttgtttgaacagggagtagcagacttttttgcggggttcgatttctctctctctctctttttcttttgtaattgtaacccttttttcacctttctggactggtataaaagtaagcctggactcgtc

SEQ ID NO: 335500 - DNA, 303 bp, Zea mays
cacgcgttccgaaatactcacaatttctatatgatgtatgcaaattctacttggggtggggcacccaatcttatggggctcctcttaatttccttcacaaaccggtcatcttttcctcgctaattcgttcggaacttttcacattcaaaaaaggccttgttaagattgagacccaaggcatattcatttggcatactttcatagacatgtttctgaaaaaatcgtactcataaaaccctttgactggctactcacccaattctttctcattgaccgtctattttcccaaaatggtcacctttt

SEQ ID NO: 335501 - DNA, 68 bp, Zea mays
aacgtacggccactcttcctaaaaaaaaacaaattttttttaaaaaaaaaaaaaatggcatccgcggg

SEQ ID NO: 335502 - DNA, 108 bp, Zea mays
aaaaaaaaaaaaaaaaaaaaaaaaaaaaaaaaaaaaaaaaaaaaaaaaaaaaaaaaaagaaagaaaaaaaaaaaaaaaaagggaaaaaaaaaaaaaaaaaaaaaaaaa

SEQ ID NO: 335503 - DNA, 419 bp, Zea mays
gcctactctcagcaacaacagtttcttccattcaaccaactagctgcattgaactctgctggttatttgcaacaacaacaactaccattcagccagctatctgctgcctacccccagcaatttcttccattcaaccaactgacagctttgaactctcctgcttatttacagcagcaacaactactaccattcagccagctagctggtgtgagccctgctaccttcttgacacaaccacaattgttgccgttctaccagcacgctgcgcctaacgctggcaccctcttacaactgcaacaattgctgccattcaaccaacttgctttgacaaacccaacagcattctaccaacaacccatcattggcggtgccctcttttagaattcttaagagttatagctcaatgattaaggcttttg

SEQ ID NO: 335504 - DNA, 419 bp, Zea mays
  unsure (1)..(419): unsure at all n locations
gtagagagaaggaaaaatatccccaaaccctagctcccgatctcgatggcgaaccctggcggcttcttcgacatgaccgtcggcggcgccccggcgggccggatcgtgatggagctgtacgccaacgaggtgcccaagaccgcggagaacttccgcgcgctgtgcacgggcgagaagggcgtgggcaagtccgggaagccgctccactacaagggctccaccttccaccgcgtcatccccgagttcatgtgccagggcggcgacttcacccgcggcaacggcaccggcggcgagtccatctacggcgagaagttccccgacgagaagttcgtgcgcaagcacnaccgcccccgtttgctctccatggccaacgccgggcccaacaccaacggcttccagttcttcatctgcaccgtcgc

SEQ ID NO: 335505 - DNA, 398 bp, Zea mays
  unsure (1)..(398): unsure at all n locations
cgtccggagagagaaggaaaaatatccccaaaccctactcccgatctcgatggcgaacccgggcggttcttcgacatgaccgtcggggcgccccggcgggccggatcgtgatggagctgtacgccaacgaggtgcccaagaccgcggagaacttccgcgcgctgtgcacgggcgagaagggcgtgggcaagtccgggaagccgctccactacaagggctccaccttccaccgcgtcatccccgagttcatgtgccaaggcggcgacttcacccgcggcaacggcaccggcggcgagtccatctacggcgagaagttccccgacgagaagttcgtgcgcaagcacaccgnccccggtttgctctccatggccaacgccgggcccaacaccaacgggttc

SEQ ID NO: 335506 - DNA, 380 bp, Zea mays
gcaacatagaaagcacaatagtgtaccaacaatggcagccaaaatattttgcctccttatgcggcttggtctttctgcaagtgctgctaccgcgaccattttcccgcaatgctcacaagctcctatagcttcccttcttcccccgtacctctcaccagcggtgtcttcggtatgtgaaaacccaattcttcaaccctataggatccaacaggcaatcgcagctggcatcttacctttatcacccttgttcctccaacaatcatcagccctattacagcagttacctttggtgcatttattggcacaaaacatcagggcacaacaactacaacaacttgtgctagcaaaccttgctgcctactctcagcaacagcagtttc

SEQ ID NO: 335507 - DNA, 301 bp, Zea mays
ctaaatggtagtagtatttagccagctagctgcagcaaaccgtgcttccttcttgacacagcaacagttgctgcctttctaccagcagtttgcggctaaccccgcaaccctcttacaactacaacaattgttgccctttgtccaacttgctttgacagacccagcggcctcctaccaacaacacatcattggtggtgccctcttttagattgcttattagttgtaattcaataataaagttttttggatgatgtatgtggccaaccagaaataagaagttacatttccagattctaatgtg

SEQ ID NO: 335508 - DNA, 373 bp, Zea mays
cggacgcgtgggcggacgcgtgggcaaccctacaggatccaacaggcaatcgcagctggcatgttacctttatcacccttgttcctccaacaatcatcagccctattacaacagttacctttggtgcatttattggcacaaaacatcagggcacaacaactacaacaacttgtgctagcaaaccttgctgcctactctcagcaacagcagtttcttccattcaaccaactaggttcattgaactctgcttcttatttgcaacaacaacaactaccattcagccagctacctgctgcctacccccagcaatttcttccattcaacccactagcagcattggactcttctggttatttacaggaacaaccacttc

SEQ ID NO: 335509 - DNA, 266 bp, Zea mays
acggggacgcgtgggcacctctgccgatttccatccgccggggcgtactctgttaccgaggaggccattgacaacatcctggcctcctccatcctgagctcgtcgccggcggacatctccacggccggcctctcctcctgctcatccagccgtctctcaccgaggactctgcctccgacgacacctgactactcgatccctacgccaaagcaccatatggcggtcgaccaacggtccccagcggccgatcaccaacgggacgcacc

SEQ ID NO: 335510 - DNA, 426 bp, Zea mays
gttggcttctcctccccctccggttcgggttcgggttcgtgaggttctccggggttcggtgtcgtgggtgagcggatcgagatggcggcgtcggatgttgagtaccgctgcttcgtcggcggcctcgcctgggccacggacgaccactccctgcacaacgccttcagcacctacggcgaggtcctcgagtccaagatcatcctcgatcgggagacgcagaggtcccgcggcttcggcttcgtcaccttctccacggaggaggcgatgcggaacgccatcgagggcatgaacggcaaggagctggacggccgcaacatcaccgtcaacgaggcccagtcccgcggcggccgtggaggcggcggcggtgggtacggtggtggccgtggaggcagcggctacagcggtggcgggcgccgtgatggcggc

SEQ ID NO: 335511 - DNA, 461 bp, Zea mays
ccttaattccctggtctacccactcttcctatgattggaaaaaaaaaaaaaaaaaaaaatttaaaaaaaaaaaaaaaaaaaaaaaaaaaaaaagaaaaaaaaaaaaaaaaaaaaaacaactaataaaaataacaaacccactttctttaaacatccaaaattacacaccattattcttcaacaactttaacaaattatctaatcaacactcatacaactattcttaatcttaccctaccaccttctctacaacatcttcatctcctttcatctacccctctctttctcttctccttactcctacataccttttcctcctctttttttccatttaatctaccacttcttactcctctaactatttttaacccttctttctactttcttcaccttctttcatttttctccctttccctttttatctctttttcttacctccttcttcttcaattctttctttt

SEQ ID NO: 335512 - DNA, 447 bp, Zea mays
acccactcgtacgcccactcgtcctccctatttccccttttttctctctctctccatcttctacaaaccgttggcttttataaaaacctcccctatcccaatactccatcatactcttctccaaatcttctttacacccacctcctacaactatcaactcttattatccaatccctcatcttataatactttccaaaattactatattatctataatactttaataaatgtcttcaaattattcctttttaccacattattatcattctattattaaacacatacttttcactattacaactaccaccatttttaaaccatcactaattaaacttcataataattttatctacttatcaacttatatctataaatatatcatataacataatttactttaaaacaacttacaattcctttcttcatttaaatttatcaccttttaac

SEQ ID NO: 335513 - DNA, 428 bp, Zea mays
gcccacgcgtccgcccacgcgtccgagatcatcctcgatcgggagacgcagaggtcccgcggcttcggcttcgtcaccttctccacggaggaggcgatgcggaacgccatcgagggcatgaacggcaaggagctggacggccgcaacatcaccgtcaacgaggcccagtcccgcggcggccgtggaggcggcggcggtgggtacggtggtggccgtggaggcggcggctacggcggtggcgggcgccgtgatggcggtggcggctacggcggtggcggcggctacggtggcggcggcggctacggtggtggtggcggcggctacggcggtggcaaccgtggcggcggctacggcaactccgacgggaactggaggaactgagcggtggggcccgcgcggccaagttatcctgttcgctaccgtgatgt

SEQ ID NO: 335514 - DNA, 145 bp, Zea mays
tcgaccgacgcgtgcgtccacgcatacgatcacccactccatcatgtcttttatctcatagggggctagcgttattggacgttctttctttactgcctgttggctaatcctatccccctgaatgtcattttgtgcgtacatagag

SEQ ID NO: 335515 - DNA, 339 bp, Zea mays
cgtcctataatgtgaacaacatccatgaagatatacttttttgcacgctcatgctgctcatgacgcatgcttattttacaactagatggcgggcctatcccaatgatttcaatacgctcaacagtacgcatactaccaaaatgtgattcaacgcactttgtctgctcttcaattatgctagtgcacctcttgactgtatggttctataattttgctgtccctaagctacaaagtatttaatcttatactcccctggctatgcaagctgtggaatgtattcttttttactgcaactgaaaaatgctacccatactatagctggtctccttattactaaaa

SEQ ID NO: 335516 - DNA, 62 bp, Zea mays
cggacgcgtgggttgagttgcaccttttggtgcttatggctatgggttggcttccagaggag

SEQ ID NO: 335517 - DNA, 404 bp, Zea mays
atacaaaccatcgcaacacaacagcaacaacagttcctaccagcactgagccaactagatgtggtgaaccctgtcgcctacttgcaacagcaggtgcttgcatccaacccacttgctctggcaaacgtagctgcataccaacaacaacaacaattgcaacagtttctgccagcgctcagtcaactagccatggtgaaccctgccgcctacctacaacagcaacaactgctttcatctagccctctcgttgtgggtaatgcacctacatacctgcaacaacaattgctgcaacagattgtaccagctctgactcagctagctgtggcaaaccctgctgcctacttgcaacagctgcttccattcaaccaactgactgtgtcgaactctgctgcgtacctacaaca

SEQ ID NO: 335518 - DNA, 450 bp, Zea mays
cggacgcgtgggcggacgcgtgggtttgagcattcagaaacacaccaagcgaagcgcgctggcaacaacctaacaacaatggctaccaagatattatccctccttgcgcttcttgcgctttttgcgagcgcaacaaatgcgtccattattccacaatgctcacttgctcctagttccattattccacagttcctcccaccagttacttcaatggccttcgaacacccagctgtgcaagcctataggctacaacaagcgattgcggcgagcgtcttacaacaaccaattgcccaattgcaacaacaatccttggcacatctaacaatacaaaccatcgcaacgcaacagcaacaacagttcctaccagcactgagccacctagccatggtgaaccctgtcgcctacttgcaacagcagttgcttgcatccaaccaacttgctctagcaaac

SEQ ID NO: 335519 - DNA, 64 bp, Zea mays
cccacgcgtccgatgtgtggtatgaccaataatatatgcatggtcataataaagttttggtggt

SEQ ID NO: 335520 - DNA, 348 bp, Zea mays
ttccacttcaactacctgagatatttttaaaacttcgcaaacccctacctaacctaaattttcactatcttcttatacaatttcctacaccacctcttcttctacaccatttacttctaatacttcctctcctttccttatatcctacttctacatatcctcatctcatcattaaaacattcatacatacatcactcaatattttacaataccatcaatttaattaatcaaataatatttaacttaacacacaataatataaattcctttcattctacattatccaaacttacttactctttcttactacatcataactctattatacactcacctaaattcaattta

SEQ ID NO: 335521 - DNA, 441 bp, Zea mays
cattattccacagttcctcccaccagttacttcaatgggcttcgaacacctagctgtgcaagccaacatgcaacaacaagcgcttgcggcgagcgtcttacaacaaccaattgcccaattgcaacaacaatccttgccacatctaacaatacaagccatcacaacgcaacagcaacaacagttcctaccagcactgagccacctagccatggtgaaccctgccgcctacttgcaagagcagctgcttgcatccaacccacttgctctggcgaacgtagttgcaaaccagcaacaacaacagctacaacagtttctgccaacgctcagtcaactagccatggtgaaccctgccgcctacgtacaacaacaacaactgctttcatctagcccgctcgctgtgggcaatgcacctacatacctgcaacaacaattgttgcaaca

SEQ ID NO: 335522 - DNA, 407 bp, Zea mays
cgtgctagcaaaccttgctgcctacgctcagcaacagcagttacctttggtgcaattgttggcagaaaacatcagggcacaacaactacaacaactcgtgctagcaaaccttgctgcctactctcagcaacagcagtttctgccattcaaccaactagctgcattgaactctgctgcttatttgcaacaacaacaactactaccattcagccagctagctgctgcctaccaccagcaatttcttccattcaaccaactggcagcattgaactctcctgcttatgtacaacaacaactactaccattcagccagctagctgctgtgagccctgctgccttcttgacacagcaacagttgttgccgttctacctgcacgctgcgcctaacgttggcaccctcttacaac

SEQ ID NO: 335523 - DNA, 308 bp, Zea mays
cccacgcgtccgcgcaacgcaacagcaacaacagttcctaccagcactgagccacctagcgatggtgaaccctgtcgcctacttgcaacagcagctgcttgcatccaacccacttgctctagcaaacgtagttgcaaaccagcaacaacaacaactgcaacagtttctgccagcgcttagtcaactagccatggtgaaccctgccgcctacctacaacagcaacaactgctttcatctagcccgctcgctgtggccaatgcacctacatacctgcaacaagaattgttgcaacagattgtaccagctc

SEQ ID NO: 335524 - DNA, 361 bp, Zea mays
  unsure (1)..(361): unsure at all n locations
ctgccatcactgagccacctagccgtggtgaaccctgtcacctacttgcaacagcagctgcgtgcatccaacccacttgctctggcgaacgtagctgcataccagcaacaacaacagctgcaacagtttatgccagtgctcagtcaactagccatggtgaaccctgccgtctacctacaactactttcatctagcccgctcgcggtgggcaatgcacctacgtacctacaacaacagttgctgcaacaaattgtaccagctctgactcagctagctgtggcaaaccctgctgcctacttacaacagttgcttncattcaaccaactggctgtgtcaaactctgctgcgtacctacaacagc

SEQ ID NO: 335525 - DNA, 92 bp, Zea mays
aaaaaaaaaaaaaaaaaaaaaaaaaaaaaaaaataaaaaaaaaaaaaaaaaaaaaaaaaaaaaggggggaaaaaaaaaaaaaaaagaaaaaa

SEQ ID NO: 335526 - DNA, 115 bp, Zea mays
attgtgtgatagtgacgaccgtatcctgtcaattgtcatatagcaggacagcttcttgtaatggtgtatataaattttcaggcgattcataatttctattttttggcctttgctt

SEQ ID NO: 335527 - DNA, 86 bp, Zea mays
cccacgcgtccgcccacgcgtccgcggacgcgtgggttttggtgtaagaatatgggatttattcaataaaatggtcggtatctgcg

SEQ ID NO: 335528 - DNA, 352 bp, Zea mays
cggacgcgtgggattaagaccaactagcaccatagaaagcacaatagtgtaccaacaatggcgggcaaaatattttgcttccttatgctccttggtctttctgcaagtgctgctaccgcaaccattttcccacaatgctcacaagctcctatagcttcctttcttcccccatacctctcaccagcggtgtcttcagtatgtgaaaacccaattcttcaaccctacaggatccaacatgcaatcgcagcaggcatcttacctttatcacccttgttcctacaacaaccgtcagccctattacagcaggtacctttggagcatttgttggcacaaaacattaaagcacaaccac

SEQ ID NO: 335529 - DNA, 245 bp, Zea mays
tttcaaccaactacctacacttaactcttagactgattttcaacaacaactagtcccacccatccacctataaccttcctacccccatcatactatcccactcaacctactctcatttctccaactcctctactcattcacatctacaactactactaccactaatacacctcccttttctaatccctacttaccttataaccacaacctcaataataacatccctaccactacactaaccctaa

SEQ ID NO: 335530 - DNA, 324 bp, Zea mays
cggacgcgtgggtctttatgggcaatcacgaatcattgactgaactgtataaaggggattggtcactgtgacgctaggttctcagatgcgcacaacatgaccgttatgaagagctacacggcattcttcaagccacatgggatatcttattctgtagagagctccaaaaaaggttactgggcaccacctaccagggaagaaaatccgccacaacatcttgaattcatactttttttgcgttgtcggattacacatgtccaacgaaggtgccgttttcacgtttctcgctcacaccatcaaaccattgacctgtgcacatggacc

SEQ ID NO: 335531 - DNA, 249 bp, Zea mays
gaccaactagcaacatagaaagcacaatagtgtaccaacaatggcagccaaaatattttgcttgcttatgctccttggtctttctgcaagtgttgctaccgcaaccattttcccacaatgctcacaagctcctatagcttcccttcttcccccatacctctcaccagcggtgtcttcaatgtgtgaaaacccaattgttcaaccctacaagatccaacaggcaatcgcaacaggcatcttaccattatc

SEQ ID NO: 335532 - DNA, 354 bp, Zea mays
ctttcttaaactaacgttgttgctgaccaaaaaaaaaaaaaaaaaaaaaaaaaaaaaaaaggggaaaaaaaaaaaaaaaaaaaaaaaaaaaaaaaaaaaaaaaaaaaaaaaaaaaaaaaaaaaaaaaaaaaaaaaaaaaaaaaaaaaaaaaaaaaaaaaaggccgccccttttaaagaacccaactttacttccccttccttccaacttaaaaccttttttatagtgccccctaatttaaattaattgcccttcttttaaaaacttcttaactggaaaaaccttggctttcccaaatttaatccctttgaaaaaaatccccttttccccaattgccttaataccaaaaagcccc

SEQ ID NO: 335533 - DNA, 423 bp, Zea mays
ccaactagcaacatagaaagcacaatagtgtaccaacaatggcagccaaaatattgggcttccttatgctccttggtctttctgcaagtgttgctaccgcaaccattttcccacaatgctcacaagctcctatagcttcccttcttcccccatacctctcaccagcggtgtcttcaatgtgtgaaaacccaattgttcaaccctacaggatccaacaggcaatcgcaacaggcatcttaccattatcacccttgttcctccaacaaccgtcagccctattacagcagttacctttggtccatttggtggcacaaaacatcagggcacaacaactacaacaacttgtgctagcaaaccttgctgcatactctcagcaacatcagtttctttcattcaaccaactggctgcattgaactctgctg

SEQ ID NO: 335534 - DNA, 263 bp, Zea mays
actgtgacaatgcgtggcttggcattgatggaatgactggtgatattgtccagaggacggagctcaggatctgggattgcttcagcgtttaagtacaaacgtacaaggacagcaattgcagctgcttgcatgcttcagagaatggatgaccttgtcagcggtatcaataagacgcacgctcctggagcctcagcttcaaagcaacccccaatcgacactgtagtcgatgcttacattgagcaaatgataacagactagaggct

SEQ ID NO: 335535 - DNA, 292 bp, Zea mays
cccacgcgtccgaaaaaaaaaaaaaaaaaaaattaaaaaaaaaaaaaaaaaaaaaaaaaaaaaaaaaaaaaaaaaaaaaaaaaaaaaaaaaaaaaaaaaaaaaaaaaaaaaaaaaaaaaaaaaaaataaaaaaaaaaaaataaaaataaaataaatacaaattatatatatatttaaaatattaactttatttttactttaaaatataattgatttaaatttttattactaaaaaaaaccttcttttccctaactaaaatctccttttttaaaatgctctttaatatcaatt

SEQ ID NO: 335536 - DNA, 412 bp, Zea mays
cctaattacctctccaccacgcttcctcccacgcctcctaaaaaaactcataaacaactctatccaaaaccaacaaacaataaaaacaaaaagaaactttttaataaatataatatactccaacaatcataaaacctactacttctcacacatttatttcatcacattttacaaaacatcatttctcaacaactactacaacttattctatcataaccttcctaactactctcattaacaacacaatcttccattcatctaactaactccattcaactactcctcttatttttttcaactacaactaccattcattcaactaccttcttcctacctacatcaattaatttctttcaaccaaccaacattcattcaactatctttcttatttatatcaactacaactactacc

SEQ ID NO: 335537 - DNA, 290 bp, Zea mays
acgagagaacccccaacggattgagggttgaaaggcagtactccacctgtatcttatggggttgccttcgtcgggagagtaatacatatacatgcatgttatggagtgctggtaaaaattagtgcatcaatttatttataaccatgatatgagctggattgtatccgagaatattctggacccgatttgaaaagttagtgatgtgtagaagtattagttggaatttggtgaatggtcgcaagtgtgcttgtgctccctcataaaacagaaatgaatgttgtaatgtattc

SEQ ID NO: 335538 - DNA, 77 bp, Zea mays
caaataagttaattcgccaggcatcattactattggaaaaaaaaaaaatggggtaggaaaaaaataaaagagagaag

SEQ ID NO: 335539 - DNA, 427 bp, Zea mays
  unsure (1)..(427): unsure at all n locations
cagaaacacaccaagcgaagctacctagcaacgacttaacaacaatggctaccaagatattagccctccttgcgcttcttgccctttttgtgagcgcaacaaatgcgttcattattccacaatgctcacttgctcctagtgccattataccacagttcctccgaccagttacttcaatgggcttcgaacacctagctgtgcaagcctacaggctacaacaagcgcttgcggcgagcgtcttacaacaaccaattaaccaattgcaacaacaatccttggcacatctaaccatacaaaccatcgcaacacaacagcaacaacagttcctaccagcactgagccaactagatgtggtgaaccctgtcgcctacttgcaacagcangtgcttgcatccaacccacttgctctggcaaacgtagctgcata

SEQ ID NO: 335540 - DNA, 170 bp, Zea mays
cccacgcgtccgtgccattcaaccaacttgctttgacaaacccagcagcgttctacgcaacaacccatcattggtggtgccctcttttagatttcttatgagttatagttcaataataaagttttttgtctgatgtttgtggcttcccagaaataataaagtccatttct

SEQ ID NO: 335541 - DNA, 336 bp, Zea mays
cagaaacacaccaagcgaagctacctagcaacgacttaacaacaatggctaccaagatattagccctccttgcgcttcttgccctttttgtgagcgcaacaaatgcgttcattattccacaatgctcacttgctcctagtgccattataccacagttcctccgaccagttacttcaatgggcttcgaacacctagctgtgcaagcctacaagctacaacaagcgcttgcggcgagcgtcttacaacaaccaattaaccaattgcaacaacaatccttggcacatttaaccattcaaaccattggaacacaacagcaacaacagtttctaccagcac

SEQ ID NO: 335542 - DNA, 376 bp, Zea mays
cggacgcgtgggctagcaacatagaaagcacaatagtgtaccaacaatggcagccaaaatattttgcttccttatgctccttggtctttctgcaagtgttgctaccgcaaccattttcccacaatgctcacaagctcctatagcttcccttcttcccccatacctctcaccagcggtgtcttcagtgtgtgaaaacccaattgttcaaccctacaggatccaacaggcaatcgcaacaggcatcttaccattatcacccttgttcctccaacaaccgtcagccctattacaagagttacctttggtccatttggtggcacaaaacatcagggcacaacaactacaacaacttgtgctagcaaaacttgctgcatac

SEQ ID NO: 335543 - DNA, 325 bp, Zea mays
cggacgcgtgcggtcacgcgtccgttcactgcgtcagggccttgaggactggaagaggctgtgctgacacacaggagaccaccttaccggtaggccacacatgccaggcgctgtgagacatgtgtcagccaccaggtctacgcatgtggagctctgtgactacaaccacgctgacctacaacagccgtcctgcatgcgatcctgaacaaggatgctgaatgccagctcccgatggtcatgtgccgccaggtcgcgtatgacctgacgctcatgtgcggtcttgagctgcactagacactgaactgcccttggaacttacctggcc

SEQ ID NO: 335544 - DNA, 158 bp, Zea mays
ctgccattcaaccaacttgctttgacaaacccagcagcattctaccaacaacccatcattggtggtgccctcttttagatttcttatgagttatagttcaataataaagttttttgtctgatgtttgtggcttcccagaaataagaaagtacatttct

SEQ ID NO: 335545 - DNA, 125 bp, Zea mays
caaaaaaaaaaaaaaaaaaaataaaaataaaaattaaaaaaaaaaaaaaaaaaaaagggaaagataaaattataaaataaaaaattaatataaaattaaatataaaaaataataattttatatat

SEQ ID NO: 335546 - DNA, 82 bp, Zea mays
  unsure (1)..(82): unsure at all n locations
aaaaaaaaaaaaaaaaaaaaataaaaattaaaaaaaaaaaaaaaaaaatagggattatttaaatataaggtaatnttatatt

SEQ ID NO: 335547 - DNA, 417 bp, Zea mays
atttattggcacaaaacatcagggcacaacaactacaacaacttgtgctagcaaagcttgctgcctactctgagcaacagcagtttcttccattcaaccaactaggttcattgaactctgcttcttatttgcaacaacaacaactaccattcagccagctacctgctgcctacccccagcaatttcttccattcaaccaactagcagcattgaactctcctgcttatttacagcagcaacaactactaccattcagccagctagctggtgtgagccctgctaccttcttgacacaaccacaggtgttgccgttctaccagcacgttgcgcctaacgctggcaccctcttacaactgcaacaattgctggcattcaaccaacttgctttgacaacccatcagtgttctaccaacaacc

SEQ ID NO: 335548 - DNA, 116 bp, Zea mays
  unsure (1)..(116): unsure at all n locations
gcgtccgtaactcatagaaatctaaaagagggcaccaccaatgttggtttatagttcaataataaagttttttgtcgggtgtttgtggcttcccagaaataataaantccatttct

SEQ ID NO: 335549 - DNA, 146 bp, Zea mays
  unsure (1)..(146): unsure at all n locations
gcaactcttactcccacacatcctctcatgccaacgtttataaccctaaaaacccacacacactcaccaaagaaccttcttaaaacggtgctagcccaaccctctcccccnaaccattcttcctcttacctcctcatccccacccc

SEQ ID NO: 335550 - DNA, 143 bp, Zea mays
  unsure (1)..(143): unsure at all n locations
gcggtgatgtactcctactacctctcctgcatcgtcngcctgctctggcccgggcggtggaagctcgccgtcacggagcttcatatcgcgcagttgctcttcagcttcgcggcctccgtggtgattcttttgcttcacttcac

SEQ ID NO: 335551 - DNA, 122 bp, Zea mays
  unsure (1)..(122): unsure at all n locations
tgactggaatgccgacaactgaaaacagactagacacagatcggagcttacttatacctgtctcacaccgcatctatacagagtcncttgtgattgtggacaaacataggacacactacaca

SEQ ID NO: 335552 - DNA, 442 bp, Zea mays
gcagtttcttccattcaaccaactggctgcattgaactctgctgcttatttgcaacaacaactaccatgggggcagctagctgctgcctacccccagcaatttcttccattcaaccaactggcagcattgaactctgctgcttatttacaacagcaacaactaccaccattcagccagctagctgatgtgagccctattgccttcttgacacagcaacagttgttgccgttctacctgcacgctgcgcctaacgctggcaccctcttacaactgcaacaattgctgccattcaaccaacttgctttgacaaacccaacagcgttctaccaacaacccatcattggtggtgccctcttttagattgcttatgagttatagttcaataatgaaagtttttggatgatgtttgtggcttccagaaataagaaaagtacattctag

SEQ ID NO: 335553 - DNA, 237 bp, Zea mays
ggacttcaattcctatccacagcatgtgtacgccaattcttttgcaataggaaactatctcactagcaaaagactctttatttaaactgttggaaccgatatccacctcgttctctcaaatctccgcccccatctcttgactttattcacaaccttaacacctaccaatcttcaccacattacatgaaacaagaactcttgcctctttgacacactaacattttctcccggtctacc

SEQ ID NO: 335554 - DNA, 367 bp, Zea mays
gcgtgagcattcagaaacacaacaggcgaatcactttagcatcatcctaacaacaatggctaccaagatattatcgctccttgcgcttcttgcgctttttgcgagcgcaacaaatgcgttcattattccacaatgctcacttgctccaagttccattattacacagttcctcccaccagttacttcaatgggcttcgaacacccagctgtgcaagcctatatgctacaacaagcaattgcggcgagcgtcttacaacaaccaatttcccagttgcaacaacaatccttggcacatctaacaatacaaaccatcgcaacgcaacagcaacaacaattcctaccagcactgagccacctatccatggtg

SEQ ID NO: 335555 - DNA, 97 bp, Zea mays
gtggccggagctgaagaggagatgctgccgggagctggcggacatcccggcgtactgccggtgcacggcgctgagcatcctcatggacgggcgcgat

SEQ ID NO: 335556 - DNA, 229 bp, Zea mays
  unsure (1)..(229): unsure at all n locations
ccaactagcaacatataaagcacaatattgtaccaacatatggcagccaaaatattttgcttccttatgctcgttggtctttctgcaagtgctgctaccgcaaccattttcccacaatgctcacaagctcctatagcttcctttcttccnccatacctctcaccagcggtgtcttcagtatgtgaaaacccaattcttcaaccctacatgatccaacatgcaatcgcag

SEQ ID NO: 335557 - DNA, 335 bp, Zea mays
aacatagaaagtggaatccagtagcaacaatagagcaacaatggcgaccaagatattttccctccttatgcgccttgctctttctgcatgtgttgctaacgcgacaattttccctcaatgctcacaagctcctatagcttcccttcttcccccataccttccatcaatgatagcttcagtatgtgaaaacccagctcttcaaccctataggctccaacaagcaatcgcagcaagcaacatacctttatcacccttgtttcaacaatcgccagccctatctttggtgcagtcattggtacaaaccatcagggcacagcagctgcagcaactcgtgc

SEQ ID NO: 335558 - DNA, 359 bp, Zea mays
attttgagcattcaaaaacacaacaaggcgaaccgcacttccaccgacctaccaccattggctaccaagatatgagccctccttgcgcttcttgccctttttgtgagcgcaacaaatgcgttcattattccacaatgctcacttgctcctagtgccattattccacagttcctcccaccagttacttcaatgggcttcgaacacctagctgtgcaagccaacatgcaacaacaagcgcttgcggcgagcgtcttacaacaaccaattgcccaattgcaacaacaatccttgccacatctaacaatacaagccatcacaacgcaacagcaacaacagttcctaccagcactgagccacct

SEQ ID NO: 335559 - DNA, 192 bp, Zea mays
  unsure (1)..(192): unsure at all n locations
ccttccataattatagcttcactatgtgaaaacccagctcttcaaccatataagcttcaacaagcagtcgcatcaagcaacataccttgatcgaccttgttgtgtcaacaatcgacagccctatctttggtgcagtcattggtacaaaccatcanggcacaacagctgcagcaactcgtgctacctgtgatc

SEQ ID NO: 335560 - DNA, 195 bp, Zea mays
  unsure (1)..(195): unsure at all n locations
gttcctgatgattatattaaggctgaccctgttctctttttacagtctactgccactgaagaaagccanagtatggctttaaatggaggagagtagcgttctataccatcttcacgcggatctccttacaagaagaataagtcgcttagagattattagctagatcgtgctaagtgtgcttggaagttctataca

SEQ ID NO: 335561 - DNA, 342 bp, Zea mays
agaggaagccgaaaccctagaccccgcatccaaagatccaccgctccaccagaggcgatcgaggactcgagagaacccaaccccgccgccgagctacatcgatccatcgatggccacggacacggagaccacgcttgcgatccgcgacgacgaacccgccgccgccgaggtagatcgatcgatggccacggacacggacacggagtcgccgacgccgacgcctgcgatccgcgacgaggaaaaacccgtcgccgccgccgccggagccggagcccatggcctaaaagaaagaagcgtcgccgtcattcttgcaggatctgctggagcctatggaccggcgcg

SEQ ID NO: 335562 - DNA, 202 bp, Zea mays
  unsure (1)..(202): unsure at all n locations
ggagaatccaaggtggtggacttctggatcgtacttatggatttgcccgaacttccggtaaaggtccttgagacatgttgngaatgaggggagtagcagcacgttcactttcactctcacataacctgtcagcgcaccatgataatagaactatgtaaagagttgttattttaatgtggccatgtatcatagtcattatttc

SEQ ID NO: 335563 - DNA, 205 bp, Zea mays
gtgttggcttctcctccccctccggttcgggttcgggttcgtgaggttctccggggttcgggttcgtgggtgagcggatcgagatggcggcgtcggatgttgagtaccgctgcttcgtcggcggcctcgcctgtgccacggacgaccactcccttcacaacgccttcagcacctacggcgatgtcctcgagtccaagatcatcct

SEQ ID NO: 335564 - DNA, 308 bp, Zea mays
gcgcaacaacagagcaacaatggcgaccaagaattttcccttttatgctcctgctcttctgcagtgtgcggggcgacaattttccctcaatgctcacaagctcctatagcttcccttcttcccccataccttccatcaatgatagcttcagtatgtgaaaacccagctcttcagccctatatgctccaacaagcaatcgcagcaagcaacatacctttatcacccttgttgtttcaacaatcgccagccctatctttggtgcagtcattggtacaaaccatcatggcacagcagctgcagcaactcgt

SEQ ID NO: 335565 - DNA, 292 bp, Zea mays
gcgcaacaagcaatcgcagcaagcaacatacctttatcacccttgtttcaacaatcgccagccctatctttggtggagtcattggtacaaaccatcagggcacagcagctgcagcaactcgtgctacctgtgatcaaccaagtagctctggcaaacctttctccctactctcagcaacaacaatttcttccattcaaccaactgtctacattgaaccgtgctgcttatttgcagcaacaactattaccattcagccagctagctactgcctactctcaagaacaacaacttc

SEQ ID NO: 335566 - DNA, 389 bp, Zea mays
cggacgcgtgggtagcaacatagaaagcacaatagtgtaccaacaatggcagccgaaatatgttgcttccttatgctccttggtctttctgcaagtgctgctaccgcaaccattttcccacaatgctcacaagctcctatagcttcctttcttcccccatacctctcaccagcggtgtcttcagtatgtgaaaacccaattcttcaaccctacaggatccaacaggcaatcgcagcaggcatcttacctttatcacccttgttcctccaacaaccgtcagccctattacagcagttacctttggtgcatttgttggcacaaaacatcaaggcacaacaactacaacaacttgtgctaggaaaccttgctgcctactctcagcaacagca

SEQ ID NO: 335567 - DNA, 186 bp, Zea mays
tccacgcactcgtcgcccgaccctttggatgaccttgaccttacccacgatgaaacttgggacgagaacaacgccgctgataaccagtgccgccgcttactacgccttttctcaaacgaaataaagtggtacaacctccttccttattgatctcaaaccatcttacaattatactgatatcaagaa

SEQ ID NO: 335568 - DNA, 353 bp, Zea mays
gcgcgcgttccttccccacggcgcggaccgcacccacgaggcgtcatcccccgaggtcgccaccgcgggcatcgacggcgcccctgatttcccgcctgccacggtcgtcatcggcgggtacgacccgctgcaggactggcagcgccggtactgcgacgcgttgcgcggtaaggggaaggaggtgcgggtgctggagtaccccgacgccatccacgccttctacgtcttcccggagttcgcggagtccaaggacctcatgctacggatcaaggagatcgtcgccagcagcgagtgatgggggacggacggcgtgggcgcgcgcaactgttgctcagatgcgtggtggatgtatc

SEQ ID NO: 335569 - DNA, 185 bp, Zea mays
ttctagaacgcgagcaacctcacttaaaggactgaggctgccccaaacaaaggtgtgactggttccaactaagagtggtcttgctgccatcaagaagagctacaacttgagactttttgattgaatagcacttctgaactctttaacccataatactatgcttgaatcaaaaaaaaaaaataaaa

SEQ ID NO: 335570 - DNA, 76 bp, Zea mays
cccacgcgtccgcccacgcgtccgctcttttagattgcttatgagttatagttcaataatgaagttttttggatga

SEQ ID NO: 335571 - DNA, 392 bp, Zea mays
ttcgctttatccttcttgtcttcctctgacttccctgaatcctcaccaacatactgcgtctggttatatttcttggtttgtctgcaagtgcttgtaccgctaccattctgcagcaatgctcacaagctttctatagcttcatttcatcccccgtacctctcaccatctagctctatccttattgttaaaaacccaaatctttaacacctataaggatccaacaatccaatcggaaattggatcttacctttatcaccctttgaccctccaaaaaattatcaaaacctattacagtaattacactttggtgcatttattggcacaaaaacattaaggctcaaacaactacaacaacttgtgctttcaaaaccttggtgctaactttaacaaca

SEQ ID NO: 335572 - DNA, 342 bp, Zea mays
  unsure (1)..(342): unsure at all n locations
gcaacatagaaagcacaatagtgtaccaacaatggcagccaaaatatggtgcctgcttatgctccttggtctttctgcaagtgctgctaccgcgaccattttcccgcaatgctcacaagctcctatagcttcccttcttcccccgtacctctcaccagcggtgtcttcggtatgtgaaaacccaattcttcaaccctataggatccaacaggcaatcgcagctggcatcttacctttatcacccttgntcctncaacaatcatcagccctattacagcagttacctttggtgcatttattggcacaaaacatcagggcacaacaactacaacaacttgtgct

SEQ ID NO: 335573 - DNA, 326 bp, Zea mays
aacttttggtcacgacgaccaagagcattggctacgctgtcacactcaagatgcggatcatgggtaataccaatcgaccatccaatctacatgcaccatcttgtcaaggctactcaaggaaacgagaacaacattgctgtcattgcttacacaactacatatcacaattggatccaaacagttacacctatgaacgtgaccgacatgctgatcatggacacatcgatggccaggatcgtcaatgctatatgcttagtgcctcacatttgaccagctcgctcttcgtgcttcacttggccagaacacgggcctcttgaggtgcccca

SEQ ID NO: 335574 - DNA, 87 bp, Zea mays
atccggggggcgagccacgcgtgctaatgacctgaatgaacaattgaaattaaaagaaaaaagtattgttccaaaaaaaaagaaaaa

SEQ ID NO: 335575 - DNA, 181 bp, Zea mays
aggcctgcggacagtggtctgctcatgctcttcttgaacgcgaaccgcataaaccggcttggggcatacaaccgttctgaaaagggagactcataaacgttcctgattgcatgctaccatacatgcgcaaaaagcaatggatcactggcggcacaacattcaatcccttccaatgcacctt

SEQ ID NO: 335576 - DNA, 318 bp, Zea mays
aacctgtgccacgcgcagaatagaggataggatgggatattacacgctgtttctcgatgtagcgggatgctcattaccctagttttgaggggtattatggtttaggggcgctcaagttggtcagatttcgagtgtatctgcccctaagcaactggtacttgttattcggttgaaacaatcagccttaggtttgtgttctacattctcatgctgtaccgtttggtagcgagttacgtcgtacgatatgcttgttccatataaaaaggcatactatatgtgccctcggggacgctgcggcgtggcctgtgcagggactta

SEQ ID NO: 335577 - DNA, 60 bp, Zea mays
accacgcgtccgatgcgactcactgaatgtttggcaagctcaattcgggacgtggggtgg

SEQ ID NO: 335578 - DNA, 341 bp, Zea mays
ctgcggccacgcttgcggtagatctatggatcacgcgcaacggaccagatcggaacgaggatgatggcatccatgctaagatccgcactccactgaagcatgaagacgtttccaacagcagaatgaatgcactatgtgcaatccaacttttgacatggtgactaatcctagctgatgatggcacctcatcatgccatattctactgttatcctgcttaaatctaaggatgtcctgaaacatcactaacttacgatatggctgatggtctgatcccaatgcacaatggactcctactttcttgatcagacgcctgagagactcctgattccataccatattc

SEQ ID NO: 335579 - DNA, 187 bp, Zea mays
ccgccctttttttttttttttttttctttttttttttttttttattttttttatttttttttggttttgtttatttttatctttaacttttttccttattaaattataatttttttcttcatcaaaacttccctgattctctattcctccccacaatgtcccattctaacacaagacatttaaactt

SEQ ID NO: 335580 - DNA, 212 bp, Zea mays
gacccacacgttcgcccacgcgtacgtccacgcctccgtttgcttctagtgccattcttccacacatcccgcctccggttactttaatgggctgccaacacccatactgtgcacagcctattggctacaacaagcacttgctgccagcgtcttataacaaccaattgcccaattacaacaacaatccttggcacatctaaccatacaaacca

SEQ ID NO: 335581 - DNA, 255 bp, Zea mays
ctgatctgacacgcggccgtctgttcctctgcgcaagctgtggaactgtacatgggattgttcttgtatttatacatgctacatgagaattcttgtgcataccaaaggattattcgtatgctaggctgacaaaagattctaacgtgttagtaggtcccgaaggtattgggatctgatgtgtcaacagggcataaccactgtctacgaaacttggtcttgctacggtttaacatctgacctactactctatcatgc

SEQ ID NO: 335582 - DNA, 261 bp, Zea mays
agtcacaagcctcatttcaaccctgcatgaccaattagtttcgcttcactccggcagtccatgcatatccatccatcagaattctcattctccacagcaacaaggcgcacgaccagcaccatcagcccgcaacaaaagacacaacaacgatggccttcctgcccgtgttccttcaagtcgggaccccgaacaacccctgcccgttcaaagtggtccggccgacgcttgggttccgcgccttcatggttgccggtgtcatct

SEQ ID NO: 335583 - DNA, 417 bp, Zea mays
ctgccgccgccaccatgccactaccctactcaaccgccccggcctcagcctcatgcccagcgacacccatgcccgtgccaacagccgcatccaagcccgtgccagctgcagggaacctgcggcgttggcagcaccccgatcctgggccagtgcgtcgagtttctgaggcatcagtgcagcccgacggcgacgccctactgctcgcctcagtgccagtcgttgcggcagcagtgttgccagcagctcaggcaggtggagccgcagcaccggtaccaggcgatcttcggcttggtcctccagtccatcctgcagcagcagccgcaaagcggccaggtcgcggggctgttggcggcgcagatagcgcagcaactgacggcgatgtgcggcctgcagcagccgactccatgcccctacgct

SEQ ID NO: 335584 - DNA, 346 bp, Zea mays
cgaccgctataagctatggtgcttattcacagcacttaacaacgtactatgatatcagagcactagttaggggtcgagcgcttgctaccgttgttgaaccagccacaagctatagcggtctaccaggacacttgcactgacgactgcaacgttttactactgacatactaggtggaatctaaccaactcgctttgagccatcacgcagcggtctaccaacactgcatcattggtggttgccatcccgatatttcggaacagctgtatgccaataagaaagtgagtggtgtgaggttggtagatctccaataatcagacatgacatttacatgcttactatgtagat

SEQ ID NO: 335585 - DNA, 56 bp, Zea mays
cccacgcgtccgcggacgcgtgggaaaaaaaaaaaaaaaaaaaaaaagagaaaagg

SEQ ID NO: 335586 - DNA, 155 bp, Zea mays
cctgtacatgcactacccgccattccccttcgctagacggtactaccagcctcccgcctaatcctcgtcttcagggttcccgtactcctaccaacctggctacccttcgtcgttctacactccgtcgcaccatcacctgcaccatcatcagacca

SEQ ID NO: 335587 - DNA, 175 bp, Zea mays
cttaccttcactccagcagactatgaagagcccatctttgccccttacactctcacttttcaatttattttacccacgaaaccaaagacttcgtaaatcttcatcaatcttcacccacttaaacttacatatactgtttaaacatttaattatacattctgcccatttattttac

SEQ ID NO: 335588 - DNA, 80 bp, Zea mays
tcgacccacgcctacgccacacttccgcagactcgtcggatacaacattcataaagaatccagggctaaaaggtcctcct

SEQ ID NO: 335589 - DNA, 309 bp, Zea mays
gatcagcaaagcggcagtgcgtagagaggatcgtcgaacagaacagcatgaagatggtcatcgttctcgtcgtgtgcctggctctgtcagctgccagcgcctctgcaatgcagatgccctgcccctgcgcggggctgcaaggcttgtacggcgctggcgccggcctgacgacgatgatgggcgccggcgggctgtacccctacgcggagtacctgaggcagccgcagtgcagcccgctggcggcggcgccctactacgccgggtgtgggcagccgagcgccatgtttcaggcggtcccgcaacaatgct

SEQ ID NO: 335590 - DNA, 386 bp, Zea mays
cggacgcgtggggcaacaggcatcttaccattatcacccttgttcctgcaacagcgcgtcaggcctattacagcagttacctttggtccatttggtggcacaaaacatcagggcacaacaactacaacaacttgtgctagcaaaccttgctgcatactctcagcaacatcagtatcttccattcaaccaactggctgcattgaactctgctgcttatttgcaacaacaattaccattcagccagctagatgctgcctacccccagcaatgtcttgcattcaaccaactagcagcattgaactctgctgcttatttacagcatcaacaactactaccattcaaacagctagctgatgtgagccctgctggcttcttgacacaacaac

SEQ ID NO: 335591 - DNA, 427 bp, Zea mays
cggacgcgtggggcaacaggcatcttaccattatcacccttgttcctccaacaggcgtcaggcctattacagcagttacctttggtccatttggtggcacaaaacattagggcacaacaactacaacaacttgtgctagcaaaccttgctgcatactctcagcaacatcagtttcttccattcaaccaactggctgcattgaactctgctgcttatttgcaacaacaattaccattcagccagctagttgctgcctacccccagcaatttcttccattcaaccaactagcagcattgaactctgctgcttatttacagcagcaacaactactaccattcagccagctagctgatgtgagccctgctgccttcttgacacaacaacagttgttgccgttctacctgcacgctatgcctaacgctggca

SEQ ID NO: 335592 - DNA, 230 bp, Zea mays
acgctcactctttctcaaagaagtattgtatgagatggctgttgggggtaaatacaactttctggggggccttacccataggagccacatgttgcacgattcattaacttctgatgttgcctatccgtagactgaagataccgtacatgcattttaaaacttcttctccaaccgtgtaatctgaaaaatggtcatcgactgcccaacttttgcagtcactctcttgagaa

SEQ ID NO: 335593 - DNA, 179 bp, Zea mays
cacctacacctcgatcacgaattcctgatccaccctgtcgcttcggggggcgggtgccaccgcccaaaggcctccgcctgaatataactagccccataagatctcaccttaaaagccttgcaactcgatcacaaccttcctggaactgaaggcgacgctgatcatcacgatacacccct

SEQ ID NO: 335594 - DNA, 383 bp, Zea mays
ccggaagcagccatcaggacgcgcgccttgtcatccaagaccaactcaacggcggcagcaggagcaacaccgagcatggtaacgggatggcgtccatcggaagccacttcggcggaggcttcgtcccttccctgcacaactcatctccgtcggccgggctctcagcgacggcgctcctgatgaaggcggctcagatgggctcgacgacgtcgagcaccacccacaaccccaacggccccagcgcgctgctccgcgcagccggcttcgcaggcactgccagcgtccgggagactagtagcagggcagcggaagaagagaagtctcacgaggcatatttccatgatctcatcatgaactcactgccattaacgggaagaggcacc

SEQ ID NO: 335595 - DNA, 388 bp, Zea mays
gccgaatatgatgccatcgatgatggtgccgactatgatgtcaccaataacgatagctatgggtgatgccaccgatgatgatgccaaacatggtttcaccaatgatgatgccgagtatgatgccttcgacgatgacgccgagtatgatgccaccgattatgatgccaagtatgataccaccgatgatgatgccgagcatggtgtcatcaatgataatgcctaacatgatgacagtgccacaatgctactctgattccatcttgcacattatacaacaacaactattaccattcatgttcatgcccacagtcgtggcgatctcacccatgtttttacagcagccctttgatggtgctgcattctagatataagcatttgtgttgtaccc

SEQ ID NO: 335596 - DNA, 304 bp, Zea mays
acgcccacgcgtccacaggaaccaacaagtcgaacaacgtccaagcttttgtgttatgaggctctctcacgcatggcgacaagcaaagcgtcctccaccatggcttccacgacgactacggcattcaacaacctgactgacgtgcggctcgccgagctttagtcagcgctgtatgggacaaggcaggccatatccgctggacgaactcacggactaggcgaggacgacaacgcgccgctgccctgctagcagcagccgaggccgtaggcactggacgactggagcagcatcgtcaacaaggcgt

SEQ ID NO: 335597 - DNA, 376 bp, Zea mays
caacaatagagcaacaatggagaccaagatattttccctccttatgctccttgctctttctacatgtgttgctaacgcgacaattttccctcaatgctcacaagctcctatagcttccctttttcccccataccttccatcaattatagcttcagtatgtgaaaacccagctcttcaaccatataggcttcaacaagcaatcgcagcaagcaacatacctttatcgcccttgttgtgtcaacaatcgccagccctatctttggtgcagtcattggtacaaaccatcagggcacaacagctgcagcaactcgtgctacctgtgatcaaccaagtagctctggcaaacctttcttcctactcttcgcaacaaacattt

SEQ ID NO: 335598 - DNA, 104 bp, Zea mays
gcgaaaagagggcaccaccaatgatgggtaatgagtatatagttcaataataaagatgaggtgatgatgattgtggcttcccagaaataagaaagtacatttct

SEQ ID NO: 335599 - DNA, 125 bp, Zea mays
tcaaattgtaatatttttgaatcaaattctcttgtaatcactccgatgatatattgtaatatggttataacttataaatgttgtaacttgtaatcattttgtaataaagaatttatttccgctgc

SEQ ID NO: 335600 - DNA, 242 bp, Zea mays
  unsure (1)..(242): unsure at all n locations
cccacgcgnccgnggnnanggcaaccgngaagaagggaaagccngagcnaagagggaaggggangccagcagaganggggaggcagcgcaagccanggcgccgaaagganggngncnacangnacnangaagacaaagcaggagngaaggagaacccaaagggagagaagaaaggggcngccancacngggcccaacggaaaggagngagcagancacaggcccaagagggcaagcgcggca

SEQ ID NO: 335601 - DNA, 129 bp, Zea mays
tcttacacccacgcgttctcccactcatcctttacgtttccacattgagccattctcatcttcaacttgtcaaactcaatatcccccttaaccttcaagctataataatactcatcattcctctaataa

SEQ ID NO: 335602 - DNA, 363 bp, Zea mays
cttccctgctgtgagcgcttcaactacttggtgcccctcataaggggcaaggcgagcctctgcatcaatagccatccatagcaatgggcagcagcacaggagatggagcccccagctaggggctggtagctggctagccagtgggcccttatggctgatgcccttgcctttactgaccacctcattctggtcaggaagtttggccaacggacacctgtccggctcttctcaaggaatggagagggcgacgcaagaattcagttccgcaatataattgaattgctagcacaattggagtacatgcggtaactgaactcgtgacctgggattctcagtacaaatggcatgaattaatgatggatc

SEQ ID NO: 335603 - DNA, 402 bp, Zea mays
  unsure (1)..(402): unsure at all n locations
cccacgcgtccgcccacgcgnccgggagggngggctgctcctccccctccggggcgggttcgggttcgtgaggttctccggggttcgggttcgtgggtgagcggatcgagatggcggcgtcggatgttgagtaccgctgcttcgtcggcggcctcgcctgggccacggacgaccactccctccacaacgccttcagcacctacggcgaggtcctcgagtccaagatcatcctcgatcgggagacgcagaggtcccgcggcttcggcttcgtcaccttctccacggaggaagcgatgcggaacgccatcgagggcatgaacggcaaggagctggacgggcgcaacatcaaccgcaacgaggccccaatcccgcggcggacgtggaggcggcggcggtgggtac

SEQ ID NO: 335604 - DNA, 338 bp, Zea mays
cagaaacacaccaagcgaagcgcactagcaacgacctaacaacaatggctaccaagatattaggcctccttgcgcttcttgccctttttgtgagcgcaacaaatgcgttcattattccacaatgctcacttgctcctagtgccattattccacagttcctaccaccagttacttcaatgggctttgaacacctatctgtgcaagccaacatgcaacaacaagctcttgctgcgagcgtcttacaacaaccaattgaccaattgcaacaacaatccttgccacatctaacaatacaagccatcacaacgcaacagcatcaacagttgctaccatcactg

SEQ ID NO: 335605 - DNA, 374 bp, Zea mays
cggacgcgtgggctcgcaagctcctatagcttcccttcttcccccgtacctctcaccagcggtgtcttcggtatgtgaaaacccaattcttcaaccctacaggatccaacaggcaatcacagctggcatcttacctttatcacccttgttcctccaacaatcatcagccctattacatcagttacctttggtgcatttattggcacaaaacatcagggcacaacaactacaacaacttgtgctagcaaaccttgctgcctactctcagcaacagcagtttcttccattcaaccaactagctgcattgaactctgcttcttatttgcaacaacaacaactaccattcagccagctacctgctgcctacccccagc

SEQ ID NO: 335606 - DNA, 246 bp, Zea mays
  unsure (1)..(246): unsure at all n locations
cgagcgcagccgataccatcgggcacccacggcgaagggcagcagcggccaaggaggacnccggacgcgaaacacganacgncaagcacccacaggagccaacgcacgcacaccaagggggcacaccaaagaggacagcagngccaggaacangacgaagaccaagaccagggcaaaccgcagcagcccngacagccgcaaagacgacgggccaagcaacaccgacaccgggcgcaaggagaacga

SEQ ID NO: 335607 - DNA, 62 bp, Zea mays
ggcacgcgacgccacaggggggccatagagccacccaaaagcaagacaccggccggcggggc

SEQ ID NO: 335608 - DNA, 65 bp, Zea mays
cggatatgttcttgtgataaaaaaaaaaaaatacaaaaaaaaaaaaaaaaaaaaaaagacaaggg

SEQ ID NO: 335609 - DNA, 63 bp, Zea mays
  unsure (1)..(63): unsure at all n locations
gcgatcgcatacagtgatgcaatacctaaatctgntcgtcaaagagatgcaaaggtttttaac

SEQ ID NO: 335610 - DNA, 326 bp, Zea mays
gttggcttctcctccccctccggttcgggttcgggttcgtgaggttctccggggttcgggttcgtgggtgagcggatcgagatggcggcgtcggatgttgagtaccgctgcttcgtcggcggcctcgcctgggccacggacgaccactccctccacaacgccttcagcacctacggcgaggtcctcgagtccaagatcatcctcgatcgggagacgcagaggtcccgcggcttcggcttcgtcaccttctccacggaagaagcgatgcggaacgccatcgagggcatgaacggcaaggagctggacggccgcaacatcaccgtcaa

SEQ ID NO: 335611 - DNA, 242 bp, Zea mays
  unsure (1)..(242): unsure at all n locations
ggcgcccacgcgnacganncaccacgaggcgncaagggcaacggcaagggccaaagcggccgnggaagcagcaggngggacaggaaggcgggggcacgacaacaaacagggacnccaggcacgccagaaaccggagcggacagagaagaaaggccgccggccaccaaaagcagcaaggccaacacgccaagcagcgagacaagggcgagagcaacggccgacagcccgcgccgacaaagcca

SEQ ID NO: 335612 - DNA, 399 bp, Zea mays
ctggcttctcctccccctcttaccaagtcctcctcgggttagggttccttagggttgggtggaggggcgatggcggcggctgatgtggagtaccgttgcttcgtcggcgggcttgcctgggccaccagcaacgagtcgctggagaatgccttcgcctcctacggcgagatcctcgactccaaggtcatcaccgaccgggagacggggaggtcccgcggcttcggcttcgttaccttctcctccgagaactccatgctcgacgctatcgagaacatgaacggcaaggagctcgactgccgtaacatcaccgttaaccaggcccagtcccgtggcggtggcggtggcggcggtggctacggcggctgtcgctgcggcagcggcggttatggtggcgggcgc

SEQ ID NO: 335613 - DNA, 162 bp, Zea mays
  unsure (1)..(162): unsure at all n locations
nacgaaaaaaaaaaaaaaaaaaaaaaaaaaaaaaaaaaaaaaaaaaaaaaaaaaaaaaagggaaaagggaaaaaaaagaaaaaaagaaaaaaaaaaaaaaaaaaaaaaaaaaaaagaaaaaaaaaaaaaaaggggggggcaggaaaaaaggaaaaaaggaaa

SEQ ID NO: 335614 - DNA, 312 bp, Zea mays
gtcaatacaccgttcaacagtcttgaactggtccttgctcgagcttcacagcacagtagcctcaacaggttcacttcactcacgttcgaacaccgcacccttgaacctactaaccaacttctcccggagcagctgcctgtccaatgaggacgcggagaggaggccactgttctacgttgctcgcctgatgaggtacgggacgatctgctgcaccggacactacggcaggtacttgatgacctgaaacacggcgttgctgacgtccagcgactgtccgtgcgtcatgccaatcaggtgcgccaactgcacgat

SEQ ID NO: 335615 - DNA, 249 bp, Zea mays
tgatgctgagcacggacaatgcggcgtggatctcggtgacaacctttctggtgctggtggtgccgctgatcatctatgatgacctggagcagcagcttaacagacctctagctggggcagcagacgcttctgggcgtggcccctacgacgtcgtcgctgaccatatagatatatccgtgcatcgaaccttttatgccccctaattgtctgtagaggtatttgctgctgtcaaggtcatcattcgagtta

SEQ ID NO: 335616 - DNA, 305 bp, Zea mays
caaaggtaactgctgcaatagggctgatgattgttggaggaacaagggcacaacaactacaacaacttgtgctagcaaaccttgctgcctactctcagcaacaacagtttcttccattcaaccaactagctgcattgaactctgcttcttatttgcaacaacaacaactaccattcagccagctatctgctgcctacccccagcaatatcttgcattcaaccaactgacagcttagaactctcctgcttatttacagcagcaacaactactaccattcagccagctagctggtgtgagccctgct

SEQ ID NO: 335617 - DNA, 88 bp, Zea mays
caagaggcagcacacagccgcaaggagcaggacaacaccgcacagcggacaaagggaagcgcaaccaggggcagcaagaccaagaccc

SEQ ID NO: 335618 - DNA, 383 bp, Zea mays
attcctgggtcggccgactcgtacgcggacgcgtgggcggacgcgtgggcggacgcttgggttgtcttctcctcccccaccggttccgattcagggtctggttcgggggcgagagggaagagatggcggcgtcggacgttgagtaccgttgcttcgttggcggcctcgcctgggccaccgacgaccactccctcaacaacgccttcagcacctacggcgaggtcctcgagtcgaagatcatcctggatcgggagacgcataggtcccgcggcttcggcttcgtcaccttctccacggaggacgcgatgcgcagcgccatcgagggcatgaacggcaaggagctcgacggccgcaacatcaccgttaacgaggcccagtcccgc

SEQ ID NO: 335619 - DNA, 313 bp, Zea mays
  unsure (1)..(313): unsure at all n locations
tcgacccacgcctgcggagaggagcnnnggganggaacatgggcatgctctaagcacatatctcagagcttaaatgggaaacattggcaaatctatcaacacaatacaatctaacaaattcacctaatagggatcacaatgtatgcaagtacatacaatccacttattcatgtcatatcatcattttcgtgaattgatataataacacataagattataatgtcaacctttttttgtataagacaagctgtaatgatttatttacttagatcccttaaccatgcctggttattccttgtattttttcatacac

SEQ ID NO: 335620 - DNA, 427 bp, Zea mays
ggcagaggttgggtctacgactacttccgcagttttctcctaaacacatttgctctgatgtggtttgtcaccataactggcgctgaaccgcgctggtggcaaggctggaaacaagggtgctgaagctgctcttacttccattgagatggcctctctgttccggcatcacttaggctgacactttgcatattctggtttctatacacgagccgctgctccagcacaactgtcacggcgtgtgctagggcagtggggctgtcgccaaggacatgcagcttgtgaagcagtgctggagccgtccccatcgccgagcagctcgtgagggtaattcaagcacgctaatgcagtctggtcctacaatagcgatccttggtcttcacctacatcttcacctaccgaacatcaggagaagttttattcccttatc

SEQ ID NO: 335621 - DNA, 347 bp, Zea mays
  unsure (1)..(347): unsure at all n locations
gggttggcttctcctccccctccggttcgggttcgggttcgtgaggttctccggcgttcggcgtcgtgggggagcggatcgagatggcggcgtccgatgttgagtaccgctgcttcgtcggcggcctcgcctgggccacggacgaccactccctccacaacgccttcagcacctacggcgaggtcctcgagtccaagatcatcctcgatcgggagacgcagaggtcccgcggcttcggcttcgtcaccttctccacggaggaggcgatgcggaacgccatcgagggcatgaacggcaaggagctggacggncgcaacatcaccgtcaacgaggcccagtcccgcggc

SEQ ID NO: 335622 - DNA, 388 bp, Zea mays
tccgctcctcgattcacgcgtcgaccgatacttacggagaggatcattaccatggcacattgccatgctatccgcacataactcagaggtagcaggggaaacattgccatagctatcaacacactacaagcttacacattcaccgaacagagagcacaaaggatgcaaatcttagccacccactgattcagggcagatcagcactatcgccaatccagattatagcctagcacattagaacggcaacctttttttgcataagacaagctgtaatggctaattcacttaaatcccctaaccatccctctttattcatcatattcacttagacaaccctggcattacacatcccaagcttttacactccacgttgtctgtcctgataaat

SEQ ID NO: 335623 - DNA, 397 bp, Zea mays
cgaacgctaaccctagcttctgttagccactctaccgtctgggcccactgataccgaagagagccttatcagcacaacgccgctcaccctcagaccactccataactgcctccacggaccgcagtccactgactccgtcagacctacttcgctgcctgctacctactacggctgactggccataccttctgcgacactcttcattagctctatctaccgcgcgcacccgtctgtacctgccagccgcgcgcctgccgctagtgccccgccgccaccccacgcgcgccccgccgtccccgcgcgctggctcgagtactccgctgtctgctcccattccactctggcccagctgcgtgctgctcttgcatcggccggcggataaacccagcatgcaaac

SEQ ID NO: 335624 - DNA, 281 bp, Zea mays
atgccatctcatacgaatcattgattatcaataaaacaagctaataatgactaaacgatcattgtaaaaaataaaaagaaaaaacaaaaaaaaaaaaaaaaaaaaaaaaaaaaataataaaaaaaaaaaaaaaaaaaaaaaaaaaaaaaaaaaaaaaaaaaaaaaataaaaaaaaaaaaaaaaaaaaaaaaaaaaaaaaaaaaaaaaaaaaaaacacacaaaaaaaaaaaaaaaaaaacaaaattaatacaacaatatacaaaaaacaaatcacccttaat

SEQ ID NO: 335625 - DNA, 291 bp, Zea mays
  unsure (1)..(291): unsure at all n locations
actctttgtttttttttttcagttcataattgattcttcaaattaaccataccacgccataacatgtnacatttattaaactactagtacacttttcaaaattcaactagttcaatactaaaatataaacttaattcaatctaatcttcttcctctccctctttctcaacaatatttaattatctgatctcataaacatttctatcctttttgtcatcaaccactcgtatccaatcccccactttgtgcttcttcaagtacttcttgttcaaatacttcaagtacctcttt

SEQ ID NO: 335626 - DNA, 377 bp, Zea mays
gtcggcatgccatcgcatacgactcattgtttatgaataaaacaagctaataatgacttttgtctcattataaaaaaaaaaaagaaaaaaaaaaaaaaaaaaaaaaaaaaaaaaaaaaaaaaaaaaaaaaaaaaaaaaaaaaaaaaaaaaaaaaaaaaaaaaaaaaaaaaaaaaaaaaaaaaaaaaaaaaaaaaaaaaaaaaaaaaaaaaaaaaaaaaaaaaaaaaaaaaaaaaaaaaaaaaaaaaaaaaaaaaaaataaaaaaaaaaaaaaaaaaggccccccttcattaacggcaaaaacaacaaaagagctctaaacccacaacatcatcctttaaggagacccaaaaatacaacaaacgaagaggcttttaaa

SEQ ID NO: 335627 - DNA, 370 bp, Zea mays
ctgagcctgctgctcgcttttcgattttccctgactgacatatactttggacaattggaattatgggtaatgcctaatggctacgaactggttcttaatcctgaaacccgtactgctttttttcttgccaactttctcatcgtcttcttgtggctgttaatcttcatccaccttattcatgtatgtcttcacatgatacaattcataatctaattatatatatataaatagtactattacctttttgtttgtatatactatttatctttaactgatgtaacataatgtgtatacatctaaaatttatcttaaaataaatttaatataatgcttcccctcttaattatccaatcttacctactctttcctt

SEQ ID NO: 335628 - DNA, 276 bp, Zea mays
aattcccggtcgccgactctacggctttactactgccagtaatcctgttattataatactctcctactgtaggggaatttatggtttctttcaatattctgaatggactgaatctgctgtatgttttcagaaagtcagatttgctaaacccaaaccttgatatgggatttcaactagggagcttcacatgcaattatcgttataaacactactatattcaatttgtatacacttccatatattctccttacatctattcttgtcattttatttttc

SEQ ID NO: 335629 - DNA, 422 bp, Zea mays
gacccacgcggacgcggaggcgtgtgcgcgtacctttttggctgtttgtgcgtgtcgagcatggagcgactcttgtaaactttcaggcggtgtcgtggaaggtcctgagcgacgacgacacgccgcactgcctcgccttcatgttcgtcaactggtccttcgtgtgagtgaggaccttccccctagcagagccagccagtcgcgctcgcccgcccgcctagcatttgcagctgttatttgttgaactctgtatccaagtactggtcgctcttgcctttgtccaggcaatcctgtgaaacgcacctgccccccagttcatccgtggaacaaacgccttttgtagttgcttgcttgctatgttatgatggatcctggtctgcttcatctccttaaaaattgtcttgtaacataaaatattttta

SEQ ID NO: 335630 - DNA, 76 bp, Zea mays
aattccttggtcgaccgactcgtacggtttgttgttgatagctggaataaatatacctgtttatttgcatggatct

SEQ ID NO: 335631 - DNA, 67 bp, Zea mays
cccacgcgtccggtcgccgtgaaacttttaatcaaatcagttcactcttttgcgaggcaaggagaat

SEQ ID NO: 335632 - DNA, 192 bp, Zea mays
cccacgcgttcgcccacgcgttcgctcaagggattattccgctctgctcttatggtctctgtgttctatttaatgattgttattaccatgtagcagtaaccatcgtcatcagtgataaccttgttgcttctgtctaaaaaaaaaaaaaaaaaaaaaaaaaaaaaaaaaaaaaaaaaaaaaaaaaaaaaaaga

SEQ ID NO: 335633 - DNA, 361 bp, Zea mays
gacccactcttacgtccacgcgttctcccactcatcctctcaatttatcattccactcttctcttatcgtctctcggttctatttaaaaagtggtattaccatataacaaaaacacaataatcaacaaaaaataaacctaattactacaataataaaaaaaaaaaaaaaaaaaaaaaaaaaaaaaaaaaaaaaaaaccccccctttaaaaaaacccactttataaaacattcaaacttacctacatattccttccaaattaaacccaaatttaaattaccccccaatttaattaaaattcccaactttttaaaacctcttaacttccaaaactcattcttttcccaacaaaatcccctttc

SEQ ID NO: 335634 - DNA, 385 bp, Zea mays
tgccgcctccgttctatctgccgccgcagcagcagccgcagccatggcaataccccactcaagcaccgcagctaagcccgtgccagcagttcggatcctgcggcgtcggcagcgtcggcagcccgttcctgggccagtgcgtcgagttcctgaggcaccagtgcagcccggcggcgacgccctacggctcgccacagtgccaggcgctgcagcagcagtgctgccaccagatcaggcaggtggagccgctgcaccggtaccaggcgacatacggtgtggtcctgcagtccttcctgcagcagcagccgcagggcgagctcgcggcgctgatggcggcccaggtagcgcagcagctgacggcgatgtgcgggctgcagctgcagca

SEQ ID NO: 335635 - DNA, 59 bp, Zea mays
atcctaggccgcgtacgaacaacaactgcaacagaaactgccaacgcttaaacaactag

SEQ ID NO: 335636 - DNA, 249 bp, Zea mays
attcccggtcgacccacctcataagaccaactatgaagtctatacacactaaaggcaattaatcgaagaaatatccgagcaagatctcattttgatcttctcatacttaaaaagacaaatcaatatattaactctatatgggataagtcaatcttactctcattaaagatacgccaaactaccctttctcaagtttgccatacaaaagtaaggactgatgaaaccaaacttgacttagatatctacctt

SEQ ID NO: 335637 - DNA, 476 bp, Zea mays
  unsure (1)..(476): unsure at all n locations
cccacgcgtccgattttgagcattcagaaacacaccaagcgaagcgcactagcaacgacctaacaacaatggctaccaagatattagccctccttgcgcttcttgccctttttgtgagcgcaacaaatgcgttcattattccacaatgctcacttgctcctagtgccattattccacagttcctcccaccagttacttcaatgggcttcgaacacctagctgtgcaagccaacatgcaacaacaagcgcttgcggcgagcgtcttacaacaaccaattgcccaattgcaacaacaatccttgccacatctaacaatacaagccatcacaacgcaacagcaacaacagttcctaccagcactgagccacctagccatggtgaaccctgccgnctacttgcaagagcagctgcttgcatccaacccacttgctctggcgaacgtagttgcaaaccagcaacaacaacagctacaacag

SEQ ID NO: 335638 - DNA, 416 bp, Zea mays
ctccagagcgcagaagaacccgatcgacaccatgagggtgttgctcgttgccctcgctctcctggctctcgctgcgagcgccacctccacgcatacaagcggcagctgcggctgccagccaccgtcgccggttcatctaccgccgccggtgcatctgccacctccggttcacctgccacctcctgtgcatctcccaccgccggtccacctgccgccgccggtccacctgccaccgtcggtccatgtgccgccgccggttcatctgccgccgccaccatgccactaccctactcaaccgtcccggcctcagcctcatccccagccacacccatgcccgtgccaacagccgcatccaagcccgtgccagctgcagggaacctgcggcgttggcagcaccccgatcctgggccagtgcg

SEQ ID NO: 335639 - DNA, 327 bp, Zea mays
gaacggcaaggagctggacggccgcaacatcaccgtcaacgaggcccagtcccgcggcggccgtggaggcggcggcggtgggtacggtggtggccgtggaggcggcggctactgcggtggcgggcgccgtgatggcggcggcggctactgcggtggcggcggctacggtggcggcggcggctactgtggtggtggcggcggctactgcggtggcaaccgtggcggcggctacggcaactccgacgggaactggaggaactgagcggtggggcccgcgcggtcaagttatcctgttcgctgccgtgatgtttaccctagtccagaggg

SEQ ID NO: 335640 - DNA, 202 bp, Zea mays
ctagcaacatagaaagcacaataatgtacctacaatagctgccaaaatatttgggttcctgatactacttgatctttctgcagagatatctaccacaaccattttcccacaatgctcacaagctcctatatcttcccttcttccccacatacctatcaccatcggtatctctcaatgtgtgaaaacccaattgttcaaccct

SEQ ID NO: 335641 - DNA, 453 bp, Zea mays
attgagaccaactagcaacatagaaagcacaatagtgtaccaacaatggcagccaaaatatggggcctccttatgctccttggtctttctgcaagtgctgctaccgcgaccattttcccgcaatgctcacaagctcctatagcttcccttcttcccccgtacctctcaccagcggtgtcttcggtatgtgaaaacccaattcttcaaccctataggatccaacaggcaatcgcagctggcatcttacctttatcacccttgttcctccaacaatcatcagccctattacagcagttacctttggtgcatttattggcacaaaacatcagggcacaacaactacaacaacttgtgctagcaaaccttgctgcctactctcagcaacagcagtttcttccattcaaccaactagctgcattgaactctgctgcttatttgcaacaacaactacca

SEQ ID NO: 335642 - DNA, 455 bp, Zea mays
agaccaactagcaacatagaaagcacaatagtgtaccaacaatggcagccaaaatatttggcctccttatgctccttggtctttctgcaagtgctgctacggcgaccattttcccgcaatgctcgcaagctcctatagcttcccttcttcccccgtacctctcaccagcggtgtcttcggtatgtgaaaacccaattcttcaaccctacaggatccaacaggcaatcacagctggcatcttacctttatcacccttgttcctccaacaatcatcagccctattacatcagttacctttggtgcatttattggcacaaaacatcagggcacaacaactacaacaacttgtgctagcaaaccttgctgcctactctcagcaacagcagtttctgtcattcaaccaactagctgcattgaactctgcttcttatttgcaacaacaacaactaccattc

SEQ ID NO: 335643 - DNA, 394 bp, Zea mays
  unsure (1)..(394): unsure at all n locations
cggacgcgtggggtaaagttaatgcaggaaggacggatgcgtggtcaagcctttgtcacattgcccacggttgaacttgctcagcgtgccctgaatctagcgcatggctatgtgttcaaaggaaaaccaatgatcatacaattcggaagaaatcctgctgctaacaaagcttcctaaagcaggatacaattttctttccagattttgatagatttcagaagttggtaggaactggaaagtgacaaaccagaggttgtgggtatctgttggctgttgttactgcaacctgtttggcatacacactangctgattggttcctcccatggtgtaatgtttgtcgaaaaataacattgtacattccagtttgtggattattaaaagaatttactcgat

SEQ ID NO: 335644 - DNA, 467 bp, Zea mays
gagattgcttccttgtctcctggatgcatcaactcaaaatggagtccactttgacctggccgtatttgtgccgaaccaatcacaacacacgaagcttggttctaacacttcagcaccagcggagcctgagcaaatcgatttgtcatggcagctgtcacttcaaacagtgtgggagaagttacttcaggataaaggtataaatactacaaaatccagtgatactagtaaagtttttgattcgcttccaatcgcaatcgagtggctaaggagaaatgcccgagaaaaccaatctacttctttccagagcagagaggcctcttctgccacggccgacgggttccggaatccgacgccgaggggacgtcgtctttcaggcagcacggccggcagaaacttgggtggaggcgagtcgtgcaggtgcaggatctgtccgaggctaagagaagggtgccgcatgggtcaaaccc

SEQ ID NO: 335645 - DNA, 386 bp, Zea mays
aaaaaaaaaaaaaaaaaaaaaaaaaaaaaaaataaaaaaaaaaaaaaaaaaaaaaaaaaaaagagaaaaaaaaaaaaagagaaaaaaaaaataaaaaaaaaaaaaaaaaaaaaaaaaaaaaaaaaaaaaaaaaagggcggactttttaaaggacccaaacttacaccccctaccattgcaacttaaaagtttttttatagggccacctaatttaaattaactggccatattttaaaaaactgtgaaactggaaaaaccctgggtttcccaaattaaattgccttgtacaaaatccccttttactcagttgggctaataacaaaaagccccgaacaaatggcctttaaaaaaaattgccaaccctaaaaggcaaatgaaacccccct

SEQ ID NO: 335646 - DNA, 86 bp, Zea mays
aatcctatattacatataccatcacatatcactcattatcaacaatatatcatgtttcctctcaaataataaaacaaaatatgtca

SEQ ID NO: 335647 - DNA, 197 bp, Zea mays
aaaaaaaaactttattattgaactataactcataagcaatctaaaagagggcaccctcttagaactgcaacaattgctgccattcaaccaacttgctttgacaaacccagcagcgttctaccaacaacccatcattggtggtgccctcttttagattgcttatgagttatagttcaataataaagttttcttgatga

SEQ ID NO: 335648 - DNA, 213 bp, Zea mays
cccgcgcgttcggaccaacaagcaacatataaagtggaatccagtatcaacaagagatcggcaatgtctaccaagatattgtgcctccttatgctccttgctctttctacatgtgatgctaacgcgacaattttccctcaatgctcacaatctcctatagcttcccttcttcccccataccttccatcaattatagcttcaatatgtgaaaac

SEQ ID NO: 335649 - DNA, 416 bp, Zea mays
cccacgcgtccgcccacgcgtccgcggacgcttgggctgactcgtggtagacctactcattgcaagaccagtactaccctgccgtccacctcaacggcgccggcgccggcgccctcttccacgacaaggaccggaagcacctcccattcctgaccaaccacaacaatggatgccagccattcaccgtcaccacgacggcttcctcagagagcagcagcaagcacagcaacggcaactgtgctctctctcttctgtcagacaacccgacaccagcacaggcacagacggccacgatccctaccgcgcagcccctcgtcgccacggcatcgcagtacggcaggctccctggcggcgacgacgacgacgtctcccttgccgggatgtcgtacatgacggtgggagacagccggcaggct

SEQ ID NO: 335650 - DNA, 101 bp, Zea mays
  unsure (1)..(101): unsure at all n locations
ccgggccgacccacgcgaaccggaacaannngaaangaaaagaaatataggttttttccaaaaagaaaaaagagaaaaaggaaaaaggtgaaaaagggcta

SEQ ID NO: 335651 - DNA, 98 bp, Zea mays
tctaacacaacaattttccctcaaggctcacaatctcctatagcttcccttcatcccccataccttccatcaatgatagcttcattatttgaaaaccc

SEQ ID NO: 335652 - DNA, 224 bp, Zea mays
cggcgggactaatcccacttatagcgtgctgaccgttgccaaagactgctgtggtaatgcggactcacatgtgttaatggaacatgtgaagcaagccttgaatatgctcatggattgatgatctgatggtgatgcaaggaagacgaaagctaatgaactgtaggccaaatcaaatactgctctggagcattgatgatcgtcatatattaacctgtataagctga

SEQ ID NO: 335653 - DNA, 328 bp, Zea mays
cggacgcgtgttcaactagcaacatagaaagcacaatagtggaccagcaatggcagccaaaagattttgcttccttatgctccttggtctttctgcaagtgttgctaccgcaaccattttcccacaatgctcacaagctcctatagcttcccttcttcccccatacctctcaccagcggtgtcttcaatgtgtgaaaacccaattgttcaaccctacaggatccaacaggcaatcgcaacaggcatcttaccattatcacccttgatcctccaacaaccgtcagccctattacagcagttaccttttgtccattctgtgtcacataac

SEQ ID NO: 335654 - DNA, 148 bp, Zea mays
tacccatacaattcactctcacactacaatccaactctctataattcacctaaataaattactccctttttttacaacttctaactaaaaaacccttccttacccaattaacttcttaaaacatcccccttcccaacttcttaatacc

SEQ ID NO: 335655 - DNA, 142 bp, Zea mays
aaaaacattatttttggtgaaaaaaaaaaaattaaaaaaaaaaaaaaaaaaaaaaaaatactaaaaaaataaattttttaatatttaatatacaaacaatctactccataacttttctatactcttatctaaattttaattt

SEQ ID NO: 335656 - DNA, 392 bp, Zea mays
  unsure (1)..(392): unsure at all n locations
aaaaaatataaaaataaaaaataaaaattttaaatttattaaaaaaaaaaaaaaaaaaaaaggaaaaggtaaaaatttaaattgtttaagaaaaaaaaaaattatttattttttaattttaaaaaaaatatattttaataaattatttataatataatataaattttttatatttttaattaaattaaatttaataagtttggttttataaaatttttatttttaaaataatatttatatttaatttaatatatttaaaaaaaataatttttttttaattttttttaataaataaaattattttatatattttatttttaaaaaatttgttatttttaattataaattggaangttttttttatattataaattaaaaatgtatatattttt

SEQ ID NO: 335657 - DNA, 318 bp, Zea mays
cgtccggaactctcctgcctatgtacagcagcaacaactactaccattcagccagctagctgcggtgagggctgctgccttcttgagacaggaacaattgttgtcgttctacctgcacgctgcgcctaacgttggcaccctcttacaactgcaacaattgctgccattcaaccaacttgctttgacaaacccagcagcgttctaccaacaacccatcattggtggtgccctcttttagattgcttatgagttatagttcaataataaagtttttttgatgatgtttgtggcttcccagaaataagaaagtacatttct

SEQ ID NO: 335658 - DNA, 344 bp, Zea mays
atggggaagtcgttctaaaaaaaaaatttaaaatttaaaaaaaaaaaaaaaaaaaaaaagaaaattgttaaatataaaaaattccaaacactaaaaaaaaatccaaatattaaatacacatacatacaaaattataaataataaaataattttactaaaaaaaaaatcgccccccccttttaaaacaccaatttttttttccccttcttttcaaataaatattttttttttattgccccaaaattcaatttccccccccctttttttaaccctttatttcttaaaaaccctttttttccccaattttataccctttaaaaaaaatcccttttttccctttttct

SEQ ID NO: 335659 - DNA, 174 bp, Zea mays
  unsure (1)..(174): unsure at all n locations
aacaattgttgccctttgtccaacttgctttgacagacccagcggcctcctaccaacagcacagtgattggtggtgccctcttttagattgcttattanttgtaattcaataataaagttttttggatgatgtatgtggccaaccagaaataagaagttacatttccagatttt

SEQ ID NO: 335660 - DNA, 456 bp, Zea mays
  unsure (1)..(456): unsure at all n locations
naattcttcaaccctacaggatccaacattcaatcgcagctggcatcttacctgtatcagccttgttcctccaacaatcatgcagccctattacagcagttacctttggtgcatttattggcacaaaacatcagggcacaacaactacaacaacttgtgctagcaaaccttgctgcctactctcagcaacagcagtttcttccattcaaccaactagctgcattgaactctgcttcttatttgcaacaacaacaactaccattcagccagctatctgctgcctacccccaacaatttcttccattcaaccaactgacagcattgaactctcctgcttatttacagcagcaacaactactaccattcagccagctagctggtgtgagccctgctaccttcttgacacaaccacagtttgtgccgttttaccacacgctgcgcctaaccttgcaccct

SEQ ID NO: 335661 - DNA, 140 bp, Zea mays
atccaattctactctccctctactctctcattaatctcggctggtgttgtttttactcttcatgttacctcttacacttccatctccctatctccctcttcctttctttttctttcttttcttatctcaatcccttcttc

SEQ ID NO: 335662 - DNA, 433 bp, Zea mays
cggacgcgtgggcggacgcgtgggcaacaagcaacatagaaagtggaatccagtagcagcaatagagcaacaatggcgaccaagatattttccctccttatgctccttgctctttctacatgtgttgctaacgcgacaattttccctcaatgctcacaagctcctatagcttcccttcttcccccataccttccatcaattatagcttcaatatgtgaaaacccagctcttcaaccatataggcttcaacaagcaatcgcagcaagcaacatacctttatcgcccttgttgtttcaacaatcgccagccctatctttggtgcagtcattggtacaaaccatcagggcacaacagctgcagcaactcgtgctacctctgatcaaccaagtagctctggcaaacctttctccctactctcagcaacaacaatttc

SEQ ID NO: 335663 - DNA, 71 bp, Zea mays
gcgaaggaaaaaaaaaaaaaaaaaaaaaaaataaaaaaaaaaaaaaaaaaaaacctagttctgaatcggga

SEQ ID NO: 335664 - DNA, 80 bp, Zea mays
  unsure (1)..(80): unsure at all n locations
aaaagaaaaaaaaaaaaaaaaatttaaaaaattaaaaaaaaaaaacctnnttctcgatcgggtatcactctttttagacc

SEQ ID NO: 335665 - DNA, 375 bp, Zea mays
cccacgcgtccgaattaaaaaaaaaaatataattttaaaaaaatataaaaaaaaaaagaaagaaaggaaaaaaaaaaaaaaaaaaaaaaaaaaatataaattaataaaaaataaaaataacaaaaaaaaataaaacccaaaaaaaaaaagtctccttttttaaaataaaaaatttttactatccttagtttcaaaataaatattttttttattgcgccctaaaatttaaaaaaatcgcccccaatttaaaatactataacttgaaaaacctttgctttaccaaatttaataaacttgtaaaaaaatcccttttttcaaatttgggtaaaacaaaaaaaccccccaccatatctcttttaaaaaaatttcccacac

SEQ ID NO: 335666 - DNA, 316 bp, Zea mays
  unsure (1)..(316): unsure at all n locations
aaaaaaaaaaaaaaaaaaaaaaaaaaattaaaaatttaaaaaaaaaaaaaaaaaaaaaaggaaaaagtaaaaatttaaaaaaaaaaaaaaaaaaaaaaataaaaaaaaaaaaaaaaaaaaaaaaaaaaaaaaaaaaanggggcccccctttttaaaaattcaaattttatttcccctttattccaacttaaaaatttttttttagttcacccaaaataaaattaattgccccccttttaaaaacttttaaattgaaaaaaccttgccttaaccaaattaaatccctttaaacaaaatccctttttcccaagttgtg

SEQ ID NO: 335667 - DNA, 392 bp, Zea mays
cacccaaacttttactttcataccaagccaaacatactcctgcctctgtctcaattatacgtctctatgcactcaacctacctatattatctcaaataacgactgactttgctcttattcacaaatttgttctgcctgtaaagatctattcccatattgtcactaacatataacttttctacttataatcacttcacctttaattgacaccaaaccttctgtgaatctttttttaaacttccattttaatacatcaatacaccatatacttttattttaatacaccatatacatgacacctaaaaaaaacaataacaaacaactataatcctaccattccctctaacaaatccaaacttacctacactttcataacaaacctatatttctta

SEQ ID NO: 335668 - DNA, 333 bp, Zea mays
  unsure (1)..(333): unsure at all n locations
tgatgtatactatcctttaccttnctcaaataaaaccattnatcaaccccatcctcatcctatantgatctctcctcttcattaaaaataattaaatctanatctgctntaccattattcaatctntnaacttcctattcatttttccccaccttattaaataaataaactgccatgagtttttttttttttgctactccttcactgcaaacatttataatgttcgctgtgattattgtattcaattttattatatacgcaataataatattatctaaatatcttttgtcctctcattggaatttcttggttcgtatacccaacttttttctt

SEQ ID NO: 335669 - DNA, 247 bp, Zea mays
acactaccttatatctctccacaaaaacttatataatcttattcatcaatcaccacttatcttttctctttttcaatcatcatcattcatatcattactctcaatacaacttcacctttccttcattcacctcaattacctccactttattacattattacatcatctaaagcactattatatcctactctatctaactattctcatctcattaacattaataatatcataaaaactcttacttaat

SEQ ID NO: 335670 - DNA, 61 bp, Zea mays
gttcatccggacaataattaaggggatccggatttgttcttgtgataaaaagaaaagaaaa

SEQ ID NO: 335671 - DNA, 403 bp, Zea mays
cggacgcgtgggcggacgcgtgggcaactagcaacatagaaagcacaatagtgtaccagcaatggcagccaaaatattttgcttccttatgctccttggtctttctgcaagtgttgctaccgcaaccattttcccacaatgctcacaagctcctatagcttcccttcttcccccatacctctcaccagcggtgtcttcaatgtgtgaaaacccaattgttcaaccctacaggatccaacaggcaatcgcaacaggcatcttaccattatcacccttgttcctccaacaaccgtcagccctattacagcagttacctttggtccatttggtggcacaaaacatcagggcacaacaactacaacaacttgtgctaacaaaccttgctgcatactctcagcaacat

SEQ ID NO: 335672 - DNA, 426 bp, Zea mays
ctctgacgatgaatagttgacaagcagcttccgaacaggaaacgtaagcggaggatctgctgcagttttgaggcagcttgtctgttgccagttgccgggtgcttcctcaaggtcttgctcatggttgatctcgaaaatatgtctcccgaaataatcttgtttatcttcttcggtggtggcacctggtagaaaattttcctgggcagtcttagacattaattcaacagtaaaagcataacatcatgcaagtataccaaatactgagcgtatcgcattggattattagcagcgctttgtttttgtcgtctggtacctattttttggctggcggttattacaagaacggtctcatattataaattattatataaggcggtcattggttgggacgcttggaattgaggaaatataccttgcttataccgg

SEQ ID NO: 335673 - DNA, 315 bp, Zea mays
cccacgcgtccgcccacgcgtccggaaaaatatccccaaaccctagctcccgatctcgatggcgaaccgtcgcgtcttcttcgacatgaccgtcggcggcgccccggcgggccggatcgtgatggagctgtacgccaacgaggtgcccaagaccgcggagaacttccgcgcgctgtgcacgggcgagaagggcgtgggcaagtccgggaagccgctccactacaagggctccaccttccaccgcgtcatccccgagttcatgtgccagggcggcgacttcacccgcggcaacggcaccgggggcgagtccatcta

SEQ ID NO: 335674 - DNA, 151 bp, Zea mays
gttctagatcgcgagctgccgccctttttttttttttttttttttttttttttttttttttgtgtttatgcttcattactgtcgatcttagagcaaaataactatcaaccacatttggagactagaagcacataagaatctagaaatgcaa

SEQ ID NO: 335675 - DNA, 171 bp, Zea mays
ttatatctgatgtgcgaacacattatcttactaaacctcattctaatgctacatcactaaaacctatcttccgaaatcacataccatatctatctctacatctacaacatatataacatttaatatgtacacacttaaactttaattcaacagtctaatcataccatcatt

SEQ ID NO: 335676 - DNA, 360 bp, Zea mays
gacccacgcgtccgcccacgcgtccgcagccctattacagcagttacctttggtgcatttattggcacaaaacatcagggcacaacaactacaacaacttgtgctagcaaaccttgctgcctactctcagcaacagcagtttcttccattcaaccaactagctgcattgaactctgctgcttatttgcaacaacaactaccattcagccagctagctgctgcctacccccaacaatttcttccattcaaccaactggcatcattgaactctcctgcttatttacagcagcaacaactactaccattcagccagctagctggtgtgagccctgctgccttcttgacacaacaacagttatt

SEQ ID NO: 335677 - DNA, 437 bp, Zea mays
  unsure (1)..(437): unsure at all n locations
cggacgcgtgggcagaccattagctttatctactccagagcgcagaagaacccgatcgacaccatgagggtgttgctcgttgccctcgctctcctggctctcgctgcgagcgccacctccacgcatacaagcggcagctgcggctgccagccaccgccgccggttcatctaccgccgccggtgcatctgccacctccggttcacctgccacctcctgtgcatctcccaccgccggtccacctgccgccgccggtccacctgccaccgccggtccatgtgccgccgccggttcatctgccgccgccaccatgccactaccctactncaaccgcccggcctcagcctcatccccagccacacccatgcccgtgccaacagccgcatccaagcccgtgccagctgcaaggaacctgccgcgttggcagcaccccgatcct

SEQ ID NO: 335678 - DNA, 452 bp, Zea mays
acgcggacgcgtgggcagaccattagctttatcttctccagagcgcagaagaacccgatcgacagcatgattttgttgctcgttgcgctcgctctcctggctctcgctgcgagcgccaccttcacgcatacaagcggcagctgcggctgccagccaccgccgccggttcatctaccgccgccggtgcatctgccacctccggttcacctgccacctactgtgcatctcccaccgccggtccacctgccgccgccggtccacctgccaccgccggtccatgtgccgccgccggttcatctgccgccgccaccatgccactaccctactcaaccgtcccggactcagcctcatccccagccacacccatgcccgtgccaacagccgcatccaagcccgtgccagctgcagggaacctgcggcgttggcagcaccccgatcctgggccagtgcgt

SEQ ID NO: 335679 - DNA, 102 bp, Zea mays
catgtccacgcctgcacacagacaaccaacattcaacatcatcttgactagcatcctaggtgtcaatccgagattaatatgataattttattctttttatat

SEQ ID NO: 335680 - DNA, 332 bp, Zea mays
gtcacctccaatcaacaaattcccaatccgccgcttcccatcccgcgttcgccgctccattggatcgaattcccgatggcgcccaaggccgagaagaagcccgcggagaagaagccgacggaggagaaggccgagaagaagcccagggcggagaagcgcgtgccgggcaaggagggcggcgagaagaaggggaagaagaaggccaagaagagcgtcgagacgtacaagatctacatcttcaaggtgctcaagcaggtgcacccggacattggtatctcgtccaaagccatgtccatcatgaactccttcatcaacgacatcttcgagaagct

SEQ ID NO: 335681 - DNA, 239 bp, Zea mays
gacccactcgtccgactcgttccattgagccattcaaatacacatctaactatactcactacattccaactaacagcaatattgtacaatatattatccctgctcaagattattcccccttttatgaacgctacacatgctatcattattccacactatcagttatactattaatgtcacaacttctatgtctgattaaagacattaatacatatgatcaacaataacttacatacgtt

SEQ ID NO: 335682 - DNA, 388 bp, Zea mays
acctcgtcggccgagcccagccccagctcgcccagtctccatctcctttaatctgccgttctgcagctcggtctctggtgctctgcacacgtcgagttccttgccgcgcgctgagctgtgagctctgtgtcgtgtccctggttccagcgtggagctcgtgagcgtcttcctgtgctccttttgtgcgatcagctttggtctctattacccgctaaactactgtcgcgccgggttatgccctgatgcgcgcatcattagtcttcatcgtgcgtgtcgtgacagctgttgtggccgtgaagcagtccgcgccatagagttcgtccgaccgcgacctcgctttactcctcgcgtcatcgtttgccgtcgagtcgtcgaacacgtcatcctc

SEQ ID NO: 335683 - DNA, 272 bp, Zea mays
  unsure (1)..(272): unsure at all n locations
cccacgcgtccgcggacgcgtggggaaaaaaaaacaaaaacacaaaaaaaaaaaaaaaaaaagaaaaacataaaaaaaccggaaacccaaaaaacaaaaaaacnaaaaacaaaaaaaaaaacacaaacaaaacaaaaaaacaaacaaaacaacaaaaaaaaaccaaccaccaaaacaaccacaacgaaacaccaaaaaaagcanacacaacaccaaccaccacccacacaacccaagaaccaaaaaaaaaagggcccccccccaaaaacccc

SEQ ID NO: 335684 - DNA, 379 bp, Zea mays
  unsure (1)..(379): unsure at all n locations
acccgccatcctttgctccacacgcgcgacgcgatttctctctcttttaaattaaattatcgtggactgctattggtctggtcgacggctggtggcatagggatggagacggcggcggcgatgctggagggcggngtggggcggttctcgcgggcgccggcgctggccgcggcgctgctggcggagacgtgggcgccgctggccgtggcgctcgcggcgctggccacgctgcccagcctgctgcgccggctgcaagtcatcgtgctgcgccttcgctcccgcgggaaggaagccatccagtcgcacatcgggacctactactactactcgtcctgcgacgaggatgacggcgacagcgacgaagacgagagctccgacg

SEQ ID NO: 335685 - DNA, 109 bp, Zea mays
cccactcatccaatccgccatcctttcatccacactctcaactccatttctatctctttcaaattaaattatgggtaactgctattcttctcttctacaactgctatca

SEQ ID NO: 335686 - DNA, 273 bp, Zea mays
gttggcttctcctccccctccggttcgggttcgggttcgtgaggttctccggggttcggtttcgtgggtgagcggatcgagatggcggcgtcggatgttgagtaccgctgcttcgtcggcggcctcgcctgggccacggacgaccactccctccacaacgccttcagcacctacggcgaggtcctcgagtccaagatcatcctcgatcgggagacgcagaggtcccgcggcttcggcttcgtcaccttctccacggaggaggcgatgcggaac

SEQ ID NO: 335687 - DNA, 119 bp, Zea mays
  unsure (1)..(119): unsure at all n locations
gcaagaaatagagtacaatggtatctgctgcgaccaccacgcctaggaggcacaacantcggcccatagacgtatttaaagcgttctatgcgtgacattcacagcttatacgacatgta

SEQ ID NO: 335688 - DNA, 383 bp, Zea mays
  unsure (1)..(383): unsure at all n locations
ggtgggttggcttctcctccccctccggttcgggttcgggttcgtgaggttctccggggggcgggttcgtgggtgagcggatcgagatggcggcgtcggatgttgagtaccgctgcttcgtcggcggcctcgcctgggccacggacgaccactccctccacaacgccttcagcacctacggcgaggtcctcgagtccaagatcatcctcgatcgggagacgcagaggtcccgcggcttcggcttcgtcaccttctccacggaggaggcgatgcggaacgccatcgagggcatgaacggcaaggagctggacggccgcaacatcaccgtcaacgaggcccagtcccgcggcggccgtggaagcggcggcngtgggtacggtggt

SEQ ID NO: 335689 - DNA, 227 bp, Zea mays
cccacgcgtccgcattcctctttcccagtgcccccagtccatcaccacatccgttcaaatgggccgcaaccgcaaggggcgcaaggctagggtttcgcacgacgccgactccgacgccgatggctgcgaagatgagagggccaccactgcgggcaggagcctctacgagattctaggagttgagaagaccgcttctcaacaagaaataaagaaggcgtatcacaaat

SEQ ID NO: 335690 - DNA, 461 bp, Zea mays
  unsure (1)..(461): unsure at all n locations
cccacgcgtccgcggacgcgtgggtgaaaacccagctcttcagccctagtggctccaacaagcaatcgcagcaagcaacgtacctttatcacccttgttgtttcaacaatcgccagccctatctttggtgcagtcattggtacaaaccatcagggcacagcagctgcagcaactcgtgctacctgtgatcaaccaagtagctctggcaaacctttctccctactctcagcaacaacaatttcttccattcaaccaactgtctacactgaaccctgctgcttatttgcagcaacaactattaccattcagccagctagctactgcctactctcagcaacaacaacttcttccatttaaccaattggccgcactgaaccccgctgcttatttgcagcagcaaatactactaccatttaaccagctagctgcagcaaaccgtgcttncttcttgacacagcaac

SEQ ID NO: 335691 - DNA, 452 bp, Zea mays
cgcgtccggaccgacaagcaacatagaaagtggaatccagtagcaacaacagagcaacagtggcgaccgagatattttccctccttatgctccttgctctttctgcatgtgttgctaacgcgacaattttccctcaatgctcacaagctcctatagcttcccttcttcccccataccttccatcaatgatagcttcagtatgtgaaaacccagctcttcagccctataggctccaacaagcaatcgcagcaagcaacatacctttatcacccttgttgtttcaacaatcgccagccctatctttggtgcagtcattggtacaaaccatcaaggcacagcagctgcagcaactcgtgctacctgtgatcaaccaagtagctctggcaaaaccttctccctactctcagcaacaacaatttcttccattcaaccaactgtctacactgaaccct

SEQ ID NO: 335692 - DNA, 269 bp, Zea mays
cccacgcgttcgcccacgcgtccggctaccttcttgatacaaccacagttgttgccgttcgagcagcacgctgcgcctaacgctggcaccctcttacaactgcaacaattgctgccattcaaccaacttgctttgacaaacccagcagcgttctaccaacaacccatcattggtggtgccctcttttagatttcttatgagttatagttcaataataaagttttttgtctgatgtttgtggcttcccagaaataagaaagtacatttct

SEQ ID NO: 335693 - DNA, 249 bp, Zea mays
ggcgtcacgcgtcgcgtcacacatccttccaaattcaaccacagctgtcatacattgagccacggcgctctaactaactgctgacaccttcatacaactactacaactgcaatcattcaaacaacttggtttaactaacccttaaggttactacacacaacccatcataggtggtgccctgcataaaaaggttcatcacatttaatacactgatgaacgcttattgctacacgcagttgcttacatgaa

SEQ ID NO: 335694 - DNA, 233 bp, Zea mays
gcgccaaggccatacatttaacatcatgctgcattaagatatatacttagctctgcaggaaaagggtcgattagtgtcagattgttactgagcatgtgtaactgaattttgttttctattacttgtttctctttgttgccttgcccttgattgttattaaccatgcataactgaattttgttttcttttaaaaaaaacaaaaacacaacaagttatccaaaacaattcaatcc

SEQ ID NO: 335695 - DNA, 442 bp, Zea mays
  unsure (1)..(442): unsure at all n locations
tggcagccaaaatattttgcttccttatgctccttggtctttctgcaagtgttgctaccgcgaccatgttcccacaatgctcacaagctcctatagcttcccttcttcccccatacctctcaccagcggtgtcttcaatgtgtgaaaacccaattgttcaaccctacaggatccaacaggcaatcgcaacaggcatcttaccattatcacccttgttcctccaacaaccgtcagccctattacagcagttacctttggtccatttggtggcacaaaacatcagggcacaacaactacaacaacttgtgctagcaaaccttgctgcatactctcagcaacatcagtttcttccattcaaccaactggctgcattgaactctgctgcttatttgcaacaacaattaccattcagccagctagttgctgcctacccncagcaatt

SEQ ID NO: 335696 - DNA, 434 bp, Zea mays
gcaacatagaaagtggaatccagtagcaacaatagagcaacaatggcgaccaagatattttccctccttatgctccttgctctttctgcatgtgttgctaacgcgacaattttccctcaatgctcacaagctcctatagcttcccttcttcccccataccttccatcaatgatagcttcagtatgtgaaaacccagctcttcaaccctataggctccaacaagcaatcgcagcaagcaacatacctttatcacccttgtttcaacaatcgccagccctatctttggtgcagtcattggtacaaaccatcagggcacagcagctgcagcaactcgtgctacctgtgatcaaccaagtagctctggcaaacctttctccctactctcagcaacaacaatttcttccattcaaccaactgtctacattgaaccgtgc

SEQ ID NO: 335697 - DNA, 260 bp, Zea mays
catctctgctactctacaacaccctaacactcaacaatcctatccttaactccatccaccatacctctcatcaatacaccttcaatacacaaaacccaactcttcaaccctctcatcttcaacaaacaacaccacctttccacatacctccatcaccctcattacaacaatcaccacacatatcaccgaagcatcaattaatatcaaaccattttccattaccctatacaacaactccagctacactccatcacccaaaa

SEQ ID NO: 335698 - DNA, 109 bp, Zea mays
cccacgcgtccgcccacgcgtccgcccacgcgtccgagacagcatccattccacagtcaccggagcaggagagcagagcaacaactgacaagagcagagcgagatcgtc

SEQ ID NO: 335699 - DNA, 351 bp, Zea mays
cccactcgacccaacaccaacttctaactacatctatccctatcactccacataatacacctacatgctttcagtaacttttaaaacaacacattccactaccatctaactcaactaactacaccaaaccctactttctactttcaacaccctcaaaatccaaccaactcactacttaaaactcttctacatacctacaacatctacaacatacacttaatccactatccccagctaacacatccctttctaaattactacaacacctacaattacatccataccaccatttctcttcactcaaccctcccttcttattgcaacaacacatcctctaacctacaatctttt

SEQ ID NO: 335700 - DNA, 131 bp, Zea mays
ttacaacatttgccccaccaccaactacttttaataccactcattttccatcaattctcattcccaaaccgccaacacttttctttatcataccttccaactctacaataactacaccccctatcacctca

SEQ ID NO: 335701 - DNA, 328 bp, Zea mays
gactacttctaaatcgcgatcttacctcttatatctctttttttttcatcgaatccgcaacttttttaataccctccatacataatctttcataccacacataataatttctctctacctactccattattacatatatccatataaaaatatacatataggatatccccaaaatattaataatcattaatatcaacgtaatcccacctctaaactccacattcttacccttctctaactctacagctagtactggtaaattccacccaatcccatcatgttctgcgccatcatcatttccattttgtttataccctattcttccatc

SEQ ID NO: 335702 - DNA, 425 bp, Zea mays
catcgttctcgtcgtgtgcctggctctgtcagctgccagcgcctctgcaatgcagatgccgtgcccctgcgcggggctgcagggcttgtacggcgctggcgccggcctgacgacgatgatgggcgccggcgggctgtacccctacgcggagtacctgaggcagccgcagtgcagcccgctggcggcggcgccctactacgccgggtgtgggcagacgagcgccatgtaccagccgctccggcaacagtgctgccagcagcagatgaggatgatggacgtgcagtccgtcgcgcagcagctgcagatgatgatgcagcttgagcgtgccgctgccgccagcagcagcctgtacgagccagctctgatgcagcagcagcagcagctgttggcagctcagggtctcaaccccatggccatgatgatgg

SEQ ID NO: 335703 - DNA, 270 bp, Zea mays
aggaaccggatgtttacctggcaaatatccagtgttcttgcgacttcttttgtagaatgtggcagccattcaaaggatgtgatgtcaggcgtgcaagcgatggacagtatgttttctgcatatgttatggacagtattttttttgtccgataggttatgcctatgcgtttcaactaaaacgtttttggtttggaaccaattgttattgagcatggataattagcatagaaatgtaattctagtttcagtggaatggaagaaagcttgttc

SEQ ID NO: 335704 - DNA, 221 bp, Zea mays
cttttattaatcagatgatcatttttaaactgaaacccttaaaactattgcctgttttctttccaattccttcatcattcttcaattcaatcaaaacttttttttaatgttttcccattattaccacattttattcataaaaattccttggttactttttcctctttccccactcctttgttccttttctcatgtaatatttattatatactttaacaaca

SEQ ID NO: 335705 - DNA, 444 bp, Zea mays
caatagtgtaccaacaatggcagccaaaatattttgcttccttatgctccttggtctttctgcgaaggggtgctaccgcaaccattttcccacaatgctcacaagctcctatagcttcccttcttcccccatacctctcaccagcggtgtcttcaatgtgtgaaaacccaattgttcaaccctacaggatccaacaggcaatcgcaacaggcatcttaccattatcacccttgttcctccaacaaccgtcagccctattacagcagttacctttggtccatttggtggcacaaaacatcagggcacaacaactacaacaacttgtgctagcaaaccttgctgcatactctcagcaacatcagtttcttccattcaaccaactggctgcattgaactctgctgcttatttgcaacaacaattaccattcagccagctagttgctg

SEQ ID NO: 335706 - DNA, 360 bp, Zea mays
cccactcgtgctcacagtcatcctccttcgtcaaatacccttctaccttacaccaattaccatcagggtcaacgttacttccaacttgcaaaactccacaataacaaagatcaaatctaagattattactcctattacaacctctaccctacattcacttcattccctacaaaccaaattatccaccctctcctctccacacaaagcttcaccttaacactattagctttcttcactccaatctactactacctcaatatcactattacaattaacacctctaatatatatattataccacatattctacccacaataaactccacatcattattaatataacttccatatatataactc

SEQ ID NO: 335707 - DNA, 438 bp, Zea mays
gcgcattgaaccaactggctgcattgaactgtgctgcttatttgcaacaacaactacgattcagcagctagctgctgcctacccccagcaatttcttccattcaaccaactggcagcattgaactctgctgcttatttacaacagcaacaactaccaccattcagccagctagctgatgtgagccctattgccttcttgacacagcaacagttgttgccgttctacctgcacgctgcgcctaacgctggcaccctcttacaactgcaacaattgctgccattcaaccaacttgctttgacaaacccaacagcgttctaccaacaacccatcattgggggtgccctcttttagattgcttatgagttatagttcaataatgaagttttttggatgatgtttgtggcttcccagaaataagaaagtacatttctagattc

SEQ ID NO: 335708 - DNA, 334 bp, Zea mays
aaaaaaaaaaaaaaaaaaaaaaaaaaaaaaaaaaaaaaaaaaaaaaaaaaaaaaaaaaaaaaagaaaaagaaaaaaaaaaaaaaaaaaaaaaaaaaaaaaaaaaaaaaaaaaaaaaaaaaaaaaaaaaaaaaaaaaaaaaaaaaaaaaaaaaaaaaaaaaaaaaaaaaaaaaaaaaaaaaaaaaaaagggttaaaattttaaaaataaaaaaaattatttattagaaaataaaaaaaaatttatttttaaaaatatttaaaaaaaaaatataaagggtttttttaaaaaattatttttttaaaaaaacttttttttaaaaaaaatatattattt

SEQ ID NO: 335709 - DNA, 61 bp, Zea mays
cccactcgtccggtttccttttatcaaaaaaaaaacttgttttattgttaataataatgag

SEQ ID NO: 335710 - DNA, 169 bp, Zea mays
cccacgcgtccgcatggtaccatctgcatacacaacatttgatgagtgcaggtttcagcaggttacagcgcatagaaaagcaggcaaagatccgtcaaatgttgtgtatgcagatggtaccatgcatttgtttccctgaatggcttcaaatgaaatgaatgtttttttt

SEQ ID NO: 335711 - DNA, 376 bp, Zea mays
gaaagtggaatccagtagcaacaatagagcaacaatggcgaccaagatattttccctcctgatgctccttgctctttctgcatgtgttgctaacgcgacaattttccctcaatgctcacaagctcctatagcttcccttcttcccccataccttccatcaatgatagcttcagtatgtgaaaacccagctcttcaaccctataggctccaacaagcaatcgcagcaagcaacatacctttatcacccttgtttcaacaatcgccagccctatctttggtgcagtcattggtacaaaccatcagggcacagcagctgcagcaactcgtgctacctgtgatcaaccaagtagctctggcaaaacctttctcctactct

SEQ ID NO: 335712 - DNA, 443 bp, Zea mays
tgaaaggggaatgcagtatcaacaatagagcttcaatttcgaccaatatattttccctccttgtgctcggtgctctttctgcatgtgttgctaacgccacaattttccctcaatgctcacaagctcctatagcttcccttcttcccccataccttccatcaatgatagcttcagtatgtgaaaacccagctcttcaaccctataggctccaacaagcaatcgcagcaagcaacatacctttatcacccttgtttcaacaatcgccagccctatctttggtgcagtcattggtacaaaccatcagggcacagcagctgcagcaactcgtgctacctgtgatcaaccaagtagctctggcaaacctttctccctactctcaacaacaacaatttcttccattcaaccaactgtctacattgaaccgtgctgcttatttgcagcaa

SEQ ID NO: 335713 - DNA, 275 bp, Zea mays
actcttactctaactttttacaacacacaaaattatatcagctttggtcttattctaaatgtccatggcacacaaaaagtcataatatcgtataacctgcacatctccactaataaacatgaaccttctatacatatccagattatcaaattatattctgaacgtgacaatagtaatgataatgttaataaaataattaaccacaatatatacataaacttaataaccataactatcacaaatcataaataattttcatcattaaaaataaaacc

SEQ ID NO: 335714 - DNA, 442 bp, Zea mays
cgacgaattgaaccgagcactagttgagattgacgacctcgccaaggatcttgaagacgtggcagtgcaaactcagtgggaggtagaaaatatggctaagagtgaagtgaaagaacaaccacaacaagaggaagcagtagaggaccttctcatacatgatggttcagaagacgagctactgatagacgaagagtcaccaattaactatgaagaccttgtgggctacgacgatggtcgtgactactcaaccgacgacacatatccgtactagtgttctaggttaaacttcagtacaagtattgtagcatgtttaggtctatgttcagctgtagttgtcggttggtatgttcatgcttttgggggagtttaatgttctggtctatgtaaactgaatccggttcaattactacaataattattgtgttaatgtggactatgtttg

SEQ ID NO: 335715 - DNA, 306 bp, Zea mays
ggtgggttggcttctcctgccccttcggttcgggttcgggttcgtgaggttctccggggtgcggtttggtgggtgagcggatcgagatggcggcgtcggatgttgagtaccgctgcttcgtcggcggcctcgcctgggccacggacgaccactcccttcacaacgccttcagcacctacggccaggtcctcgagtccaagatcatcctcgatcgggagacgcagaggtcccgcggcttcggcttcgtcaccttctccacggaggaggcgatgcggaacgccatcgagggcatgaacggcaaggagc

SEQ ID NO: 335716 - DNA, 187 bp, Zea mays
cactacccccttaccaatattcttcaccttaaattcaccatttaccttttctaaaaccccattccttaccctatactttcccaccaattttttaaacataacccataccttttctccaaccttaaaaaatcctttacttctcaaaacccaatccttctaccacccttttcccttccaaaacccccaa

SEQ ID NO: 335717 - DNA, 355 bp, Zea mays
caacaatcgccagccctatctttggtgcagtcattggtacaaaccatcagggcacagcaggggcagcaactcgtgctacctgtgatcaaccaagtagctctggcaaacctttctccctactctcagcaacaacaatttcttccattcaaccaactgtctacattgaaccgtgctgcttatttgcagcaacaactattaccattcagccagctagctactgcctactctcagcaacaacaacttcttccatttaaccaattggccgcactgaaccccgctgcttatttgcagcagcaaatactactaccatttagccagctagctgcagcaagccgtgcttccttcttgacacagc

SEQ ID NO: 335718 - DNA, 432 bp, Zea mays
tgttctagatcactagcggccacccttttttttttttttttttttgttttttttttatattttgtttcttttttttttttttatattttttttttatttttttatttattttttatattttttttttttttttttttttaaaatcatcaaccaacattttcatttttaaaatccaaatatactttttaaaaaatccaaatttatcataatctatattataatatttaattttttttaaaaccaaactaaacaaaatttattttccttccttataaaatattattaacttaaaaaacctttggttaaccaacttaaatactttatcaaaaaatccactttttccaatttgctaaaaaaaaaaaaatctcccaacttaatcttttttaaaaaattatcaaacctaaaacataaaatgtaacccccttttaaaaa

SEQ ID NO: 335719 - DNA, 394 bp, Zea mays
caactagcaacatataaagcacaatattttaccaacaatggcagccaaaatattgtggttccttatgctccttggtctttctgcaagtgctgctaccgcaaccattttcccacaatgctcacaagctcctatagcttcctttcttcccccatacctctcaccagcggtgtcttcagtatgtgaaaacccaattcttcaaccctacaggatccaacaggcaatcgcagcaggcatcttacctttatcacccttgttcctccaacaaccgtcagccctattacagcagttacctttggtgcatttgttggcacaaaacatcaaggcacaacaactacaacaacttgtgctaagaaaccttgctgcctactctcagcaacagcagttttttccattc

SEQ ID NO: 335720 - DNA, 324 bp, Zea mays
cctcccactcgtccgcccactcttattttttttcgttttcttactcgtgggcaagcccagaactattctcctggttgccttaccctcacttaaacaactaaatacaatccttccatctgaacggttttatctgttggcccatttcctctggactaagaatgcaatacacacccactgtcaatgtctgctgccatcacatttctgtactccaagtatgcaactaatgagttcattggctcttatatacactgcctacattatatttagagcttattatgtgatggctttcactgtctttaacatttcgattcctgctcattaatg

SEQ ID NO: 335721 - DNA, 382 bp, Zea mays
cccacgcgtccggtgggttggcttctcctccccctccggttcgggttcgggttcgtgaggttctccggggttcggtttcgtgggtgagcggatcgagatggcggcgtcggatgttgagtaccgctgcttcgtcggcggcctcgcctgggccacggacgaccactccctccacaacgccttcagcacctacggcgaggtcctcgagtccaagatcatcctcgatcgggagacgcagaggtcccgcggcttcggcttcgtcaccttctccacggaggaggcgatgcggaacgccatcgagggcatgaacggcaaggagctggacggccgcaacatcaccgtcaacgaggcccattcccgcggcggccgtggaggcggcggcggt

SEQ ID NO: 335722 - DNA, 122 bp, Zea mays
tgccggtgttcgtggtttcaactatttaaggaatgagaaaaatggttcacattgaggggcattccttaaatagttgactgccggtgttcgtggtttcaaacggaatttagtcttattaactg

SEQ ID NO: 335723 - DNA, 308 bp, Zea mays
tcgcccacgcgttcgcggacgcgtggggttctagatcgcgagctgccgccctttttttttggttttgcataacattgataacgatatattatagataggtcatgacagatagatccggcagagccaaccatgaccatgggtggcttacaactgattcaaacggaaagatactggtgctgctcacttgcattttttactaccacgacagaccaaaacgaaacgacactgcttgtactactgatagataatttggtccgacgacttcacgcgagagtcagccgagcgataccttttgaggggtagggatg

SEQ ID NO: 335724 - DNA, 202 bp, Zea mays
  unsure (1)..(202): unsure at all n locations
tccgtccgtcccacgcccgtccgagggacccttctgcaatctattatccatnnagaagtttggctcaagggacggggaggagtatgtgctnnncgtatgggnngaaccanngcgcaagggcacttanntccacagnctattgtcggcccctcggccccattgccccttaatcgatcgaggntnatgtcgtccccagaatagt

SEQ ID NO: 335725 - DNA, 365 bp, Zea mays
gtaacgttttcctgtttctccagaattttctgagcaatgtacagacagacaaactttgatgtgaaacacctgttgtccaataaaaaaaaaaaaaaaaaaaaaaaaaaaaaaaaaaaaaaaaaaaaaaaaaaaaaaaaaaaaaaaaaaaaaaaaaaaaaaaaaaaaaaaaaaaaaaaaaaaaaaaaaaaaaaaaaaaaaaaaaaaaaaaaaaaaaaaaaaaaaaaaaaaaaaaaaaaaaaaattaaggggggcccctttaaaaaaaaaaaagtttattcccggtttctctaaaaaaaatattttttttttgggggcccaaaattaaaactcctggccccggtttataaaaagtggaaatggaaaaa

SEQ ID NO: 335726 - DNA, 307 bp, Zea mays
tctgactctttgtcggacgcgtggtatttaaaaaaaaaaaaaaaaaaaaaaaaagggagagataaaaaaaaaaaaaaaaaaaaaaaaaaaaaaaaaaaaaaaaaaaaaaaaaaggggcggcccctcccgatttttaaatcccgagcggccccttttgaggttccatgcttactttctctttcttgcgacttcatatttttttttttgcggcacctaaatttatttcactgccccccgttttacaacttttttacttggaaaaccctgttgttccccaacttattttccttccacttcattccctttt

SEQ ID NO: 335727 - DNA, 295 bp, Zea mays
tcgagcagcaacaactactaccattcatccagctagctggtgtgagccctgctacctgcgggacacaaccacagttgttgccgttctaccagcacgttgcgcctaacgctggcaccctcttacaactgcaacaattgctgccattcaaccaacttgctttgacaaacccagcagtgttctaccaacaacccatcattggtggtgccctcttttagatttcttatgagttatagttcaataataaagttttttatctgatgtttgtggcttcccagaaataagaaagtacatttct

SEQ ID NO: 335728 - DNA, 398 bp, Zea mays
acatagaaagtggaatccagtagcaacaacagagcaacaatggcgaccaagatatggtccctccttatgctccttgctctttctgcatgtgttgctaacgcgacaattttccctcaatgctcacaagctcctatagcttcccttcttcccccataccttccatcaatgatagcttcagtatgtgaaaacccagctcttcagccctataggctccaacaagcaatcgcagcaagcaacatacctttatcacccttgttgtttcaacaatcgccagccctatctttggtgcagtcattggtacaaaccatcatggcacagcagctgcagcaactcgtgctacctgtgatcaaccaagtagctctggcaaacctttctccctactctcagcaacaacaatt

SEQ ID NO: 335729 - DNA, 90 bp, Zea mays
attcaaaaaaataaacccttttttacacacacctacaatactttcaatcaagacatttataaaaacccctaccccccccacacttctaat

SEQ ID NO: 335730 - DNA, 51 bp, Zea mays
gcatattcaaaataataaacccttttttcccaacacatccaacaaattttc

SEQ ID NO: 335731 - DNA, 148 bp, Zea mays
tcgcccacgcgttcgcccacgcgttcgcgttactaagcccgcatggagccgaaatgaaccctagaagtatccagtaggagtttgtttgcacccgtgcttcatcaaccatttctgtagattggtttgatgtgttgtttttgtttgatgc

SEQ ID NO: 335732 - DNA, 174 bp, Zea mays
  unsure (1)..(174): unsure at all n locations
ctcatcctcnncaccnccntccttctctccnttctctcttcttccaactccatctcctttacctccttcttaccataattatccatccctcacaaccctctccctatcttcctcttttaccttaccatccctaccttcttcatcttacctcacctcccttttccttatcttaat

SEQ ID NO: 335733 - DNA, 334 bp, Zea mays
  unsure (1)..(334): unsure at all n locations
naaaaaaaaaaaaaaaaaacaaacaaatttctaaaaaaaaataaaaaacaaaatnaacaggaagaggccttcaaaaaggagatcgcacccacccaaacacaaaaaaaacaaaaaaaaaaaataaaaaaaggccgccccctctaaataacccaaccttacttccccgtccatccaacataataacttttttatatggcccccaaaattaaattcactcccccccttttaacaaccccttaactggaaaaaccctgcctttccccaactaaatccccttgaaaaaaatccccttttccccacctggcttaataacaaaaagcccccaaccaatccc

SEQ ID NO: 335734 - DNA, 365 bp, Zea mays
  unsure (1)..(365): unsure at all n locations
ttgcggctaaccccncaaccctagtacatcttcaacaatttttgccctttccccaactttcttttacaaacccatcttccttctaccaacaactcatcatttttttttccctcttttatatcccttattacttgtaattcaataataaattttttcccataatttatatcacccaccataattatcacaatacattaccggtttctaaatttaataatccaaccaaaatataattaaatatacatccttttttcaccatttttactataaaaaaaattatcctttcccaatttatattccaaaaaaataatttttctcttaaaaaaacaatacgaaatcacccataaaaacccccccccttttta

SEQ ID NO: 335735 - DNA, 412 bp, Zea mays
cccacgcgtccgtatagcttcccttcttcccccataccttccatcaattatagggtgggtatgtgaaaacccagctcttcaaccaagtagctctggcaaacctttctccctactctcagcaacaacaatttcttccattcaaccaactgtctacactgaaccctgctgcttatttgcagcaacaactattaccatttagccagctagctactgcctactctcagcaacaacaacttcttccatttaaccaattggccgcactgaaccccgctgcttatttgcagcagcaaatactactaccatttagccagctagctgcagcaaaccgtgcttccttcttgacacagcaacagttgctgcctttctaccagcagtttgcggctaaccccgcaaccctcttacaactacaaca

SEQ ID NO: 335736 - DNA, 393 bp, Zea mays
cggacgcgtgggtgctgcctttctaccagcagtttgcggctaaccccgcaaccctgtgacaactacaacaattgttgccctttgtccaacttgctttgacagacccagcggcctcctaccaacaacacatcattggtggtgccctcttttagattgcttattagttgtaattcaataataaagttttttggatgatgtatgtggccaaccagaaataagaagttacatttccagattctaaaaaaaaaaaaaaaaaaaaaaaaaaaaaaaaaaaaaaaaaaaaaaaaaaaaaaaaaaaaaaaagaaagggaaaaaaaaaaaaaaaaataaaaaaaaaaaaagttttttaaaaaaaaaaaaggggaaaaaaaaaaaatgggggggggccgtttt

SEQ ID NO: 335737 - DNA, 421 bp, Zea mays
  unsure (1)..(421): unsure at all n locations
ttcttaactcctactttntnnaattatcttattnacctacaantattttnnaaaacagacagtgtattatcaaaaccacacccccaccaaaacttaccctattatcaacctcctattcaacccttttcacaatcacctctatctccttttcctcacctcntcaatcaataaattccntttccttcctttcataatccacacccaccacaanaacattccctcaattaaatccacctttaaactcaaccataccctctccctccccctttacctcttatcacctctcccaatcattacaataatgtttcctttcttctttttccattttcaaaatttttactattttttttcttttcacttttaaattttaaaattcaattatttaacatatttccataactattttcaaatcctctttatt

SEQ ID NO: 335738 - DNA, 414 bp, Zea mays
cccatggcacttgtcaccactactgatgccattggctaccatgaacccatggaggcagtactgcatgaagcaacagggggttgccaacttgctagcgtggccgaccctgatgctgcagcaactgttggcctcaccgcttcagccgtgccagatgccaatgatgatgccaggtatgatgccaccgatgacaatgatgccgatgccgaatatgatgccatcgatgatggtgccgactatgatgtcaccaataacgatagctagtatgatgccaccgatgatgatgccaaacatggtttcaccaatgatgatgccgagtatgatgccttcgacgatgacgccgagtatgatgccaccgataatgatgccaagtatgataccaccgatgatgatgccgagcatggtgtcatcaatgat

SEQ ID NO: 335739 - DNA, 408 bp, Zea mays
caacaagcaacatagaaagtggaatccagtagcaacaatagagcaacaatggaggcgcgggatattttccctccttatgctccttgctctttctacatgtgttgctaacgcgacaattttccctcaatgctcacaagctcctatagcttccctttttcccccataccttccatcaattatagcttcagtatgtgaaaacccagctcttcaaccatataggcttcaacaagcaatcgcagcaagcaacatacctttatcgcccttgttgtgtcaacaatcgccagccctatctttggtgcagtcattggtacaaaccatcatggcacaacagctgcagcaactcgtgctacctgtgatcaaccaagtagctctggcaaacctttctccctactctccgcaacaacaatt

SEQ ID NO: 335740 - DNA, 71 bp, Zea mays
gcgcggacacctgggttttggatgatgtttgttgcttcctataaataagaaagtacatttctagattcttg

SEQ ID NO: 335741 - DNA, 342 bp, Zea mays
ccaaggtcttataaaaaaaaaaaaaaaaattaaaaaaaaaaaaaaaaaaaaaaaaaaaaatgaaaaaataaaaaaaaaaaaaaaaaaaaaaaaaaaaaaaaaaaaaaaaaaaaaaaaaaaaaaaaacaaaaaaaaaaaaaaaaaaaaaaaaaaaaaaaaaaaaggggcccccctttttaaaaaaccaaattttactcccccttcattccaacttaaaattttttttatttttcccccaaaataaaatcaactgcccctcttttaaaaactctgtaatttaaaaaacccttcttttaccaaattaaatcccttgaaaaaaaatcccctttttccaatttgcat

SEQ ID NO: 335742 - DNA, 252 bp, Zea mays
  unsure (1)..(252): unsure at all n locations
cttctcctccccctccggttcgggttcggtgttcgtgaggttctccggggttcggtttcgggggtaagtgaatcgggatggcgccntcgatgttgagtaccgcttcttcttcggcgggctcgcctgggccacggacgaccactcccttcacaacgccttcagcacctacggcgaggtccttgagtccaagatcatcctcgatcgggagacgcaaaggtcccgcggcttcggttttctcaccttcttctcgga

SEQ ID NO: 335743 - DNA, 417 bp, Zea mays
  unsure (1)..(417): unsure at all n locations
gtcttatatgcagtactagcttggcatataataagtcntattancaacaacaacaatttattattcaatcatttatcttcttattaacttcatcaatattttttatttttttatacttctacatttaaaatttttcttaattacattattaacaattactattatttatttattttaatttttttgaattctttttatcttttttattatatttataatttttttaatatatttattatttattttttaacttttattatttttctttttattttattaaattttatattaatttattttttatattttattataattatttttttttaaaaattttctttttattttttttttattatttatatattattaattttttttgttattcatttatttaaaatatttttttatataatt

SEQ ID NO: 335744 - DNA, 426 bp, Zea mays
cccacgcgtccgcaacaagcaacatagaaagtggaatccagtagcaacaatagagcaacaggggcgaccaagatattttccgtccttatgctccttgctctttctgcatgtgttgctaacgcgacaattttccctcaatgctcacaagctcctatagcttcccttcttcccccataccttccatcaatgatagcttcagtatgtgaaaacccagctcttcaaccctataggctccaacaagcaatcgcagcaagcaacatacctttatcacccttgtttcaacaatcgccagccctatctttggtgcagtcattggtacaaaccatcagggcacagcagctgcagcaactcgtgctacctgtgatcaaccaagtagctctggcaaacctttcttcctactctcagcaacaacaatttctttcattc

SEQ ID NO: 335745 - DNA, 390 bp, Zea mays
  unsure (1)..(390): unsure at all n locations
caataataaagttttttggatgatgtatgtggccaaccagaaataagaagttacatttcgaaaaaaaaaaaaaaaagaaaagaaaaaaaaaaaaaaaaaaaaaaaaaaaaaaaaaaaaaaaaaaaaaaaaaaaaaaaaaaaaaaaaaaaaaaaaaaaaaaaaaaaaaaaaaaaaaaaaaaaaaaaaaaaaaaaaaaaaaaaaaaaaaaaaaaaaaaaaaaaagaaaaaaaaaaaaaaaaaaaaaaaaaaaaaaangggggggggggttttaaaaaaaaaaaattttaattggggggaattaaaaataaaaatttttttatgggggaaaaaaaaaaaaaaaaataggggggttttaaaaaaaaatgttggtggaaaaaaaacggtggtaat

SEQ ID NO: 335746 - DNA, 379 bp, Zea mays
  unsure (1)..(379): unsure at all n locations
ccggnccggaaaacccggcccgacccacgccaccgcacataccaccacgaactcccattcgccctctcacatcaacccaaaaaaaacaaggccgcgtcaaactataaaaacaggctagcccaaaaaaaaaaaaaacacaaaaaacccaaataacccaaaccaaacaaaaaacaaaaacctccccccccccaaaaaaacccaaccttacttccccctccatcccacaaacaacactctccctaaatccccccaataccaacccaccaccccctcttttcacaacatctcaccccaaaaaccccccaactttccccccaccaattctcttatcccccaattcccccttacccccctatcttccctataaaaaaatataatc

SEQ ID NO: 335747 - DNA, 261 bp, Zea mays
  unsure (1)..(261): unsure at all n locations
tctaaccatacaaaccatcgcaacgcagcatcaacaagcactgagccacctagccgtggtgaaccctatcgcctacttgcaacaacagctgcttgcatccaacccacttgctttggcaaacgtagctgcataccaacaacaacaacagttgcaacagtttctgccagcgctcagtcaactagccatggtgaaccctatcgcctacctacaacagncaacaacttctttcatctagcccgctcgctatgggcaatgcaccta

SEQ ID NO: 335748 - DNA, 181 bp, Zea mays
ggaaaaccgcgggccgacgcacgcgtccgcccacgcctacgaggacttctgcaatcattatcatagaagtttgctcaaagacgggaagggtgttctcttatggggagaccagcccaaggcactatccacagcattgcggcctctgccatggccttaactactaggatgtcttccagatagt

SEQ ID NO: 335749 - DNA, 433 bp, Zea mays
aaaaaaaaaaaaaaaaaaaaaaaaaaaaaataaaatattaaaaaaaaaaaaaaaaaaaatagaaaaaggtaaaaaataaaaaagaggaagaaaaaaaaaaaaaaaaaaaaaaaaaaaaaaaaaaaaaaaaaaaaaaaagggggcgccctttttaaagaatcaaatttattttccctttttttccaaattattacttttttttatgtgcaactaaatttaaattatttgccctttttttaaaaactttgttctttaaaaaaccttgttttacccaatttaattcttttgaaaaaaaattcctttttttttattttgtgttataactaaaaagtccctaactttttctcttttaaaaatattttctcacctataatggtaaattttaacctttcttttttaatttccttttataatcctttgggttttttttttt

SEQ ID NO: 335750 - DNA, 381 bp, Zea mays
agaaagcacaatagtgtaccaacaatggcagccaaaatattttgcttccttatgctcctgggtctttctgcaagtgctgctaccgcgaccattttcccgcaatgctcacaagctcctatagcttcccttcttcccccatacctctcatcagcggtgtcttcagtatgtgaaaacccaattcttcaaccctacaggatccaacaggcaatcgcagcaggcatcttacctttatcacccttgttcctccaacaaccgtcatccctattacagcagttacctttggtgcatttgttggcacaaaacatcagggcacaacaactacaacaacttgtgctagcaaaccttgctgcctactctcagcaacagcagtttcttccattc

SEQ ID NO: 335751 - DNA, 396 bp, Zea mays
  unsure (1)..(396): unsure at all n locations
ctctcacaattctcctatttatgtctcctccactgtttcttctcntcctgactggtaatcaaatggtggggcgtgcgagttanatcagtgaatcttgatctgtagctggagccagagtgtaatgacaataaaattaagtttagtttgtgtcaaaccgttcagtcgctagacaataaaattaactttgctagctcaagcaaaacaccatggccacagaagaatggttgatatgcaacaatcatcaggtgcctgattttctttttcttttccctctctatcacgagtcatgccactaacacacccatcagatgtcaggtatatttggcacggtttctccaccggtttatgtataaaaaaagagtgaaccacattttttnnnataatatatatttattt

SEQ ID NO: 335752 - DNA, 298 bp, Zea mays
  unsure (1)..(298): unsure at all n locations
cggacgcgtgggtgctggtggtaggcagcaatttcttccattcaaccaactggcagcattgaactctcctgcttatgtacaacaacaactactaccattcagccagctagctgctgtgagccctgctgccttcttgacacagcaacagttgttgccgttctacctgcacgctgcgcctaacgttggcaccctcttacaactgcaacaattgctgccattcaaccaacatgctttgacaaacccaacagcgttctaccaacaacccatcattggtggtgccctnttttagattgcttat

SEQ ID NO: 335753 - DNA, 393 bp, Zea mays
  unsure (1)..(393): unsure at all n locations
gccangctcctatagcttcccttcttcccccatacctttcatcaatgatagcttcaatatgtgaaaagccatctcttcagccctataggctccaacaagcaatcgcagcaagcaacatacctttatcacccttgttgtttcaactttcgccagccctatccttggtgcagtcattggtacaaaccatcagggcacagcagctgcagcaactcgtgctacctgtgatcaaccaagtagctctggcaaacctttctccctactctcagcaacaacaatttcttccattcaaccaactgtctacactgaaccctgctgcttatttgcagcaacaactattaccattcagccagctagctactgcctactctcagcaacaacaacttctttcattta

SEQ ID NO: 335754 - DNA, 414 bp, Zea mays
aacacaccaagcgaagcacattagcaacaacctaacaacaatggctaccaagatattatgcctccttgcgcttcttgcgctttttgcgagcgcaacaaatgcgttcattattccacaatgctcacttgctccaagttccattattacacagttcctcccaccagttacttcaatgggcttcgaacacccagctgtgcaagcctataggctacaacaagcaattgcggcgagcgtcttacaacaaccaatttcccagttgcaacaacaatccttggcacatctaacaatacaaaccatcgcaacgcaacagcaacaacaattcctaccagcactgagccacctagccatggtgaaccctgccgcctacttgcaacagcagttgcttgcatcaaacccacttgctctggcaaacgt

SEQ ID NO: 335755 - DNA, 315 bp, Zea mays
  unsure (1)..(315): unsure at all n locations
gcggagaagcaaaggaatgcaaatggtactcaacataaccttggaggacatgaancanaaaggcaaaaagttgttaagcaaaatgggcagagaaccnaatctattgctagacgataagaattcatcagaaggagctactaggcatccatgttcagacccccaaaaagctactttacctgttaattctattgcaacacctggatcaatacatactcagcatgaagtctcagaggcttctaggattttgcaggagttcttgtttggtgctggcagttagaggaaagtatgtgtgaactattctgccttttgatacct

SEQ ID NO: 335756 - DNA, 385 bp, Zea mays
  unsure (1)..(385): unsure at all n locations
aaaaaaaaaaaaaaaaaaaaaaaaaaanttttaaaaaaaaaaaaaaaaaaaaaaaaaaaaagaaaaaaataaaaaaaaaaaaaaaaaaaaaaaaaaaaaaaaaaaaaaaaaaaaaaaaaaaaaaaaaaaaaaaaaagggggcgccctttttaaaaaatcaaagtttatttacccttctttccaaattaaaaatttttttatagtgtaactaaaattaaattaattgcccgtcttttaaaaacttctgaattgaaaaaaccttgccttaacaaaattaaatccttttaaaaaaaatcccttttttccaagttggctaaaaaacaaaaaggccccaaccaattcctttttaaaaaattttccaaacttaaatggcaaatggaacccc

SEQ ID NO: 335757 - DNA, 376 bp, Zea mays
ggtcttcagaccattagctttatctactccagagcgcagaagaacccgatcgacaccatgggggtgttgctcgttgcgctcgctctcctggctctcgctgcgagcgccacctccacgcatacaagcggcggctgcggctgccagccaccgccgccggttcatctaccgccgccggtgcatctgccacctccggttcacctgccacctccggtgcatctcccaccgccggtccacctgccgccgccggtccacctgccaccgccggtccatgtgccgccgccggttcatctgccgccgccaccatgccactaccctactcaaccgccccggcctcagcctcattcccagccacacccatgcccgtgccaacagccgc

SEQ ID NO: 335758 - DNA, 315 bp, Zea mays
  unsure (1)..(315): unsure at all n locations
tccgtcctngtctacttaatgtcnnncttgtttggcttcaaatananntctggtccttgtgccgccctgggtgtnnaaaaaaaaaaggaaagaggggcggctctgctcnttagagganntccatagctttatcgtatcgcgtgtctatgcgatctgtcatnnngctcttctaatagtgtcancctannaattcaattcaaactggccgnntcgttttacaaacccgtcgtgacctntnggaaaactctctggcgttactctcaacttannatcgcctttgcagcacaaatcccnnccttttgcccagggctggcg

SEQ ID NO: 335759 - DNA, 121 bp, Zea mays
cccacgcgtccgcccacgcgtccggttctagatcgcgggcggccgtccttttttttttatgtttggtaaaaaaaaaaagaagggaaaaaaataaaaataaaaaaaaaggtcggatgttata

SEQ ID NO: 335760 - DNA, 61 bp, Zea mays
acggaccaacaatatatgcacggccataataattttctggctttaatgaatcaaaggaaaa

SEQ ID NO: 335761 - DNA, 158 bp, Zea mays
ctaagttctggaattaggtaccagcagcactttattatcatcacatcactgatcatcccggatagggtaattcttattagctggaacccattaataacatcttccagatcacttataatgccaaccccatataacaactcacatctccagattctaat

SEQ ID NO: 335762 - DNA, 101 bp, Zea mays
cacacatagtcatacatagcaagtttctactttctgcacgttcatgttagccaccgatttgagaattttaatcagctgttcatgaaccttaaattcatcct

SEQ ID NO: 335763 - DNA, 249 bp, Zea mays
cggacgcgtgggcggacgcgtgggcggacgcgtgggcggacgcgtgggagctacatcatggtcttctctgaaacaaggactttattttgcttgctttgagatatgactcttaccctctcatggataatatatatatgatatgatgccactggtgcttgcttgcatctgaaaaaaaaaaaaaaaaaaaaaaaaaattaaaaaaaaaaaaaaaataagaaaaatataaaatattataattaaataatatgt

SEQ ID NO: 335764 - DNA, 447 bp, Zea mays
cccacgcgtccgcagaaacacacctagcgaagcgcactagcaacgacctaacaacaatggcttccaagacattatccctccttgcgcttcttgccctttttgtgagtgcaacaaatgcgttcattattccacaatgctcacttgctccgagtgccattattccacagttcctccctccagttacttcaatgggcttcgaacacccagctgtgcaagcctataggctacaacaagcgcttgcggcgagcgtcttagaacaaccaattgcccaattacaacaacaatccttggcacatctaaccatacaaaccatcgcaacgcagcagcaacaagcactgagccacctagccgtggtgaaccctatcgcctacttgcaacaacagctgcttgcatccaacccacttgctttggcaaacgtagctgcataccaacaacaacaacagttgc

SEQ ID NO: 335765 - DNA, 393 bp, Zea mays
atccaatccagatcagcaaagcggcagtgcgtagagaggatcgtcgaacagaacagcatgaagatggtcatcgttctcgtcgtgtgcctggctctgtcagctgccagcgcctctgcaatgcagatgccctgcccctgcgcggggctgcagggcttgtacggcgctggcgccggcctgacgacgatgatgggcgccggcgggctgtacccctacgcggagtacctgaggcagccgcagtgcagcccgctggcggcggcgccctactacgccgggtgtgggcagccgagcgccatgttccagccgctccggcaacagtgctgccagcagcagatgaggatgatggacgtgcagtccgtcgcgcagcagctgcagatgatgatgcaacttgagcgt

SEQ ID NO: 335766 - DNA, 449 bp, Zea mays
gggagaaaggtttgccagagctactctcagcaacaacaatttcttccattcaaccaacggtcgacactgaaccctgctgcttatttgcagcaacaactattaccattcagccagctagctactgcctactctcagcaacaacaacttcttccatttaaccaattggccgcactgaaccccgctgcttatttgcagcagcaaatactactaccatttagccagctagctgcagcaaaccgtgcttccttcttgacacagcaacagttgctgcctttctaccagcagtttgcggctaaccccgcaaccctcttacaactacaacaattgttgccctttgtccaacttgctttgacagacccagcggccttctaccaacaacacatcattggtggtgccctcttttagattgcttattagttggaattcaataataaagttttttggatgat

SEQ ID NO: 335767 - DNA, 346 bp, Zea mays
cgtacaagaatgcggcgaaaacggccaattcgggtttatctggatgtcatgcatggtcgacggacgtagctggcttggctatgcgaagacggtacctgatgtcggacttgcaggtatacataggcattggaactcgtagatgctgggagctgatctgtttgtgccgtatagcttatatataatatggcggatcgattggagatcccagctcttcaaccatataaggtcgaacgagctataggatccaggcttatacacgcatggatgctgctgtttaaacaatcgacagcgttatctaaggtgcagtcattggcacaaaccataaagggacatcacttggaaaaac

SEQ ID NO: 335768 - DNA, 144 bp, Zea mays
acacccatgcccgtgccaacagtcgcatccaagcttgtgccagctgcagggaacctgcgtggttggcagcaccccgatcctgggccagtgcatctagttcctgacgcatcagtgcatcctgacagcgacgccttactgatcacc

SEQ ID NO: 335769 - DNA, 209 bp, Zea mays
cccagagcgacccaaacgagcttactaggacctgctctaagttttacttaaccactcccacaaaatcctctggaggaggttatattttacatacggtcaaggcacatgctgtctaccattttcgaagcctgtaagaaccaggaactcttgaatgacacacttgaatctatcactaatcttggcatagaaacatgacagacctgtacatt

SEQ ID NO: 335770 - DNA, 372 bp, Zea mays
cagaaacacacctagcgaagcgcactagcaacgacctaacaacaatggcttccaagacattgtccctccttgcgcttcttgccctttttgtgagtgcaacaaatgcgttcattattccacaatgctcacttgctccgagtgccattattccacagttcctccctccagttacttcaatgggcttcgaacacccagctgtgcaagcctataggctacaacaagcgcttgcggcgagcgtcttagaacaaccaattgcccaattacaacaacaatccttggcacatctaaccatacaaaccatcgcaacgcaacagcaacaagcactgagccacctagccgtggtgaaccctatctgctacttgcaacaacagc

SEQ ID NO: 335771 - DNA, 58 bp, Zea mays
acgcttctacaagaacctgaagcttgacatccattttgactacaccaacaggaaccag

SEQ ID NO: 335772 - DNA, 379 bp, Zea mays
cccacgcgtccgcggacgcgtgggtgcgcactgtttcattgttttgacagaagatgaaaggaatgtgcaaagcgctgttcaggcgaggaaaagctaaatctgaacttggccagacagaatcagcgagggaagatttcctcaaagcgaagaagtactccccagaagacaaggagatcattcgggagctccgtttgctcgcggaacaagacaaggcactataccagaagcagaaggagctctacaaaggtctctttgggccaagtcctgaagcgaaaccgaagaaggcaaagtacctcgttgtgttttggcagtgcctggtgtcatttatcctttatctggctgggatgttcaaacggaagaacgagtaagataatttacc

SEQ ID NO: 335773 - DNA, 147 bp, Zea mays
ctcaaccaacaacacagggatcgcttgacttcctaatgagagagcttatctaattgtaatctcacaacacctgatttcacacaaatcattacacctatcttccagatcaatattcttgatcaaaatcttacatgaaatccaattaac

SEQ ID NO: 335774 - DNA, 173 bp, Zea mays
tccatagctatatgtctgctttgtgtggccagtgatattgccgcgagtatggttggaggctattcgagtcgaatgtaccagtaccagagttaattagctttaattcgaaacaccgatccagttatataaaattgaaagaagtgtaaacaaaaagtagaaaaagtaaaaacata

SEQ ID NO: 335775 - DNA, 227 bp, Zea mays
gtctagatgcgagcggcctgctgccttctttacacagcaacatttgttgccgttctacctgcacactgcgcctaacgttggcaccctcttacaactgcaacaattgctgccattcgaccaacttgctttgacaaacccagcagtgttctaccaacaacccatcattggtggtgccctcttttagattgcttatgagttatagttcaataataaagttttttttgctg

SEQ ID NO: 335776 - DNA, 388 bp, Zea mays
agaaagcacaatagtgtaccaacaatggcagccaaaatattttgcctccttatgctccttggtctttctgcaagtgctgctactgcgaccattttcccgcaatgctcgcaagctcctatagcttcccttcttaccccgtacctctcaccagcagtgtcttcggtatgtgaaaacccaattcttcaaccctacaggatccaacaggcaatctcatctggcatcttacctttatcacccttgttactacaacaatcatcagccctattacaacagttacctctggtgcatttattggcacaacacatcatggctcaacaactactacatcttgtgctagcaaaccttactgcctactctcagcaacagcagtgtcttccattccaccaac

SEQ ID NO: 335777 - DNA, 179 bp, Zea mays
ttcacactttccatgaaacattaactctactttttaaccaccacgacacacaccaagtgagctctcttacaaactagggcggatatttacaacattaccacaatctagcacttcatctaattaatgtttctactccattcatcataatcttcaactcacatactctaatctctatcaac

SEQ ID NO: 335778 - DNA, 175 bp, Zea mays
attgttgccctttgtccaacttgctttgacaaacccagcagcctcctaccaacaacacatgattggtggtgccctcttttagattgcttattagttgtaattcaataataaagttttttggatgatgtatgtggccaaccagaaataagaagttacatttccagattctaatgtg

SEQ ID NO: 335779 - DNA, 318 bp, Zea mays
accaacacattactcctcttcctcacataaatttctcttaccttttaagtctttcaatcttaattctatctatcatatactttatttacatttttccatcattctattttataaaatatcttcctctttatctttcgacatactattcatcaatcatacttaattcaattcttactacataccatctatcattgatcattactattattttaaccctattctaaactatccaaaatctatcccttcaatcacattatcttttatctcattcttaacatttaacattttttcttatactactttttacatctatatact

SEQ ID NO: 335780 - DNA, 82 bp, Zea mays
ataatgggttcgagagtgttgtccaaaaagtattcttatggagggtgtgctgtaaagatcaaatatgatagtgggtatatac

SEQ ID NO: 335781 - DNA, 82 bp, Zea mays
agaattggttctagagttttgtccaaaaagtattcttatggagggtgtgcgagaaagatcaggtatgatagtgggtatatac

SEQ ID NO: 335782 - DNA, 453 bp, Zea mays
ctctcaaagattcagattctcagtaccctgttacatatttaaatggctgtcgggactttcacatctcaatctgctttcacatatatacataattacaatctttacaacttacttcactaacagtgtgcatccacacaccttatcatatcaatccacctcatcttaaaatcttctttctcattcaaaacttcttctcatcaaatcatacacaatcatgcaatccttccacctatcacgctacgcaattttaataacaaatccaaaacctctctgtaaactctcatatgcacctcagaatccatcaataccttcaccttccaataacttaattatcttcaacttgtttactctttctcatctccttaactgtatacacaatctccccccactttgcaacccatctataaatacccttcttatctttcttcaccccacaaactcatcttttccata

SEQ ID NO: 335783 - DNA, 311 bp, Zea mays
cttatcctctttacatctccactcattcaactcatcttcctcaaaacttatcagtcatcaaactattataataattattattcaaaaccatactattatctctacattcccacactctcaattcctcctcaattcatctcacaatatattactcttaattcataccactcatattctaatatctatatattcacactctcacatccaacacatttctcctctctctacaccaactacttctcctacaaaccttacaccttcatacatcactacaaacactactaactctctcatatctactaatccccttt

SEQ ID NO: 335784 - DNA, 84 bp, Zea mays
aatactccttctataatactacataatctcatatataacaaaacacaatcataaaaaaaaaaaaaaaaactacctctctatata

SEQ ID NO: 335785 - DNA, 70 bp, Zea mays
  unsure (1)..(70): unsure at all n locations
aaccccgggcgaccacgcgtccganggagcccacgctgaggcgaaccagcagggagcggcagcccaggct

SEQ ID NO: 335786 - DNA, 95 bp, Zea mays
  unsure (1)..(95): unsure at all n locations
nngagagcccaancggngcagccgaccaaccggcttagggcggggtaatacgcagacaaagaagagaccaaagagaggggggagaggcctatgga

SEQ ID NO: 335787 - DNA, 250 bp, Zea mays
gctgcgtcgtcccaggcgtgacggcaagactgttctaggtggctttgtctgatgttcatttggtggctttggctcagcagtttttgctgggtgctaattgagcggtgtttttgggttagtcgtctttatttgtgtccattgaatccttgctggtctagcttggcgtaattcagttggggacgttattttgtcttttaagtgctgatattgtctgccttcagtaaagtaaagtggaaaccatgaaccaaag

SEQ ID NO: 335788 - DNA, 365 bp, Zea mays
acggcaaactgtactacgtgcatttctctgattatcatctcgtacttaaggctcatcagctgcgtctctatgctaatctcagctaccatctcatttaactcattctattcaagcacaacctataccaagctcaactacacatttcaataatcccattgagtacatcatctcatatcttaagcgcatatatcggccgctcaaagacttgtaagaaaagcaaccctgcaccaaagaatcgatattcaagcttcagcataagaagctccactgttcaatctaacgcttatacaactgttttttgtttacaactagaccaaaaccatgcttcatttcatcccaattacatccatgttactttttaatcc

SEQ ID NO: 335789 - DNA, 134 bp, Zea mays
gcgatctgaagcgactagtcgaaggcggcggcggctgcgatggggagcgacctggagacgtgatggaagaagaccccggtggctctgatgcccatcgcgaagtgtgttggtggaaagaagctctgcaagcggac

SEQ ID NO: 335790 - DNA, 443 bp, Zea mays
caacaagcaacatagaaagtggaatccagtagcaacaatagagcaacaatggcgaccaagagattttccctccttatgctccttgctctttctacatgtgttgctaacgcgacaattttccctcaatgctcacaagctcctatagcttcccttcttcccccataccttccatcaattatagcttcaatatgtgaaaacccagctcttcaaccatataggcttcaacaagcaatcgcagcaagcaacatacctttatcgcccttgttgtttcaacaatcgccagccctatctttggtgcagtcattggtacaaaccatcagggcacaacagctgcagcaactcgtgctacctctgatcaaccaagtagctctggcaaacctttctccctactctcagcaacaacaatttcttccattcaaccaactgtctacactgaaccctgc

SEQ ID NO: 335791 - DNA, 338 bp, Zea mays
cggacgcgcgggcggacgcgtgggcagacgcgtgggctccagtcatacagaatccgggtcgccctcagcttcgagggggttcagtatcaactgggtgatatctgcctgaggataggaaaatgtgttcccaataattctgatgcactggtaggaatcatgatgtaggtagagtattatcccctaacttccattgcaatatgcaaggcagtcatggaggacttctttgacatatggcagggaacaatttcgaagaagtcattacctgggcaaattattcatggagaactcaacttttcacaatatggtcgttcagatcaatattcatttccacatactgc

SEQ ID NO: 335792 - DNA, 120 bp, Zea mays
gacacgcactgcagcggctcattaaactccacctacgtacgctgctacacgcatcgctaccgctgaacttgccagctctgtatcacctagttgtttcgctttctgctgtctacttgtagc

SEQ ID NO: 335793 - DNA, 233 bp, Zea mays
tcgacacgcgttcggccacacatacggttctatatctcaaacattcaatctagggaatcttagagtactttcacttgcatccgatttcataaatcttttataaactaacttaaattcaatccactgaccaatattaataaatgctgttactttaaaaaacttggatctacataacataattgacttccaacacatacaactatcgcaagatgtcttaataacaatcaaactta

SEQ ID NO: 335794 - DNA, 444 bp, Zea mays
gtggaggcttaaaagtgcagtgctctctatggcctccggcgcaaatgcagtggaatcatgcgacacaaggtcaatcgtgtgaggaattggtccccaaccggcatcccacaagttaaacagagaaggggattctttgggttttggttcagaactcccgtgtagatgatttcccagttattacgggtttctgtccatatttcgggaatattttaaactctgttgacattctattgtgtaacactaacactgtgtggcgcactctggttgccgcaagctgccggcatactacaggctctagcccgtcaacgccatgttctaggcatccacggcgtctggcgcggccacgacggccaatggcatcgattgtcatgcgtggagcaacaactgacgggtgttgtgtttccagtgcgacgcgtgcaaggaccgatggtttagttcatagat

SEQ ID NO: 335795 - DNA, 328 bp, Zea mays
gccacgccttcgaacacgcgtgctctctatcgtctgcggacccgatgcattgcaataactgaagactagggagaggccgtgacgaattggatgtcagccatggtgacagacgttaaaccgacaacgggattcttagccttctagggatcatctgcggtctagatgatctcctaattattacggatgcctagaccatatcttcgagatcattaaaacgtacgctcgacatctgctcttgtgtaacagataacactcgtgtgagaacactctgcatttgccgaagctacctgattgctacatgcattaagtgcgaaacgaactgtgctag

SEQ ID NO: 335796 - DNA, 224 bp, Zea mays
cccacgcgtccgctccaaacgcaggagagcctctagcgccgccggtctctggagcctcggagcacaccggcgccggcgctagtgaccgatgcagcctacggattccggcggcgatggcatgtaagggagggaagggtctgctggcagccaagacgacggcggccaagagcaccgacttggacaaggacaggaagaaggccctcgtgtcacgctcctgccgaacc

SEQ ID NO: 335797 - DNA, 96 bp, Zea mays
  unsure (1)..(96): unsure at all n locations
cccacgccggncgctgaaccctgctgcggagncgcagctacaaccactaccaaagacccagctagctacggcctactctggacaacaacaacttct

SEQ ID NO: 335798 - DNA, 368 bp, Zea mays
aaaaaaaaaaaaaaaaaaaaaaaaaaaaataaaaaaaaaaaaaaaaaaaaaagaaaaaaaggtaaaaaaaaaaaaaaaaaaaaaaaaaaaaaaaaaaaaaaaaaaaaaaaaaaaaaaaaaaataaaaaaaaaaaaaaaaaaaaaaaaaaaaaaaaaagggggggcttttttaaggtttcaaagtttacataccggtgatttcatattaaaatttttttaatggggtcctttaatttaaattaattgccctttttttaaaaactttgtacttggaaaaacctggggtttcccaaattaaaaccctttgaaaaaaatcccctttttgcaagtttgttaataaccaaaaggtccccaacaatttgcttttc

SEQ ID NO: 335799 - DNA, 443 bp, Zea mays
ccaactagcaacatagaaagcacaatagtgtaccaacaatggcagccaaaatattttgcttgcttatgctccttggtctttctgcaagtgctgctaccgcgaccattttcccgcaatgctcacaagctcctatagcttcccttcttcccccatacctctcatcagcggtgtcttcagtatgtgaaaacccaattcttcaaccctacaggatccaacaggcaatcgcagcaggcatcttacctttatcacccttgttcctccaacaaccgtcatccctattacagcagttacctttggtgcatttgttggcacaaaacatcagggcacaacaactacaacaacttgtgctagcaaaccttgctgcctactctcagcaacagcagtttcttccattcaaccaactggctgcattgaactctgctgcttatttgcaacaacaacta

SEQ ID NO: 335800 - DNA, 453 bp, Zea mays
gcgccaactagcaacatagaaagcacaatagtgtaccaacaatggcagccaaaatattttgctgccttatgcgccttgatctttctgcaagtgctgctaccgcgaccattttcccgcaatgctcacaagctcctatagcttcccttcttcccccatacctctcatcagcggtgtcttcagtatgtgaaaacccaattcttcaaccctacaggatccaacaggcaatcgcagcaggcatcttacctttatcacccttgttcctccaacaaccgtcatccctattacagcagttacctttggtgcatttgttggcacaaaacatcagggcacaacaactacaacaacttgtgctagcaaaccttgctgcctactctcagcaacagcagtttcttccattcaaccaactggctgcattgaactctgctgcttatttgcaacaacaactaccattca

SEQ ID NO: 335801 - DNA, 76 bp, Zea mays
ccgcccacgccgtgctcgctgaactcctgggctgcttaaatttgcagcaacaacctattatccatttagctcagct

SEQ ID NO: 335802 - DNA, 343 bp, Zea mays
aaagaataatcgtagtcatctttcagaaggtatcacacagaacacgatatcaggggtacacgggcgtctacaaacagcgtggtgagctaaatctaaggaacattatctcatatataatctacctcaactatcaccactatagccttttatactcattgggagagctttcctaaattaaaatacttaaaaggtcgttcgtttcataaagatccaatcatcaaatacgctactatagtaccaacttaattattttattttaacaactaaatacatggtaatgcacggcgaatcccaacttttcatctgattaaacaatttctcttcgcacattaatatcaataaa

SEQ ID NO: 335803 - DNA, 54 bp, Zea mays
cccacgcgtccggatcacactcgtacagagaaggacaaacatccccaaacccta

SEQ ID NO: 335804 - DNA, 160 bp, Zea mays
cggacgcgtggggcacaagcatacgtctctaccatctgaaatccatcccataaatacacaaggccagtgtacaatgtgatactaggtgctacgtgcctttctttttttaatctgtgctgcactcttgcctgtatgggctgttttgttgttgggttccggt

SEQ ID NO: 335805 - DNA, 304 bp, Zea mays
tgagacaggggatgcacacgctctagcttatgcagtgtcctggtgatctcggaccactcttcgtcagcgaagcacgttcgactcacagcactgtcgctgactacgacaacgccacctccatcacagagcacgaccatgacatgagagtcctctgcaaaatctgagagctcagcgctgtcagatctgacatctgagtcttacctatatcatatctgagatctgcacagcaccctgcgagtcaccctcagccaactacatgctcgtccaccagaccacaagttattcagcgaagactagaacaacc

SEQ ID NO: 335806 - DNA, 419 bp, Zea mays
ccacgcgtacgaacagatgcaagacgacctgacacagggcctggacacggtctaccttatgcagtctcctggtgatatcggaccactcttggtcaacgaagcacgtttgcctcataaggctgtcactgcctacgacaccgccaccttcatcacacagcacgagcatgacatgcgctacctctccaacatccgatagctcaacgccgacagatctgacatctgacttaaccgattcaacatctgagatttgcgcaccacactgccactgtgcctcagtcaactacatacttgtccaccagaccacaacttcttcaccgacgactgatacaaccacttcctctccagctgagaccgccgctgctcgttctccaccttctcgctgacgacaactactactgccaccaccaccaccactacca

SEQ ID NO: 335807 - DNA, 201 bp, Zea mays
aattaaacttgtgtcataaacatacatcttttctcatctataaaccatcccataaatacacagcgtcaatattcaactgcgataatatgttctatctacaataacttcatcttaatctgaactacacatcattaatgaccctcacgttctacttcttagcttctaccataccgacatccaaattcacaacaccgaccgttc

SEQ ID NO: 335808 - DNA, 244 bp, Zea mays
  unsure (1)..(244): unsure at all n locations
ctgggccgcggctgtggcctttgcgctgagacttgcaaggaacgccggcgagagggccgagcagacaggcaggcgcacagcacagacacagactccgacatccnagagaaccggccggacagcgctcccgatggcagagcaagtacaagatgcacagaaacgaatgagacgacgaccacccgcagaacaaggagaagaaagacctagccctcgagcggctgcaccacggaaggcgcctactgtc

SEQ ID NO: 335809 - DNA, 237 bp, Zea mays
ccgattcccggtcgacccaggcggacgcacgcgttcgccacgcgtccgcccacgcgttcggccagtagcttcaggacgtgagctccgggtgccgttgcgaccatcatccggagcgtggtcaggggctacgatgaggccatgccgacgatcgaaaaaggctggtggccatgggggcgggaacatcatgcatcaacgtagacctgactagaaggacacgaaccctactactacttctgc

SEQ ID NO: 335810 - DNA, 245 bp, Zea mays
gcgcgcacgcatccgcccactcttccgaacacttgcaataccacgacttagacggatcacaaagaacacagggcacaccacaaatgaaagcattgacacacatgactacaaaccatgtctctacccttaacttccttgacccttcttcttctccactgtatccatgctacacctgtttttcactcataaactaccttaatcctcttaactctcgatatataacctttactgtttcacctaaattc

SEQ ID NO: 335811 - DNA, 374 bp, Zea mays
cgacccactcgtacgcccacgcatccgcccactcgtccgtccacttgttcgatcactcgttcgaccaatcatacagaagaccgtggatcattaatataaagggagtgacatagataactacaaatgatatcactacctcttatctccatgacaattcctcttcttcactctatgtatgatacaccacctttccagttaacaactaccttaattatctataactaacactgtttaacattaaatgattcagctaacattacaaaaatcctggataacaacatatctccaaccataactcatagtttaacaatataccgacctatataatattatcctataacaattccaactttttaactgcacaaatatatttt

SEQ ID NO: 335812 - DNA, 329 bp, Zea mays
gatcaaccaagtagctctggcaaacctttctccctactctcagcaacaacaatttcttccattcaaccaactgtctacactgaaccctgctgcttatttgcagcaacaactattaccatttagccagctagctactgcctactctcagcaacaacaacttcttccatttaaccaattggccgcactgaaccccgctgcttatttgcagcagcaaatactactaccatttagccagctagctgcagcaaaccgtgcttccttcttgacacagcaacagttgctgcctttctaccagcagtttgcggctaaccccgcaaccctcttacaaa

SEQ ID NO: 335813 - DNA, 268 bp, Zea mays
acgcgtacgtacggttgttaaaacgacttatgcagaaccttctcaattggggctatcgtgcactaacaaaaggaatctgatcaaaccatttatcttgctgtactatctatatgcagtgatcctcatcgctgcgatggtcgctgatgagccatcgaacgatcaggaaaaatgaacacatcgaatccacgacgagcttagtgaatgcgatgacgtgcagcgaagccttttaagcgaaacgaaattccaactaaatcatgatacccatcac

SEQ ID NO: 335814 - DNA, 64 bp, Zea mays
cggacgcgtggggcgatgctaaattaaagaacctctgttaccttactttaaaaaaaaaagaaaa

SEQ ID NO: 335815 - DNA, 369 bp, Zea mays
gccagccgtgcaccatcgatgtcggcaagaacgagctcgtcctcacggagctggagctgctgagcgatgggcccaacgtatgcaacctgcatccaccgctgctggttcaacaagaccattctggaggccaaggccatcgacaagaatcgcatcgagtacatctacgatgagctgaaccggatggatcgtgcgctcaaagacttggatgaaatgctatacaacaagaaggaatccatattcaagatgcagcagaagatgcacgctgtacaagctaatgcttagacaaccgtctgtaggatgcaactagtccaaggccattcttcattttataccaattacctccatgacttttactcgcggcgaggaatc

SEQ ID NO: 335816 - DNA, 90 bp, Zea mays
cagacacattagcggactccaggtggcgatatattcgtctcgtacaatactaataaataggggctgacgatctagaacacacacgcttac

SEQ ID NO: 335817 - DNA, 100 bp, Zea mays
  unsure (1)..(100): unsure at all n locations
gccacacatnaggtcgacccaaggggccaggatgcacgctcatggccgaggacaagtacaacagggcgtggcgatctataaggcacacactaactacaac

SEQ ID NO: 335818 - DNA, 320 bp, Zea mays
cccacgcgtccgatcgacgccaacggcatcctgaacgtgtctgccgaggacaagacaacggggcagaagaacaagatcacaatcaccaacgacaagggccgtctctccaaggaggagatcgagaagatggttcaggacgctgagaagtacaagtctgaggatgaggagcacaagaagaaggtggaggccaagaactcgctggagaactactcctacaacatgcgcaacacgatcaaggacgagaagattgcgtccaagctgccggccgatgacaagaagaagatcgaggacgccatcgacgcggccatcagctggctgga

SEQ ID NO: 335819 - DNA, 74 bp, Zea mays
aagatattttccctccttatgctccttgctctttctgcatgtgttgctaacacgacgaattttcctcaatgctc

SEQ ID NO: 335820 - DNA, 367 bp, Zea mays
cagacgcgtgtgctgactattggcagcgagtggtcttatacaccagccagcactacactgacatctctgagctccttgaccagcgtcggtagctgtagacactggaaagctgcctctctgattagttccgcatggccagacacttatcatgtagcctcttgcctagaatacgccgtgccgcctagcgcgcaaaggacaggaccatgaatgactagcacaggatggtcactatcagctggatcttctataggacagacgatgtgtaggcacttgttgctgactgtgatacgtactcagatcatgccgatagctgtcacagtttttgttacaaagtgtctatgagtgcgaaatgctggaagagcgctac

SEQ ID NO: 335821 - DNA, 326 bp, Zea mays
cccacgcgtccgctgacgcttgggcgcgagcggtattatacttcatccagctcgatgctgacatctatgagctgctagaccgtcgtcgatagcagtaaacagtgcaaaggattctctttgataatttgctgaggcacagactcttatactgtagccatttagctggatacacaccgtgctacctatctaacacagcacaatgctcagacttactagacaaaaatagggactagcatatgaatctttgaaagaatagaagatgtgtaggcacttgttgaacttgcttatacagactcaagataagtctatagattacacataatttg

SEQ ID NO: 335822 - DNA, 140 bp, Zea mays
cccacgcgtacgctgactcttggtcgcgagatttattactcttcaaacaccactataaagggatcgaggatctaacatgctatcacctcaagcatcctacttttatacccttacttcctgctaatttcctcatgcctatt

SEQ ID NO: 335823 - DNA, 239 bp, Zea mays
gtcatatataatgataccccaatggctcttatactccttacctacaataataaaacaacagggcgggcgatttatattatacacacttaccatcacgatcctacccatgtacatacactttatcttgtcaggtactttatattaaatggacatatttttgcaacgtcaaataatgaaaaaacatgccattacctaactttaattattattaacacatacacatgttttcatttattgta

SEQ ID NO: 335824 - DNA, 193 bp, Zea mays
ctaatcgtgagctgaccccttttttttttttttttatcacataaaagaataacactagcgggtaggtgcacttacacagtccaaacttcctctacaactcatcattctgtaataacatcggatgtaacatggcaccactttcaaagtcaaaaatattgaaatgtcactcaagcgatagcttaaagaatgtata

SEQ ID NO: 335825 - DNA, 389 bp, Zea mays
caattctaaatggtggtcagaacggaagtgccatgtctgcgcttggctctgaactagagaatgctgcagcagccatggacaatggccacgagccatcaggtagtggtgtttagccattgggtaaagccaccagcatcatcgcgcaatgatctttgtagtaggcggtcagttggagcctgcttagagatggaatcacgtgcctgtacgttttaagagctgccacaatgatttgtcccacgtaaataagtttgcagacggtgcggctatagcaagcttgtttctcgtcttgagtcaggactgttaagaactgaagaagttcattacttacttgcgtgtagatatacttagatatgagatgttctagccatgcagcaaccctttctattaat

SEQ ID NO: 335826 - DNA, 230 bp, Zea mays
cacacgtatacgatatttaaatgggaagcgacttatgtatgctagggtctcaattggaaaatgccgcagctgccattgactattgctactagccatcatcgcccttaccttagacattggttaaacgcagcagcatgataggcgcatgctcattctggtaggctggaactcgaaccctgactagagctactatcacattcatgaactatgtaagagctcccacaatcatt

SEQ ID NO: 335827 - DNA, 184 bp, Zea mays
cagacgcgttcgctccttatgcgccgagctttttctgcatgttttgctgactcgaggctgtcgcctcagagttcacaggctaatgctgctaccttgcttcccttaaacgttacgtccatgcttacttcatcatgtctaaacacagatattgatgcctactggctggaagacgccctgtttatat

SEQ ID NO: 335828 - DNA, 239 bp, Zea mays
cggacgcgtgggcgcgagcggccgcccgcgatctataactagtcaaacccaattcttcaagcctacaggatccaacatgcaattgcatcaggcatcttacctttatcacccttgttcctccaacaatcatcagccctattacagcagttacctttggtgcatttattggcacaaaacatcagggcacaacaactcgtgctagcaaaccttgctgcctactctcagcaacaacagttacc

SEQ ID NO: 335829 - DNA, 241 bp, Zea mays
catactcgtgagcacacatctgatactctctataatagcacccaaacaccgacctctacggggtagatgtaataactctcttgaatgcaacttatcttcccaaaaataaaaactaacaaattagtttccatcttctaagcttcatagacaaaataatggaaattttattacacggattgctcaaaaaatgaataccctctattttatgtgccaatactacattatctaacttaactacccc

SEQ ID NO: 335830 - DNA, 301 bp, Zea mays
gacacgaatacgaaatctaactggccctcgacttaggaagcctaaacccttcatggcgacggaccgtgggtgcctggcaatactgctccacggggcacgcaccctatgcgacgacccttcttgtgcggcgctagactgcgggcgcggcccgctgctggacgggtggaacccgaaccctgacgcgagcgagttgcacatacaggatctaggccggcgggcgctggggcaagccaaacaccaaaagctggccgccgaacggctgaggtttcgccacctgttgcgcggctagcagcacgtcgtg

SEQ ID NO: 335831 - DNA, 242 bp, Zea mays
cgcacgcgtacgagaactaactggcgcgcgactgatgaatcccaaaatctccatggcgacgcaccgcgggtggctctcactcctgctgcttgcgggcgtcagcctatgccagacggccctgctcgcacggcgcttacgcggcgggcgcggcccgatgctgggcgggtggaacacgatccctgacgtgagcgagtcgcacatacagaagctaggggggtgggctcagagacatgccaagcacc

SEQ ID NO: 335832 - DNA, 57 bp, Zea mays
cgcacgcgttcgatcactcgttggcgagcgttgaatgattgctaggatcccaatggg

SEQ ID NO: 335833 - DNA, 125 bp, Zea mays
agacgcgtgtgctgactcttgggagcgcgttttattatatttcaagcatcacggggcggggatctatgatctcattcactatctttggtagcagcagtcgcctaaacgtatcctccttgctgatt

SEQ ID NO: 335834 - DNA, 340 bp, Zea mays
cggacgcgtgcgcacacactttgtatcaccaagtaatacattgacaggatcacaagtgggggatcaatgatctaccccactagcacctggaagacccaactgatcttcactaacttcgtaatgctatcctagcgcgctgttgcaacatctagcaccgatactttgtatgccccgtgtgatgccatgcaccaaaaccagatctctttctgctgctgaaacaaaaaccgacgtacatgagtgttctgaccatacctgccgctgtccattctctagaataacatgcgtctggagctggaagtcaaccttgcatacttcctttgtatggagctaagcattctga

SEQ ID NO: 335835 - DNA, 214 bp, Zea mays
atcaattccagactatttccacatatctccagagtggcagaatgttgttttaggacttttggcgccgggccaattgccaagatcaccattcctgagataaggaaccatccatggtgtctgtataacctgccaggtgacctaatggatgtacagtacgatgtgcaagacagtccatgagcctgatcaaccgattcaaatcatggatgagattatg

SEQ ID NO: 335836 - DNA, 221 bp, Zea mays
ggcacgcttctgctaactcaccggttcgggtttgattttttgaggaacttcgatgggcacgtacatggtaaagctctaactagatggcgtcgtaggatgttgcgtaccgatacttcattatcggactctgctgggccacggtcgaacactgattttacaacgcctacagcacataccgtgaggtactagagttcaaaatcatactctatcgtgtgacgcac

SEQ ID NO: 335837 - DNA, 248 bp, Zea mays
cggacgcgtgggacgactcttcggcgcgcgactcttaatagttcatgtctcacggtggtgtgagcgttgatggataacactagttctcatggcatgcaaattttttaacataatctccttgtaaacttgttgtagcaaatattcccaatctgttgttgagttgccagaagcccatatgctttcctagatcatcaaaaaaatatgctattgcatctggaacacgtagctaactacttgtgtaaattgac

SEQ ID NO: 335838 - DNA, 260 bp, Zea mays
cggacgcgtgggctcaccctttggagcacaaattaatatatttagtgcagcacaggggggagattcatgatctaagcgactagttcgaggggctgctgactgatcatataagtcttcatcttgctgtgctgtcgcgcctgtgccaaccctcttgatgcgactacgtagctgccggcgtggtccttcaatgaaaaaactatctgctgctgtatctgcaacgggtagctacctacatgagtcatttggccgcgcttattgag

SEQ ID NO: 335839 - DNA, 176 bp, Zea mays
cccacgcgtccgcgaagacaagctgctgctgttgtgctccgttagtgttgtataacttaggggaataccagctgcccgagatgatgcacgccttcttgctcaattacatcaccatggcaatttgtgcacatccaatgatcgacggatggatgatggttgtatcttaacacacttga

SEQ ID NO: 335840 - DNA, 281 bp, Zea mays
tcgcacaggcgtggggggagccaattgactattgggcaaagttgccgaaaaattctttgacaacctaccaggctgtaaaatggtcttccaacaagcacggggtgcccttcatccccggaagttctagcggaggacccgggtacattcccgtctcctttggagggctcaaggaaacaaacaccaccctggctgctgtaaagctcaagcgcggtctgcatgagctcgtgaccgatgcaatggtaaagtgaccgttccatgggtgtaagtaaaatctccatttt

SEQ ID NO: 335841 - DNA, 242 bp, Zea mays
aaagcgcgttggctcttttgacgggacaaagattctttctcctcgaccatatatgggtgcctggacgataaaactaacagttttgtggatccatgaagttcgctaaacaaaagtacagtgatgtccagagctatcacgcgttctcagataccgttagcctggttgagatcccatccatgatgtgagttagttgagaaaaaatgtgttgtgtagggactgaccaacttatctcgataaataaa

SEQ ID NO: 335842 - DNA, 408 bp, Zea mays
cggacgcgtgggcagcagctgcagcaactcgtgctacctgtgatcaaccaagtagctctggcaaacctttctccctactctcagcaacaacaatttcttccattcaaccaactgtctacactgaaccctgctgcttatttgcagcaacaactattaccattcagccagctcgctactgcctactctcagcaacaacaacttcttccatttaaccaattggccgcactgaaccccgctgcttatttgcagcagcaaatactactaccatttagccagctagctgcagcaaaccgtgcttccttcttgacacagcaacagttgctgcctttctaccaacagcttgcggctaaccccgcaaccctcttacaactacaacaattgttgccctttgccaacttgctttgacag

SEQ ID NO: 335843 - DNA, 122 bp, Zea mays
cgcacgcgtgcgccaaccctttggcgaacacttaaattcatctacagccccactggcgagggatatactattaatcacactatctctccgcgcagccgcttcctaatctaaccctccttatt

SEQ ID NO: 335844 - DNA, 260 bp, Zea mays
ctcacgcgtaggacaacacataggagtacagggaaatatatttacaaggctcatgcccgcggaaaagatatgactaacactggctcggcggccaaaaactctcttatcttcccatccattgtggtcttcgctaatgttcaagtcaaggcctatctaaagacgctgtaagtcacgcagtgctttgagaatgttcaacatagacccttctacccgtgcagccagtgatctatacaatttactaaactggtctgccttgggtg

SEQ ID NO: 335845 - DNA, 276 bp, Zea mays
cggacgcgtgggcggacccatgtggtcgcggcgtacccggcgctcatggtcgactacctacggcagggcgtgcacaccggtggcgcggcgcgcacgggcgcggtggccggcctgacggtgctgctgtcgatggggaactttaccgggctgagcgtcagggggtggggagccgaggagctgggtgctcggtgcctggcgcacgccgtgctcatgacggctatggcggagccccatgtgcgcccgcggtggcggacggtgacggaggagggctatttt

SEQ ID NO: 335846 - DNA, 348 bp, Zea mays
cggacgcgtgggcggacgcgtggggtcgcggcgtacccggcgctcatcgccgactacctcggccaggccgtgcccaccggcggcgcggcgcgcacgggcgcggtggccggcctgacggtgctgctgtcgctggtgaacttcaccgggctgagcgtcgtcgggtggggcgccgtggcgctggggctcgtgtccctcgcgccgtccgtgctcatgacggggatggcggtgccccaggtgcgcccgcggcggtggacggtgacggtggagggcggcatcatggactggcggcttttcatgaacacggtatgttggaacctcaactactggtacagcgccagcaccatggtc

SEQ ID NO: 335847 - DNA, 232 bp, Zea mays
  unsure (1)..(232): unsure at all n locations
cccacgcgttcgnccacgcgttcgtccacgcgttcggtcttgaaaagatatgctgaggaacaacgttgagccttcaccacatgatgaagagtggacaaattctgaggcaattggaaagttcctggcggcttttggggaatctccaaaagcattttcagcacatagaaggccaacatctcatttgtttttgcataaggggctatgtatccatcaggctttaaaaaatgaaaat

SEQ ID NO: 335848 - DNA, 220 bp, Zea mays
ctcacgcgtccgccaacacatccgagaacagggaaatttattaactgtactactgccaacgggacttctttcaagcatactatctttttgatcaaaaactgccaaaccatcctatcaatactagttttctcatagtagacattcaaagactcaaaaatgttgtcataaatcacatcgaccaatgctaaggaaaaatataaacccttcattctctggaacc

SEQ ID NO: 335849 - DNA, 278 bp, Zea mays
ggcgacgacgcgtccgacacagcttactcaactccaacaaatgcgtttcattttcactgctgataacattcaaacagtgctggttaccatcattaatgaacattcttcaaaaaaacttcttctccctaaccttttgcagtatcctaaactagcgcgccacacacctcctttaaatcttaatatatcacacatatccaggattgttattctaaacgacctttaatccctagaaattaaaagtggttgcacttataattcctaaaacaaatataatcaaa

SEQ ID NO: 335850 - DNA, 256 bp, Zea mays
cgggcgacccagcgttcgccaccgtacgaccatcttttgtgacacgtggttgcaagactacccctcgggacaggcttataaatttaccacatcctcagtttagaatcctcaccgttccaaacaagatcaataaataatggtcggtctaacatcaaaactgttatcgcaaaacggtctgttgctagtgatacgaaagaacatcttacgtgagaacactgagcacgatgtgctaccgttctcgccctgaactcacttc

SEQ ID NO: 335851 - DNA, 261 bp, Zea mays
cccacgcgtccgcctacacatacctcgaccccaccatcgagcttatctcctcccgtctaggggacgactaccacgaagcagctggtggagcataaaagccgccgatccatatcatacgaacgagttgtccactaatactccggctcatgccgtagatccctacgtacgccgtccgacagacatggtccggttctcctagcagtcgtacgtactctgatggcgctggcgcccgcgcctgcgcgcgcccgtccaccctggggc

SEQ ID NO: 335852 - DNA, 135 bp, Zea mays
cacaatgattgcacaagcctgaaagaagaggagaggtgtttatataagcactgaattgggaggctgggatgaagtaatattggctgtatgcgtttgaagtgtgagaactgatatatatctgaagcttaacacact

SEQ ID NO: 335853 - DNA, 224 bp, Zea mays
cgctgtaccccaccacctatgctcccctcatgttgcttcagtcattaccgtcttccgtgtgcgtcgggtcggtccatacgttccccacgtccaccgtaaccaccaccaccttcactccattcctgccaacgtcctgatccatcttcctcatctccttcaccccgccgcggtgccccatgagcgcgccagggacatcttcatggtcttcatcgtgctcctctttg

SEQ ID NO: 335854 - DNA, 358 bp, Zea mays
atttgcaacaacaactaccattcagccagctagctgctgcctacccccaacaatttcttccattcaaccaactggcatcattgaactctcctgcttatttacagcagcaacaactactaccattcagccagctagctggtgtgagccctgctgccttcttgacacaacaacagttattgccgttctacctgcacgctgcgcctaacgctggcaccctcttacaactgcaacaattgctgccattcaaccaacttgctttgacaaacccagcagcgttctaccaacaacccatcattggtggtgccctcttttagatttcttatgagttatagttcaataataaagttttttgtctgat

SEQ ID NO: 335855 - DNA, 219 bp, Zea mays
tcgaagacatcgttattggatcacctcttgctatgagtgtccatcaaatacattcgtacaacaatttttgctgaatggggcatgctcctcaaatgccccatctgagcataccatatactggacctcaaagaacacgccggctatatcggccacgactatgcccaacactagtgaacttccatgaacaagctcttacttcaaaagagctactagctgcct

SEQ ID NO: 335856 - DNA, 289 bp, Zea mays
accacgcgtccgaggacgcgtgggataaacacacgaagcgaagcgcactagactggacctaacaacaatggctaccaagatattagccctacttgcgcttattgccctctgtgtgagcgcaacacatgcgctcattatttcacaacgctcacttgctcctagtgccataagtttagagtatgtccgaccagctacattgatgggcttcgaacacctagctgtgcaagccaacatgcaacaacaagcgcttgcagcgagcgtcttacaacaaccaattgcccaattgcac

SEQ ID NO: 335857 - DNA, 262 bp, Zea mays
ttccggaattgaccgcatcgatccacccatgcgttacagaaaagtccgaatggcacaatgcttcttgcctatcttatgcttagagagggctttactcttgcgaaaggctgcaacttactgaacaaagtgcaccctgcagcgcagacaaacgacggctttggaaaggctctcctggcccttgacaagaagctgcatggctaggtatttatggactggcaacacaagcggccagaaatgaaggtgtgtaccatcttcaacaaga

SEQ ID NO: 335858 - DNA, 167 bp, Zea mays
caacaattgctgccattcaaccaacttgctttgacaaacccagcagcgttctaccaacaacccatcattggtggtgccctcttttagatttcttatgagttatagttcaataataaagttttttgtctgatgtttgtggcttcccagaaataataaagtccatttct

SEQ ID NO: 335859 - DNA, 57 bp, Zea mays
cggagctgagtctattataaacatcttggtctgaacaacatttctgtaatagactag

SEQ ID NO: 335860 - DNA, 96 bp, Zea mays
ttatgagttatacttcaataataaagttttttgtctgatgtttgtgcttcctcaaaaataataaagttcatttctattttgattatttatttaatt

SEQ ID NO: 335861 - DNA, 323 bp, Zea mays
ctggtgctcatgacatactcgccggacttcttcaaggtgtcccttgacattgccaaggagacttggatcgtcggcggtgatgacgcggtcctgcgctgccggagctggaagagatgatcgcagtgactgttcaacaaggaatgtatgtgccttttgtttaccttttactcctccgcttgctttttttcttctttttttccgacactcttgatgattactactactcttgcataaggctcgtgtgaagggtacgatcagcacacagcagaattggtttagccaaagccactgtatgtctgtattggcctcaccctgcaaaacat

SEQ ID NO: 335862 - DNA, 432 bp, Zea mays
  unsure (1)..(432): unsure at all n locations
cttgattctgcagattttactgaagtgcagcgtatcagtcaaagcaaggatgctgtacagagtcctttgcagattcaggatgggaagcctgttgattcagagacagcagattcaatatttattgaagacttgatattgcagttttgtgatgatcatcagatgcaatggcgctgtccaaattgtaccaaggatcatgaggagccaagtgccagtgaaagtaaaaatggtgagcagatggtgggaagcggcaaagaagacacaacagttgttggggaccagattgaacaatcagacaggaaagcaaggcacagtaaagaatctgaatgtcacggaggtaatctttcagctgcaaaacagactgagctgttgggaaccaaccaaactgcagatgacagcaaacaacttatgatgcatcncgagaacgtgaaggaa

SEQ ID NO: 335863 - DNA, 343 bp, Zea mays
  unsure (1)..(343): unsure at all n locations
tcgacggacgcaggcaggccatcaaagatttatttccacactactcaaatgcagtgtatgctggatgtggaaataggggcacagacaagcttagcgggggcaaggctgggnttcctatgggcaagaccgtcaaaataaaccccaagggagaaggggcagtgaaccgacgggtcgatgcaaagacgaacacatcctagcatgctcgtgtccacgggaaggaagctccaatatcgacgtganctgaacaggaagacgacaacgcctggaattacagaaagaagccaacgcctgatgtggatttgagagggacaagacaaggctgcacaacaacactgcactaatt

SEQ ID NO: 335864 - DNA, 189 bp, Zea mays
gtcgtggacgtgctgttgcaatgcgtgctcgggctgctgctggtcgtggtggtggtcctgttggacagaggtagcgcgcctcctgtgaggaggcagattctaaatggcggtttttctcggcttgctgaggctgctgtctgagctctagacgctgtttcggagaaaagctgtgctaactgaacatttatc

SEQ ID NO: 335865 - DNA, 149 bp, Zea mays
tcggggagcttctgtactcgcagttctacttgctgtgaggcaacgtacggcaaagcttaagcttgggtttacattggttataaattattagattagatgttgactgtaagactatcctggtattttctgcttttacattgtttgtttcc

SEQ ID NO: 335866 - DNA, 310 bp, Zea mays
  unsure (1)..(310): unsure at all n locations
gggcacagcagctgcagcaactcgtgctacctgtgatcaaccaagtagctctggcaaacctttctccctactctcagcaacaacaatttcttccattcaaccaactgtctacattgaaccgtgctgcttatttgcagcaacaactattaccattcagccagctagctactgcctactctcagcaacaacaacttcttccatttaaccaattggccgcactgaaccccgctgcttatttgcagcagcaaatactactaccatttagccagctagctgcagcaagccgtgcttncttcttgacacagcaaca

SEQ ID NO: 335867 - DNA, 93 bp, Zea mays
tcgcccacgcgtccgtccacgcgttcgggcagtttcagtgtgagcaatgacctgaatgaacaattgaaatgaaaagaaaaaagtattgttccc

SEQ ID NO: 335868 - DNA, 306 bp, Zea mays
cacacctagcgaagcgcactagcaacgacctaacaacaatggcttccaagacattatccctccttgcgcttcttgccctttttgtgagtgcaacaaatgcgttcattattccacaatgctcacttgctccgagtgccattattccacagttcctccctccagttacttcaatgggcttcgaacacccagctgtgcaagcctataggctacaacaagcgcttgcggcgagcgtcttagaacaaccaattgcccatatacaacaacaatccttggcacatctaaccatacaaaccatcgcaacgcagc

SEQ ID NO: 335869 - DNA, 439 bp, Zea mays
cacacctagcgaagcgcactattttcgacctaacaacaatggctttcaagacatgtatccctccttgcgcttcttggcctttttgtgagttcaacaaatgcgttcattattccacaatgctcacttgctccgagtgccattattccacagttcctccctccagttacttcaatgggcttcgaacacccagctgtgcaagcctataggctacaactagcgcttgcggcgagcgtcttagaacaaccaattgcccaattacaacaacaatccttggcacatctaaccatacaaaccatcgcaacgcagcagcaacaagcactgagccacctagccgtggtgaaccctatcgcctacttgcaacaacagctgcttgcatccaacccacttgctttggcaaacgtagcttgataccaacaacaacatcatttgcaacagtttc

SEQ ID NO: 335870 - DNA, 238 bp, Zea mays
cttttaaaccgattagcaacatgctgagcacgttaagccaccaacagatggcgctaaaagatgacaccccattgtgctatattggcctttctgcatgaaacgttcccgatgccatgcatcactggtgctaccactcacgtataacttggaacagttctccgtacctataacgatgagtgtctgttgtttatgctaacgcaattgtttgaccctcttggttccacccggcaagaagctc

SEQ ID NO: 335871 - DNA, 92 bp, Zea mays
  unsure (1)..(92): unsure at all n locations
attctagatcgcaggcagccgctctagattttttaagtttacgtactccttcattgcgcggcttanaatgttagaggagaggcaggctatcc

SEQ ID NO: 335872 - DNA, 69 bp, Zea mays
  unsure (1)..(69): unsure at all n locations
atgctcgagcgggcgtcaatgtgatggatatatgcacacttccancacactggcggtcgtaactattgg

SEQ ID NO: 335873 - DNA, 344 bp, Zea mays
tcttgagaccacctttcaacatagaaagctcaatagtgtaccaacaatggcgggcaaaagattttgcctacttgaggctccgtggactttctgcaagtgctgctaccgcgaccatttttccggaatgctcacaagctcctatagcttaccttcttccgccggacctctcaccagcggcgtcttccgtatgtgaaaacccaattcttcaaccctatatgatccaacaggcaatcgcagctggcatcttaactttatcacccttggttcttcaacaattaatagccctattacagcagttacctttggtgcctttattggcacaaaacaagagggcacaacaacta

SEQ ID NO: 335874 - DNA, 441 bp, Zea mays
  unsure (1)..(441): unsure at all n locations
ttgagaccaactagcaacatagaaagcacaatagtgtaccaacaatggcagccaaaatattttgcctccttatgctccttggtctttctgcaagtgctgctaccgcgaccattttcccgcaatgctcacaagctcctatagcttcccttcttcccccgtacctctcaccagcggtgtcttcggtatgtgaaaacccaattcttcaaccctataggatccaacaggcaatcgcagctggcatcttacctttatcacccttgttcctccaacaatcatcagccctattacagcagttacctttggtgcatttattggcacanaacatcatggcacaacaactacaacaacttgtgctagcaaaccttgctgcctactctcagcaacagcagtttcttccattcaaccaactagctgcattgaactctgctgcttatttgcaac

SEQ ID NO: 335875 - DNA, 282 bp, Zea mays
cgccgtccagatcgaagctaagagcgccgccgctggccacggcggttcgtgctgcggtgaagccgcctggtacgatcttcctcgccggagtccctgggaaggccatggtgtctgtgtgtttgtggctcgaccggagacaaccacttgcgtgaggggtgagggtgacaatggcaaccgagaattactacttaataaggagtatatatgtacgaaacgacgcaacgcaatcaccggctaattaaggggccgcttagttgcacttttggaccgattttattttat

SEQ ID NO: 335876 - DNA, 270 bp, Zea mays
acctgacccgccgcagccaaaccctctccagcagccgtcgtcgccaccgctgcagcgcggaggcgacccccatcgccgccaagatgcagatcttcgtgaagaccctgacggggaaaaccatcacgttggaggtggagtcctcggacaccatcgacaacgtgaaggccaagatacaggacaaggagggcatcccgccggaccagcagcggctcatcttcgccggcaagcagctcgaggacgggcgcaccctcgccgactacaacatccaga

SEQ ID NO: 335877 - DNA, 424 bp, Zea mays
caccaatgctgtgaggtcatggtgcagtatctattaacattggaacataacagtgatatgtagatcgttgataggggcgctacggatgtggaagctagaaagaaactggagtttcatatggaaggcgtaagcttagcaagaccagataaggccaagcctaagggaagaacaatcaatagtagtgagcaacaagttcttaaattgggtgcgaaaggacctaagaagatgagcaggaagtgccagaaatgtggcatatttgatggtcacaacagtcgtacgtgtttaactgtggaggataatagggttcgattagctgacttatctggacgtaagcgaggacggactcctgcttcaaggaacaaaatcatagctgcagcaccacatcggaatgagacattaacgtcgaaaaaacaaacggtggatg

SEQ ID NO: 335878 - DNA, 330 bp, Zea mays
cccacgcgtccgcccacgcgttcgcggacgcttgggcggcgactttggtggcgataagagtggagctcctgctgaggtccagccatctttcatgagttctggcgcgaggcctggctttggccgaggaggtggcagcggctttggcgctggcccgacctcttctttcatggagtgaacagtgaagctgcccttagtttggacatgatggttcccctcccgtggaggcggtaattttgaagaacgggtattaatgactagtaatggtttccggttcggctaggctgacatgcaaaaaacaggggccataattaaacattgggggccactttc

SEQ ID NO: 335879 - DNA, 220 bp, Zea mays
aaaaaaaaaaataaaatatttatagaaattattgattataaaaaaaaaaaaaatattaatgggaaaggggaaataaataaagtaaaatataaaaataaaaattgtaaaaaaaaatttaaaaaaaaaaaaaaaaaagggggggctgtttaaaaggatcaaagctaattaacgcgggtttgcaatgaaatagtcttgtaaaaggggaacataaattaaatta

SEQ ID NO: 335880 - DNA, 395 bp, Zea mays
  unsure (1)..(395): unsure at all n locations
gctggctacatattagttgggaatacaacagatatctgatcgatcagtatgcagaaggaatgtagaagcattctatcaactcatgattggaggaactctgggattgtaacttgtgattccatgttctgtggcagagttattagttttggctgcctgctgatgtccagtagcataacaatgggtccttgggcttgaagtcgtgggattttgaggcactatttttaccgacgagaatttcctcttctgtattttatcgacttgcttcatccttaaaacatgcctttggtacattgttaacccatttcttcactggtgatcttcatatattatgcagngaccgctgttctgattttattgctgatgctggcccgacatccattgcattagaagctcat

SEQ ID NO: 335881 - DNA, 318 bp, Zea mays
cccacacgttcgtctacatcgcgagcggcgccctttttttttttttttttttttttgtttggggtttttttttttgtgtgttgggttttttttttttttttttttttttttttttttttttttttttttatttttttttttaacgtttttgttttttctgttacttcaacaaaaaaaaaagaaatgagcggtggaaccccaccgcccagtttttctttttgctatcgtgatcttaacccaaaaacaagagggttataatttttggtgtcgtttttttttttcaatttgtgttttttgaataaaaggtcttttttaaaa

SEQ ID NO: 335882 - DNA, 429 bp, Zea mays
cccacgcgtacgaacaacttgtgctagcaaacctttctccctactctcagcaacagcagttgcttccattcaaccaactagctgcattgaactctgcttcttatttgcaacaacaacaactaccattcagccagctacctgctgcctacccccagcaatttcttccattcaaccaactggcagcattgaactctcctgcttatttacagcagcaacaactactaccattcaaccagctagctggtgtgagccctgctaccttcttgatacaaccacagttgttgccgttctaccagcacgctgcgcctaacgctggcaccctcttacaactgcaacaattgctgccattcaaccaacttgctttgacaaacccagcagcgttttaccaacaacccatcattggtggtgccctcttttagatttcttatg

SEQ ID NO: 335883 - DNA, 72 bp, Zea mays
gcagattcaagtttggtacaatattatcggtttctctatatattatatataaaaaagaaaaagggtagcata

SEQ ID NO: 335884 - DNA, 170 bp, Zea mays
tcgttatgaaatactaacacgaactatgacgagtttcgcataagatattgacaggaatgaacggggggagctgtgtgtagcacctgcatcaaacattcatgcgggtactttgataaagggactagtggaaagcaagcaaatggatgcggactgagctgccatctacatca

SEQ ID NO: 335885 - DNA, 62 bp, Zea mays
cccacgcgtccgcccacgcgttcgcccacgcgttcgcccacgcgtccggttctagatcgcga

SEQ ID NO: 335886 - DNA, 447 bp, Zea mays
cccacgcgtccgcaacaagcaacatagaaagtggaatccagtagcaacaatagagcaacaatggagaccaagatatgttccctccttatgctccttgctctttctacatgtgttgctaacgcgacaattttccctcaatgctcacaagctcctatagcttccctttttcccccataccttccatcaattatagcttcagtatgtgaaaacccagctcttcaaccatataggcttcaacaagcaatcgcagcaagcaacatacctttatcgcccttgttgtgtcaacaatcgccagccctatctttggtgcagtcattggtacaaaccatcagggcacaacagctgcagcaactcgtgctacctgtgatcaaccaagtagctctggcaaacctttttccctactctccgcaacaacaatttcttccattcaaccaactgtctacactg

SEQ ID NO: 335887 - DNA, 394 bp, Zea mays
  unsure (1)..(394): unsure at all n locations
cccacgcgtccggtgggttggcttctcctccccctccggttcgggttcgggttcgtgaggttctccggggttcggtttcgtgggtgagcggatcgagatggcggcgtcggatgttgagtaccgctgcttcgtcggcggcctcgcctgggccacggacgaccactccctccacaacgcctttagcacctacggcgaggtcctcgagtccaagatcatcctcgatcgggagacgcagaggtcccgcggcttcggcttcgtcaccttctccacggaggaggcgatgcggaacgccatcgagggcatgaacggcaaggagctggacggccgcaacatcaccgtcaacgaggcccantcccgcggcggccgtggaggcggcggctgcggcgggtaccgt

SEQ ID NO: 335888 - DNA, 101 bp, Zea mays
aatctgatctcgatcgcgagccgacgctttacagttagagacttacgtcctcctgtgggccaccgcgtacggcttatatggtgtcaccttaatttaattca

SEQ ID NO: 335889 - DNA, 298 bp, Zea mays
cccacgcgttcgcccacgcattcgaaaactggtggtcaagcgctttgactttggttgggggggatctatttgggtggaaccggggatgtttggcctacctgaccaattggtgacagggatgcattgtttggtatttgggattaaaaaatggagaaccttggcctgaaaaaaaatggttaggcaatgatgtgatccctgtgaagtggtggctttttttgattggataacaatatctgctttcatgctaataatttgaatgctccgttggcgtggatccacaccacttacggcatgacag

SEQ ID NO: 335890 - DNA, 382 bp, Zea mays
acagttttacagctgaggaacgattctttcttctcttcacatgcacggaaatttgggtccttattggcgtacaaacaaacaaggcaaagagcaggagccacgcaagggaatttggtcctgctgctccaacaggcgagacggcgacgggtggccagaacaatgcagccaaatgatcataggaatctacagttgtcgccatcgccttcgtgttctcgacagcgctgaaccgcgggctccgcctcctcgccgccggcgccgaggcgtccaaaccagcttctcgtggattccatgccaccggcgtgaagagaatgggagggcatggccatgatgagccatactacatccatgccaagcacatgtataacttgcacaggatgaagca

SEQ ID NO: 335891 - DNA, 346 bp, Zea mays
  unsure (1)..(346): unsure at all n locations
gctttatctactccagagcgcagaagaacccgatcgacaccatgagggtgttgctcgttgccctcgctctcctggctctcgctgcgagcgccacctccacgcatacaagcggcggctgcggctgccagccaccgccgccggttcatctaccgccgccggtgcatctgccacctccggttcacctgccacctccggtgcatctcccaccgccggtccacctgccgccgccggtccacctgccaccgccggtccatgtgccgccgccggttcatctgccgccgccaccatgccactaccctactcaaccgccccggcctcagcctcatncccagccacacccatgccc

SEQ ID NO: 335892 - DNA, 277 bp, Zea mays
aaaaaaaaataaaaaaaaaaaaaataaggtttaaaatactttaaaactcaaaaaaaccaaagggggaattggataacaaaaaatggggttctataaacataaaatataacttaaaaacttttatttactcctatttaaaaacataaaaaaaaaggggggcgccctttttaaaaaatcaaattttttttccctttttttccaccgtttttttttttttttaggcccccttaatttcatttttttgcccccctttttaccacctgagaattggaaaaac

SEQ ID NO: 335893 - DNA, 284 bp, Zea mays
agcacgcgtgggagacgcctgcatcgattgagccattactggaacatataacctttcgtgacgttatgcttgtacatccaaaacgcaacttatgatctgacatcatattggctactaacactcatctacatcatgcgatcctgcgcctactgaagatactgacatcattcaaccgattcagtttaccatcatcaactacctgctgtacgaagagactgaataaaatgaatagatggctaggggcgaacctattgggatgaaacctccttccaaaaaagcggata

SEQ ID NO: 335894 - DNA, 333 bp, Zea mays
cccacgcgtccgcaacgacctaacaccaatggctaccaagatattagccctccttgcgcttgttgcccttttagtgagcgcaacaaatgcgttcattattccacagtgctcacttgctcctagtgccagtattccacagttcctcccaccagttacttcaatgggcttcgaacatccagccgtgcaagcctacaggctacaactagcgcttgcggcgagcgccttacaacaaccaattgcccaattgcaacaacaatgcttggcacatctaaccctacaaaccattgcgacgcaacaacaacaacaacagtttctgccatcactgagccacct

SEQ ID NO: 335895 - DNA, 331 bp, Zea mays
cccacgcgtccggttggcttctcctccccctccggttcgggttcgggttcgtgaggttctgcggggttcgggttcgtgggtgagcggatcgagatggcggcgtcggatgttgagtaccgctgcttcgtcggcggcctcgcctgggccacggacgaccactccctccacaacgccttcagcacctacggcgaggtcctcgagtccaagatcatcctcgatcgggagacgcagaggtcccgcggcttcggcttcgtcaccttctccacggaggaggcgatgcggaacgccatcgagggcatgaacggcaaagagctggacggccgcaacatca

SEQ ID NO: 335896 - DNA, 170 bp, Zea mays
  unsure (1)..(170): unsure at all n locations
tntacacctgtccctgcgcccaatgcacctccataccttcatcaacaatattttcaacacggggtactgaataagactcatcgggttgtggcaaacactgctcgctactttgctcctgtgctatccttcatcccactgactatgttgaactcttgtgcggaccttccact

SEQ ID NO: 335897 - DNA, 375 bp, Zea mays
  unsure (1)..(375): unsure at all n locations
ggtgggttggcttctcctccccctccggttcgggttcgggttcgtgagggtctccggggggggggttcgtgggtgagcggagggagatggcggcgtcngatgttgagtaccgctgcttcgtcggcggcctcgcctgggccacggacgaccactccctccacaacgccttcagcacctacggcgaggtcctcgagtccaagatcatcctcgatcgggagacgcagaggtcccgcggcttcggcttcgtcaccttctccacggaggaggcgatgcggaacgccatcgagggcatgaacggcaaggagctggacggccgcaacatcaccgtcaacgaggcccantccctcggcggccgtggaggcggcggcggtgggt

SEQ ID NO: 335898 - DNA, 110 bp, Zea mays
  unsure (1)..(110): unsure at all n locations
ccactccctccacaacaccttcatcacctacaaaaaagtccttgagtccaacatcaatcctcatctggagacacanaagtcccccggcttctgcttcttcaccttcttca

SEQ ID NO: 335899 - DNA, 393 bp, Zea mays
  unsure (1)..(393): unsure at all n locations
gttgagtaccgctgcttcgtcggcggcctcgcctgggccacggacgaccactccctccacagcgccttcagcacctacggcgaggtcctcgagtccaacatcatcctcgatcgggagacgcagaggtcccgcggcttcggcttcgtcaccttctccacggaggaggcgatgcggaacgccatcgagggcatgaacggcaaggagctggacggccgcaacatcaccgtcaacgaggcccantcccgcggcggccgtggaggcggcggcggtgggtacggtggtggccgtggaggcggcggctactgcggtggcgggcgccgtgatggcggtggcggctaccgcggtggcggcggctaccgtggcggcggcggctactgtggtggtggcggcggc

SEQ ID NO: 335900 - DNA, 203 bp, Zea mays
  unsure (1)..(203): unsure at all n locations
aatctgtatgtgatacacatntcacctgaacgccattgcttgtatcgacgactcactttatggagaaatgtaaatttacagttgggtagtgttgacctatattatcatttgtcaagatatgcagaggaacaacttttttaactatttgacctatttgtccgaggaagcgatgcggaacgccatctaaggggtgaacggtctag

SEQ ID NO: 335901 - DNA, 285 bp, Zea mays
taccggtcgaccgcacacgacggcaaaaaaaaaaaaaaaaaaaaaaaaaaaattttaatacttttaaaaaaaaaaaaaaaaaacggggaaaagggaaaagaaaaaagggggggcctcttataaaaatcaaaattaactaccccttccttgcaaagaaaaacttttttatatgggcaccctaaaattaaattacttgccctcgttttaaaaaatgcgtaatgggaaaaacccgtgcgtaaccaaactaaaacgcttttaaaaaaaacccctttttacacaagggtt

SEQ ID NO: 335902 - DNA, 152 bp, Zea mays
gcaaaaaaaaaaaaaaaaaaaaaaaaaaaaaaaaaaaaaaaaaaaaaaaaaaaaaaaaaaaagggaaaaaaaaaaaaaaaaaaggggggggccgtttaaaagaaccaaacttacctaccccggccttccaacgaaaaacttttttattgggg

SEQ ID NO: 335903 - DNA, 265 bp, Zea mays
gcaaaaaaaaaaaaaaaaaaaaaaaaaaaattttcaacattttaaaaaaaaaaaaaaaaaaaggggaaaaggaaaaaaaaaaaaagggggcccgttttaaagaaccaaacttacctaccccggccttccaaaaaataacttttttttttgggcccccaaaattaaattactggcccccggtttaaaaccgcgggaatgggaaaaaccctgcggtacccaaattaaatacctttgaaaaaaatccccttttgccaactgggggaat

SEQ ID NO: 335904 - DNA, 183 bp, Zea mays
gcggaaataaaacgcctccttgaaacatctattttcaccatttgtatttaaacaaaaacagcgggggtaactgaactacaaagcggggggacttacttcttgatcaacatgccgtggccctcttatccaaatatgactctttttaaggcttgctctagagtcaataaaaaagcctacgttttt

SEQ ID NO: 335905 - DNA, 76 bp, Zea mays
cccacgcgtccgccattccacagtcaccaaagcattatagcaaagcaacaactgacaagagcagagcgagatcgtc

SEQ ID NO: 335906 - DNA, 76 bp, Zea mays
  unsure (1)..(76): unsure at all n locations
cccacgcgtncgccattccacagtcaccagagcactagagcagagcaacaactgacaagagcagagcgagatcgtc

SEQ ID NO: 335907 - DNA, 201 bp, Zea mays
cacgacccctcttcggattcccagtacctctcttggccggacgcttggcgcggcccacagtgcgtaaaaatgcgccaggcgagagcatggataacatcatcagcctgatccttatcaccattgaacacttcaccatgtgccagcttaggattgtccttgactttacagcgccccacgcacagagagccctgagtaccactg

SEQ ID NO: 335908 - DNA, 287 bp, Zea mays
gccactatatgcttaatccagcgacctttatctcattcagcactaggattctcatatggcgggtcatttataagcgtgccatgtgcccactaaacttgttcatcattttagatcaattctgttcccttttgtccgactatgagcttgcttttgcttatactcacccacacaataatgcttgtctgagaagtggggccttctgtaataagtgattaattttttaaatcctaaccctttaggttttcaaatttatctttcgccttaattcgaaaaaaaaaatataaaat

SEQ ID NO: 335909 - DNA, 371 bp, Zea mays
ttgagtgtcgcctgcggtccgtccgaattcccgtcgcccacgcgtcgtggattcatgataatgcttgagaactgaaattcccgtttcatgctaaaaaaaaaaggagggtaataaacaaataaaagggagaaagcaaaaaaaatcatgagaaaaaaaggaaagaacattggagggggaccaggtttgctgctcgtgcatgcaaccccattcctcttacatatggcatccttatgggggggcccctttttggggttccacctttcgggggcgtggattggcccttatgtttttttttttggggcccccaaatttactttccggggcggggttttaccatattcgggatggggaaaccccgggggggccctact

SEQ ID NO: 335910 - DNA, 199 bp, Zea mays
cgtatgcttccatcggccggagctgctgccctttaacagcgcggttcgcacaaatattcactggtgatgcactaccacactgagagcgacgactaccttgaggcgtgatatacgggcaagcagctactactgggtctcatggtctagaagacttgcgcgccgatcatgctccgccttgcaagacactcctgagacacct

SEQ ID NO: 335911 - DNA, 219 bp, Zea mays
cttcacacggaatttgtggacacttttgatattgtacttgggagttccctctatatcacatgggtgttctgagcacatgattggggtcttctcacatgcactcatgtaacgaataaagtcttttgtttaaaaaaaattggcatgtgcatcgtgacaactcttttcccctggcatatcgctatccataaaaccacccctacctgatagcctcctataggg

SEQ ID NO: 335912 - DNA, 361 bp, Zea mays
cgcactcgttcgatattctagagtatattctcttgctaactacttattttattcatttacgggtcattattgagcaggcatgtggtccacaatactcatgcttgcagtatcatcaatgatcaattatccttatcaacaattgacattacatttgcttatacttacctgcataataatatttttgggggaagtttgttcttttataataagtgttttattgttagaaatcctaactcctttagttgggagatttatatatatacttatttataatataaaaataaaataagacatgacggtctggattatttaaacttacatacttcttgcattcggacagtataacttttttatttttttt

SEQ ID NO: 335913 - DNA, 200 bp, Zea mays
cccacgcgtccgcaacttgctttgacaaacccatcagcgttctaccaacaacccatcattgggggtgccctcttttagattgcttatgagttatagttcaataataaagtctttcgtctgatgttcgtggcttcccagaaataataaagcccatttctaaaacaaaaccagcataacataaactcagacaacaaaacaaa

SEQ ID NO: 335914 - DNA, 372 bp, Zea mays
acgcgtccggacgcacgaggggttcgttattgcctattgtcataaccacaccgcgcatggccagtccttcagggcgcagaggatctgcttcaactaagcccaagcactactctccagacctccaccaaggagatggaccccatccttctcaggaacttgaagcactaactgaatgtcattatcaggagctgccaagctgagccacacgattgatatcttgcgctcgcttgctgcgacaaattcatctatagcatcgctcgcgtctcatgtgtgatcttaatatacacatccgtgctattcaaggacatccattaactgctgctgaactggtcttatcttgtctgtgcccctatatggacctttttacactat

SEQ ID NO: 335915 - DNA, 164 bp, Zea mays
cccacgcgtccgcggacgcgtggggtttttccctgacgcatacttggctgatacctttgtgagtacatgactaccaggcgagtattggcaaagaaaaatgcttctgttcgtgatgcccagggtacagtgtaatgttcacgaactgcggctgtgcgttgtgttaa

SEQ ID NO: 335916 - DNA, 362 bp, Zea mays
gccaagaactcgctggagaactactcctacaacatgcgcaacacgatcaaggacgagaagattgcgtccaagctgccggccgatgacaagaagaagatcgaggacgccatcgacgcggccatcagctggctggacgccaaccagctcgccgaggcggacgagttcgaggacaagatgaaggagctggagagcctctgcaaccccatcatcgccaagatgtaccagggcgcgggtgaagacatgggcggcgctggcggcatggacgaggacgcccctgccggcagcggcggccctggccccaagatcgaggaggtggactaagcggtttgttgtcagtcttgagtgtgctgcacgtgctggct

SEQ ID NO: 335917 - DNA, 159 bp, Zea mays
cggacgcgtgggcggacgcgtgggtggtactccaatcatcgtgtacaaaaccatattgtattacatgcaagtgcgagtgagatttaagcgtaaacagattgttgtagaattcgtacgaattttacagagcagaaacaatgggatgcagggattgccagt

SEQ ID NO: 335918 - DNA, 395 bp, Zea mays
cggacgcgtgggcgaaggctaggggggcactctcatcatcaggctcaaaaccatattgtacgagggggcaaatacgggggagagtgcgcctgaaaggaatgtggaggcaatcaatcacagcagccccaaaagaggctcgcaaggggctgaattccttaataatcttggtggcctgggagttatggaagcaccgtaatgcttgtgtttttgagaaacataagcttaggattcaagatggtcttaattatagtagcttggagggaaacctgtggggtttggcaatgggacaccaaactcaaagtacttgggcgtaggtggacaacgtcttatactggaaaaacacatggcgggtacccaacttaaatccgttttgaaataataatgcccctttattg

SEQ ID NO: 335919 - DNA, 179 bp, Zea mays
ggcctacgacccaggggctgcggtcttacataacctaaattctattcactgcacgtccttatcaacactgtccactgaaaaaccctaacgctacccaacttaatccccttataatacattctcatttttccacatagtgcaattatataataggcccgcacccatcttcctttcaaaca

SEQ ID NO: 335920 - DNA, 81 bp, Zea mays
ctcaaattccgtctaggattgcattttcaagctagcccctagaggtactatggatccctctggggacttgtgacaacgttg

SEQ ID NO: 335921 - DNA, 216 bp, Zea mays
aaaaaaatatgggaattatattaattaaaaataacaaacataaaggtgcaaatctgataaataaacttactacacttcttactaataaaaaaaaaaaaaaaaagttaactaataaaaatcaatttataaactaaaactaaaaatctgatttattttttattattcaatcaaaacctttttttcaattttataaaaaaaaatttcataattaattat

SEQ ID NO: 335922 - DNA, 104 bp, Zea mays
cccacgcgtccgcccacgcgtccgcccacgcgtccgcccacgcgtccgcccacgcgtccgcggacgcgtgggagagttcactctagcatggaattggtttgaac

SEQ ID NO: 335923 - DNA, 150 bp, Zea mays
gacaagcaaagacataacacttcgataagggcaaacaaaaacagaaaaagggccggcggttaacaacgccaagaaagggaaaacccaggccgtaccaaacaaaagcgccaagcagcaacaaccccctagagccagccagcggaaaagcga

SEQ ID NO: 335924 - DNA, 207 bp, Zea mays
cccacgcgtcgggacggagcgcactgcgaaggacgagtgcgggatcttaatgacctacactagggtgaactgacatcatcacatcatcctcctagtactgcactctggtcttcatacacgacggtggctcaccaacagccggcacctgcatcgtgccgactgtgccatccagcacaaccgcttccataactccactcctacctgacc

SEQ ID NO: 335925 - DNA, 91 bp, Zea mays
aaaaaaaaaaaaaaaaaaaaaaaaaaaaaaaaaaaaaaaaaaaaaaaaaaaaaaaaaaaaaaaaaaaaaaaaaaaaaaaaaaaaaaaaaag

SEQ ID NO: 335926 - DNA, 226 bp, Zea mays
cgcgccaaaaaaaaaaaagaagcaagagaggaaaaaattaacaggaaaaggaaaaggaaaataaaagggggggaaaaaaaaaaaagggaaggggaacggcgcccgttacaaaggacaaaggataaataaggggggaatgcaagagaagagagcaactacggggaacacaaacaacacacaaagaacagcaaggaaagaggctgataacagaaagagaggaaagggg

SEQ ID NO: 335927 - DNA, 293 bp, Zea mays
cctcccacgcgtccgattttaagcacagacccacgcgatcctctaaccctaaagggcccaagccgggcgggccactggtccaggtcatgtacaatcttgtctagcacgacgagctaatgagcactacggaagaagtagatctagtcgctaacactgacgcattaggatccgacgactcttacgtaccagagcacctcgttaactatctcagcgagctagacatagctgccgacttagacaagctaggatcctggcttgactatgtcgacgatatgatatcatatgacatggcc

SEQ ID NO: 335928 - DNA, 361 bp, Zea mays
cagcaatttcttccattcaaccaactggcagcattgaactctcctgcttatttacagcagcaacaactactaccattcagccagctagctggtgtgagccctgctaccttcttgacacaaccacagttgttgccgttctaccagcacgctgcgcctaacgctggcaccctcttacaactgcaacaattgctgccattcaaccaacttgctttgacaaacctagcagtgttctaccaacaacccatcattggtggtgccctcttttagatttcttatgagttatagttcaataataaagttttttgtctgatgtttgtggcttcccagaaataagaaagtacatttctaaaaaaaatcgcga

SEQ ID NO: 335929 - DNA, 101 bp, Zea mays
ccctagtatttaatatcgacccgactggattttttgaattctagtggatatttacagcaagggcgggctactaccatggaggtcggggtgctgagtgtgag

SEQ ID NO: 335930 - DNA, 440 bp, Zea mays
  unsure (1)..(440): unsure at all n locations
aaaaaaaaaanaaagggaggaggaaaaaanaaaaaaaanaaaaaaaaaagaaaaaatgtttttaaaaaaagaagaaaaaaaattatanagagagaaaaaaagaggaagaaggggattttttaatataataaaaaaaaaaaaaaaaaagaatataaaattatataaaaaaaaataaaaaaagataaaaaaaataaaaaaataaaaaaaaaaaaattaaataaaaaaataaaaaaaaaagtaaaaaaataattattaaaatagaaaaataaaaaaaatataaaaaggtgaaagtaaaataaaaaaaaaaaaaatataaaataaaatatattaaaataaaagataaaataaaaaaatattaaaattaaataaaataaaataaaaaaaaaaaaaattaatgaggaatgtaaaaaaataaaaaaaaaaaaaatgtatataattat

SEQ ID NO: 335931 - DNA, 274 bp, Zea mays
aaaaaaaataaaaaaaaataaaatcaccacaattattaaaaaaaaaaaaaaacataaaaaaaggggaattaaaaaatgaggggggcacaaaaaaactcaaaaaaaaaaaaaaaaaaaaaaaaaaaaaaaaaaaaaaaaaaaaaaaaaaaaagaaaattaaaaaaaaaaaaaaaaataaataaaaaaaaaaaaaataacaataataaaaaaaataaataaaaattcaatacaaaaaaaaaaaaaataaaaaataaaaaaaaaaaataaataaaat

SEQ ID NO: 335932 - DNA, 435 bp, Zea mays
tgagcattcagaaacacacctagcgaagcgcactagcaacgacctaacaacaatggcttccaagacattatccctccttgcgcttcttgccctttttgtgagtgcaacaaatgcgttcattattccacaatgctcacttgctccgagtgccattattccacagttcctccctccagttacttcaatgggcttcgaacacccagctgtgcaagcctataggctacaacaagcgcttgcggcgagcgtcttagaacaaccaattgcccaattacaacaacaatccttggcacatctaaccatacaaaccatcgcaacgcagcagcaacaagcactgagccacctagccgtggtgaaccctatcgcctacttgcaacaacagctgcttgcatccaacccacttgctttggcaaacgtagctgcataccaacaacaaca

SEQ ID NO: 335933 - DNA, 298 bp, Zea mays
acaagctgtacagccacccgtcacctctctttttgaatctattcaggatgctagaatggatgggatcattcacctagatactgaggactctattcatcaagctggtgcccgagagtactgtcctaaggcgattgcttttacatgtccctgacaaccttgacatggttatcttccccacttatcaaagcaacattgaccgtatgacattaatgatccacttactgaggcctttataattgcacctacaggaactcatgaagatatggggacccggtcacacccttagcccctcgtttac

SEQ ID NO: 335934 - DNA, 371 bp, Zea mays
gcgttaaaatccctttggggatttgaggcttctatttctaccccttaagggtcttattttccctcgttgtatttggttcaactttcgggaagcataaggtgtcaaaaaagagggacaaacttgccgaggtcaccaaagagttgagcgagttgaaacaaaaagtaagcgagagtgttgaattggagaggaaggtgcaggaccttgagcagaagctgcagctagcttattccaagtctgacgaacaagcagtggatactgtggagtcgagatcccgtgaattcagcctggattcatcaacgagttcatgcaatcatcatgacaaaactcatgctgtctcaccaaacccaaccctgcaaggagtgcaagaacct

SEQ ID NO: 335935 - DNA, 244 bp, Zea mays
gcgtacgctgactgcttggtctgacacgttgacttttttttgtgcggtcgcgtggttctaatggagaggggcttatcattatattccggagggaaccatggctatcaatatctcagggtctgtaacaaggattatataatcttctaacattagagcgtgggttcttgagaacgctactctaggttgtgcgtcgtttaataatatctggctactgtaaggcatccttgattggtttggtttttta

SEQ ID NO: 335936 - DNA, 327 bp, Zea mays
  unsure (1)..(327): unsure at all n locations
ctttctatctatatctgtaataatgcagtaagacgacacacattatcatgtgtggtatgaccaataatatatgcatgatcataataaagttttggttttaaaaaaaaaaaaaaaaaaaaaaaaaaaaaaaaaaaaaaaaaaaaaaaaaaaaaaaaaaaaaaaaaaaaaaaaaaaaaaaaaaaaaaaaaaannaaaaaaaaaaaaaaaaaagggggaaaaaaaaaaaaaaaaaaaaaaaaaaaaaaaaaaaaaaaanngggggggggccttttaaaaaaaaaaaatttttttcccgggggaagaaaaaaaaaaattttttattagggg

SEQ ID NO: 335937 - DNA, 265 bp, Zea mays
ctttctatctatatctgtaataatgcagtaatatctacacacattatcatgtgtggtatgaccgaggaatatatgcatgatcataataaagttttggttttaaaaaaaaataaaataatataatttatattattaaatatttaaaataaataataaaattttattattaaataaataaaaatttaaattatatttttatattcattaaataatataaagataataaaaattttatttttttaaaaaaataaaaaaaaaaaatatt

SEQ ID NO: 335938 - DNA, 92 bp, Zea mays
ggacagccgaacatgtccaaccattttttaaagttcaattcatgtacaatgatgagtgatgaataatgaataaagatttgcagcttcttgtg

SEQ ID NO: 335939 - DNA, 323 bp, Zea mays
ctggcatcattgaactctcctgcttatttacagcagcaacaactactaccattcagccagctagctggtgtgagccctgctgccttcttgacacaacaacagttattgccgttctacctgcacgctgcgcctaacgctggcaccctcttacaactgcaacaattgctgccattcaaccaacttgctttgacaaacccagcagcgttctaccaacaacccatcattggtggtgccctcttttagatttcttatgagttatagttcaataataaagttttttgtctgatgtttgtggcttcccagaaataataaagtccatttct

SEQ ID NO: 335940 - DNA, 392 bp, Zea mays
ggtgggttggcttctcctccccctccggttcgggttcgggttcgtgaggttctccggggttcgggttcgtgggtgagcggatcgagatggcggcgtcggatgttgagtaccgctgcttcgtcggcggcctcgcctgggccacggacgaccactccctccacaacgccttcagcacctacggcgaggtcctcgagtccaagatcatcctcgatcgggagacgcagaggtcccgcggcttcggcttcgtcaccttctccacggaggaggcgatgcggaacgccatcgagggcatgaacggcaaggagctggacggccgcaacatcaccgtcaacgaggcccagtcccgcggcggccgtggaggcggcggcggtgggtactgtggtggcccgtga

SEQ ID NO: 335941 - DNA, 102 bp, Zea mays
cgtttgttcattgcttagagttgggtattcatggaagcaatggaggactcttgtactactattttgttgtcaataatcatgaaaccctcccccttttggact

SEQ ID NO: 335942 - DNA, 174 bp, Zea mays
accgatgcacaattcccgaatcgacgcacgcatccacgcgtgcgtatagcttaaaattggagcttcatagaaacaaacttagacacttgaactaataagggtgctgtcaacaattataggacccctcccctttttgactgctaaataaaggctttaacaatgtgcagacaaaat

SEQ ID NO: 335943 - DNA, 68 bp, Zea mays
atttgcagaaatttatatttaccaaaacccttctaatattttaaagggcccccgagactctttggggg

SEQ ID NO: 335944 - DNA, 218 bp, Zea mays
caatacttcacttctttgctttcttcggtgccccagtagctggagctgtggatgagacacggggtgaagtattgaaataaagctgtagctttctagtccagtactgcactttcttttataagctctagacaaatcttggagcgcctgaactgttttgctgttatataacttagcgtattgataaattcgactatcacatctggattattctgctggat

SEQ ID NO: 335945 - DNA, 215 bp, Zea mays
accacacattcgcccacgcatgcgctgtctcatccgtgttttctgagaagctttacaccaacggaggcgggggcattgtactaggcaaaaaagttgccctctacaacaattcaccctgtgatcatgattctttatcatcgcactcacaattctcttcttgataacacgccccctgtcattgaattctactatgcacacaacataatggcaacttc

SEQ ID NO: 335946 - DNA, 234 bp, Zea mays
gcaacatagaaagcacaatagtgtaccaacaatggcagccaaaatattttgcttccttatgctgcttggtctttatgcaagtgctgctaccgcgaccattttcccgcaatgctcacaagctcctatagcttcccttcttcccccatacctctcatcagcggcgtcttcagtatgtgaaaacccaattcttcaaccctgctgctattgcctgttggatcctgttctacatcgcga

SEQ ID NO: 335947 - DNA, 176 bp, Zea mays
gtccgcatgtatggtatccgagtctggcaaacttattttgaggctgtttaaatatataccttttgtcggtcaagatgttaaataaagcggattaacttccacttaaaaaaaaaataataaaataaaaaaaaataaaaaaaaaaaaaatatataaaattaatatataaaaaaaagat

SEQ ID NO: 335948 - DNA, 282 bp, Zea mays
cggacgcgtgggttgcttctgaaagcgcaactataaataatgcttatcctgctggggtacgggacaccagagggtgggtgaggcagtatagagagcgacgtcaaagcatgatctctatgcatcaagatttgtcttctaagctattcggaagtacgcttaaaccctgcattagtggacgggggaacgaaataacgggatttaacgacttgtttcatttcaaagcacattgagttattgtctcaaaaacaaacgttggcgcaataactacaacaatatttttaa

SEQ ID NO: 335949 - DNA, 169 bp, Zea mays
cccacgcgtccgtctagatcaaagcattgcgacatggggtacaaaaagagtttttttagctggttacatcgactactggtacatttgaaaaggcatattccccatctttgtggcaatgtcggggcgataccatgctgggccgagaatttttaacgaagttatacttttg

SEQ ID NO: 335950 - DNA, 437 bp, Zea mays
gagcattcataaacacacctagcgaagcgcactagcaacgacctaacaacaatggcttccaagacattatccctccttgcgcttcttgccctttttgtgagtgcaacaaatgcgttcattattccacaatgctcacttgctccgagtgccattattccacagttcctccctccagttacttcaatgggcttcgaacacccagctgtgcaagcctataggctacaacaagcgcttgcggcgagcgtcttataacaaccaattgcccaattacaacaacaatccttggcacatctaaccatacaaaccatcgcaacgcagcagcaacaagcactgagccacctagccgtggtgaaccctatcgcctacttgcaacaacagctgcttgcatccaacccacttgctttggcaaacgtagctgcataccaacaacaacaaca

SEQ ID NO: 335951 - DNA, 437 bp, Zea mays
ctagatcgcgggcggccgctcagcaacatcagtttcttccattcaaccaactggctgcattgaactctgctgcttatttgcaacaacaactaccattcagccagctagctgctgcctacccccagcaatttcttccattcaaccaactagcagcattgaactctgctgcttatttacagcagcaacaactactaccattcagccagctagctgatgtgagccctgctgccttcttgacacaacaacagttgttgccgttctacctacacgctatgcctaacgctggcaccctcttacaactgcaacaattgctgccattcaaccaacttgctttgacaaacccagcagtgttctaccaacaacccatcattggtggtgccctcttttagattgcttatgagttatagttcaataatgaagttctttggatgatgttt

SEQ ID NO: 335952 - DNA, 320 bp, Zea mays
gaactctcctgcttatttacagcagcaacaactactaccattcagccagctagctggtgtgagccctgctaccttcttgatacaaccacagttgttgccgttctaccagcacgctgcgcctaacgctggcaccctcttacaactgcaacaattgctgccattcaaccaacttgctttgacaaacccagcagcgttctaccaacaacccatcattggtggtgccctcttttagatttcttatgagttatagttcaataataaagttttttgtctgatgtttgtggcttcccagaaataagaaagtacatttctagattctt

SEQ ID NO: 335953 - DNA, 368 bp, Zea mays
  unsure (1)..(368): unsure at all n locations
cgctgcttatttgcagcagcaaatactactaccatttagccagctagctgcagcaagccgtgcttccttcttgacacagcaacagttgctgcctttctaccagcagtttgcggctaaccccgcaaccctcttacaactacaacaattgttgccctttgtccaacttgctttgacaaacccagcagcctcctaccaacaacacatcattggtggtgccctcttttagattgcttattagttgtaattcaataataaagttttttggatgatgtatgtggccaaccagaaataagaagttacatttccagattccttannnaaaaaaaaaaaaaaaaaaaaaaaaaaaaaaaaaccccnncnnnaataat

SEQ ID NO: 335954 - DNA, 254 bp, Zea mays
tctagaattacttatactactacctctctcacaccttcgtgaatattctacgcgacgagggcccctctcatctttaccattttcttacacccatcctcatccgcttatttccctactcctcctgttacttttactcctactagactcttaaactgctctaccctcttaccaccataccttgtttcctctcttactttttccccttttctactcttctcatctcatcctctgattctccattttcatctctttca

SEQ ID NO: 335955 - DNA, 349 bp, Zea mays
aaaaaaaaaaaaaacaaaaaaaaaaagaagaaaaaaaagaaaataaaaaaaaaaaaaaaaaaaaaaaataaaaaaaaaaatataaaaaaaaaaaacaaaaagaaaaaaaaaaacaaaaaaaaaaaaagaagaaaggaagaaaaaaaaaaaattaaaaagaaaaagaagaaaaaaaaaaagaaaaagaaaaaaaaaagaaaaaggaagaaaaaaaaaaaaaaaaagtaaaaaaagaaaaaaaaaaaaaaaaaaaaaaaaaggagaaaaaaaaaaaaaaaaaaagaaaaaagaaaaaaaaaaaaaaaaagataaaagagaaaaaagaaaaaaaaaaaaaaaaaaaaaaaaa

SEQ ID NO: 335956 - DNA, 165 bp, Zea mays
gccgtcacgcgtccgctccgtgcattacaaagcgaaccctatccgagattaaatagcaggcgagggcgggcaacggaagaagagggggacactatgatcgtacccagcagcaaaaaagcggtcgtcttccgtctaatagacccccgtcgaggtggcggacagggt

SEQ ID NO: 335957 - DNA, 296 bp, Zea mays
acccacccgggtgttatctctacttcagcactgtggtctccctcccttttatgcttgctcaaccatagttcaatagctgaccacctttacatgatgcttggggggttccctacagccgagcatccatgatatctttcacacttgaaaacccacatgctataccgttttctcttccaacaacccctctctgttagcagcatactgctacaaccctggtggttggaacaatagcccaccctactcactgtgctagccctgcttcagaaattctggctcagcacttgtcacatctaaaa

SEQ ID NO: 335958 - DNA, 445 bp, Zea mays
accctacaaaccattgcaacgcaacaacaacaacaacagtttctgccatcactgagccacctagccgtggtgaaccctgtcacctacttgcaacagcagctgcttgcatccaacccacttgctctggcgaacgtagctgcataccagcaacaacaacagctgcaacagtttatgccagtgctcagtcaactagccatggtgaaccctgccgtctacctacaactactttcatctagcccgctcgcggtgggcaatgcacctacgtacctacaacaacagttgctgcaacaaattgtaccagctctgactcagctagctgtggcaaaccctgctgcctacttacaacagttgcttccattcaaccaactggctgtgtcaaactctgctgcgtacctacaacagcgacaacagttacttaatccattggcagtggctaacccattgg

SEQ ID NO: 335959 - DNA, 395 bp, Zea mays
cgagaccaacaagcaacatagaaagtggaatccagtagcaacaacagagcaacaatggcgaccaagatattttccctccttatgctccttgctctttctgcatgtgttgctaacgcgacaattttccctcaatgctcacaagctcctatagcttcccttcttcccccataccttccatcaatgatagcttcagtatgtgaaaacccagctcttcagccctataggctccaacaagcaatcgcagcaagcaacatacctttatcacccttgttgtttcaacaatcgccagccctatctttggtgcagtcattggtacaaaccatcatggcacagcagctgcagcaactcgtgctacctgtgatcaaccaagtagctttggcaaacctttttcccta

SEQ ID NO: 335960 - DNA, 366 bp, Zea mays
gagacgcacaagcaaaatcgtacgtgcaatcctcttacaacgacataactgcattgtctacccagaggtgctgactccgtatgaagcttgctctcactgcgtgcgatgctaaccccacaatttagactgactgctaacaagctactattgctatggttgctactgcataccgatgatcaatgatagctgacgtatgtggatacccaactttttactcctatacgctccaacaagcagtggcatcatgcaacatacgtttgtcacgcctgggagattcaacaattgccagacctatatttggtgcacgcattggtccaaaccatcacggctcatcaggtgccacaactcttgctaaatgagatcaac

SEQ ID NO: 335961 - DNA, 331 bp, Zea mays
ggttggcttctcctccccctccggttcgggttcgggttcgtgaggttctccggggttcggtgtcgtgggtgggcggatcgagatggcggcgtctgatgttgagtaccgctgcttcgtcggcggcctcgcctgggccacggacgaccactccctccacaacgccttcagcacctacggcgaggtcctcgagtccaagatcatcctccatcgggagacgcataggtcccgcggcttctgcttcgtcaccttctccacggaggaggcgatgcggaacgccatcgagggcatgaacggcaaggagctggacggccgcatcatcaccgtcaacgag

SEQ ID NO: 335962 - DNA, 345 bp, Zea mays
  unsure (1)..(345): unsure at all n locations
tctagcgatcgttatactcacaattactcataatgtattctttaggtttagcataaaaaaaaaaaaaaaattaaaataataattggattaatttatatttntttttttaatttaataattatataaaattttaattttttatatattatttattttaattaattaataataaaagggggcgccctttttaaagtatccaaccttactttcccttcctttcaacgttatattttttttttttggttcccctaaattcattttactgcccgtctttttacacctcctttcctttaaaaccccttcctttccccatcttattcccttttcttaacttccccttttttc

SEQ ID NO: 335963 - DNA, 416 bp, Zea mays
cggacgcgtgggctggcttctcctccccctcttaccaagtcctcctcgggttagggttcctgagggttttgtggaggggcgatggcggcggctgatgtggagtaccgttgcttcgtcggcgggcttgcctgggccaccagcaacgagtcgctggagaatgccttcgcctcctacggcgagatcctcgactccaaggtcatcaccgaccgggagacggggaggtcccgcggcttcggcttcgttaccttctcctccgagaactccatgctcgacgctatcgagaacatgaacggcaaggagctcgacggccgtaacatcaccgttaaccaggcccagtcccgtggcggtggcggtggcggcggtggctaccgcggcggtcgcggcggcggcggcggttatggtggcgggcgccgtga

SEQ ID NO: 335964 - DNA, 400 bp, Zea mays
aaacacaccaagcgaagcgcactagcaacaacctaacaacaatggctaccaagatattatccctccttgcgcttcttgcgctttttgcgagcgcaacaaatgcgtccattattccacaatgctcacttgctcctagttccattattccacagttcctcccaccagttacttcaatggccttcgaacacccagctgtgcaagcctataggctacaacaagcgattgcggcgagcgtcttacaacaaccaattgcccaattgcaacaacaatccttggcacatctaacaatacaaaccatcgcaacgcaacagcaacaacagttcctaccagcactgagccacctagccatggtgaaccctgtcgcctacttgcaacagcagctgcttgcattcaacccact

SEQ ID NO: 335965 - DNA, 341 bp, Zea mays
ggcttctcctccccctccggttcgggttcgggttcgtgaggttctccggggttcgggttcgtgggtgagcggatcgagatggcggcgtcggatgttgagtaccgctgcttcgtcggcggcctcgcctgggccacggacgaccactccctccacaacgccttcagcacctacggcgaggtcctcgagtccaagatcatcctcgatcgggagacgcacaggtcccgcggcttcggcttcgtcaccttcttcacggaggaggcgatgcggaacgccatctagggcatgaacggcaaggagctggacgggcggcacatcaccgtcaacgaggcccagtcccgccg

SEQ ID NO: 335966 - DNA, 160 bp, Zea mays
attctgttcacacggccacatcatcattgtcctagtttacctcgtttttattatagattcagcgcaaccaatctactagcacaaccctaagtccatgatgatgtggccgtgtgtatttaatgtattctgttcacaattatgtttcgtgctcttttttttt

SEQ ID NO: 335967 - DNA, 234 bp, Zea mays
atatgaagaatacaccttctatcaatatcttctttagacagcgtaaccttcttcttgggggggcgtcaatggccaactgggcagaaagaccaattgactacaccttctactctcatgattgcagccctcatgccgcataagccactgaggaccactaggacatctctaggataatctgcgactgcattggcgactacttcttcaactacaacatgttcatagttcagactgttc

SEQ ID NO: 335968 - DNA, 121 bp, Zea mays
caacaacccatcattggtggtgccctcttttagattgcttatgagttatagttcaataataaagtttttttgctgatgtttgtggcttcccaaaaataagaaagtgcatttctagtttctt

SEQ ID NO: 335969 - DNA, 443 bp, Zea mays
atccagatcagcaaagcggcagtgcgtagagaggatcgtcgaacagaacagcatgaagatggtcatcgttctcgtcgtgtgcctggctctgtcagctgccagcgcctctgcaatgcagatgccctgcccctgcgcggggctgcagggcttgtacggcgctggcgccggcctgacgacgatgatgggcgccggcgggctgtacccctacgcggagtacctgaggcagccgcagtgcagcccgctggcggcggcgccctactacgccgggtgtgggcagacgagcgccatgtaccagccgctccggcaacagtgctgccagcagcagatgaggatgatggacgtgcagtccgtcgcgcagcagctgcagatgatgatgcagcttgagcgtgccgctgccgccagcagcagcctgtacgagccagctctgatgcagcagcaacagc

SEQ ID NO: 335970 - DNA, 222 bp, Zea mays
aaaaaagaaaaaagagaaaaaaaaagaaaaaaaaaaaaaaaaaaaaaaaagaaaggaggaaaggaaaagagaaaaagagaaaattaaaaaagagaaaaaggagaaaaaaaaaaaaaaaaaggaagaaaaaaaaaaaagaaaaagaaaagaaaaggaggaagaaaagaaaaaagagaagaaagaaagaggaggaaaaaagaaaagagaaaaggaggaggaagg

SEQ ID NO: 335971 - DNA, 104 bp, Zea mays
  unsure (1)..(104): unsure at all n locations
attatanttatatatnttaaaatatttatttatttatgaataatttttttaggaaagtttaaattagtttagatattatataatttatttaaaaaaaaataaaa

SEQ ID NO: 335972 - DNA, 290 bp, Zea mays
ctgcatgttcgggccgaccgacgcgttctaggtcgcgtagcgcggcggtggtaaatgacttcataacttacaatactcgtgccgcgctacgtcgtggggttggtatggggacaacttaaatcccttaactgggctccattgtacggcatgtctgctgccatcacccgcgggtttcccaacttcattagcgtatatttaattcgtcgctggtcaaaatggcctatatggaacttgggccgggccgtccggcttgcctaacggtgagcaccgtgcatgtcgacccttacgcc

SEQ ID NO: 335973 - DNA, 379 bp, Zea mays
gagaacatgaacggcaaggagctcgacggccgtaacatcaccgttaaccaggcccagtcccggggcggtggcggtggcggcggtggctacggcggcggtcgcggcggcggcggcggttatggtggcgggcgccgtgacggcggttatggcggcggtggcggctacggcggtcggcgcgaaggtggcggcggcggctacggaggcggtggcggctactgcggtcggcgcgagggtggcggtggcggctactgcggcggtggcggcggcggctggagggactgatgtgtgggcccatcctggcttcggccgagttatcttatctatctatagtatcgtgttacccgtcgcttctgtcaccgcgttagtgtccgttctacct

SEQ ID NO: 335974 - DNA, 430 bp, Zea mays
ggcagtgcgtagagaggatcgtcgaacagaacagcatgaagatggtcatcgttctcgtcgtgtgcctggctctgtcagctgccagcgcctctgcaatgcagatgccctgcccctgcgcggggctgcagggcttgtacggcgctggcgccggcctgacgacgatgatgggcgccggcgggctgtacccctacgcggagtacctgaggcagccgcagtgcagcccgctggcggcggcgccctactacgccgggtgtgggcagccgagcgccatgttccagccgctccggcaacagtgctgccagcagcagatgaggatgatggacgtgcagtccgtcgcgcagcagctgcagatgatgatgcagcttgagcgtgccgctgccgccagcagcagcctgtacgagccagctctgatgcagcagcagcagcagct

SEQ ID NO: 335975 - DNA, 344 bp, Zea mays
cagaaacacaccaagcgaagcgcactagcaacgacctaacaacaatggctaccaagatattagccctccttgcgcttcttgccctttttgtgagcgcaacaaatgcgttcattattccacaatgctcacttgctcctagtgccattattccacagttcctcccaccagttacttcaatgggcttcgaacacctagctgtgcaagccaacatgcaacaacaagcgcttgcggcgagcgtcttacaacaaccaattgcccaattgcaacaacaatccttgccacatctaacaatacaagccatcacaacgcaacagcaacaacagttcctaccagcactgagccac

SEQ ID NO: 335976 - DNA, 361 bp, Zea mays
cccacgcgtccgctagttctagatcgcgagcggccacccttttttttttttttttttttttgggttttttttttttttttttgtgttttttttttttttttttttgtttttttttttttttttttttttaaaggccccaagggttttttttaaaaaaggaaacattttgggcaaacattttttaacttttgggaaaccaacattaaaattttttgggaataggtggtttaaaaaccaaaaccctcccggggaacgtaaaaattattaagttttttcgaaatcctaacgaggaaacccccttttgggggggaaattcttgaaactttgcgggggaaaaaaagccaaaaaaggttttttttcc

SEQ ID NO: 335977 - DNA, 219 bp, Zea mays
gcgacccgtcttctgacgcgcaggccctcccgtggccggacgcttggcgctgcgacaagtgagtaaatatgcaccatgcttgaccacggctagcagcatcaccatgatccttgacaccattgaacaattcacaatgaaactacttaggcttgtccttgggtttacagcgccgcaagcacagagagccctgagtaccactgccgcttgtgcggaaggtgc

SEQ ID NO: 335978 - DNA, 103 bp, Zea mays
ggactatgaggggggattaagtgggggccttttatatcaaaaaacaacaacaggtcatgctggtatacaagagcctagtttacgtgctcgcggatgccacatc

SEQ ID NO: 335979 - DNA, 260 bp, Zea mays
  unsure (1)..(260): unsure at all n locations
cggacgcgtggggccccggcctcagcctcattctcagccacacccatgcccgtgccaacagcgggatccaaacccgtgccagctggagggaacctgcngcgttngcancaccccgatcctgggccagtgcgtcgagttcctgaggcatcagtgcagcccgacggcgacgccctactgctcgcctcagtgccaatcgttgcggcagcagtgttgccagcagctcatgcaggtggagccgcagcaccggtaccaggcgatct

SEQ ID NO: 335980 - DNA, 403 bp, Zea mays
cagacgcgtgccatctgctgtagtatatcttttggctagatagctcactccatcattgggggcgcattattgagcgagtgggtgtcacacatcaccatgagtctcaataggaatctgagcaatgacctgaataaactattgaaacgcatctagtgaccaaggaatataaaatcttctactgcaccattgatataacactttggaatgattgtctccctttgtatacttgcttttctgtttacgtatgccattgtaaaccttctttttgaataactctattatgttcttatacttcgctgtatttctttattttaagaacaattttatcatgcctctactctcattgatatttcctttcattctgattaccttataatttatttttttttcaaaaatatttaaa

SEQ ID NO: 335981 - DNA, 261 bp, Zea mays
cggacgcgtggggccccggcctcagcctcattcccagccacacccatgcccgtgccaacaggggcatccaagcccgtgccagctgcagggaacctgcggcgttggcagcaccccgatcctgggccagtgcgtcgagttcctgaggcatcagtgcagcccgacggcgacgccctactgctcgcctcagtgccagtcgttgcggcagcagtgttgccagcagctcaggcaggtggagccgcagcaccggtaccaggcgatctt

SEQ ID NO: 335982 - DNA, 229 bp, Zea mays
  unsure (1)..(229): unsure at all n locations
aacccgcgcgccgtcgataaccacggccggtttcacgtcatcaccctcaccgacacnnaggaggaccaccttaacccggccctgctcttcagcctccgcttctgcgtagaagacagcccccgagcatgccccggagcgctcgttctgtcctgcgaggacaacttcttcagcaacagctactacctatcctgaacacgcgcggagccggccccagaaccggaacaccaac

SEQ ID NO: 335983 - DNA, 177 bp, Zea mays
  unsure (1)..(177): unsure at all n locations
tcgcggacgcgtgtggccccggcctcacctcattttttccacacccatgcccgtgccaacancggggtccaaacccgtgccagctggagggaacctgcngcgttntcaacacccctatcctgggccagtgcttcgagttcctgaggcatcagtgcagaccgactgctactccctact

SEQ ID NO: 335984 - DNA, 291 bp, Zea mays
  unsure (1)..(291): unsure at all n locations
agcctgtacgccacgaagaaacgcggccggttgcacgtcatcaccctcaccggagcgngggggcgccgtctcagccggggcctgggctccgccctccgctccagggacacagacgcccgccgcgcctcccccggtgcgctcgtcctggccggcgagggcaagttcttcaccaacggctacgacctctcgtgggcgcgcgcggggccagccccggctccggagcaccgcctctccactatgcgcgccgcgttccgcggtctcgtcgccgacctgctcgcgctccccgtgcca

SEQ ID NO: 335985 - DNA, 244 bp, Zea mays
gtagatcgatggaagaggggggaagaccttacatgagaccaagcgctttcaacgctttcaaggggcgtgtaccggctgtgtcgagtgcaactgtgtacataactctagtgcggatgctaacgggcacgctccgaattcaccggctaacgctcgaggccatgcgcttccgtccttctgacgcgtatcgacgagcaccgcaccacgccgactctgcttagaatgatcacccacttgaagctcctcg

SEQ ID NO: 335986 - DNA, 282 bp, Zea mays
  unsure (1)..(282): unsure at all n locations
acgagcagcacaggcatggtgaaacagctattccaaatgcaccgatcgtgcctgctgncccggggaaggaccgccccccgctggtagatcttagactccgacgacgccgacatcacagtgtacctcgtcatacatgccctgaagcacaagaactgcgtggagcgcgtcttcgtgcatcggatggacaaagccgtatggaactacttagaagggcggatccacgcgacctaaccctcgaggagagcgcagcaaataacgaggatattgaacaaaccgagatac

SEQ ID NO: 335987 - DNA, 289 bp, Zea mays
  unsure (1)..(289): unsure at all n locations
tcgcgcagtacaaccatggggaagcagctcttctacatgcaccgctcgcgccgccnnncccggggggncgccggcgcccgacgggtgcgccttcgccggcgtcagcaccgagctcacngtgtacctcgtcttccgttcgctgaagccgcaagcctccgtggtgcgcgtagccatgtaccgcatggccacggccgcctagaactcctcagangggcagtccccgccttcgtacactctcgcggcgagcgcgcggttcacggcgctgctgcacaacccgagcgaccgcgcc

SEQ ID NO: 335988 - DNA, 356 bp, Zea mays
gtgagcggatcgagatggcggcgtcggatgttgagtaccgctgcttcgtcggcggcctggggggggccacggacgagcactggctccacaacgccttcagcacctacggcgaggtcctcgagtccaagatcatcctcgatcgggagacgcagaggtcccgcggcttcggcttcgtcaccttctccacggaggaggcgatgcggaacgccatcgagggcatgaacggcaaggagctggacggccgcaacatcaccgtcaacgaggcccagtcccgcggcggccgcggaggcggcggcggtgggtaccgtggtggccgtggaggcggcggctactgcggtggcgggcgccgtgatggc

SEQ ID NO: 335989 - DNA, 365 bp, Zea mays
cacacgtagcgccggcggcggaggctatttctccgacgtcccagtcgtaaagccacaggttgcagataccttgcctgcggcggtccaactgaactaacgtatgcagtacacgaagcgatcccctgcgtgagatgacgaggctttcgacgccgatgcttatgcaccacgcactgtcactgattcggtcgaccagcgagctgttgacgtctccgtctatcgcgatcagaacactccatggttccatgcacgaataacaacggtatgcgcagattgtgttgtgattcctaaatgtatactcgctttgtgttgagcagaggcgttcttgtgtacctacgtatggctatataacacgtttcgatattttt

SEQ ID NO: 335990 - DNA, 167 bp, Zea mays
cacacataaccgtcgcctgcggagcattctttcgccaatgctacggtctgagggaaggagcggcaaccatggtgcacgtgggcggtctaccccaactattgtaagacgttcaataaaccaacgcgttcttatgagaaagagcgtctttatgctgaactgaagctggt

SEQ ID NO: 335991 - DNA, 180 bp, Zea mays
  unsure (1)..(180): unsure at all n locations
atcacacctgagattaccttttcgctgctattgtttacgatccataacagcaaacnncccagggggactctccagggaccgcccgcttctccagccgcatgnttaaccgagtttanattcttctcctcctccgccgtcgtaactatcctaatggctctcttcaccatggtcaccgccatc

SEQ ID NO: 335992 - DNA, 277 bp, Zea mays
  unsure (1)..(277): unsure at all n locations
tcgcccacagcgttcgcccacgtcgtacgaccacgcgtnntgttgacgcttgggcggacgcataaccggtggaaaagctggaagcgaggggaagagatttaacaaaaatacatctattataccatcaacctatcattgttggtggactaattaatatatacaaagagttatagattataaacacacatgacaagttggagtgttggtgtttgcctaaaaatnataatattgatccctaaaaaaaaaatatgttgcttcttgtgaataacaggactaa

SEQ ID NO: 335993 - DNA, 103 bp, Zea mays
  unsure (1)..(103): unsure at all n locations
cggacgcgtggggtgaaataagcttttactttctctctgctgtgggtgaagagactgnaatgggggaatttgtaactaacagagggccccgtggatttgtntt

SEQ ID NO: 335994 - DNA, 282 bp, Zea mays
cacaattgttgccgttctaccagcacgctgctcctaacgctggcaccctcttacaactgcaacaattgctgccattcaaccaacttgctttgacaaacccaacagcattctaccaacaacccatcattggtggtgccctcttttagatttcttatgagttatagttcaataataaagttttttgtctgatgtttgtggcttcccagaaataagaaagtacatttcttataaaaaaaaaaaaaaaaaaaataaaaaaattattaataaattaaaaaattaaaa

SEQ ID NO: 335995 - DNA, 103 bp, Zea mays
cggacgcgtggggtgaaataagcttttacttcctcgctgctgtgggtgaagtgactggaattcggaaatttggaactaacaaaaccccccgtggatttgtatg

SEQ ID NO: 335996 - DNA, 211 bp, Zea mays
  unsure (1)..(211): unsure at all n locations
cctattatttaatataatcaanttggatttttttaactttcctgcttatttactataccggtggctactaccttgcagcggggtagcccttcctatcccttgtaccttattgactcaaccacattttttccctgtttaccaccatgattgtcctaacccttcctccctcctacaactataacaataggtaacattctatcaacctcctttt

SEQ ID NO: 335997 - DNA, 312 bp, Zea mays
gaactctcctgcttatttacagcagcaacaactactaccattcagccagctagctggtgtgagccctgctgccttcttgacacaacaacagttattgccgttctacctgcacgctgcgcctaacgctggcaccctcttacaactgcaacaattgctgccattcaaccaacttgctttgacaaacccagcagcgttctaccaacaacccatcattggtggtgccctcttttagatttcttatgagttataggtcaataataaagttttttgtctgatgtttgtggcttcccagaaataataaagtccatttct

SEQ ID NO: 335998 - DNA, 152 bp, Zea mays
  unsure (1)..(152): unsure at all n locations
cccacgcgtccgcccacgcgtacgctcactcttttgctgacgcgtgcgccctcacacaacngggagaatttctgacattcaaccggcttgcttttactaacctcacagcattctaccaacaacccatcattgttggggcccacttttacatt

SEQ ID NO: 335999 - DNA, 281 bp, Zea mays
  unsure (1)..(281): unsure at all n locations
ctcgtgcgacttgaccctttactctgtttgtgttaacaaagaaatgactcntctgggggggcttctgccgtatgttaccataccgtctttcacatncgagaagaagaaagaacaactagacgtcgtactctaattatggtacccttcatgtgtgctcactcaccgctctatagacttttgattggctccaacatcttaaatttattccggccgctggaagattattgattagtcaaacccttgctgaatggaacaacataacactcacacttcttggtcca

SEQ ID NO: 336000 - DNA, 288 bp, Zea mays
  unsure (1)..(288): unsure at all n locations
tgtagatcgtgagcgggcggcctttttttttttatttcggggaactacaatatcaccncggggggtatcaggagggcgagtttgctttcacggacttaaagcccttcggttaagcacacaccaactttatcgcacgcaatcagttaacaataagagctatgcagtgaggattacacacccagacctagtaaaaggatatgggccactccatcgtagccatgaacggtcggtactttgtaggacgtcttatcttcgtggtgcctgtaccagccggcggcggacatggac

SEQ ID NO: 336001 - DNA, 288 bp, Zea mays
cccacgcgtgcgactggacgctgcagcctgtctgagtcaacaaagcgatgacgctactggcgggtcttctgcagtatgttaccatagttcttccacaagcaagaggagaaggatcactagacgtctactctaattgtggtacgcttcaggtgtgctcctcaccgctctaggagtttttgattggttcaaacatcttaaatttagttcggccgctggaggattatggtttagtcaaatacttgctgaatggaacaacaaaacacgcacactacttggtccataaagaca

SEQ ID NO: 336002 - DNA, 364 bp, Zea mays
  unsure (1)..(364): unsure at all n locations
tctagatcgcgagcgggcgcccttttttttttttttttggggaacgacaatatcatctcaggggggataagcacgacaagtttactttcacggacagaaagccctatggtaaaacacacaccaactttattgcacgcaatcaggtaacaataagagctatgcacggaggattacacaccctcacctaggaagactatatggcccactttctcgtagccttgatcggtcgggactttgtaggacgtcttatcttcgtggagcctgtagcaactggtggcggacatggacacgccttgtanctctacacctttcaaccgcgaggtcttctcataagtggtgacaggaatatgcacaaatggtgcag

SEQ ID NO: 336003 - DNA, 430 bp, Zea mays
cgtcgaacagaacagcatgaagatggtcatcgttctcgtcgtgtgcctggctctgtcaggtggcagcgcctctgcaatgcagatgccctgcccctgcgcggggctgcagggcttgtacggcgctggcgccggcctgacgacgatgatgggcgccggcgggctgtacccctacgcggagtacctgaggcagccgcagtgcagcccgctggcggcggcgccctactacgccgggtgtgggcagccgagcgccatgttccagccgctccggcaacagtgctgccagcagcagatgaggatgatggacgtgcagtccgtcgcgcagcagctgcagatgatgatgcagcttgagcgtgccgctgccgccagcagcagcctgtacgagccagctctgatgcagcagcagcagcaactgctggcagcccagggtctc

SEQ ID NO: 336004 - DNA, 190 bp, Zea mays
acctgtattaaatctactttttttctttattacctatcttcttattattccatgggggctatttatacgcgtcgggaggggcaaatctaaataaatataacttcttcacttactttggtatcttaaactagcaaacaccaccagcaaaaacttcataaccatacattcctttgtcagacctcgatctaca

SEQ ID NO: 336005 - DNA, 284 bp, Zea mays
acggagtcccggacctgtctagattctaccctggcccccaacattggcctgatgctgttgcgggggagcccagcgctgcgccctgggctttaccggcggcggaggcaaccacagtgaagactacatcgcgtgctagctccgacggtggtgcgtgccctgttgaccatagggcactcggagcgcgcgcagcttgtaagcgtttgatcggacatgtagggcaactatacatctgtggcaggtctacaactctccatcatcctgcgtgggagagaacatggttatgg

SEQ ID NO: 336006 - DNA, 236 bp, Zea mays
cattcagccagctagctggtgtgagccctgctaccttcttgacacaaccacagttgttgccggtctaccagcacgctgcgcctaacgctggcaccctcttacaactgcaacaattgctgccattcaaccaacttgctttgacaaacctagcagtgttctaccaacaacccatcattggtggtgccctcttttagatttcttatgagttatagttcaataataaagttttttgtctg

SEQ ID NO: 336007 - DNA, 195 bp, Zea mays
catgcacgcacccggaattaactgctcgaccgacgcactccgagcgcggtcatggtgcaccgactatacaacgcgtgttcacaacatcgcgcacgggctttacctccggcgacgttagcatagatccgtgcacatgcgaaaacgctcgagtctaccttatgaacctgggcgtgctagcgcccgtgtaagtgtact

SEQ ID NO: 336008 - DNA, 303 bp, Zea mays
gtgccagggtgttaacttcttctgcccactccaccggtactccatcccgcgcgagtgaacgtcagactaccggactgctatcaccgacaccatcgccaaggctaatcctgcggtgaaggcaaacacactcgtcaggatctaggggtggttgcctactgttgggtatcaagaacatcgtaaaccgcggctactcttcatgcggaactgctggcttgtcccccgcacctttatcttacatgtttgctgctacaatctggctgtgacattgcaatcacggtgcacacttgagtaacccgtctcgag

SEQ ID NO: 336009 - DNA, 418 bp, Zea mays
  unsure (1)..(418): unsure at all n locations
tcgcccacgcgtccgcccacgcgttcgcaactgtctacactgaaccctatcgcctacttgcaacaacagctgcttgcatccaacccacttgctttggcaaacgtatctgcataccaacaacaacaacagttgcaacagtttctaccagcgctcagtcaactagccatggtgaaccctatcgcctacctacaacagcaacaacttctttcatctagcccgctcgctatgggcaatgcacctacatacctgcaacaacagttgttgcaacaacagttgctgcaacaaattgtaccagctcttactcagctagctgtggcaaaccctgctgcctacttgcaacaactacttncattcaaccaactgactgtgtcgaactctgctgcgtacctacaacagcgacatcagttacttaatccac

SEQ ID NO: 336010 - DNA, 130 bp, Zea mays
  unsure (1)..(130): unsure at all n locations
acgcgtccgttcaggccttcanagaaacttgcacaactggttgctgtgcaccctatggcgcactggcacacgaaggtgcttgcatgcaaacaacatgtggtgggtaacgattttgcgtacctacaacaac

SEQ ID NO: 336011 - DNA, 365 bp, Zea mays
gattggagaactcgacaccatgaaggtgctgatcgttgcccttgctctcctggcgctcgctgcgagcgccgcctccagtacaagcggcggctgtggctgccagacaccaccgtttcatctaccgcctccgttctatatgccgcctccgttctatctgccgccgcagcagcagccgcagccatggcaataccccactcaaccaccgcagctaagcccgtgccagcagttcggatcctgcggcgtcggcagcgtcggcagcccgttcctgggccagtgcgtcgagttcctgaggcaccagtgcagcccggcggcgacgccctacggctcgccacagtgccaggcgctgcagcagcagtgctgcacca

SEQ ID NO: 336012 - DNA, 429 bp, Zea mays
ggggtactgaagaggatgatgaacctgttgtggtcgttgccaaaatgtgggagaacggcaggtttgctgactgtgattcatctaaggagaaggataatgatggtgactcgcacgttgatttggaatcaaacaagggggatgcaggtcttgacagcaatgggttgcactcaactaatgagagcagtggcagagcatcaactaaacagccgcaacagcataagaagcctttgctgaagagattccgtggtttgctgaagaagaaaagcgaaaagtagcataaaaccatctgatgatattctttgttctatcttttgacatatttctacatatttccttgattagctatctagatcctgagtctttccccgatattatgcgtaactgagtgatggatgcttaaagaatacaaaatgtcgcctgtattacatc

SEQ ID NO: 336013 - DNA, 137 bp, Zea mays
tcgcggacgcgtgggcggacgcgtgggcggacgcgtgggtctgtggcggttaagttttgaacttgcctgttatggtataaattctgaagtgtttgggtctgcgtgtgatgaacatgatatttatattcttgcgcttt

SEQ ID NO: 336014 - DNA, 191 bp, Zea mays
ggtatagaaaaagtaccggtacgaagtacctcttcatgacagactatacatcccacccgggggggggatactggaagctgacaagctaaagcctagttatctgggcagagtcaataaaaagagacagctaagaccagacacaatcacaccacagtacgcctcaacagtgatggcagcggagtcccataaag

SEQ ID NO: 336015 - DNA, 342 bp, Zea mays
cccacgcgtccggggttggcttctcctccccctccggttcgggttcgggttcgtgaggttgtccggggttcggtttcgtgggtgagcggatcgagatggcggcgtcggatgttgagtaccgctgcttcgtcggcggcctcgcctgggccacggacgaccactccctccacaacgccttcagcacctacggcgaggtcctcgagtccaagatcatcctcgatcgggagacgcagaggtcccgcggcttcggcttcgtcaccttctccacggaggaggcgatgcggaacgccatcgatggcatgaacggcaaggagctggacggccgcaacatcaccgtcaacg

SEQ ID NO: 336016 - DNA, 273 bp, Zea mays
tgtggtgccctacaccggaccaggcgatcttaggttgttcctgcattccattcgggggcgaccgcctcaaaacggccaggtcgcgatgctagtaccggcgcttatagcgcagcacctgactgcgacatggaggatgaatcactccactccatgcccataacctactgccaggggcttgcctcaatgaacaaactatatcctgaaacacagacgttcgctagctagctatttgagacctttatcaccgatgatgcgatacttaacgcgaacgca

SEQ ID NO: 336017 - DNA, 331 bp, Zea mays
tcgtgcacgcatacatccacacgtcctgtatttgtacccggccggtcacgttatatgatacacggggatgtacgcctaccaaatacggattatctcttctataatgggacctagaatcaattgcctggccgttttctttccacgacatagactgggaaggccctgccgttaccaaacttaatcttcctgccgcacacatcccgcttcatagctgtcgtattagcgaaaatgccctcacctaactgcccttccatctacatcgcagcctgtatggagaacgtgacgcgccctatctcaatgcactatgcgcgcatgctcctttggttacccg

SEQ ID NO: 336018 - DNA, 350 bp, Zea mays
gcgtccacgcgttcggtaacaacaactaccattcagccagctagctgctgcctacccccaacaatggtcgtccattcaaccaactggcggcattgaactctcctgcttatttacagcagcaacaactactaccattcatccagctagctggtgtgagccctgctgccttcttgacacaacaacagttattgccgttctacctgcacgctgcgcctaacgctggcaccctcttacaactgcaacaattgctggcattcaaccaacttgctttgacaaacccagcagcgttctaccaacaacccatcattggtggtgccctctcttagatttcttatgagttataggtcaat

SEQ ID NO: 336019 - DNA, 206 bp, Zea mays
agtgagcatctgaagattttttacacttagtacttccaggtgaaggcacgttttgctgatggagagcgaactactaggaacgtgctatgagaggtacttgagccatgaggcagactacatcggtaccaaacacagtagcaaggctgccggtacgggaggcgcatctgatgcacgaggaaacaccacattgggcatcaacttaacta

SEQ ID NO: 336020 - DNA, 424 bp, Zea mays
attgagaccaactagcaacatagaaagcacaatattgtaccaataatggcagccaaaatattttgcctcattatgctccttggtctttctgcaagtgctgctacggcgagcattttcccgcaatgctcacaagctcctatagcttcccttcttcccccatacctctcaccagcgatgtcttcagtatgtgaaaatccaattcttctaccctacaggatccaacaggcaatcgcagcaggcatcttacctttatcacccttgttcctccaacaatcatcagccctattacagcagttacctttggtgcatttattggcacaaaacatcagggcacaacaactacaacaactcgtgctagcaaaccttgctgcctactctcagcaacagcagttacctttggtgcatttgttggcacaaaacatca

SEQ ID NO: 336021 - DNA, 394 bp, Zea mays
gcgaggtcgtcctcttcgagcaccttctctggatgctggagaacgccgacccgcagccggagtccctcgacgagctggtcgactactacgcttgctgagtcagcgctgactgctccgacttggaagccttccgaatcctccaagccgcgtgcgtcccgcgcgcgggggtaaatcatgcatgcatacttcaattctgatgttttaagtaggggggagtagaggaaccgatgttgcagctcatggacgacgacgctgctctttcggctccgtagatttggttccattgacatgcagtactagtatagctttgctttatcttcgctacttcatcgtaataaagagtctggacgagtgcttctatgtttaaaaaaagccgtcagctctagaagatcca

SEQ ID NO: 336022 - DNA, 65 bp, Zea mays
attcaataataaagttttttggatgatgtatgtggccaaccagaaataagaagttacatttgcag

SEQ ID NO: 336023 - DNA, 265 bp, Zea mays
aatgcacgtgcggggctggctaccgaccagcatcccgtgagggatgaagacagaccgggaggccgagacacggagcggctgagctcttcagtgcactcctgggtggaggaacacaagctctcgtccatcgcagccgcgttagccactgtggtggtcgcgttcttatcgtacagcctgagatcgacgccggagcggccctcgaacctgcgcttcattcagaccaggatgcactcacaagcgctcacgctcgccgagctaagaagag

SEQ ID NO: 336024 - DNA, 95 bp, Zea mays
ggggcacataaggggttgcataaccagttgcttttcgtggcgattcgtgtttaaacggggggggccgcctctgagatcctcgtgaatagagcgat

SEQ ID NO: 336025 - DNA, 374 bp, Zea mays
tccacgcgtacgcccacgcgtccaggacgccatggttcagacaccgcacgggttgaaagagtgcaagctgctagtctccggcagcatgaacggttccattcggttatacggattatggactgctctgagtaactttgataatgaggcatagtttttgccccaacctgcttgtactcgcgtgggaaagcacaaagcatgaccactccccagtatttggtcacctggaacaggcttcatagctttctcatccatcatcgcatgcataaagaagctcggacgtcatgtccctgatgcatcgatcacccattcacctgttcatagagcattggtggctactcttgcatctggagaatctcatgcctccttatatatta

SEQ ID NO: 336026 - DNA, 122 bp, Zea mays
gcggcgaaatgcaaaagcaacatcggcagcagacttttatggagggagggaggaagacacacagagggggggagagatggaggggaggaggtcttctgtgcattcctgggtggaagaacaca

SEQ ID NO: 336027 - DNA, 101 bp, Zea mays
atttttttttactactactactaaggaacctggatgtaaattatgtatggtatcagcgagactgtcgtcgcagccttatgtaattctgttcagaacttttg

SEQ ID NO: 336028 - DNA, 245 bp, Zea mays
gcgtccacgcgttactgcatcaccatgggtggcatttgtctgtgttagcaatgacctgactgaacgggggtaatgaaaagaaaaacggaccgttcctaaattttactaaccgttaatcaaaaagctgcgttaaataaaaatcaatcctcaaccgatataaaagaggactcattactttttgctgctttcttgaaaaaagatattaaaggacctttatttgtgggggtcgttcttaagacaccatt

SEQ ID NO: 336029 - DNA, 210 bp, Zea mays
ggtacacatgaggagctgcatcacgagtcttattgtctatacgatccacgcttacatgggcgggccatccatcttttagctgccgaatactgccacctctattcaatcaactgaggctcggttatattaacactaaccctgaaaaccctagagttaccacacataatcgtctagtaggtcatcccccattggccagctggagctatatct

SEQ ID NO: 336030 - DNA, 448 bp, Zea mays
gaagatggtcatcgttctcgtcgtgtgcctggctctgtcagctgccagcgcctctgcaatgcagatgccctgcccctgcgcggggctgcagggcttgtacggcgctggcgccggcctgacgacgatgatgggcgccggcgggctgtacccctacgcggagtacctgaggcagccgcagtgcagcccgctggcggcggcgccctactacgccgggtgtgggcagacgagcgccatgtaccagccgctccggcaacagtgctgccagcagcagatgaggatgatggacgtgcagtccgtcgcgcagcagctgcagatgatgatgcagcttgagcgtgccgctgccgccagcagcagcctgtacgagccagctctgatgcagcagcagcagcagcttgtggcaactcaaggtctcaaccccatgggcatgatgatggcccataacatgccg

SEQ ID NO: 336031 - DNA, 390 bp, Zea mays
tgaagatggtcatcgttctcgtcgtgtgcctggctctgtcagctgccagcgcctctgcaatgcagatgccctgcccctgcgcggggctgcagggcttgtacggcgctggcgccggcctgacgacgatgatgggcgccggcgggctgtacccctacgcggagtacctgaggcagccgcagtgcagcccgctggcggcggcgccctactacgccgggtgtgggcagacgagcgccatgtaccagccgctccggcaacagtgctgccagcagcagatgaggatgatggacgtgcagtccgtcgcgcagcagctgcagatgatgatgcagcttgagcgtgccgctgccgccagcagcagcctgtacgagccagctctgatgcagcagcagcagc

SEQ ID NO: 336032 - DNA, 211 bp, Zea mays
gcagatgctcatggggctctacatctggctcggtctgtctagtggcaccacgcttacgttggcgatcccgctaccctgagcggtgcttataggttgtacaggctatcgcctggccgacgactatcatcggcgccagcgggatgtacccctactcggagaacctaatgcactcgcagtgcatcccgctttcggcagctggctacttcgccaa

SEQ ID NO: 336033 - DNA, 281 bp, Zea mays
cggacgcgtgggcggacgcgtgggcggtcgcgtggggtggtgagcaacatttcaaggagggggtgatgcttgctgacaacctatgaaaaggcgtttctgtagctgactacttggtttgtccgtcagacaattctagacgtgaattttgatctgttggctagattagctgccaagtaggtatttcgtatctctagatttatgggattcacattcactcattcttgttgctattcacttgcctttgttatgttcgaaattaaaaaggtaagaaaccttaatat

SEQ ID NO: 336034 - DNA, 123 bp, Zea mays
acgacgcgtacgatgggaaatgctgtctctacaaaagaccacctttgccgcccaagtctccgatgcgaaatatgctcgctctacgttcatgctcgcgggtgcatctgaggggctgtcatgctg

SEQ ID NO: 336035 - DNA, 330 bp, Zea mays
gagcgttcggcggcggccatcgggcgatggcatggcggtctagcctgtctcggagactaaaggatatccgggggcgcttctgagagagctgggcggccaacagcgtcgcccgtgagttctttaagaataactatggagacatcaaggctcgtaaaccctccctgccattccttgttcaacgagtgctccggtgtccaaccccagctttgggcgcgctacgatatgggagtggagagatgccggaacttggatggcctgacggaagcaccgattgataaaaagctggaagagcttgcctatgacggcgagtctcttaaaaccaaatatttt

SEQ ID NO: 336036 - DNA, 62 bp, Zea mays
cccacgcgtccgcccacgcgtccgcccacgcgtccgcccacgcgttcggttctagatcgcga

SEQ ID NO: 336037 - DNA, 415 bp, Zea mays
ctgctgcttatttgcaacaacaactaccattcagtcagctagctgctgcctaccggcagcaatttcttccattcaaccaagtggcagcattgaactctgctgcttatttacaacagcaacagctaccaccattcagccagctagctgatgtgagccctgttgccttcttgacacaacaacaggtgttgccgttctacctgcacgctgcgcctaacgctggcaccctcttacaactgcaacaattgctgccattcaaccaacttgctttgacaaacccaacaacgttctaccaacaacccatcattggcggtgccctcttttagattgcttatgagttatagttcaataatgaacgtttttggatgatgtttggggcttcccagaaataagaaaggacatttctagattcttatgt

SEQ ID NO: 336038 - DNA, 234 bp, Zea mays
tcggtcacatagacgggaactacctttaatgaatactttcatggacacctcgcgcagtgggatggggtcatctttgggagacggggaggcccatatgacattatttatccccaatacaactcttaaaagatacacctacttcctgtaattaccagacctgcatactagaagatacattggatacaaaccaccttcctttgcctatcttacttacccgcgcctgactaccaaaat

SEQ ID NO: 336039 - DNA, 65 bp, Zea mays
  unsure (1)..(65): unsure at all n locations
cccacgcgtncgcccacgcgttcgcccacgcgttcgcccacgcgtccgctagttctagatcgcga

SEQ ID NO: 336040 - DNA, 83 bp, Zea mays
ggtcacccacctcctagttaataatgaagttttttggatgatgtttgtggcttcccagaaataagaaagtacatttctagatt

SEQ ID NO: 336041 - DNA, 231 bp, Zea mays
  unsure (1)..(231): unsure at all n locations
ctcacacagacggcaactacctttaatctatactttcatgcacacctcgcgcagacgtgtggggtcatctttgggagggtcagcggcctatatgacactatcttcnccctatacaactcttaaaagatacacctacttcctgtaattaccacacctgcatactataatatacatatcatactaaccaccattcttcgcctttcttacatacccgagtctgactaacaaaat

SEQ ID NO: 336042 - DNA, 372 bp, Zea mays
cggacgcgtggggctgcggctgttttccaccgccgccggttcatctaccgccggcggggcgtctgccacctgcgggtcggctgccacctcctgtgcatctcccaccgccggtccacctgccgccgccggtccacctgccaccgccggtccatgtgccgccgccggttcatctgccgccgccaccatgccactaccctactcaaccgccccggcctcagcctcatccccagccacacccatgcccgtgccaacagccgcatccaagcccgtgccagctgcagggaacctgcggcgttggcagcacccccatcctgggccagtgcgttgagttcctgaggcatcattgcagcccgacggcgacgccctactggt

SEQ ID NO: 336043 - DNA, 328 bp, Zea mays
  unsure (1)..(328): unsure at all n locations
gttggcttctcctccccctccggttcgggttcgggttcgtgaggttctccnggggtcgggttcttgggtgagcggatcgagatggcngcntcngatgttgagtaccgctgcttcgtcggcggcctcgcctgggccacggacgaccactccctccacaacgccttcagcacctacggcgaggtcctcgagtccaacatcatcctccatcgggagacgcagacgtcccgcggcttcggcttcgtcaccttctccacggaggangcgatgcggaacgccatcgagggcatgaacggcaaagagctggacggccgcaacatcaccgtcaacg

SEQ ID NO: 336044 - DNA, 164 bp, Zea mays
  unsure (1)..(164): unsure at all n locations
tcccactctttcncccacacntncttcctcttctccctcnctccacatctcccttgggagccgnccaaggaccccgggacagggcnnnanatnnctcatcangaggccccacttgcacttgaggcaccaaccccacttcttggagagccaatggactttatgac

SEQ ID NO: 336045 - DNA, 279 bp, Zea mays
  unsure (1)..(279): unsure at all n locations
gttaattatcctgtacttaatgtttttttttgcgtcgcctgtacaaccatctcggtgggtattttcgcaccaactcgagaacctcacccctcatcntttatgttatggtgcatgatgtgtatgcatcctccacacctttttagctgactcatccgacacttactcctaagcaactcttctttctacattttcaaatcgtgtttgaaactcttccttttctcctgcataacatctacttaattcttcttcatacgtcttaataacacattgatcttattc

SEQ ID NO: 336046 - DNA, 365 bp, Zea mays
tttaaattcttcaaaaaaaaaaaaatataattttaaaaaaaaaaaaaaaaaaaattccgcacattttaaaaacaacccccgcccccctaaaaaaaaaaaatatacataaaaatattaattcttctaattaaaaaacacaataattataaatatcatccccctccccttttaaataatccaattttcctcacccttccttctcacattacttttttttttttttctaaccaaaataaatttcacttccctccctttatcaaccccctaattataaaaccctctcccttcccaactaaattcccctttcttcaaaccccctcttttccaattccatattaaaaaaaaatccttcccctcccctcttc

SEQ ID NO: 336047 - DNA, 405 bp, Zea mays
  unsure (1)..(405): unsure at all n locations
cccacgcgtncgcccacgcgtccgcaactagcaacatagaaagcacaatagtgtaccaacaatggcagccaaaatattttgcctccttatgctccttggtctttctgcaagtgctgctaccgcgaccattttcccgcaatgctcacaagctcctatagcttcccttcttcccccgtacctctcaccagcggtgtcttcggtatgtgaaaacccaattcttcaaccctataggatccaacaggcaatcgcagctggcatcttacctttatcacccttgttcctccaacaatcatcagccctattacagcagttacctttggtgcatttattggcacaaaacatcagggcacaacaactacaacaactngtgctagcaaaccttgctgcctactctcagcaacagca

SEQ ID NO: 336048 - DNA, 295 bp, Zea mays
  unsure (1)..(295): unsure at all n locations
tcgcacgtntacggtctaccacacgaagcatcgtatccagccagccagctaaacccacaccgcacatggccnggatcgtggtggtgtgcgacttcnacaagaccatcatcgacgtggacagcgacaactgggtggtggacagcctcagcctcaccgacctgttcgagcgccttcttcccaccacgccctggaacacgctcatggacacgatgatgggggagctgcacgcgcggggcaagacgcttgccgatgtgaccgaagcgctcaaggcggcgcccattgacccgcgcgtgcc

SEQ ID NO: 336049 - DNA, 54 bp, Zea mays
gtgacgagtgcggctgcgcttatacaaataccttggcgaggacgttttatgcca

SEQ ID NO: 336050 - DNA, 248 bp, Zea mays
aaaaaaaaaaaaaaaaaaaaaaaaaaaaaataataaaaaaaaaaaaaaaaattaaaaaaaataaaaaaaaaaaaataaaaaaaaaaaaaaaaaaaaaaaaaaaattaaaataaaaataaaaaaaaaaaaaaaaataaaataaaaaataaaaataaaaaaaaaaaaaataaataaaaaaaatttaaaacattttaaaaaaataaacaaaagattaaaaaaaaataaatataaaaaaaaaaaaaaaaaaa

SEQ ID NO: 336051 - DNA, 417 bp, Zea mays
  unsure (1)..(417): unsure at all n locations
cccacgcgtncgcccacgcgttcgcggacgcgtggggaaacacaccaagcgaagcacagtagcaacaacctaacaacaatggctaccaagatattatccctccttgcgcttcttgcgctttttgcgagcgcaacaaatgcgttcattattccacaatgctcacttgctccaagttccattattacacagttcctcccaccagttacttcaatgggcttcgaacacccagctgtgcaagcctataggctacaacaagcaattgcggcgagcgtcttacaacaaccaatttcccagttgcaacaacaatccttggcacatctaacaatacaaaccatcgcaacgcaacagcaacaacaattcctaccagcactgagccacctagccatggtgaaccctgccgcctacttgcaacagcag

SEQ ID NO: 336052 - DNA, 190 bp, Zea mays
cccacacctgcggccaatcttaacaagattcatttgcaaacacacttaacgaaacccgggcgggctacactaacaggagggcgagccatatattatactcacctaccactttcttacccttttaaatcaccacaaatttctttaatataacacacttttcacttgatccaagaaccatcattccacattt

SEQ ID NO: 336053 - DNA, 244 bp, Zea mays
  unsure (1)..(244): unsure at all n locations
gtaccgatctctaattcccgcctcgacccacacatccgcccacacatgcatgctacacttaatttttttcttctacaactacattttaatcccgctcttttttaaaataccccccgccccctaaaaaatttnttataccttcctatacacttactaaacacaaacatatctatacttatttcacctcataaatcatttttgctcttattataaaaacactttaccaatactttcattaactatc

SEQ ID NO: 336054 - DNA, 428 bp, Zea mays
gcacaatagtgtaccaacaatggcagccaaaatattttgcctccttatgctccgtggggtttctgcaagtgctggtgcggcgaccattttcccacaatgctcacaagctcctatagcttcccttcttcccccgtacctctcaccagcggtgtcttcggtatgtgaaaacccacttcttcaaccctataggatccaacaggcaatcgcagctggcatcttacctttatcaccctcgttcctccaacaatcatcagccctattacagcagttacctttggtgcatttattggcacaaaacatcagggcacaacaactacaacaacttgtgctagcaaaccttgctggctactctcagcaacaacagtttctttcattcaaccaactaactgcattgaactctgcttcttatttggaacaacaacaactac

SEQ ID NO: 336055 - DNA, 253 bp, Zea mays
  unsure (1)..(253): unsure at all n locations
agatcatcctcgatcgggagacgcagaggtcccgcggcttcggcttcgtcaccttctggacggangaagcgatgcggaacgccatcnanggcatgaacggcaaggagctggacgggcgcaacatcaccgtcaacgaggcccagtcccgcggcggccgtggaggcggcggcggtgggtaccgtggtggccgtggaggcggcggctactgcggtggcgggcgccgtgatggcggcggcggctactgcggtggcgg

SEQ ID NO: 336056 - DNA, 322 bp, Zea mays
cccacaccttcgaccacgcattacaagtttctttgggaaacacatcaagcgaatctcagtcggggcaacctaacagcaggggcgaccaatatattatatccttcttgagctattctcgctctttaacatcgcaacaaatgcgtttattaatacacaatgcttacttaatccaagattcattattacaaatgttctaccaccaatttctataattggcttttaacaccctatctatctaaatcttttatctataacaagcatttgtttgttaacgttttacaacaaccaatttttcactttcaacatacaattcttttcacat

SEQ ID NO: 336057 - DNA, 159 bp, Zea mays
cccacacctgcggctaatcttaacctgatacatttgcaaacacccatcacgtagcctggggacaccacactagcgagaggggtaccttaattaacatccacctaccgccatctcaccctttaaaatcaccaaaaatgttttactactcaactttcactt

SEQ ID NO: 336058 - DNA, 53 bp, Zea mays
  unsure (1)..(53): unsure at all n locations
tagcanctatcacatcaaacaagtggcgacagacaaagatttgtgagggtcat

SEQ ID NO: 336059 - DNA, 346 bp, Zea mays
  unsure (1)..(346): unsure at all n locations
cttttagattgcttattacttgtaattcaataataaagttttttggatgatggagctgggcaaccagaaataagagcggacatttccagattttaaaaaaaaaaaaaaaaaaaaaaaaaaaaaaaaaaaaaaaaaaaaaaaaaaaaaaaaaaaaaaaaaaaaaaaaaaaaaaaaaaaaaaaaaaaaaaaaaaaaaaaaaaaaaaaaaaaaaaaaaaaaaaaaaaaaaaaaaaaaaaaaaaaaaataaaaaaataaaaaattgaaaaaaaaaaaaaatatataaaaaattaatatattataaaaaaaaaattnggtggctgatttttttataaaaattaattttttt

SEQ ID NO: 336060 - DNA, 225 bp, Zea mays
  unsure (1)..(225): unsure at all n locations
aaaaaaaaaaaanaaaaaaaaaaaaaaaaggggagaaaaaaaaaaaaaaaaggaaaaaaaaaaaaaaaaaaaaaaaaaaaaaaaaaaaaaaaaaaaaaaaaattnggggcggccgttttaaaaaaataaagtttaattacccgtgcatgcaaagtaaaaatttttttataggggaaccaaaattaaattaaatggccggcgtttaaaaaagtcggaactggaaaa

SEQ ID NO: 336061 - DNA, 117 bp, Zea mays
  unsure (1)..(117): unsure at all n locations
nngctcgccttnaatccancctatttcattcaccctctgcctttaccccacccggaagcggctttttcagtgggcggtcggggatnttnancccctcaaaaaaaantccttcactct

SEQ ID NO: 336062 - DNA, 60 bp, Zea mays
cggacgcgtgggataccaaggggatctatatatcaatgtatgccataaattgtctgacgg

SEQ ID NO: 336063 - DNA, 253 bp, Zea mays
  unsure (1)..(253): unsure at all n locations
ctagcatgaacataacaaggtcgtctttttctacctacaacatgactaccngcggggggtaacttaagagagggcggggcgtcattacatcttaattctactcgtgccaaaacattgactatcccaccatctcagagtgcttgaagaactgccaatcgtaaatcactctagtatagaaaacgaataaactcgtctctgctatcttaaaaaaaataactaaacacatataaattaaaatacggcctccctttaa

SEQ ID NO: 336064 - DNA, 211 bp, Zea mays
  unsure (1)..(211): unsure at all n locations
cccacgcgtccgaacttctttcccacccctcctgtgcaccgctcactttctaacgacggggttcacccgggcgaggtgcgctttaatctcccctactgtttcatcctcnaaaatgtcgccatgtactatcctatcagcgttggcgtgcactcatgccgcctcactgctgtgttgcccaaaacgctcctactcttcttgggcgcctgcccca

SEQ ID NO: 336065 - DNA, 230 bp, Zea mays
gaacggcgttactaccatcatccacggaggcaattctatcgctgctttcctcaacggggggcttggcgacaggaggaggggcatttggaccggtgatgcttctagcttgtaactcttggaaactaataatatacctggtgaccttggccttgataacgactaaaacctctcttacatgctatgatactcatgctctgccaacattacgctgcatcttggggatgaccttg

SEQ ID NO: 336066 - DNA, 342 bp, Zea mays
gctacatataaagcacaatagtgtaccaacattggcagccaaaatattttgccttcttatgcggcttggtctttctgcaagtggtgctaccgcgaccatttttccgcaatgctcacaagctcctatagctttccttcttcccccgtacctttttaccagcggggtcttttgtatgtgaaaacccaattcttcaaccctataggatccaacaggcaattgcagcttgcattttaactttatcacccttgttccttcaacaatcatcaaccctattacaacagttaccttttgtgcatttattggcacaaaacattagggcacaacaactacaacaacttgtgc

SEQ ID NO: 336067 - DNA, 126 bp, Zea mays
acggtactgcgaccagggagcagaacgttgctgtttacttatcctggtgtctcctagaggactgtgggtggttggcacgggactcgggcaatttcggcatctgctacgtggtctataacacgcttt

SEQ ID NO: 336068 - DNA, 215 bp, Zea mays
caaactctataaacacaccctattttttattttcactgttcaccctaatataaagggaggtccgtaactttttaggctgggctcccttcacataatgataccattctatgcaatctcatacaccatttaatattggacgacctcatggatggctaccgcgaaaaaatacatcttgatggaactaattattatatataaacactttattgtcatac

SEQ ID NO: 336069 - DNA, 371 bp, Zea mays
cccacgcgtccgattgagaccaactagcaacatagaaagcacaatagtgtaccaacaatggcggccaaaatattttgcctccttatgctccttggtctttctgcaagtgctgctaccgcgaccattttcccgcaatgctcacaagctcctatagcttcccttcttcccccgtacctctcaccagcggtgtcttcggtatgtgaaaacccaattcttcaaccctataggatccaacaggcaatcgcagctggcatcttacctttatcacccttgttcctccaacaatcatcagccctattacagcagttacctttggtgcatttattggcacaaaacattagggcacaacaactacaacaacttgtgctagc

SEQ ID NO: 336070 - DNA, 435 bp, Zea mays
tcggcaacatagaaagcacaatagtgtaccaacaatggcagccaaaatattttgcctccttatgctccttggtctttctgcaagtgctgctacggcgaccattttcccgcaatgctcacaagctcctatagcttcccttcttcccccgtacctctcaccagtgttgtcttcagtatgtgaaaacccaattcttcaaccctacaggatccaacatgcaattgcatcaggcatcttacctttatcacccttgttcctccaacaatcatcagccctattacagcagttacctttggtgcatttattggcacaaaacatcagggcacaacaactcgtgctagcaaaccttgctgcctactctcagcaacaacagttacctttggtgcatttgttggcacaaaacatcagggcacaacaactacaacaactcgtgctagc

SEQ ID NO: 336071 - DNA, 52 bp, Zea mays
cccacacgtccgctgacacttggtctgacttttattcaaaccactaacaaca

SEQ ID NO: 336072 - DNA, 268 bp, Zea mays
aaataacattataatcttatttcttctcatctttctcatctgatgcctaagggaggcgacgggattgttgcaatgggtattgggaacttcacaaccaccacagcaacacgactcgactgactgctaaggagttttacacagggaacgaaccagtactcccacataacatctgcaacttcaacacttgcaaagcatcattatttttaatcacgggaatggtaacacacacttcaagcagtgatggttgtcttttacgcacaacccgcta

SEQ ID NO: 336073 - DNA, 268 bp, Zea mays
cggacgcgtgggtgacacagcaacagttgctgcctttctaccagcagtttgcgggtaaccgggcaaccctcttacaactacagcaattgttgccctttgtccaacttgctttgacagacccagcggccttctaccaacaacacatcattggtggtgccctcttttagattgcttattagttgtaattcaataataaagttttttggatgatgtatgtggccaaccagaaataagaagttacattttcaaaaaaaaaaaaaaataaaaa

SEQ ID NO: 336074 - DNA, 210 bp, Zea mays
gcctacccccagtttttctttcttcaaccaactgacacatggggcttggtcttattacaggggaacaactactaccatttaccatctatccgtgtgagccctcctacctatttgacacaaccacacttgtttgcgttataccaacactcttaacctaactcttgcacccctttacaacttcaacaattgccatccaattcaaccaacttt

SEQ ID NO: 336075 - DNA, 59 bp, Zea mays
aaaaaaaaaaaaaaaaaaaagacaaatcaaacgaaaaaaaaaaaaaaaagaggcgaagg

SEQ ID NO: 336076 - DNA, 87 bp, Zea mays
caattcctagtgagaacttttgtaacagaagaatccaagtatttcatatcaaagtttaaaagtcttatcgagggttcgcggtgtggg

SEQ ID NO: 336077 - DNA, 361 bp, Zea mays
agaaaagagagtaatattgtgctctcatctcatggtagttacaaaatgcaagacaacgaggaatgtacacctgacaagtacatttttcctaatacttgtgatcatttgttcagcctcaccgtcatgcaaaggtatatgtatataatatagagataattacttccacatcacattgttacatattaatcctttagtcgcaaataacagttcactttatctttatcgtaagttaaactactttaaatttaaacaagtttccataaaaatatcaacatgtacaaatttaaataaatacactaacgaaatagggtgatagagtatttttaaaactgattcgatattttagaatgtggtacatttt

SEQ ID NO: 336078 - DNA, 241 bp, Zea mays
gcgtgcgccacgcgtcggagcggccatctgagattttattttgttggatcaacatatattggcggcgaaagttgggaccactgagcgtctatgcctgtgagataggatgcgcctagctgttcggctgctagaaaagttggtgcacccacagcatttcctgagagggaaaaaaaagcctactgctcactttaacaggtcaacagcatcgttacctgcctcttcagcaggtcaacagctttta

SEQ ID NO: 336079 - DNA, 338 bp, Zea mays
attatgtataaaaaaaaactataaaaagggagaaaagggaaaaaaaagagaggggaacaaaaaaaaaaataaaaaaataaaataaataaaaaaaaaaaaagaaaaacaaaaaaaaaaaataaataatataaaaaaaaaaaaaaaaacaaatactataaaataaaagtaaaaataaaaaaatataaataaaaaagaacaaaaaaacaaataaaaaaaaaaaaaaaaaaaaaaaacaaaaaaaaaaaagaaaaaaataaaaaaataaaagtataaaaaataaaaaataaaaaaaaaaaaaaaaaataaaagaaaaagtaaaaataaaaaataatagatat

SEQ ID NO: 336080 - DNA, 82 bp, Zea mays
tgccattaaaggcgccaacagagggcattgttcgtccattcagagatcagttcacacacacgcacagacacagaaagagggg

SEQ ID NO: 336081 - DNA, 325 bp, Zea mays
aaaaaaaaaaaaaataaataaaaaaaaaaaaaggagggaaaaaaagagaaaaaaaaaaaaaaaaaaaaaaacaaaaaaaaaaaaaaaaaaaaaaaaaaaaaaaaaaaaaaaaaaaaaaaaaaaaaaaacaaaaaaaaaaaaaaaaaaaagaaagaaaaaaaaaaaaagaaaaaaaaaaaaaaaaaaaaaaaaaaataaagaaaaaaaaaagaaaaaaaaaaaagaaagaaaaaaaaaaaaaaaaaaaaaaagaaaaagcaaaaaatatataaaaataataaaaaaaaaataaataaaaaaaaaaaataaaaaataaaaaaaataa

SEQ ID NO: 336082 - DNA, 160 bp, Zea mays
  unsure (1)..(160): unsure at all n locations
accgtccgaattccccgtcacccacctcccggaccgtcctttccattgtctctacctccaacgacagaaggggnncccgcagccgtttttcctgtcccacgactcccncactggctctatgcgcgccctccttctgtcttctcaacccttcacaataccc

SEQ ID NO: 336083 - DNA, 149 bp, Zea mays
  unsure (1)..(149): unsure at all n locations
gtccctgagcgtttgtagtgtaaagtaaatacatagcactttcagagacttttagaacgcatcatttcttggagcaggtggaaaaccctttacaaatgttgtgtnggntataattagtggtatttttcttgttcctttatttgtacata

SEQ ID NO: 336084 - DNA, 232 bp, Zea mays
  unsure (1)..(232): unsure at all n locations
atcgcaaacgactagctcaccaaacacctcacttcatctcgccatcgcggcacggnggcgccagtccacctcgactcgctgccttcaccacaaatatcgcctcttcgagtctcgccatcacataatcacccccagccactcccctcatctcccatcccctcccttccacttaccctgaatcggcgcgtaaaggatggcgttccggcggtgcaacaacaccttgttcgctctg

SEQ ID NO: 336085 - DNA, 370 bp, Zea mays
gcttctcctccccctcttaccaagtccttctttggttagggttccttagggttttgtggaggggcgatggcggcggctgatgtggagtaccgttgcttcgtcggcgggcttgcctgggccaccagcaacgagtcgctggagaatgccttcgcctcctacggcgagatcctcgactccaaggtcatcaccgaccgggagacggggaggtctcgcggcttcggcttcgttaccttctcctccgagaactccatgctcgacgctatcgagaacatgaacggcaaggagctcgacggccgtaacatcaccgttaaccaggcccagtcccgtggcggtggcggtggcggccgtggctacggcggccgtcgcggcg

SEQ ID NO: 336086 - DNA, 420 bp, Zea mays
cgccgagctcggcctctactcctccctatgctcgccttgctccgactaggtccatccatggggcttgcctgcgatgcccggcgtcctgtctactctgctcgcccgcgcctgctgcttgcctgtgctccaactcgtcggtcgcggtcttgccttggtttatgctgcagctcgccatcgaatcgcctgctcctctgtccgcccatggccactgcactgaactcctccctgctgtctgtgatgcacacgtgatggacgcgatgaggtcgctgcgtgtgtttgtgtccgagcccacccggccgcaacctcgctttgctcctcgcgttgctgctcactgagtctttccccagtccacactctctccctgcctgccataacgtcatttcgcgtcgagccttgctgccaatcgcggagttccctact

SEQ ID NO: 336087 - DNA, 193 bp, Zea mays
ctcattccccttccacctctctctttctttccacttctcgccctctctctcttgcgcgcgccggaggacatccctccacgggcgcgcggcgcgggagcacccaccgacttatcgccggtggggcggggcgggggcgatctgatgccggcgcggcggtgatggcagcgccgtccggcggtgggggcggcggttc

SEQ ID NO: 336088 - DNA, 289 bp, Zea mays
gtgctgtagcactctgtctagtttccaggaatttctggaaggcaagtgtaatctcgttggaagctgtatcttatctgtcaccaatatagaattggtcatggcctatcagcaatgccttgtatgctcttaccattcagcacattttgtactgtactgatgagccacggcccacgggtggtgttgttgggttcaatctcatgagatgatttattcatcctgaagcttttgcaggtctatggggttaggtttgctgttatgtttttcaagacttccaatcgatcccgttgag

SEQ ID NO: 336089 - DNA, 284 bp, Zea mays
  unsure (1)..(284): unsure at all n locations
accgggnccgagcccacgccgtcccgcgagacgagttctctttgataaccttagnccaattatagtatccatcccactcctngnngccagccggtntaaccggcnncctatcngttcatacgctgtgtgcgtcgttggaccttcgttgacctctttactggaaaagatanntgcccctcactttcccgtttacacgtganntggaacgtctccaaaccacgtctcttactgnnatggccagcccacgtcttcaactactcgtnngcttcacgtttaaaaaagaa

SEQ ID NO: 336090 - DNA, 345 bp, Zea mays
tttttattatttttttatttttctttttttttcttttttttcactttttttttttattttaattttttttatttttttttcatttttattatttttctatttttatttttttatttttttttttttattttttttttattttcttttaaatcttttttttttttttttattttttttttttttttttttttttatttttttatttttttttatttcttttattattttttttttttctttattttttacatttaattaatattatctttatcatttttttttttatcttatattttttcattttttttttttttcttttattttttattctttataatttttttt

SEQ ID NO: 336091 - DNA, 248 bp, Zea mays
  unsure (1)..(248): unsure at all n locations
gttctgtcagcantttaacacgtttcagctgcatcnataatttgatgaagggaaaaagagctccgcctcgcgtctagcacaacatagtgcaaggagaangaaagttcaaccacaacctgttgtgaatgggaattccatgagtgaaaatcaatctctaagtagcaccttaatccttctgttaaaacaactttccaagctagagtgtacagacatagtcattctaaatgtgtgctcgtatggatagtaac

SEQ ID NO: 336092 - DNA, 87 bp, Zea mays
ccgcaagcaagagagtgaattcgcttttagttcttaaggttgtgttgtgcgtgttggattcgattgattaaaatcgtagtttcgtac

SEQ ID NO: 336093 - DNA, 345 bp, Zea mays
  unsure (1)..(345): unsure at all n locations
gaccacgcgtccgaggaggtggcncctaaggtggagtacccgcatcctgaatgccagagctgcccaagcctgactgcncccgtaccctacggtgcgcgggactccctaatcctgatgagctaccgccacatccggtcctgccggagctgccaaagcccgaggtgccagtgcaccccgccgtgccggatctgccgaagcccgagctttctcctcaccccaccgtgcctgagctgccgaagcccgaggtgcccgcgcaccccgccgtgccggagctgtcgaaacccgagctatctccttaccccaccgtgcctgagctaccaaaacccgaggtgccgcatctttcaa

SEQ ID NO: 336094 - DNA, 443 bp, Zea mays
gaccgacgcatgcgttgcatgttacagtctaatcatgtcatcaaagtatactgtgtcaggtctcttggacttctctggcgtggaaaggacattgaacctatcttcatgctgcagtcttcaatagggcaactcaccattacgtggccccaaaaccgttgggttcagaacaagctcatggaacgtccagattagggtcaggcaccaataccattgccttgatcgtatcgtatctgtgattctatactgagggcacatccataagctaaactgctttcaagtcagacacccagctaagtggtgatatgcagactgcaagtgcctgcaaaaggccttctacctctgttcatggaaaccgaacagtgaaataaccaaactgcatgtgttgttgcatcaatctacttgtcccccttctcttttgatgctttcctaagacttaatttgac

SEQ ID NO: 336095 - DNA, 284 bp, Zea mays
gccgccgcctcttccgtctctctcatctccgttcttctgcaatctcacccctccctctaaacggcgaggccgcagtagcgccgctacggtttgctcaggattcgaaccccaccttctgattgctccgaatccgaggcggcggttgcgcagaagtttgcggcatggcggggtacccggaggacaaccagcacgcgttgaacgggtacgacgatgaggaggtcgacgaggaggggcaccccgggcggcggggaggtcgggatggggcgtctgggtacggcgatgct

SEQ ID NO: 336096 - DNA, 176 bp, Zea mays
  unsure (1)..(176): unsure at all n locations
aaaaccgggccgaccgcacgcgtacgattcttttgaaaaccttgtcactgagttcttttcatcgacgatggaanncntatccccgcacatgtatacttttgttcgtgggtcaaaacaaacttgnntgcccatcgnattgtcatgcntgctgagatggactgctgtcatgcaactga

SEQ ID NO: 336097 - DNA, 393 bp, Zea mays
ctgagcagcggtgtcctgagtccgtgaccgtgttctctcccccgcgcttcccttcaacgccggctccctaaagatccgccgctggtctgccctctgctcgtcgattcggcgcctcctctccttcacgcgcccacgctgccgtcgcctcctcctcactgtcgtccatgccgctgtagccgcctacggccatggccgctggagccagcgactatttgacggtggagtaccactccagagagctcccctctttcctctccgacgacgagggagccaccgccggcagcggcgtcctcgtatgcagaacagcagaggacgctcgctcgctctgcgcgcatcgaaccaaaaaccacacctcggcggcagctatataaaagccttcacctgacccgggcg

SEQ ID NO: 336098 - DNA, 280 bp, Zea mays
cccacgcgtccgaaaaaaaaaaaaaaaaatttatttaaaaaatttaataatcaaaaaaaaaaaaaaaaaaaaaaaggccgcagttttttaaaaaaaaaggcgcgcccaataatacccccccccttttacatactccaactttacaccccatacatcctacataataacttttaaattaattcacctaacttaaattcaccacccctcgtattacaaaaaccttactgaaaaaacccttactttccccaatttaaatacctttaaaaacatccccctttat

SEQ ID NO: 336099 - DNA, 336 bp, Zea mays
  unsure (1)..(336): unsure at all n locations
gcgacttaatactcaccaactattaccgacactttatttttataacaacacaaaggtcatccccttcgctggtttaataagacacctggcccggaaaccttacaaccataacaaagagctaacctcttgccctgcaaagcaacaagctaacgcgaccaacngtgtgcagccttcaacatgcaccacatcacatgacagatcatcccgtaacgccacatcaaaactcgtcttttgctctgacggtaaccgaacctaaacggcacctctaaaggcagcatatgagcccaagaaagaacacccaaaattcgcagcattcacaggaaagaaatactcact

SEQ ID NO: 336100 - DNA, 155 bp, Zea mays
  unsure (1)..(155): unsure at all n locations
aacttctccgtcatttaccacaaggaaacctnacncccagcccgttttattatatagataaccgccccaacaaancanctnnttnaacatccttttaacttaattaaaaccttctcttatcacttcttcttatacatttccaattctttattttt

SEQ ID NO: 336101 - DNA, 432 bp, Zea mays
  unsure (1)..(432): unsure at all n locations
cagctcatcacatccatctcattctactactgtctcagagaccaagctgctgcaaccggagaaggagagctactctactcttcagagcactgtgcattgggacatggaaaccgtcgtgggagacctcatggcgaccgagctgaggcttggcctgccgggcaccgtggacgactgcagccagcaccagcagcagacccagctgaaggtggccgcgccgccgtccaaccctactaggggcaagaagcgccccgccgtcgaggaggaggaggcaaacaagcgcgacgcggaggcagcacccccggcggccaagtgagtagctaatagatctgagcacccaaacgttcagagtgaaccgaacgtgtgtctctcggcgcccgaggtcggatggccaccggtgaggtcgtaccggaagagctgcttncagcatgcaaa

SEQ ID NO: 336102 - DNA, 192 bp, Zea mays
tacaaattcactatctactttgctctcacattaacaccgactgaatggctttcaggccggagacaaattctatcgcactcttgtcatacaatagatcagaatccacatatcactggcatgcaaaatgtaactcaccagctgctttcagctagcatcttccatgatccacaagggtatgatgtctcgatcatg

SEQ ID NO: 336103 - DNA, 302 bp, Zea mays
tcgttacactgttgcagcttggatccgacatgccgaacacttgacccttttccagtgaacgtgggacgttccgactctgccggcaaataccacgctcgcgtacataccgatccgtggtagcacatttgtgttgtaccactcgcttttactccaaagcgagcgatgctacgcgttacgccggagctcgtttgcgccgcggtggatgagagcggactgggaggagatgaaggccatggagcgagctacactgatgaggagcctcctgcacgagacgggtcaactgcgtttactcgtcatcgtta

SEQ ID NO: 336104 - DNA, 278 bp, Zea mays
taaagatacagttgtgttgaactgatggtcttgaacgctatacgaccataatgaggcaggtgctaacgtggagctgatggcaggatctgagtgtatgatgttactgaccacgatagctataacaatgccatgctgagtactgaatgaagtttataggaatgccgatgaatgtgtgacacaagctttagtgtgtggacaagggtgacctgcctaggaacagagtatttacttacaaggctgtcctggtatttgctgatgacatggcattaccattcctt

SEQ ID NO: 336105 - DNA, 286 bp, Zea mays
aacgaggtctatctaccgacatacgtaaatgcgatttctgcatcacgcgactggaagtataagagctggttaatggggactagccaaagtagcccgacgtctgcttgcagcgtgcctcgatgaccaggcctataggatccgtgcgatgacatgcatccacatggcccccatggttgctacgtcttcattgtagagcttgcccgaggcatcacggatgtggatcctcctgatctgtacgaaccgctcgcagatacatatgagctgaggctgacctaagatgatgaca

SEQ ID NO: 336106 - DNA, 367 bp, Zea mays
gcgtaccattgatcgttactgaccctcataacttgttccacagagcggatgcctcaactcctgcgaatatacaaagcctacatatgatgcatatgcctgaacaagcactgcctgccatcacagactgctgaaccaagctcaccggacgtttctccaacctatcaacattgatctagtacttatcgagcattatggtggtaacccaagcaagatatactttgcgactaggcctacatgaagtgatagctcacaagtatcatatgcacatccagaccaatatgatagatgctgttctcaactaccgatacaatcatatggacctgcactcattcttgaatgcccaaataatggtcactgcattagcaac

SEQ ID NO: 336107 - DNA, 404 bp, Zea mays
ctgagatcacgtgcgatccatgttctcatgtttatgttttacacgacaacagtcatcaatgttggggggattattttatgaaagacgggtgcgtctgcgatactagatgcatgatactaggaacaagtcacttggctgataatgatgaagagaaacgtatgaagcaccacgcattggcacatggcacataatgccttaagcactgcgacgacaatgctgactgggcgaatcctatactagtggtgctctctattcataacaactgcctacatgatcaactcatgccataacatatcgttacttctacaacaatcatgtctttagcgtgaataccaaagtgtcccatggtgagtcccacatcatcacattatcgcacaggcaactttgctacgtcattacctatc

SEQ ID NO: 336108 - DNA, 63 bp, Zea mays
aaaaagaaaaaaaaataaattaaaaaaattttttataaaaaaaaaaaaaaaggacaaccgagg

SEQ ID NO: 336109 - DNA, 137 bp, Zea mays
caaaaaataaaaaataataaattaaaaaatttaatttttaaaaaaaataaaaaaaaaaaaaagagtaggaaatttttaaaaaaaaaaaaatggccaccccttctaatttttccaacctaacttacccttcctttcaa

SEQ ID NO: 336110 - DNA, 123 bp, Zea mays
aacaaactatcttatcgaatactatagcatcttcctcatcgatagaatatataagatgcactagggagcgaaatacgtcgttccttaatgcagatccggcgtccaccaacctcctgcgatcac

SEQ ID NO: 336111 - DNA, 249 bp, Zea mays
atgcgactggcttgagctgattgaggcttgtctatgttgaagccagcatgatgcgtctgagaaatggacacttgaaccaaacgattaagtccttctgtctgatccaccaattggactctttgatccaatctagatctcaccttatgatcttgcacacaatactaaccctgatgagccactgtcacctatgtatgcaaattacacattctatgatccagtcttgactggaaaatgccatgtagatttttc

SEQ ID NO: 336112 - DNA, 364 bp, Zea mays
ctttgatccaatttcacacgcatactagcgccgttggtagcagcaccggcagccgcgttcctcgccggcatggatcccgcgaacagcagcgcgggcgccgagctcgacgacgcgtccgagtggcgcacccgggcgctgggtggcacggagtacagctggctccgcgccgtgccgggcggcaccggcaccacgctgctcgcgctccgcctatcccacggcgacgcggccgaggcggcgctgcgctccctgcgggacgcgcaccccgtcctccgcgcccgcctccggacctcttctccctccggcccgacgctggcgttccccgatccggcaccgccgttcctgctggcgcccgatcccgccccgg

SEQ ID NO: 336113 - DNA, 383 bp, Zea mays
  unsure (1)..(383): unsure at all n locations
gcgagacggcaaaccgatcggtggaacggaacttccctcagtctcagcctccaggcgagcgagcgagcgctgctcacgtccacagggccagcaacagtaggctgtaggccccgcccgctccagatccataggcagccgcgcgcgatcgcggcgtgatggataaaagcgtgcgcgctgcgccgctgtcacgatgtcagagaggcttacgagcgtaagctaatgtcaccaccatgcttttatgggaccatatatataaatataacaaataaagttttattggaccaggtctttgaccatgccattggtatcaacgttccaaggtcccgctttctaccagntaatgcgacatcacatttgcagctcgtacagtctgatctatatac

SEQ ID NO: 336114 - DNA, 93 bp, Zea mays
cttctctgggcacattgcttcagcgcagtatctttctagcaccttgctataacgtcttttgtgggatcaatttatcacacttgatggccatca

SEQ ID NO: 336115 - DNA, 258 bp, Zea mays
cttgggctatctctttggcagtgacgaagcttcaaaatcatttgagaagcctgcaccagctgaaaagccaactcctgcatcctctgcatagagactactggatatcgctcctggaattcaaagttctaaatcaaacaattacattggatctgtaagccagaacttcagaaatgtacgcaccatccgtccgatcactactgttcaagaagtacaaggtctcgcatctatactcatttacaaaccatgtaacgatgatgc

SEQ ID NO: 336116 - DNA, 284 bp, Zea mays
ggctgctgctcccgaggagctcgccgtttactgtgccggaggctcctgctcctgctcctggtgggccccaggagccggccgccgaggcggaggctgctgctcctgaggagcccgagaaggccagcgagtgaggccgtgcgcacgcagcggcggcggccagggcccaggccccaggggatcggcgtgcgcgcatggcgccgtagactcttgcgcgcgtacatgggagactgacacgtgattttgatggtcactacgctacacgttactgtcgggactctgagtgt

SEQ ID NO: 336117 - DNA, 97 bp, Zea mays
gcacatgccatggcgtccatgaccggcctctcttagggcgttctgcccagcaggcgcgccgggaacagctccagtacggtcagcgtccttagggcat

SEQ ID NO: 336118 - DNA, 87 bp, Zea mays
cggacgcgtactcacatacttacttctaattttataaacaatacttactaccatatatatagaaaattttgaaaagcatgaaataac

SEQ ID NO: 336119 - DNA, 334 bp, Zea mays
cagaagcagaagccaccgatcggcttgccgcttgcgtgaggcgatcggagcattccatccggaggaggaagacaaccgtctacgcagcaagaacatggcgatgactcccaattgacataataatgtagcatatgaacattcttacttccataaaaattctctatcaaatcactgctaatagctttaaacttattattacatattgccatgattgaagatttattaactatgattgttcaaccatattcttcactgatacttcctcttaaaatttagaaaattattttgcaaacaacaatgatttaaggtaactactttttaaatatttgagaat

SEQ ID NO: 336120 - DNA, 235 bp, Zea mays
atcttgaccatgatcgagattttagtcctttgtttgatgctatcaaagaaagctgtgttggttctaggttgttttctggttacgaacacacaaactggttataacaagatatgtattagatttattttttgcgagttcaacttatggtcccaatgtgtttatcaatggagctgtcagcaaccctttgtaaaaaaataataattatatataattttaattttattaataaagtgct

SEQ ID NO: 336121 - DNA, 296 bp, Zea mays
aggacccgtacccagatacgtacttcgcatttcttagtcaaccaccgcgacctgacctcctgcagaccctgcacatgtcatcgccatcatctcacccttaatctcaagcatgatccaatacctcctaatgctcccatattccacaatcttgatctactggcactacactatgcacacacagtacctgtcttctcgatccttcgacgcacgactggaccccacacacactttgtgcttcattcagtggatcacaccttacgtgtgctcgcgagacttcactccttcatacgttcatt

SEQ ID NO: 336122 - DNA, 289 bp, Zea mays
gaaatacctgctgcgtaccattcagtactgcactatgcatcgtactttgttcacattattacggaaatcgcaacaacgaaccgtggatagacgctgaacgatgagctggagtccactttctcatcgaccattccggatgacgcgcgtgtatgggtgctgtatccttataccgactttgcacgaggttggttgtaagaggcactgcactgcaatctaccttccacaatgtctgtgctgtgagatactctgtacagatctactctgaaactgttcacaagaattctatacc

SEQ ID NO: 336123 - DNA, 60 bp, Zea mays
ggatggtgaggtgggagatgatgtgtctgacgatgactctaaggctgacgaaactgataa

SEQ ID NO: 336124 - DNA, 146 bp, Zea mays
  unsure (1)..(146): unsure at all n locations
cttatcggntcccctctctggccctccttgcctcactcaccagcatcggttcttcagtcgtcagcatggctcgcgcccacttcctggccgcttggccctccttcaccgccttgcgccctcctttccgcctccgttttccacagctt

SEQ ID NO: 336125 - DNA, 464 bp, Zea mays
cacacctgctcgcttccacttcgctcgtttgactactcgtcccgtcctttcgtttcgaagcctcggtagccttgacgatggccaccgccgcggtgtcggtcgacgagaagttcgacaagcttcgcgccgtggtcgccatgctcgaccagatcatctagaacgagaagttcggtttcatcagtctcgtgtcactctacctcacgtatgttgaattatgatcctcgtaggttcactgtttatgattgctattttttcattctattttttatccttgttatttgttttatttctttctttctttttttttttttatttttttttgtggttctttgatttttttctcttcttattttttgattattttttttatttttttttttctttttttttttattttattttttttattcttttttttattttttttgtttttttttttttttttttttttttttttattattt

SEQ ID NO: 336126 - DNA, 225 bp, Zea mays
gaagtgcgtgttatggacatgactctcgaactttataacgtgaatcatgactagccgtcgtgcgagcaacagtagcatcaatagcacctgcttgatcgccgtttacaacaactcaaattgatactatgcatactatcataatgacaataggcaactatcgtcaacatagcattccaaccacgatatctagcatgatgctgaatgaccaagattgctgatcgatga

SEQ ID NO: 336127 - DNA, 227 bp, Zea mays
cccacacttgatgttataatttatcaaactctttttatttagcaaggctaacatcgaataaacagaaaagagatacttcaaaacaacagaaggaaataaaaaaaaaaaaaaaaaaaaaaaaaaaataataaaaaaaaaaaacaaataaaataaaaaaaaaaaatgacaaaaatatgaaattaaaaaaatgaacataattacaaagaaatataaatactaaatacaaa

SEQ ID NO: 336128 - DNA, 106 bp, Zea mays
acgcggacgcgtgggttctcgggtcactgaaggatgacatcttatcgacgcgttagaccttcttgcggttggatgattgtgctttaagtgttcaaggggtggatta

SEQ ID NO: 336129 - DNA, 300 bp, Zea mays
cctttgcacttggagctattgacgttcttgccacttttggtacaaccatgttcttggacagagctgggcggcgcatgcttcatattatttattctgctgcgatgactctaagtcttattgcattgctattgtattctacatcaaggcatgcatttgacatgactctgacttgcatgacatgttaagtataggcgtcttggttgacgtcgtggcttatgtcattgccttctactttggaatacgagccattccttggatcataaagcctgacatcctgccaggagcattcagagtcctgca

SEQ ID NO: 336130 - DNA, 303 bp, Zea mays
agaacacgtggcctcacgatatctcatgcacgtttgtctgtcataactactgcttgacacatcagaatgagtagttgatagaggacacattcaacgctttcttcttatggcgttcggaataactctaaggtctgcttctcgccgcacgtcatgtccagagtacatcgcaaacactcaaggtgacgaaaacaccgcttcttccatggtcttagcaggaaagctaaccccaccctgtgactcgttagctatataggagcaaagctggtgccaagccgcaacaaatgcatcgtgactatcatcctt

SEQ ID NO: 336131 - DNA, 87 bp, Zea mays
gaggagcggcacctgagaacagatcaccgtcactggaagcgatatttcattactgtagagactgataaggctagagagagagagaga

SEQ ID NO: 336132 - DNA, 249 bp, Zea mays
gatgtatccggcatatgcaaatggccctggatatgttatatcatctgatattgctgattttgtcatgtcaaaattcatgaagcaaaagctgacggtacaatcttatattttcctcttgagaaaatatcctccatagaatggtcacaacaaaaaggcattccatgcttcttttttttacatttcacaaaagtgccgtctgaatgtcagacacttgtcaaacagcactttgaataacaaattgccaaaatg

SEQ ID NO: 336133 - DNA, 139 bp, Zea mays
ctcttcaatcacctatttaactgcattaattactactctcgcacctgatcacatctgctcagtcttacacacatatcctctccactttcattataccatttatactatagaaaaacaccatcatactaacctcctccat

SEQ ID NO: 336134 - DNA, 371 bp, Zea mays
ccccccggtgttccacgtgtccgtcaactccggcaccgtgctcatggacgccaacttcgtggccaaggtgacagtcaccgacaactggcacaacgccgctgccgcagacgctgttaacttgtgccgcacgttctgaacccgaattccgaaccatgcgtgtgtgtgtgtgtgtgttttgtttggcagctatcggatgtcggcgtggtcagccacgacgtgaggctcgccaccaccgactccttccaaggtctctctatccgctccccaactcttcccaccccccacagcccacaggttcccgatctgcgccggccgcgctcatacctatcttcttgctgcgttgttcgctcgcctgctgtgcctgtgcatgc

SEQ ID NO: 336135 - DNA, 379 bp, Zea mays
  unsure (1)..(379): unsure at all n locations
gtgacagcgacgcctcagaggagttcgagctgccgctcctgccatcctcctcgggcggcggcggctcaccgatggacattgaggtgggggcaacggcgagatctgatgatctgccgatctcgccgaggttgcttgcgaaggtcatcgggttgatagcgtgttggtacacactgagcacgtgcttgacgctgtaagtaacacgtattgttcgttaatactcgtgcggattttccggctaccttcgtgtgcggatgtgtttgttgctagtgttcattccatgcgcgtgcgcatgtggtcaggtacaacanggagatgctgngaaagcacatgtggaagttcccggcgccattcctgatgaacacagtgcatntcacgatgc

SEQ ID NO: 336136 - DNA, 301 bp, Zea mays
ctcaaatacacaggactggtatagactctgtcccggatagaattcgccagcaggcaatatgggtgggtgcaccagctcctaggtaaattcactgtttacttagtccacatgcttgcctatccaacataagagcagggttgaagcttctgtggtcattagtagtaagaagaagaaccatgcaggtgctaatgagaaaatccaatgtgtcatgcccagtccaaatagctcatgttcactggaacgctaatgatagaacattcatcatgcgaacggggtattatcccagaatataagctgcgct

SEQ ID NO: 336137 - DNA, 405 bp, Zea mays
  unsure (1)..(405): unsure at all n locations
gggcgacccacgcatcctctnataccttaatctctaccaaaactctcaattcttccctatccttcacatcttaagatgtgtttcatcactaaacaccctccacatctcatttatttatctttattctcctccaatttacaataacattacctatatctcacaccctacttctaaataacctcttatcataaataactttatacttcaaaccaacaaccttctattttacaaaaccaatattacttcaataaagcctcttatacaacttctcactcttaactcctttcaacattcaacactaatccatcatacttttagaacaaaacgctgcgcatttcaagtaatccgttaaaacacactctctccattctctataaatctacaaattccttgcactacaaacta

SEQ ID NO: 336138 - DNA, 279 bp, Zea mays
  unsure (1)..(279): unsure at all n locations
caccggtccaccgctttcacaatttactccgctccgctccgtttccgtcgctcccatgccagggagcctcgccacgcgagagggggccacggacggtagcagttttctgtttcggtgggcggggacgtcgtcgacgaccgaccgtagcggaaggccggagatgatggaggagggggcgcgtccttttantttgctattacgcccaccatttgatcttgtgctaatgcggtcttacacgtgttcattgattgctcgagcgcgttctatttcatctacagc

SEQ ID NO: 336139 - DNA, 311 bp, Zea mays
gcgctatgcagctcgtccttcttatggtggtggtggtggtgggaggaaccggcgatcagggggagggagccgctttggtggccgtgacttccgcaatgattcttcgtcatttggcaaggggggatcccgtggtggtggtgactactatggtggaggcagcagtggtggttatggtggtggctcctcatatggtggtggcggacacggtggagctggggctccgagtgcctgggattgatgttacagttgctcccaagtagaggggtctgccaagtttaggtcactttttactctagttctatttaggtata

SEQ ID NO: 336140 - DNA, 386 bp, Zea mays
gccagttcagcttcagcaggtgacgtcggttcggcacatgcccgccctgacgaggctcgccgcgccgccggcgctggcggccccgtccgcacgccgcagttcgctgacgctgccaccgccgccacgtcccccacactgctcctcctcctggtacagcgggaggcgctcgccgtcaaggccctcggccaccgccggcggcgccccgcgcggaggcccgctcccggagccagaggaactcgaccagctcctcctcaccgccctccgggctgctcgcatccgcgacgaggagtctcgccgctcagatcctctttttatcgatccatatgctgccattcttctttcacatgacgtggcacatcatgatatgggatatctagattcacatg

SEQ ID NO: 336141 - DNA, 288 bp, Zea mays
cggacgcgtgggcgcccgcgcgctccacacgttcccgccgtggcgctcgcctttcatcctggtccccacgcctccttccatcctcgcccgcgcgctccgcacgtacccgccgtcgcgctcgcctccctcctctttgttgcctccgcgtcggcctccaccccgctatgacgcaagcaagggcggcgcttgccatggcatcgacgggaaccaggcatcactcttcctatctctcgggatggtacgggcaggaggatcaggccaccgtcgaggaacgcgctctccgctgtg

SEQ ID NO: 336142 - DNA, 328 bp, Zea mays
cttacgcttagactcaaacgcacctttctctatcccaagccgcacaccgagaagagtaagcgctcttcctcctatgagggctccgcctacctacacatcagcgtggttatgacggcgtcaaatcggcacgcaaagcatgctatcaaactatgatctcagacagagattacaccgagttctagaacttctcaaaatggcagggcgtatctcagtaatttatgctctacacttaaaaaattatggcagacaactcatcattatcacttttgttttaatgattttgacatgttatatgttgactgcctgatagaataatatcatttatctt

SEQ ID NO: 336143 - DNA, 231 bp, Zea mays
gcgcacatacacaagcacaagcgcactctagcaatggcttctgaggttgtccgccctagcgacgcggagctacgaaaggcacaagccgacatatggcggctcaacctctcctacctcacgcccctgtcactgaggtgcgccgtggagcttggcatccctacggcgatctaccgccatggggggctgcctcagccgctgagctggtcacggcgctgtctctccccttcacta

SEQ ID NO: 336144 - DNA, 274 bp, Zea mays
  unsure (1)..(274): unsure at all n locations
gggagcacaggcagacggatgatatcaagaacatggaaacattcctcactgcggtcagctggaccaagacgctccagttgcacttatcgactgaatactccgaggttttggacatggtcaaggcttcaacgttgacgagtttgcccaagaaaaagtacctgcatggcttgaaatcactcagccttactctggaccacaaccatgcagntcttgctactctagtctcatgcttgctgaacagctctcccaacctcaaggatctcagaatcattga

SEQ ID NO: 336145 - DNA, 416 bp, Zea mays
  unsure (1)..(416): unsure at all n locations
atctccgccgnggagaggagatcggacggccagaggaaggtgtgagccacgagggcggggtcgtcgcgtgctccgaggcgcccagatctggcttgccgacttgttaacttgcggtgctgacgtgcgtgcgtcgcacacgtggcgcgcgaacattggttgctaggagaacaaagcgttgctggtgtgcgagcacatcaaaaggacgaatcaaaaaaaaagtggagaaaagcgtggtgaaaattgaaaagagagagagagttgattaggggaaaggtttggaggaggtaaaaaggcagggctaatctgtgtgctgatggggggtttgcatcatatgttatgtgccaaaacagcatctacttgggagaagcccaaaaatatgggtcgtgcagcacacgattctaaaaatttggtgattc

SEQ ID NO: 336146 - DNA, 261 bp, Zea mays
  unsure (1)..(261): unsure at all n locations
aagaccgggccgcccacgcgtgcggtccagatacaacatgaccgcctccctaaattctaagacgatacttcgctagagaatcactgctacctgtcccctaaatctcacataactactatggacctcacctaactaacggaacagcgtagctcacccggtaccctagactgacatactatccaaacacagccaatgctatattccagcacatctactattacaaatcaaaaaaaaaagnggagaaaatcgtgttgaaaattg

SEQ ID NO: 336147 - DNA, 308 bp, Zea mays
gactcctacaataaggggtacaacttccaatgaagaaaagttgcttcaatgatggggagagggcattgcagccattaaatcaagtataggatctgttgtgcttcatcttagaaagttgcctatcggtctctgcatgcaccgctcattgctatttaaaaggggacggcaaggccgaggggttgccgctgatgtcgttattggtgaggttgacggtggtgatgccgtggatgctcgagtggcgcttgtccttgacgctggagttgaggcggatgatgtacttctatgcatggttggccaactacattgga

SEQ ID NO: 336148 - DNA, 259 bp, Zea mays
gggaagggcaaatctgcagggcctgagagggtgaggtagagcgcgccaaccaaaatgcaggagcaagcggcgagctcgcggcctttcaccatcgagaggtcgtccagctccgggcaccacgtggacatggaggtcaaagaaagcaagctagctactacctctggcatggcaccccgtgctgtggaactatcctgtgcatcttctttttggcttataagcttgagtttatcaccaatcccagttctttcattgttttttt

SEQ ID NO: 336149 - DNA, 250 bp, Zea mays
gcaagaagatcgaagaggtttgatcaaagagatgcatagtgtagactgtatagctctctttggttaagcaagcatttagtatgctttttgtttggaaatgtaagctgcaactcatgaatagcaccttgtagggccatttgataatatcattatagcaggtgaatggtggttatccatgcttatactgtctgaggcaacgtaagtttcaaatgtgctgcaatcatgttcatattatttaattggttgcatg

SEQ ID NO: 336150 - DNA, 425 bp, Zea mays
  unsure (1)..(425): unsure at all n locations
gtggcggcaacgcgtccgcggcggcggcgagcgagctgtcgctgactctgtggtccaactggatcgcttcctcggacagcgcgctgaacgcgacggagcagtgctcctcgggagcgagccggtccgccctgaccgagctgccgcgggcgcggtcccggatggcgctgcacttcgccgcggtggtggcgcgctcgcggtacgcggccgtggtccaggatttgctcaacgacgtcgtcggccacatgctggacggcgtcgccgacgtgaccgacgactcgtgcagcggcatcggctcggttggcgcgccgtccgcggtgagctccaacaggttcatggcctcgaccgaaagacccggcgcgcgctggggccaggcccagagggtccggagcaacctnctcaagacgcttcagctgatggacgagaag

SEQ ID NO: 336151 - DNA, 370 bp, Zea mays
cggacgcgtgggttggaatgtatgaaaattctccaaatgttttgaattaaaaggattactagcttttaagttaattttctaaaacaaatagatgataatattaaatcttggatagttcaaatttaggcttgaattttcaaactggcctacaactttagcttataagatggcttgttgttacagcatacagttcccgtgtaagtttatgataaataactttagcttataagatgggctgttattacataaattaagatattagtttaacttactttaaatataaacaatccgagttgaaccgagctactctggaatcctggatcaaaatgaacgtgctagtaagctactagcttttagtcatgccctaatt

SEQ ID NO: 336152 - DNA, 250 bp, Zea mays
agagaggcggcaaccagggccgggggagaaccatgtgcaagctcatgtgcaccaaggagtggggggggtgctacctgctggtgatcctggtcatcgaacttctcgtcggcgtgctcttcggcctctgcgtattcaagcacggctactacaggatcactgaaatcgggcgcaaccacacctgcttggactgctacacaacaggtaccatctgaccgagccaccggccgtgccctgcttctgcctgacttgg

SEQ ID NO: 336153 - DNA, 178 bp, Zea mays
tccgatttaactcttgatcgaatatagcgtctgttatagcctcttcccccgctgcaacggtgggtgtgtttaacgactgcaaaacctactcctacaagttctttaatggctcttaatccctcttcaagtttagaaggcttcattccagacgatacatgcccaatgtatcttacacggc

SEQ ID NO: 336154 - DNA, 164 bp, Zea mays
gggaaggaattggtggaccgacccacgcgtgaagaggatgaaccaattcatgactaccttttttttcccgagggtcagatgacctgtggagatgagatatcttccacacggcgttctcgttacggctcgtacatcaaagtctgccgaagaagcaggcctatctt

SEQ ID NO: 336155 - DNA, 407 bp, Zea mays
ccccagcccaagctccagccgccgcttggctcctgccgtcctgcgtcctggtccagcgctggctctccagctccagcgccgcagcgcgctcgcccgtgcctcatctccagctctccagcgccgcagcgcgctcacggcccaccagcgccagccgccaggccgccaccgcgggaccgccaggcgcccaggcgcgctcgcccgccgaccgccgttgtccttgtacagccgccggagtccggagcaccgagcacgggagcagccgaggcgagcaaccgagcaccgacattgagcaacagtgaccgtgagccaagccgggctctctcaatatcaccacaggaacaaaggatcagaaatggctatgcaggccgcaaggaggctagcatctttgaaactccaacgacgcctac

SEQ ID NO: 336156 - DNA, 393 bp, Zea mays
aaaaaaagggtttccaaactagcccttataggatggttttttggaagattaaaacatgcctatcgccgcgtgaatttcctacggtttgttataaaagctgtaggaagttaaaaaaccgcaggaagtgtatgattttggtgtagtgaggtcgggtggccactagctggttaagcttggacattggcacgatgggaccttgcccatggttgtctgtcctggcacgcggtgacaccctgactacgatggattgaagcctcagacgacggatgacatacgacgcaacaacgaggccagatgcaacaatgacagttagtcagtcaagtgtgggctcctaacttcgtcgtggagccaccatgtctcaacagaggtgctggattctccatggcacgtggg

SEQ ID NO: 336157 - DNA, 158 bp, Zea mays
gtgcacaacgcttcaagtatgtatcccctttctgttcaacaaaaacacgttcttcatggaacgggaggctgtaatccttcttagcatgggacgttggaagcaactataacgttcctatcttgggttttgctacaccgtagccacatacctgttgtgct

SEQ ID NO: 336158 - DNA, 354 bp, Zea mays
gctgctccggcggtcactgcctgtacggcatccagtacggcgacggctcctacaccatgggcttctacgcccaagacaccctcaccctggcctacgacaccatcaaggtacgtacctaccgtacgtggccgatgggcgcctctagccctcgcctagctagggcgcggcatgacttcgccatgacatctcatgacgcgcgcgcgcgtgcactgtgcatgcagaatttccggttcgggtgcggcgagaagaaccgtgggctgttcgggagggcggcggggctgctgggcctcggccgcggcaagacgtcgctgccggtgcaagcgtacgacaagtacggcggcgtgttcgcgtact

SEQ ID NO: 336159 - DNA, 273 bp, Zea mays
tcgcacccggtttcacgtgcctttccccaactattcttgcgggtctcgccagccagtgtaaggggtgggtcccggcgtgcttattccccccccccggccaatatcgagcaaggagggaaagcccagccgctgaatgcgcccaagggcgacaagaaagagttccaacagaccgatcttgcatatctgcggaagaagaaagaccagggaaaagcactgaaagaactcaagggccaggcacaaaatggcgcgattggaggctcgggtcttaagaaa

SEQ ID NO: 336160 - DNA, 210 bp, Zea mays
  unsure (1)..(210): unsure at all n locations
gccgtncgaatctgctgccagaatgcggtggttctaccacaaaggctcatcgggcttctgcgcgccttcaccgtgagatgtcaccgccgcgtgacggccaagttggtccccgatacagtcctaaaacacctttatctgccattacttcacccgcttgacttgcacaaacatcaacttttaacggagacgcataggcctgacgctgacctg

SEQ ID NO: 336161 - DNA, 455 bp, Zea mays
  unsure (1)..(455): unsure at all n locations
atgacgtgtcgagttgtgacgacgacattgcagggatcgcgggcgtcgacgaagagagcagcgatggtgactacgatgggattggtctcggtggctgcaacgtggatggagctgctgatccccaggctagcatcggtgaggtgaggaggaaggccccctggaagcggtggaggaagcctgtgaaggcgcggtcgctcaagtctttgatgtgagcacgcaagcgcccgcgttactcttccatctccgtggtgtagatgtagaagataagttaatcggcagcttggcttattcgcttgctaactcctgttccttctgatttgtagctgttgttgattgacggactgtttgacttcttcgngttggttggttgttccatggttgtacaactttggttgccaacttgccattccttttcatgttggagtattgcgtcttggaaagttggaagcaatatc

SEQ ID NO: 336162 - DNA, 374 bp, Zea mays
ctcggaattggtgaagtttacaatggaagcaagcatagacgacagcatggaatggttcgaggacaaggtcacgacagtctcccttctggaggcaaatggattcagtgtgcaatctatacagagcgtcttgaccgaactgatcgagatcaaatctgagcgcgcccgttaccatggagagatcggcaagctgagttcaaagctagcggagaacacggcttcctcctcccgagtcggtgcactgctcgatgaaaaagatggagcggcagctcagctcgagcaagaactcgggcgcatccgccaggaaagccagaagatggcacaggagaaggagaaaatagatgcagagggcgtgagtatcaagacagcatgcagcg

SEQ ID NO: 336163 - DNA, 422 bp, Zea mays
cggacgcgtgggcggacgcgcgggcggtctcttgggaaaagactcctcccatctgcggcgtggccccttatcaaacatccccgcggcgatggatcttcgtctggcccactaacccgtcagcgcgaccgtgggtgtgggtgggtacggggatgggactcctcgggcggagaccgtggctgctgctcctcgccctcgcttacgcggccgtcgccgtctccgtggaagccttcgagggcgacgctgatccgctctacagagcatgtgtggaaggatgccaaaaaacaggctccctgaaggaggcttctattaaacactgtttggtgccaaccgatggccagcctgctgacaaatcgtggtacgcgcactagcccgttgtacttgcaatggaaggactggtactgcaagagcgaatgcagatacca

SEQ ID NO: 336164 - DNA, 274 bp, Zea mays
  unsure (1)..(274): unsure at all n locations
gcgacccacgcatcggcgatgcggaacgccntaagggcatgaacggtagaaactggacggtcgaatcataccgtggcgagagcccagaccagggaggccgtggaggctgctgacgacgtacaaatcttgacgttgaagttgattctacggcagttagcaggcaccgtgatgccagtcagatctactgtgtgaagaaccctatctactttttcaacgatagctacgaaggtggtttttgcgtttactggaaattgaaccaacacatatgctacag

SEQ ID NO: 336165 - DNA, 134 bp, Zea mays
atgcgtccactacaaaacgattcctttccatcaccatcgttgctgatcgagcccgacttctacaggcgggactagtattttactttggatgtaacaaaagtatacagaaaccttatatactacaaatttcatga

SEQ ID NO: 336166 - DNA, 374 bp, Zea mays
tcgctcagccgacgccgccgcctaaggagaagagggtcctgccgccatctttccacgatttcgggcgagattattcattctaaccctagtacaaagatcttggtgcaaaaaatcatggataatacatccgttaagaaaggtttatgttcacatcttcttatgtaccatttacacaataaaaatgcccctcatgttgacaataaagcacattttgatttacttagctccaacgtatcatcttgtagcgagccacattataaaaagaagccctcctacatgaatgcatttgatattattatcttattaactggcttggaacactctggtttatttgtagaatcttacaacaagtgagatttccaattttcattttc

SEQ ID NO: 336167 - DNA, 235 bp, Zea mays
ttgaaagatcactagcagtcattacttgattcaattgccagacttgatgaatcatgggagggcgataatgaacatatcgccatggaacgcctaatgggttctgatggggaaaggaaccgcatcactacatagtttcttttggcatgttcgtattgtccgatttacatacttatattccgcatcttctttgaccgaagtacatttttacttcattatggccaaacttaccaccata

SEQ ID NO: 336168 - DNA, 409 bp, Zea mays
  unsure (1)..(409): unsure at all n locations
ctctgttacagggttccgcaaatgttggaaaatctgcatttatcagtgcaatgctaagaacaatggcgtacaaggacccggtggcagcggcagctcaaaaatacaagccaatacagtctgctgttcctggaacaacccttggccctattcaaattgaagcatttttaagcggagggaaattgtatgatacacctggagtccaccttcaccataggcaggcagcagttatccatgctgatgatctgccttctcttgcaccacaaagtcgtttgaaagggcgatgttttccggtatgtatattccatttggttgaacacatgttcctttctctaaattttcgcactaatatttttcttcagaacatgatgttatgttcaggctaatgatacagatgttgaatngagcggga

SEQ ID NO: 336169 - DNA, 218 bp, Zea mays
ggacgcacgcgtccggtgggttggcttctcctccccctccggttcgggttctggttcgtgaggctctccgagggtcggggtcgtgggtgagcggatcgagatctctgcgtcatatgttgagtaccgctgcttcgtcggcggcctcgcctgggccacggacgaccactcccttcacaacgccttcagcacctaccgtgaggtcctcgagtccaacatca

SEQ ID NO: 336170 - DNA, 106 bp, Zea mays
  unsure (1)..(106): unsure at all n locations
cggaannnnccgggtcgacgccacgccgtccgtgcaagatcctgtacacacctaccgatcgcttttctctaccgggtcagtgagataaatgtcacggagagagggg

SEQ ID NO: 336171 - DNA, 340 bp, Zea mays
gggagatgttcgggctcagctttgcgccgcagcagtagccgccccctcgccggcgatggtccagtggctggagatacgggatcccttcgttcggctgatcggatcggatgaacggtgcgagcgactgaccaaagagatgtaactaccctccccccactttttttttttttaatcttggggtggtgtacggtaccttctgatttctgtagttttttagtaggatacctaccggggccatcatttgtttgtgcggctggcttcgtgcatgcttttctgcctagccgccgccgatcaggcctcaattgctgacgacatcgtcctatcctacgacctgtattgt

SEQ ID NO: 336172 - DNA, 341 bp, Zea mays
ccccactttaccgcgcggaaaaaacaaagagattcccctttgctctacaggaagcgccggcgccgttgatggaattcggaaggaccaaagctgctgccgtagccctgatccccgaagcgaccttccgccggtccagtctgtccttctcggcctccgcgacgccgtggtcccgggaggtgtgggtcaacgcatccaaataacggctctttcagaggaaaacactgctgaatttctcagctggtgcctagtggtgggaaataaagctagggacccaacatccttgtgatagcaatcacatcattggtgttgttttttcagcttacgctgaaactagactgatc

SEQ ID NO: 336173 - DNA, 278 bp, Zea mays
ctccgctcggccaccacttttgaccgcttcccttcccttccgttccgttcctgttctgccttagccaattcccccgaaggaccgggccgccgccgccaaaggcaaagccagaaggtccggcccccccccaaaaaaaaccgacacccccaagtctctccgagtctctgggtgcgcccaagtgggcgccccaacacaaccaaaaaaagctcccccacgggcgctatctagaaccacccccacacgggcggtgacaccccgaaaagaaagagatctcacac

SEQ ID NO: 336174 - DNA, 446 bp, Zea mays
  unsure (1)..(446): unsure at all n locations
ccctatatgaccaactagttttaacttttgcttaacactcccaaccaaatcacccacacacgcataacctatcataaatccaccaaacgagttgcacccacacacaacacgccctcaaaaccaacggttcaaattgctggataaccctcctctctcttactcacttaaatccaattgctaatattatttggatcatcgttccgccatcattcctcacacgcaaagtaacctcctgtctcctcccctcctcctgccccgccatccctcccctacctcgcgctgccccctccctgggaccgtagagttagcaccgatattagactagtattgaaagaagaagagtcatacattgacccaaactctcacacacacctgtgctacttattatctaaatcaccggntacaagacatactacgacccaaatgcactacagcaagcctttaat

SEQ ID NO: 336175 - DNA, 329 bp, Zea mays
  unsure (1)..(329): unsure at all n locations
acccacgcgtccgcgtggctttgtgtctgggggcaccattgtaggagacacacggcctgcacaggctgccgccactttcgtaactgcatcctggccancacatgctgccccctccgtccctgcatcccgccctgctgctggaaataacaatgaaaatgggaacccaaatcccaaaagttcacgggatcggcccacgtagagaaaacaaccatcacgttgggatcgttagtccctgctaaccggcgtcttgaattgcgactccttttcctctttggtacattgatgtaatctcttgggggacatcctataaaaagcatattgatgtacac

SEQ ID NO: 336176 - DNA, 95 bp, Zea mays
  unsure (1)..(95): unsure at all n locations
ggaacctcccgggtgcgacgccacgccgtgccgcgcccagcaagctagccttagctttagcatggcccggtgtaaagagccttacngnnctgctg

SEQ ID NO: 336177 - DNA, 394 bp, Zea mays
cacacctcctgtcttccttcaccttcgcgctccgccgccgccgtcgattcgtgctgctgtcaccgctaacctgtccaacatcgccggggagggaagcagcagaagaagctccccttacctccggctatcgcctgaggataaagtggggtctgtaggggagtcttaggggggagcaaaagggataggatagggagagatgaagcaatcaatttcttcgtccgccttcgcccctgcttacgtccccgctactaaccctagttatgaggttgaacgccttcagaagcttctctactagattagtgtaaatagtagacttgttcgagtttagcttggctggaagaattagtctctggtccgtggttatatctgctagcaataatggctgcgatgaacg

SEQ ID NO: 336178 - DNA, 281 bp, Zea mays
aggccattcacaacgcgaatggggtttgccgccgccgccgccgtccgggaggggggcggcgctgttcaacaggaggaggcaagccgaccggccaccgtcgaggtcctcgcgcccgccagccattctttggtctctcgctctcttctttctgccgctctctttccccccgaccgtacttgtacttgtacttgccccaaagattatcccgctcttaccttcttctggcgcgccttgagaagtcttgcttctgcggctcttgcttgcgtcggcgcattgatatt

SEQ ID NO: 336179 - DNA, 383 bp, Zea mays
  unsure (1)..(383): unsure at all n locations
gaaaacccggcgggagccacgcgtccgattggctgtgttacacctactgtccctataactacttcccataggaaccgggttacatgtatatcacgtgcttttggagatggttcaaaattactgccagaagaccacgtgttgactggctttgctggtggttctaagaaaccacgaagtcaagtttcatactcagtttctcctaaaagngaggaacttggcataaaaaacaaaggtcatttccgcaagatacaatctcatgttagtgcaaagataaatgatgcaaagaaacttcctgatagttctagaagtgggcatagcagcccggagtcattgacttgcgttgcaaatgttcttgttacagtggtggatagaggttggatgga

SEQ ID NO: 336180 - DNA, 141 bp, Zea mays
  unsure (1)..(141): unsure at all n locations
cttttaaaccaactatcacaacacccncccttgctttttataaagcacgcagcccccaccaaacacaacacactttaattccataacaattcatcccttactcccttcctcacttttcaacggcctataaaccacattttt

SEQ ID NO: 336181 - DNA, 209 bp, Zea mays
gacccacgcagccagcacaaggaggcagggttccacgaccgctttggacccagacggagcaacaatacctgcggcctggggaagacgccgaccaccacgcccactgtctccaaacgccacaccgaaatgatacctaatcacgaacaggacgaactgggtccctcacctatacaccgcatcgtgcacggcaccctcgacgaactacctcc

SEQ ID NO: 336182 - DNA, 203 bp, Zea mays
  unsure (1)..(203): unsure at all n locations
gagccccagnacaaggagaaacagccgaaaccgtaacacaccaagaacaacccgctccaggtgcgcaagctaaacgaccaaaaacagacgctgaccaagggccnnttcaaaaaactcacaacactaccacccctgacgaggcctgcgaccccgncacagcagcaacagaaaaaaaaacaacaaccacacccattgccacacaa

SEQ ID NO: 336183 - DNA, 186 bp, Zea mays
atcgaaaaaagtggaaaaaaaaatacaatatctacactggcctcaaagtacaaccacagggggcgcgggggaacaaagatctattcttttcctcactagaagatcatcaactagaggacgcgaagctgagcgccgacgccaacgtttgccttaaagactgagccattctgagtcagacgacattgt

SEQ ID NO: 336184 - DNA, 162 bp, Zea mays
cacgtgcatgcatcgtcgactgtctcatgccgccgctgcgccggcgccgctcgcatgggttgctgccttggaccagcagtcgtcgccgtcaggctgaactgcttgtaaccgtgaatttcggacccgtttgcttctgtaagatttgtgcatttgcctgagtac

SEQ ID NO: 336185 - DNA, 193 bp, Zea mays
gtcgaggagtgacggaccacaagttctaatcgcggcggcggactcgccccgtccgcgcgccctttcaagctctcgctggctcgcttcctggccccgaagctccaattcagtctccgccactcgtgctctcgtagcgtaaaagcaaggccagggcggacccaccgtgcccagcaaaagggaatggcggcctcgg

SEQ ID NO: 336186 - DNA, 277 bp, Zea mays
aagcatcggcattgtgtcgcgcgcgtatgggatggaccgtccgagctggctgtgtgggcgcaggtcgacggacaatagccccggagagacctacacctctgcgtacgaaaagattactgatgaacatgattctgccaagagctctccaaactcgactcgatcgcctgagatcacgttcaatgaactggaggacgataacgacgtgaaggtgaaggtattgagtgagaggctatcatgcgtacttctggatgatcgtgcgaaggatgatctcgtgaac

SEQ ID NO: 336187 - DNA, 337 bp, Zea mays
cctctactgaaaacttgttttactcaccatcccacactccaagcctcaaaacgctcaagcgagatgctgctcctagacctctggattaaacatgcctctcacacatactccattaaaaaaattgattccactagctgatctaatacctgaacaactgcctactagaccattaactttgcacttataccgaatatctttcattttcacttatgattaacaaccaaaagttcttcctgcctctgcatataaatatccacccactctcaaaaaaatacttaatccaccatcttgtgctacccataccatgctatcaatctttaaatcctgttcaattact

SEQ ID NO: 336188 - DNA, 371 bp, Zea mays
gcggtacagaccggcggcgacaggtgggcgcaccctctagcggagcccgagaaggggtgtctcttgggcgccacggagaagctggacggctcgcacatcttcgagcgcacggtgatcctgctgctgtcgtcgccgtcgtcgctgggccccgtcggcgtgatcctgaaccgcccctcgctcatgtcgatcaaagaggcgtcagggtccatcttcgcggacgacgccgacatcgcgcgcgccttcgcgggccggccactcttcttcggcgggccgctggaggagtgcttcttcgtcatagggccccgagcggcggccggaggcggaggcgacgactcggtggcgcggacggggctgttcgaggaggtgatgcc

SEQ ID NO: 336189 - DNA, 269 bp, Zea mays
ggtgacccacgcgtgcggttgaaagcatagttctgacattatatcaatgctctttactccaaatgactagtcttcagcatacgttgaggcatctgtaactttgactaataatatactttttactgatttgttttacttgacctttactttttttggctgctgtaatatcaaatatttcttcaatcccaaattacaaggcgttatatcttttctaaataaatacgtcttgctatgcatctaatctctcttagtaatgggtcctgtctttc

SEQ ID NO: 336190 - DNA, 347 bp, Zea mays
atctctcccctgccctgagcacgcttgctcgaagcaagcaccaccatccgccatcgtcgacgagggcgattttccagaaaccctagctccagaagaaggacaagagtccgacctccccgaagcagagcctctgacccatgagaacttcgatgaaggcaagaccattctacccttgatgcataaattacccagtcttttacaccaaaaacctaagttgggtgattgggaagggattttttgcatatgtgagaagcgttttggcctgcataaattatacactatgttttcaatatgaaatgagggaaaatggttgattttagaaaggaaaaatgtttgtgaaaatttgg

SEQ ID NO: 336191 - DNA, 303 bp, Zea mays
  unsure (1)..(303): unsure at all n locations
gatggatctcccagtcatatgctatccgcaaacagcgagacacatactataatgaaaggggtaagatggggcctgtattatatggaaagccagacgcctcgaacagcttangccatatggacacatgtggtgtagaacagtagattgatccaaggaacaacatcacagtgacagtgatgatgttgtcagaagttgccatctgagatggtatataggtgagaaggttggagaaacccgcctaatgatgtattaaagaaaaacaaaaagactgccgatggtgctgatgaggataacgtaaaaaca

SEQ ID NO: 336192 - DNA, 336 bp, Zea mays
gttttttttttttttttttttttttttttttttttttttttttttttttttttttttttgttttttttttttttttttttttttttttttttttttaaaaaaggggcaaaacaaacccccccttttttttttaatacaccccacccaatttttacccccccacctttaaaaaccatacttttttttaaaaaaagcggtggcgggggcacaataactattttttttaacccccctaaaaaaaaaataaaacggctttttccttaaaaaaattaacccaaactttttttaaattctataccttccccccaccctttttttttttattttggacccccc

SEQ ID NO: 336193 - DNA, 334 bp, Zea mays
ccaaaccctagggcttccaaggtccaagcttgccgttgatggggcgcaagaagaacgtcgccatcgacgacgacgagtacttctttccgcaggacgacgcggccgacccagccccgtccaccgccgcccccgacgtcgccgacaaagagaagtccaagaagggccgtaagaagggaaagaaggggggcaaggctgccgcgcccgacgacgacgactacgagcccactgccccgacgacggcggccgacgacgaggacgatgacggcgagcccatcaacctcgacttcaccggcaagaaaaaggagaagaagggcgccactcccggcgctccctt

SEQ ID NO: 336194 - DNA, 227 bp, Zea mays
aatccctgactatatgttaaccgtcttcattcacttccaaaaaaaaaaaaaaagaaaaagggaaaaaaaaaaaaaaaaaaaaaaaaaaaaaagaaaaaaattataaggggggccgtttttcatgttcctgcttacatccgcgttcatgtaacatagttgctctttttttaggttcaccttaatttaattttatagccgaagtttttcaaaatccttactgttaaaaa

SEQ ID NO: 336195 - DNA, 372 bp, Zea mays
cgcgatacccctcctccatccatattcatctgcccgcgaatcccatccccgcgccctcgtggccggggtaacgactaggcgaggatagacgtcgcacccgtaaatcacgcgaccatgccctttcatgcccgcaaatcacgtcacctccttgcatacatggcagccgagctcactgtacgcccttgcatgcatggtcgcggatccctgcgcgccacgattctttccatacgctgcctctgcgcccttccataacatggccgttaatacttgatagttgacatccgggagctgaagcgggagatctcgcgggtgccgctaacatagctagagcgggagcaggggctgatgaagcaacacgggaggatactcggc

SEQ ID NO: 336196 - DNA, 119 bp, Zea mays
gctaccgcttacataagatccacagctgctttaccaccctccacatggccaagaccattcggcacagaggtaggacctccacccctccctggttcattaatcaaaacgccgtcttgcca

SEQ ID NO: 336197 - DNA, 362 bp, Zea mays
gcgacccgctcctccaggtcgccgtcggtccgccgcccctccaggtcgccggcgccgcccggcatagaggaaggagcgccgcccctcctcggctcccccaccgcaacgccggctcgccacgcctacaggtatctctcctcaacactctcgtcacctgctacggtggcaggggcaccttcgtcacctgcaactacgacccgctggggatacgtcggcgtgcgcccgtactgaccggtgccggtcaagggcacctgcctctctccgttgattttggtgcttagttcatgtgcggttggtgttctatgttcgatcaaatgcccggttgagtttagctaagctttttgatgtttagagagaatttt

SEQ ID NO: 336198 - DNA, 291 bp, Zea mays
atcttcatctagatgatccttgtctacgatgtcaggaaggcgctctgcaccaagtacccgaagttggtgcaggaggtacccaataatctaggttgtaccaatgccatccatttgtgaaaaaatgctaatgacacgatggatccgtgtcgacgactccagggtttcgtgtacctgctcggcagtgtgtgcatgtcgagcttgtagctggcgatgtcgctcgagcacgcctacgcgtaggacgtcctgagcgacgacaacacgccgcactgcctcagcttgatgttcgtgaac

SEQ ID NO: 336199 - DNA, 273 bp, Zea mays
cacacactacacggcacgggcaccacatcccccaaggcaaggcgtacgtggcacgcgcgcgttcatgtgcacaacgacgaccttcatggcggtgccggccttcgcctccgccttcgcgtgcgcgcgcgccggcccgtcgcatccccgccaccgcgcgcgtagtgccgtcgcgaccgcggcggcgttcttgctccgccgccaccagcgaccgccacggcagataataaacatcgtcgacgaccgccgtgccagcttcgatctccgctggcggcg

SEQ ID NO: 336200 - DNA, 245 bp, Zea mays
gcagttcttctgctcgttccagagaaaaaaataactgctaggaactcacaaggtagtaggggattgcgaaaagggatgtgaacagctgttttgatcgaagttgtctataaataccgtgctcacggactctgtattttaaaaaaaaaaaaaataaaaaaatgaaaataaaaaaaacaaaaacaaaaaaatataaaaaaaacttcaaaaaaaacggtttttatgggcagcggatttaaaaatatcaa

SEQ ID NO: 336201 - DNA, 377 bp, Zea mays
gcaaccggtccagcactttcacgctcagctccagcaatggctgcctccaccatggcgatctcctccacggcgatggccggcacccccatcaaggtgggctccttcggcgagggccgcatcaccatgcgcaagaccgtgggcaagcccaaggtggcggcgtccggcagcccctggtacggccccgaccgcgtcaagtacctcggccccttctccggcgagcccccgagctacctcaccggcgagttccccggcgactacggctgggacaccgccgggctgtccgccgaccccgagaccttcgccaagaaccgcgagctggaggtgatccactcccgctgggccatgctcggcgcgctcggctgcgtcttccccgagct

SEQ ID NO: 336202 - DNA, 379 bp, Zea mays
ggatgccttgcagtgcaaccctggacccggcgaccttgaacagttagttgactctcatgtgggctcggtcagatgtcaggatgcttatggcgcgcatgatctgagcacgagaattttcgtacaattttcttcttcagatgtaaagtctctccttcgctgccctgcttactcatattatttacgctgcacatgctcctggtgcctcctattaccatgtttatgctttcaacactccatgattattctttttccccccctgtacactgccatccgtgcatgtctgccatgactggcattgctcgctacttcctttgcgttgcgcccaacaatcgcgagggagaaaacgagtgcgggcgcggcccgagcgagcatggagtga

SEQ ID NO: 336203 - DNA, 283 bp, Zea mays
ctcattttttccctcctctcctcactagtatacgatggctcactaccgccgactattgtgggggattgacttacctctgccatgcctgacagtacctcctcctgtctcgccaatatggcgccgtctcagtgcccttactaaccccgcgcaggagcagcagtgcaagctcacatgcgtcttcaacatcacgctcaaatccgaggaccacatcatcaaggtcatgaaccacaccgtcttcgcctacatcaacgaccttgacacctcttacttgtacggggatccc

SEQ ID NO: 336204 - DNA, 192 bp, Zea mays
ccctctcatttctacaccctctcacctcaaaattcatcctcctttctacagggatgcgtttaaatatatgaccattccccaaaccacatccttctctatggcctcatcttccaccatcattcacttcctatacctctatatctatccttctcacctcctctttcttaatttaacatatattactccatctct

SEQ ID NO: 336205 - DNA, 359 bp, Zea mays
cttgatggcaatccagtgaagcccacgtttcataatggtccagttccaaatttctcttcgggtcgtggtcctcgtccccactccccacctgcgcagctgcgctgcgccatctcgaatcctctccttccaccatctcgaacctctccttccgtctcctccccggccgattcttccagtctccagccaccttcaactgccggccgcaagtggccccgcgtctcacccctaaccccagtgaagaatctaggcgtcgtctatccagccccgtcatcatcaccatggaggaggcactggatacctaactgcttgctttgcactgatggttggaccagaagggcgagcagttggtgtcggacata

SEQ ID NO: 336206 - DNA, 294 bp, Zea mays
  unsure (1)..(294): unsure at all n locations
gccactttcagcctntttacaatacccccttatcccttatcaactaccccataccatctacaagcatgtttctatatttacactgcttcacactaccttntccatacaacgtatcaaactcttctcccattctctagaccaatcctcacatataccaaactcccatctactttcctcacttcaccttcatcccaaaccctatccttacatcataaacatcatctactactccttcttcttcacactcacccttcttaacaccttctacatatactccccactcaccaaccacat

SEQ ID NO: 336207 - DNA, 416 bp, Zea mays
agcgctgtccccatccactccatgtagcctaccaatcgtcacatctaactcacgggctatgcgctctactaaatccacagaggaccaccagctccctacacacccgccctcccgtgggaacctccatgacccacacaaccactctccgaattcaataccccttgcacttacacaaacattgctaatacactccacacagtcgcactcggggaccttctgctcctcatcgcttagctagagacaactattgcctacgtgtgcacccgacgctgctacccttcactcacctgatcatcatcctttcaaatatactgtcgtgacctcatccagacgtgctgtggcaatggatcgaagttcgctccaactctgattgggggaaaatgacttcggtatcaaacggtaaaacataacgggac

SEQ ID NO: 336208 - DNA, 276 bp, Zea mays
gcgcggacgcgtgggctcatacgcatgccacggtggcggtgatcaggcccggtatctcatcaggggcgagagtcccaggctcgacggcggcgtcagcatctccccttcccgcttctatccagtggcctcttgccctcgcctccggacctctgcacaccggccggagaccctgcatttctttatacgatgagctggagacttgctctattcggctcccagcagcagcaatcagatccacatttccaggacattcctacgcagtcttagtaccctacc

SEQ ID NO: 336209 - DNA, 107 bp, Zea mays
aaaaaaaaaaaaaaaaaaaaaaaaaaaaaataaaaaaaaaaaaaaaaaaaaaaaaaaaaaagaaaaaaaaaaaaaaaaaaaaaaaaaaaaaaaaaaaaaaaaaaaag

SEQ ID NO: 336210 - DNA, 241 bp, Zea mays
acccactcttttttttcaaaacaattttatccactctttttttttgtttcataacaattacaatgtctcttgtttacaatgacagcatcactaaacccccacaatgttcccccacatgatacaacacaccgcattatgtacctttggcatggtgctacactaacacgactcttacgagacatgattaatcattaccgatcgaaagaatggaaattattcctccaacaacaacaaaattcca

SEQ ID NO: 336211 - DNA, 240 bp, Zea mays
cccgatcaagctaaacagctccccctacaatttctgcaacaagggctttcccgttgcttttgtttctcctgctcaccgtccaacttaacttgctctttcgcctaccctactccccctccacccttgacctctccctttacctctgcgggggaccagaccaacataacgccgagcaggatccacagcccccgctgctggtgcactcgacgtgcaactccaccaacttttacgacctctgca

SEQ ID NO: 336212 - DNA, 328 bp, Zea mays
tcatatcttgtatcatcttattaagattatattttcttctcaattgtcgaaacttcacaaatgcgtttttattaatcaccataatccaaacaagccttttcttcttactgtcccatacttaattaatcatcactttatgccctaacttaactcttcactacattttttttattttcaccttcactgcccccccctcccctcctattatatcttcctctcccgtaaaacactttacttctctcaccttattctcctttctcccatttcctttaatttacctcacttcttaccctttacccccgtctcaaaagctctctcctattctttt

SEQ ID NO: 336213 - DNA, 362 bp, Zea mays
gactgccctccacccatacgtaacacgttcttctcccacgcccccactaaaacagatgcctgcgccctgcgtgcgccacaacggaaaacccaccactcgcgagcaagtgcaggcaccgttgcccatccatcgttcatgatcccagcctgcctccgcggcctctgcacctgctttgacgtggacgacgacaaggctaacaaccacgagcaagagccgacgatggccgccgccgccgccgctacagtcgtcagcgccgacgacgaccagacggcaagcaccatcatcacccaccgcaccgtggagctgagcaccggcgtgcgcctgcacgtggcggatgccggcgcggcggcggcaacagcagc

SEQ ID NO: 336214 - DNA, 331 bp, Zea mays
gcgagcacggtctccgtcagtcggtcacatttctcgcgcatcagcagcagcataagcagccatggtcaggagtctcgcgctcgcctccctcttcttcaacgccagcgagggcgagggaagccagtgcctttcctcctcggcctccttcagcacggcggcgtcgtggcagtggccgtcttgcacgcatgcgaggacgcgctccttccggggcgagatcgtgtccatgcgccacgtctacaccagcagcaagcgagaggagcaggaggggtacaagacgagcatgaacccatcctacgtcgttcacgactgctactccagctccctcttcgac

SEQ ID NO: 336215 - DNA, 179 bp, Zea mays
  unsure (1)..(179): unsure at all n locations
tctctgactctnttttcgctcttgttttaatatttcaacaaactccccntttctaggggatcgtgacatttacaggacgatgggatctctctctctcctccttctcctgatctctaagaatggtctatcacatacacacattccacccgcttctgtacaaccccctctataatgacttt

SEQ ID NO: 336216 - DNA, 326 bp, Zea mays
cgcgtccgtgctctagatccgtccatcctggtggttttgtgatgtctacagcttccatctaattagagagtgctgggcaagctttgggacgacgtgctgaccatacctctccccgagacgggcctctagaagctccggaaggccaccaccgcccgcccgctcgtcatcaacatagacgcggacggcggcatgctactaccgggcgcagtcgacgccgtcgaccccgacgacgccggtgactccgtcgttgttacgacgccggacaaggccggaaacgtgtttcgcatattctttcaaccacagagctacctgggcaccaagggcat

SEQ ID NO: 336217 - DNA, 287 bp, Zea mays
cacgcgtcgggcgaggagcgtgcaattccgtagctgcaactgcaagtctgcaacgaactccctccctcccgcgaccagatcgcccgctgctcctctatccctttcctgctgctgctactaccttaagctatcatggccttgatgctgctagcgcgcaacctgcgctcccgcctccgcccaccgctcgccgccgccgcggcgttctcgtctgccgcggcggaggcggagagggcgatactggacgggccgcggaacgactggagccggcccgagatccaggccgtcta

SEQ ID NO: 336218 - DNA, 381 bp, Zea mays
gcgcgggcctgtcatctctgaacattgtcgtagagttcaaacagtggaacagcaagcagtttcagattcctgtgaacagcaaaatactccagcagtgcgtgcacttggctttttgccagaagaaggtcatggtgtttatgttgctagatgattctgaactatagctcatttagatatgtctgggaatgagcactaagcaacaatgattttattcagatggtgtcatggaagtccggtacatagatatggcctctatgctctccagtggatcatcgaaattaatgggcaaccaacaactgatctggaaacttttataaaggtggtgaagggtctcgaagatggtgaatttgttagggtgaggacggtccatttaaatggaaa

SEQ ID NO: 336219 - DNA, 120 bp, Zea mays
tgctggttttcgtgctccaagcctgctgcttcttccagggaaaaaaagacctgcccttgttgcagcgttgttgtttagaatgacctatatttgactggtattctgttacggtggctttgc

SEQ ID NO: 336220 - DNA, 430 bp, Zea mays
gatccgctccgaaagatacctttcccccccttcctctcgcgccgccgttttggtgcgaccggggcggcggagggggaggccaagaacccgtccggcggtggggaagggggtaacccccagcaccagcaggcagtgcaggctgcgccggcggagccgccaacggcacagggggaagcggtgcaggaggctggagcgcatgtgacggaacaagagccggagggggagaaggcgaatcgagatggggagggcggcgcgggggataaggacgacggcgcgtgcagagatctggttctggttgaggatccggaggtgctcgccgtcgatgatccggaggaaggtacaacgcccgttcttgcagtctctctctctctccggccttggctctagtaatagttgcccctgttggtgcttgtgtctcagctgtcagatg

SEQ ID NO: 336221 - DNA, 400 bp, Zea mays
  unsure (1)..(400): unsure at all n locations
acctagcctagcaaccagccgccgacctcctctctaccatggatatgtgccttggagccaggggatccatcatcaccaatcttttcctcttctatacctcctcatgccgcggcatggatctccttgttcggttgtcatctagctaggagtatctggctagctcgccggccggccggaggaggaggagaaagaaatggaagtgtgactatggtgttggctcggctcactcagaagttgaagccgaatctaaatggtagctgccggcgtttctgattgagccgtgccaatatctcagtactctttcatgctgatctcgcgtcacgccagcatcgatctcttcctgaagtcgtgtagtctctctctcgtactctcatgcatnctnggcatgtgttcttatact

SEQ ID NO: 336222 - DNA, 81 bp, Zea mays
ggaaattcaatgctcgctgcaacggtggagttaattgatccctacaacacggaaaaaaaaaattacatctatccatttaaa

SEQ ID NO: 336223 - DNA, 84 bp, Zea mays
gctacgccaactacatacattatcggcagagtgaactactccgaacctgctgctaatatccgctggctgaacctgcataatcag

SEQ ID NO: 336224 - DNA, 242 bp, Zea mays
ggccgccctcggcctcggcctcgccgtcgccgccgcacctctcctccgctaggacctgctaggtgggatggagggggccgggcactactactctcattttatcccgctgtctggcgtaccctacgtccctgcgccttcgctgggttttcatccatcatccgtcatcaccatatctcttcgtggattactagcagcactgcgtttactgttattcaactgaccctcttgttcttccccgtgct

SEQ ID NO: 336225 - DNA, 328 bp, Zea mays
cgggtccgacccacgccgtccggcagaagagccggtaccttgatccctcttccgccctgtctgtcgtgtgctctctactggcgcctcctacagcaggcacgttgtcggatcactcatgtccacgactaccagacttctccggatcaggcacaggtatcgttaacaagtagcctcgacttagagcaggtctacagggaaaggaactgggaccaccagatcctgctgacggatctggtctttttacacatagaacgcggcagtgccagtggctcaactaatgccgtcgtaggactcgagaaagcttatcatggcggcgcttctgcacgtt

SEQ ID NO: 336226 - DNA, 409 bp, Zea mays
cccacgcgtccgctggggggccgatccacacgagggcgatcctcgcgctcgccgccgccgtgggtggacgacgaggacgacttgtccttcatggtggctttcacggcagccaactcggtttggaaaaactgcatcagctccatgaggtccttgatggtgggctcagccatggtgatggagtggtcggtggaggcggtgggcgtggaaggggatggtggagggcaagggcgggtgggtgaggatcgacgtgacgctgataccaggttgtcaagcgcctcgacgcccaacgtcgctgcaccgcggctacgcagttcgtagtcgcgctctagaccttcaccgtgagggattcctcaccggtggcttgagagaggcaagggagaagagcagttttggataattgatctttctt

SEQ ID NO: 336227 - DNA, 282 bp, Zea mays
gacccacgcctcacgcgacaacaaccaaatctaattctccatacactctatttattcatacacattgccaccctcgccgtcttagtgcaaaaaaagagccatcccaccctaaatctacatccacgacccgagccacgcaccgaagaagacaacaaccccctcgggaatcaagctaacccccccgacgcacgagacctcgcaagacaagacccagaaggccaccttcccccgctatgattactacatgcaggtctattaccaccgcttgatccttatctaccc

SEQ ID NO: 336228 - DNA, 196 bp, Zea mays
gacccacgcgtcacacatcaactaccaaattttattcgcttaccattctctctattaataccgcactccaccgtcgtcggcttatatcaataacccagccaactcaccgaaaaacttcattccatgcacaccacgctcacccgtgtagacgaccagcccctcctcaattattgaatcccgcccgacattcgacacc

SEQ ID NO: 336229 - DNA, 287 bp, Zea mays
  unsure (1)..(287): unsure at all n locations
ccacattccatccatcttcacggtgaggctcgagcgatccgagaagggaaatcatccgcgtagcagcgacgcatgtttgttctctgatctctctgcatcttttatcagcagtgacgcagcacaacacacgaaatggtccgtttcattatgctcttctcntgggccttttagaatcctcatgataagcgtgttcttgggttaggattcttctgtgacctcatcacacctctcctagtacgaacagacatccacagaacctacattctcttctggatccttgacgtctt

SEQ ID NO: 336230 - DNA, 297 bp, Zea mays
gcgagaacacttggttctaattctcgtcagcccctataagataacgcccatcttcacgggtcacgagaagcgttcgagctccttccacgggagaaatggtcaccgttcactacctccccgcatcttatgcctatgctccctccgcgcctgcgtacctttcctcacccgactacacacgtatctctcgctccgagccctcttcccacgtgcccatctatgtggctacctgcctttcgcctccccactcgcttcaggcggatacgggacctgggcggcgacttctttgtctttctcaga

SEQ ID NO: 336231 - DNA, 340 bp, Zea mays
ctgtgcacaaacaaaaatgctactatcagcactctccctgagttctttccctgaccgaccccgaccgcttgcatgcatcaccagcatacgtctcttctaacctacccgccggcgcattatcgttacacgaccgagacccgcactcatcgccataactgcatggccgcttcgtcctcgctggcgctgtctctgctcctcttcgcgacgatgacggcgctgtctttcctgcctccgcgcctataaatgcttacccgcctgttcccaccggtagatgcggcggtgaccaggcctacgacctccctctttttcgtcatacgaatgtgaagacaaaggcgtcctt

SEQ ID NO: 336232 - DNA, 271 bp, Zea mays
  unsure (1)..(271): unsure at all n locations
ccggcgcaatacacggtacactctcagatccgtttttaccaccgcagatccgacattatccaagcggagggaccttttcttttttgttttacacaacggtacatacaaaggtgtcattcagccaaagccacgcaccgcttttaccgatcggcgttgccgccaccnttagcattgtcngcttcanctccatccaaatccaccgccagcaagcaagccggctccatgtgtctgccgatgaagaggganaggcactctgaggctgatcttaacc

SEQ ID NO: 336233 - DNA, 346 bp, Zea mays
gcgcgccgttgcagcagatggggagagagtgtggcatagcgagcgagctagagagcgcgggtcatggcgtcactgtctgtcgactcctaggcggccaccatagcgatgccaagcagcaaccttgggagaggtcgccgcttcatggtcttgttcatggccacccataaggtccagaagcccacgcccaataccttgtacggcacgagaagatcgcacactacgacggtgttccctgtgggctagccgatctccctgacggtgacgacgagcgacaaaacgccggataagctgatgacgaacgtgcttaagctgcggttgctgactaaggcggagctctcgggcctgc

SEQ ID NO: 336234 - DNA, 278 bp, Zea mays
gcgactacccatacataatcttaccatttactgagatatcaccccctattaattgcagggataggattttcaatcttacacacactgccactattatactgactaacctagactcaatatgaccgttcacgcgaggcctaccatctcactattataactttctgatcaaccatgctatatactattttaacatgctcaagtactggtactggaatttatcttccaccctttgcactatcatcaatcaaacggttttaacactgcagtactttgactac

SEQ ID NO: 336235 - DNA, 238 bp, Zea mays
  unsure (1)..(238): unsure at all n locations
gttcgtatacaattactccgcctatgcgcttaacctaactgttgtactcacttatcccagggcagcagcccatcaccaaatgctccactcaaatctacacataatcgaaccctgctcctcaatattcaagccggcatcacatatattccatgcgacctcccttggtataaagcncatgaacgtccattatatacacctacacatatctatctatctcctttataacctgcaatacatc

SEQ ID NO: 336236 - DNA, 306 bp, Zea mays
tgcaccttgccatcctatgtgagagagagacgcagagcgagcgacctataaatcggtgggcattgcatcactgtctgtcgccatcgcgccggccaccatagctatgccaaacatcacccttgaaagagggcacaccctcatagtcacgtacatagccacccataatggccataatcccacccccaagaccgtctccgacacgagaagatcgggcacaacgacggttttacctgttgccgacccgtacccccgggcggctacgactatcgacaaagcgccacctaatctcctgactaacgtggagaa

SEQ ID NO: 336237 - DNA, 307 bp, Zea mays
  unsure (1)..(307): unsure at all n locations
acatactccgccacttatttcttaaactagaatattcaattacggattctcggggctggcctgcatgtccacagaaggagcctacttccacactgtcttgnaccctgctcctgatttcttagccccacaacagacaaggtccatatgaccttncttttaataaaacccataaagctacctcacatacacctactgtcatccatctatcttcattaaaagcaaagatatcgcaacatgctagaaatttcacaacaacaaacacatcagcagattaagctaggtccatcgatcttgctcatcgctattt

SEQ ID NO: 336238 - DNA, 379 bp, Zea mays
  unsure (1)..(379): unsure at all n locations
gcggcgacggcgcctctggnaacggcgagcctgtcgtcctcgtccggggacggctaccgcggggcgggtgccgagtcggggggcgatagcaccggcacgagcaccacgagcgccttcgcgacgccgacgccgccgccctcgtcgaagaggggcgaaaacaagntgccgcggaggctnactaagggaggtggcgtcaggcgctggctatgggagcccatagtccaggggcgggagatgggcttcctcctgctccagctcggcttcgccgtattcgcgctacgcatgcttcgaccggagatcgcgttgcctggctcagagcccgggccgcataccacgtacggcagtgtaccgtacagcgacttcctggcaagcatagaca

SEQ ID NO: 336239 - DNA, 266 bp, Zea mays
cgccgaccaccggatcgcgcttgatgcacaagttccaatctagatactatatccggcccggggtgctagccccccttctcctcgtccagtaatcgactgaaaaggaaggtggccctcgtcactggtggcgccaccgacatcggcgatgccatcgttccactcttcattgagcacctcgccaaggtctgcatcacggacatccatgatgaaggcgggcaatacatgcgctacgccctgggaggtgacccacatggctccatgttcat

SEQ ID NO: 336240 - DNA, 263 bp, Zea mays
cgacccacgcgtcacgcacaatagctatctaaccttacttttcaatccataacaaacacattacattgttacctatggtccagtccatttactatacgcccacgcttcttttcataaccatcctttaccaagtcatttttttctttatcgacattttccacatcccacacacaacttccacttactacctattcatgaaacccctcaacctttcctattgcacaacgagttaatccagcccctttctactccagtttacacca

SEQ ID NO: 336241 - DNA, 134 bp, Zea mays
ctctcgcccaccactacaccaccggcggcggtggcgacccagtcgagaacaccaatgcgatggcgacagcgctgaaccgcgggctccgctccgggctccgtcttctcaacgccggcgccgaagcgttcaagcca

SEQ ID NO: 336242 - DNA, 141 bp, Zea mays
gcacaagaacctatccttcttgctgggttacaaaaacaatgctccctccaaccactccatcatgttgctctaccaaggccatgacaccgacattgatctcgcaaacattgagcagatgaattctttcaacacgaccttcat

SEQ ID NO: 336243 - DNA, 381 bp, Zea mays
  unsure (1)..(381): unsure at all n locations
atgtcgcttggncgcacacgcgggctttcgcgtgggtcctccaccgactgatagcctgagggcgctcactgcctgctccacctccaatagcctaccgttctaagacatcatgcacaatccatatgccataagaagaacaagaaaacgcacatccaanaattacgagcttatccatcgccgncccttcacagctacacatcactgttttcgtctggaaccttaaattctagctagttgatcanngaccactcaactgccatatcaacattcaacactcatcttgcactttgtctgctcattgcactcgatggctgaaccatcgtctcacaaaaagtctgctactaaacaacacgtctaatcagccatagaaattttcacttg

SEQ ID NO: 336244 - DNA, 445 bp, Zea mays
tcgaccttcaagtctcgctacgtagcagtgcaataaaaaaagcagccgcaatggcgagcaggaccatggccctctcctccacggccttcgccggcaaggccgtgaacgtgccgtcgtcgtccgccttcggcgaggcccgcgtgacgatgcgcaagacggcggggaaggccaagccggcggcggcgtccgggagcccgtggtacggccccgaccgcgtgctgtacctgggcccactgtccggcgagccgccgagctacctgacgggcgagttcccgggcgactacggctgggacaccgcggggctgtcggcggacccggagacgttcgccaagaaccgggagctggaggtgatccactcccgctgggccatgctgggcgcgctcggctgcgtcttcccggagctgctcgcccgcaacggcgtcaagttcggcgaggccgtgttgtt

SEQ ID NO: 336245 - DNA, 246 bp, Zea mays
  unsure (1)..(246): unsure at all n locations
acgtntttcaatttttattataaacccttgtacttattaaaaacacacaaaaatacgtgagccttttttttaccgataacccctttccatattaaaaacaacttttaaacacccaacacttctacgatacatatatttcttacttaatagaaaaaacttcaagaatttattctcctaaaaccccactattctttacaacaccattatggtgaaaacatgaagtttttacattctaactccacattt

SEQ ID NO: 336246 - DNA, 358 bp, Zea mays
agatgagtaaccaaatttcgctacagcacatcgcaccgcacagcacaccacgatcagattgggaagggtccataattcgtccacactttcacaacccaccacgccaaatcacgacgagcacagctacagacgacgagcagagcagagcagagcagaccgtcactcgaccgtcactcggcgctctcacgattcatttcactacatttcactacgccttgacaggcacaaccttgacctggtccagcacggggccgcagagcgagacgccgtcggtgaccttggtcaggttgtctttggtcgggtacggcgcgggcagctccttgatggcgacagcgtccagcagcgggccgcacgcggg

SEQ ID NO: 336247 - DNA, 388 bp, Zea mays
atatactcctataaaatatgttcggcttttttagtgaccactgataaggggtttggattgagtcttttcctagatataaatcgttaaagtgaatagtcttgtagatagttggagagaagtatgatctatctttgctccaatgtttgcaatgaatgatacttttgagctacatagcactttatttgcttgtaaagtaactgagcagtattatatgcttgacgcctttacatcactacaactacttagagcaaggctaataatataacctgctgttggttgtatagatctttgcatcttatctctcgcccactcatatagtagttaactcttgactattaatacatggctcacttactgtgacaaaatctcttgcatcttatgcttaagc

SEQ ID NO: 336248 - DNA, 314 bp, Zea mays
aacgacccaaccaccgatttcacccctgcctttgcttatccccttgtccagaccctggggggggatcattcccatgctgcaactgacaccctcctcctcactaatccaagtgcccaattcatcgaaagctccttcgccagcaactagcactcacctgaaacctggattgacctctacatttcacgacattatagcacctgtaatcatggcgctgagcaaagcaacactacacgctgtcccatggatgtacaatgtcactacatccttttgtatcatcatcgacaacaatgacttaatgactacgcatggtttta

SEQ ID NO: 336249 - DNA, 302 bp, Zea mays
  unsure (1)..(302): unsure at all n locations
aaccacaccaancctgtcttgttcacaatttatgacccgaactgcaccaaatgtacagcggtacattgtcaccatcttcaactctctactcctttaagccggaacaacgcagaccctccgatcctatccctcaaacccgcgtactacttctcacttcccgccattactcccacccgacccaaccctgcttgagcctgccatatcaaccccaatgttactgtacctgcactcactacacatctgacccaaaaactactcttcattgctcataacaatcccacttccgatcacacacctagttt

SEQ ID NO: 336250 - DNA, 117 bp, Zea mays
gtcgtcattctagaccaacagctgtgattttaaggacatatgctccaaatatatcgggctggtaagctaccctgctctgatgactagtatattattatgggctatacacaagaccga

SEQ ID NO: 336251 - DNA, 257 bp, Zea mays
attaaataggcgctgtcaaaattatttgatgttagccctacttcttcacgtgacagtagccgggagagttctacaaattccacaaaaaatgaaaataggaatgaaaaacacgaaacagctcccaaggaaaaaacatcaaacaagaacccgaagatggagaaagaagtcgcacacaccgttcctgtcaagcctaaaaaggaaaataggcctttggttctgccttttgaattatctgctatgggtatcttattgctcat

SEQ ID NO: 336252 - DNA, 258 bp, Zea mays
  unsure (1)..(258): unsure at all n locations
gccgtgaactacccncaaacgcccgacgcatacgccgtctccttcaccatgaccttgggcgagctctacagcaaggaggtgcgaaaggtgatcgttgacctcctcctccccgtcattgacagcgaccgggtcacggacatcctgtaggtgacctactcttacaagacggccgctaagctgatcgacgctcctcccagtacggtgacggtgcggcgcagttgtacggcttttcccgatgatgatcctccagggacgctc

SEQ ID NO: 336253 - DNA, 99 bp, Zea mays
gtggtttccttccttctcttgtctaactcgtgcgacgccaccttcaccatgaccccggagagggataatgccccgccgccattgttcaagcctttcaat

SEQ ID NO: 336254 - DNA, 259 bp, Zea mays
cggggcgagccacgcgtacgggagcggtcctcgtccgacctgctatttgatctgaagaactacctctacctacgcggtgcggtcttccacattctgctcacgatcttgaccgcctatggcatgcacacgcaaacgctctggatgaacccttactaccccgtactgagatccttgtacccggatattacctccctggagtttgggacaactctctttaaattcccgtgtataagggtgacccttcatactatattcattg

SEQ ID NO: 336255 - DNA, 318 bp, Zea mays
  unsure (1)..(318): unsure at all n locations
aaagcccggtgcgacccacgcgtacgatcgcnatcggcctcccttttttttttttttttttatagcagtantaaataacttcggatgggagcactaaatctttcgggaaattgctaataaccaacaagttacatgcaatccccatatgcttatgaacctctacattaacttaaaacaaaacatgcaattttactactaccccatctttcngatccctcagaactagctaccttaccttcccatgcatgcatgcactcgaaatgctattcccttattcacgggcatgaggccgtgatctgctggtttattattgacttc

SEQ ID NO: 336256 - DNA, 272 bp, Zea mays
agcataccgttattgacagtgacccagttctggaccttagtgatgagaaaatcaccatgggcgagacgctctataggcttttaaacgacaagtcatctatattcatacagctagcatcggaatactccactcactcccgctgtatatatagaggcttagggggcgactgcataaccattaaaagacaatgctgcccatgaggaaacaaaataagaagattaggtgattgccaagcccttgtccactgtggcacttgaaaagtcactcgaggg

SEQ ID NO: 336257 - DNA, 393 bp, Zea mays
taccatcccctgtgaaaactgccacgagttttcatctgtaccataggggaacacagggggtggcatctgtatcatattgtggcatcatatctttcctatactgtagctgcgcaaaaaggggctctgggactgggctgatccttgggcgcagaacaacatcacaaggcttgaagattgaatgcttggatcatcaaaacaaagaaaggatgcggatattatgaggtggcaagactatatacaccacatccatccatttaattctttttacactcaagcattgaaattttgatctggaagttttgtgactgcttaggtaggttctacatgatagtagtagagatgccattgcttctggagtcacctacaggataattgtacgattgctgacatact

SEQ ID NO: 336258 - DNA, 274 bp, Zea mays
  unsure (1)..(274): unsure at all n locations
acggcatcacatccccnnactgggtgctgagctttagtacagtacaattatttatcgcgcgacgcgtaagtttgctcgctctttctcttcccttcctccttgataaancccgcattctcttaggccttgggccatttcatcctcgatgaaaaatgcattgcttaaatctaatacaatcgacttttgaattactactctcaggacaagtccaggtgaggtggctcaccctgtaaaactccttcanctggctttataagcacaacacagtgctcaa

SEQ ID NO: 336259 - DNA, 145 bp, Zea mays
tgtacttactacccaaaggtgattattattttttacattgttggtgctattgttatcaccgttttaatggttattaggttatgtataggatttgccatttgttagtatacaatatagtaagtatgaagaaagcatatggttgttc

SEQ ID NO: 336260 - DNA, 417 bp, Zea mays
ctctaatctaggtaaacaatgccgctatcggtggggttcagtcactccccgttgaagatgggggcgaaaagatcaagggcatggacgcgttccagatggcggagctgatgcggaagagctgccgggagacaaacgacaccgcaaaggcaggcgtccagacgaactactacggagtgaagaacgtgaccgaggcgctgctgcctctgctcctgcaggcctcctcctccggcggaggaagggtcgtcaacgtctcctccgacttcgggctgctacgcgtaagctgttcctgtatctgaccacaccgtttcagattccgttcctttccttcgaccaacgccagctgctgctgctgctggatctgaaacaaagaatgcagtatctcaagaacgaagaggtaaagcatgagctggacgacat

SEQ ID NO: 336261 - DNA, 333 bp, Zea mays
ctggcctggcggtcgtgtgcggctctgcgcctctccctccctcccttccccgatcgtaaccgccgcctccgatcgatcgccacgatgcggctcttctgacgtaccgccgggcgcgtcaccgttaccgaccgagacccgcgcccctcgcctggactccatggccgcgtcgtccccgctggtgctgtcgctgctcctcttcgcgtcgctgacggcgctgctggtcctcgcgccgcgcctatccccgccgcagccgccggcgcccgccggtggtggtggtggcgaggaggccgacgacctccgcctgttccgccgcgcggctctggagtcgtcggc

SEQ ID NO: 336262 - DNA, 273 bp, Zea mays
cgtacacccatcgtaccctttatcatgcccgaagctgtaagagactatgtgagcacgactcacagaaattgaggcctgtgtgattctttctaaggaaaagggtgttgacacgtttcaccttccacattcttccacttgagccctgaagaaaaacctcctatttgtattgagttccacagctattccacactataaggagaaaagaagaaacctacgtacctatcgatctggtcttgaaatgataagggagaagaggggacctttgaaatataa

SEQ ID NO: 336263 - DNA, 99 bp, Zea mays
aaaaaaaaataacataataaaatattcgggcgtcccttataaactatccataattaattacagatccatgcgacttcataattccattattgttaaaca

SEQ ID NO: 336264 - DNA, 53 bp, Zea mays
ctctctccaccttccacattcgcttatgcgccgcaagaagcactttgaccggc

SEQ ID NO: 336265 - DNA, 358 bp, Zea mays
gccgtctcccttttgcgtgagcaaagaaagagagcgagaagcagtcgccatgtctggcatcggccacaagatcgaggagaagctccacatggggggcgaccacaagaataaggaggaggagcaccacaagaaggccgaggagcaccacaagaaggaggagggggagcaccacaagaaggacggcggggagcacaaagaaagcatcgtggggaagatcaaggacaagatcaccggcgagcacggcgacaagttcggcgaccacaaggagaagaaagacaagaagaagaaggattagaagaagcacggcgagggccacgaccacgacggcggtcacagtagcagcagcagcgacagcgac

SEQ ID NO: 336266 - DNA, 248 bp, Zea mays
cgcacccataacacgcaatgggcataactcaatagtgctcacctacgcagactacaacacggaggcgtgctacaataccaaggtcacatatcatgcatcaccgcccaaaaactgctaagccggcacagctttgcctaacatagacatcccgccatgggtcttaactcgcctgaagagcattatacgtttatccacgacactcccaaatcacactctccctgcaagacgtccgcagccaatctttatac

SEQ ID NO: 336267 - DNA, 434 bp, Zea mays
cacgcccgtccggcttggaggtaagacgtgcggtgtacccggttgagggaagactcttcctacacattcctttgtccgcagttcagggtggggggttctatgctagagagcgccgtgccaaacatctctttagaggcgtctgttcgctttacagtctggatatgcgacaccggaatctgttctcagctatatcaaacgttttatataacattatgagaaacaatctcggcttaagaatctgttctcgactccaccatatctcgacacacaaacgaacaaggcgcttagatcttctgggaaattttgttatagctcgatttttatggcttcacccagcattgtctttgcccggcaaggcgccgggccgtttcaagattgcgttcttcatatcttgtgacctttgccggggagggtgttcccagaaacccattctt

SEQ ID NO: 336268 - DNA, 375 bp, Zea mays
ggttcggtttcgtgggtgagcggatcgagatggcggcgtcggatgttgagggccggggcttcatcggcggcctcgcctgggccacggacgaccactccctccacaacgccttcagcacctacggcgaggtcctcgagtccaagattatcctcgatcgggagacgcagaggtcccgcggcttcggcttcgtcaccttctccacggaggaggcgatgcggaacgccatcgagggcatgaacggcaaggagctggacggacgcaacatcaccgtcaacgaggcccagtcccgcggcggccgtggaggcggcggcggcggctaccgtggtggccgtggaggcggcggctaccgccgtggcgggcgccgtgatggcggcg

SEQ ID NO: 336269 - DNA, 454 bp, Zea mays
cggaccccttggccgaccccttggccgaccccttggtcccgcacccacttggaagcggagggggcttaattgcttctccaccttcaagagcctaccgttctaggagatcatgcagaatccatatgccagaagaagaagaagaaaacgcacaggtaaaaaagacgagcttattcatcgccgtcccttcacagctacacatcactgttttcgtctggaaccttaaattctagctagttgatcagtgatcactcagctaccatatcaacattcaacactgatcttgcagtttgtctgccattgcagtcgatggctgaaccattgtctcacaaaaaggctgctactaaacaacaagtctaatcagccatggaaatttccacttggccctagcaaacaataatatatttcccacgaaccaactaagcacatttttagacttttctcagtttctgtaatc

SEQ ID NO: 336270 - DNA, 120 bp, Zea mays
tcctctctcatccgccttcctggcgattgcggcaacaaggtgacaatttagctgcccccgcggggaaaacggccaaaaaaggcggaggctgttagggaaaggaaacggaggaccaaaacc

SEQ ID NO: 336271 - DNA, 347 bp, Zea mays
acatatcaattatatttatccacactgacattatcaaattccgctctatatacagtgatggtggggaaggtacaaggtaatgagatagcgaatacaaaatcatgaatataaaatgggtttatcaatgcccctgtaaaaagcgaaagagagagcttctcaactccaaactatagtaacactgcttgaaaggtgcatgatacttgctagtggacactgagggtatggaacgatttttcctgaaatagtgcttgcatgaacagcttgaagactcaaggcaaaggctagaaccactgaaccattgcatggcaaaacgagagaaccaaagctttacagacgagatgacaaaa

SEQ ID NO: 336272 - DNA, 353 bp, Zea mays
cctgccattacatacaatctcttcctgtacttgcggaatatgagataacaaaccttgcgtgacgggggatatgacaaggcgggggctacgataatgcccacgaaatgaccaaatgcattcgtgttcgacttgagcatatgcacaccaacttctacgcatataatgtccattttgtgccccttcattacatttaattggcggtgaatcgaaccctgttttgaagattactagcactcataggacggcaggaaaacacatactttacaggattgttctggttaccacacagttatacatgcactcctattgcttagctcgcatggaacaacatgacgggctggatctagagaaac

SEQ ID NO: 336273 - DNA, 349 bp, Zea mays
  unsure (1)..(349): unsure at all n locations
ctcgccttcgactgcccagagcgcccagcgcccgcgaagcttctagaacacgcgacgcgggcgagcgagctggcgggtgggcgaggcaaaactaaggaggcgggaggagcggcgatgcggggcaggtgacgctgcggcgcggcgtgggggatggtggcggcggagggtgggcccggcggggccgtcgaggagggcgtcggggagagctcgtccccgccgcgcgaggacgctgccccagcgcccgccggctccggcgggagcgggggcagcggaagcgcccgcgaaatctgtgcccaggtgctcgaccgcctcgtcgccgacggctacgcggaggcgtncgaccccgagt

SEQ ID NO: 336274 - DNA, 335 bp, Zea mays
tcggcaggtaccataaaaaaaccgcagccagccgatcccgatgcggggcccactcgccgagcagggggtgtccaccgagacagcgaccgccccggcgccaccgggcgaccctgctcatcctcctccggctgaggcggtcgccgccacaccaagccgatcgagaccgtctgggttctagcaactagactgacaaggcaaggcttgtttgttggagaggatccagaacctgaaacatgatgtgcagaactggcactccaatggacagacgcatgtctatacatgcccaaatggactacacgatctcaagaaaggacttgactctgaagaggaacagc

SEQ ID NO: 336275 - DNA, 378 bp, Zea mays
ctcatttccatcccacccttgcgatcccggcagctgatccttcttccctttctctctatcggacttgccgatcgggcgccggcgccgtcgccttcttcttccctctcgcgctttcctcgcggcggtggagccaccaccaagccggctgcaattcgccgtggcgcgcctgactcgtggcgcgggaacgcggttgcacgcctcgaagaggggagacccctctcccgcgcgcgacggttcccgaacatcccggcgaaggacctgctcggtcatcgctgctgccggagctgctcatgttgaatccgagatctgaaatctaccccaccatagagtatcgccctatccagccctccgacctcgaagctcttgaaaagattcatc

SEQ ID NO: 336276 - DNA, 230 bp, Zea mays
cggacgcgtgggtttttttttttttttttttttttttttttttttttttttttttttgttggtttttttttattttttttttacttttttttttttgcaaaaaaaacaaaaaccccataaacctaaaaataacccaaccaaacccccaaaaggacttgtcccgctttcaattttcctttttttctaaacacacaaaccaaattactatttccccggaaaggtttttttat

SEQ ID NO: 336277 - DNA, 243 bp, Zea mays
aactcactcgcctcgcctcgcctcgcccacccgcccgcctgtccctccccaaaggccggaggtcactcttgtcgtgcaccccttcccttccaaccggcaaaaactaacatttgccgccgccgggccacttgcaagggaccgaagggaagcccccgccggctagggagcggcaccaggcgcaagggggggaggagaagcaggagagccgccggcaggatgttcgggcgggacccctggggcggg

SEQ ID NO: 336278 - DNA, 175 bp, Zea mays
gtcacacgcgcacgaacacgtgatcaatacaccaacgacttccaattaacataggggtgcgacacgggtcttctttaagcccttatctttttcatatactaacaaattacctcacacggaacatacaaagaaatataccttggatgatcgctttctcccgatgatactacattat

SEQ ID NO: 336279 - DNA, 318 bp, Zea mays
  unsure (1)..(318): unsure at all n locations
gttggaagtgaggcagtagggtcactatggaaatgaatagacggagaggcattggcagacataatatatgctagactttcgagttgccgtgtttttcgaagaaacttagaatcttgtattattaggccttgctagcaacaaggtgcagatgcctctccgtttgctgttgtactttagtgtaacttaccttccgaatgtattattaggcgttgctagcaacaagatacggaggttatacatttgattttcagtaaaaaaagtagactctttgttggngaaaaaaaaaaacaaaaaaaaaaacaaaaaaaaagggcgggc

SEQ ID NO: 336280 - DNA, 325 bp, Zea mays
gcaaccggtccaacactttcacgctcaggcgctcagctctagcaatggctgcctccaccggggcgatctcctccacggcgatggccggtacccccatcaaggtgggctccttcggcgagggccgcatcaccatgcgcaagaccgtgggcaagcccaaggtggcggcgtccggcagcccctggtacggccccgaccgcgtcaagtacctcggccccttctccggcgagcccccgagctacctcaccggcgagttccccggcgactacggctgggacaccgccgggctgtccgccgaccccgagaccttcgccaagaaccgcgagct

SEQ ID NO: 336281 - DNA, 363 bp, Zea mays
cacagattaccagttgtaaaccaggtcgaaaaagtaataggtacggtgagtgaggtgcagaatgctcacaagccagcggagattaaaaaaaaaaactgcatgccatacacttaattagtattatccttaattatcattgacaacacagagattatatgttgcaagggctaatggggttctaaacactgtcaacaggtatagttacccgcgctgatgttcttcgcgtgttggaaggcatgttgaagatttatgagcgcagatacccatgctcggaagccacagcctcttgtaaatatgtagatgtgcccgggcatggtgtttctgagtagcagcaaaaagatctaccatgtataggagtgtttt

SEQ ID NO: 336282 - DNA, 209 bp, Zea mays
atacaatatcatttaatacagccttttcagaaataagggttaaataaaaaatataatagacgtctcgtttcacacagatcatctcttatctcctttctttaatctttccttccaactgatattttatcctccctccattctttctctcttttcctcatcttttccttccacctcccatctcccctgatccacccccttctcttttttct

SEQ ID NO: 336283 - DNA, 218 bp, Zea mays
ctggacatggccaatttgtcacaatttattattttgacccatgtcatgtgaaactgctttcgttgaagtctggtatctagattgacttgtaccagagctgtggtttacgcagactggattctggagtactggactgtgtgtgtttttttcggaactgaaaaaaaaaaaaaaaaaaaaaaaaaataaaaaaaaaaaaaataaaaaaaaaaaaaaaagaa

SEQ ID NO: 336284 - DNA, 357 bp, Zea mays
caggcaacttgaatcgttaagcagaggactggaaatcaagattccaatccaaatcactgaggggaacaaaaggaaagttgtgtgaagaacaaacttaatcgtgaaaaagtacaatatcaacaatgcacaggctctcaatcctacattgcaaaggctattatattgaagcaagaaaaatataaggatgcggaacctaatgcaatagatcttttcaaggagaaatgttttagtgaaaatgttcagaaagatattgttcacatggaagaaatggtagcagcgccatttcaggatggacaacaaccaacatctcctacagaagtttgttctaatgtgctacccggcttcaatgtgttttta

SEQ ID NO: 336285 - DNA, 254 bp, Zea mays
  unsure (1)..(254): unsure at all n locations
aggtgacttccagtcatgttttggttttggtggtgtcgagcagaggttatttattgttgggttaaggtcggagtcggacggatgctcttgggctaagtggatttaattttatccttgctgaataaagaacacggaattgtagccaaataagaacgtgatatataaatatttctttcccactttgctggatgcctggattttcaaannaaaaaaaaaactaaaaaaaaaaaataaaattttatcttttataaaaa

SEQ ID NO: 336286 - DNA, 304 bp, Zea mays
caagaaaccaccgccgagcccaaccgcacaagcgcgcgaggcaggagagagagagaggcggggagcgaaacaatggaggggaaagaggaggacgtgcgcctgggcgccaacaagttctcggagcgccagcccatcgggacggcggcgcagggcgccgctgacgacaaggactacaaggagcccccgccggcgccgctgttcgagcccggggagctcaagtcctggtccttctaccgcgcgggcatcgccgagttcgtcgccaccttcctcttcctctacatcaccatcctcaccgtcatgggcg

SEQ ID NO: 336287 - DNA, 371 bp, Zea mays
atcggtctctgcatgcaccgctcattgctatttaaaaaaaaatattttgtgcagaggggacggcaaggccgaggggttgccgctgatgtcgttattggtgaggttgacggtggtgatgccgtggatgctcgagtggcgcttgtccttgacgctggagttgaggcggatgatgtacttctatgcatggttggccaactacattggagttgaggcagatgttcctccagtccctggaagctcaactttgagccaccaagagaaccgaatacttgggaagttgaggagcaaaatggagcaaactctatccaaggtttttgagaattacaagtcactaatacgactctatacttgttggtttgacagaagatttt

SEQ ID NO: 336288 - DNA, 440 bp, Zea mays
caggcacactggtataatcatctattgtatgagcattaggaggcagaagaaaatgacaatgggagctaaaagaaaatatctctggtcccttttctgttggttattgctgtgctagagtattacttgtttggtccttttgcagctcaaggtaagttcaagctttatgtgacgaagcgtttctccttgatcattgctcaaacaagactgtctcgaatatgtgcccgaatatgaagtgtttccgccttttaattggtcagaaaggatgttttgaacacatcatgctgtataagttggatggcctgcaatttttgtattgcatctggcattaatcctcctttcactatgcaataaaatctacttaggtctggaacaattttaactatctggaacttaaaatgcaatatgttgcatcttctttcctttgctgaagctcatgccac

SEQ ID NO: 336289 - DNA, 385 bp, Zea mays
tgttatactccctcttttcatataaatatatgacaccgtttattttttttaaataaaactgtgatcacctgtcttattaaaaaaataataaattatcatttattttttgatttgttttatcactaagttagtttgtgtttgacttaaaatttttgattttgaataaatgctttgaataaaacgagtggttaaagtttctgaaaaaaaatcaacggtgacatgtatttataattttgaaaaaattcgaaataaatcaacggtaacatatttatgaacggagttagtataaaattagtggggccggctgttacttccacgagtggacaaaaggcagtttctatcactaatttgcccccctttgagtactcttctggtctatttgcaa

SEQ ID NO: 336290 - DNA, 382 bp, Zea mays
  unsure (1)..(382): unsure at all n locations
cggacgcgtgggcggacgcgtgggcggacgcgtgggcggacgcgtgggcagctgtcgatggaattgtcacttgctctccctccaacaagctaattaaggccggtcatccctcttctagctcgtttcattatccatggcggaggagaagcaccaccaccaccacctgttccaccacaagaaggacgaggagcaggaggagcagctcgccggcggcgggtacggcgagtccgccgagtacacggaggccacggtgacggaggtggtgtccacgggcgagaacgagtacgacgagtacaagaaggaggagaagcagcacaagcacaagcagcacctcggcgaggcccgcgccatcgncgncggcgccttcgcactcgtacgtagt

SEQ ID NO: 336291 - DNA, 89 bp, Zea mays
aaaaaaaaaaaaaaaaaaaaaaaaaaaaaaattaaaaaaaaaaaaaaaaaaaaaaaaaaaagggagggggggcgctctaaaatgtacca

SEQ ID NO: 336292 - DNA, 399 bp, Zea mays
ttcccttctcgctgccgtgctcctgctcgtgcgcgcgttcgcaatcgtagcgctggggttgagccgcgagtggataaaccctagccggtggtgtagctgggttggtggctttgatgccggcgacggcccgcttgtccccggaatggagtgaggtgacgaaggctgccatgggctctaactatgccacgattggattataggatagtagctggcagctaccagtttcctagaaccaatttgtggatagcgagaggagtgactgttgttcagtactttcacctcgatcatgggtggtgtctgctcaaagaagagaagccaattggtggatgaaggtgacgctctccagacatccccaaggttctcaaagaccagcagcttaaaatggcttgtgcttacact

SEQ ID NO: 336293 - DNA, 316 bp, Zea mays
cgagatggaaggtcctgaacaggtacgagaagacgctgctaagctacgaagctctctatatgagtatgttccatcaatactgcgtgttgaaaaacttgggttttggctcaaatgcgacgatccatctcatttttattctgtcgtgaactctggctatttttcttcttctctaatatatatatggggattttaatgatcaaatttctgagctctatcttgtctagtccttgatcagactatttcagtgatgtgtgccactcttaatttggacgcagagcaacccttgcgccatatgcctgggtgccatgggcgccga

SEQ ID NO: 336294 - DNA, 255 bp, Zea mays
gctatgcaaccatgagaaaaaccacaagttcagcttgcagtactgcatctgggaccattttaaggaggtagataatatggagtcaagtagatccatgaaccttgcgaagctagttgcggagatgctgttgaacttcacgctctccctcgcaactttgaaggttgttaacctggccaacccggtggagatgactcctgcaagggtctcgcatttacggatgctgtttgagaccttgctacataaagacgattcacg

SEQ ID NO: 336295 - DNA, 276 bp, Zea mays
  unsure (1)..(276): unsure at all n locations
cccacgcgctccgatatatccaatatatcttaataaattactccacaatatttatattgaccaaatattatctacacattgattcttattaatcaaacctaatctnacaatcattcaaatcttttctattaataatctaatcttaaacatttaaaaaaattctacatattaccaaataactcctttttctcaaaccatatttcaacaatttccataacttacctttcattaacacataccaacttcttttctttaacatttctttatcttataaaa

SEQ ID NO: 336296 - DNA, 91 bp, Zea mays
  unsure (1)..(91): unsure at all n locations
gcaggcgcgggccgtgggcaagcgcgtgcaggtggccggacccancgcggagcggaccggggacaacgagctggacaggaccaaggggcga

SEQ ID NO: 336297 - DNA, 82 bp, Zea mays
  unsure (1)..(82): unsure at all n locations
cagcgccgtgccggcaaccttcccgttctcttcccgcgaacccagcnnngacgcctctctgcggccccgtcccgaaatcgcc

SEQ ID NO: 336298 - DNA, 361 bp, Zea mays
  unsure (1)..(361): unsure at all n locations
gacccaggcgtacgcggacataatgcgcaaggacacctnaacactaattgtatctttgccccatgcaacctcggggcggggagcccatcaggtccggggactccttcaagaccatcatcatgaacaaaaaatctaagcgtggaaagtcaaaccccgcagagctctatggtcaagtaacaaatgcaagcaaccatactcatcataacttaaaccgcccttctttcaatagtgaggacccccaataccatgcctcacttaacgaatgcgctgcttcccccattcccaacgcttttcggaaataccaagcaaggaatacccttcgctttctcaagggaatcaaaacaattcgccttgtgggtca

SEQ ID NO: 336299 - DNA, 172 bp, Zea mays
cccgcgcatatgccgacttttcagtccgcaatctttaccgcaaggaccctcaggcgacggtggcgaaccttgcgcggtgtgggggcaatcttcctataaacaactctccacttaatgattatgggctagccaagggaaaaagcctgcatcttgttattcgaccgcaagatct

SEQ ID NO: 336300 - DNA, 401 bp, Zea mays
ctctcgcctctggttggcagagctctcttgaagcctcgagactcgtctcgccgctgctccggtcaggctgccgttgcgtgcctgcgttagctgttgcattgcaaccccgcgagccttgagctgctagctcgcccttcaccacagtcctcagacatggagttcgaagaccgctgccacaaggtccaggagcccaaattcgactgcctgctctttgacctcgacgacaccctgtattcccttaacccccggaacccaagcccttgtaagaaaaacctttaaaaataccttggtgaaaaacttggtatttaccaaacccaaaaccaaaaccttggccatctggttgacaagaactaccggacccccattgcttgacattaagggcattggctaccgcttttttt

SEQ ID NO: 336301 - DNA, 288 bp, Zea mays
agcaaaacagaagcccaccgcgccggcaagccgaagcgagcgcggagctaaagatgccgcggaccacgggggaacagagctccgggtgcccgcctctccctgccctcaccaccgacatcctcagccatggcaaaggcttgacggcccacacgaggccagctggcgccgtacaagccggaaagactacgagcgcgcacagacctgcccatgccatggttgctgtctacaacgacaagaacgccgccgacccgcgcttggctgacgacacgctgaacagcgtgaatgagc

SEQ ID NO: 336302 - DNA, 401 bp, Zea mays
ctcctgttgtagatatatttgttcttgctggtggctgacgtcctgcaaactctcataaagcgtgatggtcgtgtcaaacaccccctagcccctgcagaatcctgtgctgtgctacaatatgcggatgatactatgattgtgatggaagggaacccagcccatgtgtgtgtactgaaacagctcctggacagcttcagcaaggcaactgggttgtgtataaattttcagaaaagtgtgctggttccaattcacatgaatgagactgctgtccaacaatgtgtatccctgctcggttgtcggcgcgaaggtttcccacagacatacctagggctctctctttccctaacaaagactaggctttcaacctttgttccatacatggcgaaaacagacaagtactt

SEQ ID NO: 336303 - DNA, 296 bp, Zea mays
aaaaaaaaaaaaaaaaaccaataactaaacaatcacaacaaaaactaaaaaaaaagggacacggcgatcaaaatccacatcatactctcccctccttacctataaaacaccctcctatagtaacaccttcattaccttaactctctgtacatttcaaccgttggctctcatctttccctatcttatccctttttaataacctcttgattaatattctttttactggattccctttctccgtagagtccacacccactgattcttctgacacttttgaaatacaccattctcctttt

SEQ ID NO: 336304 - DNA, 305 bp, Zea mays
gcgctcaccgcttctcggaccactctatggaaatatctgctacgatcctgcacgagggagggtcgatatctatccatgtcaatatatgaactacaaactatacatgtcagtctgacaaaaacaatgtcataagatcaactgtttgttcattgcatcaactatctctgctctatatggaattgatgatagaggacgatgcacctgcctaggattttcaatactggatgtttcacgtgattcgagacgagcctaactgagtacatggcactgataaaatataccaaggagctcatagtcaggaatgc

SEQ ID NO: 336305 - DNA, 61 bp, Zea mays
  unsure (1)..(61): unsure at all n locations
cacaccgcgcgagatctntcgatccccgccaaaatccacgacgcccgcgcggcggccatgg

SEQ ID NO: 336306 - DNA, 268 bp, Zea mays
ttggtggtggtcttattggatcaggaatctccacataacataccggtagcaacatcaactggtgtgctgagggaagtataccctaaattttttacatggggactgaaaacaatgatacctaatctatggggcctggctacatgacgtgctctttcaaagaactatatgctcatggccatggacttgctaaagggtgcatctattgatttagatcccaaggatgaatgtatctgcactgaggctgccaatgagacaattcctatgtagc

SEQ ID NO: 336307 - DNA, 198 bp, Zea mays
acgatcgcaaccaaatcaagttacaaataaagtggataaaagtcgaccatgggcgaaggcagggaggaaattatgataactacactaactagcacatactggagtacatgggtatgactgcgaatatggctaagaagcaccttcttaaagtaatgatgaacaatgtatgcataatacaggatcgttgcaacagtactc

SEQ ID NO: 336308 - DNA, 377 bp, Zea mays
  unsure (1)..(377): unsure at all n locations
ggaatntcccgggtccgaccgcacgccccgtccgcggagcgnnngtgggtcccagattgggggtgcgatctatgtcggtctggtgacccagaggatatttcctgacgncgcnttcggcgtatgcatctgtccgggcgggtggacagatcccctgtacctgtcacagccgacaccggccccggcgttcaaggggggtcggcgccccatcaacattgtctcgatctgtctccaccacggtgctgcgttgggcgcctggggtcccgtggagatcnttcatgnagccgccacttgcccgcttctggtaccgcctaccgcgtgccggcttcaagtggcttggagcgcttttgctctacaccaaaacaccatcgttgtacccc

SEQ ID NO: 336309 - DNA, 305 bp, Zea mays
gcagaactcgtcgtcggagggcaactcggggtccgccgccgaggtgggctgcgtgggggaggtcgtcagagcatgagcgcttcgccgatgaccggttcttcctcatctgcaagggccagcagaggttccgcgtcgcccgcgtcgtgcgcaccaagccctacctcgtcgccgccgtgcactggctcgaggaccgcccgcccgccgtgcactggctcgaaggaccgccgcccgccgagcccccggcacacgaggaggacgccgaggcgctggccaccgacgtcgaggccctcatgcgggatgtcata

SEQ ID NO: 336310 - DNA, 185 bp, Zea mays
acggtactccggtccgatccggtcctgtgtgagccttatgtacgtgcaattttaatgtcttttgagtattgcaagactcgacggttggcggtgtaaaaaaataaaaaacaaagataaactaatcaacaaaaaaaaaacttataaaaaccttaactaacctactaaataataaaaaacaaaacagg

SEQ ID NO: 336311 - DNA, 351 bp, Zea mays
tttcaatagatggaagagtgtcgaatggttcttcagatactatttcttggtctgttgaagaggctggacccaaatgcaagttttgctcaaatgtggcaaaaatgatagtcacattaattgtcagcacgcctgcttccaacaaagttctagagaaggagaagatgaatgaaactcacattttggtggccgcacaaacgtggggacttgaattcatatatatttggttaggctcaacattaacgcaaaccggtgatgaccaagtttttcaattagtattttaatttaaaattaaaggacacttatatatgagttatttgaccatgcttatttattagatattgaacgacactt

SEQ ID NO: 336312 - DNA, 399 bp, Zea mays
cggacgacccacgcgtccacgccgacattcttgacctgattaacaaacggtcctacaccaaccttaaatacccaattccggctcactccaagagaacccaggacacaccggcttaattttaagaaggcttacaagaggcgcacggtggcggtctttcggtaacatctaccacaagggtgcgcgcgcgcgctatatagtcattttgatattcgagtacataaaaggcgacatctacgcgctgcagcaagggagacagcttatacatagactcatgatataaccatgtatttgctcctttcatccaaaaataattgcccaccatatccaataatcaataaatcttaatcttcaccaatcatatccatatcttgcgtatctaatattaaagaaagtgttact

SEQ ID NO: 336313 - DNA, 396 bp, Zea mays
ggtcgacccgctgtaccctggcggcagcttcgacccgctcgggctcgccgacgacccggaggcgtgcgcggagctcaaggtcaaggagatcaagaacggccgcctcgctatgttctccatgttcggcttcttcgtgcaggccatcgtcaccggcaagggtcccgtcgagaacctcgccgaccacctcgctgaccctgtcaacaacaacgcctgggcctacgccaccaacttcgtccccggcaagtgagcgagggcatatacatacttgtatgcgtgtaccgtagacatacatattcgtatatgtactgcaggagatgtaccagtattaatttgtgaagcagggagcatgggctcagagattgtaccagtagtgtacgtatttgcatgcatgctttg

SEQ ID NO: 336314 - DNA, 389 bp, Zea mays
gtatcacacaagaattctcgcaatgatagtatacaggttacataccctatatggtccttaaggaatacgtgcactatatatcatatgggttaaatttggattcaattgaatgaaaaaggatctttaaaatgttcttttttatgtcataaggaccctgtactacattacacataatgagcagaagaagtgttacctcaaaaacatttattgacaaccagaatacaacaaacacgcttgttgggttaaaaatgtgcaaggcataagtattctacttccttcgtcttaaaatataagaaatctaaagttcaaaatttgcaccaaaatacaagtattctggagttccctttttctttgtcttttaacatacaatattgagattccttttaaaa

SEQ ID NO: 336315 - DNA, 310 bp, Zea mays
  unsure (1)..(310): unsure at all n locations
aacccacccctcccgcttttgctaacccanacaacccaccacctattatttttctcattcacttctcactcaagcgtcttatattcgcccaactacaacaatctctcaaccataaaatacctcttatacatcctctaaaccaaccttccccttacattaccaaacactaaaactacattcttttatacaaacaattactttaaccccttttacttcctctcactcgctcctccattaataaaccataatactaaaatccctacctataaaactcctgttcaaccatattataaatcctcataaccctaac

SEQ ID NO: 336316 - DNA, 440 bp, Zea mays
  unsure (1)..(440): unsure at all n locations
accggannaaaatgtgtgaaatctcattgctatcggagctggcattcaatatgacacttgaaacctcacnaaggtggtgccggcgttcatactcgaaagatgacactttgcttgctatcacagagagagcctggcccatatattatctccacataccaccatatctcaccggtatgctacctggggaccggaatcagcaactgtgtcatacgtgcctcacggctgtaataatccaatatggagtgttgtgcacgntccatcccaactgcacctttcacgatgaagggccctgcgcaatataagcccaaagacacagaagaaagagaattgcactttctcataaccagaagccggtgaagaggaagacaggaggtgattcttttacaacacagtccactggagagattcnatgccgatgtaccgatgaaaccgctcggagc

SEQ ID NO: 336317 - DNA, 419 bp, Zea mays
  unsure (1)..(419): unsure at all n locations
gctttgcacaccacagactaccaacaacctatgctcttcctcaatacccttgccgtgagccgtcttgtggtcgccaaactaccgaatatgcacaaggtcaggatttttggaataaatgctgagagctaaacagcgtcatccttcaccagacattttacctatatgctttttcagaacggtctgtatgttccccttctagtgctttagttgggctcattcatcagagtaccatagtttaaaagttgttagcagatgggccttggtcgttgtatagagagatgctcagaggctggactggacatgtcgctgctgtacatctgatgtgcacagattctgtacacccttaatgttgctatatggtttgttgcgagcatctgtcagttgctatatatgtatgtatagnatcattcttgcagagc

SEQ ID NO: 336318 - DNA, 112 bp, Zea mays
aaaagaaaaaaaaaaaaaaaaaaaatttaaattaaaaaaaaaaaaaaaaaaaaaaaggaaagggttaatttaaaaaaaaaaaaaaaaaaaaaatcgccgccctttttaaaaa

SEQ ID NO: 336319 - DNA, 183 bp, Zea mays
cgacccgacccacgcgtgcggccccactccccatcacacagcatcattacgaccaacccaaaaccccaccccaccgggcggtagccttatctcacattgcgtgaccaccccactccatcatagcattccattaactccagaccaggccctgtacccacatgccaatcacagcgtacaccgaca

SEQ ID NO: 336320 - DNA, 178 bp, Zea mays
  unsure (1)..(178): unsure at all n locations
acgaccatcncctgctagcacagacaacaagcctttcgccacacattcgacactatgggaggcgcccaccatcgatacaggcgtcttccccaccgacagtccaccgtactcttatttgctagactgcttcccttatgcatcgctcacttgcttcactactctcaagacgcaatcatcc

SEQ ID NO: 336321 - DNA, 450 bp, Zea mays
  unsure (1)..(450): unsure at all n locations
ctcggcaacgactattcactcctccacggtggagtactgtctgacacacacttgacatactgtcaactgctagagatggcgaggacaatggatgggcatgccctctctgacccagcatacgcccttatacttcagccggcaagacagctatgagagacggtcagcacacattgctagactacacacatccacgaaggtagtcaacgccttcatattggtgcctcgcgccttactgggacngcattgcacgatctattgtcaatgacccttgcactggcagagacaactcacgccttgtcagtggagtcctacagacaccattgacatatgtcaagcgctaactatcacaggacaaaggagtggcatccctctctgaccaagcaactagcttatctatctccggcaagcacgcttgaggacggtacgcacaccttgctgactacaacatcc

SEQ ID NO: 336322 - DNA, 422 bp, Zea mays
ctcctcgccatcacataaaaccagtgcaagcagaagcagcgcaatggcgagcagcaccatggcccgctcctccacagccttcgccggcaaggcagtgaacgtgccgtcgtctctcttcggcgaggcccgcgtgacgatgcgcaagacggcggcgaaggcaaagccggcggcgagctccggcagcccgtggtacggccccgaccgcgtgctctacctgggcccgctgtccggcgcgcccccgagctacctgacgggcgagttcccgggcgactacggctgggacaccgcggggctgtcggcggacccggagacgttcgccaagaaccgggagctggaggtcatccactcccgctgggccatgctgggcgcgttgggctgcgtgttcccggagctgctcgcccgcaacggcgtcaagttcggcg

SEQ ID NO: 336323 - DNA, 355 bp, Zea mays
ctttttcagagtaaagccttgccttggtgctgaactttacatatttgattcaaatcattggaatggaaaaggaatgtctatagagcctggttttctattgtctctaaccctctgcatgaagtggaagtgtgcgttagaaagaagcaccattcgcatcgtgaaattgtactgcattttggccgcaagcttagagacctgcttggatacagcacgaacaagaagcaagcagcttgatcagcacaggaccgctgaaatggtcgaattgaactccaagctgctacagtacataaagaatgatctgaggaaggctaggaatgagaagaagaattcccatagtgtcatggagatggtgact

SEQ ID NO: 336324 - DNA, 340 bp, Zea mays
  unsure (1)..(340): unsure at all n locations
aaacaccaccctagctaccctacctatggggcggttgcaacacattcttctccggcaagggcaccaacgtccctccccctgtgtacaacaacccctcgtgaccaccccaaaatctacccaagcaatctccgacacctgcttcacacccggcaccgaacctcgcacgtttctccccatattccgcgcgacccaaaaaccttattccagtacccacaactacccttcacaccgagttctaccaccaataccganaccagcccagcacctgaattgaaggtcatccacttcccttgacaccgtctccacttatctaggacttacacacctttcggcccaacag

SEQ ID NO: 336325 - DNA, 186 bp, Zea mays
gtctcaactcttccttctccagcagcgggtcctaatgcgtcagcttgggcgccacctacagatccttttctcaacaattcttgtgcaccaacaacggcattcctaactcgtacttttccccccagccctacaactactcctctctgcggcggcaaaaccaatagctcaatctttagatctctcgga

SEQ ID NO: 336326 - DNA, 265 bp, Zea mays
cacaaacgttcctctccttttccatcgtcgtcccctcttctcgcgtgcaacccctgtacgtgctaggcacacaacacagctagctgcagctacagcagggcagcaaatggtttccggtgcgggtcatggtgggtacggcggcggcagcgacgacgggcaggccgtggacttccggggcaacccggcggacaagtcgaggaccggaggctggctggcccccggcctgatcttggccacgaacctgccgaaccccttttccttaatg

SEQ ID NO: 336327 - DNA, 395 bp, Zea mays
  unsure (1)..(395): unsure at all n locations
aaggnncgacccgagcgacccattctagatgtataaacacacccatggctcattatcttattctattagcactgcttaagcagcgacagagccaactaattgaaaatcatcaaattctcatattcactatatttccttctttttttttgattatctttacctttaattcttaccctttccttctaaaaatgatcaattcacttcatagatacagctctatagtcataggtagtttctaccccccaaatattaacccccatcctcctgcatatgcccattgaaaaatttatctatattaacaacagcatttcttagatcacatcacacataacatttatatcacctctaatccataaaaatgttccctccccacaaataaagtaaaggcttaaaca

SEQ ID NO: 336328 - DNA, 267 bp, Zea mays
ctggactcaaaaacatcccttccgaactatcctctgatgtttccattcccctgtagggtggggggcttctgaaggcctcctacccctccctccagccctacgtttttaccttctcaaacctacatctatacccttacaacgtgcaagcatacatattgttcctctaccccacactgtcaacaaagtcccaaccttctcgaggcttccaccccgtcttcttcagcttcaatgccgtactgtcaaccttgcttaaccacttctaccctc

SEQ ID NO: 336329 - DNA, 282 bp, Zea mays
ataaccaaacatagttggacgcgttcccatcctgtactcaacctaatctcgtcctacataggcgggatggccatccttcttgagaccttacctacccaaacgctctcggtgagctacttctattcgattaatcaggcaatccgcttgcttcattttagtccgtctcatatctgattgctggaaagtccaaacccgcgatggatcctgtctccggttgtccttgcctgtaaagctcctgtcgctctgtcttagtcgtctaaaatcacatgttctgcttattga

SEQ ID NO: 336330 - DNA, 356 bp, Zea mays
  unsure (1)..(356): unsure at all n locations
gaanngaaggnccgacccgagcgacccgaactgttacgcctttacggacacctcttcctaacacacaggacatcacaattataccactggagtggtgatttaattaccaaacttttacaacccacaaaggatatttactctacttttcacttcactcttcctttggacatcactaactgcgactgatatctaactgcaactacactaaagatcacactgccagccaacctagaccaatgcaaccagcaccagcaatacaaacaactaatggtgtgcagccccatgtgcaacactactaggagcaagaagctcccctccaccagaaagtaataggctaaaaatacttaagcataggc

SEQ ID NO: 336331 - DNA, 411 bp, Zea mays
gggcgcccgcgcgtccgaaaccctagccgccaggcgcacgcggtcacgtagcgagtaccgagcgccccagttcacacggtctgaggtcctaatctacgcagtcaatcctccttagcggtttcgttaatttgcttgtttccagcgggcgctgcttcacagattttgcttagctacgcttcggaccggcgttcctttgatgctagctcttaccttttggaagtcaaagagtgctgtctttcgcctgatctacctagacaccttttcttgcatcagcgacttctattttggttaattagcaccggtagcccccctgctgtcttgagtgagatgtccgaatacaagaacgtccttgggcggaggctaaagctgaagggtaatgcactggacgtgacggaaggtggagtccagacg

SEQ ID NO: 336332 - DNA, 358 bp, Zea mays
gcgacccaaaccctaacccccaggcgcacgcggtcactttgcacctaccgagcaccccacttcacagggcttgggtcctaatctacacagtcaatcctccttaacaggttcattaatttacttgtttccagcctccgcttcttcacatattttgcttagctacactcctgaccggcactcctttgatgcttgctcttaccttctccaagtaaaagagtactctctttcgcctgatctacctacacaccttttcttgcatcaccgacttctattttggttcattaacaccccccgcccccctgctctcttgagtgacatgcccgaatccaagaacgtcccttgggcggggctaaagctg

SEQ ID NO: 336333 - DNA, 248 bp, Zea mays
ccttgtccttccccactttctccttccttcttctccttcccgctcccctcgcccaaccaccggtccgtgtctttattaaaccgagcctaactccacccaatccttccgggcctcccggctccacttttaagacaccgaactcacacttacccttcgccttccttgctctcgacctttcttcgccgcccccgatgccttcctttcccttttcttcttcttctacttctgctttcccgaccccgaccgca

SEQ ID NO: 336334 - DNA, 377 bp, Zea mays
acccgtgaagctaaggatccttcaacacaatggcgcaaacataataaacatggggccccattggtggaggtgggaaaatatggatgagatccagaagtatgccttggaatacttaataaccttgaccacatcatttgaattttaggattacttccatcaaacacttctctgcaagcttcatctgtgggatccggccaaggtaaaacattacatccatctccaactacattagaacagataattctcaacgagctctttaaagtgccttggggactcgtcttttccggggccgccggagatgtcaatctacatagccaccgccgtggctgccatcacgatgctgtaattataccttttgtacatgtattccaatcagc

SEQ ID NO: 336335 - DNA, 327 bp, Zea mays
  unsure (1)..(327): unsure at all n locations
ccgccgattccgggcgccacgcgtcgcaacggccggcccgaacacccgggcaaggagccggaccccaggaggtgaggggcggcccagaaggaacggcaaaaaccgttccttggccaacttgttacacttngttgccgggcttgaaggcgaagaaacaccccaaccgcgcggccgccgtggacgcttccaggcgggagctggcgctgctcgagtccaacgccgacacccgctcgcaggccaccatggactactacgccaagatggagagcagcttcgacgccaccgccgagtccgaggccgccgccaggtccaagcgctccaggctcg

SEQ ID NO: 336336 - DNA, 447 bp, Zea mays
  unsure (1)..(447): unsure at all n locations
gatctacacnctaaaataaatccaaaactaatttataaatcaaattacgctatgttgcatggctcccacgattatataatccaacttataaattatataaacacctaatgatccgcttatatattattataatctaagtatatatattacatattcaactaataatttgtgttgtttgtttgtcacttaacttatttaagcgcgataagtttctaacacagcaggcaaaccgactcgggccgcttatcggttaataaaccatcctaaccacttctagacaatatatatggaattagccagaccggatcagcaggtggcaataccatctacttctctttttgcttggtgctttcaattatgttgtactaaatatttttcaacacttttctagatgtcataaatataatggtttaacctaatttccacgctcatacattttgcatgtta

SEQ ID NO: 336337 - DNA, 277 bp, Zea mays
ctgaaaaacaggaggatcatgtataacgaggcaattccacttactggaaaaacagcgaacgggacaaagcctcaggcttttaacagtactgctgaaagcagcaaggtacctgatactgatagcaagcctgcatcatcagttatcgtctctgtgctagctgatcccagggaggctggcaatggggatggtgatccaagagtatcaccaaaacccctctccaggatatttgtcgtcgttctgctcgatggtgtcagatacgtgacttactcgtgcacac

SEQ ID NO: 336338 - DNA, 97 bp, Zea mays
cctatgctgtggtcttcacttgatagtatgaactaactattctccgggctgaaactacgaggcggggacattcgctcttttataccaattcaaggtt

SEQ ID NO: 336339 - DNA, 127 bp, Zea mays
gactgaagcagagcgagcgagctgtccggccaaaccctcacggccgcctgcacaatgccgggccatctcgcgctgctcctgcccctgctcctgctggcctcgccggcgccacccctggcgtcgcgct

SEQ ID NO: 336340 - DNA, 323 bp, Zea mays
ggcttctcctcccccaccggttcgtgttcaggttctggttcgtgggcgagagggaagagatggcggcgtcgggcgttgagtaccgttgcttcgttggcggcctcgcctgggccaccgacgaccactccctcaacaacgccttcagcacctacggcgaggtcctcgagtcgaagatcatcctggatcgggagacgcagaggtcccgcggcttcggcttcgtcaccttctccacggaggacgcgatgcgcagcgccatcgagggcatgaacggcaaggagctcgacggccgcaacatcaccgttaacgaggcccagtcccgcggc

SEQ ID NO: 336341 - DNA, 272 bp, Zea mays
aaacccggccgacccatcatccccctagctgctcctaccaattttatcccatactattattaaacatactctggtgcacattatgcagcacattattacatatggtaccttcctcacttaccagaagaacccgaactgtaaattaaccttgaccaacttttacgtatgcaaatcattagcaacaaggacaacatgtttgatttctttaaagcatgaactgagtctcaacgtgcaaactatcttattaccttaggaggtattcaaagcaacca

SEQ ID NO: 336342 - DNA, 259 bp, Zea mays
  unsure (1)..(259): unsure at all n locations
cgaacacgcgtccgacctactcctccactatacgttagtttcccatttcttcatcattccctacaccgaaaaacacccaacantttagcaatcttacaattcaattcattcctaccacttctcttccatcttctacacattcaatcacaacgccaacttcacttactactacaacactctagtcctaacatcattctttatccctacactcatatgcacaacaccccaactatattaacctctttcacgcttgacacca

SEQ ID NO: 336343 - DNA, 390 bp, Zea mays
cagacgcttttgctgacgctttctaaaaaattcaccaattcgataatataccagtcaatggtggaagcgataaagggcacccatgcgctatagatatatatcgatcgatgtggacagccatgcctatagagatctcgtatgccagtgcagcacagctggatgagctcatgttatgtgcattctccggatgcaacaaattgctctgaagtacgaaaaggtaaatccttacgtgcctgttgcttataatcttggtaccgggaataaagtaattgcacctgatccgtgataatctaactaccaaatctgcgtatcaaatgaaaatgttagaactaaatgatcggatcgaataagcgtcttattaacactttctggctgacaaattaaccagat

SEQ ID NO: 336344 - DNA, 344 bp, Zea mays
  unsure (1)..(344): unsure at all n locations
acggaaccagncaaccagctttttaaggaggaactttagcgcaacactttgcaggttactnagagacgctactgaaaacttcatcgccctacccattactgtgaatacagtggcatctctcccctttgaccatcctccatccactatgcgactgctccagcatactacctgcatatcagatcaacaaagataaccttgcgcatactgctaagaaaatcaagactacccaaccaggttctacagaccctcaaaaccttaatcattacatcatcaccactctcatgaacggactatatattacggcgagcacattactttattgaattagaccacttaacctttac

SEQ ID NO: 336345 - DNA, 397 bp, Zea mays
cgtcacggtcatcgtactctccacacagggcatctgccaagtccccttctcttatactcagggggatgttttgactaccgcaaagaggaaggttttcaagtttgatgacggcatatatcgtggtgtcaacagcttcggcttcaagtccgacgtcaccgaaaggaagctctccaaggacgatgactgagcgatatatcgtgcataatctctcgataaacttatgtcagcgtgacttataataagctatactcagtgactgatgctttaataatcacgtcactatatatgtggaagaaaaatcatgtttttatactactaatatgtgtgcatgcacactttatgtgtcatgctttacttgtgatttattgcgacataacaaagacagtacctcttttcc

SEQ ID NO: 336346 - DNA, 410 bp, Zea mays
cgcttccccgcggtaggcaatagaagccgcagcgggagaaggaaagcgaagcgaaccctcggggcgcgagttagcgatggccggagaggacgccgccgccgccgcgaggaggcccccgaaggaggaggaggaggacgatgacgacgagtttgacaacgttccgctggcactttccagggccaagaaaccgggtaatgcgagcgcctccaaggtcaagaaggaggtggaggacgatgacgacgacttggacaacgttccgctcgcactttccagggccaaaaaggtttgcttgcctctaccccaaatctttgctttccggtctgtggcttggcggccgtcgcagtgcaagcgatgctaggtcttgaaagatttttttttggaataaaatttttttttggttaggtaatttt

SEQ ID NO: 336347 - DNA, 222 bp, Zea mays
acggtgttcctttactatcttgttcagtatcagcttaattttaataccattcacgttctatttcagtggactattcattttaacgtctattgtaactactttataatataccaaatgtatgatcgtcatcaaccaaatttgttctttcttttatacttgaacacattaatgttctatcacttttaaactacaatactttctaatgaacaccttctatttttt

SEQ ID NO: 336348 - DNA, 398 bp, Zea mays
  unsure (1)..(398): unsure at all n locations
ccaactccaactacgttcttgttaattgtcgaaacacacgttggggagatgggggactataaaagcctctatgaccccatccttattttaggccctttggtactcaggagcgatgcaaggacctgctgcgccgaagaaccattacttttgctgtgtgtgcaccacctacatttgcatgtagacctgcgactacctactcaccaagtgcgccaccacctgcaagaactgcattcccgtatccacagacacgggcgacaccaagtacaggcgctcttacttgctcatgcaaaactgctgctgctacatccactagactcatacacagcggcacagccgatggatcctttcatgctcctncgtccgtccgccttgctacaagcaggcagccatcaataagc

SEQ ID NO: 336349 - DNA, 237 bp, Zea mays
  unsure (1)..(237): unsure at all n locations
cgacccacgcgnccgcaagggcttatcaatgaacccgctcgctttttttccttaaccgaccagcccatgaaaaggaaggttcttaacactgctttgggttacaagataccattcactacaacgagatcacacctatctcctagccccccataatggataactgactgcataacatcgactaccccctccttcatctaaagatcaccggcttcttcaccggtgactgctccacactat

SEQ ID NO: 336350 - DNA, 300 bp, Zea mays
gcgggcttatccttccccaccggttcgtgttcaggttctggttcgtgggcgagagggaagagatggcggcgtccgacgttgagtaccgttgcttcgttggcggactcgcctgggccaccgacgaccactccctcaacaacgccttcagcacctacggcgaggtcctcgagtcgaagatcatcctggatcgggagacgcataggtcccgcggcttcggcttcgtcaccttcttcacggaggacgcgatgcgcagcgccatcgagggcatgaacggcaaggagctcgacggtcgcaacatca

SEQ ID NO: 336351 - DNA, 307 bp, Zea mays
catatgcacctatgctcaagctatggtgttcacgactgtcttggcgaaaattctgaccttcccggcgttgccctgtggttgctggaggacgggaagatggctagcatcttcaggagtactgtacttgcttctgcaccttgtggctttctcgaccgacgtgcaaagcgccctgtgtgaatatccatctgtagaaaaagtggatgccctgcgatccctttcttcatggacatggtgtgcagacctcttttactctatggcacttgatccacgactgtagctgatcctttgtactggatgcgagcgacac

SEQ ID NO: 336352 - DNA, 131 bp, Zea mays
ttcgctctagttcaatcgtcgccccaagcagttcccggcggaaccatcacagaagattaactgctcaagctgcactcttacccatcataggctactggcattatgcccctctttgctcccgctcgtcgcat

SEQ ID NO: 336353 - DNA, 245 bp, Zea mays
gggtgcctgagcttatattgatacggcactattaaaccgcggatacatcgcaaacagtgcgaacagctcaagcacttgcacccatggccatgcaagccagggacaccggactggggatcatttcagagaacgaagtggcggttgcggatctcagtcatcggccgcgatgctttgtaacggcggcgggaactataacggcggtgaccaccgagatgcttctggcggaatgtacaggaatgatccat

SEQ ID NO: 336354 - DNA, 248 bp, Zea mays
gtcaggttgtccccgtctaataaagccgtatttacctacgaggtagtcaaggaggtgcctgatgaatttgccagtggtgaggagctccccccctcgcgcataatctagccactccgcccgtccatggatcgcgccagggaaattcatgagattaaaacaggaggctcactcgattcgacaaatagagacatgcatcttatcaacagaggatgcaaacattacctaaactcatatcatattcccacttt

SEQ ID NO: 336355 - DNA, 92 bp, Zea mays
gtgttcaactctgtagcagaagctaaggctgaaacaaaagccaatgcatctgtgatatatgttccaccaccatttgctgccgccgctataat

SEQ ID NO: 336356 - DNA, 218 bp, Zea mays
gtttattatatcaatattcatacgaacttttattttaccgcttaccttcaaattattctggagaatcttgatccacacatggacatgccctatattgggtgcgtttaatagcctcacatccctcagccaaataacaacgtgaacatccttcctgattcccaccacgcttaggacgctaataaaatcatacttgcctacaaccattttgaaaacctttt

SEQ ID NO: 336357 - DNA, 427 bp, Zea mays
cgcagatcgagtcataaatctagctagcccttatcacgcctagacacgccagcaacaatgggggctcagctggccgacgcgtgtatcgccttgttgtcctcctatgccttcttggccgtgtctggccagaagttcaacgccatcttcagcttctgcgacttcatgtccgacaccggcatcctgtgcatgaacggtccctccgccgtcctgacactcacccagccgacctactgcgagaccttctttgtccgcgccacctgtcgctggtcccacagccgcctcgtcgtctacttcctggccgagaagttcaggctaccgctgctgaagccctctaagcaaggcggttcatacttcaagcacgtcgccaacatttcgatcattggcgcgaccaccatggactctggcttgttccaatttttgggcattg

SEQ ID NO: 336358 - DNA, 174 bp, Zea mays
aacacttctacacacaattcgcaaatggcttgtttacgatcggacacaaaggcataaagggcatcgtttcccattattgatggaccacactctctcgaggtgggaagcgaaataaaaggtggtcttttctaaaccaccggaccgagtgtagtgtagctctagcttcgcacgccc

SEQ ID NO: 336359 - DNA, 233 bp, Zea mays
gtgttcctttgttgtcttggacagtatcagctcagttttagtacgagtcagcttctagttcagttgactattcattttaacgtggatggtcagtactttataatagaccagatgtatgatcgtgatcaaccaattttgtggtttcttttctcgcaaacaggaatgttggaaccaacgaaaaaaaggggcggctgatctagaacagcgaagcttgcttactggtgcctacaatt

SEQ ID NO: 336360 - DNA, 154 bp, Zea mays
cctttgaaaatatttgggcgccatgtttgcatacaggtcttttcattggcagtcacaaagggcaaacgtgtgctccaattgttgatgactggcgaacaggtttctacccgaaaaaggcggatgggaagtactcttctcttacctaagctttcgc

SEQ ID NO: 336361 - DNA, 84 bp, Zea mays
ggcgtgccgaatgagtatgctggataccctttctcacgcgttggcactccctcagaactggggggatagctgggcatggaggaa

SEQ ID NO: 336362 - DNA, 267 bp, Zea mays
  unsure (1)..(267): unsure at all n locations
aaaaggtggaaggaacatggctttacaatctaacagaagcttgagctcnagaactatgatggtctccctgcgggctctagacacactggctgattacccctccaatgttggcatgctcaacttccgggtcgcgtgtttatattgctcctcaatttctattgtaaaactcatattgaatgattgtgccactgctggtcccttgatgctatcatgtatgagctgcttgctgggtacatctcgattgtattgataggatccgacacctac

SEQ ID NO: 336363 - DNA, 380 bp, Zea mays
gagagacatgatgaatgtgaatcaccgaaagaagtagaatctgagtctctttgttagataagaggaagcttgtgacactgtccacaatggtctatgttaaaggagtagtacgtatcgttgacgaccattgttatgtgatacatctaggcgttgacgggaacgtaacttacacaacccatttgttatacggttagcaatattggcacatgatgaccaaccatgtgagagacgctatgagggtgctaattgatatggcgcaacatgaccacctactcatagtactagtaaatgattctggtgcgtaacagaagattctggtacttcgaatagtgaatgccctcattctgtgacttatggagtgcaagatgacactgtcattc

SEQ ID NO: 336364 - DNA, 94 bp, Zea mays
gcatgatctcaagggggcgtttcttgacagaagaatatcttgattctttgtttgggacaaggaagctattgacactggccagaatgatctatgg

SEQ ID NO: 336365 - DNA, 377 bp, Zea mays
cgtcctccgcatcccggtgaccggtgttctccgatttggggggcgtcccttgcacgctccggtctgctgttcctccgccctccggagtcctatccagaggagcgcgctacggtacagatcgcccgccgtccatccctttcccagctctccagagcctccgccgccgcgtccggtgagcacatttcgaccggtttccaggtagtcacgtaccgcacctgtgcctctctctatcctctcctcgccgtatgcctcttggcgatttctattagtttttcattgtcacttagtttaagtcagctgctggtatgttctcgctgtctttacataattttctggtaggtccatggcttcagctattagctctgaaatattctaca

SEQ ID NO: 336366 - DNA, 394 bp, Zea mays
caacagagagccgacggcgagcacagccagcacaaggacttggacaggtaacacgagggcgaccggtgcccgtagccgacagctgaccgctgcgttggcgccagccgccaggccgggtggatgcggtgcaggatccatctcttcagccttctcccgcttccgctcggctgcgctcgcatcgcctctgccttgttgctgcctctgccgttgagttgaagcccgcctgcggcccgcctggtgtatatatatataagataaaggccgccgcatctcccattctccctgcaccgtttcgtcgcgtctcattcagcagctactagaagtagtagctggctcgctcctgccggtttcttgccgtcttcttcttcaccgacgacggtcgcgcgttcctacc

SEQ ID NO: 336367 - DNA, 181 bp, Zea mays
gcggacgaatagtatacgacacttcgcttactcactagattcccacatacatagctcggtgtacctttccttatcgtggggtctctatcccgaatctgctgggctttatttctatacatatatactatccctcgctattcgcatctctatactgtccgagtactctacggagttccgtaca

SEQ ID NO: 336368 - DNA, 291 bp, Zea mays
tgtaggcccagagagatctagctagagttttctgcatccgcctccgccctccagggtctggacctaaatgctcaagcgtacctccccacattatgaaagatgaaaacccttgttttctcctacctctattcgccgtaatcctaataaaaacatgcccaactctcatcttcgcagaagaagcagtcttcctccgcttaaggagatgacaaggagaaaccaacacatttgttatttctagtgtttaatacagcatcagggcgcatcattggcaacgttggttccaccattaat

SEQ ID NO: 336369 - DNA, 385 bp, Zea mays
atgactcttcttttggggagttcctgaaatctcctccccctatatttccgtacatgctttcgcacaaaagccgatccttcggtggatcgattccttcaatagcaacggtcggtcataaggtggctaatcactactacttattaagttagcatgcgtagccagccttgtgtgtcctgccgtgtctgctctgacacgtgaggccacgcttgctcttgcgcgtatgctctccgggttatatagtagcacatactttttgcgcaagtatatacactatatgctcctctagtggaaatgaagatacggcctaagagagactagctatctttgtcgggacactttgtacaggttaacaatatcaacgcgcatttgcttacgggaataaact

SEQ ID NO: 336370 - DNA, 290 bp, Zea mays
agtgattgtaggtttctttaagactctgacatctaactggctatcctcgtcttcaggatcctttaccatctgatcatcatccggcatacgtactgtttggatattcctccaaagacgtcagacctcatgacgggactgattctattatatggcttcctgataaggcgaacttgggtcatctcacaaaaacccaatgcacattgtactgaatgtatcaacatcgagataatgaagatattctcctattgcgactgctgggatgacctggattttctctaaagagtcattga

SEQ ID NO: 336371 - DNA, 291 bp, Zea mays
accatacgtttggggtgttcctgaaacactgtccccctatatgttcgcctcttcttccgcataatatccgatatgttggtatatcgaattcttcaattgtgacggttggttcaaaggcggctaatctctactacttattaacttagcaatattaccctgccttaagggtactgtcgtgtagttctctgacacgtagggcccacttgctcctgcgtgtatgctcccggtttattacgtcacacatttcttttacttgctaagataacattaattttctcaaaagacatcatt

SEQ ID NO: 336372 - DNA, 428 bp, Zea mays
ggtttgacggcctggtgggacggacgatggagccaagtgcttgagagaaggcatctgagggtaactgtttgctcgacgactagacgattcaccttgctcgccgttgccgcgtgttttctagatgaacgagaattccgtccggacgtttctccttcccccttgccgcaatcactgtctcgcagtgtagcagacagaacaactcaacagctccgcagaagctctgtttttaagtttcaatggaagttacgccaaagcagggaactatttgaccattgtgtggtatgtcatttatacaaaacaaatgtgaaggtatcaccctgcataaatatgcatgtcacttattatggacatgtggtatatctatagcatcactattagtttttgtaccattccgcacaaactcgtaatagatatcatatacgtcattt

SEQ ID NO: 336373 - DNA, 280 bp, Zea mays
acgataacgagatggatctgatgatgttgtttgttgggaaaggcctaatgatacgtgagggagatcctaagtggatgtagcgagaaaccaatccttgttgagctaaacgaggaccctgacggcgatgtgaagtactactcgatctatgcgctgcttgttgcgataaaatgaaggcgtcgagcttactaaccgtgttccagtgttctttcagttcgaagcctaatattccagtcaggtactacgctggaaattgttgggccacaacagatctgaagagttt

SEQ ID NO: 336374 - DNA, 314 bp, Zea mays
ctctctagacatatctggcgacgtggacttcttgaatcgacttactgacaacgcaggcgcgcaccttttcacgaggcgtgaacccccgcctggtcggtctatggataggagttaagctacttaactaactaccgtgttgcgatgaacgcgtggcatataatacgacctatgtcttgtgacactgagcgccatctaccgtcacatgtagtttcgccagacgtggactacgtggatacccattccggacagccgtcagaagtgatgcaccggacgagagccgtgagctttcttgaacgatgcacgctcatcttgta

SEQ ID NO: 336375 - DNA, 349 bp, Zea mays
cggattcgaattcgggccacgcccacgcgtccgggcctgccttctaatacccggatttgcactgccgtcgccgacgacgcacaggggagggcccatccgttataattcgttccttcgctctcggcggccgcgagatgagggagacacgtactggcagtcgacggtcctaatgacgactcactagatggagatgccacaacccatagcactctcacatccgtgacgagaagatggacatagaagcgttagcttatgcagcggacgggagcaagttctgcaaaggcgcagcctgagacttctatgacgccagcaactgctcgaatgaccacactgagaggtctgcgtctat

SEQ ID NO: 336376 - DNA, 402 bp, Zea mays
cggacgcgtggggtgggttggcttctcctccccctccggttcgggttcgggttcgtgaggttctccggggttcggtttcgtgggtgagcggatcgagatggcggcgtcggatgttgagtaccgctgcttcgtcggcggcctcgcctgggccacggacgaccactccctccacaacgccttcagcacctacggcgaggtcctcgagtccaagattatcctcgatcgggagacgcagaggtcccgcggcttcggcttcgtcaccttctccacggaggaggcgatgcggaacgccatcgagggcatgaacggcaaggagctggacggccgcaacatcaccgtcaacgaggcccagtcccgcggcggccgtggaggcggcggcggcggctacggtggtggccgtgg

SEQ ID NO: 336377 - DNA, 396 bp, Zea mays
tgtaaatctgtcagaggaggatagaaagaaggtttgtcttttactggaagttgcattttgttttgcaacgatttttttattatgtttagttgtttgccctccggaggtcgagttttttttactatattgtacaatagtcacaaaaaacagttaattttcagtgtttaatttaatcatgttggattcgttcagcaactttcctgcagtagccatggttgtatactattctgttagaagtgtttgttaaatctacgtaaagagctacagaaataagttaagttgactagtatatagaaggacgggtctggtgcagtggtgagagctatctcaatgagtcacgtgttagaagcagcctcaccgcatttgtcagggaaaagcttgcattggtttatgtct

SEQ ID NO: 336378 - DNA, 259 bp, Zea mays
tcgtgactggagaggaccagacgatatttaagttcttacactccattgatgtgcatgatggggatgcacaagctgggtattcaattcatttaaaccactctcagaacacgcgcttggtgtacacaaaccgcgcacagacccatatctttggtaatgatggaacaatcacaatagaagcttccgaaattaactggactgaaggaacgtgacactgcgatctttaatagtcttaacaagaggcgcagtaagcagcccttag

SEQ ID NO: 336379 - DNA, 169 bp, Zea mays
acgcgtacgcataactgtcagactgggcatctctgctccgctgatcgattctctgattaggcgcgggttgtgaacttgggggtgcctgtcgatccacgcccacactcttccttaggcgcatccctcataagcacctgggcgccatcgtcatcaatgatgataggcgtga

SEQ ID NO: 336380 - DNA, 392 bp, Zea mays
atgcgtaacaccttgttccccataatcaatctactatctactttcctgtagtaacgaacaaatcagctgaaggtgttgatgcatgaactcaaattccatacttcttttagaaacattgttgtatggttgataataaagctacgcatttataatattcaacgctgtaactttggaatatgtaagtcaacacaaggatatagtaaaaatgttgtcaccctcacattgttgtgtgcttgagcaacgtttttttttttgtagttgagatctattttcagtaattatatacatttgttgaaacttagacaaccatcattccatgtttcttatgtctgtatacagagattgaaggatataaatacacagtaccaggagaaactattaacacttagagc

SEQ ID NO: 336381 - DNA, 113 bp, Zea mays
  unsure (1)..(113): unsure at all n locations
atcgcctnctatccttcgcccgactacctcggcgggtcagggcgtgtttagggcggagggtgtggcatgaggagcagcagcagcaacgctccatggacccgtgcccgttcgtg

SEQ ID NO: 336382 - DNA, 270 bp, Zea mays
atcgcctactatccttcacccgacaacctcggcgggtcagggcgtgtttcgcgcggagggtgtggcatgaggagcagcagcagcaacactccatggacccgtgcccgttcgtgcgggtgctgatcggcaacctcaccctcagaatgccggtggcgccgcccgccgtcggtgccggagcggacgtacacccgtgcacgtcggcgtgctactgcaagatccggctcatgaagatgccggtccatagcgtccaggcgccgctcgtggtctccg

SEQ ID NO: 336383 - DNA, 260 bp, Zea mays
ggccatccgagttcaactcgattgttgactagctcttcctcctaaacggagcggggtgcgccgtggactagatacagaggctcggctgggtcaactttcacggctacactaagaggatagaaaaggctgtgctcatgtaagatcgctacactggagcaacgcgatgcatatcacgaccagtgtcgacagaggatgggcggaggtttatctcacatagacatggcacacctggtgctggagctagccgacgacctcaaact

SEQ ID NO: 336384 - DNA, 104 bp, Zea mays
  unsure (1)..(104): unsure at all n locations
nggcaataaagggaatgttatgctttatacaaagaacggaataatggagagatattatgaacatatatggaacatatatatggaaccacactgctgagcaacaa

SEQ ID NO: 336385 - DNA, 289 bp, Zea mays
caaaaaaaaaaaaaaaaatctaaaaaacaataaacataaacaaaaaatttaaaaaagggaaaggaacaatacctacgcaggcaaaaaattgtccttccctattccggaccccatcttcggatgcctggaactctacaccctaggtcttaacatcagccacctcctctgaatcctgtcgccctccctttacaacctatccacgcttaaaagcttgacctaaccaacatcaacctactgggcatcgttcttcctttcaacgcctccacttttaccttaaacggcaacgact

SEQ ID NO: 336386 - DNA, 401 bp, Zea mays
ctgaaaacagcatctggttggaatgacatgaccctgctgggtatttagacagtgagaaacatactgcgtttgttggaaatgcgccattgatcagctaacttaacacttacagttaatgtagcgctgacgagcgtttcacatagattgggagatctcaacgatgccggaagaagctgacataacaggtgttttaatgggaggcgaccatggaaagcgatgtgccgtctgcgtgtggcttctttctgagtggagggagtggtggacgatgctaccaacaaacagaggtgtaaagatagatgcactacaggctgctcccctcctttctgccccaatttcctccctgatgccatcttttgaggggacgcatgtttattgtgtggatggccttgccatgccctttc

SEQ ID NO: 336387 - DNA, 172 bp, Zea mays
gaccacgcgcccgcgacccgtgtggtcgtccaacttgaagacaaccatttttcacaagcgtgagcttactggggactgcccatttcttagcaaacagccacattctccatgctgtcgcagaactccacaaatattgtggggggcttatggaaaccacacgtagagatgcttc

SEQ ID NO: 336388 - DNA, 156 bp, Zea mays
gatcgataaggttctagatctgtagctttgttgtacgccatatgacgaggggacggggcaagattctctaggcagatttggttttagatgacgtaccaaggaacttctatatatgtggtcaaaggcttcatcgctttgtcataatattgtaagtct

SEQ ID NO: 336389 - DNA, 386 bp, Zea mays
ctttctcatttcagtcgccgccatggtgattccaccggtcatggcggctccgatccgagcacctggggcatgggcgggcgcgggttcctccccggcggcgcggcccttgcagcggcctctcctggtgggcacggcctgccccggcgacgcggtagcagccgtccctgcccctgcgcgggcgcggcggtcaagggcgagcaggaccgacccggctcgggcggcaccagccactgccgacgcgggggcacgaccttggcggctggagcagccctcggtgcgagtgcgcaaccctggcacgtgctacagcgggtgcgggcagcatacggcggcgcacacggtgcggtgggcgcggcccctgcctggctccccggcgatgcacggcgtgc

SEQ ID NO: 336390 - DNA, 145 bp, Zea mays
cggacgcgtgggcggacgcgtgggcggacgcgtgggtgcgccaaacaaacacgaaccttttccggtctccttccatgcttgtggggagggttcacatggattgccacgtattttgttcctgcagcagatatgtttgatctgttgg

SEQ ID NO: 336391 - DNA, 448 bp, Zea mays
ccggtcctaattccccgtcacccaccgtcgacaaaaacaaaatttctaatcaacttctttacaattcatattaaccaagctgctaaacttatctacaacatatcctacataaaatctatatacataccttttaacttacttcaagggcttctctttttaacttccaatttttttcccgtcttcccacctttcttttttttttttttcccctaatttcatttttttgccttcgttttaaacatcttaacttgaaaaaccttggttttccccactttttttccttttgagaaattcccctttttcccaatttgatttttattcaaaaggcccccccccttcttttttttccaaattttcccccttcttatttttaattgggactcccccttttctgtgcctttttccccgagtttttttttttttcccccaagttttccttttattttta

SEQ ID NO: 336392 - DNA, 451 bp, Zea mays
cgcagagataggcgtcttcgtactcgcctacctccgcggctcaaacctttcccccttctcccaatgccttccgccggccgccgctccacccgtacgacgacaccatgagggagtgcatttcgatccacatcggccaggccggtatccaggtcggaaacgcgtgctgggagctgtactgccttgagcatggcattcaggctgacggtcagatgcccggtgacaagaccattgggggaggtgatgatgctttcaacaccttcttcagtgagactggtgctgggaagcacgtgccccgtgctgtttttgttgaccttgaacccactgtcatcgatgaggtgagaactggcacctaccgccagctcttccaccctgagcagctcatcagtgggaaggaggatgcagccaacaactttgcccgtggtcactacaccattggcaaggagattggtga

SEQ ID NO: 336393 - DNA, 431 bp, Zea mays
ggccgtgtgggaaagtcaagaactgccagcgtggaatctcagcagctgtgtccggaacagctcagaatggcaggcagggcccaggtgtcaccatgggtctctggtctagacactgtagagtgtatggcagagagcgtctgtcgtctgtgcgagatgcctcgatctggaccggagcagtgcttagaccaagggcgtgcctccctcctgtctccccttctcttctctcgtctcgtttgcgttgaatgccattcggggcatggttggtgtatcagagatgacagatggtcggttgctgaacaagaatttattgctgcttcatactaataacaataatactagttaagtcgtgcatctctacggtttctatatattatatacggtttatttgtacatcaatgatcaatatgagttgcagtggttagtgtaagaat

SEQ ID NO: 336394 - DNA, 240 bp, Zea mays
  unsure (1)..(240): unsure at all n locations
attcaactgatggtgctttctgctttcggctgcgaggaacttttcagattctgaactaaaacccactagaatcagtgccagcagtcacttggaactggttctcgtttgtgtactagtctagagaaacgctaaaaaacaggtttctcttgattctagttctaattttaaggatacagtgagcttgctacatgaagttattttgatttattagagaaaatgttttgttctcagggcnnanna

SEQ ID NO: 336395 - DNA, 288 bp, Zea mays
ctcttggagtcatgtaggatctgacgcctgttcaccacgtgcctttcttcctccttggttcttcacagcgggtcctgccggatcacagcttactggtgaccgcacctccgttcctctctcctgagtcttctctcctcaccaagacaacagtcgccactgtccactgtccccacccgactgcctgcataaaaaaaaaaccgaggttcaacaaacagccactgaaatcttcatgcccatccttacttcctacccacacaccatatctctttcacatgaggatttctttcc

SEQ ID NO: 336396 - DNA, 407 bp, Zea mays
gtggactgaaatatctcaatctcaagtggttcttgtgaaatcaaccatgtctatttggtggaccattcgcgtgtgtcttatggtttacactgtagttaactcgtgatgtctttcctctggcatacataaatggtgccgcagaacttccgatgttctaggttgtatgcttgcttcacatggggattgctgatctggagatatgccttgcagccgggtctgcctctatttgatcttttagctctgcttgaagctgaattcccgtcgaccggagatactgattctgctgaagatctacagcttgctctcatacgacgccctgttggcatgcattgtgttttctgatgtgctgacaaacatgctcgggtaaggaaaagatgttttgtctgccggagattctgatcatctgg

SEQ ID NO: 336397 - DNA, 421 bp, Zea mays
ggctaaggtgatcaaggatcgaaacaccggacagagcaaaggatatggatttgtcaagggttcagatgcgtcagaggccaatgcagcgattgctgcaatgaacggtcaccatcttgaaggtagagttattgcggttagagttgctggaaagccaccacagccggcaccagcagtgtcagcacccccatcgtatcctcctacggatcctacttcaggtggatattcctcccaatcctacatgggggtaccaccaccaccttctccagggagtgacgctccagttccttggggacagacaccaccgtatgcttcatatcctgcgccaccaccaggctctagcatgtacaatcctgcaccacctgcacctggccatgctgccccacctccatatggcgtgcagcatccaccacccccagcagct

SEQ ID NO: 336398 - DNA, 427 bp, Zea mays
  unsure (1)..(427): unsure at all n locations
gttggcttctcctccccctccggttcgggttctgtgttcgtgaggttctccggggttcggtttcgtgggtgagcggatcgagatggcggcgtcggatgttgagtaccgctgcttcgtcggcggcctcgcctgggccacggacgaccactccctccacaacgccttcagcacctacggcgaggtcctcgagtccaagattatcctcgatcgggagacgcagaggtcccgcggcttcggcttcgtcaccttctccacggaggaggcgatgcggaacgccatcgagggcatgaacggcaaggagctggacggccgcaacatcaccgtcaacgaggcccantcccgcggcggccgtggaggcggcggccgcggctaccgtggtggccgtggaggcggcggctacagcggtggcgggcgccgtgatggcggc

SEQ ID NO: 336399 - DNA, 365 bp, Zea mays
cagagggctgaacagtaaaatgctggagaaaagactgcacggatgcctgctcctgctcgtcttccttctggcagacgtatcagttcaccgccacttatttgccagtaaagatgtacgtggagcctgcatgagggcagccgtgctgaaactgccgtcgatctgggtccagactcggaggacggcagcaagaggaggtcgctggccaccgccatgttctgtgtggcgaaacagggcgcggacgcggcggcgctgcaggcagggctcaactgggcgtgcgggcagggcctaacgaactgtgcgcccattcagcccggcgggccgtgctacaagcagaacgacctggaggcgctagccgtctacgccta

SEQ ID NO: 336400 - DNA, 358 bp, Zea mays
gtcgcgcgcagaatgccttttaaaggacgggagacagggaagactcatgctctagcgcaactgggctgagctaatctgagcccgccaggtttgcggtctgcggttcagcttactatgtctacccagcgcgatagacaacttgggatacttcatgtaaaggtagtacaatgcgcccgtactgcgcggtgctctgctggaggcggcacacgtgtcatgcctataggaccggatcgcgctgggcccgcagatggggtgaggccagttacgcgtgatccgaacctgcttcgacctgctcaccggcgaggcgctggactgcaagtccatcagcaaaggccggatcttgttccccgacgacgtg

SEQ ID NO: 336401 - DNA, 294 bp, Zea mays
ggaacacaaggcagctagctaactttaactaggccacacactgctgaattattcaggaggaggaccttctagatacctagctatagctcgcccggcggacacactacaacagcgacctcccatgcgcgttgagaagctgatgaaccacctgaaaccatacctggcgattgtgctgctgcacgtggcgttctccgagatgtacatcgtctcacggcgccttccctaagcgcggcctgaaccacttcgtactaagcagataccggaatcttgaggtcaacgacgacatggccccct

SEQ ID NO: 336402 - DNA, 267 bp, Zea mays
acgcaagacccaaaacccacaatctatctttgtgcacagcatggaagaagaaagaacctatggcacagtcgtggtgcggctccctcaagctgctgaatctgcttctccctgcgctcctgctgatacgagaacgatcgcaatgtatagtataacggaccttctatgcttatgggagcgacgacgagtgcctgattccctgcgctctagattcttactttcggtcaaatggtggtaatcgtggcagatgttgacccacatggaacagaa

SEQ ID NO: 336403 - DNA, 409 bp, Zea mays
  unsure (1)..(409): unsure at all n locations
tcccgccagccgccctccagcgtggcgccggcatctctggcacgtggcttgctcatgctcttgctccgcccccgcagctaccacagcagcaggaaccccccgggttttatggccggaggaggtacgaagatgaatacaacagtaaccctaacggctggcctaggcgagccaatggcactagtagcagcactagtagcagagatgattgcagccgtggcagctacaatggaagagggaagaggaagtatggggagtacaggagggggtatctggactcanggagagacagggaggagagaggaaggccatttccgaacggccggcgctacgaggaggatggggatgaagatggggcaccctgggttcaaaaaaagcgccgcggcaatcggggaatgatgaggcgagtact

SEQ ID NO: 336404 - DNA, 53 bp, Zea mays
  unsure (1)..(53): unsure at all n locations
aaaaaaaaaaaaaaaaaaaaaaaannaaaaaaaaaaaaaaaaaaaaaaaaaaa

SEQ ID NO: 336405 - DNA, 333 bp, Zea mays
gtctagatcgcgacggccgccctttttttttttttttttttttttttttttggatagcgcaatatttattctgagaaaaggacgcagaaccacacgaggatctagcaagtcaaatcggaaggccgagctaccatacctaatactatagcctccacggtctcaccggatttgctactttacatgcagcgtggataatttggagttttggacgagtgcacgtactgagcgcaaagtttcgccggttcaaaacctgtggatccccaaaaaaaaacatgtgatttaaaacttggccgagaggacagagtatgtacttgaatcagtaattcacacttg

SEQ ID NO: 336406 - DNA, 201 bp, Zea mays
  unsure (1)..(201): unsure at all n locations
gcgacggtggcatgggcatccggtgtccggccaatgaagaagacnggataaatgtgacgtaaccctctgttcgagaaaagggccgaagcacgttcgtgcatcggtcggcgcgttgccatcccaagaaggatcctgtcaccgattcgtcaatgtggcccataggtcgtgctgcattcagcgccatgcgtcgcattcctcaag

SEQ ID NO: 336407 - DNA, 295 bp, Zea mays
ggctgatctccatgtaccttgttgaatgccgggtgacaccattcttattgcggctggtggtggccatgttgcatgtaacatccaaataaagaagcctatttgcataattggcggtggcgttatgcctgctgtcactagagtgacccgctgactggacatgcacatctctctggaagctttatcaacatgcaagattgcatatctgactatcagagcaaaactcggatgcttcttgcttgatcgaggcgccagattgaccattccggacagtctccctctttacgaggctttgacc

SEQ ID NO: 336408 - DNA, 88 bp, Zea mays
aaataaaaaaaaaaaaaaaggacggacagaatttaagataacaaaaataaaaacacatacatgcggaaaaaaaaaatataaaataaag

SEQ ID NO: 336409 - DNA, 294 bp, Zea mays
  unsure (1)..(294): unsure at all n locations
gtcggattcaacgacgaacatttttgtcgtgttcgcgaatggccaacatttcgctttcatgtggatntggtgtatgaccaacgcgcattttctatttctacacctactatctcacctaacttctttacaaatactactcaccaatcctcaaaaataatttggggcgcccgctctaaaaaacccaaacttacctacccttgcttgcgaccgcatacccttcctatagcgaccccaaaattcaattgattggccccatgtttaaaaactctatacaggaataacccggcccttacc

SEQ ID NO: 336410 - DNA, 337 bp, Zea mays
cggacgcgtgggcgtgagatcggctcgaatccaatcctctccaataatacgcaccggcacccatttgcgccatgctgccgcggccggcgaccacgacgagccaagaacacgcgcggcatccctgagccacccacccaggcttaccaaaacggattccttttccctcttggatcccagccgctcccaagcgtgcgcgcgaattctctgcttgcctcgcccagcgccgtgtgctcttgtgctgaagatccatcccatccatggaggggtgccaactgctagtaggctgtaggatggagatggaagaggaagcgttctttgactcgcgagaggagctcac

SEQ ID NO: 336411 - DNA, 349 bp, Zea mays
gataatttccccaatcccccccgcgcgccgatcgcgacaaacatgcatggcgaagccttccgcttctgcagcggcggcggcgctccgtgcctccctcggcgtcgccttcgcgctgctgctcctgctcgcttcctcccgcctcccgcaccgcgccctgtccgccgaactctcgtccccctcggtggtggcccacgagcgacgcggccacggcgcctgcgcgggcgtgcggacccccgacgagagataccgcgccatcgcggccgggtctgacggccggtaccgctacccgcgcggcggcgggcacgtcgactacctgtacctcttctactgcgtcctcggcggcgaacgc

SEQ ID NO: 336412 - DNA, 59 bp, Zea mays
cgcttctcttctcccgcctcccgcttttcgtctccgtcttctacggctactgctactac

SEQ ID NO: 336413 - DNA, 217 bp, Zea mays
gggcgcgtggcgaggcgatgctattgatagccggtaataattattcgctgggcttaaggggagtatttgagtatactctgtatggtccactcattgcgtgctgtgctggtgttcatttgtatttggataattgtcgagcccctatggcatgattgtgtcatatatctgtttgatttgcaatgctattcatcgaagtcgatgtagtatatttcattca

SEQ ID NO: 336414 - DNA, 454 bp, Zea mays
gaaggaaggttgcggcggcgagcgctgactgtatctaaacctcgatgatcatggtgtccgcttccaagcgcttctgctgaggcgcaatctacttcacatccagaagacaccgaagaaactcaagacatggacattgaaccaactgggtatgagtaagataaacttcattcttaccttctatactaaatcttaatatctttcaaataataccattttatattgaatttccataatgaactatatgtgtgtgtatgtgcataaaaagattatacttatttgtttgatctgctataaaaatatatttgagaccactgaaatattgcatattagtttaacatatttataaacatctttaatagcttatgtcatgaatgccctatgaagccatatttcagagaccatgagctatgcgacacaatagttctcttatttcgtgtactgttggacagagtaa

SEQ ID NO: 336415 - DNA, 372 bp, Zea mays
agccaggccagcttcctgatgcaggcctgcaccctgaccaagcgctccttcatgaacatgtggcgggacttcgggtactactggctcaggctcctcatctacctcctcgtcaccgtttgcatcggcacgatctacctggacgtcggcaccaaatacacatctatcctggccagggctgcctgttccgcgttcgtcttcgggttcgttacgttcatgtccattggagggttcccttccttcgttgaagaaatgaaggcgtgcatttaagacggggcgtgatttccattcattcgcagctaaataataaacgctagctgggaatactggttcatttttttcttcttacacggctttcagcgggaacgggtggac

SEQ ID NO: 336416 - DNA, 401 bp, Zea mays
cggaacgaccgacgcgacccacacgtccgcagtgtgttgcgatctaaatcaaactcatccgcccgacgcttggtgctggcggaggacaggaccaagaagaatgtccaccgtctcggttcgcttctacgaccgcagacagtaacgatgcgggtgctcaacgggtgccgctcaacgatagcgaactgcagatttcgactataacttacacgcggacataaagcccgtccggaccgacagtgacatggtactggacacctgagtcgacgctgtggcgctggacacatcgttgaaactgaaactgcctcgttgcaacatccatactaatctaccaccctcgcgttcctctccctaaatgcccgccccgttgcactcctacggtaatctaggtaatctggtcgccg

SEQ ID NO: 336417 - DNA, 473 bp, Zea mays
  unsure (1)..(473): unsure at all n locations
cgggacgacccacgcgaccgctcgaacgangctaccccaactcgacggccggaacacgacaaccggagctccagaggcgagggggacggcgacaagaaggatggggcgcaacccaaagcactcacacgggaacaatacaagaacatgactcggggcgacagacacaacacgaccggcaaaacgcagggcgatggaacggcgagcaccacaaaccctactgacctgcgtgtacgaataaaagagaacaccggaacggatgcacccaacaggcctagaagaatagcgtatacagaaacaggaacgagaggacacatgccgaggctccggagaagacaaaagaatcatgtgaagaggaagcctacaatttccaagaagactattactcacaatgagagcatcaaaggcccgcatgaaggagaaggccagcaagtggactccttgggatgaactaccttctggaatctcttactctc

SEQ ID NO: 336418 - DNA, 265 bp, Zea mays
tcgggcttcaaccttcaagggttcacccattttaaaaacctaacaaccgggccttcattgggccattcctagcccaaaatccaatccaaggtcgggccccaagcggggagggaacctccggggcgaactcgtcccgcaaatcggggggcggggcaaaattaaaattcggtccggggttcggctgggtaggctcggcggggtcccaccgcggcggtcggggagcatggtggggagggggggagggctgggaaggaaccgccggcgg

SEQ ID NO: 336419 - DNA, 464 bp, Zea mays
ctggcttctcctccccctcttaccaagtcctcctcgggttagggttccttagggttttgtggaggggcgatggcggcggctgatgtggagtaccgttgcttcgtcggcgggcttgcctgggccaccagcaacgagtcgctggagaatgccttcgcctcctacggcgagatcctcgactccaaggtcatcaccgaccgggagacggggaggtcccgcggcttcggcttcgttaccttctcctccgagaactccatgctcgacgctatcgagaacatgaacggcaaggagctcgacggccgtaacatcaccgttaaccaggcccagtcccgtggcggtggcggtggcggcggtggctacggcggcggtcgcggcggcggcggcggttatggtggcgggcgccgtgacggcggttatggcggcggtggcggctacggcggtcggcgcgaaggtggcggcggcggcta

SEQ ID NO: 336420 - DNA, 251 bp, Zea mays
  unsure (1)..(251): unsure at all n locations
anangancnnnacnacagaaggaaggaganancacgggagccccangagnnnngccnggaccagagcgaggcagancgnaaccngancgcaaagnggaaaaagccagganacgagcgccnnngcngccnncggngcanacagacacgngaccacaacnnngcaacgacccgngncngccgagnccccaagcancngagggaggagcaaggganagaangngnccanngcggcngcaggggnggggccagcg

SEQ ID NO: 336421 - DNA, 284 bp, Zea mays
tgcctgtactactgaagagtataaactcaaactgtaccacgacatggaaataatatcttctcatcatggtctcatttctgtcataagctttactttgccactttgtcattctatatctgcctaccaagttaattccaatttcgagatccctcgggagccatcattatgtttggtttcatgccacaaagtcagacatagaagagcgatcttaagaactgaagaataaggatgatgccatcatgaacctggagaaagccattgaagagaagtcaaaggctattacc

SEQ ID NO: 336422 - DNA, 439 bp, Zea mays
cgcacccctttatcaacccggctgtccactgttggcttggggacttcctccgctccgctccgctcccggccgctcccgaacggtcgatctttgcatggcagcagcagctggctccaaggggcgggcgatcgctggaagcttcgtcagccgcgtcctcgccggcaaggccgcctcgccgaggtactcagacgggccacactcacccacacgcgcgggtttcggtttgccctgtgattctgtttttttactatttttgagcgtgcttgttctcgatcagttcgtccaagatctcgccgtagttttaggcttgtagcagagcgatctgtctgttctatttacggccgttcttagctttgcgctgggagtctgggttcggtgattcggtccctcggatcgatagtgcttgctggctgctgcagtttatttccccccctccgac

SEQ ID NO: 336423 - DNA, 465 bp, Zea mays
  unsure (1)..(465): unsure at all n locations
atcgcaggcagtctccttggctagcccgagcggctctcatccaccatgccaggctcgtctcttctatttcttcaacccgactcgttcacgccgccaggaacgaagggaaacggggaacgaacacgcgaagggtgcagatgacaggacgacgatggtcagagaccaattcatgagtttgacggcacttatttgcccctcctccccctgttcatttatttcttgctgcttcagagcacagagtgaagctagagagaggtggctatgcaatggaatacttcctttagttagagctttcttacgtacgatcctccggcagatgcanccaaattaactgacagtatcaacgataaagatgatgcaacattgtatccactaataacagatctagaattgtggcacatggtacatagagtttatactagttcagtactctctcaaataacgcaacatagtgtcatagtgcta

SEQ ID NO: 336424 - DNA, 382 bp, Zea mays
gcagtacagtgctcgaactggactcgcagatgggttgtctgtttctgaaacaaggacagcgtgatgcagaggagcgcaagagacagccgtggctaatcagctgatgtccatgtgtgagagagtagttggggtggttctcctgcttttcgctcgtggccaaccaccgttcgttgaacctcacaaggatggctgtaacgttttcgttatcctttacctaccacgtcagattgtatgtaaggtttgtcagattgtatgtaaggttgtaccctcctttgatggaggacaaagctaaaacctggttttgattatctaaaaaaaaggagaaactgtccatgctccgccacacaccagtttttgtgaggctgaagcctgaagctactgg

SEQ ID NO: 336425 - DNA, 313 bp, Zea mays
cgcatcttttatttatttgctatatacgtttctgtaattgcttgcagagttgcaggggatagtactattagaatttttaaggtaagaagtagtactagtggaacccacaaccgatgttaggccacgataaagagaagatttgcgacctcattttttctatacggcaagctaaatgcaatgctgctgctgacgtgtgtagcgggccgcaagctgacgtggcgaaaacttgagccctgaggagtttctgaccgtacgatttggagaaggtagtgatgccacgtgctttattttattatttggtttttttttacag

SEQ ID NO: 336426 - DNA, 223 bp, Zea mays
  unsure (1)..(223): unsure at all n locations
aacatttttgttgctgaagtggattctctaaggatgaagatggcattttgcgaaggtgtctttccgaagggactgtactaagagggcaactcaactcactggaagaaccacttctacgtttgaatttgagttnagtttgtaaatttggtttttctctacctggagataatgtaatgcatataagatcatgttattgttactcccatataaaattattgtatac

SEQ ID NO: 336427 - DNA, 436 bp, Zea mays
  unsure (1)..(436): unsure at all n locations
cgcaccccgcccggcgcccgcaatcagcgcctccgccgccgcagcccttccagaaatcgtcatcccgaaacctccgcgcccccgcccgaccccgcgcatcccgcagcccccgccccctcgcgcagccttggtgccgtgaccgccgcctctgctcgctcctccatcccgcgcaacaacgacgaccgccggggcctcgcctggcagatcaagtggggaatccacccgccaggcgtctccctgacagcggttccagcattggtgctcgcatccccgccgtccaaagcatggcgctcttcgtcttcctcctcgctgccgggcctctccacctntncctcccatcgacctccacccccaagcctcacccggcctcgctcctgcgcctatgctccacctaccgccgcgttgttagcctcgcgctccatacagaggagctaga

SEQ ID NO: 336428 - DNA, 400 bp, Zea mays
  unsure (1)..(400): unsure at all n locations
tcgaagggctctgatcttctttgcagctggcacatatatcttttcatgcttggctggagaaccggtgggctgagcaacatcctcttctattttaaagaggactttctttcggttggcaataacagcatttgccacgcgtccgctccaagctgtgagcaagaacagaaacaagagattacagatcttgagaagagagtattgattggaagcttattagttattggaactcccttgaaaaagcaggttgtgcggggattattgtttattgaataaaaaagcccgccaatttgattctactgccataccagtatatataattggagagttgaatagttnanaaaaaaaaaaaaaaannaaaaaaaaaaaaaaaaaaaaaaaaaaaaaaaaaaanaaaaaanaa

SEQ ID NO: 336429 - DNA, 83 bp, Zea mays
atcgaggaccatcctagatgtggtgcatgcacgacgtggtgtacactgagctcgacatacgggacaaacaagagaggctgggc

SEQ ID NO: 336430 - DNA, 452 bp, Zea mays
  unsure (1)..(452): unsure at all n locations
cggacgcgtgggtttgttcgcggcgaatctcctctgcttgtccgcttccccctcgtatataagaaaaacacgccgcgcgtgccgggtgccgcgctttaaccgccgcacaccctcctccctccataaatggccactcccgctcccaccctgccggagccggccgcgcaagagctgaccgctgccgtcgccggcgccggccagcggcagcagccccatcaccagcacccgctcctcgcggcggcggctgcggcgtcgctcctcgccgtgctctacctcccccggccggtgctgctgctcgtgctctccccggcctcgctctcctccctgctcctgctcctctccctcctccacctcggctccacgccgccgccgccgcctcccgctctcngccgccctcctccttcctccccgccgccgacggaggagaagaagcagcaagagcaggagcaggc

SEQ ID NO: 336431 - DNA, 407 bp, Zea mays
  unsure (1)..(407): unsure at all n locations
cggacgcgtgggtgttgttgttgttgttgcaggagctgcaggaggtcgggaactcgttcgcgagggcgcccaagtgcagctggtcgccgatcccaccgccggagctgcgcggggagaacgtgcaccacctcaccaccaacggcggcttcgtctccttcggcgtcctgtcgcggcacgtgagggggaagcgggccgccaagaccgcgtggatcctgctcaacttccagtcctacgtcaagtaccacatcaaggttctcctgccactggcagccaccgtccaccgacccgtccacgtccgtttccattactaccgtaccgtgggtggctgatggcggcggtggcgtgacgccttgcagtgcacccggagccacgtncagagccggatgcgggagcgcctggaggccctg

SEQ ID NO: 336432 - DNA, 419 bp, Zea mays
  unsure (1)..(419): unsure at all n locations
caatatcagcgtgccgcaattttcacaggccgcagccggctatatacgcccgtccgctgccggcggtcaggtgcagtgcgctgtgcacggacacggacacggacccgattcgcgtcgtgtttgtgtctttatggacgcgcgacaaggggaccaatccctccgcctccaggcatcgaacatccagccgcacgccacccctctgaatatctactgtgtgtgtcctgttctgttcctgccctggtcggcgcagcgatagcgaacgcgaaccaaccatgcctgcgtttgcgtgcgaacggcacaggacactgcaaatacccagaccatgcttatccgccggccatggttcacgttcactgtcgcgtnatcgcaccaccagccttacgcactcgccggacgatttcaacgcgctgacacgccac

SEQ ID NO: 336433 - DNA, 337 bp, Zea mays
aagacgacttgtttcattgattcttcaagagatcgagcttcttttgcaccacaaggtcgaggatgtcttgcagctgcggatcaagctgcggctgcggctcaagctgcaagtgcggcaagaagtaccctgacctggaggagacgagcaccgccgcgcagcccaccgtcgtcctcggggtggccccggagaagaaagccgcgcccgagttcgtcgaggccgcggcggagtccggcgaggcccgccacggctgcagctgcggtagcggctgcaagtgcgacccctgcaacttgtgatcacatcgatcgacgaccatggatatgattattatctatctaac

SEQ ID NO: 336434 - DNA, 262 bp, Zea mays
gcgaaagtcaatttaatctggtgctgaacattgagttgcaacaaatcatcgatagagactgagtcaccgcagctagaaaccactgtctcaaggtgctgaacattgagttgcaacaaatcatcgatggagaccgagtcaccgcagccagaaaccattgtctcaatttgaggagattttccatctatgtttgttagaaggcataatgctatttatctcttgtattcgaacatttggcaattaagaaatagaagattacttcccc

SEQ ID NO: 336435 - DNA, 395 bp, Zea mays
atgagttctaggtttgctgaaatctccattgatctttaatctgttcatcggcttgcttgagtgtgtggcgttagcgtgatgccttctcctagttcatgaacttccttccggtctggagctttgcttactcagttacccttttttgacccgtatttttttctctccattccacaactgttggctcccaaattctggtgatttgttgggtatccccctgcgaaatccgggtaaaagtggggatccgcagcttctgtggcttgtcggcttttaaccctactttttttttgaccctttaccattttcttttgcccatttttaatcccccattttccgcaagaatttacctttaatttcatgtctacttatttccgccgtaaaactgtgtttgtcgcgtg

SEQ ID NO: 336436 - DNA, 275 bp, Zea mays
  unsure (1)..(275): unsure at all n locations
cacgcgtncgccgaaagatattactatcaggtactaatcgtcaggtttgatcacaacacctacgggggctcagtcaccaaaacatgcatgccactgttctatagtgtccgaacgattcaaccctgtcattaaccagccttactcctgttgctgacctccaccaccactacacccaaacagaggctattttccatctatgtttgttagaaggcataatgctatttatctctttgtttcgaacatttggcaattaagaaatcaaacattactccccc

SEQ ID NO: 336437 - DNA, 283 bp, Zea mays
ttcccttcttcacctttcgggtgttagtaaaattacacagatttccctctctctgtggtctctgtctctgtctctgactctttttagggatgttagcaaaattacacagatttcccttctcttccattcaccttcgggagatgtattagcttgagatttctgcggggtatcatcattactatgactaggtgtaataattattgccgatctgttataacttgtaatgctgctttgaaattttcaacatttctttgccacctatttatagaattttattcttaag

SEQ ID NO: 336438 - DNA, 243 bp, Zea mays
ctgattctgattctgatttcagccaccctgaccggcgaagcgcggctgagattttctccacagcggcaccaccagagaagagatcgatccaatcagattaaccaattatcatggagggaggagaggggcaaaggcaatgtccgggacggaagttgaagacccgcccgcggcggcggctgctgctgctgcgtttgaagtgcccgcgaaacgcggccttctacggtacaactcgccgctggcgca

SEQ ID NO: 336439 - DNA, 407 bp, Zea mays
gagtacttcaacaccgacctcaccgagctgggtgatcaccccatcgggtcccacggtccaggcgtgcacccagtagcaacccctctcgtggccctcggcgatcacggtgccggacgaggcggcgcgaagaatgagctcctggccatgcgtgctgagcaagaacaggaggagcagcctgctgttgtccagaaggtgattgacatgcgagggccgcaggcgtgggtgctgacagacttgaaggggctcaatgaagaacaagagatggaggcgaatgacgtgcccatgccagagctgcagtacaatgtgcgtttgcttgttgatgaggctagggctgatattgtcaggttggacgcgcagctgcggcgggagcaagagaaggtagctagcttggtgcgggagagggaaaa

SEQ ID NO: 336440 - DNA, 378 bp, Zea mays
cgtcgccccggctctcgatcctcgcccacgctctccacggaaggcgattgcgcgatgctcgcatcatccctaaaccccgcctcgtctctcatgaaaacattagcagatgatgaggcggaatgttcttcttgggatagcgacgatgagtaccagaaattcatccaaaacatgaaccctccaagatatactaaccactcctccattaatttcttggttcaaaaaaaaatcaaatccttccttaacccttttcgaaggtcaaggtcaacattgacaacaccttatgtccaagtgctacagttattcatgtggacagcaccaacaagtatggcatactgttggaggtagtgtaggtcctcgctaacctcaagctcatagtga

SEQ ID NO: 336441 - DNA, 410 bp, Zea mays
ctcaaggaaggaaacagcagcagtgctgggcaagttcggctttgttgaagctttgtagctactcggtgctttaagaaagttagcacgatcaaagagtgatacatcagaccttttgttgctgtttgtgcttttcttttacatcttcaaacttactgtattattgcgaatgcaatgttgagtagaataacagagttcccattatttaagctatatagagtgtgacatgggcttcttttgtagcaaataaagcagctcagttggggattttggataaaaaaaaaaaaaaaaaaataatgaaaaaaaaaaaaaaaatataataaaatatatttattatatatttaaatttaattatttaatttttatatttttttataattttatttttttttttattttttatttttattttt

SEQ ID NO: 336442 - DNA, 285 bp, Zea mays
agtaaggtcctttcctgtacgcccttcattatgcacttgatgccgtaaatggaattgcatggcagactcccatggacgtgataaaacatggttcgaaaaggcctgctgacgcagatcccatgaacttgaacgcgcatcccatgaataaacctacagcagcataacgtgactcctgatcgcctgtctatagagacgatcactttgatgacctaagacgcggaatgcaggtgcttaactgcgtagtgacttaccagacctacatgttccaggtgctgaactaaacac

SEQ ID NO: 336443 - DNA, 259 bp, Zea mays
  unsure (1)..(259): unsure at all n locations
aacaagtgcaacgatgccgctgatactagctcactttggggactcctgttgtggatacgcggcacttgaagttgtgaaaagagttttgggggtccattctttcttccttgtctttggctcggctagttggctgtttttttttcatcgggtcagtggtggaactgcgaggttgtggttttatcatgtaggcaaatttgccaaatgtgtacatcggaaatatgggaataaaagcctttatcgatccccattcagcttcnna

SEQ ID NO: 336444 - DNA, 71 bp, Zea mays
agataaagtgggcagtgtttttgagccttcatatgacttttcaatatgaaatactccatggggtataaaaa

SEQ ID NO: 336445 - DNA, 373 bp, Zea mays
atactttctaataactagtactaaagtagatgctaattaagatgaaaggatacttatatatatgtaccgactactgctcggatagaagctaaaagatctcaggattattctgagaggggggacacgcaaaaacccgcggcgatgcccgtacaaccttttaggtgaatccaactaaccacagttactgccactggctagctagctggactggagtgaacagtgatgtatgtaccgctgctacagttgcttgtctgagatttcgatatgcatgtgcatggcatggatcgcaatcaaaagactgccctgccgatcgatcgacctccttcaattgtgcaaagacgaaacaattaggtatcctcggcaggatgcagca

SEQ ID NO: 336446 - DNA, 401 bp, Zea mays
  unsure (1)..(401): unsure at all n locations
cttcgttccgttgatactatcactttcttccaaagtattttcattgacttcgaaagatcagctcaaggttgaagttacatcagtttttggatctgctgcaccttcactcaaagtgaatcttgtgcaagtgttgggatctgactctaaagtcatcaccagtgagaacaaggcatatagctaaatcagtggcttcctctggcaacttccttgtcattgtttttgtgtgttgcagctccaattctctagcatcattctcctttttgtctcaggaacttcaatacgaccttgacaacaatgtccattacttggacattgctccattgaaaattgatgttgggaaatactcgatagtttttgagatttcacttcangaaccagagcaggagactgtttatgctact

SEQ ID NO: 336447 - DNA, 94 bp, Zea mays
aaaaaaaaaaaaaaaaaaaaaaaaaaaaaaaaaaacaaaaaaaaaaaaagggggaaaaaaaaagggaaaaaaaaaaaaaaaaaaaaaaaaaaag

SEQ ID NO: 336448 - DNA, 361 bp, Zea mays
caaccgaacaagccctttagaccttgtttggatactctcgtatttagttgaatccacatgtgtaatgtattgagatggattgaagtgtaacttactttaatttacacctcaatccacctcaatacatgtggatttggattgaagtgtaacttagtttaatttacactcaatccacctcaatacatgtggattgatgtaaatacgggagtatccaaataaggccttattgggatgatgaggccatggtttggtgcctttcttcatttttttgtcagtttattcttattggaacacaatgggcgggtctccgcaccctcaccccaaccagacgagttctttaaataattccatgcaccaaagg

SEQ ID NO: 336449 - DNA, 181 bp, Zea mays
  unsure (1)..(181): unsure at all n locations
cgnntccgcaaggganttcttgcctaagaagcatttcggttgcttttcggaccctgnnnagaccactcnnggcctcaaacagtggcgttcgttgatacttgtgccaaggggcagctgcagnntatctcaaatgannaatcaagggcattctcgtcnnngtggctgcgctttcnnncagtgg

SEQ ID NO: 336450 - DNA, 449 bp, Zea mays
actctagggcgaattcgactcgggcatgagacgcaggggtgcttccatctgctattagcaaaggatttattgtgccagagggaaagttttatcttgtgggtggtgggtatgcaaatacaccatcatacattgcaccatacagaggtgttcgataccatctcagtcaatttaggaggagtcgttcatcacaaagtggttatgcaaactacaaagagttattcagagggatggaagtgtatcactgctaagtttaatgaaaggttctctttggctcatttcacaaaacaacaactacaagagaaggagaaagaacttaaatcaagctataaagtagtaagagattcaagaaaggaaagtggaactggttggaatgactccctatgtatgatattagctgaaccagaagtttgggcaacgttgattagtgctcacccaaaggttgcaaggtt

SEQ ID NO: 336451 - DNA, 202 bp, Zea mays
tcgatcatatcgaacatcgaaatatagcaatagcttggcagcttgattagacaaaaatgagggggatcagatgaagatggagagctacaaagcctggaaggcaaggggtgatgtgtatccaagcctaagtattagctggtagccacaactgacaatcttgaggagactaataacacgaatggcgacactctagattatcaaa

SEQ ID NO: 336452 - DNA, 427 bp, Zea mays
  unsure (1)..(427): unsure at all n locations
accaagcaaagcattgaagngtacaagcaggaacacagnctagcaattcaagataacaatgggattctgcaggaagtagattgtaaggggtaaagactgaaggaggacagccaggtgagctcgcttagataggaattacactaaaaggcttaaataattaaactgactcttcatgtgtttgaattggtacattaagatcattgaactgtcagatggtaagatctcaagattatttctatgatactcttcatgtgtttgatgccaaagatgagcatgttatagggcatttccacttacttggatggtaaagaagactctcctacaaattgaaatgcacatacttcgggcttcacgacaactggactggacaggtgtctgcacgcttcagtggaagcagttgaagccccatatatcacagagctcatgc

SEQ ID NO: 336453 - DNA, 388 bp, Zea mays
gcgaattggagctcgctacccggcgatgctcagcgccaagcggcgaccgatagtccgagacccattcccatccacgcgacggcgctgccatgctctccccttcctccccgtcgcttccattcccgtccctcacaatctcacccccgccagccgagccccaaccctaacgaaatttacacctgcttcgttggcgtgagcggtcttaggcgtcgggcgtcgctgctgtccagcggtgtcggatccgggtcccgcgccgttaggtcgaggtttcttcggcgacggtgcagccgctggatgttagtctggcagatcggggccgagctaggcagtgttgggttgtaacatttgtatcgcatgaatgaactcagagcatctcaatgttaaaact

SEQ ID NO: 336454 - DNA, 390 bp, Zea mays
ttggcttctccttgtctccttcggcagctagcaggggcggctacggctacggcgacgggggcggcggagcgagcgcgagcgcgtgcggggatggagagggctcttgcccctcgcctgccgcggctgcctcgcctctccctctcgtggccatgccgctcgatgactctctgcactatagctctgctccagattggaggcacggcgcagcagaagccaaagggcccaagctcgaggacttcatgagcatcacttgcagcaacaagagcagtggccgcagcctctacgacagctgcggccaccacgacgacgagcaggccagcaagtaccacgaggtccacggcatccaccccctctcgtgcgggtcgtactaccacggctgcatcaacagcg

SEQ ID NO: 336455 - DNA, 284 bp, Zea mays
  unsure (1)..(284): unsure at all n locations
gaagaacggcgnngangaggagaacnncgnggncgaccncaagaagggcgaggncaccagggggccgnaccagggaaagccggangccacnnncnccnncacggacaacgannnccnnggaancgccaccggcaagacgaaaccgcagaaagcanncanncgaggggcgangaaaancaaggggagcancagngcggcgcagaagnncaccccggacaacgnccccaagccngcgaagcnggagaagggnnccacaagangnanngccagccanngaaacaccg

SEQ ID NO: 336456 - DNA, 427 bp, Zea mays
  unsure (1)..(427): unsure at all n locations
gcgnccaccagccncgncgnnaggacgnaagggaagacagccgggggncagccagngaggggggacngagnagcccgaagcccaaagcaagcgggngccaacngccaaggggggnganggcgccgncncgacgcaaggcggcncccgnccccgncccccngcnccnccgcgncgccacagagcnggggacgaccaaggnggcggaggcgaggcacngccngncgcagagccaccggnncaagggccngngcangagcagcaacaacngcgccaacgngngccagaccgagaacccccccggcggcgagggcaaggcggagggcgccacgcgcaagngcnncngcaagaagaaangcnagnagnagccaaggctttgcttgcnggcacaagcaggncgncggcacgcaacgcaanncaagcatatcgg

SEQ ID NO: 336457 - DNA, 296 bp, Zea mays
  unsure (1)..(296): unsure at all n locations
cngggcgaccgcctacgcaggccaggcgccgncgccctaagcgacgccaggnncccgggggggggncggncccnncaccggcgaagagcacccaccagacgcgccggngccggganccggaggaagngcngcgggnnncggcggnncgncnctcnccgcgcnnccggcggggnaaagaaggcggnggganacaaccgcnacgagagcagcgggaccgangacgancnccctccagcacaaaanagagganggagaggacgggcnnncagngggaagggccgagcancngcnggggc

SEQ ID NO: 336458 - DNA, 467 bp, Zea mays
tttaccggccgacccacgcgtccgcgcctggctgagctctcccactcccacgccgtttccacgctctctcctcagctcctgctcgagaacgcacgcagctcgagctgccggcgctataaaccttcgctcccttcgctgtactacggccggctgctgctactgctgcttgtcggggttgagttgtttcttggtgctgggatggagctggggctgagcctgggcgacgcggcagtgccggacgccggcagggcggctccggagctgggcctggggcttggggtcgggattggatccaacgccgccggaaccggcaggggaagcaaggcggcggggacgacgggaactactgggtggtgggcggcgccggccacaccggagtcggcagtgcggctcaacctcgtgtccagcctcggccttcagtggccacctacggacggcggcatctgtcatgtatggcgcgacgaggc

SEQ ID NO: 336459 - DNA, 77 bp, Zea mays
cggacgcgtgggttacaatatatgagtttagacaatatatgagtttgatatatgaacaggtatggtgttgagttgct

SEQ ID NO: 336460 - DNA, 214 bp, Zea mays
  unsure (1)..(214): unsure at all n locations
aaaaaaaaaaaaaaaaaaaagggaaaaaaaaaaaaggaaaaaaaaaaaaaaaaaagcaaaagaaaagggggggccganccaaggggggcccaanaacaaaanccggccccaagggcaaaaaacggccgaaagggaaaaacaaagggagggccaaaacaaaaagcaaaagcaacaaaaccccaaaaaacaacagggaaaaaaccaaaaaggcccg

SEQ ID NO: 336461 - DNA, 451 bp, Zea mays
acccacgcgtccgctaccggcgacggccgacgggggatacggctacatcgtccccctcgacccctcctccatccgcgacgcggcggcgccaggctgcaggtgttgaatgctgatttgttgtggcctgttgcgtcttcaccagttcatacattaaacttgaagaaccacgtggttgaagaaaagcccactgaaaatgagtaatacatcatcttcgtcaagtgggatgtgatatatgctgatattccaaagctcattccatttattgatctgccgtgccaatttgccagttgggctgttccctccctaaaccccagcgtcgcctccgacgagtcaccgctccgtcggctgcttgctgcagtccacgccacgcgctacgccgtcacggtcgctcctcccgtgacgcagccgtcgctaggcgccgcctatttctcggacaaagtcgctcgccacc

SEQ ID NO: 336462 - DNA, 315 bp, Zea mays
  unsure (1)..(315): unsure at all n locations
aaaaaaaaaaaaaaaaaaaaaaaaaaaaaaaaaaaaaaaaaaaaaaaaaaaaaaaaaaaaagggggaaaaaaaaaaaaaaaaaaaaaaaaaaaaaaaaaaaaaaaaaaaaaaaaaaaaaaaggggcggccccccaaaaggacccaagcnaacgaccccggccagccaacgnaaaaacccnncaaaagggccaccaaaaaaaaaaccacgggccgccgggaaacaacgccggaacgggaaaaacccggcgcgaacccaacaaaaacgccgggaaaaaaaccccccnngcgccagcgggcgaaaaagcaaaaaggcc

SEQ ID NO: 336463 - DNA, 308 bp, Zea mays
  unsure (1)..(308): unsure at all n locations
gaagaagccaagccagangagccngaagccgnggcnccagcgccaggaagcaacccaacggggaacncagccccngcnccngccgagcccgcngcngnnccngccccagcgcccgagaccgaancagnngccgagccngcngcngnacncgccccagcgccngaaaccaaaccagangccaagccngcngcngnnccngccccagcgccngaaaacaaaccagangccgagccngcngccgccgcngcnccagngccngacaccaaancagangcngagccngcngcngcnccagcgccngacaccaa

SEQ ID NO: 336464 - DNA, 245 bp, Zea mays
  unsure (1)..(245): unsure at all n locations
caaaaacccccaaaaccngacgagcaggagggccganccgcggcgccccgccgcccgagcggggcagncnacncggcccagccggggacccaagcggganggggcacaggagccccgagagcggccaccccaccgacggaaccnccgncagcggcagcggccgcagccagaacggaagacaaagctacggctangcaagcccccccggcaaaagggcaaccaaggaagacgccnacgagacaaaa

SEQ ID NO: 336465 - DNA, 156 bp, Zea mays
  unsure (1)..(156): unsure at all n locations
ccggacgncaagggggggagganggcnggccagcnngccaagccaaggnccgaaccgnnggaggagagggacggcgncaagcngccaagcnacaagggcgacaacggcaacggcgacgacngcaccgagaagagccgcgggccagacccgcagagg

SEQ ID NO: 336466 - DNA, 433 bp, Zea mays
  unsure (1)..(433): unsure at all n locations
acgcgtccgataaaaccaaaaaaggtcatgggagaagacaaacatggaattataaagaatagttgattttggacttgctagaatatatggggcttgattttggacttgctataatatatcaagctcccctgaaaccattatgtgagaatggggacgtatgtgttctctattctctctggtgtagttggagcatcaggtcaatagttcccttcaacaattaaactaaacggcggagtggagcttcatgttgggatgatacatgaacctttcaacttttagaacgtcgtgctcaactacaacttgtggctgttgaatccatacttttagaacgtcgagctcaactccaacttgcggctgttgaatccattgaacttgcttttggatttatgttataagatatttaaatgttggataaannaaagaaaaacagata

SEQ ID NO: 336467 - DNA, 310 bp, Zea mays
  unsure (1)..(310): unsure at all n locations
gggngacgcccgaggggagccaccacaccagcgacgcgcaggggcnancggccgcgcccgggaagcggncgcagaagcagcccaaggacccgaagcaggaccncngcgacccgccgcacaccagcgccagcgncaccaagncggcgcacacggcaccagaccgcggccaagacaaggcggccancgnggcaaccccggacgaggagcganccggcggcggcgcgcccgcggaccccnggaggcacggcagcgngcagcaggnggaggaggncaagcgccncaaccgcaacgngcccgncnggnccacggg

SEQ ID NO: 336468 - DNA, 349 bp, Zea mays
gtcgaacccatcgcccatgggaggagggcacgaggagcatgagggtggcggctcaaaggccgggggctactcctccggtctcccggcgtctgagccgccgcaggagtacgggtacggcacgttccagggccctcggcattcttccgtcgggttcccgcaagcttgccccgcctcccgggttcggcggcggcggcggctaccacaaccagcaacagccgtacgcgcacgcggagacgtactacgcccaggggtaccaggccgtgccaggctatggtcctgttgctgaaggaagacctgtgagaatgaggcgtctcccatgttgtggcctcggcttaggctggtgccctgt

SEQ ID NO: 336469 - DNA, 109 bp, Zea mays
  unsure (1)..(109): unsure at all n locations
cacncgngngccnaaacnnncnannggcactgaacnncnnccaagaggcagncngcnncggggganncaccgacccaacaaccagnnagangaaaggaagcgcnnaaga

SEQ ID NO: 336470 - DNA, 117 bp, Zea mays
  unsure (1)..(117): unsure at all n locations
gnagaanngacaacccnccnaccacanccgngccccnnccctggccnccacncgcgcgccggggccacgcacaaccaggaganangccncgcnangangaccgcnanggaggcacgc

SEQ ID NO: 336471 - DNA, 236 bp, Zea mays
gctgagtattaaatcgcgacagtagcgctctcatggagcagcaccagcattatgaggtgaggaggtacaggaaaggcgtgctaaaagtgcaggacggctctgagatccgagctatcgcatagaacaaggtggagttcgctaggatcgtcgactacaggttccggaagctctacgccgatggcgactggaggctgtccttgaaagagctacaaccggccatcgctgacatctgtgcc

SEQ ID NO: 336472 - DNA, 204 bp, Zea mays
gaatgagacagaaggggctaatagctatgatttcatgtacgattcctgtactgtgacagggacactcaaggaacctgcgaagcttcaacaggcctacacaaagcgttcaaccgactcaatgtctacataaagacccctgataccgccgaatgaataaattccatccgcgaacttatcgttaatagcatcagcgtcaacgctacg

SEQ ID NO: 336473 - DNA, 330 bp, Zea mays
  unsure (1)..(330): unsure at all n locations
nggaaatatcttatcctcgacgccgcgcgccacgacgcagcacgcccaagaaaccccgggtcctcacaaaaaccctgcctgccggagatggccagcggcgaccttctcctccgcgcccacgccggcgccccggtcctagcgagggccttctcctgccgcctcctagtcccggcgaggcgccgcagcggactaatctcacctctggccgcttccaaggtcggcatcgccgacgtcgttgggcgggtcaggtcgggcggcgccgaccagaagaggcgacgcagggatgcgaaagagggatttgggttcttcggggtggccacgaggagagaa

SEQ ID NO: 336474 - DNA, 157 bp, Zea mays
gcccccttttttttccttagaccacatcctcaccccgtttgccactgttgccttcacacgccggcgccaactcttataacaagctccctccacctcaccacgtctccttccaaccacaagacccaccgccatccaaaccttaagagggacgatgggg

SEQ ID NO: 336475 - DNA, 341 bp, Zea mays
  unsure (1)..(341): unsure at all n locations
cgcgtnnccggcgacacccgcacgcctcgcttcggagcttggagacttgtgaggtcgttaggcgccttaggctgtgagctctggcggtagtatagaagaagaggggaagaacggtatgaccgaacgaccggctttcttttaggttgagcttagatacccnngtgactanngtctcgtatttagtgcgactttcgttataccgtnngctatggtctttagnnngccgccgacagacctgagaaagtccgaagtgtctcgaacacacactatttgtactggctcactgnnnntgtctgaaattgaacctgacaaaaaagacactttctgnnatgttcctggag

SEQ ID NO: 336476 - DNA, 354 bp, Zea mays
accacacgtccggtctggttctttttgctgtttggatgttattattggtcatgtatggctgcttgtatgcacgtcgttggccaccgtaaggaggcccttctttgttgtactggtcctctaagaccttcatcctttttcttcttaatatatcgacacacaattacactgcatcatccaaaaaaaaagaaactactagttcatgaccactcgaccatcttattcttgccagataatataactttaatatactgatgtcctgctctcaaaagcttgaagctcaagctgttcaagcgtggtcggttgatgatatatcttatacaaacatgtatcttacgttccaagaatggatttaat

SEQ ID NO: 336477 - DNA, 386 bp, Zea mays
  unsure (1)..(386): unsure at all n locations
gcgagcccctcttcaccannaagcaggcgttcaaagcgaataccaacgaaatcctgaatggacattnntggagcttcgtcgttgcnncttcgacagtctaatccgtgagaaatatatacntatatatatttacccatacatatactgtactgctgctgtgcggtgccnnnngcgtaggcttttggcgtgatgaatnngtcatacaataaagaagggtgcgagtgtgctttgcgggtatttcatgtgtatggccatgcgatcttgagcacaatgacgtttgggatgcttntctttaagggcttctcgtgcgatctttctatattttggaaagaaagcttgtaaaataaatatatcgctcatctaggtggtgggcgttggcttgtatg

SEQ ID NO: 336478 - DNA, 570 bp, Zea mays
  unsure (1)..(570): unsure at all n locations
cgnntccgccggcttctttccgctgtagggcgttttctcgtgtcctcggtaggggcgagncctggggaagacggcaaggggtactgcgntngctgcgcgccgaggcggtcngnntcggacgaaccgtacgagtgaccgangctnggcatnnaggcgcccgtgcccatggcngctttcacnngaacntnntcatcncnntcacnnggtgngtnngggcggtgggggcngcngnngcggtgaatgcttgcttttgcggaaaggaccgnntcaagcnnagtcggcccaccnnngtcttccgcnncgcaaccgtgccngccacaatcncnngcaactggctttcgannngaggagtcnncgccgcnncgccgcccaaaattctaactganacnaagtcttcaagtgaaaggggagttggcaagtcccaaagcttggcaaagaaaagaacgctttgtgcccaaaggaccgacannaacattagatgatncttnnacaccctgtttcttgtaaatgcgttggccagtttgaggtccaaggatttttgaattgggtcctttaaaaaaaatgtatgtg

SEQ ID NO: 336479 - DNA, 409 bp, Zea mays
  unsure (1)..(409): unsure at all n locations
taccggttcggaataaccctgctcgacgccacgcatncgtgcgtattcaacnactacctttttatttcaaaacacccacctttaagaatgagccagcnttttttagacacggcgttttaagaagttcaactttacaaataattgtataaaaataattcataactttttatattaagctccataaatacgaacattatataaaatgtacttttccatgcggtctacaactctgtagttgggaagttattcgtcgaaaaccgnttagcttactatatatatatatatatatatatatatatatatgctaaaataatgtcattttaaattctcagacgatatgtacaatcaacctcaaatattgacatggactacaccaaagctctgttcttaaatatagcccataaaaata

SEQ ID NO: 336480 - DNA, 287 bp, Zea mays
attagtattagcgaactactgacgggctgtcaatgtggaaaacatggtcggagactagaacaaggcgaaggtccgaagtcattatcagaacacagatgcttacacgattgatgtcacacacacatcaccactgtccgaaacaaatactgtgtcatttaagacctatgggcgtctctccatgaacaatgtaacattgttgaataaccgtatgagtgcatactttccagtttaccagccagctctgcctgctagagcagttgttcctgatccacactatcatcatgcat

SEQ ID NO: 336481 - DNA, 293 bp, Zea mays
ctggcttctcctccccctcttaccaagtcctcctcgggttagggtgccttagggttttgtggaggggcgatggcggcggctgatgtggagtaccgttgcttcgtcggcgggcttgcctgggccaccagcaacgagtcgctggagaatgccttcgcctcctactgcgagatcctcgactccaaggtcatcaccgaccgggagacggggaggtctcgcggcttcggcttcgttaccttctcctccgagaactccatgctcgacgctatcgagaacatgaacggcaaggagctcga

SEQ ID NO: 336482 - DNA, 411 bp, Zea mays
ggtgttacttctgcagatgcagatctttgtgaaaaccctgactggcaagactatcacccgcgaggtggagtcgtctgacaccattgacaacgttaaggccaacatccaggacaaggagggcatccccccagaccagcagcggatcatctttgctggcaaacagcttgaggacgggcgcacgcttgctgactacaacatccagaaggagagcaccctccaccttgtgctccgtctcaggggaggcatgcacatctttgtgaaaaccctgaccggcaagactatcaccctcaaggtgaactcctctgacaccattgacaacgtcaaggtcaagatccaggacaaggagggcatccttccagaccagcatcggctcatctttgctggtaagcagcttgaggacgggcgcacgct

SEQ ID NO: 336483 - DNA, 236 bp, Zea mays
cccacgcgtccggtcttcctttcccaactcggtcgacgctttcgctactgctgcgcaggcctcctcctgggcggggtgattcgcctgcgatcccctcccttcttcgactatacaagcacaccccctcatcctcttcgtaccttcaccgacacctaatcctcttcctctccgagcccacacccaccgcgctctctccttcccgtgcaggctccgctaccctgttgccgcgttcacac

SEQ ID NO: 336484 - DNA, 248 bp, Zea mays
gtgaggttctccggggttcggtttcgtgggtgagcggatcgagatggcggcgtcggatgttgagtaccgctgcttcgtcggcggcctcgcctgggccacggacgaccactccctccacaacgccttcagcacctacggcgaggtcctcgagtccaagattatcctcgatcgggagacgcagaggtcccgcggcttcggcttcgtcaccttctccacggaggaggcgatgcggaacgccatcgagggca

SEQ ID NO: 336485 - DNA, 367 bp, Zea mays
  unsure (1)..(367): unsure at all n locations
ttccggtttcggaattcgccggctgcgacgccacgtcagtctcggtttttctctgtgccagtaaaccctatcggagtgtagtcttgctnnngccgccgnnctttaaacggtgaggaggtgagagtctgtcagtgatatattnnnttggcgaagtaaatacctgnncttcttgcntnnccgttcnnccgtgccttttgtgctggcngttgaccagtgtgaaatggctttaccatgttgctncatggtattcggctgtgaccgaccccgtcaanggtttctgcgcaatgattgtggaagccagctcnctcagcaaagcttnccctttaagtttgncggctctgcggggatttcggtgccagtgcagcaa

SEQ ID NO: 336486 - DNA, 265 bp, Zea mays
gactctcaccgacgtcactcacacggcggccttcatctcctcgccgaggacttttcgtaggggcgtttacaaatgacggggcgtccccagccgttgcggcgcagtaccaccaatacttctctcacgattgcctttgaacctgccagagcctcaaccatacacgaccactgcggcaactcattctatggggccatacggccgtatttctataccggatcctacccgctagaggaactatcatctggactgagcgtcccccgacgac

SEQ ID NO: 336487 - DNA, 197 bp, Zea mays
cacgcatccgcctctacctcacattttgctacgctctatcgattatcgagtgcttgctgaacaccgtgtcccgtcaatttatccgggcagcgcataaatcattttctactgctatttcttccggatatacatccaccctcgcttcgagcgtttctccttcatttaaacccttccctctgtcttctactcccacaccg

SEQ ID NO: 336488 - DNA, 231 bp, Zea mays
cggacacgaaccattcgctgtccccgtcgctgtcgacgactatgcccgcgaccgatctacgggcatcgctacgatgatcctgatctgcatcgaccacttccaacacattttgagcgtgatgaacacctacgtggatgggtagcacaagatcacgattcacatgacctccatacaggtcgtgctgctcagcatatcaacatcgtatgcaacaaagccgacatcgacatgaac

SEQ ID NO: 336489 - DNA, 208 bp, Zea mays
gtcctcgatccgatccgccgagtgcacaccacctttccccactccgatcgaatcgatggccggcgagggcgagaagaagatgataaccctcaaaagctccgatggcgaggagttcgaggtggaagaagcggtggcgatggagtcgcagaccatccgccacatgatcgaggatgactgcgccgacaacggcatccctctttctaacgta

SEQ ID NO: 336490 - DNA, 370 bp, Zea mays
gcgtccggtctgcatggtaccttctgctgatagggtaagtttaccaatttttacagttttttttcctggtggagaattgatatctactctcacctcatattgctgtattttgtagccagatgaggccaaatttgctgtaccacttctggagtctgactttgactttgccaaactggtgccaggatgtccttggagattacctcaaaagatccatctccaggtcatttttcctatcagcaggagttcaagctactcttctatgccttctgctccacgactcaaactaatctcaacaccagatttgaggtcacttctctcagttgaggatgtgaaactccctccatggtcaaatgggatgtgttttgcggag

SEQ ID NO: 336491 - DNA, 177 bp, Zea mays
  unsure (1)..(177): unsure at all n locations
gactttatatgtcctcagttggcanaagaggcttttgcaagcggcatcacgacattggtgggtgttggttctcggaccagcacatggaacttgtgccacaacttgcactccagcaccatctcaattgaaattaatgttgcagtccactgatcaattgccaattaacatgggattcac

SEQ ID NO: 336492 - DNA, 216 bp, Zea mays
aaaaaaaaaaaaaaaaaaaaaaaaaaaaaattattttaaaaaacaaaaaaaaaaaaaaaatagaggggtgttctttttctaaggttcgaagctttctttctcatacatacaacctaataacacaattttattgggccacctatattaacttcactacccgccaaactacaacttcatcactcgtaatacccttcctttacataacttaatcgcctt

SEQ ID NO: 336493 - DNA, 229 bp, Zea mays
cacatccacctgcattccacggcttatcattcatatgggggtacctatatccaagagagtgggcaggcgccttcaacgctgcgactgacaccactctgtggcctcacatcttaatgcgctggcaccacattgccctttcactatctaacgacatagcaacgagcccctgaacagatcctccttcgaacagagagacattctgcatgatgaatgggactctcgctgtata

SEQ ID NO: 336494 - DNA, 76 bp, Zea mays
aagaacaaagagtgcaagaagcacacactccacaaggtgactcagtataagaagggaaaggatagcctgtctgctc

SEQ ID NO: 336495 - DNA, 201 bp, Zea mays
  unsure (1)..(201): unsure at all n locations
cccacgcgtncgggcgtcttcgtactcgcctatctccgcgaccttaagcgttccctcttctcccattcttctcgcatttctcaccaccgccgccgctaccccctttcgacaacaccatgagggagtgcatctcgatccacatcggccaggccggtatccaggtcggaaacgcgtgctgggagctgtactgcctcgagcatg

SEQ ID NO: 336496 - DNA, 402 bp, Zea mays
cacacgcagacacgcttccgcggcgccaccaccttccgccctccgctgcccgctcgggtccgcgcccgaaaggcaaagcctcctcgctcctgccccgccccctcctcgcggcgtcggtcaaaccctagcacaccgtacgcgcaggcccgcccgctcccattccccacctccacccatggcggcgctctccgcgcccctccgcgccgtcgccgccggatcccgcgtcgccgcgtccgaccccgtcaaggtctcgtgcgtgaggagcactggctcagctcacttcggctgcgccttcccctacatcagggcctcctcttcggcgtaagtgcttgctttcaacgccgtagtcactgtcgccttgtaaatgtagtttcaagcattgctattgtccgtctaactcac

SEQ ID NO: 336497 - DNA, 246 bp, Zea mays
cgaccgaccaccagagcagcagtagactcacagctcactcgcaacaagcgcactcaccgtgtgtcacactctcacacgtaccgatcgagcggaagcaaacaaagcacacgtacggggtcgtcgagagaggaccggaatcggatggcgttcatgcggtaccgcgcgctgccgcagggggagctgacggtggaggggttccgggcgtggctggcgcaattcgacgcggaccgcgacgggcggatcaac

SEQ ID NO: 336498 - DNA, 334 bp, Zea mays
gaggagaacttccaggagttcaagagcttcctcaaggacaactcggttgacctaaccgacgtggagatgagcccagaggaggaggacgaggagttctggggccgaggaggatcagcggcaggaggccgagacccatcggaagacgcctcccgggtcgcctcgccactcgcgcgaagcttcaacaaccacccagcgccgccgacagcagcagcagcagcagcaagggggtgcgaggcgtccacgccgagggaggcgctccggtcgcctctgcagcacggagcactggcggcggtggcagctgcagctgagtctgagtgacgcacgcagttgcagc

SEQ ID NO: 336499 - DNA, 280 bp, Zea mays
  unsure (1)..(280): unsure at all n locations
acgccgcaacagtctagtttagggttcttacatacagcatgatatgtacatttcttatgcactgaagggcgtcgtggcggtgatccaatanctagctcagctgcaattctaagaaaggtcctcgctcagctcggcactcgggcgttgtgttttattgttgcctgagatcacctcgcctggcgatatccttcccccgtttagggtttagggcccgtgctagacaattatatttgttggtgaatgtcgcgcataacataaattggtggaagagaagcttgat

SEQ ID NO: 336500 - DNA, 398 bp, Zea mays
  unsure (1)..(398): unsure at all n locations
ccggnctggaaaaaccggtccgaccgacgcgtccgcggacgcgtgggtggccccgtcctctgttttagcgtttgccgccgctctgcacaagggctggctaccgatgtccgtcgcgtccgtggccgccctccggacggccggctccggccgccgccgcggcgcgggttcccagcagaccggccttaacgggggcaggttcctgatgatgcagaggagggagctggtgaccaaggccgggatcccgctcgccgtctcctgctcgatggctacctcaccggcttcagccaacggcgctgctcaaggcatcgtcagcgactccgtctctcctgtcgtgcgtgcagggctggagattttgccgttcaaagctgacgggtacaacttttggacgtggcggggtc

SEQ ID NO: 336501 - DNA, 177 bp, Zea mays
gtcacccgtccgtcgcatcctacgatccaaagctctcttgtcgcagtcgcaccgggcgaaaactacccgaccggacgccgagtacagcaggctgggcaaggcaggcgcaagctccgagccctcatcgcgaaagagtgcccccgtcatctccgctcgcgggactccgggggacgtcga

SEQ ID NO: 336502 - DNA, 277 bp, Zea mays
ttctagatcgcgagcggccgccctttttttttttttttttttttttttttttttttttttgtgtggttttttttttatgttttttttttttttttttttttttttttttttttttaaaaacaaacaaccttgttcttcctttataaacaatttttttggccaaaaggcattcttatagcttatttgtctcaacaaaatactattgcttcaaaacttggggctcacttaaatcaccatccactggcccaagttttggaaaacattacaatcatgattg

SEQ ID NO: 336503 - DNA, 377 bp, Zea mays
gcaaagcaacctactccgcgctcgctcctccacttgctcccctcctcttccgtgctcgtaccgtgcaccgtccgctctcccttcgcttacgccacacccagcccaatcaactcgccgcggaccgcgcccatgccctcattcccctgctcctcccaaaattgaccacccaatcaatcggctcctagccctcacccccgacccgttcccatggatcgcaccacctccaacaacagcagcagtgccagtagcaccacctccgccggcagccagaacccgcacctcggcgtcaacaagctcgggcgctccattcgcaagggcacgccgtcggcgtccccgtagtcacagcccgcccgaaaccgcccttcccagacccagcc

SEQ ID NO: 336504 - DNA, 316 bp, Zea mays
ctcctgtcacgtaaggcgctgaggggaacgcataagagcctgacgaggacgagagggcggtggctcacaactatcacgacgagcatagcgaagaggcttaagatagaaaaaagctatcgactatgtaggtgagaacgaggcatcctgcgttatagcgcactataaatagctacatacaggtccagtcgtgatcgagagcgcatatcttatgctcttgtactcaccgtacgcatgcttacctcctgttctactgcgttacacactcttactacgccctatagccctttaccttgcctggtgctgccactgacacggg

SEQ ID NO: 336505 - DNA, 161 bp, Zea mays
caagagatgctccaacatctcagcctgcaagcaagatcatgtcacggagaccagagtcactcgcagtcaggaaatccattgtctcacttttgagacagattttccatcatatgtcttgctagaagcgcgataagtgctatttatcgtcttgtatatcgaac

SEQ ID NO: 336506 - DNA, 334 bp, Zea mays
gtctggcgcctatccatatggcacgggagcacggttgctgtgatagctgcgaatgtcccagccgtctatgaagctcacttagcagtaccaatgtcaggagctgcagctaactgtgtcaatatatcgctaaccaccgagacaatagcattcctccttgaacactgcgtgccacaagctgtgaaggtggaccaagaattctttaccctagccgatcaatagctgcaaatacttggcaacaagaagacatctgatgtcacgcgtgctccaaccttgatcgaaatcgacgacccaacctgtgatcccaattctgtacatcatgctctgggaaagggag

SEQ ID NO: 336507 - DNA, 67 bp, Zea mays
  unsure (1)..(67): unsure at all n locations
ccgtccgannagcgttcgacgtggcagtgtcgaatccacnttccatggnnnactacgcnncaagatg

SEQ ID NO: 336508 - DNA, 429 bp, Zea mays
gatgtacctgatggtggtgcatccttccatgttgccagtcaacacggttgcggcaggagatcttgttcaacaacttattggctgggttactaaccaccctggacatggggcgacgacgaccaagctagcaattctgcgagggtactcaaggaccttttacattctggtcatagacgaaccaggccaacacagatcattttattatttgcatcacttacttacgcagatcaaggagatgtgggtgaggcttctcatgtatgctgctggcaaatgcagcggagaggtgcacgcacgccaacttggtgaaggacgtgagctcatcacctttgtctggctactcatgctgcatcatggacttggagacatggcagctgagttcaagcttttaagatctaatgatccaaatgtagccgagcggggggcgtggat

SEQ ID NO: 336509 - DNA, 379 bp, Zea mays
ctcgagtccaagattatcctcgatcgggagacgcagaggtcccgcggcttcggcttcgtcaccttctccacggaggaggcgatgcggaacgccatcgagggcatgaacggcaaggagctggacggtcgcaacataaccggtcacgaggcccagtcccgcggcggccgtggaagcggcggccgcggctactgtggtggccgtggaagcggcggctacagccgggggcggccgccgtgatggcggcggcggctacggcggtggcggcggcggctacggtggcggcggtggctacggtggtggtggtggcggctacggcggtggcaaccgtggcggcggctacggcacctccgacggaacctggaggaactgaccggggggg

SEQ ID NO: 336510 - DNA, 360 bp, Zea mays
acggaatctttcccgtgtatcccaactctcacccgatctcctcgataggcttttgtctccaaggccgcgctttctaacaagattcctcccctcctctctccgataacgctagcctccgccgccgccggcgacgaatccggtaagcctccttgcttctgctagatacacggctgccagattggtgcgccccgcgattagggaaagggtcgattgcgatcagccgttcctctgccttaggtcatcgtagttgattagtcggcggtcactgctcggattgggcacccactgcgcataggtggggggctcacccgggaaaaagcctatctttttctttttcagtaatttttggccgtttgaagt

SEQ ID NO: 336511 - DNA, 434 bp, Zea mays
gtcgaatactcagtgaatactatgatgcatactctgtacaggtatcgaatgacgcaggcaatacgatctatctggcacgcacgttggttacgcatggcaaagatgaatgtgccatggcctcatcttctaaagagaaagcaagaccagtgacgcataaacctacgcctgctctgcgtgctgtgcatacactactccatgaatgaactcaccaattctgctgaacgaatcgcgttgatatatactacatactagaccgactcacggacatgttttcatatattaacgcactgccactcaacgtcatgatggatctgatattgcgactacgaacattaatgcgcgtcactatgtgtatgcccaatcagcgttatcagacctacatgttatgtacaaatacatcgatatatataaacattgatgatcattccacatat

SEQ ID NO: 336512 - DNA, 341 bp, Zea mays
agggggctaaaacgaaagaaaagcagcagacggaggaatccagatacaggggaagggctcccccaagttctccagaacgcaaggaagaatatgcgagcgacatcgagggctgttccatgagtttcggcacgaaacaggcactgtctctgcataagaatgatatctgcccggagaagggctgctgcaggaagttcttctcgcacaagtatctgctgcagcatcgcaaggttcacgccgacgaccgtccacgaaatgcccgtggaagggctgcagcatggcgttcaagtggccatgggctaggatagagcacatgagggtccacacgggcgacaggccctacg

SEQ ID NO: 336513 - DNA, 325 bp, Zea mays
tccgagccacgcgtactatcaagcatacatagcggcgaccgtgttaactttagacgaccaccatctgggggaactctaggtatatctatgatcacaacatccatattcttactctgaagacagatcaaaagtctttgaataaggtgcaaaatgctgtctcacatgacactggtctagatgatctattcggaagtgaagaggaaaacgaagtgtaggctacatgaacctgggcacagcgactagaataggaatgtgcaaagcatgccgaatccgacaatgaagaccaaaacagacaacaagtatacagtctagaagacgctgaaaa

SEQ ID NO: 336514 - DNA, 431 bp, Zea mays
gtcttcacactcctcgccatcacataaaaccagtgcaagcagaagcagcgcaatggcgagcagcaccatggccctctcctccacagccttcgccggcaaggcagtgaacgtgccgtcgtctctcttcggcgaggcccgcgtgacgatgcgcaagacggcggcgaaggcaaagccggcggcgagctccggcagcccgtggtacggccccgaccgcgtgctctacctgggcccgctgtccggcgcgcccccgagctacctgacgggcgagttcccgggcgactacggctgggacaccgcggggctgtcggcggacccggagacgttcgccaagaaccgggagctggaggtcatccactcccgctgggccatgctgggcgcgttgggctgcgtgttcccggagctgctcgcccgcaacggcgtcaagttcggcg

SEQ ID NO: 336515 - DNA, 208 bp, Zea mays
tcgggagaccggtactataaggtacaggtgcccctgtacgactgtgtgctatacgctctctacgtcaccctcagggcgctgagcgccggcagcgctggccatcttaataagaacattgcttattacatacttgaaacattatgtattgacgagaccgatatgcgagaaactgtgcaactgacctcacacaaccagactgcgggacaca

SEQ ID NO: 336516 - DNA, 420 bp, Zea mays
gatcgagcttcttttgcaccacaaggtcgaggatgtcttgcagctgcggatcaagctgcggctgcggctcaagctgcaagtgcggcaagaagtaccctgacctggaggagacgagcaccgccgcgcagcccaccgtcgtcctcggggtggccccggagaagaaggccgcgcccgagttcgtcgaggccgcggcggagtccggcgaggccgcccacggctgcagctgcggtagcggctgcaagtgcgacccctgcaactgctgatcacatcgatcgacgaccatggatatgattattatctatctagcttgtggtggtggttgaacaataataaagcgaggccgagctggctgccatacataggtattgtgtggtgtgtgtgtgagagagagagaaacagagttcttcagtttgctatctc

SEQ ID NO: 336517 - DNA, 282 bp, Zea mays
gtgggttggcttctcctccccctccggttcgtgttcgggttcttgaggttctccgcggttcggcttcttggtgcagcggatcgagatggcggcgtcccatgttgagtaccgctgcttcgtcggcggcctcgcctgggccacggacgaccactcccttcacaacgccttcagcacctactgcgaggtcctcgagtccaagatcattctcgatcgggagacgcagaggtcccgcggcttcggcttcgtcaccttctccacggaggaggcgatgcggaacgccat

SEQ ID NO: 336518 - DNA, 187 bp, Zea mays
gaatacaaagctttttaggaccacaatttaggtaggcacatgggtaatatctaattataaaatattcattacctccccaacactcacacactctacacaccccataacctgttactcgattccttaaaaaacaagccacaaatttcttttcatggcctgcacatttaaccttaattactatgcatgc

SEQ ID NO: 336519 - DNA, 201 bp, Zea mays
gaccaccccgagcagaacttaaaaaactcttttcaacaacaaatattgattctataaccttcttccattctatagcgcattcttctaatgacctgacaaatcctgctcctgctactaccatatcccatcttcatgctacaactgcgtttatacagccgatcattaatctcagtacttatactccttatctaccactggatt

SEQ ID NO: 336520 - DNA, 149 bp, Zea mays
cgagagacgggcaggggagaggaaaaaaaaaatctaaccctagcatccgcagcgctagggttcgggggttgcgatggcggcggcggcgagacagccggggacggtgaaagggttcaaccacaccaagggcttcgggttcaatctccccg

SEQ ID NO: 336521 - DNA, 329 bp, Zea mays
cggacggagcatgggattgacccacatacccgccctccgacccgcatgccaaatacgccgcggcacgcgtcggctcgtagccatgccgtcacagtttcgcaccggccgcctcctactccctagtgacaggctgatcacgattctctcccctgtacgcttcgagtccatgtcacctgctcatcgcgccttccggctgccgccgacgcagcttgttcaccgggtcacacgccgccgcggaagcgccccccgtcgacgtgacgggagggggctctagagcatcatggaggctcagtctggaggatatagcctgggatcatatattcacacag

SEQ ID NO: 336522 - DNA, 59 bp, Zea mays
tcgcagccgcataccctatatatatcactctagttttttctcaagcttttcatatggac

SEQ ID NO: 336523 - DNA, 356 bp, Zea mays
ccgggcgacccacgcgtccgggaggcagagactacatgaataaagacaagcttaaaaggacaaatgccttccttcttgcacgagctctgaacggagatgataatatatcggtggtacatctccacaaccttgacgacgacatataagacgatgcacaacggggagatcacttatttggcggctaggtgcttgatggccttgatcaggttttggaaggtattccagatgacatgaatcccaaagatcatagtgttcttgcctatggtgatgtcaatgtactcactgacatgctggacaacattgcgattgttgagcccatacacaaagatgaatcttatctggctgtccagaataaa

SEQ ID NO: 336524 - DNA, 215 bp, Zea mays
gaaaacagcgaaaatgcatgcaaattgcaaaaaaggaaatgatcaagttttaattgttgggaccactaagtctgctggacggccgatgatgtcaaatggtgaagcagaaagcatcaagggacgcctgattgttttaagcttggaggccgttgaaagtcctcgtgagagcagttcgtttattccaacttttaagtttaatccctcttcacattctg

SEQ ID NO: 336525 - DNA, 158 bp, Zea mays
tcgggcatcatcccacctcgcgaacgaggacggcttgtagtaccttgcctaccccgcccccgaacctggcgtgtggcctaccaaccgcagcagcgacactagaatggccgcggggccggcattccttgcgttcttccaacttttcccaatcgcggggg

SEQ ID NO: 336526 - DNA, 307 bp, Zea mays
  unsure (1)..(307): unsure at all n locations
ccgcgcgccggacctgtcgtctcatccaccccccgatgcccctctctgactcccactcgggcgctcgcaccaccaccccgtctcgtctcgtctcgtctcgccaatagaaaagcatgccgcagaaataatcgccaaagcccaaaacagatagggagaggggagagacgccacgcgaggggaggaagaggaaaaaaagcagaccagagagagagagaggtgggaagggaaaaggaaaagaaaaaaaaggaaatccaccgcccgcagngccgccgcgcgctgcacacacgggacttccttcctttccttc

SEQ ID NO: 336527 - DNA, 161 bp, Zea mays
gggtatccgagcccttcatgggtgccctcctcgacggctacagcgccggcggcggttttcgcgggtcggcacactcgtagacgttattagaagctacggcgcctgcctcgtgaagatcattcgcaaggtgcccacaattaccgatggcattaactttgacc

SEQ ID NO: 336528 - DNA, 339 bp, Zea mays
aaagaataccaccaattggttcctatacttgaaaacacaacaaccctagtaggaaaaaactgggggcgagcacatcaagaataatgtgcaataaacgaaaggatgcacccaaaaatcaaatacaacgccattccttgatgggcttcaaacattattagtcttgtacaaggcgcaaaaggatgttgatgaagtgtggctataaattcttaaaaaaacatgacaacactcgcgaccgctggatgttcatgagaataaatgcaaaaaattactcaaacaaacccttatatcgggcctattaaatgtcaaattggacaaaactcaattccaagaactttgggg

SEQ ID NO: 336529 - DNA, 148 bp, Zea mays
caagcagttgagaactacactgttgaagaccttttttcccttaaccactacaaccccgacatcctcaacgacctcgagaagttcgtcaatgagcaggtctcatctcataaaaaaattatgaagaaggtcttttccttcttctcttgta

SEQ ID NO: 336530 - DNA, 292 bp, Zea mays
gaaaaaaacgcgacccacgcgaccagttttgctacctaaaacttaactatctctttacacacagtagaaaaaagggacggacgtttttttcacacgccaagtgcaccacatcagcccataaaaaaactcaccctgccaaatgctctgaaacttcacatactctaacaactctccccacaactttcactacccgcttcatttattaacgcagttcctagtcaacatataccttcccttctctctcatactgtcttctcttttgctgattattgagcacaaccagatctttatc

SEQ ID NO: 336531 - DNA, 264 bp, Zea mays
  unsure (1)..(264): unsure at all n locations
gacccacgcgaccggcgcagcctactttattgaccttttctttccctatatgacgctcaccaccatnaaggggcgcttttttattactcgcgactacaatttctacccatactacaattactaccccaactcccttcccgatgtttccaacatcatcttcctatactttttccccacccgagtctacaattaagcagcccgccttcatctcattcataacacaccgttctacaacatcttcttttccaactttaccatctacct

SEQ ID NO: 336532 - DNA, 355 bp, Zea mays
ggaaagcttgccataaacattttatgattttattgggtgtttataaattctatgggtgcatgcctgaacctttccttctcgcagatgatatcacaatatttagcaggtcgtcttgatgtgaagttggacccccttcatttgagaaaggttagctgggatatttgtctcttgagccaaattgcaagaattgcttgtctgggcaaaaagtgatgatataggaagagagatattaaattgctaaagatgttattgatggctatgttgttatggtggataaattaccaatagatgacgggttagtgaggatagaggcctacagatcttgcatatatcatcctttgaccatgagaggtat

SEQ ID NO: 336533 - DNA, 404 bp, Zea mays
attttgtatggaaaatagataattttgctgcaaacattgaaactgtgacaaatttaattaatgatagtttagagaagcccgcccatattaaataattttgaacgcaatgttattagtaccagattgtcaagccaatgtcagttactttactttgcagtttcaggcacagtgttccagaaactataataatttgtctgtgactctggtcattgatgattcataaactagttatttgctatttcattgaatgatgtcacatgcatgagcctggcaaagaattctaaccagcatgaagtttgtcaaactctacttctgttcaatatgaactcccaaattgtaccagacattgtttgttctgtgcagttggaggcttttaagaaacaattgatgaaatcattgagtga

SEQ ID NO: 336534 - DNA, 129 bp, Zea mays
accgcgaagatcttgcggggcctccttttcccaactcgtcactgagccggtcgtgccctccactcccgggccgcccaaccaattattcatgcatccatccagcagcaccaccccgctgcggcgatgtgc

SEQ ID NO: 336535 - DNA, 434 bp, Zea mays
aaactaaatgccgaggtttaaaaaaactcaagaagcatgtgctcttagctaaaactggttgtatgaaaactgatgtggctttaaacaccgtagaccagcttttgtctaaaccaacttatagaaactagatataaaaactggattcttaaaagactagtagattccaaccagggcctgatgagacttctaaacttgatagccaagctgaagaaagggtgcatcgaacctacaagcttagcaaatggcactacagctccaggatattctggtgcctccatctatagggagcgtcctatgctttatcttcaaataggtgtgtagcggagcagtgcaatcaacttctatgaactggacggctctgataggaccttcttgcttgacattactgactgtgagggataaacagatggatgctctaatttcctactgactgc

SEQ ID NO: 336536 - DNA, 448 bp, Zea mays
ctcactgtccttgtcactctcactggctcaccgtcacgtcaccgcccggatcgcaccgtacacacaaaatgcgaaggccgcccaagcccaagcgagtggcggcggcggccaagcttcccctccccctcaccgccaccttcctgtccctcctcctcctgccgctcggcttcgtcgtcatccacagggcattctccggcgtcgtcttcgcggcctcgactcccgccgtcaagcgtgttcttcttgagtactacggccgtgccagtgccaatgtcattgccagtacttgtcgcttattctctcggtgtttttttattctttttttttcttgttactcttttttttggtcttttggttttttatttcttttttttgtatttttttatattatttgtgcttttttttatctttctctattttttatttattttatttctctcttttttttttt

SEQ ID NO: 336537 - DNA, 433 bp, Zea mays
gccaaatttagataccagcccaaaagtgaagatcacggtcaggtcgcgaactaaaataggctaaaggcgatcgatcccttggcccatatctccgttgagttgctggttctgctattccactggcttctcctacttgttcaaaattaaataaggagatgattttagcccttataattttttctagttttgtggcttctggcccttagattgaagaaatttggtaaaatgggtcgctcgtatttattgctctgcaaaatacaccgcttcaaactgacctcgttaaaaaggatccttcgagtctgcgcgctcgtcaaaagagatcacgagtaattttagggcacctgacaggtgagtccgtgaatccttgtgccgattctaccttacggtctcaggctcaacgcatgccgtctgtttcccatttctcctccttctc

SEQ ID NO: 336538 - DNA, 347 bp, Zea mays
cggacgcgtgggcgctcaccacccctgtctgccgtctgcttatccctggagcagaccggagtaaggccagccaaccaaattgtctatctactgaagggaaggaggaaaaaaaaagaggtaacttgaaactgtcagtctcggcattgcataatcgcattcccaggtcccttcctttcgattccgtaagctgttgtataggacgatggtagggtaggcagagttaggaacatctctattctctgtcggaaaaaaaatcttatttttttaccatgaactgttccgtcgatctaccaggaaactggagccttctgctgttctacttatacagaaattcaaaacgccatgtg

SEQ ID NO: 336539 - DNA, 421 bp, Zea mays
  unsure (1)..(421): unsure at all n locations
cgatctgcaagtctcgctacgtagcagtgcaatacaaaaaaagcagccgcaatggcgagcagcaccatggccctctcctccacggccttcgccggcaaggccgtgaacgtgccgtcgtcgtccgccttcggcgaggcccgcgtgacgatgcgcaagacggcggcgaaggccaagcctgcggcggcgtccgggagcccgtggtacggccccgaccgcgtgctgtacctgggcccactgtccggcgagccaccgagctacctgacgggcgagttcccgggcgactacggctgggacaccgcggggctgtcggcggacccggagacgttcgccaagaaccgggagctggaggtgatccactcccgctgggccatgctgggcgcgctcggctgcgtcttncccgagctgctcgcccgcaacggcg

SEQ ID NO: 336540 - DNA, 257 bp, Zea mays
gaatggaatgaacagtacacctgggaggtttatgatccatgcactgggtcacaattggggtatttgacaactgccagctgaacgcggaaaagtaatggtgccgggataccagaatggagggtccgatcgctctgacctgaaactgatcggtgtatacccactcatacctttattgcctgacacctgtggcgttaaaaagggcgagggcactgctgtcgttcacgtgtcgtcactgctcaacatgatcattgtcacac

SEQ ID NO: 336541 - DNA, 118 bp, Zea mays
  unsure (1)..(118): unsure at all n locations
ccggttccgggaaaacccggcgcgagccacgcgaccgcgngcccagcnacanggcgaacacggagncgncgcgagccaaggcgcggggccagagggcgccaaggcagccgcggacacc

SEQ ID NO: 336542 - DNA, 196 bp, Zea mays
  unsure (1)..(196): unsure at all n locations
cgnntccggccacaagcagcncnntccttcctcctctcaaactctcgctcgcgccctgcgctcgcgtgacctcgcgtgtcgcattccaaattcgaaaaggagggnngaggaaaggggcaagatgttcaatcgagaggcttcnncgcgtcgaggagcnccccacgtgccggtacgggnccggatggagaatcggagt

SEQ ID NO: 336543 - DNA, 437 bp, Zea mays
  unsure (1)..(437): unsure at all n locations
ggacggagtcatggccgtggaggacctcagcctgtccaagacgacgaagctggtggacaaatgcgacacggcggccagtacggtcgtcgtggggaaggacaaggaccacggtggcaacaagggcgccaccggcagggtggcgaaaggtggcgctggcgcggcgacaccaaagaaggcgctcgggaaaacggtgtccggcaaagggcagaccggggagcgcagcagctcggactcatccgacagcgccgtcgccgtcgcagtcttgaccagccaggagcatcccaagaggacgacccgcgcaaggaacgccgccaagtcggctgctgcgtagcccttccgctgagagaaatgctcaaggagcactagctaggttttagcagtcgtctgttcttttgtattacgagtngtgcatagaagccaggaccatgtttttacac

SEQ ID NO: 336544 - DNA, 324 bp, Zea mays
  unsure (1)..(324): unsure at all n locations
ctggacgattggccgctggagacgacgcacgctcggccatggcgctcgctctcctatccccctccacgccatcccatcgtatactgcttcgtcctattccatttccatctctgccagtcgcgcgcgccactagtgccggtagcttcggcctcgcgttcttctgccccctctctcgcggttcctcctcgctgcagaggaccggcgcggcaggcggcgttattgatagtgccggagagggctcatcggaagaaccggtcgctggatggctcagcgcagacctgctcaggcggatatcangcgcggcggacgcggaccgggtcctgg

SEQ ID NO: 336545 - DNA, 268 bp, Zea mays
  unsure (1)..(268): unsure at all n locations
cggacgcgtgggctcgtgctgaattcctgtacgttttcaagaacaagtttgctcggaatctgccaacaagcaagtgctctaatggaaagttgctatgcggaatcctagtgagttcagggtttccaatgtttttttttttttttctagagggatgggggatgtgacttcagctttccaggcagttgagacttaattgagatggagcagctgtgcctctggttcanaaaaaaaaattgaaaaaaaaaaactaatttatataaatgcccaa

SEQ ID NO: 336546 - DNA, 144 bp, Zea mays
atccggagcagccgcagtcccaccgaccccgccgccggtcgccctccatcttctcgccgctgcctctcgtttctcttttcaataatcaagatgagccgtggtggtagtgccggtggtggtcaaagttctttggtttattttttt

SEQ ID NO: 336547 - DNA, 433 bp, Zea mays
gtggagggctggggttgggcgtggccgctgtggaggaatgattggaatgggtggaagaggatcgacgtgaccgtgataccaggttgtcaagggcgttagttcctagggtagctgaccctcgactccgcaactcgtagtctcggttcgtcttcgccggcagggttataccccccgtgccgtcggcttggtagagaaaggaggaagaagaccggagggctaaattcttgcttgccttcatcaagtgtcgattacagagataagtagccttggcttgctaaccgaatggaaacaaactcctcctaaactttaggatctaattccttctctttctattctagccactaatctgttcctggtttccttcctggggcgcgctggacctggacgcggcgtgcttagcagctcgtcaaacctcccttgcgcgccgtcttcg

SEQ ID NO: 336548 - DNA, 121 bp, Zea mays
cggacgcgtgggcttctacccctccccaccgcgggccgagagggagttcgtccgccggcgccgcgcgactcaccgatgccgagccatgatgcctgctgcggcaccatgttctgggtgtacc

SEQ ID NO: 336549 - DNA, 218 bp, Zea mays
cggacgcgtgggccgcttcacctccgtagcgctcgaccacagggactactctggcgcgctgggagcgactcttcggggctcactcaccatgctcgcgtccttatccctcgccgacaaccggttacacggtgcgctccccgcgggggtcccgctgccgtcaaccctccgcatcctctacctctcaggcaactcattctccggcaccataccggcgtctc

SEQ ID NO: 336550 - DNA, 299 bp, Zea mays
cgctagctgcggctgtttgccatcgcgtgagctcacggagtgtttggacccctcggtgtgatgtttaagtgtgtggtagcaggatgcaagacgattctggtaataaactgattatgtttgtgaacggtgataacctgatgatgtatgtgttgtaaatttagagaacggtgataacctgatgatgtatgtgttgtaaatttagagaaataagtgacatgcttccttcaaataatataatcagacatgcattcactaacacctatgcgcagactctatgacatttcctcaagaagacggat

SEQ ID NO: 336551 - DNA, 441 bp, Zea mays
  unsure (1)..(441): unsure at all n locations
tgaggttctccggggttcggtttcgtgggtgagcggatcgagatggcggcgtcggatgttgagtaccgctgcttcgtcggcggcctcgcctgggccacggacgaccactccctccacaacgccttcagcacctacggcgaggtcctcgagtccaagatcatcctcgatcgggagacgcagaggtcccgcggcttcggcttcgtcaccttctccacggaggaggcgatgcggaacgccatcgagggcatgaacggcaaggagctggacggccgcaacatcaccgtcaacgaggcccagtcccgcggcggccgtggaggcggcggcggtgggtacggtggtggccgtggaggcggcggctacggcggtggcgggcgccgtgatggcggcggcggctaccgcggtggcggcggctaccgtggcggcggcngctaccgtggtggt

SEQ ID NO: 336552 - DNA, 58 bp, Zea mays
gcgcggacccttcggcaacccacgccttcttttgtcttctactgccccttcacatcca

SEQ ID NO: 336553 - DNA, 158 bp, Zea mays
acgcgttcgagctccaccaaattgagaatatcccatagggtatgaaaatccatgaggacccgaacagtgatggcaccctgaatatccagtacctaggaagtattagtaagggtatcctccaccgtcctattagctctttgtataggagctggaaccta

SEQ ID NO: 336554 - DNA, 296 bp, Zea mays
  unsure (1)..(296): unsure at all n locations
cctttctctctcttctctctctatcgcccacctctctccacctcctctgcccaagccgcgccaccaggagttcgccccggaggaggcccgacccggaggcagtgcggcggcatggctggtggtggtggagggccggggccggggcgggtgaaggcggggagccgcccgccgtgggtcgggctggcggcggcggtgtgggtgcaggtggctgcggngacctttcaccatgctcgtggaggcggcggcggtgttggtgcaagtggcggcggcggtgtgggtgcaggtggccgtgggtc

SEQ ID NO: 336555 - DNA, 381 bp, Zea mays
ccacgcgtccgggcgaggccgccgcctgcggcgcccgccccggtgaggcttcgtctgcttttcgaaaacagtcgcctcctgcagcgtgtacagagggatgaaggccttcggcgctgctggcttctccttagcccggagctcggcaccgtcgccgaccttgccgctcatgtcgcagcccgtttccgcctccgccgcacctgcccgcgcggcgttgtgctctcgatggacgggtttaccttgccaccattcgagtcaacctgcatcttcagggataacgatattataagggttaaacaaaaatcctgcaggaagcaggatcaaagggatggccgtaaacaccaatgagaagaggcacatgatgatcaccagcttgaggaaaat

SEQ ID NO: 336556 - DNA, 177 bp, Zea mays
tgaatgaacctttacttttgtttccgctttttctatacccgaaatgggagtccattaacgaggactatctgaaaggctacgctctacaccccacccagccgattgtgcacattacactgtcctccggtacctactcggatccagtgatgcatatgtacagccccaatatcttgttcc

SEQ ID NO: 336557 - DNA, 341 bp, Zea mays
ctcttttttactcttaatttttaatttctaaaaaaaatattcttactagatttttacacactccagtcattattctttctccatttatctaaataattatttaaatcacaaatacatattaccaaataatctttatacttatcatattttttatcaaaacatactcttaccatttcaaataatctctattattcacaacattttttcaatttcactattctactcccattattacatcaaaactcaatcttaatcctcatatcattattcattaaaattacaaaaattattattctaccattcttccatttttaaaattttatcaatatatattttaaatt

SEQ ID NO: 336558 - DNA, 405 bp, Zea mays
gcagctcgccggcggctggtacggcgagtccggcgagtacacggagggcacggtgacggaggtggtgtccacgggcgagaacgagtacgacgagtacaagaaggaggagaaggagcacaagcacaagcagcacctcggcgaggccggcgccatcgccgccggcgccttcgcactctacgagaagcacgaggcaaagaaggacccggagcacgcgcaccgtcacaagatcgaggaggaggtcgcggcggcggcggccgtcggctccggcggcttcgccttccacgagcaccacgagaagaagaaggaccacaaggacgccgaggaggccggcggcgagaagaagcaccacttcttcggctgattgatccctcccgtatcgtcgtccctccccgtgtgctacgcgtg

SEQ ID NO: 336559 - DNA, 355 bp, Zea mays
ccactcgttcgcggagcggacaagagcggccagagcttctcgccggctattgtcggcgtgcagcgcgaggtgtactccaaggagggcgtgatgcgtcggctgatgccctgaatccagccgcagttggccgacgcatagcactctgagttcactgtgtacctgtactagttcctcgcgtgcgacttgctgacgcacctgcgctgcagacaccgattacactggtcctgcgcgctgccctggctcgagggcacataccggtgccccttctgtatctacggcgtggacgcctgttactgcgccgacgtctactgcgcatagaatcaggcgaagctctgttcttgctataacttgccct

SEQ ID NO: 336560 - DNA, 396 bp, Zea mays
aaaaaaaacactaaattctcaacaaaaactaaaatcgcaacatgcctggggggccttggggatctttcatccaaggcctcgcacactttcatgccaccgtatgcctcttcaatggcgtcaactaaaaccaactaagtggccacatcgatacaacgacgaatctgagaaatctcgggcactaccgaagtaagtgccttcccaacagatacatattcgcgtaactagcttaataccgatacaaccctgtacctgcgccgtacgagattacatatatcacatattcacgaaccatacatgccacgaatccgtgcattaactgcgctgatatatctgtacacactcacttgtacacctacacttgtacgaaacctataaccatttcatccaaatacttac

SEQ ID NO: 336561 - DNA, 361 bp, Zea mays
acccacgcgtccgggctatgatgatcaaggtgggtatggtggtggatatggctacaaccaaggcagatatggaaactatcaagaaaatggtggatataaccgaggtagaggaggtggtatgcgaggaagaggcaattggggttaccgtggaggctatgaaggaggcaggggtggtggctatgaaggaggcagggtcggcggcggctatgaaggtggcaggggtggtggctatgaaggaggcagggtcggcggcggctatgaaggtggcaggggtggtggtggtcctggtggaaggggatatggtggccgaggaaggggtagaatgggtggcggcggacgagcgaactaagtgcatgcagac

SEQ ID NO: 336562 - DNA, 242 bp, Zea mays
aaagcagacagctaacttcaccatggactgcaacggtctcaacgaaggggacgttatggggaaacagggccagtacatcgactaatactattgcagcaatggctacattaatggtgtcggctgaaccagagatggtggcattagcgcttagaggcttgttgatcgcatgagccggctcatccactttcactcgcatattgacaacgcctacataacccacatcgtcttagactaaccaatca

SEQ ID NO: 336563 - DNA, 416 bp, Zea mays
acccacgcgtccgctctgaccagagcctgaacagggaagtccagaccaggccaaggccaagaggaatcagtttttggaaccaaagccatctagcatgtaaagcccatcccatcagttgcaggtttgggattccaagccctccaaggttcaatggcctggttattttctcccaagacatatgtcaacttccaccattcacttctttcctccctttctacaaaaaggcccttctcaatttatcaatagccttaaccacccatttccatttaggcacattcaaggcaatgaagtccttattttgaatcgattggtcagaattgaacttaataatattcagacctaaagctgtctggcattcccgatcaataaaattagtgtgcaaagtgagatccaaggatgcattaatgagtctgatt

SEQ ID NO: 336564 - DNA, 396 bp, Zea mays
ctcactcacagtataccttgttcagatagaccactctatttttctctgcatacactggtctttttcttttccattgcgtgtgtgtgtccactaaagttatataacttttagcctacactttgtggttctgttttcttacttgatatctataattgtacaacacataaactgcatttccaattctgttccctttgaagatattaaatatctttcaactctttcggatcgtttttaatatatgtgagcgtatcaacattattataaaattcattatactgacaactactaggttggagatgacacatgtgtttccaaggtaaggttcctcatctagctcaacctcaatgagcagccataggagtgaaactgatgatgataggatgatttgcttggttc

SEQ ID NO: 336565 - DNA, 286 bp, Zea mays
gtcccctaaggctttcgttgcagaggactcactctggcctaaggatcggggtaacttagagctcctgggcacgttggaaaggaagttggtcacacaagaagcatatgacacactgaacactctactaacactatatcacgcatgaacacagctccggatcgtattggacaagcttggtcagcggatcccacgaaaaacctggcaactgtaatatagcacacatgcttaacactgaatgactgatcgtcaatcaatataccaatatctctgcaagagcagctctcaa

SEQ ID NO: 336566 - DNA, 194 bp, Zea mays
ccctggtatcaaagaattcagagaaagctgcggaggatcaagcttaggggtccatcctaggggaatgatgcaaaactaacaaaagcacataatgccagatgataaatctcatacgccatgtcgtgtaaccgagatggcactaccatatcagtcgacctatgcataccacatcttaaacctcttcaattgaagag

SEQ ID NO: 336567 - DNA, 305 bp, Zea mays
ctgacctattaccttttcttctcctaactccactcgaactaaccacgggggtactccggggctaaaattacccaatccatcataccttaaccctaaataaattcttcatccacctccaacataaatcaacgtatagcaccgataacctcaactccaaatcgtatatgacacgctcggttcgcggttcacgcgactaggctgacgactggctacccgcctctcgagcgaaacccagcatgacagaatcacattgaaataacgacacgctctgcaacaatagctccatttcacgctgacgcagcagc

SEQ ID NO: 336568 - DNA, 256 bp, Zea mays
aaaaaggatcacatatctctctctcccttccccctctctctctctggcgccttttcccggccagagtcgctcatggccacttctaaaacaaccgccatcgcatcacctgtccaatgacatacacatcccttctccgtgcaacctgtgcgcttctcgaatgctgaagctccctgtccctaagacaagcttgcacacgccatgaaggcttcttcaagacacttcctgcacggcattgacaagggatacacaccgccac

SEQ ID NO: 336569 - DNA, 378 bp, Zea mays
ctacaaggggctcggcgagaacccaaactgctatcggggcatatacgtcaagaggtccagcgacctggagcccatagagcactccgtcatccctcgcatgatcggcattagtagcatcaagcccgtccactgctggtcgctgcaccaccgatactccaccgagctggagcactcgcggagcttacccatgctcaccggctacccagccctgaacgacgccgacgtcgagaccacgagctaattctccagcccgataaaatacaccgtcatcactagcagcatgacccttcattcagatgccgcggataacgacaactcacacacccactcacataatatccgcgaggtccacagcactgtacaatacggcttctactc

SEQ ID NO: 336570 - DNA, 182 bp, Zea mays
ttttgaattcgagcgacgagccacgcgtcccaacatataacatcatctgacttgtccaacctaccaaatacatttactcttagtggggctaggaatctacatttaaaccaacattcaacggttatcttatgacttaccctattctgataatttaaactacctcaacactgtccaacttactg

SEQ ID NO: 336571 - DNA, 398 bp, Zea mays
cgcctacgccgctcagcgacctagctctcctggtctctcgccggcgcgttcgcaccgcgctggcgacaaacttcgccgccgccacagcgactgtatccgaccatccgagggcgcggcagccttgcattccacacccaccagtgcccagcccttcgcctcggcggtgaccacgctggagaagaagccttgagcctgcacttaatctgagactagaaaattgggctcaatcacgggtcgtgtcgtcccgacggacggaggaggaccgccgctagagctcgtgttgtcgcgccaggtgctcccataacttcgttttatttactacgaaagaaacccttaatggcacccagcctaagccccccttttgaattccccacaccggaattcaagcccttagctgg

SEQ ID NO: 336572 - DNA, 86 bp, Zea mays
gtccagaccccacccgtcgccgtccaccttcgtgctgctgcgcccgccagcacgccaccgctcctcgcgcgtaggctggccggttc

SEQ ID NO: 336573 - DNA, 194 bp, Zea mays
aagatttcgaaggcttgaagaatgttctctgcatcagtgtacaaatatattgcagggctagtacaacaaagtagaatgtgatgttatgtttagctgcattgtgattgctttgtcagtatacatgtaacaactaaaaagatagctgttacgtaaaatagtactaccttcttgccaaaaaataataaataagatag

SEQ ID NO: 336574 - DNA, 357 bp, Zea mays
cctctcctctactctgcttcacgcctcgccggccgatctagctagctatcgcagaccccgccggcccggccctcatcgatctctcgtcgcggcaatggccatcacaccgcgcgctccccgatgattgatccactccggtcgccattcccgccgccatcatcagctcctactatatattagcccgacgaccccgttcatcttcctcttgtagttttgtccagcgcgctccgctgacgcaatgaccaacaacaacaacggcggcaatgacacgaacgccgcggcgagcggctggctaggcttctcgctgtctcctcacatggacgagcaccagctccagcagcatcagcagcagcagca

SEQ ID NO: 336575 - DNA, 265 bp, Zea mays
ttctagggttttgctgctctccgaccccgagctccgaaggccgcagcatcaggcgcggcccccctcgcgtgtgaccgagatggcgctgccgaatcaggggaccgttgattaccccagcttcaagctcgtcatcgtcggcgatggtggaactggtaaaactacattcgtgaagaggcatctcactggagagtttgagaagaaatatgaaccaaccattgggggtggaagttcatgcgttggatttaaccactaactgtgggtagat

SEQ ID NO: 336576 - DNA, 134 bp, Zea mays
ccagattctaatcctcgtgaggagctgatcctgctgattctcctagaaaatcagaatgatttttaaaaccgcttggcacgtaaattgattcttgtcttttaaaaaaaaataataaaaaaaaataaaatatgcat

SEQ ID NO: 336577 - DNA, 105 bp, Zea mays
acgcactaacacgtagggcaaccactacggtgagtcgttgaccgtgttgcacccgtagttccgggtcttgctatacaaccagtactcgagctgctctagaagact

SEQ ID NO: 336578 - DNA, 273 bp, Zea mays
agctggtccaacgaaaggcacacagtccgacagccgccgctgtttcttcatcttcctcgcagcgccggcgctccttcttccgctccctctccgattcgcgctcggcacgcaggcgacggcggcggcgctcgtgctcgggctctcagcgacggcgggcagtcccagactcggtgtcggcgtcagcggtcccccttccgcctgtcaccaatcgccttgcgccctcgcctccggtcctccgaacaccgaccggggccctgcgtgcacgcctcccgt

SEQ ID NO: 336579 - DNA, 444 bp, Zea mays
cccgctccgatccgccagagcaaaccctagtcaatggacgccgccgccgttcacaagcgcaagcgacctgaagaggccgacccaagcgcgggggagctcgacctctccgacgccgacgccgtcgagactccgagatcgcgctccacgccgagaccgaccgccttcgcctacttgccggcgcgcctgagctcttacccgacctcgtacccatcggcctcgcctcttccctcgcctcccttctcacccacgacaatgtcgatctcgcagctgccgccgcatcactcctcgtcgaccttaccgacttcgaggacccctccgacctcgccgctgtccaggcccttgccgacgcgctcgtcgacgccaacccgctcgaccttctcgttcacaatctcttccgctttttcgagaccgaccccgatgaggccgaggccgtgcacaacaccc

SEQ ID NO: 336580 - DNA, 241 bp, Zea mays
acgcggacgcgtggggtgcgtcgagcttcgccctctggattcagccggtatacagcgccgtcggtcgggtctccgaccgtcgggtgaatgcggttcaagacgttctgtagtgtgatcgagcgcccaggcccggtggaactacagctagaacatacgacgactctacatgatcataaaagcggccgagcggaacagtgatctggtggacgccatattgctgatgaggaccacgacctacatt

SEQ ID NO: 336581 - DNA, 229 bp, Zea mays
cttctctccaagcggacaaagcccgtccctctcctacacctcccccaaagttccgttccgttccgttcagttccctcccggctcccgcaggtcaaaaccctcaacctcccacgcggctcgctcgctcgctcgctgggtgggtcggccatggctccccccgcgctcggatctcagggtaacatcactctaaactttcggaccaaaccatgcatcgggatggcattagcgt

SEQ ID NO: 336582 - DNA, 196 bp, Zea mays
ctcaggtggtgacaaaatctgtggagaagctctttggaagacaagtccggcatgtgaatctcgaaaattatttgagttcaagaatatccagcctgggtaactattcaaatgggcataagaatggggattcaaagttccgtctgttgctagcactttgtaactccatgatatcacttcacaagcagggattcaaaga

SEQ ID NO: 336583 - DNA, 347 bp, Zea mays
cccgcggcggccgtggaggcggcggctgcggctacggtggtggccgtggaggcggcggctacggcggtggcgggcgccgtgatggctgcggcggctacggcggtggctgcggttgctacggtggcggtggtggctacggtggtggtggtgttatctacatctttttttactgttttggtttctttggttaattttacttgtttctggtttttttattctttttttgacagtgttttcatttttttttttttttgctttcagttatttttgtttctttcttttttttgttttttttttttttattttattgctctgtattattttctttttttttttttatttttttt

SEQ ID NO: 336584 - DNA, 285 bp, Zea mays
gcggaacatggaggtccagaacttctccttctcctagcaaatgctggacctcctctactcgagggcgcgcccaaccaatcatgacgagcgcattatcctgatcgacatttgcgtacagaggggcctgtctaacaaatccatcgacccgttggaggacccttatcagttccgctgcatgaccctcattccgctttctaccatcttccacttcgtgtgcgacctctgctgcgccaagttctcggcgctctccgcaccccgttgcgccatccgttgtatgggttgcat

SEQ ID NO: 336585 - DNA, 171 bp, Zea mays
tcgtctctattaatatattctataatatattaatcgtttcctccactaacaaatcttaacagcctgtgatcagttctcaattctattgattcttctatagcgatgtttataacaaaactttcttctgcttacaaaatactactacattatcatccatgctctttttatttt

SEQ ID NO: 336586 - DNA, 266 bp, Zea mays
gcgagcgagagcagcacacactgcacgcagctagctaggagcagcagcagcggcggcgatggcggcctccatgatctcctcgtcagctctggcgcgtggcgcctcagggcctgccgcccctcggccgccgcgcctcctccttcgccgtcgtctgctccaagaagaagatcaagaccgacaagccctacgggattgggcgtggcctgaccgtcgacgtcgacgccaactggagaaagggcaagggcaatggcgtgtaccaacctcgt

SEQ ID NO: 336587 - DNA, 174 bp, Zea mays
gccctgccttgttaagcaaagcaacccagctgcgagacacgagagctagctagagagagagggcggggacggtttcctccttcccggaggcgaacatggtgaagctgtataccgatgagagggccacgtgcattgaggtcatccgctacgattggaagaactgcggctctttcg

SEQ ID NO: 336588 - DNA, 317 bp, Zea mays
  unsure (1)..(317): unsure at all n locations
tgtatannncatacaagtcactgtcantgggcattcacaaaacagagcggtaagagccttttcttgtcacgacattctaaaaacgacgatcggaagacgccttctgtcatcgacagttcataaaatgtgaaccgtgtattataccacatacgtgttgtatacccattatcgtattccttggcgtgcacgcngcgtatagcatnaaaaaaaannaaaaaagaggcggcncgcttctaagagcgatcnnncaagcttatcgtacnnngcgtgcgatagcgacgtnncatagctcnttctaatagtgggtcacctaaaat

SEQ ID NO: 336589 - DNA, 378 bp, Zea mays
  unsure (1)..(378): unsure at all n locations
gctcgacgctaccgaacggaaataagcccaccgagtagctggcttgccctagcaaaacggaggcgtggccctagccgaggagcgcccatggccgctgccatcgcggcctgaggcggcggggctcttaccatggggtgaggggatggaccctaccctgaaagaggaggtgatgaacgcgtgagacgaggcaacgtacacagctgcgccctggtgcctgccggcgcggatcattatgcacgacgaggacgccacctactagaaaggcaccgacgaccaaagataagaggcttctggagcccctcanaaggcatctaatcctgttcacacagtagcaaataagctcagcctgcctgcgttgcaattgattacaaagaagct

SEQ ID NO: 336590 - DNA, 164 bp, Zea mays
cgttagtttgctcttgttgtgctgatgctgctttggccctatcaagctctcgtgtgagggccgtggccacttccagcgttcctttgtatacatagagagacgacatatccttagtgctgccaaagccatggaggttaccctcctctccttctagaactgaaact

SEQ ID NO: 336591 - DNA, 267 bp, Zea mays
gagactgttatgagatattgagtgcctccccttcctttctatgactgatagcaccaggcttatcttgacaatctatgtttttagcattatcacgtcgatcattatgatctctctctgtaacatctaccatatgttatgcagcaacaaaatttctgctggaatacacattgtggcctcttcttggaaaggctcgagcacgaaatgcttttaatgctccaaaggcattattcacgagggcctatgtcaggtcacaccctctccaaactt

SEQ ID NO: 336592 - DNA, 189 bp, Zea mays
aagaaggtgtacataatatgaactgaggagatgcctgcctatgttgctgaccttctttggtcaattgggagtaaacacagaccaaatacgggcggtggtggaatttgacaaggctcggttatgtcgaaataccgtaggagaggacgtcatatagacggtggggcttctttgcgggacccagctcgagag

SEQ ID NO: 336593 - DNA, 269 bp, Zea mays
catacagctagtatcggaatactccactctgtcgagctgtatatagagaggcttagggggtgtttgttttaaattataatctattcatattatattatctaacaactttttaattcagatttttttcaaaacttattttcttatatattaatattttgagcttttatttatttttttactttattttacatttttaccttttttttttattatttataatctctttatataccatttttttttattctctattatttacttatttcttt

SEQ ID NO: 336594 - DNA, 314 bp, Zea mays
  unsure (1)..(314): unsure at all n locations
gccatgataaatcccagcgccgttcgcccgctccccgccacaagctcctcctcctctgctgcctacacactccagaggcagcacgtgctgccgtgctggagcaccactaggccgcagctgcaccaccatggcgggcgcgccgctgcggaggtcggaccttgacttcgccgacgtctttggtggcccgccgcgccgggtgtctgggaacgagcaccgctcgcagcgcggctcgcaggacacctcgtcgttcgagtccgcgacgagggcggngagcggcggacaggacacgcccgttttcggggaccggggggagc

SEQ ID NO: 336595 - DNA, 99 bp, Zea mays
gcgatggcatggaaaatcacccaatctgcctaaccctattaagccctgtcgtaccctacagaccctggccctatctctccctacgcgccgcggagcgat

SEQ ID NO: 336596 - DNA, 355 bp, Zea mays
gtctgacgagccgtcatcactcggcgcagttcacggccgctgtgactgggagagtgggggcgatactctactactgcctagtgcatgacgacaattctactcactgtcaagactcgagagcagctgtggctaccgagctctgcgtgcgtggggagcaccggataaggcatcatacgagaggagggtggtagcgcgtggacgggctaggcgcagcagcatggacgccgggatcagggtcctggcggcgctctaggcggcgctcgcagcagacaccgccggcgtgactgcgcatctgcatgaggactactacgcggcggtgtgcccggacctggagagcatcgtgcgcgccgcggtg

SEQ ID NO: 336597 - DNA, 385 bp, Zea mays
ccaagatcgccgcgctctctccaacatctcctgaccaaagcgaatccagcatcaccggggtgcaggaggcagcatggctgacgaccagcagccaccggcgcaacggtactggttcccgtactggaccgcgcctgctcctcggccggtcgcccgcccgcagctgtcgaggcgggaaactcgcccggcaccgtcacctactgcaacagcgtcggcgtcgcgggcggccgtcgcatccgcaacaaggcggcgaccccgcattcaaaaggccctggcggtgggtaccttaatcaacttgccaagccgaagccaagccggttgtcaagaaggccatggccgtggctttccgggcttaagcaattgtggccaataaaaaagcccacccttg

SEQ ID NO: 336598 - DNA, 401 bp, Zea mays
cccatggccactgccgaggtccagaccccgaccgtcgtggcgaccgaggaagcgccggtggtggagaccccggctccgcccgccgtcgtgcccgaggaggctgcccccgccgccgaggccaaggtggaggagccagctgccgccgctgagcccgaggcggcccccgtggcggcggaggaagagacgccaaaggaggaagagacggcaaaggagccggagccggcggcggctgaaaaggtgaaggaggaaacggcagcgcccggttgccgaaacaaaaccaaaaccggcagccgttaaccccaaggttgttgttgccaagaagcccccgggggttaaccccaagcttgttgttgccaagaagcccaaaaaggccaacccggccgttaaggtggccaaaaagg

SEQ ID NO: 336599 - DNA, 384 bp, Zea mays
cgacttgtttcattgattcttgaagagatcgagcttcttttgcaccacaaggtcgaggatgtcttgcaactgcggatcaagctgcggctgcggctcaagctgcaagtgcggcaagaagtaccctgacctggaggagacgagcaccgccgcgcaggccaccgtcgtcctcggcgtggccccggagaagaaggccgcgcccgagttcgtcgaggccgcggcggagtccggcgaggccgcccacgcctgcggctgcggtagcagctgcaagtgcgacccctgcaactgctgatcacatcgatcgacgaccatggatatgattattatctatctagcttgtgggggggttgaacaataataagcgaggccgagctggctgccatacat

SEQ ID NO: 336600 - DNA, 306 bp, Zea mays
acgaagaaattccgaaggacagtcagggttcatctgacaggagtggaccgccaccagttttacgagcacaatccaaatctaaaccggaactagcagaatacgctggtccatcatgagaaggaacttgcaattgcattcatcttatagggcccagcgcccatccaaccgaagcttctgaaaacgtattggctaaatcaaagcagcgtgccagagccagaaaggagattggattttctgccaaccccagtggagctcacattgttcactgctgcggaaagttgtcaaaggcctcaccagaaaatgcat

SEQ ID NO: 336601 - DNA, 358 bp, Zea mays
  unsure (1)..(358): unsure at all n locations
caccaccgctcgctccacagcagaggacaagaggaggagcaagcgagcaccgagcagaggcagcagctgctatggaggcgcggaggacggggagagatctcctcgcgagcttcgtgctcgcggcgttggccgcgcaggcattcgtggccgtggtcgagtccagggccagccccgcggagaaggctagccaaggtatagtacatcttcttgagctctgcccactccagatgaaacaagcaccaatgccgatgtcccatgagggcggcgccgaggcgagcaagctagcatttttttacctttgagatggcgtcgccgcatgcangcgacgacgtgaagaaagccgactgtgtgctgggga

SEQ ID NO: 336602 - DNA, 269 bp, Zea mays
catttcttctctctctgctcctccgcctccgcctgatccatccaagacagggatcgccatgtcggactcggaggagcaccacttcgaatcgaaggccgacgctggggcgtccaagacctacccgcagcaggctggcaccgtccgtaagaacggcttcatcgtcatcaagaaccgtccctgcaaggttgtggaggtttctacctccaagactggtaagcatggccacgccaaatgccacttttgtcgcctaaaaatattcaatgggaaaa

SEQ ID NO: 336603 - DNA, 296 bp, Zea mays
acgatccaatcgaacatgcatggtgagtcaacttgccgcctgcgagccgctgatcctgatgttgtggggcatctaccattcctgctggatcagaagagcatcctttggaggggatcataggcagatccaccatgtaccttagcatatgacctagttggcccagagaacctgcttgatggctcaaaagatggactccactgtaggtgctgaggcaggacacagaggatcatactgtcattacacctgacgatccaccacggcatcgcacttcgcgtgaggagatgtacatcatcatt

SEQ ID NO: 336604 - DNA, 128 bp, Zea mays
gtacatgtgcacgcagtgtccttcgatacgtattcctggtacggacaacgggcgtatgggtagactcccacgcgcattcaaggagagcaggacgagagatctgtatggaggatcgagggcttggtact

SEQ ID NO: 336605 - DNA, 183 bp, Zea mays
acgcgtctctgcaagcggacatagcccgtccctttcctacaccttccccaaagttccgctccggggcgatcagttacgcccccgctaccgggcgtgtaaaccactaacacttcacgcggatcggtcgctcgctagctgggtggaggggacattgatccccccccgctcggatctcatggtaac

SEQ ID NO: 336606 - DNA, 251 bp, Zea mays
  unsure (1)..(251): unsure at all n locations
tcgggcctactgcattttcttcaaggatttttactgccgccgcgttncattcatacacgggggggggaagtacaagtacgcgataggctacatctgatttaatcaaaaagaaacattctaaaaaaaccttcaatacatgttagtctagctgatcatgtctacatcatttaaatgggaaaaaatttgtgatttcgatgaccacctttatgatattagcaaggattggtcgaacccaatccttctngactgaa

SEQ ID NO: 336607 - DNA, 226 bp, Zea mays
acagctgacgcatgggcgggcactagcctccgtggagaccacagccacaccagagagcgcttctgtctccgtccgactgctgctccgcgcgagatgtaccaccactgattctgcgtgactcgggtcagtggagaatatcagcgatacagagcgggtatggagagctccaacgaaggagatccctaagttgccatccaccgtcccagtggatgcgggactgctatgg

SEQ ID NO: 336608 - DNA, 118 bp, Zea mays
  unsure (1)..(118): unsure at all n locations
naaaaaaaaaaaaaaaaaaaaaaaaaaaaaataaaaaataaaaaaaaaaaaaaaaaaaaaaaaggaaaaaaaaaaaaaaaaaaaaaaaaaaaaaaaaaaaaaaaaaaaaaaaaaaaag

SEQ ID NO: 336609 - DNA, 134 bp, Zea mays
gttgaatggaagcgataactaaatcaaggatgttctatttatatcggtctcaggtaattgtgagcagcagtagagactaagcagttctgtaattgcatttgttctaagatcattttctgtacttgcatggaagc

SEQ ID NO: 336610 - DNA, 257 bp, Zea mays
gtctgatgcaagttcttgtgtggattagcgtaccacagcacatctcaaccccgtggcgacggggagtggtaagaatcaacgctctccaagtgtaaagaacaggtgcccggacacatgggttctgggagtgataggggctaagccactagcgcatggatagacctggtctaggctgacagtgtcctttaattaatgtcctgacaacatttcattaggctcttagcacctgctgttacaagcaagaacttgaacagggc

SEQ ID NO: 336611 - DNA, 173 bp, Zea mays
gaaatcgggtgtcgcgtcgtcgcacggtgttgctcgccatatccccttcccccctgctgcgtgcgttccccggctccggcgatccgacgtacctgaacccttctccacgtcacctcgccggttgcgttgaggtgagccgatcagatcccatcggggccggtccttgcgccact

SEQ ID NO: 336612 - DNA, 213 bp, Zea mays
aaaatacatattcacgtcccaaactactgcatctcgagctacttcactcaacatcatcttcggaatccatcaggttaagaacaaccaccagtcctgtatgcacctctatctagaaacgctagctgactttaagcatgcccatctgatctcctaggatccacaacttgacctactgactgattgacctcatacccgatgagcatgtgatggact

SEQ ID NO: 336613 - DNA, 111 bp, Zea mays
gcgtacgcgctcccttataaaacctacgtcctcaagcttcaaacacaatctaacccccacaacccggagtaggggacgcacctgttctagaatcctacatatcaaagaatc

SEQ ID NO: 336614 - DNA, 430 bp, Zea mays
gcgtccggtcgtgggaagatttcaagtctgtcgtcgagtttcgccttgttggagactctgaatctgaggccgagccttctgttgcttctgatgttagctctgggcaagcaattgccaagctctctcttgaagcagatattgtacaagaagaggctcgcctgcacaccattgagaatgatggactttctggcgatttcacatcatcatcatcttacgattccaggcaaggatggaaaagcgtaaggttaaaaatgaaaattaaggattaagggtctacataatatggcaagcttgaaatccttggcctggttaatggaatatttatggttcgtttcaaaccttggaacataaaactgtatattttcggatttcacaccggtcaattccatggctggattccttctgctatatatatatattttgatcctcc

SEQ ID NO: 336615 - DNA, 154 bp, Zea mays
acggtagtggtctcatagatagcgctagcagctgtagaaaccgccaccactatgctaggagtggaagcctctgtcccgcagcagcagccattgcggcgttcctggcacctccctgcacttccttctatcggtcgtacacattccttaccccctg

SEQ ID NO: 336616 - DNA, 197 bp, Zea mays
cacgatggacgagcatcacacaggaagggcttgttttccaccgaagtgcggctcctgtatggcggcggcggccgaagcaatcccgggagtgacagcaatggaatcttgggatgcgagtggtccgacttaatttccccgacctcagcgaagcttttggccttcaacgccacgatggacgagcatcacagaagagtgca

SEQ ID NO: 336617 - DNA, 122 bp, Zea mays
aaattttgatgccattctgttaccgtgggcttcttatatacccgactccataaaggaaaggggggggtgacctcaagccaaccttctagcacctttgattcaagaagcaacttcgcatggac

SEQ ID NO: 336618 - DNA, 358 bp, Zea mays
ttcaagtctcgctacgtagcagtgcaataaaaaaagcagccgcaatggcgagcagcaccatggccctctcctccacggccttcgccggcaaggccgtgaacgtgccgtcgtcgtccgccttcggcgaggcccgcgtgacgatgcgcaagacggcggggaaggccaagccggcggcggcgtccgggagcccgtggtacggccccgaccgcgtgctgtacctgggcccactgtccggcgagccgccgagctacctgacgggcgagttcccgggcgactacggctgggacaccgcggggctgtcggcggacccggagacgttcgccaagaaccgggagctggaggtgatcccactcccgct

SEQ ID NO: 336619 - DNA, 267 bp, Zea mays
gacccacgcgtccgcacgtacgctcgctcctactaccacccctacggcatctttacgcccgaccacctcgccacggggcggggcagcaacattaagaacgtgccaaacatcattagtgatcacctcgacgcgtagaccgtgctgccgatacatgaacccggagctcgacggtaacaagatgctctgttatgccaacttcaccaacggccgcgtgtagattctatatgacaacaaaagccacatttccaacattattcatatttacaa

SEQ ID NO: 336620 - DNA, 285 bp, Zea mays
cgcgtgcgctggaaatgatagaactatgacggccggcttcttttcagctgggccatgcaacaagttagggatgaggggactactcttcaagatatgttaccaaacataacaaaacgttgttctctgtccaacattcttgaacaatgcatgtattgtgcaatgggtcttgactcagacggataggatcttcgtggtcttattccaccgaactttgataatgccgttctaaacttattcttacagaatatgactacggaggacgtaacccttcaagtcatttttgat

SEQ ID NO: 336621 - DNA, 61 bp, Zea mays
gcgctgacaacgcgccccaaccccaacccagtcgagtgcccctgcgttctctctgcagttc

SEQ ID NO: 336622 - DNA, 225 bp, Zea mays
cgcgacgcgcacaccagctcgccgtcggacgcaagttctcacaggctgctgctgctccgtgggccgggcgccaactctgacccgtacgcgttacgtgaaggcaccatggcacgcgtgctctgctcccggtcagcggtcctggcgcgccgcctcggggcccagccccagccccagcccggcgtggttctgagccgtcggcacaaccacactcgccggcgcgcggtg

SEQ ID NO: 336623 - DNA, 455 bp, Zea mays
cgcgtgcgcgacagagaagcttcaaggggatattaattaagacgttttaaacatcttgcacaaagactcaggcctggggtgttaaatcaaaagaagaattctttagtcacttttacgactgctttcaaattttaaggggcgtctgcatctcatttttttcttgtaaaaaaaatttttctctttgtttacctttaccatcctgttctttttttggaaccaacaaccttgaaaaattacatggttttatccattttattttttattccctaccacctttattattcccccttttgtttaatgtttcttaaaaaattcatttgtaatccttgctttttttccccctatttgtggctcggaaacttccaattctttacaccttttgttccccccctctcatttttacattgttaaatttacaatatttctccttcttaaagctttttttcaaatttttt

SEQ ID NO: 336624 - DNA, 269 bp, Zea mays
atctaatactggaatacattacgattttattttacagctacgtgaacactgctgagggaagggatgataataatgacttgataatatgtacgattatgagttatttaataaaaaatatgttactatcctgataatattgatgccagacatatgcatgcatacataggttttgctatctatatgcaaaagcttggaacagggattgatataaatggacgatttcagatatattaatacaactttgtttaaaacaatggatttgccccaat

SEQ ID NO: 336625 - DNA, 155 bp, Zea mays
acgaggttctgcaggaatattttacgattttattttctaacaacgacatcacttctcacagatgatgtgctaacaagaatttctgcacatatgcttcaatattctcaaaatacttcatactttgccgaccatgatgattacgaagccggcctttt

SEQ ID NO: 336626 - DNA, 265 bp, Zea mays
gatggtacaatcccatccatctgcagtttgcttgtttcttgtctgcttgccagatcaatgattcagtggcccggcggatgtaaaaaaaaaagattccttcatctcatcaaattcgaggacaacggcaaggcgacgtgggacagccagagccagcacaaggcggcagctcccgcgaggtcgtcgtcgacgacgaccatggtagcggaggagcacgtcaagcgtgtcggcgtcacccggtggcgcaaacaggtggtgggccgcatgc

SEQ ID NO: 336627 - DNA, 226 bp, Zea mays
cctccgcgccccatccctgtaggtgcgatcctatcctcgaaatcctctccctccgagccagatctttgttcccatccgtgtccatgctgaaatccttccatgggaaaggcaccggcgaagacgcgattcccgctgaggtaacccctcacgcggcggtgaaaatgcaggcaaagacgccagacgcgactcctgcagagataagcacccttcgcaacatgtggatctc

SEQ ID NO: 336628 - DNA, 139 bp, Zea mays
gccgctagggagtcgccttacgaacggagattcacaaggacggctgagcgatccacgtgggagaattactagacaacatcagggagtgggaaatcgatgctgtgtccaccaggaaaagcggaccgtacacaatgactgg

SEQ ID NO: 336629 - DNA, 299 bp, Zea mays
aacaaaccctatccgtctggcgcaggcggtttgggagcgagtaccgagcgccccaattcacacggggtatatcctaatctacgcagtcatgcctccttagcggtttcgttatttgtttgtttccagcggccgttgctgcggtgattttgcttagctacgctttggaccggcgttccttcgctgctagctagtaccttttggaagtcaaggagtgctgcctttcgcctgatctacctagacgccttttcttgcgtcagcgacttctattttggttaattagcaccgtgagatgtcagaat

SEQ ID NO: 336630 - DNA, 116 bp, Zea mays
gggaatatacgtgtctatgtgagctttttgttctgatctgcactgtcctgccatcagatcgtgcgtgagcccggttagtgctaaagaaacgcaatggtatccgcacctcgcgaacg

SEQ ID NO: 336631 - DNA, 238 bp, Zea mays
cgacccacgcgcatagctattacctgtgtgcctcccatgttcagttgatatggtgggagtctcaacgtatatcaggagagtagtgcttaatagtaacagaacctcattgctgatgcacacgcgaatctggatcatcacgtgctgtggttgtaccgcacaaaacatacacatgtcagctagtcgattggttgtgaagtatgaaactatcatcatgcgtgattatgagccgttgcgtgac

SEQ ID NO: 336632 - DNA, 315 bp, Zea mays
  unsure (1)..(315): unsure at all n locations
cttcacactcctcgccatcacataaaaccagtgcaagcagaagcagcgcaatggcgagcagcaccatggccctctcctccaagccttcgccggcaaggcagtgacgtgccgtcgtctctcttcggcgaggcccgcgtgacgatgcgcaagacggcggcgaaggcaaagccggcggcgagctccggcagcccgtggtacggccccgaccgcgtgctctacctgggcccgctgtccggcgcgcccncgagctacctgacgggcgagttcccgggcgactacggctgggacaccgcggggctgtcgggcggacccgga

SEQ ID NO: 336633 - DNA, 191 bp, Zea mays
gccaaaagggtgtcaaatgacttaatgacagacaagatggtgtttgagtttgtcaacacgcagcctgggagcacaagttcacctcttggaacacagcgaagaggcactcgcaaacacatgccacaaagcagcacatgtatcaccaacatgagggtccgagtgagctcttcaccaccaggacctcctttcca

SEQ ID NO: 336634 - DNA, 193 bp, Zea mays
ggcacacagtggcgcgcaacaacaacgtggtgctgcccgggtacattgtccgctcgcccaggggggaagacatgccctcatcaatagcgccgacatagactgcgcgtcctcgacggccgcggcggtccctggctgctggtgaagaaccactacctatccagcgacccttacatgcgcggcacgatgcagaatt

SEQ ID NO: 336635 - DNA, 302 bp, Zea mays
tcgagagagcaccacgccaccccatgctctctctctgatcctgcgcatacgcatgtgcgcccgagccgttcaccgtactccattccaaactctctgcctatccagcactgtattcacgctcgtgctcgcatatcggtctgccgtgcagagcagacaattacatgctaggctgctgcttctgtacaaaaagagcttaatcactcgttctttcggcgcgtcagcagacagcgaaggcagatatgcgcggacttgccctctaatagacacaatcctaccaacacctgcatgctacgcccaaactg

SEQ ID NO: 336636 - DNA, 140 bp, Zea mays
gacccacggggaggccaacgggacggcgtgaggccatcggtgcatgcggtcctgaggaggaggaccaggcggctactcgggggaacatggggaagacaccgtgcagctggaaatggacgagggcgcgctgtccccctttc

SEQ ID NO: 336637 - DNA, 319 bp, Zea mays
  unsure (1)..(319): unsure at all n locations
gtttcttcagagcctgagccaaatctaaggggcttgcttcatctgctgtccgatcgtgggggggctgctcggggctggcacggtcaagactcacctgaattccaccgaaatctgcagtgccacggtagttcttgcctaggtgtgtcgttggtcgttgccttgtgacccttgcggattttcttgtttctttttgaggtgccatctttgcaggttaatctcncggtacaaaaaatttgcactgggttgatcacatatccctaaaaaggtacgttcggcgaggacaaccggatgctggtttacctctttttgagtctgagtc

SEQ ID NO: 336638 - DNA, 80 bp, Zea mays
ggcagacagtggcgagtgaacaggaaggtggtgctgcgcgggtacatcgaaccggcgcccaggaggaagacatagctcat

SEQ ID NO: 336639 - DNA, 68 bp, Zea mays
ctaacgaacgagggctactacctctgacgctaactgtcgcaggggttgacaatcctgagcatgagccg

SEQ ID NO: 336640 - DNA, 332 bp, Zea mays
  unsure (1)..(332): unsure at all n locations
ccaggacgaccacgcgtccggccaaaagtgcagtaccgctgtgtaattttacatcaactcttgccaaatttgtgggactcgggttgtttgccgcattatagctcangcagagtcactgctgatggaatgcggcataagccaaacatgcccttaacacaactgattttgttatgttcaaagaaggcatgaaccaactgattttgtttgccgcattcatagctcacgtagatgaagtaagggccattgatgatgaatactagtttcgactcgatggaccaactgtttaatgagtattcttcttgagggacatggtctcaacaacagcttctgca

SEQ ID NO: 336641 - DNA, 193 bp, Zea mays
atccatcggaggtgctcttttcttacacttctttctttttccgatgcaagaaagaaaaaggggacctgttaacaccaagccgcagacattgctgctccctttgatcgttactcaggaccatcgatcccgatcgtcgttaatctatgcatcgaccggcgaactccaccgtatcccatctggaataccttctcgc

SEQ ID NO: 336642 - DNA, 158 bp, Zea mays
cgaattagatagttattaatacaattagcttggctcgtgggctgcaacaacgacggaggcggttgattcatggacggaaaacaggctgacctctgcatggacgacaacgaggtctctgagcgtcactgcgatttatacatgtgctcacggcacggact

SEQ ID NO: 336643 - DNA, 145 bp, Zea mays
gacgttcggagcgggcattttcacacagatctatcactatcctagacgcacttcatacactgcataggccgggtcctacgaacacacaaccgggcgctcggaaaactccatggagggcgaaggacgcgaaccaacgacgacatat

SEQ ID NO: 336644 - DNA, 239 bp, Zea mays
acgtcatgacaacactctggactttatagaggttttcacggcagacaatagaaacatctacgggtggtataagaagatacctgacatataatcaaagactgttaacaccgttttctgtccatatcgataaaactaggctgatgagaaactgacaccacgctattataacatcgatgtggacaccaaattcgactacttctaacacaaacggtaattgcactggacatgtatctactact

SEQ ID NO: 336645 - DNA, 135 bp, Zea mays
gaggatcagaaagggattcttgaggggtgtttggcaagattcttgacggcatcattatgggttttggatgaaagccagatggtcaacgcagtggatgtgatggagcggaaaagcgttggacatcgacatcgggag

SEQ ID NO: 336646 - DNA, 196 bp, Zea mays
ggccatgtcgaacgcccaggcgtagcacaaggtcaacctgcccaccgctggcttccacagccacacggtgtacccatccatcctcgtcggcaacggctgcggcggctgcaaggtaggtagcggtgctgatggccatgacacgaacggtctgctgcccacctatgacgtgcacatctacaaggctgctgcttaacca

SEQ ID NO: 336647 - DNA, 236 bp, Zea mays
gccgcccgcccgcccgtgtgccggttaccggtgcacaacacaacgcggacccctcgcggcgtggagtggattgggccgacccctatcgagaggagaggataggagcgcggtcgggtagggtttgtctgggtgaggatttgagcgacagcgcaggacgagggaaggaagacgaggactgactccttgaggatgaggcccaccggtgcttgtattgtcgacgagcgctaccggatgtt

SEQ ID NO: 336648 - DNA, 238 bp, Zea mays
ggcatacactaggtagcccggagaagcagacggcattgcttctgtcgtgtccacagaatggggtgatgcgagaacactcatatgaccaatgcgtatttgaaacaattactagtgcattttaacacaaggtcatctagctagacaaactacaggaccaggattaagctgcttaaccaagacatagactagtacactacactggaatacagatttgttgagcgatgtaccaaccaggaca

SEQ ID NO: 336649 - DNA, 273 bp, Zea mays
gtctgataaacaggagatttatgaccttctttcacagcaacctatggacgatgacaccctgggcaacacaaaaaacatcgcttgtgcaaccgacaataaaccttgcgaacacaactccgtcttctaagaacaacagaaactgggacctggccaccatcctaaccggtgctattgaccactccctataaccaaaccatcatgcgctcggtgagaatcacacacataagccccaaagacccttctgaagctgctttaatatcatcaatgaaccac

SEQ ID NO: 336650 - DNA, 219 bp, Zea mays
ccacgccccacgcgtccgctaattatgcacatgctatccaatcatccctacatcacatttctgttgataattgggacggtgttagttcatcattaactcgggatccaaacacggacttaagggctactcactgtcattccaaatgaaattgctctgaatatacgcagctcatattaaggcacatgcaacgttacctgcattcatagagactactatcaa

SEQ ID NO: 336651 - DNA, 162 bp, Zea mays
aaagggcgacccacgcgtccgtttgcctgcgccgccgccaacacaacccttgagccccaatccctcacagcaacggtggggggcgctcaagaatacctctctctcgtgggcaccatgcgcggccacaacggcgaggtgacggtgatcgcgaccccgatcgac

SEQ ID NO: 336652 - DNA, 150 bp, Zea mays
aactaatctgaactcttacatacgtaatgctggagtgtgattcgtaccgctatgagaatgtggacccttagctgcaagaattgctattgacctcatttcatcgggcttatcactgctactgtgaactaaagtcctggatgggccagagaa

SEQ ID NO: 336653 - DNA, 267 bp, Zea mays
gatggttcaatcccatccttatgcagtttttttgtatcttgactgctttccagatggattgttgagtttcccagctgctgtgaaaaaaaaaagattcctttatttccattaaattcgaggacaacggcctggcgacgtgggacatccagagccagtacaatgcggtagtttccgcgaggtctttgcaacaactaccatggctgcggtggaacacgtcaagcctgttagcatctatcggtggcccaaacatgtggtcggccccatgct

SEQ ID NO: 336654 - DNA, 199 bp, Zea mays
gaaaaacggggccgacccacgcgttcgttaaccatacatacagtctcatactttttttttacatcacaccccaataacatatcgggcttgcagatgctacagcttctttatctatcacaaccatgaggccacttcttcaatacactaacccaactcgtacgacccccttattaccactaatgcaccaccaagactcaac

SEQ ID NO: 336655 - DNA, 116 bp, Zea mays
tcaaccagacgcttcgatatcgattattcgttgaaggcaacgcgagagtagccatccgatcgcgggagactacacttcctaaactatacaacatcaattaccatatctaaaataca

SEQ ID NO: 336656 - DNA, 226 bp, Zea mays
  unsure (1)..(226): unsure at all n locations
ccaattagctagcttcttctagctctagctaggctcgtctgctgcaagaaggtaacagtaacagcaggcatggaggggaaggaggaggacgtccgcctgggcgccaacaagttctcggagcgccagcccatcggcacggcggcgcanggcacggacgacaaggactacaaggagcccccgccggcgccgctcttcgagcccggggagctcaagtcctggtccttct

SEQ ID NO: 336657 - DNA, 329 bp, Zea mays
  unsure (1)..(329): unsure at all n locations
gtcggcgacctctgaggcggcgacgtggaccccaacgccctcgtgtctcccagctcaaggccgccatgactaagaggctcctctgaatctctgatctgttgcaacggcgcgcctagggtttctcgccttgcctatactgtttgtggcggataagtcgtcctatcctagagggagacgccctggagcctggaatggctggctttgcagtgctcttccagcttgtgtggatgtncgtgctgcacatctaacagcaagggctgatgcctagagctaaaaatgggatgggtgaaaatgaaaaaaaaagtggctttgttaaaaaaaaaggattt

SEQ ID NO: 336658 - DNA, 256 bp, Zea mays
ggcaggcaaggccaagagcccaagacggtcggtgcggagcgcgagaggcacgtgacgcgaggagaggaggcggtgctgtggtggcctcacctgccctgccatgattataaaaaataacggagcgcgacgcgggtagaaaccggaaggcccgccgctgcccgccccttctttcttcccgtaccacacacgccgacgacgccgccggtgcggctcgctttctacacactccccccggaccgcgcggggcgggcttgct

SEQ ID NO: 336659 - DNA, 276 bp, Zea mays
gcgggcatgactctaagatgctgcgtcgaggattgaccggacccgctgaggacaccactgctggtgtggggatgctcgacctgacgcagctctccggcgcccacgtgctgcttgggattgacccgaccgagatctgcacgatcaggcaggtcaaccacgcgtatcgctgcggccactcggttgactatgggtggaaaagcaacactgacgagaactacagctacctggttgatgtcgtcgggagctaccacgatgggaagcaggggcgggccccta

SEQ ID NO: 336660 - DNA, 206 bp, Zea mays
aaaataaaacaaaaactaaaaaaaacaaaactaaaaaaaaaaaaggcgctgacaccggtggaggtccagtctcaaaggcacaagcatacacaccgcctgataataatacaagcccgctctaagtgactgttgttgggcgatccgatcacgctttaaagtaggaatgcatcaagtgagattttgttgataaacaagtgtacaatagc

SEQ ID NO: 336661 - DNA, 243 bp, Zea mays
cttggacaatcctgtactaacagacgacactcgtctgggtttttgcacatactggtaggtaactctggaacaagctataagtccatgcctgatactggctacggggctgactgttgtcgaaagcgctgcaaagacgatagaagatgctaaactggcgtatcaatgatattataatctttgaacaagtggtttaggaccactgtgctcccgtttgcagaaccatgtcagttgatgcactttgtt

SEQ ID NO: 336662 - DNA, 55 bp, Zea mays
gactgattgatcgtgatgcatatggaatgctgctgcgacatgcttacccacatga

SEQ ID NO: 336663 - DNA, 197 bp, Zea mays
aagacctgcaagttttgctacgttttatagtaataaaaaaagcagccggaatagcgggcaggggcattgccatatcctgcacggccttcgacgacaaggccgtgaacgtgccgtagtcggccgacttccgagagaccttcttaacgatgcgcaagacggcagtgaaggccatgccagtggtaacgtgctggagctcg

SEQ ID NO: 336664 - DNA, 255 bp, Zea mays
gaggaaatggccaacctatctcagcaccatacttaccttcccatccaggccaaacacaacatcaacttcatcatgaccaccatcaaacgaaacatggatgtgcaaaactacgcctacgccaagcatatgctgcacctcatctactccaaggctcccattacaaaacaagactagctcactatcctcatccacatgaacatacagactagccttacaaacaaattcatcgacacgatagatgacccctcgcaattc

SEQ ID NO: 336665 - DNA, 303 bp, Zea mays
  unsure (1)..(303): unsure at all n locations
gcgcgcactcacacgcgcgctgacnaggtcttatgcattgcgcgtgggtaccacctacagccgcacgagccatattacaccccccgatggggtgccttttcttcccagactaggaaaccaaactatccagacgacatccattcccaacttcaactgcgcctggactcctatcccgaaccctagccaccaaaccggacgctatagaccagccatcgctccatacctcgcgctcatgctcctcctcatactcggactctacaacgtccactaccactacgacacgctcttcatccacaagcacaa

SEQ ID NO: 336666 - DNA, 232 bp, Zea mays
  unsure (1)..(232): unsure at all n locations
cggacgcgtgggccgcaacaaaccaaacccaaccgcaactgcaacacagaggcatntgggtncgcctgcacgccgnncgccccaggccccataccctcctcgatccagcagtgattcgccgggctcccggcccggccatggatttgctggcgtccttggccgccgaagagcggtggctgttcccggcctttctcgccatgtacgccgccatctactgcgccggccagctcgt

SEQ ID NO: 336667 - DNA, 385 bp, Zea mays
  unsure (1)..(385): unsure at all n locations
gcgtgtatatacacatatctctttctatgcttttttatatatacactatgnctatnntcccgcccgactatttatttataaaagccaaaactccttataatttttaaattggtaaatatttcttaacttttaactcttcctctttttcacgaaacaaactaatacacacatttcaatgttattaaagatttatctacaaaatcattaattaattaaaaccaaaacccattttacttttacttaattaaactaaattctactattctcttttctacacataacctttaatcttttaaaatacttaataaatttaacctcattcctttataaaaaattatttctttttttttaattaacattcatccctttttttattataaatttt

SEQ ID NO: 336668 - DNA, 162 bp, Zea mays
ttttccctttgtattttggtgctactgatccgcttctcaactctgatcatgacaagggttacttctatggaatgcccatttataaatgaaggcaacttagacgacatggagatattattcacatgactttctgcgcttactatatttttcattgaaaggcgg

SEQ ID NO: 336669 - DNA, 418 bp, Zea mays
  unsure (1)..(418): unsure at all n locations
acaacagacgtncttnctcgtactccaggtctttgacatcgtctacacgaccttcaatgaacagcggggcgagcccggaccatagccaccaccgatggctagcatcgacctgaaactgataacgctgttcaccgaggtcgacagacgcgaccagatcagccagaacagaagtgcgctctatcagcctggctttacggcgccatcgtggagaggctgcacagatggatgaagcatgaccacaaccctacgcgagacgtagtggcggcttacgatatccgtgcgttccctcgccgacatgtccatgcgacgaatgatgtgcacggtgatcatacctgtggctcaactaaacagagggctccggactaccatgcaatagactggagcgcattctctaatagtacttccgactgtgtttaca

SEQ ID NO: 336670 - DNA, 354 bp, Zea mays
  unsure (1)..(354): unsure at all n locations
cgcgtgcggaaacactanaaatttttcctccanttttattttcacggacgcacctacttcnnagagcagccggcgattcttatacacatgccatctcccaaaaaaantattccaaaatccagaatgactaccattcttttagccacttaactgaatctttcccacattcaaccctccaatctttaaatcttattatactcattgaatgtacaaaaagcaatgaattgacatgtaaaatattcttcaatacccactttctgtcttatattaaaaacaacccaaacccatattagcaacctatatctattattttaaagacactttcagccattgatgaaaaaaatcttattcccc

SEQ ID NO: 336671 - DNA, 322 bp, Zea mays
  unsure (1)..(322): unsure at all n locations
ttgcataccattccactcttaaattataccaacctttattactcncctcgacacgctctattaaataccaactcccaacccaaaccnnatcccaaatcntcacatcncacccactccgctcggacccttcgttcaccccccatcatccatccatccatccatccagccatttgcctcaaagactttcttaaccacccccaggacaaccttcttccgtcgttcccgctcctactaaccatccttctaatccttgccctcatcatgggcctcatcacgctcatcatatacctattggttcaacccacacacccgcgcttatacc

SEQ ID NO: 336672 - DNA, 407 bp, Zea mays
  unsure (1)..(407): unsure at all n locations
gcgcaataagcntgaaccatggcggacgagtactgtcgcagcggctacggcaggtccggcgccgcggacgagtacgacagcggctacaacancaantccngcactgatgactacggccgtggcgaaggtggctacaacaagtcgggcggcgatgacgactactgccgcagcggcggcgatgggtacggcaggtccggcggcgacgactacggccgtggcaccggcggcggtggctacaacaagtccggcggcggcgatgggtatggcaggtccggcggcgacgactactgtcgtggcaccggcggcggcgggtacaacaagtgcggcaacgacggctactacagcgggtacaacagatcggacaccaccaacgacgacgaatacggtcgtggcaccggcggcgggta

SEQ ID NO: 336673 - DNA, 243 bp, Zea mays
atacatataaaccttatccaattcccaaacaaaaaaactttcaatacaaaataactattaccaaaataatcccatctacggaaaactcttcaaataacattactttctaaaaaaacaacaaatcatactctttacaccttcaccatctccccaattacatcctatttagcatactatcacccttgacattcaaaaaattcttacaaattgactcattgtttctcatacctgcatgcaatattt

SEQ ID NO: 336674 - DNA, 333 bp, Zea mays
gcttcggttctccgtagcgactgcgttgcaatcaggtcgtcgtacgtaggtaggtgttagccacatacgcatcaggaagctaacgagaagatcagatcggaggtaacggcaatggcaatggccaaggccaccatcctcgccaccttcgcggacgtggcagctctggcggcggtgcagctcgccgcggcggcggaccaccccgtgggaggcgacggctcctgggacgccagcggcaccaccggctacgacgcctggtccgccaagcagacgttcaagcagggcgacaccttgtcgttcaagttcgcgccgtcacacgacgtgactgacgtgagc

SEQ ID NO: 336675 - DNA, 135 bp, Zea mays
ctgcgcctcaagtccatggtcttcgacttagacgtcagcctgggatgacggacctgctcttggatggcgaccggatatacctcacacactcactattgagccgatgggaccagccttttttcggtgatgatcttg

SEQ ID NO: 336676 - DNA, 204 bp, Zea mays
  unsure (1)..(204): unsure at all n locations
cgtgcggacaaatgtgccacctactcaagtctattgaatgttaggaacaaggtctgattcatgtgtgctgattagtgttnagccgatggctgaaactgcacactcattcaggcctgagctgttctatggtgactaccggaatgagaccactgcaaggatactattgaagacacttgtgatcattggagtaataactgcatcgac

SEQ ID NO: 336677 - DNA, 293 bp, Zea mays
gagctagccgacgttctcctcccacttaaagcgacggccttctcgcagcgggatgcgtatgattcgctactgtacacaacacacctgcctgctatggactctactccttgctcaccgatgtaagctcatactccgatgctctcgacagctgtgctcatcgctatcaccagaaccgaaaaggtcattgccttacaagtacgacaaagctatgctactgactctacaacactgacgcctacaaaagatacggacgtgtagcgcctcttcgtgctccttctacatcaagccattgt

SEQ ID NO: 336678 - DNA, 381 bp, Zea mays
ctcgctggcgcgcctcgcgctgggcgggttcaggctccgcgccgtcccgggcggggtagcggagggtctccgctcgctctccctcagccacgccgacgtcacagacgaggcggtccgggacatcgtgtccagctgccgggcgctggagctcctcagcttgaggagctgcaacctcctcagatcggttaggatcgccggcgagacgctgcggtccctggagatcgtgcgctgcttgggcgtgcgggagctccgggtcaacgcgccctcgctcgagtcgttcgccttccacggcgacaacgtctactcgacgagcgacgacgacgaggaggacttgtcttctgccgtcgacctgggatccacgccggctctgcgggacgcgta

SEQ ID NO: 336679 - DNA, 69 bp, Zea mays
gcctgctagttcatttttgaactaaaacgcgacaaataaaaaaaatcggaggggagtatgatggatgag

SEQ ID NO: 336680 - DNA, 425 bp, Zea mays
cggacgcgtgggcttgctagcctcggcgaatttccctgcacgctccattgcgccatcgctggggccagccatggacgtgcgtccctcgagcttgtccagcgagtcgcgcccaggcacgtcaagctcctcctcgggtcgctgtcttcgagcccgacctcaagcgagctttttgcgattatgatacgcccaacgcgtgacttcgccagtctggtatgccgaatcgcgtcctcaccagaatggtactgacatcgtcgttcgccttctctgttttggtctccgtagcttcatcctcggattaaggcctagtaataactcgttgcggacacttgtgcccttgccgttgtgcctcgttctcctctcgagccttctaagcctgtagttcttaacgctgtcgccggcaccgccatgactccgccaccgaatcc

SEQ ID NO: 336681 - DNA, 316 bp, Zea mays
acgccaacaaacatcgccacaactcataaagcgttcgtacgctggcacgacagcgggcatggtagaatacgtgcttgcagcgacccgacaaaaaaaaacaaaacatgtagaagatactccatcatctgcgtttgatgaacccgcccagctaagccatctttactaataatagagccggcataaactatggtactgatgatgtgcatctgtagccggtgatgcttgggtaggggtgaaactgacgttgagcagaaacactagtgaccccccatgatgtatgagatcggagattcactggtcgacagcagaaacaata

SEQ ID NO: 336682 - DNA, 284 bp, Zea mays
acgacccaaaccctagccatctccactcgtactgacaccgtcatggcctagaggcatgggtggtttccggcaccgtatacgacgtccgggcgccatcttcgttgccaccgatgctcgacgaagaggccgatgccatcgcgaaggacgaagcctcggtggtcgagaagatgtagtccgtatggcccggggacatcagagttcctgctggtggtgcctgtgctcataggcagaagcataatccggcgcatgggctagctcattattcgcctcgtagaggagaccaa

SEQ ID NO: 336683 - DNA, 358 bp, Zea mays
gttagaatttcatgtacagtcccagtgcagcagtaaaactctccggatcgtaagtatagttgggagtaacctctacaatttctttacattcggattttgatccataacctttgtaatcaatttgactgaatcatttatccctaagatcctatgattaaacaaccttcatcgattatagaatcccaaggagcatgccaaatttgtaggcaaattttaaatcaacagtgttggcaaggaatgataatttatagttcatttgaaatactacattaaatcttattaattgcggttacaacaaactaaagccctactcctaatctttgcatgtaacaaaaactacatgtattctatgtaatat

SEQ ID NO: 336684 - DNA, 337 bp, Zea mays
gcgtccgtgttctggatgcacttcttgtccactacctttcttttcggctgacgtcaaggtcagcctgtaagccgacatttagaatccagcgagatttttccgcatttgataacgaagcagccgagggtttacagtctgcgttggatcacatggaattgcctgaaacaatcaggcggaggatccaagcatccatgcctcttcttccaccatcccggcacccttctttgcaatgtcaaccttcgcacttgtcgttggctgcattaacaccactccatagcagtacatatggtgtacgtccgcaacacagaagttgttctgtgagctgggggcccactta

SEQ ID NO: 336685 - DNA, 195 bp, Zea mays
tccttactagcctctctttctttaccaaagctttttaactattaccataatcccactcctacagaaaactttactataactaactgtatcttcccttcaaccccaaacacaacctagtcttctactcccctgcctcttcctcttccccctattcctctttctcttcctttgatctactccatctgttccatctcc

SEQ ID NO: 336686 - DNA, 417 bp, Zea mays
  unsure (1)..(417): unsure at all n locations
cagtaccatgcttcacaggatgagctgcacgctgtgagggagctccgaccgagccgggcgccgatcggtggctaccaagagcggtacgaggggtagcgggnttattattatggctgtggtgctttatatctgtatattatcttctgatgcatatgttgcaaactggtttatgctgatgtcttttttttccctccatatccattgatagttctttaataatgttgaatttttttttcatgtagtacttatataatttcattttttggatgttcaaggtcttccactttttggggtcttgcgtttgtttctttttgtttgtcatttttttcattaataagttcatcttttatctttttcattgggtttttttatcaaatgattttttttttgtttttttttatgtggattctttttttt

SEQ ID NO: 336687 - DNA, 299 bp, Zea mays
gtcccctgttactactttccttgtgaggctgttcagtgtgcattacagcagaaagtctaggtggttcctgtttgggatgtggttagccatgtggccttttttgtttgagaagattaacaagaccaggtttgttttctctggtgaaagtgtgccagcaaaagagcgtgttctgttaattgctaaccacaggaccgaggttgactggatgtacttatgggattttgcattgaggaaaggccgcttgcagtgcatcaagtatatccttaaaaaaagtttgatgaagttacctgttttaaact

SEQ ID NO: 336688 - DNA, 302 bp, Zea mays
ggtggacggacgcgtgcgcctgggcatccccaccgtgtcgtcctgctacgttccggccctgagagccgacagcggcgggtgcggcggcaagaacaggcagggccccgggcacctgcagcggctgctgttctcccacttcccccggaaggcgtacgacgtggacacgggcatcaggttcgtccagtacgccagcctcgcgtggtccgtggttgacttggtaccggccatgttcgcccatctgaatctgtagccagctgcgtagaacttctgcttctcttttcgatgagctccaaatcgggccc

SEQ ID NO: 336689 - DNA, 244 bp, Zea mays
gtacctcacatcccagtcaaacacggcacgatgtacacgattgctagaacgactgatactgcggggtgcggtcgatgcaccaggagaccacaatacgcattacggtgtatgtagaacactacgtgctaccaacaccaaaccacgttcgcgagaatgactatcacccgcgctatgacagtcctacgcggggaagacgaacggggcatcgtcggagggctggatgaacgtgagcctgttctgatgc

SEQ ID NO: 336690 - DNA, 305 bp, Zea mays
gtcgccgtcaacgaccccttcatcaccactgattacatgacctacatgttcaagtacgacgccgtgcacggccaatggaagcacagcgacatcgccctcaaggactccaagacgcttctcttcggcgagaagccggtcaccgtctttggcatcaggaaccccgaggagatcccgtggggtgaggctggtgctgagtatgtcgtggagtccaccggtgtcttcactgacaaggacaaggctgctgcacatctgaagggtggtgccaagaaggttgttatctctgccccaagcaaagatgcacccat

SEQ ID NO: 336691 - DNA, 95 bp, Zea mays
aaaaaaaaaaaaaaaaaaaaaaaaaaaaaatttaaaaaaaaaaaaaaaaaaaaaaaaagggagagaaaaaaaaaaaaaaaaaaaaaaaaaaaaag

SEQ ID NO: 336692 - DNA, 257 bp, Zea mays
gaaaaatgtgttttcagattttttttgcttaaactgcttaacttcttaacttgaaacaagaacttatttttttcaacaattctaactgttaagtgaattcaacacagttggtttcaagatgacaagtaagaaaagtaacagatctacagtcacaccacacactgctctgcatatggaatgggacaggatttcttgccctatttgtatggagcaaccccacaatgctgttttacttatatgcagttcatacaagaatg

SEQ ID NO: 336693 - DNA, 330 bp, Zea mays
atacaaaaaaagcagccgcaatggcgggcggcaccatggccctctcctgcacggccttcgccggcaaggccgtgaacgtgccgtcgtcgtccgccttcggcgaggcccgcgtgacgatgcgcaagacggcggcgaaggccaagcctgcggcggcgtccgggagcccgtggtacggccccgaccgcgtgctgtacctgggcccactgtccggcgagccaccgagctacctgacgggcgagttcccgggcgactacggctgggacaccgcggggctgtcggcggacccggagacgttcgccaagaaccgggagctggaggtgatccactccc

SEQ ID NO: 336694 - DNA, 367 bp, Zea mays
ctgcctcgagcatggcattcaggctgatggtcagatgcccggtgacaagaccattgggggaggtgatgatgctttcaacaccttcttcagtgagactggcgctgggaagcacgtcccccgtgctgtttttgttgaccttgagcccactgtcatcgatgaggtgaggactggcacctatcgccagctcttccatcctgagcagctcatcagtggcaaggaggatgcagccaacaacttcgctcgtggtcactacaccattggcaaggagattgttgacctgtgccttgaccgcatcaggaagcttgcagataattgcactggtctccagggcttcctcgtcttcaacgcttgtggtggaggaacgggc

SEQ ID NO: 336695 - DNA, 231 bp, Zea mays
gttggattgtgtataaagttgcacttatattcagctgtggtgtgcacacaagctctgtgagtggtgagtaggaagggaggaagaaagcggatccatggcgtataagcggatactgagggagctcaaggacctgcacaaggatcctgccacctgttgcataccatgccctgatgacgaagatctgtgtctactggcacgcgacgattatggagacatcagatagcccatacg

SEQ ID NO: 336696 - DNA, 288 bp, Zea mays
  unsure (1)..(288): unsure at all n locations
gacccacgcgttctctttattacaattatattttcanacctcttattccnccacaacattacatctatcacaagaaccattttcaccttattctccctcatctcatcccactctaaccaacataccacctaatccatactgatttccttctacctcatctaattcagtcccctactatacacccacacattcccaatcatatttactaccctacaattcactatacttctccccttaactcactcatcacattactcttaatacccctcactttcacatctttccacc

SEQ ID NO: 336697 - DNA, 380 bp, Zea mays
gccaggtgaagccgccgggaacgtgcccgtcggcgccgcggaagccgcgggcgcccgcggcgtgccggaagcgcctgttcgaggtcgaggtgctcagcctgcggctggaggagctggagcagctcttctggcgcccgcgccccgcgccgtcgccgcccgcccagaagaagaagcgccggagggtggcctgcccggggcccaagaagagcagctagatagctaggactagtagcttcgtgtactgtacgtgccagtagtggagatcgagtagcagcggtagctaggtgcagggccaagtggtcttggctggatgagatgagaggacgtgcatcacgtcatgcatggtataaggggtggtaggagtactgcgttttttactg

SEQ ID NO: 336698 - DNA, 323 bp, Zea mays
  unsure (1)..(323): unsure at all n locations
cgccatcccggcgctgcccacggtcgccactcgcccaggacctcatcgccaaggccaactgcatcatggccgcacgcccgccgttccaccacgtcactgtcccccgccgccccgcccctcgtcgtcgacgtcctcggtttcggttcattaggtagatcgagtcttagcgtccgtctctgcgcctctacgctgagacggtttgtttgggttaattaagttagctttcgtggagatttcgccccggggcatcaataaaatgttggcatgcgtggtgggatgcccannanaaaaaaaataaaaataaaaaatttaaaaaannnngg

SEQ ID NO: 336699 - DNA, 240 bp, Zea mays
gacccacgcgtcctacctacctcccttctcccttatccatctatttttaatactctccactcatccccttcccggagcactcttactaagtgcttcatctctcccacctacaagctaacacattccaaatccacctcatctacattctcccttcccatcttgtacctcttcctctgccttacaaggttctcactctatcctctatcctcattacatctcttctccaatctaaccactctt

SEQ ID NO: 336700 - DNA, 317 bp, Zea mays
caactcttttctattgactttacactatgtgtttcatgataacttacttatcatgtgtcgtacatacatatactgagttttatattaacttatatatatcatgtttctgtatattttaaggtcctgcaatctaatttgacatcgcacatcgcgcgctggacgcgcgacatacactagtaatacaatccatattcctttgttttcaattttatgaccttatcactaggtgcataatattcatacaagccaccttgcagttttttgcgtggttaataatgcaccttttaactcaattaattttgggccgacagaaaatt

SEQ ID NO: 336701 - DNA, 343 bp, Zea mays
  unsure (1)..(343): unsure at all n locations
catccatccccgccccgcccgcagaaccaaaccagcctccctagtccctccctccccagcggctcacgactcacgagagagcgcaagtattactgcgcaccgcctcgcccgcgggcgtcagcgtgaagctgccgcacagctaccccgcgaggcatggggatggacgccggcggcgggaagctgccgtacagctaccccgcccaccaggacggcaagctggtgaagagcttcagccgcgtggagccccgcaagttcggcctcggcctcgtcgcgggcttcctgctcgtcacctgcgcctacttctncaccgncaagttcgacgccatccacgtcggcatgatca

SEQ ID NO: 336702 - DNA, 415 bp, Zea mays
cttcctcccttctcacttttccttccatttattaatatactccactcaaccccgtcccgcgagattcttttttatttcttcatcttcccctcctacattctccctcattccaaatccaccttatctactttctccctgcccatctttcacctctccctcttccgttacttttttcttctctccatcctctaatccttcaattacatcttcttcttccacgtacttaaccactacttctccctttattctattcattacatttattacttattccattatttctttcttcttccttcgtattacatgtctcttccttactcttattacacttttatatcaaccctaatctacttcttctccattttcaacacgtacgccttatatttctatccctacttccttccccttccttttt

SEQ ID NO: 336703 - DNA, 446 bp, Zea mays
  unsure (1)..(446): unsure at all n locations
cgagggtgggaggtgccgccgtcccgtcccggtgtcgcatctgcatcgtcccgtgtcgggcggtggacgtcgggtgcaggtcgatgcgatcatctatgctataaaagaacctnctccgccgcactgtcgatctgggtccgctgtgcatagcataagtcgcaagggccgactctgggggttggaggggccggccatggntgaaatgatgcaggtcgtggcctcggcggcaggcctgctaccaggtgagcggtcatggctctgcctcaacagtggtggcggcggtcatcggtggtcgctcgtcaagggtggccatggacggcggcatgataaccgctcgtggatcgtcatccctgcatgcagctcatccgccgttcgtcgttcctcgcgcccaatcgcattcttcaagggagaggaagtcgagggcccaaagctgacgcttggagatc

SEQ ID NO: 336704 - DNA, 253 bp, Zea mays
cgacccacgagtacaaactactaccgcaagttcttttacaagctcttctatggacagttcacactggcccatgtggatgagttaatggacgaggctcttaccattgattactcatgtgattcagccatgcctttcttacagcaaagataccttcttgaagcgtctgaaactctgttaccgacaagaacttcactctacgacgattatgactaataagaacaagacaaggaggaactttctacggaaattgatg

SEQ ID NO: 336705 - DNA, 208 bp, Zea mays
ccaaaaccctcctgaagcttctatacatcccactatttttacggatccgagctatctagttcaccacccatgcatcaagtacaatacgtgtgcactccacatccgatacgctatagcgcccactaccactgctagccgcaaaaaaagagaagcagcaccttaggacgtgcagatgcataacctatgatagataaggacttgatctccc

SEQ ID NO: 336706 - DNA, 380 bp, Zea mays
  unsure (1)..(380): unsure at all n locations
tcgaggcaggtcgatacccgtacctgagaggagtttatagctgnatgaaagaatgggcggggcgtctacggagaagcatgtctggagtacgtatctccatagaagtctgtccgcagtacccccaaggtagtgtgttctccatgtctggtccgtgcctcatccgcgtgggtctccagtcgcgtcctgggtacgtccgggttgtggcatccgtgccaggtccgtcatctagcatggtcggagcatctacgagagcgtggtggctgactgacgtgagcgaggggcatgcttcggcacgccatccgcgcactccgaaggttgcggtatcctccacatccccggagcaccttctcggaggacgaagctggttgtcgctggtcggc

SEQ ID NO: 336707 - DNA, 293 bp, Zea mays
ttgacctattaacaattgtttttacattctgcaatctcattaccaacagggcgcttggggcaatttctaacatctgtaagatgcttgaatgtttgtggttggaatcatgctctttgctaaatgagaaggaactagcgtgaattacaactctttgccgcaacctttagtagatcgacctcactgtctggggaattgatcacgcaccgctctattactttgctacattatatcaactgcgaatattgaaattaggcctatgctcacttatttctgacatacgcattgcatttatc

SEQ ID NO: 336708 - DNA, 390 bp, Zea mays
  unsure (1)..(390): unsure at all n locations
ncgctcgcgtctctccgccggtttttcatccacttccgacaacaactacttgccccgggcttctcgcggatccaccgtgtgtgcttggcgctctatctttccactgtcgctgtacgatgttagcccaatggctctgctcgccagttgtacgtgggacaagtcgctgtccctctgttccatgatcgcacttggagctacatgtgccatcccggtgttccggaccctcgtggaccgcatcgattggggagcggcggctttctccgtggcggtctactgctatgtcgtgcttatctagcacctgctttcaatgctggagaacgcggtcccatcgccggagttcctctactagttcttctactactacacatgatgcttaagcgctgctcatca

SEQ ID NO: 336709 - DNA, 349 bp, Zea mays
caaaggatggtttaaaagagggggtgtaacggtctgtgctgcttacctcgacctgccgatgcgaggactgcacataatttatgatctaaaaaaagcatcaacgccttgccgatcacctgaacaagcagcattatgggaaataaaaaagagctgagatcctggtctcccctctaccctgttcgacgttcaagaaccgaaccagcgatggatacctaccttgttgcatactggcaccaggtcctgaaagaccttcattctctggctgatcctcttccttctcacctgttacaatacacgagaccgttcaacgagacacctccaaagagtttgactggctgggtgggtagga

SEQ ID NO: 336710 - DNA, 357 bp, Zea mays
cggagctctacgacatcgccttcctactctttggcggcccgactaggcagacctacattggggaaagcatcgtgatgctcggcggttatgtcgaccgctagcatccgatgtacctcttattcgaccttaccaaagtttaccgctcctactacgaactctgtaacctatacatgagcgcacctgcactcgacttatattcataggagtacgttggcgtgcctcacacatgatgacttgttatcagacaagcattgcaacattacgatgctacattctctttggatcctgacatgaaccacactagactaaatcaaatttaccgcagtctaagctcaatgttatgtttacctgttacca

SEQ ID NO: 336711 - DNA, 354 bp, Zea mays
ccaaaacgttcgcccgcttgagacactcactcgtttcaccacacgtaagccgtcccacatcagccgtgcaccttcacgcctgcgcacgcctcaccctccttatcgaccgccgctccctgtccttctgcccccgtatccggcgggtgcacacacttatacgcagctaggctccctacctgagctctccatttatccccccagcagcgcccccaattccttccacatcaccaagcccgtcgcggaaagctactactaccatttgctctgctgtatcaagaacaccagccagacgctcatcacaatgatctactatgggcttgcaaagaagctccatccagacacaaataaaggtta

SEQ ID NO: 336712 - DNA, 439 bp, Zea mays
  unsure (1)..(439): unsure at all n locations
gcaggatgaacctttctacattgaaagaaggaacaccaacatttctactggttttggaggaacaaaaggatccaagagagtggtagcacctaatgtagaagaccaagttggtagagtaactaggcagaagacaaaggaactatccttagttgagaaagatatacatggttcgactgcaaatacagatgagcacacattgatttctgccaattttcctgcacaccatgatgacgagattcagatgtgtgatgaaggtcaaatagatgtcaacaacaacaacaacaacaacaacaaagcctttttgtcccaagcacgttggggtaggctagagatgaaaccccgtatgaaaacctcagagctcaacccccanagaacagaaaaggggaaacaaaggcaaggagaaccgaaaacacgaacgggngaacacataaagagataa

SEQ ID NO: 336713 - DNA, 356 bp, Zea mays
  unsure (1)..(356): unsure at all n locations
cacactacctcttccgaagcgagaatcacgtggaaacagtcgcggcaagtgctgccgagcggcnctgacaaacactgctagtcatataccgatctcgactcaatgtattttgctgaattcccaaaagcaactttacctgcatcttctaacacatcattgaccacagatattggtgcctatgctgcgggctcttaaacgctttctcgtgcgttctcaaatcgaacttactgctacgagaattcaactgctactcggagctcttaatgttatatcagatacaaagactgcaacatcttatatctgcaccatctgctcaacaaacacaccagatttgccacatgaaaagaagcaattta

SEQ ID NO: 336714 - DNA, 219 bp, Zea mays
accaaacaccttaatacctgttctatttcaactatttcttgcccaaccacaacaataaacacttctactacatatcaaattcacacaactacccttttcctctaatcaaaactcccatcacacacttaacaaaacgcacattatccttctataccatctttttgactacacaatttcctttccaaattcccacttccttctttaaaaactccccaaaca

SEQ ID NO: 336715 - DNA, 201 bp, Zea mays
gccgtggcctgcgccggcgatattttccgtggccgggaccgggagcaggggacaaggcggggcaaactgcgcaagggacctgcatgctgtacgtgcacgccgggaccaaccctttcgaccaccataattaaggcggtcaaggtggtggaaaggcacatgcaaactttccataacaggaagaaaaaaaagctgccgtcgttc

SEQ ID NO: 336716 - DNA, 399 bp, Zea mays
aaacgggcgaaaggatccagcagcaccctttgcgcgcggcggttaactcgtcgcacatctcggggcggcgcggcgcctccctcccggccctgccggcgagagcgcggtccgatgaggcggcggccgttcctggaccagcgacggccgtcgttcaagcgccggtggcagcagcggccgtggtgggtgcgcctcttgctctccctcctcctcgccctcgcatgcgtcctcctcctcgctgtcctcctcggctcccccgaccccgacacctcgccgtccaccttcgccgcgttctccagatccgaggccacctcctcccctcttctcagtcagagaacttacttggagggaatcacggatgcgctcaacatgactgacgaaatgctgagcgcaggctcgttc

SEQ ID NO: 336717 - DNA, 124 bp, Zea mays
cggacgcgtgggcgccgacgacccggacaccgccgccgacctcaaggtgaaggacctcaggaacggccgccttgccatgttctccatgttcggcttcttcgtgcaggccatcgtcaccggcaag

SEQ ID NO: 336718 - DNA, 439 bp, Zea mays
ctggcatccctccatggtcggatccccctgcgatggacgccgcgcaggaagccaacgacgcggtccccacgctctccttcctcctcctaccgtacagcacctcgacactccttccatggcgcccagcaggccaagctcctccaacggcgtcctcccctccgctgctcgacacccacagctcctttctcccatggcgcagcagcaaacctccatggccgcccatctgttgcataccagcgcccctgcccctatctccaacccctcctcgctgttctccgtggagcatgccggctattcgacgaaatgtccagctgctgtcgcagggccccctgcctttcccctcgcgactgtagcctcgacgtcgtcgtcgaaccttccttgctgcgccttgcaccgtcgacattccttgggcgttcgataaaatgcctaaccgagcagc

SEQ ID NO: 336719 - DNA, 113 bp, Zea mays
aaaaaaaaaaaaaaaaaaaaaaaaaaaaaattaaaaaaaaaaaaaaaaaaaaaaaaaaaaagaaaaaaaaaaaaaaaaaaaaaaaaaaaaaaaaaaaaaaaaaaaaaaaaaag

SEQ ID NO: 336720 - DNA, 201 bp, Zea mays
aacaaacttgccattctcgccagcccattatttttgccaggacactacaaacaaagatggtgccttatctgatacacgccggaactctggctgttatcaccatcctcgtggctctcgccgaaggcaacacacactagccctgctgtaacaactgcggtgcttgcaacaagaagcagccttcggagtgccagcgcaacgaca

SEQ ID NO: 336721 - DNA, 403 bp, Zea mays
tcagtctcccagcatttaccggctcctccgcacctgctgctccagttccagctctcccaacaccaacatgctcggcctccggcgcctccccgctgtctccggccgcctcgcgccggaggtcacctccgtctctgcggcctcctcccacagcgccgtcttctttcgcaccctccaaatcctcgtccagcaggggcccgtccgcctccaaaagctctctgctccggacaccggtctgtctgtaccgaccccatctcaacgaaattttgcatttgcttgtaggcccagggattgtgtttcccagctgtgattcgttggttacagggatcgtggagctgaggctggagcggccggaggccaagaacgccatagggaaggagatgctccaggggctgcggagcgcgat

SEQ ID NO: 336722 - DNA, 72 bp, Zea mays
ctctccatcatccagtgctctctctttgcgattcgctcgtcgacctagcttccttgcagaacgcacgccatg

SEQ ID NO: 336723 - DNA, 75 bp, Zea mays
cgggtccgacccacgccgtccgagatgatgtaatggtcacgggcgcccggcgggttctccggcgtatggcgttac

SEQ ID NO: 336724 - DNA, 467 bp, Zea mays
  unsure (1)..(467): unsure at all n locations
ggaaaaaccgggtcgacggacgcgtgcgcctggtccaatcagggagagagctcaaacatggcactcgaacccgtcgctctcctgctcagcngcctcgtcgccgcgccgctcacggtcctcctcctcctcctcttcctcgtcgccggcaacaagaggcccgctcgtgctgcttctcccacgccgcgccactgcttgaggctgccgctgccgccgtcgccgcggggcctcccgctgctgggccacctgcacctgctgggctcgctgccgcaccgcgcgctggcgtctctggcgcgcgcgcacggccccgtgctgctgctccgcctgggccgcgtgcccaccgtggtcgtgtcctccgctgccgccgccgaggaggtgatgcgggcgcgggacctggcgttcgcgaaccggcccgcgagcgccatggccgagcgccttctctacggccgcgacgtcgcgttcgcgcccta

SEQ ID NO: 336725 - DNA, 281 bp, Zea mays
  unsure (1)..(281): unsure at all n locations
tctatatctcaacgccctcctttttttttttcttccttcaccttatctaacacggggctttaaaaaagaaccaaatctctttctcaaaacacttatcctttatttttaccaacccaatttcattttttttatcataacacacattagccatattttttttttttttatccatcacgnaaacccccaaaatcatctatttgtatcctattcattcaaactcccctttttaaagacgcttcttaccctactcttttatttttaacaaatctctatacctttat

SEQ ID NO: 336726 - DNA, 156 bp, Zea mays
accctaacaaaactttgtctgcactttacttatctttcaccgagaaacgtaactaagaatactatagtttttatctctttttctcaacctttaaaagccaacttttaaacatttcttttttaaaccattttataatttccagaccaaaaaacatta

SEQ ID NO: 336727 - DNA, 200 bp, Zea mays
cttgatatcaaaaaatctataccaacaacacaattcaactggtggaacaaactttaaccaaccgtatttaatcatcctaaattaatttcatagccctaaacatctaattatactgaacaaaaaagattttgaatatatctcatatgtttccaacttcaaaactccattaattacttataaattcactacacaaccaaatt

SEQ ID NO: 336728 - DNA, 259 bp, Zea mays
cgttctcgagtgctataaacaaatatatttttcctttattgacccacacccataacactgggagccggcggtacataaaccatacaagatgtcgaccacccagcctgctgacgagatgctcatggtctacttaatcagtccatacatccaccgctccgacgttgtccttctcctcaaaagcataccctacgagcttatcctttatgaccttaccaacaacatctatctacttcttacacacaaccccatacacaaactc

SEQ ID NO: 336729 - DNA, 213 bp, Zea mays
  unsure (1)..(213): unsure at all n locations
cggacgggggaccaggancagaagcggaaaagagatgctgcgcagagcgctgaccctccgaggggggaggcgaagacagggagggatatgaagaatgggccctccaccaggcaggagagagcaccgaggggaaccaaacgacggtctgagacgagagaggcatggcggccacgggcattcgggcagcacaaggagcggggaaatgcgggggaa

SEQ ID NO: 336730 - DNA, 326 bp, Zea mays
  unsure (1)..(326): unsure at all n locations
gcagagcagaccagaggaagcgngcgngaaagccgcccanggcggccaccggggaggggacagccaccaggcgcgcgcgcgccggccccaccccacaccggcacgccacccccgccgcacccgcgcgccgcgcccagccggccagcggaccgccgacccggcaacagggagccgccgaggcacgcaaggccgagcgccagcagagccagagaccggccccaacaggaggaggaggaggaggaggaggacgcccgaaccggcgaggagaccggcgacaaagccgggcccccccgggacccccacgccgagggcgccaggacacccaa

SEQ ID NO: 336731 - DNA, 154 bp, Zea mays
tcctctagtcccaactcaccggattttttctctcctccaccgccccttcctcacgaggttcttctactactcctcgggacacacacccaatcaccaagcgaccaaacgcgcgccaccttgattgaactctaagcaagcaaggaaaggccctaat

SEQ ID NO: 336732 - DNA, 286 bp, Zea mays
  unsure (1)..(286): unsure at all n locations
gaaancccggcgcgagccacgcatccgttctaccttctccttacaagcctgttttccaccacctcctttaaccctatcggggcgctctttcataccgacattccctatcactatccacattctacgtaaaaaaaccatctttccaccttctcccaccccctccggacccatatatgccaccgtcatttgtcttgctattgcttgacccacatctgcatgcattcggcatttctcgtgcgtacatctctcgtgtaccgtttacctcttttccctcaccccgttcatc

SEQ ID NO: 336733 - DNA, 454 bp, Zea mays
  unsure (1)..(454): unsure at all n locations
ntccgcggacgccgtgggtcggacgccgtgggccggacgccgtgtggcggacgcccgttgggtgggaccggtggcctgtgcacatttcaaaagatggagaatcacatttaactttctcttcagcacgaatgaggaacccctgcaatgtnggatgcatcggagctacgttcatcgagggatgcccccaccttgcagccagtaccactgtatgtgctatcaaagggccagagtcattcaggccggccccttcggcagggcccaactacccttcacacatttggcttctgcgccttgggcacgtcacaagcccaggcccttgggccctgaacaaaccgaaaccctagcgatagtaaccctaagtggcgctgctcaaggctaaccaaatgtnggccctactcgatcccatccnccttgtcgacttctgtggaggggcggtccttgtgtgtgtgcaacg

SEQ ID NO: 336734 - DNA, 154 bp, Zea mays
  unsure (1)..(154): unsure at all n locations
ccggaaaaaaanncccgacgcaacccacccctnccncnntaactcactccaagcccgctttctctttccccccctccctcactcactcacgccctccttttaaatacttttcgacctccacacccaaattccaaaccctaacacccccaccata

SEQ ID NO: 336735 - DNA, 201 bp, Zea mays
gtggtttcggcggaggcgcccgttgtgttttcggaggaggcaaacgtcgtgcttttgccggtttcaaaggaggtggtttcctctcatgttctctttgtggctttgtaggacgcaatcttgttcgttttttttctttttttcttcctcgtctttttttattatcttctattcttccttttctttctttttctattttttctt

SEQ ID NO: 336736 - DNA, 415 bp, Zea mays
gcaagaaccaaagtggaatgaaaagatgaatcaattagcttgttgcaagaaacagaaggtaacttaaatggtgatgcaactccaaagggtgatgcacctacaagacccattggcaggaagaaggctaagcaactattacgccgaggtggtgctgatggttacattgaggcattggacaatttgtgggagaaaaagaaacaagctgatgtagacaaagaactgaagaagaaagattcaacgaatcactagaaattgagaaggagagacttgagatagagcgcacaaggattgcaaatgaacaaaaatgtatgcatatgaagagaatgctagagcctagaggaagaataatgaaagtgggcattagcggaatggatgcagatcagcagtcgtactacagaagcctacgaagtgagat

SEQ ID NO: 336737 - DNA, 317 bp, Zea mays
cggccgaatcggcgacgccacgcgtcgatgggattactgatatctggcttgggcagggtgctgcacttgtggcagaactacatttgtgtgccttgggcttgtggctctgatctatctttagagctatatgaactgactattattcaacaggaggcatataacttactttataatgaataatctggcattggattacctatgctgatatttgccacatggggttgtttggtttttatggattggctgtgcagactattggtggggaccacggctactaactataactcaagcaacgacattgctgggtgtgatcttgt

SEQ ID NO: 336738 - DNA, 356 bp, Zea mays
  unsure (1)..(356): unsure at all n locations
gttgtaggggtgtgttccttgcccaggtctttgtgagcctgtcgtgagcggngaaggtgggccctccctgttcaaacctgtactttntactgctttctctcttaattgattggtagagctcatgccttttcgttcaaaaaaaacatacatgacaatttattgtgacaacagagggtaacatctacaaggaacaaggtgaggataactgacaggatgtgtgcgaggctgctgtcttcaacaaaccaaccgagtttcctgagccagaaagacatctacgcggccagagaagccgacaaggcggtcaaccgcacgaagagcatagaggatgctaagaaacaatctacaccagtgttggc

SEQ ID NO: 336739 - DNA, 418 bp, Zea mays
ccaaatcctcagctccggtgttctctccaatctccatccatccatcctcctcgcggggcgcgccccgaaaaatggcgccaacccctccggatggaaagtgatgttgatggcactaccctggcttgtattgcattttcctgcccaagtttaagaactctcgagattaccatggctgctgatgctgtcaacaggatgactggggaggatctaagtcgttttgtttcggagaagtcttctctctcagccctcaaaattggtggttgctctaatttggatattcttaatctgtgctcttcaagcctttcaattctttggttgtcagatctttgttccctttcgaaatcggttatgaactgtcctaatatgagcgagctatcactgtgcttcacagaacatagtaatgattgtaccaatctga

SEQ ID NO: 336740 - DNA, 239 bp, Zea mays
atcgtgctctgcgccttcctcgtcttcctgttgggcaccccgacgtaccgcctttagacacccacgccggaagcggagtcccccttccgccgcctggcacgcggcctggccgccaacgccaacaaaacaggaggcctctccgcctcgcattcggaggaggaggaagcggcagcagacgcgcggtgcgtgctgcacctgctgcccatctgggcggagagcctcgcgtacggcgtgtttta

SEQ ID NO: 336741 - DNA, 141 bp, Zea mays
attcccgggggacgccacgctcgcccgaatgtccaagctctccgtgctggctctacgcgctttggggctggggcacgcgcagtcccatatgaaccagcccggccgcacataaccgtgcgtccggccgcgggccatcactca

SEQ ID NO: 336742 - DNA, 221 bp, Zea mays
cgtattgacagactaaacccttgcgtgcagccaagctgaaaggagaacagtactgaacatattggaagccatctgaccgtatgcaggcagaggaaaataactcacattttgatatagatcaatgatcgggatggccaagcctgtgtgcacaagtacgagctgttggagcttctaccaagctaatgtatgcattgctgcatgagatgcgcacctattcttga

SEQ ID NO: 336743 - DNA, 401 bp, Zea mays
  unsure (1)..(401): unsure at all n locations
cggacgcgtgggctccaagaggtggtgctcttgcagctcacccggttccggtgtggcgccgtcgccatcgggttcacgtccaaccacgtcgcggccgacggccacgccaccagcaacttcctcgtggcctggggacgcgccaccaggggccttcccacgggcctgccgccttccgtgtactaccagccggggcagttcaagccgcgcccctcacccggacccggccgcgtcgtcgacgacgactttgaccaccgcagcagggagtactaccacctgccgtcgcctgctgctgacaacaaccacggctacggctacggcgacgaggacgtgatcgacagcatcgtcatccacaaggcgcacttcaccaaggaattcatcgcggngctccgctccagggcgtc

SEQ ID NO: 336744 - DNA, 260 bp, Zea mays
atttttacaaatattttttatctcatcatccctccttcttccagcccggcttttatacataaaaaagccctccttcctttatttaattaaccatccatccctacttactcaccctaatttctttctcaatcttccctactcactatcaatatccttacctctccatcccccaaaatttacctaatttctacataacttcaaattttctttcattaaccaatcaatacttctcatatatccattcccttaatctttttttc

SEQ ID NO: 336745 - DNA, 227 bp, Zea mays
cgcgtgcgcccaacgcccgcagttctcgtcattcatccatcgccggaaaactaacccctaagacgtctgtatccccgaggaggacaacaaaccctcgagggcggcgcccacatcaaccttaagtaaaggacagatggcaagaggtgtctttcgataaagaggtcacccactgaaaagctgataaccttattgtgaccccagtctgggacatgaatgccattgccgtt

SEQ ID NO: 336746 - DNA, 150 bp, Zea mays
cacaaaatttgtaccgttggtttttcttcgcgtctcctatggacatcactcgagagcctattaaatgaagagcatcaccctttctacttacatttccttaacctctatttccttcttctacatctactcctccgtccaaacccaatcttc

SEQ ID NO: 336747 - DNA, 76 bp, Zea mays
tcgcctcgcggtcgatcggcaaggacgttaccgatttgaattgaaacataccattggtgtacgtggacaaggagac

SEQ ID NO: 336748 - DNA, 168 bp, Zea mays
ttcaattcctcgatcctactccaagcattataataccttcagaacttcctgtgcatgatgctgggaactcatactcggccccagatgctgctatacacttctgtacatacaagcatgtatgtcttaagggcaacacgaaaagtttccgaacttgctgaacctgcttat

SEQ ID NO: 336749 - DNA, 131 bp, Zea mays
gagacgggcaggggagaggaaaaaaaaatctaaccctagcatccgcagcgctagggttcgggggttgcgatggcggcggcggcgagacagcgggggacggtgaagtgggtaacgacaccaaggcttgggtc

SEQ ID NO: 336750 - DNA, 145 bp, Zea mays
cgccgagctgatcgcggccgaggagctggaggctgacgccaacatccaccccgacgacggggactcgccaagcaatttacacgatacctcctaaattaaaaagtgaatattcaagatgaattggttgcttattatgagcttactt

SEQ ID NO: 336751 - DNA, 243 bp, Zea mays
cgaccgcaacgcccctcatctcccttgaccccgacatccccgacccgatggtgcccaaggcggagaagaagccagcggagaagaagccggcggccgaggagaaggcggagaagacgaccgcagggaagaagcccaaggccgagaagcggctgcccgcgtccaagaccttcggcaaggagggcggcgagaagaaggggaagaagaaggcctagaagagcgttgagacctacaagggctacattc

SEQ ID NO: 336752 - DNA, 83 bp, Zea mays
ccaaaaactacgactcctcctgtccctctccgcgtccaagggtggcagtcatccgcattcaccggaccccaccgggaatggcg

SEQ ID NO: 336753 - DNA, 249 bp, Zea mays
gtacacaatgggcttatatgggaaatatgtttgatcggttgtttacgaccttctacgtggggccggaaagctttcctgggctttgggtcctgaattaatgggctggggcatcgtatagtgtgacgggaagcgttgatgggacggatgaggattcatgtaataattgttctcaaaagactgatgcgcggactgtgcggatactgacccggaccgcccggggttatatgcggaccgaccgtctgtggatgc

SEQ ID NO: 336754 - DNA, 399 bp, Zea mays
  unsure (1)..(399): unsure at all n locations
cggacgcgtgggatcgtgctgtacagtatactgctgttggttgatccgttggtgccccggtgcacgctgttgcactgaactgtacaatgtactttgctcatttgttggtttgtctggagagtttttagtcttttagatattcttggtctgcatggagcaggacttggtggtatattgttgcattcgttgtggacggtacgaataagaattcgggcttgcctcggagtctagtccattttgcatgctcgcctgcagcagtgcagctgtcgatgtactctatgactgtatatggaaatggaatgttctctgtttcctttcacatggntgcagccttgcctgagtctagttgattcatgtgattgaggtgtttggttgggccccaagcagcttgcctggtgc

SEQ ID NO: 336755 - DNA, 244 bp, Zea mays
cccacgcgtccgtgccctgcctgtgcgctgacgacgacgaactgaataatcaagtactcgctggtggctccatgggcggtgcgcagcacgtacaggttcgtgaggagcgggagcggggagcggaacctgctctccttcgccaggctgccggagctccttcttcggcttctgtacaaacagttctggatcaccgagtgctgccaccagacggtccggagcatgcacaggatcggtaacaagagcc

SEQ ID NO: 336756 - DNA, 86 bp, Zea mays
ctggcttctcctccccctcttaccaagtcctcctcgggttagggttccttagggttttgtggaggggcgatggcggcggctgatgt

SEQ ID NO: 336757 - DNA, 93 bp, Zea mays
cttattttgccttttcatctctccttgtggcacaatactatggcccacctttgaacctatggcgccaacactcttagctaataactcaactaa

SEQ ID NO: 336758 - DNA, 245 bp, Zea mays
  unsure (1)..(245): unsure at all n locations
ccacgcgcccgnggacgacggggggctagagcaaaacccnggcaaagaggagcggcgacagaaaaaccaattgagtgtcagtgcaagtaagatgtaggggcaaaacagaggagaataccttgccgcgcaaggcgatagatacacaaaaacaaaaaagagcacctacaccgggtgggagccggggaagaattaaagagagggagatcccaaatgaggggcttgaactcgggaacaagaacgacaag

SEQ ID NO: 336759 - DNA, 318 bp, Zea mays
attttacaatgctcggataaacaaatggctacgagctccagatatgctgcaaaaacggcacttctttggttcttgtgtcataaacaactgcctttatgttgctggtggagagtgtgtagggatacagagaattctaagatccgctgaggtatatgatccgaacaggaatagatggtctagcattgctgaaatgagcacaggaatggtgccctctattggagtagtacatgatggcaagtgtgatctaaaagggctaaattctcattgccaggtcgtgagtgaggtctatcttccagcatccaaaaagggggaggcacc

SEQ ID NO: 336760 - DNA, 120 bp, Zea mays
caaaattgtatgataaagatttagaactttatagttaaaacgctcttattatatgtatatagcggccatgcatgagcaacaatcaggtatagcaattccaaaaaaaatgtttattatatg

SEQ ID NO: 336761 - DNA, 289 bp, Zea mays
ttttatttaagtacaaaataggcatctaaatatttacaccaaagagaacttgaacctagattgtctaggcacgcattcacgcctcgaccaactgagctagttcggctttctaattttagctgtttgttccaatctgcctaaagatgtatgaagttaggtttttgctgatgcctgcaccctgcaggtttgtgcaaatactccatatacagaagagggggtctctttctttgaaatttgacgtttgctacctctggtatcttctgttcataacaaacttcttttcattcct

SEQ ID NO: 336762 - DNA, 99 bp, Zea mays
cggacgcgtgggaaaaaaaaaaaaaatatattttttaataaaaaaaaaaacaaaaccttttttggcaaataaacaaaaaaaaaaatagggaaacttttg

SEQ ID NO: 336763 - DNA, 74 bp, Zea mays
ctcagctcgccgcacccggagaaggagcagctcggcgcggtcagcacggagtacactttaccggacagcggtta

SEQ ID NO: 336764 - DNA, 233 bp, Zea mays
  unsure (1)..(233): unsure at all n locations
gacccacgcgnccgngcaggcatcaacataggaagggacggaaaaaaatgcttcgcggacgcgagcgaacggcagggcctgatcaaggagaggagcaaggcggccgggaacaagaagaacgccgccgcaatcaccaagaactgcgaggagctggccaagaacggggaggagatcgaaggaggactaggccacacagggacactgccagacagacaggaaattaagaaaaacac

SEQ ID NO: 336765 - DNA, 105 bp, Zea mays
gccgaacatttcatctgcagggaaaacaattttttctcatgaaggcaggaagaaggataaaactttacaaaagggaagggcgggttaggcatgatgaagacattt

SEQ ID NO: 336766 - DNA, 137 bp, Zea mays
ctttttctctgcagggtgctgccagtaaaattaagatctacatggcgcttggagtagggaacggcggcgagctgttcgacaagatcgttatcaaggggaaactgctcgaacacgagggcaggaggctcttacagcac

SEQ ID NO: 336767 - DNA, 137 bp, Zea mays
  unsure (1)..(137): unsure at all n locations
catggggcggcaagaaaccgcnagcnctactggcgcagaggagcngaaccancangagggggggcagaacggagcggcgagggggaaggaaccgggagcagaagacaggncggggcaggaagaggggcaagaagaca

SEQ ID NO: 336768 - DNA, 156 bp, Zea mays
ccacgcgtccggtatgggaagacattgcaagaactgcaagttttatttgaacgaaagcagacccttgcattgacattctggcaagaaccagatacaagatggagatttgcagtcccatggcgcttttatagaagatttgtgtttagattataactc

SEQ ID NO: 336769 - DNA, 180 bp, Zea mays
gcggcgccgacgccgcgcagtgggtcgagctgctgcacctgctggccgcgcggcccgagggcccgccgcacctccgccttaccgccgtgcacgagcaccgggacgtgctgacgcagacggccgtggcgctgaccaaggaggcggagcggctggacgtgccgttccagttcaaccccgtgg

SEQ ID NO: 336770 - DNA, 112 bp, Zea mays
tgtacagcgcagttttatgctccaatgcaatcatgcatgtttggacaacagttgataccttcctcagagaaaacttggaatggtttgggaggtgaaccaactgggctaagtt

SEQ ID NO: 336771 - DNA, 165 bp, Zea mays
ccagaacgaggaggcgtacgctggaactggctgcgggaggatacggcgctcactatggtggtggccccgccgtcggtcacaagcaaggctacaggcagggcatatacgagagcgagagcgagagcgaaagtcagagcgactagagcgactgtgaggaggcgtttc

SEQ ID NO: 336772 - DNA, 112 bp, Zea mays
ggaaggaaaggggggggggggggaggggaagggggaagggaggggggaaaagaggcggggagggaaaagggggaggaggaaggggagaagagaagaggggggggggagagaa

SEQ ID NO: 336773 - DNA, 399 bp, Zea mays
cggacgcgtgggcgctgggccaccagctttgaccgccgcctcccttcccctccgctactgctcctcctcaccccactcccccgcaggagcggcggcggcggcggcgaggtcgtaccccacatcggcgagcggcggcggcaccgccggaggcaaaggcaagatgttcgggcgcgcgccgaagaagagcgacaacaccaagtactacgagatcctcggggtgcccaagtcggcgtcccaggacgatctcaagaaggcctaccgcaaggctgctatcaagaaccaccccgacaagggcggtgaccccgagaagttcaaggagctcgcacaagcctatgaggttttgggtgatccagagaaacgtgagatttatgatcagtatggtgaagatgcccttaaaga

SEQ ID NO: 336774 - DNA, 221 bp, Zea mays
caagggggggcaccacatttggcgatcaattgtgacacacaagaagatggtgacaccaatgaatgtgaagtttcaccggtcagtccaaatgacaagagaccgccaagggttaatcaaaataaaggccttatcagatgacgctggctggatggaggagaagccaagccaccaggtgctgatgaatgatgatatgcctgcgtgcctgcctgcacaacgcgacg

SEQ ID NO: 336775 - DNA, 154 bp, Zea mays
ctcactcactcacagtcgccgccgctgcccattgcccactgctcgccgctatgaggaatttgagagagagaggggaaagggcgaagtgcgcgcatgcaagcatgggctgcccttccttcctccccgccgcggagtctcttgtgcttccttgtcc

SEQ ID NO: 336776 - DNA, 268 bp, Zea mays
ctcaccagcaaattgccaagccgccccttttctccatctctttcgcgacccatttgattgattcctgatggcgcccaaggccgagaagaagcccgcggagaagaagccggcggaggagaaggccgagaagaagccaagggcggagaaacgcgtgccgagtaaggggggctgcgagaagaaaggaaagaagaaggcgaataaaagcgttgagacgtacaagatctacatttttaaggggtctaagcaggtgcacttcgtacttttggct

SEQ ID NO: 336777 - DNA, 104 bp, Zea mays
ctcgcaacttgcagtaggtgacaggtgttaacaggagctggctgagcttctcttgcttctgcaagtagtagctgtagccgccctgtatgcatagagaggagaga

SEQ ID NO: 336778 - DNA, 236 bp, Zea mays
gtgcaatgcgccagctcctatatatactatatttgcattataccatcacgcctactgctgtactgaccgaaccgatactcctattgtgcgaaacttcaaccgctctcgggcgattgcggatcgagctctaggtgacatcgatagcaggaggcggcgtcaggggcgctgcggctgcggctgcgagcgctctagcgctggcggctctagtgtgctcgctgtactgttgtcttttgcag

SEQ ID NO: 336779 - DNA, 205 bp, Zea mays
ggccgcacgggctggatcggggggctgctgggcggactgagcttggttagggcggaccgagcaaggcagtcaagtggctcatctggcagctccacctgttggtcatgctaggtctacccatggtgcaggaggagccgctgctacacacggatcacatcctgtaattgctagttaagggcgacatacaggacgctgtacatgttct

SEQ ID NO: 336780 - DNA, 291 bp, Zea mays
tggaggctacgaagcgtaagctacaggagggttaccaagaattcaacaacgcgaagaagcagcggacgatccagatggtggatccacaggacctgccgaagcaagggagccggaacctggcgctgagcggcaagccgaggaacaacagtagcattaggaaccggctggccgttcggcgttgacgctgatcccggtcaccccatgcatgttttttactaggtctggagacccgacctgcttgtatactataacctggatatatggaacagtctagcggtttttttttttggg

SEQ ID NO: 336781 - DNA, 214 bp, Zea mays
gggagctcacaaagctacgcgtgctcaacctcagctacaacaggatttcgcggattgggcatggtaagcacgtgtctccatacttgaggttactgctgcttgtatgcacagtgcacatgcactcataaagatgcgatctgagtttatcatcttcccggccggaacagactgtcggtgtggatcagagacttcgaatcattgtacaggacaggac

SEQ ID NO: 336782 - DNA, 259 bp, Zea mays
cgagccgctcgctgactggttacttattactagttgcctctctggtcctggtgcatcctcgcggaactcatcacaaggctccacctccaccctcctgcgcgcatggtgactgcagcagcagcagcagcctcctctccccgcagcatgctccgcttcgcattgaccgcctcgtcgtccggccgccaccgaacgtgagtacgtggctctcgtccaccgtcaccgccagcggccggatcgccgcgacgtctagagccccccc

SEQ ID NO: 336783 - DNA, 258 bp, Zea mays
cggacacgggggagcggtgcgccagcacctgccagcactgcgagcaggtggaggagggcggcccccgccgctaccgctgcctcgacacgcaccgcggcgacccggggccaaggtgcggcgacggcgaggacgatggtggggagtggtcgtcgacgccgaggcgtgcgaggggccaccgcgtctagcgagctatgctatgcgaggcatagacagcggggactggtttgtagcgggcaagatggaggtacgtacgtgtct

SEQ ID NO: 336784 - DNA, 315 bp, Zea mays
cacagggccaagctccaggtatccaggacacacaagggcaaaaattggaaccagaagtgcaatacttaccagcaagacccccagcacaagatgttccggtccatgctccatcccaaccacctcaggctggaaaccaaacacagccacagccttaccctccttaccagcagcagtggcaccagcaatccttccagccagctcctgcaccggtggcccagacacagcagactttcttacagacattttcttcacccgcacaggagccttagttatcaaacgggcagcagtttccaccgcaaccaggacagcaggccc

SEQ ID NO: 336785 - DNA, 301 bp, Zea mays
ggggagcgaaaaaaaggttgccttttcgaagccgccggacggagcgtaagcgtagcgctagctagctcccccaggccggagaggaggatggtggggcgacgcacaggaagaggaggaggaggaggaggaggagcggcgacggccctcgtgtgggcggtggtggcggtcgcggcggcggtgtcgcgggcgcagcagcagcagcagcagctgcaggtggggttctacgacacgctgtgcccggcggcggagatcatcgtgcaggaagaggtgagcaaggcggcggatcgcaaccccggcggct

SEQ ID NO: 336786 - DNA, 443 bp, Zea mays
  unsure (1)..(443): unsure at all n locations
acacaatatattctgttaatacatcacattacaaatgagaattacttcttatctgtgttcttttagcttaaaagnnnnnnnnttgcaacatgttgcgctgcaaaagatatagctgtttctgtttttgtgagttactgatcaatttctgcattgagttggatcttggatgagtcactgatgcacttcgattttccttagctagtctaatttatgtggtaaaagcttagagttgggagctactgctgcctccattatattgatgatggaaccaatcttatattttgtatatctctctccatcatattgatggaagcaaccctatactttgttttcttgttggtgtattctgaattattattataaaacattgctgtttggtgatttgtgccagcctacttaatggatttcagaaacatggcaattctgatacatttagttttttt

SEQ ID NO: 336787 - DNA, 248 bp, Zea mays
ggcaaggcagtgaacgtgccgtcgtctctcttcggcgaggcccgcgtgacgatgcgcaagacggcggcgaaggcaaagccggcggcgagctccggcagcccgtggtacggccccgaccgcgtgctctacctgggcccgctgtccggcgcgcccccgagctacctgacgggcgagttcccgggcgactacggctgggataccgcggggccgacggcggacccggagacgttcggcaagaaccgggagct

SEQ ID NO: 336788 - DNA, 271 bp, Zea mays
ggaggtgaagcatgagctggacgacattgatggcctgaccggaggaaaggctgaccaagggggtgacaccttccttccggaacttcaaggccgcccccctgaattcccgcggttggccgacggagttcgccgcgtccaaggtggccaaggccgccctgacctcttactcaggggtcctggcaaggcggaaccccaagttggccttaaactggccccacccggcttccttaagaaccaccttaaccagccaaacgggcttgttacacccccg

SEQ ID NO: 336789 - DNA, 213 bp, Zea mays
  unsure (1)..(213): unsure at all n locations
cctgtatcaccccacctcgtctcgtcgcctttcctcccaacccgcattcgcggcgcggncgcnttttttacataattacccgggccccccactaactttttacttaacccccctaccctcacttagctgttactgtttacacgttaaccaacatgtttggcagcttctttcctgggacgtttgctttccacgacaagcgcttctttaataaac

SEQ ID NO: 336790 - DNA, 288 bp, Zea mays
  unsure (1)..(288): unsure at all n locations
gcgttcgaaagcattcccanncagtccctacctcctgtccttgtacaacgcacgcacggtccccgttgctaagtttccagactctgtccgccgcctcctatctggccaccctgaagcgcccgttcggcatcgacggcttcggcgatggcagcaacaacggcagcgcgaccggcgagaagcccaaggcgcggtttctttaggcggaccctgctgctgctcttgccgttgtgctgcacgagttcggcgagcacggctgctttaacatgttcatccatgcgttttcgactt

SEQ ID NO: 336791 - DNA, 193 bp, Zea mays
cgcgtcgagcagcagtcgcgaggaggcagatgaccaaaccgacctgcggggctgggcacgtaacggaccagacccgaaaattttaaattctttcttgccggccggcccgtgccggtgaacccttcgtttttgccggccgggcccaacttcggccttttcttcttcaaggggattggatacgccacaagctgcg

SEQ ID NO: 336792 - DNA, 342 bp, Zea mays
agcatctgatgacctgttccaatctcttgctcatcttgatggataacccaatcaacaccatgctggtcatctacctacactagcttccaccaaagaatcaccacaccacgaataccattcatccgaatctcaaacactaaatcatgaacatacccagattgcagaacactccctcacccacttgaacctcaaatcacaaccttcaacaattatttaactgtcaccttcttaccaaccagaaattccacaaagatctactcagaactcatttcaaaatatatcttgccttcctttcgcacttccctttcttaatcatataacatttccatttttttttaattt

SEQ ID NO: 336793 - DNA, 133 bp, Zea mays
  unsure (1)..(133): unsure at all n locations
cgacccacgcgtccggccgcgctcttcttcccaatccanctcttctccccccttctacttccaccctaccaaagaatgttttaaaaacactcgtctccttccccctcttcaacataaccccttcccaatcctt

SEQ ID NO: 336794 - DNA, 195 bp, Zea mays
cgagaatctcattgctctcgcgacaaaaggtctccagacgtccttgcttgctctacagttgagaccctgcaggcaggtgcaggtgcagagactctcctcgccagagggcagtcaaccgcccgagtatgccatggcggaagcggtgaggcggacgcttgcgctgatgaacctggcggacatcatggagcgagccga

SEQ ID NO: 336795 - DNA, 244 bp, Zea mays
  unsure (1)..(244): unsure at all n locations
aaaaaccggcccgacccacgcgtccgncaggctccacaccaccccgaccacaccttatacaacaatgcccaccttcctcttcagacgccgctctccaaccttcttcttttcgaccacctccctccgcgccgccccgtcacctaccaccttggcgctgcctgcttccaacatggtcatcatgtcccgtatcgccatcatcatgctcattcttctctcgcaagccacctacaacttgaatcttatc

SEQ ID NO: 336796 - DNA, 292 bp, Zea mays
tccacacatttaaaaattctcctcttttcctcttcctctcccgttgccactcattttgtttgcctacttttaccccttcagcactaacaacctccttgaaacctacacatctttccctccaagcccctccttcctcagcaacaacagcacctcccttttccttctccctttcctgactactcctgatgacaattatcctatccttaacctctcctagtcatctcctttaatttcaatcaactgcttcctcataatatatccctttcctcaaagactgtacctttttcatatt

SEQ ID NO: 336797 - DNA, 374 bp, Zea mays
  unsure (1)..(374): unsure at all n locations
tttcntttttttcttcttctttttttttttcttttctttttttaccttcttttatttttttttttttttttcttttttctttttttttttttttcttttttcttttttcttttttttttgacttttttttctttttctgttatctatttatttttttttttttttttttttttttttctcttttttctttttttttttttttttcttttttcttctttttattttgttttttttttttttctttctttttttttctttattttttttttttttcttttttttctttttttcttttttctttttctttttctttttttttttctttatttttttttttttctttttttttttttttttctttttttctttttttt

SEQ ID NO: 336798 - DNA, 387 bp, Zea mays
gcccgacccacgcgaccgaaagcctcttccgcctccataaccacctattttctccccaaccaacatatctccaacatggctctttctaaagatacaaagtcccctcacttcctaatcttcttattattcacgtcccaacctccattaaactccctctttttcaccactaccactgaacctccatctattatatgctctacatcaatacaacattccccttctgcaccttcaacactcataaatacaacaatatccatttgaagtgaacaaacactaattcaactcgctttacaattccaaatcattttaaaccttctttccttcttcctatgctaaatctaacatacatttctttgtatcactttaaacccttttcacctaaaataa

SEQ ID NO: 336799 - DNA, 175 bp, Zea mays
  unsure (1)..(175): unsure at all n locations
catttacataanacttttttagaaacaaaaatgcactatataatctgcaaatttcttcaagaaacttccttcccctactaaaaaaccttcttcttaattaaaacctcatctccttcattttctctccctaacaattattattatccctagccatatttcttctactatttctctt

SEQ ID NO: 336800 - DNA, 499 bp, Zea mays
  unsure (1)..(499): unsure at all n locations
cactacatggcgaagcagcagcagcagcagttcatggcggcagtggcactggtggtgcttcgcttgctggcggcggcggcggccgagacggcgtcggcggcttcgtgcaacgccgggcagctggcggcgtgcgcncnntnnattattttttttttttattttttnnnttttttnnttttttatttntttttttntttttttnttttttttttttatttttnttatataatatatatttattattattttaaatttattatttatttaattttttaataattttaattatttttaaataatattttaatttttattatttatttttttttttgtggggggtgttgttgtattttataattttatgtatttttattgtttttttatttttttttttatttattatatgattatatatttttttattttattatttattatgtttttttgtaatatttattaatttttattatgtttttttttttttttattttgatttttt

SEQ ID NO: 336801 - DNA, 153 bp, Zea mays
ggaaaacccgggccgacgccacgcgtccgtaagtcttttcttacactctggaaatttgttaccttaccaccagcccttatatcatttaggtgtcatttacatgttataaacccatcatatcaccttcttgtcttatgataccaaaacaagaca

SEQ ID NO: 336802 - DNA, 352 bp, Zea mays
  unsure (1)..(352): unsure at all n locations
cggacgcgtgggcgacgaaaccctagaaattctccggcatgatgtccgccgccaatcctcgantcaagtccacgccgctgcctccgcccgcggcgcccaccgcggcgtcgcagaacccgcaggtcgctgcctccaaggcgtcgtcctcgtcgacgtccgccgccgaccccaacccaaacaagcggaccaacccgggcaacgccgctgccgcctccgcgcccccagagcctaccccgagcgtcaacggggaggccagccgctcgcctctggtcccctcgccgctccctcaccctcacgaacagcaccaccctccgcccggcgcgtcgcctcttctgccgcccctgcccccgtc

SEQ ID NO: 336803 - DNA, 302 bp, Zea mays
tgcagaacgtgcaaagtctaccatgaacgttatgaggcggaatggcctttgtcctgatctgattagctggtctatactcatagatatttatggatcttctcaaaatagggatggagctgttcaggcactaaggagaatgcagcgagttgggatgagacttaatgtctctgcatatactgttgctattaaggcgtgtgttgaaaacaaagatttgaagttagcactgcacttatttgaagaaatgaaaacacaccaactgaagcccaatttggtgacgttcaaaactcttctgacagcacgca

SEQ ID NO: 336804 - DNA, 247 bp, Zea mays
atactttatacccaatagctctcaaacacttattcttgacattcttaaacctcatactaagatctcttttaatcaacattatgactatcatcaacctcatcacaaacacgcttccataaaccatattaaccaattcgaaaccctagtcggcatcataaatcacaacaccaaaatcatgacccacagaactaaaacacccagcattcgccatatgtacattcacctatcatccaccatcattacatat

SEQ ID NO: 336805 - DNA, 223 bp, Zea mays
gaaaacccggcccgacgcacgcgtccggccgcatcttctatcagtaccctctggtgttctggtcccaggtggccgcccactacgctcgtttcttttaggcgagcaactgctaccctggatcattggacgcgcagaaggtggccgggaagatcgtggtgtgcgtaagcacggacccgatggtgtcgcggcgggtgaagaatctggtcgccgagggttttatctc

SEQ ID NO: 336806 - DNA, 257 bp, Zea mays
gaccaccacccctttctttctcgccacctactctacttctccctgtcctttctctctctactagttgggggtctagggtcgccttgacggcagccataccacgcgcgcacacgctccgttcggccgtacccgttcttcatttcccactgcacacaaatactactgtgactccgttagggagcaacaggaggaagaagcaggggggagaggggaggggtggtttggccttcttactcctgtttttcttcccttctgta

SEQ ID NO: 336807 - DNA, 356 bp, Zea mays
tcggccctgacgatccatcaaccgggaacatctcttttagcttggatccggcctcctcaaaccttcagatgttcatttggaatgggaccttgccgtatttccgttcctctgttgttaatgatgtctccgtatccggcggcacgtaccaggccaacaatacctctgtcacataccaagggatattggtcgacacaggggatgagatctactacacgttcacagtcttagccggttcgccctacatgcacttctcacttcactacacaggcaagatgaggatcctggcctgggaaaatagcacatcatcctgggtggtcatttttgagggccctagtgttggatgtgatctctacgcc

SEQ ID NO: 336808 - DNA, 228 bp, Zea mays
tcattcattcattgatagctgactggcgaggggctatatgctaacaacggacggaaaacacaccacaaatgggtggtttttcacgtgcttgtgggacttgacaaatgatatttgcatgcgagcacccacatcaaatctgtagaagagttcagcgtggattaaaatcagactgattgaaaaaactggtgctagggaagagatcgattcaaatgcataagctttgcagta

SEQ ID NO: 336809 - DNA, 419 bp, Zea mays
caccttcccagccgccacaaaacaaacgagccgcattgctcctgaccgaccgctcttacttcccttctctctctgtttcttcatttctactccacctgccccacagctactcggctgccagggagaaccagccgttagcttctctactccctctcttgtttcacgttccttcagcgcgttctggtggccagcgcatcgcagccaccgcgctcaactgtaaggcacgcgctagcggcttttcggtcgtctctatgcacagtgaaacgggcaccgcagacctcgccggcagcgagctcatcccttcgggcgggtgagctgctgtcggccgggaactgaccgcagtccgagcacgacaggttgggtgtctgtatcttgactgtctttaaactttaaaacctggatctagtcctcatttactc

SEQ ID NO: 336810 - DNA, 286 bp, Zea mays
tcgcgcagcgaaagagggagcttgcacgggccaacgcacacacaacacaagctcgtcgtcaatggcgcggtgtgctggggtgctgacgctacccgcagccaccgacatctactcggctgccagggagaaccatccattagcttctctactacctctcttgcttcacgttccttcagcgcgttctggtggccagcgcatcgcaatcaccgtgctcaactgtaaggcacgcgctagcggcttttcggtcgtctctatgcacagtgaaacgggcaccgcatacctcgcc

SEQ ID NO: 336811 - DNA, 175 bp, Zea mays
gtccaggacatcaggccccagaaataagtcctaacgcatctgtcctttctacttgtcttgtgacccaagtacgaactcggtgaactctttctcctcgcgcaggaccggtgcacaatcaaggattgcaggccagtcctgccaatgtagtgcgttttggacttggtgtggccgcgac

SEQ ID NO: 336812 - DNA, 283 bp, Zea mays
gaccaaacgaggtctggtgtgctcaacacttgtaaagcgttcagtgcccaacgaagacgaagacgaatactgcaccttacacaacatgcagacacggaaatataccaagaaagaatgggaggactttaaagaggaatcgaataggatggcgcatggggagtgcacagtaaccatagagtttgtccagagggtcggggacaacgcgcgtcgtttgcaagaagagaaagaggaggacaacttgccagaggaagagatcatggagagcttcagctcggcggaagaa

SEQ ID NO: 336813 - DNA, 435 bp, Zea mays
tcgcggacgcgtgggtgctgctgctgtcgctggttggccaggagcacaccagctgcttgctgtgtcgccgtcgtagaagcagtcgcgcgctgtcgtccgtctttcttccgtgtcgcgaccactccggcgggtgctgctgcctttcatgctggccacgccaccgacgcttttgtgataccatacggagcgccgtgtcgggcaccgtggaggtgaccgtcctgaatgggggggttaatatggggtgtctttactaggcgcttgttttgtttttgttgatataccttcttttctcgtttttttgtttttctttgctgtttgtttattcttttgtcgttgtactgttttttttttttaggtgttactttttttgtgtgtctcttttgttcttgttttttacttttttttgttgtttgtttttaatttttttcttttttt

SEQ ID NO: 336814 - DNA, 260 bp, Zea mays
cggacgcgtgggagcagcaatgcggacgaatgtctagcgagacacacacaacacaacagcgacgctagctttcaagctaatagaggcagcagagcagaccatagagagtggagatcagccagcagcagcagcaaggctgagccgccgcccccacgagtggagtggaggcagcagccagcgacaaggctgaatccgggaggtccgcgcgccgcagccgtggctgtcatcgcaggcgccgtcgtcgccgtcgcttgtgagaa

SEQ ID NO: 336815 - DNA, 162 bp, Zea mays
ccacgcgtccgcgatctgcaagtctcgctacgtagcagtgcaatacaaaaaaagcagccgcaatggcgagcagcaccatggccctcttctccacggccttcgccggcaaggccgcgaacgtgccgtcgtcgttcgccttcggtgaggcccgcgtgacgatgc

SEQ ID NO: 336816 - DNA, 398 bp, Zea mays
cagaggtccaaaaggccacaggagtgccctggaggtccggagggccttaggaccttgtcctctggcgtggaggctataagaggccggaagagcccaggaggtccggagggccttaggaccttgtcccctggcctggagggccttgggaacatgcggttggcatcaaccgggcactcgttgagttttgttttgctgatgggatcttcggaaggcgtcttgtgagtatcatcttcggaaggcgtattgtcagtacctagacgtatgacttttcccagatgccgataatattgtatcatgaaaggattctggctggacataatatatgttcccagtttacgtttttcttccacaatttctgatgtaacatactgtacagagtgatattatagagcaatagc

SEQ ID NO: 336817 - DNA, 229 bp, Zea mays
acacgagctggacgcttcgtattacttctgccgcacctaggtctagccctatcccgcagtggccggtgcccggttctcgaaccctaatcccctaccaccgtcgggtctcgcctgcgaagaagagggagccgcgcgtcgtctccagggagcacgcgcccccttcctttccggatgcctccgtgccgtggggaggagcggtcacccgtatccgtccttaccgcgaggcaga

SEQ ID NO: 336818 - DNA, 72 bp, Zea mays
atcaacgttggaagccagcataaatcccatgtaggcgacttgttgttgatccagcaaggcctgcacggactc

SEQ ID NO: 336819 - DNA, 125 bp, Zea mays
gcgcaggcggcctagcagaggtgcaaatggtcttgcacaaacgtgactgcatcctgtagctatagatttaaccggatcatttaggctctataagcgagacgctctggaagatctatattcctcat

SEQ ID NO: 336820 - DNA, 75 bp, Zea mays
gcgtcgccgagacgtcgatccgtcgcagcgtacgaagttgaccgtgaagaacatgcattcgatcggatgacggag

SEQ ID NO: 336821 - DNA, 235 bp, Zea mays
  unsure (1)..(235): unsure at all n locations
gcatggacgaggcagaggagatgcaggtggtatgtaggctgcacgaggtaggccgatgcggtgggagccatcacatgacaagcatcagntaccatatattcttgatcctacgagagcaagtgcctgctagtatttacgcgaatgtacgtgctcaaacgtgactagtctctggtgcttcatattttaacgtctcatataggctttattagcgtgatgtcgctgtcagacttaatct

SEQ ID NO: 336822 - DNA, 121 bp, Zea mays
ccttaatgctacaaatatcataaattaggaagggaacgtattaggtgggggcatgtgccctttttagggatgcaccaaaagttgatgcaattatatattcccctgagaacgattaacagaa

SEQ ID NO: 336823 - DNA, 134 bp, Zea mays
ccggaaaaccggacgacccacgcgaccggctagaaaaggcagagaggctactcatgaaacaccccgaagcaccaggcagggggcaggcggggaagcaacggaggacggagacgaacaaggaacgtggacgggac

SEQ ID NO: 336824 - DNA, 376 bp, Zea mays
cggtccaacactttcacgctcagcttcagcaatggctgcctccaccatggcgatctcctccacggcgatggccggcacccccatcaaggtgggttccttcggcgagggccgcatcaccatgcgcaagaccgtgggcaagcccaaggtggcggcgtccggcagcccctggtacgtccccgaccgcgtcaagtacctcggccccttctccggcgagcccccgagctacctcaccggcgagttccccggcgactacggctgggacaccgtcgggctgttcgccgaccccgagacattcgccaagaaccgcgagctggaggtgatccactcccgctgtgccatgctcggcgcgctcggctgcgtctttcccgagctgctc

SEQ ID NO: 336825 - DNA, 177 bp, Zea mays
ctcctcgccatcacataaaaccagtgcaagcagaagcagcgcaatggcgagcagcaccatgggcctcttctccacagccttcgccggcaaggcagtgaacgtgccgacgtctcttttcggcgaggcccgcgtgacgatgcgcaagacggcggtgaaggcaaagccggcggtgagcta

SEQ ID NO: 336826 - DNA, 97 bp, Zea mays
atccggcaaggagctggagaaggagcccaaatttctcaagaacggtgatgctggtatggtgaagatgttttatactatgcccatggtggtgcatacc

SEQ ID NO: 336827 - DNA, 147 bp, Zea mays
cgcgtccgtgcaagggtgccataagaactatccagatcatgacagaaagaagacagggcaacaagaagatgactcggctttctgggctcgagtgtttcctgatgcaacctgattcattggcttctgagcttcagaaaaaatttgctt

SEQ ID NO: 336828 - DNA, 204 bp, Zea mays
cggaaaaaccgaggcgacccacgcgaacggctgcacaacatcgcgggcgcgctgaaccgccacccgcacccggccaaggcccgcacgccggcgccgccgaccaccccaggggacgccacagacgccgcgcccgacagcccggacaaaaagcgcgcgcgcgagcaccacggcaagcacgcggccagacgagacgggcaggagcac

SEQ ID NO: 336829 - DNA, 334 bp, Zea mays
cgcgcgcttgcgtctacaaatacatacccatgcatgctcctcacacaccttgccaagaaatagagatgagaggggctcggccgggagaaagaagggggaaagatatgaagctactagcttctgcgtggaatgttgtctgcttcaaggtcttgctttgcgatttgaggatgatccatgcttgcatgtgtagttcttttgttccttagatctacaagatctgggaccaggcttcattccgctcaggaatagcttcaaaataataccggcggagagttattaggaggagctactagtactacataaacttgggttcttggtctttcgattctgaaat

SEQ ID NO: 336830 - DNA, 264 bp, Zea mays
acgcgtccggagatctcgcggggctctcaacgggcggctacgggcaaaatcctccgccggcgggtgatgtcggataggatccgcagctctcgaataatgcgaagaagagagaggagaagtgttagaagctttaagaggttcttttttttattgatgattttttttttatttttgctttatcttttttttgttattttctttatatttcttattttttatattttttttttttattttctttttttatatttttttctatttttt

SEQ ID NO: 336831 - DNA, 358 bp, Zea mays
gacccacgcgtccggcttccaccatcgaccattcatcacctcacctccaagctccaaggaatctaccctcgttgtgtgtggaaagcgctgcagcggacagcagcgcagcacgagagagccgagcgcgaggtgcaggaccgcaaaacagaggcgaagcgaaggacctaacctacgtagcaacgctccgctccgcggcgatgggccacgaggggtcgtgccgctgcgagctctgcggcgcgcccgcggccgtgcactgcgcggcggacgaggctttcctctgcgccgcctgcgacgccaaggtgcacggcgccaaacttctcgcgtcgtggaaccgacgtacgcgccttcgccttggggg

SEQ ID NO: 336832 - DNA, 112 bp, Zea mays
cgcggcggattttggtggtgcatatggtcgttactatgcaggattaggagggggatatggagcccggtctgggtttgtttatccttgccgctttcacctatattgaggaggt

SEQ ID NO: 336833 - DNA, 222 bp, Zea mays
  unsure (1)..(222): unsure at all n locations
gttcttctgcctcacagagcacatcgcatcaaaccgncgtttgcagtgaaccngcgaaaaagcaaggatagacagttgcgagttgccacactgtggtgcgctctanacttgatatacccaaaatgtgaagcctcatctggtagagccgncagactacaaagtgctgtagtgatcctacaagtgancagaatgataaatcgcccctgcttggattgcaagctt

SEQ ID NO: 336834 - DNA, 220 bp, Zea mays
aaaacataaccattttttccattccatacttccttaacctatttatctttttctatttttacctcatattttatctcattttatttcctttttttctattttttattcttatcttttttttattaattattttatatttttattttttttttttcttttttttattttacttatatttattattttttttattatttttatttaatcttatattttattc

SEQ ID NO: 336835 - DNA, 274 bp, Zea mays
gtcttccttccgactcccacccaaaaaaactctcgaaggaggtttcgatcgcgaaaccgcggagtgttcgtcccgcaagtgcatggcatttagcttcctggccaatgaggtgtcgtacctgtgcatctgcaagctcgccgttaggtcgctttcttgttttgtcgtcattcggtgtctttttttacttcgcttctttttttttggtcttagtatgctttttaatgtttagttttttttgttgtatttttttcttttattttattcttttttattt

SEQ ID NO: 336836 - DNA, 303 bp, Zea mays
gcagatattgaacatgacaagctggttaaggatggaccggaagtagcaccaaacgtgcgaggctggaggtattagtggtgtggtcgatatcaacatgagatgggcaatacagttcgtggtgagtgtatcatgctctaggatatcactctacaaggtaatgtcccattgattctgggggctgcaggagaggatgatgcatggatcgggtattgacttctatctaacggggtgaagccttcaatggtcaaagaaaaagtttgttaaactctgctgtataatcgtatgttaaagttccattttttt

SEQ ID NO: 336837 - DNA, 441 bp, Zea mays
cttcccttccttccccttctccatgttacatctggtatcagaggtccgatcttgagtttgctgccgatctggagatggctgcatcacacgggtactacaccaggctacagcgacgtcagggcaagatggatccgtcgtccaagttcttgttggatgagatcgagaagaagtttaccgccctcgacctcaagtgggagcaacacttcctcgacttcaactgtaccaaggaggagcgcctcgtcgccctggagcaatcgagcatagatctggagcagtggcgtcccaaggttgaggcatccctggaggacgtcaagctggaattatgcaagatgaacaagcaatgggatcagacgatgctggactgggcgaccgcagatcagggcatcctcggcatacctgaaccctgttttggacttcatcgtcaacacacacctgccttca

SEQ ID NO: 336838 - DNA, 485 bp, Zea mays
  unsure (1)..(485): unsure at all n locations
gcaagacgggcggtcgtccacggcgaacggtggcacggcggcgaggcgcaaggaggcttcgctcgaatcaggtggtgcggtaccgcgagtgccagcgcaaccacgcggcgtccgtcggcgggcacgccgtggacgggtgccgctagttcatggcgttcagcgcggacggtacgtttttacttttattttctatttgttttctttttctttattttttttttcttttttttactttgtttttttatttcttctttatttttctttatttatctcattttgttctagttttattatttttttttattatttttattcttgttgtgttgttnttttttttatatatttttttttgttcttgcctttttttttatttttcttttgttttttttgttatttttttattttattttttttattttttattattgtctttctcgtttttattttcttgatttattttattttattatttttatttttttttt

SEQ ID NO: 336839 - DNA, 69 bp, Zea mays
cgcgtccggttctggatcgacctcttgctgaccgtgcctgggtactatccggggatcatctacaccggg

SEQ ID NO: 336840 - DNA, 338 bp, Zea mays
caccccctcctgccgtcctcgatctcgtctcctcctccctacccaatccctcgcggtgggcgagcgtggaagcgagtgacgatggcggcgctggaggcggcgagggagtgggcggtctccttatacctccggtgctcgctcttttgtttggttcacttctttcggtttcctttttttttttggtttttttttttgttttcttttttcttttttttttattttgggttttcttttttttttttttggtttgggttttttttttttttttttttttttttttttttttttttttctttttttttcttttttttattttttttattttttttttttttttt

SEQ ID NO: 336841 - DNA, 439 bp, Zea mays
ttttgagactgtaagacaatgtttatatagttatttaccttatatagcatctactattcggatggggttttaatccactgggatcaataccttttcacccttttttcacctctatattctttttttaatctttacatcatttttccctttttttttctatatcttctttttttttataattttcatcttatcttttatttttctaattatttttattttcttcatattattttttttttttttatttttatttttttttttttttttattctttttatatttttttccttttatttttatttttttctttttttatttctatttttttattttatatttattttttttttttttatttctttttattttattttcttttcattctttatttctttttttttttaattttacttttcttttttattttatctttttttta

SEQ ID NO: 336842 - DNA, 115 bp, Zea mays
cccacgcgtaccaaacgaaaagctgtccctcccccactttcatagcataccgcaagctgcgccgggggggggctttattctctaccataactgacctcatctcctgcttcttcct

SEQ ID NO: 336843 - DNA, 216 bp, Zea mays
acgcggacgcgtgggttaccacacaagttcagatcaaggtcatgccccatgcagcagacgggggggggcgccttatacaggatccttcaggtcaagttaaccatgggcctgttctagaacctttacccagactctagcctatgcggccagcttgtgaagcaagaacatcttatactggcacgcgtagccggcaggaaatgcttgtttctttggaag

SEQ ID NO: 336844 - DNA, 382 bp, Zea mays
accacgccgacgcccgccttgacaacagccccacgtctaggtagtgtcgcaacatggacacgggggtcgcaatacctcttggagcaagtcctggtcaccctgcggtcacctctagatgctgagtagaagctgaacaccatgagtcccttgtctggtacaataggatctcatagatgaagaatttccatgctgatgctgatgatttctttgaagagatttgtaagtttgcttacacgaacagtgggagtatgtgcatagagtagaggagttgctgcattttgccactcttgaagtgagttagctctaaaccaaggcagcttttacctagtgcctgtttgtttagggctgttttaattggataattttattcgtttgtcttttg

SEQ ID NO: 336845 - DNA, 207 bp, Zea mays
cccacgcgtccggttcagacaagctcgtcgtatcaacctcctgttagctcatgcacaccgctgtggatctggggagcgtgactatgcttgacagcatcattatctcttacctttccttctactacgaccttaacaccgtcgaggcccgatggtaggtgagcccttaactcgttctgagatagcattctcaggttctttacatattgt

SEQ ID NO: 336846 - DNA, 343 bp, Zea mays
cgagcacatcatgtcagccagacagtttctcctacaggccatcaccacaacacacagatgcttttcattgcaactcacacacattctcctctcccccgttgtgcaactcgctctccctcactttacccgccttgttgccatggttaaccttgctcttcctcttacgctccttctccttcttatcattttgttttacctttttattccatttttctttgtgcttcttctttctcttatttatctttgttttgtttatctttctttactttcttttttgcttattttttttctctttttttttttatattgtggcggtagtttttactttctttcttcttttttt

SEQ ID NO: 336847 - DNA, 250 bp, Zea mays
  unsure (1)..(250): unsure at all n locations
gcatggtgcactactgcactccgnatttnancacctctatacttatatcctactggcgtacgtggatcccntagtctccactcctacaaaatcctcttcttcnccaacttcgcgtccgccggcgtcggcatcctcaaccacaccgggcttcatttcgtacgtaacacactctatccatctcctgcctattcttcttgcactgntgatctcggagctctggacagctattcgcctatactaataatgcatt

SEQ ID NO: 336848 - DNA, 105 bp, Zea mays
  unsure (1)..(105): unsure at all n locations
cacgcgtgcgggaaggtgcctgctaacgaggaacccancatgaanntantctttaatgtaggtttncctttaatagcgggtgctaactgtgaacaaccctgcatc

SEQ ID NO: 336849 - DNA, 289 bp, Zea mays
acggggtgcgacggacgcgtacggggacaccttggtaccaactactatatgtttttagaagatgctgcttaaccttggggcggggcattacataaacattgtccgaaagcactctaacacagtgtcgggtggtaagtctgaactaaacggatcaagatattgggagatgacattcttttcagtcgtgaatgagctgcactgtattgatgaaatttgtaattcgagcagtgatctgatatttgttatgtcttggaagggctttctaaaaacattgtggtctttctttttt

SEQ ID NO: 336850 - DNA, 313 bp, Zea mays
gacgccgatagtgatatatcacgctgcagtactattactactattacgtatttactccctttttgggaacgtaggattggattaggggctgcagttcgtggaggtttaattttccccacgaggtctagtttgggtactatagtaataactgagatcgaagtggattgagatgtattgaagagggatttgctctattagggatttaaacactcttaaatctctccaaaccacatccacacacgatccattgtggaaactgggttagctgtaaaaattaagactgccttcaacatgtgtctttaaacgctcctga

SEQ ID NO: 336851 - DNA, 93 bp, Zea mays
gctgcctcggccggcacctacctcccccacttcgccgccggcgggtggagtcgggccggagcagccgctagctcgcctttgttaccccccccc

SEQ ID NO: 336852 - DNA, 203 bp, Zea mays
aatacatttgcattgtattgtatgcacaggttgtgctcaccatcattatttgggcgggccgtgtagagaatcttgcgcaaactcttctttctttaatagaaatgcacactatcttgtgccgttcatttcaaaaaaaggacttgctgatgcaatgttggatgatgcatagtcaagctggggcattccctcctggtaagaaaatc

SEQ ID NO: 336853 - DNA, 313 bp, Zea mays
  unsure (1)..(313): unsure at all n locations
cgctagaaccgtcaatgggttctataggacnacccatagtctcatttatccncgagcggggcctacgcttgctgttcttcccgctcccgtaccagggccatattnaccccatgttccaactcgccggccttctacacttgacgcgcnnctccgtcaccgtcttccacaccgacttaaacgctccctacaagtcccgccaccctgcctacgacttcgtccccgttctcagccgcgactgcttgcctaatggcagctcggatgccttgcaagnaaccgtggaacgcattctctccgtgaaccgcgcctgcgatgc

SEQ ID NO: 336854 - DNA, 330 bp, Zea mays
gacacacgtgtggccggtcgatacagaacctgagcataccctagtgaggtagtctggttctacggacacttaccttcatcgaaacgggctttgttccagcatctaggatacagatcagaaggcgctggtcactcgcgtgcagaaattcttgcggaccatgctaggaacacaaggcgctctcatcatcccgttgacaattcacatcgagcttggtttcaagggcctaacggcgcaatgtattgaaattgttgaccccattgtctgctgcacctttggtttggctagctagattagtgctatatgagctatgctatgcacgggtatgttaga

SEQ ID NO: 336855 - DNA, 284 bp, Zea mays
gtcaacacgcgtgcggggatatgccacaaaattctatgaacctttttacagcggatactcgaattatccatttaggccttcatacgtggtaccatgcaggagtcctctatctaaatcccaaaatagaatggttgagcatcgagtgcgagctatccgatctgaagtattcatttgtgtttcaataatgaataacaataacgttggcgttcctcagcttttgatgcttgaattatgctctctgatatgcttctctatattttctaacaaaagggcaaaacatattg

SEQ ID NO: 336856 - DNA, 387 bp, Zea mays
cggacgcgtgggcggcgcgggcgccgccgccgcgctgaggaagctcgtgggcgagctgcggcggaggcgggatgctgctgcccttgccacggccgtagcaccgccggaataaaaccagccagggatcctacgtagcgcgccaccatgcatagctgcctagtcagcttccattactttgatgctaggtggtttatttattgagtcgtgacggtgcaatgcgaagtgtcgtgtgtcaggtgtttcccttctcatttagtttgggttcgtgtttttgtgtcgtgctagtacgtacggatcccgtaggctaggcagccaataagccaataatggacgctgattacccaggcacaacaatactgttatatgacagagctcgcccattgcatg

SEQ ID NO: 336857 - DNA, 274 bp, Zea mays
agctaccttgctcaaaagctaatttccattgatccactattttctcaaacagggattcgcagggggcaattgctttacctttataaaaattcataatatgtctatttataatttctaacgtattacccattcttgactaacgatttacatatgcacacactctatctggtcattaatattttgaaatggatgattatgagaataatatcaaattttacagatgctcacttaaggtacatcaaaggcactacaattctttgtatggccttatttg

SEQ ID NO: 336858 - DNA, 297 bp, Zea mays
  unsure (1)..(297): unsure at all n locations
cgtcgtgcccgtgggaccgccactgtggtctggtggtctcaacatcnnccgcccgccactcaggtttngcctccccgagtgggttcttccggcgtccgctgggggccgggggacgggggtcggtgccgcgactcagcttcggtcgtgctctgcaggagggtggttcaacgacttggaatgcagtcccggcttggcgcccgggcccgttgccgcctcttccacgggtcacctgcattcaagttcaaggctctacgcggctcgacggacgaggttgcacctcggcaaacaaggtgacca

SEQ ID NO: 336859 - DNA, 131 bp, Zea mays
  unsure (1)..(131): unsure at all n locations
ctcacgactgtcgtatatctaggcatnacacttgccaaagtgcatgtctatcaatgaggacgggtagacgactatggagtgtctccccatgccccagatcgctcggncgctggcgctgctgatgcacgaca

SEQ ID NO: 336860 - DNA, 221 bp, Zea mays
gtttttatacgtatgtcacataagcagcggtggtctaaacgccaaccacaaccagcgggcgagagttcgagctgggggctaaatttagactgctgcccaacccacacccagaatcatcaaagcccgagctgacttctgtgacggccagccgggatggtaactgagacgtacactggtacttatactcatactgcacctcatatatagagactagggtacga

SEQ ID NO: 336861 - DNA, 443 bp, Zea mays
cccgaaccatccaagccagaccctcgaccagattctaaaccccaacccgaaccatccaagccagacctccagccagggcccaaacctacactagagccaaaaccccaaccagaaccatcaaagccggagccaccatttggcacgggcgttgtggaagggaactgaggagcacaatggaaccgatcatcatcgtgcacgtcatctatagctttttggctatgactgataagtaataccctttgtgtaaaatcaagtgagctctctttttatatagggtacggtgtgtgtattgtgtgtagtactatgtttggacgatgtgtgtgtatccacctttaatttcccgtgtgtttccatcagcatgcatccatgatctatgtatatgccttgctaagtttgtattatcaatgaataaaagaagcatgccttgtatgtcttgtttcgat

SEQ ID NO: 336862 - DNA, 382 bp, Zea mays
ttatgccccaaacgaagtgttacccgtccgcttagggctgacgtgtgcgcttagtgactctggttagaacctaggcaattaagcagtttgaggttctcatatatctctttggagatgcatccacatctgactttacataggcatcctatgtgtgccgagattattgaagaatttcagacgagccatctggatcaccctgtcaagaagttcttcgctgagtgcgcacaccttagaatcaagctacatcgctgcttccgacaggagaaagctctgaagagaatggcaaacatcgaagagagtactagatgcaaagaccagtgcacggcttacaactggtcaatcgcagagaaaaactacgaatagtagcttggaagggaggaca

SEQ ID NO: 336863 - DNA, 421 bp, Zea mays
gaatcacgggtcgaccgacgcgtacgaagaggaagagctcgctgagagcgagagcctttgttaaacagccgccggcggcaaaatgggggagcggtttagctgcagcaagcgctacttcttcgcctcaaatttcaatctgactcacgtgtgtgagaccctagctgtgaggcgatgtgttccagtaacaccaaaaatcgtgctagcggtcacgatatgcctggtcaccggggagattatacacggtattccacaccttagactttgtgatttcaatatgtgaccgtctgaatggaacctaagaattcttaaccaaccatatcgacgccttctgtgtacgtccggtgttagagataatttcatccgtgcttttttgttctatgagcagaagataggtaatagcgtatttattattcaaaattct

SEQ ID NO: 336864 - DNA, 427 bp, Zea mays
cggacgcgtgggaagaaagggaagggtcgacgaaaggaccatcattcaggaagctccgtgatggtgaatcccaggacgaagaacctcaacaatcaggatgcggtaccatcctccgatacatcaaaaccagtacaaaatgttcttaggaaaagagttgatcctgaaactgcaaagtactttatggagatctcaaacctctttgataacaaggagattgattttgaagagcgctcaactatatgcgctaatgccttagaagaaactagagggaaagagcatgaacttgccactgatgctgttataagccacaccttgcaggttcttatagaaggctgtgagttagagcagttatgcacattcctacgcaattgtatcgactattttttggtcattgccgtggacaaaaatgggtcgcatgtggctgaag

SEQ ID NO: 336865 - DNA, 298 bp, Zea mays
ccaccgcggcgctgcggtcgccggcggtggttggcagcgcgctgggccgcgccgcggccagggccacggcgtaccgtcacttgtgcacaagcgagaccgccgacgaggccgcggccgtcgagcgccgcctatggcgcgggggcatgggcgggatcctcgactacgggatcgaggacgcggaggacggacacacctgagaccgcaacgccgtcaggttcgcctccgccgtggattcatccggattgcttactacaggcttggctagcgtgagcattaagatcacgtgtgctctatacta

SEQ ID NO: 336866 - DNA, 379 bp, Zea mays
  unsure (1)..(379): unsure at all n locations
cttatatatatggcatgctaaggtttatgatatatgtttttctgtacacatccgggttttgtgtaatttgtaactttcacgcatgaaacttgaatgatgntatgcgtcctatacgggctatgttgatgtgagcggttgagcatnaaactattataattcaaacaagaaatgtatgagctgctgtaaggttatattcactttatcttgtattggtcaggagaaactaatgccattttttgcaaacagtgggaaacttttacagagcttggcngtaccaactagccaagggtcattcttgtcggaggatcagattatttacaatggaatcggctttacaattgctgcaacttccactgctgctatcactatttatgcaaag

SEQ ID NO: 336867 - DNA, 341 bp, Zea mays
attccgcgtggctttaaccttttgggggtataggaagcttaggcacgtattgctatttgtggtgctgaggttgcacaaacttaataactgatggcattatccgaacaaattcggccgcagatggatgatatttgtgctgtatatcctcagggtgacaccgaggggaaaattcaagacactgaagaacttgacaatctataagaacacaaggctgaacaacagcctaagatacatcttgaagctttaatacaagaccaggcttgcttaataaacactctttaaaacaccaatcaaacaagtacaccggtacataatgctgatacgtatgcacggacacaata

SEQ ID NO: 336868 - DNA, 286 bp, Zea mays
  unsure (1)..(286): unsure at all n locations
caaggtctttgaaaaagctcttgtgacccattccatgacttagttaatncnccttctcggcgaacactataaccggttactctgctactcgacaagcntaaatgtgatgtgacgcatgctataccaaacactgatgaatagctcntnaagattgtgcgaaagaattggaaaacatccctacanactgctgcaagaatcggataccatcgtattgacaaagcacttatcatagagattcatgaattgttcccatcaatgattggacgntgcataactgcactttaca

SEQ ID NO: 336869 - DNA, 215 bp, Zea mays
  unsure (1)..(215): unsure at all n locations
gcgcagtatccaccgtcaccgccggaaacgtataccatcctggccactgtnacgatggacgtgccctagggggtcacggtcacggtcgcctccaatctgcttactgcggatgggccgcgcggtaagctaaccgccaacttttagcccctaaactttatttcaaccttcaggacggtggttcaagctaaaggtgattgcttgttttgttacccgcc

SEQ ID NO: 336870 - DNA, 298 bp, Zea mays
cggaactgcaagcatacagctctactcttgttatggactgaacgcgcgaatcgaaacggtgagcgtgaaccatggtggacgaatacagccgcttctttaccagcatgccagggccggcgacaactacaacagaggcttcaacatcttgttcggcacttatgactacggacgaagctaacgtggataccactagctggtccgtgattacgactacatgtctatatgtagggactggtacaccatgtactgtagttacaactacgcgtcgggcacctgtagtggcggctacaacaagttc

SEQ ID NO: 336871 - DNA, 212 bp, Zea mays
ggcgcgtcgagcccacagtgcatgctagctgtgaccggatatcatctcaataccacaagtcatgcgcaaggagtagcagagttctataagagcgctcttcggtatctggcctacacaaccggggaggcgcgaacggagtcattcaagcgagactcggccgtttgatcctcacgagcagcactggagggtgatagcacttataaggttggaga

SEQ ID NO: 336872 - DNA, 348 bp, Zea mays
gggaggcgtccgggtccggtcttgtgtcagtgcatcttcggctaccattagaagagtcggctttgccagtggcttagggtgttttggacacccaagtgggtgatgccattagggcacctggatggctgaaccactagaaccatgttaaacgcgggtataaattaatataaaacacactggattctggctactcagatggcaatgactgaagatgggaatctgctgaaccaccagaggatatatcttgatcaacaaaaggacgcgtgaccttgcttatatagacaattctgttgaaaagtctgccacatctgattacagcccttctattccattttggactagatacat

SEQ ID NO: 336873 - DNA, 230 bp, Zea mays
gagaaaggacccaccggaggggaactaaagtggctcaacggtggggatgattttaaggaaaggccctcaatctagaaagccggtgggtgtggaaacaaaaggattaaattctttgaaccaaaacagcaaccataagacggcacaaacaaaaatcaaatccaagtgatttgtcaaacccggcagatctagaacataccggcgtagtcggcaaaacagaaaagtccaaaaca

SEQ ID NO: 336874 - DNA, 334 bp, Zea mays
aaggccgagatctgaaaatagttttcctgtagatgctcatactggtttaaataatcttcccagcggttatcataacttacctccgaaacaatcactaccacttcccatgatggatcatcatgtggttcccatgggtatcagggcacctactgataccattccttacggtgatcatatactaggtggtggaaattcaacttctgttcctggagatatgcagcaactcatagattttcctttctatgctgaacaagataagtttgttggcagttcctttgagggattgcctttagactatatcagtatcagtagtccaatcccagaaattggtgac

SEQ ID NO: 336875 - DNA, 174 bp, Zea mays
cggacgcgtggggttctagatcgccggacgcgtgggctgacgcgtgggcgacaggtggtgagaggcggtccttttcttacaatcagaccgctctttttcagatcatgcaagacgagtgctgtactcacttacggaagccaacaatgcatgatgagaccccagtgtcgaggcaca

SEQ ID NO: 336876 - DNA, 209 bp, Zea mays
caagagagcgcccgacagaaccaaagcaatgggcctagtgttaacaaaagcaagggatcgagcgggcgacagcgaggaaacgacccagcctttgatagcaacgcgccaggcaccagaagagcaggaccggagcccgaagaagcagagcacctgcctgagccagctaggcaagaagacaaacccaaaaggcaaccaccggccgaccaagc

SEQ ID NO: 336877 - DNA, 432 bp, Zea mays
cgcgtgggggttggcttctcctccccctccggttcgggttcgggttcgtgaggttctccggggttcggtttcgtgggtgagcggatcgagatggcggcgtcggatgttgagtaccgctgcttcgtcggcggcctcgcctgggccacggacgaccactccctccacaacgccttcagcacctacggcgaggtcctcgagtccaagattatcctcgatcgggagacgcaaaggtcccgcggcttcggcttcgtcaccttctccacggaggaggcgatgcggaacgccatcgagggcatgaacggcaaggagctggacggccgcaacatcaccgtcaacgaggcccagtcccgcggcggccgttgaggcggcggctgcggctactgtggtggccgtggaggcggcggctactgcggtggcgggcgccgtgatggc

SEQ ID NO: 336878 - DNA, 244 bp, Zea mays
tcggtggcgcgaggacctattcgagcaggtgatgtacgcggccgggacggtgggcttattctggctggtgaaccacggagtgccggaggagctgatgggccgcatgctccgcggggtgcgccagtttaacgagggccccttggaggcaaaacaggcgctctactttagggacctcgctagaaacctgcgcttatcctccaacttacacctcttgaaagctgttgctgtcgactggcccgacacg

SEQ ID NO: 336879 - DNA, 268 bp, Zea mays
attgctcgaccacccactcgttcggttgacgaggacctattcgagctcgtatgtacgcggaacagactgtgcgcttcttttgggtggcaaaccacggactgccggaacaccttataggctatatgctccgagccgtgcgccatttcaacgaggggcccgttgaggcaaatgacgctctctactctaagtacctcggtcgtaatctacgcttagcctccaacttagacctcttaaacgctggtgcgcgcgactggcacgacacactttt

SEQ ID NO: 336880 - DNA, 346 bp, Zea mays
cggaggccttcgtgaacgggctctactactggacctggggcgacgtgctggccgcggtccggagctgcgagcccttcgccgcggcggccgacgcctcgggactcctggacaggctcatctccgcgctcttctccaagatcaccggcgccaccccgggcccgccggggacgccgaaccgctcctcgtcgtcgtgctcgtcgtcgcccgacaccgcgggcttgcgccggtcgtcgtcgtccgccaacaagacgccggagtcgatgcggccctgcgccggcagggagtggtggttcgacgacatgacgtcgctgtccccgccgaccgtcgagaaggtgatgcgcgtgct

SEQ ID NO: 336881 - DNA, 130 bp, Zea mays
gcttgctaaagtattttaaggacatattgtgaaagccgtttttatccttgtcggtgcacgtagcttccagagcgaatctttgtatggacagctgctcttcaaatatgtgtatgacctaataaacatcttt

SEQ ID NO: 336882 - DNA, 154 bp, Zea mays
acaccgtgcggtggatctttaaaaaaaaaaaaaagggcggcgtctaaagatcagcttactttccgtcttgcgacctatagtcttctataggcacctaattcaattattggccgtccttacaacgttttgactgggaaaccctgtcgttcccaac

SEQ ID NO: 336883 - DNA, 408 bp, Zea mays
gcaacaaagcccagagcttgtagtaggttttcatggcgtggaagatggggcctgcttctggcgagctcttgcgcgcgagcgtccggtccggcacagccactccttcccggccacagccaccagccgcacgcaacagcccatcgcccaccgtccacaggcacgcccctcccgcggcacggcttggcagcgcggagacggtgctggtggtcgacgtcgacggcgccctgctcctgtcgcgttccctcttcccctactttatgctggtcgcgctcgaggccggcagcttcctccgcggtctcgttctggagctcctataccccgccatccgatgctgctactgctgcctcggcggaggcgacctgaccgtgctggccgtggccgcggtcgtcttatagggtctgggcgcgc

SEQ ID NO: 336884 - DNA, 439 bp, Zea mays
gtcaccatgtccttttgcttatttctggacttcttcagcaatgccgtcttgctgctttcatagtgtggtgtggatgctcccctcagtgcagctcagatgattttggaagtggacaggttttttagtgtcttgctgcctttctgaagtatcactctgcagtgtcatctgggccaagatatcttgtaaatttcaacagccctgcagtcttatcagttatactttttattgcaggcttcttaaaccaggaggaacctttattttggtacgcacttttgtacatttgttctgaaagtagtgctgttggggacaattttgggtctgagttctagattatttctccattcctcttcttagtcatgggcctattggccttagtcacatacacagcccagcatcaacaatgttgaaaccctggtatgcattttgacccaattttcgt

SEQ ID NO: 336885 - DNA, 363 bp, Zea mays
ggcacgccctttcttttttttatttttggactttaagaacatttcctacgtgctgcattcagagacttttagggaaggtcttgtgactacaacacagatcattgttgatgtggacagggtgataaccgtcggcctacctgactgtaaaatgaatctaggctgtcttgtcgcccaagtgatctagagcatatcaacagccctgcgtggtcagggatgatactttgtatagccggcttctgcaagcaagtggaaccggttctttggtactcactttggaacccaagctccgacaatagggctgtttcggacacacataaatctgaggacctgattaattccccattgcattatttaatgatggtc

SEQ ID NO: 336886 - DNA, 287 bp, Zea mays
ccacacggacgcagcgaacggcagggtacgtttcgggagctttctatgacgctgccacgctggaccattgggggtgttcggcggccgacaggatgacagggcctatgctcaccggtgcttgctcaagaccacgaatgcggaccgggaggacgaccccgagctggcgtacgtgcttggaaacggataccttgagcgcgtgaactgacgatacaccagaaccaacgtgtgcttgaagcatcaggcgctgctgaaacacccggctagcaggcacgttctcgagccacggc

SEQ ID NO: 336887 - DNA, 436 bp, Zea mays
ctgaacctgtgatatgtcctgttacaaagatggccatgcagagcaagacactgaggagtaatcttccgttgaagagcacaattgcagagtggattacaaggaatgaagcgacacgggtcaggatcgcacgcaccgcgctctctatggcgaccacagaggctatggtgcttgaggccatacatgagctgaaggtgctggctaggctgaggagaaagaacagggatcagatgcacaagattggcatcaccaagttcctagcacggcttctggaccacaaggatgcacttattcgctgtgactccctcgacctcctctgcttgttggttgaggatgatacaggaaaggaaatcatagcgaaaaccagagccgtctcaaggacaataaagctgctatccagcagtagtactgatgagaggcatgcatctatatctttctt

SEQ ID NO: 336888 - DNA, 363 bp, Zea mays
gttggcttctcctcccccaccggttcgtgttcaggttctggttcgtgggcgagagggaagagatggcggcgtcggacgttgagtaccgttgcttcgttggcggcctcgcctgggccaccgacgaccactccctcaacaacgccttcagcacctacggcgaggtcctcgagtcgaagatcatcctggatcgggagacgcagaggtcccgcggcttcggcttcgtcaccttctccacggaggacgcgatgcgcagcgccatcgagggcatgaacggcaaggagctcgacggccgcaacatcaccgttaacgaggcccagtcccgcggcggccgtggaagcggcggtggcggataccgtggcgggc

SEQ ID NO: 336889 - DNA, 405 bp, Zea mays
ggccgcccttttttttttttttttagattccttatccaaccttctatttcaaaaataatgcattagtcacgccacaacgccaacagccggtgaaaaacaatgaaggccttgcaaatgaaagaataattaaaaaaaacacaggaatttctcacatgaacaatctcagagcgctatgtgcgtcctgatactgcaattgtcagctgttaatcaggtggcccagggccacgaatgcatctttggcaaggcatttacaagagctgtcgtgtaaaaaaatcttaaagctgttgcagaacggcagcatagttgcaggccatgataatcaacactgactacggccatggccgagtcataagaactgcttaagaattcagtggccactagccggccacgagtgttactgacagc

SEQ ID NO: 336890 - DNA, 179 bp, Zea mays
tcgcttcatctccgtccgctcccggcatcgacccctttttcccgtcatgcggtcgccgcccacgggcggggattgatcatcttccggtgcttgagtcaagtaaagaacctttccctattctcggttcgatggattccaacgttcgttatgttcttcgtttaatccgatttttttccatg

SEQ ID NO: 336891 - DNA, 169 bp, Zea mays
gcggggctaactacttctggtgccgcttcaagcgcgggcttgaccgtttggatcgcggagcatgacgccgtgcagctgcggccatcctgggctgcgagggcctgaagcccttctgcgccatctactggactctcctgcagcgcgggtaccacacagggcctgcacgacg

SEQ ID NO: 336892 - DNA, 423 bp, Zea mays
atcataaacaccgaccttgtcatccgtgcttttaaccaactttaaatcttacttgtcacagactacgtcctgcggacttggggggataactacctacaccatatggttccacaaccactgcttggaatgcaaccaattgccattgacttacatcactcaactacgaccatactaatactgcatcgacacttcagtagttctaccaacctcaccgctgaacgacctgccgtcctatgtcaacctcctcttctacatcatctacctgttgttgataatcactccaccatacagtgttggcttaaacacacccacctttttctgcttcagataattcagcaggtacgcaggcacatcatataataaagatacatgctttttaagtacctattgacgccacatcgttacacaatttttgatcagata

SEQ ID NO: 336893 - DNA, 438 bp, Zea mays
ggattaaatcatccgtcatgtcttgcactttgcggaaccgggaggagagcaaggcgtgcgacgtttttcctgccgattggctctcgtcgtatgccgtcgctgcattaggatctggatgaggtaggtgaggtagaggaggccacaacatgggccgaggcggtgctactcctcatcatgtgcggcgatcaccacgcatctggcgagggcatcaaggatgtgctttcagtctttcacccaggagcttggcgatgactgtcagaagcaagaaaaatataaggatgctgaacctagtggaatagatcttttaaaggagatgcattgcaacaaaaagaaaggttttagtgaaaatgttgagaaagctattgttgacatggaagaaatggtggtagctccagtttaggacggacaacaaccaatatctcctacaaaagttgtttt

SEQ ID NO: 336894 - DNA, 169 bp, Zea mays
ccgcaccccgtaggacggccccgaacgaggaccggaccgaggcccacgaggcagagaacgccacaacaaccgcacaggcgaggccacggccgactacgggcggagaacaccacgcaccgggcgaggaccccgagacggtgcccaaaaaccggcagccagaagcgaacca

SEQ ID NO: 336895 - DNA, 416 bp, Zea mays
gccgtgaacgtgccgtcgtcgtccgccttcggcgaggcccgcgtgacgatgcgcaagacggcggggaaggccaagccggcggcggcgtccgggagcccgtggtacggccccgaccgcgtgctgtacctgggcccactgtccggcgagccgccgagctacctgacgggcgagttcccgggcgactacggctgggacaccgcggggctgtcggcggacccggagacgttcgccaagaaccgggagctggaggtgatccactcccgctgggccatgctgggcgcgctcggctgcgtcttcccggagctgctcgcccgcaacggcgtcaagttcggcgaggccgtgtggttcaaggccggctcccagatcttcagcgagggtggactggactacctcgggaacccgagcctcatccacgc

SEQ ID NO: 336896 - DNA, 373 bp, Zea mays
gttctagatcgcgagcggccgccccgccgcagcccccgctgctgcactaccacggctcggcctctgtgcctggccctggcgacaagcgcgccaggaaagggtcggtgaagaggaggaagctctgggagctcaggttcggctgccggcacatcgtgtggcgcggctggaagcctgcgatcgtgaagggcctctgaggagagaattttgcaaacatgacaccgccgtgggaaggcttcaaatatttggcaccgccgtcgtggcaattgtaggcgtggcatccaaatctcccgacttttgcaaatttggcattgcggtcggttaatggtcattaggaactctctcgtttaaaaaaaacagataacaaatctaaaaa

SEQ ID NO: 336897 - DNA, 435 bp, Zea mays
tcggtcggagccagctcaagaggagccgccacctggccgcggactgctcggtcagtccggacgaggacctggacgacgagcccggcgcgacgaggaggtcggcgtggctttaacttttttcgcttcttctctgttctcatgtttctcttttctgctctttcttccgtcatgttgctcagtatgagttcttcgtacttttgctttcttttttactacattgtttccgtttctcttctgttcttttttacttctactctttcttttgctttttttcttgttgtttttttattgtcattctttttttttttttcatttgtttctgcttttttttaatcttgtttttttttttcttcttattttttactgtttttttttttcattttttttttttttttctctctttcttttttttcttttagtctttttttttttttt

SEQ ID NO: 336898 - DNA, 119 bp, Zea mays
tgcggacgttcgacccggcatgttcaacgttttctcggccaccggggcgcgccggcacctgtgcgcgcgagcctcggtgctgcccaccttctaccttctcttctgggcgggtttctctg

SEQ ID NO: 336899 - DNA, 186 bp, Zea mays
agcagatgcacatgtacatagagtcccacgctgccataacacctgaatctttcaatagtgcctttgtgggtttttggtgtttggatgacaacacaattaaaggtctaataaaagtgttcagtgttggacaagaacttagtgttaaacacaaaaaaaataaacaagacccagaaaactacattccat

SEQ ID NO: 336900 - DNA, 322 bp, Zea mays
cgaaacccaggccgagccaggcgtacggccgaagaaaagcggcacgcgccggaggaccggcaattgcggggagcgggctacagaaaagggaagccagagaacgggcgggcgagagaagatggccacaaaacgaactccaacagcgacacccccacacagggcgcggagaagccgacacaggtgagaacaaccccgaacacagacgccaggaacgcgcaagctgacggcaaacagcccaaaagcggcaagcccaagcactgcaggcagaggagcaagaagagcaaagggggcaagaaaagcaaaaacaaggggggggaagccc

SEQ ID NO: 336901 - DNA, 382 bp, Zea mays
cgcgagtgagcaactgcacccccacatggtgccaccgtttctgacccttttatccccgtccctggagggcccgccaacggcggcttggctgcacaggtcctctacccaaagcccgtactccgcacccccggtgcctccactccctcgcgaggcaactccttacaagttccggattgacagccccaaaccggcaccggcaaggaaaaacaccaaaacagcagcctagccccttactgtcggagttcccgggggcctgacccaccgagcggtcctcggcatcattcggggcgtccgctccctcgagctttacgatgcttcgagtccgaattcccgccacaaccaacaacatcgggggccccgcccgctcatttccaacttacca

SEQ ID NO: 336902 - DNA, 253 bp, Zea mays
cgagcgaccaaagccatggcatctccgcatcctggcatcgaagaatgttctaacctggccgatcggctgcgcgggccggacgatggccgtggcggagtcttgtaagctggtgactacagggacactcccggacctgtgctaccactttagcacgcgcggaaccaggcatggggggggggataatgcgcttgcggcagtagaagcagcctggctgctacctaagcaactacaagatggcgctagagcactttga

SEQ ID NO: 336903 - DNA, 216 bp, Zea mays
ccctcgcgagctctccaccccttcacacgaccctcctcggcggcggcggcagcgatgcagatggcggtgaccaccaccgagtgccaggcgggcgtgccgactaaacaccctaacgcgcacgcccactcgcccgcgcagtatgctgacccgcaccaccacatgccggagacactgtgggtcgtctttccgtacccgccgacgccgtccatggtggtc

SEQ ID NO: 336904 - DNA, 271 bp, Zea mays
acgctctcgtgcgacttaacctcggcgcttggacgctattattaggaggtaatttatactcattggttggtagacaatagagcgacatacgctgtccaacctcctaaacacttcttggggcgctttaacctacagctatgaactcaactttcaaggcctgaacttgttccacacgaccgtgggtcccaaggccaaccaatctgcgatcaaagatagcaaggccaccatcgtcgtcggagccacctgggtaaacaactggtcagggtgtgac

SEQ ID NO: 336905 - DNA, 319 bp, Zea mays
caggccaccgtcgtcctcggcgtggccccggagaagaaggccgcgcccgagttcgtcgaggccgcggcggagtccggcgaggccgcccacggctgcagctgcggtggcaactgcaagtgcgacccctgcaactgctgatcacatcgatcgacgaccatggatatgattattatctatctagcttgtggtggtggttgaacaataataagcgaggccgagctggctgccatacataggtattgtgtggtgtcactggtgtgtgtgtgagagagaaaaaaacaaagttcttcagcttgctatctctctctctctctctctc

SEQ ID NO: 336906 - DNA, 339 bp, Zea mays
cgtcttcgtactcgcctacctccgcggctcaaacctttcccccttctcccaattccttccgccggccgccgctccacccgtacgacgacaccatgagggagtgcatttcgatccacatcggccaggccggtatccaggtcggaaacgcgtgctgggagctgtactgccttgagcatggcattcaggctgacggtcagatgcccggtgacaagaccattgggggaggtgatgatgctttcaacaccttcttcagtgagactggtgctgggaagcacgtgccccgtgctgtttttggtgaccttgaacccactgtcatcgatgaggtgagaactggcacct

SEQ ID NO: 336907 - DNA, 204 bp, Zea mays
acgcacgcaccgagagaaaaacgccaagaacaagaggagtgccgccgaccctgacacaaggcgggacatcaccgcaccggccatgggggcgcgcaagaagagcaccaaggaggttgacgagcagatcagcaacaaccaaaacaagaacggataccaccccggggagaggaaccccaacaacgccaagaccaacgagcgcgacag

SEQ ID NO: 336908 - DNA, 448 bp, Zea mays
acccacgcgtccgggaagctgcagaaaatatttctgtgaggttgaattgtaggtgtcgtgaactatgaaaaatattctagtgattttttaatatagttttacgatagcattttttctttactgcaacatgcttgggattaataggctttgtagttactgctgctgtagattgaggatagctactagctagtttttttttctctgaacattttggagattatatttagatgatgatgaggataactagtctgattttaactggatcataaaggtttggcgatttacattttatctatttgtcttggtttttctttcaaaaaaagcccttaccaatcacaagcaaccaagacgctgttcaacttaaactttgcttacctgcactatatttacatttctgtgaaatagtggtccattgtatttaactgataattgggaaatgtttttattt

SEQ ID NO: 336909 - DNA, 62 bp, Zea mays
tgggattattatttgttcatcgatgaaacattttatggcgcataaacaataatctcatgggg

SEQ ID NO: 336910 - DNA, 186 bp, Zea mays
acgcgaggggatttatgatgagaagcgactggcctaggacacggggattgctaaaaggggagcttcccatatgggataatttggaaattcgagaactggctaatctatagtttgtcgaattccagaaaagctccattacatggttggaattctttatactgacaaagtatctgaagttcagcataa

SEQ ID NO: 336911 - DNA, 250 bp, Zea mays
acgcgtccggagcagacaacagacccgcaccggaatggccggggcgctcctcttgctgctcgttccgaccgtcggcctactcgccgcgctcgcattcctcacgcggccccgcgccctgatcgcgctcaaagacagccacgacttcatgaccggcgggtccagcgacattaggctcgccatggcctcagacgatgcacgggagggcgcgcgggtctccatccaggcccggaaccttggccgactaaaggag

SEQ ID NO: 336912 - DNA, 58 bp, Zea mays
ccccccccaaaaaaaaaaaggtccggtctcctttttctcttaaaaaaagaaggggggg

SEQ ID NO: 336913 - DNA, 263 bp, Zea mays
ggagtcagcgaagcgtgagattttagctaagcctgtgcaggttggatccgcttctcatcaatcaattcggacgcaagttgctgattacgcgagcaatgccaataaagctgatggcgcccggcgagatgatgaggcacatccttctaattctaatgaaaactatgaggctgatagtgatcgtgaaagtatggttgggcaccaaaatgcattggtttaaggagcagagggtcaactttcagagaagtctgtctttacttctaaaa

SEQ ID NO: 336914 - DNA, 423 bp, Zea mays
acttgttctagatcgcgagcggccgccctttctttttcctcttttgtcgtctttttctttctattctttgtggaacagcacatatattttttatagtctctgcaagactgcgttattatctgatccattcatcattctccaataacttgactcttgaggcaccgaaaattttaatttggagcttaaaaacatttataactcatttgcattggtgtggtgtgcatgatgcggggctacacagaatcatacatgcatgtacaactagaggctacacgtcttcccactggataccctagttactagccagtgcgtacattactagtgctggaagataagtcgtagccagcaggaaaaatttaaacccaaatcatggctgggaaataaaaaaatttgacagatgggaattgcttggtatatttatgt

SEQ ID NO: 336915 - DNA, 160 bp, Zea mays
gaggaaagaaggggagaaaaaggagcagaggttcgaaaaaagaagagacatttgagacggggggaggacaaaagaagcggagaggggaaggaaggcggttgagcgggaggaggcaggggacacaggcaacaggacaagggggagagagcgggggacagac

SEQ ID NO: 336916 - DNA, 129 bp, Zea mays
ggcctcttgaattggctcgtcttccgttttaacgccacctcgcgacgcggcccccaacccccaccgttgcggtgctactgctaccgtgctacaccatcaggaatcggacgcgggacgctcacaccacca

SEQ ID NO: 336917 - DNA, 126 bp, Zea mays
gggaaattatctacttatattactttgatgataggcatacggttgaactgtttccagtagatttcctgacctcagttgctagctggtactaccaggatggtgaaaagatctgtatgcattttgccc

SEQ ID NO: 336918 - DNA, 325 bp, Zea mays
gggccacgcgtgcgccaggctctcctctggcaccaacgaaaacgtgctcgcccctagagcccaagctgtccgggcgccccttgctcccatccccgtggaggtctccccgtcgcagtgcgcggtggccgcgccatgcgcgagtcaaagcgacttctggcagcacctggaccgaggcaacggcgcgagagcataaagagcggaaaaaggtgcagagatgcgggggctcttaccgagacgaggggaacaaccgagcgcctgggcgcttcatgggcacgtgacaagggagaaagggctggtcttcctgaacgcggcgcaccaagggatt

SEQ ID NO: 336919 - DNA, 58 bp, Zea mays
aaggtggtcgtgtttggcgctatctccaccacataaacatgaaaatgttttttttatt

SEQ ID NO: 336920 - DNA, 212 bp, Zea mays
agcttcgtggggagggggtccttcacctgcgggcgctgctgctgtaatgtgcggaggcccgtgaacgcggacaacctcgacgacgcgcaccatacgctgctggagatcgcggagctggccacgcctttcggcaccttgacccagcgcgtggccgcctactttcgcggatgccatgtttgctcgcgtcgttagtttctgcctaggcctgtacg

SEQ ID NO: 336921 - DNA, 304 bp, Zea mays
cgacgacagcagggcgcgtacgcagatgcatggagcatgggagactcagctctaggatacacaggggcgtatcggtccaggcgtcgacgattatggcatctggctctggcactgggtggacgagcagaagcggcacacggcggagctgatgtcggcgctccaggggcagcagacgtcgtcgacgtcggagctggagctccgcttgctggtggagacggggctcagcaactacgagcacctcttcaggatcaaggcggtggccagcaacgcggacgtgttccacgttatgtcaggcgtgtggaag

SEQ ID NO: 336922 - DNA, 442 bp, Zea mays
tggccatgccgcctctcctcttctcccttcgaccctcgccctgttcaggcttcccgctacgccgactcctattccgctgctccgcttcctccgcctccaccttctcgtcgctcgcctcttaccacgcctccttcgcccgccggatggccctcggcggcattcattcgcaccaccgcatcggggtcggggtctccggtggaccggactcgatggcgctgtgcgtgctcgccacggcctggaagaaggcagcggggaggaaagccggtgatgaggaggatcccgtcgcctcggcattcgtggacgggctcctcggagttgtcgtcgaccacggtctgcgccccgaaagcgccgacgaggcgcggctagtgcgtgaccgcgttcgtggcatgggtaatctcatgtacttaggccctatttgttcaaactatagattatataatct

SEQ ID NO: 336923 - DNA, 167 bp, Zea mays
cgcacacgcgtctgaactgatgtataacgttgcatctgatatacatacgcactttaccggggagcattcctctgactgggcgaaccctggcattgatgctcattctgtcgctcttttgagggccaactattacactttggcttggatattggctagggggattatag

SEQ ID NO: 336924 - DNA, 218 bp, Zea mays
  unsure (1)..(218): unsure at all n locations
cgcgcccgngnacggnacgccgacactggagcttttgtagctcatcaagatcagctgctacgggggggggccgtgcgacccggacgcccgccactaactcgcgggcgacgcggaagaaacccaccgggggggcacgtgcatccaggaggccatgccggaccacataaacgccacgggaggtccggaaggtcaacagaccgtgcatgtggaacatgacc

SEQ ID NO: 336925 - DNA, 195 bp, Zea mays
tcgcgcccgtgtaccgggcgccgttgcttgagcttcctgggcttatataagataaactttgaacgggggcccccctgcgaacccgaagcccccgaattggtttcggggcaaaccgaaggtaaacccccggggggccagggggatccaggaggccttgccgaaccacttggaccccgcgggagggccggtcgtccg

SEQ ID NO: 336926 - DNA, 54 bp, Zea mays
ttcccctttttaagttttgccgctgttgttgccgctgccaccctccgtccgcgt

SEQ ID NO: 336927 - DNA, 259 bp, Zea mays
ccgcgaatcacagacgcggctatataagcttgctgtactgcactaccctgccctgccataagatcgtacgtgagcccgggcgcgcgagagccttggagaggcatggatgatgctaaggttgtgacgctggctctggtcgtgctgctggaggggaccggggttgatccaacagccgcggtgcgcgcgagcaactctcgatccagcgtgtacagcaggctgatgccgtgcctggcgtacttcacatgggcggagccatgcc

SEQ ID NO: 336928 - DNA, 218 bp, Zea mays
gcgaggcatccccgcacgtcgcagccacaacccaagcgcaacgatctgccttcgtccgatgagctccgcgtgcctccgcgtcatttcgcgagcggcctcccacaccagcgccacacccggagaactggcttctgctgtgcatctctagaagggcgagcgaccgaccatggacggcgtccactgcaaaggcacccacttggaggaggcaatgctggcga

SEQ ID NO: 336929 - DNA, 127 bp, Zea mays
ttaacgttggagccatcagagaagtaatttaagagaccgggattgatgcagtatttgtggaagtgctggccttcaggcactgccgcaaagctgtttttgattcatcatatctatcatcatagtgcct

SEQ ID NO: 336930 - DNA, 309 bp, Zea mays
catgcgtgcggctgatcgaggacgacgagggcgatgctcgactaccggatgctcgacggctgcctgctgtgggtgctgacgacgactcgctcgatagacgcgcttgatagacatcaagcagggcgtgaacacagaaggatacaccatcctgtacactgatatgtgcgtacatttacacttacctaaataagttcatgcggaggcaccgcagcaacaactagaagatctgaacggccaccggctaggatcctgatgtacacaactcttgcagggcgtgaacttcgtccacggccgtggggtgctggaccg

SEQ ID NO: 336931 - DNA, 113 bp, Zea mays
ggaacacaagggggggaaggcaaagcaagaggccgggcgaagtgggagaaaggggggaagggagaaggggagacaaaagaagggagagatcaagaaagagaggagcaacaaaa

SEQ ID NO: 336932 - DNA, 179 bp, Zea mays
gggccgacccacgcgaacgacaagaacaatcgcagcaaggcttccataaggtcaagcgaggcagaaaagggcggctgtgagggaggattcttgggatggcacgaggaatggggcgacaggctgagggagcaaaccgtgggaagcaagggtgcgcacgtggataacacacaggggggggg

SEQ ID NO: 336933 - DNA, 270 bp, Zea mays
cagccgaagggccccggggggaaaagcagaggcgctgtggaggatcatcatagggacgagatgcaccgtcaagtgcgcccccaggggaacaaaaccaagcacaaggggcatcacaggggacacacagcaggcaagggcctcgagacgatgcagaagctgtgataggggcaggtggtgccaggaacagctacaaccgcaggcaaaggggagcaactatgaagaatcaagaaggcgcaccaggcgagaagacagaggagaatacaggaaggg

SEQ ID NO: 336934 - DNA, 291 bp, Zea mays
aagaagcacagggagcacatattagagaagggggcgagagacagagggggggacgacaggaacgagagggaggaggcgaaaaacgaccaggagcaagcgcagggaaacaagaaagaggagggcggggcggaggaggaaggcaggggaagaggtggtaacgagggaagagagaaaagaacaagaaggagggcaaaaaagcgcaggaggaaaccagagaggaggaggagaaaggaacgagaaagaaggggaagaagaagcaacaaaacagaagtgggaagggggagggggaag

SEQ ID NO: 336935 - DNA, 430 bp, Zea mays
gtgatgtactgtctgttgctgctctacaccggtgctggaggacggcattgcccgtcgtgtaggggcgatgcctcttgtccgtgctggcggctgcgccgtcgtggacttggtcctcgcgcgctgtggaagagatttatgatcggcgcatgggtgcctttgatagcgagcaggcaggaatcactctttgtgtagtgaccggcccgacgaggaccaggactcggtcgatgcgacagatgatgattgcgaacgggcgcctgtgcataccaaggacttaacgggcctcatgcagatggtggaacactcggagacggcatgcttctgtgaggtgaccttactgggaggacatggctaatgcatggcaaacacttgacctggagctggcaactttggccgtcttgcgtgaggagaaaatggggccactatcatgcat

SEQ ID NO: 336936 - DNA, 237 bp, Zea mays
cctagattcccgaaattgaggcaagacaacatcaccccggggtggcgtgatccaggaaggaatcaaatctccatggattttccatggatttgaggatcataccttcgatgacccatccgcataatcctaggattcatcttcgaatgatgcatctggatttttgcgagcggttcacatccagcacgtgcgaacttcatcctctcgaagcccttgtgcttgtcgctgccggcgggagga

SEQ ID NO: 336937 - DNA, 392 bp, Zea mays
cttcgtctccgtccgctcccggcatcgtcccctcttccccgtctcgcggtcgccgcccacgggcttcgattgatcttcttccggtgctggtggcaggtaaggaacctttccctatcctcggttcgatggattcgatcgttcgttttgtctccggttgaatccgatttttttccatgttcccaggtggacggatcgtgtccttgcttggccgcccacagcagcaatggacgacggggacctggacttcttcaacccggacacgtacctgtgcccggcgctcggcactgacccgcccagcagctgctccatggacagctacttcgacgagatcctcaaggacacggagcaccacgcctgtacgcacacccacacctgcaacccggcggtgcacg

SEQ ID NO: 336938 - DNA, 301 bp, Zea mays
tgaacataaccatcctatagcgaccaacattctttctggccttgatgccacaggacatgtgctcaccttggactgctactgctgatacatgccaatgctcagcgtcatcaactagctgatgtaccagctcccgttgcagaccccccagcaggtgttcatgcaggaagacgtggacctcaaacgactcatggactccttcaagctcattaatgctgagtcgtttgtcgatcctagaatgcacatgcttctttattagctgcatgctcgattcctttgttcccggacaaatagtaatatcact

SEQ ID NO: 336939 - DNA, 448 bp, Zea mays
ccagactgtcatctctgcattggcatacttggtacattttcttgatgggtaccagcaatattggttgaggacagcctggggttttgataacgaagttagtttttattacatatgtggtaaactgcttaatcctttctttgttactactttcacctgtttttgcatgcctgatcgataaaaaatcatgccctgatttctatgatacctattgtattcatggattcttggaactcattaattgaatgggaattatttaagtttttaaattaatgtgaaaaatgatatgagtaaataataaggaaaagagcattaaaattatgtgttttttgtcagaataaaaatgcaattattgggagttaacgtgcaaggtgccatgaaaagttttgcttgcaacttaaacatctatccatggcctagattaatgagtgtttgctattcttacagaagt

SEQ ID NO: 336940 - DNA, 221 bp, Zea mays
ctctatggcacataaggcggcgcagtgtgcaacgcacctgctacgacggatccaccgtccatctgatgcaacagagcactggtgggtggtctgccacgcaagacgacacatggatatgacagtgatacatgtgcatcctatgaatgctgacacaacgatcaccacaagctaacttgaccaactaaatagacgcgcacgaagttcgaaagagaggcatacaa

SEQ ID NO: 336941 - DNA, 350 bp, Zea mays
cataaaaccagtgcaagcagaagcagcgcattggcgagcagcaccatggccctctcctccacagccttcgccggcaaggcagtgaacgtgccgtcgtctctcttcggcgaggcccgcgtgacgatgcgcaagacggcggcgaaggcaaagccggcggcgagctccggcagcccgtggtacggccccgaccgcgtgctctacctgggcccgctgtccggcgcgcccccgagctacctgacgggcgagttcccgggcgactacggctgggacaccgtggggctgttggcggacccggagacgtttgacaagaaccgggagctggaggtcatccactccccctgggccattct

SEQ ID NO: 336942 - DNA, 441 bp, Zea mays
gctgatcatccatgcacaatggtggtccggacgaagcactggatcataccagactacttcgcttggggagtccacatatcgctgctattcctaaaccgcttcgcagagctattgatccacaagccgggcgaaggcttcctcctttggctcctcgccaccctgctggctcctttggtataactaaccaaataatccatttttctcctgttccttttagaatcttaattacacgcagttgatgcgggttttttttttttttgccagagatggctgttctcgaagttcgccgagagctactacgccatcccgatgaggaagcacggcatggtgccggaccacagtctgttccaggcgttggccacgtgcctgatcgcgatccagccgaaggggttctacgagaggctggaagaaggcagcatcgttctcaagaggtcgaagacg

SEQ ID NO: 336943 - DNA, 155 bp, Zea mays
cggacgcgtgggtctggttttgcttatgcatgcatgcatccaattttgtagcagctgttgaaactgacgttgcccaacgcacgaatcacatttgatgtaaatgcagttttttgctgcgtttatttaaaaaaaaaaaaaaaaaaaaaaaaaatatg

SEQ ID NO: 336944 - DNA, 438 bp, Zea mays
ataggcgtcttcgtactcgcctacctccgcggctcaaacctttcccccttctcccaattccttccgccggccgccgctccacccgtacgacgacaccatgagggagtgcatttcgatccacatcggccaggccggtatccaggtcggaaacgcgtgctgggagctgtactgccttgagcatggcattcaggctgacggtcagatgcccggtgacaagaccattgggggaggtgatgatgctttaacaccttcttcagtgagactggtgctgggaagcacgtgccccgtgctgtttttgttgaccttgaacccactgtcatcgatgaggtgagaactggcacctaccgccagctcttccaccctgagcagctcatcagtgggaaggaggatgcagccaacaactttgcccgtggtcactacaccattggcaaggagatt

SEQ ID NO: 336945 - DNA, 285 bp, Zea mays
acgtccgatcaggcatgtacaacgacttcccggacaccggggagcgccagcacctgtccgcgggagcctcggcgctgcccaccttctacttcatcttctggctcgctaactctggcctacccgacgcctgagattacatgctggcgcgcacgcgggccggcgtattccggaaccactactatatgctcgacgcgctcgagctcaaggcgctcaacctcctctccaaggccgaggacaagtcaagcatcgaacacaccggcacggcccacagatgggacgtgctct

SEQ ID NO: 336946 - DNA, 105 bp, Zea mays
ctcccgctcccttccttcctcctcatcctcctcatggctctgtcgtccgccggctcgttcgtggcctgcagcctccggccaagcggagctagcattcatgccccg

SEQ ID NO: 336947 - DNA, 375 bp, Zea mays
gataaacatactgaagaccatgtatccgtcttaccctaatcccaaaatttttgtggaggaggatgtcacttgtgtaccactctttgaaactgtgcaaactggggtggagctcttaagccatatagggaatcccccgcgacactgttgaatcctacagggatttgggcatctggattggaccattgacctaggatggtttcattggtggtggcctccgacctcctcctgaataatgtaggcgcagtgacaccagaactgccgttttcttaatttttaaacacttttttgtacgggttaaggccaaataaataggcccggtgctgactgttgaatggtttggggccaattggggtggttaaaaccttccaaaaattt

SEQ ID NO: 336948 - DNA, 446 bp, Zea mays
cacgcatactgcatacacaacacagagcatcagaaggagctacgatctgatcgacatggctgccgccaccatggctatcacctcccgcgcgctcgtcggcaagccggcggctggcacgagggacgtcttcggcgagggccgcatcaccatgcgcaagaccgccgccaagcccaagccggcggcgtccggcagcccatggtacggtgccgaccgcgtcctgtacctgggcccgctgtccggctcgcccccgagctacctgaccggcgagttccccggcgactacgggtgggacaccgcggggctgtcggcggacccggagaccttcgccaagaaccgcgagctggaggtgatccactgccgctgggccatgctcggcgcgctcgggtgcgtgttcccggagctgctcgcccgcaacggcgtcaagttcggcgaggcggtgtggttca

SEQ ID NO: 336949 - DNA, 381 bp, Zea mays
cctaagctgaaaattacactggtgtgtaccaacctgcctatgcattcaccaatattcgattctcatcaaggaccacaggggagcccacatcaattacgtggacacatataatacacttaaaggcaattgccgatggatcgtgtcccatggatattcaaaaaggagatgttcttgcttggccaacgaatctagcacggatgatgggcccttggctagtttatgcctgcttgctgaatggaacatccatggctctgtatgactggatcagaacaatgtcaagcatctcgaagtctgtacacgatgcataaagaacaatgcttggactgcaacacaggattgttcgtacttggaagaatactgactgtacagatggactagact

SEQ ID NO: 336950 - DNA, 252 bp, Zea mays
  unsure (1)..(252): unsure at all n locations
atcgtcgggagaggaaatcgcaaaagagggcccgtctcatcncgagttataggaagccatggagcacataggaggctgtggtgccaaggtcccccgagaggacccaatcctctgcatcaaataactgtgagcttcttcggcaagcgcggcgaccaatgaacatgtgctccaagtgccacaaggagatgataacgaagcatgatcaggccaagctggctgcctcctctatcgacagcatcgtgaacggcagcg

SEQ ID NO: 336951 - DNA, 127 bp, Zea mays
tccgggcgcgtggtctttcgtgatatgccacgaatttgaaagttcgcaaatatctactgaattaagttgctggctttatgagggttacattagaacatatagattgtgaaaatgaagccctctattg

SEQ ID NO: 336952 - DNA, 264 bp, Zea mays
cggtcgcgtggtcggacgcgtgggcaaagaatttccttccctatccgccgccggcgctcgtgtgcctgagaggtgcctgtacctaggaactggccgagttctatgtagagaatatgttttgcttgtctgactacgagatctgctgcgtctggtggaggcgaaagggagaaaatcctctgatctgtttcgtataacgcgtccgagctcgcaaatgaagggttttacacatagatatcccgattcgaatttgaaagactaatggac

SEQ ID NO: 336953 - DNA, 436 bp, Zea mays
  unsure (1)..(436): unsure at all n locations
gcagaacgaaagagatctccggtccccgggccccggctcctcccctcccgattccaatctggtctcgccggacgccgggcctggcggcgagggagagatggggaagaaccaggcgtacaaggcgatgcagcgggcgcggctggggtcctcgtccggcgcgccgggcgccgtcgacgcccccgaagacggcatgagtggcatgcggcgcgcctggccagccttaacaagacgcacaccctcacctgggaggagttcaagaagaagcagaaggaagaggaactgaaaaggggcgagctggaggctgacaaagacaaaatgatgagagagtatagagctcaactggatgctgaaagagctcaaaagctagcaaacggaagaaatcactcaaggtcatactcataatcatcatcttccaagaaagaganggaggataagg

SEQ ID NO: 336954 - DNA, 146 bp, Zea mays
cataaacacaagctcccttagtcgtagtcctctcgtttatcggttggtggacagtggatactgcgagagatcgatcaaaggaagaagagggaacaatcaagaagaagaagaagaagaagagatcgtttagctagggggtgcaacag

SEQ ID NO: 336955 - DNA, 121 bp, Zea mays
gaggcgtttaatgccagactcatcgtaattttcattagacttccatttacatgtggtaagttttcatatatacaatgttgatgatgtatacaactttaatgacgtgactgtgttttttttt

SEQ ID NO: 336956 - DNA, 235 bp, Zea mays
cacgcgttcgctcttgctcgcgcatcatttgtttgcacgtttaacggtatgcgcggaaggtcataatcggggtccggcggcgcattttcctcgcccaggcctatttcctcacggtgctcggtccttctcctattctcccacagcctttcccccttgtcccttctcccctgcgcccctgctcgctcagctccccaaccccatctgtctgcgtgtctgatccacagtccacataccc

SEQ ID NO: 336957 - DNA, 455 bp, Zea mays
tggagattgattgatcctgaacagtgtagggactcgagtggcacacatcccttgttccagtgtgcctgccattttttgcctgcaaaattggctgctggtgtatgtgtaatattgtcgttttactgcctgcagcggaatgtaagatgccgcaggcttgttgctgtcacctaggcgtagactgaacagatgttgtgcagggatcgccgatctctgcacccttatgtttgttgtacgaggaaaaccggattctgttgaaccctcgtgttcaaaaattcattgattcctgatggaaactgatttgtaaatgaacatggcaatgccgccggacaggttacagtgtatcctgtaagaccaattcttttggtccttgaacaatggaatgcagactatgttttggtcattcaaagcaaagctttggtgtgatgttattgtgttggatgcaaagcaagcgatct

SEQ ID NO: 336958 - DNA, 178 bp, Zea mays
ctcgatctgtcccattcccgtcagaaaacccagcgaacctaggtccggcctcgctcttttcccgcgtgaaagtcacgatgcgcaagagaaccactccgggggcctggctggcgggcccgtacgcgccggggaaccgcggcgcatgcgcgaggtcgacacccaacgagcgtggcctggg

SEQ ID NO: 336959 - DNA, 318 bp, Zea mays
tcgagaaaatcaactgttctggggccaaaaggaacttcaggttcaattaagtggatccttctgaaaaaagaaaagtaatactctgtatttctagcatccttggtgtgctaatttatctgtttttttttcctttcagatattgttgttacttctggctttgatcgctgttccatggatgctcttcccaaaaccttttatcttgaagaaacttcataaggagagatttcaaggtcacacttatcgtttcctagggacatctgaaatggatccagattctgaacctgatttcgtccgagcacgtcatgatgattttccatt

SEQ ID NO: 336960 - DNA, 112 bp, Zea mays
atccaattccaatcttagccgttctcagaggctgcttctaccagcgagcgacgcgtgccatgcgtctcgccgctgcgtccgccatacccaggctccgcttagcgtctggccc

SEQ ID NO: 336961 - DNA, 172 bp, Zea mays
ggcgacccacgcgttcgggactatgtaccatggagccctcctttgctcacggtccacccaagcatcgggggagatctgggcgttggacacatttgactgcatgcctaccgacgtggtggggttctcgtaacaggatatagcgcagctgtcgctcattcagaggtttctcgcc

SEQ ID NO: 336962 - DNA, 412 bp, Zea mays
  unsure (1)..(412): unsure at all n locations
ctccccctccggttcgggttcgggttcgtgaggttctccggggttcggtttcgtgggtgagcggatcgagatggcggcgtcggatgttgagtaccgctgcttcgtcggcggcctcgcctgggccacggacgaccactccctccacaacgcctgtagcacctacggcgaggtcctcgagtccaagattatcctcgatcgggagacgcagaggtcccgcggcttcggcttcgtcaccttctccacggaggaggcgatgcggaacgccatcgagggcatgaacggcaaggagctngacggccgcaacatcaccgtcaacgaggcccagtcccgcggcggccgtggaggcggcggcggcggctacggtggtggccgtggaggcggccgctacggcggtggcgggcgccgtgatggc

SEQ ID NO: 336963 - DNA, 278 bp, Zea mays
tctttcgggacgccatcattaacgcggtgctcgccgatatcacggcggctcttaactttagggggaaggagaccaccagggaggtggagtccattctctacaagggactcaaccttatccaggccgatctattataggccctcgtcaacctgaacgctcaaatcgattttgctgtgaacgcgcttaacccccacatcgcctggcttattgatcatatctgtaccaatgttcttctataagggttattaaaccaaatccatattgccttataatattac

SEQ ID NO: 336964 - DNA, 288 bp, Zea mays
agcggacaccatgatcgctgcgctctcctatatcgattcgacacttctcatgagggggtacgagacctccggggtgctgtcagccaacctggacgaaaaactcacacattttgattgcctactcgagataactctcgccaacctcgagccgcaaaaagacacatctgtaaatgcgctctacgcccaaactatcttgctcactgatgttaccgtcatgatagtgctaccatccatgtgactaaaccaaacccctcctgccttatgctactactatagtgacactaacat

SEQ ID NO: 336965 - DNA, 299 bp, Zea mays
  unsure (1)..(299): unsure at all n locations
aagaagataaccaaggataaccagagtgtgctggtttattgcttctcatgggttgtaattttcgttgttttactcgttatgaagaccgtatagtggggagaggaggtcatcanattcaagtatggtcggttaaaaggtctatttttactttaagcatgggtatctataaatcctggcatgacgttgcattttttgatcttgctatgccatggatgggttgtctgattgccactatagcnnattaaaaatggctggggggtcacaaagtttgccgggctcagatctatggggtttctgtt

SEQ ID NO: 336966 - DNA, 195 bp, Zea mays
  unsure (1)..(195): unsure at all n locations
tatctgcggtactaatatatctacaggctggacaaatatacatgggggaatgtaccataccctacgcgtcgcttgatttctataactatttatgtctgcctacgcatccttacccaatacacgatgaggacccacttgatctctnnctattagcttatcaaaattacaatggagagttatatttcttactttaca

SEQ ID NO: 336967 - DNA, 403 bp, Zea mays
  unsure (1)..(403): unsure at all n locations
cggacgcgtgggcggctatctgtggtacgaatatatctacatgctggacaaacgtacatgtgggaagtaccatccctacgcgtggtggatagctttaactatttatgtctgcctacgcaattgcacccaacagttgaggagtactcatttgttgctcttttgtttggattgggaaaattacaatggagtgttatatttctcagtttctcatttggctcangtaagtgccggacctggcttttttacataaagaaatgttttattgaaaatcaaaacaattacatcagtgattnactaccatcctgagctactcctggcagcaagcaggagttcatgaaactgaatctctgaaagaaaaatgctgaaatgttttttgagcttctgctgcgcaggttcaggtttt

SEQ ID NO: 336968 - DNA, 407 bp, Zea mays
  unsure (1)..(407): unsure at all n locations
cggacgcgtgggttcttggccttctctgcttcgctgttcttgttcttgagatcgcgctttctgaccggggagtgccgtgccggagatcctgaaaagaggtgatgcaattgcacagtatagatacggctttctctgctattgtcccctgcttttgtttcatggatatttccttcttcttgttgccgactgaatgataaggtctagatatatatatttgctttgcttggaacaactctctgaaagtcccggaaactctgtcggccggatcatcgcatcgcagctcccgntttttgcatgcagcatgcagcaccgatcgagtaactgatgctgaaattctcgtgaaacagacacacaccacacaccacggttgcgcgcgagaagtccgagacatggacagggagcagatg

SEQ ID NO: 336969 - DNA, 285 bp, Zea mays
caatctgagagagagagagagctccttgccaagcattagaggtggcatgaaagaagagggctatgctccggttgacagacctctacaccctcacatactaataactacaacgacggacacagccggcccttcaccacaagcaaccgctccagacggcttgattggcaacacccccaacgataccatgctgtgcgacactcgtctgtataccaatgagacaatacactacactgcatcgcttactaatgcttgctacatacactataacagacgtgatatgctgca

SEQ ID NO: 336970 - DNA, 478 bp, Zea mays
  unsure (1)..(478): unsure at all n locations
ttcactgtctactactgccgctagccgcgcctgcttgctgcttccccctctctttttctggggtctccattccagcatggccaccaccagtccaccattccagcatcgccaccacccgagacaaaaataataataaaaaccaacaacaacactgtagcgagaatatacggcaaaaccctagatctctctctcctctcggcattgctggctggggtgtgcggcggcccgcagtggtgagggacgcacggcgatggcctccgccgccgccgtcatcgcctcgccggtcccaggnnccgccgcggccgagcccgccgcctggctcgtcgacgagcgctacggcttcatcaccttgctgcgcggcgagttcgccgccgccaacgccatcgtcgaccacctcatcttccacctccgctccatcagcgagccgggcgagtacgaccacgtcttctctctcgtncagcagcgccgtcaccactgg

SEQ ID NO: 336971 - DNA, 219 bp, Zea mays
acgcggacgcgttgggtttcccgccaccaccgcaagggattccaaggccaggaagaaccagcgggggttaaaaaaaatttccggcttattcaccaagtccaatttgaagggcctattccggggatcttggcgcaaattaacccccttcccaaccggtgatgtgacccgttcctattccaatacaaagggccctttcgtccagcttgctttatacaaact

SEQ ID NO: 336972 - DNA, 112 bp, Zea mays
aaaaaaaaaaaaaaaaaataaaaaaaaaaaattaaaaaaaaaaaaaaaaaaaaaaaaaagggggggtaaataaaaaaaaggggtggggaaagaaaaggtctggccgtttaaa

SEQ ID NO: 336973 - DNA, 312 bp, Zea mays
  unsure (1)..(312): unsure at all n locations
gcgtccggatcgggttccaaccagcccaaaccaccccgccgccggccgtttccccgcactccaccacctgcgccggcccatcctcccggcctggcccatgccaacgcgccccgcgctgcccttgccgtgcctcagccggatccccctcaaagcacgaccacaccacgccgccggtaccggcgcaccatcgaaaccaaccctagccaaaccaaatcagatcagatccccttcccctctccacgcccaaatcgctccgatccgccgcgaccgcgatggacgacgacgacgacgtgtcnccctcctcctccccgt

SEQ ID NO: 336974 - DNA, 360 bp, Zea mays
gcgagtggcccagacgtcgcgactcgcgaggccgaggcgcggcggcagcgacgactccaacaaccacgcgcggaggctgcagtgctccagccaagtagcttttggtgtgctgaatccaacaccagctcctcctccctttgttatgtatcctgagatctccatggagggaacgcaagctcaggacacagttattacagtcacacaatatactgtacctattctatagtgaagctctgaatttcatttctttttaaatatttatacttcggctgtttgtattattgtagctaccatgaaaacagttgcttaatgcatctctagatcatttctattaaaaaaaaaaaagaaacctataaacaa

SEQ ID NO: 336975 - DNA, 450 bp, Zea mays
ggagggagaggaagaggaggaacacctccggcgtcaatccagcaggcagcaaatcgatgagagagaagaggagagacttcaagagagaggtagagagagagagagcggactaagcggcgatggctgcaggcagcagattggtgagagagaggcggatcggcttctcggtagagaggtgaagatcgcgtgagggaggagaggcttccggagagggagccagacagcgtacagcacgggggaggagaggcttctagagatggagccggagagcacacgcggccgcgccgagcgtggaaggaggcagcagtcacaggagagggcttttgggttgagccttctgacacgtgggcttagtgggctgcagactcatgaatagaggatgaagaggttaaaggctgctgcacggttgaccaatatcatgttgggttaccccttcatcacctgagatca

SEQ ID NO: 336976 - DNA, 55 bp, Zea mays
atcgacgtggcgaagcatgttgtccgggacgccggcgccaaaggtctcttcaagg

SEQ ID NO: 336977 - DNA, 273 bp, Zea mays
ctcacacatttgtggctgaatcgctcggtatggtgatacatacaactagaggccgggacgaccacatgcgggatatatcagttttctgcctatccctgttcatgaatcaccatatggtaacacccgttatgtcctgagccatcgaggatcttctctcaaagctattactaaatgtatgctcccaccgtattacaccagtagctatagacctcgtggatctaatattgacaggagatcatatatttttttttacttaagacacaaccagcgtag

SEQ ID NO: 336978 - DNA, 439 bp, Zea mays
gccaccatcgaccttcaagtctcgctacgtagcagtgcaataaaaaaagcagccgcaatggcgagcagcaccatggccctctcctccacggccttcgccggcaaggccgtgaacgtgccgtcgtcgtccgccttcggcgaggcccgcgtgacgatgcgcaagacggcggggaaggccaagccggcggcggcgtccgggagcccgtggtacggccccgaccgcgtgctgtacctgggcccactgtccggcgagccgccgagctacctgacgggcgagttcccgggcgactaccgctgggacaccgcggggctgtcggcggacccggagacgttcgccaagaaccgggagctggaggtgatccactcccgctgggccatgctgggcgcgctcggctgcgtcttcccggagctgctcgcccgcaacggcgtcaagttcggcg

SEQ ID NO: 336979 - DNA, 54 bp, Zea mays
ccggtccgggctgcccgggtcggcccgcgcgtccgcggtccccgcccctgccgc

SEQ ID NO: 336980 - DNA, 67 bp, Zea mays
caacagcgaaggagaaagcagaccaacctagccacccagggagaaagaggccaaaagggaggggaga

SEQ ID NO: 336981 - DNA, 195 bp, Zea mays
gaaaaaaaggatcgacccgcgcgtgcgcaacagcgaatgacaaagctcaccaacctatttatccattgagaaagacgccaaaatgcagcgtagagtgtcaacatgaatttcgttgtctcttacaacatcgcctttcctctagttcgcgctatgcagaacctcatatcaatgtccttcaattccgggactatctcc

SEQ ID NO: 336982 - DNA, 195 bp, Zea mays
cgactcacgactgtcttgcctgccctgcgccatgcggagccgaagaccaaccgaccaacagcggaacgcttaatcaagcaaggatgcacggtccatacccgataataatgctcctcttgatgctctgcacggtcgcagccgtctacaacggcttctattcccaagtacgtcacgccagacggcaccgggtaatct

SEQ ID NO: 336983 - DNA, 398 bp, Zea mays
cgggtcgacgacgcgtccgacaatatgtcccttgtaatgaccagagcaacactaacgcagccggtgaggcggccagcgaagacacggggacctcagatagtaatagtggccaaaaggttgtgatctttgcgcctgctgccacacttaaacaaagtgtgaaaacttcactttctgacgctgttcaagatgctgcaaaagctgcactggctgtataaaacatagaaatggagaaggcaaaagagattaaattggcctcaaaaacatagtctcatacctaatgataagaacatgagcaatgtcctaactctgtggacgcaaaggaatcaagaacggcttgctgcacgaattggccttgatgacaaagaaccggcaaattctgatgatcaatttactcattc

SEQ ID NO: 336984 - DNA, 273 bp, Zea mays
gtgatctgaatgttgtttacactgataatactgctacagattgttccatggagctccccagactgaactggagtgttgaggatgttccaggtgatagtcaacctgttgagaattctagcaagaaaactttgagatgtcccactgccggttttgaggacgatcttcctgttaccaagatggatggtactcccgttactaatgtggacgatgtagaattcacctttcatgagaagccacagacagatactgtagaagaaaatctttccatacaga

SEQ ID NO: 336985 - DNA, 487 bp, Zea mays
  unsure (1)..(487): unsure at all n locations
aaaaaaaaaaaaagggggggggaaaaaaaaaaanaaaaaaaaaaaaaaaaaaaaaaaattttaaaaaaataaaaaaaaaaataaataaaaaaaggaaaatgggtaaaaaaaaaatagggggaaaaaaaaaaaaaaaaattaaatataaaaaaaaaatagataagaatattaaaaaaaataaaaaaaaaaaaaaaaaaaaaaatataaaaaaaataataataaaaaaaaaaaataaaaaataaaaaaaaaataataaaaaaaaaaataaaaaataaaaaaaaaaaaaaaaaaaataaaataagaaaattaaaaaaaaaaaataataaaaaaaaataaaaaatttatgaaaaaaaaaatgaaaaaaaaaaaaaaattataaaaaaaaagatataaaaaaaaaaaaaaaataaaaaaatttattaaattaattaaaaataaaaagatatatttatataataaataaaataaaaaatataataaaaatata

SEQ ID NO: 336986 - DNA, 283 bp, Zea mays
cggacaatatctttaaccactttatcaaaattttacctttttaatactaaaaaaaacaacgcggcactgtgtaatctgaagcctgctatcatcataaaacatacagttgctcattccagcacttaccgggttatgaaaactattaactcctgatggttacatgcctgattcagtcctaattgttggaaacagaatcacacatcaagccttatcaagtcttattaagtggttgaagaacgaccatatggtttttattaaagaagcatcattttccatgttaaat

SEQ ID NO: 336987 - DNA, 105 bp, Zea mays
gagaacaattggcagggttaccatagtggcaccttcggaattgcacatgattcacggactcgctaacatctacgtcaatatgacgggcaccggaatgatgggcag

SEQ ID NO: 336988 - DNA, 330 bp, Zea mays
cgagaggaagaaagcttgaggagatgttctgattggttgaaggaaatggatagcaagaataggatggtactcctagcattacgaagtgctggtgcttcaataattttatcagacgatatcagcctctgttttactctgcattcatggataccagaatgttttgttaggatgtgaccatctaatgatgcatataaccgtgcaaaacattattttgcctagtacaacaccagaaggccaagcacttgaagtgccacgtatgccacaagaagctatacaaacgggtgtggctgtttatacaatccaatcttacttcaccatgcgtgcgacacc

SEQ ID NO: 336989 - DNA, 387 bp, Zea mays
ggctcagggagctcaagaagatcgtccctgacgcccaggacgccgccgacgtggacgtgctggtccgccggacggccgactacatctgcgccctcgagctcaagctgaccgtcctgcggagggtatcagccatctacggggtgtgatgcttcctttgtctgtcgcgctggcagcctggcaccttcgtcgtcgtccagtcctacgtacgtgctccactccgtcggtcgtcgtccacgcacgatgatgaaaggttttgaggtcaaaacctgctgcggttgtgaggggccggacgaggggagaagatttctcgcatgctcatctcttggttgttgctcctacgggagttagtttggatccaatatgtgttgtgcatatggcagttaatta

SEQ ID NO: 336990 - DNA, 401 bp, Zea mays
gtcgcgggtaaggaagaccaacgttttgctttgcctctaaacgagctatgaagctgggggcgtgacagcaacagtgggcggcttcatgaaaacactgaacatagacgacatggccaagcaaaaaccggacaaaacgacagatctggagcctcatgtcttggaggcctacaaagcatctacttgtcaggccaaggctggtgcgatggattacatgccacctgaggttatcaagagaaactcgtatgacaggacatgcgatgttgacaacttggctaacagtgacttgcatagatacagcgtggatatccaagctgcggactagagcggctcctaggccatgcttgcggatagtcacgtacatcttgacgacggagataccacgatgctgaacgagctgtcta

SEQ ID NO: 336991 - DNA, 149 bp, Zea mays
ggctcgcgtggcttagaggagtatgcaccaagcaatgagattaaggatgcttgatgtgacggtgcgaaatctgacgcgacgtctgctgcaaaggttcaaaacaaaggcctctacaaagtagacaagtttcatgacctctcttccgatga

SEQ ID NO: 336992 - DNA, 429 bp, Zea mays
cgatctgcaagtctcgctacgtagcagtgcaatacaaaaaaagcagccgcaatggcgagcagcaccatggccctctcctccacggccttcgccggcaaggccgtgaacgtgccgtcgtcgtccgccttcggcgaggcccgcgtgacgatgcgcaagacggcggcgaaggccaagcctgcggcggcgtccgggagcccgtggtacggccccgaccgcgtgctgtacctgggcccactgtccggcgagccaccgagctacctgacgggcgagttcccgggcgactacggctgggacaccgcggggctgtcggcggacccggagacgttcgccaagaaccgggagctggaggtgatccactcccgctgggccatgctgggcgcgctcggctgcgtcttccccgagctgctcgcccgcaacggcgtcaagttc

SEQ ID NO: 336993 - DNA, 273 bp, Zea mays
ccagcagctgtcacagagacatcagagagcggtcctccttgtgagtctgacctgaagaggaggaggacgatgaggagaagcatcatctcatccggaggagggagagcgaatatgcaccgcgtctcgctgttgctcgtcgccaacgtgtgcgccctggcggcgccggttgccgaggacttcactgacggtcttttcccgaacggcaactccaaggttggcccgcccaagtcggcgctgataaacggcccggtggtttcggcccccaacccattc

SEQ ID NO: 336994 - DNA, 332 bp, Zea mays
ccggactggaataaccgggtgcggccgacgcgtacgtttcaagctaggacagtcataatgtccttcatctttatccaaagggccccaatattggcttgagtaagtttctaaggacgctcaacagagagcttcaattgcatatttgaggagctgtcaaatattttatgtgatataccatctcaatatgctcgcacgtcgtaagatatcatactcatattcaagaacttgcatcatttaatcaattcccatacaacctcatcaagcaatatccacattgattaacatgctatagagccaaatgcagcgccatatggaaccatttgaacatataa

SEQ ID NO: 336995 - DNA, 444 bp, Zea mays
cggacgcgtggggcagagataggcgtcttcgtactcgcctacctccgcggctcaaaccttgggcccttctcccaattccttccgccggccgccgctccacccgtacgacgacaccatgagggagtgcatttcgatccacatcggccaggccggtatccaggtcggaaacgcgtgctgggagctgtactgccttgagcatggcattcaggctgacggtcagatgcccggtgacaagaccattgggggaggtgatgatgctttcaacaccttcttcagtgagactggtgctgggaagcacgtgccccgtgctgtttttgttgaccttgaacccactgtcatcgatgaggtgagaactggcacctaccgccagctcttccaccctgagcagctcatcagtgggaaagaggatgcagccaacaactttgcccgtggtcactacaccat

SEQ ID NO: 336996 - DNA, 336 bp, Zea mays
gaagatcgtcagatgttccgtgagtgttgtatgcgatacgtcgttgattcatcaaagtgttggtagtgccatgtgaaatgcacgtgaagcgttgaacatttagggtctgtctcgtcaaccgtagattcctggaaatatagattttagctgtgagctgtgagaaagctactgtgtgagctgacgttcgtgcgaaaactgaacattgattggtccaaacaattgacaactatcgattctataaaatcatgccatgatgacaacttgacaggagggacactgacctgtcctcttaaataagcccattcgacaatgggtaatcaccgtcgacggggctgt

SEQ ID NO: 336997 - DNA, 341 bp, Zea mays
ggaaaaaccattcgacccacgcgtacgcgactagactaaatgtaaaatctgtacaatcaatctacacgatctactcgctaacatacacgagggggtgataaaaatagaaaccagcttcttacaaacacataaagaatacatgcctaccatatcctatacctaattctaataacctacccgaaatattaacttcacgaatatttattgacacctgaaccattttcacccaacatgggaatacaactctcagatgaaaactgtaagacttaaatcttataccaacatacatattaaacaacttagaaatcttttttatatgcagatattatttatttataaat

SEQ ID NO: 336998 - DNA, 273 bp, Zea mays
catacggatgacacttgcattcctaatcattcctgttgctagtgcacgggctacagggagggggcaccacaatattacatgagagtgtcatataaaattcaactatcttatttatactgaacatgagatcgctgctatacatgcttatacaagcaacgatttctttgtatcacatgaaacctgctaaacattaagcaatctatcactgtaatggaactataagtactgtgattctctatactaagacatgcacctattagtactctaatcttc

SEQ ID NO: 336999 - DNA, 198 bp, Zea mays
catactcctgacacattcattccttatcaaattaaaggcccactaaatacttaaattgggagggatacaccctgtgaaggatagactcttaacttttgcaatcaactcttctattttgaccatgagagttatattctttctgattaaataaatccccaattccttgctcataaatagaccttctaaacgtacattaag

SEQ ID NO: 337000 - DNA, 368 bp, Zea mays
accgaactcatcacttcaatttctacaaatgctccacgctcggcctgaatcctttggggcggtggggaaatctgtaaaggaacacttatacaagcggatgcatgggggatcaccgtaacttacgaagacaatttcaaaaccctgcaactgatcgaaagcttaacaatatacgatggaggccggaggagaaacaaaaggatgagcgggtgtcaagatgctgctgaccgccgaactatatcaggccgactgctttgcatgctctgctctgaaaggcttatacaagccatacagaaaagctttgtgcgcaacaggacctagcaggaccagatgatgatgattaacatgcaacattctaacttcggtcttat

SEQ ID NO: 337001 - DNA, 317 bp, Zea mays
gtcttcacactcctcgccatcacataaaaccagtgcaagcagaagcagcgcaatggcgagcagcaccatggccctctcctccacagccttcgccggcaaggcagtgaacgtgccgtcgtctctcttcggcgaggcccgcgtgacgatgcgcaagacggcggcgaaggcaaagccggcggcgagctccggcagcccgtggtacggccccgaccgcgtgctctacctgggcccgctgtccggcgcgcccccgagctacctgacgggcgagttcccgggcgactacggctgggacaccgcggggctgtcggcggaccccg

SEQ ID NO: 337002 - DNA, 386 bp, Zea mays
cggacgcgtgggcaccctcgaggtggagtcttctgacaccatcgacaacgtcaaggccaagggccaggacaaggagggcatccctccggaccaacaacggctcatttttgctggcaagcagctcgaggacgggcgcacgctggccgactacaacattcagaaggagagcaccctccacttggtgttgcgtctcacgggcggcatgcacatcttcgtgaagactctgactggcaagactatcacccttgaggtcgagtcttctgataccattgacaatgtcaaggccaagatccaggacaaggagggcatccctccggaccagcagcggctcatttttgccggcaagcagctagaagacgggcgcacgcttgccgactacaacattc

SEQ ID NO: 337003 - DNA, 429 bp, Zea mays
cggacgcgtgggcggacgcgtgggtggctggcgcccctgcaagcaacccttctgggagtatgggcggtgaccttcttcactaaaccaaagaagatcaaggagcaaaaggtagatgaaaacaagataaagaaggaatagactattcttgaattagagctagagcttcataccatcttcttagtcagataacttgtggctacacacaaggcgaaatgtttcgaagctaatctaagaaatggcaacctatcatggtcagcttctgtgaagtctccttgatgtgtattccttgtatctggcttagcttagattgtgcagaagcttgtaagcaactgctccaggcttccattcaagacattgtcgtattggaaacagtatatatggaagctaaagcttctcagagttgactcacaacctacactaaatgtccac

SEQ ID NO: 337004 - DNA, 368 bp, Zea mays
gcggcggcaggctaaacgggcaactgagcttctcgtcacggcaggggtcattgatggggcagggctcagacatggacagcgaggacgtcggagggagcagcccaaaggctgccggcggccgcagggggtacatccctgggtacccaatgggctctgggtgggaggactccacggctctcttgacaaacaattggtctggcatcaaacgcccccgggactcgtcggagcctggacagagcggccttacgcaccacttcagcgggcccaagacgtcgtccgagatggcaactattgagaaattcctacacttccaggacgccgtgcctcgtaagatccgtgcctagcgggggtgcaccactcatgcacgc

SEQ ID NO: 337005 - DNA, 316 bp, Zea mays
  unsure (1)..(316): unsure at all n locations
ctaggggttaactgctcgaggnatggcgtctgtgcaggtctccggcgcgggggacggtaccgcggctttctctgtgaaggggaaggcctccaccggtgcgctccggctgcgctatacgatgaccttcggcgaggtctgcccggcgcgagggtcgttccgcggccggagaggtgntgttgtgttaggtgtttgaggccaggaagtatggaagacctangccgttggctgaaagagagcacgtaaagattaacttcttcctacgagaagacaacggctggaaacacgctcccttcgactgctcagaccagacctcaag

SEQ ID NO: 337006 - DNA, 142 bp, Zea mays
  unsure (1)..(142): unsure at all n locations
ctaaggtttatctgctcgangaatggcctctgtgcaggtctcccgcccggggggggttaccgcggccttctctgggaaggggaaggcctccaccgatgcgctccggctacactctacaatgaccttcggtgagggcttgccg

SEQ ID NO: 337007 - DNA, 406 bp, Zea mays
  unsure (1)..(406): unsure at all n locations
cccagacccagacccagagaggagggcgacgaacacacggtgacggagagccgagtggacaggacaggagcgcggagggaggaggaaacaaagcagaaaagcaacccccgtcttccatctttgcggagcgacgcgcatctgccctgcccatctctttcgtgctcctaccccccgccttcttccgcccgccgcctcagccctcaaggcttttccttctcagaccggggacgggcccgacggggacagggacanaaggtggtgcgatcttgtggggcacactccgcctccggccccggtaagagagagagagagagaaagagagagagagaaagagagagaccaacggagggtgccaggcccgcccccccgttaaaccaaccccaagccttggaattgccgcttcccc

SEQ ID NO: 337008 - DNA, 180 bp, Zea mays
ggccgcgcaatacattgtattcgtggtcactgccgcatactggcacggcgtattctttgtggctcactatttcaatgtacgccgtttccagtcaatacacttctgcactggctcgaggggcacaaccgcctgcaaggtgctatgcatggtcgacaccaataacaacaccagaaccgtaat

SEQ ID NO: 337009 - DNA, 236 bp, Zea mays
gcaaatcgtacgttggaacaacatacacagatagaacagcgttcgacgacgcgcgtccacggctaatgacccacaagcgcgtctaatgacataatgcagccagtgctcgctgacaaagatcggaacaggccatatcaaattgatggaatggacaagaatgaaatacgccaatggatcgagagtgcaaagaacactaattgtgaaagttatcaaaaccttaacagcacacgtgcagt

SEQ ID NO: 337010 - DNA, 170 bp, Zea mays
acgcgctagctactatcttcgcctttacctgcttgaacttaccccccctacacaccgggtacactttgtgatttggagccagagaacttacaacaagctcgaggccgtgtatgggtgcttaaactcgccctccaagaagaataaaggcccatttctgccgtggaccacga

SEQ ID NO: 337011 - DNA, 102 bp, Zea mays
  unsure (1)..(102): unsure at all n locations
tgctagctcttgtcttgtcanttatttaccttcacggagccgcctagctagccgagtacaggtggagtggaatgcgtggtgcactgccaaccaaatcaaact

SEQ ID NO: 337012 - DNA, 429 bp, Zea mays
cagagttatcaaggtactacttcatgctgggcgagaaggccgtcgtggtggatggattctgggatcagaagagcagccggctttgcctcaaagggtgtcacgtggtgaagtcggggccatcccgtgcagatttggcagtaggtgagtgtggaattgggatgagcttctggttcccggcagtgtggtcgttacagcaacggagcttttctgctggtctggtctggaatgcaagtctgaaaagtggtgaggccgtcgctgccggttctagtgcaatcactccaaactataggggcaatctttttggttggaagtttatttccccaaaggtggccaaggttttaaattactttaaaaattttgattggaccaaaaccaggaaggggaggttccaaattggcatttataacaagacttggtggttccgttttt

SEQ ID NO: 337013 - DNA, 348 bp, Zea mays
  unsure (1)..(348): unsure at all n locations
gaaaactctaaccttaactnggttgggcgtgcatatatataagtcgagtacttgggccaagcccattacactgagggtatgcaagtaaatacacatggactagccccgaaatactaacaatactctcacgattaccactggatgggcacatactattattagaccatcttnantcatgggaggggatttgcatggatttgggttgtccnacnagcacattgtgggaatacaagcatgtaacccgtcatttcacatgcataggtaagcatgtaaccaaactgcattattggaatatggaaaatctaggctaggaacttattctgaatacaactatccgaatctatacat

SEQ ID NO: 337014 - DNA, 315 bp, Zea mays
  unsure (1)..(315): unsure at all n locations
ggcagatgctggggcgctccattccccagcaaaggttatccgctgcatgcccttatttgccgagcacttcaggtgggggcgccaggaggatgcacacgatttcctcccctatgttggagatgcctgtcacactgctgacctccgcatgcgcaaggggttacttgcagcagntgtcattggatattgttggtgaagatttaagtggncnnggtgattgtgtgcttatgagggagacataccgcgggggattactgagtcaagtgaagtgcctacagtgccagggagaatgtaacaagactgatgagataatgcata

SEQ ID NO: 337015 - DNA, 134 bp, Zea mays
cgacccactcgtccatgacatgcgtttactgcccggcttttcgttttgcctggcatggaaagctccggggcgcaagctaacagcaagaagcccgacctatcctacaaactggttggtgccataaacgacgcccg

SEQ ID NO: 337016 - DNA, 79 bp, Zea mays
ccggacgaccacgcgtccgagcatttcacgagcttggactaaccccttttttgcctttccaccgagccctacaacactg

SEQ ID NO: 337017 - DNA, 341 bp, Zea mays
ctccgctgggccaccagctttgactcgccgccttccttcccctccgctactgctcctccccaccccactcccccgcaggagcggcggcggcggcggcgaggtcgtaccccacatcggcgagcggcggcggcaccgccggaggcaaaggcaagatgttcgggcgcgcgccgaagaagagcgacaacaccaagtactacgagatcctcggggtgcccaagtcggcgtcccaggacgatctcaagaaggcctaccgcaaggctgctatcaagaaccacccccacaagggcgggtgaccccgagaagttcaaggagctcgcacaagccctatgaaggttttgagt

SEQ ID NO: 337018 - DNA, 169 bp, Zea mays
cacacacgatgagagccgagagctagctacttatcgcgcgatggcgatgtccggttccaagatgatggcggacggcgacgctgatctggtagccctgggcctggccgcgtacaccgcgagcgctaggaacattaaagatactacgacgactaccctataagaaggacga

SEQ ID NO: 337019 - DNA, 131 bp, Zea mays
  unsure (1)..(131): unsure at all n locations
tcgcacacatgaagagagccantagctatctacctatcgcgccatcgcgctaaacgggttaaacaaaaaggcgggcggtcaacatgaccagacttccttgacaaaaaaaaatcatttcatggaaacttact

SEQ ID NO: 337020 - DNA, 418 bp, Zea mays
ggatcagaaagaaggggcctcgtaagtgttgaggccaagaagaaaaatggacagtatgacatgaagctactagctgttgacataccaatggcatcaggtcctgaccagcggctgttcctcgtcggtgatgaacaagagtacaaggtgggcgggggcttgatatctgagctgcgagacccgatcgtaaaagctatggccgcggagaaggagtttgactatcttgacgagagagaggatgaggaggacgagcggagggagcgtgaggagcgggaacaagaggaagcggaagctttgaggcccaaggaggaaaggctgccccagccggttaaaaaccgtagccggcggaagaagcctaaaaccctgaaaaaagttccttaccccaccgtccggacctacctttcaaccttgcctgggccat

SEQ ID NO: 337021 - DNA, 354 bp, Zea mays
gattttatttgagttggacggttacatactaaaaaatcgaaataggctagtttggtcggtgtgcgtccatgtgctgtcccagtggagcagcagcagtgaggcgtacagcatttgctgaaggtgaaagcagtcttacagatctgtagaaaatgttgtgcatatccatgttagcagccgaactaggttatttggtgttacagtgctacacatgggggggaaggaaactaaaaagcggattggggctccgggtttaataggtgaccggcatccggttggtggttaaattggggtacccaaacccagaggtgagacctggattggtttggaccggcggtggtttgggaattggcgggg

SEQ ID NO: 337022 - DNA, 290 bp, Zea mays
caagaagagcttgagagcatgagggatgcactcgaggagatctccaaggttccagcagaccagcttcccaacagagataagatttgggctaggaacgtgagagagctctcctacgacatagaggttagtattgacgcattcatggtgcagtccaagggtaggaagctggttaaacaatatggtctccagaaagtcattggtatgtgtctcgactggttgttgcagcccaagattcgccataaaatggctactgaaataggacgatcaaaagcgcatcgttgaagtgcacg

SEQ ID NO: 337023 - DNA, 327 bp, Zea mays
  unsure (1)..(327): unsure at all n locations
gggagaacatcagctatcagnatagattcttaactacccaagtgggctgattcaaccaagacgattcacccgtatatagaatatgaagaactatccaaagcagaaacttctgaacaatgtgcttacacatataacagaacactagaagaatacctttgacaaggacgtatacccagttgatgggtaaatttcagtgcttattgtttcanctngaaaagatgatctgtaacacatagtgtgattcaggtaaaacaacctgtgatgcatagcgaaagtgcacacgtcatacaacatatgattgaccaaaataatctacaacaaaatccc

SEQ ID NO: 337024 - DNA, 422 bp, Zea mays
  unsure (1)..(422): unsure at all n locations
gacacttccaagtgaagcgtctgccgaactttctcttgtcctcaccagtgctgggtctcgcgggttattctattgtccataacacaaaactgcttcaccggcgttaccagagatctagcgcccacaagcagattatcactgctctagagaaaaggccgagtgcgtcgtanattttattaggtgtttgtnactgtnattgtagtatttcnctgttgctttcgtaccaataaagcacaagggaactctaaggctaatcagataaaaccagttgctacctagatagctgctgctgacataccatgacagttccacgccagctaaccaaatcattttacaggatcaggactcttgctgcatactactactaccaatctgtctgcatctagcctttatggcatgcacagccttggtcgtgatgcacg

SEQ ID NO: 337025 - DNA, 301 bp, Zea mays
gttcttgcgcgtacgcgtacacagccccgatccgaatcgtcctcctcgcgagcctcgccgatcccccactcccctcccctcgcttcaagatgcagatctttgtgaagaccctcaccggcaagactatcaccctcgaggtggagtcttctgacaccattgacaatgtcaaggctaagatccaggacaaggagggcatccctcctgaccagcagcgccttatcttcgccggcaagcagcttgaggacggccgcacacttgctgactacaacatccagaaggagtcaacccttcatttggtgct

SEQ ID NO: 337026 - DNA, 169 bp, Zea mays
gacaggagttcgcgtaccggcggtttccgcggcacgtcacggccaagcgcatgcggctgggctagaaagttacctactcgtgccattatgcatggaggcgaagcaacgcccgcgtgctctgccgggagaggaggccttcgcctgcgacaaactgtcgcgaggaggactg

SEQ ID NO: 337027 - DNA, 418 bp, Zea mays
atctggccttcatggcattcacagccttgttcgtgatgcacgtccaggtcagtaatatgatcatcttcctcgttaaagcaaaagcttgtgtgggagggagcactgttgggctgagtaccaacttaacttgcgttcgttttcatgcaggtgtccacacggttcctatccgctagccccgcggtttactgggctgccgcgcacgttctggcttctccgagccgcgccaacagacgatggggctacctggtctgtggtctatttcatcgggtccattcttctaggtagcctgtttttttccaccttttaccttttaacgtaccgaagaaccaacgaatgggggggggtccccgattccgtattccataaccaggcacttccggcagggatgggttattttgttattaaggggattattttg

SEQ ID NO: 337028 - DNA, 272 bp, Zea mays
  unsure (1)..(272): unsure at all n locations
tctttaacaaagacctgcacgggccaacgaagaggccgcttcagaacctgggagccgaaaccaaccacatgtgtttggacccctatgcctaagccatgttcgaagccattcaataagcacattctataaattattgagnggaataagggtgtttgtgctagagtggagagaggnnnatggagagatacattaacctggccctggtgcttgtgggcacctaaatcctggcttgatgttggcgccgcacaatggtttatgcagatgggttgaat

SEQ ID NO: 337029 - DNA, 435 bp, Zea mays
gtcccgtccggatccgtcgatggggaaggagggcgtggtggcagggccggcggcggatgggagtaaatcgcggccggagtgcatcaactcgtccaacccgtaccacgagtgcactgactactgcctccgcaagatcgccgaggccaggcagcgcctcgacgacgagctccccgactcgtggaagcgcccgcccgagcaccgcaccgtccaccgggactgcatcaacgcctgcaacccctaccacaagtgctccgactactgcttcaagcgcatggccgaccccaagtcaggctttgggcgtggggggcaccaccaaccagttgcctgggcaacggttgccggaccttttattcccgggaaccacaaccacctggagattaccgttcccaccgaccagaaggcgccaccccggattaccggttcccgcaaattacc

SEQ ID NO: 337030 - DNA, 121 bp, Zea mays
gtgccgcccggatccgccgatggcgaaggaggtcgtgttgttagggccagcatctgttgggagtaaggcgtgttaggcgggcattaactcctccctcctggacctcgagcgcactgactac

SEQ ID NO: 337031 - DNA, 389 bp, Zea mays
cggacgcgtgggcaacggtttaaaccgtagaacaagaaaactgactatttaatatagtagagatataaacggttcatttgacccttgtaactagattcatttaacaatgcagcactgtattttctatgatgatgcggaaatatgaatgctgccaagcctttttttactttcgaaaagaacacacttccatcttgtctctaaattctgcttgttgattttgaaatctaatctatgcctcctcatctagtccaccttgaaaagtagttctagggtacttgaatgctgggaagtggtaaggtcaggtcatgggctcatggcaaacctgcttactcttctactcccaccttaaacagtactacagtagtagttctaaagtacttaaatgctga

SEQ ID NO: 337032 - DNA, 216 bp, Zea mays
gagagcgttcttgaatgctgcgattgttcatctcgcactggtctgatggaatcccacgccaaggaaggagctgttgcaacacaagcaccagcagcgaccccaacgtcggcggctaccgtacgcgctgaacatctgaaagagcacccgtaactgactgtggacccatacatgcaagagatgtcgaaaaccgccgcacggagcgttagttactgcaag

SEQ ID NO: 337033 - DNA, 190 bp, Zea mays
ctctctatcaagctatttctaccgtttctcttgtactcgagcggggaaaacaaagaaacaaaaaagcaaggaagcagctgcacgcacgccgtctcctgtccggccatggagttcccgtcggtgtgctactgtgtgatcctgccgcagccgctaatacttgtgctgcaactgctggacttcccgcggcacg

SEQ ID NO: 337034 - DNA, 112 bp, Zea mays
tggacgactggcgcaagactgttatcggcatttaccttggctacgcactcaagggggaggggcgtaccctctacgggtacggcgtctaggccgcacccactcccggaagaaa

SEQ ID NO: 337035 - DNA, 306 bp, Zea mays
ctccaaaacccgaaaccctcggtcaatatagccgttatccgaagttgggcacccgaggcaagctctagggagccaccgtaaaaccatacccaaaatgtcgacagcctcttccatgctcaccgccggggacaatacacgccccttcccagcccctctcctgcttgacgtcgccaccatctgctccttcgatacaaagggcctaacggcagtggcactcttcatgcgcgcggaggccgcatctcccaagtcccctgccgcggtggaggcgactcctacgaagatcagggggaccggtatcacccatcc

SEQ ID NO: 337036 - DNA, 351 bp, Zea mays
gtctggattactggaattaatggattaacacgtgccatggcggcttcggcaaacagccaggactcaccgctgaagccactcatcatgaaattctttatttcctgtcgatatccattggaattcacacgatactgtgctgatcctttgtcaaagatcgtgatattaagctatttgcagctatcttggctggacgcctgctagcaactcgtattgaaccacctgctttcatggctacatcctcgaattacgcggatgccactattaagagggatatcgatgtagcacaggagacagcagcttgtaatccctctggggctgccaacacgactcaacatcacaccgggcatatgt

SEQ ID NO: 337037 - DNA, 356 bp, Zea mays
ggctgaatgtcttgtatcagttgtccagtagacttaccgcataagcggatatggacaactgatggctgaatgtcttgtatcaataagattttttttccacatccgacaccattctttttggatcaatcgggcttttaatattacctacctttcatcgagacaacttggcagttggtacacattaaatatgcgcaaatcagttcaggtcgtttcagtcctatttgaataattgctctagtttaatatgccatctgtggtcaattggtcataatttcagtttctttccaattatagcgtcgcattcgtacaagatcatgtagcaattgatttggcaagttgtgttccaaatcgcatgt

SEQ ID NO: 337038 - DNA, 310 bp, Zea mays
ggtgtacaacgtgcgtagcgcggcacacctggggtacttcctggagcactgaagctgaagcaggacacggggggcgccggtcttgatcataaggtccatgcgtcattagccacacgaggacaatgacatgcagacgtgcggtggcgctatgaccacgttcacagacactacgtgaacctgcggcgccgagactactgtgctgccttgattataccggaagggaagtgcgtgaaccttacttacagctactactacaacggcgaccacttgcaagtgatgagctgtaagaccaccagcggcgagaaccatg

SEQ ID NO: 337039 - DNA, 400 bp, Zea mays
ggccacctccgatgtacagacctctcgttcctccagcactcgcaggcaagagccagcaagacgcgctggttcagctacagatacagccatcaagcagagcatagatgcagcaataggtgatgttttaacgaagccgtggctgccgctgcccctcggactgaagcccccttcggtagacagtgtcatgggcgagctgcagaggcaaggcgtatcgaatgtgccgcaagcttgtggatgatccccggggctgcatagctgctagctcgtccctgcacgcagtgcaacaaaagaaatttgtcgacatgccttttatgttttgaattcccgtgaaccgtttatggagcactcacagctcgttcagggtcagatgaacagaacattataggagtatattctttga

SEQ ID NO: 337040 - DNA, 423 bp, Zea mays
  unsure (1)..(423): unsure at all n locations
gcccacttgtcatcggactgagtggcgtcttcctcctcccttcgtaactttgcagacccgaccgcagcagcccggggcaacaagcgaaccgacggcggcgatggggatcggtgagcacttcgagggcgtcgcgctcaagtactccaaggcgccgcacggcgtcctgctggcgaccggcttcggcgcgatcaccggcgccgtgctgggatccgaggtggcggaccactggtaccagctctacgagatggacaagcagggggccaacctcaggttcatctactggtgggaggacaaggtctcaggccagaagagctgaaccacatcgagtgatgcctattctactgagcacaccagcgtgacaacaaaacattgacgtctctcatgccgagttcttagttgttctttcctagctntctctaataa

SEQ ID NO: 337041 - DNA, 374 bp, Zea mays
gagccacgcgtccgagacactaacggaaaggtcgtggctgttgatacttgtgctagcgagaggggaaaacggaaaaccctagcaccctctgcccggtagccgtcgggcataggagtatagagatggagagtggacgatgttgaactatggtctacgtgcggtggactgccttaccaggccaacgaggagatgcttcgagacgctttcggatactacggaaccatcgtatatgtcaaggtgattaatgatcatgctattaaaggcaagtgtcaaagctcagttactcacactcactccataactgctgagcatgcaattgcgggcattgactgctagaaatgatgcaatcgcattgcacgagtaaaagaattgcg

SEQ ID NO: 337042 - DNA, 304 bp, Zea mays
  unsure (1)..(304): unsure at all n locations
cccggctcgagccacgcgggcgcggacgcgtgggcggacgcgtgggctacgacacacattcccttgctgacggtatcgggaaagaaagggaagagcacaaggaaacaggagatggaatgccactcctgcnnngtcagcctcggatctgaatatctcccgagagttgggttaaatcaagcaaaaaccaaatggcacacgagaccatgtggcaaaagctgatgacattcgaatctcggggcggctcctatttcagcagattctggtgcacatggtgcggttttgtgcacgctctcgtcacggcaaa

SEQ ID NO: 337043 - DNA, 397 bp, Zea mays
gacagcttcatcacgcacagggccttctgcgacgcgctcgcggaggagagcgcgagggcggtgaccgccgccgcggcggtcgcgggccagcaccatccgggaccggccgggatgctcttctcgcaggccgccggcgggggtgacggcggtgcggggttacacctgccgccaggcgtgcttgacccgtcgcagacgctgggcggcggccacgcccacggcatgtcctttcaagagctgtgcctgaagagagagcagcagcagcagcagttcgcgccgtcgtcgtggctcacggcgcaacatcaccagcaggagctggagctgcccggatcggccgtgttcggattggcgaggccgctagaccagcaggagtacatggggaactccacaacggaaagca

SEQ ID NO: 337044 - DNA, 365 bp, Zea mays
  unsure (1)..(365): unsure at all n locations
actaattgtcgtgtcaccaccagcccaccactgaccacttcgctatggaagttttgtggaagctgttggtttaattggaaccgaccattatttgcaagatgatgttcgtatctgtgccattgacctgcatatatgtatagttccaatcacggatcaaattcagaatttgacacgaaaaagaaaaaaaacagggaatatggctaggatgctactcggtttgaatggagtccaatcaaaacatgtaaaaaggtcagcctgtgaacagggactcagactgtttgctgcggctttaatccactggctcctgttttttcaaagnagacgaatggacgaatagtgcgacatgcatatatgtaaagacctct

SEQ ID NO: 337045 - DNA, 345 bp, Zea mays
gggcacacgcgtccgggtgtcttcaccatgtctatctactacacggtgatggatcggcacccgggatgaaggtgggtgcctctagcaaggggcgcctcaccattttcaagagcgaggctgagtccatcgaggcattgtgctgaacccattggtactgacgaaaacatgtaaagaacctccacaaattatctgttgagccgccgaggttccatacctgggagtactcaagtgactgcaggagggacacgtcctggctgagaaacaaccacaatacattcgacacaaaccgatagctgcatgtgaacaactctctgagctgcatgctctgaacacaatggctctttt

SEQ ID NO: 337046 - DNA, 53 bp, Zea mays
gttgacttctccttcccctccggtttttgttcgggttcgtgaggttctccggg

SEQ ID NO: 337047 - DNA, 172 bp, Zea mays
accgggccgggatccacgcgtcggcccactactgtatcgagcaaggtagtggctactgtagtgcctcacgatcatgtatgagcactggggatgaagaggaatcgtacacattgacaaggcttgaccctcgtaccactgttaaaaacacaatatgttctggtgaccaaaacac

SEQ ID NO: 337048 - DNA, 358 bp, Zea mays
ccggatccgggccgggattcacgcgtcggcccactcgtatcgatcatttgcaagctggttgtaaagtatctgggggttgtggcgcttcggctttggtgcgttggcatgagaaattttgcggtggttgcttgtgctgcgtgtgtattgctcctacgcccttgtacacctagcctgtgttgtaactgaatttttgccgaggccttatgcgtgactagtgtttccactgacactgtattgcacatttttgtcgcatggaatgtactattattgtgtggctcgtgccagtcttaaaaaaaaaaaaataaaatggccttcgatctttatgatccaatattacttactcgtgcatgctacgtca

SEQ ID NO: 337049 - DNA, 329 bp, Zea mays
cactcctcgccatcacataaaaccagtgcaagcagaagcagcgcaatggcgagcagcaccatggccctctcctccacagccttcgccggcaaggcagtgaacgtgccgtcgtctctcttcggcgaggcccgcgtgacgatgcgcaagacggcggcgaatgcaaagccggcggcgagctccggcagtccgtggtacggccccgaccgcgtgctctacctgggcccgctgtccggcgcgcccccgagctacctgacggtcgagttcccgggcgactaccggctgggacaccgtgtagctgacgactgactcggaaaccttcgtcaagaact

SEQ ID NO: 337050 - DNA, 173 bp, Zea mays
tcgatcagatcgtcatgtatacagccgggtgttcactcatgagagacgggtgacgatggtgtacctacgcgtggcaatcatactcatgggactactcctggtaacaggcaccaatgggaggatgccgtcagaaggccagttacagccgtcagctttcgcaatatcatgagatc

SEQ ID NO: 337051 - DNA, 274 bp, Zea mays
  unsure (1)..(274): unsure at all n locations
taccggtccgganaccgcggcgggagccacgcgtcgacccacgcgttcgctccaaacccagcgccgactgctacgagcagtctcacgcaagctgcgggaaacaaagcggtcaacatggcatttcacccaatgtgctcgtagcggaggggcgctgtggccgtggcgctgctgctggcagaggacagccacgaccgttgcagcacgctattacctgcggccaagttagcttcgatatggagcactgcctatgctacgcccgctgaacggcttccgc

SEQ ID NO: 337052 - DNA, 383 bp, Zea mays
cggacgcgtgggcggacgcgtgggcggacgcatgggcggacgcgtggggtcctgatcgccgtcggtgccaccgacgactgctgcttcgtctgccccttctgggtcttccgttcctcttcgtcctcctaccccgcatacccaaagaagcaccaatccccttgcaccaactgctgtggctgcgcctcctgcggctgacgtgacaccaagcccgccaacggtgagatggccgcgggtggggagaacaagaagaaggcgccggagtcggatccgccggaggcgccctccatgatggagcagctcatgcccgagatcaccacccacgcgctcaggtacctcgactacaccagtctgtgccgtttctacatgaccaactacgacatgcg

SEQ ID NO: 337053 - DNA, 284 bp, Zea mays
gtgaaatcggcatcgccagcaacgcctgactgtaaaactacacgggcacggcagaggatggcacgtaatactccagccgggtaagggactgcgcaggcccctacttacaggctgactcctgggacgcactggctcgcatgggctgtatctgaggggacactggtgaggaggacggcgaggtccaaaaagaatgtttgaagtacatactgacagacttcgctagagcattgctgtaggggcgcgtaccagccataaatcttgcattcattaagtgctcacaacat

SEQ ID NO: 337054 - DNA, 279 bp, Zea mays
gctgccgaaacttgtgttttgaactattatgtgtattatgaacttttgtttgcccgctctgggtatttttccgctaacatgaattaggactaggtcgggcctacacattgggttcagcacgtgccttggagtaaaatgcttccataggtattatcatcggtcaaaacttggtggctgggtatgcctttataaaccaacccattggtatcgtccaaacaaaccagcgaggtatttaccgggcgggagctatccgagcaacaatcattcctaactgagggt

SEQ ID NO: 337055 - DNA, 330 bp, Zea mays
aaccgcgccgggatccccgcgtcggcccaaacgttcgatctttatgagcgggccttatatgacgttcctgtgaccaacccctggggttcatccgcgaaaactattgacacacagtcaggctacacaacttgcttccctgctcatcacaaggttgcactgcctctctttgatcttgtctgaggccaaattttggtagagggctgggctattacatgaccacctattggttactacctaccagcttggacagattttttctggactggagttatgctaccagaaatctatgataacaatagggtcgtccacatggggtaagaaatggtagcc

SEQ ID NO: 337056 - DNA, 357 bp, Zea mays
gccatcttagctggagcagcagcggtccctggttcactgcactccgtgcgcgcctggcctcctcattgactccgcggaaggaaggagcagcaggaggtttggccggctcatcacgcccgtcaataaccctcggaggattctgctcttattcgcgacgctgtcgagcgtggggacgacgatactgatctacttcacgctggcgatcaacagcagagcagaggcctagtcgtctgaaagccacaaccacagacgccgccgccaagccatttgtgtcgcgggcgtttacagcagtacatgccttgatgtattcctgagctcagtgagacaatggatgaggtggtgggggggggggggtta

SEQ ID NO: 337057 - DNA, 155 bp, Zea mays
cattattggcaatagcaaaattcacatctatttgtctctggataacgggtctttcttctctgcaatgcccttttttcattcttatggtctgagtggagccctcttataccgtacacggcatgtcttgcgtcttgggttttatgtttacattacat

SEQ ID NO: 337058 - DNA, 370 bp, Zea mays
gcgggacccacgcgtgcgccggtccaacactttcacgctcaggcgctcagctctagcaatggctgcctccaccatggcgatctcctccacggcgatggccggtacccccatcaaggtgggctccttcggcgagggccgcatcaccatgcgcaagaccgtgggcaagcccaaggtggcggcgtccggcagcccctggtacggccccgaccgcgtcaagtacctcggccccttctccggcgagcccccgagctacctcaccggcgagttccccggcgactacggctgggacaccgccgggctgtccgccgaccccgagaccttcgccaagaaccgtgagctggaggtgatccactcccgctgggccatgctc

SEQ ID NO: 337059 - DNA, 361 bp, Zea mays
ccggtccaacactttcacgctcaggcgctcagctctagcaatggctgcctccaccatggcgatctcctccacggcgatggccggtacccccatcaaggtgggctccttcggcgagggccgcatcaccatgcgcaagaccgtgggcaagcccaaggtggcggcgtccggcagcccctggtacggccccgaccgcgtcaagtacctcggccccttctccggcgagcccccgagctacctcaccggcgagttccccggcgactacggctgggacaccgccgggctgtccgccgaccccgagaccttcgccaagaaccgcgagctggaggtgatccactcccgctgggccatgctcggcgcgctc

SEQ ID NO: 337060 - DNA, 283 bp, Zea mays
ccggtacggatgcgtgcgtcggcccaagcgttcggcacatgaggatcgcgggcctacgcttgtacagctgtcagctgggcccaccttttcggcccgacgccctgatttccgcatcgtcttgctctcgcacccttcccactgccatcagcatgtgaaggaggcgcggcatcagcttggtgatttgtgagcgatggcgccgccacggtcgcgaccgtgggcttaccttcgcgtgattgtcggcaccatcctcgatggcgcactcggattctacgtcatgcaacta

SEQ ID NO: 337061 - DNA, 418 bp, Zea mays
cccacgcgtacggtttgcttgtttcttgtataaacattgtaacttaatagttaatggtaatacctagtgcttggcgtaagttctttaaggactacacattctttttaaattggcactgtaccatatgaataaataactctagtaatgtgataccgattttgattatgcattctgaaggacaggaaccccaatggaaacatatacctgtgggcactgcatgagcaagctgtattttggcaaagagtatatatgctgatcagattgctttgatccatccattatggacatgaatagacaactgggttactgcaaaagtggctcctacttcacaatgtaataaacactacaaaaaacctttcgatgggttgttggcccatggattacatgcttactaccatgtgattgttgtatttgcttt

SEQ ID NO: 337062 - DNA, 254 bp, Zea mays
cggacgcgtgggcggacgcgtgggtgggcagcaacacagaatggatatttggcaccaggacaagtctaagaagggggacgataagaatactgcttctcaggaattctaggtttttttagagttaattgagtatgtgcgaggatgcatcttgtgtctggcagagtatgtttactttagggatgtaacaaagtggacttcttgttcactgtttgaagaatttgtctgcaaatccaagttcgagtaatttattcttc

SEQ ID NO: 337063 - DNA, 304 bp, Zea mays
gccatgacgtttctagtaatatatatgtcgggcatcaactggggtttatgtgggaggaaaggagatggccttctgaaggtggcggtccgctcccattgccattaaggttcactggactatagcggaggagaggacaccttgcctataaagcattatggactgctatggtgctagcgtgccgacaagatgtatggtgggttgcgtgtaaaaggtggcggcaagagttggagaaagtgaatgacttatatgttctgcatgtctggtctttgccttggttggataaacacactgaggtgaaagttga

SEQ ID NO: 337064 - DNA, 266 bp, Zea mays
gcgacaaaagctaaacctatccgccgggggaccatccgaggacctggcgtgccaactgatgagtgccgaccgacgttgcgcccgttgtttcgactcgacgatcgttggacctcacctcgaaacgcgatggaagatggacattggaccgagtcgacaccatatagcctacttggacgagacaccgatggccaatcaacagagtctgtgcctcaaagccacagtgagatgtgagaatacaagatcgttcttttaggaaagctataatt

SEQ ID NO: 337065 - DNA, 249 bp, Zea mays
ccgtcagcgactcacctattctcccctctctccccgacgtctcccatttcgtgtacggtgaccttcctcaccctgcaactcagcacgtgtaatggccgtgtttcccgttctctttccccacaccttcacatcctcttgtcttctttgcctctttctcaaacagcactgctccacattcttctattgccgttcccgcacttttttttcctcaatttcactttctcacatctttggttgcctttcctttcc

SEQ ID NO: 337066 - DNA, 308 bp, Zea mays
ccggggcggccacgcgtccgtcgccacggtcttactacccgttagccctggggaggcacaccttgtcgggggcagagacagcgaccactccggcgcacaagcgggatcctcttcttcctcggcaagtgccccatcatgtggcagtcggtcaagcagcacgcggtggccatgtccagctgcgaggccgagtacatagcggcctccaccgctataactcaggcgctctggcttgctagcctgctcggtgatctacttgtgagagccgttgaaacaatggaactgcgcttggacagccagtccggcctggc

SEQ ID NO: 337067 - DNA, 130 bp, Zea mays
gcggtttaattagcacaccctcctgtagatgactgttgtttgttggatcgacaacttggtatggcttgaataaggtgtgttatctgtacctgtatactttttttttatttaagaaaatgcaattgtgaac

SEQ ID NO: 337068 - DNA, 242 bp, Zea mays
gaacaaaaaaaaaagaaaaaagaagaaaaaaagagagaaaagaaaaaaaaaaaaaaaaaaagagaaaagagaaaaaaaagaaaaaaacaagaaaacaaaaaaagaaaaaaaagaaacaaaaaaaaaaaaaaaaaaaaaaagaaaaggaaaagaaaaaaaagaaaaaagaaaagaaaaaaaagagaaaaaagaaaaaaaaaaagaaggaaaaaaaaaaaaaaaaaagaagaaaaggagaggtt

SEQ ID NO: 337069 - DNA, 245 bp, Zea mays
ggaccacattgagggctttgcacgtggggtgtcttgggttactaatggaaggagacctggcctggaaacacctgttggactccggcccacagggggacactgtcaggttgccatacgttaacaactgggttatactcgagcgaaacttacccttgaagatgcactaatgccgctacgtgtgggaatgtgagttacagactgatactccgctactgatgacgctgccttttatcgtggcctgaggg

SEQ ID NO: 337070 - DNA, 122 bp, Zea mays
acgccatcccgcggtgggagacgtccggcttcgtggagtacatcgagtcggggcacaagcagggggacatgctgctggtggtgccgcaaggcgcgcacgcggtgcggctgggcaacgaggcg

SEQ ID NO: 337071 - DNA, 431 bp, Zea mays
  unsure (1)..(431): unsure at all n locations
aatctggctgctgctggtttgtccgtgtctctatttgatgctattgtttctgctgatgcgtttgaaaaattgaagcccgctccggatatattcctggcagcatcaaagagcttaggtgtcgacacaaatgagtgcattgtgatagaagatgcgcttgctggtgttcaagctgctaaagctgcggaaatgagatgtatcgctgtgacaactactctagaggaaatagcgttacgacaaggcagtccctcgttcatacgaaagaatattggagacatttcaattaacgacattttgtatggtggttctaatgctcgccacagtatgtaatacaaacaaagattattttgatctagtaacatatctcttgtatgaaataatggactagaaactattgaacccattacattaattctgatttatcagcctgnnat

SEQ ID NO: 337072 - DNA, 226 bp, Zea mays
acgcgtccggtcggcgctggtgaaccggacgggggggttgggcgcccaccccatcccgcggtgggagacggggggcttcgtggagtacatcgagtcggggcacaagcaaggggaccttgttgttgtgggggccgaagggcccccacccgtggcggttgggaaacgaggcgtcgatccggcagcgcctggccgtggcgcgcggcgcctactacgccatttcacgttc

SEQ ID NO: 337073 - DNA, 468 bp, Zea mays
  unsure (1)..(468): unsure at all n locations
aaaaagggaaaaaaaaaaaaaaannaaaaaggtggggataaaaaaaaaaaaaagaaaaaaagagaaagggaaaaaaggggaaggggggaaaaccaaaaaaaggggagaaaaaaaaaaaataaaaaaaaaaaagaagaaaaaaggaaaaaaaaaaagaaaagaggaaaaaagagagaaaaaaaaaaagaaaaagagaaaaagagagaagaagaaaaaagaagaaaaaaaaaagaagaaaaagagaaagaaaaaaaaaaggaaaaaaaaaaaaaaaaaaagaaaaaaagagaaaaaaaaaaaaagaaaaagaagaaagaaaaaaaaaaaaggaaaaagaaaaacagtgaaaagaaaaaaaaaaaaaaaaaaaaaagaaaagagaaggaaaaaaaaaaaaaagaaaagaaaagaaaaaaaagagaaaaaaaaaagaaagagaaaaaaaaaaagaggaaggaaaaaaaggaa

SEQ ID NO: 337074 - DNA, 258 bp, Zea mays
aaaaaaaaaagagacaaaaaaaaaaagagataaaggaaaaaaaaaaagagaaaaataaaaaaaaaaaaaaaaaaaaaaaaaaaatatagaaaaaaaaaaaagaaaaaagagaaaagaaaaaagaaaagagaaaagagagaaaaaagatagaaaaggaaagaaaaaagaaaaaaaaaataaaaaaaaaaaaaaaagaaagaaaaaaaaaaaaaaaggaaaagaaagaaaaaaaaagaaaaaataagaaaaagaaaaaaa

SEQ ID NO: 337075 - DNA, 311 bp, Zea mays
agagaatggtgattggatactggatgttaggttatatgtgcgccctacggtgaccgggcggtaaggcaaagaacttattggcaagtctgagcactattttggggggtggggtgggggggagcgaagaaatataactagctgtaagccacgaacagaagctggctaactaatcgaaagaacgagaggaacttagagatacaaccaaacgcggtgagaaaaaaaaagaaaaaaaagggggaacgggttataggatccaaacttacaacgcgagaatgcgaaggcatagattttcatatagtggcaactaaaat

SEQ ID NO: 337076 - DNA, 299 bp, Zea mays
gtcagaatcagatggcattttttcccctccttccctcgtcgacgaatcgagtttggagccgtggcgtaaccaatcccaataaaaatcgccgcctccaattcttcaacctcggtgacaccagaagcagaggggtcgcgaattgatcgaggctttctgcagcccacttgtccactccaacacaagagccggggcggcggatcggccatggcgccgccacggcaagggggggagcatgcggaggcgggtgttcgtgattcggcgccctggctgcgggcccttcgacacgtgatggcgcgggt

SEQ ID NO: 337077 - DNA, 252 bp, Zea mays
cggacgcgtgtacggacgcgtgtatggctgtcgagcatcgaccgactgagactgacccgttcatcacacaccatgacagtgatgcatgaggacaagatcctagttgcgcagaagcagcagcatggatggagaccggagttgcacctcctgcttctccaaccaccctgtagacgctgccggtgccgtcaacgacgaccgctgcaacatcatcaggattgtccaataccgtcacgacaggtgacggcgacccat

SEQ ID NO: 337078 - DNA, 356 bp, Zea mays
ggcatatccaagcgcacacctgagggcactgtttctttgatcggtctggtcatatggtccggggggggaaaactgagtgcaattgtaacctgggaaacgatgctttgcataacatgaagcggaagctacgccgccaaaagcctgcaaaaaccatgcgtattgatcatagtaaaccgtcactacatgcaagacgcgctcgctcagctgagcaccgtcctgcggaacatcgacagcctgttcatttgcatctgacacaactggagcacaacagtgaatcggactctgggctactatgacaccaccccgtttcaacttaagtactggactcaccctaaggacgatcactacgactggtg

SEQ ID NO: 337079 - DNA, 101 bp, Zea mays
tcagcactgaacacttgattgatttattggttttctagctaggataatgacaatggaggctgggaagtttcatacgtccagcatccatgatactactgtga

SEQ ID NO: 337080 - DNA, 290 bp, Zea mays
ggaaacggggggggacggacgcgaccgcccacgcgaccgggacggggacagattaggctcttcaagaccttactaacagctgtgaggtgtaacaaaaatcttcagggggatttgagaactcgaatatatttgcacataaaaaacctgttgctgtatctgtgtcattgctttgacttcttcatcattggcttatatatttccgtgcactaacttgacttgccattcttgtggtagcatcttgacaatacttttagaagagacccgaccaactatgagggcgtgtataaaca

SEQ ID NO: 337081 - DNA, 134 bp, Zea mays
cggacgcgtgggcggacgcgtgggcggacgcgtgggtaagatctgccgcggttccattttctggtcgcctcctccgccactgccatctccctcctctgtcctccgaaccactcgtcttcgtttagccgccgacc

SEQ ID NO: 337082 - DNA, 322 bp, Zea mays
  unsure (1)..(322): unsure at all n locations
ctagcttcttctagctctagctaggctcgtctgctgcaagaaagtaacagcgcaagcatggaggggaaagaagaagacgtccgcctgggcgccaacaaggtctcggagcgccagcccatcggcacggcggcgcaaggcacggacgacaaggactacaaggagcccccgccggcgccgctctttgagcccggggagctcaagtcctggtccttctaccgcgccggcatcgccgagttcgtcgccaccttcctcttnctctacatctacatcctcaccgtcatgggcgtctccaagtccaccttcaagtgcgccaccgtcggca

SEQ ID NO: 337083 - DNA, 432 bp, Zea mays
  unsure (1)..(432): unsure at all n locations
gcgcccccaattaccgctccccacgcacccagacacgccgagcgggagaggaagcgacagccagcagccgaggcggccagcgccagcgcaagcatgaccactcccactcccagtgccgacggctcgcccccgggctcctccgacctcgtgccccctttctaccccgagatgatcgtcgccgcgatcaccgccctcgccgatgagaacggctccagacaggccgccatcgcgcgccgcatcgaggcgcaggcccgcggcgacctgccggtctcgcacccggcgctcgtngccgcccacctctcgcgcatgtccgccgcaggggagctcgtcgccgtcgcggggggggaagtacgcgctgnccccgccgncggcgcagncggcgccggagtcacccggctgacgacggcgaagacgacgacgacgacgacgact

SEQ ID NO: 337084 - DNA, 79 bp, Zea mays
  unsure (1)..(79): unsure at all n locations
tcggggactacagacttatcgcaaaagccgtggactaagcgtaccgggcggtggaatgcgacggcggcnggtacccctt

SEQ ID NO: 337085 - DNA, 321 bp, Zea mays
cataaaaccagtgcaagcagaagcagcgcaatggcgagcagcaccatggccctctgctccagagccttcgccggcaaggcagtgaacgtgccgtcgtctctcttcggcgaggcccgcgtgacgatgcgcaagacggcggcgaaggcaaagccggcggcgagctccggcagcccgtggtacggccccgaccgcgtgctctacctgggcccgctgtccggcgcgcccccgagctacctgacgggcgagttcccgggcgactacggctgggacaccgcggggctgtcggcggacccggagacgttcgccaagaaccgggagctg

SEQ ID NO: 337086 - DNA, 335 bp, Zea mays
  unsure (1)..(335): unsure at all n locations
gaggtgggttggcttctcctccccctccggttcgggttcgggttcgtgaggttctccggggttcggtttcntgggtgagcggatcgagatggcggcgtcngatgttgagtaccgctgcttcgtcggcggcctcgcctgggccacggacgaccactcccttcacaacgccttcagcacctacggcgaggtcctcgagtccaagattatcctcgatcgggagacgcagaggtcccgcggcttcggcttcgtcaccttctccacggaggaggcgatgcggaacgccatcgagggcatgaacggcaaggagctggacggccgcaacatcaccgtcaacg

SEQ ID NO: 337087 - DNA, 299 bp, Zea mays
  unsure (1)..(299): unsure at all n locations
gtcccaccaagctgtcccccgaccactccgccgcccgctccaatggcggcgccggccagctgctcatgctttcacccacgcgcgaccgncagcccgncgtcttctctcaagtcgggcgcttcctccctgcttctccgacccttcgcaccctaaaccctacccacactgaggctccggcttctctgtttccccccacctcttgcagcgtcggcaccaaagtcttcgtcgggctcagggcgcaaaccaagctcggttcgtcggagtcgtcatgcccgaatgtcagcgctgggttccacact

SEQ ID NO: 337088 - DNA, 327 bp, Zea mays
ccttataatttttattcttttttttttttttttatcttttttttctttcattatataataacttttttcttcttctcaattgtttcttttcaaattttttttaaataacctttttttttataatatattatttttttttttataattatttttttctcatttttttttttttatatttttttctctttatattttattcttttatttttttttcactttcttttttttatttttttttttacttttatttttttcttattattttctttctctttctttattttattttccttattataattattcattttcactttattcattttt

SEQ ID NO: 337089 - DNA, 238 bp, Zea mays
aacatatcaagcctcactcaaacatgatcgtcatcttttacatcaaactccctcttcacgtgacggccttaaatgtcatactcgaggcacatcctactatctctaatacctttctcaataaccatactggtcgacctactgcatcgtctacaccccacaacacttaactgcttgttcattcaaataacagccatcacacatccattgtcccgacttttaatacataaattccaaacca

SEQ ID NO: 337090 - DNA, 385 bp, Zea mays
tgcagatcttcgtgaagactctgactggcaagactatcacccttgaggtcgagtcttctgataccattgacaatgtcaaggccaagatccaggataaggagggcatccctccggaccagcagcggctcatttttgccggcaagcagctcgaggacgggcgcacgcttgccgactacaacattcagaaggagagcaccctccacttggtgctgcgtctcaggggtggcatgcagatcttcgtgaagacacttactggcaagacgatcacccttgaggtggagtcctcggacaccatcgacaatgtcaaggccaagatccaggacaaggagggcattccaccggaccagcagcggctcatctttgctggcaagcagctggaggatgg

SEQ ID NO: 337091 - DNA, 396 bp, Zea mays
cccatatccgctcccctacctctccagcatctcccgtctccgtcgtctcgtctctgctgcgtcacctcgccgccagccatgggcaagatcaagatcggaatcaacggtttcggaaggatcggcaggctcgtggccagggtcgccctgcagagcgaggatgtcgagctcgtcgccgtcaacgaccccttcatcaccacggattacatgacctacatgttcaagtacgacaccgcgcacggccaatggaagcacagcgacatcaccctcaaggactccaagacgcttctcttcggcgagaagccggtcaccgtctttggcatcaggaaccccgaggagatcccgtggggtgaggctggtgctgagtatgtcgtggagtccaccggtgtcttcactgac

SEQ ID NO: 337092 - DNA, 305 bp, Zea mays
  unsure (1)..(305): unsure at all n locations
cggacgcgtgggcggacgcgtgggcggacgcgtgggtccgacggcgccgcctccgtctccggcgtcncgagggaagaggtggcggccgtagagacgctcgcgccgccggcgagggcagtggggtctgacggcgcggatcggaccgacccgcccccgcacgagcagcaagaggaggccgaggagggcgcggcgaaacccggtgcctccctgcagcaggacgcgccgctgaccgaggaggtggtggaagggggaagcgggggccacggcggcggcggctcgcaggagcaggagcaggatcaggccca

SEQ ID NO: 337093 - DNA, 321 bp, Zea mays
ctagtcccctgctccattctcagccgccgccaatcccttcccgtgctccgcaaccgctgagtgagaagaagagatggccggcaagggcgatagccccgctatcggcatcgatctcggcacgacgtactcttgcgtcggcgtgtggcagcacgaccgcgtcgagatcattgccaacgaccagggtgaccgcaccacgcccttgtacgtctgcttcaccgactccgagcgcctcatcggagatgcggccaagaaccaggtcgccatgaaccccatcaacaccgtctttgatgccaagcgtctcatcggcaggaggttcaatga

SEQ ID NO: 337094 - DNA, 387 bp, Zea mays
ctccgcagctcgaataaagccccctcctcctcttccagtcttcctcctccgcgcttcagtgttccgagcgccacgattccggttcttgcagagtagcgcagagtgccggaggaatctgttggattctcctgctactggttcggttctttgggagttgttggcggtgtgccttgagcgatttggtgcgccgcggattgttgtggggtgagggtgatagcagagacaagggccgtgtggagagccgaggaggagggaagggaaagggggcgcaccgcgcatgggcgggcagtggctgggggaggggatgccgccgtccaacctgcagtgcttcttggactgtaccacccccaccgtggacacgcacatttctcccaagacgaatggacg

SEQ ID NO: 337095 - DNA, 254 bp, Zea mays
cgctccctcacactatacacgcacacacaaatccgcttctaccccctcacgccgccaccggcgtaggactcctaaccagactcggcgtgctccaacaaccttctcatgctcaccgccaacgacctatatgacatcagaagacctcacaaccattatcaggaccaacacgcccatcaccaccatcatcaacctggcgaacgatgccaatcttacgccccagagtgtcaaggcgcccagctaacagatcctcacca

SEQ ID NO: 337096 - DNA, 323 bp, Zea mays
  unsure (1)..(323): unsure at all n locations
gaggtgggttggcttctcctccccctccttttcgggttcgggttcgtgaggttctccggggttgggtttcgtgggtgagcggatcgagatggcggcgtcngatgttgagtaccgctgcttcgtcggcggcctcgcctgggccacggacgaccactcccttcacaacgccttcagcacctacggcgaggtcctcgagtccaagattatcctcgatcgggagacgcaaaggtcccgcggcttctgcttcgtcaccttcttcacggaggaggcgatgcggaacgccatcgagggcatgaacggcaaggagctggacgggcgcaaca

SEQ ID NO: 337097 - DNA, 307 bp, Zea mays
atcccccctcccctcgcttccacaccttccttctcgtctcccctctctctctctcacacacgcacacacacactcattaggtcgggacgggaggggaggggaggtctcgtgcgcgtccggctttcctctcctcgccgcacgacgcgcgcgcggtcccggtcgccgatggccaagtcacgcatgccgccgttcgccgccgccgagcggttcctcggcttcccccgcggcgggccctcgccgggggccgtggcgccggcgcccgcccgccttgacgacctgccggaccttgccgaggccgacctctggt

SEQ ID NO: 337098 - DNA, 424 bp, Zea mays
ctggcttctcctccccctcttaccaagtcctcctcgggttagggttccttagggttttggggaggggcgatggcggcggctgatgtggagtaccgttgcttcgtcggcgggcttgcctgggccaccagcaacgagtcgctggagaatgccttcgcctcctacggcgagatcctcgactccaaggtcatcaccgaccgggagacggggaggtcccgcggcttcggcttcgttaccttctcctccgagaactccatgctcgacgctatcgagaacatgaacggcaaggagctcgacggccgtaacatcaccgttaaccaggcccagtcccgtggcggtggcggtggcggcggtggctacggcggcggtcgcggctgcggcggcggctatggtggcgggcgccgtgacggcggttatggcggcggtg

SEQ ID NO: 337099 - DNA, 356 bp, Zea mays
gcgatgactcagcaccacctcccccatcctcctctgtcctcgtataaagcgccgcagtccacgacgtgtacggcgcccatgggagctggagcaccagcacacgccgctgccccggctctgcgccgcgaaccctagccgaccgcctcatggccgccgagtcctgcggcagccgcggcgcctcgcccccgccgcctccctccgctggcggcgcggccgggaggcgccgcaaggcggaggcctacgccgaggtgctccgccgcatccgcgctggcgccggcggctacggtgctgcccgccccgagttgaggaccagctctggcccaacttccaaggcctaccggccaaataggcttgga

SEQ ID NO: 337100 - DNA, 452 bp, Zea mays
gacgacttgtttcattgattcttgaagagatcgagcttcttttgcaccacaaggtcgaggatgtcttgcagctgcggatcaagctgcggctgcggctcaagctgcaagtgcggcaagaagtaccctgacctggaggagacgagcaccgccgcgcaggccaccgtcgtcctcggcgtggccccggagaagaaggccgcgcccgagttcgtcgaggccgcggcggagtccggcgaggccgcccacggctgcagctgcggtggcaactgcaagtgcgacccctgcaactgctgatcacatcgatcgacgaccatggatatgattattatctatctagcttgtggtggtggttgaacaataataagcgaggccgagctggctgccatacataggtattgtgtggtgtcactggtgtgtgtgtgagagagagagaaacagagttcttcagtttgcta

SEQ ID NO: 337101 - DNA, 137 bp, Zea mays
tcgtggacgcgtgggcggacgcgtgggcggacgcgtggccggacccttggccacattcgtcaacttgcgaacctctaattcccccatgagccaaggccttccccaaccaagggccaatcaataacttccaaaccgtc

SEQ ID NO: 337102 - DNA, 242 bp, Zea mays
  unsure (1)..(242): unsure at all n locations
gcgtctcgacgaggcagcantngcaccagtcccaccaggtccggcgctctgcccanataatctcctgcgtnncccccccccaccagtggcctggccttctttgtcggacgaacgggcgccgacgaaacctcccgcgcgcnncacctcccaccccttcgannctccgacgacttcggncgccgccgcagcccgacgaccgcttagtcgccggcgggtacccgcctccttcgcnncgacggtgg

SEQ ID NO: 337103 - DNA, 144 bp, Zea mays
cgcctctcaaggctaacgcgcggaagggcattgggcacgggcagccaccgcgccgttcgcgtccacgtgaaccccaccgccgccaccacccgccgcggcacgcccaacccacaaaaacccaaccgcccaccacccatacccagc

SEQ ID NO: 337104 - DNA, 445 bp, Zea mays
ggttcatggaggataaataccaatatctggaaagagcccattgcatttctgtctactcttttggaagcagatgatcgtgctgttcggatggctgctggtgaagcattggttttgtgctttgagttaaatctgcttgatgtttcttctcgtgaggacgatgatgttaacacaggaggaacagctggttctaagaacaagcttttcttggatatgcaagcattaaaagcaaaaatatcaggtctggccactaatctctctgctgaggctggggggcaaggtgcagacaagaaaaaacttactgaccaaggagactaatttcaaaggatctaaaatttggccaggattggtacctgccttgaggattcattcagaatggttgaaaaccttatggtttaagggtggcctcatggtctgaattaattcaagtggttggtttctctcttct

SEQ ID NO: 337105 - DNA, 426 bp, Zea mays
ggagaggagatctcaggttttgggtggagtgccatgtctggagagttaattttaagacgaagacgaagtccaagcacaacgtttgctaggtgttcgatgatttgtttgagccaggaatcttcgtcgatctcgtggtttcgagtttggtttagttatggtatgttaattaatcgcgtgatgtgaaggacaagagctggattgatctcaaggtgatactgatgaatgaacctgaagatggatgatctgattagatgccaggatgggagatgctcgccaagcgagtatcatgtcccaccactgactaagggtattccaaggtcctaggttggtgctgctgtggatggtgctaatgccggtgggctcgacctttctatttattagtagctcttctatcttcttttttgaagattggcacttaagctagca

SEQ ID NO: 337106 - DNA, 253 bp, Zea mays
ctctcattcctcacacacgcgaagctgagagaccaaagaaggagaagaagaaggagaaggagcgagcaagcagaaagttagctagctgctagcgtggaagtgcccaaggcgagagagagagacaagctaggacggccgcgacaggctagccagccagctgctagctagctcctgcggacgagccgatggctggcgccgacgtcgacgtcgggacggaactccggctcggcctgccgggaggaggcgccgcggc

SEQ ID NO: 337107 - DNA, 265 bp, Zea mays
ctcaattccaaggctaactcgccgaagaggatggcacaaagacagaagaccgagccttggggtggatctgaacgggaacgggacaagaacccaaaatgtcacatcctacctacaaaaacgcaacgtgcccatcaactatacccatcttggcgttagtatccaacgtcggcgctgtcgtcctctagggagatctactactcctcacgctgaccgatagtcctcgggcgtctacagatctagatctgaatctggaagaccagattat

SEQ ID NO: 337108 - DNA, 302 bp, Zea mays
agccgatgcttattatacaatacattccaggacagttgggttccgtgggtcatcagactggaggagacgtatcatcgatctctgtacccaatctagactagagcctggctccatccagtccaattccatcagagccagtagtggactgatgcaaagcaaagggagagattctttgggtcgtcggaccgatgctgctgagtcaagctgagagtatctgactctggctctgctctagcccttgatgagggagaagctgaatcgctcttggatctctcttcttgaattgggtgcgtaggttcctg

SEQ ID NO: 337109 - DNA, 288 bp, Zea mays
gtgcgatccttgacaaacttgctcagggtgatgtttcatacggtaatgttattgcatatgtgactcgcggaaatgatcagcacgtttgcttctatgacgaagacgatatgttctggcacgctcggaataatagctactgctgctattactaccagaactgtagtgagccaaaatccttgtacgatgattacatctgcaccttctacacgaggaacgctctcaagaaccattcgtacaagagaccattaccatatgaagggactgagctctatacgcctacgaggtgtt

SEQ ID NO: 337110 - DNA, 145 bp, Zea mays
  unsure (1)..(145): unsure at all n locations
aattcccggggtcgacgccacgtcgtctcgcgtccccttcgcttcgctttccgcaattctcgcatttcgccttcctatcncnnttcgcccgtccaactctttcggcgggtcgagggcggtnngtttcgcgcgtgggnngctgtgg

SEQ ID NO: 337111 - DNA, 255 bp, Zea mays
gcactacacaaaccaaccataacttctcttgttctcgttctcttccctgcgtgaaccgtggaccgggaagaatcgggcgttggggactttgggatttgaaagcctacatattattatttctctaattcaggagtggtccgtgctggtagggaacggatttgcgttgctttttggagaatcctttctgatcgttccaagatgctttccttttgctgctttgtttttgtccgaggatgatttgtctaattcggtcgt

SEQ ID NO: 337112 - DNA, 456 bp, Zea mays
ctggcttctcctccccctcttaccaagtcctcttcgggttagggttacttagggttttgtggaggggcgatggcggcggctgatgtggagtaccgttgcttcgtcggcgggcttgcctgggccaccagcaacgagtcgctggagaatgccttcgcctcctacggcgagatcctcgactccaaggtcatcaccgaccgggagacggggaggtctcgcggcttcggcttcgttaccttctcctccgagaactccatgctcgacgctatcgagaacatgaacggcaaggagctcgacggccgtaacatcaccgttaaccaggcccagtcccgtggcggtggcggtggcggcggtggctacggcggcggtcgcggcggcggcggctatggtggcgggcgccgtgacggcggttatggcggcggtggcggctacggcggtcggcgcgagggtggtggcggc

SEQ ID NO: 337113 - DNA, 156 bp, Zea mays
cttctgctccagtgatcagccccctcccctcctggcctcctctccccccggccaaaaactgatctgtttttttcggttctggtaccatagctattagtagtcgtagcggctaacttgcaagccgattgtctctagcacgcaagtgtttttccctcc

SEQ ID NO: 337114 - DNA, 295 bp, Zea mays
  unsure (1)..(295): unsure at all n locations
tcccgggctcgactccacgccgatctcgcgttcgatcccgtcccctggcacgtcntggaagaaggtggtgtggtggaggtcttaccggaccgcgggtagctcgggggcggtgcgccccaactcttgccgataccgannggtgtccgcttcctttatttcattcgnngtccattccgcctctcggaaagagttgagaagaggagtaagggaaggcgaaggacctcggcgccccgcgatgggccggcgaacctgtaccgccctcgaacttcgacnggcgtctttgtgcgacaagctg

SEQ ID NO: 337115 - DNA, 456 bp, Zea mays
cgaaggcacagccgccgccgtttcttcatctcccatcttcgtcgtcttcgcagcaccggcgctccattttccgctctcggcacgcaggcgacggcggcggcgctcaggcttgggatcttaacgacggagtcagcggtttcccctccccctctcgccagccgcctcgcgccttcgcctccggtcctccgcacaccggctggtgaccctgcgtgcgtgcctctctctctcctcccgccttcggtggatcgtcaacgccgccaggccccggcatctgagccgcgcgcggcctgagggcagcgagagccagcagatgctgctccaccaaggtggtcgcgcatgcccaaagcgaagcgttacccgtcctcttagcgctgaagcgtgcgcttagtgccggcttttggaaccctgtatcataccgaattgcgcattatagaaattggctaggactaccctggg

SEQ ID NO: 337116 - DNA, 178 bp, Zea mays
ttgctgtacgggccacctggttcgggaaagactcttaatgctcgtgttgtcgtacatgggtttcgactccctccccgcgccgccgatcgccgaaaccccgcgtcgcgtcgcgtagaggagagggaaagcgacctcaggagggcatatcaagaagcagagaagaatgctccatctatca

SEQ ID NO: 337117 - DNA, 232 bp, Zea mays
  unsure (1)..(232): unsure at all n locations
cggactcctggttccacaaatcccatctnatttccccgcatcctcttctactcgaccatctgttccgtctacaaacccgcgccgccgttcnccnaaaccccacttcgcatcgcttacattccttgattgctcacacaaacatcattaaccagcttctgnnaagaattgtncagaaatatanncataatccatagctgctttcttcatttcggggaaatcatgaacagtcctc

SEQ ID NO: 337118 - DNA, 417 bp, Zea mays
  unsure (1)..(417): unsure at all n locations
cgggccgaccgacgcgtccgccacgcgctttgagagggggatttaaccttttagggcaggcagganaagcggcgcaccaaggtgacttctccttgggcggccggctacttaaataaatcccctcgcctcgcctgcggctgcctcttccctttttccttccgcgcaaatcactcaagtgccagttgcgcggcggatatcgcctctaataccacaccgcaggcaagtggtccgcggaactcgtaagtgcatgtaacatcccattgctgcggctgtcttcgccggtggctgtgcgtaagcaggactcgcatatcgacggatggactcgctgatcgtccagctgttgaatgctctgctctttgcccattaccttggttccgtccattgtagagaacgactactacctcccgcaggctcaca

SEQ ID NO: 337119 - DNA, 97 bp, Zea mays
gtgagtcatgggccgatttcacaggaaacatctagaacgacgacctaccctgtctgcggtcgtcctgcaaccacacgcactggaagcatcgtgcggg

SEQ ID NO: 337120 - DNA, 53 bp, Zea mays
gcgagtcatgggccgatttcacaggaaacatttagaacgacgacctaccctga

SEQ ID NO: 337121 - DNA, 293 bp, Zea mays
atctggctcgcgtctcttttcttcctctggttcggcgggccccggccccaaactagccaagggcggggagatccacatccagcgcaccggacccggacccgcccaacgactgcggccactgtttacttactagccagcggcggcgaaatgacagatctacatagcaccggacccggacccgaccgtcccggtggaacaggatgttcggacttcaggcgagcggcgcggcggcctcgtgggtggtggggcggatgggcaccgacgcgcatctctacgacgaccgcgacgacgcc

SEQ ID NO: 337122 - DNA, 53 bp, Zea mays
cgagcttctgattatgggttcagagcaagtttctggattaacctccccaaaaa

SEQ ID NO: 337123 - DNA, 324 bp, Zea mays
aacttatatcaccacctccgagcccgagtggaaagggaaggcaggaatcgacccgaacgcgcgctcatccgcctgacggcgaccgcccacatgccgaccgcctacagcctacgcgcgccgacattcaccgggcaggagcgcctaaggctgacatcgccggcgctgccgatatgcccgacgggaggaggggcctgccctccgtatgagggttgacatactagcgtccgcgtgcgcgtggcccttcgactagctgtacgcacggaggaggcacacacattgacccttcaagaaatacatgctctgaaactggatccaggatataca

SEQ ID NO: 337124 - DNA, 184 bp, Zea mays
cggacgcgtgggcggacgcgtgggagcatgtacacccagaggccagagctagtgatgacttgtgactgacgagcctctatagcatacagcaccgcgcgcggcggagccaaagccaaggacggtccggtcgtatgaataagtatcacccccaccagaaccccaagccacacaccatgcacgccag

SEQ ID NO: 337125 - DNA, 442 bp, Zea mays
  unsure (1)..(442): unsure at all n locations
cctttggccatcctaggtctcgtgtacagtcgtcccctccgctcctcgcctcctcctctcgcgagtcccgaacggccgatcccgacgccggctgcgtggctcgcctcagagccccagccgtatcctgccacccttgtccgtgagcgcccgctatcagcgcagctagtccctccctccgcccgctatcttgagcggtggtgatggagtttactttcgaggatgcagcggaactgtgcgcgctcgtttcgaatcagcaatcccacgtcgacgagaagcggaggtggctggagtcaatgatcctcagaccggatggctgcatcaggcgcgcgaagcgacccangtttttggattgaagtgtaagcgtgcgccaagttctgggatgcgagtagtggtctaattcaggccttttcttggtctctttaaataagtggcccgaagttag

SEQ ID NO: 337126 - DNA, 63 bp, Zea mays
caaaaatgtagcacatgcaacttggcttatttcgtgccgattgtgtgcttgcatttggggagg

SEQ ID NO: 337127 - DNA, 282 bp, Zea mays
  unsure (1)..(282): unsure at all n locations
atctgactccccggatctgtgcgccccatcttccatggaaggggagtcagacgcccctgagctgctgctagagaggaccgtgcgaacgggactcatacgccccgggcttgtaacattgagcggcgcattctacatagaaatcagggaagagacgacnacaacatatacattatcacaaancggtttcaggtttttcaggagtcgactctacctgttgtttaatactatgacaaaanggggaagctctgaaaaataataatttgccgttgctcttattttttc

SEQ ID NO: 337128 - DNA, 269 bp, Zea mays
  unsure (1)..(269): unsure at all n locations
cacaaagntnctcctcgatcctcatcttctcctactcatctcctccccctccctccctcggtctctcgagtcaagagcagagcacctcccaaccagctttccctttgcttccaccttgggctgaccccccacctgagcgcaccgactcgcttgctgctgggccagacacacacacgcactggaaaaagcgcgcctcgcgggcacgccttggacacgaccagagcgagctaggccacacgcgcgggactgacttacacacacaaccgcgg

SEQ ID NO: 337129 - DNA, 216 bp, Zea mays
  unsure (1)..(216): unsure at all n locations
cggccgacgacgcgtccgacaaatacacacaacttcctttgtcattattngaaaaaaccacaacagggattcggtgatgacctaggcgctcaggaaacccaaaaggatacccaaccacccaaatggacagacagaggtaatcgcctaccgtaaccgcgagatcgagaatccaggcactgtgaaatcaaaaagagagcacctaccccaccacgagga

SEQ ID NO: 337130 - DNA, 349 bp, Zea mays
cgacccgatggcgcccaaggccgagaagaatctagcggagaagaagccggcggccgaggagggtgcggataagacgaccgcagggaagaagcccaaggccgagaagcggctgcccgcgtccaagtcctccggcaaggagggcggcgagaagaaggggaagaagaatgccaagaatagcgtggagacctacaagatctacatcttcaaggtgctgaagcaagtgcaccccgacatcggcatatcctccaaggccatgtccatcatgaactccttcatcaacgacatcttcgaaaagctggccggcgaggccgccaagctggcgcggtaccacaagaagcccaccatcacg

SEQ ID NO: 337131 - DNA, 460 bp, Zea mays
  unsure (1)..(460): unsure at all n locations
gcgagcggccgccctttttttttttttttttttttttttttttttttttttttttttttttgttttttttttttggaggcgccgccaccaccctacgcgctgtttatatttcatactttcctatctcacgatcttcctgacaaaaaaactgaaggctctaaagttcaaactcttcaacgggagatcttttcagtttgacgtctgcaacgtggtcatggtggcaaggaacaccaaatntttaggaatgatcaaaaacccggaaaaacccaaaggcatctttgaagtcatccaccttcttcttggaaccttttgcatgctatgtctagctttctcctatttgttgtacaagaaaacataaaatggaatttaaattttgtggtcccaaaaatgtggaaacctgaagtcctgtaaaattaggcttaacattaatgcaaacaattttattttagtttaaaattaa

SEQ ID NO: 337132 - DNA, 96 bp, Zea mays
ggcgaacggcgcaaattaccctgctaacacttatctttacccacctaatcatggtcagctgcacaaacttcacgaaggtccagttgccttcattct

SEQ ID NO: 337133 - DNA, 448 bp, Zea mays
  unsure (1)..(448): unsure at all n locations
ggggagtgccccctttcatcatgttcccatgacttcttccgcactctgacgtggtggatagtgccgtgcctagccgtgaaggtgacccgggaggtctcccgcttcgcgcacatcctgcagcaggggtcgtcgtcggcctggacctggagggcctgcgcggtgctgttcgcgtccgtggcgtcgtggacgtacctgacgacgatcatcctgtcgtcctgcatgctcttcaacctggtgtgcagcctgcaggtcatccacttcgacgactacggcaagctgctggagcaggacgcggacccgctggtgtacctcaaggagcacctgcagctccgccacaacctgtccaagatcagccacaggttccgcgtgttcctcctnctgctcttcctcttcgtcaccgncggccagttcgccatcctcttcaagaccacggcgtacagcgggccga

SEQ ID NO: 337134 - DNA, 130 bp, Zea mays
ccgggccgaccgacgcgtccgccagttcatcgagtctctcgagtagcgtactttgtagcgagttatcgcgctgtgaaaattagactgtgcttgcgcgctgaataattttgctggctttgtcgttttggtt

SEQ ID NO: 337135 - DNA, 66 bp, Zea mays
ccggccgaccgacgcgtgccatcgccaataatggagtttccttaccaccttcaccaccactgccat

SEQ ID NO: 337136 - DNA, 191 bp, Zea mays
gatcccggtcgccgagcgtcgagggcttccaacactttcacgctcagctctacttagcaatggctgctcacaggcgatctcctccatggcgatggccggtacccccatcaaggtgggctccttcggcgagggccgcatcaccatgcgcaagaccgtgggcaagcccaaggtggcggcttccggcagcccct

SEQ ID NO: 337137 - DNA, 364 bp, Zea mays
  unsure (1)..(364): unsure at all n locations
ggctgacatgacacgaacaaaagcgcatcgatctcgctgtcgtcactcctcgtcacccagggccgaacagaagcaccacccagcatggcccttcangcgggcccttctccatnccaccttttaatccgtccccaagaagtgcagcctcgccgtcgcggcgaaggacacggcattccttagcgtatcccagaagaaggtgcaggcggcgtcgctgtcggtgagaacgcgggtggcgacgacggcgcctgtgccacgccggggccacacggggccaagatggaagagacgtgcgaggcgtgtgtatcacgccgtctcggtggcctgcgcgcaagcctgcgaacgcagtgactgtatgctgccactc

SEQ ID NO: 337138 - DNA, 223 bp, Zea mays
  unsure (1)..(223): unsure at all n locations
ccggnctagaattacaacactagactcacatttatctgtgttgcactcactacaatctttcaacttgtaaaacatcactttacagataaatgaataaggcgtccttctcacagggagaggcgcattgaacatttgccacaaacattttttttcttttaaccaacaaaacaaccaacagctaataaccctatacctcctgcacctaaaaaaccagcagatatct

SEQ ID NO: 337139 - DNA, 326 bp, Zea mays
cagactaaggcaaaggaactcccgctactggctggtgaaagcaagatgtagatgggcgagattctggattacctataccagcagcagcagcgctgaagagctctcattctttagtacttacttatttactttccacagactctacatggcataaatgattcattaatccgttgaaagtgcttgtatgctcctttgccactatctcccaccacttagcaaaggatgcaacattggctttggaggacaagaaaaagtttctcaatccaatgctctctttcagatgtcattagtgaatgggcatatgatagggacatatgtagtgcaat

SEQ ID NO: 337140 - DNA, 263 bp, Zea mays
gggactctgcactcttacacctgtttaggcaccgtcttgttggaggactatacgatgtgttactatcgacacagtagtgtgccaatgcctggcatcatgcactgccgaccgatgggccatggccagcgccctaacctcaacgattcaagctgatggtgcaaatgcaaccgactgagctcacgcccaacatgattaagctctttgaaccgagtgcaccgttcgagtacataacctgcgctggagaagcacatattgcctgccta

SEQ ID NO: 337141 - DNA, 190 bp, Zea mays
  unsure (1)..(190): unsure at all n locations
ctttcttcaacccctcctcgaccggggggaagcgaaggatgcaccatagcttagcaaaccatcccaccaatcgaatatcgcttcacacgatgactaccgaaacaaccgtttgcaaattctcccaccgcatcatgccncaccttctcaacatatatgtatcttgcccgacaacacaagacttcaaaattta

SEQ ID NO: 337142 - DNA, 301 bp, Zea mays
cggacgcgtgggcacgaaccaacccgtgctaccttcgattccctcgtcgggctttctgggaccttcgctccgactaatcccttgaccgggtcaagcccgaacgagactagggaggttccagcgccgccggtgggggagatggcgctggagctgagcctggcctcggcttcgacgccggcgggcggcgggttggtgcatccggcctccatcgccccactcaggaaggagctgctagtggtctgcatgtggattctactgcacatctccatgctcgtgctctcggacgcgctggggcacgtcg

SEQ ID NO: 337143 - DNA, 220 bp, Zea mays
ccgacacatgtgacaagcctcatgttatccgtgcatgaccaattagcttagcttcactgcggcatgggatgcatttccatacatcagaattctcactctccacagtaacaaggcgcacgagcagcaacaccagctgccaggaacaaaagacacatcacccatggccgttcgtccagtgtgcgtgcattgcgggacgcggagcaacccgtgccggggcaag

SEQ ID NO: 337144 - DNA, 335 bp, Zea mays
ccggcgcgacccacgcgtccgctggtttgtcacttcttgtttcggatctatagatgcaaaaacactactgcagtcaagtgaaggatatcgatgcacacgtcttatactatcctcgcacaactgaatcacggagcttctgttttaataccactggtaccgttcaaaataccgacctcttcatcaaatatatcctcccctgtgaggttcaagggctgttcatatcccttaataacgtgaaatcataacacagattgcatttaacctccttatcaaacttatctactgaatgatttatatataattccttatgacacaacactgaacaatttcgcatt

SEQ ID NO: 337145 - DNA, 360 bp, Zea mays
cggacgcgtgggtgtgatacagcaacaggcaattcctattatttcctaccgtgaaggaggggaacaacgtggtctgcgcgggcatggtgggcgcgtggaaggagaagtcgttgaaggcgccgccgaccgcagctcggctgtcgtcttgctgtcgtcttgctgagactgagacgcgatcaggtcggcggcctgcttccagtcgaacctctgcgccgggatggcgccggtggtgggcgacgcgaagaagttcgaggaagagtggagcgggacgggcgagtccagcagctcggcggggctgagcccgggcgggatggagaagtaggaggagggcgacatcggcggcggcgagatgggcaggct

SEQ ID NO: 337146 - DNA, 145 bp, Zea mays
  unsure (1)..(145): unsure at all n locations
atactcatctcncttcattaatctctttctcttcctatccaccttcttacttttaaaaaccttctttttctntcctttcccccctaactaattctttcaatttttccttccatcatcacttactttaacttctctaatattttcc

SEQ ID NO: 337147 - DNA, 480 bp, Zea mays
ggagtttgaacctcaaactgtgatcgtagtcaggttcagtttccttcaatatctgtgatcctaatcaggttcagtttcctccaatatcttttatcttggataacagctcaatttctggataatgatttatatgctctcaagcaactgtaacatggggtgttgaaagtaagaattggaggacattgaacatcattggtaatccttattgcctggaagggttcaatttcctctaatatcttatcttcaacaactgcataattttttttcttgaatctcaataatatatatccttttatggaacattttgaacacatatgtattcgtttttcctgatctgattggtttggatgacgatttgatttttcgatccaatcttgctaatgttcaattgctataaaaacccctaccaaagttcacaaaagatagtatagggtcttattcctgtatcaaacactcacataatcatacttctaagtgttt

SEQ ID NO: 337148 - DNA, 433 bp, Zea mays
gctccagctcctatcctcttggctccgcccgtccgcggtccgcgtgtgtgcgctccatccttctccaccacctgtcgccgggccaaccgcaccgccctctgatgactgggccgggcgaggagctggccgagctgctgtgggaccgtggcccggcgctgcggagggcgccgccgtcgttccagcccttcacctgcagcgccgccggcagcagcaggtcgcaggagctgaagcggcatgcctcggacaccaccaaggcgtcagcgttcgtgaccgccgtctccgtcccgctgggcacgcacgacgccggctccgggctcgggctcgccggcctccccgtccacgacgacgacgacgccgtgccgtggttgcattgccccgtcgccgacgacggcgacggcgacacggcgccgctgccgccggagttctgcgccgg

SEQ ID NO: 337149 - DNA, 232 bp, Zea mays
ggcacatcgagatcaccatcgtgcacactggcacgtgcactagcttaagataaaccacagaccaccaagccgtgcacgcattatgcagtacggtcagcatggtctgcgcgaacaccgcgccactggacttgtacaccagtacgggcacccagtaggcggagttatcaaggcacccgaggacgaggcacgctcgagaacacacgaggatgggccactagggagcacggatgac

SEQ ID NO: 337150 - DNA, 198 bp, Zea mays
ctcccccctaccctaccccccacacggccacacacacaccgtcgcgtccgacccccacgccgtcgactgctcgaccggtcggctccgatggggtacgtgctgtcggcggtgggcagggtgctggagcagcccacggcgtggggggcggcctgggagatggcactcctcgcggggcccctgtgggcggcggccctcctc

SEQ ID NO: 337151 - DNA, 319 bp, Zea mays
ctcgcaccacaagcgagcgagggacccggggcggaagaagagagagaagacgtctctctcctctcggcgtccccgttccccaacctctcgtctgctgcctgcctgcctgcctgcctgcaaaaaggagtttgtcatggcgtctaagcgcatcctcaaggagctgaaggacctgcagaaggacccccccacatcatgcagtgcaggtcctgctggtgaggacatgtttcattggcaagcaacaattatgggaccacctgacagtccctatgctggtggtgtttttttagtgaacattcatttcccgccagattaccccttc

SEQ ID NO: 337152 - DNA, 450 bp, Zea mays
gttccgctttacatcaaggtacagtaacgcttagacaaatgaccctccctttaccaaaaaatatgaaaagatcggcggagatatatttctatgcggcttttcgttgtacttgtgttcttcttacctgattgcttgaagaactgacatctatctaatggttatacgcataggcatgttctgagccctgttgagtgtaacaatctgcaagttgaggggaagcagattacagtctgcctatataatctagaatggttgttcaacttgcagattggaacatgcctccatctgactttgtggaccctaattgcatttagcttcaaatttcccttctcatacctgatgaatacttatcctcatgcttctgaaaattccaaatttgcttagtgagcctcatgtgccttttgaatctatcgacatggcaaatggtattttccagattcatgttcaatt

SEQ ID NO: 337153 - DNA, 149 bp, Zea mays
  unsure (1)..(149): unsure at all n locations
tcggtccttccggggaggggacttcgctcggcttcaactttccctcgtgccttcccccnggcccggtcgccaccggggtggcctcatctcgacgccaagcgtgccaggccgtcttgccagtatacctggcgaagagcgggcnncggagc

SEQ ID NO: 337154 - DNA, 391 bp, Zea mays
  unsure (1)..(391): unsure at all n locations
cccacgcgtccggttaccctgtgagaactcatggtaatgatgagcacaaagctccactggaacaaatgctctgactaatttctgatttcagcatccttgttcctcaattgctctgattcaccctggtggtttgataagatggacttctgctgctgatgatgtcgggaaaacacataaagcaaaaagataaagagtacccttgaggtgcttctttcgacatttgatcttttgcgaggagtcccatgctgaagcaggaccgttgattttcaggataaaagaagttggaaccatctgaagtgtcttctctttaccgaataataggcaatgaaacatcatcaggctgcantcgggaagtatcatgcatcaggtgatctcttggcttgaatctact

SEQ ID NO: 337155 - DNA, 225 bp, Zea mays
ctgacacataggctagatcacacatctgcttctagctgccaggctgtcgcgatgcatataagcctacctctagacgcttactcctgacgctgcgcgatactagtgtaataatgatatatatatctactgatgcttcaagcgtacgggtgatgtttaacggcatctacggctgctgctgctgagccacagtaccttactgtttctgagacttgtctctcccacact

SEQ ID NO: 337156 - DNA, 481 bp, Zea mays
gcgaagaaagcgagcacagcggcgccggcggcgatttcctcgccgaggaagaccaggagtggcacctccggcaagcgggtggcgctggtgtctgcgccgccgaaggcggcggtcgccaagaaggtgaaggcttcggcggcgaagggcaaggccaaggagccggccggctcgaaggccaagggtaatggggaggcaccctcggcagaggggtcggccaagaccatcatcgtggaggcctgcaaacaatgttcttccttcaagataagggctgaggcggtgaagaacggcttagaaagcgctgtcactggaatcactgttgttattaatcctgagaagcacggcgtggatgctttgagattcgtcaactggtggtgaagtcttcgtctcacttttggccatgccaagacctttcactaagatgaagagtcttgatatggatcaagtcatttctgatattgccaagaaacttgcttgaatgagg

SEQ ID NO: 337157 - DNA, 301 bp, Zea mays
acgccatttcttcccagccgccacagccttcttcctcctctccccacacgcacagctctctcctgccctgtacatggcgcagaaaaatctccagccatggcgtgagcaccattcccatggccgagctcacctgcctgccgcgagtttgccagcaacccccacgcggatctccatttcccctagctgtcgctcgccgcagagttctctgctggcttcctcctcgtcgcgcgcagggcacctttggcgttcgcccctgcgagctccatagcctagccatggtggccagcgagctccctgctcc

SEQ ID NO: 337158 - DNA, 308 bp, Zea mays
acgaaaatggatgctggcgtacatgatgcaactgttaggatagacgccctaaccgggggcacggtggatctgcacgaggccacagattgtatatgatccaggacaacctgacacccgcatatcttgaaacagacctattacgcttgatttcgtacttacattgagcatgacattgggtcccacacattcggcgagcacaagaagactctaattgtctacgtgaggataccgacctacaaacgtccttacgttgaatctaccactgtgacacacgatgcaacggattcgtacaaaacttctgagaaaag

SEQ ID NO: 337159 - DNA, 463 bp, Zea mays
  unsure (1)..(463): unsure at all n locations
gagagatctgaagcacgatgcggagcagtcgaatcctctaagattaatggagtagaaggacgaagatgaagaaaatggtggtcctttatagctctttgatgacgtggctaccaaggaaggaccttctggagcgtaagctgatagcgagtctttcttggcacacaaggaccgtggagtgcaagatatgctgcgtcaatcttacgtgactttcttctataaagagggatggttatggaagagctcgataatttcggacccaaggggtccaaatcctgaagatattgtgagactgggacttggtcctcgcggaggacaagntcggaagagtgttggcttgcctcttcatagagggcacgtagggagtgaagtcaagttttctggaggacatgtatagagttggggtttaatgaatgtatttttagngtgtcttatgctggaagtccttgagctggaatcttacttc

SEQ ID NO: 337160 - DNA, 409 bp, Zea mays
  unsure (1)..(409): unsure at all n locations
acggtctgctctcctttcacntatgagctgcctcttttttgtatcgggatgactacactacggggtgagcatatatggcgggtcgccctctcttctagggatgcagtagagtctgtctctactcaacactctatctctagcatttcaaggtagagcaagcccatattgtctctacgaatgtatgctcaatcaagaaataggtttaggccctcaatggctaacacttgccatggagattcatattaccacacccatattaactgcaaacaacataccagggtcgaaagatgtatcttctatcgaagctgcaaacgactagcgcatgtatgaagctaccatggaaatgcacccgcaacttgaaccactacacatcatcatgccgccaaagaacaactatatgcttgcatag

SEQ ID NO: 337161 - DNA, 279 bp, Zea mays
atctaataaaaatactaacaaaaaaaaaaaaaaatttttaccaatactaaaaaaccaaccacgagaaattatacataaaggagaggctttcacatgccccactttatttctatcatcaacttacctcaccccacttcacttcctctctttttatgacctctgacccttccttaccctcaacttgtctccatttaacctcctcgcttcacctacccccttgtcctctcccaaccttctctttttgccccttacccttctttcttcattcccctacttacc

SEQ ID NO: 337162 - DNA, 213 bp, Zea mays
tgctattagtgactacaaatgggcaatgcgttgctggggctggcatggctggagccatcgatttttataaacccgtagagcttgggacactggacatgcggaacgagtccctctctctgagtgacacatctgggaggacgtgccctacactattgtccggcccatgatacttgtgatcaatgtgatcattcctgtgccacacaggcgtgacac

SEQ ID NO: 337163 - DNA, 243 bp, Zea mays
acgcttcaacctccattaacaaacgcgtaataaaacataatatcaactcccacaaaattcataggagagtttaaaaatatagccacggttgtgcattgtttccaaagctaatctacagacatagcaccatatgcagcatttagcgtccaactcgacctaacaagcatatttatcttcaagacactcaaacaaacgaccctgcatccaccaatcttatcgacctcatatcatatctcattatta

SEQ ID NO: 337164 - DNA, 410 bp, Zea mays
  unsure (1)..(410): unsure at all n locations
gcggcaggaggggggatgcatggatagtcatccacatgaactttcagagttgcagtatcagttttttcttatgcagaattcattgactatcatgaatgaaatgagttcctattgatgttgtttcttgaatcataggattgttctgtgtaccttatggtactttgtgttgtagggactgttatagaacattagatcagctctatgaagaattataattggaaccatggtaatggagtgtttgttttcttgtaactttttccagccctatgaatcgtattgcttgctcactttggttcattctttccaggtgactcgtaagactatctttgtgatgctaagaaaatttacatctgactctctctcccncccagcacacacaaacaactaattagatagaaaagaagtgaaaa

SEQ ID NO: 337165 - DNA, 411 bp, Zea mays
ctggcttctcctccccctcttaccaagtcctcctcgggttagggttccttagggttttgtggaggggcgatggcggcggctgatgtggagtaccgttgcttcgtcggcgggcttgcctgggccaccagcaacgagtcgctggagaatgccttcgcctcctacggcgagatcctcgactccaaggtcatcaccgaccgggagacggggaggtcccgcggcttcggcttcgttaccttctcctccgagaactccatgctcgacgctatcgagaacatgaacggcaaggagctcgacggccgtaacatcaccgttaaccatgcccagtcccgtggcggtggcggtggcggcggtggctacggcggcggtcgcggcggctgcggcggttatggtggcgggcgccgtgacggcggt

SEQ ID NO: 337166 - DNA, 444 bp, Zea mays
cgcagctctctggcggcgtcggcggcgaccggggctcctcctccaccgccggcccgggccggcagcacagccaccacccacctcccccgccgccgcccaagatcctcctcgccaagccgccgctgccgcacgcctcgtcctcgggcgccgacgacgacggcgggaccggggccgctggtggccgcgcgcgccaggcgccgcagccgggttcgctcagcctcgtctccgacgcatgggaggcccacaccgacaagatccttccgtatctgacggagaacaatgatttcatggtgattggggtaattgggccgcccggtgtatgcaagtcgaccatcatgaacgagctttatggatatgatgccagctcacctggaatgcttcctccatttcctacacaaactgatgaaaccagattgatggggaaacactgtactactggtattg

SEQ ID NO: 337167 - DNA, 253 bp, Zea mays
tcggtaacacctaaataagaatttccattctcctttatcttatgcatgaaggttcctgttgcactgtgatgattaaatgcctcatcgattacttcaaatgttcgttctctaataaatccaatttgtacaagcatgttatggctgtacattatcagtgtcgtccttttttgttccaattctctgtgtgtttcaagatgttttcttactatcacgttaattacaatcattatatatctatctctcattttcacac

SEQ ID NO: 337168 - DNA, 257 bp, Zea mays
gctcatatttactcatctcaactgcgacggttgtagatctctactcatgaatatcggtacggggaacagtcacaaatacaggctcagactatttaacaacgattccacacatgaaaacacctgctgccttgactaaaatttctgacctataactaaagcacgtatactgagaaatgtataactactgcttctgatacgtcgtctgccaaagaacttctacaagacacatttctttgacctgacaatacacctgaacc

SEQ ID NO: 337169 - DNA, 61 bp, Zea mays
acgcgttcgtacagacgtgctcttttctttatcttgttaatttagatgctagttgttgagg

SEQ ID NO: 337170 - DNA, 207 bp, Zea mays
gtgtttcctcagtggactagtgtgaagctgtgcttagcgtagcggaagggaggaaggacaaggcaaggcaactgatggcggcgggcggcggaggcggctcggcggcgccgttcgtgtggaagacgtacacgatggtggaggaccccgggacggcaggggtgatcggctggggcagcggcaacaacagcttcgtcgtcgccgacccct

SEQ ID NO: 337171 - DNA, 396 bp, Zea mays
aggacgcgtgaggtcgaccttcggttaagactcttccaagcgcaacccactcccgtgcgccgtcgtcttcaaccttgagtccgtgcttgctgcccaccgccctttctttgtcgaagtcaacaccgccgccgcagccgtcgaggttgaagcctcggctccagaggatgccccctctggagatggtgcccccgctgaggcccatcctgctgctgacctgtgccggggggatccggtccgtgggtctcgcggctctcgtcaacaccctcgttacctgcccccgctgcgacgttcacgtgtgtgctacctaatcggacaagccaacctgtggccactcaattaccatccgtgaaaccatcacttggacatcagtggatttcacaagtgctaaagcttttt

SEQ ID NO: 337172 - DNA, 179 bp, Zea mays
  unsure (1)..(179): unsure at all n locations
accggcgcgacccacgcgnccggtgtaattaattcaattaccctcattttatactaccaacagaatcccaaccgccgttgtatttaaccatacaacttctcaaatcctaaatccccccaaacacaccctacattagacaacatctccaaagcaccaaaaacgacacatttaattcatca

SEQ ID NO: 337173 - DNA, 349 bp, Zea mays
gttcggagcgcacacacacacaaccagatctcccccaaatccacccgtcggcacctccgcttcaagatgcagatctttgtgaaaaccctgactggcaagactatcaccctcgaggtggagtcgtctgacaccattgacaacgttaaggccaagatccaggacaaggagggcatccccccagaccagcagcggctcatctttgctggcaaacagcttgaggacgggcgcacgcttgctgactacaacatccagaaggagagcaccctccaccttgtgctccgtctcaggggaggcatgcagatctttgtgaaaaccctgaccggcaagactatcaccctcgaggtggagt

SEQ ID NO: 337174 - DNA, 249 bp, Zea mays
gaagaagtgatatgaagggtcggccccttggtggggccgtcaaatacttttggccttgaccagtgtgagaaccattttctgtgctggggatccaatttataagtttaaatagggcatactagctacccagaaatttcgatatttcactgcccaagcacagaatgaattggtactgacgcaatggacccactttacacatggtctttatgaagcatgcttctttgacaagggtggtcattggtcagtatg

SEQ ID NO: 337175 - DNA, 145 bp, Zea mays
cgaagcgtccgacgacccaataaggccttttagcaagtgcatgcacacgcgtagcagcgaataactgcccggtgcctgcctgtttgacatataaagagtacggtcgagaaagatataacttacatcgatggaagcgaagaagaac

SEQ ID NO: 337176 - DNA, 211 bp, Zea mays
acgcgcatgtaccatcctctcgctcgccaggagaatcagccgcctctgcttcttccgcgggcagagaatgttttttttcgtgaagactcataataccaatgcgtatttcaaacgttttcaagttaaattcaagaaaaagcgggctggcaagacagactacagggccaggatattgctgattaaccaagacaaaaacaagttcaacacaccc

SEQ ID NO: 337177 - DNA, 67 bp, Zea mays
accgcttcgtcccgaagcgatcttggtaaaagactgatgattcgtgttgccaaacgacacaattcgt

SEQ ID NO: 337178 - DNA, 104 bp, Zea mays
aaccgttctctcccaaaccaactttgtaaaattcttatgaattctggtgccaaacgacacaagtcgttttttaatgagttgtggaacaatttttatataaatta

SEQ ID NO: 337179 - DNA, 330 bp, Zea mays
aattactgatgagaaagcaccaaaggaaggagattttgacaacctggtacgtcgaatctctcaagttgatatagaaacagaaattgtgtttaactgccaaatggggagggggcggacaactactggtatggttatagctacattggtttacctaaaccgaattggagcttcaggtgagaacaaaatttactctggttcctgcttctgttatctgtgtgcttctgttatctgtgtagatctgactgaaaaacagtagcatgagtgcatgaacacagacagtcgtgttgggaactgtcatgtggttgtggtcttttagtattacaaactgat

SEQ ID NO: 337180 - DNA, 204 bp, Zea mays
caaaaatctgggaacaaaatctgccttgggctaccagagtatattgctcccatatcattcgctgaccattttactgtccattcggtgaacacataaatgtgcgaacaaactcattttaccagtgaacaggtagcacaatttacttcacaaaatctgtgagcacaatttagttcacaaaatctggtagcaattaacatgttgcac

SEQ ID NO: 337181 - DNA, 462 bp, Zea mays
  unsure (1)..(462): unsure at all n locations
cgnntccgctcgtnntcgatctnngtgcagcacgatctgagggtcctcgggccgaccccgtgaagacanngcttctaatcgtnncggcgatggcgccctcgtannttgcatagnnntggggcntnnggaaacccaagaaaatgcctntnncaaagcaccttcatnntgctgnncagaataccacgtggcgaatcaagcggttgcacgttgtacccaagggattnnnttgagaatgcggtngggtctccaaaccaagaagcccctgagtntnntcttaagaatgaacncnncccttgggaaagggttcctggttctggagacccctcctgatggccctgtcttttgagagtaaaatgctatcgcaccgctactgttgctcgctttgaagggatgaccaaccctctttttggggtcttccccgtatttgaacaaagccccaacgttgagcaaatggatggattt

SEQ ID NO: 337182 - DNA, 226 bp, Zea mays
gccgcccgggtatctctgtctcactaccacttgccgcccgccctgcccgttgccttctcctccgactcttatcctatacggtcctgtctctcgcacggcccggttcgctggctaccaccttacctgccgctgactcgctgcagagggcaagacctgctgcaatggacgtcgtgcctgcgtgggggcacggcagaagcactcatggacgcagtgcaaactgcactag

SEQ ID NO: 337183 - DNA, 334 bp, Zea mays
  unsure (1)..(334): unsure at all n locations
cgatgaatttgcattaatcacttcagcctagaagcttatgcttttttttacaattattactgttgggcacagagttaacagtaccatatgctatggttatctatttgtgtttctgccaatatatagctaacaattctctgctgcatttagaggaagagcgagtggtaatgtggtataagcaagggcctagtctaggatttggtctttttctatgaagaacanaccaacaaatgaaaaatggtagaaatcaagccgtacattttgggatttaatctacaatgaccttgacggaaaacaatggttaaggttaataatggagggattggtttaattt

SEQ ID NO: 337184 - DNA, 248 bp, Zea mays
cgatcccctccttcctcctagctaggtcgtcctgcgcctataaacgcacagacacagcctctgctttgcctgcctcccctcccctcccgcttgtggcttcgtccttcggtgcttctcgttttaggagtgaggcagccaacggggttgctaaaggcacagctagcgaagcttctgcagcacagcgtctcgtcgagaagtcgagaagctagctcgcttctgccagaggtaaagaacaagctagactactc

SEQ ID NO: 337185 - DNA, 234 bp, Zea mays
cctttctccattgttcacgtagtttttcgactgccatgattcactgcaatgcgaagaccttggcagccgggactacaggctattgactgcatctcaggcttggctgcggctacgctaggctcgtgcagaataaaaagcaacggccagtgcaggccgtcaggtcacacggcaatgtgcataaatatgctgtggtacaacacatcagcgctgacaagccagcactgctcgctgctg

SEQ ID NO: 337186 - DNA, 230 bp, Zea mays
  unsure (1)..(230): unsure at all n locations
agcccacctccaccgactgggctccagggtgaactatataacctatgtaccacgcgccgnnacgacggcncgccgtggatcgagtgcgaccaacnncattctcgctcgtcnnngccgccggcccgcgatcaaatccgatcgtnncgtcatgatngaaatatctatcnnaatctacgccgtcgatcgatcgatnngactacttngnntctactgggctatgtnnactacta

SEQ ID NO: 337187 - DNA, 304 bp, Zea mays
  unsure (1)..(304): unsure at all n locations
ggttgagaagtcccccatgctaatgaaagatctgaagatcagggcccacaacatcctctgtgtgacgagggcnatcctcgtgacaccacgaatactataactcctttttacatttggatttctgatctcggctctgcatgatctatctcaaatgtcttacttatgggcgcgttatgttttgtctcacccttggcactttattagatctttcttgtaacttcctctcctctgattagcaaccttgtaataacattggctcttatcataattgacccgtagctgttgtattcgtggctcagactgt

SEQ ID NO: 337188 - DNA, 215 bp, Zea mays
atccactgtcagtggcttgtcaccggtaccctcaatggagcaagaaaggaaagacggcaagctatggagggagttgaacgatggtgtaaagctgagctggattgttgtcaacaagaagatgaagagggcagtgaacctgacgagctggcacccgctgagcgggcagaggcactggccgaccgatgctgacttcgttctgcggttcgggtctgtgc

SEQ ID NO: 337189 - DNA, 376 bp, Zea mays
gcaaccggtccaacactttcacgctcagcttcagcaatggctgcctccaccatggcgatctcctccacggcgatggccggcacccccatcaaggtgggttccttcggcgagggccgcatcaccatgcgcaagaccgtgggcaagcccaaggtggcggcgtccggcagcccctggtacggccccgaccgcgtcaagtacctcggccccttctccggcgagcccccgagctacctcaccggcgagttccccggcgactacggctgggacaccgccgggctgtccgccgaccccgagacattcgccaagaaccgcgagctggaggtgatccactcccgctgggccatgctcggcgcgctcggcttgcgtcttcccgagc

SEQ ID NO: 337190 - DNA, 165 bp, Zea mays
cgcgggcggtacaacacatgccttaacactaaccctacatataaatgcttcattctttacaatattcatagggacttcctgaagtgcactatcgtctcatcagcacaattaattcatctactttgactacacttcttgatttccccccaacaaaacttgttgata

SEQ ID NO: 337191 - DNA, 98 bp, Zea mays
  unsure (1)..(98): unsure at all n locations
canatacttgcataagatggcaggnccgggcaatcgtggcctcttcgtggccctccttcggcgngggcgtggaagcngctgtnntcacggtggtgaac

SEQ ID NO: 337192 - DNA, 432 bp, Zea mays
  unsure (1)..(432): unsure at all n locations
cggntcggaaaaaccggcccgacccacgcgtccggatgaagaaaccctttccagttcttcattcagatgggttccaaagcgcctatctgggtgaggcttctcttgctgtacgccgcgccctgaggaccttctgaacatgccaacgatgctgtcgagctcccgcatcatggctcagacttgaaggaacatattacttcaaccaatattcctgcccatctcaagaggggcagcgaactatgctcggcctgtaaaaacttcacgagcgaagccgccacttatatctgcaaggaacacacacaggacagcatcgtggagtttcttcatgatgcttgcttgcaatcattctcctttgaacagaactgtatctagctgatggactcttatgcgactctcctgtttgacaacatcacagacatcataccggaatcgttt

SEQ ID NO: 337193 - DNA, 358 bp, Zea mays
acccacgcgtccgatcacagccaccatctacacatttctttaccacctcaccaccaacgctaaccaccgtgttttttgcgtttttaccgaaggaggcagagccataaaaagcccctatctcagaaccaacagtcaactagatcctactcaactgataccaaatatacaggcagacacaaacattttcttcacaagatcaccatactctactcaaacatcttctaactaaactataccaagttgtccattcactcaccaccgaacaaactaatcacctcaccttcataacgctgatattccgcttgcaatgggcatacctagaaccaaatttgccacatacatttcctacatcatcatt

SEQ ID NO: 337194 - DNA, 369 bp, Zea mays
  unsure (1)..(369): unsure at all n locations
gttggcttctcctccccctccggttcgggttcgggttcgagaggttctccggagttgggtttcgtgggtgagcggatcgagatggcagcgtcagatgttgagtaccgctgcttcgtcggcggcctcgcctgggccacggacgaccactccctccacaacgccttcagcacctacggcgaggtcctcgagtccaagattatcctcgatcgggagacgcagacgtcccgcggcttcggcttcgtcaccttctccacggaggaggcgatgcggaacgccatcgagggcatgaacggcaaggagctggacggccgcaacatcaccgtcaacgaggcccaatcccgcngcggccgtggaggcagcggcggcggc

SEQ ID NO: 337195 - DNA, 79 bp, Zea mays
agattttcgtatgtaatgatgcactggcaccaacgtgtatggaacatttttttttggctataaggcttgagcttctatt

SEQ ID NO: 337196 - DNA, 292 bp, Zea mays
tgactgactgacacatgggaaagtagcactggaatactgctgcctatacacacacggcgcttggggaaaaaaatctgacgcaaaaaccgacccacagacatactcatgcatgatgcataaaacactactagtttgcattcgcaccgaacgaattctaacttgagagacactcctgtcggacaggacctggactaactacaaactggcagggaccatcctggtgcaagtatgacccacctggcttcctttactacttacagattatttaaagccatttccgatgcatacacca

SEQ ID NO: 337197 - DNA, 409 bp, Zea mays
cggacgcgtgggtcccgctccactccgcactgtgtcgagccgagcaagcggctggcgtaccttggcaccttgcccgcgcccgcccaagctccgacgctgcctgaagcagcaagtgacagctcccctgggcgagccggtttactaccagcacggtgagcttcggtcgggcggagcagacgacaggcagcgcaccaaggtagatcgacgggctctacacggacccgatctgcctctatgctgcaacctggcttttcttcttccaatcagcaccacagcgcaacgcctgaacggccgtcgctgccggctacgccaggtgctcaagtcttcttcggccccttcgccggcgacgagcgccaccaggatgcgtccgagactaagttgatgaagcagcctacttgggtcttctttg

SEQ ID NO: 337198 - DNA, 240 bp, Zea mays
  unsure (1)..(240): unsure at all n locations
caagttaaaagaagcaccagtgcctgatcgatggcggcccangctctcctctccgggcggcaggtgctgggccgccccgtgcagtcggccgtctctaggtcgtcggcgaggaaggcgcccttcgtcgtcagggccagctccagccctccagccaagcaaggtgccgacaggcagctgtggttcgcgtccaagcagtccctctcctacctcgatggcacgctgcccggcgactatggcttc

SEQ ID NO: 337199 - DNA, 210 bp, Zea mays
cgacacattgggcccatataatcccaactaaccaacacggtcaacggacagtgggcgacaggaccggacaagccacgctggctctcgcctcactcaccgttccaatgaacctctaccaggctattacttacgggaacgtcaccagctaaccaactcgacttgatgacgccggctaccactacccataccggcacatgaacttgcgcaccc

SEQ ID NO: 337200 - DNA, 371 bp, Zea mays
acctactacgcgagcacgcgccggcgaatcgagatcggcatgtggccggcggcgacgatgttcgctctgggcttcctgctctgccccttccccgccctgtcgccgtcggcacgtaacctcaccgcgctgctgccggagctccgcgacctcttcggctccctctaccgccactgccggcaggagttcttcctgctggcgtctactcgacggcggcggcgtggttcgtagagggggtggcacaccgacggcgatgaatcatttcgtcgttagcaccgtttgttcaaatcctccgctgtaggacagttctgctctctgctgcagcgcatgtccggccctgtgttacttctttgtgaatgaacatccattcatca

SEQ ID NO: 337201 - DNA, 338 bp, Zea mays
cggacgcgtggggaaaggttcttctattacttgaactttgctaattgaagctgcagggggaacgtcgatagatcagcattgcgaggcacaacaacaaggttgcttaacaatgccaagaggccacagaaagaagccctcaattcctgaggtatgaagctgcgtatatccttaggtgaataaaacctgacgtctgttcgaagctgtacctaaagaaaaaaatgcataccaacccagaggtatgattctgtacctaaagaaaaaaatgcataccaagcctaatgtctgttgttcaccttacgtgaatcaaactcaatgtattatgtttaatgggtcttaac

SEQ ID NO: 337202 - DNA, 397 bp, Zea mays
  unsure (1)..(397): unsure at all n locations
atacatttattccgctggtttcaactcgagatatacaggcctactgcctggatttagactgtaagcaaaatatattgtgacacactaatatataggcagcgttatttacagttgattaattatgtatacaatatatataacttttacatatttcattgattaattatgtatacaatatatataaccttgtgtaggtttatgaggctactgcatccgattaacctccccaaggcgtgagctttatgcagtcatttagcctggagtttgtatccgtgtcacctagtactttacggtaataataagagactgtatctgtatgtttcggtaaaccagaattctggtcacctcttgtactcttttgtattttaatgacattanaatccgagtgtttctcttt

SEQ ID NO: 337203 - DNA, 242 bp, Zea mays
  unsure (1)..(242): unsure at all n locations
atttatttccaattntatataacttttaaatattcaggcctactgcctgnattttgcctgtttgcaaaatatattgggacacactaatatataagcaaccttatttacactttattaattatgtatacaatatatataacttttacatatttcattgattaattatgtatacaatatatataaccttgtgttattttatcaagctacttcatacgattaaccttcccaaagctttaacttta

SEQ ID NO: 337204 - DNA, 148 bp, Zea mays
  unsure (1)..(148): unsure at all n locations
aaaaanaccacccacacgtacatggatgtatataaaatatttaatcaatcatctttttaatttatacaacacctaaataccttgttttttgtgactgtcatcattacaaacaaaaacaaaatattttcaacttcacaattctattaca

SEQ ID NO: 337205 - DNA, 337 bp, Zea mays
cgttcgttgcgtagccaaatcgagatctccgtctcccccgtgacgaatcccacgcccacctgtccccgacccggctggccgcagcaacagcgcatcgcaccgggaggcgggagccgaagaaccaaacaggagatggcgtcggcgctgtcctccctgcgctacggcgacagcctctcggtggtgggcatctccgccgcgacggccgtgctctgcgaggccatctgctggcttatcatctaccgcaccgacacctacgactccctgcgcgcctgcatcgaacgccactcacgcacgctggacgccatgaaagccgctgcaactcctccgggctgactct

SEQ ID NO: 337206 - DNA, 456 bp, Zea mays
ggaccggaacgaccgacgcgatccgatcgtgcatatattccactagatcattcttatgtcgacggcaatgactcgaccgcgctgcaacgggcgttgagtgagatagaaacatgggcaagaaagacaaaatgcctgctctcgcaattctattgaggacaacctactgttgcgaaaacgatgacaaagactaccgttgtttgatcactgacatcgacaaggggaagcgattcatgacgtcgccggagcttagaacaatatcggacagctatactggaatgccgtcatataccctgtcgccatgtatgccatacacgcagcattatattcacagctaatcatggatgattgggtcggaaccaattccactaaattggtgtatgtgattaatcattttatgcgaatcattgcacatgcacgtaatgtatcatatagtgcatacacaagggaataatacat

SEQ ID NO: 337207 - DNA, 99 bp, Zea mays
cctcatcatcgcgcgcgaagcctttgtgcctttgtctccactcccgaccgcgatcacgcgcgcggcgttcgtggccacagacccagcaatgcctcgcac

SEQ ID NO: 337208 - DNA, 441 bp, Zea mays
  unsure (1)..(441): unsure at all n locations
tggatggatgggtagattacatcaatcatcggtgtgggtgtggagcgacggcttgagacgtgtgtttttcggctgtaatcgggagaaagaaaaagagaatggttgaactttcaattctattgttttcatacttttgtttttaaaattatcacaaagacttcgtttgtttgtaagctgatttctctagtcggttgcgattcatgaggacacagcaacttagagaaatatgttttagttatactgttctttttttatatagcctgtctccatctatgtaatacaagcagcattatcttcgcagttaatcgtggatgatttggtgggaaccaattccactaaattggtgtatgtgattaatcattttttgcgaagcaatacacattcacgttatgtttcatatagtgcatcatttttggaataatacatagcggntggtacaat

SEQ ID NO: 337209 - DNA, 391 bp, Zea mays
cggaatcgaccgcacgcgacccacgacgccaggtataatatgatctgctaaacgggatagtgaggtagcgaccctgcaacgtgagcgatgccctggagatcctcgtggggggagctggagtcaggcgcactgatgaggcatacactcatgcggcgtcggaacgatggatgtaccttgtatgaacacagcgttgggcgcactgtgagcttcctccccgatgggggagacggtgtggcgggaagcgctcaaagcaacgctgactcctcctgcttacccgagagcaccccgaataaggtcaccacgtgaaagcgtgcctatcggtacgtcaggtattcttcgagtgtttacaacctttggcttccgtccttgctatggctattgtctatttttc

SEQ ID NO: 337210 - DNA, 200 bp, Zea mays
ggaacccccaacacaaaaaagcaaaagcatatcacataatggccggcggcgtgttctcggggctctctggcgcgcgcgggcccgttgcggctggcgtggacgcgggaggcagtcatgggccgcgaccgcctgagcgggtgaccgccgctccggtccactcgctatcccgactcgcgtcgagcgcctcagaacactattcg

SEQ ID NO: 337211 - DNA, 414 bp, Zea mays
gcaggccagctctgatgtcccctcccagaggggagagttagctagcgaccctgcaacggtagcgatgccctggagatcctcggggggggtgctggatccaggcgcgctgatgagggtgtggctcatgcggcgtgggtccgatggatgtcccttgtattaccacagcgtcgtgcgggctgggagcttactcccgcatggtggagacggtgtggcgggaggtgctcaaagcaacgctgactcctcctgcttacccgagagcagcccgaataatgtcaccacgtgaaagcgttcctctcggtacgtcaggtattcttcgtgtgttatcgacctttggtttccgtccttgctatgactcttctctatttttcttgcctcggtcagtttgcacgtgccgcataagtcggtaaaggacgt

SEQ ID NO: 337212 - DNA, 214 bp, Zea mays
aaccggtccaacactttcacgctcagcttcagcaatggctgcctacaccatggcgatctcctacacggcgatggccggcacccccatcaaggtgggttccttcggcgagggccgcatcaccatgcgcaagaccgtgggcaaacccaaggtggcggcgtgcggcaacccctggtacggccccgaccgcgtcaagtacctcggccccttatgcggc

SEQ ID NO: 337213 - DNA, 179 bp, Zea mays
gtacagtccgaattgacggatcgaccacgcgtccgtcattaaccttcacactgctgctcgccgaacgacaactcatagccgcctgggagctccacaataccatcctacgcatgcgtacatatgccgccgatgctacgcactcatatgctacctcgagacttggtggcgccactggccca

SEQ ID NO: 337214 - DNA, 86 bp, Zea mays
gtccatccgtccgacagagcacatctcacgctgcgggtcgaacagggccgtccgtcaatcacgtttcaggccgacggcggcacgat

SEQ ID NO: 337215 - DNA, 340 bp, Zea mays
gaagaatgccgccgacgctgggcctgctcctcgcggcggcggcggcggtcctgctgctgctgctgccgccgccaccatcggcgggggcgcaggagacgtgctggtcggggccggcgccgcggcgcggggcgtggatgtccgtggccagcttcggggcgcgcggggacgggcagacgctcaacacgggcgcgttcgcgcgcgccgtggcgcgcatcgcgcgtcgccggggcgcgcggggcggcataataacaagcctagacaaaaactcctgcggggctcgtgatgcgctactacttagacatggtactggtggcggtctacccagtagccgccctcattg

SEQ ID NO: 337216 - DNA, 344 bp, Zea mays
acagccccccccccccccccccttctcgcgcctcctacctctctccagtcgggtgccacgccttgccgcgctttacctctgcggcgcactcccgttatcatataacccgcgcgccggctccggcgagattcgaccaaactccatggggctcgagatggtggaggtcatgtccgagactgttcctacggttgtgcctgcggcaaggaaggaaaacggggggggtatttaaccggttaagcggtacttctttggggccaaggacccccgccggggggcccgggggcttgaaaacggcggtgaacgggcgcttacggttaaaggaaactttgggggggacgggcttc

SEQ ID NO: 337217 - DNA, 327 bp, Zea mays
gccctcacccacggtacggcttctcgatccaaggagcccggtcgacatccccagtggaaagaccttgacggcctcaccagtgctgtacatacaattactgtcagccgttgattactcctgcggattattgtcacaggccttgtgcgaatctgctgaacttgaacggcatggactctctcttggatgacaacgaaaacctgaaggcctcatatacatgactgactgcactcccataatggactgcgcttcatggcttactgcagacgaaccgtgcgacttcaacatatgtaggttcagaggagatcaacaaaacacgctaaaaccatg

SEQ ID NO: 337218 - DNA, 324 bp, Zea mays
ggttgcggggcaagcgaattggcgtcccagctgggttcttcggcttcccagatggatccgtcaggcagatggtgtaccagcagcacctcgacacgctcaggcgacatggagcggtggtgacagaggacctttcgattgcgaacctggatgtgatacagaacgccactgtgagtggggagctggcagctctagcagcagagttcaagatcgccctgaacgcatatctgtcgtccgatctgtcacgctcccccgtggcctccctggctgaactaatagtgttcaacaatgcgcatccggatgaagagatgctcaaacaagtcgggc

SEQ ID NO: 337219 - DNA, 318 bp, Zea mays
gttcaactaacacaaacgcatgcttcacaacatgcgcggagtcacgtacatctgcgcttaggggatggacatgatcacaaaggtgaccgagaacgagaagatcgacaacgagttggtgacgaagaaggtggacgagtactacgggttgggggcagaagatcagaggaagctcaacgagtactgcgaggtgttctgcagattcatataatgcaatatagtgaccctagactacatcgcgaacatgaagggctgcgtaataaacggagcttacgggaacgatattaagcgacgtgtcaacaatggacatgtgcacaaaga

SEQ ID NO: 337220 - DNA, 142 bp, Zea mays
  unsure (1)..(142): unsure at all n locations
cccactcttcgcctactttctggagcagctagggttccgtcctcgatccgatgcgncgagtgcacaccacctttgcccactccgatcgaatcgatggccgccgagggcgagaaaaaaatgataaccctcaaaaagctccgat

SEQ ID NO: 337221 - DNA, 137 bp, Zea mays
acgcgtgcgtgtaagactgtcctccatatccaaagccggggcgccgcccctggctgtgctgggctgtgcgccctacgaacgcgcgccaacaccagccctagcgccgcccgtagctctagcgacgacgccctgccgac

SEQ ID NO: 337222 - DNA, 246 bp, Zea mays
tcttggtgtgcgcgctcggtttccattccttttttccctcgcgcgcggccaacctagaaagcgacggcggagccggagagggaaggggaggagggacgaccggtcaagggcggacgatgtgctgcggcggcgacggggagtgccggccgctcgggtggctcctgggcctgcccttcgcgctgctcgccgtactcgtctctttcgtcggcgccgtcatctggatcatcgggctgcccatctcgtgca

SEQ ID NO: 337223 - DNA, 237 bp, Zea mays
  unsure (1)..(237): unsure at all n locations
accaatttttcctaagccttcngatagagggcagggtaggctttcgtttcgtccggaagaagcaagctaaaggaaggcgatcggatcggaggccatcgggaacggaacggaacggaaaaagccttaattcgagttatcggaggagtcgctagcaccacaacacagggccttcgattgcacgtattggggtgggaggatgttgcanaaaccatggaagggatgcatcttcttccttct

SEQ ID NO: 337224 - DNA, 275 bp, Zea mays
gcgcagactttctgaagaaaaccttgttccctcttattacagaaactgtaagaaatgctattgctgtgcttcacgatcttggtgctttaacacaaggacgaacaactaacagaattagggaaaaaggtggggttcctggcagccaatcattcaccaccaaaatgcttctggttggtttattaatggactggcttgaatcaacattgacattggccttttcaaattattattaaaatacaattggtctttcaacaaccccttattagatggaaaag

SEQ ID NO: 337225 - DNA, 61 bp, Zea mays
tcttcttcacacaagcgagctccttctgctcttgtgctaagtagctagctcacggcagaag

SEQ ID NO: 337226 - DNA, 208 bp, Zea mays
gagtccagatgcaagtccaggtttgtcggcgatgctgcgagcggcatgcgggcggctgctcgcgccggggctccgtcggctcggactgggcacatgcacctacggcaaagcagctcctgccatcgggaacggaacggtacggaagaaccctcagctcgaggtatgggacgagtcgctagcaccacaacacaaggccttcgattgcacg

SEQ ID NO: 337227 - DNA, 342 bp, Zea mays
caagaagacactggataaacacgctttttccactttatacagaaacactagaaatgcgggggtggtgcttgatacgggtcctaagctagctcataacacaatcaaattaaggcgcggattaactccttctgaatgtgcaagtacaaagccttcacaggatgacttgcgtcagacaaaagaagaggaaatggatgatcactgctctcatgttccagttcggcatctgatattcatgcatcatggcattcaacagaagctggagaaaggtaatcgggttgatgatggtaatgatttcctgcgaataactgctgacctagctgaaacaacttaacttcttatcaa

SEQ ID NO: 337228 - DNA, 54 bp, Zea mays
cccacgcgtccggttctagatcgcgagcggtcgcccggttaatatttactatct

SEQ ID NO: 337229 - DNA, 240 bp, Zea mays
aaaaaaaaaaacaaaaatctatcacacactaaatatcaaaaaacaaaaacggtcgacatgggtggaacacaatcttaccttacggtcacccttgttgcccacattgcctgctgccgccttaaaagatcaaaaccttcttacccctccttaccatgggataatttttttttcggcgtcccaaccttccttttctttgcccccgtttcaaaatccccccccttcgaatacctttttattccc

SEQ ID NO: 337230 - DNA, 422 bp, Zea mays
acgcgtccgtttgctaccattgttcactttaggtactcccaaggagctcttacataattttcatgatagggggaggttggtatgtaagagaaattagctttgcctttcttatctatccgtccgcaagaccgcaacaccaccccattctccagcaacgagacaacaaatctcctcctcttgctctccgtatccgcataaggccatcaccttaaagggcagcggcggcggctgatgccacctccttcaccaccctctacatcgcgcgttcggcggagcaccggtccctctttgcctccaaggacgaacctttggcactcctcttcctccgtggcgcccacatcccctcgcaagccgtctccttctccgggggccttgcagcgtcttcatcttacagtcgcgcgcgctttgctacattcgccagc

SEQ ID NO: 337231 - DNA, 389 bp, Zea mays
cgcttcctttcgtcttccccttcgcccctttctctctctctctctctctctctctcgcgggttctcgcgtcgccgtcgccgctggtgcgagatggtcgagacgaggcggagcgccgccgcgaagcgcccggcggcgggggaagaggataagggggcgccggcatcgcctgcatcggctcccgcggagaacgcgggggcgggtccgagggcgggtgacgatgtcgcgtcgtcgcagcccccgaagcgagccaaggttgggtgcacggaggcggacaccgagaagccgttggtggcgccggcagaagtcggcaccgttgcgggcccactgcccaacacggttggtctgcaggcgctgaccggcgccatggacaagctggaggccctcttga

SEQ ID NO: 337232 - DNA, 229 bp, Zea mays
cggacgcgtgggcggacgcacgggtgctttgataataattactgaacttgcaaaatcaggggaggaggagcatgacctcaaaacaagccatcaaggacgtgaaaaataacagaggtgcctctgcctgggccggaaaggagaagaccaaagacggcgtgcatgagaaggcgggcaaagctagggcacacataccctgccgagaatgcagtggctgtagacacgatgcacg

SEQ ID NO: 337233 - DNA, 89 bp, Zea mays
gaagagataaccctcaaagctccgatggcgaggaattcgaggtggaagaggcggggcgatggattcgcataccatccgccacatgatcg

SEQ ID NO: 337234 - DNA, 209 bp, Zea mays
cgcacccaacccaatgaaccacttccatggactcgagcggtacgacgcgggggttcgtggtgggtgccatgatgaccgccgctctttggtttcttctcaagatcaaacaggcatgctgaaaacatgaagatgaccgcgtatacacggatgacgccatggaacacaaggctgcccatcataaagaagacgctgcatatgattacgaccaa

SEQ ID NO: 337235 - DNA, 129 bp, Zea mays
  unsure (1)..(129): unsure at all n locations
ancaattctccagattaaaagcacatcgttacatgccggaaatcacgggagcgcagatggatcttccactcctgcgaaccattcaggggctatatacaactatgtataagcgcgcatccatataaatac

SEQ ID NO: 337236 - DNA, 202 bp, Zea mays
aactgttgctgtcacacgtcgcctttcgcggccgaacactatgatctcgagaggcggcggcgaccaatgcactaacaagtcttcgtcccaaccggtccggctgactcttgacgacgccaggatggtgatactatcccacaagcccgacgccgacacaggaacgctgggagtaccatccccagatacaatggcttcgagcccc

SEQ ID NO: 337237 - DNA, 153 bp, Zea mays
actggttacatacaacacttccattttcccgagctcgcattcaatcagggcccaattgaggtaataatataacaacaatggtggttcccgtcatcaacttttccaagctgaacggcgctaaaagggcaaaaaccctggcgcaaatcgccaatg

SEQ ID NO: 337238 - DNA, 365 bp, Zea mays
gttgggagtaggttgcagcaatattctttgtgttgcgcgtactggtactgggaagggctagaaaatggtaaggacaaatctactcacttggaacgaggaagagaccacaaaagcagaaaggatcccagagatatgcctgtggagggttcaagaaaggaaaagaatagagatgcaacaagggagggcgccaagaaagaaaaaccaagacatataccaagggaatattccagaaaggaggacatgagatatgcaccaaaggaggtacccaaggacaactctagagataggtcaaacactgatgcaaagatggatgacataaaagatgcaccaaatgtcccggagaaggaaagcctgagagatgcacc

SEQ ID NO: 337239 - DNA, 252 bp, Zea mays
atcagtattactggcttagacaagactgaatgggactgaggtgttacgttggacaaaaattcccggattaaatccccgagctgcggcattatgtgccaacgcacttaagggttgcccacaacttcgacgttaccatctcgggcttggtcggggacttaccgcctgcctgggacgtcgaggcgtagtcgaagatcgtcataaacacttacctactcatcgtttattacgtcgcccttgttgtacgaatatatc

SEQ ID NO: 337240 - DNA, 303 bp, Zea mays
  unsure (1)..(303): unsure at all n locations
tcgtctcgtccctagtccgtccgcgtccataaactcaatatcctcgtccatcgcccccgaatacatttccgtgtgcgtttccgggtgccgctgaagtcgtatcgcattccgagcccgattcgcgttgactttcgatcgactttcgggtgccttcgacgatttcgcggtgccttcgcagattagattaggcattcccttgtcgactctcttcgaagggggnntagagcgccgagtcgaccccgtctgtcactgtgcgatggtgccttccctctatcccgccgctctggtgtaccttgtggaaac

SEQ ID NO: 337241 - DNA, 374 bp, Zea mays
cgcaaaatttttcccaaatcttctcctctttaggaaggcagcccgagcgggggctctggagtgggggactcgtcgtctccaacgagagtgattatggcggctaacgattcgtctctcaaggtgtacccgcacccctgcatcagatgtcgcaccgcctttgactggacgatatccaagatcgactggtccaacttctaggggctttcactttctcttcgtccacgttcagagtcgcgacgaggacggattttatgacatggataggatctattcttcgccggaagtactttaacaaataaagcaaagagacaaaataagaaggcttcatttgtgtaagtactttgttaaccaatgccatcaattagggataaaat

SEQ ID NO: 337242 - DNA, 417 bp, Zea mays
  unsure (1)..(417): unsure at all n locations
ggcagcagctaccatccctcactctcggtacctgacctgaccacgagagcaacatggggggaggacacgacatgcacgggcagcactacggccacaacggcggcgtgaagggctttgtgtccaacctcgtccacggcggcggcggccatggccatggaagcggctacggtcatggccatggaaacggctacggccatgggaatggcggctacagcggcggtcacgggtaccctcctcccgccgccggcgcgtaccctcacccgcacggcggccactggtacccttcttccgtcacctaccccgcgcactcggngcactacggtacgtgagccgtttctgaatcctgtgaccttttgccgtttgttacatgacatttccgcggccggccgcgcgcggtttgttatcctggctgcgtcg

SEQ ID NO: 337243 - DNA, 264 bp, Zea mays
gcgtacgctggctgagtggaatacgttatatttttgctggacacaacctttacgtgctgcgaaagataagtgccaatacgttagcaggcgtatatgttaggggggcggcacatcttggttccatatgtggagcttgagcagacctgggacacgtcattgcaaaggccgtagcaactgcgctcccacaacatgatatgcatgcaattcacaaaatgtccatgctgatgcaacgcgctagatcgttgtagtgacagctcagggaga

SEQ ID NO: 337244 - DNA, 280 bp, Zea mays
ctggcccctgagggctcccacacggaccttccagagatgactctatcaacaccctacaaggggctagaatgttctgtcaatgccggaatgatttgctcgaaagaacgcgcttatcgccgctttttcttacaccattgctgactctatggcctcctcacccgccatcatgaacgacaggagcgctagacatgctccaaggactcattacactctgatcgcaagttgcacgaataccatctttggagaatgatgcgcatgagcactgattaccgatatttgt

SEQ ID NO: 337245 - DNA, 418 bp, Zea mays
gtggaaaagcgagcaaatgatggaatacatcaagaaactttgagaatgtatcaaaggggttcttgggacagaagacacaaatatttctgaaatcgagaacgagaagatcagtggtcatcttgaggcgacacacaaacaacattttgagatagatacaaaccttttgaaattattgcatcatatatacttccttctacatttctctggctaaaattttattatttcatacagcggctgacttgaagaatactattgaagatacaatagcaatatgtgaggaacttcaaaaacaatgcacatctctaaaagaggctctaaagatagtggaggtcgaaaatggaggcctctaatagatgaaatggaggcaaggatgggtgtggaattttcgcgtaatggacttttagaagatctgaacatg

SEQ ID NO: 337246 - DNA, 113 bp, Zea mays
  unsure (1)..(113): unsure at all n locations
ngcacgcattcacccncacccctcctaccgatttatgttcaactcgatgcgtacgcccaagggcaccgttaccctttctgatcacatccacatcactattaagaacattcttc

SEQ ID NO: 337247 - DNA, 85 bp, Zea mays
aatgtactgaatcgaattttgagttttggccttttgggaactaatcaacccttgggtgcagggccacattggtttattttgtgct

SEQ ID NO: 337248 - DNA, 144 bp, Zea mays
gagatccggagcatactcagtcccaccgactttgtcgtttgacgacctcattttcttcgcggtggcgggtggtttttttttcaataataaacaataacccttgtggcaattcccgtggtgggcaaaaatatcttggtatctctt

SEQ ID NO: 337249 - DNA, 300 bp, Zea mays
gccgcgccgtccaaaccctagccgtcggcggcggcggcggcggcatggttggcgtggaccggcccctcgtcttcgtgaaaggcctatagggcgacatggtaacccacgcccccgggatatccttaccccccgtgttttgggcgcccattccccccgacgtggtgagggttacccacaagatgttgtgctgtaaaaaagagcacgactattcagtattttcccgcggcggggaccacaaaatttgggcgtactctggggccccccgcgccccgttttttatttcccccgtgtcccgggggg

SEQ ID NO: 337250 - DNA, 155 bp, Zea mays
gccgacttggcaccccccttgacctttgccaggtcttcgtcggcccttttgcttggaaccaggcttcaaccagaaccaccccagggaatcctcaattgcttttagttccttaccaaacccaaagaaggaggccatcaaagataccaaggcttttt

SEQ ID NO: 337251 - DNA, 126 bp, Zea mays
acgcacgcactcttacaaaaatagtcttttttattatacttacttcctattactctgaggtggcggctttcctcaacaccaagcagacgacgaacgacgtggactttctagctaccgtggcccatc

SEQ ID NO: 337252 - DNA, 110 bp, Zea mays
  unsure (1)..(110): unsure at all n locations
agctttgtggtgctttcgcaaagcgtcagcaggtaatcctaacatntccctgttgacgcttgggggggggttcgcatatacacaacaaagacaccttcggattttctcct

SEQ ID NO: 337253 - DNA, 302 bp, Zea mays
  unsure (1)..(302): unsure at all n locations
ccgtccgtggcaaaaccgtngccggtggtgtccggtatcatacctgtttggtcgttgtgcaaagggcgnngcgtgggccggtgggcggtnctaatcccgggcaccggcaagggccgggtcgtgcatccacggnntcgtgcgttggcatagtntngcggcggttggctgttccactngtttatacccgggataagaaaagacccgtcccacngnttcaacgtctttccccttttcatttctacacgtnnacgccgcngtnncggagaatcgcagctttgcacgacngnaaccccanngcgtgg

SEQ ID NO: 337254 - DNA, 275 bp, Zea mays
ctaaaattagaatcctctcatgcatctttagttagtagttcacacccactggagtgaacaaagttagcttcgtcttcccacgttacttatgataatgggttttcgttgcataccaaaagcagcaacatagcaactgcaaatggtcatggtagagagcgtgcacagcccttgggtatcatttctgagcgtgcacatcaagctttagcacttgagcacctcgagaatatgtggacaaacggaaagaactcccaaccagaaaatgttgatcatatctc

SEQ ID NO: 337255 - DNA, 212 bp, Zea mays
  unsure (1)..(212): unsure at all n locations
gcgttcgccggntnnggactagacccctcctactactctgctcccaaaacgtaccacccaggtgctacctttctttgaccccttcacttcaccatcctcccataaatccatctcccacttctggaatccctaccagcggaccaacgccgaaccaactgaaaaagcgacccaaggtctaccaatagaaattgaacccctgcaacccagcacaa

SEQ ID NO: 337256 - DNA, 144 bp, Zea mays
  unsure (1)..(144): unsure at all n locations
cccacgcgtccgtttcagatttcacctcctaacttttctcttatatcttcacctccttcctcggccaagcttgctttcaataacagatgagcaaacccccnancatttccatttccattcgctacttccccacttatcttcccc

SEQ ID NO: 337257 - DNA, 72 bp, Zea mays
tcgccaccacagatagcatcagcagactcgcaagggggtagggtaaggttgtgtactactcttcgccgtgcg

SEQ ID NO: 337258 - DNA, 295 bp, Zea mays
  unsure (1)..(295): unsure at all n locations
ggcagcgcggccacggcgccacgggccatgtcgaccagtacggcaacccagtcggcggcgtcgagcacggcaccggcggcatgaggcacggcacgggaaccaccggcggcatgggccagctgggtgagcacggcggcgctggcatgggtggcgggcagttccagcctgcgagggaggagcacaagaccggcggcatcctgcatcgctccggcagctccagctccagctcgtcggaggacgacngcatgggcggaagggggaagaagggaatcaaagagaagatcaaagagaagct

SEQ ID NO: 337259 - DNA, 194 bp, Zea mays
  unsure (1)..(194): unsure at all n locations
gcgaccagcgtcgcaggtctttactaagatgaaggggactccaccgtcctcgcggttaagaccggcgcgagcgcaggacgccgcggactccacgctcgccgctacaggccgngcaggaattgcgtaaggagctgtcgccacgcatccataggctcggctcgcctaacttctcgctttacacagacctcagtgcg

SEQ ID NO: 337260 - DNA, 412 bp, Zea mays
gaagaagtgatatgaagtgtcggccacattgttgtgtcgttcagatactctgggcatgaacaattgtcagaacattttcctgagctggggatccaatttataagtttaaatagggcatactagctacccagaaatttcgatatttcactgcccaagcacagaatgaattggtactgacgcaatggacccactttacacatggtctttatgaagcatgcttctttgacaaggttggtcattggtcagtatggcagcaaattgtggtacccaagcactcgcgttgtgtcggtatggtccgacattgacactgctactagtggctccaacaagtggccagcatatgtccatagaattcaaatccaatcaaaatcaggctgctttttcttgcaacattgcatgttctgatctcatg

SEQ ID NO: 337261 - DNA, 322 bp, Zea mays
  unsure (1)..(322): unsure at all n locations
ccgtccgctctactgggtcacacacanctatcacagacatagtgtgctttccaaaaggccaagtgggtgtgtacctanngcaacgcagnnntagctcgggcccgtctgcaggggcgagctcatcaaatgtcggaggggagaaagcnnaccaccgacttgcttctaaccactcanncaagaagggtacgatggagcacgctccgctcgagcgaggtacgcggtaccctccgagaaccgaggtgggtcaactcgccaccggcgtagggctgagtaccgagaaggtactaagaaaggaaggagaaggagcacnaagcacnaagca

SEQ ID NO: 337262 - DNA, 356 bp, Zea mays
accggaatggaaggccggatcgaccatgcgtacacaagccacccacatctgtgggacactgtgcatcagcggcgcactggattatggtgctcatggagagcaaacccatgatcgacactcatgtcgcatagataaagacattcctatggaacctctgaacataagcgcgggtgacaaatggtgattaacgatcgtcttgtttggaccataaagccttgtcccgataagaactggaggttgctgatatggtcattcacttgtcaaggatcagaagcacgactttgagtatggtccttgtaccgcatgacagagatacgactttgattcgatcccaggtacgccatttcagaaatccg

SEQ ID NO: 337263 - DNA, 307 bp, Zea mays
gacgtactcttgcgtcggcgtgtggcagcacgaccgcgtcgagatcattgccaacgaccagggtaaccgcaccacgccctcgtacgtcgccttcaccgactccgagcgcctcatcggagatgcggccaagaaccaggtcgccatgaaccccatcaacaccgtctttgatgccaagcgtctcatcggcaggaggttcagtgatgcgtctgtccagagtgatatcaagttgtggcccttcaaggtcatttctgggcctggtgagaagccaatgattgttgtccagcacaagggtgaggagaagcagttt

SEQ ID NO: 337264 - DNA, 216 bp, Zea mays
gccgacggcgtatccggacgcagggaggcatgttgacgccgcggccatcgacgtcgttgtggtcagccactgttagtgcgcagtcgggatgcgcccggaccttagcggcggccggtggacggccacggtgctgacggcccacgcggagcgttaggcgcccgcgctcgctgtgttactgaccatccgggagctcaggctgggctgcgcctattcgtt

SEQ ID NO: 337265 - DNA, 307 bp, Zea mays
aaacctaaattaaagcaggtattatttacaccaggaggttgtgggcatgtgcccgcaaaaactgacagaagaaattaaaattctgtatatgcagaagaacaacatacgctgaatcactagtactttcctctgtttcaaacttgttcgtgcatgtcaagagcctggaatgtcctcactagagcaagattggtcggattgctactatgccaatgctccgtgctttgctttctttgtttcaacttgtacaggacgttttccgtgccgtgcaaaatgcttgcgaacttccttatgatcgggcgatccagct

SEQ ID NO: 337266 - DNA, 122 bp, Zea mays
  unsure (1)..(122): unsure at all n locations
ccggtnccggacattcccgcggtcggacccacgtcgtctcgcatccatctctcgcgcccctagctgaggggacggtacccagcggcaccagagggtggcgacnngtacgacngtatcgacga

SEQ ID NO: 337267 - DNA, 213 bp, Zea mays
  unsure (1)..(213): unsure at all n locations
ccgtccgaaggcttctcgaagcctccgaaaccctttccgcgatctntnntcttccgccccgcttcaatctnnntctttggcgcaaggaactcacgttttcgctttcttcgggttcttctcttttcgactttcggcccccgaataaagaatgnngcgtcggcttggcgccgcctccttcgnnncgccgatctccaaggcgccgnngcgtcgtct

SEQ ID NO: 337268 - DNA, 141 bp, Zea mays
gtccagaagcgacgccgacgcagtctaggattacctgatctcatccgcagcgacagagcagggaggcagacccacccgagccagcaacccatggccgacgagacgccgcgaatactgctcgcgatcgcgggcctaacccta

SEQ ID NO: 337269 - DNA, 247 bp, Zea mays
tcggaaccgattcaggttctaagcatgatcaagctgggctatgaaggtgttgtggcactggtgggtgacgatatatcactttcaatcggtcctgaccagattgaagctctgtatgagttggccaaattttagtacgagtgtcgtaactacttacgggctgttgatttcttttaccagtatggagcctttggcacaaaccgtgatcgatatttgaggcccctttgctgaatactgcgtaaacaaatgc

SEQ ID NO: 337270 - DNA, 220 bp, Zea mays
  unsure (1)..(220): unsure at all n locations
cgtctcggcacatccacttcgctcggctcctacagtncagaggacatagagggagggagcatagctgagcactcgagccagagggcatgtcagcttgcttatggagggcgccggtnaggtacggggagacgaatctctnctcgcgagcccttcgtgccctcgcgnngcgttggctccgcgcaaggcccattctgtggcccccgtggtcgaagtccaaggg

SEQ ID NO: 337271 - DNA, 323 bp, Zea mays
  unsure (1)..(323): unsure at all n locations
gaatggnaagggtcgactccacgcgatccgtaccaacttttgacacagtcgagcagcgcacgtctttttcgagatctgagaagaattgatgagcgagcgcgcgaaccaatcaaagaggaggccgtactacctctctttcaacctcgtcccgcgcgcctgtttgaacggagtggtaccatatcaaacagtacatttccgtgcacatcgagcaaggcgatgtccaggtcggcaacgcatgctgcgaactttactgtctagaacaccgattacatgctaatcatcaacgacagggacataagaccgctcacatcacaatgatgcct

SEQ ID NO: 337272 - DNA, 396 bp, Zea mays
gcagaaaggagcagagagcgcacaccaaaaccaaaaccaaaaccaaaacggaatcattgggcacagcaacggagtcactccagtgcatcctataccgttcttccccggaccgcctttcgtgtacccctggagtccagcatggaacggcattcccgccatggcagcggcggtgtgcgcagccccagcgacagccgaagcagcgatttcatcagaacacggcaccgcgagcagcaccgtccagtggaacgtgccaccagcgatcgtgcccgtgctgccaccgggattctgcggcccgatcccagtcccggtaatcccgccgccttccgtctggccactgatcacttcctggcccaacgcaacatggagcgcgccgtggctcgggcctagcgctagcgt

SEQ ID NO: 337273 - DNA, 435 bp, Zea mays
ggtgggttggcttctcctccccctccggttcgggttcgggttcgtgaggttctccggggttcggtttcgtgggtgagcggatcgagatggcggcgtcggatgttgagtaccgctgcttcgtcggcggcctcgcctgggccacggacgaccactccctccacaacgccttcagcacctacggcgaggtcctcgagtccaagattatcctccatcgggagacgcagaggtcccgcggcttcggcttcgtcaccttctccacggaggaggcgatgcggaacgccatcgagggcatgaacggcaaggagctggacggccgcaacatcaccgtcaacgaggcccagtcccgcggcggccgtggaggcggcggcggcggctaccgtggtggccgtggaggcggcggctaccgcggtggcgggcgccgtgatggcggcggcg

SEQ ID NO: 337274 - DNA, 393 bp, Zea mays
cggacgcgtgggcgggtgcggtgcggctcacagtgcccccaccaaaccatccttgtgcgattcgccgccatcattgtgagcaagctcgagcgcgtctgccgccaccgcttccgttgcttagctctgtgctcccgccaagaaggcgaaggggagacggttggttgagttgagccagccaggcgtctgctctcggttgctttgctatggggatctgcgcgtcgtccaagcgcgtggagcaggaagaggacgagaacgtggtgtacgtggtggtggacgggcagggcggcggctgtggagggggatggggaggggacggccgtggcgcggcgggggagccgacggtggccggcttccttttctcgcagaagggcaagaaggggcccaaccaggacg

SEQ ID NO: 337275 - DNA, 403 bp, Zea mays
agccaacaaggcaacaacaaacacctccctccttcttcactttcctgccgatgttgcacgaagcaagctagggcacacaaaccgacaaggccgtctacgcgcgcgttggtcgttgtcgttgccgaccagcatgcatgcagcatggtcgtgaacaacaaggtggacagcttgtcttacgacgtctaggccacgccatcctttttcgacggcgacggctctgtgcaagggacaactccggcgtacccagcttcggcgcctgcaccagcaacccaagcgcccgtgtcgcgggaaggctgcgccgcgttggtgcttgagcttcacaaggtgtcgctgttcgagcggtggactacagcaaaggcgctgtggcagcgcctggacgatgtgttctttccggacgacccgt

SEQ ID NO: 337276 - DNA, 261 bp, Zea mays
gttactgctcaaggcgctgccgcaccatgtaaataagcaagggacggtacattatatcccagctaggctttgttcgtttcatccctaatccatggggattgagggggattagagtggattgagggggattttgacttataggggatttaatccctctcaatccccatggatttgataaaaacgaacagggccctagtgtggccgaggaatgcggcctgctcatcacacgggagggtggcaggttcgaggtcagggcgggca

SEQ ID NO: 337277 - DNA, 302 bp, Zea mays
ccggaacggacagcccggctccgacccatcgcgttcctggacacggcgccggcagcccatcaccatgagctccacacgcggacattgatcatatcgacgctagagcatttgttcggccgcatagcgtaatccactcagcacttgaagaagcctagagggtgttcctgtgcaacaagcctgactccgacatttaacttgctgtccatccgcacgcctgtgaccaatacttaccgccccatcctctggcccatctatgccgacaccttatcacaagcaccccacatcggctgagaatcaaatct

SEQ ID NO: 337278 - DNA, 262 bp, Zea mays
ggtactgctcaaggcgctgccgcaccatgtaaataaacaagggacggctcatgatatcccagcgaggctttgatcgtgtcatccctaatccatgaggattgatggggatgagagtggatcgagggagagagaacctgatggccaattcaatgcatctgaataatgatatattagatctagacaaacatgtccctacatactgcacagatacgccatgtcatcacacagaattggcagcatggcatgcataactagtgctacc

SEQ ID NO: 337279 - DNA, 425 bp, Zea mays
ggccgcccttttttttttttttttttttttttttttttttttttttttttttccaaccgagccgggatcctccctttgcgttttataacttacaaaaaacaagctcgtataataatattattacaatatagtacttagcaccggggaaatagagtcgaaaacaagagacaacccgaacggttgaagcatgatcctccgttcccgcctatgactacaagccgtccggggagaaaacaaaggctccaccgggatgccgtcgttttttgatcggacggccgaaacattcttgggcggggccggccctacacgcctgcactgcccttggtcaagccgggcgacgacgaggagatttgaagaagcgacagcggtgcggacggaagcgaggaaaatttgaaaaggtgatgacacggagccgagccgagcca

SEQ ID NO: 337280 - DNA, 332 bp, Zea mays
ttttgtttaggacgtcgccacattccatcccatctctcagcgccctcgtctcccgatgtggatgggggaaggtacataatgcgctcgaccacattaattttgtcgttaagagtcaaaccatggtttgtgttcacaactgaaaccattggattttgtttttgacatcctcaaggaggaactaaccgagagcttgctgccgcaaagaacatttctcacatctgagatcgggagaagaaagcattgtcaaggagaatagccgatctgttgatgtgcttggccatgagactgcttttgcaaccttcatgggtaagattcccatcaacaagaaaaac

SEQ ID NO: 337281 - DNA, 293 bp, Zea mays
gaattaaaggaccgacccacgcgacccgtcacgcgttcgcccacgcttctggatccggttggtttactaatcaagaccacgaccgcgcgagggtggtgttgctagctataattaggctactgctatatagaacttgcttggcacctgggatacagaaacaatgtgctcctcataataattaacaagtaaacctatgcatacatgcatgagcaccgagcgattcagtatcctgactgcatggcggcctgccatatctgtaccgaaacatacatgacaaggagcgtcagctagat

SEQ ID NO: 337282 - DNA, 358 bp, Zea mays
tcggagacagatgtgcactccatgtagatgatagtccccggatgccgaggtagccgaagtcgaggtggtcgaagtttgagcatcaacggttggcggggtgacacaaaaatggacaacaacagcctcgtggacccttttgattctttccgtgaccggtcatcgaggatcctcgacaaggaagccggcgcagcgcatgcgtctgcgctcgctagaggggccgcaccggccttcgaccagtggaggcggcggtggatccggtcgggaaagctacgacagcgacggatccagccatgacgacggcggaatttgagtgcttgtgcctttgaatgggcatcatattgcttttttacatgaaacg

SEQ ID NO: 337283 - DNA, 397 bp, Zea mays
gagacagaggagcctatttgagtatatcgacaaagtcactgcctggatgaggagcatctcgggactaactccctcagagctgtggagttctacgccttcgtctcaaaacctttcctactgctatcactgaacatcgcaacacatactcctgtaattgcataaacgacgctgataaagtgccgagtgcttccttgcaccaagactattatcatccacacttgacaaacgctgattatatgtacagtctgtattactggcttatgtaatacttatgacataaccattctacttatctacatatacaaatcaccatcgggtaactagacaaatgaaactggtgcatcgatgtacatgaatccctaaaggctatatgactgtccacggaggctataaggag

SEQ ID NO: 337284 - DNA, 494 bp, Zea mays
cgaccatccaccagcagctagcgtagcgagcgatggccaccgaactccagtcgccgctgctgcctccgccaccgccgccgccgcagcgacgactaagcccgcgggcagccgcgtgggcggcgctcgccgtctcggcgacggtcctgctcctccccttcctgatcggcagcaccaccagcagcagcagcacgagacaccctcggcctcgatcctccccaccatccaaccccgtggagctcaccctcctgaccgccgccagcgacaagggcgccggtgtgcctggacgggagccccccgggctaccacctgcagcgggggtccggccgccgggtccggcagctggctcatccatctcatgggggggcgggtggtgcgaccaccgtccgcagctggctctgaccgcaggacgacctacctcggctcgtccctcttcatgcagaaagtcatggacttcactggcattctcagcaacgacccggcgcagaatcctgatt

SEQ ID NO: 337285 - DNA, 474 bp, Zea mays
aatcaacaaatgttgaagtgattgttgataggatgattgaatacatgatcaacataactgatcatcattataagacagaaattgcatcacgttgtgttgaacttgcagagcaatttgcgcctagcaatcagtggttcatccagaccatgaacaaagtctttgagcatgccggagatcttgtcaacatcagagtggcgcacaatctgatgcggctaattgctgaaggctttggagaggaggatgaaggtgctgacagtcagctaagatcatcggctgtggattcatatctccgcattgtcggagagccaaagcttccttcttcgtttctgcagataatatgctgggttttgggggaatatggaacagcagatggaaaatattcagcttcttatattattgggaagttgctgtgatgtggcagaggcccacctcactgatgacactgtcaaggcatatgcgatctcagcaattctg

SEQ ID NO: 337286 - DNA, 488 bp, Zea mays
gttcaccggtctcgcacactgttgtcggtaggcgctatcatcgccagcgactcgtttctcctccgctgcattggtcatgcttgtcgtggctagaccacaaaccttcctcaagcatgggcgtgacatcgccttagactagctccaacaggccagctatttggcaaggcaaagctaatttagcttgtcatgtagtactgttcgtgctccaatagcccagctatctagcccagccaaattacatgggaggagagagaaccggcaaattagctggcctagacacgccagccattcttcaaccgtcacgctcacctcgcgagggaatcggcgggcagcggctccacgaggatctgcgagggcgtggcttcatcgacgaccaggatggacatccagttcaactccgaaaagtggtcgctccctgtagcctcagccatgatggaacttgagaagtacaaccttaccagtgcatttactggatcaatgcataacat

SEQ ID NO: 337287 - DNA, 402 bp, Zea mays
  unsure (1)..(402): unsure at all n locations
cgagaaggacgccggcttctaagagcaagggcgtcccttccggagggtatgcttcaagacctgccgaatccggcacgaagaagatagaacagaacagcgacgatgaaggtgattttagcagaaccaatgggtcactctatggtgaggcagcggagcatgcaagtactgcagaagagtcgtctcaggtgtactcgacaggagacatttcaagcagcgcagaaaggggcgaagctgggaccgaagaagaggctgaccaaaatcaatcttcagcgttgttttctgtatctgtggatgatgactcaatcgacaggaaacttgatgagtaccggtggtaaaataagtgcatgnncnaagttcgaaacctaaatcttcatcacttgcaaagtgttggctggacaaaac

SEQ ID NO: 337288 - DNA, 365 bp, Zea mays
ctaaagctaagcgccttactccctacatgctaaatcacctgtactatgctgcatatctgagcttgcttatcatcatatggaagctcttgcttagtcctgcaaatgacacttcaagtacctctattattagatccatgctatcaaccaatgtattgatcgcgtctgtcatgactccaagcatacactcccactctcatgcttatttacttatctacgtctgaattgtctaaaaaacaggtgaacaaatcctcttcctgctgataaacttgctatccataaacgtcttaattctgctcccaaaattatgacgacacatctaacattaaaatgccacagtcctgcatacatactacattgctacttat

SEQ ID NO: 337289 - DNA, 324 bp, Zea mays
cgcctcgctaccacagttcctcttcaagattctcagagggtactgagaactgaacgtggaagggtaagatccctggaataggtagtttgctgtaagcctgtaaagattgtatccaagcaataagaaagccccttatcacctcctcggaggcgtgttccccgctctgtaaatttgacaccggtaggttgctccagttgtatgttttgcgaatcatgggtagtggaaaattgaaatgttcattggttcttttaaaaaaaaaaaaaaaaattaaaatgaccttaataatagtgataaataaaaattttttagtattacatattatac

SEQ ID NO: 337290 - DNA, 284 bp, Zea mays
ctcatacctaacttgtttttgggaaaacgtttatcccttttgcattcagtgtgcctactgacgaagagtattttcttgccgaggtaaacaatctcctcatcatctaagtgttctccatctggaagatgaacacacccttcctctaatacctctttctccacaacaccctttaatacacctccatcacttataatttcttgccccaccgctcctttccgtcgcggaaagaccactccgttcacaagatgacaattcgcttcgcacacctcttttaacaagcccaa

SEQ ID NO: 337291 - DNA, 480 bp, Zea mays
  unsure (1)..(480): unsure at all n locations
gcctgggccaccagcaacgagtcgctggagaatgccttcgcctcctacggcgagatcctcgactccaaggtcatcaccgaccgggagacggggaggtctcgcggcttcggcttcgttaccttctcctccgagaactccatgctcgacgctatcgagaacatgaacggcaaggagctcgacggccgtaacatcaccgttaaccaggcccagtcccgtggcggtggcggtggcggcggtggctacggcggcggtcgcggcggcggcggctatggtggcgggcgccgtgacggcggttatggcggcggtggcggctacggcggtcggcgcgaggtgtggtggcggcggctactgaggcggtggcggctactgcggtcggcgcgaggtgngtggtggcggctacggcggcggcggcggcggctggagggactgatgtgtgggcccatcctggcttcggcgagttatcttatctatctatagatc

SEQ ID NO: 337292 - DNA, 340 bp, Zea mays
cattcacctacacccacgcccaaagcatcccattttttattcataaccatccccacataggtgatttctctctacgtcgacgactgacattttgcccgcaacaacatccattcacacaacatcttgtcactaaactacctgcagaatgatcactgtttcatccaccaatcattaacatagcttgcatgtatatttcaaccccatgcatttctcgttaaatatatactctatattccataacacaattccaccacataaaaacctttggaatcattatgattgctatctctccacttatgaagataccacctatgatgataacaacacatgtataccacct

SEQ ID NO: 337293 - DNA, 400 bp, Zea mays
acggtctctcctcctatgttgtccttcttcaggccgttgttcatcaactggcttcctcttcggctccttatatggagagtacgcgcgtccttcactggatgcaccatctctcttcctctagtccaatcgtctaactattgctttcgacaatagatatttacctacatcattctcatccatttatgctcaatcaccttatatgtatacttcctcaatagctcacactcacaatctttattcacattatgacaccattattaactgcaaacaagataccgcttcgcatgactacctccctatagatgctccgcacgacttcacatcttttgaagcttcatttatatacacaccaaattttgaaccactacaaattcttctttcacaaataatatctatatcc

SEQ ID NO: 337294 - DNA, 308 bp, Zea mays
ggcttctcctccccctcttaccaagtcctcctcgggttagggttccttagggttttgtgggggggcgatggcggcggctgatgtggagtaccgttgcttcgtcggcgggcttgcctgggccaccagcaacgagtcgctggagaatgccttcgcctcctacggcgagatcctcgactccaaggtcatcaccgaccgggagacggggaggtctcgcggcttcggcttcgttaccttctcctccgagaactccatgctcgacgctatcgagaacatgaacggcaaggagctcgacggtcgtaacatcaccg

SEQ ID NO: 337295 - DNA, 294 bp, Zea mays
ataaggggcgactaaaatggctccaacgaccgcttctcaatgacgacagtggctacggcgaggagcgccttcgcgagctgcaggcgttctacgacacgaagctgggggtgaaaggcctggtggactccggcttcaagtccattccgtccatctttcaccacccgacgtacgccctgagcgacatgatttctccggcgcctcctctgccgccgtcgtcgccctccgccgccgtcatcccggtggtggacctctcggtgacgcggagcgatgacctagtcgagcacgtgaggcacg

SEQ ID NO: 337296 - DNA, 282 bp, Zea mays
gttggcttctcctcccccaccggttcgtgttcaggttctggttcgtgggcgagagggaagagatggcggcgtcggacgttgagtaccgttgcttcgttggcggcctcgcctgggccaccgacgaccactccctcaacaacgccttcagcacctacggcgaggtcctcgagtcgaagatcatcctggatcgggagacgcatatgtcccgcggcttcggcttcgtcaccttctccacggaggacgcgatgcgcagcgccatcgagggcatgaacggcaaggagc

SEQ ID NO: 337297 - DNA, 457 bp, Zea mays
cttccccgtcctgcaggctccaggcgctgctgctctcgtcctccgctagcgagcgaatcgggggcccgacgccgcggcgggaggtatctcgctttcgatcagcgacggcgcgcccggatcgcttgatctgacggagtttctatctaggattttggttggagcgtcgttctccggtgcttatctcatttctatttatcggtgcctcgggttcacggccaaattcgctgctgcgtggggctttggagattggagccaattccttaaagtggcggtggcagcgtctggtgggaaccatgagcttcgtgttccgaggaagcagggccgacatagaggccggtggcttcacagggttcgcccccgagcgccgcaccatgcgaattcatgcatggagcatgccggtgatagcaattcttggtttttcttctaactgtttttgttttgttcatggtactgaact

SEQ ID NO: 337298 - DNA, 428 bp, Zea mays
  unsure (1)..(428): unsure at all n locations
aaacaccacgccgaagataaaggggagatagagtacacggttatcagaccagtgcagagagcaatagatgctgtggtggggtgccgatcctcgtccgagtctcatctccgatccacgctcggctgcgtccgnggctggtcgcgtgcgtggtcccgtccggcacagtgtcaagcggtcggaagtgcgaacgatcttcgagggccgccgttccgggagtgtcgacgaggacctccgaggagtgaggaggaggacgacgtagggggtggttggagagcaagcccgccttcgtcgtccgcgcctcgtccgcggcgacgcatcccagggcgcgccatgagcagcggagccggcgccgggcgcccgaccagcagtacatgggcgttcggcgccgcccgtggggcaagtgggccggcgagatccgcgaccccgtc

SEQ ID NO: 337299 - DNA, 498 bp, Zea mays
acggacaaacacactcgatgaaaaggagatatgatttcacgttacagacaggcatacaccaaagatgtgtcgttgttaccatcctgtgcgatctcatttccaccactcctttgactccttgctgatctacatatcccttctgcaaatgcaatctgcttgaatgctaactacttttttgccactttccggtagttctactagtgactcctcctattactaagattactacatttttattttttaaaaataatcccttttttttttttttactccttctacattattgatatatcttttcttcgctacttttatctatcaacactctaaatgtttttctcttttatcaattcccttaatttttactccctttattcttttagtaaatattttataaaactaatttttttgtttttatacaagttaatcaaattacttccttcaattcttttatttatattacctttcttttttttatttattttaaaaatatttctctat

SEQ ID NO: 337300 - DNA, 478 bp, Zea mays
  unsure (1)..(478): unsure at all n locations
cgcctagtgatggtcgtcgttggtccctgcgtccttccccggtcgtctcacctcccttcggggcccctgttttttttcagcttcggcgtccatcgcgtcctgctccttccattcgtatgctctggtgatcgtccaccccggcgtccagcgctgcccttgtctcttcgggttttgtctccccaacaccagtcggacgctccttccattcatatgctctggtggtcgtccaccccagcgtccagtgctgctctcgcctcgtcgggctttgtctccccaacatcagtcgctgcttcaactcatgttcgtggatgccgtatctacgactccgacactccctacacaaatctgctgttttgtgttcatcgccgaataaaaatgccgggcgcttctggagaacggaaagatgaagtctgctcttcgatcctaagcgttcagtgttatgcgcgaaccaganactcgtgccgatatcacggtcttc

SEQ ID NO: 337301 - DNA, 169 bp, Zea mays
tcaccctgtacttcctctcattcattcgttatacaatacacaaccaatatcatgtaaaactctcccattcttgacgccattcagtccttgaatagcctcaatactgactcttttgtataactttcatgatactacataactctaatattttaactctttcatactcatc

SEQ ID NO: 337302 - DNA, 279 bp, Zea mays
  unsure (1)..(279): unsure at all n locations
cttcccctcnncctcaataactcttttttttccnccaccatatccctccctttagaaagagtttcttataacaaccatcccaccccacatcccccattcatctctcacatatactaccaattactactccctcttcctttccccctacagcttatccacaatttttttttaataccactacatcacaaacaaccctctctacttcctcatcttccacaccgaccctcactttatcaacaactacttcctaaacaccatttacccaattatcccttctca

SEQ ID NO: 337303 - DNA, 55 bp, Zea mays
cttccctggaggccatgaccccatcgcccctttctttcacgccggctcgcggttc

SEQ ID NO: 337304 - DNA, 406 bp, Zea mays
  unsure (1)..(406): unsure at all n locations
actgttataaataaccacacaccctttttttcttaacccaaccaatcanttacattgatgagcctctctactactcttagttactaccatcagcttgcttcaacagtataatagagctatcctatgatttcgtcacctaatccctcttcagcggcccttctcctcctttcttcttcttccgttctaacacattctctcgcttaccttactcacgacaactgctttaataacaataatgtgactgtgcataacctgttcatccactactttactcttactctttatcctctttccaacatcctccctctgttctctatcacctacactcttcaccctctcaatcactccgaattccccctgtgctattttacagttctccttctctcgccctactcctcccattttt

SEQ ID NO: 337305 - DNA, 363 bp, Zea mays
  unsure (1)..(363): unsure at all n locations
gaaacccgacagggggagtgttatttcaagcttggctgaaaataaaacgtccattggtagtgctaaccaataacaacggacaaagccaacacgactaaccaggccacccagtatcgcttccaaattaatatcatacacagatgtggctgtttcgccccctgcacattattgaaacccatttggagaacaagaagcaaaagagaaagatagtggacgtgatattgacctatcactgtcatccgaggaagaaaataaaaagtttacagaaaaagagaaagaaaagccaagtgaggacagtagcaaagagattctttcaagtcagcgagacttaaagagtcatgtagaaatacctnctgacagcaa

SEQ ID NO: 337306 - DNA, 210 bp, Zea mays
caactaatctgtaacagtgaaagggtctctatctgagtgcctgacttggttacgtggtcggaatctctgaatagcactcctgacgtcctgggctcgactccccggagcgaatttctggttaaaaaaaatcccctcgtctgtcccaccccaaaccataggtctaaggaccggtcctggtccccaccctttcttacatgggcttaccgtgcc

SEQ ID NO: 337307 - DNA, 384 bp, Zea mays
  unsure (1)..(384): unsure at all n locations
aaaacccgggtcgaccgactcgtacgggctggtaatgttctatccgttcatctacgtgtacttgttctcgtttcaaaattcatctagttgtttcttaaaacgacatggttctntcttcttgtgcttgctgttagaaattgccaagaattatcactttcgcattctcttcttgggtgtagctcttgtcttcttgttcaaggaggctgaggaaagaaaagacattgaagatgaatccgtcgcatcttcaaggtactacttccacatgtgctctctcatcataattccctaactggtcatcgaggatgtgaagttcccccactgccacacctgcttctttgatgatatggctgtcgaccttctatgcatctactactcatccatcat

SEQ ID NO: 337308 - DNA, 282 bp, Zea mays
  unsure (1)..(282): unsure at all n locations
tcttactcaaatcctctctcttacattaatatccttctttaaagtattcatccaanaacacctccccagcctttttatatcaaattacacccccaaaaaatcctccaccaccaatatctttttacaacacttcatctttaacttcttctcttcttaccttctcccttacatttttttccttcctctccattaaaataaacacctctctttttcaatatccctccataaccattatttaccacaatttctcactcctatatatccccatctccttcaacttca

SEQ ID NO: 337309 - DNA, 298 bp, Zea mays
taattctgggctcacaattgttagtcacagtggtgtggaaagtgcagcatatgcatgttcaaatagtcaactagaaagcgcatctaatgtgatatctccaaatgttgatgtaccttttgttgattgggatgctcttgagattgttcctattacagaagagctggttggttctatagttcccgttgttgatgaagacaatttttatgaacacattggtctttgagtaccacatgaataagatctatgaggctgaacctgcagttaaagagtatttgaaaaaaaatcacaaggcattttg

SEQ ID NO: 337310 - DNA, 379 bp, Zea mays
  unsure (1)..(379): unsure at all n locations
cgacccatctcgtccggcccacctaattccctgccattcctcttccttctcctcctcgtctccccctangggagacgggttttattaaacacaaagacgcccccctcatcctatgaagccatggatcacaatgaggctgcgtgccaggccccctatggacccatcctctgcatcaataactgttgcttcttctgcagcgctgcgaccattaacatgttctccaagtgccacaaggacatgataactaagcatcatcatgccaatcttgcttcctcctctatctacaacatcctaaaccgcatctaccccttcatacatcctcttctttctttcaacaacaccttattaccttattcccaacttcacttcaaacaattaa

SEQ ID NO: 337311 - DNA, 51 bp, Zea mays
tccgaattccggtcgggccaaccttccggccaattttgttacaccgcccga

SEQ ID NO: 337312 - DNA, 204 bp, Zea mays
tactcctcaccaacacaatcttaaaatccttcccatcctacctctctattatatacttacctcattacatcaactcttcattcttctcatcatatctctcattcaatctcttacctcctaaaactcttcctctcctctcttaatctctccaaccactcattcttccttatccacttactttcattcttcacctccttcctcaaa

SEQ ID NO: 337313 - DNA, 301 bp, Zea mays
cagcgccagctccacccctcaccttttctttatatacacccctcctcccaaccctaccgaatcatcactaccaccgctctctcttcctctcctccatctctcaacgcctgaaactcacctcaccttccctcctctccgctcatcccccactactcccgtagaaaatagctgactctgattatatccatcccctcttctacgacaacctaactttcatcgtcaatgcttccttcgccctctactactctcctaatgccttctttcccagcatcttttttctccctctccacaccggtttaat

SEQ ID NO: 337314 - DNA, 187 bp, Zea mays
tcttttccttccatccaatcttttattcaatctcagccatagcttctcttcggacagcattctactaactaccacgccgcctataccaattcccgttcctaggagaaaactcgtcaagtgattgaggcggcccatgacaaaaggagggaggccaatcacaatgcttcctactccgccaaccacacca

SEQ ID NO: 337315 - DNA, 321 bp, Zea mays
  unsure (1)..(321): unsure at all n locations
tctttcttctcctccccctcttacttatttctcttccggttacgcttacttanggagaagttttttacaataacctcccctcacctnaactaccccttcttcttcactgtctttcctctcccaccatcaacaattctctttaaaatcccttcacctcctacttttatatcctccactccaatttcatcacctaccttcatactactacatctcccttcttccacttctttaccttctcctcctacaactccattctccactctatctataacataaacctcaaataactctaccgccataacatcacccttaaccattccc

SEQ ID NO: 337316 - DNA, 51 bp, Zea mays
cgtccgctcgcataccactgcatgggtgttggggttctttgtatccctgct

SEQ ID NO: 337317 - DNA, 175 bp, Zea mays
gacccactcttacagtcttcctccactatatcactcccctttgttattcttctactagtactatcttcggcgcgagattttaatatacaacttctccccctactacacaccttctcttatttacccaccaccatacttctatcaaaccacctcttctttcttcaagcctaccacc

SEQ ID NO: 337318 - DNA, 307 bp, Zea mays
  unsure (1)..(307): unsure at all n locations
gctccgtctacccctctacacctgccattggtttttaaccatggcgtgggctactcggggccgtgtttttaaaaacttctttgctccnaccatcctcttcgtcccaaatactatctcttccccctccgtctcatgatccatcaccgccgccaagctatcccacttcctctccttttccacctcctgaaacaccgccctctgggccaccttcatcggcggcataataatgttcaataacctgcctaagcacatcttcttcaacttgcataacaagatgttctcctcctacttcacgcttatatctacc

SEQ ID NO: 337319 - DNA, 244 bp, Zea mays
acagcataataatccatattctactccatctctttcttctatactgcgagccctattcgggcgggtcttttatcaaatgctccgccccctcaaccctttcacattctccttcatctaggctattccttcctcttctgcttcttttattaaagcgtaccactaactctttttttaccactacaacaacccacgtaacgtatgttccttctacaaaaactaccccaacttcatcacttttttgttc

SEQ ID NO: 337320 - DNA, 94 bp, Zea mays
attttcttcccttctttctttctcttaaaatttataacaacctctatttctcttcccttatttccttatagtctaccatcttctcctctctttc

SEQ ID NO: 337321 - DNA, 275 bp, Zea mays
  unsure (1)..(275): unsure at all n locations
tccatctctccatctcccctccattttctttctaaaattctgcnncnacctcccatgcggtctcttctactaacccactccgcacattcctctctaccttatctctcttttttctattaaatttttaatctctttctcctttgtttccttccaccttacctctctatttatattaatattatcccttatcccttctcccctctttcctccttacctatttactcctatcacttcatctctctcctttcctcctctaatcgcttctactcttctca

SEQ ID NO: 337322 - DNA, 341 bp, Zea mays
gtcttcacactcctcgccatcacataaaaccagtgcatgcagaagcagcgcaatggcgagcaggaccatggccctctcctccacagccttcgccggcaaggcagtgaacgtgccgtcgtctctcttcggcgaggcccgcgtgacgatgcgcaagacggcggcgaaggcaaagccggcggcgagctccggcagcccgtggtacggccccgaccgcgtgctctacctgggcccgctgtccggcgcgcccccgagctacctgacgggcgagttcccgggcgactacggctgggacaccgcggggctgtcggcggacccggagacgttcgccaagaaccgggagc

SEQ ID NO: 337323 - DNA, 195 bp, Zea mays
  unsure (1)..(195): unsure at all n locations
gcctgaggactagcgcacattcggttgagtattgctttccttaaccagngcattttccagaggggagagtattgtggatgccgggtgctaggccacaaccncangaactccccgtcatcgctcatgtcgacatggactgctactatgttcaagacgagcagcagaggaaccccgcgctcaggcgacagccgaccg

SEQ ID NO: 337324 - DNA, 333 bp, Zea mays
gtgaggttctccggggttcggtttcgtgggttagcggatcgagatggcggcgtcggatgtggagtaccgctgcttcgtcggcggcctcgcctgggccacggacgaccactccctccacaacgccttcagcacctacggcgaggtcctcgagtccaagatcatcctcgatcgggagacgcagaggtcccgcggcttcggcttcgtcaccttctccacggaggaggcgatgcggaacgccatcgagggcatgaacggcaaggagctggacggccgcaacatcaccgtcaacgaggcccagtcccgcggcggccgtggaagcggcggccgtgggta

SEQ ID NO: 337325 - DNA, 376 bp, Zea mays
  unsure (1)..(376): unsure at all n locations
aacctccactgaacacaatggagcagctcctatctgttcaaaatgccatttctaaaattgaggagcttgtccaagatgcanatattgttcttctgaagataagagctctattgttggcttttccatcccaggcgacggacagagctattctggcattggtattgatggccctgagccttgccatcgttcccacaaaagtgcttctgctgctggtgtttctggaggtatccacgaacaactcaccactacgaagagcaagcacagaaaggtgtaccagaaggttgagagagtggtggttcagcatacctgcagctccagtggtggtggagaaagagaaagaggacaagcaaagncgatgatatatctaatgtaaatc

SEQ ID NO: 337326 - DNA, 388 bp, Zea mays
cacgactccagatctcccaccgctcgccatggtcctttacgcgaggcaccgccacacgccggattcgagctcctccccacatgccgcctctgacatggatctcccgctcgccggggctgcctaccagccctacgtctctgagctcctctccttctccatcgagcgcctgcacaaggagccggagcttctgagggtcgacgcggagcgagtgcggcggcagatgcaggatgtggcagtggagaactacggcgccttcatcgccgccttcgaggcgctctacttcgtccgcgcgcagctcgagagcttccatggccacctcgaggccatggtgtatacggaatgcgaactatgatgaagcacttgatctagaagcttttgtgagcaaaat

SEQ ID NO: 337327 - DNA, 187 bp, Zea mays
cctcgcttccggcgccatggagacgaagcgggtggccatcatcggcgccggcgtgagcggcctggcggcgtgcaagcacctgctggagcgcggctgccggcccgtggtgttcgaggccggcgccgtcgtgggcggcgtgtgggcgcgcgtgccgacagcacggctgcaacccgggccagaccagact

SEQ ID NO: 337328 - DNA, 233 bp, Zea mays
  unsure (1)..(233): unsure at all n locations
aggcccgggccgaccgacgcgtncgggtccaatcgtcatcaccggctacctgttcctgacttcacacctacctcctccacccagaggcgccttcatgcaaaactgggcggcctattcctacaacacccgcatatgccccataccaccatatacccgctctgatgctttaaatcaatgtgtataacattccaagcatctgacctgacaaataccgacccaagcaaccatgattc

SEQ ID NO: 337329 - DNA, 339 bp, Zea mays
gcctgaaaaccagacacaaccctcgctttgttcttaccaaccagtcaagctgccaactggtcgagctgcgggaacaggagacagtgccatcctgtgatacgtgctcagaagatcgacaccgtttacagacactgcacaggtaccgagacgcaacgatgctaatgtcaacaagagactcacaaggggactgcacaatcattgtgctggctggtgcaaactagaaagagtaggcactaaatctgaaagacaaagtgaacgaagaggctagcagaatacctatgacggacaggcccatattgtgtatcgcagaaaaagccgaagctcacatgaggaagaaac

SEQ ID NO: 337330 - DNA, 338 bp, Zea mays
cgcgagcggcgcccttttttttttttttttttttttctgcagttgctactgattattctggggccactgcattgtagaacagacacgcgcgactctgacaccactaactcccgacatcgcactatccgcaaacgacgtcgaacgggacagggaatggtacttccagatagaaaacgagcagaagaatcccggttggacgacggcaccgagtcaccgacctcataggccaatcttattcctgcccatctgatcaccatttgctcaaaacaaaacaaaaaaaatcttgtccgtccgtctattccagttgacctctgcccggggacgaagacgctgtagcc

SEQ ID NO: 337331 - DNA, 332 bp, Zea mays
gacgacttgtttcattgattcttgaagagatctagcttcttttgcaccacaaggtcgaggatgtcttgcagctgcggatcaagctgcggctgcggctcaagctgcaagtgcggcaagaagtaccctgacctggaggagacgagcaccgccgcgcaggccaccgtcgtcctcggcgtggccccggagaagaaggccgcgcccgagttcgtcgaggccgcggcagagtccggcgaggccgcccacggctgcagctgcggtggcaactgcaagtgcgacccctgcaactgctgatcacatcgatcgacgaccatggatatgattattatctatct

SEQ ID NO: 337332 - DNA, 300 bp, Zea mays
gtcacacacacacacacacacacacattttctttctcacacacacacacacacacacagaggagtgtttttcaaagccaagggcgtgtactaccaaccagctatctcagacggcagcaggcaaccatcatgtcggacgagaagcaccaccacttcttcaaccaccacaagaaggacgaggagcagcccaccgtcgagtacaggtactccgagaccgatgtggtcaccgtcaccagcgagggcgagtccgacacgtacaaaaaagaggagaatgagcacaagcacaagcagcacctttgtg

SEQ ID NO: 337333 - DNA, 338 bp, Zea mays
acactcctcgccatcacataaaaccagtgcatttagaagcagcgcaatggcgagcagcacgcatggccctctcctccacagccttggccggcaaggcagtgaacgtgccgtcgtctctcttcggcgaggcccgcgtgacgatgcgcaagacggcggcgaaggcaaagccggcggcgagctccggcagcccgtggtacggccccgaccgcgtgctctacctgggcccgctgtccggcgcgcccccgagctacctgacgggcgagttcccgggcgactacggctgggacaccgcggggctgtcggcggacccggagacgttcgccaagaaccgggagctg

SEQ ID NO: 337334 - DNA, 205 bp, Zea mays
caactccagctatagcaccgagggcctcccttgtggaagtgcctggcgctcgcagtcgccatggacctccgcatcgcctacaccatacaccgcctcagtggcgcccgcaccctctcccagatactcgctgaggcccggatcaagatcgacccgcgcaacaacaagctgcgcgacctggcgcgcgtcatgcgcgcgctcaccgtgt

SEQ ID NO: 337335 - DNA, 193 bp, Zea mays
  unsure (1)..(193): unsure at all n locations
ccgtccgtacattggtgtcggtcaaaaagaagctggatatatattatanntatagtgtcacaaccagctacattttgtcgggtggaggcttttaaagatggccttcgtgatcactacngctgctcnntttttaggacccgtggaacctnngccatcggctgtcactcgatgaaataatacgatnnntaaccac

SEQ ID NO: 337336 - DNA, 206 bp, Zea mays
gcgaccgttcagtggccagcgttttaacagacatctatgtgtctgcgacaacaactaggtgcctgagcgacggcgtacagcacaacgcgcccgcatactactgaaggtgcgaggcctacatctgtatcataacaggcgacgagcatccagtctgcactgtacgatggacgcccctacgtgcacggcttccacggcctggaggagtc

SEQ ID NO: 337337 - DNA, 236 bp, Zea mays
atcgttacgttagtcgtcttcccgcactaagttgcttttcactttcgacaaatacctggccggaccgggatttaacagccaaagcgacagaagctagcggctgtggcaatggccatacatgtctttcaacttgtgcttgctccaccagtccacctgtcgaatggacgcgcctacatcgaccttttacggatcctcgcgcagttcgcaatggttcacttcttatacttactagcagc

SEQ ID NO: 337338 - DNA, 305 bp, Zea mays
ttgtgaatatgattattccgaagctgggagctggtagggatcgggtgttgtctgtatgctatctggcatgcctaatgtgatggcactggttagtacctgtttgtatggccttgtatagaatatatttcgtcgcatcagcttgagttgtggttgcgtgaacctaccatatatttcctcgcaaaagaataatgtgtcgttcaaaaaaaaaaaacaaacatgaccacctctcctgcaaatgcgacagcatgtaaaaatgctaccaactgcactgataaataacatcgaccaacaaccattaatattgg

SEQ ID NO: 337339 - DNA, 414 bp, Zea mays
cgcaggtgtgggaaacatggttgctgtcggcgaacggcgttaacagccgcacctccgttcctccgggcgtgcctccgttcctccggctgcgcccccgctcctccgaccgcccccggtacctctggttgacctcgcccccattcctccggctccgcttcgtgttctccggcctcgcccctgttcatccaaccttcggttctagcccctcgtgaaggtaggccagcctgggtatgtagaatttggatgtcagtttccttatattccacatcggttgcattcgacccgtgcataagggtgtgcaaccagttcattggaacatggccccaaattttactacattagctcatttaggattggaggcatactgttttatcacttgcaggtcaattgttttccaagatattgattcacttc

SEQ ID NO: 337340 - DNA, 437 bp, Zea mays
  unsure (1)..(437): unsure at all n locations
gcgaagggaaaaaaagaagaagaagagcggctttggatcctcgcatttatcgctcgctccgatgcaccacaccaccatcggtccgtgtcactccatcgcacgcatcgccgccactccgctcggcccgacgcccgagaagcattcgaggaaggaaggaaggaaggagatccgattccaaccaagccgggagctgagagctcccccaccggccccgccgcacctgcagccgctcgcttcggcttcgctcaggctcagcagctgtgtgtgcgtctgcctgtggtgtggactccccctcacatggcgagggcggaggagagccgcaccccgcagctgtctccccattccaatgccaagtgttgatctctcagcaaggagggagaaagcagaaggaccggttntgatcttctgagcggntcatggttatggatcgcgcgggt

SEQ ID NO: 337341 - DNA, 390 bp, Zea mays
gagcgcacccgtacgggcagcaacacaagcaagaaccacacctcctttcttcgcctgtgatcatgtcgtcttgctgcggcggcaagtgcgggtgcggctccagctgctcctgcggcagcggatgcaacggctgcggtatgtaccctgacgtggagaccgccgccaccagcagcgtcaagaccacggtcctcgccgcgccgaccaccaaggccagcgccggcggcttcgaggcggccaccgagggcggcggctgcgactgcaacacctgcaagtgcggcaccagctgcggctgctcctgctgcagctgcaactgagccggcccggctcggcgatggcgcacgagagtcgagaggacgacgacgaggaggcgtataataataaatataatag

SEQ ID NO: 337342 - DNA, 294 bp, Zea mays
ccgggccgaccgacgcgtccgggcagcaacacaatcaatatccacacctcctttcttctcccgcaaaccgccccacctactgggggggcaaatgcaggggcgggggcagctgctcctgacgaaaaccaagcaaccgctgagcaatctacccagacgtggagaccgccgacaccagcagcatcaagaccacggtactcaacgcgccgaccaccaacgacagcaccggcggctacgaaacgaacaccgacgactgcagctgcgactgcaacaccagcaagagccgaaccagctgct

SEQ ID NO: 337343 - DNA, 466 bp, Zea mays
gcagagacaggcgtcttcgtactcgccttttttcgcgacccaaagcgttcccccttctcccattcttctctcatttctcaccaccgccgccgctaccccctttcgacaacaccatgagggagtgcatctcgatccacatcggccaggccggtatccaggtcggaaacgcgtgctgggagctgtactgcctcgagcatggcattcaggctgatggtcagatgcccggtgacaagaccattgggggaggtgatgatgctttcaacaccttcttcagtgagactggcgctgggaagcacgtcccccgtgctgtttttgttgaccttgagcccactgtcatcgatgaggtgaggactggcacctatcgccagctcttccatcctgagcagctcatcagtggcaaggaggatgcagccaacaacttcgctcgtggtcactacaccattggcaaggagattgttgacctgtg

SEQ ID NO: 337344 - DNA, 294 bp, Zea mays
  unsure (1)..(294): unsure at all n locations
ttgatcactgagcacaaccactggngttttttttaatcctcncgcaanaacctaggcgactatttatatcggcggcgtgggtccacctcacttttaccaatggacgtcatgtgtgttcacagaacaatgatattcttgccttgcatctgcatgtaaacattgatatctttcagtcacatactctacctggtttcacccacaaacttactaaggataaactaaaaataaaaccataaaaagttactacaaaacaatcttcaagccaaacacctatttccatcatcatcacaaaca

SEQ ID NO: 337345 - DNA, 366 bp, Zea mays
gacgcaacacttacgtgccctacgcacgagattctcttaccgcatcggagggctcctggcctccgctgcgcccatggcgtcccaggcgccgccagagccagcaccggacgaggcgggtctggaaagcatggagggcctcgtactcgacacggtcatcttaagagccggcgcgcgccccgcagcggagctcggctgcgccagaacacgtcctgcgaccgacgttggcgaccactacctctggcgcaaattactgggcgaggaactggggctcgacgctcccgtcgatccagagggccgggctcttgcctacgtccatgatgcatataaactttgggtggagtcttttggcatgtaccctctacctat

SEQ ID NO: 337346 - DNA, 255 bp, Zea mays
  unsure (1)..(255): unsure at all n locations
atgcgcccgacgcgcagacagacgacggctgctccttcggccgactcgccttccggcgccatcagctcggcaccttctgcctacgcggcattcacagcgctgggaccaggaccggcgcccgagctcgctggcacggtggcgacatcatcactcgccggcagaanacgtcgcagacgcaccggatcgagcctgagcccgccactcatcacaatactggcggccacgggcgcagcgctgctggtggagctgtacaca

SEQ ID NO: 337347 - DNA, 380 bp, Zea mays
  unsure (1)..(380): unsure at all n locations
gccgctctgcagccgagtcgagtcgaactagcgcgcgagcgagcgaggaagaagaagagctagctatactgctgcttcctcgcgcgcagcancagcagcaaacgaagaaagctccatctgcttgcgcacacacacacatacacacacacaccagctagctccatgggcggcagcgcggatgcgaacggcgcggggtcggtgcgggtgccggtgccgccggcgcggccgttcctggacacgttccgcgggaacctcaaggagaccttcttcccggacgacccgttccgcggggtggtgcgggagcgcggggccgggcggcggaccgtggccgcgctgcgctacttcttccccgtcctcgagtgggcgccggcctacgcgct

SEQ ID NO: 337348 - DNA, 155 bp, Zea mays
gctctagatacgcagtgcccatacattcgtgtttgtcttcagaaccgcgctctacctagacgagacattgggatgcgatcatatcggcgcctaaactaggaaactactacttgctctgattgactaacatctcaagaacctccggatggacaatc

SEQ ID NO: 337349 - DNA, 381 bp, Zea mays
ggctggcttctcctccccctcttaccaagtcctctttgggttagggttacttacggttttgtggaggggcgatggcggcggctgatgtggagtaccgttgcttcgtcggcgggcttgcctgggccaccagcaacgagtcgctggagaatgccttcgcctcctacggcgagatcctcgactccaaggtcatcaccgaccgggagacggggaggtctcgcggcttcggcttcgttaccttctcctccgagaactccatgctcgacgctatcgagaacatgaacggcaaggagctcgacggccgtaacatcaccgttaaccaggcccagtcccgtggcggtggcggtggcggcggtggctaccgcggcggtcgcggcggcggcg

SEQ ID NO: 337350 - DNA, 344 bp, Zea mays
cggacgcgtgggtttttttttttttttttttttttttttttttttttttttttttttggtttgtttttttttttttggggacaggaagggccttttttgaaataatgaaattgaaaggctttgtttttccaaatgtcaatatacccattactttaaaagtacacgggattttaggcgcagtttataaagagacatttagcaaagtggcaaccaaaaacaactgttttttggggtccaactaacaacatggaaagggaacatcctccggtcctttagggttaaaacaaaccttggactcttttttttcacctgcaaaattggtctccacgtaataaatgaatgcc

SEQ ID NO: 337351 - DNA, 332 bp, Zea mays
  unsure (1)..(332): unsure at all n locations
gacgacttgtttcattgattcttgaagagatcgagcttcttttgcaccacaaggtcgaggatgtcttgcaactgcggatcaagctgcggctgcggctcaagctgcaagtgcggcaagaagtaccctgacctggaggagacgagcaccgccgcgcangccaccgtcgtcctcggcgtggccccggagaagaaggccgcgcccgagttcgtcgaggccgcggcggagtccggcgaggccgcccacgcctgcggctgcggtagcagctgcaagtgcgacccctgcaactgctgatcacatcgatcgacgaccatggatatgattattatctatct

SEQ ID NO: 337352 - DNA, 408 bp, Zea mays
  unsure (1)..(408): unsure at all n locations
gcatcctccatgtccaggccgctctcttccttctgctttcaccggatcaggtccggcggcaccgcgtggaccgccgcgcctccatcgatatgcgccaacaaggacgacggcggcggcggcggcggcggagagagcaggtccctaaaggatggcaagcaaaaggacgagtgggaggaggctaacgagaagggcagcgcagaggccgtcgtcgtggggaggaaggtgatggtggcggcggcggacggcggcggcgaggaggcccgcacggcgctgcagtgggcgctgtcgcacgccgtccggccctgcgacacggtggtcctgctcgacgtcgccagcggcaagaaccgtacgtgcgtaagctgcgtgtgaccaataaccatctattntaagtcctgctggttacagtac

SEQ ID NO: 337353 - DNA, 409 bp, Zea mays
gcctcgtcggcgcgcgctgtcctcatgtttctttcggcgcgcgctgtcctcatggtccccgtgcccaccgccacagctcgcggcggccggcgtgccgaagcactgcttccgacgcagcgccgacggctacctgtactgcgagggagtgagggtggaagacgcgatggcggctgccgagcgcagccccttctatctctacagcaagcttcagatcctccacaacttcgccccttctatctctacaacaacctccccgtgctacgcatcctgcgtgagcttggctgcggcgtcgtcctcgtcagcagcaacgagctccgactcgccctcgaggcgggattcgaccccgccaggtgcggctctcgttcctagatttttacttcctgggatgaactggtgtcattgagcaaat

SEQ ID NO: 337354 - DNA, 363 bp, Zea mays
ccaaaaaccccagtcgcaagggggtggagcctttgagttatgggaagggtgtacagcagtgccgggggggtggacaaggcgtggcagcgcaatcttcatcttatcggcggcggcggcggcggcggggagaagaaggcgtgtcctgccgcggcgcccgcgctggggctgcagaagcataagtcgtggtcaccggacatcgagcgcgacgaggtgtgggagcgccggcgccgggacatgcgccgcggaggcacggcgcttcggcgcgcgcggagcgtcacggacgacgacctcgccgagctccgcgggtgcatcgatctggggttcggcttcgagcccgcggagtcggtgtgcgcggcgtgcggc

SEQ ID NO: 337355 - DNA, 338 bp, Zea mays
  unsure (1)..(338): unsure at all n locations
accctgcttccgcgccaantgcttacgacgtttgacttttatgcgctgcggaaccgcaagagcgcggggcgcgcagaggcagtggcgcgcgcgcttgccgccgcgtcgtggatctgtctggacttgacagacatgctcctcgccgacgccgtgttcctggacgtcgccagacttctgccccggcgggcgccgagccccattgccggccccaccgacgaagtggacagcgacaatgaggaggccggctgcagcgtatgctaccccatggtgctcgggcaaatcaccatgtacaacgaacgggaggcgtacaaactttacattgaacagcatgcgggatg

SEQ ID NO: 337356 - DNA, 330 bp, Zea mays
  unsure (1)..(330): unsure at all n locations
cggcgaacacgctgctccgctcggctctgctttgctttactctgctctgctctgcggactttggtgggacaagacaagatccagatgcacaagccgaccgctccttgccacgcccgcgcaatcctctcaacagtcgacaccgccgatggcatcagccgcgcccgcgcccaagccaggggtcctcctcctgcgccgcacggacgcggacttcgccgccgcgctgcgggcgcgcttccgcgtncacgacctgcacgccttcggcgcgccgntcggggccttcctcgccgccgccgcggcggaaccggagcccccgcgcgccgcgctcgtgat

SEQ ID NO: 337357 - DNA, 425 bp, Zea mays
aagaaaccaaggtacctagttcaaagagtgcttatctaggaatacaatggagggcgctcgtgcgagcgcagcaaccggagccctgcagtccgttgtggcgaagctgcaagctctgctccgcgatgagtacaggcgcctcacgggaatgcgcggcaagatggagtggctcactggcgagctggttgccatgaaggccttcctcaccgacatgtccagggacgagactcctcctgatgaacaacgcaagctgtggatgaaggacgtgcgggagctctcctacgacatcgaagacagcctcgacgacttcttcgtgcagcatgccgccaagccagacggcatcatggagaagatggcgagcctgctggagaagaccaagagtcgccaccggataggcaaggagttcgacgccatcaagaggaaagtca

SEQ ID NO: 337358 - DNA, 220 bp, Zea mays
cggacgcgtgggcggacttttgggcccggatcacttttgcacgcaacctcatctcgtcctccagatctattatgggcgtccggcttgacaccttgcctccccgagtgctcatcatgagctactttgtttctatttatcatgaaatccgtttgcttcatgttgtgcattcttatatttgattgctagattcttcataccctctttggatcctgtattgtgt

SEQ ID NO: 337359 - DNA, 335 bp, Zea mays
cggacgcgtgggcaaaattccctcggcaggtggttattgtagacgctccctcatacctaccggccaatttaagcgggcaggggatccccacaaggcatcacatggaagcgaaaggtggcggtggcgcggcgtggcgcgggcgctggcgcggctagctaggccggctcgtgtgcgtgcgcgaggagacagccacagccatacagggatgctgtctgcttcgtgaccgtgctggtggtggtgggctgcagtctgcagctcgtatcacacgcccacagtgcaagaaggagggagtgtaagaaaatagaggaagttgtttttaaaggcaacagcgagtc

SEQ ID NO: 337360 - DNA, 269 bp, Zea mays
tgagcacatgctcctgtggcgttacccattttagtctcgcgattagtatgccctacatctgctgctgatgagatgggacatacatttctggcttgagcgcttgctgcgttaaccagcgctccacaatatgatatgaggagcggtgcctttaaccatggttgcatagagactggtgacgttgacagtagtattcttcccaacgactcctgtggaggagaatgcacactcgcttttggtccagctgaaacataagacaatgccttagatat

SEQ ID NO: 337361 - DNA, 227 bp, Zea mays
  unsure (1)..(227): unsure at all n locations
nggacgcgtgggcgcataggtcccgcggctactgcttcgtcaccttctccacggaggaggcgatgcgtaacgcgatagagggcatgaactgaaaggagctggacggccgcaacatcaccgtcaacgaggcccaggctcgcggcggccgtggaggcggcggcggcggctacggtggtggccatggacgctgcagatactgtggtggcgggcgccgtgatggcggcggc

SEQ ID NO: 337362 - DNA, 234 bp, Zea mays
agccttctggaccccatgtgatcacgctagtggtctcgattgtacatcagaaacctgcatccccaggtcaccgctagagagctggagaacgaactccgcacgatcgccgatcttcgcatgtctgcctgcccgcaaaccacctgactttgcctatatcgattttgatgataagatggacgcacaggatgcaatccttgacctacatggcaagaatggatggaaagatgaggtata

SEQ ID NO: 337363 - DNA, 296 bp, Zea mays
cccgttataaaacaccataaagagagcgagtgttctaccgttccgaccaagaaacaaagagcgaacttcatcggcgagaggggagagcataaactacaggcataggaccatgtacagatatctcgggaataaaagcgaccacaccacgtgctaccagatccttgtgatgcccaaatatgcactaaagaaccacctattgatgacctaagcaacctcactattgtagaaacacatctcacaagccgattatccctaaacgctaacgattcatgagaaggattctttcatctagatag

SEQ ID NO: 337364 - DNA, 211 bp, Zea mays
agcgtctggctacaggcaacagccctcgggaaactcgcctctcgcccgctcgcaaccggggcgggaaccaccggcccactgcgggtggcgcgggcccatagagagcagtctggtcctggcccacataaaacaaccaacggcttgcaagacatggcggactgcaaaacgtaacatactaaagacggagctgctgtaacatgacatgctgctt

SEQ ID NO: 337365 - DNA, 417 bp, Zea mays
gcatcaacctctctcctctcctctcgctctttactactagctactagctttaatttgtaactgcttgtctgccatggaggaagaggagggatcgtcgacatcatcagtcgctgtgcctgtgccgccgccgcctaataagtacgactcctggacgacagatccggaggagctgatgatgatgatggtcgacgaggcggcggtgcagcaggaagggccccgtcgccggcgggactccatgctcaacaagctcatctccacggtctactccggacccaccatcagcgacatagagagcgcgctctctttcaccggcggcggcgacgtggatgctcgcaactacaacaactcctccgccggcccaggggctttatcgtccccggagaaggtgctgatgagcaagatggagaacaagtacac

SEQ ID NO: 337366 - DNA, 201 bp, Zea mays
aaaaaccgggccgaccgacgcgtccgcgcacccactaaccccattaccccaagaaaatatatccaaatcccccccccccacatccacgcccatctcaaagggcttacggactacccccataacccccccttcactatcctgccccctttttcaccctatccatacctcaccaccctcaaccaaaaccaaacctcacccttt

SEQ ID NO: 337367 - DNA, 391 bp, Zea mays
  unsure (1)..(391): unsure at all n locations
canaagcaacaaggcagcagcacaagcaagaatcatacctcctcccttcgcctgtgatcatgtgcgcttgctgcggcggcaagtgcgggtgcggctccagctgctcctgcggcagcggatgcaacggctgcggtatgtaccctgacgtggagaccgccgccaccagcagcgtcaagaccacggtcctcgccgcgccgaccaccaaggccagcgccggcggcttcgaggcggccaccgagggcggcggctgctactgcaacacctgcaagtgcggcaccagctgcggctgctcctgctgcagctgcaactgagccggcccggctcggcgatggcgcacgagagtcgagaggacgacgacgaggaggcgtataataataaatataatagcggc

SEQ ID NO: 337368 - DNA, 231 bp, Zea mays
ggaatcccggtcgaccgcacgcgtccggcacgcgtgggcgggggtcgggacctgaatcctcaatccgcttcctcaccaaatacgcgacgcttttgcggcgcgctggcgtacccacaatggcgctcaccaccgcctccacggactcctctccctcccgaatcatacgccgcttctcttcttctcaagactctcgccccccttcctcgctcctacatctagccccgcgccgag

SEQ ID NO: 337369 - DNA, 367 bp, Zea mays
ggggtttggggggcaaagggggcacctttgtactggggttttttctccccattttattcttcttcttaatacaaaaatacgcagctctcctgcgtattcaagaaaaaaaggagaaaggggggaagcccttatgacacactcacacactcataccaaagactcatacaatagattcttaattcacaccctctttttagacaatgacattatacatacacacaattttgaagacccttcagatgtattcattatttaggtgcttccgcttttagatataccactgctgctgctaaattatttactgtcaggcgtgctaacatgaaggaattttccagggcatttatctaatttctggtatactaagcta

SEQ ID NO: 337370 - DNA, 53 bp, Zea mays
aaaaacccggccgacccacccgtccgcctacaccttgcacacattcctaaccc

SEQ ID NO: 337371 - DNA, 272 bp, Zea mays
gcaggcaggtcggcgaggagggcaggaagatcgtaaccgagccgtgcgggggctcaggaggggaacttgacaggacccttggatctcacatacttcctgcacgccctcccgtgcccgtcgacgcgtcattcttgcctgccgcgccacacctccgacctcatcttcttcagagagatcatattcgccacaagctccgccatgaacctgtcgttcttcgtctacacctccatcaaccccaactgcgacttgctcatcatcgactccatcaacaa

SEQ ID NO: 337372 - DNA, 425 bp, Zea mays
  unsure (1)..(425): unsure at all n locations
gcagcaggtactggcccatgcgccgcaccattgctgttagcacgaagagtggcaccgccagggccgcccaccgggcgccgaggaccgagcgcacgccgtcggcgatccaagcgttcgccgccgacagatacgccttcgaagctctccaagtataactccgtagttctgtcaacaattttctccaatatccatcttttgttgtacactccaaaagcaccaacgatttttgttgttaagcggtaaggcgagcaagtaaacatgaacaggaggcggtaaggcgagcaagtaaacatgaccaccgtcttaacgcctaggcgatgccttaaatacattgtttctcattacgtattgcatgggatgaagctggttgcttatgccatgagggtgatttgntcaattatgctgcttatgatgatggtacttta

SEQ ID NO: 337373 - DNA, 202 bp, Zea mays
tgacgatgcgcaagacggcggcgaaggcaaagccggcggcgagctccggcagcccgtggtacggccccgaccgcgtgctctacctgggcccgctgtccggcgcgcccccgagctacctgacgggcgagttcccgggcgactacggctgggacaccgcggggctgtcggcggacccggagacgttcgccaagaacccggagct

SEQ ID NO: 337374 - DNA, 414 bp, Zea mays
accggccgaatccggtcgaccgacgcgtcggaatcacagagcttcagcagcttttctttaacccacaactgattcatgactcggttcccagtcctaccacctgtggccgtaagaggcaaaagacatctcaatctgttcctgctttacctgcaccgcctcctgcgatgcattcacaacagctggctacaccaacacagccatcatcttcaactgctaggaaagcagtacccccaggccataaaggcaaaaagatgaaaccaggtcagaaggtaccacgtggctctgcagccaagcctataccatcttcagcaggtcctagtggaagaggaccgcacatgaataggggtggttctgctcctgaagctcaagctcagaatgtcgatccattgattggtcgtaaagtgatgagtcggt

SEQ ID NO: 337375 - DNA, 302 bp, Zea mays
  unsure (1)..(302): unsure at all n locations
gtcatacttacatgcactttcaccccccagatagttctataaacaagntantcaacacgctgtcgcaaatactggggcctatggaccgccccacntaagatttttttccaatttaacttgttacctgtcatgttattgaaatatatagaaagacctgttatagtggcgacgagtcactatgtctcatgttctaagcaacctctccacgtgctgagaaggcttgccttaaataatcactttctcatactccactcatgtgcgagccttcagcactgagtatgaaccttacctgtgggataatg

SEQ ID NO: 337376 - DNA, 147 bp, Zea mays
gatgggtggattcaccggccatgggtccaattattttaaggtaccggttgatttaaacgcggggctttcacccggttggatgtgaggatattatgtggtccctttttcgggggatgggttatttcattcatggctatcatattcgtc

SEQ ID NO: 337377 - DNA, 229 bp, Zea mays
cggacgcgtgggcggacgcgtgggcggacgtgtgggcggacgcgtgggctgtattagcagggaacctctcaatgaaataactaagcatgttcaatgtcctctttttattagagagagacagggagaaaacgcggaatttgtgagacgtgtgcaattgtgcatgcagtttacgtgatcaataaagttacatggaaattattttatccacgtgcgatgcaagtggagctta

SEQ ID NO: 337378 - DNA, 407 bp, Zea mays
atctacgagtccggtattctccgtctcccgtttgtttccactcgtcctcctgcttgactgcgtcccaccaatgagtggatgtgtgcgcgctccgacactcaaagcctcgaagccgcactcgccgaccaactagaatccattgcatcggcactctcacagcataggaagaagtaccatactgtgcgcttcccaccacgcgtgcaacgtcatttcccctaatctgcgtacgcggcgagatatgataccattctgaaattgctgatcggtgtgatgaattataggccaatacttcttatcttactcctgctcgtgctcattgtcacatcacattttgagtggaagcagcatattggtgaggcttaagctaatccaacagctacacgaatgaggcaacaagcgcttggaag

SEQ ID NO: 337379 - DNA, 288 bp, Zea mays
gtaatagcactgataaattatacaaacgcaatactttacaccccagctccgcagaaacacggcactattcctacgggtacgggcgcacttacctgccatccacataatcatcctgaatttgcactgcaacacttacctatccaaactctattaataactgatactatgattcaccacgctgacatttatacaaatcaaacgctcctccgcctacttaaatattttaagaaaaatattatcacactacacataatttcctcaatgcatgtatcaaactaacacctgaag

SEQ ID NO: 337380 - DNA, 157 bp, Zea mays
gcagggaggtcggctaggggggcagggcgatcgttcaccggccctggcgggggctcgggaggggaacgttacagggccgcaaaatatcacatccttcctgaccgtgggcccgtgccagtcgacgcttgcatcttgtggggagagcgccatcatccga

SEQ ID NO: 337381 - DNA, 345 bp, Zea mays
  unsure (1)..(345): unsure at all n locations
atcctttcctgactaatactcccgaaacagttcttctacatatctccgacagctacncaggcgaaccttacagcgggaactgggtccccctactatctcacatataaaagaacagacttacacacacccatctcatcagcctggtatacaccataaatgtcatggccatactgaaggcatgatcaaacatcttaccaaaccataagcactctctacaatacttgagataatcgatatatctaccaaccatcttatcatcgatatacttatacaaactgtggaccacaatatcatgccctctattgctcattacgtaaactgccacgacaagatcatgctactttc

SEQ ID NO: 337382 - DNA, 278 bp, Zea mays
gtaagacatacagggcaaatgcagccaaatattcggtgccggctccccacgagcgcggagcggcaacctcattggaggactggcgctctcttctcttgcaggcggccaggtaggataaggagccacgacagcatgcagtacagtgcgcaccgcaccaacccggtcgcgaccacagcggttaatatactggctacacatagcttggacgtctactttttcgacaacagcatcagcccgacacccactgccttatcaaagatcgtgaaattaaaacggat

SEQ ID NO: 337383 - DNA, 329 bp, Zea mays
ctctgatctaaactacttttgaggacggactcaattccgcatcacacacatcccgttcatgggcgatattcagaggctgggggtgctctccatcctcgacgtcgttctcacaatggtggccgaacacagggaggaacttaacctactaaatgactacatccagagacgctactattacgacttgtgcagcgactaccccctgcgattccggcagttagtgaaatcctcctttgaaattcaataactttgaacaattattattactaaataagccgcgttttcttggacaattaatttaacttccggaaggaaggcctttcaattttatt

SEQ ID NO: 337384 - DNA, 432 bp, Zea mays
  unsure (1)..(432): unsure at all n locations
ccagtttctgggtcgtagcaggaaacagggttatgtactccatgttgacgtgtttggagaaggccagcaaagcttttatttgcgttgggccttatttgagttgagcctagccatgagttccacgctctctcctcttcctctacagcactttgttagtccacaacgcgtgctactgctgcagcaacaaggcaacagacgaaatgatgaattcttctgcttgcgtctggccgaatggcgtccatgaaatgagatcgctgcaagaatttgcactgattttttttatctctctccaccaccacggactgaggattgaggagacgccaccctgatgcttatcttcttccagttcgtatacagtaacctgaacctgaaactngctgcagcttagaacatgaagctgaacactgccgacagtttatgccccctttgaac

SEQ ID NO: 337385 - DNA, 437 bp, Zea mays
gcagatcttcgtgaagactcttactggcaattcgatcacccttgaggtggagtcctcagacaccattgacaacgtcaaggccaagatccaggacaaggagggcattccaccggaccagcagcggctgatcttcgccggcaagcagctggaggatggtcgcaccttggctgactacaacatccagaaggagagcaccctccacttggtgctccgcctcaggggtggcatgcacatctttgtgaagacattgactggcaagaccatcaccttggaggtggagtcgtctgacacaatcgataatgtcaaagccaagatccaggacaaggagggcattccaccggaccagcagcgcctgatctttgctggcaagcagctggaggatggccgtaccctcgccgactacaacatccagaaggagagcaccctccacctggtgc

SEQ ID NO: 337386 - DNA, 218 bp, Zea mays
  unsure (1)..(218): unsure at all n locations
cccttttctccccccaactacgacacaatcctcttttcctgacccagaccacacnatagaagagcatttcaaagggccttgagaccctcccctaaccaaggctagcctaaacctcagctccatctcttcttcagatgcttttcaacactacatcaacaactaaatcgacaaccttaccaacactaacaactacccactcaaccacgaaatcaactgtt

SEQ ID NO: 337387 - DNA, 345 bp, Zea mays
gttggcttctcctcccccaccggttcgtgtttatgttcctggttcgtgggcgagagggaagagatggcggcgtcggacgttgagtaccgttgcttcgttggcggcctcgcctgtgccaccgacgaccactccctcaacaacgccttcagcacctacggcgaggtcctcgagtcgaagatcatcctgcatcgggagacgcagaggtcccgcggcttcggcttcgtcaccttctccacggaggacgcgatgcgcagcgccatcgagggcatgaacggcaaggagctcgacggccgcaacatcaccgttaacgaggcccagtcccgcggcggccgtggaggcggcggt

SEQ ID NO: 337388 - DNA, 414 bp, Zea mays
gtgggttggcttctcctccccctccggttttttttcgggtccgtgaggttttccgtggttgggcttcgtgggtgagcgcatcgagatggcggcgtcggatgttgagtaccgctgcttcgtcggcggcctcgcctgggccacggacgaccactccctccacaacgccttcatgacctacggcgaggtcctcgagtccaagattatcctcgatcgggagacgcagaggtcccgcggcttcggcttcgtcaccttctccacggaggaggcgatgcggaacgccatcgagggcatgaacggcaaggagctggacggccgcaacatcaccgtcaacgaggcccagtcccgcggcggccgtggaggcggcggcggcggctacggtggtggccgtggaggcggctgctacggcggtggcgg

SEQ ID NO: 337389 - DNA, 301 bp, Zea mays
cggggacggctgcgtcctcgggtaatgcggtttgcgggccgttgcggcctcggggcaacggcggcggaggctgtggacgacggcggtggtctcggggcgcggaccacagcggcctcggcctgcgacgaggtggcctgagctcagcggcgccggccaagggcagggagcgaggcgacctgcgcaaggggcggcctctggcgtgggcggcgctggcccaaggcggtgaggtcccggcggcgctggccaagggcgaggaggcggcggcgctggccaggggcgaggaagcggcgtcgtccaccgc

SEQ ID NO: 337390 - DNA, 290 bp, Zea mays
ctcaatttcgcttacattataaaaacgcctatgtattgaccacgacgtcagataatggctcgcgacctctggcctgcggaacggccgacttgaaaccctgaaagggccaacacaaaacacaaactgatggaacttcgcgacaacatcaaggacataaacgagctcgagacccggatgctggctatgatgcaccccgtaatgaccatcatactcctgatgtagtaggagaccacgccgcaagctcaagatcattctagagaacgtgatcaccatcaccgtcacctactccg

SEQ ID NO: 337391 - DNA, 438 bp, Zea mays
cacatccgcatggcctcccgggtcacgaggctgctcctgcaccgccgcctcaccaccgcagcggaagcctccgcgcgccgcgcgccgcaggctccctgtgccggcgccgctgtctccaaggatgttgttaaggctgaagcttcatctttgaaaaattcaaggtggtacattactaggtcaaacacttcaggtcctttgactactcgttatgagtgccgcaaagtatttccttgttctgtaaggccatctgcatcttactctacacaagcttcagaccagaagggaaaacaggaagggaaagacttgtcaaatgtagaacacccctttgatgatattacctacaatatacctgagaagccagtgacatttactgaaggtgcttcttatagtctggtaatactcgccgggctcggaattgcaggactggctggatatgct

SEQ ID NO: 337392 - DNA, 170 bp, Zea mays
tcggtcgacccagcgtcggggtgcggccatggttgccttgccttcactcacacactgcaaatgcgcaccctgctgatggtctccttcctgtgatagagtcaatgcatcgcaccactacctcttcctgtctaacaaacagcacccaaactatcaacaaccggacagaagga

SEQ ID NO: 337393 - DNA, 407 bp, Zea mays
agagaagcaaagcaagcaacaccggctgccttctcgcaggtcagtacaatgagaggatcgaggttctgcggcggagatctccggtggtggatgttggccatcttcttcctctgcacactaattgctgccgcggaggagcgcgtcgtcacccatctccccggcttccagggaccactccccttccagctccgaactgggtctgctctgcatgtggctctgagccgttaacctcttcgatttctatcagcgtgtttagctatggctcaccggccggcgggcgtacaggtacgtggaggtggacgaggacaatggcgttcgcctcttctactactccaccctctccgagggctcctcagccgacgacccggtcatgctctggctcagcggcggccccggatgcacttcct

SEQ ID NO: 337394 - DNA, 427 bp, Zea mays
gtggcgcacgagaccaatcctgagcgcccctctctcaatccccataaccccgacatacggggacaccataaccgagggatctgatgcctccgcagcagcgcctccttctcctcactcatcgctaccccaggagggcgcgccggcctatggcccaacgctcgccgatatcctcccaccgacatcactgcgagacgacaaggaagagaatgtggactaccttaacctaccgtgtcccgtgcccttcgaggagatccaacgcgaggctgtcatgtctctgaagcctgaactttttgaaggatcgaagcttgactacacaaaagggttcaatcaaaaccattgtcttagccacaggtaacatcattgcataatgtcagacccagggccagagactcccacatgagcgtggcctggggaaggaataaactga

SEQ ID NO: 337395 - DNA, 377 bp, Zea mays
gtcccggtctgctcattctttcgcagtctgttgatatatatatgtatattcttttgcgtgggaaggactcctgtgtgttgcgtgaaaaaactggattccgcgtccgttaggacttaggagacctcatcgcgtaacagccttccaaaaaaaataaagagagcccgcttctcaaccagctgctgattaattggtgcagggctagcttgtaagaccgctcaactccagctttgcggccctccaactttccccaattcaagttcaatattggcgagcatgcgagtttgccctcttgcgtcatcgtccttgcgatcccctcgtgcctgtttctgcgtacgcctgccgtatacaacagttgcgccctgctctccggcaagcta

SEQ ID NO: 337396 - DNA, 343 bp, Zea mays
cggacgcgtgggctccattctcagccgccgcttatcccttcccgtgctccgcaaccgctgagtgagaacaagagatggccggcaagggcgatggcccggctatcggcatcgatctcggcacgacgtactcttgcgtcggcgtgtggcagcacgaccgcgtcgagatcattgccaacgaccagggtaaccgcaccacgccctcgtacgtcgccttcaccgactccgagcgcctcatcggagatgcggccaagaaccaggtcgccatgaaccccatcaacaccgtctttgatgccaagcgtctcatcggcaggaggttcattgatgcgtcttgccagagtgatat

SEQ ID NO: 337397 - DNA, 295 bp, Zea mays
ccggcgtccggattgcagttgcttgcggcctcctgtcgtcacatctgcaacacctcctggggcctttttcggggcacgagggggcccctaatgcccaagaagatgggtgtcaactccaaggcggaggcggctccgtgtgcgccggtccgccgcggaggccgaccgtcgggaccgtcatcagcgccccaacgaagaccagtactgggccgatgctgagggccccaagtcccgcgcttcctgctcgagcactaactatggcgagcagcgcgcactaacatataatgatgcaggcgtg

SEQ ID NO: 337398 - DNA, 371 bp, Zea mays
gggttggcttctcctccccctccggttcggtttcgggttcgtgaggttctccggggttcgggttcgtgggtgagcggatcgagatggcggcgtcggatgttgagtaccgctgcttcgtcggcggcctcgcctgggccacggacgaccactccctccacaacgccttcagcacctacggcgaggtcctcgagtccaagattatcctcgatcgggagacgcagaggtcccgcggcttcggcttcgtcaccttctccacggaggaggcgatgcggaacgccatcgagggcatgaacggcaaggagctggacggccgcaacatcaccgtcaacgaggcccattcccgcggcggccgtggaggcggcggcggcggc

SEQ ID NO: 337399 - DNA, 427 bp, Zea mays
cagctttgaccgccgcctcccttcccctcctctactgctcctccccaccccactcccccggaggagcggcggcggcggcggcgaggtcgtaccccacatcggcgagcggcggcggcaccgccggaggcaaaggcaagatgttcgggcgcgcgccgaagaagagcgacaacaccaagtactacgagatcctcggggtgcccaagtcggcgtcccaggacgatctcaagaaggcctaccgcaaggctgctatcaagaaccaccccgacaagggcggtgaccccgagaagttcaaggagctcgcacaagcctatgaggttttgagtgatccagagaaacgtgagatttatgatcagtatggtgaagatgcccttaaggaaggaatgggcggtggaggatcccatgttgatccatttgacatcttctcatc

SEQ ID NO: 337400 - DNA, 137 bp, Zea mays
tctcacgccactgcgctgccctagaaccttttccgccgcccctctttaggattaccgtgggcccgatcgccccctggcacgcccgccccgatcgccccctggcacgcccgcccggatcctgcaccggaattccgtgt

SEQ ID NO: 337401 - DNA, 413 bp, Zea mays
gctggcttttcctccccctcttaccaagtctttctagggttagggttccttagggttttggggaggggccatggccgccggtgatgtggaataccggtgcttcttctgcgggcttgcctgggccaccagcaacgagtcgctggagaatgccttcgcctcctacggcgagatcctcgactccaaggtcatcaccgaccgggagacggggaggtctcgcggcttcggcttcgttaccttctcctccgagaactccatgctcgacgctatcgagaacatgaacggcaaggagctcgacggccgtaacatcaccgttaaccaggcccagtcccgtggcggtggcggtggcggcggtggctacggcggcggtcgcggcggctgctgctatggtggcgggcgccgtgacggcggttatg

SEQ ID NO: 337402 - DNA, 387 bp, Zea mays
gctggcttctcctccccctcttaccaagtcttcctcgggttagggttccttagggttttgtggaggggcgacggcggcggctgatgtggagtaccgttgcttcgtcggcgggcttgcctgggccaccagcaacgagtcgctggagaatgccttcgcctcctacggcgagatcctcgactccaaggtcatcaccgaccgggagacggggaggtcccgcggcttcggcttcgttaccttctcctccgagaactccatgctcgacgctatctagaacatgaacggcaaggagctcgacggccgtaacatcaccgttaaccatgcccagtcccgtggcggtggcggtggcggcggtggctacggcggccgtcgcggcggcggcggcgggta

SEQ ID NO: 337403 - DNA, 277 bp, Zea mays
  unsure (1)..(277): unsure at all n locations
agcacgcctttcccgaccttttccttgagngtcctttgctcactatatatgcaggtacctcgccggtcatcgcgacacctggagtcacatacgtcgacaaggcgaactgtaacagctggatcttacaccaaccaagccattcatccaactgtacgaccagaaagaaattcacttcctgacggagggacttgacgccgctgaaaacaccaccatacactacaaacagaacctatgctacaactgctcaaacaacaccaccatattgactcaatgtata

SEQ ID NO: 337404 - DNA, 441 bp, Zea mays
gtacgtctcctggggctgattccagcgctcatctcctcctccgtactcgcacggtgctgcagtgctgcaactgtgcctagtcgctactcgctttcctgtgccgcctcgtccgtggtcgtctctctgcccagtctggtgtcctgctctccatgacggccggcctcgccgtgaaccagctccagcctctagcagccgcgacgctcgcctgcttcacgctcaaatcctgccagcatctcctagtcgcccctcgcgcagaatcaacgattgtcagacgtcacctccagttaaactctgtcctggccgagacgtccttgcgcatccctgtttcccctcgccgctgatcgtctcaacgtcgtcctccactaacccggctgtggcatccagttccctcgtcggtcgtcgcgccccttgctcggtctccagtttccatgttggttctta

SEQ ID NO: 337405 - DNA, 393 bp, Zea mays
  unsure (1)..(393): unsure at all n locations
gttctagatcgcgagcggccgccctttntttttttttttttttttttttttttttttttttgtgttgttttttttttttttgggctgaaaacatggcccttccttttataattacatatttgtccaacgtaagtgtcagtgcatcccatgatggcatacatacatattttgcgtacatacacatcacatgactggttaattacatatgtccaacgtaagcctcagtgcaccccatgatggcatacatacatattttgcatacatacacacatcacatgactggagaatcattcaaagatctctcattttatccaaaatcaggaaccatgaatttttccttgttgtcgtcggtaagcacctccatccgtgacttctttaacaagcgccccccct

SEQ ID NO: 337406 - DNA, 383 bp, Zea mays
cattatcatgatcactaaatatccttctctctgcgcggcggcgccgatcggggggctgcgtcctgggagtcatgaacggtgtacccggcgttcagcgcagagcccatccggccatcccgttcgtacctaaccggcaccttcttctgcggatcaatccggcaaagccagcgcgcgcgatgcgccggcggtggtgacagcctgctttctccgggcggcggacgttccgcgtgggcggggcgcgttccccccgaggagccggagccggaggtcttctccttcgccgagcccctccgtcgtggcccacagcggggattcggcggggagatactatggcgagggactgagctcgcgggcacgcgttcaagactgacctgtctgggggg

SEQ ID NO: 337407 - DNA, 114 bp, Zea mays
tccctctcttcctctcttctttccccttctcaatttaatcctataccttcctttccaagacctgtctttttttctttccctcctctccttcttcatcttcatcccttctctccc

SEQ ID NO: 337408 - DNA, 181 bp, Zea mays
acccactcttcctccctctcttcctctctcctttcccttttcatattaatccaaaaccttcctctccaagaccggttcttatctcattcccccccctccctctttatcttcatcctcactcaccccattcccaatacttctatttttccattccaatatatactaatcacattttcattca

SEQ ID NO: 337409 - DNA, 362 bp, Zea mays
gcgctgacgcttgttctcgcctctcctctccttttctagttatccactcggagggccaccgctagactgcgtgtctttccggcgagggcctctctgtctaacatcatatacagggcagacaaagctgcgattttggggggggctgttggtccatcattagttgttggtggagataaaccacgtgaaggctggtgctctggtacatgttctccatgcactgatggcattttgccgtggtggaaagatggactgtctttcgcctttcttattcttatcgtcgtctttctgctctaccacctcggtcgttctctttgtggctctttttcctattttttacttgtatgattacctttttcactgtc

SEQ ID NO: 337410 - DNA, 217 bp, Zea mays
gacccacgcgtcctctcataataacacatcacctttcccttccatttcaacacaaccccaaactccacaggacgagtctttttataactcctcccgctcattacaaaattcattacataatcatcccacaactaaaactattattaacctaaccataatctattctactaaaaacaaatttaaacccttcctcatttaataatttcttaaaattcat

SEQ ID NO: 337411 - DNA, 354 bp, Zea mays
ctaatcctctctcttatccaaaccattttctttctccttccaaaccctaagctcgcctggcctgtttttttacacctccgttcacctattgctaatttcttctaggtctacatgcattgcatcttttattatcgcgcctacttcaccaacgttcacaactttcactgttcttatcgctactacctgtagtgttccctcgctcttctctcttacctgctctcgttccttaccatcctctactgcgatttcgttctcattctcctcaccttctctctcaacaatctttatgtctattcctacatcaacatcctcaatggcatcgtcatccctttgtactagctctcactcaccctc

SEQ ID NO: 337412 - DNA, 256 bp, Zea mays
cagaaggagctctctgtcgcagcccgaggcatgtacacgggccaattcgtctactgggggtggcggggcaaccctcttcaatgggaaacgtgcttgcccctccgcgggatcccctgaggggtggccgtcgtcttgcaacgtcgagcaccaacgtcgtgtgaaccgcggtggtcttcgccaggggcctctgggggactatcgccatttgtgatcaagccacataccctgacatacggcaacatcgagggattaaagc

SEQ ID NO: 337413 - DNA, 170 bp, Zea mays
gtccggggacgcgtacgcgtggtgctagagactcttagtgcacaacctaccagcagcgcccacaggtaagggtaacgggctggggtctacagggcttggccgagcccactcctttggcggtggcaggatgagctgaattcttgagctcgtcgtcctcgtttccgccgcca

SEQ ID NO: 337414 - DNA, 437 bp, Zea mays
cctccacctttgtactcttgtcctcatctccctttcccctccataggatgctgtcggggggggaacagtgactcagcggcagctcattgttggtgagctgcaggcctgctgcagctcagccacaccaatccactccactcctcgctgtcactgaagatataaagcatcctttgatggatcataaggcatggctctggagaaagaaatcagcagaaagggagttggagaaggagaaggttttgttattagagagatccttgcaagacttaaatgagcaactttcgtttgctcattccgagtgcgttgagaaggatgccattttagctaaacagtcaaaagtagctgaaaaagccatattacgttgggaaaaagctgaggccgaggcactagctatcaagacacaacttgatgatacattagatgaaaaaatggcaatg

SEQ ID NO: 337415 - DNA, 451 bp, Zea mays
ctctgtcctcctcttcctactgtaaaccacctcgtccctatccgcggcaaccgttcaccgcgccgcgaggcctgctgatccgaccgaccttccaccgtcatggctcccctgcgccgcgcgtctcgcctccttcgatcagccgtctgccggctgaggtctccagcgccggctcgggccttctccagcgccgcggcgaccgagacgggtgccgtgatcgccgccgctgccgtggcggtggccagctccgggctcgggctgtggctgaaaccgccgtcgcttgccgactccggcgaggcgcccggcgaccagatctcggtcgcctgtgccggcgccacggaagcgcgggaagagaaggggtggttcctgttcgcaaactcatttcgtagaagggtcttcttcaactacgagaagaggatacggcttctcagtcctcctgagaagatttttgagt

SEQ ID NO: 337416 - DNA, 198 bp, Zea mays
atcgtatgcttgcttgttttccgaacaaattttatgctatcaaatatagtgatctgagtggggggccgttaaaaaaaaaaaaaaaaaaaaaaaaaaaatgaaaaaaaaaaaaaaaaaaaaaaaaaaaaattataaaaaggccggcctttttaaagattcaaatttaatttacgcttttttgcaactttatattttttt

SEQ ID NO: 337417 - DNA, 70 bp, Zea mays
atcgtatgcttgcttgtttcccgaacaaatcaaatgctatcaaatatagtgatctgagtgatgagcaggg

SEQ ID NO: 337418 - DNA, 427 bp, Zea mays
cttctcctccccctccggttcgggttcgggttcgtgaggttctccggggttcgggttcgtgggtgagcggatcgagatggcggcgtcggatgttgagtaccgctgcttcgtcggcggcctcgcctgggccacggacgaccactccctccacaacgccttcagcacctacggcgaggtcctcgagtccaagattatcctcgatcgggagacgcagaggtcccgcggcttcggcttcgtcaccttctccacggaggaggcgatgcggaacgccatcgagggcatgaacggcaaggagctggacggccgcaacatcaccgtcaacgaggcccagtcccgcggcggccgtggaggcggcggcggcggctaccgtggtggccgtggaggcggcggctaccgcggtggcgggcgccgtgatggcggcggcggc

SEQ ID NO: 337419 - DNA, 364 bp, Zea mays
aaaaaagaaaagtggtgcaggatggtttgaatctttgtgcatgattaatgctgaggcagtaatatgggaaaagcttatccatgttctgccgcgcgcaccccgccccgcatccgccccgcacatcccgcccgcatcccgccgtcgtgccgcgctccttccatcctccgccctcatcccaccgccctccttccattttgagctttgacggtgcggatccccaacgctcccttccatcctcgcggatcccccaccctcgaatcccacgctccctcccgcgcttcctccatgctcccttccatcccacgggcccgatccgattcagcttctgtctcactcatctcgcccggcctccatggaaagatct

SEQ ID NO: 337420 - DNA, 389 bp, Zea mays
attttctgtagtaattacctgatacatgcatgtttttactttctttgtatccctagtttgcagataagcacactgtaatagaaaagagaagaatataattactaaggaacacaggaacaaccaaaaaattgatctggagcacttaaggcaacgcccggaccaagaaagccatcatcgtttggtggtttgttgtgaaaggggaggcaacatcaatttgatctggagcacttaaggcacgacctccctcaatccttgtatataactaagtacatatagctacactactttcagtttttctcatgattcctaaacttgcagttggagacgatgacgatccaccatgccaaaatctttccctctctgaccacgcactgacgatgcaacaatag

SEQ ID NO: 337421 - DNA, 287 bp, Zea mays
  unsure (1)..(287): unsure at all n locations
ggcgaccacgcgtccgattcggcgaccaccggagcgcggaggaggcactatgcgtccatctagagacgatggccgccgggggctgcttnccctccttctggttcttgaataaaccgcttgaaaggaaagtggcccttcttacttggggggccacccgcattggggaaggccttcgttgcctttttattgaacaccgggcccaaggcttgattgcgggacatccaggatgaggccgggcagaaattgcccaaccccttggaaggtaacccccagggccccattttctt

SEQ ID NO: 337422 - DNA, 101 bp, Zea mays
gtctgggccgagaaatccgattttccctttcccggaacccaaccccggtcgaaaaaagagagggcttggggggcggaaatgcagcccttcgggccgggggg

SEQ ID NO: 337423 - DNA, 397 bp, Zea mays
gcgaccacgcgtccgcagacgcatgctgtttcgtatacacttcaacgaagacttgaaccgagacacgcatgcacgaggacctggggcgaccgtactcacggctgttgccgaaatccacggcagactgtgcaggatatcctccatcatcagaagctacacgcagattatttcttatttgctgagtgcctgacacgaggggtcgctttgctgttagcgacccgtgtgtccagcgacgacagtcgaggccgatgctggtagggcgaccatccggcgcgcccttgcgtcgctgaaacgaaggcatctcgccgaggaaagggcgcacaggcatgacatagaggcgctaacccgtcccttatactgccacgctttggagtgtaaggagaacgctcaaaagcat

SEQ ID NO: 337424 - DNA, 278 bp, Zea mays
gaaactatcgcactataccggtccacacaaagccgccagagcgccgcgccaccatgtaccgggttttccttcaaaccttatacatggatttcaacgataccgacgacgacttctattcctttccaaccgcctgcaccttcatgtgctagaccccgcggcaacatcttcctgaccagctgaaccggcacatcatgaatgttccgcgcccaagcatcccgttatcccccgtactggagcaatggaatcaagaaggccatacctccaagaagctcgacatc

SEQ ID NO: 337425 - DNA, 436 bp, Zea mays
gatgatccctggtgtccttggtttccggtccggcggggtcccccccccctcttgcctctggcaagaagagtaagcagagatggcttgccctgcgcaatccatgctcttcggcagcggctgcattctcctgaggggcaaacctcgggctttctcctcccacgtgcgagggggcatcatcggcggtggctgcagcagcaggccgttccagctaacctgcaacgctttctcttccccgtctcctccctcgccggcgccggcgcaggaagaccccgactgcaacgacgaggagtgcgccccggagaaggaggtactgctgctcctctttccgccctggacttggcgtgcctccctcgttgcgcagccgtagattgtttacgccagcacaggacagcaaaagcagagagtgtgtgggattgaagcagcaacgagaacgaga

SEQ ID NO: 337426 - DNA, 385 bp, Zea mays
gatgatccatgcgttctttgtttcccacccttcggtgttcgcccgcacgactaccgtctgtgaagaggagtaagcacaaatggcttgcccttctcaatccattctatccgccagcgtctgcatactactgagcagcaagcctcgggcttcctccttccacttgcgagggagcatcatctcactgttgctgtaacatcaagccctgccaactaaccagcaactcttcctcttccccatctcctctctcgccgacgcctacacagtaagaccccaacttcaacaactagaagcgctccatgtagaaccaggtactgaatctccactttcatccctttacttgacttaactacctaggctcacatccatagaccgaatactccagcac

SEQ ID NO: 337427 - DNA, 409 bp, Zea mays
tcggcataacacacacagtttgattttgtctctttttctccaacatgttaccgctctcgccatgtcgattatcaagtcatctttcacgccctccccacctctccccatttctctcgatatttcccaactactttctccgaccaactttcccaaagtataccactctccctgtctcttcttaatcaacccctattccctcaaattactttacaattccgtcctgtccaccacattcatgtcatctccgattctctcaatgtgtccttcattctccgtctgaaccacctcaacgtgcttctccttcactaggtgctggcgactcgctccaatgtgtaccttttgaatgacctttccccttactttgacctcctttccctcttttcttttctttcttttctcagtcttccct

SEQ ID NO: 337428 - DNA, 312 bp, Zea mays
  unsure (1)..(312): unsure at all n locations
ggagacggacccgtccacaatatcaccaccctccctcccgtttctattttatcctttttccccccnccaggcggtccagaagacagccatacttaaaacgcacactccccctcaccaacacaatctcaaactttaccatcccactaccacgcaccctcacaacaataaccccaccagcatcctaaatctgcccgcacgtactcctctgaccatccatattcgccccaaccccgttcgcatattcatcgacacctttataaatacaccccacatagtctgacaatccaatctataaaacgaataactccgaca

SEQ ID NO: 337429 - DNA, 362 bp, Zea mays
acggacgcgtgcgcagacgcatcaccctactcgccgtctctcgtttagctttgattcctacctcctcgcctaggggtctggggctattttatcggcggactggaatcgcatagaggcccgtctcatccgatttaaggaagccatggaccacaaggaggctgggttccaggcccacgaggtacccatcctctgcatcaataactgtggcttcttcggcagcgcggcgaccatgaacatgtgctccaagttccacacggagatgataacgaatcatgatcaggccaagctggctgccttctctatcgacagcatcatgaacggcagctacgccgtcatggtaccagttgttgcttgcatcaaca

SEQ ID NO: 337430 - DNA, 435 bp, Zea mays
cgatggcgaaccctcgcgtcttcttcgacatgaccgtcggcggcgccccggcgggccggggcgtgatggagctgtacgccaacgaggtgcccaagaccgcggagaacttccgcgcgctgtgcacgggcgagaagggcgtgggcaagtccgggaagccgctccactacaagggctccaccttccaccgcgtcatccccgagttcatgtgccagggcggcgacttcacccgcggcaacggcaccggcggcgagtccatctacggcgagaagttccccgacgagaagttcgtgcgcaagcacaccgcccccggtgtgctctccatggccaacgccgggcccaacaccaacggctcccagttcttcatctgcaccgtcgcgaccccttggctcgacggcaagcacgtcgtcttcggccaggtcgtcgagggcatggacg

SEQ ID NO: 337431 - DNA, 419 bp, Zea mays
  unsure (1)..(419): unsure at all n locations
gcgacgtggtgatgatgtacgggacacggcgctgctggagccatccaagcagcccaagcgagcgactctctccgtcaaggtgagcctagcccagatgcttcgtggcatgatcatcatggacgtggtcaccctggaggaggcacacatcgcagattcgtagtacacagctctaaggtatcataattcctggattccaaatctgagacggatgttgatgttgactataacagcttgtactcaaagcagggctttctacagggtgaggtgctcgtttcgttgtggctagagtaacttgcgtactctatctcatcgtttttaatttatttagttttcacaacaactgttttgtgatatgtgctatcacttgatacttagattcatgctattagagattcatacctcangtttgcaagatgtat

SEQ ID NO: 337432 - DNA, 328 bp, Zea mays
ctcgtcgtcataatcttccgttcgacaacttctcgctcctcactgcaaaaatggccctgaggcgagtttgtaggtcaccgttgccctccaataaaaactcggataaattgacgaaccctacgttcgagaaatggccgaagcacatctgcataattggctcgtcgcctctctagaaggacctgcacctgagtcttcaagagccacaacgtcttgctcatttagttctagcatctcatactcaagcgaaagcctatcgacccttagacgctcatgcaggacagccgctccattcacatgcacaacgttaccaaccggttggagatgcttt

SEQ ID NO: 337433 - DNA, 320 bp, Zea mays
gggcgaccgacgcgtgcggaattcttccacacccattgacactaatagtttagcctttatcggcaccttcgtgagcggggttccggggtgcaatcacctgctggagcgcggctgccgtcccgcggtgttcgaggccagcgccgtcatgggcaccttgtggacgcgcgtgccgcacagcacggcgctgcagacgccgcggcctatataccagtactccgacttcccatggccacacaccgtcacctaagtgttctccgaccaccgacaggtcatgttctacctggacacctactcgcgccacttctgcatgctggactgca

SEQ ID NO: 337434 - DNA, 423 bp, Zea mays
gacgagagccgcttcacgcacgccgactagttgagctttacgccgaacttccgctccagccgttcggggagcttcttcaggaacaggacgcggctgctctgccgctagtgcggtggccacactggctatgcctactaagactagggtcccgccctgcgctacgaggggcacagcagatgacctgtacatgagctccagctccagggtgaagcatgcacgtcccctcggacgaagtatgttatcaacatcagcgcgctgccgccgttatcagacgactctggtgctctcctctacccgtgatggcgatctggattctcagcttgcgccatgtgtaaattaaggcatagtgggtgtcttcagttacttcccgagcagaaccctgttggtgtattgcacgtcacaagtgacatcatgttcatattt

SEQ ID NO: 337435 - DNA, 297 bp, Zea mays
gggaggttaatgaaaattctggtctgacatccacaacatgcacggagaggttggctctgggagatgtcactgcgctcattcggatccacatcaaagatggaggtggacgaaggcgacaaagctactagctgatgctgaccgcagcacatgacggcggtgctggggcttgacgtggcgccgtacatggtgcggcggtacgagatcgcgtcgttcccgtccttcttccaggcgggggaccgtcgtgacacgcgcgccacctaccggctgctggaggaccgtgccaccgtgcacgtgctc

SEQ ID NO: 337436 - DNA, 302 bp, Zea mays
cgcaggaccctggtggctgtgtatttcgattctcatagcttctcttttgataaggaatccggaggaacataagcatatcccttaggaagacgttgattctgtgtagaagcttgatctaatgtcataacgagctctttttgaaacatttctctctgatgcataattatcttcttatcagttgtcttcttgtcttcatcttctagtttctctgcaccaatagtaggtctctgtgtaatttgcttaccacttcgatgtcctctgatactcattcttgcgtttgaatgatatcaatgatcgatatc

SEQ ID NO: 337437 - DNA, 328 bp, Zea mays
ggcgacccacacgtgcgaacgtgaacaccactactgttaccaaccagttggacgtttacacaactatcatcttcctaggtgcgcgggtagactttgatatggccttagctagaacgatcctcaacaatgccataaatgcacgagcgcagactctggataacccggtgctcgccgcaaccctgaagacagatcccaaacttcactcgatgatctcaacctttgcagccgactctgccgtctcatgcgagtcaaaccgcctagatgttgcctagtttgatcgctacgcccgcaatatactctaatcatggcaagacctccacgactttaa

SEQ ID NO: 337438 - DNA, 176 bp, Zea mays
gtcgcggtagccggctgttgcggaggatgtatcaggcaggccatggcgtcttcatcggcgagcccttctgccgtcctcgagattcacaatgatcttgaggtccaggccaacgcccttatcaagatccataaagacattgtcaagaaccaccaggtcctgtatgcatttcatcatta

SEQ ID NO: 337439 - DNA, 369 bp, Zea mays
gcgaccgacacgtgcaaaattgcacacaactgcttctccctaccagtttatcctcaacaccactataatctccctagcgccgctggtcgactctgatatggctttagctcacatgaacctcaacatggccatgaatccccgcgcgcatgctctggcaaacccggtgctcgccgcaatcccgaaaacagatcccaaacttcacttgcttctattaaccttcgcagccgactctgccctctcattcgaggcaaaccgccgagatatcttctagtctgagcgctgcaaccccaatatactctgctcatggcaagacctccacgacttcaccacgttcagcctcatggacaatctccagagcgcgctatcata

SEQ ID NO: 337440 - DNA, 331 bp, Zea mays
cactgtccaccggtactagttgatcttatgcacgctaagaccccacatagcgctgggcagctattcgtaggcgtgttccttagcctggtccatggccacatcgtccgcgcgcattatcagttcaagaagaaggacgcggaccgcatgctgctcgagacctatcgaagaccggatcgtcatcttgtcccactatatcttgaaacgttcataaagcgcatacagaccttttttgctagcatgcctctcgttgatttatacgtcaagtggcttaacaacagggtgcactccatcccagtgatggcgccgatcaacacggctttttcatacttgt

SEQ ID NO: 337441 - DNA, 346 bp, Zea mays
  unsure (1)..(346): unsure at all n locations
acgcgtgcgccaattgtcacttgctcttcctccaacaagtttatcattgccggncgtaatccctctttaggccgtgtattatcatggcggtgagaacaccaccaccacacctgttccaccataaaaggacgagatcatgatggcacctcgccccggtcggtacggagtacccaagtcacagatgccactgtactgaggtaggttcacggccagaacgagtactaccagttcatgaggagaagcacataagcacaagcgcacctcgggaggccgaaccatctcaccggctccttcgactctacgagaaaacgatgcaaaaatgaccctgagcacgcgcaccgtcaca

SEQ ID NO: 337442 - DNA, 418 bp, Zea mays
aaacccgggccgacgccacgcgtccgactgctaaaaagattctcttaacaaggagttagatccatcacataacattctcaatgaagccaagctataaaagacctgccgaaaattcattgcagattactaactagctctgtcacttctaattgacatcagactcatacacccacatcatgttctcatcatggctccagattatgtcactttagctgaagattccatccatgttgaagcaaatggtcacaatgagacacaagtgagagtttctgtcaatgatcatgcaaatagcacgacaatactcatcaaagatacacaaaaattctgcaacatcaccattcacagtgcaatcacacaggacacgtctggcagtgacagagtcataaggatgccacttacgccaacatacacgctactg

SEQ ID NO: 337443 - DNA, 184 bp, Zea mays
gacctcttgttaatgaacaccttatccggaagatcatgaatggtccccgctacatcatccctttatgaactaaactggaccaagggaatcaaaaatgtcatactcgcaataaactcgacatgcagaccatcgcaaataagctcactcttctacggcaggtggatcactcactatatcacatgct

SEQ ID NO: 337444 - DNA, 408 bp, Zea mays
cggacgcgtgggttgttattaatatgcctcgttgtctacacagttcagcctaaatccccggccattatagaagatgttctggacttctacgtctaaagttaactaacggtctaggatctgcttccatttacacttttttacttcaagagagtaagtagttgccagagcactttttccacatatttgtggataataagtagacatcaaactagatcacctggacaacagagaataaggtggcataactttagcaaaaaaatagctaaagttatgattctctttatgaattttcatagagattgtgatgtcaaatatctaagaagaaacgcatggaaaacttctatattgatagagtagtttcgctgcagaaaaaaatactatattgaaacgtgtttgaggcgagaggca

SEQ ID NO: 337445 - DNA, 191 bp, Zea mays
gtgtactcatttcatcttatactacaatatttgaacacacaaacttcacctaagacttctgtgacgttcaaaatacattttcatcccaacaacgagctcactgcatatcactctactctaattagcaataactcccttctcacacaaaaactaaacaacatgcatattacacacacattcctcttcaccta

SEQ ID NO: 337446 - DNA, 404 bp, Zea mays
  unsure (1)..(404): unsure at all n locations
caancaccaccccgtctctcctcttcccagcggtttcctgatccccccacctcgttcgccgaggccgcagcgagcccgcccgtcctccgtccccgcgggagattgtgcgaccgcagagtttggatgctcctgcctatgcaagcaagatgtcaaccaccagagatattgtttagtgctgggcaagttatgcaattttggatcataaattacacagggacaagataattatggaccgcgcagacacatcaggctttgtcagtggtggttgctttggtactacactcctgctgatattcttccattttgtctattctacgatccatgtctgaaagaccctcangaaccctgcagctgtctgggcagaaatatcatcaggcccctgttctttgagatctctggtgttt

SEQ ID NO: 337447 - DNA, 408 bp, Zea mays
cgctacgtgaagttcgcctcgcggcctcgcctaccaccacccgtgcccgtgtcccgccggcggcggcgctggggatggcggggcccaaggcggctgaggacggctcggcggctccgctgctgcctgcgcaggcgggggaacggagctcaggaggcgtgggcggaggggccacgtccgcgcagacgctggggaacgtggttgtctccatcgtgggcaccggtgtgctcggcctcccctacgccttccgcgcggccggctgggtcgcgggctccatcggcgtcgccgccgccggctccgccacgctctactgcatgttgctactcgtcagtacgctcgcccgcccgcccatccctccttactgatcctcacactgcctgctgctcccgagcaggagtaggcgagtacagt

SEQ ID NO: 337448 - DNA, 444 bp, Zea mays
atcttctgctcttttctttaatttaatgcgtgtcatggcctctacctgagctgcgaccttgtacagacttgaacttgtgttaggctcaaagcaagagtccttgactacaaaaagacttacataaataaataagtcaaaacaagaatggatagggtctaaatactcattagtaatgtattaagacaaagtcttgctttcagcttacaggggttaattttattttttgttttaaatcgataattggatatggttgatttatatcgagtctaaactgtgtagctttcatgtttactgcaattagtattaaaatattttttacttattaaccagtacttttaataatgtggtggcaacataccagtaactatttataagtgttacacgacttcgttcttaattattgtaagctcattcataccccaattaaagcatttgcacatataa

SEQ ID NO: 337449 - DNA, 339 bp, Zea mays
gactaccagcaaccactgctgcatcgggcgttatcgatggacagtgctaaaggcgggcatgctgttccatgactgtacctaaaacgcacccatgctacaatatacctaggcatcactatatatatacgttcagtaaatgtattgcatgtctcggactgccggtgtctccgtcgtttaattctacctactgtatagagcgagtgacatatctcccgccactgcctacttatagctgtgagtaacaagcctgcatatgtaatactgaactatctgtcatgcatacgcaagaggtgcaacactgtaataaatgtaaaggaacccatcgactccgaaaaaaca

SEQ ID NO: 337450 - DNA, 403 bp, Zea mays
cgaggatccgggcgacctctacggggtgatcgccgtcgacgacggctccggctcgcagaggctcttcgaccggaacaggtccgacgtccagtcggtccgcccaggcgagcaggcggagatcacgggtcccggccgagccgtgtcgggcgccgacggcttcgccgtcagcttcgatctcatggaccgagacacggacccgtctccggacgacgaggtgagcaaggaggtggtggtgtggaacccgctggacgccaccagcgacgagtacgacgttatccgcagcaggacggtcgccggcaagcacgggctcgtcgagctccgctacgcggtgatgacggacgcggcggtggccaccgtggaggtcctcgtggccgagagcagcgaggacgtcccggacgtctac

SEQ ID NO: 337451 - DNA, 383 bp, Zea mays
  unsure (1)..(383): unsure at all n locations
gattggaaaanccggcccgagcgacgcgtccgatcaaacttcaggggggttgaatgttaatttaacaccctatcgagatatggcggcggggaagataatgatgggaacagacatgaagcttcagtaactgaaacactgtaccatggtttctgaactggcgacatatcttctcttagaacacttagatagattttcctgcataacccttatcaatgaaatatggggctgcttcatttgaggaaccaccttattcttacttgactacgcccatcatgattcatgatttcatcacatgaatattggtgtgatggatccaaccttcatgctcttttaagctttatattacacatgtttaaagctcattacttgatccctaacttata

SEQ ID NO: 337452 - DNA, 405 bp, Zea mays
ctcgacgttgccgacgccgacgccggcgcttgcgcctctccgaaccgacgccatgccccgcgtcaaatggttgatgcactggcatccgagtcccggggcgacgctcaacagccagatcctggcggaggcgtgtggctgcgccgagtccctaggcggctccaaggacgggcggtggaagacctccatcttcttctaccgcgccatgacccgggacggcgcgggaggccccgcggtgcagcagcaccccgacttgcctagggagctcctcggcgtcgcgctccacgagcgcccgggtctctacttctccatcgtccgcgcccagcgcctcgttctccaggccgatgcggcgttcccccaggtcatggagaagctccagtcatacagaatccgcgtcgccctcaactt

SEQ ID NO: 337453 - DNA, 387 bp, Zea mays
aaataaaaaaaacaaacttacattcacggtttctacacccaacaaaaaccaaacagacatacgcaaactttcaaacatcaacactggcacatactcacacaacaaacacaaaacactaaccgggcgcccacaccaaacgacccaggctaacccactcctgaacacaactccatagaccctcaacaccatccccaaaacaacaccgcgaccttgcctccacacccacacccctgggaaatccccacctttccccacattaaatgcccaatgacacaccccctctcccccctcttatatacttgcgaatagaccgactccactctccatatccaatactcacgcacccgtactagctaattttacgacccatgtagcccccccttaatc

SEQ ID NO: 337454 - DNA, 331 bp, Zea mays
cgcgtccgaccgtcacataaaaccctttaaataaacgcgtagacgtcccccagacaacaagaccgcgcacgcgccattgaaacggccccgaggccataccgaacctgaagtggacaccactgagccatgaccgcgcgtggtgctcaacccagcaaactgcttcgggtgcaaaatcaactctgatcatccggaggagatgagatcccacgacctgcggggagcgccacctctgccgcattgggaaatccagaggggatcataccgtaagtgcgctcggggagacccaccacaacttcgcattcagaggcacgaagaagttctcccaccatca

SEQ ID NO: 337455 - DNA, 318 bp, Zea mays
aaaccggcggagcgacgcgtccgctcattttactcatttttcatcctttgtattctatggagaggctccttgccggtcggcgggtcttcttcctattaatgatcgcctcagtaggaagccatgcaactcgtgctccaaaacagtactggaagtgtgttatttccgacactcccatgccgagctgcttctactaactcctcaacaccatagctggtctctatcactacttgatacacgatgtatatggatgctcgaacatcgtacaaacatatatacgtaataacaccgactgatctcttgaattccatgcttattcct

SEQ ID NO: 337456 - DNA, 370 bp, Zea mays
cggactcgtgggcggactcttggtctgactcttgggttggcatgccacgcggcttggcgggattcgttggtccaaggttccctgtttactttgctagaggccctataccagggatgattttccttgtcacgatttcgcatcctctacctctgcgacttgacatgatgattgggccttaccacgattcgctgatcgcaggcctgtctacgctacgagctacgttgcttattgaactcttggctgtgcagcagcacactccacttggaatgatgaatgccctgcattgcaaaaattattagatgatcttctgcttcaacctcatgatctgcgtttcatctcttatctatgggctgtatctcatgcacctaca

SEQ ID NO: 337457 - DNA, 293 bp, Zea mays
aacgagaacaaaaacatttaacaaccgggcgtataagatccagacgacccaacctaacgtacggaaaattctatacactacaactggttctataaacactcacacaacacattaaagagacggggggccctctttataagctccaggataaacaccaccattacccaacatgactactttcgtatagagccccctattacactccaatgaaagaacataatacaacgccatgaatagaaaaaccctactgtatcaagattaaatgactagattacaaacccattttctgattt

SEQ ID NO: 337458 - DNA, 405 bp, Zea mays
gccgtgaacgtgccgtcgtcgtccgccttcggcgaggcccgcgtgacgatgcgcaagacggcggggaaggccaagccggcggcggcgtccgggagcccgtggtacggccccgaccgcgtgctgtacctgggcccactgtccggcgagccgccgagctacctgacgggcgagttcccgggcgactacggctgggacaccgcggggctgtcggcggacccggagacgttcgccaagaaccgggagctggaggtgatccactcccgctgggccatgctgggcgcgctcggctgcgtcttcccggagctgctcgcccgcaacggcgtcaagttcggcgaggccgtgtggttcaaggccggctcccagatcttcagcgagggtggactggactacctcgggaacccgagc

SEQ ID NO: 337459 - DNA, 293 bp, Zea mays
acccacgcgtccgcccggcgttctttccaaatattcttcttttttaaacctactacaagcaagctgtgcttatcgaacatttcacaaatatacacaccaccagccaactcatcacctcacccagactcaacatctcttacgctcaccccgcgtaaaagacttacacaaaattagagcacccccagacgctaatgctgaacgaatggcacaccggttacaacatctcaacagaatccgaccctttcttctcaatcgcaaactcttcttctccggcactttaaacacaacaactt

SEQ ID NO: 337460 - DNA, 331 bp, Zea mays
aattgggttagacaccatattattttgtctttatttgagtacagaacgaagtaaggtctgtgacttataaatgtgctaataaccgtctatctaaatttatgcacttgaaatataccaactcgcatataatatataaattatctgaacgatgccacgccaaatgtgtacttccataggacgaaaagcaagttcctatcatcacaaactccaatcaaatttagcgatatgtcatgagagcactacaggtcaacattacagccttaaaggtaatgaccctcgtttactatttattataaatcaacttgattttactagttaaattttttgcact

SEQ ID NO: 337461 - DNA, 267 bp, Zea mays
  unsure (1)..(267): unsure at all n locations
tttatttacaaatttacaacatttgcttactacacacagacacnaccaacttggggggggccctctttcaaatcaactggccccacctacttgactgaactgcctactttaaaaaatgataaaagcatcatttcaagccaatctcctaacaacatccagtcaatatctaatgagccatctaaagatgcaataagatcaacttctgcttttggtggttctaataaaacttctttaagctcttcacctatccatttaatggcaaacaat

SEQ ID NO: 337462 - DNA, 189 bp, Zea mays
  unsure (1)..(189): unsure at all n locations
aaaaaccggccgacgcacgcgtccgtnacaaaatacactttatcatgcaattgtttttcaaaaacaccttaacaaacatctgcatgttctatacanaatgacatctcgtgatacaatattacaccaatacttgaataattaacatagtaaattctcaatcaacacttcataaaatgatgcactacatca

SEQ ID NO: 337463 - DNA, 70 bp, Zea mays
ataaaataaagcatgtttggtttttcaaattataagaaaaaataaaataattaacgagaaaagaaacggt

SEQ ID NO: 337464 - DNA, 382 bp, Zea mays
acactctccaaactgaaaaatattaacagcttcacatcaggtgacatgctcatggggtataggaacgctgctcacctgctggtgttagctgctgctgctgcgtgctgcccgtgccaagtccggagcaacatcagccaaccaaccacctcctgcgctctccgtctcccattccgtgctcgctcagccactcgtagtttcggagtcaaccgccagcgcctggatccggtgaagccagcccagcccatggcctccggcaccgtaccaccgcagctggtcagccctgctggcgctcgccgtcctatccgtcgtctcattcacgcacctgtccctccccggctagtcccatccgctccctgaggaagctgctgctgctgctgctgca

SEQ ID NO: 337465 - DNA, 335 bp, Zea mays
acattattctctctcatatatgatttaccattaactgcatggatcggtcgccaggggcgagcgtccgattcttcgtcaccgttgtctacatcataactttcactgtcaccactatcttcacgacagtccttccacaatctaattcttgatttttgtcgtcttcgtctaccacatccttataaaaaatactaagttcttctcttcatcaatactcaccttcatctcagcagcatacttcttagcagcttcacacatcttcgcaagctctaaaaaactgttttcaaatactaaccttcaaatctaaaagcttatcaaaacacagtgcacaatagcta

SEQ ID NO: 337466 - DNA, 404 bp, Zea mays
cggacgcgtgggtcgcgctccgagaatcttcgctcctcgcggcgccagcagctcgtgctactgttgggtcgcgctactccctcgcggatggaagcgcctgcagccgccgagactgttcgtccacgccgccgtcgagacatttctcccctcttccaggccgccgccgcctcaggtactgccatagaaattcaagtgcccaaactgtggggagttagggcatagaaagagcagctacaagtgtctcctcaatggaacaaagaaaagaagccgaggaaaaacacaacaaaccaatggtttcccaaaaatgataatggttcttccgagcaccagcactagaatctatgtcacatgagcttgttaccactgagcagctgggaaccactgcatgttcatcacagcaactt

SEQ ID NO: 337467 - DNA, 433 bp, Zea mays
ggcttgtaagaggccatcaagatcctggaggagctaccggcgaccgcctgccgtagcagccgggcgcgcttcgtcagcttggggacggacagggcagcggcagagggcatcagcagattcagcaagctgccgcgcgagtccctccccccggtgcacacgttcgggctcggcgaggcgcacgaccccagggagctgttgcatatcgccagggaatcccagggcacctactcattcgtggacgaccagaacacggacggcatcaccggcgccatcgacgtctgcctcagcgggctcaagaacgtggtcgccgtcggcgcgcgcgtacgtcttgagacgcccgtctggagcggggtcaccatcgagaggatccagtcggggggatacacatacagcaggactggctccatcaccaccagagactacaagacgtacg

SEQ ID NO: 337468 - DNA, 409 bp, Zea mays
ctgccatatagcaactggggtggtaggagacaaaggctcatttacattgatgttcccaggcaaagaagccactcttgagctttggaagtcttcagccgaattttgtgccatgaggtcactgtctataatatctcttgctcaactcatgattaaattatctcgttcttgtacaaattctagcagtgctttggcagcattttatacaaggcattttgctgaaaaggttccagatataaagcctccatccctacagcttttggtgagcttttggcaacacccttcggaacatgtgcgaatggctgcacgttccttgttccactgtgcagctccccgttctattccacaaccactacgagtaaacaaaaataaagtggtcaatgcccccttgtcttcatcagataatatgaat

SEQ ID NO: 337469 - DNA, 433 bp, Zea mays
cttaggatccttctgttcggtgttttcagcgttcacctgttgccaccatgcagagaaacatgtctaatccatgtactacaccaatcatatccatcttctgctcttgttattactgatgcatctactgctaatcccccaccacactccactacccatttagactcctttggacactaactacatccactgacttaaacatcccttttagttttgaaaaaataaccacagcattcctaaccactatgaattaaaagcactaccacatatatactgttactgtctgaagcatgctttttactatactcctggacccacacttttactacacaattgtatgggatctaaatacacagactagactttcacccctacaccaattttctaatagaaaagattttttatcttcaacatacaaattttaaccccaactttt

SEQ ID NO: 337470 - DNA, 393 bp, Zea mays
  unsure (1)..(393): unsure at all n locations
cccacgcgtcgcgagtaggaagctaggangaaatcaaagcaacttagttgttggccgagagaagcaaccatgagagctcaggggtcgttactcgtgacactggctgttatcgtcgtcgtccttgcagctctgccactcagcaaagggacagacgaggaaggaggaggaggggaggcaggcctcggtcggaactccgccgcctgaacgagctgcgggccatgctgcaacaagggcgggttctgctacctgtctgacccgccgtagtgccaatgcctggacttctctacagtctgctgccatccagagtgcatgcagttcatcacgtacaccgtcgactgtggcgtacacatcccggccgtgcacgcctaccgctgcgcctacatcctctttaac

SEQ ID NO: 337471 - DNA, 256 bp, Zea mays
ctggcacatcttcaatatagcaacaatgatttcattgttgctagccaccactcgcacgaggagtctatcttgactacactcacattcaaaacaaacacacagtggcgtgattccatatctatgactacctgtacaactaccttgacctgaaaaccaaatagctgatgatacttaccttatcttcctgcctgagactctttctcaccatgcaccaccggacctgccagttctccaatctgaaactgactaacactac

SEQ ID NO: 337472 - DNA, 187 bp, Zea mays
ccggccgacccacgcgtccgccgaccttacatgttatccacaccattcaagttctcctctctattatacctgggaacacttcaaataccaacgggacatacatatcctacatactccagcaaacatctcacttctcagtaagaagaaacttagaacttacaccctatatactcaccttattactgac

SEQ ID NO: 337473 - DNA, 433 bp, Zea mays
cggacgcgtgggctcgtatccgagtcgatctctgctccggtggcgattggagggcacgatcgcaatgacaggtgggtccggctgcctcgcgctcacagtgcaccgttggattctttccatggtctacatgccagtgagaaagtgcacggcgactctagagtaaatcccggtgctaccgacagcgtgagtgacgaatccagcatgcgcggatgccatggcggctcagcttgagaccaagctggcatatactatcttttgactggtgaactcgttgcatggcttgttctatgtttagcaatgtattgccatatagtaattaatttccagcctaggccccagaattaccctcttttaatctaacaactttgattccaattgcattaattgcattgcatgatgaacggacctttttaaccataagtaagttcctttt

SEQ ID NO: 337474 - DNA, 284 bp, Zea mays
ccgacccacgcgtccgctaacatttaccctcatttcctctacaaacctgtcttcacactccacgaaagcccaccatcagctccttacactactcccactcacccaatcacacatcccaaacctttattataacaaaccaccaccacaccgacataactcgcaactcaaaacacctacgatgaactcaacacaatatcaactcacttaaatcaaactccatttcggtaatccttctcctctcacttacacaaacaactgtcatatacatccttatcactcctgaa

SEQ ID NO: 337475 - DNA, 246 bp, Zea mays
ccttgatattccaaacaatttaaccattagtaacaacccaagggagaatttctataagtgtacacactatatacatcatgtactacaaaaaaaactacatgcttaccaagacgaatatgacacattaaacaggacaagggaacagcaccttaagaatcatccaaaagcctttgaaacaaatgataactccatacaacacatgcatacattcattgactctgtgttgtacaatgcaaaaagagcatc

SEQ ID NO: 337476 - DNA, 53 bp, Zea mays
cttgtacaatctcttgttttttcataccctatcaaccggatacgcccgcaggc

SEQ ID NO: 337477 - DNA, 247 bp, Zea mays
ccggaccgaccgactcgtccgaaacgtcccctgtcccgctaggatacaccttaaagcctcccccataaccacatatcagagaggagctcatgatgttctgcttccttcaccacgaccactacgttcagaacctctcggcacactgcatatacactcacccacttcaatactttaagcgcatccgaccatgcttactgcctctccgaccgaaactgcaacgtggtgctagacaaagacataccacgct

SEQ ID NO: 337478 - DNA, 294 bp, Zea mays
tatggggatattatccaaactctcaatttgggcataaagatcttggaggcttcttgcgcgtgagacatgcagatggattgacaagtgcaccaattcgttccaagcagtaaagctaaaacaaaagtttgagtactcgtatccaccgaaactttgcttgtacttaggtacatgaatatctaattaagaaaaaactttgcaagaggtagtagaaaatagtaaattaaattgctgaaatttaattcaaccaggataaaggatttaaccttaattttaatttatttatttaattccaaa

SEQ ID NO: 337479 - DNA, 402 bp, Zea mays
tgatcactcctggcctctgcgaaggaaagaagaggtgggggaggctggtttggtggcgtgtaccgatttgcagcagctgatggcggcgcctctgctcccctcttccgtctccgtgctcctctcgctccacatcgcgctgctgctggtcctctgctccagccaggtaggagattcctgctcctcagtgcgggactgcggcacgggcctctactgcggcaactgccccgccgcaggcaggaccaagctctcctgcatcagggacctagcccatccacccaacctccatgggaaagggccacccttcaacaaggactcaagggttcgcacccaccatttcctttccattcttggggaacccgcccgccctgggggtgagagggtcaccgtctaccaccaggaaga

SEQ ID NO: 337480 - DNA, 334 bp, Zea mays
aaaaaccggcccgacccacgcgtccgatgtctccattttgacattttttcaatacttcttgtggccctcgtctgtaacgatcagagcggagcctctatttctaacgggaataataacacaagggtcttccgtgcacaacatacggtgatacaaagtctatgtgcataccacatctgtaaagcttattgcggtcttgctttggtcatatctcaaaggtcgtgtaaattgtattacaacccaagttaaccagtctttttatctcacaaactctactacttaccaagcgtacgataccataaatgagcactcgcatcagctaaagaccaaaagatga

SEQ ID NO: 337481 - DNA, 226 bp, Zea mays
acgattgcttcctgcctcatgacactcctgcttgtcttgctactgatagtcttcgcttctgcgcacatctttaacgacctctagaacgatctactataactgaggccactttgtgtacaaaaacatactgggagccaaccagcatctgtttctgaacagcttaccatatccatgtacctctcattctacttggacttatctctctgtatctagcttaacatgccac

SEQ ID NO: 337482 - DNA, 435 bp, Zea mays
ctcagttccacatattgttactcctcgtcttcagaggaggccgacgaggaatgagtgggggatgacggcgtactactcgtgctcctatgaaaggtcacggaaaggaagaattccagccatggaggacgaggcggacggccgccgacaatccttcgtgctgcgctccctcgtgcgcgcgggcctaaagcgcgaattcgccttacccatcgactcgcaggctcgcctttcgtcctcatacgcacccctgggccgcacccgccgctcataccgcatcctcaacccatcggccgcttcgaccccctccgtcgacggcgccggcgtctcgacatacttctcctcaacccccgacacaaagccaaaagccaagcgcccgggcccaccagatcctgccccttccactacctttcctcctacaccagactatgcccctgcccc

SEQ ID NO: 337483 - DNA, 165 bp, Zea mays
cttggaccattcaatcctgactagaaggttttcttggctggcaacttgcttgctggtgaggtatgatggcgatgcaatcggcaaatcaaggagacgggggatacctacgatgctagtcaagtgcactgagttgcaaaaagcactctgatatataatgccaatgtt

SEQ ID NO: 337484 - DNA, 214 bp, Zea mays
gacccacgcgtccggacgttctacatctattcacaaactcgattttggatccacacaaaatcttcaaacctaggcacattgtaaaccttctcgagaccttctctcctacaccaaaccactttttctacccatctgttcaaaaaccacatctccaatatttcttttaatactgaatgtatccatatccattccatcattatcggaattatatata

SEQ ID NO: 337485 - DNA, 346 bp, Zea mays
gcatagctagcaccacaacctatcgtccttgtatatatagtactactaggctgtggtcggtgatggcgtgtccgagccaaggaagaagacagcagaagctagcaaacaacatgagtggtgccatggacatggtgcgagccgcgtgacccaaacaaactacatacgcctgcctagctaggagagagcagacattgagagctcagaagcgtgcgtgcacacgtaaggatcgatgtgctgaggaggaaaagagaaggagatcgaagggattattaaagttctgtcacgtctttttgctgccggctatcgatcatgtggagcctggtgcggcgatggcgatgggggcggc

SEQ ID NO: 337486 - DNA, 204 bp, Zea mays
gcgcgacatcctctactactccggggtcgttgccaaggcctacagcagcctccaccgcagacgcccttcgtcacgcccccacggccgactatacaaccgcgtcgccgtgaaagagccgttcatgtactaccaccccaaccacacctacgcgtccaccacgggctacgccaactctggcggaggcacccgagacccctacatgct

SEQ ID NO: 337487 - DNA, 302 bp, Zea mays
aaagcctttcattattcataatatgccactttcgagcaggtaattgcacctgaatacttgctgcctttttgccaagaaaggatgcatatcaccatccttttgcactgcatacatatcttctgtgaagaccagtgtatcccaatccaaaagagagggagcgaacttgcccactgcgcacggcattactcaacccagcagacctcatgtcgttcagtgatcctacaacaagcctttgcttccaactattctagtgccatacatccatgacagcgcttagctgtagcgctacacccgcttatgca

SEQ ID NO: 337488 - DNA, 332 bp, Zea mays
gcgtctagaagactatcagaaggggacatcaaataaaaaagaaaaaaaagtcttaattgctttctttttatctctgtcgtgtcattcccttaatcttagatctctgacttacaagttataacaaaagaaataaacaacacatataaatatttgtaagaaaatatatatatgatcatgggttttcttcacaaactatttgacgaaacgtttgccgttccagcaccggaaactattcttacgaagctctcaaagtacaactcgtgcttctgcagaagcttcgtccggtcaacattatcataacatgttcctataattctcagcatcaccattgt

SEQ ID NO: 337489 - DNA, 250 bp, Zea mays
gacccacgcgtccgagcgtcttctgcctgccttgtcacccgtatctttgccttgtgaagaaaagtcttctcctgcctcttctctaatgaaatcctcttctcatctacaactgagcctccttctctctttcggatcacatgctttctcctatccaacatcgtttaatctcgctctcttattccattgttctaaactcattgttcctttttttctatgacattctcgttccaactccattctttttatcaat

SEQ ID NO: 337490 - DNA, 433 bp, Zea mays
atttttacagaatggtttcttctctgaactgatcgacttcaagggtgttgggttgcaagtggcgtataatttcctgttatccagctagctctagcatcaatcatttacccctatgagatttagatgaggttgcagctacagaaatagtggtggcttgcatgctattatgaatagcatgctgaagaagctagcaaagaaggatgaagaagtggttgttgcatctggcatcccatgtacaacaatcagaactggttctctacaaagcgctcccgggggcgagagagggttcaattttactgaacaaccaagggaagaaaacgcaaagaggatgctgctgccatatgtgtggaagctttgaatagcattccccaaaagacactcctttttgagagggattgccaatggacattttgggcagcgtgtgaccaaactg

SEQ ID NO: 337491 - DNA, 131 bp, Zea mays
cttactacataatccccatccttgtcaacatactaatcctaacattacagctttgcattctgcttattacttacctgaatttacatagcattcacatttatcttttactcataccaattttaaataattta

SEQ ID NO: 337492 - DNA, 355 bp, Zea mays
  unsure (1)..(355): unsure at all n locations
aaaaaaaaaaaaaaaaaaaaaaaaaaaaaattaaaaaaaaaaaaagtnggcagaaggggaggtttgatgcaaccatctgatgccaagcaacatccagatgcagccgagggcagtacagaaccactcgctgatgtacctggaagcgatggtgcagctcaaggttcaatgcaacatggaacttcggctcctcataccgaaataaaagcgatggtcaggaacatactgttcaaggacatcgttgacaaggagcacgatgctgagatggcttatgtggatgaagtgatcaatggcatctttaacgctactgacagcatggtcggcggcggccgcggtgatgcttccggtctaatcgcga

SEQ ID NO: 337493 - DNA, 182 bp, Zea mays
tttgaaacatctccaccatgaagatagccttgggtaagaaatctaaggttaagaagcatgcagtgtttgtatcaactataccatgcctaccatttggagcggcgtgtgacaactatgaggttgaaactgaggtaaaatcacatgcatacacacactgtcctgtaacatacccagttgaaact

SEQ ID NO: 337494 - DNA, 276 bp, Zea mays
  unsure (1)..(276): unsure at all n locations
cccgccgacccacgcgtccgctcctctatcnacgcaccaccccaaagacctccctccgcactcccagggtgttcaaccctgcnccctttccccctcactacatgtcctactccctctccccccgccgccaaaaccgccacgtctttcccccacaatgtccaaaataagcttgcctccccggctcatcacctcacagtcttgaccctccgtaccaatccttgcaacttacgctccttgatttatccccatcttcccccccattcccctttttttcaa

SEQ ID NO: 337495 - DNA, 339 bp, Zea mays
  unsure (1)..(339): unsure at all n locations
ccggggcntggcccgatatcaccttctggttagctattgtggcaccggtgtttccaagagtactatgtcatgacgcatccggtgcagcgtagagctctggaggagcacatggaggtcttcgccgatggggacaccgtggtgccgacgttcctgttgcagtgcgagcgcttcgctagctgcgcgtcttagcacaataacgtgtgcgactcggtgtctttcgtcatcggctcccaggatgcgtcgcgactgtaccacccggtttcgggactcgcgggttagcccgctgcacgacctactagcagtattagcttcatacattacaccgtcgttgacgttaac

SEQ ID NO: 337496 - DNA, 437 bp, Zea mays
aaaaaaaaaaaaaaaaaaaaaaaaaaaaaattataaaaaaaaaaaaaaaaaaaaaaaaaaaagaaaaaattagggcgggggctgtcgttcttccaagcttacgctcccttacacgcgcctgcatcgttctactttttttatacctaaacttaattcaatttcactggccgtccatctacaacgctgggaaagccaaaaccttgcccatcccaatctaaatccccttcatgcacatttccctttcttccgttgacgtaaaaaggaacagacccgtccccattgccattactaacacatcctcaatcttaatggggaatggcactccccctgtaccttaacatcaacccctgtggttgttacttttcacccccaccgttaccctttcacttgccatagccctacctccctttcctttcttttttttcctttcctttatg

SEQ ID NO: 337497 - DNA, 355 bp, Zea mays
ctcacagctcgcagcacctgcaccacttgacaaccagccagctagctaaccaaccggcggaggcaagaacaagcaagagacaacttgccccgtccaggcagcatgtgcaactccaacgtcaagtccgcgggcgtcgcccagatcgacggccgcccggtgctgcagccggcgggcaaccgcgtggcggcgccggacgccgcccgcccgctcaagaagtccctgcacaagtccttctccatggccgccttctacgacaacaatgccaccgtgcccgccggtcccgcccttgccagacaaccgtgcgggggccgcgccggcttcttttgtggcttctaagaagcccggcccgggcccg

SEQ ID NO: 337498 - DNA, 402 bp, Zea mays
ttcagaaagcacacaacttattctttacattacctagacgcatggcctttgatgttcgagaatcgtaatgtatacaactactcaatgccttcagtttgttggtaaaatcaactctccaaatccatattgctatcgcagcacaactcaaaacactcctgtgcacatacatagttcaccacaggcatattacaccttgtctatttccaactcataaacatcgataaggaagcagggagccatgtctggatcaaaaagtggaaaccctttactcacttagggtctagagctgctaaccaagtgcatcttataacaacacgctaagtcatgtcactgcgtgcataacatgatcagtcttattaaaggacattgacaaatagtccacaatatatcgtggccttaacc

SEQ ID NO: 337499 - DNA, 361 bp, Zea mays
  unsure (1)..(361): unsure at all n locations
ctatgtgggaactgtaatggtgctggcttcttgggtggatttctgagcactttcgatgaggctgcgcaatagtcatcggtttaatttatgtttaagttacattgagggacccattatatatgtatcgtgttccagggacacataatcatattatataaaataatatttttaatgaanaaaaaaaaaaaaaaaaaaaaaaaaaaaaaaaaaaaaaaaaaaaaaaannaaaaaaaaaaaaaaaaaaaaaaaaaaaaaaaaaaaaaaaaaaaaaaaaaaaaaaaaaaaaagggggggcccttttaaaggatccaagtttacttccccgggcttgcaaagtaaaaattttttttttggggcccca

SEQ ID NO: 337500 - DNA, 357 bp, Zea mays
cggccgacccacgcgtccgcgagactcctcgactgcacgcctctgtcctgctgtcatacgaccgcatcggccggcgatcctaccgcatctggaagcgcgggccggctccggaccactgacctcgctggctcacggcttccgcatccagcgctcggaccagacgtcctcttctcgggacggcgccaggcccgagatgccggggcaaggagctgactcggctcgctaataggctggcgcacaagataggagatacggatgcctgggggggcggcgtgcagcccagagtctgagggggcatgaggtacgctatggcaagaccacatgtaccgccagggatcgacgcacgctgcagagctc

SEQ ID NO: 337501 - DNA, 264 bp, Zea mays
cccactctctctccccacgatggcaaaaatggcgatggcgtcctcccgcctcccggctctcgggtgcctcgccgccgtcgccgtcgccgtcgcggcggaggccgccgccgccgccggagaaggcggcctccgcctgccccgcgacgccacgttcccggcggcgcaggcggagcggctcatccgcgcgctcaacctcctgcctaaagagaaagagggggggccggccgcgggccggggccaacggcccagcgtggcgcccgggga

SEQ ID NO: 337502 - DNA, 446 bp, Zea mays
gaaaagggtcgacgaacgcgtcctacgaatgctatctctactcattattgcatatatttctaatccaagcacacctctcatgaatcgcactatatcaatcacgcttccttaaacattatcatcattacccaccccacaattatataatacgcatttcgatttatcactatcgtagtatttcttcaggcttattctattcaagaacacatgtactgcgtttatgttcctaccaaccatctctatattcgtgacataatttgtcgtccactcaactaacctggttcaaacccaacattttatatcgtcgaatgccttttaacttttttccccttcggcccatcgatcccttaaataatagccaattattttatacttagcccaaccaaattaaaaacaaatggtccacccttaacttaaattaattggcaaaaaccaagttctcccca

SEQ ID NO: 337503 - DNA, 231 bp, Zea mays
  unsure (1)..(231): unsure at all n locations
accgnnccagaataggggggacgaccgcaggcgtccggatcagtattggtagcagatggaggttgttctggcacgacgacaacgccaagaccagaggtggggccgcccatgtacagagaacaccctatccttggcgctcgcgggacggtgccatgcttctactgcgtccaggagacgcatcaccacggggggtactacaaacgtatcttaccagtcggcggcagtgtaatc

SEQ ID NO: 337504 - DNA, 406 bp, Zea mays
ctcagattgtattcatgacatgttggacaacaaatgtccataagctacaagcactgtaggtattatatgtacaatgcctggataaggggaaaaactaggcaggtaaagtgaaaaaggataaaaaaaaatatttctagtaaatcaaggcgttacacagatggagcctttggtttataagcaaagtttcgtggttggaaggatgataaaagaccactgacaggggcatgggctccgactaacgtgttgcagtcatcgcatggtacatggcaaggctagatctactatatggctgcgtaccagacggcccatttggcggcgctatcaacacgacgcatggacttgatcttagcgaaggcgtcgaacttgaaagtggctccacacatggctccctagctgtcgacacgcg

SEQ ID NO: 337505 - DNA, 204 bp, Zea mays
  unsure (1)..(204): unsure at all n locations
cccacacgtnctcttactcctcccctgactttgtttcttacgcctacatactcattcatgcacctttccattccctgactcaaacccaccacccttataaatacaccctcctctttccaacaaacctcctcttccttcctccacctatgcatacgagctccctacccacacacctattacgaagaacacaccctctatgacttg

SEQ ID NO: 337506 - DNA, 140 bp, Zea mays
ggcgcgaggggcgcgctgccccagccggcgcggattcgcttcgcgtctatagccttggagacccgatcggtgagctagcgccaagacgatatcggcggcgatgatgatggacgcgggaggatcgtaagtccttcagggca

SEQ ID NO: 337507 - DNA, 66 bp, Zea mays
  unsure (1)..(66): unsure at all n locations
cgacgccagcgtccgggggcacnagggtgtgccttcacgctctatttcaaaaccaaaacctaaaac

SEQ ID NO: 337508 - DNA, 198 bp, Zea mays
ctcatctcaagagcgactagagagagagagaggaagagatcatgcgataagctcatctcgcacgcaagatgcggtctccaaggggcgcatgcggctgccgcggcgtccaaaagcatgtggaactgatccctggcataaccgacaacgtggtcttggactgcctggcgcgcgtgcaccacgcctgctacctggcgatgc

SEQ ID NO: 337509 - DNA, 93 bp, Zea mays
aaaaaaaaaaaaaaaaataaaaaaaaaaaaaataaaaaaaaaaataaaaaagaaaaaaaaaaaaaggaagggcggccgaaatgagggaggcct

SEQ ID NO: 337510 - DNA, 399 bp, Zea mays
caacatccagaaggagagcaccctccacttggtgctgcgcctcaggggaggcatgcacatcttcgtgaagaccctgaccggcaagactatcaccctcgaggtggagtcttcagacaccatcgacaatgtcaaggccaagatccaggacaaggagggcatcccaccggaccagcagcgtttgatcttcgctggcaagcagctggaggatggccgcacccttgcggattacaacatccagaaggagagcaccctccacctggtgctccgtctcaggggtggtatgcagatctttgtgaagacactcactggcaagacaatcacccttgaggtggagtcttcggataccattgacaatgtcaaggccaagatccaggacaaggagggcatcccacccgacca

SEQ ID NO: 337511 - DNA, 248 bp, Zea mays
ctcgcacactacggatttgttgacgaggctttgtcttcttcgggcccttgggctatcaggagtgatcaagttcgcatgatgcgacatgaatcatgtggactactctctgtgtattatacttactctctgatatggacaaatgataactgccctttctactaattgattgaagcctagaagtttgacgatctatattcgtcggactacaagatgctacctatctgaacaaatcttgtgctggatatcat

SEQ ID NO: 337512 - DNA, 223 bp, Zea mays
ctggcacaagatggatttggtgaggaggctttgtcttattttgacgagtgagctatcaggagtgttccagccgccgtgatgctagctaattcattggactatctctttgcatgtactactctactattatgagaaatcatcatagtgattgcactaattgatggaaagtcaaaagttttacgatatatattctggggagttcatgatgctacctatatcaaca

SEQ ID NO: 337513 - DNA, 173 bp, Zea mays
accaatcctatctaccctttatcacctgtttttgactttcccccagcttatatgaacaggggacacgaacatgccggtgtcgaatttgcttccaaggaacgtgtgctagtccttcctcctccatctctgggacactctagacggcttacgcttctggaccggtcgctgtatgc

SEQ ID NO: 337514 - DNA, 466 bp, Zea mays
  unsure (1)..(466): unsure at all n locations
tcttcgtactcgcctacctccgcggctcaaacctttcccccttctcccaattccttccgccggccgccgctccacccgtacgacgacaccatgagggagtgcatttcgatccacatcggccaggccggtatccaggtcggaaacgcgtgctgggagctgtactgccttgagcatggcattcaggctgacggtcagatgcccggtgacaagaccattgggggaggtgatgatgctttcaacaccttcttcagtgagactggtgctgggaagcacgtgccccgtgctgtttttgttgaccttgaacccactgtcatcgatgaggtgagaactggcacctaccgccagctcttccaccctgagcagctcatcagtgggaaggaggatgcagccaacaactttgcccgtggtcactacaccattggcaaggagattggtgacctgtgcctngatcgcatcangaaagctt

SEQ ID NO: 337515 - DNA, 411 bp, Zea mays
gaagccggaagccttcgccgcctgcgcgtgttcggcgatggacaccgtcgcctcatggcgcctcctctccccgcctcccttgccgcagcagctacccatacccaagcgggaagcgaccttcgcggcctcgccacagcagcattcggccagctccagcagcgccaagttcaggctcctcctctgccacctccacctccatgacaagccagcggcgtcggtgcagcagagctcgcagctgcagaggctggcaacggagctacggtgcggcgccgtctgggcagctgttgaggcgccggcggcgctggcggtgaccggggaggaggacatcgacctcctagcgatcctgccgccgatcgcggtgttcgccttcttctactttctcgtcgctcctccgctgatcatgaactggat

SEQ ID NO: 337516 - DNA, 357 bp, Zea mays
cgcaaacgtatctccaaacgacgacgtgtaccgcgcgatccccaagcctatatcgccggggaacaagagcaccctggtctggaatctggtcgcaaaggacggtgcctcgtttttccttgaccatataacagacattcaccgcttaatatagaactggaccgctcgctatatgcgcgctgtggagcgagtaccatattccacaacggtaatctggaattgatcgacaatcactacggctacagaaatgtgcccttgaccgaggctatagtccggaaggctcatgggtaggagaacatggacatgtttgtcagctcctttgacactagctgtcacgccgtctttatgaaccgactttgc

SEQ ID NO: 337517 - DNA, 432 bp, Zea mays
  unsure (1)..(432): unsure at all n locations
ggacgttctacgtgtttttgctaaaacgatcggacgttctaaactctaactacgttttatcgtttaaacgacgtttaagcgacgttttaataacaatgacgctgagaacggtaaattttaccggtttctcggttacgcaaacaattagtttattacatggctaatagtttgttagctggctaggggttctaaatatatgtcgnggaagcgctaacgtcctgatgatattggcgttgttgtcgctcaggctaataggcgggggctctatgccgattgattaggttgctgctatcattattatcaaggacggctgctttgaaaaccatttcatttggtcatgtatgacatgttcaccaacttcttgctcccaccagctgctgagagcataagggcattagatttagcgatgcgattttagattttttttgtttt

SEQ ID NO: 337518 - DNA, 392 bp, Zea mays
cccagtcccggggtctagtctgagggccgtttccatggccaaccgggcgaggccgctccgggccatctacatgaccagcacctgccatgaccctgacacgtgggcgcacctcatcaaggagtacgcctcgcaatccttggtccgggaagccgccctcggctacgccaggaacctgacccgccggactcaccaccaatccctagtaagcgtcctgatcaaggccgtcgctgccttcttcccggacgagctaggtgttggcatgtaccttcatgcggaagccctcaagagcggctttgcccgcgatctgatcatcggcaccacgatcgtgtggatgtgctgcaagtgtagtgcactcgacgacacgcgcagggcgctcgactaaatgccggacc

SEQ ID NO: 337519 - DNA, 62 bp, Zea mays
gagctccttactcgccagtcgccatgggcatgattaagatcggaatcaacggcttggaggat

SEQ ID NO: 337520 - DNA, 243 bp, Zea mays
gtcataattttataaacacgtccgagcatgtctccacaagcccaaacccacacgagcacaggctctatccactatgcaccgacctaacttatcgtcaccaacgaaagggtcactgctgctcagaaagactcccacttgtcatagctctagctactagctaatactttgaggccggcggcatcctgaacagctgaacgctttagtcacttttgccatcaacagcgacgaccgatcgatcatcta

SEQ ID NO: 337521 - DNA, 454 bp, Zea mays
caccctcctctcttcacaccccacaggccatgcctgccgcgccgcaccgcaccgcattggacatggcgtcgtcctcctgcctcgcctcgccgtctggcgccacgctctgccgcccgcggcggccgaggtgccgcgtggcgtgctcggcggccgacgccggcgggagcaccgggccggcgtgggccaagggcgcgggccgcctcgcgtgcggcgtgctggcggcttggtccgtcgcgtccgcgtccaatccggtcattgccgcgagccagagattgcctccactctcaacggagccaaaccgatgcgagcgcgcattcgtggggaacacacatggccaggcaaacggggtgtacgacaagccccttgatctccggttctgtgattacacgaacgagaaaaccaatctaaagggcaagtctttagctgcagcgctgatgtccgaggcaaagttcga

SEQ ID NO: 337522 - DNA, 199 bp, Zea mays
agcctgcctaaggtgaatatggcaacactttgcttgagaagtctgattatctcacatcggaggcaaaggcttctaacatagaaaacagattgcctgccgacactacaaattcgctcaactattctaagtatgacagagtgaaaacaacaccactatcactgctctccaacacgaacgttcaaccatctgaaagacaaat

SEQ ID NO: 337523 - DNA, 425 bp, Zea mays
acaaaacataaaaacatctaacattatagcttagagagactaaatccccggaataggagccagaagaagggccaaactcttggccccggataactcccaaagctccttttcttctccagcccttctgatagctgcatccaggtttggggaaaggctgtcaaacacacaactgtttctgtggttccaaataatccaaagccccagaataattaaggagttaaaccctttcttggcaattccatgcagctgatcgctgcagcttttccaccactgcatggcgtttccctcttccatttgaggagtgagaccctcaagattaacctgtccaagcagcccttacccctagcgaaaacacaacctacaagcaggtggtttatggtttctggttcttggccacacaatgcggcaacaatcacgatggttga

SEQ ID NO: 337524 - DNA, 328 bp, Zea mays
gcagaacaacaataaccgtttgtttgcctattgctgtgcacctgatcccaaatggggatcgggtagcattgcaaaattcatttgcctaaaaccctttcctgttcacacaagccattacacacatgtttaagaagcgctgtcctgtccagtacatcaaattatggacgacatatatcacctccatgctagaacttcctggctactcttacacccatgctatatttaacatatttatcatatatgtctatgacacacatggtttatcttctacaacttaccttatgaaagctattttcaaggctatgggtgtgaggactgactttctgga

SEQ ID NO: 337525 - DNA, 298 bp, Zea mays
cgacgcgtgggcgccagcctggtggcggccggcgacctgtttgtgtccgtgggagaggacgggctcgcggggctcaccgaagccgacaagcgtggggccgttgccgtcgtagctgatcaggacctcaacattgagggcacccttgcctgtcgcgcgctggtcattgtagacgacattttgactgcgctccgggtactccctgcctgcttgtacagccggccgtcgatgaacatggctatcataggtgtcactggcacagatggcgtaactaccacaactcacctcgtgaaagcaatgt

SEQ ID NO: 337526 - DNA, 425 bp, Zea mays
aaaaggtgtacggaacattgctttacaatttaacagaaacttgagctggaacccgactaggggccttttctggccttccagccttctgcatctagcccatctggtgtggctagaaactatcaccgacaagcccttctatcttgtgcacatcactcctacctctggctcagtcgtgcggatgaacccatccaccctgacttcaccatcacatatgctggggtgagggcaaagctggatagaatcatggcatcgagctactacacagctcatctataaatgatgacaccaatggatctggctgctccagtggcaaactttggagccggatgtgttcaggtgcaagagagcatggttgtgtctccttaggcactggaagcaatccaagagagccatgatgttgaaaacacaatgaccagaatgaagat

SEQ ID NO: 337527 - DNA, 337 bp, Zea mays
aaaaggtggacagaacatggctttacaattttacagaagcttgagctcttaacccttgagggaccctcccctaactctctagacactacttttatcatcacaacattgttttgacactacttagccgtgaccacctactatattattcacatagccttcatcaataccaacaacttcttattctattacatccaatctatcgcttccctaatccatgaaccaaagaatataccctctccttgatgaaaatcatcacttcattatattgcacaacttataatcccttttaattatcttttcccactactttaatagatttattttttacctctaccta

SEQ ID NO: 337528 - DNA, 364 bp, Zea mays
cctgaacacctctctctcgccacctctcctgaacacctgctcgccccaaccatttccttcggatgggcgggcttcggccttgcgccggcggagctttgaattggcttcgaccggcaattcggcgaggcgcccgtgacgcattgggtgcagcgtttggatactacacctgctggcagctacagggaaatattttgaattggagatctatatccgcaactaaaaagctctggagtacagtagctagtgcaaagcctgatgattctaaatttgaaagtgtggatgcaccacttgagccccaaacatgtgaaggcagcttcttgtgtggtctgttgaagaacctgccacacatttttctagctgcagc

SEQ ID NO: 337529 - DNA, 231 bp, Zea mays
acgcttggtctttcattaacggtgacaaagatattctaggatcacgcgcatccaattattgacacgatcgcggatgagcttcctggatggcccgcagacttgatgacatcggctggaagaacagttcaagcgctggatgtacatactgatatgcgcatccacttagtaatgtcaatggatcttccaagttgggtccctaaacatgtggatatacacagaagaggctttctt

SEQ ID NO: 337530 - DNA, 374 bp, Zea mays
cgcacgcgtggggtggtgaatccaggatggcaatcgtgtcatttgatacatgagtgagaagcgtggtgataaacagctggtagatacgtgcgctccgtgtaattattggagtactgtcggtggcggcaaccactgattaccagggatgcttgtaatatgttgtgacgggatacgaatgatgatgagcatatactgctgacatgcatggtgaagtcatagattgcttatgctctcctcttcctcattccatggcaactagcgtacttgcgaagagatattcttttctgtccgttgctctagtaggggtttctgctctcaaggtgtccgcatgagagacgcagtaccatgttaaaattcttgatgaactacttgac

SEQ ID NO: 337531 - DNA, 303 bp, Zea mays
ggaaaaaccgggccgaccgacgcgtacgacctgacccactccattttaccatcccattctattcttatcccctaccgctaaccctccctgcctggctttctttctacgccgtgccaaccatcaccctccgctgcctctccatcgccatgtccgacaccgcactccctcccatccacaagctcctccccacagtttccctcccactcctcacctcatccacccgcgcctcgccgctcctcctctacgccaggcgccacctgccgctcgctcccctcattacctcctccgacgccgttgaagcca

SEQ ID NO: 337532 - DNA, 266 bp, Zea mays
cggcggacggtagacgattgataccatcggtctatctaccgaccgggacacgaccgagaggcgcggaggagctgattgctcagggagcggacgaaacctaaggacctgatggctcttctactgacgatctcatgagcgcacatttggcgcgcgccatctaacacggattcgatctatgataaagggagaccgttcgtcctgaccccgtgctgcgagataagcaatagtatgactggtaaaggcactagattacaatagcctgactg

SEQ ID NO: 337533 - DNA, 264 bp, Zea mays
gttctagatcgcgagcgccgccctttatttttttttttttttatttttacattttttttggggttttttttttttttgtttaaccactggcaaaataaaccaatgtttttagagccaattttaacgctgcttaagggtgaaaactgatcttgcgcaagaaaagagctccatcgcctgccttgcttttcttgctgagacgatcgaagggactgccaaattaattacttccattgcgggggacgcttacttagatttccttaccgg

SEQ ID NO: 337534 - DNA, 333 bp, Zea mays
ctccttctacttgcaaaatccgcatagcgcttgtttctgtccccgctcgcgcgcttactgggggacgcgctccggcggcaccagcgatggggaccacccgttgtcgccgatctctctaagctccgacgcgtgcctccatccctcgtcgctgaggtcctcactgcgcgcccttcaccgccggcgccgctcgcgctcccattcttactctgggccggccgccagaagggcttacgtcactgcttaccagctttacatgccctcgcctcgctactgtccgcggtaggccttccagtcaaggctgaccaggtccccgacctcatgcggacgcaacgg

SEQ ID NO: 337535 - DNA, 301 bp, Zea mays
ctgacgagaggagtggatggcgatgcacatttatcaaggcgtagagtgcagcctaagggccacgggtccgtatagtgatgccaaaccttgaaccgaagaacaacaagcacaaggtactaaggttgatatataaggccttgtaggacggttcaaggcataagactgtctgcaaggatgtttttagagagcatcaggtcaagtcaactgtgttgaatgacggtaggaaagagcctccaatggatgaatcatgactggtgtgctggcagaaaatgatctatgtgctgcactatctagggcatat

SEQ ID NO: 337536 - DNA, 128 bp, Zea mays
gcttcaacaccaaacacctaggggggcgtttttttcaggacttcttcaacggcaaggaggtgggcacgaacataaaccgcgatggggctgtcgcctatggtgctgctgtccaggctgccatcctgagc

SEQ ID NO: 337537 - DNA, 232 bp, Zea mays
gtcgctataaaaccccctgacagagacgtgtcttatagccgcaaagcgcagcctcattgcgcgggattgctgagaaatgtcggaccttgccggaaagcgcaacctgcgcaggggccgaaactgccacccgaagcactgtaaggacggctaggttcatcggcctcgcgtcgccggtttttaaggtaaagccaggtaaggccaactgttcttaaaaaagaagggaggggggcgc

SEQ ID NO: 337538 - DNA, 283 bp, Zea mays
cggacgcgtgggcggacgcttggaaggacatttgactaaggcttgagaacgtcgaacacaaggatcccggactttgtggccgtaggagacgatctcttaccatactgttgatgatatacgaattcgttgccctgacccatttacatctgacgagcggaggatccctcagccaacatggacctgggcaaatgggtggatcctacgcttgaccatacagaccatcgatgagacatatactccggtatcggtgcaaggccatgaccctagctatgaaatatatgct

SEQ ID NO: 337539 - DNA, 239 bp, Zea mays
cacaggtgccgctctttagtgcagcacttcttaattttctagagccctgcgcaattctgcgggcatacatctccgcggctttgatttcccaaaagctaccgtacctggatcgttcgagatgtttacgcatagcttctttggaagaggagccgctcaaaaacgtttatttggatcagatggcctcacgaaatgtgggtatgttttcaaaaaagaaaaaccgacagactctacgagagctc

SEQ ID NO: 337540 - DNA, 159 bp, Zea mays
aaaacccggccgacccacgcgtccgcacctgcatcgctccttcttcccttacacagtgattctgggaccatctaccccctcgttgggggatgttttttggcttccatggagaggctcattgccggcctacttggcttcctattggctgcatcggaagga

SEQ ID NO: 337541 - DNA, 395 bp, Zea mays
gcccgccggcctccctccctccccacgacgacagcctgcatgcccatggcgccgcaatgataacattcctctgagagctcgcccccgactccaaaaccgagcacacatctgctccggcttctacttctaccagtacacatccgcagtaccagccgtgtgcgcgtgcaggcaggactgcttccccttctcctcgccactgcacgccgtctagctcggcctcagctctgaccgggtgactcactgaccgacgacgcctcggaagcttctctgccgccggcctggccacgtcggtcgccgtcgtcggaccccgaatgagagccggcgatcgtcccgcagagcgcacgccgtaccgtgcctggtgatcgggggccgacaacgacagctttgggagcgag

SEQ ID NO: 337542 - DNA, 284 bp, Zea mays
cgcacaccgtcaacggtctgacccaccccttttaattttgccccaccaaccagcaccatgggggaggtctccggagcgcgaggggcctgcaacacaggcaacgaagacaccgctccgcgcggacctgatgaggaggaaggcaaccctgggcacgggaagaagccccaccatcagggtcacgatagaaacacaggccacccccccaccgacaaacagaagaacgcgaggcacccgcacgagcaggaacaccaaaggcgccggacagcgccacctgcccaagccct

SEQ ID NO: 337543 - DNA, 264 bp, Zea mays
aggttacgtgacatagaagtgtgggggagatttttgtgagcggcggcgaccggcacgggcgggggacttgagcgggggaacagggtacgccgatgagacccaccccggacaggcggagggaggagaaagctgcaggcggcgcagggaggagagctgcctcagtatgatgggacaggggctagcagggaaacgaccaatctgaggccgagggggagagccagtaacgtcggagcggggaagttgaggaatactgcgtggcggcgg

SEQ ID NO: 337544 - DNA, 187 bp, Zea mays
ggcttacctgatctcctctcagcagaagacgtaccttctgaacgccggaacgaacagaagagagcgcattataatggatcctgtgattctaaaatcacaaaacctggcaacacccatcatgaatacaatctgccatttttgcatcgaggacttccccatcctgtgcttttacctataaatggacccc

SEQ ID NO: 337545 - DNA, 55 bp, Zea mays
cggacgcatgtgcagctcctacagtcacgccttctttttacagatcacgcagcac

SEQ ID NO: 337546 - DNA, 140 bp, Zea mays
ctcttcgcctgcatcgtatgaagagatggcatagctttttacccgaatcgccatacttagcgggggacaatttcaagcccaaaagatccccccaggaattcaaaaaaaacttgccccttcttcaaaactggaaacttttc

SEQ ID NO: 337547 - DNA, 258 bp, Zea mays
  unsure (1)..(258): unsure at all n locations
ggaanacccggtcgaccgcggcgtcccgactcaaccaatctacttgctgctacaacagtgtttgcctggtgccttgcttccacctaccggatggatctacacctgctgctcgaacggaacaaccgctcgcggcatgttaaccaccacctccaacaactctggctttaatgaaggggaaaaacatttgagattcgttgcggatcaaaagcccgagcaagagaattagacgtaaaacgaaaaaccttttgagattcaatt

SEQ ID NO: 337548 - DNA, 76 bp, Zea mays
gggttctccaagctatttgctcctatactttattaattgattattattatgattaaaaaggaaaaaagaagggctt

SEQ ID NO: 337549 - DNA, 347 bp, Zea mays
gtccgcgacacgcatcgcccaggcgagcgcagtggagaatgtcatctccggaagatggcacccgccgaagcccacgtctccgccggcgccggtgtcagttccggtgttggagactcccgtggccccgccagagattgagaggcctaggtctgttggggtgagagagctggatagtggggtggagaggggcgccgcaccagtgagacccgcgtcacatgaaggaaggattggggaagggagagccggggaggtgccagagagacccaagttgaagctgcttcctcggtccaagccaattgaggatcctgaacagcgtcctacctatgtcgaagagaagcaggtgcacc

SEQ ID NO: 337550 - DNA, 423 bp, Zea mays
gtcaggggaaggcttgctcggtttatcccttccgcaccctactcatgtgggagtctactgcactggatcttttctttttatagacatgactgagtgatgatgttatttgttccatgcctttttcgtcatcagtatttatatctttccttgtctttttcaggacaagcctcagccgccacctgagggccgtcttcctgatgccaccaagggtagatttctaatctttactagattggcatgaatgctgagttaatgggttacattgaccttgcatctttttttaagtgtttcaaagatgttgttttggcatccctgtacccagcttgctttgggtaacagtggttccttgtagccaaagcaccgcatatgcggccagaccaaacactcgttttcatgtcacttctattgacacgaggactggca

SEQ ID NO: 337551 - DNA, 310 bp, Zea mays
  unsure (1)..(310): unsure at all n locations
gaaacctgacccaccacgaactgcctatctgcatccatctttgggccaaccaatgaccgggccaaccacacctgggctctcccctcgagatgctttcacggtgtactgcaagaaccaggaaccttcctgttccctccggcgcaaggggctcacttttaatttctcgagaggggacgctcctttctcggggcagccttctctgcttgttgcctgcactcggctgtcctcttttgattcttggcaccgcgttaatttcgcaaatgcggcagggtgtcngctcaagaggccggcttctgcgtcttgggcgctt

SEQ ID NO: 337552 - DNA, 414 bp, Zea mays
gttggcttctcctccccctccttttcgggttcgggttcgtgaggttctccggggttcggggtcgtgggtgagcggatcgagatggcggcgtcggatgttgagtaccgctgcttcgtcggcggcctcgcctgggccacggacgaccactccctccacaacgccttcagcacctacggcgaggtcctcgagtccaagattatcctcgatcgggagacgcagaggtcccgcggcttcggcttcgtcaccttctccacggaggaggcgatgcggaacgccatcgagggcatgaacggcaaggagctggacggccgcaacatcaccgtcaacgaggcccattcccgcggcggccgtggaggcggcggcggcggctactgtggtggccgtggaggcggcggctactgcggtggcgggcgc

SEQ ID NO: 337553 - DNA, 334 bp, Zea mays
cttcaacgaccagcttcacattttttaccccagacaccccaccaagaccttttgtaactacaccatggttatcatccacaaccctgacaacggcacatcaagaattaatctgccctcttgctccaataatattgcccccattatcttccctaccattatttaatcacttattctatttaaagcaggactaacaatccgatactcaatgctagtaactcgcaccacaagtaccgcttgaaaagaaacatctcacccaaagttctttatacattcattaaccctttataatatccccactgtatgatgtaaccaccaacacatttttcacaccttt

SEQ ID NO: 337554 - DNA, 359 bp, Zea mays
gtgagaagccatgagtagggaacagcagatgccacggcggaggttcatcgccgtccccttctcctccggctgccgctcccactccagcgtcgacgtcgtcgacactgggcgccacgccggcaacggcaagaagccccacccgcaaggggctgaagcaggggcggcggcggcgaggggcaagggggagtctctggtggcgcggctcctgcgggggttcaagaacctgtcgcagatcttcgcggtgtacgacgacgaggacgaggaggaggaggagcgggagatggtgatcggcctccctacggacgtgaagcacgtggcccacatcggctgggacggcgccacgagcaccagcagcaacc

SEQ ID NO: 337555 - DNA, 431 bp, Zea mays
aattcatggaggataggcagttcatgcagctttgcaagaggatacggatgcgcggcgaggatggacggcaatctgtacttcattggtggggtcaacgatgctggagaaactctcgggactgtggaggtctacaatgagaggcaaggctggtcgatctctggctgcaaatccgtagggaagagggcctttgcctgcgctatcaccgtttgacatgatcgcggatctcataccgtaccaatttttttgcaaccagcagtcatggttcgcagcctggtcctaccacgttggtccgagtataccttcttcccaaaacagtcactgggttgagagaaattttgctgcctcctcccccactacttatactactccagtccgtgaacaaatcaacttctagagttgacttgagccaaacttttgcaaacgttagaaaa

SEQ ID NO: 337556 - DNA, 415 bp, Zea mays
gaaatcctggattaaacaccatgatggtgaatttctgggtgggagggggaatcaattggaccacctgattttctcttctttgatatcaagttttaccatggaaagagactgccatgtcaaagcgagttcagctgcttcaaggtgctcggaaaggggatgctgctgtccaaccccatcgtcgttagggccaagctcatctccaaggtcaccgagaagaggatcaatgttactggaggcactatcttgctgaccgccacataggatctgcgtaggaacatggaacattgaggcgcatgtcaacccaatgaattggatattgaaaaatggctggatatagatgaaccagctgatatttatgttcttaggggatagcaggtttaagcacaaagagaaatgagtccatcataagtgagat

SEQ ID NO: 337557 - DNA, 416 bp, Zea mays
cctccctctctcctcccctcgccttgtctcgcttttctgctgctcggccccatccgatctggatcaacacattgaccgagcagccatggaggttcaacactccctgtctcgacccctgagcggcaagggtctgtgcgagcacaccggcagccccaggcgcggattccccatcgccgtcgcggcgttcgtgctcgtcctagccctggtcgccggaggccacggccacgcaggaagctctcgccgcgcacgccccaaccgcgaccatctttgtcgaaccagacgtccgctctaagcagctcgccgtcgtctgtcccctggcctgcgtgcccaggccacgccctgcctctacgtcgttgtcgtgttatgccgccttccatcgcgcctcgccttgctgcgcaacggttcgctgcgtcgtc

SEQ ID NO: 337558 - DNA, 425 bp, Zea mays
aggttatacagatattgtgctgtaccttgatgctactattatgtgtagtaaaatttttggggtcggaattgaccaaacttatggatttattcaacgtttcaattcagtgacaaatgctactattttctatattcagatacttggtactgatttcttgatcaaactcattaaacttagcattccttatagttatccccacacgctgaggttgcgcctgtgccatggcataagacacgcctacatcgtggacggatatgcgctgccatggactgacctcagcgcagatcgtgattgatttgtgggtgaccccggtttgatgtctggttgttgggctgcgcaggtgggctgtcgcttgggatcgaaaaggatagggcatctactgccaccatggggtttgtcgacgacttcaaaaggcatgttgtcgc

SEQ ID NO: 337559 - DNA, 436 bp, Zea mays
  unsure (1)..(436): unsure at all n locations
gcccaatcattctgtccgttttcgccacccgtggcctcaaaaccaatccgaggcacggaacatatggcggccctggcgggcgaggacaaggacgttgccgccttcctcgcggactgcacggcgtctggagacgccgcatatggcgccgccaaggccgtgctcgagcgcctncacgcncccgtcacgcgccccgccgcacgacgccttcttggcgccgtccgccgacgcttcgccgccttccgcgccgcgggggaggactgcttccgcaccttccactttcgcatccacgacgtcgtcctcgacccacacgtacaaggtttccaacaaaggaagaagttgacaatgatggagataccaagcatcttcattcctgaagattggtcattcactttctatgagggcctcaaccgtcatccagactccattttcagggata

SEQ ID NO: 337560 - DNA, 388 bp, Zea mays
gcaatgcaaacggcgctgcttgcgagagtgaaactgaacttgtttacacaaatcctctacctttggcgcgctgcttgcaagctgtttgggaggtccagatatggcggatcgatccttccacgtcggagcgcaaagatctggtgtcaacagcgagggtcaccctattgaccaatctaccaacaccagaaaagatgaagagcttcgaacaaggcctgaagaatttttcatccaagttgtagagctactgacgaaggcatgcctgccgcctacattatcacatacagcgggggagcgccgtctattagtttactccatcatcagctctaggaggaaggagagctgctcagtggctgctggacctatctgtcattggcatggcacatcatca

SEQ ID NO: 337561 - DNA, 301 bp, Zea mays
gccgaccatcgacataattaaactcgtggtctagtgcgccagaggaggacccgcgcacctgggccgcgccgactacgctgttgcgctcaatacaactgtcatgacgcgctccaggaggggatggtacgtctcatcatcctctacgagtacacgaaggcgcggcacgcacaatcctactcacctgtactgtgagctctcgctagtacattgaccctgtgactgagacacttaaggtatgcacgtcagaggtctgggaggttatcaaactcacggacgacaaccatgcgctgcacacgcacat

SEQ ID NO: 337562 - DNA, 308 bp, Zea mays
ccggaaccgggacccagcgtcggacgcgggcggcgtcgtcctattatatactcttctatccggccggttcgctcaggtgtcgcttacaccacgttcgtttgctcgcgggcccgcagccgcctgctgctcctctgaccgccgcggacgcgccgctctagtctctgggttacaccgcaacgtctgccacttcgcaccgccacacaggctgacctcgcacggtcgcgcggggccgcgggacatcaacgggttatggatccacgcggacccggggtctcggatgcggcctcggtgggcggctgtcggtcagc

SEQ ID NO: 337563 - DNA, 203 bp, Zea mays
cgcgcgcgccctacctactttatcttcatgctattcacccacacaccgattcctatcctaagcgcatttctcactaccaagtgggatccttcctcacaccacctcttcactttcttccgaccgcctctacccaacccagacatcctgacttcagtaccttctaaccagcctcacgcagttaccatcactctctactatagctc

SEQ ID NO: 337564 - DNA, 325 bp, Zea mays
gacagacagcacctactttagcttttttcgttcttcccaaatgtcactcccatggccgagagagccttcttcccagtgactcgttccgtgcctgtgccattcaacgactttaacgactgcattgttccaaagcaaactcccaacgatgagttctgtgacctcgtggacgtgctgacgagcaggcagtacttcatcctgtatctgcgcctgtaccattgattattgctgcctgagcactgagtgcctttgaccattgtgttccagctccattttacgccgttcccagactacgagatccttgagagctaccccaagtgcggaacca

SEQ ID NO: 337565 - DNA, 319 bp, Zea mays
gagaatgtaaccatgatttacgctccagcgctctaattcgaggtaggagaatcaatggcttgaacgctttcctgcgcaatcagagaaacatctgacggcgccaccaacagcctctggaaagaagcaacacttggcttcgcttgaaaagtggtttattggctctgctggaactggtattactccccatgagacataattcaatccatatatatcacagctgccaaaataatggcctttttacaacaaggcccaaaggcagtgtgcatcatattcaccaactgcagctatgactacgataaaccctgacaatcatttgaca

SEQ ID NO: 337566 - DNA, 202 bp, Zea mays
  unsure (1)..(202): unsure at all n locations
gaataannggtccgacccacgcgtccgtgtagttactatccactataattctcgccgctantcccctgtcctactgctactgctactagtggtattgtctccccaaacccaaccctccctaatcccctcaaataccttatatacagcaatccttcctcgccgtcttgattgctttaaccgcaactatccatggattaatgtc

SEQ ID NO: 337567 - DNA, 219 bp, Zea mays
ggttcccccagtttgtctcattgtgcaactgtgctctcacccgctccccgagtgtttgggtccacctgtcagcccagccgcgtgacagtgcccaacaacagaattatttgttctttgtaactcccagcttcatccactgacatagggttgcactgaatgctgtattgctttgttgaatttcattttcttaatgcagaatatataaatatattacaatat

SEQ ID NO: 337568 - DNA, 208 bp, Zea mays
ccctgctgtgcttgcagataatgctataagtttctcacctgacaagctgcatgtgctactggggatagttctaaagaaaacccaagccttcaatcacacgccagcccgcgctctcaagccagactaacaagccgaactctgttgcattacccccatctatccatgaaacatgtacctgccaccctcgatcaacaccacttccgaccca

SEQ ID NO: 337569 - DNA, 447 bp, Zea mays
cgacccacgcgtccgttaaaatggaagccgaggtcgggcggccaagtagttaactgcaggccacccaggcagaggcgtcagttctcctctacgaagcggcgttccgatccacgctggcctgctaaaccaacacccttcaccagcttttatcctccatgctcagggcatccgccgccgccgtcttgctgtagacttcccactcgactacgcgctcatctcgcaccatgcgcatctcgagctgcacctcctctgcctccaagcctcgctccatgctgcccctctcgttcggatccaataccctcacctatctcaccgacgcaattacctctgttggagcgaaagtcgcccaccccctcgctcggctcattaataatgggaacatgacaagttataacgtaatgaaagcgaagaacacttcaactatcgaaggctttgggatggaaggat

SEQ ID NO: 337570 - DNA, 134 bp, Zea mays
cgatgtagacaggacagaacggccttagattttgtatcatggctgatcaacatgttatattaccatgaggcgaggtaagcttgaccgattgtcgcttcaacagccaggaagagcaagagcaagatgctgcgcaa

SEQ ID NO: 337571 - DNA, 371 bp, Zea mays
ggaagagcgtggcggtgaggcggcgacgactgggagggaggaggaggcgctgtctgaggcggtcgtctatcggagcggcgtcgtcctacagctcctccatcggcgagaactccgcgtccgacaaggagggcagcgacgggaggaggaggtggtggaaggaactgcacaaggcctcagcatgatgccctgctccagtccttggacgatgccctgcccatcaacatggaacctggcagctggaaccggaccgatccccaccgagaagaatgccacgtctttgcacaccgtcaggatggcgacgccaacgccggcgccacgggacaccgacccgcgcgcctgcatgaagagagcggcggacagcgccgccaggc

SEQ ID NO: 337572 - DNA, 55 bp, Zea mays
gatactcatatcaccatcttatcactaaccgtctctaaactcacacccacggcct

SEQ ID NO: 337573 - DNA, 260 bp, Zea mays
ggagcgttggcgccgtgcggactgtcttgaccaccaacagctactaaagaggggactgggcggctgacacgccgcaatggtcccgacacacgggggccagcaccagccgagtgaaaggaggggtgaacagacaggcccgcacgcctgatggcctggaacctgggccacctggccacgtctgggcaccgcctcggggtcgactatcagcatcagacagagaggagctaccagactctgcaggcaggcattggccacacggt

SEQ ID NO: 337574 - DNA, 371 bp, Zea mays
accgcacacaacacaaactcaaccttgaccgtgacatacacgacgccatggctatctagcaggcccgtaagctaactcagcctggccggctaggcatgatgtattgtgcatccggtcgatttgtgccacatcaacattgagagctgaagatgactggatacacaaacgaaggggagcatcgtgctgatccagaccaaaacggtcgagccatgacagacagaccatacatggacacacgctgctactgataaaaccatgtagacggtgaagcagcagatgatgctaacatacttgttcaactacaggcaactagtgacgcacgacacaagtctacagatgaggtgtaccactaccggctactattagcggtc

SEQ ID NO: 337575 - DNA, 435 bp, Zea mays
gcggaaggccgcaagcaccttgtacagcaattctggcgctcgacccttggtggcacaaggcgcggttagacgagcggatttcgatacgtcagctagtttcggccccgcttgggggcttatgaaagctcctgacggtaactgcggcgtctattcctctctgagtggagcgctacagagaaagctcgtggacgggcaacgaaccaacggcgtttccatacgcggaaccatcctcttcgttttcggattgcagtacgtgctacaatatcacatatctcgcctttatccgaagagggggttattcacctagctttcaccaccagtgattttgcggacgacggcctatggttcccaaatcaccgaccgatcgacgacgccatccttcttcccggcaacataagctcacccatcgacctcatgagtggtgcgattgattca

SEQ ID NO: 337576 - DNA, 259 bp, Zea mays
cgtccggttccggtgaacctgaatttatggctggaactcgctttgcaaaagaaaacggctaaagaaactgctgcttgtcacacctcatctgataccataacaacacctggatgtgcacccttgatgtaccctcttcactaggcgtgtatatttcggggagatacctaaaggttgattagaaaacttgaaaagataggctataacctttgcttagtatttggaaaaacaccttatgccctgtgtttgctattatattttc

SEQ ID NO: 337577 - DNA, 436 bp, Zea mays
  unsure (1)..(436): unsure at all n locations
gtcgcagtgccaccgaggcttccaagcaagttccacccccgcctgcctgcggagctcggccgtcccctgcgctgcggagcgggagcgggagcggcggcgacaatgtcctccaacggcaagcccaccccacagcccgcggcggccagcgccggcgccggcgccggcggcccgccgaagatgtaccagcgacccatctaccggccgcagcaagcgcccgcgaagcgccggcgcggggggcggtcgtgcccgttcagctgctgctgctgcttctgctggacgctcctcgtcgtcgtcctcctcgccgtcctggccgccgtggccgggggcgccttctacctgctgtaccggccgcaccggccggccttcacgctgaccgcggcgcgcgtgacgaggctgagcctgtcgccgtccgncaccgcgcccgcgctgagcgacg

SEQ ID NO: 337578 - DNA, 199 bp, Zea mays
  unsure (1)..(199): unsure at all n locations
gagcgggagctgtagcggctgcgttttttttcttcatcgtgtagcccaccccacattccgctgcggccagcgccggttttttttttgtattcttttgtttatgtaccagcgacccatctaccggccgttttaagcgcccgcttatcgccttctcggtgggcggtcgttcccgttcattntnttnttttttttttttttt

SEQ ID NO: 337579 - DNA, 421 bp, Zea mays
ggtgggttggcttctcctccccctccggtttgtgttcgggttcgtgaggttctccggggtggggtttcgtgggtgagcggatcgagatggcgtcctcggatgttgagtaccgctgcttcgtcggcggcctcgcctgggccacggacgaccactccctccacaacgccttcagcacctacggcgaggtcctcgagtccaagattatcctcgatcgggagacgcacaggtcccgcggcttcggcttcgtcaccttctccacggaggaggcgatgcggaacgccatcgatggcatgaacggcaaggagctggacggccgcaacatcaccgtcaacgaggcccagtcccgcggcggccgtggaggcggcggcagcggctacggtggtggccgtggaggcggcggctactgcggtggcgggcgccg

SEQ ID NO: 337580 - DNA, 400 bp, Zea mays
cgaaactctagctctgcttgcggcgggcggtagcgactgcgcgcgacgtggaggaggcacccccacccgcccactcatccgccccccgccgtcctcctcccgcggttccacggtgcacggtgcaggatccactcttctcgtcccctccgcccgcccgtcgtcgccctcctccatggatccactgcgctcggcgcaggagctcttcacgcgtgtcgccctcctccatggatccactgcgctcgacgcaggagcaacaaggggcgcgcgcgatggcaggcggcggtctccaaggagcgaagaagcgcaagcgcgagcacgcaagtcctcgaaaagaagtcccgtccttggcgcgcccccgtcaggtgccgccggctgcgtgcgttaacacccagccaagaac

SEQ ID NO: 337581 - DNA, 163 bp, Zea mays
  unsure (1)..(163): unsure at all n locations
cagcggtttcatactaccacgcccacgcccggcgccggagcgcgagggccgatctccccgatggaatcttctccgccgctactcccaaccagnngccctcttcgcccgccgtcccgataccgctcgaccgcgcccccgccgtcccgcgccgccttctctggtc

SEQ ID NO: 337582 - DNA, 277 bp, Zea mays
  unsure (1)..(277): unsure at all n locations
cacgcgtccgntcctatctctatctggtagtataggactgtgcggagctactagcaacgtagagtatccggcatgagtcctttcggggcggtgatcacgccagaaaccctcaagtacatgtccaagtaccagggacgagagatcacgcaggtggactgcgcacgggaggcgatgaggctgatccacgcggaagacaagaacctgcaagccgagaattcggcatgggaactcaagaagaagttcggcaacggcgtgagcaccatggtgctcgtctaca

SEQ ID NO: 337583 - DNA, 383 bp, Zea mays
  unsure (1)..(383): unsure at all n locations
ggcgacccacgcgtncggggaggcccagtgactgtagaagtgaacatttctatggcagttgtctgtaagctattttaggtgctactagtgcaagatcccaagccaggatagagagtcatagatagaggtgtgtgtatgcgtgggtgtgcttaagatcttgcataccttgggttgctgtctcggtatgaccgtatgggtctcctagtatgtccgcagtcggcagagacaggtcgctgcagaatactactacaatacggagtacaatactactagtacatgattgtattgacctggttgagtggatgtagttgacacctctatctacagacagaatggaagtaaaagtgagaaagaaaaaaaaaattaataataaataatttttt

SEQ ID NO: 337584 - DNA, 306 bp, Zea mays
ttctcttcttcttcttctttaggtcgtccgtcgaaaggctcctcttctttttattgcgccgttttggcaaagggggtggggaggaactcttcgtcgtcgcgcaccagcagcagcgttacgcaattcacgaaagaacatgctttaagcagggagaccaatttttttccgagcgcgctacgatggagctctactccggataccttgacgaccatttcaacccccacaagctaagcatcggccgcagcgccgtcttgtcgccggagtacatggcgtccgcgtcccccgcccacttcgccgaggcgcccc

SEQ ID NO: 337585 - DNA, 425 bp, Zea mays
cggacgcgtgggaaagaatttggaggcctttgtgggggtcccttgcgaccggttctggtcgattattcgtgctgttgaattcaatatgccgctgtgacccacctctgcctggtttcttggaggaaatttgcttcagttgtgcgtcgttgagttagagctctcctccagctcttgattcggtccatggggctttgccatggcaaaccgacgcaaatcccggaggccgaggcgggggaggatccccatgtagcctccggagcgggtgacagcggggacgggccgacctcgccgtcggcggcggcgcccacggcgaagccgggcacgccgaagcagcccaagttcccgttctacctgccgagcccgctcccgccgtccagctacaagggctcgccggcgaactcgagcgtcgcgtccacgccggcgcg

SEQ ID NO: 337586 - DNA, 427 bp, Zea mays
ggaacccctgcggcgagccgtgcgtgttcttctgtcccgccgccgccgcccgtgtactggcgccggccgccgccgccgacgccggagtactacccgccgacgaccccgaccccgaccacgccctactgcccgccgccgcctttgggcggcggcggcggctacgagccgtcgcccgggtacacgccgtcgacgccctacacgcccggctacaaccccacgccctccgggtccggctggtacgcgccgccctacacgccgccgtccgcagggacgctgtacccgcaggaccccgggttccggcccaacgccgcgccgcggcgcgccgcgaccctcttctccctcgccgcggcggtggcctgcgcctgcttcggcttgttgtgaccgaccgaccggacggatcggaggccgcgaatcgcgcacgtacggt

SEQ ID NO: 337587 - DNA, 243 bp, Zea mays
gtccggccagggacatctggacggattccatcgggttcttgacggcgcggatcctggagcaggcgctgcacggctggcccgtctgctccaggtgctgatcgacaaggcgtggcagtcgcgcacccgcgcggcggggttcgcgcggggctcccccgtgcacgtgtgcttcgccatgaacgcgcgggcggcgcttggcgtaccgcgcgggttctacggcaactgctactacatcatgcgcgtgtc

SEQ ID NO: 337588 - DNA, 204 bp, Zea mays
gtggcagcccaagtggggcgtcgcagccctgtacggcccaccggtaagtacctcgccctttcggcagccccagctactaccggcagttcccggcactcggtgggacaccgcgctgtcgccgaccccaaccttcgcaagaaccggagctgaggtgatccactccgtgggcatgctgggcgctcggtgcgtttcccgactgtctcc

SEQ ID NO: 337589 - DNA, 252 bp, Zea mays
  unsure (1)..(252): unsure at all n locations
ggccgacgcaggcgtccgagcggtnnnnncaaaaaataaacacgtcgctcattatcgtgcttcattcaatccggggcggtccgttcttgcgcgcaccaaccgccactcacatcttatccttcacacctttcacactcttttcactcagttcgagcaaggggggcagctagcgagccacgtgctgcagtcaagctagtgccaatggcgagggcggtggcgatgcttgcggccctggctcttgtcgtggtggat

SEQ ID NO: 337590 - DNA, 391 bp, Zea mays
aattatattatcatatattttttttttttttttttatttttttttttttttttttttctactttttttttttttttttttttttttttttttttttatttttttatatttttttttttttttttttttttttaatttttttattttttttttttatatttttttttttatttttttttttttttttatatcttttttttttttattcttttttttttttttttatttataaatttttttattttttttatcttttttttttattattatttttataatttttttcttaaacttttatcttatttttttttctttttttttttttctaaattttttttatatttattttctgtatttttttttttttatttttttttatttttatttttttt

SEQ ID NO: 337591 - DNA, 313 bp, Zea mays
ccctcgaggtggagtcgtctgacaccattgacaacgttaaggccaagatccaggacaaggagggcatccccccagaccagcagcggctcatctttgctggcaaacagcttgaggacgggcgcacgcttgctgactacaacatccagaaggagagcaccctccaccttgtgctccgtctcaggggaggcatgcagatctttgtgaaaaccctgaccggcaagactatcaccctcgaggtggagtcctctgacaccattgacaacgtcaaggccaagatccaggacaaggagggcatccctccagaccagcagcg

SEQ ID NO: 337592 - DNA, 168 bp, Zea mays
  unsure (1)..(168): unsure at all n locations
acccacgcgtccgctagatcgcgagcggnnccctttttttaataattttttgaancgaacgagtaaagttcgctcatattaacagaggaaatccccccctaaatataagacttagaaggatatgtacattcacttatctctctcaaaaaaaatccttgttcataatgc

SEQ ID NO: 337593 - DNA, 279 bp, Zea mays
  unsure (1)..(279): unsure at all n locations
ggggagtcgagggaacgacctttcaacctccaggaagcctcgcnctcgcttctgtccgtcgatgaagcaccaacaaggaagggccaatgctttcttctggggttcgagggaagcttgtgaaggggccaagaacacaagtggtnttgctggcacgatnngtactatctcactatntgaagtgaaggggatggcgaagtcnaagaagcttcttacgaagctaaggggtctgggaagaaaagccatgtggaagaacctcaaagggggctgcaagggaattca

SEQ ID NO: 337594 - DNA, 406 bp, Zea mays
gtccggatcccagctcccctgcccgctcggttgactccctcgtcgccgagtccagctgggagtccgagaaaaaatcaaatcgaccgagtccgcccgtgaagccgccgacagaaggagagagcacacagcgggcgaggcaggcagcatgaagtccatgggcagccgcgacaagctcgcggcggcgtcgagcccccgccgcgtcctcttggtggtcttcgccttctgcttcgccttcgccaccttcctcaccttcctctacaccacctcccacttcacgaccgcgcccggctccggctccggctccggctccatcgcggcctctaccaccaccaccaccaccacgaccttcggctctgcgggcggcggcggccaaggccaagcagggcccgagtccgtgtccaagcag

SEQ ID NO: 337595 - DNA, 284 bp, Zea mays
  unsure (1)..(284): unsure at all n locations
acccattcgtacggaaagttatgcaggacctaaagccaggattcnatcacggnaaggccananagnnctgggggggtgaatttaaatttaattttgctcataaaaccttattccctactgaatgttgtcattaaggcactcatgctctattagatcataaactacgtccattctctttatcatcatattaatgtttagcgaatgtcccacttacatatggttacataacacattcttatctctatattctatttttaaattttttctttacttattattaacac

SEQ ID NO: 337596 - DNA, 428 bp, Zea mays
cggacgcgtgggttaattttgagccaacctctcatctagagccaaacacttccaatttttgtaacgacacttctcagatcttaataatcgagcgagagcatcatcagcctttttctctagattgtttgtctttgtagcacatacagtgaaccagaactggtgttttgattattaaatgcggctaaaagtatggggcacaaatacgattagaactttgcagtcttggtcaacaattggtgataatcatgcaatcaatgcccaccacttgctgaaatatgtggcgatttgcgttgaaagtttgttttgcctgtcatagaaagcaccacgcgctgtggcacaattaatgtagaatagcttgaacatgtacattaagggctagtttgggaacattatttttctaagagatttctattttcctaagggaaatt

SEQ ID NO: 337597 - DNA, 436 bp, Zea mays
agcgcacacacacacaaccagatctcccctttattcacccgtcggcacctccgcttcaaggggcggatctttgtgaaaaccctgactggcaagactatcaccctcgaggtggagtcgtctgacaccattgacaacgttaaggccaagatccaggacaaggagggcatccccccagaccagcagcggctcatctttgctggcaaacagcttgaggacgggcgcacgcttgctgactacaacatccagaaggagagcaccctccaccttgtgctccgtctcaggggaggcatgcagatctttgtgaaaaccctgaccggcaagactatcaccctcgaggtggagtcctctgacaccattgacaacgtcaaggccaagatccaggacaaggagggcatccctccagaccagcagcggctcatctttgctgggaagcagc

SEQ ID NO: 337598 - DNA, 381 bp, Zea mays
  unsure (1)..(381): unsure at all n locations
ccgtgcttntcctcctgactttatcacgagctctgctttattgagtgcaatatgattatagagctcgcactgtttgcaaacctgaccgtgagcctgctctgtacaacagtggcgtgctccgctgggcgagcaaaataacggacttcagaacggaggacgaatgcaactactccccggcatttgtgctctacaacatgtcggcggaaactgcgtacagcttctattactgggtgaaaatcgacgggccacaaaacgcacatgtgaaaagaaatatactgaccgtggagaacgcaccataacagtgcttcttgaccgctatcgcgcgcaacgactgctgatattttctcaagggtggctttactctcaactccacgtctcaaa

SEQ ID NO: 337599 - DNA, 397 bp, Zea mays
ccactggctctcctatatagaagcgcggcttgagctcgcaccgtcgccgccgctgtcgcatcagaagcctctcttcccgtcttccggtcttcccccaaacccctcccagaagcaatcattccgcccgcattaaggccaagtggaagaagaagcggatgaagcggcttaagaagaagcgcccaaagattaagcaaaagtcccagttagccaaatcattgagtgtccccgcctggagtctctctgcgttcggttgttggttactgagaaaatttaggtttttttactaagacacgctgttatggatcacaaattcctctcgtttgttcgtggtctaaatattgcatcaagtgttctgcactttattctttagatgttaagtgaaacgagagcttgtcta

SEQ ID NO: 337600 - DNA, 180 bp, Zea mays
ctaacagccagaaattctcctccgaacgacttatttaaaaagaagcaacccccctacctccctcgatccaaagacctcatagattctgccgtcgccactccagaaccaataaatgctcctcctgctcttcttttctttcctcaccaccaatacctcctttctcctcttcaatttctccac

SEQ ID NO: 337601 - DNA, 233 bp, Zea mays
cgcagatctgtaggcatctctgggcctatgttcagaccttagacccaggcgccaacctagggggccgtggtagaatttggggcttatcaaaccagcatatgtctagaaacgagctgctccaatgctgcaacgaaaagaggacgacgagcttcagataatgctccatatgaaccttcatggctaccctccactgcagactgagtccaaactcatgaagccgacctccccagctt

SEQ ID NO: 337602 - DNA, 273 bp, Zea mays
ccgggccgacgcacgcgtccgaaaagccaaaagcatcaccgccgtgtctttctattgcagcctccctccaagacggggacgcgctgtttcattcggacacgacccgcatcctgccgccctttgcctacctgccatcccttccgtccacgcaactgaagtacatagtgttcacacacaacacctgccccgccagcatcacgaaataagattctgacatccgcaccatgtactgcctcctcgcgaaactatccaccaataaactcgccaccttgg

SEQ ID NO: 337603 - DNA, 264 bp, Zea mays
  unsure (1)..(264): unsure at all n locations
tggaanaaccgggccgacccacgcgtgcgcaaggcacaagccacccatttgtttacaggttccggagctaccgacaaccactgggccaggggcggcgtttccatccttgccgagctcctcgagccggaaccttgccatctcacgcagcggtacatatggcagaacattaatattcccaccaggggcggtgctagtggaaagcactaggtaggggacgaatactatgaggactacgcggccgacttctacgactttgaatccaac

SEQ ID NO: 337604 - DNA, 189 bp, Zea mays
acaaccatctccaaacacaattatcacgaactttcacatcaaatctcccgttttttcaagtgacaactttgctatacaacccagcaagcatcctactacatatcattcggaacgacaccacttttatgagctttaccctgctaattaccacaactttattacacacacgacctgatagctatccaaaat

SEQ ID NO: 337605 - DNA, 381 bp, Zea mays
  unsure (1)..(381): unsure at all n locations
aaaaaccgggccgacgcgacgcgtncgaaaaaaaaaaaaaaaaaaaaaaaaaataattttaaaaaaaaaaaaaaaaaaaaaaaaggaagagtcaataaaaaaaaaaacacacccaaaaaaacaaaaaaacaaaaaaaaaaaaaaaaaaaaaaacgggcccccctttaaaaaaacccaaatccacccccccacaccttcccacaaaaaacccttttaaaagagcccccaaaataaataaaatccccccccctttaaaaaatctgaacctgaaaaaaccctgcctttcccaaaaaaaatcccctataaaaaaacccccctcctcccaaaaaataaaaatccaaaaaaccccccccacagccccctccaaaacattttcccccc

SEQ ID NO: 337606 - DNA, 95 bp, Zea mays
  unsure (1)..(95): unsure at all n locations
ccgtccagctcgtgcccagagatttaaatanntttagaatctatantgtcgtgtnntttttttttgtaggtttcagctcccgtgtctcagccctc

SEQ ID NO: 337607 - DNA, 283 bp, Zea mays
gttcctgaacaagcaaacggctttctccattttccttgagtgcacagatagggcgtcgtggggcatgaactttgcgaacgtgaaccacatggtgctcttcaactacccccacgacccgagcaagtacgtgcggagcgactggcggacatgtccgcagagcgtgcagaaacggcaaggcgttcgagttcacggtgggcaaacatgtgtccctggccagtagtgcgatggagagcaacatgacagagcacccgctgcacgacttgccgaagcgtctaaagaccct

SEQ ID NO: 337608 - DNA, 325 bp, Zea mays
  unsure (1)..(325): unsure at all n locations
cggaccgacccacgcgtccgntactacaacttttaccaagccctcttaattttccatgcctnaaaacttcgtgggggggtgattgaagtttttgaggcatattaccattgatacaattgaattcttgactagaccactagctacgattatgaggacaatactttcttctcctacggagctattctcaactacaaaatatcactgaccggtaaacgagtaaagtctaatgttaaggactaactaccttctcctttgagaactccatgctctacgctatcgatagcgtgaacggtctagagatccacagttaaacatcaccgataac

SEQ ID NO: 337609 - DNA, 328 bp, Zea mays
ctccaatccaatggacaagatcacagaaacattccagtttcatctcaaacttcatttcgatgccccaggtgtcccacaatctgaatccttaagtcatttagctcatggaatgaccaaagccagggcagcccgactattctatcaaatagctgttttggcaacttgtgattacatcaaggttactcagctggaacggaaaggagatgaactgtacggagacatcttgatctccagaggattaaagatgtgacttggtgatgttggaaacaattttgctgcggtggttcccggtgcacatctcgtgtttatattacagaatgcttacata

SEQ ID NO: 337610 - DNA, 212 bp, Zea mays
gccgaggaggcgtccgttttgctcttcctttcacacacaatctccctatcccaagcaaaccaaaccccaacggccagagtttttataatcttgtccaactcacacaccaaccctttattcaatgtatataagtccaaaacaaccgaacacatgctatacatcccccattgtaaagccaacacccaacctaacaacaacaaccctcttatcca

SEQ ID NO: 337611 - DNA, 242 bp, Zea mays
ctcaccagcagcaagtagttttggaggcagttacaaaacaaccatgttttgaaactccatttgtagattatttaagttttggaggcatattggagtagaaacaattgaatttttaacgagatccctccctcagttaatgagtgcaagactatgttcaggaacgagactatgttcaggaacgaaatttctctgttgtgtcatcgagtcaagtctaatcttaaggagtaacttttcatttgatt

SEQ ID NO: 337612 - DNA, 324 bp, Zea mays
atcgtatcatctaacctgttcagcaggctttttctattttcgcagcccggtttgccgaccaggttccagggttccagagtagccaagctaatcccgagtatcgttcgcgcgatggcggaggagcattccaaccctcatccccagcaagctgtggagagggacgttattgtggagcagcaccaacatcctaggagggccccgaaactgaggtacctggacttcgtccaagtggcggtggcgcaagccgcgatgtgcctcgctgggctctacggtctctccaaggaccacgccggccctttccgacccagcgttgacaccgtctag

SEQ ID NO: 337613 - DNA, 431 bp, Zea mays
  unsure (1)..(431): unsure at all n locations
ggaatccaacagttaaatattattcattttgttcacaaggaattataagacaatgatctgggggatgcattaatctaggtagctatttactttaagtgcattttgactaacgatttgttgctatgttcctgaggatctatggatatttgctttcctgttggtactaaggaagccaacaggaaattttggactactgcctagattaatgctcgagaaaaaaggtgcatgacatcaatattgctattctatttgttctatagaatcttatatggaaacgtgcattacacagtcccagcctactagagactatagctttttattcactacactaaaccagntaacttncttcacacccgtgcacccaaaacatggtattgcaatccttgggatcgagcctcagagctagaggaaagtattcatgtacatggata

SEQ ID NO: 337614 - DNA, 181 bp, Zea mays
ccgaggaacaacaccattccgattaacatgtatcaccacatagccactgactgcgacacggggactgccttaatgaaccaagagtacaacctcaagcgcgccaagaccaaagacaactatctaccttgctagctcgagcttttctgaatccctactgctccccgcagtccaacccatatca

SEQ ID NO: 337615 - DNA, 320 bp, Zea mays
gcgggagggcctggggtcagcaaaaatctttatgcccactctcggcctagatctccggcgagccggccgcgcgcggtagccgatccactctacgaccccgacccgatgggtggcgaggtgccggagccgcgccggctgagccgctcgctcaacttcggctgcggcggcgtacccgaggaggcgctgcacctcttgctcgggtacgtggacgacccgcacgaccgggaggcggcctcactcgtgtgcctgcgttggcaccgcatagacgcgctctcgcgcaagcacgttacacgaagcgtttgctacgccgtggagcccgc

SEQ ID NO: 337616 - DNA, 431 bp, Zea mays
cagaggtgggttggcttctcctcccccaccggttcgtgttcaggttctggttcgtgggcgagagggaagagatggcggcgtcggacgttgagtaccgttgcttcgttggcggcctcgcctgggccaccgacgaccactccctcaacaacgccttcagcacctacggcgaggtcctcgagtcgaagatcatcctggatcgggagacgcagaggtcccgcggcttcggcttcgtcaccttctccacggaggacgcgatgcgcagcgccatcgagggcatgaacggcaaggagctcgacggccgcaacatcaccgttaacgaggcccagtcccgcggcggccgtggaggcggcggtggcggatacggtggcgggcgccgtgatggaggcggctactgcggtggcggtggaggctaccgcggtggtcgtggaggc

SEQ ID NO: 337617 - DNA, 145 bp, Zea mays
gggagcctcacacaaatgatggcactacagtatcttgtttttgtccccaaacatgaccttgtggacctgtacgctgaacttaaaccagcgtggatcaataacagatcagagatatggccgatcatacatcacggtgcatgctaca

SEQ ID NO: 337618 - DNA, 227 bp, Zea mays
tctgtcttcacccacatttcactctttcttatcaacaccccacccctttctcgaggaagctcttttaaacagcagcgagcccccccccctctcttataacctccccttctccatctcttcccattataacattaacaccttctacacacaccacacctacttctcctccaatttcttcccacaaaacaccacttctattactttcaaacctaaccactttctttacc

SEQ ID NO: 337619 - DNA, 128 bp, Zea mays
cgcagcccgcgcagggggatcactcgaggggatgtgggctggtgctcttgttccagcaaagaacaaggcggaccttccaacaactcctgcgtgaagccaagttatgtgcgatagcaagcaccttttat

SEQ ID NO: 337620 - DNA, 253 bp, Zea mays
acgtggagaggtcatacatctcgaaaggaatgtttactattgcagggatgaccacactatggggatcgttcaaaccggaggtcctctttgcgatccccaatggcaagcaccaggcctatcttaactaggcatggtgacgaccttttgggtacacggacttcctgaattgtcgaagataattgatgcattgcacactataatattgtactgagattaagcaatactcgcgggctatgtctgtcaccactcgatg

SEQ ID NO: 337621 - DNA, 317 bp, Zea mays
gcgctccttcggagatgctcgttaaaagaacgcatgcattatgcgcccgcatgcatcagcgtgctacgaggggccggtgacagtccccggcttgcgcgactcgtcgcacggggcacagaccccggcaccctcggcgaggacgcgacgccgctaggccaagcgcaggagcgtgtgctcctcggccccgacttacgacgcgggcccggctgccggcgttggatcccctgcgctggccgcagcagcctggcgcatccagccaccggcgcgcgggcgcggctggccaccggctcgtgggcgcggctggccccggcgcggat

SEQ ID NO: 337622 - DNA, 431 bp, Zea mays
  unsure (1)..(431): unsure at all n locations
gcgtacgnaaagaacttggcctcctctaccgtttcgtttccttacatgcgcgccaggccgcgacgacgtagctttttaaaggcgacacgcccacccaaaatggccgtctcccacgcgccgccgcgccagaacgtgctccccctcctgctcttacacgcgctcgcagcagcgttgcctgccacctgctccgcggccagtatcaagaagtcgcacacggacatcttcagcttcggtgactcgctctacgacaccggcaacctcatcataaaccacacgcccaatgcgctcaccaccagacgccctccctacaggatgaccttcttacacaagcccaccgaccgctgctccaacggccgcctctttgacgacttcctgttcgagcatttcaggctgacactaccaccaccttcgcaagccaaaggcaatgactt

SEQ ID NO: 337623 - DNA, 313 bp, Zea mays
  unsure (1)..(313): unsure at all n locations
gatcattctagccagttttctctctgttacctcggatccatctctccaggcagtcaggcacggtctgaaaagcaatgcactatacgtgctacttcctcggcaggactagctcaccaggcacgttgattaggaattatgacagcgtatttcnttatgcaattaacttatgagtttcttaacatcaatcacacggttcaactatagcttgctagacaaatatgaaaaaaagtcngagctgactgaagatttattgtctgcaaaacaggtactgcaagtaattatcatgttacattgttgcattaacaaagagagg

SEQ ID NO: 337624 - DNA, 357 bp, Zea mays
tccataactccagggggtcgggcgcggttctatataaccaatgcactatacatgctacttcctaggacaggagtagctacaccaggcacgttgtatatggaattattgaacagcgtatttcttatgcaattaaacttatgagtttcttaacatcaatcacacggctcaactatagcttggctagacaaattatgaagaaaagtacgtagcagatctgtgtgatttatctgacctgccaaatacagctactgtctagctatatatgcatgtttaccattgtttgcatctaacatatacagaggtcttgttaacatgccactttataagttagatagatggaaactgtactaaacttat

SEQ ID NO: 337625 - DNA, 267 bp, Zea mays
ccctcccaatgataccagcgtatgaattcttaactcgattctctaatgccatgccagcagaaccataatccattttaccgctcatcagtgtacatctctctctctgtaaaaaccttgggctgactcagctgattgcacaagcaaaacaagacatttatcttacatcttctaatagcgaatcagatcaaaactgcccacatgcttaacatgcctgcactcttaatgccactgcttacccaaccccaatgcgcccatctacttcagctg

SEQ ID NO: 337626 - DNA, 396 bp, Zea mays
gacgcacgcgtccgggccgatgccgcccgcggtttacgggacctttagggagtccccgattggggggggttcagagttctaccacttgcagcacgccgaggacttgctggaccgcggcttcagctccaactcgctcatcgaggacatctccgcgagcctggaggcggcactatccgggcgcgccaagaagccgcgccggtggcgcaaggcgtggagcctgtgggggctcatccaccggcgcgccgcggggcgcaagagcggcggggggccgtcggacatcaccgaccgttccttctccgagccgtggccggacctgcgcgtccgcggagccaaccctaagatgcagcggtgcaacagcagcaacctgagcgcgcgcaactcgttcagcaacaacag

SEQ ID NO: 337627 - DNA, 241 bp, Zea mays
  unsure (1)..(241): unsure at all n locations
cacttttcctccgggcaatataggccagctagctctatataccacccgggctccntttaacagggaggagagacccaatgatcctagcaaaacgcacacagcatcaagccaaccagccagctaaaccgaacaatatctacatatatactatcaaccaacaataaagaaaccaaaaaaaaaggcaagcccaccagcgcctgcaaacacaggatctaataaggaatgaaagaaggaagtaacg

SEQ ID NO: 337628 - DNA, 405 bp, Zea mays
gtgtttttgaactgatatcatcatcttggctgttttcttcagtgttttcttggtttgtcggtgttctatctgatatgaagatcaaacttgttttatctggatgcaaacaaataattggtgttttgagttgatatcttgcctcgagatcatgtttgtttagttgtcttggatattgttactttatcttcataatttaccgctgtcatttgtccttctcatattgatgttaggtagttccagttggttttgattccttttgtttccatccaaacattgtctcctaacttctcatatggttttggtaggatattctggacttggcaaaatatgcatctgtacctgtcataaatggtctcactgactataaccatccatgccaaataatggctgatgcacttactatgc

SEQ ID NO: 337629 - DNA, 329 bp, Zea mays
ccgacgcacgcgtccgtataattgcttgtgaatataattacaatcttttgataacaaagatacaacaggtccccaatacatcgttacagcgtgcacaaatcaaacaacacagacacccacccaataataccatattatcaactcttaacttgatatatcaatgccaggacagcacaaaccaatagctactgctcctgttctcaaaggatgtctcacactatgcactgtgtctacattgaatctgaacttcacttacgcaaaaccaaacaagaatcttgcagcttctcccagcagatcacatcaaaactacccacatgcttaacattcat

SEQ ID NO: 337630 - DNA, 241 bp, Zea mays
aaaaccacaaaaaaaaaaaaaaaaaaaaaaaaaaaacaaaaaaaaaaaaaaaaaaaaaaaaaaaaaaaaaaaaaaaaaaaaaaaaaaaaaaaaaaaaaaaaaaaaaaaaaaaaaaaaaaaaaaaaaaaaaaaaaaaaaaaaaaaaaaaaaaaaaaaaaaaaaaaaaaaaaaaaaaaaaaaaaataaaaaaaaaaaaaaaaaaaaaaaaaaaaaaaaaaaaaaaaaaacaaaaaaaaaaaaa

SEQ ID NO: 337631 - DNA, 328 bp, Zea mays
ccgccgtcggcttctgccaccgccgcggcgtcgcgccccgggacctcaagcccgagaacgtgctgctggacgaggcggggcggctcaaggtcaccgacttcgggctggccgcgctgcccgagcagctgcgccacgacggcctgctccacacgcagtgcggcacccccgcgtacgtcgcgcccgaggtgctcaggaagcgcggctacgacggcgcccgcgccgacctctggtcctgcggcgtcgtgctctacgtcctcctctgcggcttcctcccgttccagcacgacaactacgtcaagttgtaccagaagatcttcaaggccgacta

SEQ ID NO: 337632 - DNA, 290 bp, Zea mays
aaaaccggcccgacgcacgcgtccgcaaggaaatactcacaattaactacacatcctaacgcatttctaccaccaacccgatactgcgctaatggaaaaagctggacagggttcatgttctcccctccactaatctggcgctactccaacgtctgctgcaattcctcgtcatatatgtcttgttcaccacccaaaagtcacatctcggaggaggagctaaaaacgcatcagcactcaaaaactacctgctgttcgacagtatatctcacgaggaccacatgaaccacacc

SEQ ID NO: 337633 - DNA, 168 bp, Zea mays
ccagacacacatacaacttataaaaaaaatttttgaactatatacacagctccttttacagagataacgggtttgaatactctgcaattgatactcaaacttctaaattgtaggcgcataatttcatttaattaatcctcacttacacacaattatcttgaaaataca

SEQ ID NO: 337634 - DNA, 306 bp, Zea mays
cgacccacgcgtccgcttggccttttttctcttttactattaatttttgaaatgaaagctctcgactattaaaagggtctcaagttacagtagttttccaaaagctgactttgggtttcaacatttttctgcataataatgcaagtcaccggtactgaccactgtgatccagcatattccacagaggaactcatgtgcgaggtgcacggcccatggaagagccattctgaaaattcgcgccacggtatacttctggggcttgaagtgcacgcatttgattcacatctccgtagtcagagcgaacat

SEQ ID NO: 337635 - DNA, 172 bp, Zea mays
tacttcgtgtttcgtataataataacgagaaaacgaccaatgcggatttatctggatgtcatgtattgaccaccgtcattgctggcttggatttcaaacccaccatgcatactgatgcttgaagaccgaaccttctatcacacttgcccatataatatgcattggaacttgt

SEQ ID NO: 337636 - DNA, 176 bp, Zea mays
ggcggccgggcgccctttgcctcgctgccgtcccgcccgtcgtcgcaactcgcctgcatggcgttctgcgtcgacgccggcgccgccagtatcacgttctccctgcacgacgtctccaacaggtgcgtctacgccgcaaaactcgccggcttctcgctcgccacctcggcgctcct

SEQ ID NO: 337637 - DNA, 352 bp, Zea mays
gggcgacacacgcgtccggcaggacacaactaccattaaggtccatagtatcctgctatgagcccaagacctaaacgggggtacgggggcagtgtatgaggagtctagcatccactgaaatgacataaccgtttgtgctggcttaagcacctcctggcggccccgtcgaagaatagggcaccatcgtacctacccataagatcaggatgtcatctattgtcaacggacgttgcttgccctcttccgaacctccatgcatacaggtgctggaacacggtacctccagcagaacttgcctgtataataagcaattctacaagcctattatcggagatcatctgtcaccaccgta

SEQ ID NO: 337638 - DNA, 277 bp, Zea mays
  unsure (1)..(277): unsure at all n locations
gacgcacgcgtccgcaatganccaaacacattcaagccaacaatgaaccgccttcaagaccccgagccaaagcgccacattggaggggctcaccatcaccctactctccaccgaaatcacatcaacaatggcgacggagccaacagtgcttcatgaccccgctgaacaccagcgcctcaccaaggagacggcctacgtaaactggataaccatagtccacgcgacggatccacgaaaaccaccagacgcaacacgaggactaccacaccaacaagct

SEQ ID NO: 337639 - DNA, 346 bp, Zea mays
aagacccgggccgacgcgcacgcgtccgaccgcctttttgcactactctttaccctattttcctcccgatcgcgaactcgcgatataggcaagattaccagggagaaggagatggccaataataaagataaggcgttgaacgtttctggcaagccgcggcactcgaacgacgtcgaccgccccaatgacaatacaggcgcgtgcacgccgctccaattgctggagcacttccgaaagtaccgttccgcggatctagatgtacaagacgcatgccatgatggacccctccgagaaggtgctcaggaacgataaagagtctaaacagctatctaacacccgcatcgag

SEQ ID NO: 337640 - DNA, 335 bp, Zea mays
  unsure (1)..(335): unsure at all n locations
ccgccttcaaacccgaactttatagtcgcttcgcatcgatggcgcccaaggccganaagaagcccgcggcgaagaagccggcggaggaggagcccgctgccgagaaggcgccggccgggaagaagcccaaggcggagaagcgtgtcccagcaggcaagtccgccggcaaggagggcggcgagggaaagaggggccggaagaagggcaagaagagcgtggagacctacaagatctacatcttcaaggtgctgaagcaggtgcacccggacatcggcatctcctctaaggccatgtccatcatgaactccttcatcaacgacatcttcgagaagctc

SEQ ID NO: 337641 - DNA, 282 bp, Zea mays
acgacgcgtccgagacccaatcttatgtttgagaacactttctccttgtttcgagacacgcccccaccagcacccacgggggatgctattcggcgctaccaatccaacacacgcttagtctgagcatgccaccaccatagaaattttgacccatgacgtccacttcccgtcgtcccctgcaccgctggcgctcgaatgctcgtgcacatgcactggctgctgtaactccgtcgtgcgaggccgcagtccagctaaccaccgcgaaccgccgactactatagt

SEQ ID NO: 337642 - DNA, 371 bp, Zea mays
ccacggggttgccgctttaagaggatcgccgggacgcggcgcgcaagctgtcggtgagctcacggcccgacgacgagacgcccagggcgagggcccccgtgatcaggggaggcggcggcaacgggaggaggaacggcggcacggcggacgactgctcgccgtcgacgacgtgcccccggaggacggccgcggagtccgacccggccgggctccggagccagtcggcgctgtcgttccgaggcgcgtggtcgtcgtcgtcgtcgacgtcgtccaggatatcgcccacggaggacagcctcgcgcgggcgctgcggtcctgccactcccagcccttctccttcctggagcaaggcgagacgacggcgccgtca

SEQ ID NO: 337643 - DNA, 354 bp, Zea mays
  unsure (1)..(354): unsure at all n locations
cgtccggttttttggtgaataaaaaataaataaaaaaatttttttttttaaaaaaaaaaaaannnnnaaaaaaagaaaaaaaaatttaaaaaagaaaaaaaaaaaataaaaataaaataataaaaaataaggggcgcggcctgttttaaagaaatcaaagcttaacttacccggtgcattgcaacgtaataattttttttatagggtcactaaaattaaattaattgcccgccgtttaaaaacgtcgaaactgaaaaaaccttggcgtaaccaaattaaatcgctttgaaaaaaatccccttttcgcaagttggcaaaaaaacaaaaaggcccgcacaaatcgcctttccaaaa

SEQ ID NO: 337644 - DNA, 370 bp, Zea mays
ctttcccttcggttacggttcttcctaacccaattcccccgaaggagcggcggcggcggcggcgaggtcgtaccccacatcggcgagcggcggcggcaccgccggaggcaaaggcaagatgttcgggcgcgcgccgaagaagagcgacaacaccaagtactacgagatcctcggggtgcccaagtcggcgtcccaggacgatctcaagaaggcctaccgcaaggctgctatcaagaaccaccccgacaagggcggtgaccccgagaagttcaaggagctcgcacaagcctatgaggttttgagtgatccagagaaacgtgagatttatgatcagtatggtgaagatgcccttaaggaaggaatgggcggt

SEQ ID NO: 337645 - DNA, 388 bp, Zea mays
cgcgtccggaagtcacatctacgcctccatactgtagtagcagcagccgccgccgccgtctcggaagtggagctcctaggggcccggggcccacgcggcggcgccatggaccagctccggcccgagccggccgcgggcgcgcggcacgagatcgagaagacggcggcgccggacgtggagtcggagcccgcggcggcggagccggagccggagcgcgtgccgccgtggcgcgagcaggtcaccgcgcgcgggatggtggcggcgctgctcatcggcttcgtctacacggtgatcgtcatgaagctgagcctcaccacggggctcacccccaccatgaacgtctttgccgcgctgctcgccttcctggcgctccgcggctagacgcgcg

SEQ ID NO: 337646 - DNA, 377 bp, Zea mays
cgtacgaaaggaatctattctgcaagacatgggttttgtttgcccggccacagcactggcccaagacggcctttagcgcggcagcatgggtgcggccgtaccctgataaaacatatatatctggagttgtgtttgctgctactgggggagttcggttatgcgccataggttgttcgctatatattgggttgtgcgggattttgtagcaatgtggttagagtgatgctcatttggagcgttagagagctctcggctcgtatttcttatcaagacaagatagtatttaagggcgctgtttgggattttgaagcaatgctctaactgtttatctctctgtctctgaacacgacaaacatgaaggtttgctatatttcatg

SEQ ID NO: 337647 - DNA, 240 bp, Zea mays
  unsure (1)..(240): unsure at all n locations
gcaggcagaggcagcagnccgggatactatatcagcgggccgagccgacactccctgccatcataactctctccaccatctcgtgtccttcatcctcggagcgtccgcctccgtcgtcctgctcttctttctcactattgctacaagcggatcgcggttcactgtaatctctaactgttccaacataaccacgggctttgacgaccatactcccgtccagtctgctccttttaccctttc

SEQ ID NO: 337648 - DNA, 308 bp, Zea mays
ggggcggcccaagccgtccgcggacccgtggccggacccgtgggcggattcttgggccgcctcaccgctccgacacaggctgcgccgcctctcctcctgctccgcggctacccctctcgttggggctgcccgcttcctcgtgccctgctccgagagccgtctccccgcgttcacctcgtctcgcttcctccggtcggcggcggctgcgccgtgccggtgttgctcaagcgctgcgatcaccgagcggcctgcgtctgcgtggcgcggagtcgccaccatggccgatggtagtagccgcttcgggcatg

SEQ ID NO: 337649 - DNA, 297 bp, Zea mays
  unsure (1)..(297): unsure at all n locations
ggccaccgccccncggaagaggcccttcctcgggggcgggcggaattcggggttcttgcccggccccggtcccctcggcgattgcgaacgctctctgcaaatcttcgcgtaactccggaagcgctccgaagatgaactgcgggccgcccgaccagctgccgccggagtcggcgccgtcgtgcttcctcaacctgaactgggaccagtctatggccggcgaccacctcgacccggcgctcaactcgatggtctcctccccggcgttcaactcgacggccgccgccgcggttactgaca

SEQ ID NO: 337650 - DNA, 135 bp, Zea mays
aaaaaagcgccgacccacgcgtctcaaaacacatatacaacaaatacacagtcatgctatatcaaactccgcaaccaacctgcccgccgttcttgatctactctagccctcctccccgcaccacctccaaccttc

SEQ ID NO: 337651 - DNA, 237 bp, Zea mays
cattaacacacggcacacgcacggaacttattttcatatagagagaggacagctattgggggcgagcatctattcaactaactaactaacttcataccattctcacatctcttagccaaccctacagctctagaaagcaaatcaaaggataacactacgcattgtctatgcttaccagatcagttcaacagactaacacatgcgtaaccacctatacgccggctctgaccttgcaac

SEQ ID NO: 337652 - DNA, 365 bp, Zea mays
  unsure (1)..(365): unsure at all n locations
ggccggaanaacccgggtccgacccacgccgtccggttactccgtcattacccgtgttcaccagatttggaggtcgaaactcagtacgaacatgtattgcgctggaatcttttgcgtggaccaagagtgacttgctccactagggcaatagcatttatgaccaatgctgagactacattcgacttcaccacagaagccttgagggctgtcctgcgtgtggaaccggtcgcagttctgggaaggatgaccaacggacccttgccacttcgtcggtcacgggatcttcaacatatcacgaaggaggccattaccctgaacacgggaggagttcatttgacgcatgttggctgatgaagctcaagatc

SEQ ID NO: 337653 - DNA, 447 bp, Zea mays
cgcctgcgcgcccctgcgccccccgcggcgacgggcggccggcgcctcctcagcgacgggaaggggcgtgtgctcagcgaggaggagcgcgccaaggagagcatctacatccagaagatggagagggagcggcaggagaagctgaagaagaggctcgagcaggagaaggccgactccgacaaggccaagcccgccgacgccgacaagaaagccgagggatctacctagctaggattggcatggcgctggtggaaggcaatcacgtttcgcatggatccgaatccgatggtcaactttgtgaatgaataaattctggaaaacgtcaacagcactggatatgctggtgcttcaaaaaaaaaaaaaaaaaaaaaaaaaaaaaaaaaaaaaaaaaaaaaaaaaaaaaaaaaaaaaaaaaaaaaaaaaaaaagggcggccggtttaaaggat

SEQ ID NO: 337654 - DNA, 304 bp, Zea mays
gctcccactcgcaccgcccgtccgcccagaactatctcgctcgtccgcgttcagctcagctactgcaatttcgcaacaagttgcaagcaataaccgaccaaggacgacgaacgggtcgatggccacgctctcctcctgcagccgcctgagtagcggcaccggcgccgcggccatacaccggcagccggcccgtgctggaagccgcctcgtcgtcacctgcaaggggggcttcttcgggaccggtcgggccgcaaccgcttgcaaagggggggggcccgcttgcgtaaaacttcaaaacaaaggg

SEQ ID NO: 337655 - DNA, 459 bp, Zea mays
  unsure (1)..(459): unsure at all n locations
cgcggacggatttcttctcccaaccaccttgcaaacaagcgttgttagctctcgnggcgcaaccacaacttgtctgctttcgccgcccctacgccacctcctcnaatctagcctcgtcgattgcttccccagtttaatagatctacaaccttcacaacatattcacgaatacatctcaccctcagttcctgaccattctttatagccttctgaccaaaccattgcagatatgttataaagaagttgtgaatggttaaaggacaactacttttttaagaaggctgaaaaattttattcttcttttaggaaaacccattttcaaattatttatctttcaaacaccccaaataacttttaattaaaaaaagattgaactttccatatattaacttttattcgggaaaaaaaaaaaaatttttcttttaaaaatgtgttccaaactctttttttttttttatt

SEQ ID NO: 337656 - DNA, 362 bp, Zea mays
  unsure (1)..(362): unsure at all n locations
cggacgcgtgggtgggaattaaggagggcgcggcggtggcgagcagcttctgctcagcgaggcagctgcaccggcgagctagccgcggcctctatgctcgcggggatctgaactagccgctgctaccccatcgcgctgacgactggggcgccctctcctcatatcccattcccaacacaacactcattttctccattcccacgtaaaagagagaaaggggagcatcgcagtgcacacgcgcaatggaaggctcgccggtggcgcgccttccggaggctaactctctccccgacggcttcgtccacgacgacgagagctcaaacacggacgcggntncttccttcttcgcgcccataagtgac

SEQ ID NO: 337657 - DNA, 385 bp, Zea mays
acttcctcctcctcgcgagctcagctcgcgctccgccgcagacagcgccgccgccctctcctcggcccccccgaaggaagcttgcgctttgccgccacccactgatgccggccgccgcaggcaccccatggccccgaccgggcggctggtttagagcgcaagggcaaagtattcatcgagataaaagatgctgtggacaaatacagcagcccctatgtttatacctaccataacatgaggaatcagaagctcaaagaccttatggagcatgtcaagtcttctatcaagatttttctagctggaaaaaaagttatgcaaatagctcttgggcgttcttctgctgattaaactaaaacaggcctccacaaacttttcaagtttcttt

SEQ ID NO: 337658 - DNA, 318 bp, Zea mays
aaaaaggggccgacacacgcgtccggcgcgagcatttaatgttctctcggattagtggaactacgcgtggctcagctgataccagtgggggaaaccaacgagctaccgccgccacccttggactcgccgaccaacatgatgccgattcagaccatgatggaatgcgcaggctccattcacccgaccaactagcagttcctccataacaactactgcgaacacttaaatgcatcctgctttcatgcggcagcacttgcattcattgactatcttgttatggtcggatataccttcatgcttacaacacctattgatcct

SEQ ID NO: 337659 - DNA, 228 bp, Zea mays
  unsure (1)..(228): unsure at all n locations
aaaagggccgacgacgcgtccgttcacgtgcactctgcaccccctcgacaggtgctcntaccgccgcatnggccgcggaaatgtcgcggaatctggacgacgtgccgccgctagatctgatgcacgagatgatcacgccgtatgaagtgcagctccaagccatgacacgccgttaaatcgccatgccaccacctggctcttgaaagggaacccattctaccattatta

SEQ ID NO: 337660 - DNA, 391 bp, Zea mays
ggaaaaaccgcgacgaccgacgcgtccgttgacctgcaaacttcaaatgctcaatactccattttctcgagtactcgttcttccgagaggaaatgataacaggtgggatgcccaaaatgacgaaacttttgttataacacatagcacttaatacgcgtatttgaaaaactcatatgagacgactaactacacacgattggcttatcaccaacgagaatactctgctattagaatgacatagaccttaactctggtcctgtggaacaagaaaaatctcataaaatatttaagaatgccaaagatgctcttacaaacccatgcatctaagaaactctaaaaaggggggttttttttactatcgaacaaacaacacttcctcaatagatatttg

SEQ ID NO: 337661 - DNA, 369 bp, Zea mays
tcgaccgcacgcgtccggtgacctgcaaacttcaaatgctcaatagtccagtttctccagtactcgttcttctggacgacaaatgatgacagttgcgatgcacaaaaagatggggcttttgggggttaacttatgagtgatgacgcttgctgatggaactcaatacagccaactagctatacgcgatccgcgcagaaatttgattggtagtcgctgattaacatggcattattttgatatcactttttgtgtgataagattattctcatctagattttaagtatgcaatagatggttaagggtccgtatgtatgattgaatctatgggttcgaagtaatttttaggctttggatactgaactcttgttt

SEQ ID NO: 337662 - DNA, 230 bp, Zea mays
ccgcgcctctacatttcttctctctctgctcctccgcctccgcctgatccatccaagacagggatcgccatgtcggactcggaggagcaccacttcgaatcgaaggccgacgctggggcgtccaagacctacccgcagcaagctggcaccgtccgtaagaacggcttcatcgtcatcaaaaacccgccctgcaaggttggggaagtttctacctccaaaactggtaagca

SEQ ID NO: 337663 - DNA, 388 bp, Zea mays
  unsure (1)..(388): unsure at all n locations
gcggccgcgcacacgggcacgnggcaagctcgcaacgcgttttctccaccgatcccctgaccgactccggggcccttctgtgccggctgcctgcctaccacatcaaacagtgcgaccatacaccacattcacatgacggaccacgccatcctgctgctgccggcgctcgccgtcgtactgctctgctaccccctcgcgcaatgcgggcagtagaactacaacctcatgttcagctacggcgactcgctcacacacactctcaacctgctcgtgtccagcccgctcttcaaccacatagaaggccgctacctatacggcatgacctacttacacccacccaccgggcgtttcttcgaccgccgactcattgtcaaatttctaacccaag

SEQ ID NO: 337664 - DNA, 159 bp, Zea mays
  unsure (1)..(159): unsure at all n locations
gacccacgcgccctacaaatacacgaataaagattttttttatcaaccantctcaaactgcttttttgatgaaagtccccaaacccacctgatttttctctatatccaccataagtatttacaaaaaaataatctactcctcctacaacctttgctata

SEQ ID NO: 337665 - DNA, 333 bp, Zea mays
ctgcacgcgagagtgagcataacaacctcaaaaagaggtccatccttaaagagaggcctcctcttgacgatgtgtctaacaccaccattgagacgtccatcttgaaagacaaatctaccctgtgtagccatgaagctattatgaacccacagaatatttttgctgatgacgacgagaccaaagggtgccataaatgggctaaagatggtatggagggcactcactttactgcgaatgattctcacaaaaatgataaatatgttctacacaaacgtcttattaagaaaaaggcggaagttaccatagccaatggtggctggtcacatgacgtat

SEQ ID NO: 337666 - DNA, 421 bp, Zea mays
gaccacgcgtccgatgaagcgagcggacattccttaaaagaacggtgaatgacctgaacagggagtattcttggagttggtctatggctcgaatcggctgaccaaatcagcgagaatggcaaccaaatatgcttcgtacttgatacccgcgttgccttgagacatgtgcgagttctcacaattcatttgattggtgatcatggttgttaaagcggtaaggcgaacaaccgcagtgaaataccggttggacacctaaacaccacctaggccactccttggcctagtaatcggacaaagcgcatacactttacaccaccggacggacacctaggcgttgactatacgacaccttaaaaactcaagaagaaagtggcgaaagttacgtcagcattgtatggcttgtcacattaagtatatggtc

SEQ ID NO: 337667 - DNA, 283 bp, Zea mays
acaagggctaccgcccaccggccaccaccccacgcgcgtctcacgccatgggcagcgcgtcgtccccgccatctcacaggcggtggagctggggctcggcgctggcgggcgcggcgactacggccgccgccacggccctagtgctgtgccggccgcgggacccgcggttcgagctcatctccatcagcctgtccgccttccacttccgcccgccggcggcgctggacatcgggctcaccctcaccgtgcacgccaccaaccccaacgtcgtgcccgtgcgcta

SEQ ID NO: 337668 - DNA, 339 bp, Zea mays
  unsure (1)..(339): unsure at all n locations
tcgnntccgatactagttccttcttggttgcatgctgtcagagggagggtgtacacagtagggccagtatgccgtcgtcgcgccgtgtcgaaatccgaaagcatgagaggagtcggcatatggccggtgatccgcgcggtctcggcgtcggtcgtggtcgtgcgtcgtcttggcgtgccgtggcggtgtgcgccgcgagccggcggtcggggatcactcgtacccggtgtgacttcctggcgctgcattgcggtgcggcggtccctggacgacatgcccggctcggcgttcttcgacgggtgggacttcacggccgacccgtgcgggttccccggcgtg

SEQ ID NO: 337669 - DNA, 369 bp, Zea mays
gaatctcccgtggcatccatgacaagggacattccctgacaaggaaactgcattcggatgggaaggttgacaccacacagacactgcacaacctgaatgaagatgaactagccggatttgagcaatcatggaaagggaatgctggacattacttgcctgactggaaccacaatgctggtgcacctaatatcgataattctggaaagcctagcttcatatttgtaaggaggacacatttcgtgcacatggaggtttgatgcacatattaaaatatcaatatgcatcttaaatctaacgctctaattgatttgtatatgttgcaaaaaaacaccatctgcagtggtggaatgtaacagtggaagatgatat

SEQ ID NO: 337670 - DNA, 410 bp, Zea mays
cggacgcgtgggccaaaattggcggttactggcggaggtacaagtgccacccatacaaaggaaaggattcaacaccctggtttctcttgtggcttggatgttgtggaaacatcggaatacatgtgtctttgataaggctccaccaagcattgctaggatcatccaggaagtcagagatgaggcttctctttggtgtttggctggagcagcagggttgcgtggtctttggccatatagctgttatgtaatgtggtataggtcgtctattgttttgtatcttagatgagttcctttaggtttctttgtttttggcctgcataaagagtacttgctttctttgggtctattacagacccttactcttcttaatataatgaaacacaactcttctgcgttttcaagattttttt

SEQ ID NO: 337671 - DNA, 334 bp, Zea mays
gtccagttctctccagatgtgaatgcgggacgggtattatagatatgtatagtctagagatatgtatgtgcttgtatttcaaggtgtattttgactatacacatgaaagccaccctttctataacgagtgtgaggtgttctcttaatcttctacatttatgggggtggatgatcaattcagcgtaacaaaaccattgtgctgatatgctggcttttcctccaacaaactatcaggctggaaaaaagttgcttctcattactaattcagatttccattatacaaacaaaatgatgaatcatgcattcaatcgctttcttcctaatgatgtgggat

SEQ ID NO: 337672 - DNA, 402 bp, Zea mays
ggcgtcttcgtactcgcctacctccgcggctcaaacctttcccccttctcccaattccctgcgtcggccgccgctccatcccgtacgacgacaccatgagggagtgcatttcgatccacatcggccaggccggtatccaggtcggaaacgcgtgctgggagctgtactgccttgagcatggcattcaggctgacggtcagatgcccggtgacaagaccattgggggaggtgatgatgctttcaacaccttcttcagtgagactggtgctgggaagcacgtgccccgtgctgtttttgttgaccttgaacccactgtcatcgatgaggtgaggactggcacctaccgtcagctctttcaccctgagcagctcatcagtgggaaagaggatgcagccaacaact

SEQ ID NO: 337673 - DNA, 447 bp, Zea mays
cgtcactgcacccttgggcagcgggcgcgtacctacctacgtgcggggggagccacacgcctccctctcgcctcttggcatggacgccggcggagagaagtgcggcgacgcggcggcggagggcggggagggtggcggagacctctacgcggttctcgggctcaagaaggagtgctccgacgccgagcttaaggtcgcttaccggaagctcgccaagaggcaagaaagctttgaggagctgcagcagctttttgtggacatgttccagtccgatattgattcaggattctgcaataggactgccaaggcccatcagtttcaggggccaaccaaaagtagaacatgctcgacctcaccttcatcatcaccgtcccctccttcttctaccacagcaaaggatgcagaggtgccaacatgtaatggcttcaataagcggggttcatcagc

SEQ ID NO: 337674 - DNA, 369 bp, Zea mays
  unsure (1)..(369): unsure at all n locations
tcgtctcgtccgtatccaatatgatattacactgtgtgtgcanntctgtctctattcgccattcganntcttcctctcggtgacgctcggaccttgaataccaaagtctgcttatctatctatatcntgcatcaatatattcagcacacgtacgctatccatctgcatatatgtcagtataggtggcgcatgtattgcttttaataattggtgtcatctaagccatgcaagcatgtgtgctttatagctaatcatcttgcactacgctcgtctgtttatttgtatacgtaagtactgtacattgcatgcacatgcactctcatcacctgtaatgttttacttgaaatttattcaaaaataaataaaggc

SEQ ID NO: 337675 - DNA, 445 bp, Zea mays
cagctttgaccgccgcctcccttcccctccgctactgctcctcctcaccccactcccccgcaggagcggcggcggcggcggcgaggtcgtaccccacatcggcgagcggcggcggcaccgccggaggcaaaggcaagatgttcgggcgcgcgccgaagaagagcgacaacaccaagtactacgagatcctcggggtgcccaagtcggcgtcccaggacgatctcaagaaggcctaccgcaaggctgctatcaagaaccaccccgacaagggcggtgaccccgagaagttcaaggagctcgcacaagcctatgaggttttgagtgatccagagaaacgtgagatttatgatcagtatggtgaagatgcccttaaggaaggaatgggcggtggaggatcccatgttgatccatttgacatcttctcatcattttttggaccctcttt

SEQ ID NO: 337676 - DNA, 404 bp, Zea mays
gtctagtggagcttttccttgccctcgagttctagccagtgttcctcacgagatcgaggtagttcctgtgttcaaaccagtgttagctcctcttctcagtcactaggttgttctgcctttgtgctgcgcctgccaaccctattgtctggtgaccacacccaccgaaacctcccacctcgctgtggccaaagcgttccagtgagttgcatgcccgtgtggtcttcgttccgtggtcttcaaaggtcagtgaagcattggtattgctgctgtgtaaaaaaattggataaaacgtctcaaaactttcactgacaggtatatagtttcagtcagctgaaacagaattttatgtgttctcaacccatttttggagcactataactcttgatccatgattctttgaccta

SEQ ID NO: 337677 - DNA, 195 bp, Zea mays
aatccacactgacattgagttgcatttcttgaggtaacaagcgtactctgacagggagacggcgagcgagatggtttatagggcaaccaactctgaagtggctggccgcgtgctcacatccctcttactgaaagaagcgtagcttcagctgattcaattggactgctacagatgcacctatcgcatgctggagta

SEQ ID NO: 337678 - DNA, 225 bp, Zea mays
atttggcgctgataagactcgagtggaggcggcaagcgaggccaccagtgttcaaaaactgtgaaaattcccacctctccctgcctctctcgcgcgtccgcgcccgcgcccgcggactcgttcaatccgccagcgctcccccgccccccggtggtagcgggctctacagcagcgctcctatccggttcccctgcgctccgcgtcttcatctgtggcggacgacgc

SEQ ID NO: 337679 - DNA, 222 bp, Zea mays
cacatacacaagcacaagcgcactctagcaatggcttctgaggttgtccgccctagcgacgccgagctactaaaggcacaagccgacatatggcggctcagcctctcctacctcacgcccctgtcactgaggtgcgccgtggagcttggcatccctacggcgatctaccgccatggcggggctgcctcagccgctgagctggtcacggcgctgtctctcccc

SEQ ID NO: 337680 - DNA, 277 bp, Zea mays
catcgagatgacgccaccctcctccggccgtctctcggccctcatccgccggtgcgcagcgagcggggcgctctccccaggcgcgcagctccacgcgcaggccctggtcggcgggcgccttccggacaccaccctggacacagacctcgtccttctctacagccgctgcggggcgctccaccgcgcccgcgaggtgttcgacggaatgccctctccgtccatgcacgcgtacaacgtcctcctcgcggcctcccctcccgaggcggccgtgaagctc

SEQ ID NO: 337681 - DNA, 240 bp, Zea mays
catgaaccaaactacccatttcttcctacatctcagagcagccttaccacacgcgcataggatgacactctactgactactctctctactccatcaatatgaccgcgatcaaggtcgctgcctatccactgtccttcatcacttcatctctactctatcctttcaaacatcatttaatccgtcacactgatcacactcctgcctacggacgtctactttgctcttagcactgcgttacca

SEQ ID NO: 337682 - DNA, 282 bp, Zea mays
ctcttcggtttgatacatgaatttggaaacccaaccagtggcggggtcttattggtgctacggctgcacccctttcgtgcacctctctgtccaaagcaccatcgtctgcccccactgtcaaagcggtttcttcgaatagatccgtgccggcgccggagccgaagcctctccacgccatcgactaaatcctttccccgatgatcctcttttgctccggcgacagggcttccgccgccgtatgagagaagctttcggcaaccgctccccgttcaaccctcttat

SEQ ID NO: 337683 - DNA, 151 bp, Zea mays
acgttatacactatactacccttcccttttatatctttttaacatacgatcatctgggccctggaccaaatacacctatattttctttcttgcacaattacaatcacccataatctgacacatacacacatatttcaccaaaaaccgattc

SEQ ID NO: 337684 - DNA, 305 bp, Zea mays
ctggactaatttctaaactggcggttgtaaatatgatatgattttctaggttgatgcatggtataaccattcccatctccttggattttattcccctttttactgtgtacgggaaaactgcaagccattttgaaccaaagacgattcagaaataagactttctgggagatttatccacttaaactcgacttcacaaaagcacttgttatcgtaaaggtttaaaagcttgaacatgtcctacccaatacaatcattttataaaattattagcataatttaattgattttctggtaccttcactttt

SEQ ID NO: 337685 - DNA, 397 bp, Zea mays
cccgatgcgaccatgcgtaccgatcgaatcaggctagagctcactgttgcgttttcttaagaacactataaaaacaacgggggagcttctttcgggtcaacaccttatttgattcacgcaaggcctttactttaagaaatttgcccgcttatcgtcctaattacacgtcaatgctcaaaccaagctcactgcgacgagctaatctaccagacaacaaaagcattgcaatatgctcgccatctacaggaccctgacagtgcgaaaaactctaatacatgcaccaagaacaacattgttcataaacaatggagagatcacaaccattagcacaacgtagactataacaagatcttacgtcacacatgacgtcaaaccggatctatatccgacgatccac

SEQ ID NO: 337686 - DNA, 385 bp, Zea mays
  unsure (1)..(385): unsure at all n locations
tagatctaggaattttttttctaggcaacagacaatgctaaacagtactgtcttccaataataatgtggtccaaacanaatgagaattcatttatgacagcgtttggctcgttaaacgcttacacaatactctatcgcaaagaattctccaagattacctctcgaacagcaattgatctccttgtgatgggattcatttgcttcttcttgaaacttattttcattccaattaacaacatcatcttctcatctgcttatgattaaaggttctacaatcgccttaagaattcacgttgtcaagcaaaaatatgcacaaatagtttccacatcaatagatcattctaatgccctaaatcttaaatcctgtttcaatttttgttttttt

SEQ ID NO: 337687 - DNA, 421 bp, Zea mays
  unsure (1)..(421): unsure at all n locations
aagaggccctatttagctaactattttctttctttcttcgtcggcgggaaagatgggagtggctgtttatttggacaccattttcgtccctttgagtcttttcatcacagtgggttaccatgtctatctttgccacaccatcaagaacaaaccttcacgtacaacttatggaatcagtaagaagagaaggacagattggagtctcaacttaaatcaggtaattgcatagatcaattgtgcatgtaatatgtttatacatggaatttattctcagagtaattgtttggtttcatgttttcagatatgatttttcacgtgtcagaacagaacatgattttcagaaattaaaaataataattaactttcacatctcanacatatataatttttctatttccaacgaagtttcaaacacacaata

SEQ ID NO: 337688 - DNA, 298 bp, Zea mays
ctttctaacagaacacacgctacatctacctttacctcaacccaagctacaacgaggacagtcaagctcgccctcacatctcagagcaacaacttcaacagcttcccccttccactcttgccagatgcctcatgccattgccttgagctctccggacaccagcacctgaccctgtctgcatacaccccccagctatttaacatatccaaagcctaagttctatatataacggatccaggcctattcttatactcctatcactgcactaggataaccgaacttgtagggtatgaagact

SEQ ID NO: 337689 - DNA, 326 bp, Zea mays
attcaactccagcacatatcatttttttaaaaccttcctaatcattctccactgtactttcttaatacacaccgcccttccccatttctcattctaacctaatactagctttattatcatttacatctttttaattttccccaactacttaacttttgcatgttaatagatatctgtaactatatctttacattacattatatatcaaaataaataaacactttttcttttcttttcaaaaaaaaaaaaaaaaaattccgccccccacttatttaccttctcaacctctcaattaattcattccgctaccttcactctttccacct

SEQ ID NO: 337690 - DNA, 430 bp, Zea mays
agaccaccaatttacttgtgagtgtatacccaacacaaactgaagtcatcatgcactactacacccgcctctcataagttgatagggaacctatcatggagtattccacaccaccaccaatgataggcaactaccaccaccctaatgctcaccgtgtcctcaacgagaagattgtctatgaggagaatgttatttgaggatcccgccacaaccacattcatcaccaccaccctgagactcatgagagagtcaaggtggtcgagtatgaacaagttcctgataatcgcattgtctatgaatagaaacctgcttatgacaactatcgttactactctccaaggtattgaaattggacaaatgcaagaacacctataacgtgttatcatgttgctttttattaagcaggctacctattataccaaaagcacca

SEQ ID NO: 337691 - DNA, 442 bp, Zea mays
aatgcttttgcacacacacaccaaaagacatacaggaattcttattcagcttatggtaccgggcaattcatgccttgttcattaatgcaacaggttcttcacgtaaatcatgctctaccccaattgatgtcaacaggttgggggcattgtcaaccagttcatcagcgagccagcgtaaagaatttaaatttcctcctagaaaggcagaagttagagaaatgtcaatgaagtcagagtttgagcgacgcatcaatgtgcaggcgatgaaactaagttctcatgaaataactaccattgctggacgtccggcgacctctactaattctcaggatgtgaaatctgctgttgctgcagttccttctagtaatgccagcgacagcatatgtaaacctgcagctggtccagtatcagcaccaccaccaccaccacgttcaggttattc

SEQ ID NO: 337692 - DNA, 175 bp, Zea mays
gacccacgcgtcccaatctcaaactttaaacccactctacatttccaatgataaccctccctctgaggctagaatcttctcataacatgccatcatcatctaccaccctggacacatacacaactcctactcccaagacccattctgtcacacactcccacatcacacctcaact

SEQ ID NO: 337693 - DNA, 313 bp, Zea mays
actctgattctcctccatcccatactatttttcttaaattggcaaataccttacccaagtagtttattaaataccatctacctccttcacaaaacttccttctctaatatctattacaaaaccccctatctacagatactcaacttatacaaacaatctattcacattacatagaaaatacatccttaaaattacacacctcctaaaacacttctcttcatccatcccccactcaaacacatatattacaagaattcaatgtctaatcccttcttacccccatcacaaacaacttgctttattatcatatttt

SEQ ID NO: 337694 - DNA, 303 bp, Zea mays
gtcacctacaactacgccatgtcttcttccatgttcatgtcgctgccgcctacatcatggggcgcgagttttcctaagacccctctccatctacaaccaccaccaacttgattcactcccaacacaatctcagccactgtctttgaatcaactagccgtgtcaccatcagagatacaactcggtatagctttgagtgcaacatatacttttagctccctcatgagcccatacatactctctcttgccacctatttttctgaacctgcctctacctgaggcttcacattcacacacactcacca

SEQ ID NO: 337695 - DNA, 431 bp, Zea mays
tcggaacgttgttataaacgttgctgttttcagataagcacgtaactcactatctatctatcaatcgatatctccgagttcagccgaaccaaactccgaagctatggcagagctccaaaccaaggttgaacctgttacggtcccggctccggtggatcccgagccaccgctagctgaggctccgccgctcgagaagaaagcggtggcggtgccaccacctgttccggctgcggcagaggaaaccaaagctcttgttattgtggagaaggagaaggagaatgagaagataccagaacctgtaaaaaagaacgcctcacgtggatcccttgatagagacattgctcttgcagaaatagagaaagagaaacgattgtctaatgtgaaggcttgggaagaaagtgaaaaatccaaagcagagaataaagcccaaa

SEQ ID NO: 337696 - DNA, 434 bp, Zea mays
  unsure (1)..(434): unsure at all n locations
cggcttttaactaattcctcctcctcctctctctctccccgatccagctagccggacctgccaccctccctcttgaatccgctcaagttcccgatctcccacctcgtcctccagctcgatcgcgttcgcggcaccccactccgcgctccagaaataagtagccggcggtttcctcgccccaggttttgcggtcgctggggagtgggaattcgttcggctccggactggccaatgctcctgcggtttcttggagaggccgctgagattgggatccaagctgcgttaggcgagcagcagcagtagccgcatcgagattcgacgtccttgtccgagggattctacgcttcttgggcggcgatttcggttgcagcgggaaaaaaaaaagaattctttcaccggacttggcccaactncgctgtatgttagggtagccc

SEQ ID NO: 337697 - DNA, 255 bp, Zea mays
ccgacacatgttacaagcctcatctcacccttgcatgaccaattagttttgcttcactccgcgggtccatccatatccatccatcagaattctcactctccacagtaacaaggcgcacgaccagcagcaccagcagccggcaacaaaagacacagcaacgatggcgttcgtgccggagtgcgtgcaatgcgtgactcagagcaacccgttccagtacaaggtggtcaagccgacactagagttcgtcgctttcgt

SEQ ID NO: 337698 - DNA, 290 bp, Zea mays
tctatcacaactcactattatcacaacttctctctttctacacaaagaagcttcttatcaaaattagcacctcctaacacatatcatcatcaaccttaagtaatctaccattcttcctccttcctatcacatttctcttctctttttttttaactccaacttcaaccatttataccccaatttccacactcccatctactatttctatacatacaatttctcccacaactcatactacaacaacttaattattaatgactttaccaatgttcttctacccttctacccaa

SEQ ID NO: 337699 - DNA, 472 bp, Zea mays
  unsure (1)..(472): unsure at all n locations
cgtgcgtgtttcgagtgtttccctgtnnttcggtagtttcctagtnnctctgtgtgagcgaccgacctgagnngcggcctggcggcgtgcggacgcgccctatcgctcagggtgacccacggttctttctgtatttctggtgtatcttctgctcggctgtctgtagcaccctcggctccattggtcggataattttgatgacgattagagccttaatttactggttctagataccttcctatacttgatgtctactgataacccttccaattcgcgcaagaggcctttctcttcttaagaaagtggttggatcggtttgtaggaccgggaaggtttgattcagcagcccaaacagcaggttatccccaacgttgataactccagacagataaggagacgtacagacctggtgattcagtcactgtgactatcgaaatctgtagcccagctatgttgaaggattatgttgggc

SEQ ID NO: 337700 - DNA, 206 bp, Zea mays
  unsure (1)..(206): unsure at all n locations
tataatanagcattttttttcacatccaatgttatnacctgatgaaacctttttatctatcttagtcacacacgccttatacattataccacaattttaaaacaataatcacatcaaatactaagttataatataaaaacaataattttttcattaaaaaaaaaaaaaaaaatacatccgcccactatttatctcttctacctctt

SEQ ID NO: 337701 - DNA, 215 bp, Zea mays
  unsure (1)..(215): unsure at all n locations
catcctttctccttcaacaccaacaagcnactaacagtgggtttttatagaaagcgaggcaaaaaaaaaaataaaacatctaaaatatactccatcatcttccttttattaaccctaccattaaatccatatatactaattatatatccttcacttctcttatacccctcttttacatcactaaccactcaaactatttttccacttaaacatac

SEQ ID NO: 337702 - DNA, 187 bp, Zea mays
  unsure (1)..(187): unsure at all n locations
aganngagaccannntangggaaaacaccactaaaatcccacccttttttttttttttttttagccccctcccattatccccatttaaatgagccaaacccttttacccaaaaaatactcctatacgaaaacacaaaaactaacaattcctcaccttcttttccccccaaaaattaacccataattt

SEQ ID NO: 337703 - DNA, 327 bp, Zea mays
  unsure (1)..(327): unsure at all n locations
ggccgacggacgcgtgcgatttgattaattataagcaagtacttgaacttaaaaaacgagggccanaccacgggcgaggatcgattttatatttgcgaactcctcatttgtcttcttatttcaacttttcaatatgccccttcctataatcttgtcctcccctacaaagtttgtcgactcttgcctaatcaaatctatatatcaaataaaaactacaccttatttttatatgtctttattactcatcatgcaatcgattgcttaatcaattttactttcactattttatctcaaaaaaaacaatataatttttttttcactctatta

SEQ ID NO: 337704 - DNA, 210 bp, Zea mays
aaaaaccgccgacccacgcgtcgttgtgtttactaatctcttcaacacttctggtcttcaatcccacctcggagggattttcattataacccttctctataacaaatattactgaaactacctacataaataaccttatgacttacactgacctcccatttactttataaaacaaaatacatttcaacttgtatatttctgcatctatca

SEQ ID NO: 337705 - DNA, 361 bp, Zea mays
tccagattgcatcttgtgtgattgtggtacttcttctgtcctcaccagtgttcacctctccgctcgcatttttgcccattcccacggtctattatgccatccctctgtcagtggttaccactcccactgacttcctacctcaccattgccaaaacttctcaaggattgaccatccctcatgaccctctttccaccttcttttaagaacacctatacgacgtggtatttgaagaaatctactccaacccctgcttctcaagtggattaaaccatctaacttcgtattgaatagaatgatctaaaaccacttcactgcaacaaaatctatccccctttcattcaaccccttccttgtgtattt

SEQ ID NO: 337706 - DNA, 91 bp, Zea mays
tcctgacattaattagagtcagacaccagataagttctttcagcgttagcaactaactgaggaggacatgtctgcctggtcaagaacttgt

SEQ ID NO: 337707 - DNA, 92 bp, Zea mays
ttctacctcccccattatctcagcccttttctctcccacatcgcccatccttcctgtccgctgtgcctactatcctccaattaccattctcc

SEQ ID NO: 337708 - DNA, 378 bp, Zea mays
cctcagctcccatatccgctcccctacctctccagcatctcccgtctccgtcgtctcgtcgctgctcctcacctcgccgccagccatgggcaagatcaagatcggaatcaacggtttcggaaggatcggcaggctcgtggccagggtcgccctgcagagcgaggatgtcgagctcgtcgccgtcaacgaccccttcatcaccacggattacatgacctacatgttcaagtacgacaccgtgcacggccaatggaagcacagcgacatcaccctcaaggactccaagacgcttctcttcggcgagaagcccgtcaccgtctttggcatcaggaaccccgaggagatcccgtggggtgaggctggtgctgagtatgtcgt

SEQ ID NO: 337709 - DNA, 132 bp, Zea mays
gacttgattatccttcaatgaccaattcattttccttcgcatggagaatccttctgggggcgcaactgtttctgtcaagggacaactataacgactacctcaatgatgaatggaccttccttgaaacgtaaa

SEQ ID NO: 337710 - DNA, 264 bp, Zea mays
ccgctcccctacctctccagcatctcccgtctccgtcgtctcgtctccgctcctcacgtctgcggccatgggcaagatcaagatcggaatcaacggtttcggaaggatcggcaggctcgtggccagggtcgccctgcagagcgaggatgtcgagctcgtcgccgtcaacgaccccttcatcaccacggattacatgacctacatgttcaagtacgacaccgtgcacggtcaatggaagcacagcgacatcgccctcaaggactc

SEQ ID NO: 337711 - DNA, 333 bp, Zea mays
cggacgcgtgggcggacgcgtgggctcctacagtggtggcgtgtggtagatagagggggtggagctcgtgtcgggtaggggaagagaaccgcagcaccgctagtggctactactgattaccaggattagggagaagagaacggtagggttaagggccactctcttctacttcttttaaagctcgtggctgtgggagcgtcttagccttgtcctttgcttttctgtagaaaacgtgggtccttgcgtcttatcagcgcctcccatagaatttgtgttccttcatcaaccgtccgtgggcttcatagcccacactgctggtacgctaattactga

SEQ ID NO: 337712 - DNA, 385 bp, Zea mays
ttccgggtgccaagtgtgctgactgactgactgaagatgcatcagctacacaaggagctagatagagggtcatttgcttcttggaatggtgggagagctaccagctgcataagtttaaggtggactgtgctgtcctgtatgtaatgcgtgagagacatgttgtttatctgccgtgctgggttggacgccttttgccttttgtggagttttccatgtgccatgcgattctgtctaatggtacgatatgtttctgttcccctatgctgggtttccgtgtgctatactgctatgtaattctgcccaaatgtttgtacatgttatcagtgtgattggagagcctaaaaggtacacacgggactgtatgatacttggtcccgatcaggaa

SEQ ID NO: 337713 - DNA, 414 bp, Zea mays
ctactccattacttattttattttactcaactgttcaagaacatcaaggccgatgattttttcatctatggcgctcctatccatgcttccatccttatcgtttatttcaattacaacgtacattaccttcttcttctctacttcacccctctttccctttatcatctatactgcttgatgatttatgacatttcttatccctattaacaccaccatccccaccaataatgatcacgttttcttcacctactcttacaaccagccctatttcctgatccatttttaccaagtttgatatgacccttactctctacaacaacctgctttacaaattctatctctccatcatccccccttcaccccatttttttccacacatcaccgttttctttgacatctactccaacttcattc

SEQ ID NO: 337714 - DNA, 344 bp, Zea mays
cacagacgtgtagaccattttcttaaattcttcctttccttttctttttctacaaatttattattctctagccaagcaggttttatcataacatttctccatcttccatcacatcctttttatttactttattaatcctttctttatactaataatatccaatattatatttacataatacccccctctaaaaaaaaaaataaataaattcctccctttttatattatccaaccttacctactcatacattcaacaacaatatctctcctataattttaacctaaaattcaattcactttcctaaccctttaaaaaccttctttacttaaaaaaacccctttcc

SEQ ID NO: 337715 - DNA, 252 bp, Zea mays
gtctgatttgcttcttctctctctccggttcaccttcaatcactcaagcttatcctcttagctggaggctctatcaacccatccaaatccctcctgtagacattagactcctcatcttcaccatggccattgctgggtccagaccaccactgcctgacaaccccttagcacctacggcgaagacctcgactccaacattatcctccatcgagacacgcacaggccccgccgattctgattcttaaccttatg

SEQ ID NO: 337716 - DNA, 221 bp, Zea mays
cgacgggttcgtacttgtgccatcatccatatcgtcgagcacggttattaacaggcggcccgagtcaccgtctcactgacatgctgaactattaaaatgcttaatgtttgcacgctcaacatctaaaacgtctatatcaacacgacgtgtgttctacctcacgtcatcagttaaaccatgctagtatatatgtctccaatcacgatccactcgtatctcat

SEQ ID NO: 337717 - DNA, 264 bp, Zea mays
tccgcacctcgccacatcgtgccccttgctcccactctcccctccctcggccctcctcccggcccgcgcacgccgccgcccgacgcccccggtctcgcgttgcccgaagccccagatccgtcgcatggcccccgtcctcccagttgcccagggttgcggcaagcacatcgtgctcgtccacggcgggtgcctaggcggctggtcctggttcaaggtggccacggcgctccgcgcagcggtgtaccgcacggacaatgccgacct

SEQ ID NO: 337718 - DNA, 172 bp, Zea mays
  unsure (1)..(172): unsure at all n locations
aattttgggtngaccacgcgttcggctcgccatcaatgcctccgtccacatctccattgtttcttcttgccccggccgttgggcgcggtgggcacaagccctctttgctcccagttcctcctcctcctcctcctcnccctcttctataacaccctctccgtcgtcgccgggg

SEQ ID NO: 337719 - DNA, 442 bp, Zea mays
ggcgtgtgcgcacgcacctccccaggccccagtgccaccttccctcctcggctcgactcgcccggcgctccgccgcagctggctcatcccaatcccctcgtacagtcgtgctccgcgcccgcttcaccgcctgaacaaagatggaggccttcctagccggcctcttcagggcgcctccacgggccgtccccgcccctcggggcacgcctctccccagccttcctctcttctacggcaggcgccgcagggggccgtcctcctccgtcgtctgcatggcggagccctatctgattgccaagctggactctgcggagaaggcctggaaagaaatgtcggttaggttggcagatcctgacattgtctcggatccaagcgaataccaaaaaatcgcgcagtctgtttctgaactggatcaggtcgtgaccacatacaggcaattcaa

SEQ ID NO: 337720 - DNA, 179 bp, Zea mays
cccactcttcctctccccctccgactcctcttccaggcccgccaccaacggcgaggcgccctgcggcgcccgcgaggtcgacgtctgctaagatgacacgctcgccggcgtcctccgcagcttcgtctacggcgtctggtacccggacgagcctcttctcctgcggctccgggcggcgt

SEQ ID NO: 337721 - DNA, 347 bp, Zea mays
cctccttccctcctcggatctactcgccgagcgctcctcctcatctggctcatcccaatcccctctttcattctttctccgctcccgcttcaccgtcttaacaaatattgaggccttcctagcctacctctttatgtctccttcacaggccttccccgcccctccttgcactcctctccccaacctttctttcttttacatcattctccacaagtggccttccttcttcgtcgtcttcatggcttaaccctatcttattgccaagctggactctttctagaaagcctggaaagaaatgtccttaatgttttcatatcctgacattgtctctgatccaaacgaatacc

SEQ ID NO: 337722 - DNA, 167 bp, Zea mays
  unsure (1)..(167): unsure at all n locations
acatgnntgctctcatttttgacgggtcttaaagcttggatggccgggcattcttcaccactgcatcagaaaccatacacatttgctttatgtactgtttggatggcgaatggttcgtcgagcggcacaacctcagtggagaatcctgtttctaatagcagatctga

SEQ ID NO: 337723 - DNA, 151 bp, Zea mays
cttgaaaggggagagagagagagagaagagagagagaagagagagagagagagaggagtgggagacccgcgagaggctgccgtgtatggaccgtatactcagcgactgcgaaggagggataaggggatggccgggatcggaccgatcaggc

SEQ ID NO: 337724 - DNA, 321 bp, Zea mays
ggtcgaccccgcgtcggcgcgccatcaaggcgtcggtcgacatcgccatggcggcttctgcccgcggcggtggggcgcggtggccacaggccgtcttggctccaagttcgtcgtcgtcgtcgtcgtcgccgtctgctagaacgccgtcgccgtcgtcgccggggaagaagaagaagaacacgcgcggcgtgtgcaagaagaaggtcgtgaggcggtcgtgtctccaccacacgaggacgcggagacggagggatggcagcattgctggtaccacgtcctcgtcgcttgcaaggacgacggcagcggcggcgacgacgctcg

SEQ ID NO: 337725 - DNA, 59 bp, Zea mays
agcgtcccgtcaggctgatctctagcgctctctctgcggccgttcacgtctcggtccca

SEQ ID NO: 337726 - DNA, 347 bp, Zea mays
cgacccacgcgttccgttcctgctttttctcattttctcttaccttttcttcttctctacccctatcctatcctcgggcagggatctcatagagtgccataccatcccatttaagaaacccatgaaccacaataatgctgcgtaccagtcccccgaagcacccatcctctgcatcaataactgtggcttattctgcacagcttcgaccatgaacatatgctccaagtgccacaaagagatgataactaatcaggatcaggccaagctggctgcctcctctatcgacagcatcctaaacggcatctacgccttcatgtatccgttttttgctagcaacaacaccttat

SEQ ID NO: 337727 - DNA, 287 bp, Zea mays
  unsure (1)..(287): unsure at all n locations
aaaaaccaaccgacgcacgcgaacgatctganactcccactctccccctaccgttttccctacccatcacacacaaacagcctctgctcaccttccacatcctccgggtcatgtcctgctgctccccatgtcgcccccactcgacctctactacatatgcctctcgccggcggccgcttccgtctctgcccaccacgacctgaattgtacccagctccgccttggtctgccggggaccgcttcgccttaccgccgcgttgtgactgccaccgcaaccaccctggacc

SEQ ID NO: 337728 - DNA, 325 bp, Zea mays
ggaaaaaccgacccgacgcacgcgtacggtcggatactgtctgtttcctctctccttttactcactggatctacaaatccaggctatcgcccatcttcagaattcccatccccccaccaaggactctcccctatcccaaggactcatgcctttcgccctctgacgtgacaactcattccatcccgctattaaagcctgttccaaggttgtcaattccgatgtaacgcggcatgaatttctaaaccaacatcgtcccttagttcctaaacgagtctctggtagacaggacttcgtctcatacactgtcagcctaaccggtcacaaa

SEQ ID NO: 337729 - DNA, 290 bp, Zea mays
tggaaaaaccgaaccgacccacgcgtacggtctgctaccaacaccacaacctaacaccttaccgcgtatagggttttctgcttcaattgccgtcgttgaggcagacggggagcgcatgatcaacgtggccatcgactactcggatagcgccaaaaacgcgctggactgggccatctacaacctgctccaccacgggaacaccttcggcgtcgtccacgtcttgaacaacggcccgaagaaaaccaacaccaccctttgggccaagtccgaaacccgcttattccactttt

SEQ ID NO: 337730 - DNA, 182 bp, Zea mays
cacatacatacacacacctagctttatatcatgcccctattctctcgggtcttgccacatttctatgcgtctctgcggcaccgaagggataaaaatctcggcgtgaactcctggccagtcttttgctgctttcatatccgcgcgcgtgtcgctgcgaagtaacaaaatggtgggtggtggcc

SEQ ID NO: 337731 - DNA, 261 bp, Zea mays
ccgtggtcaatccaccatatatcacggtttgacctactaaaacgacagtatccgtgttgagttcttccggggcggggatcacgccacaaaccatgaattacatttccaaataccatggacgagagatcactcaaattgactgagcactggatgcgatgaggctgatacaagcataatacatgaacctgcaagccgagaattcacaatggtaactcaagacgaagctcggtaacatacatagcactatggtggtctgttaca

SEQ ID NO: 337732 - DNA, 288 bp, Zea mays
gagcagaggccgagctgggcgactgcgcgcgaccactgacaagcacgggcatgggagtgacgccgagggagctcgatatgggcgggctcggactaaagcacgcgcggcaaggatagtcgacggcaagctaaaaccaccggaaggcgacgacgcttgagaccgtccaaggaggatcgatggcggccgatcagaaggacacgaccgacgagctggagcaaggagaaggggcggccggcgaacaggaacgagatccgggctgggagagcgacggccggaaaaagcagggca

SEQ ID NO: 337733 - DNA, 180 bp, Zea mays
  unsure (1)..(180): unsure at all n locations
gggncgggcgacgcggccgtgtacgcttctatcaaaagctaccctttattttatccaaccctctctatctctccggcgggcgttcttattagcagtgcaggatctactctgacgatttagcctaactcatccttcaatgcgctcaaactctctgcggtcggtggcgaatcccgaactgct

SEQ ID NO: 337734 - DNA, 297 bp, Zea mays
tggttacattccaaaagaccattactctttttttcctcacacatttacctttataaaccgcccgcgtttcttacaatactctctcaaccccattatcacatgaatctccaatttttctttcttctacaaatatctctttttcttccttcttactcaccaaaaatcccataataaattctcatcacaactacactaatattttactcttgtcatcaatgtcgcccttcattcttactattatccttctccttctctctctcctctctattcttacccttcttcttcaaaaacatactc

SEQ ID NO: 337735 - DNA, 189 bp, Zea mays
  unsure (1)..(189): unsure at all n locations
tctcgcgtccctccccgtcccacatcccattcctcggcagccggtcagtcccatccatctgcaggacctcattccgtcacccgccttcccctttcnctctcgtcggcgcgcgatggatggtctcatcaaggggttgttccacgtggccatcgacgctctggaggacgcctttagggatagggaccactg

SEQ ID NO: 337736 - DNA, 360 bp, Zea mays
aaaaccagtgcaagcagaagcagcgcaatggcgagcagcaccatggccctctcctccacaggcttcgccggcaaggcagtgaacgtgccgtcgtctctcttcggcgaggcccgcgtgacgatgcgcaagacggcggcgaaggcaaagccggcggcgagctccggcagcccgtggtacggccccgaccgcgtgctctacctgggcccgctgtccggcgcgcccccgagctacctgacgggcgagttcccgggcgactacggctgggacaccgcggggctgtcggcggacccggagacgttcgccaagaaccgggagctggaggtcatccaactccgctgggccatgctgggcgccgtgggc

SEQ ID NO: 337737 - DNA, 281 bp, Zea mays
  unsure (1)..(281): unsure at all n locations
gaatnnnccgggtccgaccccgacgccgtctcgcgtcagaccaaatggcgacccacgatcaaagcaagaagtaagaagnnttcgtcagcgaccggcgtcgttctgcgccggagctcaatgagatgtnctgacgcgggagcctcgcggaggaacggcttatctccggcgtggaggtgccgcgtcacactcgatgcgcactggagatcatcatctcgcgccacgcgcacgcagaacgtgctcggcgagaagggccgcaggatcagggagctcacgtctgtcgt

SEQ ID NO: 337738 - DNA, 303 bp, Zea mays
cgtccgtccacgatccttcctcccccacctctcgcctttctttgacgatccgccggcatcaaaacgccggcggcttatcctaaaagcggggggcctcatgaatcccccggccggcgccagcggcaagggcggcgcggtggacccctctctgccgccgttcacgtgccaggagtgccgccgcgccctcgtcgtcgtcggtgtcgagtcctacgccgacagactgcccgcacacgccgcgcccggtaatcatgcatcttttgttcaaggcagtgttatgggtgcaagcaagatggacaactctta

SEQ ID NO: 337739 - DNA, 387 bp, Zea mays
  unsure (1)..(387): unsure at all n locations
gaaaaccctagccgtcgtcaccgaagcggtcttccaggtaagcaagagcgtccaccccgccgccgccatgaagcgcaatccccgcgtntnnanttntngnnttttttntnttttttttgttttcctttttattttttttttnttttttttttttttnattttnttttttttttttttttttttttttgtttttattgttttngttgttgttttttgttttgttttttttnttttttttttttttttgtggtttttgttttttttgttattttttttttgttttttttattttttattttttttgtttttttttgtttttgtttttgttagtttttttattttttttttttttaattattttttttttaattgagtattgtttttttt

SEQ ID NO: 337740 - DNA, 282 bp, Zea mays
gcgtcgcgttgggagcagtattctgcttctgtgcctgcgtcccgacaagcggaaagaggaggcgttagatggaggtagaaagggggacgggagcaaagcgagcagccacagaacagggagggaggtagagaggactagaggagtcggagcctcggaggagggagagggcgaagagtatggggaaccaaatcttggaggggaaacgtagagttctttcgtagaagaaacaggtgccacttgaagaaggtagaagtagctcaatacatctactgctgtcggggg

SEQ ID NO: 337741 - DNA, 225 bp, Zea mays
  unsure (1)..(225): unsure at all n locations
gccgacccacacgtccgatccactctttccccttctccttccttttcttcccccgagactattcatatanacgcggaggctttctatacctcgtttgctctcnccttcttgtatccaaggttcctactccatccgcccttagtctactctcaaccttccacataaagatccccctcccttcaccttaaataaaccgcatcattctcacctacagcatcttttact

SEQ ID NO: 337742 - DNA, 395 bp, Zea mays
  unsure (1)..(395): unsure at all n locations
ctcggcgccgaggcatgctgttgccgtgagtgagcaagggatctttccggcgatcttggaggcggcgagcctggtgccgcatgctggctgtccggccggccggaggctagctagctctcgcctctcgaccgagaagtgaagtgaagtgaagcgaggcaagtgctgtccagtagtagtggtggtcgcgaacactatttatagcgccccggcccccgcccccgcgtgcggcgctctcttctctctcacaggaccacggctcgcgcgcgcgggcaccgactncaaaataaatagatctcatctcatcttcttcttgctgataaggtggttgggtgcttacttaacttgcttggcagatggacctggtggcggacccggacaggccggacttcgacaac

SEQ ID NO: 337743 - DNA, 328 bp, Zea mays
aaagctttcgaaagcttttaacgttcttgcgctcattccagttgtgaagcaagtgttgacggaaggtacagtaagtgaaacacagttccttgcttcattagtatttgcggtgaagtcatgtatgtgaaccatacaggcgactaaaaagtccacagtgaattttggcactgtattagccagctaaagacatgtttacgaaacactcaaattccaatccaacctgagcagatcccaggccgcagacgacctttgggcttggaacatcttcccatgcctgagccaacaaagctctccttttgctttcaggcctgagatttcatgttcaagg

SEQ ID NO: 337744 - DNA, 331 bp, Zea mays
  unsure (1)..(331): unsure at all n locations
cggaanacccgggccgacccacgctttctctccgtcctcccccacctcccaccatcccttttttttgctcgactccttctccttttatccccgccttttttttacctgtttccccccttttctttttttctttttttttatctttctaccttattacttacttcttctttttcttttttatttcttttttcctccccctttttttcttcatcttctcttttatcttttcttctttttttttttttttttcttttttttttttttttcctctctttttttattatttcttttattttcctcatatttttctttttcttatctcttttttctt

SEQ ID NO: 337745 - DNA, 115 bp, Zea mays
ttgcgcactcttgcggggatacctagccaacagtgcgtcgccagctgggggggatacataagaatcaaatggcacctttaactgcgtaatcaaacaaacacctgcaactgaaaca

SEQ ID NO: 337746 - DNA, 317 bp, Zea mays
  unsure (1)..(317): unsure at all n locations
ctcgggcataaacacaaactattaccacatcttctattactgtccagtaatgacgcagctgacagcggccgcctacaagcagcacgatgctcctatgcacgacgtcggctctggcgacgggtacgagagcaacaataaggcgcgcgcggggctctgtggcctgctccncgagcgcaagtacgttgacctggcgcgtgcctatcagcgtctgatggaagctccttactccgcgacgctggcgcacacggccaactcgcttctggcagaccgcgtctctgccttgggcgtggctgcccatcgggccactgcatcggtgc

SEQ ID NO: 337747 - DNA, 336 bp, Zea mays
  unsure (1)..(336): unsure at all n locations
gagggacgacccacgcgctgcgnaaccaccacatcctactcgcggctaacccaactatcaacccctaatccaaaccgccacgagacgacctacaaccctgacccagatcctcactacaagcaacatacttctcctcgctaccacagttaaactccgggatataatgatagtgacaaccataacccagctcctccataccaacgtgaccacactccttatcatggcggaagcccaccacctccttaccaacgaagaaacccaccacctgtctaccaggcaagaaacagaccaccttcttagcaacgaactacgccaccagctccaccacctctttat

SEQ ID NO: 337748 - DNA, 311 bp, Zea mays
atcttatgcacaaatccaagcctaaagctatacattctcacaacacgtctggagataactgtattgctatagaaccgaacgctacatcacacttacccaaactctgtcttgccaacacggaccatatcccaaacctactgtcgcccaatgaacatcaaagcaccgtgatcgctatctatactctctcacaatacattactacatctactgtggatgggcactttagtctcgcgctgtaaagtacaagcttctatgctgaacaagacagccatatatttcacacttagagcatctatgaatcatgtagagct

SEQ ID NO: 337749 - DNA, 252 bp, Zea mays
  unsure (1)..(252): unsure at all n locations
ctttcatttattaacccacacaaaaagctattcttgctctcaacaagcacctagagaactgtattggtattaattcacatgctccacctcaatttcccaaactcattctttcacccacggatcatatccaaactcttctttgacccaagctacattataacgctgtnctcactatctatacttcctgataatacattactacacctacctgtacatttgactattttcttccctgtaaatgtccacatctat

SEQ ID NO: 337750 - DNA, 277 bp, Zea mays
  unsure (1)..(277): unsure at all n locations
cgggccgacccacgcatccttttacacctaattccccacacttcttcctttctcccaaataaacccaccatttgcattcgttcttatcaaataccactctctcttcataaatatatatactcccacacatatatagcttataaaactataaccttctcatccacacacaacacatatctccanncatacacacaacacaccacccatctttcttaaattctaaccttctctatctctcaagaacattattcctacaatacaactaccatatacatcc

SEQ ID NO: 337751 - DNA, 414 bp, Zea mays
tctcgctcctgctatccctcctggccgttgccgcttacggccgtctcatatccaacgggggcgggttcgatcagctcctttcagtgatcctcctctcacggtcctttccggccgcggaggctggcaacaaggccctggagaagtgcgaacattcctacgggttgcttccctgcacataccagcgtgctaataaaccactacactcgcgctgacatacggatacctcatgtacaatgcggacacctacctgtcatccgtgagcgagctgctccttgagatcatcttgccccgcctagtaggcagtctgctccttcacattctacacgcccttcccgacgcgctcctagtgctcacatatggcctgttcgggagtaaagacgaagcacacagtcatgtactgatctgaatgggact

SEQ ID NO: 337752 - DNA, 329 bp, Zea mays
  unsure (1)..(329): unsure at all n locations
ggaattccaggcacgccccactccatatcctatgcacgacttatataaagacttcattcttacccagcgcctcatacagtgtagtgtctggatcaatggtaaaacccttacattcacaaaaatcactataagtgcctatcacccgcgaaatgcattgtttacaccaattctcaaccgtcgtacttcttgcncctatcacgattttgtaccatttacactatatgctctctcatatgcttcctctccactgacacatactcactactaatattttccctcttctcgcatgatactgtaacaatcatgaagccctgttatataaatcctca

SEQ ID NO: 337753 - DNA, 427 bp, Zea mays
atgcgcctcgcgtacgcgcccataccgtaccgttcccgaaacactagggcgcggcacgcaccctgggggtgagcgcggggtcgggcgcatgcggcatggcgccgcatgccgcggtgtcgacccctgcggtggcggcgctcgggttcctcctccctacctgctgggacatcgaggtcacgtgcgccgccgcgatgatcctcgtcgcgctctacgctgcgtacgagctcctcaacccgcgccccttccaggctgcagcggcggtcgacgccgacgagctcctcgtgcgggggctagacagcaccaacaaggggggtgcgagcggccgttctgcgtatgtactgaagctagaattgttggctgctatgaattttgatggcggggaacttaaatgggacatctgacccgtatgcattgatcacttgtggtg

SEQ ID NO: 337754 - DNA, 148 bp, Zea mays
  unsure (1)..(148): unsure at all n locations
acccacgcgtccgggacgatgggcagctcacactctgnccttaagcctgccacgtccaacacacacncggggccagggaccttttacaacactattgtctcccacacatttcccaagctgaatcgcgcttgctacaacatcgatacta

SEQ ID NO: 337755 - DNA, 216 bp, Zea mays
  unsure (1)..(216): unsure at all n locations
gaccacgcgtccgcacaattctaacaccatctagcacacaatcttcatttctcctttaagaaaaaacacaaaggacccgaccactcangcatcatttattaccntcaacatattcatatcttccacttacccaccatccatgttttccaatactttaactccactcttctgtttatttcgctgcaccctctttattatacacaacacttgatccac

SEQ ID NO: 337756 - DNA, 57 bp, Zea mays
cagggccgacccacgcatgcatactagatctaaatcgctagcgtttctttctttatc

SEQ ID NO: 337757 - DNA, 161 bp, Zea mays
aattcgaggcacgacccactcactatccttgcgccattctacatgaaacattcttatctactcctacatccgacacaaaagatctggtataaaaaaacctaaactcaccttactggccttccatatacacccaccccactggaaaaaccctgtctttaccc

SEQ ID NO: 337758 - DNA, 350 bp, Zea mays
cggacgcgtgggcggacgcgtggggaaaattgtcaaacttcttaaattgcgaggagaaaggaaggcggagaaaaagcagaaggcaccatctagtagttcagtaaatgccgagaacgatgatgatgtcctgggtttagtaagagaaattaacttgagcaaccaagaagatttggaggaattgcaaaagggcaagcctaagaagcgcctgacagatacaaaaaatagtaacaagaagccacttgatttttcttcacctaaacgcaaaagatcaatttctaagagtagaccacattcagcataaggtagtaaaaacagtgatgaccgtctaatacatactcctaacacagaga

SEQ ID NO: 337759 - DNA, 276 bp, Zea mays
gtcactaaatatatcataccagcaccttcttttttatatcataatcgctttcaactacgcgtcgatggtgtttctatacggatgtctcttcccataccttacaccaaaccacaactcatgttatattccccgcatatctcggctttttttacatagacctcactgaatcattttaagcactattatatgaaacacttactatcccaaacccaaacatagagctccttattacggcctccggtggaatcttttgtgctactgactctatactatatt

SEQ ID NO: 337760 - DNA, 360 bp, Zea mays
  unsure (1)..(360): unsure at all n locations
ggcctctgcctgtccctctcgtgtcttgcctttgtgcggtgctcgatcctgcccgtcgcgtgtccgtccaccgctgagaagatccaccattaaatgcctgatccacccacctcctcctcctggcttccctatatcactcacccatccacctctcttcgaccncacctcacagactcctcacacttagtactgttagccaggaacaagccccagcagcagcagcagcaatggccgtggagaacggcagcgcctactaggctgcggcggtgaccgtgaccgtgacctgcgcccgcaccgtggctccggccaataaccgctgcacgctcgccacctttgacctncaatacattaccttctact

SEQ ID NO: 337761 - DNA, 269 bp, Zea mays
  unsure (1)..(269): unsure at all n locations
ctcagccacactcatggatctctttctactttatctacgaccgaaactactacgaggcgtgtgccttcacctatcggtctcactacgttcacaagctcctatctatgaacaaaatcccttacctgatgatccccctgaacatatctcattacatcattatcgncaagctcattctgaacctgaatcttctccttaacctgtcctcctttgtcaccactttgatttagccctcaagcaacaaactcattatttactccttcaacactaac

SEQ ID NO: 337762 - DNA, 437 bp, Zea mays
agcacgcatgtgcagactcctaggtctaggttaacgagatggctactgccacgggcttagggtttaatcaagctgactcttctacgtcccagtcaagatttatacacgctgatattgtcagaatcattttatattacacataatatatatacacgcaccttagtgaatttccaaagagatttgtagagctatctgcatatcttgatattatgcctgtacagaacggtcaacgaagagcagtgcctgtaccgtcaactccagaacttgctaggagcatcgtacattctgttttgaacgaccatgacactcgctatcgtcaaagatatgttgatgttatggcaaatgatcaagcgaggcacacttttgagaatcaacctatacttgttgtatatatccaaacatatcttgttgaccgagaatttttcgctgtagctact

SEQ ID NO: 337763 - DNA, 208 bp, Zea mays
acaatccaacatatgtcgattcatctcatttctacatcaccccattgacaatgaggtgcgggctgtaactacacatacgtacaaaactcaactcacgaccctggattaccgaagtcggctagcgtttccaatgctcagctcatggacacacttgatattcacaagtagctacactgctatggttattccactcttgatactggttcac

SEQ ID NO: 337764 - DNA, 441 bp, Zea mays
  unsure (1)..(441): unsure at all n locations
tcgaaaaaaataacaaaaaacaaagcttctactgcgagcatggattcgcttgtgaagggcaggattggctatggtgcttacggcagcancaagccccagatgagctaccaccgccagagcaccgagtccgtgaccaccgtcgtcacggaaattaaccgcatgaccatcaacgacaagccctactacggcggcggcggcggcgtgcataaacaggcctgcaaggtggaggcgttcgatgagcacgacaaagcgtacaacggcaccctggccgtgaagaagcaccacgagtactaggaggaggaggagtacggtcatgtattcgacgcggagtacggtgcacactacggcgactccggcaatgaagaagcatgtctacaactacacnaaagaggcgtgcggagagagcgacgccgtctacggcgctcaccacggtggcgccgg

SEQ ID NO: 337765 - DNA, 310 bp, Zea mays
ggccgacccacgcgtgcagcgacgccacactcgcacatcttcttttcgttctccaccccccacccctcgcgtcgccggggtggccttcaaggccctttaccaacccccaaacgcggccccctttccatctttgaccccacttgacgccagccgttctctcgccacctcatttcccttcacctcgcactccgcccgcatcgcttgctttcaagcatatactcctgaccatgctcaagcttatttttccctacggcatgctaactcatatcctcacccagctcaatgtgcttcttgccggctcagtcccgaa

SEQ ID NO: 337766 - DNA, 153 bp, Zea mays
cacctactcagcccaaacctcaacttctctttcctttttataccatcctcccacactcgtgttggtgtcctttttaacacaggcttccaccgcctcctttcaaaactaacaatcccttcatcgttaagtacctcaacgtattcacattcttat

SEQ ID NO: 337767 - DNA, 409 bp, Zea mays
cggacgcgtggggtcgccgcgatcgaacacacacatcaccagctttgggagccgctgagagaaaccggacgcgcggtggtttgctttcgccggaagcgccgtcggattaagaagcataaagggaggaggacagatggcgggggatcggctgagctgggcggggctgctcaaatggagcctctcctacgtcgacggggcgggaccctctcgcgccgtcagagaggaggagcggcggtggctggcggacgcggtggagcagcacatgatgatggacgtggtgagccggatgagggagattgcgctgctcatgagcaccccgcccgccgtcctggaggcgcagggcatcacccacgacgacatcgaagatttgctgagtgagctgcacgtgcatgttgagtctatcgacatg

SEQ ID NO: 337768 - DNA, 168 bp, Zea mays
ataactacacatacatcaaaagaagaacttgattttataagcacatgataccaatggtgatgatgtcatactgtcacatgctctacaattcttacaatactccatatgaagaaaataccatactttcttatcttatcatacgttatgcataaacaaataaacctcttc

SEQ ID NO: 337769 - DNA, 181 bp, Zea mays
  unsure (1)..(181): unsure at all n locations
ggagacccacgcggcgacaactacacatacatcaaaaggatgaatctcgaaatccttacgcacacggaaccaacggtagaggaagtattactgtcacatgctctanaacccaacaacactccatataatatgcataccagactaacttatcttatgacaccttatccctatactactaaac

SEQ ID NO: 337770 - DNA, 258 bp, Zea mays
cccatgcttcctattgtcactcgctttcctttcaacaagctaattaagcccggtgataccgcttctatctcggttgattatccataacacatgataaccaccaccaccaccacctcttgtaccacaagaaggacgaggaacagctctcccccggtgtatacctctagtacaccctgtacactgatgccaccgtgactgacgttgtttccaccaactataacgagcaccacgagttcatgaacgacgagaaggagcaca

SEQ ID NO: 337771 - DNA, 226 bp, Zea mays
gataactacgcatacatgaaaaggaaggatcttgatttatagaagcacaaggtaccaattgtagaggatgtaacactgtgacatgctctagaattcttacaatacgcatatgatatgaagaccagactgacttatgtgatgagaagttatgcataaacaaataaagctcttcaaagcttgaaagactaggaaggactaaaagacattaatgatgttctcccattct

SEQ ID NO: 337772 - DNA, 259 bp, Zea mays
gcaacctcataagcgcccacagcaacgacgcctacaggcacgccgactgaaacttcctcgggaacacagccatactcatcagctacctcaaccccgactacaacacaagcatactctacaagagtgcctgagtatacattacacaataattagctgcaccgactgatcaagggtgaactaataccaagaccacgcgcgacaacagccgtctgagctatagactaaccattcaaacgacgaggtctgcctgatgatacat

SEQ ID NO: 337773 - DNA, 313 bp, Zea mays
aattaaaaaaaacgacggacatcaagcagctttcatcgtgcattcaccaccacttccccacactactgccgccttagtctcgtgtcgcaccccatcgcgccattactacccaagctcccacctttttcacgttgaatattcacggcgccaatatacacatgcctccaccccttgactaatactgcttgccctatgtcgcgcgttctctttctcttctgttgcatgacatctacgcctaccccatcgtgccttttactcactgtgtggtggtcaacatccctcccgtcaccattgtccttccctatgatttctc

SEQ ID NO: 337774 - DNA, 424 bp, Zea mays
agcaatcagtcgtcgtcagccacggacacactacacgagcagaggaagctggggtcttgcgggttcctgcagtcgtctgcagccgctgccgacgagcggcgcgcccgcccgctacgtgacatcgggtcccctcggggccatggggatctacgagcggcagcgccacctggtgcccaccggcgtgtggggggaaccgttccggctcgacgccgacgccgtggccatgcccctgcccctggccgcgttcccctcggtcaccgtggccacgccggcgccgctcgacgtcgtcgagccggaagcagaggagatcaagctcggcaaacgactgttgcaggcgcagcatgacgacgtgccgcggatgcaagaagcgccgccgtcgtcggatagcttcagccacgacgatgacgacgctaggccgagagac

SEQ ID NO: 337775 - DNA, 331 bp, Zea mays
  unsure (1)..(331): unsure at all n locations
ggggccgacgacgcgtccgaatggctcttttccagtgtacttttgagattttctgccangnnctgctcgagctcnacgaggacaatttcaatgcaatgtgcagctccttctgctacctacaatagtggccgtacctgggtgccgccatgtgcggcgccaatctcgccgtgccgcctgccgtgccgacaccaagcgccagcgacggcaacgactcctcctcttgcagcgtcagcggcgcgttgagaaacaccatgcctgactcatacctaaacgcctaatgccaatcaaaccacatgaccataatacccataacaagcaccagccatctgtc

SEQ ID NO: 337776 - DNA, 373 bp, Zea mays
  unsure (1)..(373): unsure at all n locations
tccggtcatcctgntgttttttttaggtttttagcnccnancnaattanaagagtctttgcaagcttttaaacgactttttgccctttcctctcccttatacagtcctttagaatcttctcatttccaccacctccctccctctcttcatctacaaatactcattcttttttatttacaatctttcacatacttttccttttactcttacaactccatttactcctttttcatcttctttcttttacaactccactcaactccttcaacttttttctcatctttctccatccctttatcaacctatccaccaatttcattttctccaaccttttttacctttcttattccatctcctccaccttctactactt

SEQ ID NO: 337777 - DNA, 398 bp, Zea mays
gggttggcttctcctccccctccggttcgttttcgggttcgtgaggttctccggggttcggtttcgtgggtgagcggatcgagatggcggcgtcggatgttgagtaccgctgcttcgtcggcggcctcgcctgggccacggacgaccactccctccacaacgccttcagcacctacggcgaggtcctcgagtccaagatcatcctcgatcgggagacgcagaggtcccgcggcttcggcttcgtcaccttctccacggaggaggcgatgcggaacgccatcgagggcatgaacggcaaggagctggacggccgcaacatcaccgtcaacgaggcccagtcccgcggcggccgtggaggcggcggcggtgggtacggtggtggccgtggaggcggcggc

SEQ ID NO: 337778 - DNA, 411 bp, Zea mays
gccgcccttttttttttttttttttttttttttttttttttttttttttttttggtttttgttttttacctaaaaacaaaagcaaaatttcctcggttgttctgtcaaaaaaagtttaaatgaacaactacccatttttctaccctctgcttcggaagttaaactaaaaaatgagccggcccggcccccccccctgctccattttcccttcccaaaacaaaacacaacccatttcttcggcctttcaacccccgtttcttcaaccaccccctttatttcccaccccgccccttcttaaaaagcaaaaaaaccccccaatttaggtccccccaacatcggcagcgggctacggattcaaggcccacaaccacctttacagccttatggccactgatctcatgctttgccttc

SEQ ID NO: 337779 - DNA, 300 bp, Zea mays
tcaaaaacagaaatcaggaatatttcatagcctatcttacttccttccacacctctatcctcattagttaactcaacaataatgttcactaccttcttctactctacatcactcctctctctctatttcttgatacttccttatgaatgattaccttacttatccctaataacaccaccatccccaccaataaccatcatgtattctccacctactcacacaaccagccttatgtcttcatccatctttactatgttaacactaccctcaccctctacaacaacctcctttaaaatttct

SEQ ID NO: 337780 - DNA, 279 bp, Zea mays
ttaaatccttctatattattcccacctcaatttttatttcttaacttacctcttattcatctattgtcaattctctctaattatttgacgttaaccttaaacatatcaattatatatcttcaatccttctaattcctttttattcctacattctttatttcttttccttatttttctttacaacatttttctttcacatttaccatttttcctttcacattataattcatttccattttaccataatccatcctttccttattctcattacacacttta

SEQ ID NO: 337781 - DNA, 406 bp, Zea mays
  unsure (1)..(406): unsure at all n locations
ttgtttatgaagtacttttttcaacttaacagattccccanaatgagggtanagtgctccatacaaaagatattcacacttaancataagtgactggaatgaatgatcagccttcacgatcatttggaagggtatctggtggtgttaatcctaaaccaaatacctcatccaattcccgagctaatgctaaaggctcatctgttagggatgcgattgcctctacagaaactgagttccgtgacgttagtttgcatcggaatcgtctaccacggaagtcagaagatgtatggaaaaaggttacagctggttctgattcaaattgctctggtcgtcagggaaaatttttgatcatgcaatcattcattacccatcatgaactaatcttgcaagctagattgacaagacc

SEQ ID NO: 337782 - DNA, 450 bp, Zea mays
acgaccgacgcgtgcggcactcgttctttccaaacggagaagaggattaggttctttccaaggaaaaggaaaaaagggtcaggagagagagagagagagagagagagagagagagagagcccttgctcgttcgttcaccaccacagctccgatcgatccgcaaggcaggcaagatgtacaacgcgccgtcggcccaggagatgtcctacttggagcacgtgcagaggcgccacgaggagaagggctgcctctacgcctgcatcttcactgcgctgtgctgcttctgctgctacgagacctgcgagtgctgcctcgactgcctctgctgctgctgcaactagccggggctagctccggaggacggtcgagacgcagcagatggaggtcgccttcgtctcttctacctacctaccaatctacctagtgatgatgattcagttcccgtttagg

SEQ ID NO: 337783 - DNA, 271 bp, Zea mays
ttcttcctatctatctatcccattcttccattccctaatttcttacctatcctctcactttcctcttctctctaacatatctttttatcttcctttctaaccattccatcacccttcctttcctttcatcacctttctctccttccacccttttactccaatcctcatttctattcttctcccattaaaactcttcacaaatcttatcttgccatctcctttttctaactttattaactattatatctttatttaaaacctacaattatat

SEQ ID NO: 337784 - DNA, 390 bp, Zea mays
  unsure (1)..(390): unsure at all n locations
atataatatgtaaatttttataattctatcncttntacancttctgggctcattgaggattttctaaggttactgatcatctantcccatgtccacctccgtctttctcccttctccttcttctaccatacacccttccgtcttattctcccttacttcttacctctcattctctctactgtctgtcttctcttccttaatcctctccttctacatccactccgcttttgtgctctccatcttataccattacaaatcattttccttccatcttcatctctcatactcttcttccgtcctcctttacctatcctttactctccttcttctcacgccctaccctaccatcttcttctacactttcttcattcactctcacttctttccttt

SEQ ID NO: 337785 - DNA, 244 bp, Zea mays
tatcaattgcctcaaagatccttcattcttccaaaatgcaattttcaccttttgaacatattttacttcacttcataaaatcaccctttttaaatttaaaattgagaactttatactctttttctagtcaatatctatcatttacatttaaactacacattaagtctcaacagccttttatttaaatcataaattatatctctaaaatattcattcttactttcttctgaaaattttttgatct

SEQ ID NO: 337786 - DNA, 427 bp, Zea mays
  unsure (1)..(427): unsure at all n locations
gggccgaccgacgcgtccgcggacgcgtgtcttgtgattgttatggtggttactgataactngacnacctggattgaaagcagaatgtcataatatcnagcctctacccccacaggccatgtgcatcagagacggagaaagcgagcagattcccagacggaacggaaacggagcgcgttggcaaaagcagagctgagcctgaaagggccatgggtcagtcattgcttgcttgggtcatcttcatctagctgcggcgctacctgcctgcctacctgctgctgtatacgtaactattagaattactcatttcggttagtaataatatcttgtctggtatgttaaaaaacctgaacagcatgccagtaaccaaaatgacagacatccgattggtgtntaaaaaaaaaaaatataataaaaaaaagggcgg

SEQ ID NO: 337787 - DNA, 197 bp, Zea mays
gggagactaatcttgctggttgctggcacctttccgaccccgtttgaaaccttaaaaacgggtgacgtacgtatgtaattgaatttgaggttgcaaatgtagtttcaactacttttgaagggttcgtgagtggcgtggtcacatgcacgtttcagccggttgactgtatgagatgaatgcagtgtagctgtagttgc

SEQ ID NO: 337788 - DNA, 277 bp, Zea mays
cagatgcacagatcaatctgtgggagttgcctaccaacttcaacaccttgcgtctattattgaggttcttgacccgaagctacatgaccacctagatgatgtgggctctggaatacgaccctgacattttcttcgcagcgtgtgaagaacaaggtgcagtatataaaaacaaagtttctaaatccaaactgaaaggactgcgccattttggcaagtgggataataaggataaggacaaggataaggaagatgctaaaaatggggctgaggatggtga

SEQ ID NO: 337789 - DNA, 156 bp, Zea mays
cattagcacagcgtctcgagtgattaatatattcgaagattttattgcccggttcaatttggggtttcccccaagggaccttccgccccattaattttttccagttgggaaaaggcgtgatgtttgctttaaccaaattgcactatttgaagggaa

SEQ ID NO: 337790 - DNA, 145 bp, Zea mays
  unsure (1)..(145): unsure at all n locations
tctaggtgaccacctanatgatttggtctctagaacacgaccctgacactttctccgcagcatgctaagtacaaggtaaacctgatagtaccctagttctaacacccaaacttaccgaacttaccctccgaaacctatgcatcct

SEQ ID NO: 337791 - DNA, 201 bp, Zea mays
ccggctgataccggtcacccacctcgccagcccttcctcctcgtcccgctttttaacactgaatcttatccgcggatatgaaacacggccatcaatagcaattgcaacacatcgtcacactttgaagtctgttacaacacgattacactacagtggtacatgcacttttactcattggacgctaatttactacaatagctc

SEQ ID NO: 337792 - DNA, 403 bp, Zea mays
  unsure (1)..(403): unsure at all n locations
aaaacccgnccgaccgcacgcgtccgttccgcttcctcatctcctcactctccgtttttttgcctcccctttgcttcactccgatccgctgtcttttccattacgggagccaatccatctctccgatgcaacctccttacatttttctccaccatattggccaccgttctgcttttgttattccagcgattctcgccgacggcagctgcggtgaaggtgaggaacatatcgacgttgcgctgggagccgaagtagtgggccacgggcaaggacgaggcgaacattctctcctaggcgtaagctctcgctagcggctaatgagatggtttgctgacggcggacgaaggacgcgagttctcctcgctctacagcatgctgcagtgagcaattgggaactctcatc

SEQ ID NO: 337793 - DNA, 180 bp, Zea mays
caattagctagcttcttctagctctagctatgctcgtctgctgcaagaaggtaacagtaacggcaggcatggaggggaaggaggaggacgtccgcctggcccccaacaagttctcgaagcgccagccatatcgaacggcggcgcagggcacggacaacaaggactacaaggagcccccgc

SEQ ID NO: 337794 - DNA, 127 bp, Zea mays
  unsure (1)..(127): unsure at all n locations
atgaaagaccactntagcctttctccagtattaagtccgcaactggtgctttcagatctttgaggctcttgcatacatgcaccagaagggctactttgatcgtgacctcacaccttacaatctgctg

SEQ ID NO: 337795 - DNA, 248 bp, Zea mays
cgaccgacgcgtccggtcgtgggcagccgggcatgtaggaaaagtgcttcagcgtcgccaatctccatggagctcaggagcgcctcgctccggcgatgcgcgctgccatcggcgtccccggtggccgcgagggtggggaggaaggaagcgaccagccatggtgggcctgcgtcggggcggggggttcgcggaggaagggcaccttaagtactacgaagccgcccctccgaagaaagccgttgaagccg

SEQ ID NO: 337796 - DNA, 173 bp, Zea mays
atttgaattttgccactttgtgaaagaaagctatataatccacaaggcttctggcttggtgtggcttgtttggtgatacctgtacaagcaaatttggtgacctgctgcttaaaagccgtttctgcaaagaggtcatcttgactgatcgcagcgatgaagtttctgaagcaagg

SEQ ID NO: 337797 - DNA, 206 bp, Zea mays
  unsure (1)..(206): unsure at all n locations
gacccacgcttcctcttactctttttcntactctttctcatactctttttcccacacatccaccgnttaaatctagtcttccattcccacactccttcctattaaccacaaacctaactcttatcttctctttccgccctccatactaaatactcataccttccttccatcgtctccgcatccatccaccatgtcccttttcaact

SEQ ID NO: 337798 - DNA, 108 bp, Zea mays
  unsure (1)..(108): unsure at all n locations
atctcaattancataccatttttctccattttgtgccgatccatacttaccatctacatgttcctgggtctgtcactcaccagtgcacgacacacaccttgttcctta

SEQ ID NO: 337799 - DNA, 72 bp, Zea mays
  unsure (1)..(72): unsure at all n locations
acccacgcgtccggtaactggnaanttccattttttcangctttctttatgacccaaaaccataccatttct

SEQ ID NO: 337800 - DNA, 193 bp, Zea mays
cgaccacgcgtcggtcacgtctcactaacaatactcatccatttctctgtctactcctcgtcacccatccagaaacatattcaccacccatggtggcccttcattctgctctcctcccatccaccctctcatccgtccccaagaagtgcatcatctccgtcgcggcgaatgacacggcattccttatcgtatc

SEQ ID NO: 337801 - DNA, 211 bp, Zea mays
caagaaaaaagaagctacacagattcaacctccattcaaaccatggcttgccaccttagatccgcgagcgtgccttccagccctcgctctaacaaagccaacatcgatgaacagctgcagagcctgaaggcaaccatctcctcaccttcagtggccattcaaaccatggttgatggtctcaacaagatcgtgagcatctacagctgcattg

SEQ ID NO: 337802 - DNA, 154 bp, Zea mays
gccggcgtcgaagtggtggtcccaagtttgcgccgttctccgacacgtgccgcacgtggtgtctgcggtctggagatgccttacgggggcggcacaccaccctgaggcggtggggctctcctctcaaagactcactcggacggtgcgttttagt

SEQ ID NO: 337803 - DNA, 151 bp, Zea mays
tcccacgcattctaccccactccttatgctctttataccaacgccaaaactaccttcctgaggtacattatatattgcgcaactccatcccctcatctttactgcccaccctcatctacatcttcaacttaccctccttctccccccagta

SEQ ID NO: 337804 - DNA, 53 bp, Zea mays
ggcggcggctgtttccattgccatcttcgttcataaacccggcttcacaattc

SEQ ID NO: 337805 - DNA, 98 bp, Zea mays
  unsure (1)..(98): unsure at all n locations
aatcccacagccaacacctcctaacattaaacatccttatccctatcatattatcanaacaccccacacatctcaaccatctcccacataaactacat

SEQ ID NO: 337806 - DNA, 195 bp, Zea mays
ctcggcattctccgctgcttctcaacaccttctcgaacccgtgaaaaattccctctcctttgcatccttttgaagagggcttgggcacataccaaccataggcgccccccatccataccgtcgaagccgcgtctgatttggtgcggattttggcgaaataccccgctcctagctccgctgtttcaaagataacaa

SEQ ID NO: 337807 - DNA, 146 bp, Zea mays
  unsure (1)..(146): unsure at all n locations
ctcaccctcttctacctactcccctttcacttaattcccccatttaccttcccttccccaccactatctaccaccatttcttttctacctcanccactaacctactcactcccctatctctcccttccactaatctacctttcctc

SEQ ID NO: 337808 - DNA, 96 bp, Zea mays
gcctgggagccaccggagggtcaccgcccctaaggggtcgtggcattaccctattcgcttgcggcgggctcgctggcttacagtaccggggggcca

SEQ ID NO: 337809 - DNA, 425 bp, Zea mays
gttagcacaatagcactgtcacagaatactcgttgtgtacagatcagacattgagacggcgggttgtgatctgtctatctcagtctccactacctgacgccgccggtggttgccgttttcatgaacagagcttgtgtcgttggttcttccaccttcgtgtcattgcgcctcgtgttataaattagtgttccctaaatacagccatgatattaggattcatccttttaatataagctccgtaccaaaatagtattcggtttagttttccatttttatatctatatttatctaggtgatgatgaatatagactcatatatagaacacatgtaccaaatattgtatgaatccactaaaaccaaaaaacttttttttaatagaacaagtagatctcgtgccggctcgttcaaaaaactaaaaccaaaac

SEQ ID NO: 337810 - DNA, 86 bp, Zea mays
  unsure (1)..(86): unsure at all n locations
aaaaaaggncggggaaaaaaaaaaaaaaaaaaataaaaaaaaaaaaataatataaaaaacaaaaaaaaaaaaaaaagtagtcattt

SEQ ID NO: 337811 - DNA, 455 bp, Zea mays
  unsure (1)..(455): unsure at all n locations
gcgtccgcggacgcgtgggcggcgcctctgcactagcatgcacagcagcggcgaggcggggcggggggggcttctactctacctggcccggccggccgccgtgcaggcgcaccgatccaatcctcggagctggcggagtctccggccgcccggcgcccgatgctgcccgccacccgaggcagcaagccaccgcagaggtccgccgccagatcctgctccgactccttagtccttatcagaagtcatggacctgtcgtcggacccgaagcgcaagccgcgctgcctcagcaaggtggtcatgctcgcgctcctcatgagctaagttgagtttatactttaggcagttcatgagctaagttgagttttagccttacaatcagtttgcgtcaaacattntgtataacagtaagctagagagtagctgctatagcaagcagctacaactacaaacaaga

SEQ ID NO: 337812 - DNA, 363 bp, Zea mays
  unsure (1)..(363): unsure at all n locations
ggccgaccgacgcgtcctgtcaacattgcttattatgctgangcttactttctccttatttgaacccatcgaacggctggtctcatcagactcattccgtgaatctcactccctcacccaacgctccatattccacactcgccttgctccccatgcatcaaccgcttgtgctcctccttctcttcttcatcagctctgccaaatatgccgtctcctcccgcgcctacgcctgtgcgtctacctacattctctatctgaacccctcgctcaagccgttcccctacaccactcacctgcactggcaccacgcgcaccttgactccctctcccttgaccccgtgcgccaccttctctactcttaca

SEQ ID NO: 337813 - DNA, 360 bp, Zea mays
gggcaagcacaaccaacgggaagaatattcttaattctgcgtaccaacaaactcattcaaagggatctgcattccctatattcttgttcttcttattgaatacaattgttcagcttgtttattttgcttaaatgactgactccgttgattatgataaaaccctataatattttcaacatgacaagtttaacgtctccttcttttttatatttctcattttctaggacttgcccaacaattatcttaatcacattattctttattacaatgaatacaatctctttacaaatattctttacacttaattaaatactcttttaacaatacctttaaatttttcaaaatttttaaacttttttt

SEQ ID NO: 337814 - DNA, 422 bp, Zea mays
cgcatcggtgcgctgttgtggtaccagtgggagagtgacaccgtccgctggtccgacgccagcgagtacggccgccggatggggatgctcgtccgtgatctccgcgccgatcttggcattccgcaccttctcgtcattcaggtcgggttagcatcgggcctaggacagtatactcaagtcgtgagagacgctcagaaagggatcaaacttcgcaacgtcagattcgttgatgcgatggggttgccattgcaagacggccatctgcatctaagcacccaagctcaagtccagcttgggcgtatgttggctcagtcctatctaaattatggtacatcccaactctagctagtacttgtgagatagaaattcctgccctgtttgacgattcattgagaaccccatcttataatattgtgtatgga

SEQ ID NO: 337815 - DNA, 305 bp, Zea mays
  unsure (1)..(305): unsure at all n locations
ggcggattanggccggcagcatggacttctttttgtaggagagtgggagagacgatcatgctatattttttgtggacgagacgatcatactgtcattgtaacgtgtggtgtacgagacgatcatactgtcatggtatcgtggtggcgtattcatgtattaccagacaacctctaggccatagcaaattccatctatcctacaaccttatcagatccacgctgacttattacattacatgcttgtctttacgatcactagtacactacacccttctcgcggaattcaacatttttatattcaactt

SEQ ID NO: 337816 - DNA, 307 bp, Zea mays
ccattgtggatttaaacttaagtggatttgagtttcaaatgctacctgacttttttggcaacatttgtttactttagtttttgagtctgtcaaaatgctcaaaacttgagctactcccccaatcatttggtcagcttgcatatttgaaaggtctggacctttcattttgttttgatcttaaacttccagagttctttaagtacctttcttctcttcagtttctaaatctatcacactgccataatgtagaatatctgccatcttttgaaaacttagtaatttggagtatcttaatttattacaatgt

SEQ ID NO: 337817 - DNA, 359 bp, Zea mays
  unsure (1)..(359): unsure at all n locations
gcgtccggccagtgggggctcnaaggccgagggaggtttggtaagcggcgggtgccgggccgcccgcgccggtccgaggccctcaccagtcaccaccccctcccctcttccgtctgtcccccgcttgccgccaccgccgctgcccgctcgcgatccttcccctttttaacgctcccgcggccccgcgtcgtgctcccttttgtcgccgctgccttcgtgcccgtactcgcgggttctcctcgctcctcaatctccgcgcctgggcgcggcgttcgccgccggatctgggcgcgggacggtgccccggacggtcgatggcgcgggtggcgctccggttgggcgcccgcgcgctcgcgggt

SEQ ID NO: 337818 - DNA, 431 bp, Zea mays
ggcttctcctccccctccggttcgggttcgttttcgtgaggttctccggggttcgggggcgggggtgagcggatcgagatggcggcgtcggatgttgagtaccgctgcttcgtcggcggcctcgcctgggccacggacgaccactccctccacaacgccttcagcacctacggcgaggtcctcgagtccaagattatcctcgatcgggagacgcagaggtcccgcggcttcggcttcgtcaccttctccacggaggaggcgatgcggaacgccatcgagggcatgaacggcaaggagctggacggccgcaacatcaccgtcaacgaggcccagtcccgcggcggccgtggaggcggcggcggcggctacggtggtggccgtggaggcggcggctacggcggtggcgggcgccgtgatggcggcggcggcta

SEQ ID NO: 337819 - DNA, 417 bp, Zea mays
tccccctccggttcggtttcgggttcgagaggttctccggggttcggtttcgtgggtgagcgcatcgagatggcggcgtcggatgttgagtaccgttgcttcgtcggcggcctcgcctgggccacggacgaccactccctccacaacgccttcagcacctacggcgaggtcctcgagtccaagatcatcctcgatcgggagacgcagaggtcccgcggcttcggcttcgtcaccttctccacggaggaggcgatgcggaacgccatcgagggcatgaacggcaaggagctggacggccgcaacatcaccgtcaacgaggcccagtcccgcggcggccgtggaggcggcggcggtgggtacggtggtggccgtggaggcggcggctaccgcggtggcgggcgccgtgatggcggcggc

SEQ ID NO: 337820 - DNA, 460 bp, Zea mays
  unsure (1)..(460): unsure at all n locations
ccggggcgaccgcacgcgttcgctccatttccttctgtctgcttgccttctattcctagcccgnaccggcgtccaccttggcggactccttcctcaccaaacacccacggcgcattggcgcttccacctcttatcgtacgaaggcgagcggctttcacggtgtctctctgtcgcatgcaatggcaccgctgtttgaggggcgcccaacagctgcctgcccacggcatgctcaggggcgctggggtcccttgccgctgtccctgaagtctagcctgggttgttgatcttgccgcagatgcggtactccattacttctccgcccgcgccatcatttcggccacacctcagtctgttggtcggtcgcacatcccttgccccgtcgagcttaatatgcaatccgttgcttgtgaaagtttcgatttattcacgttattacacaattcagtcgtcatgactgtca

SEQ ID NO: 337821 - DNA, 393 bp, Zea mays
ccacacttcagtcttgtccggttgttccatctcagctaaagtaaaaccaccacccatggaggtgatcctgatcatcactcttttcccgacacaaagagagcaccaagaatcccctccgattcatcgacgacgaaggcgatggcgccgctaccgcaggccgtccacctcctcctcgccttcgccctcgcgcttggctgcctggtgggcggcgccaccgcgacggtggtgacgacgtgcagggcggcggcggacagcgacgcgcgcgtggactacgcgttctgcgtcgtcgagctgggcatgcaccgcgagagccccgacgccgacacctggggcctcgccaaagtggccgcgctgacgggcgtcaacaacgccgacaacgccgtgtacgacatc

SEQ ID NO: 337822 - DNA, 362 bp, Zea mays
gagcagtggctgcctccaccatggcgatctcctccacggcgatggccggcacccccataggtgggctccttcggcgagggccgcatcaccatgcgcaagaccgtggggcaagcccaaggtggcggcgtccggcagcccctggtacggccccgaccgcgtcaagtacctcggccccttctccggcgagcccccgagctacctcaccggcgagttccccggcgactacggctgggacaccgccgggctgtccgccgaccccgagaccttcgccaagaaccgcgagctggaggtgatccactcccgctgggccatgctcggcgcgctcggctgcgtcttccccgagctgctctcccgcaacggcg

SEQ ID NO: 337823 - DNA, 425 bp, Zea mays
  unsure (1)..(425): unsure at all n locations
gngctctcggcgggctgcagcgagcagcaagccgccgagcacagggtgccgccgagcagccgagccgccgccgagcacagggcgccgccaagcagccgagccaccgttcgagccgccctgccaccgccgagcgtcgagtcttctctgacaatggggaactttcatgatagggagcaaatgtaccttttccaacaacaagaccaacttgttcccacgtgagactgtggaattgctccagcttggcgaaattcaataccaatgcaacaggaaggaaaaacaacatattaaagagtcccaggaatcccagaaactgagccatgctcacttgtccttgaccttctttctcatcgggcaacttttttcgaatcaaggtgatatacacagcatataaaccggcagaaacaatggataggaaatctccgaga

SEQ ID NO: 337824 - DNA, 321 bp, Zea mays
cgcctcttcctcctcttcctcctcctatctacattagcgcctgctccccttcgtctgtggtcaggtcttgcagcagcggcaagtgcaactgcggctccagctgctcctgcggcagctcatgcaactgcatgtcccctgacgtggagaccgccgccgccagcagcatcaagaccatggtcctcgctgcgccgaccaccaaggccagcgccggcggcttcgaggcggccaccgagggcggcggctgcgactgcaacacctgcaactgcggcaccagctgcggctgctcctgctgcagctgcaactgacccggcccgcccggcc

SEQ ID NO: 337825 - DNA, 307 bp, Zea mays
  unsure (1)..(307): unsure at all n locations
ccggggccgaccgcacgcgtccggaccatctcattcatctgatcgtcagcacctttttttatgataatgagcanngcctgtcctccggcggtcgcgtgccttgccatactgcagcggggcagcacacgctcggcgcccgccatgtgcgcagcgccgcagcatgctgagcggtgaatggcggcggcgcggccaccagctgctgcactgccggcccgccggctgttcgagtgtcgggaggaggccgggcggtggcgcggtggtggtgagggccgggcctgggccacttgtctgagatcgagccggacct

SEQ ID NO: 337826 - DNA, 267 bp, Zea mays
  unsure (1)..(267): unsure at all n locations
ggcgaccacgcgtncagggagtgctatataacacctgaaaagcttttcagttcaaaggtgaaagaaacttgctctggtgcgggcactctcagacagctgaccctagatcccatttgctgggacaggcacacgcaaagcatgctacacaagtacatatgcactgctctacgcgctgcagacatgcatctcattgacggtgataacccgaacttatgcatacttgagggccactgagagtgaattatgcttataacgaaagtgtaccta

SEQ ID NO: 337827 - DNA, 61 bp, Zea mays
  unsure (1)..(61): unsure at all n locations
atgcaancttnagtattctatantgtcacctaaatanctttnctaaggattnttataaata

SEQ ID NO: 337828 - DNA, 374 bp, Zea mays
  unsure (1)..(374): unsure at all n locations
acaagcacaagcgcactctagcaatggcttctgtggttgtccgccctagcgacgccgagctaggaaaggcacaagccgacatatggcggctcancctctcctacctcacgcccctgtcactgaggtgcgccgtggagcttggcatccccacggcgatctaccgccatggcggggctgcctcagccgctgagctggtcacggcgctgtctctcccctccactaagctgccgttcctcccccgcctgcnacggctcctcgccgcgtcgggcgtgttcaccgtcgacaagcagagcacggaggaggagcgnttcctcatgagtcccgtgtcctacttgctggttgacggcatccctcacgaggaccacatgaaccac

SEQ ID NO: 337829 - DNA, 206 bp, Zea mays
ctactacgtatatccatttctttctactaaattaagagagacgacgcggggtggccagcatgcatcgtgcggtcaccaccatttcagctcacgagggcgtcatgaggctggagtcgcactccatcgcggcccacgaccgtcggttgccgggtcagtacactgcggcagggcacggcgccaagaaggacatgtcgccgtcgctggag

SEQ ID NO: 337830 - DNA, 267 bp, Zea mays
gaaaacccggccgaccgcacgcgtccgatatggactctccctcattctgtgtggcgctttaaaggcaaccggacggaacgcctccccagtgcggcctatcaccaagggccacagctccatgcacctcgcccatctcatataccaactacacccatgccaatactcctctgagctcatggccccagccgagctacatcatctcttctgcagcacacgtcttgctccctaacatgtcacgcacccgtactcacagctcaccctgccctc

SEQ ID NO: 337831 - DNA, 378 bp, Zea mays
  unsure (1)..(378): unsure at all n locations
ctctcatgcgagacggtgcggaagggcttcttttctgctggcgcggccttcaccttgtggaggggcatcctgggcgaggtgtactacctcagctactccaaatcccgagatgccgctggtggtgctggctccagcattggcatgggcccttacaactaaaggagcttgatcgaggcaggcaggcagcccccgtgttatcaactctgctttggtggaggaatgcaatgttctttttaatattacattaggnacggtgtaattggctgttggatccgcggttattgtgttctctctaggttctaggattaaaaatatttttttgaagagnatactgtttggattattgggctggatcctcgtaatgtggatacacgatat

SEQ ID NO: 337832 - DNA, 309 bp, Zea mays
  unsure (1)..(309): unsure at all n locations
gtgggttggcttctcctccccctccggttcgggttctggttcgtgaggttctccggggttcgggttcgtgggtgagcggatcgagatggcggcgtcggatgttgagtaccgctgcttcgtcggcggcctcgcctgggccacggacgaccactccctccacaacgccttcagcacctacggcgaggtcctcgagtccaagattatcctcgatcgggagacgcagaggtccctcggcttcgtcncnacaccccctccacggaggaggcgatgcggaacgccatcgagggcatgaacggcaaggagctggac

SEQ ID NO: 337833 - DNA, 178 bp, Zea mays
  unsure (1)..(178): unsure at all n locations
atcgctctgtcctgcgaggggggccgttcgctcctcctcccagcatctggtcgcggcggcggcggtcgcggtcctggcagcggcgctgctgctgctggcggcggtggccgggacggcgtcngcggcggngagctgcggcgaggtgacttcgtgggtggcgccgggcctcgggtacgcg

SEQ ID NO: 337834 - DNA, 382 bp, Zea mays
agctagcgttccctcttcttcacctcactaacaccagcagctcgatcgctctgtcctgcaataatggccgctcgctcctcctcccagcagctggtcgcggcggcggcggcggcggtcctggcagcggcgctgctgctgctggcggcgggggccgggacggcgtcggcggcggtgagctgcggcgaggtgacgtcgtcggtggcgccgtgcctcgggtacgcgatgggcagcgcggcgtcgccctccgcggcgtgctgcagcggggtgcgctcgctcaacagccgcgcgtcgtcgacggcggaccggcaggccacctgcaactgcctcaagagcatgacgggccggctcggcggcggcgtcagcatggccaacgccgccaaca

SEQ ID NO: 337835 - DNA, 376 bp, Zea mays
  unsure (1)..(376): unsure at all n locations
agagcctccaaaacctcgcaacaaccttttgttacccacacccatccgccctgccccggcgcgcgctccctaccaaccccgacgagcgccaacnaccggcacggtgtccaagctggcagcgccccggcctgcggcgccaccgctccggccggcgttcgtccgcgccgccgcaatcgccttcgacccctccccgcgccgggtccgcgtctacggcgccgggcgggccaggatcccctncnttgtttgnatagcttctgccaaggaaggaaatggtgcaccgaccaagaaaacctcgcttcacgatcnnaaggtggtgtaaggcacttttcccgttgtaaagagaanacctctgccgaccttgtcaccagactttgct

SEQ ID NO: 337836 - DNA, 424 bp, Zea mays
  unsure (1)..(424): unsure at all n locations
cgtgacgccacccgcccatcggctacacaccataaccggaacgttcctgccaccccgggggagcggctcacttgctgccgtcgccgctcggacgatggactggtacgcgtggctctgcagggtggggctgcacccggacgtggccttggagtacgcgctgctcttcgcgcgcaaccagctcggcgccgccgacgtgcgccacctggaccacgagttcctcctcagcatgggcgtcgccgncgccaaccaccgcctcgagatcctcaagctcgccagaaaggagtcgttgtcgtcccaccgcaaggccnccgccatcgtcgtctgtctgccgtggcgcgccaccaggctgctcgccgcggcggtgcaccggtccgcgcgctcggcgctcgggcgccttcgcgcctgtcgggacctgaaccgggag

SEQ ID NO: 337837 - DNA, 236 bp, Zea mays
ggagaagcaccaccgcgactggaccctttggttctgctgcggatccctcgccaactgcgggcggacgcttgccgccgtcagcgagcttcatcatgctcggcatctacctggcgctgtgcccctccaagccgcccttctacctgcaggactgtgcagctgcgctccatagacctaagggacgcaggactctccatggacctacacgagaccatcgattcacaccttcttaacgagcg

SEQ ID NO: 337838 - DNA, 249 bp, Zea mays
acccttttctttccccgaatcaaccccgcaccaccgacctaccaccgagatttttaaaatgattcagcgccttcccaaccttaccaccaaaatactattatcctcagtctcttatccctatgaaccttctccattattcatttttccactttttctcattctatctcaataccaactacttctacctcatattccaatctctatttcaattacaactttaaactaccatctataaaacattaccatcac

SEQ ID NO: 337839 - DNA, 167 bp, Zea mays
  unsure (1)..(167): unsure at all n locations
accgcacgcgtccgcggtgaatgaatctccctttaaccttggtgcttaaactcgaaatctgtgaccatgcagctaaggcactttctaaatagaaacagagatgcacaaaaacatgacngaaacgcatgagccaaaaaaacacagaaaaaaagcgccagccccacgaa

SEQ ID NO: 337840 - DNA, 190 bp, Zea mays
cataacacaccttgctgcactgcccagacattatattctacaggaacacgaccgagagggagggagaggcatgcatgctcctaatcacgcaactctccatcatgaccgagctcctacccgcaaccgacgtggctgccccagccgccatgcacacggagatgtcgtactacaacatgaacagcaccgctca

SEQ ID NO: 337841 - DNA, 227 bp, Zea mays
  unsure (1)..(227): unsure at all n locations
tagtactaggcaccacacctnagtactcagcgagcggaggattggggtgccctgttcttatacttcttgctcaacaatgatgattaatctctgactctcatgcccagtattatcctgtggactttgcacaggcngcattgattagaacgtaggcacacgatgttacaacttatgagaatggagtcgactcccaacatagtcggccattacacattcacagtcaaatt

SEQ ID NO: 337842 - DNA, 337 bp, Zea mays
  unsure (1)..(337): unsure at all n locations
cgatactnnngacgagagtgccattgtgtaccganncaaggtagagatatcttatgttcacgtgtcgatgaagctccgccgcctcagnngaatcccatagccaatcataatgtctcttaaggaaacgttgcatgccagaaattacgcatgatgcgcatcgatcacaagctggttgactaagttgaagaattattccggtggttgtcgggnncnagttgtgcatgtcaacattttcaagtgattaccgcatgtccacaaaatttttgactggaagtactccatgttaacgcaggggtttgtggagntgtgaaagcatggatgtttaccaaaatattta

SEQ ID NO: 337843 - DNA, 180 bp, Zea mays
  unsure (1)..(180): unsure at all n locations
gctagcccactcctctttttcacctgatcgtacactctcgcagctcgatcattcttagctccgctatctttaactggagcttgggcctctaaccctancccctaactagtaactagccactcgatcgtgaattcatcatccttctgatcgacacccatggccactgtctatgaccatacc

SEQ ID NO: 337844 - DNA, 380 bp, Zea mays
gaaaaaccggctcgacgcacgcgtccggacgggggcgccaggctttagtgccctcgactgcctcccagctccgactgaacctgcccaccggcaggcttaaccagggctgacgggagctccacctaggccgcccacctgcactggcagaccaaggtcatctccgcggacgccgagcagccgagctcctcccacggagtcacggtcccacccccagctaaggcaccgagcttcgccccgtcccgcatgggcacacccctgcacaggccgagccgccttgctcctgttcctcgccacggatctagtgacgactaggctgagcgacgattccagcgtctcgatgtgtgacccgagttcaactcctctttcgtcaatctcgagat

SEQ ID NO: 337845 - DNA, 379 bp, Zea mays
  unsure (1)..(379): unsure at all n locations
gcgggctgggcctggacgtctcctcgtcgtcgccgggggcctcgtcgtcaggccagcagcagcgccatgaggccatgcgtgtgtcactcccggacgcttcgctgcagcaatggccgccgcggctggagctggagccggcgccaatgctgtcggccgggctcggccttgcgctgccgtacgactccaccggggctcaggtgagcctgccggagctcatgatgggccagtcgtctctgttcaacgggaanccggccacgctggacttcctggggctcgggatgagcccgtcgggcgcgtcggcaggtanaggcctccccgcgttcggccagcccattggcggcgccgtcggcggcatgggcgggaccggggctggcgccgt

SEQ ID NO: 337846 - DNA, 279 bp, Zea mays
gccaattcctaataaaaacaactttcatctatcgaagcagccaacgcaaccgggagcagtggctttctgaaacctatcgtgctcacccttccagaacatcatcttcagcccaagcccctcaaacctgcggccgctgtcagaggcttccatgatctggatcagcaaaacaacaactgcggcttatagactaccctaatgccactacactacccacggttcaaaaaagcggactaccaggccattccggagtgtcgcgtatactgactgctccttgagtac

SEQ ID NO: 337847 - DNA, 285 bp, Zea mays
ccgacccacgcgtccggcagctcttgcgattttccctcaagcgtttcgaaccggaacggatcctacgaatcggaggtgtgtgctgatatgcgaccacggggaacaactacccaaccgtcagcaccaaatacatctaggccttcaaaaaggccacgtgcaagctactatcccttatcacaaataagagctgttcacccctcatgctccttctcgccagatactccgtcttgacgaccgacacgaagtccatgaccagtgccgcgttatcaaccattacattcccag

SEQ ID NO: 337848 - DNA, 181 bp, Zea mays
aacacccacccaaactgctatcagcagggaaggaatatcacagtttcagaggccaccccaactcctattacccatcaagtgcatgcccccgacctacccactccccgctgccagctcccactctcctgactacacctataccacacccatctcccacacatcgattccattcacctcttca

SEQ ID NO: 337849 - DNA, 218 bp, Zea mays
tagagactagcggcgattcggggagtgggtgtccagtgacagcaggcctcctttaagcaagaggctttctgccgaggaaaggcagaacgagagcaacaaaaggaaggagctgaatcttttgaaatatgaagcactcaaggatgaattgctgctcttgaccgcatgaactggagcagcatgtagtttataattgtctcctggatctctctctggagact

SEQ ID NO: 337850 - DNA, 239 bp, Zea mays
gggccgacccacgcgtgcgaaagggtaaatgaccatcaacccctacttctatgttattaaacacaccaacacggggacggtttgtataaaagactacatggacgacacaccacacttaatcaacattcatactggtaacgtgacggaccaattcactcacttcgatacacttatcaccaccaggaccagcattacaatcatcccctgccacacaaggatgaaggtcagcatgaacccca

SEQ ID NO: 337851 - DNA, 320 bp, Zea mays
  unsure (1)..(320): unsure at all n locations
cgacccacgcgtccgctggctctttgcctaacttttggncnnacttcttattcttatcttacactgacncntgagctcatgcagaattctaaaccgacagtgcataccaacaaaaacacccaacctccccatcatgagtaagccttgtaggaccatacataccctaacactatcgctgcccactctccgagtagcgatggccaaggttttttcttttatccttcacaaccgaacccgcaactcaccgctcaagcgaacacactttcgaccgcaccacagctctccttcatgatgcttgtgccaactactaccctttcatc

SEQ ID NO: 337852 - DNA, 366 bp, Zea mays
aaaaacggccgacgacgcgtgcggactggcccacgtcacccctttttcttcttaacatccatactaaaacctcagaatccggcgcttctctcccatcccatgccctcctctcaaccctattccctccccattccttactcatgacgctatcttcccacgccaccacaactactgacgcggcggcacgacggcacctttccccaatacactcgctcctcttcccgtcgattacccacgtcgtctgtctacccccgtcctccgacttccccgctctcactacaactccaccatgccgtggcatcgttcctcttccccgacactcatacctccacccgaccgtatactcactgcatgcatcgaacacct

SEQ ID NO: 337853 - DNA, 214 bp, Zea mays
cacaaacaactcgggaacgtatattcataacttcctgccctcccctacaacctttccaaccacatcaatagaacacctcatcttcaactcttcaaatacaaacatatccattcacaattcaacacacattgtaaacaaatcatattacactatcttaaaacaccaacttcattaatacatatcatatctatctacaaaccctcaaaatcatttt

SEQ ID NO: 337854 - DNA, 360 bp, Zea mays
  unsure (1)..(360): unsure at all n locations
gggccgaggangcgnncgaccggcctccacnaccctttgaaatcgctcttgtaaccatacacaaacaactcggccaacgtatcttttatatattccctgccctccccctaaatcctatcgcaaccacatcaatagcacaagttcatctaccaactctcgcacatcgcacacaagcattattcaaaattcatcatgatggtgtaaacgacatcatattacacgatctgaacaatgcaaaatacataattgaatcgatagcatctgcacaccctcaaaatcattttaatcctaagattgatgaatgccccaaagagactccaaaggaacttgatttcaaccatcaattcatataatactaag

SEQ ID NO: 337855 - DNA, 282 bp, Zea mays
acgcgtgcgcacgatcattcacacaatcaccattactcttctatttttaaccacacaccaccaatctcggctagggtgaattttaacagggagcaaacacatactctacactgccccaccgtacatgttaatcagaactgcaaccctaccgtaccttctagcacgccacccccaggattagccaccctaccggattttctccttcaaagtttctatttttgttatcactccggcgcaagcatgcgagggagtcacgaccaacccacgagacactagcacaaa

SEQ ID NO: 337856 - DNA, 323 bp, Zea mays
  unsure (1)..(323): unsure at all n locations
gacggaggcgtacgactgaaaaaaccacncaatacctttttctatcataaacaaacaacctactcatgggtgaagtatatttataaaaaaaaccttccatttctaacaccatgccacattacatgtacacccatccacaccaccacattgaggcccatcataacgcacccgatcaattagacacgaaacataaaccacccctgaacagtcccatcttcatgaacaaacacgaccacgaccagtataagaacaaacacacacttcaactgacgaccacaatagccaatgtcatccttttctatcccgataatcacaatcacaat

SEQ ID NO: 337857 - DNA, 192 bp, Zea mays
  unsure (1)..(192): unsure at all n locations
accgtcttccacnaccattagaaaacgctctgttaaccatacanaaacaactcggccaacgtatcatttatctattcgctgacatcctcctaaaacctttcgcaaccacatcaatagaacaaattcatcttccaactctcgcaaattacaaacctgtatcatgtacacttcatcatcacagtgtaaacaaaa

SEQ ID NO: 337858 - DNA, 186 bp, Zea mays
  unsure (1)..(186): unsure at all n locations
aaaaacgggccgaccgacgcgtccgcatagacnatcnanctctttcatatatggctttatcctcttacttcattaaaaggatcacagcaaatattctcacatatcaatccactctccatcacgtctgtggggcgactcacattaagtattcttttctagctttttcaactcttgatatagaccacc

SEQ ID NO: 337859 - DNA, 316 bp, Zea mays
  unsure (1)..(316): unsure at all n locations
aactgatactccagctggaacgggctcaattccgccgggacgcccatgcnaagggccaggcggaaggccggcacatggctgctcatcatgcccctccggtcgaggacgagcgagatcaacgagatgcccgaccgggtgcacaccgtgggactacgacaacgcttcatacacaccatcacctcgttcatcaaggcggacaccggcatgccgctggagaaattatgcaagacgtcgcactgcaggacacggaagagctcagtgcactcctgaaagagaccatagatcccactgaatgtctaggcgtaccggtcgcacc

SEQ ID NO: 337860 - DNA, 368 bp, Zea mays
  unsure (1)..(368): unsure at all n locations
aaaaggggccgaccgacgcgaccgnncgggcccaaccagactccnggccagacctatcggccgacccgccggcacaagggcccggcggccaaagaggctngcccggactcctccacaccccaagaagaatatcactactccaatcacagcacgtggagaacaaagacaactgacaaagacaacaaatactacactgaccacggcgaatccagacgccattgaaaaaacgccaagcacaaacgcagctccaacagacttcaacactgacgccaattaataaaaacgacccatatggacaagaggcataccccaaacaccataagcaatcagcagttcccgacacacatcaaactagctgcaagaacaaa

SEQ ID NO: 337861 - DNA, 151 bp, Zea mays
  unsure (1)..(151): unsure at all n locations
cgcgtgcggtactagcatntnagtaatatactgttacttctagtttttctagactacctctacacgaggccgtggtaagtcttcttcgggtctatacgttccccttgtctccgtaaccgtcgccctccacttatactgctgatatgcgctt

SEQ ID NO: 337862 - DNA, 434 bp, Zea mays
catcgaccttcaagtctcgctacgtagcatttcaataaaaaaagcagccgcaatggcgagcagcaccatggccctctcctccacggccttcgccggcaaggccgtgaacgtgccgtcgtcgtccgccttcggcgaggcccgcgtgacgatgcgcaagacggcggcgaaggccaagccagcggcggcgtccgggagcccgtggtacggccccgaccgcgtgctgtacctgggcccactgtccggcgagccaccgagctacctgacgggcgagttcccgggcgactactgctgggacaccgcggggctgtcggcggacccggagacgttcgccaagaaccgggagctggaggtgatccactcccgctgggccatgctgggcgcgctcggctgcgtcttccccgagctgctcgcccgcaacggcgtcaagttcggcg

SEQ ID NO: 337863 - DNA, 222 bp, Zea mays
  unsure (1)..(222): unsure at all n locations
gccgacgacgcgtgcgttctcacttcacncactgccatctctttcttacagaacaactcatcactggggaggagtatgccttttacaataccgcccctttccactacacacttttacatgacattgtttatcttttccttaaccgtcctcctaaccattctcacaactgcaccgaactccaaaccttccttttctttaatgcccccggtgtacatacccgac

SEQ ID NO: 337864 - DNA, 275 bp, Zea mays
tctaggttccttttcatttatggcttgttctcagaatgtctccagcaagttactgatatatttatacaaaacattgccccctcactatacactgcactgttcgcatagtgcactttaaatatatctatgtggatgagtaatctgctgacatatacttatgtcgatgacacaagaatatattatgtccaacacagctgttttgtctacttccgattatatgtatcttcaacatgctgatctatctcatcaacattccttgacttcatttatttcat

SEQ ID NO: 337865 - DNA, 73 bp, Zea mays
aaagggggccgacccacgcgtgcgatcacccacacatacagtttcatttctcttttttaaacccaccccctca

SEQ ID NO: 337866 - DNA, 305 bp, Zea mays
  unsure (1)..(305): unsure at all n locations
acatgggctatantaatactttatcttttcctcccccaggatcgcctgacgcgtgggcagattcttcctcgacaacacccatttccacctctatctcgtcaactacccctttataaccactgactacatcacctacatattcaagttctacaccgtcctcgtccactttaagctcacttacttcacactcaattactccaagacccttctcttcaatacaaccctttaccgtctttttcatcaatgaaccctaatgaaatcccctgtcgtcaaacttaccctcaacatttcatataatccacctt

SEQ ID NO: 337867 - DNA, 324 bp, Zea mays
aattggtccatcacaacctaactatatcctttgatacaaccccatgaaacttaggggcctgtgggtatataggagcagctagccaaaccaagaccaccacaaatggtcgtcgatccacaaggatgctaaaacagactccaaagcgttcgagtatatacactcgcccaacccgaacccaaacgtgactactggcgccctagtggataggctcattccagaacgacaccttctaagactccccagacaacacctggcagacggagtccagcacctacaacagtgtcaccctggtctgcctactattcagcctcaacaccactttct

SEQ ID NO: 337868 - DNA, 214 bp, Zea mays
attctttcttcatagctatcctaattcatttttcaatcttcccaaccataactggcgctggctcaaatacaaaacatatcctatacccaaaatataccaaatctacccttaactcaattcagcttttttctcatcacccactacctccacctactccagagcatcaccatccactgacaacaggccttaacaacatcctattttaataacctca

SEQ ID NO: 337869 - DNA, 158 bp, Zea mays
  unsure (1)..(158): unsure at all n locations
cttagttattcatccctttcttcattcatatattattctccccaaccattacttggacttgctcaatttcaaaacatatccgtctcccttatatanaccaaatcctctctcaacttaatagaccttttttccccttatcaactaccttcttctaaaac

SEQ ID NO: 337870 - DNA, 281 bp, Zea mays
  unsure (1)..(281): unsure at all n locations
attttnggtcgacggacgcgtncggtcactctatacactaccacggtcaaaggattcaaactccacatgcaccctacatacacgggacagggacgccataccccaacaagtgacgactacacctacggatccaaaccccgttatctaatttctttacacaccccaaaaaaaggagcaaacaacctcaatctacacaccaacaaaggctgtgcaactggaacacgcaccagaaagacgaaagaggctgcaaccgcgaacaagaacaacacgaacacccataa

SEQ ID NO: 337871 - DNA, 390 bp, Zea mays
acgttgctgcccatccacaacttcccttctgattttccttgaactgcacatacaacgaggctaggaatgttcaaagacaaacaaggctcacaacccacataacacgcatagattccctgtttttattttatccagcctgctagccgcattcatactcgaggcggccacttcctcagaagctaaaccttctagattggagaacaaaacgaaatccctggagaaacttgataatctccgtgagaacgctttagtccccaatgataaaagcagatccaccgattacgagaaagtgatgccccattcggagaactttctaatcccacacgctaccgacgatgttttcttattttttttaaacctacccataaacccttccattgcgtaaaattt

SEQ ID NO: 337872 - DNA, 333 bp, Zea mays
  unsure (1)..(333): unsure at all n locations
ccgagaccanctcccacaacacttttattttttacacccccgacaacctacagggacctgtcacaatataacggaccaggggcacccacaaacacataataaaccataatggtacttttatgattaccaaaacaaccttaacgaaacagccctcacccttcataatcaacaaaactccagtaatcaaaccaatcttacctgactccccttgataacacacacaaaaacattacgatgaactcacctaaacaatataggacaaatacgataaacacaaatactacaacattaacaaaaaacatgctgaagaccacaacaacatcaaccaaccct

SEQ ID NO: 337873 - DNA, 289 bp, Zea mays
  unsure (1)..(289): unsure at all n locations
attcggacaaacaccgacgcacatgcctatttcgtttctcagccaaccccgcagaagagtgcccgaccctacttcatagaggccgcggcatattccntcaacgccactcacgcaggaggttgttcaatcagctgctattttttcccttcttttctttatttattaaatcgactaacaaagaaatgattatcatatatataacccgtagaggaagccgaacaataataagctaggcctgaactcatgccatacataataatcatgagaattgtcagacagacatagaaac

SEQ ID NO: 337874 - DNA, 304 bp, Zea mays
ccgagctctgctctctcaaaacatgttcttttttacgctcccgacaatctcgttgggcagcggacgatatatcctgccagcgtgccccatactaacaaaaaaatacggaattacattttgatgatcctgtggagaaccttactgaaagtgctattacccttgataatgaggaagaatccactacttaaactaatctacctgatcagtctaaataagaaactcaaaagctttacgatgaactcacttatacaatattttacaacttgcttaaccacagacatttgatcattaacaataaacatgt

SEQ ID NO: 337875 - DNA, 300 bp, Zea mays
gcgtacgcacatgcctgtcgctttctcaaccacaacttattctctttcattggcacccataacctcgagcagggttgtccttgacacccacaaacaaatcacccctgttctaacttcccattggcccccccgcccatttacattcaaattgatttgaccccgcacaagcataaacaacaccgcccgcgctcttttttttcgcaatgctatttagcaaactgcaccgtgcacttcactttaattcacaccaaccccacacaatgcgatgaaatatctaatggcgaattttttttttttttc

SEQ ID NO: 337876 - DNA, 284 bp, Zea mays
cccaggccgacccacgcgtccaatccagatgacaagtgcaccattaccgcacttctctaactagtgctagtcgggggaccatggggagttacttaagcaccctcacccgatacaccctacctttgctagtcctcctacgtcttctcttctcttaatcgttgtgatttgattcttcacttctttcgcacattgcagagggtgctcggtctgcaactatcttaagttaaccagtcgtgtgtgctctatcgagttcgatatattcatactactgcgctgttataatc

SEQ ID NO: 337877 - DNA, 174 bp, Zea mays
ataactccttttcaacctctttttagcacttttacctaccagccaaattcggggttcttaggtgaccatttctagtgccatcatcactcacacgccaacctccctacttataataatcacactaagtactatatcaccttaatcttgaccattccatccttcacttcatgcacc

SEQ ID NO: 337878 - DNA, 98 bp, Zea mays
cggcagggtgggtacagtagcaagctattgccctagtctgatgtaagaacaaatttatatgatccatcccatattgtctttaattagattcttttttg

SEQ ID NO: 337879 - DNA, 309 bp, Zea mays
gagctgccaataccagcagggcataggctgatcctgccacacaagcacacccccgtcgatgggctgtgcgtaagcgaaccaccctgtgtggctctgcattacgtacacgtcatactctcgctctgcatcacgctcatactgtgatcgcaataggactgcttacacaaacctggtggtatgtccttctggcccatagctaatcggcttaaccatgcgatagtgatcacacattggcactacgtgctaccactgctcgagggtactctatggctcatcatctgctctgaacatgcgcgagcaacttcaggg

SEQ ID NO: 337880 - DNA, 273 bp, Zea mays
cagtccatctcgtctcgtcccagcaaagcaaaggcagccatgccccacagtctcttgctgcgcgtcgtcctcctcgccgccgcgcaagccagcgcggccacgccgcggcagctgttcctcgtgagccggccgcccatcacgctcaccaaccaccacggccagctgctgacgggcaactactccgtcaacctgctctggtacgggcgtttcacgccggcgcagcgcgccgtggtggccgacttaatcctctccctctcgggaacggggccgggg

SEQ ID NO: 337881 - DNA, 220 bp, Zea mays
  unsure (1)..(220): unsure at all n locations
tcaaaatctatcgtacccaaaaaaaaaatcgtgctcggcacacgcaggcggcgctgcgtctggggctctcagcgacggaggggcagacgccagacgggcagtcccaggttcggcgtcgtcgtcagcggntccccctnctgccagtcgcctcgcgccctcgcctgcggtcctccgcacacctgccggcgactctgcctcgctacgacgctacatcaacatg

SEQ ID NO: 337882 - DNA, 384 bp, Zea mays
cggacgcgtgggcggacgcgtggggcggcggcgaggtcgtaccccacatcggcgagcggcggcggcaccgccggaggcaaaggcaagatgttcgggcgcgcgccgaagaagagcgacaacaccaagtactacgagatcctcggggtgcccaagtcggcgtcccaggacgatctcaagaaggcctaccgcaaggctgctatcaagaaccaccccgacaagggcggtgaccccgagaagttcaaggagctcgcacaagcctatgaggttttgagtgatccagagaaacgtgagatttatgatcagtatggtgaagatgcccttaaggaaggaatgggcggtggaagatcccatgttgatccatttgacatcttctcatcatttttt

SEQ ID NO: 337883 - DNA, 242 bp, Zea mays
gcattgggttggcagcacgtccctgcacacggtgacacgggccacggcacggggagcgagcgccgagcgagagcaagcaaccgttgtccgccgggccggccacggcggtgtcccttgcttcgcgccttcgccggtgcactaacccttaacgcaggtacggaccgtgccgggtggaattactgtgcccctgggaatttggaccggcctttgtggtcgcaagacttgactcgtgtacacggcac

SEQ ID NO: 337884 - DNA, 216 bp, Zea mays
agctgctcttaatcaacttttttccagcctttgcctccaccacatcacacggggtactctgggtgctcttcttgtaccacaggtctctcctaataacactatacccaacaactccatacatcccttcgaccactacgacgactaccagcactactggatatgctaaataaatagtcgacaaatagagcaatagcgcatacgcatactcatgcactg

SEQ ID NO: 337885 - DNA, 403 bp, Zea mays
  unsure (1)..(403): unsure at all n locations
ctcacaaccttctgcccgtgaccgtcgtcctcgccgtcgcactgctcatggccccagccgcgggttacccgtggctatcgtgtggcaccagcagcagcttcgcggccaacggcacataccaggaccacttcaacttcgccgccgccaccctgcccaagaacgcctcgacatcccctgacctttttgccagcatagtcgtcggcaccgtgccggagcagctctcagccatggccctttgccgcggcgacgtcaacagcacgacatgcttcaggtgnctgaccgaggccttggagaacctgccagcgctgctcacgacaggctgcaccattactacgatcctgatgtccactactcgagtgcaaccctcccgacacacgacacggccgcgatcgaacgaccccat

SEQ ID NO: 337886 - DNA, 324 bp, Zea mays
  unsure (1)..(324): unsure at all n locations
gcgttatacggctccaatttatctgacttgtccctgagcctttgccgccggctggagctggacggtcctcgggcagagcaggcagtcggactgccagagtcacctccatggcctctgctgctacttcaaccctccccaagggttagttgaggccaacatgcaacagatactttcaggtgaccggttaagttcatgcccacaccaaaacatgcgtagcctgcaagtgtccgacccatatccacgggttgatcgcttacactggaagaaggacgacattactcncggtgtctgcacttggatcacgtcagggctcatctgtcactg

SEQ ID NO: 337887 - DNA, 178 bp, Zea mays
  unsure (1)..(178): unsure at all n locations
nntacgcattgctcactttgtttcttgcattttctgaacctccttcgcctggggaatcatggtaattttattgaggtgaaggagctaatgcacccaatacacaccaaaagctatgacgatgtgtactaaccctacgaacactacgttgctgattatcaccacacaatcaaatcacctt

SEQ ID NO: 337888 - DNA, 284 bp, Zea mays
aagtcttcacactcctcgccatcacataaaaccagtgcaagcagaagcagcgcaatggcgagcagcaccatggccctctcctccacagccttcgccggcaaggcagtgaacgtgccgtcgtctctcttcggcgaggcccgcgtgacgatgcgcaagacggcggcgaaggcaaagccggcggcgagctccggcagcccgtggtacggccccgaccgcgtgctctacctgggcccgctgtccggcgcgcccccgagctacctgacgggcgagttcccgggcgacta

SEQ ID NO: 337889 - DNA, 84 bp, Zea mays
ggcctggtgctgcaaagacaaagcgctaacaggggagcacaaggacacaatggaacgtgtgctcttgttgtgtgcgctagctgg

SEQ ID NO: 337890 - DNA, 307 bp, Zea mays
gcaagctcctatttttataaaagagttcattttgactgcaacgtcgcaataaacagcaggactagctgccttatgtacagatctttattctttaatgactttgactatccggatattgtcttcaaggaggaatgcttgaccattcgcaccatctgagctaaagctaacacgaatattatctatccattgacctttacttgcaatgccggtgctaaactgggaccactttcaaatctcaacaaagctacctgacagctgtgttaactatccactaccactgtgacaccgaaaagctagcatcttaccc

SEQ ID NO: 337891 - DNA, 95 bp, Zea mays
acgatctcctcctactatggtctctagacaacctatccagagtggagcacccaggcgagccagagcgcatggacacactgccagcgtcaaccttc

SEQ ID NO: 337892 - DNA, 359 bp, Zea mays
cgtgcggtcgtctacatagcatgccaaaacccctctgtttcttttttttcatggaaaagcttcagtcggcttcttaggtatcaacttggtacaacattaacccatacttatcatggcagcgcgtatgcgctcactaggcatccaagcagtcggcactggatgccatgcctcgtcgactcacctgaacccagttaggcgatggtaatgacatctcctagaagcccacctagctgttgaactaagctttaatgggtctgccttgtgcactatacgcccagtttactcttctttcctctgctgccaccaccgttagagccgttagatcgctcacgccggctgcctgccgcgtgcctgtgcca

SEQ ID NO: 337893 - DNA, 225 bp, Zea mays
atcacactcgtagagagaaggaaaaatatccccaaaccctagctcccgatctcgatggcgaaccctcgcgtcttcttcgacatgaccgtcggcggcgccccggcgggccggatcgtgatggagctgtacgccaacgaggtgcccaagaccgcggagaacttccgcgcgctgtgcacgggcgagaagggcgtgggcaagtccgggaagccgctccactacaagggc

SEQ ID NO: 337894 - DNA, 293 bp, Zea mays
caagtagtgatccgtgacctcccctcctccggcctcctgtcgccggcgtccgtcgctcgttgtcgagcccccgggagcaaaggcttccgccgcctgcgttccggatggagaatcccttcagcgtgaaggtgctgcaggtattcacaggtttcggcgtaggatgcggcgtcggcatcggcgtcggacgacccatctacctaggtatgatacctgggcttcagcaagttatgagtgctacaaggggagcaacagatgctttttctggtgtcacaaggcatgtcaattccgcgcta

SEQ ID NO: 337895 - DNA, 213 bp, Zea mays
ctagaactagcacgtacatcctacacacttttagaaactgaaacagacgaggcacattagcgagcacgtatagcacggtcaccaccatggatgtccaggaagacgctattagtcaagcatatcactctataccatcgcaggaagcctgactacttcacaactacagagcggtgcggcatgaatgcaataaagacatctctacaccgctacaga

SEQ ID NO: 337896 - DNA, 335 bp, Zea mays
  unsure (1)..(335): unsure at all n locations
tgcctccctagtccactaccctcgctttctttctcgctcatccctttcttcccgaagctgtctgtcctgctcctgcgcgcgttggaggaaggaagcctaggaaagccaccgctcaccttctcgctcgctcccccaccgaacgcctcttggtgggagaagaattggccgaaaagcttccggttggctggccgggatctcttcgtctttaattaccggacccctggggggattgcctgctgcctcattagaccagaccagacagggagagggttgagttgagggggaggagaggagagagacacanacaacgggtggtcgctgggaagaggaagaag

SEQ ID NO: 337897 - DNA, 93 bp, Zea mays
ctttatatatacatgaacaataagggctgggttggttgcattccataccactactcatgtggacgagaaagccctggagggcgacatggtggc

SEQ ID NO: 337898 - DNA, 85 bp, Zea mays
  unsure (1)..(85): unsure at all n locations
ccgtccggacctagnnttctacgatcgcgaggcgnngccgctctatgagcganntccaannncttacgtacccgcgtgcgatgcg

SEQ ID NO: 337899 - DNA, 314 bp, Zea mays
gatccggagcagccgcagtcccaccgaccccgccgccggtcgccctccatctcctcgccgctgcctctcgatctttgtacagtttctcttttcaataatcaagatgagccgtggtggtagtgccggtggtggtcaaagttctctgggttatctctttggaagcggtgagccccccaaaccagcagtggcaccagctgcaagtgctccacctgttgagaaaccatctgctgcaaagactgatgcggccaagcaggttgctgctggggttaccagccaaaccaataactaccacagggctgatggtcagaaacact

SEQ ID NO: 337900 - DNA, 182 bp, Zea mays
ggagaaccgtgagcagagagacatggcgcgccaccaccagctgcgggcgctgctcctgtggccactcggcgtcctcctcctgctccttgccccgcccttcgccggcgcgtgggggaaggagggccacatcatggtctggaagaacgcccagaagtacccgtccgagaaagccgccgccgccg

SEQ ID NO: 337901 - DNA, 200 bp, Zea mays
gtgcccagtcatctgattaagcagatccagttcagacgactaacaccgtacgcgatggtcgtgctcacacgtactgcgatccagcagtctctgtattgagccgtcacgctgcatgtctggaccctcatgaaacttatcaggcacccttgcttagtggagatccacctgctggttatctggatactgcataggtgtatgac

SEQ ID NO: 337902 - DNA, 197 bp, Zea mays
cggaaaaccaggctcgacccacgcattcggcgacgaattctctaactaaattgacctcattacagatcgcagcccttctcggtgcccgtaggacataccctaggtactatccaggcacttacgagccagccttgccaccgtctgtggtcccccgcgtccttaaccaaaacctaacctgactatgcaaatccccattt

SEQ ID NO: 337903 - DNA, 254 bp, Zea mays
tcgcatcgcgacagcgatatcgggaaaagggaacttcgaagccccgggaggcgtatgggcaccggcgaagagcacgttgcggcgccggcgccggcggtctatgaaacgccggaaaaaaaacaaggcaacacaaccgagcttcccgcacccttaagcttgacgaaaaagcttgccccaactcgaggtggacgaagtggacgatttgaggttattttttgttccccaactggtgaggaaattaaaaagcagagaca

SEQ ID NO: 337904 - DNA, 178 bp, Zea mays
ctggggatgattgcttgactttgaacgcgctcctcctccacattctatgcgggatggtttgaacctcttcatttgcctctccgtcccttgcgatcaacaaaatacttagcgccctagcgatgcttaagtgtatcaaggaacacaacatgtataaaagattatctgatgaacataaaaa

SEQ ID NO: 337905 - DNA, 185 bp, Zea mays
gccgccctgccgtccctatatctaaagtcgtctactacgacccagtgaaaagtccacagggtttggttagaggaaggaaagggctgcttcaccagccacaactacaattcgccggccagccgcgtgacactttggcgctccacagggatcgcggggctccgagacgccacattgaaggaagggcc

SEQ ID NO: 337906 - DNA, 253 bp, Zea mays
ggcgtcgcggcaacggcaaggccgcctgtggtgacactcgttctttgcaagaggcacctatggtaagaccaccatgtcttgtgccgttcctgtttctctcgctgctgcgatggatgcaattgttcagggagtacgttatgcctttggtttgcatgcacctgctctgcttatcaccttatgtttactgacgcgtgtatctgtgaaatctttttgcatggatcttattaaaactctctaacgtcttattaacaat

SEQ ID NO: 337907 - DNA, 323 bp, Zea mays
  unsure (1)..(323): unsure at all n locations
agcccgagaacgtgctcctccggctcgactgtcacgtaacgctggccgacttcnacctgtcccgtctgctccaccccagcaggtcgtccgcggagacgtcgtctcccccgcggccagcgtcatgcgcgggcaccacaaccggcggtcgcgcgtccccgcgcggagcgactcggtctcaatcaccaggtcaagtcatactccaactccaacaactacaggccccctcaccagccctggtgcgctgcgtcgactccgagcagcagatccagagcctggtccgctacatcatgtggagcgtcaactggacccttgtgggcatgaag

SEQ ID NO: 337908 - DNA, 446 bp, Zea mays
acgccgtccaagtaggtggaaaatcgaggtcgcgcccttgtcttacacgccactaaaggccgcgccgacggggtcatcagacgctttggagtttggacgggctcgcctcggccgctctggcgcttgtgcggtgggtgaagcgcgggtgctggtgcgggaagcctcgccagaccagcgctgccgactgccgagctgggtgcgggcgcgaggagtcgacgggagacaagggtgagggtgaggctccttctcttctcgccttgccctgaattgctgtcatttttggttcatttgcgcttgcttcggtggtgatttgtcgccgacgcgtccggattctgtgtcggtgcgtttcttacggtgtctgtgatatggctgcgactttttcccttcctgttttgagttacgttttccggttgcataatctgtaaccctttatccactctattttc

SEQ ID NO: 337909 - DNA, 357 bp, Zea mays
  unsure (1)..(357): unsure at all n locations
cgggncggcccaagccgtccggcccttaattttttttgttccgggttcaatatttccaccaccgcatagctcctgccttcttgctagttcctaccttcgtcccccccgccgccgtcgattcgtgctgcgctcacctcgacccagttcaatatcgccggcgagggaagcagcagcagaagctccggcagaacccccacctccggctatcgcctggggataaagtggggtcggtagggcggtgacctagggggagcaaaagggatccgatagggagagatgaagcaatcaatttattcgtccgccgtcgcccctgctaacgcccccactactaaccctaggatcatactgtcttttggc

SEQ ID NO: 337910 - DNA, 369 bp, Zea mays
ccaccttcctttctattatccacatttttgcgctatcccggcgtacggctgcgatcgatacacgcccaatccaaaccctacctaaaactccgcctcgcgcctacgggctcacactcgtaggcacggagtgccgttccgcggtgggcggaatcaccaaaatgccctgcgttcaccaccacctgctcctcctgacgctcgccgccttggcgtggcggcaggcaccgctagcgccggcggtgacccgacagcaatcgaggcgcagttcgactcctggtgcgcggagcacggtaaggactacgccacgcccgaggagcgcgccgtgcggatggacgagttcgaggacaacgccgcctacgtcgtcgcgcacaa

SEQ ID NO: 337911 - DNA, 208 bp, Zea mays
catgtccacgctgatcgggcgctacacttgctcttgcaaataacggtggtcgtcggccgcggtctccgccctacccggcgaagaccggcgccgacgacctgccctcggaggcggcggctgggacatggacctggagcacgcccactcggccccttcgaccgaaggccgcaccggatgaagacacgcgcacccgcatggctctctcaaa

SEQ ID NO: 337912 - DNA, 240 bp, Zea mays
  unsure (1)..(240): unsure at all n locations
aaacccgggccgaccgcacgcgtacgaaacaagtgantganaaagagagagagaggtgggaaatatgctgcgccacgccgccgcccggtctgtttccgggccgtcggttcccccaacccgcccccggcgcttgccactgcggaagttccccctgaagccctcgaagacttcaccttcctccaagccttaaaaaagttctccccaacattgaacccccaaggaacgcccttttccttatta

SEQ ID NO: 337913 - DNA, 380 bp, Zea mays
gcagctcgcgcagttcccacttcccacccaccaaaccaaactctcctccacaaccacagccgtcccccgccgcccctcctcttctcggcttgctcggccccaaaacggcaagagccgacgccagcaaaccctcggattcgggagggaaggaaggcacgagcacgcagctgcctacccgcagctaaccccaaacagcaacgtcgtagccgagagagcctccgccacctacccaccaactcccgcccgtcgtcgcctccgcttgggttctcgtcgagcagttggtgggcacctaccgcatccagccagagagagagagagagagtgagccactgagccagggcggcaaggtggagatgaagaagctgtaccaggcggaaggg

SEQ ID NO: 337914 - DNA, 125 bp, Zea mays
  unsure (1)..(125): unsure at all n locations
tataaaaaaaattaaanaaaaaaaaaaaataaataaaattattaaaaaaatataatgaaaaaaagtataaaaaaaaaaataaataaaaaaataaaaaaaaaataaatataataaaataagnttgt

SEQ ID NO: 337915 - DNA, 119 bp, Zea mays
  unsure (1)..(119): unsure at all n locations
cttctaccaaggccttctactatatctgacagacatgganatagattgctgcgattatacaactatgcatcatcttaacaacatctaggaatacatgctcatgaagcaatctcactctg

SEQ ID NO: 337916 - DNA, 392 bp, Zea mays
  unsure (1)..(392): unsure at all n locations
agcctgatgactcctccggctcacccgccgtcntctcccagtcgtccccggacatctggcgcagcgataagctgatccaggtgtacgtcttgctggccaccacggtgggcctgttcctgccgctggcgcacgtgctgggcaggttcacgcgcggcgacatgcagtggtgccgtcggagacgccgcacctgttcctgctgtcatgccaatcctgactgagaacgtggtggggtcgctgggcgccttgtcgccgtctcgcatggcgctggagccgctgctctacaccgtgcgccatgttttcttcatcctcgactgggcctacgacgcgtggtcctacaacgcgcatgactccagctgggtgtggataggcaggtgcctttgcgtcggcaacct

SEQ ID NO: 337917 - DNA, 388 bp, Zea mays
cactactatccacctgcctagccctggtggctggtgcttcacgccggcagcctccagcgagaccccagcagcagcccgccgcctccaagtacgccgatccggcctccaggggactgcctccttctcgccgaccttagatttggtcgctgcaccggtcgattagtcatcgggccggtagatttggctgctctggccgccgatcgcacgtccggttgggggcggctttgatgggcgacagcggctggcgctgtgtgagcgagctgggcgagcgcggcgtctgcgcgtcgcctgtcgcggcgggcaaatgcaggggtcgcggggaactcgcttttggggctgcgggactgggagcgcgtgggggtgggcgcggcgttcgtgtggcttgggg

SEQ ID NO: 337918 - DNA, 154 bp, Zea mays
  unsure (1)..(154): unsure at all n locations
acaaaatccaccatcctcttctcactcccncacccacccggcaattcacacccacagccctcaacacctctccatcacccttcatctccccaaaatcacatcctcacacttctatactatccttccttatcttatcccaaaaaaaggtgcaatc

SEQ ID NO: 337919 - DNA, 335 bp, Zea mays
  unsure (1)..(335): unsure at all n locations
gcgtccggaccgggcttcccgttccccctcctctgtgtacatggtgctggtggccgtcgaccgcgcaggtccgttgcgggggcctctaatggcgcacaacaggcagcagtacggcggtggcttctccgactcccgcggccatcagcaccaggcgctcccggactggcccggcctcaccacgcctttgccaagccatccttccggatccgtcgncctggaagcccgcgccgcgccgtcgatcgcctgccgctgtcgttgccgccgcgctcctcctacttgccggcgtctttcttctctcgcgccgcatttcacgcagttctgcatatgtcaaccaa

SEQ ID NO: 337920 - DNA, 139 bp, Zea mays
  unsure (1)..(139): unsure at all n locations
cttaccgactgatctgtctaacccaacaacctctccactagcccgctttcttctcaaatccctcgggctcctcctaaccanctcatctctcttcctcccaccccatactacccaactctacttcacccgtacacccata

SEQ ID NO: 337921 - DNA, 380 bp, Zea mays
acgccgtccggaacggcggccacctcttcgtcgtcaagaacgccgccgcagacatgcgccccttccacactgggggccccaaccaacatcaccgcgcacggcccggcggcgacccgggcccgcctcaccttcccggtacccccatgcaccccgccttcccgccacctgtcccaacctcgccgccgccgccaaccccatggctgcagcggcggcggccaacctttcctggcgctgcagcttctaggccaggcccagcagctccagaatctcggtttcctcgccgccgccgcgctccagaagcagcagcagcaggcgccgttctttcctggagggttcccttcgaaccccaatcagtttgcgcctttcgcgggtggcccccc

SEQ ID NO: 337922 - DNA, 342 bp, Zea mays
  unsure (1)..(342): unsure at all n locations
gacacagaggccatcacaaatgtggaaccctcattatttctgtgtcacctcacttactctgcatcgtgggcgttgtctgtcgtcgccatgggccatgcacnngcagctcggtcagcttgggcggcaagctccttggtcaccgcccgtaaccaaggacgcgttccaacctccttttacagtgcgcccttaaaggacggccacccgttcgtcctcaacttaagtagcccgtcttttcgttggccacttccgcaacttcttccaaaaccaacaacggaacgttaaccgcaacgttttcggcaaacgcaaccaacggcaaaaacccgttgttcccggcttcttttt

SEQ ID NO: 337923 - DNA, 59 bp, Zea mays
  unsure (1)..(59): unsure at all n locations
cggggagccgacnaacccaccctcgtggcatttatggcaccgccgcgatgtctatgccg

SEQ ID NO: 337924 - DNA, 474 bp, Zea mays
  unsure (1)..(474): unsure at all n locations
gaaaaacnggggcgaccgacgcgtccggcaacggcaagatctgggacgccagcaggtttttgaggctgggcatcaaaagcagcttccganctggagtccccgaggtcgtgaccggatcgattacgctggagagcgagttcgacaccagctacatctggggcgagaacaccgtcaacacggaggagttctcaccgactacgaggtcatcgtgcctccgcacaccgtcatcacggtgcgatcctggccacgcagggcacttgccaggtccccttcttctacacgcaggaggatattttgactaccggggagaagaaggtcaccaagtatgacgatggcatcttccgtggagtcaacagctttggtttcaagtccgaggtcaccgagaggaagatcaacggcgaatgagacgatgcaccactgtgccaaagtctgcttatctatctatatttgcattaataattcagccacgtacgc

SEQ ID NO: 337925 - DNA, 250 bp, Zea mays
aatacaaaacaatcttattccacaaacatcatttatatcaacatctaatcttcccatcaaatacctatatattctatcatttttcaaaaacaatcttcacaatttaaactcaaaaccatcatcatctctttctcatcctaataactacccaaacttatttaaatactaacacatccccctcaacatatatacatctttttcctataaataaaacatctatccacctacccttaatacattattcatacta

SEQ ID NO: 337926 - DNA, 163 bp, Zea mays
ggagaggaggagccgacgagacaccacacagggcaaccctggcgggcgcggtaccaaggtcttctccccgcgccgtggcacaccatcctgcgcctgcgtgcgtctctactgtcaattgccaccgcatgctgcgagcgaggagaggagcacgtgccgagactag

SEQ ID NO: 337927 - DNA, 209 bp, Zea mays
caaaaaaaaataataaaaaaaattaaaaaattttattaaaaacaaaaacaccacccacaacgagcacgcaaacctaaaaaaacacaacaaatcaaaccaaataactacatactaaaaaaaaaagggccgtccgccaacactatttttaaattcgaagccctctctttaaacaacccaatcttccttccccttacattcaacaccataat

SEQ ID NO: 337928 - DNA, 247 bp, Zea mays
agtacacaaaccggcggcaattcagcttcctgatccaagacctcatcagggacagagaggcgtctcgcgttcgttaccgaggtgaggtgaagaaagaaattgccgccggagcaagaacaagaaccttcgccccccttgccgtgcttcctgccgcttgccttggcggcggcggccttgccggcttcggcttcggcccattccggttgcacaaccaccctcatcatcctgtacccgtgcctcaactaca

SEQ ID NO: 337929 - DNA, 283 bp, Zea mays
gaccacgcgttcgcaacgcttttcttccacttctcctactgttttttttttcccgacccatcaactgatagcacagatgcttttcttccaataggatgaaccaaacaaatatcaatcatagattacttgccctactcagtccatgctctcctccagctactgcatcttccttaggagcaagcctcatgcatcatcccaagttcgatgagtcatcatcgacttataccttaacaacaagccattcctgctcacctacaactcttactcttttccttacccttcc

SEQ ID NO: 337930 - DNA, 61 bp, Zea mays
  unsure (1)..(61): unsure at all n locations
gccgcacagtgtccatctggcnncttcgcnctacggttcttcgtcctctctnncgcattct

SEQ ID NO: 337931 - DNA, 435 bp, Zea mays
  unsure (1)..(435): unsure at all n locations
gtaccatgaaagtttgtttaatctaggaatttttatcaaggggagagacgacccctaaatggaggcttctggtgcaaaattgaatgccattcangggctcgtatgttcttcttgcttgttgtcgaatcattcttgttgaacctctttatttatagtcacattgtaatattgaaaataccgatgtgttactcagacaaagcttataaaggtgttaaatgaataacagaaccatttttctgctattctgtgcaatttccaatgagttcaacttgtagcagagatatatacttaaggctcgttttatgaattgtaacccattgttttgtgctgttcaagcgccctggcggagagaaagtttaccatgtcttcgacaatcaatttcctgtatctattaaacgattgcaagttgataaacaaccttttatggaaaatgtg

SEQ ID NO: 337932 - DNA, 362 bp, Zea mays
ctcgtagagagaaggaaaaatatccccaaactcctagctcccgatctcgatggcgaaccctcgcgtcttcttcgacatgaccgtcggcggcgccccggcgggccggatcgtgatggagctgtacgccaacgaggtgcccaagaccgcggagaacttccgcgcgctgtgcacgggcgagaagggcgtgggcaagtccgggaagccgctccactacaagggctccaccttccaccgcgtcatccccgagttcatgtgccagggcggcgacttcacccgcggcaacggcaccggcggcgagtccatctacggcgagaagttccccgacgagaagttcgtgcgcaagcacaccgcccccggtgtgc

SEQ ID NO: 337933 - DNA, 352 bp, Zea mays
gcttttgaatgtgaggaggcttaaactaactacaacggttcccccctaaatcctaatccagcttccgctttgcagggcacgaccccctttgcaactgactgagtccaaatccaaatccagttaccccacaactcaacctcttttgatttgattctgcaggatccatccgagaacgagcggccacttctccgatgccgtcctcaatggccaaatccctcctcctccctccccagttcgtctgcgtctcaccccgacacccccaccgagccggattccccgtccttaagccccgtcgcgcctcgctgttggccgtcaccggcggagacgtcacgcccccgtcggacgccgacag

SEQ ID NO: 337934 - DNA, 278 bp, Zea mays
tgcgcacttggattctgctaccaccgtttgctcggaggaagcacaagcccccatacacagacgattgtccaaattaatctcagaccgttctcctaatcaaagcgatgaaaagcaagagaggccgcagcccgtatcatgttcttgagtcatccttcgaagatattggcaggccagactgcataaacaagaaagagtgtgagctgcatgcgctacatacaccacgaggccgggcagaaactgagcacaccctaggaggtgacgcacaacgcgacatgttc

SEQ ID NO: 337935 - DNA, 345 bp, Zea mays
agctcccacacacacagcagtcttaccaagttctcataggtttagggttccttagggccgggtggaggggcgatggcggcggctgatgtggagtaccgttgcttcgtcggcgggcttgcctgggccaccagcaacgagtcgctggagaatgccttcgcctcctacggcgagatcctcgactccaaggtcatcaccgaccgggagacggggaggtcccgcggcttcggcttcgttaccttctcctccgagaactccatgctcgacgctatcgagaacatgaacggcaaggagctcgacggccgtaacatcaccgttaaccaggcccagtcccgtggcggtggcggt

SEQ ID NO: 337936 - DNA, 207 bp, Zea mays
  unsure (1)..(207): unsure at all n locations
cagcaaaccggcggcggcggccaaaaagtgtcgtacagtacgtgtggagtgtaatggagcttccatgcatgcatgagtggatccatgccatgttatgaatctagtccttcctttcttgtatcttccatgtgacgcggcgtgtgcgtcccttcatgtgtgatgatgccagatgaatactacaaataagacgttgtgactgtgccnaat

SEQ ID NO: 337937 - DNA, 370 bp, Zea mays
  unsure (1)..(370): unsure at all n locations
gccggctcagccgcagcgccgctccgccggttgttcctccgcctccgtgacccgccgccgctgcccnttaacacgctcctatcccgcctcgcgccacatctgcagcaaggccccaccctagccccagcaccagccccggctcttgcactcccgacctcgacgccggcccaaacgccatccgggattctccgcgacgcgctcttctccttccacccgggcctccaggcacacccgtgcctagatccgattgggggtgcccccgcaagggacgaggccggcgcatgggcggcggaggtgtgggcggacagcgtgaagaagaagcgcaagcgtaagatgaacaagcacaagctccgcaagctccggaagcgac

SEQ ID NO: 337938 - DNA, 254 bp, Zea mays
tcagcccacaccttccctaccacctttagttgttccgctcctgtgaatccccccggcggggggcacagaattcccccggcacacctcccaaggccaccggacgccagcagccccgtccccggccacacctacgtacgatcgcaatgctggcggcgtaccttatgccggggccttcgctcgcggacttccccggtaccgaccagaggagcccagttcctttcctccccttccctgcccgtcttcaccaccgggcc

SEQ ID NO: 337939 - DNA, 315 bp, Zea mays
  unsure (1)..(315): unsure at all n locations
cggacgcgtggggccttgagtcgagtccccgtcgaccccggcccgagagataagtcgtacgttggggcccgccgactgctgcacgacatggcacatctctcatctctcccgctccgagttcgcgcgcgtgatgccgccgtttggatttgtgcggtgacacataattcactgtaaattactcaaactactagcaatagctagctagtgcagtacagtatacttatgattccatttgatgcgtacggnctacaacgtgtaagtactagtatttagcgttgccaataattagcgacagggcacgctccggcagcgaat

SEQ ID NO: 337940 - DNA, 392 bp, Zea mays
  unsure (1)..(392): unsure at all n locations
gaccaannagctagctnctnctagctctagctaggctcgtctgctgcaagaaggtaacaggaacagcatgcatggaggggaaggaggaggacgtccgcctgggcgccaacaagttctcggagcgccagcccatcggcacggcggcgcagggcacggacgacaaggactacaaggagcccccgccggcgccgctcttcgagcccggggagctcaagtcctggtccttctaccgcgccggcatcgccgagttcgtcgccaccttcctcttcctctacatctccatcctcaccgtcatgggcgtctccaagtccacctccaagtgcgccaccgtcggcatccagggcatcgcctggtccttcggcggcatgatcttcgccctcgtctactgcacc

SEQ ID NO: 337941 - DNA, 114 bp, Zea mays
gtggctcgctagaaaaacacttcagccactttttcgtacccgattagatcgggggctctggcgtggccacctattgtgtctcggccacttgatggccatgcgtggctcctttct

SEQ ID NO: 337942 - DNA, 278 bp, Zea mays
ctatacaccaaggatagagctgattcaatgcacggcacacgatggggagaagaaacagcactatacaccaaggataggccatcagctatgaaaggtaacaaggctgctgaaggacatgtcaggatagtcttgggaaattgcagagagggcaattgcttgaggaggtcgccacagtgctgtagtaacagatctaggagcacttcttacattctgataggtgctttatggacagtgcggacaacagaatacacatgatgttttaagtccaacgtgtgtat

SEQ ID NO: 337943 - DNA, 234 bp, Zea mays
  unsure (1)..(234): unsure at all n locations
ccccacgcaggaagggngnnccnaccccncgggcgcgccgcgccgancgccgagaancgcggcgggcgcccccaacccaaacgcnggggcggccaagggccaagcncgccgcggagggggcgcaagaagaacggcgccagcgacgacgacgaggaccccanaccgcaggacgacgcggccgacccaggcangagnacgncagcgacagcagccgccgacaaagaaaagagcacg

SEQ ID NO: 337944 - DNA, 247 bp, Zea mays
ctatgcactaaggagcacacttttacaatttatagcactcgctgagcgagcggcctaacgcgagcaatcaaaggctgtccggcgggtccgccacgtcacagacctctggttcgagccttgaccggtgcactcacgcattacgcaagtgcagtacgtaaaggagtggaatactggtactcacatcagatgcgaccattcctcatgggtctataagaccttcatctcgtcatacctcgagcacggcttt

SEQ ID NO: 337945 - DNA, 316 bp, Zea mays
gcagttgcggttgcaaatcggatctcccttcagcaaccgctagagcttcctcaccccgccctgccctcatcttctccacccgctgccgcctgccatggggaactgcgccagcgccatcgacgccttcgtgcagcgcggcaacagggcgtcgccggccgctactgctggaatgtgcgcgtcgaggaggactagtagctctgccaccacggggaagctgtcaacgcttagcagcgccagcaccttcatgccatccaccgttagtggcggcggcgacgacgacgacgatgacccagtgggccagatcctcgagtcccca

SEQ ID NO: 337946 - DNA, 427 bp, Zea mays
  unsure (1)..(427): unsure at all n locations
cggtgacgaaaccctaggacttgagatccagcgcacggctcgggtcctcctcaccgttcccggcgatggaacggcggcaggagctctgcaggaacttccagcgcggcagctgcaagtacggatcgcactgcaggtttgtgcacgcctcctctcagcagcagcagcagcagcagcagcagcaggcgaagcccaacccgtttgggttcggcttagggagtaagcagcagcaacagcagcagtcttcgttttgtgcgccgttccagcagcagcagcagcaaaagcccaacccgtttggatttggagtgcaaggcggtgcggctgcacagtccaaaaacgctcctggccaggcaaagccatttcaaaataaatgggtaagggacccctcaaccccaacgaagcaacatgaagcggcacagncaccagcagc

SEQ ID NO: 337947 - DNA, 144 bp, Zea mays
agctgctgacagaataactgttgccagcctttgcctccaccgctatatacggacaacgcggggggctcttattagccaacagagttctcagactgacaatctattgacacagcctaaggaatgctgcgtacgttgaacgacgag

SEQ ID NO: 337948 - DNA, 272 bp, Zea mays
tccaattgtcacttgctctccctccaacatgctaattaacgccggtcatccctcttctagctcgattcattatccatggcggcggagaagcaccaccaccaccacctgttccaccacaagaaggacgaggagcagctcgccgccggcgggtacggcgagtccgccgagtacacggaggccacggtgacggaggtggtgtccacaggcgagaacgagtacgacgagtacaagaaggaggagaaggagcacaagcacaagcagcacctctgcga

SEQ ID NO: 337949 - DNA, 370 bp, Zea mays
ctcgcctgggccacggacgaccactccctccacaacgccttcagcacctacggcgaggtgctcgagtccaagattatcctcgatcgggagacgcagaggtcccgcggcttcggcttcgtcaccttctccacggaggaggcgatgcggaacgccatcgagggcatgaacggcaaggagctggacggccgcaacatcaccgtcaacgaggcccaagcccgcggcggccggggaggccgcggcggcggctactgtggtggccggggaagcggcggctacagcggtggcgggcgccgggatggcggcggcggctaccgcggtggcggcggcggctacagtggcggccgtggctacagtggtggtggtggcggct

SEQ ID NO: 337950 - DNA, 188 bp, Zea mays
agggccgacccacgcgtccgaaccggcataacatagctctttcgccccctttttgagcacccggagccgtagggagtcgggagcctcatcctcatgcttgccggcccctttatcgcaccttggggaaaggaggcccacatcatcgtcctcaggatcccctaaaagcacctgtttgagaaggcaccgcc

SEQ ID NO: 337951 - DNA, 220 bp, Zea mays
  unsure (1)..(220): unsure at all n locations
cncgccnccnccgggcnccggcccacnccngcccncccncgcncaccgagagccagagccagnggggcagccaaagccgagccgcaaccgcaaagaacangcgcggccnccnnnccccagcacgcggcacacaccgggccgcncgggccaaccacccncgggncacccaaccaacaaancanccgccaccacaccccgcngcggcgaagngcggcggcgc

SEQ ID NO: 337952 - DNA, 213 bp, Zea mays
  unsure (1)..(213): unsure at all n locations
ncggaaagaagcccggccgggncggaaggggagcagnncncgccnncncggggagggcgccagaggggngggcagaggcggggcagcgcnggggncagacgcagcgnncnccaaggcncacnaaanggagncncacaanggcgaggcngangacnngccnccaccacccccnnnggcngcnggcggggaaccacnnaaagccgangaaacaaa

SEQ ID NO: 337953 - DNA, 170 bp, Zea mays
tgatagaggatctactgtgccgtctttccgagaagacggagcacaaggtctcagtgggctacttgtacaagcccttcatcttctccttggctcgtctggaccttgccaacaactggcctggtctgcggctgctctacggtcgcaacgagccgctggcagagttggttaac

SEQ ID NO: 337954 - DNA, 296 bp, Zea mays
ccttgagtggggtgagcccactgttccgtccggcaaacaggaactggcggagattctgttcgactctgctctatagatggcgccatgtgcgtagcggtagctcctggaataagcaagcactgagcctgcgccctcccaacgcgcgcggtcgtcctcaccagtcaccaccaagggaatgtttctggttgcgcgcgatgaaccatgtacaatacaccggggaactgaaataaattgaaatagctagtcagaatttttagaataaaactgggccagcccgatacactacgccaacaccc

SEQ ID NO: 337955 - DNA, 152 bp, Zea mays
cggacgcgtgggcggacgcgtgggctagaaacaaaatattctaaggatgggcctggtgagcgtgaaggggaatcatggacagttaagtggttgaagtttgataatagttacttaaaggagataaagttttttttttgaaccaaattcaagac

SEQ ID NO: 337956 - DNA, 238 bp, Zea mays
  unsure (1)..(238): unsure at all n locations
cccacgcgnccganggaanngaaggcccagagaacagcccgcaacgacaagagcaaggaagcgagcaaagcgggggaggcgacaaaaaagncaggaccgagggacaaagaagaagagaaccagcacacacgaccgccagggacgggcaaccccggggagaagcggaccagcgaagaagcngagaagaggaggaagagggaagagacaacgcacaagagagngannggccaagaagagg

SEQ ID NO: 337957 - DNA, 282 bp, Zea mays
  unsure (1)..(282): unsure at all n locations
cccgggccgacccacgcgnccgcaaagagcgagcacagacggcgcggcaggcngggggggcgacgacggggcggcgaccggggcaccgggngcggggggcgggggcgcggcgcagcgggcaggcggcggacggcgcggggccgccgccgagggggcgggcgccccggaggagggcgcggcggcggcgggcgacacgagcaacgggcagcgcacggggggccagcccgcggcggacaagacgacagaccgaccggccgcgccgncgcaggcgngcggcgacgc

SEQ ID NO: 337958 - DNA, 261 bp, Zea mays
ccgacccacgcgtccggtcggactcgtgcgctctttccacactcttttttaaattgcaactgacgagcctgatcagcgagcatgcacagctcagtcaccagcatttcataacagttacttcaaataaatcaagttatttactttttaacgaaatacaagacatgaactttttgagccatcttccctggaaagagcagaacgaacaggatcttgtagttttgcctacagatgctgcattatctgaagacccatcggtcaatg

SEQ ID NO: 337959 - DNA, 222 bp, Zea mays
  unsure (1)..(222): unsure at all n locations
ctcnngcaacaagccaaacaacccagnggctgcnagccgagacagggganaganggagagagaggcgcgcagatggcgacgccgncgncggcgctttgcnccagcnncgccncccngcggaccgccnccaacggccacccccgnggcancgccnccnccacgcccaggaaggcannccacgngagggcancagcncgggnggacaagnncncaaagagngac

SEQ ID NO: 337960 - DNA, 368 bp, Zea mays
  unsure (1)..(368): unsure at all n locations
ggcgcgctggcaaggaacacagacaaagtttttcgagtcgtacaccaagcactcggctaagtcgtatcataatgtctggcgaaacaagctctcgtaaaggcacgcgcatcagcatttggaccgatcaagatctacttcccaccacaaccggatatggctgtggtagaacttccagtcatattcatgagctagactttctaaatcctgccctaacagtaatctatgacacaggaagaagggcacacagcacaacccaccgaatattgngatgctgatggccatgatgaatatgataaacgggtgaatactgacatgatacctgtgcacgatccgattgcctccaaaaagccttcggttgtaataccaaa

SEQ ID NO: 337961 - DNA, 271 bp, Zea mays
  unsure (1)..(271): unsure at all n locations
ggnacaccgncaacnaccgcgaggccnacggcgnanccgccggcaacggcgngcncagggggcacaaaaccccgcgccggggcgggggcgnggagccgcacaagancgaggaaccggccnggcggnagcgcaggggcccgcgcgacaggcggacggccacgaggaggcggagcgcccccgcggcggcgacgncggcggcggagacggggaccncgaaggagacggcgacgngcgacggcgcggcgagggcngacaccgcgccgggggagaa

SEQ ID NO: 337962 - DNA, 270 bp, Zea mays
  unsure (1)..(270): unsure at all n locations
gacccacgccggcggnccggccccagcccgcgccggcacgaccccaagcgcccccgcggccccgcaggaccaacgacaggnnngnatggagagagcccaaagcgnacggncacggcgccggagcccnncnngacgccgccgcccgcgccgcggcaccncgccgagcgccgcancgaccccgcgcaacacgaaggngccancgccgcgcccggcgccgccgacgcgaggcgcaagcgccgaagccggcncccggccaccaccgagcgcaag

SEQ ID NO: 337963 - DNA, 261 bp, Zea mays
  unsure (1)..(261): unsure at all n locations
cnnngcannggagnagcagcaaagcaaagcagcncggccagccagccagngccgaggggggcagnnccggaggcacacacacacacacgcacaggngcngaagcacacggcagnngccnngccggggcganngcngcnnccnnccnnccnccncccncgaggcnncncncagcccagagagaaagacgccaaggaagagcnggngccgcnggcncngccnccgaaccaacccaacccaaggcgncagcagcagcggcggcg

SEQ ID NO: 337964 - DNA, 220 bp, Zea mays
ccgaccgaagaccgaggcgacccacgcgtccgataatgctacagacactttttatcatttaccttgccaccaacgaatgcgggaactggcgataccagcacggttattcatacccataccacaaccaccacatcccatactgagaactggatggcatcagagctgtgtcttcctcacactatgaactcgagtgcggtcaggatcaagaatgcactgtcgc

SEQ ID NO: 337965 - DNA, 228 bp, Zea mays
gtcacgtctcccacacctaactgtcccccgtttcacgaataccaaagcctacatggggacgcgaccgccactgcctcccactcctgctcctcgaggacgacgccctcgccgccgaccctgctagcgcggtgctgggcggcgggcgctgcccgctgctgggcgggtggaacccgatccctgacatgagcgactcggacatccaggagctaggcgggtgggcgctggggc

SEQ ID NO: 337966 - DNA, 321 bp, Zea mays
  unsure (1)..(321): unsure at all n locations
gaaaacccgggccgaccgacgcgtccggctaatcctataatccatgatttaaaagatttgcgtgccanacagtcaccagggaccacagatgaaattgcagcagaccccatacatcatcttgaaatatttagatcacattatagatataatggatccagagcacccatactcactggaacaaatgaatgtagtgactgaagatttaattgaactcaattatctacgtaatcatgtcatgattacattcaccgcaacaatggagcagtggatnntgacgtctattattggactacgcatacgcgtgaaactcagactgagctt

SEQ ID NO: 337967 - DNA, 290 bp, Zea mays
  unsure (1)..(290): unsure at all n locations
ggtggttttccattcatcatcgttcttcctttgtctctgaactttttctgctgggtctgggggccgggagcagaggttgctacacgtatatattctgaagaagagatcgagatgaccagcgtgtggaagaccaaggttctgcctggcctcaacaagatctttgacaaggatggcaagaaggctgcagctgcaggcttcttgaagtccttcaacaaggaggagattgacaaggagattcnnnccccgaagacagatctggagcccaaggtcgtggaggcctacnaagcatc

SEQ ID NO: 337968 - DNA, 200 bp, Zea mays
  unsure (1)..(200): unsure at all n locations
ggccgacgaggcgtccgaaccaccaacaacaaccatatttttcattttctcgccnncacnccancggggggccgccccctccaacggccaatctgacacaataccaaaatcactaggacacgatcccttacattcactcctcaaccaaatgcttcccagccctgcgatatcttcttccccttgcagatgaccctcatcac

SEQ ID NO: 337969 - DNA, 196 bp, Zea mays
  unsure (1)..(196): unsure at all n locations
cttcccccacccttttttttcgttttttggttttttttttttggtttccccacccctnncggctaaaaaataacttttataacccccctccctttaatactcccaacgggggttaaaacattttatttgataggggctaaattttaacaggggcaaaccaaacaccacctttttattttactcccccccccccaat

SEQ ID NO: 337970 - DNA, 242 bp, Zea mays
aaacgaccatgcattgaggaaaatatcttagttcatatatgatcatgcaagttcgcacgcgagaaagcatctctaacagtgtaacgtgcgacaaatgcaaacgcgacgcaatactccaattcctcttccatgtcccaccttcagatcgatttgcagatatctgctcggatattgtccaggtatgtgacgcacaagtttcttgaacaattacaactgaaatatgccgcacaacaatatttatt

SEQ ID NO: 337971 - DNA, 229 bp, Zea mays
ccgacccacgcgtccgcctaaaacaactcctttacttatgtctcatctctacgccaccaccccctaagcaggtggagctgcctttaaactccctatgtaatcataagacccataaccactttactacatcaaagcccatgattactactaatctctctcctcacacataatgactgcattcacatctaaaagattataacatacactccaacataacctttcattacaa

SEQ ID NO: 337972 - DNA, 250 bp, Zea mays
  unsure (1)..(250): unsure at all n locations
ccgggccgaccgaggcgtgcgaatcagncagtaacagctcactttttacacttttaagccccccccgctcccagagcccaacggagcaaaacgcaaagcccaccaaccacacatcaaaccacaccatcgatggcgcccaaggcggagaaaaagcacccagtaaagaaacccccggaggaggagcccgcgacctataaagctcataaggctccggcagggaataaacctaaggcggagaaacgcctcccct

SEQ ID NO: 337973 - DNA, 214 bp, Zea mays
  unsure (1)..(214): unsure at all n locations
ttctttctgctccaatctattttttctactcgaccancaaaangggaggggaggtcgatatactgtttataaggtctactcttttctttcctacttctaatcccactttcatcgcctcttcgctttccctgactccttctcctactgcaaggtgaatctgctgctcttcctggccgaccgcaagcctgactctctcctctcctggtgccccgac

SEQ ID NO: 337974 - DNA, 156 bp, Zea mays
cggccgcgtgggcccccccccttttcccttttcgccgcccccccccgccgcgcggcgccgggggcggtcttgcggccccttcgctctcctctccccccggtccgcctccccgcgccctcctgccgcctccccccggccgcgtgctgcggctccttc

SEQ ID NO: 337975 - DNA, 374 bp, Zea mays
  unsure (1)..(374): unsure at all n locations
tctacttgctaggaggtggttacacacccgttaacctacccccgccgccttggcctcacgtgacgatgtcttgcacggtgaccatcccgaactcgccagtcttctcgccttcacgccgcccgctgtcctgcaaggccgctcccgcgtcgccggagcccgccgtcgccgtctccgcctcttccgcggcgcccgcgcccgccgccgccggttcgccgctccgccccttcgcgctccgcgcgctgctccngnaggaggtatttccgtctccatcgccccagctggcctctgccgcagcggtggcctcggtaccaagcggggccgtgctgaagcggcggcgacctgcgccgctccttgtgccggcgtccggcgcggcg

SEQ ID NO: 337976 - DNA, 448 bp, Zea mays
  unsure (1)..(448): unsure at all n locations
ggccganccacgcgtncgatcggcccctacgtcttctcctcctcgccctccgactcttacaccgactcctccgacgcggcttcctgcgcgcccccctcgctgcgcttgcgccccaacccctacgcgtggaaccgccgcttcgggctcctcttcctcgagagcccgctcggcaccggctacagcgcggcgccgtcgccctccgccatcccgacgacgcagcccgccgtggcggagcacgtcctcgccgcgctccagtccttccttnnnnngcagccggacgacgccacctttcgcgcccgcccgctcttcctcaccggcgagagctacgccggcaagaccatccccacggtcgccgcgctcattctggccgncaccaccagcaccaccaccaccaacccggctcttcccgagcacctgttcacgaggatgaggatcaacctgcgcggcg

SEQ ID NO: 337977 - DNA, 353 bp, Zea mays
  unsure (1)..(353): unsure at all n locations
gccgacccacgcgtccggatcaaanatagagatagagctgtattatttatcatgaagggtggcaagaagggggtgggcggggctgtggtggccataggtgctcttctgcaactcatggcagctccaccgacggccatggccgcccgctcgccgcacggagccgtgccggatggctccctcgccacgacgcccaaggtgacgatgctgtcggccacgctgtgctacacgggggagacatgcaaatacattggctgcctcactcctgcttgctcctgcaactatagtgatcgtctatgctacatcatatttactcctgttgcttgaggccattccgcgaagccacaactcttaca

SEQ ID NO: 337978 - DNA, 178 bp, Zea mays
gacatatacttaaccttactattttacaattttgaccatcatagctttcatggggtgctggggttgatagatagggttataataacatttaacagacacaggaacagtgaaattatacaccactggataaataagaaggtagtcatatacaacataaatgttatcaggatgtacgagg

SEQ ID NO: 337979 - DNA, 180 bp, Zea mays
cgacccacgcgtacggacaacctcacacctcactgtttatagctttttgtctctccttccccactcggggaaatgggacctgaacatacagtccgcgcaaactgctatgccctctctgtctattcgcgtccacttcttgtggcctatgctttgtaccggcgcatccgtgctcgatgcgac

SEQ ID NO: 337980 - DNA, 378 bp, Zea mays
  unsure (1)..(378): unsure at all n locations
gccagtaggatagcctcccagatctagctgttacggctgcctcttcctccttccccaattcgggaaagatgacatgaagatcagtttgtgtaaacgtgttgccctctctctctcttcgtgtccagttcttgttgcgtctgctttgtactgttgcagcggtggtcgatgcgacggcgggatgggcggatgaggggcctggctgctagatggtgtggctcacttctctttctgtcagntctctctctcatcctanggacttgttccgccgtatacatccatcaccgccgtcccacttncgtccatcgctgcgcgccgatgatgcgtcgccgtcgtcgtgcaggcggtgcagcctcacatcggtcgccgtggtggcagtgt

SEQ ID NO: 337981 - DNA, 347 bp, Zea mays
  unsure (1)..(347): unsure at all n locations
gcctcccttctatgccggagcttttacaattttgactcgcgcagcactccggtgagcctgggggactccctccctgccgctgggatggccaaggaaacgagttaccgaccgagacgggcaagactagggcaggcgccaaggtcgggctcccggcgatggacctatccctagcgttcccgcacgccacaccttcctccattttcccgccgtacgcttatgattattacccggatgatgatttgnnnaccagtgaagaacgctctaatatgatgaacgtcaagcgtctcatggcaaaagaaatagctcccattctgttatcgtacagggaaaacgcatagtttccattt

SEQ ID NO: 337982 - DNA, 77 bp, Zea mays
  unsure (1)..(77): unsure at all n locations
cacgcgttccgcaactaagataagatttcaccttcatcaagngctagacccccttccggccatgcatccattgcatg

SEQ ID NO: 337983 - DNA, 149 bp, Zea mays
ggcaagcgcatcgcctacaaacttttcgattttccgcgagctcccatacataaggtagatggggctatggcactgagggataggaaacatcaatggctctatttggtagcatgacgtgtagtgttcaactcacattattgcgattgctg

SEQ ID NO: 337984 - DNA, 374 bp, Zea mays
  unsure (1)..(374): unsure at all n locations
gcgaccacgcgtccggcaaggagcggatgctgtgggcgtccacgcattgcgctcttctgcggcggcaagcgcgacggggcctggggggtggggcagctgggcgagtggctctgacgtgccgcgctaccgtcaccgcgggtgagcggggcgcccggggggccgcccgttaccgtgcgccgggtgcgcctgcgcgacggtcgccacctgacctacgaggagttcggcgtgcccaaggaggtggcgcgctacaggatcatcttttannnnnngcttcgccagctcgcgcttcgacagcctccgcgccncncatgaagatagcgatgagctatgcgtgtacatggtgggcttaaaccgcgccggctacggtgagagcg

SEQ ID NO: 337985 - DNA, 174 bp, Zea mays
acgacgtctgatccctcttaccgcaccttcttgatgatctacccgttcgaaccccaaacccggccctgtgctgtatgctctgagatgattacaaaccatatggttaaccatcttactacacaacatggatgtttattcaagaatcgtcgccttctgcccatattcatcattcca

SEQ ID NO: 337986 - DNA, 444 bp, Zea mays
gaaaaacggccgacccacgcgttcgtcctgtctttctactcgtatgttttgttcccccctcatggttctcacggcaggttcgctactgccggttggattcctttcttctttcttgtttgtgcattatttattctcttggtaaagctggattgaagatggtttctccaggttgcacacaaaaaatggctcactgaagaggtaggttgacaatgattaggatcttgagaaaagaattcaacccttatattagtcagtcttctctttacaagtattttgttatcttgagctttactttaatgcatttaataactataatttttcccaagttttgctttatttttttatgaaatttgcattctcaaccctttgaagcttgttttgatttgttttggtttaaaattttatcacttttttttttgtcttttttatttttttatatttttc

SEQ ID NO: 337987 - DNA, 109 bp, Zea mays
ttaaaaaaaaaaaaaaaaaaaaaaaaaaggggggccgcccagaaaaattccggacgcggtccctgcacgcgtaccagctggcccgatactgagttgcataacagctcgc

SEQ ID NO: 337988 - DNA, 79 bp, Zea mays
  unsure (1)..(79): unsure at all n locations
agagctatgacgtcncatgccagccgtccgtagcctggaatcctttaaagtcgacaagctcactagtgacagcggccgc

SEQ ID NO: 337989 - DNA, 357 bp, Zea mays
tcgacgcggttattctgcaaaaacttcaacacgtccagaccgtcgtcaaaggtgccgacaatctgcgtctggctatgctctttaattagccagctcagttcctgttgtgccaggaattcgtcttcaacaatgatgactttcacaatatcactccggctcaaagcaataacgtagcctgtgaggcgactggggtgcgttggttaggaatgtaaaacgcaatttccgtccccggctccaggcggcggatatgcagcccctcgccatacaataacttcacgcgatgatggacattcagcaggccaattttattgcccggcatttcattcgctttgacccgctcaatcacctttggatcga

SEQ ID NO: 337990 - DNA, 389 bp, Zea mays
ctcgtagagagaaggaaaaatatccccgagccctagctcccgatctcgatggcgaaccctcgcgtcttcttcgacatgaccgtcggcggcgccccggcgggccggatcgtgatggagctgtacgccaacgaggtgcccaagaccgcggagaacttccgcgcgctgtgcacgggcgagaagggcgtgggcaagtccgggaagccgctccactacaagggctccaccttccaccgcgtcatccccgagttcatgtgccagggcggcgacttcacccgcggcaacggcaccggcggcgagtccatctacggcgagaagttccccgacgagaagttcgtgcgcaagcacaccggccccggtgtgctctccatggccaacgccgggcccaacac

SEQ ID NO: 337991 - DNA, 423 bp, Zea mays
gggaatggttggagacaaaacatagtgggagaataagggagtttagtgtagtaaaatatattaaaaaaatacagataaggggagatgtataggggaaatggttggagatggcatgagttcttattatcaattgggtctaaatttaatgtgtggtctttttgtttgatatttttttgttatttgtggccgaaagttcaaaagataaaaaggggaaaggggttgtgtaggctgtgacgttttttagtgaggttgttgtccttttatttatgttgcacgttgaagttgcttatctatgaatttgccctgtatgatgcacgatgctgtgctgtctcctgtaatgcaaggttgaaagatgtgaaattgtgtttcatggtttttttattaccccctaccctacaacacgtatatcttgttatctgattt

SEQ ID NO: 337992 - DNA, 228 bp, Zea mays
ccgtcatcgatctcgtttcaaatccatcgagcctcgtttcctccgtcccgcagcatctcaaccccatggccaagatcaagatcgggatcaatgggttcggcaggatcggaaggctggtggccagggtggccctgcagagtgaccatgtcgagctcgtcgccgtgaacgaccccttcatcagaaccgactacatgacctacatgttcaaagaccacactttgcacggac

SEQ ID NO: 337993 - DNA, 427 bp, Zea mays
  unsure (1)..(427): unsure at all n locations
tctttaaaagccgaccaacccgtccgaaagagctaagctagattcatggcgctgctgaagacaggctccaagagcactctggttgtcgccgtcgtatggctgctgatagcaatccttgctacggctgatggcgctactcaaaagaagctccaaggggcctgcgaaaaaatagtgaaaggcgcctgtagtgagaaggtctgtggcggaatgtgcgctatgataggctccaacgctgttgggtcatgcaaggtcgatggccgggtctcctactgctgctgccaacaaaaaacccccacacacatcggtgtccactagctgggatctagcttgctttttgatccagacgtatgattgttgaactgaaatttttcgttattataagcaaagtgtatggttcgtgattggtctacaaataatacantgtacc

SEQ ID NO: 337994 - DNA, 381 bp, Zea mays
gcgcagaagaacccgatcgacaccatgagggtgttgctcgttgccctcgctctcctggctctcgctgcgagcgccacctccacgcatacaagcggcggctgcggctgccagccaccgccgccggttcatctaccgccgccggtgcatctgccacctccggttcacctgccacctccggtgcatctcccaccgccggtccacctgccgccgccggtccacctgccaccgccggtccatgtgccgccgccggttcatctgccgccgccaccatgccactaccctactcaaccgccccggcctcagcctcatccccagccacacccatgcccgtgccaacagccgcatccaagcccgtgccagctgcatggaacctgcggcgtt

SEQ ID NO: 337995 - DNA, 395 bp, Zea mays
  unsure (1)..(395): unsure at all n locations
attagctttatctactccagagcgcagaagaacccgatcgacaccatgagggtgttgctcgttgccctcgctctcctggctctcgctgcgagcgccacctccacgcatacaagcggcggctgcggctgccagccaccgccgccggttcatctaccgccgccggtgcatctgccacctccggttcacctgccacctccggtgcatctcccaccgccggtccacctgccgccgccggtccacctgccaccgccggtccatgtgccgccgccggttcatctgccgccgccaccatgccactaccctactcaaccgccccggcctcagcctcatccccagccacacccatgcccgtgccaacagccgcatncaagcccgtgccagctgcagggaacctg

SEQ ID NO: 337996 - DNA, 80 bp, Zea mays
  unsure (1)..(80): unsure at all n locations
agaagagctaacacgncatgcgcgcgcacgtaaacctggaatctttaaaagccaacaagctaactagtgacagcggccgc

SEQ ID NO: 337997 - DNA, 195 bp, Zea mays
  unsure (1)..(195): unsure at all n locations
tgtctgataacaaattatactctaactgacgatgacttttgaagcaaagagggcttacttataccnaatcttaccccatatttttcttgttttcaaaaaagctcagttatgttcctgtacactcggactcagtcctacatttaatgattcaaatggaatccatattttttcacctaaaataaatttacaatatat

SEQ ID NO: 337998 - DNA, 189 bp, Zea mays
tagtctacccacgcgttctttaaatcctctcctctactattctcacaagcatgttttaatacttccaaggcctttcacatatcgtgtgcttgtcccacatcacacgccactccacaacgtcattaactactaattcacctaccctggcatcgacttctctaaactcaccaacatcaccttcatcttctt

SEQ ID NO: 337999 - DNA, 334 bp, Zea mays
cagcgcacccgtgtggccgtcaggcgtgggatgcaccacctccgtcgcctcgtccgatctcccctccgccacgtccctccccgcgcggcattctccggcaggccctccgtttcccacggcaacgacgcgtatggtagctcccacgccgccgcttcagacgcgatcgcttgcctcgtcgtcgcaggcggcggaggcctcgaggccgacctcgaccgtctcttctcagccgtcctttcccacgggctcgtctgcagcgtccttcgagcgctcacggaccggggcgtccccgctgagcggttccttcgcggggccctaatccctcgggaggggcttt

SEQ ID NO: 338000 - DNA, 222 bp, Zea mays
ccccccttcggcttgcgaggaggcggatgggaggcggtacgtggtactggtcgtggtagggcttacaggagtgctctgtccatggaaaaggcggggcaacaacgccatgtcatcggcagcttcggcaataatgcgcccgtgctggggctgcaaaatcagaactcgttgtcgacatacatcgagcgcgaccaggcgtgggagcgccggcacatgtgcatgcgc

SEQ ID NO: 338001 - DNA, 105 bp, Zea mays
tctttcctctccactttactagtcggctgtcgagacatgtttcaccatcccggttgccccctggtatacggctgcgctctctgactctcaaactgttggcgccca

SEQ ID NO: 338002 - DNA, 282 bp, Zea mays
gtgacactatagaagtgcttgacgtcgatgcacgcgtacgagctatgacgatcctgtacacgtgcgtcagctcggatgctgttgagtataccaatctttcgatgagactaggtgacatcagctgcctactagaagcatcagatgcgcatggcatatcaaactttcgcaggccgctagtgctacactctacaccactatgctgtcgtgctggctatgcatgcgcatacacaactgtatatgcttagtgctactcttcgccggcggttccttttcttcttcccc

SEQ ID NO: 338003 - DNA, 290 bp, Zea mays
acgttaattgttgttatcgcaccttaataaattcatgtttagcaaaaaaaaaaaaagggaaaaaaaaaaaaaaaaaaaaaagaaaaaaaaaaaaaaaaaagaagataataaagaaaaaaaaaaaaaaaaatgaaaaataaaaagtaagtcaaaaaaaaaaaaaagtttatatatacagagggccaagagttagttattacataaaggaggaattgaattaaggcaaaattgggggggtatccttgatataaaagagtcgttaagctttccaattgaaatatttttccatt

SEQ ID NO: 338004 - DNA, 406 bp, Zea mays
gtccgcgatcggagaagatggtgcgcaaggcaaaggttgagttcgatgagcaggcaccggataacttcgacccgaagaacccatatgcggacccggtggctatgctggagtaccgggaacacctggtgcgggagaagtggatccagatcgagaccgccaagatcatccgggagcgcctccgctggtgctaccgcatcgaggggatcaaccaccaccagaagtgccgccacctcgtggaccagtacctagaggctacacgcggcgtgggttggggcaaagatgcccgaccgcccgagttacacggtccgaatcccttcatgcctcgtcttaccctttgatcggcatgatcgataggtctatatggctgcttcttctctggttcgcagagcccaagaagatcatcgag

SEQ ID NO: 338005 - DNA, 358 bp, Zea mays
tcgacccacgcgggcgcgcaatgggaccgggtccacactacgctgatgcgccatggtaacccgctcccggggaaccaacttgctgacctggcggctatgctggagttctgcgaacacctggtgcaggagaagcgcatccagatcgagaccgacgagatcatacgggagcgcgtccgatggtgctaccggatcgaggggatcaaccaccaccagaagtgccgtcacatcgcggaccaggacctagaggctacacacttcgtgcctaggggcaaagatgcccgagggaactagttacacggaacgaatccgttcatgcctggtcttaccctttgatcggcatgaacgataggtctatatg

SEQ ID NO: 338006 - DNA, 111 bp, Zea mays
tcgtcttcaagaaggaaaaggtgttccttgccggccatgacgagtatatcgtgaggggagtaaaagatctccaccatgtccaaccggaagttctttttggaatcaaacaca

SEQ ID NO: 338007 - DNA, 276 bp, Zea mays
tttataataaaaaaaaaaaaaaaaaataaaaggggaaaaaaaaaaaaaaaaaaaaaaaaaaaaaaagggtggaaagaccaagaaaatataaaaacgaaacatacaagcgggccaactttccgtgtagggaggtggatttgagcttgggggaattatgggcatagttgtttcctgagtgaaattgttctccggttttattatcacactatgtttgatccggttttgtacagtgttaattctggggtgcttaatgagggggcttacttacattaattg

SEQ ID NO: 338008 - DNA, 172 bp, Zea mays
  unsure (1)..(172): unsure at all n locations
tttattaatgggggtattatttttntttataagggaaaaaaataaaaaaaaaaaaaaaaaaaaaaagggcgagttaccaagaaaaaaataaaccgaatcctacaagcggtccacctttcccttttttgaccccactttgtttgttgtgcgaactcatgggcatatttttttt

SEQ ID NO: 338009 - DNA, 144 bp, Zea mays
tggggccactttacccaaacgccaacacggggagccccttatacacagagaacatgcgcacaacgcgcagaaagcgcccaacgtgattaatgctcctcacgagaagaagctttacgtggttaagaaggcagcagcgcatcctcc

SEQ ID NO: 338010 - DNA, 94 bp, Zea mays
tcctgacccgagcaccgacgccgctgtattctgtcggtgccgacccactccccccagaccccaggagggggagccgccttatacacacggaact

SEQ ID NO: 338011 - DNA, 176 bp, Zea mays
ccaacaaactactaacctgcccgaagcgggaggcgtacgtcgcgtccgtgggagcacaccctacaactgaccagaaggatgctaccagcactgaggacgactcaaaggctttagctagtgcggcgcacatacttcgcgaagttctccagacctttgacagtgaacgctgtaccggg

SEQ ID NO: 338012 - DNA, 189 bp, Zea mays
cgatggaggcgccggacgaggaggccgggctggggctccctgaaggcgagcggcttctggaggtggccctcatcttcgggcaggggctcaagcccccgtccggcgtgcggcggcggctgcaggcgtaccccgtggcctgggtcgacgcggggcacaagcttcagacccttcccgacgccacgggcgggc

SEQ ID NO: 338013 - DNA, 182 bp, Zea mays
tctacccacgcgtcttttaaaaatgcaaaaatttcttaacttggtgtggtctttaactagtaccacgcgcatttataaattgattcccattcattcgatcacaaacactttattgatcaccttcctcattcaattcccaacatccatagtctctatatcgcctctaacacaatcactcatac

SEQ ID NO: 338014 - DNA, 266 bp, Zea mays
ctcgcgtacgcgacaaactaggccgaccggcgccgccctacgctcagctgcccacctgccctggtcttcgactcttcgtcgtgcgctttgccggcggcgagcacccatcacaccaggatggcgctaaggggggtctggcagctgcagaagctcgtggtaaactactgcgactggggagggagcagcaggggcatcagggccttcatggaggcacatcttccagcctttaaggaaaagaatccacacttagaggtggtgacagagct

SEQ ID NO: 338015 - DNA, 274 bp, Zea mays
tctcgtttcaaatccatccatcctcgctgcctccgtcccgcagcatgtcaaccccatggccaagatcaagatcgggatcaatgggttcggcaggatcggaaggctggtggccagggtggccctgcagagtgacgatgtcgagctcgtcgtcgtgaacgaccccttcatcagcaacgactacatgacctacatgtttctagtcgacactgtgcacggacagtggaagcaccatgaagtcaatgtgaaagactccaaaacccttctctttggtgag

SEQ ID NO: 338016 - DNA, 290 bp, Zea mays
gcgatgtaacctaggacaacgccgtacgacgaaacgcatctaggagagcacgcgagggagcgaccatggggcccaacgggaagaagaagagcatgaggaggctcatcagcaagcgcacaaagatgaggcgcacatccaatgtaggcacatcgacgatggactgaggacctgatgacatgcgagggtacatgcatttgttacgatgcatggctacgcctgcagagagattccaccctagcacggaggcacggttcgccttcagctgaacgggatgactgcacttaagacgg

SEQ ID NO: 338017 - DNA, 330 bp, Zea mays
tctcgtttcaaatccatccatcctcgtttgctccgtcccgcagcatctcaaccccatggccaagatcaagatcgggatcaatgggttcggcaggatcggaaggctggtggccagggtggccctgcagagtgacgatgtcgagctcgtcgccgtgaacgaccccttcatcagcaccgactacatgacctacatgttcaagtacgacactgtgcacggacagtggaagcaccatgaagtcaaggtgaatgactccaaaacccttctctttggtgagaaggacggtgctgtgtttggctgcaggacccctgaggagatcccgtggggttcggt

SEQ ID NO: 338018 - DNA, 358 bp, Zea mays
cctctctcccgcaaaccccgcgaccgcagtcccagccgcccctaatctcctctctccacaccccaaatcgccgcccacagatctcgccgacaccagcgcagtgacccagcccccgccttccccatcgtgatagcagcgtctcctagacgccccctccccttggcctcggcgcgatgcctgcacagctcctgtctgccgcgtgaggaggcgccacgacacgtgcttgtgtggctgtcgacgcgaaggcacccgtgatctgcgtcgactctgaggaggagcgccgcctccttgagatccaggaggtcgaggtggctacggcgcgtactcgtacggtggtcgagagtgccgagctcgcgac

SEQ ID NO: 338019 - DNA, 131 bp, Zea mays
gacgagaagctcgacaagcttcgcgccgaggtcgccaagctcgaccagatcagcgagaacgaaaagtcccggttcatcaaccttgtgtcacgctaccttagtggggaaaccggagcaagatcgagtggagc

SEQ ID NO: 338020 - DNA, 268 bp, Zea mays
ccggctgcgaagaagccagcggaggaggagcccgctgccgcgaaggccccggcggggaagaagcccaaggccgagaagcgcctcccggcggccaagtcgtccggcaaagaaggcggcgacaagaagggtaagaagaaggcgaagaagtcggtggagacctacaagatctacatcttcaaggtgctgaagcaggtccaccccgacatcggcatctcttccaagggcatgtgcatcatgaactcctttatcaacgacatcttcgagaagc

SEQ ID NO: 338021 - DNA, 231 bp, Zea mays
tatcacccttgaggtcgagtcttctgataccattgataatgtcaaggccaagatccaggacaaggagggcatccctccggaccagcagcggctcatttttgccggcaagcagctcgaggacgggcgcacgctggccgactacaacattcagaaggagagcaccctccacttggtgctgcgtctcaggggtggcatgcagatcttcgtgaagacacttactggcaagacgat

SEQ ID NO: 338022 - DNA, 203 bp, Zea mays
cggacacctattattttagattaaaaaatggggggctccaagaaacctgagcatgagattctcactgacactgaaaaagaacggacgttgattgcttcagggcttacaacaacttgaactactaatgctgtttttgagcaatagattgagttacagagtgtcttatttgctgaggacatgcagttggcggctttctttaatga

SEQ ID NO: 338023 - DNA, 362 bp, Zea mays
  unsure (1)..(362): unsure at all n locations
agctgatccttaagtcaccacgcgtcgcggaccgtgggcgacaaactaggtgggtaccgccgacgcgcgcgcgccgccgcccccgtcctactgcangtgcgaggccttcatcggtatcttaacaagcgacgagcaaccaggctggactctaccaagggggggccttccggcaccggttccgggggcttcccggggctcttccgggccaaatcgtgcttggcttgttaaccgaacttcaacttgtttggccggttggcgccttttaatgggcttcggcaaaataagaaccggattcttaacggtcgtgccaaaggtggcactggcgtgcaaaaaagcaacacttgtgatgaatgaaccaaaaa

SEQ ID NO: 338024 - DNA, 188 bp, Zea mays
aaagtcaacccacccgtccgcccttttctttaaattaaaataaaaaaatgggggggcccaaaaaccccgcgcagtatatttttgctgactacttaaatgaccgtccgccgcatgcttcagtgcatacaacgacttccacatctgttgctgtctttgatcaatcaactgagctacagactgtctaattt

SEQ ID NO: 338025 - DNA, 137 bp, Zea mays
ttgaatcctttaaagtcaacccacccgtccgcccaattttataattttaaataataaaattggtgtcaccaaaaaacccgcgcattatatttttactcactttttaaatgaattatcgctatattcttcaatatttc

SEQ ID NO: 338026 - DNA, 156 bp, Zea mays
ccttccggaactttttgttaacattttaaggaaactgggattcgatcctctgggtcggaaatgattctacaattctacttaccaaagtaaggtttatgacgaatatgattgtttaccttacaatgatccattttaactacttgatgatgatttttt

SEQ ID NO: 338027 - DNA, 340 bp, Zea mays
caaactcttgtgccacatctaaagacaccgcggcggcgatcctcctggtggtgagctactctaccaatctacttgacaaaataaagattatgacgaatatcgtagcttaccttacaatgctccattataactagctgatgatgattatttagtcttcttctatttcacagaaatacccatattatctgcataaattttccactaacctcaagactaacttctgaaatctaacgtcacaagttaggatcaagagcattcccaacatcagcccaatttgtctataactaggtacctggatatcctatgcatgcttagtgctgtccacaatccactactaatt

SEQ ID NO: 338028 - DNA, 91 bp, Zea mays
aaattttcttagcaacaaataaataagtgggtaaaattaataaaggggcggtaccttaaattatataaacacaaccaatgtttcctctcaa

SEQ ID NO: 338029 - DNA, 375 bp, Zea mays
cgaccccccaataattgaccgccgcctcctggcggcccaccttctcctattataaggagtcttataacagctcgtcatcatcatcatcatagctgcctgctggaaaaaattatcctctcataacaacacaccacatcctacccgccggcatcataaagagagcctcctgtgccgcctaaggaatcatcctaccatcattaactgcgcgctgactactggctgttcaccaggcaaaccacccgtgccacctgctttattaaataatccaacaccccgcgagaagcggcttgcttattattcgccaccatggttgttttttttatcaccaagacgaccaacaactgattatcgttcatcacctgctcctcataaaag

SEQ ID NO: 338030 - DNA, 173 bp, Zea mays
  unsure (1)..(173): unsure at all n locations
aagtcaacccacacttccgctctacttttttccccctatctccactccctcgccaaattttaaaacctcctcgcctccacncactcactatccaaacacttactatactctctatacacatcctctctacactttacctccacctactatacaccttttatacaattccttac

SEQ ID NO: 338031 - DNA, 212 bp, Zea mays
ctttctttgatgcttaaaaaaaagcaagacgcttcctcttgttcccatgaaacttccatcgggacccatcaccaaacaccactagagctaggaattaaactacaacttaagtgaatcgtagcccattttattttaaactacgcattggtacccacactttccaaattgtaaaatgcgttcacgaacacaaacacaaacttatctcataaccg

SEQ ID NO: 338032 - DNA, 247 bp, Zea mays
ctcctttcgctcttacaacaattaacgcgcgcttattttaatgcgactccattctactattgatcctcacatcttattacagctattcaaattaacttatacttcaattgcattatctttaaactacaactcaccctcatctgatctactatatataatgatatgtgcacttacatattattcataatatcactaatacctaatcattttacatactaactttatttacactgtttattactctatt

SEQ ID NO: 338033 - DNA, 179 bp, Zea mays
accatttcaccatctcgcagatacaatgcgcgagttatatctcctctggcgccatggcgctctatgcgcagaagacctgatatggaccggagtacaagggtaaggatctctaacacgcgaactgctttcgccttaagattgaactgtccgacggagaaatgcccaccctaatggcgtgc

SEQ ID NO: 338034 - DNA, 102 bp, Zea mays
tcgacccacgcactcgggacgtctgacggcctgtgaactcctggggggatcctctaaccgtgaccgggtactcctactcctaggaggataagaactaggagg

SEQ ID NO: 338035 - DNA, 320 bp, Zea mays
  unsure (1)..(320): unsure at all n locations
ggggcgggggggccgggggcggcggggggggcgggggggggggcgggggcgcggccaccgcgggggggggggggggggcgggggggggggggggggggggcggggggggggggggggcggggggcggggggggggggggcgggggggggggggggggggggccgcgcgggggggggggcggggggggggggnggaggggcgcggcggcggggggggcggggggccggcggcgcgggggcggcggggggccgggcgcggggcgggggcggggggggcgcgcggcgcgggggggggcgggcgggggggggggcggcgggggg

SEQ ID NO: 338036 - DNA, 222 bp, Zea mays
  unsure (1)..(222): unsure at all n locations
acaaaaactannatcctctaaaatcnacccactcatcctctgctttttcctcactctctacacctctcgcgcaatttttaatgcccgcccggccccaaaccaatcatatcacatccatattcttatcttatattactcactctatacatcttcatcttctttctccctacatcattttttatttccttccaccttttattattaatacttttaacccctttt

SEQ ID NO: 338037 - DNA, 290 bp, Zea mays
cccattttcggaacgaacaaattaccatcggatcccaactccggctggagcgggtctagttggactaagatccgtccgatcaccccgcgccgacataaatgaaagaagatggcagatgccgacacattactttgcacctctgattctgcgaacgagggacaccatgacaagctatatgaccaggtctgacatgccggaattgacgcttgacttgctgaagaccgtgacagctaggatgcttgtgatgacctgcaccaataccacacatggacatggtctttggagagatc

SEQ ID NO: 338038 - DNA, 84 bp, Zea mays
aatcttttaaagtcgaccaaccctttcgggcaagtagtgcaggaagacctaaaaccggggtgtgcggaggcttgcgacgtttac

SEQ ID NO: 338039 - DNA, 212 bp, Zea mays
cagggtaccagtaatagtgggcgcttccgggggactgtgccggtcgggtcatgctgtctactcaacatgcgcctctggatagaaagtgccgtggctgcgccgttggctggtatcatggagtctggctccagatttagtggttgtacggggttcgactactaagacggcgttattactcgctgtgaggtctccttttctatctaagatttgac

SEQ ID NO: 338040 - DNA, 269 bp, Zea mays
  unsure (1)..(269): unsure at all n locations
agacgacccacgcggccgggaacaaccnggngccggaagggagaaaggggagggcaaacaacggggggggggcgaggcaaaacagangcccaggagaagcaggaggaggcaccaaagaaggcanacgccgcaanggccaaaggcaagaaagaagggcaaggccggcgccggcacacacgacgaggacgggaccggccaaaccagagaagcaggcngccgggcgaggacagacaaagaagggcggacagaaaggacaaaccgggagaacg

SEQ ID NO: 338041 - DNA, 131 bp, Zea mays
  unsure (1)..(131): unsure at all n locations
acgacccacgcggccgggagnncaagaggaagaacaagaaggaggggacnggcaaccccagggcgcgccggaggcngaggaccgcnnggngagagggcgaagaggacncnggcnnccacggcccagaccac

SEQ ID NO: 338042 - DNA, 297 bp, Zea mays
cctggaatcctttaaagtcaaccaacccgtccaatcgcaacggccgccctttttttttttttgtgtggattataaaattgggggtgggtttttttttttttttttctttttttatattttttttggttagaatattttttgaaaaattcacttgggaactatcataccattaataaaaaaagtattaatacatcaatcaaaaaaacgataatataaatgactgttaaaaaaaggtaaaaataaacagttggactatcaccaaaaaatgcatggtctaaaaaagaacaaatgtgaaaa

SEQ ID NO: 338043 - DNA, 266 bp, Zea mays
  unsure (1)..(266): unsure at all n locations
gacccacgcgnccgncncgagcgacgacncgganacagccgccgggcgacgccaggnaccagggcggcgacgggcccnacnccggcaacgagcaccaacaagaaggggggggggaaagaagggcgagcaccaggcactgggacagcagngngaaangaaaacacggcaagcangagcncgcaccgggggaagnggaangaggacaannnggangaaanggagncaaacaaaccggngaggcagaagaaaacagagccaaagacacc

SEQ ID NO: 338044 - DNA, 315 bp, Zea mays
attacacctgtaccatttattcggggagctactattgttacgacgcctcctattctaatcacctttcttccaaccaacctaactactgtggcgaatactgttgatatgcaccctgaggcgcttcatgacgctcttacgatcaacaatgtttgtttcaacgtgaaaaacaattatctcaatgatctgcatcaagttttctagaacttcaactccaacgtttaccctgccaagtaacatgctaggttcacctacaaggccatcatcatcaaccatctctttcacattggcatcgacatatccctcactgcttgactc

SEQ ID NO: 338045 - DNA, 170 bp, Zea mays
tcgacccactcttccgcaccgttacataacctacagccgcctgtttactggctcggacatttaaactccatgagtcaaggtcaaccactcaaaccctttatttactgagaaggatgttgctgctttgactttataaccctgagatatcccagtcgttccctaccctaata

SEQ ID NO: 338046 - DNA, 361 bp, Zea mays
gcggcggcgatgcagcagctgatccgcggcgaggtgcatcggtacatggcgagcgcgggcctgcgcgccggctgcggcgccgttggcgcgaccgacctctgcatgccgcagctggtggacggcgtcatgcgcgctgccgccgaacaggtcggccggatgcagtagccccgcgcccccggcgggggcatcaaaccgtcagtgctcccaaatcgtcgtctagctagggcgaccgcaacgcaacggttgttggagtagcaaacttggttttaaggtggagggaaaaattggctgggctgaaagcagaaagccttgtaatgtacatgaaagaaacggaacggatggcgcgctacaatctgagcta

SEQ ID NO: 338047 - DNA, 390 bp, Zea mays
gtcttcagaccattagctttatctactggagagcgcagaagaacccgatcgacaccatgagggtgttgctcgttgccctcgctctcctggctctcgctgcgagcgccacctgcacgcatacaagcggcggctgcggttgccagccaccgacgccggttcatctaccgccgccggtgcatctgccacctccggttcacctgccacctacggtgcatctgccaccgccggtccacctgtcgacgccggtccacctgccaccgacggtccatgtgccgccgacggttcatctgccgccgtcaccatgccactaccctactcaaccgccccggcctcagcctcattcccagccacacccatgcccgtgccaacagccgcatgcaagcccgtgcc

SEQ ID NO: 338048 - DNA, 376 bp, Zea mays
atccaccaccaccaacggcgccgcagcccccacgcaatctcaccggaaaaacgcctcctccagttgagctgagcctgagctgcagctgagccgccatgtgcccgcggacccactgagccaaaacccctcgaccccgcccccactgcaggccgttccctttccaagatccgcgctttgatccgtccgccgccgcccgagaccatgccggccacggacctccagggctcctccccgttctcctccttcggccgcaccctcctctccctccgccgcgacgccccggcgtccgcgtccgcggcggctgcgatgccgccgcccggcgtcgacccggagctcgaggagtttcacgcccacgtcgccgcgcaccttgcggacc

SEQ ID NO: 338049 - DNA, 315 bp, Zea mays
gttcgtgttcaggttctggttcgtggccgagagggaagagatggcggcgtctgacgttgagtaccgttgcttcgttggcggcctcgcctgggccaccgacgaccactccctcaacaacgccttcagcacctacggcgaggtcctcgagtcgaagatcatcctggatcgggagacgcagaggtcccgcggcttcggcttcgtcaccttctccacggaggacgcgatgcgcagcgccatcgagggcatgaacggcaaggagctcgacggccgcaacatcaccgttaacgaggcctagtcccgcggcggccgtggagg

SEQ ID NO: 338050 - DNA, 347 bp, Zea mays
gcactgatgagtttaagcaatacgacagtctatatgtgggtaacaggagacacatatggtcatgttcttgatcatatattgatgaaaacgttcataattgatgttgctgatcctacattgatgaaaacttcacaagtattatatacccatgctgtatatgacattgcattgttgacacttacctaatagcttttattttcacacttcttttcatcttttgcatgctttgaatcctaattgcctttgtcctttgcatctgctttcctttcccagcttcttcttaaggcctagtgcccagattctaaactcatcaaggtgttactaatggatttacccaaggaggactt

SEQ ID NO: 338051 - DNA, 245 bp, Zea mays
tcggcacgacctcggttcacggacgcgcggcggatgcggcggagtacgactgctatctcacctccatcttctgggactgcctccagatcgaggacgccgacgatccgctcgctgcctcccccgccgaggagttcgagtgggaggaggtcgcgtctccatcgggcgccgccggagaagccctggagcccgagtgggaggtgctcgtcgacttgccttccgcctccgtcgatgaggggttcgtgtac

SEQ ID NO: 338052 - DNA, 161 bp, Zea mays
tattctacccacgttctcgcacatccagaaaacataaagcgggggctctaattcaacgcatagccgagccaaaaaaattactcactaccacccctaatcctcttacacttaccaaaacctcaaagctgacttctccagccactcctccttccctctcaaac

SEQ ID NO: 338053 - DNA, 218 bp, Zea mays
tttctttatactgactttattattaattttgtaataaacgcatttaatctggcatcattagactttctctttgatgaactggactcgttttgtcctgtttatgatttatgttgtcttgcgtcttatatcatatgttcatatcatttttcgttgccttaaacaaaaggtgtttttttaactgttttaatttactcacaaattgtatcaaattttgtaca

SEQ ID NO: 338054 - DNA, 373 bp, Zea mays
gtgtctgccgaggacaagacaacggggcagaagaacaagatcacaatcaccaacgacaagggccgtctctccaaggaggagatcgagaagatggttcaggacgctgagaagtacaagtctgaggatgaggagcacaagaagaaggtggaggccaagaactcgctggagaactactcctacaacatgcgcaacacgatcaaggacgagaagattgcgtccaagctgccggccgatgacaagaagaagatcgaggacgccatcgacgcggccatcagctggctggacgccaaccagctcgccgaggcggacgagttcgaggacaagatgaaggagctggagagcctctgcaaccccatcatcgccaagatgtacc

SEQ ID NO: 338055 - DNA, 259 bp, Zea mays
tcgagacaaagcgcggacggaccctttgaccgtccaattcgtgagctttggcgtctgtgtattttaatcgggagctgtatgctgtagctagctagagaggtttagagcagcacccaaatggtgagcaaggtggtggaccttcttttatttcatgtctacttagccttttttagttattctttctaccttggcttcattattatgtgacttttattatttctttctcttccttcttttattattttatttttttttgttt

SEQ ID NO: 338056 - DNA, 309 bp, Zea mays
tagtctacccacgcgttttctctcaactctttcctcaaatacagcacgcttcttttattaacagagggggctcttatatatcttttcccttacttttctaatatctccttactttatatcctagtcacacacaatacatctattactcttattttgcaatattcttactccaacttaactttttatcttctttccatattctattccaaattttttatttttacattttatctcttaactttaaattcttttctatcaacacttatctaatttttctatttattttttttctaacattctttttttttt

SEQ ID NO: 338057 - DNA, 241 bp, Zea mays
ccgcctcttcctaatccgcctgccgcggcttattctccgccgtggaggaaggatcaactcgatcgccagtcatgacccggtgagagaaccaggattcccataccgggaacgtcttcgccgcatctgcggcttctcctggaccgaatccggcatcttcggttgccggtaagggcgctgagggccattctgtggtgcggccgctgcagtctgagctgattgctctgattatgggcggagaccc

SEQ ID NO: 338058 - DNA, 366 bp, Zea mays
accccctttgatccgagcgcagccgggcgagaccatgccggccacggacttccatggctactcccggttctcatacttctgccgaatcctccttttcttccgtcgggacgacccggcgatcacgatcacgacgggtgctatgccgcagcctgtcgtctacctggtgctctaagattcatacgcccacctcgacgcgcacctcgcggacctgatcagtcatcgcgctgatcgtgatgatgagttcatgtccatcaagcagatccagcgcgagttgcactcgcacctggtaacacatgatgagttcccacccgcggatgtcgaggaccgctcgagccgctcctacgcgcttcggcgcccagcattgat

SEQ ID NO: 338059 - DNA, 277 bp, Zea mays
ggcctacctatcccgagagacctcggggggccccttcttatccgggggcgtcaacattcaccacccctaccactaattcggccgtatcctacataccctacgatgttacgaccacctgacaacaaccgtatcgcttttgtagccccacatccaggtgtacaagaagctaatatatatcctcgtccacatgaaccccctgatcctggatgaaaacaacccacatttagattggatgtactaataaatttacttacagtttatcatagagctatttaat

SEQ ID NO: 338060 - DNA, 384 bp, Zea mays
ccgtcatcgatctcgtttcaaatccatcggtcctcgtttcctccgtcccgcagcatctcaaccccatggccaagatcaagatcgggatcaatgggttcggcaggatcggaaggctggtggccagggtggccctgcagagtgacgatgtcgagctcgtcgccgtgaacgaccccttcatcagcaccgactacatgacctacatgttcaagtacgacactgtgcacggacagtggaagcaccatgaagtcaaggtgaaggactccaaaacccttctctttggtgagaaggaggttgctgtgtttggctgcaggaaccctgaggagatcccgtggggttcggttggtgctgaatatgttgttgagtctactggtgttttcactgacc

SEQ ID NO: 338061 - DNA, 329 bp, Zea mays
tagatcgcgagcgggcccttttttggttttttttttttttttttttttttttttttttttttttttttttttttttttttttttttttttttttttttttttttttttttttttttttttttttttaaaaaaaacccacctaaaaaatttttttttttttggaatttttaaaaaaaaaaaaaatttttttttgcccctttttgaaatattttttatttttacggtttttttattacccttaaaacattaaaagctaaatcacattctgcacattttttctgaaaaaccccttttaaaaaaaaccaaattcttttatttccaaaaagctt

SEQ ID NO: 338062 - DNA, 113 bp, Zea mays
acataactttatcctttatatccacccattcttttcttttacaaatcactcatttcgcggaatatatccatgaggagccaggtctcattattatccatatttttactcctcct

SEQ ID NO: 338063 - DNA, 308 bp, Zea mays
ccgcgtactaagctgatccttaatcacccacctccacacctcctcaactggcgactattcttactgagggcggtataactgctcatccccgctaaaggaggacggaacgacataggtcgtgctcctgctttctgtcgggtcgggctgctggactggcgcaccggcagcgcactttaccagacacaagatacctggcgatgcggcaaggtatggacggggcgcgctggacctgacgctggaccgactcggctcggttccatccaagacgagacctgtcgcaagatcgacatgcagataagctgggccag

SEQ ID NO: 338064 - DNA, 104 bp, Zea mays
  unsure (1)..(104): unsure at all n locations
gacgancaagagcggggggggacggcggagagggggagggggggaaacanccaagacaccgagcagnanaaacggaaacacggcggggcgcgncacaaaggagg

SEQ ID NO: 338065 - DNA, 395 bp, Zea mays
  unsure (1)..(395): unsure at all n locations
ggcctacctcgccgcggaggcctacgtgggcgccaccttagccggccgcgccagcaggctccgcgccgagctcccgggcggcagcgaccgcgtcagcctcgccgtcgacgaccacgtcgaggtcaccgacgccttccgcggcgcccggatgcggtggcgcaagacgcggacgctccgccgcggcaacgtgatcgcctggaacccgcgtgaggaggagcgccgcgcctactgcctcaccttccaccgccgccaccgcgcgctcgtcgaggccgcctacctgccgcacgtcctcgccgagggccgcgccgccaccgtccggaaccgccagcgccgnctctacaccaacaacgccagcggggactggggcggcggcgacgacgggccccgcgcctgga

SEQ ID NO: 338066 - DNA, 303 bp, Zea mays
gccatctgtttacccacccccaccgacgcactctagtcaccggcggcccaagcctatctccgaccaccgcatccatgtttttcgccgccgcgctccaccttcaccccaccttcggcacgacgcacccgcacctccaccaatccacccgcaaatcgtacttccttcgcttacagccgtctcgccgtcgcctacccgtcccgcgcctgttcctcacgcccaccaccgccagcaatagcaacagctctcctcccccaccgtccccttcgcccgcccccgccgccccgggttccctgctcgccaact

SEQ ID NO: 338067 - DNA, 211 bp, Zea mays
  unsure (1)..(211): unsure at all n locations
tattccacccactcttccaatctaactactacctaaaatagcggcggttttttatacatctccgtcctaaatttcaccgttcatactcattactcaaatcttcattccattatttctgcttaacattacccaactacttcctctacaacactttgatacttaacttcacatttatcatgttcttttcctacacccanatcattttcaaact

SEQ ID NO: 338068 - DNA, 216 bp, Zea mays
  unsure (1)..(216): unsure at all n locations
gcgctctctacccctattcctctttacctttncccggggaaagggcgcataggcccaccaggaggaaatttttttttccctacctttttactaccctcaataaaaactccaccccctttgctcattacttatacatccattctggagtcaatttccttttaaattaacaacttaaatattgaacttcttttatcccaactgatctgtaaggacatt

SEQ ID NO: 338069 - DNA, 386 bp, Zea mays
taatcaacccactcttcctctcctcccctacgcacacatttttggggaattcgagctatgtgggctcgtcttctcatggcatatttcaagacaacaatcatcctagccctaattttttttatcttctcttcaacatttccttcctacaaaaccttacaaatcttcattttcttcttgtatcaacaactatatgctacaccattcgttgaccctcttattaactactctgaccacttcactacctctacattcgctttttaatgcctatcccccattcacaaaaccaaatcatcctacttcatacattatgtcaacaaattctaatttcttcttccctccattaaaacaaccaatctataacatccgttgtgtgatacactcaatta

SEQ ID NO: 338070 - DNA, 249 bp, Zea mays
aaaaaaaaaaaaaaaaaaaaaaaagagagaaaaaaaaaaaaaaaaaaaaaaaaaaaaaaaaaaaaaaaaaaaaaaaaaaaaaaaaaaaaaaaaaaaaaaaaaaaaaaaaaaaaaaaaaaaaaaaaaaaaaaaaaaataaaaaataaaaaaatctttttccttttataaattaaaccctattacatttccaaacatcattccatacgaaagtgtaaatttataagtctgttttacctaatgattaaatat

SEQ ID NO: 338071 - DNA, 340 bp, Zea mays
taatctacccacgcttcctacataatcgatccatatcctccttaagtgagcatcttaaccaaccgacctcacactattaatcatcgacttcctactcttacctcttcaaatacattattatcagttacacaagcttatcaaaatcattccttctttttcaattcacacataatctcttccatcccatacactatatcaccatcatctttaaatttctctctccgcattatcaccatctataacattcccatcaaacttcatatttttgtacacctatatccaataatcattcatatctattactatgtcatacttcataatatcttctgtaaccattttt

SEQ ID NO: 338072 - DNA, 353 bp, Zea mays
  unsure (1)..(353): unsure at all n locations
gacctttagcgcggcagaacaaatgggggggaaaagcctgcctacggacccttcttctatcccttccgtgccctatccaacaactccacccaatgctacccacacacctcgcttttatcttaaattcagcccctcacaacgataaaaacttcaacctcaattccatctctatctntccacctggacctctgagctaatggtgtctgatagggtggattctgtctactttaacgggaagcttggcccggcagtgccatgctacgtccccgtctcccgcgatgccgactgtctggcttgtttgatcagaattgctgacttgatcaatgccaacactaaggtgctcaaagctgatt

SEQ ID NO: 338073 - DNA, 332 bp, Zea mays
catgactgccatgtatgagctgcaagggctaaaaacatacataaagagaaatacaaagagatccctacccttcttagagatactgactatggacgcaaaaccaccaaatgactccatatttctgctgcttcttgtgtcgcaaaatccttcttcctcctgtgcagacaaccaggattgcttttacaccactcaccgcttggcgacctggtgcgtgtactgaacctgcaagttcagctgcctgaacgactcccaacagttccatacctagtacaagaacagatcacgcgaaagctccacgagaggcatgtttcactggcacttctgcgactgat

SEQ ID NO: 338074 - DNA, 258 bp, Zea mays
cagctcatggcgaaacaaaacccgcgtgcctatactgccccctcgcagactatacacgtgtatctagtgtttttgcctctcctcgcactcctcctgaatcttctatacgttctaggaggatgagaggctttcttctcctcctcatccattgcgtccaccaatgtgcagcttattatgacccatcccatcaaccttattttccgtttccttcagatcaaatcacgcatccttatctggctcttctagcataaagacctt

SEQ ID NO: 338075 - DNA, 387 bp, Zea mays
gcgcaatcgcgctcccgcatttcgtcgagcaggtgtgaatttgtgatgccgccgtctcctatcgtcctccctgccaccgcgctgccggcggcccgcctcgccagagtggtggccgcctccgaaagcggaggcgcgactcctccgagggcgtcccctcggcgggggcggcgcggcaagcccgggttctctcggcgttcggcaatcaagaagagcttccaccaggagcaggtcgtgttctccactcccgtctccaccgaccccaccgttgccgtcatcggaggcggcgcttccggcctctcctgcgcaacttccctcgccgcccgcggcgtccgctccgtcgtcttcgatacggggatgcatggcctatggggaaggatggcgactagg

SEQ ID NO: 338076 - DNA, 112 bp, Zea mays
tcgacccactcttccgtgtcggttcattttttcttaccaaaagtaattatacatcttaatcttgaccttgtcaagtctattttaaattcattttttacttgttcatcttatt

SEQ ID NO: 338077 - DNA, 365 bp, Zea mays
ccattttggaggtgaggcgggggtgggtttgaatgctccaaggatttcatgactctggtttccacgccgagaagccactcctcgtgctgccctcctgcctcctcgccccgttcgtctccgccgtccccatgccaagaagcctgcgcctggggagccaccagcagcacccgccggctctgaagctcagttcctctcagatactgccaattagctgtttccgtcaggtcttccgcctgctgcagtgtttccccctcttgatttggcacaattgttagcgaatatacagaggttaatcaatcaattaactaatcaattcagcgatggtggatggaaaaaatttaatttttataatttttctaatttta

SEQ ID NO: 338078 - DNA, 297 bp, Zea mays
attcctccctcctcgttgactgccgcggggagcgatctggtcgtcaccttcctggaccgaccccaggccacggtgcagcagcctgcactctagtccgtgcgtgtcgcgtcgcgtctgcgggcggcattgcgtatcgtttctgtaggagcagaggagcaacttccttaagcaattgttcccgtccccgcagaacggcatgttttcgccttccccttgcgggttcaatggccgccgccaccaccaacagcggcaggaggcggtttcgtccatggaatcccgcggcggcgcgtctggggc

SEQ ID NO: 338079 - DNA, 223 bp, Zea mays
tattcaacccactctttctgtggaaattattatcactcatatggggatggttttaaagtgatgagggagttcatatcttattactacagtatttcattattgactctcttcattgtataaagaaattgcatatactgtgtggaaatatgcagctacaataacgtctgtctttccttcaccaaatgaagtcatggctattcttgtccacctattgctacaacaa

SEQ ID NO: 338080 - DNA, 348 bp, Zea mays
gtcttctgctcccccttcggttcgggtgggggttcgtgaggctctccggggttcggtttcgtgggtgagcggatcgagatggcggcgtcggatgttgagtaccgctgcttcgtcggcggcctcgcctgtgccacggacgaccactccctccacaacgccttcagcacctacggcgagggcctcgagtccaagatcatcctcgatcgggagacgcagaggtcccgcggcttcggcttcgtcaccttctccacggaggaggcgatgcggaacgccatcgatggcatgaacagcaaggagctggacggccgcaacattaccgtcaacgaagcccagtcccgcggcggccgt

SEQ ID NO: 338081 - DNA, 63 bp, Zea mays
  unsure (1)..(63): unsure at all n locations
ctcgcctncgtctttccctcccccagctcaggcaggaccgcaggagccagacccaaacccacg

SEQ ID NO: 338082 - DNA, 194 bp, Zea mays
gccatattcaatgcacatactttggaggtggattcacagccgtgtgggggtctatccagctcaccacggagtcccgattccctgagcagccacttgtgtgctatcagtgtataaaccactgtatgagataacatatctgcgtactccacgaatagtacaaggagatatacattgacatgaacgccatctagagt

SEQ ID NO: 338083 - DNA, 99 bp, Zea mays
ccgacgcgtgggcgcgagccgaggccaccagaataccggagcgcggcatggaggcctaccaactaaccctattgcgagtccgatgacagcttgccgtac

SEQ ID NO: 338084 - DNA, 375 bp, Zea mays
tctaaaggttttgcttaaggtcgaagtggcggtgccattttttcagcagactaaaatcgaatcaaattcctgttaattgggattatgacacctatctagtgagtagtgatctaacgtttttttcaagtaaaaaaaatgagacctttacttctatactagtctagagaccccagcctattctgttcgtgtgctcagcatcatctatgtgacatttatcaatgttttgagtgtccagcttcaacaagaacggcaacatcactatctacctgcatttcactaaattggctggttcttgaatcttgatgatgcttctgtcaaacattttcatgtcatcatcctacaattacaaagaacagatgcagctgttcagttatt

SEQ ID NO: 338085 - DNA, 190 bp, Zea mays
aaaaaaaaaacttaaaataaggggagggttttttaaggaggaagatgcctaacctaaaaaaaaaaaaataaaaatcaacaattcccaaaaagtttatatctttcttattataccaattgaattacatcttttttattgtcgcgttcgtttccctgctcttatacattaacttctatggcattatttttat

SEQ ID NO: 338086 - DNA, 347 bp, Zea mays
ccccaacctcggtcttttccaggcccagccgccaccgtgcgtctgtgcaagtggccttcggcggtgcgcagagcagagctggtgccgtggcccgtggtggtggcccgtggtgcgcgcttccctgcagcctcgaggtctgcacgccgccggcctacctcgtagcaccacgcgccgccggcctccctcgctcactaccggacttcgcacacgccggcgcggcggcggccgaccatcctcggaggtgcagttacgcgcgccgtaggaaggtttttcttccatcatttgtgcgttcgttcaactgagccgccatgcgccagccacggtccgggccggggaagaggcggggc

SEQ ID NO: 338087 - DNA, 216 bp, Zea mays
tcgacccactcatccatgtgagactgcatccaccaagtgcagggttactagacgcggctgttatgccctaaatgtccttttacctcatcctatacaggctgtagctctttatcttgtacttgttcttaataatgtcttaagcttttaatccgtacacttatagtaactaatctgagctaaggaaatataccttcacaatctttcaaacgatccatt

SEQ ID NO: 338088 - DNA, 325 bp, Zea mays
gattgggttagactaccgtcagccagcgtctagtagttctcaatccgacatgccgcttctcgttctgcgcgtgccgctcgcctcgaccaacaatactagtacatgcagtggcgctgcacctcctgtagctgtagcaccagcggcagagcattccgacggcctactgttcgacggccttgctctgggccacggtgacgacgtcgacgataaggccgaggcggacggcgacgacgcagcgaccgtgaagctggagtggctgaagtcgcagatcatcggcgcggaagcagagttcgcgtcgcccgttcgggacccgacgcattacgta

SEQ ID NO: 338089 - DNA, 385 bp, Zea mays
atcgagcgccgccgccactcgccctcccctgccatctctcgccggccgccgtctcccgcccaccggccgccgtctcccgcccaccggccgccgcagcgtgttatatttcagcccctcttgatcggccacccgaaacccgcaggagagaggctaaggaacgatggggtggaaggcggcagagaagctcatcaggcactggaaggtcctgcgtggtgacaacgtgatgatcataagaggcaaagacaagggggagtccgggctcatcaagcgggtcattcggtcgcagaatcgcgtcatcgtcgagggcaagaacttggtcaagaaacacattaagcaaggggaaaggcacacaggtggtattttctcggtcgagccccacttcatg

SEQ ID NO: 338090 - DNA, 301 bp, Zea mays
tctcttgtcattgtttgactcatgtcatatgggtatacttcctggggccttcgctcactcaactctgattcaagcccaacatcttatctcataactttcgagaacgttctacaagaactcgtgcatgaccaacaataaggctttcacaatctatgctttcaaatatcaaaatgatctttgcaacaatgaaattcacctagcatttttagaagattaataaataagcttcttttatccacctcattgttcatactcatattaagaacattattggtttgtaccagattaaatctcaccttat

SEQ ID NO: 338091 - DNA, 274 bp, Zea mays
gcttctcctccccctccggttcggggtcgggttcgtgaggttctccggggttcggtttcgtgggtgagcggatcgagatggcggcgtcggatgttgagtaccgctgcttcgtcggcggcctcgcctgggccacggacgaccactccctccacaacgccttcagcacctacggcgaggtcctcgagtccaagatcatcctcgatcgggagacgcagaggtcccgcggcttcggcttcgtcaccttctccacggaagaagcgatgcggaaacgcca

SEQ ID NO: 338092 - DNA, 140 bp, Zea mays
gaagaatgcacactcccttcctgtgaggccaatccaatggcgccctggctacttgccaccttctgcgcctcacccttactactacccggcagcagccctaggccgatgggcgctgcccccacccgccgttcctgactgca

SEQ ID NO: 338093 - DNA, 256 bp, Zea mays
tcgcttgtccagtgcccccaaatgctggcgaccacctgcagccggccgccgtgcccgtgcccgtgcgcgcggtcgcggcggctccccgcggcgaccttccgcgctaggcgcaccagtagcgcgaagcgaagggcgcctaggagagcggcggcggcggtgcggtgcgggctgctgcccgtggacccgtgggcgcccacgatggactcccagagcgtggcgtcgcagctcttcgtccgctagctcttccccttacctg

SEQ ID NO: 338094 - DNA, 186 bp, Zea mays
aatcattaaattcacctacaagggggggccttgtctccactggagccgagcccccatcaaaccctaactatctaaaaccccagtttcgctgtccgatggtcgtcggctagacgcgcccttactaccccactcaaagggccccaagatgtccttctcctccaacccagaagccgatgcttgatccca

SEQ ID NO: 338095 - DNA, 394 bp, Zea mays
  unsure (1)..(394): unsure at all n locations
tcccgatctcgatggcgaaccctcgcgtcttcttcgacatgaccgtcggcggcgccccggcgggccggatcgtgatggagctgtacgccaacgaggtgcccaagaccgcggagaacttccgcgcgctgtgcacgggcgagaagggcgtgggcaagtccgggaagccgctccactacaagggctccaccttccaccgcgtcatccccgagttcatgtgccagggcggcgacttcacccgcggcaacggcaccggcggcgagtccatctacggcgagaagttccccgacgagaagttcgtgcgcaagcacaccgcccncggtgtgctctccatggccaacgccgggcccaacaccaacggctcccagttcttcatctgcaccgtcgcgaccccttg

SEQ ID NO: 338096 - DNA, 191 bp, Zea mays
tcggtaccctaaccctagacctttgcgatgtgagacatcgccaccggaccatccccttcagttgccactcagttggcgcccccttctgcctacccggtcttgttaactgcctatatgtccatctccgcgtacgccgaggaggaagaggacctctaaggccgcctcaaatatgctccaacgccacatggagt

SEQ ID NO: 338097 - DNA, 206 bp, Zea mays
cgccttaacagaccgaggctactcccaggcgccgggtcttctttgatatgttccactatctatgctaacggtaatggcgaccgttccatgggatctgatctggctgattgtgaggaagaacaactccttcctggtgaagcattttggcaacttattatgccaaggttcatttcaccaatgagcccaacatcctttacaatttacac

SEQ ID NO: 338098 - DNA, 271 bp, Zea mays
ctcgctgcctccattcttcactaaccggcactgtgagagaggggcgcggccccttgtacccagatagtgggaattccttcagcggtttcggacctgggccccgctgtcctccatggaccgcaacgtcgccatggaaaacgtcgaccacgacgccttgagatgcgactatgcagtccgtggccagatctacatgaatgctcagggcgtgctgctacaactaccaacacaaccatggaccgttgagtttgacgagagcctggtccgcaacatt

SEQ ID NO: 338099 - DNA, 126 bp, Zea mays
gagcacactccacttggagctacagctctacgttgtaagactactgtcgaggagcgaccctctggctatcaatcgggccgggcattcgaattaactccacggtgattgagcagaggaccctactgg

SEQ ID NO: 338100 - DNA, 252 bp, Zea mays
ataactgtgaatgcacgtcgcacgcgtacctaagatcgtatacagtagagccaagcgtcccatccgctagaaaatgctccatatacggcggtggttaagcgctctgtctccggatctcgcttgtccaccgatctgcgagaggtatgttttcgtacaccaccgtcactgacgcccgccatggccagaacctccacgtataagattcttgcaaatctcctggtatggagtaccacatgtgtaggactctaaacg

SEQ ID NO: 338101 - DNA, 179 bp, Zea mays
atcgattgctctcattagtcaggtgcggtgcgagcctctcacggcttgtatctcctagatacttcaagatgccatgaagaatatgatgtccaccgcgactgctgtgcttgatgtcagtgaccagaactatgctccacatatggacacgcgtctcaggggctccgttaagctgtcttaca

SEQ ID NO: 338102 - DNA, 388 bp, Zea mays
aagtcgacccacccgtccggtcagggaagggcggaaggcgtcggtcgggcggcagctctgctcggtcacggcgcttgaagggcggtgtataggccgccggagggagtgaagagggagatggctccggccagcgggtggggccgggcggtggggaacacgcggtcgttcgtgggcaacgcgctgggcggcctccgcgggtggagcaatctcgcctcctggaccgtcgccggaaccctcgcctactacctctgggtgaagcccgcgcgccagctccagaaggagcatgaggagcgagccactttggctgctgcaacggatccttatcgttacgtcgagaagcggaaaccgattcctgatccacaggacactggccttatctatgggaaga

SEQ ID NO: 338103 - DNA, 254 bp, Zea mays
tcggcgtccggtgtctccggcgaggctcctgtctcggcgcatcgtggaggactgcctcgggctcgtccagctcatgagcgacggcaccgtcaagcgcgcgccggcctgcttggcctctgccgacgatgcggcaccggtcggatgcaaggacgtcgtctacgacgaggctcgcaacctgagcctccgcatgtacgtgccatcgtcctccatggcggggaacggcggcgccgagaagcttcctgtgctggtctact

SEQ ID NO: 338104 - DNA, 175 bp, Zea mays
cacgctcgtaccctaccgcatattacgatgatcggcactaagccggggaaggtggacttggctctcgtcgtgttttgataaggcgggcggtcctgcagaagaatgggtggttcttacgatcgactgctcctagccagtggaggaaagatcatggagtgcctcgctgaaaatttct

SEQ ID NO: 338105 - DNA, 303 bp, Zea mays
tagtctacccacgcttccggtaaaaactgaaggctctcttggggcgtcgtattctaaaaggagatgcgcctaatcctcacccttctacaaactgcaatggatccttctaacttgcttgcccatgaggctgcatctgtacttgtacaaattcatgatgctgaagctattcctgcactggtggctattctcaaaaatctttcactacatccatatgtccttcatgatgcatcataaactctttgagctattattctttaaaataacattcctgtgttggatgaaattttaacaactgatccttct

SEQ ID NO: 338106 - DNA, 76 bp, Zea mays
tcgaccctcactttcaatcgcattttccttgcaaccgagggggtattctcctaccaaccaaagacctattgctccc

SEQ ID NO: 338107 - DNA, 293 bp, Zea mays
actggctaccttggtgctcacaccatatgctatgaacccagcctctctctctccgtctagcagcctattacatttatggaccagatcatgatttgcatcaatgcgcgccattggatctgctggctggcggccagggctgctcctgcatagcgacgacgcagagctcgctctcggaacatacgccttgtcaggacacaataatgtacctcatgctcaagtatgacactggagtcagacactgcaatgaccatgatgcctgtgagtatgactcatataccgtgctcattggccat

SEQ ID NO: 338108 - DNA, 393 bp, Zea mays
aaatcggaccaaggcgtccgctcgcgccggggctcgtcgtccttgccgctccactgcccgcagcagatgcaccacctgcacccagccgtctgccggcgtccgcaccagagcgtgtcgcctgctgcaggatacgccgtccggcccgttccccgcccgatgccagccagtgggtaccgcatgcagggcggagaccaccgcagcgtgggcggcgtggctccctgcggctacggagaggcgctcgtccaggccggtggaacccaacacgttgttggattccacgacgacgaggcaagctcttcgagtgaaaatccgccgccggaggggcgtgctgctggctcgaactagcttagctagcttctcagttccccgtgtacaataagaggggcggtcgcg

SEQ ID NO: 338109 - DNA, 131 bp, Zea mays
tcgacccacgctttctgccaacacacacatattactctgcagtgcattccattccatctcaaacgactcaatcatgtgctgtctctacaccaatctatttcttgtccttctactcctctcttgttacacca

SEQ ID NO: 338110 - DNA, 324 bp, Zea mays
  unsure (1)..(324): unsure at all n locations
tcntttttttttttttttttttttttttttttttggtttggtttttttttttgttgtttgggcaggcaacaatcactttttcagctaccattctattcagaaccagtgttacagggaaaacacattctccacgggctacattacattttgcgctggagagctcacaacagcttcacatttttgatgaccattaccattagaatcggtggcggggaaaagaaaagaaaaaaggaaaacttgaaagaacaaaccgcgcttgagacgatcgatgcctatagaagactcagtgccacacaagagcatttaattctgacctaagggtgg

SEQ ID NO: 338111 - DNA, 122 bp, Zea mays
ccaatacattaaaccatcttatgttgggttgcttcgcatggacggcatccgttcaaccaagtggtgaagccaacacacattaaatgggttgcatttgtagcctacttagggcactggtgctg

SEQ ID NO: 338112 - DNA, 271 bp, Zea mays
cccacgcgtccgcccacgcgtgcggggatgtttagcctgcagtctgtacttgccccaagcatctatggtgcctgttttaaatctcagatcacaatagacgtttgttttaaaaaaaaaaaaaaaaaaaaaaaaaaaatataaaaaaaaaaaaaaaaaaataaaaaaaaaaataaaaaaaaaaaaaaataataaaaaattaaaaaaaaaaatataaataaaaattaaaaaaaaataaattagtataataaataaaataaaagggggggccccc

SEQ ID NO: 338113 - DNA, 263 bp, Zea mays
ccaagccgtcgtcggtagggactggagctggggcaggagccgacatcgcatggctgtcgctggagcccgacgcgcgcctggcgctctacatcgccatggcgcacgcgggcctcgccaccgcgctgctcgtgctctacggcctttacctgctgctcgccgacttcctccgcccgctgcagtgggcgttgctctgctccgtcccgctccgcgagacgcagcgcgcgctcgtcgccttctgggagcccccgctccgtggcggactc

SEQ ID NO: 338114 - DNA, 82 bp, Zea mays
gaaacatatgagaaaaccgcttcagaggtgacggaatcctcagcaagagctatcatggattatgagcacaacatgttctact

SEQ ID NO: 338115 - DNA, 150 bp, Zea mays
tcaacctttgcgttctaacctttttaactatattactgggtggggacataccagccagcgatggcgctcctttcgctgtacaacaagatccggatcatgaaggtccgcgacgtgccagctttcctgaagacggtcttgacctgtaacaac

SEQ ID NO: 338116 - DNA, 61 bp, Zea mays
gtctgtctctgatcagttcgccaatcgtgacgcgtatggcttcgatgtgtgacttgctact

SEQ ID NO: 338117 - DNA, 413 bp, Zea mays
  unsure (1)..(413): unsure at all n locations
tgagtcagatcccacagcagtccagggtagagacttgacaggtcatgttctagccctggtccaggtccatgcgaaaggagaagagagacacggagcctaactaaaccctaggtaacggaaaggaagcacgagcccggatagcctccgagctccgcagagcttgtcgacttgctccaggcgtgcaagaagaattcatcggtcgtcggcgacacctaacctccttgtgacgcgatacctccagaatttgaacgccaaaatttccgccgccgccccctctttcgaaagtcccaagagatcttccatggacgacattgatgacgacggtgatgacgacgacgattctgatatgaaggatcccactcctgagcgagacgagctcaatgaagagattgntgagtctgatcttgagctcg

SEQ ID NO: 338118 - DNA, 193 bp, Zea mays
tcggccgccatagctgcatagatatttaggcctcttacgaccctttctctttgtccagacgcaccatccgaccaccataagacagactgctaaacctgtcctatagctccacttatttactatatactcttaccaaaagagtcttctgtcttacaaaaacaaactttttaacgctgcataatccaacacacat

SEQ ID NO: 338119 - DNA, 212 bp, Zea mays
gtcgatgcgagggaaggtccaaccatgttgcttgggttcactgaccaggtgaacaaggggatcaccaccctcgccggccgcagcttgacaacgaaggagaagactacaaccaagaggaccttcagtgtctgcatagaagagttccatgctcgcctacctgaacgccgtgcaccaggtgtaaatctgacagactgagccccatgagtcaggac

SEQ ID NO: 338120 - DNA, 439 bp, Zea mays
tcgcttaatctccaggatccttctgggctgaggccccggcgaaggctcaggccgaccacgcttccgctgcccaggttgcgccgcttctcatctgcgacggagacaaggggggatacatcaggatccgctcgcttatcatgcagctcattaaagcaaacaaacaaggaaggtgcgtgaatgccacgcaggggggtgggcagacacaatagacgcggaaatcttcgtgagccgaagcatgagtcggttaaaaaggagcaccaacgctaggtaaagccgcgaaccggaatctgccgaaaaagacggcaacaaaccaagcaagaaacaagggagcgaaggaaagaggaggtaaatgtaaatctgctgccggcagagagcgaaagaacgccaaatcgagcaaatggtggcgctaacccacacacactgccactagtacggtgga

SEQ ID NO: 338121 - DNA, 333 bp, Zea mays
  unsure (1)..(333): unsure at all n locations
cgcatgtccactcanatctgaaaagtcaagagaatccgttgccgtcgaggcggtgccgttcccggcgcaaggccacctcaacggcatgctgcacttgtctctgctactcgcgtcccgagggctttccgtgcactacgcggcgccggggccgcacgttcgccaggcgcgcgcgcgcgtgcacagctggggcgacgacgcccaccgccgcatcgagttccacgagctcgaagtccccgcgtacgccaccccgccgtcagacccggtcgagccctcgccgttcccgacccacctcaaccncatgagcgaggccttcgtcgctggcgcgcgcgcccc

SEQ ID NO: 338122 - DNA, 535 bp, Zea mays
tgtcgatcccatcgcgtctcgggtcgataccgaataatcatcgggcagcgagatgatgcggagcatcggcatagtcgagagagagcatgttccttcagccgtgtgcggtgagaatgccagccaattagcagccaggcagaagattatttcagcatagaggatttctatccatgatccaatgatacgtctgagcatcaatgggccatggtaggatttaggtgacgagagacgagacaatgagcctgcgatggatcctcattcttcaatccatcctccaggaaagcatcttcccaggatccacataagttcatcagggagaggagagatgtccgcgagcgcttcgggagccatccgcttgatcctcatccgacgatccccatcctggatcagtcgattcccctcgacgaggaaccactattatttcgtccatagagtttcccatttagtatgtagtctccagttgagcctcaccatttgggaaatattcccactagtcggagtcgtcttcaaccccatcatgaacgagcttttcacg

SEQ ID NO: 338123 - DNA, 61 bp, Zea mays
tagacacacgcgtccgtgaagactactatgagctgatttacaacaacgactaggactatat

SEQ ID NO: 338124 - DNA, 224 bp, Zea mays
tcgtcccacgcgtccgcacacactcgcgaactccatttcgatcccatatgtgatgaatccatactcgcgttgtgcgttttgcaacctctcatcctcatagccaatatcaagatcggtatcaacgtgtatagcttgatctgttggctggtggccatggcggcccttcagagcgacatctgaaaactcaattctttgaacgtacacgatataacaagcgattacat

SEQ ID NO: 338125 - DNA, 101 bp, Zea mays
tccacccactcgttcgtcatccaccaacacctgcaaagggttttggtatctttgttacggtccttaacccctattcatgtaccaattcactcaccattctt

SEQ ID NO: 338126 - DNA, 106 bp, Zea mays
atcctccattatataccgaactccaatatccacactcacaataactttgccaccaacgaatattgcctccatatactacgtgctccttctctatttttccttaacc

SEQ ID NO: 338127 - DNA, 333 bp, Zea mays
  unsure (1)..(333): unsure at all n locations
tctacccacacgatgcgtccacgcatccgncccatgcatcccagaagcttccagtgttattacattgcgctgaagctgctgatctgtcctgtgttcgcctgcaggacaaacacatagtgcctgtgcatgaagagctcgtgatttaaagggaacacgttctatcctacttcataaagacaatcaacaagctgcatggttacctctataacaacgaagggaaaaaaatgcaaacaaccttacctcgactgaaagagattgaaatgcccgctcttagcacaaacatcgatgacgaccttgcgaaagcactcaaggaagtagacgaacacagaatag

SEQ ID NO: 338128 - DNA, 272 bp, Zea mays
gcggcggggtaggtcgagggggtcttaacggcaggcgagctcggctcctgtcacccgtcgttccacacaaccatgtccatgcggaagacctgggagcccaaggtggagaacgctacccttggacccactgtgcgtgaaagagagtttgcctctggtagtcactcacatgcttgcagtacctaatgactcccctattgatgtcactgatttgcatgggagggatactgtgggtcggatcactggtggcatcgaaggctatgctgatcttgatg

SEQ ID NO: 338129 - DNA, 127 bp, Zea mays
gcacattcgcaggctgcaccgttgtcaacgccaccaggaccaccgccactgtcgccattcctaccttcaccattctcagaccctgaaccagtctacgcacccggacgacaacgacagtgtcgaccat

SEQ ID NO: 338130 - DNA, 170 bp, Zea mays
catcaaacctttacataagccacctgcgctcatcctgcactttgaccagattagggagaagggtccttgctctcagctccgcattcctacctcaccacaactcccctacagccacacactaccactcgtcaagatcccaaaccctgcaactacagtgctgccaccatatc

SEQ ID NO: 338131 - DNA, 331 bp, Zea mays
tgcgcgcgtctactgatcttaatcaccagcgtcgatcaagtaacctgggtggagcatgtcttgaagctatgttctggaagtcttcagcagactatgtgttctggttttcatacagccacactgggcaggacaatttatgccctagcttgacgcttgcatttgatatgataccctagctttgagtcaaatgcacagcaacggattgcatggaggtctgattatgcaaaaaagatgatctaatgcaatgatgatcaaattttgtgcagaggaatatggtcataaaaagcaactcccaggcacatatgtaagtgagctatacaatactttaata

SEQ ID NO: 338132 - DNA, 244 bp, Zea mays
tattcgacccacgcattctgacttttctaaccatatcccctatccctagctcaagatgctcttgttataaatcaagaccctctcttatgcataaaatcctcctaacaacgatcgtatcaaattaaaaaacatctactcggcctagattatcctcaaaaactcttatatcttttcaactctttaaaaacacaaactcgcgtttcacaactttgctttcctctcttctacaattgctagctcttca

SEQ ID NO: 338133 - DNA, 354 bp, Zea mays
acgatcactcgccagattgacgccaccgttccctaccaacaatgccgactcgagatgcggaggaagaggcatgctaataggaggagtctgaaagtcttcctaccgaacaaacattagcacatgggcgatctgatcctatagaatgtcttggtcaagatcgcctatcagcacctgcgtctcctgtgtagcagcaccatctccggcgccctgtccaggaccttcgaggcgccgctagagacgatctacactcactagattgtcggctacatcaacgtctactccattgacagggtgtgccattggatcattcagaacgacagatgatcctgtctgttccactgcaacgacttgtac

SEQ ID NO: 338134 - DNA, 182 bp, Zea mays
gccctttccagctaacctttcaatcctagggttaggtgaccttgggaccgggtggcgcccaatgctcatatcaagccggcggcgtacaatccggtgaagttggtgcccacggccccggcctagaaggccccctgtgcggagatgcccaagacggagaagcgggtcccggccggaaaatcccc

SEQ ID NO: 338135 - DNA, 143 bp, Zea mays
tagtcgacccactcgttctcgaaccaactcaaacctatcctggttcaagatcactatgttcagggttattgcccatcttgctacctaatccaccgcaaataaaaccttaacatctcaagcaccatcacttcactattcacaca

SEQ ID NO: 338136 - DNA, 183 bp, Zea mays
tagtctacccacgcgtcctggtaaaagaaagccaagactaccgtatggacctacgggacctacatctagaaggcgttgcaacacgtgcaaacacgactttgaggcatcgaaccaagccatctccattatcaactccttcatcaacgtcatcttcgctaacgttgcagctgattcctccaagca

SEQ ID NO: 338137 - DNA, 174 bp, Zea mays
tccacccacgcgtccgaactggttctggaaagactatcactatttatggttgggaaatcaatactggtcttactccaagggccacatctgtactttttaccggtgatcaagcgcgatggcaacaaatattcattttctttgatggcatatatcgcggagcatcatcaagataat

SEQ ID NO: 338138 - DNA, 174 bp, Zea mays
gccgatcgcccttgccaatctagattgaaggtggcgatgccgaagccatacgcctacttctgccatacggctcagcccaactagggtctactctcgctaacctacccgatctagcaccgattgtgcaggaacacctacctcatcaactagatgagcaattacaccttctacaac

SEQ ID NO: 338139 - DNA, 397 bp, Zea mays
gcgacgcgacgcgtaacctcagatcctaatcagtcgatccatgcgtcttatccacaccattggtgctgccgaggatgggggcaatgcgctttctggaatccacgctctctcgtcctgcatgtctacacgggctccaaccgtatatgtaactacatctaagctgactggtaggccagagatgtccccgacctatgctgagaccaacgccgcgccctatgcctcctcctaaacggaggcacactggcatcacctcgtcacgtccatgaggacctacgttctaccgttctacaacgagacagcacatctaatacctctgctgctcctgctgacattgcaccgaacagatactccctgaagctccttgcctgatacgacaccgatttggcatacaactccc

SEQ ID NO: 338140 - DNA, 397 bp, Zea mays
aagcaacataaaagtgaatccattagcaacaatacagcacaatggcgaccaagatattgggcctccttatgctgcgggctctttctgcatgtgttgctaacacaacaattttccctcaatgctcacaagctcctatagcttcccttcttcccccataccttccatcaatgatagcttcagtatgtgaaaacccagctcttcaaccctataggctccaacaagcaatcgcagcaagcaacatacctttatcacccttgtttcaacaatcgccagccctatctttggtgcagtcattggtacaaaccatcagggcacagcagctgcagcaactcgtgctacctgtgatcaaccaagtagctctggcaaacctttctccctactctcagcaacaacaatt

SEQ ID NO: 338141 - DNA, 313 bp, Zea mays
taccccctaaacccaatccgcgcgtgtctgaagaggatccagccgctacctacctccgaagatcgcccttcttacaaatggagaagccattctctattatgcttcacttccacaactatctctgcactatcacaaactagatcaaaccctatctggaacgaacatcaccccctagctaggccgacgccatactcctgaccatctcgatgctcctaaacagaaaaacgctacgcaatctctcaatcaacatcgtacgtacctgctccgctcgcacgaccacaaaggacacacgctggttgtcttctacatccaa

SEQ ID NO: 338142 - DNA, 365 bp, Zea mays
  unsure (1)..(365): unsure at all n locations
gggctaccgagcaacgggagtgaaccacttttggggccgaagtctgcaagaaatttactcaagagcgataccttttgaggctatatattcaagatgaagaagtataacggcaggccgagttttcacagtgacggcctgcacactatctcgtgtgaggtgaagatcagttggtcaaaaaaaaaaacaaaaaaaagaggaaaagcataatataccaaaaaaaatagagataggtgtacacagaactgaaaaaaaacaaaaaaaaggcnaaatacaaaaataaaaataaaataaaaaggcaagaggcaacttttgtgctggtactcatgcctttgtgtatgtgtcttagtggttgtttcgatgtacag

SEQ ID NO: 338143 - DNA, 301 bp, Zea mays
tcgacccacgcatcctgcattctcttgtacaagggatgttccctggggtatgaggcgaatgtaaacaggcctaccttcccaaaaactacaatgctgggaattactggaaaataccattgcctagaagcagattcgtgaggtacaagtccagtctgcacaacaccactgcactaattatatgatgtgccgcattgatcatgacaaggccattactagattggctacatacagatgctcctgctcctgatataagctcctgcgagatagaactttgcatatgtaggatcataatttatgtagt

SEQ ID NO: 338144 - DNA, 359 bp, Zea mays
cgacgccacgcgtaacgctccaacccgtctacattcaacgccacgctgtccgctgcgatcaacataacattcattcggaccaccggagatctatgtaactaacttatatctgcctcttctattacttgcaattccattgcttacaaccacgatcatagcgtcagacactcgaacatctactatgcttatcatgccttgcacgttcatcccttctacattgaatgaaggatcaccaacctgacttctggatccgtatgaactacaagatccaatagagtggtaccacctactgttatcaaccttgtttgtacagtcactaggcctatgacaaatgcactctccttagctgacaatgatat

SEQ ID NO: 338145 - DNA, 165 bp, Zea mays
atcgccgggtgcgacgcacgcgtaacctcgaaccctctacagacaacccacgcgtccggagcaacattaaatgatcaaaggggtccgggatattttgacacggtcttcgcctttctctccctgcattgagtgctaacacaacaatccaaggtcaaactcacaagc

SEQ ID NO: 338146 - DNA, 232 bp, Zea mays
catagtctcccccatgctgacccttcccgaacctgagagtaacaactccataggcgagcactttaatcaaaacttcattgaggagcgctcatagtctccgtctctcggagctaataccatcctttcggcttcagttgctacgtacacacttacgatctatcattatcaagactcctctttacaagcacatatcattattaagtcggatcaatactctggcgataactgtacc

SEQ ID NO: 338147 - DNA, 96 bp, Zea mays
tcgacccactcattcgtgacctttggcccattctttatggctgcgggctttccagatgcggaccaggctatctcctcccttgccctacacggcgat

SEQ ID NO: 338148 - DNA, 236 bp, Zea mays
tcgctcggtaataacaccctgatcagctcaaacggccgacaggactgccgactgcacctacctcgtaatccgtagaaaaaccgtagaaatctctagatcctgagccacatccgtgagctaggtcttgttccatgtctcgcaggatgcatggctactaccggactcctgagaccggcgatgctcagcggctgcgagagtgtcccatcctgctgttagtggtaccgcgatgccgtgca

SEQ ID NO: 338149 - DNA, 197 bp, Zea mays
cccccccacctcttttattctccttctatgatccaccacaattctatgcttctagacctgttactttcacattctcttcctcctatttttccttctcaactacccccaacatctcttgtcatgaatcactctcttcattactatattaacgcggttattcataattctttcttatttcaatactcaaaccacctttt

SEQ ID NO: 338150 - DNA, 430 bp, Zea mays
cacacagacacactcacacacaacctacccagacggccagaccccgcgccgccccgccgccacccccacccccaccccaaatcagtcaaacgcgccgccgccgccatgggctcctccgtcagccaggccggggcccctcctccccatccccccacatacgcgtcgactccaccctttgcgcccgctgccgctgacgccgctgacgccgccgccgccccgccgccgaaacctcatgaggaggaggcgactgaggagaaggtggactacctcaacctcccgtgccccgtcccatatgaagagatccagcgcgaggccttcatggcgctgaagccggaccttttcgagggtatgcgcttcgatttgaccaagatgatcaccccgtacttcgctttgactcacaagcgtgccatgggatccattgagatcccgg

SEQ ID NO: 338151 - DNA, 146 bp, Zea mays
gtggctttcaacaacgagaaaggaggcgtagttgagtatctcagggataaaaaattggtgacttggacttaaatcaaccaaatatttcattcaacactgggctagacaccaaggccatgggttcggcctggcttgctaatgctttg

SEQ ID NO: 338152 - DNA, 159 bp, Zea mays
ggacggacaaggagcaggcggaagaggagttgtgccaaggcacaatgggtatctcgcgtgactcgatgcacaagcgccgagccaccggtggaaagcaaaaggcctggaggaagaagcgaaagtatgagcttggtcgcacagccagccaacaccaagttg

SEQ ID NO: 338153 - DNA, 167 bp, Zea mays
agcagcacaagcagctgaagaggctgcgatttgactggttcaagtgtattaagcaatagtgttgcatgctaaatgggatcgactgagcgattatgagggagatgaagggatagcagaggtgatccccaacagtgatcgaggttctgacaagttaatcaggcattagc

SEQ ID NO: 338154 - DNA, 243 bp, Zea mays
cgcacacgtgcaccgacagaccagtgcgggctagtctatcggcagaactaacaggtgttccaattgccttccgccaaggatgaagctccagggaaatgcgctgactccagtgtggtagtgcatcacggttcacgtcctccaagcggcgattcatgtcagagacgcctgctgcaatgcgcactgtatcgagccttgacatgaagatgcatgtcgtatacaaaacaacacgacgaccactagtgg

SEQ ID NO: 338155 - DNA, 228 bp, Zea mays
tctaaaagcacgaccaccacgatacataacgtgactgctattaaaagagcagccgtcctgaggataacgcatgtggtggcaacataccatacttggatgtgtacaagaagcgtactctctgaaaagactgaagatatgctgattatcaacactggtgaattgaaacgaatacagtagcagacacgtctggatatctggtccaatcacaagagaagactgtatgtacaa

SEQ ID NO: 338156 - DNA, 394 bp, Zea mays
  unsure (1)..(394): unsure at all n locations
tgtcgacccacgcttcctctccgctttgcctccctccctcgctggcgggttccaaaacgcctgcagacctccatacnncagcggctcccctgacagcggaggcgacgcctgcaccatgtcctcctgcgacgacgaccacgcctcgctcctcatatcccacgctggggcctcgtcaccgtcctgcccctcgccgcgcggttcggcggtacatcagcaccacgccgacgtctaggcggacgaagccaccgtcaccgcctccccgaggctcgccagctgcggctgtggcgtgcgcggtctcctgcgcaacctctagcgccgcatgtccgcacgcggatcttggcctgggcgttgccagcaccagcaccagcaccagcactatcaacagctcgatccc

SEQ ID NO: 338157 - DNA, 363 bp, Zea mays
agaccattagctttatctactccagagcgcagaagaacccgatcgacaccatgagggtgttgctcgttgccctcgctctcctggctctcgctgcgagcgccacctccacgcatacaagcggcggctgcggctgccagccaccgccgccggttcatctaccgccgccggtgcatctgccacctccggttcacctgccacctccggtgcatctcccaccgccggtccacctgccgccgccggtccacctgccaccgccggtccatgtgccgccgccggttcatctgccgccgccaccatgccactaccctactcaaccgccccggcctcagcctcatccccagccacacccatgcccgtgccaca

SEQ ID NO: 338158 - DNA, 184 bp, Zea mays
ttcggattgccaccggtctcgccaccactcccggcgcctcgaaccatcaacctgtcgcaagaggtcgcgggcggtccgatcggtggtgccgtgcgcgatggcggcgccgcctaccgtgcggggctacgggccagcgtcgccgtcgtcgtcggtggcgctgcctcgggcgcgatcgcgggtacct

SEQ ID NO: 338159 - DNA, 357 bp, Zea mays
  unsure (1)..(357): unsure at all n locations
gccgccctttttttttttttttttttttttgtttttttttttttttttttttttttttttttttttttttttttttttttttttttttttttttttttttttttttttttttttttttttttttttttttttttttnaannggggnnnnnnnaaaaaaaaaaggggaaaaaaaaaaaaaaaggggggggggnnacaaaaaaatattattnnaaataaaagaaaaaaaaaaaatttttttaaaaaaaaaaatttttttttataaaaaaaaaaagggggttttttaaaagaggtggggggctgggggaagaattttttttccaaggggggggggagttgggaaaaaacaaagggggggg

SEQ ID NO: 338160 - DNA, 229 bp, Zea mays
gtgctcggccggcgacgaggatgcctggtgtgccgacggacggtggcggcgcaatggtaccttttacaggggagcctggccaaggggcgcccccgccggcacccgtgcggccaatccgccacggcgtgtggcgccccatattttccatatatacgtcttgtggcagagggaaacctttgtacgggtcgtgtgtctcccccccccaaattcacactggcggcggcacaca

SEQ ID NO: 338161 - DNA, 151 bp, Zea mays
  unsure (1)..(151): unsure at all n locations
atccattccataccattctccctagtctcccggactctccctccctccctccctaatcttctcgtccgtcgtctcccatggaacggctcatntccacgcccgccgcctccccgacccaaacccgtatccggggacccctttccctcccctt

SEQ ID NO: 338162 - DNA, 202 bp, Zea mays
gtccttgtcacgaacgatacacaatctacttctagtccgctcatgattactccaccagatcaaacagcagctatgatgcacggttcaggagtaagatcgacacctccccattcacaaccactgaaccctgcagtgtcacttccccctacagtcagtgcagtgggtgatgagtccaagagaacggcagcagctatggcagata

SEQ ID NO: 338163 - DNA, 289 bp, Zea mays
ttaaagtcaaccaagccttccggggggttggcttctcctccccctccggttcgggttcgggttcgtgaggttctccggggttcggtttcgtgggtgagcggatcgagatggcggcgtcggatgttgagtaccgttgcttcgtcggcggcctcgcctgggccacggacaaccactccttacacaacgccttaaacacatacggagaggtcctcgagtccaagatcatcctcgatcgggagacgcagaggtcccgcggcttcggcttcgtcaccttctccacgggaggacg

SEQ ID NO: 338164 - DNA, 143 bp, Zea mays
gcgctgcagcactgggctgtgaccaaatacgacccatctctacaaagttacttgcaaactcatccaggagatgtgatgacttatcacgattaaaaagttcacgctcaccatgaactggctcttctagatcctgactaaccact

SEQ ID NO: 338165 - DNA, 72 bp, Zea mays
gctctatgaaggcctcgacatagtacatggagcggatctctcagaagagccaaggatcataggggcgaaccc

SEQ ID NO: 338166 - DNA, 126 bp, Zea mays
tattcgacccacgctttctaaaaaaaaaaaaaaaaaaaaaaaagaagttggctccctaaaaaattccgggccccaaccaacaagcataccaaactttccctataatgaatcaaattaaaaacttga

SEQ ID NO: 338167 - DNA, 108 bp, Zea mays
aaaaaaaaaaaaaaaaaaaaaaaaaaaaagaaaaaaaaaaaaaaaaaaaaaaaaaaaaaaaaaaaaaaaaaaaaaaaaaaaaaaaaaaaaaaaaaaaggggcggccgc

SEQ ID NO: 338168 - DNA, 313 bp, Zea mays
  unsure (1)..(313): unsure at all n locations
ggctgacagagtcatcctatcatcatgtcatctccactggccccgagccccgatgcggctctaccggtcgtcgtgtcgtccctgcggcggctcggcggnacanncgacgaggccgnctnctgtacagccacatttattctacagccacattatgagaatatgtagatatatgttggatgcggaggtccaaaaaccgcagctttcagagttgccaataacaaatgggttcagaatgaacgaggaaactacatggctgtgcataaaaacattccacaagccaagaattgccgtgaggcgagtggccctagcccag

SEQ ID NO: 338169 - DNA, 85 bp, Zea mays
gtactcgttttcccttccaaggcacccgttgcgagggcggaagcgccgattgccggggccggggccggtgcgggagccggggccg

SEQ ID NO: 338170 - DNA, 447 bp, Zea mays
tagtcgacccacgctttcgcgaccttccatcagttctcgaggacggattcccagggcgaggccggaggcggacgtcggcaggttggcctttccatgaggtacaaaatggatgagggctgcgctgacgatgatgacgacatggccaccatcgccgccctcagattgaaggatttacctgaagggagttatggatcggatggaacatgtggttgtggaatttcttgaggtagcagtcggctacatcgtcttcctcaaagccttatattctcctcataagagtgctcttaatttgagttggttcagttaagatttttttgtgccatcaaagaagtagctcatcatggcttgcatcagggaacctgcttccattttgcttttttatgaaggatttgagaattacgcaacaacagtttcagggaagccatttgtgtcatcatgtaaacatga

SEQ ID NO: 338171 - DNA, 131 bp, Zea mays
tagtctacccactttttctcgaagactcaacccttccactttgtgaaggattaaaattacaagccggccctccctaatgccatctccacttcaataactctttctcttatttcatacacctaactattttc

SEQ ID NO: 338172 - DNA, 159 bp, Zea mays
gagagacagagaagcagagaacccctcctggacctcggacttttctgttactgcttcggtcccaaaatcctaagggtttgctcgccggcgcgcgatggaagccaacttgtcagcgtcgatcgctccgcaaacgtgggaactggagaacaacatttccgc

SEQ ID NO: 338173 - DNA, 217 bp, Zea mays
gttggcttctcctccccctccggttcgggttcgggttcgtgaggttctccggggttcggtttcgtgggtgagcggatcgagatggcggcgtcggatgttgagtaccgctgcttcgtcggcggcctcgcctgggccacggacgaccactccctccacaacgccttcagcacctacggcgaggtcctcgagtccaagatcatcctcgatcgggagacgc

SEQ ID NO: 338174 - DNA, 367 bp, Zea mays
cgaaggccctggcgcagaacagcagggtggtccagcaggagaacgccgcgctgatggccgagaacgcgtcgctccggcacgccatactgaccgggtcctgcctcgcatgcggcggcgcgacgacggcggcagcgcccgccgagctgccgccggagagcaggcgcctggtggcggagaacgcgcggctcaggggcgagtacgcgcgcgccaccgcgctgctcaaccagattctgctctcggtctcggcgccggcgcccccaggcccagcagcagcggcagtcgtcgtcttctccagctccgtcgcccgccccgtggccgaccgcgccgttcggttccgcggccacgcggaggccgccatggacctgtt

SEQ ID NO: 338175 - DNA, 90 bp, Zea mays
tttctaacgccctctcacacaacacctatggcgtccatcttaacagcggcgggctcatctccaataacacctctctccttaattccatac

SEQ ID NO: 338176 - DNA, 206 bp, Zea mays
cggtcgactccagtgactgtgcccgctcccgctcccgctccctcgcctgcgcccttggacccgggggctacagccggcacggccaagaagtcggcgtccaacaggggcagtgattacggccacgaaaagccccgcggcggcgtcaccgatgattgtgatcgaaattccgtcgtcacctgatgcctccacaggtggggggcgctcga

SEQ ID NO: 338177 - DNA, 311 bp, Zea mays
gttggatgaagcctaccgttccataacactctaactggagcgtagccctgatttgactgatcgcatcttggtgcactctcataatctggagccttctaatactgactggtgccggactgaatgaccagagaggcgaggagaacaattacttcggtcgctgctgctacgtagtgaatcacccggtattattcgcgggagcggtactaggcctccccatgctcgcgctaggcattgtatactatgtcccgctgtaatcatgcaaagggcctcctgcggcgcttgtaggaccccagaatcattgcatacatata

SEQ ID NO: 338178 - DNA, 144 bp, Zea mays
ggggcttgcagctggagcatctatggtccgagttacttcctctttcctccaaggcaaggctcctacaacttgcgctcactgtttctgtacagatccttatctactactctcgtacttcgtcgtcgccaacttcttcacgtgatc

SEQ ID NO: 338179 - DNA, 144 bp, Zea mays
ctccaccgattgaccaaccaaaaccctcaagcccattatgtacttctactcggactccacctccgcgatgcattacatggaactcacctttcctctaactaccggaggactgtcccggttgcggccggcgttttcatctcatcc

SEQ ID NO: 338180 - DNA, 403 bp, Zea mays
gttcaccgaaggggtgaaaaagttggactatttgatgaagagctggtacatggtgttcatctaaccagtccttgtgttcagtcaccattggtgccaagtggtgtcaaagaaacacctatagtggatcataacaagagacctgcatccagtgacatactggacatagttgaatgcaaacggctgaagcaggaagatcaaatcgttactaaggaagacaaccatacatctgctgaggaggattttcatgactaccccacatacacgacttgcgaaagaagctttgactcaccactatatgagagtgaggaaagtgaagatgagggtgtagattcacctctccattgttcacatgctcgcccctatgttgaagatggtctatggcctagcagctttcatcaatctg

SEQ ID NO: 338181 - DNA, 389 bp, Zea mays
aaaaggcagcagcagcacagagcaagaccgcaaagaaagcaagcgggctgcgggcaagcctccttcaccattaccgcgcatgtgctctgcgccggtcatctgccttcggtgtaggacctcttgtctgttgcttggtcatggacaggcacacctgcaagctctgctcccgtcggttccacaatggccgcgcgctgggcggccacatgcgctcccacgtcatggccgcgtcgtcggctgcagcgtactactcgccgccgccgccgctctccctggcgtccacctcgtcgacagagatggacgacgacgacggtccggcgcggcagaagccacccacgccgtgcgttgcacgcgaagaaggcgccaagaaagcgttcggctttcccgaactc

SEQ ID NO: 338182 - DNA, 71 bp, Zea mays
gaaacattctcccggagctatgctatgcgtgggtataatcgcatccgagtaggtctctcatattgagaatg

SEQ ID NO: 338183 - DNA, 221 bp, Zea mays
gcccattattagcccaaccagacataaaagcacgggcgattaatgacccttcccgacttggggataaataaggtgtagcgctgcttgacacagaggatgagaggcgcagaacgtattgcgggacatgatgtatacgtctacgaaacagtcgtgagcgtggataacctgcctgaacgtgctgaccaacgagaacctggagggggtggacacctcactgataa

SEQ ID NO: 338184 - DNA, 354 bp, Zea mays
caatgttgccagtcaagttccaccaaacattccaacagctgtgcatgctgggcagactcaggtgacaattgacatgccaaggttgggtcaagacagtggtcctcaaagcatacacaacatggagatgcagccaatgtctccaaacgtgcaaagccaatccttgcaggggttaccccttgtgccggcttccagctcagctgatatggccggagttcctgttcctcacaacgctgtgaaaagcgaagaagttagccgagttactgcatccctggcacaatactttggaaatactgctttcggcgctggtacggttggattacaaccgtcgcagccgaatatgaacgcaagcctgat

SEQ ID NO: 338185 - DNA, 115 bp, Zea mays
  unsure (1)..(115): unsure at all n locations
tcgcccacccgcccgctgccttcgccggatctcgtcggactcggatccgcccgaccaccccgngccgtcgacgcgcagcagcagcagcagatcagagaaaatggccggactcgac

SEQ ID NO: 338186 - DNA, 286 bp, Zea mays
ctggacgcaaacactgggccgcgttgcttctccgtcccactgaaccatcgccgtcggctagccgcatgagaagttcccgccgcgccgacgccgaaaccgccgtcgcgtgttttgaagctctcgaaaaaagggcgcgcagcatgagagcggccgtgaactcgccacctccgcactgctactcgcgccgccgcgccagcgccacgctgctggatgcgcgccatgtgttcgaccacgtgccgccgcagcgcctaccgaacctggccgcgggactccgcgtgcggcccat

SEQ ID NO: 338187 - DNA, 289 bp, Zea mays
aagtcgacccacgcccgtccggtcaagattcttggggcgcacaaggcaacaacatgacgccactgtacatactccggactagacttgcactgcaccgcgtggagaccccccagcgccgcactcaatgaaaagaaaggggctaatgggctcaatggtatcagtccccataaacagaagggataaaagatgcatcaagccggtctaagtctgcaaaagcacttgattcaacactacctgaagacagggctgtactcacaattggagggctacttggtgcgcttccataact

SEQ ID NO: 338188 - DNA, 364 bp, Zea mays
aagaagtcattttttgtggcagcattctgttctattgctatccaacaagccatgccagtataatgttctattgctattcaacaagtagtcatgttagctgtagcagtcatcttagctgaagcatgaagcagacatttttttgttcattttactttattgggagacaatagatagctcgctgtttttttggtttgtttaattttaagaacatcctcttcaagactatgcaatattacaatgaccagttagtactctgcatgttaagctgatagatgtatcttgctttcttcaagtatcaccagtttttgaatcatatacaaattgaactaagcctgactgagcagtttggatacagatattggat

SEQ ID NO: 338189 - DNA, 153 bp, Zea mays
gcggaagccaccaccaccgacctgtgaagcgctatgggagcacctgaggccaagccagatggtgcttgctcatgttggttaccatatctgctgcgctctgtcgcacatacctactctgcgacttgtagcctgacaggtggctaagacctgcat

SEQ ID NO: 338190 - DNA, 134 bp, Zea mays
cggggcttatgagatactgtcttcggtgggaaacagtggcaaactcgatgaaaatagacacgctgataaagagcacgcattacgtcttgcgcgagcactggcagaacatgatgatcttttgggcgaaaatgggg

SEQ ID NO: 338191 - DNA, 117 bp, Zea mays
  unsure (1)..(117): unsure at all n locations
atccgtctncactcctgggtcacttcgcctgtccctcggcctctctctctctctctctccttgcttctgggcctctcccctccaggctccaagggccctaccggcggaccggggccc

SEQ ID NO: 338192 - DNA, 319 bp, Zea mays
gttggcttctcctccccctccggttcgggttcgggttcgtgaggttctccggggttcggtttcgtgggtgagcggatcgagatggcggcgtccgatgttgagtaccgctgcttcgtcggcggcctcgcctgggccacggacgaccactccctccacaacgccttcagcacctacggcgaggtcctcgagtccaagatcatcctcgatcgggagacgcagaggtcccgcggcttcggcttcgtcaccttctccacggaggaggcgatgcggaacgccatcgagggcatgaacagcaaggaactggacgggcgcaacatca

SEQ ID NO: 338193 - DNA, 352 bp, Zea mays
ggccctgcctggcgcctgctttcaccgtttccgcccgtcgccttccacctctcgcactacagctcaagcacagcgcggcaccctacgtccccgcgactccccccttcttccactccactactcgccgcgctccccatgcccttcccgtgacgccgaaaccaaatgcttttcgctcttccatattactgtcgcggcggcggaagatgtccgcggcattgcgagatatggagaaagagaggaagcaagggttcttcgccgcgctcaaagaggaagtcgtacgggggcttgtcccggcaaggaccagaaggaagtccccggcgccgaggagcgcgtcatccgcgaagatgctgat

SEQ ID NO: 338194 - DNA, 250 bp, Zea mays
  unsure (1)..(250): unsure at all n locations
cctaaccctagcagtcgcgctccctgcttgtctcccggccgccgccgactctatctctcccttccctctcaccacctcctcgtcatcctcagcgtgcacgctgcgcgtggccgtagtggggggtggccccgcggcgcgtccgctgccgaggcgctggcctcgccgagggcccggatgcaggtgctcttccctttcaacctcgccgatgacttgtcccgcgcgctggcgcccggggcacccatncccatgc

SEQ ID NO: 338195 - DNA, 168 bp, Zea mays
cgccggtgctcctcttctcaatgaaacgagggttgctgcctcggttcggtctgagctcccatagactgacgcttccccccctgaagagaacatgcgccctttgttggaacgaaccatggaacgcacctctataatcgagcaacctccacagcggcagcggagcctgat

SEQ ID NO: 338196 - DNA, 67 bp, Zea mays
gttctgtaaaaggtgacagcgccgacgctgtgccgctggatcagctgtaacgggccgtctggtccgt

SEQ ID NO: 338197 - DNA, 394 bp, Zea mays
cggacgcgcagcactgcggcggttcggcgtccccggtgcgcggcctccatggcggctcgggcgcgcgaccccggcgaggcggcgcaggcggccatgcatacgcgtgatccccagcccagccccggtggcggagcggtccacagccacggcccccccgacgggtgcgcggatgcggccccgagcagcgacgcgtgcgcgggcggctccagccagccccggcgggcgcgcgtgcgcgacaccctgggcgtgacccctcgacggctcgtgggcgtagcccccggcggcgccggcgcagaggtccctggcgggcgtcttgcccgcgggtgcgcggccttggaggcgcgctggcaaacagccccgcccaggcacacaagcgcgaccccccgcatgggtg

SEQ ID NO: 338198 - DNA, 302 bp, Zea mays
ctgcaccccccggccccgtccgttcacaggcagttgcgtctctcattcagggcccgtgctcagtcgccgatgttgcagtgagatcgagcgaggtaagcttacatctgagctgttgctatcgcgcgtcgcagggaaagctgactcgaccttgactttatcatgctttcctgttgttcctggctccgtgttcttgctctagcatgacactgagagacccgacacgttttatattccgggcttcagatctgctgcatcttacacggaaaggatctagatctcacagagtcctagtactaagctgt

SEQ ID NO: 338199 - DNA, 268 bp, Zea mays
cacaaacgctgacagttaccccataagaacgggagggtcttcagcggctctagggaatgtagaccaaccttcagctcgtgctaaaagtatgatgtgcatgcaacaaagacgaaaagcttacagtcaactaccttctggatcatagccatgagattgacgagcagcaccaatcgaccttcggtggatggaggaaaccattgcagatgctgaacaacaagtgtcgttcttatcctatgctgctgactatctatgatttccatatatattt

SEQ ID NO: 338200 - DNA, 304 bp, Zea mays
acgggtgattcttcatcatggttctgatggggttctgattcgtgaggatactcatggatcctgtccgataacgagcgcatcgagatggcttcgctacctgttaaccactactcgttagcacatggactgagtttgcctaataagcatcactcactgcataaatcattgactacctaaactgaagcactagaatgcaagatcatcctgaattgcgagacgcagacggcccgcgtactaggtttccctatcttgtgtacggtaaaagctatgcgtaacgatattcatagcttgaacctgtatgaaa

SEQ ID NO: 338201 - DNA, 305 bp, Zea mays
gtcgtactaaaccgcacacagacaagcagacatacgagagttgatttgtacttgacatgacgaccgtgacaataaagctcactatgccactggaggtgaacgctgtcaagtataacatgcgcaatgaatatccagacaatgacgaatactctgctatctgtatgtctgactgatcagatgacatagctcaaggagttcattgtgtttccattattgaaacccgtactatggtttactgtaggaactaagcactatagggatatgatactatacagaactgcaggcactgtgaataccctatgcgc

SEQ ID NO: 338202 - DNA, 226 bp, Zea mays
gcccaatacacaccatgctcaccaacgggcggccgcggcggaggagcggagcagagagcaaccatggcgtggaagcagatggaagagatacaacggaagctatacctgctggagtacccacgggcaaacgcccccgtgcaatccctactgttcgccggcgtatagcgctaccggctactcgagtggctcttcttacggctactaggcgacagatcagcactcacgc

SEQ ID NO: 338203 - DNA, 76 bp, Zea mays
ccgatcgacaccatgagggtggtgctcggtgccctcgctctcctggctctcgctgggagcgccacctccacacata

SEQ ID NO: 338204 - DNA, 237 bp, Zea mays
ccgacacctatcgtgtgtaaggtgcttgtattgtatactgctgcgggtaacaagatttcatccacatggcttattgcaagatcgggctctgtgggcaaggcagggtcggccagctattgtccgatgggggcctgcaaagtgactacggagttcctgaagacgaaaacgattcgcaaagtagctgtgattacatctcctgcatgtccaagttctacgatgtatgctgtcagacgctgt

SEQ ID NO: 338205 - DNA, 223 bp, Zea mays
tcgaccaacgcattctgtcgggcttccccaccacctacgccaacgcgtgcggtggtggtgaccgacctgctgtgcccactctccatcttaaccggttgctgccgtagtacgaagtgttgactggggcgtacctgcctgtgggcatactgcgagcgctaccatttactccccacggttgatgaggtaacgactgcgatgggccgaacatcccatgcatgaagtg

SEQ ID NO: 338206 - DNA, 296 bp, Zea mays
gcatgcgcgcgctcgtaactgagagttctgcaagcatccacgcgttactcgagggctgaccggatatagctcattggctattacaaagattaggaccgaaatcccctccgtcattgacgctcgccgatggctacaaggccaggcgactgtgtttccccccaactatcgatctggatacaccaccactcgacgcataaaaagtctattgcctcgccatggccatgagttagtatgagagagagtacacgagcgttgccgtccggagagtgctcaacggagacgagtactggacgttc

SEQ ID NO: 338207 - DNA, 54 bp, Zea mays
gtcggatctgagacgagacgagttaccatcttatcccaactccggaaggaacaa

SEQ ID NO: 338208 - DNA, 242 bp, Zea mays
gagaccgtggacggcacgaccgatgacgttctgaacctgttgtgactgaagccccagaacatgatgtcgcatctatttaagatgatgctgtttgggatcgccaagcccttccatgacatgcggagccccagttgcacagggcggatactgttccctcaactatactcagaatgcaccgtggcaggtgctgaacaacgtatccgatgttcgcaatttacaggtggagcttccatcagcagatg

SEQ ID NO: 338209 - DNA, 221 bp, Zea mays
cttggatcctttaaaatcgacccaacccttccgccaggcaaaaacattgcgaccacaaaaagggcgcgctttaaaggcttttttttttgagataacaaagaagaaaaggagaaattgccgtcaccatcaagtgggtgaaaggcaagcaaatctttgacagaacccgcaaccccaacgtccaagtggacgtgggccttaaccacggcagcttacccaagggg

SEQ ID NO: 338210 - DNA, 373 bp, Zea mays
gctcaatcatttcctttatatttttctatcgccagcgcctgccaaggcgcggattggcaggagcggggatcgcactattattgtttggctccccactatgtcttttccaatcaagcgccaggcgatggacctcatgaagcttatgatgagctacttcatggtgagtatggtgtacgaccggatgcatgtatcttttgcagaaattcgagtgcctaacgaagacttttatcaaggaacgcttatccgaaggcataagtctaatagcagacacatattcttactaatccacatcgattcgctacatcagtacgatatattacccgaatatcactgaaaagattgtatgagactgtctggatgttattaaccagac

SEQ ID NO: 338211 - DNA, 311 bp, Zea mays
cggacgcgtggacggacgcatgggcggggaggtgtacgaggacgaccgttaccggacgtggggtggctccttcgccctgaccgtccgggaccccggggactcatggatcaccgcgctcagcaaccaccttggctggctaagtgccacctacgccgtggtcatgttccaatcgctccacgtcgggaaaggcgccttggacagggacgacacctgggtgggcaggatcgacagggcgcccgagcacgactgcggctgcgtactaatgagggcagtcagcggcgaggcgttccgctataccagatgcgtcgtca

SEQ ID NO: 338212 - DNA, 347 bp, Zea mays
gcaccgtccaagccggctttcgcctttgcctacggggagaccacgagttctgacgagcggggtatcctgtcagtgtctcgtgctgctgctgccttctctctgaacgggatgtccgcgtccgagttccagccaagatagaatggaagaattaattacaatcacggaagacacggtacaaatatagatacggttcgtggctcgtggccatttgtaatggaagtttacgtcaccaatttttttttccaaattatcaccactatttttccccatcgggataaagttgggaagttgtgctgttgttcacggttcactagggtatgtttgggacagtgaatggcttatgaaag

SEQ ID NO: 338213 - DNA, 395 bp, Zea mays
gcttctcctccccctccggttcgggttcgggttcgtgaggttctccggggttcggtttcgtgggtgagcggatcgagatggcggcgtcggatgttgagtaccgctgcttcgtcggcggcctcgcctgggccacggacgaccactccctccacaacgccttcagcacctacggcgaggtcctcgagtccaagatcatcctcgatcgggagacgcagaggtcccgcggcttcggcttcgtcaccttctccacggaggaggcgatgcggaacgccatcgagggcatgaacggcaaggagctggacggccgcaacatcaccgtcaacgaggcccagtcccgcggcggccgtggaggcggcggcggcggcgggtaccgtggtggccgtggaggcggcggc

SEQ ID NO: 338214 - DNA, 378 bp, Zea mays
aggaggtgcagcggccggcgcgcgacatccccgccggcgtgtccggctccgtcgtcgtcgtcaccgtgctctactgcctcatggccgcctccatgtccatgctcctcccctacgacgcggacggtactcctctctgctctgctctgctatgctctctgaaacttgactttgaagagatgccgagatcctgccgaatagggctgctatatttagagctcatctttggttgcgtaggttgccaccgcaagctagctgcatctgattccggcacccgcttctgtttgtccgcctcagcttcttcttcttttctgggattgtatgggatgttgatttgggtggggggatgaaatgaatctgccgtacgtcccgatcccaaac

SEQ ID NO: 338215 - DNA, 414 bp, Zea mays
gttggcttctcctccccctccggttcgggttcgggttcgtgaggttctccggggttcggtttcgtgggtgagcggatcgagatggcggcgtcggatgttgagtaccgctgcttcgtcggcggcctcgcctgggccacggacgaccactccctccacaacgccttcagcacctacggcgaggtcctcgagtccaagatcatcctcgatcgggagacgcagaggtcccgcggcttcggcttcgtcaccttctccacggaggaggcgatgcggaacgccatcgagggcatgaacggcaaggagctggacggccgcaacatcaccgtcaacgaggcccagtcccgcggcggccgtggaggcggcggcggcggcgggtaccgtggtggccgtggaagcggcggctacggcggtggcggg

SEQ ID NO: 338216 - DNA, 105 bp, Zea mays
tcgaccagctcactcgtgacagtggtcgctccgggcataccagccacgcgacctgccggcggccctgctatgcctatagatcgagaccttctagctggccacgag

SEQ ID NO: 338217 - DNA, 230 bp, Zea mays
tcgaccagctcactcgagacggcgcacgctcacacagtttcggaccagaccctgcaggcatgccagctattccctatagagagtgagataagagcttggggaaaggatgggcatagctgttggctgtgcacaaacggcatgacgggacagatggacacaacacacgagcctgacagcatgctgagtataaccagcaagggctgaacgagatacctaacatcacatataat

SEQ ID NO: 338218 - DNA, 382 bp, Zea mays
gtcatcgatctcgtttcaaatccatccatcctcgtttcctccgtcccgcagcatctcaaccccatggccaagatcaagatcgggatcaatgggttcggcaggatcggaaggctggtggccagggtggccctgcagagtgacgatgtcgagctcgtcgccgtgaacgaccccttcatcagcaccgactacatgacctacatgttcaagtacgacactgtgcacggacagtggaagcaccatgaagtcaaggtgaaggactccaaaacccttctctttggtgagaaggaggttgctgtgtttggctgcaggaaccctgaggagatcccgtggggttcggttggtgctgaatatgttgttgagtctactggtgttttcactgacc

SEQ ID NO: 338219 - DNA, 287 bp, Zea mays
gttagggcagcgatccatacccacccgagccaacggcccatgggcgacgagacgccgcgtctcctgcttgaggacgggggccttaccctcgacgaacttgccgccggaggatcgccgtctgtgggggtggagccgccagtgctgcaagaccaggtcgagctcctgctgattgcaaggagccggacttcgcggactgaatggtctgcgtgcggacgatgatccactagaacacggagctggtatacgaggagctgcagacacagctagctcgtgcgccgggagctcca

SEQ ID NO: 338220 - DNA, 252 bp, Zea mays
tcaacccacgcgtacggtctgcgctactcgttccccaggtcgagcgcacctgctcccgcaccgtcctaccgaccgaacgcccggcctcgtgacccgagaaggcggcagcgctgagcttaccggaggtcgcgacggagtctgtggctttggacgcgcccggcgccgacttcaagctcgggagggagcggggcgcggccaccccaagcacgaactcggcgccgtaatgctgaaggcaacagacgggcctggcgg

SEQ ID NO: 338221 - DNA, 376 bp, Zea mays
  unsure (1)..(376): unsure at all n locations
agtcagacccacgccgnntccgggaaaagggcgagctcttctcactctgtcggactcgcggcgatagcagcaggcacccgtcgctctctcggctccggccgtacgggcaccggaccggctcacgacctttgtcttactcgcatcggttcgatcgaattcctcggtacccatgaggggtgcgcctgaggggcaagaatcctcgccgtcgcgccgctctcataccatcgtgcagagcgcctgcnnacctagtaggccggaaggctnntgcttctattggctagtcagttgtccaaaagggggcgcgccggctgaacataagttcgctcgtgcctgtccaatggcgcgcggcgattccctggctattagtggtgggggg

SEQ ID NO: 338222 - DNA, 256 bp, Zea mays
gactcatgccggttatttacaacgggatcaaggaatggtgcgcccggagctactactactagcggagcaacctgcaccgcgtcgacgcgacacagcgtgggcgcccgtactgtcgaaagcccggagccacatgctgaaaaccacggggagtgcgcttccgactggggcagggcgcgcgctgaccgggcagaggctctggtcaatcgcaatcagcgctcacacgggctgctgccagcatagtcggacggctcggctt

SEQ ID NO: 338223 - DNA, 156 bp, Zea mays
gggacagcaaccaagcacgcgtccctacctgccgaacatcccagccagcggtagccggttagtccaaatgatcttcagtagccagcccgtcagccggattgcgatgggctctagtccgacgcgatggaaggactcataaaggttcgccactggcat

SEQ ID NO: 338224 - DNA, 98 bp, Zea mays
tcgaccaactcattcgtgacagtggatggcaactgaatctcagtccggtacttgcaggcgtaccatgcttacctagagtgagtcgcatgtgagcttgg

SEQ ID NO: 338225 - DNA, 407 bp, Zea mays
gttcgttcggagcgcacacacacacaaccagatctcccccaaatccacccgtcggcacctccgcttcaagatgcagatctttgtgaaaaccctgaccggcaagactatcaccctcgaggtggagtcgtctgacaccattgacaacgttaaggccaagatccaggacaaggagggcatccccccagaccagcagcggctcatcttcgctggcaaacagcttgaggacgggcgcacgcttgctgactacaacatccagaaggagagcaccctccaccttgtgctccgcctcaggggaggcatgcagatctttgtgaaaaccctgaccggcaagactatcaccctcgaggtggagtcctctgacaccattgacaacgtcaaggccaagatccaggacaaggagggcattc

SEQ ID NO: 338226 - DNA, 407 bp, Zea mays
  unsure (1)..(407): unsure at all n locations
ccagaagtgaacagcctcaaacacaaactagagaagataggtgctagcttagtgaggttaacccgtaggatgtcgctggaagacagtttcaaggagagggtagccatgtggcgcagggaacatgacattatttacaaccagctcccagtgctgctagagaagatggacatcctatttcctgcggagaacatggaaaactcggagcccgagaacaaatctgaaacaaagaatctggtcgccccgctgccagccgtgacgccggaggaaataggggagcgctacaaggatctggaggagagcatcaggggattcatcaaggatctggacgaggccganaaggaggaggaagaagacggaagcacgagcgaggcggcatcgccgtcttcagtggacgatgagtaataatc

SEQ ID NO: 338227 - DNA, 171 bp, Zea mays
tcatgaacatggggcagcaactactcaaggcgcggatatggacagcaacggcttggccatgcagccatcccatcatgcatatcgggatgtggactatgactgctctgaaaagcacacaagcaccttctttgacgctggcgttcaacttctatatgatatatatggggagga

SEQ ID NO: 338228 - DNA, 258 bp, Zea mays
atacagtagacccacgcgtcccgcgatggcatctgcggctgacggggagtgggaggcggatgatcggaaggtgctagcaggctctcaagccctcgcttaggctacctacggcctgcccaacctggctacacgtgctcctctacctccacatggacgcatgactgctctgacatgcacataaacaccttctttgacgatgccgatcacataccatatgacatatgaggggatggtcaggctgtcaacaacgagcatgga

SEQ ID NO: 338229 - DNA, 291 bp, Zea mays
agagggagctgacgcggcgccatggacgaggaggagcacgaggtttacggccaggaaatccctgaggacggcgacatggacggtgctgacgttgatatggatgcctgcggggatgacgcgacgaagctgcaggagctcgacgagatgaaacgcaagctgaaggagatggatgaggaagccgccgccctacgcgatatgcatgccaaggtcgccaaggagatgcatggatgtgaccctagtgcatctacaactgaggcaaacgagcaggtggatgcccgttctctgtatgtt

SEQ ID NO: 338230 - DNA, 365 bp, Zea mays
  unsure (1)..(365): unsure at all n locations
ctcgtttcaaatccatccatcctcgtttcctccgtcccgcagcatctcaaccccatggccaagatcaagatcgggatcaatgggttcggcaggatcggaaggctggtggccagggtggccctgcagagtgacgatgtcgagctcgtcgccgtgaacgaccccttcatcagcaccgactacatgacctacatgttcaagtacgacactgtgcacggacagtggaagcaccatgaagtcaaggtgaaggactccaaaacccttctctttggtgagaaggaggttgctgtgtttggctgcaggaaccctgaggagatcccgtggggttcggttggtgcttgatatgttgntgagtctactgggtgttt

SEQ ID NO: 338231 - DNA, 415 bp, Zea mays
  unsure (1)..(415): unsure at all n locations
gcccatccctcccgcccgccaggtcccgcgagatctctcacagccccctcagatccgcctaccctcgccgccggcgcgctcgcgcgctttccgcacgcccgccgccatgtcgcacaaccacggcgacacgatcccgctccacccctcgtcggcgcagtccgacatggacgagatcgagagcctgatccacgccgcgccatccccggccaccgtgctccccgcgcggtcaccgtctccgacgcgggcctccatacccgtatcttcctctccggccccgtcggccgtccccacgaagccgactgtccccgccgcttacatcccaatctccgtctgcgtctcccccgttcccgttcccgcgtacgtctccgtccccatcggcgccgacaggtttgggtctncgnccaacacgctcacg

SEQ ID NO: 338232 - DNA, 224 bp, Zea mays
gttcttgattgcgagcggccaggtcgggagtgatctatcagatcctgctaagataccactctttctgtatagcggggcgcttgagagctttgcgtaatcatggccaatgttgcacaacgactgaaactggaatccgctcacaccttcatacaacctacgagacgtggacatgatctgtagcgtcattcacgcctaacgattgaggtaactcacgttaattgcgc

SEQ ID NO: 338233 - DNA, 286 bp, Zea mays
gatcagcaaagcggcagtgcgtagagaggatcgtcgaacagaacagcatgaagatggtcatcgttctcgtcgtgtgcctggctctgtcagctgccagcgcctctgcaatgcagatgccctgcccctgcgcggggctgcagggcttgtacagcgctggcgccggcctgacgacgatgattggcgccggcgggctgtacccctacgcggagtacctgaggcagacgcaatgcacaccgctggcggcggcgccctactacgccgggtgtgggcagacgagcgccatgta

SEQ ID NO: 338234 - DNA, 297 bp, Zea mays
cgctgggcttgatcgggcttctacatacatggctcggtagcacatggccttgcactccgccgtgggtatcgacggactccactcgccgcgaccaccgctggctctggcttgaacagacgcgtgtgcatgtatcatcgtcgggcggtactagcatggccgcggcagcttatgcggctgtggctcaacagcagcggcggggaaggaagccgttcctgtgtgtgcggcagcgtgcttcgggtcggtgggtggcagatatacatgccaccatccagaacatccgcgtgtggctaggcacct

SEQ ID NO: 338235 - DNA, 197 bp, Zea mays
actgaccgcggtggcagcgcctctttctcgcaccaccaccgggactcaacacagcacatgcagctcgagagagatagagagagagagagagataaagatgtcgtgtgttgggcaccaccaccacaaccagccggcatgccccggcatgcttcccaaaccaggtgttgaagatactatgccgtgtccacgagaactac

SEQ ID NO: 338236 - DNA, 259 bp, Zea mays
tcgacccactcattcgtgacagtgggggccgacttcatttttggccagtattttgatgcctaccaactttcactatgttaagcaccattagaacctgccattgttaaggctaataaaccttttaggtgagattgtggtagacagcaagaattttgatgaacatacaatcatgaagcatattgattatagcacgatgcgtagagtgatgaatctagacaagatcaatggcatcgagctatatgtcatgttttttttccaa

SEQ ID NO: 338237 - DNA, 328 bp, Zea mays
aacaaaaaataaaaaaaagaaagaaaaagagagaaatgtcagagacacatgagaatgcacgacccgtaggcggaggcgcgactagcgcgctttacggacgcgccgcggtcatgtcgcacaaccacggaggcacaaaacgcgctccaccaatcgtcggagctaactgacatggacgagatcgataggctcatccatgcggcgccatctcgggccacggagctacacgcgcggccaccgaatggaacacttgtctacatacaaggatagttatctgcgggacagacgctcgtaccgacaaagctgactttgcctggcgattacataccaa

SEQ ID NO: 338238 - DNA, 242 bp, Zea mays
gggtaggtttctactaatcctcaggctcggtatatggtactggaggttgtcaggtgtttttcatcctggttcagcatacatagattgtgggtgacatatgatacgacagtgaattactatggaggaaacacctgctcacgcgtaatggtataaccatcaatgccttcatgaaacgaaaagcattgtactccctaattatttcatgctgaacatgctaacagcatgatggtctctatttaaac

SEQ ID NO: 338239 - DNA, 203 bp, Zea mays
acgctcgcgacccatcgtgcatacacacgccagcctttttgttctccccgcgtgcgctccttttctgtatctactggcgactactccgtcaccgccgccgatctacatcgtgacgcccacgtcttcgacaaccacgagtcatcgttttcgtgaggatgaaatagcaaccgaaacaatggcagtagattcccgctctcgcagac

SEQ ID NO: 338240 - DNA, 251 bp, Zea mays
cggacgcgtgggccggagtcagacacgcctgccccgtcgcgcgcatgtctgcctaagcgccgctccgcccctgccctacgagagcactctgcggccaaggttgcaggctgcagccaccaggcctctacggtggaggagaagaatggaggatgctgccaaacggttgagatgagactccgcttcacaagacagtctccacagtgaatctgcaatgggtagctcactgcagtctgatggacataggagagatg

SEQ ID NO: 338241 - DNA, 200 bp, Zea mays
tcgggatattggtcgtctccgaactctcgctccgaaggctgcaggattacgagctgtccctatagcgtgtgacataaatgcttctggtgaatatggggatcgctgattactgcatgtaaaagctcgccattcacaatgatggacaaactgctaaaactacatatgaaaagaggcatctgacgtggccaattttgtaagaa

SEQ ID NO: 338242 - DNA, 390 bp, Zea mays
aaagatctcttaatggattttcaggcgctataaattcgagtgataaaggacaggtttcttccagccgtgtccgccatgcattggctatgggtgacatggaatacgtctctgaattactagggaggaaacaccgtcttttgctaatggttaaccaacactgccttcatgaaaagaaaagcattgtactccctaattcttgcatgctgaacatgccaccagctgaaggtctctatgaaaactgcgaccttgttaatggagggtatcttggaccatgtagagtgatcatcaactctgatactatcatcattgagatgaaagatgataacagtttatccctaaatcctattcaagaagttcagttagggattgagtttggatgaagttatatac

SEQ ID NO: 338243 - DNA, 382 bp, Zea mays
ccgtcatcgatctcgtttcaaatccatccatcctcgtttcctccgtcccgcagcatctcaaccccatggccaagatcaagatcgggatcaatgggttcggcaggatcggaaggctggtggccagggtggccctgcagagtgacgatgtcgagctcgtcgccgtgaacgaccccttcatcagcaccgactacatgacctacatgttcaagtacgacactgtgcacggacagtggaagcaccatgaagtcaaggtgaaggactccaaaacccttctctttggtgagaaggaagttgctgtgtttggctgcaagaaccctgaggagatcccgtggggttcggttggtgctgaatatgttgttgagtctactggtgttttcactga

SEQ ID NO: 338244 - DNA, 216 bp, Zea mays
tcgacccactcattcgggtcggttggcttctcctgaattaccggctggtgtctacgtgctggctagcgggccatatggaagagatggttgcatctggcgttaattaccgtcattgctgtggcctgcttgaaagtgccatccactaacacttcctcaccacctacttgcccacctactgaaaggtactggcggcggagatcaatcaggatcctgaca

SEQ ID NO: 338245 - DNA, 103 bp, Zea mays
tcgaccaactcattcgtgccagtcggcggcctgggaatgcaagaccggtacctgcatgcgtaccagctgtacctataaggagtcgtgttagagcttgtcgtgg

SEQ ID NO: 338246 - DNA, 332 bp, Zea mays
tgctattattcgtgtctatcgtcatggcgggaaggaggcaaagaggaaggaagcgcctggggagctccagacagacagacgaaccgcgcaccatggctacttgaaaacgacagacgaaaaccttagctacggcgcgcgaccgggcagatgaggcgcttctgggcgatgtcgaatgcggcagcaggagggtcaatgactaggcggagaatggaagacgaggaagcagcagcgatataagaggcagatgcagggcacagcggcaggtgcgaagctgatgatgacgaggtcaaaaacatctactacacattggacgaagaaggctcgaaagacta

SEQ ID NO: 338247 - DNA, 57 bp, Zea mays
atcggatcgagatgggcgcaggagagacagagtgcgcgggcttccatcgatggcctc

SEQ ID NO: 338248 - DNA, 136 bp, Zea mays
ggccaatcgagctccctggattatcgaggatcatggtgcagatctgcacgcagatcgtatttggcctcgtgtagatcatggctctgatcgctggcaccgccgatgtattataaatggtgatgacggacccgaatct

SEQ ID NO: 338249 - DNA, 203 bp, Zea mays
gtacaaggcatgcagtatttgtacgaaccatagcgccagagcaccctcgagaatgggtgtggacctctcgtcccccgggaggtattagatgaccatgcgcgctgcgcccaaatgcgtccatgtgtaccttaggcttctcgtcacagctctacccgtttctatgtaccgacgaccaagcatcttttcaacgctgtcattctgaa

SEQ ID NO: 338250 - DNA, 419 bp, Zea mays
gcgcctcactggatcgcaccaaccctctcccgctcatcggacggcgatgcaggtcggggacggcggtggggactcggcggacttgcggggccgccaccggatccaggccgagctcaagaagctcgagcaggaggcgcgcttcctcgaggaggaacttgaagagctcgataaagcggataaggtatcatctgcgttgcaagagtttctaatagcaatggaaaaaaaagctgaccctctacttcctgtatctgctggacctgtgaatcagtcctgggataggtggtttgaaggtcctcaagatctgcgcggatgcaaatgctggtttttgtgatcctgggcaatattatcaagagaaacagcaagaggcgattattgctacaattcaagtgtacatcgttttttttgtcccccgcagtata

SEQ ID NO: 338251 - DNA, 220 bp, Zea mays
attagctttatctactccagagcgcagaagaacccgatcgacaccatgagggtgttgctcgctgccctcgctctcctggctctcgctgcgagcgccacctgcacgcatacaagcggcggctgcggctgccaaccaccgccgccagttcatgtaccgtcgccggtgcatgtgccacctccgggtcacctgccaccttcggtgcatttgccaccgccggtcc

SEQ ID NO: 338252 - DNA, 263 bp, Zea mays
acggcgggcgctacgtattccagcgcgcgcacgtacgcaagcgtcccaacgtcgccgttgctggctccgctctctcacgcggctgtcgctgcgagcgcatactacaagcatacaagcggcggctgttgacggctaccaccatctcccgtacatgtaccacgctcggtgcatctgccatctccaattaatgttgctacacaaaagtatttatcacagcatgtccagatggaggctacggaacatctacatacgctcatccatga

SEQ ID NO: 338253 - DNA, 52 bp, Zea mays
aaaagctttttttcaaaatgtgcatttgcatcctaattgtctttttaagggc

SEQ ID NO: 338254 - DNA, 213 bp, Zea mays
gggaaaataggttcattttcatcctaatcctctttcgaagggccgttgagttttcaaactagccctaaactgtagaaagtgtttatgttgtttctacaagacactgatgcttcagcatcacaggatcaaatcgcatcagcaataagtgccatttgcaaaaaaaaaaaaaaaaaaaaaaaaaaaaaaaaaaaaaaaaaaaaaaggggcggccgc

SEQ ID NO: 338255 - DNA, 318 bp, Zea mays
cgtcgacaagccaacagcccagcacgcaaagggcactgtgccgttacggcgcggcggagccggaaactcccgagtcgcgtgacagtaaacgaaggcacgaacgcgactcttgcatccaactgtcgaagcaaccgaatcggggacaaccgagggcgagggcggccggcatggggatcgtggaggcgtggatgccggagaagcccatccgcaccttactagcccgactcgcccagcgccgggcggcggatgccgacgacttactcgcttccccctctgtcaccacggtcatcgatggcgaaggcggcggcgaccggagca

SEQ ID NO: 338256 - DNA, 116 bp, Zea mays
gaggggtattactaaaatggtgaaagcattgggtgaccacctggttctgggtaacttagctaatgcgacactgatcatggggaatcgggatgacactcctgaaacgtccagctcgg

SEQ ID NO: 338257 - DNA, 407 bp, Zea mays
  unsure (1)..(407): unsure at all n locations
ctctgaacagcgaagcacccatggccctcgccaccacagccgtctccctccaccttttcctcacccggcccgcctccgtgctccgcgtaggccgcggcctcccatgcctcctcctccgagccacttcgtccacctccgcctccccggacttcaacatcaccttcgcggagcccgcgccgtccgaaaaggccccgtccgcgcagccgctggtcccgtggatcgtccgcggggaggacggcaagccccgcctcagcacctccccgccgccggacgtaatccangccatcgcgctcgcggaggcggaggccaagaaggccgccaagaaggaaaccctcaaaggccagaatggcgcanttgccgccgccgccgcggctgcttccaatgccagcgtcaagggcaaggaaagg

SEQ ID NO: 338258 - DNA, 348 bp, Zea mays
acacatcgacgctaaaaaccctagagcgaggaggcgtgccaggccagctgtttgcgatgacggcaccggtggacaaggggaagaatgccaagacttatgcctacggcggcgaggagaacgagctaatcgacggggcccttgtcttttccatctagaagcttcagtagattcatgacgagcttgagaaggtttatgtggaagcaagtgacatggttattgaagtggagcagatatacattgagattcgcagaccttgttatctcacgaggggtgacatttttaagaccatccttgactttttgctcacagcgtttttgagccatcctctactaaatgagctttttactg

SEQ ID NO: 338259 - DNA, 116 bp, Zea mays
ggttaatcaaccacccatgcatgggggggggcttcttgagtgtctacgtgcagatgttgatggggcttgtcgactacgtggtccgtgtaggccgcatcatttcatgtatgcagata

SEQ ID NO: 338260 - DNA, 170 bp, Zea mays
acgctcactctccgctggtcgctcactcttgcagcttcacccttcactcaggcttagtctcttattaactctaggctctagctagccgcgccactccttcgtgtggccataagccttctgatcgacaccaatggccactgacgaggtccagaccccgtccgtcgtggcgg

SEQ ID NO: 338261 - DNA, 167 bp, Zea mays
tctgtctgaagtcattttaattagaactcttaaagctcgtggtcggtcggtcggtcggtcagtcagtcattgtcgttgatgtccagcgttgtgtttttttttttaatattctctaatggaatctttcagattgaaaaaaaaaaaaaaaaaaaaaaaagggcggccgc

SEQ ID NO: 338262 - DNA, 264 bp, Zea mays
tcgacccactcttccggttcaaggaagcaggcgtccaccatggtgaatgggcgcacggtacagcgcgtcatgctctacttacggatcaccatccttggatacaagaggttcaattcgaaccagtgctagaccacgtcactcgttcatatcgaggagttgaacaccaaagaagacttcgcgtgttacactgtctagcgcatggcttacatctacagggctaagaccaagagcagcgagacccgctacaggtgcatatggtgcaag

SEQ ID NO: 338263 - DNA, 272 bp, Zea mays
acgcaactgatgtgagcactagggttggaggaacgagtaagatacctggctgacgaatactctgtgagggggcatgtgacgaacaaatcgtatatctatagtatcggcgtcttgctactgtaaattgatgctgatatatgtaactacaacaatatattgcctgactgagacaataatgttgtcgagaagacatgggcatactacctgcagaaaaagctagataaggtcataaacgccgaaccatggtaggacctgaactgtgaggatgcatg

SEQ ID NO: 338264 - DNA, 256 bp, Zea mays
accccgtcatcgatctcgtttcaaatccatccatcctcgtttgctccgtcccgcagcatctcaaccccatggccaagatcaagatcgggatcaatgggttcggctggatcggaaggctggtggccagggtggccctgcagagtgacgatgtcgagctcgtcgccgtgaacgaccccttcatcagcaccgactacatgacctacatgttcaagtacgacactgtgcacggacagtggaagcaccatgaagtcaagtg

SEQ ID NO: 338265 - DNA, 271 bp, Zea mays
gttcttcgtctgaaaaagcctcctggatgcaccgggagaggtcggagaggctgaactgtctcctaactcttctcttgtcaagatggtagatgctaaatctcattctgaggaagtcgccaatggtgaaaaatgtggctcactctaaaagaccaacaacatccgcacgtgcgggacatgggaacgaatggagatcctgctgaaggatcgggatcaccaatgaccattaataaggattatcggactgaacaagcttgatcagcactaaatagtc

SEQ ID NO: 338266 - DNA, 251 bp, Zea mays
ttatagactatccactcttccgtttaaaacaacataaatccatcattcgcatcaggcgaactttatgaagttgctaccatttaataaaactctatgcctaacacctttattactactagtttactacccgggatctaacttatactaacaatgacaattgctagcgattctcattgatcgaacgctgatgagcccttacactagtttctaaactaccttccctctcttgacatgttcaatattttacatcc

SEQ ID NO: 338267 - DNA, 117 bp, Zea mays
tcgaccacacgcgtccgactgaatacactcactatcatgcccaaaggcgattgtatggacgcatggcagtcatataaggcctacaatatctttgcttttactgaccagatctacctc

SEQ ID NO: 338268 - DNA, 301 bp, Zea mays
cccagcacgaccaaaacccataacctgagaatggcacacttccttcgcggcaaggccgccaccgccgtcaccgggtcggcggcgctgcgcgcgtcgtgtccgacgccatggctgcggaccgcctcctcgtcgtaccaccacacgatccaggctgtaccgcgggagacagccggcccgcgcgccgaggcgcgcgagcgccgtcactgccgagtcccggcggtgctgctcactctcgatgtcgccgcgccagggaacggtattgcccaccgggacctccttaccgtcgacaggaggcagctcg

SEQ ID NO: 338269 - DNA, 100 bp, Zea mays
tcgacccactcattcgtgcctgcggactacactgtaatagccgaccgatacctgtatgcttaccatgctctcctacattgagtcctatcaaaccttggcg

SEQ ID NO: 338270 - DNA, 321 bp, Zea mays
tcgatccacgcttccgttctgagccacagcactcagtcagtgggttcaggtgactttattccccacgcgctgttccattcaaccctagtcactgtcggttcctttgcggcatgctctcgtttggcttctgacctgctccttctcctccgatgcctggcgattctcattgcttgtatcgtgatgacgctctttcacttgtatccgaactaccttccttatttggacttgttcaatcgcttacatcctttatgctttcttgtctagcgcttgtttatgttctcgattatgtcttcggctagtcttatgttcaatgaatacata

SEQ ID NO: 338271 - DNA, 184 bp, Zea mays
tcgtgacagttgccggcgtcggactttgcacccggttcctgggcgcgtgccagctctccctatagtccgtcgtgctacaccccgtccaaatcatgttcatagacgtttacagtgtgaaacactaatccactgacgctcccatacaagatgccagccgcgaggataaacgctcaaggctcgggtg

SEQ ID NO: 338272 - DNA, 127 bp, Zea mays
tcccgagtcaggagaggtcaagggggctacggctgagctcccccttctcgtccgcgtctccatcgccgcctccgcttatctcccatggctctcgcccgtcgctgtggatcgaggcagtctatgcacc

SEQ ID NO: 338273 - DNA, 204 bp, Zea mays
ttactcccaagtgccgtcttatatggggccggggactttctaaaacccttacccctctacctctcaagatggctttacctcccacggctcccgccgcatccggaggcccaagctactctgcgtcctgaccgcctccatcggcgcaagtggtgggcaaaacctcattgcattattactacaacatgctgcaccagtcgcctgaac

SEQ ID NO: 338274 - DNA, 276 bp, Zea mays
tggaagtgtcgggctagttagtacgcgttgcgcgcattatgaaccagttatcaaatcattcactttccctagtcgcagtcgaagtgcatgaaacgcacaaacgatttgaagtactcacagctggactcaaagcacacaactatgccatgtgccatcaactgctacacctgctgctggaacagatctactgcgctacctagttcatcgaacatcttcagcactgccaccgcatgatactaatgcccacactagccattcaacaaatagtgtgacacc

SEQ ID NO: 338275 - DNA, 373 bp, Zea mays
ttcatcctatatagtcgacccaccttttcactatcctcacttaacacaacacggccagtgtgatggataaatgccagacacgaaacattattgatttacaccctattaataaaaacctctgaacatatcttataaccatgctccacggactactgactcaaccgtgcatatgcaatcaatactcattcaccttatacaacctcatcttaggtacgaatgcatccataaatttaacctaaaaacactttcatatgccgaataccataataaacccgctactaccttaaattatggcataatgaaatctttactctacaatgtaaccaataatccaaatcaatatcaaacttatactcctctcaagatcattcct

SEQ ID NO: 338276 - DNA, 262 bp, Zea mays
  unsure (1)..(262): unsure at all n locations
accacccacgcgtctgttagacaatacgcctatggcacaggagatgcgccctagtgaagcattagttacatagatcacgggcgcgcctagcactggaagtgtatgaaccgcgcacccgtatggacaagcgcacccaactactgatagcatcccacattgctatgtgcgatcgatagatcaataaaaagcgtgtacagatgaactgctcctttcacgacctntaacaggtcgaccattgcccgtgcatcgaactaatgcacac

SEQ ID NO: 338277 - DNA, 164 bp, Zea mays
ttacccaggccacttatcactccaaaaaccactcacgtacatgattgtagtattctaacacaccatctacattgatcatacatactcatttttaaaaactactgttacaatccactcctctgatgacatgaatattcaccatcattactaaaacattccttacc

SEQ ID NO: 338278 - DNA, 280 bp, Zea mays
ccaacttcatacttcgagcggcggggaactatcccatagcgatctcatactccaccaacgatttcaagaagccatccgagggcttctaccacatcaaccttaacgcaaatggacaccatggacatctgttgttcttcatcattatgaagtactcccaactaaccaaccattttaacgcttatagcaaccttcactctatggtcatgaatgccaaatccatcctgatccattgccacaaccttaacggcaaccatacccccacttacctccatattcaata

SEQ ID NO: 338279 - DNA, 225 bp, Zea mays
cagagcctgagggttaatccaagaccaggttcggaaatgcaccaggacggagaatggtcttgcaacattatgtagagagcggagcatagttacttgagcttgatggatatgctctcgattcagtactatgagatggcctgaattctctcaaaggtggctaagactgcaaacgtgctagagcactatgctggagaaagagtgcgtctaaatgttgattactacatt

SEQ ID NO: 338280 - DNA, 232 bp, Zea mays
ccctatttgacggttagtcacagccgatgaggggaaacgcacaaggagcgagaacaacactctacactgttgccgagaatcgaaatggttaccttgagcttgatgtcaatgctagcctgcaggcactatcaaatgcccataattctctcaatggttcatagcgactcatacgtggtacttctcatgactgatctacccatactgtgatatatatggtactttactggaatct

SEQ ID NO: 338281 - DNA, 190 bp, Zea mays
aatcctacaccaacaccttccagattatacgcaaggcattctacctcaccaccaacgacacacacaagcgccagttacttcttttgacggacactgacatgccctactgatacctacatctccaccacctacgaaaacacatacctaaccacaatttcataatttacgaatacatctggagccatcacga

SEQ ID NO: 338282 - DNA, 324 bp, Zea mays
cactctatactcaaaccaaatttccattttaaaacataacaacctttaagaccgctaccgtgtgcccattacatctttgacaaccactccccatcctaatttaaaaaattcactatataactcccacatcaaaaataattttgatatcccctccacaaaagacaacccatacttctctactcacctctctgcacataacgcccaaaaggagacacataacactcactacttgcagttttagcacacactaaaagccccactaattgacaagtttctgaccattctttgctggaactcttttaacagataaatcaccctctatca

SEQ ID NO: 338283 - DNA, 247 bp, Zea mays
atccattaaccttttctattatcataatctttttccatcttcgcttccatcaccatttagacccgttttcgtataaattcaaccttatctcaatctccgatatcaaacttcatcaaatccactatgccactcctttgatacgacgaccatctactctttctacaactgtaactctctatccacttttttctccaacctatcctttaacttatcacaaagatataattgtttataccctattctaccc

SEQ ID NO: 338284 - DNA, 388 bp, Zea mays
  unsure (1)..(388): unsure at all n locations
ccatcttaatttttattctcatggataaccactttccataccgttacctgttccatttcatgtctaacaaccactcccnatcctaatctgaaaagttcactattaaatcccacatcaaaattaattttgatatcctctccagaagattcaacccatacttctttattcacctctctgtccataatccccaaatagagacacataacactcgttgctctaatttttatcatacactaaaagcccaatttatctataatttgtttaccatttttttttgcatttttttcaataattaaatcaccctctataaatcaatgtacattcctaactcgtttaaaaaaatatcttcttaaatgctctatttttcttccacatttccaattttttt

SEQ ID NO: 338285 - DNA, 175 bp, Zea mays
tacgagtacaccccaatcactgacgatagggcggatgtgcggaagatcgatgatttctacttcaatctggcccctactatcaagtgactatcccccactcactaaccacataggccgccggatgaacagcaagtgtgaccacatcggccagagctagcataacattttgtacagc

SEQ ID NO: 338286 - DNA, 171 bp, Zea mays
gctgacgggcaaccgctcctcactggggcggcagcgatggtgcatgttaacatctaccactcctattgtaacaccctctatatgccgtggcgtgcgcccgataaggagcgcctagattactatatgtaccgcgtgtatgagtacttcctgaagtgcaagcgcaagtccttc

SEQ ID NO: 338287 - DNA, 173 bp, Zea mays
ccttatctctatttccgatctcaaacttcatcaaatgctctatgccacttcttttataggaggaccatctattcttgctacagctgtagctctctatgcactttatgctacaatctatcctgtcacttatgacaaggatataggtgattataccctattctacccacgtctta

SEQ ID NO: 338288 - DNA, 256 bp, Zea mays
  unsure (1)..(256): unsure at all n locations
gtgacttctgtatcctctcgatcgattgcttcctccaccgaggcggggggaagcgccccccagatcgccgccggcaagcggcgatcactgcaactgcgagcataagggacgctcgtgaagtgaccaatccgatctggcactggctgcacagggcaccattgaatggctaatccggacaacggnggggttgcctactgttgcggttctctgatggttccttcactacaagctgtattaccacaattggtatcgactt

SEQ ID NO: 338289 - DNA, 87 bp, Zea mays
caatccacccacgcgtccttcctaacacacaatatactagtgggcctcgggggaaatatatagacccccacttcccctcactcgctt

SEQ ID NO: 338290 - DNA, 375 bp, Zea mays
gcatcctccatactctacccacctttaccattttgcccaccgctcaaacaatcaccgagcacggcgccctcctgacaagggagtcgccagcaatggcgacggcgctgaacacttactgtatgagccctagcataggtgctgcggcgcacctaatgccagcacagtcaaccagattcaccttccaggcctcttaccctcgtcctaccaactcaagcagcaacgacatgatccacccgcagagacattactatgagctgcacacaatactcaccactgactaccacatgcacgatatacctctctcccacccctaccttgtggctagcatgcacgtgatcaccatcctcttccgtgacctgcaccacctgtacacta

SEQ ID NO: 338291 - DNA, 256 bp, Zea mays
cccaagcgccccccccccccccctgggccacgcatggggaacgcgcggcgccccgccgctgactcggcggcggcgtcggaccgggaggtcggatttgcgaagctacatggcgagtgcttcgagtactacatgcagacctactccatcgttcttggtcgccatagccgccgtcgcagcaagggccccgtcgccgccccgccggaggccgacgacggcgtcgacgtggacctcggcgccctcggagcaagcatgaacg

SEQ ID NO: 338292 - DNA, 187 bp, Zea mays
ccgcgctgccctcgtcccgatctgcgacccaaatacccgatccaccatggccggaataaggcttacgcccgaggaaccctagatgcccgttggcacgccaccccgtccccagttcgcacccttcgttgcctgcgcaggcggtggatggttgttggtagccatagccgtccacgaacgaagggccctg

SEQ ID NO: 338293 - DNA, 251 bp, Zea mays
  unsure (1)..(251): unsure at all n locations
gaaagttccagcgagcgactgtgtctagcaggatagagcgcgctggggaatatgcggacacttttctgcctcgtggacggcgtggccgtcgcggccatactcctgacagcgtcatgccataagtgcggctacagtacctatcttcatatctgcgtctagtacaagcatgagtcatgtacgctgcaagctcacanatgtgactaaattaaggtccactatcgtgggacactgactgatggatcagatttata

SEQ ID NO: 338294 - DNA, 402 bp, Zea mays
atcttatccatcacctatggtgaagagcctagatcacataaccatccgagggctctttctactttttatgtttcttgtggcatcctttgttggtcatgcacagataataagaggtgaaaccaaggagaataaggacactaacagcatgacgatgacaacaacaagactaggaagctatgtaattagcatggatgaaaaatctagcttgtgctttctggatccaagaactctatggtacatctgcaaaataacatatcgcctttttaggacattgaaggattgcttggagttttgccacaatatatgatgcaccatgttggaaaaaaagactaataagaggccatgctttctcaagattgtagatggagatggtgaagatgttatacccaatcatccatgcat

SEQ ID NO: 338295 - DNA, 403 bp, Zea mays
cgcaagcttcgaaccttcgacccacgcggcgcggctccagcaccaacccccggcggcgatgcagatggcagcggcagtggccccaaccgacgccccggcctcggcggctgctccggcgccgcacccgccccacgcgcacgcggcgcacggaccgtcacacccgcaccaccacatgccgcaaccgcggtgggtggtcatcccgtaccctccaccacaccacccaaacatgtatgccgcggcctacggagcctacccgtactatggaaaccagcagctagtgagctgatgtggcgatgctctctgctcagtttcctccctcggatcggagggaggaaaccaagtttttggtcctgtaagatagtagctacaatgagatattataggcggccatacaaatgggcga

SEQ ID NO: 338296 - DNA, 76 bp, Zea mays
ggctcaaagatcgcaagcagtctcccgccggggcgggccgcttccagctctgcgtgccaattcgcattcctggatg

SEQ ID NO: 338297 - DNA, 76 bp, Zea mays
gagaatggatggtggccgccattgcgtaggaggaggcacatcattgtatttgctgtggactctgtgcaggatgcat

SEQ ID NO: 338298 - DNA, 271 bp, Zea mays
tcgcggacgcgtgggcagaagagcacatcggggcttcgaccactgcgtcgtgacgacaagggagaagatcacgacgcgagcgaacttgacgtggagcagcgtacgaaggagaagcgacactcgacacagcttcagacgtcaggcgcacatggctcgaccacgcaacagttagtgatgatgacgaacttggacgatggcaacggcttttcagcgtcgcgaacagagggtgcacatgaacagcgagctcggcgagactttcggcgtcgcgaac

SEQ ID NO: 338299 - DNA, 51 bp, Zea mays
gggtctttgtgaggaaaatcaatgatgttagcggggctggagcttaggggc

SEQ ID NO: 338300 - DNA, 64 bp, Zea mays
gtcgagcgcggacttccatcttggctcgtttggggggttcggaagcggcgctgggggtctcttt

SEQ ID NO: 338301 - DNA, 178 bp, Zea mays
tcaacccacacgttcgtttaaacttgctgaccttatacttggggcgaatgtaaaaagttacaccacccgtattcatgccttatacataaaatctacgtgtaggacattaacctaatgttctgtaagatcattatctattcttgtggtgcttactgaaagagatgtgtcgagaacaaaa

SEQ ID NO: 338302 - DNA, 125 bp, Zea mays
atgcacgcgttcgtatgcattgattcttttaaaccacccacgcttccgcttttattattattttttgactgacgagggaggcccgtactctcgtatagtgttaaggtatacatacatatttatat

SEQ ID NO: 338303 - DNA, 330 bp, Zea mays
ttcttttctcatcaacctctgatgaccgcagcgaccctcgaggccatccgttcggtgcctacactgcacagcatcacctactgctggagctggtcggtcgctcatcaatggacaaagacgtgccctgtcaactcgcgctcgcgctcgcttgcatacgccgtacaccgcgctgatcctcctgtgccgcaggtcccacgccagcgtgcttataacgctcgacgacttcgactccatgggtgacgacatcgccaacgacacccaggctatgatggacacgtgtgccaacaggtgcaacttcaaacaagaagccgtactcgccgtgacggacag

SEQ ID NO: 338304 - DNA, 89 bp, Zea mays
tcgtgtcagcgggcgaactgggatgtgatgtccggtacctgcgggctggccagctttcactatggtggggtatattggatcgtgcagtg

SEQ ID NO: 338305 - DNA, 354 bp, Zea mays
ggcttctcctccccctcttaccaagtcctcttcgggttagggttacttagggttttgtggaggggcgatggcggcggctgatgtggagtaccgttgcttcgtcggcgggcttgcctgggccaccagcaacgagtcgctggagaatgccttcgcctcctacggcgagatcctcgactccaaggtcatcaccgaccgggagacggggaggtctcgcggcttcggcttcgttaccttctcctccgagaactccatgctcgacgctatcgagaacatgaacggcaaggagctcgacggccgtaacatcaccgttaaccaggcccagtcctcttgcggtggcggtggcggcggtggcta

SEQ ID NO: 338306 - DNA, 198 bp, Zea mays
caggcgaactactcactggggtcagctccggaatcaacagatggggagatgtagccggcgaccatttagctataatgagtgcgattacagctggacctaatcattgtcatagttgtagccgggtggaaagtgatatcggccgacaatgacacacaagatacgaacccgaagcataaacagtaaaagctaaggcggcta

SEQ ID NO: 338307 - DNA, 316 bp, Zea mays
atagttgaccagacgcgtccggcgaaacaaacaacatattcaaactcgtgcgaaaggaggcataaaactaacggattgcgtggatgtactcaaggacaaaacggggctactgcaattgctgtcagacatgaaaagggcctatagttggtgccaccagaagtcattcgtggaagcccgcacacttgttctgctgatatctggactgttcgctctacggcacttgaaataggtataaggaaagtctcatagacccatcaatatcaagaggggtctctactttatgatgtggcgacgacaaaatgacacccacctatac

SEQ ID NO: 338308 - DNA, 264 bp, Zea mays
cttcactagtacagggctggtcgagacgtgcaaacggatcatcaagcggcaataatcccatccagagccgggttccactgctgcagacaccaaaggcaactatctcaacatgaagggtgattactgctaatacctgagtatgagtaagactggacctgatagaaaaagctgtgcgcccatacaaacggcttgataaaaggtcagatcgcatcatagatatggaggagcttctttaacataaccttatgatgctgggacaatcac

SEQ ID NO: 338309 - DNA, 398 bp, Zea mays
cgcttcgctcctctctgtcccgaccgagcagcagcgaccgagccctggccgagccgccctcccccaacgcgcctgcaccgacgccggctccgtgtcgggcaagctcagctacgagatcttctcgctgctggagagcaagttcctcttcggcaacggctccatgtcgggcacgccagggcagccgggccccggcaaggacagggacaagggcagggtgcgggtgctggcaatcaacgggtgcgggccgggccccagcgacgcgctgctggcgtcggccgcgctggcgaggctggaggagaggccgtcgccgctgcgacgggtgttcggggacgccacgctcaaggacaccgtggcgccggtgctggtccccagctacgacctggccacggtggcgccct

SEQ ID NO: 338310 - DNA, 375 bp, Zea mays
gtgaagggaagggagcggaagagaggtgggtgaccgccgctcctccgtccagccttccagttccaggcgtggcgaactaggcaagcggcaagctcaccgctcctcgagtgaggcccaggttccgtcgccgccgtactcagcagcggataccggcgagtcaacaggtagtagagggggaatgaggagagcagtttctgttcgcccggtcacacgcgcggacggagcaatcccgctgctgcgtccgactcagtttgccgtcaccctgttgcacgtacggctagggtttggagatagatacgctccccagctcgtgtggaggcgcgccgagatgcggggaggaatagaggaagcgcggttttgataccttgttcctga

SEQ ID NO: 338311 - DNA, 190 bp, Zea mays
ataggaacctggaaccatataaggctatatagaaggctgaatctcacaccaactatcttgaccatatcgagcgacctttgtgacgagaatggagggacgtcctaatgctgtgaagtctagccttttgaattcgtagtggcacgaacagagagtacttgctgacccaggagcaaggcatattagagactaa

SEQ ID NO: 338312 - DNA, 418 bp, Zea mays
aagcttcaaagcatctctgctgggattttagcaagcggcaacgacgagcgacccaaaaaaagcaatcaatagtcaccatatctgctcctctcgctccacacccccctcctctgcgacttgaggcaggacaggaggcagagacgggcaatggggttcgtgctggtggtctctctgcccttcatcttcctctccatcctcctcggcttcggctgctacttcctcggcaagcacaggggccgggaggagatgcggaccggcgtcagcgcgcagatctacggcacgccgctgccgccgcccggcgtcgtcggagcctactcgccgccgcctgagccgttccacagcaataaacaatggtccgaggctgtgtgactgagaatcagacgtctcttcattcattctactagtactactacatata

SEQ ID NO: 338313 - DNA, 119 bp, Zea mays
ctccccctccccgatcatcgcaggccgatcaatcggcggttccgccggcattgggccgaagaatgaccacatcgactggaagagcggggttctggcctacttctctcatggggccttct

SEQ ID NO: 338314 - DNA, 266 bp, Zea mays
accacctcaacttcagctgctcctagcatcgtcgagcgcgagctatacaccgagctagccggcggagggcagcaaatgcgggcggccgcggggtcctggcactcgtcgtgctcaatctgacggtcgtcgcattggaggacgacccgaccattgtgcattcgaaccatacgatttggctatacggtgtccagctcggcagcgcgcgcttttgcttctgccttgagctggacgaccagcaatgcgggactgaatatgatcggtccatt

SEQ ID NO: 338315 - DNA, 236 bp, Zea mays
gtgaggaaactttacttacccactatggcgctgcctccgcgtatctctcggtttgtcttattgctgacatagctgtcgtattcaggttccagtggcgctgccgcctgaccgtcatccgcagcatgatagggaagcgctcccccaccggcgacgaggatgacgcccgacccaagaagatccaaagctgacgaactgagcaactgcgaccgtaaggcatccgtttgtcccataagctc

SEQ ID NO: 338316 - DNA, 105 bp, Zea mays
cagacgatccacgcgtccgatactttaacttactggagcagggaccgaggattttgcccgtttttatcatcctaagtccctttactggaaggagtccggctaatg

SEQ ID NO: 338317 - DNA, 183 bp, Zea mays
ctcgtattactattcccaatctagcaaacggtaccatccttttgcaaactaagagaggggctcgatggtactcaaggcggataagaatcggtctgctaataaactagcagtggaagatcgcgcagtcctggcagaaaaggcccttggtgggaagaagcaagaggcggtgaatctgctcccggc

SEQ ID NO: 338318 - DNA, 230 bp, Zea mays
ttcttttacggtggggtgggtttttgttggcttcggtgttagcatattcgttgttggttgccctgtaagatgaactgccgaggctagctcagctagtttgaaataatttatgtttcaaaactcagatgtattgcgccgacacaaaggattagttgggtatcttctggcaaaatagcaaccaacatgtcaaacatgactaggcatgcctacacattggttttcgacgttta

SEQ ID NO: 338319 - DNA, 264 bp, Zea mays
gtgcagcgactactcaaagctctaatcgggcggatgatcaaaagcctgcctccagatcactggacaaactttgttgaggggctaaggcagttgctgtggcctacctacccaccaaggcggggcttaaatagctcgacgagtactttctcactcgcaaatacatcactggctaacaaacttgcaaagatgactagtatgtctacacttggttttcatatgctaacttatgcaagtgtatcaacatcgcatggtggataaatcaca

SEQ ID NO: 338320 - DNA, 231 bp, Zea mays
agacgactacattattggtgaagtacggcgcctcctcggcctctagctcatactatgtccgtgcttcggagcgtgtgccatgcagggtccatgcggactgctgcctgaactgggcccgccggctgaaggccactggatactccagcggcaagcagaatgactgaaaaccgaagtagatcatgagctgacgcaataagcaccgtcaaccgcttgacagtcgctcctcttcta

SEQ ID NO: 338321 - DNA, 336 bp, Zea mays
acgatttattattcgaatccacaaaggacgactgagaaaagagaaggaaccaagaagatcatgaacatacagcatccgggttacagttttgacacaacgctgtcgaacaaggtttataagcctgaggcttgctgcgcatggaacacgagataaatggcacagatcgctataagggagacgatttgatgtctgggtattttatgtggtaaatcaaggctgtgctatcacaccccttcacaaatgtgagccagagctgtttttgccttgcacttttagtttgggacttcagaaggaaaccttgacatcgagcaacaccatgatcttggacaccaactg

SEQ ID NO: 338322 - DNA, 311 bp, Zea mays
attaatcattcgaatccacaaaggacgacggagaaaaggcaggagccaagaagaacaagaacaagcagcatccgcgttacagtttttacacatcgctagacaacaagggtcataagcccgaagcttgcatgcgcatggaacagggataaagtgcagcgatcgctataaggagccgatatgagactgctcatgtttatatggaaatgcaaagctatgctatcacgcccctccactaacatgaccagagctgtttctgccttgcgctttcagtttggactacataaggaaacctttacatcgatcaacgccat

SEQ ID NO: 338323 - DNA, 338 bp, Zea mays
gcggtgggttatggccacatggtctttgagctcagcgagctgcccacaccgggagtctaggtcaggaggaagctctatggctggagctacgacacccaaaacccgtctgggtctgatgactgcactatgatacttcgtcaggtacttgaatttctttatcggagtgatgagctgaacaccactatcaacgcatcgcactgtggctaagtctttacacacacatagagaagcttcaaacttaaataggcagattccagttattgcactcttgactcctactgttgtcaaatggaaatatcagtgcgctggacattcttttcatcgtacggagagaatta

SEQ ID NO: 338324 - DNA, 315 bp, Zea mays
gaactgaacaggccagatgctgaccaaggaggacatttagagcgccacgaacgataatgggctgccattctcacctgacagatctgatgctgtcaagacggcatacagcgactttcctgaaatcaaacatcgagatgtgccacaactactggcgcataatctgaatggaaagcatgagcccagggactatagagctgctcctgattaaccaaaggacgctactcaatgtagctttgacacttatgtgaagaatcatattggagcatagaaagaaggaggcaagactggacggcatgaagatcgaaagctaactac

SEQ ID NO: 338325 - DNA, 99 bp, Zea mays
atccacccgctcactagtgacagcggacaacctggtaatgcctgaccggcactctgaagcgtgccaacttgccctatggagagttgtattagagcttgg

SEQ ID NO: 338326 - DNA, 120 bp, Zea mays
cttacacatgcacttgcactagctgcggggagcatacagcgatgcgtagactgccaaggtgccagtcaaagtgtcgattgtgtacttggcagtgtcatgtgcactaacttatatagtatg

SEQ ID NO: 338327 - DNA, 399 bp, Zea mays
gtacagtccacccacgcgtccggcgcatcctcacgtcgctcggcgggatcggctcgaccctcaacctgtacatcttccggtgctttgttaagagtacgttcaccgtcactggccagaagcacgacgtggctttcaaggcatccttcttcaacctgatcccgtttgcatacacgctggcgaaagcacagaagctggcgacgttcaagaactttagttgacgtgcgggccacagaggacatggaggcgaacgtattagagaagcactcagatgtgatgcgctatcttgatgccatcgagcacatcggcgagaacctacgaaacactgacaaaattcatacgaccaatcactgcatctgcacaaaagctgacggggatcacattctggccaagtgcacatgg

SEQ ID NO: 338328 - DNA, 218 bp, Zea mays
cacatcgccatggcagccaagatgtttgcattgattgcgctcctagctctttgtgcaaccgccactagtgctacccatatgccagggcacttgtcaccactactgatgccattggctaccatgaacccatggatgcagtactgcatgaagcaacagggggttgacaacttgctagcgtggccgacccctgatgctgcagcaactgttggccttaccgc

SEQ ID NO: 338329 - DNA, 130 bp, Zea mays
cggccgcctgggaactaataacaggtgcggttcgacttctcgagctctccgtctagcgaatccccttccaacttgccataatcttggcaagacccgtgtcctgtgagcaaccatcatgctgtcaacctac

SEQ ID NO: 338330 - DNA, 161 bp, Zea mays
gcgtatgccagcgttccgcttgtgttcacaggaacacgaatgacgtagggagcgcctagctaagtctgcaactatactgaagggaggctggctaacagcgccccctgtattatgcgagatgaaaggtgaaaaaggtcgtcgatggcacaactgctgacgcg

SEQ ID NO: 338331 - DNA, 252 bp, Zea mays
ctgcatgcatgcgttccgcttgtgttaacacatacaccagtaacatgtggcgcacctatataaggctgcaactatactgctaggagtctggcaaggagccgctaccgatctaggggagaccaaagatgaagaagcgtctggcactcaactctgcttacggggccacacgaggagtccatctgggccgccgagctgctgccctgcgactgccacacctctgctgcggagctgctcactggcgcgaccgacgag

SEQ ID NO: 338332 - DNA, 393 bp, Zea mays
ctccgttgaaaaagttgaattgttgattgacttgattggttatatagtttctgagagttgggaaccgcagggtaggggcatcggaaggagcatcatagacgatgctatcagagagttaccactactgcggaagctggctttggatctttgcgatgcctgtgaagacggttacgatagcccaaacgatgcggaagggaagatgattagaagtgtaaggatgagccgatgcaagaagatggcggtgtcgtgtttggaggtccccagacaagggtcttcaacttcaaagccggtgcacaaggacactgtagtgctggaatggagcaacacaatgttcacaaccaccatagtgaagaaagagtgtgatgagcctcttctgtagttttgtccctaatg

SEQ ID NO: 338333 - DNA, 257 bp, Zea mays
ccttactaccgacaggttcccatttcgctaggctagcggctcgtggatcgcccgtcctcacctcctccagcggcgacagcttacgtagccgccttcttaagaatgttatagacgccgaccgaaggacccggccgccagacgcagcatccgttggtgaaggcgaagtacgcaggctccgcttctaaggacgacctagctagcccgctatgaaccacaggaaggccatcttacgggcgaagctacgtgagacgaatgag

SEQ ID NO: 338334 - DNA, 278 bp, Zea mays
acggtgaatgggatagaggtgagagtctgctggatctaacggtccgggggaggaggcaacgttagatcttcaaatcttggcggaagatgcacaaagaaagtggtctagacggctgcgagtgccaggacgacgatgatcaagttggatttgatgtggaaattggtcaccagcaactagagacccaccgagtggtcctgtctattaacaactatctatgaatggaagcaccagctagaaaccaagctgttctaataacacctaccctattgattgcgagt

SEQ ID NO: 338335 - DNA, 100 bp, Zea mays
tcgaccaactcattagtgacagtggacgccctagaaatttctgagcggctcctgaaggcactccagatatccctatacctagtcaaattagagtttggca

SEQ ID NO: 338336 - DNA, 366 bp, Zea mays
cagagcgcagaagaacccgatcgacaccatgagggtgttgctcgttgccctcgctctcctggctctcgctgcgagcgccacctccacgcatacaagcggcggctgcggctgccagccaccgccgccggttcatctaccgccgccggtgcatctgccacctccggttcacctgccacctccggtgcatctcccaccgccggtccacctgccgccgccggtccacctgccaccgccggtccatgtgccgccgccggttcatctgccgccgccaccatgccactaccctactcaaccgccccggcctcagcctcatccccagccacacccatgcccgtgccaacagccgcatccaagcccgtgccagct

SEQ ID NO: 338337 - DNA, 392 bp, Zea mays
  unsure (1)..(392): unsure at all n locations
gggaggacctgactcgatctgggcaaaacaccattaccgacgtgttggcggaagaggggtgtagtggccgccgccgtctggtgcttgcacgggcttgcggttcgtgttgcggttcgggaacttcgcgagcgcgcctgggaagcatatccagcctcgatttggcaagggacgtcatggtctggcgggaattcttcactggagttgggtggcggcgcggagttctctccctccgtggaccagttcgagcaccctcacaactaccgaagagccagtggccgaggatccgggtgttcatcaggtagaagttgctgagcaggagctcattgaagacgagcaagctacagaggattatggngttcagctggtagagactgctgtgcangagctcgttg

SEQ ID NO: 338338 - DNA, 361 bp, Zea mays
agaggcgcagagacaggcgtcttcgtactcgcctatctccgcgactcaaagcttcttccatttcctaccgccgccgctgcagctccaccccattccgtcgacaccatgagggagtgcatctcgatccacatcggccaagccggtatccaggtcggaaacgcgtgctgggagctttactgcctcgagcatggcattcaggctgatggtcagatgcccggtgacaagaccattgggggtggtgatgatgctttcaacaccttcttcagtgagactggtgctgggaagcacgtccctcgtgctgtttttgttgaccttgaaccaactgtcatcgatgaggtgaggactggcacctaccgccagc

SEQ ID NO: 338339 - DNA, 335 bp, Zea mays
cgcggctcaaacctttcccccttctcccggttcccgccgccgctccatcccgtaacgcgacaccatgagggagtgcatttcgatccacatcggccaggccggtatccaggtcggaaacgcgtgctgggagctgtactgccttgagcatggcattcaggctgacggtcagatgcccggtgacaagaccattgggggaggtgatgatgctttcaacaccttcttcagtgagactggtgctgggaaacacgcgccccgtgctgtttttgtgaccttgaacccactgtcatcgatgaggtgagaactggcacctaccgccagctttttcaccctgagca

SEQ ID NO: 338340 - DNA, 387 bp, Zea mays
ggagaccactcgcgactgctgtgctgagctggcgcaaggttgggccctaggtgctgcacgcgtgaacctggacctctggtcaagcttaaatagaagtgctacatcaacgttgctgttatgggtcatgtctactctcgcggggctatgaccattggcaagttgagctacatgcaatctggcattgacacgcgcgcgagtgtcagtatcaacagggaagcctctgtaatcatcacaaagttctctgatcaccactaagtgcttagacaagctcaacgatgatctctatacagggatcaccgttcatattggattgtcgaagtgatagactaccgagcactaatggactgctattgactcaacagaacatctggattacgaccataacat

SEQ ID NO: 338341 - DNA, 414 bp, Zea mays
gttggcttctcctccccctccggttcgggttcgggttcgtgaggttctccggggttcggtttcgtgggtgagcggatcgagatggcggcgtcggatgttgagtaccgctgcttcgtcggcggcctcgcctgggccacggacgaccactccctccacaacgccttcagcacctacggcgaggtcctcgagtccaagatcatcctcgatcgggagacgcagaggtcccgcggcttcggcttcgtcaccttctccacggaggaggcgatgcggaacgccatcgagggcatgaacggcaaggagctggacggccgcaacatcaccgtcaacgaggcccagtcccgcggcggccgtggaggcggcggcggcggcgggtaccgtggtggccgtggaggcggcggctaccgcggtggcggg

SEQ ID NO: 338342 - DNA, 267 bp, Zea mays
aacaaatcacatttatctgatccttaggggcaagcaaggccatcttgaatttctatcgaaatatcatgcgtcaccactgagtggcccatgtcctgtttgtttgctcacggcttgaagactcatcggctggtccttctaaatcagttcagggtttatttgagagcgacggtattggacgggattgagacggctacaatcccctactataccaatttaaataacagcgatggaggaccatttaacccccttgcattgcaacaagcccta

SEQ ID NO: 338343 - DNA, 236 bp, Zea mays
aaaaaaaaaaaaaaaaaaaaaaaaaaagggggggaaaaaaaaaagggggaggggaggaaaaaaaaaaaaaaaataaaaagaaagaaaaaataaagggaacaagagttagggtgttggtggtgatgaatttatgggtgttgcattttttggtttagggggggtgtttttcgggtttttttttgggtgtttttggggggcatctttttttttttttggggtgggttttaaagtttggg

SEQ ID NO: 338344 - DNA, 262 bp, Zea mays
gtgagagcacgcttgccacgcccgagcatggggaccgcccaccgggtggccgctaccttactgtggtctttaccaagtcaccatgacgcgtccctcatcctgcggagccctagtgacaaaacctgccctacccatgtgacttatggccggtatcacaggtggtccacagctagcattccggataacagtccaccgcttgagctattgcaggcaccaatttaccacgatgaatacactggtaacgtctgcagagaaaaagatc

SEQ ID NO: 338345 - DNA, 368 bp, Zea mays
gacgacccggcgactgctgcgccgggggatcctcataccatacgccgcggcggcctcaataacagcgacagctctccatggcgacactaccggcaaccggccgaggggagagacgattggctagagcgggcggcctatctgcgtgcgacagcggcaccccggtgtggtcgcgtgcgccagtcggcgccgtgcccaggcgtcaagctctgcccactccggattccgttatgcactgactctagcgctgttctgactgactgtcctagactctgacttccacctggtgagcgatcttgactcctccgattcttgacctggcactgtttcgattgaatccgacgccgacgatgtagatgagaacaccccag

SEQ ID NO: 338346 - DNA, 142 bp, Zea mays
gcgcttgacggagctggcgaaccttgggggggtcttctgtgaccgggggaaggagttcaatgacagggcggatcatcgcggtgttcaagaagatgtacagcctaatcgatgaggacaagcagaagggccgaatatttgggat

SEQ ID NO: 338347 - DNA, 385 bp, Zea mays
cgaaagccagccagcaagcaaccccctgccccgtcggtggccacggccacgggcagccgcgcaccggccaaggcacagctagctagcgaagcaggccagccagccatccagactccggcaagggatggtggtggcgaggaagccgcacgccgccgccgccgccgccggcggcggcggcgtcagggtggcgcccgcgaggctggagggcctccccgcggcgtggccgggcgccgccgccgccgtcaaggtcaagtggccggcgcccgggggcgcgctctcgcagatgctcactgggcggtgggcgcgcggggtcaccgccgtggaggccgtcggggccggcgggaccgtccgatgggagccgcgcgacgccaaccggttcaggctc

SEQ ID NO: 338348 - DNA, 270 bp, Zea mays
taaacttttaacggtcattctatttcaaaaggtttgcattttgcactaaaaaaaaaaaaaaaaaaaaaaaaaaaaaaaaaaaaaaaaaaaaaaaaaaaaaaaaaaaaaaaaaaaaaaaaaagaaaaaaaaaaaaaaaaaaaaaaaaaaaaaaaaaaaaaaagaaaaaaaagaagaaaagggggggggggttaaaaggggagaaaggggggggaaaatggggagctcaaaagataaagtagtaaagtgggaacaaaaaactgggaggtaga

SEQ ID NO: 338349 - DNA, 259 bp, Zea mays
cgtgaaaccccgaggtgaaggaacaggggggcgagtgctagcagcagcggcgactccttcgccataccgttcgtcgtgctcgctcactcggatcgaaccctccctagggtttcgcatcggcctcccgccaactcctatcccttccccctcccttcgccacgcgcgcgcggggagctaccaaaccctacgacggcaaattcggtgcgatcgcccacggtggatgccttgtctgccgacgagaggagccgttcggggcttg

SEQ ID NO: 338350 - DNA, 406 bp, Zea mays
ggaaacgcgtgctgggagctgtactgcctcgagcatggcattcaggctgatggtcagatgcccggtgacaagaccattgggggaggtgatgatgctttcaacaccttcttcagtgagactggcgctgggaagcacgtcccccgtgctgtttttgttgaccttgagcccactgtcatcgatgaggtgaggactggcacctatcgccagctcttccatcctgagcagctcatcagtggcaaggaggatgcagccaacaacttcgctcgtggtcactacaccattggcaaggagattgttgacctgtgccttgaccgcatcaggaagcttgcagataattgcactggtctccagggcttcctcgtcttcaacgctgttggtggaggaacgggctctgggcttggttctc

SEQ ID NO: 338351 - DNA, 152 bp, Zea mays
cttgtaagggactaggcgtcactccagcaggataactcagtttccccgaaatttggatgacgcctagttatctactctggaacgtgtccttgtaaatgcgtcaatggtcaatctgagtttttttttcaaaaaaaaaaaaaaagggcggccgc

SEQ ID NO: 338352 - DNA, 143 bp, Zea mays
gatggctgataaggttcgagcagtcatagaggggcctcttacactggctgactttgacatggttgacatacatgagcggagtggtgctcacaacgagtgacgacacgtgccttgaagattgcatcagagaggatgctcatatg

SEQ ID NO: 338353 - DNA, 211 bp, Zea mays
ggacccaaggcgccgtcatcggcgacatgagctaccgacttgtcgtcggcctatcgctgatcgcatcagagaccggcgtgcccgatgtcataacacacggtcccggactaccctaccgcgggctcctcaggcgcgggagacgccggggacgcactcttatgctacagctggaggctgtcggacgagacgagtcaacaccggcccctggagc

SEQ ID NO: 338354 - DNA, 173 bp, Zea mays
gtcaagatccagtacggacacgccaagaaggacctgctggacaacgagcgcagcgatcgtgagaatctctacgtgcagctggtgaacaacatcctcagcgccttgactgacaccgacgacctggtcacccttgggtacccggacatgatggagctggccaaatacgtggtgtg

SEQ ID NO: 338355 - DNA, 117 bp, Zea mays
gtcgtttttgggcaccgaacacgttcttgggaccggcggcggcggcctaatttcaagtccaactggttaaggcttcattgggcttgaaccctttggcggcgacaagcacttacaaca

SEQ ID NO: 338356 - DNA, 345 bp, Zea mays
cacttccacagtcagtgccttttgttggcagatgccaagatctgggttctgcactaccagcatgaaaagctgctcaaattgttgaccccctccccctatttggtttctcctgcatcaatgcatcatacatactctctggctctggattttttttcgagtaatagcatttttacatgttcgagcaaattatctgttattaagagaacttcagcagggcaatatgtaaagcagtcatatactgttaactatattttgaaattcctttccattgcctctcaagcaattttcctctgtatgtccaggtatttatgttgggggaagcaaagtggtccattttacacgtaa

SEQ ID NO: 338357 - DNA, 304 bp, Zea mays
  unsure (1)..(304): unsure at all n locations
tagtcgacccacacgttcggaacaaacgagtgttgatatgtccgaccggggtagaaacgagcgcaaagcaccgggttttcttttgcatttttcttggaatgcctgagcaaaggcagagctggcctggccagtggccaccattttattgttgaggcgtggtgctgtgtaacaccacggttagtttggttgacacgcaagttgggcataactttgattgaataatactagtctcatcataaacatattttctagcgnaaaaaaaaaaaaaaaaaaaaaataaataaaaaacgacatacgaacaaag

SEQ ID NO: 338358 - DNA, 241 bp, Zea mays
gcggcacaaacgagtgttgatatgtcacgaccgggtaaaaaaccagcgcacagcaccgggttttttgcagcattcttggaaggaatggctgaacaaaggcatagcttgcctggccagcggccactattttattggggaggcgggtggctgacgaaacaccacagtttggttgggtcgacacgcaagtagagcataacttggattgaattatactaatcataaacatatactgttggctagc

SEQ ID NO: 338359 - DNA, 171 bp, Zea mays
acaaatgctaccaataggaatacaaggggggttactgctccctggccttctgtcctccccaaaatcacttgccggacaaccgagatccacccatagcaaccaaattttccacctgctgcatttacagccctgtcctgacaccagctcgagtaacctactggccatggctgg

SEQ ID NO: 338360 - DNA, 372 bp, Zea mays
  unsure (1)..(372): unsure at all n locations
ctgggtcttcagaccattagctttatctactccagagcgcagaagaacccgatcgacaccatgagggtgttgctcgttgccctcgctctcctggctctcgctgcgagcgccacctccacgcatacaagcggcggctgcggctgccagccaccgccgccggttcatctaccgccgccggtgcatctgccaccttcggttcacctgccaccttcggtgcatcttccaccgccggtccacctgccgccgccggtccacctgccaccgncggtccatgtgccgccgccggttcatctgccgccgcaccatgccactaccctactaaccgcccggcttagctatcccagcacacccatgccgtgcacagcgatcaac

SEQ ID NO: 338361 - DNA, 287 bp, Zea mays
gagtaaaccaccttaacttccaccggggtgccactcactattagataccatggctaacgaatcgaataaccactagaacaggctcaatcagcataatcatttgattctccaaaagcttctcttatctttgactaacaagccatcttatggacctgacaatatcagcgagttgcttactctaatactaatgatcgcgaacacgctcaaatatactctgaactaccttaagaccatttctatcctaaagctcactcatgtacttattgacctcaaatttatgacttaca

SEQ ID NO: 338362 - DNA, 171 bp, Zea mays
ttaaagtcaaccaccccttccgaataaccatggttgctcccaatcgcggcgagcttctaaattttgtcggcgtgcgcaaaaaaaacctttcttttttcccaaccccaactcttcttttttcccgttacccctccagatttgggccgcaaatttcccccccgcccccccttt

SEQ ID NO: 338363 - DNA, 380 bp, Zea mays
cggagaggttccggattttcggggtggggtttgggagatgcctcccgtgaagaagtacaagaaggggaagcgtaaatacaacgatggcaagctcaatattgtcagggtacgacgcgcgcctgactcgctggcaacggagctccgtgccctagacactgagtgatgacacgctttactgaacatgctaaaagagctagatcatgctgtgccttcatatgagggcgaagcattgaggctcttcttcatgacttcatcgaagacttttgactacatctgctccattggtatgcgaagatatgatctcaatggcacctgctggactgatcaacattgaggggcggcttctcaatgtggataatcatgtggcaattgtcatgatg

SEQ ID NO: 338364 - DNA, 422 bp, Zea mays
tccacccacgcgtccgtttaatggttgtactgggacgaaggtgttggaaaaaatattgctgaatctcgtgctaattataactctgccgaataatatgatattgacttctctccatacagcaggataaggcaatccaatgtataaccaaacaaggaccttggcttctggttgaacaaacgaggtgaaacgtgggaaagggttacttaaattcgtgacaaattttaatattacagataaaggataatgagagaacgagcatttgctctcatgaacacagataacaattttgctctgcgtcaccgaaaatctataatccattatgattcaagttttgcttatactgaacttcaatgatgattttgacttgcatgatcaaacttttgtaaaccgttctgatcaaagttattaatattatttaaatt

SEQ ID NO: 338365 - DNA, 395 bp, Zea mays
  unsure (1)..(395): unsure at all n locations
gngtcttcagaccattagctttatctactccagagcgcagaagaacccgatcgacaccatgagggtgttgctcgttgccctcgctctcctggctctcgctgcgagcgccacctccacgcatacaagcggcggctgcggctgccagccaccgccgccggttcatctaccgccgccggtgcatctgccacctccggttcacctgccacctccggtgcatctcccaccgccggtccacctgccgccgccggtccacctgccaccgccggtccatgtgccgccgccggttcatctgccgccgccaccatgccactaccctactcaaccgccccggcctcagcctcatccccagccacacccatgcccgtgccaacagccgcatccaaacccgtgccagc

SEQ ID NO: 338366 - DNA, 169 bp, Zea mays
cattccacattctcactatttacttttataccacccaataattactgaccgtttacatataaaaataccagcggtacttataaattaattatatcaccatcttttttaaatcttactcataacttatttcctatataatatatatatcctttcacaattccacacaaca

SEQ ID NO: 338367 - DNA, 216 bp, Zea mays
tcggtgttttgatacccttagctttatctgcgggatacctaagaagatcccgatcgacactataatgacattgctcgttgctctgagtcttctggctctcagcctttagcgcacacttacatgcatacaagcatgataatgcttatggcactcacagccgaatgatcatttacgaccctctgtgcatctgtacatcttgatgtcacctgccatcta

SEQ ID NO: 338368 - DNA, 363 bp, Zea mays
ttcgtttctgcctgctcgtttctgcggcgggggcggcgacggcggcctaccacctgagcggggcggggagaggggacggagatggatatcgcgcgggcggctgctggcgtggcctgctgcaaggagcaccagaggatctacgccgagtggttcgccctcgccgacccagatggcgactgccgtgtcacgggcgccaatgccaccagcttcttcgccatgtccacactgtcacgcgccgatctcaaacacgtgtgggcgaacgtggattacaggatgcaggggtacctcggattaggcgagttcgtcacagcaatgcagcttgtgtctctggtccagcagggaacgagaacccacatgacagtc

SEQ ID NO: 338369 - DNA, 409 bp, Zea mays
gcaaccaccgcctccccgatctcgtcgagaggaagcccaatcccgaaaccgtcgccgtattccaatggcgcccaaggccgagaagaagcccgccgccaagaagcctgcggaggaggagccggcggcggagaaggccacggcggggaagaagcccaaggccgagaagcggctccccgcgggcaagtccgcaggcaaggagggtggcgagaagaaggggaagaagaaggcaaagaagtcggtggagacgtacaagatctacatctttaaggtgctgaagcaggtgcacccggacattggcatctcgtccaaggccatgtccatcatgaactccttcatcaacgacatcttcgagaagctggcggcggaggcggccaagctggcgcggtacaacaagaagcctaccattacg

SEQ ID NO: 338370 - DNA, 51 bp, Zea mays
cgggacctgaggcgtaccagctgtcctatagtgagtcgattagagcttgca

SEQ ID NO: 338371 - DNA, 369 bp, Zea mays
ctctcgctgttaccaaaataatgagagggtggcaccgagtgcgagacaccgggaactgaagcatgtagcacgaggaagcgatcccccatgaccgggcgaccaggcgtaggaaaacattgcgctgtatccacttcacaaaaacacgataatgatcatactctgaaaactcccaaccctcggacgttctcataagcaattacgcatgaacacctcagacatatgcgtgatgaattttcactcactaatgcagactctcgtggaccacttgagatttaagacgcacttagagaccgtgcacaatttcacctaccgcttgcacaaaccatactgccatcgtgatcgcatctatccatcgcatactgacatgac

SEQ ID NO: 338372 - DNA, 166 bp, Zea mays
ctttttctgttaatattaaaattagggtgtggaatcttttccaaaaccacttgcattttataattgatcacactcttgcaatgaaccatatgattttattctgctacaagataacttcacctactatccaaattctcaaaatcactttaaaaatcataccctatat

SEQ ID NO: 338373 - DNA, 142 bp, Zea mays
atcttcattcactcactctcttccatcacgctactgtagataccatggccaagtcgaccgctatgttagtagccgatctggacctgttggtggtgatggtgactactagcacaggcggtggctgggcagcagcggcgtgcga

SEQ ID NO: 338374 - DNA, 370 bp, Zea mays
gctggagaacggtattctgccttgacggggttctttgttccttattcacatgtttcacttgtgatctattaggtgaggaaggaactaggaattgaggagaatgctaaggtgctcgtttttaattttgggggtcaggtgggtcacttgtcatataggtggtttggtaagcttatggaatatgtttctattttctcatgtggtaatgttatgtggctacttgtcaaaatgaactcaatacagacaatacacaaaagttgcttttcgccagcttcccagataaactgcttttccaacaggcaacagctaccaaatagggcctatcgtttcttctgaaccgatatctgctgattctgattctttcagtaatcac

SEQ ID NO: 338375 - DNA, 432 bp, Zea mays
atttgagcttcaaatcaacgaccaacgttgtgaggatgcagaggaggaacaggagagccatgaaaataatggacattagaaacagagacatgttcctcgagagcatcatgtgatttattttgttgtaaatcactaccgatgcagctcggtttgcctactgtttcatctacactttctcttcctttttccttgatgttataggattaacatcactgggtgactttctggaattgcatcgatggttccttttggtgagaaaaggtcttgctgctggtcaagaatgtaacttgtagagcatgatgttgaatcgtgtgaaattagttcagtacttttgatctaacaaataagaagtcgaaatggggaaaggagatataataatcttttcctttgaatattatgggaaccggtatgttaaaaaaaaataaataaaaa

SEQ ID NO: 338376 - DNA, 130 bp, Zea mays
tcttaacggcaaaggccattaataagcaaccatgacgcattcacaacagcaactcaacaacctaagctagagggagtgagtgggagagagagagagagacacacgaggcccgaaagagatggaggtgtgg
